United States Patent Application Publication US 2015/0240253 A1 - sequence listing, part 14

SEQ ID NO: 63962 - DNA, 733 bp, Zea Mays
ctgaaggatattatgtgtttcgaccatcggtatggggccagagcgctgtttgtggccaccagaacctgtcaatcaattagcttatgttgccttttgttcccttgcgccttgtgtcctccgaatatgacgttaacttcctgatcgatgcgcgggaaagctccgcctctacctctgccggtgtttagtaccgacaatgcaccatggggtgtaccatgagatgcttttgtgagtcgacaacatcaactgtagctcgatggttcgcttcaatatgcgacgaaacacacgatttatacaggttcgggccgtgagatgcgtaataccctacatcatgtttgcggtgggttgtattgctttgatatatggaggtttacaatgagggctagggtttggatgtttgatgagagagcggggggcatgtataaaatcagatgccttagagggatccctcacctgccttatatagttcggcgtggcttgggttacaagttggtttccttctaaatctcctagatagtttagattacaatagagtccttgtcttgtgcgccaagtttgtttagtcagtcggcctcggacccaagtcagtcggttggcctcgggcccatgtagataatacgcctcatttggacccatgggatacccatcccccacaatcccccgagcttcaatttgacttgagaaacaatcaacttgaagatccaaattctgctttctgaagatttttccttgtagt

SEQ ID NO: 63963 - DNA, 688 bp, Zea Mays
cttctccacggaaccacaccacggcgtggccgagtctccctatggcgtaattcgtggtatgtcggctcggatcatatccgtctctgtcccctgtatccatagctatagttagtagtgcagttggatcaccatagggttggtcgagcgttgctccggtggcctcgccgtcgtgcggtgcttgctgtttgccgtgacccagcgcggaggtaggagacgcgccctgggccgttggatcgggcgtgttcggacaggattagaagtagccgtaccctttcgcttggacgagtatcgatcgtcgatttgatatcgtgcgggtgagatgagataggactataattaaatcggggcctttggtctccgatcctgtggatctgggcaagttttaatctgggccgttgatggatcatcctgtggccctcactgcataccggttcgggttgatcggatttaatctgggacgtccgtttctaatctgacggcccatatcaatacataccccttcgccctagcactttagcataagaaaccctaggctttatagaaatagaacccgccatccttcgcggctattcactgtgtcttgggactttttgcactgtgggccctgtctttattagaaattgaggcacggcccagactgattataaaacagagaaaatcatttagaaattgatttttaatacaaaac

SEQ ID NO: 63964 - DNA, 693 bp, Zea Mays
ggaactcaggggcctcggggtaaaaatctgtagacacagagcactattcgtagtactgcgggttaatttccacagaggttagggtctcttttacaaaacctacggtcgaaggggtatgggccacgatgggccgttggattagaatcctacggatcagatcagacctacctgagattgaatcggagcgaggcgagaaccgcacgatccatgatctatggccagatcgcgcactagtaatcgttacgcgactaactaaatcataaccgcccattgaaccacccacgacccagatttaacccagccgaaggtgtatcctatttctaatcgtatccgcccacgcgatgatcaacgggcacgaccacatctccttcctccgaccaaccgagacggtggcgccgccctgaaccacggtggtccattgccggaccacacccaaaactctactctggccgccgtgaattgatccgaggagcgtaaactactgcatatgggtagtgagatcggtggagggcatcataccggagtaattcgcgacggtcgagcgggtccacggcaggggatttctcgaagtagatttgaaatccgacgagcaatcaccggcataccagtcaccaaccgtgaccagaaagaagtggcgcacggttcacgtgatcccgtatggcaccacggttgagctccggacctggagcaccc

SEQ ID NO: 63965 - DNA, 635 bp, Zea Mays
ggccgagtgacttctgctactatgaatggtccttcccataagggcgatagcttgtgccatccctcccccgttagaattcggtggaggacgagatctcttactgagaaggatcgttgtcgcacggccttgtcgtgatagcgtctcagagtctgctggtaccgtgccgattgaattactgcgttcagccgctcttcttcgagtacatcgacatcttccagcctggttgcttcggcctctactatgctttcaaagatcaaccttggcgccccaaacttgagatcagcaggcaatactgcctctgacccatagaccatgaagaaaggagtgtttccatgcagagctcggctaggttgggttcttaggctccaaacgacgtagggcaattcccttatccattttcctgtgaacttttcatttttatcgaagaccttttttctgagtgcctccaatatcatcctgttagctcgttcaacctgcccgttggctctcgggtgtgctaccgaagcatacttgacctgaatgcttttttgctcgcagaaatcgaagaactctgaacttgtgaagttggaccccaagtcggttatgatactgtttggtattccaaatctgaatattatgtcttgtatgaattccac

SEQ ID NO: 63966 - DNA, 479 bp, Zea Mays
ctcgtcaggaattacttagggtcctacaaaccatcatacattagaagttggggtggtctatacaaggttggccatggtgtagcttgcaaatccactgctagaggggaagtgctgtcatagacgaaggcgtcatggttttggcctgctcatcttttcatgccatacaacatagctctttagatgcttcgtcgatttgtcattgcagctaggaaactcaaagcatattctcccttcttgcctcaactagttgttgaatgctatcagacccggtttttgaagacaaaccaaatgtgcaccaagtaatccagatcgcgtacacaaccattgcacaaatgacataacattgttcaatgctcgaatcataagatatagcttaacattaatagataacagtctaatacataaacattatgcaataacacttacgtattaatggaagtatagggaaacaagggagaacatggccctccacagacatc

SEQ ID NO: 63967 - DNA, 298 bp, Zea Mays
gatggcaaggcatgtgctacaactactatgagttactcaaccatggtcatcgctatcagcacatcttctaccttgaggtgatcaacaaagatgacgacgatgacactacacaatcgtgcatggaggttcctaagaataatcccttcgccatctccctgcatgccatagcaacactatgcacaacgaacaccatgcatgtctgaaagttccctttgacccgggaacaggatctggatgtcgcctagaggggggtgaataggcgaataaaacttattactttaaaacttaaattcttact

SEQ ID NO: 63968 - DNA, 469 bp, Zea Mays
gagcatattcatcagagtaaaaatttatccgtggtgatcccgaaggtgttgtccaatggattggcgaagaggtcgaaggttttgaagaaattctcagcgaccgtggggacttttgtgccttcgccggtgcacgaggggttgcagtaatattggagaaaactggctgtgaacacgttaaggatgcaacccaggcagaagctatcttctcagcaaacgacacgaaggaaccttcggctgatgcttctttataggcggaaagttctattctgatgtttggatgaaaggcggctgtgagatggccgatgaagccataaaaaagaatgaaaaagaatctcacgacgcccgagaagaggcaaggcaagctaaagaagctattgaacgcgcaatgattataggtatccttttaaagctttcccgttgtttgtttatagcttcgaaattcacgattatgcttttcattacagccggc

SEQ ID NO: 63969 - DNA, 415 bp, Zea Mays
ggagtagaaacacacaagagtacaagagcagtaacaccacacacacaagcaaaggagagaacacaagaatcaaaacgacagagtttctctcaagaaaacgctcaattctctctagaatgagtcgaaagcgtggttgcgttgaatcggagtttcggtgtgctcttagtatgctcgggtaacagctccatgcgcctaggggtcctttatagcccaagggccaaaggagctgtttgatcttcatttagaaggctctagttgccttctgtccatgggtgcaccggacaatgaacagtacatgatttctttccatcccatccatgtcgatcgttcaattagccgttgcatcctttggctgcacagctcaccggacagtccagtgtcacactagacaatccggtgctgccatgtgtccatc

SEQ ID NO: 63970 - DNA, 523 bp, Zea Mays
ccgaatcccgctagaactttggaaaagggtcaaggtttagcgagggaaaaaaaaagaaaaagaaaaggtaacgcccgaattttggcgagtaaagaaaagaaaaaaattcaactgcaaaattcggggcgttacattgcccatggaatcattcgagtaatcccactctttgtttatctgacttatgaccaccagtgaatccccatataccatcagtctcttgatgcccagtgatatggcaatgttcagtccatgaatcaaagcttcatattctgctgtattattggacgctgagaataataactgaagagcatatttgagttgttcacctccaggtgcaatgaagaggattcctgtgtctgccccctgcagcttcaacgagccatcgaaatacatccgccatactcctacagtctcggggtcatctggcacttgttgctcggtccattatgatacgaagtcaactagcgcttgagtcttgattgcagtacgaggtcgaaactcaatgtcgtgagctcctagctca

SEQ ID NO: 63971 - DNA, 461 bp, Zea Mays
gtcccgcacctcgttcagctcctgcgtcggcgtccacgtcaccagcgccctcctgcgcagccggtgcggcgtctgcgctatggacagcagcacgtcgcgaagcgccatatcaacggcctctagcgagcagcgcccctgctactatctagctccgtttctctcgagctgttaatttctctcttctcttcgttcctccttcttttgctagctcctcctggtggcttgcgctttcttcatctgtggctgggcctgggtggacgtagccggggacgatcgaatcgagctcgcggctactatttatacgagaaagagaggaggagggcattcaagttcatggccactcggacggtgggcaatgaagtctctgcgcttgtccagctttttggcgtactggcctcacccacgcgagcgagctagccaatccagcaggccagcaccagcactagcagtagacgatggat

SEQ ID NO: 63972 - DNA, 706 bp, Zea Mays
cttcgtcaggggccgcaccgtcgtcgcccctccccttccttctttcgcaaaccctagtgccacttcgcaacccgccgtgtctcctctcctgaccctgattcgctagttcccttttcctattctatccccatatcacaacatcaccctttttcatccctcctcattcttcatcttcctcaagacggcgtgcttcctcctaccaccgccgacgagctactcgcccgcagcatgactctacatcatggtcgtactattataaagcactagtttcgacagttgtcatgcgttattttttacaaaaatcccttacatttattttaaaaccaacctgtggtccccatatcagatcacatctcgcacatcgcacgctatagtttgacctcacccatacctatcctgctccgcttcatttggggccgcatagccaccacctcttccattcctttagctaaccctagcgtcgcctcgcagcccgtcgcgcctcctctcccgaccaaaattcgctggttcctttttcctattctatcccatcacggtgtcaccctttttcatccgtccccttctttctcttcctctatacggcgtgtttcctcctgccgccgccgacgagctgctcgcccgcagcatgactctacatcctggtcatctcgtcctacttctggtggccctactagcgcatgggcgatcctcaaacttgcctcacagt

SEQ ID NO: 63973 - DNA, 698 bp, Zea Mays
ttttttgccacttttaatataggtcactgatacctcaagcaataacatggcattttatgtgcctctcatctccaaacaatggtaaaatgttaatctttcttgttttattagatggtttcacttcttggtctaagggcatctacaaccctaagccctttgaatgattttccaagcataagaaacaactaagagactgcatgatataactctaagccccttgatataaatgtagttaatagacaatttgtatagagaatcgtgcagagactagacttgagcatgggccactagaaccgaccaaccggacccgatcaccaaaaaaactcgagccaacctgacctgaccaatgcaacagaacccaacccatccacctgaacctaaactgaccaatccgcaataatacaagggccaggcatgtgccatgatttttgacccaaaacccaacccaaccaaaaaaacccgacccaatgcaaaaactatcgacccaacccaacacgtcaaactgggagacacagaccaacccgacactaagcacagatcaggcacggagccgtgccaaacaaaccatgacatgaattttacccgacctggcgtttggagatagacgctttgtgaagagcccatcacttatagttttttgagttaaccgctaaaagcactcaaaacacacatattaaatgggttgtccgtgccctaac

SEQ ID NO: 63974 - DNA, 778 bp, Zea Mays
aaagacatatttcatatcttcgtgttctctaatggggtaattttcgcacatttcgttacacttctcctcaataaacctcagccacccagtcgaaggagctttatatggagattgctctttgaagtcaaaagtcaatgttacaagttcttcatatttcgatttcacctccttcggaagtttccacccagtacgagtcggatagatattataagtaagtgcctcttaaatcacatctcgagatccaatctttttatgattgaattgaaggctttgtagcactcatcggcagcttcgttcatctcacacattggccttttcagggcaaagctaatctccaaagggctcatcagtataccattaaaatcctcatgttgctcagagtaaactttggcataataccattccttcgttcaatcgccatgccacttcattcggtaggccagaactagaccagatgtatccttgcgatatgcgaagttgtagcactcgaaattgttgtgaaggttagattcaactttgccttcgtctgataatgctagtcatcaactttccagaatgcatcagcattggtacgccccttgctttgtacaacctagataaaaatgctaaggcaaaccattgcatttggggttaattgatgcatgtactgttatgcagtggaaacgttttccgttgttcaagtccaccatttccctttcaattcacctttgagactacaccagaatcacttaagcaaacacattagtctcatggagtcaagttgtagcatatcctcccc

SEQ ID NO: 63975 - DNA, 366 bp, Zea Mays
tgaagatctcaggtgcagtgcacctcgccgctggtgaccccgcgcccggattcacgccggcgatgcgattcgtgcccagtgttgctcggataacttcgcggggtgaaagatctttggcaagagatgaagatgggacactgttgtcgctctgtcaccgtgcccacttgccggcgatgtggccgagcggccatcgccaaggtgtacactggtcatcgtaattgcgccacgccgtgaccctttcaccacgtcgttaccagctgtaatagctcaccagtgaccgtcgtagctccttagcctgtgactgccacggtagttcacgtcagggaccttctcctttctccggctgccagcgagccttctccaaat

SEQ ID NO: 63976 - DNA, 338 bp, Zea Mays
gcctccctagagactcggcgccggtgtctgaatggcagttgctgcctgccaggacgggggagggagccttgcaagcaatcgcttcgtttgctcggcgctcgtggaagtggttcggaattcagcaccggaagcaactgctgctgtcaggtgttcgtcgttgctccgacagagaagagtatggtatcatatactcctacgtacttacgtttctagtccggcagagtccaggcatcatcggatctgaacggttggtcagggagggagtaaaatgaaatccacccgaacagaaagtgtgcagactaccacgtccactacgtgcacgccttgccatcgtacgc

SEQ ID NO: 63977 - DNA, 479 bp, Zea Mays
aagcaaactaactctaactaagactgactaagaccaaggcactgaagtaagaattattacagactccgactctgtcgatctatggctccaaatctatctgagtcctatagtcaggggtgccgtaatcaaagcgaccacggggcggcgagcagtaaggatgctgaatcctgacaggagcgggagaaccaccatcctgatagtggcgtgctgcacgctcagcacacaattgcgccacctccgcccgaaccttgcccaactcgtcaagggcatgatctagcttggtgttgagcacgacaaccaggttgaccatgttgttttgcctgggattgccctcaccaatgggcaagacaatcacacctccagcactgccggtcgaacaacgagcaatactacgaaagtgcatgtcgtgcaacatcttgcatggctgcctcgacaatatccctctcagtgatagaataatgctctaagaaggcctctac

SEQ ID NO: 63978 - DNA, 507 bp, Zea Mays
gcgagatcagattgggtccgtccgatctcatccaatggcacacaatcaaaatccgaaagggtatccccgtgctctatctcaagcgtgcgatggttatcggacggtgctgatcccagcccgaacctcatctccctcctagctctcacttcatcaccaaccccggcgacccacgctttcagcctacggcggcgccatggtcggcgccctcaatccaggtgttccggcccctaaacttgaatacgagcagtgctacccgataagagaaacaaagagaacaagatggtcaaggactcaccgccgattactacgtggatgaccctggccacgcggtgcggtcacggttgaagtccgacgaggaattgacggcgcgcagctcctcaatcacgcctaccggagccgagcgcgcacaccggaggtcacgtagaattcctagggccaacaattccgaccgttctagcgtcatagtcgcgaagccacggcggcagatagagcccgcggcggcgctga

SEQ ID NO: 63979 - DNA, 458 bp, Zea Mays
gttacaccggccatggacgccaccgcgccagtactgtatgctgcctggaacgagcaccaggtgagtgaagtccgttggctcagggaatcgttggctctcggttggacaactcagattgagcgtagcgataccctttcagcccatgggatctggatcgtggatcaaggaatcgagggccgtggatgaggaggcgtggttgatttcggatcacggatcctacatcctgtggccataaatgcgtaccgattcatttaaaggttattctaatctgatctctgagttttggatccaacgactcaaagtcacccataccccttcactaggataacttgcaaaagagcccctcgccttttcctgaatcaacccgccatccccaccagtgcaaaagtaattccacttagatccttttattcatagatttaaccctgtgtttaagagaaatagtgtccccagcccag

SEQ ID NO: 63980 - DNA, 402 bp, Zea Mays
aacatattcatactaccatcctcattcaaactaggttgttcacctaaatggttagcattttcatttaatctaccagtcaatagtggctccccatgatgtatccatgttgtgtatgtgctcgccatcccattaatatataagtgatcctgtacttgtgatttctgtagagaaaattgattcaaacactgtcgacatggacatagtatctcctcaatctcaggaaatcgatcttcaacaaacttcatgaagtcatccaccctgactacgtacttcttgctgaaaagcctagtattgatccaagatctgtccatctgccatacattgaaatgataaaacattataggttaaacacataaaatatcttaaaactcattcgtttgaatttgaaaaaaaacattgtat

SEQ ID NO: 63981 - DNA, 589 bp, Zea Mays
tgaattttgagttaaatttgttttaattgtaagtttgggcttgatgcacaaacaataaaattccagcatgatgcataagttcatgtgtttatttggtatttacttaaaagaagatatgcctcatgaataagtcacataatcaaagagctccttcattatttccaatggcaagaggcatgtgtactctatactagggtttacaaatcctacccccttaaaaggaatctcgacctcaagattaagatgaactagggatgaggtggggaaattctactcatagttcttctctctcctaggtagcttcatcttcactgtgatgactccattgcactttgcacatttgatcactctattcctcgtaacacgagtcaaagtatcaatgattttgataggatacttagtataagtcagatcatcttgaacactaaggtcctccatgggtagttgctcttctggtaccctgaggcacttcaactgggatacatgaaagacatcgtgtacatctgctagatggtcgggtagttccaattggtaggaaacttcccccactcgctttaggatcatgaagggtccaatgaaacgaggggga

SEQ ID NO: 63982 - DNA, 866 bp, Zea Mays
cggaaggagtcgatggtgacggcggcacaagtgagggagagtggacgttgtggtcgagggaggaggataggggaggggccgacagggagggagagggataatctaaataatattgacggttagatttaagtaaggaatatgaggttatttagcgatctgaaccgttgattttaatgatgtattagttttatgtataatttgttaggtgagttttacaaagtttagacacgtacagaagacatactggctagcagagcagtgtcaagtttggtgggcgcgccttgaggtcttgaggaccatctgcatgcactcctagctagcctatctatcacggactattccttgcggtcgtagattccgagccattcgtcttacctttccttccttccgtgacctccactccaagccatctctctctcagactctcagccatcgtcgatccactctacaatttgtcgagaatagattactctacttcacaaaagcttctagaaaaatgccctgatgagagcctgaaacacgtcacgtacacacggaaaaatatcgtggtctgacctagcgatggagcaccgtgcatggaccatggtggcggtgccgcagagggttgggggcttggggccagccgccaggctctggggcttgaggttgaggggtgggcccagacgagatgacagatgaggaggcaggtggatgagggaggagcgtggcattcacatgaagtgtggacccatgtggccacccaggtgcagccccccataaacaatttgcaggtgctggacgggtgctacccgctggcattgccattgctaccagtatttgctatactactggcctctccactttttgtttctatctcatgtgtctat

SEQ ID NO: 63983 - DNA, 800 bp, Zea Mays
agcagcagtcgtgcgcttccgtcacaggtggagcagtgcctgaatgtttctttcaacgaacgatgcctagacatagctcatattcttgagctgctggcagaaaagaaacaactttaaaaggaagtggctgggtagaaggagcgcttggtagcaacacttcgatcaagggatgtgtcctttgcccaggaaaaccacttgatgggtcgtttccaagacttggtgatggattataataatttggaggactatgcccatgagatgcatgaggaagtccaccagctttactaccagctacacccgaatgacgcaccaggggccgcagaagtggagggtggtgttgtgttagctgatggaggtgagcctgacacggacttagccatagaagtagcccctatgcttgtgccaggtggtgatgagtccctaggtggtagtgatgtttccgggatagcttcagatacggagggttagtgtcggtatgtgttctggtgtcatagcctctgttgtaagcatagttttgtaagatatgcgagttttggtattgtaatgaataatgcaccgtgtaccggttttatgtaatatatttggtggttatggatgtatattcataatatttgtttgcctcagatgcctagtgtactagagattcggatggggctggatcatcgcacagtggtgcggaagctaatcccaatcctccaccgccatcggttccgcctatgctggcagatgctattgctgctctcgtaaatgccactacggataatgccagggtactgcgagagcttgccaacaatcaaaac

SEQ ID NO: 63984 - DNA, 315 bp, Zea Mays
aggagccacaacgaccgcgtaccttcaaaccgcgacgaccagagataggcatgtggaaaactaatacatttaaggcagccggacgactggtcaaatccggcctgacctttgatcaattattgtctaaatatgtgaaaaagaaggccggccccagtgatcggccaccaaagcgaccttgcttacccacccaggagcgacagcagattaggccgattggaccacctcaccaatcggaaaggacgggaggtcataatgttcaattaagacctaacgcacctgcatggacacctccacctccacatacacccatgtcat

SEQ ID NO: 63985 - DNA, 589 bp, Zea Mays
gtttatgagccacaagtcacccaatttttccagcaactcatatccactgcaagctgatgactggttgaagttagtggagaagatgctaaacattacccaatgcactaacagtgagaagatacgatatgcatcgggtcacctcactagccccactactgattggtgggatgcttactgtgttgcacatgccgccgctgacaccatcacctgggtagaattttcaaccaattttaggtactatcatatccctgctggtttaatgaagattaaggagttcctttcgctcaggtagggaggcatgttagtgattgaatatagagataaattcatccagttttcccgatatactcctgaggaggttgttgaagatgaaaagaagcatgaattgtaattggagggactcatcgggccactccaataccagttgatgtaccactcattcccatctttttagaagcttctagacaaggacttagctcttgaacacaaatgtgtttagctaggagagatgaagaggaatgctatcacttagggacaaggaggcagtagcagtcgtccttattacacttagcctcagggtaccccagct

SEQ ID NO: 63986 - DNA, 693 bp, Zea Mays
cgaaaaaacaggttctgccatgttcctatcggcattacttaaaaccactaaggaattagctatttgtccctcattagtgcctaatgaaatgcctaagttgctcaagtttgttttaacagtatcgataggaatatcaaaaatcttactgcttaaatcacgattaaccgaaataaaattacctccattgcgttccgcttttagcctttctgtccgaactaaagaatgctcatcagtatttctagagcgtcgcttgcgcccagaggctactgcttgcaccacttcaggcatcgccgcgagctgctgaactttgttggcataacaatctggcgtgttcctcacctccgcgtccacagcctgccttgccgcttcttccatcacctcgtcagaaacatgcgccacagaggtaacggcaggagcgttcccgacaagtatcagctcgcatgtaggtgcgactttttctgtttccaaaacaacctgactcggttgcatctatccaatatcaaccgcacacacaccctcctccccgttcaggttctgcacatgctgattaccttccttatacctgctgttgtttcctccattacctcctgcctccttttcctgattgttacccgacacatgattatcatcaagcaggtcatcttcctctccatcgtctccctcctctttcccatcctcatcgacaaaaggctc

SEQ ID NO: 63987 - DNA, 307 bp, Zea Mays
aagcaattggttcgatgaatttttgttccagtaagaggtggacttctgccttcaccgcttcggttttttcattagacatttttcatagcttttgtttcttggggcgcatggtgggatcaatgcccaagctatgttcaatgatggtgcggctgacgccgacaaggtctagggctgtccacacgaagacgtcctttgtttatgagagggttgctggggtcttcgcattctgttgtgagacaatgcacattgcgctggccggggacgaagtctatttctatgttcctggctacctattgatctccatcta

SEQ ID NO: 63988 - DNA, 829 bp, Zea Mays
cccaaagatagcagagttagaataggagtcggttacggtagttgtacccgagttagacaccatgtcatgttgtaatcctgatgcagtattctggcctacatatactcaatccccctctcttttttttctctcgaacacataggagatctgagcatcattatattaagaagaagaatgggcacaaaaagccccagttacaaacacacctataaaacacacacgccaacgcatgcccccccaaaacacatgaaacacgaagcaacaaccaaaagacccaaaagaaactaatgaacatccagaggagctgttaggaaagatatcccttttgctcctactgcctcccatagatgtctgtcctcaccagcttggatcagtgcagtcacgatactaggtgagataccatcaaacacacatttgtttatatgattacagatggtccatgccccaaaataatcaggctgtttaatctccctgtcaattgttcacccaccgaatcattgactctgtgccaccattccaagaaactaaacatggctgtttggggggctagagaatgaagaccaaattgcttgagccaacggaaccaaaattgccttgagaagacacaggacactagaagaggatcaagagtctcgtcctcttggtcgcacaacaagcaactttctaggtgctccatccccctgcgggataagcgatgagcgatctgctgtccagcatttgttgtgtgccactaaccacataaagaaccgacatttagaaggtgacaattctttaaaggaacccaatccgaagtacacccggtggacgacacttgagaaacaagtcctcg

SEQ ID NO: 63989 - DNA, 655 bp, Zea Mays
aagagatgttgctgcacatgtggctaagtgtgatgtgtatcaaagagtcaaggccgaacatcaaagaccagttggactattgcacccattgaagatacccgagtggaaatgggaagaaattggtatggatttcattgttggactatcccacactcctgctgggtatgattctgtttgggtgattgtggacaaattgacaaaagtggctcatttcataccggtgaggactaattacatgggagccaagctagcagaattgtatatgactcggatagtttgtctacatggagtgcctaagaagatcgtgtctgattgaggatcacagtttacttatcggttttggaagaagttgcatgagagcttggatacaaagttgaatttcagttcagcctaccatccccaaactgatgggcagacagagaggacaaatcaagtactggaggatatgttaagagcttgtgctcttaaacatggtggtagttgggataagagcttaccatatgtggagttctcttataataatagttaccaggccagtctgaagatgtcaccatttgaggctttatatggcaggaagtgcaggactcctctatattgggatcagactagagaaagacagttctttggacctgaacttatacaagaggcagaagaa

SEQ ID NO: 63990 - DNA, 304 bp, Zea Mays
gttcagggtacttggctttcacatcatcttctctttcccaggttgtttactcctctgagtgatggccccacttgactttgcacatcctgatagtgcttcttcgagtgacctggtctgttgtctctagaatctgagttggcttcttaatataagtcagatcttcttgaacctcaagatcctcggttggcaatttttcttccggtactcgcaagcatttcttcagctgagatacatggaatacgtcatgcacgactgacagactttctggtaagctaagttgatatgctacttctccacgtctttc

SEQ ID NO: 63991 - DNA, 568 bp, Zea Mays
tgatttgtagccattggagtaactcatatgcaattggatggttcaagtcataaggctcaagttatcctagctcaagtaatggttatggtcacaagatcatgtttagtatcaaagtaagaacctggaaggactttcatatgtgcatatactttgatcaagtagccaaaagctagaatctaagaaagaactagactatgggtcatttcagcatttggaaaagttcttagtgccattggaatatattggaactcaaagatatggtgaaatagattggttatgagtttgacgttccaagtgagttttggagcaaattaaaggatgaaaaacagaaggaattggagttggagaaaactaaatagtgagtatccatgacatagaacatttgaatacactctaactatgtttgtctaagtcatagaaaagtgctcaaagtcagccaaatcgaagtggagaagaaaagaaaaaagtgtcttttctagcctgttcagcgacacaccggtggctctccaaaccgatcctgtggtgcactagcccaggtgcgtagaagctctgtagaagggcttggcgg

SEQ ID NO: 63992 - DNA, 303 bp, Zea Mays
atttgttcaagattttttcatgcacatgcaacggtaaagcataggcgaaacacaatcgcctcgctcactgatgataatgggacaagtttctcggagcatgatcaaaaggcaaatcttctgtggaatgctctcaaaactcgtctgggtacttctgatttcttggagaatgtctttgatctgtcaaatcttataaatatgcaggatggtttacaatggttggattcgccattcaccaagcaagaaatcgatagcattattgcagcactcccctcggataaatcctcgggtccagatggcttcaac

SEQ ID NO: 63993 - DNA, 745 bp, Zea Mays
tgcgaagtggagatccaagtccaacactatgagcccacgtcggatttgataagatgtgtcactacaggccgcgactggatatataggcgacagaccaagggcgtgccgggaggtcgcaatcaacatgactatacatccccacgtacggtctgaggtgcgcctccactgcctcaacggggccagtcgaccttagtcatgggggacctcaacaccggagcttctacagtgggacgtatagtggacggcacacggtggatacaccataccgggtgtacgcctacgcacgccgatgagtgacgcgggcccgtgaggacaggtgagactgcacgacgtatgactgtgccatatgactgacccgcgagagctcctatgcactattacgaagatgtcaacaaaagactcgctacagggacccgtatgacgaacgaacaagacaatacaccatgttgggagtacggttgcgcacgaccctatggacgacgttagaagggctacgccatccaggagcgacgaacatgcccttgctagcagaatacaagtctccaatgcaaggttctgtccttgagctataaaatggcaggatcccttctatctacacatggtcacaccaattgtaacacgcctctaagtaatctacgatcaacactacactagactaaggtgtgagcctgaaccagtataatctctctgtctcaatccacgtctgagttctagcgattcaacattcagagtgagttcactctag

SEQ ID NO: 63994 - DNA, 889 bp, Zea Mays
tgatgatatgccctgattttgggctgttcttcatttgccttgctgctggatttgaacctgcgcccttggttaatgtttgtaggactgatatgctaagttagttccatgtcataagttcctacctaagtgccgctcaataacgatgaaataaaattccaatgtgaggcaatgatctgtatcatggttgacacaagcacctttgagcaatcaaggctgctatgttgttaaccttgctcttagaggacatggaaatggactcgaatatgtgaaatggactgctgacgaagggcgatgatgctcaaccttttcggagtcgcacgccattgagcaaccaaggcagctgcgtgtctggtagcctatttaataatccctttttgtttgtggttctgcctaggatggtcacctggatggatatatgacaaccaggacagttccactcacaataggatgagtagattgggcagaaagagaagggagggcctgatttctatgattgagcaaaggagatgctgagctgagcccctttcgtatggtttatgcagcggtgctttatggctctgttttttgtttcataccgcgcttgagtggctaagattgttctgctttccattacagagcttctgcactctaccatcttctgagctgatgatacctgggatattctttgacgtttgctgctttactacgatggcccatgccttactagaaggtgattctatatctgtttgctgctttaactaggatgccttgcaccttagagcatctctagcagtcaccaaaagaaaagacaggttgtgcatccttgacaacaaattcacctccccatgatagggagtagcggtcatccgtgtatctctgcgtgttttttccaagcgttgatagattcggg

SEQ ID NO: 63995 - DNA, 1381 bp, Zea Mays
gggttgaaaatctgggatgttacaaacctaccccacttaaaggaatctcaccctcgagattcagacggggctcgagaaaaggtaagggtattccctcctcagagagtcctcactttcccaggtagcttcctcttctccttctctgctccactgaactttacagagtcttacttctaagttgcgggtcttttggactgctgagtcaagaatctttatcggcttttcccggtactggagatatttttgaatctaaattgtctctgcctcgatgtggttttctggtacttgcaggcacttacggagctgggacacatgaaacacgttgtggatatctgacatggattctggtaattcaaggcggtatgctgcgggtcccactctgcaaatgacgggataggggccgacgaatcgcggtgctagctttcctttcatttggaaccttttgacaccacgcatcagggagaccttgaggtatacgaagtctccttcctcaaatctgagttctctccgtctgttgtctgcataacttttctgtcgactctgagcttcaagtaacctcttgcggatcagggcaactttctcttctgcctctttaacaaaggcgggtccttccagtgtcctttcccctacattggaccacattaggggggtctggcactttcgtccatacaatgctttgaacggtgacatcttgatactggcctgatggctgttgttatatgagaattcggcatacggcaaactggactcccagtttctgtcgaacgtcaacacacaggctcttaataaatcttcgaggaccttattgaccctttccgtctgaccatctaactgggggtgataggcggtactgaaatctaacttggtgcccatagcttgctgaaggctcttccaaaattttgaagtgaactgcgtccctctatctgacactatcttccgaggaataccatggagcctgactatctctttaagatatatccgggcaagggtggctcctccaaaagtggtttttactggaatgaagtgggccaccttggtgagacggtctattattacccagatagagtcatttcctttttgtgtctggggcagtccggttacaaaatccatgcctatttccttccacttccattcgggcactgggaggggttgcagtaggcctgcaggtttctggtgttcggcttttgttcattggcaggtgtcacaccgggccacatactgtgctatctctttcttcatccctctccaccagtatcttgttttgaggtctaggtacatcttggtggttcctgggtggatggagtaggctgagttgtgagcttcattgagcaagatttctcgtgtctctccttttggtacacacagacggttcttgaaccaa

SEQ ID NO: 63996 - DNA, 752 bp, Zea Mays
tctccctttggcggcaagcaccaaaagggtcaccctaacctagagaccagaagtagaaggaggaggtgcatgcgcattagagcgagggagagcagtcagagcaaaagtaggctggggatcagagtcaatctcggatctaggagagttggtgttgactctgacgctgtctgcggtgcctgagttgctagcgctggagctgaaacagagatggtcacgacaggagtagaaactgctgaaactggttgcactggcggctgagtacttatagctccgacgacctgagtcgagaagtccatggtaaccgaccaggatggagagaaaatcgtaccaaaggagtgtagcttgggtctggactggatcgctggcaccatggaagtatgtagagctagtgatggagcggattgtactggaggcattggaacactggtgtgctgaaggatacgagtcatgaaagcccggtgctccgccctatctaccagaagttgttgaagtgtgtactgattgatgtggcttaggaacgagatcgacaagcaggtagtttatataaagcactcaatttctacaacattttttgcttcatgaccacatttactaatttctgcaacattttcagatgtgatgtccttgactaaggtgttagatgcagcagccttcactttgaacaagaggttagtaagttttggattatgccttcagttttggaccatgtcctgctatactgttatatactgctaggagcatatcactagtag

SEQ ID NO: 63997 - DNA, 338 bp, Zea Mays
cgacaaagcacacaactatcagctacgaaggaccataacctgaccgaaccaaactactagtagcatcacatataacagcacatagctgaccaaaaacaaagttcacacagatcaaaccaaatcagcaaacaacaatctatcccgtagtttttcctgtagcctggcgctatggagaggggaagtagaacaaccacaaagttgatgaaccaaaatagccagataacaaaacatatttcttcattggattcgtctgtcaactggcctccaaccacgagtcttgttgtagatctcacacgccatctttttgattttgaaacttccgagctccaccagttttc

SEQ ID NO: 63998 - DNA, 315 bp, Zea Mays
gtttagatgtattttcttttgaaggttatatgtcactgaaagctgtactcatggagttttcatttatgtattgtggctcaactaaaatagcttcatgcttcataaattaatcaccggttcaatgtaaattcatgaacattggttcaatgttgtttcatgttctacgtccatcattcatcaaatgcagattttactgatgattgtgttgactgctgcttgatcctcgtgtcggtcctaactgttactttataattttggttctgttgggtatgcctaattggttttgtaataattataactaacgctgctttcctg

SEQ ID NO: 63999 - DNA, 1296 bp, Zea Mays
tgaatatctaaatttcctccatggaaatctctaaacattttcataagatctcctttgattatatgccaaaagtttttgaagaaggccactccaaacccatttggactcggggcagagtcaacatgcataaggtcaatcgcctgttttatctcctcttcatcaaaaggcctaatcaggtgagtggcctcctcaatagataattcacttctaccttcccagaaatcctcgcgtaacttcatcgcacaaggaatagatggcccaaaaagatttttataaaaatccaccacgtggttactaatatctttctggtccaccaaagtacaagaatctgccaccaactgtagaatattattttgtcctcctcctaccgttagcaaacaggtggaaaaaactagaattagagtcacctttgagaatctagttttttccggcccgttgttgccaatacacttcttccatatgatacacatgctctaattctttctcaactctatatctttcgttccaattttggggaagattgtcattcataaccaaaacatcatccaagctttttagctttaataaaagatcatgtttaatcttattttgatcacctcttttttgtctgttccacccccttaaaaatcttctgatggaaaccaggctcccatgccacccatccatcgagtaggaaccttcaggcctacgatccttaagatcagtccatttttgcgaaatcaaagccctgaagtcttgttggagaagccagttattctcaaagaaaaaataatgagatttattaggattattctcactagagtcaagcacaataggacaatgatcagaccccactctagttaatcctttagaaaagcaaagagggaacctctcctcccactcagtagaaacaagaaacctgtccaacttaactagcaccggattaacttgattattagtccaagtatactgagggcccccttggcaatttctcgaagcttgtagagattaataaattcattaaacatgttcatgaggctctgaatattctaggaattcttctcttgcctattccttattaaattaaaatcacccccaacaccacaggaagggtctccctttcgcatatatccgacaactcttgcaaaaaactagcatactggtggtgctgagcaggcccgtaaacacacaacaccacccaacggtaattgctgaatttgtttctgaccgtagccttaatagcaaaattgaagttttcccaattttccacctcgagggagtcttccttgacccctagtaaaataccaccagaatgac

SEQ ID NO: 64000 - DNA, 687 bp, Zea Mays
gtttgcaatactgcgacatcaaatcaaattttatagtagttctactgataggttggtattgtggacagaaagcacgttgaatcagattcttaaaattagggctttcacccatcttaataggtaaatcttcagaaataatgtatttaataatttcttcacgtgctacttgtggattgtaaacccatgtacttacagtgccatccgcagcgaagttaagttgagtttgcacacctgcaccaagagtttgccctaccttcttcaaacaagctctaaaatatcgattcatatgtccagtgccaccaatagaatctgcactcaactcagttttacaataatgacatacaacaatataactttttataccattttcaacaatctcccgcttatccatatgtttccagcactctgccctggaaacagatggtttagcagcactttgcactagcacatcagctggttaggaagaacttccactacaaacaggtacacctagctccacccccatctgctggtaaggaggaactaccactacaaacaggtacacctccagcaccatgtactggtaatgaggcattagcaatagcactaccatcatcagatctaccttccaaggttggggcgagttcgcaaggactgcaggaaccatctatcgtcctactagcataaggttttctagtagttgtcctc

SEQ ID NO: 64001 - DNA, 612 bp, Zea Mays
ctctcgccggctccggctcctcattctggttcaacgcgaggtttgccaaaacgtctagaggaaagtgtttttagggtaaccttgtcgattccttcgcgggccagaaatttggcaacgacccacctttcttgagggtcattaacgaacttgaaaacgtcttttatttttctgtccatttgcagctggctatgtacttaagggccaaattttggacatcatagtttcatagcctatctagccaagagcaggagtcgggtttaccaaccactctagtagaattgaggcttgtatacccatcttgtgattgagttaactcaagattaagcactcatgtcgaagccaaccttgtgaggtagttgagcttgatagaggagcgatgatccttaggctcgcctcaatatggatgtaggtgaccgataagttaccagaccacatagatatatcttatgtcttcctgttgttgtattcgttttatcactctctgtgctttactttgtgttgttcaattcatatagtgatattaggacttgtcatcctagaagcaaacctagctagtttatcatttctagttacatacttagcttacattcttgatcactagaattgtgtagc

SEQ ID NO: 64002 - DNA, 304 bp, Zea Mays
tgcaatcaaacattggcttgtgacaattcaaatctcatccaatcagatggtgagagtggaaggcttttatagagaaggcaagagtttctgatggggattttttattcctagtttcaagggtgagtcacatgcactgttcttccctcccctttgcctggcagttccaagtcactatcatccatgactccatcgcgtcaagaccgtgtggacccgttgcatttaatttaatctaatccatctttcatctcctgtctgttaccaaatttaatgcatgtaatcctcatgtacttatctgtatataatg

SEQ ID NO: 64003 - DNA, 437 bp, Zea Mays
tgggtgcgctactgaaactccctagctaaggctgtgtgcaggtccgggtcccagtcgaaataccctcctgggggccaggtcacctactccttcttaagtatactggcatccaacctcgacaagttgagaccacatcccagaggggccaagtaccagggaagaagttgacaacacacatagcaaagggaaagtagcatgcagataagttgtaatgttgcttgacacgtaatacttaaatgtatcttacaaaaccaaaatatgataagtcgcttctagcagaacccttgctttctctccgcagatccgactactcatcatcagtgggatctcgctggaagcgcttggccaccacgtctacagcgtcctgcatgctcccccgggtggcgtcttcggtatcggccaccggacaggcgatcaccggcaccaaagagatggct

SEQ ID NO: 64004 - DNA, 284 bp, Zea Mays
caaccgattaaaagtagggccaactctgctgagccagccaaacgccttggaagtgttttgctccctagtacctgttttagggcgctgtggtctgacagtctaaggccgatgctgcgtctggttgtccgtggaccgtccgaccttcattgtcggactgtctgtgattgtccgagctgtccatcgtacgtagtataggtgagcatgatcgggtatgcttgtccaccgagcattcgtccttggatagggatataaagttagcgcgatgattagaaaggactcatcgg

SEQ ID NO: 64005 - DNA, 305 bp, Zea Mays
tggatcctttgtccattgtactttcttgttgaaatcagattgttgaaggcccggaggggtggcaagacgaacggcttgggcgctattggtgctgtggtgggtagcatactgatttcctgcacgaagggttagcacagggttttctatttagaacttcatgggcctcactgcctctatgacctttcggaactgttgccaggatcaggagtttattatattagtcagtacttctagattcctgtggttgaaacttgaaatgtagtgttatttaccagaaagtaactttttcttcggttccatgcgat

SEQ ID NO: 64006 - DNA, 574 bp, Zea Mays
ggagaggcgagcacgggcagatatatatgcgccacaggggagaatctggatagaggtggtgagcaaccgatggtgcaggcgaaggactacggcggcgacaatcttcttctctctccctctctttctgtctctcaaccgcggtggatctcggtgagctagggagcgcgagggcgcaaagttttatacaccgacccgaggaggtaacgagcaacaaccggcgacatttatgcagttggatcttcggtcgttccgagctcgacgccgcgcaatggggaggaaggagtccgacgcgagatccgtgaggttgaggattgtgctgacaactggggcccacccaatagagacacaaagtgtgaaacgtgggtgcagagtgcggatggatgaccggccgagcggctgagggtgtgggtccacatgtcggcgcagtggggaggattggctgggctggcaacgcgagtgagatgggccgaggagggtagattcggcccacgaggctggtaggtttgatcttttctgtttttttatttcagagttccttctccaaatttaattcaaattcaaaattcctatttca

SEQ ID NO: 64007 - DNA, 491 bp, Zea Mays
ataaaatacatcataaattcatgttgaggttctttgtttgctgcatttaactagtgtttgaatttcaaagcaaatttgaactcaaatctattgaaaaatagagaaaacagaaaaaggggaaagcattcctactgttgggccaaaactagcccacctcggcccaactactccacttctaccttgtgtggcctgctctctcgcgccctctcacgagagtggccgacgggtggaccccactgctcagcctcacctacaaagtgtgcctattcggctgggaagccacattgtcaaaaccaccctccttatcctaggattggaaaatgtggacattattttgggagccaattggatgacctgacaccaagtagtgctagatgtagccagttgcatcgttgagatcaaatccgcaatctgtgggagtttcaccttacttctgcccagccaagattctactcgatcatgtgcttttgctatgatagagttacccttga

SEQ ID NO: 64008 - DNA, 524 bp, Zea Mays
tccactcaccgaaagatcaggcacctcagctatatcactaatggcctctaaacgggcaacaggggcaaaggtctcctcataatcaattccctctttttggcaatacccttgagcaatcaaccttgccttgtttctcactaccaaaccatcctcactttgtttgtttttgaaaacccattttgtaccgatgggatggcagttagaaggaggtggcaccaaaacccaaaccttgtttctttcaaaattttcaagctcctcatgcatagcattaaatcagttaggatcagataaagcatgtccaacatctcgaggctcaaaagtagcaacaaaagctgagtgagcaaaatgagaaatgtggtgtgacctagagcgagtgactcgcttgtgaagctccccgatcatctgctgagatgggtgacagcactgaatatgctgtggagcctcccttgaggaagtggcatccccctcaacagcagcttcaactcctccagtctcagcaggagctagcttgagcggaccccaag

SEQ ID NO: 64009 - DNA, 625 bp, Zea Mays
cgggatgccgacagcgctggccggcggaaccaacattgcaggttcgccaccacaagggccagcctttgactccccatctggcgagctggaagacaaaagcgatatgacctctcctctgacgcttgaacccaccactttgcgaggaaggttagtcaccaatacaatggatgggcaagagtcaagtgagtgcttggtcacctttcctgcgatgggcggcgcttggaccgaccttggtgagagcactctggagtcggacacttaccgtgatccatgactagccgacggaccctgagaggttggaggaaacaaaaccctcctgactaaataccgcttttggaaagcagaaagcaacaactaaagtctgttgggggtaagcatagagcggacccctacttattgcgttcgactgaagccaacagtggactttgctgattccattcgacagcggcaagcaacaaaaaggaataagacaatgtctgacacgacacatgtctaaccctttatcatcccctgaagggagacactctccccttgggggctcaggggctactatcggggaaatgatcccctgtccctggcactcaccagtcagtgagcacgcttagggaagagcccctgatcgttg

SEQ ID NO: 64010 - DNA, 721 bp, Zea Mays
cctctcgccgccgctggctctgctacccgcgttcttcgctgcatctggttcttctcggactccgccgctccccccgcagacgcaagaaactgctggccatggagcccccatccgcccaggcgatgtccgcgactgacgacttccaggacaaggccgtcgacgagtggtaaggggactcgactgctccctccaaaccccgatccttctcgtttccgctttctcctttacgagttatatatgaccgacggcggtccgccgtttgtttggttgcagttgctcttgctgctacgattgctgctccagcatcctggacttcctgtgctgctcgtcctgatcgatcgatgcctgccctttcgacggccccgtggaatttctcagggaaccggaggccttaccgtggcccactgatcttggattctagatgccgtgggattcgtgtgttctttaggtccttcggtgacgatgtttgtaatccggattcgaatcatcggtaacagtaaaggaaacttgatagactgctgaacagccgagttatcttcaaccctgcggtgtgtttcctctgataaagcttttctgcgcgtttgcagatcgattcgctgtttggaattcttatgggtgacgtgcggtcgcacttgacgcacgcttcattgcagattttatttacaggagttcttttttttttccgcaaaccatttggttctgcgtttcttgtgcactgaac

SEQ ID NO: 64011 - DNA, 753 bp, Zea Mays
cgtgctcgcccttaggcaccgttgatgttttgaccgagaccgtcggtactctagtcgttcttcaggatttgtgcgaaccagtcgtgcctatgatggccgttgaacctgccccaggacggttatgtcatgctcctttaattcatctgcgttccccctgtcctgatgccaccttctattttgggtttttccagggctttgatctttcggagttgtcatttgatcatgccccggtgggttcacccatctttcacactgctgatcaaccatcagggccaaatgctattctcagccagctctggcgtgttagggccttgctcttagctcccattaacgcactggtctaggattccaaagaaataaagtgcattcttgagttaatcaaaagtcaactcctagaggcactccaagtcaaactctggccagctggccatctccctttttccgtgcgaaggtggaagcagctcatcggaatgccgccaagctcgagctcttggaaaaggaattggaggaccttgaggaacgagaccgagtaacccgatagctcatccaagacgagaaagcctccatagccaactttaagcaggagatggaagccttgaccactcgactgagattggatcttgccaacgtgagtactttgagttgataggctgtggcaggtgaggacatggacaatgacgctttattgctaaggccgaccacgttcatgtcgaagccattcatgttgtcgacaatttcctctgtttacttgtc

SEQ ID NO: 64012 - DNA, 604 bp, Zea Mays
ccaaaatatatgatgtgcctctgttataggcatgggttgttccaacttcgtcaaatctatgacaaaaggaggaaatttaactggacaatgtaaggtcgctgatctccgagcttgcttccaaaaagaggcaaatcagcacatgatgaaatgacccaggagaaaaagggaacactcgctcgccgaccgtgtcccactaattatattatcatgaatattatccaagcaattatatagaaaagccaagcttgcgacaccaattgctctatgaatgccttctgatatctgaacggccatctgaaataccccaggacgaatgtattggccagcttcaacaggaatgcaataagtgcatagccaagctgttataaatgcagcacggtaaaccgttgaaggatatatagatcggtaagataatgtctcggcaccaagaatggctgcaagacggtcaccttgaaccgcgacatggaaacgaagcttctgaagtaacggatctttggggttagcaaagccatccaataaagaactgccaaaagaatcagctttatcatcaaaaaagtggtctaaccaagcggtaggactcactaatcctaggcctggctgcagc

SEQ ID NO: 64013 - DNA, 761 bp, Zea Mays
ttcgtgcctctagacgctgtcgtcaacgttcgctcaccgctgctcgcgcctcatgcgatcgcaaccgctgccaaaaatcgaaaccctaatccctagggtcttctgggctgcttttatagacgcccagggcctgggtcgcttgagctggtgcggttgaaccggatggcagtattgggccagggctttctcctagctattgaaagttcatggctataaatatctaaactatatatatatattcttctcatcgagcctgttccagacctcatgtccttttcgtgggatcgttaaaacgtcacacctcacaaacgtcgtgttgctcatgtctacccccgtcttcccctgacatctacccctcggcgctaccatcgtctacccccatcaaacctacctcgcctcgctccaccatgcaaccactgcctccatgtcgacgcgcgcttctcgccgctgcactgcatatcccactagttcgagtcttgtgacaacttcgtctcgccaaaccatcgtccacaatacgcgctcgtgtgacacaagcgcaggcgcctcgtttcgtcttgctttgtcacataatgtcccgcacgtcgtgcatgcaatatccttgtcgcacccctcctctatgcatacgcacatgtccttctggtttcccgattgccaacctcctccactttccctagatctagatcatacagacagagcaggtgccccttaggttatcgatcgtcataccaaggtgagtgtccttcttctctcttcgtccccca

SEQ ID NO: 64014 - DNA, 400 bp, Zea Mays
cacctgttgagacatcgtttgagatcgatggcgagcctcttaagacgtcgtatctgcgccttgcgctaaatgtcggcaggttcgccccaaccaagctcgctgatggatgagtgggaagtcatatcaagcatggggtcacgctaaggactctgaccccctacctggcgtgccaaatgttggagggaaaatccttcggtcgggtggtggagtgcaccctccctgatcctaagatgaggaaggggcctaaaggtttgcctaaccggaaggaagaatagaagaacacaaggatttagagtggttcaggccaccagagcgtaataccctacatccactataagttgtattgcttgagagcttgagtgtcgtgggtctgaatgtccctccccctctctgcatcgca

SEQ ID NO: 64015 - DNA, 469 bp, Zea Mays
ccctctgccatcgctcgtgaccagtgatcgtcgcggcgtaatccacggaaatttcgcttctatcatattcgcattaaccctagggttggatagtcgcattgagacgagagattcgggccctctgcgcgttgatgttggtctcgccggtgttgcgtcaccgcagatgcgagcggccccaccgcctgagctggggtatcgggcggtaatcggtttctgaccgccgatgtgcacgcgaacggctaggattagaggcgggattaccgttttcagggcattgaatcatggccgttagattggatctgtgggttcagatgagaagttggcgtggttggatcttggccgtggatctcagatccagtggctgttagctcatgtcgtttcagccatgtgtcaattctaatctgagacgtagatagttgatcgggcggttgagacttgagaaacaaaccccttcgtccaggcatattag

SEQ ID NO: 64016 - DNA, 461 bp, Zea Mays
aagaaacgcgtacaccgttggatctacgtaggacggatgggattagatttgtgagagagtcatcatgaaccgttggatccatgggcatcggtcatgatcagatctgcgtactggtagggattggatggttctgcgccatcggatgtgaagtggacgagtgggattgaagtagtgttctgatttgggcaaatgaatcggagccgtagatctcggggcgtgcggtatggatagcgtaccgattaataatcacgctcatctaatcttgcgcgtacaaactgaatcggacggtgcagatcgtcctgtaccccttcgatttacacattttgcattagaagccctgggtttattaagattcaacccgcagtccacgttgcagcactctgtgtcttaggaagttttgcaccagagcccctgcgcgcagtccagaatcataggaaaatttagaaattcaattagaaaat

SEQ ID NO: 64017 - DNA, 959 bp, Zea Mays
aaaatttcgatgcttgtctctagccgagggtacattctgttgctgctggtggttctgttgattctgctggttttgctaaatatgttgcacagatgcagtgagtccctatagaagctgcatttgagctgcgataaactgctacatattagggttcggtggcggtggtggtaactgatgaccactctggttcctgttgttgttgttgttcctaggacctgagcgagcgttcaccatctggttggttagaaagtgaaattcttagaggagtgaggagtaagaaaggttctagaggggaatagcttattattaaagctaagtttgttttttatatgctcttatggccatcattccataagaccatggcactcaagcaaaaatccaaatcaaacatttcaaccaacaccatcacatggttgttattattataagcataaattataaaagaggtgttcatcgtctggcccgaaaactatcttattacaattataacttaacaatttcaagcagcctggtgatggattcgggttccccatagcaaatcctcttgcggggatgggacaacgccatggcggggacttgggcttcaggggatcccttccttgaagttgagcttctagggctgcaatcctggtgtgggcatcctctagctccaagttcaccctagagagatctagggtggcactgtccaggtcggtgttaagacctgccactacaccagctagggtgttgaggcgatcttctctagctccacctggaacgatgctggtctggctacctccactcagacgcagaggaagatgcctaaacttcgtgtcatgtagctgctgccggtaggtgtggctgaaagaccacagagttcgcctagcagcatcgctgaccgaagcagcgtaggtggatagcggtgtcagggactcatgagctgatagagtcctgaaccccctatcccctgcatccatcac

SEQ ID NO: 64018 - DNA, 288 bp, Zea Mays
tccagaggctgcgtgatcatcagttgtatgctaaactgtccaaatgtgatttttggctgagagagattaaatttttgggtcacaccatttctcaggatggggtatcagttgatcctgagaaagtacaagaagtgatggattggaaacctcctaccactgtgcggcagatccggagttttctgggattggcagggtattatcgacggtttattctggatttctctaggattgccaagccaatgactgaattgttgaagaaaggagtcaagtatgaatggagccaaaaat

SEQ ID NO: 64019 - DNA, 443 bp, Zea Mays
gacagtgatccgagatcaaagaagcagtgctttgcaataaacagtccagaaagatgtcctcccattcactggtatacaagaccctgtccagccgaaccaaggtcggggaagaccgtttattcgaccatgtaaagcgcctccctaacatcagtaattccataagctgaagctcattaataagcctccgaaaccgacacttcatagctctatccagattaccattatttttatcttctgcccggcttataagattgaagtcaccccctatcacccaaggtccctggcacatagaacgcaccaaacggagttcttgtaaaaacaaaagcttcttatcatccagatgtggaccatacactcccagtaagccaccagggtgaggcattgtgttgatcaaactgtcataaacctcattatggtttgcagtgtgctcactcagaattttg

SEQ ID NO: 64020 - DNA, 763 bp, Zea Mays
gtcgattgtgcgtagtgacggtgttagcaaacggtatcaacagatgggatggggaaaggcagcggcaacaatctagcagttgcacgattcctcgtcatcatgatgaaccgcccgcctttcatgtcgtcgtcgtcgtcggcagtcggcagcagggacgaaacgacgacacggcggccgggcagatctcatctgatctcagtgagtgcacacgcgtcaaatactccatgagtccacagcatgacgacgacgcgaccacaagatcatgagacatgaactaggaattagaacaaatctagtactactactagcttgagaaagtgccattgttggatcgaggaattcccttcttatcttcgtgagaataatccatgcatgcatgggagtctaatcagaagattgaaagtgttcatttgtcggaagcaatggaagccctaaactacttaccctggagagaatgtgttggcttgcgttggctacttccaagcaatgttcttggagaaggaaacgaatggaagcatatgagcatatcaacagttcatcactggctcagacggacctcagagggtatcagctgagcacatgccctcatgcagcgatatgcatacatatgatcggtctattgtccgtccatcagaggaccgatgcgtacccaaatgctcacagacaaaatccagcgagctagcgaccacatgccaacgccatgcatgagatcgttcgcgttgatgcccggggcgggaatcctattggccttcttggaatcttg

SEQ ID NO: 64021 - DNA, 551 bp, Zea Mays
cggaggtcaggggacgtcggtgatccgaagtagggacggtgcatgccatgcttgccgtaattctccggtagcagccacgaatcaaccagcatcacctagcagacgaagcaatcaccagttgaagaatcatgaatccaaaggtctgctagaattctcgtcacttcctccacatggcccacaagccgaacatacgagaagtcgaaacctcatgtgcaacgccagtcgacttccatgactgaggaaaaaacttggaacgcctagcgaacagacaaggctacaagcacaccaaccgagtgtcggacatacctcccatcatggggctccaaggagatcaccacaccctcatgcaacaggggggagcgactcacaacatcagcacaatcactcgccgactgaaagcgcaccagcagagatccgagcgacgaggtgagaagctcaaagttgaagtgggggaaagcagcacggattgcctcccaaacgaacgacgctggggcagacactgcccattgcagtgttatatagacaaacatgaatgcaacggctacatcgtg

SEQ ID NO: 64022 - DNA, 636 bp, Zea Mays
aaccacggcgacagaacccagcttccagagagaccgcaggagccgcgccgccgctgctagccttgccatcaccgcctgaatcctttctgagtgaagaccctgttgatcgctgcgttgccagtgtctgctctcgctctttggtgcgcgcttggtggtctcatccgtgcccaattgctcgctggtgggctacgggcgtccccaatcgcgtggcgtcggggagtcccttcgcgagctccggatccaggtatggcctataccctatgcttgaatcgtttatgctgcgatgtagagcgaatctaggttgaattggagcatttaggccccgtagattgctcatgggagctctaaaccgcctcgaacccgcttagctgcgttgtcagctctgccctatacctccccgcctacaaaatacctcagttgtgttcgctgttgttccctcctcccgtggagctaggatcgatgagttcagggaacgatttcgctagatgctggactccgtccatgcgcgccgccgtggctcagcggtgggaaggggatggatcttcggacccttggatcttgaccaacggtcacgattaggcagtaggcgtacctcttcacgtgatcgatccggaccattgatccagtggagaacgg

SEQ ID NO: 64023 - DNA, 635 bp, Zea Mays
tgtagccattactactcctctatgagtttggtgtgtagctcgcggagttgctcgatgtgtgcgatctgactccctgtgggggtctaaactgcaccctgctcccttggctctctggcgtgtggggatggtgtcaacgcgttggcctcccgaggcatgccaagttggtttccttcatcatgctcctcgtgccccgtgtggaagcactcctgagtcaggtcgtaaccctcatcatcgaagctgtagtcgttggagccatcggaggggaagtggttgcatgtggacaagaaatatcgcatggccctaggaccacggagcctagagaagcctaggcctagacccagatcattttctgcctcgaagtctatgtaccccaagatttctgggaggtccacatacatgctggtgtaggtgcttgtcgtataggggtagcttggaagatcgaagctcatttgaaagaagatgggattgaatactgatggtcccccagtcaaatggtggagctcacacctcctgacccgtaggaggaggagccggtgaagctggcgtctcccaacctgcaggaggggagctggtggtgtcggtgttggagcgacgtatgttgatgctttgggcatgaagctaacgcatgatatgtc

SEQ ID NO: 64024 - DNA, 1024 bp, Zea Mays
tgaggtcttctttaaccaaggtccagcaacatttatagaaaaggccaatgaaaccatccgggccaggagctttttctgaatgtaaactcatgaccacattcttgatctccgactcttgcatcacgatgtcgagcccacctaacgaaaagggggaataatctagagcggcccactgaactaccttatgtctcattccagtctctccaagaatctccttgaaatgctgatgagcctcttgcattttgtcttgttggctagacaataaagtaccattccgaaggagagatctgatatagttcttctttctcctattgttggctaccaggtgaaagaatttcgtgtttgcgtctcccatacgcatccataactgtctggagtgttgtctcgcagttgctttttgaatggaagcaagaccaagaattttgattttcagtcttctcctgaactccaattcatcgttggagagctgtctattttcttgcgccttctctaggtgagtaagagtgatctggataattgccaggcggatcttgatgctccctactgttttgcgtctccacatactaagggccttagctgtgcgtgacatcttgacatgcagcctcagaatggcatcttcagagttaacatcagtagaccaagctcgattaaccacctccttgaaatcgtccaactttgtccagaacgattcaaatctgaagcctttgaagaaacgaaattgtgaacgaccttgcataataattgggcagtggtctgaagtcatagtgcaaagggacggcagatctgccgatgggaagagcccatgccattgagttgtcccaaagaatctatctatcctggtcattgtagggtccacttgttcatttgaccaagtaaaggctctatcattgagctcaagctctaacagatgcaaatcatcaattgtattgttgaactgactcataattcttctattgattgatcctttatttttttctcttgctctccttatcatgttgaagtctcccaggatcgcccattccgg

SEQ ID NO: 64025 - DNA, 530 bp, Zea Mays
aaacgattacttgtactgctgcccagacaatatggaaactaaagtatgtcgctacatgatagataatattgttttctcgaagtcggaggccatgctctcaaccatgtcctccgaggacttttctgattgcttggcttacacgcatcttaaggtaatttctattgatttttgtttttgagctttgggttgacttgatggaataatttacttatatttctcttttcatgtcttacaaggtttgcttctgatgaagaccctgaggaacaagaaaaatgttgaggacgaagctgccctaaagagacaatgaagcttaggttcgaagtgtgcaggcttcattttgattgcgatgacaaggaaaaatctttcaagattctagagaaggatttcattgaaagtcgaaccaatgtccagactatgcgcgaagagaaaagtaagcttgaggaaacaatggggagaaaaatatcagagcttgaagcttctaacgctaaaaaggacaaccaaattgcatcgcttgtggctgagctgaagcg

SEQ ID NO: 64026 - DNA, 347 bp, Zea Mays
gcatatctgtgcaaacatctggtgagcagtgtttcatctctttgttttgacctgtttgcaggtacttgcagttgaacctgaaggaccggaagagtggcgacgaaagagaatacgtctctcttatcctcgtgctgtcaaaaacttctggtctggaacccgacaccattgtcgaagcatcgttcaagctcttgatatacgatcaagcatacggacgacatagcgaacatgaatgtaagattcaaatcacatgctaacctggtaggctagctggtataggtacatggaatggaactctactaagttgatggccgcactgtacgtttgctttagttagccacagattccag

SEQ ID NO: 64027 - DNA, 521 bp, Zea Mays
atcggccatagggcttcttacgccgttgttgatgctaaggcgatgctctatggccagtggctaggcgaggcctgttgcatcttgctcgtgtaagcaagctgtttgatgtaatacctcaacgcatcttcctatttgaactgcattcagtttcttgcgtacctgatgccagagttcatcaagggaactttgatgatcttatcttgcttgctagtttcatagcacaaatggattttcaggctttagattcctgccagtttacatgctcaaattattgtactaaaggctgtagccattttgctgtgctcttgtattagcacaattatccttaaaagattgttttctctcctcccccctcaatcctgcattgttttggtaacatggtgctactccgttcacaggtcagactagctaacatcagaatgcctcctcctgacctcctccatctcatccaccttcagctgctctatttctgcattgttgacgtgagagttggtcgacagactctgatgcatttgccttgc

SEQ ID NO: 64028 - DNA, 324 bp, Zea Mays
cggtaacccccccgatgccgttggatcctgtgtcaatgcctcagatttaaacaatcgcgatctcctcccatccctccatctatcgatcaacggttgacattcaacgcttgaataggtaggcgggttttaacctcagccgttggcccggcatccgacggccaatccatcgtcttcccaggaacttgctcagaggcggcgccatggcctgaccggcggcaaacacgccgatgcacagccatcaaacccaaccggcgactatccctaaatccgaaacgtgctacacaaagcggggtaagagctgagttcaccagaggagcccttacc

SEQ ID NO: 64029 - DNA, 463 bp, Zea Mays
gttgttacaaattctaaagagcccaggggctagtttgtaaatatctagggcctaatggtaacactcttagtactacacccggaccaggggttgatttaatggaaaggtgagggttcttatgcaagagtgccgggctaaaggggtatgggcagaccacggtcgcccgattagaatcctatggctacgattggtcatatcagagcttatcgacccgcgctagccatggccgtccgattgaggatcaatggctttgagtttatgacgctacaatctgatctggtgcgcacgatcctgatccaatggtagagatcaattcgttgaaccggtatcggctatctattcccagtcgttcgctaggaaatcgatggccaacaacgtcctcttcctcccaacatccacctgaggcagtgccgcccgaattggcggctgcgacctcgccagagcagacccatatgtcccccat

SEQ ID NO: 64030 - DNA, 300 bp, Zea Mays
gctgtgtattatagccatctatgttgtgaacaacatttttggtgccatgatttacccacggtttatcttgttttggttaataggaagaaaggtgtcactatgttctgtcttttttctctccttccacaagtttttgtttggtttacatttccatgagtctatgttcaggttgcaggttctcctttgcataggtttatattgaggctgcagataaacttgtgctaggagaaataggaagagataagccacgatgatttgtcttttttctctccttggtcaagtttttgttgggtttatagt

SEQ ID NO: 64031 - DNA, 375 bp, Zea Mays
aaagcccatggtgacctgctaggcctaatgaaaccattagcaagaaaatcgtccaattgccgcttcaactcaacctgctcctttggagccatctaatatggggccttatgaataggctgcgtacccggaatcagcttaatttcgaaagccacatcgcgctctggtggaatgcctggtagctctgctgggaacacgtcggcataatcacacaccacacggatgtcctacactcgtaaggcagcctcactctccaccatcatagaaaaaagaattcctgacttccttgtccgacgatccagaagtaattgggacaacaaggaaagagtgtactttggagtgcttcccaagaataccacctccctacccgacgacccc

SEQ ID NO: 64032 - DNA, 462 bp, Zea Mays
ttctggacttgaggataccttatctttgagggcccgaggacttcactaatgaagtagactggatgttgcaccgggtatgcatgtccttcctccactcgctcgactactaacgcggtgcttaccacacgagtcgtgcaggagatgtatagcagcagatcttccgccgactgactcggcgtagctcagtgcagtggcttgagtactggtggtgtggtcaagaacttcttcagtgcctctagagcttcctatgcctctgtggtccactgaaacttgtccacctttttgagcaatttgtaaaatggcatgcctttctcgcctagccttgatatgaacctgctcagggttgccatgcatccagtaagcctttgcacctttttctgtgatcgtggcgcttccattctcatgatggcatcgatcttttctggattagcttcaattccttggtggctaacaataaatccg

SEQ ID NO: 64033 - DNA, 1071 bp, Zea Mays
ctaaggctcaagcctcccacgttcgctggatctagcaacccgctcgatgctgatgattagctgcgcacaatgaagaggaagttagagaccattggatccctgaaaactagcatgttcacctagctgctcatcagctctccgggatgtccctatcctggtgggataccttcaacgctgctgtgagagatgctacctaggcagaatttgaggttgctttctaagagcatcatgtacccttaggaatcgtctagctcaaggaagaagaatttcgggagttaactcaaggagggagatccgttagtgaatacatccacaaattcatagaacttgctcgctatgcacctgatgatgttagcacggaagccaagaagatggcccatttcttaaaggggttaagaccagaactcaagaccatccttgccagccaagaattcctcagtttctcgcacctctcgaacaaggccatccaggaggaaagagcatgagaataagaaaaaggtcacctcaagaggaaatttcaagttctcgagctcaacaacaggacaggcactagagggttcgacgttttgggttcccttccaaagggtcgaacttcagcaaaccagcatgatccactccgtcacgtctcaaccagcctggtcaaagttccttccacacccagtatgttgcaagcagccaacctccaaccagtgcttgttggcactatggagaccccagtcacttcaagaataattgtccacagttgaagccatccgtacctgcctactccaactcggtgaatggccccaacaatgttccggcacccacctccaaggcaccctccaccaacagccagctaagcaagacccagttccatggcaaggctcgagtgaaccacatcgacgcccaagaagctcagcaagcccctggagtagtgcttggtgagttcctagtcgaatttacccccgctgctgtgcttttcgatcactagttttgtggaaaagcatggcatccctactgcatcattagaaattcccttggtcacccgaaccccagggtcaaaccttctatgtcaccacaagtgctcccaag

SEQ ID NO: 64034 - DNA, 449 bp, Zea Mays
caatagatgaatcgtagacaaacaagttgcggggaacgtggacaatttgtagcttcctggattagatcaaacgagaacaacaaaaatttgacggatgctggaaggcttcaatgatacagtggtaaattctttcttataaaaatgaggtagccaattagatcagaagagaatatgctaggtgtgcttgtatatgacataggcttaacaaacttgataagcaaatcactcagagaaaccaagcgatttagcttagtagctacatcccaaatagtgaccattcctttctttgaagctcaaaggttatcactctgttgaagaaaccacaaatattgcaatcattttgctcaacgaggaccgacagccgcgcaccagtccgctaccgccactcgctacgaggaagcctgggcacggagaagcatcgcggtcgccgccctgctcctcacgctcgc

SEQ ID NO: 64035 - DNA, 966 bp, Zea Mays
cttgatctacacggtgcccatgccaacaatagtgcaaggagaattatctcccatccgaacagtgcctccgttctgcacagctttataggtagtaaatagagatttgttagtgcaaacatgatacaagcaagcagaatcgaggatccattgagcatcatcatcagcacatccagcaaaggcaataagaacatcaccattatcagaattattttcggaggcaacagagacagtaccactgatcttacccttatccttgttcctgttctccttttctgcaatttgtaacaattcttaattacattgttcatcttcttgcagtatttgcaaaacaattcatcagatggcccccttgacttggagcgacccctctggttctttccctttcctttgccacctgaataggacttcttctgatcactgcggccatggacatataatgcttctccacttgagccggcagcatcttccgagttaaccatctgtctcattttttctttcacagtcaaagcttcatacacttcagccacggttagggtatcacgactatataggatggtatctcgaaaattgctaaacgatgtagggagggaacacaggagaagaagagctaggtcttcatcatcaaactttacctccatagatgtcagatcagccacgatcgccttaaacactgatatatgcgtcagaacagagcctccttcttgcaacttgtgggagaacaacttcatttttacgtgcatcttgctggttagatccttcgacatatagattgattccagcttcaaccaaagtgcagcagcggttttctcctccaagacctcctgcaggatattgttagacagatgaaggtgaatatgtgtgagcgccttacgatccttgctcctctcctcatcagtccaagtcctgatgtcttttctgccaaacccatcttgggccaagcttcccggcgatgggcctccggtccgc

SEQ ID NO: 64036 - DNA, 363 bp, Zea Mays
tttcttggaaataggggcggtgcctaggataagctctatggcgaactcaactttcctttcgagtggcatgcttggtaactcctcgggaaatacatcggggaattctgacacaattctaatatgaatttgcttggactccttgtcatctaccaacaaatagtgacaggctcctccttctagttcaggcaagtacagtttagttactacttcctttccggatggggacaccaatctgactgtactcttatcacaactgatggtggctttgtttctgtatagctaattcatccctaggatgacatctaacccttgagtaaccatcgttactaggttagcggggaagtctatcccccttatttcaat

SEQ ID NO: 64037 - DNA, 826 bp, Zea Mays
cacatgttacagataagttgtgggcggtgatggatgaattctcctatcaatctaatgacggtgtggttgctttgagagggatgacaagatatgagatgagattagatagttttgcaggggtaccccttagccttatataggtgatcggagggatatccctttacaagccttgaagtctatctaactttatctgagtctatcttcgacgccacatgtgctcctgctcatttggatttcggtcgcctttcctccgagttatctaccgagtatctagctctttagctacatgtgaaatgtgcgcgagaggcatcaacgctccttctgcgtcaaccgtgtataactcagttgtttcggctgtcacctttcttggtcgaactcgttcagtctagacgcggcccaatggtacgccttgctaaacgaactgtcggggggggcatcagatagcccatggaacaattttgtgcttataaggacccatgggatatctatctcccaaactgtcgaccagactatccgttggattcggcctgatgtttgacagattgtcgaagggtcaaggcgactgaaacccgttgtcggtcgccgcatcgcggaggcgtcgcccatcactacgaaacggcatgtcggccctgccacccgcagctataggtgactagatgggcttaactatatagactggcacgaggcatgaccattttggtatggcacgggctacacggtatgaggcacaaccattttggtatggcacgggcacgacacgatagtaagcgtgttgggccggcacgaggcccgtcatgggtagtgcttgggcttaggtacaagccca

SEQ ID NO: 64038 - DNA, 337 bp, Zea Mays
atttctttagctctggtagaaaaagaaaaaggaaaactatgaacagtattggaccgaaaccggaccaagtcagcccaacataggcagaagcgcgcccgcgtgcagactttgcaagtaggcccctgatgttatgaataactgaaagcgggttcgcagtactatttctagagtcactgacactttacagaaacctcccccatgttctatttcttcgaaggttggggtccacgacggtggacaacgcatggccgagctctggcgagcttacaccagccaattcacttaatgactgacgccctactttggccaagaccgaattcaagacccaccgattgtt

SEQ ID NO: 64039 - DNA, 275 bp, Zea Mays
tttgagtcgcgttccatgaacactaacaagtccataacctcatttgagaccgacccagttcgtgtagaggttgctgctcagttgcaacaagtcatcgaagatggttcagaggaaggcagcgacttacatttatttgccactcatttgttgatggagaaatggtatagagatgtatttgcaaccctgaagaccaaagaaggaaggaacgcttggctgcgccgtgctttcgagatgaatgttaagtccagttagatggtgctcgtccgacaacgatg

SEQ ID NO: 64040 - DNA, 317 bp, Zea Mays
aactctatccatggattatgattttcatcattatcacctttatccttatcacgtctatatcttaccttgatgtttatcttataccgtcctttaagatatcctcttttccatctcaatctgagcattgtactttacgtacttttcccttggtcgtgtcctcttctttgtcacctgcgagtttataactctatcctttgttgtgtttttgtttgttatttcctttacccttctcatcactctatcctaccttgtgattacattacgtctgttatctaaaatctccaatctcctatctcaatttgagagcgatgttttac

SEQ ID NO: 64041 - DNA, 864 bp, Zea Mays
ggccacttttgcattgcttcagtcttggaagggtctgcagctactccttgctgtgaaatgatgtgtcccaaatatgataactcggttttgccaaaagcacactttgatctcttaagaaaaaattcgtgctccctgagtgtaccaaacaccagcctcaagtgatgtaagtgctcagcccaagtagcaatatacactaaaatgtcatcccggaataccattgtgaattttccgagaaaaggagccaggatggaattcatagcgcactagaaagtagttggggcgttggtaagaccaaagggcatgactcgaaactggtaatgaccctagtgagtcttaaaagttcttttgtattcctcggattcctgcatccaaatctgatggtagcccgcagtgaaatccagactggtaaaatattgtgtacccgctagttcttccaaaatttcttccactaggggcatcgtgaatctgttcttgatagtgagatcatttaacttcctatagtccacacaaaaatgccaggatccatcttttttaactagaaggactggtgaggcaaaaggactggtgctagggtgatcaaaccagcctgcagtagtgtagtgacctgcctttctatctcatctttgtgaaagggggagtacctataaggcttagagtttacaggcactgatccaggcatcagtggtatgcagtgatcaaactgtctcatgggtggcaactgagtggggacagtaaacatgtcatcaaactcctgtaacaacaactgaatatgagcttcattagtctgaataccagaatcagatgtggactccactaggaccatggcccaaatgtcatttcctgtcacccatttctgcacttgta

SEQ ID NO: 64042 - DNA, 398 bp, Zea Mays
gcggggggcaggctgcccgggtggcgttccagcaaaacctagcgcgtgcatcagattttgttgatttgcttttgctcctgatcgtctcctttccctaatgttttcctctgtgctgcagctcaagctcgggggcatcatttcttccagcttctggaagccaaataagcacaaggtgcagaggctgtaagattgacttgaacgcttcttaggaccgaatgttctactcaccgtttttattagatgtagtagaaatgaagcctttgcttgtatttatgcaaagaatgtaggcagtcatatctatattactactaccaactgcattgtcgttttctttttttgtgtgttgcctctggttgtatttatgttgttgcctactcatggatgtgcattcctacctt

SEQ ID NO: 64043 - DNA, 821 bp, Zea Mays
gcgcgcacgtacgtccgtcgtagtaaacctaacccagccagctgagctgtgctgtgctgtgcggtgaataatggccacgcacgcaacgcaacagtagcggtggttgagaggatcggaggaagacgaagactaggggggccgggaaggatcgaaaaggcggtgacggatggatggtcgctttgctttgcttcccttgcaatgcaccccacccacccaaccttgtcatcactctcgccacgctactgtctcacgtcactgggataaatcaaatgctagtagtgtttttcgaccgaccgaccgatcggccggccggctcgctcgtcgtgcctcgttttttttttcttttccttttcctttgagcatgcaatgcaatggttcgtgcctggtggaggaggtgcagtgcagctaggtagccagagccagagccaggccactaatgcgcggctcataataatcattgtactgcccggactcgagaccgtgatattgatcgagggagggaggggtcgtcgtccaggctgtggttggtgcagtaggcctcgtggtcatgggccaggatctgtatgatccagttggtttgcgagtcgctgtcagctgcatatatttatatatataatttccagtactgatcgagctgagctgcagcagcggccagcgatcgagtagtgactgaccgcccaagggagaagggacggcagctgcatgcctgcatgcgcctggttgtggttggtagggcgatcggatctctgtgaaaactatgtgcgtgtgtggcggtgtgtgggcgtaccaatagcccattatctgcggatgacacacctctg

SEQ ID NO: 64044 - DNA, 944 bp, Zea Mays
actcggctgattggtaggagcgggggcagtagtgggacgaataaagataggctgcttgaatggatatgaaggtgggcgaggcgaagaacgattttgattaaaaggtcggatcaccaacctggttctcttttcaggcccttgatttgacctttcacctccaaacccctttgattttccatgtcctgcatttttggcttccactgccagtgtcgtgctgacagccttactgtaggtgaggtccaagcatgttgccatttttcgctaaagcctgtcattgagccccctcataaaacaattctttttctttaagtcagtatccacctggtcaatggcatactgagagagatggttgaatttgttgagatactgcatcaccgtatctcctccttgcctcaaccggataaactcttttagcttcatctggagtactccctctagaacataatgctctcggaacgccaatttgaactcatcccaggtaatctgatgtccaacaagctggactactgagaaatttgcccaccaagtacttgcaggccctcttaactattgtgcggcgaacaggggcttttgcgtctctgtgcatcgaatcaacccaaacttctgttccatcactcttacccattcatcggcttctaaaggttcctcttctttaatgaaaagcggtggtcgagtctcagagaattccaaataagtagtatcacacggtccttgtgggggaactctgcctctgtgcggttggaactgattgctcaccatttcacgcaaaaagcgtgtattatcagcggtggcattaaccagggcagcgatagcctcggccaatgttggtggtacttgtggcgggtagggagtatcctccctaccgcgagatgtccctacaccatcatgtgcacgagtccgtgatggcatctgaggcaaagaaacatttggaaaaaatataacat

SEQ ID NO: 64045 - DNA, 541 bp, Zea Mays
tgtacatcgatttcgatgcggtgttcgacatggtgcccttttgtcatggcatcaagagagaggattgccagcatgaggggttcgatggcgacgccgttcactcgccgctgtgggcactgggtgactgaaatgggtatctgagcgaggcagggtgagatggcaacttggctgacttcagtagcgttgttgttctgatggttctggcatgattaggaatggaagttagctttgctggtagtcccttcagaattcagatcgtttagctaagctttacatactagtactagtagtaatgagtagtggtcataatattttgttcggttagctggaagctgtggactataaggatctgcaggtggaatgctgtataggattaggcttagagatccatagtgaccttttgttcctggttactatggaatttactgatgcaccgagtcgtcaaatgctaattgggtaatcggtactccattcctttgaaattgtcagtcgctgtgatttcgtagatatgttagtttaaccatttcatcacccggtttgc

SEQ ID NO: 64046 - DNA, 578 bp, Zea Mays
ctgaaagtcaagagtctgaatgcctttgaaaactaaaactttattgacgatgaagtcccctgattacagagtacaatgttgcttcaagaatttttgaggcctccctagggataaaactttctaagatgctctatgttccatgagttccccacttccgtgccatccatttgagtaagccggtatgatcctggccgagtgaccgctgacacaaagaatggcccttcccatagtggggacaacttgtgtcgtccttcccccgttagaattcggtgaaggaccgagtctcccactgcaaaggaccagtgtcgcacgactctatcatgatagcgcctcaaggtctactggtatctagccgactgaattattgtgttcaatcgttcttcctccagcacatcaatatcctctagcctaatagcttctgcttcagctatgttttcgaaaactaacctcggcgccccaaacattagatcagcgggcagcactgcctctgacccataaaccatgaagaacagggtgtttccatgaagagctcgactgggttgagttctcaagctccaaactacgtaaggaagttctct

SEQ ID NO: 64047 - DNA, 762 bp, Zea Mays
gaattcttttgaggaggccgagatgacagtcacgaggatcatgcatgtgcagacatgcttgttgaactgcatatgaaatgcctggctgtgtcagagttaagtattgcagtgcgcccgtgagacttcgaaacaccgatgggtcagacaccttgtcaccatgagagccgggaagcttgccgctggtgtctattggcgtgagtgccggcttgcacgcgctcatcctcgcccattgcaggatgtcttcggtgtactttgcttgggacaagaagaagctgaatctcgctcgtgcgccgaatatcggctccgaggaagaacatgagatcccccatgtctttgacagcaaactcagacgtaaagaagcaagtacgccagatgagtgccacgcttgaagacgaagagagtgagtcagagcgtgtcgatcgaaatccaatggagacgacgaacttggcaaagcgatgaaaccgagcgcgtggtgcctgtttcagcccgtagagggacttggacaaggcgcacatggcatccggcatagaggtgtccacgaatcaagcaggttggtggctgaagacgtgttcctgtatatgcccatgtagaaaagcactggatacatcaagttgtcagtcggtttgcagcgatggtgagcattgttcgaaccgtgcctggcttgattactggagcaaaagtctcagcgaagtcgattcctggtcactggatgaatccacggacgatccagcgtgctttgtacttgttgaggctgccatccgg

SEQ ID NO: 64048 - DNA, 469 bp, Zea Mays
gtttataaatacaaggctagacttggtgccaagggatttacccaaaaggaaggcgaggattattttgatatataatcacttattgctaggttgatcacaattcgtgtgctaattgcacttgctgcgagtcatgatctacttatccatcaaatggagataaagacaactttccttaatagagagcttgatgaggagatctatatgaagcagtcaaagggatttgggacatctagataggagaacatggtgtgtaggttaagaaaatccgtgtatggcctcaagtaggcacaaggcaatggcatgagaagttcgatagaactttgacatcagcaagctttttggtaaatgaaggtgacacttgtgtgtactatcgatttgctggtggtaagggagtaattttttggactagtattgatgtgataaatgatgtagaatcatttttatctcaattttttatatgaaggatttg

SEQ ID NO: 64049 - DNA, 547 bp, Zea Mays
attaggttcaatcaaaacgtgctaagaacatataacagacaactgcaggtctgcagcacattttaaggatgtacgtggttgctttgcgtgtgaagaattgcaagacggtggaagtgcttgcttgatgcttgtctgtctatgggaaaagagcgtgtacccgccatggacttctggaacgaaagtgaaacagatggacgctggctactggctagtagctaaaaaaagaacacgagctgacaggttgacacgtgcggccagcgtgtgtagtgagtccattttgcaattcacaacatcacgggagctaaagccagcgatggagccatggaggagaaccgccgccagacacaaaccctagcttccaggttcaggttcctgctggctgctgtctcacggtcagtcggtcacggcctcacgcgacaaggactccaggccagcaagcctgcgacctgcctcacgggtgcatcagccacggccaggcctatgggctccctgtctctatatgtgggcttgggctgtatgctactttcggaaattccgagatttaaat

SEQ ID NO: 64050 - DNA, 338 bp, Zea Mays
aagaaggccatctcgcgaccgtccgatccggaatgtatgggtgggattagatccggagttaatccaataagatacgtcgatcgtcagtttgagggctgtgattcgatgccaggtaccccttcacctcgttagaatcagaaccgtcaatcttagatcagacgtcctgggccgttctatgtcgcgtttcgtccaggttcgatccgtaccgcgcatctcgaatcggacggcatggattacttgcgggtttggtgtgcggggaatctaatccacgcgctcggctacgaatcagacggccatgattggagcttaccccttcgcccgcctattatgcataagag

SEQ ID NO: 64051 - DNA, 502 bp, Zea Mays
tgctcaaccctttcatcccttccattattccatacccatacagatgtcagacctttgaatgtcaactacaagtgatgtcactaaatgcgaagaatgcggtgcgttggcaagtcaaaacaacactataaataaaacagctgacgaacagacattcaaggcacaaaaagatgcacagccaaaccaacagacaagtgaccttggaacatgttgttgttgtgagtactatggaattccttgtcgctaaatcaatgcaaatgaaagtgaaactgcaaaacagaagaaccagattttattttctggcataaaagacaaatgtctccccctgaacaactaatagcagtgtctctcatacctaatgcactgtcagttgatgaattgcaaagtattccaaaaaggaaacatcacaaggatgcccatccccaagaagaaacacatgagtgttacattgatggatggactctttcttgcacatagttacagcctcgtggtcacatcaggtcca

SEQ ID NO: 64052 - DNA, 493 bp, Zea Mays
ccggtgtatccccttgggagcatcgcactcccggttacattcgggactgaggaaaacttccgcactgagaacgtccagttcaacgttgcggaggttaacctccctttcaatgccatcattggcaggccggccctgtaccggttcatggccattgcccattacgagtacttggtcctcaagatgtcgtcccctgctggggtcctcaccgtgtggggagaccgccccgctgcgcttgcagctgtcgagaagttgcacgccctggcggcagaagccgctcgcccggatgacgaggggagggacccctcgacttcctgtaccaagacgccttctaaggtgcctaaggtgaaaccatccagagtagacggtgtccccgtcaagaccatccagcttggcgcggattcctcctagactactcgcatcgcggggaatctggaggagaaataggaaatcgcgctcgtcaccttcctccaggcaaatgccgacgtattcgcat

SEQ ID NO: 64053 - DNA, 517 bp, Zea Mays
ggaaaagaagcggttactgcaaggccatgtaggatgggtgcaagcacgaaacatgtttgaggccaccttctctagcatgcacgaggacatcgtacttgtactgtgaagatgagcaatcgcccactattacagcagcaagctcaccattggctggtaagttgtactgtgtgtcgtgtcgtgtgttacagcctaacaatcgcaacgtcacattttggtcgccttgttcgtctaaacgttctttagcaaagcgaaatgccgcgaccaacttgttatgctcatctagcatgttaagtaataaatgggccacctctggatccgtacgatcatggacgtcagcctcattctcaaacatgcccaacctattttgcacctcgtgttcagtgtcatatatgtaaagttgtgcaaactgtggtcgcaatccatgactgggtagcagcgagccaatgcgatggtgtacgacaccattgattttgaaaacataaggtgttgtaccgttatttatcgatctatcaacgac

SEQ ID NO: 64054 - DNA, 501 bp, Zea Mays
cttgcggtgtctgttcatcgccgttgagttcgccacgacgaaagacaccaatcacacgcgccagtgacttcctgtttctccgaccgccgcgcgtcttcgtccaaatccccgaccactgcttaagcccgttataaattgagcgcactgtgagctccgtagggtaatcacccatccatagcacccacacttgcctccaatcgttcaccagagaccgtgaattgctcattgcccccaatctccgtttccaccaccgtagaaacacctcgccgaggccagcttgctccaggtcggttcatactctctggtcgtttgtttagtatccttaagttctccttatgatgctcgacccctccaattgagctagagtccctaggatcgccgggaacgtgcttggttagccgtgatgtccgctgtcaacgtgggcagggcgtgttagtgcgccactggtgaaattagttggggggaaacactccttaggactggaattagatttagaccgaa

SEQ ID NO: 64055 - DNA, 664 bp, Zea Mays
ttaaattagaaaactgcacagatcttaataatacagagaaaaatataaatacttctagacaaggcttgagaaaaattgtggaggtactcacctagtagttacactgtttaaaaataataaacactacagtatacaaggctaaacaagatatatctattaaagcctatttctgcccaaactttaggaaaatgaaaaagggggtagaaaatagaaaccagagggtgaccacattttttctagaatgcctaagtgatgtagtttttaggaaaaatatatggaaccctagtccagtaatgatctgagtttataatttcaattaggtgttaagaatttaataaagaccatgactaaaaatataagggcacatgcaataatggcaagaaaaattcagtagacccctgtccactaatataccactgcaaaaatgataaccaccccaaacgataacaattagtgggttaaacaaataaaacttggattttccccatacttcaagtaaatcaaaagaaggactaaaaatgggaaacaatgagcaacccctatttttacctaaattactatgtatactacaagagaaaaatataatactaaggtaaaaatgtaatggaatacacctcaccccctgcccatgaaaaagaccatatattccaagaaatcttacaac

SEQ ID NO: 64056 - DNA, 389 bp, Zea Mays
cagctggccgcctccgccgtgaatgccgttaatttattctgcattacagactggagagaccacggagccgtcaccgccgtgaaggaccagcggcagtgcggcagctgctgggccttctcggcagtgggcgcggtatcatttccttgcttgttttacaagatccattttgatggcggccgtgtagtcttagctgagtgataaatccaggaaccgagtgggtccaggtccacgtgaaagggatcctgttgcgatgttggtccttactctggtcacaacacaggtctggtcaattacaaaggttctgcttgttgttgcttttcctacatgttaataatttgagtttaccaaagattctttatgatgttcagtttgcattttgatcattaacc

SEQ ID NO: 64057 - DNA, 663 bp, Zea Mays
aataaggtgaaaatattgctccaaaaggcctcatttcctttttttaattcctcgaaactctccttctaccctctaaactaagggtctaaagtaaggggagatccatagttcgttttccctttcatgcacatatttttcgtgtaacttgaatattttcccgcctctctgcatatataacattgttggcattcatccacttctctaagatgtcattgtgaggtcagacaatggatatgatcgcgacactgtggccctatacgacttcatcgagtttgtgggagagtgactgccctaccctagtttgtgggggtgtgactgccataccctgcctaccttaagtaggcgacctccacgaggctaggaaagatagcagttgttgcaccatgctagaccatggagatggagattgcaactgccactgccacactaagctagtccttcatcacttagggtgtgcgtcactagtaggtgaattgtatcgtctattgcgctcactaccaccaccaagagaggtgtgcattgcaccatggtgagtagatgagccagcacactgtgggggaatatatatccccaggtcatcacgaacactaaaacatatcatgggacgcctgatgggcctcccattggttcatcctacgggatgggccaacaggttataatcag

SEQ ID NO: 64058 - DNA, 596 bp, Zea Mays
tctacaccatagaggctaaatacatagcaaagcatcacaatttctacgagcacacattagataattatgattctacaataatcataatattcaagataatcagacttaactcacataagccactaaataaaacgttatcaaagcaaagatcctcacgaaaacataacctcaacagtctaacgtatttatataaatttagtatatggtttctcagatttcgattgaaattgacttgtcgacactaatcgcttccacttacttcattaggtaccaacatctatctacgacagttatcctaccacgagacgaagcatagaatgtcttctagtaaagcattaatttctttaaacaaactaaatcggcacgacaacatcgtcagaacttactagctagctagataaaatacttaacctagttttcgcattataatctaatcacgctacgtatacaaattttccaacacattctttatagaatttgtacctcaaacctatatttcaccacacctcacgactacttcataattacggcggtaaccaagcagcatacaattacgacctttatcatgcatcaaatacacccacgacgcgtttaag

SEQ ID NO: 64059 - DNA, 522 bp, Zea Mays
ctaactcaaagcactaaaaacaaatatgtaatgcaaatagttgtagaatacctcaccgatagaaagatttactatcaaattggatatcgacttggcaatgaattgcacattaagctcgtcattaggttgaatcctcaagttatgtccctatcagatatagtagaatataacacaaggagaagggatgctatcccttacagtttacatggcactacaatactagtaacaaaatgaaaaataacaggaaacacctcacctccaaaggcatgacagattccacgcacgctgaaagcctaggatgttgtctagaggccaaaacaaggaaagagttggccgcctaggcctaagcattgatggagccaacaccctggtcggaacaagagtcgggggaagagggagaaaatggagccagggcggctaggcctaggcagcggtgaggcacgtggggttgagcttggcacctcagcctaggggcgggcccgcggctgtgcactaggagcctccacatggaggaacttgact

SEQ ID NO: 64060 - DNA, 634 bp, Zea Mays
aaatggttttggtatggtggtagtaaaaaataacatgttgaatagtttcattactattataaaaataacataacttgattcccttccggttctttttgctaagttatcctttgttaagatcacacctccttagagataccacaagattattttaatttttaatggcactttcaaatttcaaatcagtttaattatgattataagagacatcttggtccaccattgcccggtacattgaacagacattgaattttccactcttatgtatatttcaagagaaggtgtctctttcatttgttaagttgacttgggcaatcttatccatcaagttttgccattcaatgactttatcacccaccaacgctcgatgaaaggagatattcaacgatgttgtagacataattgtctcaattgtatcatgtgggtggcatacaaactggtaaaggttaggatacaactcacttaaaggtcgttggtctacccagatgtcttcccagaacctagtttgtgatccgtccttaactataaaggatccacgtgccaagaaaaggtctattacattcataataccttcacaaaaataagaatcatatggtttaatcatagcttgtgtcaagcatcttgtactcagata

SEQ ID NO: 64061 - DNA, 520 bp, Zea Mays
aagaaacgccaccgtcggcttcagcgtcaaaaacaccagctgccgaagctgctcccaccgtagctacaactaccgaagctgcggcggccgaagccacaaatcttgaaggcgtactttctgatattgataagatgattttggatatggccacggaagaaactgctacagctgccaaagagactctggccccagcgcccgggaaagagaaggagattgtcgaggatacttcggaggaaaaggattttaattttcaaaacatacttgggcaaaagttgtctagggctgagaaggaagagctgagggattatgcaatatcatgcggctatcaaccaggagcattgctcttcggtggcattgacgaagagagcttaggatgtctccgggaccggactggagcgaaggttgtcagcactctatcgaagagtgttggctttccaaagcttgaggccgaccttagcagatattggcagcaacatatcgccggcagcttgttttattctaattttaaggtaaagttctt

SEQ ID NO: 64062 - DNA, 487 bp, Zea Mays
gttattttattcattacatcaagccattacatgacacgacatcctgctatcacaagttcgttacacgcgagtgctatctagggtactcccgcagtccttctctaatgtgtccccaaattccttgagaagatcatcaaggctagccagggacatctcatcggtgtcggataggttccttggagggttttcttccttctgctcagtctggcatccttggctcttggtcttcttgcggattttctttgcgggggcaagcttcttcatcttcttgtcgtagtccatcttcagtgtgcggtaggcttctcgggtattggtttcctcaccttcagctattgcaaggctctcttgaagggacactttttcttctgagagttccctgactttctgctccaggctttccacccgggaggttagagaggtgcagtggagggtgaggtcatcatattggttatcaatggtatgaaggtatccagccatgtagacaatg

SEQ ID NO: 64063 - DNA, 298 bp, Zea Mays
aaagagtttacttaattattatttaacttgagtatagaaatcatcgtactatcaagggggttcaaaaagaaggttggtgtttgccaaagatcaagcctctatattcaaaagcaatttcgaaaaccaaaatcccttagatactctgtgtatgactattattaggattgagaaacgaagagtgttcctgttgagaagtagttgaacttcttcagctatagttgagcttctttagctgcagttgagctttttcaactgagttggacttcttcagctgcagttgagcttctttagccgagtt

SEQ ID NO: 64064 - DNA, 282 bp, Zea Mays
ggcatatttttcaatcatcaggacagaaagttatctactgttgttgtaaagcttgctttccattatggtagcttaaattagttaacatatgctcttttgctgtcaaattttcagtatcctaaatccgttagatatgctgacataaaaagaaacaacaatattgttttggtagatttacacaagtttgtgtacacattgacatcgaacggtcaagattcatgaagggggtgtttgttttgtgtaatgaagcggtccgtcatcatctcactctttagttttttg

SEQ ID NO: 64065 - DNA, 602 bp, Zea Mays
tacaaggatcctcccaaggatccgagaagcggtcgaggttggtgatccgtccctttaacccaaatcgctcttttcctcgtccacccgcctatccttccaagcaaccagttttcatctgtcccactactgcccctactccaaataatcagtcgagtgctcctggtactcgtttctcggccttacccagctcatctaacagttgcttcaactgtcggaagtttggaaatttcatcaaggattgtccctatccgaagcaaaataaattcaactttcaacaagcttctggaagcacatctcatggcaaaggaaatgtggcaagcactcaggcacgtaaaaatgcaaggaaaactgggtgagtctactatactcaagtggctaccaccccggaaggagagctagtgatgatgggtacgttttccgttgccaatcatcacgccgtcattcttttcgattctgatacatcacatactttcatgagcaaggcttttgctgagaagcattgcatacctactgttgaatcaaagaagggttttgttattcaatcacatggaggtcaaatttttactaaggaagtagtcttccacgtacccgtaaatttaatc

SEQ ID NO: 64066 - DNA, 1562 bp, Zea Mays
tgtgggctagcctgtggtgataaacatgattagctgctccaattgcttgctggtgaggggggtcttcgcgttacatgtcggtgatttcctgctctagtgcccttgatttttcctcctcgtccatgatcagttgcctcactctggcctgcatattggttccttgtcttttggatgcaaggatctctctacttctgaaggttgctgttttttatgcgaagggcccgtagcttgagctggtcttcggctaagattcctaggtcttctccctcttgcaagatatctccatcttctagggctaggagatgtgccgagggcgcaaatcctggtggtgggtcgtcataagggaggtcttcagagctacatgtatggacactttcctgtggtgtgggttggtcttcggctgagggggcttgttgttggttgcctccgtctcgttttcaactgtggcgggtaaggtgtcatctgcgagggctgctttgcctttcttttcgacgaggactacttttgtggcttcatcgagggagggcctggctctggtggtcgcctttttgggaaccaccaggggtgttggttttcatagcacatatggtgggcaccgaatgttgggaccgttggacacatgtacaggtgaccccatacactcgtgaacttgaatagctcaggtgcacgacaaggtagcaagtagggaattgtggcatcttgttatgtgtgtcccatccgtgtatagaactgggtatttataggtaaccgggagggtaggtgtacctaagtaccgctatacccccgattaccttttacaatccaagaatattccccacaatggggtcattacagcatggcggggtttgttaatctagctacacctaaaagtctaccactctcgggggcttagaagtgggcctaagtcatagtggggcaaagcctaggccccatggagaattgtcgaggccttcgcccagatatcagacccccgacttcatggtaatcattgagggtgcctttgctagggttgtgactccatcgtcgagggggtggagtcgagccttcgcccaccgtgtcaaaggcggccacgagccccctattctcgcacaccttttgtcgagccttctccagtggcccttcgctcagcatttctcaacgaccatggtcgtagactctgtcgctggcgtagggaaaagtcctctatgatagcagaccatgtgcccaaatagggttaatcacagccaggtgagtccaatcgatgatggtccgacctttgctccaacaaaggacaaggtcagcagagttggtatagtcaccccaagccttcgtgcatctctcacgacaaacgaggggaacttcttcctcttcttcaccatcacccccattgtgtagaacatcctactcttaccaaccatatattttcccgccatcttggacgtgtttgactcacactgagcaaacacaagttttgtgctcagtgggcatcgaagcctcctcctcttcttctcctttgggacatagacatccacttcttgtgtgttgttgtgcccacgatttgcattgactcgactgtccttttc

SEQ ID NO: 64067 - DNA, 390 bp, Zea Mays
cttcatgccagcgccattggaggacattctggcttcccagtgacgtatgctcgggtcaaacagttgttctattggccacatatgaagcaacatattcgagatttcgtggctgcatgtgttgtgtgtcaccaggcaaaacctgatcggtctcgttatcctggtctgttacagccactgcccgtacccaactatgcgtggcaagcgatttctctggattttattgaggggctgccgcagtcaggccactacaactccattctggtggtcgttgacagactcactaaatatggacatttcattccattgcggcacccattcaccacactcactgtggcacaggccttcatgaccgcagtttaccgccttcatggaatgccagagtctatcgtc

SEQ ID NO: 64068 - DNA, 1455 bp, Zea Mays
ggggaacctggctcagagcttcgcccaagacgagagcgaggtctccgtcactgcagacggacagcgacgagtcccctcggcccctcgccgactccgccgcattgcccgtggtggccgacgacaagtacgtgtgggcggacaagtaccggcccaatgtcctcaacgagttcatctgcaacaagaccgtcgccgccgagctctaccagctggttggtgatcacacgaccacattgcaaacgttgcttcagagtttgccttgcagtttcgtatcagagcagcttttaggattgtggccaagttcatctgatacatgggcaagttcgtctgttgcatgcaggttgttgcacaccagtgcagacatttcatctttgaaggcccgccggcggttgggaagagaagcatggtactggcacttataagggatgcttttggcccccatgatctcaaggtcactatggcaaacttggcttaaattactactagtcctcatttaaagaagctaaatggctaaaacctcggtgtcttcacaatttgttatttttttctccatcctgacatacgcagatagaggaacagacaaagagatttgagctgaaggtactttatatgcatgaaagcgttttcccctttttttaactccatggtcactttcaccaaagtgatcaagttcttttttcctttgttgaagtgataaagttgttgctattgttgtgaattcataaaatgcaaccaactggaatcatcagcgactaattgaccgatttcacactatagggagaaattagaaagcacatcgatgtcagagtgaagacctctgagcatcatgtggaggtgagcttggctgatttacatggctacgagaagtacatcataaccactctgttgagtgaatccatcccatcaccaagctcagtttgtgaccatactaactgcagaggtaacatgcaatattttgttaataaagctaggaatttcaaacgattgcattgcattgcatgctccgcattgatttggcagcagttttacatgctgcgttcatacatcggttgtttacatatgtgcagtgattgttatccatgatgctgataagctctcgtttgatcttcaacattatattggttggtttttggggaggtatgccgggtgcaacaaaatcattttctgctgttctgatgcttctaatcttgaagccattaagcatctctgtaaggttgtgactcttcaaccaccttcatttgacgaggtacttcactacacaacttgttgatcagtgttatgtgtatgattttttcgcttattgcactaggcggtttgttaaaagattgtttgtttttagataataaatgttctagagtacattgcaacgcaagagagcattgatttgcctcgtgatcttgctagaagaattacagtcggcgcaaacaataatctccgacagacaatacgctcttttga

SEQ ID NO: 64069 - DNA, 297 bp, Zea Mays
cgggaatttgggtacattatatcaacaggcaccgccgtgatggcagcgtgccactgagctgctgtgccatcaccccatcgtttcgttcaggcccatcagaattcatgatctgcaccttctcatcatcaaaagtggaatttcgtggtccgcatatgaatttggcctacgaggcgtcgagtccaaagcgctagaattacaggtccgtctaggcagcccagccagcgaaaatgactgttgccacacgattaggcccaagataatcctctggtccttgtgttttgtcgacttctgtgggcc

SEQ ID NO: 64070 - DNA, 922 bp, Zea Mays
ggaagtactaagttgtaccaggacctaaaggaaaagtattggtggtacgtcttgaaaagagatgtggctactcatgttgcactatgtgatgtgtgtcaacgagtaaaagccgaacaccaaagaccagcaggattgctacaacctctcaaggtaccgaaatggaaatgggaagaaatcggtattgatttaatagttggactaccccgtactcgggatggctatgattcaatatgggttatagtggacaggtagactaaagtggcacactttatacctgtgaagacaacctactcaggagcccagttagcaaagttatacatgtcaaggagtgtttgtctgcatggattaacaaagaagatcgtatcagatcgaggaacccaatttacctcacgcttttggaaaagactacatcactccatggataccaagcgaaactttagctcatcttatcatccacaaacggatgggcaaacagaaagaacaaaccaagtgttggaagatatgctaagagcttgcgctctaaagcatggtagaagctcggataagagtttgccttatgcagaattctcgtacaacaatagttaccaggcaagtataaaaatggcaccgtttgaagcactttatggacaaaagtgtagaacatcgctttattggaatcagactgaagaaagtcaagtatttggtccagaaattctccaagaagcagaaaagcaagtacagattatcagagagaatttgaaaacagcacagtcgagacagaaaagttatgctgacaatagaagaagaaagttgatatttgaagtaggagactttgtataccttaaagtttcaccaatgagaggaatgaaaagatttaaggttaagggtaaactatctcctcgctacattggcccgttcaaaattttggaaagaaaaggtgaag

SEQ ID NO: 64071 - DNA, 807 bp, Zea Mays
gaattttgtttgatctttgaaatctggagttcaaaacaagagttcaaatttagtttgaatgtttgaaatagaaaagaaaagaatggaaaagaaaaagaaaaagccaaactacctgtgttgggccggcaagctagaattcagcccagtctcctcttctctcgcatgcgcgcccggcccatcctagcgtaccacacgcatcattggacgtgacactagcaagccaggcccacttgtcggccactcagcgtgcaccagtcattcttctagctgacgtgtggggcactctccccagccttgtttgtcttccacgtcgcggagctttcggcgaggaacattacaacaaccgccccgatggggtgagccaactggggggggatcctctctgctataaaccaatgcggtagggtcgcctaggccatatcgacccaccccaatcgcaccaggagcaatagccgagagccacttcgacgcagagtgtgaaacgagagtgagagcaggccgccggcatgggaaatcggaaccgcgacaagtctgggcttgggactcggctttgggggatcatcgcacctcgtagaaggcgtgctcctcattgattcgggcgaagttcactggagccctgtgtaatttctcgtcgtcgagcctaatccaccacagatccgctcttccaagtggattgcccgcctgcgcgcatcatcctcggtaaggtttcctcacccgcattcgcttttatttccgcatcgtgtagagctgtttgggttagaggttggggcgctaggaccgtagactcgcctcatcggtgaagtcctc

SEQ ID NO: 64072 - DNA, 819 bp, Zea Mays
ccatgttgtagacatacaatgagtctccacttaattaacgggtgactaaagtttagtccatgtcacatcggatcgccacatcattatatagtaaatgatttattgtagtacaaattcctatatattaaaccactgccgaacaaaccgctatagctagactatccacatctttaacattcttaacagtcgtccgatttatgtcccacgactgaaggaggcaaaccgtagaaccccacacacgtgttcctcccaaggccatgagaaacttctaggtggaaatcgaagcatcgctccataataaaagtagaaaaatcaggcatcgtcgtgtccgccgtggtggaaggggggaaaagagagcagtccatagcgaccacagcagcgggtactcagtgtcccctgatctataagcgcttcatctatggtctgtgtggtgcggacaagacatcgttgtctccatcaggtcggcacactgtcgatgtcggtgaccatatgattgtgtttgcagccatccttcaatgccatctgcttcgtcgcgtgtattattgttctctccgattaccatgataggtcgtcggatgtcgacgtgtacacgtgtctagcaaagcagcccgcccacatctaggctatcgtggtcatggtggtcggagccgtgcagggcgctgtagtcgatgggctcatggacacacttacgcccgccaatagggtcaattcttcgcacaatcatttcacagactaaactgccctttagaaacacatcattttaattaatattattataaatttgtttagaaccttataaaattattacctatttttaat

SEQ ID NO: 64073 - DNA, 438 bp, Zea Mays
accaccataaatcaccttagatggagtcatgtgtagagctgtttggaaggatgtgttgtagcagaactcatcccaaaggtagctagcacaaccaactcttcgattggtctctactcgaccacaaagcagtgaaggtaaactctcaaaattatatatgttttctttgactgacatttgtttgcacctagaaggcggtactcatgcaaagttgaacattggggaagcagaagagctccatccagaacatgctagtgaagacaagatcatggtcactgatgatggacaaggagttccgtgtagcttgataatgttgttgaagaagacttaagcgatggaatcagcaatttatgggtggcccaagggaatgaactgtgcgtacatggagaagcaatcatccaaagttaagactattatctgcccacaaaagcgaggaaatcc

SEQ ID NO: 64074 - DNA, 555 bp, Zea Mays
ctaaaatcagttgaatagggctgactttggagctttgtatttttaaaaatacaaggaatttgcctagggtcgacacatcaaacttgtagagatataataggagtgcaactttgctgaagtaactaagctatgatcacatacaaagtttggagaaaaatgagctcaaagttgtgctgtcagtcacattgataactgaattaaggtcactagtgacattagcaagacttttgggtcaaattggaataggatctagtgctcgattgaggatagttactatagtcgatttgtagctggttggttgagctacaactttgttaaagacggattagtaagtattcacatgaaaatttgagatctaggctctgcaaagtggtctatcaagatgactgaatgagaaactgatggtacagtatcgaaaatatcccaggttcagttcatctcgccgccggcgaccacgcgctcagattcgcgcctgacgctacgattcgtgctcaacggagtactgatagttgctcggggtagtaaatatcgccttgtggataaacttgagccact

SEQ ID NO: 64075 - DNA, 622 bp, Zea Mays
tgttgggtccaaaccttgggcctgccacatctgaggatcccacaggggtggggggaagatttggttacctgaattggggctggcaccaggtggtcgaaaaggtgtatttgagttgttctcgcccattctggaatgaaatacatagatacattaagatggacaacagataacaaacttggagcataaaatacaaactcgaattcattgcacataagggtgacagaaaatgatcataaggatgcacccattcgcatacattcatataaaaggatgaagcattcgacataaggttcttacaaaacgaacattagcttgaagcagtcctacatcggttacgcatgcatcacagacataacacagaagttcctaatttatttggatgcatatgtgccactacgacaaaggtcgaggtaccactcttacatgttccaaatgctatacctagtggacctgtccgagtcgtaggagtcattgtcactgggctcgtacaattctggcgaggaaggggggtgtaagtgaattgtctaggccttgtctttgcaggctcagcaaggtgaatttgttcctccatcctctccttctctgggtcagaccgtgctttgctctccagtgcatcctgctc

SEQ ID NO: 64076 - DNA, 559 bp, Zea Mays
ggcggagatggagaggtgcattaccacgggcggcagttcgcttctggcgtggtggttcgccttctcagtactcgaagacccgcacaccagctgtatgacttgtggccccgggcccccgtgttagaggatgggtcgctttggtgcgcgccaggcgagatgagcgcgagcaggagagtcttccttgaaaagggattctccccgcgtgcagcagttaccctttcgcattctctgttcttgttgcgcccttccgccttcgagctttctgtgccccctttgcattcgcgttctcctgctccacacctgcgccaccgtcgacgccatgacttcgcttggccaacccgaccgcttccagaccgaggcgacactcgatgtggtgcgtaacctgcttggatggggtgcgccggcactcgccaggaggatccgcgctggcgccgtccccctcggtgacctcgccgtcggggagttcgttttgttcacctcctacatctcctgcgggttggcgctaccaatctcgcctttcttcctgatgttattggaggagttcgacctccagcttcag

SEQ ID NO: 64077 - DNA, 460 bp, Zea Mays
aatagcctgcaagcccaagaaatcccctgagatccttgacattcgaaggaacaggccaagatgccatagcttcaaccttggtaggatctgtagctacgcccttctggctgatcacatgccccaaatatgctatttattgtttggcaaacgtgcatttagagagtttaacataccaacgttgttgatgcaaaatatgaagtacctgctgtaaactatgcaagtgcttggcccatgtatggctgtaaaccaatatatcatcaaagaagacaagcacacccttccgcaaaagtggggccaacgcagaattcatggcgctttggaaagtcgctggggccccagaaagtccaaaaggcatcactcgaaactcatagtggccgtgatgagtttgaaatgtcatcttgtgctggtcctgtggattcatgcgaatctgatgaaatccagctctaagatccaaagtagt

SEQ ID NO: 64078 - DNA, 749 bp, Zea Mays
cgtggtgagaaacagggttgtcgcaggagtgttccggcttaccttcgaccgcgcgcttggggtggggcttgttgacttcccttggtagcggggaaggctcttgtggtgacgctattcggagttggtcaccaacatcgggcgaattgctcgccgaacttgcaaaatcgccacggcggccccctttccatgggcagtgcacgtcgcgccaccgtcgctggtaagaactcccttgacgatttcgtgctatgttcctcatcatttccatgtcggtgggggaatccaggagggccagggcgccagatcatcgtgtcgccagtgaggcatcgtcgcggctggcttgcgcggatgcgctcggtcgtcggtaggtaggatacgaccgctcggtcgttgatctcatgtctaacagacgttattatatgtagggtcgaagtagtgagaaccgtcagatcttgtggcatcggccgcaattagcactgcgtatcccttcgcctagattaaatcctagccgtcagatcggacgcgggcggacaagattagaacataatgtaaccaggtccgatctaatctgggcgcttgatctctaatcggatggccgaaatgcacccgtaccctttcggtcgcgttttgttgcaaatagaccccctgttattccagtatcaacccgcagtcctggcgtcagtggctctatgtcttgggattcttaccccgaggcccctgctgttctctgttttaatgtgcccagtccaaag

SEQ ID NO: 64079 - DNA, 522 bp, Zea Mays
ctcggatttcgataataataggctagtcgacaagtatgttgtatagcggcctaggttgttgctttggttaaccaacttgttagatggctttagttaagctcgtagtcacaatgatttgctggttgtagtctaaatatgtatggttatggtcgcggatgaaaagtattagtgctcatgtgatgtctaagttaaaatacaaattattgggtaaaaagcgcttcgatagtgattattgtggagaatgcgttgttaattaagtatgatacttctagtgctcaaaatgacatggataaaaattagtgagtctacttgttagtcctcatttgattattttaactctaacaaatggtaaagtgttagaataattcaagtccctagatcatggcaattcttgaattatatagaagatgaaatttattgatgactgttttggactgcacgcagtgatttcttcgtgtttaatgtttgatgaacaaaatcatgttttctgtagagaagccatatagaaaagttgtagataac

SEQ ID NO: 64080 - DNA, 556 bp, Zea Mays
ggacgacctactgggagagaatctggtcgattatggagcctcgttcgagcatgcaggtatggatattaatgtaattacattttcagccgattatgatatcactgacaatgatgaatctgtagttgctcaattcgattttggtcctaaagaggtcgtcttcaccaaaccaaaagaatcggtcaaccagttaaagtcgctctttgtgtgtagccgcattgatggaatacctattactagaatgctagtagatggtggggcgaccgtaaatttaatgtcttattcattatacgaaaaattaggtaaacaagatgacgacctgatcaggactaatatgacgctcagtggtgttaggagcaacagttcgatcaaggccatgggtgtcacgcccgtcgaattagccatcggaacaaagaccctcgttgctgctttcttcgtcgccgaggtggaagggaattatagtttgatattagacagagaatggatccatgaaaatcaatgtgtaccttctactttgcaccaaatgttgttacaatgggtaggcgacgatgtagaaaag

SEQ ID NO: 64081 - DNA, 1053 bp, Zea Mays
cacggagagcgcaacatttatactggtttggacagaatgtccctacatctagtcatcggtggcttgcgctatcgacactattgacgatcaaactcgtagtaggggttacaagcacttgagagagggaggagaggctcccagatctcttatcagggtggaagtggagcttagaagctgagaggtggaatcctagctaagtcttggcttggcgaggctctgacctcctgatcctcgtcggcgctcttcctcctgttcgtccttgcgggctcgtcttcgtctgttgatctgtcgtcgatcccccttgacgcattgggccagcctccctcttttataggccaggactgggtcggccagcggtggcttcactgggaaggagccgtaaggcaaggtaaacccagtgttcacctagtgtgagtctatgtgtactcgtggggccaggggctgcctggttgccgcgtatttatcatgggggccgccccatcattccggctacgctgacccgtggcttccgtagcctggggctcggtgtagttcgtcgtgtagtggcctgcggaaggtctccgcgctctggcctagtccgataggccataagtgcactgtagtctgaggatgtgtgggtcattaatgtgccgtagtccgaggggtccgtaggttatgagtgggaagcggaccggcacccatgttgtggctctgggctaggcgtagttaatgcagccaatcatttatagcgggccagccggggccggacgcgggatccattcgagtggttcccttccgacacgcccttcctcccttgtcaggctctgtcacgcccgaccccaggctcggtgtcgtacggttcacccgggggacgtgtccttccaggtttggcgcatcttcctcttccgactgactaacgggtcctagcgatcaggggctctttccctagtgcgctcactaaccggtgggtcccaggtctgggggtcattccctcgtcaggtaaatattggtataacatcaggcattgatgaggaatgtagttgtatccctcacccctgtctttgagatgtgtgg

SEQ ID NO: 64082 - DNA, 770 bp, Zea Mays
gtggtcgtcgccacgttgcctctttttgcagcacctgcgcccatcgcctctgcactcacaacagccacatccacaagcttgcccactgtgccgcttctacagcagccgctgtgccgctacgtcgcatctgcactcgccaccaccgcatccacgagcttgctcatgacagccactctcccatcctccttagggcctgttcggttagaccctccccggccgggatcacagcccgatccccgtggatcaccccctcctggaaacaatcctggcccataaaaaaatggtgttcggttaagctctgttgccctcggcctggaatgggtccatgattttttcgttgcccctggcatggaacggcgcccgttctctcagcggtggaaaatatccccacgcgaagcagccgcaaggcaacaggcgtaaagcaggcagcgacgactaggcttggacgcgagattcctctccccggcgtcgatctcctccgacagtcgccttctcacctgtactcttcttcctctgtgtcttctattgcatctagggtcggagaatttatagtcgatgggcaaatctaggatccccatcgccgacacacgaacttcgcctgacgcagtcaacggctgcgcagccggagccctatcgccggcgagcgttgtgtgagagggcaagagcggagaggctcgctctccctctccagctttgcatctgtgcaataaagaagcagctgcgtgaaagaagcatctgtgagctgcgttaaagaagcagctgtgcagaag

SEQ ID NO: 64083 - DNA, 518 bp, Zea Mays
ggggccctcccacttgagttgtagctttcctacagtttctaggttagctattctttgaagcaccaaacgctctggcttaatattttttagtctagcttttctgtcccggcattttgttgtttatgatcaattacctgaagcctaaccccttctattgagtcttttggtactttgcaagtatcttcatcctttgtcgaagctagagtccttattgatcttgtctttgcttcttccggagttattgctttgtcgccaaacatgagtttaaatggagtgaaactcgttgatcttgaaaccacagtgttatgattccacaccacctttactaattcgtttggccactttccctttggcagattaaaagttgacctcattatcctgtgatgatgattccatttgctcgctccactaagtcattggactctgagtatcttaccgatgtgaaatgtatctttgttccaatctgatcatagaaggttttaaatgcttcagagtcaaactgtgctccattattgtaa

SEQ ID NO: 64084 - DNA, 444 bp, Zea Mays
tgaaaaatatcaaacaacagagttctcatttttcttagttattgttttgtgcaagagcaatcattctgaagtttggcctctttttgtttaagggaaggggtggtatgcattatttgaattaagtggcatttctcttaaatcattagcaataggtatgagtttgctcctttttcatgggtttgcatttttctctggtggtttatctcattatggacttagcaaatttttggttgcccgttataacattattaggggttgttcatgatttatttggaaaataccttattagctattcatatttattttccttacttaaaaagttgggctgaggtgttctctatttttgtagtggggctctggtggttgtaagtccactggacttttattatccattttgggtatagttttgcaactctaataattgattttctagttcaaataagg

SEQ ID NO: 64085 - DNA, 436 bp, Zea Mays
ctcgagttggtatgccatctccccaactctcctaaagatcatgaatggcccaatatagcgaggggacaatttgcccttgactttgaatctcctcattccacgaagtggtgacaccttgaggtacacataatctccttcctcaaattccagtggtcttcttctattatctgcgtagctcttttgtctggtttgagctacccttaaattctctcgaattatacggacttgttcttctgcttcttgaatcagttcatgcccaaagaactgcctttctctagtctgatcccaatatagaggagtcgtgcacttcctcccatataaagcttcaaatggtgacatcttcagattggcctgatagcaattgttatatgaaaactcagcatatggtagacttttatcccaacttcctccatgctgaagtgcacaagctctcaac

SEQ ID NO: 64086 - DNA, 372 bp, Zea Mays
actgggcttcagtgtttccagcggtgcatttagtcggtgcggtcgctttcttggaggggatctgcttggcggaaaggtctcagcttagcggcacatgctggcgttcacgatcggtgcagagggacaagacaaaggtgttggcgtggccgggtcaagatgtcgacgacggggtctatggcatgattggctctgggtaataactgatgtggatcaaagaccggatcgagacttggtgacgcggtctcaccgtcgttattcgttaagttggtgctcacgaggcataacaggttgtggttgggtaagggctctaggcgtcgtcatggtatacgtgagaggcgtgaggagctacactacaccaaaatagtaaacttc

SEQ ID NO: 64087 - DNA, 418 bp, Zea Mays
attcttctcctcttgggcgtcatcatcggcattggcattggcacctccattcttgctgaaggacttagaatttctgatgactttgtttcatcagccctctgttcttctattttttccgtcgctggcactttggttggcccttcaatattcggcaggagagttggctccttggcttcggtggccgaagaggtctcatcgacatattcaggcactgtggccggttcaatgtagcgtagccggtgtgtgagaaccttcatctttttcctcttcggcgccggctcactaggagcggctgaagcaacttccttcgcagaagatgtattttttcttttttgaccccgtgttggataacgatagtcgagttagacaaacccaattgcatcaaatactcggttgagtcttttcttctttcggcctc

SEQ ID NO: 64088 - DNA, 712 bp, Zea Mays
gaggaaaactgctgcttcgaccaccccagttgagcctgtgccgaagggcaaaaaggtgaaggttcttacccaccggccgcgttacattgaaccggccgtggtgcctgagtttggcgcagggacctcttctactaccaaaataaaaactgtcccaactacgcagggcactgaagagccggctataatgccgaaggtgcttacagtcaagctggttgaaacgaaggttgataaggctgaagagccaaaaattgaagaaataatgaagatgccagagattttgagccctccaacagaggcaacagtaccgaaggtacaaatgggttctgccgtatctcctaagaggagaaggatggcaaatgtgctggatgttgtgttagaaacaacaaaaacctgagtcctgctcctacaaggaaagttgccgaagcttccaaggcgcaacctgaagctgatactaagcagggtgaagtcgaagctgcaacaattcaggctgaaaccgaagctgggcctttagtgcccatcgagatggagcgtgctgacgctaaggaaaaatcaacagagcggattgcaactgaaaaaatcgaggctcctggtcccaaagcgtcgaacaaaagtattgactatattattcgtcatgctttgggaaaggtactatcccaagaagaaatattagaagcgcaacactatgcccaaaaattgaaatatccgaaggggg

SEQ ID NO: 64089 - DNA, 325 bp, Zea Mays
gcgtagggtaggcggcggagttaagcacctcccacaagatggaagggaaaccctcatgagaaaggaaatcggaactgaaacgagtgtctcctccattggcgggggtgggtgaagtcatctatggaagaggatcaaatgtaaaggttatggtagaagaaagaaaaatatgtgagcccgggttgttaaaatgaagtgggttagatcaaatttttattcctttaatttctaattctttcgtgttttaaaatgcatgcatgctgaaaagagcgtctcctcaccgaatcagaatggtgcctttagggaatccttgaaatctaagactcgc

SEQ ID NO: 64090 - DNA, 575 bp, Zea Mays
ctactctagactacaaagtgctcggggcttgtcgggcatacaccgtgggtacttgcaaggaaggaagaaggcggactcctactagaattcccctgtaatcctactaggactcatactgtgtaatcctactaggattcctacattctaaccgactagtaaaccgccccctagactatatagaaggagggtcgggttcctagatcaacacataacacctcaacacccaagtgtagtgttcaatatacaacacaccaaacaggacgtagggtattacactatcttggtggcccaaacctatataaatctatgtctcgtgtcctcacattgaccttcgggttctaggtctggcgatcccccaccgcacaaaacactacctcgcatacccccttggtaggctgtcggacataaaaatctgacaaccaggacatccatacgagccaactcatcataacttagcggtcaaattgggatatccgctattgacacgagcacgagcatggcagggtgcaaacacccaaactgatgcctctagggaggtgtgtaattctccagcaccatcttcgcttggcaagatg

SEQ ID NO: 64091 - DNA, 613 bp, Zea Mays
tcttgatcggctacccgtgtaagtcaaatcctcttgaacactaaggtcttccattggtaactgttcttcaggcaccctgagacatttcttcagctgagatacatgaaagacatcatgaacatccgcaaggtgatccggtaactccaattgatatgcaacctcacccactcgctttaagattaagaagggtccaataaagcgaggggacaactttcctttgactttaaatctcctcatacccctgagtggtgacaccttcaaatagacataatctccctccctaaactcaagtagtcttctccgggtgtcagcatagctcttctgcctggactgtgcagttctcaaattctcccttatttgctggacttgttcatctacttcttgtataatctcaggcccaaacaactgcctttcaccagtttgatcccaatataatggagtcctgcactttctgccatacaaagcctcaaacggtgacatcttcaaactggcctgatagctattattatatgagaactcagctttaggtagactcttgtccaactactaccatgctgaagggcacaagctctcaacatgtcctccaatacttgattagccccttttgtttgtc

SEQ ID NO: 64092 - DNA, 370 bp, Zea Mays
gaggttctagatagaacgagtaaagtggttcgacggaaacacactatggttttcacaccaacatagtgatttttttttcagaataacctctcggaatactcgcaacttcgtgttgctggcgattacatgtccttttatctcatagtttgcttcatgtcatttagcgacaaagagagcaatgtgccaacatctggttgagcaatgtatggctgagatttatagtcttaaattatttgatagggccttttgcttactaatagaatcccaatttgtgatgtcttctatgccaaaaaggctttcatgcattatattatatatcttcgggttacttcgggtaaaactttatgcatgaggagatagcagaaaatta

SEQ ID NO: 64093 - DNA, 545 bp, Zea Mays
gaaacgtgggcacagggtaagttgcctcagaccgaggcacgaagttgtaacaaccaaaattgttatgatattgttcctttccgattgccttcatctgataagacaactcatgaatattgcagaaggatcatgcatctagctccagtccttggctcctcatggcccatataaaaactcccactttaataagagctttgggggtaacctgatgaaggtatatctcaaacttcttcaaaacttcgactagcatcttatggagcagaaagcgaagcccaactttcatgaagctcctgaagactaacacttcatcaacttctggcaggggaacagtgtcttctcccccagccctcactatagacacatcatgaaagtatttacctttcatcgcttcaatttgaccttgtctaattgtggatttcccaaaaacaatgtggcttggtctccacggccgatcttcggcattttcattctcactctcaacatcgaagctttcactgtcgcttttatcaccagatagtccagctaacatttcattggtgttcttc

SEQ ID NO: 64094 - DNA, 2037 bp, Zea Mays
cctgagaagaagtgttcatgaaattttctgttctaattcctccatagatttaatagagttaggtggtagcattgcgtaccacgtgaaggcggtaccagtcagagatagcgagaataaacgaacacgataggcttccttatcagcgaattctcctagacatgctaagaactgccttatgtgctcatgtgtgctttcctcgctttcaccggaaaatttagagaaatctggtatcctagtccattgtggatatggcacgacatcaattcgatgactataagacttccggtacgactgccatgtgcctaatacactaacactgagtttgtctctgaacaatctagctacctcgtccctaattttgtccaccacgtctagcgacaatccattaagtttgtgtgtggaaattttaggttgccttacatcattatgttggctttcctctcagatatgcccgagatgtgtgttaggtgtcctattaatgccaccacctcccgctctatatctatcgggctctctggtggctgaagaatattcgaccctgtgtacataaggatggcacggcacggttataatatgttgccggtggagcactctgcatattgtgcagctcctagttttatgtacacatacctggacgatccagcgtaaggatctggacagtccgtgtctggactgaatggtccaagtgtgtatccggactgtctggttgtatatggcactgcctgggtagttccatacctgaacggtctggtgtgaggggccagacggtccgcgacctgaccgaattgtttggggttgtacccaaatagtccgcccatgtggcttgacctgggtggtctgcgcgtagattcgcgcggagtttgacggtctggcgaaacatgttggacggtccatgacgtatctagacggttcggtgttagggaccggacagtccacgaccgggacgaatgatccggaggtacacctagatggtccgattgtgtatggcgctacctgagtgatctacgtgtgggcttttatagggtgggactgtccgagatgactcacagacggtccgattgtgtcgaaaactggtcgtgtgcctggcggcggcggctgtgatggtgacacgaatgtgtgcatcagcgtaccatacgatggctgggccaaaggagacccatttatagccgagtgtttggtacgaatggttccgtattggattcacgcgagggaaactaagggcggtaggtttcttatatgaaagcgcccatcttttaatagattcgtctacgtattctttcatagttcccctcgttgttccatgaaatcctcaaaagatggatctggggtacatacaatgggaaccaaaaggcggaggtaggagagacgtcgtgtcgatctccccttgactgatgatcttctagtggcgatccaccatgaagtatgatatgtacttttctgtcgcctttatgtgtcattccttaagttgtcgcaacacctcctcctcctccttgtcgcgtcgttcggcgagttgtcgcagcacctcctcttactcgtgccttatgaggttatcgaagtgatgctggtcatcagccgagagtgcctccatggtcagcttgatgatgttggtggagacgtcggtgtgttctttggaaccgcccatccgggggtacaatttttggtagatctaaataccctcgtctcagcggagtcgccaaaaagtatgttggcgccgatctgggagccaaacactgaaacaaaccatctatcagtgctctctacggaggcacggacggtccgcgacttgggcgcaggagcggatcctcctctacacactttcggacggtcaacgcctggggccggacggtccgcgatatagcagagggtcttcttctccacgaagaaccctagaactcgccctgtgagagttcccgtcaagggggagagttccaaggtgttgttctgggtcggcagaccgcccggtgctcctataaccggcttagagttgaatagagattattgtggaaaactaaaccagatctaaacataaggctaaat

SEQ ID NO: 64095 - DNA, 856 bp, Zea Mays
ctagaaaccaaacataccttaggatactggagatcattatgtgctactcgagatcattatgtgctgcgtgcattgttaggttacagaatactggagatcattatgtgctactcgagttcattatgtgctacgtgcattgatcctgtgcccacacgtgcacaagcaaaatatacataaaatataattaagtataaaagtctactatattgtaccggacggcacaggctctagtgttcgttgatggcatatcatacatatccctgttataagtatgataaccgtctcagaaaaagacatctttgatattatgccaataacgacgaggtagttggatcggtggaatttgagtttaatttaacgtctctcctctcttgcaccgtaaacaggagagattgtataacgttttaggataggctgagcaagcagttttgctccctgctattgtatatataggaatctatcgtctccaccatcaagttcagttcaggggaatatgaatctgacacggtgcatgcaattccagccctaaaccccaatggatggcatgacttgtacataatcgaataacaatatggttggtattctgccactatctccaccaaaactgaaagcagcagatttcttcactagttaggtgcagatgcagccacagccacaccattacgccattccagatctaccaaaccattcatcacattcctgcctaatcataagccacagcaatagctttttcccttattttatttaaagagaaaaacagaaagatgctgaacccattatggggccagcgatatgaaaactaaagaactagacaaagacgacttcatacatcgttttgtacgagccgttgacttac

SEQ ID NO: 64096 - DNA, 561 bp, Zea Mays
gaagaaaccctaggtaacactggggtgttacaaagacgaagaagttcagaatcctgaaggtgttcgtcgcaagcgatcacgctggacgagctatccagccacgcctgatgaggagaaaagagaaggaaacgactctggcggttatcatgcttagaacaagatgttggtccctcaacatcactcctcggtgatggcccagcgagcaccaccctcgaggatgatgttagaggttgtgttgatgctagggttggtggttgtgtgcttgatgaggatgaggaggacgaagaagaagaaattcccttgattcgcaagaacagccgccgcagtaggagcagtgacatcccgatgcaggccttatcaggacttgttagcctccaggggttgacaatgtctgcttttgaccacacattagaataaattatccctaaaaaccttttatgagagcctcatgaggttgaaagttccatcgtccgttcagaggtcccggatgatgttcctttgtcatgcgatcctgtcgggcaagaggtaacccggacagtttctcgtgctttgtcgaccttg

SEQ ID NO: 64097 - DNA, 930 bp, Zea Mays
aacccacctccttctgctagtttaggtcaagatgttgtctcatgatatcttcacctgtttgtcgcttcgaatgcccatctgtaaccctcttgtctttccgaaatgactttgtatcttttctaaaaggatgattagcgtgaaggaaatgtcggtgcacatcaaaaaatgtttcttttttccatgctttaacctatatgcttgcgactcactcatacatatcagacaacgcaacctacggtggacacaccacccacaccaaatgccatatgccaatagatcatgcattgagcatatatatgtcgctcatagattaaatctacaattcagatggctatcataagcctccaccccttcccacaacactttcaactcttcgataaatggttgcataaatacattgattttcgtacacggatccttagggaccgaaataaccatagcaagaaacgtgacctcttctttcatgcatttggtaggagggagattgtatggcatcatgaaaaccagcgaacacaagtacgcagtggaacttctactgaaaggagtgaattcgtccgccgaaaaaccatgacaaacacttctagggtcccttgcaaattctagatcaaaacggtccagtgcctgccatgcctcgccatctaatggatacaccatgatatctggatcttggtcctgacgatccccttccttatgcatctcatttgcttcactatctcctgatttagaaacaaccgtttaagccacagagtaataggcatataccgcgactgcttgatcgggacttttatagtgacctcagtcccttcctcatccaccaccactgcatacctcgacttctttcagtgcatgcaatgggtttagatttgcgctaacccataactttgagccaagtctgtgttttaagttgtattattgtaggaacacctattc

SEQ ID NO: 64098 - DNA, 578 bp, Zea Mays
cacgacgacgagcaacagtggcgcgatagcagcaaatgcggaggagcaagcacaaaggatggcgagcagtagcaaggctggcatttggtggcactaagcaaggaaaatcggcgagggagggtgttggcacgaaacccataaccatacactcataagcgaggaagaaaatagcacgacaaaagaataggatgtaagcttaattgtattgccaagcaagtcatgtgggctataggaacgaggtatatatagggttagccgggggttggtgaaatatgtattgtattacccccatctaccaactatatttgcactatgcactgtacaactaggtaattacaggatttatgacataatttcctaatacattagatttaataccctctagagtcacttgcaagtgggcccgcagagggcgggcgctgtttacacggagattgctctaggcgaagtctacttgccatcgacatcacgggccgcctttcggccatgttttgtattcgagcttccaccaactatgagccccctttataggtcaactttcctggttgactttgctgccaattagagaggtcgtgttt

SEQ ID NO: 64099 - DNA, 272 bp, Zea Mays
gttggaattggctgaattagaatttaatacctgaccaaacctgtttggctgtacgtggaattggaaatcaactttccactcactttcccagcccgaatatgaagtccacgactgattcctagcctctaaacgtggaaaaggattcttctcaccctcccgacatgtctccgccgctgttgtgacgcccgacatacgacgccggcgatctgcgcactgcaacgctcccgtcgatcctccctaggtgaaccttctcaactagatcgtgctcttcg

SEQ ID NO: 64100 - DNA, 570 bp, Zea Mays
aaaaagggtcccttctaaaagttacttctgttagtcaagagattgtgagctaattttgtaaatactgggaattttgaaactgtggttatgattttaattcagacatatggaatatatcattaccctgatggtgccattagaataaccagcaaaaagctgccctctgaagaatgctatagcagttgctgcaccattgcctggttgaccaatttcgagaatttgtgtatgtacacatgatacacgctgcactgacaacatcagataattatttcttatgtttaagaaacatttctcacaaagggctagctagaaaatgtggttataataatctcagcatagattctgaaattaacaatagcaagcctaaagaacttttgatttgatcagatataatcataggctcttagctcccaatctaagatatacctgatggtctgttcttgctgttacttagcatggcatgccttgtttgctggaacaggggtagtatgaaacgaacaagggaagtgaaggagctcataggggtgtgataatggatcacgatccaaatgtttcttcataattcatttg

SEQ ID NO: 64101 - DNA, 336 bp, Zea Mays
ctaagaggagaaggatggccaatgtgctagacgctgtcttggagaccgcaaaggccttgagccttggtcctattaagaaaattgctgaagttgctaaagtccaagccaaggccgaagctgagcctgcaacgcctattgagacgaaggtcgtcgcgcctgaagataaaactaatcaacaggcttcagatgctggcatggcagaagggcaagacacggcagaaagggcaaaatctcctgcccccgaagccgctgtcgaggatgctgattatatttatcgtcatgcttcgtggaaaaagttgtccgaagaagaagttctggaagccaaacactatgcgc

SEQ ID NO: 64102 - DNA, 623 bp, Zea Mays
acgtacctcccgccctcgcccgtggcagcgcagcccccaccctctcctgcagcaccactccttggacaaccgcctccttcctctatgaccagcgtgtcgcctacaactcgttgctccttccctccactgcgtggtccttcatggcggatgcgcctcgctcggcgccggatccctcgcccacgccgagtgtcaccatccctgtgttccgtgctgcgtggattccccaccgtcttcctcgggctttgcctcgcctcccttgacgtcattgccgcttactctaccttgggcgcggcgccgctgccaaggtcgccatggctattgctcggcatcgagaatgctctgcgaccctcacctgggagcacgagcgcactgcggtaggtgcccttgcctctcaactagcggaggttgagtgacacctacacaactcctcgttcgcgaccccctccggtggccctagtgcctccctctccctctgggttcgacgttgttgtcatcgccaccctccacacttaggcgatcggtgtccagaacatctggtcgcttttctttgtcgttcttggtccgttatccacccactacgcccgctgcgcgcgaccagatgctcctcactccagcgctacgcc

SEQ ID NO: 64103 - DNA, 432 bp, Zea Mays
tggtgatgtcatttgggctgaccaatgcaccagcatatttcatgtatctgatgaatttggttttcatgcctaaactgggacaagttcatagtggttttcatcgatgatatcttggtgtactcaaagaacgaagaagagcatatcggtcatttgcatgtagtgcttcaacgtctgcgagagcaccgtctttatgccaaattatcaaagtgtgatttttggctgaaggagatcaaattcttgggtcacactatctctcaggcaggcatagctgttgatcctgataaggtgcaagaggtgatgaactggaagccgccaacgaatgtccgacagattcgaagttttctgggattggctggttattatagaagattcattccagatttctctcgaattgtgaagcccttaactaaattattgaagaaagaagccaag

SEQ ID NO: 64104 - DNA, 399 bp, Zea Mays
gtgactactaaactgatgggatgttgatgagatgaaaatggaggggtccccctcggccttatatacatgaccatgggggggctttctcacacaactgttgattgtgatctctctacttatctcctaattagtagcaaatagccttcactatctcgaggaaaatccggcactcccatgccgagctatccctgccgttttaggatgtcggatgcggaaacaaactggtccaactcactttcacatatgttgtggctagctcggacgtgggtctcttccgcctctggatcgacctgcctttactgtctctatttgcccagcccatagcagggcacttcaaaggggaaacttgctatgtggccccgagcgaagttttgcccttgtgtggatccaggggatatc

SEQ ID NO: 64105 - DNA, 629 bp, Zea Mays
gccttccacaatttttgctattatcccaaacttgtgcactccaattagcggattccacaactttcaagtatcccaaacctctagtatttgtcctcagctgaaccatatgcaagttagaatgatactcaatattatttcacctttatcgtttttccatcagcttgccttctaccaacaatcctccaagggcattctttactagacttgcagaatcttctaaacctttccttggatgacttctctgtgcctagctcaaactcctcattaatagcaaattgcctgacaaccaacctaaattcatccattgatgggtacaatgttcccaagatccatttttggtgatccttatcatatgtaatcactacctcatctggtatggcatcattaataggaatggtaacatctttagtattttcatctccctcctcacacattgtacaaccattcggttcagctacctttctcctctcatccgcatccctcagcccaagatcacatatagctgatcctcactcattgtttcatttcctccttcctcgtcatgagtctctactattttaagttatcccaatcaacttatgggataggtgaagaagcctcaaacaacaacaatggaacatcattattgc

SEQ ID NO: 64106 - DNA, 458 bp, Zea Mays
aaatttaatactaaaattcattttcaaattgattttatgaatattatccactgtctggacctcgcatcgatttccatagagtccaggggttcatctacaattctcccaagacacagactacctccctataggacggcgggtttattatagggatctacggggtttcttttgcatgatggcatggccgaaggggtatggagagatcctagtcgttggattagatacgggcgcgccagattaaatcattattcctgcgaaccggtacggaatcgcatccgttggatccgaatcaaacggtgagggttttattactctggatctatcgttgtccgtccgatccagatcgacgaaccagatcgaaacgtggtgaaagggtatgcgcggactaatcacagccgttcacgccgatccgacggcgcacgatctccgccccaacagggcacacacgcacggcggcg

SEQ ID NO: 64107 - DNA, 455 bp, Zea Mays
gaaaaacaagtggaagctctatgggtgcaccaattgctcagtcgtcatcttcagcacaagcagctgaaaataaagatgcaaataaattggttgtcgtaggcacaagtaatactggtactagagctgtagcttctgttgatatagcggtccttcatgatgatgatgaggacatacaataggagatgactggaacaggaaagagacaaaagaggcgcacatctattgtatggaagtattttaccaaagaaactgtggaactggaggtgaatggcaagaagtttgagcagctttgggcctactacaactttccaaaatgtaagcagagatatagagttgagtctaatcatggaacaaatgcattccacaaccatctgaggtcacatcatagtattgtcaaaggacagctagaactaaagacagaaaaggatcatggaaaagatgtcaccactattgaa

SEQ ID NO: 64108 - DNA, 463 bp, Zea Mays
gacaaccttcaataccttatatttcaggacggaagtcgtaatttcgcattctctattccaaggttcaaaaaagtgctaggccactgcgggtgattcaggtttgtgttgtgcggtatgtatgactgcagatggaaggtatttgaaagaaggggacatgtcttgtaccacagccaacgggtgcaacaagaacggactgctcatgtagtcatgttccctgcatgtgggcagtggctgaaccgaagcgatccatgtccatgagttttcaattaatcacttcagctgctacacttctaatcaataattacttctgaagcttctcggtttcaattcactttatttcaaaagttctctactagtagttgatgtgtttgtgtgacttttgaacttgtgaactgatgctgactgctgcaactgtgcactgaactggtggtgttgagcgcagaggtaacccttcagatttgtg

SEQ ID NO: 64109 - DNA, 495 bp, Zea Mays
cgttgtcgcagcggtgcataaacatcgtcgtcatcgtcgtcgtcgtccacatgagagtgagctagggctggagttggtggtgggggacgagcctccagtatgtccatgtgtgtaacaagtttagctactcgtcgatcaagctgctcataggatgtcgctgcagagtcctggtattttttaaaagctttagtcatcacgcgcatcatctccttcaattccagctgagagatacactcatcgtcgttaagcttaggccccttctccttgtccatttggttctttggtcctgtcattgttagcgcaaaacagagacaaaaaggcaacaaacaatgtgaaccctacaactatgtctcagggtgttggtggaatacaaattatgaagcgtcttaccccgctcttacaaagttcttaccagcactgcaggtggcaaacggtgaccggtgtgactgtccaacgagcgtgagtgtgattgcaaaggagtacctgttctgctcg

SEQ ID NO: 64110 - DNA, 756 bp, Zea Mays
cataatggaaacaaggaggctggagtgagcaggaatggtcatccaacgagcaagagtggcatggtgcggtggagcacaacatggagtcaaagaatcaccttttaggctaagacaacgaagacaaggagggaaaattgagaagcccccaagcttagggagtgaaaaggatgaaattgacatacccactccaaatggggacatctacctaagaagcattgtaggcaagaaaatcctttgggacaaattaggcatatacctatttgaaggtacgacgatgtcacatccatcaacgtctcccatgccttaggatggatatgatgatcatgatcacaatgatagtgaaccaggaggcaatccgctaggcaattcatcagatagtcctcctagcatgaacaagacacaataaggaacaatatcgacaacaacacccgacaacactacaccgcctgcaagtgatccgaagggggcaaacgatcatgttcgctcgcaccaaaaaaagatatgacatccacaggcacaggaagtggagcctaatcatgggtacaccgacacggagaaggcagtcataagcatagcaaaagaacaccaaagttcatctatgtttccaatgcatgcttatgaatgatattgtaaaagttacttgcaaagtttttctcctgactatctcatgtactatataggcccaagacaccagtttcctagccccattcagatgactgtcttgaaaactacaagccaggcaagttcatgttaact

SEQ ID NO: 64111 - DNA, 846 bp, Zea Mays
ctagggcctctttatgcttttgtaggtgttcatttctcatacgaaggctctggagcagttgtttttcattattgacgtcgagatcctcttcatctgggtaacttgtgtggtccttcttgacgttgggatgggaaggcattggcctcttgtgtcgatcctagactgagatcgtgggcctaaggaaagaagacatggattggtcctcgtctggctgaggattggatggttggcctcttgataggttgggctagattttggctgtgtaagggtggctttaggggttgaaaagggtgtgacgagccccccctgagctgtttatgtggacacttcctttggggattggattgtttgatggctcattgcggtctagggaggggggctcactcctgctggttggacaatgaaggctgccttcgcctttattgtttgactttgatcggcgaaggtaacctttgcttttggggtgttgtcaaagacgactgccttcgtcgtcgcgaacttcgaagcatgctgtgattgggtgttcatcttcttgggaggcacaaatgttgaattctaacaggtgggaaccaaacaagaggaacaaatagggcaaaacaacgagacaaattgggaaacagtggttcacaaatgtcttgtcaaccgtcccctcaccccattcggacaggggtagtagggtaacgaaggggtagcccccctaaagtacttgtttgccctttagtacaacactttaatttgaggttgttacagtccaagtattacatgcacccatttctgtaccttgtttagtgtaatagagtgcacgatgccgactgatgcccccacaacaggtggcccatcgcttac

SEQ ID NO: 64112 - DNA, 380 bp, Zea Mays
aaccgaagtcctcgaatcccagatgatcttcgaacccaacaccttcaactcgaagtgatacgaaaatctgtacgcggaaaggaagaaaaatgatctgttattacgtggttcatgacagtggacctactggacatgaggggaaggggtgtcgcgggatcgaggatgaaccctagcaacacgacatcacgcagcggggtgggtaacgatggactccaggttgaccgtaccttacgaagatgcagacgcgatgtttgggacgacgcggaaccttgaggacggagcaagggcgtcggcgtcactgcggcaaccatacggaaataggaaaagggtgaaggaaacgcggcaatgcgaggaagaaggtgcggacggcaagggaggac

SEQ ID NO: 64113 - DNA, 417 bp, Zea Mays
gtctctcataagaccacttgaaccatcgcattcaccacacattatttcaatagtgcccataatgtatgaacttcaagctcgtgattttcactttgcgattattggttcaacctcgattgcatttatcattgacccgataagagagcttcaaacactcatgcctaggactttgttttggatccctttgcaatctagagaggcaagataggtgtcgacatatttgtctcccacatttaataatgatctccgtcatttcccaaaacgaaagattcgttgttccgtattcccagcacattgatattgcgcgcattgctaggaacttcatcatcaagatgaacctcttcatgaggcaaatcaccatcagggtgaattaatcagaggaaagttatcatagaccacgtgaatctgcaatcagaa

SEQ ID NO: 64114 - DNA, 700 bp, Zea Mays
gagatatggatcatattctaatttacagaatattttcaaaatttatatgtatgcatgcataattgataaaattttaacatgtttctgtcatatccgacgggtaccctataccacttgaaactcaatgggtacaattatgggtttgaatttttactcgtgggtacgttcacaaaggatacaacctgtccacctgggtatgtcatgggtgtgatgttggtcctgtgttggggcacaaccatgatgacataaagggacatgacactttgtcgagctcccatcgatgcaccgcgctaatctacctaatgcgctcttgtgtcgccgccagccctgactaccactagcgaatgacaactagggtttagggaaaggaatttgtgcatgtctccaactctctgacaatgggtgctgtcgtgcgggacgagaatcgggagtagaggggagacattgccagtcactcacataggtgggtgcagtaaagaatttgggtcataggtccccattgggccttagagttagggaggaaatagtaggtgttattttatggtgattgttatgcatgtgttcatttttgctgtattttttcaatatgtatatacactatatgcattttagtcaaaaaattaggtattctactgaataccattgaataatggtgggcccagccctaacactaaaggaaaatatctatgacgaagaccaa

SEQ ID NO: 64115 - DNA, 914 bp, Zea Mays
tatcaaagatgtaatacaccaaataagctacaaagcctagtgagaaagtctaatcaaaagagttgtgcaaaattcccaaatcaacccttgaagcaaagcctccttgagaaattcagaaattcagatttctgaaatctgacctcttcataaagaacaactgcattctcttgattcaaaaacacaaatccatttggtccaaatataaaaatggcgccaaactaccttgaacataccctggaaaaatttgggagcaagacttggccgtttgacatgatcttggcagggatttacctcggaactcggtcttgtgacactggcacattgacgaggcgacaactctatgcccttgacccgaaaccgctccgctccacagagctcagttgggggaacaaatcttacacggtgatcttgcccaaattcgcgaagatctgtgccctatcggcgttagaacacgggcagaagcaatggtgccacgtgctcgaccgcggctgacatgcccggtgcatgccagcccgcgcacccacgccaagtcgtgcgcgcccgcgctgggtccatgcccgcccgtgcaccgcgcctgcgcctataagagcagggaagcctcggttgtactccctccatgcctcacctgactccctagacccagcacttagctccggcgagctctgcgctgcccgccaagcagcgcgagcactcggccaccgtggccagaccactcccggccatctccactcgatcctgtgcctcggctagcttccccagagccccgtagagctccccgaagcaagaaactggatgctacttcaccggagaagccgttccaccctcgtcgtagttgttttccccgccagcgcgcgtggctacgactaaccgataagccatagttcaattcctcgcgcctacgccttctctagcac

SEQ ID NO: 64116 - DNA, 323 bp, Zea Mays
aggcaggtagatccaagagtcggtgcgctcgcagggcgatatgcgctgtcaactgtgctcggaagaaggattcctgaatcctggtactgaaaagatctgccgctgtagggtccctctaagcaggcaaccaggactccacgggtacgtgtgtgaacctgcgtacctgggctgcagtggtaacttccaacgactagttctgacagtagtcgttgggcagatggcacaccggacagtgaacagtcactgtccggtgcacactagacagtccggtgtgccggctaaaaatccaattctgaactcgttgctcttgggtttctacgggg

SEQ ID NO: 64117 - DNA, 752 bp, Zea Mays
caaagtctaatttaaggattattccattcttctttttcctatgcatctcatgaattgtttcatgtagagtaactactccatccatgatataccttcccggaatgaaagcagattgtgaaggtttaataactttatcgactacaaccgatattctatttgtcaacactttggtgaagattttgaaactgacatttagaagacaaatcggcttgtattgttgtattttaagagcttcttttttggcaatagtgcaatcacaccaaaattgagacaatgcagtggtaaatttcctttatggaattccataaatagcgccattaggtctattttgatgatgtcccagaaggcttgataaaattcagctgggaaaccatctggacctggtgccttattatgttccatttggaaaactgcctttttaatctcgtcctctttaaactcttctgtgagtaattcattttcaatatctgacacttgtgggatgtcaccccttaactcttcatttaaactgaaatggttagactcaggctcagcaaaaagttttttatagtatttagtgatgtattccttaaggttgttttgccctattattactccctcctcctgctcaagctgaaaaatcctagtctttctatgtctgccgtttgctagtaaatggaaatacctagtattatcgttgccttttaacacatttgttgctttagaacgctggatccaataaatctcttgttctctagcaacttagataattg

SEQ ID NO: 64118 - DNA, 797 bp, Zea Mays
atcatgttggtagggaactcatgtccgaccaatgttacgggtacgttgaagactacttccttagtaaatatttgacccccaggcgattgaataacaaaaccctcttttgattcagtactatgtatgcaatgtttctcaacaaaagtctttctcataaaagtatgtgatgcaccagaataaaaaaggataacgacgggatggttggcaacgaaaaacgtacccatcatcaccggttctccttccggggtggtcgccacttaggtgtagtaaactcgtccaggttaccttgtatttttgctcgttggagcgttggccacatttcccttcccttgagtcgggttcccagaagtctgttgaaaatttgatttattctgctttggataggggcagttcttgatgaagtgtatggacttcccacaattaaagcaaccattagaggaactgggtagggtggggaaacgagcaccaggggcactcgactgattgttctaggcgggggcaggagtgggacggaggaaaactggttgtttgaaaggatatgtgggtggacgaggagaagagagatttgggttgaaaggacgaattaccaaccttgaccacttttcagatccctgagacgatccttcacccccatatctccttgttttaccttgtcccgaattcttggcttccactaacaacgctatgcttacgacccttctataagtgagatccaggcatgtggccattttgcactggagtcgatcattcaaacctctcatgaagcaatttttcttcttgaaatccgtgtccacttg

SEQ ID NO: 64119 - DNA, 290 bp, Zea Mays
tttttgtgttggtgaggtctgggaagggcaaagaccacgttggggcctactatttccagacaaggtcagatccgacagtgacctacatcgcctctcttggcaacacgaggtgggagaactggcgacacaactgggtgattgcccatactgaggtcagcgaccgtcttgcccttccgagtgacgggcccaatctcagccggaagcagtggagggaaaaaccacgcttggtgctagagtttgtgcccatcctggataggatcaaggaactagcggttggcggcctaacctca

SEQ ID NO: 64120 - DNA, 1130 bp, Zea Mays
ggttatgttattacaattattccggatcggactctgcttgtttaacgatacgatcagtgagtgcggttagatagagacgagacgtcgctgctctcccttttgcgcttcttttcggctacaataacaaggcaacgtattatatacgtactgtacgcagaaggcaagagtgagtttttctattcttctccggaaacagtcttgcattggaccatgtgacgtttccactgattatcgtgcagtgcagtgcagtgcatgcatgttccatcaggcatgaatgaatgactgactgactacattctgattgccttgctagctaccaccaatgcaaaagaagaagacagcagcttttctcggatcacccatatgcatgcatggctctggtactatgttattattactgggctccccgttttttttcttcttctaatgatgatggaaaattagggtgtagctatcttgttgggtgcttaattaggcaaagaggagcatggagtactagattccatggcgcaccagctagcgtcaaatccaggccccatggatatgtcgtcgtcgatgcttttccgtgttgccgcgtgacgatcgccaacaagtcccaggagccggttcggttccagggacagctgtcgtcccagtagaggaggggactcaagagagagtgaaatattcacctcagtctagagcagtagagcctttttgtcacaatgtcacccacctgatcttcacttgtgacaaaatccacgctgattaggctatattggctacagattcatgaacaaagtgatgcttcacctcgatatactcgctctgcccatgaaatactggggtcttcttcaacattgattgacgtgtctctctccttatacctgagatagccatattgcttgacatttgtagcagtgatatatctaccacctttttgtttcatggattggaacgtaactggaatattggccattattccagatgtgcttttcccaccatcaacatcttcagcgaaccacaccagtgttgttgggatcctctactaacatctacgcctggcccccttcttccttccaaaccaccaaatagcaaagaattcctccccaaaaaaacaaatgcaagatcggaacgaatcagcctgaaag

SEQ ID NO: 64121 - DNA, 563 bp, Zea Mays
atacacacgtgagaagagaaaatggcgagtttgaagccattcaatgcaataatataattgaacaaacctccggctcctatagtgtggtgaagaagattggcaacacaaccatggagagaagagatgaacctgacaaactgttttatagtggctgttttcttatttactttaggggtccaatgatacagaactaagctgagaaatattgtgcttctgttttggagagttcgtgaacagaggtcgtggactacctgagaaaatgaggacaacaaatacccaatttccataataagatttaatgtatttgacactgcatatattcgtttgagccggtattgtagatgttgaatttggcatataagacattgaagtgcaaattcacaggtggcagcttagaacagatcctggaaaattccacagtcgggcagcacgacctagggctaacctcgacgcaaacaagccattcagtcacgccgctgtcggacctcatggacagggggcgctggtggtgctttctacgccgcgctgtcgtgcaggctgccatggctatcgctggacagcgg

SEQ ID NO: 64122 - DNA, 527 bp, Zea Mays
aaaaagtagtagtgctcatgtgatgtctaatttaaaacgcaaattgttgggtgattatcgtggagaatgcgttgttaattggttgtagtaattttagtgcaaatgacttgaataaaatttgcaagtcgaattgttggttctaaattgattgtcttaactcgaacaaatagtaaagcgttagaataattcaagtctctagaacgcgacaatttttgaattatatagaagctggaatttattgattgttgttttaggctgcacgcactgttttcgttgtgctgtttgtttgatgaattaaattatgttttctgtggaaaggttgtatacaagagttgtagataacatgattatcttgcttgtactaaaatttgacagccataaacctgatcgtttaggagttgtgcttttcacaagcccagcacctgaatctgtcgaatttctgaacagatttcagaaattgcgatggttgcttaagttaatgttgaaatcagtgattggtggtcacaagaaagttgtggacaacttta

SEQ ID NO: 64123 - DNA, 701 bp, Zea Mays
ggatttgtatggtacggggcgcggttgggaagagaagcgtcggggatgagatcgatctgatgctcgatgccacagagcggtggaagacctagtggtaagtttgtgggaaagacatcagcatactcctgcaaaaggttaaccacaacaagggtatatccaaagacgatgcatcatcaagcgaaacaagcatacgcgagcatacaagtgcataacagggcatatgagcctcatgtaaatcatcaaaatcagcacatgtagcaagtaaaacaggagtattcaactttattcagatgtaacaggtgcagctgatggagatttgacttgttgtgcagttttagcagacttactaagatcatctttcagaatttggtcaggggtcattggatgtataactattttctggcatttaaacatgaaagaataatgattcgaacgaccatgatgtaaactatcagtatcatattgctaaggtcgacccaataacaaagagcatgcttccataaggataacatcacaatcagcataatcagaataagaccctagtgaaaaggggatacgtactgagcgttttacctttattttaccaccgccattaagcaattgaatgtgatactgatgtgggtgtgtgctagtgggtaaggataatttctataccaaagtcatacttgccaaattattgcacctgacactatcgatgatga

SEQ ID NO: 64124 - DNA, 457 bp, Zea Mays
caagtcgcatgaataataggataagccattgcagccactattccctcatccataagcccaacattgcagccgctgtggaaggggatgtcacctgtggaagaagggagaaactatcaatgcaggtgaggtcagtgacagttaagtaaatttccttaaatctgtgtcccaagtgccggtactgttctggaataaactaaacagtgaagaaccgttaaactatcagtataaacagctctctttaagtaaattcccttaaatctatgtcctaagtgtcggtactgttctggaataaactaaacagtgaagaaccattaagctaccagtctaaacagttctcttttctttccccggatattcagatagcactctccacaggttgcaggccagtatatgccatgattatgagtttctgactcatcttcctatgtcgttgtagttgtggcaggtaaactgtggg

SEQ ID NO: 64125 - DNA, 754 bp, Zea Mays
ataatagatctccataacacattaggcttagtgtgttgatttgttaaacagtggagcatagatagttaagatcaaagaaatacgagaacaaagagagaatattaatgtgtcctcagatccgatcaagtgaccgagttaggatcagccacacactctggtcgagggcacatatcctctatatggttgtgcctatgatcatatgcgctatataaacgagacgttggaccaacatggaagcccacactttttcctaacctaggcaccacacctaggtcggttccgatctacctatagcgccctagtggctagaaacatgccaattttatcctatgacattggtagatgtaatacccaaaaatgtaaaccagaaaaatagtgggttgaaagagttgatcaccccaagtgcatgacttttattctatatcacatgctaacactcatgtcccaaataaaccaaatcaacaatggacacaatactaaattatgcatcatgttggtctttggttgtatgtgcattaaataaaaatatatatatatataataaggataaaaataataataataataagttaatgaatatcagaagttggattaaaccctaagttgaaatttgggtttgaaaataagaaaaagagaaagattatgaaaatataaatgatatatatgtaaatcaatatatccagagtcaatacccctaaaattcacaaatataagttgtagtgatgaaccatagaggtttgaattcaaatttaaa

SEQ ID NO: 64126 - DNA, 498 bp, Zea Mays
tttcagggctcgaagatgcaccacctttggcatttttgctttgtccttttcctcctctggcgacgaagtcccaaaaatggcatcaacaagagactccattcttggactctttcctcctgtccagaatccctctatctccgtgggtgccgaagcctaaccaccttggcctgtgcccttcgccgttaataatagcctaataggctggttagctctagtcccaaagggcttaaagtcgaaaagggcaaaggctgagttattacatcaagaattcgcgtacaacctagcgatgaagtagaagcacttcccttcccctgctcttatgcagttgcccactttttctgagcaattctagctttcttcttatctaaaggggtggccgactcttcgccactgtcaatttcatcatcttcgtctcatcatcaataggcttagcttgtttgtttttcttggaagtctacttgtcagttacctttgtgctcctctgtctttttttctcta

SEQ ID NO: 64127 - DNA, 625 bp, Zea Mays
atagtagtcaccctgaacagtcgtgaaagcaagtgtgccatgttggttttaaggcattttccaacttaagttgatcgcctggctggtagggcatagtggtcgccctaagataagtagacgtgaggatgtcgcatcgtattgagtcatcaccgacttaaaccgattgctccattagtagggtatagtggtcaccgtaagtcaggttagcgtgagcatgtcgcactgacttaagtcgtcgccgacttaagccgattgctctgttagtagggtacagtggtcaccctaagtccggttagcgtgagcatgtcacaccgacttaagtcgtcgccgacttaagtcgtcgccgacttaagctgattgctccgttagtagggtatagtggtcaccctaagtcgagtaagcgtgagcatgtcgcaccgacttaagtcgtcgctgacttaagccgattgctccgttagtagggtatagtggtcaccctaagtcaattaagcgtgagcatgtcgcaccgacttaagtcgtcgctgacttaagccgattgctccgttagtagggtatagtggtcaccctaagtcgagtaagcgtgagcatgtcgcaccgacttaagtcgtcgctgacttaagccgat

SEQ ID NO: 64128 - DNA, 333 bp, Zea Mays
ccgagactcagccaacactgataatggacggcgggttgatttccccaaaacccaggggccctttagaaaatgtttcatagcgaaggggtatcggtgatccatagccacccgatcagaaatcaagggctgagatcaccaggccgaagggatataggattcatctgatctagtctgtccatcgcagagtgtacgaccaccatccaagcggtatcctaattctaattcggacctatcatcccaggatcaacggcccacgtcgaccattgccagatccgatcagagccgtaaattccaagatccaacgatcatgaatttatgcaaacgggatgtaat

SEQ ID NO: 64129 - DNA, 699 bp, Zea Mays
ccaaatatcattgtgtaacaataccatggtacaaagagtactaaaaagagatagtatggagcatatggcgcaggtagatggtcatcctgaacctggacacgagtgggagacaacacatgggcttcaattgtagtatgtgtaataccctacatactctggttattcatcgattgatgaacacaaaggtcaagaagattgcaagcttagcacccgtaagcatcaagaccttctagctcccccttatctattggttgtggtgggagttctaacctaatggtcctaaagcacctttaagcatgccctttgtgtatgatgaattctattttgagagaaagtgtgtttgtccaacctcatgggtctaaccccttaaaacattactttgtcactccctttttatagtgctagggaggagagaggttacataaacctcagattctactgttaatcccaacatcacgttcttatcctattcatggagtcgtatcgaggccatgtccttagacgtgacacagtgtcaaagatgtccttcggacggttgtaatacctatcacagaggtaggtatgatatgtcccatcctcaagcctcaaagcacatgttgtttagtatgatgtagttgatggttgatgtagcattttatacttgataatacttaatggcacaatctgcatgcgcatgtgtggctacagggtcgatgcacg

SEQ ID NO: 64130 - DNA, 543 bp, Zea Mays
attgcagtcttgcgctcatcagagaaaccaatgttgaccctcttggtttcttccgttggcatcatagaggtagcggcggatgctttgttcatggtgattgtgaggtcgtcctctgctggtgtgtcgtcattccacgctaaaggtgccatcgagtgtccagctgtgagggccgtctggatggccccccgaaagcacttcgcggctccttgaaagtggccacggacggtgttgataccctaaggcccgagcatcttgaagcataggaactcggtttgagtaatgtgggatggccatgaatttagctagtcctggcctcccaacgatagtgttgtatacgcaatcgaatcaagctacctcaaagcataggaactcggttcgatagttatctagggcgccgaaggtgaccagcatgaagagatgtcccagtgggtactccccttcagtcagcatgatgccaaagaattgggtgtacgtctgagtgaggtcagtggtcgagattcctagagctcgaagcgttctggggaaggtaacattgatgctaat

SEQ ID NO: 64131 - DNA, 960 bp, Zea Mays
tatcaggggtacctacacctagttcaacgagaagagcatgtacgaacaagtccatgggctcgatagagagcctaggcactcagatgtcaagacaagaaggaaggcctaccatgagaaagcttccataaggataaacatggcgaaaaattattagatttggatatatggttaagatcctaacagatatggcaataccttagccgataaggaagaaacactggtaaagatagagattgactctctgatagactatattacaatctcaatcttgtaacggacccaaatactcatcctataaagcactgctcctccttggactataaaataagggccaaataagccctcaggggcagatcatcatatcatactacataacaatagccaccaccacaaatattacacagggtattgttggcagttgttattttgtgttttcggccatcaactatcataggatgagtgaattcatgaacaaagtaactcatcttgctactaactgagtttcacaagttttggttggaatatttgaatgcaggttgagaaaacatgcagaaggtgtgaaatggctaatcaaggctaaaaatggcatggcctgtcggccaaccccctgaccgtccgaccatcctataggctgcctaaccatgtccatgatcatccgaccaagtccttggctgcccaaccactttggccaaactttctccccctttttcctacacacttgtcatgatgcaaccaaaacaacttgagggtgtagccacaaggatgccacgtcaaagagctagaagaccaccacatcattaattcaaggcactttgatctaatggctaaggaataaatacgagttcaatccaatgattaaggaaaataactatcaaactgacctctaggaagcgttgtggaccattggatgaagaatgcaatagagagtggtcggtcagccaagacttggccacccagccc

SEQ ID NO: 64132 - DNA, 1192 bp, Zea Mays
attttacgcattttctttaagccttgggctgcggccacaatttccgaaaagttcagtgtctaaaacgtaaatatagggactgaactgtattgttctttatattctcgtggacagcgggtttatttgtactaactcgaggggcccatttgcaaaagacgtgtaaccgaatggggtatgggctgatcacagccgcccgatcggccatgaacgacgccgattagatcatcactttaaccaaacggtacaaaatatgggtcattggatacaagatctacggcgtaggtttcaaataagcacgatctaatctccttcgctcgatctagagtcagcggccaggatttacgcggaagggtacgcgacttctaatccgggtcgtctagacgccatccaacgaccacggtgccaccagccaccccctcctccaaccctgccgatagcaggcggcggtgccataacttcccacgacggagcatcagcggagcatggctattcgatgccccggtgccttattcaaaaattagctagttgctatacatagtagggagagtggtgggttccagggaagtgatcacattacgaatcggctcgcgatgacgccgagccacagtgaggcgcggatctatggcgtgagaaacaacgacaagcaatcgtcgacgccccgacaccctaatccgagcacaattcggcgcgaattgaaccaaagaaggtatctaagagaaggagggccttatcggagtattggacagcgcaggagccggtcatcgacgaagggcgtcacactttatcactcccaactccggtcgtagctggtgattcgtagggtttgccgatggaacgacctgggcacgggtggtcacatatatagctgcgagatgcggaatccaaacaggagtagttcgcgtggcggccggatcgtcccgagaaacccggcgacaacatagcaactctgttggagctccatgtggagtacatcggccaggaagacggacccgccaaaggtggccccacacgtcagtgcgtaaggaacccgaacgtgtcacatggtgggactaggcggtggagcccacccgtcatccacccccgtgcatcagtggagaagcgagcgcaagtgggccgtgatcccattctggcgacccaatacaggtttggtttcttttcttattttctatttttatatctggttacatttcaa

SEQ ID NO: 64133 - DNA, 762 bp, Zea Mays
ccaggtttgcagtttaggacccctctacaaaggcagggggtccggcagcctgggggccagttctagagaatgggcgcccgctccctggggtggtccggagctgtgcaacctcttagcttggttccgtaccttaagccagcacgctccaccgctctaggacgggcaccctagtatttggaactatagtcctgtgggttcggcaacctagggtccggttctagagaatggacacacatctcctagggtggtccggagctgtgtagccgcttagcattgtctcgtaccctaagcctgcacgctccaccactctgcgaccgccgtcctagtatttggaactgtgatccaagggatccgagcatacggcttggcttcccagactaaatcgtgcaggtcctgttgcatgaatcaaaggatggcaaatatcacacgatgggtcctatgggtgtgctactaacgctccctacccgaagctgtgtacaggtccaggtcccagtcgaggatacctcgagggggccgttgccaactctttcttaggtatactggtatccagcctcgacacgtcgagcctacatcccaggggggccaagtaccagggaggagttggtaacgccacacacaacaaggacaaatagtttacagataagtgctggtactgctcgataaatagtactcaaaagtatcttacaaaaacaaaagttattacatccgccttcaagtggagccctagcctcatttctacaggtatgaactactcggcatcag

SEQ ID NO: 64134 - DNA, 304 bp, Zea Mays
tgtgagcggtggatcatctgcgatgacgcagaggactccgagaaaaaccaagatctcgtgtctcaggagagatcccatcggaatggatggatcttaggttgcttatacaaagctcatctagatgacgtagagtcatagaaatgtgaagattagaggttcagaggctacaattacggctcgaactacttctaagactaatgcataaagtaaataagataatgcttacttggatgtttgcttactttttttagtttagcttgctagactagtggtatgattagaaactatgttacacgattttttt

SEQ ID NO: 64135 - DNA, 511 bp, Zea Mays
tttcaattctttgatgcatatctctagggggagcctatttctatgtcttgatcatatcgagactattgctttttcctagtaatctcatatagtctcttgcatgagaataagtttctcttgatgtatgctactacatatatccaacttgttaaaataatgtcgctcttatcaaggattgttgctttcattgctaaagtagcatatgtactagattctcctattctaatgcatatgttgttcttttgatcacatctgttatttgtttgatcattgaataacttcaattaaccttatgattcttagtgtcgcatattctatcaatcgatatctctcttgatgtgcactaagttaaaactgagaattcatgatatatttatgcaatttgtgatccacttgatatataataacaatgacttaacaaaggatcactagttgtagaactctctcttgtgcaaaatattttcatatattgtcttgagtataggtcttaagcgactaagactaaggacaa

SEQ ID NO: 64136 - DNA, 568 bp, Zea Mays
agcgtgtatcagcaagttttttgtgcgccttgtgatcgagttttcctttataatcacagacagtttcagaactgatcggtatcctaccacgctcacggctcatccggctcagatggaccaatgacgatcccattaaaattccattctggcaacccatcaggatacacaagcaacgatgtcaggacgattcgctatatggggagaagattgggttaatttaactacaagttcagggcaatttcaccatcccctgtggagaaaatgctgacaaacgtccttgctaacccaacaattacctccatgtgtcttgagtgtgaggagtacaagttcactggtagaactagaagtgtcaaagccgccctttgtctccctcaggagaggaggatgggttaaaggatgtaaacaaagagcaacgaaaatacaagagttagtagaaagagattcctccattgaagatttaaggatgaataagttagcacagagagatttcgtcaatgaagtttgatgtaagaatgaagagaacaaccatcagcagccaacttgtacatcctatcgcacaccttgttcc

SEQ ID NO: 64137 - DNA, 595 bp, Zea Mays
aatacgaattaaacaagttttcttgatttatttttaaactaaaaatcatttcctatattaattacttatttaatcaatccttgggctgcggccacaattccagagaagcacagggtctattacgcaaataactccaagactcaggactggaccgcgggttgaatacctaaacggacaggggcttatttgtgaaactggctcggcgaaggggtatgggcaatccccagccgtccgattaggaacggatgcgccagattagatcgatcatttgaatccaaccgttatgcaatactgatcgcaggattagagatcaacggcttgatttaatctatgaagaggtacgcgatctggaccaccggatcagcgatcaagggcttggattttaaatgaccgcgatccaatctgaggcgtccacggttagatcaacggccaccgcaaccctaccacgaagtggtacataggtttaatctagaccagtcagctcgagatcaacggtctgtggctcatcacactatcgtccaaccggagccgttgatcacaagatcaacgctccacgccttctcttccccacgccgcaaccaggcggcagcgtttg

SEQ ID NO: 64138 - DNA, 636 bp, Zea Mays
ggggcccaaatcctttatggcgaactcatgttgaaggatggtgatgatccggtgcaggaggcccgaagaggagacaatgagcacgatgtcatcaacatataggaggaggtatataatgtcaccgccatgcccggtagatgaatagagatgtgttcgacttagcctcagcaaaaccaagggagagaagatatgtggcaaataggttgtaccaagtttgggggccttgttttagaccatagagggacttgttgagcttacaaactatgttatggtgagcatggtcaacaaagccaacgggtcttagtcaaagtcccatggaaaaaggcattcttgacacccaactgatgaactagccaagaacgtgtgagggcaaaagtgagaactacacgaatggtagaaggcttcacgatgggattgaacgtctcaccgtagttaacaccaggacattgagtgaagcaccggagaacccaacaggccttatacctatctagagtaccatcagccttccgcttatgtatccagacccgcttgctagtaaccacattgctgcctaggagatggggcactagattctaggtgtgattggcaaggagggcttggtactcttcctccaaagcgcggtgctagtgaggatcg

SEQ ID NO: 64139 - DNA, 633 bp, Zea Mays
gctaggtgatactaataactaatagtaacaagaaatctgaagccaacaaataccaactagtaccaccaaatacaacccctctaatgcaaaacactagaggctctcaatctctcacaaatgtgatcattaagtcaagagagggagtgggagtgtgtttcaacttagaatgatgtatgcacttcaacaaatggccatgagacccccctcaaattcatccaaccaactatttatagaggggaacaaatagaataactattaccacatgcattagcttcatgacctcttagtctaatagtttgggcctagtggtccaattgtcacgcgtcaatggctactgattgtgaccataatgactagtttcattagtctagtgttttgatctagtgccttaaccatagaactaatctgatggtcactagagagctccaaaacaataaaatcatcactgggttagtgtagtgcttagcatcaaatccctattagtatttggttcactcaattacgtcatgcttatcctcacgtagccgtggtccaaaagctaggcaccaacaggccccacataggctagtggcccatgtgaggaatcattcaaccacgcactacgagcctgtttggttcagtgtctaatttgcc

SEQ ID NO: 64140 - DNA, 623 bp, Zea Mays
tttgtgttgtaagcgaggactcgactgtctcgtagttgtccacgtcgtatgatcctccatactcatcctcaatgaccacattgtacacaataatatatgtacgcatgatcacactaagtatctggtgggaaaaagaatgaattgagatgtcaagaataagaaatcaagccttgatcaccccaaatgttctttccacatccttctgtgtgccctcctagcacatagaaaacatcttcgaagtctgtgggagcggaatggtcttcacgaacaccggccatcgagggtagataccatcagcgaggtagtatccctggttgtactcatgaccattcgccatgatattcacatttggtgcttcacccttgagtacatcagtaagcaacacttattgattgagcatgttcacgtcgttattcgatcctaccaccccaaaatagcatgctagatccacaagtcgtacaatgcatccactccgagcatgatggtcggagatccaatgtccttccttgtgaattatcctctccatccaataggacaacttttcccttctgatgcatgcaatctttactccctatcataccataaatattctttcttccccctcaattaacagtcgtctaagg

SEQ ID NO: 64141 - DNA, 707 bp, Zea Mays
cgcaaagaggtttctcagagctcgagcgaagacatcaattcctcgggagacgcgcaggtctctagcaattcctcaacaaaatgaccaattgccctcagcaccgactctacagccgtcgtacctaattttctctttctgaaagccgcacctggagccctatcccttgagggaccttcatcagccgagggcctcacttgcttccctcaggcgatcagcggtgtcggcagagtctcccttcgggtaagaaccataaggcaaattatttagctcaaacacacggttcaacctggcgctggaaccacggatatcccaactcctcaatgtttctgtcctcggcgcgtatttaccgacaatcttgacggcttcagcctcgacttcgtgcacaaaagcagtcgcatctcggccgcgcaggtccacgacaaaggccggacttcgcaccaattggccacccaatgtcagcattcgacggggggtaacgtcgcccagtgcccaaccatgcgccaggggccacacatcgcaggcaataaactcttcgtctaaatcacatccactactcaagcggactgcatatcgaagggcccctcatcttgatcttcttctgccacctcaaaatgtggaaatgtcacatagcaatgcgagcacaggatggcagggggcaaactcggcaacccttcgacatttctgggagccacataaaaccaaaattc

SEQ ID NO: 64142 - DNA, 814 bp, Zea Mays
gaccggagacgtgaacgccaaggtgactggccggagcggagaggtaacagcagggggtgcagacaagatcgaaggcaccactggagcgtgaagcgaagaaggcggagcagactgaaccggaggtgctgagataccagaatgctgaagcatgagggccatgaatgccctattctctgccctatcctgaataagctgctgctgaagagcatcctgcctgtcctgcatgctctgaaacatcgagagcatcgtctcggataaccgtgcctgctcggctgccaggttggccagaattgccgcaagagcagggtccatagccggaggaggagcaggggcagcacgagaactcccagcatcatgatcatgggagcgaggaggcataggaggcggaggcggaggaggaatcccaaaatcatcatcatcatcatcatcagctgttgtaccctgggtgtcaaactgtcgaagtgcggcatcctcggcctgagtgtcaaacacaggagcataagctggcactggaatctctggagcaggacggtaagatccaaacacaaggcgtgaggcctcaagggtactctgaaaacgaggtggctggatcagctgcgcaaatatgtggcacaagtagtgagcatacggtagctgccgtcgagcacgaatcccatccagaacagtgtcctcaatctcacagatcagaaagtcaacaacatcaaactcagagtgggataccagggcaccaaggagccaaagctgaatatgagtggtggcctccctgtatcccatcctaggcaggagtgtccgtctgacgagctcatacaagtac

SEQ ID NO: 64143 - DNA, 501 bp, Zea Mays
tgtgccacatgtatatatatatagtcagccttcctagagctccaactttctctcgagcagaataggtactcctttgcaatcacacccacgctcgttggacagtcacaccggtcaccgtttgccacctgcagtgctggtaagaaccttgtaagagcggggtaagacgcttcataacttgtgttccaccaccaccaccctgagagatagttgtagggttcacattgtttgttgcctttttgtctctgttttgtgctagcaatgacaggaccaaagaaccaaatggacaaggagaaggggcctaagcttaacgatgatgagtgtgtctgtcagctggaattgaaggagatgatgcgcgcgatgactgaagcttttaaaaataccaggactctgcgacgacatcctatgagcagcttgatcaacgagttgctgaacttgttacacgcatggacgtactggaggctcgtcccccaccaccaactctagccccagctcactctcctg

SEQ ID NO: 64144 - DNA, 413 bp, Zea Mays
ctggtgatcaggctagacataggcttaacgggtcgagggaggagggatggttacccgacttttatcacccagagaggtcggccaaaacggtcgaggcggctgggagcttcgctggtggaggctgcggcgaaatcgcggggtcgttgcaacgagcgagagttggaagatctacagggctgttgtcgcgggtccaccagtcagccagaaaacggattagcgggcgcgtgcggcagagaaagagaatccgatgagcgagggaaggaccagtatgcgagcggggcccacatggcagtgcacgcgtgagcgtgagaaagaccatgcgtgggctgcgcgggtgggtttgcgtattgggccgaataccaggttagggcccagttaggctaggttagttttattcttttcttttctattct

SEQ ID NO: 64145 - DNA, 608 bp, Zea Mays
ttcaataagggcttttgtggactagtgcaccagaccacttacgcagagtggtatgttcctggagagctaaagtgacatgcgcattggaccagtccggtgtgactatcaaatgtaatggctagttctagctccaacgactacccaacgtggcaactaatgacgtatggttcggtgggtcaccgcctcatcggaatgatccaatgccacctgatatggcaactttcgttgattgcgcaggtggacagaaggtctggtggcgcaccggtcttgtacgatagaggtttggtgcacccgtggcaggtgtagatttttgaaatctaagctaacaactaattgagggcttttgggctataaataaccccttagctgaccaagacaaataaaaagagttgtgctttcattcctaacacatcgaagtcatttcaagagatccaagcaccatacttgagaagagaagcctaaagatagtctttctagaaagagtgtgtgcttaggtgatccgcattggtggtgttatgttgttgtgttcttgctcttgtgttggtgatttggttgttgtaaagctggcaagaggctttgagttgtgcggtgccttgcagagactatct

SEQ ID NO: 64146 - DNA, 557 bp, Zea Mays
ggtttgacaattttagaattattctacaattttctataattgttggagttctgctggaaaaagaaaaagataaagaatgaacaatcctgggccgatttcagcccaggtggcccagtaacacagggaaagcggggcgcgcccgcgtctgtggtggaagctttgcagaaacgccctcggggttatggctaactggcgatgggttcggttactgttactctgtgtcactgacagtttacacgagggtccttcggtttctattcctttaccgcgccaggtcctcgacgacggtgagcgcggggaaactccgacgagcttgcagactgaccaaacgaggcaatgaccggcgctcccgagcggtggacacgaaattggacctccctcgattaattcccccaacttaatttcacgattggtaagctatcaacctctgtccacgtgaaccgcggatgatgaggacaatggcacgcgttcccggtgatgggaggtggttcagttcaattgcgcgggttggtgagcatcacccgtgtataaggatgctaaaacaagaacagagaggg

SEQ ID NO: 64147 - DNA, 459 bp, Zea Mays
caatattggagacccactctacgtatctgcaaggtctaataaaattagcttctagcagccggtgaatttcatccttgattcatgggagaaggtctagatgaaatattctagctttctgcttgaaagatctgaaatcggacttaatgggcagccgatgctctacgatctcacggcttaatcccggcatctcagtgtagctccaagcaaagcaatccgaatattctttcaatagaccgatcatttcatttttaggatcggtctccagggtcttgttcacaaaagttggccttggagttctgccatctcctatgtcgatctcctccaacggatcggccgatgtaaacccctgtcctaatttgtcgagatctctgaattcctctatcatgtcccccacagagaaattagatgatctttgtgtgatggcggactctccggtctcaggggccggatcatccgtga

SEQ ID NO: 64148 - DNA, 428 bp, Zea Mays
gggaacaaccgtggcatgcactaaatcccttgaagaaaatgtcaaggacttgaggattgccaagaggaaggaacaaaagaagaaaatcaatacctcttccaaaagcctcaaccatgcctccataaaaggtaacatccaaggtaataatcaagtcacacttcacactgtaatatctcaaaaaaatgttgaccaaaagttgatcttcggtgcgtggatatgggaaaatggttgtgggccgttggaagttcagagtcagcagacgtgaagatctcttttaaatgatagcatttgagtattcatttgtttgaataggggcatagatgggggatttggttgtgagtcgtcggtttcgcatcaagggcatcgggggcatcgctctctcctcttatcaaaaaccctagctgcccctccccttccctcatagcagc

SEQ ID NO: 64149 - DNA, 549 bp, Zea Mays
taattaccttattatacctgaaacagacttaggaataaccggtaagttagtgttttaatgactttggccaaagaggaccccaataggggcgacgaggcacgctgcagtgtgtgtggcctacacatccggccatggacggtcgtgaccgagtgggacggtggtcgccaaacccaacaagaaagatggagggcggagtcaccgaggggaaatgagaggaatccggtagaccaaaggatccggaaaataagagtcgtactttacgagtacacacacgatcgccgaatggtttttaccctaacgtgccacttattgtgtagggctggccaagagacacggccggcgtgccaggccatgtggcatgatgggccaaaagttggagaacgacctagcctgccaaacgctctcgtgcttttttgtttcggaccgtgctcagcttggcccctacggcacgacccaaacttacagtaccgtcccctccctgcatcacgattgtcttcgtccggtcctgccgtcccatggcaaccgatactactcccgaggagtgacgat

SEQ ID NO: 64150 - DNA, 1030 bp, Zea Mays
caggaacccacgcagttctcttgcattaacaggtactgaccactgttgcaccacctgcacctttgccggatcggtggccacaccctcggcgctgattatatgtcccaggtaggcaatggtcgtctacgcaaaggcacacttggtcagattgactttccactggtctcgttgcagcagtcgcagaacagtggtaaggtgttgcaggtgctcctcccaagaatgactgtaaatcagaatgtcgtcaaagaaaacaagagcacatttgcgcagtactggggagagagtgtcatttatggcttctaaaaatgtgttgggtgcaccagtgagtccaaatgccatcaccagaaattcaaagtgacccatgtgtgtttgaaatgtcgtcttatgttcctcacctgggcagagttgaatctgatggtaccctgctttcaagtctagtttgctgaaccactaagcatgtgataatttgttcattaattggtcaaatactggaactagatacttgctcttgactgtgatggcgttcaagtaacggttatccacacagaatctaggtcatgtcctttttcttaaccagcaaaactggcgaagtaaatgggttggagctcttctgaattacgccctgagacaacatctgttagacctgcttttcgatttcatctttgagagccagggggtagcgataaggtctgactgtaaatggattagcgccagggatcagaggtatggcatgatcacactgacggctcagtggtaacccgacagggtcagcaaacacctcggcaaactgagacacaatcgactgtattcttggtgctagattgtgcatttcggtctgtttagcactcgcatccgattggtctggcagtaggtgtagttccaccaatgctccggaaggaaatgtagatactaccccttgtaaacaaatggaagtatcctaataaagtatgatcatccacttgttgagccagtcgactcgaataggactacgggcttgtaaccagtccatacccagaacaagatccaccga

SEQ ID NO: 64151 - DNA, 296 bp, Zea Mays
tatcttatcattaagacatagatcctccaactcattaatactagccaaaacacacacgatttcaatgctacggttgatggctaacatttacatagcatctcgtgatccttcgccgactaggcgaccagagatatgttttttggattattctctttgaatgtcgattcggcgtggctcggtcggaatcacaaaagtaactggtttcgatgtttgctaaaatagttgatgttagggtttactcagccattgacttgtgtgacaataggtaatgcaagacacgctccgcctaaccttcc

SEQ ID NO: 64152 - DNA, 304 bp, Zea Mays
taattttgcacacagtacgtgtcgtttggaggaggagcagctagctaaaaagcatgttgaaagatctgccaggctaccaccccgcgagattgcacacacaacagtaaagtaaagatgcacatatttaaaaactggattagggacacgagacgatcatgaaaatttgggactgcatgacccttggtgtatatatatagctactcctaattagatacatacaaaggaggggtcaggcgatggaggagagtgtcgccgcgtcttgcttgcctggcgtgatgttcttcaaaagaccccgcaccttcat

SEQ ID NO: 64153 - DNA, 884 bp, Zea Mays
agtaggcaagcatttgaggcttgaccaaaccacgataaaaatcattgtgtcttgtgtgcttgatcttttgcggtttattattctaagtttttgatctacacttgtgttattgctctagttataattctgcaatctaagagagaaattaagtgcaagaacttactccttctctcactctcttggatcttgtttttaagctaacttataattcgagatccaagtggtgttaagttgtaatttttcaggtgtcacctattcaccccctataggtgactatcagtaaactattgagtagagagtacaagcacatagtgtggcagccatgtcttgcttataccattaacctaatgttgaaggacatttgcaagtggtccagtcattaagcaataattcatatttcccactccataggttaatgaatctgaataggatgaagagattgggagtgacgatagcacaattgaccctagtggaggtaatggtggagaggatgatgatagccatggggatggtgaaggtgatgctgaaacatatgctcctaggggtagtgatggtccatggagtgatgttggagggagtggtatgcgggattggagtttcaccaaagagagttagttcacccatgccatccaagatttagattatgtagcacctcattcagaacaggagatgagaagcggtcgatgacgattggtttcccttcctgttgatgatggcagtcgcaactcagttagcttctattataactatctaactcgacgcgatcaaaacctaaacccttatgcatggctagcacctcccattcaagtaacgccatcggtcatgtatgagtatggacaaccacccccctctgccttcatatgcatattcacatccaatacttg

SEQ ID NO: 64154 - DNA, 281 bp, Zea Mays
ctacttgttccatcctgccatggttttgcacagtgcttattcggcagtaagaatagttgcgatatgctattttgttgtttggggtgaaggatctggcctttgagtgaactttggttttggaatatcttgttgctggtctacctaacagttgctttcttcctccacacattttcatccgactgtagttagccagcttccctaactttgtgccttcaattataaacaaacatctacttttgattatttttagctttcttattgtgaataagtgaagtggttgc

SEQ ID NO: 64155 - DNA, 571 bp, Zea Mays
atggattctgatgttgtttaacatttggtatgaaatgaataaccatcataatgttatatctataactatatttttatatttatgaatgatgaagacttgttcttcatgaccttcgtccaagatccattatacccgaaaaaagataatgcttcgaaggacgaaggtctttaacgtttaacaattgtgttgccttgctttatgattcagtaataaaaaacaagtgaccaacaggtacctcttgcacatcatggtagatcgccaccaaaaggttgtccaggagagggaagtagaacttgcttccctaacgaccctattgcaacaacccccactatgagtaaaaccgtgtcatcccatgatatccagtctcttaagaattattgtgatgacacattcaaactcatgagggtgtctgtggataagtttgtcaaacatgcaaaaattcctatgcctaatttttcgtcgcataaattaggctgaaacagttgcgccaaacacatcgacaacaaatgggtttgctcagtcctagccatattacggtatgccgatgaattcatatctggggtaatcgttg

SEQ ID NO: 64156 - DNA, 645 bp, Zea Mays
ccatgaacatggaatttgcatattcggcatatcaatgttgtacattccagtttcaagggcaaaccgcctaagttcggcctcggaccgtccggaagccaagggcagattgttcataggtataaaactccagatgaccagattgtataccttactggtaagatcggtatttggaaccgcagaccatttgggcctcataggcggaccatccgtgaagcactatatctgccatccgatagagcatttaatacacatctagtcgttgatatagttgttacatataaatgttgcggtctacacgttgatcttataggggtggaccgtctgtgtgtacctagaaactacaatttgccaccaagagctatgtgtgtggttggggctataaatacaccccaacgagcccattatgtcatccattcactcaaattcaatacaagagctacaacattcactccaacattcaaagcaacacctccaagtgatgaaagccacacaagtgccacactaaaaagattagtgcattgagttagcgccttgtgtgagagtgaattagtggagagtgtgttgtgctcttgagattagagtcttaactcccattgattgtaaagctagcgagaggcttcaacgtgtgaactacctcatggagac

SEQ ID NO: 64157 - DNA, 816 bp, Zea Mays
gggaaatagagatgaagttggaagttgtccatgctgatgacagagactaagtattgttggctatgcaacaattgaaggggccagcccttgcatggttgcaaagttatagagaagtcaatgaagacactgcagtgatgatttgggatgactttatcaatatctttagagaacaacacattcctagcagtgcgatgaagctcaagaaagatgagttcaggaagctccgtcagggtgccatgtctgtgacggagtatctatacaagtttacatagttgtcctgtcatgctcctgaggatttcaacaatgatgagaagaggtaggaagcctttctaggtggtcttaactctgaggtcaagaccttggttgaggtcaccactcataatgactttaacaccatggtcaacagagctatcaccattgagagaatcaggaaatcagagctcaacgagcgcaaacgtcgattcgagaacaagaagcctcaacagtgagaaaagttcctgaggactcaatttcctactcactcagtccaacagagccagagtgcgtcgtatttcgaagctcatctggttctttccagaagccagctcaatcagccccaactgaaaagactcaaaacacctttcaaactcaatagtctgctggaagaagccaagtgagtaacccaagagcatgcttccactgtcgtgagataggtcacttcattgccaactgcccatacaagaactagctagcaccatcggtcttttccaactcggtgaatggaccataacaaccaattggagtcaaccgtgctacaccagcaaggagccaacaaac

SEQ ID NO: 64158 - DNA, 509 bp, Zea Mays
gcagtcgtcgtttgctctgccaccgcgcatcaacgttccagcacctcgcagccgcattgaagctcttgatctgaactcctagtcccagggtaccgattttccatatctctcatcctaccaagatgttctccagtcaggtgatggtggatccgacctaggtttgcctcctcttggtcgtggtagatcagcgcgcacactatttcaatccaccagatccatttcagctcctatttctcatgcccgaggtgcaattcgaggttaccgtggagttagggggagaggcactagtagtcatggtggaggtcgatctgctatttatgcacctattgaccctgtcctcattgaagattttggagatgaaccaaccaatgaaatggattctcgagctccagtggtaagaaaaattttcatgtcttcattacaatgttttactgtgtttgctataatgaattgtatgtgcctcaagtggtgattaaacaagatctgtatgtaccatcatctattgtcca

SEQ ID NO: 64159 - DNA, 561 bp, Zea Mays
gtcagccagctcgagctcgtcgggcaccaatccgttcgccgctgctaccgcagtagcgatctcggttgccaccgctcaactaatcaacatcaagtcccacgttcccgtgatgcttgatctcggcgactccaacttcggcacatggcgcaccttcttcctcatcgcgttccgcaagttcagtgtcctcgaccacatcgacctgatgcttgacgacgccgagtggacgcagatcgatacttgcatcgtctcctggctctacaccacgctctcctccgacctcctctccgtcgtcatccagccgaccgacgatgcctacaccacctggaccgccatcaccgaccagttcctcgacaacgtcgtgtatcggactgtccaggctcgtcagcagttccacgggcttcaccagggggacatgacgatcacgacgtactgcggccagctcaaggtcctgactgacacgctccgcgacatcggtgctcccgtctctgaccccgacctcgtcgtcagcctcctcagcggcctcaacgacaagttcgccaactgcgtcacaaccatctccgc

SEQ ID NO: 64160 - DNA, 530 bp, Zea Mays
ccagcgcgacttcgtgaaattggacgccaccgctgatggagcctataaattgccgcccccgcctgctccgctaagtagttgtgtacccagtaaaccaaccctcgcctcgaatcatcactagagctccccaatttgggattttccccaaatcaaccaaaaacaccgagcggtgtgacctcgccgtggccaatgagtttcaggtccgttcatgcccactgtgctcttgtttcagcacccttacttgctcctgatactcgctgacccattcaatttagctaggcggtcctagatcaccgggaacgcgtttgaatgtccgtcgttcccgctgtcaccgtggacagagcgttttcgagctccgatagtgaaattagttgaggggaaacacttgttagggcttgaattaggtctgcgccaaagtagagcaccgatcgttgcgtgaatcggccagtgtaggctcgctagagctcggcccagcgccgttcgccatcatgcaaggcgagctgtgaagagatagaagtgcaagggcttat

SEQ ID NO: 64161 - DNA, 1044 bp, Zea Mays
catccactcatatgttatcttagttaaacgtggtatatatgctagtggttagtgtatccgttttcatgcagtttgctatccacacccgctcacagcatgtcccaccgaaactctcccaaaaaaaaatcccacgcatctcacatgacagaaaatgttctattttttttttcctggtgctgatgagcctgtgtgtttcttcagaagtgtcaccttcagtaggtccggccgtttgttcagttgtcaaccaagcttccgtgtcaatacatgacgtgcaaccttttgtatattcacaaggatgtgaggaccaggttgcacaacaacctacgcacatatgatagtgcagcaggacacgcataccacgcatgcacttcgttctagcctccattgattctgcagaatctgcatgcagtgccaagggcatgcatgttttatttgctagtgtgtaccttggagaccatgccactggtcagacgggagatttccgccccatttaaattatagttaggaaatacatccattattattaatgtaaaaattttcacttatatatattgtggtagtgtttctagttctaccagggatctgtcgaaggaaaaatgggtgaggcgaggacaagctacggcctgaatgtgaatgtggtggatgcctcttggacgccgtagtcgcagaaaacgacgcacagggacgtggattccagctcccgtgaggaagctggtagaagatatctgctattaattgccttctcttgattacaaagttctaattatataggcttaaggctaaccgactactcgaagacttatcaaactaaactactccataatattagaagataaactgcaccaaccgactactccacaatactaggagacttatctaactaaactactccataatattagaagataaactgcaccaaccggctactccacaatactaggagacttatctaactaaactactccataatattagaagataaactgctaagacttatccaactaaactgattacctatctcctggtctcttgtgcctattctgg

SEQ ID NO: 64162 - DNA, 522 bp, Zea Mays
atgaaatccctttagcactactggggttggatgaattaatggatgtgcatgcaagcatgttgcaacaatggtgtgtggtagggtttttcaacctaatctttaaggcagtgcaaaagagtaatggcaggttaaaccttaggatgatgaacaaatttcgggatatcttagacacacttgagctaatggagatgcaactaagtggaagacattatacttggtctagtggtacatccagcccaactttcacatagattggccatttcttccccactgagcattaggagctgcacaacccgacttccaaccttcaggcattaccttcttctgtgtctaatcactacctttgctactatctcatatgcctgtaaacaacaaaaacaagacttttaggtttggaaccttttggcccaaactgtctggatacttggatgtggtgcagcaggtctgggaacggtcggttagaactctggacaacatcaaagtgatacatataaaccttttgaaaggatcacgatgcccaag

SEQ ID NO: 64163 - DNA, 489 bp, Zea Mays
ttggaatcaaacctgtcggtggcctgggcatttgagatctggtgttgttcaacacttgcctccacctttaaatcatccaccgcctccacacatcgtcttgttcttcttggggtgcctaggttcgccaccgcacttgtctagcaagccacactggtgctatcactgcttgacgatgggaaaagcacatcattctgacatggtgtctggtgctcggatgatgacctcaccaccaggtttcccgctcttaagtcacacgccaaaaaatctgaccaaagtgtatggggggtcctctcccacccgcgacctgaggcttttgcctctcgcactctcggatcaagctaaggatgagcttgagaatctcatcaaccttcttcacactattaagctcttagacttgcctaacatcaggcggtgtgcctttgctaagctagacggctctctccactcagggctcctctatagagctctgaaaacccaggggagcctacc

SEQ ID NO: 64164 - DNA, 722 bp, Zea Mays
cacgctttttgttgtctttttgtttgagctttcactacttgtttttctcttgttttggtctttcttaatattgcccgtgtcattgttttcagaccgattatgtatccaggtatggacttgaagtttaatgccacacctgctctaggagagcagacaaccttcaagtgggtcattgatcatgggtgtaaaatggtatggttaccattgttgatattttatatctctggttaaattgcttccttcgtacaaccataactattcaatgttttctttgagggataactattatattgttgatatgctttgtgataatgaattaccctgggctgatactttctattatagcacaagtagctagcccatctataacaaggacttgtcccctgttagtaaatgaaaatgtttctccctaagtctgtagattgtattgttcagtcaagttgttgctcattagaggcatgttctatattcataatgatgtctgaggtcccattgtatatgcacaaaggcttccagtgtattttttctacattagaatttttcaaagactgtaaattgtattagtgagacaagcagtcatgcattaggggcctggtccatgatacaattatttataatgagatagagatttcattgtacatgcagccacaaggcttctttttatatttttttaacatgagtgtactgatgcaatgtcgttctgttttgtcattttatttttg

SEQ ID NO: 64165 - DNA, 1221 bp, Zea Mays
cccctataaagcgtgcattagagggaaaaggaaaaggagaataaggagagagacacaccaggaagaagaagctcaccagggtgctcacaacatccttggaaaggggagggggcaagtcctcgtgcatgaaggacctcgacgataacatcgtaacgaccctgacccaggcttcgatctctaatagagcgagcggagtaggggaattgcgatcagggtcgttgaccctagagtattggtgcatcgatttctagcgggccatcagaagctggatccggtgatgcatgaagttcgcaccagccgtgcgtcggagagaccctatttatttagcgtcttgaccgccgtcagtaggtttactactttgatcttgaggctcacctctccaccatgctgccactcacccgaagacaccggctcacgaccggtaaatggtggggcgctcctggccatgttccttacataaaaccacttgccttcataccagatgaaggaaggtagggggatcttgaagtattttgctttccaactaaagcaaagcttaatgatgaccgagtcaacgtacagttgatggtcatgacccggggacacccgcacactgaagaagtactgccacagcctctagtgggggtcgatccccatgaacacttcacaaagtgtgatgaagcatgctatgtgatggacggcgttgggacggaggttctagatctctagcttatagtagtggagcccacacacgaatggatgaagggtaatccaaacccttgctcgtagaaggatgtgagcacgatcacttcatctcccaaggatgaggcacctcgctctcaacttctagcctccaccccaagacatcttttggggggatgaaccctttcttctttaggccatgaagacgactctcacagatcatgcaggatgggaacgacgccatgcgagcataaaagggatgggcacaaagatgagagaagacaaagcaatcgagagggtaaccccgagcaccctcctagtctacttatgcgaaagtgcaaggggcaaggatggcacccagaaggtggggtccaccacacaacaacaagggaggatccaccctttcaaccaagggtcgccttggcagtcgagcgaaggaaactgtgtgacttgaaggatcccgctacctagggcagagaaccagaaggacgcgccactgaggtcgcaccagtgacaggcagggtggttagccaaaccaac

SEQ ID NO: 64166 - DNA, 609 bp, Zea Mays
tacatttgcatgacctgctactagttcctatgctccaaaaggaagcttcccccgaaactaagcaactactagtattgcaagtcaattgaagcccaagaaccaaatggtcaaagtgatgcagaatattcatgccactctaaaggaaaattgtaaaattgcaaacaaagccatgctatgtgagcatcttgatgaagttatcaaggaagttcagtctatggcagttcaatgtggggcaaaggaaggatcaactgaacacttcatggcaaccaactttttaagaaagctgagaatcgatcctcctttaaggtatttgagacagacgaaggaacacttctttggttgaagcgatactgtgcacgcgcaggactcatgtagaagagcttactatgctagttataattgttgtgaaccatattacgaccagctgaacattagcatgctacttcttgcttaatgaacttcttatttgttgcttaagaagtcctttatgttgaattgaaccctattacacatagtgtcatttatgttgtgcaatggttccttatagatggatatttgttcaagtgatgatgaggatgatatgtcgatgactgttgatctcaaccgagt

SEQ ID NO: 64167 - DNA, 736 bp, Zea Mays
tatgcattgtttctgtaccttcaccttaaaaaaaacaaaacaccatgtattgccaggctgatagagttgaaatgcaaatgataaggttgcggtcggatcaatagacatatacaatactttgttcatctattgccaaactggaaagtttgaacatttttatccatgtaccctgactctgaccgggagaggtgacctgttcactgattcggtcccaagtgtgcttgaaactctggcggattttgcccatcaaattgaaacagcgtattgagacggcaaaacatctgtcaaatttgaattttatcgcggagcctactgctcaaagaagcacatacaacgtcgaaaatagaaacacatagtattattgttctaaaatctgatacatggtctttggagtattattttcgttgtttttagtggtggttcattcaatattgctaggcatacttgtgtacttgctatgcattatttttgtaccttcgccttaaaaaaagacaaaacaccatgtattgacagactgataggtcaaaataaatcataagggttgaaataaatgacttcgtttatctattgccagactctaaggtgtgaacatttttatccagcaccctgaccagcgtgacctaatggtgtgtttggttggttgtacgaggagggatggaacctgactagcgtaacctgtccactaatggtgtgtttggttggatatataagggcatgtacagtggagagacacaaa

SEQ ID NO: 64168 - DNA, 386 bp, Zea Mays
aaatctggtagttggagtaatggagcgtgggttaacttatctttcagcatcttgaaggaatgctcttgtgctgaagcccaggtgaatgatgcacccttcttggtgagttcgtgcagtggggcagcaatggtgctaaagtccttcacgaagcgacgatagaacccagcgagaccgagaaagctcctaacttgcgtgaccgttgtaggaactggctaactgtgtattgcattaactttggcttgatcaacttcaattccataacctttttccagcaagtcttgcacttggagttgtatctctttggtctcttccggattggtcctgtatggagcacgatttggtatggaggctcctggaatgaggtcaatttggtgttcaattcctcg

SEQ ID NO: 64169 - DNA, 351 bp, Zea Mays
ggaaatcgccgagtacgtgcattgaggttaggccgccaaccgccagttccttgatcctatccaggataggcacaaactctggtaccaagtgtggtttttccctccactgctttcggctgagactgggctcgtcactcggaagggcaagacggtcgctgacctcagtacgggcaatcacccagtcgtgccgccagttctcccacttcgtgccaccaagagaggcgatgtaggtcactgtcggatctgaccttgtctagaagtagtaggccccaatgtggtctttgcccttcccagacctcaccagcacaaaaacactggcgaaagagggaagtgcaagttgccactcccacg

SEQ ID NO: 64170 - DNA, 418 bp, Zea Mays
caaacacaaaccaaccagcacgactcctgaaagcctgatcgcactccactgaccgcctcacctcctctggaggagaccaaaaggccgagcacaccagcaccaacccagaacagagagagagagagagagagagagattactaaaaggctcgcgagcaggttagtcaaaacgtacttgtagctcgcgccggcagcccggcaccaatcaccggaggacagcgcttccctctccctgcgtggctatatcttcttcgacagtgggagagacagagagagacaacacccacacgctcgggatcggagaacgcgcacaggcactttccatcccccgatcaaatcgtcatcatgtgcaacgccgccgggacagattccttgccggcgccggcgcccccgctcggctctctcaaggcctccgcgca

SEQ ID NO: 64171 - DNA, 561 bp, Zea Mays
taacgttgtgtcccctcccttttatagtttaaggggggtacatacaaggatgctgagctccgacatgcgagcctaggagcataatggaaggaatacattatgtgaataattaatgctgacagcacatatgagcagaggcgtataggcggagtcgttcagattccctccgccttagtaacgcatgagtaatcagtgggagtcatgatgactgcagtccatgcagtattgataggcagtgacccttttcctggtaacgcgggagtaatggtgagtcattgtccttgctatggtaatgtgtgagtaacagcacggcccacacaacgtggactgggcacgccgcctgtcactggaatggaccgacacacgtcttatccgtaataaatgcaaagacacgcgtagcccagaggctttatgttaggctccgcccgttggcttacgccgcgcgcagttggccacgtggcaacatcgggtctccgcctaggcgaggagcaggagtgtatgtgataaggttcggatcccaccagatcaggtctggacacgtgtcggcatgggacctccgcc

SEQ ID NO: 64172 - DNA, 725 bp, Zea Mays
ggtaattggtgtactgtatttttcgcgtttcaccagtcggcgtgtagagtagttcgaatttggaattagcgctctgttgcgtggaatcatagggggtccggccatgggctgccgtgttccggcctgtggcgccgcaggtggccgggggaaaaaagcatacgggtttctgaccgtcgatacgcgatgagcggttcagatctaaccaggcgtaccaattgggcaggggctcatcgcgaccgttgatctacggatgagcgcttgtggttagaccgtagggttttaaatcagaaccgttgataggtaatccaagggcggcgattgaataccatttcatcgttcacatggttagatccaaaccgtagatctgtaaccgatggctgtgatcgcatgcttgtttataatgacgatggtctaatctgtaacgttcccttttgatcggacgaccgagatatgccgataccccttcgcgggtcaaatttgcacatgtgcccctctgtttttatagaataaactcgccgtccattacagctattcactgtgtctggggattcttaccccgaggcccctgctgttctctattttaatggacctagtccagagagtaggaaaatcaaagaaaattaattagaaatggatttttagtgcaaaaataattgctagaacttgtattatcatagaaaattcatatgaactccaaatggatccattccagtttctataatttt

SEQ ID NO: 64173 - DNA, 752 bp, Zea Mays
ccgtgggtctatataaagaagagttagaggccaaaagtgaaatggagttttttctagaaagattatgagttgcatgactcacgaaacagtttggtcgattagtttgattattagtaatatggacacatgccattgccatgaaacatagtcacacacaataaaactatctgcatgccatgttcttcaagatagtaaattgaggaccaccattctgttgagtaaagtatttccatgctcagcctggtcatgctagttagttgtatcctcatgaattgtgtcactaatgcctaatgaaggccactctctgcaatttaattatatgcatccacgactacacacgagagacaaagaggacaacattgtgcctctttgccatctttcacatgagcatcgttacagcaagccaccggatcttagcgagacatgtcagtacacgagatgacaaaacgtaaccatgtagtcctctatgtatatttgatatcttttgctgctttccatcgggggcatgagattatatccaacactatgcatactcacatgtcttaggtataattcaatgttttcatatgctcttagaacaaagttattatgaattatgattttagaggaaactaaaaattgatgttgcctataagtttgagaattattggtagacgggataaatcacttataatattgagttttagtaggtgcgtaattaattcaaaataaactcgatgacatctagaggccatcaaaactatacaaattcc

SEQ ID NO: 64174 - DNA, 637 bp, Zea Mays
ctctctctctctatttctctaggcagtgcaccccttatttccaccctttgtgcccaattcaaaatcatgtgaattccagtgaatccatgtggtgcaatgtgttcctatgtggccattgagtatccttgcaggttcctagctccttcgggaaggttttcccaccccaaatagtcttttcaccgaaaccctagaaccccgcacgtcacgtgctcggtgaaatgcccaaaccagccaaaaatgctccaattgaacccagatttttcaggcaccttcacaacatctccagtaacatattcgcaaaatttcacgcccatccgatattccaggctttaatttcatcaaattccccgtttcgagcgatcgtttccgagccgagtgcccaaatctctttttcttcgcctaaattcaaaccaagcacacacttcactcatattcacccatataaacctatttgtgaagtatcggctcaattccacgtcatttcgtgcctcaattcgaattccaaacctcctatggcactttttatcgttcaaacgctgttttcacgtcgtttgacctctcgttcgtctcatctcttgttttctgtgccatatttctctgtatatgtatttattcacatttcatatacttatgacta

SEQ ID NO: 64175 - DNA, 1237 bp, Zea Mays
accttgatacatggccgggacgccgatggtttggacatgagcgatggtgagcgcggcacggctcctctgcccgacggtgagcaagacgtggggtggctattgtgcggtcgggagatggctgcgctctatgagaccaagggaggggagagcggataccagcgatacaaatatgggcgactgggtgaacggttggtaggaacgtgcgtcgtggccgattcaagcagaagagacggtttccatggaagggattatgagtggggatcgcacagctgaacgaggatgccgcggtgcagctcatagctggtcttgtggcacagaaagtcaggcacggcgtgtaggggcatgggctggctacgcacaacagcagccatgaccgccgtctgctcagccacgtgcagctgcacggcgagaggacaggccgcggggcgacgactaggatagacagagctgacacatgggcccgaaataatagcgagaggaacaagtgttgaaaaaaatggttgcacgcacaatgtgtggacgttgcgcggcgagacaaggaaaggtgaggtagatgaaggtaaataccgagggttagacatggggtagactggggtagaaggggcaggagcatcttggggaattgtcgagcgacgactgggtgtataaggtaatagtgcggaacgaagtgaaggttttacagatcatagagaaactgtcgaggtagacgccggggtagatacgagcagcattgtgaatcatctaggcccctttggtgatgttttggtaattaatgacaactgcttgtggaataacgattcttggagaaataagaatgcagggttggaccacatagaacaggaaatgttggagaatcataagcattggttgtggatcagatgaaggcaaaggtataatataggtttcgtttttgccggtcttgaggagtttagagaagatacctgaccgaattagtaggctagatagccatactattaagaggggtcaatgtctttgatctgtgtaaaacttagtgcctcatagagcatcaagtagttgcatttgcatgaggactaacagcgcttcaaatttattgagttaaaagttctttcaaaagcaagtttgaaaaattgcaaagtgttggatgcgcggaccgtctgggccttgagggcggaccgtccgcgatccaccagaggggtccgaagtctgaccacttcggcagccacattgttccattgcactgcggaccgtccgggcc

SEQ ID NO: 64176 - DNA, 1580 bp, Zea Mays
atttgaggctgcttttagagagcatcatgtgcccttgggaatcgtctagctcaaggaagaggagtttcgagagttgactcaaggaaggcaatccgtcagtgagtgcatccataaattcacggaatttgctcgttatgcacctgatgacgttagcacagaagccaagaagatggctcgtttcttgaaagggttaagaccagaactcaagactatccttgccagccaagacttccttagtttctcgcacctctcaaacaaggccatccaggtggaaagagcacgagaagaggaaaaaggtcaccttaagagaaagtttcaaattctccaagctcaacagcacgagaagcaccagagggttcgatcttttgggttcccttccaaggggccaaacctcagcaagccagcaggatccgctccatcacgtttcaactagcctggtcaaagttacttccacaccgagtccgttgcaagcagccaacctccagctaatgcttgttggcactgtggagaccccggtcacttcaagaataattgtccgcacctaaagacattcgtacctacctactccaactcggtgaatggccccaagaatgttacggcacccgcctccaagacaccctccaccaacaactagttaaccaagacttagttccacggcagggctcgagtgaaccacatcaatgcccaggaagctcagcaagcccctggagtagtactcggtgagttcctagtcgaatttacccctgctgctgtgctttttgattccagagcatctcattctttcattgccactagttttgtggaaaacatggcatccccactacaccattagaagtccctctggtcacccggaccccagggttagaccttctctgccacctcaaatgctcccaagtcagaattcttttaagtggggtagtattcctggaagacttagacgtactaccatcccacggaattcatgtaatcctaggaatggattggttgcagataagactattcttctcaccgaccaccagggaaagttagtttcgtgtaaagctcaaccgccaacccaagatctaatggtgttcagcctagcagtaaaaggcatatctgtggtggaagaattcatggatgtatttccagaagaattaccagaaatgcctccagaaagagaagtagagttctacatcgacctcctcccaggcaccgtaccaattgcaaagagaccgtaccgcatggcacccacagaattggcagaactgaaacttcagatcgtagaacttcaacagaaagggttcatttgtcctagctcatcaccttggggagccccagtattgtttgtcaccaaaaaggatggaagcatgagaatgtgtattgattaccgatccttaaatgaagttacaatcaagaacaagtatccactacctcggattgacgacctttttgaccaacttcaaggggccaaatatttctcaaagattgatctgagattaggataccatcagttgagaatcaaggaaacagatattcagaagatagcttttgttacccggtatggccagtatgagtttacagtaatgccctttggactaacc

SEQ ID NO: 64177 - DNA, 459 bp, Zea Mays
cgaaggggtaccaacacaccgtggccgcccgatcacctatatgcggccacgattggacttcgggcgcaatgaagaatcccgcacactacccggacgtccgatctaaaaccgaccgccaggattatatcgtcgcaatatgtgaaccggtatctaccctcagccatccaatgacctcccaatggtctggatctaattgagtgaaatggggtaccttacgtccaatctgaggccttcgtttcgatccaacgctccccagatcatcttcctcaacacgccctgcgctaccgcgacattcactgcacacgcttcttcatcgcgacggcggatgccagagctccctttcattgatgggcgtgaacgcgaacaagatctggacgccacaactcgcccagccaaagcgcccgcgccacccggagattaagcggtgcaggggtaccggcgcatagaccacactctctc

SEQ ID NO: 64178 - DNA, 824 bp, Zea Mays
gtcaacagttggcgtgccagataggggctcgctacgtgtaacacaccaagttcccaccaagaactctagatggccaatcctcagcacccttgtcacctcgacacgacaatctggtttgggagtgtcgagtacatgccccttgacttgggttatgacatgatgctcccccgcctatattctctcagccaggaggagcacaaccacatttgctaccctggccagtagaaggatatccggacacaatgatctggttcgggagtcttgagttcatgatcattagcttctgctatgacatgatgctcctcccacccggacacccttcggacaccgactatcgtttcctctagctaggaggagcgaggccacgcctattcccctgtccggaggaggaacatccatacttctgccccccgtccctctcaccacaggagacgaggacgaaataatcacaaccgtgccacgggcggcactctacgcctagacaatgctcctaggcaggtcgacaacgtagactccctcgcaagggacttgttgcgcattagcttcatgcccagagaatcaacctcagcacatgttgccctaataccagcctcactagcccccccgcaggttgggaggtgccgactccgctagtagactaggggagccatcgatatttaacccaatcccctttagattcaacttcaatccttcgggctacccatatacgacaagcacctacaccagcctgtatggggaactcccagaaatctcgaagtacataggctccgagactaaagatgatctaggtctaggcctataattctccaagctatgcgaccccg

SEQ ID NO: 64179 - DNA, 758 bp, Zea Mays
catgactcatgggtaacctctaagccctgacttacacatggcaatctgctcgggtggtgaagtctgtccctagttcggtgctacacgcttcacttaactcagggtgcgctcaagccccgcttaacgaaggcaatcaccaaaggttgtactacgacccatgaacaacgttacacactctcactacaccttgacagcacagactcaattcttacttcataactcaaacaaatctccttcatgcatatcaattttcctacattctctttcatgccatcaaaatatccttaactaacatgcaggtcataggtaagtcttaataagatctacaaagttcaatactcaaagttacatgatcaaacatcaagctcgccgaccactctaactagcttgggggctaggtcatctctcgcctcgccgaggcactactttgatggcttggggactgggttgctacctgcctcgttgaatcactacttcgacagcttagggtttgggccatcgcccaccacaccgactcgctgcttcacctgctcaagggctgggttgtcgccccctcaccaacttgctactttaataactcgagggttaggtcatcgtctaccttatcgactcgctgcttcaccggctccagggctaggctatcgcccaccttgccggctcgctgcttcaccaactcaggggctaggtcgtcgcccgcctcgctgactcactgctttgtcgactttggaggctatgccactgccttgtcagcttggggg

SEQ ID NO: 64180 - DNA, 298 bp, Zea Mays
ccacctttcaaacatttcctccctgaaggcgaggtccttctcctgccaagcgagatctgtcgcccgcttatccagggaagcatccttctccttgaggttctcctcggccagggcaatgctgttggccctgtcatctagctcccgttgtagcctctgcaggctgtccacagccgcagtctactagacccgctgctcctccaggattttgttgaaggcattcagcttggcctggagctccgtgacgacctcctccctctggtccaagtgctcctccttcttggccagcctcttctccttc

SEQ ID NO: 64181 - DNA, 376 bp, Zea Mays
aattcccctcatgcttcctcaactgccttgagccataaacaatcactctgccttcctgcatcaacacacaaccaagaccaatacgcgaagcatccgtataaactgtgaaacgcttaccgctctcaggcaaagctaggataggggcgtccaccaacttgctctttaatgtctaataactgacctcgcaatcgctggaccagatgaagagaacacccttctccaagagtctagtcaagggcttagcaatgctggaaaattttggtacgaaacgtcgataatatccagtgagccccaagaaacttcgaatttcaaagacactagagggtatcttccactccaccacagccgcaacattcttgggatcaaccgcaatgcc

SEQ ID NO: 64182 - DNA, 572 bp, Zea Mays
ttcagtagcttcttctaatagtttgttgacagcttcatcaatggcttcgttagctattctaattatgtcgagcgctcccttcagagatggatcagcttcgggattgtatggctctagagggggcggaagcttggctgcatcagaatacaagtatttattagtaccaaagctgcaataacttacgaagctaatctgtaataggtatacctataagcctggcgtgttcagcggcctcttcagctctcttagcttcttcctgcacgtcgtgagactctttctcatttcttctaatagcttcatcagatatctctcgcccacccttcagccatacttcggaatagaatttcccgctaaatgtagtagcgtcggccgaagggtttttaatatcatcagttgatagtgagaatcctggctgagttacagtcttcacatgttcacaccctactttctccaagattgatatagctccgcgggcaccagcaaaggcgcaaaaatcccctgtcactaaggatctcttcaaaggcttcggcttcaccattaatccactggataaccccatctgggtcaccgca

SEQ ID NO: 64183 - DNA, 364 bp, Zea Mays
aggcctcaaaaattctcgaagcaacattgtactctgtaatcgggggacttcatcatcaataaagttttcgttttcaaaggcattcagactcttggctttcagctgacttcgatttgattggacttgaaatcagcacgcttactcgacttagggtgaccactataccctattaacggagcaatcagcttaagtcggcgacgacttaagacggtgtgacatgctcacgcttactcgacttagggtgaccactataccctactaacggagcaatcggcttaagtaggcaacgacttaagacgatgcgacatgctcacgcttacttgacatagggtgaccactataccctactaacagagcaatcggc

SEQ ID NO: 64184 - DNA, 740 bp, Zea Mays
gtttggctattcaaggaacttgggtggacacgacggacataagcgtggccttgttgggcgcgagcaaggaccagtggtgccagaattgctcaccgacatgggatcagcgctgccatgccgcattgcacagtttgtagggtagtcacccccggggactagtaagaccatctctgcatcctctgctttgtccttctcattgcgtagcactcgttggttcacgaattaggtcctcggggcgccgaccgtggcctcgccggcgggcagcgccgtcgggagatttatttgcgccgctgctgtgttggctagaggagaggggtgatgcgacgatcgcggatcagaaaacatatggtggtgattagatgtggaaataacccttcgatgcgttgaatttgcgccctcgattgcctgacctatggatcggatgacattaatgcgtggtcagatccgtgtcgtccagttatgcggggacgtcccagattggatggtgtaacacctcttcgggtatttgaattcgggccattgatcggatctcggatgtgtgatgttagttcgagggactttagaatcttgggcatccacctgtgatctggcggtcaggattgcgtggcgatttattataatgtgagatgtaatctgacccattggatcgagatcgcatggtcctggttcaccaataccccttcgccgagcgagattcacaaaagagcccctgggtttaattagaattaacccgccgtccg

SEQ ID NO: 64185 - DNA, 1182 bp, Zea Mays
gactagcaagtagacttacaaattttatccaaatcgtttagtacactaaaattactacaaccaattaacaacgcattcttcacgatgatcacccaacaatttgcgttttaaattagacatcacatgagtactactactttttacccgcgaccataatcatgcgtatctagaccaaaacaagcaaatcaccgggattacgagcttaactaaggccatctaacaagttgattaaccagagcaacaacctaggacgctatacaacatactcgccggctagcctattattatcgaaatccgagacacaacatatatttaacaatcacttaacgaaatcgactcctacttaacatgagttggttaatcgcagtattggacttagcgaaccattttagacatcacaactcaaaaacatggattggagcagattaatcagcttttcctaatcattgctcaacttaaagttgttaatacacaggtcacttaaaatggcacatttttgggatctaacatagaggcaattacacatggcgtaaaactccataagactacatttgctactgaaggacctaaagcacttatgtgcatatcttagcggattgttcttcaattttaacaaggaccgacttatgaatgctactcgcctctaataattatcgggctgcgataacgctcatacaagatttctaattgatcaacaagacatgtatttatcatgtgggcatggaatgtgatgattgacaaagtgaagcatcacattgccatacaacaaaaatcatgacaacaccgatggatactatccactaaccgtttgaaaaactgaacttactcctcgcttgccactacatcactcctcaatcacacgaccatcatgcatatacttcacacgactatataatagcaacctaagcgttgtgttacacaagacatacatcttccttcgttgcgagtataaccatattacggcatatacccgcacacctcaatcagttatcttacgccaccactattataatacaccacggcacatacacgcatacgtgtctccactgcattctcatgaccaattttagcacaattatttatgacaatgtttattgactacacaagtgaaacactaaccgatcattcgcacatctcatcttaaaaacactaatcacatgtaacataaattatatcttcgat

SEQ ID NO: 64186 - DNA, 681 bp, Zea Mays
ccacggatacgtgtctgaaccgacgtacccggctgcagtggcacgctgaagatcaagcagtcgaggatcagcagctaggggtcgcacctcagtctcgtcacgctccctaaagcaaggtggaggaatgggcgaagcgaaaatgggagcgagagggggaacagtggaagctggagtggtggagggggtgggtatggcagaagttgtggatggctctggagcgacgggagctggtgaagtgagaggtggagtagaagttgtggcggagggagcagaggagcgaggctaagatgcgaggcgacgaactctgtaagcaatctggtcggaggaaatctgcaactgtcctccccgctctacctgctctgctgctggtgccgctacaagtgctgcacgggcagctctgtccatacaccgcttcttctggccttcttgctgctcaaggtacattgtcttccccttgacctgcctgaaggggcgaggagggtcctcgttgtctcctccctctggcgctgagacattcttcgtccgcaccatcctgacctgagtgctgcatgagtgagtgaaaaattaagcacgagtagatagcagctgataagattaggaatgaaaggatggctacctggaaacctcacgagaaagagagaatccaggcaggacaggagacgagcatgcaggcaggagaga

SEQ ID NO: 64187 - DNA, 355 bp, Zea Mays
aaagatatgaaattgtcaagcagtgccgctgcagttggtgggtgatgggggtgataagtcgctcgcgacgggtttggatttgggcgtaggtgcggcgtcgtttatgagcgattgttatgtggatttgtgcactaagttgtgtgccaaaaacaggtggtggacttctgaatcgcacttagggttttgttcaaattctccggtgtaaaatagtgatggtttatcccgtcggtttattaatgtgtcgtatacttgattatatttatgtcaattgtgttcgtcctcatattccttgttggataccattgtttgaatttatccatgttctattaattacatatgttgagagtgtggtttg

SEQ ID NO: 64188 - DNA, 1253 bp, Zea Mays
gcagcacattgatggcacggcacgccacagatgagcagatctatctgtacagtgtaggactgcaggagcacgatggagcatgcatcaccggccatggtcctccatggatcatggaaaacggggtggaattccactccagtgcgtcgggcgctgggggtttgcaatggccaaagtgatgcgctcgctggctaacggtggcaaggcaaacatccatggggcaccacggattatggagctgcgtttaccagaactccagaagagagagatcgatgagcgagggatgacagcgcagcggttcagcccagggaacggaagaaacggccataccggacgtacgtacagtactccatctcagaggagataagcagtctcactctcagccacgccacgagccacgggcgggaaagaaagacggcggctgatggaaatgcacatcacgtactatagtagtgatgactgacagccaccaaagtgtgaaaagggtggccctaccccaccatcatggcctgaagaaaagctgagccgccatcaaaaccaacggcacggcacctgcgagtgatgcctgaagtctgatggaggaggagaaaagacacagagaagagagagagagagcgctagctcagcagctgagctcagagatccatcagaggccgtgccaatggagcgctcgcctttccctgcactgccaccacccagcacctgcagtgtacgcacgctgctcgtctacttcattcggctggccggccggcggtcagatggggatggggtctctctcgcgccgatggttaaacacaaaaaaaagtctcgttattcacaatagattaattaatcactagtagtggtgccccttgctaataatcctttgtcgtaagcgcaattatgttatgtcgtgggggacaggggctttgcagccagagacctgtgacctgttttttattgaacgctaggttggacggtagcggagggacatggacatggacaggctgtactggcctgcccgctgctcttcccaattcccatgttgctgctgtgttcacctcctactatattctattcttttatcagttctcgagggaaggatggatgcaagcaaacagtcactatcgaaaactgcttctttatcgattcggtatagcctaaaaacagtcgacaaagacaaggatcagcaaattgtatatcggcaacagcttatttgtcgagtattttttatcgagtactcgacaaagactttgccgaatgtcattcggtactcg

SEQ ID NO: 64189 - DNA, 849 bp, Zea Mays
ggcgctagtgagcgcgcccagaggctctgggcggtgcccacgagcggatggagaccgacacgaagggcgccgcgagcgcgttcaagcatccaaccccgtggaagccgtcatcaccaccgtggaccaccgatccagcgacggatccagggtgcgttgctcacacgcatggatggcaaggacgcggtggttgcgacttggggaagaaccaggggctcgtccactggtcacagggccggagggagggggacgaagggtgagcgtcgttcgccggagagcgagatccgcggccatggacgcaggggtgtgcacggcgcagagatttatgcggattcatgggggaaatcgggatagaggtggcggcgcgcttatataatcctatagaactcagcgatggccgaggaacccggagcccaccgtgaagctgttgcgagaaatctgggagtgggagttctgcgagttgctaggctccgaggaagacggctgcatcgtgcgggtagaagaaacacagtgcaggtgggcccggttcaccagtgggagagttccgcgcctaagacggacgcctgaggctgacggggtggtcccggttgtcggcgccaggtccaaagtgggctgcgcacgtgagggcgaattcgcgagatgggccgaaattcaagccaccggcctaagtagcagggttattccttttccttttatgttcttatctctcttctccttttagattttttttaattcataaagtctaaatgtcattcaagttcaaactttctggtagatttgttttctcattaatcattcatcctagacatggtatggataaatttatctatttttaatattcatttcatgata

SEQ ID NO: 64190 - DNA, 1002 bp, Zea Mays
ctcaaacactctgtctctcacagttggggtggcagattgggtggagtgaatttgatggaatgagaagtggttgtaagtttctataaaggtgtcaagccactacactcaccaaccttaccataacaagtgtccttaccatccctagcagcaaagcctaaccccagtgatgggaatgatggtcttgatcttccatcaggttcacgatcattatatatatgttggagattggcacaactatccggctccagatcataaagacccgaaccctgcaacctttgcaccattctcctctggttatcaaatctgtcacaattcggttgacctcaccaagaaggctaatccctgcatgtgaatcgaagaacataagcaagaacaaagtagatgcaatatgaaattgtgaatagtaaggattaagcactttagttggggttccacaaaccgacgaggcgatgaaactgtataaaaaagaataacctaagcaaaacccatctaatctaatagatactagtgaaaatatacactagaaaaacgactaaggcggtggccgagcaaccctagaaatataagatttccggcagattctggacgccatcttgttatgacgacttctaatgacctgagcgtattttgacgtgggatcaactgggttgggaagcttatctccttagctttccaacgatatctagaatgtccaaaatagagttcgcatttggcctaggcgtccattttcgtgaggccaatcttgcaatccgaactggactcacgaataaattggactctatcattgattgggccttaaccatatagttgacgtccatgtcctcatcattcttccgtccttggttgagtcgtcctcgactcaaaattattagttcatgtgaaagtagtggttgtagttctatatatcgtccaagcttgctccccttcttaaaattgaccctgttgtttcaaaacatataaagaagaacaagtggaactcgacatgatatgattagttttaac

SEQ ID NO: 64191 - DNA, 652 bp, Zea Mays
gggcctcattcgctgttacgaaacaggtctataatttacgtaaatttcgtattcatttacgctatttcggttcacgttttatgattaaatcaacccgagccagaaccctagcacgatcggctgcacacaattttcacgctgtaattttgggcctcgtttactgttacaaaacagatataggatttacgctaaatttcgtattcatttacgctgttttagctcacgttttacgcaggaatccgcccgagccagaacccgcgcacgatcggctgcacgcgattttcacgccgtaattttgggctacgtttgctgtaacaaaacagatataggatttacgctaaatttcgtactcatttacgctgttttagctcacgttttacgctggaatcggcccaagccaggacccgcgcacgaccgactgcacgcgattttcacaccgtaattttaggccccgtttgccgttacaaaacagatataggatttacgctaaattttatactcatttacgctgttttagctcacggtttacgctggaatccgcccgagccagaaccagaaccacatactgcatgatttatgctgtcaagtacatgtcattatgcagtcgtaaacgctgtccacagtgtcatattcgttccacgtgattcgggcg

SEQ ID NO: 64192 - DNA, 373 bp, Zea Mays
cgaagatttacagttaaaggaaagctatcccctcacttcattggacccatattaatcctaaagcgagtgggagaggttgcatatcaactagaattacctgatcatcttgcggatgtgcatgatgtctttcatgtgtcacaactgaagaaatgtctcagggtaccagaagagcagctaccaatggaggaccttagtgttcaagatgatctgacttatgctgagtatcccatcaagattcttgatacactgactcgtgtcacgagaaataaggttataaagatgtgcaaagtgcaatggagtcaccacgaagaggatgaagctacatgggagagagaagagcttcgcatagatttttcccatcttttccctagtc

SEQ ID NO: 64193 - DNA, 327 bp, Zea Mays
attggttgcgccctggcaacacgacacgttatttgtgtcgtacgaacatggctgcatcatgtggttgctatgttgtactctcacttagtcggaccactcccgttgagtcggatcaccatcaccgagtcgcgtattttttgcatgccttgcaagcacgattcagtcgccatgatcagcgagccacaattgcgtctgttgcgcacgttgcgtggacttatcctgtacctcgactatcgagccacaattgcgcctgttgcgcttgttacggaggcttattcgttgccgtagccttgatggccacacacacgttgacgccagatacgctgg

SEQ ID NO: 64194 - DNA, 2938 bp, Zea Mays
cgcggcgcgagatccgggctggaagggctggcgggtcccgttggtggcgccgtggcgtcggcgtgatctgagatgagattggacccggctgcgcggtattcgctgcggaggtagacggccatgacgaccaacaccaagcgcgcctacaagctccgtatcctcgtcgcttcgtttgcgctatttcgcttcctttttttaattccttgtcggggttgctgcatagtggtttttgtatgaccgatccatcgctgctgccgcggtcgttcaaccagtagaggggaacatttgggtcagcaagtttgagaaggagctcccgactcttaattttctgtttctgttgagttgttaaataggtattttgtggttgcgagattcggcaggtcacatttagctgttggtgattatcgagtagtcgttactgatttgtcgtttattatcctagaagtgcgattgctggcattccggcatgtatgtgaaaatgtctgaagtggtacattgatgcaaataatatcagtcatcgagggagattgggctgttaaattcgcacacattggaatgccttgacttgcatttggtgtagaggagtttgtggcgcactcgtccaatgttaactgcctcaagattgggaggaagacctcgcgggttcttgtcacaggaggagaggaccataaggtcaatctttgggctattgggaagcccaattcaatactggtaagactgtttttctagttctgtttctacgtatggactgattgtaaactgcggctccacagttgggtaggaaaacaaaactcttaactcacttgaaaaactattggctgacctaagtggttacaagatgagaacttcaccttttcaaccgctaacagatttttatgtagcacagttctccttatgccagtattcaattaatagaaagatacttttaagttagttatatcaacctaccgcacagcaatgcgttttgaggatggttcgtttatatagttaaaataggtgtcatgaataatgtttcttaaggacggagtactttatttaatccactttaactttttggtggccgtacagagcttatcaggtcacacaagtgctgtggagtcggttggttttgattccacggaagtgtttgtggctgcaggagcagccagtggaacaataaagctatgggatttggaggaggcaaagagtatgcagatatgaatatttaacttactatatgtgtatatgtatgaatcgttcagtaattgcatctcttggctcattttctatgcagttgtccgcactcttactggacatagatcaaactgcatgtcagttgattttcatccgtttggggaattctttgcctctgggtcactggacactaatctgaagatatgggatataagaaggaagaattgcatccatacatacaaaggtcacacacgaggggtgaacactattagatttacacccgatgggcggtgggttgtgtctggtggcgaagataatatagtaaaggtaagaatttgccaataactctatgctgtgtgtgttcaattgctagttcttctgctggaatttgatttttcttttgccttaatatttctaatgaaaaaaatcctttttttcccgaacatattacaatatgtttttctttggcagctctgggatctgacagctggaaagttattacatgaattcaagtgtcatgagggtcagatccagtgcatagatttccacccccacgagttccttctggcaacaggttagattcagaatttacaatgcttatctgtttcttgactgttatcttttctttgtcccttttggttgtacaatgtagtatgtacttgtttatggtaaaatatcagacttctgtcttggtatttgcttgaagaaaaaactcttctattcgttgagctagtaaattaatttaagtatttaggtgctctctaaaaccaagcttggcatttgtccgttaagtggagaagctgtttaaatatgatttcctaactagacctgaaccaaactgtaatggctgttcctttgatgttttaagtggtaaagtgtaatggatcatactatcgctgtaattgttgtctgccccaccgcacctcataataactttttgattgtttaccaaaaaaattcctagtagtcatatcttggcatagttcagcttgctgtaagtaaatcactatacatgtattgtgtaaaattttcgttatgagatatcatgcttgttttcgttggtgacatctgtaagagatgcattgaaattttgtacgatacgttctatataaactttctttccatgtcatcaattaacacatttcattttttgttttgttgtgagacacattctctcctgtcaggcagtgaagaatgtattcatatgtttgtgtgggagctcagaagactgtattccttttgaaactatatctctcttatgtaaaacttgttgcttcattcaggttcagctgataaaactgtcaaattctgggatttggagacatttgaattgattggatctacaggacctgaggtacatcggtatttggagctgatagttcacaattgtttatttcctttgcatttgtaatcctcagaatttaagcattatttccttaataagtagcttgggtggggatcccatctctaatgttacatcgaaaaagaaatggaaaatgaacataaacttagatgtccctgtttgatgcttctttatacaacaaacagtcatatgctaatgttttgcagcataattcagttcaatttgggcacctatttaattcatttggatacctcttttgtttccatcatttaattcatttgaatcacttcttggaatcacttcttgtgtttccataaaaaatactagacaacaggtgtccgatccatgacattcaatcctgatggaagatctttgttatgtgggctgcacgaaagcttaaag

SEQ ID NO: 64195 - DNA, 761 bp, Zea Mays
cagatggccaacgattagatcaccatctactatgtcaatgaagatggattccccaaggtgctttatgcggcaattgttcgtttgggcattccagagcgtctagaatatgtgagtcgtgagttcacagagcatggtactaaaagttgtgaggtcactgtccacattggcgcaagtgacaagtacttggagatgcaaccccagaacatcaccgccactggaagtagtatgcaagacaccgtccaacttgcggctcagaaagcattgaagtacttgtcccagatgtttgactggcactgggttccacccccatgaagtacttccctccactggattgtaaccgtccttcttgggcggcaaggatccgtaacttggggagtaccacgactgagaaagagcccactattgtcactatgactggctatctgcttagcctcgatgatttgtgcgaccaactgcacaagcgtgtgatggaccacatccaacgtgccgagaaagcagagacccgttggcataaggctaagcttgccttagctcaggcagaagcccgggtggccgaggcagaaagtcaccttgctgtggccgaagaggaccttagggagcaggcagaccgccatagacagcttctcagatgtgtctacttagtggattgtgccaagcgcaaggaacgccagcccaggaccactgttgagtcaccacccttggaggcaatccctttataccctttgttccacccccacaggagaatttgtgaatcagtgcca

SEQ ID NO: 64196 - DNA, 689 bp, Zea Mays
caggaatggcgattggcggctggacgaagggccgatggagttggtcgttggtgcctggctgtgctcgcgatatcctccgccgccggcttcgtgtcaaataccgacgagctagatctgcgacggagggccaatggagttggtcggggacaagctagatctgcgacggagcacccgatgtacacctaaccctccctccttgcgactgccgattccccatccctgcaagtctacgaccttggccagcttccacgtattagagtatgtatgctgtgacagattgtaaacgtgtacaccaaagatagaagaggcaaggagatatggtagctagcgctgtaaaaggaaaagagataatctgttactatctttacctccttaattatctcctggccgttgtctaggtgctacacctcccctatatgtaagccacggctggggcttttccagtcatcaatccatcaacacgcagcacgcctgtgacgacgtttctctccttccaagcgcctctgaatctctcacatggtaatcagagcttagggttccatggcaacgagttcaagcaccatcaccaatccattcttcggcttccaagtgaccgagaagctatccaagaacaatcatgcgtcatggagagcgcaggtcctcgccgcgatccgcggtgctggctacgaggggcatctcaatggcaagac

SEQ ID NO: 64197 - DNA, 317 bp, Zea Mays
catcctacggttgtgacagaaggcgggatggttaaccatgaccgggctaatccaggccaaccgtttctgatcggacgaccagaaatcacccgtaccccttcgccaggccattttgctaaagagtccataacctttctgaaaaataaccccccgtcctatacgactattcactgagtcttagaaaactttggtttagacccctggactttcggaaaaatgaggcccagtctagagaacatataaaataggtaaataaatacagaaattgatttttaatacaaaaagaattcctaaaacttatttattgcatagaaaat

SEQ ID NO: 64198 - DNA, 375 bp, Zea Mays
atcagcaacaaatggggcgtctcagtcctagtcatattatggtatgccgatgaactcatatcaagggtaaatgttgtcaccatcctcactgcaaggtagatcggctcttagcatggccggacagtatgcgcacgatcacagaccgtccgaccctccaacaaactgtccatcaccttacgtcggatagtccggagtcacacagagcctaccttaagactcgcatgcaaagtccagcacgatcgaacctgatacaataccagaccacccggtctctccatggaccgtatgatcaccaaggttggaccatccgggtgtgcatacataggatagggtatcgcgcatcaggcacaatcatcacacttcaccccacctgca

SEQ ID NO: 64199 - DNA, 660 bp, Zea Mays
atgttggtgattgccgagaccttttctaggatggtttcaatatcacgttccgacacgatgaaccctagaagcatgcctcaggggaccccaaacacacaattctcatggttgagcctaatgctcttggcccataggcatgcgaaggatgtcttgaggtcagagacgaggtcacaagcttttcttgtattgaccacaatgtcctcgatgtaggctttgaccgttgagccaatatgatcgccgaacatgtggttcatgcaaggttggtatatggcgccagtgttccgcaacccaaagggcatggtagtataacaatacataccatgtgtggtgatgaaagaggttgcaagctggtcggaatatttcatccagatttgatgatagtcgaagtaggcatcaaggaagtataaagtttcacattccgcactagagtaaatcagtgtagtctacacacatcttccattcccctccatcttcctgacttatacgggattcgctaaccacttgggatggaaagcctccttgatgaattcggctaccaagatcttgtgaacctcctccctgatgactctgtgcttttcctcgtcgaatcggtggcatgtattgtatcatcggtctagagccgacgtggaagtccaaggagtgctcggtgacctccctcgg

SEQ ID NO: 64200 - DNA, 410 bp, Zea Mays
gttccaggagtgctccaggtcttcgtcgtttggcgttgtgagcctgtaagcgctgggggaagcctttgtcttgacaatgaaagggccctcccacttgggctccagcttgcccctggactctgtccgagctgttcagacgagtacgaggtccccttcgctgaactctctcgggatgactccgtggtcgcgccatgcttttgtctgggcttggtatttgttccgagcctgtagagcgaagactcggtctccatcgatgagatcctttgaagtgggctcgtccacgtcggggacggctgacggaactatttgcggggacccatgttttatttcttgtggggtcatggcctccgatccatatagaaggcgaaaaggggtgaacccggtcgccctgcactcagtcgtgtttagcg

SEQ ID NO: 64201 - DNA, 321 bp, Zea Mays
aaccaactagaaaagaaaattaaacgagttaggtctgatagaggaggggagtatctttctaatgaattcggtgaatactgtgcggagcatggaatcatccatgagacaacagcttcctactctcctcaatcaaatggggtggctgaatggaaaaaccaaactttgacagacttggttaatgccatgttggatagttttagtttaactaagtaatggtggggcgaagctattttggccgcatgctttgttgtaaaccgagttccatcagctaagggtgataaaacaccctatgaaggatggaaaggtagaaagcctgctctt

SEQ ID NO: 64202 - DNA, 650 bp, Zea Mays
gagaggagtacgacctggatcacgacatagcaacacggagtcgcaccactcgagttgagtcggctgcagcctcgactagtgggccgttccgatgatggtcgagatgacctactaccgactcctctccccaggaccgatgacatgagcactagcaggaggacacatgcagagttttcgcgcttactccacaactccgggccatccagtggcctcccaacttcaaggtctccaacgtcgacaagtacgaggctaagcaggacccgggtggctggttggctgtctacacgactgctacatgggccgccggggcaatggaggacgtgatgacggtgtacttgcccattgtcctggggcaagacgagctgcagtggctccgacatctaccctggcactgcatcgacgattggagcgacttcagtcgttgtttcatcgctaatttctagtccctctccgacaaactggcgcagccatgggacctcaaatccatccagcgtcagaacgatgagacccttcggtcgttcctcaagaggtttcagacaatgaggaaccacatccccggagtcgctgaggcagccgtaattgaagacttttaccgggggtccaacgactcggccttcgttcgagccatactccagaatgcaccagccacc

SEQ ID NO: 64203 - DNA, 693 bp, Zea Mays
gaacaagagacagcagaagctcatcgatcggtaggtcctagtggcaaccaacagttccccggccccgtattgatggtcggagcacgccatcacattcagctgagctgaccagtggctcaacttcgatcacccaacaagtaccctctacttgtcgaccctttgatttgatagaggtgagtcaaaaaggtactggtggatggaagcagcagcatcaacgtcaccttccctagaacgctccaagctatgggaatctcgactgtcgacctcactcactgggacactccattctttggcatcatgccaactgaaggggagtacccgctgggacatctcttcatgccggtcaccttcagcgtcgcagacaactatcaaactgatttcctatgcttcaaggtagctctgttcgattgtggatacaacgttatcattgggaggccgagactgactaaattcatggccatcccgcattacccgtacatgatactcaagatgcctgagccttagggtatcaatatcgtccgcgccgactttcaaggagccgcggagtgcattcggggggccgtccaaatggctctcacagccagaccctcgatggcacctttggtgcggaacaacaacacaccagtaggggatgacctcacaatccccacgaacgaagcacccgccgctacctctctgcgaccgaatgaagaa

SEQ ID NO: 64204 - DNA, 395 bp, Zea Mays
tcgcaaagggctacggattcaccgtgcacaactaatttggggagaggtggagaaggcagtgcgaattttggcttctaccaagctcactggtgaagttgtgagtgcctcgtcgtggtccatggcgatatttataggcacggtggtccggctaacgatcagcggccacgaaatgcattgttagcgcatggctaccacgtaaggaagaggcacagtgaggtaaggtggtggcgtgagtgacacggcgacaaaataccgcgccacggcgaacaacggcaaaaaatctccggccaggctccggccaggttcgcgggaccgtgaatcagcccatagttatcttgccgcggtcgttcctatctcctcttcacctgcacacatccgaaaccacagtaaccaga

SEQ ID NO: 64205 - DNA, 351 bp, Zea Mays
cagccccatcgctgcctgcgcaactccaattaagacactgcgtgtttggtacgtatcatcatacgagcacgcaacagaggtgtgcctacgctccatccaacccctttctccaccgctgcagaacgtacttggagggcactctttgatcttcatcatcagagtaatttctacatattagagcgcggcacaatcgagctcattcagctcatccatgttagcagaaaaagatagacctttcgatatagcacattaacggtcacagtcacagaatctttgttaggttgcctagagagagtcatgctcgcttctagagaggtctagtccaaccacgacggtgtgccctgctatcgc

SEQ ID NO: 64206 - DNA, 453 bp, Zea Mays
tcaatatcacgacgtgcttgaaaaggtgggtgcgcggtgatccaagggaagttgtgcctgagtgtgtgtactcaagcgccacatccctcaaatcatcgcgcacccaccttttcaagcatgacgtgagattgagggagttgtcatcgctggcgtgggaggagggggaacttgaatgctgccatgccatccaaacacctagattgtcgttgtgtcctcatcgggcattctggggacatcttccgagcattggagatctacgtgaggcatccacgtgcgtggacatacacacacacacacactcaagcgccacatccctcagatcaccatgcacccaccttttcaagcacgctgtgagattaagggagccgtcatcgccggcgtgagaggagggggaactcgaatgccgccacgccatccaaacacctagactatcgttgtgtcctcaccgggcat

SEQ ID NO: 64207 - DNA, 282 bp, Zea Mays
ttaggaaattcctaagcaaagaggaactgactagaaaaaggactgaaccccggaaggatggttagtaggagaaaaggggtcccactttcctcgatgaaactagatgcctgctgatcttcagcgggttcaactactatgcttagaaaaggcatgggaagcttgagcgacgtgaggtattcagcgttcgggcggcggtcctagtgttcctcgaatgtcccaaccaagctattactttcgaccgctccaaccaccccaagcacgtccttggcccaggtgatatcc

SEQ ID NO: 64208 - DNA, 367 bp, Zea Mays
caagtaatgaaaaaatgctgggaacccagcctccaaaaagttgattcctatgatcgtttctgtctctaatatagaccggattgatgccttttccagcagagtattttacattcatgagttggccagattgccatgtctgaggtgctgttgatccttgttattatctgactgaagatttagattttgaggtagaaataaaaggtttggcatccacaactcgttcccagtatattacttgctactgcagtgccaggccacggagatgctctattattgttgttcatgatgcaggttagtcgtgatgtggatttcttcgattaatcctgaatactaaatcctgaatactaaatcgagaagtttgacgtgg

SEQ ID NO: 64209 - DNA, 658 bp, Zea Mays
cagtgcgtgcagcccaaaacagcaatcaataaatttcagctcacatataattcaagaatcaccgcattctagagacttgaatcattctagcactttaccattcttttagagttaaaataattaaatgaggactagcaagtagacttacaaattttatccaaatcatttagtgcactaaaattactacaaccaattaacaacgcattcttcacgataaccacccaataatttgcgttttaaattagacatcacatgagcactactactcttttacccgcgaccacaactatacacatttagaccacaacaagcaattcgccgtgattacgagcttaaccaagttatctaacaattcggctaactagagcaacagtataggccgctatacatcatacacgtcggctggtctattattatcgaagttcgagacacaacatgtatataacaatcacttaacgaaatcgactcctacttaacatgagttggctaatcacagcataagacttagcgaactattttagacatcgtaactcaaaaacgtgggctggagcagattaatcagcgtttcttacccatggctcaacttaatttagttaacgcaccagtcacctaaaacaacacactgttggggtctaacatagaggaatttacatacggc

SEQ ID NO: 64210 - DNA, 281 bp, Zea Mays
aaccgatgtaggacatgtcggatgtttgttaatgttgcttttgtatgaaccttatgtggaatgcatgaaacttgctatattttagtacaagtgtgttatctgttgtacaaattaattgattcgtgtatttcattcccagaatggctgacaacaacagaaacacacctattcgacctcctggtgccggccccagtacatgtaaccagattttccccccatccatgtgggatcctcagttctggcagggccaaggattagacccaacccatcctgctacaatt

SEQ ID NO: 64211 - DNA, 397 bp, Zea Mays
gaattttccgccaactaagcttgcttcggccgaggggtcttttgtatcttcaacagataaaacagcttcggtttgcgccaaagattttacatgatcgcaacctatcttctccaagacagctgcaattcccctcgcgccagagaaggcgcagacgtccccacggccactcaaaacttcctcaaaagcttcggcttcgccgctgatccattcaattgggccctcaggatcgcctcttatgaagttgtcctcgctggagtatgcgccaaccttggcgaagctagtttttatttttctcacgcattctatggattttcaaaacatctctctttcgaagagcgtagttctacaactgtcttttcccaataattcttccagtaatcactggtgtctcggtcag

SEQ ID NO: 64212 - DNA, 393 bp, Zea Mays
ttttctgctcggtgggtggtatgcattggtgagaagtgagctatcttggtcaaattttccacaatcacccatatggaatcacgatgtcaagaagtattgggcaatcctacaattaagtccatgcttatgtcttcccacttccaagatggcatggggagcggttgtaaagcaattgtcgcttttaaatgacttgcttggatcctttgaaaggtgtcacactcggacatatacttagctatctccctcttcatcctcgtccaccagtagggttttaggtcatgatacatcttatttctcctagggtgtatggaaaatttggagagatgagcttcatccaaaattttcattctaagttccaaatccttgggaacaacaagccagtcttcaaaccat

SEQ ID NO: 64213 - DNA, 490 bp, Zea Mays
gctaaggagccacgtgtagccgcctgcagtcacgctgtcgtcgttgatcagcggtctgacttcacctttgccgctagtagctcacgaagctggaggatagcagatcgacactactctagatctgccctggcacgagcaagctcctcacaccaggtgcggagaccgtctgcaacataagtcatgggaaaggatccctgactcatgataccagatgttttgaatcctagttcataagaggataagcagtgcgggaagatagccgagcggagtcgacttatgggactagactattagagagatctagaactaattcttctttattgattcattcattttcccttaagaaggtacaacccatccttatatagccaagtaactaactcaatttatctaatttaatcccaagtaattaattcaatcttatctaatctaatcccaagtaactaaatcttatataatctaatatttatccattaatcctaaccctggc

SEQ ID NO: 64214 - DNA, 387 bp, Zea Mays
accttatagttattgaatcacaggaacggatcgtgtccgtagatccgtggatgtgcgcttgggatcttgtgtagacgtggcttgatctcggacgatgatcccggacccaagggcctgggttgcatacaggtataggcgttggcagatctaatcgtggacgtaggtcttaatccaacggctgatcgcgaccgatacccctttggcctgccatatttacgcatgaaaccctctggtcctaagaaaataacccgccgtcctagtaccctgcgctctgtgtctacagatttttaccccgtgacccctgtacttttcggtaattgaggcccagtccagtactggtttaaatcgattaaatgaattagaaattggatttataatatgaaaata

SEQ ID NO: 64215 - DNA, 761 bp, Zea Mays
caggaagtagctgaagcgagggctttgctagctgaagttggtctgctgaaagaaaggggcctgactgctgaagctgtggttgctgattttgttttcaagaatgttcagccgttgaaggacagagcatacccggcttatctgtacagaggcctagctggcccgactcgggttaccaacaggagaattccctctgtagacttgatgaaccgacttgagatgatccttagaggcaaagtatcaaatattggcgccccagtggcatattcagcatggaacctgccttctcccaagaccttcactctttttgtgtcgaatccacctgtcactgagggcggtttgggccttagagtgcggccctctgctgaagaggtaaacgctttggttgcttcgctcggggaaattcctgacgacgaacggcaagtccactttgaggtgcctttggatcctagtgacacagaaataagtgctatgcttgatttgctggctgaggactctcctgatgctgctcctgccgggacattggtggtggcgcctctcccagaagctagtataactttggatgttcagaagcctgccagtgctcacccgagacgcccttgccgagccaatcaacctgatccttctgcggatgagcagaaaaagaaaaagagacgtctccggcaagtgtctagtttggatcggggtgctggtccttcggctcctgctgctgaggaggttcccgtgcttgatttcactaacgccgaccccaatgggtgtgctcc

SEQ ID NO: 64216 - DNA, 718 bp, Zea Mays
taagaatcaaatcacaaagagtgaaactaggtgctctttatattttctaagttttgtccctttgtagttgtttttgagctgtttctgacttagaactgagttgagtggacttatgcacatgtgaatcaaataataggcaaactagttagtttataaggttgtgatggtcatcaaacactaaaattaattagagaaaatggttaaggtcatttctctttcagcctcctcaccaggaggagatgtgtagggtcgcagagcttgagggaccaattgtagatcatgtgctaggagaaggttaccctcgaggggcggcaagcgctggcagcgacagacgtaggacgaggatgggatttagcaaggtggaagtaaaaaatatcgtgatttcgggggagaggcttcgccatgcgccgctgtagatagatcatgttggtgttttaaagttgtagatacttgtagcatctatattgttgtcctcaaaattgagaacaatataatatatgttcataaaagaaggctcatcacgtggaatgatatctggtacacatgaaggcttactgcacatgtgcatatgtagaattttggccttcaaaattggatctaacggtacacgatcattttttaaaactcacatctctagcaggttcgttttgtagaaaactcctaattcgtgcaccgtcaaatctgatttcgaaagctaggattctatatccatttattt

SEQ ID NO: 64217 - DNA, 323 bp, Zea Mays
gtcgtttcacgcctgacaagagagaggctattcgcgccgagctagctcgcttagtcgcagcagggttcattagagaagtacttcatcctgagtggctagcaaatccaattcttgtactcaaaaagaataaagtggattggcgcatgtgcgtcgactatacggatctcaacaaaaattgtccgaaggatcccttcggactccctagaatagatcaggtggctgattcgaccaccaaatgttctatgttgtccttcctggactgctattctggataccatcagatcagcctagcaaaagaagatgaggaaaaaaactgcattcat

SEQ ID NO: 64218 - DNA, 713 bp, Zea Mays
cttcttgtggccttcctactgctccaagtaaacagtcttccccttgacctgcctaaaggggtgaggagggtcctcgtcatctcctcccctggcaccgacacattcttcgtgcgcggcatcctgacctaacgactgcaaatgagagagagaagctaagcacaagaagataacagtcgataggatgacaaaagaacgaatagctacctggaaatctcacacgagagggagagaatccaggcaggacaggagacggctcacgggcaggcaaggtcactgaaatgacagaagaggtgagcacgtattagtcacatagtcataattatataaaatgtgaataaaaacatacacagagtattatggcacagaaatcgagagatatagcgatcgagaggtcaaacgacgcgaaaacggcgtttgaacgtgaaagtgccatagggggtccgaaattggaaatgaggcatgaaactacgtggaattgaaccgatacttcacgaataggtttatatgggtaaatatgagtgaagtgtgcgcttggtttgattttaggcgaagaaaatggaatttgggcactcggctcggaactgatcgctagaaatagagaattgtgtaaaattgaagcctgggatatcggattggcgtgaaatttggcgaatatgttactggaggtatggtgaaggtgcctgaaaagtttgggttcaattggagcatttttg

SEQ ID NO: 64219 - DNA, 925 bp, Zea Mays
atagagctacaactttgatacagatggattaagtagttactacataaaaatctgagatctgggctctgcaaatcggtctgtcagatgctccgatgaaagtctgatagtacagtaaattgaataagatctcaggttcagcccccctcaacgccggtgatctcgcgcccggattcgtgccggcgtcgcgatgcacgcccagttaaacgcagataacgatcctcgaatgaaaactatggcgatggggatgatcttgggacactgtttcgccctggccgccgtacccacttgccttatggcccgtccagataacctcgccggagttggccgcctgccgctcgggtgccacgtgcctaggtgctctaccatgtcgcaataaatcgccttagaaagttcgttcatcgccggtggtcgtgccacagtgaaagccatgaatcacttgcgccagtgacctcccttctctccggccgccaacgcgccattccaaaattgggtgccactgcccttggacactataaattggtgccccaacctgctctgctaagtaattacgcacccagtgaaccagccctcacctccaaccgtcccccacaactccccaatttgggttttcccccaattttgttctctgcgccgccatgagtgagctcatcgtggccagctttctgcaggtccgttcacaccctcctcgctcttgtttcagcactcttgtgtgctcttgatgcttatcgacccagctaattgagctagaacatgtaggatcaccgggaacaccttgaattgtcctaggttggcaccatcaccgtgaacagaaagatttcaagctcaaattgtgcaattagttgagggattaatgtcaccgagagtggaattaggtgtcagccgaactagaggtctggtctttgcattttccggccggtataagctc

SEQ ID NO: 64220 - DNA, 542 bp, Zea Mays
attgggcaccaagctttcacttagtgtcgcttttcaccctcagactgatggtcagtcagagcgaacaatccaaaccttggaagatatgttgcgcgcttgtgttctgtcatggaagggtagctgggaggatcatcttgcactggcagagtttgcttataacaatagctaccaggctagcatcaagatggcaccatttgaggcattgtatggcaggcggtgtatctcccatctgtgctgggagactttgggagagagatccctggttggtcctgattgggttcagcagacttctgaaaaggttcgggaaatacgtcagaatattttggtagctcagagccgtcagaagagttatgctgatatgaggaggcgggatctggaatttgctgtgggtgaccaagtccttctcagggtatcacctactaaaggagttgtgcggttcggtgtctctgggaagctcagcccgagatacattggaccattcactatcttggcccgagtgggcagcctggcttatcgcttgctactgccggattccatggcag

SEQ ID NO: 64221 - DNA, 988 bp, Zea Mays
gttgaatgttggtaaagtttattattcatatgtagtggcatgagcgagtgtgtgaatcggggaaataactgagttatgttgattggacgtgatgtgtaaatttaaaaattgtaggtttgtgtgtagggtgtattattgaacatgtatgtcgatgtattataatagtgattgcgttagagtcgtttgaagtattttgaatgcatcccgaatatggttgcattcgaaatagggaaagagacatgtagtgcgctgaaaaggctagattgattttataggtcgtatgaaaaacgttctattaagtgtatacgtcgagtgtgctaaatggatcctacgtatgcagagtgtagtgtattggttaggcgaagagttttggaatagacgagtatgaggcgtgcagttaagtcgtgattgaagtgcaaatcctatgcaatgtgatgggattcgtgattatataggagttgtatttgttgatgtgatgagtagggttaaatatatatatgcttgtgcgaaggatgtattattgagcttgggtcaaaatgcgaggtactagtggtacgctaggcaggcggtgttccaaataaataaatcggttgatgtggtagttgtcgtgcgtggtttattgttagtgagtagttgaattacaagttatgtgagaatcatgttagaaactagtatgcggcgtgtaactgtgttcgtgtggttaaataataataataataattggaagaacagtcgttcaaattggtcagtccgattaagaatgattttgcgtgtgaggtgaggtggtgacatgccaaagtagtcatggtttccccccatgtttataagtcgagtcaatacacatttcgcgttcataaaatttcacgtcgcacatagtgtatggttgtgttcatgacttcgaatagatgttttcgagtggacaagtaggtttataatgcaaggtgtgtgatgatgatattcgtgatttaagtagaggtcatataattat

SEQ ID NO: 64222 - DNA, 1044 bp, Zea Mays
gtgattcttgtgtaattagccctagaagactatagtaaagttgaagacctatagttggtgcaccaattttcttaagtaagataggcctgttcttatgggaagaggggaggaacttggctcagtagtgaactgaagaagttcagaacagtccaaatccctgaaaatatctccatccactaactactctaggtgtttctggtgtgggctaactaaaagaactcgttgcctggaaggggggggggggggggttcacttgctacaactccaccatgcctgggataaacatggagatgtaaaaatcatcccctagctgactcagctgcttggatgcctctttgctgtcccacatgcagaaaaaggagttggccacatcttttgtcttccctgtgctttccccatacgtggtgctcatgcagaaggattgggggacgtattagtgtagttggactcttgttaaactctagtaaagaccccaacagctccagctctctaaactatttaccttggtgagttatggcaccaaattgaacaccctgtgtttctatcggtttcccgcctctctcaccgtgccataccattcccatacacctatgctaagcccttaagcttttcccagttccttggtctcactgcatcagcttgaacacgagtttgccttggagggggtgaccatacagggtgactgcccacctccccgtggtcagccttccctagaaggtaatatgttcgagttgttcgcgtttcataacccatgtgggatggtgatgctcacggcattgcccttttgaatgctactgtggtatcccgtccagaacgccatcgattttgtctagattaccgccgcagaccacctttgcgtggactgaccaaaccatgcccttcccgggtaaactcatgtgagcaacgtgcactagatagatcactcgtgctcaccataatcttggattgaatgctaccatgtcctagaactgggttcgggctcgccgaagctcggtatgccgccaccgccagggatagtcaggctatatgtcatcttagtccgat

SEQ ID NO: 64223 - DNA, 1574 bp, Zea Mays
agcccttggcctttgccctaagcctggcactccttctgactgtcgtgtcgactgagataggctgcctttttctgggagttgcctctgactggggagggagttgaggcttagcaggggaatcctgactgggtggagggggaattctgattgaaatggtgcccatgctgggtgcgacgaatgccgagatagctcccgacaataggaatttcctggcccaatcaaacgaatctggcctcattaaaaggcccatgaagaaagcaacccaaacctttggaacagaaactgagccatcattgtcagggaacaaatcagcccaagaggaggaacgctttctggccaagaaatcttcaaaagcaggatcaaggatggtttgatccaagtgcaacatgaggcccacattgatgttatcatcaatttgcatgtcgtcctatccctcgacattgtttccctccaaatttatgttgtcaggagggaaagcaggcaaggcaagaatcgcttcagccgggccttcctcctgctggagctggactccctgagggataatgatgtcgttaaaatagcccaccgaatcgtcagaagggagattctcaagacctgaaagctgatagctgaactgctcttcttcattgatcacatcgttaacattatttggtacaacctctggcacagggggttgagcctgctcaacaggccaagggtcccagccatcatcagcattagcagcaacattttcctcagcattgattccatcctcaggaggaatgttgaggtcgaactgaaaatggaagttgggcatcggctgccccatacaaaaaaaactcaacagggagctggtgaccatcatgggggtagggaggcacgggttcctcatcctgaggttgggcgccaagcatgaactgttgcacaatgtcacattgaacagtccaagagacaccctgaaaaccatcagccaccgagaagactatgaactgtggcacttcctgcaaagaagtcactcttgtatgccttaagtgttgcttggaaattggagttgttcgagagttgtcacttggtggtggtgtagtgcaatgttgggtgttcatttgagagtagtttagcagacctcctaatgtaatacgaatggtttagaagttattggactaatctacagccaggataggttgcatgatatggacacagtttactccaaaacaaatcctaagcgaaatatacaagtactatatggctggcggcggcggatagttcagtggccggccgtgccaaaaacaacggtaacgtgccacatgtgcgggcaacaaaaactagagcagcagctcgatcgagaagagttttagtatcgtctgagttgcttcctttcgacgacgatgccgtagtcttagcaacgttgtcgtcgacaaaagtagaaaatatttaatagtaaacaaaatatatacaactccttgattgtcacgatccactccaaagaaaaccacacagctcgaccgatgggcttgatgaaggaagatttcagagagcgacgacagtggccatgggcacgcccactgcggcgccccacgtcatggtgctgccgttcc

SEQ ID NO: 64224 - DNA, 1188 bp, Zea Mays
ggactggaatttcatcatgtggagagagatcgcaacgcggcagcagacgcgttgtcgaaactaggatccagtcggacctaggtcccacctggagttttcgtccaagaggtaccatgcccaagtatttccttagatcaggcagaagagtgcaatgttctgagccagccagagtcaaactctaatgactagagggagccaatcatcagatatataaagaatgaagaggaaccggatgacaaagctacagcagaacgcatcgcaaggcagtcagttcactaaacactcattggggaggtactgtacagaaggggcgcaatgggagtcctcatgaagtgcattctttcggctactgggaagcaactgctagatgagatccacgccggacagtgcgggatacacacaacatccaggactctggttaggaaggccttcaggtctggtttttactagccgacagcaaagagtgatgcagccgagttagtccagaggtgcgaagcttgccaatacttatcaaagtagcagcatttaccagcacaacaactgcagaccatacccgtaacatggccatttgcgtgttggggactggacatgattggacccttcaagaaagctcagggaggatacactcacgtgctagtcgccattgacaaattcactaaatggatagagtacaaacccattacttctctgactttagccaagtcagtggaattcatacaagatataatattcaggttcggaataccgaatagcattataactaacttgggatccaatttcactagctcgaaattctttgatttatgcgagcaaagaagcatccagatcaaataagcgtcagtagcacacctaagagccaacggtcaggtagaaagggctaatggaatgatatttgaaacactcaggaagaaagtcttcgacaagaatgaaaagttcgcaggaaagtggatcagagagttgtcgtatgtggtttggagcctaagaactcaacctagccgagctttgcatggaaacactcccttcttcatggtctatggttcggaggcagtgctacctaccgatctcaggtttggggcaccaaggctggtcttcgaaaacatagatgaggcagaagctactaggctggaggatattgatatattggaggaagaacgattgaatacagtaattcaatcagctaggtaccag

SEQ ID NO: 64225 - DNA, 380 bp, Zea Mays
ggaaattgggaggctatggtggacgatcagaggcgagagctggtgcactgggtgcgtaataacctagcggagctcactatggcatcaatttataaagtccatcagcagtggcgcccaatttggagaaggcgtgctggtggccggagagaggggaagttcactggcgcgggttatcatggcattcactggagcaacgactccgatgatagataggccatctattgtgacctacgacgacgtggtaacaaggcagtagcgtggcgtgctcgggttaacgacgatcatcaccgtgacggccgcgcggccacgtcgcgacgcaagtggatgaggtgacagagcggccacagtgctccgacttcatcctgtgccaaagatctttc

SEQ ID NO: 64226 - DNA, 337 bp, Zea Mays
ggggctggtgcgcggaggttaggcgacaacgcggcggtgatgcaagaaggcgtactccgagccggtccacttcgccaaggaccacgagaccaaggacgacgagcccgcatagaggatgcaacgtctgcgttcaactgtaagtgagtttttatccgctccatcgctagccatcatagctgttggccggttgatctgtcgcccccccaccccggtagacgactccgtccttggccagaatagttgttggctggtacatgttcttctactgaatccttgttgcgtccttgttccttgaatgattcatgagattggtaaggctatctgcagcgcataccgc

SEQ ID NO: 64227 - DNA, 473 bp, Zea Mays
ctttctcttagtgttgcttttcaccctcagactgatggtcagtcggagcgaactatccaaaccttggaagacatgttgcgtgcatgtgttctatcatggaagggtagctgggaggatcatctcgccttgactgagttcgcttataacaacagctatcaggctagcatcaagatggcaccatatgaggccttgtatggcaggcggtgtatctcccttttgtgctaggagactttgggagagagatctttggtcggtcctaattgggttcaacagacatctgagaatgttcgggagattcatcagaatattttggccacttagagccgtcagaagagttatgctgatgtgaggaggcgggacttggaatttgcagtgggtgatcaagttcttctcagggtatcacctactagaggagtcattcggttcggtgtctccaggaagcttagcccgagatacattggaccgttctctat

SEQ ID NO: 64228 - DNA, 300 bp, Zea Mays
gtcaatacatatagcatgttatgctgccactcttcacgtgtcagggtcttggtggtcgagccacttgcgcttctgagttggcctcaaaatatgctaatgttcgattcattgtcaccatcattgtaacgagggggtggattatgcacgctcgacagtttgtcaccataataagttgttgtgaagtttgagacctcctctagaatgtatgcctctgcaatggaagcctcgattttgcatttatttctacatttctttcgaatagtctttagacatctctcgattggatagcaccaatgtccc

SEQ ID NO: 64229 - DNA, 517 bp, Zea Mays
tgatgagctgaaattgttatcttctttaaatactttgggctatattgaatttgttgttatatgtaatctaaataatttagaggagaaactttcttttagtgctgattttccatggttatctaaacatacatatcatattattggaagatataattgcaaaggagaatatatggtacattaagtatatatttgttcaaatgtgaaatctccttttatcataaaacaatatgatcaattagagggatgggttaaagctaaccatatcacatccagttccacttgttcttctttgtatgtgttacaacaacagggtcaacttcaagaaggggagcaaggttagacggcatcaagcactgcaacaacaccttttgcaggcaccaacgactttgagtcgaggacgactccaaaccaagaaggggagaatggtgagtacatgaatgtcaacaatatggtcaaggcccaaccaatcatagagtcccaagctcaagaggagtttaagtccagtttattggtgaat

SEQ ID NO: 64230 - DNA, 567 bp, Zea Mays
ctgggctgaccggcgaggagagaagattggaggagggaggttgaagatggactgggcgccgtaggatttagaatggatggtcccgatttgatcttgcgtactggttgactgtaggagggatggaaaccgttggatccaaatgagtggcccggattaaaagaactcataccgtttcaacgtttgccaccgatctacgatccgatggcaggcagtagctggtagcgtggtcgattttcggccgttgattcctgatctggtggtagctgttcataccggttcatgcaaaacctagatctaatcagagccctccatttctaatcgggcggcccagtttcgcccgtacccctttgctggcgcgtttttctttatgagcccctggattattcaagattcaacccgcagtccagggaatagtgttctgagtctagggtttatttgcgccgtggcccctgccttctctggttatcttgtgcccagtccagaaaaatataaaattcagtaaaagtgattaggaaatgatttttaatgtgaaaataaatgctagaatttgtttaacacctagaaaat

SEQ ID NO: 64231 - DNA, 484 bp, Zea Mays
acaattcatcacttgttgcttcaatggcatcaagccaatcatcatctggttcaccaaattgattcctgaatcgataagtatacttcaggtgaatcagactgctttttcgcgcatttgcattagctttagcatccttcggcgtttcccatttggcagtcagggggcacaccttaaaggctatgtgctcctacactatgtccctagtgctgatgtagttgcacacagcattaaatgccgctaggcaccttgagatctttctgtataaacaatagcaggtcttctcaatccgaaccacgatcggataggccactggattacatccttaatatcgcttctttgactcaagtcattcttcacataaaaccactacttcatccatcaagccggccatttttttccaaaggttggcacgagatgtctagcatctgactagtacacgaaggtataacatccgaagttattatgatattgctcttttatagtg

SEQ ID NO: 64232 - DNA, 1117 bp, Zea Mays
aacagactttgacttagggacaagagaagctagaggacgatagacggtgggtggcttacacctagggtcattggccagtgcaagtgtgcatggagtagaccatgttgacccggtcaagatgatggttgacgaagtcaaatggagattgcgaacacaagattgacttgtcccttgtggtttggattgatgatgagtgattgttaacatgggtaatgctttggtatgtgttagtggactaacaagagtacgagcttgtgttatgcaaccatgtcactcggcttatggtgtgcaggtgtacagtctagggacggtgctcaacaacgaaggtgaacatgctggttcatgtcgatgggctgggagcggcgaaggacaagtgctaggtcttgatcgagggactagagaaggtgactagctgtggtggctgacacttgggacatgcaccggtacgaggacgtggaggaggagatcatgttgccaaaaccgacacgagacaataggacacgtgtctaggacatggggggcgtgtatggagcacgctactcacggcaactttggtggttgagcctcaaaaacacccagcgctatagttcgctggtttcgccaagtttgggcctcaaaactcgatggtgtagttccagcaggaattagaggcggcacgtggcatcatcgtgaagggtgcattgaggcgaagcaactttgtggaaagcatgtggtcctcaaatgcatattccaggagttggaccattttacccccggttaagtggatgagctctatgtttctaggggtagtttagactagtgaaataaccttctataaatagaagggagggctggttgttttagctatctctttgggctttagttcatttggctttctcattttagttgttctctagttttcttattctctagtttgtaatagccccagttcggagatccatagatgctttgaactcccgcatctgtgtacctaagattttgaggaagtgtggccaaaaccacatgcggtccaacatttttcaaatgagttttgatttcctcttctcacttctcttctcttgtggattttgtgacaatcctttgtttgtttgtgctttggtattgtgttgggtttctc

SEQ ID NO: 64233 - DNA, 1138 bp, Zea Mays
gcgcggccgagctccgacgagctcgtagaccggccgattggggcaacggctagggttcccgagcagcagacatgaaatcggggctaccttgatcattttccctaacttaattgcgcttatgatcaactacggagctctggccacggtggccgtgagtatcgcggctatactgccgtgttcccggcgaccagaggacctctagcttaattaaatgggttgtcgagcatcacagagctatgaaaaggcttaaacaagagagagaagaagatgagctgaccggagtacggctggccgcggtgaggttgagtttcgggtgacggagaatggatttgggggaaatcttaaattcgagctctcggaggcacggttgctaacgattgctggtgatgatgttacgcagctaggggagggctcaatttataggcggcttcaccggtggcgcacaatttggtcgagcaacgcggcggccggaggtggagaggattactggcgcgcgtgaatggctgtcccatgccgtggcaagctctccggtgttgattagacaacagtgggggtttacggcgatgcagtggaaaggttgagccacgcggcgcacggccgggaagcggcggtcgccggtgagcttatctgttccagtcgtagggtagagggggaagcacgggagggtcaccggagtggagcccagctcacggtggtgaagatctttactgggcgatgcttacctgctggccacggcgcacgaatcacggcgagcggcaatcgaaagcgacgggccaccggcgacgggcaggggggggggaaccgtgatctgtttcagtttgggtactgtaccatggcaagacctcatcagaacacctaactgagcaacttcagagccatttttctcaaaattttgcattacaacttggtcatctctctgcaccaaagttgtagagctatagttaatcttcaactttgccacaatgcttaccatcaaatagtcactgaatcccattcgaaatcgagctcaaagttcaccctatcacactactactgaaaattcagttcagggattgcctgacagcctgactttgagcaagattatcttccaatttctcacaagaacatggcttgcactcttaagcaaacttgttatcca

SEQ ID NO: 64234 - DNA, 315 bp, Zea Mays
gctctgaccaagccacttggcagaatgaagttctcagaactaagaaggcaactgggagttgtcagaattcaagaatgacaagattaggggggtgatttgttgcatttttcaccaacttgtaatcctgtcatagctaggtgtattagttagtttgcatatttcgttttcgcatagaatccgggtgctctctggagactaccgagagcacgctgtgaccgcgtccaggcgtatctcccgccatgacacgcatgtcgtgcatgtcgcacgagcgcccaaaaatggtggcacatcgtgcagctgcgaggcgtggcgggg

SEQ ID NO: 64235 - DNA, 356 bp, Zea Mays
taaacaaaatcgtgtcatctgcatactggagaatagaaaggccctcctccactaagtgaggtaccaccccaccgatctgaccctccctcttagctctattaacaagcactgctagcatatccactactatgttaaataacataggagaaagaggatcccccctgtcacagacctttttttgtttgaaaattattccccaacatgtcatttgttttaatattgacgtgacctttttgagtgaaggcctctatccaatcacaccatctatcacaaaaccccttcaacttcaaggtctgtctcacaaacgtccatctaattttatcgtacgctttttcgaaatctattttaaacacaac

SEQ ID NO: 64236 - DNA, 532 bp, Zea Mays
ggcgaggcaaagaacgattttgattaaaaggtcggatcaccaacctggttctcttctcaggcccttgatttgacctttcacctccaaaccccttcgattttccatgtcctgcagttttagcttccactaccagtgctgtactgacagccctactgtaggtaaggtccaagcatgttgccattttccgctgaagcctgtcattgagtctcctcataaaacaattctttttcttcatatttgtattcacttggtcaatggcatactgggagagatggttgaatttattgagatattgcattacagtatctcccccttgctttaaccggataaactcttcttgtttcatatggagcactccctctggaacataatgctcccggaacgctagcttgaattcttcccatgtaatctgatgcccagccggttggattgctgaaaaatttgcccaccaagtactggcagaccctcttagctgttgtgtggcagacaacggcttttgtgtctctgtgcatcaaatcaacccaaacttttg

SEQ ID NO: 64237 - DNA, 493 bp, Zea Mays
gttgttacgacgacaacatgttataataaaatacattaatatgcagaaacattaatcatcattccacctatatgctccccaatgaacaaaccgatgtcaagaaaaccaaaaggatgaaaacaaaatcatcgaccagctagttcatacaagggagtagcgtagttcatacaaggggtagcgttttcccagtcagcatcccaccttttcccggtcaatattccaccttgtaaaattcaatttgattctacaaaaaagtatattcaagaaacaattgagcagactccatcataagttgatgaaacacgacatttttggtggcacattgacatatagtcgaagtaaaagcagaaaaatgtagcacaattgcaaacttgaagaaaatatattttcaatgcaaaaacatatgcataaagtctcgtgcccgcgcgctgggacgacatatgaattatttaatagaatgttagtgcataataatttatacataaaagaccaa

SEQ ID NO: 64238 - DNA, 1871 bp, Zea Mays
atccagaagcaatgctttaggctattttaaatactccaaaattccttagttaatctaaaaatcagtcaactatttttattaaaatgtatgaaaaataagaagtctaggaaaattggtttgacaattttaggatttttctacacttttctataattgttttagctctggaataaaaagaaaaggagaaacttgtgaatagcattgggctgatttcagcccagacggcccaacagtggacagaagcgtgcccgcgcccgtgccactttgcacaggggtccctgtcctttcgaatatcctaaaacaaggtcaacgcactattgagatgagtcactgacaattcccagaaaggacccccgggttctactcttttacaccgaccaacccacgacgatgaacagacctcgccgcactccggcgagcttattccggccagacgacgctacggctggagctcccgtgcgacaggggcgcaattaaacctttgccgaacacttcccctccatcaatttcaccaagggggcactgaatggatcagttcacaatgaccgggcagatgggcaaggggatgaacgtgttccgaccaaacgacagcgaggacgaccgaattgaggctggggaaaggttcacgagttcaccagggtctacggacacactttggtttgggcagaacaagaactgaagagcgggtcgacggtgagggggtagtcatggcggtgttttacagagcaagggtgcgttccggtgatgggcttcggccgaatttcaattggttggcatggagagcaataggagatcaaaggcaaactagaacaagaagcaatttcataaacactgacccgaagagcgctgaccacggtggagtcccttgcggcggagcaagaacagaggaggagggaatttgggggctacgtgggttttccggtggaattaagtcagttgcctaagagcttgtgcgcgcgatgcaacgaagaagcagtgcccggactcaatttatagccagcaagccggagatggatgaaatccccgagctgtgactgagctggcgagcacacctacgcggcagagccacggcgaaagtccagtggccgccgtttaaccgggtagcgccacctcaatgctttgaagccacgtcgcaaaagcctttaactgtggccgccgatgactgtcctgaccgccgtggcgttcttatcgccggcgagggctgatccttatcctcggcgcgagttttctgaagactggtgaacagtgcgcctgactcagtgaagagcttatctgacagatctacttggagctccattttctcaaatttttatgtggtgactaagccatatttctgcatcaaagttatatacctataatccatcttcaactttgccacaatgcttaccatcaaatagtcaccgaattccattcaaaaatcgggctcaaagttcaccccatcatactgctattgaaaattcagtccagggattgcctgacagcccgactttgagtgtgttttcctctaatttcttcttaacaaccatgcttacacccttaagcaaagttgttctcctttgtttgctatacaactttgatgtggtgccctagggcaaaaaccctataatttgaaagttacaaggctccaaagttgagcccaaaactctgaaattcagacttaggctatatagtgcttaagaggtgacttttgcaaattagtccaaaacttagggtttggcttgtaaatctccctaaatgtgaaccatgtgactttatatgctttaacatagtagtttttacactttagtccaaatgtgcactgtttttgcacataggcccctagggtttggacttagggttttccagggttcaaatgggggtttttggtatct

SEQ ID NO: 64239 - DNA, 531 bp, Zea Mays
cgatgtagacgcacgatgaatgaatggatgaagagtcccagctcgctagaactagaaggtgcatgcatgcatgcacgccacaataatattccttttcatttgcacatatagctagtatgcatggctcgtgcatgtgtctcataatagcccgtgtggtcccaccaatggcacacgtcgtgtatgacgatgtgacacgatgttttacacttgtcgctacccccgccgtcacctgcttgctcggtcctaaattaattgcacgtctaaaacttgagtatcactcgggctcaagataatcatatgccggactcttagatggtttaaatagtgtcctaggatcaggagcaaacctacgttgccctctcatttctttgttgcgagtagtatagtatagattttcaccaaaaagtcgtctgctcaatccaatctagatgcctctcactatgatgttttgatgctcgtcgctgtatagattttcatcataaaacccctgctgaacaatcttgtggcatgaggtataaaggaccatggtac

SEQ ID NO: 64240 - DNA, 527 bp, Zea Mays
atggtctggtctttcgcaaaacagttcagactttaagaccgaacatctaccgtagcgtaaagacagtgttacggatgattcggtccccgagaccggaaagcccaccatcacacaaagaacatctggttcctctgtaggggacatgatagaagaattcagagattttgataaactaggacaggggtttacatcggctaatcctttggaggagattgacataggagatggtaaaactccaaggccgacttttgtaaacaagaccctggagatcgatcctagaaatgagatgatcggtctattgaaggaatattcagattgctttgcttggaattacactgagatgcctggattaagccgagagatcatagagcatcggctgcctattaagtccggtttcagacctttcaagcagaaagctagaacatttcgtccagatcttctcccacgaattaaggacgaaatccaccggctactagaagctgattttattagaccttgcagatacgcagaatgggtctccaatattg

SEQ ID NO: 64241 - DNA, 386 bp, Zea Mays
ctgcacgcaagctccgtcactacttcgacgaccacaaagtcatagtagtcactggatttccgataggggatattcttcacaataaagaagccatcggaagaatagccaagtgggcctgtgaactggaatctcatgacattgaatttcgacctcgcaccgcaatcaaaactcaagcactagttgacttcgtattagagtggaccgaacaacaagtgtcggataacccggaaactgcaaaagtatggcgaatgtattttgatggctcgttgaaactgcagggggcaggtgcagggatcctcttcattgcacccggaggtgaacaactcaaatatgctcttcaattgttatttctagcatccaacaatgcagcaaaatatgaagctctg

SEQ ID NO: 64242 - DNA, 607 bp, Zea Mays
agaaaaacgtgatataaacacgattgaggaagtggtgtagtggtagaggaggttatgtgtgagagagaggttatacgattttgattctcatcggccataataaacgtggatttggttcaaatatggtgaaaatgaaaaggtgatgggttgggaatggtgttggcttaaaattaaaaaaattgttgtttttcaggttttttgcgattcttaatttgccgagataaccgcaccactcagccatggcacgactgctcacctgaatgcgcgaggctatcatgcgaggcctgcgggtcagtcaccgtgccatcacaacgctgctaagtggggccaacccatcgggttcttccttgttagcatcacgcgagtgaagggcgcagactccacggctcacaaatcgcgaaatcaccaactgaaccccgaaatctgatcacaacaaactcgcggggttgtgggattcggcatcaccagtgtataaaagtgatcccctccctgcaaaacaccttagccgagcaaatcaagtgatcgagtgaacgccattgctgagaaccacgacggcaaacagaatatggatgcagtgtggaatagaacagcccccccctggactccc

SEQ ID NO: 64243 - DNA, 402 bp, Zea Mays
ttatgtttcagcacccaaaattattctgatgagggaactaaccaaagagcctgcacaatgagaagactaggagccatcaaaatgaaaaacaagagtggtgagttgtaagtatttattagaactgaaaagtataaccatcatgattttacttgggtcagcatatcctttttgacagtgcactatcctacactttattttattcatgaaaactgaatcagcaactgatgtgttaggatctggcaaaatttggtgaggacaaggagtaaaaatctttcccttgataaggattcttgaacccttcatagataacaaataccagccaatgtaattaaccaaaaaatcaatcatcctttgtacatcaaacaacctttctactacttcagtttatttttataaggcata

SEQ ID NO: 64244 - DNA, 891 bp, Zea Mays
ttttgaagggtggttgaagctgattgaaacaaagtgcaatgaaatttgtgagaactatctaattaggaagcatggagatatgtcatccaccttcaggagccaggggaagcttcagcttaatagagttatggatgccatagggtttgagtatacagactatatagatcctgcagccaacactaaatctggagagaagcagaaaatagttgcaaagactaccaacaaagaatcaaagaaagtcgatgatgatgaaacatggagtgatgagtctgagaatgacaaagagccacctttggcctagaaaataagaaggccaagattgttgtaaagaaagctcaagctactcaagagcaaggaaaagggagcgctacaactatgtcattgggtcgtacgcggatccttaggtaatgacccaaccgctgccattttccactttaagtcccttgggcctgacgctaacttggttaatgacaactacgaagggcaatgacgatggtggccaaacttcgacatcttaaaagggcaaagatatcttgttcgaagaggaagtcgacaacccacacattcaaaatattggagacgctgcttttggagattcattgtcctcaggagaggaggatgaaaagaaaaccaccgaaggcgagggatcttcagggcacaagaaagcagatgaggagccaagttttgcccttaaaacatatacagtcgagtccactcaatccactgaagagatggatgaacttggcttctttttaagacatcttagtggggaagaattgagcaaaaagatggcttcagagctagaggtcaaggctgaaatcatgggttatggtcctagagctatgctttttggtggaggggacaaaatgctaatgtgcgtgatcgatgctg

SEQ ID NO: 64245 - DNA, 652 bp, Zea Mays
ataatttgcatttcacttagacatcacatgagcactaatacttttcctccgcgaccataaccatatgcatttagactacaacaaccaaatcatcgcgactacgagcttaacccaagccatctaataagttggttaactagagcaacgatatagcccgctatacaacatacacatcggcttgcgtattatgatcgcagactgagacacaatatacactacaatatttttttataaacatacatatttgtcatgtgaacagagcattttaataattatcccaaaacaactaactacattacacaactggtattacaatcctacttgaccactagatgtgactactagaatccgcgagcacaaccatacactacatgtgaagcgtaatttaaggaacgcataacgcgtatagacttgactcataaacatagagaaagcgacgactactttttcatgccaccacctctctacttaagccaaaacaattttcctatccacatcaaccaaacttctaatcgagtgaaaatctacacctctttgtcacgaatacaaccatattgcagcatgcactcgagacacttcggttcaacttaacacaattaccactacaatgcacttcgatatacacgttcgacatcacagtgcttcgacaaac

SEQ ID NO: 64246 - DNA, 610 bp, Zea Mays
gttcactattgatcaagggcttcttaactagcttagaggcattgcttttagcatcaaggtagacaggctcattttttgctcttggcctcttaacgagtcaagcaccatgttcctcagagtttattgtgagagctcatcaatgttggccatcaagtcctcccaagaggggtgcttgcatccctagctctccccatctatgttagagaaaggggagatggtgaggaggttagaaatggagtgggataatccacaaatgcagatcgacacttgatgggtgaaaaaacttagcatgtgtgtgattcattcaccaagtgattgcattatggaaaatgagcattgagttcctcaactataacaaaagttcagaggatgaatctagtgcgatctccaccgacaagcctagagccaaatcatggaggttaagtttgttgattatcttagaatgttctagaagtaatcattgagttccttagcctatcacaaagctaggttgtagaggtgaagcttgctgactttatcgatcacgaagtataggatcccaaagcaaaaaacttggttgttgatgaaagtggagacaagggatggatgcaccacgaagagtctgtagtag

SEQ ID NO: 64247 - DNA, 539 bp, Zea Mays
ggcgggtctcgctctgcgaggtgcttcgcatgtcaccccacatcctcatgaaagggagagggcacggtcaaaagagggacctcgccaaattgttctagcaccgatggctgaaaggggttttggggagtaggatcttagggcgctttttgaagccgaagagcttaaacttatgttgtctaattttcgggaggcctgtctaattccgaaggtgttgcttttgtaatattaaaatatgtgtattgtcgtggcttgacgaatttgagtggaacactgccctcgcccccttcgccgagggacgactatactgctctttggtgtctgaccatgtttgcacattttttatgttatcctggcttcgaaatgtttgtttctgctaagccgtctttgcacgttttgtgtgcgtatctagctgcacccttaggcaacttttgcttggatagaaattgtcttagcacgtgttttgtgcatatccggctgcaccttacgcgacttttgcttggatataaattgtcttcgcacatgttttgtgcgtatccggc

SEQ ID NO: 64248 - DNA, 284 bp, Zea Mays
cgaacactctagtgcccccagggaagcaacacttctttcttttcttgggtttttctaaaccgatttcgattctaacttgtgagtgagatcttgagtgacacctagcactagtttagagtgtgaacatgcaccgacactacactagttatctcttggtcaaactactcatccacaacccctatttatagtgcagctaaaataaaaatagaagtcctaactctagaccacgtgtcccacaactccttcgacacttaggatatgaagagcttcatcttttgattcgc

SEQ ID NO: 64249 - DNA, 394 bp, Zea Mays
catgcatagatctcacgtatggaaaggctgtcagcacagccttatctattgaagcaaagtacataaattctgggaagaataagggattcggtggtgagaggcctaatcagggccaggcgaagaagcaacggtttgtgattcgaccttcaaaccaaaatcgcactttttctcgtccaccctcatttcccttcaaacagccaatcattatccgccccaacaatacccccactacccaaaaacagccgggtgtcccaggcactcgatttcctgccttgcctagttcttcaactgggtgttttaattgcgacaagtcgggacacttcatcaaagactgcccatatcctaggcaaaatcaatctaatgcttcgcaaggatctgggaaatcagctcagcc

SEQ ID NO: 64250 - DNA, 485 bp, Zea Mays
aatttccattagcttaatccaaatctcatgagcggttgtgagattcttgatgcgattgaactcatttatatcaagagcatcataaaagacattcatggcttgatcatttgtgaggatattctcattgtcactaatggatggttcatcttctttcaacacaacaaatccatccctgacaattggccaaaattttccacccattgctctaagatgcattgacattcttattttccaatagtcataattgttcccatcaaaatgcggtggcttcccaatgtgcacattgttgttactagccattttgtcccactccgggatgattagatccacaaacaatggagtccttggctctgataccacttgtaggatctaggacaccggctagaggggggtgaatagacggttttgactaaaatcaaaaacactaggtaaatttaatcaatataacaagaggaataaattctctagtgacaacaagtaaacaa

SEQ ID NO: 64251 - DNA, 966 bp, Zea Mays
cctcagctaaagccgtggaattcatacaagacataatattcaggtttggaataccgaacggtatcataactgacttggggtccaactttacaagttcagagttcttcgatttctgcgagcaaaaaagcattcagatcaaatatgcttcggtagcacacccgagagccaacgggcaggttgagcgagctaacgggatgatattggaagcactcaggaaaaaggtcttcgataaaaatgaaaagttcgcaggaaagtggataagggaattgccctatgtcgtttggagcctaagaacttaacctagccgagatctgcatggaaacactcctttcttcatggtctacgggtcagaggcagtactacctgctgatctcaagtttggagcgccaagattgatctttgaaagcgtagcagaggccgaagcaactaggctggaagatattgatgtactcgaagaagagcggctgaacgcagtaattcaatcggcacggtaccagcagactctgagacgctatcacgacaaggtcgtgcgacaacgatccttttcagtgggagaattcgtcctccgccgaattctaacgggggagggcgacacaagttatcgcccttatgggaaggaccattcatagtagcagaagtcactcggccgggatcatatcgtctcactcaaatggacggcacagaaatcgggaactcttagaatatagaacacctcaggaagttttatccctagctatatttcaaaagctatcaagacgacaatgtactctgtaaaatgggaaatatgtcatcaataaagaaaggcttcaagaatactcagtttgttcatgattgactcgcattcttacataactcagggtgaccactatgccctgctaacggagcaatcggcttaagtcggcaacgacttaagacggtgcaacatgctcgcgcttacttaacttggggtgaccactatgccctgct

SEQ ID NO: 64252 - DNA, 378 bp, Zea Mays
cgcaagagcgtcggtagcctcgccgcgagcccagctcctgcttacagacacaaaatcactactgctgctcctgctagcagtaaataaccgcgcgcccgttaactaacaaagaagaagcccgaaccgtccgtgtcgtcagcagcagcgacgctgctgggacgtggcgacgacctttacaagactgcagctagtagcctgcgtgcttgatgcttgttcgtcgtctagaatgcgagagttttccccacaaaattcctatgaacatagattttgcatgcttgttcgaggcggccttcatcttctggaagggggttttcaggtgtacgtgttctgaataatgaagtctagtgtacttttcagttcttgtgagttggacgctct

SEQ ID NO: 64253 - DNA, 589 bp, Zea Mays
tgatgatcgactctctccagtcattgggatccgcctctagctgactcagggcgttgcattcttccatctgatccgtgatgatgcttggttgctgtatttcttggacgaagatcccaggtggaacttaggcccgactggaccccagtttcgataatgcattagctactgcattgtgatccctttccacgtggtgaactccaatcctttgaacttgtcttccagctttcgcacggctacacaatatttgcccattgagtcgatcgagaagtcccaatctttgtttatttgacttatgactactagtgaatcgccgtacaccatcaacttcttgatgccaagtgaaaccgcgatgctcagcccgtggaccagtgcttcgtactctactgcattattggatgccggaaacaaaagctggagtgcatacttgaattgttcacctccaggagcaataaagagaatccctgcccccgctccttgcagcttcagcgagccatcaaagtacattctccatacttcagcgacctctgggcttttcgggacctggtgctcagtccattttgatatgaagtcaaccagtgcctgagtcttt

SEQ ID NO: 64254 - DNA, 315 bp, Zea Mays
ccctatgttctatttttcgggacaacaacttagctgacttcaaaatatgatatctcctagaatatttcaccaacttggacgcataagcactctatggaaagatatgataatgctctacaagaattttatagcgattacagctaattgactccgcaaaaataccagaaacagtcagcactactgctgtctgcccgccaccaaaaatcagggcagcacccccgctaattcgcctaggagaacggataatccaacaaaattgcagcacaattacaaaatagaaaacaaggtcaccttgaactccttctcccttccttc

SEQ ID NO: 64255 - DNA, 272 bp, Zea Mays
tgaccactataccctactaacaaagcaatcggcttaagtcggcaatggcttaagacggtgcaacatgctcacaactacttgtcttagggtgacctctatgccttagcagccaatcaattggcgtaaatcaggaaaagactcaaaaaccagcacgttgcacttacttccacaatcgttcaggacgactactgaattctaacaacataaacaaaatgttatagttttcagcaccaagaacacattctagtaccctatccaccgagtatccgagc

SEQ ID NO: 64256 - DNA, 407 bp, Zea Mays
aatcatcaagagtaacaagaaattctcaaacgtaaagatcatatagtaccaccaaatataaatcccaaatgcatgcactaggtctatcaacctctcatacaaactagcattaagagcatgtacaacctagagaccctgcatcggtttttcaagtacaagatacaattaagagactgcataatacaaccatgagactttggatcataaatacacttaagagacaatttgtatggagagtcatgtagaactagtctcttatatattttttcaattaacctcctagagacccattaagggactccatattgaatggggttgtacatgccctaagcttggagaggcaggagattgtcatacctagatttaagggcaaatctagatacatctcatatgtgtgtcaggatcaa

SEQ ID NO: 64257 - DNA, 1053 bp, Zea Mays
cgcaggtaggagctgctgccggatacacgcgccatccatttctacagcacgcacgtaggagctgctggccggagatacacgcgcacacatgcaggatctgctggatacacgcgtgtctaggtcaagtcatcgatggctgttctagcaccttcactgcagcaaggttttgcctgtcagacaagggagaaaaaaccatccaaagattagtggatcgtaagtatcatctgtctccaacttgtatataaatacattcaatgaacataacgtggcatgattgagtaatcccttcaatttcttgtaactcacttgcatctaaacatagagatatggtgtaatttcttcagcaatatgtaatcactccatgtaatcttctttcttttctttcccctccccttttttccctactcatatctccccctctcccaacatgtatttgtattagaactgatccttttctctttttataagaatcaggtgcccccgttgcattgtcaaaaaaacatagacatattgcagctggtatggtaataacaagtcactgaacataaatattttgttaatcaaatgcaatatgtttccaagtgaccatcagcaacaacatccaataaagatttcaaacaattacatcaaagtattcagaaaaccaaactaatcaaataacaatagaagactatttttactaaaattatcaaaaacctattctgtgaaaactgtagcctaaacatccaatgctataattacccctagctttcaagaccacttacattcaatcttttctgatccacataaccagacttttgacagcaaacacatttttattgggttatatatagattaacacacatgtatacacaagcgaagaaaaggatcgtgaatcattacctgatcaaaatctcaaccagatttccagagttgtccatcaatgtactcatttgtgttagcaatctgcatccagtatagaagatagtaatcactttttcttttgcatgttcttccacattcaacaaatgatgatcttgaaaaacaataaaggacaaacatgtgaggtctaac

SEQ ID NO: 64258 - DNA, 677 bp, Zea Mays
ttctaaattgaacatctttggttaaaccctaattttgattattaacttgctcccattaacatggttagtattaaatgcacaacacaaaagtccaaaatgaggcattgattattttatgtattattaattaattattctctttaaataaggatattctcttgttggaataagtagatggtcacacatataatgagatatatttttttcaccttatttacaatttgggtcttacagctaccattaaacactaatgccccctttgggtattttaatttttgagcatagtgtagtgcttctagcttttcttcttgagaaagtctcttcctcgaagcatgacaaatgatgtaatcaatgttttcttttgaagcttcgggagcagaagctttaacctgctctgtcgccttttcttcaactatggcaggctctgccttagtgggctctgtaggcccaacgccggtttcagcttcaattgttgcaacttcgacttctgcctgcttcgttttagcttcgggttgcgctatggaggcttcggcaatttttcttgaaggaacaaaactcaaggtttttgctgtttctagcacaacatctagcacgtttgccatccttctcctcttaggagttgcggcagaacccttttgtgccttcggcactatcacctctgatgaagggctcaaaat

SEQ ID NO: 64259 - DNA, 537 bp, Zea Mays
gtctacccatactacggcaaataaatacttatccacaaagcaaaaataacataccggtgcagcgagaacttgtctatacccatactatggtcctgttggatacatatttgatagatttgaatatggtgatggagggggtccatagttttcatatccatacatgatcgatggtggtacttcgactaatggtggagggggtccataatttccatgttccggttgccattgccatgcataagggttctagattgggttttgttcaggccgatagttagaacaattggagctacttgagctacatattctatcttggacaggaaatgaaaccaaacgacgtcgactgcttattgtctcccgctgtgaatgaggtgtatcatggtaagaatcttgaaataataactaaaccataaactattggacattcacatttaacaattaaaccataacacatttaccaataactaatacataaaccataagccatcacatatataaaaatagtaactcatctttacatatatcatataacatcttcac

SEQ ID NO: 64260 - DNA, 879 bp, Zea Mays
tcaagctccagatcactgaaaaagggagctcaacgagccatcgcttgccgaacttgttcagatcattgaagatcctcggcttcaggccctgtaggatcatgccgttggcacgttccacttgcccgttagacctcggatgagccactgccgaccagcctatccttcaccaccagtgctataaccctccgagctcgaggatagcatctcgtcgcacacatacaagacttgcagcatggactcagggtcctagaggctggagaagtccaaggtgaagctcgggccgtcttcctcctcggagtccaggcaccctgaggggaaaggaagcccgacatacatctaggtgatggagctggtgtcgaaacttggatggaaggggacagggttgaacacgaatggttctcccccgacccccgctatgtctctctagggagcgtctggctcctcccgacccatgggtgggaggaccgattcagctgacatcgctcgctcaacaaagtggggaactgatgtctcccacattagaggaggtgatgccaggaatgttggtacaggcaccactagggcactctaggtgcaatgcggccgttggctaggtccctcgagagagagagagtctatgccatcaaccattcgggggactcctctagtgcatggggtgccatgagtggcatgatcacggttgttccgtctctgcctcctgcgacgagaagggcggcaatgggagcttgggcgctcgagagggacaggcaagaggagtatcatgtcatactcgatgccgggagacatgaactctaggctctcgaacctgatcaccgtcccaagcctgagtggatgatggaaacctgccatctagagttctggtgggaactggaagtattt

SEQ ID NO: 64261 - DNA, 510 bp, Zea Mays
gcaagaagtgcggagttgcagatggtcataatagcagaacttgtctttcaatcgaagaaaatagagctcgtttggtaatccttgctaacccaagaaaaagagggcgtctaccagggttgaggaacattaatacgtcgagagatccaaaatggaatgaaacaactacttcaaagaagcatgcgatgagtctagagacgactgatgagtctgatagtgaaatgtaattatacttgtgttggatggattgtttattactgttaaaaatttatgagatggacataaagtggataataatgtggttcagtaaggtttgttgttatgatgttatttagtaaattttaaatggcatcgaaatatacttaatcgcatataaaatgggactaaagatgaatgaagaaatatatgttggaatgtagtatttcgtaaataatgaatattaacatgcataataagaagaatgatcgttcgtaaaactacatagacaacaacgtaattgacatagagctgtag

SEQ ID NO: 64262 - DNA, 470 bp, Zea Mays
ctttaaaggttggatgtaaaatatgatcgtatgttcgtaatgattcatagttctgagctcccttgacaaccatcagaagcatcctaacataatatctttctcctgcagatggatgcacaaaatgtatgcggcctattttaccatggcgttgtctgtgctcccataatcttttcttttcatcccatctccactcggatgggaagtcagggtaagttagggatctagcgttttcatgtctttgattagcaacaaaccactcagttagcatggttcgatgtaagaattcttgtgatagaatttgcgacatgttggcattagcatggtatgtaatgtaattctcattaggcaagtgaaccggtaatctctcaacgggaggaaaatgtcgatggatttcaaaaccaaaaatcctccaacatgaatcatatggacatataaatctagcatctaaatattccttgacctcattcctt

SEQ ID NO: 64263 - DNA, 876 bp, Zea Mays
tcaccttcggaagcaataaagagaatccctgcacccactccttgtagcttcagcgagccgtcaaagtacattctccacacttcagcaacttctaggctatctaggatctagtgctcagtccattctgatatgaagtcgaccagtgcctgagtttttattgccgtgcggagccgaaactctatgttgtgagccccgagctcacatgcccacttggctatccttccaatagcttctttattgtggagaatatcacctattggaaatcttatgactattatgactttgtggtcatcaaagtagtgccggagcttgcgagcggttaggagtaccgcgtataacagcctctggacttgaggataccttattttgagggcccgaggacttcgctgatgaagtaaactggatgctgcaccgggtatgcgtgtccttcctctgcccgctcgactactaacgcggtgcttaccacgtgagtcatgcaggagttacacaggagcagatcttctgctggctagctcggcgtgatggcttgagtattggtggtgttgtcaagaacttcttcagtgcctctagagcttcgtgtgcctctgtgatccactaaaacttgtccaccttcttgagcgatttgtaaaatggcattcctttctcgcctaaccttaatatgaacctgctcagagctgccatgcatccagtaagcttttgcacttttttctgcgaccgtggcgcttccattctcatgatggcctcgatcttctccggatttgcttcaattcctcggtggttgacaatgaatccaagtagctttccggctggtactccgaagacacacttttctgggttcagcttccaccggtagcgcctcaggctgttgaagaccag

SEQ ID NO: 64264 - DNA, 354 bp, Zea Mays
tgcgggattcgtggggagttggtggcttctgccagggaagttggccgaaactgagctcaggcgaggcggagttccctcccgaggttgaggctgtgcctagacgttgcatgtcccatctagagttgtttaagaacaatgaccgaagtgggggagcagtgcccggtattcgtgggtgtgcatcatcatagtcgttgaaagtagatgggatagatatttgtatcgtcacatttaatgtgcatgtcttcgtggttcctgaaatctttggtcgaggtcgggttcgagacgggccttcatccgagatgccctcggacgagatggaaattgctttctgtaaaagggggtccctcaggcgag

SEQ ID NO: 64265 - DNA, 576 bp, Zea Mays
ggttgtctatatcatccaaccgttcaattccattccatatttccatgtcaatttgaaacaaattacccggagcagggcaaaaaagctcagtataaaactgagtagcatgttccaaaatatttttatcccaaaaaatcctcttatctccatcttccaggaagacaatattattttttcgtctcctactattagcatgcgatggaaatactcattatttccatcaccatgcataagccagttttcatgcgtcctctgtttccaaaacagttcatcttcatcagtcatcagaaaattctctttcataagatagcatcttgcttcaagctgctgaatattaagaggaccccgctcttcatccatttccagcctattcagatcataaataatttgatctatcttcttctttttctccccttttaagttccaatcccatcctttaagaaactgcttgcataactttagtttttgttggattttatccggtgcacttttagctcggcatggtttgttccaaatatcttcaactatttttttaaaatttggatgagataaccaaccaatctcaaaaaagaagaa

SEQ ID NO: 64266 - DNA, 869 bp, Zea Mays
ggctgaagagaagaagattgctgaccctgcattgaccgggttttatgaagctatggagaagacaaatacatagaagattaccaatgagatgctggctggattatctgaagattccagcgatagtgaaagttttgacttagaaagtggaaacgaaggtggcgaagatcggcccttgcggtcgagtcataccatcttcgagaaatcaaccatcaaacagagtcagattgatgcaatgaaaggaagatacttctgcgatatttctatcgtgagggctggagcagatagcagtgcccctatgcccgaagctgacgaagtggttgtgtataggagcttcatgaaagcaggtcttcggttcccctgaatagatttttagttgaagttttgaagacttttaaattttaccttcatcagattacccccgaagctatcatcaaaatggagatttttatttgggccatgaggagccaaggtttggagccgaatgcaagatgcgtctgcaacatgcatgagttgtcctatgagacgaaggctactggtaaagaataatatcataataattttggttgttacgacttcgtgcctcgctccgatgtgagttatcccgtcccaacatttcagaagaggtggccaggaggctggatgcaagagtggttttatgtgaagaacgacttagttgaaagagaggatataaaggggatcattcaatgccctatctggtctcgcttcgacattaggaggccagctactgcccttggaaatgatattcaagcatgccagacggccttcaacactgtatgtacttatattggctttagggacttagtccaggagcatattgcttacaaagtgtggcctcttggaagtggctg

SEQ ID NO: 64267 - DNA, 412 bp, Zea Mays
tatgttagcagttcctgccgtgtactaggctaggataacaatctgtgctattatggatagaaaccaggatagttatggtaggagagatcctgattggtgtaggggatcaatctggatcagcccacactaggaaggcctgatactgattgatagaggagatcaatctggcactatttctataagccactcatgatctcctctccctataaatactgtaaccggctggctcttcattcatcaatacacaatagcctacaccacatatctctctcacatggtatcacgagttcgggacactcccgttcctcccaccttccgctgaaatctgcagcctgctgcacctgcgcgctgcacgtctgcagctgctgcacctgcgcgctgctccatggccggcgaccaagttccgcccgcc

SEQ ID NO: 64268 - DNA, 462 bp, Zea Mays
gcggccaagaaaagggaaaaaagggagggggcgaccactagggttttgtgggagaaagaaacgacgcctcagatgtctcctgactttgcatccaacggcccacaactctttccctcatccacgcaccgaagatcaacttttggtcaatattttttgggatattacactctaccccccttaaaaagaattcgtcctcgaattcgaccactccaagcaaaacacccaaggtaccccatatagcaccaccgttcgaaacatgggtccattattgttcttaattaacacaagaacttctaccttggactaattgtctaaggaaactacacaacctgacatcaagcatgaaccaacatgtaatgaagctcaaatcaagtcatagatgcaatcaacactacgatttcacaacatcgaatttggatgcagccatacatcagcatcaatgtcttaaacactcttttatga

SEQ ID NO: 64269 - DNA, 416 bp, Zea Mays
tagggagcttgggtttaattcatgaattccagggctcgattgtatttactttacactagcagtggacgatgagttgttttcaaataaagtcagtgtcttttacgcaaattttctcggacaaaggggtatcaggtgactacagccgctagattggttcttgacgacccagattagatcggcccacatcagaaccggtacccaaccattgccgttggattagagatcgatgcccaggcttttaaataatcgagatataatccaaatcactcgtttatgatccgacgtacccgattctatcacccaattcgttatctgatcccttaatctgagctctccattttggattcgatgacccccacatctccttcctctcgaccgaggccgagcagagcacccaaccctaagctagcgagctc

SEQ ID NO: 64270 - DNA, 786 bp, Zea Mays
gagtcgtcatgcgtgtcctccatagggtcatgcgtagctgtactcttggtatggcatatcgcctcgcacatttgtcatacaacatcctgtagctagtccatcgctaacaccttcataatagtgcgtggcgggtcccgcgggccagtcccacagagcggtcgtgcgtggcacgattctgcttgtcaccacaggcctacgtcacccctagcttgcttaggcgtacaccctgatatggtgtatttgttgcgttcttttgggcatgcgggtcattgtagagactctagcactgagactcctacgaacagggtagactgatcagatgagttagtgagggtatatccgtgggcacatgcgggggtgttacgtcgtgtctgacagagaccttttggtactatatgtacggttcaaacgtggtttggcgatgctgcatcttgtcgcgaccatcgggctacgtcttaccgcaaccatcatgggtcggcatcgtcgacttgggttccctccttgtggatcctctcgatggggatttggtcgttcgccacaccccatagacttgatcggcggggactcagtcgttcgccctgcctcttagacttgctcggcggtgatttggtcattttccctgcctcatagatttgctcggcggggacttggtcgtttgtcccacttcacatacttgctcggcggggacttggtcgttcatcctgccttgccaacttgctcgatgggaacttagtcggtaaatgggccagagagaggtttatgggcctcgctttgggtaccccattt

SEQ ID NO: 64271 - DNA, 454 bp, Zea Mays
tgcaatacaacatattgagattttactatctaccttccacatttcaggacattaagccgtgttcatatgatgtttgcagttaattggtattttgaattagaatatatcttaacttttcccgcactttccattggcagggtttgttaaacttctgagaaattcggtatatattttgcaaaaaatacgagtacatatatcttggggtcgattcatatactaagaataatgcatggcaacaatgcactcggtaaatcgacgacacaaaaaagcaagaccagcagcaatcacgacacgctgaatgactactcaaccataccacaggacacacaaaaagcaatatatagcctgctgccgatcgatagacgacgtacgacaacggatgcacactcgtgcgaatcgatctcatcacatggtgccattgaaggtgaggagcttccacgtcctggactcggag

SEQ ID NO: 64272 - DNA, 385 bp, Zea Mays
tgaaagcgaaccttgagaaccctaaatactctctctgcgtccttttgtgcgtcctttgccatgcaacaaatatttagtaccttggagtttgtgggaggagaatggtctttataaacaatagccaacgaggatagttgtcatcggcgtggtagtacctttggttttactcatgtccattcatcgtaaagttcacatttggtgcttctcccttaagtatgtcagggagcaacgacaattggttgaacatgctgatgtcgttgtttgacctagctatccgaaaaatcatgtcatatccataagttatacaaggcaaccgcctcgagcatattgttcagggatccaatatcttcccagtaaactgctcttttcatccaatggggttgtt

SEQ ID NO: 64273 - DNA, 491 bp, Zea Mays
agtacttgttcctgtttatcatctcatcatcagatgtgtagtagtgatattattatttttagcgaagaatatgtgcaggggaatatttgcgatgcttgggtgtcttataagatggctcaactcctattcagtaataataaataattagcaagaaggttttgatggaaatgatcctaactatagcatcggcaatggtcttgcgtccggtgaataaataaacattggtaatattcgactaatacatacaacggtttaattatatcatataaaactacattaattaattaattgtaggtgtttggtcgataactatcttaggccttttttggatacgtacgcagagcacaccaactcatccaacacagattaagtcataggcatccaaacaaacaattccgtatgtgggagtcatcaaaacaaattccttgtgttggagacattgtaaatgcttagcacatccacttcgccaagaccttctcctagtctcattg

SEQ ID NO: 64274 - DNA, 470 bp, Zea Mays
gtactggcgtggctcgcgcgcgacatatgcacactgattaatttcatgtcatgcatggcgcctttctctgacttccctgtctcccgtcgttgtactacatgtgttatcgatggggctaggatgggcctccgatagaatccttatttactagctagtcacccagctcgagcagtgatgagatccgtccatctgggggcttcgttcacttctgcaacagcgacagttgatccgcctgtgatcatcactatgatcacgtacgcgtagccagtacctcttccgagctagctatagcgtcgtctgatccatctcctcggccttcacaccgctgtcgtcgattgtttcagtgccgcgatttggagcagtgcgcgtatgcgtacgtgtggaactactaattaattatgcacatgtaagcgccatatattaacagttacatatatgattcaaattttcaattaaatgcatgctactcc

SEQ ID NO: 64275 - DNA, 444 bp, Zea Mays
gagggttgcacactggggcatgagttggatgcttggcggcaagtcctccgccatgggggcgggtggcgccgccgctgggctctcgttgggaggaaggagaagtgtgatgatcgttgatccagtcaccaatggttgtgattagcatgttgtgtaccacttcacctaattaaatatgggtcatgggttgttgatcgggcgggtcaggtgagattgcagcgtgggtgagttcaagccatagatcgtggatcgggtggctgtaattgaaaccaagtgtaacccttcgttcttctaattaggactgtaagatttagatcagacaacccacaacagaggataccccttcgaccaaacgtttttacaaaagagtccgttcaagttgcgattgctttgtaataaaattgtctacgcggtaacaacattattcgtatcctatctcatattttt

SEQ ID NO: 64276 - DNA, 615 bp, Zea Mays
agcggccattcaatttgggagcctcaatttcgtcattagccgggagggccatattgttagagtagcgcctacccaacctcctccgcccaggaatcctgacaccatctcaaaagccttcggtgccctcagactcaccccatgtgggtggcgtgaggggcatgggctagccccgccttacgaggttgacaagataaggcgacagatcacaatccatatggggcctaacccctcgtatgatgatctgatggctttctttgcgtccttagaggacctctctggttatacaatgcagagacaatgtcctaccatggtgcctctggcagcagccccggtgccttcccgcctcgactatgccacgccatggcggtgatcatcgcccaagtggcccatgattatctccccacctccgatgacttggagtttgtagggatggccgatggcggtggggccctcatcttcaacgcactctgcacggactcaaacctagatttgagcccccctaaaagcagcaaaaactcccagtggcgaggagaacaaagaccgcccagcctttgcagccccatcagcgatactaacaaagtggggataacaacaagaaaggctcaccataaccat

SEQ ID NO: 64277 - DNA, 324 bp, Zea Mays
tacgtttctatgtggtttgtagctcttcttaaattgaccgttatttcagtcttcgtttactattatgcttgttttgctgataggttgttgatgacttgtttgcataaacccaaaactacaccatattctcatttagtgaaccttaacctaaatatgtattaatttctcgaccactcatcctaggtgccatcttgtgtgaagatcgttcttttcacaagtgttgggggtcttcttctccgttgaaggtcttcaagacaaagacatcattggcaaagtgattttgaggactctctctctctctctaccgaagatcctcgagatgaa

SEQ ID NO: 64278 - DNA, 621 bp, Zea Mays
tgcaaaataatgtcagctctctgaactggagtaggttaacgaagcgtatacctcatgttcgctgactgcaaaccgagtagcaggtagtagcctaggtcttcatcacagagctagctgccccgtcgccttgatcagttcagagtcagagatgatttgtggacaccgacccacccccaccgccagctgatgggattattacgcgcaggcgcagcgctgctccgtttcgattgggaaccgcgaccactatcacgtcatacttacctttccgcgcattccgcaagtcaaaagagacaccagcagttatgttgcgggtactgatagctactacaaccataatttctttttttaaaaaggcatagtgatgaatttagttggaaatgggccatggctggaggagtggaggatgggcgtctgggccggactgaaaatgcttgagcaggccttggcactagcagacagcacagcaaaagccgtagccatgtggtgtagtcgtgggtctatagaagccatggcaaaccctggacctttttttcttcagtcaggatgcgaccttgcttgggcctgtgtcccattgcccaattgcgtccatgctcgattattattgctcacgtttacttttag

SEQ ID NO: 64279 - DNA, 686 bp, Zea Mays
gacgtggtctgggttcccctacgcgttcaccaccggtaagaatcccctctctgatttcgccatgattataacatcacgtagagtcctgtggttttggaatcgagcgttggatccgtcgcatcgcgaccaccggggttgctcgccgtcgggtgagtaccgccgcccaggtgtttgggtcactttggtaatggtttgcgaagagagagagagagagagagagtaatgggcgtggggtaggagataaccatggaccgtccgattggtaacgtgtggttgcgattagatcatgccgtaacggttcgtttggatgggggaaaaccattgatcaatgattgtggggctgtgaatgattcaggtttcattgaatccggttcatcggatcttaatccaagggttgtcctcgcgtatcacttcactgggggcgcgatctaatctggaccgccaggcgtggatccaacggcccaaaccccaccgtaccccttcacgataacgttttataaaacagaccttatgattttagagaatagaacccgccgtcctcggcgacagtaatctgagtctcgggaatatttctatgttagtctccaagctttctgagatttgacgcccagtccagaggtgaataaaaacagagaaataaatatagaaatgggtttttaatacaaaaaaataattctagaaactgg

SEQ ID NO: 64280 - DNA, 753 bp, Zea Mays
aagtttaattggacactagaatgtatgaagcttttgataaactaaagaagttgttaaccacaacacccgtgttggcccaacctaacattgagaagtccttcgacgtttattgtgacgcttcgggtatgggcatttgatgtgtattaatgcaagaaggccgtgtaatagcatatgcctcacggcagttgaagagacatgaagaacactatcctactcatgatctacaccatgccgcagtggttcatgctttgaagatctgacaccactatcttctgggcaatacttgccatatttatatagattacaaaagtctcaagtacatcttcactaaagctgaattaaatttgagacaacgaagatagcttgaattaatcaaggattacgatctagaagtacattatcatactggaaaggcaaatgtggtcgtagatgcgctcagtcgcaaggaacatttatgtcatttgtcgacaagtttgtacgaaaccaccatctatcaagacatggaatgactgaatctgagtatgttccaaccaacattacgaaccaatttgcagatggaatcaaccctagttactcaaattgtggaagctcaaaagacagatgccggaataactcatattaaggaacgtatggcagtggatcccactacgtgttttcaactggatgacaaatgtattctttggtttaagcttcggttagtagtcctaaaggtcccgacatgaggcaacagatacttgatgaatctcatacctc

SEQ ID NO: 64281 - DNA, 876 bp, Zea Mays
gttctttttggtgccgttccttttttttgttagcacatgcatcgtgcagtataggaacttacggtcaaagaccgattttgaaccgtcaaactaatgtccgctaaaaacaagggtacaaatactactcgaaaataaagtacactagacggatggtgtacgaaacatacgaaacacacatctgatttaacaaacaaaaaatacttgtagtaactaatttgcatagtggttggagcgggctaattagttccccagcccaaaactcgtctaatttcagtcaattattgcatgtcagtaaattgttgtaaagaattgtttaatctgacgagcttacatcagagaatgcagggttaaagttaactataccttcctcaagaagtactgttgtaaatttttattcctaagagagcatccaaaagtcaagaaagtttcagtaacctgctttcggatcagttgtgctaatatatctgaatccagccgtacttgcaagttgggaccataatctgacctggtcttctgctgcgcgacactccttcggaccggccgaccgtgttactataaaataagaagtagatatcaaaccaaacagcgagtctaaacgaaaatactgagacacatcatcgtctggcatgtggggatcaggctccggcaaaaattaacaccattgtcgtcttcagaaaaagttacataaaatcgaaccaaaataatgtacctacataaaatcgtcgagctcggccacgtacgcgctagctcagccacgtatgtgtcacctcatcgtctagagtccagcgcattaagtaccatggcgccgtgacgtattacctcgacgcagggccgacgctgactacagggctgccagggcggccgccctgggccccc

SEQ ID NO: 64282 - DNA, 616 bp, Zea Mays
cttgatgatcctatggtcactctatgatttaggcttgctatgcagtgtagtatatgatgccttttgtacttgcacttggttgctgaaaaactcaatgctttgttggacatcattttttttaaattgcaaattggtttgttcacattgttctatatatatggaacctttaatatatgttgctctctgaactgattggctcagcaccatatgggatctaatatatctgcagaatatgtaatgagtttgatgtcactttattgctatccattatgccaacattagtagagttagatttctttgttgttttctcccttttttgttaggagtggatttgatggtctggtgttgaccgattattacgcgaaggttctttgcgcccgccgcaagtaataaggacatcaagaccacataccagaagctcgccgatcgcttatcccctcctatccaaccccatcagtcctcgtatcaccaagcaaccgtatatagtatttaccatatttatttgaaattaatgtcatgcttcgggtttataccaacggacaaatttgtagtcaatgataatatgtgttattcattttcatgtaatcgttgtgtacgttttcatgtaattattgta

SEQ ID NO: 64283 - DNA, 517 bp, Zea Mays
ggagagtcctggtcgttggatctgggctagcggatgagattagatcaaggataacaattcggtctgtcaaatccacgacgtcagattagggtctaagggctagggatcgtgcgtgtgttatgaggctgagcgggtttttaaagagcgcctgggtttgttttatcatgtcgtcccctgctatataggaaccatcacaaagcagtcctggaatttgtatattacaccctgagctcttagggaatagaacccactgtctaggagagtttccttcacactggagcccttggagtaatagttaatattcacatatagttccctggaattcacaattagacccctaagatcataaatttaaatataaaattagtccctaatcttgtttaatccataacttttacattttaattccacttttagtggttcaccgatgttggatctagttacttttgtaaaggcgttctgcttatataataaattttgtgacactggtttctatacaataagttgtcatatgtgt

SEQ ID NO: 64284 - DNA, 395 bp, Zea Mays
gattttgaaagttgcaaggttcaaattattatattgtactattttttgtgagttttttcccctctcatataggtatcttgtaaaagatttttaatgaggcaatatcaatacaagtttactgcatcttctcccaatgcaccgaacactgttgtcacgattgaggaccttgtcaagaccggctaattggaagtagtatactactagctagtagcaggtgcacgatttgccaattccaacattcgatagatgccaattccaacattcgataggcacgcaagtacgctataaaatggatgcatggaaacgcacagaacctcacgacaaattcagatcgaaaagcagcaatgcaaagcttcaacttctccatgctgacaacacttgtgccattccttctt

SEQ ID NO: 64285 - DNA, 332 bp, Zea Mays
atccaatgtaggcgttcacatgtgcgccatggttctgcctccaacatccttgtccctaccgtgcccagatctccgtcgatggaaggcacaattttaggatgctccgcggccaccccatccatcctcggccttgctggcttcgcgtcaaccccgccatcctcgccccgctctccgtcgatggaagccaacgaccgcctcctccatcctcgccccgctcaccgccatccccttccatcaacaccccctccatcaccgccccacatccacaattgttgtgtctttccttcggcatccacaccccatgtacagctgccacaatcgccgcctccatc

SEQ ID NO: 64286 - DNA, 638 bp, Zea Mays
gttacacccattggggtcagcttcaacaaggtcacacccattggagtcagctggtgcacggtcacacccattggggtcagcttcaacaggtacaccaccattgggatcaacctcagtaaggacctctgctggtacttcttcacaaacaggagcagaagggctagcatcttggtccaagcatgacagtcgccgaagtcgcctctttttcttctttttctcctcaacatgtgcagttgggtagctaactgggcgaggacgctttgggcgaataccctcaggctttcgagtgtccactgttttgttaagctcctgtacaaccgtaacaaccattagtttagcatgagccgagtcagaagattctccagccaacatattgagtatatcatctatttcttcatcatccggacttgccggcactaaaaagtgaacttgcctctcatcattgggaagatcatgaagaggagcaaccagagcttcaatgtcctcaggagaaggtcgcactctaagaccgataccactatcactagcaggagggttggacacaaaattgaaaaatgacctagaaggtggcagattccaagcagaataagcaacaggagcaccaacatttgataccttgcccctcagaatcatatcta

SEQ ID NO: 64287 - DNA, 556 bp, Zea Mays
ctcggtgaaaacagagcgagcatgaaggcaaacatcagggaacgtttcttactagcaatcgaggcagtgtctagtccgaccacgcaacatggcgggtccgcggcggcacaacaccgatggaagtcccccattccctgggaccgaacccaagttctactggtggcaatgcgcttcagagagtatggaggaactatggggagaggactcaccaatcatggttctgtggcgcagccggttcacaacgatgaatttctctctcaccctacctacacggacggcaatggtgcaaggttggggcgcatcgtttagctctttttaacataaggaggcataggaggctcgtatatatattctcaacactgagagctccaacaaaattcgttacaactactaggagacgatctcggcggcggatttggtccctggctttgtttcggtgctagcatttgtatccatcgtgaggttgagggtgaccctggcaatgggacccacctggaagtgacttatttccagcgtcggcggacgtgggggaggaaagggttggccaaaggggccc

SEQ ID NO: 64288 - DNA, 613 bp, Zea Mays
ctggcattaaagtgcttataaatgcactgtagtttactcactattcatgttgccatgaaaaagaaatacatccatcttcatctagctaaatatttgaaggagtatcataaattcttatatgttcagcttattttcttgttagctataaagtggtgcttcccagtggtatgcatgatcatatccatgcattaataggattgtcagaattgggtaatggtataagtaacatattctttttgaaatgtgattctgagcttgtgtagataaatgttcctcattgaactatgaattacacatcaagctctaaatttacatgttgtgctgttgagtctaaactacatgcaacgattgtaattgaactgatttcttaccttgcagcgtctagaatcccaactatcaagaaccattaaaattttatcaacaaattgaggcacacagtaccagtaggttagactgtttgctatatgttttggctaatttacaagaatgatttgtgatgaaccctgcaagttaaggcttgctgtgacaatgttttaagttgggctttggttcagatgaaacacatggcattgttcccttctctttggaaaatatgaagcactatgtataaatc

SEQ ID NO: 64289 - DNA, 470 bp, Zea Mays
aaatcctaccccccttaacaagaatctcgtcctcgagatttaggaaggactagggaaaagatggggaaaatctatgcgaagcttttcttctctttcccatgttgcttcatcctctctatggtgactccattgcactttacacatctttatcaccttatttcttgtaactcgagtcaatgtatcaagaatcttgacaggatactccgtgtaagtcaaatcaccctgaacactgagctcttccattggtaattgttcctcagggacacggagacacttcttaagttgagacacatggaacacattatgcacatccgatagattagcaggtaactcgagttggtatgccatctccccaactctcctaaagatcatgaatggtccaataaagcgaggggacaatttgcccttaactttgaatctcctcattccccgaagcggtgacaccttgaggtacacataatctccttcct

SEQ ID NO: 64290 - DNA, 396 bp, Zea Mays
gtttcctccggatttgtcctttatggcgcaaggtttggcaaagatgcaccaggaataagatcaatttggtgctcagtccctcgtataggtggcagcccctcgtatctcacttggaaatacatcagaatactcctgcaaaatgttagcaataaaaggaggcaaagaatgttgcatatcttgaattgaaatcaaagcatccttgcataccaaagcgtaggcaacagaagtggaagcaaataattcattaacatcagatttcgtcgcaagcaagcaatgtcctttcaattttatcccatctttgttattaccaacaacgttaatattcttgttgttctcagttttagcttttgtagctttagcaacatcatcacgcacaatagcctcaggggacatggg

SEQ ID NO: 64291 - DNA, 1663 bp, Zea Mays
ctccccagctccaggttctcagcctacagaacacccacatcgacgctccgatttgtgagtcgctgtcagccattcgctcgctgaccaagatcaacctgaactacaacaaagtgtacggccggattccagagtccttcgctgacatgccttccctcagtgttcttcgtcttgcctataatcgcctcgaaggacggttccccatgaggatcttccagaacagaaacttgacggttgttgatgtcagttataattctaaagtatccggtctactgcccaacttctcatctgccagtattatgacggaactgctttgtagcaacactaacttctctggtcccattcctagttcaataagtaatctcaaagccctcaagaaattaggtattgcagcagctgacgacctacaccaggagcacctccccacttcgatcggtgagctcagatcgttgacatcattacaggtttctggggctggtgtggtaggagaaataccatcttgggtcgcaaatttaacttctctggagactctacagttctcgagctgtggcttatctggccaaataccttcattcataggtaacctcaagaacctgagtacattgaaattgtatgcatgcaacttttctggccaggttcctccacatctatttaatctgactcaactacagatcataaatttgcattccaacagtttcagtggtaccatcgagctcagctcgttcttcaaaatgcccaacatagccagattgaatctttcaaacaacaagctttctgtagtagacggagaatacaatgcttcatgggcatccatcgcagattttgatactctatgtctagcatcttgtaacatatccaagctccctgaagccttgaggcacatggattcctttgcagttcttgacctttcaaacaaccacatccatggcactctacctcagtgggcatgggataattggatcaactctctcatcttgatgaacatatcacacaaccaattcagcggtggtattggatatggctctgtcatttctgccaatatgtttgtttttgatattagttataacctatttgaagggcctatacctataccaggaccacagaaccaactgtttgattgctcgaacaaccaattctcatccatgccattcaattttggttctcacttaactggtatttcccttctcatggcttccggaaacaatttgtccggagaaattccacaatcaatctgtgaagcaacaagccttatgctccttgatctctccaataataatctgcttggctccatcccttcttgtttaatggaggatatgagtaacctcaatgtattaaatttgaaaggaaatcaacttcatggaagattaccaaatagcctaaagcaagattgtgcattcgaggcattagacttcagcgataatcagattgaagggcagttacctagatctctagttgcttgcaaagatttagaggtttttgatatcgggaagaatcttattaatgatgcatttccatgttggatgagtatgcttcctaaacttcaagtccttgttctaaagtccaacatgttcactggggatgtggggccatctatttcagaagatcaaaatagttgtgaacttggaaaacttcgaattattgatttggcttcaaacaatttctctgg

SEQ ID NO: 64292 - DNA, 457 bp, Zea Mays
tttcattcctctcccattcctctttgtgccagagatgtgttcaaaacgacacacaagaaaccatttaagatttatatccatatctctattattttgtaaaaaacagaagagtatcattggcatactgaagaagactgatttcgcatgaacacatgtgtacaactgcaccgtctctacccgtccatccgtgttttgtttttgctggactactgttcaggaacagcaagcagcagacgggagaacgaccaacctaagacgtacgctgggactatgggagcacactactggccggccggagatgttctcgtgtggctggtggtagagtggtagtacgtacgggacacggtttgaacagtacgtgctctatacgctgttattatgaccctctactggtccagctctacctgatctgaggcatgcatatatctagaccaatgaagccccgtttcttccctgc

SEQ ID NO: 64293 - DNA, 385 bp, Zea Mays
gctagagcaaatacgaagtagtacatttctcttgtagatgtatatagatgagaggtgaatgctgtttatatagtgaaaatcattgatcattataactgtttttttttggattttgagggagtgcatgtgcaagccgcgcaggcaagcagaggcacgtggaacacgagagacgcagacttgtcggaccctgaccagatgagatcctgggagggttccagaattggtgacagtcgcgccgcaataaggtagtactcccactggccactccagcggtccatccagactccagaattgcaattgcaggggcagaagaggaaggaagaaaagggcagaagcaagctcgcatgatcatcatcgctcacatgtaatgtgcctggataatgag

SEQ ID NO: 64294 - DNA, 385 bp, Zea Mays
cgccgtcgagccctcattgtgtccgttgcctaggtaagcttcgccttgtcacccgcaacccgggacacccctcggttcgctccctccccctctggttcacctggtctgcgctcaccggttctctaccgcagctccgccaccgtcgacttgtgcctcggacgccgttcgagagtccttgagcctcccctcaaggtaactgtcctaaccccgcccctaatttcccatgtcatgcacttagccgcgcgcgattgctcgctagagtgttcccctgtcggccaaggactccccctctgctgtctggccacctcaatcccgttcacgcaaacccgaccccgccataacgcttgttaggtcatccccaacctctccagctatccagatcgac

SEQ ID NO: 64295 - DNA, 856 bp, Zea Mays
gccagctggcagggtaaccccaattgcatattgcacaacggtcgagtcatgccgaagtttaactctaacggactcataaccatgctcattagcttctccctctttttcacatccgctttcatgtagaaccatacattagtccatctagtcggccacttggtacgatagccaataaccggggccttcgtatccttccgatatgcaaaattgtagcagccaaagttcctgtgaaggccatctgctctagccttcgtctggtagtgaagttcgtgcacccgatagaaagcttcgacattcgcatccattctctggcttcggagtgcccatatgtacacactaagtctaacaatgacatttgtggtcagctgatgaaggtatatttcaaaaatttttagaacctcccctatcatgtcatttagcgggaaccgaagccctgctctgaagaaactcttaaagatgataacttcatcatccctcggctccggaataatctcttcctcagcaaatcgaacaagcttgctctcagactctccgaagtagcctagttttttcatcatagtcatgtcatcttcttatacagtagattttaaattcaagatgactaggttttgtcgggtttagaatgctttagtcctcctcgctctcgttaccactatcaccctcaaccacagtttgtccagcttcaacattggaggcaccttcgtcagtaatttcccctggcacaactagacctgatcgcttcattacttctgagatgggcactgtttcggtagctccggcctcgtctccctcatgagacaccttagcggtggatcaaactctagccatttgtgtttatgcttttttctaagacgaa

SEQ ID NO: 64296 - DNA, 311 bp, Zea Mays
tcaggacaagatgaatttactaatataagatagaaccttttcagatgagatggatctattaagctagatatatttttaatgggggataatctaagtcatctatttaagctagatatatttcatttctatgatcggtttctaggttcttgttcacaaaagtcagccttggagttttaccatcccctatgttaatctcttccaaagaatcggccgatgtaaacccctctcctaatttgtcgagatctctaaattcctctattgtgcttacctaaaaagagtttgaggctctctacgtatctgcggactgttcg

SEQ ID NO: 64297 - DNA, 686 bp, Zea Mays
cgactacaagaatgcaaaaggagtcgtggtggactcatctaccccatgcaaaaggagcacgtagaattaaaggacgatccgtggactttatgttaggttgggcatcagtgaggatcaagactcgcccctcgcttgcggaaataaaaatgggtttgccacggaagggctgctagcggaaacaaagaaatgtgtttgctccggtcaagtaccaccgttgtagtatctactttgagactcccttactcattctcatctctatattcaaactgtattttacgaatagtacagtcaataatgtaaaataatatatatgggtgaactttagttaatgtgctggagtcggcggaaccaccgccagacaccacaggcggtggtctgggctgccgccacgcacggctgcacaggcaaaaaaacatcatacgaacaagcaagcaaccagagtatttggcgtaggcatactggcataggtgtcgcagcataatattgcctaggttatctttaattcgtggatccgccactcactttgtcaacaaatagaccatctgttttgcagctgttgttcaatgcaggtatggaacgcccgcacagcggcaacgtttttgccatctgctcactggtcaggcagcacaaggtttcggggcccttgcgggcaggcgagcagctggaaatgctcggcctattcaagc

SEQ ID NO: 64298 - DNA, 564 bp, Zea Mays
cgcgagcatggagaggtggatgatcgtccagagatgaacacagacgaggatgtagaccaaatggaggacatgctagatgacattcaacatgagtatccaacactagggaccaaccaacccccatcgaaggaactatagcagttttacatgttgctagaaaccttgaatgcaaaagtgcatgagagcaccaacatgactgtacttcaggtcataacacgacttatggtgatgaagtcaaagtacaacttctcaaataactgctacaacgatatcatgaagctaattattgatccccttatgccaaaccacaagatgccagagaacttgtatcagtctaaaaagattgtcttgggtctcaggtcttggtatgaactatgagaagatttacgcgcatgaaaataattgcatgttgttttggagggatcacaagaatgacacccattgcatgcattgtggcaagtcaagttatgcagtgctggtgggcgaggaaggcaatgaggttacttcaaaagtctcggtcaaccagctccggtacatgtctattactctgcggcttaaacgatt

SEQ ID NO: 64299 - DNA, 498 bp, Zea Mays
ctagagtttttttatagaaatcttggccttcttcttttctaggctcgaaggtggctcttcgtcattctcagacccatcactctcgtttcatcatcagtagctttgtttgatgatttgctagtagtttttgcagctcttttccactttgctccaacttcagtgccagctgcaggatctatgtagtatggatactcaaaccctatagcgtccataactctattcagccgaagcttcccctagcttatgaagttgcatgacatatcttcgtgctccctagttagatagttcccacaaatttcatactttattttcttcaattaatctcagccacccggcagaaggagttttatacgaagattgctccttgaactcaaaagctagtgtgacgagctctccgtctttttatttcacttcctttggcaatttccatctaatacgagtaagaaagatgttgtaggcaagtgcctcttgaattaggtctcgagatccaattttctc

SEQ ID NO: 64300 - DNA, 583 bp, Zea Mays
gccatgcttttccacaaaactagtggatataaaagaatgggatgctcctgaatcaaaaagtacagtagcgggattaaattcaacaaggaactcaccgagcactactcctggagcttgctgagcctcttgagcatcgatgtgattcactcgtgcccttccttgatattgggtcttgttctgctggttgatggaggagggcgccttgggggcgggtgctaaggtattcttggggccattcaccgagttggagtaagcaggtcctgatgccttcaactgggggcagttgttcttgaagtgactggggtctccgtagtgccaacacgcattcactggtggttggttgcttgcaaccgagggggcatgaaaggagctctgactctgctgactgaaccgtgacggagtgggtccagctggtctaatgaagcttggtcccttgggtggaaacccaaaggaacgagttttctggtgccggtcttgctgctgagctcggaggacttagaatttcctcttgagatggcctttttcttcttcccttgccctttccacttgcatggctttgtttgagaggtgcgagaagctgagg

SEQ ID NO: 64301 - DNA, 280 bp, Zea Mays
tggaactgtggatatgctgggggcagacaggcagagagctctgcctccccaggatacttcgcccctcgttccaccgcgagcccttccgcgttccgcctctgttccgccgctcgggacccgggagacgagaagtagtagccccatccccaactggtcctaacccacggtacccaatccttgactcggttctctccatgagcttactgccccatctccatttcttcaatcattactcgcctttccgttcaagggcgttgcttgcctggataaccacggcatc

SEQ ID NO: 64302 - DNA, 678 bp, Zea Mays
ataatagcaatttctacaagcttttatgacactctttaagactactaacgaaggttgtttggatgatgggacagaatattcggctaacaaaatctaacttgttggatatgttgggacataatgttcggttaaaaatatgactttacatagaaaccctattaggaaaatatttaaaaatggacaaacaataattttcaagaaatcagatcacgttgtccaattggcgatggagtcagtgataggttcataagccctcactaggatacttttatctgattcctcttttagtcatctaacatttctgacctaaagcatcaaatatgtagatgtttttggacggtgccacatccatccctttagcactttacatgacactaacacaagaaaataacaaaccatcacccactttgttcgagggaggccatacccacggatgttgccaatatgtcttccaaagaccttgatagaagaattttggtaaaggtctgtctaatgctacccatgtgcccttatgggcccacaccgcaaaaggacctagcttagctctatctaaggatgggtcccctcatgttgaggacccaatatcgcccctaaatctttgaggctctcctagcctactacgcccctagggcccttgggaaatcttagactcctaggattctttcaatctcccaccct

SEQ ID NO: 64303 - DNA, 620 bp, Zea Mays
ggaaaatgaatgggttgaagaaaataatgaagctaacggtggtaacacatatgacatgttgtggatgaggcattaggaacaactcaagctctccaaggcaggatttcgtcaagaatagttgttgcaagtgctggttcgtcttctcagcctcaacggacatatgttaggacaaggaagcgttcaagaaatgcaacaactcaaggtattgaataagatgacagtgatgctcaagaagatggtcctgccacagcagatgcaaaacaacaaccgccaccaaaagcaactcaagatatggagcaagatggatctgaatctattggaggggaagctgatgttgctttttgatcggatgttgatatgctctaggtagtagactagcaggtactacattattgcttgtactttcaatatttcagtttagacttaaatagtgcctatcatattggctattgcagtattgtttgtatatacatatattatgttatatacatatacatatacatatgtccagaaattatataaggcgagtaggagacgaccagaggttgactacacgtcctaattgtttccctaatcacgattaggtgtctggttggttctttggaacaaccagctggttg

SEQ ID NO: 64304 - DNA, 481 bp, Zea Mays
gttgagacaagtagccaacgactttgcttatagggtcaagaaatattctaggtatgacgtcaatggataccgttttcgcacaacaaactacgacaaaagtcggtccaatcggaaaacaacatgttctggagtctttacgcccggccttgacaatgtcgattattttggacgaatcgaagaaatatatgagctcaatttttatggttccaaacctcttactccagtgatattcaaatgtcattggtttgaccctcaagtgacgagacggacacattctaatcttgggatagtcgaaattcgacaagattccaccttaccaggagacgatgtctatatcgtggcccaacaggccacacaagtgtattatctcccatatgcgtgccaaacgaaagaatatcttaagggttgggatgttgtgtattaggtatcgccgcacgggaggttacctgttcctaacgatgaagattacaacttagacccg

SEQ ID NO: 64305 - DNA, 379 bp, Zea Mays
aaacccacttttgcaaaggtgtttctccatttcttctatcttctgaggccacttgttctgcagcgattgcaaggacaattcactagacgacttgttctatctttgaaagcgtgatcaagaaaagcttttgttacacccatccattcattcgaatgtgccccatcctttctccacccgtcatacatcaccctccgatcaccgtccatttcaaaggctaaacaaaagacaaagaacatcaacgatcgtccgtggcttaggtgaactccctattaggtaaaggccctaaacccacctaagagtgtaggtcgatgcttgtgatttgtgacgtgtaccctacgattaccacgaaatttcggcagcataaccccgctgctctcca

SEQ ID NO: 64306 - DNA, 760 bp, Zea Mays
gttcaatacatcaaacctatagagatatgttagtagtacaagttttattaagtgactaagcattggtgctgtacgaaaattggaaataaaagggcttaaagtcgggctgacagtcagtcattgaactgaatattggttaacagtgaagttaggtgaactttgagattggattcgaccatgatcagtgattgtttgactatggttgctataacaagattgtagctggattatagggcaacaactgcgtaaggattcgcgctgatcgtgatgattcgtgctggactcgggcaggatagtgccgggagggtgaaaagatcagaaggggagcggatttggtcgcggggtgaagcttatcaaccgtgcctgtagccgtgtgacgtggtcgaaccgccggtgtcattgtggaaactccagcgacctcaattatgccacaccgtggctctttactgcgcggtagtaaccgtggcacgcctaggctcaccatctctgaaccgctgcaccggtgaatgccacgactgagccaccagtgaccttcttcctctccggctaccagcacgccatgccaaaattaggagccactgcccttggaaactataaattggtgccccagcctgctccgctaagtaattgtgcacccagtgaaccagccctcacctccaatcgtccctcacaaccccccaatttgggatttcccccaaatcagtcaagaaccccactgtatgtgagctcgccgtggctagctctccacaggtctggtcac

SEQ ID NO: 64307 - DNA, 296 bp, Zea Mays
tgataattgatcatatcacacatttgattcgcactcaggtttacccttaaatccgggtgtgacatctcgactgaaggtggtcggagtttttgaccatctgtatgctctagtgggctattcgtggccaccaggacttatcggtcagacaacttttgttgcctcctgttttcttgtgatccatggccttcgaaaatgaagttgacctccctatcgatgtgagggaaagccccaacgtcgactccttgttgttgttgatgtggaccttgtcggtgtttgcagcccgaccacacacccag

SEQ ID NO: 64308 - DNA, 641 bp, Zea Mays
gttggcttcttattattgcacgatcaccatccgagaaatctgcatcataaatttcagcaagtcgagcaagcttattgatatcaaatttggagaatgaattttttggatcaagacatgaggagcaaactaataactctgtgtttgcttcaccaaaccgatgattcatttccacacaaattttatcaaccacaacatagaaaatctcagcattacaaccatttgctcttttactgatatatcacgcgactcatctataagcactgagaactgtctttcaccgattccccccatgattacctctattatttcttctacacaacatcttgcaagatccttttggatttctggagaaagcatttgacaattcaatccaccacggtcaaaagcgttttctcacagttccatccttatctttccaccaatctatcatctctctaaaattacccttgtttaaggacgtagaagattcatcatgtccacggaaagccaatccttgtgccaatagatacctcgaacactctagggatgacgtcaaacgtattttatataactcttctgcttcttgggatgcaatacaaaacttacgtgctacactctgcctttgattattgaaatcatcacaatgctttaaacagttgttg

SEQ ID NO: 64309 - DNA, 965 bp, Zea Mays
ctgaagttgaaaactagttagacaagaaaattaaaaggttgcggtctgatagaggaggtgaatacctttccaacctttttgatgagtactgcaaagagtgtggaatcattcatgaaaccaccgctccatattcacctcagtcaaacggggtagctgaaaggaagaaccgaacggtgtgtgacttagctaatgctttgttgcaaagttcgaggatgcctgacatctggtggggcgaggtagtactcacggtgtgctatgtcctgaacagggtgccgcctcgcaaccgtgaggccacaccctatgaaggatttaaaggaaggaagccagatctttcgcatcttcgaacttggggctgccttgcaaaggtgaatgtcccgttgccgaagaagtgaaagctaggccctaagaccgtagactgtgtcttcctgggttatgcacataacagtgcaacttatagatttctagtggtccattccgagacaagcgaagtcgctgtaaatgtaataatggaatctcgggattgacattctttgagagcattttccctatgcgggataaggaagtggtagccccatatggtccatctcggacgtattctctgccctcgagtgtccttgaccagactccagatttggagttaaggaggagtaagagacaaaggactgaaaagtctctgggagatgattatattatttatctagtggatgaagaaccacgctccctcacagaggcatatacatctccggatgcagagtactggagggaggttgtccgtagcgagatggattcaatcatctcgaacggaacttgggagataactgatctcccagctggttgcaagcctgtgggctgcaaatggatctttaggaggaagaggagacctgatggtactattgaaaagtacaaggcccatcttgtggctaagggttttactcaaaagaaagaggaggattattttgatactt

SEQ ID NO: 64310 - DNA, 338 bp, Zea Mays
aatgcaaccaacacatcatccttaattaatggccaacaagctttgtaaaatctgcccgtgaaaccatcgggcctgggtgctttatcagatggcagttgcttaatagtttcccatacatctttttcactgaatgggggatccaattcccccatgttgtgtgaaggcaaccccacaaaatccaagttaagagctacggatctgtccatcgttttacccaacaaattactatagaacttgtccatcaggttgggggctggaacatgttttttgttgttgtcattgatcattgttatatgaataatgaagtcacttcttcatttaccatgtcatggtggaac

SEQ ID NO: 64311 - DNA, 426 bp, Zea Mays
gttacccgaggcagtctgggtgttaaacacgactgagtgcagggcgaccgggttcacccctttccgccttctatacggatcggaggctatgaccccaccagaaataaaacatgggtccccgcgaacagttacgtcagctgtccccgatgtggacgagcccacttcgaaggatctcatcgatggagaccgagtcttcacgctacaggctctaaataaataccaggcccagacaaaagcatggcgcgaccacgcggtcatcccgcgggaattcagcgaaggggacctcgtactcgttcgaacagctcggacagagtccaggggcaagctggagcccaaatgggagggccctttcattgtcaagacgaagacctcccccagcgcatacaggctcgcaacgccaaacggcgaagacctggagcactcctg

SEQ ID NO: 64312 - DNA, 1048 bp, Zea Mays
tttttgtaaaaattggggtaaacttctcgtaaataggcatcagtctcccatgttgcgccacactcatcgtggtgactccacaacaccttatatgtcttgatatactaaatctgatccaatctttagatctttggcttctactctttcttcgggtaatctaagtcatttcttcagctgagagacgtggaatactagaaaataatgttcatgtcttctggccactaaattttgtaagccacttccgcttttctctcaataatctggtaaggacctacatatcttggtgcaaccttcctattgatcccaaatcgttgtacacctttcattggtgatacctttaaatacactaagtctccgacttgaaacgtaagcggtcttcgtctttgatcagcatagcttttttggtgatactgggaggtttcgatattctagcgaatgactcaaactttttcttcagctttagctactaagtcactcccatagtatttccgttctccggcttgtacccaatttaacggtgtccagcatctccttccatacaaaacttcgaatggagccatcttgatgcttctttggtagttgttattgtaggaaaactcaactaatggtagccatgattcccacgatcctttcaacgattgtacacaagctctcaacatatctttgaggatttaatttatccttttggtctgtcccgaagtttgagggtggtacgccgaactatgcaccagcttagttcccaaacccttatgcaattgttcccagaaatgagcggtgaattgtgtccctcaatctaacacaatagtgttggtatcccatgtaaatgaacaatttctgaaatatatatatcagcatactatggtggtcggtaggtagtttcgatgggtagaaaatgagctgatttggggagtcgatccataatcacccaaattgaatcattgcccttttgtgtaataggaagtcctatattgaaatccatacttatctcttcccatttccacttatgcatagacaatgattgcaataagctagctggtttcatgtgaat

SEQ ID NO: 64313 - DNA, 334 bp, Zea Mays
tcttgagagaatactttggctcctgaacatgttagaatgtcacttttgctaacacgatctaaacggtaaataaagggtgacccattgtttatagcctatgataacattaatcctaaccagttaatcggggtgctagaatgtcacttggtcggatcacggatgcactcggctccaagcctccaaccctacctctacctgtgtgtctgtgttattagatcagagcaatctctgaaacccgacttggtcagctcggtctctgtttccccgtgatattccgatcagtcagtccatcgctacgagtagcttggggaccgacctaatgcatggtttcttt

SEQ ID NO: 64314 - DNA, 315 bp, Zea Mays
tttttcctttgtacaaaaaaaatgatgacacacacgcggatataaatatgaatgactaaaaagagatcatggcacctccattctcctatgggagctttatttggaaatcatggtcgcctaagaagtattaaaatttcctacagcagcccataattggtgttggattgctgatagtcttgcccgcagagggctgcctcatccggatcagtgccctttatgtgatcaagaggagaaaattcaacaaaatttgacgaactatgtcttctccagacaagtttggtatttactcttatgcctatctggtccacactccac

SEQ ID NO: 64315 - DNA, 1218 bp, Zea Mays
aaatttgaacatgatttagtaggaatttggctatagttgttatggcaacattatagctggaacattggtctacaactttggtacagagggatgaggaagttgtcaagagaaatatagaaagaaattgccctgaagttgctctgtcagggtaactgaaacgagctcgccatggtacagtaccagaactggatcagatcgccagcgcgacagaccctcaccaccggcaacctctctgcgccaaaattcgtgccgccgctgtcctgattcgtgtgcggtatggagtggataacgtcggggagggataacccgtacgtggcgccatctcccaagcccagccggagtcttcaccggcggccaccgtgaccagtaaattttgtcgcggtgtcgcccatgcctcaatctccctcactgtatctctttccgacgtggtaggcatgcgcttgcgatgctatccgtggccggaggtcgtttgttgggtcgccgtgactataaatcgcacggtggtccacggcgaggtgtttacctcttcaccagtgaaccgatcgcaaagccaaattcgcgctgcctctaccccctcctcccaaattgattgtgcaggataaaactagagtcccttgccaccgtatagtcccaagctccatcctcaatttcacccgagcacaccacgacgccgttttcccccaaattggtccgccgcactgcgaagaacagcccgcccgtggctagcccactatggtgagttcctatccaattcaagtgttgtttccatgcctctgcatgcttgcgaagctcacggtggcatccgtttgctctagtcgaccatggtgtggcgagaacgtgtgctcccaagctcggtgtccgccgtgatcatgggcagacggctcccagtgggtttcatatcaaattaatggttgttcctaggtctccttaggtcagggaagtctccccgctagttaacccgtgcagccatcgccggccagggctagtctgtgtgtcgtcaggggcgaacggcgagcacgccgtggcctggggtactcgtggggaagaaatagaaacctgagggcatttctgcaatgtgtcagcgacttagtacaatagtaaatgaacctatttcggtttagctgataagacgagggcccctatgcaaagttgccagagcacgcgggtgcgcgcgggcgcgcgaccctgtttcctgtgtagttaggctgtgctgggcta

SEQ ID NO: 64316 - DNA, 730 bp, Zea Mays
tctgcaagctgatccttcatcatcgcagtcaaaccaagttcaagcttcagataccccatgttatccatcatttcacggcaaacattgacctccttactgtctagtagacaatagaggaagtcatcatcgttatctcctccgtataccaaggacccctaggggtattttagctccttagcataatgttgtgtttcggtaacttgctctaccgatagctgttttcctgaagcatgtcgaacaatgtaattcaaatcactctggggaggtgcttcaggagcaggtgttgtgggtctttctggaaggctctctttcacaagtttttctggcacagcttctgaaggtcccgcttcagcgtgaacagaagagatgctttcagtgaccacttctctggcatcttcaattttcccgtcagaagcttcgacagaagtaggaggtggcattgtcacagactctaaaatagcatccaaacactagccatcctcctcttcctcggagttgcagttgcagtagctgatagcttcggtaacgctgtcaccagcacctttggctgctctgctgccttcgccgtttccaggtctttagccgggtctgcaatagcttcaattggcatcgcaggagccgtctctttggctagggggcaatatctgtcctttcaattaactttggcacatcgaccatcctgatgggcttcggtctacgtgtcaagaccttaactttcttcgccttcggt

SEQ ID NO: 64317 - DNA, 479 bp, Zea Mays
gatcaacctacgcccttgtcgcacacgcgccaatgtcaccccacatgaactgttgtatggctcatctccatcctacgatcacttgcgcgtctttgggtgtctgtgctaccccaatatcactgcgcagacgccacacaaacttgcaccatggtctattgcgtgtgtgtttcttggctatccggtggatcagaagggttatcagtgctatgatcgttcatcacgccgtgtcatcacatctcgacatgtctattttgatgaaactgtgttcccttttgcacaggattcttcaccacccatctatactccatcaccttcttccgcagtgattcagaatgtgcttctgatccttctggcacgacggtatcctcgtgtccactcccaccagccacctccatcctctcccatgaatcccgctccacggttgttgggcaccaacaccatatccgtggatcctgcacccttctcgccaccacaagttg

SEQ ID NO: 64318 - DNA, 538 bp, Zea Mays
gaaatacatgtgaacgttaggttgcgcatttttatgtcgctctaaatatttatgatgtgttgagcttttggactcacgtcgagcgattaaattgtatagtgggtactcagacacgtcgatcagactacgttattaatcggttgagttaaggcattggctgagcattggctgcgccctggtaacatgacgcagtatttatgtcgtacgaacttggctgcgtcatgtgattgctatgtcgcactctcgttttgtcggaccgctccggttgagtcggaccgccatcaccgagtcacgtatttttcgcatgccctgtaggcactgtccgtctgtcgtgatcatcgagccacaattgcgtctgttgcgcatgttgcatggacttatcgtgtaccccgattaccgagctataattgtgtctgttgctcttattatgaaggcttgttgtgttgtcgtagccctgatggccgcacatgtgttgacaccagacgctagagcttgtactcgtgtggattgtggtgggttgttcaagcccctaaagtca

SEQ ID NO: 64319 - DNA, 529 bp, Zea Mays
gcctgaagaaggctaaaagtacctttgggggtacttaaggatcctaatgtcgcctagagggggtgaataggccaatataaaacttttaactctattcaactcaacttacttgattttatcggtagcagcagattaatgtttttgtccaactaagtacatgtacttcacaaacacttaaaccaaatatacaataagaagggggagtaatgtaaatatacaaggggacaagacacacagtttatcccatggttcagcgaagcctcaaatgcttccctactacatgttggaggtattatctagcttggagtccttttcaactcgctcctccttactcaagtttaccacatcttgtgataaattgagacttccactatcatttggttgtttacagcaaactcgaggctttccacaccttgataactgtcagtgtttgtgacccgactgcgcaccatggggttccccacgtgatgcttttagataagacaacgtcattgattgcaactcgatggtacgtgcagatgcacgttgg

SEQ ID NO: 64320 - DNA, 729 bp, Zea Mays
tggatcggcctcagggctgtagggctctggaggaggagacatttcagctacaccaaaatataagcttttgtgaggcacgaagtcaacaaacttatgaagctaagaatatgacaagcgtacctatacgtctttcacgctcagcggcctcttcagcttttcttgcttcttctgaggcaagatgagcctcttcttcgtttggcctaatggctttgtctgctatttctcggccgccgttcacccacacctcagaatagaatttcccactaagggtagtagcttcggctgaaggctcttcgatgtcaatcgttgatactgagaagtctggctaaattacaacattggcatgttcacagccagctttttctagtagtgaaacagcccactaaacccctacacatgcacaaaaatctcctctaccagttaggacttcgtcaaatgctttggcttcgccctcaatccacttgattacacctttgggatcaccatgaatgaaattttgttcagccgagaatacaccaacactaacaaaagcatttttcaacttgttagagcattgcatagcaacattataacactcctccattgcctgacgaagctcctcaatatccttctgaaccctcaaccattcggtatcggatatctcacgttttgattgctcgacgttgaagttttcagtaacttcatcaagcttcttctctagtcctgctacttcagatctgtgtaattcca

SEQ ID NO: 64321 - DNA, 607 bp, Zea Mays
acactctacatggatttaattttgacttcatttagacagcactaaactttcaaaagtaggaataaataaaagaagaaacattcacgagggtgggggacatggtgtcagcacatgctgtgtttgataggatgccgatgagggatgccatctcttggaatctcatgatctcagggtatgcagtaagtggcaatgttgagtctgcatggtcactttgatattatggatcggaaggatgtcatttcctagactgctatggtctctgctaatgcaaaattggggatctagatttagctagagtgttgtttgatcagatgcctgataataactttgttttgtggaatgcaatgattagagggtacaaccacatctcgcggtataatgaggcattatgcacatttcagcagatgatgcttgagggaagattcatgcctgatgaagcaacattaataagtgttgtctcagcctgcactcagctaggcagtgttgaatactgcaactggatcagttcttacattagtaaaagcaacactcatataactgttgcattaggaaatgcattcgtagtttgcaaaatgtggagatgtaggaagaccgcggttatttttta

SEQ ID NO: 64322 - DNA, 926 bp, Zea Mays
tgaagacggatcctaggcggacaccagtcctatttcattcttgccaagcagttatcatcatttgcttcatcaaaagctagttatatggtgattttcccagataaaatgaattcttggccttgtctgttctattccaaagcttctctttttgccgaacaacgaagagatcgaaataatgctttatagaacaaattggtatataatatgaggagaaatatttgccctgctggcagcataacaaattattaactattgttataaattctctctcaaaattataatacctaaaaatgttgcacaaattgatacccaatttcagaacagtatgagtaattgggtaaaccatgggcagtgataaaaacgagctcgactatacatctatgcatataaaaatatttgcttggcagcattgtcctgatgccgtgcactttactaccattatctacacacatttttcctatgtgcttaaaagcacaatgcaaccaatgaatgtctttgtgagcgttagaccctgatggtcattttacttgttgatctgaagtcaactaatggctccaaacgacgaatggtatgcatgagcccctgaaggacccttatggataaaatagtgttgcacatatcattctaaatcttaatgattgactatgcatttggtagtaataacaataagtttgcagaattgtaaccacaaagcaacttgttgttgcgagtcttgctagaagttgagactaacccttcacattgacggaaaatgatgcagtattcatgccactgcattaatctaagtgcaaacctcactgcataaaacccctatctgtaatgtgcgtaagatttcccaaataaatcaccacaagcaatagcatacactggccacaactggatgattgcggttggggattttatctgtatgcttttagaacatctcg

SEQ ID NO: 64323 - DNA, 570 bp, Zea Mays
aagggacccaccgtaaactctctaagaattataccaactctttgagaagtatgcccgcttcgaagagctgcattactgaaaggtagagttgcagcgcaagctaaaggtagactcgcagtccagtaaaacatggaaccaaggtccttagtaggagtaccaccgtcaagaacatggctaatcacagccctaggtccacaacatagccaacgagcaacaacaggtagatgtcccccctcgacgttaacctcagcaacaagggcacgacggtagcacgccaagaggtagaggtccccaacaatacatgaagttttattgtgtcttccatggcgaggactcagatcatccaactagggattgccctggagaccaaagaaactaaagagcacatggctagggccacccccgcaaacaatcaatgagccatcactcatacctactaccccaccaatgtcaaccccagcagcaaaattacaatcagagagccccacaacacccacaactgcaataccaacaaatattaccacccccaccccttaagcaaatcaacaagcctgacaactcccccacccc

SEQ ID NO: 64324 - DNA, 372 bp, Zea Mays
gatctttattcatatcgagagatcttacaaccataggagttttgactggatatgctttatccatattgaatttctctaatactttctagatatatgccgattgatatataaaaattcttgaaggtaaatattcaagttgaatacctaagcagaatttggtttgactcaaatccttcatctcaaattccgtctttaaatgatgacgtgcgtcatttatatctttttcatttccaataatatcgaggtcatcaatatactgaaatgatacaaaatcgagtggaggacttcttaatgaacacacgtgaacaatcatcattattagtgtatcctttaagagaaaggaattcacttaagcgattgtaccacattcgc

SEQ ID NO: 64325 - DNA, 493 bp, Zea Mays
gtggtgttgataatgctctcatcaagagggagattgtaaacgcaaggtttacatgttcccttgtggttcaggtttgttatgagtgattgtcattggagtagcgtcttggattgagtcatgtggactaatcgaggcataagtttgtgcagcatgtctcctggcttgtaatgtgcatgtgcgaaatctggaggcagtggtcgatgacaaaggtaaaggtcatgcaagttagtgctaacggcccaggagtagtgaaggacgagcactatgacttgaccgagggactagagaagtcggctgactagctgcgatggctgacacttagggacattattaggtgtaataacatggtggagcagattttttgttgccgacacggttgatgaccaacgggacacgtgcccacgatgggggagagacctatgaaatacgctatatatggaggtttggtggttgagtcccaaaataacccaacgatggttttattggtttggcc

SEQ ID NO: 64326 - DNA, 532 bp, Zea Mays
ctcggtttggcaggatactaccgtaagtttgtcaagaacttcggtgtcatcgccaaacccctcaccaacctcttgaagaaacatactatctttgtctggactgacgaacacactttggcgttttctctgctgaaaacggccctttcttcagcaccagtgttagcactcccaaattttactcgcccattcgccattgagacagatgcatcggggtcaggtgttggagctgtcctgttacaagatggacaccctctggcttacgtcagcaaaccattgggcatcaagaacatgggcttgtccgcatatgagaaagagtaccttgcaatcttactggcagtcgaccactggcgctcttatctgcaacatggcgtatttcagatttttacagaccaaaaaagtctgatacatctcaatgaacagcatctgaagacaccctggcaacaaaaagtatttaccaagctgttgggacttcaataccaaattgtttacaagcaaggttcgactaaccgggcagctgacgctctgtctcgtc

SEQ ID NO: 64327 - DNA, 614 bp, Zea Mays
cggtgcttgaaccaaaggactccttggtcatctgccctgaggtccgggagttgttccttgtgggatttctccacaagttttgctgtctctgagtctagacgttgagctttgcatatgaggtcttccagcactggtttgacttcgagactatcgttgtttcccaaacatgcatttagttgcgctgattctttcttccaatcttctaaaaagttggttccttttattccgaatggttttcgactgagggcgtcggctaccacgttgtccttcccggggtgatagtgaatttctaggtcgtaatccttgatcagctctaaccatcttcgctgatggaggttgagatctggttgagtgattatatacttcagactcttgtgatcggtgaaaatgtggcatttgtttccgattaggtaatgcctccatatcttcaaggcatgcactatggctgccaattccaaatcatgggtggggtaattctattcgtgcggcttgagtaggcgtgatgtgtaagcaatgactttctcgttttgcattagcacacaccctaagccttgcctcgaggcatcacagaagacgacaaaatcttgatgaatatctggcagtgatagaacgag

SEQ ID NO: 64328 - DNA, 897 bp, Zea Mays
caccggttctctctgtcgcgtggcccaaccccgtcagcatcatccctcgagttgttgcgagttacgcgcagatctcgcctccaccccccttgtcggacttcaacctgtctggggacctacctgggtataaaacccggattgtgttcgtgctagcggtcgggcgtgggaatcctctgagcatcgttaattgctcaatggaatcctacctccgccgccgtgccactaatcgcagtgggttgtgcaactcggtgtcctaatacgcggtaagatgtctcccgttgtgtttgcttttaacccttcttcgagtagcgctgttggaattgggggcctgggcgcttgtgcgtggggttgaccaactctggccatggtgcgccgtcgcgtatggctgtcgtcggcagggaggggacgatcgccctgggccgttggatctgggggggccaacgggcagattaaaaccgagacagcgattcggttcggatacacctgagccgttgataatgcgatcaaggggagagattgtatctgagcccttggtatggatcgggtgatccagattggatcgcatcttcataaaatccgcaccatagattcggggatctgcggtggagaatgcataccggttcgggaagacaaaaatctgatctggtccgttagattgcgatcggacgggtgcttggtgattcgcgctatttaaaaactgtggccgttggatctaaatccgatggtctgcatggcgtacctgttcagggctggctcgatttaatcctggctgtccctatcgatcggatggccgagatcagctcgtatccctttgccatggctcatttgttaaagagtcctcgtactcttctccaattagcccgccgtcctacgcggtggtggctgagtcacaaacac

SEQ ID NO: 64329 - DNA, 574 bp, Zea Mays
agtattatggttttaaatgcacaaacaaagatccaatatgatgcaaaggtttattttaggtgttattaattatttgttctctttatatatggttattaccaggttacagtgagtatgggggcaaaaacacataatgagatcttctctctccaaattgtttacaaattggatattacaaatcctacccccctataaagaatctcgtcctcgagatttaagaagatctagggaaaagatgggggaagtctacgcgaagctcttcttctctctctcacgtagcttcgtcttcgccatggtgactccattgcactttacacatctttatcaccttatttcttgtaactcgagtcagtgtatcaagaatcttgatagggtactcagcataagtcagatcatcttgaacactaaggtcctctattggtagctgctcctcaggtaccctgaggcacttctttagatgagacacatgaaatacatcgtgtacatctgacagatgatcgggtaactccagttgatatgcaacttctcccactcgctttaagatcaagaaaggtccaatgaagcgaggggacaa

SEQ ID NO: 64330 - DNA, 671 bp, Zea Mays
taaacttaaaaactattttagacccaaaaatatgcgaacttcataaaaaatatatgtttatttaccaatatttcatccttcgtcttcatccagtctctttgtggttggaattatggagcaccaaagtaaggatatcggttcaaagcgacatcattgtcactacttggggtgccatcgtggctacatgagggcaaaatggaggacccaaaccatatggagcagaagcaccatctgggagcaccaaacaagaggagtggaggaggagcaccatataaaggagtagcatcatattaatatccatatgggtatggagggtatggataagtgattattgattaaggaggagcatcgatagtaggatctttagtgggagaagtagaagtgttggttgtaaaatcatcattacgagaatggggcatttgtggaaggttagtatggatacaaacgaggatatagatatgaaaatagaggttgtggattgagggaacaggaatggacagaaacatcctcctaaaaatgatgtaagaaagaaaagtcatcgaagaaaacctcccgcacatcaacaagggtgtcaggaagtgtggagcttggtcgttgagcaagtcgatgaaggtttgaaagttcagacttcacctacgatccatattgaaatggaacgtggtggagtacaa

SEQ ID NO: 64331 - DNA, 376 bp, Zea Mays
tttacctttttcccttgggggtagacagtaatgtagctttcttcatctttattcgactctatgtcgtctggaggcgtcttgggtggcctgcccatcccaagacaaatcataggatctctcctcctcaacaggccctcctaggagcgagatctaggtgctgttggcgaatgccgccacctatgcgcacgcgcggaccatcctatcaccaaacgcagaccgtctggcataatcgcaggctctgcgccaggtcacggaccgtcaggccttaggccatagaacgtccactctgccactaagagcaccgccgtcggtgcacctcatagtgattggcacccagatcggtgccaacatactttttggtgactctgctaaggac

SEQ ID NO: 64332 - DNA, 462 bp, Zea Mays
aatgataacagttttgtggcaatcaaaaaaggtttttgtaaagttccttttttcccccaaactagcttaactcatcattagcccagcactctaattccattctatcaaagtagcaagtagctagatcttgcactggctgatgagctgtgttctggcattggctggaagaggctgtgagttggagttcacttttggttggttttgctgctccacaactcataatatctcccagccaataggttacaccatggactaggctggaatggggcctctgctgtgtcgtcgcctactattccttagctgtttctctttgtgacagctgtgccactgagtatatattatatgtatatttgcttgtggccttgaattaaaagcaggggctgccggatataaatggaccgggagatgtttaggagtagtatataaaatatatgccgggtaaaggaccagggaccaccgcca

SEQ ID NO: 64333 - DNA, 321 bp, Zea Mays
gaggggtgcagtggaggagccatggccagccgagcgccatgggcaagctggagaggccgctggccatccatgggagcaggggagccgagctggggaaatgacgaccatgggaggagcttgctgctgccgtgagggagagggaggacggcgtggggaggaagggagcagggcaggtgggctgccatttaaagaggcgtcgccagcagccattgggcgagatgggcggcctgcagagctctggtcagtcagtctgctggcaggtgatggcaggacgacttttgatggatgtttttggcattttccttttggaatcggaccttg

SEQ ID NO: 64334 - DNA, 273 bp, Zea Mays
atggatccggaacttaggtaggtggcgacgtgtgaggggatagcggaagggagaacgatcaaagctggattggataaacaattcgtgtctggaaacttcacgtccgtgatagaggaaatattgctcgcgtccgtggtgcgtagacgtgtcggcagccatgaggatgtcgtacccaggaacacggagggagccccaaacctcaacgccttttaagactttagattagatgtatgtcaatcgatgttcatgccatagttgattttagccctattt

SEQ ID NO: 64335 - DNA, 526 bp, Zea Mays
caagagctgagggcgaaggtcactagtgtcgcccacctttctctctccctgctcgtttttgttcgtggctaagggtgcttgtgtttggttgtggcacacatggtacttgagatggcgaggcgatcctggtgcctcggttttatagctagcctttcgactgtaacaatctccagctggcagattcaagtttattacgtccacgatgctcgctgcaatttggttctatgctcggtgcgatgaagagaatgaaggctgaggaactaggccaacacgtcagctgcagatgtatgcacgtgcgacaaaggtgctcggccaacatggcacgcctgtcagggagatagctaccaagcgcacgcggtgtaagtgggcttaggcagtagcccccgccagtcagcgacgccagaaaaggaaaaggggagggaataggagtgggccggctgtgtggaagggggatcgggacggctgcggattaagacccaagacacggtagcttctcccttttccttttttctattttgtttctttt

SEQ ID NO: 64336 - DNA, 2963 bp, Zea Mays
gatttgaggattaaatttcctgagaattcgttcggcgagccttatgccttgccatgcgcccatgttgaactatctacggattattgagtattgactgctaaagtgttagcaatagcagtggacaagcagcgaacaatccgagaaacagagtttgggggaggagcagatagcttggagaggaagaagaacaatagtgacagcgtagattcctctctggtctcctctgttaccctctctcactctaatactcctattacaaggtcggcccatcaggcgacccagtcgcggcccacgaacttgggattgggcttgtgcggacgccggctggttcttggctctgctggagtcttctctgtggagctgttgctcgcgctgctaacattcccccctccatgcgaggatgcttgtccccaagcagcagcagttggaaaacgttggcgtaaggcaacttcatcttcccaggtatccaaagccggttcggcgccagaccagcgcaccagcgcttgacgaacatcgtgtccgccgcgcgaaatggaccgccgagccatcacctgaataggaaactggacatccacattatcaggaggtaaggacgggctcaccaaaatagaaggtttgacgctaggcttaagttgcgacacatgaaacactggatgaatggaggaagaggttggcagctccaacttgtaggccacagctccaatgcgctgaagaattttgaaaggtccaaaatacttgtaggataatttgtgattagcgcgcaccgctacagagctttggatgtaaggttgcagtttaaggtacaccatatcacccacagcgaacacacggtcagaccgatttctgtcagcttggtgtttcatgcgttgttgggcacgcagcaagtgttgcttgatagtttgagtcatcaattggcgattggccagccaagactgaagatcaccaactggaatagcatcaactgcagacagtcccaggctgcgaggtggtcgcccatacaagacctcaaaaggagaagtacccagcgaggagtggaaagaagaattgtaccagaattccgcaagcggcaaccactttttccattgtcggggagtagaactgacaaagcatcggagaaaggtttccaagcactgatttactcgttcggtctgcccatccgtttgcggatgataagaagtactcatccgtaatgtcgtgcccgacaatctgaataattcctgccacaaggcactcgtgaaaattctgtcgcgatctgaaataatagcttctggcaggccatgcaagcgatagatcgaatccatgaataactgggcaattttcagggctgtgaatggatgagctaaggcgagaaaatgagcaaacttggaaaatttatccaccaccaccaaaatacagttgtattttccagatttgggcagaccttcaataaaatccagagacagcacttgccaggcatgagcagggacggcgaggggttgtagaaggcctgggtatcttgagcgatctggcttggcacgggcacagatatcacacgcagccacaaactgacggatagcagttttcatagttggccaagcgaacaactgcttaattcggcgatatgtcacaggaaacccagaatgtccaccgatggcactgttgtgtaatgacgccattactttgttatgaagatcaatattgtgtcccaaccatatgcggcccttatatttgattaacccatccgtcaactgataatgtccagaaggagtattgacagacagctcagtaagcaattgtttatcttgaggagtctgcatataactctctgcaatgtctgataaccattgaggagtgctgacagaaatagcatgaaggccgtgatctggatgaggacggcgcgacagtgcatcagctgcgcgattagctgaaccttgcttatagacaacttgatattgcaagcccaatagcttggtgaacacgcgctgctgccaaggtgtcttcaagtgttgctcattaagatgaaccaaactcttatggtccgtgaaaattaaaaaggttccatgctgcaaataggatctccaatgatcaacagccaagagaatggcaagatattccttctcgtaagctgaaagccctctattcttgatgcctaaagacttactgacaaaagccaatggatggttgtcttggagcagcactgcacccacacctgctccagaagcatcagtttcaatagcaaattggcgagcaaaatcaggcagcgccaggactggagctgaggaaagagctgtcttcaacagggaaaagcaatggaatgttcctctgtccagacaaaaacagcatgctttttcaacagattggtaagaggtttagcaataacgccgaagtttctcacaaacttgcgataataacctgccaacccgagaaatccccgcagctctttgcaactggtgggctgtggccatgaagttacagcatcaatcttcctgggatcagttgagacacctgcctggctaataacatggcccaaataagaaatctcttgtttggcaaaggagcacttggtcagtttcacttgccactgatcctgtgtgagcaactgcaggaccgactccacgtgaagaagatgattgtcccacgtatcactgtaaactagtatatcatcaaaaaagaccaaaacacatttgcgcagcaagggcttgagagtactgttcatagcaccttgaaaggttgctggagcacccgtgagtccgaaggccatcacacaaaattcaaaatggccgtgatgtgtttgaaaggctgttttatgttggtcctggggatccattcgtatctgatgaaagccggcccgaaggtctaatgttgaaaaccaagcagcgcccgccaattcatctagaagttcatccactacgggaactgggtacttggacttaacggtcagtgcattgagatagcgataatccacgcaaaagcgatatgtacta

SEQ ID NO: 64337 - DNA, 720 bp, Zea Mays
agcaggtgtcctatacaaccactgcataaggaacccaccaattaacctgtaagaattttagcaacttttcaaaaatatgcccgttcagaactccatcaaagaaaagttgagtcacagcgaaaggcaaaagagactctacaattcagtaggacatggatcaggcctccgtggcaatgcatgacctagcccagcaagagcgcggtcagctccaagtacagaatatcacaaaccagcagcaaccaggagagaaccccccaacgccagggctactccccgcaacaaggtcgcgatggcaaagcaactagggtcagaggctgaggctgaggccctcagtggccgagaagattctactgtgttttccatggcgaagactcagggcacccaaccagggattgcccggagaccaaggcgaccgaggaccgactggctagggctgccccggtagaaaaccaaagagtaatcgctcatacctatcaaccataatagtatcaccagcatcaataccaaaatgagcatccatattacccccagcaccaaaaccccaaacccttcccacaacaacatcgccttcaacaccaagaaaggttggccctgccaccaccaccacaccacatcagtcaaaccaacacccaccaccaaagcatgaagacttcgctgatccacccttcgagggagtgattcgtatgatcactagagggtccacctcagattccgagaaca

SEQ ID NO: 64338 - DNA, 520 bp, Zea Mays
gctaaaatgaaaacacttttctcttgtgcatgtggccatggtggggctccgacatgggtggactaaggatgggcttcggcacgaccatctcacacggcgaggcggcgacacacgtgacacaaacaacacacggtaaggtcaaaccttagcatcaaggtggacccaactacgagactgaggatagaagatggcactatgtgttgtcaaaggggctagagttgggcatcgggggtgagccatattgacccatacaacatagggtagggctacaatggcatggttagggttgggcgttgaggcgggtttggctcaaggctttgggtggtgggatgtgtgccgatggtgggctgagcttggcgagcattgcacatagcaagaaattgaagacgtcgagagagaaaaaaaggaagttgaattgatacctatgtaatgagtagcggggtgggtaatttcactagctcaacaaaaatagtattttcgaagcaactcttgatatactacatggtttcaatggatctgg

SEQ ID NO: 64339 - DNA, 348 bp, Zea Mays
gtagtttgcacatctatgatatagagaggtttgagccgtctgagataatacattacattcttcatatggtggatgtgtagatgttagcgcacatagagcttacatactcagaagatgattcaactagcgagtgaaattgagaacctagagactactggactaacgagtggagctaagaacctaaaggatattggacttaggtgcagtagcaacataaagttgcccttgaatgcaagacatcttccctggtgtttcttattactagttataacctttgtgatgttaacaactcgattttatattgctatacaccttttttataacacaaaggagatagttacatcttta

SEQ ID NO: 64340 - DNA, 502 bp, Zea Mays
ggctggtgtacacggctatcgccggcacggacatggtcggcggaagccgagcagcctctcaaccaccacaaaagaagcgtactccaatcagcggcaccaagcaggaaaccaaaacccgctgctccaattctgatcttgggggggctcaattcaatcccacgagctcggagcttcggaatcaagcaacccactaaactctctcgagctagaaacgaagcagcagcgggcggtggtggggtcaattgaacctacagagcacgaattcggcgtcaaagcacggccgtggcgagattaccccggcgaatccgtgggattgagaggatgaggggggcgcgcacaaggggatgcttcctcgccttcctcctgccgcgcgtgttttttgtgggtcgcctccgctgcgtggtttgtgaggtgtggatttcgggtgcgtggccagaagaatctggggttgggggcatccacgccaacaatagccgcgcgcggctggtatggcgaaactgcc

SEQ ID NO: 64341 - DNA, 576 bp, Zea Mays
caccgaccaggtgcgcagaccgcaccgtacactttttggctcactgtaccacctgcttacgtcaaatattattacgtgttatgctcatttgtgcatcagtttatacacttttggtatgcacatgtttcgggcatccgggcccacgagaagattgtgttcctgcaatctgggcagccgtactagtcccacacaaaatattgatatattacgatgtattatgttttcgtttacgaaacagtaatccacgtgtcggtctatggaccttcacgttgatttcgcccagcagattacgtgtatcgggcccacgaatccacacacgagcacacagtttttcagctcacctcacccgaaatgctcgcggcggccgaaccctagcattatcgccgccgtctgcttcttctccaccgtggcggctgaaccctagagattctacccgccgtcgccttcaccttctccactgcatagaccgagacgccatcgccttgttcttcttcacaggagagggacccggaatcgtggagaccgagccgccgcccccttgttcttctccaccgcagagaccgagccgcattcgat

SEQ ID NO: 64342 - DNA, 630 bp, Zea Mays
aaagtttgtagtgggtcccaattgcaagtgttgatggagttgtgggtccgtcctgtcagtcactgcaaggtggacgaaaacggcatgcggatgtattgctaggcaaacgggtgacggggtggacaaaactaaaactaagggtagacttatgtagttgtccacaactaagagcgtcactgtaaaaatcccttatttttaagtctaataggctcatgagaaataagattagtagagaattatataggaggtcattgctaacacatgactcacgatccggagcaaacaagaaggcctctcacagaagtattgttcttcaccagatgccatgtgttagcaactgactatgacacgaacacaagtgttcatcggtcaaattaaagaagagcgaccaacaggacgtttgctttccggctgtttcccagttttggtttctttttacttctcttcgtttctcatctgtcagttcagttcgacggctgagacctttgaacatatgcccaattcctagcacatgaaatgcaacgacagaacacctgccacattgcgctaaaagaaacatctgcagcaaaacatcataggacatagcacctagccacaaggcttcagcatcaaccaacatgtaaactgaac

SEQ ID NO: 64343 - DNA, 314 bp, Zea Mays
tttggaagacgaaggccgccaacatcgccgaagtcacctcttcttcctttttttccacaacaggtgcagtcggccgactcactcggcatggacgctttgggaggacgccttcgggtttctaggccttcaccacttcaccaagttcttgcccatctgtgatggccattggctcggcacgggttgagtcagatgattccccagccagtaaactaagcactacatttatttctgcgtcgttagtgctaaccggcatctcaaaatgagtctgtttttcatcctctcaaagactccaaagtggggcgatcatagcctca

SEQ ID NO: 64344 - DNA, 763 bp, Zea Mays
ccaatcacaatttcttctggaagacgcacataatcagatccaatagtctcctcagttccattaccaattctaaggaggtattccgaaaaccatttatcagattgagccctcatgttcatagtcaaacgtatctttcttatgctatcccacaaataagatctctacaatgtggcatccgttatttgtgctcttgtaccacgtgtcactacaggaagcacctggcgaaaatctccaccaaatactataacctttccaccaaatggcaaagaagatgtcataatatcttatagggacctatcaaggcactcaactgcttgacgctttgtcatcgcaacttcatcccagataattagggacgctgtgcgaagtaactccgcagtgccactttgctttgtgaagttgcatgtgctattgtcagcgagtttaatagggattttgaatcttgagtgtgttgtgcgtcctccgggtaatatggacgctgctatacccgaagttgcagtagcaattgctattaatccctctgaacgtactctagcaagtagtgccttatataggaaggtcttacccgttcctcctggaccatccagaaaaaacaactggttttttttattaagtacgtgatctatgatttcatcaaatcctgcacgctgtccattgttaagacatgtatatatatccaaatgttcttgatccacaccaacagcaagttcctctctaagctctctcattatatcattgcaaaattcacctaattatcacaaag

SEQ ID NO: 64345 - DNA, 495 bp, Zea Mays
acatctcaagtcattattttatttatactaacattatttgttattattatttaaatacacaagcaaacaaaactccagcatgatgcaccttttattgaggtataatttattttaaacatgtctcctaataattcttatgaatgtgaaggcattacacataattttatttctctctcttatataccaaagttgggtattacatcctcaaacgccggggatagctcagaacggaggtgtcgggttttcctcaggataagcaaagtctgttggctattagctaggaaataagctgaaagagtgtgatcagcatgcgtgcagggagtgctctacggtcgtgtatataaggcctagggggatccccatcattttcatctcattagcacccctccattcgggagacacaacttgtaaacaccccacacatacaaaatcaccctaggaagtagggtattacgctcctcaagcggcctgaacatgcagaaaattgcccgactc

SEQ ID NO: 64346 - DNA, 305 bp, Zea Mays
ccttaaacaactattaatattaatttgtttacgagaaacaatacttcttcttaagacatccgcatcatttttatgcaataaattgtatctttcatacaaattatgctatatttacgaaaccatctactggatattataccattcctaagttttgctcgttattattttcgcatatccatcacatgcagctagtctagttccatatataccgccgcagatctgaacctccgtaataaccgtccactaatttcgtgcatgcacatacggaaatcccgtagagtgcgttacatgcacttcaaaaaggc

SEQ ID NO: 64347 - DNA, 558 bp, Zea Mays
cgaattacccaggcgaggatgcggtgctgccatgtggcctatggcgtgtcgtggaagctgctaggcctcacttagcgtgggtctctgacacgagggccacccacgttaaatatgagcagcacatccgcctttccacaccagtgacaagcggcttatgccccgcattgaatgcatacgacttgtgcagtctacaaggcctaggacgcgtcagtaacccatgcgttacgaaggcaaggaccattgacccactgcacagcacgtgtaacttccatcatgacccttgttgttcccactacaacaccaggtgaagagataggcagaagagacatgacgacactgtccacctactcccctatgcaagacgatgggctagcctacgacgcaacctatgcagcagcctacaccgtagcctactacaccggtgccttcacgcgctacagtaacagctagagttaatggcatagagatatcacattaactcctatgcatgttagcttgccccgccctagcaatgtcagcgcactaggaacatcccatcacgggcctaggccgacaaac

SEQ ID NO: 64348 - DNA, 573 bp, Zea Mays
cccggtgctgccagtgttgctcgcaccgcctcgaactggcggacccgctcctccaatgcccactccttctcctctgccttgagctcatgatcagccagcagcttctcccgcctttcaaacatttcctccctgaaggcgaggtccttctcctgccaggcgagatccgtcgcccacttatccagggaggcatccttttccttgaggttctcctcggccagggcgatgctgctggccctgtcatctagctcccgctgtagcctttgtaggctctccaccgcccctgtctgttggacccgttgcttctcctggattttgttgaaggcattcagcttggcctagagctccgtgacgacctcctccctctagtccaggtgctactccttcttggccagcctcttatcctttcgggccacctctagctcccaggcgtacaccttctaggggtccttcttgtagcccttgcggtcccgctcaagctcggaccgctcaaaggcgaactagcgggacactgccttggtgcgctcctctagctgggtacgccagtcgctgaggcactggtgctcggattctagc

SEQ ID NO: 64349 - DNA, 477 bp, Zea Mays
gtgctataagcgttgtgtcgaccgcctcgcaattcactgacatcttcaccaaaggtccgccttcaagcatttttctagagtttcgatctagcatgaactttcattcaaccgacgttcctactaagggggtgttagaatctatatattcttagggtttacactttcctttcttggtcctccaatcttaggattgttcttataatcttgggtgtcctcccaatatgttgccatatttgggtagaggctttatctatatattttgtaatcaacactaggaatcaatcaaggacaatattatcaaaaattcctttgtctatcatttacaataggaagaccaataaccatttttatactgagaagtgaggttttgcccaacagatcgcgtatgtgttactatattaaaacaccaatttcctatcgtgtgtcgcatgcggagctcatggatctgtttctctttctcgcctaataaacgaccct

SEQ ID NO: 64350 - DNA, 551 bp, Zea Mays
ccatggttcaaaagtaatcgaacccatgaataaagccttataagatgatttagaagagaactgtccagaggaagaatgaatccacacatgtctatcagcctcctgagtgagcaccactccccttaatgcgtcccaaaggtttagatattgttgtatcccagacaaattaagaggggtctcaatgtcgctgacccactgccagttctcaagagcatgggccaccgtcctggaagaaatagcttgtttccctacattagccacaacagcaggggcaaaatcttggatacaagacccatccacccaccgatctgtccaaaataaagtattacacccattgccaaccagggtaacaattgaagaagaaaagaagctcttgacatgctgctgaataggaaattctagactagaccacggcttgttaggatctgttttttccaaccataaccatttagcttgtggcgcccaactttggtacagcaggttagaaatcccaagcccaccgagatttaaaggccttgtaacaatgtcccacgaaacaaggcaattaccac

SEQ ID NO: 64351 - DNA, 353 bp, Zea Mays
ggtggatgttctggacttctggtaggtgcatattatttctggtgaatgttttgctagctgtttacatttgtgaatggtaaatgtattttgggctgctttgcttgttgcaatcagcggctagctgtttttgttcgaggtgcattttaaattgtaggtgagaatgtgagttgtgagatcaatgacttggatgtttgtggaatcagcggctagttatgagataaatgtattttgggcagctttgcttgttgcaatcagcggctagtgtgaggtctgggaactgggatcatgggaggatctgcctaagtgtctactgtctagtgaaaaccgctaaaacatttagctgcagatatatc

SEQ ID NO: 64352 - DNA, 388 bp, Zea Mays
ttgataattcttatctgactccttgactttataatatctttcttattccaaaccttgtctcacctttgttttggttgaataagtagaattggatagtgttgtgctggtatgcttgagttcattgtcctttgtgttcatgattgatttgcttctttgaaatgattgttggtatattgtgtgacttttgtccacaaagacatcaattagctaggtaaaaccttagataaatgggttttctctgctctctataatctgtctttactcaaccctttcgtcccttccattcttgcatacccatacagatgtcagaccttggaatgtcaactacaagtgatgtcactaaatgcaaagaatgcggtgtgttgacaagtcaaaacaacactataaa

SEQ ID NO: 64353 - DNA, 612 bp, Zea Mays
tagtactatatatacgctaacccaacactcaacgttaataagataattaagataaaaaacattcatcaaaacttactcatacaattaattgttgatgaatagaattagggggaaaccccaaaaatagaagcatacgtgtcactgactgctgacacacttggatcatgagctgaccgcttaaatgtactgtctcatacacttgaatacttgagacggatggttgttaaaaggtgtttttcaatatgcttctagctcagttatgagcattaccactggtttgatgagatgctaacattgtctattaagcttcaaccaatttaattttgtcaatctattgtggggcgtccgaaggacgtgtgatggtctagtgaaagcaaaacatctgtgtaccttaaacatgaaacttaatcccaacccattttcctagaagatgcaagcgcctaaagaagagaaaatatatttgttgagcgcgtcaagattgcataaacagaaaccatccctcctgcatcaaatgtgcaaggaaacatggactacagcgggaaagatcgagacgtgcgggagatgcccaaatccagactaaaaaaccaaccgactgttcgccaaggaactcta

SEQ ID NO: 64354 - DNA, 582 bp, Zea Mays
caagggtctaggatgctacccgcctcacctacttatccacgacttagaggcagcttcgtagccgcaccgccttgctgactcgtcgactgcttagaggttgtgccaccgctgagttgttgcttgcctcactgactcttttgtcgacttgggggttagggttttgcccgcctcactgaccactttgtcagcttgagggcctgagctgctgcccacctcgacgactcaccgcttcgtcagctcgggagctggacggttgtccaccttgttgactcatcgcttcgttagctcgggggttggactgttgtctgccttgatgactcatagtttcatcagctcgggggctgggctgttgtctgccttgccaactcatcactccaaatggccaacttctagcatcctttgaggctcgacacaatgatttggtttggtagtctataattcatgtcgctcgacatcaagtacgacatggtgctcctcccacctagacacatggctgacactcaggggcatccagacatctacccctgtcctcctcgccgtaggaggcagagacggaacaaccgcaattgcaccgcgagcaac

SEQ ID NO: 64355 - DNA, 909 bp, Zea Mays
aacgtccagggagcttgaactaacctggagcaagctaaccacgttgaggtctctttcgcggtggtggaaacacagattggggaaactgagcaattcacgggcgttagtggacaattaaagacaagacttggcggcttagatgcgtgattaccctatggagctcacgacgggctcaatttatagtaggcaagagcggtggccggtgaatttggattgagacgtgcagcggtcggaggaatgggaggtcactggcgtagtggattcgtggaaaataccgtggcgggctccccggcgatgatcagatggcttaagcgagtcacggcgatgtggtaaatgtgcccaggcacgtggcgcaaggccgtgaagcaactgtctccggcgaacacatccgaagcatccgtgactagctcggtacggtggtcggagtaatttagtggccggagtatatccacggggatgatatttactcaaccccaagcgctatccaaccaatccgagcatgaatcacgacggcgaaagcacgaatccgcgcgtggctcgtcgacggcgagggacagagctggcgacctgatcgggacactgtaccattggaactgcgattcagagctcctgacagcccaacttgtaatgtccagaacacaaatttctatataagaacttgctaattcgccagttgtaaacttgcagcccttcataccagctgcaattttgttatagcaacaaccaccaaacgagcaacagatctagctcaaaatggctctcaaacctagttctaggccactatcagtctgatttcagacctaagacagcctgacaggtcaacttggagtcaaagtttctccaaatttcttatgtaacccaagcgtaatctctgtagcaaagttactctccttacatagctctaccaat

SEQ ID NO: 64356 - DNA, 377 bp, Zea Mays
ctcgtgaggaagaggtggctattactattagaagcgagtgttgtagggctctggcccatcctgttcctaaaaaagaagaatgttggagtaagcacgatagaacaaggtggctcgtacccatggaaagcggcgagaagaataaaacaacacggtcggagggaggcatacccgccgccgctctcgtcagctaccttgtcgcagcgagtcagcgacgatgatgcaattgctccctgtgtcggccatcgaggagctgaggagcttcagtggagcgtagagagcgttcggttcctgagatgcgcctctagccattggatcagcttcttgctgctgaaataaaaagagatgacgaccacaagtaaagccagattagctcccac

SEQ ID NO: 64357 - DNA, 588 bp, Zea Mays
gcaccaaacatgtagcttttgggctagtttctcgcggtcgcgcttcctctgtggtaaggaggcaccaaacaacggtcagcgagaagcggtcgaagccctgcatccgagaaaagcgcactccccccatgattgttgttttgtgtgtgcattagggtttctccccatcccgctcaccacaacaggcgactcatcgctcactcgctgccaccgactaggaaggcactcctctcccctagtttgcctccatcgaaacccccttcctcatcaccatcgttcgcacccttacatcctgtttgtcgtcttccaggtcaatgcgaggtgagacggcaccgccgatgaaccagagctaaaggtggtgcttcgggcgacgattgtgtggtcgctgaactggtaagtacatatgtgcaactccattcaagtggctcgtccaacacactagtacaacgaccaatggaccaagatggtatccaatgggtggagagaacgttggagaatagtgatgactgttacgacatatttcgcatgcgtcacactatcttttgtcgactccatgattcattagttaacgattacgacctcgtttctagt

SEQ ID NO: 64358 - DNA, 807 bp, Zea Mays
tctgatgctctcagaagttaactttttaaggataacggtgggtgtcatctgttggataactagtttgtagctcgatggcccctttcccttgcgtcgactaggtcgggggaggtggccctctcctcaaagggcctgaaagcccttgcgggggatgtgtgcataacaaagaaccgacatgtatcaacaaccaactcagaaggccagattagtaaaggtcggcatggggcaagtcccgatcatcatcgaggaaaaactaaaccgcccaacaatcctcatagatcactcgggggctacgtcacactgatgcgctaaagcgcatccagaccacggtctagcgggcaccgtctccgagcagcaccatacgagttcgtcctcagatgccacattttacttcgggaaccactacctacgccaagaacaaagtaatcccccaagcaatcctcacagattactcaggggctcgaggactacatcatactaatgcacttccacgcacctagggttttttgatccccatcaaggaagcccccgaccgactccaaagagtcacacgaaggctcaaagcctacttacggatacctaggaacagggtacccatgtgaggcccataaacctcttcctagcccgtccactgagaaagcctgagaggtggggtgaacgatcaagtcttcgccgagcaagcccgtgagcggggcgaacgaccaagtccctgccaagcaagtctgcgagacgggacatatgaccaagatcaagccaagtggacccacaaggacgaacctaggtcaacgtgttggatctcaacagccg

SEQ ID NO: 64359 - DNA, 670 bp, Zea Mays
tgacacggtcgaacaaaaaccaactactgacgcaaccagtacgcgtcataagcatccacacatcgtcgtggcaagcaaagtccccatctcatttcacaacaagcaatgtcgtcatagtttacatacacacagcgaagggccaccggccacattgcacaaataatacaaatcacattttgttgccctccctctctattgcgagccgggggaaggcaacattttcgctcaccaccgcaacacataagcgagggcagcaaacatgctacatcagctaagcctttgggataaggtctgcctcacgaaaattaaacaacatcatcctcaactcctcaccctcaaaaagattccgcagatccccctccccaatacacgtcccggaagtcgaggtcaacaaatctcgttgtccacccctctctacccgaagacgggttcgttccatccccatccgtcgacgcctaccacttcgcgacatctcgccaacattatgcttcgacaccactcttcgctggaggtgctcttcgatcatcgccctagccgggggagcaaacgcttcgcgcacttcaggctgcggcaaggactccgccgcagccacatccaacgcagcaaaataatgcagtcctcatccaaagactcctcagtccatgaaaacggactcccaaactcacccccg

SEQ ID NO: 64360 - DNA, 720 bp, Zea Mays
agatggtgcatgcatccgatggtgaagcatggaaacactttgatgccattcaccgtgagaaagccgaagaggctcgtaatgtacgtgttgtgttggccacagatgggttcaatccctatggaatgagtgctgccccgtacacatgttggcccgtgtttgttatcccaatcaatctccccctggtgtgtgctttcaaaggcagaatatattcgtgtcgttgataattcccggacacccggggaataaaatgggcgtgtacatggagcctttgatcgatgaattggtacgtgcatgggaggaaggggtatggacgtatgaccgagctacaaagacaaacttcagaatgcatgtttggtaccagaactccatgcatgacttatcggcgtatgggctattttgcacctggtgtgttcatggtaagtttccatgcccagtttgcaaggaagctctcaggttcatttggttgaaaaagggtgacaaatattcgtccttcgataaacatcgacaatttctccctcctgaccatccattccgcctagacatcaagaactttatgaaaggtgtcgtagtgacagaccgcccacctgcaacgatgagtggtgccgaaattcgtcaacagatagatgggcttgtggcaaatacagaaggtggttttgttggatatggtgagcagcatatgtggacacataagtctggcttgactcagctcccctattatga

SEQ ID NO: 64361 - DNA, 564 bp, Zea Mays
atctactctgtgagtcttaaggatgaagagtcttgacttccacatatggattgaaccaattcttccggcaagggttcgaggctatgtacctgagcttgtctggctaacgcttagagggttgaactatttcttcttccagctttgtgcaaaagagttatctaagaccgtgattgcagacttggaaagaatggcacccgcgttactgtgtaagctggagaagatctttccacccggcttcttcaatctgatgcagcatttgattcttcatgtcccatatgagacatgaatggggacgtgcattgacgtttgtgctatccaatcgagagatgtctaaagattatctaaaagaaatgtagaataaatgcaaaatcgaggcttccattgcaaatgcatacatctagaggagatgtcaaacttcacaacaacttactatggtgacaaagtaccgagcgtgcataatccaacccctcgtgacaatgatggtgtaatgaatcgaacctcaacatattttgagggcaactcggaagcgcaagtggttcgaccaccaaaacccttaaaatgaag

SEQ ID NO: 64362 - DNA, 907 bp, Zea Mays
ggatggcgggttgttattctaaaacttcaggggttccttggcacaatcgctatccgaaggggtatctggcaattggaaccgttcgatcaagcacggacgcgcgagattagacttctacccaaaacaaaccggtatctcacagtcgccctcagatccgcatccaacggccacgaccgatacgcgggtttgagcgcggggccggatacaatcgtcggttcacaacggacggtcccgattcaatagctgcccaactctaatcctggacgtccacataggatctgacggtcgcgaatccatcatcttctacccagaaacgctgcggcggtggccgcgttgaccacggcggctcctacgccggtgaaccccgatttcgcgcccaaggacactaccctcgagcctgtagcgttgacgtgatgcgcacatgatgacgaatacgtggaatgggtaacttaccagcagtggcgtagtagaacctcccagccacggaaccaggtaatccgtggcgaaacccagtcggcggcgagaaattgccttcaaccaccgcctccggcccacctgttccactggaccccgcacctcgacgacgtgcgcggaggacgagggcgctggtcttccttccgcctagcagattccctggctctcgagatctccaagcttgccccgaacgaccacatcgacgagcagaccaggttgcggccctggcggacggtggcggcactcacccaagccccacggcgacagcgctcgagattcaatggaataggagagagttgcggcgaggtccgcatttatacgcatgggaaggtgtccgactcccaaccaccacgcgagatcaccggagggggttgttaagcttcacgcagatccagcgaagaagacggagtccgttcgggtgcgcccaccgtca

SEQ ID NO: 64363 - DNA, 630 bp, Zea Mays
acaatatacagttcgaatcctactatcacgtcggctattttaggtcggatagagcacgttgcatatttgcatgccgatcttccatatattggctagtttttcggtgccatttagaatggacgtcggacgatacgtggatccagcttgctgcctgggcgcaagtagcgtccgctaattttatggctatatatatatatatagatatgctgtgatatgtcgttgtcacgaccgtcgttcaaacttgacctctaaggctctaatcatggagcaagcgcaaggacggtgagggtgcagctccagactgcacgtacaccacgcaacagacgtagcacccaaatggtgctgccagtgctcgacctgttcctgatgatgaacatggacctgagtgctgcgcgtcattgtttcggagtcctcgttcgacgcaggcagattatgcgccagcttcaacttcatcgtcttcttcttcgttctgaaaacgccagtggcgatcgagtttggtcaggcgaagctgttcatcaacatcagcagaactcaactagacagactgtgaaagcgatcccggcggtcaaaccggtcggttggagtgttgtgctggctcactgcccctgacctgacgaccactgatgaggc

SEQ ID NO: 64364 - DNA, 405 bp, Zea Mays
gcaatatactctgtgcagcttggatgctttgaacattgcattggatgagagtcattgtacacttactgatattggtggtcagacttgaggctgtactccaaaaacttagaggagttccttaaccagatttagtttatctattccaggctgcagaaataggacaatatcatcagaatgaagggatattcgctacccatgtcctctccttagaaggggttgcaaaagcccaagttcgtttgccattgtgaatttgtgatcaacgaatttagaacatccattaccaaaataaaagacatggtggggggcaatgtgtccccttgcaaatatttgggatgccagggatctgagcaaaagggaccagatagcatggccgcttctgtgacctgtttgtgtcgtggacaaggg

SEQ ID NO: 64365 - DNA, 372 bp, Zea Mays
ttggtaagtttattttagtgttccactgatttccttttaatgccttagtgaaagtttattaagattcctagctgaattcattggggtgagattcattattccttctaatttatctcttcttttcctttttcctttatgcctttaaggtgggtttgaactacaggatagcttaataaatttccaaaaattctgcaaatattatagtggcttctcactggtgtataactctcagtcttaaaatttggggtttacaaggtgaggggttctctctgtacaaaattatcaagtgttagggcaaagggggtgttttgaactacaacttcctttaacagtgggttattctctaagacttatttttgcgggcatctagat

SEQ ID NO: 64366 - DNA, 292 bp, Zea Mays
atttcttcagttgtgatacatgaaacacgttatgaacggcggacatatgctctggcaactgaagacgataagctacaggtccacactgttgtatgatgcggaagggaccaatatagcgaggtgcgagttttcctttgacgccaaagcgattaacacctttcattggtgatacctttagatagacataatcaccaaccttgaacaccaagggccgacgctttctatcagcataactcttctgacgagactgtgctatcttcaggttgcgttggataagttgaaccttttcctc

SEQ ID NO: 64367 - DNA, 504 bp, Zea Mays
acctaagggcagaaccgagtacgcgtcataagcgtccgacatcgctgtggaaagcaaggtccccgttccatttaagtgccacggcagcgcgattacaagtcgagacaatcttacaacaagcgcagcatgcggcgtcatcatagtttacatacacacaacgaatgcccgtcggccacattgcataaataatacaaatcacgtcttgttgccctccctctctattgcgagtcaggggagggcagcgttttcactcgctaccgcaacacgagagcgagggcagcaaacatgctacatcggctcagccttcggaataaggcctgcctctcggaagttaaacaacatcatcttcaactcctcgccctcaaaaagattccgcagaccccctccccaatacacgtcccgaacatcgaggatagcaaatcttgttggccaccccgatctagtcgaagacgggatcgttccatccccatccgtcgatgcctcccacttcgtgacatctcacca

SEQ ID NO: 64368 - DNA, 358 bp, Zea Mays
tgtagaaccattcgtattgggagtttgcgcggtgtctcgatagttggtggccgccggtaatggccaccaccgtgggagccctgttcacgccgtcgggtctgaccggcaggggtaggagacgagatagtctgcggtggatgcatctaaaccgttgaacgggtaattaacgatgggatggggcacgggcatagctgttggaggaatggatctgagccgtagattggatcggatccaatggctggtgcagttaaagtgggtgagtgctttgtagccgtaggatcttgatccgatggcctgatgtgcgtaccggttcgatgccgtcccgatgtgatctgggccctccatctctaatcgggtg

SEQ ID NO: 64369 - DNA, 454 bp, Zea Mays
gtctggtaagtcttttcccaatcgggtcgccttgatcccctgtgcactttgcgctagacggaagctaggttgatgcacggaccgcctggtagacacctctggtgaggagcgcggccgcgggttgtttgtcgccgtgctgggtctcgacagagggaagaagatggtttcgatgccgtcgatcgactcatggacgaccctgattagatcccaggataacctttcggggtgttaaatccaagccattagtaggggatcctgtggatctggttaggtctgggggatgatgacgttttagccgttggatcgtgattccgcgatcaggattgcataccgattcgttataatgtgagatctaatccgaccccttggatcgtgatcgcacggtcctgtttcactaataccccttcgtcgtgccagattcacaaaagagcccctgggtttaattggaatcaac

SEQ ID NO: 64370 - DNA, 308 bp, Zea Mays
gggaaaagtaggtaaagtacgatgctcagattgagatggaaaagaggatattttaaaggctggtataagataaacatcagggtaagatataggggtgataaggataaaggtgataatgatgaaaagcataatccatggatagagttaaggcaagactcgcaaagtgacgaagtggagaaaataatcaaggacaagataagtaaggttccattaggatgatcgaagtaaagaagttcattaccaagggatgttataaggaacaacgagattaacaggaatgtgtgaaataaaatgaccgctcacggttc

SEQ ID NO: 64371 - DNA, 296 bp, Zea Mays
cacgcatgccgtagttctccctcactgtaccttctaccgacgtggtcgacatgccatagtgatgttatccgtggccgcgaggtgatcgccggaccgccacggctataaatagccgttgggttcacggcgaggtgctcgctgttcttcaagtaagctcgagtacaactagaaattcccactgctccctccaccttctcccaaatcgattgcgcacgatgaaagcaccgcttcttacgaccaagtagcctcaatccccaaccccaatttcacccagagccgccgcgacgccgttttcc

SEQ ID NO: 64372 - DNA, 744 bp, Zea Mays
ccggcggtgcgcggcacgaggctgtcggagcttgcccggttaccgttcatctctacagtgcacgactacgccgagcgcttcaacgcggtgctgtgccatgcacacaacctctcggcatcccagaaggcggagctctttgtgggaggactgcccgaccacatacggatcgacgtcaagctccacgaaccccagaacctgcaaatagccatgcacttggcacgggcgttcaaacgccgtgcggctagtccaagggtgcttcctccagtacgtggcgggaggaactcgtcgcgaccaccatcgtccggtccaccccgacaaccgcaagggctaccttcgtcgggctcggtgccatcaacgggttcctctacaccgtcacgatagttccaccggctaacaccagcggaatagatggaacgtcgacgacaaggattgtgttacaattgtgatgaaccctatgtccgtggccacgtctgccaacgtctcttctacctggagtcgacagactatgttgatgacgcattcccaccggaggatcacgccggggctttcaaccacggcgaggccggacatcccgcgaccccaggggcggacaccgcgcaggactccgatcctccaccgacggtatcccttcacgctattgtaggggtccagaccgagcaggccatgcgcctgccggtgatcattcacggccatcgattggtggcgcttctcgactcaggatcgacgaccaacttcatcaacgtt

SEQ ID NO: 64373 - DNA, 638 bp, Zea Mays
atcgaggtccacgcaggctctctggctagtggtgatctccttggcaggcactgaagcagtagagctcagggtggagaatgagtttgcctaggcattggtgaagaatctcgtcttccgtaagcacgacaagcacattctggtcaaacaccacttcatcaggagctacttggatgaggggagtgttaaggccaactacattagcactcatgactagctcattgatttcctcaccaaatcacttgggagggtcaagtttcaggagattagcgatagacttgggatggttcaaatccctctagcggcaccacacaacacttagtgggagaatgataggataagttcagtgatgatatgataagtcccgtgcctatgtcagcatcttatctagtactttgacatcttaccttctaccttatctctaatctagtagttgaaattttatctctactttcagttataacagaccacttggtcctatatatgtaaccataaccagccatgtttcaaagtgtggcataagaaatagaaaaatctgccccgaacctgtgctcaactccaacaaagcgtttggtagtgtcgagaaagctcacttttcttggcaagcttgctcggctcagcaaggatttccttgcccatgg

SEQ ID NO: 64374 - DNA, 354 bp, Zea Mays
tttggtatgatcagattttcagtggcccatttgctatcagcggggatcaaataaactacgcatttgtttgcggtatgcattaaagattggatatcctcaatataaactgcaccgccttttttaattgatatatgttaaagtgtggatatcttcaggatgcttcgcagtcagcagttaatgaaactgccaagatcggttgcattatggtcatctggtgtactgttctacaaggcaattcgaaaatttgtgttgatgtccttgcaaaaaaagttgtgttggtggtgcataggataatcggattaatgctgttgttgctacagcaactaagctgtctatggtgcttgctgcttggtt

SEQ ID NO: 64375 - DNA, 481 bp, Zea Mays
aacagctcaaaaacggtatgtacgaaggtttcatgcatcacaaagaagtacattacgtcaatacatatacaaatacttgatgtatggctattacaggaaacaaaggccatgtagaaacactaaaactctcaattatacaaagttttaatcttcttttagcactttctcaacgacttcattcagtagtctatcaatagcttcgtcaacagcttcgttagcaattttaattatatctattgcttccttcaaggacaggtcagcttcgggattgtatggctccggagggggtgaaagttcaactacatcataaaaatgtgagttagttccaaagctgaagacaaattccgaagctaaaactcagtaaaagtacctataagccttgcacgttcgacagcttcttcagcttgtttcgcttcttcttgggagtcttgagattctttttcattttttctaatcacttcataagctatctcacaaccac

SEQ ID NO: 64376 - DNA, 971 bp, Zea Mays
gtccaatacgaactgagaacccaccatcatgtgcataacctttgtaaaaattttccacatctgtgatgctatcaaatgtcatccctaccatggacttcaaacttggatcaacatcaagaataaatgaggaacactacaaggttaaaattcaatcttaagactaatcaacacatgagttcatgagtaaatgacaaaaagtaatcaatgtttcatactcacaataatgttggaagatgattttgttggtgtggatacgccataatctggaccggttgttgggtctaagcactccaaactggtcgacgcgtgcatgacaacggaggctggcgtcgtcgtcgtggtcaggcaagccgacacatcaggtgttatggaagtcggcgtcgtcatgatcagggaggctggcgtcgttgcgggcaaggagctcggcgtctgctcgacaatggagggcgtcacactcgtgctcgacgtggaaggtgcactcgagatcagagaaaacgggggcttcgcgatcatgtagtccgagatgtttgcgatcagggagcctgacacatgctcgacgagggagggcagcacaaccatggcgacgttcgcgcggcgtggccatgattatgtccgtcagccgttaggctgggcacaattctgtccggcgacgccaaggttggttgcatgacaattagttgctaggtactgtgctgccaatcaagggttggattgcagtttggataatagatggggggctcatttgtaaaagtacaacagggatggttatacacgttagatatagatccagtggccgacgtcgtggtttgctcaggtttgcacgatacctgcagtttgtacctgatctgaagccttagatgcatgcggtctcctcaactgggctggctctacaatttccaagggcccttgagtgtgcaaaaaccaggatccatttaaaccactgaacttttttgttttccttttcattttct

SEQ ID NO: 64377 - DNA, 559 bp, Zea Mays
gtcgagctctgcatggaaatactcctttcttcatggtctacggttcagaagcagtactacttgctgatctcaagtttggggcgccaaggttgatctttgaaaacatagcagaagccgaggctactaggctggaggatgttgatgtactcgaagaagaacggctgaatacggtaattcaatcagcacggtaccaacaaactctgaggcactatcacgataagaccatgtgacatcgatccttcacagtaggagatctcgtcctccgccgaattctaacaggggaaggacggcacaagttgtcacctctatgggaaggaccgttcatagtagcagaagtcactcggacgggatcatatcgcctcactcagatggacgacacggaaattgggaactcatggaacatagaacacctcaggaagttttacccctagccgtatttaaaaagctattgggacgacaatgtactctgtaaactgggaaatatatcatcaataaaaagacttcaagagcgctcaaattattcattgtcgacctgcattcctacttaactcagggtgac

SEQ ID NO: 64378 - DNA, 456 bp, Zea Mays
aaacaacacaaacatagtgatgttatgtcaactctttgcttgacatacttaattctcttttctcgagtgacaccaactgttgcgccatgttttcgaatgtagtctagagcaacctatgagcattcaaactaaagcttttaaaagaagaaacataagcctgagctcagctcaaaatgtgccacaacaactgaataaaacagcatgctcaaagcaaacattggttggagtaaaaaaatgtgttcctccagtcgagcagctgaataagtacctgttgattttgaatgacaaaagcttcctccagggatgggcgtagcagttccatcatttgtgtatcagaaaagtcataacatatatgctccagtatacccttgtcagcaacaaatcctaatgctcgaaatacaatgataatgggaatgttcgcacgaatataaggtagagtagcacagacatattgac

SEQ ID NO: 64379 - DNA, 1267 bp, Zea Mays
atcaggtgcacgaccatccatctctgaggggcgcgatccaaggggtacatttcgttgctgctatgttcgtccaacaaagattggcatggctagtggttctacttcgcaactatggggcttcgtctgccgctggtaacgacctccctgccttccttcccggggtgcccttggaggcccccaaaagctgggtatgggcatcccaaaggacgaggagaagagaacagctagaggtattgcaactgtgttaattcttcgtggtcttggggtcatgctggtgggtgtgattggtaattacctccaccgggggtggctcctgtcatggtcaggcaattgtcattatacaatatgactgtcgaggcactgtcaaaaggcactcggttgatcgccccacccccagcgacacgaagattgcttgctggctcacggaagccaaggaaatttgcaaagatgcagacgaagccgtcatcccatacgttttctcgattctaggctgcccttcgatgcatactgagctaggattcatggagtttgagtttgtcttgttcccctactttccttcttcgtctctactctttgtcagtttcgcaccctctgatcctccttcttccttcttccagccttcctccccggtgctgtgggacaacctcattcccttgttgaaaagtgcggtggagaaggagacgactcatgcatgggtagagtagtaatggaaggacaaaagagatagggtggaaaagaagtggtgtagggccaagtgccaaatgcatagtgaccatggtgtcgagagtgactcaattgatgaggatgaagataatgacaatgcgagtgtgggctctgagctttgggccattcctgatgcctccctcgatgcctcaacaactgactctgtctcgacttttcctggcgaggtgccgagtgcctttcccatcgttgagaagactaagttcccaacactccctgccctttttctagaccaattgcctcggtagcacttgcccctctgcccatcgtgccctcatccgaccggccaccgagggtagcttgtgggggaaattcttctgcctctggtgtgtcggatatctcggctaacacaccattggggccacccacactctcctccaaggtgggtggcaggactgatgcttcgtttgggtgccacgggggtgaggcgccttttggggggcaaaggttcgtcagggcacgactaatcaggcgaggaccttatgggtccccatcgtctggctccttttttgccatagctctcgat

SEQ ID NO: 64380 - DNA, 374 bp, Zea Mays
tgccgtggcgagctcggtacggtggccggaattgtttaccggttggagttatccacgacgacgatatttacatgaccccgatcgctatccaatcaatccgagcatgaatcaagacggcgacaacatgaatcgcgcgtggctcgccggtggcgaggggcggaactgtcgatctgatcttattcagatcactgtacaatgacattcttctttagtgcacctgacagtctaatttgcagggcctgaatctcaaatctttacataataactgactaatctgcctgtatcaaagttattacccaatgattcagctacaatcttgctatagcaactatagccaaattcctagtagatcaaggttgaatcctagaccaaag

SEQ ID NO: 64381 - DNA, 469 bp, Zea Mays
tacgatatgaatataaagggcgaacacaactttttgatttccaagattagttaaggaacaaggatggtttcagatttccgcctagcttcatcatactacaagtgcgtacaagtgttataatccttaacatagatccttttgaactttatagattacagagcatgatatccaaatcatttttttgatccatgtatttctttgagcacaaattgagagaaagacttgagcgggattttagggcaactagaatagagcatcatattgtttgcatatagcagatgacaccacactttattctctttataaagaggcaaaatacaataggtgtgaaagattctccaaatttattcatatatcacttagcacaattacaatttctcaaaggggcaacaacttgacacttttttcgtgagacatactccttctagctaaacgatatattattcttccttgatagatgtaccaatct

SEQ ID NO: 64382 - DNA, 615 bp, Zea Mays
gtaaaattttgtttttgtgatactgaaattcggttgctgcacaggttctgacgcatgggcctgcgcaagcaaccgctgctggcaatactaattttgtggcggtcgcaactgttgtgcgtgtcgctgataatttatctggttctggatctgagtgttttgagtctgatggtgagtctaggagtttgttttcctggactgtagagtcctcggatgaaggcttggattattttgctgcattagatgtggccacggcggtgtccccgccgcgggtggaggttggtgaggtggctgatctgcctagtgcgaggaccaagtgtcggcggcgaagggtggtgtcgaagcatagcgtgggcgaggtttcacgaagtggaaggcaccgtcgtatggggatggagtgggaccatcttcgagtagaccggtttggtaaacgagaactattgtcctcgccgattgggacgagcataggtgagggtgatctgcgaaatctctttaagggtgaggaattgagaataatgttgttcaattatagggagttgggtatcatcccgaaggttgagccgatgtagtatatggtgccctcactgtgtatgtaactgcaacttgtattctaatgtg

SEQ ID NO: 64383 - DNA, 680 bp, Zea Mays
aaaactttctgagatgctctatattccatgaattcccaatttccgtgccgtctatctgagtgagacgatatgatccaggccgagtgacttctgctactatgaacggtccttcccatagtggtgacaatttgtgtcgtccttcccccgttagaattcggcggaggacgaggtctcccgctgcaaaggatcgatgccgtatggccttgtcgtggtagcgcctcagagtttgttgatatcgggctgactggattaccgtgttcagtcgttcttcttcgagtacatcaacgtcttctagcctagtagcttcagcttcttctatgctctcaaagatcaaccttggtgccccaaacttgagatcagcaggtagcactgcctccgagccgtagaccataaagaagggagtatttccatgcagagctcggctaggttgagttctcaggctccaaaccacatacggcagctctctgatccactttcctgtgaacttctcattcttgtcgaagactttctttctgagtgcttctaatatcatcccgttggctctttctacttgcccgttggctcttgggtgcgccaccgaggcatatttgatctgaatgctcttttgctcgcagaaatcgatgaactctaaactggtgaagttggatcccaggtcagttatgatgctattcgctatcccg

SEQ ID NO: 64384 - DNA, 404 bp, Zea Mays
aaatatttcaaagatttgtggggacggtacaataagcttacgcgacagttgtcaagtggcgcaggcccgataaagctctcacttgaagaggtatctcacctgaacatttcagtctttctctatttatagaacttaacactaactgacgctttccattgcagataaaaaaagaacttgaatcgggtaaatacgaacgtatgttgcaatatttggatcagctcacacatatatttataagctgtgatgagcataagtcaccatcagtacctgcgtatcgtgccaatattagatgtgggaacttaagtagtgcaagtactgggaagcgcagcattgacgagacctcttccagccatgttcggcagaagagctcgaaagttcatttggctcagtcattacaaaatgac

SEQ ID NO: 64385 - DNA, 504 bp, Zea Mays
tcatctaatttaactgtcctctggactgcacactaattaccagaaaaagcagggtccctggcgcaagagatccaggacatagggcacagtcacccttcacccaggacgacgggttggtttcttaataacttaggggcttatttgcaaaagaagtacgacgaagaggtgtagccgtcagattagaagttcgcgacgcagatcagttcgaccctataaacgaacaggtatgcaacgaccaccattggattgatgatccacggaccaaagcattaagatcaacctcgatcacacatccccagatcggcgacgcaattttaatgacacgaagtggtatgcgccgaacccatcctgaccgtatcccagagatccgacgatcgacatcaagcagccgattgtttaatctccaccgctcatctggaatcgacggtgacaagttatctcctaccctggcggccaaagacaacggcgctatcgccctgcggcggcgccctcgctggcgtggag

SEQ ID NO: 64386 - DNA, 769 bp, Zea Mays
gattgcactcaccctaaatcctaagatgaggaaggggcttaagtgttttgcctatcttgctaagcggtcatcaagcacatgaacacgcgaggatttagagtggatcaagccgccggagcgtaataccctactccactgtgtgttggattgttgtggaagcttgagctgtgtgtaagcttgaatgacttgcgtccaagtttccctgtctagtgcttgcattgtaacgttgtatgcctccccttttatagttcaacaggggcatgtacaagggttctaagccccgacacatgggcccagggacaaatagaaggatggaacttctgcttgccatgcccgtgtaatcttcgtgcgccctgacacctgagatatcggtgtgcagggggaaacttctcatataagggatgagtacagtgcaccacgtagcacgggcacactatttcgacaatggactggacaggtgcgccgtctgcagggtggccctagcgccacctgccagtggaaaggacatgatgcaataaatgccgtgggggcacatcatctgtcagaagggtggacaggcggcgtgtcctctccacaataaatgcggaggccgcgcggctcagagcccttacgtcatgctccgcccgctagcctacgtcacggacaataagccatgttgctgctttagacccttggccgagcggggggcggaggcgctacggatagagccaggacacgcgtcagtcctggacccaggcctaggttatgacactccttttctcgggacctt

SEQ ID NO: 64387 - DNA, 1169 bp, Zea Mays
gaacatcttaagcctaccacaaagctctttagcaaattcccaatcctctatggttggcttaaaaggagcacaaagcttttctttaattgctaggcgatcaaacactacttgataatcaagtgtggtgctaagcataatgtaggttgaattccatctagtcttacaatcgagagctatccttctctcgtatttaacattcatttgtgttgtgcgttcaaaacgctcatgtctttttggcgtggcacaccaaaatccaacactatcacgcaccctttcaataccctcatccataacactcattccatctttgactataagatttatgatgtgtgcagcacaacgcatttgtaacaatttgccatctagcatgagagaggaaaggtgtaacttatcttgcatgcaacacatcaaattatcattagtggtgcagtgttcaagagtcactatcgagattttcttctcaatttgccaatcttgtaagacttcgtaaagaacatcacttatagtttctgctgtatgtggagcgggcacatatatgaacctacagcaacagtaataaatgtaagcaccaaagaaactagaattcaaccacaaatatgaactacaagtaacagttacctcaaaagaaatgatttcagcttccattcatcatcaatgaaatgtactgtaaccgacatatatcctttttttatgattagctgtccacatatcagtagttacagcaatccgagattgacacttttgaaagaaattgatcatagaactcctctgcacctcatacatatctaaaatgtcctttttaatagtgttcctagacattgttttgaaaagaggttgtagagctgcacaaaatctcctaaaaccaacatggtcaaccattgaaagcggatactcatggacacatatcattattgcgagctctttcctagcaacttgttgatcaaaaacatacttatcaaaattattgctccatgttcatccttactcaacttcaaggttgcttgctttaatccttttctaacttgtcgtgattgacaacttccaagatgactacgcaaatgagttgtactagctttactatctccaactaattgctttttacaccaattacattgagcttttaatttaccaccaaaagttacttgttcaaactctagccaaacatcaga

SEQ ID NO: 64388 - DNA, 469 bp, Zea Mays
cgcaatttgtatccaaattttggagtgagttgcataaattcttgggtacgaagttgctccatagttctgcataccatcctcaaaccagtgggcaaactaaaagagtaaatcaaatacttgaagacatgttacgggcatgtgttctagaatttctgcagaaatgggatgactgtctacccttggcagaattttcgtataataacagctatcaagagagcatcaagatggcaccctttgaagcattatatggacgacggtgtcgtacctccttgaattggtctgaaccaggagaacggtggtttttcaggcctgatatggttaaaaaatggaagaaaaggttcaacgaatcatacataacttgaaggaagcgcaagctcgacaaaagagttatgcagacaaacgacgccaaccctagtactttcaagtcaaagattacgtgtacctaaaagtatcaccaatgaagggtgtg

SEQ ID NO: 64389 - DNA, 643 bp, Zea Mays
tcgtttttgttctttttccacgctaggttttcacacaagtgtaaattgctagtttggtttcaagcttacacacaacaaagatatgaaaattgaggggacattatcactaccatatgatgctaaagtatacaaaatagaaatgtacctttgtagcatgtttactacttttcattttatccttagcatcatcttgctagaaacaagtgaaactagacaccacatgagatcataataaatagggttctagttactcatttcacactaagactaggcttatagatatcactaaatcaatcatcattcaagtcttagttctagcaaacacttacacacaagtatgtaggaatatatgacaaatgtgatgcaagcaagcaatgtagtgcacaaacaaatgcatgaaacatatattaacgagcttgctccccctacttgtgtgcatctcttgttcaataaaatctcataccattatactttgctcttgatccattcgtattcattctaactcaattgatcagtagctcccctgagttcatgtccaattttctattgtgcatatttctatatctttgttccaacttgcacatttgcatatctttgttccaacttctccccctttgtcattaattaccataaaagggttgtt

SEQ ID NO: 64390 - DNA, 374 bp, Zea Mays
gttcaacatcgtaggccttagttctcggggagccgtattctaattcagagtgcaacacgcctccgcgccaaacgctaggaacaaagacgtgcaacctgtcgcccgggacgacgtggctcgcaggctccagagtactgcaggtagttcggtcgcccatcgtccgacgaactttttgagcttgtaaaaaatccgtggtttgaggcattgcaggattaggccattcgcgcgctcgacctgcctattggattttgggtgcaccaccactacccagtcaacacgaatgtggaagtcatcgcagaactggaggagcgactccctcgtaaattgggttccgttatcgatgatgatggagttgggcaccccgaaacggtaga

SEQ ID NO: 64391 - DNA, 573 bp, Zea Mays
ttgttctaggtctagcttgttgggagcatgtcaaacttgtcctggcttgcatattgagctagcagagaatatcactaggatagccttgcttgagaaggctagctcaacgagtgcacatgtacctgcgaagtgtgcattgtgtgagggtttgcagtccgtgcttgaatcctgcagacacaacaggactaggattgagacgaaaacacataccttggatcaatcttgagttgggtgtatagcaatgagccccagttgggaatgatggctagtcaattcaagaggagaactggtggactagggttaggttttgctgctaaggctggtagtggcgctagctttagcaaggttggtgagtgtagtggcttgaatccattagagaaacatccagcctccctaaatcttgtgaaacctttccatccaaatctgccacccttgttgtgagagatggagtgcttgtggagccaatgagagcccctacattagaaacaagtgtggtttccaaaaccaaactatatcaggaacacacttgacaccttacctgacatctctagtgatcccatttctagtgctcct

SEQ ID NO: 64392 - DNA, 433 bp, Zea Mays
tcagtggcgaggttaaagcttttgaagagattctcagtgacagagtggatttttgcgccttcgccgatgcccgcagggctacaccaattctagaaaaggtcggttgtgatcatgcgaaggctattgtttagctagagtttgctctctcagccgatgacatgaaaaatccttcagccgaagcttctgcgctaagtggtaaattttactccgaggtatggctgaatggcgggtaagaagtcaacgacgaagctatcagaagaaaagaaaaggaaactcatgatgctttggaagaggcaagaagggctgaagaagttgccgagcgggctaggattataagtgtgcatttattgtggtcttagcctcgtaatccgttttaacttcggaactaacaaacatatactacggtgcagctgaactatctctgcctccggag

SEQ ID NO: 64393 - DNA, 1158 bp, Zea Mays
acggttctctcatccctattacctctgttggctccacatctattcctactgctcatggtcctttttctcttaatcacgtcctggttactcctcaaattatcaaaaatttaatttctgttcgccgctttacttgacaataattgttcagttgagtttgacccttttggtctctctgtgaaggatcttcgcaccaagaccgtgatcgccaggtgcaatagttctggtgatctacccgttgctaccatcaccaccacgtccccacgccttggttgctacctccaccaccctctggcacaaccgtctcggtcaccttggatcagaaggccttcgtcacctcgtccattcagctgctatttcatgtactcatagcacttgtgattccctttgtcatgcttgtcaattaggccgccacactcgtttaccttttacttcttccacttctcgagcatcacgccattttgatttaatacattgtgacttatggacatctcctgttgctagcgtctctggttacaagtattatttagttatcatcgatgattgctctcactatttttggacatttcccttgcgcctcaaatccgacacctttcccaccctctctcatttttttgcatacgtccacacccaattccacaccaccatcaaagccgtgcagtgcgacaacggtcgagagtttgacaacctctcctcccgttccttcttcctcactcacggtgtttcacttcgcatgtcgtgtccctacacatcccagcagaatggcaaagccgagcgctctatccggaccattaacaatgtcatccgcacccttctcttccactccagcatgcccccacactattgggtcgaagctctccataccgccacctatctcatcaaccgacaccccaccaaaactctcaatttctccacccctcaccatgcgctttttggctccccacccacctatgaccaccttcgggtttttggatgtcgttgttatcctaacctctctgccatcgccgccaacaaacttatgcctcgctccatgttgtgcgcgtttcttggttactctcctgaacacaaaggttatcgatgcctcgacatggcctccaatcgggtcatcatttctcgccatgtcaccttcgacgagacctcctttccgttcgccgaacatac

SEQ ID NO: 64394 - DNA, 538 bp, Zea Mays
gcggatatagaggggaaaagaaggcatattgcttcgaatcatccgatatacacatagtagcgtaaatacagataaaaaagcgtggaaccctagcttaaaccgaatagtaagaatgagaaagaaatcaaattttaatcccaccttagaggaagcgcttgaacgaggacactaccgagatcgtcgaggcgtaggagcagacggtgctctccgccgccgtccttcttcgttcgccgcctagatgtctgtaccgaatggcaagtgttgttcgagaatggatcagattgtgtctatagtttacgttcaaaaaaagattgtgtctatagtaagaaaaacacacgtggctcttcacttttttaacgaggccaaagacgtttctagcgactggactctggacacgcggtagccgatggactatggatgtttttagttgcctggcaaaccagggccaggtcctgccggtgcaagcaccttgttgtttgtttcccatacaacctcatgggctagttccaattcatacatgtctggaccacgtcacagc

SEQ ID NO: 64395 - DNA, 423 bp, Zea Mays
gcgcagcctcatcatacaaattacagttacatacacatagcgagggcaccatatactacattggctcaaccttcggaatgatacccatctccctataattgaataacattatcctcaattcctcaccctcaaaaagatttcgcagctccccttcacctatgctcgccccaatcggcgaggatagcaattcttgcctaccagtccggtccacgcgaagacgaccacgctccatcccaatacgatgaccacttcgcgatgattcactaactctccgtttcgccaccgcccttcaccgcctatacccagtactcgcacccgggagcccccggaaccctccacgcgcggcgaaggctccactgcagccacatctaatgccgcaaaataatccaagccttcatccgaggactcctccgtccatgaaat

SEQ ID NO: 64396 - DNA, 726 bp, Zea Mays
tgccattgtcattgagcacttgggttggtcggtcacaaagcattgctagatctcttagacctttcagattgtcctttatttgtttcaaaatgcatgcatgtgtgtatgagggcttcagcaacattactttcttggtgcatgacatcaatgttgtcacaagaatcaatgacggcatataagggagctcacatagaccacatatatgtgtccagttgtggtccactctgaatccttggtacttgtctccctttttatttaggacaaggttgttcagctgagcatatatttctgctgcgttcagacgtttaggcagtcctttggtgaccatggtgttctttataaagtttttcttatcgctcctaaaggggtgtttcctgggcaaccagcatcaatggcaatcgaagtaactgatctttccaccatgagcaagacggaagcaatctatatctaaactgcaatatggacatgtcaatctaccatgtgtactccaaccgacaaaaatagcatacaccatgaagtcatgcaccgaccacaaatacgcaactcaaagtttgaatatctgttttttaaaacattgtatgcttcgactcctttccaaagctccttcaactcttcaatcaagggtttaacataacattgagtttctttccaggatggtccgggtcaggtatgattaagcaaagaaatataaatttatacttcatacaaagagaaggtggaaggttg

SEQ ID NO: 64397 - DNA, 718 bp, Zea Mays
atttatatatcgaaaatccatttataatttaatttctctgatttttctactctctggtctgggcgcaacattactgagaaaagcaggggcctcggggtaagtttcctaagacacagagaatagttcctgtggaccgtgggttgattctctaaaatcataaggttctttccgcaactgcgcaaacgaaggggtacgaagtgttaacggccgtccgatcaggcgcggatggcccggattagatcttccctggttcaggactgacgctcccagataccgcttgatcgcgcgccaacggctcagatttaattaacctagatccaatcgcacccgaacgcttccgatcctacggtcccggttaacctatgcgaaaggggtacgcgcagagccatcccaaccgttcaccccatgatcgacggtcagcaccaaccatcgaaacccctccccgctgacggccgaaccagggcggcgccaccatggttccgcgttggtgcactcaccggagtcacccaatcgccgcacaccggagcccaaacttcaatccacatgtcccacgacgagtacgcgcaaccaggaatcaaatgagggggttctcaccgtggttttcgaagccgcaagaccccggtgacgacgcggggaagatccgccaggcacaccaaattccggtgaggaattactcgccgacggagactccggatcgcccaaggacgccgcgacaaca

SEQ ID NO: 64398 - DNA, 380 bp, Zea Mays
cactagctgaactgcacactaatttcagagaagcttaggggctctggtgcaaaccttcctaagacacagagcgcccctaggtgtactgcaggttgatttctacattttccagggtctcttatgctattctgccatggcgaaggggtaccggaggatctgagccatccgatcaatactagacgcctcagattagatccatatttcatcgaaccggtatcggatacggaccgtcagatcaccatccaagggtcgggatctatcgacactagcgctctcggtcacccacacatccgcagatctacggctctgatttgttttccccaaagcggtaagctacaattgatctgggccgctcatcaaaacatctatggttctcattc

SEQ ID NO: 64399 - DNA, 683 bp, Zea Mays
tgactgaattactgtattcaatcgttcttcttccagtacatcaatatcctccaacctggtagcctctgcctcggctatgttttcgaagaccaatcttggtgctccaaacctgaggtcggcaggtagcactgcttctgagccatagaccatgaagaaaggagtgtttccatgcaaggctcggctaggttgagttcttaggctccaaaccacatacggcaactctctgatccattttcccgcgaacttttcattcttgtcgaagactttcttcctgagtgcatccaatatcattccattagccctttctacttgtccgttggctcttgggtgtgctaccgacgcatatttgatctggatgcttctttgtttgcggaaatcaaagaatttcgagctagtgaaattggatcccaagtcagttataatgttattcggtatcccgaacctgaatattatatcttgtatgaattccactgctttagccgaagttagagaagcgatgggtttgtactctatccatttagtgaatttgtcaatgacaaccagcacatgagtgtatcctccctgagctttcttgaagggtccaatcatgtccaatccccaacacacaaatggccatgttacgggtatggtttgcagttgctgtgctggtaaatgctgctgctttgataagtattggcaggctt

SEQ ID NO: 64400 - DNA, 426 bp, Zea Mays
gccaatgatcaggtgagtccggaggcggctgagtcatgggtcgtccagcttgtggtccatgtttatgcgtgcattctgataaaccattggagtacaagcactggacagtaccacagtgatcgttttggtcacaggaatgcaggccaaacctgtatatcagtatcaccgtatgtatcactgcacacggttactatcggacccgatggaaaagaacgagatacccctgcgaggccagagagccaagagaaatactagtagatggtatttgcaactctccaataggagcgccggtttggtgcattgttggctcccatctccatgacccatgagaggtccccgttgggcatccctcgagttggtacagagatccagtggtgagcatgcgcagcgtgattggatgcgcatccggtccaggcttgtcatgcg

SEQ ID NO: 64401 - DNA, 272 bp, Zea Mays
ggtttgagttgtgacacatggaaaacaaggtgtatctatgcatcctcaagcaactgaatcttgtaggccacttcaccaatcttctctaagacagtatagggaccaaagaacttaaaagccaatttaggacatgacctatttaccactgaatgttgcacataaggttggagcttaagcaacacttgctcacctacctgaaattcccatggcctcctcttaagatcagcaaaatgcttatatcgttgctgagccttcaacaattgttcctgaag

SEQ ID NO: 64402 - DNA, 539 bp, Zea Mays
gttctgattaatacaaaccatataaaaatggagatgattgaagggactaaaatctctttactattcaagcaaaacgatttagcccctcccatcccctatattctatttgctcccaaacaaacacataagaaaccacaagtgagataaccgacctcctataacaccacccacacctagtacatcacatgttcatactcgattgaaactcgaggaagaccgggaaagatagatcttctgtgaaaatattagtgaattgagagatcgttaggacttgtagaacatgaataccatcaatcgcaacatgttctcggatgaagtgaacatcaatcttgacgtgtttggtacactgatgttgcaatgtgtttgtcatgaggtagatggcacttatattatcatattagacgatgtgacatgttgtagaggctctagaagatcaacgaagagttggcagaactaggaggcctcggctactccattggcggctacacgctacttggcctcagcaatggatcgtaacacagtctgctgacacttaccag

SEQ ID NO: 64403 - DNA, 904 bp, Zea Mays
ttctaaaaaagaagatcaactaatgactgcagccttcggcactcgtccgaagcgaaggttaaatcgggtaatggatgctctgaactttgagtaccctgactatgagcgactggaccgaggcaccgaaggacagaagagaaagggagttgccagcgtcctaaataaagaagatgctaaattggtgaaagatgatgaagaaaaactaaaaaagagaaagctgaggcctgagccgaagacagatgcttcgaagaaaagaaaggttgcggctccgaagcagaaggcaactgacatagaagaagaaactgttgcaacaccttctgccaccggcgtggaggaaatcttaaaggtaatgactaaatctttgcctatcaagctaagtccactggggccacatctgacgaagctttttcagaaggaaaaggagtcctcgataacgaagaaagcagctaggccgaaaaaacgaagaattgttatagtgatagaagttattgaagggacaccaccagcagcttcggcttcgaaggcaccagctgttgagagcgcaacagctaccgaagctgcacctactaaagctacagctgccgaagctgccagagccgaagatgtacatttagaaagcacactttctaacatcgataagatacttctggacatggccacagaagaagctgccgcagccgctgaagaagccatggctacagtacctgagaaggagaaggaaatagctgaagaagcttcggaagaagaaaactttaactttcaaaacttaattgggcaagaattgtcggaggctgagaaagaagagttgagagaatatgccatatcctacgggtatcaaccaggggcactactcttcggcggtgttgacgatgaaaaattgggctgcgtccgagatcaaatcgga

SEQ ID NO: 64404 - DNA, 288 bp, Zea Mays
gacgaaaggaattacgacaggagatcaagagacgagaaacttccataactctaaaatcacaagagataggaaaatcatgtaactccatattaactccacaaccccaagagactctaaactcccataactctagaatcccaagagactctcataactccaatttgaactacctgagtggcaaaacattactgcatcgtgacgcaccacgccatgccatacgaaccacaacactcacaatatttaaaatggtcctttatgatttaatcaaataatttatatgagtcaaac

SEQ ID NO: 64405 - DNA, 289 bp, Zea Mays
cttgcttgtgtcttcgattcgcaggcaaggattagccctcgtggcgaggtcaatcgagcaacgcacggttgataaccagaggagaagtggtgctacgattgcggggttctagtcttgttgattggaagccagatcgtttgtatgacatctccaccaaatcgatagttaccttcacctgacggaagatcgggcaccccgttcctatcaagtggtattcaaagactcaggtattaccgtcaggtttaccctagtttagtttatgttttttcatcctataaatccagaaaat

SEQ ID NO: 64406 - DNA, 417 bp, Zea Mays
catttattcaatttaaacgacactggactgggcctcaattaaacaggaacacagggggctcggggtaacttttccgagacacaggctaaccatgcagtggaccgcgggttctattatctaaaattataagggttcaactgtaaatcgcgcaaccgaaggggtatggaccgacgctggccgtccgatcaagcgcggatggcccggattagatcgccaccaaatgaaaccacacgcgatagccgccctacgatcgtggatcaatggaccaaaaccacccatgccagcacccgatcctaaccgctagatccgatccaacgctcacgatctaatctgatccaatcggtaagttgtctctaaccatgaccgtcccactggatgcaacggtccctcgccatccctaacctgggtaccccggcc

SEQ ID NO: 64407 - DNA, 462 bp, Zea Mays
gttcccttcatcttcggcatccccaagcaacttgacgttggatacgtccagttggctaggtaatcttgcaccaaatccctggtgctgatttgctcagccaccaccctgaattctacctcggccagctagcatgttgaccctagctgcatgttgcacaggggcctggtcattccgaagtttaaggacagcgggcaaatgaccatcgtcatcagtttccccctcttcttctcatcagccttaatataaaaccattcacctttttagccggttggccatttggtgcggtaactgagaactggagccttcgtatccttgctatatgcaaaattgtagcagccaaaattttcatgaagactgtctgccctagccttcgtctggtagtgcaactcgtgcactcggcagaatgcttcggcatctaggctcatcccttggcttcggagggcccagatgaagacgctaagc

SEQ ID NO: 64408 - DNA, 279 bp, Zea Mays
ggtgcatcgtaggaacccgtcagtagttgaatctgactccgatgatgatcaagaaattcgtgaagaaactcatccgcgttctagatccaagcgtgggcgaggatccagaaatgtgatgcaaggtggtgaggcctcagggtctcatggtgctcgcggtcgaacggaccggaatccctccggtcggtctcgacccgcggccaatccacaggcatgggagccaactagcgatgatgacggaggcaaggatgatgaagttgatctcccctctgccaacacacc

SEQ ID NO: 64409 - DNA, 584 bp, Zea Mays
gattgactaaagtagctcatctcattccggtcaagactacttataaaggctcacagctggcagaaatatatatggctcggattgtgtgtttacatggagtaccaaagaagatcgtgtctgatcgaggttcacaatttacctccagattttggaaaagttttcatgagaatatggatttgaagttgaattttggttcggcctaccatcctcagactgatgaatagacggaaaggactaatcaagtattggaggacatgttgagagcttgtgcccttcagcatggtagtagttgggacaagaggctaccttatgctgagttctcatataataatagttaccatgccagtctgaagatgtcaccatttgagactctgtatggcaggaaatgcaggactcctctatattggatcaaactagaggaagacagttctttggacctgaacttatacaagaggcagaagaacaagtgcgaatcataagagagaatttgagaattgcacaatcaatgcagaagagctatgctgatacccggagaagactactggagtttaaggagggtgatcacgtgtatctgaaggtgtcac

SEQ ID NO: 64410 - DNA, 603 bp, Zea Mays
ggggtaacatttctaaggcacaggggacagttcatgaggatgtcgggttctaatccaaggaaacctagggtttcatatgctaaaatgccataccgaaggggtatgatcgcaccacgaccgcccgatctaagatctacgctgcagattagagccacattacactgaaccggtatgcaatctgagccacgagatcggacatcgacggtttggatttaaaacgtttggatcacttcgcggctgtccatttacgatctaagggctaggatccgatccagcgaagggttacgcgttgatctaatctacaccgtccgtaagcgaaccaacggtgcgcaccttatcttctacccccaacgcgacagcccaggaacacggcgtcgcgacgagtcagacggtggagtcctcgccggtgactacccaacccacggaatcaacgaaacatgctagctattacctagtgcaatcgaaagaggtgaaagaggcgaacgcaaccgtccaggactcaccagtgattatgtagcgcagtacgctgcccacggcgtgatgcggatctgcagtgccggcgagcaatcaccgatggcgtagccaatttgatgccgagctcta

SEQ ID NO: 64411 - DNA, 567 bp, Zea Mays
ccaccccctgccccatgagaaagattatagattctaagaaatcatacaacccatcccctataagtaaaaataaccaactttaggaatgattgctcttgcgtaaagaagaaactagaaaaaatgggaaatctgttgtttgacatttttcaaatagactggtagtagaaagcacccactaagcccccaaactttagaaaatcaccattaaataaccattaggtatccttggctgcaatctggcatatgggcataatattacccataaacaccaataaaactaagttatagggcagaagccacttctacacaagggttgtagttaaagtgccccctctgtcgtagatcttgttatttttgtgcagagataaccacttccattttaggccccaaattttgagaaagacttgtgtgggccaataagaaaccactgtaatttttataggattttttggaaatttctatatcagaagcgtagttcaacctaccctataaaagaccttaagagttaaaaggggaaagaaatccttgaatcctagtatgcaccttggacatgtacaaataaaaaaa

SEQ ID NO: 64412 - DNA, 1301 bp, Zea Mays
cagccgcagcagggcccttcacggtgggacgtggcgccttcgtgtctccttctatgaagactcttgactatccttttccattactgttgttacaacggcactaatgtttcttccgtaaggaaagattttaaagtcgtgagccaaacgggacgtaagtaatcttcgccggaggcccgggggatagggtctttttttatgccactcaccctcgatcaccttcagcattcgcgaagatgatttccggaggtgggcaaagtcatgacctccccaggcctagcacacgtctccaccaactcctcaacaaaacccattgaggctctcgaaccccccaatgccttcatcgtacctttcacctcaatttttctttttctggtagtcgcaactacaacattccctttcgagcagccttcgtctgctcggaccgtcaccttcttctttcctcgttcatccccggcgtcggtagaaccctcctcaggatatgggtcatatcgaaggccattcaattcaaaacacggttcagcataacattcgaaccccgtatatcccaactcctcgtcagctccatctttgctgagtactttccaataattttcactgcctccgcttccacctccctaacgaaggcggccgcatcccgccctcgcaacttaatggcgaaggcggggctcagcaccatccgattattcaagaagggcatcgggcgcagcttaactgcacctagatcctagccatgagcgagtggtcataccccgcacgtaataaactcttcggtgtgcgccctagcttatcctagctgcatgccaaagggcgtcttcacccttatctcccttcttcagcctaaaccatgggaaacacgatataacaatgcgagcacagaatagatggaggcagcccaggaaccccttcgatgtcctccaacgccatgtagaaccaaaaatcccaccaattaccccacttattcttggtgcacgacacaatttccactacttcacctagagtgtttccagtcctcggtgtgaaggtgcaaatttcaaactgcgcaaccttgccaccaatcaccttttttgctaatggagacaataattcttggcgaagacctcgaccaaaggctccccgtcgtacgaagtcactgcccacacaaacttcaccagggccaccatggcgttcagcattagctgatgaatctaaacctcgaaccgtcgtagcacttcaactatgaactggtgcgcgggcaaacaaagtcaggcagtgaataacgcttcgaaaacaacaaattcccccagctctaggacctcttcggc

SEQ ID NO: 64413 - DNA, 919 bp, Zea Mays
tccatgatctccacattctgcttgttctgcccgttgcgatgggctacggtaaacgagtcgtctgtcgattcctacatgctgcacgtacaggaggcgtcgggtttctcttgtacgagcacttgcatctttcttagactccaacagcttttgtccaactgaggcccatctggaggacttcgggtagcccatcaagggccattcggatggcccatgaagcgtcttcgggccatggtgacctgggggatatcaatcccccacatgggcctacaaacaagggcaacataggaacacagaggagatggcaagaatggcaagggcaagaccttcagagcaacctacaggcagtggcactagaggcaaccatttataggcgcacaagtacgcttagtgtcacacgttgtctccaagggccaaccactacctagttaccagcaccccttcgcttgccaagcattaatagcacattggctcatttcgtgaaggatcgaacgacacatggatcgacaacaacattgactcatgtgctgaactcaccaactcgtgttgcctccctcgcataccatgacatttcagctctaggaggacactcaccaggtaaccagcacttttcgtcccccaagctacattaaatgtccgacaactcatttcctagaatttgacaaaccatgtcatgtgtacatgtccccttatgtagcaaaatgattcacagataccaaccacctcgactcccacatcacacaggtagcagtcacggatgggtccacaacttattacaaatacaactcccaaacccctaccttttccaatacccctacttttacacccatgtgttacagggaagaggccacccattcttcacatcctagagtcaaatttatgccctaataggctatctcaaacaaccagaatggtcaccagg

SEQ ID NO: 64414 - DNA, 623 bp, Zea Mays
ctataaagggagacatggatgggtagcttgacctaggtaagtctagtaataagttgtgatgcacacttatgaaatctagttatatgtagctctgtggaagcacaagatgagttgagatcaaacccaattggacatgtccattgttatgcagttgtattggaatgttcaatgtgcaccagatacatggcatcaaatagaaatgtgtcttgttgcataagtagatagcttgtggaagcccgagatgagttgagatcaaacctaattggacatgtccaactacactagaaatgttcgatgtgcactgaatatagggcatatgataaaaatgtgtcttgttgcataagtagctagcatcaaaatgcctgatggcacataaagaaggctggaactagcatgggagttagtgtactcaaagaacatgtatggtgatgcaccaaacacctcattggacatggtactcaaagaggtctatagacatgtacctcgaggctttacactcattggacttgtccggtgagactggtcaagaagcattggatactagtagaataacgactagtttagaaactactcgttaggacatgcacctgatgtgtttgatgcaggaggttagtgtacatcag

SEQ ID NO: 64415 - DNA, 797 bp, Zea Mays
atcgcaaacgtgcttgtgttggatttaagtaggcgcgaacgtgctgcgccgatttaagtcattaccaacttaaaccgatcgctctgttagtagggtatagtggtcaccccaagttaagtaagcgtgagcatgtcgcgccgccttaagtcattgtcgtcttaagccggttgctcagttagtagggtatagtggtcaccccgagttaagtaagcgtgagcatgtcacaccgccttaagtcattgccgacttaagccgattgctccgttagtagggtatagtggtcacctcgagttaagtaagcgtgagcatgtcgcactgccttaagtcattgccgacttaagccgattgctccgttagtagggtatagtggtcaccccgagttaagtaagtgtgagcatgtcgcaccgccttaagtcattgccgacttaagctgattgctccgttagtagggtatagtggtcaccccgagttaagtaagcgtgagcatgtcgcaccgccttaagtcattgccgacttaagccgattgctctgttagtagggtatagtggtcacctcgagttaagtaagcgtgagcatgtcacaccaccttaagtcattgccgacttaagccgattgctccgttagtagggtatagtggtcaccccgagttaagtaagtgtgtcggttgacagtgaacaattcgagtactttttgaagtctttttattgatgatatatttcccagtttacaaagtacattgtcttcccaatagcttttgagatctagctaggggtaaaacttcctgagatgttctatgt

SEQ ID NO: 64416 - DNA, 327 bp, Zea Mays
ctatcttgcttcagctttccacccatggcgacatcaccgagtgattcctctgcttcttttgtctcccattcctctagccgtgaaccaaccccagagtgggatcctataccagcatatgagaaacatgcacctttgcactgggatgcagatggatgggactttgaggttgcatcggaatccgacggcgacctcaccgacggggacgacctccagctcctcgttgacggggagctggactctgacaccagcactgactggcgcacgacggagaatcgtcagatgtggagtccttcgacaacgatgacgacccgatgtctggacattgga

SEQ ID NO: 64417 - DNA, 1663 bp, Zea Mays
ctctaggtgactttcaagaagtctaggatggggcccagaccgtcttcctcctcggagtcaaggcatcctgaggggaagggaagatcagcgtacatgctggtgaaggcacttgtgtcaaagtttggttgaaaggggatagggttgaacactgatggttcccccctagccgctgatagagctgacaactcctaccatgatgaggacgacgtctcccaacccgcaggtgggggagccggcaaggctggtgcaactcgacctacggtatggagggccggcaaagctggcgctccccacgccataggaggaggaaccaatagagtcgatgttgaggtcacttgtgtcgccgacgatgctctaggcctgatgctgacgttcatcagggccctcgcaagggagtctgcttcgttagctagttcaggagcatctacgggatacagggtgctgcacgtggtccggttgcggttgctccgtctccgcctcctgcgacgagaagaacggggacaaacgtctggttgcccctgagtgtcagccaggggaccaggtgggaggagcaccttgtcgtactcgatgtcgagcgacatgaactccagactcccaaacctgatcaccatgtcgagcctcaaagggtgctggaagctagccatctggagtcttgatgggaacttgaagatttgcatgcagcgatcccctacctggcgcgccaactgtcggtgtctagacctgaggatctaaccaaccagtgaaataatgttgtgtgcccctaacccagatgggtgatgcaagatgacacaagtatgtatcctggtttgggcaagagaaagccctgcttgcagcagagggggatgacacttatattacttgcacctaagtgcttgtagtaggcagtacaagctgagcgtgagagggaaggatcccaagtccctagggttgattgaggcaagtgccaatatcgtggaggaggagaaaaccgtgaagtgttcgcctgcctccctgaagccgtaggctgccctatttatagcctcaaggaggactaccaggagtactagagttggccatgtatggtgaggaggtgtagacggtatggcccgaagcatgggtcttgtacttgctattgacttgtgcccgcccgatttctgctgagagccgaggccagggtcgaggattcgatcacgtacccgagccccttccaaggaggttgcccatgttgtagtggttgacacagtgttgagtatggcaaaacgcactggagtaatacgcaagctcgactgtttacggtcacatcgggcgcctttccattgcagatatcgaggccgaactcaggctcggacgaggtgaaagtctgctcgaggtagaggccaagcccgcttaaggattcgaagacgtgtgtgatacacctaatggagtggcctcctgcgggattcgcaaggagcacgtagtcgaggccgaggtcgacttcgggcgaggcagagtttgcgcccgagggccatcctgcactcttgttgtatcgtgcgtcccatcgggggttgataggcggcgtgtgggaacagtggtcgcatgcgttatcgtagttggtgaagcatgacaggaccgcgatcttgttgctcatgtttgcctgcaactctgtgtgcggtaggtttgcgcattgaatgctcctatctactgc

SEQ ID NO: 64418 - DNA, 513 bp, Zea Mays
aaaatacattcatatatatacaaatgtctgatgtttgttccatacattaatattacatttcctagttaacaagaatctagtcttctttgagtattctctcgtcagcttcattcagtagcttgtcaacaacttcgtctaagattgtattggcgaccttcatcacatccaaagcctcttttataacggcgtcagcctcaggattgaatggctccggaggtggcgaaaggcgactgtagcaaagtatatgataatcagggttcgaagccataaatgaataataaagcaaaagggcattaaatggaagtacctataattaatgcacgttcggtagcttcttcagcttcctttgcttctactcgagcatcatgggattgtttttcatttttccttattgcttcgtccgctatttcgcggccgcccttcatccaaacatcggaataaaatttcccacccatcagagtagcttcggctgaaggttcccttgtatcgtctatggagaaggtaacttctgcc

SEQ ID NO: 64419 - DNA, 362 bp, Zea Mays
gcaactgattaatatgaactatacatagaacagtaccaataatcaaatgtagagttaattgaagtacaattataagtgcatatgaggacctttgcaagaacgacacgtgcattaaaaacaattatatgatataagcatagttatgacatttgagaataaggagttagggacaagcaaagcaacgtttaggatagtctacacacacgttgcatcaaggggtggggtggagggagcgcaaacatactcacctggcgataggtattaaattgccgaacaagggtcagcccgtcagagttactcatctgaacttctgaagcattgatgatagcaggcatcaactccaaatctggcgagacatagtt

SEQ ID NO: 64420 - DNA, 581 bp, Zea Mays
ggttcgaagctagcaatcctgttgaagggatccggtcacatgggtctagttgttcaatcccttagcacaagattacaatgcactatacttctgttacggggtatcggcaagatcaactcatcaaaggttcttcatcaaccactgaatcactttcaagaaccttgagccaattatactaaaaaattggcttgagcctcgagggtttgtgggggatagatatcccccaagtcctcgtgacacgaatacgctacatgggccgcctaaaaggccctcgatgggttgtctacggaacacgtcatgggcctcggcatggtgcaactgaaaccgaataaagcagtcacacagcgagtcaaggggatccccaaagacgtgtcccatgcatgcagccatgtgcaatcctcgcgcgaagccaaccgaactctagaaggtccgatgcgtctataatagacatgggtagacgcgcataagattccgatctgtacagggctacctcttcagtcgactatataaggttgagaaggtactcgtacaaaaaaagattagacactatgtgaaacctcattagacctagctagatccgc

SEQ ID NO: 64421 - DNA, 294 bp, Zea Mays
caccaatccaccaatggagaatgcagcacaccaaaggaggaaccatgggggcggctagggtttagagggaagtgggtgcagcaccttgaggaggagaggagcggctgcaatggggaagaaggggggcggcggctgctgcaaaaatgagggaaggagggggacagctgcttctatgagggaaggggaggggcagctagggtttttgagaagaggagggagcgatgcccccgatgcccttgatgcgaaaccgacggctcacaaccaaatcccccatccatgccccgatttagacaa

SEQ ID NO: 64422 - DNA, 427 bp, Zea Mays
ggaatgcaatgctctgagccaaccagagtcaaattctgatgactagagggagccgatcatcaggtacataaaaaatgaggaggaaccagatgacaaaaatgcagcagaaagaattgcaaggcagtcagctcattatactctcattggggaaatgctatacagaaggggtgcatcaggagtccttatgaaatgcattctctcagatacaggaaagcagttgttagatgaggtccatgctgggcaatgcagagtacacgcagcatccaggaccctggttgggaaggtcttcaggtcggatttctactggccaacaacaaagagtgatgcagccgagttagtccagaggttcaaggcctgccagtacttgtcaaaacagcaacatctaccagcacagcaactgcaaaccatacttgtaacttggtcgttc

SEQ ID NO: 64423 - DNA, 627 bp, Zea Mays
caagtgcggcaaagcggttagggaagtgccgcaacggagcttttatacgcgagggggaaacagggtcactcttcaacgacccgccgacttcggcgcggtctcccgacgagctcgggagcgtctgttgcgggaggttaacgacgcgcatacgagtgggtgacagggagggcccacacggtagagactccagtgaccacgcagtggaaaaatgaggctaacagagtggccccagctgtcggcgcgagcttctggtgtgggctgcacggtgtgaatacagagttgggccggattagagcagaaacggcccgtgaagcattttatttttttccttttccatttctaattccttttccttttctcttctttccaaattcaaacttctcttcaacttttaaatttgaattctgtggcaaacttgtcttccaattaaatatcccacttgaatatgacatgatctaaattgatttatttttaagaaatttatttggtgatggctaatgcttttccccccttctccacatttctttagaattttgctttccaagttagagtttaaattccatgtgtcctttaatattttaatatattgttaacaccacctttattttattattcataaatgcacaa

SEQ ID NO: 64424 - DNA, 468 bp, Zea Mays
agctaagattttctcgaagatagatctaaggtcgggatatcatcaattaaagattcgagcagaagatgtacccaagacagccttcaccacgagatatggattatatgagtttttggtcatgtcgtttggactgactaatgcaccagcatactttatgaacctgatgaataaagtattcatggaatatctggatcagtttgtggtcgtattcattgacgacatactggtatactcttcgaatgaagaaacacatgaagatcatctaagactagtcctacaaaagcttcgtgacaaccaattatacgcaaagttcttgaagtgtgatttttggctgaaggaagttgttttcctaggacatattgttactgatggcggaattaaagtagatctaggaaagataagtgaaatagtaaattggaagcaaccaaaggatgcgtctaagatcagaagttttcttggattgacaga

SEQ ID NO: 64425 - DNA, 424 bp, Zea Mays
gacattttcaccgatcacaaaagtctcaagtatatttttactcagaaggagctgaatttgcggcagcgtcggtggctagaattgattaaagactatgatttgtccattcattatcacccggggaaggctaatgtggtggcggatgcccttagcaggtctggggttccaaaggtggccttgccattgatcgctgatctggaccgtttggggatcgctttgtgttatgtcggcaccgctagcgaggagactcagatgcttattcaatcctctctcatggagagggtgcatgcggctcagcagcaggatcgtcttttgcaggaagctcgaaagagggttggtgatggtaaaccgcgggagttcaacattgacgagaatgatttggttcgtttcaggggccgcctctgtgtgcctcagaaatcagagg

SEQ ID NO: 64426 - DNA, 972 bp, Zea Mays
ccaagagggagtgaaaccgcgattgcaaggtcatagctgtattgatcagaagaaagtatgtggagcttgggaggccaaaaactaatatcaaggattagcaaaaatcgagtgcagattagcgaagttcaataagtgtccaaagcacaagtcacaattgctagctaagacgtgtcctatcgaagcacaacaaggtaaaagtaacaaaccaccagaatggcagttctgtaaatagagcagatttttcagcactagtagaaatcaaaggcgcctttccaaaggagtactagcaaaagagctcaaaatattctgaatttttttaccactgatccaaaatcacaaaggatggaagcacacaaaatttcacttgaaacagagttgtattgtggcctagagaaaatcacaaaggatctctgaaattcctaaaaacacttaagcaatttttttaattatcttcccgatttttttgaatttttgaccgaaccaaacacttaacaattttttgaatggagtcaggaatttgctgtaaaaaattgagctcaaacggagcaccgagcgaaaagttatgcccgttttatggaaggtacctcaagttatggttttcaaagccacaaattggcaggaaccctagcggcggctcgggagcataggggcacaaacctccctggtataagcaataggtaagcgccagatgatgaaacaaggaggggctatgatgcaaggcggcttgcaatctaatctagggctagcgtggcgagagttcacacaaggcggctagcgagggcaaatcaagtaatgtggtgtctcgacttttaatctgggaaaggtggatgggatagcggcgaaaacaaataacaatgacggagcggttgaactatgatgatgacacgacctaaaccagcaacaagactcgaacacggacacaaattcaacaaatcaatctaaaacgaaattgcaaggctaaacagggtttta

SEQ ID NO: 64427 - DNA, 350 bp, Zea Mays
gtcaatgctaactttttgggtgaaagtttgtcattaactattttaagggttgagttgttttatttgttggattgggtattttattcatgtttgggtatgggttgatatgtttgaattatcctttatgtcatatgcagatgattgttgcgtgcctatgttttagatgtctagttaactagaaaaactctggtaaaatttctaatttgcatgtctcaaaaatgttatattcataaaaaactaatttgttgtggtagcttcgactgattaggtgttgggatgttacacatagtgtggatgttggttttttagagtgacccaaggtcatgttgcttggatggttaagtccctgc

SEQ ID NO: 64428 - DNA, 621 bp, Zea Mays
cgagacaacacacaaataacacacgaaccagacacacaaatagcacgacgacgacgagagccacacatgcgaacaacgcgcgacccacgcgaatgacgcatgacagcacgcgacactgtgcgaaacagagcacggatagcatgcgaaacaacatgcacgacagcgcgcgacacgcgcgagtcaacacaactacacgcgcgaacaacacgatgacgcgcaaacgatgccacgcacaaacaacaacaaacaaacaaataaaagtatttaagctagtattaatcaagttaacgtatatttttaaaagcgcaacttaaaaccaaaaactagttttgattaaattgctacgttaataaccaacaaacaaactgtcaattaagtaaataaaacacacatatgtcatgacaaaataatatgtctcacgtgtgcacgacattattacgaagctaacgcgatagaaacagaataattccgatgtctaacgcaaaagttaatatataattagtaaaccatggatttaaaggacgcgacacatctctgttagttggagcatggccacacggagggctatggagtcaccgccacagaaaatccatatcagcatatcagatcccgtgtgatggc

SEQ ID NO: 64429 - DNA, 443 bp, Zea Mays
attggatcaacacctaacggtcaagatccactataagcgaaaggggatggctgcgtcaatctgggccgcacaaaatatgatcaatggccccactgtttctcccttctcctactcttccccccccccccgccgcgcgacacagcaacccctgacagcacggtggtgccatcaccggagcacgcggatcccgccctctgggcccaatcctcccatctgatctatgctacgcgtacaacacaggaccgtgaatctgtgggagaaaaaactgaccattaattgcagcactgaattccccaaccacggcctagggtggattcacagcggtgaggtggctccggcgtcgaatttgtgatggcttgatggtttgcttcgtcctgaaaggccaaggctagcttcggtagtaacccgagatcgccccggtgcttcgcgacggtcaatttgtt

SEQ ID NO: 64430 - DNA, 406 bp, Zea Mays
ctggaaactagtatgcatatgtcctcgtatgatgttgtggtaccttgatgacataaaaatgatcatgtgttgtgagaggtaaagagtttagaattaacttatcgtcacatgctaatttacattattaaagtgtctctttcatggtaaccaacttacataacataagcatgtgatagttgtgttcgataaccaaatcattgcaaattggaaatgagaatttgtagtaactgtccatgattgtgcttgatgattgagttaagtgttcttgtgcttgcaagctgaaaaattcctgcatgtatagtttggttgtgcaattaagctagtaatacaaaatgacctggataaaaattagtgagtctacttgttaatccttagttgattattttaactctaacaaatggtaaag

SEQ ID NO: 64431 - DNA, 401 bp, Zea Mays
ctttgagttgattgatactcaaatcaattcaaagctagggggctatgcccattacgtgcacctatggtacaccctatggatacaaggacaaagaaaacgctgaacacaaaagcggattatgaagacctttgagttgtttgatactcaaatcaattcaaagcttgagggctacacccatacggtgcacccaaatggatacagagatggaacaaaattgtcttcaaaaagataagggaaaaaacaagaggcctcattcctccttagattcttgagccaactactctcgaaagttggcttgagcctcgggggcttgtgggggacagatatcctttgggttctcacgaacattgaaacgtatcatgggtcgcttgatgggcctcccagtggtctgccctatggga

SEQ ID NO: 64432 - DNA, 572 bp, Zea Mays
cttgatcctccgccggattctaatgtgggagggacgacacaagctttcaccaccatgagaaggatcgttcatcgtagcagaggtcacacggccaggatcatatcgacttactcagatggacgacacataagtggggaactcatggaacatagaacacctcaaaaagttctacccttagcgaggcctcaaaaaccctcgaagaaaagttgtactctgtaactagaagatttcatcatcaataaagctgtcattttccaaaggcattcaaactcttgattgacaactggctttgattgggcttgactcgaaatcggcatgacttgacttagggtgatcactatgccctactaacggaacaattggcttaagtcagaaacgccttaagtcggtgcgacatgctcacacttacttgacttagggtgatcactatgccctactaacggagcaatcgtcttaagtcggaaacaccttaagtcggtgcaacatgctcacacttacttgacttagggtgatcactatgtcctactaatggagcaatcggcttaagtcggaaatgccttgagtcggtgcga

SEQ ID NO: 64433 - DNA, 771 bp, Zea Mays
gagaaatcgtgcacacagtttttttataccgacgtggatgaacgcggtcgcgcgtttgcgtcgcgctttatatataagaaattggaggacgaccagaatgtattagcgtttttcccaccactgtaataacaaatttcattacggcagtaacgaaactacgacctttaacagatttaagataccaatcactcgtcttatgtattttactcgatcttttaccaacatcacaccaatacacactagcacatctcaagacgaccaaaagcaaggctggctggctgcgtggctggtattcatataattaggattgaactgcaaacgtttggtcatgatcgtatgcttttgcgtggcatgcatgcatatatgaacgactatagctagctcatacagttgccgacagccagccattcaccaacacaaaaaaagcttcctttgtccattccgatccttgctagggcacgagagctaagtacgcagctgaagaaaagtttggctccaatccagagctagctaggtagcttcatttatggtttgcatgcatgcagcgtttcttccgtatctcggtcgggccattggacctttcagaacgacacgtatgtctctctcttccaaacgacagcgcacatatcttgatccaacatgcatcggatcggccacactgctaaaacatgatgcccgctgtatatgcggctggcctgcaccacccaccgaacgtacgtatcgtatacgcggccagcctatatatatagtatcggacctgaggctgctggt

SEQ ID NO: 64434 - DNA, 427 bp, Zea Mays
ctgcaaaagacgatcctgctgctgagccgcacacaccctctccatgagagaggattgaataagcatctgagtctcctcgctagcggtgccgacataacacaaagcgatccccaaacggtccagatcagcgatcaatggcaaggccacctttggaaccccggacctgctaagggcatccgccaccacattagccttccccgggtgataatgaatggacaaatcatagtctttaatcaattctagccaccgactctgccgcaaattcagctccttctgagtaaaaatatacttgagacttttgtgatcggtgaaaatgtcacaagcttcgccataaaggtaatgcctccacgactttagagcaaaaaccactacggccaattccagatcatgagttggataattcccctcatgcttcctcaactgcctt

SEQ ID NO: 64435 - DNA, 1221 bp, Zea Mays
ggccgacctgtcggctctggtttccttcgtgcacgtgccctgctctctctctgtcccgcaggccccgcgcgtcagcgtgcccattcgctcgcccgctctcgctacaacttatatttaggctcttgcatttgtctaaatgctttaacaaagatgatgttcgctgcatttgcctgtgtctactaagacattgtgaattacgaagcttttgattacgtaagagattaccattgcatcattgtgtgggaaatccttgagccaaaggtcatcctatgtgaatgtgattagaatgtgtgaccacttcgactgaatgtatggaccttgcacttcgacatgctgagctcttctctacaattcctttctccgtcttttgttttctagctcgaagcttgacccgccaatgatggggaatatttggtttgaggcaagcactacattgttgactgttctgacttcgaagggatctcttctgttaggttgatgcaactcttgtgttgaatgttgaggttgtccgaagtgctattgttcatacagcgagggtgagccgaaacattggacgctgaaggttgttcatggtactaagcatgttgtgggatgtacggagatgtgcattaagatgtcgtgtggtaaacttccttcggttgattgctttgcgctgcagctgccagctccttctgcttatgtatggtgatctagcatgactttgtggtgtggtccttattttcctcatagaacacacaatacatttttcatctatgcatgttattatgaaaccttcctttaaagttgtggcctctcctgccacctcttcgtgtccacttgagaattgagctaattattggggataaaaatgttgcccctaaatctatttatctttgtgatgccctaggttttgaagtgtgatacccaattttcaaaaaaagagaagttggagtttattctttctttgtttttctctttcgggtgccacgctattggggtttggaattttgggaggtaaacctcagtaaaacagtagaatttatgttggttttgtacgcgggggacgggagcacaggcatgagtgtgggtttgggccgttgatctcaatccatcggtggggagcccactatttctttccccacaaccctagccgaccaccctttttcttccccctttgtgtggccgccaccccccttttgtctcccttgtgcagccgccccctccctctaacccttggccgcc

SEQ ID NO: 64436 - DNA, 500 bp, Zea Mays
cagggtgcgatccgagcaggtcggtgcgtaggcactctagacaatacaaattcatctcgtttctggcgattgtttctgattttggcgttcagcaagctgttatagggatttttctaaaccgtgagtgtgttaggaaccttgaccgtgaaattcaatgtttacatatacttatttcaaaatgtagccatcttcacacatgtcgcaaacatcctgtgtgcatatcaatgctatcttactccatgaacaaaggcatctttccattgaaatatatttacacatatatatggtttctatagttctttgattttaatagttacccatgtcctatgagaaggaacccttcagatcacttcttgatgatgataaataaatatttcgaggtgtttatattatgtgctaaatcaaggtcattctttgttccttgcttgtatgttttcctatgctttcaataggaacttgaggaagcgtccacccttttggtaccaagtgcgacaaaattc

SEQ ID NO: 64437 - DNA, 890 bp, Zea Mays
gaaaaaatacatgataaggaatctaccaagtagtaggtttgaattagtagcccattagaagtaagaaaggaaaacaattcccaaacgaccttcgttgactcttaatccagttaaaacagacaacaatgttgtatcaattgagctgttagaaacagccataaagaatggtgcctgcctcaattaactgaacaaaaaagataatgaaagaagagttgatcctcacctcgctcctaatatacaagcaaccaaactaaggacaaataattaggttcacattgcagcgtcggatgtcgtcggatgccagggaggtcaaatagacggcggtgctagctgagaagccggtccaagcgagcgggccacggccatagcttcgctagctgggtgtgcggggagcaggtttccgatggctggcctacttgcctctccgcagtcactgatgagaccattgacggatggacccccagctcggtgaggtttgttcaactggacatggaggcgagttcgtcgaggctgttgatgatggtgtcgtcgacaaggccgccgaggccaaggcggagcgagtgtcagcacattgccatgtgggatctgtgataggtgataaatgggcattttcagctatataaggagaccaatttaagctatggaggtatcgaagattcagaagaaacacatctccatctccattctcatttccttgtgttctagtgttcatctaatctgtccagaaatctctgcatctcttttcccttcccctctcatgtacctggattctcttacattctagtcctttgctgctgctggttgagttgagatattagtgttgttaacagcgaggcccagctccgttctaatcgggtacggtgagcatagcagcgagttgccccggtgat

SEQ ID NO: 64438 - DNA, 493 bp, Zea Mays
gtgtgattgtctcgcccgttggtgagggcaatcctaggctaaacaacatggtcaacctggttgtcgtgctcaacaccgagctggaccacgcccttgacgagttgggcaaggttcaggcggaggttgcggaattgcgtgctgagcgcgcagcgcgccactatcaagatggtggttctcccgctcctgtcgggattcaacacccttaccactctccgccctgtggtcgctttgattacgtcaaccctgacagcaggatctagatagatttggagccatagatcgacagagtcagagtctgtaataatgcttaattcagtgccttagtcttagtcagtcttagttagagttagtttgcttatcttgtgttttgatgcttgtcatgatgaacttataatgaagttggatctttgtaatgattgtcaccaaggtgtgggcatcccctacaacttggtgtagttattaataaagtcagttgtttagctgggcaacctat

SEQ ID NO: 64439 - DNA, 564 bp, Zea Mays
gtgtggctaagagaccatagggttcgtctggcagcatcgctgaccgaagcagcgtaggtggatagcgatgtcagggactcatgagcagacagagtcctgaatcctctatcccctgcatccatcaccctgacgtggatgcgagtgatgtagtagcaagctcgaggaggctcgctcactcgccttgtctcgtacaaggggcggacgtaggttcctaacgcgtgcaacacttcttgcagcaggttggggaagtgccccgtctcgaacattgatgtgtaatgttcggtgacaggaccaaaccccatgaagtagtcctgctgggcgtagttggatttctcgttgacttgttccacttcgtcctcgttgtcgtcgtcatcctcatcatcgtcgtccccagagtcgtctgggtcgtcgcctccgggtgcaggagcttgaacgactggtgcaggcagttctgaggttgatgacctagctgcgaaggccagtgactctgccaacggggtgggcgtcggtagaagttcctccgagctatcttccaggatgactccatgctccactcgaatgtga

SEQ ID NO: 64440 - DNA, 444 bp, Zea Mays
tggctgcggccactcagccatcgcttgtaccttggtgggatccatggccactcctgtagccgagatggtgtggccgaggttggagatcgactcgacgccgaacgagcatttggatcggttgacgaagagacggtgctggtgcagaattgtgaagacagtgcgcgcatgtcggagatgatctgtccacgtctcgctgtagattaggatgtcatcgaagaagacaaggacagagtgtcgaaagtacggccgcatgacatcgttcatgagcgcatggaacatcgtcagcgcgttgtagaggctgaacgacatcaccaggaactcgtagaggccgtcgtgggtacagaaagcagttttggtgatgtcctccgcacgcatccgcacctagtgatagcctgaacgtaagtcgagcttggagaaggagcgagcgcgatggagctcatcaag

SEQ ID NO: 64441 - DNA, 474 bp, Zea Mays
agaatcacaagatgccaaaggacatgtatcagtccaaaaagttgctctttgggctcggtatggactacgaaaaaatcgatgtctgtgacaataactgtatgcttttctggaaggagaccgcgagtgagaagaagtgtactgtatgtggtgagcgtagattcgttgaggttgaaaacgacgatggtttgatcgtgacgacgaagattgcttgtaagcagcttcattacatgcctcttatacctcggttgaaacgtttgttcatctccaagaatacagccagacacatgaggtggcacaaagaaggggtacgtgagaatccaaatgtcatggcgcacccagctgatacagatgcatggaaggcactagatgcttttgattctagctttgctaatgaagtgcgaaatgtccacttcggtttagcaacagttggtttctcgcctttcaatctaactgcaacgtcctactcatgttggc

SEQ ID NO: 64442 - DNA, 680 bp, Zea Mays
tgagagggatactgccgaggcagccatgcaagatgcagcacgacgggcactttcttagtattgctcattgttcagcggggtagctgatggccttgacctgaagtactaccctcgtcgttcgacaggcagtgctagtggtgtgattgtctcgctagttggtgagggcaatcccaggctgagcagcatggtcaacttggtcgccgtgctcaacacagagttggaccacgcccttgacgagttgggcaaggatcgggcggaggttgcggaattgcgtgctgaatgcgcggcacgccactatcttgatggtggttctccagcccctgttgggattcagcacccttaccgttcaccgccccgtggtcgcttcgactatggtaccccaaactgcaggacccggatagatttggatccctagatcgacagagtctgagtctgtaataattcttagtttagtgtctaagtctaattagtcttaattcgagttatttcgcttatcttaggttggatgcttgtcatgatggacatgtactgaagttggatctttgtaatgattgtcaccaaggtgtgggtatcccctgcaacttggtgtagctattaataaattcagttatttagtttggtaatccatctatttccactttcctccttatctgagaagctgtcagtgaagatgatcaatt

SEQ ID NO: 64443 - DNA, 817 bp, Zea Mays
gagccctgaggacatatctcaaagggaaattttggaaaaacatttcggaatcgagtacgatagcgaccagtcctggggctgttgatgcaaattctgaagtttgacaaataactatatatagaactaccagtcgttaggtcatgaacaatctactatgtagtaatgtcgatggttgtatgttgttgtcgaaatggtaggtacaattgtgtgtgtttatgtttggatttgtcgaacgatgtctgaactcccggtactactattccagtgctgctgcattgcctcttattactatcacttcagtacacttcagtactaaattggtatatgtttgctgtttgttttaacgcagtcgtaaaatggaccagtatactgagggagaaccttctcatggccaccaaccttttgtttacaccgaaggaattgatttaactcaatttgatgatgatgcaaccttccagaacgcttgcaacattgatgtgaacttgcaggcatctgaaaacaatactactcctccaactcaacgaaacaaaattgttaagaagacagtaacaagaagacttgcaaactacagtcaggctaaggatgaggtccttgtgtcggcctacctaaacatctccaaagatccggctattggaactaatcaatcaggaaagtcgtattggcgtcgcataagtgagtactacaatgaacacacgaaagcacctacctcaagaacacaacattcattggaacacaggtggggtgacatccaacgggaaacctccaagttttgtggtgcttatgacaaagttttaaggctgaagcaaagtggtaaaag

SEQ ID NO: 64444 - DNA, 373 bp, Zea Mays
gagcaataaacacactctgtggtttctgaggaaagatgtttgtggtttttgaggaaagcatgtttcagtgcttgcgaaaatgaatatgccagtgacctttggctatgtgcatcagaaccgaagatatcatatttgacatcgttgatatggaatacccatacatcacaatcattggcaggggtacactgaatgcctttgaagttgtagtacatccaacatatctgtgcatgaagtatccatagaccaatattagtatatggtagccaagaaggtgctagaaggcccgaaggaagttgggtagcatcaaaggtcgtgcataacaccgacaaaacagaaaaacaagagcaacacacacgaataaaaaaacagattc

SEQ ID NO: 64445 - DNA, 690 bp, Zea Mays
ccctgagcctaggcttgagtcggcgtagctcgcgtcgtgaccacctgagtcctaaccacgatcaacgatggtgtgggaacccctaactctaatcctaggttgggtgaatattatatatgtgagttaggtggccaaagcacattacaagaggggtagataggtaaatacagagatatactaccctaactctaacagcagcccttcagtctcaactctatcttgtataggtgttgagaatggatcgaaacatagtgaatacactcgacgatagccccttggtgaagatatcagcgaactgcgacgtggctgggatgctgagaatgcaatagacgagggtggagcgctcgagggggttgtggagctcgatagagaagccgacggagccagaaggccttggtggccgtagcgtggtactcgccctcggcgctagagcaggagatgatgggctgccgcttcgtggcctaggaaacaaggttggcgcccaggaacacgatgtaaacagaggtggactgacgtgtgtcggggcaaccagtctaatcagcatcggtgtagaccacgagctctaatgttggtgagggtcgaaggagaaggacatagtcgatggagccacgtaggtagcgaaggatccacgtaggttgcgaaggatccacttgagagtggtgaggtggggctttcgtggggtgtgcatgt

SEQ ID NO: 64446 - DNA, 769 bp, Zea Mays
cgagaatccataaggccccaacctggcgcgccaactgctggtgtttcaaacctcgctctgacaagtaaatttattgtgcgcgttctgggctccagatagtgtgcgcggtgggcgtaagatatataccagttcgagcagaacatccctacatctagtcctcaatggcttgcgttattgacaccattgatgatcaaagctcatagtaggggttacaagcgggcgagagagggaagagaggctcccaagtctcttattatggtggaggtggagctaagggttatatagtgcagtcctagctaagtattggcttggagacatggctctagcctctaggtcctcgtccttgcgttctcctcctattcatcggtccttctcgacatcttcttgtatggggtctgtccttatgtgtgcgtatctctgtgtgtcccgaggtcatttcgtgggctagcctcctccttttatagaccaaagagggggggatcagctagtggtggcttccttaagaaggagccactaggcaatggtaaaaccgagtgttctaccatggggtgaagccacacgtgctcgtgggccctagggtcacctggttgcctcgtattctttatggcagatgacgtgagtagcatggggctagagtgccatcatttgggctatgctgaccccctgcctctgtaacctggggctcggcgtggctcatcgtgttgtgacctgccaactgtctctacacttaggtctagtcccgatatatcatgagtgcaccacaggtcgg

SEQ ID NO: 64447 - DNA, 1003 bp, Zea Mays
gttggttggaatttttttagtgtcctcgtagtgaattacttttgtgtcttcaattttagctgtaaatcaatttctagtgtaggtattgaaacactaaattttagctgcaaatcatgtgaaaagaattttgtcctttgaatgatagaagggttggcctgctgtatagtgtatgcttagctgacaaactgacacactactcttaagcatatctgctcttggatttttgaagcatctttaagtgattccaaaaatccatggatctgatccgagcacaattaaaaggccaaagggaggtcacacacgagtttaccaagcggacgcacgcgagtacatccggcgcccaccatcagccatgtaattcactaccttttcatcctgcgcaattctttcctgtgttgagtatgctgttctttctggaacctgtttgggtttcgttgtgggggcgtgcgtgaggttttagcctgttcatgtttgttgatacgtgtgtactcgatgtggggtggcagcttcgaatgcgatgggttgggttgcctggcctcggtgattgtggattgggtggctcattagtgttttgcgttgttgatcactgggggttaggttacaggtttatttctgaaataagtttatttctgagacatatgttacatgtttatcgatcctctccatacaactggtctgttatgtttcattcgattttcagttaagtcatagtactaaactgcacagtctcattcgattttcagttaaactgcacagccatttttgataaaccaccatatataacttaggagtttgccaaatcacttcctcgagttcagcaattttatgaaatgaattttgaagttgaaaaacaagtatgcattttctcatcttttgcaacattcaatttcagctatggtagtaattaatcttgaattgattaggtcacttttcttcattataacctttactgcattatactctttgtttatagtatttatacagtaatttatgcttcacatag

SEQ ID NO: 64448 - DNA, 1279 bp, Zea Mays
cattacatggattaaaaataatcttcatatgtgttggggttagccgaatcataactctcatcatcactatcaactatttcataatcaacaccatctgaaggcgcaagttcgtcattaatgtcattgccttcaaggattactaagtcattctcattttgcacctcatcatatcctcctcatcaacaaccatttcaatatctacgtccattccgatagattcggttaagtctatctcaaatcgcccttctagcccaacttcttagaagaactctccatcatatgtgtccgggtctaagttataatcttcatcgttaggaacaggtaatctactgtgcggcgataccttatacacaacatcccaacccttaagatgttctttcgtttgacacgcatatgggagataatacacttgtgtggcctattgggccacgatatagacatcgtctcctcgtaaggtggaatcttgccgaatttcgactatcccaaggttagaatgtatccttctcgtcacttgagggtcaaacccatgacatttgaatatccctagagtaagaggtttggaaccatgaaatttgagttcatatatttcttcaatttgtccaaaataatcgacatcgccaaggctaggcgtaaagactccagaacacgttgtttttcgattgggccgactttggtcatagtttgttgtgcgaaaacggtatccattgacgtcatacccagaatatttcttgaccctataagcaaagtcgttggctatttgtctcaactcggcactcatagacggatctctttggccctgcaagtattcgcaagttaaaagatgctaaattgagttcatagatagatctctttgacaaactaagcacgtaccttacgtttgaaccaggaaatgaaatcaggcaatccagttctcgcaccctttctaagaagagtatcatattcctgtggagttgggtcccttgatcgatgccagaattcatgaagaaattgttccatgtatggcgtcacctcttcaaggttggtcaatacatatagcatgatatgccgccactcttcatatgtcagggtcttggtggtcgagccacttgcgcttccgagttggcctcgaaatatggtgaggttcgattcattgccgccatcattgtaacgagggggtggattatgcacgctcggcaatttgtcaccatagtaagttgttgtgaagtttgacacctcctctagaatgtatgcatctgcaatggaagccttgattttgcatttatttctacatttatttcga

SEQ ID NO: 64449 - DNA, 1465 bp, Zea Mays
gggaaagtggagaacagagaaggataggacagcgaagctggagattacttctcagttcaggtttacaaaatgcataaatatctctccctcagctaacataatacaaatactttacttcagtccgccgacatatcttgggttgggcttcatgggccgcgtgctacagcatggaagttgggcctccgcttcaggatttgtatctgctgatgttgtatggtttgccggagctggacgtgtaacagtcactctcctggattagcagggaatggaatggaatggaacggagcggagcggagcgagggttacctggattttggggcggttccgcttccgccgagagagaaatggaagctgatcagacggagcgctacatgagagagagaataatgtacgcgaaaaagacggaaacaccctccttgatgggcccgcacccgctcgagcctatcctacaggaaggcgcatgacgttgtggattcacattcactagggtgttggcaccaagaaatggaaaggatgattgcgatcttcacttctcgagggagaaagcagcatatatgcccaagtccgtcaaggtccgcaccgatttaatcgagccgagacacggtacggataaatagtggatcgtgtcgtacccacctgtgagccgaaagtctaagtcaagcacgactcaactagttttaaaaatatgttgtgtcgatccattgtgccgtgctaccgtgtcggacgactcatgacccgttttgtaacagagctcgaaaacaacttgttttttctatcttttattgctaatttttcttcatcttttgtaatggagctcgaaagtacctttaaagtggggtcgagttggtcatatactcatatgtgtatatatggtgcctagattagagtaaggtcggatcatgaatgagtcatgtcagaccgtgctcaatctaatgggctattccgcatagcatcaagttaaatgagtcgacactaaggaggcgtttggttcggcaaattgtaatgtaatcagattacagagggggatagatgtcaatactaatgtttggtttggctcaacctggaatctaataccctgtaatccgataacggtctatgtacttatgatcccgtctgactccagttgttaacagataacgctgctgcttaggaagtattgtgtgcgtagcttttcctttagctgtccctgaaataaaaccaaacaaagcctgctattcgatgcaatgtaactggtagcggtgttctctatttccatttacattatcggtccctggaaccaaccaaacaacacctaaatggatcgtgttcgtgccgcccggtgagtttggaaacacgtctaagcatcgtgtcgtgccgaaatagtcgtgtctttctggtttctctatttccatttacattatcggtccctggaaccaaccaaacaacacctaaatggatcgtgttcgtgccgcccggtgagtttgga

SEQ ID NO: 64450 - DNA, 863 bp, Zea Mays
ggccttttcgctattcacgatcgaaggtcttctgatgccgaagcgtgattgtatgggttgttgaaatacattattcacattatccctctcaactaaatcattcttaacatataacagttgcttcatccaggaccctggacactttttccgaaatgttggaacatggcatctcgtatcagaacgatatacgaaggataacaaccaaagttgttatgatattgttccttcttaaccgcctttgtctggtaggataatttgtgtatcttgcagaaatagtcggcgtctggctccagcccttggctcctcatcgcccaaataaaaactccaactttattaatgcttcgacagtaagctgatgaaggtatattttgaatcttttcaacactccaactagcatcttatgcaagggaaagcgaagtctagccttcataaaacttttgaataccaccatttcgtctgtcccaggaagaggaacagtgttttctcctccagccctcactatggatatatcatggaaatatttgttcttcattgcttcaatctgctctttcttaacaatggatttttcaaaaacaacatggctcggcctccatggtcgattttcggcgtcttctgcaccactgtcaaaatcaaggtcatcgctgccctcagatgcttcagataatccatctagaatctcattggttatcttttcaatattagtcctctccatagcttcgtaaaacccagccagtgtggtgtcctcactcctcttgtcttcggccatctcagcttttgttaaaacataaagccgaagctcgaaaacagtcacgactacagtagcagcaagctaaagaacaaagccaacagtgactcgatagcac

SEQ ID NO: 64451 - DNA, 637 bp, Zea Mays
cgaacagaaggtggataaatacaaatgcttccgtcaggatagcaaaggaatcctatggtttggagaccgattggttgttcccaagaaccctaagctcagaaagaagatattggatgaagctcacctttcaaaattctccatgcaccccagcagtaacaagatgtatcatgacctcagatacttatactggtggacccgaatgatgagggaaattgctaagtatatatccgaatgtgacacctgccagagagtcaaggccagtcatttgaaggtagcaggcactttgcaaccccttcccataccatcttgggaatgggaggatatttgcatggatttatcgtaggattgcccaatacctcccggcaccatgattctatttgggtcatgtggataggttgaccaaaacagcgcatttcttgccagtgcataccacccacaagacagagaaatatgcagaaatctatgttgatcaaatagtgcgtttgcatggaattccgaagaccattgtgtctgacaggggatcactgtttgtggcacgcttttgggagcagctccaagaatcacttgggacccatgcaataagaagctcagcataccatccgcagacagatggtcagacagaaagggtgaatcagat

SEQ ID NO: 64452 - DNA, 516 bp, Zea Mays
ccgagctacaaacgggttattcaagtgagatccgactgaaccttaatagggcttggactcggcgagcagtcccatggtggtgactggtgatgcaaatcttgcagtcagtcatgagacgaccgaggtggtgtcaggctgtttgttgaggcagcaacgaagtctgttcagcccatggctccccacagcagaatgccatggtctcgatcgtacccctcacgatgtctcacttcctcttgatgtcgtctggcatgcaatgcctcgatgctggttcgtgtgtcacaccggctgttgatgtggtggcgcatgtcaccatccgggtgggctggtggaagaaggtggttcgccgctcgagtgaggatctatcggtagccctcattgtcgagcgtgcgacgtagatcattcgccatctgagccaacgcaccatcgagctgtcttggagtctacatggccaaactcaagttgcaggttgcagggaagaggtaaatgctcacgtgggggtctagcattactcccgcc

SEQ ID NO: 64453 - DNA, 412 bp, Zea Mays
atccagtcttattttaccagtattatctaacatgtttgtccatttggttagatctgatcagattagatgggatcagaattaaattgatgtattcagattaggctagataagatctactagatttattttggagtagatcatgtttgttacactattatgagataagcaaagtggtgaggataagtatgcttattagaacaagatgagtctctaagaacaaaatagaatcttttggtactggttagatcgattgggataagatgagaatcctttcgagaagagatgagtctaataaagtaagagagtatcttttaagataggatggatcattttaagataagagagagtcttttaagataagagggatctctatgaaatagatacattttaatggaggataatctaagttgtt

SEQ ID NO: 64454 - DNA, 561 bp, Zea Mays
ctctttcctgctctatagacttctagaaggtgctaacatttggtaccagaggtcagcatcctagatccgcttggaatactgcctcggcgtccgcgatccagtgctatggatttgttcgacaccactgctcgcaaggtgctcgacaaaatgcgcctgatggaagcccaccttaatgagaagattgtcggtcgctgtgatggcatcgagtgccgtgtggacacgcggtgcgatgagctccacaaccacttcacagcgtgctgctacaccatccagcagcaagccgaacatgtcttcgacgagggtcctatcttcgatgaggaacctgtattcaagggagaatcgtttctctccatcaccgaactcatccccaccggcgcgttaccgaactcatcaccaccggcaccggatacagctccaacagctccatccacgggggcagcagatccccgctatcctacctcacccccatccacgaggccgcctgtgggaccctcgcttccgacgaccgactgctggagccaactcaagcagcccatcggcatgtacaacacgacatgcaag

SEQ ID NO: 64455 - DNA, 596 bp, Zea Mays
cgacattcaaggggactcctagcttgtcataggacaagtgatgaaggactcaaggtgtcgcaaacctaagatggcggcatattgtcgcgagttacaatagctcaaggattggttcgatggccttgagctaaatcacattccctgatgagaaaacaaagcagtggatgccctcttaaaatggcataatgatgagcgaccgtcctgtcggggtctttgctaccgccctttttgggccaattgtctgttacgatgaggcctgccaagagggtgggtaacccttaagcactggccctccgatcccagagccgatcgctgtcgtggaaggcacagaccgctcgactagttctgaagacgattggagaacatcgtatcgcaacttcctaaccaatggcctactttctcaagacgaaacagaggcacaaagacttcatcagcgggccaagtcctttgtcctgattagggaatatctctacaaaaaggggcatatcggaataagccaactatgaatcccaatcgaacagggaagtcaactcctggaagacatccacaacgggacccgcggacaccatgctgccctgaggagcatcatggggaac

SEQ ID NO: 64456 - DNA, 593 bp, Zea Mays
gcaagatgaacttttagattagtatcaatatttcaggaagaaaggatgtgcagtatgagaaatcacaaagtcatttaatgcagtgagaaaagcacaacgtggttccaaagaaacgatgtgcagtatgagaaatcacaaagtcatctaatgcagcgaggaaagcacaatgtgatttcatgaattcgacagtacttgcatggcagttacgaacgtacaataacatagtaatgccttaagcttcaggaagctacatgtaataccaatcaatctgacctgttgcaaagtcttcatattcatggggataagtgtcccaggtactgtgaggtaggttactgcagaatataggaacaatatctggacttccaaatgagatagtgtgccgactctgattgaatacagaatcaaactcaactggattggccttccatcctgccaaatacaatactcactgtttcactattagggcataacatataacactttaattcaactaagcaatattaaccaagtgcaggatgtcagttatgcgcatttctctcagttacaaaatattggtactaagcactacattcagtacatgtttttttggttaa

SEQ ID NO: 64457 - DNA, 1148 bp, Zea Mays
ctccggtgagctcattctagtttacatgagtcggtcacattcaatccaatgactcaaaatgaatcagtgacctactagggcaacggtgcttgcgcgaatttggacagaggcaacctggaatggtcggtcgacatgagcagtgtcaacgatgacattcccggcgacaatgcagcgttctggtagctatggcatggtagcgttcaattaaccaagaccgagagcttcactagcaataaggaatgctaaaacctggatcagggggccacgaaataacatgagaagggccagccacggcgagatgtctcacgacggcgacggtcaccagatttggggaatttgttgactgggggatacggtgcacgagagaggctggcggagggtggaatgggcgcataacagagaggcagagcgaggggagtgctcaatttatagagaccagctacgggtgctacaaattttggatggagatgagctcacgacggtgaagaggtgagtcaccagagctcatctaccgtggcgctcaatggagtaaggtctcgagcagtaactggttgcccaccatgacctatcgtgacgtggaaacaccctcaagtacatggcacaatcgtgaggggcggcggacgctgacgatggcatttcggccgatcgtgaagcaagtgggtacggcggccagcgcacagattcatctgtggccgtgatattttcactcctctagtaatatctacgccgagccgtgcccaaatctttgtggtgagctcggatcatgacatgagatcgccggcaacgaggttctctgcaccagagatcttttcagatactgtaccatgccgactccattaagtgtgtctgacagagcaacttgaggggcctttttcttcattttccatgtggtgagctactaatccgattacttcaaagttattctcttatagaccagcttcaactttgtcataatgatcttgatcagtcactcactagatcaagcacaatccggctccaaagtcgatcaaacaccactgacagtctgttttcagattaatgctcgactgatagcccgacttctatggcattttactccaatttctatacaattcttgggctaagcgacttaatcaaacttagattactatagtagctctacaactttg

SEQ ID NO: 64458 - DNA, 638 bp, Zea Mays
attttttatacttcttcaatttttgacccttcagccttatttttatcagccttcgtttcaactagttcaaccgaaggtaccttcggcattgtagccggctcttcagttctctgcgcaggaggagtaatttctttggcagccgaggaagccccttcgctaaattcaggtattacggtcggttcaatgtaacgcggctagtgagtcaaaaccttcaacttttttcccttcggcacaggctcatcaggggtggccgaagtagcagctttcctctttttcccctgtccacgcaccgggtagcggtagtcggggtaaatgaagccagtcgcgtcaaaaactctgttcagtctcttctttccccgacctccgaaggctgcggacagtgcattatcctctgctttggaatatgctccaagcagttcatcacttgtagcttcgatgcacttcagccaatcatcatttggttcatcaaatttatctccaaacctgaatgtatacttcagccagaccagatcaccttcgctagagttagtgatgatctccttcggcatttcccagctttctacaagcggccatactctgaaggctatatgttcttgaattaaatctctagtgccaatgaaggagcaaacggtactgaa

SEQ ID NO: 64459 - DNA, 595 bp, Zea Mays
agaaactggaatggattaatttggactaagtatgcattttctttaaattaaacaagttctagcatttatttttacactaaaaatcaatttctataacattttccctgatttaccgccagagactgcaggggtctcgtcgcaaatctttctaagactcagagagtccctggcgtggacggcgggttctaattcaactaaacacaggggctcctatgcaaattacacacgttcagagcgttagggttccctaggaccaatggatctcgatcgaacgtccaaaattagatctagaccgtgatgaaccggtacgcagtctcggcttttggattaacggtgatcagcccagatctaaaataaccattaagggcacacaaccgaccgatcgaaatcaacggttgctatttaatgagtagagagataagcgtcgatcgtccgatcccgatcggacggtgctcatctgacatccgaaggggtacgctggactctaatcacaactgtctgtcagcgatcctacgacccacgtgatttcccccatctccccgccgaatgacggcgacgttgcccggaaccacggtggtccatcgccggaatccag

SEQ ID NO: 64460 - DNA, 336 bp, Zea Mays
cagcaatccaagggcctaggttgtgtggagacatggatggcattttagccgtggatcctagatccgatggccacgcgcgcatatcagttcagttttactgggatctaatcatggctactgaagggaggtcggacgaccgagattgactcataccccttcgctagttacattttcatgagtcctcggattttcgcctgaattaacccgtgatcctgagtagttataagatcatcactgataggtccctgcaaattaaagcttagaccctgggttctcctgtatttttggccgcggtccaaataaccgagaattccatgaaaataaatacagaaatca

SEQ ID NO: 64461 - DNA, 281 bp, Zea Mays
cgaggttccactcagctggataggaaggctcaaatacacggacacagctgcatttgccattgctcgtgcaagcaccacagaagaagccgctgaatttgcagcctacccagccactgatgcatcaggctgacttgtcgtaggtggaactggggaactcggtcacgctagagctatccggaggattcagcaccagcgaggtattgttgtcttatgtcaccatccaatccaggaaggtccccaagctgggatgctccttggctcacagtgaccccacttgcagt

SEQ ID NO: 64462 - DNA, 539 bp, Zea Mays
attgacaagtgataatatcaagtatctttagcaaagaaaaattaatttgaatcctaggtaggcaaatagcgacgtggcggccattgtcagcaggacgttgctcgtgaggtggacagttggttgatgctcatggcgcctcaaccaggatccagcagtcaagcggtcttgccattttgcacttggctcgtcctgcaggctgcaaggtcgcagtcatggcaacgagcttgaggttttgaacttaaatgcgacaaagtttcatgttaagcactgtgcatgtgatatacatagcagcgaatatcatcctgcgcacctgggatggtagagacatggcagttgttgtggtgctgcctgctgtaagctgtggctcctcagaccaagaaccccaaacacttgtaaacgcctatgcattcgtttaaacagagtcgaggccggcaattcggctgcagctagcggtttccttgtaaaacagacagctagcagagctgcacgacccggtcgtgtcgtccgactcatccgagcaaactcagacaaatgtccta

SEQ ID NO: 64463 - DNA, 778 bp, Zea Mays
gtgagggagagcggagaggcgacgcgagatctactgttcgcgtcgtgtgcgagggataggtgacgcgagctccaccatccgcgctgccaccatcccctccatcgccaccttcgctccgccgtcgactgctccgccgctggctgctccactatcgtctaatctgtcgctggctgctacgctgcccctaggacatgaggtattcaaccattgccaccatacgcttctggatctagggctattgttggtctttgcgccgaataggctagggcctccggctcgcgaggccttcttcctatgccgaacttcctgtaccagattcactagcctatctgttccatcagacccgagcagacaagcgttgtagttggtacttgcttgattatttatggcattcgttgttgttctaccgaactcgtcttcttggttgtgaagacgcgaccgccgatcatgccacacatgccacacaactgcatagaacctagtggtctttgtcttgctccaaacaaccaccatggtcggtcagttttttagaatagcgaccactcttggattcccttttgaaaactacaagcaggctccatgttcttcgactaggaggaggccatgtgtggcagctgctcgtaagtcagggcaagctattttcttattctgcagttctggcatagtgtaaactaatttctctccatctctccgctgcaaatggttgattaatcaatctaattttgtgtcaaatttcttaaaactttacttagttttaggaaaaaatgttaacactatc

SEQ ID NO: 64464 - DNA, 403 bp, Zea Mays
gtctctcaccttgtaaagtcagggtaatagagtgcagtatataggaagttggggatcaatgaaggttaattccatatttactaggttatgcatgtatcatgtttaaaactatactaataaatcttcccctcttatggagacatggcacatacaaggaaaactgcacgcaaatctactggacctcttggcgtgcctcgtcatcagctagcccccagacatgaagggagtagtagcggcagcaatgacccaatcggaggattagagaccaaggtggaacaactttggacagagctacgtcatcgaaataggatatgggcacaggacaaccaacgtatagctgaattgtcagctgacgtcagccgcttgcagtacgagatatctgaacgggattcagccattgatt

SEQ ID NO: 64465 - DNA, 458 bp, Zea Mays
gagactgggaggagaccaacacacttgtggaggaggcatggaagccgaggcgatcgaggggagcaaagggagggacatggagtggagggcagaagggagtgcaacggcgatggcgacgacgatagtttcgttcgtggtctcattcagtaagtcgagagagacagggattgctgccccacctctgatgatcgggtctatttctacgtcaaaattgggctctaggtgggctagaactctcgtgaagttgtcttccaaacagaccaaaatgatgccctgtggaaacttcccaagggctagtttggaaacaaaattctccttgggacctccctcatttcttagggtgaacaatcccttcaatcgcctttctacatctcgctcatatccatcccctctacaatccagtttgcttcgattcgagatggattcgttcccgacggatggtggtggctcaacgtctt

SEQ ID NO: 64466 - DNA, 464 bp, Zea Mays
gtagctgtggaggtgaatgaaagagttcatatcgatctaatggtgagccagtctttttggtaggcgacttgagagatatcatatcttacatatcgtttgagtctatcatcttctattgcgagtatgcctactcttcgagggttcggttgcttttcctccgagtaggtcactacctggtcacgtctaagatgtgtcttagagtctcgccattcttctgcgacaaacacacatggataatgttcttgtgtcgtattcttcgagcttgtttccctcttggcatgttgtcttgtttcgcctgcatgcgtcccgataatacgcactgttgggtgacttaccgcgggcctattaggctacccatgcatggaacatatctgtgttgcaatgacccatggtatatccttctcccatagccgtcgctagatccacgacggaagtcgaaaactatttctcaccggcgtcgacgt

SEQ ID NO: 64467 - DNA, 809 bp, Zea Mays
aagacatggagaaggcctaaggccgatttcgtcctaagtagggcctagaggaaggaagtacttcagtggatcaagatggtgatgttccctgatgggtatgcagctaacttgagtaggggggtgaacttatctactatgcgagtcttagggatgaagagtcatgacttccacatatggattgaacggattcttcctgcaatggttcgaggctatgtccctgagcatgtctagctagcgctttcagagttgagctatttcttccactagctttgtgcaaaagagttatctcgaaccgtggttgtagacttggaaagattggcacccatgttactgtgtaagcttgagaacatatttccacccggcttcttcaatccaatgcaacatttgattcttcatctcccctatgaggcacgaatggggggatgtgcaaggacgttggtgctatccaatcgagagatttctaaagactattcgaaataaatgtagaaataaatgcaaaatcgaggcttccattggagaggcatacattctagaggaggtgtcaaacttcacaacaacttactatagtgacaaactgtcgagcgtgcataatccaccccctcgttacaatgatggcggcaatgaatcgaacctcatcatatttcgaggccaactcggaagcacaagtggctcgaccaccaagaccctgacacatgaagagtggtggcatatcatgctatatgtattgaccaaccttgaagaggtgacgccatacatggaacaatttcttcatgaattctggcgtcgatcaagggacccaactccacagg

SEQ ID NO: 64468 - DNA, 1275 bp, Zea Mays
atttcatgtcgaatccccctgctggtgatagcggtttgggccttagagtgcgaccctctcccgaagaggttagtactttggttgcctcacttggtgaaatccctgatgacgagaggcaggttcatttcgaggtacctttgaatccaagtgatgctgagataagtgccatgctggatatgttggctgaagattcctctaacgcagcccctgctgaaacactggatgtagcgcccatcccagaggctggcaaagctttagatattcagaggtctgacagtgttcacccgaagcgtcctcgccgagccaatcaaccaacttctcctgttgaggggaagaagaagaaaaagagacgtcttcgccgagtgtcaagcttggatcaggatgatggtccttctgctcctggtgctgaggaagtgcccgtgccattgtttgctgaagctgaccccaatgggtgtgacccgactgatgctgaacccaatgggtgtgacctagatgacgctgaatccaatgggtgtgtcgtccgcattgttgatgaagatgaggaagaggaggatgaaatccctctagttcggaagaacagccgacgctacatagtcagcggggaaagtagtggtgttccttctccagccttgtctgctctcattggtctgcaggaattgtctttggcaaactttgatcagactcttgaagacatggtcccagaagatctgttgttggagccggcagatggtggaatgatggatattcatgccgatgtgcctgatgctgggctagagttatctcgagtggcgtcccgtgtctcatcgaccttagagtgtggtcttaagggtcaggaagctggtctggattgttctgctcacatggaagtgggtgaaggtccttcagccttagaggtggctgttacggagagcttggccctcaaggacgacactagcgtttacccagcccccgagggtgttgccggggatgacccggctcgaatgggtagcgcgagctatgacccagcccccgagggtgtccgagtcggttctccctctcacacttccatggacgttcacgtagggtcttctcctccgcattctggttgtatggcagcagctcaagcttcgggtcaggaagtcacattaaaggccagcgctcctgatgacagagttttgccatctgctgatgatactgacctggtccccactgatgcattgtgggttgttccagttggtgatccttcatcgagccatcaattaacttcccacgacttgggagttccttcgttctttt

SEQ ID NO: 64469 - DNA, 413 bp, Zea Mays
caagcattttcaaaacgaaaaattctagtttttggaattgtcgtggagatggatactagaatgggttttgatctaaggtggggtgggggagggcattcagagagacaaagggaaatatggctagcagctggacattagagaaggtccgatcgagcctagtgagggtgggggtagcacgacagttggacgaggtgtaggagcacccatagaggcgaagctcaatcatgcagatgtcatttagggtagagttgaaggctgagcatagtctgttgtcaacccggccagtgctaatttcatcaggggatcgaacaaggttgaagtcaccaagcaggagctagggaccctgaaccaggatgaagagctcagataatttagcaaggatgaagtcagagtgttggtggtacatgggggca

SEQ ID NO: 64470 - DNA, 484 bp, Zea Mays
acaatctggttcaaaaatagcatatgtgttcctaagatagatagtatccgtgaaaccatactaaaataagcccatgactctacctattcctttcacccatgcagtaccaagatgtaccaagacctaaaacagaagtattggtggtatgcatgaaaagtgacgtaacctcacatgttgcggtgtgtgatgttcgctagagggtaaaagccgaacatcagagactagctagactacttcacccgttaaagatactcgaatggaaatgggaacaaattggtatggacttcatcatgggtctacctcacactcctactgggtacgactctatcagggtaatagtggacatgctaaccaaagtagcccactttattccagtgaggaccaattacacggggccaagttagctgggttgtatatctctcgaatcgtctgcttacacagagtacctaaaaagatcgtatctgatcggggatcatagttcaat

SEQ ID NO: 64471 - DNA, 506 bp, Zea Mays
ctccgccgtgctggccctgcgccaccgtgttggtgcggccagtggggaagaggttgtgtgcgccgtccgtctcttgatgaacggcgtagattagagaagatcgtaccccttcgcgggatagaatctgggttgtcgatcttactgcagatggttgagattagggattggcgtgggctggcgctgatcgttggatctaggtctgaaggtcggtgttgcgtaccaggttggattgaagaaggatttaatccaagcgctctattttagatccaacggccagtagtattccatacaccttcgtccagtcctttttgctaaagagtcctcagactttctggactttgaacccgccgtccgtggtagctgtgcactgagtctgggtgaatttgcgagtgagcccctgatctttttagtaattgacgcgcaaaccaggaaaatagagaaaacagggaaatcaatttagaaaatgaattttaataccaaattaagtgcaaaaacttgtataaatc

SEQ ID NO: 64472 - DNA, 844 bp, Zea Mays
gttcactctaaaagccatcatctttgtcacgatcaccgactaccctggtcttttctcgttgtcggggcagatcaaagggaagatcgactgcgtagtttgtcttgacgatatttgctacacttatctcaagggatcttgcaagactatatacatgaggcacagacgattcctcgtgaaagggaataggtaccgaagagctatgatgaataggtacttcaacaacaatgacgagccacaacttgacgagccagagaagacaaagtacggggaaaaggtgtttgacatggtgaaagacatggatcaggtcgagttcggaaagaagaagaagaatgacgggatcacgatagggaagaagagaaagcggggtgaaatggagaaaccatccgtcttcgttcctttcaagaaacaatatatctttttcaagcacttgccgtactggaaggagctacatacgccccgtgcaatcgactgcatgcatctggagaagaatgtctttgaaagcaagatcggcacgctgctagacatcaagacaaagaccaaggatgggatgaagtcatgcactgatcttgtcaacctcggcataaggccagaacttcacccgggtcaacctgagaatgggaaagtcgaactcccggccacgggatacaacctaacagatgaagagcatacgacgttttgcatgtatctgaagcaggtgaaggtgccgaccggtttatcttccaacatcaagagtctagtctcgatgaaagaccgcacattgaccaacttcaactcccatgactgccacatcatgctgacggtgttccttccaatcatcattaggtgtatcagaccagaatacgtg

SEQ ID NO: 64473 - DNA, 521 bp, Zea Mays
gcttcgtcatagagtaaatcttggaagttgactggttcatgatgaaggttgtcttggttaaaatcctaataattttggtccatgtagttgttctggtcctgcacttcaatgttgcacatttcttcagttgcttcgtcaatattttttctgaagctcagaaagacgaagcaccttttccctgcgcttctccaattgttggtggcttgcttcgagattgttaatctcttgatcaagctcttggtcttgtggctctaggttgatttccttcctcgtttggtttcttgcctccctgagaagagctttgtccccttgattggtgtccaaggtcatgaggacgaagtaagttattgttgcgttcttcggtggcatggtgcgagttgtggttgtgagatcagtggaggtgggcaccaatgttggtacttgatttcaattcccctaaaggtatcgaaaatcaaggcaacacaagttagatgtaaagacctttgtcctcttgatttaacacttcttcgaagtgttagaac

SEQ ID NO: 64474 - DNA, 325 bp, Zea Mays
cttcttctcatcggccttaatatagaaccactcacttttccagccggttggccacttggtacgatagctaagcactggagccttcgtatccttgcgatacgcgaagttataacaaccgaaattttcatgtaacccgtcttctctggccttcgtttggtaatgcaattcgtgcaatcggcagaaagcttcagcatttgggtccattccttggcttcaaagggcccagatgaagatgctgagcctaatgatagcgttaggggtcagctgatgaagatagatcttataattatccaaaacttccccaatcatctcgtgaagcagaaac

SEQ ID NO: 64475 - DNA, 1312 bp, Zea Mays
ctaggggttttaactaactggagatgggtttgatcactattctactgtgtcgctgacaacttgcagataagccctccatgatctatttcttcgcagacccaagtccacgacggcgttcacgcgcggagaggctccggcgaggttctggaccggccgattggggctacggctgggttttccgagcagcggacatgaaatcggggctaccctgatcatttcccctaacttaattgcgcttatgatcaactaaggagctctggccacggtggtcgtgagcatggcagctagaccgatgtgttcccggcggctgggggtctcctagtctcaattgaaggctcggcaagcatcacagagtcatcagggtacttaaacgagggagagtgagggctgaacggacctagaaagggttggccgcggtgagcagttccttgcggtggcggaaatttgatttggggagaactccaaattcgcggattccagtgaatgaccgtggctaattcgtggtggctgggcagcttactagcctacagagttcggggaggggtcaatttataggagggtaaggcggtggccgtgaattttggacgagacatacggcggtcggaagtgaggaagaacggcggtgcgatgaacacgtgtttatcgccgtggcagtaactccggtggtctacggggagttcagaggaggtcacggcaatgcgatggcacggttgggacacgcggtggccaacggcgagggcacggcggcggtgagcactttacccgcgggcggtgagccaggggagatgaactacggctagccggagtggcttccaagtcacaggcggtgacgatcttttaacctcgcgacgttatccacttacccgagcgcgaatcatgacgccggcgacgtgaatcacggcggaggggttaccagcatcgagctgtccaagctggcgacctgatccactcgggttactgtaccatcagaagttcagtttcagtttcttgctacatgcctgacagagcaacttcagaattctttttctccagattttctatggcaacgtgatccacactctgcagcaaatttgtagagtaatataccatctacaaatttgttatgggaatcatacccaaacttgcactggatcatgtttaaatccaagtccaaagttagctttgtttcactgaagttctgaatttcagaattccaccagcctgacagtccaactttgggcttacttatctctggatttttcttaacaagtgagcttaccaccttaagcaaagttgttcttctataatcaggttacaattttgatgtggtgac

SEQ ID NO: 64476 - DNA, 436 bp, Zea Mays
gagcaatactctacactttaaatctttaagactaatgtcatttcaagtctatattatgcttaatctcaaattaaaaagggaaatggagttacgagcaacgaaagcacttccactgcatactcgatcggtatcaaagatctcttgctctaactcaattggttttattatcatatccgtggtgaaaagctcactatcaaattgctgagcaatgggagagcttccactgcacatttgttcagtatcaaacaccctagctcaaactcatgactcttaaatcccatatccttgttggtagggccatccaaaatttactatgttttttgtgcttaatgccaaaggggagagattattaggggccaaagcaaaaggattgcaccaccaccctgtttttaccaaattggtactctttcatttgagaaacactcttgacagttaa

SEQ ID NO: 64477 - DNA, 611 bp, Zea Mays
gtaatgacagcatatttgcccatcgttctagggcaagacgcactgcagtggctgcaacatctgccacgacactgcatcgacgattggagcgacttcagtcagtgtttcatcgccaacttccagtccctctctaataagctgacgtagccatgggacctcaaatccatcaggcccctgggtgatgaaacactccggtcatacctcaagaggtttcagaccatgaggaagcgcatccctgaagtcgccgaggcagcggtgattgaagatttctaccaaggatccaatgactcagccttcatccgagccatactacagaaagcgccctccaccgccgaacaatagtttcgagaggcagacctgtacatcaccgtagatgagcgggcccaggacctcatcagaggtatgaaacctgcaccacggcacgacacgaactagcaaccggacaggcactgggagaagaggcctcgtgaggaggtacacgccgccggaccacccgtcactcgagcccatggtgcgccccacgaaggtgtatgggcactgatgaaatcctcgacgcccagtgctcgtaccacaaggacatgcgccacaccctacagaactgcagggatttc

SEQ ID NO: 64478 - DNA, 561 bp, Zea Mays
gaaggggataccattattgctctcctcgcaagggggtgcattgcatcgaacagcacacatgtggttgtattccctttctttatgtagcaacattctttctataggaatacatgaaagtgttgtgaagtctactatttctgatgttaatggttgttgcaaacttacaattagttatgagcaatttttcaggtgactgctctactccttgaagtggcataacatattgttcagttcatgtagtaatttagatatgaaatggtgaagctatcttagcatagaagttgcagtgtgctatagcactcttatgaactgtgatatgccattactataagatgatgtataagtagatcagatcaggtacgctggtacaaacatgatttgtgcagcaagcaagaagcagaaattggtgcaaaacctaagcgcgagcattagaacaacagaggcaccaagacgatacggggtcgggggtgctcacgtcaccagtagggacttgaggttgaaggcgagcatggaggcgtggtggtgcatgcaggcagccacgccgaggcaaaggcgtcggtc

SEQ ID NO: 64479 - DNA, 518 bp, Zea Mays
tttgaactaacaataattaccaatgcttttagatatagttcaaagaatgcataaatagacttggatgaaggaaaatatgtgatctagaagataaacacctcttgaaatgtactatggcactagaatactcattgaaaacctacaaattatacaagattctaagtcacaagatagaaccaatctggttgcgaagataacgaagaaacgaagcaaaataagggtttatatggcattggaccagagcatcggaatgtcctaagggtcgtcggatcatatagcaaaagcaaactctaattggtagtgaatggaagcatcaaaccaaggcatcagaacgaagcaactaaactgtcggactatacaatcatactatttatctcaaaggtgtcgaattataactgttcacaagacatgagacggcttaggacacaatccaatggtgacaaaaagattatagagaggagaaaggggtgtcatgcttgtttgatgatagttgtcaaacgggtctagcgacaggcgtc

SEQ ID NO: 64480 - DNA, 567 bp, Zea Mays
gaataaaaattagttatcatagttataattgatattaaacgcaaagaaaatcatacagcgcatcgaggtagcaaactcacgtaaaaagtatcatggttggccggaacacgacccggttttaattttcccctatttttttataaaactctatattatacttgattataaattataaaacgaaaaatgtgtgtgtcatgttggctagacagatgtgagtttaaagcaaacaaccatgattcaaatgacattcacatttacatacttgcacgactgtgcacatgcaagctttgcatggagcgaaggcgtttgcatgcatggttgcatgcaccaatttagttgcatacttgcatgcgtgattcgtgtgtgggtttagtggttgcatgcagactgggaccggctgcatgtgtggccacgcacggggacgccgcagacgccagcagaggattgcatgcagactgaggccggttgcatgcgtggccacgcacgggaacgcagaggattgcatgcatgcatgtagaggatggagcgggggcacggatgtggtctacattaagctcttaatagtta

SEQ ID NO: 64481 - DNA, 412 bp, Zea Mays
aaatggcataaagaatagggaaatggagacattagaaaagcaccatgtcgtgaaatctcagtcgcatgtgaggtgagttatttttgttgttcatgtatgtcattaatatgtatgtacaagtttgtactccaataatcatgttttacattatgcggggtaattgtaaggactacagtactttcgttttgattaaatggggtctatattttttctatccttgtctttccatgttcttctgaagcaccattgaatctttgcacaagtaattgtcgcctaccttcatgtgccaagtgttactttatgtagctcattgtgtattaacttgctgatttccttaagaaaaatatgaggacgaagcacaagcaaataagtactacatggttcaggtgcctgtctctcaccttgttgaagt

SEQ ID NO: 64482 - DNA, 615 bp, Zea Mays
gttttgatgagaagtatagtcatcgttctaccgttgatgatattagacatcttttagctaagatataggagaggggattttctagtatgatacgtagttagattacatacattagaagtgaaggaactgacccattggatggaaagacagtttaatagggagacattggatccctgaccatcatgcccaaagtgcttgcctcgtacgacttatggatttggcatattttttttgttatagcaagctcgaacaacgatgtcaacaaccgatcgtcattattcactaacgtgcttaagggacgagcaccaaaagtaaacttcacggtgaatatatatgagtacaaccaagagtactatctcgctaatggtatcttgcacctggcgtttggtgtttgcgatgaccacacctatcccacatactccaaaataatatatatttgttgcatgctagaagggtacgcggaaggacgctgagacaatatttggggacttcaagtatcgcttagatattctcgctagcttaagtcgttcttttttctcaccaagtatttgtgtgatcatacatgcatgtagagttatgcacaacatgttcattgagaatagacgtggatgaaca

SEQ ID NO: 64483 - DNA, 429 bp, Zea Mays
gtgggtgggagatgtcgaaggagactgctgctgggtctagccaaggtggcttggtttatttgaagtacacattcaaatacaggagccaatttgatgagccaaacaatgactggctagatgccattgacgcaaccagcgatgacttgctcatgcctactcaagggccaaggatgatgccatgacaactgtcttcagggccgaggtaagaaaaggttgaatagggtttttgaagttattggtttcgtatacccagactacagctatccttcgcaaaagcaaggaaagaaaagaagtgctgacgcttcggtaatttctactacgccgaagccaaagaagattaaagttctgacacatcggcccaggcacattgaaacggccgaagtgctgaagcttgataaagggccttcttctgccttggagttaagttac

SEQ ID NO: 64484 - DNA, 393 bp, Zea Mays
tgatttagttatgtctaatatcgtgcaacggtgtaaggttaacggtgtaaggttgtacatgccctgttaacagggtgaagctgttgcagcgtggacaggcaatctcgaggtgcgatcttggatgtaaaaaagggtggtggaggcggtaagacaagcttggcacaaggctagccattgcacgatgctccacctggcgcgaacggtggcagagttcctccatctcagcctcacatccttcccttttacataggacaataacggatgatgagtaataaggctctcattggataaaccttcacatgcaagatgtcagatatacctttccatgttatgtttacaaatataaagatgttttcagattagaaagaaagaagtataaagattttttttaat

SEQ ID NO: 64485 - DNA, 798 bp, Zea Mays
gaaaacttaaactagttagaattgcgggttcattttcaaaatgcctagggtctctttaataaaagggctaagcgaaggggtatcaggcatctcgagctgttggatcaactatctgtggcgtagattagatagccctttttatctaactggtatccatcgatgactgcaagatctatgatcaacgacccacagcttgccatgccatgatccaaatctgcctttgatccgaactcacggtgcagatataaataagcgaacaagtgtggattcttctaatttgaaccgttgattaccggatcaccggtcacgggcgctccttcccctacgactgctagggacggcatgccaccgcctctgatggcagttctctcaccggagacacccgtccaggtgcaccgtttttccaatccctactcccgatgaccctatatgaacccgaggtaccaatgaatcggagggggtgacttacttgtggttagatacttggggacggctgcccacgcaacgcagtggtccacgacggagtagggtcgacgatgagaaattacggggccatcgaagcctcctgcgctccacgaccaacccacacaccacctacactttctggcgaacctccttgaccatgcgctcgaccccaagcaatggtgtgatgtgcgttcaacggtggtaggccatcacctctctcggcgatggttacacggtgggggcaacagagaagacgatctatggattgatggcttgcgagggtcatggtgcccgaatacttataggccctagggcgacatgcgttcgttcgag

SEQ ID NO: 64486 - DNA, 391 bp, Zea Mays
atgagtgagctcattaacctccttcttgagggtttcattttctaccatgagagaggcatcctaagtgaaaccatcactcatatgagttgtagttgtgctgaagggttagtaggagcgacaacaatatagccatagaatgacacatcaagaatatcataattgatcctatgcttgttatgtcaataaactccttttgagcgagaagagagaagtgagcttccttcaacttctcctgagtatcaataagagcctcatgagtagtcaaatgatcctcaacagattactcaagagctttgtgcttgttgtgcaattctttgaattcttctatcttgttcatgagagaataagccttttgcaatatccttgattatcacaaacatcctattaaact

SEQ ID NO: 64487 - DNA, 461 bp, Zea Mays
tttacaagaattatttctggcacataatcatttgtctggaatgattcctaaagttcttgagagcataagtaatttggttgaactagacctctcctttaatatccttgatggtgaggttccaactcgtggggtgtttgctaacatgactggattctcaatggctggaaatcatgggctttgtggaggcattcgagagctagaattgcctccatgtcaggatatgccacaaaagaggtggcaccgtggactgcttaggattgtgcttccaattgctggcactgctatatgcatatctcttctattgtttgtgctctttctgttgaagtggaaagtaacatctgaaaagacaaaaaccgacagctttattgggttgaccgacaagtatccaagagtttcctaccttgaattgtttgaagctactgatggatttgcacccaccaatctggtaggtgaaggaaaat

SEQ ID NO: 64488 - DNA, 606 bp, Zea Mays
gacgcccacgaccttggcttggcggcggcgtacacctgtctagccgccggcggctgctcgagaggacgagtgcaggtctacaggagcagcaacacagccgccgctagggtttttacttttttacttttagtgctcggttgtgttgttttttgggcccaaaattcgttcgctggatcggcccacgtctgcttccaaagtccaaacgtgaatttagcgcgctaaattatagccggtttagctgatttagccggctaatagcggatattagcgtctctatctgtttagcgctaaaatgtgaatatcctatccccaccctcctccagcagctatatcccgatatagcggcagctatatccagctattttaaacattggtcaaaacccagcggagaaaggacgggcgctttcctcgcgtttgcactttctgcaccgcatcagctgactgggttcaggcgttcagccaggagcggggtcgcgcacgccgtcacctgaaagcagtcggtctcactatcacgttgctgcgacctttcttttgcgagtggttttcttcgtgagaccatgggaggaggatcacgtgcgtttaggccagttgttaccttgctttagc

SEQ ID NO: 64489 - DNA, 575 bp, Zea Mays
ttgatctcggccggtcccggccaaatcaacggtcgtagtccatcgtgcccactcgccaccccaagctccacggcggcggcagccgcactacccaacacggcatggcacgccgacgaggagaggcatcagccaccccagtgccccaatccatacgagagtaggcgcagaatgggcagaagatcatggcggatatgaacggatcatctttacctgaactggcgtggcacaacccttcgcgcacgatgcaccatggcccacggcggaaatctgttttccggtgagaaattcaccgagcaccagggtcttctcagtccagccaataccgcagatcgcttccccgaaggtctacaaatggcccgaactcgctctcgcctccggaacaccgccacaaccaccgatcctcgacggcgaagcacccccaacgccttcggttccgcacgacgagcattcctggagatgatgcttcgagttgatagagttggcgtattatatagggcaaaggccaccaagatcggtgggatggttgcaacagtctccgagttcggcgggagatctggccatggcgcgcgcgcggc

SEQ ID NO: 64490 - DNA, 630 bp, Zea Mays
gaatgatttgagatataattcggggatgtatgtgtatatagtcatgaagaaggtcggggaaagtggttgtgtcatggctgcccactagttccgataagtaaaatggatattgcgagagttcaagttgatgcttggaccaccactaagatttgaaatctgtattgtgcagcgagggcatcatgggccactggattgcatctaatctatcctcgggatggtagggccgttgtactagactctttggatacaccaaaagaagggtatcaagaatttgaaaatgtattgagattgtaagtgatggtacttgttgttcatttactctatacacaagtattcaaattgtcattgacgatactggtgattttgttacgtacagcgcttaccgcaagtacgtggacgatccacaatgcatcgatcgaagatccgacaagaagaagaagttccccaaaacactgaaagtcaggcgcaacttcccagtacattctaaagtgctatatacgatgtgtatgctctcaacatgttgcaactagtgatatgataccgtgtatgacgtatatcgtgcaatgctccaaacaacctcatgggtcagtactatgtgaattctacgtctgtgagtatctcagagcctac

SEQ ID NO: 64491 - DNA, 317 bp, Zea Mays
attttaaattgcggctgtgtttagtgtgcatttcttcataatgggtgctaaacgaattgaatggttgctgagcctaagctacctaaattcctaaatcacatgaatcaatttatctcgtcacatgcatagtgttgggtgtccttatcatgtgaagagagttacacactgatgtggggaacctcgctgagaatcgctattcacattaataggatacatgcctctgtagacaccaaactaaacacaacaaaacagagaaggaaccttttagcttacccatgaagacgacgaacatcaacagaaccaagatcaatcacaaa

SEQ ID NO: 64492 - DNA, 596 bp, Zea Mays
aaaaactcaaaacaaatcaaatcatgaatcattttagcatggaaggaacaagatatctgtgatatcatctctttttttttgcatatttttgtggatcatatatctatggatcgtacccttcactattgtatcatacatctttaaattgtacctattagatatatttggaaggatatattcaggatatgcatggagctgcgtctcctccttgatgttagacgtaatcatctctttctatctataggagctgcgtctcctcgatctgttccggatttctctccggctgcttgattgtatcgatgacatatctatatatacaggaggcaggcgagctattgccttgcgccgcctttcatctaacatggtaccagggccaaaggttcttcatgtccactgctgcctctgaaattttctcctcctccccttccaccgtatcctcctctatggcgcatctgccttcctccactaccatggccgccatatcccttcatcaagcggtcacaatacgcctgaccacctccaactatccactttggcgtgcccaactcatgccttttctccgcagcactaagctgctcggccatctagatggctcc

SEQ ID NO: 64493 - DNA, 483 bp, Zea Mays
acgtgtgggcgctgttgcttataaactgaagctaccggattcttctcatgtgcatccggtgttccatgtgtcccagttgaaaccttctgtcaaacaacatgtgttggtgagtgcatctcttccctcagtgcctgacgctcttcgtgttcctgtccaagtgctgcagcgtcgagtggtttcccgcggaggtgcttctatcgatcaggttttgatcaggtggtcggggtgtgatgctgctatggattcttgggaagatgaatgtgatgtccgtcgtcgctttccatgtgcggtcgcttgggggcaagcgtcctttcaagacagggggaatgtcagcagacaacatgtgagcagacatgttgacgaggtgcagcagccggatggagttctgatggaagatgtaaaggctgcggaaatgggccaagacgatgtcgaagctggaattatcagactgggccgtcgtgttcgcaagcccaatacaagata

SEQ ID NO: 64494 - DNA, 1002 bp, Zea Mays
cagccaccgccgccggccatccggctgcagctggaccggcccgccccgtggtttagtaagggcacccttgagaggtctgctgattgtggcttatccgtcggttcatgggttggcggtgccggaaagattggattctgatggatgttttgttggcctgtgcctccaggttcgtgcgcttcgtgagcacgccagaggtgctggagttgacgagcacctatgatttagagatgtcgcagctggaaggggctaggaagatatatgcgcagggagtaagtgccaagcaattgtttcagatgctgggtgtttttcgtcttctgtttcttcgtgtagctattgcctaaatttctgtaccttattcagggtactggagacgctacctcaggtggaactggtatgtaggatgattatgttcagtgtttggattggcattccatcatcaattggggtttcgatattgctagcttattccatctatgttcatacctgataacgtttctctgcgcctttttattttggaaattttagtccatgttaactcgagtgacattgaaatatcaaatatctaattgatggtaaaagtcagaagcaaagaaggaaaatatagatgggaacacaactgggataattgatccccatggaattttaggagctcttgactatgaaacgatgcattggatagcaccaaatttgcattggaagcaatctatgtctaattcaggaaagacataaatactgtaattaattgctaactgtttgtggggttaacgaatattgttataatgttgcattgctagtgtggtctttcatatctgctgtgtctgaatctaatttatgtaatatctggccatgcttattggcagctgaaaatgttacaggctcagcagcggcggtggcagcagatattacaaagtaagcctctctgtcatgtctgttcttattcatttgtttcttcttttccgtataactcgatttatctgagtccagcatgatctatcaaatcag

SEQ ID NO: 64495 - DNA, 788 bp, Zea Mays
gtgcacgaactccgctatcagacaatggctagagctgatgggttacataagaacttcggatgctataatttcgcgtatcggaaagataccaaagctcctgtgattggttatcgaaccaagtggccgactggctggacaaatgaatggttttacgtgaaagctgacgagaaaaagagggagaagcttatgtctatggtgatgagtccctagagaatgagcttcggcatgacacggcctctgtgcaatatgcagctcggctcccctgccaattagccaaagtggaatttagggttgttgcggagcatattagcactcgagatttagtgcaagaatacttagccaataaaacctttccaacgtctggtgggtggggaatgccaaagaaaaaagaagggaataaatatgaacttttgtggcttccctaccgcttcaaatttcaaaaatgtttcgacaagttgtgcgttgtatggttggaactgatagagaagatgtgcaatgaaattcttggaaattatacaaagaagtcatatcaattaatgacagcttccttcggcacacgagagaagcggatactaaatcgtgtgatggatgccttaggcttcgagtaccctgactatgaaaggcttgacgaagaagccgggggattgaagagaaagagggttgtgagtgtgctgacaaggcaagtgcagaggtctgttgaagcgggcaagaagaaaaggttgataaagaagccgaagctaacactagagccttcggcccgaaagaaaagaaaggttacaacttccgac

SEQ ID NO: 64496 - DNA, 462 bp, Zea Mays
ttggtcttcttttggattttcttcgtgggcgcgagcttctttagcttcttatcgtaatccatcttcagggttcggtaggcttcacgagtgttggcctcctcgccttctgctatatcgagacactcatggagggacaccttctcctttttaagttccttgacctgttgctctaagctttccacccaggagtttaggtgggtgcagtgggaggaaaggttgtcgtagtggttatcgagagtttggagatatccggccatgtagacgatggtggggtcatcctcggtaggatctctccctgatagggcctgaagttttttcctctaggtgggggtatttttgttgctaggtgggaagtaacgaagggggggggtttcaaagagctctctgttgtagttttggcatagctgtttaagggcttttcgggcaacattttggcaagtgtctgggaagcggtgcccgatg

SEQ ID NO: 64497 - DNA, 342 bp, Zea Mays
gtcgttctccataacctcttcatccgtcctatcttgccttgaccagcccatggtgtcgtgggcataaccgtgcacactcgtaacgccatggacggtagaagagagagtgaatcgcggtcgtcgcggggttccatctcgccgtgtccatgatgtctagccagggggaaacggtcgtgaagcttcattggagcgtgtcgtgcgtcctccactcctagtcatgctcgagggagtagccgaggtgcatgttatccctcgtcggagttacacgtcattgtggagcgcctctatccgtgggcagtaagcgtcgcactgccatcgggggtaagtgaccttggaatctga

SEQ ID NO: 64498 - DNA, 942 bp, Zea Mays
tcgaagtcttcttcaaaagactatctgtgcaaaagtctcctaagggtgcagccggactagcacaacaagtgcgcaaaatcgaagtcttcttcaaaagactatctgtgcaaaagtcgcctaagggtgcagccggactagcacaacaagtgcgcaaaatcgaagtcttcttcaaaagactatccgtgcaaaagtcacctaagggtgcagccggactagcacaacaagtgcacaaaatcgaagtcttcttcaaaagaccatccgtgcaaaagtcgcctaagggtgcagccggactagcacaacgagtgcaaaaaatcgaaggcgcattacatcagtgcaaaagtctacatcgagaaactgtccatgctaagaccgactgcaggcgcagccggacctacataatatacgtgctagaccaagtgcgcaacgcccctatgaacatagccggatgcgcgaaggcacaaagcctcatcatacaaactatagttacacacgtacagcgagggcatcacaccttacattggttcaaccttcggaatgattcccatctccctatagttaaatagcattatcctcagctcatcaccctcaaaaagacttcgcaactccccctcacctatactcgccccaaccggcgaggacaacaattcccgcttgccagctctgcccacacgaagccgaccaccatccacttcactcactctacgcttcgccaccgcccttcgccgcctacgcccagcactcggactaggcaaaacttcagcatccgtaacacgcggagaagcctccgccgcagccacatccaaggccacaaagtaatccaagtcctcatccgaagactcttccgtccacacaaccgaactcccagagtcatcaaactcagaaaacttagacgtagactcatctgattcatttccagcgaccacggtcgaagccgccacaaaa

SEQ ID NO: 64499 - DNA, 981 bp, Zea Mays
gctgagtgttagacatatatgttagccatatctttaggccaatcactttgaccttcttgtaatggccttcctataatcatgtagattggccctcctgtaatcacggcaagcccatgcatgtgtccggcaatagcatggacatgtatatatgtatgagtacttgttcaattgaaattattgtatcattacctaaatttctcacactatcatggtattaattggccatcacttctaacatcctagcttccactaaaccatatcctacttgtcactactgcctccccttcgcgacatttgtaacattcctacatcgtccttcatcttccctctgtcaatgtccctatttgacaatgagcattgcgttgaggaggaagcgtgccgtgccgacgtagagacacatcatcttgtcgaggaggcaacacaccgcatcgccatgagaaggtggcttgagcctcgcccttgcacagaccatgaccatcctttatcaacaatccatcgacatctagaacatcaaggtcctcatgctaaccacttttgactttggttatacaaactacactcgttggcggggcctcttcctcatcgtactttccaagtgcccttgacgaccatgtcctctctgatatggtctatgctgacgatgtcaagtggtatcacatggacaccatagtcaagcactgggtattctccatgctcaccacccaacaccctgggttcctaatatggagcaactctatatctatcatggcaagcatggtgttgcttgtcatggatgaccaatttgtcagtaacaaggagactcgcatcatgatccttgatgttgaattcgtcaccttctagggctatctctccatctttgactattttcatcgtctcaagaaaatggatggaaataacaataagctcgaagagaaaattctcgatgacaagctagtgctcgccaccctatgtggccacattgagaagtttgcctacatgatc

SEQ ID NO: 64500 - DNA, 385 bp, Zea Mays
ggaaggccgtcgtcatctggagcttagtgccacttaagcgcattagctcgtgccagaagctggaggtgaacactgtgtcccggtcagagacgatggattgcggaatgccgtgcagccggacgatgtcagcgaagaacgcctgcctctctgccgagtatggatgtgctagggggatgaagtggcaatacttgctgaatcagtcgaccactgtcaggtctagggcgatgtcggtccacactccttgtggtacgagcagtgggatcaacaggctggccgagaggagatgcttggacttgttgcgttgacagacagcacatgctcggaccagatcctagggaagtggaagtcgcgacggagacggtgcagcgtgcgctgaacaccccgt

SEQ ID NO: 64501 - DNA, 600 bp, Zea Mays
cataggtcaagttgctctggtgacacaacctaaatggcttgaaacatctatggaaccggtaagtaaataggatattatcgagatgagtcaatgcacaatgaaagaaaatgagtagggcggacacatgttatttaactatggttgttgtctgaacagaaatatgcatattgaggtagggcatagattgctaattacatggtagcccatatgaacagaactaaagatgtgtatcctgaaggcatgcatgtgtaagcaaggataatgcatttgatctgtgattttgtgctgcaacaatttataaaaggcaaatgcggatttggtttgttactatccaaagccaatgtgtatagtgaacgcagaaactcagatatttcttgtgtataatgatgaagatatatgtatgtgtgtagataaaatcaatgtgagtagcaaactcagtaacttagatattaattgcatatcatgatggagatacacgtgtgtatatagatgaatgtatctatggaacatgaacataaaatgtaagtataatcttatctcagcagtaggatgatcatgaactacaggaacagtggcaagttcagacacaacgcattgcag

SEQ ID NO: 64502 - DNA, 464 bp, Zea Mays
gccaaatgtttcattgacttcatagaactgatttcgactactttggatgctgagcaagggaccatgcctttctcacatatactcatctggagaatgtcaagcaagacggcccatctggacacatggcaagaagagataaactagctagctgcctcccaatgatgctactaccttctcttcgactgcttcaacgttcacatgcccctcccttgcatggcgtagtaaactgggttgcttgaaaaaacgccacttctaagcgtatcaacgaaatttcttgcaaattaaccaaccgttgcaagcgcctgcaggaatttcgagaggaatcctcaacctccgcgacctttgcgtgctaaagttattatagtccgttcaccttaaattaaatcatgtcatttcagcattgtcccaagtcaagcttctctagtcttaatcgagtttaaatgcatcggtatctactacaatat

SEQ ID NO: 64503 - DNA, 580 bp, Zea Mays
gcgagggtccttcggttgacgtggcgggttcccatccttcgggtggcgcaaggtagtgtttccggtatggtgccgcccatctctcttgttcctgtggcgagttcgtggttgacgttcccacgatgacacgcagctggtcccatggttcagcatctaggcctgattcatatgacacgactttctcctgtcatcgtgggccctacgtcgtcctcccgtgtgtgtggatttgttcatccggtacggtgtcgtcatgtcacttccgacataccggctactgtggagactttggtgttgaggtcggctctcaccggggctacctcgtcccatcagatagagcagcgtgctcaaattataagaaaggggcgtacagttgtgctgtcaactatcgcgtgggctcctagtgacatgctctgctgtggtcaatgtacgctcgttactctagcctaccgcttggtctcgctccacggatgtcgggtcgaacgttccacccagccgacttgctcggcgggggttggttgtccaccccgcctcgcagacttgcttgaccggggacttggtcatccactctgtctcatagact

SEQ ID NO: 64504 - DNA, 388 bp, Zea Mays
gacatttgtagaagccatcacgttctcccctaaactccatcctcaaccactaacacatagattcttgagtaagctctccagctggctcaacttcctccacctctcactactggaatcagtgtaggccactcgacaaagctagaaatacactcgtcaaagggtacacgacaaaaacgttatcgacaaagggttttttatcgagtattttttgtcagacactcgactaagatttttaccgaatgacgggactcgacaaaaaataaacctgcccaaaaatatcatttttttaaatcatgggaggcacccatcagcaagggcaagtcgtgacacttttcgcacaaactacacatgccgaactgatgagtttcctcttttgtgtaatctgttc

SEQ ID NO: 64505 - DNA, 1890 bp, Zea Mays
tttggacatgagctctatataccacagttggatttgaggttaaagagtagcttggctttaggaggatggagaagttgtttttcgatatgtgcattagaagtggtgaagcacttagggtggttgagtatctctaaaccctaaactagggccccaaaagtggatttggagatttagccatactttttgaaaaagtgcatatatcaaagtggtagggtttggagagcctaacatttttcccatttggagatttccatatgttgtggagcaaattggagaaaagagtaaaaggttataggtgctcaaatattgaaaccctaagtaagaaaaaaatgatattgagccatgtttggacccttgtaactcttaatccataagtgctttgcagtgaatcactttagcaaagttgtagggatgttatagtagtgcaagtttgtgtaagggacctagccctaaaaccgtgtggaacctagtgtaaaatgtcccgaaagtgtggctgtcagactgagaatagttctgaaactgaagttcagtgacattttctcaactttggaatccaattgtggctgatccagtgggggtaaggtttgggtcactatgacaaagtggaagcctgtatatcaaagaacaactttgcaaaagggaggtaggtatgttactgcttggaacaggaagtaatagtgacctaaacttgctctgtcagacggtttttgggtgggattcagaatgaacagtaaactgcataagatctcggttcagggaaccttgacgttggtgatctctatgccggtgatctcctcatcgtgattcacgccagtgttaagatacgcgcctggataagagtggatagctgtccacggtgaaaatatcaggggagggggatggatgtggtctctggcgcgagctcatccatttcagccagttgatcccgtggtcggccgggacgccatcaccggagtttgatgttccttgtggccacgccacgtaacagagggtgttaccacgtagctgggagtcgtggcgtgaagccagttactacctgaagccattgctccactacgcgccatggtgaacacgctccagtgaagatcttttctgtcaccaccgtgagcacttccgtcccaaattcgcgaagcaagaaatccatccctttaaattgaggacactccctgctttgcctctctgttacgcgcacagcccacccctcactgccctaattcattcaccacaacccccagtcaccggtttttcccgagaaaggtcggtagcgccgccgtgagaagttccaccgtggtcagtcctgtctgaggtaatcccagcccaactgctatctgttttaatttcctttaggtgtcgtggtgctcactggcttgggaatttgaactctactgcagcagagcatcgagaacatcgcctcgccgttgcagaggaccgccgtagaccgcctacgcgtcgacccactgctctgtctgacccctctcgtcctctcgcccttcgttacggtgtcctggtgagtcactgatgcttgccatgccttcaatttgaactctaccgcgttgtcgtgttcggaacaggctcgtcggaatcttggttccgccattaccgagctcagaggggtttccggtgtgtgatcgtttaagcagtacatggggtagcgtcgtcttggctcagcaatggtgggatggcgctcggttttgctagtcttcgccaccgtcgtgagtccaagcgaggggcagggtggccggcggccgaccgcgccatgtcggggccgtgcgtttgtgaaagaataaaaacccagagacctaagtgaatccgtcagtgactcagccaaacagtggtcaggaccaatactggtttagttttagtgcagggttgttttcgcatgatggccag

SEQ ID NO: 64506 - DNA, 348 bp, Zea Mays
agcacattgatccgagggcacccttaggcctaggaaaccttgaaggtgacacctggagatggtgcgaatgtcggataacaaagggtgctacgatgacgaaagcacgaagacattgccgatgatcgagatatatctatcccgagcagacccccgggagggcgcgaagactaataagcccccttcctagctacgaccggatgcgtcctagacctctccacaaggcctcctcacagtcagagcagaggcccaacaatgaagactcctagagcgaaggcgtacaagacgggccaaagaggactaagtgcaggaggttgaaccgagctggggctaccccagccgcaccatttg

SEQ ID NO: 64507 - DNA, 536 bp, Zea Mays
ccaagaccagactttagtaatctcttggcatggcaagttctgtggcggttggatcgttcgagtgggcgaacgtgaatttggataacgtttgaattttataaattcggactgtgcgtataactgcgaaatcatgcgcgagtgggataatggagtttggtccccagtagattgtgccgggcagagcaataaagtattcaggtcattaacggacgaagtttgcctcatttcgatcgactcaaacacgacctataatatcaaagacgatgctgtttggtttggtctgtttgcttttggcccttatccgagtatttggttagcaaatgaatttatcgtatcttagtcatgttaagagttgtctcatttatcgtcgccaataaaattttggtctgactaaattagaccatgcccaaatcataataccagaactcagacttctgaaatttgttttcgccaaaataaataagattcagataaatcctatttggtttcgattaactcaaaccctatcacaagtaccgtcgacccgtatcattgtg

SEQ ID NO: 64508 - DNA, 471 bp, Zea Mays
ccgacagtatcaatgaccattccagacatggatacatgcgagacaggacccgccacatgtgtgcgtggggaatgacaacatgagggttggtgccttaaaataagggtgtcatctatcatggtgtcgaccatgacatgagaccaaccaccctaccacaaggaagtcaaaaaggatgacgagtaatccgtgacgagatgagacaacatgtaacggtgaccgtaacatcgctacatgattttgatggaaggagaaaggatcatccatagaggcccttcaaccgacaagaacgtcggaggaaaagaagcaatgtgacaagacccaacccccgctcattttgtctgaccactcaggcttatgaaatgggccctcctctcaccttggtctataaaagggaggggatggtcacgatataaggcactggtaacagctagcataagttcctagaacacttgtgatcaaatagaacactcg

SEQ ID NO: 64509 - DNA, 813 bp, Zea Mays
accgaaggtggaatcagggtagtgacaatcccaaatccagaactactgtgtgatggattaagctgttgagcacccaatcccataggtgaggaccgcacttgaggttgtagagactgaactcccagcatagcttggtcttgagacatatggttgagcaccaacgatgcagatggaagagacactcgggcagccaccagatcatccacctttccatagagtagacccaattcatccctgatctgagtaacgtcagctttgatctagagcttccatattgacaagtcccgaactgatgcagcgttttggtccaacgcgaacttgatggattcacattgctattgcagagagtagagaagcagagacagatcggctatgctcttctccatcgctttggcttgttgttgaccccacgtcttgtactgcgatcgcagcacatacggcggcggatccgccaggattgcggtgacaatccgataccagattgtaagaacataggtatggatcggggttgagagctgctcccggcactcgatctcctctcacgaagcactaggattcaagggtatcgtggtgttacatggcgagtccaccgccagccagatgcaaccggtcccgagttcctcccctcgtcccccttcatcgttattccttacataaaataaaactccttctatccactctggacaccccacactacgatgtggcccactgcggcccatagactcgactattgggcctcctcaagcgagttgtctttcccgccaccgagtcttcatcagcaatccccttcttgatcctcacattgtgggcgac

SEQ ID NO: 64510 - DNA, 438 bp, Zea Mays
gcggttcaaaaatcagggttgctcgacacatggcgcagggcagggcagaggtgatcgacggcgtggcgtgattatgctgtcctaattgggcaggagatgccatcgggacttgtttcgctgcaggaggcagcgctgtggccgctgtcgtgtggaccggtcctactaaatggtagggctggaccgcatgccccctagggatggcaatggatgtcatttatccgcgtacccgcggataaaaaacccgttgggtacggttttaggtacgagtctgtacccatggatacggatacggatagcacttgatatccgcggatatttttaaaacggatacgaaaaatcaatatccatacctgaatacccgaatatccgttaaaattacacccatcccacaggcccacgggccacatcgccacagcccacaacgccacaagcattctc

SEQ ID NO: 64511 - DNA, 1412 bp, Zea Mays
gataatgtcatcaaaaaagtggaagttgacctcatgctctggtagcggctgaacaagaacaatgccccaatcttcataagcagagggttgaggacaggtgacagtgcgtaccatgatttcctagtgatcaacttgttgcgccatgaagccatgaggaagaaaaggagcgggatcaactctgtggaaagccattccttccgagacttcggagggcgggatccgctggcacgacgaacacacgctccgcagatgagggtttaatagcgacggggtcacccatggcagcgaggaggaagagggttttgtaaacagtgcaagttccgtggaaggcagagagccacttatcgatagaaccgcctgagcaaactcgccaaaattattaaaaaaggcaggggagaaggcccacctgtaggcaagaggcgagcagacttgaaccacagccgcggggggaattcccaggagacatcctcaaacttactggggaaggaaagaaaatctcttttacaattctacccaggaaatccaaatagttgacagttattgcctgaaaaagaataatccccgagggaacaagaatcatctgacccatgagctgaggcgccattaatgctgaggacagacttattcttagagatctcctggtgttgcttcggtatcttcttgggccaccaaattaaattccacgaagcccaagggcacgcccgggagcccctcagagaagactaagagttaggcctctcaaggcgaccgttgctaaattttgaaagattttgaaaattagcacgtcttgcaaactgcgcctgggaagttgaatgaatggccgactgatcaacgcgatgacgaacagggaaagaaatctgattgaacaccgaggatctatgctgcatacttgaaggcaaaaacccggccctgacctggccacccaaaggaaccaaattagcgccagacaaagctggctttcgaacaatatcagcaaaagaagccttcagattacggccgcgagaaactagagtccaagaacttgattcttcttcagtgaaaagctgccattctttgatccaattagggccatcagaatttcaaagatgaaggtacactttgaatgatgagcaaataaatgagtggtgtctgtaaactacgagacccacatccttgcaggaaagcgagaaacgaaaaacccggtccgacagagaagaaatcatgaaaagcttcgctgaaccatcgatgaaggattgaagaagaagacccaccgactcttcacacagacaccatgagcacttgccgaaagagacgactaaaaagaacttgtggcgatcaaatttacccggaagaagattgatcgggcgattgaacttgcataggatccaatcttgaaaacgaaggccgacagaaaagtccaaggcagagtcaac

SEQ ID NO: 64512 - DNA, 444 bp, Zea Mays
cggaccgccgcggctataaatagccttgtggtccacgacgaggtatgaacatcacacacattgagttgaatcgaagccaaattcgcgctgcctatgccccgtcctctcaaattgattgtgcacggtaaaactagagtcccttgcggccgtatagccccaagctccaccctcaatttcacccgagcacgccacgacgccgttttcccccaaatcggtcagtcgcgccgccgagaacagcttgtccgtggccagcccgctctggtaagactctgtccaattcaagcgttgttttagtagctctgcatgcttgtgaagcttgtcgtggcaaccgttagctcaactcggccatggttaagcgggaacgcgagctcgtgatcacggtctccgccgtgcacatggccagaccattcccaaagtattcaagctaagattagtgagtgttcc

SEQ ID NO: 64513 - DNA, 435 bp, Zea Mays
ctactgttccccgcatgttactgaggcgaaagggaacgtgcggacgggacaggacaacaccgtccatattcctcctacactcacctacgccataacgtacaacatagcctttacccacacgccaacaagaccgggcaaaagacaagactggacggagaagatcttaatccaccagccctgatcttactccacgatatctttgtttttctaggcccacttgttgggactcagactccatgtaatctcctcccttgagctataaaagggagagcacattcggtagagagcagaccagcttgaagcgattcgagctaggacgactcataggatattcacacgaagactccccaagacgattaggacggtgctatccgccacgcggctagcaattatctccaataatagtattcatatcttataacacatgctcctcta

SEQ ID NO: 64514 - DNA, 850 bp, Zea Mays
ctcgcgtggcagtggcttgagtaactatagagaagctcttatttataactagttgtatctctctagtataattaagtagttgacaatattgtgtatttgagagaacccaacctagagacttagcaactatagttatttaaggggcttgcttgttgtgacatagagctagagcaagtatttccttccacacaaattttatgctaattaatcttattctagtatttagtggtattaaaaaggaaattttaggctattcacccactctagttatctagatcctatcacttgcacttgcccctctcccttttgcgctcgcccaccctatcggccacgcagatccatactaccgaccacactcgcctgccaagccatggtcgcacgagagctcttcgtgccatgggctggcctagtccctccataatgtcatgataagtccttgcctaggtcacgatgagctccatcgccagccatggccgaccctgcttttgattgcacgtcttacccttcgctaatgaggcctaccgccaatcacgatcaaccctaggcaggcacagcaaccacatcgtggctatgcaggagctccatcgtgccatggcctagcctaacacctccttgatctatggaaagacccttactaggtcatggcaagattctcccctagccacaaccagtatcgtctctcatcacgcatgcctcctctggtcatgacaacccctcctcattgtatgtgtcaaagaagactatgacatgtgagctcatgtgtaattgagacaaatgaggagaaggtggtcccattgtcggttgttgttcggctccaatttgttgactattaggttgtatccggcatctt

SEQ ID NO: 64515 - DNA, 700 bp, Zea Mays
ggaagggtggcgtggtctacattattggattaataggtagtagagatatagttgttgtttattgatgagattatgtatggtatggataatgttttggttttatctttcctattttcgatcgaccaccatatgtttatgttcggattagtttgtttctgtcatcccgcatattcagtgtctgatctattttgatgatttcggatttcggattcgctttcaaattaaaatataaaagtaaaaatgagaaatggtttatcttgaccgatttcatccatttttatctacgtatctataccactatataaaccacaagtttaaactttgcaaaactcacccaaccaaaccaccccaccgacaacctccactaaatccaccaaacaaattgcaccatacttaacacacaatcaaaaccaactgttcagatcaacaaattgcaccagacttaacacacaatcaaaaccaacggttcagatcactggataacccttttcccttactcaaattcaatgaataatattatttagatcatccctcattcctctcccgtgaccctagactcctcctcccctccctctgtgttcccactgccgcctctccctcactcgcgccgccaccgtcaacccctcctcttatgtcatcgccgtcgacccctctctttcctttctcgagatcatagcatttaagactggatatatactag

SEQ ID NO: 64516 - DNA, 438 bp, Zea Mays
gataaagaagtgaatatgtggagagatacttagcgcagatgatggcgtaggggtctctgtccatgacgaggggtgaatccgcggcgatgctctgactttcggcgagaaattttggggcccttagttgctcatcccgtccagcgaggccacgaataccttcatcgtggcacagtgaagcacccaagcccagctccgaggactcgacgatgatgagctcgtgggtcgacttctgtggcgattttaccctcttctccagatttcggtgatatgctctttgtgctccggccgaccgtacgtgccctcaaacactacacccagcatctgcatgccctagcgattctcttctgcttcatctcgcagtttggataccaacgagatctggaggacctcacgacgggttcatctccttttttagctcttcgcaacgctctatttcac

SEQ ID NO: 64517 - DNA, 556 bp, Zea Mays
gttacactaatgttgattattgttccatctttgtaagccaatcttgcaccacaacacttgttgtaacttaaccgtgtggaataagatatatgctgataaactcacacatatacctcatattatatccatgtacaggcaagagacaaggagatagtgttgaagcttggcttcagatggggcttggcaaagatgcagtttgatctccttatttctcttttctgttccccataaggtgtagcatgtgcaatgatccgactaagatttctcatggattctttgctactgtatttgaacccgccaatatgaatgttttgttgaacccatttaaagaccactgcattttcgtattgtccaggtatctctatgttctccatcctcttcctatcactaatgtgtggcccctacatgtcatcttctttctccttttctatcttattcctcctttcctttcttctccagattgtgttaacagatgtagacattgttggaaaggattaaaagatgttgacacaatacctattatgtaatagaaaccgtcgcaacgcacgggtaccta

SEQ ID NO: 64518 - DNA, 1105 bp, Zea Mays
gtaaccaagaaacgcgcacaacgtggagcgaggcataagtttgttggcggcgatggcggagaggttaggataacaacgacatccaaaaacccgaggtggtcataggtgggtgggaagccaaaaagcgcatggtgaggggtggagaaattgagagttttggtggggtgtcggttgatgagataggtggcggtatggagagcttcgacccaatagtgtgggggcatgctagagtggaagagaagggtgcggatgacattgttaatggtccggatagagcgctcggctttgccattctgctaggatgtgtaggggcacgacatgcgaagtgaaacaccgtgagtgaggaagaaggaacgggaggagaggttgtcaaactctcgatcgttgtcgcactgcacggctttgatggtggtgtggaattgggtgtggacgtatgcaaaaaatgagagagggtgggaaaggtgttggatttgaggccaagggaaatgtccaaaaatagtgagagcaatcatcgatgataactaaataatacttgtaaccagagacgctagcaacaggagatgtccataagtcacaatgtattaaatcaaaatggcgtgatgctcgagaggtggaagaagtaaaaggtaaacaagtgtggcggcctaattgacaagcatgacaaagggaatcacaagtgctatgagtacatgaaatagcagctgaatggacgaggggacgaaggccttctgatccaaggtgaccgagacggttgtgccagagggtggtggaggtagcaaccaaggcgtggggacgtggtggtgatggtagcaacgggtaaagatcaccagaactattgcacttggcgatcacagtcttggtgcgaagatccttcacagagagaccaaaagggtcaaactcaactgaacaattattgtcaatcgtaaagcggcgaacagaaattaaatttttgataatttgaggagtaaccaggacgtgattaagagaaaagggaccatgagcagtaggaatagatgtggagccaacagaggtaatagggatgagagaaccgttgccaacaacgatactagagggggaggaggaagagacagtatgagggatggtg

SEQ ID NO: 64519 - DNA, 322 bp, Zea Mays
agaaacatgaatacctaagcttgctaattccacacctatagtgattgacttcaattgctgctgttgtttcattcgagtttatactacagtgggttcgtaattactagggattacctgtctatacaatctgtggtggctggtgggtcgccccctttgcaacctaacatgcatgcatatgattttggtcccagattctagcattatatatcattagtaaatctatttggctatatgaagatggaaatcaaaataacctatgtgtcccatgtacttgtgctcacctattgtgacatgcacaagttaatctgttctataagtctgt

SEQ ID NO: 64520 - DNA, 508 bp, Zea Mays
ccggggcttggttggggaggagatcggaccacaccacacctccgtccatggtagagatgccactccggcgagaaattctgatgggagttggtcgtggtttcgcacgataaggctatgcgcaactcccccacgtgatgtcgaagcaatggcactgccctcccctgtctgtatgacgatgtagaccgagacatccctggtcgcgtggaattgaaccgaagaatgcaccctcacgccttcaatctctccaaatcagtagcggggattagggttcctaggaggaaaagggaaagaaacaagctctgacgcatggctttatggtcctggttgagatcggttaagacatttgcgatattcgcgtggaagtcgaccgatccgagcttctcgccgcacccacaacggcgcgagggagaaacctgacaggacagcccacccgacatccagtgagcacgaccgagagagagaacagagatcgcgcgcgcaactgagtccggctgacaacagggccccg

SEQ ID NO: 64521 - DNA, 868 bp, Zea Mays
tccctttgtcattggaattgaggagcatctagtaatcgctacttgggagcactatcgtgcccgtagaagggcgtgcactatatgaaggaggagcaccataagatccatgtagaggaccaccatataaatattcatatgggtatggaggatggtatggatatgtgatggtagaggacgagcgatagtggtaggagatttaatggtagaaggagcatcgatggtaggaccagtggtgaaaccaacctagaagcagagtaagggcataaacacatagtaagactacagtagctcaccaagcgcccagtgtcaagccccaggccaactgggagcaaccaagctcaggcgtggttaggcctcaggcgtccgctgaccgaatctagtagatgcctgatggtcgggctgtgggcaaagaggccagatggaaggatggtagtgagctcgtctaacggcaaggaggtggaggtgaggcatggcgtgtcctatggaagtggaggcaaggcactaagacatgcaaaggtggaggatacgagggagaggtgcgtggagccgcagcccaagatgtggaggcgacgcagctactgcagaggccagaggccttgggtttatctcttggtttacttgggttgagccaccgaagcctagacacatgctcaggcaatccaagcctaggctccacctctagttaggattatcattcggaagatgagcatccattaaaggtcgataaggataaggacacgttggaggagtatatgagtatggaaatataagttaataaagtctgtgcagtgaggaaacaagaataagtataaacatcctcctaacgacgatgtacgaaagaaaggacattgaagaagccctccatatc

SEQ ID NO: 64522 - DNA, 405 bp, Zea Mays
gctcccctaattctataagagatgttagtttttaagctaattctcatgtaaatgcttctaacagctcccctaatctaatttggcccccctaattttggatcctggcttcgcccctgcctaggtgcccctactttgtgctagggctagaggtggatgtcaccccgcaagttgacaacagtatgcccatgcttgagtgttagttgggcctcgttcaagcctttttgagcaattttactcatcgtgacccatgggcattgggcctggggttttaacctcgacaatatggacgcttgactccttcctcgagtgtatgggttttcaatgggctagcttgcgcaaatcaaggtaggctctgtactctctcattctttatatactccctccgttctaaaatataatttgttt

SEQ ID NO: 64523 - DNA, 550 bp, Zea Mays
cctctctctctctgcttcctatcgtcaaagccagacacgcatcaatatctctctgttaactacgtagtggatctgttggggttttgacgatggtggcggcaacacagccgtatcgctctcaggtacgctgttcttacgagttccagttctgccagccaaaatctgctatctcccttacaacccaggcttttgtataattgccatgggctgcccgttagatgggcctaattcatccacacatttcctatatactttggattcggccttttagcccgagtgctctgctttgcttcctgaacttcagcgtccgcctcttccatcacaacagccttcctagtgttcaggtgccctgtgctgctaacatccccttccccttgacagacagcttgtccccaagctggagcccgcgggaactgctgcttgatggtgtgttcatcttcccaggtagacaatgaagccggccagttagaccatcggattaggagttgaggtataaccttgttacctttgcgaagcggccttgattccagcacttctgtgggtattttca

SEQ ID NO: 64524 - DNA, 778 bp, Zea Mays
ttcatgatggcatactacgcttgtagcagctcgaatgaacactccacatccttttgatattcatgttgtttctttgtgaaatatttgtgctttgttgctcccatggtttgagaagctattgttaagtgtgctaaggagggtaaatgtcatctgtcatgtactaccccatgttgtattcgttactaattactatgtagttcacaattgtccatatccctctaacaatattatcaaacatattgtagaccgatgcaacacatttatatcattaagggagctaggaaaaccaaataaagaattccaaatccacaattcatagctagctatgatctaaagtattatggtgggtttcttgtagtggcccctatacatgccatgtcaagtcgtcaaacatttctcccactcccagtgcatgtagtttatgcttccaatcatccctacgaacccacgttgctcagcctctacttgtagcctagcaatgtcctagccattagggggtcattcgccatacaacgccacgatcgacctagtgaattgttcaattgtttcgaagatggtggactcccccatttgaaacacctagtacaatcgattagttgaccatccataagtaaacatgcagagggcaacctttaccttttgtatggtcgagaaccccaccccccccaagtgatcgtcgtgtttatgcgatgcttgaagtatggattcattgcctcaagtgcgttggcaacgtcctagaacattgactgtgtcatccaaaacctatcaagtattggac

SEQ ID NO: 64525 - DNA, 626 bp, Zea Mays
cacaaatagtgctaggaattgggccgggctaacatggtccggacctatcgtgcttcgggacaaataggctcgggccgagaaggcccaaaaaactttcgggttgtgccatgacaacctaaagagtacaaacggtggcccaacttggtcctaaagcacgtcgagccttcttcttcgggtcgggttggctcaagcctggctcatatgtgtgggtcgtgctagagcccaacagtccgaaatttgaggctcgacctagacctgtcttcgagccgtgctagcccgatctataccacattgtgtcgggccatgcattgagctcttatttctggaccatgctcgtgctggctcaaaaagactggcccatgttactagcactagctacgggcactaggcacgagcaacatgtcgcacgcggtccacatccagcatgctcgccctgtgccacatcgccctcgattggttgcatccttgtgccctcatcaccttgcccgtgcgagcgggttcatccttcgctcgtgtggagaacgacatagagacgcacgaaagggaaggatgacaatgttgtgctacaggcgaggtgtgcagtgtcgtgctataggcatgcgagatggcatcacagtgacgtgctt

SEQ ID NO: 64526 - DNA, 414 bp, Zea Mays
cttagttcaggaacatgtagcctacatgatatggccactgataaatagctggtaaatgccaaaagaaaccatcattaaccctagcgaaggcggcttggttcgactgaaatacaccttcagatttggagaccagtttgtcgaaccagatgatgactagctgaagtgtgttgaaaacactagcgatgagctacttggagcatattccaagtccgaagataatgcactatctgcggccttcgggaaccgaaagaagaaaagattaaatagggtttttgatgctattggatttgtgtaccctgactaccgctacccgccacgggggcaaaagagaaaaggtgcgacctctggaaaggttgccgcttcggctgctccgagcgagcctgcgccgaagagtaaaaaattgaaagtcctcac

SEQ ID NO: 64527 - DNA, 476 bp, Zea Mays
ttgggatcgatccgagggatgtctgggatggtagcactctgttttcttttcctgggagccatcatgatttttcaaacgacgcaaacggattcgggaactcagaaagctagagagcggcgaagaaaaaaacaagaactagggttcatagctcaagaggacgtcaacagaagtttgggttggcatactaagtcgggcgcaaaggggcaggccgatagctcgggagagttttggttgcagcaaaacaacatcactcgggcattacctctaaaatgctagtgaaccgtcagacacaagagcggagtatgcaacaacagattggcacgaaagcaggtgttcattcaccagtgggggagtcattataaaattgagaccgactcattatgagtcggcctccagcccttcaatcttacattacattacattactacttagactacattacactactagttaaactacattattctactactaac

SEQ ID NO: 64528 - DNA, 1207 bp, Zea Mays
caaaatccgcttaagggtggcgccgatttagcacgaaaagtgtgcgatgacaaataagggcaaaggcgaagtcagccaccaatcggcatgggggccaagggcagtgtttcacatccaaattgttgactggcgacaactttcgaatacaacccaatgcacactttaggaaacataaacccttcagcaaaaacatgtgcaaaccaactacgagcaaatgcataatagaactcaaaataatatgggcaagggcaacaccccacgcagtaaaattacaaaacaagcacataaagggctaggaggctccaccttcgaaatgaagccacactccctataagtatacagtagcaattcaagttcctggcctttgaagagcaacctaagttccaactcttcatcacgacaatggtcacggaccccgcttaactcccccgtcaagacagcatgacgggggctgatgtccaactcacccagctccccctcgttaacatacaaagggcccacccctaatacctccccgagcgaaatccttgaaacagatccttgcaagcccattcgcctttgtttacggccaccatcgcacccatgcctaaacactacggagaaggtctcccttcgcttcagaacatcaatttgcgtactttttagtcaccgctagcaagcggagccccacttgaaggccttcacctatttcagtaaagatagcggcataacacatacgacatcgtaaagaacattctttcccttacccgagaaaccaaaattctcctacgtaggccccgtcatcaaaaaatgtgcaggcaccaagcaaatgttaatatcatgcccccaccacaaatatgcccccaaaactatcaacacatcctacacctgcgtgacactgatgtcttcattggtatcacggtacgaggtcttcatagtgctcggctcgacactagtagcggcatcccacgaagaatgtccttccacgctaggttcatccccaacatcttccagcaaggcagcggagtccctaaattcctcaacctcctcatccttcaactcctggtatagaagtcaaaatattagaacccccaacaaataaacacacaaccaagacctcgcaaaaaataattacccgatccatcacccgactgtccctcttgctaacaatggagggcccatgcagaccccacattcgatcgaatagggcacccgtaggaggcttcag

SEQ ID NO: 64529 - DNA, 561 bp, Zea Mays
aagcgggtagcatggagggtaacatttaaggtggagactgcagtgattgagtccattacagttgacaatcagctttagcagccattattgttagagtctgcaggtggtgttcatgacactggtgagatagatgatgagtcagatgcagatgatggtcagtcatatgatatagatttaggtggagatttataagtttcagactctcctattgcacatcgcattcagagacagagacaaccaccaaatcgatatggagagtgggtcactccgtttgtgagacttagaggtacaactgctttcgctttgacagttgcataggatattgagcttgatgagcatagcgcttacaaagaggctattagtagtcttgaggcagcttgttgggtctaggctatgacagaggaaatagagtcattgcataagaatcacacttgagacttggtattgccgcccaaagggcacaaatttgttggttataaatgggtgttcaaactcaaagattcttctccaatagttgatgctccaagatataaagccagactagttgcaaaaaggcttcaa

SEQ ID NO: 64530 - DNA, 679 bp, Zea Mays
ggccaagggagcatccgattctataggaattagcaccaccgaaagcaagctctgagtagaaccaacacaaaataaaagaataacaatagaagaaaacagttcgaaggaagcaaaatggccctattctttcaatacaccacagataaaaggatagacaccagaatcgcacccaattcgccccgcttgcagaaatgactaatccaaccagacgaaccatgaacccactgaaacgcaaagggggatcaatgccgagacggacaggaaacacaacactgccacatgacacacatggtcgtgcctgatgccaggcagatgagcaacaacaacgacatgaaacgctcacaaattcgttcggcacacgacgacgatcgcaaaacctaggattcggcagcacaggcgaaagatatgtacgcgcccgctgattgagacaactgaggagaggcacggccgcgagggaaagagagggaaggaggtgaaatattaccttgtgagcccccgggggtcggtggaggaaaggaatgagcggcggagcgaacggaagcgcggaacactgtcttggcgaggacgaacgccgatttgtttggatcactcgttattggataatgcaaatcgaggagatggcgggcaatttgcggctggtgggcgcggagctggcggccatagatccagcagagagagg

SEQ ID NO: 64531 - DNA, 998 bp, Zea Mays
gtttatggtctgactacacaccatggggtaccccatgtgatgcttttgcgtaggatggcgtcattgatcacgactcgatggtacgtgctgatgcacatcggaacacaagagagcttatataggtttaggccgctggaatgtgtaataccctacatcttgttgatgctgagtaccgagtattgctggtgttcataggttacagatgagttgtgggcaacgatggatgaattatcctatcgatctaatgtcgatgtggttgctatgggatggctaacgaggtatgagatgggatgatatgagatgattttgtaggggtaccccctcagccttatataggcgactagagggatatccctttacaagtcgtgaagtctatctaactctatctgagtctatctttaaagcgacatgtgctactgtttatctagagtttggtcacctttgttccgagttatctcccgagtatctagctctttaggtacatgcaatcttcgtgcgcgaggcatcagtgctccttttgtgtcagctgcgtataagtcagctattttagtcttcattttccttggtcaaactcgcttagcttggtcatgacccaatggtaagctttgctaggcaaatcgtcaggggtccatcaggcagcccatggagcattttcgtgcttatagggacccatgggatatctatctcccacaagcccctaaggctcaagccaatttttagggtaattggctcgagaccccaaaaatggatcatgcaatttgattattccatgcttttgagtgcatctttgttctgcctttgtatcgagctttgagttgatttgagcatcaatcaactgaaagttcctcatgatcttgcttttgaagggttttaatttgtcgcctcgaatgtgattcgcttaactgaaacctagccgactgaaacttgtctgattgaagcctggctgattaaaacctggccgactgaagcctagcctactgaggcttggccagggcacg

SEQ ID NO: 64532 - DNA, 668 bp, Zea Mays
taaaacagtactattcaaaaaccatggttttgaaatacttttcttccaaacatacttatctagcaaacaatgtatggaggaaactctctcatctctaatgaaactctctcatatctttcttcgttaaattacatgccatgtgttgtggtttcagagaccgagggacaataagatttatgttcggtgggggatgctagcacagactcactccgaatgttgaatcactaggactcaacgatggatctgagactcgggggttatactggttcaggttcgcactatattccagtgtagtgttgatcgtagaattgctttgagcgtgttataataagtgtgcttatgtgggaagaaggagggggcctgcccttttatatctcaagggtaggaccttacactgggcttgtattctactagagagagatagaaagagaggaagagagacctgctccctgggtcgtgcgtagatatactctcggcatggtgtcgtcctttcctgcggctctggcttttgtagcgagtccattgttgacgtcttcataatgggttccacatatcagtctcaaagtgcggtcgtacggggcatggcttatcctatcgtcatgggcccttcgtcacatgccagcgtgcacatgcgcatgctcggtatggctcattgttccgaccttctg

SEQ ID NO: 64533 - DNA, 554 bp, Zea Mays
agtctatacccttttgtacctgacttgtacccaatgaacaccattcgcttggatctgtctgataatttgtttatgcctggaccgagttgtttcacatgtgctagatagccaaacacccttagatgattcaccttgggttttttccatgccaagcctcaaaaggagttctactttcgagagcttttgttggtgatctattcaatagatacactgcagttctgactgcctcgccccagaaaatcatgggaaccttcattgctttcagtaaacacctggacatctcaaccacagattgattcctcctctccactactccattctgctatggtgagtaaggagtggtagtgtagtgctttatgccattttggttacagaaaactgtgaagaggtttgaagtgaactcacctcctctatctgtccttagccctttcagccgcttaattaccagactcagtttcttctctcagctttatgtttttgaagaacccaagcacctgatcttttgtctgaagcatttccacccacatatatctgctatagtcatctaccacaag

SEQ ID NO: 64534 - DNA, 568 bp, Zea Mays
aaaattctcaacttgtgagaacaatacatgtgactttattcccaaaattataccaaaacctcatgggactcacaaagaaccagatcactatgtatttcaatccagtgtcgtttgaagacaccaaaaacctggaagaagtccaacccaactccttgtaaaaattcaaattcgaatacacagggaagagggagtggtagtgccgacctaaggtccggttgtgctaagtgtacgggcggcagtgctaggcactaaaaactgtctagaaaaatctcaaactttgtataaagtttgcgcggggagaaagatttttactgttgaactatcaactcgagcaacacagaaaacaaaacgtaaattcaaaaactcgagaagaacgggattttctaggacgaactcaaaacgagataggagaggatcatgaccacaaacaacaccatctggccataagaaatgatcctaggagtaaatctcacctaccaacaaatcccaagagaaccggtgaatcaagaactcgatggttttgcacaaatccacaagagaagggaaggggagaactcaagaacgaaag

SEQ ID NO: 64535 - DNA, 364 bp, Zea Mays
caaacaagctaagcagagtggtggtagaattggtgatggccagtgagagcagaatagcacaggtggctacaacgatccccgtcaggaacgtgcaggatcttgctgcttgcgacgccggcgagctaacggcagatgcactggagcggtacgttaggccggacatcgacaaggacgcagtcctttacgagcactccggtgagcttccggtggttgaccttggaagactcaacccacagcactgggaagaggaggcggcggccaagctcagatatgcttgcgaggagtggggattctttcaagtaggtgcctccattctttataaattagaagcgtaatttgactttctaaacgtatctaaaaattg

SEQ ID NO: 64536 - DNA, 934 bp, Zea Mays
caaaggttgcaataatccaggaggatgtgtccgttcccctttggcatgttgacagacatcacattgtttcacatactccagcacatcagcttttaaccccttccaccaaaaaagacgcttaaggcgatgataggtagcttgtccccctgagtgcccccccactgcactgtcatggagggctgcaataagtttcgtttttaatgcagagttgtgagcaatccaaatcaatccatcttttctaataaccccctgctgcagagaaaaacccttttcattaggactatgcacagccaactgagccaacagatcttgggcctcagcatcagtagtataagaatttagcacatcttgaatccatagtggctggacttgcagcacagtttggagaaccataagatgacccactctagacaaggcatcggctgccacgttctccttccctttcttatacaccactcggaattgcaaccccatcaatttagccatagctttcttttgccattcagagtgcaaattctgctcttctaagaagcacaatgctttgtggtcagtccgtacagtaaattcagtatactgcaaatactgacgccactttgatactgccagcaataaagccaaaaactccttttcatagattgacaacgattggttcttagtgctcaaagccttactcaaatatgccactggcttgtggttctgcatgagcacagcaccaattcccacagcacaagcatctgtctccacctcaaaaggctcagaaaaatgtggaagggccaataccggtgtagtgatcgttgcctgtttgagagtacagaaagcctcttcagcctctggagtccacacaaacaatttctgttgcaacagcctggtgagaggtttagctatgattccatagttcttcacaaatcttctgtaatagccagtgagtcccaaa

SEQ ID NO: 64537 - DNA, 637 bp, Zea Mays
aaatagagccatatcaccatcactctcactttcgttttcttcatcattactatcttctttttcaattgccttagaggctttagctttgagagcaattgattcattcttcactttctttgctaaacttatagcatcagcttgagatttcttgaatatatcttgagtaagaatttcccccaatacttcggttggagaagttgtagatagatcacttcttactaacattgtcacaatggtctcatatttctccggaagtgatctaaggaacttatgagtgaaatccacatctggtacattaaaaccgagtcccttgagttcattcactatctcatttaaccggttgaacatatcggatacactctcatcttctttcataataaattgctcaaactttcctttgcacacatatagcttggcactcttcacaattgtagttccttcatgaatttccattagcttaatccaaatctcatgagcagttgtgagattcttgatatgattgaactcatttatatcaagagcatcataaaatacattcatggcttgatcatttgtaaggatattctcattgtcactaacggatggttcatcttctttcaacacaacaaatccatccttgacaattggccaaaatttt

SEQ ID NO: 64538 - DNA, 378 bp, Zea Mays
gatccgaattttgaaggggaaagctggcggccggagagaggggtgagtcaccggcgaacgctatcgtggccttcaccgaggcaatgttacaggcaatggacaggcttcctatgacggtttactgcgacgtggtaaggctttgaagcacgtggcatctgggcagcaggcggcaaacttcggcgaggtcacctggaccggccgcagggcatgtgggtacggtgacggagcggtaatagtgccccaagttcatccaggcgcacgatcttttcacccgcgaccgttatccgcacaccagagagcacgaatcgcagtgctggcgaggatcgcggtgcgggatcacctgcggtgagatacactgaacctggcgatctgattcag

SEQ ID NO: 64539 - DNA, 452 bp, Zea Mays
tggaaaagcatatattgctggtgactggctcactgacattgaatcctcaagcgagtcttcttcaagtgaagaagagaatgatgaaaaggttgtcgccatcgctggggatttctcttcaccaccaccatcaccctcatccacttctcacctatgccttatggctaaaggtgaacaaaaggtacaacttgagaatgatattattgatgattgtgatagtgatagtgatgaggagtatgcttctccttcctatgatgaattagctgacttacttaaacaatacactcaaatcattagaaagtcaaaagctaaatgtgacaagttaaaagatgaaaatgagtttttaactgccaagtacgacatagttgttaaagctagtgaagaaatgaaagatgaaaataaaactatgtcatcaactaaaaatgagctcaaaaccgcccttaaagatgccaaag

SEQ ID NO: 64540 - DNA, 481 bp, Zea Mays
gtccatttgattcttggtcctgtcattgttagcacaaaatagagacaaaaaggcaacaaacaatgtgaaccctacaactatctctcagggtggtggtggagatggtggaatacaaattatgaagcgtcttaccccgctcttacaacgttcttaccagcactgcaggtggcaaacggtgaccggtgtgactgtccaacgagcgtgggtgtgattgcaaaagagtacctgttctgctcgagagaaaattggagctatgggaaggctaactaaatatatatatgtggcacacaagtcagtaacagatagcaatgctgaataagtgttccaagtactcgtcctagttgctggcctagaaaatgtaatagaacagttggaccaaagcacaagaaaggaggtacaagtatctagtgggaatgacagttctgtaaatagggcaaatttttcagcactagtagaaatcaaaggcgcgcttcaaaaggag

SEQ ID NO: 64541 - DNA, 1028 bp, Zea Mays
tgttgtccgggagacagtataggaaatcatcttcattagtgccattgaacactaaggcccctttcagatattttagtttctgggcgtagtgtctcgcttctaagatttcttcttcggataatttttcccccgaagcatgtcgaacaatgtagtcaacatctttggctggagcttcgggggcaggggatttcgctttttctgtcatatcttgccccgctgccatgccggtatctgaagtttgctgatcaactttatcttcaggcgtgacagccttcgtctcaaggggcgctgaaggcccagcttcggcctggactttaacagcttggacaattttctttgtaggagcaggactcaaggcctttgtgctctccataacggcgtctagcacgctggccattctcctcctcttgggagttgtggcaggagccttttgcactttcggcaattctgcctttcctggtggactcaggatttctggcattttcactgatttttccaattttagttcttcggccgcatcatctttggcttcggctggcccgactgtaagcaccttcgacactacaatcgattcttcagcactctgcacggtgggggtcgcttgttttgcttcggcagttgaagaggtcccttcgccaaattcaggcaccacgaccagttcaatatatcgtggccgatgggtcagaacctttattttcttgccctttggcacagcagtagtggctgaagcagcaatttttctcttctttccttgccttcgcagtgggtagtgataattagggtatacgaagccaattgcatcaaataccctgttcaatcttttcttcccccggcccccgaaggctatggataaggcatcatcttcggccttggaatatgtcccaagtagctcgtcgctggtagcttcaatgcatttcaactagtcatcatttggttcatcaaacatctccctaaatctgaaggtatatttcaatcggactaggccaacttcactggattcggcagtagtctccttcggcatatcccag

SEQ ID NO: 64542 - DNA, 615 bp, Zea Mays
gtttttcgacgtttgcatgatacgttggtggaaaattatggtctgcttccaagccgaggtgtcagtacaacagaagctttaggtattttcttgcgggcatgtgggggtccacactcatttaggcagataaggaataagtttggtcactctttggaaactattagtcgcaagtatagtgaagtccttaatgcactatataagatgtcttctgacgtaatcaagccaaaagacccaaatttcatagagattcacccttgattgcgagagagtagattttggccccatttcaaggattgcataggagcaattgatggaagtcactttcccgcatctgtcccggccacagagcaagcaaaatatattggtcggcacggttacgcatcacataatgtaatgatcgtttgtgacttcgatatgaggttcacatttgttgttacgggtttgccaggttcagtgcatgacactagagtattacaagatactttgataacttatgcagacaggttcccgcatccacctgaaggtatataagtatgttgtacttttgtatcatacgttattaatttatgtcatatgtatttaacttgatatttttgtgcaggtaaatattatctt

SEQ ID NO: 64543 - DNA, 1047 bp, Zea Mays
cgacgcaggctctctcttccacgctgtctgccaactaaccctgcgggtgggaccactgtgtcagccctcgcgcaagcgctcctccccacttctgctactgatggatggggcccactactaacccccacgtctatcaactccgtccaccctaccgtggaacgcggccgatgcgattcctctaccgcgaattcgcggacgcggattgacccagcctcccgcccggactgggtacaagtagatcgcgcacgcgttcctttcccctctcccctctttatccctaatttctcaccaccacaagtcatcgccgtcgcttccgtacgagagtgaatccgccgctgacgaaccatgccggtagcgccgccgcgccagcaaggcccggtgttggaggttcgccgacgtgtctggaacccgatagctgcaatcgtcgagggtgtggagtccggggtgtcgacgaattgctcaccgtgcttccttctccgccgcggtgcctccatctcccgtggattagtgtctgtgcagctacattttggtgagccttcgttctatcgtatccgtggtcaagctagggacgagtagggaccagcggtttagactttggtaagctagcgacggtatggaaaatctccggcgagatctacaccgcggctgggacagcgctgccgcgcgcctgaccagaatggggtgaggcgaattgggatcgctagatccctggtgaatggcgcatattagtttctcacataccggttcggtggaaaaatctgtgtcgtccgatttcgatcagtcggtagtagactagagtaggcactttagatctggatcgttggatcggaatccgacgactatcgtagcgtactgattcacatgatgtgtagatctaatctgtggtgttgtgtgccgatcggacgaccgagaacacaagataccccttcggcctgttcgtttcacaaatggccccctgcttttctgttaaatcaacctgcggtccactgcggtatagaactgagtctagagaattttacacgttaaaccctttgtttctgtttaatt

SEQ ID NO: 64544 - DNA, 442 bp, Zea Mays
tatgttatacctttgccttcacttgatccacaaccaatgcttataaatctccaagattttctgttctatgtggtccaaccctgcattcttgtttctccaagaaccgttagtccacaaacagtcatcattaattaccaaaacatcactaaggggcctagatgattcacaccagcctctaccaccccccaccacgaggaggacctagagaacctcgacaacctccgcagcaggaagggggaggaggcggagcgttttcgcgtgttgacggagaagtcaacgtcatcttcggcgggcatgggtcgcaagagagcaagaggcagcagaagctcaacgaccgtaagatactggtggcggccaccagtgctcccgcccgtattgatggtccaaacacccgatcaccttcactcgggcagatcaatggctcaacttcgatcatctgggc

SEQ ID NO: 64545 - DNA, 405 bp, Zea Mays
cacagaacagggcgcttgaatcactttaatgtggctgtcaaatgcgtaggagtgatgtgtatgctcttgagtgtcttggtattttgtagaggttgaaatggaggtccttttatagccccatgtgacaaaatggtcgttagacttgcctccaaaagctgtagaatttctgctctcggctggcgcaccagactgatccggtgcccagcgaatcggggacagggacgccttctccggcatcctaacttggcacttccaaattgggatggcaccggactggtacgaatagccaccagacctccatgtgtttgcctttcgttgaagtagttattaggcgccgaagtagccattaccacacagtccaatgcagcaccaaaggtgctcctgactgctattgttgatagtttg

SEQ ID NO: 64546 - DNA, 346 bp, Zea Mays
gaaattttgatggctctattgtgctctccacttagtgaactgatttggggtttttgttgggcctttttgtaatatctttctcaatacattttgtagatgttctataatacttcatctttggtaaaggtttcctttcatgatttagccatttgcccactctttcccctttaatcccatgtttagggtttaatggcttaagaggggatttagggttttagaatcttttcatcagtgagaatgtatgaaggccaaggtatctttattgttatgatcaatacttagcttagccatgattccaaaacttttagtgccttcactctccaatttaacatattggataagaggc

SEQ ID NO: 64547 - DNA, 550 bp, Zea Mays
ccaaaaccatttcacaaaccagacaaaaaattagagagtggagtgatgatggaccacttcattgaacaaaccaaacacagtgtaagtttctaatttccaatcaaacgtcgacccagtgtaagttctacatgcctctttgggttctactagttgtttaagaggaagaattatatggatcgagtttaccgagagcgctatggttgatatacgttcagctttaatagcttgctggttgccttccctcctggaatcctgggtgttcagccttaatagcttgttggttgccttccctcctggagtccttgcacccctgcagctgtaacgatgatgaaagtttaccttatttcttctggaaggagcacaccgtacattctatgtagccagctgctaatcagaaattcagagcattcaatattgaatttggcccaagatttagataacaacataacaagtagatggtttgtcgtggacagaaaaaattaacttcctgtagtgattccaaatagtctttatagaagtagattatctctcagacaatatcgggttaaca

SEQ ID NO: 64548 - DNA, 772 bp, Zea Mays
tcaaggcattgatattttgattcttctatactctagcagttctcatacgtttatcaatgaactagtggcttccaaactctatggtggctctcctatgatgcaggatattttagtctaggtggttaatggtacgtgtctcatctgttcttcgaaatttttggacaccatttggtacctcaatgatcatcaatttaaatccacattgaaggtgttgcctctttcctcatacgacatgatagtcggtatggattggctagccacacatagctccatgttggttcattggacaacaaaattgctcaccattccttatcatggctcgacagtcaagctctttggattatagtatggaactatccaatgttcagtcatggaactcaatcatattgatggcctgcctaacaaggatcgtggcctccttcaacaattaccagttccactacaggaccttgttggctgttttgctcatgtgtttgcattgcctaagggtctcactcccataagagactgtgataatcaaatccctcttctcccgatgctaggcctatgtagatgtatccatattgttatgctctagctctcaagaccgagattgagaaacaagtggaggaaatgcttcagtccgatataattgaaaggagcaaaagtgagttcccttcctcgatcattttggtaaagaaaaaggatgattcctatcagttttgtgttgattataggcatcttaatgtgctgacagctaaaactaagttcatggtcctcatcattaatggat

SEQ ID NO: 64549 - DNA, 489 bp, Zea Mays
ctgcccttgcccagagtcggtagcgttgcagtggagctccaatccgagctctgattcctcctcgctttcggccgagcaacggtgagacctggcgcgggttgtgcggcaatcagcagctgagcggcagcagcaagggcttgagcaagggtagccagcgcgagtgcgagggaaccatctacgagcgtgagggcgaccagaagaaacattgtactgttttgcaagaatcaactctatgggtatgctacctctctgtcttctttctgtccagtagcttgttagaataagaatttcaataaaataagaaaacaaacaagatatgttgctttgtattattaattggttaatttgttagctgcatgtcttgtgtaagttgttcagtatagtcaattaggctgttcgagaaacaattgttccatttgtagtgaacttgtggggtatcacatcttgtagaaacaaatggtatgctaaatccctaagcacacattcatt

SEQ ID NO: 64550 - DNA, 466 bp, Zea Mays
gttagctgcatacccatcagggaacatcaacatcttgatccactgaagtacttccttcttctaggccctgcttaggacgaaatcggccttaggccttctccacgtctttctgccacttggcggcttcatctctaggtttggtctatcacataacgctgccagatccactcttgccttcacgttatcctttgacttatcaggaatgtccataattgttgcccacagtgcctcggcaacattcttttcagtgtgcatcacgtcaatgttgtgtggaaggagcaggtcgtcaaaataggggagccgagtcaagccaccagacttatgtgtccacatatgctgctcaccatatcccacaaaaccaccttctgtattggccacgagcccatctatctgttgacgaatttcggcaccagtcatcgttgcaggtgggcggtctatcactatgacacctttcataaagttcttg

SEQ ID NO: 64551 - DNA, 414 bp, Zea Mays
gaccacttcaacaaacacacgcaggaggagagagaccagcgctgcaaaatacgtgtggggtgggcgcattatattgcatgcgtccactgctaggtacttagctgctgccacaacctaacaaaccaagctggtgcgcatacactgaggagcacaccactgcacaatctcacaatgcaggcaggcaggaattctccatgttatgcccaccaagctaaggaattgggtcaatatgcagcaggcaccaaaaccacgatccatgtacgcattctgacaatgaaggacagtcgctccttggattgtcaacacagcacagagcaacaccaaagctggaaatcgatcgcaatcgaccaaggacaatagtgcccacgattcaaggagacatacatgagcaagttgccgatatctagacaccgc

SEQ ID NO: 64552 - DNA, 358 bp, Zea Mays
tctttgcgcaagagtaatcattctgaagtttggcatgtttttgcttaagggaaggggtggtatgtattaattggattaaatggcctttcttataaaatattggcaataggtattattttgcacctttccaatgggtttgtatttttctctagtggtctatctcaatattgacctagcaaaattttatttgcccattattgcattattgtgggttactcatgatttaattgaactatggctcattatcatgttctatttatttaccttacttaaaatgttgggctggggtgtttattatttttgcagtggggttttggtggttacaagtccactagatttttattatcaattttgggtc

SEQ ID NO: 64553 - DNA, 836 bp, Zea Mays
gttgaatggtttcatcttgtggacagaaaacacatttttttgatcctgaccaatttctcttggcaaggttatctttagttaaggttaccccttgtcttaagaaccagaagaagatcttgatctttaaggggagttttagtttccagatgaggccatcctgccgtacttgtgcgttcccaatcaatgccgcatacatagactgagtggagaacaacctgttttgatgaaggctccaacgaaaactatctcttgcctggttcaacgtcgtatccactactaggctgactaaggtatgccatctctccaaattagcaccatgtaggcctctcctgtaggagacattgagaggtacagaccctagcacattggccacagtagcattcttccgctgcactaggttatataggctcgggaatctatgctggagcgagaaatcccccagccatttgtcctcccaaaaccttgtgtcctgtccgttgttaactcggaatatcccattcgcaaagaagatatccttcactttcatcaaacccgaccagaagtgggaatctccttgtttcctaaccacttgaccaagggttttattccctagatacttccttctaaggatctgttgccataaaccctcctcgtttatcagcttgaacaaccacttactcaacaggcatttattctgaatatcaatattcttaattcccaggcccccaatgtccttgggctgacaaagaatattccatttagtaagcctgtatttctttttttcctggtccgattgccaaaagaacctagatctcaggtaatccattttccacaaaaccttacgagggacctcaaag

SEQ ID NO: 64554 - DNA, 388 bp, Zea Mays
caccaattaactgtctttgctttatcaccggccggaaggcagaagatacgttgcagttgcagggttacatcagaatagagagagtacccaactttcaggtatttgtgtttgaaacatttgacaaacaagtcgagttcggtagtgacgtctacaaaaatcagtgtataatgataaactgctaaatttaatatgaatgcaacacagataaaatctagcgatgtgtgcctttttcacaatgcatgttaaataaagtgaggacactcccccccttcgcattctttagggtagatgctcctatcagctaccccaaagatagtccaaatcacatgcggtgttagaaggcaggagtctgctggggaacatgtgggtcctacagtttggctttgcc

SEQ ID NO: 64555 - DNA, 502 bp, Zea Mays
gtctaggcttcggtcgcccttgtctggatacgtggagataccggacctcactcggcctaaggtacaggtggtattttccatacccggagtcattctgaaggctcatagctgcagctagagggtgccttcttctctagggctttgtgttctcttcgaacacctttgttcggggatccaacaggcccacaaggaggttagggtcctatttgcaggatcccaggcttagctaaagttgttgattctttccccttatggggcttggtggagatggtgatctagcccaggagacaagcctggcctggccacgactctatatggtgggccttagccctgggttgggttggttgctagtgaaatcctcaacggtggccactggggtatcaccttgtcatagtaggagtgggtaccccgtattcagggtaccgatagatgcccttgggcccacctcagttgaggcagcgaacccacaagtggggccataccttcgtcttgttccagaaat

SEQ ID NO: 64556 - DNA, 491 bp, Zea Mays
gaacaatgtatgtggacggcgggttctatataggaaaaacacaggggcacatgtgtaaaactaacccgcgaacgggtatcgggaaatgctgaccgccagatcagaattctacgcgcctgattagatccgcagcggtgtgaaccggaaaggaacaggtaccgttcgatcgaggatcgttggcctagatcaactacgcgaagcaacacgcccaggatttaatctcgtccgcgagacgcggatcgaacggttgagcttctattgatcaaagcggtatcaaaactctaatcctaaccgtccgcggtcgattcgtcggcctcgatttaaaatgctgagatctaatctcgaccccacaattgccatcggagggtcccgggcttcccgacccagggggtctccagatttaatcctggccactcaatccgatctaacggtcatccgaccatcgtctccacctaacccgagcgccaccgcgccagctacctatgtcggcg

SEQ ID NO: 64557 - DNA, 1173 bp, Zea Mays
cagaagtcagagcagactgcaaggatatgcgtcatgaattcccggtgctctgccctgtctaccaagagctgttgctgatgggtgttatggtggtcctaaatagtttggaacatagacaacatccgctcggacatttgttgttggatggctgcctaacgagcctcctcgcctgctaggtgagcctgctgctgagtgagagtctaaagtatggcagccaacgcagggtcaatcgctggaggagcagccggaggagcagcactagagccactagcctcatgatcatgggaacgaggtggcacaggaggtggtggcagaatccctagatcctcatcgtctgaagagatgtcagcagtggcaccctgatcctcaaactgacgaatagcatcatcctcatccttgaagtctagtgctggcggatctactaaagccggagcggtgtccttaggagctgggcggtagaatccgaactgatgtctggaggcatcaagagtggcctagaactgagggggactgatcagctgcgcgaagatgtggtagaggtagtgtgtatagggcagatgacgttgagctcatagtccatccaacaatgtgtcctcaatctcgtagatcaagaagtcgacaacatcgaactcagagtgggaaaccagtgctctgaggagccataactgaatatgagtggtggcctctctgtataccatcctcggtagcagggtgtgcctcatcaactcatagaggaacttctccactggggtgaagacagcaggagagcgtcgagatccatctatgaatggaggtcagaaaagagcggcggtgtgagtggtgccgggagctactccatcgtgaggacaacaaggagggtctgaggtaccatagcacaagctgtgaagcctcgtcgtcgacttagcgaatccaaataactcctagatttgagctacatgcagagtgatgtcctcatgctcgaaccaaaacctcctacactaatggtcagggtcaatccatattgtagcatagaacactcggagccactcctcaacataccggccaccaaacgtcagcagagactatagtcctagcagatatgtaatgtgaccctcagacccttagactctacatcggctactgtacggaaggcagaatgatctagatgtcggtgagcccgcaaagctatctgag

SEQ ID NO: 64558 - DNA, 845 bp, Zea Mays
gttaagttgaagtttatttgcgcgtggaaagtaataatgtgattaatacatagtactcttagtcgatagtagaaattgttttggcttatatagagaggtggtgacatgccaaagtagtcatcgcttcctctatatcttgagtagggtcaatacgcgttatgtgttcatgaattgggaagtaagcacatgatggtttcgagttagagattagtggtttacgggtcgtatgatttggtggatgtgtgaaaatacatgtgaatatgtatgtttataaaaatgttgtggtatatgttgtgtctcggatttcgataataataggctagccgacaagtatgttgtatgcctaggttgttgctcatgttaatcaacttgttagatggctttagttaagctcgtggtcacgatgaattgcttgtggttgtctaaatgcgtatggttatggtcgcgggtaaaaaaaatttagtaatgctcatgtggtgtctaagctaaaatgcgaactagtgggtgaaaaacgcttagatatacatatatgccggatttgatgattgtggtgaatgcgttgattaaatgtgtatgttagttctagtcacgaaatgacttggataaaaagtagtaagtcgacttgttggtcctcatttgattaatttaactctaacaaatggtaaagtgttagaataattcaagtctctaaaacatggcaattcttgaattgtataggagctgaaatttattaattgctgttttggaatgcacgtagtgatttccccgtactgtatgtttgatgaactaaattgtgttttctgtagatatgtgctatagaaaagtggtagataactttattatct

SEQ ID NO: 64559 - DNA, 732 bp, Zea Mays
aaattaaactggcttccgaaagttgttcggtatcctatggcgatgacacattatttaagggcttatttctcgatcggcaccatatgaatactgttcattatttccgcgtacgtagtttaggatcgtgggagccttacatgtgatgccaatcgccatatatagtgatcttgatagcacagaatcatctctctcccgcatgcattatatattccttatatatacgctaagggatggagcacgagctgactataaaatccctctagtcaaagccgcaagctagcagtatctaatttgttcgattcggattaaaggcacctgtttaaactactgtatctataatttatagagataaaatagaagctggtacaaattaaagccaaacgaatagatccgatggtacagattaaagccaagcgaacagaccggatatagattaaagccaaacagacagaccagtcacccggcaagcccgtgtgctggaggcggcgtcgccagctctgccggtagtagtcaaaatgtatacagaattcagtatcctccccggtgttgcattgctggcctataaatagctagcgcatccccctcacaacacgagcatcagctgagcctactgagaacacacaaattaaagccttctcctactcctacatacgttgatcaatggctctcctgcgtgtcgtcagcacggctgtactgcctgccgcctgctgcgtcgtcctcctcctcctgtcc

SEQ ID NO: 64560 - DNA, 448 bp, Zea Mays
attatgttgccctctacactctagaaacgttgtcttgatgacaaccaaacaaatcatgtaatcaattgctccagaagtgatactgtcatgattagattccatttccattcctgttgccagtggtccaaccaaacactttgttggtggaattctaagtctctgaagcggtccacatggtcaacaaaatcatggtcgtccatacgagttggatgtggatcgtgtcgcgcattcattcgtcccccttctttctctctagaattctcgtgaggtcgttgttcctgtctccccgtcgccccagcctccatcgtctgtcgcctccatccctgctctcatgttccgcaattacgcgttgtgcggtgatgttctagccatggcgtgggggaggacaaggccatcgattccggtatggcctcggcatgtcttcacgtctcaaagtggatcggcggcg

SEQ ID NO: 64561 - DNA, 419 bp, Zea Mays
cattgacaagttcacaaaatggatagagtataagcccattgcctctttaacctcagccaaggcagtagagttcatacaagatatgatattcaggtttgggataccaaatagcatcattaccgatctaggatccaacttcaccagctctgaactcttcgacttctgcgagcaacgcagcatccagattaagtatgcatcagtagcgcatttaagagccaacgaccaagtagaaagggccaacagaatgatactggaagcgctcaggaagaaagtgtttgacaagaatgaaaagcttgcaggaaaatggatcagagagctgccatatgtggtttggagcttaagaactcaacctagtcgagctctgcatggaaataccccgttcttcatggtttatggttcagaagcagtgctacccaccg

SEQ ID NO: 64562 - DNA, 471 bp, Zea Mays
tgctcaagtcaatacatatgcatgcaaatgggtcagctgtgtaattccagcaagcatgatcaaagcatttgtaggcgagcagatgctccatgtggttgtagcatggttgcaagctagcagatgctccactctatatatgttgtattcataaccaactccactacaccaactgtagtttactcaatattttataactgattacccacaaaactataggtggctgaaatatgcaaaacaaccaaaaaagcatattgcaatagttttgttcttgagggaataatcatgaatatgcatccacaatagccaccttcattcatctatgtaatcaagcaagctgtgaaccagacaacaacatgatgcccctaatttgatcaactcacatcgacatgcagtgcctaaactcaatcagagttgggattcactctgtgtgcatcaaacacatacttctagccccatgcccccatgttaaaa

SEQ ID NO: 64563 - DNA, 331 bp, Zea Mays
ctctcttggtaacattcacgggttcatacctgaaggttatcatctacatgtaatgagatcaacagccatgattttggaatccccctaagaagactccattaatttctcctcagcgagttttgggtgcaggcttcctttctaaaaatattcatctaatccctttacaaagaacattttttaaatatcggatgtctcttaccattccttgtggttccgtcaaccgtctgtgcacattactggtgggcccaaggtgtttacttcatttgcggagttttccaaggaggttctcaaggcaagtgtccgtccagcttctggcggtgcggactcttca

SEQ ID NO: 64564 - DNA, 332 bp, Zea Mays
cccccgccagtgcttctctctgtctctctggcgtctctcctccgccggcgacctcccccccaccggcgactctccgcgcgacctcgtgcccctctccttccctctatttcaatcggtcagtgaggcagtgaggcactccttctccaccctgtgtccattttttcaaattcctgtcaaatccaatgaatctcaaaggtggaatgtgttcagttgtccccattgtgtattcctgcaggtttctagctccctttgggagggtttcacaacctaatttgcctcaatctcccaaaacctaattcaccgcacgccaagtgttcggtgaaatgcccaaa

SEQ ID NO: 64565 - DNA, 385 bp, Zea Mays
gttcccttctatctctaccgatttctggaattccgctgtcgttgttggagatctcacatctggtatcagaggtaccgattctgggcatcgttcgctatggatcctgatcatacctatttcactcggttgcaacgtcgtcaaggtgcaatggatccgaataccaagttgattctagaagagatggagaaaaagtttgctgccatggatctgaagtaggagcgcaagttatctgaaattgccgctggaaaggagtctcgtctgtgcgagttggaatcagcaggggccgagttggtggcctggcgccccaaggtcggcgccgccatggacgacgtcaagctcgaactgcgtaagttcaacaaactttgggatcggacttctagggagg

SEQ ID NO: 64566 - DNA, 684 bp, Zea Mays
tttgcatttatttctacatttcttccgaatagtctttagacatctctcgattagatagcaccaacgtccctgcatgcccccccattcgtgcctcatacgagagatgaagaatcaaatgctgcatcggattgaaaaagtcgggtggaaaggtcttctcaagcttacacagtaacacgggtgtcaatctttccaagtctgtaatcacggtccgagataactcttttgcacaaaactggcataagaaatagctcaactctgcaagcgcttgtcagacatgctcaaggacatagtctcgaaccaccacctgaagaacccgttcaatccatatgtgaaagtcatgactcttcatccctaagactcgcagagtagataagttcaccccctactcaggttagctgcatacccattaggaaacatcaacattttgatccactgcagtacttccttcctttgggccctgctgaggacgaaataagcattaggccttctacatgtctttccaccactaggcggtttcatctcttggtttggtctatcacataacgctgctagatccaatcttacctttacattatcctttgacttatcagaaatgcccatgattggtacccaaagtgatggaaagagagaaagtataagactgatttcatccccagcagggcccacaacaagaaaattctgcag

SEQ ID NO: 64567 - DNA, 519 bp, Zea Mays
ctaatggtctctaatttatctacacagctcatagactttaacccactagattggtcacaaaaagattcctatcctagcttgatatactgcttcattggtttcagattactttgtgtggtctaaaatttcagtgttctatcagctctgttttggggtatactatcagaggatttcatagtattttagagttgggtctctcaattgaacttatacccctatagtagctctaccattttgatgtactaacctgggacagaattgtaacacccctggtgttacccaaagccctggccaaagagacagattatgtcctactcaaactttgtgctaaattggaaaggaggggactaaaagttttagaatcatggttaagataagcattatccacaacaagaaagaagttctatgcttcatataatgttcacccacaaacaagattctaagccctaattccttcttaagcccttaaaccctaaccatgggattaagagggtaagaatgggcaaataatcaaaacac

SEQ ID NO: 64568 - DNA, 302 bp, Zea Mays
attttgctcatgaggcctgagtgctcttgatgcgtaagcaatgactcggttgtcttgcatcaaaacacaacccagtccagtgccaaaggcatcacagtacacatcaaatggcttgctgctatcgggttgcgctaacaccggtgatgtggtcagatgttgcctcaatgtatggaaggcatcttcgcacttctgaccccaaacaaacttggcttctttcttcaacaattcagttatgggattcacaattcgagagaaatcaggaatgaatcttcgataataaccagccaatcccagaaaacttc

SEQ ID NO: 64569 - DNA, 976 bp, Zea Mays
ggcgagcaattcctcggccatcgcttgcagattccgcccggcacgagagccaggcactgtgtccgccatggccacatggccgaggccccagacgaagctccacatcgacgcgtagcaggaggactcccctgcggcgaccctgctttcttttctctctgcgcatggtgacagagcagtgccgtcggtgagcggtccgcgcgcggccagctcacggtggagacgtcatccctcctccttctctctcttcgctctcggcctctctctctctttctcttggctttgcccgagcatgacggcgattggtgagctcgggaccacggatagggtatttataccgacggccaagcctatattggcggcggattcacgggcagttgaagcagtctgcgagctcatcggtgaggacgaggattgcggcaagtggttgtaacaacctgccccacggagtccgcgcggattccgcgccgttggcgaccgcgaggatgaaggcacggttgaacgatctccgcccgcgcgttctgttgcggcgaagaagggaagtgatgacatgcgggtcccacatgtcagtgtgacgccaagagaggaggagctgggctgcgcaggtcaatgaagcaaatgggccgaattcaggcagaaacggcccactaagcctcattattcttttctttttatattttctgttctctgttttcttttctttttatttttaaattcccaatttgaaattcgaatttttgtggcaagtttgttctcagatcaaatatgaaatcttgaatattctagtatgggatgaatccattgtttataaatttattttttttttcatcgtttagtttcctttatactatttccaattttctaagatttgaattaggttttaatccctaattcccattcttaaagtaaccctattaatattatcattattattaaatgcacaaacaattaactccagcatgatgcatgatttatttta

SEQ ID NO: 64570 - DNA, 439 bp, Zea Mays
aagaggtaatggaagccctgggcttccgttagtgggggaagccctagccaggacgccaaccaggtcgcggtcagcccactgtacgcgagcatgcgtcagccatgcatatgatagccatgaatcctggatgagacgtgacagacgatatacgcatgcataaatatatgtagaaatgtgcataaatcatgcataaaaggaatcttttgggccacgaatcatgggaacgaatattatcatgtgtacaccgtttacgactgcataacgctgtgtaatatgatagcgtaaaccatgcaacatttaaatatccaccggtttgagataaggaaagacgtgccccacgttcgcgtaaataaaggcacagttacggaaggaaacaaattctcatttacagccgcttgtccacgttcgtatctgtgatattggcggcggttaacgactg

SEQ ID NO: 64571 - DNA, 457 bp, Zea Mays
gtttccgcagtgcagccatattaacatgaccaaacctctcatgccaccgccaggctacttcatcttcgcgcccacgcactgctaggcacacagactgttgtatcttcaaatgaaggaggtacaacctgttttcagctcgcactattcttgccagtaatcttccatcaggttccctaatatgcatcaccccatcatcaacatgaatcttgtactttgcttcatcaagttgcccaatactgatgatatttgttgtcaggcgaggaataaaataaggcccaacaaacgaccgggtctcgccattcttgcacataaacttgatggttcctcgtccctcaatctgagccaccgagttgtcaccgaacctgacagtacccaacactctggtatccagatcggtgaaaacagccctggatccggacatatgatttgtggctccagtgtccaggatccaggttcc

SEQ ID NO: 64572 - DNA, 439 bp, Zea Mays
gaggaactgaaggaattaaatctgttcgtagctcaatctacatattgatgtcgagtggaggatgccaaaactctggtgctacaatgccctgttttccaaagtagcgaatgtatatattttcctgatgagatcctagccaacatttctttccctgtacagttcttgtcaatgttttaagagtttgaagttgagccgaacgtcttgactcttgagtgggaaggagattgtgttcagaaaactgtacaaataccttttagcttgctgggttgcaaactgttgcagttggaaggccttgatctttaaactatccgaagcagtatcatttaagggataattgtgccagtgcccctattttgaaatgtatctgtagatttatcctctgctttttagactttgcgtgtttattcctatttttttaaacgaatctgttgtatacccc

SEQ ID NO: 64573 - DNA, 298 bp, Zea Mays
ggaaaacagatctattatgtggtgtatcgtatagggtacaagggggcctatttatataggcaaaggggatagagatagggtcacataatcttatccaacaaatctccccttgacgctaaatctataaaactgtttccccaaacatcactagggtgctaagctccacgaacacctaccaagtcaagacaatgcttgaacttggtattagataatggctttgtaagcatgtctacatgattttcatctgtatatatctcgtccactttaatcttgccttcagcaacaatatcacgaatga

SEQ ID NO: 64574 - DNA, 905 bp, Zea Mays
attcctaaactaaatctctagtaccaatatgttcagatacaattctaaattcgcccacagcatctgggcatggtgcccccgatgtcatgttgcactgaggcctagtcaacccgaaggatagttccagcgggctctgaactagcttctcctttttctcatcaattttaacataaaaccattcagttttccacccagtcggccacttagtgcggtagctaaccaccggtgtcttcatgtctttgcggtatgcaaaattataacagtcaaagttctcgtgcagcccatcctccctagccttcgtctgataatgaagttcgtgtactcggtagaaggcttcggcaagcggctcggctccttggcttcggagagcccagataaacacgctgagcctaacgatagcgttaggagtcagctgatgaagataaatctcaaaattttccagcacatctgcaatcattccgtgcatgggaacctcaaccctggtttgaagaagctttttaaaaactaccacttcatcattttctggtttcgagatggtctcctccccgccacagcgaatcaacttcttttcggcttccccgaagtagcctagcttcgtcatcatgggcatatcagcttcagacatagtcgatttcccaaaatccaaatggctaggcttggatggcatagcggtgttataatcaatctcttcaccaatatcgccctcttcaatatctgcctgcttggcttcagcagcaggtgcaccctcgtcagaaccgccctccgtcacaaccagtccagaccgcctcataacttcagaaattggcatagtctcagtagcttcagtttcctctttgtcacgggttatcctagctgtccagcgcaccctggccatttgatgctgaatttcttgcgttttggcaaag

SEQ ID NO: 64575 - DNA, 1026 bp, Zea Mays
gtcacggacggttcggctttcaaggccggatggtctggtctttcacaaaagggttcggactttaagaccgaacatatatcacagcaaaaggatagtattacggatgatccggtccccgagaccgaaaagtccgccgtcacacaaagatcatctaattcctctgtggggaacatgatagaggaattcagagatcttgataaattaggacaggggtttacatcggccgatcctttggaggagattgacataggaaatgataaaactccaaggccgacttttgtaaacaagaccctgaagaccgatcctagagatgaaatgatcggtctattgaaggaatattcagattgttttgcttggaattacactgagatgcctggactaagccgagagatcgtcgaacattggctgcctattaagtctggtttcagacctttcaagcagaaagctagaacatttcgtccagatcttctcccacaaatcaaggacgaaatccaccggctattagaagctaattttattagaccctgcagatacgcagagtgggtctccaatattatgccggtagagaagaaggagtcaggtaagcttagggtatgcattgattttcacaatttaaatagagcaactcctaaagatgaatatcccatgcccatagccgacacattaatcaataatgcatcaggaaatagaattattagctttcttgatggtaatgccggatataatcagattttcatggccgaagaggatgcgtctaaaacggcctttatatgtccaggcttcattggtttatttgaatgggttgtcatgacattcggtcttaaaaatgctggtgctacttaccagagggctatgaatctgatcttccatgagttgttaggaaacattgtggaggtctacattgatgatattgtagtcaaatcggctgagtttagttctcatatagctaatttgtgcaaagcctttgataaaatgcgtcggtatggtttgaaaatgaacccacgtaaatgtgcttttggagtgtcg

SEQ ID NO: 64576 - DNA, 553 bp, Zea Mays
aaaagtgtgatgttgtgtgttgagtagtggacttagttaaggacctggtttaagcaaaatgaggaaagatcatctcttgagcaagtaatatgatgacttggagtcttaagtattaaaggaaagctttaaaaacctagaattatttgttttggagtgttagtctagtggaagtaacacttgaggagatggatcacctcaaagccttcagtaaggtttgaaagctttgattggaatagtgtgtaagcaaagtaaaccctaaaccaagcacactttggacataagttctgtataccacagttggatttaaggttaaagagtagtttggctttaggaggatggagaagtttgtttttggtattagaagtggtgaagcacttagggtggttgagtatctctaaaccctaaacctgagccccaaaagtggatttggagatttagccatacttttggaaaaagtgcatatatcaaagtggtagggtttggagagcccaacatttttcccatttggagatttctttatgttgtggagcaaattggagaaaagagcaaaagg

SEQ ID NO: 64577 - DNA, 775 bp, Zea Mays
caagggtacatcaggttttaactattaggtgagtgttgacatagattgagtgtactatgtcataatcaagcttcctttgggatctagcttgattcatattcttctttaatgagattgatctcttccttcttgagtttggttgtcgcccttcgggtttgggataagaggtcaagatagatctgtaggtaacagatgggtagagggtttagtatttagctatatgctagatgggattagttatgtaacctgcttttgtaggtcaagttattgggtagggccaggttgatctaagatctcaaacttgtttataggagcagggtccaatgtatttcctcagcattagctaatcatgtttgagtgactcacattagatttgatcataatagattagataggattgggtatgactataatagactagtttagattagatagatctactagggtaaaatatagattattagggtatgttagaatcttttgagataggtgtaggtaggtcggaatctcatgttaggttaaaacagaggggttatgcaaccatatgatgggtaaggtagttgcatatagtcaggtagttgtatatggtcaagttagcctagggattcaatttagcttaaatcatatttataggggtaaggtacaatctatttcaccagtattaactaatctgttgagtaactcactttagatgggctcaacttagggttagcctttgttaggttagagtaatctatcacattagatcagatctaggttagattggtattactag

SEQ ID NO: 64578 - DNA, 604 bp, Zea Mays
ctgataaaactggtgatggccatgacttggcttctggcattgctgattctaggtacatcctctgcctctctgtgccttcttgttgtttacaacaaagtctgaatgccactgttatcaaataggtcttagatttaattgtggccttccttgctcgcttttcttttgcctctgaaaaaacgttgtccagttgtgatgggcaacatctaaattagcaatgggctacagtgactcgtatgcttccattcctgttgttgcttccattcctgtcgtatgctgggccaacagtaactcgtatgcttccattcctgtcgttccagccttaagtaaaaacaatccagaaaccctgcaacatagtggacatgtatcatctgatgttttctaggccaaacgccatatttgtaggaaagctgggttggtaatggaactgcccattgcttttagtgtaaacaagaccaacatgtttagcatactagcataccgggatattccttcagaatagcaatcctaattttgcttttacaatacaatgaaaaacgctaaacagactattaatatgtatatccacggagaaagttcagcaaaacgagtcaaaaaaattcttgta

SEQ ID NO: 64579 - DNA, 282 bp, Zea Mays
ggaagtccgggtctttctcttggactgaagaggcggaacaagccttccaggagctgaagcagcacttggtgtccttaccaatattggtagctctggaaccagaggagccgctatatttatacatcgtggcggtcgcagaagtagtgagcatggtgttggtcgtcgagagaccggcaccagaaagccaggaacatgggggctcgggaccgactgcgggggtccgaaccattcaaaggccagtctactacgtcagtgaggcccttcatgaggcgaaaaccaggt

SEQ ID NO: 64580 - DNA, 454 bp, Zea Mays
cgactttctatttcttctccaaactagtcctcgaccgcggcgcgctcatcgttcacgcctgccgaggcacataccggccatgaccggcgatgattgctcaagccgattatcggggaggcttcaccgacttaagacggcctcggaacacccactaatttaactcgagcaccccgagaacagccggtccacgtgcacggcgggaaccgagcacgagagtacatgttctcgccaaaccacggtcgatcagagcaaacggacgccaccgtgagcttcgcaagtatgcaataacactagaacgacgcaaggattggacaatgacttaccagagtacgctggccacgggcgggctgttttgggtggcgcggcggactgaattaggggaaagtggcaattcaacgtctctggatgaaattaggggtggggattgaggctataagatcgtaagggactgggc

SEQ ID NO: 64581 - DNA, 384 bp, Zea Mays
gttggcggtggagatggccaactctggataatcgccggcaatggcaggagatggagttgtgattcgtcaagacaccgaggcagtcgttgatggtaacttaatgtttacaccacctcatgttctaatggggcctcgaatcaacgaggtaagcaatggggaggaaggagaacatcggattcgacctccgatgtccaatattagctcccgggagatggatacacctcaagtactacattcacatgtaagttcaattgttgtatttgatagttgtttgagtagattgttatgagcataatcatttgtacactctacattgtcaatgaattacagcgaacaaccattgatccgaatatagttccaatagtagggatgactttcaaggat

SEQ ID NO: 64582 - DNA, 618 bp, Zea Mays
ttgttcatatgacccacatcttttttttcctccctccttgtttcgttggcacgttgttatccttgctgattggaacgctatggggcgtcggatctggttatcaaaaaaaggaaggaaacaaacaataaaggacaactaaaaaaaggcaaggtacaaaaaaattaaaaaaaaagaaaaagaaagaaggaaagtgaaagaaggcaaccagaaattagcgcgccccatttccttaatcagtattgttgtgttgggcaagccaaaccagcaattagatttgggcgcctaccatcattgtttttggcaagcaggccactatccattacacacctcctcctactttccttgttcatggatttgggtgcgcccatttccttgtaaagcatttcttgtttttggcaagcaacacctccatatttggtgcgcccaagctttccaattcaggctattcgattttggaaagcaaaccttgtcaactcgttcacggatttggtgtgcccaggcattttgggaagctatcttgggcgccactttttccagccggggttctagtacgccttctccaccttttccgcacctcccttacacaccccctccttgccttgttctgttcagttttac

SEQ ID NO: 64583 - DNA, 775 bp, Zea Mays
attttcagaataaccaggcgatgccatctgtccatgccttgttaggtctggaatcaatttgattggtgacaggttggacatctggctggttgagatagagggccctcggctggacaccactctgccctgtacttaaatgtttctgttgattggacttgcgcttcaataaccacatttgggcttcctcccgtttcagccgatctcctctttttgtcgcgttacattcattgcatatattttgtgggtatcacctattcagaaaatcttgaagcttttgggcgatacacccaatgggtgtgtccaaggggtgtctgccccacgaaaggtgtttattgcgttgtcctgaagtagtaatttgatgtgacagagggggtgtaatcatttgcctgagcagttgacttgggtccaaccgatgccgtgttacgcgaaacagcgccagttgcctgactcattttcaggctgcttgaattgcttattgaattcttgcgactattcggtgagcagggtaggaagtggacggtcacccctcagcctctttaaatagcccgcttgccctaactattttcttcactcgcccttgatcacttgctcttcttcttcttcgtcacttctccactttctgcacgaccataggcaggggcaagaggggcaagggatggcctcaccacgctgacggcaagcacaagcgtcctccaagtccacccttggaggactttggtgactcggagtattcggaggaagtttcctccgagtatgaccggtcgcccactccagc

SEQ ID NO: 64584 - DNA, 901 bp, Zea Mays
tcggcccgggagccttcaactgagggcagttattcttgaagtgactggggtctccgcagtgccaacaggcattagctggcggttgattgcttgcaacggagggtgcctgaagggagctctgactctgctgactatagcgtgatggagtgggtccaggtgatttattgaagcttggtcccctgggtggaagcccaaagggtcgagctctctggtgacgttcttgttgttgagctcggagaacttggatttttctcttgagatgccctttttcttcctctttcgccctttccacttggatagccttgttggagaggtgagagaaggtgaggaagtcttggctggcgaggatggtcttaagttcgggtcttagtccttttcagaaaacgtgccatcttcctagactcggtgctgatatcttcaggcgcgtaacaggccagctctgtgaacttgtgcacatactcactgactgtcctcccgccttgagttagctcctggaattcatcttccttgagttgaactattccctggggtacatggtgctcacggaaagctatttcgaattctgcccaggtagcatctctgacggcctcactgaaagtgtcccaccatgctaaagccattcctgaaagttgatgagctgccagttggatacgctgattttcggggcatccttccagcttcctcttgatcgtgcgaagccagtcatctgcatcgaggggattgctggaccccgcgaacgtgggaggcttgagtctcaaaaattctcccatcctgtcttgcggccttccaccacctgggcgctggttttccagacttcgagtgaggacttcaatgagtcgggtttgattggctagaacttgggccagatctagtggtaattccggaggtgcggggaggtggg

SEQ ID NO: 64585 - DNA, 400 bp, Zea Mays
caaagctttactcacaaatgccaaaggatggttatcttgctgaagaacagcaccaatgcccttgcctgaagcgtcagtctccaccaaaaaaggtttgttaaaatttggaaatgccaatactggagctgaagggagtgcttgcttaagggcttgaaaagttgtgtcatgaatagaagtccacacaaatactgtgttcttttttaacagctcagtgagtggcttggcaattactccaaagtttcttacaaacttccagtaatatccagcaagcccaagaaaacctcgcaactccttggaagtttgaggcacaggccaagataccactgtttcaaccttggaagggtcagtggataccccagcttggctgataatgtgacccaaatatgcaatctgttgtcgg

SEQ ID NO: 64586 - DNA, 342 bp, Zea Mays
ttgctcccaagccatactccataattcaggagcccctcttgacgtgagttggcctctatgccagcgatggttgtcgcggatcctgggtgatgccgttgtcccatccctcctccatactagcaggtaccttgatcatccaataatgaacgggcaaaataggtacgaagccctaactcgatctaatcacagttgtttatttgcaatccaaccaccttggatttcgtggagccatgatctaatcacaggcatcgatctaggatccgatggctagagatgcacgataccccttcgaccgtggaagttttgttaaagagcccctgccctttctaaaaacagaacatg

SEQ ID NO: 64587 - DNA, 528 bp, Zea Mays
acgccgtctttaatctcgccaccaaactctgctagaagaaagctacggacaagggccccttgctccttggtggtcgagtgcaaattgccaagctgacggctcaagtggtcaagtgggatgtactcgatttgtctgcttgcctgactgctgggccggggggtgatcgcagcaggatagcaagttgcccgtggacatgccagcaattttgacgcagctgtataacataccagcgtgtgatagaaaagaatgtggatatccaaggtgaagaaaatccgtcagttagctcacggaggaaacatgaaacacaagaaggacatgaccatctcagtccacgccaaaagatattctcattttcctcaccattttttctcccaaaaataaaacatactaattactcaccattttcaccctcattctcgttttctattcacgttcctctcttcagcgcaaccggaaatatctaacggaacatgcggtccacgctcgtgccgtacgatcccaccgtccaaccgattaaccaaatacaat

SEQ ID NO: 64588 - DNA, 668 bp, Zea Mays
gccaggtcgagaagcatcacaagcacacagggatgctaaaacaagaccgaggagggcgtgatcggacctgtgaagggctgaccacgacgagctcacacatgcggtgttcttgaccgatttgggggaaatctcaaattggggcattctggtggacgatccgaggcacgggctagtgtattgggtgcgtgactacctagtagagccgatggcatgcttaatttataggacccgagggcggtggcgcgtgaatttagcatggcgctgtggcggccggagagaggggagagcactggtggcttaatcgtggcgttcaccggtgcaatggttcaaggattgtaattctaagtgtgccacggttactaccgcacaatagcgagccacagcgtggcataaccgaggtcaccagagtttccacggcaacaccagcggtctgaccacgttgcacggctataggcgcggtgataagcttccaccgcgaccaaatccgctcccccgcgagatctttttaccccccgtggatatccactgtgtgccaagcacgaatcacggtgactggcacgaatccgagcgcacgggtcaccggcggcgagggggactgaaccctgagatcttttcgttattgtaccatcaggggcagcttcagttgttctgacaaagcgttttgcagc

SEQ ID NO: 64589 - DNA, 468 bp, Zea Mays
ggtctggtgggatccggaccttatcacatacactcctgctccctgcccaggcggagacccgatgctgccacgtggcctactgcgcgcggcgtaagccaacaggtggaacctggcatgaagcctctgggctacgcgcgtattcacattcattacagataagacgtgcgcctgttcatcccagtgacaggcggcgtgcccagtccacgctacgtggtccgtgctgttactcacacgttaccatagcaagggcaatgactcaccattactcgcacgttaccaagaaaagggtcactgcttatcaatgctgcatggaccgcagtcatcatgactcccgctgattactcatgcgttactaaggcggagggaatctgaacggctcccttgcttagggtttagtcagcattaattatccacataatgtattccttctattatgctcctaggcccgcatgtcggggctcagcatcc

SEQ ID NO: 64590 - DNA, 650 bp, Zea Mays
ggagaaaatactatatacagaaaataaatacataaataaaactagattcttcctatgcttggacttgaagttgttcaattatcccaaatgagaaactcacaaccaaattagaacctaaattttgaaatctaaaataaagggaatttgaaaggaaaataaaaaaaagagaaaaggcaaacctgctgttgggccgaattcctgcatcctcggcccatcttccgcgctggtcgccccgtgtggcttcatccacgcgtggactcgttcactgacctagtggggcaaccctgtcagaagcatcctcaacctcccatgaaatctgcgtgacctccgcgggcgctgacccattccggtccgcaggggagggagaagaactcgcacgtgttgttgtcgtcccatcgccatcaggggtggttggaccttatcctctgcgctacgggtcgcctccattgaaactgcgctcaacggcttccgcgcatggcgcagactgctgaccgcctgggctccgggttcataagggggggcaggtgggttcccagaccgcgacctcatccactccgagcctcgaccacaatcaccgccaggactggccaccgttgcttcctcaccaccaccttctaattgcgtccgccattaacgaagcacagagagat

SEQ ID NO: 64591 - DNA, 537 bp, Zea Mays
gcaaaccattaagtttaagattgagcaatttcactagcgataagggcaataaaaaaattgtgttcaaccacaaccgattgaaagttccttgccaacctctagccatctagaagcccaagatctatgagtaacaaactcaaaacactaaggcgacgtttggttcctagcagatttcaagtatttggatactacacaaaatccaatgcaaaatccattatcaggttatagatagattctgagattatggcacacaatccaatacagaattttgaaggtgtttggttcataatgggaccacaggggttttggccctcctggtcgcggcgacggtcccgtgtgaccgtccttctacaacccctggatcagaaccatctccatatggcctggcccgaccatgggtgctttcacattgcgtccacccaaatcgactctcctcaccacgccctaccacagtgctcctacaccctcggtgcttcctcttccaccctcacctccgcctcttctctcgctcccagggactataaccccacccactca

SEQ ID NO: 64592 - DNA, 905 bp, Zea Mays
gctccggcgagctagactggccggagggagccaagactggtgaccccgaacggctgacactgaattggaccttccccgatcaattcccccaacttaatttcatggttggtaatctatcaagctttgtccatgcggaccacggacgatgaggataattgcgcacgttcccggtgaccagtggtttcccagttcaattaagtagtttggtgagtatcacatacgtatgagagtgcttaaacaagggagcagagggaaggagctgacctgaattgggctggccacgacggggtgtgttttacggtggcggaaatcgaattgggggaaatcagaaatttgtgagctctggtgatcaattaagggtgggagcgggtgcttcggcttcgtgattacatggcgcaatagacccgaccatcaatttatagggttgttaagcgatggctgatgagtttggggcgagacgcgcgatggtcggaggagaggagtttactggtgcgcgtgattggtggcaaaccccgtgtcatccacttcggtgatcatcggacaggcaatgcacggttaactgcgatgtggtaaagcgtcaggacacgcggtggacgacggtggtggctcaacggcggtgagaatctcatccaagggatcggtgaacaaggggagaggcatggcggctagccggagtggcgtccagctcaccgacggcgacacctttcaccccgcgacgttatctatccactccgggcacgaatcgggacgtcgacggcacgaatcgcggcggagggattgttgacggtgagagttctacgctggcagcctgatccaattcaggttactgtaccatcgcgagctcccatcagtgcacctgacagtcaatgtttgggcttaattttctctcaaatttccatggcaac

SEQ ID NO: 64593 - DNA, 996 bp, Zea Mays
tcacctaacaattcattagatatgttaattggtttcctcaccggctaaactttttggctagctaccctgaatagccaaactaagatgatacatatagagagctcaaaatgaagaatcccttgatgaagatgctctaatggttctaagcaggacctcaattagctatccagtactagagagaacgacgagtattaattagcactctcgcatagtagtagtagagagaaagagagagagagaaatgatctgttgtatctgatgatctcatggtcacgcgggcgatcaggatcagctgcacccgtccagtacgcacggccaggaattttacttacccttttggagggcacaagcactcacatcattctggtggtgcttcgctacactagtgctacccctgctagtactgcactactagagaaggaaagagcgcgtgcaggtgcagagcgcagcagctgagcaggcagcagcaaaaaagaaaaaaaagattcccatatcgctcgcgacccacggtttgagaccgcacgcaccacgagaggtgaggtgattgatagcgtacctaacctacttactctactctacccgtcgtgtgggcccttcaccaagacgagtttccaaaacgggcatacgcccacgtcaggacccagtcatcgcacacgcacacaacccaaaccgaggcccgtctagtgtagtgtagtgggcccgcggccgccatcaatgggatctgcgtcccatctcggcgggcgcgaggtgaggagaggagtcgtcgtcgacgacgacgagtagtctgcctctgctccggcgggccggacggccgcagtggtgtggtgtggtcgtcatggttatgacagggacgacaggcgcccgtgggcctggtggctggacgacgatgcatatctccgatccatgtgctgtgtgtgcccatcatcctgttggtacggttggggggaacaggagcagagacagcaggcaggcacaggcagggctcactccaccggc

SEQ ID NO: 64594 - DNA, 451 bp, Zea Mays
gctagcaacaccatcagatacgccatacggttctaacgagcatgtccgaggaccgaccgccaagaatctgccagccaatctatatgaatcagcccgccaagactccactgcgcccaagcaaggcggcacggcaacatagcccaccactggcgagcaattcagctcccaccagaacctaatcgtgtttcctaataggcgcccgagattgcggagacgagaacggatacgatggagggtacctcaacggcgaaggaagcagtgacgttgatagcctaggaatcaattgaaccggtcgccgttcttgactccgagagtgatttcgcaaccacacctccccgtctccccttgctaggctccgattccgccccgcggactttgcgaaacgccacggccaatgccgacacactagacgacagtgtagaggatgtaccgcggcggtggcgattttcag

SEQ ID NO: 64595 - DNA, 685 bp, Zea Mays
tttccaaagacacacttgttcctctttaaaaataatttatgctccctgagtttctcaaacactaatctgatatgagatatatggtcagaccaggtagagctatatactagaataccatcaatgaaaaccatagcaaatttccttaagaatggtgctagcactgaattcatagcacactgaaaagtggctggggcattagtgagcccaaatggcataactctgaactaatatataacccatggtgtgttttgaaagtagtcttgtactcatcctctcttgccatccttatctggtgtaaccaacggttaagtccaaacttgagaaatagttggttcttactaattcctccaagatctcctccacgagtggcattggaaacctattcttgattatcaaatcatttagtttcctatagtacacacaaaatcgccaagtgtcatccttttttcacaagcaacactggagaagcaaaatgactcacattgggcactatcagcctagcttccaatagagataccacctgtctttctatttcatccttgtgaaaaggagaatatctatagggcttaacattggcgggcattgacctaggaaccagtgggatctgatgatcatagggtctaggtggtgtgttttggcacaacaaatatgtcttcatcccttgcaaaagctgttgaatgtctcc

SEQ ID NO: 64596 - DNA, 441 bp, Zea Mays
gtctgcagaaccaccaccttgagaaaacgagctaccaacgcctccagattggctagagactgtgtatccaaatcagactacaaatttgacaaaaaaatgtgcaaggtgatactcatgtggtagaaacaatatacatattgtaaacaagcaagatttgtttggggaaggacaaggttcctgatgggcaaacgacatcctcactatcagggaattgctagtttccagaaaaatgcttcctctgaacatccctggacactaacaagtacaaatatatcttcctcgatctttttcggcatcaataacattccacagaattatactaaaaaatttatccagctatcccattttagaaaaaactacttctctgccaacaatcatataaattaagactacaattatacaaggtctaaaggtcttaattaacatcaagtttcaagagat

SEQ ID NO: 64597 - DNA, 580 bp, Zea Mays
aaaaatatttatttttgcatgtcatgctggattttttattgctgcacttgaattcgaagttgaaatttgttgaattctattttgaaaatgcaaataataaaaaatgacttcctatctgaattcgggtcagcttctcggcccactcccccgcccctttgttgattcggctgaatgggtcgaatggccatagccgtctccgcaagccgacccagtcccaccggaactgcgttgtttgcgcactattgggactatatctctttcacggactcacttcccaacaagcacgcgaacaccacccatgcagccgtgccacactaactggagggcccgggctatgagatccatcgtctctaatcaggattccaccatggagttcgaaacagacttcgctcctggatacaatcgtcgtcccgtgctcgttgtcccttgcccatataaataccaaccccttcaaaccccttgagctatctattcgagtgccgaatcttttgttgccacgcaatcgcgccaccgctaccaaacttgcgaagccgaccgccgtcgcgatcaatccacacgtatgtcgtcgccaagccctcgg

SEQ ID NO: 64598 - DNA, 632 bp, Zea Mays
aatataagtattgattatgtgcggagaaagagaaagatgtttatagagtttaggatctaaaaattgatgaatttttactaacgcgatgacttgcctcattgcctgattctgtgttgacgttgattgtgtatgtttttcaccaaagtgattctgacaaaacatggtgaaaagctaaatgtttgacggaccacatcagttttggtgcccaaaagctgaaaatgctgaatgaaacacctccatcatctgtatctactatggcagttgagggacacccaccaggaagcacatgaaaggaggatttgagtgtcctggctatagtggaggccctgctaaagtttatattttattatcggacttatgggtcgatttattggttttgaagcgtttcaaattcaaaaactgatagcggatggcattgaagtggcgaaagatatagctttgagacagtggcagagtcagctcacaattggagcctgggcaccgtcattactatggtagattgtttttaaccgcttgagtaggtagtcaaattaaattgaatcaaacgatattgtgtgtctgtttggtttcaagcaaatagttgcttggaaacgccggttcctcgtacgccaacttgaaggtcgtcagtttcc

SEQ ID NO: 64599 - DNA, 567 bp, Zea Mays
atgggttttgctgactggagccaaagatatggagtgatgaagtttggtttgtctcactactgaactccgagaggaaatcccatatttgacgtgtctagggcacgaatctcgatgccatcttcacatacattgtagaggggttagtttagaacaattttgtcaatggggacttaaggatttgagctagggatcaaggtgaacatgctcaagttctaggtgagggctaaaattcagcaatctgaatttcagattttccctagagagctttcacttggatggcctttttggggattttaattgattattttggccaaacttttataacaaatattgtatcttaattagtgtatttcaacttttataattggcctaagccatgattccatgtttttcatggtctttttaccaatttcttccattctacttaaatggcctaattagggttgttctagggtttaaacattttcccattttgaatgcatgatatgatttaggcatgagtcttaggacaaaagaattagttgaatttttgctatcaagtttttggtgtcttttgctcaattttat

SEQ ID NO: 64600 - DNA, 391 bp, Zea Mays
tgtcatagaaacgcgtccgagggggtgaatttcctctttataacttgttatgcatgggtgtaaaccatcaggccgggtttatgtgggcagacctcaccgggctggtgtacacatatgcaaaatttaattatgaaaggagaaaaatttaaccccttagagttgcttctatgaactgaacttactgagataggaaggggtacttcttcggctatagcaaagttggcctccctcggtttggcatatttccatcgccttgaggagttcctccttgctgggggagaggttgcggatcccctcttggttcagtactttgccgcaggattaggtcccgaccctgggttccctactatgcacgaaccatcggccatagtacttgggcgcctggttacga

SEQ ID NO: 64601 - DNA, 307 bp, Zea Mays
tggctatgttgctgagaattgaacagtcgacaaagaattctttaccaagcacctttttatgctgactctatggctcttggcaaatatggtgttggccgaatattgttgtttgccaatggttgtggtttcacactcgacaaaccactgagcagtctcggcaacaagcgtgtctctggtagtggtaccgattgaaaggttcaaacgatactatcgatataattagtaccagttggtatcttgaacttgttctggtgacttaacattagtgtctgttaaaggcactagtacacataagctctatagtggc

SEQ ID NO: 64602 - DNA, 730 bp, Zea Mays
accaaaggtctggtggtaattcgcagactcgtcaaggaagcgtcgtgaacacacaggccaaaagtaacaacaacgcaccattacaacccaatggctgtttcaagtgcggcgaacttggccattatgctaacaactgcccaaggtgcaaccaacagacacctcagaagaatagcagtcagagaactaacgagaacacccctgctcgtggatctacgtagaacaaaacgtcgcagaaccagaatagaggaagggttaatcacgtgacaccagaatcagttcctgaggatgccgacgtggtgtatggtatgtttcttattaactccatacctgattcagttttatttgactctggagcatctcattcatttataactgagtcattcatggaaaaacataacataccaaagtacccccttaagaagatgttgcatattagttcaccgggaggtgatatgaaggccacacactcatgcccccatgttaatctcaagattcaagggatagattttctagtcaacctagtggtcctaggatccaatggtattgatgtgattcttggatgtggctggttgaaaagttgtgatggagtgatataatgtgccaaaggaacaattatgttgacaagtccacaaggtgaaagaatccaagttagcataggaatgtcaacaaatgcaaaaggagagacaatggtaaatcacttggaagaaaagcccctggaaaatatcatggt

SEQ ID NO: 64603 - DNA, 360 bp, Zea Mays
aaacactaatacagttctaacacaaatgaagaacttgcatttagttggtgcccaagtcttccaaatcctcttcgaaggcaagaatttgatggagccaataaacatcgagttgcatgctgacctgctgctatactgtccattagaagacaatttccaagtaaatgggatatctggctgtaaaatggtgtcctctaccagttgccaaattattagaattctgttataacctgcactgagagagatccttggatatcctcaacccatcttctgtttaatagccctgactcactgtacgccgactggttattctcttgcgtactgcagaaaaatggtttgggggctatgctagccacactgctg

SEQ ID NO: 64604 - DNA, 656 bp, Zea Mays
ataacatcgcccattaattgaaccggtacacgctactggccgtccgatcggtgatcgacggtcgtgattttaaatacatgagatctaatctcacccgcacatttcgtatcgaacgactgagaaccaaatccaaccgtgcccgcacacacaccgatctgcggtcgagatcgggccaagtcaaaccggtacaagcctctaatcctagccgcccatatcaagatcaatggcacaaaggccgtgttcccaacgcattgcgcatcaactgcgcgcccccagaaatcacgtagacccctacggcggcgagaagcaccacccaccgaccctcacccctgcttgccccaaccaccgcgctaatcgatgcaaacgtaagaggagaaaatgcagaaccaaatggagaccaacctatcgaaaacagtggtgacagcgatgctgcccacgacacggggcagactcatggggacccgattgcatcggcgagcaatttcccgatcattggttgatctccactctaggtttcctcgcgaacacgctcccagtgctaaggcgaacacccagttccatggtgtagacccaatggcagcatacacacgaaacccactagcggcggacctccacacacttcgagttgtctatcacatggtgcggtggttattttt

SEQ ID NO: 64605 - DNA, 721 bp, Zea Mays
ggtcccgaagaaggaaaatcctcaatctgtgggagatttcaggccaattttgcttctaaataatagtatgaaaattatcacaaagcttctggccaatcgcctgcagacagtgatgacctccctcgtgcacaagaatcaatatggcttcataaaaggaagaaccatccaagattacttggcctgggcctatgaatatattcatttatgtcatatttccaaaaaagaaatcattgtgttaaagcttgactttgaaaaggcctttgataccgttaagcatgaacttatccttcaggtgctgtctcatagaggatttggacctaaatggcttaactggattcggaatatccttcaatctggcatgtcatcggtcttacttaatggagtgccagggaaaacatttcattgcaagcgtggggtcaggcaaggcgatcctctctcacctttattgtttgttttggtggcagatttacttcagagtgttatcaataaagcaagacaacaaaatttactccagttacccctgactgaaaattgtggccaagattttccgattgttcaatatgccgatgacacactactgataatggaagcctgcccgaagcaactatttttcctcaaagcagttcttaactcctatgcaacttcgacggggctcagggtaaattataacaaatcaagtatgtatccgatcaatgtttgcccagagaagatggagattctc

SEQ ID NO: 64606 - DNA, 827 bp, Zea Mays
atgaacatggatgtgagagttaccaccctgtgtgatgagttgtgcagattgaacatggaagttgtttcttcgggtggcttaagctatatctcggtggagcccacattgcaagagcagatagtcagggcacaggttgaggataagtgtgttcaggttatcaaagatatgctccagcaaagggcagaaaaatacaagtgtttccgacaggacagcaagggaattctatggtttggagatcgattggttgttcccaaggaccctgagctcagaaagaagatactggacgaagctcacctttccaaattctccatgcaccctggtagcaacaagatgtaccatgatctcagatctctatattggtggactagaatgaaaagagaaattgccaagtatatatccgaatgtgacacctgccagagaattaaagccagtcacttgaaggcagcaggccctttgcaaccccttcccataccatcttggaaatgggaagacatttgcatggacttcatagtgggattacccaatacctccaggcaccatgattctatttgggttatcgtggacagattgaccaagactgctcatttcttgccagtgcacaccacccacaagacagagaagtacgctgaaatttatgttgatcagatagtaagactgcatggtattccaaagaccattatatctgacagaggagcactgtttgtggcacgcttttgggagaaactgcaagaatcacttgggacccaagtaatccggagctcagcatatcacccacaaacagatggccagacagaaagggtaaatcagattttggaagacatgttgcg

SEQ ID NO: 64607 - DNA, 696 bp, Zea Mays
gctcgacacgaatgttcagtcgttgtaggtagaaattgttttggctcaaatagagaggtggtgacatgccaaaatagtcatcgcttcctctatgtttataaggcgagttaatgcacgttacacgtttgttacattacgcttcgcataaaatgtatggtcgtgctcacgattttgagtagacacatcgagtggtcaagtaggctcgtaatacaagttgtgtaatggagtttgttcattttagaatgagtgttgaaatgctccattcatgtgatgaacatgtatggttattttgaatcaagtcgatgcagtgtaatgatgatattcgtgattaaattggaagtcatgtgtttgaatagtgaagcttaattttaagttacaagcgatgcaggaaatgttgtagttaagatatatgtgaaatgtgaatgagtcattttatgtatgcggtatgtggtgtagtggtggtatgaaaaataggttagcacgcaatcggctagttggcgagttcgattggaattgtttagttaatttggattgtaaggtgaagtgatggcattacttcgtagtcatcacaccatcagttaaataactatagttaagtgttaaaacagttagagtagcgagtggatggtaattgtaaaggctaggtggaaaatgaagtgaaatattgtcgtagataggactgcacgcacaattttt

SEQ ID NO: 64608 - DNA, 393 bp, Zea Mays
gctttggtccatctttcatagaatggactatggtagcaagtatctttcaccatcttgaaaaaagaagtgttcattttctctatttacgctaaggaatgttggatcttagtggacagcatattcatacgcagttggacacttaatactgatactttctttctcaaagagcatcaaaagagttcccgaaatatctgagtaaaggttaccagcactttctttttcattatttgcaacttgcaattaccttatgcttttatcaatgacagagtttcattccaaaaaacatgtaaaaaaacaaaatcaaaagtatgttgtttcctttttcaggttggtccataggacattctgtgttattgtttccatgccctttttatgtgcaggtccccatttaat

SEQ ID NO: 64609 - DNA, 553 bp, Zea Mays
aagagagtcagtcaacatggttgataacttcccagattactatacggtagaacaagaaacgaaccactatacacggcaaaaatcaatcacaaccccattcggccaccccagtaggcaacaagccaacttaaaaatagcattaccaaataatctatattgttcactacttttatactattaagtgtagatgaacttctattaagttttgtttgttaccaagtgtgtgacataattttatttattatttacctacttagttatttattatagctacagtcaagttatgttgttaattattaaactttaatttatgtattattgatcgctataaaaaataaatgtaggcatgtattatccgaccttcgaaatccgctttcactccgacatcggtctgactctgtaccatttccgacatcctaaaacatccatatccatatccgcaattgcataatatcagctctgatccgaatctgtcacaaaaataggattaggatatggaaaaggtgttatctgctccactccgattcgtttgcttccctaatttaagatgcaa

SEQ ID NO: 64610 - DNA, 427 bp, Zea Mays
gatcagattgcttaccgagttcgtcgtctcgcctcttggcctcgctcctccgcacctaccactcccgccactgctaccactccacctcccacttcacctactcccatcactcctgcgccatccaccacctcagccatacctaccacctccactacttcagcttccacttctcctcctccttctcccctttccgctccacctatcccacctgctcgcttccgggagcgagatgagactgaggtgcgtcctctagctgggatctgtgacaccctagtgtcacctagggttctctcaaaatgccaaaccaagaaccatcattttatgtgaaccaaattaagcatgagcatcaatttgacttaagagtaaagaatccaccaagcatatacctaaaagtatcatgatcaaaacaaatgggtctttcaaaaag

SEQ ID NO: 64611 - DNA, 974 bp, Zea Mays
tactttgcggctttggatgtggctgcggcggaggcctctccgcgtgttacggatgctgaagttttgcctggtccgagtgctgggcgcaggcggcgaagggcggtggcgaagcgtagggtgagtgaggtggatggcggtcagcttcgtgtgggcagggctagcaagcgggaattgctgtcctcgccggttggggcgagtgtaggtgagggggagttgtgaagcctttttgagggtgaggagcttaggataatgctatttaactatagggagatgggaaccattctgaaggttgaaccaatgtaaggtgtgatgccctcgctgtacgtgtgtaaatatggtttgtataatgaggctgtacgccttcgcgcatccggctatgtccatgggggcattgtgcgcttggtctatcacatttcatacgttggtccggctgcgccttgtagttggtctatgcgcggacagtttcttggtgtagacttttgcacggatgtaacgctttgcgttttggcgcgcttgttgacctagtccggctgcacccttaggcgacttttgcgcggatagtctttttaggaagacttcgattttgcgcgcttgttgtgctagtccggctgcacccttaggcgacttttgcacggatggtctttttgaagaagacttcgattttgcgcacttgttgtgctagtccggctgcacccttaggcgacttttgcgcggatagtctttttagtaagacttcaattttgcgcacttgttgtgctagtccggctgcacccttaggcaacttttgcgcagagtgtcgcacgcgagggtagctagcgctgcccctcgcggtgactttgtattggtcgaatgtcgaagaccgtcgacacggtcttttttcgacgtagatttttgcgagggatttttcgcttgtatattacatggctctgcctcgttaaaaacctcaccccccgggaggaaaagagtgcgtgcca

SEQ ID NO: 64612 - DNA, 758 bp, Zea Mays
tcagcaatttagcatacaacaaactgacggttgtacatttatcataagtccaacatagttctcacacatatacaacagttattattgcaaatactacctgaactcgaatatttgaaatacttctccaactgaaaaaatactcataggactcaatgtttgtaactgcactggacgacataaaaaacgatagattgtttgtaaaaacattggacgatggaaaaaagactcgtaagcctgacagtttgaagcataacagggctaccaacacctaatttgacttctcattcttctcgtaagaacggtgcagccaagcgttccttccttctttggtcttgagggtagcaaatacatctctataatgtttctccattaaaagatgagttgcaaagaaatgtaagtcgcttccttcctctgcaccatctttgatcacttgttccaattgggcagcaacctctttacgcacggggtcattttcagatgaggttatggacttgtaagagcccctggactcaaaagcatcgacaatctgtttcatgtattcatccctcatatcctttttcttcttaggtttaggagagtcatgcaaaaccttacgctttcccttaactgtagagctggggttaggtgtgctgttttcacccgcaccaaaaatgtcttcttcgtggccatcagatgatgaattagcatcctcaactccaggaacaagggttgtctcattggtgcacacaatgggtccaaacattatcttaaggttgtcc

SEQ ID NO: 64613 - DNA, 707 bp, Zea Mays
cattattgtttgttcccattcccacaccaatgaacaccgtaagatctgcacgctgcggcagagaaacgtgggttgggatccgttcgacctctccaccccttgtgaaaactgaaactgtagaacgcccatttgtttctagatcgccttgcttctcatgatcactcgttttgttagatcatcggccgcgcccggcaccggttcttccgatccagctagtgcgaatgcatgctcgcgctaggcacgagcgagggttaacatggcagcattgcatttcagatgcagtttcattgtagttgcagagaacacgtagcctgtctcacagtgggggcactaaaggcagctagcttgtgtaaaaagaaagaaagaaagaaagaaagaaaaaaataagtggacgcgaaactgctgctctccgctgattgcggggaacaacgaacacgagtgcgctgggtgcaggaacgcgatagcattctccagtggcagctggagaagttttgacaaaagtaggacacaatcagtgctattctattctatctaaacgttaaacggccacttaaacaggcgaaacggctgtttaaagttcaaacaagctaaataaacggccgtttcaaacagtgaggtacaattgcacaacgaaaacgaagctgctttgtcatgttcgcgctactacaatagttggatatcttgcggttgaaaaagagctgatggtg

SEQ ID NO: 64614 - DNA, 724 bp, Zea Mays
cgctccagtgcggctgacacccaattctacctataacgaccataacccctcaatcaattgcaagattccagctcacaatcgttctgtccacggtggcgatggaaatcggagataacttaacatgttctgggtgattcaaggcggtctaatccaatcggatggttctgtgagcaacaggggacatgagggaggctagaacatcccacagaaaagcacgagctaacctgtagacgtcgggccatggcgaggtgttcacgggtgcggaaaaccgatttggggagaaagaggaattagagagctatggtggctaatcggaggcaggagcgggtgatttggcttcgtgattacctaacaaagctagcggtgtgcttgatttatagtgttcaagagcggtggctcccaattttggaatggcgtgctggcggccggagagaaagaaggtcactagtggctcagtcgtggcgctcgtcggtgcaatggttctaaagtggtgagtttaggcgtgctacggttactaccatgcggtaaagagctacgaggtggcataagtgaggtcgccggagtaccacggcgacaccggcggtctggccacattgcacggctataggcgcagttgataagcttcaccccgtgaccaaatccactccctcgcgagatctttttacttccccgttgatatccactgcgtgtccagcacgaatcacggcgaccggcacaaatccgg

SEQ ID NO: 64615 - DNA, 582 bp, Zea Mays
tgcttgccaccgtgctgcgcagtacctcgccgaaactcctgctgcatgcgtcgagaagtcagccacctggtttgttgtcgcttgacactgttgtaactactcgcccgacgtcatcgccattcatcgttcaacggatttcatcaccgcgcaacgaccacacccttcctgctgctgttcgctgcgacttgaccacctcatcgacttccgtgttggtgccctccttattgccgctataaatccatccccgtcgccgaaccaaggtagaaaagatgaacattttaccagctaccctcttcatatgtatgtttaattgcgtgtagacacatacgataggttccatattttaaatacgtatttaaaacccaaataaaataaatattgatttgttagcttcataaatttgtgatacacatttaaaattagtgtttgcaacattttacatgtttcgttaatatttgaattatgattgttatatttttcaaacaagaaataataagaattatagctttatgttttcaaccaaaaataagagataattatttataatgacatttgtataaaatatataaatttaccagctac

SEQ ID NO: 64616 - DNA, 302 bp, Zea Mays
attcagttgatgttataataaatgcataaaatattttagtttccatctaagcacgagtacaacacgagaataactatatttggctacacgtcgatacaatatctcaactcataattatcgcatccaatagatttaaatttgagtacagagaataaaagcttaatgagttcatgatagttgatagccataacattgtcaatgtctcattggtctctagtacattacagttgactgttaacacaacacaaattaatattcattaatcaacaacatatgcgccatgataaattgataaataaaaa

SEQ ID NO: 64617 - DNA, 457 bp, Zea Mays
agccgatagggtagataaatgcgtgtacttctagcatatcctttaggagattggtgcttatctttctccacttcacatggcaccacctataccactttagactgttgttgtgctagccattcagtctagtgggattcagatttagaactttggaatggctatctcccctctctgacatgtcactttggatttcacagctcagtctgccgtggttgggagtgagtcgacgggagtgcctccaatgtgtttagctattactacttcctaagtggtagtctccattcctcagcctcagcaaccattgttcttcctttgttgatgatagtatttgcttcaatggttcctccagtgctagatctagtgcatgatctagtttttgcttttacctcagatacggcttcaatgtctgttctagctctagctcctccagcttcgacaaatcatggatccaactccg

SEQ ID NO: 64618 - DNA, 618 bp, Zea Mays
ctccagcttgcccctggactctgtccgagctgttcggacgagtacgaggtccccttcgctaaattccctcgggatgactgcgtggtcacgccatgcttttgtttgggtttggtatttatttagagcctgtagggcgaagacgcggtctccatcgatgagatccttcgaagtgggttcgtccacgtcggggacagctgacgagactgtccgtggggacccatgttttatttcttgcggggtcatggcctccgatccatatagaaggcggaagggggtgaacccagtcgccctgcactcagtcgtgtttagcgcccagaccgcttcaggtaacaaatcggcccacttgccctttttctcgtcgaggagcatcttcttaacagctgtgaaaatttttccgtttgcgcgctccacaactccgttggactgcgggtggtatactaaggcgaaggcaagcttggtgccaatggagaagcagaagtctttgaagtcttggctgtcaaactgcttgtcgttatcaactgtgagttcggacggtactccgaagcggcagacgatgttttgccagaagaatttctgcgcagtctttgatgttattgtggatacagccctcgcctcgat

SEQ ID NO: 64619 - DNA, 566 bp, Zea Mays
ctaggtttggaccatggttgtttgatggcttagaagctgacttggaatacttggttgtgcccatgttggacttgtactcttagttgaattgggtttggaacatagttgtcccttagcttagaacccaacttggaagacttggtcatgctcgcgatgtaatactcatagtcaaacttggtttagaccatagttgtataatggcttaggagccaacttagaatacttggccatgcctgagttggaatcatactcttagtcaaattgggttcatactacatttgtttgatggcttataagctgattctaaagacttagtcatgctcatcaaggaatattcgatagtgaatttatgggtggatcacgagatctagaaaatgaaggtaaatgcatagaagactcgaggatttagacaggtttgggctctcaatgcgagatagtaccctacatcctatgtgttggtggctattgcttatgatctaatggtctaccctcttggagcgccatgtctctccttttatagttcaaggagggaggtggttataggaagcttatctggtctcccgcca

SEQ ID NO: 64620 - DNA, 621 bp, Zea Mays
tatgcactaaccatcacaattggttattcaacgttgaattcgtatttcaaatagatggacaattttttgggcatataccatggatgcatcgtggaacaagatcgttatggaaatgctgagttcgttgacatgcaacgtgtggctgtgatattcgacgatagaccctcctttagtgaggtggttgctaaggctaaggagaagatttgttgtcatgatgctgacgacatcgtcgttgatggggtgctaaacataggtcctctacccaacgtgcaaagacttatcttcccaattgagtgtcagtgagagtgggataattatgttaaatcagctatgaagacacaaaagcaagtcatggatgtagtggtacgatgtttgttagttgccactcgccctgaagacgaaaactatgatcgtggtgttgaggtcgtgccaaccgtgcctgatgctcaatctgccccccagtatgatcccattaagtgagcctacaaatgattgtggaactcattacctccacctagattctaccgagggtatccctttggcagggacccttgcagtaagtccctttgtaggtctctttgtagccgatcatcatttttgagcatacctactttgttcttt

SEQ ID NO: 64621 - DNA, 820 bp, Zea Mays
aaattaattagaataaatatacatctattcatcaagttggagtttattgtgtgtgcgtttcatagtaataataataaaatatgataatagaaaattcaataatgtccaaaattggatttaagacctaaaattataattagatcgtggagaaatagaggaatatgaaacttacataaaatatgcatagaaatgtatttttaaattagtaccctaaatgtacaatgtaatttgaatacaaatttgccacaacactaaattcaaatttgaaaggaagcttgaatttggaaataaaagaaatagaaaaggagaataaaaacaaaagaaggacaactcacttgggccaagctccctatttccggcccagctcagctcaccttctggcccacctaacgctggcaccgcgtgggctgcccgatataatgccgcgcgcgcctgctcttgatccgacactaatcgctgggaccgccttgacagctcgttcttcctccccacaacgaaatcgcgtgtgcttgacaacagacttaaccgggatgctcggattctgtggtgactacccgaatccgctaagctagggatgatggggtccgttgcggggagttcgccacgttttttttgtgatctggttaatcctagcgcggcggtcgtcttcttcgagttcggatccagattagctcgggcctcggggttgttgtgaaccaccgccggggatcgcgggatcccgatccggctcgatgtccacccgaccgctataaatcgggagccccgagaccaccttgaccctccaatcgacgtcgggaagtctcctcgtggccgttgtggc

SEQ ID NO: 64622 - DNA, 298 bp, Zea Mays
acgcctcgcaaggcagtcagcccacaacaccctcataggggaagcactgtacagaaggggtgcaacaggagtcctcatgaagtgcattccttcggttactgggaagcaactgctagatgagattcacgccggacagtgcgggatacacgtagcatctagaactctggttgggaaggtcttcaggtctagtttctacaggccgacgacaaagagtgatgcagccgagttagtccagagatgtgaagcttgccaattcttatcaaaacaacaacatttaccagcacagcaactgcagacc

SEQ ID NO: 64623 - DNA, 1009 bp, Zea Mays
caggaagactgagtatcttgacatcccattgaaggattgcatcaaggtatggtgctttgagtggttcaccatggagaatcacaacaagtcgctccctacccgctctcggaggcagcctaatgtttgaacgccaagttggatagaggccccaactgacttggaggtcgctgaggctagaattctacttaccaagaaagctagcttgaaagacaagggtttgactgctgaagctgttgttattgaagtagaggtcatacttgctgcgcataggaacttgcctaaggagggaaaacaggcccacttcctgatgctagctactattgatgatgctaatattgaagctgttctcattgcgttggctggagagtcaactggatctgctcgatttgagtcagggagtgtcgctctcgtgcactcgggtggtggggaaaaaagaatttgcaggcccgaaagcgcccgtctcaagtgagcgtgccgagcaaactcttaggttgagtctgtcgaagtgaaaaagaagaggagaaggctttggtgctcatctagcttggagctggagactgtccctccctcgtcaaaccttggtggcaatacagcggatgctgaccttgaggatgttgtggaaagctgcggtggcacaaaggctagcagatatgtgatggaggaggaggaggaagatgacgacgaagaggaggtgcttccactggttcatagggatcgtcatagtaaggctggcaatgacattccagaccttactccttcgggactagtgagtctctagggcatgactatgtctgccattgacaacgcactggaagaggctattcctgaggatcttttgcttgagcttcctgagatcagggtcatcgacgtccgtgtagagtcacctgacggcgcaccctctacaggtcctctggctgggcaagaggtaaccctgccagtttgccatgggtttccagcccccgagggtgttccagcccctgagggtcctaggaccggctccctctctgct

SEQ ID NO: 64624 - DNA, 605 bp, Zea Mays
gaaagaccatggaaaacttgaaatcatggcttaggccaattataaaaaaatgaaatacactaaataagctacattaaagattatgaaagcttggccaaaatagtttgttaaaaactccaaacaagccattcaagtggaggttcaatggggaaatctgaaatttagatttctgaattttcagcctttgaaccaaaaccgagcgcgttcaccttgatccttaactctaatcctaatgcccccattgacaaaacgtgtctaactaacccctctgtcacatgtcagaagatgacatcgggacgcgagccctagacacgacaaaacctaagatttgcctcgggctcgggctgggagacagaccacacttcagagctccaaatctttgaatccactaggccaaatcctatgacccccacacaagaacggtagcttatagggaggagaagaggttttgtgcactgaccaaggcaagagcaggctcggatgaatgaccacacgcgccagaactcgggcagaatgaacgtgcacacatgttcgaccctggtcggtacgctggcattcgcccaacccgcgcgtgcgctcgccccagcgttcggtcaagtccgtcg

SEQ ID NO: 64625 - DNA, 382 bp, Zea Mays
gaacaaggaccataatatgaggaattgtcaggtgactatagaaaatagaaagagctagccgaagcatgggagaaccagccaaaggagatctttcatacatcttcattctattcccctaatatccaacaacatgtctagcatcaacaaccgaaggcataaccttcaggctctattgcttcgatgattccatcaccaagccactgaacactacccttaccattcattctaggaccccctccatacgaacaagttcctgcaggccaagctcatttttcaacacaaaacatgtgttagcatgacagaagggatccatccaaagctcaaacagtgaacaatgtggtccctaagtccaagcataattactagggcctaaggggttgga

SEQ ID NO: 64626 - DNA, 353 bp, Zea Mays
tattaatcaaaccctaatcagattaatacaacaatcagtttgctagaaatagctgctttctagaccagatctgattaacataaacaaagcaaagcagctgaaaacaaatcattgctaatatgaaactaatcagatctagaatgagaagacaaagcagatgaaatcaaacctgagaacagatcgagaatagatcagctagggttcactcgcagctgagaacagatcgaggtcttaggagagcgatcaaacctgagaagagggagaccacacatctagggttcactcacagctgagaaccgatcgaggtcgtaggagagcgatccttgcgaagcaaatgaaatcaaatgagaaga

SEQ ID NO: 64627 - DNA, 422 bp, Zea Mays
gaagaactctatggcctggcatactaggccagtctgatggtgagccaaatcactttatcgaagaaggttgaagaagaagataccaaatgacacaggcacatcgccctagcccgatgtggattagaccaccaaggtccaatggttgtctcaggctccaacaggcgacgcaaagactggctgacgtggcacgaggtccggtaccacgctcagaaggaaggtgttagttaggatcctagggaatgtgccacaggacatggtccgatgcaccaacgcagagcatatttttgcaattcgtccaatggatctattggctatttgggctataaatgtccctccacacccgcgtcgagtacccaagcattcttaaagcaagataatactcccatttatgtagaactaggcattctagatagagtatgctc

SEQ ID NO: 64628 - DNA, 449 bp, Zea Mays
tagaaaacagagacccgccggatatacctaagtccctaaattgccaatctgaagcaaactctatgcagaaacaagtcctaacctaatctgagaggttaatgggggaagggaaacacacataccttctagacctaggcttatgggcgcactggtgagcgttgttgtgtcctataccggtgctccacctccatctcgttgactcccacctctggtgttgtcatgtccatggttagtgacaatgacatggggctcttcattccccaacgtcaatggatacaatggctccattgccgccataggctgcaacgattctggtcactagaaaaactagaagatctgatcttgtgaatgtggcgcctagggcttgcgggggcacagatgctttggcgtccgtgtcggtctattactgtttatacaatgtctctcgcgactgagggccacaaccatga

SEQ ID NO: 64629 - DNA, 309 bp, Zea Mays
attagcttctgcaatctctccttcagataacctcttgcccgaagcatgacgaataataaagtcaagattctcggacagagcttcgggaccaggagatttagcttcttcggctatttcttcctctgtacttatgtcaaaccctagagattcttgctcagccccttcatcagttgcagtgggttttgtatcaacaggaaatgaaggcacggcttcggtttcagcctcggttgtagcagcttcgacaacttttttcgcgggagtaggagttaatgcttttgtggtttcaatgacagcgtctagcacgctggc

SEQ ID NO: 64630 - DNA, 413 bp, Zea Mays
gttataagcagtcgagagagggaggagaggctcccaagtctcttatcatggtggaggtggttacgaagtggagtactagctaagtcttggcttggcggcagggatctggcctctaggtccttgttggtgcgtcctcctcatgttcatcggtccttctgggcgtcttctcgttggggtccgtccttgtgtccatccatgtcttcaaggatccaagagtctattcactagagtctaaaagtccaacccccaatcttgggtcggcctcctccttttataggccaaggagggggtcggccaatggtagcttccttaagaaggagccgtcgggcgacggtaaagctgagcattctatcatggggtaaagccacgtgtgctcgtgggccccgagattacctggcagtcttgtattcttt

SEQ ID NO: 64631 - DNA, 320 bp, Zea Mays
aggtaattaggagagattccagttcaataataagttacttcgcaataatttagggggttacttctatggagatgattagagttgaacaaatcccttttactaggaaataactaacctctaaaagaaaaggaggcttaatgaagaatatagcttagtgtgtctaaacctataggtgtaaggtaattcaaaatgctttataacataacctatgtgaaattgtgtggagtttttgaactatagtcaggaccaaccaagaaaagacagactacatgttcttggacgatgtagactatcttgtagaagctcacgtgtaatagatc

SEQ ID NO: 64632 - DNA, 479 bp, Zea Mays
attttgtgtagcttatgactcattcttgtgaagtgtcattgcaaactggagatttaagtgcacctattattgtcgaatcatgttgcgggctcttggttggaacagtttattatccttagatttaaaagaatgctataggaccttggcaaactgtatttgtagctaatccctaacctttgtgtgtttgccggagctggttaatttgcatttcaatctatctgtgttactggtacttattattcatcctagggcagtgtacacatctgagcacaatgtgctgtgttgtgcaagttttgcttgtgttataggtcgtatcaagttgtcctttctccaggcctgccttccttttttttgttttgagtttgttggccaacaattatacagttacaattgacaagcatatgtctgaattttcctatgaatatttcagcattttgtgttgtttgtctagaaattataacaaatcaggatgccagaga

SEQ ID NO: 64633 - DNA, 848 bp, Zea Mays
ctaaacaggagcttactcttttatgaactaatgattcataactagaatgagtgaagtaaactatacggtgtgattgctatccaactcagaacagtaatatctggtttattaaagcacttgaatagtgcattggggtatatacagattgatagccaaactccagcacagaacataaaaattattgtcgaaacttatgagccgtttacttgctggtatggaattctgaactcggaagctgacatcgtcagcctggtctaagtgtccgacttaaggagaacttcaggatgacctctgtcctggcaatgcgctgccgtttttgctccctactgagagatgcagggtacaatgttagtgcctgtaaggtcatcggctttatgctccacaccaaaaattaaaaaaaaaaagtgaaaaaaacaggcacacgtgttaccgagtcctgatccaaataccaacttgctgtgctttcagacagagacgatcctatgttgaggggggaaaacgatgtgcgttattccagttgtgcaaccaagattcgattttgattgtgtgaagggcatggactgtcgatccatgatccatatcgcaatcagctatagactgactggcagtgtgcattttcgaaacatatagatgttggggcgtcgaggatgttacctgaatgaaggaaatgaataaatgtcaccgacgtgaatggcggagggaagcggcgagctcagatttcatagttgcattgcggcttgcggcacggcggggcaggagaggagaggaggcgatcagaaatcccctagccaagaccatgactagcccctccgatgttgttccccggcccgacagctgcaagagccgcc

SEQ ID NO: 64634 - DNA, 446 bp, Zea Mays
tacaagaagatgtaaacaaaagatatgtaaaatttttttgtgatagattttgctccatcggtccagcccatcaatccctagtatatattcttagtttctaggaccatgatgttaattgtatgagctttggagggctcccttctatcgtgatgctgcatattctatacttgaaattggggttgtccgatgggaacttggtcatatggaggtggttccggtatgaaggatggaggtcgtaaccaaccaccaggcaaaggattgctcgaagcattggaggctgaaggttggttttgggtcctaatgttggacatgctgagggatgtaaggtgagtagtacgaagatgtactgaacaattattttgactgggttgtttgggcatcagcagcagcgagctctttttaattttgtattgtgatttggcatgtcttcatactatgacctttat

SEQ ID NO: 64635 - DNA, 360 bp, Zea Mays
gggcatatttgaggacagagtgagtaaactacacggaattatagatcatgtatgatctgtctttccaatcttttcctcggcatatatacattttcactcgcaactttgggccggaggcggacagcaagatccattgcacagctggtagcaggaatccaatgcggcacatgcagatgcactgcaacagtgggcctcgctaaactggcacacggggctcagtaccgcacaaacggtacaacagcaaaccagttatggcccgaaaacaacacaccaagcacgtgagcggtagaccccatcgatctcacactcggaggtcggagccgagccgaggacgtactacttacaattactctgctaatt

SEQ ID NO: 64636 - DNA, 620 bp, Zea Mays
ggggttagagccaaatgcaaaatgcttctgcaatattcatgagatgtcctatgagatgaaggccactagtaaagaacaatatgataataattttggttgctacagcgtcgtgcctcgctccgatgtgagctatccagtcccaacatttcggaataggtggccatgagcctggatgcaagagtggttttatgtgaaaaacaacttgattgaaagagaagatataaaggggatcattcaatgccctatctggtctcgcttcggcattaggaggccagccactacccttggaaatgatattcaagcatgccagatagcctttaacaccgtatgcacttatattggcacaagggacctagtgcaggagcatattgcttataaagtgtggccccttggaagtggctaggagatgcccaaggaagctgctgtcgggtccagtcaaggtggcttagtttacctgaagtacacctccaagtacagaaattgattcgataagctgaacgtgactggttagattgtattgaggcaaccagcgacgagttgcttggtgcctacacaagggtcgaagacgatgccatgacagtggccttcggaggacggggcaagaaaagattgaataaagt

SEQ ID NO: 64637 - DNA, 372 bp, Zea Mays
gtgagccaatttgcatggctgggcagccatcctcttggtcacctgaccatcccatagaccggtcggccatcctcatagacgctcgaccatgatattggtcgcccagccacctgactcaaccaaatgtactccaacttagtcctacatgtttgtcatgatgaaattcacataacttgaaggtacgatccgacaggacaccagacggtccgcggtgggttcctagatggtctggtatggggttggacggttcgagatcgtactcgaactgtccagtcatgggtagaggtgctgccacatcaattagatgttgtggcctatgggggcagcagttgccctggtatgagttcattggcatatcatataatggttggg

SEQ ID NO: 64638 - DNA, 542 bp, Zea Mays
gcaagagattggtggctttcactgtggcgagctcaccggcggtcaccggacatgtgtaatacgagctactgcaacgtggtaagacaccaaggcacgtggcgcatggccgataggtggctaactccggtgagttcattcgaatcggccgtgagtcaggcggacacggcggccggagtgaaatagtggctcaagttcatccacaaggcgatatttactaccccgagcaactatcagtactccattgagcacgaatcacatcgccgacatcaatcgcggcgtaagatcaccggcggcgatatttagtggattggggatatttccagtgcactgtaccatgggaatttctgtttgaagcgcctgacaaagcaaaagaaagcgccgagatctttaatttttatgtgagcacttgctaatgttcatgtaacaaatttgtagctccataaaccagctacaaatctgctatagggacctggctgattttctcattcccttgagcaagaattgagtcccaagtcgatcaaatctcactatcagtaaaaatt

SEQ ID NO: 64639 - DNA, 506 bp, Zea Mays
ctcatattcttacagatggtgagtgattacagggaatagcatattagcatatatttgtaggtatctgcaaaacagattgagacacaattacatattaaaaattagtagaggcacaattatgtattaaagatcagtataggcatacattgaatgctaggtgcagtggctctggtatatcttatagagcatacgactaggaaacctgaaaaggtctaaaactggtatttccgatctccattggctgtgatgattgttcttgttcatagttcggatcccatcatagtgctgatcttccctctacactacactgctgcttggataggcacttctactatgtccgcatcttccaaacaccatccagtttttggctagcatgtgcttgtagtgactattgtattagttattactgacttgcaggatggatgtatttgcttagttaaaataaaagatagttgtgtttgctcatctgatcattatgatttatgagcacacatatttattaacgt

SEQ ID NO: 64640 - DNA, 629 bp, Zea Mays
agatgccttgagcagaaaggcccagtgcaattgtatgagcatggatgcaagagttaccaccctatgtgatgaattgtgcaagctgaacctggaagttgtttcttcaggtgccttaagttatatctcggtggaacccacattgcaagagcaaatagtcagggcacagattgaagataagggtgttcaggttatcaaagacatgatcaagcagaaggcagaaaaatacaagtgctttcgtcaggacagtaagggaattttatggtttggagatcgattggttgttcccaaggaccctgagctcagaaagaagatactggatgaagctcacctttccaaattctccatgcacccaggtagcaacaagatgtaccatgatctcagatccttatactggtggaccaggatgaagagggaaattgccaagtatatatccgagtgtgacacctaccagaggatcaatgctagtcatttgaaggcagcaggacctttgcaaccccttctcacaccatcttggaaatgggaggacatttgcatggactttatcgtaggattgcccaatacctccaggcaccatgattccatttgggttattgtggacagattgaccaagactgctcatttcttaccag

SEQ ID NO: 64641 - DNA, 556 bp, Zea Mays
actgatggtcattagcgtgtactacttgtaacaggtgtgacaagctcaatacaagttttggcagaatcagcatcactagagccattagtcagagttgtccccgtgggtgtcaaaatttagagtgctcaaagcttgagagcaagaaggaattcttattcttaggctttataatcatgggtatatccatagtcgttgttgccttcctctatcatatatgctatgctctcatcaactgcacgaggaggtaatcactagaccttaattgctcctctccgcaagtcatgtaaaacatgaggtgtaaaaggttatttggagatgaaatattgcaattgtaaacccacaatatataagttataggattcagactgaaatttcttccttttgttctcatctttgtttttatcaagaaagatgtgtttcttagtgctatgcatgatgacatttttgtgtggttcttgctcctgttttttgcccttggagtcgtaaagttaccatttgatatttcggttctaggtaataatctcctaatgtaaggtgttggttattattatttttc

SEQ ID NO: 64642 - DNA, 385 bp, Zea Mays
aactggagggcatatttgaggtgctcgcctccaggtgcggtgaagagaattcctgctcctgctccctgcaacttcagcgagccatcaaaatacattcgccatacttctgcggtctctgggttatctggtacttgctgttcagtccactctgatacgaaatcaaccaatgcttgagttttgatggcagtgcgaggtcgaaattcgatgtcatgagatcccagctcacaagcccacttggctatttggccaatggcttccttgttgtgaagaatatcccctatcggaaaaccagtgactactatgactttgtggtcatcaaagtagcgacgtagcttgcgggcagttagaagtactgcatataatagcttctgaacttgagggtact

SEQ ID NO: 64643 - DNA, 474 bp, Zea Mays
taaatttctcagggtctaacatgtaaaaattaggacctccttgctctactcttctgaactaaggggacgacgggttggttctagaaatattcagggtttcttatgcagttttgtcgcgaccgcgaaggtgggatcgtcttgagctgaccagatcagatctaccggctcacaataaaaggtgaaccggtacgtgttctaggaccttagatcacagatcaatggctagaaaacacccacgccgacggggatcacacggatggtgatccatgtggtatccacggaccttggggaggaagaccgacctgacaacactggtccatagtccagtggccagaggcgagtttgttgtgaggccgactgacctgtgtgccctagaggtcatgcacacagaatgccacaagtgtgggatgaaggtgggtcgcgcgcataaagttaatgggtcgcgcacatagggttttagcccgagtattcttt

SEQ ID NO: 64644 - DNA, 1422 bp, Zea Mays
cgacggcgatgaacttagcagagctccggtgagctcacagaccgaccgattggggcaacgtctagggtctccaagcgactgacacgaaattggatctaccccgaccttttcccctaacataatttcactaatggccacaaggtttggtctagccacggcgaccgtggacaaggcggaccgatgagcgcgttcccgtggattcatggcgatccagtacaattaaggggttcaggaagctttagaagagcctagggacgctagaacaatcaacagagaagtatgaagtcacctggaacaggctgaccatggggagtatacaccgcatggtgttcttggtggatttgggaagaataaaaaattagtgcttactggtgagggtttggggatacaggtaggtgcagtagatgctggaatccatggcagagccgaggaggtgctcaatttatagttcccgttgtcggtggtgtccaattccacgaagttgtgctggcggccggaggaaagcaggggtactggagcaggggatgggtggcgttcaccgtggcacttcctccggtgagcaccggttgaggagctacggcggttaccggtgagctagtgcggctaggaacgacgtggtgaaaagctttgagcgtggcacaaccgcagtgaggcacggcaactccggtcacggccatgaggccacgtcgccggtgaaaaagggcaggagacagtgaggccacagtatctcatactcatccgcgacgagatctttacctggtgaacgaaatccctacgcccgtggcacgaatcccggcgaagaggtcgccggcggtgaacattttgcgctggcggtctgatccgcacgagcactgtaccatggccaactccatcagacagcctgacagagcattttggagcttcattttctcccagattcaaatggcaactctactaaagctctgcagcaaaattgtagagctataaaccagctacaacattgctatattgtactgccacaaaaagtcaatggagcctgcttgaaattaagcttgaagttcctgtcagtccactgttagtctgaaaattcagacccagtaacctaacagtccaacttcagccttatttatctctagattcttcttaacaactatgcttacactcttaagcaaagttgttctcctatgattgagctacaaatttgatgtggtgccctagggcaaaaaccctagaatttgaaagatacaaggctccaaagttgagccaatatcactgaaaatcagacttagactattaaggacttaagaggggagttttgcaaataagcccaaaacttagggtttaacttgcaaattcacatatttgtgacccaaatgacttaagacacttatttaacttggtttttgcactttagtccaaaagtggactaattttgcacatagg

SEQ ID NO: 64645 - DNA, 379 bp, Zea Mays
atataccgtgataccgtcggtggatccgaacccccgtgggaaagtgccggaccccagcatacatgacctgggcctgcgggtacgacccgagaccttcgcgttaccccgaatgggacctggacccctctaagtaaggtccaggccacccacgacaagatcccgggacgaagaataccctggcctaagtcaaggacgtacaggggtccagcacagacacttgtcagggccttgccgagtgtgcttccgctccccgctcaggcgggggcccggtgctgccacgtggcctattgcccgtgacgtaagctggcgggcagagcctgatgtaaggcctctgggccacccaatctctgtatttattgcagaatagacgtgccgcctg

SEQ ID NO: 64646 - DNA, 1523 bp, Zea Mays
ccatcttgtgtttgagtcctaggaatgtctgactcatggtttatcatgaagagaggcaacgagccatcgagtccagtcgaacgaagttggcaactatatgagtcggtgcctaggagtatgaggacagtctcctagcggaccccgtgcttggatcctgcgaaaggacccagggcctcactcagattacccgtttgcaactcaccaagcgccattgattgaccatcaaggaaagtgtggtctggctcacctccctacattgttgtggaaaggatgtgcgggggaggctaaaacaaaaagacaggatgactccccagacggatctccacatcgagcagaggctcgagagctcacctcgtacgggtatgtgaatgggaaaacgtcgcatgaatagcgcccctcggaccatgagagagcagaggaccaatcggggtctgagggacccaatgaccatgcacgttgtaggaactaacgggccacaaagcaagactataggagatcatgaattatttactccaccgacaccacctagagcatggagtttgtcacgacatcaaagctatttgttaggtgatccaagttcgctgaccttgtctcggcaagtaggacgacaacctcatttacgcagccacctcagtgaagctactcaatggtgaagcccgtcacgacgccatggtgactcccaaattccacagcctcacaaacacgcattggaatgtcaatgagatgcgacatttgattcctcccccatgcatgaatgaatcttccagcctgatctacgcataggaaaaaggccagcgctttaggcctaggacctacgacgaaccaccagttagttagaaaacatcgagaacctagaggtcggaccacgaacgtacctctagtcgtgattgtagacgctacacctcagcattagccacctttaaggccgaacgtaccgcacttgaatcccttaaaagagcatcctcagttcgctccaggggggtcggtaaggtggccgattgaggcacgaagccactgcgccttcgcacctcaagagacatgatcatcactctggagagcaagctaagggttagttggcagaaggatgaaagggaacctaggaggtaagatgggacatgaacaccatccccttgacggccacctcttcgggaggtgcctcgatccatgggcaaaggaaagcacgagctagcaagagatctacggaggggaacgcttttccttttgtgtctctctcttcttctctctccctctctctcatgtatgttgttaaagaggagaggtaccatgacgagcccatgtagaatagtagagggaaggggttcgaaagccccatggcgctagaaactagaaagcaaaagtctttttcatatattattattatttccatggggacagtgccaagacgtagcaaaccacggttagtgtgcaacacggacgacgccgtgaacaaacaccctaagaacgtcacaactagctacatcgtcgtagccttccagcaggttctccaacccttcatccaagag

SEQ ID NO: 64647 - DNA, 435 bp, Zea Mays
ttgcaaatctgtcggcgccagactgtttttttgcttcctgtaattgttgcgttcatcaatctgttgctgatggccgggataaattgtctgatcttgcacaattttcattcctaggaatcgacatcatgattggtttcaaatcacttttgcaaatggaactggacgacgattcatcttgcaatgacgatgattatttcatcatcgcagctactggaattgtgcaaacctggtggttctgttcctggacatgttgttatttatcgagatcgacaagacgggcatcaaaggatgtttcaagattatttggcggccaatccgacatacggtccacatttatttcgtcgaaggttggtgtttattaacctttgattagctccttactatatgtattatatgtgttgaaggttattatttttttggtttagatataggatg

SEQ ID NO: 64648 - DNA, 803 bp, Zea Mays
caaatttttttctagtaatgcaagaacttcaaggaatcaaaatgagatggctatagttgctatagaggagcaacctgataataagccagaagaaaatattgatcatgagcctatggttaattcacctcctacagaaaatgctagtgttgatgaacaacctgtttgtattgaggatatctatgatccaataaattgggataatcttgataacaagtcaagggacatattagtagagaagggacccatcagagatgaaaatattgaatttcctttggataccaatggcagacatttttcatatactcattactctagaaagatgagcaatggagaagtttatgatagaaagtggttggtatattccaaacacgttgatagagtgttttgtttttcatgcaagcttttcaatacagaaaactgcaagagttcattgggtcatgaggggttcagagattggaggcatattaatgagaggttgaaagaacatgagtctagtatacaacatattacaagcatgaactcttggaatgaactgagggtgaggcttgataagcatgaaacaattgacaaaaacattcagcagcaaatcacaaaggagaaagagcgtatcaggcaagttttacaaagaataattgctgtagtgaaatttcttggtaagcagaatttagcttttagaggaccaagtgagcaactttacaatgatcaaaatggtaatttcttagcttgtgttgagatgattgctgaatttgatttggttatgcaagatcacctcagacgtattcaaaacaatgagattcattatc

SEQ ID NO: 64649 - DNA, 379 bp, Zea Mays
ggttgataaggctgaagagctgaaggttgaagagataataaaaatgccaaagattctgagccctccgatagaggcaaatctaccgaagatgcaaaagacttctgctgcaactcctaagaggagaaggatggccaacgtactagatgcagtgctggagactacaaaggcgctgagccctgctcctgcaaagaaagtcgctccaactgaagccaaatcgcaggccgaagccgaaactaggcaagcagaagccgaagctacacaagttcaagctgaagccgaagctaggccttcagtgcccaccgagatagagcctgccacacctgaagaaaaagcagcagagcaaattgctcctaaaaagattgagactcctgcccccgaa

SEQ ID NO: 64650 - DNA, 823 bp, Zea Mays
ccgggtatcatcagatcagtctagcaaaagaggttgaggagaagactgcattcatcacaccatttggagcctttttctatacctccatgccatacggcctcaagaacgctggagcgacttaccaaagttccatccaaacatgcttagccgatcactagggcaagcgggtagaggcttacgttgacgatgtggttattaagacgaaaaactcagaaaacttcatcgaggatctccaacaagtcttcaacagcttgagacgctaccgatggaagctaaacctagaaaaatgtgtatttggagtgccagccggaaagctacttgggtttattgtcagtcatcagggaatagaagtaaatccagaaaagattgaggccattatgaggatggaaccgccacggtcatagaagaaggtacaaagactcactagatgcatgacagcgctaagcagattcatatcaaggctaggcgagaaaggaatgccattctataaattgcttatgaaggtggacaaatttcagtggaccacagaagcataggaggccctggatgcactgaagaagttcttgaccactccgccagtactgaagccaccacgccgagctacgcccggtcagtcggcagaagatttgctactatatatttcgtacacgactcacgtggtaagcaccacgttagtagtcgagcgggcagaggaagggcacacatacccagtgcaacatctggtttactttatcagcgaagtcctcgggccctcaaagataaggtatcctcaagttcagaagctattatatggggtacttctaaccgctcgcaagctccagca

SEQ ID NO: 64651 - DNA, 723 bp, Zea Mays
agtcatatagtgctgaagatcacaacattagaagacatgatttgaaaacatcggtttaacttatatgtgatgagatggttcaaatcataaggctcaaggaatgctagctcaagataagtgaagaagcatggtcacaagtccaaggaagaatgtgtaagaacctagaaagggttctcagttgtgcacactttatgagaaatggccaaaagtgagaaatcaagaaggaaacaaattttgggtcactccagtgtgtggatatgttcgtgatgaccattgcagcatattggaactcaatggagtaagagtattgcccatatttggaatttggagttccaagtgtcagcaaagtgttgttttccctttgagttcttgagtgtaggaatcgtcgtactatcaagagggattcaaaagggtattggtgttgttgctaaagctcacactccttgttttttagtcaactattttgtttcagctcaactatgattgaagtgggtggttcaactggtccttggcccacctcaaccttgtttggctctagtattttgcaattgaatttgcattcagggtggttcaacctgtcacactacggttgaacaaggcaattcaacttgtcccactgtgattgagctaggcatttcaacgccccttcccaaacctcaactgcatttggctttgttagagggcgattcaaccggcccttaggacggttcaaccgcatatcat

SEQ ID NO: 64652 - DNA, 1010 bp, Zea Mays
ctgacctggggtataagagaaaaagcacgccgcatctgcgcatctcttgcttgccgcacagagagagtcatggagaacgagaagcaagagataaatgggggggggggggaagccgccacactcgatctacgaattcgcagccgatcgatgcttggggatgggtctcggaggtccgctggcgtgtgaagatctcgtccgatcgattcctcggatgcgtgggccacttgggtccagggaatcgctcaccggagcgctgggcccaccatggactgcacgtctctgtggttcaggcactactccgcacaatcgtcggtaagaacctccccatagtttcgctttcacctctgcatggtgtagcatcttttgtttcgaagttgaattagtggataatctactggtcgaataccggccatggtgccaccacattgggtgggcaccgccgcttcgttggccagagaaggaagagggccgtctatccattgatcgactaagaaacggtgacgattagagcaggcagataccggttgggcccttgatccataccgttgatccgggatcggagcgttgtgggttgggcacaactattttaaatccgaaccataggcgctcgatcggatgaataggcttgcatcaaagggtggtctattgtgggctattgatacgggatccaaaggtgggggtgacataccgattcgttatgaaatccgacatatcggtggcgtgggcttctaatccaacggcacagatcagcccatacctcttcgtcgtggtgctttcgcataagagaccccgagtttctgaaaactaaacccgccatccccgtatgcataaaaatcactgcacctaggtcctatttttcacgagttagcccctgaactctcaagaattagtgtccgctgtccaacaaggataaaataaatggtgaattgaatatagaaattgattttgttgtaaaaataaacctagaaatcttagataaatcataacttgaccgttttaactcagattta

SEQ ID NO: 64653 - DNA, 312 bp, Zea Mays
ggcgactttcacttagtttaacagggaataatcacttaatcgagttctacaatatccacaatatcctaatgcaagcacacacccaagaaaacacacatgaagtgatagcctattcacactgcttattatactcatctaatgaggttggttatttagtaatattcagattagtagtgcaagtattagaaatggtaatatatcattaattgtgattcttgtccatataactacacttgctaaattaatgttgattgaagctaactactactagactttacccagcctctgcagctgccgccagcagcttccccg

SEQ ID NO: 64654 - DNA, 336 bp, Zea Mays
aactcaccctaaatatgttgttgcatttatgcccattttgatggctgctttattgttgccctgatttttccactgcccatttcaggcttgccctgagtccctgactgctctgagatgctttcgaaggatataattgtcatattactatgcaacgtggatatttattcaaggtatttttcatacaatggacatgtgaattcaaggttcttggcctcaccaattgatgcataagaatgtaacttaacaattgatgttctttctcccttcaaacccattggccttttgacctcctttagaatcgccacaggttgcacaaattcatcattcctggcggac

SEQ ID NO: 64655 - DNA, 1253 bp, Zea Mays
cgtgcattccgaacacctcatccttctttcgtcaaaggtgacagtgtgacactagtgctcaacatgataaggtgtcatgccatcaccaccataaggcctatttttaagattgccatcaccatcataaagcctatttttaagatagatcgactaatcacatgaggattgctccaaaacagtttaggactgcttggttcatatttgtgcaagcccacatggaatttaatacttcaattagttttggcatcaaataaaccatcacaacctatcatacttcttcctttgttggtttaacatatatatagcctgccttagaccttaatgtcatgataccaaatgcccagttaggtacatccgcgaggaaactgtttaagtgctaatcgggttattataaacactactaacatgcccatcttttactttggagcacacacactttatatatgcactttgcacaaaggacccttacaaatgttctaatttcaacaacactccccctcaatatgggcaaaagatatcaaccatgcccatcttgttacatattgactcgttctcacttgggcctaaacctttcgtgaggcaatcagctaattgattacaagaattgatgtgctctaatcttaaaaccccactatctatcttctccttgataaagaacttgtcaatctccacatgcttagtgcgctcaaactgaactcgattgtttgcaatatttattgcagcaacattatcacagtggagtctcatagttctattcctcaacactttcaactcccctaatagacgcttcagccacatcatctcacatatgcttaatgccattgccctatattcagcttctgcagttgacctagccaccactgcttgcttcttgcttcgccatgagacaagattacctccaacaaacacacaatatccagatgtagatcttcgatcatctctactacttgcccaatcggcatcacaataccatttcaagttcatgtgcttgttccttttaaaccacaatcctctcccaggagttcccttcaagtatctcaagatgcgataaacaacatccatatgtcttgtcctaggatcatgcatatacctgctcaccacacttactacatagcatatatcaggtcttgtgtggcacaagtagatcaaccgcccaaccaatctttgatatgcctctctgttgacaggatctcctaactcatcatggatctggtgatttttatcaataggagagcaacatggacgacacccca

SEQ ID NO: 64656 - DNA, 567 bp, Zea Mays
tttgattcctccattggtgataatatgacctaggaaagcaacttccttcagccaaaaatcacacttcgaaaatttcgcatacaactgattgtctcgaagtttctgtagaactaatcttagatgattttcatgtgcttcttcactctgagagtatacaagtatgtcgtcgatgaataccaccacaaactggtcaaggtattccatgaatactttattcatcaagttcataaagtaaggcggtgcattagtcagtccaaaagacatgactaaaaattcatttagtccatatcttgtggtgatggatgttttaggtatatcttcggttcgaatcttcaactgatgatagcctaatcttagacctattttggagaatattgtagttcctctcatttgatcaaacatatcttcaatccgaggtaatgggtacttgttcttaatcgttacttcattcaagcttctatagtcgacgcacattcttcttgaaccatctttcttgttcacaaatagaactggggctccccatggagacaaactggggcgaataaaacctttttctagtaattcttc

SEQ ID NO: 64657 - DNA, 789 bp, Zea Mays
tccgccatcacacagagatcatctaattcctctgtgggagacataatagaggaattcagagatctcgacaaattaggataggggtttacatcgactgatcctttggaggagatcaatataggagatggtaaaactctaaggccgatttttgtgaacaagaccttggagaccgatcctatagatgaaatgatcggtctattgaaagaatattctgattgttttgcttggaattatactaagatgctaggattaagccgagagatagtagagcatcgactacctattaagtctggtttcagacctttcaagcagaaagctataacattttgtccagacctactcccatgaataaaggacgaaattcacggttgctagaagctaattttattagaccttgcagatacgtagagtaggtctccaatattgtgccggtggagaagaaagaatcaggtaagctcatagtatgcattgatttttcgcaatttgaataaagcaactcctaaatatgaatatcccatgcccatagccgacacgctgatcaataatgcgtgaggaaatagaatgattagctttcttgatggtaatgccggatataatcagattttcatggccgaagaagatgcgtctaaaacggcctttatctgttcaggcttcattggtttatttgagtgggttgtcatgacatttggtctgaaaatgctggtgctacttatcagagggctatgaatttgatctttcacgagctattgggaaacactatggaagtctacaatgatgatatcatagtca

SEQ ID NO: 64658 - DNA, 396 bp, Zea Mays
cagcaagaatgatggaacactcctgacaaactgaacaactactaatggagccattagcagaactaaccaaaattaggtgacccaacctctgcaccgaaagaccagcccgcgacacaaaatcctccgaaacaaacgaatagctagcgccagagtcaaaaagagcatgggccacaaacgaatcaactaaaattgtacctgtcaccacgtctcctttctctctgccatccgcagcgggtagcacataagccccggaaatacccgcagaagaggaagctcccggagtgaaattaatagaagaaccccactgagtcgtcgggtgaggcagacgcggagctccaaactgagacggcataggagtagtcggtgaaggagtaggcgcagccagatactgaggaa

SEQ ID NO: 64659 - DNA, 1046 bp, Zea Mays
gaaagggaggccgtgacgccggctggctatgctgcagcgtgcggctagcaacgcctactcctggtggtgggcatcacacatccgcaccacccagtccaagtggcttgaaataactgtcgttggtaagcatcccatttattcacccctgtcgtatgacgagttcgtattgcacattgcccaatgattggttgattttttttttcctttcttttgttgtgcagagatggaggacagagtaaaggccatgctcaacctcattggggccgatggcgattcgttcagcaagaaggcagagctctatttcaaaagccggccagagctcatcaatcacgtggaggagatgttcagatcctatcaggcccttgccgacagatatgaccggatatccagtgagctgcacaaggccaaccacaccattgccaccgtgtttccggatcaggtgcagttctcaatggaagagggggatagtgaggggttttctaaggcaataggtgggattgatctcagcaacttcaagttccctgcactggaaggcttgtccgtgggctcaggctcacagagcgcaaacaggggcaccagtccggtccccaagaggggggcccaggcacaccggaaggtcacccccaacatgaccaaggagaaggcacaggaggagatagacaagctgcagaaacagatcctggcattacagactgagaaagagttcttgaagacctcttacgacagcgcactaggaaagtatctagacattgagaaacaggtggcccaattgcaggatgaggtctgcaatttgcaggatgctttcagcaccggtgtagccattgaagacaatgaagctcgggcattgatggctgcacaagccattatgtcatgtgaggatacgttggtgaatttacaggaccagaaaaacaaattgactgaagaggcggaggtggagctccgacgagccaatgaggcaattgaaaagctgaaaaccttcaagaacgaatgtggactgcctcatgtgcaaatggatgggcatgatcaccatgaaatagaactggtcc

SEQ ID NO: 64660 - DNA, 704 bp, Zea Mays
gccgcagtgactgggaccgggagatagccgagatgcagtgtaactttcgcaccgcaacaataaacaaactaacgtgtgcgagcaccagagagaggacacgtgtcattactctacgcgcttacatacatcaattcatgggggaaaaaattctacaaaacatgtcatgcctaagggtcagcccaaatctctgacaaaatcagacagatagacagaaagctctgccctgattgtacattattagcctgcgctgtttcgatggtagtcaccatgtgtagtagtagtagttagtccaatgaatcaagattagaatgcgatgggagaatcctaccatatgcacatcatcagagtctgcgaatgtcctcttccgcgcacgagctcggaagcttcttcggacactgacctcatggcttgtaatgcttgcatcagcatgctaggccatattgagatgcctcatcttcagagtctctgaatgtccctttcgtttctccgccagcgccgcctccgtacgtgatcgaactgctccagtcgctggcgtcagtcacgactcacgcgtgtgcctcccgtgcagggcggacctaggataaatatatgattgagggcatactcccaacaactaacactaaaatgtcatagcctgaacatttaagctagactgagtaggaaatctaatggtgaaaatttatgctctgctacttgcaatagac

SEQ ID NO: 64661 - DNA, 377 bp, Zea Mays
aattctggatttcccccaattcgggtttccgccaccgtgaaaccaacctcaccgtggccagtacaactccggtcagttcatcctcccctctttctcgtttgagtattctcataacccagtgatgcttgccgaaccaccgaattgaactaaactgccaccaatcaccgggaacacattcatctgtctgcaacaccctcgatcaccgcggctagagcgaatcgggtcaccatttctgaaattaagttaggggaagtgatcgggaatggttcaatcctatgtccgctgcttgggagcaccggtcttggcttcctccagccagtctagctcgccggagcgcggccctgcactgctcaccgtcgtggactccagtcggtaaa

SEQ ID NO: 64662 - DNA, 363 bp, Zea Mays
gttctcaatggatacaacagtaaggagatagatttctgtgagcactgtatttttggtaagcacaagggggtaaaatttaatactgttattcacaaaagtaaaggcatattggattatgtgcatgctgatttgtggggaccctctagaaaaacttttcttggtggttgtcattatatgcttactattattgattattactccagaaggatgtggacttattttctaaaacataaatatgatgcttttaaagattgaaaagttatggtagaaaggtagaccgagaagaaggtaaaggttctgcatactgataatggcctggaattttgttcagatgcttttatgtctttctacagacaagaaggt

SEQ ID NO: 64663 - DNA, 562 bp, Zea Mays
gcaagcagcagcagcaagtaggggctatgggaaggcagccataaataatgctgtgtcatgcgaatagtctttctttgatgctcatatctcagttacttttacattttacataatgattgttgattgagagcaagattactagtaggtgttgaggtattgcaatgcaaatagatcgaagggatggacttgaaactcttctgtgtttgctgaacaggatggagaagggacaactatcaaatgaatgggctcaagaacacaacgaacaatacttgcacgacgattgggctgacagcttaggtgttttcattgagaatccagaatatgtgaacacttttgaggtatactttttatttactgcgaactaaaaatttgaattttgcacatacaatggtgttgttacaggcttacagctaaaacaagtgttgttttctctgcagaatgacatggtctctcagcaatcttttccatcccaagaaaaagtaaaaggtaaagaacagaagaaacaaggaaaacagaaaaatgttgctcatagagggacaacctttacgaaggaggaggacgc

SEQ ID NO: 64664 - DNA, 831 bp, Zea Mays
ttacgacatcacgatctatcttctttagatgctccattctcagagcaagagatcaaaagagccattgatctgttgcccaccgacaaggcgccgagacctgatggtttcactggattattttttaggacgtgctagagcataataaaaggggatgtcataagagcgaccaatgctttccatgctctacgttgtggcatcttatcactcatcaacaccgctaatgtaatcctaatcccaaaaaagaaggggcagaggaagtgggtgattttagactgataagcttaatccactccttcataaagcgtatttccaaaatattggcattacgacttcagccccatatgaatgcgatcgtctccacttgtcagagcgccttcatcaagaacaagagcatacatgataacttcttggcagtgcatactgcggctcgctgttttcatacaaacaagacaccaacacttctgttcaaattggacatagcaaaagactttgattcaatacattgggagtatatcctcacccttcttgagcacctaggcttccctataagatggaggggctggattgcggcaattctctccacctcaacctcaagggttattctcaaaggcgtaccaaaccctcccatctagcatgggcgaggcctaaggcaaggcgaccccctatctcctcttctttttgtcattgcaatagatcccctgcaaagactgcttgaagcagcaactaaactcggaatgctctccaaactccgtggccgctcgcccgacctatgcatattgatgtttgcggatgatgcggccatatttgtcacacccacaaaaggtgaggtat

SEQ ID NO: 64665 - DNA, 571 bp, Zea Mays
gcgagcagaagaaggacatgcctatccagtccagcatcccgtctatttcatcagtgaagttctggggccctcaaagaagaaatatcctcaagttcaaaaactattgtatgcagtacttctaactgcacgcaagctccgtcactactttgatgaccacaaagtcatagtagtcactgaatttccaataggggatattctccacaacaaagaagccatcggaagaatagccaagtgggcctgcgagctgggagctcacgacattgagtttcgacctcgcactgcgatcaagactcaagcactagttgacttcgtatcagagtggaccgagcaacaagtgctagataacccagaaactgcagaagtatggcggatgtatttcgatggctcgttgaaactgcagggagcaggcgcaggaatcctcttcattgcacctagaggtgaacaactcaaatatgctcttcagttgctattctcagcatccaataatgcagcagaatatgaagctttgattcatggattgaacattgccatatcactgggcatcaagagactgatggtatatggagattca

SEQ ID NO: 64666 - DNA, 628 bp, Zea Mays
taaaagtatcacgccatgacgagcaccggtgaaatatcgccggtcggaccctagcctaatccacgagaccatgaattggtgcaaagttatcttgccgcggccatctttatctccaattcacttgaacacatccgaatccacagtacaacatatctttcttcagatatttcttgttcactgatcttcgttgttctactgaaccgaccccctttcgccctttctttctttcgattcttgttaagaacaaggtaatctccattaataagaagtgttcaccagacaatagtcttcaagttcactataggattcatggatcaaaactgcatagattgttagatctggtgctctcaaatcgactgcatctcactgaggtcatattgctctgaatccggttttcagtattgcccaattcacatgacttgtttctaacaccacaacttcataacactagttctctggtttttgtacaacaacctagcaagtcgactgcactaaagttactccactacaaactagctttaaccttgttacagatgtttcaatcaaacacccatgaaattgagctccacatggtcccaaagttggctccatacaactgatcttctgaatattacaggaccttagtctg

SEQ ID NO: 64667 - DNA, 1327 bp, Zea Mays
gaagtagtgaaaaattttggggatccaaagttagtgatatccgagctcatggaagattataagtgtgagagcgaatctttattctagatatggatagaatgttgtgaatttatggcatagttcaggtatatcaatttccaatggatcagcagaactcagaatgccgaagcaaataatcttgcacaaatggcctcgggatacaaagcgtgctcagatgacaaagactcccaagtgtgcttgctcgatccaggcgattggagagccaatatctttaattatttgaaggattcggctcaagtgcacccagagggacacattatgaggccacgaagtacgtcttgataggagatgacatgttctataggaccatggaaggtttgctgctcaagtgtctggggctgaatgaagcaaattggctcttacatgatgttcatgaaagagcttgtgaaactcatcaaccagcccacaagatgaaatggttgattagatgatcgagaaactattggcccaccatgcttgaagattgctttaaatattacaaagggtgtcaggcatgtcaaagatttgggaaaatacagatggtaccgacgtcagcaatgaaccctattgtgaaaccatggccatttaggggttggggatggacatgataggaaaaatcaacccctcgtccagcaaatgccatcaattgattttagctatcacatactatattcacaaagtgggtggaggccgtctccatgaagttagtagcaatgaaggatgtgatcagctttgtcagggagcaaattattcatagatttaggattcctcagactataatgactgatggaggatcgatttttgtttccgaagaattcagaaaatttgcagataacatgggaattaagctgataagatcatccccacacaatgctcaagcaaacaggcaagccgaggcatcgaatcaaagtcttatcaagttgatcgagaggaaagttaacgagcatcctaggcattggcatgaagtattataagaagctttgtgggcctatcggatctcgtgtcatggctccaccaaaacttcaccatatcatttgatatatgggcaggaggctatgctaccaggggagattgcggctagctcaaggcgtgtggaattctagaattacctgaaggttgaagattaggccgctctgatgaacggtaacgtcaaggatctcatggaactaaggctttggtcattagaaagaattagagagaacaaaactaaggtgagccacgcatacaacaaaaaggtgagacagaaataatttctggctggaaatctagtatgggaagtagtattgcc

SEQ ID NO: 64668 - DNA, 303 bp, Zea Mays
aatcttttggtcgagaagcagttgtacaatagaataggtatgataactaaacacattgccagcatacacatttttattttacacattggttatgtacaagtctgagtcgatcatgcactaagaagtctgtagggggtctgcatctacggcccgcaacacttcccggtaaacaacgtttcgagtctgtgatccgcaggaaccatcaggatttccaatcaaaattctaaaaccacttctagatgtaacccttgaaacaacaacgtaaagctggacatgcgtaaacacaggtctgtcaaggtagag

SEQ ID NO: 64669 - DNA, 462 bp, Zea Mays
gccagggtacgctcaactgcaagggtgacccgcgaaggagaggaagccgaagccaccgagacagccccaatttccgaagttatgaggcaagcgagattggttgtaacagaggaagttattgatgaaggtccacctactgccgaagttgaacaagctgacatcgaagaagaaaatgctgatgaagaagaggaagactacaacactctgaccccatcaaaacccagccacttggactttgaaaaatctactgtgtctaaggctgatgtactcatgatgatgaagctgggttacttcggagaagctgagaagaaacttatttgttttgccggagaagaaaccactccagagcccaaaaatggcgtagtggttttcaagagccttttcagagcgggactgcggtttcccttgaacgagatgattggggaagttttggataattatgatatctatcttcatcagctg

SEQ ID NO: 64670 - DNA, 332 bp, Zea Mays
ccttaccaacttcaacaattcattttaattcaatggtaaaacatccacaccagatgagagtatatgaagatcaaacacctcacctcacagcaccacaaaacaagtagttctattgaaacaaaactcctaatcttcctaaaccccgttcttgccatcatgaaaagataatcatgtaatctaacattctttgcaccccacaaaagggagaaagtctacagaactaatggagcaataaagccgacaagaagcccataacattctacgcgacacatttcatcgaagaaatgccaaaaactccacgaagagcattgatagcacaacaacaacacaat

SEQ ID NO: 64671 - DNA, 466 bp, Zea Mays
ctgattttaagattttacctctgggtggttatgacataatcctaggtatggactggttggagtgccacagtccagtggaagttcattgggtagaaaaatggttggagtttgactataatcacagaagggtgcagttataatgagttcagcccaaaattcagacctgctacagttaacctatttccaattggggtccttgaccagacaggaggcggttgagcaactcttggaattacaaggaggggagagtgtggatacaaatgcgacattggttcctgagtcgatcaagcaagtggtggaccaatatcaacatctgttcttgaaacctaccggtcttcctcccaagagggcaattgatcatgctattgagctcttgccaagcgcccaaccttttcggctaagaccttatcggtatactccacaatagaaaaacgagatagagaagcaagttaaggaaatgtttgac

SEQ ID NO: 64672 - DNA, 1396 bp, Zea Mays
aaccagggaaggtaaaagagataacaaaaaccttgagataagggcggagcagttgtaccacttccctgaacgacttcccctagggggtccacccgatccatgggcgaagggagactttggctaataaggaagcccacaaggaataaaaagcaaacaaggtcactctcccccttccccctcttgctttttaaagggacgactctcattaaaacttgcgaagaaaagatcctaggaccctatgatagaaaaccatagatcaaagattgctttattatttatccgggaaaatagcaccaaggcacgttacaccatagtcagtgtgcgctgggcacgacgtcatgtgctggcaccccaagcacgacatgacttcccacctcatcgaaaccttccaacatgccttctaggcttctagatcttcatccaaaagggacgaaggaggaccgatgacgtctcaaagactgcagccagagcagagctcccccatgagcagtgctaccgcacctctttgacaaatgtcaaaatcaacaatgttccggacatggcatagtatcatggatgtgacgtaatccaaaagctaacctaggcggtagcacaacttctctagcttggctcccaaggctgtcagaagaagcaaatgggatgagggaagaggcgagaaagccagaaagtggctggagggcaattgccttaccaacaatgcgaccattggctttagagagttgtacacaaagcagctcgtcctcgaattcagcagcctcttgcgccgcatggaaaacattatgactctcttgggactcctaatagagagggagaggggaccgagggcccgaccatgatgacccatggagggtgacataacctcttagtcaatggaggctgccctacgatgaaaaagatggtggggaaatattagactcacgctatgaaaggggacaagggcactcagataaaaatacttaccttagatcctaaccaacatggcgtggcatcccaccgacttgcaacccatttatcgacctagctgtaggattcgttcgaggagggaaccaaagagaaaagggctcgagagtgaccaacgaacggacgcccgcctgaacttataaaggggcaaggcaatgcctgacccgagagaagcatgtgaggggagatactccccgtcgagggctactatcggggataagatccccgttccttggggcccatcgatcagcaagaacactgggaagaagcctctggtaaccagggcccatcggctaataagaggaggaaggaaacatctgccctaaaagcacccacccctggacgaaccctgaggcaccaagcctgggatcgggcatggtgaagctagacaaggggcagtcgaactgaagggaaacccctcgagtggatccctcac

SEQ ID NO: 64673 - DNA, 605 bp, Zea Mays
cctccccaggatccttcaggaagctatcctcccccagctcagcctggggaagaaaactttgcggcgaacttggcgactcaattctttgatccgcatcctcctcagtggtgatttgtggctggtggttctctccttttttggtgctagttgccaaaaagggggagaaggattctcatcttggcagcacttttaatttatgtaatgaacacctggtctgtaataattttattcgcgtgactattgtgatgcatgtggtgatggcctagagccacaaacattttaatgatgtgatgaccttattgtaatagccagtaccattttatatcttatgctatacaatatggacttgtttgtgtaatgatattctttttatcatcacatcttatttaattatgttgcatccctcattttttgtgtattgtgttggttgtttactctctccaaatatgttgcaaattgacatatcaagtcaatatgattatcacaaaactcatgcacatatttagggggagctgcacatacacaaatacttatatctcgccagtgttcttactttttaatttttatctctactctagtttgttttggcatcaatcaccaaaaag

SEQ ID NO: 64674 - DNA, 372 bp, Zea Mays
ctggaggggtgatgacggccgaacacgaataggtgcgacgaccaagcaggtgtaggtgttgtgacttggtgtgcagcatgagacaatgatgacctagtacggagcatgagtagtgttggtgatggctataacaggacacattggtgtccaaagtgaggtgcatcaatgatagtttgtgcaagaagaaggtgataagatagaattgggattaacgataggtgtttaagacttgaatcactaaataacgtacctaataggttatcgttcaatttaacactaaagagaattgtttcatggatatgtgtttgggactacagcgggatgacctcgtggtatgatacaagcactatggcctctccgtaagtggcacat

SEQ ID NO: 64675 - DNA, 365 bp, Zea Mays
ttgactcagaaacagtactttctgtatcagaaaccaataacacaaaaaaatctaaccgttacatcagatttcatatatagatttatattagtttatacggcccatcttacagattagaaagacataatatgattatatattgggagctggagactaaacggccagatcagacgcgtggggcatataatagctagggtctcgagagcaagtgggctggtgctcccccaaacatggtgtcccctctgatggtggtagaaatttaaaaaagacatcacacaaacaaaaggcaaaccacaatctccacgtttatgaacttttcccaaaccaggcccctttgcttttctaccctttgtggcctgcccctg

SEQ ID NO: 64676 - DNA, 501 bp, Zea Mays
taaaggtctagcaaataatgaacttggacaatatgaatttatagtggcggtagtcatttggtatgaggtattgtatgctgttaatttggtaagcaaacaaatgcaagcaaaggatatgcttattgatgttgctattgagaaagtgcaagggcttctttctttctttgagggctattgggaaactggtttcttagaagctttggagtcagccaaaaaaatcgcacttgagatggatattgatacaacatttcctaaaaaagacaaattaaaagaaagagacattacgatgaaaacccagaagacacaaatattgccacaatgtctcgagaggacttatttcgagtagagtattttgtacctctagttgatcaagctattgcctctcttacgacgagatttgagcagtacaaagattaccaaaaaaatttggtttcttatttacttcagaaacattgcagtcgttggatgatcagggcttacagtcttcttgtgataatcttg

SEQ ID NO: 64677 - DNA, 366 bp, Zea Mays
ttgtggtgggccggctgaaggaaaccagcagaggcaagtctattctgatacgaagaggcccacgtccgagttagatgctacaggagcacgggtatgtcgagcggggttgttgtgcccacccgacgggctgaaccgccagcgataactcgggcgcgggagcgtaagaatttcccaagataaaggaagattgttcgctacaaatcaggagataagcaaatggaatgtgatcaccatctgtgtggggtagctatccttggttgtgtatataaggccaagaggcacccctaccattttcatctcaccctcatcccaccattctcatagtccacataccaaaaaccatcacaggacgtagggtattacgcc

SEQ ID NO: 64678 - DNA, 320 bp, Zea Mays
gcgcgtaggtcttaagtcggtcgggcacgctggtgggtgcgcgggctgggtgtgagctaggacgaggtgacgagaggggcggagggaggttggtcttagtgaagttttagagtcaatggttttaaggaccaaacaaccaaaacctttggagaagcttatccactacacctgctccataatcttggtgtgtgtgtcattgttatcaccggtcgatcgatcaccatgtcctccagcatctctatttgacttggtcaacacgatgtactcctccatatatacatttgtttattgatatcctcaagtatcaaccacccacaatc

SEQ ID NO: 64679 - DNA, 563 bp, Zea Mays
aattttgttagggtttcggctctgaataactcgaagcgggagtgagaatggcggccctagtacgtagtcggggttcatccggtgatgcgccgctgcataaggagggtggcgccaccgtctgcgaccgcgagcgagagggatgaatgggtatcgttgatcggcagatcaactgtgcagattagaaaacccgatgcccactcacaatattaaatccggaccgtcggtgaattattgggcgtttctaatttgcgtaagtcggggcgcgatcctggctgtgtatcgcagatccaagggctggcatcgtgtaacggttcgctaagtgatcaaactaatctgggcgctcgtttggtgatccaacggttccgattcaatgaaatatagattaaacctgcgctgtagatctccaatcttacgttagccatcaaataccgattcgttatattggtgatctaatctgtgccgcgaaggttggatctaacggctctgggtgaagggtaccccttcggcctaggcgttttgcgtaagagaccccgacaaaataactgaatcaacccacagtcctg

SEQ ID NO: 64680 - DNA, 531 bp, Zea Mays
catcaatattgtagatctatggaaggagaataactttgctatagaaatcatgcctttgtaccatgaagaattctgagataaatgagcctgaagttggactgtcagactgcttgaaatcggaaattcagattaacagtggaatggcatggagttagggctcgaatttaagcatgatccattaagaatttggctaggggtgctataacaaagatgaagatggtttaatggtttacaactttgatgcagggccttagatgtgttgccatagaaaatttagagacaatctaccctaaacatcatctatcaagcactctgaagatgactctcatagtacagtagccgatcggatcaggttcagtgaacctcaccgccgatgaccgtcgcgctgtgattcacgtcgatcaccgggattcgtgcgctgtggattgtggataactgtgggcgggtaaagatcttggcgcctggatcagcttgagtccggccgcggttaagcccgccgtacccccttgctcatcggtggatcgggatgag

SEQ ID NO: 64681 - DNA, 488 bp, Zea Mays
tatgaactgcaggcggaggtgagcagtgggagtgtttgcgtattaaagtgcaccgcactacaatacttgtttgtggatgttgagcgtttactttagcttaatcaatcttatagttttttaattaattaatgttatctttatcgtccatgcaagaggatctctatcgtgtttcgcaagatagaagccgccaagcacctgttcggttttgtgtagaacttcatgctccttcctatccggatacttatatccttattcggatgatggtgcctagcaacaacgatagccttccatcgacttagacgagcagccatagatctccctcaaaaacttatgtgccgtcgcaacgcacgggcacctacctagttatatttgatgtataataaagtgcaatggatatacgatatgtgatggcccggtggtaagccaacgtgatgggctctttccacaaaaaatctccactaacccatttttctagttatacgaccgta

SEQ ID NO: 64682 - DNA, 431 bp, Zea Mays
tctcatataataatagttatcaggccagtctgaagatgtcgccttttgaagctttatatggaaggaagtgcagaactcctctatactgggaccagactggagaaagtcagttctttggacctgaactgattcaagaggtagaagaacaagaccgtgtaattcgagagaatttgagggtagctcaaaccaggcaaaagagctatgctgataataggagaccactggaatttgaggaaggatattatgtgtacctcaaggtgtcaccacttcgtggaatgaggagattcaaagttaagggcaaattgtcccctcgctttattggaccatttagagtttttaggcgagttggagagatggcctatcaactcgagctacctgataatctatctgatgtgcataatgtattccatgtgtctcaacgtaagaagtgt

SEQ ID NO: 64683 - DNA, 565 bp, Zea Mays
ggaaaatctatgcgaagctcttcttctctttcccaagtagcttcatcttctctgtggtgactccattgcactttgcacatttttataaccttatttatcgtgacacgagtcagtgtatcaagaatcttgataaggtactcagtataagtcaggtcatcttgaacactaaggtcctccattgatagctgctcttcaggtaccttgagacacttctttagttgtgacatgtggaatacattatgcacatcagatagattatcaggtagctcgagttgataggtcatctctccaactcgcctaaaaactctgaatggtccaataaagcgaagggacaatttgcccttgactttaaatctcctcattccacgaaatggtgacaccttgaggtacacatgatcacattcctcaaactccagcggtcttcttttattatcagcgtagctcttttacctggtctaagctacccacaagttctgcctgattatacagacttgttcttctgcctcttgaataagttcaggtccaaagaactgtcttcctccagtctggtcctaatatagaggag

SEQ ID NO: 64684 - DNA, 606 bp, Zea Mays
gaagaatttctgggcagtcttcgatgttatcgttgatactgctcttgcctcgatacacttggtgaaatactcgacggcgacgaaggtgaacttgaggttcccttgggccgtgggtagtggcccgacaatgtccaggccccagcgctgaaggggccacgtgtgggcgattagttttgtgaactacgaagggcttcccgagcgtggagaaaacttttggcaggcttcacatgaccttgtgacccgattcgcggcgcagatcatagcaggccagttgaaaccttgacggatcaccttggtagctagggccctaggccccgcgtaagagccgcaagtcccactgtggacttcgcgcaggatctggacgccttcggtctcggtgacgcatttaagcatgggttgactgaccccccttcttgtaaagttgtccctcgatgagagcgaagtcccggctctagtgtttgaggagcttgacctcgctgatatcgcttgggtggtaatatccctgcaggaacatggttattgatgcccgccagtcttcggtcatgatgaggttgactatgcggtggccctcggtgtcgttggttatttggaggccctctgggctgc

SEQ ID NO: 64685 - DNA, 1078 bp, Zea Mays
gggaaacgaaatctttattgatgatgatgtcttcagattacagagtacaatattccttcaagagctttctgaggccttgctaagggtagaactttctgaggtgttctatgttccatgagttccccacttctgtgtcatccatctgagtaagccgatatgatcccagttgtgtgacctttgatacgatgaacggtccttcccatagtggtgacagcttgtgtcgtccttcccccgttagaattcggcgaaggaccaagtctcccactacaaaggatcggtgccgcacaactttattgtggtagcgcctcaaggtctgttggtacctgaccgactgaattactgtgttcaaccgttcttcctccaccacatcaatgtcttccagcttggttgcttctgcttcggctatgttatcgaaagttaacctcgttggctctttccacttgtccattggctcttgggtgtgccactgatgcgtactaaatttggatactcctttgcttgcagaaattgaagaattcagagctagtgaagttggaccccaggtcagtgatgatgctatttggtatcccaaacctgaatattatgtcttgaataaacaccaccgctttggctgaggtcaaaaagacaatgggcttgtactctatcaattttgtgaatttgtcaatggaaaccattatatgagtatagcctccctgagctttcttgaaaggtccaatcatgtccagcccccagcatgcgaacgaccatgttacaggaatggtttgcagctgctgcgcgggtaagtgttgttgctttgataggaatttgcatgcctcacacttctggactaactcggcagcatcgctctttgcatttggccagtagaaaccagatctgaaagccttcccaaccagagtgcttgatgccgcaagtactccgcactacccggcatggacttcatctaacaattgtttcccagtagccgagtgaatgcatttcatgaggactcctgttgcacctctcctgtacagtaagccccctatgatggtgtagtgggccgactgcttcgcgatgcgttttgctgcagccttgtcatccg

SEQ ID NO: 64686 - DNA, 273 bp, Zea Mays
attgaagtccccgtcaggagaagaggtagtggacgagctaaggattcctaaatcagaagagggagtctgtcatcagatttcaattgatagtaaggagcccaacccgctcgaggctatcaaggttgtgtcggactttccggacgtgtttcccgaggagctaacgggcatgccacccgagagaaaggttgaatttgccatagagcttgtccctggtaccgcccccatttctaaaagggcctatcgagtatctggaccagaattggtggaactcaa

SEQ ID NO: 64687 - DNA, 1158 bp, Zea Mays
aataaagtagatagtaatcacaacttgtaatgggataactctctattagtgtatataaggccgagggggaacccctacaaaatcatctcatcacataccattccagcccatcctcacctatagaaactgagccatcacaaagctcatcctgtaaccctcgtactccaaaaatcaataccaagccacaataggaagaagggtattatgcaactctaagctgcccaaacatgtataactctgtgagtgattccgacgtgcctctgcacgaaccatcaagtcatgatcaacgacgtcgtcctgctcaaaagcataacgtggataaccccgtggtgcacggtcgggtcacaaacaccaacatctggcgcgccaggtaggggggtgcgacgttgatacacaacgactccatggccatcaccttcaacaccatgatcaccttcaatgccggagagatcttccactttggatccatcgcctgcgtcgtagatcaggagggtatcttgcaccgcataggggacccatccaggaagaaatcttccccagtggcgcaaaaagtggttgcaggtttgctttgaacaacaccataaaaaattccaccgacgggccccaaaacgcaagaacctcgataggttttcgttccgtgcaagatcgcgtcaaaattgggtgggcctagggacgttgtgacgcctgtggctcggccgaccgaggccacacctccgacgtgacaaacttcattgtccacatcgcccactcgggcatggactcggatcactcagcgaagagaagcatgtgcctccgggtctagcaaaaccccgaaggcaccactgacgaccatctcgaccactctgccctcaaaagagatggagggagcgtgaagcaccacaccaggctccttcttcccagacatcctcttcatccagggaagagtggaggatgcacctatttccgacgatgagcccaccatactggggaggagcccccatgcacgccgacgccgaaacagacgccataacgtacggcgtcaccacgaagccggggaatgggatccagcacaagctgtttcctgggacgaagcctctgaagtaggggaatccccctgacgacagagcgctccgagaataccacaactctcgtcgtcatgatcatcgccacgcccaggaa

SEQ ID NO: 64688 - DNA, 483 bp, Zea Mays
ccgtagttcgatctccgccgcgggaccgctttgcgccgtggccaagtgtccctgcttcaccgtcgtcggtaagaagtccacataccgattcgcccatgcacctacatcgtgtagcattagtttgatttgggaatcatgcgctgggggcttgaatcgcgcgctcgccggtgatggcgccaccgggttccgtctggtgcgccgccgactggttgggttagatggtgtgtttgtcgggcaccgtaggatctgtgatgggcggctgtgattactttcaccgtaacgattcggctagggagactcgggggcgtcggatcatgatcggacgcgtaggatctagcttgggtattttaaatcggggccgcagatcaccgatccaacggctagcgtaacatgcgggttctgtatgatgatagaatcatctgcaccgtccggatctaatccaacgacccacatctacggataccccttcacgatagcgttttg

SEQ ID NO: 64689 - DNA, 524 bp, Zea Mays
ccctgtctgacacctcttttgcagtgaaataccttgcctggcacaccattaaggagaatgaatgaggtcctggacaacaagatcatatgcatccatctcatccacttagcaccaaaacctttctatgacatgatctccatgatggcattgtgttcaattttgtcaaaagccttttggaagtctaatttcaggatcatcatctctttcttggactacttgcatatgtgaagatactcaaacgtccatgcaaggcagtcttgtatggatctgcctttaatgaaaccatattgattggcatggatcaatttaggaagtaacttatggagcctattaacctttttgttatgatctttacacttgtgttgaggaggaaaatgggtttgtagtcattgaccagaactgggtcctcttttttagggatgagaacgatgtacgatccatttatgctctgcatgcatagtcttcagttgtagaatgtctaacacaacgagtgaaaatcctgagagatgataggccaacatttt

SEQ ID NO: 64690 - DNA, 613 bp, Zea Mays
ggctaagcataagactaacaaaactaatctcaacctttttgggacacctagaactcagaacatgggtagaagcaaggtaactacttttataaaccactttacatgatttaacttgtataacacccaaaaatgaatcaagacaccacatgttaccttggtctaaaagcagagtactaccacacataataccattcattaggtgatttatcaaaaaggcagagttccatgaaagcatttatgtgcattttcccactaaaggaatgcctcaatttcaccaaacaacactatcattacaaacaacaccggacataacccatcggctacaacaattgaaatatcactcatccatcgcatcaccaatacgaccccacattgcatacatattcactgacgcatctctcacataaatctacaccttaaacctaattctcacatcaacacgatgtttgcttcccgaacactaatacgtccatacaaccacatacaactgaaccctttcatcatacatctcatgcacatcacaaaaataactcctaataacatacctgaaaaaacataagaaacatctgagttcctttctatgcgaacattgtgaggaagaccatctcccttc

SEQ ID NO: 64691 - DNA, 1154 bp, Zea Mays
cccggctttgatctcaatatccatgacggaggatgcccaacgtcgttagatactgtggagctgacgcaccccttaagaagcttttccccatacttagcactatgtcaacctctacggtatgggcgacccctcgcaggggggctcaggtacatgatgagccattggccttggctctcagcgggaaccaagcaggcgcaagtcaactataagtacaagaccatacctcaggccataccatctataggggcacgagacacgtcctcatagtatgtagccaactcccgtccaccaagcacctctgcttggacctataaataatataccctactggtttaggagggacaggagaacacttcacgagttttcttctccagtcggtattggcacttgcctcaatcaacccagggacttgggatccttccctcttccaatcagcctgtactccctactgcaagcacttatgtgcgagtaatataagtgtcatccccctctactggaagtagggcctctcattgcccgaaccaggataaaagacttatgtcatcttgcatcaccatctgggtctagggcacgcgacattatttcactagttggttaggtcctcggatccaaacaccgacagttggcgcgccaagcaggggcggtcgcatgcaaaacacccaattcccatcaggactctagatggctggctttcaccacccgttgaggctcggcatggtgatcatgtttgggagtctagggttcatgtcactcgggatcaagtatgacatggtgctcctcccacctggtcccttagcgaacacacaggaacaactagacattcatccctatccttctcgttgtaggaggcagagatggggcaaccgtaaccgtgccacccgtgacaccccatgccctgatgaagctcatgggctggctgatgacgcagactcccttgcgaggcatcatcagcgaaacgcgcatccctagcaccaactttattggaacctcctcccacggtgcggagagcttcggttccaccagcccctcacaccatgggtaaggacgagctagccttgccggacctcccacctatgggttgggaggagccggccactccatggcaggacatgtcacttctatcaagggctgctggagaaccgtcagtgttcaac

SEQ ID NO: 64692 - DNA, 502 bp, Zea Mays
cctggttccaactgtgtgaccgtcgcattcgagttcgttggctgtcggtcccgttttggtgttcgacttcggattatttctattgcgtgctctaatctaacctagatctgttcaaacgtcgggtcagatcgagttcgagtggggtcaagttcggatcgtcggatcagatcgagtttgagtcgagtcaagttcgggttgtgggtcgtttgacatgacccatgctcgacctgagcatagcgtcgagtctggttggcccatgactccttatcgggtcgggttttttaggttgggtcgggttttttcgggttggttcaagttctagttcaaatatcatggctcgtatctggcctgtggattgttgcggtcaaaaactatagcccttgctcctcatcgcattgatcgggttggttcgggtcgagttttttcagacggattgatcgggtcggataacccatactcaggtctactaacccatgctttcgccatcatgcggagattgagc

SEQ ID NO: 64693 - DNA, 390 bp, Zea Mays
gttcgtagcaagtagtcggaacaggccgaggcatcaatttatagaggacggccgcgaggagggcgaatttagatggggaagtgcgcgcggtgaaaagggggaggagtcaccagagtttgctaacgtggcgttcattggtttacgttctacggcggtcactaccgagtcttcatggcttgcgacgagtggggagatgacttaatgcgtgtcacaaccgagctagatggcggcacaatagcgacggtcgcacagccacgtcgccggtgcaagtgggtacggcgacagggcggaacagtgccccaagttcatctcctgtgcgatatttttcaccctgtgtagttatctgcactccactgggcacgaatcgcaacgacggtgaggatcacggcg

SEQ ID NO: 64694 - DNA, 600 bp, Zea Mays
ccctgaggcgctatcatgataaagttatacgacatcgatctttcgcagtgggagacttggtcctccgccgaattctaacgggggagagatggcacaaattgtcaccactatgggaagggccatttgtggtaacagaagtcactcggccaggatcatatcggcttactcaaatggatggcacgaaagtagggaattcatggaatatagagcatctcaggaagttttacccttagcaagatttcaaaagctatcgggcagcattgtattctgtaattggaaaatacatcatcaataaaaagacttcattctcaagggcacttgaactgtttattatcaagcatgcttactcgacttagggtgaccactataccctactaacggatcaatcggcttaagtcgggagtgacttaagatggtgcaacatgctcgcgcttactcgacttagagtgaccactataccctactaacggagcaatcagcttaagtcgggagtgacttaagacggtgcaacatgctcacgcttactcgacttagggtgaccactataccctactgacagagcaatcggcttaagtcgggagtgacttaagacggtgcaac

SEQ ID NO: 64695 - DNA, 292 bp, Zea Mays
tggatggtatggtacgcgaggaacagagaagggtgctgtgtagccttgagccaccacagacctgagggtacaacgtacacaagaggaggacacggcgtggatgagtggaattcattgcgcagatggtatcgacggtggtagcggtggatcagggggagacgacgaccgcggcagctctccccatcaatgcggatgctgcatctcagatccgtcaacgtggtggcgcccccatgcatctcgatcggtagacgcattgctcgcgtgcgtgccagccccacgcaaccgtaatcct

SEQ ID NO: 64696 - DNA, 1370 bp, Zea Mays
acaggattaaggtagagaatgcctgcatgagcaagcagagcccagatgtgcgtgaggaactccccgccactttcaaggtgttgcatgtgttgcttggtggtgtagtgcgacttagcggcatggatggttgtcttggcccagaaatcttgcagcgccttccagcgatccccatccgccatcctctccagctgcttaccgagctcgatgcctttatggaagatattccgagcgtcgtcttcttgttccgtgggttctcccaccaccttcagtgccaactctgctatatcggcttcatggtacggaagtagttctgggacagatccaatcaagtacgcacagtatctagacaaatgaactgcaacgcctcggtcatcatctcgagtagtccgattagtaggagcaggaccagaggaaatatcacagtgttcagttgcgatgtgccaaattagcatgacttccagctgagagaggcccttaagttcacaagaatacgtatggaacggcatctggtcctgccattgcgatgtttctacggcgtcgtcgtccttggttgggtcgttgccgccatacgttgatatgagcgatctagcaacagctctcttcactgcatcagaaacctccactggatcttgctgttttatcccgtttctcatcaatgagtgctgcttcatcctgtttctcatcagctgtccagaaaacgtgacccttctaaggaaagcgatgactgttgcaaagatggatgggctgatttcgtaccagtatctcttgacatacatggtggctagtgatacctgggcccagtccgatgccagataaaatgccgcatgcaccagctccactgtgagggctataaccaaaagcagcagagtgatgatgtagtcagctcttgagatgcgtacttgtatgatcggatttggcgtctcaagtaccagtgaattcctgacggcaaacacaccaacggttaagattagagtgatctttgctaaagccaaagactggaggaacggcaccggtagctgattcgtcgctgcgaaggtgtagtagtactttgtgaagaagtagtcgtagcagaagcccagctctgcctcgataatcctgaaggctcttttgaaatgctcttcagagggcagcagtttcttgaatacgaaatcatggtcttttatttcagggatggtcttgggccgttggacaactagcccaaagaaacgccttgcaatgagctgccgaaacaaggcataggacaggcataggtctttcagacaagctgaggagcggccatccagacaataccatacctggtcgatggtaacgagtccaccacctccaaacggacggtagcagactgcatacccgttgcccttcatgctctg

SEQ ID NO: 64697 - DNA, 634 bp, Zea Mays
gtggcggccaagaaaggggaaaaaggggggagggcggccactagagtttctttgcgggagaaaagaaacgacgcctcagatgactctgacttagcatccaatggcccacaacccttttcccacatccacgcaccgaagatcaacctttggcaacattttttttgggatattacactctaccccttaaaaaaattcgtccttaaattcgaccactccaaacaaaacatccaaggtaccccatatagcaccaccattcaaaacatgggtccattattggtcttaattaacacaagaacttctacctcagactaattgtctaaggaaactacaccacctaacatcaagcatgaaacaacatgtaatgaagctcaaagcaagtcatagatgcaatcaaaactacgatttcacaacatcaaatttggatgcagccatacatcagcatcaatgtcttaaaatgacactcttttatgaaggggtaatatgcactaagcacaacccttaccaacttcaacaattcattttaatttagtggtgaaacatccacaccagatgaatgtataagaagatcaaacacctcacctcacagcaccacgaaacaagtagttctattgaaacaaaactcctaatcttccta

SEQ ID NO: 64698 - DNA, 654 bp, Zea Mays
ctcttgaacatgtaaaaggccatcaatggtttttatgcttacaaccagctcttttctgtatgatcgcaaataatcatcattcagaattgtccaaacactgttctctatagctggaaggttacagttgaccaaacagttatttctgtacttcccctcacttagcttgttttatgaataatgccagtaaatatcacatatagcaggcaggtagctaatcagtaattgattatttgcaaatgaactacaaatgtcagctgaaaaaggattggtcttcttatgaaatttactgatccccaatgatggactcaaaaactctatagatgctttcactaggtaaccattagtattaaaaacaatgttagttgggtcttaacgtgtacccatggtccaactggaaaagcaacagagtgtactagtcaatgactatatcggacccttgaaaattcttcatcgccccttgtttttcctttcctgccaagattgtctatatctaaagaagtccaagcatcataaagaatgcataccagtatcaacaagcaccagatcaaaaaaaccataaatctaacactatgtaattatttcatctgtttcattcagttactcagcatcttggcctaatctggctaaatcgcacattgctgctgcagataaaca

SEQ ID NO: 64699 - DNA, 559 bp, Zea Mays
aattaactcggagttaaaatggatttgttatgcattttctaaggttttagtattattttagcaataaaaatcaatctccgacttagttctattaatttaccaaggttcaggggctaactcgtgaaaaacagggcctaagtgtagttatcttcatacatgtggggatggcgggtttaatatgcaaaagaataggggctcttttgcaaaagagtcgactgaagaggtgtcgtggcatgtgagcaaaccgaccagatttcaatggccccaatcgaccctcacaacataaagtaccaggacacgatcagtgccgctgatcaagcgatcaacgaccggtacgaatcggtgcgcagatcaaatcctgaccgtccaccagatcggacagcacaacgttcctcacagttcctcatagatctatcggtcaatctacaccgacgcgaacgggtacgacatcggccaatctacaccgttcctcacagatctatcggtctctgattcaacacaagccatcttctcccaccagccacccagcacggcggcacagtcacctacggcggcgcgc

SEQ ID NO: 64700 - DNA, 619 bp, Zea Mays
tttgatagcctcatattctccattcaccattcatcattcatcaaattttcatgctcaagaattggtaggggtggttgttgcctccttagaaacagtgaggtcacaaaactttgcagtaatagtaaggagtaaacaaattagtaaaatctgaaatcaataagaacatagtagaaacaattatgaaataaaaactacaaactaatttaccttcctcaagcttggacagttcttctaggttctcttcaacactaatgaaatcatatccgcgaatccaatcatttgtacaaataaggcgctcaaccattgttggggtcagtgaactcctaaactcatctagtgttctccccctgcgctaaaggctgactcggaatcaactgatgagataggaattgctaagggatcacgggccatgcgagacattattggcaacctagtagcattgtccttccaatacttaagaatatcaaaacttttttgtcctcttcattgtcctctaaaagatatttatctaattcagacttgacagtactattgcaacacccattattgctcatctgttgagcaattatagacctcataagccttttgttcaatgccggtttatcttgagaatcagaag

SEQ ID NO: 64701 - DNA, 428 bp, Zea Mays
aaggctacacattcggacaatctgcataacaattttgggtgatatagcttcgcccagcgaaaaaaattctaagtttctagtgttagcataccggaccaagtggccgagtgagtgggccaaggatggttttatgtgaaggccgatacaaagaagagggatgaattcaaagatattgtgttgagtccactgaaagtgagcttcggctacaagagaccactttgcaacgtgtgtgtagccgctcagatggcttacatcaccttcaatactgtagcgaacaagactggcacctgagactttatgtaggagtttctttgcaatagggttttccacactcagtctggctagaggatgccaaagccgaagaagggtgatgaagaagtaattcctaacattcttattaacattttaagaacaagcctatgttcaag

SEQ ID NO: 64702 - DNA, 482 bp, Zea Mays
gatgcatccaacagacatcaactgcgagtgcggtaaatcggagatcacattatctggcacagaaaactctcgattctctctcctcatccccagtccgtgctgtaacggcgaaggtgcacatctcgaggccatcggaaggagaagttcgcgtccgaatacgatagctgctggaagcaagcttcgattctcggcatcgctatgtgggcccgattgcgtagacgaccatgttttcacactccgcggtggggatctactggagtaagcaggggcctaaagtgacctacatgctatattgtatgtctgcatctcgtgtcagccctgtaacatcgccaatcacgtattttttgtgggagacttatctgctgagttatcacattgagatggtctttaaatcttcttgatgtggggcctatgtttttgtgccatattatccctggtggtccctccatacccttcagccttggtaattggaataacccaag

SEQ ID NO: 64703 - DNA, 508 bp, Zea Mays
tagggaagtgtctcatgttgaggatacctggttgttatataattgatggaaaaacgcctgggaagactaaaaattgctgaagcgcagatgctcctccagaacatgcacgcttgtgttcgaaaaatgggttcatatcctgtcgtcgatcccagttaactacttccggtatatatttatacaactagtgtactacaatactagtatatctcaagtacctggcttatccatccttttatatatatatgcagacatagtcacacacaatgtgtcagtcagtactcagtaatctccaaaaccatatgaatatcactaaaatatctgcaggttcatctggctacggaccctcctaatgaacatgtcacaagcctcatcgatgtcatcctccacgttgaactccagaccttcaacctccctattggtccttatgatctcgatgaccgatggctcctcgggattatcaagggcatgaagctcatcgtgatcgtcctcaccgttgtaatacttgtca

SEQ ID NO: 64704 - DNA, 694 bp, Zea Mays
gaatgtgctcttggtgctgaaaactataacattttgtttctgttgttagaattcaacagtcgtcatgaacgattgcagaagtaagtgcggcgtgctggttttggagtcttttcctaatttatgccaattggtcagctggtaaggcatagaggtcgccctatgacgagtagttgtgagcatgttgcatcgtcttaattcattgccgacttaggctgattgctctgttagtagggtatagtggtcaccctaagtcgagtaagcgcgagcatgttgtaccgtcttaagtcattgccgacttaagtcgattgctccgttagtaggatatagtggtcaccctaagtcgagtaagcgcaagcatgttgcaccgtcttaagtcattgccgacttaagccgattgctccgttagtagggtatagtggtcaccctaagtcgagtaagcgtgagcatgttgcatcgtcttaagtcattgccgacttaagccgattgctccgttagtagggtatagtggtcaccctaagtcgagtaagcacgaacatgttgcaccgtcttaagtcattgccgacttaagccgattgctcggttagtagggtatagtggtcaccctaagtcgagtaagtgcgagcatgttgcaccgtcttaagtcattgccgacttaagtcgattgctccgttagtagggtatagtggtcacccta

SEQ ID NO: 64705 - DNA, 755 bp, Zea Mays
ccgacttaaggcgtttccgacttaagccgattgctccgttagtagggtatagtggtcaccctaagttaagtaagcgtgagcatgtcgtaccgacttaaggcatttccgtcttaagccgattgctccgttagtagggtatagtggtcaccctaagttgagtcgtgccgatttctagtcgagtccaatcggagtcaatttgtcaatcaagagtttgaacacctttgggaaatgaaagctttattgatgatgaaatcttttggttacagagtacaacttttcttcgagaattttttaggcattgctaagggtagaactttctgaggtgttctatgttccacgagttccctacttctgtgccgtccatctgagtaagtcgatatgatcccggctgcgtgacctctgctacaatgaacggtctttcccatggtggtgacaacttgtgctgcccctcccccgttagaattcgacggaggaccaagtctcccactgcaaaagatcggtgtcgcacagctttgtcgtggtagcgcctcaaggtctgctggtacctggccgactgaattactgtgttcaatcgttcttcctccagcacatcaatgtcttccagcctagttgcttctgcctcagctatgtttttgaaagtcaaccttggcgccccgaagatcagatcagcaggcagcactgcatctgacccataaaccatgaagaacaaggtatttccatgcagagctcaactgggttgagttcgcaggctccag

SEQ ID NO: 64706 - DNA, 390 bp, Zea Mays
gtttccatagattattgtgtagtcgtgacttctgtacttgagtctggatgcttcaaacttattgatagggttgtaatgcccttgcaaatataacattattggcgccctccagcctttgtgcattatgatgatgactgtcttgtggccttcgtttggttgcccgataaagggtatttctgtgacctcgtagaatacaactgatggtaggggctcacctcttgttactgttttcatcaacatatcaacctcttcatttttccctgcttgatgtgattgtgaggccgcaaaactatttttcaaggcttcacatgtctgtcagatactgaagcaacactggctctaggcagtacattccttttctacttgaacaaccacaatcttcgagtcggt

SEQ ID NO: 64707 - DNA, 623 bp, Zea Mays
cgcgtatcgaagggccccttcgtcttcatcttcttctgccacctcaaattgtggaaacgccacataacaatgtgaacacagagtggcaggggcaaactcggcaacccttcgatatccccgggagttacataaaaccaaaagtcacaccaattgccccacttattcctagcacagggaactatctcgacaacttcagctaaggtcttcccagtccttggcgtgaaagtgcacgatccaaattgggctatcttatcacctatttttctcttctgccagtgcagacaatatttcttagcgaagacttccatagacggctgcccgccgtatgaggagacggcccagacgtacttcgcaagcgccaccactgcattcaatgtcaactaatggacttgtacctcgaactttcgcaaaacctccactacaaaccaatgcgtcgggaggcgaagaccagcagcgaaaaaagcttcaaaaacaatcaactccccctctggctcggggacctcttctgcccctggagcccgcccgacaccgttcccaaaataacctagccgctgcatctccaacacgtggcccaaaaaaatcctcgaggtcccgaactcgacggtatggccaggctgcagttc

SEQ ID NO: 64708 - DNA, 739 bp, Zea Mays
cttgttgtgctattccggctacacccttaggtgacttttgtgcggaatgtcttttaaataaaagacttcaattcatgcacttgttgtgctattccggctgcacccttaggcgacttttgcgcggagtgttgcacgcgagggtagtctgcgctgcctcttgcggtgacttcggagtggccgaatgccgaagaccgttgatacggtcttttttcgacatgttgcgtctgagtttttgtttttgcggggtattttgcaggtatattacatggctccgcctcattaaaaacctcaccccccgttaggaaaagagtgcggaccggaatagtattgtttggtggattacaagggcgcgtgggccctgagggttaaacaaaaaatttgtggagattgtcaatgttccaggagtgctctaagtctttgccggatggcgttgatagcctgtacgcgctgggggatgcctttgacttgacgatgaatggaccctcccattttggctccagcttgccccgtgactctgtccgggtggtccggacgagtacgaggtctcctttgttgaactctcttaggacgaccgcattgtcgcgccaggccttggtttgagcttggtatttgttgagggcctgcagggcgaagacgcggtctccgtcgatgaggtctttagacgttggttcgtcgacgtcggagattgctgatgtgcttgttcggggtgacccatgctttatctcctgcggcatcacgg

SEQ ID NO: 64709 - DNA, 279 bp, Zea Mays
aaccctctcgaagctatcgacgatgccctattctctatcttatccccactctgcaagaagttttgttatggatcccctggatctattatttgacttcttggctaagttgataggattgttctttagtattaacatttttgactagatcggtaaagacgacattatattatagtggttttctaatccataatattgctataaaacccttgacttcttatacttttgtttccttgctattgtattgacatccttaggcaatatctaccttgatatattaaa

SEQ ID NO: 64710 - DNA, 386 bp, Zea Mays
gagatgtccaggagctggacccaattgccgaggacgaggagaggaggctagaagacgagaacgaggccgaggatgccctccagttcctcatcggtggtgctggtaccgttgaggtggggaccaccactggatccacgccgacgagccccacggtcgaggcgagcagtggctctggatcctgcctcggcccagccacccgttcgaggaggaggtgaccgacgtccaaagtctggctagactttgaagaagtgactgccatggagggaggtaaggagataagaaccgttgtcgtttgccattactacaagcagagtttatctgctaagtcttcttctagtactgggcacttgatccggcactcgatgcattgcttagctaagaaagaa

SEQ ID NO: 64711 - DNA, 451 bp, Zea Mays
ttgaattaccaaatgaaaataacaaaggacttacctagtggagggtggggaaacttatcgccatacttccgaattgcatggttgaaaacacgcatgtcatgtgctggtccaggccatcccgcgacggcaaaggcgaagcgcatgtcaaagtcacaaatagccaacacattttgtgatgcatatccatgccttcccacatactgaagggcatgccataaggaaccattactccagtagcacatgttttatcttacaacccaaaagcaatctcagctagttggaagaggttctatactcctaaccaaaatcagacatatccaacaactaatatacaactaccatccagaaccacacaattcaaacttccatacacatgattagcatacgaactaatagacattcattgattgacaccacctcctcagccaagccagccttccctccttggttg

SEQ ID NO: 64712 - DNA, 366 bp, Zea Mays
atttgggggaaatccggtgactgtgggctatggtgcacgacagaggctaactgcgggtggtatgagcgcgtaacagagaggcggagtgagggtagtgctcaatttaaaggaaccggctacgtgcttcgccaatttgagacgaagacgatcatagtggcggtgggatatttcactcgatgagttcgtcgtgacgcctgccggtacaacggctcaagggcagtaactccagacctaccacggttatagctacgtggtgaaatggtcacggcgtggcgcaatcgcgaagaacggcggccaccatggcgatgatcgtccggccacgtcaccgtgcaagtgggtgcggcgaactgagcggcaacagggccc

SEQ ID NO: 64713 - DNA, 380 bp, Zea Mays
ctaggatgctagttgatggtggagcgaccttctctatgtgtgtggccgtgttgatggggcaccgagttctaggatactagttgatggtggagtgacgatcaatttaatgccttattccttgtactgaaagcttggcaaacaggatagtgagctgattaggaccaatataacgcttagcaatgttgggagcaacagttcgatcgaagctaagggtgtcatgtctattgaattgaccatcgggacaaagatccttgccgctgctttctttgtcatcgaagtagaaggcaattatagtgttatcttaggtagatatttgatacatgccaatgtgtaccttctactctacatcaaatgctaatacaataggtaggtgacgaaat

SEQ ID NO: 64714 - DNA, 352 bp, Zea Mays
ctgacatggcagggtctagtgtgccactgtactagtcactatgccaaccgcccatcagaatggctacctgctacaacaatatgacaggggtctagtgcaccactgggctagttatgttggaggtccagtgtgacgtagaaatgtgtagatttctccactcaactccaacgactatttgggttgttgggggctataaatgcaccccaaccagcacattgaagacacaagagctacaccaaacatccatacattgattgcaacacctcccaagcattcaaagcaacacaagcgccacattcgatcgatttgagttagagagatttagtgtcttgtgttcttgagttgttggaag

SEQ ID NO: 64715 - DNA, 900 bp, Zea Mays
acgatcatggacggcggagcaggaactccggcgagcttgcactagccaggatacgcgatgaccggtgctcccacatggctaacacctaattcaacccttaataactgtttcccctcaatcaatttcactagcggagctctaattcgtccagtccacggagacagcgcagacaatggatgaacaaacgtgttcccagtgatctagggcagtccagctcaattgaatgggtcgagcagcattaggagaacccaaggatgctgagacaagagagcagagagtataaacaaacctagaacaagctagccacggtgaggatgctttcacggtggcggaaaccaatttggggaaactttgaaattggcgcgctctagtggatgatttgaggcacgagttgctggattaggtgcttgactacttaacggaactgagggtgtgcataatttatagagtgcttgagcggtggccagtgaattggacggagacgcgcggcggccggagaggaggaggggcactggcgcacacaattagtggccttcaccgtggcagactcaccggcgacgagccagggctatagtgcggtttacagcgacatggtgaagcttcagggcacgtggcatccgatcgacgacagccaatctcggtgaacttatctgagccggccgcaaagcaaagggatacggcggccagccgccggtgttatccccaggcgaagatcttttacctagaagcgttatccggtcatctgtgagcacgaatcacaacggcggcgtgaatctaagcacacggtcgccggcggtgagcttctctgcgctggcgtcctaatccgattactgtaccatcgcgaggcttcatcagttggtctgacagaggatctttagaagcatttttcttgaatttttg

SEQ ID NO: 64716 - DNA, 777 bp, Zea Mays
tttgacctcaaactaaacacgataaatttatcatagaacacatgccacacggacggatcacaccttaagaaaagctggccacggtaaggaggtgcagaacagccagcgcggtcaccagacacagggacggcttcgagcaccaaacttggacaaagcaactggggtgactgagggggttaacacaagcgtaaagggatgatgagccttggtgaacaatcaaacggagcgatggggcacgggaacagcgaaattcagccagaacccgagactacgatagcggagagctaacagaaaccgagttctcgtggccttattggagcttaatatggagggagccagagcgagcacatctagcttcactactgcacggacaccacatatgtccaagggcacagagaaacagtaaacggtgaccaatagtgttcggactggaggcaagcagacaggcaaacatcatagtcaacagataggcttcacctcttcaatccaatccttggcagtgaaactatcccaagttatcccaccctcatcctgccagcacaaactcttatccctaacttacccagaagcaactggaacacatagtggatggagatctttctcaaactctgaatctgctgaaactggattcacttggttcacctgcaccccttctgttcacccccagttttctcacaaattctaatggcaccaggttgctacagcaatccaaggtcgaaatcacacagaacaaaagttacaaatgctcaaagtgaacccaactcactgaatttcggt

SEQ ID NO: 64717 - DNA, 640 bp, Zea Mays
catgcctagagccattctgaaggctcggagctatagccagagagtgccttcttttatagagctttgtgttctctccagatccctttgtctgaggatccgatggacccacatggaagtgtacatcctatttgtaggatcccacacttataactgaagtttttgattcttttcctttatgggacttggtggagacgaagatccagcctaggagacaagcctggcctagccatgacttcatatggtgggccttagccccgtgttgggctggttgcccgtgtaatcctcaacggtggccactgggttcttaacttgacattgcaggagtgagtgccccatattcagggtatcgatagaggcccccaggctcacattgggtgaggcggcgaacccgcaggtggggcaatgcatgtgtcttgttccagaaatgccagtcttgtgcagcggcaccatgcctatatccttcatgccgagtgggttgcttgttgacatactattgttgctgcataagacaaacaaagtggtctcgccctcgtgcttatttagctttgggaagccaaaagtttctctttcctgacccctagctgctaaggctccctggaggttatcctagacatggggattacctttagtccaaggagct

SEQ ID NO: 64718 - DNA, 471 bp, Zea Mays
ttggtttatcactgcaaaggctgaatttgtattagcatcatgtcttctaatagctgcaaatatatttcagatgttgttggagaagaaacaaggaacattggggacaatagtggtggtaatgtgccattaccaaacactttccaataatgtgatcaactttccaactattgtgcaaggaggatatacaagtcttttttttggcttggtcttgatcatacaataaacaattggatgcgccaaattttatatgatgctgtccggaaaggttgcggcggtgtagcggcgaccaccatggatacggcggggcagcagcatttttccgtaaatcccaccaggctagatacacgccgttacggtatcgtactacgggtcgtatcacgtggcatggaccaatccacatcaccacgcggcatcgtacgttattgcatgcactaaggtatcgtttagttcacatatttataacgtaatggg

SEQ ID NO: 64719 - DNA, 320 bp, Zea Mays
cggcgaacttttcattcttgtcgaagaccttcttcctgagtgcttccagtatcattccattagccctttccacctggccattagctcttgggtgtgctactgatgcatatttgatctagatgctccgttgttcgcagaaatcaaaaaattcagagctagtgaagttggatcctaggtcggttatgatgctattcggtatcccaaacctgaatattatatcttgtatgaattccactgccttggctgaagttagagaagcaatgggtttgtattctatccatttggtaaatttatcaatggtgaccaacacgtgagtatag

SEQ ID NO: 64720 - DNA, 354 bp, Zea Mays
tacgaaaacatccatgtgtgcaagaacaattgtgtgttgtttcagaatgttaatgctaaaaggaatgagtgcccagtatgcaaggagtctagatggaaagatgaaactggttcgaagagggttccacataaggttttgaggcattttccactgttgctaaggttgaaaagaatttttgcttcaaaacaaacttcagaggaaacacaatggcacaagaaagtgaggaagccagtcgccaatgtgatgagccatccagctgatggggaaacgtggaaggactttgaccgaaagtacccaggttttgcagatgatccaaggaacctgaggctagccttagctaccgatggattcaat

SEQ ID NO: 64721 - DNA, 1529 bp, Zea Mays
taaggcctcaggatcctattggtaaccggcaatcacctcctgtaaccatgtcggagtggacgcagaaatagcaacacattcaccatcctcatgtggccggcgagacaacgcatcagcagctgaattatatacccctttcttgtaaacaattcgataatgaagacccaacaacttggtgaatactttttgttgccattgagtatggagtctctactcgttgagatgagacaaactgcgatgattagtgtaaataacaaattcagcatgctgtaaatatgaacgccactggtcgactgccaacagaattgccaaatattctttctcataggcagataatcccatatttgtcattccgagggccttgctcacaaataccaacggatgaccctcctgctgcagaacagcccccactccagtaccagaggcatcagtttctatggcaaatggtttatgaaagtcaggcaacgctaatacaggagttgaagataacgcttgcttaagagactgaaaggccaattcctgaacatcagtccacacaaagacaacatgcttcttaagcaatgaagttaatggtttagtaataattccaaaattctttacaaacttcctgtagtagcctgctagacccaaaaatccccttaattccttgcaagtcataggtactggccatgacacaacagtagacaccttggacagatcagtagataccccagcttggctgataacatgtcccaaataagcaatttcctgtcaaccaaaggtgcatttggacaacttgacctaccaataatccttgagcaacaactgtaacacttgctcaatatgttggagatgaacctcccaagtagggctataaaccaagatatcatcaaaaaataccaaggcacatttgcgaagcaaaggctgcatggtcttattcatggccccttgaaacgtcacaggtgcccccgtaagcccaaacgacattactcaaaactcataatgtccatgatgagtttggaaggctatcttatgctggtcttgaggagccattcgaatttggtgaaacccagctcgtaaatccagagttgaaaaccaagcagacccatgcaactcatcaaggaactcatcactgactagaacaggaaatctggttttgactgtgagggcgttaaggtgacgataatccacacaaaacatgtaagtgttgtccttcttcttgactagaatcactaaagaagagaactcactttggcttggctgaataatactagcacccaacatctctgtcacttgcttttcgatctcagacttcaatgcaggagcatacctataaggtggcatatgaaaaggttgtgcacctagcaacaatgcaatatggtgatcacaatccctggtgggcggaaaaccagttggcaccgcaaatacagactgatagcgcggaagctgtgactatagatcactagacaactcagaaaggatagtctggtccttctcatttaactcagtcaaatggcacacctcaatcagagaacaatggcctttagaag

SEQ ID NO: 64722 - DNA, 412 bp, Zea Mays
atccaatctaatctagatcctatataatctaataagatttaatctagtaagagttacttattgctggtacaaaggattaggccatactcctaactcgcataagcctaaattggtgacttagatcaactcgatcatacccaacaacttgacctacataatatgctacataacctatccaaaccattcagaagcaaacaaccaaactaaatcggactaatcccatttaacacttagtcacctactaaactagtagctctatctatttgtcacctacgaatctaccttaactacatgtccctaattcggataacaactccaagaacaaagatcgaagatgatcgccctcatcaaatcaaggaaggataagattcaagccggatcctcaaaggaatcaagatccacaatcttggac

SEQ ID NO: 64723 - DNA, 390 bp, Zea Mays
gccttctatgccgaagatcactcgtctaaccttttgcttcagcacaagcaagtatatttcaagaacatttctactattggacgaagcaacccttcgatagggaaagggtgcaaataagcttcgcccatgcatacaagtggaaaagatgctagctaaagtcgatagctttggcggcaacagaggaactccgggcgcaagcctaaggagagagtgacgaaggcccgaacccgcgcggccgaggatggagaaaaatatgtttttccctaatttaatttataaacaatgtgtgtaaaacccagaaggggatggttgtaattttgtgcaaaggtggttcattttccctataaatagttgaatagtggcctgcataaggtaccttttcaagggcca

SEQ ID NO: 64724 - DNA, 306 bp, Zea Mays
cacatttgagtcccagaggatctggggcgcttcagcatatcaccatagattttgtggtgggcttacctcgttctcctcggggcagggatgctatatgggtggtagtggatcacttgactaagtccgcgcactttattcccatgaagaccacaaattcagcttcagaatcgggtcccttgtatatgaaggaagtagtcaggcttcacggggtgcctaagtccattgtttctgattgagactccaaatttgtatccagattctgggagagtcttcacagtgcattgggtaccaagctctcacttagtg

SEQ ID NO: 64725 - DNA, 724 bp, Zea Mays
caaggcctgcaaggctagacgaaactccatcgaacacacatctattgcgaagcttcccgagagaccaagcccctagaataaccacagagttcagaccctgtttgatgggaccagagagtcagagactgcctcatttaaatgccgccaccaatcaccaaaggaaacaactccaggttcagggtagagagactggagaccaaacttctgaataatggaaccagaactgccgggagaagacacaggaagcgagcaggtgatcaatggtctcaagttcctggtcacaaaggaggcatctaggatgatgttgcagccctctccgatcaagccggtcggccgtccaacatctatcctgagcaaccaaccacatgaagaagcggcaattacccggtgcccagaatttccaaatgcgctcccaaggatcaaagaggatccctccctagaagaaaccctcataggctgacttcgcagagtactgtccagagggtgagaaccgccaaatgtgtctatcctcaactttcgggtccagcacaatctgagagagattatcccaaagctgcaaatacttaagtaaggcagcaacaccaagggcgcctttgaggtccgaaatccaaatattttgagtcaaaacatcaagaaccgttcatctgttggctcttcgtttgggaaccagccggaatagctgcggtgcaaggtcagcgatacactgtccatggagccatttatc

SEQ ID NO: 64726 - DNA, 1005 bp, Zea Mays
gggaaggtagcggctctctctcaggcgatagccgtgtagggagcgaaaacatgtatgccccgtgaacatcccgaccttgctgaggtgactcgttcttgaccaaggggagttgttgcgaagacgccaacgcctctgagaaaggacccataaaaaagagccccctcgtggtgtggacactaaccacagtagccccacgctagctgcatttgctggaaggggctccccaccagctctcggaggaagtacatacaaagtacttgtcgagggtgacgcttgggcccttctagagaccaatgtcgaacccagagcctccctagcaactccatgaccctcagggacaacaacctcagatcggaagtcggcacaaaggccatgtgtcgctcccgtgggccaccccagaggttgccacaaaggaagctcctcgagcaaaaaacgctgtggaaacgacaatagaaactcatcagagagacaagatcaagggtagtgaagagaactagaggtgtgagagcagaatgcttacgaactcaacaaagcctggctcggggcgcatcggagacacccggggatggggacttggacaaccgtgacacctcgtccacgtcctttagaacctctaaagcctgcccaagccatcgagcaacattcgtgtcgctcggaagacccccaacacctggggcaaaaggtcggcccccatccgactcaagggcgtagctcgagccttgagaggagcaaccccgcgccggaggtggcacaaataacgccagcacccgacacgtccttctctaggaggataagcataggtcatggataagaaagatgacttgattgccggagttgggcaaccaagggatgaaggagggagactgggttattgacaagcacgaataaggtaaggccaaggagatgatactccgccgcaagcccctcttaatgacagacatggaaaaagaaccatcatttgtaagagaaaaagagcaagaaaacatcatttaaaaacaagaaaat

SEQ ID NO: 64727 - DNA, 1033 bp, Zea Mays
gtctagtgagggtagcaatggtgtagtacagagaaggcaacatatgaaatggtcatatgtacatagtaagacagatgttatgagtggaatatatttgaaagtctagagttaagacgtaatgacctaaaatcaagcaaaatacaatctgattggaggcaaacaattatctagtagatatgttggtagttgcgtgacgaaacagccagacgttaataatgtaaccatattttagcagcaattatctagtaggaatgaagtacctcagtttcaaggtaagaagatgaaccttgacactgcaaaaaaaccaattgttggcaattaagataggaagaaaaggttttctgattcactggtcaatttaaaccgaagaaatccatacctctgagtagttcaacaaagacaagatgccagatgttctttttaaggcagagtggtggcatatgcataacattccccttggaaaaaaatcctatcacaagcataattcattgaagcacttttgtactgtaggattagtatgtgaaaaaatggctgtgcataatgactattttaaagatcgtaaactgaagcttataaaccaaagattgtaaattagagattgtaacctaaagctgaattaaagtttgtaagctgaattcaagattataaattaaagcttataatctgaattaaagtcagtataagggatgttcagagatggtcattgacaaaatattggccatggtatttaatataaacacgacaaattcttaataagaaatgacttgtatgtgtctatcgtcgtccccttgcgtgaccagtgtggtgcccttttgatccatctcaggcatgatcaatcgctatccaccatctaaatctgcaatctgcccgtggtcgatgacgattttgcttcttctcccttcctgtcagtttctgcagccacattgtcaagattttgtgctagcattattgtaaataagcagctttcatggaaggcaaactcaaggtgttgtcgtcataaataagtcaccaagaaattattgtcataaataaa

SEQ ID NO: 64728 - DNA, 836 bp, Zea Mays
gaaacaaatatttccagtattgattgtgtggtcacagaaactcacattccatacatacgtcttctcgagcagatctgtgattggattaggaataaagccggttggattgttggctatgagcatatcgcacggcctcttgatgatgcattgcgccattcgaccaaagaggatgaagtctgtgtcacctgtctcatcccctgcagtgagaagtagtttgtacctgaaacacatggtgataccgagtcaacacggtgaaaatggataggccgtatgtataggagatggaaacgttcaatcagggtgacacatagaaaagtagttgttgcatattagatgtgagtgggagtcaaaaccgcaagagctgttgggaggcaaaggtagaatggaggcaattgaagtgaagagatgttgcctaacctttggttgggcgtgccaatggtagcgcaaacttgatcactgcacttgtaggaatccccatgagccacagttgtgcgggtgcattttttgcatgcattgtaccaccacctataaccaatcttttttatagtgactgtcaccaagaattccctatcctgcacgaacatgtaaatatacggtcatattatattcccagacccaaccaactatggcacgattgcaggaaaactagaacagaagaccatgacagttggtaaggcaataatgactaagttaatcaaacatggaacataccttattctcaaatgggtgcagatctctaatacaagcgattttttgttcctcgggaacatggggcataggctgattcgaagatacaacctcgttccacttaatgggactatgcgctttcctcgcac

SEQ ID NO: 64729 - DNA, 321 bp, Zea Mays
gtctttttgcaatatttccctcccctaattgatggttataaagttgcttagggtttgggtaaaagttacacatgctttgcacacttgttcaccttctttccccccttacctagggttttgggagatagggtttaggagaggtctagggttcttctcccctcttatccaaggtagtaagtgtgcaaggattagagtaatgcttcttatgtcattggcaacttgattagcacatgatcaccaagttctcaagtgttgccctaagcctttaccccttgtgatcacagcttctagtgccaaagtgggctttagccaaggtaacac

SEQ ID NO: 64730 - DNA, 348 bp, Zea Mays
ttttaatttgaggcatcactttgagatgctcttagattgatcatcgttgtggaagcttaaaggccaaatagggggattaggctgtgacactagttgctaggggtctgcagttcttgatcctgagcacttgcttctggacttcgaaaacccttgcaacgatgcttcttcatctggtactttttgtactactaaaggttggcaaatgaatgcattgagcttattctttctagtgtacctatatttgggtttacagtgtttgttctgttgttcatgaagggtccagcaaaatttgcaggcgtgttgctttgtttggaaaccaaatgccttttcaattggttgccagtggcg

SEQ ID NO: 64731 - DNA, 643 bp, Zea Mays
aatgtgatatataaaaaataacgaaacacttttaaaacattagttttgtgcatcgtttgtgttatctttcatatcgctttctgttagagggtccttcctcgccgctctcaggaggacttaaatccaagtccaaatccaagtccatgtagagtgcatggaagatgaagtccccaccgccacccgccatctctacaaactcaaagtcatcagaggtggggagatgaccgtatgacacggtcgaggcgggaaggtgttgaggctactgctagaaccaccgcagtaggacatcatttctgtgtcatataacgtagagagctctacgtaggacgcgaagaaagccgacagattgtcatacgaggggttgaacctcatatagatcacgatctgtcgtcttatttcattaactttagaaggcggggcgagcttgtgtccctcatgccgcccgcatggggtgaggctgaggggcaccgagggcttccaagatggtgtcggggtctccgacgaaggaggtcgggcaggtgtcactctgaccatattgccttcctggctgatgacgaaaccgaggtttccaatgtgaatggccgctccgggggtatcgtctatgtgcggccgcctgtaggatctaggacactagctagagggg

SEQ ID NO: 64732 - DNA, 421 bp, Zea Mays
ctcaagtcaacttgaagcacgagggcttgtgggggatggatacccctgggtacaaatgaggcgtattgtctacatgggccgaccgactgactcaggtcctaggccaacgactgaacaaacttggcgcataagacaaggactctattgtaatctaaaccgtctaggagatacatatggaaactaacttgtaacccaagccacaccggattatataaggcgagctagggatccctctcaaggcagatcttaggggatctgatctcatacacgcccctcgctctctcatcaaacatccaaaccctagctctcattgtaacctccatatatcaaagcaatacaacccaccgcaaacaggatgtagggtattacgcatctcatggcccgaacatgtataaatcgtgtgtcatgtcgcatttcgaag

SEQ ID NO: 64733 - DNA, 413 bp, Zea Mays
gcgtaatcccgtgcggttcccagacagaatggcatgtggagccaccgggtagccacgcatctacgctctctccccgtccgcagaccggtcgggcccattcttcagtgaaacgcatccacacactgatacgcgagccctctgcgtcggacgcgtgatgtctccacggatgtcgctctcgtgagactcacaaccccccctgcgcgtcagttctatcctccaaccaacccaccggtaatggcgctacgaacccaagaacatcggactcccctcctctgcttccaacccccgagccaatccatatgggctataaggcgtgtggagtgctttcgcccttttcccctttacacacatgaaccgcccttgtagtgtcgccgtgccgattgacttgtagcgaatacgccattgccgccgac

SEQ ID NO: 64734 - DNA, 893 bp, Zea Mays
tgataatcagtcttttatccaaaagacactccacgcaaaagttgcctaagggtgcagccggaatagctcaacaagagcgttattcgaagtcttttcttcagaagacactccgcgcaaaagtcgcctaagggtgcagccggaatagctcaacaagagcgttattcgaagtcttttctttacaagacattccgagcaaaagtcacctaagggtgcagccagaacaacacaacagaagcatcaaacgaagtcttttattcaaaagacatcgcaacaattacctaagggcgcagccggaataacgttaatcgaagtctatcattacaaaggcactccgcacaaagccacccatgtacgcagccggaacaatacaagcgtacgaatacgaccaacaggccacaccaccattacaattacatacacacggcgagggcatcacctattacacatacacgacgagggcatcgcctatcacatcggctcaaccttcggaatgatacccatctccctgtaattaaacaacattatcctcaattcctcaccctcaaaaagctcccgaagatccccttcgcctatgcccgcccaatttggcaaagacaacaattctcgcctaccaacctcgtctactcgatgtcggccacgctccattcccatgcgacggcgcctgccgctccgtgaaaattcacccacacactgctttcccaccacccttcaccgcctacacccagtactagtaccagaaagatcctcagcacccaccacactcggcgaagtctccgccacagccacatccaacgcaacaaaataatctaagccttcgtctgaggactcctccgtccaaggaaacgaactcccagactcaccgtcggactcaaaacattcagacatagagccag

SEQ ID NO: 64735 - DNA, 405 bp, Zea Mays
gacaaattcgaaggattagaattccaccatgtggaaagggatcacaatgcagcggttgatgtgctatcaaagctggggtctagttgggcccaagttccacctggggtttttgtccaagaaatatagcaactgagtgtcaccgtatatcagatggaggactgccacgttctgagccagacagaggtagattccaatgactagagagagccaatcatcagatacataagaaacgaggaagaaccagatgacaaggctgcggcgaagcgcgtcgcaagacagtcggcccactataccattatagggggctactgtatagaagaggcgtaggaggagtcctcatgaagtgcattcactcggctactggaaagcagctattagatgagattcatgctaggcaatgtggtg

SEQ ID NO: 64736 - DNA, 715 bp, Zea Mays
attttacttgtaggattgggtatttactttcttatgttggatataggctctgatgttttatttaactttcatgtcttatatggttgatatttatatgcatgtgttttgagtatttattcttatgttggatatgggctctgatgttttatttaactttcatgacttatgtgattaattctatatgcatatgtttcatgatgcatttatgcagaagaaactttgctaaaatttctattttctatatcttaaaattgttataccgttagcaagtctttatttgttatggtagcctccgggagatgttggggtgttatacatatgccaaactcatttgattgacaatacaatcaaactaggaatatacattgcaaaaattaacgtatacactgaggtgttgagggatataacccttaagagagcgggtggatgtaacatcctagcccagtagtagcacccttaaaagagcagggtgaatgtaacatcctaacccagtagtagcacgtagtagttggcccatgtgacttatatgtgattatagttgagtctaataccaccttaaaagtttatgatggtagcgagaataaaactttaagagaggtactacacatatggagactcgatccatgtgcagctcaagcaaattttggacatggtgtgttaaaaaagaatatgaccaacgttgacaatatttaatatacacagttattgtaatgac

SEQ ID NO: 64737 - DNA, 838 bp, Zea Mays
agcatatcaacgacatgagctgaatatttctagattgttgacactcttcacaaccttagtagtaacaaaaacaatcgaccatcatagtaggccaataaaaactaactctatgcaataaccacttcattttggagccgattgatgcttaccacaaacatctttatgaacttctctcatagctattcttgcttgatcaaatcctaaacactttaataacaagtcttccgcattccttctatataacttatcattgtgcaacacaaacttgaacacacttcaccgaacactcttttcaactttagcacttggatcacgtaaatgctttactatgggaactctccaaccattcaactgagcttcaaatgtcattagaattcaaaacaagccgattcgggtcttcgctgagaaagtggcctggccgacttcgtgagttggcctagctgggtctggaaagctagcctggcggccattaggggctgacctagccgggttgggcatacctgcacaaaagagagcaaagttggccttgtcgattcccaattccaacttggtcgattcttactgatcagattcaaatgaaaacatttgcatcaacctcttctttgatagaaaagttatgtccactggtgtcaaagctagatgcttggtgagccaacatgctagccttataattctcatatcttggaatatgccaaattcgaaattcggtaaagaaacaatgatacgaagacacatacaagatagacattaagtgatccttctaaacattgaaattcaccagcaactttatgcagtaccaacaagaaatcatcaaaggcctcaacatgttttaactccc

SEQ ID NO: 64738 - DNA, 528 bp, Zea Mays
acaaatcctacccccttaacagaaatctcgtcctcgagatttgtaagaaaagggatacagaaggattggtttgtaattcatcttttagtctataattggttcaaaaatttagagtctcattttttttatttttatagtccatagtgggtggttggaagagcataggtatctagccccttattatttaagatataagctggacaggttgaggtaagaaagattatggcaaggaaaagacttcatccgaaatgtttaagttttgatttatcacgagattcgctttgattgttatttccttccttgtcgatgttgatattttcttcttcagtcttggtctcattgattcgcggtgagtacatatcatcggggttggggaatatggttaagatagatatggatgaggtagactacatgatgtagatcaaaaacttgtttgatgttaggtggggacagacagattatgcaatccatcatgactctactggttgggttagcctgtcattctttatttagtgcagagtgaactaa

SEQ ID NO: 64739 - DNA, 626 bp, Zea Mays
tttgttcacttccttttatgtaatacctattttttagaatgactgactcattaaataactctcatatcagttattcgcatacatgactgaggctaaaaagatggaatgactaagtatttatagaatggttgtgttggtttacttcctttaccgtaatgctcgttttttagaataactggcccactaaaataacttctctcttagtaattcttagtaatgactgaggctaaacgatggaatgactgagtatttatggaatgactgacactaataactataatgactgaccctgagaaaatacaaacgaatgagatgcaagtcgatatttaggaattatgaaatgacacaagtttctagtttttatgaataagatagttgtcaaactactgaaaggaaagcttactttcgggtgactagatttgcatagtactagcttcattgcatttggtgctcactttgctgtctttagtactcttgttactgccttattgcttcttacaacctagtaatgtccacatcctatgcggaggtgtgagaacgagaacccgacatttgcaacaatgatgatatagatgctcgacctcgatgcctcaagtgcctagagtcgatcatggaatcaaatatac

SEQ ID NO: 64740 - DNA, 539 bp, Zea Mays
agtcagcatgggaaacaaagatgagtgacatcattatctatctcttggatgtccatagttgcagagggcgatggttagttgattgatatttcttgtattggggggaatttgggtacacaacatgtgggttgggtggaggtggaggaagagtgggtagggttagggtagatatgatagaagaagatggtcgtatatatagagaatgacgcaagggtgaacccatttaatcttgatcctacgctcactagatacacctttttaagaggaaagtcacaaggtttctagggctattttgtatagatggctgcacaaccacgataaccgcaattgcttgagttgtaaagagtgaggcaacaattattgttgtagctatagagactactacagtaatcacaagagatcatgcttgttgtctctttatgtaagtcatagacattactttaaagtatcaggtggaagtagacttaaatataaattttttctaggggtccattgaaattccttatttttgtgatcttcttgaatgcatttcattctct

SEQ ID NO: 64741 - DNA, 351 bp, Zea Mays
ctcatcatgaccgaagactggcgggcaccaataaccctgttcctgcagggatactaccagccaagtgatatcaacgaggccaagcgcctcaaacaccgaagccgggacttcgcactcattgagggacagctttacaagaagggggtcagtcaacccatgcttaaatgcgtcaccgagaccgaaggcgtccagatcctgcgtgatgtccacagcggcacttgcggttctcacgcagggcccagggccctagccgccaaggtgatccgtcaaggcttctactggcctgctatgatttgcgccgtgaatcaggtgactaggtcctgcgaagcctgccagaaattctctccacgc

SEQ ID NO: 64742 - DNA, 510 bp, Zea Mays
gaattttccaagttctagcaattgttttttattaaaattgcatttactaattcatttacttattttaaatacgctctggactaggagtcaattcctggaaaacgcagggggctctgtcgtaagattaccgagacacagagaatagtgttctctggacggcgggttgattcagttgtttctcggggtctctttaagaaaagtgcacggcgaaggggtatttgttgatatggaccgtcagatctgtgatcaagggtcacgattaggtggcgctataagtgaaccggtacagcacatgggccgatggatccgagatctacgcctgatatctatccacgccacttatcagatcagggcccccggatccgcgatcgatggtctagagtgaagcatcgaaccggtatgcgcatatttaatcccgcgcgtccattccgatcggacggagtatatctaatctgactcgctctaatcttaaccgctggcccaaaatccaacggctaggcgcctatctac

SEQ ID NO: 64743 - DNA, 449 bp, Zea Mays
caccgcaactggtcaggaggttctgccatcgacatcgccatcatcgtcttcacctcgcatgccgtctgtctagcaaattgatcatgtgcgacctcaccctcatgacgtctgtcgtctgccgcaagtttcttaaccaagcacgagggttaccgctgtgtcgcctcttcggacagcagcgtcgtcgttcgtcgtcgaccctcgtcattgcatctacattatcgtcgactctatcggtgcgcgtctcctgtgcacggtctgtgaactatgtcggcacacccgtcgatctgcattgcaccttcatgctgcgtcgacaccctctgtcactggtttgcaccacgttcgtcttcgagttctttgccgacaagtattgtcgtcgcgctccactggcgtcatcaagtctcttcttcttgtgtgccgtggctctcgccgccacgactctaggatcctcg

SEQ ID NO: 64744 - DNA, 504 bp, Zea Mays
cgaatacatcgtggttgtcctccagaaaacagatgaacatgtcttcctatttggcggtgaggctggagctgatgatcgtcgtcttacgttcatcgtagaagtcgaggttggctttcttggtttcttcaatcggtcgtatggtggtaacagcagatgctttgatcactgggattgtgaggtcatcccctagtgatgcctcagtgtttgtagttggttattgtgatgctatcgagggtctggcggtgagggtcgtatggatggcccccgatagcattctatcgctccttggaagtcagcctggatggtgatgatgccttgaggtccgggcatcttgagtatcatgtaggggtagtgcgggatggccatgaacttggctagtcccggtctcctaatgatggcattatatccacactggaaccgagctaccttaaagcgcaggaactcgtttcggtagttgtatggagcaccgaaagtcaccagcatgtaggagtgccccagtggcta

SEQ ID NO: 64745 - DNA, 2007 bp, Zea Mays
cgcgggagggttcgcgagcgccgtggagaagcgctcgataccggggatagttgaggaggaagggtatggagcgaggggagaggagttggaaggggacgtggccggggctttggagcagaggtggcctccgtgggatgggttggccgagcggtacaagctcatcggcgccacctccctcgccttcgtcatctgcaacatggacaaggtgacccatcctgtttgtctctatcacgtggacggttccgtcctgggcacttggcacgggatgacaggctggcaggcggctaattgcactgttacgattttgctctacggtattttgagctgctagaattaaaatgactatgaattcgagttgttgacctgctatagttttgctcatggaaaactaggtagtcaatgacatttaccggatattcagtgggaatttgggtggcaactggcaaaacgattgcactgtttttttcctctgggtttcctttagagaactttagctgaagtccactgatgcaatagtctttgtgcttgctctaaggaaacgtgccatatctaactgtcacattttttagggcttattttggaactcatttgcatcactagtacaaacatgtaaccttcactatgtaccaacagggcttttaggcatttccttacgagcatgaaattgtttgaagtaatgaagttgctatttacagtttaatgcactcttcttcatgtgacatatttatttaattctatgaaagcttttatggatgatcggtccatcatcctttcctgagaggaacaactgttcattgcaatattctaattttgcaggttaacttgagtgtcgcaattattccaatgtcacatcaatatggttggaactcatcaactgctggcttagttcagtcctcattcttttggggttatgcattgagtcaactaccaggaggatggctggcaaaattgtttggcggaaggtttgtttatgactttagggtaacaaaatcatcttgaatatgtacgaatacagtgtctatgcttatgaaaatactgatctaatatggcatctgcttgtgaagtaggaattgccaactgctatcctatggttcataagctgaacatatccttatttgtgttacccctttccaggacgaaaatactttatattaccattaaaactaaaaacagattaattctgctcaaacttttactcctacaatacatatagtgtctatttatctatttctttttctgattgtaggaaagtgcttgaggtcggtgttgtgacatggtctttggccactgctataattcctgttgtagcaggttttatgccagggcttgtactatcgaggattctggtaaactacttacgaaaagtctgctcagggttgttggtccgaaatttgctctacttattgtgcttgtgtattcatagaatgtagtctgtaaaaaactcgaccaacggggtggggggtattgacagcccctgggtatattaagaagaggaccttctcacgtaggttgagaaaatatgatcttgggttgggagttgggacggatgtagtatttaacaaggaaaatttccagaaatgttggaactttcagaactaagtactgcaaagagatagtgaaataacacattaccatgcagaagcattatgacatgctgatatccataattccatataaattctggagcatccacatttgagcacagtgtctagtcatcacatctcgtttacttgtactttgggtgtgttaacttgaacaagaatattttaccatctttatttgtttgcatttattctttgtaagttgtgttctatgatgctaggtaggtattggagaaggtgtttcaccatcagctgctacagatttaattgctaggtaagatcatatcctagtttggttcctttcttgacatttattgttgggacttcccttagtacaacatgtgtcaattttgttttctacataatggtgtatattgtggttctaatttctagcacaatatggcag

SEQ ID NO: 64746 - DNA, 655 bp, Zea Mays
ggttgtgcactaactaggacgagtttcaacatgcccgtgctaggccgggacaaacgacccgtttgtacttgtctaggattaggatatggatatggaaatagaggttacagactcaaggaatgaggatgagtaggagcatcatcctgataatgaaggacgtgagaaggaccattgaagaagacctacccaaaacgataggggtctcaagatgttgtggtcgttgagtaagttagtgaaggttttagagtttggactccacatgggatgcatatcaaaacagagagcaaggtataaatagagaagaaggcaagtgatttggggagtgagggatgtgaatgaacccaaacacccctctctatttatagagttgattcatgatttatttttgaatttttgaacgtttttatgagaataataggaggggagctcctctacttcattttattgagaaaaggttatgtataacaaaagaagaaaagacaaattacatttccacctatctatccactcagttattacatactgaaatttggactttgatagatgaataaccatcaacatgtttttcttgaacaaggacatgcaacccaatacagtgggcaaaatatttttaaatattcaactatttatgttcttccatatgctctaactcatc

SEQ ID NO: 64747 - DNA, 730 bp, Zea Mays
gtcggaagccatggagcagagcatcgccgacttatcaaagctcctgcaagccatgcaaagccagaacgagtccatcaaatcggctctggaagctaatatagtagcggtgagagatctgtcaagttggaggccgcacatcgaagcggatgtgggcgatctgcgagtggagttgagcaacctctccactcaggtgaaggaattgacgaccatgcagagtgaaatcgcagaggcccgcaagatgttcgagatggggtctcaaggacaaccatcgtcaacaacggctccatgggtatcaccagagttcatgccgattgctgcgaatggggaatctggcgtaaatacatatcaccgaggtgctggttttagggtaatccataccctaacaccacctccggtcaaaggtactaagacccctccgcaatttaacttctctaatcagtatgacccttttcagcatcctccactgttaacaaattactcaagttcgttagcagcagccttgcctaatgtgaatttccctcagtttgacgaccatcatcctaaaatgtggaaaaccaaatgtgaatcttactttgaagtttttgttgttcctagagaagtgtgggtaaaaatagctactatgcattttgggggttcagcagcgttttggctccagtcgatggacccacctattcgtctaaccccatggcctgagttttgttccgcagtctgtgctcgttttgagagggat

SEQ ID NO: 64748 - DNA, 2529 bp, Zea Mays
cgaacaaacgttgcgcttgtcaatcgtattgctgtgctatgttctattatcagtgccaacagcaacctgtaaggggccaacagggaagaatagctgggaaaaaaaaccaaggaaaataaatggtgtgatgctagcatttccgaaattttatatggtatcagacaacagtatagcttcatgacgataggcaagtaaggtctgcatgcaccatagcatattctttgcggtcttcaggcttcgtttcggtaatcctggatgtggaagcaaggtactatttcgtaacaccgcatcaagtatcagcacacatggagcagcctggctgcctcaagcagcaaattgagcgaagacagcagtactacatgtgaaatgcttctgacgcttggtgttacttctgcatgaacagtgctataaaatgtctacacctgctaccgaaaaaattaaggatgagtgctcatgacttcatgagacatatatcatggacaacactattactataatggggaagttcatctgctaagtttagccagcaattctattgccaaccacacaaattatagtaagcaagagaacatagataatcggtggaatggtcgactactgtgtatcacacatataacacagtaaacacacactgcatattcacattatacactacagtgcttcagtacaggttttttttttttgatcataatgggggggaaaggttccccaccttgattccatttcatttcacattcccgtttagcccaaaaaggctagatggtacagaattgtttacatagccggatatatccggttgggagagcaacagggaaaagagttgattacaatctagcatttgagaacaccatattccaggcttcttttactccggattctttagagctatgcctgtgactccaactggcagcttcggcgcaaattagctggagagtttggttgagggtggctgcctcttgcctgaaaacaaaaccatttctgcgtttccacaactgccagcaacataggatgacaaaggagctgaactcattttgcgggaggtttgagggccgttcaatctggtgcaaattttgcacagtcatgtcattggggatgtgaaagccaatcgcaagccagaaggtcttggcaaagtggcagcggagaacaatgtgatcagcagtttcgcgttcctggccacacacatcgcaagtgtcctcatccacaatttttttcagcagcagattttctttggactgaattttcccctgggtgagtagccaagcgaagaattgggctctcggtggcgctttattgctccaaatgaaggctgcagcagggttcgtcaccctatcttgctttttgaggaaatcatagagcttggatgtttggaattttccactctgagagacaaacgaacagacgcgagtgtcttgctgttgactgagggcagaatcattgatgatgtcctggacttgatggagttccatctgtgcctgatctgaaagtctagggactagagatagtccatttgtgacaatgtcgtggacacttgattgcttggccaaacagtgagagtagagcgctggtaggcgtgttgccagatcatcttccccacaccaagcgtcatgccagaagtttgtgttatggccatttccgactacggaagtagtgatggcctggtagatgggtagcaccgcgcgcaggttgttccagtgcatcccgtgcacatcaccctccaaggtagccacgttgcagtttgctcttgcccaagccgcccaagaggagttaggagctgaatgaaacctatgaattagcttgacaaggaggcatctgttgtgcagtctgaggtctttgattccaagtccccccactacctttggggtgcaaactttttcccatgcaaccaggcagcacgctccagaggctttgtcctccccagtccacagaaaggaacgtcgcctgcgatcaatttgtgcgacaactcccaatggaagagagattgcagacatgatataaatgaggtggctgtccaaaacagagttgaccaggacagctcttcccatgggcgttaggagggaggcttgccaacctgctagatatttgtcagtttttgcaatctggggtgtgaatgctgataggtgtagtttcgtgctggacagaggtaggcctagataagtctgtgggaaaccttcaagtttgcatccaagaatattaagcatgtctgagagttgggtgttgtccacgtttatgggcactgcagtacttttatggaagttgatctttagccctgtagcctctgagaaagcatcaagaactgattttagagctgtgatgtctgcaatgttggcacgcaggagaataagggtatcatccgcatactgtaagactgggcaggggctatcacccacaaccttttcctcctggttgctgacgttcttcagtacaggttttcaaacacaacaacaggagaaaaggtcgtttctcaggtggccgatataatctccttgtgcagtatgtatatcattgtcagctgagtactaagacttcacc

SEQ ID NO: 64749 - DNA, 518 bp, Zea Mays
caatacatgaattattatggtcggtgtaaaaataagagtttcaaaggaactttatataaatgtaaacggataaagtggagtgtggtgcactctatgaagcaccacactagaagattcctacatcgtaacatggtatcgagagctagggttagctctggtgaagacggtggcagttttgtcagtcaaaatagaaaacccacgtaaattagctagtttccgtcggcagggaggtaaccgacgaaaatcacttaattttcgttggccgcatcagacggcgatagaaatcaataattttcatcagctactattatgcgactgatgtaatttaagtgattacaactatttcagcatcgtttcattcttcctcatcacacgctccactctctcgcactttgcatgcaccaaagctccttgccaccctgtcgtgtcgtgtcgcatggactgtcgacggccctgcctatgtcgtcgcttcacattgtcgatgttcgtccacgtcatcttgcaccatgccacccgtc

SEQ ID NO: 64750 - DNA, 432 bp, Zea Mays
tggtaatcaaaacagaaaattcggaaaacttcatcgaagacttacagctggttttcaacagcttgagacgatttagatggaagctcaatcccgaaaaatgtgttttcggggtaccagcaggaaaattgctcgggtttattgtcagccaccggggaatcgaggctaatccagataagattgaagctatcatgaagatggaagctcctcagtcacaaaagaaggttcaacgacttactggatgtatggcggctctgagcagatttatatccaggctgggagaaaaaggtttgccattttacaagctactcaagaaggtggataagtttcaatggacttcagaagcacaagaagctctagatgcactgaagaaattcttgacaacaccaccagtactgaaaccaccccggcgagctacgtcgactcaaccggctg

SEQ ID NO: 64751 - DNA, 653 bp, Zea Mays
ctcattcatgtggactggtcagccatggctcatctgaggacaaacaagcaagtagtacgtgccaacgacatgattctacaaggcctcaagccaaggatcttcaacgatctaaacaagtttagtagatgatggcttactaaactcccctcagtgattttgagtctaaggaaaaccctgagtcgggccacgggattcacgctgttcttcctggtctatggggtcgaggccatcatacccacggacctagagcatggctccctgaggctacaagcatatagcgaacacaacaatcaagtcattcgtgaggactcactggaccggctggaagaggctcaggacatggtactccttcatttggccaagtaccagtaatcgctccgacgctaccatgcaaggtgtgtccgacctcaggaattcgaggagggtgacatggtgctttggttacgacaaggcaactgggggctccgtaagctcactcccccttgggaaggacccttcatcatcaccagagtactaaagcagtaacatacaaactctgcaacaaacaaggagaagtctacgacaacacaccgaacattaaatagctacatcgattctacccttagtatcccaaacccaaattgtactcgaactttcataaataataaagtttg

SEQ ID NO: 64752 - DNA, 442 bp, Zea Mays
gggcgttacagtacgcatcgttttgcgaccacaagaggtcgttagggcaccaccatggttggtagtcattgctttgtggccctcttcttcctttggctcttgataatgtggaaccttctaggttggccctcaaagtggtggagccacctagattggctcctagtgacatgttggcgtaagtcataactgttggatggttgaggctcaacatcagtgatggcgttctcaggtgtactctaggcatttatcaatggttggcaaccattggactcattcactctagtagtacttgaataaaggtcaatcccaatgcttgtgataccaatatctatcctacctatgtcgctcctcctcgggccattgccgccttttgaggtgacaatactgctattcttgtgccaggctttgtgcatgtgagcatgcctcttattcgttgtccaag

SEQ ID NO: 64753 - DNA, 782 bp, Zea Mays
cgttgtcacattagacaagagtgctctgtttcagcggacggtggagttcttgaagcagctgacgaagccatgctgcctcgataatgttgttagccacaacgtggtacttgcccttggcgctagagcgggaaatgactggtgctgcttcaaggaccatgagacaaggttgtcacgagaaacacattatagcctgaggtgtaccggtgcgtgtcaagatagctggcctagtcgacatcggtgtagacgacaaggtcagtggatgtagatcgtcgaagaaggaggccgaagtcgatggcgccccaaagatactgtaggatccacttcatagcgatgagatgttgctcatatgggacatgcatattaaggcacacatgttggacggtgtaggcgatgtcgggcgaggtgaagacgaggtgctgcagggcctcgacaagacttcagtagctggtgggatcgaccactggggcatcgtcggaggaggccttatcctgagtgtccatcggagtcatacatggcttacaatcggccatgccggcacgctcgaggatgttgattatgtattggcgctggtggagaaacatgccctagtacttgcgctcaacggtgattcctaataagtggtgtagctcactcaggtccttcatcatggactcctacttgaggaaggagatgatgcaccgcaggagttctgggagttggccatgaggacgatatcatcaacgtagaggaggaggtacaccgtgtctaggccacgatggaagacaaacagggaggtgtctgca

SEQ ID NO: 64754 - DNA, 402 bp, Zea Mays
tttcgatgagactatgtcttgtacaacccctgttttttaggatgcagatcgtggatagatgggagatgccatctttgtgaatgaggagcaaggcgacaccgattagagtgatctcgagccatctctactggctgcccaatcaagcctgcttccactacttcgactgacggacccaacgttacttcttccactacttggggtccattcgagctggagcttgctaagcctagaaatgatcaagctgctattaaggggtggcaagctctttcagggaggcaccacgacacatttagagctgccacacacctcattagatgatcgatgagctacatgagcgagtcactcgatctaggttacaacacatctcccactttactcagtctacatttgttgctttgtttg

SEQ ID NO: 64755 - DNA, 455 bp, Zea Mays
ggagtcaatgaaatgatgtgtgggaacccccacagataaactagctacattgctcttctcttccaaaactaatcatttcaaactttcttatcttacgttgaaagcgtgctcagcaaaacgcgtcgctgcatcatgtctctctcctgtgggaccctcgacggggaggggggctaggacaatgtgacctagagcttctgcaaacgaaccctaaggatgggagacgtgcaggtcgaccctaccctcgtccttgttagaaccgacctaagggacaaatgacgcgaacggaggggtccattgaggaagctagtcaagattgtgaatgcgtatgcctcgaaggttacgacgatggtcgccagtgcaatcttaggtcctgaagtcgcagatacctgccccgaatgaacgaacgctaacaagaatgaagagggaaaaggagcgtgaaaccctaacaacaatcg

SEQ ID NO: 64756 - DNA, 1249 bp, Zea Mays
gtgaatattggatccctgtcagagatgatagacaatggtaggccatggagtttgtagacctgtgataggaacagcttggccacagatagagcagtaaaaggatgggacatggctaggaagtgagcatattttgaaaatttatctactaccaccaatatgcagttgaagcgtcgggatgtaggtaatccagaaataaaatccaagctaataacttgccaagcctgatccggtatgggtaatggcaatagcagaccggggtatctatttctgtcggccttggcctttgtgcaaatctcacaagactgcacgaactccttgatctgtcctttcatgccagcccagtaaaacagcttcttgatgcgatgataggttaccgggaacccagaatgacctcctataggactgtcatgaagggcagtcatcacctttaattgcacttggttactgctacccagccaaatccttcctttatgcttgatcactcctgataccaaagtgaatggctctattgtatcccctgcagcaagcgtactcagaatgctcttagcttcctcattctcctcatagctgttagtcacctcggtgagccaacttggtaccactgtcgaagttgctaacacgttgagttgcagtttggaaccatcagtgcataggtttggccgtctagaaagagcatctgccacacggttttccacccctttcttatatataatgcggaattggagacccaatagcttggttatggctttttgttgccagatagtcgacaacttttggtcttctagatgggttaggctttgctgatcagtcttgataaaaaaattctccatgttggaggtaagggcgccagtgatcaactgcaaataaaatggctagatattccttttcgtaggtggacaatcccaagttcttaggacctaaagctttactgatgtaagctataggatggcctttttgctgcaaaactgccccaatacccgatccacttgcgtcggtttccactacgaattgttgtgaaaaatctggtatggagagaaccggtgcttgcaccaatgctgccttcagagcttcaaaggctttctgagcttcatcattccacacaaaaatttggtccttcttgagcaagctagtaaggggtttgctgattatgccgtagtgagcgacaaatcgacggtagtacccggccatgccgagaaaactcctcacctccttgacgttgttgggaatgggccagtctcgaataacctgc

SEQ ID NO: 64757 - DNA, 699 bp, Zea Mays
gctataactcaaacaaagatggattatgggacaacatttttgctgcagacatatgatcaagttgccacacaaaaattagagaaccaaggcctctaacttgctctatcagacgctctgatgatgatcaccatggtatagtactgaaaaagatcagcagatgcagtgaatgtgctaccgatgaactccgcgccgtgatatcctcgttggcgtcacgattcgtgtgctcggtgtgcggatatcggcggcggtgaaaatatcttggcacccggattggttcggacctggtcactggtgggttcaccgtacccacttggtctgaggctgagcgagatgatcctcactggcgttagttgcttaccgaccgtgcgccacgtacctaggggctttaacacgtcgtagtaaaccattgaagcaagtccgtccatcgccggaggccttgccacggtgaaagcaacaatcacctgcgccagtgcatttctcctctctccggccgccagtgtgccttctcaaaattagattccaccgctgatggaacctataaattgatgccccagtgagctccactaggttattacgtgtccagtgcaccagccctcgcctccgattagccaccgtagctcgcgaatttcaaacttcccccaatttggttctccgcgccgccatgaaccaccacgtcgcgagtcgctgtttccaggtccg

SEQ ID NO: 64758 - DNA, 573 bp, Zea Mays
gagtttagtcaactagttgtcttaattgcaaaaaatgaacatagggctttcaaatggacactctttttggtaattgatgacaacctcacaaagataggaattaaatttgaaatccaagctagcacttcacacaaagtgtaaattactatcttggttggcacaatgcgttgcttatctatcataaagaccacttaggaacgatttggataagtttaacatgaactaattaggtaatgttagctccccctacatatgtgctagtgttttcagattaaagtttgcacatatgctagatagaggttgtggaaaatttagtactacttagtgatgctaatgtgtataggataaaccttcatagataccacccgacgatgtgattgccaacttgaagatcaccctttaatctttatccttaccatatcggttaactagacatcaaagacacataaaccctatgacatcaacattataagaaagtttctagataccactttgaagaaaactaagatctaagtctagctaccacttgtaacacatacacatgctagttttgaattcatcaaccattccttt

SEQ ID NO: 64759 - DNA, 431 bp, Zea Mays
atggcccaagggcacatttccctttcaaaacggcgtcgcggcggctctgggtgaaattggggttggggattgaggctacttggccgtaagaagctgtgctttcaccgtgcgcaatcgatttgggagaaggtggaggggacagtgcaaatttaacttcgactgagcttcactggtggagatgaaagcacctcgccgtggctccttgctcaatttataggcacggcggtccggtgattgttttgcggccacgaggtgggctgttagcgcatgtcgaccatgtaagaacgaagcacagtaagagagatcgacgtatggcgacagcgcggtggacaacgctgagtcacggcgaccgccggtgagtaactccggccgcatgcggctgggttcgcggagtcgtgccacgtacgagttacccaactccggcgttatcc

SEQ ID NO: 64760 - DNA, 701 bp, Zea Mays
tatttgcctctggagcaggagaggattccactacagcaaggacaaaacctgatcgggaacaggggcaccacaagacctcaactgggctgacacagagttaagaacattctgcaaacacaaaagttagcaaaggagcctatttgtcgacataagtaaagcagggcaaaggttagctcacttgaaggttagaaaggaacaagggaaatcacagagctagaggcaatggcatgcttttagacggtggagtatcaacagaagcaatattgagagcagattcgagccccaaaggaggattagagctcacgcccaaggcaacactaagggagacctcagctccgatagcgggcaacggattcccagcatctagatcactgacctctaaagtgactggaccgataagagcagtaggaggacttgtcaccactagttcctcggattgaaccagtggcgatccggcatgaacgtccatggaagaagccaaggaggagccgagctcggcacccttggggactgggtcatccttagcagcacccacgggggctgggttatcctaagcggcacctttggaagccaaagcaccctcgatcgtacccacaggagctgggtaaccctggcctgcaacatcaagagccaatttattcccatgaactaggctgccctcaaaggtcgaagaagcatgagaaactgttcgggttatttct

SEQ ID NO: 64761 - DNA, 349 bp, Zea Mays
gttgtgttcaagtatgcaattcagtataacatgaccgaagatcgtaggggacagggtacgtagaccatgctacctaacttatgggtcaattaaccgatccagctgtctctacagacacctagcaaccttttctttatagagctcacatgcaatccgttgtcgcattcaaaaggattctaaggatgctttgcctcacctgtattggtgcgaggggttctcagtgacagggtttatgaaaacacagttcgagctcgttttcttctccattatttccccttcttttattgcgataaaactttttggtttgggtgtacgtaggatttcagtttcctttttgtgaatgaggtca

SEQ ID NO: 64762 - DNA, 472 bp, Zea Mays
gggaagacgaagcacaggacaagacgccggagatggacgacgaggaagaagtacaacagcaaccacgtgctgcgacggaacatgctaggcgcggaaggcatcctaacgtgtgtgtctctaggccggaatgggtcgtgtaactagtgtgggccggaggccgaggaagcaatacttaagtagctgggatagaaccaggagacgttatcgatgaagagaaacacaatcgctaccagcttcctcttctcgctgtattcctcttctgccttattccttcttcccctctcccaagaaactgtgaatcctttccaccgtcgttgttaacacctgttattagagtcatcgatcctggatcccatcgtcaactgcccgcggcggccccgaacagcggcgatggagcaccccgacacacgcaagttgctcgaggaaatgtagcacatggaggtgcgcctatctgaggccatcttgggtcgct

SEQ ID NO: 64763 - DNA, 688 bp, Zea Mays
accataccaggtgtatgcctaagcacaccaacaatgacacagtctcgtgacgataggcaagatcgcacgatgcacgatcactctatacgactgacctgcgggaccctccgcgcactaccacaaggatgttagtggaagactagcaaatggaactcgtttgacgagcagacggggcagtacgccatgatgggagtatggctacacacgaccctacgtgcatcatcaaacgaactacgctacccaagggccaccggtcgagctccttccagcagaatacaagtccctactgtagagtccagcccttgaactataaaagggaaggaccccctctttttgtgaacacgcgagcacacgggttgtaacacgctcaacactacactggactggggtgcaagcctgaaccagtataatccaccgtctcaaatccacgttcgattccatgtgattcaccattcgaagtgagtctgcgctaatcccccactaaacacaaatcgtattgtccctggttttcgaaaccataacagttggcgcactaggtaggggaacttttaatgtgcgagaagacacccatcactccaatggcccacgcatcgacattcgctagtggtgaaaccttcacgtcggggagccacaacatgtttggcaccctcgacttactcgccactgcaaccggtgatctccgtctcac

SEQ ID NO: 64764 - DNA, 580 bp, Zea Mays
acaagctagcggaacaggctgaggcatcaatttatagaggacgaccacgaggagggtagatttgaacggagaagcgctcgcggtgagaaggggaagagtcaccggagttcactaatgtggcgttcactagttaacggtctacggcggtcactgccgagtcttcacagcttgcaacgacgtggtgaatcgtctgaaggcgtgtcataaccgagataaaatgcggcacaacggcggcggtcgcgcagccacgtcgccggtgcatgtgggtacggcgacagggcaaaacagtgcgccaagttcatcctcgcgcgagatcttttcactgtcaaccgttatccgcacgccagagcgcacgaatcgtaataccagcgaggatcgcagcacggagttcactggtggcaacgttcactgcatctgtgatcttttgcagatattgtaccatcgcgttcttcatcaatcgttatgacagagcgaattgaagagctttgttctccaattctcatgtgacaacctagtaatatgtctatagcaaagttgatctcctacaaaccagctttgattttgttatagcatccttaat

SEQ ID NO: 64765 - DNA, 295 bp, Zea Mays
ttgcagtttacctaggcctgaaatacacatgcaggtgcatggcaccaaagcaaactgttaataaatcaagttatttgtgattacacgagtcaaatggaaaaaacatgctttgttagcttagctcttcattcaagctaacaatgaataagcatgcacagataaatattttgcaataagaggagatagaaagatagctaatattttattgtgcttaattgtggcaataagcatgtaggctttataaagtttgcatcagttctcaaaagataaaactcacgagcaagttgactctgta

SEQ ID NO: 64766 - DNA, 321 bp, Zea Mays
atttacaagccaaagtatcaggacagaatacagatcaagccaaagtatcaggacagaatgagtgaatgacagatcaagacaaagtatcaggattcaggacacatcaagacaaagtgtcagtagcaccagcaccttcatccagccagaggtccttgaagggctcctctaattcattgtccaccacagcatgttgtgcccgttgttggcctagctcccaatctttgatgcacaccaacatctccactgtatcttagttcaagcgccgtcgtcgatcctcaagaatcctgccagacaaactaaaagtagactccgaagaagtag

SEQ ID NO: 64767 - DNA, 740 bp, Zea Mays
ctggattcggaaatttatatgaaggtcccggatgggctgagagttccgaatgtcaagtcaaatcgcaacatgtacatcgttaagttgctgagggcgttgtatgggcttaaacaatctaggcggatgtggtacaatcggctcagcaaattcctcctgaagaagggatacgtaaataatccagattctccttgcgtattcattagaaaatcctagaagggttttttgcatagtttcggtctatgttagtgacttgaatatcattggatatgctgaggatattgaggaggccagtgcctacctcaagatagagtttgaaatgaaagacttgggagaaaccaagttttgcttgggcctgcaaatcgagcatctcccagaaggaatatttgtatactagtcaacctattgtaaaagggtccttgagagatttaatatgattaaagctcaccctttaaaggccccgatggtcgtgagatccctcgaaatggaaactggcccatttagaccaaagagcgataatgagaaattgttgggacctgaagttccttaccttagcgctattggagcactgatgtaccttgcgaactgcaccaggcctgatattgcattcgcggtaaatctactagctagatacagtgcagacccaaccaaaatacatttggtaggtgttaagactatattttgatacctcaaaggcactcaagatcttggcctattttttctgaagaatcaggaccagacta

SEQ ID NO: 64768 - DNA, 1043 bp, Zea Mays
catgatacctgcacgcatccaatctaaacaaatggtcccctgcaggcagtactcgtactcgttcatgtatgtgaataagcaaaacgcgggttagcaataatagtgtccaaggtactgtagtatatcgacaacatagaggttatatatggcatcatgggctttggtttattttgtaggaaacaggaggagttgaatccctgttcaaaatttattaatcaacacatttacataacaattttgggaaacaaaaactgtcaaaaaaatacctaagattatacatagcttttagatgtggggccctaaaccctaaggtagtactaccctcgagtatccctaggcacatctttctaacttgagaaaggattacacttaggctcattaagtcccttgttaagatttgggttctaggttcggcggccttcgtaatggtagaccggggagctagcgccatagcattcaagtcttattaagtactctatggattgaactacaccgagcaccaatacacttaatagcaccacaaggggtctggaagactaagactcaagcgcctcgagcacgagggtcccccggggcttggatcgcacataggtgctccccacacaagaggcctcgattagagacttagattattgcatcctagggcatcttcaggaactagggactttgatccttagtgcattgtaggccaactgggccctaattttgttagtggatcttttcaagacttgcgatgtagttattccatcgggatgccttgatgttaagttgcctaggggtagtggtcccatctagtgccattgtgctcattttattcagggatccttgaatgtatcttagcgacagttgggggtatggctttcataggtcgctaacagaggccatctactttgttgctggattgatccgtggtattccctacatatcatggtgtcgcaatggtggctggcatggtacttgatgatagtgttgaaaggaacaaagacacctaaaaggaggtgaattaggacttctaaaaacccgcgctaaactaggccaaaaat

SEQ ID NO: 64769 - DNA, 438 bp, Zea Mays
tggagatgagaccgaagccactgaaactgttccgatttccgaagcaatgaggcgttctaggctggtttcatcagaggacacacctactgccgaagcaacacaagctgacgctgaagaatttggttccgaagatgagtacagctgcggggtgccaagtaaacctagtcatctggactttggaaagtccaccatctctgaagctgatcttcctaaaatggtgaagctgggttattttagtgaggccaagaaggaattaattcattttggtggagaagaaactatcccaaagccaggaaaggatgaggcagtagtcttcaaaagttttattaaagctggtttaagattccccctaaacaagatgattgctattgtactgaagaagtttgggatttaccttcatcagctgacccctaatgctatcgttaggttaagtgttta

SEQ ID NO: 64770 - DNA, 291 bp, Zea Mays
gatgtgcaaaataaaatgaccgctcatggatcattaagaaacaagggtggtcaaggacatgttaactaaaatgtcttgaatagtcattggggtatgaaagtttctaaggatacaagcatacaaagacaaggaaatagaaaaagccaaaggataacgacttaacaacggaataggaggggatctcagaagacaagaagttcatggacatataaactggagtgtttaagtaggcaggagaaattcagatgtaagtatttgagacaagagtattgaagaatctaggggtacgag

SEQ ID NO: 64771 - DNA, 287 bp, Zea Mays
acgaccctgacacacaatgtgtaaccaacctaaacatgtactcaacccctccttggatgataaaaggagggtcgagtagcctgaagagtgaagatcatcagatcataagcaatagccactaggacatagatcatacgatattatctcgcatcgagagccttaacctatctaaattctcgtgtctccttgtgtgttgggggtcttcttctcccgaaggtcctcaaaacattcactaagtgactgtttcttttgttttgttatgtgtatactgtagggttaatgtcgaa

SEQ ID NO: 64772 - DNA, 373 bp, Zea Mays
acaagctgaagaagctgcagatcgcgaaaggcgcataggtatagtttcacggcatctagcttcggcatttgtttttgtgacttcgaactgattaattttttctactgtagctgaactatctcctccaccggaaccattcgaccccatggctgatccggaaacgaagaaagcaatagagatcatcaatatggccgaatctattattgacgaagttgttaacaagttgttaaatgaagttgcggagaaggtcctgaaagaggactagtacttattgtaaaaacatttttagatgatcaatgtagctttgctgtatcaagactgtaatattcgatgtgcatatttttgaatctaatatgtaaattatttgtaattc

SEQ ID NO: 64773 - DNA, 893 bp, Zea Mays
aattcatgaaggaattgttccatgtatgggtcacctcttcatggttggtcaatacatatagcatgatatgccgccactcttcatgtgttagggtcttggtggtcgagccacttgcgcttctgagttgacctcgaaatatgctaaggttcgattcattgtcgccatcattataacgagggggtggattatgcacgctcggcagtttgtcaccataataagttgttgtgaagtttgaggcctcctctagaatgtatgccacttcaatggaagcctcgattttgcatttatttctacatttctttcgaatagtctttagacatctctcgattggataacaccaacgtccctgcacggggccccccattcgtgcctcataggggagatgaagaatcaaatgctgtattggattgaagaagccgggtggaaatatcttctcaagcttacacagtaacacaagtgccaatctttccaaatctgcaaccacggtccgagataactcttttgcacaaagctgacggaagaaataactcaactctgaaagcactagccagacatgctcagggacatagcctcgaaccatcgcaggaagaatccgttcaatccatatgtggaagtcatgactcttcatccctaagactcgcatagtagataagttcaccccctactcaggttagctgcatacccatcagggaacatcaacatcttaatccactgaagtacttccttcctctaggccctacttaggatgaaatcggccttaggccttctccacgtctttccgccacttggcggcttcatctctaggtttggtctatcacataacgctgccagatccactcttgccttcacgttatccttcgacttatcaggaatgtccataattgttgcccaca

SEQ ID NO: 64774 - DNA, 541 bp, Zea Mays
gcgatatagtcgagaggagagggtgtgcattttgaggtggagtgcagaaagacgcttggcgtgttttttcctcggaggggacacggtcatttaatgtgacgtgacgttctgcttgccagccgaccgttcatggtacgcgtgctcgcgaaattcgaaacaactattgttcagtcgtttttcaatcgtaccttggtggctctgtccgtccaataaagctgaccgggagggagggcttcggaccattacctttgcagtttcaatcctttgcctccaaacgtcgttttcaccttctgcccagatagctcttcgccttcttctcgccttctgtttgtttcaatggcggaaaagatcattgtccttcctccccgctacacgtggcctgtgtcttccgttaccgacgcggatctggaggcgttggttgacgccgacctgctccggcaccgaaccgccaagccgcagtccaagtggatcggaccgcacgatgagcaggtgtcgaatacgcccgcgggctacattgttagctttaccacgttccatgaac

SEQ ID NO: 64775 - DNA, 397 bp, Zea Mays
tagaaagagaaagcatcagtaattatagtgctgtgaatagtttgagccaacaacagttgttacaatcgaagtagacagtatagtgttttcaaaaaatacagcagggagacatatttaggaaactatagtttatagtagcttcttttcatataacataccttttttctttctgtgcttatagcttcctagcgttcttatcctttattgcaacgttgtcaaatgaaaacattttgcgcctctgctgttggcctcgaagacacaaaaacatgcattaaaactaccactgcaattagaatggagatggaagacactgattggtaaagtgtcacattacaagaatatctaccaacaaacaatcagttcaaatttaaaacttcaacatctaagtgagtcagcc

SEQ ID NO: 64776 - DNA, 437 bp, Zea Mays
cattttatagccccaagtggcctaggagccattgctccttccttagaaaactgtccaaaaactgctatgtgctggctcaccgggtcctatagcccctagtcacgcgatctgattgggcgccttccataccggggtggcaccggaccgagtccatgcgccaccggaccacctgctgacgtcatcagatcgttggaactgtgcgccgttggaagtagccattggagaagagttccggtggcacaccagaccaggagcagtatagggagagagagggcatgggtagggaagggagatggcggtcgtgggcgccggggatgagggagagggactgcgaggacgagagggttgggcaaacgatgaacttctatggacggtaatggagaaaactcaccggagaagagggtgctcgccagtgccgagaacaaatccatcaattg

SEQ ID NO: 64777 - DNA, 470 bp, Zea Mays
cgtgagcaaagccttccgcggtcactgattgttagccggaccaccgtggctataaatagcgccatggaccacggcgaggtattcacatctccaccagtgagctcagttgaagtccaaattcgcggaatcctctccacctctcccaaaattggtagtgcacggtgaaactatagttccttacggccgtgtagccccaatctcacctcccaattccacccagaaccgtcgcgacgccattttcccccttttctgtcaccagcgagcacaacttctccgcgctccgtggccggactactctggtatggctctgcacttctcaagtgttgttttagcagctctgtatacccgtgaagctcatcgtagcaaccatttgaccaattcgggcatgattccatgggaacacaggctcaacgtcgcggtttccgccgtgtgcgtgtgtaggacgttctctaagtgtacaaaccaaaatt

SEQ ID NO: 64778 - DNA, 812 bp, Zea Mays
aaggatctgatgcttagatcatcgtcagaccctttcctcagacgatcttgaagagctgcaaccccaaaatcttctttcgataaaccaagttcagcccttaaattgttggcagcaacagcttcatcgattcccaatgccgttcctccaccagcatttggtaaccccaaaataaggtgcaccgtatcctttgtaattttgagctccttccctgggccagctcgaattgtcatgtcattatggtcaagcttttccatcagccaagctaaatgtgatctactaccgagtgcgtcaagtctcatatcaagaatactagaaaatcccctccgtgcaatagcttggcgttgtctgtcatttaatatctggatgcttactaatacgtcttgggggttgcatctcacattaagcctctgctgaaaaaatgtatacaatgaatatcgtaaacatttacatctgcataatcgcaactcaatgtttaactcaaacctcaacacaacgtgatttcatgcagaaaatgatatattgccatagaccataaattctaacctgtcgggggggggtccactactttcctccgctttgtaactatcttcttcaagacttttggaggactgtcatcgaagttatggttcttcgataatggcataaagtcatcgtcctcatcagcagcctgccttgtttcgtgtctaacagattccgccggaacacggggtatgtcaacactaaagcactcttgagtagactgaattataatccgttttggattagatggaggtcggtctacgttcttcatgtatgatgttcctgccaaatca

SEQ ID NO: 64779 - DNA, 581 bp, Zea Mays
attaactaagcaaattgcttcctaggagtaccattgagcgaaacaaaagaactgccatagctcaaaagctttaaaacccaattaatccacttgctagggaaaccaagactagccagcatagcagtaattgtgtcgtgttcaatagagttgaaagcctttttgaagtctagctttagaatcaccacttctcttttagactgcttgcattggtagatgtactcaaaggtacaagaaagacagtcctagatggatctccccttaatgaaaccatattgtttttggtgcacgattctcataaccgttgattgaaccatgttggccatgaacttggacaggagtttcactatagagttaagaagagagatgggcctaaaatccacatgtccgacacgattctgtattttggggataagagtattgaaagaactatttatgaccttgctatctagttctcgtaggaacaatttttatcacttaaaaagatagctggctcatatctatgattgaaaattaaagttagatgtgatcgttataccatcttttaaattcccatcccctactctcattcagctatatttctc

SEQ ID NO: 64780 - DNA, 875 bp, Zea Mays
agttaccacatcattcataaatctattatttttatgcataaataactgttgaaaaaacataaatttagtgtccatcaaatgaacatgtattgcacaatcagatcatttatacctttccaccagcaggaacatggattgcaccccctcctactttagccccttgagctacggcattacaagaaaccacctgcattccatttgtctaaaaattgtatcaaaataatgcatcaaaatcaagcttctattttgtatcacatatattgtgatgtatatacaaaaccaacaccacatacacatagtacaccacctattgagctttctgtacagttattttcagtacgatcttcgcataacagaccccccccatagcttgcctctcctcctgcaacatttgaaattccaagaattttttactgccatgtcatctgattatttcacatatatgaaacatttccatttttaacacttacctcattatcttcactatcactagtcgtgcaaccatcgacgcatacgatgtctggtctagacgtgagagcattacgacaagctcttccaacacctctagtgcctaagtcttctgtcctcttgcggcaccagggtaacatcccaaaatcctaacctagggttgaaaccctaatctacccccctttccctccatttcatcctttaattccaagaactcccttagattttctttcatcttatgcatacaccttgtttgatcacaagcacatcacttagattctattttccagcacctagattacccacaaaataatttgctcaaaagaaaaagatgcaaaaagggaaataggatttagaaaataaaaagaaaaagaggaaaacccttctccccccctgctgggccgttt

SEQ ID NO: 64781 - DNA, 481 bp, Zea Mays
agacgctttataataacatacgtaatataatcagagtataaccttatatagcaatcagcggatagacaacttcgttcctcaggtgtagacaccaactccacagggacaattgaatggttgatcacaagccttgactatcgtagttgaaatagcaagagtgagcacgtacatactcaacaaatataacatggggctatgaggctcaaaaggatagacactggtttactgcatcagcttttaatagtaagtcaaactttttagcaattaaatataataacaacaagttatgcttaaccccattaacccatatagttattattataagttctcatcacaatccatcatcacccagtaaccaccatactcttgaatccatgtctcattcatcatagcctctgttcatatctctattctgcaagacgtccaaggccgctcgtgaccttaagcaaggctagtatactagttttaaaacactctgtag

SEQ ID NO: 64782 - DNA, 606 bp, Zea Mays
ttcgaatatgatttggaataaagagattcgggcctcttcttagggcacgttttattggatgacagagaaagctcatgataaagtggacttccatcacctttgctatattgtttaggtccgagagaggtgacaagtatggtgacagcaagtggtccatgtccagatcgtccggccataaatggtggatattccgctcagactattttaactggctagtgttctggtagtccaagttgaaaggttccggaccgttcggcctaggaaggcagaccgtccaggcttctgacagcactgacaaatttcaaacggtctttattaccttccacctgtggttactatttgatatcctaaatcgacctataatgtattttctggcctagctcatattacatagcaaatatcaaaccctaacaccataaactccacgcctaacgctcacaattctctactgttggccgccctttctagccttgctggcttcctgcgttgtgccccgtggcctttctaagtctcatagatcgcagcaccgctggcgactggcccttccaagctctggtgcccctaaccgcggtctgcaagcacataataattcttttattaagtttt

SEQ ID NO: 64783 - DNA, 386 bp, Zea Mays
gtttatttaaagaagccaaggggcgacccgtcgtctcccgtacgtacaacaaatagtcacaaagacttcaagagtcgtgtaaatttccaagaaggtgagcaagtcactgaaaacaattggcgtaacataacaccgaggaagagtaataccaaccgctcatgcacattactacaccctgtcgcgtgaggttactattttgagacaagtcaacatacacacccattgggtgtacagaccagattttttgggatttgtggaagcggtctgatccatgagatatccgcataagttacaaaacgacaaactcaacattggtaaaactagagtcagccgaacttctatcggttggaacctagtcagcggtcgcattaaaaaccttggtcaaa

SEQ ID NO: 64784 - DNA, 712 bp, Zea Mays
cagaggttcaacaaaacgctggaagatatttctcgtttagatctagtttggaaatttaaatccccgaattcggagattaaggaaaattaatcctcatgaatgacggagggatttaagttttaaaactagcctttatctaaagattctccagcaatagctcaaaaataggtcgcttgtttcttatttccctactattataaaacactggtttccactgtgtcttcttcgatcccgctgattcctttctaactaaacaagccctatggcactgatggtgggcatgggatagattcagtctcgtgtttagggctcgtttgattagaaagggattgaatggaaattgggaggggggtagaggtttccatacatgaaacgtgagtaggagagcctaccagagatatgctggaactgaaacaagggtaaacattgactacaacagcaagtgatactactctataccagagactgctgcccatgcattgcgtggatgaaagagatagagagaaagaagcaacagcacatgcactgaaccgacgatggatatatgcaatttctcacagatccaagaagaagaagaagaatgcatgctgcccatgctccggaggataccctttttaaaatctggtcttacatgcactgtgctgcactgtctactgaccagacccgttccatttgtttgtactaccggccggtagctatagctatagctttc

SEQ ID NO: 64785 - DNA, 555 bp, Zea Mays
gggcacgggggcagtgattcgtggcaattgtgggataagaagccatgacggtcactgggtaacgatcacaactcacggcgacgtggttaatggcttgaggcgtggcacaatcacggtgaagggcgcaaactctggtgacggccgcaaggccacgtcgccggtgcaagtggtcgaggaacagcgaggccacagtagcccgaactcatccgcgacgtgatctttttacagtcgagcgcaatctacttccccgcggcacaaatcacgacgaccagcatgaatccaagcgcacggttcgctggcggcgaaattatctgatcctgggatattttcagtactgtaccatcagaaatcctattcagagctcctaacagccagatttgtagcgccgagatcatagatttttgtataataacttgctaatttgtctgtagcaaacttgtagccgttcatactatctacaattcttctatagcaacaacccccaatcgagcaacagatcctgctcaaattcgagccaaaagtctggccaatgtcactggtgtcctaatttcagtc

SEQ ID NO: 64786 - DNA, 703 bp, Zea Mays
tgcgaagtcatcaccttggtgaccgagaatgggaagcaacaaccatcttaccatgatgacaagggtgacagacatgatccttcccaaattttaacttggggaatccttggatcagtcaagtgcgctcagtctacacaaaatatcaaagctcaagtgacctagcctcctatgccacttccaaatcaaacaagaaaatcctgccaaaagacatcgagaagggccagaagaatgtgtaaaatcagcactgaaaacatgaccaaaaggagaaatccaacaaataagatccccttaggcatccaaaactcgagaaaggcacttttaaagagcaatccacagtcatcctcaagaagttgcaaaacataaagctggttgaaatgcaaattcaaaaccaaagcaacatccttgaggacaaaactctcgttacgaagccacgagagacaaccttacctctcgacttatcgttgaatgtgatgtattccttaccattcacggggtcaaggctggagaaccatttttgcttccgatcatgtggcgtgaatagttggaatccatgagccatatgttctctaggcctccatccttagaagcagagtcgtcgccgatgtcctggccgtcgccgcccaccacatcattgccgagggccatggtgcaaaggctgcctacggtgtcggcaaggaagcacatgctgttgagcttgtcctca

SEQ ID NO: 64787 - DNA, 411 bp, Zea Mays
aaggacccttcgaggtaacgggaatgcaccgacccaagggcaaccatctagctacgactggaggagtaccttaccccgatgccgaaacatctctgtaagttctatccatagagcaagactaaggggtcaaatctatttccattttttgtaactagataacgcatacgtgtacgacaattcggtggggtctgtccccataaacccggtccattggtctgcacacatgcatgacaagttataaagaaaaactaccccctcagttgtgcccctatgatagttccatcttgctgctccatggtcctaccttgcagtttttcagataataccttttatctaatccacccgtgtggctcctatctgtcctgacgttacgacatccgaattgaacagccaggcttgcagtttaggacc

SEQ ID NO: 64788 - DNA, 398 bp, Zea Mays
atgatttgttcgtgcacgagggaggaatcatagactatgcctcctcgacatcatggatcgtgttcgtgaggccttggatttcagggttcactggggcactacgatggctcttgccatcgcatagctatactttaatggccacctccgcgatgctatcggtctgcctattggatcaacatcattggacctagacctcctaacatgcgactttgatgctactacaaacgttgtaattggggtggtgtcggtggaggaaataatcagtgatcttccatagcctcatcccatggcttgattatttatgcgacgtgtatggtttttgggtcccctagatcttggttggtctcaggatttctcttggtctatgggcgcttttcatgcgactttctctcatttgc

SEQ ID NO: 64789 - DNA, 591 bp, Zea Mays
tgcgttgcttagacaggaatggaatacaagttatcattttttttcaattacaggccgtgtatttaattaaggagaagatagcaccgaaaaacaacttatataagtttatctccaccaacttactcataccattcctagttctcaacctttcatcacacatatttcaaacttcacactgcaaaatgatgttttgtacggctatatacacggtccattgatcatagcctaacatctgaaaaatgtagttatgagatatcttatagccatggaggaagtggttagaaacctgacaacaacgacgacataacacaaaaaatgtattaagggaggccctccaccataaatcttgatggctagatttgcatggaaataaaaatccacacaaaggatgctaaggctggccgcaccggtgactgtaaacggtggactggaaatatttacagcgcgtgagcagctgcaacggtggactggacacactattgtaaacttacggttgcattggagaacctcacatgtagcgcgtccttttctttaactgtataatctctctcctcttttggttggctggtacgtgggacggctgcaggtgcg

SEQ ID NO: 64790 - DNA, 1801 bp, Zea Mays
gcttgctgcacaggaggggcggcggctgtagaggaggggtggccggcggcgtgctgcaaaggaggggcgtcggctctgtgctgcaaaggaggggcgccggctctgtgctgcagtgaggggcggcttcaggtaagttagggtttaggttttgtaatgggcctttggactggttgggccgaactaggaacaagtcggccgactttctagcccaagtcgacgactagtcgacttagatatttcagtcgttggcaagtcgagcgacttgccagaaaattcgagtcggtcccccaagtcggcctctcaagaccgcctggacaactagtcgacgacttgaaaatagggttggacatgtcgtctttttataggccaacattcaccatacaaagcagcaggtctaatcgtcgtcctataaaagctatcttttagcttatgtggacgccagatgcttgacaccatttcatccaccctactttgattctatggctaacacatcttcatcaatatccacgtctctctgcaggggcttagaggcagcggtcgacaagggtggtggtgtagagggagaggaaaaaggctcggctcccaccatccatcggtattatttgaggccgaagcaagtggaggaacaatgggcagggaaaagggagagccagccatggtcgggagagaggctggcgagctccggtcgaccagcgacgactgtggaggtcatgcggctgggggaggatgggggagggaggaagaagaccatctcgatatcatgttagagtagtgatttgagggaaaacccctaaccctaaatcggggtaggcacatgtgtacatatattaagagtatatgggctaagccttagcctattacaagagacaatcgttgctggggcggaaatttgtggacccaaacactcgaaagcggaatgacaggtggcacgacaaaacagtaagttgagagcgcaaattgccttgtcaagtgggtcctgtctggctacaggacgggggtatttataggggcagtcgagggttggtggacctaagtacagttatacctgcgactaccaactatattctcgacatgcactgtacaacggggtaattacaggactacaagaacaagtttccttgttacaccagaactagtaccctccctagccgctaataggtgggcctagagtagttgattgtcgtcccacagtggccgaacggcacgaggacctggcgtctacctcctctccttgccattggagatgtggacacgttgttcctgccgacacgacgaagtcgaccaccttcgaccatgttaggtcttcgggtggtattcgaaagccaaccccttcgtaggtgagcacaccatgttgacctcgtcgttggggcgaagggacggaggccatttccttcgatatccgtcagttggccttcgcttcttccctgtttgactggccatgcgcctaacactttggtagtaggttaatatgcaagggaaaaatggtcgaggggttgttctatcctcgctccaatacaagccccccgagggatgagttcaacttgttgagtcgatcccggagacttttggaggagacggacgaacgctgccctcgatcacaagttgaacttttgcttatttggaaagaagaaaaataaagcgaagaggctgaggcctccgaacgatgcggaggcagtgtctgatgacgatgttgggctggccgctatgtcgaccgatttcactgaagacctagcagccacgagccaaactgtcagcaaggtcatgtcgcccgcaactcttctgatggcgcaggcaagggcgg

SEQ ID NO: 64791 - DNA, 436 bp, Zea Mays
tagggcttctgtgacgtactaaatccatgtggtagatgtgacctatcatatatgtaaataactgtgaccgtttataagtgatcagggatgaaacaaacgtaactagacaggtgccaagagactcaagtctataaaaattgtagctgcagctggttgaatagctgaacagccggcgagatgattctaacaacattgcatgtgtatgtaaaaataaaagagataattctctatacgttgctacaacggcgaccaatgcctattctttgtagctagcagtcttgaaaacaacgcccaccaatgcaaaaactgttccgtttggtttagtccatgcatgtcacatcggatgtttgatactagctagttaaaagtattgaatatagtttaattaaaactaattacatagatgaaaactaaagacgaatcaatctaattagtt

SEQ ID NO: 64792 - DNA, 491 bp, Zea Mays
gtgcggctcatcgtgttgcgccctgctagcggtatgcgcactcaggtctagcctcgataggttatgagtgctctactagtcgaggggctcgtaggtcatgagtgctctatgtctcgagggtttcataggtcatgagtgggaggtagactggcgcctctgctgtggctcggtgctaggcgcagttaatgcggccgatcatttatgatgggtcagcctagggccaggcatgagatccacttcgagtggtttccctttggcacacctgaaccccctgtctagttccaccacgcctgaccccgagctcagtgccgcagggtttattcgagggcgagttcttcaaaggtagacattacctatctcctccgaatagccagtgggtcccagccataagaggcattttccctagggtactcgctaaccaatgggccctaaggactggggatcatatcttcgacagtagcccccgagcccctgaagggagaatatttccc

SEQ ID NO: 64793 - DNA, 763 bp, Zea Mays
aactgtggacttatggaagtttgtcaacagccctgacgcctcaccaaatagcccgagcagctttagtattgtctcgacctcctctttttttggtgcaataaacaaggccgcatcatcaacgtacaatgagagacaaggcaaggcgagcggcccctaattttgctgagaagtcccgtctctattgccaagtctaaaattttctgcaatgggtcaatggcaagcacaaataacaatggtgagagtgggtctccatgtctaagtcctcgaccatgagacaaggggggattcgggatccgttaacaaagacccttgaggtggatgttgagaggatggctgcaatccaatctctccaccaagaagggaagcctagatgttgaagcagcgagagaaggtattcccatcggaccgaatcaaaggctttcgcaatgtccaatttgaggaagagcgagggtatgttcatgcgttggtagcgcctcactgcactacgcacggccataaaattatcctgaatagtccgtttcttgatgaacgcgctttggcatggtgagacgatttcatgcatatgtggcgctaatcggagagcaagagtcttgatgatgattttgacaaaggagtgaatgaggctaatcggaatgctcctcaccgagtcaaaacttaatgatggtgtatctgaagagagtgatgggtgtttttttgtaggagatgtggccattttcatgtttgtaccattctattagaaacactgtacagtggcaccgtgaca

SEQ ID NO: 64794 - DNA, 289 bp, Zea Mays
acatgctggaacagaaagagggcgccatcatatggcctcatttcaaggagcttttccagcaacgcttcggacctcccctccaaagcaaccaattgggcgaggcagcctgtctccagtttcggtcgaggatcgaagactactactctactaggaaggcatcccgacgctcctttaccatgcgactacacttcctcccccgcaccagtaggcacaacttttcatcgccagccttcctggttgcctctgcatcgacgtcgagctctactgcccaacctacctataactagcc

SEQ ID NO: 64795 - DNA, 1402 bp, Zea Mays
gatttatggaaatgttacttgcagagaaacttccacatatatccagcagttaaaatctgattgtgaaatatctagaattttttcctcacaaacacaaaagtataatttggtaatttatggaagcattgcccatgaaaacataagccgcgggaatttacccatacatattcatgtgaaacagttgggccggtgccagctacatccgtatcattaagaaacaatgtctagttaattgattcctgaagctagaaaaaatccataatgaaggtaaaacatgactcacctccaacaatttgtaggtgttgggcgtcttgaatactgcacagttgaaaccatggtgagaatcacatctttgttctggttcagactccccatttctgatttgcatccaatatcttcatctattggtacattggaaatgaacagtagcggccacttttagtgtacttaaacctcaggtcatattgaaactaaataaaatctaaatgtggcccacaaggccataactaaatgtatatacatcaaaactgagtcctttttacatgtcatggtgctattctttttgagacacgcaacattaaacaaccaaaataaaaatagatttccctaggttcaagctcagtctgagatttaatttttcctttgtctgcattcactatcttcttttctctagctttgtgttcaatcagatagtccatttttacttttacagattcacttgttctacattcatgcattataggcatggaaccaccagatcttgcttcacaatccatatttatgtcatcaatacttgcctgatcatgacttggagtagcagatcgtttggtggcatgcacttgcgtggcagtcctatttgacaactgtttcacatgaggttgaccttcccgcataggagcatatcgtttctggttttgcacttgcatgtctctcctaccaggggatattgatttcatattggatggctgcttcatgcttgaaggagatgcaggatgaacctacctttgctgcatatcagaatatgacctatcctcaagttttgcttgactatgacttgcatcagcacatcgttttagggcttgcacatttttatcactcaagactgagcttgaacctagggaataggtgacatgaaacagaacaacatattttctatgtggacctatctatcaagtcatgtcaaaaatttctatggcagataggtccaccatagactgaatcataaggaaaaagtatcgagtaccacacaaagctaaaggatatatccagtcatatctttgaacaactattttcaacaatagcaaattaaatcacttcatatttgagatccaatttaactttaaaccacttgtctactttctccaatagtctgaagctcctaatatagaagagggtcatatta

SEQ ID NO: 64796 - DNA, 470 bp, Zea Mays
tctgcataaaccttcggcatttgcgctcatgccttggcatcgaagggcccatatgtaaacactaagtctgacaattgcattccgtgttaactgatggaggtatatttcaaacttcttcgacacctcagcaatcatctcatacatagggaaacaaatcccagcacggaagaagcttcaaaatacaacaacctcatcatccttcaattccagaatgattttgtcaccagtgaatctaatcaaattatcatccttcttaccaatataccctagcctcttcatcacatccaaatctttagccttcacattagacttttcaaactcaatatggctaggtttacttggataaagaatattgggatcctcttcatcatagtcacctttggcttttgaattaattttctcggacatagatgcctcttccccatccttcaccttgacaatgcttgactctctcatcacttctaaaatta

SEQ ID NO: 64797 - DNA, 784 bp, Zea Mays
ctcattaaaaaataggtaataatttcctaaggttctaaacaaatttataataatattaattaaaatgatgtgtttctgaatggcagtttagtctatgaaatgattatgcgaagaattggccctgtcggcgggcgtaagtgtgcccatgagcccatcgactacggtgcccgacacggctctgaccgccatgaccacgacaacctcgatgtgggtgagctgctttgctagagacgcctgcacgtcagcctccgacgacctgtcatggtaatcggagagaacaataatatacatgcgacgaaacagatgacattgagggatggttgcaaacacaatcatatggtaaccgacatcgacggtgtgctgacctgacggagacgacgatgtctggtccgcaccacacagaccatagatgaagcgctcatagatcaagggacaatgagtacccgccgccgtggttgttgtggactgctctccttttccccttccaccacggcggacacgacgatgcctgcttttttctacttttattgtggcgtgatgcttcgattttttcctggaagtttctcatggccttgggaggaacgcgctgtgtggagttctacgatttgcctcctacagccatgggatataaatcatacgcacgccgtcattttgcctttaacaggagactatacgtgaggcctgctactcgctctagctgtcgttcacgcccaaccaaaccgagatctcaaccaaaccctagccgccgcaccgtagccgctgcaccagagtcgccgcactaaaa

SEQ ID NO: 64798 - DNA, 734 bp, Zea Mays
tgccggattacctaacagagccgagggtgtgctcaatttatagcatgcttgagcggtggctagtgaatttgatggagacgcgcggcggtcggagaggaggaggggcactggcgcaaacgattagtggctttcaccgtggcggacttacctgcgatgagccagtgatatagagcggcttacggcgacgtggtgaagccataaggcacatggcatccgatcgacgggcggccaactccgatgaacttatctgagccactcgcaaagcaaaaggagtacggcggccagcctccggtgttatcctgtggcgaagagctttttcccataagcgttatctggtcaccggtgagcacgaatcacaacggcggcgtgaatccgggcgcacggttcaccggcggcgaggttctctgaacctgaccctatccattcactgtaccattggaaacgttcaacagagcgcctgacagagcaacttgtaacgcctagatctcggatttttgtgccagaacatgccaatccgtctgcagcaaacttgtagcccattatttcaactataattctgctatagcaactaccctcaatcgagcaatgaatctaactctaaatcgagctctaagttcatcctactttactgctagtgacgattcagacttaggctgtctgacagcccaactttgggcctaattatctccaaaattttcttgacaccaaggcttaacccctttagcaaaattgta

SEQ ID NO: 64799 - DNA, 361 bp, Zea Mays
ctcacaacaatggctcaagttgctcacaatagtgtatagatagaattaacacttgtgtatctccatatacaacatattagtccacctaagttgtcacttaattaccaaaactaaactaggatatttcaaactagcgtgacaagctagacccacaacttgggtgtcgtaagaatcaatcaagtgatgtactcgaactagctaagaacattccactagagttgttattcatgatctctcgcgaggccgaccataaaagccccttataatagcttgatcagagtcaagaacaatagctaatagttgctcaatgattcatctagcttttagccagctaaatgtgaaatcaatgagtgcaagtaag

SEQ ID NO: 64800 - DNA, 541 bp, Zea Mays
aaatcagtttatttcggtctgttgttctcgcctggatccgaatcttcagatataaacaagtattaaataattcggttcctactatccaccgtgaaatcgcgtacgggaatcgataattgagcttcgattcactggtaaattatcctgactgtggaaccaggtactctgacgcagataaaaattacttgatttcgaatagaaggaaacacagtctgaaatactgttgttaacatcattttgatttgttctaattatgtctcgtcacgatctaaaaatcttaattttcgaaatatctgcgatttaccttataaagaaagaatagaaattgagaaaaaactgagaaaaatcttctcctacgccgctcacctgccttgtccgttgatttttctgcagccactcttcctctgatttttaccgtccgtcaccagctctcgttcatcctcatccgcctaagattttttttgcagtcgccggctgatcttttttttctccagcgaccaagctccagtccggcgctcatctctctctgctcgccttctcc

SEQ ID NO: 64801 - DNA, 375 bp, Zea Mays
gatagtagagcatcggctacctattaagcccggtttcagtcctttcaagcagaaagctagaacattttgtctagacccactcccacaaataaaggacgaaattcatcgactgctagaagctaatttcattagaccttgcagatacgtagagtgagtctccaatattatgtcggtggagaagaaagaatcaggtaagctcagagtatgcattaattttcgcaatttgaatagagcaactcctaaagatgaatgtcccatgcccatagtcgacacgttgatcaataatgtgtcaggaaatagaattattagctttattgatggtaatgacggatataatcagattttcatggtcgaagaagatgcgtctaaaacaac

SEQ ID NO: 64802 - DNA, 458 bp, Zea Mays
caggggtggcatactccacagacacgacggcagaccgaggctcctagggcgctaggggttggtttggatagctagaggggttggggatgacctagcaagcgttatggcggggtcagggttgcatgaacggggctgaggcgaccagatggtggaaggggagtcctcggtggacaagggaacacttcggcgagcaatcatgcgtggctaagtgcatgataggggaaagtacgggcggggttaggtcggttacattgagggaaggctcggggactctcgaacggtgtccagggcacaatgagggcacgagttgacggctgcggggtttcggctacacgaggagaacgccggtgagcacggaccgagagaaccagaggggttgggggcaaactggaggatgtcccacattgctggcgcagaggcggagcttaccaaggcaacagacacggcgagggctcgac

SEQ ID NO: 64803 - DNA, 309 bp, Zea Mays
gatcgcgatccgttggacgtgggacggccacaccacgatccgatctaaaccactcattaccgaatcaacgccccagatttaatgtcgcaaagaggtatcccacgatctaatcttacgcgtcggcaacagatccaacggtgaggatccccaccaacctaaacgttatctggtgattaaatcctgagcgcatgatggctgatcaacggtcgagaaaagcccaagctgaatcggtgcacagatctaatcgcagcccttcattaaagaatcaacggccacccgattctcttcctccccaaccgaacactggcg

SEQ ID NO: 64804 - DNA, 496 bp, Zea Mays
atacctctcaaatgtttggttgggatcctatttataaatcacaaggagagataccatatcaccctcaacaaccaacattatgccctatccgaccatccaatgagtacactcacggaccattgtgtcatggtctcatggctctcaatgactacaatgccaatactatgttagcactagttgttcttgatagttggctccatgctttatggcgtatagtatgacacctatcatcataccagtctgacgcaccaattccttctctagaacctttttatccaatgccgaactcaacgttgatggtttgatgatctcgtgtagggacggtccgatgctcctattgattacgaatagtgggaatgtatgctctgatgacatttctattatgggtcaaacacctcggtctgatgctcctgctcttctaccgaccagagtagatattgttgtatgttctgatgccccttagaatggtttgacgcctcgatttgacgctttatgc

SEQ ID NO: 64805 - DNA, 726 bp, Zea Mays
ctcaattcctgataaattcaagggtctctgcgcaagataacctagactcagggaatagttcctctggacggcgggttggtttcaaagtttggcggggtttcttttgtaaaacgtacccgcgaaggggtatcggtggagatgagccattggatcccaaaccaccgggcgagattaaatcgtgcaccagatgatacggtaagttatatatgcctttggattactatcctacgacccacgggacaccatactacgatcagatctgatccgtccatcggtcaatcaacgatctggatgtaatataacgaatcggtatttaactgcatcccccaccatccgatccaaaacacacgactcctggcgcatcattccaacatctaatctggaccaaccctatgcgatccaacggtggacccgattcttcctccccgatgcgcccaggcggcggcggagcggccacagagacggtgatctcaccggagatacccgatttggcgccaccatgcatgtttcccccaaccaaatttgtgcaaaagcagtcctgaatcacggcgaggatcgtggaaggttactcaccggcctagctgctgcgaaggcgcacgcccacgggagatggcggcacagccccaaatcttgatttccgatgaggaattcggcttcgccttgccccccaatcgcgcccggaatgaccctatgcaccatcagtgtgtctccccgaggcgcgacagc

SEQ ID NO: 64806 - DNA, 393 bp, Zea Mays
atttaatgtgccccgtccactctgatggcaggcatcgaccagaccgggcggcatacctgtccaatcaagcagcagacagtacacccacaccactgcacacgcgcagaacctttggcagcacgccaattctactcaggcagtggatgtcagggcgcagtgagatagcgcaaggtgaccaacattagttgctccgggtattccacccttatgtctctgggcccgcatgtcggggttcagggtctctttgtacatgtccccctttaactataaaagaggaggcatgcggcgtaaaaaagctcaaacacacacacacaatcttagactcgctagctcatacaagctctcaagcaatacaactcacagtggagtagggtattacgctccggcggcccg

SEQ ID NO: 64807 - DNA, 1272 bp, Zea Mays
atccactacttgttatgattgcgccaagtatttcggcattaagttggtttattccgcaaagctcgcgcccacctgcatgtgcagaccgagtcttgcggcattctgttggcctctcagatctagtgcgtgggagtttaagtcggcttcagttacctcctgtcaaggcccacgatgtgtcccttggacgacttatcggtgacattcaagcagcccatgaagcgagttcgcgtcttgatgacccgggatatccatccccacaagccctcgaggctcaagacaattttggtagaattggctcgagactctaaaagcgaaactggggttgatgaaatatatttgctgatgggatgctcaagaattgctcttgtgggttcagatcctcatgaataggtcctggatctcttcgacaagactgatggcaccagattcagacccgtccagggacaggtccgaggccactaagtgcccctaagggggagagcgcaccagattcagacccgtccagggacaggtccgaggccactaagtgcccctaagggggagacgctcaggagctgggctcgtgaatccggaccccgtcgacaagactgatgacgtcagacccggacccagacccacacatggagggacaggttcgaggccgccacatttcctggaggggaagtcgctaagagttgcgcccgtgagtccgtaccccatcgacaggactgatgacgtcggacccggacccacatagggacaggtctgggaccaccatgtgtcctcgagggaaactcatccctaccacgcgcccatgagtcgagaccccatcggcatgattgatggtgttgcagatgaaaacttatccctagacccgaactcgcaggggtccgatacccggcgggggcacccgtggacccaaagtatataacatattacatgtacaatgagataatgtccacaatttatagatctttctctctcaactgcaattgagatcaggttcaaaggtgtgaaagagactgttgtatgtgcatgtcatggaaaatttgtagtcgctacccttacaacaaaatgtttgttgtcgcccaacagtgcatatgctgctctggggtcgttgtacgtagatgagacgcacatcagcacatgacatggttgattggttagctacttcgtggctcgtctcatcaactcgccaacctattggacaaatcacaaacgtccagctcggtggctctagcacaaaatcttgtccctcgtggagttccagcagttccaactccagcacaacac

SEQ ID NO: 64808 - DNA, 1087 bp, Zea Mays
taattgcactaatgaccaactaatgagctctggccacggtgaccgagagcatggtggacggatgaaggtgttcctggcgatctaaggctactccgtgcaaattgagggttcggtaagcatcacagagctgtgagagtgctcaaacgaggaagtagaggacaggggctgacctgtggagggctgaccacggtgaacttagtttcacggtgttcttcgactgatttgggggaaatcttaaattcgagctcactggtggacggttgctagtgattctcggtggctgggtgggtggtgaccttgcggagctggtgggggcttcaatttatagggagagcgagcggtggccgggaattttaagaaggcgcggcggtcggaggtagaagaaggcactggcgcacgtgaatccgtggctaacgtcgtggcaacctcaccggcgacgatgggacggcggtagggagtcacagtgatgcggtagatggacagagacacgtggcgggctacggtgaaggtttgacgacggtgagaaccttatccacgggcggtgagcaaaggggaagggattacggctggccggagtggcttccaggtcaccggcggcgaggatccccttaccccacgatgctatgaatccgccctgagcgtgaatcttgacgccggcgacacgaatcacggcggggagtcaccgtcggtgggatttttctggcgctggcgatctgatccacaatagtcactgtaccatggcgatggtcattctgatgaactgacagagcaagtttaggtcacattttatcttaatttcaaatggcaactcatccagtgacctgcagcaatgttgtagagctacaatcagctataacttcgctacaatgtgctcccacaaaaagtcactggatcttgcttaaagttaagccctaagttcatgtcatcccactgttaatctgaaattcagactgaatcagcctgacagcctgacttcaggcttaattatctccaatattttcttaacaactatgctcacactcttaagcaaagttattctcctttgttaggtctacaagtttgatgtggtgacctagggcaaattctt

SEQ ID NO: 64809 - DNA, 794 bp, Zea Mays
ataaaggcctcaatatcttatcaagagggtcgcactctatggcccggactgccatcttggacaggcgggtcggaaacgaacttggaaaagggtctctgtgggggaagattccagacagaatacgaaaaggagcaccagcattcgaaaccttgcctctcagcatcgaaccaactcgactcaacatgtcctcctcagaaatttgtttgttggtaattcgagtagggtcattaaccccagtgtacaggtaggcagggtagactctatcccttcaaaggctgaatattgttgaaaacaaaatcaacaacaatagcttgaacagtcaaacctctatccttcaacgcacatatctctgcaagcaacaccctagactcagcaagctctgaatctgtatggacctatgtccagctaggcgttcggatgttaggctgcctccctgatcgagtaggaagggacttgttatgattttccatagtaaaccattcgaagtgccatcccttaatattgtctttcaagggaatgtcgagatactcggctttcctacctcgatgaagttctaggttagcaccgccaacaagctgatgctgccctccagccatcccgggccgacaatggtagaggtacttccaaagcctgaagtgtggatgaattccaaggaaagcttcgcaaagatgaacaaacacaacaatttgaaacatagattggggtttagacgagtgaggtttagagaataaaaatcgagaagacaacaaaagaagggagaaactggcagagccagtcctcggataagaaaaggc

SEQ ID NO: 64810 - DNA, 637 bp, Zea Mays
ggcacgtaatactttgatccgagacacgcaatgcaacatggagaacatcacggacatggtaggtggaatacttaccaatggcagaggcaaatagggggttgtccacggtgtggcacgatcctacggcggcgttggcttttgggttagaaattcggccagcagcagaggtcccagaaccccgaaatcaccccaacatgatccggggatcaaggcgaatcaagctactcccccctcttggtccgcgacaccgagtgagtagaccctgcagcgctgcggctgggcggtagtgacaacactgaattgctcccgagctcacgatgatagttcaggtagggaagggaggtcgcagggcttccgtttttatagcccggaggcaccaacgaatcggccagattggaacggaaaaagaggcgatcaagagggatctccggtgagctcagacggagttgttgcaacagacgcgcgcgacgcggaagcgacgagtccgacaccgggggcccatatggcagcgaaagaagatcgcgaatgcgcgcgtggagcggatggcagactgggaggctggcgacacaggcgcatccgctagtgagactagagcgagggcggaagaagagcctgacatgggtggcccacatggcga

SEQ ID NO: 64811 - DNA, 364 bp, Zea Mays
tcgcaaaggaagatatacataaataaaaggtgtggattttaattggaaactaaacgaagcgatggacgtacgacagacctatgaaagccacaacctcacacctgtgtggtgtggctacacatttccatagcttttggtttgcacctttttggacatttccacggcagaatgttctgcacgatcgaacgactatggacgaatgcatggggtggggtgaacatgaaaagaatgtgctcctagctagaagtgcactagagtactggaaatgccatggaatggagaggagggaaaacgattcctggactccacactcctccactgccggccgggcaaagtgtgcagcaggggggtcacacacaagtgc

SEQ ID NO: 64812 - DNA, 669 bp, Zea Mays
cgtagctctattgcgaagagggggagggcagcgttttcactcaatatcgcaacagagcagcgagggcaacaaaaatgtcacataggctcctccttcggaataagacccgcctcccaaaaattgaacaacatcatcctcaactcttccccctcaaacaggtcctgcaagtccccctctccaatgcacgtcccagacgtcgatgaaagtagctcacgctgagcaccccgatccaatcgcagaccaccccgaagacgagacctttccatacccattcggcgacgtcttctcccactttgtgacgactcactgatgctctgtttcgacacatccattcttcgcctccgtgagtcttcagctctcacatcagccgaggttgccagcaccttgcgagggacagatcgcggtggagactccgacgcagccaaatccaacacagcaaaataatctaggtcatcctcagaagattcctcaacccatgagaaaggactcccaaattcttcttcattcgaagaccatgacccaagctcagacccctcagacacatttccactaagaaacattgcatttgcagccatcaaaacatcattaatatcaatgtcatcagggtttgcttgcgcaggcctagacgtccgaacctgctcaacaaccaaccttcagtatcacaaaaag

SEQ ID NO: 64813 - DNA, 560 bp, Zea Mays
tcctggcccgtccccccggtccttgacaccgccgtttcagtaaaccacggcggtgaagacggtttcgtagccgaggccgacgccgcaggggtggcataatcgtaggcagagcgatccccttcgcactaggccatgccaccttggcattgtggcgtgggtccactagccaaagcggagctttccatttcttctgctgggcatcttggtgatctttctctatcactactgacacaatagcactaatatttctcccataaggaagggttttcagctcacgagccaaacagatgtaaactagtcatcgtcgtcggtcaggggtatagggtccttcctatgccatcgatccccagtaaccttcagcatgcgtgaagatgtttccaggagctcgggcgaagacatcacctccccaggacccgcgcacgtccccgttaactcctcaacaaaaatcctagaggccttcggccccatcttgtcatcccccataccttacaaatctattttcctctttcgagtagctgcaaccacaaccttccccttcgaggtgccctcctcaagccggg

SEQ ID NO: 64814 - DNA, 391 bp, Zea Mays
gcttaccctttcgtgcgatcgaatccgagtcgttgatcctaatcgaacgaatggattagggtctcaggtaaataacatccgtgcggtcgatcctagatccaacgtttggtattgcataccaattcatccgtgtttcggtttaatctgggccgctcatgtttaatcaatcggtcgtggcacgaacgtacccctttgccacatacactttgcataagagaccctacgtttctcggatatcaacccgaaatcctctttagtgacagaatccttaccagcgggccctaaatttttctggttagaccctatgctttctgtatttcgtgcgcgcagtccagtgggttgtaaaacagggtaaaaccaatatggaaaatatttttagtgttaaaataat

SEQ ID NO: 64815 - DNA, 461 bp, Zea Mays
cgggatgaccccaacccggcgtcgagcacatcagcacaaacatccgtcgcaccaccatccactggctctgataacagatcctctggaaccatatcttcaagagtctgatcaaagttcgccagggacaattcttgtagaccaatgagggcagacagagcaggagaaggaactccactactttccccactggcgacatattgccgactgttcttctgagtcaaagggacctcatcttcttcctctccgtcgttttcatcagcaacacagacaacacccccattgggatcagtggcagatggagcacacccattgggatcagcgacagatggatcacacccattggggtcagcgtcagtaaattcaagcacaaacacttcctcagcagcaggaaccgaatgaccaacatcccgatccaaattggatactcgccgaagacgtctctttttctttttctgctcatc

SEQ ID NO: 64816 - DNA, 475 bp, Zea Mays
cagcagcattgataatgttcggtttacaacttcagtctgtccatctgtttgtggatgacatgttgtagagaatagaagtcgtgttccaagttttccccatagagttttccaaaagtaactcaaaaatttagtgtcacgatcagaaacaatggttcgtggaatcccatgtaaacgaacaacttctttgaaaaacaattcagcaatatgtgaagtgtcatcactcttgtggcatggaataaaatgtgccattttgttaaatcgatcaaccacaacaaaaatggaatcccttccctgctttgttcgtggtaaatcaagaacaaaatccatggatatgtcttcccaaggcacactaggaataggtagtggagtgtataagccatgagggtttaaacgagacttagctttatgacacgattcgcatcgaaggacatgtcgctccacatcccttctcattttaggccaaacgaaatgatcg

SEQ ID NO: 64817 - DNA, 659 bp, Zea Mays
tggacgtccttgatacgggccagaggcctcattgcctcaatcgccttgattttctccgggtttgcttcaatgccccggtacgaaaccaggaaccccagcaacttccctgcggagacaccaaagacgcacttgtcagggttcatcttcgtgcaggttgcctgcagcctgtcgaagaccagggttaagtcttccactagggtcgaccctctcttggtcttgactacgatgtcgtcgacgtatacttccaccttttccctaatcaggtccccaaaagtcttactcatcgcccgcacaaatgttggcaaggcttttttcagaccgtaaggcataacaacatagcagtaaagcccatccactgttataaaagcagtatgcttcctatcttccctagacatctggatttgatggaaaccggaataagcatctaagaaagacaaaaggtcacacccggaggtagaatccatgatttgatctattcgcggaagtggatatgggtccttgggacaagccttattaaggctggtgtagtcgatgcacatccgaagcttcccattcgccttggggacgatgactgggttggctagccacactgggtgatgaacctcttcgatgaagccgacgtctagcagcttccggacctcctttcggatgaagtcctg

SEQ ID NO: 64818 - DNA, 922 bp, Zea Mays
ccatccaatcacatattattgtctagtgttgcaaacctattattatcttattttttgctaacaagaacataatgacattattggagtgaattgatctaatctgtatggagctcattagcctggaacattaactgggtcaaatgtgcttttctattcaagcacaactctgtgctctatcagttaaaattagagccaaaattacgatgctttgatgcaaaatgtaagaactacaccctagctgaacaagaccctaactgatataccctaacaagaaccaaacatgtattcaaaataccagtgtttggtatatattacctcgaactcggtacactgaaatcagaacaattaaattgacatgtacaccattgaactgaacctagacaaacgagatttgaacatattcacaatgaaatgaacaagattgtaccgaaccattgagagaacagagacaacgaaactaaataagactaacacaaattagacgagaacttactataggacttttggacagatgaacagcaagcacagattacgtttcactgttgcctgtggaagcttcacggttgcctgtgcatggggttggggtgggcgagtggtttgaggggtgctgatgcttactaccaagataaattaggttgtgtggttgtctgcatatgaaatagttacatcaacctgagcaccaaatctacaacgcaaaatctaggatagtttcttaactctgtggtgctaaaaaaatttccatggtactaagaagctgacaaccacaacataccgaaaacaattccaatttaatgatggtgagttaaaaaccctcttggcatcctaaaacctgtagaaaataggccacacaaactggagcatcagtttaggaactaagggaataaatatgtgagagattttcaaaatatgaaggcaggaagag

SEQ ID NO: 64819 - DNA, 633 bp, Zea Mays
aagcatttaaccatgatagacaaagtgttgaactagcacaatgctcgtctgatagctaaccctagcttacaagaaacaagatcattggaattagagtgttggttcgacgacagtcattaggccaatccagtgctccttgaagctttatagttacctttcaagagagcattaaactcaaactgattggtccaacattatcaacttagggcacattacacaggacgatcacactattttcctgagcggacccactactaggtgcataagaaacttcatatagggtcgttgaatcctgatcattaatttgacaatgggtgtcatactagtatgacattgctgggatctctctggtcactttctacatggtatcagaccctggtcgatgatcggaccatatgccatcaatagctattggagcaacaacaatgacattcaaaatgctaagtgagctctagattcgttagaccagtgatttatggttggcatcaaataatctgacgctcccattttgtgcacaatatttgagtcaatggctagttgtctctcgggaccttataaatagagtttgtttgagcatgaaacaaatatcttagcttcccaacatgacatacactgtaatgagtgtaaggaaac

SEQ ID NO: 64820 - DNA, 431 bp, Zea Mays
cggaatcagtttgatttcaaaagctacatcgcgctctggtggaatgcctagaagctttgccggaaacatgtcagcaaagtcacacaccacacagatgtcttgcacccgcaaagcagcctcactctccaccaccatggagaaaagaattcccgacttccttgaccaacgatccagaagcaattgcgacaacaaggataacatgaactttggagaacttcccaagaataccacctccctacccgatggctcctgtaataacgctgtcttccaaaaacaggatataactatgcgatactgagataatcaatccatacccaagataacatcaaatgccccaaggaaatcacaataagattagctgaaaagacctcatcagaaagaatgacggagcaaccctgacaaactgaacagctactaatggagccattaac

SEQ ID NO: 64821 - DNA, 619 bp, Zea Mays
ttctttttcatatgctgacagacccaaatgtgccggccccaaggctttactgacaaatgctaagggatggccatcctgttgaagcactgcaccaataccacttcccgacgcatcagtctcaatggcaaatggtctatgaaagttgggcaaagccaaaaatggtgccgaggatagagcctgtttgatagcttgaaaggcagaatcttgcacattggtccacacaaacaccacatgtttcttaagcaaattggtcagtggcttagccaagatgccaaaattcttaacaaatttcctatagtagccggcaagacccaagaatcccctcagctctttgcatgtagtaggaataggccaagaagagaccgcagaaactttagatggatcagtagccactccagcttggctaataatatgacccaaataagagatctcttggcgaccaaaagaacacttcgacaattttacttgccaacaatctttgaccagcaactgtaacactgattctatatgaagcaagtgatcctcccaagtggggctatataccagaatatcatcgaagaagaccaagacacattttctgagaagggatgatagggtcttgttcatggcaccctggaac

SEQ ID NO: 64822 - DNA, 323 bp, Zea Mays
ctcacttgtcttatccttgattgttttctccacttcgtcactttgcgagtcttgccttaactctgtccatggattatgcttttcatcattatcacctttatccttatcacctctatatctcaccttgatgtttatcttataccagcctttaaaatatcctcttttccatctcaatctgagtataatactatacctactttcccttggtcgtattctcttctttgtcacttgcgagtttttaactccatcccttgcctacttgtgtttgttattacctttacctttcccatccctcgaccataccttggtgatgacgttatgac

SEQ ID NO: 64823 - DNA, 279 bp, Zea Mays
ttcgggtcataccatttacactcaaagaaaactagcgctaaaggcttatttccagcaaatgtaatctcaattatatttttgattttcccgtaatagcaggcttcgtgtccttccatgtcggttgccctagtaacgactccactattttgagtggcggccataggatgacttaattcgaaaatgcatgaacgaaagcgatatccattgatgtcgtaacgtccatagcttttggcagttacgcttccaatagataactgacgtaagtcatcattcaaattc

SEQ ID NO: 64824 - DNA, 394 bp, Zea Mays
ggattttatccttgggctgttgtgccacctaaacagcttgccaaatgaggccaccacttggtggatacacatgtcgttcatgtgggtgaccagaaatcccaacatcaagatccaacctttccttgaataaacgatttctcggaaattttgagccctatcttggcggatgaatcgaactaatgtaccttccacattgtagatatctccaaaaagcaatctatctttttgaaaaaggcttcccatctcaaaaatacccaacccaaaaggatgaactgaacaactaaggacatggagttcaagttcattctcaatgaaatcccaaatcctatgcacccacatgctaacgtccagtggaggaaccacaccttcaacgtcagttgcgatgacaaaatca

SEQ ID NO: 64825 - DNA, 574 bp, Zea Mays
agttatgtgaggtgcttctaacaaacgtcattcatgcacatgagtaaagttttcaaaaataaatgccatgatgcttagggtttaagggggtcaggcaactaggttttctaacatgtggagtaaaaaccggggtgttacaacacaggtcccgagcatcttgtaattcagcatgtgcgtgtgggacctggctctcggacccacctgtactcacccggtataaaaagaaggtaggtactattgacccacgtcagccacgacaggccacgtcgtcaccaaactccatccggaccaatggcgcatcatacccaggcgggtgctgagaaatctccatcaacatgacaacgcatgaccacatacggtctttggcactccctgtctctgccttgtgggaccaaccaaccctagtcctagaggatctaagcatcggagtcgctacagtaacccacatattggataggacggggcaatacaccataccgagtgtatgcttacacactctagaagggtgacatagggtttttcgcaaagaggcatggccatgacacacacggcctcatggcatacccagactttt

SEQ ID NO: 64826 - DNA, 597 bp, Zea Mays
acgagcctcgacgtcgccaagggagagctggggtgagcgcagggaggaactgagcgtcgtcgtgagcagagagaagtggagggaaccgaccgtcgtggtgattgggccatcggcatagctgaatccatggagatcggtttgggcgcttcgccgagtctccccgagtctttaggagggtcctcgaggtcttcgcaaacgacaggatacaccggggttgttcttctgtcgcagtggcgatcttcactgtggatcggatgcaaggctacgccatcgttggtaacaacttcgtaactcgaatcactgtatccttctggttgggtagcacctctcggtccgtgagatggtgctctagggagccagggaggggattgaccctcggcccagctagctcaccgtcgggtgggcaggcgtcagggccctgttctggtcaggagcaacaggatgaccccagatcgaaggatctagatcgggtggcggtgcttagatcgtggggtaccgcttggggaattcgatcatggccaaggttcggtaattcaatggctcaaactcaccccgttaagtcagccgagcaactttttgaaatagcccatgtgacct

SEQ ID NO: 64827 - DNA, 903 bp, Zea Mays
ggcgcgtatttggcggatgcctttgacttggggctcagtcgttctccctgtgcgccctacataaactccagccgtgccgccgcgttactccctcttgttcgtctagttgcatccagcagaagaaaaactctcgtccccattagagctcaacggtgcagaggagagagaggaatgggggagggaagtgcgcagtggcccagtgcggacagcattgtggaggttcgcgtgggcagggccacgcggcggagctcatgcctatttgccgctgtgatacttgccggtggagttgcccttaccgggggtgttccttgtgcgtacgacgttgggcggacacagctctagcaccacgcgaagaagaccgtgtagggctgccatagtgtgaagttgttcgtccctgtgccgaaccacggtatgcctccattatttcctcgccgttaccccctctgatgttttagctttcatggcgggaaggcaggccaggtccgccgtcgcggtgcttggctagctgtgggtgtgcgtcgcgaggaggaagacgctagataagccctggatcataggatggacggctagcttaggtatggggcatctgttcggcggggatccgatccagacggttgaacttagatcctagggccaggtatgcgtaccggttcactctatacgacatctaatcagggccctcggaatgagatccgatggccagaatccatccatactctcagccgcgatagatttacatatgagaccctcatgattccctaaatagaacctgcaatccacccaggtgttgtcaaagtcttgggaaactttgcaagttaacccttgtgctatttggtatttgatgcacagtccagcagccagggaattaagaaaaacactattagaaattgattttaatacaaa

SEQ ID NO: 64828 - DNA, 294 bp, Zea Mays
cttatttggtacaattttttaagtatgcttgtatgttgtccgagttaaatgcttgttatgatgggacacgagttgtctgagtctcagagaccagtgcgaagctttagagaccataggtccgtttgggagcggtgaagttccatttgttcaagatgtgaaactcaagacttccttagcagtgtctactttagaaataaggaaatgacaattaaatccaaaattaggattttgtggtgttatagctgccaaatgaaaaactcagagatcgtgctcatatgagttagaacaatatgc

SEQ ID NO: 64829 - DNA, 1037 bp, Zea Mays
aaaaaacacattattcaacgctcataaacatgagatgtttataatattatctcccacttgcattaaattcaatcatacatgcatataatactgattgcactcttgtatgcctcatgttttagttgtggaagaggattcatcaacgagtcatcaacattcatatgattgtgtcgaggatacgatcaacgacctttggggcccatcggttagagaacgtgccaagggagcccctggtcactggggcccgttggtcagctcgaagaggtgaataacatctgtcctgaaagaacccgcccctagtcgaaccccgcggcatcgagcccggggtcaagcgtgacggaacccgacaggggaggtcgggcgtgtcgaagggaaaccactcgagtggatcccatgcccggccccatactgactcgttgtaaatacctggtcgcattataactaggcctggcactgatccatagcggaggcgccggtccacttctcactcatgacctatgaacccctcaggccgcatatcactcatgacctacaacccccagtctgcgacgtatttatggcccgcacacaccttggcttgcggcgcactcatgacctatcggggctaggtctaagtgcacaaaccactggcagggcgcaacacaacgatccacgtcgagccccaagctacgaaggccaagggtcggtatattcaaaataatggcgcttgggacccatgcagcctcacgtcgcgcaccatatatagttaagtcatgttagagtgatttgatcctccaagacttagcacaagtgtttggaatcctctgtggacctgaatgatgttcaaccccaaaaatatgtatttgaaagtaccttcaggcaaactgctcagtttcctggtaacccgtcatgaaatcgaggctaacctagagatggtctaacacatagaactcatgagccccctaatgtgtgttccataggtctagcgcttgacaagatgcacggtgaccctcagtgcgtgtttggaagtaaagtattccaaaaccgttgttttggaa

SEQ ID NO: 64830 - DNA, 445 bp, Zea Mays
ggagcccaagcaacagaccattgtggacaataatcagacaaacaacaccacacacgcgcacaagtggagcactggaacacaggagaaacgcactgcacactagcaacaccacctccaccttctttcaataaccaccagcgaaccaaacacaagaacgccacgaccgaatggatcagtgcgattggaacagaaaaccggagagaggaaccaggaaccggtgttttgctgcgtgctgctcagaaacggaggaggcaaacggattagcgagaagggtgggagatcgagccgcagaaatcagcgtacgaagaacgccgccgctgctctcaacaaccgccaccagccacctcctctctatctcccgtaagccagcagaagcaccgaggtgccctaactcctccccagccggctgggctgctcggccttttgggccttgaggtggcccagt

SEQ ID NO: 64831 - DNA, 484 bp, Zea Mays
aatctttttcagcgagaatagtggtcatagtttagggaaaagctcaccgaagctcaagcctcgttgtggagccgcacaacaccatggacggggcttgctgctgcgagattcacggtgatacttccttccctgagtttgagttcatctctgcttcaagtaatgtcgtttgaattgaaggtttgatcatggggtcacaggattgggggatacggcaatggtcggcgtcgccgcctgggcgtagtcgagaggttgaagatggcccctgaccattgcatccacactgacgaccacgattagatcactggatacccctttggccgagggcccgagagccattgcatcgtaatcggatggcccatgttcggtagggggacgtttcataaagagtccctgtggttaagagaaattaacccatagtccatctataaataaaaaaactcttaccgctgagtctatgttttatattttagaccctgggttctca

SEQ ID NO: 64832 - DNA, 629 bp, Zea Mays
ccgcagagcaatctgagctaacagctaagccctgaagaaggactcctgggtcctggtactgaagagtggcgcagctgccggatctcgctgagtaggcaaccacgagtccactggcacgtgtctgaaccgacgtaccctggtagttgtggccctctgatggtcaagcagatgtggatccacagcaagaggatgcacctcagtctcatcacgctctcagaaatgaggtggaggaataggtggagcgggagtgggagtagtggaagctagaggtggtggacgctacatcacatactgctatatgcgaggctatatctttcttcatgacataccaccaatacttttgtttcaagtcctggtacatcttggtactaccggggtggatagaataagatgagtcatgggcttcctttaatatagtttcttggagactatctatttcaggaacacatattttatttttggactagattgtgccctaattatccttcgtgaaatctgcacctcttccctctaccatcaggccttgaatctcttggattttggcatctccaatctgatccttccagatatcttgctctagagtggggttccacttctatggtaactccttctatgtgaggaactatccc

SEQ ID NO: 64833 - DNA, 847 bp, Zea Mays
ttgaaatgtggatgaaaaaaaaagaactagaaataactatattttggtcacgggtggacgtggtattgtggtccatgctggccattatctgtggccgggaaagcatattgcttcactggttgaggacggctgggttggtgctgtctttagaacttttcttgagcacaagatttccttcatttttcctttgcttgcatgtgtagttgtttagttggttgaaggaggcatggacattgtgccccaacacatgactgatgacaacacacatttaggatctgcatgtactttaggtgggttactaatcaacctctggatcaagtttcatgctgcttacaaatgggttaggtagtattctagagagcatggtttctggtagtgccctggtgggcgagggcatctgaaaacagtcatatgcaaagcagttcggtggtattttcggggcacatcatttggaagcataagaaattctagcagtttgaagcaactgaaaatttcaaacctggatgaattatgcgatcgttctcgtgtatcagaaaagatatggtgcgcccttattatgttggtgtcaatgaaaacaaaactgaaccacctcctgtcaggtgggttgtgagggtgtgcatcatatcgctagagatctgattcttcactccgtgttttttcaagtttaagcgaagtcttgagccttcatttttattaccttcgtcttattttgtctaaagaagcgtagtattgcaggggaaagccttgtctcgattactttgttttcatatccctttcatgtggaagccttggacattggatctattcttgctttatcattagatcttgcttattgaaacattgtgca

SEQ ID NO: 64834 - DNA, 1111 bp, Zea Mays
cgcccacgcccgcggtggcaatcttgcagaagggccctcggggttttgactaactggagttgggttcggttactattcttatgagtcactgacgatttgcacagaggtccttgaagttctattcctttacaccgactgatccccgacagcgtcgagcgtggtcgagctccggcgagcacgtagaccggccggaggaggccaagacaggtgctcccgagcagcgggcatagaattgaaccattcccgatcacttcccctaagtcaattttaccattggctgcccaaaggcctctggccacggagaccgtgcggacaacccaatgatcaacacgttcccggggattggggatggtctagttcgattgggcgggtgggtgagcatcaccagcatacaaagatgctaaaacgagaacaaagaggacatgatcagacctgtggagggctggccacggcgagctcggttctgcggtggcagaaacttgatttgggggaagactaaaattcaagctctctgatgaacgattgctagcgattttcggtggctgggtgggtgatgaccttgcagggctggcgggggcttcaatttatagggctcaacggcggtggccgggaatttcagtggggacacgcggtggtcggaggaggaagaagagtattggcgcagtggcttggtgtccagcgtcgtggcaattgctccggcgatcaacggggagccactaaggcttacggcgatgtggtggaaagttagagccacgcggcggacaacggcgacggcttaacggcggtgagaatccttatccgagggcggtgagtaatgggagaggtaccgcggctagccggagtggcgtccagctcaccgacggtgaagattctcttacctcgcgatgttatccatctgccacaagcgcgaatccttacgttggtgacacgaatcgcggcgggactcatcgatgatgagcggaactgtcgcgctggcgttctgatcttcatcaggcactgtaccatgggatgctccattcagttaacctgacagccatagtatagggccagatttcttccgaatttctatgacaacacatccagatctctgcagcaaagttgttcctctgta

SEQ ID NO: 64835 - DNA, 678 bp, Zea Mays
gctgtctctgagtctaggcattgagctttgcatatgaggtcttctagcattggtttgactttgagactgtcgttgtttcccaaacatgcattcagttgagctaattccttcttccaatcttctaaaaagttggttccctttattccgaaaggttttcggctgagggcgtctgctaccacgttggcctttccggggtgataatgaatctcaaggtcatagtctttgatcagttccaaccatcttcattgatggagattgagatctggctgagtgaagatatacctcagactcttgtgatcggtgaagatgtgacatttgttcccaattaggtaatgcctccatatcttcaaagcttgcactatggctgccaattccaaatcatgggtaggataattctgctcatgcggcttaagtaggcgtgatgcataagcaatgactttctcgttttgcatcagcacacaccctaagccttgcctcgaggcatcacagaagacgacaaaatcctgatgtatatctggtagtgtcaaaacgggtgcggtcgtgagcttctcctttatgatctagaaacttccttcacattttggggtccacacatacttatggtctttcttgaggagctcggtcataggtcttgctatgctggagaatcccttgataaagcggcggtaatatccttcc

SEQ ID NO: 64836 - DNA, 523 bp, Zea Mays
agccgatacttcatgagtaggtttagatgagtaaatatgagtgaagtgtgcgcttggtttgaatttaggcgaagaaagtggatttgtggcactcggctcagaatcaatagctatacatggggatttgtgagaaactggtgcctgggatatcagattggcgtgaaatttggcaaatatgttacatgaggtgtcatgaaggtgctggaaaaatctgggatcgatttgagcaattttgagtggttcggccatttcatcgagcacctggcgtgcgagggtttaggtttcgagggaaatggctattagaggagatgaaaccctccctaaggagctagggacctgcagggaagcttgaacaaacatccaggggcactcacaagactttattcacaaaaattcatagagattggattatggaatcaattgtagagggtggggagctgactgcagaggatgacagaggatgagagggagagagaggagggcagctcaccaggaaagagaagagatcaggccaaaagtctag

SEQ ID NO: 64837 - DNA, 740 bp, Zea Mays
gtcatgcttgtcaagttgggcgtcacactcgcctaccttttgcaaactctacttcgcgagctctcaagaattttgatttaatccattgtgatctgtggacctctcccatttccagtgtgttcggttacaaatattatcttactattcttgatgactgctcgcattttctttggacgtcccctcctcgcctcaaatccgaaacattcactaccttggctaattttttctcttatgtgaaggcacagttcgactgcaccatccgaagcattctacgtgacaacggtcggtgttcgacaactcttccacccgcaccttctttctcactcatggtgttttgctccggatgtcatgcccctacacgtcctcccaaaccggtaaagtcgggtgtatgattcgttccattaacaacatcatccgttcccttttatttcgggcccccctcgccctatcctattgggacgaaggtcttcacaccactacatacctccttaatcggctacccaccaaaacccttacttatggcaccccctatttcgccctcttcggctctcaccctacctataaccaccttcgcgttttcggttgtgcgtgttaccccaacatgtccgccaccgctcctcacaagattgctccccgctctagcctttgcgtctttcttgactattccagcaatcacaaaggctatcgctgtttggacctttccaccaacagaattctcacctcgcgccatgtggtttttg

SEQ ID NO: 64838 - DNA, 468 bp, Zea Mays
tttgctcactggtcgcgaagatatggtgcactcaagtgtgatctgtccagcagatcgattccgaggcaaaatccaaggtttagtgatgtcacactttgagttccaataccatcctctggtatgtgttagggtaagtagttaggcacatctttgtcaattggagtcattagttttaaggtttgaatcctaatgaacatgaggaagttttggttaggggtctgatttttagaattggaacattctgatttttatttacttctctctcttatgtgacttgtttggaatttttggcaaacctttttggggtgttatcgttactaactattgtaggtattttggtgtggtaaaacatttattaatggtccaagtcatgaaaaggtaattcatatagctttctcacttaattcatgttggtgctccatttgctcaaggtagttttttagggtttttggttaccttctccttttt

SEQ ID NO: 64839 - DNA, 536 bp, Zea Mays
gtgatttttgtcacagagacctgtcattacccttagatgttggcaaaaataatttttagtgtagaaccaccaccgaaattagagctgtagtgtaaagtgaccattcaccctcactttatcctaattatttttaacctccaaattgtagatttgactatagagaccagtgtttacccactgtaatgtttgcaacatttttggaaaattctaagtcactatggcagttcaaaatcactctagaaagcataaatagaaagtaaaaaaaggaagtgtggaaggaattactattacacaactaaatctctctaagtgtccaataaaatgtaaggagatgattaaattcttaatttcactaagaccctaaaataagtgtgtataaaacactaagagcaacatccgataaagaaaccctagtttacccactgttttaatattgtttcaccatacatagtatttactaaattgacatatcattaatatacatgtatcttattcattgcattcgatagattgtaatcttgctgacggagagtacg

SEQ ID NO: 64840 - DNA, 494 bp, Zea Mays
cgtacaaggaattacttttattactgtgcaccagttgatttggattctttactggatgatgctccttcgaatttgtttactcctttggaaacggctcattgtcccccttcccctttcaattttggtgtcattttcacctactatatgaaagagtcagacgacgtgaagagatgaaccaacaatttgatagttcagtgttgctgttggtggatttcgattctgtttccgactcccagaatccgcgttggttttgcttagttatcgcccttgcctttcgccaatgcattcagtttgccttctgcagtttgctaccacaataaatgtgtataatttgcttcctacaattgacgtctggcagcaaatcatttggacaacctacaacttctattcagaacagatagtatggttttgcagtaaacaaatggttacctattcctttccatactcaccaaaatatatgtctctcctagacctatagaccataaatctcatgt

SEQ ID NO: 64841 - DNA, 529 bp, Zea Mays
atttgttcgcatgttaccatagccattggcttagatggtaataatgaattgctacctcattcgagtggtaagtcagattaagggtgtgtttggttgaatggaagagaatgtaactatttcattcttattttttggatgtttggcttcaaacaaaagaggaacggaacggctcttggagtctccatattgaaatattaaaatttaccatagttgaaatactcccgctctaccaaaacgaccgtatgcgagcactcctctagacatgagcactcggacacccatcggtctacctctggctatgcagtgtttcttgtggccaacctcatctcttagtcctccaagtgagtgtcagcatgtggtctcacgctccagtgtgctgagggtgagtacctagttgtcgacaatggggtggctaaggcaagctggatgcaccaactcagctcctccaggagcttcacagtcccctcaccagtagcacacttgtctaccacgacaacgtcagcgtcatctaactctctgtcaaccccgc

SEQ ID NO: 64842 - DNA, 1141 bp, Zea Mays
gtagtatttcatatgcgaactcatgacacgtgctaacaactcgcatccaaatgataaaaagcgagaggcaaaaggtgtggtgtgggaggaactgaacgcgtcggatgagttcgtagtggggcgacagcttcttgtttgacaaattagagccggcttggctggctggttccgtgtgcccgcgcgcatatggagatggaataatccacggccggccacaagcaaacctagcttggtcattattgttctctcctcattacacacacactcaaccttcttgcgaaagatgaccgtctcgtcagagttccgtatcttcttgcgcaactttcatcgagttgataattgcacgtcctagtcaggatctgacagaaaggtgaccctctcttctctctctcttgtttcttcaacacggtacggtataggcttttgatttgctggttctcccaccacgacgcggcatgttctggttatttctctaaaatttttttttcattcactaatcacggctgtttcgtcgtttttatattcaggtcagcagaaatctgtaccttttcagttcaacggtgcttgagacatgccatgttaattagtaccaagtagtgctggttgaattgaaaaattaatcactgaggtgtgaaagtagtccattttcaaaacgtttatgagagcctttgacatttgattccaccggccttgtttcgcagctactgtactaatggcaagaggaaaaagcatgcacgcatgtgggagggagggagacagtggcaggagatattcacgatgagcagctaaacaagaggccggagatgaatgaagggagaagcacaccacatgagtcattggccaaaccaaccaaccaaccaagcaagcagcaaatgttaggtccgggggaggaaaagcaaataaatggatgcacatggaatcaaacgcagttgggtgggcgcggggcccaccctccttttcagttttaaagtctcccgtgtcctttctcgtttgagattctatgaacctgttaaaggcatgcatctttcagccatccatcttttcggaccccgcccttttctccccctctcttccttctgaccgatagatacgatggatatttttttttgccttccaagaaacggcttcatcatcatcatcg

SEQ ID NO: 64843 - DNA, 313 bp, Zea Mays
cattatgcacagcggacaatgtttcgggtagttggagtcggtatgccactggtccacattgctcaagcaccaggaatggaccaatgtacctgggtgcaagcttccctttaaccccgaaacgcgatacacccttcattggtgaaactttcaagtagacataatcgcctaccagaaaacataagggtggtcgtcgtcggtctgcataactcttttgccgagtctgagctttcttcatattatgaacaattttctgaaccttttcttcgacctcttttaccatatctggcctaaagaagtacctttctccaggttc

SEQ ID NO: 64844 - DNA, 573 bp, Zea Mays
cttaagggcaaaagcctccgcaatacacccttcgactctagccttgttgcgaacagacgccctgagctttttcaatgccctttctataggatacatccacctgaattgcaccggtccgcctaccaaagcttcccaagccaaatgcacaattagatgttgcatcacattgaagaatcctggcgggaaaaccttttcaaatttacaaataagaattggaatttctttctcaaaattctgcatcaacctcttcgatatcgtctttgcgcatacttccctatagaagtaactcagctctgcaaatatgctccaaagctcatccttaaaatagcctcgaaacatcacgggcatcatcctctccataataatatggtagtcatggcttttcaaaccgatcaatttaccggtcttcagattgactacccatttcagatttgccgcatatcgatctagaaatttcagattcttcaaccacttaaatatttatttcctttcatccggcttgaggcagtaatcagctcgtggcctactctcatgccctttatcgcttactttcaacttgagcatcggcctatt

SEQ ID NO: 64845 - DNA, 372 bp, Zea Mays
tgaatgaggaagaagttgatgaccttgccgaacttgaatgttcggtgacccgggtgagtgacttggcagaggcgggagctgaagggcatacaacacctccagggggtgctgctgaagaccctgcggcggcggctgcttcggcgcaggttgaagggatgcaattggggatgggttggtggttttgatttttgtatgatactgagatcggttgctgcgcaagtttcaacgtccggaactgtgcaagcaaaccctgatgatgttaaaattaatgatgttttgatggatgcgagtgcgacgtttcttaatggcaatgtgtcggagtgatcagattttgggtcgtggtctttggaggatggggaattggggagccct

SEQ ID NO: 64846 - DNA, 485 bp, Zea Mays
ttcgaatacaagacccggcttcactatggacgctcccattggtgtataaatagggcagtgatccctccacggatgatggatcgacaacacatgtagacgaacactcgctcttccactttgtctcagatattgacacttgcctcaatcatctttagggacttggggattttccatctcctgctatgcttgtaacccctactacaggtaccacggtgtgagtaatataagcctcatcctctctgccggaagtagggccttgtgatgccgaaccaggataatgcttgtgtcttctcgcacactatctagagtcggccgcgcgacacatttactggttggttaaggatccgcggtccaaacgctgacactagtgatgttataagtggtggattatatataggtagagattacatattcatcgtgcatttatctttgccatcaatcaacttgaaaacccacatccaactgttgctactgtgtcgtgttgg

SEQ ID NO: 64847 - DNA, 356 bp, Zea Mays
gcatgttctatatacagaattgtgattggcctgcaagttgttgttcatatggtgagggtcccagtatgaagggttgaggcttcacctagtgaattgacaatggagttgtcaaagcaatgaagcccgaaggttgtgtctttgatttgctgatggtggacatgctgtagaatgtagggagagtagtaggaagatgtgtggaaaacctccttcgactgattttgccttgcttcaacaatttccttctgcttttgtataattatttggaaactcttcgtggtgtggcccttattttctccacaaaagaggcagaacaacttccttggttgagagttgtatcttcctccaaagcttcgaac

SEQ ID NO: 64848 - DNA, 577 bp, Zea Mays
gaggaactagtggagtggcagagggagcgagagcggttgaagcaggtgtggtggaggttgtgggtgtagcgaggctacaggtgactggagtagcggcgtctggagtagtagtggtgactggagtggtagaggtggctggagcagaggggtcaaatctggctagagtggagcgtacccgaaacgagaggcgtatgacacggaaagctatctaatctgagctaatccgcatctgacctctctgctctgctctcccagttggtgctactgcgactactgttgctcgagtagctctgtccaatctacacttcttcttgcctccctgctgctcaaggtagactgtcttgcccttgtcctgtttgaaggggcgaggtaggtcctggtcatcacctccccctggagtgacattcttcgtccgaaccatacttactgctggtactgcccactgacccctaatatgttgcacaagatttagaggagatgagcgagagtagcaaagcagtagatacgaaaatggaaggaaagtgctagctacctagggcacgtctctcaataaaaaccaaggaagagtcaatcgagc

SEQ ID NO: 64849 - DNA, 456 bp, Zea Mays
gctggactatctggtgattcaagtgaaagtgaaagcttcgatattgagagtgacaatgaaaatgtcgaagatcggccgtggagaccaagccacgttgtttttggaaaatccacaattagacaaggtcagattcaagcgatgaaagacaaatactttcatgatgtgtctattgtgagagctggaggagaagacaccgttcctctaccagaaggtgatgaagtggtagtttttaggagcttaatgaaagctgggctttgctttccgctccacaaaatgctaatcgaagttttgaagacgtttgaaatataccctcatcagattaccccccgaagctcttattggagtgggagtttttatatgggccatgaggagccaaggactggagccagatatgagatgcttttgcaatattcatgtgtggtcttatcagatgaaggcaaccagaaaggaatagta

SEQ ID NO: 64850 - DNA, 719 bp, Zea Mays
ataccattgtattgttgttactcttggctgagctggtattctgaaggagttaatcaagattattgagaatatgatatgagatagaagccctcaaaatgagtaatgaggatgtggcacaaggattgggattcttcattggagcctgatgtacttgtttataacttggtgaggattgcctcttgcccttttattttttttctttttacctaatttcctatttgcagtaatattttccttaaaatatattttcttgtcccttgattttgttggtgtttagtgcacgtgttctgtcacagcagtggaaaggcgtattttgggtgttctagcaaatgagaattggtggtttaccatctgcagctacaggagcaacatttgggttggacatggaagtaagcttcattttttgtaaacaaaaaactacaaaccgactgaaagctttatgctgcttgcgttgcagtcttgctgggttgtgttgttgctgcttgctcgagcgatactacatccgctaaggaggatgacatagtgtggtgaagtgctgcttggaatacacatgtagtgtggtgagtggagacatgctgtgtgcactctatgaggcagggttgtgctgtatttttgaatcatttaaatatttggttcctttactcttatctttacaattgtgtgcctggcattggaatggacacaatatttaccttggtgtatgatgtgtcaatttttgg

SEQ ID NO: 64851 - DNA, 407 bp, Zea Mays
aaaatgctggttttacccctgccttacgactccttcttagagaacccaccattggtcgacccctctctcgtcctataaaaggaagagggcggcctgggcaggggggtcgacggataaaggaacataaggacacttggagacaaccggacaccttgagacggatacgagcccacaaggacgaaaagaaggaggagcgccaatgaggatcaaaaggtcggagccctgctaagtcaaggcttagttaggactccacattatagcttcaaagctccacttccacccccaacaagaattctgggagcctctcctccctctctcgactgcttgtaacccctactacgagtttactcattcatggtgctggtagcacaagccaccaatgactgtatgtagggacattctgcccg

SEQ ID NO: 64852 - DNA, 708 bp, Zea Mays
catttgcagcccacaggcttgcaaccagttgggaaatcagttatctcccaagtttcattcgagatgattgaatccacctcgctacagacaacctccctccagtactctgcatctgaagatgtatatgcctctgtgagggagcgtggttcctcatccacttgataaataatataatcatcacccaatgacttttcagtactttgtctcttactcctccttaaccccaaatctggagtctggtcatggacactcgagggcagagaatatgtccgagatggaccatctggggctactacttccttatcccgcatagggaagatgctctcaaagaatgtacatcccaagattctattataacatttacaacgacttcgctcgtctcggaatggaccactagaaatctataagctgcactgttatgtgcataacccaggaagacacagtctacggtcttagggcctaactttctcttattcggcaacgggacattcacctttgtaaggcagccccaagtccgaagatgtgaaagatttggcttccttcctttaaatccttcatagggcgtggcctcacggttgcgaggcggtaccctgttcaggacatagcataccgtgagtactgcctcgccccaccagatgtcaggcatccccaaactttgcaacaaagcattagctaagtcacacaccgttcggttcttcctttcaacta

SEQ ID NO: 64853 - DNA, 672 bp, Zea Mays
cccaacaggggcagaaccaaaagttttcccgagactcagacaaatcagaggtagactgcgggttgttttgtataaactgtgggggttcttttgtaaaacggtttcagcgaaggggtacgggtgaatggtggccgtgggatcacaaatcaagggtgcggattagaagcccaggctccgaaccggtgtccaacgtcagtggtcggatcccgatctaacggtcttcccttaaagcaccgatgcgagagccccagccgatggatccaagatcaacgaatctggaccaatccatcgaagggggtatccttgatataatccaggccgtccgtcatcgatccgacagccacaaccacctttctaatctagaccgttaccccgcagatcaacagcaccagtacatctcctaccttacgcctgtagccgagctccccacggtggtgttgtagttcaccgacgcacagagatccagccacccggcgcgcccaacccataaccgaattgtccaaggcctatagaagtgtttaacgagctcgtagtagtcacatacctgcgttggtcatgcacattgcgggctggccacggcagcggcggatccgcggcgaagttccctcaccggcgagaaattccagagccccgagccaccaatctagccaaggaagcccgaggagaccctgc

SEQ ID NO: 64854 - DNA, 483 bp, Zea Mays
caggtggctaattaggtaggccatataggccaatcttaggattacaaggatgccctaaagcacccttctgatcggtgaggatacgttcttttcagcatgcatgcattataaaatatgaaaggattagaaattaaaggaaagatgtatctaagcatgaatgtaacaatcgggataaaaataagtaacataaggagtagaatcaaatctaacccacctccttttaagaacctggtcacatgtttttcctttccacagtcgtaatgtttacatctaatcctctttcacagatgacttcactcaccccgccaatggaggagacactcatttcagttccgatttcctttcccacgagggtttcccttccatcttgtgggaggtgctcaactccaccgaataccctacaccccctctgtacacggtgcagctgtacgtggagcatcgagtgccacattgccgagtctgtctgactctagaggctcaccc

SEQ ID NO: 64855 - DNA, 472 bp, Zea Mays
aatacataactaaactggaacaaatcaaattatactacaatgtgtatatcacaaatacaaagactaagaagtgaacttctttgtacacaatattttttgtatgttacatttgagaagcattcatttctcttgctgtaagtacctttacctctcacaattgctcgtgacaaggaaacataatcgtgacaaggtaactaatagtgttgatgtcctagatcctagatggagaatcaattagaagcaatagcttgtagtcaaacttgagaaagacaagttgcaggatgatgatggtgattgtcaccccaagccattcttctatcgctgatacacaccccgttaatagagacattccaccaaagcacgccacactgaaaactaatagccagatcacctgaagagcaatgaatgttgtagatcggggtagaacttgatgtggtaggcaaattcgctttgcgcttgaacgatgcacacg

SEQ ID NO: 64856 - DNA, 481 bp, Zea Mays
cgagcggcttctgccgctagggcgtgcaacttctcgacagctgcaagcgcagcggggcggtcgccccgcacggtgaggaccccagcaggggacgacatcttgaggaccaagtacccataatgggcaatggccatgaaccggtatagggccggcctgccaatgatggcattgaaagggaggttaacctccgcaacgtcgaactggacgttctcagtgcggaagttttcctcagtcccgaatgtaaccgagagtgcgatgctcccaagggtatacaccggttgagggcccactccggagaacgggcgagagggtcccagtcgggatcctgggatttgcagctacttgaacgcagcctggctgatgatgttgagcccagccccaccatcaatcaggacatgatgcagcttcatgttggcgatgacaggggcaatgatgagtggtagtatgctggcccctgccatgttttcagggtagtcgaatg

SEQ ID NO: 64857 - DNA, 625 bp, Zea Mays
ctatgtcctatataccagtttaatttgttcaacgcgttgcggttcttgttagatcacgaatattaacatgttcaaggtgatccaatccccttagccctatcctttgtcttattagtcgatacttctgtacattgtgttgtttcagttcgatgtctctatcctaaacttctgtgtatgtggtgaagtacccacatctaatgacattcttagtcgcggtaaattgttgaattaagaagaaaatgtgttgcgacacagttgtctatcttcacatttttgtgaattgatttaagggtgtcactgtttttccccaattcatctatcagtctgctacacaaattcgtgatcttcctttattttaattgtgagtcaactatgtctatcttcacacttttgtgaattgatttaagggtatcactatttttctcaattcatctatcaggctgctacacaaattcttgacctctctttattttaattgtggattgatttaagggtaagttgcattcctcatccttttttaacataattctctcagtcaccttgttgatttttcctgctactgtcctcacattttgctcgacctttcacttcccagtatgaagcaaagctcttgcctggcttgatc

SEQ ID NO: 64858 - DNA, 432 bp, Zea Mays
aacccgattcttgcccttttgcgcgtttccaagccaccccgtgatccccttccatcccttcctcaccccttttccttgtttcatcggtcgcaatcccgagatttgtgggacctgaacggcaaggccatcgccgctgtggtcaccttcccccctggcgcgattgcctagcccctctcccactataaaatctaaaggccccatttatcattgccacaagccaagcctcgctccctgttcgcattctcgagctctcatcgcgacctcgccacaccaccatcccgagcttcgccctcacgccgtaccgcctctgctcaccgtgaacatcatcgtcgaccccaaccggagttccataggtgcgcaaggaggctcccagacccgtttccaagcttccccgtcgctccagtcacgccagccacgatgccactaccccaa

SEQ ID NO: 64859 - DNA, 389 bp, Zea Mays
ttagtggggatcagtgggagaatcatgtagatctttgtcatacctttccaacgagtacttatgcgctcgattcggagttataatttaggagatatcgttgtttgaatccggttatgttgctgtccaaaaaaacagattttcaggtgaatgaacagcagtagtattagcagtttctggggatttttcgtgggaaattagtgataatcaatatgagaatcatgtagatctttgtcatacctttccaacgagtacttatgtgctcgattcggagttatattttaggagatatcgttgtttgaatccggttatgttgctgtccaaaaaaaaacagatttttcaggtgggtgaacagcagtagtattagcagtttctgtgaatttttcgtgggt

SEQ ID NO: 64860 - DNA, 668 bp, Zea Mays
cgggcaatgtgtgtatcatatgaggccgacctcgtttagtttactagcgatgagtttggagctttttaggggaggcctgatcagtgtgatgctcgccaaaagctcacgaaggggccggcagagcgtctgggtggtgatgcatgaggctggcgagggaagccacgcaggatcacatgcaaaaaagcatgtatgtcttgttgggtagcaactagcaaagggccggagagaaagagacgatgtcgggccatgcgtgcacgggtcaccagacggagaaatgtgcgcgcgcgtggtcaatcctcccaatagtcaattgtgtggtagctacagctaacccgaggttgattactctccaaagctggctggcaacgcgacaaagagtacgatacttggtttgcggtttgcctgcttgataattggtgggtgatgatcatttgagtattggatcgatgagcaaatctttgacccggcagtgatcaaccttctctaccacgccacgccacatggcgagatgtacgccatttaaggtcatgtttgggatggctccgactcctctaaaaataaatctggctctggcctctacaaaaacagcttatttgtaagagcctgtgctttttttaacaaatcgtttggcaaaacggcccctcttaacgtgagacgaggggaatgag

SEQ ID NO: 64861 - DNA, 347 bp, Zea Mays
ctagaagtatgctacaaaccaattagcaagttgtcatgcaaaaattcaagaaaaatgcttctaaatatcctctgttaggccaactgatgaagcctcgcgatggtacagtaactggattaggacaccagcgcagagaagctcaccgccggcgatcgtgcgcccggattcacgccgccgttgtgattcgtgctcaccggtgaccgaataacgcttttgggtaaaagatcttcgcctggggataacaccggcggctggccgccgtatcccttagctttgcggctggctcagataagttcaccgggattggccgcccgtcgatcggatgccacgtgccttgaagcttcacc

SEQ ID NO: 64862 - DNA, 677 bp, Zea Mays
cttgtcccaattgcctccatgcttaagggcacaagctctcaacatatcctccaatacttggttagttctctcagtttggccatcggtttgaggatgataggccgaactgaagctcaacttcgtatccatattctcatgaaagcttttccaaaatcttgaggtaaactgtgatcctctatcagaaacgatcttcttcggtacaccatgtaaacacacaattcaagccatatataactctgccaactgagaaccattataagtaaccttgaccggaatgaagtgatccactttggtcaatctatccatgatcacccatatagaatcataaccctttgaggtgtgaggcaacccggtaatgaaatccataccaatttcttcccacttccattcgagtacctttagcaggtgtagtagtccagctggtcttttgtgttcaactttgaccctttgacacacatcacacatagccacgtgtgcagccacatctcttttcagcccataccaccagtacttttgcttcagatcccgatacatcttagtgctaccaagatgaatagagtaatcggagtcatgggcttccttcagtatagtctcgcggagactgtcaatctcaagaacacatatccggtccttgaaccgtattgtgccttgctcatcctccataaattctggacctc

SEQ ID NO: 64863 - DNA, 990 bp, Zea Mays
caccacatcaaacttatagacctattaaaggagaacaattttgcttaagagtgtgagcatagttgttaagaaaatttaggagataattaagcccaaagttggactgtcaggttactaaggtctgaattttcagacagacagtgcaaccactgagactttgagcataaattcaactatgatccagcaagaatctgcccatggctgctatgacaaacttgtagctgatttgtagctctccaactttgctgcagagcatggagtatgttaccatatagatttgtgagaaaatcgagcctaaatgttgactgtcaggcgctctgaataagtgctcgccatggtacagtgactgaaacggatcagaacgctagcgcgactgtcctcaccgccgacgactcccaccaccgtgattcgtgtcaccggcgtcgggattagtgcctgagtggatggatagcgctgcggggtaaaagaatcttcgccgtcggtgagctggacgccactccggctagccgcgatacttctcccctttctcatcgcccctcggattagaatctcatcgtcgttgtgccgtcgctgttgtccgccacgtgtctctggcgatctaccgcatcaccgtgactcacccttgctccccgttgatcgccggagcaattgccacggcgctggacacccagccactgcgccagtactcttcttcctcctgcgaccaccgcgcgtccccactggaattcccagccaccgccaatgatccctataaattaagcccaccgcgagctccgtatggtagtcaagtaacccgtacaccaactcgcgtctcgaatcatctcccagagagcttcaatttgggacttcccccaaatccaccaagaacaccgtgcggtgtgtgctcaccgtggccagcactgttcaggtccgttcataccatcttcttccccgtttacgtactctcatgtgtctacgatgctcgccgacccatgcaatttagttaggaac

SEQ ID NO: 64864 - DNA, 542 bp, Zea Mays
tccgttagtagggtatagtggtcaccctaagttaagtaagcgtgagcatgttccactgtcttaagtcactgccgacttaagccgattgctccgttagtagggtatagtggtcaccctaagttaagtaagcgtgagcatgttgcaccgtcttaagtcactgccgacttaagccgattgctccattagtagggtatagtggtcaccctaagttaagtaagcgtgagcatgttgcaccgtcttaagtcactgccgacttaagacgattgctccgttagtagggtatagtggtcaccctaagttaagtaagcgtgagcatgttgcaccgtcttaagtcactgccgacttaagctgattgctccgttagtagggtatagtgatcaccctgagtcgagtaagtgtgcagattgataataaatagtttgagtgcctttgagaatgaagtctttttattgatgatgtattttccgattacagaatacaatgctgccccgatagcctttgaaatctggctaggggtaaaacttcctgagatgctctatatt

SEQ ID NO: 64865 - DNA, 779 bp, Zea Mays
gtttccttttgatcgtgtgcatccaatcgtctgcatcgagggggttgcttgatccggcgaacgtgggaggtttgagtcttaggaagtcccccattctgtcttgcggtcttccaccattcgcccgttgattttccagatttcgagtgagaacctcgatgagtcgggtctgattggctagaacttgggctaggtctaagggtaggggtggaggtgcggggaggtgggtttcactttcttctctaacgacttccccttcggctcttcggggaaaacctgctctaatccctgaggcggtaggcgtggttttatccgaagccatctgccagggaagagagtcactatcatgcacatgcaaattgttttcagccaagttattttattcattacaccatcacattacaagcataagattactacaggtgggactacacgagagcgttcttcgaggtactagcgagttccttgtctaaggtgtccccaaatgccttgagaagatcatcgaggctggctagggatacatcttcttcgtcggaccagtcatctattctggggggaggtagggctagaggggccttcttcttcttcttctctgtctggcatccctggttagcggtcttcttctggatcttctttttgggggcgagtgtctttagcttcttatcaaagtctatcttcaaggtccggtaggcctcacgggtgttggcttcctcgccttctactatgctgagactctcctggagggatgccttctcttgcttaagctcttttacttgctgctc

SEQ ID NO: 64866 - DNA, 847 bp, Zea Mays
gtttgtaagatcatctaacaatgctaacaccgttattttggctaggatatccataggaaaaacactgtcaaacagacaggtcccttgctaatcccctgtggagggacccaaactacacatcaataagaccacaaaacaacatggaccatttctgagaaacaaaaggccaaatggaaaagagaggaaagcagcacataacaattgtctgttctacttcttcctttccatttaacttcttgattgatcacacagaagaaatgcgggctgtgggcctctcctgcccgactgcttcccttgataatgctactaataactcttcctaacgaaagcagcatgtacagtacaataagtgaatatgatatggacaggctagagcggcacagatgaccaagctggacttgcccagagtgtactagcagtagtaagagcgcctttggatgagttagggctagttagtagttgggctaaaaatagctcaaattagataagattggctagctagttggctaacaagtaacaagtagtttcaaacttatctaaaaaattaacccacctattagtcctcatgtttggatgcacttaagctaatttaaactagttttcagctaactagtgattagctcttgtgtcaaacaggccctaaatttgaaacccttttccacagtgtagtagcagttgaatatttaaaaccatttcccaaggtgggcagccaacatgatccttttaatctcttaaatgcacggtgcatgacttaagattctaatctactgattcgaggacatgcatgccgacatgtatggacttgggcccgggcgcccggctgccgcacgtgagaagtcaaatggag

SEQ ID NO: 64867 - DNA, 364 bp, Zea Mays
tggacacctacactataaatttaagtagtagtagagatatgcgtcatgaatccggcgcccatgttctgcccagttattacgtagtacgtaggataattaggcgggaacaggcttcgtgtctcgaggacgagctttgccaaaggataaaacatttgtctcttctgcctgcttgtttgaatatatattctttgttttcttcgtcaatggagcacttcaaccaccaagcttaatttggcacctgtcgtggcacttatgttttctagtgtatttgctaagcagatgccgatgagcaaggccagtatactgccaggttttcgtctaggctaattgctttattaatttatccactgtcatgtgcagtttc

SEQ ID NO: 64868 - DNA, 464 bp, Zea Mays
tgatcgcttcactcagctttcatgctatgcaccagaagaagtagacaccgacgataagcgccaagagtgtttcttagaaggcttgattggacctttgaactatcagctgcagatccacagtttcccaaatttctaaactctactcaataaagcaattggtttagaaagtaaaaggaaggaattggcagaccataagaggaaatttcaaggacaatacggcaggaacacctgtcatcataacaactcacaaggttctcaatatcgctatggaaatccaggtgggaacaatcaaaaatagatgcaacatccagggcaacaagtccagaggaataatcagtagagaagcaatctcagacaggtcaaaggtctagtggatatccacagaatcgccagggaagcgccatgaacacaccggccaaaaaccaaaatcaagttaccctagttcagcccaacagatgtttcaa

SEQ ID NO: 64869 - DNA, 542 bp, Zea Mays
tatgtgtgagaatgtcgcaccgccttaagtcattgccgacttaagccgattgctccgttagtagggcatagtggtcaccccgagttaagtatgcgtgagcatgtcgcactgccttaagtcattaccgacttaagccgattgctccgttagtagggcatagtggtcaccccgagttaagtatgcgtgagcatgtcgcaccgccttaagtcattgccgacttaagccgattgctccgttagtagggcatagtggtcaccccaagttaagtatgcgtgagcatgtcgcaccgccttaagtcattgccgacttaagccgatttctccgttagtagggcatagtggtcaccccgagttaagtatgtgtgagaatgtcgcaccgccttaagtcattgccgacttaagccgattgctccgttagtagggcatagtggtcaccccgagttaagtatgcgtgccaattgacagtgaacaatctgagtgcctttgaagcctttttattgatgatatttttctcaatttacagaatacatcgtcattccgaga

SEQ ID NO: 64870 - DNA, 857 bp, Zea Mays
tttaatcttcatagaatgttttgttcctcggcatctattctttgatttgtagcaaatttatttatttacttatggtgatgatgtgatggtgatcacttggttatttctgatagttccatagacgcaacctttaggtccttaagagaggatactatcattttcgagttgttgacaaaggtaatgctcacccttggatatgttaattgttctttttgtttgttagatatgctgctttatatggaggtaatagcatagtgcaaaacagtgactaatggtgttctttttttgtccataaataataagaaaataggatctactgaggggctctccctcccattgtatagacgaaagggtttattgaggttagcataaagatggtaaaaaaagtgaaagctagctcaataagataagtactcaagtgctacaataaagattttgaaagtcgcacaacatggaatttttcatgaagagtggcataaaaaatgggagttatttgactagaaaagcgcaatttacttttgtccaaatctgtatgcatataaccattgaggtcgagaagatacccgtttggaggcgttgttgttatctctgtcatccacgcatacaatttactttagcttaatcaatcttgtggtttttaatgttatatctcggttgtccacgccaagaggatctccatcgcattttgcaagatgggagccaccaagctcctgttcggtttcagtgtagaaccttacgattcttatctcggatcctctgatctttatccaaatgatggtgttcagcaacaatgatagtccgtcattaacctagacgagtagcaacaacagatcccctcaacaatttatgtgccgtcg

SEQ ID NO: 64871 - DNA, 497 bp, Zea Mays
tttttgagttacgatgtctaaaatggttcgctaggtcttatactgtgattagcaaactcatgttaagtaggagtcgatttcgttaagtgattgttgtatatatatgttgtgtctcggattgcggcaataaaaggcaagttgacgtgtatgttatttagcggcgatgtcgttgctctagttaaccgaattgttagatgacgtgcactacaccacaacccaaaatatgcaacttactgtcagtcgctaaaagcccttttagcgtcttactatccatcgctaaaaacatatgccgactacacatatccgacgctataagtgccgtcgggataaatctatagcgacgaacaacttttgtcgactgatcatctagcactaattaaacatataccgactgacttagatatagcgacgcacggttcattaggatatacgctaactaatgattagacgctaaaaattcttttaacgactgtcagtaagttgcagaacatataaac

SEQ ID NO: 64872 - DNA, 690 bp, Zea Mays
gtcactggtaggatgcataataggaattgtgtcctctgcaaagtgaaaggccattttacgttcgttgtgttcagcgcaatccgtggaatcaatacctcatcgccaatcctggatcatgtgagtattatgcatcgcagaacacgctgacctagctgggaaataagcagccttgtcccattacagaggcccatagtttggttcagattgcgaagcagcatcaccatcgcatcctctttaagcacaagtctatggcaaggaaaattgggtgcatttatggaattgaggaattcggttgggtaaagcacatcaaaatctagaatgtgttctgctgattttaaaattgtgtcacagctaatgcactcgacgccactgctaggtaccatcgaaacaatatgctcgttgatgtcatcaacagttgaattattaggacaaatgatagcacgcgtagctaggtaatcatagtttctgtgatttgcaataaaatttgggtacacttcagttataagtgcgaggaccttttcaccgtcatcgtgaatcaatagatcgggaggaatcatgatccacaaaggctcagcctcgtcgtccatcttctcaacaggaatagtacaatctccaatggataaaacccatttgctaaattcagcaagagcagcatgctttttcgatggtaggcatgggttggcaagacac

SEQ ID NO: 64873 - DNA, 551 bp, Zea Mays
cttggagcctactcgaggatagaggacgaggccatgactattgccttcggcgctcgagggaaatggagactgattagggtttttgatgtaattgggtttgtttaccctgattactgttttcctgtccgaaggcaaggggaaaaatgaaagttgctgcttcaatctcttctaatgcgctgaagccaaaaagggccaaggtcttgactcgtaggccaaagcctattgggacggtcgaggtgccaaagcttattgaaggtgccgaggctgccccctcagccacagaaatagctcctgccatgccaattgaagctagtacaggcccggtaaaagagcgagaatcagaaaagacagcagattagccaaaggcgcgaagccctccagctgtaacagggctgtcgaagccattgagtactacaacagcgactctaaggaagagaagaatggctagcgttttagatgctgttttagaatccatgaaagtgccaactcctgcttctgccaaagcatctagcgaaaaatctgaagatgcaagagaagcgattactgcaagc

SEQ ID NO: 64874 - DNA, 798 bp, Zea Mays
accaggaaaacgctccttgcgtaagtgaatccaaaccaagtcccccgatctaaataacactttcttcctatgcttgttcatgcttgcatccttgcgcactactttgagctcaattgcttccttagtcttctcatatatcttttttatgtatgcaacacacttggaagcttccatattggttctttcctgcaatgaaaggggcataaattagttgtagaatgtactgccctgttataagcaaactccacgtgtgacaaacattcctcccaatccttcaagttcttctttaccagttcgcagcagcattgacaatgtacgattcaccacttcagtttgtccatcagtttgggggtggcatgtggtggagaacaaaagtttagtcccaagctttgcccacaatattttccaaaaatagctcataaacttcacgtcacggtcagatacaatggtcttgggcactccatgtagtctcaagatttctctgaaaaataaattggcaacatgtgaagcatcgtcgctcttgttgcatggaataaaatgagccatttttgaaaatctatcaaccacaacaaaaatagaatctctctttttttgagccctagtcagccctaaaataaaattcatgcttatgtcttcccaaggaattttaggagcgggtaaaggagtatataaaccatgagggtttagttttgacttagctttgtgacaggtgacacaatgctccacaaatctgataatgtctctcctcatcttgggccaatagaaattatcactgagcagttcataagtcttcttttg

SEQ ID NO: 64875 - DNA, 434 bp, Zea Mays
tcgtccatgcaaggggaggaagggttggggttttatggcagtgtcaaactgtgaattgtagacatgtaaccttaaaatagatgggaaagttttagtggagagcaggatgaagcgatggagactggagggtgggggtttccgctctacgtcttgtataaaaaagtgaagctcatggatatctgacaggatttgggccattttttgactatctcgcagaaatccgcagattctcaacgagacgctggagctaggagcagcgccaaactgggcctaaaatttcaaaaggcttgaaaagaatcgatcatgtcatctcttctttttctctactctaagcaatagtttttttggttctagtttctaccattgttgtgtctatacatttaaattgtaaaaatgctaaaattatgtacaaatgaggattaaaaccatgattg

SEQ ID NO: 64876 - DNA, 392 bp, Zea Mays
gcgtatagtaagggaaccactcgaatggatctcgcgtctggccccggctgacccgccataaatgatgtcgcataaccacgtctggcgccaagccaaagcatcagcgccggtccgcttcacactcatgacctatggacccctcaggacacatagcactcatgacctacgagcccccggactacggtatattaatggctcgcacacccttagactgctacgcacttatggcatatcgtactaggcctgagtgtgcagacctcccgcagggaactgcacgatagactacactgagccacaggctacagaagccatgggtcggcgtagccggaatgatggtgcctaggaccatcaccgccccgcgataaatacgcggcagtcagccagccctaggc

SEQ ID NO: 64877 - DNA, 541 bp, Zea Mays
ctatggcactttatttttcttccttagctacgaggtaggcaccaaggcattatgattctatgacctagtgatatgttgcaacatcatttatagggatgcagcctttgacgacctagaattcttgagctagaaggatgaggacaaggacctagaggttggcacaaagcttgtcatggattatgatttgatggatgtcgagtgcatcaacagcgacactatggctcatcaaagctcttgatgatgtgagcctctacaagaagccttgacacttctaaggaaggtacactcgtgatgtttctcaaggcaccaacccctcctcccgtgacaccatcactagcatcgatccctcctgccatgactagtatcaatgttgacttctcttgtgtctttattactagtatcaattcactgccctagctaggttttgtctcaccacatctaaacatagaggaatactaggatgctgacaacagtgttgtgctgaggtactgcaccatgaacaacatcctcgaagaggcatcatagccttgcttagcttcac

SEQ ID NO: 64878 - DNA, 363 bp, Zea Mays
gatccttgcgaagcattaggttgattttgcctaggatatgggcagtccttgataaaatgtcctgatttgccgcaattaaaacacccagttgaagaactaggcaaggcagggaatcgaatgtctggggcacccggctgttttggggtagtgggagtattgttagggcggataatgataggctgtttgaagggaaatgagggtggacgagaaaaagggcgattctggtttgagggtcgaatcacaaaccgtggtttcttcgcctggccctgattaggcctctcaccaccgaaccccttgttcttcccagaagttgtgtatttggcttccacagataaggctgtactgacagcctttccatatgtg

SEQ ID NO: 64879 - DNA, 346 bp, Zea Mays
tactggaagaagagcgattgaatacagtaattcagtcagctagataccagcagaccctgaggcgctatcatgataaggctatatgacatcgatcctttgtagtgggagacttggccctttgctgaattctaatgggagaaggacggcacaaattgtcaccgctatgggaagggccattcatggtatcagaggtcactcggccaggatcatatcggcttactcaaatggatggcacggaagtggggaattcatggaatatagagcatctcaggaagttttatccttagcaagacttcaaaaactatcggagcaatgttgtactctgtaattggaaaatacgccatcg

SEQ ID NO: 64880 - DNA, 610 bp, Zea Mays
ctggtgacaaaaagcagctctcctactctcaaattcagggtccaggttctttaggaagtgggtcactctcctgtcctctacccacttatgagcagtctgtgcatcctgtggacaagccatttggagaggagcagagtgatctagttctccccacaagtactggagctcactcgcatattgttccgctggtctccccatctatttcactgcatctgccttactatgaatttccatcatcaccatcacatttccctttcttgagtacatattgctcaaggtcttccaaatttgtgctgcagtgcacatggcttcaaccaccttactcacacggagacatggatgccaacaatcatgccacaataaccgagttggtggtataccaaaccttccattcagggttgtgcctctcaacaggttcaacacaaccctcctccaaatagtgctccacttctttacgtcctacgagcacttgcactctcctagaccaactcaaataattcttgcttccttctagcttcacatcatttggtacaagttccaatttcaattcagatgctccagacgccatcttggagccaatcatacctagtcccatgagttcttgaatcat

SEQ ID NO: 64881 - DNA, 369 bp, Zea Mays
cgtagtcatcttgtcgtctgttagtgacctagctgaaggttgtagagaaaggtcgtttacatgtgtgttattactgtcaccctgcggttctgtatgaattgcaatgtgaagtagtaggctctctatgtgatgctagatgtctaggtagactttcgtgaattgtggtgctcgaaccgtcgagataaaggttaagtcggtcgatgccgagtaagtagttaaaataattagtggaattatcatagggttagaactagaaactagtgttctcgcacccgtttgggatgttgtggtcgcttgacggcaagtcaaatggaaatgtgttgcgctataaaatttagaagtgacttactgaaattacactaatagagt

SEQ ID NO: 64882 - DNA, 625 bp, Zea Mays
gtggaatagagaacttaatcttagcaaatggatcatgatctggttcaggattatgatgatgacgtctaccattacctcccataccttgtccattatgtgcgaggcgttgtcgcagcggtgcataaacatcgtcgtcatcgtcgtcgtcgtccacaggagagtgagctggggctagagttggtggtgggggatgagcctccagtacatccatgcgtgtaccaagtttagcaactcatcgatcaagccgctcataggatgttgccgcagagtcctggtattttttaaaagcttcggtcatcacgcgcatcatctccttcaattccagctgagagacacactcatcgtcgttaagcttaagccccttgtccttgtccatttgattctttggtcctgtcattgttagcacaaaacagagacaaaaaggcaacaaacaatgtgaaccctacaactatctgtcatggtggtggtggtggtgaaatacaaattatgaagcgtcttaccccgctcttacaacgttcttaccagcactgcaggtggcaaacggtgaccggtgtgactgtccaacgagcgtgggtgtgattgcaaaggactacctgttctacttgagagaaagctggagttctgg

SEQ ID NO: 64883 - DNA, 675 bp, Zea Mays
gccggtcgaagagatgacatgtcacactccccttgtcgaaagatcttctgatgtcagtccaccttgaaattggccaggtacttctcctcgtccccctcgatcaactgtcttttgtagtcctcgaatctctactgatcttcaagcgacaatttctccatagttgacttcacgatgttgcttaagatatcggattgatcatttgaactgatcatctatggtcaatctctgctaggtcacacattttgtccccataggaatcgccaaaaaatgtgttggatccgattcgatgccaaacactaggggtgtggtgtcctctgcatgagcgccaacggttcacggtacagggccgcacagtccgtaactttgccgcatgagaggatcttccctgtacggcgtcgaacgacccacgatggcgtgggccatcttcttcttcgcgagaacactacatctcaccccgccccaagatggacctcttcgaggaggagagttccaagggtgcttcgtggtcggcaggccacttgggacgtccctacgcggcgtatggtcgaggaaaactaatactatggctagattactgctactcctagggtgagaaagtaaagaaaatgaaatattgatttattggtttgattgtgttattcgctaattggtcgtgtatatatatactaggtgtat

SEQ ID NO: 64884 - DNA, 278 bp, Zea Mays
aatgtgtcctgaaatagactcaaaaatagttttcggcaggcagtatgaacctgtggtgagccggtattaccgtgaggcaaatctgttttcgccaatgatatgtggtcatagaatctcaggtgcaatgctgcagagctcatttggtatagtgcatgtggagtgtggacatagatccagtacaggtttgtcgcaatacaaaacaagggaactcccacatagatgtatgtgtgaggaaatgaatgaacaaatgttctgcctctgaatctctgatatgctag

SEQ ID NO: 64885 - DNA, 377 bp, Zea Mays
tttgtgttgaacctttatgcatctgtaatacatgaatacttggcaaactagttagtccatgtgtttgcgttggtcattcaaccaccaaaattaattgtggaaaaaggttaaccctatttccctttcatgtctcatcgccctttgttgactttggcgtctttgacggggcaggtgttcatacagtgtgaatttaatgcgcacgtcttgcggttccgagaactttggttgaggccgggctcgtggttggacctacacccgagatgccctcaggcgaggcggatatttgttttctgtccaagggtgctccccgagtgagtcgcggatccctgcaggtgtagcgttcgtccgaggttgggctcgggtgaagcgtagctgtg

SEQ ID NO: 64886 - DNA, 378 bp, Zea Mays
tggagaactcgagggcgaaagggcgcagcgagtgatgagaatgactaccgcactcgggggaatccctttttaagaaagactcccccactcacgccccgagacgccgcagaaaatctcgcccgacacgcaccaaggtgacccagcctctggcacgggggcccaggctcacgagtcatactccttgggcgtaggtctccgagtgcgaagaaggcgaatcgccacgcgaggagcgaaccgctgcacctcttcatctccgccaaaagcagcggaccagcctctggcacgggggcacaggcccacgagtcatactccttgggcgttggcgttagtctccgagtgcgaagaagacgaactgccacgcgaggagcgaatcgccgt

SEQ ID NO: 64887 - DNA, 512 bp, Zea Mays
cggggtctattttccttacaggagcataatgctcattggattaggcttcaccactgaaataagatgtttagtggggatgcatcccctcttgtgtttgagggatatagttttccttattgaaaaatccgcatgaggtgtatctagaggccatatatcttggggtatatagaacctccatacaaggacttcaaaaatttaaggatattgccaacgtagatgttgatgaggtaccatgcgaagtggaatgcaaaggaacaaaactcattatttggaggtctttgcaaagaggtatttaaccgtatatggaaccacaaggatgcccattcaatatggttgaatatttatgtgctccatgagggaaccaaaagtgagtgtgaggaacactatcaccttgtgatgaaaatgttgaattccttagaattctttatcattaaattgctaatgacatgtactcttgcttgaatgtaaatgaaggtgcaatataggatggggaaatagttatggtactcttg

SEQ ID NO: 64888 - DNA, 760 bp, Zea Mays
gtcgtagtaagttaaaaccctagggagttattgttgttgcatcacatgctggagcatctaattttgtatgacgttttgtgttgtcgtgcctccatttgaactcatgaagcatgtttgattttgaatttaaaagctagagctatattcaaatagaaagaagaaaatagaaagagaaaaaggaaaagcccaccctagctccttcccctagctggcctgctcggcggcccagcctacttcccctccctctcctgggcctgcgcaagcgcagcctagctcgccaaccccgcgcatggccacatgcaaattttccatgtggtggtgcatcttgtgcggttgagaaaatagaggaaagaactaccatatgggtcccacttcctattttctctcctgcgcataatctgcatgctaccgggaaccgcgcccacgatctccctcacgaaccgctcccaacagccctctgttcatcttcccaaaaccacccaggcatagagtgcatctgctgagccggccacgatcagggagcctcggcaactgtcgctcgttcaaaacacttggccctgctctccccttcttcaagcacgcaggaaccaccctcgcttcattgccaaaaccgctccacgcccagaccacctcgtagcgtgtagcaatcgcctccgccgccgccatccactttacttatgtgcatctagacctgatataatgttaagtgtttgcatgtgtgcacgttttcaagcaaatcctaaagattgccatcttgtag

SEQ ID NO: 64889 - DNA, 583 bp, Zea Mays
cgcgggccaaacttgtcagtctcctttccccaactgaccgccgtgctcggagggtcggtcgcgccattgtcgcggggcggttgctgcaccctggccaccctcgcgtccataaagaaagctgtgaactagggctcgttccttccttccccttctttttaccttctcggccatcaccatttggcggctcgacggcgagagggattgcgccgccaggtttgcgttgtcgcgctctggccaggctaccgccagcctctgcatgggattatcagcgaagtgttgcgggagtccgtcgaagcactgtgaaggtttaataccttgttgtgggggaaatcttggaccaagatgtcgtgaatttctcgtcgttgggcggtgccatttctttccgtggtcggagtgcgtcgcagctccaccgtgggtaagtaaccgtgtgacctgttcatttttgagcccccatggcatagaccgtactggtagaaggtttgcgggtgtagtagtcggcagggggttctccgatgggcggtgccgccgtgacttgtgggtgcaggattgaagataacttgcgagtcattaatctggcgatgga

SEQ ID NO: 64890 - DNA, 535 bp, Zea Mays
tttgtgtccactcaagtaaaacaccgcacatcattatgccacatcgtttctcaaaataaaataaagaccatgggaaatttagccaaattgcgtgagagaactttccaaacataggttaaggttggaaggcacctttttttccaccatacagttgctaaaaagcatgaatataaagaattcaaaacaatagatcagcttttcaactaaaaataatgtttcccagatgtcaagggcattgtattcgcacgagatggtattagagtacaactaggggataaagatgttattgggctagctaatgaccttttatgataccaggtttcctataatcccctctattcaaggcatacctagacggtgtttatgtccactcaaataaaacaccacatattaatatgccacattgtttctcaataaagcaaataccatggaaaatttagccaaatgagtgagagaactgtccaaacataggttaaagttgtaaggcacatttttccaccatacggttgctaaaaagagggaatataaagaattc

SEQ ID NO: 64891 - DNA, 434 bp, Zea Mays
ccgctcactccgagtctcactctcactccgtcctccctcttccttacagaaacacaactcatgcagctcgtacggcaccaccaccaccaccaccaactgccgcactgacacatgcatgcgcagaaagcagctagctagcggccggtggccttgagagccgctcgctagcttttaaaattagccaccaattcaatctctagctagcttgggggagctccgttcctagctacacgtacgggcggcgcggcaaccaccagccgtgtagccgacctagtacgttggagcgaagcatatatcggcggccgcatcacatggagagcgcgatggagaaggtgtgggagtcggggcggcggatgagccggagcatcgggcggggcatgggcatggaggcgtggggcgtcgacgacgccttcgtgccgcagcacggctcccgg

SEQ ID NO: 64892 - DNA, 440 bp, Zea Mays
cgaatctcaaactattctaaggaggaggggaaagagaacccgattggagacttaccgggtagtattatcgtctccggttcacgttgtggtgcggatttatggccacgacggaaaaccggcgacaaattgtggtgacgacgcgcgcccaaagagtcgagtgacaccgcggctagcctctacttgcacgagcgatgccctactccctgaccatcgggatcagaacgtcgatagccccccgattgcaggtacggcggatttcctctttcctctcaccagcttcgttctcaccgggtagaggtggcagcgtcaagggggtccttataggctatgcgaggatcggctggaggaaaagggatcgggcccccacacgaccgccccggcgcgcggtatttgcgggttgttaccgccatgagcggccactgtgtggtgtctggcacggt

SEQ ID NO: 64893 - DNA, 437 bp, Zea Mays
ggaggaggccacaggaaagaagcgcatcaagacgaactttatcgaccaaggagcggctctagaatcccatgatcacctaaggacgaagggtagcgacagggactcgtcaaaagtagggggagcgtgatgcgaagcagtagcgatggaacacaagacacgcaaaaccctagaggatgaaaagggagccaaagcagagcaatgcctctaccccaaatcgagagtggctaacccaccaagacgcaatcgtcggatcaaaggcaagtcccgataagcaataagtgtcctaactaacatattgccgatcttggtgaataggcctgggctaaacaggatacctacccctaagaacggataacacccagatcgaacctaggcactaggcgacaaccgcacgacacaggtatgatgctgaggctcgacaaccatgcgaccacgcc

SEQ ID NO: 64894 - DNA, 806 bp, Zea Mays
gtcgtatcttacttggataacccgtttgtagctcaacgacctccttccccgcgtagacccagtcggtcggggagatcctcccttcaaaggaggagctcctaacatatccttcgaaagggagatgcgtgcattagatggcgaatggacacgcccggcaagggaggatgacgaagcgacgacctgctcaaaggggtcactcccccgggataaatacaagggaaccgtggactcacactcagcgtgtgacgaccatcgcaggaagggctcgtccctaaactgcattatcaccaagtaaactcccaagcaatccacatggcttactcggggacttgggcgctacatctaacagatgcgcttgcacgcacccaagcattccgccctcaccaaagggaaatggacctatgcccagcacgtggcatcaatcgcatgaagggcccatccctaaattgtattatcacgaagtaaacccaagcaatccacatggattactcaggggctcaagggctacatctaacagatgcgtttacatgcatccgagcgttccaccctcactaaagggaaatggacccacgcccagcgtgtggcgtcaatcgcatgtattatcaccaagtaagccccctaagcaatcgacatggatcacacgagggctcgggggctacatctagcagatgcgcttgcacacacctaagcgtataggccaccgagcataagcctccgtgcgactccaatgagtggcccgaaagctcgggggctgctatcgggtacgtaggaacggggtacccaaggtaaggctcataacctctttc

SEQ ID NO: 64895 - DNA, 412 bp, Zea Mays
gttgcaaggcaccagctgatttcaagtggcttgcctttatcctctgacatgtgtcacattctgatacatattgggcaatctccctcttcattctggtccaccaatacaagggcttcagatcatggtacattttggtgcttcctggatgcatggagaatttggagagatgagcttcatccaagattttcttcttgagatccttatttttaggaatcaccaatctgctttcaaaccacaatataccctttccatcttggcggaaacacttgtacttctctgtcttctgatggaggttctctttaatgatttgcactcccttgtcactgagttgggccatgattatctggtctcgcaaatttggctcgacggaaatgtgagacaaaacaccagagggaatcacttcaatcttcat

SEQ ID NO: 64896 - DNA, 710 bp, Zea Mays
gccctcgtttgagaatttggaaaaatctgacacactagttcccggagggtatggaacgacgtcccatcgatcgaggatcatatggcctctgatatgactgtcctgggccggatacactgacacctaatttatcacgaaatagttcagatatttccttccaaacttcatccatagtgaccgatggtaaccgatcagtcctcgggacatggggcacatgcggtcggttatccttatgtcagccttctataccaggatgatcaaaggcgacttcttgtaaaggcccctaaggcatatcgataccacatcccactattgtgtggtatggggtgaccctttccatctctgtaggggccaaaaaatattcagcctcatgcgcgggcggtggcatgctacaaatacggtgcgttgtaggtgggatggagtatgaaaattgtgcttgatgcgtagtactatgttctgagtatgcatatccggtcggtcaggcgtaaggtgccagaggtccgcaatgtttctggacggtctggtcataccaagttgtgcgttgcataccgatggtggtggtatactgcggctttgatgcaccgcatgtgggaaatattaatgttgaggtgggtagaaaaattgtgtgttgtcagcagcatcttgttctacgtaaacgtacccggacgacccggtctaggtggccggacggtctggtgtgacgtcgaacc

SEQ ID NO: 64897 - DNA, 1222 bp, Zea Mays
gttctggagcacgatgggctcgggccatactggcccggcctaattcccagtgctatgcgcatcccaggacgtacgaggccgtcaggcctaaagatggcaacatggatctgttatccggtgggtagttactccattaaggcacagggacccagcaggtagaatggatacatgtatgtactcattaaactcgtacccttgtgcccatgagtattttatacatggaatatagccaataattctctaaaattttagcctagctcaatttgtcataggcttctcgctcctgagtacaactatacgttgcatagccccaaggacacatggtagtagtaggcagacaatcggccaaactagtaaagcacgtccaagccaccaagcttctgtgatacgattcttcgttagtgtgcaatcaaagcgatcaagtcgcacgtgacacgcccacacctggaagatggaagacagaagacggaaggccggatgttgccgttcagcacttaccattcgccctaaaataagttgggtagatagcgcaaatctaccactatagatgggttcaggtattggtgctgcgcatgagtacaggtattaaagtggtaagtttgtagtctaacggggctaggtcagagatagagcaacccgaccatcttcacatattgtcatccctagtcaggccggtgtgtatacgcgaaggaccgtgtcgacgacaacagtgacagacaacaacgaccagacagtataaattccttggcagactcgatggactagccagacgaccggcctattgaggcagccgcgcggctctcgacgtggttgagtgagcctccgtcgtgccatgcccagaccgctagagattttcgctggccagtagtagtagcagtagcagatcacatcacaatcacatccgtaaggcgtaagcccgtggtccatttgcagcgcgtgcgtgcgtgcggtgcaagtgcaagtgataaaagaaaaggtcaaggaaaggagaaagcagtaaagcgaagcgcccgttacgttgacagcagcccacttattatcgcgcgtaaataaaccaagcttgtctttactccaaagcactataggacgatcgacgacatgcacatccatgccactttctgtaggaccattttgattttttttttttttggtacggtctacctagtcggcccgcccggccggaaatgctccgccccacgcactaatgcatgttggtttcaac

SEQ ID NO: 64898 - DNA, 989 bp, Zea Mays
ctgacttctaggtggcagaccgtctgcctagctaggtggacagtcggcccatgttaaatctttgcggttagtgctcgggtgctaaatggttccaggtcgcggatcatccgtccgaggtcggcagactgtccgaacctaccttttttgggattcaaacggtgaaaatagtcgttacttgtacgccagaccatccggacagaggcgcggacatgtctgccctggacgagggagcctcggccgagacggagattctctcgagcatccgtcctgacctagacagacctcaggcgaggttgagttttgggaagacccttgagggggacctcaggcaaggcggagttttggtaagacccctggggggaccttgggcggggcagagttttggtaaggcccctggagggacctcgggcgaggcagagttttggttccttgttctcaaaggacgtaccttgacgaagtccttaggttttaagtgtgttttaggggtgtgatctgtgtacccctaattattgtacccgacaataactgatcaccaaaaatctgcatactagaggtcgggtttacaaagggggaaactcttaccggtctagaccacggatagcgccagaggccgggtttacttgagcggatctttaccagtccggatcacagacaaatgctaatctattacaaaggaagagtttgttctcatgctaccttatagattgaaggtgtgaggttgacctagaccgccttagctccattgtgcatctgactcaaaggtcgagcatcgtcacttctgctaccttgaacgccatggagcttgtggtaggcaagttgggtcttggcgccattggtgaaccccttcagagcgtgtggaatgtccctataatgatctcccaaggtcgatgggttgtctttgtcgcgacgaggttgatgtcgttgtagccgccattggcctggctccctttttgcctcgtcagggtactgctatccttcagactggaagg

SEQ ID NO: 64899 - DNA, 695 bp, Zea Mays
ggaggagtccaaggaggaggccgatgaggactacaatgggtatggtggcggtgatgaaggtggcgcgactggaaaggatggcggcgacgacaacaaatgtggcggcgacgacaacaacagtggcattggcggggagaagggcggcgacggcgatggtggtactagtgatgaggcaccaccagcttatgtaatagtcatgggtgtagtgtaggggtagtagtagggggtggggatcctttgctagaatcagttcataatgaagttgccatcttcttcctttgagtactgagttctttcttttccctttatcccactctgtgcttgaggttcgataggtggtatcaagctctctattttgcttagtttcctgtatccttcgcgttacccttgacgactgacttctggcgttcgacttatacgacgaaatgaatcctctatcagactcaacctgtcctacttaatttgtctgacttatcacctttctttttgattttgagagaccgtttccattgtactgatgcagtgataggtcgggggtacttatatatatatatatatgcttattgtctgatggttcttggcagaaaaccctagcgttgctttcaccgtaacttcctcctttgaaattttcctgcctcagggactttgtgcccgatttcacactcgcgacaggtctcatggcgtcgtgcccaaga

SEQ ID NO: 64900 - DNA, 344 bp, Zea Mays
aattcagggtgttacagtttgtgtagagggaaagaagatgatttctgaagtattaacacgatcaactcaaaaaaccatgtgcagatgtaaaatcctgagaagcatggggttttctcaaacgaactcaaatcgagattaactcggatcacgaccaagaactgcactaacagggcatatgtagtgatccaaagactgtacttcaacaccaatcaattcccaacaacacccacaacacaagaactcgatggttcttccacaaatccaaagagaaggagagggaagaagtagagaacaaaattgacccaaaaacgcagtgaagacaaagttgtgcaaatgagtcaaac

SEQ ID NO: 64901 - DNA, 900 bp, Zea Mays
gaactggccccgcgccggcgctgtgcaattttgcgcaattaccctcgttgcatcagtcaaccgaataaaggtcctatgtcctatttaattgtttcactgaccttagcactgagatccctgtctttttgcttattcacaaactcaagtccacgatagtgactccggcaaccctaagccgggcacgaggttgcgcgctcacgacaagcccacgccggccatctccggcaaggatttacattcttaaacgtcacctgagcccggcccgacctaacccgtaagcgattcggatttaaatagtctaggctgcccagatcacggcaacggcggacataccaaactctggcgtgcacgaaccagggtctaggacctcgaagtgttccattcacggttatggtaagtctcagggattggtctagtgcactatgcccacacagatttatccagggagagtacagtttaatcagcccacgcgaagctggttcgccacggcgtgctagacagacccgacggcgttctggccggggtattatggtaacgttcaaacgagcaacgcccttagcatcactatcatacatgtattatgatacgtgagcaaaacgagcagattacctcccaggaaaagctggccacgaggaggtgagtgattcggggaacgaagtcaccacgcgcgcctagaactccacggttcagttaaagcaacggagccaaagggttgagaaaatgtccaggaagtaatttaagtgcagaagaacggtatgatacggtgaggagactatggggacagctgaaacttgagtgagttcaggtgttgaactttaatacactatgagagggcataggagttatcggcttggttgaggcttcctttaggctttcagggggaataaccggtgctaacat

SEQ ID NO: 64902 - DNA, 437 bp, Zea Mays
cttgcctctaagaatcatttcaagccggttcaccaagtctacagcgggaattcttctgttggtaacccgggttgagtcagctagacctcggtacagataagccgggtatgccctctccttcaacggctgaatgttcttgaagataaaatcagcaaccacagcctctgcagtcagacccctctccttcagcagtccaacttcagccagcaaagcccctgcctcagccacctcctgatccgtgggggactcggtccaactcggagtgcgaacatccggctgtctccctgatcgaggggggagagaatttccgtggttctcaacaataaaccactccaagcgccatcccttgatactatccttgagcgggatttcaagatagtcagtcttcctcccatggcgcatctccaaactcgcaccccccaccagctgatgctgcc

SEQ ID NO: 64903 - DNA, 455 bp, Zea Mays
cagtactggtgtacaagagatgaaccatatcggtacatttcagtaaatgacttcgtagattccttcaaagcattccatgttggccatgcattgcagtcggagctcgagctgcccttcgatcgaaccaagaaccaccctgctgccctcacaacatcaaagtttggtatcagcaagatggagcttctcaaggcatgcttttgtagggagtggctgatgatgaagaggaactcatttgtttacatcatcaaaatagtgcaggtaagaaacatgcatttggctcctaaaatcttctctactttgaaatttagatagttatagattcagatggttgtcacatacttgtaccagctcataatcctaggaaccattacaatgacggtcttcctgcacacaaaaatgcatcgacacagtgttgaagatggagtcatctttctaggtgcgatgttccttggatt

SEQ ID NO: 64904 - DNA, 316 bp, Zea Mays
tggccaagtacacattggtgaagaatgggattctaatgaagaaagctcaagcttagatgaagagagagtggcaagtattgccattcaacggtctacatcgagacaacgactcttcaccaacctcatcgacgacttcgagactcctacttgtctcatggaaaaaggagagaaggtacatttatttaatgcaagtagttttgatggtaatagtgatgaacatagcatgaaaaataaaatgattaatgaatttggtttaaatggctataatataattactaagttaatggagaagctaaaaaaagaaaggcaactctcg

SEQ ID NO: 64905 - DNA, 787 bp, Zea Mays
cgggtggaagcttacattgacgacatggtgatccaaaccatgaacctggaaaacttcatcaactttctccaataggtcttcaatagcctgaagcgctaccattggaaacttaacctagagaaatgtgtgttcagggtaccagccaacaagctactcgaattcatcattagtcaccaggtaattaacgccaacccagagaagatcgaagccattatgaggatggagcaaccacaatcacaaaagaaggtccagaagcttacaggctgcatggcggcacttagtcatttcatctcacggctcggtgagagaggcatgccattctacaaattgctcaagaaggtcaacagattctagtggacctcgaggctcaggaagcattaaaggcacttaaaaattcttgaccgccccaccggttctcaggccacccaaccgagctacccccgaccgaccagctgaagatttactgctatacatttcatgcatgactcgtgtggtaagcaccacgttagtagtcgagcgggtagaagaagggcatgcatatccaatcgagcatcccatatacttcatcagtgaagtcctcgggccctctaaaatcagatacctttatgtccagaagttggtgtatgtagtgctcctcaccgcgcgaaagttgtgccactattttgacgatcacaaagacatcgtggttacatgcttcccgataggagacatactccacaacaaagaagcagtggggaggacagccaagtgggtgtgcgaactcggagctcatgacatagaattccga

SEQ ID NO: 64906 - DNA, 583 bp, Zea Mays
ctttgcgatgcggcggaccaatttgggggaaaacggcgtcgcggtggctctggttgaaattggggttggggattgaggctactcggccgtaagaagctgtgctttcaccgtgcgcaaacgatttgggagaagatggagagggcggtgcaaatttgacttcgatctagtcactgtgtttgcgatgatcacccttcgccgtgaacccaatggttatttatagccgtggcggtccgacgatcaccacacggccacggacaacatcactagcgcatgtcgaccacatcggtagaaggtacagtgagggagaactacggcatgagcgccactgcggtagaattcactgcgtcacggcggctgccggtgagtaactccgaccgagctcaggagatggtgccacgtacgagttacccctccccgacgttatccactccattccgcactcgaatcaggacgatggcggcactaattttggcgcagagaggtcgccggcggtgagatttttctgccgcggccgatctgatccgtttggggatactgtaccatcgcgaactgccattagggctcctgacagtcaatgtttggg

SEQ ID NO: 64907 - DNA, 551 bp, Zea Mays
aagatattcaatctattttggctgatttcaaacctcccgagagtgagactattcctatcactcctactcacctcatggaagacgaggtacatgaccagatctaactacacaaccgttttcgcattttatgtataaccattgttgcagttaatattaaactcaaacctataggaagatgtggagattggtcatgatgttatggattaacagggtgcattattgtgaagaccgaagaagacttataatatgctagtcatcatgtgtgtgatgatattatctattatcttagcttgtcaactattttgaactattttttaacacctgctatactcctgcagtcctgaacttatcatgtctccacaggatatcctgaatcatcgcatacgttgactttggctgagcgtctgtttggttgcatgtacgcgaggaatggtaactacatgagtgaatgcaaaataagtcattctgaggccatttacctgcatatgcacatacgacagaaatgaccgtacctagccgaccaagctcgcgttagattgggtgtacgagag

SEQ ID NO: 64908 - DNA, 781 bp, Zea Mays
ccacggtagaggtctgacttgaacgccgttagcaggtatcaccaactgcatgggtggcggccatggttgccggtgcagcactgcatcccagccacaactaaatggatgcaagcaagaactctgtatgagactgaagcaattcctcaagcacctattggttaaggtgttgagaaccatgtccttaatctgaaggtcaatatgatgttggacgagccatgctgccacgtcttctccatcacaaacaacatcatattggagtgtccagtgcccttcaatgtgcttagcattcagaactgtatttgtttctgcaagaacctcagcagcattaagatcacatactgaaacatgcatcccaccaagttctgaatcaattcctatgcaacttgtgcaaagttgttggcagctgcaatatgagtaaacatgtagctgggaatattcagagccaatgttacatgagtggagtggcgtatcagactatgtggctgctagtattctttcagtatatctcaacttggcgctggtttccaactacactccaaaatgagttgaggatcatcaactgggcctgggaaaatgattgtgttttcaactggtctgcattccagataggaactagctccttgagcttgaacgcggacggctcggtgacaaacttgtagaagctgtagagacgcagttgtgcttcctcggggatgctgatactggaggccgcgacgaaggcggatgcagcgttgaactcccgctcgtccagaaagttgaagtcgcggcggtggaagttcac

SEQ ID NO: 64909 - DNA, 485 bp, Zea Mays
aacttttcaagtaatactcattttggcctcacattcatccatatgccctaatcccatggttaaataccctactctagggttaagaagtacttcaagacatcacatcacatttgttttgaagttttagcctagtagatgcattctaggtgtaacaaacataatgacatgtcaatgcatatgatgccatgctcaaattttagttctagtaacaccagaggtgttacaaataccattaaccacattagaagatattgtctttgaggaggcaacattgaatctgctcaacggaactcccttattgcatgggagaaggtaactcatccgaagaataagggtggtctcgggttctcaacttgaagatccagaacacatatatgcttctcaagtttttgcataagttctatggaaggcatgatatccccttggttaatcttgtctagaactcatattatgcctcaggtcagattcgtcatgcctctcaggta

SEQ ID NO: 64910 - DNA, 678 bp, Zea Mays
ggaggcaaaggaaggagtcgatcaaggatggtctctccttgtttgttgatcttcttgtgccgatatattgtgaagtgtgatagaaatttttcctttgtcgcttcatgagccctgttcatgaggtctttaatctcctgttgcttgacggctgacaaactttccatagtcaacctaagatattgtttggggagacactcgtgtgatctttgggaccggccatcgtagctgatctaatagatcaatcatttctcccaagtggaatcatcaaaaagtgtgttggcgccttttttagaccaaagaacaacaaaccctagggcttgtgcgaggcaagcaggacctcagtgtcctctctaaaagagcacagctcatcctcgtggggaaccgaaccatccgtgactatgtagagacctccgctcttcacagtagatgcgcaagtcattcgcacgtaggcaccagaccatccacgatgtgtctagagaactctgagaagaaccaagatcttgcctccctagagggaccccattgggaaggatcaaccttgggttgctttggcatgacggtccacccaaagctcctctcgatgatgtagagccaaaagaggcgaagaatggagattgagaggctacaactagagcttgagctactcctaaacctaatgcattaagtaaaaaaaataaa

SEQ ID NO: 64911 - DNA, 512 bp, Zea Mays
ggacaaggccgaagctgccgaaacagcgcccataacagaagtaatgaagcgatcaggtctagttgtgccaggggaagttactgacgaaggtgcttccaatgccgaagctggacaaactatggttgagggtgagagtgataatgaaagcgaagaggataacaacattctgaacccggcaaagcctagtcatcttgaatttgaaaaatctactataacagaagatgacatgactatgatgaaaaactgggctatttcggggagtctgagagcaagcttgttcgatttgctggggaagagataattctggagccgagggaggacgaagttatcgtctttaagagcttcttcagagcagagcttcggttcccccaaaaggacatgataggggaggttctaaagaactttgaaatataccttcatcagctgacccccaatgctattgttagacttagcgtcttcatatgggttctccgaagccaaggaatggatgctaatgccgaagctttttgccg

SEQ ID NO: 64912 - DNA, 507 bp, Zea Mays
ggaagaagcatgggtggaaaccgtggaaccaggtaaattggtgctttaatataatagagatatagaacaaaagagaaaggaagaagcatgggtggaaatggaaaccatggaaccaggtaaactggtgttttaatatagtagagaagagaagagaaggaagaagaagcgtggggaatttctgttctattctttgatgtcggaccgagtatagtttccaacactatatactccgagccaggccaagatccaacaaccacatcaatgtttaatggcccaacatcaatacaatgaattttgttatcttctctgcgctaccaatacttcttctatacctttattgctcacatggacgatgtactccaccactcagttgccatctttcaccgtcatgacatcgctcgctctgcgccatcatggcccctctgtagatccaactggtctctagatggatgaagatggaaactgattcttgaggatgcaataattcttccatgatgacatctctag

SEQ ID NO: 64913 - DNA, 463 bp, Zea Mays
cataaaacaaagagtataacaatatgaatagtaaagtataatattaaccttgtctattttgacataatcaacatatatcttgttaggatgtattcagcaacgtcctctaaatttcgtcccctaaaagaatattttgttatttacagcttactctaaaagattttatcctctatatcttaactatctccagcaatgttctctaaattacatccttatatttttccaccatattaatagaattcgtctgatagtctcgttgctcctctcttttctcttgcctcgtattagatgtagtcttgtttttttgacatcacagtgtagcatctagtttacagagcgcataggtacatttggaggacatgcgagagctccgatactttggtgtaaactttggcgcacactttacagattgttgttggacgtgatacaaaccttgacgaacgctaaatttatgataacggac

SEQ ID NO: 64914 - DNA, 747 bp, Zea Mays
cagggttccggcgagtcgcttcatgcaggccttgtcacactactacgaggtggagctacacaacttcaaccccaactccatcgcgcaggcagccatcttctctgtcgtctgcgagggattcctggggattaagccccactcggacctgtggcgccacctctttcgcacggagcccttctccctacctagcgaggtgaggaaggtgcgccacatcgttcacgccagtggctgcacactccagctacgcttggatcggacggcgctttacatccctgccacccttacctcgttgaacaaggggtggtagagtcgatggttctacctccgtatcgatgatgggcggctaccagagtttacacaccacgtcgtcctcggagcggaggataagtggaggtgggggctgccgcgggatctgtagacccacctaaagtcgctgcttgaggggctgtgaaagctccggtactgtggtctcactgcagctggagttgtcgtggccttccaccggtggtgggtgctgccgctggccgaccgtcgactccgccacgacgagatgaccctcgaggcctccgtggacagtttctggatggcctcggacgccttatccaccgacgaactcctccgacaggtgaagggaatggtggggaaggcggattattccgccgtagtgccgatgcaccccgaggagggctacgtgtccttggtgagtcttttgtttttcatttttgatcttcagcttcttctttttca

SEQ ID NO: 64915 - DNA, 595 bp, Zea Mays
gagtaggttgatggagaacgatgacgacggttcaacacacagcagcagggagctagcatggtgaagacaaacggcgacgcacaacagcagcacaggtttggcggggactacaggcgcgaacgacgaagcatgtggagtcccgcgagcgatggcaatgatgcggcgtgacgacacagcacgagcgtggggaatccaggtagatggacgggcttcgggacaggaacatcaaggaatggcgagaggaggaagatgaacatgaaaatggcaattgctgctggctaagggagtgcagcgtccttatataggggaagagagacaggagattggccagattaactttccctaatgtccagttaaacgttacattcatccacattcgtacctagaagaaatgctatcaatggcgaaccttatggagctattactgctgtgagtaaaagtggagcggacggcacgggtgggaaacgtaacggacgacgaacaaacagcaaacgtgcaaagctataatgggagattgaagagaatccaaacagcaggtccacgcgtcataggggcaaagcgagagaaggtgagcaggctgggcacttggcaaacg

SEQ ID NO: 64916 - DNA, 617 bp, Zea Mays
gacacgacgatgtgcgtatatatatctgtatctaccgtccgtggatcgaaataacgtcccgtcccgctagctcccgcgtacggcgtatcgtatggatggtatgcatgtgcgcgtgtgttgccagctgagctgcgagagagctgaaagcagcagtggttcatacgccgagagcacgtacgaacagtggtgtagtagatgaacagcgccttcaattcagtctcgtcaccagccaactacgttagggcggacaggcgatgatgttgcctggcaatgttggcccacagccaggactagctactggataggaggtgcagcggagggccggatcgtcagtcagcacgacggttcccttcccggtccggtccggcggacccagccctgcacacgtacgttcgtgcgcgcactggacgtctcgctcgctggcaccagaaatctgagatcccggccgggccggccatgcacatgcccacctgcaagctttgctttgctttgctgcgcttcactgttccggttaacgcctttgctccatccacagggcgcggtcctcctgctttgtcgatcactgaatccaggggcgaagccagcatttgagattgagagggacaaattagattaag

SEQ ID NO: 64917 - DNA, 390 bp, Zea Mays
gtgagtttgatctcatccttggcgtagagttcctcagtacactaggacctataatgtagaatttcaaggacatgtgcatgtccttcacacgggcttcccggtccgtgcggtggactggcttgagctcgcgcaggggccaggcaaccacaccgaccgcctgcgccataccgtccacacccggccagccgctcatggaccgcctgctccagcaatttgaggtggtgttcaccgaacctgcagggctgcctccactccagccatatgaccaccgcatccatcttcttccgggcactcctccagtcgcggttcgcccctacagatatccccagctccagaaggacgaactggaacgccagtgtgcggccatgctatcccaagacatcattcggc

SEQ ID NO: 64918 - DNA, 796 bp, Zea Mays
tgtagcggcagttatttttattttaggacggatgtggtgtaaaaaacatgaaaggcgcgcggtagacgactgactgacacacgtccgggaccgtccagtgtctgcactgcatgcatgcagcccactcagaaggccgtcctgatgaccaccgccaggaagatcctcagtgtcacatggtttttacttgcagttaatgacgcagctactttgtaggtgatgttgcaggccggggactactgaagaagcgcatgcagcccataccatatctcaggcaggcaggcaggctcagccgtcaatcgcgttcgagtgttctccattattatcacgacgacccaggaccaggaccgttagttgcacgtaaatttgatttgcttctgtccacaaagcctcgtaaccttttgttgctacgcgctggagaagaatgcttaattaccctgcatatggtaaagttgtagtagttcacagacaaactttaacctgctgtgtccattcttcaacagataggacggcgctagagatacaaccttgctttgcaaattcttcattcttcacatagtacacttgtcttctttgtctagtgtccggtattagacaaaccatctatttgtcgagagtgtgtttctttgcctagtgtccgaggatttgctctcggcagagaatttagcactagggaaagatcgtatgtccggtagtgtactactggtcaaagtttaaaatttgtgcagcctacaggaattgacatatttctttcttcgtttcctggttgaaacgactatggaactactgctgacctgct

SEQ ID NO: 64919 - DNA, 1274 bp, Zea Mays
tctgttgatctattatagctgttgcccttgttgccttcacattttatgttgtattgtagaagaattgaagctcagatcctttactaatatgcttgtctctcgggttgacaattcattagacatacagttgttggttgggtacttgctttctcggtgtgactttccaagagtgcagaaatgatcgatttgcagaatcacactccatttggtttgagaagattctgagtaatttgcaggtgatgtatatacttctgtgcaatttacgtagaatgtatttttgcaattttttaacttactgtgtcctcagaagttagcttgttttttcattatattcagtgctgttgtgtgttacactcttctccttgcattgatgcacagctctctggatacccgagagaaaaaaatgccatttcaatttctgagcaatcccattattaattaaagatgtattaacatatttcaaatgcttgctaggatataccatgaaactgatactgtgtctttgggaggtaattgaagtgatctgcattttttcagttgtattttgctacagtgggcttcttttactgctatgtgctatgaaaaccttctcttgcaagtccatcatgctgtctagactctagagaaccagtaaatttcagacatggtttaccttggcaggagttatatttatgttgtactgggttttcaagtgcttcaggaataagaatagccatagaatctttagttttacgacacctctgaaaaaacaggtctaacattcttctcttcagtatcactacttgggagtaatactcttactggttcacattgtagttgaatatcaattaattcttcttgattgatgttgccttcttaggtagtcctgttttttgttgttcagaacactgtgctattacttcttacatattgctatttttttttgttttctgatacatattacttgttttaaagtcacatgaataagacaaaggaaaaaatgtaaatgagaacatgcccgtcaacattttcttctaagttttggtctgtctattatcttcggatgaaagatcaatccatttgaaagttcatgtttggtacacttatctgcaaattcataatctatttgaatgttaattcatgtcaaaatacctcttttttaatgtccgcaaaccacaacaaatcagtcttgaactatggttcatcatgtaatgcaatccatctcattcagtatatcgtcctagaatgaatagccttcaacaaacagtacgggttatggcaatattttcctttcc

SEQ ID NO: 64920 - DNA, 1035 bp, Zea Mays
gatcctatcatcgtgcaataattgcctcaggcattgatgaccccttcgagctctcctaattctttttctgcccaagttagtgcccctccgacatcctcgctggcatatgatctccctcccgaagtagcaccaacagaggagaaaattttcttcagataatcacagcaccgggaggcgatcccgaagcagtggtctcgaaggcgcctcaaggattccaataactctgcattttcctcatcctcgtcgtaggaatgggcgggtccaccagtatctgcttgaagtgcaaagcttggctctttggccccttttaggccccaaggatccgccaccttcaacatattttccttcatcttttcctcctttggcgatgaagccccaaagactgcctccataagagactccatttatgggctctccccttcagatggggattcctctacctccataggagttgaagcttgcccacctttgcccgtgcccttcgcagttagcaataggctagtcagctttggtcctaggggacttatagtggaaatgagtagaggtcaagtcattacttcaagaatacgagtacaacctagcgacgaagtagaagcacttcccttcccttgctcttgtgtagttttcttcttggtctttgtctcggtaattctagctttattttcttcggaggggtggccttttttgaaggtgactcttcgtcaccctcagtttcatcatccttcatctcatcattagtagccccaacttgtttgtctttcttggaggttttcttccctaatacctttgtacttctcctttttttctgcaacttcggcgctggtcactggttttgtgttgttcgtgtattcaaatccgatggtattcatcactctgttcagccttaatttctcgcggtcccctaaggttgacgccatagcttcgtgctccttgacaagataatttctagcaatttcattgcatttcttctctacaagttgtaaccatcccaatgagggagctttaaatgaagcttgctccttgaattcgaaggct

SEQ ID NO: 64921 - DNA, 908 bp, Zea Mays
cacgatgtctcacggtggcgcagacagatgatttgggggaaccccaaattcagcggctgtagtggctaattgaaggtgggaatgggtgctctggcttcgtgataacatggtgcagcagaccgggccatcaatttataggagcttaaagtggtggccagtgaatttggtcttgcacggtggcggccggagaaaaaggagatcactggtgcaagcgattggtggcatctaccgtggcggctctccgacgatcatcggatatagataacctgagctattgcgacgtggttaagggcctgaggcgtggcacagtcgcggtgaatgacgcagactccggtgacggccgtatagccacgtcgccggcgcaagtggtcgagggacagcgaggccacagtaacccaaacccatccgcgacgagatcttttcatggttgagcgaaatccactcgcctgaggcacgaatcgcgacggccggcgcgaatccgggcgcaaaggatgccagcggtgagggggctggacctgggatcatgttcagttcactgtacaatcagactcccttcagacgcctgacacaacaacttgcaacacctacatctcggatttttgtgtaaaaactcacccatccatctgtagcaaacttgtagccctttatatcgactacaattctgctatagcaattaccctcaatcgagcagtgaatctagctctaaatcaagctctaagttcatccaacttcactgttagtgaggattcagacttagggttgcctgacagcccgactttgtgcttatttttctccaatttctattcagcaccagtgctcaatcacttaatcaaacttgttctcctatgatagctctacaactttgctatattgactttgagcaaaaacttcaagaatcctgagatgta

SEQ ID NO: 64922 - DNA, 356 bp, Zea Mays
gtgccacgtgccttgaagcttcaccacgtcgcagtaagccgctctatattgctggctcgtcgccggtaagcctgccacggtgaaagacacgcaactattgcgccagtgatcttccctatctccggccgccagcacgccatgaccaaattgagagccaccgctctgggatactataaattgagcacacccctagctctgttaagtcatcacgaagccaaagcatccgctactgcctccgattagccaccagagagctccaatttctttctctccccaaattagtcttccgcacccgtaaacacctcgtcgtggccagatgcctacaggtcagttcaagcatccttgcttgatgttct

SEQ ID NO: 64923 - DNA, 530 bp, Zea Mays
catggccagccatccacaggtcggtttgtgcttctctggttcgtgttctagcatccttagggtcttctgttgctcatagactcgatcaattgaacgctaccacgcttagtcatcgagaacagctcggcctatcctcggttttcgccatcgacgtggccaggggaattcagggtcggattagctcaattagggcatggactaggctcgtttgggtttggagatgatgatccgatgctcggtttcggcggtcgtcgccattttaagcgaatcccagcgagggggtggccggtggacgagcgcgccgtcaccagggaccttatttgtgaagaaatagatgtccacgggcttaactgcgattgttagtgagacatcagaatagtatttaggggctctttactggttattaaaatagttaggggcctctgcgcaaaaccgccagcgtgggcgcgagcgcgcgcgtgtttcctctgttcatgaactggcttgggccagatttggcccatcacaattcattctttttccttttcttt

SEQ ID NO: 64924 - DNA, 673 bp, Zea Mays
ggacactaattttggtatagaaactttagatttctttgatggtcgtggagatggctgtggagaaggtggatccctgaagggcgatgtatgtggtggagacaatgggccaccatgaggatgaggagaaggagggtcagaaagaggatgagaagcagcatgtgaagtttgaggagttgatgatggatgtacaataggaacaacaatttgagaaggcggagacggttgggcctgcgatgatggctgtcgtggtggatcaaccaattcgacatcccttcaaggccaaaggataaaattcttgatagcttgtccaagtgtctcgataccttcgggcccagggatgtctagcatgtcgtcctcgtatccttggacaactgtcgtcacttctaccctgcaatattcttcttgaatgtcgtttccatggaacttgcgtcctgggatcgcaaggcctgtggttactttctttgtacactgattgttaataccatatcttataactagtgtgcatgccacaggccttgtgatgtcatcaactggatagcggaccttatttcccgttgacgcgacagagcttgggatggtcgtaccctcggtggaagccgacgtttgagctgctggaattatttgcatctgtggagtggtcatgtgttgaacagacatcacacttgccatcgcc

SEQ ID NO: 64925 - DNA, 437 bp, Zea Mays
ggtaactctcaaatggttttaagagtcgatatggttttgaagttttaagagggaaattagacgatggtgctagttcgataggtaatatatctctactactctataagttcttattgtaggcgtccacaccacattcatggtgcacggttctgccctgcagtaccttcccctcctagaaccttccatcgacgccgctccctgaattcctccatgccgctccccgaaatcctccatgcccccgcgcctgaaattcctccttccccttccagaaccttccatagacgctacgccgtgatcccttccaccggccattcaaccatctgcttccaactcctcggcgtccaagttgtccacaagcacaagcagggggctcttccatccatggctcgccccgcacaggcagggggcccttccaacgatggagcacctcgccccgc

SEQ ID NO: 64926 - DNA, 284 bp, Zea Mays
ctgcacaagcgttgactaaatggctgaggagaaggttgttgaccctgctctagctgggttttatgaggctatggagaaaacaaacacagagaagatcaccaatgaaatgttggctgggttatctgagaattctagtgaaagtgaaagttttgatttggaaagcggaaacgaagatgccgaagatcgaccctggcggccgagccataccatcttcggaaagtcatccatcaagcaaagtcagattgatgctatgaaggggagatatttccgcgatatttctattg

SEQ ID NO: 64927 - DNA, 403 bp, Zea Mays
gtgattattttcctattttctcggttctctggattgggcgccaaattctggaaaacacaggggttctggtgcaaattgtacctagactcaggcaaccctgactatggactacgggtttattcttacaaagtgtaagggcttctttacaaattctacggccgaaccagtatggacagatcctggtcgcccgatcgcaggcagacgacacagattagggccaccaacatttgaaccggtacgcaacacaggtgcacggatccagatccaacggtgcgaatttgattaggaatgatgagatccccaccctccaaacttagatctacgattcctctctggtatactcatgggtgtgcgcaagggccgtccgataggagatcgatggccaccacgcgcctcactcccc

SEQ ID NO: 64928 - DNA, 327 bp, Zea Mays
cattaattaatcaataaatttatcatgacattcgatggcagagagaagaaccaaaaaataaaagcaagcgagcgagcaatcatcaccttcatctacggtttgcctgggtgcctagagggcatgcttgagaatttgcatgttcatccccttgctatagctccctgcgtgtggtacctctatgatgctattcgtgatggagaatctgcttatggaaggctcctatcgccacctgagatggcccctacacatcattttagattattactaagatgcacaccgttttaaattattactaaagtgtgatggaaatgaaataaacaaccaaaa

SEQ ID NO: 64929 - DNA, 601 bp, Zea Mays
ccaatcaattgccttggcttcgttgtaagccgaatcaaccaggagaactttcttggccctagttatcagattttcggtgttgtgaaaccttctttgctttatccgataacccgatgcatcctgtgccagattgttagctctacaattctcaactcgagatatatgccgaatgttgaattcatcaaaagaatgaattatgtcccaacatttttcaaggtacccatttagagtaacatctaaacattgatactatcccaatacatgttggacaaccagctgagaataaccaaatgccttcacatgctttactcccatacactttaaagttccaagccgaacaaaagggcctcatattcagcttgattgttagtgcaataagtttctaatcgactagcgaagtcaaagtaggcgttacttggtgaaacaagcatgatgccaatcccttgtccttcattgcaaaccaattcatcaaagtatagggtccagggagtaacaatgaggtatgatatatctagtttataagtatcctcaatccgatgttctataataaaatccgctatgacctggcctttcatagatttcaatggttcataggccaagt

SEQ ID NO: 64930 - DNA, 532 bp, Zea Mays
gttttgagattttaacttatttgggcttcattttgactcataggcctagtttagggtcaagtactctaccctagggttactcacataccaagtcacatcaatacaacttgtttgaaatttttatctagtgaatgaactctaggtgtaacaaacatatgatatgcccatgcacatgatgttatgctcaagttttagtgacagtaacactagaggtgttacatccttccccccataaaagaatctcgtcccgagatttaaagtcctagggcaagtaatggaaaaggaaacacgtcacatttttatttccttatttcttgtacaaggcagggggtggtatgggtctattccattcttacaaacaactgtacatatcttacaatttacatgaagctaagaagccatggaaattcttttctaaaaagtcttgggtttcccatgtagcttcatcttccgtatgttggttccattgtatcttataaaatttgagaactcttcttcgggtgatcctgtccttttgatctaggactcgaac

SEQ ID NO: 64931 - DNA, 312 bp, Zea Mays
gcgtggtcggggccgaggacgggcgcagcagccgcgcagattttactgtctgtttcatggcgaagactgcgcgcacccaacgaattgcccggaaacgaaggctaccagggacaggatgtctcgggcacagcccgccgacaaccccagagttgtcgcgcacacatatcaacaccacctcccacaaccatacaaccacggccccgcctagcatctacccaaccacgcataccaacaccaccaggaggtacaagtcgtaccacccccacttctgcctctgcacccgcatcagccaaacatccaccaccaaaatca

SEQ ID NO: 64932 - DNA, 366 bp, Zea Mays
gactccaaggagtcgcacgaaggctcaggggctgctgtcgggtacctaggaacggggtacccaaagtgagacccataacctctctttggcccatttgtcgaggaagtctatgaggcagggcgaacgaccaaagtactcgagcgagcctgcgaggcggggtgaacaaccaaagcaccgtcgagcgagtctgcaaagcgggccgaatgacaaagtccccatagagcaagtctgcgaggcggagcgaacgaccaaagcaccgtcgagtgagtctgtgaggcggagcgaacgaccaaagccccatcgagcgagcctacgaggtgggacgaatgaccaaagtctacgacaagcaagtctgcaaggcaggcc

SEQ ID NO: 64933 - DNA, 1163 bp, Zea Mays
tgcaattgttcagcgagcaatgttcttgcgcagttttcagcggtccactgaccaagctatttttatccttccttccattgacaaccagagaaaatgagcatcctgtgtgatccacagtccatcaaaatccgacacaaaccattggtctgctcccttgattacgtaaacaacgtggacttggaatattgatttggagttaaacaagtgataggccttagtggctgcagcttaaatccatggcatcggcatacaatattttatctctatgtattgcagctgcagtagtccgaacggctttaatccagccatgtctcctgtgacactagctaaaaagattggattgctcggctaatagtaggtgacaaggttgtttggacggcgacgttcacatgctggcccccgctgggattgtggttgtcagttgtttctcttgcttaaatggctcgggctggtggttaagacctaaacaacaacgattcggtggggggtgttatcgatgcgagcctttggtagaggctgatgtgattctgatttctaaaatgtgctcatagtggaggaggttggggtattagtgtcaatttaaattgcgaggttgatgtcgagcgctgttgtatttcgagagttggtttcgaagacttggatggattttttgttcttccataggaagaggttcatgaacattgaggcgtttatttatgcctacatatgtatgtatgtggttcctctgttcagtaaggcccgtgaatggttcactggagaaatgcagctggacgacgtcaggagccctgggcgtcttgtaaagataggaaatgccatggaccggtgcaagaaactctactgaaatctggtcagctatctccctctcacacacttgctcattctctgcttaccggagccgagcagatcacacagtgagtcagtgacgaccgagcgcgccttggttacgacatctcgtcgtcgagtatcagcacgcaatagctgacccggagcagctgtggttagtgcggctcaagagctgactgcttgtgttttcgctactagtattctggaaggaagcattatgtgactgtcgccgaagcaactgcgctctccaagtccagccccctttcccttcgcacacggttctctggccttgtggttccgccgttgcaggttgggacagc

SEQ ID NO: 64934 - DNA, 502 bp, Zea Mays
aatgggtgaaaatgctaactcgcacatttgaaaagttgactcacttagaggatttaagaacttttaaaatgctatgaaaagagggattgatgggatatttttatagccatcagacactatgcattggaccttggactataaacattagactaaacactacacataaaataatgttgaacatgagagctatctaagggctagatgcacttgtggtggaattgcccctgctagcagcgggtccactaagggcccctaggctcagtagcatgtttgggactttagcctttcaaaaaggaggatgtcataccactcgatggtttagggcacaattgcatcgatccatgcaagagaaagccacgccatatttggacgatggtgggattacacccactcttagttgcacaactagtcatcagtagcagcaatagggcatcaaaagttcaaaacaacccttggtctggtgtgaaccatcagaatagtatggtgttgatttggcctctat

SEQ ID NO: 64935 - DNA, 364 bp, Zea Mays
atttacatatttgtacaagttctgcaggttcatgagcatgttctctaactattctacaagtcagtatctgggctatcttctgggagttccacgttttaagaatgaggtagatgccatgcctgttgacagaattgatgcagtggaatacatgttgtacaggtatatgcaataatccatgccaataaatgtagtgcccacaccttctttacgatgtgcctttgaaacctacattttcacagaatccagctttctgcaccacgtacttcaggactatctgatggtagattcattcatgaaggatttgttctgaagcttcgtgtggaggataacattgtgggatttggtgaggtttgtctttaccact

SEQ ID NO: 64936 - DNA, 532 bp, Zea Mays
cgggaaactacctctcccattttcgttaccattttttttaccgaaaacgggagcgggagcggaaaaggcggtagcgaaaacggttacggaatatatgggtatgcgaaaacgaacaaatacgaatgaatattcaccgaaaacggacggtagccagacagtagtcggaacaactacatgcacacatcagtgacaacacacaagcgccagaacaaaaaaaacagcgcactacacagtacgcccacgaccaacgcgaggttagcagtagtccagcgtctaggccagcagcttcacttattagggtccctagctccatgaggcacatgcacactacagagtcacacaggaaacagagctacaatgtctcaaggcctcaagcacagatgcagtcgtccagccgagcagaggcagagctgctgcacacacacaggttgtatattcgtgcacttgaaactccctatgggaaacgacagtgaccaatgggccaagaattcatgggctttgatacatgcacacgatccgcaaaatgtaaaac

SEQ ID NO: 64937 - DNA, 1750 bp, Zea Mays
ggaggtatgagaaagaaccttataacaaaattgaagctggcatgacggacaacaactttgatgtagtcagataaacaagttgtcacataaaaaaattgagaaaagaacccctcaaatcattatatcaggcgtgctgaatgaacattgccatggtacagtgaactgaacaagattgagttccgtgtgcccgtcgccgacgcccctccaccgtgattcaagctcgcgccatgattggtgccactgagacgtggatcaatggaggggtaaaaggatctctggctcggattcgttgatcgagttaccgctctagccacggacaccaattgtcctcaccgtgtttcaatcactgtcgccgtagcaagccaccggacgctccggccatccacgcagctggttggaggcttccgtgttgcaccgtcataaagggtccgcggtaagcccgccatgttactggcttgaggacaccgtaagagctaacgttgagctcctcgggctatcgccgccgccgtgattcagcggtcaagttgaccaccgtcgtggtgactccctttaaattgagcttgctctcagtctcgtctctttgttacgcacccaagacaagctttatttcccccgttccaccatcggtagccaagaacacaagtttttccccatcagtggtcaccaatgccgacgagtggtgcaaccgcatggtcagcctttcctaaggttggtcatccttgcttaacttgtgttttgcagtctataggtcatggtgaagcttatgtgcttgcctgtttgaactgtaccgtataaggttaactggaacaccgtggtgtctttcggtgaacgctgccgagggcagtgtccacgtcgaccgaccaaactgtagcttctccgggcaaacctaggtgagcaccgtatgtttgatgtattactggtactcattgtgaccttggatcgaaccctaccatgctcgagacctcggtacatctcaccggagctcatcgatccaacgtcaacgtgactagtgtggctctaggtggtttgaggtcgtttaacttaggggaaatatgaggtaagtctcggggatcacattggtaggctcggtttcattggagatcgtcaccgtcgatgggtctaggcaacggatggccagcgctcgtcggggttggaccgtggaccagagtttgcgaaaaagaagggaagccaagggcctatgtgcaactgtcagtgagtggggaaaatagtacttagacctattatccagttacccaaatcggcaggggtctccgtgtaaagtacgtagcgcgggcgcgggtggcctgagcggcggccgttttccctgggttggtgggccgagcccgttagtttcggctcgtcggtgttgaacctttttccttttcttttatctgacaactagtaaattacactagaaaatgtaagaaaatgataaaatagtgaaaccaattttgtagagtccacaaaattgtgtagcttctgataaaattaattgtaaaatttttgtagcatcaagtaaatttctagttatttaaaagtacccttaggaggcttaaaggaattttagaaataaaactataggtccaaaaatcatgaaaatttgtagaaaagatatacacctttagaatagctcatggtaaaagtcttagtctgtttagagttgaattacctagagaactagaacctagctaagtatgagtagtgaaaaccctaaactttgatactaaattagggttagatcaaacttaat

SEQ ID NO: 64938 - DNA, 861 bp, Zea Mays
ctaccgctaacgtcttgtgacttatgagtgggtatgggtggagtccgattggctactgacttggataattgattccttaaaggtagtgggtgataataatagcagttattactctaggacgtgagctaacaatcgtcaaatttttctatgttgtttaagtccaagatttctgttagacataaggattcatgtaaaatacaattgcagtccggtacagtttttagccttgtgccctttgcaaaaaggactacaagaatcatgccttttttcagtgtaagctgttgttgacttgctgagtagtttatcctcagggagttcagaccaatgttaatgtggtaatagagtttcggcgcgtcagctctaaacagaaaactgatagtacattgacgtttatgattagttttgtgccacattctatccaaaagatccagttaggagattagctcgtggaatagtttaactccttgccccttcatctgttttcaagatcaaacacgttttttccacttgggaagttgtttaaattttctgccagtagcagatctgtttagacctagatagctaattgttagctggctactactagatcctcagggagttgagagagcttctgacaacaacaagttcagagttgtaggggatgctaattctttgtattcgtgatgtaagttcattttgccagctacaagaaaataccagttgtagtgtagtcatgaagcatgagacttccagatataagctaaagctatccacgtcagatacatagattttcaagatcaaacacgttttttccacttgggaagttctttaaattttctgccagtaccaaggatttgtttagacccagatagctaattgtca

SEQ ID NO: 64939 - DNA, 1873 bp, Zea Mays
ggccgtcccctccgcgtcttgagcgcgtggttgtgtgcggtccacagctacatgagatcggcgaggcgtgctctggacggcttctttcaggtacgcggttagggtttccagtagacttcttaggctcgcattcttttccccatcttgcttcgcgtctttctcgcctctggtggcttccgagttcgtcgcgcgaaagtttctgtggggggtggatctcctctccgtttcgcccgccttcgcttggtgaggagtggcctcttccgggccgctctggtgtgtcggctccgatggattcgaaaaatcgaaaccctaactgggatcgatggggtccgaaggaggcgccgcagggttctcagtcgtggggaaagaatcggaacctcagctggcgattgaagactggatccggaaaatctgatgtcaaagaagatattcctgtctccactcccggtgatgccggtctgccaggtatcctcaaaacccccccgccccccattctaaaatctgagaatgatttggtgcgtagggttttttgccagaaatgtggtttagatggtcatcatgctagggagtgctttaagtctttgtggtgcgaaatctgtcgcaaagaaacccacaacactgctcggtgtgttcttcccaaacagaataagcccagtatgccgattgttggtatggtggcagatgggctagggttttactcctctcatttcgccaaacccttatccaacaaacctaaacgcagttttattggcttggttaaaatcgttgagggtttgatcaccgccgaggatctggagaaggatttcggttttcactttccttggggccgcacttggaaagctactaagtgccattctggttttctcatgcaattcccctctcaagagagattggatgaaatgattaatttccccgaattgaaaatgaaattgtctggagccaaaatctctgtctcttcttggagttctcaggctaagcctaaatctaaactgcattctgtgtggattgtggctgagaatgtgccagaagagttgcaaaattatcaggccatttgtgaattgggatccactattggggcagtggaagaagtggatattaactctttaaactctaaagaaattgtgaggtttaaagttcatgtgaagagtgttgctatgatccctcctatcattgaagttggtgtcaaaccttttttgtatgacattttcttcaaaattgacaacattactgatgaaggttggaatgatgactctgttaatctgggcaagagggcttcggttgatagacaagggtttggtgagatctctcttggcaaatatgctaaaaaggccaagagtggtgatgaggactctggcaaggatatcaagggaaaatctcccttaaaaatatcctcaagtcaggccaatgttgctggttccctgtctgaacaatccgaaagcatgaaaatggggaagggttctgaagaccctaaaggttaccttgatagtcagggaaatgaggatgaggaattcaatgatagtgagtatgatctgttggattctcaggagttggatgaattcatcaaggatgatgaatttattccttcccctgcccaagataaaaagaaaatgcatctgagtaatgttgaggaagctagcaagattgctggtggtaaaaaatgtggtcctatggaaggcgaagttactgaaggagtgagaaggtgcagcaggttggaatcgtctgaggaagtgaaaattgctgataaagctgctgcaagagctatggctaaagatgctttcatcaacaaaggtacgtcctacaatcctttctcggttttgaatactgataatgatgttctcatggatgtggctcacaaaattggtgttgatttagg

SEQ ID NO: 64940 - DNA, 408 bp, Zea Mays
caacaagagcagcagggtggacaacagaccgctcttatcgcctgagaggtgagaggaaggcgagaggacgccccaggcgacgtcgctagcgcgcccgacgagagcgagcgagattgtgctactctcatccgcattggagcacgcgtccgggcgagatgcaggcgatgcgcgggtgcaggcggtgtgcggacgagagcgtggggcgagagcaaggttgtgtgttctgattttccacctggccatgtctgtgtcacgtgtgctagtcgttgcacctagacatttttttatcgtttggagaccaaaaaattcgaaaaaattgcaaattgtttttacaaatttcatctccaatccatctataaatacccatacccagaaaaggcatgcttttgaagctatgaaacatcataa

SEQ ID NO: 64941 - DNA, 1287 bp, Zea Mays
cacgggatatagaggtcacccctatatgagtaatcgtaagcatgtgaaatcgccttaagtcgttgccgacttaaaccgattgctccgttagaagggcatagtggtcaccccgagttaagtaagcgcgagcatgttgcaccgtcttaagtcgttgcggacataagtcgattgctccgttagcagggcatactggccaccccgagttaagcaagcgcgagcatgttgcaccgtcttaagtcgctgccgacttaagccgattgctctgttagcagggcatagtggtcaccccgagttaagtaagcgcgagcatgttgcaccgtcttaagtcgctgccgacttaagccgattgctccgttagcagggcatagtggtcacctcgagttaagtaagcgcgagcatgttgcaccgtcttaagtcgttgccgacttaagccgattgctccattagcagggcatagtggtcaccccgagttaagtaagcgcgagcatgttgcaccgtcttaagtcgttgccgacttaagccgattgctccgttagcagggcatagtggtcaccccgagttaagtaagcgcgagcatgttgcaccgtcttaagtcgttgccgacttaagccgattgctccgctagtagggcatagtggtcaccccgagttaaataagaatgtaggtcgattatgaacaaactgagtattcttgaagccttttttattgatgacatatttcccattttacagagtaaattatcatcccgatagcttttggaatatagctagggataaaacttcctgaggtgttctatattccaggagttcccaatttctgtgccgtccatttgagtgagacgatatgatcccggccgagtgacttctgctactatgaatggtccttcccataagggtgacaacttgtgccgtccctcccccgttagaattcggcgaaggacgagatctcccactcaaaaggatcgtcgtcgtacggccttgtcgtgatagcgtctcagagtctgctggtatcatgctgattgaattactgcgttcagccgttcttcttcgagtacatcaatgtcctccagcctagtagcttcggcttctgctatgctttcgaagaccaaccttggcgccccaaacttgagatcagcaggtaatactgcctctgacccatagaccatgaagaaaggagtgtttccatgcagagctcggctaggttgggttcttaggctccaaacgacgtagggcaattcccttatccattttcctgcgaacttttcatttttattgaagacatttttcc

SEQ ID NO: 64942 - DNA, 524 bp, Zea Mays
ggaagttttgcctctactggcgggttcaagatttctgacttttttatcgatttttcctcttgtggctcttcggccttaccatcttcagcttcggcgggcccgactctaggtatcttcagcactacagttggctcttcaatgctctgtgcaattggagcagcctgtcttgcttcagcagttgaggaggccccttcgccaagttcaggcactatggctggttcaatgtatcgcgaccggtgggtcagaacctttattttcttacttttcagctcaaccgacacaacaatgatggccgaagcggcggcttttcttgtcttctcttgccctagtaacgggtaatgatagtcagggtatacgaagccaatagcatcgaataccctatttaatcttttattgccccaacctccaaaggctacagacagagcattatcttcggccttggagtatgctccaagtagctcatcactcgtagcttcaatacacttcagccagtcgtcgtttggctcatcaaacttctccctaaa

SEQ ID NO: 64943 - DNA, 326 bp, Zea Mays
aaaatctgtccgagtcagaacccgatcacgatgggacgcacgagatttttacgccgtaattttcgggccacattcgccgtttcgaaacagatctacgatttacgctaaaattcgtaatcatttacgctgttttggattacgttttacgctaaaatctgtctgagtaagaacctgtgcctgatgggacgcgtaagatttttacgccataattttcgggccccattcgccgtttcgaaacagatctacgatttacgctaaaattcgtaatcatttacgctgttttgattcatgttttacgctaaaatctgtccgagtaagaatccgtg

SEQ ID NO: 64944 - DNA, 776 bp, Zea Mays
ctccgggtttgcttcaatgcccggtgcgaaaccaggaatcccagcatcttcccagcggagacaccaaagacgcacttgtccgggttcagctttgtgcatgttgctcgcagcttgtcaaagaccagggtcaggtcttccaccagagtcgaccccctcttggtcttgaccacgatgtcatcgacatatatctctatcatgtccctattcaggtccccaaaggtcttactcatcgcccgtacaaatgttgacaaggcgtttctcagaccgtagggtattacaacatagcagtaaagcccatccactgttacaaaagtggtatgctccctatctttcctagccatctggatctgatggaacccagagtaagcatctaagaaggacaaaaggtcgcacccggaagtagagatttgatctatgcgtggaagtggatacgggtccttgagacaagccttattaaggctggtgtagtcgatgcacatctgaagcttcccgttttcctttggaatgatgactgggttggccagccatacagggtgatgaacctcttcgatgaagccaacatcaagcagcttccagacctcctcgaggatgaagtcctgctgctcaacggactgtctacgaggtttctgactcaccgatttggcatcagggtggatcttcagacggtgctcaatcacctccctggggatccatggcatctgcgacggttcccatgcgaaaacgtcgacatttgcccagaggaaggcgacgagcgcgagttcctatttctcctccag

SEQ ID NO: 64945 - DNA, 758 bp, Zea Mays
gttcgccttgtcccatgctctatgtaggatcattttggctgcctgggggtcctggatggccgggcacgtctcctcgccagcgtgctccgtcgtgggaacacctttgccaccgcggtaccaggcgtcgggaggaagaagcttgtgtaccgtcggagtagcatcgtgcagctaagattagaagttggatagttgcgccggagccattgatcgcacaggggatggccctgatcaagttgggcgtaccccttcgatgtattcaatcacggccgcatagttgttaatgagtggccctagttgcatacctagtcacatgtttaatcggggccgtggatcttggatccaacggatagatgatatccctggagcatatcaacccggttgtttttataaagatgcactgggcttcttgatattcaacccaccgtctagcgctataggaagattgtcgcgggcgggtccagatatttttgaaacagcccctgagtttcctgagaattgtgcccgcaagccaagggataattaaaattaggtaaattggtaaagaaagtgatttttagtatgacaataattctataaacttggaaaaatcataactcatttgttttaactctaattttagcggttctgaagcctacggattcatatcggcttgtagaatattactatgcagtttattcctatgttggtgtgatgttaatttatgtttatatattgtgtgattgtattgagcaaatgaacgaggaacccgaagcaatcaa

SEQ ID NO: 64946 - DNA, 455 bp, Zea Mays
gctcaaagccatagcagatagcctggactaggactatttatgtgccaagaggccctatccaaagataccatccaaccatgttatggggacaccgagccctaccacatctcatggccatcgtcttctctacaaatgttgactagtgagttgttgtgtatcaatgaccttgttgcaactttctagggagtggaatatgactctaactagatgtcatattttagtaactaggacaagtagtttgtgaaattatgctatgtacttatggtaatccagtacctctattatgggcagtggttgttgtgtattgtgaactttgtacaagtattagtaggttctagtttggaactaaaatagaccatgttagtgggtaccgtgacaaaactttgttgtcttggtgtgttagactatatgtaatttgaccattattgttgtgttgttgtcatccttgcttaatt

SEQ ID NO: 64947 - DNA, 766 bp, Zea Mays
taatagcccggtgatgacatctgtctgtatcttgtttggtctggaatcaatttgatcggtgaccagttggagcccggccactaaaaaacagagagcccttggctggacgccactcgttcggtactttaatgcttctgctgattgaacttgtgctttggtaaccgccattttggacttctcccatatcagccgatcttccccttttgtcgcggtatattcattgtgtatatgttgcaggtattactgcttcagaaaatctcgaagaatccaggtggtacacccaatgtgtgtgcccaatgagtgtcttcccagtaaaagacgtctatcgcgttggcctgaaatagtaacttgatatgacggagaggtataatactctgcctgagcggttgacttgattccatccggtgtcgtgttacgcgaagcggcgccagacgcctgactcatttccaggcggtttgaattgctattgaagtcttgtgattgttcggtgagcgtgtaggaaatggacggtcgcctcccggcctctttaaatagcccggctgctttctccactcgttcttgttcactcgtcttctcctttttcttcacttcccctccctctgcatggaccatggccggcggcaagaaaggtcatcatcatactgacgagaagcggaagcgcctcccccccccccgagtcctccctcggaggactacagggactcagagtactcggaaaatgaatagaaatagagtctgatccttaaatcttatagtgtaaaattta

SEQ ID NO: 64948 - DNA, 1326 bp, Zea Mays
gctcaactttggagccttgtatctttcaaattctagggtttttgccctaggtcaccacatcaaaattgtagcccaattataggagaacaactttgcttaagagtgcaagccatgttcttatgagaaatttggagataattcagctcaaagttggactgtcaggctggtatagactgaacttcagagggacaatgaccttgatccaggattgagagccatttagactaagatccagtgggcatctaccttggattgctataacagagttgtagctggtatgtagcattacaactttgatgcagagcttgggttaagttgtcattcaaaattgagagaaaactaagctccaaaatgatctgtcagagcgtctgaaactcatcaccatggtacagtagacccgagtggatcaggttgccagcgcggtgggctcgtcgccggtgaatcgccgccgatgatcgatcccttgctgcgattcgtgcaccgtgtaccacagataaacttgaccgggtaaaaatccgatactggattgagccacggctaaggtcgccacacttcaccccccagctcatcgtcggttggatgacctcgtcgccgataagacaccgtcgttgcacaccacgtgtctcagcacgaaactctcttgcagtgactcattagttgcatgcccggcgatcaccggagtcactgccacggtgaaagccacttttccccggattgagctcgcctcccctctccggccgtccgcatccctcgaccaaattcttcaccgtcgttcgatgcgcctataaattgcgtgtgccaccagctccgtagggtagtaagctgtccagccaccacgaatcagccccggtcgttcactaaactccacgaatttggatttctccccaaaactgtttccgccaccgtaggatcaagctcaccgtggccagccctttccaggttagctcgtcgctctctctcccttgtttgggcactatggttactctacgatgcttgccgagccactgaattgaattaggggaccaccagtcgccgggaacacgatgatctagccgccatgctttcggccaccgtggccagagctccgtagttgatctcagatgcaattgagttgggggaaaagcttaggataggtccgatttggtgtctgctgctcgggaaccctagcggttgccctaatcggccagtctacgagctcgtcggagctcggccacgcgtgaacaccgtcggggtcgtgtcgcgtaaaggaatagaagatggagggtgtttctgtaaaccgtcagcgacacataaaaacagtaaaggaacttgtttcctgttacccag

SEQ ID NO: 64949 - DNA, 520 bp, Zea Mays
aagaaattggtaaaaagaccatgaaaaacatggaatcatggcttaggccaattataaaagttgaaatacactaactaagctacaatatctattagaaaagtttggccaaaataattaattaaaatccccaaaaaggccatccaagtggagctctctagggaaatctgaaaatttagagttctgaatttctgccctcacctagaacttgagcacgttcaccttgatccctagctcaaatccttaagaccccattgacaaagttgtgctaaattaacctctctgcaacgtgtgtgaagatggcatcgacattcatgccatagacacatcaaatatggaatttcatcttgggtttcagtagtgagacaaaccaaacttcatcactccatatcttcggctccagtcaacaaaacccataagcctccacacataaacgacaaaggaatgtcaggtgaagagatctctcaacgggatcatggccataatcgtgaagatttggagctaatccacgcttgaatttgac

SEQ ID NO: 64950 - DNA, 368 bp, Zea Mays
cggaaggaaaacgaaatatcttgatattccgcttaaggacaacattaaggggtggcgtcttgagtggtttattgtggaaaaccatggcaagtccctcccccctcggtcgggaagacaaccagatgtgcacactccaagttggattgagtctcctactgccttggaagtgtcagaagctagggttctgcttgctgaagtctgtctgctgaaggaaagaggtctgaccgtcgaagctgtggttgctgactttgtttttaagaacatccagccctgaaggacagagcatacccagcttacttgtacagtggtgttaccgactcaactcgggttactaataggagaattcttgctgaggatttagtgagccg

SEQ ID NO: 64951 - DNA, 415 bp, Zea Mays
gtggccaatcacatgatgagatcaattcttatataagtcttataaattgggtattacaatgaggccaaggtgtatgccattcagagttggccaacgccttcgacggtgacacaagtgcggagttttttggacttgtaggcttttatcgccgttttgtgaaggatttcagcaccatcgctgcccctttacatgagctgaccaagaagggcatttcgttccattgggggcagccacaagagtattcctttgcacttttgaaagagaagcttactcacgcaccgctactccaacttcctgatttttggtaatacttttgagcttcaatgtgatgcaagtggagttggtattggtgttgttttgttgcaaggaggtaaacccgttgcttactttagtgagaaactgcatggacctgttc

SEQ ID NO: 64952 - DNA, 751 bp, Zea Mays
gaggggaccgccgcagcacggcctcacgggcgttgggtagggtagggtcgtggcaggatcgaggacggcgcatgcatgacgtagtagtacacgggtgggtttgctgatgtgtattgtatggctgttgcaagctgacgtcatcatgcaggacagttgttgctggtgattgggtgaagtagacgtcgaccgaaccgttgaagcaggcggcgaggtgagaccacacgtacgttgtttaagtagaccacaagtcgaagcaagcagtttaactagagtacagtcttgaattcatgatggcgcgcgggctcgacgacgatcacaagtcgcagcacgacgtacacacgccatctcgcaacgttgctggtttcgaactccatctgatcctgtacgcgtgtgcttgtagcgatgcgtggtggatttacgattttacctaagaatatatacccttctacaagttttcatatacatagttctttcgatctcgatacgagttatatcccaaccatgcgtcgtcaggggctcatgacgtcagccgtcagtgtgccgtgttcgctcggtcgtcgtcgtactcgtcctctaggctccgaacgagattagattaatcggaagtggaaacatcgtgtatgaagttaacggagcacaggtactcaattctaaaacgtttggacttcacttgccgcgttattacgcgggccttccatcgttctatggcgtgattcgaccagacacatatagattttttttttcttttttt

SEQ ID NO: 64953 - DNA, 1092 bp, Zea Mays
gaacagtgttaggctgaattcagcccaaccggcctgcagaagggagaaagcacgcgcgcgtccgcgctcgcgctgccgaccttgcaaaaaggcccctgctgatttgaataacttgaaacagggtcgcagtactattcctagagtcgctgacatctacaaaaacaaccccctagttctatttctttacatagctcggtccacgacgtggagcgtcggagcaggcactctggcgagctcactctggccagaatacgccacgaccaatgctctaaattgttttactcctaattcaacaccgaagaagcatttcccctcgatcaattgcacttgcggagctctaaatcgtcctgcccacggagacagcgcgaacaacggatgaacacgggtgttcccgacgacctggcacagcttagctcaattgaatgggtcgaggagcatcaggagaacctaaggacactgaaacgggagagcagagagcatgaacatacctgggagtatctagccatggagtgcggaggattttcgttcgccggtgacaaaaaagggggaaacggcgccgcgacatttccgggcggaattaggaggtgaggctgggcctacacggtcgcaaaggactatggtttcaccgtgcacaaccagttttgggagaggtggagaggatttcgtgaatttgtgcttcaaccgatttcactggtgaagatgtgaatacctcgccatgggtggcacggctatttaaaggcgcggtggtccggctaacgatccacgaccgcggattacaccgttcgtgcatggttaccacgtaaagaagggacacaatgagggaggagcgaggcatggatgacatggcggcgaaaatgaccgagccacggcggccgccggtgaattatctccgactaggctcaggctaggtccgcgaggtcgcgacatgtccgaagttacctccctgcgaatatccacggcgtgccaggcatgaatcacggcgatcggcgcgaatccgggcgcgcggatcgccagcggcgagggggactaaaccctgggatatttcagtgcactgtaccattggaagcttcatcagttgttctgaccgaggat

SEQ ID NO: 64954 - DNA, 512 bp, Zea Mays
ttagattaactcgggcgagagtccttatcccatacgtatttatccaactaactgcacatgaatctattgggatacgcttaggaacgggtccagacttaccctccatatatatgaaggggtataatcgattagaacacaacacaatcaatccaaatcaatacaatctactttatttccttcgttcttcatcgcattaggagtaggagtaatttagaactaatttagcttttccccaaccccaactctttatccatcttggactctatgtcgtcttgggacgtcctaggtggcctactgaccctggggcacccactagaactctcctcgtcgatagggtcccttccgtggatgagttctagggtttaccgaggaggaagacgactctgtgcgtcacggagcatctggtgcggcacaaagaggagccgctcctataacgaggtcacggatcatccggccctcggatgtggaccgtccgcgctccaccagagagcaccaccgggcggttcacctct

SEQ ID NO: 64955 - DNA, 1061 bp, Zea Mays
ggcgattataggatagttaggatagaagaatttgatggcatcaaaaacacgatttatcgagcgcctctttcgggcctcaaaggcctgctgtgaagatttggcttctgacttgctaaaattaccaagaatttcattgcattttgcttcaacgtaatctagccagccatcgctgggctctccaaagtcatcttcgaatctatacttatatcgaatcctaattagcctaggctcagcatctgaagcatccgcttcagacaccttctgcatatcccactcagctgccaatggccatgttttaaaagccaagtactctagaataagatcacttgtaccaatataagtgctaatagcattaaaggcaactatggtagcttaggcttcaaagataacataacatgttggtttcttaaatccaaaacttataacaataggagattgaatgattcccgatatatcagctcgtgcaggcaagtcattcttcatataaaaccattcttttgcccacttatttgaccacttgctttgataggcaaaggccaggaacattaaactcctttggtatacgaagttataacaaccaaaattattatagagctctcttgttgcctttgtctgaaaatgcagttcatgaatatgactgaaggccacgcagaaatctttggcatcaaattatgttccttggcttcgaacaacctagataaaaattcctaaacgcactatagcgtttggggtaagctgatggaaatagatgttaaaccgcttcaacacttcgactaccatcttatgcaagggaaacctaataccaacctttaagaaacaccggaacacaacaacttcatcctccctcggacttggtaccaactcatcaccccctaaccgcacctagtcaatattatcatttagccgaagcggttaagtacctcgatgtgcccttctttgattttggattttccgaaatccacatggatgggcttcgtagggtgaatgaccgtgttgtcctcttcaagatccatttccacgttgtctttggattggttcagtgagccagcctcggcataagg

SEQ ID NO: 64956 - DNA, 525 bp, Zea Mays
atcctcttcagcaaatttgggaaacgacattttcaataatacctgatttgttgcttgcatgttcatcctctcctcatgttgtcttcccatcatcggaacctggtgattcctcctctgattctctcgctccatctgctcaccctgggcgaaggtgttccgcaggggaggccttcctccagctcgattctccagatcctcctaagtgtttcacagatctcttcccatctgctccaggcgcatctgagcaatctcccttccagtctcttccatcctcaggtacaactcgttcctctcctcggcagcgcgctccgccacacatgccgccaaatcggcctgagccatgagttggagttgtaccttctgcatgtccttcacttgtctcgtcaacacctccaacgtctccaaaacttggctcaatcgctcctgtgtagtgcgatccttctccgccattgcttcgagcaccaaacgtgtttgagccgagggcttcacttgaggagctgtgttgcccaccgccggagatcgacg

SEQ ID NO: 64957 - DNA, 883 bp, Zea Mays
ctgaactctatggaatcattggaattgttgcacattgcatggctggagctttgatgcttgccgaagaggaagcacatctttagggattggctgggtcttgagggctttcctcttgaatgccctagctcctagtgattagtttttttgtcatttatatttcagttacgggtgtgtatgttaagtgaagcaaatcggtgtgctgaagaccagtaaatgtgacaagtgtctattatttactgtttggcacctgtccttattttagcaatactcatgccttcttgttttattttttctatatcagtcagattggcaagcaatacgaggagcccttgttggttgcctggctttattgcacaggaaacatggtgttggttgtattgtgattgctgatgtcaaaagactagttgagtctttcttacagaatgttccagtgcagtcacttgcagctgctgaccgcaaggttgatttgattattcagtgcaaagatggttagataggtacatcttaaaatcattatctgatgtactgatacctttttccatctctgtttgaatccagctgtgctttgaaattctgagctgcatattggatcggtacccggaagctgtaaaacaaatggtgtggtgattactctatatctgaacaacactggatcactactatattggcaaaacataattgctatccgtactggaaaaaagaatgcattcatgagttctgtctaatcataaactttctagctgttagagtagtatattgctctctgcaatttatgttctcttctgttaaatgtttagggggtgttttttattttaatcttttgggtcgatattgtcgggtacccaggaactaggtgcccaaagtaggctcaagactctcaacg

SEQ ID NO: 64958 - DNA, 778 bp, Zea Mays
ctcaactaattcactagcggagctctaactcgctctatccacggtggcagcgggcaccacggacaatcgaacgcgttcccggcgatctaaggggtcctagttcaattggaagggtcggggagcatcagaggcacacaaggacattgaaacgaaagagtagagggtatgagcggacctgagatgagctagccacggcgaggcgtctttcacggtggcagaaacagaattgggggaaatgggaaattggcgagctctggtgatcaattgagggcatggcttggtggcttggtgcttgactaccctacgggcccgtcggggtgctcaatttatagtgtgcttaagcggtggcctccaattttggattggcgcgctggcggtcggagaagaaaggagtcactggcgcacgagattagtggctgcaaccgtggcaacctcaccggcgatctctggataagtcagtacgagtcacggcggtgtggttaaagtgttaaggcacgtggcacaagaccatgaggtgtctaactccggcaagggttgattcaaggtgatcggggtagagcggacacggtggccagacaaacagtgccttaagcatccggggggagaagatcttttcaccgcggaacgttatccgggcgccggtgagcacgaatcacctcaccggcgtgaatccacgcgtggggtcgccggcggccggttcactgaaccaatagatttttctggtcactgtaccatcaaattcttcttcagtcagtctgacagaccatgtttggggcga

SEQ ID NO: 64959 - DNA, 601 bp, Zea Mays
tcggctgcgcgcctgcgcgggctagcagcgtggaaggacacaacacaaggccgggctggcgcacaacactagcagcgtggaaggacgttcttgcgatgctgggctggtgtggccgtgcggcagcgaggaccacacggagccgtggtttgggaaggatggaagggaggaacatgcactggagggttaatgctatatatgtgggtccaagtgcataagtaacggcgtcgattagtgaatggacggcgatggcatagaggaaaacaaagtctaaaactgatggcatagagggaatgctataatttccaatgacacataaggaattggtataatttctaatggcatagagggaattttctctaaaatgaatcagggggtgggtcacttttgactgccgaaggaacgctgtcggtcccgaggtggcaaacccgcttggtctcgggagtttgcacacgcagatttgtgaaatcatgacgcccatcgtgtgctgctcgtcttcgccatacgaccagcggcttgcctgtgctcgtgctcgtgctcccgagcaggatacaagcgctgtacgtactactatacaggacgggtggtcctcgttcgtatagca

SEQ ID NO: 64960 - DNA, 490 bp, Zea Mays
tgtggggggcgctgcgcaggtcgacgtctcgtgtgtcgaaggttaacgatatgtgggaccactttgtctgcacgactgggctagtgacggcgacatggttgatgctgcggtagtggtcccgcttctgccgcttggtgtcgaagtcagtgctggaccccccagttatcatatgaatgactccgcgataaggttgatcggcgaagtcttcctgctttggggcatgggggatgttttgttgttgctggtgtggtggtggaggcggaggatgtacgatttgtacttcctgatgatgttggtaagcgtggtgcggtggatgcggggcgggagcgtggatatatggtggagggggtggctggtaattatgcgtgacaattctgggattgtcggctggctgcgccctcgccattctgtctctggtggccttgacttcggggcagtctctggtttggtgggcgcagtcttcgccatggaaaaggcagtagaatcggcg

SEQ ID NO: 64961 - DNA, 422 bp, Zea Mays
ggagtatgagaagattgatgtttgccaggacaactgtatgcttttttggaaggaacatgacagagagtagaaatgcttaaaatgtgggaagtcgaggtacgtggagcttgtaaatgaagaaggggagaaggtggtgacaaaggttgcacataaacagctttggtacatgcctctcactcctagagtgaaacatttgtttctctcgaggaagaccgttatgcacatgaggtggcataaagattgtactgacagacaagatgggttaatggtgcacccatcagatggtgatgcatggaaggctcttgacaactttgatccagattttgctagtgatgcaagaaacgttcgtatcggcttggcaactgatggtttcacacctttcaatatgaccgctgcgtcgtattcatgttggcctgtcattg

SEQ ID NO: 64962 - DNA, 1047 bp, Zea Mays
ccaaagtaggggcatcggccacaaagatacaaaacgatgtgtctacgtgtattgttttggtatcgtcaccaacccattgacttaacatttggtgtaaagtagaaggtacatgttgattgacatgtatccaacctctccctaggattgtactatagtctccttgtacctcgacgacaaaaatacagcggccatggttttggtcccgatggtctgctcaacggacgtcacaccattagcctcgattggactgctgctcacaacatgccaagagttatgttagtcctgatcaactcgttatctagcttgcatagctttcggtacaaagaatatgctagcaagctgacggtcgcaccaccatcaaatcaatatccttgaaattggtgtcccatcaatacggttgtgcacaaagagcggctatagacgatcttgtgcttgaggaccatattatggagttcccaatcagtcttgcactagtggtgccaacctatcaaatacgaatgtttgtggtgccctaggcttggtaatatgttagcccatatggatactgtgggtgtggcattatccctccccatattggatttgggatgtactatgtgggtaggtaagcaagtggataggcgggtgaatgtgtaggtggataaataggtgggtaaccaacgacttagcaggtggtgcttcccatggtgtcagtggtgttggtggaactagctaagtcaccttttgtgtcgtttcaggcggccctgtttcttttgcttgattttctaatactggcgaatgaggttgcttttctggccaatctcgtggagcagctttcttgttgacatatttagaaaggagccaattgaaagtagattcggtgctgataagatggcttgatgcttatgtattttgtttccacgtacctatctctaatcgttgaggtctaaaagtcatgggttgtcactgttgttggacctcctctaaagacattgacctagtggccaatcatgcttgccccccagcgtccttggatctaatggtgatcttcagcgtctcctttccatcggg

SEQ ID NO: 64963 - DNA, 818 bp, Zea Mays
acagttttcgaaatctgttctgacagaggacagaacacagcaatcagtttgtaaatttcataactcttaaaccgtcaggcctatggctgtcaaattttaacaccagcaagataataaagttatctaccacttttctatagcacatatctacagaaaacacaatttagttcatcaaacatacagcacaactaaaacagcgcgtgcagtccaaaacagcaatcaataaatttcagctcctatataattcaagaatcagtcgtgttctagagacttgaattattctaacacttcaccgttggttagagttaaattagtcaaattaggaccatcaagttgactcataaattttatccaagtcatttcgtgctctagatttaacatactcaattaaccacgcgttctccacgataatcaacattgaagcgcttttcaaccaataatttgcattttaacttagacatcacctgagcactactacttttcattcgcaaccataaccatacacatttagaccacaacaagcaattcatcgcgactacaaacttaaccaaagccatctaacaagtcggctagccagagtaacaatctaggccgctacacatcctacacgtcggcttgcatattatcatcgcaatccgagacaacacatatataacaatcacttaacgaatttgactcctattcagcattagttggctaattacagcataagacttagcaacccatttagacattgcaactcaaaacatgggtgggagcagattaattaacgtttcttaaccttttcttcaacttaaacaagacaacacacaagtcac

SEQ ID NO: 64964 - DNA, 1694 bp, Zea Mays
caaatatgataccacaactaacatatatagaaattcttttccagggaaaataatagggatgagttaatttgatatacaggttctcagttttaaagatttcagattgcttgaaatgaatactgtgcctgttgacttcctttttccctctagaacacacttcatttttttagaaaaaaatgcagaaaggaagaggggttccaaaatggaatggttcaagatccgcatgcacctctgaagttgaactttgcaagcgtctcagagatggtcgacaaggacgctgggtcaccatcaagaaccagcgctgaaagcctttccatcattctgtcatcaaggtattttgacgacaaactttgagtatttgttaaggatgtataatctggttctggtgtgagaccttcgtagtgggtcagaggtaagcactctttatataatatataaatgaagaaaaagacagggctttaaaatgtgtggaatcgcttgtttcaatggtaagttgacctgtatttggactgatgcacaactgcacaaagaagttagtaaagccaagagatatggtaactcaagcaatacatcagcatccaaagtcaaaactatttttctatgcaaaagcttgcaaccatgttgctttcagggtgccatactctctgagctatggagtattcgttttcaagaaaaaaaactagtgggaaactggtaaaatattaacatgcaaacctctaccgttctatttattcctctttgtttgcgatttgtagcatcaaatttgacatgctaatgcaattacaggaaccactaagtaccaaactatgatggcagtaattgccacagcacatggttttagcaatgtccgtgggaatctgttgacaaaatgacatgcagaaaatgggggacaaaagacaacaacatcgcattaaatgaagccgcggccatttcggtgccattagtataataataatacagtagacccctgggaaacgaatatatgtcataccatatctatgggcagtccaaaatggcattgaaatctactttttttttgctccctccaaaaccgccctgtttcatttctctatgaaaccaggagagggaaaaagtaaatgccagtccttgagggcgatgtctttactagttctagggagatttacgcccagaagaccacaaccaatctgtgattcccagttccattttggtaaaagtctcgcgatgacattatatacttaaactagctctgagaagattcaattctatttcgtacatttcagcaattcctggttcctgctacagtaatattttggagctggccccccttatggtgcaatgcaatctccaggcccgttctctgattgtatatgtatataccatatcatactagcaacaacctgcattcatcagtcggtcatagcagccggcaagcctcgggtgccaaaagaagaagaaacgatgaaaaaatatcaatgctaaatgaactcagtaatccacgaaaaattaacgagcggcgtacgaagtggaaacgcacatggtagaaagtaccgcaaaaaccgctaagctaaactgcggcgccgcgtaatcatagactaagggtttatccacctgcagacgctcactgcttggactggaactcaaaaaaagaaaaatagagcagtccttaggcgcacaaaccgacaaccggacaccggcggcaccggtgacgcaac

SEQ ID NO: 64965 - DNA, 556 bp, Zea Mays
ccgggagacagtacaggaaatcatcttcattactgtcgttaaacactaaggctcctttcggatatttcagtttttgagcataatgccttgctttcgtgattttatcttcggacaatttcttccccgaagcatgtcgataaatgtaatcaatagcttcggccgacgcttcgaaggcaagagattttgccctttctgccatatcttgccctgccgtcagaatggtatccgaagtttgctgatcagctttgacttcaggcgtgacagccttcgtctcgctaggcattaagggcctagcttcggcttcggcttgcccagcttcggctttggcttgcccagctttggcttcggcttgctcagcttcggcttcagtttgtgctttggtagtttcaacaattttctttgaaggagcggggctcaaggcctttgtagtctctaacacagcatccagcacgctggccattctcctcctcttgggagttgcggcagaagccctttgcacctttggcagttttgcctctgttaaagggctcaggatttctggcattttcattgtttc

SEQ ID NO: 64966 - DNA, 293 bp, Zea Mays
aaagtgttcgttgtcaacaagtcaaaaggtaccgcaaagtccaagactttctctccctcccgattcctactaccatacccaacaccttcatgccccttgaggtctcctcccatgaaaaacttctcactaataggtatagttctaacaatgctatctaagtctccccaaaaagtcacttagcactctcattgggggtatacacactaattacgtttaagatcaaatcacctacgacaagcttgactaagataattctatctccttgccttctcacatcaaccacaccgttcttg

SEQ ID NO: 64967 - DNA, 670 bp, Zea Mays
gaagtgggcatatttggagaatcgatcgacgactgtaagaatgactgatttgccatatacctttggtagggcttcgatgaaatccattgagatgtctgaccaaattagaactggtacctccaagggttgcaatagtcttgctagatggagtgtttctgttttgttttgctggcaaactgcacaagaacgaacccaatctctaaccagtgccctgtccttgtgaactaagaaatatgtcctcaacctttgcagggttttctggatgccgtcgtggcctgtggagtgggctatgtgcaggatagcaggaagtatgctggaggattgtggtacaaaaatctgattgccatgcattatgagtccctctctgatctgccatggtgcaccttgctgccctatactgatctgattgtgcagcagctgaaactcttggttgcttgcacagtcttgttggaggtctttgtagagttgaaaggttagtgttgagatcgtatacaccgatccactggtggtttccctgcgcgaaagagcgtctgctactatatttagccgaccagccctatattccaccttgaagttgaaaccaaatagcttactaatccactgatgctgaggtacaattgagagccattgatcgagcatatacttgaggctaaaatggtctgtacgtacc

SEQ ID NO: 64968 - DNA, 474 bp, Zea Mays
actgtcctaagtttcctctcatatgaacctaatatagagccacctttacccgacgcgtcgactataatttggtcatcacaagcccaaccatcatacggtatgctgacgcacacattcacaacacaaccatagctgccaccgctagcacctagcacacgactggcactaggcactgccggaccatccgagcctaatctcgaacattccggccacctcgcggatcattcaccatcctttatcgaaccatccaacccaacaccaacatgtgcgcacgccacccaagcggcgccatatatggccggacaacccaggtatagctatagccaatgcaacccaaaagcagaccgtccatcgacacacactggacaatctggagtccagtcggaccgtcctgcaccctaccctggactgtctggctatgtgtacgcataatagggagctgcaccatattcacaatttccacatctatcccag

SEQ ID NO: 64969 - DNA, 808 bp, Zea Mays
gccgtcagaagagttatgctgatgtgaggaggcgggatctggaatttgctgtgggtgaccaagtccttctcagggtatcacctactaaaggagttgttcggttcggtgtctctggaaatctcagcccaagatacattggaccattcactatcttggcccaagtgggcagcctggcttatcgcttgctactgccggattccatggcaggggtacacccgatttttcatgtctctatgttgaggaagttcttgcgggatccggaccatcagattgagatggaaccaattgttgtgcagcaagatttgactttggagtgtcgtccagtgcgtatattggaattctcgaagcgtgtattgaggaagagatcaattaagtatgtcaaggtcttatggactaatcagtctgagcgcgaggctacgtgggaacttgaggagctgatgcggcagaagtatccgaaactttttgttgtgggtaagtgttgttgattcattaatttttacttttgtcgttccgatagaagtgtcagaattcgtggtcgaattctttttaagggggtagagtgtgatacccggtttgcaaagaagagaagttggaggttattctttttgttttttttctcattcggttgttgcgttttggggatttggaatttgtggaaaatcattcaccagtagggcagtagaatttgtttggttaggcacttgcgacggggtcaggagctatcgcgtgggcgagttgggctgcgattcgtgattcggctcactaaccttccctaaccctagccgcccttttccccctaaccccccct

SEQ ID NO: 64970 - DNA, 2238 bp, Zea Mays
gcgggttttcctgggtcaaattcgggatgaagatctggttccaggagcaaagctggcttgattagccacctttacatgcatttgggctaaatggtagctctcctgtattctgttgattctgtgtttacaggaggtgttctattttcaggttgcggtgaggagaaatggatgtagagaaacctgcttccaaggcgcatggtttctttgcgctcttcgattggggaaagaagtctaagaagcgcctgttcgtcgggagcaccagcagtgatccaaatctgagtaagaaaaaattgcaatagaagtcgagtggttgctgtgcacagggtgcatttttacaaggggtctggctaaatttatatcctactatttctttgcagaggatgctgcagatgggaaggatattgatgatagtacaccaacaacaagtacacggtcaaattctgtgcgtgctttccactcctaaatcctccttggtgctgtccagtgtgttgcttatgcttggagtcctgaatttactatggtatggttgtttgtatactgcagatccttgaagatgccccaagtttgaaggaaagcagtgagcacagctgctcatcttcagtaattgatgaagaagctcagtcaagaagaagtccgactgttgtggctaggcttatgggtttggattctatgcccgcggcaagctcacccgaatccaatcccgttccattaactgtgcaaccccctttccaacccaacagccacgaggatttgatcggcagaagttatgttggtagtccccttaagatgccgggtagtcctattgatcggtttaaaatggaagcactgcctccaagacttgccaagaggacactatctgtcgcacagtataagttgctgtctcccatgaaaaaccctaaccatatatccagcaggaatgcagctgatataatggaagcagcatcaaggatcatcagacctggagtagaaaatatcagttcttacagagttcacgatgttgggaacacaaatgctgcacgtgcctacaacccaggagagctcataggagtccaacaaaggtcacagaagcttaatgaagcactgaggaaacgtgatggctctgcgtcttttaggccgccaagtggaaaaccttcagatggaaggttgagaggttcggagggcacctcgtcttccaggatctcacaggcaaatggatgtgctccagttgctccaaaggtcaaacccggcaatagattagatactgctcgagctatgcatgcccaggaaaaaggggggatgagaaaatttggtaaaaagcttgaaacccacaagaaccctgaaaatagcaatgctgaaagaagtgggctgaacagacaaaaggatagtaaccaactgggcacaagttcgtctagtgtgcttgtgccaaacagcagaaaacagaatgctacagtcaccaaacataaagtgcactcaaacccagcaacccccagtaggcaacggagcaatattcaccaaataaatgcccatccaagaaaagcgagggctgccaacacatttgctggaagcagtagtcaaggtagcagaaaggtggacttgcagccagatgctcgtgcaaatgtaagaaataattctgtatccaaagcaatcccgaagccaagaagattacaagacagaagagtgtactctgatacaagccagtcaagtgatagtattaattctgacaggagccagaggcggattcggcacaatattgtgattgatgagcagtcatctttttcaacaaacaaaaagaaagtcagcactgagattgtttcattcacatttacctcgccagttcataagtcactacatggcacccacttccccaatcattcagtggaaaaacaaatattagggaatcagaacactgtgtcaacttcaagcaatacatcaaacactaaacttgatgtcatagatggaaaatttttgggactcctgttggagcagaaattgagagagttgacatctggtgtgagatcaccctacactaaaccagccgaaggtgctcaagtgtaccacacttcaacagctttggaagatatggcatcagcatgtgaaacatctagcattgcttctactgattatgatagggagtcattacagtctttcagtgatggaaaagctactctgccctatacaaatcttgctactagaagtgtccaggtatgtcatgtcagagactctggcgcacctctttcagtcagatccttttgtcagcac

SEQ ID NO: 64971 - DNA, 500 bp, Zea Mays
atttggtggggtcaacgaagggaagctaagatgccttcggaatcgcaccgaggccaaaattgttagaaccttctccaaaagtgttggcctgccgaagatagaagcggacctttgcaggtaccagcgacaacatatcgccggtagtttgctctatgctaatttcaaggtaaaaaagtatcgatttttattattatatatttcttattttgaattaagttgttttctgacgaaggttgttttggcagagtatacttctaagtaaagtgctaagaatgcagcaagatcttgaggatgagaagaacgaagttattatcaaagatctagaaagcaaagtcaaaaattacgaagctgctctgacggaaaaagactccgttcttcaggatcttaaaatcaaagttaaagattacgaagttgccgtggaaaagaaagacttcgtcattcaatctttggaaggttcgctggctgaagcccaagccgaaaatagcaggttaaacaatgaa

SEQ ID NO: 64972 - DNA, 638 bp, Zea Mays
tgaagtaaaaagtcgaaacctaacttctcggatttttattttctagaaaacgaaaagttctgaaataggtgaagtaggtgatccgtattttttcatttcctagaaaaccaaaaaaaaaccgaagtaggtgatcggttcttgatgtctgaaaaccaaagttttttaaaactgaaaaatcaaaccaaagtttcaaaaaaaacgagtccccgactttactcgatggagtagggctaagggtgggtcagtgcaaggagatatcgttagctaacgtggcctagagcgtggtcgatatcgagcgccatggttctatgattgacgattcagcagactagtcgagacccgctaaccagtcggttcagctggtaccgatcgtcttaggatcgtactagtcggtacagatcgtcgtgttcgagtctaggtcagtatcaaccaggtttgattgataccgaccacctactgctaatgcgacgtctcctaatttgctgatactattttaacggtttgtgtttcgatttatttaaaaaacttaaaactccaaaaaaactcgaatccaccctacaaatagaccagaggtgcttgggttcatttacactcctttctctccaattgacaagtcatcttctccgtttgtagccttt

SEQ ID NO: 64973 - DNA, 432 bp, Zea Mays
gttagatctttttcctcgccaatgttggagtctgcgcagaaacgaaaagatcggcggccttggaagggacgcattccagcgcctcgagtgtcgccgtgtttaacattgggagatgcaatcagcagggccaaaatcatacagaaaaaagcaaactcttggccacgatctgggattactaagatgcattcttctttggaccagcgacagccatcaaccgtaattaggaaagaatttcaaaattcttctaatgggcgtattctcaggcgtaatgctgggtgcgttgatggtccagtgtcctctgtttcacgtacaatgaaattgggccctcgtatgccgtataggcccacagctggccttgtctccctgtttgcacgaacgggcaccaatattggggtgtctagggctcctattgcacgtgagcattctgaaaac

SEQ ID NO: 64974 - DNA, 864 bp, Zea Mays
gtaaaaatttgggagtgactgctatagtaagattgaagctggatagtagagaaacaactttcttaaagatggattaggaagtcactgcatgagaaattaagatccaggccttgcaagttgggctgtcaggctgactgaagaaccatcccatggtacagtaactgaaaaatattacaagttcagcccccctcgccgccggtgacctttgcgccatgatttgcgtcgtcgccgcgattcatgctctctggtaagtggataaccacgacggagtaaagatcttggcaccagatcagctcaggctcggtcgcggatgagtttcaccgtacccacttgctcgtcgtgcggccgggatagacctcgccgccgttggccgctcaccgctatgcgccacatgctaaagcgctataccacgtctcagtggaacacgtcatgcatgcccggtgatcgccgaagatctgccacgatgaaagccactaaccccgagcgccagtaaccttcttcctcttcggccgccaacgcatcatcgtgaaattggacgccaccgctcaagcctgatataaattgccgaccccacttgctctgctaggtagttgtgcaaccagtgaagcaaaccgttcctcgaatcatcccgtagaactccccaatttgggatttcccccaaatcactcaagaacaccgagcggtttgacctcgccgtggccagcgcatcttaggtccgttcatgtcctctgagtcctcgtttcagtatcctaggatgctcttgatactctctgacccatccaattgagctagagtccctaggatcgtcaggaacgtgttcggttacccatggtgtccgttgtcaccgtgaacagtgcgtgttag

SEQ ID NO: 64975 - DNA, 409 bp, Zea Mays
ctaggaatagatgggtagctaggtggctatatctatataggccataaaggatattactagtactattaataaggatgctatagaggcacccgaaaaagtagttaggtctgagaagacgtctagaatgagcatgcatcatgattgttgcattataattgtctcttgtgcaccaacatgcttctctcacctttattccaataataagaaattttgaataatgtgatgtattgctatgttatgaactataagaaatgccttatctcttgcctaattagtaagtcttgctaggttgtgttatgtgtttctcttgccttgctatctaggtggtattgtaaatgttcaaccctttttgcaaaaaaaagtgttgtctcttctgctcatgaaaagaccccctccaaacaaccttgag

SEQ ID NO: 64976 - DNA, 618 bp, Zea Mays
catggctgcatctacacagatacgaacagataggtccgtagcaagacaagaaccttttctttaccatacattttcaaattgaaaatagacaagtctcaaagacagcaacttaaagacaacaaggagacatgcacacaggaatatttctcagccacgcgggattggaggcgtaggtcacccacgaatatttgcgcatccggtgggaaaggattcgcgtcgctgaaaaatggaggtcagttttcatctttctcccctaaaaacagattagcggtcagattagcagccttttggagttcaacgaatggcattcaacgaagctaggaggctgaattccaaaggtgatgtaaacgatattccaaataaatctcgcaaagtcacaatcacagaaaagatgttgtatcgtctccataaagctaaaaaagaacaattggtgctaccttgccatttatttttttgctggaattatcctttgtgaatgtaaccactttagaatgtaccaaatgaagatattaatctttagatgtatcttaatgttccatagctggttcgttttgggtactaaccccttcttgtatcacataccacaaaaacaacgaaccattaaagtatcttgctcaa

SEQ ID NO: 64977 - DNA, 311 bp, Zea Mays
tgcgcccccgcacgcccgcgcgtgctggctgttttgcgaaaaggaccttggggttttgactaactaaaactgggttcggttactattcttatgaatcactgaagatttgcagaaacatcctcacaattctatttcttctccaaggagctccccgacggcggcgcgctcgtagatcacctttgacgcggtttgtacaggccatggccggcgatggttgttacggccaactaccggggaggcatcactgacctaaggcagcctaggaacgtgtgctaatttagcttgggcacttgaagaatggtctgctcacg

SEQ ID NO: 64978 - DNA, 500 bp, Zea Mays
gccggaccgtccggatatgcgtacgcagagccgagagctgcgcaatacgcacagtttccacattcatcgcagcaacattatggtgcctcaccagcaacacattataatcatgccataccacctcatggacatagggctgaatactattcggccacgagagagcctgagaggaatagggcaggagctggtgacattaataggacacctaacacacacttcaagcacccctgggaggaaagccgatagaatgatgtcaggcaacctgagatctccacccacaaacccaatggatggttgccagacatggcggagaggatcagagacgaggtggccgggatgttcagagacaaactcggtgttagtgtgtcaggtacaggacaatcgtatcggaagccttatagccaccgattcgacaccgtgccatatccacagggaactagaataccagacttctctaagttttctggtgaagatgggaaaaacacacacgaacatattag

SEQ ID NO: 64979 - DNA, 915 bp, Zea Mays
ctaggtctatcctcttgggtgcgtgtatcgtttgtcctagcttgcagtctgagctagcagatagagacgctaggatagctttgcttgagaaggctagctcagtgagtgcatctgcacctacgcagtgtgcactttgtgagggtttgcaatatgcccttgagtcctgcagacatgacaagacaagaatcgaggaagaaaacacataccttcgatctatcttgagttgggtgtcgtgcagtgagccccagttgggcatgatggtcagttagttcaagaggggaactggtggaccgggattaggctttgctactaaggatgggagtgtcactcgctttgggaaggttggtgagtgcagtggtttaacaccttcagagaaaccttcacccactcctaagcttatcaaaaccacctctactaagcctgtcacccctgtgagagatggtgtgattgatgaacctatgagagctcctcctcagaaacaagtgtggcttccaaagcctaatcatcttaggaacacacttgacacctttcccgacatctctagcgatccccttcctagagtccctcagccatccaaaaagaaagccccttcccacaaacaaaatccacccaagagagaggtgaggtaccattgtgaacattgtgagagtgatgggcatctagcttctttttgctttaggaggaagagagatgagcggtaggtttctgagtcgagcaggaaggacatgaatcgcccctctcatggtgttcatgcttggcctgttcagagatgtcctaggaggcctagaggtgttttgcctcttgccgctaggcctcaggcagtgagaccacgtggtggtcgtgcccgacggcatgctggtcgtgtatcatatggccaaggaccatgtgacataggttttggttcatacttcccca

SEQ ID NO: 64980 - DNA, 396 bp, Zea Mays
acacaataatggtaatggaagcttgtccaaggcaattgttcttcctaaaggcaatgctaaactcatttgcagaatccacaggacttcgtgttaattatcaaaaatctaacatatacccaatcgttgtgttggaacagaagatggagctcctagccaatacctttcaatgctagattggaacccacccgttcacatatctgggtctgcccatggtcttaaacaagccccaccttgaagcctttctaccgttgatagaaaaagtagaaaatagactagcatcgaccacccacttcctgtctctggatggccgctatagatggttaacactgtcttctcatcactacccacatactacatgtgcactctcaggctccccaattcagtgatcaaacaaat

SEQ ID NO: 64981 - DNA, 465 bp, Zea Mays
ccgatggagtgcaccggtgaggtacctaatcgatctctcccgggtgtcaaacactaaattggaccgagctacgtgatgtggaagacaaagtgataaccagcaatgggtttcttatcgagggaaagaagcacaggggcccggccacggcgtcatgcaggcaggcggatggagagcagctctggtgagaaatcagtggtcgcctagggcttgtattcaccatgtgaggcaactggcggtctccgtggcggctggcgaacctttcttctcacttgtcctaccccgacaacggtgtggtcaacgatcgacggtggcggccagattctctatatgcggtggtggtcgagcctagtgtcgcatgatggttgtgggcgtccagggatggaggtcatgttggtcagcccttggtatagccccaggagttgaggcctggccggtattacctccatgatctccggtggcggatac

SEQ ID NO: 64982 - DNA, 672 bp, Zea Mays
tctccaatagtgaagtaagaggtttcactattttggagaagccttcgataaatcttctgtagtatcctactaatccaagaaaactcctaatcttggacacatctgtgggttgtttccaatttagtatttcacttattttactagggtctactttgattcctccattggtgataatatgacctaggaaagcaacttccttcagccaaaaatcacacttcgaaaatttcacatacaactgattatcacgaagcttctgtagaaccaatctgagatgatcttcatgtgcttcttcattctaagagtatactagtatgtcgtcaatgaataccactacaaacgggtcaaggtattccatgaatactttgttcatcaagttcataaagtaagctggtgcattagttagtccaaaagacatgactaaaaactcatatagtccatatcttgtagtgaaagctgttttaggtatatcttcagtctgaatcttcaactgatgatagcctgatcttagatctatctttgagaatactgtagctcctctcatctgatcaaatagatcttcaatccgaggtaacgggtacttattcttgatcgttacttcgttcaaacttctatagtccacacacattcttcttgaaccatctttcttgtttacgaatagaactggggctcccc

SEQ ID NO: 64983 - DNA, 858 bp, Zea Mays
ggttgattgggtgtctgtatctcatatagctgagtctgacttgattttcctgtttgggtttccatgtgttttgtggcttttgcttgtggttgaggtggactaatcatgtatccaaatatttttctattccttttgttgttcttcattccattcatcaaatatctctatgactcatttttctcgttcatggttgttaaggtaggaatgttgtcgttggcatcatttacttcatttccattggggttcatcatctggttagagagtaaaagagatagtgagacaagattacataataggcttgtatgacattaagataaagagcttaacacaacattttgatttccaatataagattaattaaggaacaaggatggtttcagatttctcctagcttcatcatactacaagagtgtacaagtgttataatccttaacaaagatcttttgaacttatagatttcagagcatgatatcccaaatcatctttctgatccaacaatatttctttgagcataaattgagagaaagacttgagcaggattttagggcaactagaatagagcatcacattgtttgcatatagcagatgacaccatactttattctctttataaagaggcaaaacacaataggtgcgagagattctccaaatttattcatgtatcacttagcacaattacaaatcttgaaaggggcaacatcttgacattttttcgtgagacatactccttcttttagctaaatgatatattattcttccttgtcagatgtaccaatctttagagctggaggtcggtcgtcttcaactactattctttctccagatggagtttccaaacacatggttctctcagtatgt

SEQ ID NO: 64984 - DNA, 528 bp, Zea Mays
gaatttgcacaggcggtgttgcagaaatttgggacgggagattattttcaggccatggataatctgttggagttgcgtcagaaagggacagtggatgaatacctaaaggagttcgaggtgattaggtatgcgacagctatccacaacccacagttggacgagaccatgttcgtcgcacatttcatcaagggtttgaagcaagaattacaagggcacatgcagtctcatgttccagctacggtggatagagcagcgtttctagcgcggattcaacaaaatgttttggaaaagcaaagacagaagtatctaaagtttggagggcatggtaagatcaataactctgctgttcggcaagaaaataaggcagttctagcgagtcaagacctgtccaaggagaaactggtcagagagtaccgaagacagaacgggttgtgttttacttgcgaggacaagttcgagccagggcatcaaaacaaatgtcctaagaaggtacaaatgcagttgaatgttctgtcaactgatgaactg

SEQ ID NO: 64985 - DNA, 556 bp, Zea Mays
aaaaatttgacagtgttcgtaaaagttgtcatgtacgatgtgtacaaacacagcaatctatgtagaagtttcatgatttcatggtgtataggaaaatgtgtgaactcgcagaaataaaccaagaaaagttaaagaattgtctatatgcatttttcatttgtcaataacagcacaccaacaaatcaaatcattttccatacgtggttattgaccatcatcgcattgatgtatatgtgtgcatgtcatccatcgtgatgttagtttttttgcaggttttagaaacctaatcgtacaggggaggtgctatcgaaattttgtgttgacagacttgtcttccttttttgtagaaaagatacttatttcttagccgttgcgggtctgtttgcaccgcgtccccttcgccactgcatgaacgacactaactcgacactgcatgaacgatacatgtcctcctgccgctaggttcagtcgggaacgacactgactcgacacatcaacggagcagccagacaatacatgaaagtcaagtatgatgctccagtaccaaagattccaa

SEQ ID NO: 64986 - DNA, 691 bp, Zea Mays
cgatcaagaagtcaaatgacgtgaaaacgacgtttgacggataaatagtgtcataggatgtttggaattcgaattgaggcacgaagcgatatggaattgagccgatacttcacgattagatttatataggtgaatatgagtgaagtgtgtgcttggtttgaatttaggcgaagaaaaaggaattagggcactcggctcgaaaacgatcgctcgaaacggggaaatgagtgaaatttaagcctgggatctcggattggcgtgaaatttggcaagtaggttactggaagtgttgtgaaggtgcctgaaaaatttgggttcaattggagcatttttggctggtttgggcatttcaccgagcatgtggcgtgcggggagctagggttttggtgaaacggccatttgaggtgggaataccctcccgaaggagctaaaagctagcagggatacacaatagagacacttgaactcattccaccaattggatgcacaggaattgacaagaattcaaaaggatttggaattggtgcaaagggtggtgcactgcctaagagacagagagaaagagagacaggggagaaaacaaatctgctcaccgagggggaagaggaggggagcccaaagtcaccggagcaccgccggagatggtggccgccggtggctggagatcgccggcggggggagaggaaatcgc

SEQ ID NO: 64987 - DNA, 425 bp, Zea Mays
accatatacaatgcatgtctctattgtgcaacaatgttgagcacgtcttactgcagtgatagatacatcctgtcatagtggcagatattggagtccacgtcgttgagtatgacgtagttggtaaatagtgtagatgtctacactttataatgcttgtgggtatactagcatgtccatgcgtgtctacaatgacaacagtacacaccatacaatggtcatggatacatctacgaccttagtcatggcaccattgtactttcttgatcgtaacatcatccatcacatttagcatgatgaactaaagccttatcttgatttccctgcaccatgtagcaattttttattagaggcccatgtggcatgatatcgtactgttccggaacatcctgctccacggacgtcataagggatgtctgaggaatctg

SEQ ID NO: 64988 - DNA, 618 bp, Zea Mays
gtgagaacgaagatgtcaaagatcggccatggaagccaagtcatgttgttttcgggaaatccactgttgagcaagggcaaattgaagcgatgaagggcagatatttccatgatatatccatagtgagagctagaggagagagtattgttcctcttcttgaagcagacaaagtggtggtatttaagagttttatgaaggctggacttcgtttccccttgcataagatgttggtcgaagtgctgaagacatttgagatataccttcatcagcttactctcgaagctttgattaaagttggagttttcatttgggctatgaggagccaggggctggagccagatgccaactgttgctgcaacgttcatggattgtcctaccagacgaaggcaattgggaaagagcaatatcataacaactctggatgctacagttttgtgtaccggtctgatgtgaggtgtcatgtgccaacgtttcgggaaaaatggcagggctcttggatgaagcaatggttttatgtcaagaatgatctgagtaagagggaggatgtgaggggcataatccagtgccctatacgatcacgcttcggcatcaggaggccttcgatcgcaagtggaaacg

SEQ ID NO: 64989 - DNA, 464 bp, Zea Mays
tctcccgtatccacgcatgcagccgtaaatacgccacttgcacatgtgcatgcaggctgaatcaactgcatgcaggtaaccgaacgcatgcacagagcaagtcaacgcatgcgaggagccctgctacggaggtacacgcaaccaatcacatcataagtattttggctgatgtctccttcacatctagtatctccgtcatgttttttctggaacacagaaaagccacatatcattatattaaaatgagaaataaacaagtaacaaaataggcggtctaaacgtagtatctccgtcatgttgaacggatcaaattatggaagctgattactattatttgttcgcacctaaacgtggtaaccatttgctaaaccaagcaacaaatattttttgaattacacgatacctgcttatctctaaaaacacatgctcctccggaccccacctgcagtgacaatacatgctcc

SEQ ID NO: 64990 - DNA, 703 bp, Zea Mays
gactttttgaaaaaggccacaagaccattaggcggcttgtagggcctgtatcgattgaacttctgtcgaggctctaatccgtaattactgcccaggcccacaggctggcgctctgttacacactgcgactgtctaccttcttcttcggggtactttggtccgctaacatgtggaccccccacactgtttgtcttcctcctcgggttggtgggaggagtagtctgaggtcaagccatgatatgccatgttctcgcccgacgactcccattcaagctaaccgaagcacgagatggacgacaaactgcttcctcaagcatatccccgaacgttatagccggcgaacgcctaggtcccggcaatgggccctgccaagttcttgagcagtagttttggcgactcaccgatctgccgctcgacgacccacgcatctcaacgttgtgcatcacctccgacgattgcactcccagagaatgcgagcccgtgctcgagaacgcagtacctacatccctgctatgattactgttggccatgagagagaccaaattcatctgcctctccgcgacgacaacatccagctcaacattggagtcatcgacagattctacctcagcttgaaggacccagaaacgacccctaggtccctcagtcgaggtagccaccgacgatggatccaccgagaagacaccagctgtatcatcctcac

SEQ ID NO: 64991 - DNA, 370 bp, Zea Mays
aacaaggactaacacacgtggctttcatgctcaagatccacaccagccacgacttagctcaaatatctgctttgtccagttattcaaatagagagtagagcagataagggctcattgtccacaaatatccaaccaatccactgaatacagacaggagtagagacagacaaaaactctactgtggtaggctcaaacaggtgcaaaactgatatttttctgcagagggggactgaacctcgagccccatattgcccaccccaagtctatctcagtttgtgcacataagtggaggacagcagggatgtgaagatctttcttcagatttttgtagcaactcccagtacctgttgaactctgatctctccctatt

SEQ ID NO: 64992 - DNA, 1344 bp, Zea Mays
tatatctggatttgtaggacttaagaaggttagagttaagaaaggtaatcttgttttggatatgtattgatctgagcgcatatatgtaagcgcgtctatatattatatgcatatctgtagccacagtatataatatctgtgtatatatatgactgtacacatgtacttagtcactatatgtattctgtgtacatgtacatttgtttatgtacttatgtatttattataagaatgcatgatgcaggttaaggatcattgaacgtatatagagaagtatttcgaatatgtacaatgtactatatgtataggagaaacttacaatatcagatgtattggtcccagatgtattggtcccgttggtgacaaaatatgcgcactatccaaatcacctgctgatggtgttgaatagtaagttgctgatggtgttgaatagtaagtgagtattcagagataataatgaacaaagttggattcacatatgtaagctgaggagtctgatattccttttaataagatattcgtatgagtcgtagtaggtagtttgatgagaaatgtagataaccttgaatagcaatccaacatttggtaaatattaggaaataaaaaaaaaatcgttgaataaaaaaaaatggagtcgaagtgagcgaagctggaggtaagctctaatcacccttgcacggaggaggaagttacaaccaaaaacctaacatcgaagccctaatatctagccgtgttcaatggaaccagaatgagatgcaaaagacaaaacctagcacgaagaacacatagccagagaagtctccgtacctgcggggatcgtcggcacgttgaggattgggtgtactggagatggtagcacacgtcgggaacaccacacggcggccgtcagtaacagtacagttgctgatggggaatgcggcgcgatctgttgttggaagaatcgtatgacgcagtgaacagcgtaaacacatggagaaggatggattgtgaggtacgcaccagaaacgagatcgtagttgccggcgacggagcggacactcgcggggaaggaggagcagcggcgtgcagtaggcttcgctttccagatctccgcccaggcgcccacagagaagctagcgggccaacctttttttccttttgactgggaactggcagccttatgtggaagcgtcccgtggtgtggccagcaggccaccattttttccgtttgactgggaacctggcagccttgtctggaagcatcccagggtctggggaatctcatattcacgtgctgcatcttggacgtacacgacaaatcaaacgattgagagaaattttgcagacgtggacacctctacctac

SEQ ID NO: 64993 - DNA, 660 bp, Zea Mays
taacagaaatctcgtcctcgagatttgtaaggaaagggatgtagaaagccataggttttggttgtagtttagcttcgagtttttttaagtggttttaagcacacatgttttcatatttttttaaggaattgattaggaaagcatggatatcaagccatctaatatgtaggataaaaggtgtctttaaagcgtggatagatttgggtaagaaagagtaaggtaaggaaaggctccatccaggatttgtggatcgtgattcctcttgaagttggatttgactcatctccttccttgttgaggtcgagctcttcttttcagaccttggtgtcttcatccgtgttagggacaagaggttaggatagatttgtaggcaacaacttagtaggaagtgtagttggtttagtagtcagctatgggttgaatgagattagttagaatctagtttggttgtttgctattagataggttatgtaacctgttatgtaggtaaagttgttgggtatggccgggttgacctaagtcaccaatttaggcttatgtggatttggagtatggctttatccttgtactagcattaagtaactcacactaggttggatcataatagattagataaaatctagattaggttggatataactagattagactagtttaatt

SEQ ID NO: 64994 - DNA, 2200 bp, Zea Mays
tgcaaatccgacgtgctcctacacgtaccatcgagtcgcagtcaacgatgtcgtcctactcaagagcatcgcgtggggaacctcgtggtgtgcggttgggtcataaacactgagagctggtgtgccaggtagggggtgcgacgttaatccatgatgactccatgactatcatcttcaacatcccaatcactttcaatgctggggaggtcttctactttggctccctctcctacattgcagaccaagaaggcgtcctgcactgcatagtgcatccgtctaaaaagagacattctctgatggcgccaagtgtgggggcaggcttgctcacctaactctagtgagaactgcgccaacgaactctaaggcgcaaaaatttcaaccagcttctgccccgtgtagaattgcaccagcgtcaggtgggccgagggccattgcggcacctatagctcgaccgactaaagttgcacctctatcgtggtggacccctttgtccacattacccactcgggtgtggactcggatcactcagcaaaaagatgcgggtaaccccggcaccaacgtggccacgggaacaagaccagtggctgttctggccgctccgctcacatgggagacggccagagcatgagacgctgctacaagctctttcttcctggatgacctctttatccagggaagagtagatgacgcacccatctctgaagatgagcccactgtactaggggaggagtccccgcaacacgagccacgccaacgtcagaacagacgccgtaacattcgccgtcaccataatgccggggaatgggatcctactcagcccgtatcctggggcgaggcatctaaagcaggagagacacctgacaacagggtactccacgagcgtcgcaattcctaacgccgtgatcgtcgccatgcccaggagtgcgagcgggtatgagcggtatatgatgccaggctccgatgcgagaacccactccttcctcagattctcatgcccgactttgctcgagccctgaacacgctgagggaagtcggcagagactaggattagatcgccagcggcctgccgtgtaccccggacgcggaaggctaccggcagatcctcacctaggtggcaaaccatcttcttcccctcgcccatccggtaccggacatgcactacgtcatcaacagtcagcgagacgtgcggagcaacatcaacacttcacacggtcgacgacgcgaagatgagatgaggtggcggcaagtgtatgactgagatcatggtgcaccggcacgcaaccatgcaaccaggacaaagtgagcagttgcctctatgaatagcatggcaccacaccggttgctagggagaggtgacacgacacacggtgtcactcgccgcccaaggactaccaccatgaccacactcgagaagaacgccgggaggaccggggtacatgcggaatctcagtccttttcccccggttccagccaattcaatggccacctaacttcatggtctcgaacgtcgacaagtatgagcttaagcaagatccaggcagttcattggctgtctatacgaccactgcccaggccactagagcaatagaggatgtcatgatagtgtactttcccattgttcttgagcaagatgcgctgcagtggctccgacaccttcctcgccatttcattgacgactaggacgacttctgccactggtttgttacgaatttccaatccctttctgacaaaccggtgcaactcttggaccttaaatccatcaagtgccaaagtgatgagtccctccgctcgttcctaaagcattttcaaactatgagaaatcgcatccccaatgtcacagaggtcgccgtgattgaggacgtctaccacaggtctaacgactcatctttcgtctgagccaccttggaagagttgttccgagaggcatacatctacatcaccaccgatgaacgggcctaggacttcatcggccatgcgaagcatacaccccaggtgctgaaggaggggaaccagcatcaggacaagcactaggaaaaggtgccaagagacgaagtgcatgccgctgggccctcggcgactcggccccgcagcgtgccacgaggcaacatacgaacactagacgagattctcgacgcccagtgtccgtaacataaggatatgcgccataccctgcataattgcatggacttcaagaactcag

SEQ ID NO: 64995 - DNA, 627 bp, Zea Mays
aacttcacctgagtggccggagcaccggagtcgtcgacgaggggcaaccagaggggcagagctgatgttgtttgaggtcaaggaggattggatgagtgtaggcagagcagatcagaacaaagaagcgagacggagagccggagaggcacgcacagtcgcacagattcggggaggcacaaaccctaagcgaagaagcgagacggagagggcgagaggaaacaagagatctaagaacaaatcgcaagagcaccgaaaagtcaccgacgaccaacactcaccagtttaggtttagggttaggagaagccgagaagtagtcgaacttacagacaggggctatgtcggctcaccggagcaagaggaacacgacggtcgacggccgacgagcacaaagcacggatccacggagccaccggagcgtccacaaaggagatccagagagggcgagtccgcgagtgtgacggagaaggcgagggccgaccgagagaggagacggaaatgtggaagactggaatgtgcggcagtgggtaacggggagtcggagacggggatagatattttgatgtgaggccgggtctagaatgggccgaatgcttaaacgggccgtgctcgggctcagcacgacgtgc

SEQ ID NO: 64996 - DNA, 885 bp, Zea Mays
gtaaaccaaacaagcaatatttacagctagaacaaaatcaatagaagatttgatcttgaacgataaaacataagcacctctcagacatttcatcgagcatatatgtgcattactaccactgaatgcgcacatggaggaaaaaattaagagttgaggatccgggcggggtaggacctaggtcatggttgctagtgctgcaagggaaaggacatcagactagtagttctgctgcagcgccctactattggtgctacaccgatgtggttgataagaacgtaccaaaacgaaaccctgacgcaaaccgacctgcccacaaatcgtcttatggaagcgcgaggtagttctgagggaaatttagaaaccattcgtattccataaaaccatgtatcccataaaaccatgatgtcatgacatataggttggttgctaaacagaagaccaatgactcaagaactcacccgttgacagcaatgctcaacagagggcgttgtgatgcgcacaggacgatgatggtgtgtgggtgggatccggggaggcgagggtatggtgacgcaaggctatgtggctaaggtgagtgcgtgtcagggcgaggacataggaatggcggatcggagcaaacacgggttggggttggtgtgagggcgcgcgagaggtgaggccacaaaggttgtaacgtcactctcttcctcactgagctcggggcaaaggcaatggcaaatccttccccactgagctcggggcaaaggcaatggcaaatccggacaacatcggtgtgggcgaggaggtagagacaacccacgcacacattagctcggggcaaaggcaaatccggacaatatcggtgtgggcgaggaggtagagacaacccacgcacacgacaaccct

SEQ ID NO: 64997 - DNA, 862 bp, Zea Mays
agaagtgagaagagtagacaaataactatgaaatcccacatcaccacaaagcttgtagctaaattagacattaatatgtctttggtccttgtagccagaagagtcatatgtcttgatcactagactactagtgatgataatttgtgatagaaatatgaagatcttgtagagacctattgtatcctctctactcctgatgatttcttcgtatgagagcagtaatatctgttgttgaagatggatcctggcggacaccagtccttttttcattcttgccaagcagttatcatcatttgcttcatcaaaagctagttatatggtgattttcccagataaaatgaattcttggccctgtctgttctattccaaagcttctctttttgctgaacaatgaagagatcgaaataatgctatatagaacaatttggtatataatatgaggagaaatatttgtcctgctggcaacaccacaaataattaactattgttataagttctctctcaaaattataatacctaaaaatgttgcataaatcgatacccaatttcagaatgtatgagtaattgggtaacccatgggcaatgataaaaatgagctggactatacatctctgcatataaaaatctttgcttggcagcattggcctgatgccgtgcactttaccaccattatatatgcgcaaattctcctatgtgcttgaaagcacaatacaaccagtgaatgtccttgtgagcgctagaccctgatggtcattttacttgttgatctgaagtcaactaatggctccaaacgacgaatgatatgcatgagcccctgaaggatccttatgaataaaatagtgttgtgcatattagtctaaat

SEQ ID NO: 64998 - DNA, 377 bp, Zea Mays
ctccttgcgagttctctccgcaagacttgtcgtctcagtgtccatgacctttgcgtatgaggtcttctagcattggtttgacttccaggctgccattgtctcctagacaagcattcagttgagctaattctttcttccagtcttccaagaagttggtttctttctccccgaaaggttttcggctgagggcgtctgctaccacgttggctttcccggggtggtagtggatctcaatgtcataatctttgatcaattccagccatcttcgttgacggagattgaggtctggctgagtgaaaatgtactttaggctcttgtgatctgtaaagatgtgacatttgttcccaaccaggtagtgcctccatatttttagggca

SEQ ID NO: 64999 - DNA, 439 bp, Zea Mays
cgctggtgccactagggatgagccccatcccagtgttggagccgccagtgtcgatctccgatgccctcccggtgctggactctgccatcgatcacctctggcacctggatcagatcctcggtgcccgcctggaggcagagggctcccacctggtacttggccccctaggaggtaggctcgacgtgtcgaggctggataccagtataccaaaggaaaaataggtggcctggcccctaggaggtagtctctacagtttgagactacctacctctggactgggacctggacctgcacacagcttcggctttgaagttttaggagcacacccgcaggacccaccatctggtatctttcatcccttgattcatgcaacaggacctgcaggatttagcctgggaagccaagccgtatgcccgaacccacaggatcatagttccaa

SEQ ID NO: 65000 - DNA, 468 bp, Zea Mays
ccgcgtcgaacttccgcgccgcccggttgggtcggtcgtgggagggaagggagttttccaccatccgatctcgaacgggtggcctacattagatagctcaccgcttcacctatttatgaccagggccattcgatcacattggatggctggtgttgggccgtggcgtggatgcatgttaacccttggatctggatccaaggatcgacatagtgtaacggttcgggctagcgagatttaatcctgactgtccctgttcgatcgaatggctgtgatcacatcgaaccccttcgcgagttctcttttacttaagagaccctgcattttagattaatcaactcgccatcctagcctatttagaaaatgtcacaaccaggtccaaaaatttacagaatgaacccctagctttccgaattttctacccgcagtccattaggtcagtttattagtaagcattaattcaaatttgat

SEQ ID NO: 65001 - DNA, 329 bp, Zea Mays
atctcggccgtccgatcgggaatgaggcgcccagattagattggccacccaatgaagcgatacacgctgaccaccgctggatcccagatctatggttcagcttcgtccacgcacaacttgtactccagccgatcgatcggaatacgactgtcacgatttccaaacccaaatcgatacgcggctcctaatcgcagtcgcccactagcatatcgatggcccaccgccttcgtcctccttcatgcccaggtcgcgacggcgcccagaccgcggcggaggcaacatcggtgaactgcaaactggtgccccagcgctccatacaccgattgact

SEQ ID NO: 65002 - DNA, 486 bp, Zea Mays
ctgcggtgaacatggtactgtggccggagttgtttaatggccggagtctatccacggcgaggatatttacgcgaccccaagtgctatccggttaccagtgagtgcgaatcttaacggcggcgacgatcccggcgcgaagtcatcggcggcgaggggagcggttgatctgatctgtccaggcactgtaccatggcaatgcttaatcagtgtgtctgacagccaagatttagggccagattcctcccaattttctatggaaacatccccaagtctctgcatcaaagttgtagtgctacataccagctacaaatttgttatgggaatcatgctcaaacttgcattggatcatgtttaaatctgagccctaactccatgccattccactgttaatctgaatttcagatttcaagcagtctgacagtccaacttcaggctcatttatctcaaaattcttcatggtaccaaggcatgagttctatagcaaag

SEQ ID NO: 65003 - DNA, 284 bp, Zea Mays
gtttaaagttaaaggaaagttgtcctctcactttattgggcccttcaagatcctaaagcgagtgggggaagttgcctaccaactgaaactacccgaccatctagcagatgtacatgatgtcttccatgtatcccagtttaagaagtgcctcagggtaccagaagaacaactgcctatggaggagcttagtgttcaagatgatctgacttatattgagtaccctatcaagattcttgatactttgactcgggttacgagaaataaagtgattaagatgtgtaaag

SEQ ID NO: 65004 - DNA, 502 bp, Zea Mays
atgaggggcagggccacggttagggttaacctaattcgccattggcaaactagcagtcgtgcccctctcgctctcgccaagccgccattgcaaacctagcggtttgatacacaatgcttccccctatacatgtggatacctcagaggtgctgcatctagagcactaggatgaaccaagtgaggacgtgaaggacgtcgacgactgcatggcactgttcgacgcattcgtctacatcgagatggcttccactgtcctgcgcgtctagtggtaattccatgacctataacagcaatagttcttggtttacggggtagaaaattttgttttgcgctagtgtagcctcccaataatcctacattggtatcagaggcaggttctgcgtagtttttggtctagatctaggtgcaggagatggatctacttgatgcatggtttgattagatcaattgattataaggggttaaagtagattacattgtatatgactgaagagatcagttt

SEQ ID NO: 65005 - DNA, 620 bp, Zea Mays
taagcaaaagtaatatatgttaaatattatcaaagttgatagtagaatttacacgtatgcactatttgtatgtaatacaataaacatctaaaatctatggaggtatactaaaaatacggtagaatcataaatgaagacaaattccttagaattttatagtatgcagcaattgtaggtagggagcggggaagaggaaagaaagaaataagaaatcgaaatagatttgcaatgataaatagtttcatcatgaaaacatagtaaaatgtatttgcacctgctttgcaaggaccaaatatattaccaccttttatatcctgtaacaactcttccaatttcatatgaaatactcttacaggaatatcaggtgcatctgaagatttttggccagagtgttgaagaccatctacaatttcatgccactttgcattgcatgtaaatgttacaaaaaagtcgggtggaccatggactctgcagatggctatgctatcatggtaattttgtatcatatatcgttgtccaccaatgtgtgacgccggaagtacgattgtttttcccatttcgtcaccgtttatgcagcctttactaacagcatctgatatgccttgaaggttttctattcg

SEQ ID NO: 65006 - DNA, 1265 bp, Zea Mays
ttaaaccatagaaaatagtaaataatccaaaaaatggacaaatttacatgaagtaactttttaacagttagatgaacaaggggtgcactttgaagcaaaaaacataaaaaagcaataattatagttcaaatgtgaagttgtagttgattgtcacgaaagttagtgcgagattatgcccatttgtgaagcacctatatttatacttttgtatagtcctctgatttttttatctcaagcaactaggatcaaatttagactctatgccaagtttcactattttttacaacatttgctatttattcattttttttgcttggaaaagcatttaaaccatagaaaatagtaaacaatccaaaaaatggaaaaatttacatgaagtaactttttaacagttatatgaacaaggggtgcactttgaagcaaaaaacataaaaagcaataattatagttcaaatgtgaagttgtagttgattgtcacgaaagttagtgcgagattatgcccatttgtgaagcacctatatttatacttttgtatagtcctctgatttttttatctcaagcaactaggatcaaatttagactctacgccaagtttcactattttttgaccacatttgctatttattcatttttttgcttggaaagatatttaaaccatagaaaatagtaaataatccaaaaaatggacaaatttacatgaagtaactttttaacagttagatgaacaaggggtgcactttgaagcaaaaaacataaaaaagcaataattatagttcaaatgtgaagttgtagttgattgtcacaaaagttagtgcgagattatgcccacgtacgatacccaagatgtggcaaaaaaactggttttttacacgttgtggacaaaaaaaatgcagaataagaaaacattacagtgacgtcgccccattacgctacatgcaggctgctggttgattgtcgaagcgagttttatttaactgtagacgttttctgttcaatgggatcctctgcaccttcccggttcccctgatgtgcagaatcacagctatagctgcacggcgagggagcactaaaagagaggagcaggcgagggagcactaaaagagaggagcaggtgctgctgttgcgtaagcccagaggagacttgctgccggcgtggaaggagagaaactgctactctgctagctagcatggaggagagggctggggtgcgcggaggagtggagttgccggcattgaggagacgactaggggcgtgccgagcctgc

SEQ ID NO: 65007 - DNA, 417 bp, Zea Mays
gctattcattttgcgcttgcacatcaagccgcaaaagcacataagttcttttcataagaaccataagagaaagagagcatctcatttcctcaaaaacgaagaggtgaattcccatatgatgtaaaaatgaaatgaacatatccaatgaacattgaggataattaagcccattaggcgagttcatcaaactctattaaattattatccttcaaatggcttaaccattttctgatgttgtaatatgctgcaaaatatatcatatcttcatatgttggagaattataggtatcacatacagtgtaccaaaagatttttgaaaattggtggacacaacgtagataatctccatgtaatgaaacaatagagtagatctcccagtagtgggcaaacttttgctgcctgaaagcatggtctctg

SEQ ID NO: 65008 - DNA, 414 bp, Zea Mays
tcggtaggagcggagcagcttggctcagatacggaagaagatccctcaataggcctcggctcttcggtcgtttcaaagcgcttggggcggtgtgttagaaccttcactttttcggcttcggcgtgctagaaatcgctgaagcatcagtctttcttttctttccttgctttcacgaaggataacaataatccaagtatacaaatccgatgacatcaaaaactctattcaatctctttttgcctcgacccccgaaggccgttatcatagcatcatcttcagcccttgaatacgcaccaagcaactcatcaccggttgcctcaatggcatctagccagtcatcatttggctcatcaaattggttcatgtacttgaacgtgtacttcagatagaccaaaccaccttcgctagacccag

SEQ ID NO: 65009 - DNA, 944 bp, Zea Mays
gcctacagattgagaaggggagccaatgaattgcaccagttccctgaccctgagtctgcttgttgctccttgacggttcatccacacctgtggtggaataagcatcgcccacagtgagctttcctcttcgttccgtactcttgacattgacaaaatttccatttgtttctataaaatggaagcaaaattgttgcactgtgtgttaaatgggaacacaatttctgtgggtgtgataaatagaaacaaaactactgtgggtatgttaaatggattgccctggttgtatacaatggtgatgattttttttctttttgttgtttccttttgcgcttcataacttatgttttataaatgcacatatgcaaacctctaggttggttttgttaccattttcttttgccgtaattgatggtattcacccaggacccaatccccaagcctcaagatacagcagtgatggacattgagcgatgcaggatatggtggccacgccaggagctgcagttcaagcagaaacccttctcaccgaggctcatcctgtttggatggttcttcagcagtgctggttctatcgacatcgtcatctctgcagctgtgccccaagttcacatcctgcactcttttgccacactggacaccctccaggtcagcattggtgattcaggttaaacacagtttaacattgttccttcattattgggtatttttttggtagatgcatgaactcatattcagtaatctatgcgccgaatgcagtattgtgagattcttgtaaaatcttagttgaaggtgaggaagtgatccattttgtattttaatcccaaagtaacaagactgctttaatccattttaaagtattaaatgtaactgatgaagctttagggtacagctatgaatttagtttctgtttagaggaaattagccattgaaaatgctgtgccgtc

SEQ ID NO: 65010 - DNA, 528 bp, Zea Mays
ctcatgcttcatcatctatctccctacaccggggcacggcggcgcagcgccacccatgcggcggcagccattgccgcgcacggccaactggcgatccggcgcctaaccttcatcactgaccccagataaacgacgcggaggatataacgaactgggttacgatgtgttaccggtgggtgaggcgacgactgctccggtccacagcgcgacgacgttttacaactctggcgagatccatccctgtgtctctgatcgccttctgccccgaaaccgacgtacatgcgctcagcacacaccagcgaactcagccaagccctggtcacctccaatcgcgtagcgaagcttctcggcgttgacatccagcggctctatggtgatacgtccgctccggcgaggaattccttcctcttcgcccgacgatcttgcctggtgaggccacagacatcttccatgtggcctagtgaagcttccgggaacgaatccgaggacgcgacgacggcgatgagcatgcgaaattgactacggcgg

SEQ ID NO: 65011 - DNA, 660 bp, Zea Mays
tacataactctgttcacggatacaacgcgaggaatggaccgaccgagatgtttccgatgatccaatggattctagctcaattggatgggtcggagagtatcaagagcacctaaggatactaaaatgagaaaccagagaacatgaacggacctgaaacacgttaaccacggcgagggctctttcacggtggcggaaaccgatttgggggaaatctcgaattggcgagctctggtggatgatttgaggcacgagttgctggattaggtgcttgactacctagcggagccgagggtgcattcaatttatagcgtgcttgagcggtgggcagtgaatttgaagaagatgcgtggcggccggagagggaagaggttactggcgctagcaattcgtggcgttcaccgaggcaggctcaccggcgatgaacgggtgggttacggtgactcactgcgacacggttaaatggtcagggcgtgtcgcgatcacggcaggcggcgtatgcctcgacgacggccgctgcgccacgtcgccaacgcaagtgggcacgacatagggtggaatagtgggcaggctcaccggcgatgaacgggtggattacggtgactcactgcgacgcagttaaagggtcagggcatgtcgcgatcacggcaggcggcgtatgcc

SEQ ID NO: 65012 - DNA, 443 bp, Zea Mays
gtggtattcagtgcttcaagtgtgttggtcatggtcatgtcataaaggagtgtccaaataatcgtgtgatacttgtgaatgatgatggagaatattcatcagctagtgaatagaaagctgaagcaggaaatgtagaagacactcataaaattgaggaacacactggatgtgaatttgagcatggtactactcttgtggttacacaaatcttgagtgttcaaatgaaagaagctgaaattggatagcgacataatctttttcaaatgtgagccaaagtgcaagacaaagtagtaaaggtgatcattgatggagggagcttccataatcttgcaagtcgtgagatggtttaaaagcttggtttgaagttgcagtgacaccctcatccataccatgtccaatggttgaatgaatcgggagatattaagatttgttataaggtgaaa

SEQ ID NO: 65013 - DNA, 356 bp, Zea Mays
ctcccctctagcactcacgatggaaatgtcacgaaagtaactccctttcatcgcttcgatcttcccttgcttaatagtcgactttccataaacaacatggctcggcctccatggccggtcttcggcatcttcatttccactttctacatcaaaactctcgctatcgctggagtgttcagataacccagcaagcatttcattagtaattttctctgtattggttttctccatagcttcgtagaaaccgaccaatgcggggtcagtaatcctcttctcctcagccattcagacgatggttgtggagatgcctaaaagtcgcctagaggggtggtgtataggtagaaactgaaatttac

SEQ ID NO: 65014 - DNA, 436 bp, Zea Mays
atttcctctaaatctgcagttgctgaacctccccacgtatcacgcgaagaatgtgctcgcaaactatttaagttcatttttttaggacaactagatccgagcatgtatgtattcgttattcaaacttcaattaagtataattagatgatttgtaattaaagtttcattttttcccaggtctatcattgattttggaggatttggaggttttgtcctggatgttgtccaatcgtttggtcctaataaatgccttgagaaccttttcatgtagggatttatcgactgtattcgtgatgatgatttattatacaatccagataccataatcaacactctaatactgaatgtcaatgttggggtatttttttctctacaactttgtatcatatttcaacccttactgtataaatatataatactaatcaatatatttttt

SEQ ID NO: 65015 - DNA, 345 bp, Zea Mays
gtagtgtaatgtaatataatgaccaaggggtgaaggaggtcgactcataatgagccggtttcaagtttgtgacaaacttcccatatgaaaaatgcagctcttttgctaatccagtgttgcgtgctttttgtttgtgcgtttgaaggctccctggcattttagaggtaatgcccgagtgatgcttgtgatttccgcttttccgagttatgatctggcactttgagcccgacttatcgagccaactcatatttatgctcacatgtcctcttgagttctgaaccctaattcttgctttttcctccgctgcttctctgtttcctgaactcttgagcccacccacttcgc

SEQ ID NO: 65016 - DNA, 434 bp, Zea Mays
ggcgtaggagaagctccccctacatgtgtgcatgatatatccaatttgaaattgcacacacatataatattggagttttggcggagttttccctacaatgttggttatcgaggcatacacaagtaatatgatctataacatgagcattgcacatttaacacccctcgattaaccattcacatagtacttcgaaccaatcaacaaatatataaaaatcagcacacatggttcaacatacacaaatgtgacataaacagttcacaggataagacatagttcatgcataacaaaacacatacataataataaacatgcatatgtaaaatgtcttaaatgtccacatgtgagcacatgagagcccccctacataaaatctccctgttgcatcctctgcatcacatctctcccctttgacatcaatttccacaaaaaag

SEQ ID NO: 65017 - DNA, 723 bp, Zea Mays
atttcctcaaatgaggttgtttaagatgattagatattgtctctcctatctccctttttatgtttagttctaaatttagtttatccaagatatatttagttgtttaatgaatggtgcatgtgtttgtatgtagagagaggaagataggtttggtaattaagattttttgtttactagttactaagaaaggttggtttatgtttctcttgccaatttttgtttattctttctcaattttacctacattttggatctagggtttcaccatgtgttagggagaagagtagctagggttgtgtctctatttcctcaaatgaggttgtttaagatgactagatattgtctctcatatctccctttttatgtttagttctaaatttagtttatccaagatatatttagttgtttaatgaatggtgcatgtgtttgtatgtagagtgaggaagataggtttggtaattaagattttttgttcactagttactaagataggttggtttatgtttctcttgccaatttttgtttattcttgctcaattttacctacattttggatctagggtttcaccatgcgttagagagacgaatagttagggttttgtctctatttcctcaaatgaggttgtttcagatgattagatattgtctctcctatctccctttttatgtttagttctaaatttagtttatccaagatatatttagttgtttaatgaatggtgc

SEQ ID NO: 65018 - DNA, 284 bp, Zea Mays
gaaagcctcaatatcctctagagagggtcgcactctatgacccggactgccatcttcaacaggagggttagagacaaactcagaaaaggggctctgtggaggaagattccatgcagaataagataagggagcaccagcattcgaaatcttgcctctcggtatcaaatcaattcagctcagcatgtcttcttcaggaatccgtctgttggtaattcgggtagggtcattgaccctagtatacagataggtcgggtaaactttatctttcagaggttgaatatttt

SEQ ID NO: 65019 - DNA, 535 bp, Zea Mays
gttgggcaaaggtgaagggtcatttgatgccgctgactgattctgcacaaagaatagattgcatgtgtgagacaagatagatatatatatatatcatacatgactaaaaaattcatactcgcgggagtagaaaactgatgaggttgagttggagtgaatagtgcagctcgcggagctagacccgctatggcgctaagagtgtgcatgtactgaaacgtctatgccatcctctgatgatcgaccaagcgagccacccactccgccctcatcctcacctctaccacacgttccatcctctcttttctagctgggcctgtaatatttcaccacaatgttacgataacacaaagaaaatgtatataatactcaataaatgacaaatacaaaagaactaacatgtagttcttgtatctgatattgtgaggtgtcctatcgaggtcatatggatgggctcataatcgtgctccttgctcaaacctgagatatagttggaatgtaggacaagtcgattgcaccatcgctaatctagtatcgg

SEQ ID NO: 65020 - DNA, 1115 bp, Zea Mays
gtttgactggggcatgcgatgttgaggggacgtattcctgcattgcatctcgatcattcagttcgcatgtctacaccgtcgatttgtcatcgacaccaatccaccatagattgggatgcctccatcgacttgttccatcgtcgctccaccttgtgcgtactcggtccatacaaccgaatatgtgcgatccacatggctcccgtgacatcatcgctgagtcctacgtgcatcttcttcgtgcaatagggctactggcttcctactgtgttgcctcatcgagccgcaacactgttgcccggatgtctgcttcgtcgttgtatctacatcgccattcttcgtgcatcgacgactgttctgcgaaatctttgcttcaccatccgttcgcaaaaggtctttatgatcaggtcttcgctatcaacttggagcgctacctatgagcgtgaggccaccgttgatcatccactgctgccaccatgttctacatccgaactactcactctcaagcacccaccgcgcttgaactgctcacctttcggtttgacgcattcattcccacactgcttcttattcgtctagcacaaccacgtcgtcaacgttgttgttttatccccagatactttgtcttttcagacaatcgtgtgctatgtcggcaccttctaccccgttgttctgcagaccactaccatcatcgagatctctgctagtccctcagatgttgatacatggttggggctttctaccttgtacgtctggtattggcaacaccaatgcatgcttttgtctttgatgtgttgatgggttttgcgaacccaagccacaccttggtttaggcagcttggctacatcgacttcggcattgaccctcctgttcctacctcgtctgccttgatcgcatcatcgcctttcgtctacaacggttttgactacgtggacctcgacatcacctccttccacgacgatagcctctgcatgtctctgttatcaccatggcacctcttgtgcgcgtatagctccaacatggcaacccaaccataactatgttgacctcggctatcttcagcatggcttcttcgaccacagaaaatgtgcccttgagctcggctacctcgacattg

SEQ ID NO: 65021 - DNA, 589 bp, Zea Mays
gtttatactggtctagactctcgccctagtcagtatagtgctgatcgtagcattgcattgaggactattttacaacaggtacatgtgtcgtacgacggagggggtcctgtcattttatagttcaagggtaggaccttacagaggggacatgttccctattggtaagagtgtgatatgttttcctcggttgacgtcgtctttatggttgtgcgtatccgtacccccggcatcgcgtaccactttgtctgtccagtatacgggtccatgtagtgagttcgatgttgatgtccttgtagtggtgtttgtgggtcccacggggtagagtcgtggtatgtttcagggtagtgcgtggggcaaccccgccttttgtcatgaacctcgtgtcaccctacaacatgcataagcgtacacccggtatggtgtattgtcttgtccttcccagtatgcgggttactatggagactccggtgcttaggtcgccatggttggtcctgcaaggcagagacagaatacaccagagacatgatgtagtggcatacagtcatgttgacagggattcccggcgcccttttgctatgccgcactgaga

SEQ ID NO: 65022 - DNA, 298 bp, Zea Mays
ctgagctgctttcttgggacagttcttcgcccagtggttttgttctccacaatagaaacatgcacgacctcccacttgcgctggggctgcttggccattttggttggttgctagggcaggaaggcgagctgcctgatggttctgacactggtactgatttcctgcaagttgggtgctctgatagtactgctgctgctgctgtcgagaaaactgcctctggtactggtgctgatgctgacgctggtgttggtgaccttgcttgaattgctggggtgaattacctgagtagcggggacga

SEQ ID NO: 65023 - DNA, 633 bp, Zea Mays
cttcgatgttcctaccgatcgatgcataccatttgtgactacagaagcatacgatcagtattcattatgtagacgaaaaaaaagagagctaaaaataactgtattttgagacgggggagtaggttgattaaaccacgtggaggactagtgctaattattgtcatacgtgatatccaaagcatgatatcgaattgtttacaaattttcgagagcgttgttgttgtagggagtacgtgtgtgtacgttagaggtgtcttcttcgtgcactagacgtacggacgggacacaatgatatatgcacgccactagtgatcagcttacacgtgtcgtctgttgccgggttaacatcaccgcattagtccattttttttcatcatcacccgccataaccactagtttcccccactaatcaccgaaccagcctcgggttaggcagcaaatcagctcgaaaccgagccgaaccaccacaaacttacgacgtggccccaccggtcatcctccttacctaaccctcgtggggctgggccgcctccgagtggaggagcagctgctgcaacggcagccatctcagagaagaaccatcaccactcaccactctcctgcttcgccgtcaccagcggagagaattggcta

SEQ ID NO: 65024 - DNA, 394 bp, Zea Mays
tctttggcatggcatccaccttcttcgtgaggtcatcgacttgcacaaccacagtgtcaacctgcatagccttggcatccacctgcttgttaagttgttatggattcattgatttgcacgactgtcgcgtacgtccaccttgttcagatagcgcttgattggtttactgcgaacgcacaccctgtcccacgcgagcctggccggccaggtacggccatttctggcgacatcagaataacttattttgtatccactcatgcagccaccgttcctcgcgcacagacaaccaaacagacgctcaaccaaagtcaacgcacgcaacgattcaggatggaatggtacgggtaaccaatcagatggatagtgcatctttcttgaaatacaaacgaggacg

SEQ ID NO: 65025 - DNA, 370 bp, Zea Mays
ctagctctctagaagaaattacttgtgctgattttgatgaactacttactgatattggtgatttgtacactcatatttctccaccagaagctagtctccatgaatcttctactggtccctttaataatcggagtatcacattactggctgcaccctatcacatttcaagtagccacaagaccattactctagctgttgcaccggatcaagtagtgcaagaagtcatttgtgctccagagtttggtactaaactaccattatttccattatcatatgatttgtcaagcacatcacagcccaattatcactcgctgcaatctgaatgtttatcatctccttttggttcaccgcatcattctatggtggtacg

SEQ ID NO: 65026 - DNA, 591 bp, Zea Mays
cacatgatgaataccgagtaataggatgtaaacacaaatgggatctccgccttcgaagaatcgaagtcgaatacgaaaggataacttgccgataagttcgataaatttgttcgggcaagaattgtaagactagattgactttctgaattgcattcgtttcaagaaataaaagttttaataggccccaaatttggcctttctcgagattgaataactccgaatttggtgaaactttatgaatagttttgataaatagagatagacgcgatcaagaaataaaaaaaatctagtgaggatctgagctaaagtccaatctcacagcattacacgaaataaacacccggggtgtcacacgaagttagtccgtagaggactcatcaacattctcttgaaatcttcgcgatgctcagagtctacttctgcgtagaaccactcttttgtccaatcactatgccacttttgtaacgggaccatccaatctataaaagcacaaatatcaaaaacatctgcttgcatagttgtttaaacatacttgagcctatatagacccggtagaccgtcgagtatcccaaaggacctcggtaaatcaac

SEQ ID NO: 65027 - DNA, 790 bp, Zea Mays
gttgctctggacgtctctggcacatgtgtggtctcgctgcggactcgtgctcgatgtcgggatcatcggagcaagtccttcgtcgcggagccgaggtcggcacggaccgcaacaccaccgccacctattcgaggacttcgtcgtcggctttcttcctccgtcgtagttgacgccttggcatgggcagggctctacgctacactgatgaggtcgcctaccttccccttctgccttccgcgcgccatagcagccgagtgcctcagcccccccccccccccatgttcttagattgccagcgggacctccaccttagggattggcggcgccgccgtgttcctgtgtctgagatagaagattgagtttgtggtgtggatcagaaaatgggcgggtaggattgacggagcgatgagagaagttgttcgccgtaggattttcatttgacgatcaggatcggatctaggcagtcttgggtcagatgggatctaaaccatagaacttggatcctggggtcgacatcgaataccgattcaaggtgatactagatctaatgctgaccgtacgatatggatctagcggttcacattccataccgattctcttacaacgcaacttaatctggactgtagatcagatccaatggcccaagattcgcagtaccccttcggtgtacacatttacataagaaaccccctgttttcgtagaataaacccgtagtccaactagcagtgttccctgtgtcttagaactattaccccaagacccctgagttttccaggaattgaggcccag

SEQ ID NO: 65028 - DNA, 615 bp, Zea Mays
tgaagaaagagtaagaaactggatcttgcataagatttggtttcaacacgatatccaagagacaatgagagaagaggagtattaaattcagttaagtaatattgatgtttgcattgaagagatagtgtctagtagtagtttctagatgacgtggaggctataaaaactataagtggtgtcttgggttgggactgctctaaggtccttagagtatacttaggaccacatattatagccgagacagattgctaggtcgtgttggtttctctctttagaagaacagggatacacattactcagaaattgtttagaaaagtatctgagaatgaatctccgatgtctgtattccattaacgtaaacaatatatacacagtgaacggacggcttcacgcccgcacgcctgttcgggagaaaaagcacgtttactttatgcgtttacattattgctaattaggattaagggaatgagtaactgctaatcttctagagtcttcttgttctctctggatcttctggagacttcttatctctggatgagatcaccaccgtctattttcctttaacactcccccttgatcgaatctatcctattacatcatctaggaatacaaaac

SEQ ID NO: 65029 - DNA, 579 bp, Zea Mays
gggtgaaggggtacaggaggacatcagccgtacgatccagaatcgagggctctaattagatctgatcttaagtgaaacggtatgaaactgtggctatccgatcccacacggacgaacattatttaattacaccacggggtcactctgatccactcctaaccgttcgatccacgattgacgaccacgatccgacacgaccgaaacgatatgtttgacccaatcctcgacgcacattgcgcaaccaacggacctggcacgccacctaccaccgatggcctaggacggcgacgtagggcaagggcacgacggcgccatggccggcaacggtcaatcccggccaccaggtgcccgaatacacaagcgaaaagtgcaaaacgttgtacgagatctagcgaataccaaggtagagtccataccatggattggggcggcagtggccctacccactcggcacgacgggaccatggcgaaactcgtcaccggcgatgaattctctgttccccggttgctaaattcatatggtgaggtcgtggacaccacccacgttttgaggcgaagcaccctagcatgaatccggac

SEQ ID NO: 65030 - DNA, 443 bp, Zea Mays
ataacaattttctaaatactcaaacactactgttaggcattgcatgtgctgttaaggttaagcatgtcactcccgctgtcataggttacatagtgtgaaaatgttgatcctaggctgccgtcacttgtcagcctgtggtctctagaaacagcctgctaattttttgtttttcgtagtcctaccgatgcagaaatcagtgttgtggattcaaccaaaacaatggtctcatggtcacattggtggaccgtggaatacaaaatatgatttactaaatactaagagtgtttttattgcatgtcatgaggtgttgaagttagcaagttatgcatggtgttcttgtttttctgaggactggttgggtctgtaaatggtggacataatttactaaataacattctttcctgcatgtggctggtgttatggccttgtagccataggtgtag

SEQ ID NO: 65031 - DNA, 523 bp, Zea Mays
gaggcaaatgtctacaatgcccctaggtataaagatgttgatctcactttaggtcggtgtgaagatcaatatgttacaacaaaataaaattatagcgaagaaaatattttatggaataatattaagaaagcattcgtaaatcgcaattcatacatcacttggtgggttacctagaaaaaagatcactattgcgatgtcatcacgaaacctaactattgtacgatcattggagtatggatatgatgagtcaatggggcagagctcgctagtggcataggcgaggaagtcaagggagtcgaacatggtgtggcttccaggtgcgaaggtctcaccatcggtgaacgctgaagactgagccatcggagtggagggtgtcacctggcatgctagcgaactagcggtcccttacctagccgccaactgtcatggttttgaaaaccaagggacaataggatatgtgttcaggaggggatgctagcgcgttctcacttcgaatggtgaaccacctgggattcgaatggag

SEQ ID NO: 65032 - DNA, 684 bp, Zea Mays
ctgcattttaggtgataaaagtcgttaattgctttggaaaggtcgtctttaaccacgtcgaagcagcatctatagaacagcccaatgaagccatccggtcctggcgccttttcagattgcaaccccataaccaccttcttgatctcattatcctctatcacattgtctaactcggatagatcaaatggcaaacagcccaaattatccaaacgaacagccctctgtctcactccacttgttccaagcactgcattaaagtgatgatgagcctcatgcattttatctcgttggctggtcaagattgaatcaccatgaactagagatctgatattattttttcgtcttctattgttggccatcaaatggaagaatttgttattagcgccccccagacgcatccaggtgagcctggaatgttgtcttgcaattgatttttgaatgcaagctagaccaagaattttggatttaagccatttcctgaattccaatttgtcactggtgagctgcctagcttcctgagccttctccagaagggttagcacaatctgaatgattgccaattgcacactgacattaccgagtgattttcttctccacacgcttagagccttagctgtgcgctgcatcttcacatggagcacaagaatcgcatcagcagaattgacaccaacgctccaagcgtgt

SEQ ID NO: 65033 - DNA, 816 bp, Zea Mays
ggctgtgcatttgttagaccgaaagacatcacaatgaactcatacaacccatacttggtaatgaatgccatcttcggaatgtctgaaggtcgaatcatgagctgatgataacctgacctcagatctatcttggagaacacgctggctcctctcaactggtcgaacagatcttctattctgggcaaggggtacttgttcttaatggtgacctcattcagagctcgataatcgatacacatccttctggtgccatctttcttctccacaaataggacaggggcggcccaaggcgaggtgcttggccggatgtaacctttctctgacaactcatcgatcttcttcttaagttcaactaactctggtcctgatactctataagctctcttaaagatgggggcagtgccaggaagaagctctatggcaaactcaactttccgctctggtggcatacctggcaggtcctttggaaacacatctggaaactcagacacaaccctgatactctcaattgggtctacttccctgctatcgatagccatctgataacaacttccttttcgtggctcaggcgggactaactccgtcaccacttcctctccaagtggggacaataacttgattgtcctcttatcacaactgataactgtctgatacttatctagccaattcatccctaggatgacatctattccctgagtacccatcactataaggttagcggaaaacgctatcccccttatttccacacttacattcaaacaaatgctatcagctcgaattctaccaccggctgagtcaatttgaatgggggttgac

SEQ ID NO: 65034 - DNA, 369 bp, Zea Mays
cacaaaactgcatttgaaacggttagtaaaaactatatattttgatattcaaaatctgcagtgttagtccaacatgaagtagtaatggatgatcattgttgttcttgactttgtgcccacatggaaaagtaaatagatagaatggcaaacaatgcataatgaactgccatgacactttaaatgaagatttaagtgttcagattttctgaaaattgtgctacatagctcatggtctctaaactatggtttcacagggaatttatgacataaggtattgaaattgtttataaaaacggtgaactaatatgcagtatttgaatggactagatatattttttaattgcagatcaaacaaataagtataatctt

SEQ ID NO: 65035 - DNA, 1738 bp, Zea Mays
ggcggtatttatctgtcacgaccacaggtgactaagtgttcctagtagctgtcagtagctgtcaagccagtactttgggccaagattagtgtatctgtgatttgttcttgagctatatgattaggggatcttagtcccggtccagtatgagatctataaatacttgtaatatggaaaaggaggattcaagtattgaataaatcagaaacaaactactccacttatctgttcttgtgtggcatgagtatgctacgccctcgtcggattcctcacgtcatcggagatctgcgacgagatcctcctagtggccaagggacatgatagtggtatcagagccattcatcctcgacggtgatcgatgagttggccaaactgttgagaagaagagaaggcaacacggcacccaccaccaagctgttggtgggacacactttgtgttagaatccttggagatggagtcaaagcagaacgaagcaaggtgggaaaagatgatggctaccatcgagacgctcacggtgaaagtgcagaagatgggaggggtacaacgacagcttctgggtcaatttgaattgactgcagaagtggtgagacaggcctcagaagagcgtgatcggctgtccaggcaagtggaggcaaatggtacggaattggcaaggatcaggctagaggctatggcggagaacacggagaggcatgccgaggagtgaggaggagttgagggaacctgcgggtgggaggagagagcaaaatcaaggtgatcgaaggaaccatgatcatggggaaccctaggggtttgagagagatgccatgcatatgcatataccgaagatgatgttcccaaggtttgatggggtggaaccaggaatttggttgaccaaatgtgaagattattttaggatgtatagggtgcccgaagctatgaagggggtggctgcaagtgtataggttgaagggaggagtaggatactagagaaccttgtccagagcagtgttagagaagtttggggccaaggaatatcctagagccatgaggagattgttgggtataaggcagagaaggggagtagaggagtacatcaaggagtttgaataagctagatatgttgctgtggtgcacaaccaccaactggatgacacctttttgagatctcagtttgttgaaggtttgaagggtgaaatacaaggaatagtgatggcttagcttccaaagtggcctaaaccaatataaactgttgtgcatcatcgatgtgctcctgcacgtaccatcaagtcacaagcaaagacgtcatcctacccaaaagcatcacgtggataatccagtggtgcgcagtcaggtcacaaacaccgacaccatctgaggtaaagccctctgaataaaaaacagaccaaaaggacatcgcgagtgtggaagtaagtttttctagcaagagtttttttaaataacagaacgttgggagtgtggaagtatgtttttctagcaagagtttttttaaataacaacatacctaacgtttcttttatttatgttcaaaaaagatgcaggtagagcttgatatcgattaaaccccactggtccctcgcctcacccatgcaagagccaaccatttgaagtcacctttgcgtacgggagagacaaggcagaccaggaagcaaaagaagcagaaaaaaacaaagaaaaagaaagctattaaatatgataaggatggattcgagattttcgatgaatctttgatttcag

SEQ ID NO: 65036 - DNA, 562 bp, Zea Mays
aagagctgaaaattatggtgttgattccttcacaaatgttgggttccgtggatggaaggatggtcgcaaattaattgagggacatgataaaggagttgctcataacaatgctagaaggcattatgaagattacaaaaatcagaggcaaagtgtgccatatgctatgacatccggtgctaataaggtggacaatgaatataaaagtcgtataattgttatacttgaagttatcatatttcttttgcttcaggctcttgcatttcgcgaacatgatgagtcctcttcctcaagcaacaagggaaattttttagagatgatagaatggtataagagcaaggataaaaatgttgcacatttgctccgtactaatcaaatgacttcaccgtcaattcaaaaagacttatgcaaagcttgtgctgatttgaccagcaaagctattattgaagatattggagatagaaacttttcagttcttgttgatgaggcccgagatgcatctataaaggaacaaatggttgttatattgaggtatattaattcacaaggtcaagttattgaaaga

SEQ ID NO: 65037 - DNA, 437 bp, Zea Mays
ttgcagattcctcaatggaagtgggactgtaacaccctagtgttacctagagttcttctcagtgctaactcaagatcattatctcatgtgaatcaaattgaacaaaagacaccaaaaactcatgtgcaaaaattcaaccaagtctttttgtcttaagaatcatgccataatcatatcatgcactcaaagtggggaaaatgtctaaaccctagaataaccttaattaggccatttaagtaaaaagggggaaattggtaaaaagaccatgaaaaacatggaatcatggcttaggccaattataaaagttgaaatagactaattaagctacaataactattagaaaagtttggccaaaataattgtttaaaatccccaaaaaggccatgcaagtgggagctctctagggaaatctgaaaattcagatttctaaatttcag

SEQ ID NO: 65038 - DNA, 325 bp, Zea Mays
gcacaatcaaggcaaaagagttatgctgataataggagaagactactggagtttaaggagggtgatcatgtctatttgaaggtgtcaccacttcgtggtatgaggagatttaaagtcaaaggaaagttgtcccctcgcttcattgggcctttcttgatcttaaagcgagtgggagaagttgcatatcaactggagttacccgatcatctgtcagatgtacatgatgtgtttcatgtgtctcagctaaagaagtgcctcagggtacctgaggagcagctaccactggaggaccttagtgttcaagatgacctgacttatgcggagt

SEQ ID NO: 65039 - DNA, 398 bp, Zea Mays
tgcgccagtgcacccccttctctcaggccgccaccgcgcaatctcaaattcacgggccaccgctcaagggccctataaattgagcacgccctcggctctgctatgtaattgtgcactcaacacacccactcgtgcctccaattactcaccagagccctcgaattgctcagttcccccaaatcagttttccgccgccatgaacaagctctcaccgtggccagtgcactcgaggtccgatcttgtcctctgctctcttgtttcagcacccttacatgcccctgattcttctcgacccaaccgattaggctagaaccccttagatcgccgggaacacttcatgatgtccattgtgcccgctgtcaccgtggacaggatgatttagagctcaaatctaacaa

SEQ ID NO: 65040 - DNA, 613 bp, Zea Mays
gtcataaactaattttctctttaattcctttcaattctcctgtgattctggtaatcaaattagccccttaagcttcgttatgcatattgctgaccaacgcgaggggaggagcaagccgagctattgtggccgtgggtgcacgagtaaacggcgtgcaggccggatagtgtgacacggtgacggcgtacagaccgcggaggacaaagaaacaacgttcatgcatgccgcgactggagaagccagcctttcagtgcgccgaagtttatgccgtggtgtctaactgtgtagacttcaggtcgcgactgtagctgttcggcagtctgcgtgttgtatccggcgtccggcgaacacggggtacttgacttgacgcgtacgtggtgcgtctgcgacgttgccgtgggcgtatattctagccacgtttccaaagttcctgcagtgcgcacctggtgaccagcgatgatctacatgtcttgcactggtgtgaacaccataaccgcaccaaactgaccaccctcaatagtcagtaccctcgaaataaaaggagataaaaggagagcggccaaactgtatatatgatcatgtaaaacgataaagattgaagttaaaataggag

SEQ ID NO: 65041 - DNA, 602 bp, Zea Mays
caattttattccagcacaaagtggcaatgatatgatggctgcattggtctggtattattaattcatgacaatattttagtagcagtaataacagcaaaatttcttcaggcttaggctgacatgcaggagatgatattttgtttccattgctgtgtgctgtatttgccttagctttggcacttaaatattgcatagttactgttgtcatcttaagtagtctggaggaccatttctttgctggcacccaggtattcttttatccataatccatttcctaatgtttcgtctagtagtttttatgtttgataattttcatctgatgttaggtttggtcgagttttatggatgctaagatatggttcctctcgaatgacagcataattgtggtatgtctgacatcttgtacacaaatgccatcaagaatcatttgggacttgacatcttgtacactaatgccatcagcaatcatttggggcttcatgtctgatgtgtgttgtttacatcataactcctggactgttgcatggaataatattgtagctgtagctgctgtaagtcacaaatttcttgttttgttttacataggttgtccatatgctctt

SEQ ID NO: 65042 - DNA, 631 bp, Zea Mays
ggattattttgttgcgttggatgtggctgcggcggagacttcgccgcgtgtggagggtgccggggatcttcctagtgcgagtactgggtataggcggcgaagggtggtgggaaaacatagtgtgggtgaatttttgcgaagtggtaggcgccgtcgtatttggatggagcgtggccgtctccgagtagaccgggttggtaaacgagaattgttgtcctcgccgattggggcgagcataggcgagggggatcttcggaatctttttgagggtgaggaattgaggataatgttgttcaattatagggagatgggtatcatcccgaaggttgagctgatgtaatatgtgatgccctcgccgtgtgtatgtaactataatttgtatggtaatgtggcctgttggccgtattcctacgcctgtgttggtttcggctgcgcccgtgggcgattttgcgcaaagtgtctttttaatgagagacttcgcttaacgcacttggtgtgctattctggctacacccttaggcgacttttttgcggagcgtttttaaataaaagacttcgattaatgcacttgttgagctattccggctgcacccttaggcgacttttgcgcagagtgtcttttaaataaaag

SEQ ID NO: 65043 - DNA, 431 bp, Zea Mays
ctcgctgggtccttcgacggtttacctagcgccccggtgtggattatgatgagactttcagtccggttgttaggcctatgacagtttgagttgttctttctttggctctctcttaggactggcccattcatcagttcgatatgaagaatgcattcttacatgacgccctcaccaaggctgaataccgtgtcgtggcaaatggtgttggtgaagctacttggttacgtcagttactccttgagattcagcatccacctcgccgtgccaccctagtctactatgacaatgtcagtgctgtatatctctccagcaatcctgtgaagcagcatcggatgaagcatgttgagatcgatctccattttgttcgagataaggtcgccctcggtcacgtttaggttcttcatgttcctacgacatcatagtacatagac

SEQ ID NO: 65044 - DNA, 776 bp, Zea Mays
ccggctgcttcgctcatgggggagatggccggagcacgggacacgccctaagctctttcttcctagatgtcctctttatccagagaagtgtagaagatgctcccatctataacgacaatcccactgttctagggaggagccccctcagcaagaggcatgccaacgccacaacatttagcatcattacaaggccgaagaacggaacctcgcgcaacctgtatcccgggatgaggcatctgcagcaggagagactcctaacgacagggcactcagcgagcgcctcaattcctaacaccacaatcgtcgccacactcaggagcacgagcgtgaatgagtggagcgtgatgccaggcactgagttgataactcgccccttccccataacctactgtctgacttcgcctgagacctgaacacaatgagcgaagttggcgggtctcgggctcaaatcgccaacgacctgccccgtaccccggacacggagggctatcgatagatcctcacccacatagtgaaccatcttcttgctcatccggctccggacatgcgctacgtcatcaacagtcgggtacacgcgtggagcaacatcaatgtttcgtgcgatcaccggcatgaaaattagataaggcgacgggaaagagtatgaccgaaatcatggtgcaccagcacgcagtcacgcaactaggacggagttggcagcagcctctacaaatagctcgacactaggccaattggctcgggagaggctgcacgaccctcagcataagttgcctcct

SEQ ID NO: 65045 - DNA, 405 bp, Zea Mays
ttcagagagaagtttgatgaaccaaacgatgactggttgaaatgcattgaagctaccagcgacgagctgcttgggacatattccaaggccgaagatgatgccttgtccgcagccttcgggggtcggggcaagaaaagattgaacagggtgtttgatgcaattggcttcgtataccctgattatcactaccaattgcgaaggcaaggaaagaagagaaaaactgccgcttcggccaccactgttgtgtcgaagggcaagaaaatgaaggttctgacccacctgccgcgatatattgaaccagtcgtagtgcctgaatttggtgaagggacctcttcaattgctgaagcaaaacaagctgctcccaccatgcagagcgctgaagaattgattgtagtgccgaaggtg

SEQ ID NO: 65046 - DNA, 292 bp, Zea Mays
cggctcagcaggatgacttgggccatggagagtgggaccagtggattgtgaatgagcagcccattcagcaagaccaacaaccccctttgccagaggagcaacacattcagcaggaagaactgcaactcagcaatcagcactctggcttgtcatctgatagctccattggtgctggtcagcttgcaccccccacgaatggtcattttgcggtgaatggtcatgctctgattgggaatggaatggacatcaatgctgcccctttcaatgggcctcaggaggttgatggaccggc

SEQ ID NO: 65047 - DNA, 795 bp, Zea Mays
ctcaaggtcttggtggttgaaccacttgcgcgctcgagttggcctcgaaatatgctgaggttcgattcattgccgccgtcattgtaacgagggggtggattatgcacgctcgacaatttatcaccatagtaagttgttgtgaagtttgacacctcctctagaatgtatgcctctgcaatggaagcctcgattttgcatttatttctacatttctttcgaatagttttagacatctctcgattggatagcaccaacgtccctgcacgggcccccattcgtgcctcatacgggtgatgaagaatcaaatgctgcattggattgaagaagccgggtggaaatatcttctcaagcttacacagtaacacgggtgtcaatctttccaagtctgcaaacacgatttgagataactcttttgcacaaagctggcggaagaaataactcaactctataagcgctagccagacatgctcacgaacatagcctcgaaccatcgctggaagaatccgttcaatccatatgtggaagtcatgactcttcatccctatgactcgcagagtagataagttcaccccctactcaagttagttgcatacccattagggaacatcaacatcttgatccactgcagtacttccttcctttgggccctgctgaggatgaaatcggtcttaggccttctccatgtctttccaccactaggcggcttcatctcttggtttggtctatcacataacgctgccagatccactcttgcctttacgttatcctttgacttatcagaaatgtccataattg

SEQ ID NO: 65048 - DNA, 2450 bp, Zea Mays
agaggagaggctcccaagtctcttattcgtggtggagttggttacaaaatggagtcctagctaagtcttggtttggtggtggactccggcctctgggtcctcctcctgtccgtcggtccttctaagcatcttctcgtctagggttcatccttgcgtctatcgtgtgcccggggcccgaatcctagccaggggattcaggttgtgcccgtccaacatggagcctcgggtcgtcctcctccttttataggccaagaagggggtcggccaacaacgactgcctaaataaagagccaacggacgacagtaaaaccgatagttctaccatggggtaaagccacgcgtgctcgtggtcgattggctgtcttgtactctttatggcgagcaacgcggacaacgtggggtccgagcgccatcattcgggctatgtcaacccctggccttcatagcctagggctaggcgcggttcgttgtgttgtgcactgccagaggtctgcgcactcaggcctagtcctggtaggtcatgagtgcgtcgtaggtgggggtgtgtgggccataaatgtgtcgcagtccgagcagttcaaaggtcatgagtgctcatggtctgagtggctcgtaggctataaatgggaggcggactaaaaactccgctatggctcggcgcgagacgtagttaatgctgccggtcactgatgaagggtcggtctcgggccagacgagggatccactcgagtggtttcccttcgctatgttcgaccccctattagactctaccactctcgacaccgggcttggtgctgcagggctcgtccagtggtgggttcctccagggcagacactacctgcctcctctagctgaccgatgggccccagttgctattggctttccccggacgtgctcgctgatcgatcggccctagggactagggatcttatccccgatagtagcccctgagcccctagggggatagtatttcccctcgggggcttctcccgggtctggcgtcgtcttgtcccttttgtcgctcgcaaccaattagttggagaggctcgtgaggcccgctattggcttccgagatccagtcaggcgctataagtaaagggtccctctgcacttcccccaactgatttcaatcgtcgctcccttgcttcctaagaacaacattctgttaagagggtaacactgtctaaaaccctttaggatcctcccagctgaccatgaaccatggcaagtgtcccgctctagagtatcctcactaaggtcgttccaagagtcgcttgccacgagaaaggtgggtggtttctaggaacttgtcctttttcttgctcctctgtcatcttggtgactggttttgttcgtcgggtgctgggctcaagcgttacaggagaagtcatatcgctctcgtcctccccctcgacctctccgaatggagaatcaagggctggccctagcggcggtgagcccaagccatcatccctggcgtacgatgcctccaatgcgccaaccatcgttggtcgtcccgtggtgtccataaggctgatcggtgccagcccccaactcagccatgtcatcctattgaggcgagttgtcgcagctccctcccccacctgtcaccccgcggggtcggaaccttggcccttctactgctagcgatggccgagttacggggcagactggaggcatctcgatcggttgtgaggacaccgcgggcctccaagcgcggttagacgttgtggaggcccacgagtcgagtaagctatttgcttcgctcttcatcactccccactctccagggatgctcagacctttataccttttttgttcctaatcagtgtaggaggccgagctggtggagcttcgctaggagatcgatgtggtgacttggagcaaccgtgcctgcagggcgacccgtctgcagcgcttgctcgacatcccgagtcatgtccgaaatgtcgtggaacacgacattcaccatggatccattgttgcatttgccattgcccagttccgcactgggatttatcttcgtgcttcaatggcccttccctaggtgcttcattcgcggccttcgagagcctgatctaggattatggcgagaccgctggtgggatcatcggcgccttatcctcggaggatctgattcgatgggtgccttacggcctactttggtgtccaccttttggttccctggcatgggcttctgctcttgtagttgcaccaggtgttagaatgggagagaggagtgatgagcttttcgccctaccttagtcgtagtttcccctctttttgggtgtctggccacgcgttcaaccctcgagcctagaattgtggcaccatgggactcagggtaccttcatgtagaggacgatgtaatccgggagaaatcccaccttagtgacttttacctttgtgtccccctgtttattatgcacatggaaataacttactcgtg

SEQ ID NO: 65049 - DNA, 564 bp, Zea Mays
cgggatatatctaagaagcttagatgcatggaaccgttgcaatgacccaaagcacacttatggcattgacgatggccgtatccgcaaggctaagcacgtgttatgttatgttatgttatgttgtattatatcatatatttgcaatgattaccacatatgatttgtctgtatatataggaagatgctgccaccggatcagttgtcgtacgaatgagcgcagatctgtgcgtgaaagagaaattagggttgggtccggtacgtgcagcgatgagagagaggcaggccgagatctaggatctaatatgtgttcataggcggctgcgtgggcaagtactggcggtgtactgtaccatacgctgtgccattccaaaaaagcagtatttaccacttggatttaactttcactacttgtcactgtcctcctccgtcctcttcaaacaactttcaaactctctttctcctgacaaggactgctctcttgctgtgcattagacagtgaccttcaaactaacatgctttttttatttgatttaaatacatctatggccctgaacttgttgagag

SEQ ID NO: 65050 - DNA, 546 bp, Zea Mays
agacaacagacggagggaactcagatttgaggaaggagatttcgtatacctcaaggtcttctcgatgcgtggtgtcagaagattccaaatgaaaggaaagttagcaccgcgtttcgtcggtccctatctcgtcattagcagagtcggacccgcaacatacctccttgaactaccagaatccatgtcagatattcacaatgtgtttcgtgtgtcctagctccgtaaatgcctgcaagtaccagagaaccacatcgaggcagagacaattcagattcaaaaagatctccagtaccgggaaaagccagtaaagattcttgactcagcagtctgaaagacccgcaactcagaagtaagactctgtaaggttcagtggagcagagaaggagaagaggaagctacctgggaaagtgaggactctctgaggagggaatacccttacctcttctcgagccccgtctgaatctcgagggcgagattcctttaagtggggtaggtttgtaacatcccaattttcaacccaggtttgaaaccctaatctaacccccc

SEQ ID NO: 65051 - DNA, 1580 bp, Zea Mays
gctgtagtttacgagccacgattctccaaccacacccctctgctttgcattcagctcgataccttgtcttattagtcaccacattgtgtacctcaaactctttcttgattgcgtgttgtctcaaagccatcctaaaatcatgcattgtaggaaaagattcaccaacctcaattttgggattttccttgtcaaccactatgctagcttcacaatctgcatcatcatcaactaaaatttgcgcctcacagatctcagcctcagtaacctgttccacctgaggagcttcctgagcgccatccctaaatcccaaggcagcataaaattgctcatcaccaacaaaaatatcagcatcatgcatcatagtaggatcgacatcccccacatattgacttgcatttttggtgcatggcaatttccccaacaatttctcctccactgatatgctccttacataacctggtttcagttcaaattgtacaaccaatgttagcactttacttgtccaatacatctgaaatgcgttgtcaagatcagtgtttgtgataatctgttgtagatacttattttctcgatcccaaaaccagcatatcggctcttgacaactcccccaaattgttctgcttgcaagatcatccattaaatgtttgactaagtagccacccacaacattcacggacaaaacatggtttttatcctccatctcaaccttactgccatcttcaagaatagccgtataggctggaatcgtagcgcgcaggctgaacacatgctctttcctacgtaccaatcaaggaaaattaacaaaaattagacctatcactctacggatgaactacaaaatcagactcacgttgggattaggatatggaactcactctacgaatgcgctgtaatttccatcaagctgtgacctgtcggccatctcattgccgtccattttgccgcctctcatgccgtctgtgcccttccacccgctgcagatgggatcatcccccatcttgttgaagctgttcatgtccatcgtcgctcacttctgatcttgtgtttgggggattttgtggttgaagtgctaatcagccgccgccatcagccatgtatctagggttatgttggcgcttggtggcagaagaacggaacaagaaaggcaagggagcacaggagagacgaggggccaactcagtcttttggctttgggggcaagggaaagaaaaaaaatcggaagggataggaaaggacgatgcgtgcagttttctgactgctgctagtgcctgaagtgttattccgtgaatacttagattaccagtgttgtttgctgaattagctcatagaccggtgctattttatggatttccccctctccaagcaaggagagaccggatataaataaataaaaaggcctgcacgattgcattgcaccgacacattgcgcagacattctcaagaggtacaagcgtctccccgcgtgatcggcttggagtcttcgttccggttgttcacggttgtctgctaggaccgtgcgagttgcaaagattttttcggtttcatattgtcgctgtacacgatatcgctgtattcatttt

SEQ ID NO: 65052 - DNA, 485 bp, Zea Mays
tgcatcagacacgctagtgccttcctaacgactagtttctgaaactagccattattgtacatggcatccaatgcacacataggtgtcgcatcaaacatgtccggtgagtacaatcgtgagtgtgtagttgcatacctctttgagtaccctatctggtgatacaccgaacatgtacgatgagtactcggccttttagacacagtttacatcctctctaagtaccttgtctggtgttatatttggtggttcaccgaacacattcaatcattacaagtctctgaggccacttctataagctctcagagtaccatgtctaacccaccatatatggtgcacatcagataccctggtgttactcttaaaacacaaaggtcacactcatgtctggtgcaccatatccgatgcacactagacatgtccgatactattgctgcaccaccgactcactcgtttcgaccattttcgagttgtgttttgtttcaaac

SEQ ID NO: 65053 - DNA, 813 bp, Zea Mays
cagatacatcgcacctcaccgacggtgatccccgtgcctggatttgcgcaggccgtcacgattcgtgcttggcgcaaagtggataaccgtgggggagtaaaagatccagtggggagacgtattgggtcgcggacagtagcttatcggagggcttgggggctgtgcgatgtggccgaatggccgtggttgtaagaggtcaccggtgagctcgactgcgccacgctgtggtcctttaccacgtattcgtagccgtggcatgctcagaattactctccctgcatttgtaggccgtcgagcgccacgtcgtgctcgccagtgcaatgtcttgtcaccatcgccctccaaatcccttccaaattcggagtaatcatggccaagctctataaattgagcacctcccttgcttcgcctcctcataatgaacccagtgcaactctaacctcggtcggtcatccaccatagcctgagcaattccgttttcccccaaatcggttctccgcgccgtcgttagcatcttaccgtggccagccatccacaggttggttcatgcttctctacttggtgttctagcatcccttgagtcccctattgctcgtacgcccgcttgattgaactagaccacgctgaatcatcgagaacaccttagttttccctcgggtctcgccgtcgtcgtgggcagaagaactccgggctggactagttcaattgagggatggattaggatcgccaggggtggaattagatgtagaacgacttagggtgtgaatggtttggtgttgcggccggtgcaagctcgtcgaagcgcgcacgccg

SEQ ID NO: 65054 - DNA, 728 bp, Zea Mays
gggagtaataaccgtatacgaggactagcaggtcgccagaaacattgagagagacttcatccccggccagcgcaacgtacattgtcttaccaccgagaacaaagactctaagggccctcgcccgatcaaagaacagacggccaaggcctagttatagagcaacgaaggggccaaaaaagtcaccctcgacgcggcaaccccaaatcaaacggtcctgatcagcgaagcagaagaagaaaagctcatgtcttcttaaaaccgcatcaaggatgtattcgcatggtctaccctagacctcatcggagtaagtcgtgcaatcatcaaacatagtctaagcaccgacctagcaatacaccccaaaatgcaaaaaattgtgcaagatgtccgattaaaagacgaaagcagcgaaggcagaatttcacctcctgttggaagcaaaatggagaaagtgtatagacttcaccagcctcaacaaggcctgcccaaagtatagcttccccttaccaagaatagacaagattgttgactcagtggccgaatgcgaagtaatgcctttgctaaactgcttctcagattacaatcaaatctacacgagggaagacggcaaggcaaaaacaagctttatcacacccttcggcacataatgcttcacgcgtatgcccgaaggcctaaaaaatgttggctccacattttcaaggctaatcaagaccattcacgagagccaaatg

SEQ ID NO: 65055 - DNA, 466 bp, Zea Mays
tccaaaccacatatggcagctctctgatccactttcctgcaagcttttcatttttgtcgaacactttcttcctgagcgcttctagtatcattccgttggccctttccacctggccattggctcttggatgcgctactgatgcgtacttaatctggatacttcgttgttcgtagaaatcaaagaattcagagatggtgaagttggatcccaggttagttatgatgctatttggtatcccaaacctgaatattatgtcttgtatgaactccactgccttggctaaggataaagaggcaataggcttacactctatccattttgtgaatttgtcaatggcaaccagcacatgagtatagcctccctgagctttctagaagggtctgatcatgtccagcccccagcatgcaaatggccatgttatagggatggtttgcagctactatgtcggtaaatgttgttgctttga

SEQ ID NO: 65056 - DNA, 428 bp, Zea Mays
atcatccccaaactgatggccagactgagagaactaaccaagtacttgaggatatgctaagagcttgtgcccttaagcatgggggcagttggacaagagtctaccatatgctgagttctcttataataatagttaccaggccagtctgaagatgtcaccatttgaagctttatatggcagaaagtgcagaactcctctctattgggatcagactagacatagacagttctttgagcctaaaattattcaagaggcagaagaacaagtttgtatgatccgggagaacttgagggtagcacagacacggcaaaagagctacgctgataaccggagaagaccactggaattcgaagagggtgatcacgtgtacatcaaagtgtcaccaattcgtggaataaggagattcaaagttaagggaaattatcccc

SEQ ID NO: 65057 - DNA, 753 bp, Zea Mays
tttcattttgctgagccattagctcctgcatcgtaggagcctgcggtggtggcgggggaactttgctcgcggcgtgctcttgctccatctgtcaaataggaaattttcccgttgttatacttaaaatccatgattttagagtgacttaatcagggtaaggtaaatggaaatatgaatttttcattttgagctcgagacttaatactgcactaggtaatcatgaactaatttgatacttaacatccatcttttcattaagcataatgatttttccgggttacatcatatcaggagactcgattttctagtctagtacatcatgtggtgccaaaggctaagctatgcagagtacatcttcctgacatgtttctacctaacccatctaaccctgagtagcagaggcaacactagcctcaggtgaagggggtccttcagagtgagcagtgtccaggctagaagctagctcaatctcctcggggtcctcctcctcgctatcctggtctgcctccatctcttgatgcatctcctcgttgtgcatttccaaatgagcattggcctcatctagctccacctacaagtcatggagttgattctctaggatctctatggtattgtccttaatctccacttgccgctccagctcgtgggtgtggttacccatttgctcaatttggagatccttctccaccaactcagaggataaatcaactatgaagacctccatgtcgtcgagggttgtcttgtcagtctgag

SEQ ID NO: 65058 - DNA, 528 bp, Zea Mays
gggaggcgctcgaaaccgagcaccagcgccttggagactggtgttcccaactggagaggcgcactaaggcagcgtcctgccaattcgcatcagagcgggctgagcttgagcaggagcgtgaggacttcaaggaggacattcggaaggtgtctgaccgagaggaggaggtgacccggaaggagagaagcttggtcaagaagaaagaacacctagaccaaaaggaggaggccgccacagcgctccatgataagctgaaagcttataatgcagtgctggagaaacagcgagacaagcaggttgcggctgaggcgaagctacagaagctgcagcaggagcttgccgacaaggctagtgacattgctcgcgctgagggaaacctcaaggcgagggaagcttccctggtgaaacgaacaactgacctcacttggcaggaggaggacctcgtcttcagggaggagatgtgggcaaggcggaacaagctgctggatgagcttgagctcgaggcagaggagaaagggaagcgtctgg

SEQ ID NO: 65059 - DNA, 707 bp, Zea Mays
ccacaaaccacatatatgtgtccagttgtggtccactccgaatacttggtacttgtccccttttcatttaggacaaggttgttcagctgagcatatatttctgttgtgttcagacgtttaggcggtcctttcgtgaccaccatgttctttataaagtttttcttatatctcctaaaggggtatttcgtgggcaaccagcgtcgatgacaatcgaagtaagtgatctttccaccatgagcaagacagaagcaatctgtatctaaaccgcaatatggacatgtcaatctaccatgtgtactccaaccgacaaaaatagcatacaccatgaagtcatgcaccgaccacaaatacgcaactcgatgtttgaatatctgttttttaaaaacatcgtatgcttcgactcctttccaaagctccttcaactcttcaatcaagggctttaacatgacattgagtttctttccgggatggtccgggccaggaatgattaagcaaagaaatataaattcatatttcatacaaagaaaaggtgtaaggttgtatggaataacaaatacgggctaacatgagtatgatgatgccatttgaccaaaaggtgtgaagccatcggtcgcgaggccgattcaaacattcctcggttcagctgcaaagtctggatcaaacatgtcgagagccttccaagcatccccatctgaagggtgcacgat

SEQ ID NO: 65060 - DNA, 565 bp, Zea Mays
caagcaccaactgtgcaagatgacattgccatataggcaatgatcaaggggcttcgtctaggcctagcagctcagtactttctaggaaaccacttcactccttagagaagctgttacagaagatggatgtatacataagggcagataatgatttccaccagagaagaggtccaaaggtatgcaaataccactaggggcttggggggaagaatccacccgagatttgtttgaagcatacataacccaactcaaagtgacgagaaggtagctcaatcttagggcaatcaagccagcatcaacaaccaagtactcaacaacactcttcctaaagcaccttctgcccaccagcttcgagagtaggaagaggaggtcgaagcttcggtggaaggttcaacacataagcaagaaagttgtattgtgcgttttgtggtgaagataaatgccacacatcaaggacttgccagataaccatccacaagcaaaaagatctcgctgctgtgactgctcaaccatctcagtcgaaggaggtatttagtacatctttgtactactcaccctacatccc

SEQ ID NO: 65061 - DNA, 1350 bp, Zea Mays
atctcatggtcaggtaaaggttgaatgctgataatagcccagtcctcatgcaatggcgggaggcgcctagttactgacctgatcataatttcccggtgaaggaccaccgaagcgctgaagcccggtgggagaaagggttcaggatcaacgcgcctatacgccatcggagcaggaaccgaggatcaccaaccaacggacggagacggagcaggttggggttttggtgaggtgacgcccaaagaaagcgtcaaggactgaaggggtgtcgattcagattttttaatacctcccgggcgaactcctcgaagcaactgaatttgggcggtccaccgatcagagacaccacaggggtgcgaaaccaggtactgtgatcaggagaattttggtttcccaccaaggtgacccgactcccaaaggcagggaacgaagtcagaggagaaccgaaggaagttatcttgttgggacaaaataaatccaagtgtccccggcctttacagaaatgacagcttaaggtcggcgggcccagcagcccaacaggcccacgagcacgcacggggcgccattggaggttgcgggggcgagaccagttggaattcgaaatttgaaatttagaacggttgggaataccgcctccaagaactacaccagaagaattagagcccaagaaccgaggagatccaaccctccccatagaggaagaaggccacgatcccacagccgaaaagttcagacgattgaacacagaaactctggggcgaggccgaggcccagcaaggggcctccaattactatgaacctgagcatgattatggaaaggggggttcaaacgattgaacaccgaagatccagcccgagccgaacgctgaacaccactaggggacttgataatgttgcgaatcggaacaacattagcaccggtgagagggagcctaacaatatccgcataggaaggattcttcctgccccggaccttcaaccaggaagtcgcttcctcatccgaaaaaagcttgaattcatgcttccaattgggtccaccacgattccagaggttgaagaaggccctgaattccttacgctcaatgcaaccagagttgtaaatatgaaaacccacagccatcgaagaaaccgaaaaccgaaaaacccgatcagccagctgaagcacctcaaagcccgcggcgaacccaccaagagcagcctgaagaagatgaccaaccgagaccgaattcaacttgaagatgcatctgccaaaggagaccaccaatcagaaggacgaccgaagacttgggcgagcagggcaaacagaagatgccaggacatccctgagggagtcctcgaaggccaggcccggcc

SEQ ID NO: 65062 - DNA, 425 bp, Zea Mays
cgcgcgaccatcaccgtcgtgccaccgttcctcgcggttatgccacaccgtcagccatcttaccacgtcgcaattgatcccaatacacaacccatctatcacctaaggccttgccacggtaacagccacggtcacccgcaccagtgactcagtccctctctccagccgccgcgcgtcttcttaaaattagccgccaccgccgatggcacctataaattgtcgcctcagtgagctctgctaagtaatcacacacccaacgcacccgcccgtgccttagattgtccaccagagcgctccaattttgaagttcccccaaatcagttagaactccgccgtgagtgagctcgccgtggccaacgctctgcaggtccgttcacgccctcctcactgtcgtttcaatacccctgtatgctatagatgctcat

SEQ ID NO: 65063 - DNA, 795 bp, Zea Mays
acttcatcaaggtcaatgtcagacacaaacaacaaagttcaggcctagagatttctccccaagtcgacaagcccggtacccaaaaggcccaccaaagtcaaagatcaccagctttacgtccaccttctttccatgctcatacatgcattaccactaactcttggataatatcaaatgaccatgagctccaagacaacattcaatttttaggcagaccatcatgcgaggacagagtcgcgaactagcccataggcatacaaacaaagtccataggttgcatctaaaaatcaaaagtgtcccatgagcaaacaattctatgaattaactctaagatgactctagtcttgggtttgtgtgcacgacacttgcaagataagaagacaaagaagcgatagatagtcgcacctgccacgatctagtttgctggcataccaaaggcaacgacgtcataaggccagctccaccagccactgaagcctaggggcacaaagacgaggccatgaatgccgagaatgacgccgacgagaatgtgtccccgtagccaatactaaaccgtagtggcacgcgacggcaacgccgaggagcaggaagcgacaaatgccaagcaagagctccggtccaatggatcaggacgctggcacccgaggcacaacagtgggtggggagcattccccctatccactgcccgcccacccatggttgacgtagcatctatcgccgcccagtccaggaggaagcaggcgtcaccgcatcgagagacatcaccatcaccgacaacaggaagaactcgcaacc

SEQ ID NO: 65064 - DNA, 521 bp, Zea Mays
ttttgtttgtgcatttggattgaagttaaaactccaacttagattaaaagggatttaacttttgagttcaaatatgaaaatagaattagcaaatagaatagaaatgagaaaaagaaaaaaaaatctccatccgttgggccatctccttggctcaaaccagcccacacgtccttgccatacatgattttcccctttctttattcccttgccaaaaatgacatcaccatatcatcatgggtgacataagcaagctaattcctatcagcacctgcgtaacaaaccgagtcggagttgaggttgaatcgctcgtaactgccacacgagacccacgttccagccgtatctccttcgtcgaaccggttgctaaataacactggcaccgaaacaaactgcagaccgagtctaccgctgagattacctcctagtggttgtaacagattctgttggagctctcggcgttgagcatatatacgagcccctgagcctcccccctcatctgcccgtcttggcgagtcctgccg

SEQ ID NO: 65065 - DNA, 538 bp, Zea Mays
tctgtacccgttcctagacgtttaccaacaacagccacaagtttggagtactaaacatgcgcagaaaagggattagttacttctaatatgatctaatcatggactgttcgcgtttaaaggcagaccgtccacatgctagaccatacgaccgtgtctagtgctacaaaaggtgctcaaccacatacaaagttatatcacatgaagagttataaatcaggtactataacatgttattcaatctactaatataatttcaggtctacaggcctaggatccaaatttttgggtaatttaggtttgcctatatcaaagtgtgggattagacagttcaagtttgtgtttgggtatcggatatcactccctccacgcccggagtccccgtttggctgccagttcctctcagggccctgtaggctccgtccgttattcctctccgcgatcggaggcgccgggcgcgattggctgggcggctgtccgcctggccgtggctggtgaacgacgagcgtcgttggcgttggcagggtgccagaggccaacc

SEQ ID NO: 65066 - DNA, 342 bp, Zea Mays
tgcaaccccttcccataccatcttggaagtgggaggacgtttgtatggattttatcgtgggattgcccaatacctcctggcaccatgattccatttgggtcactgtggacagattgaccaagtcagctcatttcttgccggtacacaccacccaccggacggaaaagtatgcagaaatatacattgaccagataattcgtttgcatggaataccaaggactatagtatcggacagaggagcacccttcgtggcacgattttgggagcaattacaggaatcacttggaacccatgtaatacgaagctcagcgtaccatcctcaaacagatggccagacagaaa

SEQ ID NO: 65067 - DNA, 793 bp, Zea Mays
attgttttgggaggaccgatggttcatggtaaatgcattgaggaacttgtgccacgcctgtttgctgcaatccttagatgtttggccaataacagaaaggtgtaggcggcactcaatggcaggaaatggatagctgacatccatggtgctctaactgtgggggtcattgctgattccctcactctttgggatgccttacaaactgttgtgttgcaccagggtttggaagataaaacatattttcaggttggccactaatggtaaatattcagccaaggcggcatatgagagtttgttcatcgactcaactctttttgatccttgggaaagaatatggcactcttgggctcctccgaagtgtaaattctttttgtgattggctgctctagggaggtgttggacagcggatcagttgcaaaaaagagggttacaacaccctgaaagatgcccactttgtgatcaagaacctgaaatcattgatcatctccttgttggatgtatctttgcaagggaattctggttcagattgtttggacagattaatctacacaaccttgctccgcaggtgaacaaaataccatggagtggtggcgaaaggtgactgatcaagtgcagggattagcagcaaaggggccgaataccttgattattcttggttcctggacaatctggaaccacagaaataggtgtgtttttgatagaatttcccctagcttagagctggcttttaggaggctagaagaggagacggtgctttggaggttgcaggggctaagaaactctcctcttggca

SEQ ID NO: 65068 - DNA, 517 bp, Zea Mays
gccatcttggtcctaacagttgggctggcttgcaggctttcatggcatatgatggatcgttcatcctgtattttattggcattacaaatggtgttgtgactttcatgtcttctcctcactctccctctctctcacccaactagaaccttaacatggcggtggtggtggcaatgaattcgacaacggcacacaagactaagatgactatgagtggcatgatgcaagtgggcttgtccatgggaggcgatatgagctcaagctccacttttggtggtagcagaaggggatagtaccacctattggactaccctgattgccatgttccacttatctaaatctagagcaagcaagtgatcacaatgaatgagttgttcgtcaagtgcccccacaacgaaaaggttaggtttgcagtgtttactagatcttttggatctgatttcaatttgatagaatttgggttagtagggtgtacaacaatgtgtggatggatctgttctaaggagaagtacaagaccta

SEQ ID NO: 65069 - DNA, 312 bp, Zea Mays
cacatatcaacttgtggcatacatctcatcaacatcagatattcgatttgcatcaaaataactaactagtaccttcatgtatgtggtattgtgaatgccaaggctcattgtacctctcagataatgcattactctctcaagagcacaacaataatcatctccggattcgacacaaattggtttatcttgctcacagcaaacgatatcaggccttgtagtgctagctagatacataaggaaatcgtttatttgggagtatttcaattgatcccttgctattcttcggttttgctcaatagtacaataggggca

SEQ ID NO: 65070 - DNA, 649 bp, Zea Mays
gtgtcatgttcatgggtcttaaagccagcataggtggcagcgcggtggtgttcggcaccacatggatcggtggcacatcgctcatcgcggaaattgtcggtatggcgagcatcagtggaagggtggccacgggcaagatcggcggcttcgacatgacaggaatgcccgagacagcgataggagcgatggggggcggggcatgagcaagataccacacgacatggcacatagtgatgtcgtcaccgatgagcatgatgagcgtcgtggcgaagaagagagacgaagcgtcacaagtcattgctatgggctaggagaagtgcttcctcaggagtgaggagctacaaggccatcacgctcttgcggcgggtccttggcgagcattttattgtagctccattcgaagctgagtgtgtactgtttcacgagagctaggctagttgggaacgagatagagatggttgatggcctttcgatgcaaagcatggacgacagatacatagtggatggctgttgttcgaggcatttggttcattagctcatttgtcttgtagttggatcggaattaaccactgctcgtgcatgatgcaaggcgatactggacaccgcttaactaatgcatgctgcatcatgaatctctccatggccttag

SEQ ID NO: 65071 - DNA, 470 bp, Zea Mays
ggcgtttgcatgtagtgcttcaacgtctacgagagcaccacctttatgccaagttgtcaaaatgtgacttttggctaaaggagatcaaattcttgggtcacactatctctcaggcaggtatagctgttgatcctgacaaagtgcaagaggtgatgaactggaagccacccatgacggtccgtcagattcggagttttctgggattagccggttattatcgaagattcattccggatttctctcgaattgcgaagcccataactgagatgttgaagaaagaagccaagtttgtttggggtcagaaatgtgaagatgcctttcacgcattgaggcaacatctgaccacagcaccagtgttagcgcaacccgacaacagcaagccattcgatgtgtactgtgatgcctcgggcactggactgggttgtgtcttgatgcaagactaccgagtcattgcttatgcatcaagagca

SEQ ID NO: 65072 - DNA, 677 bp, Zea Mays
caagcatgtttgatggctttcaatatagtgtgcacttacataggtaccagggatctggtgcaggggcatattgcttacaaggtgtggccactcgtgaatgattgggaaatgtcataggagactgctgcctgctccagcgaaggtggtctggtttacttaagatacacctaccatttaagaaattagtttgatgagccaaatgatgactggctcgaggctatcgaagctaccagtgatgagctgttggaagcttacacaaaagcagaggatgaagctatgagcactgccttcggcgctcgcagaaagaggaggttaaacaaagtttttgatgtgattgggttttttatcctgattactgttttcctgctcgaaaacaagggttgaagaggaaaatggtagcctcctcctcttccatcgtgcctaagtcgaagtaggttaaggttttaactcatagactgatgttgcattctataaaaggacaactgcaaaacttgatggaaagagggtagagattgctgaacaggccgaagctatccccttggcttcagagacgattcctgctgcgacagccgaagctagtatcggcctagaagaggagtctgagaaaaagagctcaaaagcagaagaggttcaagactgctgagtcccccaaccacaactgagttgctgaagctaac

SEQ ID NO: 65073 - DNA, 773 bp, Zea Mays
tttcgatttagttcattgtgatttgtggacatcacctgtcatcagtgtctctgggtttaaatactatttggttatccttgatgatttttcacattattctttgacttttcctttgcgcctcaaatatgatactttttccaccatctctaattttttctcttatgttcgtactcagtttgggcgcacgatcaggcaagtccaatgcgataatggtcgggagttttacaattcctctactcgggctttctttctcaccaatggtgtgaagcttcgcatgtcttgcccttatacatcacaacagaacagtaaagttgaacgcatgctccgcaccaccaacaaaatgatcgcaccttgctgctccaagcgtccatgcctccacgctattgggtagatgctcttcatacagccacttatcttcttaatcgccttcccaccaaaactgtccgcgcctcttgtccctttgctgccctatacaacacacctcccacatatgagcagcttcgagtctttggatgtgcttgctatccaaacctctctgccactgtgccgcataagcttgctccccgctctactgagtgtgtttttctagggtattctcatgagcataagggttatcgttgtcttgatctatccacaaatcgggtcttgacatctcgtcacgttgtctttgatgaagcttgcttcccttttgcagcctcgccccctcgaactaatgattttgatttgttgtctgagatggatccgatcacttcacccatcgaaacacgtctttt

SEQ ID NO: 65074 - DNA, 587 bp, Zea Mays
ggtgggggtgttaccatgttcaatgcccagaccgggctaccgcctgttggtaagtgggatgtcttatggttttaagtagggtgattttgtttttgctaactcatgtttgttgtgtaggggcggaggcagggaagctggtggtggcgccattgaaggtgcctgccggcccggggggtccagcgaagggtgtggccgggactttgctggaccgatgggtggaattttgcgccgctactgatggaggaggcaaagtcgctttagcggctgccgccgaaggtgtggaggtatctgtcgcacgatagctacgatatgtaagcttttgcatttatattattatattttttgttatgtgctgatcttggcgaattgtaacgctggacggcggtcttcgctgaccacattgcatccggggcgctgacctcatagttgcgttccaagaggaaacgactcaagggaaaaattgagcgccttcggatgcaacataccgaagcgataagagataagttagcgaccgagaacaagagccgaaatcttctcgacagggtgacgatgcttgagaaggagagagaagacctcggctgtcgact

SEQ ID NO: 65075 - DNA, 820 bp, Zea Mays
tctgtgcctttggcagaggtctttttatacaaggtttgcgctttcgccaatggtattcatatgcaacattcacgacgagatattcaaagttgcttcggcaaagaagggggatttccttctttctttatgaagcgtgaaaagaagggaacgtgttttttcgcctgtggctcaaaaacggtacgtacgaaagtttcacgcctcacaaagaaatatattacatcattaaatatacaaataattggtaattgtttcttacaaaaacgaaactacatgcaaagattctaaattctcaataaacagccctagtcatcttttaaaactttgtcagcagcttcgcctagtagtctgttgacagcttcgtcaacgacttcgttagctattctaattatgtcaagcacccccttcagagagggatcagctttaggatcgtatggctctggagggagagagagctcagctgcaccaaaatacaagtgcgtgttagtatcgaagctaaaataatttacgaagctagtcatgatagatatacctataagtctggcacattcagcagcttcttcagttcttttggcctcttccaaggcgtcatgagattctttctctttctttctgatagcttcgacaactatctctcggccacccttcagtcatacatcggaataaaactttccacctagtgcagtggcttcggtcgaagggtttctaatatcggttgctgagactgagaatcctggcttaaccacagccttggcatgttcgcagctgaccttttcaaggaccgacacggccccacgggcattggcaaaagcgcagaagtccc

SEQ ID NO: 65076 - DNA, 579 bp, Zea Mays
aacagtagcctgaagagctggaggaggagcagactgcactagaggtatcggaacgccggtgtgctagaaaatgtgagtcatgaacgcctggtactctaccctgtctgctaggagctgctaccgtagagtgtcctggcggtcctgaatagtctggaacatcgatagcatccgctcagacatctgctgctaaatagctacctgtctggtcttctctgcggccaaatgagcctctgctaagtgtgtgactggagaatggcagccaaagcagggtcaattactggaggagcagctgaataagcagcactggagctaccagcctcgtgatcatgggaacaaggtggcacatgaggtggtggcagaatccccagatcctcatcatcattggaagaagtatccacaactgcaccctgatcctcaaactgtcggatggcctcgtcctcaaccctaatatctgatgctggagctggagctggaactgtgtccttaggagatgggcgatagaagacaaactgaagtcgagaggcctcgagggtggcctggaactgaggaggccgaatcagctgagcaaatatatgacag

SEQ ID NO: 65077 - DNA, 317 bp, Zea Mays
ggatgctaggaatatgtcaagtctggttcaaggacaacatctgtcacttcaatggttcgatcgagaacccgaagacacttcttcaattgtgacacgtggaacacattatgcacaacagacaaggtttcgggtaactgaaatcggtatgccactggcccatatctttcaagaataagaaaaggaccaatatatcgtggtgcaagctttcctttaaccccgaaacgcgatacgcccttcattggcgaaacctttaggtagacatagtctccctcaagaaaatataagggcattcgccgtttgtctgcataacttttctg

SEQ ID NO: 65078 - DNA, 598 bp, Zea Mays
acacaatgtatctcaccaatgctgatggaccatacctctgcagctatcttcgcctctgaccttaggtcaactttcaacggtgatatatcctgatcgattgaattagcatgtcctgctttagaaggcgtactcatcaaatcaacgtcaattattactggcgctgctgcaggcgagctggcttcaatctggctgatatgcaattgctgacagcttccaggaccttcagaacaaaatatttatttgtacttctgtcaaggtggactataaccaatagagccattaatcaaccccacaaataatattcaataaattgtagtataagtcagatataggtgcaaaagctgaggtacatgcagtttttggaatattttattatcaccaccaacatatgcatcataagggaaaaaacatgtgctgtacagtgtactgaaacatcattctaaggtatgtaatcataaacaaatataaaatacaaaagtagatataaaaaataaaaatcacaatattcaaacaatgttttcacacagcaatataatgcaaaatctaccatttcaaacttgcggattgtataacattgctactgcatatttacagtgca

SEQ ID NO: 65079 - DNA, 392 bp, Zea Mays
gtaagggatcgccttgacctgtgtggtcggcattgaagaaaagggttgagaaagacccgaccctttgtgggcacctcaacgagcagtagggcaccttggtggtgtgaccaaaccttggtaaaaatcatgtgttttgtgtgccttcttgtgagcgtgatttgttcctcatcatctcaggtctacgatctatctagttcctcgatgccatgctaacctctcattgggcctcgctctctgcctcttcgccgatgcatcacacttcccccactaaagatagtggagatgttcaggtggactcctcgccctcctgttgattcctgaaatgaattaggaataatgatactcttaattgtaaggttattggagaggccaaattatcttctaaagtgtat

SEQ ID NO: 65080 - DNA, 564 bp, Zea Mays
cggcgctagcagcacatgaacttgggaggatgtggcgcctcccttcgccgcacgagccgcgtcattcaccgtcttgtatggcacgtacgtgctgacaagacaaccaagtaagggcctagagcaagggcaaagaagaaaggaacaataaaacttgacatactgggaggaatggttccgagtagtaggccccctttgtgtcggaggcatcgccgtcaccgacatggagggtgctgggggaggcgctgccaccagctctattccctcatggtgcttcgtcggcacaatggacactagagggtatgacgccataggctccacccctccctcgccgcacccaaccaatgcacccaaagtggaagatgacgtcgcagcctacactccctcctggcgatgctccgtaggcgacacgaacgcagcaggatccaccgctggcccatccctcgaggctgggacgatgaagtttgcttcggcattgccatgatggaatgggccacccacagacgctaggagcccatcctgtcggaggtcatggcggtcatgtcctccatgttggttgaagaaatt

SEQ ID NO: 65081 - DNA, 427 bp, Zea Mays
catttggggattgtgggttttcatttgtgaagaaccatgggttgaaggaacggatcactagccttgatcgcttctcagatccctcacctccttcacgtccaaacctttttgtcttcccttgtcctgaattctttgcctccaccgatatcaccattcttacgaccctgttgaaggtaagatccaaacaggtagctatctaccgctgcaccctattgctcaaaccccccataaagtagtttttcttctttaaggccgtgttgacttgttctatggcatattgagataggtggttgaacttagcaaggtactgcattacagagtcatcgccttgcttcagacaaacaaactcttccagcttcatctgcagaatgccatctggaatgtaatgctccctgaacgcttccttaaactctgcccatgtgatgag

SEQ ID NO: 65082 - DNA, 531 bp, Zea Mays
gacagcgtcaggcggccagcgccctcaggtaccttgctgcttttggccttttgctgttgaactatggagacatggagtggtgctgtctgtagagctgtgcctgtgcggctgcctgctggataatgtgtgtcgcccatgcagtgctgtgctgtgcggtttgtgcctgtgcagtgctatgcttcatgctggaatgtgtgtcgcctacctatgcagtgctgcctgatggagagtggtcgagtgctgtgctagtgtgctgtgcggttgtgcctcttgctctctattatgtgtgagagcgagactaatactatgagttaatctatgatagtgtgctctatgctatatgactatgtgtgacatctcaactggaatattgtttcactgtttcaatttttaaatattgttgctagacactacatgttggaatatatcgggtagtttgttattacccgaacccgtacccgaaagtacgggtacctaaaattacgggtacccgatattacgggtacgagtttgggcttcgatgtttaaaac

SEQ ID NO: 65083 - DNA, 476 bp, Zea Mays
gtgatacatagtctagaagtttcatagggaaggagatgagagtgtgttggtgcatttggaggaaatttcttgtagatagtgaatacagatcatgaagggcctcattatcattagtcaggcacaccattgatgtcaagaatgatttcaccttgatggatgattttgtccaaggtgtagtcgacgacagaggtgacaatgatgaggatcttggtgagccgtccttggtgaaccttgagaatgcacagttatttaaagattttattaaccgcctcaacaatgatgaccttctatttggaagcccatatggtaactagagaacataaaaaagatgaagtatgtggcaatggatctgctctataaggactcttcaaagcaatggaatatgttgtgttttgatctctggatgttgatgcttaaggttcatttcaaatggcccgacactagcttcaacgagtgttacatacccttactttcat

SEQ ID NO: 65084 - DNA, 723 bp, Zea Mays
acctccttggactataaaaggagagccggagagccccaagagggcatatcatgattacatggcataagcaatagacaccaccacaaacaggacataatgttatcttagggtggtgggaattgaaatagataattataagggatcacaaagtgttatcctagggttcttagttggttcgtctaatcaacctcttattcttttaatcagatcgagttccttctataattgcatataccccgtttttcgaggagggtatgagatacaaagaatatggatcctaacctagggattcttgccttaggcttccatatcctttgccttggtgttgctaatcccttacttgtcatgtaggaggggatgacaatgttgcaaccactccctgacatattttatagtttggtgcttgactgtaggtgttgtctgctgccatggagcctttcctaggttacaattctttattcttccttggtatgcaagggtcctcatacattaagaagttagtgagtggactaaaagccatttgctttgttagctcatgaagttgtttatcctgatgcatcatgatatatgtgtggtgttgccaagggagcaatcgatagtgcctcatggctgtggcatcggatggcaatgtagtccttataagtctctcatgattcgggtgccttatagattttatatctagctattgccttagctcaatgagcttgttggacctaaaccaag

SEQ ID NO: 65085 - DNA, 298 bp, Zea Mays
cgataggggagccgtacaagttcatgcttctttcccacttcttttctcttcggcattccacaaccactagaagttggatatgttctgtttgataagtactcctgcactaagtccctagtactgatgtgcccagccaccactctaaattctacttcggccaattggcaaggggcccctaactgcatgttgcacaagggtcgagtcatgccaaagttcagcttcaagggactcattaccatactcatgagtttttccctcttcttctcatcagctttcatgtaaaaccattcattagtcc

SEQ ID NO: 65086 - DNA, 608 bp, Zea Mays
ttccccaacttaatttcatcaatggctatttggtttgctctggccgcagtgaccgtggacattgcggacagatgaacatgttctcggtgatcagtgggtttctcgttcaattgggcgggtcaatgagcatcacgggtacatgagaacactcaaacgagggagcagagggtatgagctgacctgaatcgagctggccgcggtgagggtgttcttgcggtgtttctgaacagatttgggggaagttcaaaattcgagctcttggttgtaagattggaggcaatactaggtggtgtggtgcgtgatcaatctatgaagctcacggtggcttcaatttatagggatcgaccgcgagcacaacgaatttgagcggcagatcgtgatccgtaagaacaaggtgagtcactggtggccgctcaacgtggcctttaccgtggcggcgcctccagcgatcaccatatatgcatagcacgtttagccgtgatgtggtaaagtgcccggacacgcggcgcacggcagtgatcgaccaacggcggcgagctcttatcccgatcatccgatgagcaagggggtacggtgagcttagccgcggttggactcaagctaatcca

SEQ ID NO: 65087 - DNA, 402 bp, Zea Mays
tgtcgaccagcctactagtcgagtaacacggtgaagcgggactgccaatcctgcccgccgaacaacccataagcagctagcactagaccaatcgtccagtctagatgatcgcagactggttcccaagtgtctcctaggtctatgatagcaagccgagcagcgtcaaaatccaagattctttagctccgcggctcaaaaaaatgccatgaaatttccacctgcttctcgatgctccccgggaacttcaaatctccattgcgcctctatactctataggctgttttttcaccttccatctctccactcggtataaatttattttacaaatctgcatcgcgcctctacaggttgtgtttttcacctttcatctctctccactcgatgttaattcattttacaaat

SEQ ID NO: 65088 - DNA, 432 bp, Zea Mays
ttctcctcttaggagttgcggcagaacccttttgtgccttcggcactgttacctctgttgaagggctcaaaatctctggcatttttgttatttctttaatttttgacccttcagccttatccttatcagcctttgtctcaactagctcaactgaaggtaacttcggcattatagtcggctcttcagtcctctgcacaggaggaacattttcttttgttttggcagccgaagaggcctcttcgccaaactcaggtaccacggccggttcaatgtaacgcggccggtgcgtaagaaccttcacctttttgcccttcgacataggttcatctagggtggccgaagcagtagttttcctctttttcccctgcccccgcagcgggtaccggtaatcggggtagacgaagccgatggcgtcaaaaaccctgtttagtc

SEQ ID NO: 65089 - DNA, 435 bp, Zea Mays
tgattccaattcgatccaatccaatcaaatccagcgcgggcgggcgggcctgggtggagtggatcggagtcaatcgcctaataattcagagaagaagctatatatatactgtatccgtccagaattccaccatcagtttcgtcccgcgtctgcgccggatcttgcatccatcgtggaggagttgggtacgctgccattataatttcttcagcaggcagagaggcagccaacacagccgcagtccagaggaacacgcatgcatagcatacatgcagcagcagggtaccaaacagtagcaggagatggatgcagagaagggaaagtttcagccatcggtgtgtagtggcatacattgtgtcgtcgttgatatgaggatcccccacaatgccacaatgcctactaccagtctgccccacacacacacaacacacagca

SEQ ID NO: 65090 - DNA, 306 bp, Zea Mays
caaagagccagaattggaaaaaacagtgatgatgccaaaaattctgagcccaccggcagaggcagaattgccgaaggtgataaaggctcctgccacaactcccaagagaaggaggatggctagcgtgctagacgctgtcatggagactacaaaagccttgacccctgctccttctaagaaagttgccgaagatgtcacagtccaggccgaagccgaagctgggccttcagcacccattgagacgaagcctgccgcgcctgaggataaagctgagcaacaaactccggatgccggcatggcagcggg

SEQ ID NO: 65091 - DNA, 433 bp, Zea Mays
gaggcaagctgctcaccggcgtttcgcagttcatcgacaagcccatcatcttcgtggaagaggaaatcatggaggccacgatgaaccttgacgagcggtgcaagatcggcagcacgtactacagggcgaagctcgacggggaggtgtttgcggtgaagccagcgaaaggtgacgtgtcggcggagctgaagatgatgcagatggtcaaccacgccaacctgatcaagctggcgggcatatccatcggcgctgacggggactacgcattcttggtgtacgagttcgccgagaagggctcgctcgacaagtggctgtacgagaagccaccgtccgcgctgccatcgtcgtcgtgcaccgtggcaactctctcgtggggtcagaggctgagcatcgcgctggacgtcgcgaacggcctactctacatgcacgagca

SEQ ID NO: 65092 - DNA, 409 bp, Zea Mays
aaacaagtaaatgttgtgttgttgtcctaatcttgttgattgtggttgattgctctactctcttgtcttgcttgagcatgattgatagtgttatctcatgatccctatattagtagattatataatcagagatatacaagtaactagtgcggtattaaattaaattgttgacatctagtaagtaattagctgtaacacccctggtgttactataactaaaacttgagcatgacatcatgagcattggcattgcatatgtgtgacacacctagagtgcattcactaggcaaaaatttcaaacaagttgtattgttttaatgtttttgcaaatagaaccctggttattaggcttaaccctaaatagtggttaaaggggtaaaacttaacccaagttgagaaaatctaaaag

SEQ ID NO: 65093 - DNA, 420 bp, Zea Mays
cggaaaacaacgtgttatggagtctttacgcccggccttgacgatgtcaattattttggacgaatcgaagaaatatatgaactcaaattttatggttccaaacctcttactccagtgatattcaaatgtcattggtttgaccctcaagtgacgacacagacacattctaatcttgggatagtcgaaattcgacaagattccaccttactaggagacgatgtctatatcgtggtccaataggccacacaagtgtattatctcccatatgcgtgccaaacgaaagaacatcttaagggttgggatgttgtgtataaggtatcgccgcacaggagattacctgttcctaacgatgaagattataacttagacctggacacatatgatggagagttcttccaagaagatgggctagaagggcga

SEQ ID NO: 65094 - DNA, 540 bp, Zea Mays
ggccgatccacattgaagaagaaagatttgcaggtgatgaagaagcttggttactttgttaacagtgtcaatgtgcggctacatggggaagacacgacttcgaagcccaagaaatacgaagttgtcatctacaagtgttttttcatggctggacttcggctgccatgtatcaactaattgcaaagattttgcataagtatcaggtattcatgcatctgctgacaccaaaagctatttttcgcattggcgttttttctaggctatccgaagccatggtggatgcagcgaggttgatgcattttgtagaatccataacttgcatcatcagacgaaggctagagcttcggacaagcttcgcaacaacttcgaatgttacaactttttgtattgcaaagacacagtcaccctgactctaccgtaccgaacaaagtggcatggggattggagaaaggaatggttctacgcggaggttgattctgagaacagcgaagattttaaaagcatgctgatgaatcctttgaagagtggcttcggtctaaa

SEQ ID NO: 65095 - DNA, 379 bp, Zea Mays
gacatgtcgagttgatgcggctagttgcttctcatgcatggatgcaggccttgctgattaaagtggctgtgcgtgggcggtaggacgcaggaactcagagctacctagagatcatatcgaccagaagcgatagatccagcattaggagacatgcgttctttgacaacttcatggaatatgatatgtgtaagtgtatctcgagaagctcacacaccagtcatttggttggcctctgtaaacctactacatgtacatacatgcatgcaagcacaagttgtgtgggctagccagatagccgcagaagcctgcatcagcaccttcagattagctagggagtctatgtatatgtataggcaacgtatatataatgtagaacgag

SEQ ID NO: 65096 - DNA, 455 bp, Zea Mays
acaactcacaccatagccacatgctaagatggcctagtgaggcccttgccgatgtggaccatttattggaaagcattttataaaatccactcatgaatcacatctacgggatgacgcaaacaacataaggtattcttatactacaaatttttaaatgagttgccacaaaaggcgtaaacaattcagatcccacaatgtagacgatacaacaaactttagatgggaagacatgaaatatcctatcaattttcttaacattgaggtatgtcataggactgagaaattgagttttacccttgtgcctcaattcatcttcttcagaatgatggttttcaccctctactgcagaacgaactcttgcttgtcctccactctccgtcgatgatgagaactaaattgccatatcctcgtgcctcaagataggaatgttccatgattgaacaaaagaactaaaa

SEQ ID NO: 65097 - DNA, 403 bp, Zea Mays
gaaactagactaacagtgaaccagaaccaagtttgggagctattttgagtatgatcgagtcagtatttgagtatggttgctatagcaaggttaaagctggattataggacaataactttgttacaggaagattagtaagttgtcacatagaaaatggagaacaaggctccacaaatcacgctatcagaacaactgaagatgagggccatggtacagtgcgcaaaagatcttcaggtacatcacccctcaccattggtgaccctcgcgccgtgatctacgctgttgctacgaattgtgctctctggcggggagatatttgcggcagagaaaagatcttggcaacaggttggctcggactcggtcacggttaagttcgccgtacccacttggtctgcggctggac

SEQ ID NO: 65098 - DNA, 555 bp, Zea Mays
gcttgatctatgacagtttaagagcatcatctgcaatggcttacaagtggtgtgacccacgccattctccatactaggtttcaacatatggaggttcctgatcgcgaagtcatgatgacctagagtgtttctacaaaggcctactccgaatcacgaagactatgccattgtaaatcttgagcctcttcgtgaccatgcgcttgacttcgatgttgttagtggtatagtggaggaatcctaggttactcataagcatgtgccaataagggagatatagaggacattcttgggtcaagcttcgatacatttcgtttatgctagggatcaatataatctgattatttctagcctgcacacttatgatgatgtcacttccccttaaaccggcacaatgaggagagaaacacgaggctttttactttaaccgagacgtttgactcatgttatatggtttccctttggattttctgacacaagggcaaattgaaaaatctataaatagctttgaccgacttatcaattaggagctaaactcaaggttcttaaatagactcc

SEQ ID NO: 65099 - DNA, 537 bp, Zea Mays
ggttaccaataggagaattcctgctgaggatttggtgagccgactagacatgatcttgagaggcaaagtgtcaaatgttggtgctcgtgttgcctactctacttggaatctgccacctcctaagtcctttttcaatttcgtgtccaatcctcctgctggtgatagtggtctgggtcttagagtgcgaccctctcctgaagatattgaggctctggttgcttctctttgtgatcttcccaatgatgagaggcaagttcattttgagatgccagcgagtccggatgatgcagaaatagatgctgtgctcaatatgttggctggagaatcttctgactcggcccctgctaaaacaatggttgttacggttataccagagcttgacaaaacagtggacacccgaaagcctgagggtattcgcccaaagcgtcctcgccaagtcagccgcccaactgcgcctattgaggagaagaagaagaagagacgacttcggcgactgtcatgcttggaccaggatgctggcccttctgctcctgtttg

SEQ ID NO: 65100 - DNA, 489 bp, Zea Mays
tgggcacgggcagcccacggatacccggtacccatgtgggcacgagtacagacacgaatctatacctgactgcgggcatgggtttcttaacaggcatatttcatttttgcaggcacatgtttaggtttgcagtatccatcgagtttgtgtctgttgccttctctagccacccggcacaaagcagacatgtaggtcaggcataaaaactaaaggtggggtcgcattgtcaatttgttatgatgtgctctctgcctctccatgactcccacccgtacaaagaaaaaaaaaataaaaaaggcatcggcttgaccagaccggttgcatgtatgatatgcgtcgtcctttggcgccacttcggttcttgaaatccctattcaggttcggaggccctttccagcagttggcctgcaaatcatttgctgaaatgagaattccctcttcgattatggtattggacaattggcttgcagctgtcaggtgcgtccaaaa

SEQ ID NO: 65101 - DNA, 565 bp, Zea Mays
cgagaaggcaccagaagatgcatgagaggagatttagttgggtaaacgtgcacgcgcaaagccagcagagagagagagagagagatgatcaatcaaggtgagcaaccatatatctctctcaactaccccctgatgctggaatgctggtggtggctgcagatccgttcaaccgccccgtccgcccggctagccatttacccctttcccgtccggcccgccgatgcatgcatggaggcttgctcgagactgctaccggccctttatataaaataaaattaaaaaaaggagatgatgcatgagcagcgcacgtttcacgccaagtagtaaagcttggaacacaggtttccttgattcgtgcaggtgcagcttaattagacttctgtatgcgacgggatagaagcatccatcctgtgaactggtagttcgtgtttggtgatcgaggcgccgcatgtccttccttcggttcttgcctaaaaaatgatgcatgtaaattttagtattgtccgatcaatataaattgagacggaaattaaactaatttacatctcaatccacctcaataaat

SEQ ID NO: 65102 - DNA, 283 bp, Zea Mays
ggtcgaacaaaaggtggataaatacaaatgttttcgtcaggacagcaaaggaatcctatggtttggagaccgattggttattcccaagaaccctgagctccaaaagaagatattggatgaagctcacctttcaaaattttccatgcaccccggcagtaacaagatgtatcatgatctcagatccttatactggtggaccagaatgaagagggaaattgctaagtatatctctgaatgtgacacctgctagagaatcaaggctagtcatttgaaggtagcaggc

SEQ ID NO: 65103 - DNA, 370 bp, Zea Mays
tccacaatcacccatatagaatcatatcctttcgaggtgcgaggcaatcaagtaatgaaatccataccaatctcttcccacttccattcgggtatctttaacgggtgcaatagtccagctggtctttgatgttcagctttaactctttgacacacatcacacatagccacatgtgtagccacatctctttttagcccataccaccaatacttctgcttcaagtcctgatacatcttagtgctaccagggtgaatagagtaatcagagtcatgggcctccttcaatataatctcatgaaggctaccaatctctggaacacatatcgtgtccttaaaccatattgtgtcttgctcatcctctgtgaattctg

SEQ ID NO: 65104 - DNA, 328 bp, Zea Mays
ttagtataatatggcgtcacctcattgctaaggtaagaaaggtaagtgtaggaccatgcagactgggactagtcgactgccctcatgtgtgggccaccacacatgttgtgtagggactagtagaagtaattccaacaataaatgaaaggtagttaataaattgctttacttttaaaatttaattgttgcatcatggggatgggctggaatgaacttttctgcagatacactaactatgaaatgaatagttcatgtagtcgcgtactaatgagtgaatgagtatgccaccgcttatgacgcgcatgcatcatggaattaaaaatcattc

SEQ ID NO: 65105 - DNA, 547 bp, Zea Mays
gttgctggtgaaggtggtcttctacggcatgtctaaaattacctgctccagtgtccttgcctactcttcttcatatgtgatcagttgtctaatcctttcctgcatattggtctctgccttttagctgtgaggacctccctttgcttctggagatggttagttttgatgcgtagggctcgcagtttaagctggtcttctgctaaaattcttaggtctttgccctcttgaaggatgtctccgtctccttcggttgggaggtatccaatgggagcaaacctcgacggggggtcgtcgtgtgggaggtatttgaagctgcttgtgtggacgttgccttccagggtaggcaggtcttcggtctgagggtgcttgttgttgactgcctcagtttcgttgttctcaaatgtggtgagcggggtgtcttctgcgagggttgctttgtctttcttatcaatgagggttgtcttcatagcctcgtctagggagcagctagctctggtggtcactttcttgggatccattgcaggtgttggacttcggagcacgaatg

SEQ ID NO: 65106 - DNA, 517 bp, Zea Mays
agccgttagtgtatagacatctggtgcgccactagtgtcacaccggacacgttcggtgcatgcaactggatggagcacagtcacctttttatgacaatgtttcatgagatatttctttatcaataactttcctctctatgacaatgttttctttagtggttgcatctctcaaatcttttctttagcttctcattctctaatgtgattaggtgaatcttgtcaaaaagttttttctcttcctcttgattgcatatatgatcagttgaatgttcatgattcatactcagtcatcatatagtagctacatcaatcttaacaatgttgttaatagcctcatatatttcaatagataaaagctcatgtgtaacaataagattgtcatgatcaattttagtttgagtgtaatcttattttagtgatgcatgtctatcattggtctctccatttgtttcacttagtttgtcatatttctctttaatatcttttagatagatcttaaacacattattaatagatg

SEQ ID NO: 65107 - DNA, 487 bp, Zea Mays
gtctggagctctccggcgatggtgccgctatggattgggtgggcatcgccgctgccgagttcagggatgaagagaatgcatgcaccgtccatccataactggatggatgtgattaaaagattggatgagcgcgtcatagccatctgatgggtatcgtgcggttcaggttgtctctggcatacactctcgcgggagcaatctggtccgtagggttgtaaacatatggactagattaggttaatgctttcgcctttgagtcgttcgatccgagcccttagatcaagaactgacggtctgcgtggagtaccggttcgggtgcgtgctcgatctaatctggggcgtgcgaatttgatccaacggctagggattaaggataccccttcaaccatgccatcttacatatgagaccctagacgttttaataactaacccacagtccaacacgggatggctctgtgtcttgggatttattgcaccaagacccttg

SEQ ID NO: 65108 - DNA, 383 bp, Zea Mays
gccagatgcgcgaaggcacacagcctcatcatacaaactatagttgcatgcgtacagcgagggcatcacaccttacattggttcaactttcggaatgatccccatctccctatagttaaatagcattatcctcagctcctcaccctcaaaaagactacgcaactccccctcacctatactcgccccaaccggcaaggacaacaattcctgcctgccagccctgcccacacgaagccgaccaccatccaattcactcactctacgcttcgccaccgcccttcgccgcctacgcccaacactcggaccaggcaaaacttcagcatccgtaacacgcggagtagcctccgcctcagccacatccaaggccgcaaagtaatccaagc

SEQ ID NO: 65109 - DNA, 972 bp, Zea Mays
gtttcatcaatatgatcggacacgagcgttttgttcgctctcttgtcctctatatttatatggctttctaactaaacaaagaacgaaatgacttcgttctattgtatctttaaactaaacaaaaaattagaatgacttcgttttacctaacaaatacggaggagaatggttttattctcgtaatctcccgaccaaactacaaaaacccaaacaggacacgcaccttccgtgaacttctcgtgtcgcagattcgtgaagcagtagtaaaccacatccacatgactgacgcgggggttgcatgattctatcaggcagataaaaaaggcagcatcacacttcacacgccttgttttctcgaagggaatggctagaatatgacggacacattcatctcttttccctgccagccgttcgtttttttattggccaggtcgagtttttagatgcaattttgccgatgtcgacaggttttagctccacgaagcgagaatcgtttccgtgcctacacattctattctggcaccggttcccgaattgacacttcgcatctttgcctgcacaccaaacaacaccgacgtgacacgcaaccacacagaaggagacactattgtagcgtgatgtatttcctaatttattatatttcgtgaatagcagttcggtttgttttctaaaaaaagaagtaagtttctgtgtggctgtcaacgtgaggccacatagaatagactagacccatgaggccacgagcatctctagagcataatccttttttaggccacaaagatgccaagggatatcttacgttctttacagagacatgtacactattttctttcagaggtaaccaaacaaaatcctccgagggcaatagaaaaacgaagctatcaacaaccagcagatgaattcatgatctgtcggtgccatcacccatcagccaaaagaaatcggcacacctacctcaagtttcatggtgcg

SEQ ID NO: 65110 - DNA, 943 bp, Zea Mays
taaaaatcaaagaactatttttattaaattctataggaaattagaaacctagcaaaattggtttggtatttttaggatttttctacaattttctagaattgttttagctctggcagaaaaaagaaaaagaaaagtgatgaatagtactggaccagaatcggtcaggtcggcccactgccagcagaagcgcgcccgcgtaaactttgcaagaacaaccccgtcttttggaataaccaaaactgggtcccctacactatttcgcgagtcgctgacagtttacaaggaacccccctcccacgttctaattcttcgcagactaaggtccacgacgaggaacagcactggtcaaactccaacgagcctacgtcagccggataccacaacggctggggctcccatgcggcagagactagattagaccccttccgcacatttcccctcaaccaatttcacgaacggcggtctaccttgctctgtccacggtgacagtgcggatgatcggatgggtggacgcgttccgaacaaccgacggcagggatgaaaaaattgaagctcggggaaggtttacgggttcactaggggttaggtacatgctttaatttggacaaaataggagcagaagagcgggtcgacagagggggtgtcacggcggcgttctacggagcagaggagcgttctggtgatgagactctggcaaacttcaattggtcggcttcgagagcagtaggaggttataaacaagctagaacaggaagcaatcagggagttactaacccgaggagtgctggccacggtggagttcttcatggccgcgcaaagaacacggtggactgattttggtggattgtgtggattcttctggtgaaattgagtcgactgctcaagtgcttgtgtgcacgatgtggtgaagaagccggatccgagctcaatttataggctgatg

SEQ ID NO: 65111 - DNA, 511 bp, Zea Mays
atattaccatcacaccacatcgactcgattcaataatactaaccataagtgtttatcacatgaacggagcattgcaacaagcaacccaaaacaaactaactccttcacacaaattgcattatggacctactcgatcactcgaagcgtctactcaatgtcatgaacacaaacatacactatatgtgaagcgtagttcaacgaacatataatacacactaacctgactcataaacacagaggagtgatgactacttcggcatgtccccacctctctatccaatccaaatcaatttctaactacactgatcaaaccatcatatcgcgcaacacccatacttcactgtcttgtgtataaccatgttgcgacaagcactcgagacacttccatcaaacctaacgtaaccacttatataatgtgctctgacacactgattcaccgatacgtccttcacatacaccgacgtttctcactctacttatcacatcaaacgaatacaatcatccatttctc

SEQ ID NO: 65112 - DNA, 384 bp, Zea Mays
cgaggaactcaatttacctcgcgcttttggaaaatactacatgagtccatggataccaagctaaactttagttcagcttatcatccgcaaacggatgggcaaacggaaagaacaaaccaagtgttggaagatatgctaagagcttgcgctctaaagcatggtagaagctgggataaaagtttgccttatgcagaatttttgtataacaatagctatcaggcaagtctaaaaatggcaccattcgaagcactttacggacgaaagtgtagaacaccgctatattggaatcagaccggagaaagtcaagtatttggtccagaaattcttcaagaagcaggaaagcaagtgcagattatcatagagaatctaaatacggcacaatca

SEQ ID NO: 65113 - DNA, 678 bp, Zea Mays
gaagaactcaggaactacaccaacgggtctggacccccaagtatgtcgttcgcccccctaaggacgggtcctggacctccatgtataccctctgctccccttataggggcccagacctcctcgtctaacatctaggctcccagcaggcggggcccaagtcttcaggctagctcgtgcccttggtcccactctctgctcgaacaggattccagtgccgccatgtggctcatgggtgtgtggcagaagcctttggcaagaagcaaactcgtcgccagcatttgatgcgagcggctggggcgtgccctgctgtgtgttgggcatgcgcaggctttttgttaaatgacgcaggcgcgagtgaccggtccacgcgttaccaagatgggtggttgctcggcattactgtgcatagggcttgcacagtcccgattcttacgattatgcaaaccctaggctgccccctattcttatgattatgcgggtgcattccaccacccgactggagtttgctctccaacatttgacacaccaggtaggggcttcgacttaggtttttgcctgatcttttgcttgtcatcatggttcagatagcggaacaatttctcagtttttatttggtaatatctcggttttcgcctcatcttttgtcgagcaacttctcagtttttgtttggcaatttc

SEQ ID NO: 65114 - DNA, 508 bp, Zea Mays
aaattcctagatttatttttgcactaaaaatcctttttctaaataaattctgaatttcccaaggattctggactgtggacactattttaactaagcctagggtgctctgtgcaaaattccgggcctgttttataattcctttacacgtatcaggacgacgggttgatttgataagaggacaggggctcttaaggaaaaaggctatggcgaaggggtatcgttgattccgagccgcccgattaagatcatacgaccccgatgcaatcacccgaaaagggatgctatggttcttaatcacgaccgtcggtttactgatcaacagccactgttatccccctcgaagcggtaccgaagaccatatcccaaccgcccattaccccatcaacgatcagggatcaaccaccagactcgatctcccccattcaatccagacggtccgaacagggtccgatggcccggcgtcttcgtcctcccagcgcaccaagagaacgacggcgcgatgccctgc

SEQ ID NO: 65115 - DNA, 421 bp, Zea Mays
ttcgtatatataggagaggtctgaacctgtttataggcgatagctcacaaatatcatacgattagacgaataacaacatacaacgtaagaataatcgttagagataatctaatcgcggggacacatatcgtttgagttctaaagacagagtccgtcactttttaatgtttaaccaatgcattgtcgcggacacatcatttttatgaatctaagccatcataaaagcctacttttcccatgcctctttcgtaaactcgaacgcagctgtgccattgcgagcacgattgcgtccaaactcggaatggcaaccccctagccgtccgatcgaccgccagccccgagtccgatcgaccgcggtctgcgccatcttgtcctcttcctcccttcctggacggctggagctggacctgctttattgatt

SEQ ID NO: 65116 - DNA, 765 bp, Zea Mays
aatgagtaaacaaatgactcaagtgaatgtgcataaacagtactgaggatatgcatatatatcaaatacaataagcatatttgataataaaatagatgtgaaaacaaatcattaaagtaaatgtgcataaagagtactgactatatgcatatataataaaacaaatgtgtaaacaaatgactcaagtgaatgtgcataaacagtactgaagatatgcatatatatcaaatacaataagcatatatgtgttacttgggttgtgtaagagtactctctgctaactcatcaataaatacctaatccatagcctttgtctagatctatggatgtcgggcgatagaggggatctagaataaatacatatgctctaatatcggggctcctgaacaaaaaatagatgcaatgcgcgatgcaatgacccgattagagagatgtataaacggatacaaatcacacatttagctggagaataagggttacaatcaaatccacttcaatcgaccgaaatgcttcaagaaatcgacggcaaactcggtgtatttcaatgttggattacctggaacttcttgaatcaggctccaatgctgggagattgaaggatgtaagctggattggaacggcgctggattggagcggcgctggattggagctgcgctggattggagcagcgaaaatcgcttggcgagtcgcctccgacgaagaaagactgcgcggctggggttttcttcctatcggcgcgggtttgcctccgttgattgcgcgaat

SEQ ID NO: 65117 - DNA, 470 bp, Zea Mays
gtcggagccataaatccgttgtggatcctcttcctcgttgtcgtccgaaacctgggatcgggtcggggtcctgcgccgagctagagtgaagccatccgtggtgtttgcgggcagaatcgacggtcgtgcgacacttaattgctcgccggtgccacaaatccgtcgcggatcctcttccccgctgtcgtccgaaacctgggatcgagtcggggtcctgcgccaagctagagcgaagccatccgtggtgtttgcgggcataatcgacggccgtgcaacccttaattgctcgccggagccacaaatttgccgcggatcctcttccccgctgtcatccgaaacctgggatcgggtcggggtcctgcgccgagctagagcgaagccatccatggtgtttgcgggtagaatcgacggccgtgtgacccttaattgctcgccggtgccacaaatccgtcgcggatcctcttccccgc

SEQ ID NO: 65118 - DNA, 716 bp, Zea Mays
ccacaagacgggccttgtacttttcaatagtaccatcgggtctcctcttcctcctaaagatccatttacagcccacaggcttgcaaccagctgggagatcagttatctcccaagttccgttcgagatgattgaatccatctcgctacagacagcctccctccagtactctgcatccggagatgtatatgcctctgtgagggagcgtggttcttcatccactagatagataatataatcatcacccagagacttttcagtcctttgtctcttactcctccttaactccaaatctggagtctggtcattgacactcgagggcagagaatatgtccgagatggaccatctggggctactacttccttatcccgcatagggaagatgctctcaaagaatgtcacatctcgagactccattattacatttatagaaacttcgcttgtctcggaatggaccaatagaaatctataagctgcactgttatgtgcataacccaggaagacacagtctacggtcttagggcctaactttctcttcttcggcaacgggacattcacctttgcaaggcagccccaagtccgaagatgcgaaagatctggcttccttcctttaaatccttcatagggtgtggcctcacggttgcgaggcggcaccctgttcaggacatagcacactatgagtactgcctcgccccaccagatgtcaggcatccccgaa

SEQ ID NO: 65119 - DNA, 449 bp, Zea Mays
cgagatttaccttcgtcaactcacccccaatgccatagttaggcttaatgtgtacatacgggctctccgaagctaaggtaaaagtgccaatgctgaagggttttgccgagttcatgaactccactatcagacgaaggctagagctgatggtctgcacaagaactttggatgctacaactttgcatactgaaaggataccaaggctcttgtgattggttaccgcactaagtggtcgactggctggacaaatgaatggttttacatgaaaggtgacgagaaaaagagagagaagcttatgagtatggtgatgagtcccttaagattgagcttcggcatggcacgacccttgtgtaacatgtagctcgggtcccctcccatttggtcgaagtggagtttagagtcgtggcggagcatattagcactcgggacttggtgcaagaatatttggc

SEQ ID NO: 65120 - DNA, 471 bp, Zea Mays
ccgggaggaaagaaggcaaggaaggatacagtttagagcttcgaaggctcgaccctcaatagggttcagacgaaccgccttaggactttagggctccaagcccaatactgatcaagggttcaaaggttggcccctcgaaagggcttcaaaactgcctagagcacagagtcagggatgactataggtacgcccgtacatggccccatctcaggttgcaacctcttaatacatatccgagaacccccgggagcgattcgtgacggtatcccatcgtagggaggcatcgagccatcggaccccatcgaacgggtctgggacgcgaatcacccgcaagtgcctttggggcatgtctccagacctcaagttgactccaatcgaaaggagctcggacccccgctcggatcacccgttaacaactcaatggaaacgtcatgctcattgcccattgagggcagcgtgacacattccccc

SEQ ID NO: 65121 - DNA, 1067 bp, Zea Mays
ttgagccatgggagggacgggcgccttttataacaattcctcgctgtccatcatcatcatcatcaggtgccgtgttcaccgagtacttacaaattaaagctctccttcccgctccagttgcattcattgtcctctatgcccctataagccaaatgtggcagtaccatccaccgtgtgcttcaagggtagattggtcaattgtgaacaagtgactaggatttccaagggcgcggagctgtcgatttggcagccctcgtgtcgggcgggctttccagctgcacaatgccgtgcacactgtctatgtacttgagcgtaggtgccaaatataatattgcttgagagatagatagatagatggtgccttccgaggggttctgttggcacatatgtccatggactcattcgcaacagaaatggcggcgcgtgggttgcttcagttaggacataggaatgccgccccgggaggacgaggcaaaaagggcgcccactgatccctagcatcatatatactggtgatggtccggcgtaagacgtacatatgcccggccgtgttgtttgttggtggcgaggaatgcattctacgtggtacggtgccctacagctgtgtaaggaaaacgtggcatttgaacaacaagcaattggcaacgaaaaataaagggaggaagatgtgttagggagtgcgagcatgtgcaaggcactagcaatggcgtgagggaaatggagaattaaaagatgctgttctagatggtctttgggcaccagcagacagcagtgtatgcgtacacaacgcatgcatgcatacatgtcatccggtggcaggtggtagcaaaatgcattctacgtggtacgtaaggtgtttgttgccttgtaggcgctctcgtgtgtcatcattccctatacgtgacaaccttgcatgttccacgcatgcatggaacacacatggttcgacctttgagaaagagatgccgtgtgcggtacatagtatgtgggtgttcgcctttgttcaacatcgccaatgtggttttgcatggttgatatgtcatttctatatttatgtaacacccgtt

SEQ ID NO: 65122 - DNA, 572 bp, Zea Mays
ccacatttgaactcttttgactaagtctgaatttcagtgtaatgtgctcatcgttgtgaccttgtaactttcaaacaaaagggattttgccctaagtcaccacatcaatttagtattgctcccagtcgatcaccagtgagctccaattttaaacttccctgaaatctgttctaagacactgcgaagaacatctcaccgtggtcaacccaattcaggttagttcttaccctcttctccctcgtttaagcattctcatgcgtctgtgatgctcactgaccaacccaattgaactgagtctcccttaatcgccgggaacgcatggttctttggttcatccgcgcgctcaccgtggccagaccaaattagatcgccattcttgaaattaagttgggggaaatgctcaggggggattcaattcagtgttagtcactcgggagcaccggtcttggctccctctagccagtctagctcgtcggagcttggctccctgtgcggtgcgccgtcgaggatctcggcgtgtaaagaaaagaaaggtggaggacttaagtgaaaaggtcagcaacacataaaac

SEQ ID NO: 65123 - DNA, 302 bp, Zea Mays
accgacaactcggccgacttgaaaaaatgatagtaattaccattgttgttgatctttgcagacatatggggttgtgtccaatcatccccttcctcagcgtcactaatagtatcctcagtcgcagtagccatgctccttgaaatggatgcttcaaattgccggtttcaatgggctaagatagcttgtctttcaccatgtggtgcatgttgtttacgtcttagtggtctagtagacatacgcagtgaatcagcatcctcagtctgtgttgaagctggcaggaacgggttactggcgatatcagg

SEQ ID NO: 65124 - DNA, 362 bp, Zea Mays
ctgagtgcttactctacccttgttcttcttggacttatgaagagatttctctgggatccactagttcgttccttgcgagttctagtatgacttccttgcattgtgtggattagctccagttgtggttctgcggtcgtttggagatcgagtcgaagtctacacggtttcagtgtctctctccccgtcgcttggtcacctccgaccttgatcaggtataaagtcatttacccgttgttcttcagcaaatttaccttgttattctattatatttatagccaaccatcctatttatcgacctactgccatgaagattgggccatcctagtaccaaatataactcggtacctatcatttcgtatcaa

SEQ ID NO: 65125 - DNA, 410 bp, Zea Mays
cgacaaatctaggatttcctctcagagctcagagtgagacaaaccaaacttcatccctccatatcttttgatccagtcagcaaaacccattagcctccacacacaaatgacaacggaatgtcaggggaagagatctatcaatgggatcatggccataatcgcaaagatttggagccaatccgcgcttgaacttgacctctctctacgctgcctcgtgctcgacgtcgtgcctaggcgccaaagcgcgcactggcgctcgcccgcacacaccacgagcgcgtgtcagagccacccctcagccatgtttgctcgcgcctttaagaccacccccagacacgcctcacctcactccgcactcatcttcgctggccagacaccacccttagctccggcgagctctgcgccacccg

SEQ ID NO: 65126 - DNA, 525 bp, Zea Mays
tgacatcaccgcctcgtcaaatcttggtatggcgccccctatccaaatcacgagtaggtgaatttcattttgcgtgattcctcggggtggtttgctcgtcgggctcgcggttagcgcgacaccggtgagggaccgccgtactctaggcacaccaccgtactctgccgtcgagggtaggagtggtcctctgtgtcgtccaatcctagcgtgacggccaggattagaactacgcgtaccgattcgcactgcgcatctgaggcgtcgatgcagtgtcgggcggttaggatccagtcacgtgtacgataaacctggacttgatctcagatcccagggctccgtttgcgtaccggttcgggattaaactgatctaatctacaccgtccgcttacgatccaacggccgagatctgatagttcccctttgcagaaccatattaacaaacgaatccctggccaatgcaataatcaacccaccgtcctattgcatggtgcgctgagtcttggtactcttctgtattaacccctg

SEQ ID NO: 65127 - DNA, 401 bp, Zea Mays
tcttctgtataaagccatcttctgtgatgctaagcacatggcgccgacacatattgacaaaccttttctttttttcttttctttcaatcagagagctgacacttgccagttcccacagcatccctgctcttctcttctgtttggagcatggacgcgcactagacgcacatacctgcggtcaagtgggtggctgaaaggacatgcagcttcaaaatcaagtgggtgccatctgttcagatcaacgctgcctgcctcgatcggtagtacctgagtgcgcaaataccggatttatttggtaatacatctctaaggactgatgttgttgtagtgtggctgcattagatattcattttcattcactcggcaggtttccctcatcagcttgctctctgctttttcac

SEQ ID NO: 65128 - DNA, 551 bp, Zea Mays
tggtcactggtcaccgtctcgcctggacgagacgacgcacgcatatatcgatcgacagtcacagtaccagtaccagtaccagtaccactcgcttatctcatgcatgcatgtcgagatcgggtacacacacggatgcgtgaaaaaaaaggggccactgccagccagtggtactggtactggtactggtacttttttcctatagcttgtctccctgtcgatctgtctgtgtgggcgtctgacatacgtagatatggaatgcatgcagagcattgcttcctgctgccactgccagccagtgtgtattttgtttgacactgtccacagtccacttcacccatcgccactgagatagtacgtgctataaacgtagtagtagtatatggtgatttgccgtgtgtttcgacttattcagtaaagaccgaaaaacattcggcaaactctttgttacatgcgctatcggccgtagccctaaaccgcgacagtgaccttgaggatatcaccgtgaaattagagggccggggcagtgatagatgtttgatgtcattattatt

SEQ ID NO: 65129 - DNA, 343 bp, Zea Mays
aaagaacaatacaccacacaacagaatacaacaaataagcagacgctcagcgcagggctcacacctactactaagcgagaaagagaaaacaaaggtcgaggctacggtcgaaaggcgattaagctaagcagctatggattaaagtacttgcctaaacataaccatattaatttgacaatcgcgctatgcataaaataaagttacgctacgctcttaattattataaacaattcaaggaaaaggattgtcacgcggcgaaacgcacgacgacacacgtgaactaaactagaagttgggacaagttgccacgcgacgaagcgcgcaactaaacacttgaattaaa

SEQ ID NO: 65130 - DNA, 465 bp, Zea Mays
ctgtcccgcagtagcttgcgcttcttggtcgtgccgccgccgccgccatcgttgatggctagactgagcgtcaggttcatgtaatcgccgacgacgacggcgacgcggcgaggatgatggggacgatcggaagggagggagagaggaaggggggtacggcgcgatcgagagctatatataagggcaataatgccaaggcagcaagggaatctaggagatctcggcaagaggaggaagagggaatagcgtgtagctttggatgcaagaaatgctgcgtgcttcgttttggctccgtccccggcgacgtggccttggattccaaggataggatatgcctgccgggggtcgtagctagcctagcgctcgttggattggctaccatctagctgctgctgctgcctctttggtttatgcacgaggaggatcttcctgtctctaccggcatcatcagggccaccagacccc

SEQ ID NO: 65131 - DNA, 322 bp, Zea Mays
aatgagatgatgcgtgcgatgactgaagctttcaaaaaataccaggactctgcggtgacatcctatgagcagcttgatcgacgagttgctcaacttgttacacgcatcgacatactggaggctcgacaacaaccaccatctccagccccagctcactctcctatggacgacggcgacgatgacgatgatgtttatgcaccgttgcgacaacgcctcgaacgtaatcgacaaggtatgagaggtaatggtagacgtcgtcataatcctgaaccagaccatgatccatttgctaagattaagttctctattccaccgttcatgg

SEQ ID NO: 65132 - DNA, 615 bp, Zea Mays
agtaaacataacaacatacccaacactgcctaaacaagtaaacataacaacatttgttgatcaataatacgattgcagtctagattgacatttgtttcctcgttcagcacagctccatttttctggcgacctcccttacatgacctacttctctacaattgcgtatgttatctttcacatttccccccttattcatcgggtcttcttcttcctcacgagtctcaatctatcatccccgcctctaccctcctcggtcgtggcccgggcgacttgtaacctcaccgacgaacttagtgcctgcctactacccctgacgaataaactcgcccttccctaatcccaatctaagagttcatcaatgcctcctctcccaccgccgacaccacttatccacttatctcactttagccgcttggcagcgacacccacttctccctcatcgctcctcgaccttacgacatatttgactttgagagacgacgaccttaactagattaatggaggcgaacatggttaggtgtcatttcccttaattatggctaggatctacgatcgatcgtccaacttcattaatggttaatataaatgatcattgtaacgcgtccaactttgttt

SEQ ID NO: 65133 - DNA, 463 bp, Zea Mays
gtgtatttgcgtctgctgccgccaatgcctgtagtgatgtatttgtgtattctcggatgtgagcaagcgcgcatggaggcggggtgaaagaggatgcaaacgcgagcgcttcacaggaaacacgtacagagagtcgtggtaccaaataaacgaaacagcgtgtactcgctgtggtaagaagaagcgacttcctagaaaaccgagaaatgattaaagtgtttggtggagggggattatcgtttaattccagctataatccgctcggatctaagctcatggactgcaagttattacgtacgtgcaataatgcttgctattgtttgtattcacttcgctgattcttgaacatttctagcatatgaaagaatcgctttcgcatcaatatctatatgtatatatacggatatacctacctatctacctatctatctatctatttttgtctatatatacacgttccgat

SEQ ID NO: 65134 - DNA, 1586 bp, Zea Mays
cactttgaagccctcgacggcggacggcgatgcgcagggctccaacgagctcatgaaccggctatttcgctcagcgaccggtgtcctactttggccgaagccaaattcaagtcctaaggaccatttcccctaaaccaatttcataaacggtgagctatcctgttctgtccacggtgaccgtgggtgttgcgggtggatgaacgcgttcccggtgactagtgggctcctagttcaattgggcgggtctacgagcatcaccggcacatgagcaaacttaaacgagggagcagaaggtttgcactgacctgaatcgagcaagccgcgacgagctgttcttcgcggtgtatttgaaccagtttgggggaaatgcaaaattcgagctagctggtgatcgactgggggcaatgctgggtggctgggtacgtgatgatgttgcggagctgacagagggctcaatttataggaagcaagagcggcggccgggaatttggatgacgacgcgcgacggccggagaaaatagaaagttactggcgcagtgtcttggtgtcctacaccgtggcgattactccggcgacgattagatggctatagagagccatggcgatgcgacagaggtgttcaggtacatggcacaagaccggaagacggctgtcgccggtgagcttatctgcccaagccgcaaagcacgggggtacggcggtgagtcaccggagtcatctccaggcgcatagctttcacctggcggccttatcgggtcatcgacggcgtgaatcgcaacggcggtggcgcgaatcgcggcgaagattggtcgtcggcggtgagactgccgcgctggcgatctgatctgttcaggcactgtacatggcaaagtcagattcagtgcgcctgacagcttaagttcagggccaattttctctcaatttcctatggcatcttacccaaagatctgcatcaaagttgtagagctacaaaccagttacacttcggctatagggactgaactcagttgagcactagatccaggttgaatcctagtccaaagatggctctgttacactgcaagtctgaagttcagagttcaatcagcctgacagccagactttagacttaattatctccaatttctccataacaaccttgcttacactcttaagcaaaattgttcccctatgttaggtctacaaatttgatgtggtgccctaaggtgaattctcactgatttgaaagttataaagctccaaagttgagcctataaccctgatttcagacttagcatagaactcaaatgaggtccattttgcaaataagcccaaaatccaagatttagcttacaaatccacacatttgtgaaccaaatgacttaggatacacatttatcatggtttttgcactttagtccaaaagtggactaattttgcacataaccccctaggttttggatttagggttttctagggtttcaattagggtttctggtatcttagggtgtaaatgtaacttaaacccatccttagtaatattttatgactattttacttagtctttggggttttctccatttagtccctgtttttctcttctaatc

SEQ ID NO: 65135 - DNA, 526 bp, Zea Mays
ggtttgaccctatttccctttcacttagccgtcttgccatcccacggaattgatgtgatcttaggattggattggttaaccaagcataatggtgtcataagttgcgtagataagaccgttcttctcactgaccaccaagggaagtcagtttcatgtcaggctcatccacccgcccaagatccaatggtgtttaatctagcagcagaaagcatatctgtagtagaagaattcatgtatgtgtttccagaagaattgccaggaatgacgccagaaagagaagtagagttctacattgatctaattcctggcaccgcaccaatcgcaaaaagaccgtaccgcatggctcccaccgaattggcagaactaaaactccagatcgcagaacttcaacaaaaagggtacattcgtcccagctcatctccttggggagcaccagtcctgttcgtcaccaaaaaggatggaagtatgaggatgtgcattgactatcgatccttaaatgaagttacaatcaaaaacaagtacccac

SEQ ID NO: 65136 - DNA, 601 bp, Zea Mays
cccttcagcagcagctcttggcagacagggcagagcatcgtgcgttcatgactcacatccttcagcacaccggtgttcctattcctccagtacagtctgctccgcctccttctcttcaggctactactgtgctagccatttagtaaggacccagctacactcctttggtcgagccatctctcagctcaggccagtcaccctagacttctctacccaggtcgtaggaccagtcagtgctcagccaccggtgcctccagcgtctgttgtcgccactccagtcgtggatgtctatgtgtctgctctagctctagcagatccaacacacgtagccagcgtccgagtcagcaccagctccagcctctaccatagatattggatccaagactcaccttgttcgcgtttgcactgcttccttgacctcgacctgatgcgtctgctcctcctccttcctctgggctctaggttagggtagcccttttggtgtttgacgccaaagggacagggatacatagatgagagttcatgatcttttgatgtaatatatgcatgatactctctatattagctcttcgcttttgtatgctttttacctcacaaactc

SEQ ID NO: 65137 - DNA, 2588 bp, Zea Mays
atatcatccaggaacacgaccacaaagtcatccaagaacttatgtaacatcctattcattgcttccataaaagcagcaggggcattagttaagccaaaagacatgactatgaactcgtaatacccatacctggtgcaaaaagctgtcttctcaatatcctcctcacgaatcctcaactgatgataactagagttcaaatcaattttagagaacacctgggcacccctcaactgttcaaagagaacctcaatacgaggtagcggatatttattcttgattgtcacttgattcaaagcacgataatccacacattacctcttgcttttatccttcttctcaacaaacaatactggggaagcccatggcgacctgctaggcctaatgaaacccttagccagcagatcatccaattgccgcttcaattcaacctgctctttggagccatccgatacagggccttatgaataggctgcgtacccaaaatcagtttgatttcaaaagccgcatcgcgctccggtagaatgactggaagctctgctgcaaacacgtcggcatagtcacacaccacacagatgtcttgcacccacaaggcagcctcactctccaccaccatggagaaaaagattcacgacttccttgaccgatgatccagaagcaattgggacaacaatgataacgtgaactttggagaacttcccaagaataccacctccctacccgacggcgcctgcaataacactatcttccaaaaacaggatataactgtgtgatactaagttaatcaattcatacccaagataacatcaaatgcccccaaggaaatcaccacaagattagctgaaaagacctcatcagcaagaatgacggaacaaccttgacatactgaatagctactaatggagcctttagcagaactaaccacaattgggtgacccatcctctacaccgaaagaccagctcgcgacacaaatttctctgaaacaaacgaatagctagcaccagagtcaaaaagagcatgggcaacaaacgaatcaactgagatcatacatgtcaccacgtatccctgctctttgccatccgcatagggtagcacatatgctccaaaaatacccatagaagaggaagctcccagagtgaagttaacagaagaaccccacggagtcgccaaatgaggcagacgcggagctccaaactgagatggtataggagtggtcggtgtaggagtaggcgcggccaaaaactgaggaaaaccctgcataggcacgaaccgaggagtcccgagcacataaaactactacggagggggtggtactaaaaattgatgctcaacgcttgacatcatgctgacagtgccttgagaggaggaagaagtcactcgctcccatttgagcttcccattgggatttctcctacacaccacatccttgtgatcctgactacagatagagcacctgccactccactgacactcggcacggcgatgcgcttcaccacaacggaaacacaccagccccagcccgggcttaggaacagcacgatacctctaagtactccctcatgaagtacccgattcggagggtttgccatggtaggggtggtggcgctggtgttgtgactttcccctcttatgggctggacccccagtgttgcccctcctcgcgtcctggccacgaggctgatcaacacccgaagacttctgagactccatggtgtactgatgttgcatctccacacccaatgcctgctccaccgtagtacggaaatccaccaacggaaaggcgcctagagcatgcctgatagaaggtttcaggccctaatggaactagcacgccttctccaattcattgtaagccacatgaggaacaaagcggaccattttgttaaagcccacttcatactctgtgatagacttcttctcctgcttgtaagattgcaaatcaatcttcattttctctaggaaggtgactgggtagaacgtcctctcaaactgcttgatgaaaacatcccaagacaggactcctggtgaggaagagtgagctgcatgcacgcctctccaccaaatttgatcctcccccttcaacagatgtgtgccaaaacaaacccgatctccacacacaatctcgaaaaaatccatcttatcctccaaaaaagtccactgccatcaaaggtgtccagcttcatgcccatccattgcatcagagagaccactgacaggaaggggcacctcagccccaccacctagagcagcacccgcagggacagcgcccccaggcactcctccacctctggcaccctgagcagctccagtaggggcaacaggaatagcttgcctcagaatggccaactcctgctgcatggcctgcatcgcggctaacattgccgccggactcatagaatccccactaggatcttgcgggctgccatgagccctacgaggcggcataactgtagccacaggggtaagtaaataagtaaataaaattggcatagcaactcatcaaataatgtcaagctagcactgacaatttcataatatatcaatagtaaagcaagaaacccatcctatatgtgcagtgtgtcaatttatt

SEQ ID NO: 65138 - DNA, 436 bp, Zea Mays
aatccatgatcagaatgcccgatgccaatattgggaacgatccaaaagtgcgaccagtagtactcaccaatttctcatggcataattgctcctaagaaaactaaatataaataatgcaagggacattcctttgtcatcaacaaaggcatctcattgtttattgttacatatattcagtaggagattaatcaatagattcaacatggacacatatataaataaaaccaaccatgaaagcaaggtaagaagtcacacttgctcacattatttaattgatgctttccttttatatatcaaggcataaaaatgtatacatgttgcctttgctatgaaacctagccaatatatggagccgggtcagtgccagatattttgcgctcgacaaagcacacgtctccggtagtgatatatgtgttactgatgctccttattagaa

SEQ ID NO: 65139 - DNA, 484 bp, Zea Mays
gtggaagtgtacgtcgatgacatcgtagtcaagactaagagagggtcgaccctagtggaagacttaaccctggtctttgacaagctgtgggcaacacgcacaaagctgaacccggacaagtgcgtctttggtgtctccgcaggaaagttgctggggtttctggtttcgcaccggggcattgaagcaaacccggagaagatcaaagcaattgaggcgatgaggcctccggcccgtatcaaggacgtccagaagcttacgaggtcattagccgcccttagccgcttcatttcaaggctggctgagagggcgctgcccttcttcaagctgttgcggaagtccggaccattctcttagaccgaagaggcggaacaagcctttcaagagttgaagcagcacctggtgtccctaccaatactggtagctctagaacctggggagccattgtatttatacatcacggcggctgcagaagcggtgagcatgg

SEQ ID NO: 65140 - DNA, 572 bp, Zea Mays
ttgtgagcctccaacggacttagagccctggcagagctctaggtacgtgcccgtgcgttgccacgagacaagaaaaatgcccatgcatcgtgataaaatacccgtgtattgcgacggtgacataattactcacttccactggcatagaggagcatctagcgctaatggatccaaacaagttgttatccaagcaaacaatatgcaaacatgggcaggattcatacaaaccatttcccaaactcacgccaggtagagaatcaactaacaggctcacataatttttacagacaccaaaaacaaaatcatttcaaaaaatacattcagcatgaacccaacaaagcttacatcaggcatcctattaacctgcaacttgcaagttcttagatacgagaagatggttcagttcgtccctattaacctggaagttcttctaagattcaaagaaatacacaaatgtcacatatcagttctagagaaaaaattgtcgtatttttcagacacactttttccctagaccgtagcatctcttcacaaaacgtatggattaatgcatgccttagcattcagtgttt

SEQ ID NO: 65141 - DNA, 391 bp, Zea Mays
gagaattgtacctacgacgtcctagcggtgaggtgtgaggattcgttgtcctcctcactcttctgcgtgcgcactcctcctctggctctagccatctcgcgtccacacatatgcctcctctctctttggaccgcgaaaagcttctcctcaacgggaactcttttggctccagcgtccacacgggctcagacaaaaattcgataatcagagaagccaggagggaatgaaactgggtgtagctgggcagtgtcgacgaagtgtcgcatgctcaccatttatcatcctcggttgcattgtcgtgttagtcaccgaaatatgtagtttttagaaaagcaaatgataaagctaaacataataaaataatcaaggctaatccagaaaatggctacaa

SEQ ID NO: 65142 - DNA, 851 bp, Zea Mays
gccaaggtgtgtgtaaccattgatcattcaagtgaatcaagctcttctgatctgtgaagatcacaaactcattatgcaacaagtatggtctccactgctccactgcaatgagaattgccagatattccttctcataggtagacatgccttgaattttaggacctaaatccttactaattaaagctaaagggtgactagcctataacaacacaactcctactccatttttgcaaccatctgtctaaatacagaaggtttgactaaactcaggcaaggccaaaacaggagccgagcacattgttgtgttttctaccataaaggaagatttcatgttcttgagtccaaacaaacaaggttcctttcttcaataatgcagtgagaggcttggtaatcacagcaaagtgttgaacaaactttctatagtaccccgctagccccaaaaactcctaagttccttcacattggttggactcggccaggattgcacagcttctaccttggcactatcagtagccaccccagcttcactgatgacatgacccaagtaagaaatagacctctaggcaaaatgacatttagacagtttaacatgccaatggtcttgctgtagtaagagaaacacaacttccaaatgatgcaaatgatcctaaaaagtggggctctaaactagtatatcatcaaataaaaccaaacacatttcctcaagagagaggacaatgttgtattcattgctccttgaaatgtcccaggggcccagagagaccaaaaggcatgactacaaattcaaagtgtctattgtgtgtctaaaatgcagttttaaattccttgctaggcctaaatcttacttcatg

SEQ ID NO: 65143 - DNA, 619 bp, Zea Mays
ctttatcggaccggacaacccgtttgtacacatataaatacaattctaccggactacgaatacagtagtagacatgtacggacttgcacgtgttcttgaaaccattccatttgcaataggccagttaatacaatcaattctcaatagaaataatatcattcgtctcagtcatgttttcttttctctcaaagtcctttttttataatagctatgtttttcatgttaaaataatgttgtggctatagttagacaaaaagattatccttcgttagcctacgtatgaaattattaatgacaagcacgtgcgatacgtaaatgtcgatgaaaaaacttccataaacattctattcaatctatttcttaaaaactatactagtcaggtgctcgtgcgttataacgacaaacaaaatattagtgcacaacgaatacataaaaaacaaatatcacatattatcgatctcaatcttataaattctctggcaacaaccaatacagaatttcagggggcatgtcgcagggagggcgcgggaggcaacgtggggagggaggttgaggacgaaaatggtgtggacccaaaaggaggcgggagagagaagtgtgtaggacatcgggttgattc

SEQ ID NO: 65144 - DNA, 355 bp, Zea Mays
ctagtggtaaaggtctgcagtttgacatattatcatggtggaaggctaaccaagtgacatatcctgttttgtcatgccttgctcgtgatgtattggccattcaagtctctattgtagcctcggaatctgccttcagctctagtgggcgtattgttagtaaagttcacagtcgtctagagcctgatattgttgaggcactagtttgtaccaaggactggtatattgcatctaatagaggtaaaattgatatgttattttctctactgtagcctactaatactaattttcaattcaagttatgttagtgttactaattattaaatttgtgcacttttagattgcaagattaaggtac

SEQ ID NO: 65145 - DNA, 644 bp, Zea Mays
ggttgagacaaatggccttcggttggacaccaccctgccctgtactttaatgcttctgttgattggacttgcgcttcagtaaccgcaattggggttcccctcgttttagccgatctcctcctttatcacggtacattcattgcttatattttgtggataacacttcttcagaacatcttgaaaattctgggcgatacacccaatgggtgtgcccaaggggtgtctgccctgcttagagtgtttatcgcgttgtcctgaggtagtaacttgatgtgaaggaggggtttaatcatttgcctgagcagttgacttgggtccaaccggtgccgtgttacgtgaaacgacgagagttgtatgactcattttcaggtgtcttgaattgcttattgaattcttgcaactgttcggtgtcacacccggcgatacacccaatgggtgtgcccaaggggtgtctgccctgcatagagtgtttatcgcgttgtcctgaagtagtaacttgatgtgacggaggggtttaatcatttgcttgaacagttgacttgggtccaaccggtgccgtgttacgtgaaacgacgagagttgtctgactcattttcaggcggcttgaattgcttattgaattcttgcgactgttcggtgtcaca

SEQ ID NO: 65146 - DNA, 559 bp, Zea Mays
ggacggttgaggtcgccgaccggtggggtggtggagtccgccggtgggggaggaggaggccgttgtgtcacacgttgaagagaagggggagatggaggccgccggggttggaggatgttgttctgtcgcggtggaggctacgcgaccgaggagtggtggaggcaccgacaatggatactccgatcggaggccgtgttgaagaggaggggccttgggccgcacactgggctactgggccgcacgcggttagggttagggatttcagaaaacttgagaaagagatggagcggacaataggaggggaataagctgcaatagtagtctgccattccgtgttctgcctttctgccattccgtgctctgcctttcacattcctgttttgtcatttccattcccattctcattctcaccattccttgttgcacaccatgctgtcatttccattcccattcccattctcaacattccttggtgcacaccctagtcagccccgcgtcacgacccccattcccatagcgcaaaccatcacactccggacgcggggcccacgtgacagcc

SEQ ID NO: 65147 - DNA, 714 bp, Zea Mays
atatatatatatataatttctcgtatataacccgtgtatctcggcttcatatgacttttcaagtactatgactgtgttggtatctattgcagcttcatatatacgtaagattgctttgcttgcttagtaattatcacgcaccattcaccaatctatgcttatgatagtgcgtcaagtatgcgtaggggtggcacgatccaaatgtttcttatgacttttaataaattttattagtttaaaaataaataggaatagagcccgactcttctaatctgatttgatccataagttttatatactctaaaatttagagcccattaccaccctaagtatatgtatgtatgactattcctgctcaatgtaatccaagtatttttctccacacctatttttatgcttccaaaggctccacgctccaaggatgatagcactattgaaccctcaaaacccatagctgccactcttctctgaacccctcctctagggattgaaggcaaggtcgagtctcataaaaagcacacctatttctaagcttccaaagctccacgctccaaggatgacagcactatggaatccttttattttgcctttgggaatttttaaagaagctttcctccaccagtcaacaaagtagacatctcttctcttaggtaccacagcagtaaggccaatttgggataaggtagcatgccataaccgccttgcaaagacata

SEQ ID NO: 65148 - DNA, 293 bp, Zea Mays
tggctttggatttcacttcacctattctagtagagttagtggggttagacattgtgcctacatcttttctagtaacaacctcttatatttagaccaccatattattatagctccacatgctccatctactatggtcactcgagataaaaaggcttcacctttagtcactatccctatttagcatgtacctatagttgagcctctccctactctaatagttgtgacagctccatccatgaccatacctgctcagtctctatcgactcgagtggttgagatagttcctcctgctc

SEQ ID NO: 65149 - DNA, 469 bp, Zea Mays
gttagttgtaatgaggtgtcagtggcagtaggttgctaggacacgataccgagagcgagttggcaacggaccgagggtccacgtgtcaatgttagacagacgtcagggttagttgaagggtgaaaaggcaagcccattaaggatagttcgaatagacctggtgaagccccaaagcaataacagttcaaatatatgtccttcctctaatggtctacatttctcatctcatattggttgccatagaggtggccaaccctgagtgccagcaattcacaagctcactggtggagggtgaggggattcactacgattccaaattaggtataagtaacgagccctccaggcattcatgccctgatatgtgtctcacgtgtcatatccatcccgcggtatgtgtggcatgcaacaaatagtgcattgctacctttttagtttcgtggtggtgttgtatggataccgtttcaatcca

SEQ ID NO: 65150 - DNA, 395 bp, Zea Mays
ccacaagtcataactccagtatgtatgcctgggaatatccaacaattaattttgatgatatacaaggtatacacacgcatgcatggtgttagttgggcttcttttctatccgtctattgtcattggtctatcaaaaaccacagtttgccggtccaatcctatcccacactttatgtatccttccccagggtggaaatgcatgatagtggcatcccgtctgtctgccacatctcgcccgcccctaatcctctcacctcttccaaattgtaaggctatatatatctctagtcgttctcctgtctcatttcctatcccacctatttcaaatcccaccgtaaacagtgctatctatagtgcagaacataggtcgcgactgccaggctaccaactcaatg

SEQ ID NO: 65151 - DNA, 424 bp, Zea Mays
tcactgcgaaaccagcttttgccagaatgaagatggtttccccaagttgctgagagcatgcacagttcgtctcggaatcaggagccaaccagagtatgatggtcgtgaattcgtcgagcatggcatggagaagtgtgtcatgactgtatacattggatccagtctgcaccatgtggaatggagtgtcactgctgctgggcacagattcaaagacacctgccaagtcgtcgctcgcaaggcattgaggaccctgtgtcaactgtatgaagaagaagtggccgacacccgcttagattcttttcgccctttcagagataccatcccgtttggatggccaggatgcgtgtattggaaggtcagcagctgcttgaggacgacccctcagttgtgtacctcactgcctacctgctcaccctggatgcac

SEQ ID NO: 65152 - DNA, 464 bp, Zea Mays
aggtgatgatggatgtacaataggaacaacaatttgagaaggcggagacggttgggcctgcgacgacggctatcgtggtggatcaaccaattcgacatcccttcgagccaaaggataaaattcttgatagcttgtccaagtgtctcgataccttcgggcccagggatgtctagcatgtcgtcctcgtatccttggacgactgtagtcacttctaccctgcaatattcttctggaatgtcgtttccatggaacttgcgtcctatgatcgcaaggactgtggctactttctttgtacgctgattgttaataccatatcttataactagtgtgcatgccacaggccttgtgatgtcatcaactggatagcagaccttatttcccgttgacgcgacagagcttgggatggtcgtaccctcggtggaagccggcgtttgagctgctggaattatttgcatctgtggagt

SEQ ID NO: 65153 - DNA, 397 bp, Zea Mays
gtgggaagctatgcacttgggtggcggcatgctgctccggtgtgttcgccgtcgagaggtgagcggcgatgctgcccagtccgtcgtggggtggaagatggccttcgggccgttggattcacaagcgacgatctagattaggcggaacataccccttcgcctatctcgaaactgggtcgttgatggttgatcctgcgaccacaattgcgtaccggttcggattgaagacaactttaatctgagccctcaattgcagatctaacgtcggtcatgtacctacaccctttcggctccgccgttttgcaaaagagacctcatagttttagtttaacaacccgccatccatgcggggtgaatatgagtcttagggaacttatgttttaacccctgtattctt

SEQ ID NO: 65154 - DNA, 925 bp, Zea Mays
cctcctcgggtatataaccagctcgggtctggagcttcctccatcaaatccatggttgttagggtttaatcatgcgcacaaagtgagggatgggaggtcgagaaagaatgtcgctgcccccgtagatccaccgcgtgtaaaattcgattcaccgtcaatcgggtcccaagatttgtgtcctagggcttcttccggcctgcgggagggaggttgtggttgcgccatggtggattggtcacctgtgccatcccaattgctcaccggagcagtccctgcagtgaagatccgctatctgtcgcggggcgacttcaccagggtgccttcaatggtatggtgtccctaatcctattcggtttgatgttcgcattctgttggtccctccgatgatggcgattgtgcactaggttgcgggtaaggcgctcaccaactcgttcgctgcgcggtggcggcgcgccgccgtgctctggcgaggcagggttgaagacaagcttgcaaccgtcggtggtggttggatcttacttcgacgctcccgattagatatgggggaaaaagagctcggggttgtggatccagtgttggacgacccaaattagatggtgcataccggttcggccccagttcatctcggccgtagattgttggtccgacgggtagaattcaatcgcagtattttagaatcctaaccagaggatttggatccgacggttttcgctccgtaccggttcattttaagtatgacctaatcctagcccttggtttctaatccagcggccagaaacgaatcatactccttcaccgtgcgattttcttaaagagcccatgtgcttcacaataatcaacccgcagtcctctctggtaggaatctgagtctagagattttagtagactagcccctgttctccctgataattgaggcatagtccag

SEQ ID NO: 65155 - DNA, 624 bp, Zea Mays
atgggggagaagatacaaaacaacatgatgcgcgccaatgctggaattgcagccacaacgtccgaatgggacctgactaaaccagtctcccatgacaaagagtttgaggttggtgatacccaggaggaactagaattctgacaacagatgaacactctatggaggaactgtcatggcgcttaggaagtgcacgtgaacgcaaggccactcgtgaacttgagcgtgaggaggccgagcatgatcacgggtgcctacagggtccaccacccatcccacagaacttgctgtcgggttttgctagggtcatgcagaccctgagtcaagctggtggcatcctcgccaagatcaccaatggccttccccactcgccagattgagaagtctattaactgatcctcactcaagtagtaaaccacctcctaccatcgactcttgctgagggaaacacacacaaccacatcaaaagctattctaacgaatgaaacaacattgaagcatcatgcacatgatgatatgatgaagagttgaggcactaagaggagtatgattggaaccatgacattccatagctagggactgggccataggcagcttctgctacgacttcggtcaatagcttcgtgc

SEQ ID NO: 65156 - DNA, 646 bp, Zea Mays
cttacatcttgtttcctatctcttcaaaatataagatgtaggtagttcatatagcttttcacctctcaatgtcaaaataatatgacgacatggaattcccatcttttcgaatagtttgcacaagcaacaaccaaaattatttgatgtgcaccactcgagcactctatctctcatcaacccatcattaatcacaactaacttaacatcatcttgttgtgtagtacctagaacagagcaatggtctctagcagcaatcacttctttttgaaatatgtcgaacacgttatgtgtgtacaatatgcttgcttgtttctccatagcccacggggtatgtaagaaaggtgtggtatgtatactaacatgatcatcttttaattcctcatgtcattggcattccaaggatgtatcaaatctaagccagaactcaacaaaacataatgttcggtggataaagagattgaagaatgaattggagcttttagaccttgaagtagttcttaggactcctgcaagaggtatatccataaagaatgctggaatccatggctctcgaatttgatatctattagccaaccattcattgctctcaagtccataggcaactatgatagcattccatcgcatcttaaactcttctctagtttct

SEQ ID NO: 65157 - DNA, 278 bp, Zea Mays
attcagtttactctaactgaacatcacaactcacagcctgacagggcatttttagtggcattcttctccctattttgtacagtaatagggcttacaccccacaataaccttgctctccattctatggtctaccaacttgctacaagaaccttggcacaaagtcccatgaatcaggcacagcagggctccaaggtttacaaaaactcattttcagagtttcattagtctgaaccaaatcagacatctcacccatactgacagcccatcttcacacaaac

SEQ ID NO: 65158 - DNA, 407 bp, Zea Mays
ggttaattgagggatcctcttctgtatctaagccaagtcgctccgctcctgtcgaagctaggacagaaccggatgaagggctagaactgaagaaagcggcagagcaaccgaaggccctgactccgttgcgtgagacggagctgccgaaggcatcaaggattcctgtagcaactttgaggaagaggagaatggccagcgtactagacgctatcatggaatgtgtaaaggtaccaactcctccttccgctgcagcgcctgatacagagggtgaagttttaaagaaatctggcgaagctagcacgacgcaggctacttctgaggctagaccctcagttcctgccgaagcacgaccttcggaggctgctcctctaaccttggaaaaagaaggtgtccctaagaaatccaag

SEQ ID NO: 65159 - DNA, 1154 bp, Zea Mays
gccctatctagcctgattcggcccacgtccacgggaaacgcgcccgcgcacgcccgcgcacgcccgcattggcggctttacatagaagacctcagctttttgaacaaacagtaaagaaccctgggcactatttccttgtctcactaacatttgcacttagacccttcctctttcttatcttcgcaaactccagtccctgactaatccctcaactaatagcactaatccgggccgaaatctctctgtccacgacgacagcgaaaaccagagacaaaccagggtgttctaggcgattcaagcggtctagttcaatcaaacgggtctgtgagcaacagggaacatgagggaagctagaacatcacacagaagggcatgaactaacccgtagacgactggccacggcgagatgtctcacggcggcgttctgactgatttgggggaaatgggaaattgggaggctctggtggacgatcagaggcgagagctggtgctttagatgcgtaacaacctagcggagctcactggggcattgatttatagggtccatcagcggtggcgcccaatttgaagaaatcacgctggcggccgagaaaagggactgagtcaccgcgacattctatcgtggcgttcactagacataggcggatggctatcactggttaacctccacggtgcaaggcgacgtggtaaactacctaaggcgtggcacaaccggggaaaacggcggcaggctcggcgatgactgtgcggccacgtcgccgggcaagtgggcacggcgacagggcggccacagtgccccaaactcatccacggtgaagatcttttcactaccgagcgtaatccacttatccgaggcatgaatcatggcggccggcgcgaatccaagggcggggtcaccgccgacgaggtgcactgcatctgctgatctttttcagtgctgtaccatggtgatcatcatcagagcatctgacagagcaagttagaggccttggttctccaattttgtgtggcaatttgatcatttgtctgcagcaaaaatgttgtcccataatccatatttgtttttgttatagcaaccatacccaatcgatcactggatcccattcaaaattgatctccaagttcttccaagttcacaggtggccataattcag

SEQ ID NO: 65160 - DNA, 481 bp, Zea Mays
aaaaaactgcgaaccaagcgggagaaggccaaaataagcaaatagatatggctgcacataaagcatgttttcttagcaagttgccaagatattgtcaagtacatacatactattgtagaggatctatttcacgtccatgtattttaggaaattttttggcaatattgtcgagtatcttaatcagataaagactaccatttaccagtggctccaattctagatgaatagcatggttcccagttcccataattatgattttgtgtacaaccgtagacacagtgaaaaagcaaagttctatactcacactatgtttggcataaatcactttcgaacacttcttcccaaaaaagatatttgcactctacctacattgcacaatgcattatcaccaagttagatataatacaataatgcatttatctaatgctcatgaagcaccatctgatccaacattcagaatgccaaattatgtaagagaaac

SEQ ID NO: 65161 - DNA, 538 bp, Zea Mays
cattctctgcaacaatccacaccgaatgcaatttggatttaggtttagcctgcgagctccaagaggatacagaaatctttgccccagacattttcattttcaattcagggaagttaatcatttcatctagtctttcttgagaaggaaactgcgtcaagaaaccagagtgacacttggtagctttccaagttcgaccccaaggaaaatgaaaaccaaaatccttttcaagatcttcagcagaaatcaaaccctctaccactttcaccaaaccaatgaaacttctcttaggttttttcgacagtggtttggaaaagtgagacgagtaaaaccctaacccatccaccgccataccaacaataggcatacaaggtttgttttgcttggggaggacacatctagcagtgttatgagtttctttatgacagatgtcacaccataaagatttgaagcaatccctggcatgatgcccctccgcgccacacttttgacagaaaaaacgacgaacaatttcattctcttttttcaaaatgggcggggg

SEQ ID NO: 65162 - DNA, 280 bp, Zea Mays
ttactgtctgttcatgcaaaccatatctagcctcaaattctttttggaaaccttgtccaaaatcctcattaaattctcctctgctcaacccagaagccatctaggttgatgacctctcttttcacctggatatggtaatccttttccttgcgaatcatgctggctttatcatccgaatctctggatccttcatcgattctgccccgttatctggttatctgctataacccgttctcaagtatcagatgttgatctacctaaatctctcatttctggtcag

SEQ ID NO: 65163 - DNA, 769 bp, Zea Mays
ttttcattagtctctggattgggcttcaaatactcagaagtgcaggggccctgggtaaaagtttctaagacacagatcggctggcgccaggactacgggttaaattcgcagaaacaaaggggctcttatgcaaatggtgcgggctgaaagggtatggtgcattatgggccgttggatcatacatcaagggctacgattagatcggccacaaaaaagaatcggcattcgatttcgacctttggattgaagatgtgtggctcagattaggtcttcacccacgtgatccggtcaccgcaggatcaagatccaatgattgcggcatccttctactacctccctgcgcatgacacggcgacacgcacccagagcggcggaagcacaccggcgaatgcgcccttcggtgaaccccgtccgattcacacacccgactctattttgatgaatgctcgaccaccatgaatctcatggctaacccctatccatgaaacgatgcacccatgcccctacccacgctgaagctccgattcacggcagcgccattgccgggaaagcgcaatccaaggcagcggcgcactaatagccgagtcccgggggttttacacgcaattaggttgttcgtgaagctaaggaaggtaattttatgggcgcggacgacttaccctggacagtcgacgatcggtcgtggaggaagcctgtgcacgcactctggtgagggattaccgggctgccagcacgccgcgcaccccgattgtgagggtaacacccccac

SEQ ID NO: 65164 - DNA, 565 bp, Zea Mays
cccagagccaattgtgccataggacaacccaaagaccatagacacataatgccccaataaagtctagagaataaataatgtagcctcgagagccttgtgccttagagtggttgttattagtttaaatctcctaggcctcttgtgccctatgacactcatgagaataagtccaggtccctagagtacctcacgcccaaaggtattataaagaataagtatctaggacagtttgagcctcgaaacacatggtggcacttagacactctagattctatactgaccttgaggtccttaagcacacgagccttacctcatgaagacagacaagccctgaccctttcagggcacaaaaccccatgggaacaagagacatggtgagcttaagtggaatcctattacaagatggaagaatgtgtctaggtccaccaaggacagtatggccctaagaatagaccccacatctaaggacttgaaggtaagtccataccaataacttaatggaaagtcttatgtataacacattaaatgtgtgatggtttactgagagcacctagagggggggggg

SEQ ID NO: 65165 - DNA, 747 bp, Zea Mays
cgcggccagccccaatccggtcagcttatccctctctctccctcgtttgagcactctcatagctctgtgatgcttaccgagccaccaattcgaactgagagaccaccaatcatcgggaacgcgatcaaatgctcatggccttcgcggttctcgtgggcaggatagaataggccaccatttgcgcaattaaattaggggaaacgtttgttaggtaatgaatttggtttaggtcgaagctgagcgccagtcattgccccatccggccggtcttggtgctcgccggagctcggctgtgcgcgcaacgccttcgtggacttcaaaccgagaatagatagaagtgcgagggtgtctttgtaattgtcagcgaccgtgttaaatagtgccttggactctatcggggtattcaagaagacagggacccttctgcaaggttgccaacgcgggcgtgggcgcgccccgtttctctgtgttgctgggtcgtctgagctgaaatcagcccaacactattcacaagtttctccttttcttttaattccagagctaaaacaattatagaaaagtgtagaaaaattctaaaattgtgaaaccaattttcctaggcttcttattttccatagtatttaataaaattagtttcatgatttttagataaaataaggaattttaaggcatttaaagtagattaaaacattagttctggatttttagaaaataaatggttatcccaaaattgctcaaactttttat

SEQ ID NO: 65166 - DNA, 696 bp, Zea Mays
tggtgcgtacggctggtgggggcccacatgtaggagacgtgtatacgtcgttggaggcagaacagctgttagcagaacgcgtcggaggcagaacacgtcagaggtagactactattgcagtcttaataagtagtagagatatgcgcacaccatcagtttttactgtctctcggaaagaatttgctttccacgaacatccgcttgctgctcctggaactgtaacttaagttgcgtcgacgcttgcttcaaccacctagaagttcctacacatactagaggtaaactggagcctcaaatcagttacccatgctaaagtggcctgattttagctgagttgttgctgttagtgtcagttgcctgtgaaaatattttcgagcagcaaagcatcgaagtgaactcatggagctcatgtcattggccgtccgttgagctggtcacggatgcttaactttctcgtggactcgtgggtttggcaaagccatcgaatgatgatgtcgacgtggagtcgccagttgtatcaacatcatcgttgtattgtatcgtcgactgcaagctgctggtccagcagcagctcagcgcacgcgttcttgaccacatcccaaactgttcatcaggttgtggctatatccatcgataagtgcttcgaggcggatttactagtcgtcagtttcatgcacgtttgcagcccacagaaat

SEQ ID NO: 65167 - DNA, 447 bp, Zea Mays
gcattttagaggtaacagccgagtccttttgagccacgtcgtcgttttagaaataacggccgagtgattactggtgacgtcggtgttttagaaataacagccgagtgataacgggccacgtcggtgtcttagaaataatgaccgagtgaagactggtaacgccaacgttttagaaataatagctgagttatattgggccacgtcggccgttttggaaataacggccgagtgatgacttggcacgtcagtgttttagaaataacagctgagttatattgggccacgtcggagtttttggaaacaaatgccgagtgatgactgggcactttttagagatggcatctggcccgggaaaaccccatttgtaccgtgtcgtcgcatgcctctgcattctgagccctagccctgcttttctgcttccagaccttctctgcttccttgtgatct

SEQ ID NO: 65168 - DNA, 523 bp, Zea Mays
gctttctagaactagcaacaaaaaagaaagagtgaagggcttggcgactggcgcctggcagcgagggttctccatccctggacttctcttgtgtagacgccatcgggtgctgcggcacgcgcttgctgtagcaagcgaggaataggtgagaaatcctcttcgctttacctttgatttctttcgcgcactttgcttcttcagcttcttcgacgccaatgctcttgatatctgatgcaggctacggtcaccatcccataccggattttgtttgggtcgcgctgcaagcagtaggatgatgacatcactacggggagaagcgacaatcccatctccgccgtgggaatcatgggtgatcgcttcgttcttgatggtttcgcctgtttttcctggtagtcttaggtactattcttgcttacctggccatcgctggcactattttttgtggcatctggtgggttcgactatgacgattaccctcacctatgtaaatcctggattgatggattttttaatagctaaatag

SEQ ID NO: 65169 - DNA, 1213 bp, Zea Mays
attcctacgtttcactgacagttacaaaaacacccctctaattctaattcttaacaacgtcaggtccacgacgtggagcggtggagcagtagctccgacgagctcgctctggccagaatacgccacgaccagtgctctaaattggtttactcctaattcaacaccgaagaagtgcttcccctcgatcaattgcactagcggagccctaaatcgctctgtccacggaggtagtgcaaaccatgggtgagcacgggtgttcccgacaatctagcacgttctagtttaattgaatgggtcaaggaacatcagtggtatgtaagagtgctgaaacaagagagtagagggcaagaccggacctgaattgcactgaccacggtgagagcttgttcacggtggcggaaaacagatttgggggaacggggcaattcgtgggctctggtgagcaattggatgcacgagcgggtggattggacgctagaatacctaacagagtcgagggtgtgctcaatttatatggctcttgagcggtggccggtgaatttgaactcgcgtggtggcggtcggggaagaggaggtccactggcgcacgcgattggtggccattaccgtggcaacctcaccggcgatcactggatgggctaacacgagtcacggcggtgtggttaaagtaccgaggcacgtggcgcaaggctgtgaggtgtctaactccagcgaggggagatccgaagcgaccatgagctaagcggacacggcggtcggaatgaacagtggccagagttcatccactggtgatatttcttactccctctgtgttatccaactgcaccgagcaagaatcactgtggtggcctaaatccacgcgcggggatcgccggtggtgagtttactgagctggcgatctgatctggttagtataccatcacacagctcctttagtcgttctgataaagcatgtttggggttgatttgctccatattttatgtagtgatctgaccaactctctgcatcaaagttgtagcctaacaaaccagctttaactttgttacaatgttcaccatcaaatagtcatgggatcttactcaaaatcgagctctaagttcatccaacttcagtgttactgaaagttcagacctaaggctgactgagagcacaactttgagcttatttttctccaaactttgtatgtaatcaaagcttagttacttaagcaaa

SEQ ID NO: 65170 - DNA, 327 bp, Zea Mays
gtttgctggggaagaagtgattccggaaccaaggaacgacgaagtcgtagtttttaagagcttctttagagcaggtcttagattccctctatacgagatgattggtgaggttttaaagaaatttgagatctaccttcatcaacttaccccaaatgccatagttagactcagtgtctacatatgggctctccaaagccaagggaagagtgccaatgctgaaggatgttgccgtgtgcacgaactccactatcagacgaaggctagagttgatgggctacataagaacttcggatgctacaattttgcataccggaaagataccaaagc

SEQ ID NO: 65171 - DNA, 1055 bp, Zea Mays
cgcggggacctgtggcttccacgttcactgacgggcggagcccatcgctcagccacacccctccctccgcgcggactcgttcgctgtctgtctctgtcgtgtgggcccctttggtcagcactttcttctccgccgcgagcttcgcgcgccgttgtaacagccgccgccgaggaactcgggaccccttcaaccacctcgcccacggacattgcgcggactcggactcgccccgcccctatataaacccggtagcgctagcttctctatccatctcgacggaccgtaggcggaaaggaaggagtgtgtgtcgtgagcatcggcgtgggtttggccggcgatttggtccttcgattgggaccgggttggctcggcgacgtcgcggggcagccatacgaagcttcggtcgacgttgggggccttctcgggggcgggaattgctcgtcgtcgtgcaagctccgccgtgaatccgctctcttccgtgggcgggactgcaacccttcaatcgccggtgagacccctctctgtagattcactatcatcccctcttgattttgcaccgattaatttctagttcggggtggtttggcaccggattgcgcgttcgccggcgaagctccgccgtgggtgcgccaccgccgccgctcggggtgctgggaattgggggaagggctcctgaccgttggatctcgttgtgcggtcgagattagatcgtgaggataccccttcgccccattaaaaaccagccgttgatctctaatcgtgcgactcacggcgcgtaccggttcggtcggggggaagatctaatctggccccttgattcaagatcggacggctctgatgggtccttaccccttcgctgtggcgaattaacagaagagcccctccacttatttgaaataaacccgccgtcctatgtgactgtgctttgagtcttagaagatttacccagagccccctgacctttcttataattgaggcccagtccagtgaataggaaaatcatagaaaatgatttagaaaatgatttttagtattaaaataaatccagaaactta

SEQ ID NO: 65172 - DNA, 546 bp, Zea Mays
ggagcatactcttccgagtagaggttcatccacagtgaccctgatggagtcgtccagtggatcagcagagaagtcgaagcctttgacgaaattttaagtgatggggagacttctgcgtgttcgctggcgcacgaggggtcacggcgatcttagagaaagccggttgtgaacatgttaaggctgcagctcagccgggatttgttttctcagcggatgtcaccaaagacccttcggcataagcagctcggtgggatattctactccgatgtgtggatgaagggcggtcatgagatggatgatgaagcgattaaaaaaatgaaaaagaatctcacgatgctcaagaagaagccaagcgagctaaagaagctaccgagcgcgcaaggctatgtacctttaccgaggtttagcttcggagttcgttttcagcttcggaacttacaaacattttttatgatgtagatgaactttcacctccaccggagccatataaccccgaagctgacctggccatgaaggaggcgttagatatgataagaattgctaatg

SEQ ID NO: 65173 - DNA, 271 bp, Zea Mays
tatttcccattttccttagactctgggtcgggcagcgaatactgagaagtgcggggactattctacaagaattccccagactcaggctaaaccagggaaggactgcgggttgattccctaaatttataaggtcttttctgcaaaaaggcatggcgaaggggtatcgggaagtcctggccgcccgatctaaaacggacgcaccagattagatctcaactaccctgaatcggtacgctatgcagatccttggatctagatccaacggcctggg

SEQ ID NO: 65174 - DNA, 470 bp, Zea Mays
tccattagttaaaaatttaagaatttccctttttctaatagtccttaatgggtgataggtatctagctacttattaggtatgatataagagatggataagttagggcaagaatagcttggggtaaaaagtttatggtgagaaagaactccttgttgggtggtaatgcatctgaagatcgatttggacttctctccttccttgacgaggttgatcttgttcttttccgatcttggtctcattgagtcggggtcggtgtatatcatcagagctgggggaatatggttaagatagttatggatgagatagactacatgatgtaggtcaaaatttggtttgatgtcaggtggggtttgatagattatgcaatccatcaagactctattggttgggttagatctcatgcatgtggctgagttggtctaagacactagaagtttcaagtgcatggggggttatggccttatctttt

SEQ ID NO: 65175 - DNA, 816 bp, Zea Mays
ttgctatgacagtttgcgtctaactaagagatcctttttggacctatgcaccatcttacgtgagaggtgcagtatgtgtgacaccttgaatgtgtcagtagaagaaaaggttgctatctttttgcttgtagtgggtcatggcactaagatgaggatgattcatagctcatacgggtggtcacttgaaccaattagtcgctatttcaatgaggtgttgagaggtgttctatcattatgtcatgaatttatcaagcttcctaaccctttagctgtacaacgtgaagattctaagtggaggtggtttgaagattgccttggagcactagatggtacacacgttgatgtttttgtacctttggctgatcaagggaggtataggaataggaagcaacaaatcaccaccaatgttttgggtgtttgtgatcgacacatgaagtttgtttatgttctagatggatgggaagggtcagcttcagattcacgtgtgctacatgatgccatgtctcgggacgatgcatttgctattccaagtggaaaatattacctagtagatgttggatacaccaatggaccaggctttcttgctccatatcgatccactcgctaccacttgaatgagtgggctgcccaagggaagaacccattcaatgccaaggaattgttcaatttgcgccattcaatagctagaaatgtgatagagagaacgtttggggtattgaagatgaggtgggctatattaaggaaaaactcatatttttacttatgtggcggtaagtttcaattttttttgtttttatgttgttacactatcatcaa

SEQ ID NO: 65176 - DNA, 944 bp, Zea Mays
ggatcccttgatttcctttttatttttctctacatactcaactaatggcattaaattatgcaaataacaaataaattaataaaggaatgtgcacctcatgctgatgttatttttgtgatgcatcttatttgaatcaaaggaatcttaataaaagcatttactccttccataattaagtagaaaaataaataatgttaaggcaaaccatgagtgttaaaatcacattgtgagttttgtgtatatatggaaatctttattccagaacagaaattcaaatgtagtttgaatccttgaatttggaaaataaaccagaaattataaaagaaaaaaatagggaatcacctgtattgggccgcagtcctgaaattcggcccactagcttcaaccagcccactagatcctaccgttggcggcctcacccgtgcgccatatgtcactgcggtgtgggtcccgctcgccagcccaaatctcttctgtcgcgtggagtcgcttccttgtggggtcggatgaccagtcgtctcccttccgcaacagctcgatcttcctcctccggtcagactcgggcatcgctatccggtttcctctgctcgtgattctcgccagctgttcctcaaccaagcgcatagcacgcggagtatcataaccgacatgctcgaatgagatttatctgggttccgctcgggttgttgtggatcttgtctgggatccctattcctcaccgggcccctattgcgtggccgggattctcggatgccggttcggccgtggagtgtataaaacgggtgttcgaccctcgccatcaatcggaaaccaggtcgcttcctcgtcgcggtactgcccggcactaggaacgcggtgggaagaaggttgacgccgtcgtctacactctcagctaaccagtgcctgggcctcggttggccacggtgggcgaccctggtggttca

SEQ ID NO: 65177 - DNA, 1172 bp, Zea Mays
tcaccgacccgtgggccaactacgtcagcgctactccttcttcttcgcaacgactctcgcggaccgaactcaactgaacgcggcgatttaccagccgcggactccatgtttggcgcaacaaacccatggaatcggttttcctccgccagcgccacttcatctggacttcgtcatggggtttatagggttcaatcagctcctacaaccgagcgctgacagagaaagagagaaagggccgagagcctcgcccgtgagagagctgagctcggcgagaggagagatcgagcaccatcgtcgtgcccttcattcccttgccctataagatagatccgtgaccgagcccgcccaaccgcatcaaggctcgagctgacctcaaccacggaatctggagcagcgcgggtccaggtcgggcgcgagattcgccaccggcgtccctcacctccatgctcgtagagcatctgctgcgtgttcagaggtgtgcgcccgtgaaccctctgcgtgaaccggtagaccgccaagtgcatggccgaccggaggtacggcgattgctcgccgtcgattagcgccgccacgggcccgtccttcactgcgaacacgcgcgtcttcgcctctaatctcggtaaagaaccctttccctctgtccactttcagctcctcttcgcaatgcaccgatcggatttcgctattgggcgcttgggaccgaaattgctgttccccggccatggcaccaccgtcagctcgggcagcgtcgccgttctgctcgggtttatgggaagggatggtcgtggccgttgatgataagatgggcgggtctgattgaagggcggtagcatttggttatgggccgtcgatcatcgcacgggcggacgagatcagtgcccacgtagtgttttaggctgatgcgtcgggtgtcgttcaattttgatcgaacggtcgaagattatttaaatctggtgcgtcgatctgaaacggacggctccggtcgcgtatgggttcataaagatggagatctaatcctggcggtctgatcatgatcggatggctcagtggtgtcgataccccttcggatagccggttttgcaaaagaaaccccactatttttatgcataaacccgccatccctcgcaactgtactctgagtcttgggattgttacgcagtggcccctgcgtt

SEQ ID NO: 65178 - DNA, 465 bp, Zea Mays
ccctatcaagctctcttgcagtcttaccgttacttgtccatgtgccagtgtctatcctctgttgacgtggtctagagcttacaccaagattgtagtctataacttgttttggtacttgtggtcaagtccttaccatcatcctaggcagtggaccagatccttgtggtgcctcctgacttaacctagatccatcacccctatcatatcatgcaccagctctttgtctgaattcatgctcctcacaagactgatatataacatcctgaagttcatcatcataatcatcatattgttcttcaccataatgggttcttggtgcttcatctgtctgttgcctctactgaatccttggcctattctttcctttgtcttgtctaactcaccagtaaagaatgtctatttaaagagaaacatagggacaattcttgacatccttgcctcgatgtgctaaatactccttcaaac

SEQ ID NO: 65179 - DNA, 537 bp, Zea Mays
gtcggatcctgagctgatgataacctgaccttagatctatctttgagaacacgctgggtcctctcaactggtcgaatagatcttctattctgggcaaggggtacttgttcttgattgtgacctcattcagagctcgataatcgatacacatccttctggtgccatctttattctccacgaataggacaggggcggcccaaggcgaggtgcttggccggatgtaacctttctctggcagctcatcgatctgcttcttgagctcaaccaactctggtccagatactctgtaagctctcttaaagatgggggcggttccaggaagaagctctatggcaaactcaactttccgcttgggtggcatacctggtaggtcctttgggaacacgtctgggaactcggacacaaccttgataatctcaagtggatctgcttcactgctatcgacagccatctgataacaacttcctttcttcggctcaggcgggactaactcggtcaccacttcctctcctagtggggacatcaacttgattgtcc

SEQ ID NO: 65180 - DNA, 888 bp, Zea Mays
ggcacgagaatccataacccaacactcgggaacagggggagcaagtagcacaatcaagcaacaaaatgctggcgagattgtattaccaagcgtgtcccgacaattacaagaccgaggtatttataggggtagccatgggttggtaaactaagtaccgtaatgcccccggctaccatctatattcccgccatgcacaatacaacatggtaattgcgggaccaagtacagatttcttggttacactacaattgataccctcccgagccacttacaggtgggccctgccgatggtaatctctgttgcatagacgcttcttggagagtgcttgagggacacacattgattatgctttctatgaatgagggacacacacatcacaggggaatgcaaagccgcatggaagcgatctcatcgccctaccaatcttggtgggctgggaattctcaaccttcaacatttttctgtaacgctcagagttaggtggctatggatggactaacctctcatgataagccttggtataggatgaaagcactatgtatatagtgaaaacttcatgtgtagttttagtaattggaaaaacttctagacgaacctttaccctgatgttttgaatgagttagttttaagtccacatccaagattaggaaagaatgacaaccatggtaaggatgataatggacacaaagaataatcaaatgcttaacattcaaaagtgcaaggagaaaagaaaaatataaaaagctcaagataaacgataactaggatatttttgtttaatcgacccgaatacaatagagtttgtgatcaaatttaggatcgatggtcatcctattaaaaggagagtctagttatacaatttggtcacctagtactactagttgttg

SEQ ID NO: 65181 - DNA, 995 bp, Zea Mays
tttgtaacttaatttccctttgggtttgaaggagtaattagtacgtttctcactcgatccccttcaatacgggatggaatttgagtttctaaactgaacttgccgtcctagcttgtggataccggtaccagccacagtgccacattctgtctacttcccgtgttctcttcctgctcttcccattctacattccattcccagccatccatccatgtgcgaaactgacaaccatggcctcccatacgtacagtaccaaccatgcttcgcattatgatcgaggtggagatgggcatgcaaggacgctagctacatttggtttgtcctaccgattcagactgagtatataaatatcgtgtttggttgtaaatacgatttaaatgtagatgcaggttttctttgttcggttacttttgcatggatacaagtcctttctacttaccaccgttcgattggtgtgtacaaatgtcgtgagactttagttccatattacttatctagatattagagaatcaacttatatgtaggaggcttccatagaggcaacacgtttcgcgtcgcctaatttgtgtcaatgtgcaatcgtctcgtgacgttatctaaactacagtttttttttttactttttgtttatttgcctatcaaatatcacacataaactaccacgtcgaccgggaatgcacgttacatacgagatcttcggacgcttacacatagggagatttcaggggtggttcctcgaatttagcagattgaacccgtcaagacactctataaaggggaggtccttcagccggagagcatacgacacagcaactgactcgtcttctcattctcttctctatgcgccgccgcttctctgtcctaccgtcccttcgtttgacgtgcaacatatcaatggagagcggtgtctccgaaccaacgccagcgttttggcgaccagcacaggtggtgacgaattaagttttctgggaagtgcttcatacacgtccgttcgg

SEQ ID NO: 65182 - DNA, 591 bp, Zea Mays
acagttcccacccttgctggtatgatgacatccgaattgagtaagccaagcttgcagttcgggacccctatcctgatagagggggtccagcaacctgcggggtccggttctagagaatgagcgcttgtttcctgggatggtccagagctgtgtagacgcttagcctggtcccgtaccctaagcctgcacctccaccaccctacaacgggtgccctagtatttggagttgtgatcttgtaggtccggacatgaggcttggctccccagactcaatcctgcaggtcctgttgcatgaatcaaaggatggctgataccagacgatggttcctatgggtgtgctactaacacttcctagccgaagctgtgtacaagtctaggtcccagtcgaggctacctcctgggggccgggtcaccaactctttcttaggtatactggtatccagcctcgacacgtcgagcctacatcccaggggggcaagtaccagggaggagttggtaacgacacacacatcaaggacaaataacatacagataagtgctaacactgctcgataaatagtactcaaaagtatcttacaaagaccaaaaaat

SEQ ID NO: 65183 - DNA, 533 bp, Zea Mays
ttggagggcccagatgtagacgctaagcctaacgatggcgtgaggagttagctgatgaagataaatcccaaacttcttcaaaacatcaacaatcatcccattcaaaggaaatcttaatcctgctttaaagaagcttttgaagactaccacctcatctttttccggcttcggagtaatttcctgtccgccaaaatgaaccagctccttttttgcttcactgaaatagcctaacttcatcagcttagacatatcatcttcggtaatagtggatttcccaaactccaggtggctgggtttagatgacacggcactgtaatcatcttcagattcaatttcctcagcatcaacctgctcagcttcagcggcaggtgcatcctccgatactaccagtcctgaccgtttcattactttagagattggagcagtttcagcagcttcggcttcctctccgtcgcgagtaaccctagctgttgagcgtaccctagccatctgatgattgaatttcttgtcttttgacgaagttgaaatttttt

SEQ ID NO: 65184 - DNA, 604 bp, Zea Mays
tgccctggagaaaggatattattttggtcctccagtcttcactatgtacaggtgagattgtgagcacttctctttccatgagctcgattgagggtgcttttattgtttcaaaaaatacttctaaaggcaaagggagcccatgtactgctgatttagctaataaatttgcatgctcattctctccccttgggatactagagggcacgaatcgtagtgacgacacgaatcacgacgcgatggtcaccggcggcgaggggcaatgtatctgaagatcttcttcagttactgtaccatgggaaccttattcagagcgccttatcgagcatatttgggaatgatttgctccagaatttatgtagcaacttgatccatcctctatatcaaagttgttgagctacaatccatcttcaattttgttatagcatccctagtcaaattcttattcaatcctactcaaacttgatcctaatgttcggccagtgtcactggtgaccatgtttcagtttaaaagctgactaacagcacgacttcagatctaattatctccaaatttctcttggcaccaaggcttacttcctatagcaaagttgttctcctatagttg

SEQ ID NO: 65185 - DNA, 1355 bp, Zea Mays
cagtgtttggctcaactttggagctgtgtggtgcctgttctagatggttttggactgagatctttatagcatgtttgaatatcatatgttaatgaacaagtccttttaagtgagtttggtttgattccacacaaaaagtgaagaaaagactgcccaaaggtggaactattagggtgtgagttctgatacatttttcagatcactgaatatggtctctgtgaattggggtcgactttgaggccttctaacttgtgattattatgtatttaaccctggaaatctatagtaaagttgtaggcctatagttagtgaacaaaattgtttaagtaaggtggacatgtccatgtttggaaattggagaaaagagggggttaagatggtcctgcagtcgactgaacaagttctgggcagtccaaaagatttgagaaaaatatcccagcccactattttttctagctagttctcagcgatatgcaggtaggaatgatctggtgttagaaggggagtaacttggggtaaaattttactgcccaggggaaataaagaaaacaaatttgaagcctatcaagggggtgactcagctgtgttattgtggccctgctgtccaacatgcagtgggggtgtagaaattccccctgtgccttgtcctgcatggtggccatgcagagggagttggggaacatattagtcatgagttagccctgtgtatgttgctgtgaaagcccagaaagctccggtccttggttgcttgccatggatgtttgaagcccaaagactgaaattttaacatgccctgtcggttctatagtttcttcaccataccctgctaatcttctacgcttaggccacctcctcaaccttttccacacctctggttcactatgaaagtttaaaactgaagcaacctctgccagtggttaccacaccagccgattgtcctccccaccgtagctagcttcccctagaaggtaacaagctcgattttttcgtctttcgtaatccctatgtggttgtgaagctcatagcgttgtccttttgaacgctaccgtagtgctccgtccagaacatcgtccaagtcttgtcccgaacgccgccgcggaccatcttcacgtcaaccgaccgaaccaacccctctccgcgccacccaatgtgagatcggtgtactagatcaactactggtacttgtcgcatcttcggattgaacgctaccgtgttaaaactctgacccgacctcgctggagttcgatatgccgccgccaccgtggtcagaggtgcttgggggcactactgcccgattattcatgggcctatagtgtattagccatgggcctatagtgcttgggggcacttcgccg

SEQ ID NO: 65186 - DNA, 527 bp, Zea Mays
gaggaatagtggggtgccatgggttccccgccggcggggaattaagctgaggcggggaccggggagggagggagcaggcagcggggaaatagacggcgactgcaccaacccaagttggaacggaaactattgtgccgatgatgtctgcctctgcccgccccccctgacgatcgatcgccaagggccaagatcctcgtcaatgcttgtctgaaatccttctcgattctacgtgactagtatgcagcgcaactagcttgatttatactactagtataatttatggttatataataaagtggtgttggtaccagtcacatgaaatacgttggacgaactaaggacaaagctacagccagccaccgttgcacctttcatggaataataatagcgctccaatatggccccggtgaactggggcagggaacacaggatcaataaactcagagctggggtactagtatatactaaaaacacatctatacgactatataatccgcgggtttaaactttccaaaatccaaccaacc

SEQ ID NO: 65187 - DNA, 323 bp, Zea Mays
aaagattctggactgcagacacaaaaaccagggagctcggggtcccaatcataaatattaggacttataattccctatagcactccccggacgacaggtttatttcgaaataaggcagggtctctttaataaaatcgcccgcggcgaaggggtatcgatgatcgcggaccgtagatcgcttgatcagtggtcgtgatcagattacgaaccggtataccacgactgccctcagatctcgatccgacgcccgagacctaatgaaggcgtgatctatttcgaaccgtaggatcacgatctaacgactcccttttttaccaaaacga

SEQ ID NO: 65188 - DNA, 449 bp, Zea Mays
cgtgccctgccaattcagacggtctgctctgctgactcggactgtccagatcctaatacgacggacggtccgtggcctgatactcaactctccaaactttgtccactttctgattttgaatttcaaattttgatttgtcgctcatatatggacattttgaccaatccaagggttagtatgcatgcatatacacattatgtatttgaggaatacaaattttcatataaaactatttagatcaaacaagaataaaaaattcatcaaaaatacccaataaatagcctagagagcatatttagaagcgaaatgcaatactacacatgtgtattcaacctcaagccacgtttgagagatctatcacattcatttcacttcttaatgtgcaaaacctcgtttcatctagtggctttgtgaatatatcggtcaattgatcatccgtgccaatcgaa

SEQ ID NO: 65189 - DNA, 949 bp, Zea Mays
gtattgttatggcattttgcaaataagaccctagtgtaggatacttaaccctgaatagggatctgaagggtaaaacaagacccaaatagagaaaaacctaaagtttaagtgaaatagtcataaaatgttcttaagaatggacctacattacatttacacccctgagatatcaaaaatcctaattggaaccctggaaaaccctaaaactaaaccctatggggctaagtgtaaaatcagtgcacttttggactaaggtgcaaaaactagtaaagcaaggtgttttaagttatgtggttcacaattatgaagatttgcaacttgaaccctgagttttggacttaattgcaaaagagccacatttgaactcttttgactaagtctgaatttcagcgtgatgtgctcatctttgtgaccttgtaactttcaaacaaaagggattttgccctaaggcaccacatcaactttgtagctctatgaaaggggaacaattttgcttaagagtgtaagcaaggttgttatggagaaattggagataattaagtttaaagtctagttgtcaggcttttaaagtctgaattttagactgacagtgtaattacagagactttgggcacgaattcgagcttgatttagtaggaatttacccatagctgctataacaaacttgtagctgaatccttggtctacaactttgatacagagccttgggtatgttgtcacaaagaattaggagaaaatctgctctaaacttcgtctatcaggcactctgaagatccttcgccattgtacagtaccaggattggatcagagcaaccgcccatctcaccgctgacgacctccgccgcgattcgtgccgccgccgttgcgatttacgccaccggtgacccgataaggttgccaggtaatagctattcgcctggagatgactccggtgactcaccatcgtacc

SEQ ID NO: 65190 - DNA, 501 bp, Zea Mays
ggatgagaacctgcagcttaccacacattgttctagccttcaatgctacaactggttccgcacaagcacgcccatgatgaaccaccgggatccatgaaatggcttcagcagcccaacatggaaaacatcatgaatcttggctcctagtgagttgtagtatgtaggacacctcaccaatgagctcaagcacttagaaagggccatagaacttaggcccaagcttaccccccgccatgggtagaaatggaagccactggccggtgaagtagacaaagccaaacccactgaccaactgaatacatgacctccttgtggcgcttattaaactggtgcttgtggtactgctgggcctgctccagcctatcacatgtttccactagaaactcatccttatcccaaatctagttatccactgccgggaccttaacctcatttggttcataagaacacagtgtgggagggtccctaccatagaccactttgaaaggggatgtacctaga

SEQ ID NO: 65191 - DNA, 303 bp, Zea Mays
attaagtgacacaaccctaaactttcatatgactactatatagcctgtgttacacatgatcccgaggagatgatcgatgatggcggtggcgcaagtgaggagagggggaagggaagcgaagggaagggatgagggatgattcaaataaagtagttcatagggaagggagatgagttatccaactatctggaccgttgattttgatagtgtgttaagtttgagtacaatatgtttggtgaatttagtggggataatgagtatggggtgatttggttgtttgacttttgcaaagtttaaactgac

SEQ ID NO: 65192 - DNA, 615 bp, Zea Mays
gttgtaaggtacaattacctaaccacctatcttcccaaaaacgtatatcacgaccattattaaccgagaaaactcccctttctagaaacatgtctcttactttcataaggccagtccaaaaatgggagtctcctggttttctgcgaacctgtccaatagatttgttatataggtacttctttctaattactccttgccataagccttcctcattaattaacttaaacaaccatttactaagtaaacacttattctgggtgtcaatgttttttattcccagccctcccatgtccttaggttgacacaggatatcctacttagctagtctatatttctttttttggctatcagcttgccaaaaaaatctagacctcaagtagtccaacttcctgagtatcacccgagggatttcaaagaaagacatcatgaacagaggaagacttgttagaaccgaattaataagaactaagcgtccgccaaccgaaagatgtttacctttccagctgctcagtttcttctcaattctttccaacagtatattccaatcggcgttctttaattttgtaacttgcataggaatacctagatacttgaaagggtaagacccaaccttac

SEQ ID NO: 65193 - DNA, 308 bp, Zea Mays
caagattatccccctagggccacggcggagggacccgcggtcaaggccaaggacgggcgcagcaaccacgcagattttactgcttgttccacggaaaagactgtgcgcacccaacaagggactgcccgaagacgaaggccaccagagacaggatgtctcgggcgcaaccagccgacaacccaagagttgtcgcgcacacatatcaacaactcacaccaccatacaaccatggccacgctcagcacccacccaaccacgcataccaacatcaggaggtacaaatcgtgcctccccacccccacctccgc

SEQ ID NO: 65194 - DNA, 732 bp, Zea Mays
agaaactctgccaataatggttgaccgaggaggctatggccagaagtggcaatgacaagtagtggcttggccataggagtccacgaccagttgtggctagatagaagtggttatggcaactgtagctggctagaagtggccatgtctagcaatggcttggctaggggtggccatggcgagctttggcttgccagcacatgggaaaatgtgccatgctgaccagtgggtgaacttcgttgcagtagcaagagaccaccaaaatacaggagaaggaaggaaggattttgctcttatacaaggaagaaggggaggaagaagggatgtcattgatggcagtggaggggatggggaaaggaacaggaaggagatgaatggaaggggcacatgatgaagaaagggtaggggtgcaaaagaggaaagtgggaagtgcggaatgggatgggcatcggcgaggaagatgaaggagcacatgtgcataaggtacaagaaagggtgctgcaatagtgtacctggccggcttgcattagaggcattcgtgcctggccgagctcatgcctacaatgctggcactgaaccacaccgtagccaactgcatgcccacctatccgcttcttggctggtcgtacccagcccctagctacgcgctcacctacacagggtcgcaccacagcctagcatgccacgcttgcgcccctagcctatgctaaagcacaccaaactgctcacgtcggg

SEQ ID NO: 65195 - DNA, 681 bp, Zea Mays
tttctttccaaaatcttgaacggcccaatgtagcgaggagatagtttacccttaaccttaaatcttttcatgcctctcatcggtgaaactttaaggtatactaagtatcctacttcaaatattgactctcttcttctattgtcagcatagcttttctgtctcgattgtgcatttttcaaattctctctgataatctgtacttgcttttccgcttcttggagaatttctggaccaaatacttgactttctctggtctaattccaataaagcggtgttctacactttcgtgcataaagtgcttcaaatggtgccatttttagacttgcctggtaccaattgttgtacgagatttctgcataaggcaaacttttatcccagcttctaccatgctttagagcgcaagctcttagcatatcttccaacccttggtttgttctttcagtttgcctatctgtttgcagatgataagttgaactgaagtttagcttggtatccatggactcatgtagtcttttccaaaagcgcgaggtaaattgggttcgtcgatccgatatgatcttctttggtactccatgcagacaaacaattcttgacttgtataactctactaactgggctcctcagtaagttgtcttcataggtataaagtgtgccactttagtcaacctgtccactataacc

SEQ ID NO: 65196 - DNA, 456 bp, Zea Mays
gtgaaatggtctagtaagaatctctggtcttactgcagaggtcaggtcaaatctagctgtgatatgtgatttgcataatttggaccaagagcagttattcgagtgaaaaaaaaacaaaatcagcttggagtggaaatgtatcccaatgcactggtctatgccataaatgctaataagtttgttgatttggtaaatgcatatggtgtggttgagtggttctgtgacaatgtacagtgtttacttttaatttccctcaggcgtcatttctatgctttagtttatggatttgatggttatattgctttgatatttgtctgctttaatttccctggttagtcaagattcattgatgatccacctatgttaatgctgatgtgcaggaagtatgcttatttttttacatcttttttttctctgttgctcatattgctgcactttgctgctgaatctatccct

SEQ ID NO: 65197 - DNA, 338 bp, Zea Mays
gccgaagaccgttgatgcggtctttttcgacaggttgcatcttagtttttgcgggggatttttgcggatatattacatggctccgcctcgttaaaaacctcaccccccgggaggaaaagagtgcgggcctgaataatgttgtttggtgaattacaagggcgcgtaggccctgaggacttggacaaaaaatttgcgtagattgtcaatattccaggaatggtctaggtcttcgccggatggcgttgttagcatgtatgcgctgggggacgccttcgacttgacgatgaatggaccttcccactttggctccagcttgccccgtgactctgtccaggtgg

SEQ ID NO: 65198 - DNA, 574 bp, Zea Mays
cttgacttcgccaccctgctgacggtggcccattatacaggcactgagagctcggtttgcctccatcgctgcaatcacagccactagtacatgacacgcgtctgataaaaaaagtacatggcacgatgtgaaactaaactctggacgcatgatgtaaaaccgagtactgagttctagattttatattatatatacgttgatacaaaacgtgtttaaattgtagtattatggtatgttttgcctagtttttgctcctaaataattaagatggacatagtctactctggccagctgggtgtcggtaggttgccagcacgcaaatcttcaaaacttggtattgtgccatgcaataagctaataaatgatcatatatctactttcttaaaggcaatggagtgtttttgcaacagaatacgggtccttcaggtgtaaggaaatcaatttcatactgagaatactctgaaatatggagaaggcattttttgttttttacaaattgaaaatagaacagtgatttagaaaagccaatttcatgccacaattcagaccgattagttggctatatgtggatcag

SEQ ID NO: 65199 - DNA, 638 bp, Zea Mays
gaaagtcgccaagtaacccttgtttatttacatcatccttgtcactaaaggcacaccctggagagcttgaacgctgctgctccagatcggcacatattcatccatcccgagcataaattcggcgtgtccggaaccaacccatgcaactcagaagcagatcaaagcctgctcagagacaagcaggcgaaaaagggaccgaaacctggccgcgccgtagggatttgcttgcagcagctggcacggagcgcacccaatgaaggaagaatgccagaggcaaagggaagggcggaggcacagtaccaatcacagtagtagggcctactactactaggacgtctcacttctccgagaggcccaagaacccctctcaacggcaccatgggacgggacgcgaccaaagcgtacgtacccaaccacctgaaagcgagaacaccattgcccggccccggcatgcttcaaagaataaaagagcggggggggggggcatcacgcatccacgcgaaccctacagcggcgatgcacgccagccctgacgtacgagaagggaagggcagtagcttccatcctttcaccaccaccccttgtggtcacatgccactttgtcctacaacactgacaagacacggaacatctcctcc

SEQ ID NO: 65200 - DNA, 614 bp, Zea Mays
ctcctgtgatgtagaaggcatagggataatctcctgtgatctcgtcgagggggatgagcagcggcggatccattgccgctgacgagtgcgtgaaccgagagccgtcagcctacgatgacgaagggagaagagtggaatgcgtgtcggcgatccgttttgaagaacggtggacagggggctctaccgttgttacagagctgatgacgctcttaaactgctaaaagtggcgaggagagcaaaaatccaaacctgctggcattataataccaggattccaattgcttggttcggggtactaattttccgaagccaaaagatggggaggctattccaaaaaactcgtgagcgaggctgttgagatgctcggcccggtggcggggacagtaggggcaagggtcggggtttggtttagactgtccgcaaccgttctcctaaatttttccccctaaatgttactatgcagacacgtcatcaagatttcatcacctatatttactcgtcccgcaaccgttcccctaaagtttcccctatatatccctctactcattaaatatacatttccatataactaacttaaccaacttcaattttgttttcattttatttatttgcac

SEQ ID NO: 65201 - DNA, 299 bp, Zea Mays
gaaacctaaacaaatcggtcctaaagttccaagcaccttaataaacaaaccttccaagctattaggtgacacagaccacccgattaccacaacttctatagatagataggtgaatccgaccacccctcttctttaactggacactcggtacaatcataataagatgttcatataaaaatttgcaacaatcattttataatttagcaccgaattttctattattaatatcttggtaacaagtttatataaatatcttgagtaccttaaatttcatcgattgacaaaatggctaggcgaaa

SEQ ID NO: 65202 - DNA, 358 bp, Zea Mays
gagggatctaggctactggtaatcttggtcatggcgtcaggtccaggatgtccgagacgacgatgccaagtggtggaggaggtggtggagaccagggcaggaggcggagacgcgccggaggtggacgaccggagcgtgtagagggaccccgagctgtcacagcgggcgaggggagtcctggtggccagatccttcacagagaaaccagaggggtcaaactcaatggaacaagagttgtcagtggtgaaacgacgaacataaaggagattatgagtgatgtggggggctacgagaacgtcgttgaggtagaacggtccagggagaaccgaggcacctactgaggtgacaggcagagtgg

SEQ ID NO: 65203 - DNA, 1703 bp, Zea Mays
cttcggagctcggggtccgaggtctcctgccaactcttcgacctcgggggcctcgtcgcgtgatcttcgtcgtgggtctgcccctacggcgggttctcccaggcctaacgagtgcaggaatgggcgcggatgtcggggctgtgatgattgctccctttcaaattcaaagtcaatctcaaattcaactgttgggcggcattggcctcgtaggttgcagtggcggcccattctgcgtaacgggcccctcaggcctgggcttgggcctggagggatggatttgtcgggctcggttacttcagccttgctctgtcttttttgtaaagccagggggcatttgaaattgttctgcaaacgtaaaaaatcagaatttggtttccctctctcctcgttcccttccttcgaaagtttctgccctttggaagggtctccccgtcccttggacttcgggtcctggttccgctcgtcctcccggtctctgacgggtgggactccaccttcatttgcctccttccgtgaattcgccgaagcggtttccttattaaaaaaatccgaacaggcgccagaaacgtccttggagctcgcgttgggtgtcacttcaacaaaaccccaacctgcttctccaccctttgctctccggcgatcgtctgagaatctgtcaatggcgtaccggctcgtagacccggggccgttcctccctccaggattcagcgccgcggtggtccagcatcgtgggattatggtcaggtcagtttcgcagcgtttgccgccatttcacgaggactgggcgattataaatatccatcctttaccggagcacgaggtcttgttccctgcggttagggatgtggtcagagaataccttgttgagcatcagagggttggtgtccgcgccattcagcgctcacattttggacaagtgttggtgcaattccgtagtgtgctggagcgggataacttggttcttcttggtccccagcagtatttggacgctactttcaccgcggtccgtcacaatgatgcatggaaccaccgtgcccttctcttcaaccatgaatgttggcttatgcttctggggtttcccttggattatcgttcttcagagtatctgcaggccgccattgggtcgtttgggaggttgattctgtgggaggaggaccgaagcaatatatctagaaccctgctccgtgttcgggtcacttcgcttgaggaggttccccaatttattgttttctcggaggccgagggttttgctggagattcctggacggtgcaatgcgaaattatccagcagcttatgcttggcggtcaggctcaggatgaggaccccatccctccgccacctgaggatggtcatcagctccccctggccttcttcgggctgggccaacctttgcccccggctgggcttgaccttaactttcctccggagcctgagggtggagtgttgccggctcagcaggatgacttggggcatggagagtgggatcagtggattgtgaatgagcagcccattcagcaagaccctcaaccccccttgccagatgagcagcacattcagcaggaagagctgcaacacagcaatcagcattctggcttgtcgtctgatagctccattggtgctggtcagcttgcaccccccgcgaatggtcatcctgcagtaaatggtcatgctctgattgggaacggaatggaaatcaatgctg

SEQ ID NO: 65204 - DNA, 1167 bp, Zea Mays
tggctcccattcaccccctttggtcatctcatcggtccttcaattgattttggagctggttaaggatcaatacatcctaatcggttattgattgattgaaggtgacatggaacgaggtgttggcaaacctctattcttcaatgtgacaaattacccatactggaagatttgcatgtctgcgtgtctttagagtatcagctattaggtatgggagattttccttgatgctgctttcgaggttcatggtgctcgaattatgcctatgtagatagagttctgtgatttgaacaacaaagccagaaaagatttgttctcatgtctctcgtttgctgagtttgaacgagttgtacattgggtatgactaacaagatctagtccaccctcgagaaattccatgagaccaatgatcacataaagaccagaccctttgagatgtacatgcgggagtatgagaactttgtccagttggctgtagagatgatcaacatcatgttctctcggttccagttaatagtgaacaagacgcgcgcaaacaaggcacaactgacctatgatgatcatgagagagcactcaagttactatatgctctagatcggagggttgggaggtaaaggtctcagtgatcatcaagtcgcccaattatgagactctcaccatggatgagctgttcagtaagctcaagtccactaagattgaccaccagactcgagccaagattgagaaccttcgtgcatccacaatggccctggtctctggaggtggttcttcttctaatccttcacccgctttgtttgctttatcttttttgttgaccatcatagaggagtaggtggagagccttaaggatgaggagctggtgcttgtggccagcaggttcacgtggtttcacaacaaccgctagaacatgtggtgtggcgagtacaaggatggatgttataactacggtgaccctgaccacttcatcactagtttccccaagaatggtaagccggaggctagacagtgcgaccaccactctggtcgacgcaagggaaagtgcaagtacaccaccaacgagcacaagtccaaggggaggttcgacaaggaggcactcaagaagaagtacctctagaaggccaagttgaaggagtgtgccttcctcgcctcccttagcaaccttgaccacg

SEQ ID NO: 65205 - DNA, 528 bp, Zea Mays
gtaattgcacttatttttacataccctcattgtgcactagcgccttctcacgggaatggagtcataatagctggtgtatgatctattgatctgtgccttgccaattgccatgagtcaatgacgtcgattgcgctgtgctccattcatatccattctgaatttctgatttgattgtccttggagtaaatcttggactgtcttcatgtgtccgaatccaaaatagtcatgtggttcgtctgcctttcagctcatttggaaggttctcagagttgctgatcccaccattggcagttcaagtatcaagaggccattggtgacagaagctgcagcattcatggttatgcgatcgttgccagagaaaccatcgaaggtgaactcacctgatctatcataagtagaggcggacagcagcagaggcacgaggatgaggaggagatactgtagaaagcaaggttgatgcatgttcatcacatcagctagacagacgaggcctgctcttctctgcaatatcgatggatcgagtcgagt

SEQ ID NO: 65206 - DNA, 606 bp, Zea Mays
catttcttgaacatttctaccaacttgttgagatcatcctttagtgctcatctcacaaggccacaagcttctaatccttggagagagacactcccacctagggtcaaggacctcttttaccacatcaaatcatcacccaagcatcacatcagatgtttgttttgaaaatttagcctagtggatgcatcctaggtgtgtcatacatagtgaaatgtcaattcatatgatgtcatgccaaagttttagttctcgtaacaccaggggtgttacatcgttcccccataaaagaatctcgtcccgagatttaaggctccaggataagtaatggaaaaggaaacgcgttacaactttatttcctatcttctcttacagagcatggggtgggtgtgtgggtgtgttctagttttataataaagtacataaaccctaaaaattacaagaggctaagaacttaggaaaatgcttttctaagaaatcttcagactcccatgtagcttcttcttctatgtgttggttccactgtaccttgtaaaacttgagggtcctttttcgagtaactcggtctttctgatccaaaacttggatgggatgttcagaataagttaa

SEQ ID NO: 65207 - DNA, 501 bp, Zea Mays
ccctcgcgacggcgcgttcgtccgtcgcccaccatctcgctcggattcgcttcaaacggcgactaccgccaaaaccgagtatcggatcatcatcctcgaacccaaacgagcctagtccatgctctaattgaactaatctaacccagaattcatctgcccacgacgacggcgaaaaccgaggacaagccgagctgttctcgacgaccaagcgtggttgcgtgcaattgatcgagtttacaagcaacaggaaaccctaaggatgctagaacacgaaccagagaagcatgaaccgacctgtggatggctggccacggcgaggtgtctcacggcggtgcggctgatcgaattgggggaaattagaaattcaggggttgtgggggctaatcgagagcgaggaatggtgcactgcttcgtaacaagctaacgaagcaggcgggggcgtcaatttatagtgaccagaagcggtggctccgaatttgggggggataagcttgcggtcgt

SEQ ID NO: 65208 - DNA, 557 bp, Zea Mays
ggaagcagtatcaaaatggaggcagccaaccaacgtcagtgaagttcgaagcttcctaggaatggcagggtattaccaccgcttcatcaaaggattctccagcatagcaagaccgatgacagaacttctcaagaaagaccataaatttgtgtggaccccaaaatgtgaaggaagtttccaaatcataaaggagaaacttacaacaacacccgttctatcactgccagatattcatcaagattttgtcgtcttctgtgatgcctcgaggcaaggcttagggtgtgtgctaatgcaaaatgagaaggtcattgcttacgcatcacgcctactcaagccgcacgaatagaattaccccacccatgatttggaattggcaaccatagtgcatgccttgaagatatggaggcattacctaatcggaaacaaatgccatattttcaccgatcacaagagtctgaggtatatattcactcaaccagatctcaacctccgttagcgaagatggttagaactgatcaaggattatgacctagagattcactatcaccccgagaagg

SEQ ID NO: 65209 - DNA, 788 bp, Zea Mays
accttcccttccatacgaccacgaccctgttagttctgtatccatgttttgtgtgcactgccaatgatggatgggggcacacgtgagagcatggcgtgctgccgtcaaagcccgagtgctcagcgttctgcgattttgtgaggtatgtactggtatagctaccttctttaggtttaatatggcccctggttatgccagtctagctctttccctttcgcctacacaaacatagaaccgtttcgtctttgaacaactgctgtcgagcacattagctggcttcccagcgtttcacgggacctcctcctcttcccgccaactgcctactttgtcgcagagatatgcctgtggtatctccccttccatacgaacatgtcagtttgacattcctgttgttgtgtgtgctgctgctaatggatgggggcacatgtgagaacatggcgtgttgccgtcgaaaccccattgcccaatgttctgcaatttcccaaagtctgcactaatattatgcgttctttgagttgaatatagcctttgtttaaggcaatccgtctctttccatttcgcatagacaaccgaacgttcattatgtctttgaacagctactatcgaacacatgaacacacttgatcagccatccgcttcggcgccaacacatgcgtcgcgttatgcaattttgttgcgttctcagcaggttcgtcaaaagcggccaggttagtgactgtcaagcttttgatgctgcttgtatctactacaactctatgctcatactaagatgcgtgtgcacgccgttt

SEQ ID NO: 65210 - DNA, 407 bp, Zea Mays
ttatcttgttattatttatgattgttcacactacatttggatgtttccgcttcgcaagaaatccgagacattttccaccatttccaattttcttgcttacattcgcacacaatttggcaccaccgtcaagagcatccaatgtgataacagccgtgaatttgataattctcaggcccgcacattttttctttctcacggtattgcactgcgcatgtcgtgcccatatacttctcaacaaaatggaaaagcagaacgttcccttcgcaccataaacaacattctgcgctccctattatttcaggcgagtctccctccggcctactgggttgaagcgcttcacaccgcaacatatcttgtgaaccgactccccactaaaaccctcgccttctccacaccatacacctctc

SEQ ID NO: 65211 - DNA, 441 bp, Zea Mays
atatagcagtatgagattacaatattctaactaccaaatatactctaacaacgaaactagctatcagtatagagagatctaaatgtccacctgttattatgtcatcaaaaggtgctagaaaaggtagcacgacctgttgtcttgaagcaatgaagcatatcatatgaaagctagctaaattttattttcttgaacgacgcaggagaagaatgaccacccaaacctacctagaaattacatgagaccaagatatgctggacaatatcattagcttggtcacaaagagggcaaacagtagggtgtggcaagccacgcttcgcaagatgttcttttgtccagcatctatctattattctctgcaagagcttttccaaatctgcttccatggtgcaaatctagtaccgatgaaaaagcatcatgcgaacgctcttgcagtgcgat

SEQ ID NO: 65212 - DNA, 376 bp, Zea Mays
gccgtggtgtgctctgcgccgccggtgggtcagccgatggggagaagaagctgggtgggccgttggatcggcaatggatgggcgaggggtcgcggaccggtgatccatccgtgaacggtcgagattaaaacgtcgacaccgtttcgagttgatcgcttccacaccattgatcttcacgtctagggtcgggatcgagtccatgttactttgaatcgccaccctcggttccggatctatgggttcatataagcatactacggtgatctaatcggggtcgttcaattctggtcgggtggctgataataaaccatagctcttcagcgtggtaatcttgctaaagagaccctgccttatttcaaaaacaacctgccatcct

SEQ ID NO: 65213 - DNA, 285 bp, Zea Mays
cttttgagcttggggatggagtgtatgtgaagggatgaggctcctagagcgacaagggggacataagtagcctttctaccatatcctcatatcaggatacgaagcaggtgattgttggggacatagagaataaacaatttgaggtcttaatgtcccatgggatattttaaagtttggcaatgctgagaaaaattaggcagtgtcggggtgcagtagtgccgcacatatacgcgactgtgtcgcgtagactagaaaacctagtattatttaggattttggcacttg

SEQ ID NO: 65214 - DNA, 285 bp, Zea Mays
gtccaaacgacatgaccaaaaagtcatataatccatatctcgtagtgaaggctgtcttgggtacatcttctgctcaaatttttaactgatgatatcccgaccttagatctatcttcaagaatatcttagctcccttcatctgatcaaataaatcttcaatccgaggtaatgggtatttattcttaatggttacttcattcaaacttctataatcaacacacattctcctcgaaccatctttcttgctcacaaatagaactggggctccccaaggggatgaacttg

SEQ ID NO: 65215 - DNA, 383 bp, Zea Mays
gtgatccccgaattggtgctcaggcgcgtaatacgcgaatatgataggtgctacgtgaccctacggacgtggcaatgacgactaaggactcaccggaggtagggacgtcgactagagggttgtccacggagagagttgcacagcggcgctgaacgcaagacgacgcccaattaccccggcccaaagccatgctagtcgaattgggggaagccatagtttccacatgaccaagcaacccctgcggccaccctctcaggagtaaatctgcgttgccggctcggaattgccggggcggcatcacattctcttctttcatgaggcactcaggcaatctcatttgtcatcgtgtctggttggataggagagattggcctcgagtttta

SEQ ID NO: 65216 - DNA, 474 bp, Zea Mays
gatcgatacttgtccaaaaaaagtaatcgtcaaagaactttttgccaataaaatgtttgtcgagtattttttgcgagtgtaacactcaacaaaggcttaccgagtgtaatatggcttttgtcgagtgtgtccgagacactcggtaaagagcttctatgtgaaaggtagaaagatttgggtgttgtggataatgagtctaatgtgcttgatcctaggaatcctacgcaaagataagagccattgcaattcaatgaccaagcaattgacatgctatatgaggtgcatacgtcaaggtatttgagagcaccaacgactttactatgcttaccaggtttgatcaacgctagaagaatcttatgtgggcacttcaacggtaaatagtgccaagttgttcatctacgaaggcaagtatgtcaagttcataatgaaggatggtgggagtgtgccagtaggctcaatacagattccagcgag

SEQ ID NO: 65217 - DNA, 590 bp, Zea Mays
gcgaggcggagagattgcgcccgtgggctgaatcctacttcgggcgaagcagagagaatgcgcccgagggcaagtctgctctgcttgtcgtattaggcgtcccatcggagggtggcagtgtagacgtaatcatgctgttgcgccagacgtgatcgccatcttgtcagtcactgtgctatgctgccacagcgtgggttggcatgagcattaaatgtgcatgtttccttcctgttttcgggtgcccctgtcttttctgcctgaggctggctcgggtgagacggacggtgcgacggcgaccttaggcgaggcggagtcctgcccgaggtgcgagactcttggggatatatctcggtttttataggtagctcggctgtcacccctcgagagtttcgcccttatctctctgagtgcatttgttatggggataattcaggtcctaattattaccaccgacacattataaataaaccttcatttctttcttcatgattcacctttaccttagtacgtactggcgacatgacaacagaggcaaagttaagaagagataaattgttttcaccgacaatagtgacgaggggacaaattgg

SEQ ID NO: 65218 - DNA, 686 bp, Zea Mays
tccagggataatttatacatatgtgtggagtataattatttttggcatgatgtcgactttagcacttgtttctgatttagtatcaacaacacgagtcgaggaatattattcttctgtgatggtaaagaagctagggaatactgcagtaacatgggggttcttaccttgcaatagacctttctgatgggctacaacgacgtatataatcgtgcaacatgatctgacttaagggtatgcccttaagactgtgtatgaccgaatgacgcgatattcctcaagggtatgcccttgaggtctttggaaccagttccttagagagaggtgcttgatggcgagttttcttgccgatggagatggagcctggtgaagcagtaatttctcgatgtagaatttcaatagcctactcacactcctcacgcgaggtgacctcacggcagcctcaaagcagtaacttttgcgatgtgtatgatggcacttttgcgttgagcagcaagcgcggcagcctgacagcgtcctttctttttgtccaatcccccgaactcagcgatgtggccttgtatttataggccgaaggagcttagtggtacgctagcgtcgcatcgcatgggagaaagaacgtgcgttcgtgcctggtgagtcagcgaaagtggaggacgtgcgtcgtgcgcgcatgggagcgagcgcgt

SEQ ID NO: 65219 - DNA, 632 bp, Zea Mays
tttatatctatattcaaatatataaaatacatacatcaactattgttgtctaaaccctagaataaccttaaatgagtcatttaagtaaaaaggaagacattggtaagaagaccataaaaaaacatggaatcatgacttaggtcaattataaaaattgaaatacactaattaagctacaatatctattagaaaagtttggccaaaataattaattaaaatccccaaaaaggcgtggagctctctagatttctgaatttcagccctcacctagaacttgagcacgttcaccttgatccctagctcaaatccttaagcccccattgacaaagttgtgctaaattaacccatctgcaacgtgtgtgaagatggcatcgagattcgtgtcatagacacgtcaaatctggaaattcatctcgggtttcagcagtgagacaaaccaaacttcatcactccatatctttggctccagtcaacaaaacccacaaacctccacacataaacgacaaaggaatgtcaggtgaagagatctctcaacgggatcatggccataatcgcaaagatttggagccaatccgcacttgaacttgaccactctctgcgctgcctcgtgctcgacgctgtgcccaggcgcc

SEQ ID NO: 65220 - DNA, 424 bp, Zea Mays
gttaaaaagtgtacgatctgcagactgcaggggggcacggagcaacagctggtcctggtcgattcgagagtgacagacagcaagcaggtgagccggcgggtgtgcgtgtgcccatgtcatcatctgccagtgcaaggagccgggctgcaatggacgcgggcggagtcggcgtcttatttggctattcaccccctcagcgacatccatagttaacatgctcgggtaaaggaaactttcactaattcttgctacaaccatagttaacataaataagataactgaacaatcctagagaaaccatgtagaggaagatgagaaggtattgccacagaaggcatccatggccaagggagacaggtcccatggaactatctccatggctttctatcccacgcattaccgtgggcctccatgcccgggtcga

SEQ ID NO: 65221 - DNA, 782 bp, Zea Mays
ggccctcgccgtacgagccatctgcaacacgggcctttatcatgaatgtgaagcgggttgtgaagtcagctaactcaccagtgctgctatcccagagggtcaccggatctgccaagactgctcggcccacactgtgagcgatctgcccgtccagctcttccttggtaagcctgaccgccttgttgtagaaggcatcctcctgtaactggatcgtggctgctccgttgctgtttgactcagtgaagttcagcttgaaggacagagaactgacaccggtgatattgcaaaacacgattaagtggaggagagccaaaaaccaagtagttgtgctccttgatctcatggttggtggtgagaaaactggagagagagagggagaagggaggaaggagaggcaaggagctgaaaaggattttcctatgcttgcttatgtaaatagtaactatgaactctcaacttggtcagttgtcctttactgcacagttcacacacaggcgcttcttgttattttgtctatcagttaggcgcacggccggcctgtcaatagggcatgggccttgaaaggacagatgtaggcgacacgagaagtagctcagatttggagtttatgttgattgtatcagaggtcgatgtaaaataatgggatgatgttgaactatggattagaattttcccgtaggacggaggatgctgaagatgctgtgtttgtatcgccggcattgccggcctagaggatacacaaaaaaacagattgtaacatgcaagaaggtcagggatagtcc

SEQ ID NO: 65222 - DNA, 340 bp, Zea Mays
gagagtgatatgatttgtttctatattaacctgggctcagtctataagagaccgggggtagtttgtactagggattatcaaaagaagaaaatctcctagtcctaggaggttgcctggggcgcactagaggaactctccagcgtccggaacgccaccaggaatcctcctcccccttctcactcctatttcctgcgttcttgtccacaacctcctgctgagcccccaacgaaagcagggagtctgcatcatttagtatcagagacagccagcgtcatgacttccgagtccggcactggacagaatcctaatgggcgtggactcgctgactccctacgccaaa

SEQ ID NO: 65223 - DNA, 833 bp, Zea Mays
cataggtccggttgccgatactgaagatgccgcccaggaggccgtacaagatgttgtggaacaagtggccaaacgtttctagtgggatcattcggatgatgagtaggcagatctgtagagagaatgcaagggtcctgctgggaagcggcttgtaatattttttggttctgtaagatactcttaagtactatttatctaccaatgacaaaacttatctgtatgttatttgtctttgttgtgtgcgccgttaccaactctctggtacttggcccccctgggatgcaggctcgacgtgtcgaggctggatgctagcgtacctagaagagaattggtgacccggcccccctgggatgcaggctcgacgtgtcgaggctgggtgccagtatacttaagaaagaattggtgacctggccccccaggaggtagtcacgactgggacccggacctgcacatagccttggttagaaagtgttaatagagcacccgtaagacccgctaactggtatcgtttatcctttgattcacactgcaggacctgcaggactttgactgggaagccaatccgtgtgtccaggccccttggaccacagctccaaatactagggcacccgtcgcagagtggtggagtgtgtagtcttagggtacaggaccaggctaagcggctacacaactccggaccactccaggagacaagtgtccattctttggaaccagaccctaggttgctggacccactggactatagtcccaaatactagggtacctgccgcagagtggtggagcgtgcaggctcagggtgcgaaaccaagctataggtgtacattcgggctgcc

SEQ ID NO: 65224 - DNA, 359 bp, Zea Mays
gagtgggataattttgctcgtgaggcctgagtgacctggatgcgtaggcaatgaccccattgtcttgcatcaaaacacaacccagtccagtgccagaggcatcacaatacacatcaaatggcttgtcgttgtcgggttgcgttaacaccggtgctgtggttagatgctgcctcaaggtgtgaaaagcatcttcgcacttctgaccccaaacaaacttggctcctttcttcaacaattcattcatcggcttcacaattcgagagaaatccagaatgaatctccgataataaccggccaatcctagaaaacttcgaatctgacggacaattgttggcagcttccagttcatcacctcttgc

SEQ ID NO: 65225 - DNA, 810 bp, Zea Mays
atggagctcggccgttgtaacggccatgccttttttccccttccgaactggattctgcaccgatattaaacccaagcgcatcgctcccctggccataaaagcttcgttcctcgtgccacaaaagaaacgggcgggctagagtcctcatcgtcaatcgtgtcgccgctgttgatccgtgcctacaggctcgcggtgcacctaggttgcagccccaaggaatatcctacgcatgtggactctcgccataacgtcagtatacgataaacacccgtggcgctgctgcaactcctcaccgaagttatggctccgccgtggattgtacgtctccgtggatagaaatcctcggcgcatcaatcgtcggtaggtatgtgcctccttgcttcgcttttgtatccgcaacattttgaaccattcttcgtcgagttttggtcaccagtgcgtcgggcggtgtcgctccggtgaactccatgggcggatcccggccacgccgccatgcccataaggcgggggagggagatgaagttcatgccgttggtttcttatccaacagtggtgattagatagggagataaccttttgatggattggatccgggccatcaatccagatcggacggatgaaaatcgatcgcgtgactttaaaacctggacattgatctgtgatcctatggctgtcgttgcgtaccgattcacggggcttcgatctaatccggatcgtcgattgtggatcggacggataggaataacctataccccttcggcctcgcgacttttgcgaaagaacccccaaggtatttacaattcaacccgc

SEQ ID NO: 65226 - DNA, 413 bp, Zea Mays
gcaaattgttttcaaccaagttattttattcattacatcatcacattacaagcataagactactctaggtggaactacacgagagcgttccccgaggtactaccgaactccttctctaaggtgtccccaaattccttgagaagctcatcaaggcttgctagggatatatcctcgtcgtcggaccaatcatctattctggggggaggtagggctagaggggttttcttcttcttctctgtttggcatcctcggttggtggtcttcttctggattttctttttgggggcgagcttcttcagcttcttgtcatagtccatcttcaaggtttgataggcctcacggatgttggcttcctcgccttctactacgtcgagactctcctggagggatgccttctcttgcttaagctcttt

SEQ ID NO: 65227 - DNA, 358 bp, Zea Mays
acattactcataaatttgttgtattaatctcttgctatttttcatgtgtttttgtcgtttttaggctatacccgaagctaaggtggcagctatagttgagaaactcccttctatggaagccgaagagatgaagatcagagaagctaatgtattgatagcacaaaaaagttattcctttagagctgctcctagagaccgaagaagaggaagaggaggagcaaaaagctccaataatgagctcgttcttcgatattgatggagatgagtgtgagtaaaaggatactgctagtacaatattagcatcgaagagtgttacatcacttgctgcaatgtgattataccaagtagtctggggctt

SEQ ID NO: 65228 - DNA, 651 bp, Zea Mays
ccgagggtgccccacgaagacagaagagatcattagataagaatatgaataccggcacaaaacgggacgtagggcattatctaatctcaaaagtataaacttgtataaatcttagtgtcttttgtgcctttagctttagatttagcttttgattacgtgacctaccccataaaatcactatcgaatcagattttatagttggtgcgctaggtaggggtagccacactaatcaacaaagagttgatggcaaccatatgtttcacattagaaggagaaatcatcttcaacacccagagatctatcgatggcttgctctagtggctttggcatcatatgaccaaaatcccgaggatacaatattcatcttggcaaatctaggtcaatttgatatcatgatatctactcgaactcgaattggacttcaatcatggttcgaacttgtacatgagtctaagttggactatgactccaaccctaacttggattcgggcccagactcgaacctatagaatccatttaaagattgcttcgagatcatggttgcttcgacgataagattgcttcgaatggttcgcgaccttagcatggacgatccgctcctcgcacaacggtctaatttgatagcccgacggctatgactaataatctaac

SEQ ID NO: 65229 - DNA, 582 bp, Zea Mays
aaggcgcggaattataggaaatagtttccacatgcaaacgtgattactatgatacgtgggcgcgtaatttatggatcttgcatgggaagtaatgcgcggcaggtaaaaaaaatgtagcataagatgttgaaagctatggcataaattcgcaacgacataatagttgcataaatagtctataccgtttggcgtaaaatgttgagtcattgtgcgtaaatagtttattatggatattagttttacattgacatcaccataatatcgggacggtttcggaaataatggggagaccctgtaaacgtggatacagttacttgtatagtatccgtgatttcctttcattcgaaaaaagaccactaagcctgcataactaattggagttggagatggccggctcgggagattcgccggcgatggaaggagatggcgttcgtcttgatctagagacagagggaggagttgatggtaactcactggtcacaccacctcctgctctactgggtcctgtgatcgccgagatgagcatgggaagaaggagaacacagggttcgacctcctatgtccaatattagctccagggag

SEQ ID NO: 65230 - DNA, 358 bp, Zea Mays
gttgtcatggcgtcatctttagccttcgaatatgctccaagcaattcatcactagttgcctctatggcatctagccagtcgtcattcggttcatcaaattggctcctgtacctgaaggtatatttcaggtagactaaaccaccttggctagagccagcagcagtctccttcagcatttcccacccatctgcaagtggccacactctataagcaatgtgctcctgcaccaagtcccttgtgcctatgtaagtatacaccgtattgaaagtcgcctggcatgtttctatatcattcccaaggacagtggctggcctcctaatgccgaagcgagaccatataggacattgaacgatccctt

SEQ ID NO: 65231 - DNA, 512 bp, Zea Mays
caaagtctaaataaagttttcatgacataaagaagaaactcacaaccgcaccagtactgacattgccagatatccaccaaatctttgttatcttttgtgatgcttcaaggcaaggtttgggatgtgtgctaatgcagaatgagaaaatcattgcttatgcctctcgcctactcaagccacatgaacaaaattatccaaccacaatttggaattagcacccatagtacatgctctcaagatatggagacattacttgattgggaacaaatgccacatattcacagatcataaaagtctaaagtatatttttacccagccggatctcaacctccatcagcgaagatggctagagctaattaaggactatgacatcgaaatccactaccacccgggaaatgcaaacatagtggctgacgccctcaaccggaagcctttcgggaaagaagcaacaaagttcctggaaaactggaaaagggagtctgctcaactgaaagcttgtttggggaaaagag

SEQ ID NO: 65232 - DNA, 308 bp, Zea Mays
gtctgactgccgaagccgtggtcactgactttgtcttcaagaacattcaaccactgaaagacagggcctatccagcatatctgtatagagggctagccgactcgactcgggttaccaataggagaattccttctgtagatttggtaagccgacttgtgatgatcctcaaaggtaaggtttcaaatgttggtgctccagtggcctactcggcctggaacctacctcctcccaaagcttacaccctttttgtgtcgaatccgcctgtgactgacagcaatttgggccttagagtgcgaccctctgctgaa

SEQ ID NO: 65233 - DNA, 448 bp, Zea Mays
tgggagtctgcctccatcatcaaggttgtgatgacaacatgggttctagctgagatatataactacatattttcctagatctaggagcgaccagcattgaaggactcaccagatatattttgtgttcatcaaaagcatcctcagctttagcagtccaaacaaattggtactatttctttaatagcttgaagaaagacaacaccgaatgccgagtcgagatatgaatctgcttagtgacaccatgcaactagtcaacctctagacatcctagagtcgactcaacggacccttccttagactttcttcaggttggcttcaattccacggtgtgaaacaagatatcacaataatttcccagatgttacgccgaaggagcatttctctcaattaatcttgatgttgaaatttttaggctcatgaaggtctctaccagaccagagatcaaatc

SEQ ID NO: 65234 - DNA, 612 bp, Zea Mays
agaaaagcggccgcgcgcgcgagcccgcgccgactttgcgaatagacccccagcgttttggataacccgaactgggtgccctgcactatttctgtgagtcgctgacagtttacaaggacctcccccaagttctattcttcgcaggccgaggtccatgacggtggacagcgcatggccacgctcctgcgagcgtacaccggccaatttactcaatgaccggcgccctatttcggcagaaaccgaattcaagacctaaggatcgcttcccctcacttaatttcacaaacggtgatctaaccggctctgtccacggtgacagcgggcatcgcggatattcacacgcgttcccggcgatcctagggattctatcccaattgggctggtcggggagtatcaggggcacacaagaatgtggaaacaagatagcagggagcatgaacagacctagaggtcgctgaccatggtgaggtcaatctgagcggtgttcttgagtgagttgggggaaatgagaaattggagctctctggtgaacaattggaggcgagacttggtggcttggtgcatgattatcctacgaacccgacggtgcactcaatttatagagtccacgag

SEQ ID NO: 65235 - DNA, 518 bp, Zea Mays
gttccaaacctcttgagctaattattagtccgctaataagttattagccgggttcatgcagctaacaactaatagctatttgtgaggtataactaacaattagttggtccattagctagccatttctaaacctctaagcgcgcccgcagagtggagtgaagagcgctgcctctagctctgactcgagtgaatgcgtatttcctctcccaacataatcgatttgtttttttttttccttgctgatcgagtgagatcaggccttgaattattgcgagatttgcctggtactcctactttacttcacggtacactagtagcagtaactacttaacactagtgtactgttcgtcagttccaatcccgatcgactctcactcactcacagaggatgcacctgaagcgtgtcgcgtcacgcgcttttcactgggcatgcccatgccgtttcgcggtacgaccacctcgtgatttttgccgaccagtttcgaattggcaattttttcttcttccttgtaagaaaa

SEQ ID NO: 65236 - DNA, 769 bp, Zea Mays
atttggccttataaggttaatcccttcttactgttgccatcaatgggtccatcgaatgcagtagccacatatggacctaagaaaatatgaactttaaaatattgtgcacctaaaaatatgtggacttcaaaataatatatgtgtacttaccaatttttgatcctccatcttctctagtctcttcgtcattggaattaaggagcattggagtaagtggactcatttgaagcagcatcatggtcattgcttaagggcactgtcgtgcctgccggaggatgagcaccatatggaggagcaccatgtagggaggagcaccgaacaagagaggaaatggaagaggagcaccatatcaatatccatatgggtatggataagtaaatagtggtgggacaacgtcgatggtaggagctttagtgagagaaggatcattggtggtaggatcatcgttaggaggagcatccatggaaggtcgatcggtaggaatacaaaggaggagaaaatgagtatagaaacataggttgtagagtgatggaacggagacaggcagaaacatcctcttgatgatgtactagagaaagtccatcgatgaagaccttcccctacaatagcaggggtgtcaaaaaagttgtgaagattggtcgttgatcaagtcggtgaaagtttgaatgttcagacttcacttgtgatccacattaaaaagagagtgggaggctacaatatgacagaagacgagtgaaatggaaagtgagaggtgtgaataagctcaaac

SEQ ID NO: 65237 - DNA, 564 bp, Zea Mays
ttgcagtgatcggacacagtagacaggatgggcggcagtgacgacgcgaccacagggcggggggtggttgtgctgcattgataacatcatcttcaacctcggacgactctgcgaggcgggcaacggcgcgcaccgcagaggccagagagtggtgcggaatgagcacagatgacgcaagaacaagaggaccccgagtcacaattacattcgcaatattttgactggcgactgagaccctgaacacccaaggacgcaagcacacgacgcggaggcgatccggatgcaccgagaggaggtagtttgcggcgttgctgacggagtggatgttgtagtgggggagaagggaagatggagttaaccagagatgagccgacatttggtggcaaaccgaacctggggtagcggtggaatgatagttggcgaggagccatccctgcatgcgggcacctggacggaggagcgtccctgaaacaagcggcaaagctccggcgcgcgaagctccagtgggcggcagaacgcgtggcgtgaggcctgggtgggtggtgcgggcggtggtgggtggac

SEQ ID NO: 65238 - DNA, 964 bp, Zea Mays
agtaccaaggtaaaattgatagatgacaaaggtaatggggataacaaacaaaaatacatcaaaggatggaattaagacacaacttgcaaggcaacaaagaaggaaaacaatcaaggacgagataggtgaagcaccactctctagctgagatggaaaagatgaggctttaaagggtaggttcaaagtaggcactaaggtaaaaatataaatattacaaggggtaaaggcgataacatacaagggtgtaagagaaggggcgaaggtgcagaagaaccaagggtatcagtacaataaagaatggagctaaggtaagactagcacgtggcaaagatgaggttacaaccaaaggcgggataagtaaaacaccactctcggactgagatggatgattggaggttttatataacagacatagtgtaatcaccaaggtaagatcgagagatgagaaaggtaaagaccacagtaaacaaaagcacaaccaaggatggagtttagaaaaaaaactcacaagcggcaaagaagaggatacgaaggaaaaaataggtaaagtacaactcttagattgagatagaagagaggagattttaaagggtaggtataagataagcatcaaggtaagatatagatgtgacaagggtaaagatgataataacgaaatgcataatcaaggatagagttaaggcaagactcatgaagtgactaagtggagaaaacaatcaatggtaagataggtaaggtcccaatagaagggttgaagtaaaaattcattaccgggggaagttataaggaaacaacgagatcaccaaggatgtgtgaaataaaatgatcactcatggatcttcaagaaacaagggtggtcaagggcatgttaactaaaatgttttaaacagacattgggttctaaagtaagcatttatataaaaataagagtatgcaagattccaaggatacgagcataccaaga

SEQ ID NO: 65239 - DNA, 424 bp, Zea Mays
gagttttcactcaaggctacactaataaacccatcatcacatgtgatttaaattgggcaaaggactccaaacttggaaatcaagaccctaagtaagtgcaacccatattaaatgtcatggcttggcttatcatgcacatatagtggggagaattgcccaaaccctaatgcaaacccctttggacaattggagcactataagtgagtatgaccaaaaggctataaaaaccacatgatcatgacttgggccaattataacaattgtagtacacctaataccctactaaaatagtaagaatgtgaccccaaaaaggtttcagaataaccctaaaagggtcaccaaagggagaaacctaagagaaaaatcagatttcttctaagtccaaaaccaacccttttccaaagatcaaacatgttcaccctct

SEQ ID NO: 65240 - DNA, 387 bp, Zea Mays
tcagtgtaattccaagcaaaacaatctgaatattccttcaatagaccgatcatctcatttctaggatcgatctccagggtcttgtctacaaaagtcggccttggagtgttaccatctcctatgtcaatctcctccaaaggatcggccgatgtaaatccctgtcctagtttatcaagatctctgaattcctctatcatgtcccctacagaggaatcagatggtctttgtgtgatggcggactttccggtctcggggaccggatcatccgtaatactatcttttcgctgcggtagatgttcgatcttaaagtccgaactgttttgggaaagaccagaccatccggctttgggagccgaactgtccgtgaccaaagactcataaactttg

SEQ ID NO: 65241 - DNA, 502 bp, Zea Mays
aaattttcatgagcaatactaagttcctcatggctcaattttagctcctcatgtgaacaagtaataacataaagtagatgtttttgttgttcacatgaatactttagaaatgagttttcactttccaaatttcttgttttatccttatcattttctaaatcaatgttcatgctagcaagtctatcaacaagctcatcatatgaatatgaatgattagtcacgttagcattatatacctttgtattaccttgtgacatgaagcaatgtggtgtaatggatgggcttgtagtagcgatatcatcgtccaagcatgaacaatcaccataatcgagtatgcttgagatagaacaatcatttgcatcacttgagtttaagccaacacaatcatgattattaagtgaaattgtggtatgtcattcatcattatcacttgaccatgaggtggagcaatcttccacaaccaccgtgttaaggatgtgctccacatcctcgctagagatcc

SEQ ID NO: 65242 - DNA, 483 bp, Zea Mays
aacatcgagagcatcctctcggataactgctgatgagctgctgcctggcgggtctgctcggctgccaagtgagcctgctgctgagtgagtgtctgaagaatcgaagcaagtgcggggttaatagcaggaggggcaacaggggtagcactagaactcccagcctcatgagcatgtgagcgtggaggcataggaggcggaggcggaggtggaatcccaaaatcatcatcatcatcaacaacaacaactgctgcatcctgagcttcgaactgatgaagagcagcatcctcagcctgagtgtcgaaaacaggagcagaagctgacactggatcctcaggcgctggacggtaggatccaaaaacaaggcgcgaggcctcaagtgtgccctggaactgtggaggctgaatcagctgagcaaaaatgtggcacaagtagtgagcatatggcagctgacgatgagcacgcataccatccaatatggtgtcc

SEQ ID NO: 65243 - DNA, 868 bp, Zea Mays
cggcgccccaagctttctagagaaaccatgctatacaacacgaagatgccaactatcacgaaggagctagtcttaccacctattgcgtaggcacgacatctggccatgacacagcgtggatctgccatacccgcccaactccggcgaccaatttctcacactccggtaaccaatcgcgctaggagacgccacgaattccttcctagggaccaggcgaagtttcctaacccgacaccgacaccacgacaatggtttatacgcgtatcaacaatggcggcttcggttctctcccggtgactctttgttctattcctctcaatgatggtggcatctggattccaattatggtcaagggggcatggggcacaaattaaataccttggaaccagggaggggagccccgaatcacaacaactcaaggattgtgatttcgttcggatttgttatagcgctagatgagagaagcttctatatgcccgggtccacatggcagtgatagtaaaggaaacagatgcatggaatgaggggctgcgctgcgggacctggatgtcagtgtgcgctgcaagatgaggtgggctaaagagtggtggagttgggccgagagaggaggaagatgttcctttttctttttttttctttcttttctatttcttcttttcaattataattcaaatctagttttcaaattccaactaaaatttatgtcaaatgcccaatcaaagaagatcgagcataaaatggaaatatctttctacatatttctattaactactctattcctttatttaggcaaatgtttcaaatatgcaacacacattatttgttttgatattatttctacatatttctattaaagatacattttaat

SEQ ID NO: 65244 - DNA, 440 bp, Zea Mays
cggttctgaagaagagcactgatgccgagaaacacggaaggggcgcgacaccgactacgagctgaagctttggtaaacagatgcatttctttctctacactttggatttttcgtagtctcgaaaatgcattttataagcatcggaaaatatgtcttgtgtcgtcgaggctgataatcatcgtccagtttaacagttctaagttctaaccaaatttgacactgctaaccatgcttgtcacgatgtaccttgatatatggtccagtttatcagttcatatattgccatctaaagaagaaacaataagcatccagtttctagaagctttctgtattcttcgatcttcgttattgtgccggcccatccaaaggcccaaaagctatatacttagtcggagctgcccagattgcttcttgtattcggcccatagcttgccagtaaa

SEQ ID NO: 65245 - DNA, 743 bp, Zea Mays
cgctgatcttcttggccattggggtgaaggaagaagacagggagaagacaaagagctctttcttgcagaaggcgaggacgacatgtaaatcaagaagattgaagcgacaaggtaacggtccgaagcgtctatcttgggcgaatttataaagacgggcgaagtcaccaaggtgtgaatcgtcacgatcggacgacggtcgtttcgaatcccacacgcacgcacgccgcaaacggtcggctgacggactggacgtcccgttgcattaaattatcgtgcccctccaagaaaaaacgcgccaagcgtcgttccacattccgcctcaaaaggtatgtcctctgccctctgcctctcttccctttaccccctcaacagttaactggaagaaggcgtcttctacctcgggcaactcacctcgagaagtaaaaaggcaagaaagaatattgttcagaggttcgaaggtcaggccctcggtagggctcagaaaaaccgccttaggacaccagggctccgagcccgttactgatcaggggtttgaaggttggcccctcggaagggctccataactgccccagagcacaaagttagggatgattgtaggtaccccgtgcatggccctagcttgggttgcgacccgagataccttaagacatattcgagacccccgagagcgattcgtgatggtgtcccatcgtagggaggtatcgagccctcgaaccccatcaaacggggtcgggaccaggcga

SEQ ID NO: 65246 - DNA, 563 bp, Zea Mays
gaatatcttgaagttccgttgattgtgatcatagctatgttcttgcctttcaattggtagtatcttggtttaggtaatttatgccttaaaatgttgtttctcttgtgcatctatgaaaccttcttaatcatgacatgcttagatatttcgctttatatacatgattgtgttgatcttcaattggtatatgcaatgatagttaaatatgaagcatgtacaggttgagtaaatgttagacttccgtgagtattcaattggattaagtatcactgaggcgtgcattgctgtatttagtcaacctttcatttagccttgaaatggtgttaagtggcgtttcctttggtatgcaaattggcatctttgggtgatgaaagtggtagagtatgccttgaccaaggtatgttgtgatcccctctagttctaaggaagctagattgtgcaaagtgcaagtcattcaaatacttgatgcacaacttgagggggagcacacataacttgtgtcttttgagactaactgtttcttgagcaatcttgtatagtctctaggtggaaaagagaagata

SEQ ID NO: 65247 - DNA, 804 bp, Zea Mays
cagtgaccgcgtggcggccggaataatcacccctctaccgcggcgatcttatcctgcttcaagaatatcgtcgcgaggagatgcccgtcgatagctcagcctgaccccagcccaaatcatggcgcagatcggtcatcggcggtgaggttcactgaacctgatccgatcgactattgtaccatgagagtcatcttcagagtgcctgacagatgatgtttagggtagattatctctaaattttctattgcaatattatcacccttctgcaccaaagttgtagttctatcaattatctccatctttgtcatagcattcctagtcgaattcccactggttttagctcatatccgatctcaagttcggccaataccactggtggccatatttcagtcaacaaaccgactgacagcccaacttggcgcctattttgctcttaactttgcataacaacaatgcttactccctttagcaaagttgttctcctttgatagatatacaatattgatgtggtgacctagggtaaaatcccttgtgtttggaagttacaaggccccaaagatgaacccattacactgaaattcagacttaaccaaaagagttcaagtgtggctcttttgcaaataagtccaaatctcaaggtttgtgttgccaatcttcataattgtggaccatatgacttaagatgctttaacttcatagtttttgcactttagtccaaaagtgcactaatttttcatttagccccctagggtttaactttagggttttccaaggttctatttaaggtttcttgcactcgtaggg

SEQ ID NO: 65248 - DNA, 413 bp, Zea Mays
ggaaaacgaaattctcaggctatggtggctaatcggagttgaggagcagtgctctgtgttcgtaacaaactaacggaacaggccgaggcatcaatttatagaggacgaccgcgagtaggacgaattttaatggagaagcactcacggtgataaggaaatgagtcaccggagtgctaatgttgcatgcactggttaacggtctacgacgattactgcctagtattcacggcctgcgacgacgtggtgaagcgacttatggcgtgtcgtaaccgagataaatggcggcacgatggcggcagtcgcgcagccaagttgtcggtgcaagtgggtacgacgacagggcaatacagtgccctaagttcatccttgcacgagatcttttcaccgtcagtcattatccgcatactagagtg

SEQ ID NO: 65249 - DNA, 814 bp, Zea Mays
acccatacctctacggttagtacgtagtcgcgggtgattaggtgcttcttggtcattttgttcagtatcagcaacatagtcatcccagttaccttcggcgccctcatcacacccaccattggtattaacatgcatctcatcaaatcgcctcaagagtgcgacaaggctcttgttaatatgagcaactgtcacttccacatttgcaagtttggtgtttgtgtcgatctgtgtggcctccaattgccccatcttttcattcgtcacctgcaagtcattatcaagacctttcgtgtgcgtcttcaccagccttacaaagtgttgtatgatgcccttggtgcgaggagagtgtggcatattacgagaagcatcatcaacctccaatcctgccatggttagacgaacagaggcaacaagataaaaaagtgaaggaataaaaattctacaactattaggatgtagctactgcaaggcgctcactctcaacttgccacacaagctcttaccaattcttaccttgctcaacatgaggggtcagcaaccaacaagtatgcaaccgtggaataagtgtatcggtgccgcagcaacacgacctatcaagctgtagtcgaaatatgtagagttgtaggtgtgctgaagcaaggaatacactagtaccacgttatttacaaaatcaagctgaataatcgttcaatggtggtactgtgctggtcctaggataaaccatgctagagacatgagcctaggcacaaaggtagtcaccgaaaaagaacaactagcacaacacaaagagaaacaatagattgagagattcagc

SEQ ID NO: 65250 - DNA, 583 bp, Zea Mays
gagagagaaccggagaagacaagtgttttctccccggaattccgcgccagctcctcctcccctgtgcattttggcagcgcagatcacgctgctcccgtccatgatccatccaccctcttctccctttctcatcaggccttgactgttctcgactcccctaatcaccagctcggtctattctcctcttcctcgccgcgctccgtcctgtctccgacacacacacgccatctgctgccgcgtaaacaccgggaaataccaggccttcctttcctgctataagcaagtttcaactccccaagttcgctgcttttggtcaatcttatctgcgctcccaggtctcagcgtcgccggtccccttttacttcgatccctctatccgatcactgcaattctaagcttcaattacctcctttctgggaaaattcactctctgataaagcaagccgttgagcggctcacgcaccacaccaccagtagctagcttcagctaagatctccatcttcccccatgctacaagctcctccaggaccgtcagccatggcagagctatagcggttgctccagttggcccgctcaagccgc

SEQ ID NO: 65251 - DNA, 471 bp, Zea Mays
tctcttttccgggcactggggccagggtctcttcggcagttatagcagcttcttccatggccatgttcaaaatcatcttatcaatattagaaaaagtgccctccagatttgtatcttcggccgtcttagcttcgtcagttacagcttcggcgggggcagcctctgtagctgtagtgtctttggcagccggtgtttttgacgccgaggccggcggtggcgtctcttcaatagcatcaataacagtaatgatccttcgcctttttcagcagacttcttgattgatgcaggctcctccttcttctataaaagcttcattagttgtggccctagtggacttagcttgagaggtaaagattcgatcattacctttaaaatttcctccacgtcagcagcaggaggcgttgaaggaatttcttcttctatatcagttgttttttgctctgcagccgaagcttttcttttcttcggaac

SEQ ID NO: 65252 - DNA, 1585 bp, Zea Mays
ccccggacgaggtcgaggacggtgaacgcgagggtggagaggaagcagtacgcggcgaaggcagcgacgaggacgccgacggccgcggagtagtcgcccgggtaggagctgtcgcagtagtagtggtaggggcaggtgacgaagtcggtggtctcctccagctgccaccgcatgcacttgagtatctgcctcgtcaccgcgtcgccgccgccgtgctgagccgctctccacgccgatcgcccggcaccgaagagcacctgatcataggacatggtgggtggcagcgagcgaccgtttcttgacgtccttgagctctctgcccctacttgtccttcttcctcctcctctgctgcttcttgtcctgttcgctatatgcatgcctgcatttggtagccgccagtgatggcttgctttcggaggcaaccgctcaccttcctcctctccgctcctcctcttggaggccggtgtgctgctgctgttgcttgtaggaggagggaggggaggggagaggggttgcaagtttggaactggatagggaaggtttaactggcgacattgaaggaacttgccaagcgtgccctttaacgtgaagttttcaaacaccgtgtactaatcaaagcaaaggtgcccagcaaagatgtgctctggatggctgatgccattagcgaggattaatggggaggggggtaggggtgttttgggcatatggagctcatggtttgctgtcatggtggttgggtttgggtcgaggaggggatggaagctgagggatttgtttgacttcgtttccgtgtcatgcattggtacaagcagagggagggggagagcattagtagtttacatgtgtgcctaggcgttagttcaagtttgttggggggttgcattttctgagagaggtttgttggggtgtttggtgaggatatatatagaccaaatggacaattcagcgcctagttcgtcagtgcatgattaggcctgtatgattagcatctacctctagctaacacgctattcagtcttgcatatgtgtgtctgtggttcttcgcatgatggtgctatcatttggattccaaggcaacagacaggatactcgatcggcatgaggaattgggactcgggaaattatcctggtagtttgcgcaaagccagatcggccatgatcctggagcgacaaggaaggaggagtgcccatctgtcatggtatatttcccagtctgacgcgcatgtctgtctctgagtctgagatggtggccggatgtttgcgcagcacaacgcgtcctctcatctttttttttttattttttataatccaaccagctctggatctttcttatgatattctcatctatccctcacgtagacgatccaactgcccccgtttgatgtgtcatatgcatcatccggtgaggttgcgttttactacttgtttattgttgccacgaacgagttcgcactcttctcctctcttcctgttcaaccttctgttattgtcagaacatgtgccacatgatgggatggacgaagattggctgcaaactgggcgctgcaattctatggcagtgttgttgttgttgtttagaaaaaa

SEQ ID NO: 65253 - DNA, 360 bp, Zea Mays
atttattgtttctagcacatctagcacgttaaccattcttcttctcttgggagttgttgtaaggtctttttgtgccctcggcattggcattggcacctcaactcttgctgaaggacttaaaatttccgatgtctttgtctcttcaaccctcagttcttccattttttccatttccgacattgcggccggctcttcaatattctgcagaggagttgactccttggcttcggtggccgaagtggtctcaccgacaaactcaggcactgtggccggttcaatatagtgtggccggtgcgtaagaaccttcatctttttcctcttcggcgctggctcactaggagcggccgaagcaacttcctt

SEQ ID NO: 65254 - DNA, 887 bp, Zea Mays
tgttatcatgactgctagaataattgtgataactatgcagcatgtgaaaaaggaaataaatttcacgaagttctggtttcttcgtcatgaacagccataagctagcatcagccattaattccatgtacgcttaaaccatacacagcctagacgtacgattcattgcgggcagcatatgtgtataagaacatcatattgtaatggtgagaaggtttataattactgattgcaggttcgaagacaatctctttatataattattagtatggggggagaaggtttgctttgatttatccttttcttacacccgattcacgtaaaaaaaactttggcaataggtcttttttttatatgttgcaccctttgtttcgttttataggtaaacagtagctttttaacaacagcttggaactgcactttgcagcgtgttagctccctagaataatccctctgtcatgccggcctgccaagacgtgtctcgaggcgactacagtattctcgctaaggagtcgtcctcgggcaggcactttcttttcctaatcgcatgcttgcttagcatctaaccttcctaacgcctgcttttcttgacagtgtgttttgtgtgaggtccagctccagcaggaaccactaaacgagaggggccggctagctagattgcaagaggatgtcaaaccgtaggagaaaggactgtcgagtaacgttcatttggaaagggtggttttgaacatttgctcgatacttatatttaaactctattctatttatagtacttaagtagtattattataagtatttgtatacacgttctcctggggatagccggatagcatgtcataaggaatcctaacattgagctatctttgtctgcgaaactccgttgtctagct

SEQ ID NO: 65255 - DNA, 610 bp, Zea Mays
ttgccgatgtactgttcaccgagctctctttgccgagtatcactgtttttcaggctttgctgagtgcttcaggcactcgacaaagcgcccgattctggtaactagtctaagatagatgcctctagagagggagcctcgggtataggagcctttggattatggacttcgggtacaagtggctctagtatctagggcctatcgatgccaccagctcgttgaggtcctcttccttgtcaggttcagcttccgcctcatcgagatcctagtagtgctcttggatgtcattgctggacgtgtcggtccctcctaaggagtcatcctcctcattagagatctggtactctatgtcatccaagttttgcatcatgactctggggtccactagttctgttggtaccttcggctgagcctcttactccatctaagccacctaatcgaacctgtgtgggtcctcaggctcatagtcctccataggttcatccttagtcttagagaaccattcatcgaactccatgtctttggggatgtcctcgacggtgatgtgcaagggtctctcttccaccatagtcttagtggggcgggaactgtctagtgtcgatacagatccttc

SEQ ID NO: 65256 - DNA, 434 bp, Zea Mays
ctcaacagctagggttactcgcgacggagaggaagccgaaggtgccgaaaccgctccaatctctgaagtgatgcaacggtcagggctggtagtatcaaaggatgcacctgccgctgaagctgagcaggttgatgctgaggaaattgaatatgaagatgattacaacgccgtgccatctaaacccagccacctggagtttgggaaatccactattaccgaaggtgatatgtctaagctgatgaagttgggctatttcagtgaagcaaaaaggagctggttcgttttggcggagaggaaattactccgaagccggaaaaggatgaggtggtagtgttcaaaagcttctttaaagcaggattaagatttcctttgaatgggatgattgctgatgttttgaagaagtttgggatttatcttcatcaactaactcctaa

SEQ ID NO: 65257 - DNA, 449 bp, Zea Mays
cagctctccaaaggcactcagttgtggatgtcctgcgtttacacgtcccctcaaaacagtaaagccaagcgtattattcgtaccattaacaatgtcattctctcgttactgatccaggcatccctttgtggacggtacttggttgaggggctccacacttccacttacctactgaacttctccccacaaagatgatcgatgttggttgtcctcgtgtcgctttgtctggttctgcaccttcgcatgaccacctgagttttgggttgcgcatgttaccctaacactgcctctactgcttcgcacaagctcgctccttgatccacctagtgtctttctcggctactccgacgatcacaaaggctatcattgtcttgatctatcttctaaccacatgctcatctcttcatctcttgccatgtggtttttgatgaggacagcttcccgctcgc

SEQ ID NO: 65258 - DNA, 544 bp, Zea Mays
ttctccaatctaccttccctagtccctacttccacttcaagatcgatctgcctcatgttgtactgtaaatctgttggtgaatattattttaatttcaatgttcccagaagcattctatggggggaagcaggggttcacacacatcgccgggagtgcagtgggatgacaagtattctatgcgtctgttcagtttttttcatcaggttctgttcaacttcattggtcacagtggccttctcaaaactcagcacatcctatatggttttatactagcaaagggtttctaggggcaggacccagtggcataatggctgctgatactattgtaacagaatctggagcttttgtggggcaccccttgttaatccatccactgtagctgtttgggaagtgatgccaggtcttggaaatggtattcaggcaactgcaaagttaaatgcagcaagttctgttcctccgtctctgaatccccccttcatggccgggttttgctccactagcagccaacctgtttcctttgcaagattatcttgtttctgtgggt

SEQ ID NO: 65259 - DNA, 398 bp, Zea Mays
gctgttcaaataaactgaaatgggaacccttgctggctaattctgtttcctgtttcaaaatcggagaagaaaaatcttctcacagtgctctctctccttatctcctcacgtacgctacgcagatttttctagtcttcgttctcatccacgcacggaaggaaaatcttctctgcgttcctatcctccactctgatatttcatcgatctgatttttgttgaagttgctggccgctcagccttttctagcgcgcaggctcttcttcaaaaatcccatacgtacatctcccttccctcgccttatctctccaccgctttctctcttccatctgatatgccgcgtcgctgtattctggaaagcaaaagcaaaatcccgccactgttcttctgttgaaattcct

SEQ ID NO: 65260 - DNA, 848 bp, Zea Mays
tatgcttgatttgctggctgaggactcttctgacgctgctcctgctggggcatcggtagtagcgcccctcccagaggctgatacaactttggatactcagaagcctgccagtactcgcccgaggcgcccttgccgagccaatcagcctgatccttctactgatgagcagaaaaagaaaaggagacgcctccggcgagtatccagtttggatcgggacgctggtacttcggttcctgctgctgaagaaatgcctataactgaatttattgacactgaccccaatgggtgtacccaatctgctgctgatcccaatgtgggtgctccttctgttgctgatcccaatgggtgtgccccttctgttgctgatcccaatgtgggtgctccatctgttgttgatcccaatgggggtgctgcctgtgctgctaatgtggacgacgaggaggaagaagatgaagttcctttgactcggaaaaacagtcggcagttcatcgctagcggtgaaagtagtggagttccttctcctgctttgtctgctctcattggtctgcaagaactgtccctggccaactttgatcagactcttgaggatatggttccagaggatttgttatcggagccagtagatgatggtgtgatggaggtttgtgctgatgtgcttgatgctggtttgaggtcatcccgtgcctcgtcgaccttggagcgcgatctcgagggtcggaagactgacttggatcgtcctggtcccatgaaagtaactgagggcccatcagccttagaattggctaccgcagagaacttggacccccagggtggtgttgacacatgcccagcccccgaggatgtcgccg

SEQ ID NO: 65261 - DNA, 525 bp, Zea Mays
agaagttccactaatacgcaagaatagtcatcgcaataggggcagcgacattcccatgcaagccttgttagcacttgtcagccttcaggggttgtcgaaatctaattttgaccaagccttggaagagatcatccccgagaaccttctatcagagcctcctgaaaaattgacaatcccatcatctgttcagaggccccagatgatggccttctgccgtgtgatcctgctgggcaagaggtaacccagacagtctctcgtgcttcatcgaccttggagggcggtctagctcatgaagacgcaccggccctcaatgctgccgatccaagtcacccggctcctccggatatggctgagggatcctcagccttagatgtggctactatggagggcctagccctcgagggtggtgctgggagcgatccaacccccgagggtgttggggtgggctcccctctccctctgctgcttccatggatgttcacattggatcaccgtcggtccaatctgaggaggccgcggtgacac

SEQ ID NO: 65262 - DNA, 947 bp, Zea Mays
aacaagtttgcttaagtaactaagctttgatttcatacaaagtttggagaaaaacaagctcaaagttgtgttgtcagtcaacctgaaacctgaattatgatattcagtgacataggatgaactttgggagccatttcgaagatgatccagtaggtgtttgagcatggttactatagcaagattgtagctggattataggactagaactttgttacagagagattggcaagttgccacatagaatttcgagaaaatttgcccaaattatgctctgtcagttgttctgatgaacaatcccgatggtacagtgcacccaaatatctcagatacagagcatctcgccgtcggtgacccttcgccgcgattgacgtcgatcgtcgcgattcgtgcgccgtgacttgcggataatcgtggacaaggaaagatctcaactcgggaaagggatagaggcttatcgccggactgttcaccgtaacacttgccgcgtagtggacagaggtgtcctcgtcggagtttgccgtcgatcatagccacgccacgtgcttagaagatctaccacgtcgcagtagatatccgtaggaggtcagttcgtcgccgaagacattaccccagggagcgccatgatagttcacgccggtgactcacttctcctctaggccgccggtctcccctttcaaaattagacaccaccgcttagcgcccttatacattgacagcccggtctgttgcgcaatgttatcccgaagccagaacacccattcccaccttcaattagccaccatagccggagaatttccttcttcccccaaataggtcgactgcgccgctgtgaaccacctcttcgcggctagctgcttctaggtccgccctcactctttttgtccgtgttttagcacccacacgtgtttgtgatcgtcgtctgctcgacccattaagcttgacctcac

SEQ ID NO: 65263 - DNA, 400 bp, Zea Mays
taggcacggcgtcgagcacgaggcagcgcagagagaggtcatgttcaagcatggattggctccaaatctttgcgattatggccatgatcccattgagagatctcttcccctatcattcctttatcgtttgtgtgtggaggcttatgggtttcactgactcgatcaagagatatggagggatgaagttgggtttgtctcactgctgaactccgagagaaaatcctgggtctgacgtgtcttgggcatgcatctcgatgccatcttcacacacattgcagaggggttagtttagaacaaaattgtcaatggggacttaaggatttgagctagggattaaggtgaatgcgctcaagttctaagtgaaggctgaaattcagaaatctgaatttcagattccccg

SEQ ID NO: 65264 - DNA, 570 bp, Zea Mays
tagcattgcttgtagaattacaaagacgcgtaggccctgtgacttaaacaaaaaaattcggagattatcgatgttctaggaatgttctaaatcttcgccggatgacgttgccaacctgtaagcactggaggatgccttcgtcttgactatgtatggaccttcccactttggttctagcttgccccgggactctgtccgggtggttcttacgagtacgaggtccccttcgctgaattctcttgggatgactgtgttgtcatgccaggcttttgtctgaacctgatatttgttgagggcctacagggcgaggacacggtctacgtcgatgacatctttggaagttggttcgtcaacatcgggtgctgctgaattgtttgttcgaggggacccgtgctttaattcttgcggcgttatggcctcagatccatacattaggtggaagggtgtgaacccggttgcccggcactccgtcatgtttagggcccatacaacttcgggtaactggtcgacccatttgccctttttgtcgtcaaggagccttttttatggtgctaaaaatcttgccattgg

SEQ ID NO: 65265 - DNA, 546 bp, Zea Mays
aacactgtattgcaaaacgacaatagtagtaactacggtcgcatgatatgctattcggtggtcatatagaacctatcgacacggtattgcaaaacgacagtagtagtaactacagccagaggatacgctttggtagtcatatagaacctatcaacacggattacaaaacgacaatagtagtaactacagccggaggatatgctattaggtaattatagagaacctatcaacactgtattgcaaaacgacaatagtagtaactacaaacgaaggatatgctattcggtattcatatagaaccaatcaacacgatattgcaaaacgacaatagtagtaactacaaccggagggtatgctatcagtagtcatatagaacctatcaacccgatattgcaaaacgacaatggtaacaaagagaaggatatcttgcttttagataggagacatatcttgcctatttaagatagaagctattcgacaacaagaaaaagttgttgctgctgatgcaaactttagctggacccatcgtgtttcactaagagaaaa

SEQ ID NO: 65266 - DNA, 874 bp, Zea Mays
gacgtagtggaaaacaaaattcacattttatatagtgatgatgagaactttagtgctattcataaaaacttccaagctactactttgttgttaaattctctatgcagggagaaatacaacacagtgagcggtctgggcaatgccaaagaaatttgggacacattgaagatcgctcacgaggaaaatgatatgacaatgatcaccaagatggagctcatcaaaggtgaacttgggaggttcgccatgaagagaggggaggagccacaagagacgtacaacaggctcaagactctagtgaaccaaataaggaactatagaagcacaagatggatggatcatgacgccatccgactcatgctaaggtcatttaccgttcttaatcctaatcttgtaaacttgatccatgagaatcctaggtacaccgagatgacgctcgaaaattcatgagcgggcgaatgatggccaaggaggctagatacatcgacgacatcgccaacgggagcctccactaggcaactcgtcgccctcaaagcgataaataacaaggagtcactccccgacaaggtggcgcaaattgaggcagccgacctcaataaagatgagatggcgcttgtgatcaaggggcgcaaggacttctccaataaaggaaaatcaagggggaagcgtgcctgcttcaagtgtggtaagttaggtcattttattgcacaatatcccgataatgaaaatgactaggaacaagacaagaaagggaacacgataaaattctactagaagaagaagggtgaggcgcacattggcatggagtaagactcggattgatcatcctccgaatctgatgatgaaatacttgccgcctctgccttcaataagtcaa

SEQ ID NO: 65267 - DNA, 869 bp, Zea Mays
gatgcctcacgccgtgggcgggactcgtcgtcgtttcaatcaccggtaagtccaccaccacgcccttcgccatcgcctccgagtcatgttgcaacagtctgctatgggaaatcccattctcgggctcggttgtcatgcgcgtcggtgggctcgccgccgcaaggccctatgcgctgccgcgtctggcctgtgatgggaggtggcgctcgcgaaacattgatcggtggatagacggctaggattagacctaaggataccctttcgctacgttcaatccatcccattgattcatccgcgggcggctatgattagatcgagcctaccgcttcagggattaaattcataccatcggttcagatgtgcggtcaagattagatcataacttaccccttcgtcgatgtgatccggactgtagatcagcgaacggagggcttcggttaaatcgcgttgacccaccttggtgtttttccatatgagcccctcgattttcaaagaatcaacccgcagtatgcgtaccactgtgaatcatttaaaccaggtccccatattttgcaaagatgtccttcgacttatataaaatacagaatctgagcttcagttatgtagaacaaaatttgaaaataatttctaatataagaataattcaataaactttagaaattcataactccttcgttttaactatgttttagtccgttctaattgcattagcttcgtaataatatgccctacacattaataacactattttaccatgctaggggttttcaaaatatataaatacctatgtttattaggttaacttttctagcccaagctaaaagaagtattttaatttggttcctctagaatttgactaaaatattatc

SEQ ID NO: 65268 - DNA, 779 bp, Zea Mays
actctagaggaaccggaggttattcttgggcgatcgctccggtctggcatcgagccagaagcaacgccgactcccctcccacaggtgttgtcctgtgctcatcaggctctccaaaaaatcgaggtggcgatcctgcgagagtgggaggcgctcgagaccgagcaccagcgccttggcgactggtgcacccaattggaggagcgcactaaggtggcgtcctgccaattcgcctcagagcggaccgagcttgagcgggagagcgaggacttcaaggaggacctcaggaaggtgtctgaccgagagcaggaggtgacccagaaggagaaagggctggtcaagaagaaggaacacttggaccaaagggaggaggtcatcacggtgttccataaaaagctgaaagcctataatatgatgctggagaaacagcaggatgagcaggctgcgactgaggtgaagatgcagaagctacaacaggaacttgacgacaaggctagcaacattgctcgcgccgaggaaagcctcaaggcgaaggatgcctccctggagaaacaagctcctgatctcgcctggcaggagaaggacctcgccttcagagaggagatgtgggaaaggcggaacaagttgctggtcgagtttgagctcgaggcggaggagaaagagaagcgattggaggggaaagagcaggcactggaggagcaggcctgctagctctaggcggcgcaggctgctcaggcgacgcagacagccccgggcccctaggcggtggaggtgatgaggaa

SEQ ID NO: 65269 - DNA, 330 bp, Zea Mays
tgtcgacgctttcttgatctttgtgacgtggaggttccacctcttggggtgtggatccaccggcggagagccttgctttcatgcttggactcaacatgctattttggatatcctggcatagtaacattcacatactcagggtatgatatcatcatatattgatcatacatgtattgatcatagtttggtgacatatttaaagttgtatgactcaccaaatcattctaaaaagtggcgacatttgatgtagccaccttctttcctttcttcatacttttgaggaggtcagcatttatggtgccttcatctatcaatttatgtatgatggtt

SEQ ID NO: 65270 - DNA, 620 bp, Zea Mays
gtttttgcatcaccggcgttggtaacaagtgcttagttgagctcgcgggttgtgtccgtggctctgggggcggtgtgatgccttagagcgtgggcaatttgttgccatcgttgcggtccgccatggaccagggtctctgttgtaccactgtaggtaattcatctcctattgtgtttgatatcctgccctcatcacttagcactaactagactcatggttgtggccttcggcgttggattgcgcgacttcggccatggccgccgctgtggtctgtgggcagaatgtcgccgctacctggggttggctggccatgtgagtggtaagggagagaagctcctggccgttgatcttgtaatgggtgggccggattaggaggaatcgtatctctgcgcgtgatgcaacctaaactatcggatcatgaagggacgttccagatctcataactcttactggttttgggcttggggtatctgatccgttggttcgcagatggacggccagactggatcatagcggcccagctcgggtgggatgatggccgtcgatctcgtgatccgcggctcgggtgtattggtgggttgggatctaatctggtccctggatccaggatcggacggctc

SEQ ID NO: 65271 - DNA, 642 bp, Zea Mays
agggagccacggatttgccagcgaaggaagtttgagccgccaccgtcgaccggcgaggagacttcgattcgggccacggaactctcggtcacggttcaatttgcgtgggtggaggttttgcgtggtgcaggagcgttcgttgcagtgaggactaggcgaaattccgcgtggatctcatccgccgccgtgtgattccgccactgcctggacatcgcctccgtcagattgattctaggtatggttggggccctcactaattcgcccaattaccctgtatgtgaagagccttctcgtgttaaactccctccatgggggagccaataatcgccgctggatttgggaactccccatcgggccaccctctgctgcggtcggggattacggggaatagtggtcggtgaatgcaccttctggtcgatcgctctgtcctacgcatcgggtagcattggtcaaccgtgcgaatcgggaaccgtgggctggtgcgtgccttccagcaatggcgccccgccgtgccttcgcgctctgtcgccggtcgggcgccgtggtgagagagagaggattggggggagaaagatgaagggcttgggttcttggatcatacacggacgaccccgatctaaccccgcataccccttcgctcga

SEQ ID NO: 65272 - DNA, 1792 bp, Zea Mays
caacaaccgccttgggtcgggagtcaaggcgatggtgcagagccaccaccgctggtcgcccttaggacgagggatcttcgatcgagaaaggttgtaggaataatgaaataaactcctcaatatggcaagataagagaaggggctagagggaatgacactagatgcttacaaattcaaaaagcctggctcaaccatgcatcagaggacactcgggggttgaaatcaaaggtggtcgtgttgctccctacgcctccctctaaacctccaaggcctggccaagccattgagcaacatccaaatcgctcagaaggacccctgcgcctagggacaattgatccttccccatccggtccagggcatagatcgagccttgaggggagccacccctagacggaggtagcgccaataacacccgctcctgtgacacctttatctcggaggataagcacccctgccagatggttttggagtcaagctttctcttcagtcgtaacattgcaactccaattaatgggaacctcggacgaaacacccaggtagacgctgagaagctacgaccccggtaagagcccttgaccaacatctcacaaataaaaccatcgcatgtgcgaacccttattaaacgaggaaaggggaattgagatatactcgtgcgaccttccgttgtgaaggcggatactagtacacccgaccagccatgcctccattgtttttcgctcctccttcttccgtaacagcccaaacacagaaaaagtatcgccataaggcgagattgagctcgacacctaggtaccccttgcacagggcgatgaaagcagcaatgtgttgaatcccattcggattcagtttatgaagctacacctgcaaatacttgaagaaggtcataatgaaaaggttaagggggaaggcaagacctcgctcatggaaacgaacaaacaaaaccacataactgtgaggcagggttgggccacctcgacacccagaatcagccagccaccatcagaagcagacctcaccagacgagggcccaaaggttctcctggcttgtcaaggattggcgccaatccgccgtagcgagcgcaacggacaacccgagtatgagaagcatgggccgagtgaggaagacgaggaacaagggaaccgaaagcaaggtgggaaagacacggagagtggaacaattaaataaaatctgccctgtgacaccttgctgcttagtgccagcggaggcgatccacctaacgagggggggcaggcctgacccaccaacgtgttagaccactggttgcacccaccacctctcaggcagaggcaagttgtttcttcatgcacaataaaatgggaaacacaagagtgaaagccatgcattaggaaggggttttcctcgaatttcatcgtcctttacataaaggaaccctgagtcttctgtcgccataattctaggctcggggctaggcgcaggaccaaacatccaaaagagaagagggaagacctatgattgaggcaatattggaagctcactattcccttcctatcatagtgcttggcatgactatgagggcaaaagcgcacgtcaggaaaccaaaagatggccaccagaagagggccctaaggagcccatcatatcaagtcctctgaggacacaacgtcggtggctttgtcgtatccctagatcaagttctcgaaggccatggacaaagcttcctgaggaagtgtcgctggagcatgaagatcaacaccagtgtggagctgggcgatgacaaaagcgacgatggtcccatggtgaataatgtcg

SEQ ID NO: 65273 - DNA, 526 bp, Zea Mays
gtgctagtcaacaagatcagggtgcttggaagtgaagactggaatgattcaaaagttaccaggctattcatgagagcttataaggaaaaggacatgggtctggcaagaatgatcagagatcgagatgattatgaggagatgactcctcatcagctgttcgccaaaatccaacaacatgagtctgaagaagctccaactaaggcaaaggattcaaatgccttggttgcaaatgaacaagagtcagtgaagaagtctgcttcaagcaaggatcacaaacacaagaaagttattgagagctccagtgatgatgatagctccagtgatgatcttcatgaagaagcagctatgttcatcaagacgttcaagaagcttgctaaaagaagccacaagtttcaaaggaaaaacaagaagagagcctgttatgagtgtggccagactggccacttcatagcagactgtcccaacaagaaagatgaagaaggcaagaaggagtacaagaaagacaagtacaacaaaggtgagaaga

SEQ ID NO: 65274 - DNA, 635 bp, Zea Mays
cgcgacatgttagtggattgtggacctggaacaattcggtgggctacctggttcgcttggtggtcgtttggctagttggttgggtctagggtgaagcttcaccctaagtgacacatagcatatatatagggtctggttatttggagcccatggcttcaaatagttataggaagccctgatcggctccctacccccatgacctgtacgaccccaccatcccgcatcccacatccagatcacgtgggcgcgctattttagggatccttttttatggaagttatatacgcgatgccaggttttcaacgtaaaagtcatcatgtttgagcgtaaaatagtatcagacataacataaaatcctatttctgtcacctcgcatgcagggtcctatttttatggaaggtacaatcatcacccaccagatgtgcatgcattttcgatttttatggctggtgcggtttcagatccgaaaattatggtaggtccaaaattatagcacctccaaaaattattgtgcgtgtgaaaattttgcatgcgggacactgtgtgggtgcaactcagatttgagcgtaaatattctcatgtttgagtgtaaatactgtcagatatagcgtatatgttgactcactcccaacaac

SEQ ID NO: 65275 - DNA, 395 bp, Zea Mays
tgagatgctggtgatgatccagaatttgatgatatataccgtgaaactagcgaaagatctcaagttgagcgaagggtattattatatcttcaacatgacatggtaacaaaataatttactatatatgagtttagttataaaatcatcgtatgatacttatgaaacataatatatataagtattttgtaggtgttcatacctataaacatttgtgaacttcactggtatcttgttgtgcttaacgccaaaagacgagagatacaaatactcgattcattgggttcttcattaggtcataaagatctcgattgtgttgtgagtaaataaaactcgttactaattttgtttgtggttatgagtaatttgttgatgtgatttactaattttgttttgta

SEQ ID NO: 65276 - DNA, 808 bp, Zea Mays
gagccacaaaactacataacccacatccttccactacagaaatttggggctaaccaatagaacacacgtattttagtgtttagaaataaacaataattatatttacagcctaggcaccgctccccacgcctcccctctcccgcctcacgacaacgcacgggcacatacctagtatgcacaataattacttgaattatcaatattatttgacatccataatacggcggacatgatttatcaactcatttcagtacttgagcaacagattgataattgaattaaaaaaccatcatccagcggtggcatattacagttgcagtactaaacggaaccttgacaagatgcggctcagactccaattcaccgaaaattgttagttatgctcttccgggatttttgtgaactgttacaattatcccgggatttcacaaatagcaatggaccaaagatgcattatttgaccgttcgtttatacgtggacaacatcgatcggcaaggcaacaaagccacaaaactacataacccacatccttctactccagaaatttggggctaaccactagaacacacgtattttagtgtttagaaataaacaataattatatttgcagcctagacgccgctccccacgcccccctcaccgcctcgtggcaatgcacggacacatacctagtatgcacaataattactgaacttatcaatatttcttgacatccataatacgacggacatgattcatcaactcatttcagtagttgagcagaagattgataactgaattaaaaaccaagcatccagcggcgacata

SEQ ID NO: 65277 - DNA, 724 bp, Zea Mays
ggaagatttgcatgtctgtgtttcttcagagtattagatatcgagtttgggagatttgcctcaatgttgtgttcaattcaattctagaagtgaatgaatcactccaattcaagtagagttccatgattcgaacaacaaagctcgcaacactttgttcttgtgcttcttgctgggtgagtttgagtgagttagacatttgcctatggctcacgagatctggtccaccctcgagatattccatgaggataacgattatgtgaaaactagactctttgagacgtactgacgagagtacgagaactttgttcagttggctagagagaccataagcactatgttttctcggttctagtccatcgtgaacaagatgtgtgccaagaaggcacatttaccctatgatgattatgagagagcgctcaagctacttcttgctctggatcagagggtttgggaggtgaaggtctcggcgatcattgagtcacccgactacaagaccatcaccgtggatgagctattcaacaagctcaagtccaccaagattgaccactagacctaggccaagtttgagaaccctggtgcaccccccatggccctggtctctggaggtggtgcttcctctaaccctcacctactatgtttgctttgtcttccttgttgaccatcacagaggaacaggtcgagagccttgatgatgaggagttagggcttgtggccagtcggttca

SEQ ID NO: 65278 - DNA, 693 bp, Zea Mays
tgccactagcccacgccaggggaagatagtgtatcccttgcatgaaatgtgcgcgacacgcccagtctacaacatgcaggatacattgttgcccacacattattgaggtaggactattgactccttgcatcgcttgggcgcccttcattatgacctttaccggccctcatgcgttactgaggcatgaggggacaagcaggaggagacaacacgacaacgtccatacaaccctacgcacaacaacatattaggctacaccacaacctacaccaaggactacgtctgcatttcgattagatggggcaggaggataggatgccaggagctagctcgatgaccaagaggagatatgtgcctagaagatatagtgttgccagcccttacctgacacttcacacttcgggtagaagtgactcctaggcccagctcccttataatgtgccccttgaactataaagggagggcactagcgatgcagagggaggtcgactcacatccagacccacgacaagctctcaagcaatacaactcacaatagatgtagggtattatgctctgggggcctgaaccactctaaacccttgtgttctttagttaatctactcggtcaggcaaacctctaagtccactcctcatcggaggatcaagggcaggtgcactccaccactcgaccagaggaaatatgcctccgac

SEQ ID NO: 65279 - DNA, 723 bp, Zea Mays
gtgacattttatgaaggatcaattaattgttaggttatatgatggttaacaaaaagttcaaaactagggggggtctaatatattagcctgctataacggtgtcaagagaattaatcatgcaggtctctttgagtcatcagggtggaagctagctccttttgcttttgttctacaatcatgagatctcgtcagctcatgtagtacagtagtagtagtatatgtctcggttggttggttggtatgtaggggtaggaataggatggtgaaaaatcctcgtcttttgctttcttgtgtgttggaatgatgcacacacaagctagcgcgtcgtacggtcgtggctcaacggtacagtagtgtatcaccccatcccaccacaccacatgtttagcatcggcctcctcatttagggctagtttaggataagaggaggcaaacccagggagtgaataccctctttgaataactaaatactttattcagatgatatcctctgagaatactattagaagaaatgacagagatcctagagtgcattaaattaacccttagggctagtttgggagctaaaatccggaggagattatagtctatgatagatacaaaatgttgtctaaacctatgctcatggggtttcgggtacctaacgagtttcctataccaacaaacatcaaacataaaaaaaacaatttatcatacaaatgacaatcaatatactaataattc

SEQ ID NO: 65280 - DNA, 1091 bp, Zea Mays
cgtgatcgccaggtgcaatagctcaggcgacctctatccactctccatcccgttgtcctccaccactaccccccaagtcttcctcaccagcgcctcttcacagctttggcatcaccgtcttggtcacatcagccacgacgcccttcgtcatttaactagttcatcctctatttcatgtaataaaggctctactgcccccgatatctgtcacgcatgtcaacttggtcgtcatgttcgccttcctttttccatttcccagtctcgtgctccacgtcactttgatctcgttcactgtgatctatggacttctccaatacccagtatttctggttacaaatactacctcgccatccttgacgactgctcccacttcctgtggacattccctctccgcctcaaatccgacacatttcccactattgctaattttttctcttttgttgccactcaatttggcaccaccataaaaagcttgcaatgtgataatggtcgtgagtttgacaactcccacacacgagctttcttcctctcccacggtgtccaccttcgtatgtcgtgtccctatacctcccagcagaatggtagagcagaacgtgtcctccgcactgttaacaacatcgtccgttccctactctttcaagctcaccttcctgctccttattgggttgaggctcttcacaccgccacatatcttctcaatctccaccccaccagcaccctaaattcctccactccccatcttgccctctttggtcgccccccatcttacgaccatctccgtgtctttggctgtaagtgctatcccaacatctctgccactgccgcccataaactcgctccacgctccaccatgtgtgtctttcttggttactcgtctgaacacaaaggctaccgttgtcttgatatctccaccaatcgtatcatcatctcccgccatgttgtgttcgacgaatcctcctttccgtttgccgagacccctcccagctcggctcttcccactaaccttgattttttggatttattttctgaacaggtcccggttccacccattggcgcattgccctcgtccactgctgggcagcgcaccagcg

SEQ ID NO: 65281 - DNA, 414 bp, Zea Mays
cgtaggttaagctaacaaaccccataaaattccagaaccgaactgattctgcacacgcgcggaccgtctgcgctgccaccgcgaatagtctggacctcggaccgtccagccccaaggacggacagaacgcatgccagtttcggtgttcaacaacactattctaaactaaaactaaatatttctctcctaaaagccctacttctcccattattctcctcccaccaggaacctcaatcagcccacccaacaccagctctataaaatatggcctttgcaatctagagtacacacatcttccttacatatgcataatatgaacacaaagcatcaatcgaaccttaatcttattttacttgatagtgaaccaagcaaccaacgaaatgctaaaaagaccaaaaggaaacccaccccagc

SEQ ID NO: 65282 - DNA, 738 bp, Zea Mays
caataaaaaatgctcgtgccactgttgcagctgtgtaaagatgactgagggcaataaagtgggcatatttagagaaccgatcaaccactgttaatatgacagacttaccatggaccttcagtaaaccctcaatgaaatccattgagatgtctgtccatatttgtattgggacttccagcggttggaggagccctgcgggatgcagcgactctgttttgttcctctgacaggttgcacatgatttgacccaatcctgtaccagtgtcctatccttgttaatgaagaaatcagctcttaatcgatgcaacgtcttttgtactccaccatgtcctgctgagtgtgcggcctccagtattgagggaatgagtttggatgatgttgggataaacaccctgcggccgtgcagcatcaagccttctcgtatctgccatggggcctctagggatccctctgtaatctgagtctggaggagtttccactcgtcattattagcacattctgcccgcaagtcttggtacagctggaatgttggggttgatatggtatggactgaactttcagttgtgtccctgcgagataaagaatcagccactgtgttgagtcgtcctgcccgatattccactgtgaagtcaaagccaaacaacttactaatccactgatgttgtggtaccgtggatagtcgttgatctagtatgaacttgagactgaaatggtcagttcgtaccacaaatcgtctgc

SEQ ID NO: 65283 - DNA, 519 bp, Zea Mays
gcgtttcacgcgcgctcgtcgtctgtctccgctacgctgaccggtgggccggagatgtcaactccttcctcaactgaaatccgcgcatggcgggcggcgtagtctcccctccccttcttccggagctgctggtcgtggctccgaatccgtaggatcggggcgttaaatgccgtgcttgcccacgaatcctccaccctaaaaccacacgaaaccagccgtcctccccatgaccgagagagctctcccgtgcatgccgccgccggctaaaaccacaccgcgtgggtgaccgaccgtagcaaggtatccggagtgttcgcgggtgaccacggaagcgttctacggcacattctggcggaatagcccatcggaccgccacgaattcctcgacgtcgttcaatctccaccgcggtaccgcactgtcacgtgggcagggcagtcgccatctcgatttgaggtagatctactcccatcctccttgtttcaatctccgcggcgcgtaggacgtaggaatcggagttt

SEQ ID NO: 65284 - DNA, 504 bp, Zea Mays
gcgcatcattcaaccggcgcccgaaggacaagttagcagcatccagatggggaacgacgatgtggacatatttgctcgtagatgcgcatggtctacaccagcgtgaaggcgtgtgtaaagtactactataggtaaatataatgccatgtcttgtagagtttaggtaaactataagctcgccgccaccgacgcaagcccctccatcatcgacgacctcacagtcaacgcgcgtcaccatcgggcatcgctccgtttggcttaaagctagcattgtcaatctcgtgccagcgagttggcccacagcacgtgtgaaggcgtgcataaggtactactataggtaaatacagtgtcttgtcatgtacagttccggtaaacgataagctcgccaccaccgacgcaagcccctccgtcctcgacgacctcatagcccacttgcacacatgctgctcttcgaagatggcagcaatgcccatgcctacgagaaggtcgacattaagtgcgagc

SEQ ID NO: 65285 - DNA, 382 bp, Zea Mays
ctttccaaaggaaatatattagaattgaaagaatttgctgtgtctggtggttaccaacttggatccgttctcttcggcggcatagacaaagaaatcttgggatgcattcctgaccacgtcggagcaaaaattgtgaataccctggctgttgggggccttcttccttcgaaggtcctcaaaaatgtgaatgtggaacaaaatcgagtgcagattagtgaagttcaataagtgtccaaagcacaagtcacaattgctggctaagacgtgtcctatcggagcacaacaagataaaagtaataaactagcagaatggcagttctgtaaatagcacagattttcagcactagtagaaatcaaaggcgcgtttccaaaggagtaccag

SEQ ID NO: 65286 - DNA, 631 bp, Zea Mays
cagcaactcacattgctctcctcccgatgtcatcctggagctgcagcttctcggcacgtcctcggttgggacgtcctcatccgttcaaccagccagctaccctacggcttaccaggttatggcggcattccagcaacagcaaccaccaccatgtccaccaccgcacccgcaaccacgcaaaccccacagctgccatcccacaccaacagaatcacgccaccagcccaactcctaccaattcacctaatccccttccctcactccccatcccagctgccattcaccgatgactcgactacaccacaacatgatcccactgccttccacaaactcgcttttccccttatttgacggcaaggaggaaccgctgagctggctcaatcgctgtgagcactatttcctaggccgacgcacactagaaggggacaagatgtggcttgcctccttccacatgaccagtgtcgcttaacactggtactatatgctccagtgtgacgagcacgggctccaatggccacgtttcaaggagttgtgctatcaacgtttcggcccgcctgctcgctataatccaatggacgagctcacccgactaccgtttcgcacatccgtgacaaattacgccgagcggctc

SEQ ID NO: 65287 - DNA, 619 bp, Zea Mays
cctccttggagcatggtttgctcttcggctcccacctccgccgaagcatccctctaggtcaccaagctgtcaaggccgacgaggtcctccacatcttcattgttcatcgcctgcgaagacagcacaacaatatttcaaaacaacgaacacacaacagccctcaccaaacccataacatacctgcgccagcgctcgatctgccctctcccagacgatgtcgcgaccatgagggccccacatcctatcataaagggccccagcagagtgctttagcacgtcatcttcaatctggaacacaccacaatcaaagtcctcgttcgctcggttgaagacctcgaaatgcctgcatccctctcgggacaaagcattcacagccccttcgcaagtgacgacagacacataggacatgagacccatcacaatagacgggagcgactctagctcatcttgcagccacccagaaagcgagtgcccacctcctcctccgatttgtcaaaaggggcagtttgcgctccaaggtcacggtacgcatccatgaaaagcttgtgcgcccgttcgaccctagcacgggtggaagattatgtcctctcgcggtggccgcgcatattcttcacctcca

SEQ ID NO: 65288 - DNA, 848 bp, Zea Mays
gaaaggtttgggagtgccatgtccccgcatattcctggtcctgccctttgtccaagcagaggtctggtgtcgactaatggccatacgcacctgacgtaagccatcggatgatgcctggcgtaagcctctgacatagggcccgccagcattgagtgcaaatgggatgcatacttgcccgcaccagcagcaagcaacgtaaccacaacattaaatgtgtgcggcgcaccacgcctgaaacatgtggattttactgttaaccgcacgttatcgaggcaaaggcattgacccaatgcatcatttgtgcgcctttcgttatgacttcctctgttctttgtgcgttactgaggcatgaagagacgggtggaggagacgcaacgacaccccccacacctacgcacgaagcgtagcaggctataccgcaacctacaacaagggctacatatgaactccgattaaacgaaactggggataggatatcaggagccagcacgacgactaagaagggatacatgctcaggaagatctagcgtcgctaggcttattcgacgcctcacattgtactttgtaattactcctgggcccatttgtcggggctccagctcccttgtaacgtgcctcccattggactataaaaggggtgacacttgcgtcacataagggaggtcgatttcacactctgaccgacgactctcaagttctcaagcaatataacccacagtagatgtagggtattatgtgtcaacggctcgaaccactctaaaccctcgtgttcttgtgaccatctgtaagtccagacaaataactaagcccactcctcatctgtagactagggcgggtgagaattggcc

SEQ ID NO: 65289 - DNA, 1062 bp, Zea Mays
agcaactctgccttcgagtcctatactgatttggtgaaaatttataaaatagctactttgttggaagctatttgtgatcttaactcttatatttaaatataggactcgatttaaatcctctctttgagatgctcttagtgaagttacatgacgagaacgggtccgaaattcatgggatcgtatcacgctgaacattacatgcgtgagaacgtgcaagtcagatttggacatggccgtgcgatcagaataaagacacgatagttggtatgtcagaatgcagacgtaaccaatcacagcgtcagcgtggcacctgacaccggttcaactgtcgtgtcgcaagggagccgccaaaggacaatgcataaactgccacgcgacaagacggtgcatagcgacagacttcaggataacggtgacatcgctatagtaccctaacggaagaagaaagtgtcacccatggagtccttcggctgcgcgagaatcctggaggacaaggaactacatgccgaggctccaccccctactcgctatgcctcaacccttagaacttatgtaatagatccttctctcagtttgtcttataaaaggaagagaaggatcacgatccaaacaaagacaaccttcgtactcatagtcatagccagttgtaagcgcaatcaagccataatgaggattttggtgttgatgaccaccgaattagagaactaacaagatttatcgagattacaagaagagaatcgaaaagggaggatgttatataggtcaaaggatccaccaatcactaatatggttttgctgactcaatgagtttaaattcttttatgttttatattttgagtttatgaaaagtcgtactatcaagggtcaagaacaattggtcaacttttaaaccaaatgctcaaaattcatgatagacatcgtcataccgagccaaatcaaccaccaaaattttatttgctatcctggtttggctagggcgatagtgccacccataacataaccgcttgaatactaagtatatatatacatctattcgaccacaacggttagaactcctttctc

SEQ ID NO: 65290 - DNA, 375 bp, Zea Mays
accggagcaggaccggtctagaaatcccatcaaaattgccccaggcaagagcgggttggcattcaagacttgcacaatcgagggggaagaagaaaaaatttacttgagtagggtgggcacgcctgtgatctactcctacaccgatataggtaaggagattgtaggcataatatctaatggttacgacgttgtatactaaagaaaggtgttgttgcgttgcattctttttttatagggggtactattgcgccactttcaagtgttacgggcctaggatgtctccaatggtaacctcaactctaacctatgtccaggcaataccctttctcgggatacactacatctcgagggagtcgtggatcccgtccctaccac

SEQ ID NO: 65291 - DNA, 1542 bp, Zea Mays
ctggggagatatccttttacagatcatgtgagcttatctagatctatttactttcgctactattgtggcatcaagtgatctactatccggttgcatgttggacgtgttactcagaatcttgttggcttctttgcaatacaagcacatagataataccttgatgtcgtgctcttaggaatcctcctagctgagtcatgtttatcctcccggtagcacttgcttcccttgaggctcgacccaatagcacatcttcgcggacgacttttcgggggtcagttcaagtggcccatggggcgtatccatgggacaatgacccatggtatatctatctcccacaagtccccgaggctcgagccaatttctgaggataattggttcgagactccaagaatggttgggttacttttctttgagggcatatttcttctttctctctcttttcgacattctgtaggtgcacccaatggatgtagcccccgagctttgagctgatttatatatttaatcaactcaaaggtcccaagatcctgtcattgtggtattcattctatttctctgttttgtaggtggatcgtgcttcaggcccgatggcaatttggcaactgactttggcttgagtgcgacttggccgactaaatgttaacagactgaagccataccaactaaaccctagtccgagtgcatctgaccgagagcttgctaaggccaccgactgaactcagtcgatggaggtctagttgactcagggttgaccagtaagcttatgccaatcttgagtttgtcattttgtaggactgccatttgatatttcgctgattgcgttttccagaaaatccaatatttgcacccaatgggtggatgtgtacgccgtcttgtccaaaaaatagttgcttgaggtgacagggcgtaatgatgcgtatgagtggttgatttactgaatcctcgtgtcgtgttatgccaaagggtggcagaattgtgcagctctcggaaatttaagcatctcttgaaggctagcgactgttcattgtatggccataataccaaggggtgcccctttgcttccttaaataggccatcgagtgctgctggctcctctactcgcctttgcctctcctttctaatttcttcttcccttcctcgaaaagcctggatggtaggaaaaaagatgataagggcagcaagaaggccaagggcgagaagaggaagcgtctccgactccctcgtcggaggacttcagtgactcagagttctccagtgaggggactcctccgctttcctctaggtccccatcatttgtctgcacggatgactcgatggggttgtccctgtgggagagggcgtacctccatggtctcaagcacgccggtctcgatgacttggaggaggatggggacgacgacaggtacgaaggcggtgatgaaggcggcgtgaccgacaaggatggcggtgacggcgacagcggcgacgtcaacagcagcaggggcagcaacaggggagatggggacgacaggaatggcggtggcaaaggcgctaggagttgcg

SEQ ID NO: 65292 - DNA, 445 bp, Zea Mays
ggaatggagtgtcactgctgctgggcacagattcaaagacacctgccaagtcgtcgcccgcaaggcattgagggccctatgtcagatttatgaagaagaagtggctgacaccccgctcagattatttccgccctttcagagaaaccgtccagtttggatggccaggatgcgtgcattggaagggaagcagctgcttgaggatgaccccacagtcgtgcacctcactgcatacctgctcaccctggatgcctagtatgatttcttggctcggcaccaccgtcagatgattgcccgagcagaagatgcagagaagctcaaccgtaagctccatgtggatctcacctcagctcaagctcgtgtaactgccttggaaagtcgtgaagccattgttgttgaagccctaaagcaagccaaggatgagcacgtccagaagttgatggatgcc

SEQ ID NO: 65293 - DNA, 343 bp, Zea Mays
gttgctggtaagtcaccgagtagggaggcagaggtggttcggagtatgcctgcaacgtggcggtgaggaaaggggtgggtccatcagagtagaggcgggttggcatcgtcaaattagggagagtattgtatgcggtggtcaagcgagaccttgttggcgctactggagtacgacggcggaaggctcggctcgtcaggagatggtgcgatgaggtcaaagcccacgcgctgaggtatcctcagtcaccgtaatcgtggggaagtggttgtagccgccgtggctcgaaagaacccttgcatcatcgaaaggtgcctcaatttcttcacattttgcttcaccatgc

SEQ ID NO: 65294 - DNA, 336 bp, Zea Mays
cttgggagtacctagtgttgttcacttatggtaagtaccttcattttataacaacatacctatccttttcttgaatcatcaaaataagaattcgatggtgaattctcttcaatgggggaggaatataataagctacaaataaaataatataatcaaatattggtatgtcctaagaatggttggagaccatggatgcgtacacctcatcttgatgattttgttcggttgttaacttgttccatttggattctagatgagttgtttttggcatcatgaaatctgagtcgttcgatgttagggttgcaaaaagtttctttttctctcccttagtcaccg

SEQ ID NO: 65295 - DNA, 286 bp, Zea Mays
gtagatgttgttgctttgacaagtactagcaagtttcgcacctcagaactaactcggctgcatcacttttcgccgtcggccaatagaatcctgacctgaagacctttccgactagtgtccgggatgctgtgtgtattccacattgtccagcatggacctcatctagaagtcgcttcccagtagatgagagaatgcatttcatgaggacgcctgatgcaccccttctatatagtgtctccccaatgagtgtgtagtgagctgactgtctggcgatgcgctcggccgc

SEQ ID NO: 65296 - DNA, 657 bp, Zea Mays
ctcttcgacagagtaccgataaccttcgctctggttcagtctcggagacaacctaagctttcatcgtcactaccgccgaagagtagcgcccctggttgatacccgcaggatatggcatagtctctcaactcttctttctcagcctttgacaattcttgtccaattaagttttgaaagttgaaattttcttcttccgaagtatcttcggccgtctccttctctttcccaggcactgtgccatggtctcttcggcggctgcagcagcttcttctgcggccatgtccagaagtattttatcaatattagagagtgtgctttctaaatttgcatcttcggccgttgcagcttcggcagttgcagtttcagtaggtgcagcttcgacagttgttgcgccctcgacagctggtgtctttgacgccgaagctggcggtggtgtttcttcaatggcttcagtcacagtaataattcttcgttttttcggcacagcagacttcttcgttgccgagggctccttcttcttctataaaagcttcgtcagatgtggccctagtggacttagcttgataggcaagattcaatcattacctttagaatttcttccacgttggcaccagaaggtgttgaaggagtttcttcttccatatcagtcgccttctg

SEQ ID NO: 65297 - DNA, 745 bp, Zea Mays
agaggacacccacgaagccatcgtttttgtgcctttcctcatctgaggacttgccctgcccgtttctccatttttccatggcctccttgatttctacgatttgaatcttacacatttaaatcccaactctattcttcaaattgccatttttgtgcacctatgcgaggcctttcttggaatcattcctcactttgggctctagaggtatctttaccactgtcgacccggtatggccgtaggacagcatcagcttgtcaatggtgccagtttggagcttcgccaagggaggaaagtagaataccttgatatccccctcaaggacaacattaaaagatggtgccttgagtggtttaccatggagaatcacaacaagtccctcccccttgatcagggaggcagcccgacattcgcatgcccagctggacagactcccccacttatttagaggtagacgaatccaaggtgctgcttgctaagatttgctcgctgaaggacaaaggcctaactgctgaagccgtggtcgttgactttgtctttaagaacatccaacctctgaaggacatagtctaccctgcttatctgtacatcagggtcaatgaccctacccgaattaccaacagacagattcccgatgaggacctgctaatccgacttgatctgatgctaagtggaagggtttcgaatgttggtgccccttgtcttattctgcttggaatctgcctcctcagagtcccttttctgattt

SEQ ID NO: 65298 - DNA, 311 bp, Zea Mays
atatatgcaggcttgtcacattgttaacataaccatctttcaaaaccctgttttggctctcagatctctgggtggaagtcattcgcccacaatacatgcctttgaaatatgttgctttccatatcttccttttctgccacaatgcaacaattgcagggtgttctcttatgccacattcatccaccagcttattccactccacctcaaactgtgtgggccccagaggatagtttatcagggactgcagcttctcctttagattattatcattgtgcaatttgtacagctcctcgagctcgtaatcctatgtt

SEQ ID NO: 65299 - DNA, 290 bp, Zea Mays
gcgatttcgtggaagaggctgaggccatacgccaggatttcggggtggaatttctcaccgacgggcgagtttcaccttacggtcgcagatccttgttgggaattcacagcaccgcacaatccttggtaataaactcctcctcatgctcagtatatcatccgcaatgcgtagctaggccgaattagaaactggacgtccgagtgcgcggattggatctccggtcacgggcgccgccgcgtggggtttctctccgccgtagctgtgcggcgaggtagacggcaaggcgtggg

SEQ ID NO: 65300 - DNA, 912 bp, Zea Mays
cattaccaaaaacggtaaacaaagtcaagccccggggcggggccgggtggcgtccctcgacgacggcacgcgcaaagtggccactaattcccagtcatcttactgctggtcggcctgcttcgagcccgtccgtcctcttttagaggctagctagaggccggacttcctaattccaaagtgataagagatgagatcaaaaggagcgtgatgatgaaaagcatcgatctgccgtcgtcctttgctttcacttttctcccctgctatatatgcagctacgtgctcgagcatgatgaaacggacatgtttttccttcggacgaccattgattgcgttgcgtgcgttttcggtggtgcgcatatatgcagcaggcggcggtgtgtcccaacagctctgtccatgcgtgcagaagccttgtccatccatccatccatctatccatccgtccgtgcgtgcgtgcgtgcagctttattttttaatttccttgcaatcaaaacttttgctgcttaagtgatccactgacgcctgtgtatgtatgcatgtagtgggttgttggatgtgcttatctgtcactagatggagagaggattgaccaaccgccagtttatttggtggaatcaaactaacgtacacggtcagacaacgctgatgagaatctatgtcgtcgtcgaccgtccatgcatatccaagctcagttggctagctagctagctttagttgtttgatgcattactgtctcgtgtgggccaactcaacgtgtcaattgtgtcgcacgggccgggtgtccaggcatctaggagacacacacatgctacgtagcctgggcttttctccttgagttgacatatgcatggactagtataagataattaaggctgatgccttggagaacttttatgtaaagtgttctcctct

SEQ ID NO: 65301 - DNA, 559 bp, Zea Mays
cggcaacagaaagtcccgctaagctgaaaaaacggagaattatccaagtggccgatgtcattcatcagacaccgccgccgacatcggcgtcaaaagtaccatttattgaaagcgctggcgctgccgaaaccgcagccaccggagacgcaaccaccggagacgcagccaccggggccgaaggtgccgaaaccgagaccgccgaagatcctaatctagaaaccacacttggtgatattgataatatgcttctaaaaatggctgaggaagaagctgctgcggccgcggtggacgcaacaattgagaaaggaaaagagcaaattgaagatactttggaagaggaaaacttcaattttcaagatatactagggcaagagttatcaaaagctgaaaaagaagagctgaagaaatatgctgtatcctgcgggtacaaaccaggggctctgctatttggcggagtcaatgaaggaaagctgaggtgccttcggaatcgaaccgaggccaaggtcgttaggactttcttgaagaatgttggcctgccgaagattgaggcggacctctg

SEQ ID NO: 65302 - DNA, 732 bp, Zea Mays
acatatatttagagcattggctcatgaatttgggagatatgtctaaacaacacctgcatggtccttcccattcaagctactacctccaaatggagagccatgatgcaaacaacaatgcttgtaacactatgttctcatgcctcttaagttggatcgagttcaacatcttgctatttttcaaaagatttggtctaccctagagaaattccatgagggtaatgattatgtcaagaccagactcctcaagatgtactaatgagagtacaatatctttttagtcgattggggagtatgttagttccatgttttcgtgcttttgttcgatcgtgaaaaaggtgtgcacaaacaatatgcaactaccctatgatgatcatgagagtgctctcaagttgcttcacacactagattagagggtttgggtggtgaaaatgtctccgctatcattgaggtgccaaactatgaggctcgcaccatgtacaagctactcaacaagcacaaattcacagatattgaccaccacactcgagccaagattgagaatcccagcgcacccactttgacccttatcttatgtggtggtccttctttggcgaacctttcacttgcaatgtttaatttgtcctctttgttgtctattttagaggagcggattgagtgttttgaggacaaggagttggtgctcgttgctagtcgatttgcgcagtttcacaacaaccgcatgaaccaacgaca

SEQ ID NO: 65303 - DNA, 284 bp, Zea Mays
gtccagcacggaagcagaatacagagcaatgacaaatgctacgactgagttgatatggctgcggcatttaatcgcggaattacatatcttaagtccaaaaattgcttgtctatcgtgtgataacatgtatgccaagtatctttctttcgacccagcccgaaattcaaacaatacggatcttttcaggtttaggctacgtcgggcggtccgagtgtacacctatacttccaacctagtctttcatggggcatgaaagatattgaggtggattaccacttagttcg

SEQ ID NO: 65304 - DNA, 421 bp, Zea Mays
aaacaaaagacaatatgaaagctcgaagagatctagcaatgctttgtgaccgaccaacccaagtgctcaatgccaatggtaagccgccacgtgccttgttctgtcttacctctaaagacaagatcgaggtaatgagatggatgaaaaaaattaaattttccgatggatatgatgcgggcttgaaaagagctgtgaatttgaaaacgggaaaactaactgggtgaaagagccatgacttccaaatattaatggagaggattatccctgtcatgtttcgtggttatatgcccgacgccatgtggcaagcaatagctgagctaagttatttctataggcagatctgtgccaaagaaataagtaaaaatatgatggagaagttggagaaagaaataacagtgttgttatgcaagctagaaaaaat

SEQ ID NO: 65305 - DNA, 347 bp, Zea Mays
aaaaataatcttcatatgtgtcagagttagccggatcataagtctcatcatcactatcaatcatttaatagtcaacaccatctgaaggcacaagttcttcattaatgtcattgcctccaagtatttctaagtcattctcattttgcacctcatcatcctcctcatcaacaaccatttgaatatctacttccattctgatagcttcggtttagtctatctcaaatcgtccttctagtcgatcttcttggaagaactatctgtcatatgtgtctgggtctaagttatattcatcatcgtttggaacaggtaatttaccatgcagtgataccttatgcacaacatcccaa

SEQ ID NO: 65306 - DNA, 600 bp, Zea Mays
ggccaatgaattccttgttggtgtcgaattgctgccgcaaaccccccaccgacaggagcaaccgtatctgcgcaccggctctcgatgagaactctttcccctggttcgttatcgtctccgctaagtatagtccacacctggtgaaagtctatggcgggatcgaggtttggggcatcaccgatgatggcgtccgcggtgtgggcggtggcaccaccatactcaacgagcgtggggtggaagacgagtggttagccatcgatcggctaacggacaacctggattagatcaaggataccagttcgtctcataatgatttagcccttgatgtgtgatcaggtgggcgtgatgtggtgtagccataaatagtttcgggacagttggtttcagatcctgtgagcgggattgcataccggttcacttttagtcctcaccatacatcgctgatccaacagtcgaggcacgcccataccccttcgccttggcatatttgctaaagagaccctagattcctaggatatcaacccgtcgtccatacctgttagaaaataattataaccgagccctggaatatgaagtttaacccctatgcttcctagttat

SEQ ID NO: 65307 - DNA, 426 bp, Zea Mays
cccagtcatctagtcatgaaaatggaaggagggtgtatggatctgttgctactgcgagtttgacatttgtattgcagagtatctaatgcattcgattaccaatgtagactgatttagctatgtaattaatgaaaaatggaagaagcaataccagtgccacagaggtatacaaaatatacttgtagtgtaagtagatgttgtaattaatgaaaggtgtccaaatacctgaaaaaaattgaccacacattgttgaactgaataaatttcaacagaagtagactggtttagttgtgtaagtaatgaaaaatggaagaagcaattgtcccatggtcaaataactgatgcagattggtttagttgtgtaagtaatgaaaaatggaagaagcaattgtcccatggtcaaataactgatgtaggtatgaacgc

SEQ ID NO: 65308 - DNA, 520 bp, Zea Mays
attgcacacccaaagcaaatacaggtccatcagcatatccaatgcaactattttatgtccactctcttgtgtttgccctatttaaatgcaccatcttgttccactattttatattttgatgacaaatttcgttgttatatttataggtatgacacagatttttttcatcccatattaatattatttggcctagactatctagcttgtggaagtcactccaggatgaccaaaaggacgcctggatcacgaaccaaagaatatcacccagcaagcagacgaatatgatatagaagtagtcctcgatagcaaaacaaacctgtatccacggaggccttctcgacagtcagttcacggacgacatcgatatcaacaactctattacaacggtgtctggtggtagggaagagcaatgagggccacaacaaaaaagagggagctagcgatatctcggatccaggtctacaaaatacgaacaagagacagagaggatgaggaatcagctaataaaggggaggaagac

SEQ ID NO: 65309 - DNA, 352 bp, Zea Mays
aagagagcttaaagcactcatgcctaggacattgttttggatcccattgcaatctataaaggcaagataggtgtcgacacatttgtctcccacatttaataatgatcttcgtcatttcccaaaaacaaaagattcattgtttcgtattcctagcacaatgaacctcttcgtgaacctcttcgtgaggcaaatcaccagcagggcgagttcatcggaggagagttactacagaccacgtgaatctacaatcagaacatatgctttgactaaggccgatggatcatattcgcaggcgtccctgagaatagatcaaatgccaataagtcaaatgtggatatgatattaatcccgg

SEQ ID NO: 65310 - DNA, 420 bp, Zea Mays
gcgctgctctgttccaacgagcagctggcacggaggagtgccgaagtggtggacttgacgtcccggtgcgagggattgaaggaagagggtggggccattcgcgagagcgtgcgtcggctgagggacaaagtccgccgcttgaaggcagaggcggaccatcgcgaggaggagctgcgacaaatgaagggaaaccttcaagcggtgacggtggagtgggacaaagcttccctccccgttgactccctctccaagcacctagaggccgaacggtcggagggccgggccttgaaggcccagataggaggtatcctaccgaagccttgcctcattttttgggttcgatctcttttcctagccatgacttgacgtccttgtcctctccttaggcctcgagaaggatctagagaccacagcccagac

SEQ ID NO: 65311 - DNA, 514 bp, Zea Mays
aagacttcaaggacttctgcttctccattggcaccaagcttgccttcgcctcagtgtaccacccacaatcaaacggcgtcgtggagcgcgccaacggcaagattttcacggcaatcaagaaaatgctcctcgacgacaagaagggtaaatgggccgacctgctacctgaagcagtctgggcactgaacacgaccgagtgtcaggggaccagattcactcccttcgcctgctatatggatcggaggccatgaccccgcaggaaatcaaacatgggtccccgcggacaagcacttcagcagtacccgacgttgacgagcaaacctccaaagatctcatcgacggagaccgtgtctttgccctccaggccctcaacaaataccaagcccaaacgaaggcctggcgcgaacacgcagtcgtcccaagggaattcaacgaaggggacctcgtacttgtccgcacaacccggacagagtcacggggtaagctggagccaaagtgggaaggaccatttatc

SEQ ID NO: 65312 - DNA, 1043 bp, Zea Mays
gtatgaaacctcctttagcaaaaaagcttcagcgatgcatccttctactctagccttattttgaaccatgcctcgcaggtttttgagtgcacgttcaatgtgatacatccacctatattgtacaggtccatcaacctttgcctcatatggaatgtgaataagtagatgctccatcgaattgaagaatctaggtgggaatattttttctaacttgcataacaacactgatatttctttctccaacttctccatcatatttttttactttttttggcacagatctgcctgtaggaataacttagctcagctattgcttgccacatggcgtagggcatgtaaccacaaaacatgacatggataatcctttccattaatatatggaagtcatagctctttaacccagttagttttcccgttttcaaattcatagctcttttcatttcaagcctgcagcataaccatcgggaaatttaattttttttcatccatctcattacctcgatcttgtctttagaggtaagacagaacaaggcacgtggcggcttaccgttgtcattgagcacttgggtaggtggtcacaaagcattgctagatctcttcgagctttcagattgtcctttgtttttcaaaatgcatgtaggtgtgtatgagggcttcaacaacattactttcttagtgcattacatcaatgttgtgcacaagaatcaatgacgacatataagggagctcccagagaccacatatatgtgtctagttgtggtccactccgaatccttcgtacttgtcccccttttcatttaggacaaggttattcaactgagcatatatttttgctgcgttaagacgtttaggtggttctttggtgaccacggtgttctttataaagtttttcttatgctcctaaaggggtgtttcctgggcaaccagcgtcgatgacaatcgaagtaagtgatctttccaccatgagcaagacggaagcaatctgtatatgaaccgcaatatggacatgtcaatctatcatgtgtactccaaccggtaaaaat

SEQ ID NO: 65313 - DNA, 391 bp, Zea Mays
aagtggggaaaatgtctaaaccctagaataaccttaattaggccatttaagtaaaaagggggaaattggtaaaaagaccatgaaaaacatggaatcatggcttaggccaattataaaatttgaaatacactaattaagctacaataactattagaaaagtttggccaaaataattgtttaaaatccccaaaaaggccatgcaagtgggagctctctagggaaatctaaaaattcagatttctgaatttcagccctcacctagaactcgagcacgttcaccttgatccctagctcaaatccttaagaccctattgacaaagttgtgctaaattaacccctctgcaacgtgtgtgaagatggcatcgaggttcgtgccctagacacgtcaagt

SEQ ID NO: 65314 - DNA, 355 bp, Zea Mays
ccttacttgatggtgatgctccccgatcccttcaattgaaccggaccgccagggatcgccgggaacacgcaccattttcttcctcatccgcggttcacgtgggcagaaccggatagtttacttaatgagaaattaagttgggggaatcagttggggagggttcaatccggggtacgtcgctcgggggcaccggtcgttgcgtaaatccgccagtgcaacctcaccggagttcattctccgtgctaccgtcgtcgtggacttttccctgcgaagaaataggaatcggaggtcttttctgcaaacagtcagcgacccagagcaacagtgaccgaactcacttctatttagtccaaac

SEQ ID NO: 65315 - DNA, 542 bp, Zea Mays
gccctcagtcagtcattgatgtgcaccattttgatgccataagtgatttgtttatgtcttccatcatagtactgtaaatctgattcttagaattcagtcatatatcagtcatcatggcctcatatgttctcactcaaacaaaaacggaagccatttaggagcaacagtaagaaccattacaattggttcattatgtagtacttgaaatccacgatttctattatgaaaaaatacagccaaatttgagttaatgatgattcagaccaccttggttgaggtaatgatgtttcttccaaaagatttgtttatcacattggatgggttttatggtagtgccaactgcccacatatataaaaaaactgggaaataatgctaaaggtttccaactttaggtgcaaagggaatttccagaaaaattgggaatgtcatcaataataaccaaacaatacttataactagagatgctagaaacatgcgaggtccatagttcaccatgtattaagccaaatttatgttgaggcaccatgagagctagatgata

SEQ ID NO: 65316 - DNA, 700 bp, Zea Mays
attgctccgtttgtaaggtatagtggtcaccctaagtcgagtgagcgtgagcatgtttcaccgtcttaagtcgtcgccgacttaagctgattgctccgttagtagggtatagtggtcaccctaagttgagtgagtgtgagcatgttgcaccgtcttaagtcgtcgccgacttaagccgattgctccgttagtagggtatagtggtcaccctaagtcgagtaagcgtgttgattccgagtccaaacgaatcgaagtcagctgatagtcaagagtttgaatgcctttgagaatgaaaactttcttgatggcggattctccaattacagagtacaatgttgatccgatagcttttgaggccttgctaagggtaaaactttctaagatgctctatgttccatgaattccccactttcgtgtcatccatttgagtaagccagtatgatcccgactgagtgacctctgacacaatgaatggcccttcccatagtggtgacagcttgtgtcgtccttcccccgttagaattcggcgaaggaccaagtctcccactacaaaggatcggtgtcgtatggctttatcatgatagcgcctcaaggtctgctggtatctggctgactgaattactgtgttcaatcgctcttcctccagcacatcaatatcctctagcctggtagcttctgcttcaactatgctttcgaagac

SEQ ID NO: 65317 - DNA, 572 bp, Zea Mays
ccacaattagcaaggtgctagaactaatttcatatcaaaatagaaggtgcaacaaccacgtttaggttagttggagactcaccaaacggtatgctgtgaggcggaggagcacaagatgatatgttgtgaggcgtagggtctcaagaacaggacgttggaagtgttgctgctctagctcgtggttgttgtggtacgatgtgcatagggctggcatgttggcggttgggaacgcaggcgagcgacgatggcaggtggataaggttatcgcatgcgtcgaacgtaggccggcgagcgtggaaggcgcgataaggttgttgggtaagcgcaaaatgcgtaggtagcgagtaggtgaggatggcggtcgcggcatgcacggacgcgattggagcagacacggcaagaacggagcacggtgtggatttcgggaggccgcggttggagcgcccgcggggcgtggatggcggccgcgattacgggtgggttcatggcgagcggaggggttgcgagatttctaaggcgctcgggtcggttgcaagctccatggtaatggaggcgtggcggagacgacgtgg

SEQ ID NO: 65318 - DNA, 601 bp, Zea Mays
gaatgtgttagccaccaagatcttgaggcaaacaacaagctcctaaaggagcaagtggaggagacggtccacaagtcagtgcatgatgccttcattgacatgaaccttggcaagacttacgagaggctggatcgacgattgtcctagatcgttgatacacttgctgtgttggagacgcaacaacaagcaccgccaccaccacctcctcgtccacgtcttctcgatgatgcggtgtttgatgaaaaaggtaattatgatgaagcggccaccagagatttgcgcctacgtcgtcgtcttcatcaaaacacagaaggtatgccacaccaccagcaaggtaataacaatcatgctcctaacgacccttatgctaagattaaattttctataccatctttttcgggtcattatgatgctgagggatatcttgattgggagatgacgatagaacagaaatttgctgcccaccttgtacctgaacgacatcaagttagacaagccactagtgaatttaaagattttgctattgtttggtggactggtctagttggggatggtacaacacctacgacttgggaagatcttaaggtagctatgcgcgata

SEQ ID NO: 65319 - DNA, 1033 bp, Zea Mays
tgccataattaaggctagaaattccttctcataaatggatagttgcttattattcatacccagggccttactcaagaaagccaatggtttgtgctcctgcataaggacagctcctatgccttcatcacatgcatcagtctcaaccacaaaaggtatctcaaaccttggtaaggccaggtgtttgagtcatggcctgcttcagattttcaaaagccatttgagcttcaactgtccaaagccataccttcttgccttgaagtaatactgtcaagggctttgccaaagtgccataatgccttacaaacttcctgtaatatccagtcaaaccttggaagcctcttaactcagtgacagaagtaggcacagaccacctgaccatggcgtcagttttggatggatcagtagcaaccccttccttagaaataatatggcccaaatattgcaactctgcctgagcaaacacacatttcttccttttgagataaaactggtggtgccttaacacattgaaaacttgcttcaaatgttgaacatgatcttgcagtgtagggctgtaaatgagaatgtcatcaataaaaaccagcacaaacttctaagaaagtgttctagaatagagttcatggcacactgaaaggtggtaggagcatttgttaacccaaatggcattactctgaattgataatgcccatgatgggttttaaaagctgtcttgtgctcatcttcctctcccatcctaatttgatggtacccagctgtcatatccaaactggaaaaatattgtgcctgctaattcatctaaaatctcatccaccaaaggcattggaaacctattcttcattgtcatatcattgagtttcctgtaatctatgcaaaaccttcatgttccatctttcttctgtaccagtaatactggagaagcaaaagagctcacacttggaacaatcaagcctgctttgagcaactctgccacttgtctctctatctcatctttgtgtagtggagaatatctatatggtctggcattcactggaac

SEQ ID NO: 65320 - DNA, 374 bp, Zea Mays
atatttagatgaggaggagtcaaaagtagctatgggtgaggtacatgagggtatgtgtggcacacatcagtcagcccataaaatgaggtggatgctaaaacatgcagggttttattggccaaccatgatggagtattgttttaggtatttcaaagggtgcgatgagtgtcaaaagttcggggatattcagtcagcgccggctagcatgctgcatccaattataaagccatagacatttagagggtggggtttggattttattggtgaaattcatccatcttcatctagagggcatcagtttgtgttggtggctactgattattttactaaatggactgaagttgtgcctttaaaaaatatgacacataaggaat

SEQ ID NO: 65321 - DNA, 1047 bp, Zea Mays
ctacatttgtctctgcaatcacatctgcaaatatatctgacacaagcctatcaatatctgacattgttgtttcggctgcattagcatctttggcttcagcagcacctttagcttcagcttcggcatccgcaggaatcgttgttttggccgccgaagctgagggcggtgtttgtttaatttcttccattacatttacaattcatcgtttcttttgttctttaactttctcctttgtagtcgaaggctattctttcctctataaaaattttgtcagttctgatcccagaggacttagcaacttgaagggcggggattcagtcattaccttcagaatttccgctacttcggtggcaaagggcgtcggaggagcttcttctcctgtctcatccaccttcagctcagaagagggcgttgtgtcaagcttttgctttttagagattgttgccttcggctctggagctgtttttgttttcttcaaaactttttcatcttccttcactagctgagcagcttgcctactcaggatgttgacaatcctttttcctttcaccccttcggcccctttgtcaagcctctcataatccgggtattcgaagtttaatgcgtccatcacctgatttagccttcgtttcgaccgggtgccgaaggcagcagtcattaattggtcttccttcttggtgtagttgccaagaatttcgttacacatcgtttcaatcatttctagccactctttacatggcttcttgaatttcttctcaaatttaaatcgataagggagccgaacaagttcgtactcccccctcctttttcttaggcattccccagccgctagaggtcggaaatattctatttgccaagtactcttgtactagatctctagtgctgatttcggtagctaccactctgaattccacttcggctagctggcatggggagccaagctgcatgtggcacaagggccttgtcatcccgaagcttaatttcaatggactcatgaccatagtcattagcttctcccttttcttctcatctgcttttatgtaaaac

SEQ ID NO: 65322 - DNA, 558 bp, Zea Mays
gctgatggcatttgtaaaagagcacgctcagtgagacactcatccagtgtgttgtccgactcaagcagtccccttctctctgctgcctcacgaaaagtcggtagtgtgacaccatctactgaccttagatctacataggaggtggcgcaagtcacgtggtttaggagaacacgaagatactagtgctccccctcgaccggatgagcaaagactattctactgacatgtctgcccgtatctcgtttcctccgttgccatatttttcccttatcactctgtcgaatgtaccactccgggaagtcacgatacaggatggcccgagcctcctcatatagcctatgttgtgagcattgacctatcagcacctgaacggttgatgactcgctcgaccatttgtcgctcgtgaaaatccaccatgtgcatgtttggagatggatctgcaactgcatcataggtggatagttttgactaagctcaaagtcgtatatcctccatatggattctagaggggttacacaccttgcatctctatactgcttgatctcatctacatcatca

SEQ ID NO: 65323 - DNA, 448 bp, Zea Mays
cattgacttgttatgggctggtatggactgtatggagttgttatgtagtgtatggactgtatggacttgtttggcctctacagacttgtatgaactttttatggacttgtatgacctctatggacttttatgtgcttgtatggacttttatgagcttgtatggaattttataaacttatgtgcacttgtattgcttctacatgtgtatatgttggattgatataaaacaggggaaactcttcattgcctcctttgcatccgggttcactttcccttccggagagcttctgggttcttctccattgcctcctttgcatgacgtgcatgctcaagcttcttctccctctcctccctgtaatcagcggcacgtctcatttccttctctttaatctattgttgccccaccgcaagctcctctcgtctcttgtttaccctctccttgtcctct

SEQ ID NO: 65324 - DNA, 961 bp, Zea Mays
tgagcccatacgtttatttgcgatggatcttcactaaataaaaccaaaatggagcaaatcatgcaccacccacaaattgatagttttgtaaaactctattactctataagatcctattgtagacgtccacacacatggttggtgcacggttctgcctcgaaatcctgctgtgctcaacgacgatgtgccgctctccctaaaatcctccatgcccccgcacctgaaatccaaatcagagtatacgatttccttcccctcccagaaccttccatcgacgctacaccgtgatcccctccaccggtcatgaccaaaatcttcctcaggcgacattcaaccatccccttccatcgacgcaagccccactcaccggtttccccgcaagctgcttccatcgttgtcgcccaccttccaacgatggagcaacaactcctcaacatccaggttgttctccattacacctccccgcaggcagtccacaatccgcgaacgcaatccgctgaggcagctcgccctgcgcagacaggtcgcccttccatccatggctccacgcaagcagctctcccccttcctccgcgcagcgccccaatccccttcctccatgcaggcagtgtgctccctacacgcagccacgcgccgtttccgcaaaccgcatgttgtccccttcctccgtgcagcgtcgcattccacattctgccccaaaaatctctacccgctcttcggcgatggaagggaatcaattcagtgatggaaggaggcacagattgcggattacacgacctcgttcaatccgtcgatggagggaacgtcctcggcgcccccaaccaaactgcgactattaaagaaacacgaagggagcacccaatttgtgcggagacccatcccgtgcgccataatcctcgcatcttcaccaggtacccgattcattttagtgccccaatcctcaattctcttatgcacatgc

SEQ ID NO: 65325 - DNA, 655 bp, Zea Mays
tcggagtgaaaaaggcaagtttttaggttctcttgtgtcaacgaagggcatataagcaaatccaagaaaaatcaaagcactacttcagatggagccaccaaagtcaagaaaagggctcagaggttagtagggaggataacttctttaaacagattcatatcaagatctgctgaatgaagcttgccactttttgaagtcctgaaatcagtagagatttttcaatggggccctcttcaacaacaagattttgaaggattgaaggactatttaataaagctaacaacactttctccacctttgccaggggctcctatgttactctatgtgtcagcttcacaggcaactgtaagtgctgccttgtttcaagaaatagtaagtgaaggtgtaaaaaggaagatgcatgtttacttcatatccgaattattgaacccatccaaaagaaactatagagagatggagaaggtcctctatgtagtcctaatggcttcaagaaagcttcggtattacttctaatcccacaacattatcgtgttatcatcccaaccactcaaggtattataaggaacaaagaggctttgggccaaattgagaagtgggcagaagaactcaactagttcatcatagactttgttcatagattctctattcagtctca

SEQ ID NO: 65326 - DNA, 297 bp, Zea Mays
attttgcttgaccaacaggtgatgagggatgattgattgtctgtatctcatatagctgagtctggcttgattcttctgtttgggtatccatgtgtttcggggcttttgcttgtggttgaggtgaactactcatgtatccaaacattattctattccttttgttgttcttcacgatgttgatggaagtttctatgcattttggttcatatcccatgtctggagattgagatagcttaatctcggaggtgcccgatagtgaactcttctcaggacaattacgaaagtaatgaccttcac

SEQ ID NO: 65327 - DNA, 913 bp, Zea Mays
gtagtgacgaagaggatgttggtgatgtggtcgtggcttgcagcatcgacaatgttgtagccaaggtagggatgacgttcaaggagtgaagaggatcctcctcatcttgcacaatgtgggtctgctcttttttggaatttgatcggcactcgcgtgcctaatggcacatcatctcatagtgcatgcattgatcgctgaacttgtttgatggctcacctgacaaacagcgcgcccatgggcacacccattaggccttcatctttgccgcatatgtcgccatcgcttgatccaccaccaaaatggttttctgcttcatgcttcttttgtcttgcatcccattcttcctctgtgaggtatagtcttccatcttgctatagcaacgtcagtggtttctcgtttgcatcctctacagtcctaagtcgaccaataaggctcctctatcttttcgcccaagatagctagagttgtgaccatcctacatcagtggtatagtcttccatcttgctatagcaacgttagggtcatgatcactgacatttatcttgtttaccaccgcctcctctatcttttcgcccaagatagctagagttgtgaccatgccttagagtcataacaaaaaatctttgatgctctcaccgtccttgaacaccgacagattgaacgatcatcaatgttatgtgccacctattttcatgtggtcatccccgacacacatctctgagatggcatctaatgcttcctttgtcgtctccttgttggcgatcacgtacaccatctcaagtttcactaagaaatagagagcgttaaacatcatcatctcctcacgtgtatcattacatcccttctcaatgatcttccacaaagctcttgccttcaacttcacctttatcaagagcacctggtatgagtaatt

SEQ ID NO: 65328 - DNA, 531 bp, Zea Mays
cctgcggccaccgcccccgacgaacaccggcgaggccatgggctccatgctacaaatcctggtgagaacctcctcctcgaatctgcgtccatcttctaaccgcatagcacgcctcgagcgggggagcagagaaattgtgtgttctggtcgtgcgccgccggctgtgcttgagcgccaccgcgcgtggccggtgaagtggggaagatagccgcgtgccgtttgatccgtagtcgacgactgagattagcagcaggttacccattggcggccattgaatcgtggccgttggttggatatcgtgggaatcatagtgatctggacacggggaatttggagcgtagattgcgtatcggaccgtcgggatcaagtagcgatccgtttatgtggtcgatctaatcggcgccgttgatttctaatctggcgtctgagattcttggataccccttcggccaccacgttttgcttaagagtccctgttctttttatgaatcaacccgcaatcctggcgccagtagttctgagtcttgagac

SEQ ID NO: 65329 - DNA, 328 bp, Zea Mays
agcaacacaaacagttgacagtactcataaaaataacacagttgacagcactggccagtggccactgggcacacaacacatggcctcgccacctaggtcctcgggcagttgggcttccaggaaccagcacggcagtttcagtactcataataaccaggattattatacacagcaacaggcaacaggcagtttcagtactcataataaccaggattattatacacagcaacatgcaacaatagcagattagcagataaacagcaccagcaccagcccgacagcactccagtagaccagcagtagatagcagtttcagtttgcaatcagc

SEQ ID NO: 65330 - DNA, 725 bp, Zea Mays
agaaggtgaagctgggctacaacgaggtcaaagcactgcactgctagatctttcgttcgcacgtttgtcatctattgttgttggatcttgtcatcttggcaacatcgtcagcttgcatgtggatggatttggtgcagggcttggcggtcctcaaggcctccctgcagtccaagacggtgctcacggatgtcttcatccacggcaaggctgcgtcgtctagtgctcgcgcttgaaggccaccgtgctagcgggcgcgactggctcctggcgtgaacgaaataagtaaggtttggtttgctcttttgtgatgggatggatcaacttgctgcgacgacgtcgtccggccgttttagccttttggtttgggtttgtactgaactgatatcatctggtagcttttggttggcggatcgcatggggtcttatttggttgcgatgtcggtgccggcgtgccgcaaagggactgaactttgtacacacatgccctgttcaacgtccatggattgcttgctgtgtcatctctgcgttcgcacgccgcaatgtgtgacagctagtacgtacgtgtagcatctaatgacatgcgattacgctgtcaatgcgtgtggttatgctaatgttttgtgtgtgtagacttcgacctgttcgccatctgctgcttccagataacaacagggcacgtcgcactcttcacccaagagcacgtcgcacgcggtaggatcacaaaa

SEQ ID NO: 65331 - DNA, 569 bp, Zea Mays
gccaggtattcttgcactagatccctggtgctgatttgtttagccaccactctgaattctgctatggccagcggacatactgaccctggcttcatgttgcacaaggttctggtcatcccgaagcttaaggacagcgggctcatcaccatcgtcatcagtttccttcttttcttctcattagccttaatataaaaccactcactcttctagccagttggccacttggtgcgatagctgaggaccggtgcctttgtatccttgcgatacacgaagttatgacaaccaaaattttcatgtagcccatcttctctggccttcgtttggtaatgcagctcatgcactcggtagaaagcttcagcatttgggtccatcccttggcttcgaagggcccagatgaaaatgctaaacctaacgatggcgttaggggtcagctgatgaagaaaaatctcaaaattatccaaaacttctccaatcatctcattcaagagaaaccgtaatcctgccctgaaaaagcttttgaaaaccaccacttcgtcgtccttcggttttggagtggtttcttctccggc

SEQ ID NO: 65332 - DNA, 537 bp, Zea Mays
gaagaagcccagagatatgcagaattgactaggggcttcggggggaggtttaacccaaggcatgtcaggtagcattcacaacccacttcaaaacaaagacaaaaccagccagactcaagggcaacataatcaatcacaaggctcaaggacccagcaacaaccctctcaggacaactttgtttgccagccccaagaggaggcagaggaggacgaatattcagaggaagagtcaattcccaactaaggaagttgttcggtatgttctatggagaagacaaggggcaaaccacaaggacatgtcaggtaacaatccaaaaatagaaggaaattgacgaagcatagcaggatcaaccaaaacaagtcctccaaacttccccatactactcctcatacatcctagagtatgtccatcatcatcagccaagccaacaacctttaggatccattgctttggcaaccagtctttagctcactagatcgtgcactagcctttcataccaacatcttcctcatatgagcaacaacttccaggtccac

SEQ ID NO: 65333 - DNA, 1185 bp, Zea Mays
aaggggatgaaaagttggccatgccaccgaccagaaaaccacgcctaaggaagtcaaacgaacactaagagcgtccaacctggtaaggcctcaaactatttctattttctttatggggggattgaaaaatctgtggcagaattgtcatggattatggggttcgaaaggctgatccgcaagggcttgcggacacctcagtgaaaattagagtgaggagcagctggtgatgggcacactagtggctaggaccctaatgcgtgaagagctaagggcgtcaccaactcatgttcgagtcctaggaaggtatgactcatggtttattgcaaagagaggtagcaaaccatcgggtccagtcaaacggagtcgtcaactatatcagtcggtgcctgggagtatgaggatgatccccaaatggacccccgcgcttggatcctacgaatgtaaccagggcctcactcggtttactcatttgcaactcaccgagtgccattggtagcccatcaaggaaagcatggttcggctccccttccctcatcaccgcagaagggatgcgcgggggagagtaaaacaaaaggacaggatgaccccgctagacggatctctacatcgagtagaggctcgaggcttgccccgcatgggtatggtgaatgggagaaagtcgcatgaatagcgcccctcggtctgagaatgatcctaggaccaacaagggcataagggacctaataaccatacacgtttcaagaacaattgggccacgaaacaaagctatgggggatcacagattatttcctccaatgacaccaccccgagcacaacgtttgccacgacatcaaagttgcttgttaggagatccaagtctgctgacgttgtcccggcaggcaggccgacaacatcatgagaagtcatcaccatgacctagtgaatcctgaattccatagcctcagaaatacacttcagaacatcaaagaggcgcaacctctgattcctccctcgcgcatgaacaaatcttgtagctcgatctacacatagaaaacccagcgctttaggcctaggacctgcgataaacccatatgtgataaggagtctaaagaaagactgtgagcccagaggtcggaccaagatagactgcctgcccccgggtcgctgagaactgctagtcgtgattgcagatgtcgcacctcagca

SEQ ID NO: 65334 - DNA, 1126 bp, Zea Mays
ctagatttccatggggcataaattcatatactaactgcgtttggttatcctcaaaataataaccaattagtctgaacatgttcggatgtttcagatttcctagaaagctaacctctgcctgagaaactaaacaaaaggtccgtttaggatttggtgaaacaaatctgatgtgagatgatactgtcaaatgacatggatacagcgaaaaatgacaatttgaaggatgtgaaagatttggaaggtgccagagagtggcgtacagaatcctttgtttctcgtccgtaaactgcttgacatatacaaacaccagcacctggcttgagaacacaagaaaaataatcactttagattcgatttggctagtaaagcaatgtcgatgcagtgaccagacaacagaaaaaaaattgcgaactgagacagagcacagcagagcacaacctgcggggcacggggaagaacatggcggtgttgggggtggggtagcggcggcgtggggaggaagagggcgaggcgacgccgcacgtggtggagagcgaggaggattctttggggtccgtctgtgtgacaattgcatgcttgcaaaaggatgatttcatcgtaaagctccaaatctgtcaaataaacatttggcgaaacaaaaatgtcagaacaacatagggagaaagtgatttagaagaacgtgtgaaattaaacaactgaaacaaatggaaagctctaggcattaagaatttctcagatttcagaagaacaaataaagtttgttagtatgtattatatacatccagagtttctcctatgatatgactaaggttgtactaagaagctaagactgagtcctttgtactacatataatccttctacacaactaccatacacactttaataaatggttcttcataaaaacatcagaggaactaaaagctactgcataaaacattttttacctcacagagccttcttctaggagaaaaaattgaatatatgaaagaagacagaataaacaatagaatgatcttgttattatacatcaaattacaaaggaacccataaagtagggtcacatttcagcacaaataaggcattaagaaaaataaattgacatattaaaccagaaacggatgcaag

SEQ ID NO: 65335 - DNA, 305 bp, Zea Mays
ccggcgcgttgctcaacccggaggtcgtcgagtgtcttctgcatcacctccactgcctgggggcccgaggccatctgtgtcgcctgagcaacttgcgttgcctgaaactggcggacctgctcctccagagcccgcactttctcctccaaaggcttcctcctctcctctgcctcgagctcaagctcatccagtagtttgttccgccttgcccacatctcctccctaaaggcgaggtcctcctcttgccgggtgagatcagttgcccgtttcgcaagggaagcttccctcgccttgaggcttccctc

SEQ ID NO: 65336 - DNA, 918 bp, Zea Mays
ccaacattccgaaaaaggtggtccagggcctggatggaggaatggttctatgttaagaataatttagttgagagggaagatataaaaggaattattcaacgtcacatttggtctcgcttcagcatcaggaggccagccaccgctcttgggaacgatatagaggcatgccagagaagcttcaacactgtgtgtacttttattggcacaagagatctggttcaagaacacatcgcctacagagtatggccgcttgtgaatgaattggagatgccgaagaaggctattgccgggtctagtcagggcggcctggtctatttaaaatatagtttcaggtatagaggcgagtttgatgagccaaatgatgaatggttgagcagtattgaggcaaccattgacgaattgcttggggcctacacaagggccgaagatgatgtaatgacattggccttcgaagaccgaggcaagaaaagattgaatagcgtttttgacgtcattggtttcatataccctgattattgctatccctcgcgaaagcagggaaagaaaaggaaaactgccgcttcgaccatctctgttgtgccgaagggcaaaaagatcaaggtcttaacacaccggccaagatacattgaaacggccatagtgccaaagcttagcgaagggacatcttccactactgaggcagaacagattgaattgccgaaggtgcctacagccgagccagtcgaaacgctaaaaaatggtgccgaagccaaagaagaggcggccaaaaaggcagagctagggaaagcaatagtgctgccagaaatcttgagcccaccagcagaagcagaattgtcgaaggttgcaaaggctcccgcaataactcccaagaggagaatggctagcatgctagacgctctcatggagacgacaagggca

SEQ ID NO: 65337 - DNA, 356 bp, Zea Mays
caggaatcaaagtggtgggttttaggggctagagaaggcgtggcacgaggcacggatgggaaaggggtgacaccaagtccaactgcacgacagcgagaggcgatgaacaaataggagagaagagaatgatcgagcagtatagggtaactcagtgccaagatccatgtcatcaaagtcacgccatgccaccatcatgacccgtggcactaagacatgtatgttggatatattatctgacctaatcaagaagactgagccttagtctatcttattcctctctaatagatccatgctctaatcgagtacacaaacccttattaagttgtgaccctggtcacaaggatgccatattaaag

SEQ ID NO: 65338 - DNA, 291 bp, Zea Mays
attgcatttgctatgtacgtggtgtatcttgcttcaaaatcattcttcatagtatttatgcaatgctcaacttcttcgtccgtctttccctttaactcttcattgtctttgccgattctaaaagtgtggctttcctcacatatcagtattggattcagatacccaatccttttaccggcattagcatcgggcttggtaccgtacatgatctcttgttggtcatgttgcattctacaagtcacacatgcgtgtgtcagatattgaaaattaataacacatagatgtggaaat

SEQ ID NO: 65339 - DNA, 459 bp, Zea Mays
gtgagagcataagctgaatgtccgctaaatttaagtgtagttaggtacaaacgtgagggtattttagagaggtttggatcatggagcgtgtgatacctatggcctcatgtgtttgatagattcataaacataaatgtcaagaagattacaagtttaagtaagaatggagcattatgacctactagtctccctcattgtttagtttcagtgtgagatctaacctaatagttcataatttacctttatgcctatgcttaaatgctacacacccttagatcagatgagatgatttggtatgtgtggggtcgaatccccttttacccgttgaatcgaattctcttttacattactttatttctaccttttatagaccaaaggaggagagagagttacatgccgattggtattatgggtcccactcaatagagacccaacaacttcgatcttataatgcctgtg

SEQ ID NO: 65340 - DNA, 402 bp, Zea Mays
cggagacaacacagctcggcgaagcggtcccaaggaggcatgccctcgtcatgctccagggtgtagtaccacgtctgtgcaagtcccttgaggtgatatgacgctagccatgtgcgattggaggtcggagtgcgctgtcccctaaagaattgctccggagccgtcatacgtggcgaactctagcttataaaaacgtgggggggagagcgtcggcgcccctgtaagcagtagcctccatgccagcatcacgggtgtgcacatgttagggtgaccacgcagtcactacgtggagacgtgtggcagcaggttgctgcgaccttggaagagcagcccatcaacccccaccgtacagtgtaccactagttgtgggacctccatgcccctagcagcgctgcccgacaa

SEQ ID NO: 65341 - DNA, 513 bp, Zea Mays
gttccttcaaaatcatctaagagaacacttttctagatcatgaatgccctttgaaaaatcactcttactccccacaaaagttccaccttggttcacttcagaattgtcaaaacttgctcttcagcttcaaaaaccggttcaaccgatttctggactatttcttctgccacctctgtcctaccagtctgacagtcaaaagctgtcagaaaagtcgtgtgcagatattttttgaaaaccggttcaaccggatttgggcccggctcaaccgattttgagcccggtcgagtctccggctgagtagatcagtgaaccgagaaccccctggtggaaaccggttcaaccggttttcggtccttttctcccaacgactgctagcttttgggggatcctttaaataccccccacactctctctcttcattcacttctgcccttccacgaattcttggctgaccaacctccaaacaaaggcattcatttcacctctcacacccgaaatcgcatccccttcaat

SEQ ID NO: 65342 - DNA, 906 bp, Zea Mays
cagacttcagaaatggacagtacacttaacaagttctttataaacaaataactaaagcgaaaaaggatttagaacctcagttagttgaagtggacgtcaaataatgaaataaatatttgaagctgcataataagtgaagggttcgttagttgcatgcaatgtttactgatgtatcaaacaaaggggttctatgttaactaagtggagttcataaaaatagtaaattgttcataatacaaaaaaagtgatatgtatcaaacaaaggggttttcatgacctaataaacggtaattcgtgctttgttgttggcattacaatatgaacaatgatttgtgtaccaggaagactgagcaatgaacatcaggtctgacattaccacatattatttcagctgatggacttagggcgtggaacaaacaataagcacgccatgatgacgactatgaaaatcacaccggactctttgtgttgttgcgtatgctcgaaaaactattaggcttccacatgctctacaacttaacgacggatcaggtcagtgttaaagcttaacaataggcgatggggacaaccagtacaccctaactggcgaaatcgccatgaaaaaattaatccagctactaaatctagtacatgtacatgtaaacggtgcggtttaatgacacggacatggatttgggtcacggattgaatccgacatgaaaaaatgggaggagagaaagggccgtaccttcgacgtcgcagctcgaaagaagcagatctggtgcgcgtcgatgtgtcgccgattggaatatgaccccttgacgtgagtaccgctgacgacgaactggcgtgggacgaggaccgacggcggcgtcttcgcacggatcgaccgtgacgccgcacggcgaagctccccagcggatccgc

SEQ ID NO: 65343 - DNA, 923 bp, Zea Mays
cgctttctactaaagtatcccaaactccttgagaagatcatcaaggctagccagggacacttcctcaacgtcgaaaaagttctctatccctagggaaggtaatgttggcggggcttcttccttcaggtcagtctggcacccttggctcttgaaacactttcagatcatcttgacaggggcgagcttcttcagtttcttagcatagtccatctttagggttctgtatgcctcatgagtgttggcttcctcgccttctgccatctcgagactgtcttgaagagccaccttttcccccttcaattccttgatttgctgctctaggctttccacccggtagtgtaagtgggggcagtgggagaaaaggtcatcaaagtggttatcatgggtgtggaatatctggccatgtagattatggtagggtcatctgcattatgatctctccctgacaaggcctagagtctttttctccaagtaggggtattcttgttactaggtggaaaatagcggaggggtgtctcagagacttccctattgtagttttggcatagctggcggagggctttttgggcagcattctggctggtatctgggaagcggtggccaatggcggtgatctaaaagcgagggtgattggtgtagcttcagctttctcctaggtagactgccatggagcatttctcaattctattctcgcggtattccttccagacatactctagcttcttgtggatccccatgcgaagcgcacaactccgaagaaggtgagggaatccttccacctccgagcaataggatgtcttaaggacaaaggtgccttccatctggtagcaagagaagaagggttgttaatatcgaggaaagagagaaggttctttaagaggttaagaggtcttttcttttgagcaaagctttttaggtcaggg

SEQ ID NO: 65344 - DNA, 654 bp, Zea Mays
gtatgatcaagtgaatttgaatctgctccttacagatttttgtgtgttgcaccttcatagtttttagtcatgtttttatgaaactttgtgagctacttcttgcttccgtgctgtttttatttgacaagctctaattatttagtcaacatgtcacaagttggcttgtattattttgataactgaaagaggtatgtcacaagctctaactacgctgcttgagttcacatgttctgtaatttctcagacaactgaactgaattttggggttcgaagacgcgatgttgcatattgattttcgatattgatgtgtgttgcaggatggtggtaaggttcttcctgatttgaacggtaggatgttgcatgatgttgatgcctgatccaagagctcacacccgtttatttagttcaattcagagcttgcatgctctatgtaagaaaactgctatgtgatgtgtttttaacaaactgctacattctgaatggagtttgcatgctccttgtactgatacatgccgcttgttgttgatcgaaaatttagttttcaaactatatgttgaggacaaatattttgtaaactgctacttgtactgatgtctgcttgcactgtaatttaacatgtctttgtcgctttgcgcgcgcgtgtatgagctttgc

SEQ ID NO: 65345 - DNA, 351 bp, Zea Mays
agagtggagtgggcggtgaagcgttgtgttcttgcctctccctctgaaggccccaggctcctccttttatagtcgcaaggaggaaacccaggcgtacaggtgtttctacgttattgtcgttgtcactagtggtgcgctcgagcccagtagcagcatggtcgtaggaaaggcctttggagggggcgcgtccgagacctgtagctgcacagccggcgggatggccctggtactttgcattgtatattgtgagatagagagctgaggctgggtaaggagcacgagcaggcatccgagcccatcctggacgagacgtttttcgagtcgtagttgtttaaaacagcactcggcatg

SEQ ID NO: 65346 - DNA, 953 bp, Zea Mays
ttgctaattgaggaatcgagggtggggtattagtgctttgggacaaatctaggggcaaaaacttaggtctagtttggtcccaacctggcaatctaaacaactgggttggtaatttggtggcatataggatctgatggcgtgctgataatttaatctcactgacaggatgcgtcgccggggttggtaatttggtgttgtctagggtcttgtgacccgattaatttagccccgttggtactatttaaagaaaggtgtcggtactgacttccttgggtagggttcggtttttccatggaatattcatcatcctgcagaaccctcctcatgattgatgggagttttgaacttccttcagctgcatcttcagtccgagctcttactgtacagagatgcaactttttgcaaaccattgctgtttcccagcagtcaaatatgaaaccattttgtaagatctaatcaagtttattgcttgttgctgatggcgataaaaggaggcttcaaacaagcatacacgttatttcatgggtcattcctttaggcaaaggccatctggagttgaaatcaggcggtagcattcaattttggttgatttaatattcctactgtttctgaatgcatatttcttcttctttctttgttacatactagaggattgcacaattaactgacacaagtaccaaacaaaactttaactgacaatgggtgtaactgtgttttctcagaacatttgaagttttgtttccttttcaagtaggaaactatatatagaagaaatatttttctttaaataatagacattaatcctttgatggcaccaggattgttcattactctgaaaatatgcttgatagcatgcactggtgattttgaactggatctcaaagtatagtctcactaatgtttgcaagctgacttattagtgaataagtaaaacaatctatgttatgtgattt

SEQ ID NO: 65347 - DNA, 547 bp, Zea Mays
aggctctccacctgctcctctataatagacgacaaagaagatagagcaaccaaaataggtgaggggttagaagtagaaccatctctaaagatcagggccatggtgggtgcaccagggttctcaatcttggcctaggtctagtggtcaatctcggtggacttgagcttgctaaaaatctcgtccatggtgagagtctcatagttgggtgactcaatgatccccaagaccttcacctcccaaaccttctgatctagagcatgtaggagcttaagtgctatctcatgatcattatagggaaattgtgctttgttggcatgcatcttgatgacaatcgattggaactgagaaaacatagtgtctatggtctctctagccaactgcacaaagttcttgactctcgccggtaagttccaaacagtataatctttacattatcattaccctcatggaatctctctaggatggaccagatctagtgagccatagccaaatgtccaacttgctcaaactcagcaagcgagagacacgagaacaaagcgtttcgtgc

SEQ ID NO: 65348 - DNA, 428 bp, Zea Mays
atatatgtatatatattttcctctcgtcgagcctgttctggatctcgtgttcttttttgcgagatcaccgaaccgcttctcctcgcgaaaagcaagtcacttgcatctgccatccccgactacctcgtcgacccttcgtctattcccccggtctacccttcgtctaagtctatcccttccatcaatctcacctcgcttcatctcgtcgcgcaacgctcgtgcgtgcaacctcctcctcgcttcgccacaccccacctctatttatatacgactccttccctctacacagataggaacttcttccctggatccggatctcgcgagcagcagttaccaggtacgcagctctctcatcctcccttcgtcctataccgacgctcagatctatagagctgcagcagcggtcgccgtcctcgaagccggtcgtc

SEQ ID NO: 65349 - DNA, 376 bp, Zea Mays
tattgtggtacacatagatcttaacatatcctcaatcacctattgctaactgatccgtgcttatgaagttaaaaatggatgcttcgttactatggttcaaaggaaacaacattgggacttcagtgtcatttccatattcctcatcctcgtttactcatgtttgtgtacccaccattttctcatttgcgaattgatttgcagtcatgtggattcaatattttttgttcaatgttgctggtacagatatccatgttaatgttcctagtataagaacttagtaccactgtcgttcaattccccaacacaaccccttgttccttccatattgattacttcaaactcgcgttagttcctctgtctaacaattggacatctc

SEQ ID NO: 65350 - DNA, 554 bp, Zea Mays
tgaccgcgtacccctccacccactggcacgtggacccaactggtcaagccgggtcctccttcttcccagggttgttacgctggggccgaattcctcaccgcggatggtgcctgggagctcgccgtggccgttcttttctcggctagactcgttcctcgctccctaggtggggccatgaatacctagatagtaccacccctttgttagccaatacaagtcacacagagtgccaccatcacgtaggagccatggccaccggagagcatagcaaaactaggatgggatatcgtggtgcgtccacgtcttggcgaagcattagaggaagtctcatggcacgccagaatgcatggttggtgtcttcatcctcttcggacgggagcagtgggtgaactggcgcatcgcgggtgtgaagcttgccgccaccgttgacccatgatatcatcaccgttggagccttgctgtcgggggggcttcaccaggcttcgttgatcatgagcgttgctccgcctagggagattacgctccggccgccgggaattgttcaccggagcaac

SEQ ID NO: 65351 - DNA, 590 bp, Zea Mays
tttacgtgaagaatgacttgagttagagggaagatgtgaaaggaattgtccaacgtcatatatggtctcgcttcagcattagaaggccatccactacacttgggaatgatgtgcaggcgtgtcaagctactttcaacactgtgtgcacctatattggcacaagagacttagttcaagagcatattgcttacaaagtgtggcctcttgcagcgagtgggaaatgccgaaggaagccaccgctggctccagccaaggtggcctggtttatctgaagtatacttttcggttcagaaaccagtttgatgagccaaatgatgattggttgaatgctatagaagccacaagtgatgagatacttgcagcgtactcgaagacagaagatgaagctatggcagttgccttcggcgctcgcggcaagaagaggttgaatagagtatttgatgttattgggttcgtttacccggactactgctaccccgcccagaagcaagggaggaaaaggaaagccgctacctcggcatctactgatgtgtcgaagtcaaagaaaatcaaagttttgacacgtagacccaggcgcatcgagacggccg

SEQ ID NO: 65352 - DNA, 674 bp, Zea Mays
acggatattgcttgtaccatatttgtttttatatttttagattcggatacaaatattgttgagttgtgtctgataacatttaaatgaatgttgacatcttaaatattcaactttgagtatatggatacggatcagatactgaatgtctggactcatacggatcagatctcaacccttttagacggatcaaacttgaatacagatgtgtcatggttttagaaaggggtgacaatagatttatgttcgatgggatatgcgagcgcggactcgctctgaatggtggatcacaggaatctgggctaggaactgagagacatgttatactggttcaggctttcgccctagtccagtgtagtattgaactattgatcatagtattgttttaggacgttttacaactggtgtgttgtgtccagaaagaaggttgtctagccattttatagctcaagggtggcatttacagttgggacttgtattctactcaggggtccttgacttggcacccttgggttgatcttgccttcttggtgtcgtccgtaggtgcgtttgctgccgtgctcccgacacggcgtcctgcctcgtccgttctccatatcgatccttatagcttttttgttgtcaacattgcggtacctggcacaaagtgggcttacgatgttgttcttcatcttccg

SEQ ID NO: 65353 - DNA, 389 bp, Zea Mays
aaatcttcaattctgggcaggtggtacttgttcttgatagtaacttcattcaaggcttggtaatcaatgcacgtcctctccgtgccatccttcttctccacaaacagcactagggctgcccaaggcgaggtactcggtctgatgtagcctttctccgacaactcatcaatctgcttcttgagttccaccaattctagtccggacactcgataggctcccttggaaataggggcggtgcctggtataagctctatggcaaattcaaccttcctttcaggtggcatacccggtaactcctcaggaaacacatgtgggaattctgatactacattgatagcctctgatggtttaatctcctcaatatgggcggtgacttggtgacaacttcc

SEQ ID NO: 65354 - DNA, 605 bp, Zea Mays
taccgaagataactacagttgagctagccaaggctgaagataataaggccaaagagccataggtggaaagagtgacaaaaatgccagaaatcctaagtcctctaatagaggcaaccctgccgaaggtgcaaaaggcttctgccgtgactcctaagaggagaagatggcgaatgtgctggatgttgtattggagactacaaaggcgctgagccctgctcctgcaaagaaagtcgctccaactgaagccaaatcacaggccgaaaccgaaactaggcgagcagaagccgaagctacacaagttcaagctgaaaccgaagctgggccttcagtgcccaccgagacagagcctgccgcacctgaagaaaaggcgacagagcaaactgctccggaaaagattgagattcctgcccccgaagctttaataaaaaatgatgactacatctttcgacacgcttcggggaagaaattgtctgaagaaattattttggaagccaggcactatgcgcgaaaattgaaatatccgaagggtgccttggtttttaatgggagtagtgaagatgatttcttatactgtctcccagacaacaaagaaatatccgtttgcc

SEQ ID NO: 65355 - DNA, 516 bp, Zea Mays
gctttattgaagaggttcatcaccccgtgtggctggccaacccagtcgtcgtgccgaaggccaacgggaagcttcggatgtgcatcgactacaccagcctgaataaggcatgccccaaggacctgtatccactaccgcgcatagattagattatggactctacttcggggtgcgacctcttatccttcttggacgcttactctggtttccaccaaatccggatggctaaggaggataggaggcataccgcttttgtgacagtagatggactatactgttatgttgtaatgccctacggtctgcggaatgccttgccaacttttgtccgggcgatgagcaagaccttcggggacctgatccgggataaggtggagatttacgtcgatgacatcgtggtcaagactagggaaggatcgggtatagtggaagacctgaccctggttttcggcaagctgcgggcaacccgcaccaagctgaacccggagaaatgcatcttcggtgtctctgcagagaagt

SEQ ID NO: 65356 - DNA, 565 bp, Zea Mays
gttttaggtagaggcccctagcctttcgaataactggtaaagaagtcgcggcactattcccttgtctctctgacaatcacacttaaacacctcggtttatgtttcttcgcaaggtcaagtccccgacggtgaacggcggcgtgcgcgcttcggcgagcttgtacaggccgcagtacacaacaacacgtgtcctaacttggtctacacctaattccacccctgacgatcccaatctatccctcaattgcacgagtctagctcggagttcttctaccacgacgacggcgagactcgagggaaacccgaggtgttcccgacgactaggcgtggtgtagcttaattggcggggtcgacgagcatcataaacacatgagagtgacaaaacacgaaccagaagggtgagagcggacctggagatggctgaccacaacagagtgactcacggcggcgcggagagtggatttgggggaaattccaaattaggacgctacggtggacgattggaggcgagggctggtgctctagcttcgtaacaaccttgcagagctaacggtgcactaaattt

SEQ ID NO: 65357 - DNA, 369 bp, Zea Mays
atttaattgtctccaaaacatctaacacattaaccatccttttttcttttcggggtcactgttggacccttctggcttttttctgactcaatttttgctgaagcacttaaaacttctaatgttttcgcttcttcagtctttgcttcttctatcttttctgttgttggctcttcgaccagctctttgattcctagcagcagagttgattctttagcttcggtggccgaagaggtctcaccggcgaactcaggcactgtggccagttcaatgtaacgtggccggtgtgtgagaacctttaccctttttctcttcggcgccagctcactaggagcggctgaagtagtttcctttgcagaggaagtgttcttt

SEQ ID NO: 65358 - DNA, 280 bp, Zea Mays
gtattttcatatcgtgtacacttgttttgcactagatggacaagtctgggaaagtcattgcaaagtgggatagtagagcaacaaaaatttacacagaaatatgtgtagaagaggtgaatgcacggaacatgccacaacaattcctaaacgccgaagggtacgctaacctcataagaaagtttaaggaacgcactggtcgcacgtacacaagggatcaaatgaagaataggtgggactcgttgaagagaatgttcacccagtggaaaactctaaatgaaag

SEQ ID NO: 65359 - DNA, 414 bp, Zea Mays
cacagcgaagttacttcgcgcggtgtttcggaccaatttgggggaaattccaaattggggctatctggtgagtaattagaggcacgagcgggtggattggatgcttgactaccttgcggaaccgacggcatgctcaatttataggccccccgagtggtggcccgtgaatttgagatgtcgtggtggcggtcggagagaagggggtgcactggcgcaagcaattggtggctttcaccatggcgagctcaccgacgatcaccggatatgcataacgcgagctactacaatgtggtaaaacaccaaggcacgtggcacaaggtcacgagggagccaatgccggtgagtctatccgaagtggccatgactcaggcgggtacggcggccgcagtagaatagtggccggagttcatccac

SEQ ID NO: 65360 - DNA, 363 bp, Zea Mays
gttcaatgaccactaacaagtccattacctctgctgacaatgacccagttcgagttgaggttaaggcgcagttgcaacaagttatcgatgatagatcaccagaaggcagccaactacatttgtttgccactcatctattgattgagaaaaagtatagaggtgtttttgcaacactgcagacaaaagaaggaaggatcgcttggcttcgcaatgcttacgagatagatcttaaaaagtgcacttagatgctggtcgtccgacaacagaggcttatgttcagtattatggttgtttctgtctgtgttatgagtcttgtcgttttattgttatgagtcttgtcgtacgcttcattttcccggtgaa

SEQ ID NO: 65361 - DNA, 496 bp, Zea Mays
cggatttgtcttatagtaaagacttcgtgttgagcacttgttgtgcatatccggctgcacccttaggcggcttttgctccgatgtattatagtagagacttcgtatcgcgtacttgttgtgcatatccgactgcacccttaggcggcttttgctcggatttgtcttatagtaaagacttcgtgttgagcacttgttgtgcatatccggctgcacccttaggcggcttttgctcggatttgtcgaacgcgagggtagtctaggctacctcttgcggtgactatgtatatgtcgaatgtcgaaggccgttgatgcggtctttttccacacttatggtgatgatgcttgctagaattttttgcaggggctttttggcggtatattacatggcaccacctcgttaaaaacctcaccccccgggaggaaaagagtgcgggcctaaatgacattgtttgaagaattacaaaggcgcttgggccttggagcttaaatgaattt

SEQ ID NO: 65362 - DNA, 699 bp, Zea Mays
tggggacgacaagggcgaagctaggtgggttgtctcattctctccctagctcatcgctgagggtccatagaaagcttcaggtgtccttgggccatgcttccgctccttagagcttagggtagagggatttggatcagcttgtgaaacaccaaaaggcccatcaagcccaactgactaaaggtgatggtcaggctattcgctagtatgccctatctagtcttgattatggcccatctctagtgaaaggaaattagagaaacgtattaacatcagggagtcaatcgatggtctagtagtttccaaggcatctcctgttggctaaagatccactaccttttgatctatcaccatattttgaattgggctattgtgacatcgcataaagctagagatggagctggcgacgcttcggtagtcctaggaacccctcaacctgttctctctaaataatattgtagatccttcaatgttaaataacatggtttgccaaagttcaccggtgatagactgaacatgtggctcttccatagcagcatgcaatgaaccccacttatcttcccggaacagtgatgagatgacgagcccacccttcccttgttgcgctgcttgtcgatctgaacatagatgtggctctaggtgatcttggtcttcaaggacttgatcatcatgtttatctatgggaggttgaggtcacaaatc

SEQ ID NO: 65363 - DNA, 274 bp, Zea Mays
agtttaacaagattccactattgtgtgacagtgagagtgccataaaacttgccaacaatcctgtgcaacactctagaaccaaacacattgacattagacatcatttcttgagagaccatgaagtcaaaagagatatcgaattatttcatgtgagcaccgaaaatcaactagctgatatcttcacaaaaccccttgatgagactaggttttgctttcttaggagtgagctaaatatcttggattctcgaaacgtgtcataaaactaaaattttga

SEQ ID NO: 65364 - DNA, 499 bp, Zea Mays
tagtgtttcccaacagcttgtgaaagatcaaattcatagccctctcataagtagcaccagcatatttcagaccaaatgtcatgacaacccactcaaataaaccaatgaagcctggacatataaaagccatttagacgcatcttcttcggccatgaaaatctgattatatccgacattaccatcaagaaagctaataattctatttcctgacgcattattgatcaacgtgtcggctatgggcatgagatattcatctttaagagttgctctattcaaattgcaaaaatcaatgcatacactgagcttacctgattttttcttctccaccagcacaatattggagacccactctgcgtatatgcaaggtctaataaaattagcttctagcaaccggtgatttttatcctttatttgttggactaggtctggacgaaatgttctagcttcctacttgaaaggtctgaaaccggacttaataggcagccaatgctctactatc

SEQ ID NO: 65365 - DNA, 306 bp, Zea Mays
ataatacaccactaatgcacctacgcttttcacaggcatatatatatgagtgccaggccaaccagccggcggccatatgatacacatgaaccctaattatatcacatatattacagctatagctagtagggacatggaacattattatacattatttctcggctactcgtccctaagctgcttcacccagtgctgcacgcatcaagcacaaacacacacatatacattttatacatacatgctagactacttattattgtactttgatgcgcgaccaagggacgacgagccgacgatgggctcaat

SEQ ID NO: 65366 - DNA, 440 bp, Zea Mays
tcatctattgaggtgagtgatgatgttgaatgttccatggtgcatctatcgaagaggttgcaccccccctcaacagtagcatgatcgcctccaagcttagaaatctacagctcaagtggaaccccaagtagtggaagaaatgatgtagggcctgttagccgaagtagtggaagtaggctcaactagggcaaccaatggagacagctcaagatcaccccaatcgacgttatcttgctcctcctccataaagatggtctcacccatctatctgtgatctgcatgctcaaaaacacggacgtacaaggcatagtcccatcgaaagtcacctcacaagtctccaaaatactgttagttttaaggttaagtatgtgataagctcgagaatgtaaagcataaccaataaaaattatatcagaaaatcgtgaatcaaatatgtccaa

SEQ ID NO: 65367 - DNA, 601 bp, Zea Mays
agcgagaacgaatggcatctaatttttgtaacacccccgccggcacctcaaaaaaggacatcatgaaaatgggtaggctgctcaaaagacgtccaccagaagaaagtaatttacttttccaggaacttaatcttttttcgaatctatcaataacactctgccattcactatttcgtaacctacgatgggtcatgggaatcccgagatatttgaaaggtaatgaaccaatcccgcaaccaaaaagatgagagtaatttagatcatactccttagctaaaccatagcaaaaaagctcgcttttgtgaaagttgatttttaaacccgacatttgttcgaaagcggtcaggagtaatttcacgttacgcgcatgttccaagttatgatccataaaaacaacagtatcgtccgcatattgaaggatagaaagtcccccttccattaggtgaggaaccactcccgcgaattggttatcttctttcgctcttgaaaagagtatcaccaacatatccacaactatattaaagagaataggagaaaggggatcaccttgtcgaagacccttatgtgtagtaaagaaaggcccaacttcatcattaatttt

SEQ ID NO: 65368 - DNA, 1130 bp, Zea Mays
atctcgccctcgagattcagacggggctcgagaaaaggtaagggtattccctcctcagagagtcctcactttcccaggtagcttcctcttctccttctctgctccactgaactttacggagtcttacttctgagttgcgggtctttcggactgctgagtcaagaacctttattggcttttcccggtactagagatctttttgaatctggattatctctgcctcgatgtggttatctggtacttgcaagcacttacggagctaggacacatgaaacacattgtggatatctgacatggattctggtaattcaaggtggtatgctgcgggtcccactctgccaatgatgggataggggccgacgaatcacaatgctagctttccttttatttggaaccttttgacaccacgcatcggggagaccttgaggtatacgaaatctccttcctcaaatctgagttctctccgcctgttgtctgcataacttttctgtcgactctgagcttcaagtaatcttttgcggatcagggcaactttctcttcggcatctttaacaaaggcaggtccttctagtgtcatttcccctacattggaccacattagggggggtctggcactttcgtccatacaatgcttcgaacggtgacatcttgatgctggcctgatggctgttgttatatgagaattcagcatacggcaaactggactcccagtttctatcgaacgtcaacacacaggctcttaataaatcctcgaggaccttgttgaccctttccgtctgaccatctgactgggggtgataagcggtgctgaaatctaacttggtgcccatagcttgctgaaggctcttccagaattttgaagtgaactgtgtccctctatctgtcactatcttccgagggataccatggagtctgactatctctttaagatatatccgggcaagggtggctcctccaaaagtggttttcactgggatgaagtgggctaccttggtaagacggtctattattacccagatagagtcattccctttttgcgtctggggtagtccggttacaaaatccatgcctatttcctcccacttccattcgagcactgggaggggttgcagtaggcctgcaggtttctg

SEQ ID NO: 65369 - DNA, 314 bp, Zea Mays
cgcacggcttcgatccgtgtctgggtttgggtggaaggagaagatggatccgagcatgggggtccacctgtaagcgaaacagcaggagagacaagagagagggagactggcacactggcccatctgtcggcgcgcaagtgagaggcagtggtggcaacgtgactgggctggtgcggggcgaagggagctgggcgcgcggctgacaccaggggccacctgatagtgtcgcggtggaaaaagaaaacgggagggggaaagtgggctggcacgggtgaagttgggtcgcgtggtatcaggtaaaaagggggaaaacg

SEQ ID NO: 65370 - DNA, 1333 bp, Zea Mays
atcaaagaaattgttgcccaaagttgctctgtcagacttgtatcaagtaactgaaactgaacctgaagacagaaatggtcatagtgatatgggatcaatttgagcacgccatatctttgaattcgttcggttttgacccaagaatcccatagtaagtttgtagactaatgttaagtgaacaaattttattaagggaagttgctctgttcttaacaaaaatccagagataaagagggtagaaggtggtcggttcagaagaacactgaagatcaaaccctgacaaatatctgatgaacgtgataagatcagggccactgttgaatcagatgggcttgcgcgatctagtgaggagaatcaatccggggatggaaaacttcgaacgtggcgcaattccgtgaacccagtcaagcgtggccggagttagtcgccggaggtcaccgtgactcagttaacttttgccgcggtgtcacccatgcctcgatctccctcactgtgcctcttccctacgtggtatacatgcgccaacgcagttatccgtggccatagatagctagccggaccgccgtggctataagttgcaccgtgatccacggcggggtatgcacacctccactcagtgagttgatcgcaatccaaaattcgcgctgcctcagctccctcttcccaaattgattgtgcacggtgaaactacagtctcttacggctgtatagccccaatcccaccccccaatttcacccagagccgccgcgacaccattttcccccttcctctgtcaccggcaagccaaagtctccgtgctccatggccaacccactctggtaaggctctacgcctctcgtgtgttgttttagcagctcggtgtgcccaagaaactcatcatggcaaccgtttggtcaattcagccatgattgagcgggaacgcgagctcgaggtcacggtttccgccgtgcacgtgggcagaccgttctcaaggtgtttaagccaaattgacgagtgttcctaggtcacccttggtcgtttacgcctcccctgtagctagactaggcagccatcgccggccatggcctgtacatgccgtgtcggtgatgaacggcgagcgcaccgtggtaagggacttatttggagaaggaacgaagttccagggacctttgtgtaactgtcagagagagagagagggaatagtaactaggggttcttaacagatattctaaacagcgggagcctctgtgcaagtctgccagcgcgggcgcgagcgcgcgtgttttccacccggagttgggccgcctgggctggatttggcccaagactgttcattccttttctttttctttt

SEQ ID NO: 65371 - DNA, 434 bp, Zea Mays
tccataggtgatttcatatcaagtattcttgagggcattcggttgatgaagtatgtggctgtcattactgcctcactccacaaatacttaagcacattcatctgaaacaatgagagatattgctacctccaacaaatgacgatttttcctctctgctacaccattttgtggtggagttccaggacaagttgtttggtgaataactccatgttctgatagatatgatctgaatttattattcacatactttgttccattatcagtcctgataacttgaatccttgcattaaactgatttgcaaccaatttatgaaagtcttgaaagcactttaacacctcgtttttatgcttgagtatatagatccaagtcatacaagtataacaatcaataaaagtaacaaaccactttgcaccattcacacaagtgactgaac

SEQ ID NO: 65372 - DNA, 287 bp, Zea Mays
gacatagccttctaggtgagggaaatgatatcgtgccaacaagctgatagtcgtttagaggggagatgaatatgtgacacctgaaatttcaaccctgaaaacaaactaaattccaaaatagtggttagagcgagagagaattgaatcggagtagggagagttctagcaaagtgtgctcaaatgattgtggaatagacatgggagtaacacttaatgattgaattaaaatccaagcaagagatcttagaggggagagggaagaacaaatcacaataaaaatgcaaaac

SEQ ID NO: 65373 - DNA, 670 bp, Zea Mays
aacaatgcttaaccacttaagcaaagttgtgctcctatgatagctctataagtttgatgtgttgaccctaggcaaattccttatatttttagaaatacagagctccaaagtcagccctattcaacagattttggacttagtcacatgagagtatagagtgactttttgcaaataagcccaaatatcatggattgatttgcaaatcctaaaatgtgtaaaacatattatttgaggtgccctaatatcatggtttttacactttggtccaaaagtgtacaaaatttacacataaccacctagggtttcaattcagggttttccaggggtctttttagggtttttaagactttagggttttggtgttgcccaggtccattaaatatgatatcttatgaccatttctaatgagttttgggattttaacttatttgggcttcactttcactcataatcccagtttagggttaagtactctaacctagggttactcacatcccaagtcacatcaatacaacttgtttgaagtttttgcctagtgaaagcactctaagtgtaacaaacacatgatattccaatgctcatgatgttatgctcaaattttagtgatagtaacaccaggggtgttacaacaaacccctccgtttgatgagtcttctccaccacattattg

SEQ ID NO: 65374 - DNA, 1351 bp, Zea Mays
tgaccataaccttattgtcttttgggattcttttctcgtttgtcattaaattgctaccatttgaccatctctgtcccttggcattaacatgcacgtacccctagattctccaatactcttgtttcaaatatttacctctaaaaaaactctactacccatttaaacatttcagtttatatgaccatgaccttcctgtcttctgagaccctctcatgttccgttgataagtcgctatctttttggcaatttgtactctcttggtcttaattattctcgtaccattggaatcttgcatactcttatttttatatatgcttacctttatatcccaatatctgtttgagacatttcagttaacatgcccttgaccacccttgtttcttaatgatccatgagcggtcattctactttgcatatccttggtgatctcgttgtctccttgtaactccactcggtaatgaatctttacttcaacccttctgttggaaccttacctatcttacccttgattgttttctccactttgtcgtttcgcgagtctcgccttaactatatcctttgttatgcttttaattattatcatatgcacccttgacacctctatatcctacatcgatgtttgtctcatacctgtcctttaaaatcgcccctcttccgtctcataccttctttctcttgatcatatcctcttctttggctcgcgagtttgtaacctcatcctttgttgtgcttttgtctcttattgcatttacccttctcatctctcaatcttaccttggtaattatgctatgttcgttatctaaaacctccaatctcccaccttagttcaagtgtggtctcttacttatctcacccgtggttatatcctatactttactacttcaagacttatcttaactctattcttggttgtacctagattcctggttttttatgcacatttacctcttcctttatatccctgcctattatcacctttgacccttgacctctctccatatttaccacgatgtttacctatttttttagcctcacttatcctatttcaatccgagagtgttgttttcccaattccgctcttgttcgtttcttttcccctttgtcgctttgcaagtcttgtcttaccttaacttcatcctttgttgagcttttgtttgacatcatccttacatttgtaatatgtagatcttgccttgatacttatctcaggtctgcttgttgaaatcccctcttttctatctcaattcgagagctacgttttacttatctcacccttggctatatcctcttctttaccgcgtgtaggcctagacttaactccattctttattgtatttgtaccacttgctc

SEQ ID NO: 65375 - DNA, 276 bp, Zea Mays
agcttaaacccttcacacccaattatacacctgtgtttgcagactttcaagaatttccagatctgagtacacaggcgctgcaacctgagagcattctggaccgtcgtttggtgaaaaagggctctaaagctgttccccaagtgcttgtgaagtggactaatctaccagcgtcttcggcaacctgggaggactggtacgtactcaaggcaaggtatccgtcggcgtcagcttgtggacaagcatcagctccaggggagggacttgtcgcgcccgttc

SEQ ID NO: 65376 - DNA, 357 bp, Zea Mays
tggacggcacagattgatctcgcgtaccctttcagttaggataggcatggaccgttagttgaatgatgaacgctccagattacaacaataccgcgcccttcattattgcgatccgaccgttgatctggaatcatggggccatgatcgcataccggttcggtgttgatgccgtctaatcagcaccgtccaaatcagatcgtgcggccagaaacaactcacaccccttcggcctgtgcattttgcagataagccctcgggttttcaggaatccaaaccgtcgtccgtgacaggggcgccctgtgtcttggaatctttcacaccgagacccctgcatttctgtctaatacacgtgcagtc

SEQ ID NO: 65377 - DNA, 395 bp, Zea Mays
acggcggtgagaatcttatccgagggatcggtgagcaaggggaaaggtacggcggctagccggagtggtgtccagctcaacggcggtgctgatccttctacccgagatgttatccacttgccacgagcacgaatctagacgcaggcgacacgaatcgcggcggagatatcgtcgacggtgagatctctgcgctggcggcctgatcccaagtctggtactgtaccatggcgaatcccattcagatgaactgacagcccgatttgcagagctatttactcccaattttgcgtaataacatgatcgacattctttagcaaagttatagtcctaaaatccagctacaacattgttatagcaatactaagcaaattcttgctcgatcatgcattaattcg

SEQ ID NO: 65378 - DNA, 603 bp, Zea Mays
ctctatccaacttgaaactcgcatgtctagctatatcctagagtgaggaggcagggaattgttatgattttccatggtaaaccattcatatcgccaccccttaatactatccatcaaggggatgtctagatacatagctttcctaactcaacgaagttccaagctagctcctccaaccacttggtgctgaccactcgccatacccagcttatagtgataaagatacctccacaatccaaaaggcgatgcaatcccaagaaaagattaacaaagatggacaaatatagcaacttgaagaatggagttggggttcagatgggtcagattgagggagtagtagtcaaggagaccgcggaagaaggaggagactcataagcctaacccataaatcaagaagggaacaaaaaggacagattcatgggtatcttctgtgggaacagagatccccttccagaccctccacaaattcaacgccttagggggaagaacgcccatctcaataaggcgcaacaaatgagactcgaaaacaagaaaggcatagttaccgcagaacggaagctggctgttagggtcaagaggagcaatgatggtcgccgaggcccc

SEQ ID NO: 65379 - DNA, 796 bp, Zea Mays
gcctgggaaaggcgtggtttagacgaccgtaatgagaaaggtgggaaagcacggggcacggcaatcatacatcgcaggagagagagagagagagagagagaggatgcatgcgctttgccatgaatgatcctccccttgctaatcagcaccgtaatgcactttgccatgaacttttttttttcttccttcctttgaggactgaactgaagaaacaggcattcctgtcctgtacccgtccaagttgccgtgcagtagcagtggtggccctcgccctagtttgagagagtaacaagtcttgcacatacatacccagcgctagcgttccacatggcgcacagcagttgcaactttcgcgcgaggtgaaccggcccgccacagtttcccccctcatccgatggccacctgcatcgctcgaacaacacaacacaacccacaaaaagccttgcacatcgcctcaagaacagaacagaacggcacggccgctttgcacgcagccgaagcatgagggccactggatctgccggatttcccgatcccttttctcttcccggaggcggggcatggaacagcatccaattatttgacatgatgcggcctcaagaacagcgacggatcccaaccgctaggcctctcgagacgaccggaacggatggagatggagacctctcctctccatggagatcgcagtctgtagcgttcggacgattgctggggcgaggcgatcggtggccgccagtaaatccaactttaataggtaactagctcaaaccttgtttagatatactagactagaaac

SEQ ID NO: 65380 - DNA, 507 bp, Zea Mays
gcgtggtgagccgcggcgccagggtgttgttggttggccggctacaagactggaattcgtacgtacagactgtacctagctccggtatcttcatcatcatggcatacacggtacctcccgtcctgtgtcttttgggcgacatgacattatttatgcaaactctgtttttggaagcaaatgacagacgctgatagtaagtggtgaagctagagcgaattaaaggagtgtgtatgtcttgagtgtgcatattaataagagtaaaatatattttcaattcttaaacttgtggtcccgtgtcatcttggttcacaaacatttaaagtgtgttattctggtccttaatcgttgtccaagtctcagttagaaccaaacggatcgtggttgacatatgaaccccacatgtcagcccaaacggatcatggttgacatatggaccccaaatgttggtcacctattcagaggacaattaaaatagggcgacccaataaagtgataagatcttcttcc

SEQ ID NO: 65381 - DNA, 401 bp, Zea Mays
ataagctcgaggatcaccgtcattgacaatggcacctctcaacatcagctcagctcggctcaagacgtcttcctttgtgaatcttttatctattactcgagaagggttcctaacaccggtatatagataagcaaggtgtagtctgtctttcagaggctgaatgttcttgaacacaaagtcgatcacaacaacttcaggaatcaagcctctatctttcaagttagcaatctcggccagcaaaacccttgccttagagaccttagaattagttaggccctcaatccaacaaggcactcacacgttcgactgtctcccagagcaaggggagtgaattattgtgattttccatagtaaaccacccataccgctagccctaaatactatccttcagaggaatatct

SEQ ID NO: 65382 - DNA, 361 bp, Zea Mays
ccctaggacaatgggtaggtacgctgtcatgacatccactattgccatggttgcccgggcgacggttgtttagactgccaaacagcctcccgagtcttgcttgggctcgtacttgtcgacattggagactttgaagtttggaggccattggattgctcagagtcgaaggatgagtacggagactcctcacgtccccctatcctctcgtcggtgatcgtgcgttcggtcccggggaggtgagcgagcatcatgtgtcgccttgattgtctcggggtcgggcttctagtggaagctaccgctgactcagttttggttgcatggctgtgcgccggtgcaccatgttaccggtcatactccctcg

SEQ ID NO: 65383 - DNA, 542 bp, Zea Mays
ctggcgcaagattcccgagacacagagaatagtactccctggatggcgggttggtttctgtttctctcgagggttcttatgcaattgtgtctgagcgaaagggtatctgccaatctgagacgtcggatcgacagcggacgatggagattagatcgtatcttataacgaaacggtatgcaacgccgaccatcggatgttatttgaacgctctcgattttatgatgcccaaaccaatctgagccatgcgatcacgatccaagggttaggatccaaccggcaggtaccttcaatctaagccgttaatcatgaaatccacgccccagggaccatcttcaaccccactggctccctttctctctcttctttactctctctctctctccggctaatccccacggccgagcgccattgacacggcagcaaactgcccgagctcgccattcgagcccccatccaacggcgccacccatcatctccccaaactccctgtcttcatcttcccaggtcgtctccccaggtcggcaccctacaatccgcccgag

SEQ ID NO: 65384 - DNA, 751 bp, Zea Mays
cgcgtacaccgtggcccggtagcccaagtgtggtcggtagtgtccatcgtccatcgagggtcacgctcggaccaactatccgacctcaagacatccggccccggaggaatttctcaacggagagttgcggtcactgtgacacacacctcgtcgtggtttgagcctagtaccacgaaatttgtggtaagcaccatatctctcgtcttgatttcataccctcatcgtgtagagtcgattagaatagaggataacttacacgtgtccccagtattgctcaccagagctttggttcgccgcggttccgcttcgcgtcgcgggagacatggtagtcaccataatcctcacaaagtaaccccctatcatgttcatcgttgcccacacattgtttcgcaccgagtggatgccggagtagtgcaccagtacacgaagtgggtggagcttcggtagggtgccgccgttctttgtcaagcgagggaagacgatgagagggcgtcgtccgatctgcgtgagcgatcgagatcaggccaaggataccccttcgcgactcgggcgggtggtcgtttgatttggatctaagggtcacgattgaatcacgagtaattaaatctagggcgcggattggtgatgggtcacggcgacgtacccattcgtgcgcggatagatctaatccagggcgttgaaaatagatctggcggccagtagttatccataccccttcggccatagcactttgcataagagcccccgtagt

SEQ ID NO: 65385 - DNA, 1220 bp, Zea Mays
gcagtaaccagtgaggaagcggtgaaaaaggttccaaaatcaatgagcagccactagctgagcttgctgtcttggctattgttggagttacccgacacgaccggggcctattacgacacggtccgtttagagtataacttcgctaggtccggctatttaattagactgtgtcgggctggctctcgtgccgcagtcgcgaccagacacaatacgtcggcccattagagaccaaggtatttttttttgaaaaaggacacgacaaaagctttgccatgacaaaaaattattagaaagagacacttacaaacaccggaaaggaaagacaatactaggggagaggggaggagcaaagaaaagaaaagaagcactagcaaaacagcccattagaaacccagcacgccacacaaacaaaacactaaaactaactagaagctctttgcgggttgaaatcttctttgacgaaattggccacttctcgctcgctcttctcaagaccatgaaagattcttcgatttctttctttccaaatctcccaccaaaagtaaatacagagaccatcgaattccttgcgagcagttttctctacttttagtctgcacttcctccaccattcatagaccgacgagcactggtccaacttttggcagagaggagaggttgtaccacgagctgagccaactccaacacgattttgtgaatatacaatcttttgctagatggcccaccgtcttcggttctcgcttacaaagcttgcagataggatcattattccaacctcgcttctgaagattattggccgttagaatttttttatggaggagggtccatgcaaagaaccgacatttaggctccgtcttcgccttccaagctggagaaagtttgagcttggcaaaactcccgtggaactgagccaggtaagcactcttggtagagtattcgccatctgattttgtctacttcctcaatatttatatggacttcatggatggcttcccaaagtctcacaaattcaattatttcagtttccccagaaaccggagaaataagagaaatccatgtattgtcgagtagggccttttgtaccttaatgtttttgcgctttgccttaatgaagagtgggggcaatgagacgcgccgccgtgccattaatccaattggagaaccagaaagaagcaagggtcccattgccaactgtcaccgaagttgaagcatgaaaaaag

SEQ ID NO: 65386 - DNA, 561 bp, Zea Mays
cgattaatttcgaacagcacttgtattttgcttcgattcgccgtcttgcgggcgagatcgtcccttcttgaggtataccatcttgtaccccgtcatatgaaaacatcattccggaaatatatagattagcactggttttgtttaacattcctattttattttggccagcccatacgagtttagcagatccacacttgtagtttgacctctgattacgttcttcatcctccgatttagcccccttgtgcaacaaagtttgtatgtaccattaaagttggaatacacaccaacagtcagtagacctgcttttggaaaaactttgaacccttctttgggcgtcatgtttctaggagatgctgacggcccctacaatttatcagatcacccgtacatggtaatggaacaaaggttttcaaacttgtagcctaacattagccatgacaccaaatctatttccccagtgatgttccttcgtgtgaagcagatgttttataagtgaaccaattgtatttgtaccgtttctgtggaatgttaccatttcgtagtattataatcttcacc

SEQ ID NO: 65387 - DNA, 303 bp, Zea Mays
gctcattgtagcttcagcttcggtcagctttgtctcggtttcaacctgtgttttcgaagccttggcaatttttcctggagaagagcttgaagtttttatcgtctccagcacatctaatacgctagccatcctttttctcttgggggttgctgctagatctttttgcgtcttcggcgcctccactcctgccgaagggcttagaatttctaatgttttcatcccttcggttctcggttcctcaattttgccagctttcggcattgcagccggctcttcaatcctctgcgtaagagaaggtctttt

SEQ ID NO: 65388 - DNA, 468 bp, Zea Mays
cccttcgccccagtcagacacggcggtgctcgtgcacccacggtggcaccatggcaagaatcataccaaccccacaccacagccctgaactttgattcgaacgacgatacatattaaggagaagaaggtgcagcatttggggaggtgctcaccggcttttggacgaagcaggctctcgaccacggtcatctgcggagccgtggcggtggagaaaatacggcgaggaatcgccgactcctagagagcccatcctgcacgccgatgccatgatgagcatccacacctactggcgaatgatcatgaccattccgaggacctcggacgacatcataggcatggggaaccggtgatggccatcacgtcttcctcgagcgcccaatgtctcccccaatgtatggcggatccctgcgagcgcgtagaccaacatatgggatggccaaaggagtgtggcggcacaggatttatacc

SEQ ID NO: 65389 - DNA, 325 bp, Zea Mays
agaagttgagcgcccatgttctgtttcgattctcctcctcctcctcacatagtgggtacttggggcataatatcagtagccaactacgtcataggaacgttggtttctaagggtgccatatcttagggtttggtaatttcattcactaggcgctagaaagagtttagatctcttatgaattgtggaagctatgatttaagaaagcacatgaattggctccagtctcagcctctgcctcacctttttatagtgcctatgagtcaagggtcacaaccataggataggatcgtacccccgattttggtgcaataagttgtagattgcc

SEQ ID NO: 65390 - DNA, 674 bp, Zea Mays
aaagagtggtgagagcctctaggactacatccaaatgttatcacagaaaggaacaaactcccagatgccaccgatgccaacgtccccgtccgccacaaactctaaagcacttcatctccaaaccgttggccaaaaaggcaaagtaggaagagctgacaaagtcgacggagcaggagacccccactgaggacttcctccaaaccacaagatgcctcatgatcttcggcaggggagaagcacacggtgacaggcgccgccacaaggtagcccgacaagaagtgttcgcagcagcccaccgtcccacgatacctctggtggtcatagtccccgatcgacttcgaccgccgtgaccacccagacaggatcccgcatctcgggacctgccccctcatcgttgagtcaatcgtaggctcaaagtgtctcaacaaggtactgatggatgggggaagcggtctcgacatcatgtacattgagaccttcgactatttgggcatcacacactcagcaatgtgccatagctcggcacggttcgatggcatcatcctaggctatcaggcctaccccctcaggcagatcactctgcccgtcacattcggggaccccgccaacttccacaacaaacgacaacaatttgaggtggtggacttcccttcgatgctacaacaccatcctcg

SEQ ID NO: 65391 - DNA, 313 bp, Zea Mays
gttcaattaaatctttgacatccatttgataggctccttttgaaattggtgcggttcagggtaatagttcaatgaaaactctatatcacgatcaggtggcatacctggtaattcctccggaaatacatctgggtattcacacactattaattcgcacactattcaaagagttctcttccaactgattcatcattgtctctgttgttgctggcatactgacattgacttcaattctttctccttgtggactggttaatgtaaccatcctcttagcacaagatatcactccatcatacttggtcaagtagtctat

SEQ ID NO: 65392 - DNA, 341 bp, Zea Mays
tcgaagtgggctcgtccacgtcggggacagctgacgggactgtccgtggggacccatgttttatttcttgcggggtcatggcctccgatccatataggaggcggaaaggggtgaacccagtcgccctgcactcagtcgtttttaacgcccagactgcttcaggtaacaattcagcccacttgccttttttatcgtcgagcagcatcttcttgacagctgtgaaaattttgccgtttgcgtgttccacaacttagttggactgcgggtggtatactgaggcaaaggcaagcttggtgccaatggagaagcagaaatccttgaagtcttggctgtcaaattgc

SEQ ID NO: 65393 - DNA, 868 bp, Zea Mays
ctcgtttcagcatccaccaacctccgacttagatatgtcaccacatgctcctttccttcagtttcttgtgtcagaacagccccatgaccttatcttcagctgcaatgtataatcagaatggtactcctgctagtggtgcttttaatacgggagctgaagacaagtattttttaatgagatcaaatgcttcctgctgctttgcccccaaacgaatttggcatcattcttaagccgaaggataggggttaaggcatcaatcttctcggctaggttagaaataaaccttcgtaaataattcaccttgccgagaaacttctgcacttcgaccttacaagtcggaggtcccacattctgaatagacttgattcggtcagggtctatctctataccatgttcatggatgacaaatcctaaaaacttaccagccgacactccaaaagcacatttacgtgggttcattttcaaaccataccaacgcatcttatcaaaggctttgcgtaaatcagctatatgagaactaaactcagccgattttactacaataccatcaatgtagacttccacagtgtttcccaacagctcatgaaagatcaaattcatagccctctgataagtagcaccgacatttttcagaccaaatgtcatgacaacccactcaaataaaccaatgaagcctggacatataaaggtcgttttagacgcatcttctttggccatgaaaatctgattatatctggcattaccatcaagaaagctaataattctattccctgatgcattattgattaatgtgtcggctatgagcatgggatactcatctttaggagttgctctatttaaattgcgaaaatcaatgcatactcttgag

SEQ ID NO: 65394 - DNA, 718 bp, Zea Mays
gtgccctcaaggcattactaagaattaagccctgtaaagaggaggaaagaattgagcatgacaaataaaatactccattcccaacttcaaagttgacttctatacctttatactattgtacgccaagctatcagcaagatcatccttcgacaaaaccgaaaggccttcttcaagtttcggaaatcccatacttttagctatctcccgacaaacggatatttctttattgtctgggaggcagtacaagaaatcatcttcattagtgtcgttaaacactaaggcccccttaggatattttaatttttgggcatagtgtctggcttccaggacttcttctttggataaatttttccccgaagcatgtcgaaaaatgtaatcaatatcttcaactagggcttcggggatagaaggttttgctttttctgccatacttcgccctgaagtttgctgatcagccttgtcctcaggcatgacagccttcgtctcaatgggcactgagggcccagcttcggcttcggcttggtctttggcagctttagcaattttcttagtaggggcggggcttaaggcctttgtggtctccagcagcatccaacatgctggccatcctcctcttgggagttgcggcaggggccttttgcaccttcggcagttttgcctctgatggaggtctcacaatttctagcgttttcattgtttcttccacctttggctcttc

SEQ ID NO: 65395 - DNA, 338 bp, Zea Mays
gaggaaccagaagaagctgatgaaatagaaaacaggggcacggagctgcaactcacgtaaccaggctccaatgggccatgtaatgcgtcatgggccgagtcgtgcaactatataggagcagtactgtaagagaaaagggtatgaaagaaatagacaataccagaaaaaagccttcgtgctcccaccatcttctccgacttctctatctctttccccttcatcacgccattccctgccttctcctaccccgtcgctaacatttggtatcagactactcgtatcctggaatattgcacgcatggaggcggcaatacagcagattctggacgcgatggcgc

SEQ ID NO: 65396 - DNA, 542 bp, Zea Mays
ttggcgtataagtcgaacatcaaaagttagtcgtcaaggctaaaggcgaaagatactggaaaataagcaatatagagagctcaatactagcaaccggaccacaaacacagagtgggataaagggaaaaagaaaggactcagtactcaaaggtggaagatgacaactttatttatataaagtggcgtcattgcctaaacagaatcagttcattatgaactgatcctagcaaaaggctaacaccccctacacctactacatctactaattaagccggtggcgcctcgccaccgacattgctatcgctgttgccgccaccgtcgttgctgccctcgttgttgctgtcgtcaccgccaccgttgctacacttgcccttgtcgtagtcgccttccttgccaccaccgctattgttgcccctgctactgctgtcatcatcgccgcccttgcccttgccaccatcgacgtccttgtcgtcgtcgctgccgatcgtgtcggtcgcattgccttcgtcatcgttgtcctcgtcctcctccatggattcctt

SEQ ID NO: 65397 - DNA, 572 bp, Zea Mays
gtgagccacattcgatttcgttagtcatgcatgtgaggtgtgatattgcactctcgattctccctggctggtgtgctagatgtaatgtctggtaatatatttgcttctggtaggacaagaattagttcgttccttggcgatggacatggatgctactgtacactcggaattcttaggtgcagcatgtacttagcgcagggagagacgttggttgatagtttacgatagcaaaagatgcagcaggtggtaaacacatgttgctttgatgccttgacgtggatgtagttctgaatatgcgggagtcatgcaaaccttgtgtagttgtgtgtactacaccccttgttgcttgtagcagagtttattcgcaggtgagtggaacttgcatttcatactgttatatatgttgataccatgatgcatcttagtgatccttgaattggaaggatcatcgtttccacttttagttcttacccatagttttttgtcgtgttggtagcagattctttgtgttagtcgttactattgtgatccacgagtcacccgtaagcattagcagttaatttttatcgtct

SEQ ID NO: 65398 - DNA, 420 bp, Zea Mays
gccttcgtcacacccttcaccttaacttcaacctttctcttttccctcgctgttgtaaccgcaaccttcccctttaagtagacttcttctaccattgtcgccactcttttcttctctagcttcagcagagtcctcctcagggtacagaccgtaccaaagaccattcaactcaaatacacggttcaacctgacgtttgaaccacatatatcccagctcctcggcatattcgtcttcattgaatatttcccccacaatcttcacagccttcacttccacctctcggacaaaggacgcagcatgccaaccatgcagttcaatgttgaaggtaggtctcaacacctgccgacccttcaagaaaggcatcgggcgcagcttcacttagcccagttcccaaccatgtgcaagtggccacactccgc

SEQ ID NO: 65399 - DNA, 730 bp, Zea Mays
tagtcatcttggacagtccggttatatcgcagaccatccagcatattttgccagatagtttgaccctacataggcccgcacaaaccatccaggtagcgccatatatgaccagaacgtttgggtatacccatgaatcattcggttcggtcgcggaccgtctgaccccttatgctggacattctaactacatcacggaccgtccaacatattttgctggatcgtctaaccctatacaggcctatgcacagaccacccatgcagcccagaccatctaggtataccattggaccatttggccaggcgcggaccgtctgggtatgcacagtttcatcaaccatcgcagcagcactacactaccccataggcagcatattataatcatgccatgccacctcatatatagagatccaaatattcttctgccaccagagagcccgagagatatagggtaggaggtggtggcattaattggacacctaacacacatcttgaacatctctgggaggaaattctgacaaaataatgttaggaaacttgagattttcaccctcaaacttaatggatggtcaccagacatggtggaaaagatttggaacgaggtagccaggttgttcagagaaaactcggtgttagtgtgtcaggcacagggcagccatatcagaaaccttatagtcaccaatttgacgtcgtgccatatccgcaggggactaggacacaggatttctctgaa

SEQ ID NO: 65400 - DNA, 367 bp, Zea Mays
ccaagcagctagccgaagctattagctttgctaaacaacttgtgtacccttcgagggctacaatcttcaggggagggctagatgattacttgtattgctgcctggatagtatggaaattgaagcatgccgctacatggcagacaatattggtttcccgaaacaattgttgacctcagcaccgctcaagtgagaatagatggtcttaaagatgaagtaaatcacatgaggcaacttaatgaaaactattgaatcttggtggcaaactattacaccctcggcaccagatgctataatgagttagtgaagaccttctcctctgtcggagcttcatctagagagaagaatttttcggatggtgacttggag

SEQ ID NO: 65401 - DNA, 585 bp, Zea Mays
gccaccagaacagggcacgagagcaggacagtcagcgtattgttaaactgtcagctgaagtcagtcgcttgaggtttgagatctcggagcgggactcggccattgattgggccattaactcgcgttcgatcacttggcaccgtgaagcaaaagcttgagcttgtgtggatgagcttagcgtgaccctcgataacctgcaagcgtactgtaatacattacatgaagaagttcatttgctgtatgctcgactgcacccggacgtgccctctaccgctgctgcaatggtagctggaccctcgggaacagcaaacacagggcctgagggggagttggacctttttaagccccctccttctatgaacctggttgatgagcggtctcctgtagcagacagtgaagcaacaaaggatgatgaagactagactagtatagtttagataaatacttatgtaaaataagtaatgaagtcgggttgtatgctggagtctgtataattacattttggtaatgtaatatgatggtatgtactgtcatgttatattttatccaaatgtttctttgccttagatgccatcacggactcac

SEQ ID NO: 65402 - DNA, 509 bp, Zea Mays
cccaaattcacgaagccgatggtcgaaccctttaaaacaagtgttccccttgttccgcctctctgttatgcgcccaacccacccttagccagcgtttctcataaactgtagctcgagttcttcgaatctcccaaaaccggtcaccattcgccgtgaggtgcttcgccatggacaaatcgtttctggttagttctcactttcttagccctggtcctgacttccttcgatcctctaatttattacggtaccagccgattgaatgctatcgtcgtaaaccactgagaacagcacattaccgtcgcagaacgccactgtggacacccctcacgtcgattggctctttcgtgccttctccgtccaaattcatgcgagcaccgtaatcctagtgagccactggtacatcccaagtccgttaattgaactctaccgcattgtatagctcggaatgggctcaccggagctatggccccgccatcgtcgtggacaaacacgaactagggacctaccgg

SEQ ID NO: 65403 - DNA, 687 bp, Zea Mays
ataaaatccaaccagtgctagatccaagttagactcataagtttttaccatcacgaaaacaccaacgctagaaccaagcatcaagagagccaccaatgcgtcgtactttgcctacactcatggttgttgcgacagttgatgatagaagtcatcgagaccatgatcttgtgccccatccacaacagcgtgctattcagctccctcagtgtcggcatgtcatcatgcatctatagggagaggaagatattgtcgcaaagaaagcaagatccaagcatacgagatgtcaattgtcatctcttaggtttgaaataaatcgactaagtttgataatagcatatgagatgtcaggtttcattgcgctagccaagtacatgagagatccaatgagttgacagtatctcaattgatctcatgctattctacgatttttccttaataacatggttggaccataaggagttggagcgggtttgcagtcattgtatcaaaagagactaaacaccttttccacataatgtgattgtactagagtaaccccaccattctttatgttaagaataacatcaactactcctaaatcttttatttcaaagttactaaacaaaagtctttcacttcctcaatcacattatattattactaaaaattagaatccatccacatacaaacacatgatcacaccttctc

SEQ ID NO: 65404 - DNA, 442 bp, Zea Mays
atcgacttgttccgtgccaggtatcctcaatttcagctcgaggacgagctgcctctcgaggaggggagagatgtaatgtacgggcagacgtacacgtggcgtcacagggtgcgagatgtgcgtcgcgctgctgagcatgcagcacgcctgaatcagcaggtgatctcctctagtggctaagaatagaaggaggagagtaattgattgtttccctttcctgccactctccgattagaaggaagagagtgattggttatttcccttttattactttcctttagcagtccttaagtctagggtgattggttatttcccttttcgattactttcctttagcagtccttaagtctagggagaccttagtctatttatagttgtaaccgcatatggagaaggcatcaataatatttcagccctttcttctatcttctctctaagccac

SEQ ID NO: 65405 - DNA, 361 bp, Zea Mays
gtgggaggggaaaagtgaaaaatatctatgcgtggttcgatgaggaatgaaggcaccagatttaatgtgctcatgtgagcacgagagctatatgagcacgggatacgttctcctactcatttataccactagtttaaactttgcaaaactcacccaaccaaatcacctacacattgataacatccactgaatctaccaaacaaattgcacacagactcaacatatcgtcaaaaccaacgattcagatcgctggatagttcacttccccttactcaaatccattaatccaatggacaacattatttggatcatcctcatctctcatccctccttcccctcacccatgacctcgttgctgcca

SEQ ID NO: 65406 - DNA, 326 bp, Zea Mays
tttttgatgtgattggatttctttatcctgattactgttttcctgtccgaaaacaagggtcgaaaagaaaaatggcaactttatcttcttccactgcgcctaagccgaagagagctaaggttttgacacataggttgaagccacattctttagaaaggacagctgcaatacttgatacaaagaggatagagattactgaacatgccaaagttatccccttggctttggagacaattcctgctgtgacggtcgaagctagtgctggtccagtagaagagtcggaaataaagagctcaaaggcagaagagcattcgaaactgttgagt

SEQ ID NO: 65407 - DNA, 343 bp, Zea Mays
tcagcgcgtcgtggtgtgccaactgggtaggcgacgaccgccacttcttcttcttcctcgcattctttggctttttcaaactgggagagagtccagagctgggactggcctctgcctgctcaccacttgcttgctccgtccgcgtctctttgtcagggctgcatcatcgtcggagtgctgctgatgcttgtgtccaccatcggcggcttacggagcatcgtccaagacgcatcgacgttccagttctactcctgaagccctcacacttgcatgtacctctacactcacatggttccagcaagtcgtcaccctcgctcgtccacgcagctctacctctacattt

SEQ ID NO: 65408 - DNA, 326 bp, Zea Mays
tggaacaaagggagcaagaaactatgcctaaagcaaaggtagccaaagctacgcaaaccacatgggaggatgaggagctaggctttgtcacaagacatattagtggtgaagagttgaatgaagaagtttcaaagctgggggaaaaaggccacaccttggggtacgaccctggtgctttactatttcctagggaagaccagatgatgatgtgcgtactcgatcccaatgaaatgaagattgatcagaatataacccgaagcatcgggtttcctaacattgaagagaagttgtgcctggtgaagaagaagaagctctcccacatcctg

SEQ ID NO: 65409 - DNA, 739 bp, Zea Mays
ctgtattcttcgagacaaataaacgtttcaactgaggtaaaagaggcatgtaacaaagttgcttacatgctatctatgttgtcatggtcacaccatattgtttacagcctctacgaatctcgcctcgccacatactgcacgcttcttctcatttgtggtctccttctagaagagcatatagttattatcatagatatcaatttttctgtagtgcataccaagactcgagagcaatttcttggactgatacatgtctttagacaacttgtgattcaccataagtacatcactgatcaagttcataagctcctcgcaacagttgtttgagaatgcaaacttatacttaatagccataagccgagtcacgaaaacgaggacgatcactttcgtgtgctcgtccaatgtctatttgtaagtgctcgaagaacttcagaacctcaggcatagatggatcctcagaattaggggtcgaggtggattcttagaatcgttggttagaatctcatgtcatacatgcaagtctttattttggagataaccaaaggttctgaacctgcattgtgctaactcgtcaatcattcctaaaatgtgattccttttttttcattcagagtttggttggacaaattaagatggattgagatcttagttgttaaggtagaagcaaaagcaccaccactgaatcctgtactttaaacggtgatagcagcagttgcggtcttcgatatcttagtgtgtt

SEQ ID NO: 65410 - DNA, 1281 bp, Zea Mays
atagattcctcacccactaagtgaatcaagttctcattgtcgacatatccaagtctttttaggacctttaactcactaagctttatgagagattgctccatgccaatataactaagcttcaacggtcgatggtcatattcttcttccacaacaacaacatctccgatagtagagacattatcctctgagccttccccctcttcggctacttcatcaacctttcccttcttcgacgcagttgttttcccttcatagcctcagaaatgggaacccttgcatgcattcggtatctacagcttcctcatctctctgttctgcttctaatgacattggtgttgctaccttattaattgtcctaatcattgccatataaaggttgtccaagtctcaagtttttgaagctcaatcaatgcaagacacacaaataagctttggaggcagataatttaatgacagtaggttggtgctaccaataaatgtcgtgcgacctagctgggactgaccgagttatataggtaaaaagcgtagaactttaggagtcacccacctctactcgctgtcgtgtggaccatagtcgcaagttcccgcttcgtcaccagttgttcaagtgtgtgtttatttgatcccgttttcaatggcatgctcgaggaaggtgcttttaggaccttcggtgtaaggccttcttttgttccacggtctaagaacgttatgaaaaaacgaattaatctagttagaggctactgttgggggtaagcctataccaaaggtcctcaaaaccagttattcttaaccatctcatgatttgtttcagtagcaaccaattatgcttgctaaaggtcactaatgcaggtcgaaaagggaatagaaaaagcttcctcttaagtgagcagatgatgcatgttgtagctcgaagcggacaacgagaaaatgaacaaagaatttacaaacgtgtgcgcccagactttggaatttcatacaatattgcacactgaactgtcactataaatagaggcacagtgccatgcacgttgaggagactcggtaatggaatcactctgcctccgaagatacgtttccttgctattttgaactgttgtcacaacattcgaaggtataattgtaagcatttataatcaggaaggaggaatggaagaagtatattagtgatgaactatcctaagcatttttacctatcatgattttcctaaaatagcatatagctcgtgctaacgctactatcctagggaggtgaggggtcgacagtggctgcggcagtgcaag

SEQ ID NO: 65411 - DNA, 469 bp, Zea Mays
tctttatatcctaacttcctcaattaatctcctcatatagtgttgaactcattttgtgcagattcctttatgttccagccccacgtacagctgaggttattgctgatattcttcatgatgttctccttgattggcatattgagaggaatttgtctactataactcttgataactgcagcacaaatgatagtgttatgaggaatatggttgggacctccaatgacagcctcaggcaaagagtggacactgtgaaaggcaagttgccctcccctcttgtatgttacaaggtaaattaatccatatgagatgtgcttgccatattttaaacttggttgtgaaagatggaatgagtgtaatggaatatggaattgatagtattagagagattgcgggattttggtctgccacacctaaaagacatgagaaatttgagaaaatggcattgcaaatgaagggtaaatatgacaaa

SEQ ID NO: 65412 - DNA, 509 bp, Zea Mays
ggtctggtactattcccgaactgtctggtaacatcgggcaacacctacgacccttgtggatggtctagcgtagggtgccagacggtctgacggagggtcggatggtccaagatcgtgtgcggatggtccggccgtgctcaaagttgacccaccatttagcggagatggcggtgtcggtcgtcctggatatgagtccatcagcataccagaatatggctggggaaactcatttgttgccaatgtgtttggcgcaatagtttcggcgcctaatttatgtgataaaaaattaggcatgtgagtttttcctaatgcatgtgccatcctctctatatcctttgtgatacttttaatccgattatcaaaagaaattttaatagatggaatatcatcggctgacctggcatcacctatcgtggggagttgttgcaacacagctgacatgtactcgacatttatttccatctcttggacggtcttttggtggcaatctaccctgaagtgcgagagga

SEQ ID NO: 65413 - DNA, 387 bp, Zea Mays
attgagccctccgatagaggcaacactgccgaaggtacaaaaggcttctactgcaactcccaagaggagaaggatggcgaatgtgctggatgttgtgctggaaacgacaaaagccttgattcctgctcctacaaggaaagttgccaaagctgccaaagcgcaacccgaaactgatactaagcaggcagaagtcgaagctacaaaaacttaggctgaaatcgaagctgggccttcaacgaccgccgcgacgaagcctatcgcacgtgaggaagagatgacaggacagattgcacctgaaaaggttgaagctcctgctcccgaagcttcgaacaaaaacactgactacattattcgtcatgcttcgggaaaagaactatcccaagaaga

SEQ ID NO: 65414 - DNA, 369 bp, Zea Mays
gttctatctgactttatacagtttcgtagccgttcagaaacgtgttacgtcattgctccagaacggcctgtttctgccgttttcaacatatatgtgtcacgtatcaagcatttgattggcaacaagttgcaatgtttgccctcccagcatcggccaatgtttcaatcaatgtttgatgctcatgacaaagaggtggataagtactgtgattcccttcagctgagccatcagatgattgtttcgaagcagagtgaactctctgaaatatttggtgaaatgatcgatgaagtactgagagctgcaacgcagcgcgattcacagcaagaaggttttattatttatgtttatttttttaaactgatcaagttc

SEQ ID NO: 65415 - DNA, 404 bp, Zea Mays
gtccagagaaaactattcactttctgatccccaaaatttgagacagagaaacacacaccagtaacaagccactgtaatttttgcagaatttatagaattttataaaagcaacttgtagttcaaacctacttccaaacattaaagagaataaaagaaaaggaaagaagaaataaaccccacctcaataaatctaacttgagtacttatcaattctcactaagacttaaaaggaattcagtggaaccccaaaattttaatctattaccttagctaagtttaaaccaatttaccaagtataccacccaagggtcttacataagtaaagttaaccttgtttaactcaaaagatcatgcacccttaaagttgtgatttctaaaagcacatgtcatatcatgcatatatc

SEQ ID NO: 65416 - DNA, 996 bp, Zea Mays
ggctatccgaggcatagagtaaacatctggatcttgtcccgcgtaagtatctaagcgcacgaagcaaatgaccataatgaactgaggtcggtgtggatacaaattggctcaaaatatgaacagcatgagcaatatcaggtttggtgatggtgagataaacaaggctacccacaatatggcgatattgagttgggtctgctagtggtgtcccatccttcggacgaagttgtaaatgaatatccattggtgtcgcaactgtgcgtgtattagtaagtccagagcgatcaaaaagatcttgtatatatttggactgagatagataaaagccttttggagtctgctgaacttcaatgcccaagaaaaagctaaggggacccaaatcagacatctgaaattccttactaagatgcttcttgacatgagaaatatgttctaaattgtcacctgtaaccagcatatcatccacatataatagaagtaaagtgcggccttttggagagacatgaacaaacaatgcagatcatgttcactcgaagaaaaaccagcagatgtgatgacagagatgaatctctcaaaccaagcacgacgagcttgtttcagaccatacaatacacgacgaaggcgacaaacgtgccctgaggtggtaacaggacataacatagagatccaaacacacgaagatgatcatatcgtagagatgtccttaaaagaacttcacccggtgttttgccagaaagtttagatgatggttgtctattaatgagatacacggcagtggaaacagcttcactccaaaaatgtgaaggaacaaaagaagatatcaaaagagtactagcactctcaataatatgacggtgtttgcgttcagcaacaccattttgggcatgagcaccagggcaagaaagttgagctaaagtaccctctaaggtcaatatctggcgaatattatcagataaaaattcaccaccggaatcagagcgaaaaattttaatagta

SEQ ID NO: 65417 - DNA, 389 bp, Zea Mays
aagaaattcaatcgtcagatggctagggtatgctcaacagctagggttactcgtgacggagaggaagccgaaggtggtgaaaccgctccaatctctgaagtgatgcaacggtcagggctggtagtatcagaggatgcacctgccgctgaagctgagcaggttgatgttgaggaaattgaatctgaagatgattagagtgtcgtgccatctaaacccagccacctggagtttgggaaatccaccattaccgaaggtgatatgtctaagctgatgaagttaggctatttcagtgaagcaaagaaggagctggttcgttttggcggagaggaaattactccgaagccggaaaaggatgaggtggtagtcttcaaaagcttctttaaagcagg

SEQ ID NO: 65418 - DNA, 431 bp, Zea Mays
ttgggccgcaccctcacaattcggcccgctcacttggcacctgtccagcccagtggtcagtcggctcccatgcagtccaccatgcgtatgatgcctggcaggcgggacccactgtctgcctcaggtcgcgcacgcccgtactggctcgtggggtaggcctgtcaggtttaccttcctcctcgcaacaacccgcacgtcgcgcgcacaacgactgccgaaatccacgcgacttcctcgatccatctcgacctcgtaccccacctcgcggcaagctcggaggagtctgcggactcaatcgtgaacagatgggcgcggaaatcgcggaggctcggccaacggctccgtaacctgaacggtgaccaccttctccggccgagatcctcgttgaacgacccataaaacctagtcatcgctccctcccttccataaat

SEQ ID NO: 65419 - DNA, 455 bp, Zea Mays
gactcgaataggatgttctgaatatgttaagtctggttccaaggtaacatccattacatcaatggttcgatcaggaacccgaaggcacttcttcaattgggatacatggaacacattgtgcactgcagacaatgtttcgggtagttggagtcggtacgccactgttccacatctttcaagaatagggaacagaccaatgtatcagggggcaagcttcccttttacaccgaaatgggatacacccttcataggtgatactttcaggtacacataatcttggacttgaaagtacaagggttggcgtcgtttgtctgcataactcttttgtcgagcttgtgcttcttttaagttatgtatttttcgttgaaccttacttccatctctttcaccatatcaggcctgaaaaaccacctttctcctggttcagaccaattcaagggggtacgacaccgtcg

SEQ ID NO: 65420 - DNA, 551 bp, Zea Mays
cagggttaaatctataaggtttcctagactcagatctacccacgttggacggcgggttggtttgctaattttaggagggctcatatgcaaagtcgccaagccgaaagggtatcgtgatttatcgaccgcccgatcggaaacagacgcgccagattagatcggtgacatcgcgaaacggtacgcgatcgcgaccactggatcgatatccaagggtccagattttatttgaccgagatcaaaacgaactcgtccgatcatgcgccaatgggtgggattcaacacacgaaggggtacattgagctctaatttcccacatctgctctcggatcaacggtcaacgatttccttcccaccacatcatccaagcttcgtcttctacctagcaacaacaccactatggcggagcaaagctcccatggttgcgcgcgccggcgaagcatggccccagcattctgatgtatgaatcgcgacgcaaatggctacaactcaaagtggggaaggaattgaacccaggggaagaactcacatgtcacagccggttttggaaggta

SEQ ID NO: 65421 - DNA, 514 bp, Zea Mays
cttttggcaagactgagctgctatacttgggtcatatcatttctcaagatggtgtgtccacagatccttctaagacggatgctatgaaaaagtggcctacacctaccagtgtgactgagttaaggggttttttggggttgactggatactacaggagatttgtgaaacattatggcatcattgctaaacctcttaccaatctactcaaacataaggcatttcattggagtccagaagctgacgcagctttccaacagttgaaacaagctatgtgtgatactccagtattagccttacctaatttcgaagaactgtttgtggtggaaacggatgcttgcatgaatggaattggggcagttctcatgcaaagaaacagacccattgcatatcttagtaaagcattgagtgaaaaaaatcagctgctctccatttatgataaggattttctagctctcctaatgacagtggaaagatggcgtcagtatctacagagggctgaatttgtgattagaac

SEQ ID NO: 65422 - DNA, 537 bp, Zea Mays
ctctgaacgaaggttgttcagagccatcgtatagccttcatcttcaatatttttctgtgccctaagcgcattgctaagaattaagccctgcgaaaggaggacataattgagtatagcaaataaaatatttcattttcaaatacaaagttaacttctatacctttatgctattgtatgccaggctgtctgcaagatcatccttcgacaaaattgaaaggccgtcttctagcttcgagaatccgatgcttctacctatctcctggcaaacaaatatttctttgttgtctgggagacaatataagaaatcatcttcactacttccattaaaaaccaaggcacccttcggatatttcaattttcgcgcataatgcctggcttccaaaatttcttctttgaacaatttcttccccgaagcgtgttgaaagatgtagtcgacattttcgattaaagcttcgggggcaggaatcttttccggaacagtttgctctattgccttttcttcaagtgcggcatcctctgtcatagtgggcactgaag

SEQ ID NO: 65423 - DNA, 389 bp, Zea Mays
tccaaaggtagtcttcactgggatgaaatgggctaccttggtgaggcgatctattattacccagatagagtcattccctttttgcgtccggggtagtccggttacgaagtccatgcctatttcttcccacttccattcaggtatcgggaggggttgcaataagcctgcaggtttttggtgctcggcctttgttcgttggcagatgtcacactgagccacatactgagctatttctttcttcatccctctccaccagtatctggttttgaggtctaggtacatcttggtagtccctgggtggatggagtaggctgagttgtgagcttctttgagcaggacttctcgtgcctccccttttggtacacacagacgatttttgaaccaaagga

SEQ ID NO: 65424 - DNA, 621 bp, Zea Mays
tgtctagtcattgcactatttctggtcaagccgatgtgatcaaatacatgttgcataacccaattatgagtggtagaattggtaagcgggcttatgcactcatagaatatgacttggcctatgaaccattgaaaatctatgaaaggccaagtcgtagcggatttcattgtagaacatcggattaatgatattcataaactagacatgtcatacctcactattactccttgaactttatattttgatggatcggtttgcaatgaagggcaatgaattggcatcgtacttgtttcaccgagtaatgtctccttcgacttctctagccgattgaaaacttattgcactaataatcaagccgaatatgaggccctcttatttggcttggaacttttaaattgtatgggagtaaaacatgtgaaggcatttggtgattctcagctggtcgtccaacaagtgttagaagaatatcaatgttttgatggtactgtgaatagttaccttgaaaaatgttggagcataatccattcttttgacgaattcagtattcgacatatttcgagagttgagaatcatagagctaacaatctggcacaagatgcatcaggttatcgaataaagcga

SEQ ID NO: 65425 - DNA, 611 bp, Zea Mays
tgaaacgccgataatatccaacgagccccaagaaacttcgaattttagagacactagagggtctcttccactccaccacagacgcaacattcttgggatcaactgcaatgccctgctgattaatcacatgccccaggaaagccacttcggacaaccaaaatgcacacttcttcaacttgccatagaactgattctcccttagggcacctagaacgagacggagatggtgctcatgctcagcctcggtcttagaataaatcagaatgtcatccaggaacacgaccacaaagtcgtccaagaactcatgcaacatcctattcattgcttccataaaagcagcaggagcattagttaagccaaaagacatgactatgaactcataatgcctatacctggtgcaaaaagcggtcttctcaatatcctcctcacgaatcctcaattgatgataaccagagttcaaatcaattttggagaacacctgggcacccctcaactgttcaaagagaacctcaatacggggaagcagatatttattcttgattgtcacttgattcaaagcgcgataatccacacatagtcgcttgcatttatccttcttctcaacaaacaat

SEQ ID NO: 65426 - DNA, 554 bp, Zea Mays
ctcatttacgctgttttagcttacgttttacgctggaatcggcccgagccaggacccgcgcacgatcggctgcacgcgattttcacgccgtaattttaggcctcgtttgctgttacaaaaacagatataggatttacgctaaatttcgtactcgtttacgctgttttagctcacggtttacgctggaatccacccgagccagaacctgaactacatactgcatgatttatgttgtcaagtacatgtcattatgcagtcataaacgctgtccacagtgtcatattcgttccacgtgattcgggcatcaaaagattcctttatgcatggtttacgcatctttatccatatatatgcattcgtatattgccttacgcttatcatcctggattcttggctgtcgactgcatggctgacgcaagcacgtgggtgctaggtcgaccgcgtcctggctggggctttcattagtaggttgtcttatcccagataaaagacatattccaaatgcattttacatgtttcccacgtgcaagcaggaactgatgagttgaactcta

SEQ ID NO: 65427 - DNA, 681 bp, Zea Mays
tttaattcctggactgggcgcactattatcagaaaccgcaggggctaacacgcaaaattgcccaagactcaggattcccacagacggactgcgggttggtttcataaaagcacaggggttcttatgcaaactagccatagcgaaggggtatggaactattacaaccgtccgattagtaatcagtgatccagattagatcggaccccattccgaaccggtacacgacgccaatcgtccgatccaagatctacggttaatatattacgcgtgccagcggccctacgatcctagatctacggcggtggacgagccctggcgaagcgttaccttgttttaatccagcccgctcatcagaagatcaacggcgatcgtgtgtcgtcctccccacgccgagaccaggcggtgacgccgacgccgtcgcggtggtgccatggccgcaacacacaggatccccgcacagcagcccaaacctcaacgtggatggtgcaacacgacgagagtgacaaggcgatcgaggcaaggggacccatgacgtagtccgtgccccctgacgcactggccacggtatgaagtggttcttgcggcggaatcccaagtccggcgtgaaattgccgatgtcccaggcatcccagccaccacggaatgcgtcatacgtcatccccgagcccattagagttccgc

SEQ ID NO: 65428 - DNA, 833 bp, Zea Mays
gaagtccaatggtttttgatagagtattgacaatctttgccctagcccggttagggacacatcccaaaatttcttcgtctacaccaccaaatagtacggaaccgggtttgtatccgccagcaagggcaaattctttcaactcagaaatatctttgtcagacagttcttgaccacccaggtgtcgtaggtccaaatttgtgtcttccgaagctttaccagtagatacttcatctgtatctatcttaggaaccacatcagatataagcttgttaatatctgacattgtggtcccgaggttttcagcttcagtagcctcagtaggcttggtttcagtaccttcggctccggtggtatcttcggtatcgacaggcatagcaatttcttccgccgaagccgagggcgggatcttttcgatggcatgcatcatgttcatcattcgtcgctttttcagacccctgacatgtcccccaccatccgaagcagtctcctttccttccaagcctcgttcaacacccttctccttcgactacaataggccagtcagatccgaccccaagggacttagcattgcaaatgggaagggttcagtcattaccttcagtatctctgaaacatcgacagaggaggatggagaagggcccacagtcttttctagtacatcttgtaccttcgtatccactgaagatatcttaacgagtttacatttcttaggagccgatatcttcggctccgacactgttttcatcttcttcaaagtctcttggtcctccttgacagaccggacaacttgcctgctcagaatactgacaactccttttcttttgactcctcca

SEQ ID NO: 65429 - DNA, 719 bp, Zea Mays
caaacctccatcacaccaccatccactggctccgataacaaatcctctagaaccatatcctcaagagtctgatcaaaattcgcgagggacaattcttgcagaccaatgagagcagacaaagcaggagaaggaactccactactttcaccactagcgatgaactgccgactgtttttccgagtcaaaggaacttcatcctcttcttcctcgtcgtctacattagcaacacaggcagcgcccccattgggatcagcaacagaaggaacacacccattgggatcagcaacagatggagcacccacattgggatcagcaacagattgagcacactcattggggtcagcgtcagtaaaatcagtcacaggcacttcttcagcagcaggaaccgaggtaccaacgtcccgatccaaactggatactcgctggaggcgtctctttttctttttctgctcatcagtagaaggatcaagttgattggctcggcaagggcgcctcgggcgagtactagcaggcttctgaatatccaaggtcgtatcagcctctgggaggggcgccaccaccgatatcctagcaggagcagcatcagaagagtcctcagccagcaaatcaagcatagcacttatctctgcatcactaggattcaggggcacctcaaaatggacttgccgttcatcatcaggaatttccccgagcgaggcaaccaaggcgctgacttcttc

SEQ ID NO: 65430 - DNA, 612 bp, Zea Mays
ggaaagagcaacaagattgttgaagaagttgcaaaactctttgctgagggacctaggggatctgatggtgtggttaggagtgaaaggaagaggtccatgttgtttgaggatgataaactagtgttatccagtgtgccagatattgtcaataatggtgctaagaaaaatcgatcaaccaaggttgaatgagtccaccctaagctccatggtgctatgatatacgcctagtttcactaatgtggcctgcatctggtggacaaagaagggacaattaatttactgcatttgtgcggatgagagatgagcatcgtgtgctttggcttaggaactttctggctaagcactattatgtgtgaggtggttgggtcctcattctacgctgcttctccggttaaaaaagagtagtaggatagaatgcaacaacacctcaattgatgactaataaatgtgaattaggtgttaaagatgccatcataaacatttcagttattttagctattgtcattccaacttggttgtgtcccttgtaatgtacttactactaccaagctgtggtatgacatgctcattttgaatatcgtagtacatccaatgaaccaaacaatattttca

SEQ ID NO: 65431 - DNA, 484 bp, Zea Mays
agagcaagtccgcggatgagaaacgacatgtagacaacggattcatgggtatctttgtcggaacaatgacctcatgacagatctgccaagaacagagttcctttggtggcaaaaccccagtctcaatgaggtggaaaagatcagattcagagataatagaccagcgaacggaagctggctgttgggatcgatgggcgggatgatcgcagcaacggcgctctgcctcttccgcttgggagccattgcaatctctcgggcagaacgagcgggcccagaaattcaagaaagcagagaagtggctgaggaaaaagtgaagttagggcttggaaatcaaaaaggcacgtcgacacgagtataaatgggtttcttgggtcgggcattacctctaaagtgccagatcaccactcggaaaagtaaaagcctcaatcatcactcggacattacctctaaaatagcagcactgtcaaacgcatgaaaaactttc

SEQ ID NO: 65432 - DNA, 377 bp, Zea Mays
tcgaagaggtctcaccaccaaattcgggcattgtggctggttcaatatagcgtggtcggtgagtaaggaccttcacctttctcctcttcagcgcgggctcactcggaacagctgaagtaacatccttcccagaagttgcactctttctcttctgcccccttggcgggtagtggtagtcaggatacataaatctgatagcatcaaaaaacctatttagtcttttctttttccggctcccgaaggccgcagataatgcattatcttccgctttggagtacggcccaagcagttcatcacttgtagcttcgatacatttcagccagtcatcatttggctcatcaaatttatctccatatctgaaggtgtatttcagtcga

SEQ ID NO: 65433 - DNA, 829 bp, Zea Mays
ctgatacctaattctacccttaacaaccataacccctcaatcaattgcaaagctctagctcctaatctctctgtccacggtgatagcgcgaactacggatgaaccgaggcgttcccagtgatcctacgtgttctagctcaattggccgggtcgagaagcatcaagagcacacaagagagatgaaacaagagcgaggagggcatgatcggacctgtggagagctggccacggcgatctcacacactacggtgttcttgacagatttgggggaatcccaaattggggagctgtggggacggttggaggtgagggctggttcactgggtgcacaactacttagtagagctcactggggccgcaatttataggttccatcgatggtggcggctaattttggagaagacgcgtggcggccggagagaggggtggtcactggcgcaagtgattcgtggctttcaccgtggcctaaccaccggcgatgaccggacatgctaaggcaagtcactgcgacgtggtagagtacctaggcacgtggcacccgcgcgacaggcggccaactccggcgaggttatctggaccggctgtaaggcaagggggtacgacggtcagggcgaaacagtgtcccgaactcatccccagcgccagatttttcatccggtgattgttatctgtgtttaactgggcgtgaatcacaacaccagagtgaatccgggcgagagaccaccgggagcgaggggggctgaacctgagatcgtattcagttactgtaccatcagaatgccattcagagcacctgacagagcatatttgggggtgatttgctccaaaa

SEQ ID NO: 65434 - DNA, 467 bp, Zea Mays
tagtgcccttatatattgtagcgcatgtggttggggctataggatcactagggcatccgaccaaagtgagggaggggtgaattaggtcgataatccccttttctaacctagggcttaaactctagtgcttagaataaaacctaacacgtccgacacatgctagttaaaactaagttgtatcgaagcactactctagacctaccacaaagatatatgcatcaaaaagtaatgcagtaagtaaagagtggggagtagaaaacaaactctcgagtagacacgtgatgcaacatggttctccacaaaagtctacgtcaatgtgacaccaaggctcttctgatcagtgtcttgctcaagccaccaaggctttgggcaagcaaaagctaattgccaccaagccaccaagtcttggtcactaccaccatctctctcggccagacggatgaatccactatgtagctcaaagggtc

SEQ ID NO: 65435 - DNA, 425 bp, Zea Mays
gtgttattgaccactgctctggtattggctcaacaggacattgaaaaaccttttgatgtgtattgtgatgcatcaggtagtggactcggatgtgttctaatgcaggagggtcgagtcatagcttattcttcaagacaactatgccgacatgaggagcacaatccaactcatgacttggaattagttgcagttgttcatgccctcaagatatggcgtcattatctgctggggaatatatgccatgtatatacagatcataaaagtctgaaatatatttttacccaatcagaactgaacatgaggcagagaagatggcttgagctaattaaagattatgactagaaatccactaccacccaagaaaagccaatgtggtggcagatgcactgagtcgcaaagcttcctgtcactgtcttacagtaagg

SEQ ID NO: 65436 - DNA, 415 bp, Zea Mays
gttccatggatggcgctcgtgcctgatgcgtactatgcttggtgttgatattgggtttccgaaggcttctagaaaacgtcaacgcatcacagacaatgtcgaggaaccaatcctaaccacaagtttggcggtgacgacatgatacaaaaatctaaaagaatggtaagtttgatttagctatgtcgatcagcaaatagtacgattgcttatgaatgttttttgtttatacaggaagctatgagtggccaaaagcctagtgacattgaggtctaccaggagggccacaaaggaccagaccctaacaaccctgaccagctctgcagctagacagccaaggatcggctgatgagttttggcccaaaagtacaaatgttcaaagtatagaaattcctgcatttgtaaggttgtgaatgat

SEQ ID NO: 65437 - DNA, 1553 bp, Zea Mays
actaagattaaactccttagttaaatccgcaacaaaacgatgcttcttagggtctccaaaaccatcacaattccaaaacacccctttcattttaacttttgtttttgcacgataacttcttctttctttttttcgatctaactttcttcctatgtgtatcactacctggatccaatggattttgacaatccgccttgttgtcaactccgttatccattaagtcatccatgatacccccacaaagattattaagagtaagtatgtctaattcctcatctgactcctcatccactatgttataaacagtcccttctaccacgctatcccgacccacctgactcaccatacctttatcatagctattaagaacctggattgacttagctaaatgggattcctctacacctagagagataccgatcgcgtcaagattcgaaacaaccaagttcaaaggaatttgcaaaactttattacatgaaatagaggagggagatgggctgttacctccattacgttcagccttcagccttttagcacgggccaaggagttttcatccatgatgctcgtcctccgcttgcgaccagctgcgacagattgtgaagcttctggaatagcagccagctgcttcaatttctcacagctatcatcaggcgattgcatcaactctggactatccattggcacatgatcagcaataacagccccagcctgatcggtgacaacagcaaccaccacagattgcttagccttcccgacagcatcactcatcaaaagcttctcatcatcaacatcattctcgtccatgctggactccaatggatcagcatgtagctcctgaccgaaccccaaagaaccatcaactaacacaccatctatcggctgacccgcaaaggtagtgacttccccgagagcaactgatttgtgcccggtattatccccaccggccagcttgttaaggggttgatcactagcattttccttcctgttgagaccatcttcgttgttcctatcagaacctttatcctcacttttactatcagcatcatcatcaaagaaagaatcatcatcaaccgccattgggaccgctgtccctgcgccattttccacccacaggtgtacctcgtagaagaccttggctacttcgacatccaccgcaaagggaattgcctgtggatcgatcacactgacctgcatcctacatatgccatgatgtctgtaaaacgccatatcaacatcggatgcaacccccagggtcgagccaacaccccaaatgtgaggcaccgtacaaaattcaaccggcaacccattaaactgaatccaagtatcaaccaacttagctttgacacgacctccagacgagcataccttaaactcaagagtcgccttctgcgttttagccctgaccggaccccattcaaccattctattcaattccaaggaggactgaaatatggttttgaaggttccttgatcaatttgatccaccttccacggtgctaggtgcggaaggagcctcttaagttcacataccacattgtccagagttaacacg

SEQ ID NO: 65438 - DNA, 423 bp, Zea Mays
cgttcgtctagttgctccgctctggagttgcgtgcttcgtgcccagctggtaatcgtatggcccttgctgttcttgctgctgctgttgactgtgcaggatggactagtttcaaccttaggatctcttgctacctaattcaggtgcgggtgcagcttaagtcgcatagattttgggttttcagctgaaaatcacgtgtcccatgccagttgcgcccgtgcgtggggttttagcacggttcaattgagctgtttcaacaaaaccttattattgcgctcgtttcttgtacttgcagttttttcttcgtgcctgtgttttccgattagagttactttgttccacgtttagttatacttgattatcctgcggacaacctgatattgtttccttgccactgtcatcccaatgtgctgttgataaacgaa

SEQ ID NO: 65439 - DNA, 763 bp, Zea Mays
cgataagccaagctgccaacccgggctaagatagagaacggtccaatgtatctcaggctaagcttcccggagacaccgaaccaaacaactcctctagtaggtgataccctgagaaggacttgatcccccactgcaaactccaagtcccgcctcctcacatcagcataactcttctgatggctctgagcggccaaaatattctgacgaatttcccgaattctcagatgtctgctgaacccaatcaggaccaaacagagatctctctcctaaagtatcctagcacaaaggggagatacaccgcctgccatataaggcctcatatggtggcatcttgatgctagcctagtagttgttgttataagcgaactcgaccaaggcgagatgatcctcccagctacccttccaagacagaacacaagcacacaacatatcttccaaggtttggatagttcgctccgacttaccatcagtatgagggtgaaaagcgacactaagagagagcttggtacccaaagcaatgtgaagactctcccagaatttggatacaaatttggagtctcgatatgaaacaatggacataggcaccccgtgaagcctgattacttctttcatatacaagggaaccaactctgaagctgaatttgtggtcttcatgggaataaagtgcgcagacttagtcaagcgatccactaccacccatatagcatccctgcctcgaggagaacaaggtaagcccaccacaaaatccatggtgatatgctcc

SEQ ID NO: 65440 - DNA, 442 bp, Zea Mays
gcacccttgggcgacttttgcacgggtagtcttttggagaagacttcgattttgcgcacttattgtgctattccggctgcacccgtaggcgacttttgcatgggtaatcttttggagaagacttcgattttgcgcacttattgtgctattccggcttcacccgtaggtgacttttgcacggagtgtcgcacgcgagggtagttagcgctgcccctcgcgatgactttggtgtggtcgaatgccgaagaccatcgatgcggtctttttcgacattggcttagttttttgcgggggatttttgcttgtatattacatggcgccgcctcattaaaaacctcacccccctgggaggaaaagagtgcgggccggaataataatatttggtgaattacaagggcgtgatggccctgaggattcaaacaaaaaatttgcgaagattatc

SEQ ID NO: 65441 - DNA, 1076 bp, Zea Mays
ccccttctgttgaggtctgttcctacagaacccaaagaaaattctgggatgcttatcttagtgtcatctccgcctaatgatatgatgtctccaaacattacaggtgctcaaggaggtcctaagcttcctgcacaagaggcagatcttccacctccaattatattacagtcaaagagtttaaaacaaaaaagcacaatcctgcctaaaggaagtgttcgaaagagagtggaagaatttgagaaatcagtagaggctaagatcaaacaacctccatccatgtatacatctatagcgacgccgctagaagtgtgggttgttcaagaaccaaagagttatacttatcccaccattttctataaagctccacaggtattaccttatgattctatcattaggttacctacatttaacagtcatgctgacaaggcactaagtactattagagccgatccaaggttggctcatttgttagaaaaatctgggattaaacttcaacgcaatttcaggcttccatcaccgcctgccatttgtgaagaatggtgggatgaggcagaaagattaatcagaaaaaggaataaaaaggggagaaacataactcaatcaaagtatggcctgggttatagtcatgatgactcaagtgaaaatgaagatgatgaagtcaatgacccacgacgagtgacatgtcgtatgaccttcgagggtgcttcctcttatgaagaacaagataaggcttataaaaagccatactggtcccgatcaattcacacaatagcaaatgcttgtcaaggaatgggaaatgagcagtatgtcttatcacgagttgaagaagttctcactataggagagcagggagaagtcgtcgatgctgcccctgcccctcaacaattagaagatggtgttcaactcactattgatgaattagttgagatcaacctaggggctgaggatgatccacgccccacgtttgtaagcgcaagccttacacctgaggagcgagaaagttaccgagaattccttatggaatttcgtgattgttttgcttggtcatataaagaaatgcccgggcttgaccctcg

SEQ ID NO: 65442 - DNA, 534 bp, Zea Mays
ctcgcagacagtctgttgagcggcaggacttcatccgaaaggaggtccgaaaactgctagacgctggcttcatcgaagaggttcatcacccaatatggctggccaacccagtcattgtccccaaagcgaatgggaagcttcggatgtgcatcgactacaccatcctgaataagccctgtcccaaggacccgtatccactgccacgtatagaccaaatcgtggattctacctccgggtgcaatctgttatcattcttagacgcttactctggtttccatcaaatccagatgtctagggaagataggaagcatactgcttttgtaacagtggatgggccttactgctatgttgttatgctgtacggtctgcaaaacgccttgcctacatttgtgtgggcgatgagtaagactttcggggacctgattagggacaaagtagaagtctacatcgatgacatcatggtcaagactaagagagggtcgaccctagtggaagacttgaccctggtcttcaacaagctgcaggcaacccgca

SEQ ID NO: 65443 - DNA, 842 bp, Zea Mays
cattgttctaggcctctagcttaatgtttcaagtattcccttgtctccttggcgctctcatttaagagtagtagtccttgttaagtgtattggctgacatgattgcctcgtattctgccctagcaaattcagtctcagtaagcttgtcgtcttatgcatgttgatatctgagcagatcacagtttacttggagcaacatatttatcgggacttaagaagtgagcaatacggctttgcaaaagttgtgatgttgatataccgcagactgtcagtttcctgtaaagaacagatgtgagtcttcttttcaagtttctcttgctcatatggccctggattctgtgaagttgatatttttatttggtttgcgatggatacttcttacactttgttattgcttttgcttgttaaaaatgtaattgttgttttcttaattcaggcctctgtttgcaagtagcctattaagcattgtccacacccttttagaccaaaagaggcaggatgatttatgtatcgttggatgcgaaaccttgtttgattttgctgtcaatcaggtattcctattggagtagatgccattgtccattagcaggactcagtttatatatagatatgtcccattattggtgatattgagtctgtctattccaggtggacggtacatatcagttcaatttggaagggctggtcccaagactgtgtgaaatagcacaagaagtaggagaagatgagcgagcaagtgccctacgagcggcagccctgcaatctctttcagctatggtaagttctgtgattgtgccatatctaactgatatcatatgttgatgttagcatgactttctaaa

SEQ ID NO: 65444 - DNA, 609 bp, Zea Mays
ttcacgattgatttagaacagcactcgtatttttcttcgattcgccgtcttgcgggcgagatcctcccttcttgaggtataccatcttctaccccgtcaaatgaatacttcatacacgaatgatttagatcagcactggttttgttcaaaaatcctagtttattttgcccagcccatacgagtttagcagatccacacttgtagtttgagctttgaacttgttacgttgttcatcctccgatttagccccctggtggaacaaactttgtttgtaccacgacatgggaatacacaccaacactaagtagtcgtgcgcattcggaacaactttgaacccttctttgggcgtcatgtttctaggagatgcagacggcccctacaatttatcagttcacccgtacttgccaatggaaccaaggttttcaaactcgtagcctaacattagccatgacagcaaatccatttccccagtgatgttcattccactgaagcagatgtttattaagtgaacaaattgtatttctggcgtttctgtggaatgttaccctttcgtagcattttagtcttcaccaatatatggcattccactgacaacctgattatgtcaca

SEQ ID NO: 65445 - DNA, 328 bp, Zea Mays
gaaccgtctggccatccgctggcatgtcgtaccaagtgagagtgacagctagctctgacatcttgccgttggtggcacaccagtggcgcactggattggttcggtgcgccagccgagagcctgtacagtaacaactagtttggggtggttggtggtatttataccccctccaacagccatattcattgtcctgctgccccaaccatatattattcattactttgagcttgcaagtcacgtttgcatagtgaaaagattaggaaatcataatcccatgattagcgcctcattagtgcaagagatagccacctagaggacccaccactca

SEQ ID NO: 65446 - DNA, 322 bp, Zea Mays
gagcacgccttctggcgaacctgtaccggccgagacactcaatgacaagcgccctagcttggccgacacctaattccacccttagcgacactaatccctcaactaattgcactaatccggcctagagttcgtctgtccacagcggtgacgaataccgaagacaaatcgttgtgttctaggcgatttaatgcggtctagttcaatcaaatgggtctgcgaacaacaggagacttgagggaggctagaacatcacacagaagggcatgaactaacccgtagacgactggccacggtgagatgtctcacggtggcgttccgaccg

SEQ ID NO: 65447 - DNA, 490 bp, Zea Mays
cgtcggcattgttcaaactcgcatgcatattgcatgattattgtatcgatgatcatgcatgccacaagtcaacaagatctagatgcacagtactacaagcgaagcggcctttgtagagcttaattagctagcgcgcatatatataatattataataaagccccccttccccgaatctatttacgatccaatcgatatatatgccaagaacaacgagcaattttcaaaattgttttagtatgaggggagagggggggattaattgacggccaaatttaacaaccaagaacgtattaaggtagagatatatagctgtagcctcgtggatggatcgtactgcacctgggatgggggttgttcttgatggacttctgcccgtacttcctccacctgtacccgtcgctcggcgtcttgccgccacagctcctcaccttcgtcgtgtgcctctccggtgcccgacccgccgctccgaacctgccactccaatttcc

SEQ ID NO: 65448 - DNA, 676 bp, Zea Mays
atctaacagacttcgggaatggcccatcaggatgaaccactccctcggggctagtattgggaggagaccgaacacggcctcgatcccagagcgaagagcatattttcataccatacacaggttttcacgtgaaggggccctcgtcgaagtcaacatttgctggtcgtaggaccaccagtgaagaggtcttcggtccaatgggcgacaacttttccgcggaagctgaggccttcaccatctccttgactaaaggacttccgtcatccggccaggcgcaactagatggagcgaagatacgaaggccttagctaggggcaaaggccacaagtcgaccccgaacacctccagcataatagaagacatcgacaagggcccacccatcaacgtagtgtgagggtgtgttgtctggtatacgcagattattgtatgggctgcaccgtaattaccctgttgatggggatataccctagatatagttgttagccaagggtagggccgtgttatggacagcctacccctgtacgtgcctataaatacccctgtcttatagcgggatggaacacgcataacaagaagcgacagtttccccagtttatttcgttgtgcgtctgagctctcatctgctttccgagtatttgggtccacttgtcagctcatccacgtgacattgctcaac

SEQ ID NO: 65449 - DNA, 335 bp, Zea Mays
ataaagggaagaaaattgatgatgccccttcggaagagaaggattttgaccttcgggacctgggtggccagaaactttctgaggaagataagttagagttaaaagaattcactatgtcttgtggttaccaaccagggtccatgctcttcggtggggtcgatgaagaaatcttgggatgcattcgcgaccgcaccggggcgaagattgtaggcaccttatccaaaaggggttggattcccaaagttggagactgacattagctgctacaggagacaacatattgttggtagtttgttttattccaatttcaaggtgaggtttttctctaaactttt

SEQ ID NO: 65450 - DNA, 470 bp, Zea Mays
taataagcttcttagtaaatatatttctcaatttctttgctcgtttatactacacataggtaacattaattatttttctctcgtaagaaaactatgggaagaacagcaatcgcacgactagttgggcacataaaatccgttagtagcactacacaaacagaagcaaatgtttaagcaaatcataacagatcaatattggggatgcaaccaaaattggtgaggaacaagtcctttacaagttaatgataaaggaatagaatctttttcacaattgttgttgcaacaagcagaaggcaacctgacaaacacacatgacgtgtaagcatccttgtgcagcgatcaatggcgtgactggtagaaacggggtcgattgcagaacacacgaccattggttctcacatattgtgttatgccaatgcaaataccagcccacataaatgagagcaccaagtgccgagcatcatttcgtg

SEQ ID NO: 65451 - DNA, 564 bp, Zea Mays
gaccgacgctccatctctcattcgtcaatccattccggtgccgactggctctgaagggttcaattagctagcttctgattctgagcagttccttccaccggcacgagcacatttcatggagtttgctgctaggcttggcatttctagattagatcccaagctgagagattaatgcgagccataatccggccgtggtcccgcatttgccggtgagtcggtgaccgtaccaggggggacgggacttggattcgcaacacacacgacacaacggtttttgaagcgcctcccattcgcaagacctagctctttcggcttacctcattggcagcaggtgcggctgcaaaggagtcacagccaacagaacccgaaattagcttggtgacacaattgctatgcggccttcatttatggctttgtctatctatgaatataatcatggtagctcatgctcgctgcctgcttcatcggtcgtcgtcagcaaggcaggagcttgatggagtagcagacgagagttgctgctataatagtggttctgtgagtacgttctgtactgcactggcattc

SEQ ID NO: 65452 - DNA, 797 bp, Zea Mays
aaacagtaagaagagtagcactgtcatgatagtaaaaatctcaaaacaagctagagttcaatattgaaaaatgtcagttcatgtatggccaaggcaattgcttgcaaggaaaacggaactcttcaagaaaggttcacacaagaatggtccacaataacacaatatgcagattgctgagtagtttgacagaacttaaacaggtcagcgttgacacgtcactctgtatcctggctgaatgaaaacaagcaaccaatcaaactactattgcatgtacatatgttggctatttgggcctggttcactgatatgagtgactatgctgaagcaggaaaccaatcatgtgctttgtgatccaatgaaacatacagtggtagcacatccttgttgatcaagttccaagtaagggaactgagaaaataacagaacagcagggggaaaacaatcgtctttctcttccctcccccttttctttgtcttcctctccctttcccacaagtgacatcatctctaagtgcagacaagtcaccctgattagtaaatcccacaaaacattttgccatccacatacaatagcctaaaccagcctagaagattcaatcaagtttatgaaaaaaatgggtagaactgtagaagattcaatcaagtgcatttaaaaatggacataaacataatatatgcactcgacacagctacattacactatccaaacaaagcaaaccaagtaaatctcaaaaacagattcaaagcagaatcaaggccgatgagaatatctgctgccccgaaagcaaaagcacaaa

SEQ ID NO: 65453 - DNA, 738 bp, Zea Mays
ttacggcaaaatgtgtaggggttggggccatggagtggggtggggtgtgtgtgtgtgggggtgaggggggcagagaagaagaatatgaaccctcttcagcaacctcttgacaggtttattggttctcaaccaagacttagttattaatatgaactcaaactgaccattagtgagcaaggcaattaatcagcagaaggataacctaaagcaaagtcgccatcaccaatcccttaggttatctccagcagcttacccatccccatatccatactccgctctgcgaacagtgcagtctatggtgcaaagcagtgttttttgggttaccatataggtgaactgctgaagacggtcttagtgacacaaagtgcattctcatgaatggagcaagtaatgcagattccctcactgaaagcattgcaagagaagaatatgaaccctcttcagcaacctcttgacaggtttattggttctcaaccaagacttagttattaatatgaactcaaactgaccattagtgagcaaggcaattaatcagcagaaggataacctaaagcaaagtcgccatcaccaatcccttaggttatctccagcagcttacccatcccatatccatactccgctctgcaaacagtgcagtctatggtgcaaagcagtgttttttgtgttaccatataggtgaactgctgaagacggtcttagtgacacaaagtgcattctcatgaatagagcaagtaatgc

SEQ ID NO: 65454 - DNA, 916 bp, Zea Mays
gtggattttgtttgtgggagggggctttctttttggatggttgaggggctctaggatgggaattgctagagatgtcgggaaaggtgtcaagtgtgttcctgagatagttagggttttggaagccacacttgtttctgaggaggagctctcacaggttcatcaatcacaccatctttcacaggggtgataggcttagcaggggtggttttgataagcttgggagtgggtgaaggtttctttgaaggtgtcaaaccactcactcaccaaccttcccaaagcgagcgacacttccatccttagcaggaaagcctaaccccagtccgccagttcccctcttgaactgatagaccatcatgcccaactagggctcactgcacgacacccaactcaagacagatcaaaggtatgtgttttcttcctcgattcttgtcttgtcatgtctgcaggactcaagggcagactgcaaaccctcacaaagtgcacactgcgtaggtgcagggacacgcactgagctagccttctcaagcaaatctatcctagtgtctttctctgctagctcagactgcaagccaggacaaacggtacacgcacccaacaggatagacctagatctcaactcgtcgtgctcatctagcaaggtggagtactaggtctgcaaagtggtgatgttcgacatgtgtagagcgcactcatcacattcagtctcgtcggacaccacaactaaagctctagcagactcaagttttctaagtgtgctctcgtacttggatctaaactctctcctcccacgagcagcctgcctaagcaacttatcctgactatccaaagcaacattcagctcttctatctcagcagcgagatcatcggcggaaggcagtacctcagaagtagtgtcatcgccgatgtctttgtcgtc

SEQ ID NO: 65455 - DNA, 1008 bp, Zea Mays
gccggaattgcgccaacatgtggccccgggtgacagaaacctctcccctctcgtgatcactcaaaccaaatcgccgaccaccatggaggttagttaggatcttctccttcgaatccaaccgaattttgagccgggagggtactacgtgggtataaaacccagggccacgactgtccttgccatacccgtgcgctaacgccatggacaatatcatcgagcagagagaaattgagcgtgagggagccgctagcccgctacagtcgtcccactacctcagggtcatttcgttgcgggatagccaggacagaggcgtttcctcacgtcctctctcgtccctctaattttgagagacaacactgagatagtaatatcccaactctcgattatgaaacaaacaactttatttaagggatcgtcccatcccgtcccgtcctgtcattgaatggaagtatacatagccttgaatggaggatgcaatcgccttggggaaaagaattcctcgctagaggagcaccgtcggtgcggaactgaggctcacgtggacacgagtttctgcatcgccaccctgggtaagaacctcaccgagcgactcgctttcattcccgcatcacgtagcactccacatcttggtaggcgaagcatcagaacgattcggccgttgcgctggtcatggcgccaccgtgagatcggtgcactgtggcactatcttagataggtatcgggacatagaagatcatcactgaccatcgaattctggattgagggtgtgggttagactcgagtaccgattcggggtggatccacctcagtcgttggattgcgatccaatggatctgtgtgcgtaccgtttcggctgaagcttgatataattcgggtcaccggatcaagatcgcacgctaggatagactcataccccttctgccgcgacattttcctgatttgacccaagaaaactagataatataacccaccatccatcaagttcaaaaaataacaattaagtctctg

SEQ ID NO: 65456 - DNA, 1060 bp, Zea Mays
gagtcgtcgacgaggctccacagcttgtgctatggcacttcagatcctcctcgtctccctcacgacggagtagcccctgccactactcatgtcgtcgccctatctcgacctctgttcacagatgggtcgcgacgttctctagtagattttactccagtagtgaagtttctctatgagctcatgaggcgcacactactacccaggatgggatactgagaggccaccactcatgttcagctctggctcctcggtgccttgatctcacactctgagtttgacgttgttgattttctgatttgtgagatagaggacacagttttggatggtctccgtgctcggtgtcaactgttgtatactcactatctatgccacatatttgctcatctgatccagcctcctcagttccaggccaccctcgaggcctccagtctgcggtttggtttctaccgcccaactcctaaggaaaccactctagcactagttgatccactggcaccagatctcagggttgaggaagaggccatccgacagtttgaggatgagggtgcaattgttgatacttcttccgatgatgatgaggatctggggattccgccaccacatcctatgccacctcctgagccagcactagtgttgctcctctagcaattgaccctgctttggctgccatcctttagtcgctcactcatcggcaggctcacatggccatagagcaggccaggcaggccgctatccaacagcagttgtccgaacgaatgttgtcaatgttctagaccattcaggaccgctaggacactctacaacagcagcttctagcagacagggcaaagcaccagacgttcatgacccatattctccagcataccggtgttccgatcccttcagtgcagtctgctccccctctagctcttcaagctactgttgtgctagctatttagtcaggaccctagctccactcctttggtccttccttctccccgctcaggccggtcaccctagacttcttgacccaggtcgtcggacctatcaacgctcagccatcaatgcctccagcatctgc

SEQ ID NO: 65457 - DNA, 676 bp, Zea Mays
ctcgtcgtgtgttttatgtgattatgtttacgagacaattaagaagtgcaagaaaaggtttagagcaaaatgcaagagaacatataagggttgtaagtgatagctttttggatcataaaaaagtacatcgattgtgtggtaaataagcatgtcaattatgcatcttgtattctttttgcatcaattagcaagtcataatttggctgcaagtgataatcctttgtactctgtgttgtaggtgaagctaaatggacaaagacacgaccttttcatactcacaagaaaaaaacatcgggtaagaatcaaacctacacgcatgcccgtaggtacaaattcacatccaaacccacactttatatgtatttatcacaaacacatggataaaatgtgcctgttgacatccctactcaggaccaacatgcctctagcttgaaccctttgctttattcatcaaatttctgtcaagtacttgtagtacatttgtgtcgcaccacagcgacactttgttattgcccttagcataaaaatatagtcaatgagtgttttgcaatcatcgtgctatgagaagagtgaaaatggcttagagggggtgtgaatagactaaacctgaaaactatcaccacaaacttcaagataatgtcaaatttacagatcaactcgtgcaggtcagttcaac

SEQ ID NO: 65458 - DNA, 309 bp, Zea Mays
cagatcactagcagccggtctcaagaaaattaccacatcatcagcatagagcgatattcagtgctggatggagcgagttgagaggggttgaagcaaaccctcatcaacaactttaacaattaggccattgagaacatccataacgatgatgaagagaagaggggataacgagtctccctgccgcaggcccctcatgtgttgaatgtattccccaggaactccattaagtaaaatttgggtagaggaggttttacttctcttgcacgccccgtactcccttcactttttagagaccagatctacagtcgt

SEQ ID NO: 65459 - DNA, 296 bp, Zea Mays
agcgtttcaaccgaggtataagaggcatgtaacaaagctacttacgtgttgtgctatctcggtcgtcacggtcaaaccatcatcgatttcaacctctacgaatctacactcaccacatattatacacttcttctcactcgcggtatccttccagaaaagcatacagttattgtcatagacattgattttttcatagtccataccgaaaccagagagcaacttcttggactgatacatgtcctttggcatcttgtgattctccggaagtacatcactgatcaagttcagaagctcct

SEQ ID NO: 65460 - DNA, 1131 bp, Zea Mays
gatgaataaatatgggttgtttgaatggatatgtagttgggcgaggtgaagaacggtttgaattaaaaggtcggattaccaaccttgttctcttttcaggtcccaaagttgatctttcacccgcatatcattttgactttccgtatcccacatttttggcttcgactaacagtgtcgtacggatagccctgctctatgtgaggtctagacacgttgccatcttacactggagtctgtcattgagtcccctcatgaagcaattcttctttttcaagtctgtatccacttgatcaatggcgtactgggagaggtgattgaatttattgagatactgcatcacagaatctcccccttgcttaagtcggatgaattcttccagtttcatttgtagcactccctccagaacataatgttccataaggccagtttgaattcttcccaagtgacttgatgtcccgcaggttggatggcagaaaagtttgcccaccaagtgctggtgggcctcttaactgctgagcagcaaataagggcttctgtacctcgatgcatcggatcagcccgaacttctgttccattactcgcacccattcatcagattccaagggttcctccgccttgacgaaaagcggtgggcgggtttcggagaactccagataggtagtgtctggtggtccctgagggggaactctccctccatgttgttgaaattggttgcccgccatttcgcgcagaaagcgtgtgttgtcggcggtggcgttgaccaaggcagcgatagcctcggccatgttaggaggtacgggtggtggattgggggtgtcctccccgccgcgggatgtacctgtcccatcatgagcacgggtccaggatggcatgtgaggcaaagaaacatttggaaatataacatgccaaacatacaccatctttatttcattgcggaacagtagtaattatacatactccattatacaactcgactttcttccttattttacataagtacattacttaaactatactactctaatcctctccgtccttagttgttctgctgcctacttcaggagaccgttcatctgcaagattcatggaagaaggggctccaaaaaggtcaatccccccattagatcctcc

SEQ ID NO: 65461 - DNA, 294 bp, Zea Mays
atttgtcctatgccagagcaggcttgaaagaacctttctcttcagctaccacgatcgtcaaaggtttcaccgctgcagtaatctgttcaaaccctgggctacttggattagccacatacgcagcaggcggtgcagtaccctccggcgctagtgttgtactggcagtatcttttccttagattcatctttggcaacatcgaagaatgagctcatcttcggagatattcactcctcttccttctcctcttcgctctctaggagcgactccaaaggtgtaacctgtgaactatcaag

SEQ ID NO: 65462 - DNA, 769 bp, Zea Mays
attaaccacggacgtcgatgcaacataatcagtacatggacacacgttgaaagagagcatgaacaaataatagggctataacacatcaatggtatcctgttcacccagaacaagaattggtaaaaccgcatcattgctgacatttaattaaccaacaaattgtgcgatttacattacctttgctgaagtggatcttggaacctcagacgaataacccgagttgatgcggaaatctgaagggtacccctgtttcgttcggcttctgggatatgaagaacaaaaacgtaagtacgtcgatggtaatcaattctgatgtactgaaaaaactggacatggtgtcaatctactagaatccagatattgaaatgtattattgcgtcggctgctaacatacaaaaatagggtacaagtaccaaataaacaaataatagtgcaaaacacagttcaatggtttcccctaaaccgtgaccaacaatcgttcaacaccatctctgcatcacgttgctacgagtccataaaggggggataaacatcttaaccacggacgtagatgcaacctaaaccctaatcatgacatggggatgcaacggatccggaaaagcacaataggagaatgggatgggggagaggaagatggtacctgcgaagacgctgagatgcgaaaggggggaggagtccaaggttgacgatggcagtgggagttcacgacggagttgcggctccgcggtcaaaaccctagcgcagtgaagggtgacggagccatcaaaac

SEQ ID NO: 65463 - DNA, 1184 bp, Zea Mays
tcatgaatcttccatcgaactccatcagttcttgagaagaactctatcgataatttattgccgactttgatggctcctaccgtcgacctagcaccgaggctgacctccacaatgtccaacagtagcatggtgattcaatgcatgctttcatccagcagtttagataggtacacaacaccattctgcgcatcaccctgcttttgtcaccatcacctttagataggggtgtgcgacaaaatgctagagaagttggccacccgtgaatccaagatatcatgaacatcttctccattgaggataaatgtaacgggatcacagaggggcaggtctagcacaccccacatgcagtccagctagggctcgatggcacatgctcttcgtgcgggtctccccgcaataagaagggcaagtagtctattgttgccatcgctcctagcccagaccgggccaaggcccacaattgcgataggtgcccccgcgacccaagcggcatggccctaggaagcaacgtgctaggatgcaaaacttatgttcgctccacaacaccagcacgcacgacatctctgattgttgtgtggtttgggacctcatccggcagcaccaggaggagcagtcctagtagctacgtgcttcgtagaaggacccgctgcatggggacctcagccctaggtgggctcaacgacgtagccctgatgaggacccatgagcatcccttcttagggcctccatgggtagcgtctacttgatagggcagacatcgttaccaatcacctttagcaccatcgaaaacttccgcatggagtacatcgacttcgacattgccaagctctacctcccctacaacgccatccttgggtacaccatgctctacaaattcatggtgaccgcccactatgggtatcttgtcctcaaatgcccatatcgtctagagtcatctttgccccaaccgaccggctcgacacggtcaacatcctagagtctagagaggctttagaccgtctcccacgacatcacaaatgatcagcctcttgagttggacctccctcctcaaggaccaccgtctgcatcagtgtcgacatggtagggaaggagggagttccttcctcctcgtcccatcaaccagcaaccagctcacctaaggcgctctgccacacctcctctagctccccgatgtcaaaaaccgc

SEQ ID NO: 65464 - DNA, 509 bp, Zea Mays
ctgaatttggtgctaaagatgtaaaccaattgaaagcggtactagataatgataaaggaaacaatttcaccttgtgggcatctgttataccaatttcacttacctgcgctaggtattgtcctgcatgctcgtaggtagtttttgaatcatccccagaaaatttcacgaagtccggtattctaaacctcgaggatatggcacagtgtcaaaaaattcaggatagggcttcctatatgacctagtatgccctttgggctcaaaaccaaattccttgagagtccttgccacttgttctataacaccctcagatctctcaccctcagctgctgtatgtgtgactctcgatgctgataacagcgctctctgctccccaatcctgtaatcatttggaacaaatccttgtgggatcttgttccctataggtggaatagatggcccgtatgccatactctgataatatggctgctgtaggttaaagttcattactgaatccccactcctctcattaa

SEQ ID NO: 65465 - DNA, 393 bp, Zea Mays
accgacttaaggcattttcgacttaaaccgattgctccgttagtagggtatagtgatcaccctgagtcatgtaagcgtgagcatgtcgcaccgacttaaggcgttttcgacttaagtcgattgctccgttagtagggtatagtggtcacccttagtcatgtaagcgtgagcatattgcaccgacttaaggcgtttctgacttaagtcgattgctccgttagtagggtatagtgatcaccctgagtcatgtaagcgtgagcatgtcgcaccgacttaaggcgtttccaacttaagtcgattgctacgtttgtggggtatagtgatcaccctgaatcatgtaagcgtgagcatgtcgcaccgacttaaggcgtttccgacttaagtcgattgctc

SEQ ID NO: 65466 - DNA, 519 bp, Zea Mays
tatttttatactcaaaaacaatttctaaatctcttttttcctattttcattagttcctggactgagcgcaatattatcagggaacacaagggctactctataaaaatgctttagactcagaagtatcccgcaggggacggcgggttcatatgctaaaagatcaggggctttttaagaagaggggcgcggcgaagggaaaccgatcagatctggctgtccgatccttggctgatggcgcagattagatcagacatatgctgaatcggtacgcgatcctggcccttggatcagagatccatgactacggtttaatgggtcgaaggggtacgtgatgatctaatcctggccatccgttagccgatcgatggctagaatgcttcttctttctctagacccaagggacaccctggggcattctagtccggcggccttcctaccgtcgagctgcatcccggcgtcctagagcttccacggataccgaacggcgccacaccacaccgggatggagtaatccccggc

SEQ ID NO: 65467 - DNA, 1026 bp, Zea Mays
cgaatgaaacctttttctagtaattcttctatttgtttcttcagttctactaaatctttgacatccattctatatggtcttttcgagataggtgcggttccgggtaataattcaatagaaaactctatatcatggtcaggtggcatacctggtaattcctccggaaatacgtctcggtactcacacactaccttgatattttccaagggcttttcttccaagtgattgatcactgttttccctttttcatctgttgacttgtctatattaacttggattctttcaccttgaggacttgtcaacataattgttccattggcacactgtatcactccatcacaacttttcaaccagttgcatccaagaatcacatcaataccgttggatcctaggaccactgggtcgactgaaaaatctattccttgaatcttgatattaacatgggggcatgagtgtgtggccttcatgtcacctcccagtgaactaatatgtaatatcttcttaagagggtacttaggtatgttgtgtttttccacaaatgactcagttataaaggaatgcgatgctccagagtcaaataaaactgatgcaagtatggagttaacaaggaacataccatacactatgtcggcatcctcaggcactgattctgcagtgacgtgattgacccttcctctactctggttctgcggagtattgttctgagcagatccacgagcgggggtgttctggttatttctctggttattgcttttctgaggtgtctgctggttacgccttgggcagttgttagcatagtggcccagttcactgcaattgaaacaaccattgggttggactggtgcgttgttgcctctgggctgcgtgttactggtgccaccttgacggttctgtgaactcccaccagacctctggttggtctgagagttgctcctttgctgcttttgactctgattatttctctggccttgttgtccagagcgttgcacttgataattgtttccgccttgatttccagagcagaac

SEQ ID NO: 65468 - DNA, 455 bp, Zea Mays
cgaagctgtttatgtgcaacctttgtcaccaccttctccccttcttcatttacaagctccacgtacctcgacttcccacattttaagcatttatgctctctgtcatgttccttcgaaaaaaagcatacagttgtcctagcaaacatcaatcttctcatactccataccaagaccttcaagcaatttcttggaatggtacatgtatttgggcatcttgtggcccgtaggaaggacctcactaatcaaatccacaagctccttgtaacaattaattgagaatgcaaacttggacttaattgacatcagccgggtcacgaattcgaggatggtcacgtcagtgtgcccgtgaagaggctcttctgacgctttgaggaggtcaaagaacttctgaacctccggtgtaggtgaatcatgatgatctggggccaattcaggctgtagatcctcaatcatct

SEQ ID NO: 65469 - DNA, 1448 bp, Zea Mays
agctctctgtagcaggcacctctaaggctgaaggaccttcaacaacttccacgggaacggagcaatccagatcagcctctcgactcttaagaccacgctccaaggtcgacgaggcacgagatgctgctcgggataactctaacccggcatcaagcacatcagcgcaaacttccatcatcccaccatccgccggctccgacaacagatcttctgggaccatgtcttcgagagtctgatcaaaatttgccagcgacaattcttgcagaccaacgagagcagacaaagctggagaaggaacaccactactctccccgctggctatgtagcgccgactgttcttccgaatcaagggaatttcctcctcctcttcctcatcttcatcaataatgcggacggtacatccattgggatcaactttggccggattacacccattgggctcaacatcatcaaggtcacacccattgggttcagcatcagtcgggtcacacccattgggatcagcttcagcaaaaaccagcactggcatttcctcagcagcaggagcagaagggccggcatcttgattcaagcatgacactcgacaaagacgtctctttttctttttcttcccctcagcaggagaagttggatgattggttcggcgaggacgcttcgggcgaatactatcagacctctgagtatccacagctttgccagactcggggatgggtgctacagccagtgtttcagcaggggctgcatcagaggaatctttagccaacatgtccagcatggcacttatttctgcatcactcggattcaaaggcacctcgaaatgaacccgcctctcgtcgtcggggatttcgccaagtgaagcaaccaaagcctcaacctcttcgggagaaggtcgcactctaaggcccaaaccgctataaccagtagcaatatttgacacaaaactgatgaaggccttggaaggaggcagattccaggctgagtatgcaacaggagcaccaatattagacaccttgcctctgagtatcatctcaagccggctcaccaaatccacagcaggaatccttctgttggtaacccgggttgaatcagcaaggcctcgatacagataagctggatgcgctctatcttttagtggctgaatgttcttggaaacaaaatcggcaaccatagcctcgacagtcagacccttctccttcaataatccaacctcggcaagcagagcccccgcctcagctacctccaggtctgtgggggattcagtccaactcagagtacgaacatctagctgtctccctgaccggggggagagaattcccgtgattttccacaataaaccattccaagcgccatcctttgatgttgtccttgagtgggatgtcgaggtactcggttttcctcccatggcgcatctccaaacttgcaccccccacaagctggtgctgtccccc

SEQ ID NO: 65470 - DNA, 462 bp, Zea Mays
cttgatttatccgaccccatggttcatgccgcgatagttctttggaactggaggacaggcttgaacccatggtgggctagttgttgctctgcgacagggaaactggaggatagttttttgttcctctgcggcagggaaacgctagatctttctctgcgttaatgtgcttctgtgattctgtctagtgtctacgttatgtgcttctgtctagatcttcctctgtgttagtgcttttgaatatatatcttgatcccgttgtgatattgtttaggtaatctgtttatatgaactgaataagttcatgctgtcttgaataagttcatgttgtcttcatactgtcttgaacagtatcttgtttatatctgtcttgaataagttcatgttgtcttcatattgtcttgtttatatctgtcttcatactgtcttgaataagttcatactgtcttgaacagtgtcttgttt

SEQ ID NO: 65471 - DNA, 522 bp, Zea Mays
aagaaggacgaggacggacctgtgggtggctggccacggcgcggtgtctcacggcggcgcgacaaaccaatttggtggaaaatccaaattcgggcgctactgtggctaatcggcggtgaggagcggtgtactgggtttgcaacaagataacggagcaggctgggacatcaatttatagcgggtgactgcgagcacgacgaatttgaacagagaagagcccacggtgatgagggaatgagtcactggagcttgctaacgtggcattcactgggcaaaggcttacgaccgtcactggctgtcctccacaactcacgacgacatggtgaaatgacttgaggcgttacgtgaccgaggtaaatggcggcaaccccagcgacggtcgcacaaccacgtcgccggtacaagtgggtacgacgactgagctataacattgcccaagctcatccctcgcgcgagatcttttaccaccagtcgttatccacacaccacagcgcacgaatcgcagcgccggtggggatcatg

SEQ ID NO: 65472 - DNA, 611 bp, Zea Mays
ctgggaagtggtgagcgaggtgggtgcgggatacaggcgcgagatgaagaaaggttgttggcgagggagaatacgtccgctgtgtgaaggacatatatttacgccctctgtgttgcactcctatatgaattttgtttaaatttataaaataccaactctcttgaaagctatattttagccttaactcctatatttaaaaataggacctagtttaacctctcacttggagttgctctaagtgaaagaaaccggatatgccacaaggaaagattttggtgcagaaggcaaacaaacctctttccgagcaataatcggagcgggcgatgaaagcggcgatacaggaggcgaaaaggatggcacagagaagatgaatgaaagtgatggaaaacgaagagaatgagagcacgacgacgcaaagcgaccgggagagggacgacgcggatggagtaagaaagaagaaagacgtggtggaaggagtgcggatagccggccaagcatatcaaacagaagtaactagggcaacaactaatatgcactcagatcttatgtgcaaacgtgacagcgaggttcctggttcgttagtgtcggggaccataattaggggtaccctc

SEQ ID NO: 65473 - DNA, 415 bp, Zea Mays
gccctcacttgtatatgtgtgaaggcttgtatgatgaggttgtgtgcccttgcttgtatatgcctgcgaaggcattgtgtacttggtctggcatgttttgttatgctgtgctggtgcgtatagtcggtctcggcgcggacggtttgatgttgtcgtttctgccttcgttgtgctagtccggctgcactcgtaggcgtcttctgcacggatagtctactcggtagactttggtttctttgcacttgttgtgctagtccggctgcacccgtaggcgtcttctgcgcggatagtcttcgcggtagactccggttttttcgcacttgttgtgctagtccggctgcacccttaggcgacttctgcgtggatagtcttcgcggtagacttcggttttttcggcacttgttgtgctagtccg

SEQ ID NO: 65474 - DNA, 602 bp, Zea Mays
cttagaggaccttcggagaagaagcaaggccccaacagtcatcctccctcaaagtggaacaacctgtttcaatatagcttagcttcgaaggtctgtccttgggcagcaccggagtaggtcttgacgacgacgaagccctcatcgcttcagagatgggcagggtatcttgtcgtgcctatgaagaggtaggtgtgattggttttgtgatggtccgaatcctagccatttgagtggactggaaattgtctaagatgacttcgctgaagccggcttctaaagcggcgatggatgggaagctttggtggcacagaaaattttggcggcaggtagttgagggcagtaaatgtgatacatgcccacccgcttgattgtttttatactgagaaatgcgcgtgaagcggcgtgagtcgcaaaaaatgttccctcgcatcaccctcagcttcaccctgtttgtttaacttccagatcaattgttttttattgaatcgatctatcttctccataatgagctttgaaaaggtgttttcggaccttcggcataaggcctcccaattttattttttgcgatataagctcgttacgaagaaacgaactcattctgc

SEQ ID NO: 65475 - DNA, 888 bp, Zea Mays
cttttccataggaatatggagaatacaggtgtgccccagtggaagcagctgctggcttcctttgggccaattgcgtaaccttggcatttgggaatagagataagcgaagcagcagcatgaatgtatgctccatcaggtgctgttttgatcttcccgtgttatggtctcccctgatgcctctatggagcggatccacaagtccatatagtgtgtactttgactgtatactgaatattcttgcaaaagaaagccttggtttctttgaaaagcaataaattatagcacaaatgaatcaacatattctagtgaaaatcatttgtctggctttgtgctgagagctttaacgatgaagtgggaaatcttttcgatatttggatatgtaaaataggatcatattatacccaaattgtgggacgttattctcaagtaaatgtgatttccaacttgtttgctgtttgtagtggtgatttgtgattctcatcattccttctcgttctgttctgtttttttgttctttgttttgtttgctgtgttgctttgcttttgcctaggtgcataattgtctacttcattccatgctacggtttccattaaagtttcattggaaattttcttattgtgaatgcttcatttgcaggtcataattatggttcctcctcaatggctactaggtgcagtagggattcatatgatgacagtgttaacaactgcacacaagttactgcttcgaaggtacagaaatgttttgctatgccatctagcatttcttatgtcttggaagcaccattgaatcatcgataattcaccttctctaatgcattttctattacgcctgttcaggatgtttcttctagggaagcttcaaatgtcttcacatggttaggagca

SEQ ID NO: 65476 - DNA, 1260 bp, Zea Mays
caacacagttttcgaaatctgttctgacggtggacagaacacagcaaccagtctgtaaaattcataactcctaaactaccaggcctatggttatgaaattttaacacaggcaagatcagaaaagcatctacaactttcttataacgatcatgaacagattgcaacattaaattaataaacaatgcagtttctgaaatctgtacagaaagtggacagattcagttactgaatttgtaaaaagaataactcctaaactgtcagacctatggttgtcaaattttaacacaagtaagataatagagttatctacaactgtcttgtgaccacaaataacttatttcaacattaacttaagcaaccattgcaatttctaaaatctgttcagaaattcgacagattcaggtgctgggcttgtgaaaagcacaactcctaaacgatctggtttatggctgtcaaattttagtacaagcaagataatcatgttatctacaactcttctatatgacttttctacagaaaacatgatttggtttatcaaacaaacagagcttctatataattcaagaattgccgcattctagagacttgaatcattctagcactttaccatttcttagagttaaattaattaaatgaggactaacaagtagacttacaaattttatccaaatcatttagtgcactaaaattactacaaccaattaacaacgcattcttcacgataatcacccaacaatttgcgttttaaattagacatcacatgagcactactactttttacccgcgatcataaccatacgcatttagactataacaagtaatccatcataactacgagcttaaccaaagccatctaacaagttaattaaccaaaggaatggcatagcccgccatacgacatacacatcggcttgcctattattaacgcagtccgagacaccacatgtatatatatcacaatcacttacgccatcgactcttacttaacatcagttggctaacgccgtataagacttagcaaaccattttagacattgtaactcgaaacatgggttgaagcaggttaattagtttttcttaaccatttctccacttgaattagttaacacacaagtcacttaaaataccatattttaggaggtctaacatggaggcatttacacatggcgtaaaactccataagactacatttgctactgacaccaatagtacctactaacctattattcaccatacgaacacaattactcgccgcctact

SEQ ID NO: 65477 - DNA, 535 bp, Zea Mays
tgaacatcaatcgtaatgttgaaccgaggacgatttgttgtcaagaaggggagaatggatgagaacattactggctcggatatgaccatgttaatggctcatgttacaaaggtgaaactcttccacgttgtaacttcctttgatatatttgaaaaattgatattgcgtcgtaaagtgtgtttttatttgtagaacttcttacatggatcaagcaatgtgttgagtgtacaaggaaggcattaaagaacaaagaagttgattggggaccaagtaatgatatttccaacatccccaagtagaaaaccacgccatcagatttgaagccatacttgagtgaggagtacaagatagagtcgaggacaactctactgcaagaaggggtggatgctgaggacatcgcttccattgatacaacaacaacgacaaccattcacaagttactaagaaagactcacacccgttcaagtgaacttaattattaggtgatctcgttccttgcagttgaaattaattctcctcttaatgtggtactaaa

SEQ ID NO: 65478 - DNA, 1053 bp, Zea Mays
atttctatttcttcacgactcgggtcctcgaccacgcgccggttgagcacttggccggaatcacgtgtactcgccggcggtgacctgttccagtggtgttgagtacatgggctccatctctgacgctatccgaacatgtccatgggtttaatttgaccagtccaccactaatccatgtctgtccacgacaaccgcggagcaaactcgccggcgagcccgttccggtttacacaagttagttgcattcaatccaaggactcagaatgaattagtgacctacttggactatgatgcttgcacaatcttagacaggggcaacacggaacgaccgatcgacataagcaatttccatggcggcgttcccaggcgacaacacgacgttccctaagctacgacgtgataacgttcaatgggtcgagaccgggagattcactagctgtaaggaatgctaaaacatgaacccgggaggcatgaactgacctgagaatggctggccacgacgcgatgcctcactgcagcgacgttgaccgatttgggggaaattccaaattctcgggctacagtggatggattgaggtgagaagtgttgctctgagcgtgtaataagagggcggagcagggagggcactcaatttatagaggtcggctacgggtgttccgaattttagacgaaggcaagctcacgtcggtgaaaaggtgagtcactggagctcgtctaccgtggcgctcaatggggtaaggactcggggcagtaaatggccgtccaccacgacttactgcgacgtggaatgatggcgtatggcatggcacgatcgggtaaacggcggccatgacagcggtggtcgcgcgaccacgtcgccgggcaagtgggtacgacgagaccggctcgatccacaccccctcagatcttttcatcttcgcggtaacatctcacccaaatcaagcatgaatcactgcggccaacccaaatcaccgcacggagatcgccggtggctaggttccctccacctgcgatcttctttagtctactgtaccaagctgactccattaagt

SEQ ID NO: 65479 - DNA, 501 bp, Zea Mays
ccaccggcggcgagcagggaacgggatcttcttcagttaccctttactgtaccatggcaattaccaattcagagtgtctgacagccaatatttaggcccaatttgctcacgaatctttatggtaacatacttaaagttctgcagcaaagttgttgtccattataccatcttcatctttgctacagcagccatgggcaaattctttctagattagtcataaactgtttccaaagatgatccaatgccactgtcagtctgattttcagacttaatcagcctgacagccaaacttcaggcttgattatttctaaattcttcttaacaactgagcttacattcttaagcaaagttgttctcctatgatagatctacctagttgatgtggtgacctagggcaaattctcaataacttggaagatgtagagctccaaagttgagccaatatcactgaaatttcagacttagtatagaactcaaatgaggtccattttgcatttaagt

SEQ ID NO: 65480 - DNA, 473 bp, Zea Mays
gtcgaggtgccttcgaggccaaggcaagaggtgcttcaagggacgacacatgaggtgccccgtggtccatgtcgagaggtgcctcgagggctgttgctcaaggtgcctcggggggccgacgtgtaaggggccctagggattaaaaccgcaaggtaccccaagcctcgaagggcccagggattgagcgctagacgtctgagtacgcgaggggcctcgagagataaaatagttgtggtgttggtgctggtattggtgcggggaccgatgcacgaggtgaatcgagggccaacccgtgaagttccctagaggctagggcaagaagtgtcccgtaggttggcacacgaggtgccccgaaggccatggcaaaagatgtacaagggccgataagaggtgagccggagcactaggacaagaggtgtctcggaggtcgatgcacggggtgtcctagggaccgatgctcgaggtgcctcaag

SEQ ID NO: 65481 - DNA, 655 bp, Zea Mays
ttgttgaccagtagaacccctctataaaagccttcccaaccaacgttaatgaggttgcatgaacaccacactgtcccacatgaatcttcctcaacagatgcctaccactagatgtatcaatgcatctcatgaagactcccactgccccacgccaagtctttgccgatcagagtgtggttggcagactgcctagcaaggcgctcgacaacagcttttttgtctggctcttcttcattcttgatatatttgatgatgggtgctctccagttagttggatattcttctacaagcagtatctcatgctctatcaccttgcactcttctctcgagtcttgcgtagtacttggatgccatatctcttgtacataaacatctggaggaacctgagctctggtggaaccaagctttgacagtggattgatcgctataatacaatctctatccacatgatgaaacttcaggcctttgaacttatcttcaatctaacggattacaacacaatacttgctcatgacctccatggaataatcctaatctttgttgatctaacttatcgctaatagaaaatccccatataccatcacctgcttgattctgagtgaaacaacaatgtgaaacccatgtatcactagtacagagaagctctatacagtcg

SEQ ID NO: 65482 - DNA, 656 bp, Zea Mays
ttgtactgacttggcgataaggaattccatagtactcacaacaacaacatgttccaagatcatttgtctattggtgtacatccttttgtgtctgttcatcagttgtttcatttctggtgatgtttcgacttgccaacacttactggaatgaggaggtgagttgagatgctttctgtattatcagagcttgtgcatgtaatagcttttctaagtcaactatcgagggtgatgttgtggttgatgtcatatggttaccggtagtctgctcaggtgctataaactctgctaaatcaacttgttggagtctagctacaacttgagaggttgcttgcagaaactgtgcatgtgccttcttgaactgttacatctgagacttagctagaggagttgctaacacaatgtattctttgcacttagtgacatcacttgtagttgacattccaagttctgacatctgtatggatatagcaaggaaaggagggacgaaaagattgagctaagatagattataaagagtagagagaacccaactatctaaggtttaacctagctaactgttgtcgttgtggacaaatgtcacacaatacaacaacaatcattacaaagaagcaaatcaaacatagtcacaaagataactaacatgaactcaaacattt

SEQ ID NO: 65483 - DNA, 309 bp, Zea Mays
aaaaatgtttttacaatgagtactagtcctctttcaggatcttctccgcaacttcatttaacaatttgttaacgacttcgtcaacaatagattcagccatattgatgatctctagtgcttccttcgtttctggatcggccaggggatcgaacggttctggtggcggagataattcagctacagtggaaaaaattaatcagtctgaagccacaaaaacaaatgccgaagctagatgccgcgaaacaatacctatgcgtctctcgcgctctgcagcttgttttgcttgtactcgggcgtcatagatgtctt

SEQ ID NO: 65484 - DNA, 357 bp, Zea Mays
catgtatgcaatgttatgatggtttgtctggtatgatctttgtgtatgcataggagttgacatgtcttgctagaggctgctatcaattattgggctaagtaagagtactcgggccatgtctatgtatacgtgaacctatatggtcacacacataagggtaagaaagcctaactcagataggattcgaattagactaggtttagggttgttggtagacctcggagtcagaagcccaccaaggcacctatataatgagtggtatacacacgattagggttgacctaattcacccattgcacaccaaccgttgtgcccctcgtgccctcgccatgccactatctcatacctagcagttcg

SEQ ID NO: 65485 - DNA, 442 bp, Zea Mays
gtcaggacctgtgtgagaggccttcgtcacacatcgtctggtggcttacgctaggggcgtctagccacatgttagcaccggacccccgcctaggtgaagggtagaccttggaataagtggtgatagtgtttcccaaacttttcctgaccatgggctcgagccatacccatggggtccgagctattatcgcccttgtctggacacgtggtcttatttgcaggctcctagccctgtagttgaggttgttgattcctccctttatggagcttgatggagacggtgatctaggcctagagatgagcatggcctggtcatgactctatatggtgggccttagctctgtgctagatcggctgcccgtgaattccttaacggtggcccccgagggctcacttgacatagcaggagtgggtaccccatattcagggtaccgacagtggcc

SEQ ID NO: 65486 - DNA, 459 bp, Zea Mays
gttcctaggaacaggaatcattaaatttggagttatagattttaagatatgaattttccaaggttttgtaacacccaggtgttacttagggttttcactcaagactacacaagtaaagcccatcatcacatgtgacttaaattgaggaaagtacaccaaacttggaaatcaagatcctaagtaagtgcaacccatcttagaagtcatgccttggctttatcatgcacatatagtggggagaattgcccaaaccctaattcaaacccttttggacaattggagccctagaagtgagtatgaccaaaaggctatgaaaaccacatgatcatatcttgggccaattataaaatatgtagtacacttaataccctacaaaaaatagtaagaaagtgaccccaaaaaggtttcagaaaaaccccaaaaggttcaccaaaaggaagaacctaagagaaaaatcag

SEQ ID NO: 65487 - DNA, 444 bp, Zea Mays
gaactccagtgagcacgcagaccggccgaattgctccaagaccggtgcctagactaaggccaaaccaaattcatgaccaggggagcattttccccaacataattgcgcgaatggtcaagaggtgtgctctggccacgggggtcgtgaacatggcggctagctcgtcgtgttcccgacgattgggggcatctacattcaaattgatggcttggcgagcatcactgagctatgagaagacttaaacaagggagaaaagaagatgtgctaaccgggagggggctggccgcggtgaggttgagcttcgggtggcggagaatggaattggggcgaatgagaaattccagagcttggatgaacgattacgagtgggagtgggtgcgttggcttcgcaattacctagcgcaactacctgggtgctcaatttataggaaggtaaggcggtgg

SEQ ID NO: 65488 - DNA, 795 bp, Zea Mays
caggacgagcagcgatcacggcttggtggaagagttctttgcatgaggagtgtggccccttgcgcatggctgtgatgtgggtgcggtaaagctacgcccgatgccctttttgaataatcggctggtgccgagtcccgccttcgctattgagttgcgggggtgagatgcagctgcctttattagagaagtagaggcggaggcgatgaggattgttgggaagtattcggcaaggacaaagatgacgagaagctaggacattcgaggttcaaatgtaaggttgaaccgtgttttgagttgaatggccttcgctatggcccgtatcctgaagagggctctgctgaggctagggatgaatgaggaaagataagagtggtgacacgggtagacaaaggttgcttgaaggggaaggttgtggttacggcagcgaggaagaagaaaaaggttgaagttaaggtgaaaggtacgacgaaggcatccggggctgcaagggccttggagggttttgttcatgaattaacggagacgtgcgctaatcctggggaggtcatgaccttgtccgacctccagacaccatcttcgggaatgctgaaggtgaccaggggtgagtagcataaaaacgatcatattcccatggccttcggcgaaggttattttacgtcccatttggctcaagattttaagatttttccttacaggagaaacattgatgttgttgtgacagcactaatggaaaaaggccacgaggagtttgtgcggaagaaacggcaggcgccgctacggctggtggcccgcgtc

SEQ ID NO: 65489 - DNA, 548 bp, Zea Mays
ttctgctcgggcaatcatctgacggtggtgccgagccaagaaatcatactgtgcatccagggtgagtaggtatgcagtgaggtacacgactgaggggtcgtcctcaagcagctactgaccttccaatgcacgcatcctggccatccaaactgcacggtctctctgaaagggcggaaagaatctgagcggtgtgtcggtcacttcttcttcatagatctgacacagggccctcaatgccttgtgagcgacgacttgacaggtgtctttgaatctgtgcccagcagcagtgacactccattccacatggtgcggactggatccaatgtatacagccacgacacacttctctgtgccatgctcgacgaattcacgaccatcatactctggctggctcctgattccgaggcgaactatgcatgctttcagcagcttgggaaaactatcttcattctggcaaaagctggattgacagcggacctccatctgacttctgagagaaggaaagggggaaaacatttttgaaatgaaaggatgagagcaagatttat

SEQ ID NO: 65490 - DNA, 1008 bp, Zea Mays
tttgcgcagtcgcccagaatcagccagatctaattagtggggctataaaaaccttcctcccctacttctaaaccctaaggctctcgaacctaaaccctgtgacactgctctccttcgtttcaaagcacttcaactccgatctcgtgccccaagtccttcccccttcgatcggtgggaagattcttcggtgtgagataagttttcgattctaaagcatgtttttactcaagttcttcaatgtctctctctagttggtgcaaatcgttcttacttgcgatctctttgttcttggaacgtgttgttccttgtacacttgtaatcttgcctttagagtctccaatttgtggacgaccccgagaacgttttgtctcactagttctatgtgggcaaatcgagtaagtgattgccttgacctgtgtggtcggcaatgaggaatggggttaagaaagacccgaccctttgtgggcaccgcaacgaggagtagggaaccttggtggtgtgacccaacctcggtaaaaattgtgtgtcttatgtgcttttgtgggcgtgattttgtctctcatcatctcagatctttgatctatctagttggttttaattcaactcttccgctgcgtttattgttggtagctctaagtggtttcatttaagtttgtagttgaacaggtgaattgcggttgaaccggcctccccaaccgaactgtcctttctcacaaaagttcaaagtttgtgttgagaattgcaggtgtagcctattcaccccctctaggctacttttagtagtttaggaagtagtaaaacccctctatagagtggtagggctgttgttacaactatctcttttggctctctttggctacttgttttggccttctagatactcctagttttactcctctaggttgcaatagtttagacgaaatctgaaggtgattttgtttctgtagtatgtgtttgtgaactccataaagttggccgtaaccacccgcgggccagcgttgattgaat

SEQ ID NO: 65491 - DNA, 368 bp, Zea Mays
cggacagcggggcgccgggaatcagacgacgttgcagtggttgcggtggtggccgtcgaggaagcaggggtggctttggcgagccatcacaatagcgtgcacagctggtactcatgaacaggaggctgagagcacgaagaatagaaggagatgatgtggaccggttccgcgatgctgcgacaggaggctgagagcacgaagaatagaaggagatgatgtggaccggttccgcgatgctgcgatagtaagatttatagagcgagggaaggagtaacggcgctgggcaggtgaaggagaagggcggctgccatttatggcctaggtagaaaccgtcggcgctagaggaagaagaagaggtacgagcgcac

SEQ ID NO: 65492 - DNA, 884 bp, Zea Mays
cttgaatgcagaaggaatagaagtagacccttccaaggtagaagcagtgttaaaatggaggcagccatccaacgtcagtgaagttcgaagctttctgggaatggtaggatattaccgccgctttatcaagggattctccagcatagcaagacctatgaccgagctcctcaagaaagacaataagtttgtgtggaccccgaagtgtgaagaaagtttccagatcataaaggagaagctcacgaccgcacccgttttgacactaccggatatacactaggatttcgtcgtcttctatgatgcctcaaggcaaggcttagggtgtgtgctgatgcaaaacgagaaagtcattgcttatgcatcgcgcctactcaagccgcatgagcagaattatcccacacatgatttggaatcggcagccatagtgcatgccctgaaaatatggaggcactacctaattgggaacaaatgtcacatcttcaccgatcacaagagtctgaagtatatcttcactcagccagatctcaacctccattagagaagatggctagaattgatcaaagattatgaccttgagattcattatcaccccgaaaaggccaacgtggtagcagacgccctcagccgaaaacctttcgagataaagggaaccaacttcttagaagattggaagaaggaatcagctcaattgaatgcatgtttaggaaacaacggcagccttgaagtcaaaccaatgctagaagacctcatatgcaaagctcaacgcctggacttagagacagcaagacttatggaaaaagctcgcaaagaacaacttttggacctcaggacagatgaacaaggagtcctttggttcaagaatcgtctgtgtgtaccaaaaggggagg

SEQ ID NO: 65493 - DNA, 361 bp, Zea Mays
agcaaatgatgtagcaacagatttccaaatactgagattatactttttaagaactttctcaatataacttttctgagatacaaaagagtaccagcacgacgatcacgctgaatttacatcccaagaattttctttgccggtccaaaatctttcatatcaaatttatgactaagttgagccttcaattcaataatcagtgacttgtcatgagaagcaatcaacatattatcaacataaagcagtagatacacaaaagatccatttgggaactgcttcaaataaatacaatgatcataattgcttcgagaataaccatgtgcaagcatgaacgagtcaaacctcttataccactgcctaggag

SEQ ID NO: 65494 - DNA, 659 bp, Zea Mays
cggtagcaatgacagcggcaagggcgacagtggtggtagcagcgacggtggcaagggcaacgacaggggcggcaaggccagtggcatagtgccactgatttaaatattaatatagatagtagcagtagaagtagtagtagcagtagaataatgtagtgttagttagtagtgtagtgtaagtagtaaggtaatgtagtaaccatggtagaagaagttgactcataatgagtcggcttcgagtttgtgttacccctccaatatgaatcaaagacgcagttgctccaaataataattgttgtgttgattttcatttgcgcatttgaaagtttgtctatgcgcttgacagtgctggtattttagaggtaatgttcgagtgacgactgaggcttttacttttccgagtggtgatctgacactttagagataatgcccaacccaagaaacccatttatacttgcgccgatgtgtatttttgatttccgagccctaacttcactttttcctcagccgcttctctgctttcctgaatttctgagtccactcgtttggcccgagtgattgcaatggcttccaagcagaagaggcagagcaccgttgctgcaatcatcccgcccatcgatcccaacagtcaccttctgtttgctggtaatcacatgtct

SEQ ID NO: 65495 - DNA, 465 bp, Zea Mays
gtcaccctgagttaagtaagcgcgagcatgttgcaccgccttaagtcgttgccgacttaagccgattgctccgttagcagggcatagtggtcaccctgagttagtaagaatgcaggttgacaatgaacaatttgagcgctctcggaatcttcttattgatgatatatttctcagtttacagagtacattgtcgtcccaatagcttttggaatacagctagggataaaacttcctgaggtgttctatgttccatgagttcccgatttctgtgccatccatctgagtgagacgatatgatcccggctgagtgacttctgctactatgaatggtccttcccatagaggtgacaacttgtgccgcccctcccccgttagaattcggcggaggacgagatctcctactgcgaaggatcgatgtctcatggtcttatcgtgatagcgcctcagggtttgctagtaccgtgc

SEQ ID NO: 65496 - DNA, 799 bp, Zea Mays
tgctctcagattgccgccgttatccactgactcatggaaaacactctgcgataagttcttgataaactttcaagggtataggccagacacagatgccctgctgaattatcattctgcaggcagcaggagaaagagacccttcgggagtactataagcaattcctcctcttaaagtcgcaactgtcatcagtcgacgaccacatagccattcactatgcaatcaggggtcttcacgtaggtgttctatacaaccactacataagagacccacccaaaaacttacaagatctatatcaactgttctaaaagtgtgccatgtccgaagagccacaccaaagaaaaatcgagtcacaacgaaagcccaaggacactctgcagtccagcaatacatgggtcaggcccccataatcgaactcaggctggcaaaaccataaccagtcctaggtgcacaacatcgccaatcagcagcagactagagacacaactcgtcatcacgaataccctgcgcagcagggcctcagcggaaacactagaggcaggggtagaggccgaagcccatagcagcgaaggttctattgccttttccatggcaaagactcggcacatcccaccagggactgccctaaaaccaaagccataaaggatagaatggccagaaaccaactggctgacaaccaaagagctatcgcccacacctaccatccccaacaatataactagcaccaattccacaatgagcattaccatccccactagcaaaaccacaacatataccagcaacaccaagaaatcccagctc

SEQ ID NO: 65497 - DNA, 693 bp, Zea Mays
gcgactttcactttgtgattcttgattcagcctcgcttgcatttatcaatgacccgataagagagcttaaagcactcgtgcctaggactctgttttggatccgtttgcaatctagagaggcaagataggtgtcgacatatttgtctcccacatttaataatgatctccgtcatttcccaaaacgaaagattcattgttccgtattcccagcacaatgatattgcgcgcattgctaggaatttcatcattaaaatgaacctcttcgtgaggcaaatcaccatcagggtgaattaatcagaggagagttatcacggaccacatggatctgtaataataacatatgctttgactaaggccgatggatcatattcacgggcatccccatagaatagatcaactgtcaataagtcaaatgtggatatgatattaatcacgggtatatccacatctacatcaggtagaagcattcaaatcaatatggttacgtctcaaggatttctggcaaactccatatacacaggagtacacactgaacgacaagttcagtttggcttttgtgcgttttatagaatattgaggcattacactaaatgggcatttatcttcccctaatgccgagatgttctaaaagcatgatgtcgggtaccataattaggggtaccaccaacactcctaaactcggctggtaatcac

SEQ ID NO: 65498 - DNA, 1023 bp, Zea Mays
caactatatacctccgccacgacaagctcctgtctacccagtggtagtagacgaagtccctgtggatctccatcaccttcatgtggagaatggagtgattctggaggacagctcagaacagattctggcgacacccaccccgttgtcagaatcactagcctttgcagatggagcttcatcttcagccaccaacaccagcagcccaaccccctgctccaggaggcgacgatccagatgattctagtgatggtggagaagatgatgatgatgatgaagaggacaacaatgttcgagacgaggcacttccctaacctgctgtgggatgttctacatgcgctaggaacctatgtctgacctctgtatcacacaaggcaagtgtctgagcctccccgagcttgctactacatcactcgtgtgcgtattagggtgatggatgcgggagataaaggtttcagggctctatcagctcataagtctctgacgctgctatctacctacgctgcttcggtcagcaatgctaataggcgagctctgtgatctctcaaccacacttaccggcagcagctgcatgacacgaggtacagacatcttcctctatgtctttgtggagaaatccagaccagtgttgttccaggtgaagctggagaagatcgcatcaacacccttgtaggtgtgctggcaggtcttaacactaacctggacagtgctaccctagatgtttcgagggtacatggagaactggaagaagctcacgccaggattgcagccctagaagctcagctcgaaggaaggaatccacccgaagcccaagtccctaccatggctgtgtccccgccctgcaagaggatttgctatggagaaccaggatctatcaccaggctactatagattttttagttatattgtaataagttcagttttgcgattagacgatgaaacttcttatgacattatgattataataataaccgtgtgatggtgatgtttgcataatggttgatttggatttttgcttgagtgcaa

SEQ ID NO: 65499 - DNA, 516 bp, Zea Mays
gtcgaaaataactaacacttaattatctaaaatataccaaccaagttttcatgcataaattttcccatccaataccaacaatcaacatacaccaatatcgcatctaaattatataacaactaaacttgaacaagaggaatgagaggaggtggaggagctaggggatgggtcgatagcgagagaggggcatgtacacaacactagtggcggaatgggcgcacacgtggagcggcgatggttggtaatatagacctgttcaaacgtcaggtcagatcgaatcaaggccgggatgtggattgttttacgtggcccgttctcgtcctgtgtcaagtgttgagtccggtcggggttgtgcttcctattggatatgtcgggtcaaggttttttttgggttaggttaggttttttggctttggatcgggatttttttaagttaggtcaaattttggataaaaaatcatgactcgtgtctaacccttattgcaggtcaaaaactataactcatatccactcgtt

SEQ ID NO: 65500 - DNA, 859 bp, Zea Mays
gagcgatggagggttgaagcaccaggggaatcccttgtcagacttgaagaatcaccacgggtcagggagctccatagctggtggcttctgctgcgtcaacaccggtcgaacagagagggagaacacgaggaaccgagcgcaggattggggtcttcatcgtggaagcgagggagaagtcagccgcctctgccatcgacgccgtgtgtgtggggggaagaacttggtggactggtgcgtcgtcgtgggctccaaccattgcgctgtgggactgggatcgtcctgaccttcattggtgcgcgtggcgaggatcaccagtcggctccgtcgcgaatcagcatcaccgaggagcgcgctctgtcacaacaactggtgagcaccccttcctggcttgcgaggagagagagtaatgggcgtaaggtagaagatggactaggaccgtccgattgataatgagcgcctcagattaggttagcttacccctttggctgggcggaaccccgtccgtcgatcccagatccaaaggctatcaccgtgtaccagtcactttaggggaggttgaatctgcacccttgatggctgatcgaacgactcagaccgcgcactgattcttatcccgcgccaatctaatctgggacgtccatattcgatctggcggctcacgatcaccgatacctcttcggacgtgccgttttataaaagaaaccccctagtttccagtattcaacccgcagtccaccacggggtaaatctgagtctagggaatacttgcgcaccagcccctgtcttttacagaatttaatgctcagtccagagaacagaaaatccaaagaattcatttagaaaatacatttttgtgtga

SEQ ID NO: 65501 - DNA, 740 bp, Zea Mays
ccgaaggcagcagtcatcaactggtcttccttctttgtatagttccctagaatctcgttgcacattgtctctatcaattctagccactccgttcatggttcttaaatgtcttctgaaatttgaagcggtaagggagtcgaacaagttcatactttttccctccttccttcttctttggcattccccatctgctggaggttgggaaggttctgtttgccaattattcttgcaccagatccctagtgctaatatgcccaaccaccaccctaaattccacctcggctagttggcagggtgaccctagctgcatattgcacaaatgtcgagtcatgccgaagctcagtttcaggggactcattaccatggtcatgagcttctccctattcttctcatcagccttcatgtaaaaccattcactagtctatccgattggacatttagtgcgtagccaatcaccggtgctttggtgtccttccagtatgcaaaattatagcacccaaagttcttgtgtagaccatcagctctggccttcgtctgatagtgcagttcgtgcactcggtagaacccttcggcattggcacttttaccttggcttcggagagcccatatgtaaatgctgagcctaacaatggcattcggtgtcagctgatggagatatatttcaaatcttttcaaaacttcccctatcatatcgtacaggggaaccgaagccctgccgtaaagaaactcttaaacacaac

SEQ ID NO: 65502 - DNA, 526 bp, Zea Mays
ggggtattgggtgttaccttacattttaactaggtttcatatttttctctggtggtctacttcattaatagttgggtaaaattttatttggctaatgttgcacaatttttggctttcttatgatttaattggaacatgggccaaaaccatatttgaattgtttagctcacttattgggaggggttggggtgtttattttttttgtagtggtgtcctagcagttaggagtctactaaatttctcttcccatttttgaaattgtccttatacatggtattatttgtttccttattgcctaataatttatttaaccctatggattagtcttggacttgggttctctgtatttttcgtaggttcctcatcacctaagtatactagaaaaaatatgctcttcctctgtttatcattttccactatccttcttaattttctaagttttggacagatgtagtttttaatagcaaagcttaagttaatcttgtatactggggtgctcagtatttttaaatagtgcctaagttgg

SEQ ID NO: 65503 - DNA, 514 bp, Zea Mays
gggaaattctaaaggtaatgactgaaactttgcctgtcaaactaagttcgttggggcttcatctgacgaagctttttcataatgaaaaggagcccgcaaagacaaaggcatctaggccaaaaacacaaaggattgttaccgtgactgaagtgattgaaacaacaccaccaagagctccagctctgaagatgtcggcaattgaaatcatgacggctactgaagctgtaccttcggaggctgccgcagaagaggccagagccgaagatgctaactcggaaggtattaatttagagagcatagccgctgatatagataaaatgctgctaaacatggtcgctgaagaaactgctgcagccaccgaggagaccacgactgccaaacccgagaaaggaggaataaccgaagatacctcggaagatgaaacttttgacttccgaaacttagttggccaggagctgactgaagctgaaaaagaggaattgaaagagtatgttatatcttgtggatatcggac

SEQ ID NO: 65504 - DNA, 390 bp, Zea Mays
cgattctaaaaagttccttagtacagaatgcttgatcaatgctctgcaaaattttgatggtatactgatcggacaccgggcaaaggaaaactcactgtaacaataaactttcatccgcaggggtctcaaacgccaggcacgcagatagcaggttcagctgaaccaaagacagttttgggaaaacaaactcaaatcagtactcccccataaggcaaactagttcctcctaggttgatgtaggttttcaaaaggcaaactagacaaatcggagcactaatcccaggaaggaatgtttggatttcaggggcagcgaaggaacaaccaaaaagagcaaaacatccatcgaagtccaatcaatcttaggattcctcagcagctaggtgccatcgc

SEQ ID NO: 65505 - DNA, 613 bp, Zea Mays
accctcgaaccttttccttacacccatcatcacaacgtctataaatagggtacgaatccttcccttgcaaggttgcttcactgtaaggtcgggggtattgattcttgcatgatgcacgacccttagtgcatgggcagttagggtttagcgaactacacggaccatgcattatatgcttgataaccatctttcgcagttgaggatacttgttggatgggatctcagctgagatcaaaaggtcgtactgctcagggcacgttagcttgtacttcctctacatgatgagtagaaaatgggcatgtggcaaacctcgcttctgaaactccacgacatagacgtaggcacaaaccttaccaagaatatcatgtttagtcagcctatgctttaactcctgtagttttgcatgaaagacacgcactacaagatctggacgatcctgtggtgtctgctcagggaggagctccctccttatctcatcccagttggggttacatgtcatggtaagaaatatgtctggtttaccaaacttctgcaccatagccataacatccatataccgatgtctcatgtcacgaggaccgccaataaacaacagagacaacacagttcgttt

SEQ ID NO: 65506 - DNA, 411 bp, Zea Mays
gatttacacctcgtgtcaggtggtctctatgacaccgattggtgagatcattcgcaatcatgacacgtctgggcacatcgcaaagtggtccttcgagctcaataagctcgacataaattacatccctaagaccacgatcaagtcttagaccttggctgacttcatcgtggaatggacagaagcccaagcatcacctcatcgaggactcggaatattagaccatatattttgacagatcctacctcaagacgggcagcagcgcaggagtcatcctcacgttgcctcaagggcatctccactttgatgtcaccaacaatgtggcagagtacgagtccctcgttagtgggctttagatcacagccgaaataggagtgcgatgaatcctagtgagaggcgactccaagatggtcg

SEQ ID NO: 65507 - DNA, 727 bp, Zea Mays
atatgcttgacaagctttgcaggaaaaggagatgatatgaagctttgggtgcttgagagagtcaattcgattcttgttaactcaagccatcaatcttcaatgatctatatccatgattgacccatggttgtttttcaaattactatgtcttaaactcatatcatctcggggaaagtattgatgttgtaggaaataaagaattatcttatgcgaaaactacaaggcctacaacgtggaggaaagccaaaggatggtaacatctatgcttttaagtgcaagtatcttaaattatcatttcttatgtgtcttgtgtagtcacatagaaaagcacttcaaatgtttctaactatgtcaccattctttgaagaaattcctctcatatggtagattgtatattcatcatttctgaaccatggaaatctacatactttaaactgttgaaagtacccatggcatgtttttccactaattatcttattattgccatgattctagatatggagagatatttcaagttcctaaaaggataaggtgtcaagtaaggaattcaaatccttaggacacttataaaaggaaaattctctctataactagaatagtgagactaatgcttttatctaagtaacccatgtagtctcactagtagagaataagtttctctttggaagtgcgcaatataacttaaaaggaaaatcaatccaataatttatgattgtcttcttgctta

SEQ ID NO: 65508 - DNA, 574 bp, Zea Mays
gctagcagcagccaataggcctctcgcatcgagcttcgtgttgccacctctttcgtgcatctatgtacaaggaattgggttctgcgtttgtgtataaacggagtggtgttcttcaatttctcagtcatgttatttcaatatatctgtcaacctgtgtcagcatggtcactaagaacaaacttatagaggtacgacttactgagaactttcttgttgttgcatcactgaagtacaattacttcagttgaacaaaacagttatatattttcatgaatacgtttcactctcccaattatttttctggttgcattgtttagacaatagcaaattgcattgacatgtgatttaaatgtcaaaatttatctacagtttgctatttgatctacagtgtaaggttgctgaaccgtttggcttgctctggtggtagttgccacctttcttttgcctttgccaaattttaaaatgtacaaacaagggctactcttggcatgcattattttcactggtttgacgtagtctcaattatgtatttaggtattaagaagtagctatctcaaatttctatgaattcaag

SEQ ID NO: 65509 - DNA, 417 bp, Zea Mays
cgtatcgtcaatttcaccgccgttaacccatagcgaactaggccgtggtggggggaaaactatgccgccgtgggcattagcgacgttcaatctcgatatcgccctagtgagtaaccgagagacttcgctgacgctcctcgcatgtatccaaggcgccttcgtgtggggatttgcatcaacacgggggcaattgttcatcggcgcagagatttcgccgccaggacaaagctctctgtggccagggtctcctactccacggttgcaggtaatgcccctccccgacggctcgaattaataatagcaccatgtaatagctactagagccgggattgggtcacgggggaggttggaatgtctcatcggagtaggctttcacataatcaccgcccaacaccactgtcggtgcaattttggtct

SEQ ID NO: 65510 - DNA, 420 bp, Zea Mays
catgaaggttaaccagtgatcgtcatccatctatgaccagcgatcgccacggtaggtcgccgcagtgactcacccccccttctcggccgccagcgcgatttcttcaaatcagacgccaccgctcaatgcccctataaattgatggcttggtctgttgcaccatgttatcactgagctagagcacctactcccgccctcgattagccactatagctagagaatttcattcttcccccaaatcggttttctgccaccgtgaaagactctcaccgtggccagcacgttacacgtccattcccaccctctgttcccttgtttcagtactctgatgtacccttgatgctattcgacccatctaatcgagttagaacccgtaggatcaccgggaacgcttcaagttgtccgttgatcgcactgtca

SEQ ID NO: 65511 - DNA, 688 bp, Zea Mays
atgcattagagcagacaatggctttaggcagctttcagaaggaatacacggcatgtctaaagtattcagagcacaacccaatttgttggggagaatcaattctcactaactcaaacaccaagccaatcttcaaacagatggtatatcatcaagaggcagaaggggagaccacacctttcaaggcatacactccaacaacgaccaatcaaggaggctatattgtgtattttgctgagaagatgaaggacatgcaaccaaatattacaacagcacaatctagaagtgaaacaaatatagctgcaaagtagggccactagccgaagcatgtgtttcacacatcatctcaatatccacccaattatgcaacaccacatattcaacatcagtggcacattttgcatcctttagcctcaagtccaactgtgcagcaacaaccatcaatgggaagcttgtagtccccaactctttgacccaccttagtatgacccattactgcacaattaatcctagcaatgcctagcgtaggagcgtgactaagctaatacaacataagagtttgaatgtagcatgattaacaacatggtgctaccatcaaataaaatattcttgataatgggaatgtcaggctttggaccaatcaacaaaacacaaaagaaatagcttcagagaaagatctagcatgtaggtg

SEQ ID NO: 65512 - DNA, 570 bp, Zea Mays
ggcttgcaaaagtatttagatcatctaggtttcaacttaattggatatggttgcacaacatgcattggtaactcgggcgagcttgatgaagatgttgctaaggcagttaccgacaacggtaacttattgcttattaactagccagatttgcctgatattttttcatgctcgattgtacttcagaaaatgaaatcccatattctttggcatgcctttgtcagatatcattgcggctgcagtactctccggtaacaggaacttcgaagggcgaattcatgcattggttcgggccaattatcttgcctcccctcctctggttgtggcctatgcccttgctggcactgtaagcagtggatttacccctcattgattgttttttactggtgtcgccaccatggataaattctcatattttgtcccttcaatatgtatacatttgcatcaggtttatattgattttgagacggaaccaattgggaaaggaaaagatggaacggatgtgtactttaaggacatatggccatcaaatgaagaaattgcagaggtaaattctaaattgccgcattcttc

SEQ ID NO: 65513 - DNA, 508 bp, Zea Mays
ggatttcattacctggtgaactattggaacggccctcaagaaatggcaacgtgattttttagatgatccaaagcagatattgttgcggtagggaacaattgttgaatggcaggcagcacgacgacatcttcctcctctttccatggtatactggaggacatggccgacatcaaagatctctccagtaccgcctccgcgttcatagccgaggtcaacaagcttgcccctaaggttggtatttggcacagtaccgacgcacccattcagccatccgacgtgatgcgaagatgcgatgaacaggcgcgacgtggcctcttcttcctctatccgtggcatgctggaggaaatggccaacgtcaaagacagctctagggccgtctacgtgttcatcgtcgaggtcgataaactcgcccatggttggtacttggaacagtatccacacatccatccatccacccatcctaagattgcatctttttctgagacccatagatagcaaattcagaac

SEQ ID NO: 65514 - DNA, 547 bp, Zea Mays
agtggtatgggccgccggagcgtaataccctactccactatgtgttggattgctgtggaagcctaagagttcagagtctaaccctatctgtgtcgcgtgccctcccttttatagctcaaggggggcacgtacaaagacactgaaccccgacatgtgggcctagggacataacagatggaatacccagagcaactaatgtcagtcaccttgtgcaatctccctgtgccccgatatctgccgcttgagtagcattggcgtgcagcagaaggttccccggcatcgtacaagtcatgatgaccattgtgcgcgcgaggttgtatgggcgtactgcctgctgtctgattggacaggcacgccgcctgtagggtggtctggtcgtcgcctgccatcagagtggacagggcacattaaatgccgagacggcacatcgcttgtctgcagggcggacatgtggcacgtcttttccgcaataaacgcagagatcgcgtggcccagagcccttacatcaggctctgcccgccggcttacgtcacgggcaataggccac

SEQ ID NO: 65515 - DNA, 298 bp, Zea Mays
ttggattcgtacaaaattttggcagtaggtggttgagggcagtaaatgtgacccgctcctactcgctctatcacttttatactacgaagaggcacgagtcgagaaaagttcgcgtgcaggcaataccaccttcaccttctccctgtcttgtggatcgtgagtctaactctttttcaatcaaattgtttgttccaccttatccataacgagcttcgggaaggtgttttccagaccttcggcgcaaggcctcccaatcatgtttttgcgatctaagctcattatgaagaaacgaactcat

SEQ ID NO: 65516 - DNA, 417 bp, Zea Mays
tttctttccatttttgcgttttcaggtggctgatggtggactgtgatagttgcgtaataaacaagaaaaatgtttcattggacaaccgagcttttaatttgctacgtacatagaaagagtcaactcacaagaaatatagaaatagtcagcaatgggatcgtcagctccacacctaaaccaacatgtgccctacacgttttactagaccaagcacttgattgcttcttagtacgtagatttgtcaacgtcgagacagagaaaactgtgctttctttcaactcagcggagttgtgcattggggtaggctcctggtggttgggatcgggccctacattgctcagccagcgcgcgctctatgccgatagcgtccatgttcgatgcacccctatacttccaccgccgtggaggcgaaaacgg

SEQ ID NO: 65517 - DNA, 1069 bp, Zea Mays
gctggtcaaagcacacaagtcggcgacaatggcttcatccttgttgcttctgccactggtcccggcctgccctgccctgcccccatctatatctagtctaggcgatcataccccgtgttctaacaggctcgtagctggccgggatggagatggagatcagggcatgggattggtggaggcaaggatcgagcgagatacgcgaacgagagagaggccttgcattggccgatggtccatgcctccatggagatgctagctagggcccagtggagtagaggaggagcacacgacgatggatgaggtcgacacgacgacgagacgaagagagcgattgtgggtccacacagtgctgaggtcaagcccaagacgtgtgtactgcttgctgcgtcgtcatgtgcggtgcttccgattcccacagcccgcgggtcaaccactgctgctatcctagcacagcaacagcagcactcgacgactcgctgttgccgggatatgacccacacccgctgagatctggggaggggagctgtaggggtatgtttgcgacacgtatctgaccggctcgactcgctcgtgtggtctaggctgaagctagccggtcccaattgctgcaacatattttgtttgtgcacttgtaccaagtaagcctggtccatgtgagctggtgtttgccacacgtagacagtcaggctaagagtcacttttgtttcttgggagcaaccatgagcagctgatttgcgccacgaggagccgagttctaaaaaaacggagcttgccttcgtttcttgggagtcaggctgaagagccacttttgcacgcgcagaaccgagctccaaagcaagtcagggcacacaaacacaggagttgcatcccgcgagcatagccaggccctcgagccaaggtcgcaaacgtgcccgtagtagcccatacatagcccgcacgcgggtccccaaacaaacaagtcggctgccaaaaggaatatttttttttctttctgtcgctggtccgtgtggggccattgaccctatatttttttctttctgtaaacgagtgggccccactggtagcctcg

SEQ ID NO: 65518 - DNA, 460 bp, Zea Mays
caaaaaaggaaaggtacggcttctgtgaaagaaactgcttcagctactcctagcgagccatcgccaaagagaaaagggtgaaagttctcacacaccggccacgttacattgaactagccacagtgcctgagttcagcagtgaaacgtcttcggcccccgaaattaaggaatcgactctgctgccaggagccgaagaactggtcgaagtgccaacaacaaaagaattggaggaaccaaagactctgttgccagaaaccaaagagctggccgaagcgccatcgacagaaaagatggaagaagcgaaagcatcaactgagggagcgaaaacatcagaaatttttagtccttcagaagaaattgaagcagcaaaaattaaaaaggggccaacagtgaccccaaaaagaaaaagaatggttaatgtgttagatgttttggaaacaattaaacttccaagcacgac

SEQ ID NO: 65519 - DNA, 336 bp, Zea Mays
ccccccccgtgtcctatgctcgctaatcacgtgtttttattaataagataggagtctcaatttggaaattggttacgttagttaatttgtatagctaatcgtctatctcattcaatgttaatctactaaaagtggtcacgtttacactagtgcatgtagctaattcttttgttagaaccaattggaactagagcacgtaacgtttagttattcgtttacccgtagtgcatctcgggcataagctttaactctcgcgagaccttttcccatttctttctaaccatggtaagttcattatcgcatgtgatattctatgcatatttacttaatttgttc

SEQ ID NO: 65520 - DNA, 312 bp, Zea Mays
gccgtatatgtgtaccggtgtatctctacagtacacccatcatctaataataagagcaaagttacactggtagcctattggtaagcatgtgggacaccgatgcagagcaggccagcagggcatgttccattccttaacgattggaccaatcgaagctaactgtggtcagcatgtaccagttccgttcctttttccgttcacctttcctctttacaagcatcctcacttcatcagcgttcctaaaagggttttcttttagcatctttctcgcaggattgctgtcagtacacccaacttttgactcaagattcc

SEQ ID NO: 65521 - DNA, 524 bp, Zea Mays
tagacaagaattttatgaggaatactaatcagatatataaacaaagacaagagtttggtactagacaacagatcagcaagacaagtatactaatcagatatataaacaaagacaagaattttacgaggtatcctccaaattctagacagcagatcagtaatcgggggacctaggaggacaaacgagaagagaagatctagaggggtactaacctgagaagagggagacgacacagttagggttcactcgcagctgagaaccgatcgaggtcgtaggagagcgatctaacctgagaagagggaggccacatggctaggcttcactcgcagctgagaaccgatcgaggtcgtaggagagcgatccttgcgaagcagatgaaaacaattgagaagataaagcagatgaaagtagatgagcaaccaagaaaggggctaaccttgcgaagcagatgaaagtagatggacaacgaagcagatgaacccgagaggcgagagccaagtagatcgacaaatcgagcttgtccg

SEQ ID NO: 65522 - DNA, 656 bp, Zea Mays
cgcacatgatatttcttcatttcctacaacatcaatatcttcctcgagatgatatgagtttaagacatagtaatttgaaaaataaccttgggtcaatcacggatatagatcattgaggattgatagcttgagtttataagaattgaatggactctctcaagcacccctaaggcttcatatcatctccttctcctgcaaagcttgtcaatcatattttggtacccatcgcttgatgggtccatcttggttagtcgacagggatctaggaacccaagagtcctttgttagcacttggtaaactcattacctttctaacacaagttgcaattttgggttgcctagtttcatgagaatcaattgacaagttaggagtgggattgttaccaatgggacaatccttgcattgatgtcccttctttcggcaagtgtagcataggcgtttttcaggccttgaagatttcttccttccttgtttcttgcttgctacatggttagtgaatgttttcttttctaaccctatgcctctttgttttaaatggggacaagatctaagtaagtgtcccttcttggagcatttaaaacaaagtctatcatccttgttaataatcaagccatttttaatgtagggacatgacctaatcaagtgccccttttca

SEQ ID NO: 65523 - DNA, 493 bp, Zea Mays
agactggattcccaacttctatcaaaagctagcacacatgctcttaacagatcttcaaggactttgttgactctttctgtctgcccatctgtctgagggtgataagcggtactgaaatctagcttggtgcccatagctttctgaaggcttgtccagaatttggatgtgaactgggttcccctgtctgacactatcttccttgggatgccatggagtctgactatctccttgagataaatctgggcaagggtggctcctccaaaggtagttttcactgggatgaaatgggctaccttggtgaggcgatctattattacccagatggaatcattccctttttgcgtccggggcagtccggttacgaagtccatgcctatttcttcccacttccattcaggtatcagaaggggttgtaataggcctgcatgtttttggtgttcggccttcgtccgttggcagatgtcacatcgggccacatactgagctatttctt

SEQ ID NO: 65524 - DNA, 767 bp, Zea Mays
attatcttttcatgatggcaagaataaggtttagaaagattaggagttttgtttcaatagaactacttgttttgtggtgttgtgagatgaggtgtttgatcttcttatacattcatctggtgtggatgtttcaccattgaattaaaatgaattgttgaagttggtaagggttgtgctcagtgcatattaccccttcataaaagagtgtcgttttaagacattaatgttgatgtatggctgcatccaaattcgatgtagtgaaatcatagtgttgattgcatctatgacttgctttgagcttcattacatgttgtttcatgcttgatgtcaggttgtgtagtttccttagacaattagtatgaggtagaagttcctgtgttaattaagaccaataatggacccatgttttgaacggtggtgctatatggggtaccttggatgctttgcttggagtggttgaattcgaggatgaattctttttaagggggtagagtgtaatatccaaaaaacaatgttgaccaaaagttgatcttcagtgcgtggatgtgggaaaagggttgtgggtcgttggatgctatatcagacgtcatctaaggcgtcgtttcttttctgccacaaaaaaaatcctaggtggccgcccccctttttcccctttcttgaccgcccctcccctccccctttcttggccgccactcccctccccctttcctggccaccccctctcctccccattgcagccgccctccaccctctccactgcttcctcc

SEQ ID NO: 65525 - DNA, 505 bp, Zea Mays
agagagttcaggggctaaagcataaagtttacgtagactcagtactactcgcagatggaccgcatgttcaatttgtaattcagtaggggttctttagaataatagacaccgcgaaggtgtatccttagatttgggtcgtcagatgtgaagcgcacggcctagattaaaacgcgcttcacatgaaacgctacatcgctatagccgtaggatctaaactcaaccgtcaagatttaatgttctggatcgctccgtgaccgaccgatcgaaattctacagtcacgacgtccctggcccgaatcggtacgacaggattgatctgagccgcaatgaccagatccaacggcacaggtacattcccccaccgcctaatctccaccgttcatcacccgcgcaacggtcccccggttgtcttcttcctcccgcgcccttctatcctcttttctctctcttcttggtcgttcggcgctggtagccccgttttcttccccagtgcgacacccgcgca

SEQ ID NO: 65526 - DNA, 524 bp, Zea Mays
tggtgggctaaacgacgtggcggtggctgcttgggggcagctgctatggtggactgggaggaagtggtgggagaggatcgacgtgacctagataccaggttgtcaagggcgttcgttcccaaggatgtcggtccccgactacggagttcgtagtcgcgatccgtggtagacggtagggttatacccccacgccgccgctcttcgtcaaccgggttatgctcccaggttgctgacttaggagaatagagagaggagattagatagttgatattcttcccttctcatagtttgattacaagatatatatagggcctatggcccaaccgacttagagtaacaatctccactaattaaggaactaagatatatatggcctatggcccaaccgacttggagtaaccacctccactaattaaggaactcaaatcgacacatatctatccctagccgctggtggagccggcgcccaacatgccttcctgcgtggcctttgcatgctgttcggcgcgctcctgggcacgacg

SEQ ID NO: 65527 - DNA, 892 bp, Zea Mays
ctgtgctacccatggtggtgtgacatgtgtatgtctctactcaaatgacaatagaggtgggtctgttaccaatcaaatagaatagaatggggtggcacactttgttagaaaaatcgctagagatattatcgtgttgggtaaacacctagaggtggcatgtgatggggtcccaacttttggagaagcagacattagttcttgggggtttattgttatggaaacagaagaaattgtgtgtcgtcttcataagagaacaaccaattgtaatcaccctggttttaccaattcagtgaggaacaaaatgtctagtggttcgtgtggcctgagaattattagtcaatgggattttttagtagtgtttggttcaaaagcgaggtgaaatggagtggctctgttctacctttagtagtgttcaattgagggaatcatggaacaaagtggctccaaaaagagaatcttcacctaatatgttgaatccctccgctcccaaaaactataaaacattttcacttgtgagtgttcatgtccaaagaaccttcctcaaaaacattatgagcaccacccgtgagtcctaactctcgacctcccccgatttcacctccttctgtgtcgctaggaggcaatctggctaccaatagcgagctccttctcgaccacatctagatccaccaacgtctgtccttgatgcaccccctataggtttgtccatcccccttcctccctccttctcctttagcatggccatggcatccctctatctccatggccatgatagcatgatggccaacctctccacctatgtcattttgtgccttgtccatgccttcagcacgaccaggggttgggccccaatatcagtgccccatggcggcccgtcgatagccaaaacaat

SEQ ID NO: 65528 - DNA, 345 bp, Zea Mays
cgcgcctcctcctcctccttctccgtgacatgcaaagtcatcgatctggttcctagccgactatcgcggctagccaacaacgcccgcgtgctcacaagattcatcgcctctagcatgtgctccaaccagtgttgcgagctctagcacctctcgccattgttaggcatcgcccgcatgctctagtggtgcccatgtgaactctatagactctagtgcatgtttcgcccctcctgtaactatctggtgctcccatgtcatccgacctcatttttgtgttcgagcgaagctcgcgtgacctccaccgcttaacacgtgtgctatgacgacctcaatgctccagctccc

SEQ ID NO: 65529 - DNA, 554 bp, Zea Mays
gttctgcccgcttcggtcggggccattgcgccctcaccaggagtataaaatgccgccaccgtcgccgcgattccccttcgacttaatccatcggacgccgcctaggtcatcaagtgagactggttgagagagaagagagagggacagaggtgatagcagctgcctcggtgctcaccatcaccgttcttctgcatggtgggcatcagggtggtcgccggcgatctgcgctgccatcggtggtgttgccgtgggaaacctctgcctcaacgccatcaaaatttctcatcggaattcaacccaaccgcggggaaacgcatcgctcgtggccacagctgctgaagtcgtattcgcctccggtatggccttaaccatgttcgccgagctcgcatgttcatgtagctccgttcgaatagaaatctagggttgtgtgccacgtgttccaatgtctccggcgggtttcgccaccgcagcacggggcggcgctgctgtgcgtgactggagcgaggaagaagctacgccagccgttagatgcagagcgtatggctcagattagg

SEQ ID NO: 65530 - DNA, 704 bp, Zea Mays
ggttagttccgattatttcggttcggtcccacgctgccagcacacccccttcctcgccagctccaaagccgttccatcttatccattactgtagtacgttaaattaaacagccagatgttgatctgccatcatcgggcaaatcaccgaatacagatgtaaataacagatcccgtcatgtaaagattcttgattccacgatgtgtcattcgacgaccgtactattttttattcttttcaacgtaacaccagtagtgttttgatacacagatagcgtcttctctagctagtacgccgttcggagcgtaaaatatccacctcatggtgcttgctcatctatgcatgcgtatagataaatggactggggttctagtcgtgtgtgtgtatataatatcaataattgtgcacgtgatctggcccacgtcagttgcacaagctaaaagcaacgaagaccattagtcaattgcacaatctaaagcaacaaagaaagtagcggtgtatgtatatataatcatgaattggctgtaagattcccttcgcaccatcgacgtatagtactctctctctctcttcctaaataaattaatttctagagtcattcttaaaccgagccttttgcagttacaacttaatttataaaaaagcatgggcgcacaatatacttatttagtgtcacatatatttatattttttcctataaatttgg

SEQ ID NO: 65531 - DNA, 677 bp, Zea Mays
aaaaactccagcatgatgcatttttttatcatttgtttgacttaatctctaaattgtgtgtgtgctcttttcttatgatgcaaatgaggcacatagaattgaggctaactctctattattcttggtatacaacttggagtattacaagagaacaacggtgcaagcaggctatttatagaggtcgggggtggtcgtccacatcctatcacgctcgtcgaacagtcgcaagtattcaataagcaattcaagccgcctgaaaatgagtcaagcaacaggcgccgctacgcgtaacacgacaccatttggaccaaggtcaactgctcaggcaatatgattacacccctcggtcacatcaagttactactcaaggacagtgtgctaaacgccctgcgtaccaaggcaccccttgggcacacccattgggtgtgttgccaagaattttcaaaagattttctgaagaagacatatccacacagtatacgcaatgaatgtactgagacaaaaggaagagattggctgagatgagaggaagtccaaatatagctactgaactgcaagtctaatcagcagaggcattgaagcacagagcggagtgatgtccagccgagagccatccgccagacgtccaatctgtcaccaatcaaataaattacagacctaacagggcatagacagat

SEQ ID NO: 65532 - DNA, 539 bp, Zea Mays
gatgggagcggcacacgtcgttggttggagcaacctttcatgtgtgtagagatgagacttgagagcatggtggttcctgttggcggcagcggtatggaggaatgtgagggcgggggcggttcgtgcaaggtgggtgaagaaggtgacaacggcagacgggtagaatggaggtgagagactgaggacgacaccgtcgaaatcgaccagaagtggagatagggcaggccgagggtgtccatctttgagacactctcgaccatgttgtattcgaaattggacggtacaagattttccatcctcgtgcacacgagtttagttagacttcatgcgcgcttcgtccctaagtatgtctagccaattttgatgagggttgggcaaccacgtagccagcaaaatcggcttggacggttctaatgcaaacgcagcgccgaaaatcatctaaaaaatcgtatttattcacttcgactctaaatgaagcgatctatatatgtttttcagtcagcttgacgagaggaacacaataatataatacatttttt

SEQ ID NO: 65533 - DNA, 468 bp, Zea Mays
aaagtagcaatcgagtgaggcccttcggcgtttccctccagaatcccttcgccgttttacccacgcgtcacaggacagaacggaagagcggagagatgaacacgggacgggacaggacactgacaccagtataaatagggctggagattacggtgctcggatgtctgagtgacaggtaggccatggtccactggacccgcggtcggtgggcgagtggggtgctgaccgtgctgttgggaatggaactgaaaattaatgcttgcgggccccgcgggattttggaggtgtacggatttcgtttgacgtgtgttgcgttcggccggtctcgtgatgctacggaatgtcgtatactcgcgttgtttttctgaacgaattttaaactctggcacgtagtagagattagaccaactttgatgaatgacacactgatcattagttaataattccgctggacattagatcccaaac

SEQ ID NO: 65534 - DNA, 1115 bp, Zea Mays
agaaggaactccactactttcaccgctggcgatgaactgccgactgtttttccgagtcaaaggagcttcattctcttcctcctcatcttccacagtgacaacacaagcagcacccccattgggatcagcaacagataaggcacctacattgggatcagtagcagtttgggtacacccattggggtcagcgtcagtaggtccagtcgcaggcacttcttcagcggcaggaactaaggtaccaacgtcttcatcaaaactggatactcgtcggaggcgtcttctcttcttcttttgctcatcagcagaaggctcaggctgattggttcggctagggcgcctcgggcgagtactgacaggtttctgaacatccaaagttgtatcaacctctggaaggggcacaactgccaaagtaccagcaggagcagcgtcagaagaatcctcagctagcagatcaagcatggcatttatatctgcatcactagggttcaggggcacctcaaaatggacttgccgttcgtcatcaggaatctccccaagcgaagcaaccaaagcactgacttcttcagcagagggtcgcactctaaggcccaaatttccatcagtcacaggtggatttgacacgaaaagggtgaaggctttgggaggaggcaggttccaggccgagtaagccaccggagcaccaacatttgacaccttacccctgaggatcatttcaagacggcttaccaagtctgcagaaggaattctcctgttggtaacccgagttgagtcagctagcccccgatacagataagctgggtaggccctgtctttcagtggttgaatgttcttgaaaacaaagtcagtgaccacagcttcagcagttagacctctctctttcagcagtccaacttcagctagcaacacacccgcctcagctacctcctcatctgtgggagactcggtccagcttggagtgcgaacgtctggctgtcttcccgaccgggaggggagagaatttccataattgtcaactataaaccactctagacgccaccccttgatactgtccttaaggggaatctcaaggtactcagtcttccgcccgcggcgcatctccaaactggcacctccga

SEQ ID NO: 65535 - DNA, 2067 bp, Zea Mays
aaaccgaggcaagtcttctcacaaatacggagagactgtttccaacccacgacttagtgactttgtaagacagctctcaccactgcatcaatcctgtccttcacatttgatgaattcaacatgaaaagaatacaacacaggagacacacatcttagggcatcatatgtggcaactaaaccatggacctataattctaataaaggtaaacatggttcactaagcaaagcaacagcatatttcagtgctcgcttagtaccaatatggctgccattctctaatcaccgcaaattgctacatatataggccaaacaaggcatgcaggaatatattgagtacctttactcaaatactaaaacccaacccaaggggagagacatgccgaacacattgcttgaaagtagagaaaaggcacccaaaaacaaatccttacggtcttacctccacagagagacctttactgaaagactgaccaaagtgataatggctgtatttagtgtgaaaaattgctaacagtgctacgtaatacagaactagctcataaagaaaacgaaatagcatctaagtgccttcttgatgaaccaccagtccaccacaacaaaacctcacaaaaattgggattttctacagaagttttgcaggcaacgtagaatgaatgaatagtggagcatttgcttcacattagattcaaattccaccattgcagtgcaactagtttgcaacttaagaaactagaacatcaaatactgcaatagcccagaaaagagagaaaaatacagcataaagttataatgtcaaattgccacagctcactgttaagacttatttgatctagtgaaacctagttatctattagtaaaaattaattactgacaagtatacaggtgcatcatgaaaaccaaagattaagtgtgatcaggtagagctagagcaaatttgagggggtgtacttgtcttgcgggtgcatagctttttagtatgaaggtgcagatgaggtgaaaaattgatcataatcactgtttttcatttttgctgtgggtgcgctcgcgccacagttttatacatagtagctccgcccctgaatgagataaataattaaatcttagtttttctgaagagtatagtgcacattactatgccactaactaaaccctacattttgaacaggaagagcatagtggcacagtgctgtagtactaaccgttgttagaaccatcagtggcctagcatggttgctgcactttataaatgttatattcaaccacgcataatgcactcagcatgcaacatagtgacaggcttatagattcataataacatacatcttaggattagcgacgaagtgcaatcaattatattaagagagagtagcatagttacattctaataagttcttgaagttaccatggcaaggatgttgccaaaatgaaaaactgactattttgtaatatttcataatcttcatgtcagaatcaccaccttagttattccccaagaaaaagtatacattatagccagttcggtttgccatttagcaaaaaaaacagtgtggttctaagatatccctatattacaatctaagggttgagcaattcaagggtgctgacttctggcaagcgaccaaaatgttgaagcaaccaaaggaccttcctagttcacaacaatctctaattacccgtgtatagtagctgaccaaaaaaaaaagggggtggggacaaacctgttcaaccccacaccctcccacagacccactcaaatcctttgttgggactcaatcaccagtgcattgagcatgatatgcatgacagcgtcatacacatcaccatcataatgcataccatcagctgtgcattgctgcccgcacccctgggtgagcttccccacatcaagcagcaggaatgagccgccttcaccgcgcaaaacacccctccgatcgacctcacgatcataggcatgcaccatggtgccgttcatgtgtgccctcttggcgtctgtgttgagcatgtggttcacgaggtgcggcaagccaagccagaacatatgtggtggcggctccggaagctgcgagc

SEQ ID NO: 65536 - DNA, 305 bp, Zea Mays
atcttctcttccttcggtaatgaatgtatcaagttggtctctaagaactacacaatcatattctgtgaagtcgtcaacataaatttgtgcaagttcaacaagcttatcttcatcatagttggcaaaagaattactaggatcaagacaagcaacacatctcaagagttgagtagacctttcagcaaaacgattgttaaactcaactataacttgatccaacaccacattgaatatttcatgatgaagatgctcataataagtaaccaactgtcctctacggcctctagaacattctcttctaacta

SEQ ID NO: 65537 - DNA, 393 bp, Zea Mays
gtttttgatgcaattggcttcatatatcctgattactgctaccccttgaggaaaggaaaaaataggaaaattgtcgcttcggccaccaccgttgtgccgaagggcaagaaaatgaaggttttgacgcaccggcctcgatatattgaaacggtcgtagtgcctgaatttggtgaggggacctcctccactgccgaagcagaacaagccgctcccgccgttcggagcgctgaagagtctattgtagtgccgaaggtgcctacagtcgggccaaccgaagccaaagatgatgcggccaaagagccaaaattggaaaaaacagtgataatgccagaaattctgagcccaccagcagaggcagaattgccgaaagtggcaaaggctcctgccgcaact

SEQ ID NO: 65538 - DNA, 1288 bp, Zea Mays
gtgtatctgatattaattcccaccggagttcctgtctaaagtttttgctcccacaagattcggtagcataatcttccagagctggtatctaggttttttgcccagtgatttcttttgatttagttaattattctgcacggctctctcatgatgtattgttttcttattacggtgccttctcacgtgtatgtgtgctcttgcgtcgttaaatcttgcagcagtttcctatgtggttatccagtaggaaacgccttacgggcttcatttcaatatatgctctttaaaaaaaaattccgagtccaggactacaggtacgtgtttcgatctccagatctaatcttaaccattttatcaaaatagcttctgtaactgatatcatttacttaccattgctatctgaattcttgtgcaggagagatacgtgtactgaggtggatctagatcactcccaacgatcgtagcttggttgggacgtggctacagcgttgcttactctcattcttgtccttatgcaggcgtgctttgcacaattcttaaacggcaggttcctagcctagacggccgcctgcccagggctttggtccggcacttgcctgagtggtggggtgggcacggggaggattgatggaacacctaaaatggcgagtgcttgtattgaatgagcaggcttgagctcactgtagcacattatgaaacctttgcatgtctgccctgcatctgccattcagttcagtcaactctttctacactgattacacagtagatcaagaatctgaagacattgcaattacttcgggggggggggggggggggggggggtgtttggttaggtttgcgtcgttctgctgtgcaggcaggcatgggcagctgtaataaatctgcacaagtacagcaagctgtgggctgtggcccgaggtgggggactgtatctgcgtctcttatctttatatcgtccttgtgtgggaaggctcttatatgatctcttctatcaggtgaagatggggaaagccgagtgaacagttgatgggaaggagttggacagtgcgcaggtatatttgattttttgctactctgtgagaacgcatgtagtacagtatatttatttctggaccattcacgatttcgttgcatcatttatggaaaccattgagacgacgctgaatttcttaagacacaatatatacgctcacagggtacagcaaggtatggtgcggcaaacttgctctgaagctctgcaggtttgacgcggagactatctccgaggccagatcttgagggcggaccgacc

SEQ ID NO: 65539 - DNA, 1272 bp, Zea Mays
atagacgacccttgacagtctcaaggaactcttgatcaaaggtaccgttctcgtcccaccggagggtggagagctgctcttgctctacatagcgaccaccgcctaggtggtcaatttggtactcgtcatcaaaagacagggaaggatgcgcacgcccgctccagtgccccatctacttcataaacaaggtcttgacccgcgcaaaggtccgataccctcaaaggtctgataccctcagatgcaaaagcttttgtaagccatcctcatcaataagtggaagctaaaacactacttttaatcgcacctcatcaccatcgtaacaacgtttcccctaggggaggtgatccataacccagaggctgctgagagaatcgctaaatgggccctcgagctaatggggtagaggatttcatatgctctgtgaacgacgttcaagtcgcaagtcctcgccgacttcgtcgtggaatggatcgagacctagatggaggcgacgtcggtgaacgacagatcatgggtcatgtactttgatggctcgctaatgaaagtgggggacgatgtcggtctagtctttgtctctccctcaggagaacaattgcagtacaccgtccgactccatttccaagcctccaacaacatggcggaatacgaagcccacgtaaatggcctacacatcaccatagatctaggcattcagtgccttgatatccggggagactcctagctggtcatgggacaagtgattaagaactcggaatgtcatgaccccaagatggggcatactgccgagaggtgtgatggctcgaagacaaattgaatggcctcgaactaaaccacgttctccggaaggataacaaagcggcggatgccctcacaaagatggattccggacgagcgactattgcaccaggggttttcgttaccgacctctctgagtcgactgctcgttacgatcagacctgccttgaggatgagtagtcttcaggcattgacccatcgatccacgagctcgtttccatcgtcaagggcagggacgaccagatagaccccacaggttacaggaggacaccatactgtgattacctgaccaacgagacaccccagaggacgagacaaaggcacgaagacttcatcggtgggccaagtccttcattctcattggtgaggacctatacaaaaagggacatatagggataaagcaatggtgcatccccatcaagaaggggatacgacttttggaggatattcacagtgggacctgcgggcaccatgcca

SEQ ID NO: 65540 - DNA, 336 bp, Zea Mays
gaggaatactaagactaaggctactcctaatgcatatggtaaaatcgggctgatagatcgattgttgagtgttttaatcggtcatacacattcatatatataggagagatctggacccattcctagacggtttccaacagtcccgaagcgagatttgttacgataatcacgcagggaataaggattccagcctaaattaatctaatcgtgaaccgtccaagctatccttcggactgtctgggctacacaaccggaccatacggccgtccaggtgccaaatctggtgctcaacacatgtccccttccttttggtggagcttaccgagccaaaagcac

SEQ ID NO: 65541 - DNA, 963 bp, Zea Mays
tgcaagaagtgcgggaaaagagtaagttcaggtctcagaaaggtgctgtggttcagaaacataatatacagagcaaattcgagctcatatctggtgcttggggggtctaaagacgagtatatgcttctaaatgcagtaagcaggttcagacttctctgaatgctctgacagttgaggaccaagtgtagttttggttaagtttgttactctctcggttctaaaaatatagttctttatagtcatcttttttccgtctatattcaaatacaaataaatgataatgaacgtaaacatacatataaactacatttataaattaattaatgaatgtaattttagtctaaaatgaattatatattaggacggatggagtatttatgattatgttacctttagtagagtagtactgcatacatctgcacatggtcttgggggttgtagctgtaccctcttaagctctcccgtccaaaagtttcagtcggcgatcggcgtgtagcgggctgcgcaaaaaaaaggttcagaaaaagtgagatctgcactatggagaggagaccaactggtggatttaagcatgccgttccgacaaacaactaaaccggccacttggatgatccgctttcatctccagctgtccttcattgaagcctctgtccatgtgggtgacagccacacactttcagttaattagcctaaaagctcgaaatcagcactgctctacgcaccctgttggcgtggtcaggtcaagtagccttggcgattacgaatccgttaattcttagcgtgcgattcagcaattcagggtgaagaagccattcttttacggtaggaagggagtgcttttggcatctcatatgccccatctctctgtcccaacaaaagaaagtgcagtcagttttcatcgttgattcaagtttatagaaaatagtatcagtatttatatttactaacagtatttagttcaac

SEQ ID NO: 65542 - DNA, 496 bp, Zea Mays
tgactctggagcatcacattcgtttataactgagtcatttgtgaaaaaacacaatatacctaagtatcctcttaagaagatgttacatattagttcaccgggaggtgacatgaaggccacacactcatgcccccatgttaatatcaagattcaaggaatagatttttcagtcaacccagtggtcctaggatccaacggtattgatgtgattcttggatgcaactgtttgaaaagttgtgatggagtgatacagtgtgccaacagaacatttatgttgacaagtcctcaaggtgaaagaatccaagttaacatagacaagtcaacagatgcaaaagggaagacagtgatcaatcacttggaagaaaagcccttggaaaatatcaaagtagtgtgcgaatacccagacgtatttccggaggaattaccaggtatgccacctgaccatgatatagagttttctattgaattattacccagaaccgcacctatctcgaaa

SEQ ID NO: 65543 - DNA, 573 bp, Zea Mays
atcgagcaggtggctcgtcatcgatcgatctgggaaatgcatgacccccaaggagttgacctgctgctggaagtggccaaaaaacgcaggcagatcgaggaaccggagcacctgcgcctgcgtcgtcgtcaggccccggacatttcttaagccgacgggtccggggatggggggaccaatcgtatttatccagacggactgcccaaaaggcaaaaggcagcgcgagctggaacgaatggttggttgcccggagcagatgcggaggtccaggtccagccgggtttgatcggatcggatcggatccgtccctttcctagttcccattgccttcgcagtggcctggaatcgtagcatttctgattttctggtacttcaaaaaaaaaatggtggaaaatgtaggagtatacgtacgtgactgtcacaatcctatgactctcaagagcgcaatcttggcctccccttcttcgcccaataaatagccgctccacctcacctccgctctcggcccgtgtccaccgcgtcctctcctgcccgtcgctcacgccgccaacactaccaggctaccagctcagc

SEQ ID NO: 65544 - DNA, 404 bp, Zea Mays
tgattatactgcaaaaccatgtctgctaagcgcgccactaacctaacctgtgcagtacaccagagaccgaccaaagcacgtgtgttccaggaagcaaagaagaacgcacactaagcagaggactaagatgcggaagcaagcgtagttagccaaacaaacctacgaccacgaccgcctccacacgagctaggtcacgaacggtatcagtgcaacaggcaatcccagcggcgtcagcaagaaatcagatctggaagaccaaagaagacggaggaaggagatcctaaaaatgcgaggcagagacgggggagacgaggaaggaggtaagaataacaaaaacggatgctaggtaccaaccttatggccgtccggaggaggactgtgaggatgcccatgccgcagcactg

SEQ ID NO: 65545 - DNA, 334 bp, Zea Mays
ttctgataaccttctcggccaatcggtgacgaacagagcttctcacaaatgcatagttacaattttatttggagcgcatttatccctatcctgataaccttctcggtacttcggtaacgaacatagcttatcccattcaccttatctactttgttttgatggatttttgttctagcgggtttggggtggtttttattggatatgtatgttctagaactttcgaggatcatctttgccagacagtttgggcagattattcccaagcatgtataggttcatcttttggagcaaataaaattaagaaagccatgtttgatggattgttagatctatg

SEQ ID NO: 65546 - DNA, 371 bp, Zea Mays
gaggaatgctacgacaacctcctcacttgcttcacgtggactcgctccgacgatgtcaaacctaccagaaaaccggagacactgttggagcaggttgacttatccacgtggttagaggagcgtattgtcgccctctgtcaataaatgaactacatcatccaccatgccatggtgccgtcacaaccaagcaaagtttagctagccctcaagaagagacggaaaatgggctcaacaccactagccagagaacagagccaaatcagagtaaaagacaataataaagctgaaagcaaagctagtccctctagaaagaggaaaatggatcaacacaactagcaagacctctcccaaaaactccctctaacaaaaac

SEQ ID NO: 65547 - DNA, 474 bp, Zea Mays
tctagtaaatcctccatctcatttttatgctctattttaaatttttctttacaaacagtgttaaacagcatcatttacagttgcacgtctcgtatttttcacattttattggagacagttcacacgtgcgcagcgacaaaaagccgctcaattgatgtgccgatgggaacgacatcttgtttagatagcgccaagcggatggccagaaacaaacccacgtacggtacactcgagcttcaaagaacgtactacgcagtacgcacacgatgctagttctgcttctatcgtacgtacctccaaacaccgagggagctcagtggaggttgaactggccatacgttatcaaaaacttagaatgcgttattgatgatgcaaccactatcaatctacaaatctttcaaaaacagtccccatcaaatatgacgatgtatccataaatggatctcattgtatcagtataccctacctagtcac

SEQ ID NO: 65548 - DNA, 572 bp, Zea Mays
gtccttaactgttgagctgactttgtttaagttaaccaaccctttctgcagtttgtatccgatacaaacctatctagtcaaggaaaactggtggcaccctaatttcatagacccaccaccaattgtacaagacctatgatagtgcaaggtttggataggcatttgagcttaaacatttatgagggattgtcctacttatatcatcgcacacaagaacatatatgcaacatgaacaagtagaacattaagaatggcattcacacaatagttgtgattcgatatggctttttgtcacatggtgatctccatctccaataatctgtccatcatgatgatctccatctccattatataggtatgacatccttcaggtgatgagtccttcaagacctatctaacgtatgctagtaaccaaattacatatacgctttggatcatcagatgttgacacacaggtcattacctcaaatttggacaatacatatggctctagccgtattaccctggtcatgacacgcaggtcatgaataattcattaatatgcatcataaacacacaacagtcataccaac

SEQ ID NO: 65549 - DNA, 513 bp, Zea Mays
tcgaaacctgtaaggtattgactctagaagtttacaacaaattgaaagaccaatgttcagggaacaagtttgatgtgggagggtagctctgttcctatgaagaaataggagaaaaaggaggctgaatctgggtctgcagtcgactgaaccagatcagtgcagtctagaaaactctgaaaatatatccatccctggcagatattttggtgatttcagaggatactatttttagatgaaaccctgttaaagatctcggtcattgtggtattgtgcttctatgtgaaatgaatatgagaatacacattaataattgggaaagggataagggtgagcggtgcaccctctgctgacagtggcgtcaaaagcagaaaaggaaaatctccccaaaccagtaactcagccataaccgtgcgcctctgtcaaaacctcaacgtactctacagacttcccctcactgtagctagttgtacgtggataggaaagggtgagccacgtgcaccagtctctgaagtc

SEQ ID NO: 65550 - DNA, 1627 bp, Zea Mays
aggatcacccccattgggatcaacatcaatagggtcacacccattgggatcagctcctgtaaagagtttcactggtacttcttcagcagaaggagcagaagggccagcatcatgatccaagcacgacacttgccgaagccgtctctttttctttttcttcccctcggcaggagcagtcggatgaccaacttggcaaagacatttcgggtgagtaccctcaggccttcgagtatccacggttttctcaggctctggagcagttgcaacagccaccgtttcagcagcgatagaatcagaggaatcccccgccaacatatccagcatagcaccgatctctgcatcactcggattagtaggcatctcaaagtgaacttgcctctcatcattgggaaggccaccaagtgaagcaaccaggacttcaatttcttcgggggagggtcgcactctaagacccaaaccactgtcaccagcaggaggattggacacaaaaactgaaaaagggcttagaagatggcaaattccaagcagaatatgcaacatgagcaccaatatttgatactttgcccctcaatatcatctccagccggctcaccaaatccacaacaggaatcctcttgtcagtaacccgagttgagtcggtgacaccactgtataagtaagccgggtacgccctatccttcagggactaaatattcttaaaaacaaagtctgtgaccacagcttcagcggttagacctctctccttcagcaaacgaatttcatcaagcagaaccttggcctctgttatctccaaggtggtgggggactcaatccaactaggagtgcgcacttccggctgtctccctgaccgaggggggagggacttgccatgattttcaacaatgaaccactctaagcgccatcccttaatgctgtttttagtgggatatccaggtactctgtcttcctcccatgatgcatctccagactcgcaccgcccacaagctgatgctaccccccagccataccaggacgatagtgatacaagtgtttccacaaaccaaagtgaggaagaattccaaggtaggcttcacatagatggacaaagatagaaatttgcagaatagagttgggattcagatgagtcagattcagattgtaaaagtcaaggagatcgtgaaagaagggagaaattggaagagcaaggccgtggagaagaaaaggaatgtaaacgacggactcatgagtatcctccatcgggacagtaaccccacgacaaatccgccaggaataaagctccttcgaaggaagaactccgacaacgacgaggtggagaagatctgactcggaaacaacagacatatgattacctgtgaaaggcaattggctgttgggatcgatgggaggaataaccacagcgacagaattctgactcttccgcttgggcgccatctcaatctcgtcggcgaactgagcggaagcgagatcaaagggaaacagaggaggtttggaggcagaaagtaaagctagggctcagaatgcagaggcatgcgacgacgcggtacaagtggggttttctcgggtcagacaccatttctaaaaaagtgcccagtcatcactcggtcgttatttctagaacgccgatgtg

SEQ ID NO: 65551 - DNA, 492 bp, Zea Mays
tatgtgccctataaatttccaacgaagatttccatgaggtcagcctaattttgatacaccgggcctcaggttctcgagccacgctcatgccgattttgtcaagtacaagggaggttctagattatgaaatcatcatggtccacccctcttgcttgacacgctagccggtagacccctagctacaggttgggtttgattctgctgagtacttcgcgatattggtgggtgccatgtatcactgtagtcccggtgtgtcaggtatgataaattagggatacccagactacacccctaaaatgcgcttgaaaccctaagcacaccatcaagttacatccctgaggtcaaggaatcaagaactccgcctcgcccgaggtcccccttaagggtcttcccaaaactccgcctcacccaagcccaatctcggacaaggcatatgctcatgacaatctccgtctcaatcgaggtcacctcacccctgaacgatgatgtccg

SEQ ID NO: 65552 - DNA, 293 bp, Zea Mays
gatcgagggggagggatttgttgtgattttccatggtgaaccactcgaggcgccatcccttgatgctgtccttgagggggatatcgaggtattccgctttcctcccccaacgaagctccaaactggcaccaccaacaagctgatgatgccctacagccataccgggtcgacaatggtaaaggtacctccagagtccaaagtgggggaggattccaagaaaggcctcgcacaggtgtacaaaaatggcaacttgaagaatggagttagggtttaaatgtgtaagatttaaatcg

SEQ ID NO: 65553 - DNA, 499 bp, Zea Mays
cttgcacgtctcatgtcctacctggatcttttctctctcgagaagtttccaggtagctatcactctatttgaggccttatctactgctctctactctcgcttatcttttcactctatcttgcagcagtcagttcaggatggtgaggacgaagaacagcacaccatcagggggagaagatgacgaggatcctcctcgtcccttcaaacatgtcaagggcaagattgtctatcttgagcagcaagagggcagaaagaagaggcacttggatagagccgcacatgcagcacttgcagcggcaacaacaacaaattagcctgagaaaggaggctagctccagatttcttctgatcaaattacctatcgagttcgtcgcctcgcgtctcggcctcactccactactcccccactccttccgccatagtctccactccacctcccactttgccagctcccgtcgctcatgagccgtccaccacacccgctttgtccaccacctcc

SEQ ID NO: 65554 - DNA, 432 bp, Zea Mays
cggtactttgtggactttatgaagattataccacctttaatctgaccaatcttcactggcagtttgacacctttttaaaaaaataatactagacaccgctagctcaccgaaaacaacttgcctgctcatctgagattgtgttgcctgtcgctttcgaagtggaaaaattgctcctttactgagcaagctgtgtattgaaaatacagcatcccgaaccatcgtgcatcaagatgtcccttttgtacgtatttatgtttgattcgagtatgctgcttataaggttttagaattcaagattgttattacatctcgctttcacgtcggaaaccacgcagaggagttccattatcctatggctctgcacctgcactcatttgatgctgctaaacgaggtccacgtctcaagtcttggtttttcttggtgctcccaac

SEQ ID NO: 65555 - DNA, 499 bp, Zea Mays
aaagagagagagtgtttatgcatattagcatacaagtcaagaaagagagtagcaaatgtaacatagaagacttgaaactaacctcccctatatgtttcctagctttggctctagcaatttctttgccacctttcaaccagattaatgtgataaatcgtctagccacattcatggcatctctagtaggcgtggtcatgtcatccacttctatgtcgaagttcaccttcccaacaactttaacgtgtgcacatccagccttctccagaattgaaaatttgcctcaggaagcaactactacacaatagtcgccctaggtactcatgacctcctcaaaggcatccacttcttctgcaatccatttcagagccccaacaccatagccagtagcatagtcggtttctcctgaagttgcgccaacagagtagaacaatttctttaaacgctggcagcactggtggctatatataccaaagaaattctcctgaagctcctttaatgg

SEQ ID NO: 65556 - DNA, 333 bp, Zea Mays
ccatactcttggctatctcccgacaaacagatatttctttgatgtccaggagacagtacaagaactcatctttgtccgtgccattgaacaataagacccccttcatatattttagttttcggacgtagtgtttggcttctaagatttcttcttcgaataatcttttccccgaagcatgtcgaataatgtaatcaacatcttcggatggggcttcgggggcaggagatttagctttttctgtcacgtcctgccccgctgccatgccggtatccggagtttgttgctcagccttatcctcagacacggcaggcttcgtctcaatgggcactgaag

SEQ ID NO: 65557 - DNA, 868 bp, Zea Mays
atcgaacaagttcgttcatctgtgaaattgtttggtgcgctgccatcttcatgaaatcgtgcatgcagtaacttcagagaagctggatgcgcgcctcacaatgctgctcgcctgctccagcaagagtccccggccccccagccctgtcgtcgatgaatgaatgcatgcagtgtcaatgtggtgcggacgacgtgcagtgcagagtggttacacatcatcacaggggcgcggagtcgccaataattgatcgttcagccttccaatttaatgaatgtgttcgttcttcttcgaccgtacctcggtgagctagaccgcacgcaactgccgcctctcgagtttgtctctcgttttacttgtgcttccgcttcccactccttgcgacgacgacgccaccaatcatcggctacagtcgtcaagaactcaaccgcgcaggaattatctgcagttccgtatcagtttgacactatggtcaaaactcaaaagggggtaggatgggagctaggctttctttcctttctttatttttattagctttctatttttcaaatggatagaaaaaacattttgcagttgtttcaaagaagacaaagagagagtacgagtatacgtttcatagttgttttaaccaaacagtttatagttttttcataacacgtatatcattttataattatttaatcaaacagctttcagtttttttttctcaacgcatagattatagtacttcttttatagcttacagtagttttttcatagctctcagctcaacgaaacaaagcatatatataatagaccaataatcatgcattctgcatcatctatttataatgaattgctagttgctgtcactttgcatcgagattatttt

SEQ ID NO: 65558 - DNA, 799 bp, Zea Mays
caaaaaaagctacaattgtttgacctaaaactagtgataggcattaaatagtagccggtgcttagggattgttggagtgcgtagatattttgcaagcaagcgagaagcgagagaaagaggtggtacgagaagatcaacagcgcccaccgaatctgtttctttttttgggagcgacgaactgaactggagtgcgtgcctgtgctggctggcatgcagtttgtgattttgtgtgtgtgtgtgagagagagagagagcgaagtgcaactggaagccagctgaagctagtctcgatcggtccctccgaggacaatgcaacaaggagcgaggaacagattcagagaagagctataggtagccgctatgtatcgtgcatgttcattggatcgagagctcctatcgtgaagagctagctgtagcgattattggagcactgtagtacgtagtacctgctgctgcgctaggcgccaacgccattgatcgccatatgccccatgctaggttagggttgctttgctttgctttggtctcctttcgttgcgctagaagcagtgccaatacgacagtgagcagcagcagctgctgagtttactagcacgtactgttggttactgtagggccgaggtactctagctagcgaggcgccattattattcaggttcaggctgcaggagcaaacagaaccatcgctgctgctggctgctgctgctatccacgacgattcatattcattcaattcatccagacaataatcatcctgctgctggtgcagtagaaaagaaatgcatgcagttggataaag

SEQ ID NO: 65559 - DNA, 376 bp, Zea Mays
gtcactgtgtgtgttggcaacttggcagtactaaaaccggttcagagcttccgacgtgtggcagcctggaaagggagaagggcctgtcaacgcgcacagatggtgatcaagacttcaagagcatggctggttggctggtcgctgctagcatagcagctagctactgctacgccagaactgtagagattccacgcactgcttctaccggcgttcgagggcagcggcacagtcccacagagcgcgattattccttcgttattgctgcacctttctcttgcgcacgagtagttgtgttgtctgcgctgtggaacatgaccacaactagataggctcattcagcacacaaccctctctcgtcgatgcctggctcacgctc

SEQ ID NO: 65560 - DNA, 544 bp, Zea Mays
ctcatgtaaaaagtcacttgcaggtaaagcatgttacaaacaggcctacatctcatgactagttagttgctgtgctaactgagctagctggtttcttcacataacaagcgttggggcctttggcttttcagatgtacaggagcaagaagctggaccaagagtctgctggacacgagagagcagcaacctcctccggttgtcatctcaaatctctctccccaatttaactaaataatctcctccacagaagcacactggatgactggacacacatgcagaaaacgccatggatcagactgaatcttttccttaacctccgctgctcaattttggcagttttctcgcccatggacttccacatgatgaggacaggggaccatcatcgctaccatgacatgttcctccatcgacctgcagctggctcggccatctcttcgcggctgctccacggtggggagttcttcgggtcacgaaacgccgccgtctcgccggaggccagaaggctctacgagctcctccaacgccggcagcctaccatgcaaac

SEQ ID NO: 65561 - DNA, 517 bp, Zea Mays
cctagctgaagagctcgggaaggagagcaagttcctgcgccaggcgggggtctcaagaagttgaaggaagctactaagaaagagttgtctaagagcaaactttgtgaagcaggatttaacaggatcatgcgggtggttgcggagtcagtctatgaggcttttcgcaaggtgtagagtcattgggcgccgatgtttggcctttagagcttgaaggcaatgggctcttcgattgcatggtggaatggatggagtcgaaggtggtggagggcctgtctaggattattgatggcatgatgagccttgaggcattggcatgcgaaaggtgcacacacttcgaacgactgcgtgtgaggactttgttttcgtccggaaactctacaccaatgcttgttcttcatgttgttgaagctgcgatgagttgttgcaatggatgtgggcgacatttggcctcgaggtagcccacactcggtcttttgcaaagctagacaaggttggttttttgttgtttttaacttgt

SEQ ID NO: 65562 - DNA, 383 bp, Zea Mays
gtcgggcaatacctcggtcgctagggccatcggtgtctggtgaattgctcattggagctccaaatcgccgcggcgccgctttccattgtgaccggcattccctgctacaacaccgacggtaactttccttcacctgggttaacaatcggctactctctctgttgtatcgtcttgcgtggggattgccgtgggtttggccggatggccatcgccggtgtgacagccgccgtgatggtcggcagcgcctctgctcggccgtcgggtatggacgaaacacagtgaccgtgggatccattcagcgactgggattggaagggggtgtccaccgatggatcttggacgaacgggttagattagaagtagtataccccttcggtgggatt

SEQ ID NO: 65563 - DNA, 421 bp, Zea Mays
aggtgccagcaagtccagatgatgcagagatagatgttgtactcagtatgttagctggagaatcttccgactcgacccatgctgaaccgatggatatcacggttggacaagagcttaacaaagcaatggagacccgaaagcctgagggtacccgcccaaagcatcctcgccaagttagccgcctgactgcgccttttgaggaaaagaagaagaagaagaggcggcttcggcgactgtcatgtttggaataggatgtcggtccttctgctccggtttgtgatgaagtaacagcagcggtccttcctgaggttgatcccaatggtggcgtccatgttgaagttgatcccaatgggtgtgaccgtgctgaagttgatcccaatgggtgtaaccgtgctgaagttgatcccaatgggtgtaaccg

SEQ ID NO: 65564 - DNA, 382 bp, Zea Mays
tcataaaagactgctcctcatgattccttagataatataatcggtggatgacttgttgcttcttcttagccatatagtctggacattcttgtaccttagagaatatactattattctagacctcttgtaaatttgagaaaggtgttctcccagataaacgtaaggtgtgtctcttttttaattacatctcttctatactgagcaaaacatgtaacttttatttgacaagattggtgttaggattcacattgagagcatgctcgaccagttccctcatgactaccgacttatcagatggatttcatgcgaagatgctcctattgtcttggaggaaaaattatctaccttcaagtgcgtatacgcaaagaaatctgagaactct

SEQ ID NO: 65565 - DNA, 470 bp, Zea Mays
gcttcggcagctgcagcttcagtaggtgcagcttcggtaggtgtagcgctctcaatagctggtgcctttgaagccgaagctggtggtggtgtctcttcaataacttctgtgacagtaataattcttcattttttcggcccagctgccttcttcgctatcgagggctccttctttttctaaaaaagcttcgtcagatgtggcgccagtggacttagcctgataggcaaggatttagtcattacctttagaatttctaccacgtcggtagcaaaaggtgttgcagcagtttcttcttctatatcagtcgccttctgcttcagtatcgtagcttttctcttcttcggagcaactgctgtcggctcagggctcaatttcctcttcttcaggttttcttcatcttcttttaccattctagcagcctgtctgcccacaacactaacatctctttttcttttttgcccttcggcaac

SEQ ID NO: 65566 - DNA, 514 bp, Zea Mays
ccttggtcattgtcgaaggggagatcctccagccgggtgatggagtgcacccgccccgatcttgagatgaggaaggagttcaagtatctacccaactaaatttgagaactcaagaacacaaggatttgagtggttcgggctaccaggcgtaataccctacatccactttgaattttattgctttgagagttcagtcgccgagcatatgttttagcctatgctttttgtatcgcatgtcctcccttttatagtctaaggcgaacatgtacaaggatggcagaccctaacaagtgggcccatcatgcctgtattaaatacatgtttcatggagttataagtgcgttggagggctaagatcttccccagatattgtgttgacttcatgactagacttgttcctcctgttgcctcgttactgatactattgggaccagatgtgttgatgtgtaatggatctaatccgatatcttcgcactgtcacatctggtctacgtagcagtgagagtgctgagca

SEQ ID NO: 65567 - DNA, 524 bp, Zea Mays
gaggaagacgacgagaaagtttggctgacagagttttcaacggaggaaaaatgtttaggggccctcttttcaaccttcaattcaaccggtggtcgaggttggctcatgctgaggcgactaggttgccagctctggtggacgtcgaggttcacgacatccctgcccacgcatgggatcgttctacgacggagtatcttctccgggactcttgccttattacagacattcatccgagcacgaccctgaagaatgagttgtcttccttcaggcttcgtgcatggtgttctaacctagatatgttccctttgacgatgaagcttctcattgttgagccggggacggacgtgcaggagagaagatgtctttcctatgatattaaagtggttgttactgatgaggtggtcccgatgaagttggacccccctccacctcagtcctcttcggctaatggacgggatcggcatgaggatggtggcgggcggcattcagacgacccccattctcaacatacgggctgcaggccg

SEQ ID NO: 65568 - DNA, 649 bp, Zea Mays
atcacatcatcctgcatagcatcacatcatacatcatatcacactaatgacacgaactgaatacgaagtccatcttcgggaaatgctttgtgaaataaaaatatgccagggcacaaaagtaagccgagcaatgcagtttcatcagctatgttgcaaaagaagggatctcttgtttttcaagcatggatgattctatgaagcatgaatgttttcataaagtacggaaattttcatgaagcatggattcttttctttacgaagcatgaaaaagaagggaaggtgttttttcgcggaaggctaaaaacggtatgtgtataaaagtttcatgcatcgcaaagaacaaaattgcaaatagtttacatactagattcaaaactatacacaccaaatattacagtattagtccagcaaatgctacattgatcgtctaaaaatgtttttacaataaccactagtcttccttcaggaccttctccgcaacttcatttatcaatttgttaacgacttcgtcaacaatagattcggctatattaataatctccagtgcttcctttgtctctgggtcggccaagggatcaaacggttccggtggcagagataattcagctacaataggaaaagttaattagttcgaagccataaaacaaat

SEQ ID NO: 65569 - DNA, 637 bp, Zea Mays
gggatagactgcaaacttcccaagacacagattactgccgcacggacggcaggtttattttataaaaacagaggggctcttaagtaagtttggcactgcgaaggggtacaggacgttttaagccgtccgatcaagtgagggtggtccagattagaacgacgagacgcccaaccagtacctgatcacaacggttggtttacgaccctacgctccgaggttcaatgaagtggtgatcaccatccatccgttcggcgttgaatccaacgatcacgactcacaagactacacgatgcacgattattcaatcccaagcattactttgggatccaatggtgccaaacaacctactccctcatctatttgtggccacaaatcacgagatcgacggccccggggtatcgtctctcctctaatacttctacacggcggcgccgcccacccacggtcgcacaactcgccagaatcccacgccccatcacccggttacaaaccccagctctaattagcgcaaaatgaaatgacggcgattgggaactacatggatggcttcgtagggcacgattcgtagtagggagccccagccacggaaggacgatttcatggcgaattcaccacaccggcgagcaatttcagaggc

SEQ ID NO: 65570 - DNA, 673 bp, Zea Mays
aagtcattttattgatggtgtatctcccagttacagaatacaatgccatcccaatagcttttgaaatctagctaggggtaaaactttctgagatgctctatattccatgagttccctatttccgtgccatccatttgagtaagacgatatgatccaggccgagtgacttctgctactatgaatggtccttcccatagtggcaacaatttgtgtcgtccctctcccattagaatttggcagaggacaagatctcccactacgaaggatcgatgtcgtatagccctatcatgatagcgcctcagagtctgttggtacctggctgactgaatcactgtattcaatcgttcttcttctaatatatcaacatcctccagtctagtagcttcagcttcggctatgttttcgaagatcaatcttggcgccccaaacttgagatcagcaggtacactgcctctgaaccatagaccataaagaaaggagtgtttccgtgcaaagctcggctaggttgagttcttaggctccaaaccacatacgacaactctctgatccattttcatgcgaacttttcattcttgccgaagacttttttctgagtgcttccaatatcattccgttggatctttctacttgcccgttggctcttgggtgtgccactgatgcatatttgatctgg

SEQ ID NO: 65571 - DNA, 463 bp, Zea Mays
caagagtatgcttacatacatacagcaagggcatcacacattacattggctcaaccttcgggatgatacccatctccctatagttgaacaacattatccttaattcctcaccagcaaacagacttcgcagctcccctcacccacactcgccccagccggcgaggacaacaattcccgcttgccagtcccgtccacacgaaggcgaccaccttccacctcaccacgatgacgcctatcacttcgcggcaactcactcaccctctgtttcgccaccgcccttcgccgcctatgcccaacactcgcacccggaagatcctcatcacccattacacgcggtgaagcctccgccgcagccgcatccaatgccgcaaagtaatccaaatcctcatccgaagactcctctgtccacacaatcgaactcccagaatcatcagactcaaaacacttagacacagaatcatca

SEQ ID NO: 65572 - DNA, 356 bp, Zea Mays
aaaatttccagactactgctggtactaatattacaacaaaggatacacccatagacctagtgcccattttattcctctgtgtcagtgtctatctctgacacactactgccccgtggagaaccactaactgatgcaaccatagtagctgcttctacctctaggtctgcatcaggctcacccccatcagctaacacaacaccacattctgcctccgcggctcctggtgcgtcatcggatgcagctggtagtaaagttggtgaactttctcatgcagctcattagagtaatcctccaaaccattgtaagctaggaccaaatcctggaaacgacccctcagatgattctcacgaccaaaa

SEQ ID NO: 65573 - DNA, 467 bp, Zea Mays
aacgagctccccgcctacgcacgtggaccggtctactccgaccatccccggcgacgatccgtacatcaacgtgaccgtcatgacctcccctatgccctagaccacctcaccggagaaatctcatcgccagtaagcccctccgccctttcctccgccgtgggtactgtttaattgggggaaggacctcgggttaggtttagtaaaaccccaggggttttttctgaattgtcagtggcacatgtgaatagtgactcgaggactagtctgtaaggaaatttgaaaacactcgccagggaccttgatgcaaagttatttcccatttaaccatttctgattattctttttaatgaacagagaacttaggaaattaataacttgagaaatatttaaccaaaatttgtcaaaccaattttgctagattcaaaataatatgaactatcaggaaaaaatagtaaacctcatgtttt

SEQ ID NO: 65574 - DNA, 533 bp, Zea Mays
gtccagccatggcgccaccgcttggctttggggcgccgctgccctatgtccggtgggggaaagagatgagagggggagatgatgaattacgcgtcgtccgttcgtttcatgatggatggataggattaactcctcgttttattaaaccagtgccgtagatcgctttatcaatggccaggatttgaagattggggtacctcgactaatgcctgtctccaccgtgggatcctcggccaacgtttgggattagattcaccataccccttcactgcataaaatccgggccgtgcatctgtgatccaatggccacagttgataccgcttcattcaaaatagaaatctaatctggaccgcttagatcaaatctagcggccgagatctcaccgtaccccttcgcgggtacgttttataaatgagaccctgtcttttacatatatcaacccgccgtccacaccagtgattctctgagccttaggaatttttgcaccgtagctcctgcacttcttagaaatcgaggcccagtccagagaatt

SEQ ID NO: 65575 - DNA, 551 bp, Zea Mays
tgaccacgacgaatgggtatggtcgaccctgggccacacgatagaaatcggacggcccagattaaatgatatgagattcactcagatccaccagatctcgatccattggttaggatcggatcccgcgaaggggtattctatcgtctaatcacgaccatccaacctaagtccgacggtcgagaagagcccagatcgaaacgattcacaagttctaatccacaccgaccaataaaatctaacgctcagaatgtcatctcccaccccgcgaccccaggacagcggcgcggcagtatccagggcggcggcgccagataccaagcaacagagcaacaccggtgccccaaacgaccatctcgacctctctcaagcacacgggggcacgatttctaccatggataggctctacgcgatgtggaggaagaggcaaatagctgggacccgatcgtaccagcggtggaggcgactgaaggctcggccacggcatatggcagtcccggaacaaaaactcaattccggcgagcaattggatttgcccagatagcagatttccc

SEQ ID NO: 65576 - DNA, 721 bp, Zea Mays
gcagagcaccgttgggttaagtcggcttgatttcgaagatatttctcctcaagttcagagcaccgctgggccatatccgacaatgcagctgaaagggatgcatgactaagaacaaggtgatcaataaaaacagttagggaagctataagaacacaaaccagcattggacgccttcaggtcatcaatctgtttttggagtaacaatggattccattgcatcagagtcagagcttgctcgggaacagtggctccacaggatctcagctgagcagaaattccatcgacaagagcctatgatcaaagacagatgagcagaagaaagataactcactaatatgaacaatgtaagagcaagaggtcgactcacctgaagattagagaagaacagtggtaaacccaggcaggatcgacgagggaagatcagtaggaacaatctaaagggcatcatcaggggtgatctcagccccgccagcaggcagcaggctcctcgcttcaagctcgttggcctctaaggcgacatgtccatttacagttgtgaaagcatgtacaaccgtcgccccatcggactgaggaggggacgacccaacgtggacatccatggaggcgtgggaaagggagcccatctgaacaccctcgggggctaggtcgtagcttgcactacccaccagagctggatcactaccagcaacaccctcgggggctaggtaactgccgacaccac

SEQ ID NO: 65577 - DNA, 792 bp, Zea Mays
gtgaggttcaggttgctaaagcgtaacatcctacgtcttctttagatggcaggaaagtggtagtgtgcgtccctgcataagggatgtctccctcttccttttagggctactttgggaatctcgaattctcttcgggattgaagaggattaaggtgtaaactaatttccttttcaatcatcttcaattctgaaggggtttgagtttacaaactagctcttagagttggtttgatgaccaggaaaataaaggggatacatggagaaggaatcacctctatttttcgggtcaccaaatcagcccttatagaccaagggaaagaggggttatagttgacaggtggggttggagcacactttgctcttactggatatctcgggtgcatgctggatgtgtgtgactattgttgaaatcttgggacgtggaaggtggaggagcatgttccccatgccgctaaaggtaaaggagacctgggaccgcatggcagcaagtcacggatgatcaagatcgaagacatgtggcgaacgacgcgggtgacttggaacttgacgattcatgacacatttcatccatgtcgctaccgtgcccaagacgagaaaacatgccgcccatgccgccataatgccacgttgccgccacaccccagattattagggcctaacagctaggaagtgggtacgatgctagtatagttgcacctattgcgtcgaataggcgcgacatctcctgactccaactctttgactgactgtggcgtggctagccacatggcatgcccagagcccccctttgaa

SEQ ID NO: 65578 - DNA, 310 bp, Zea Mays
gcagcagcgcaaacagcatcctcattagggtcagcaacaggcggagcacacccattgggttcaacgtcagctagaccagtcgcagtcatttcttcagcagtaggaactgaggtgctggcgtcctcatcaaagctagacactcgccggaggcgtcttcttttccttttctgatcatcagcagaaggctcgggctggctggttcggctaggacgcctcgggcgaatattggcaggtttcgagacatccaaggtcgcaacaacctctggaggcggcaccactgccagtgtaccatcaggaacagtatcagacg

SEQ ID NO: 65579 - DNA, 758 bp, Zea Mays
ttaaatacaagacgtacacctgaaccatgaccatgtgctactgacgattggactgtacgtgctccaggggtctgagacattttacgatccttgggcggaccttcgacggtgatttgagtatatttttccatgtttggatacgaatttcccatttacaaggattaggatgaaggagattaggagagattttgacttgctagacatttgaactcacttaatcgctgcaatatatatttatatggaatgagattaaaacaaatagtccttattaataagttagtgtttggtttaaaggatagtataaggggctggtccagttttataggtgtttattttggagacagcagacagaacacatagctttctttcatagagaatacctaagaccgatccaggcatccagcagagctccttccggagtgcgtaaatgtcgcagtgaagtacgcctcacatcgtgtaagggtgtgtttggttggagagcggatgagaacagagtcgttctatttctattttctaggtgtttggttatctagagaggaagagtggagcggctctaggaatatctcggttaagtatcgtgctaaaactaggaatgagctggctcaccaaaatcgaccggacgcaagtgctcccgttcattcctctctagcaaaattcctccgctcttccatcccactgttgtcgtggggagcttcgtcatcgtgcattaacttggatgaatccgccgcctcccttttccttcccgtgctcacgctggc

SEQ ID NO: 65580 - DNA, 312 bp, Zea Mays
tgattttggtggtggatgtttggctgatgcgggtgcagaggcagaagtgggggtggtacgacttgtacctcctggtggtgttggtatgcgtggttgggtagatgctaggcggggccgtggttgtatggttgtgggaggtggtgttgatatgtgtgcgcgacaactctggggttgtcggcgggctgtgcccgagacatcctgtccctggtagccttcgtttccgggcaattcgttgggtgcgcgcagtcttcgccatgaaacagacagtaaaatctgcgcggctgctgcgcccgtcctcggccccgaccacgc

SEQ ID NO: 65581 - DNA, 331 bp, Zea Mays
gccaggagataagatttaggtccctacgaaaaaacgaccttgctccatcatggattgtctggcccagagcgcgaaccgttcggtgagacgcagagagacccgctcctgcagcgaggtcgcgaatcgttcacacctccgcagagggcatcgacagatggtacaccctagtgtttgacctcgaataggaccaacactaaaaacacaactatttctcaaggaagttggatcctgccaagcggaattttacaattattttatctcaccgcgggaaagcatgtttctcaactctagcatataaccttcaatcctttgcttagcatgacgcaacggc

SEQ ID NO: 65582 - DNA, 642 bp, Zea Mays
gagatatggcacgagacgggacgatcaagaagtcaaaagacgtaaaagcgacgtttgacagataaatagtgacataggaagtttggaattcgaaatgaggcacgaaatgatatggaattgagccgatacttcacgaataggtttatataggtcaatatgagtgaagtgtgtgcttggtttgaatttaggcgaagaaatagggatttgggcactcggctcggaaacgatcgctcaaaacgggaattttggtgaaatttaagcctgggatctcggattggcgtgaaatttggcaagaatgttgctggaagtgttgtggaggtgcctgaaaaatttgggttcaattggagcaagtttggctggtttgggcatttcaccgagcacgtggtgtgcggggatttagggttttggtgaaacggtattttgaggtgggaaaaccctcccgaaggagctaggaacctgcaaggatgcttaaggcacacaggggaacacatttcacaaagggaaatcaccagaattcacaggatttagagttgttgcacaaagggaagaggtgggaggctctgctcaccagaacagagaagaactgagggagtgagagagcaagagttgctcaccgaggagaggagaggaggggagcccaag

SEQ ID NO: 65583 - DNA, 334 bp, Zea Mays
ggagtttgtcatcctcacagatcacaaaagcctcacccaactcaacgagcagcgccttcatacaccttggcaacataaagttttcaccaagttacttggtctgcaatacaaagttcattaccgtcctggttcggagaatcgtgttgctgatgcattgtctcgttgtgtgcctgctgaccttcttgcattgtccacggtggtacctcaatggttattggacgtccaggccagctatgatcatgacgccgaggcccagtctctcctggcccgcctatcggttgatcctgctgctgtcccgcacttcactttgaaagccggtctgctccggtataag

SEQ ID NO: 65584 - DNA, 632 bp, Zea Mays
gagattttaaaatgttgcgtacttgtgtccaggtgtctcagttggagatttcttcaagaaacgccgcttcggatccgaagtcttctttggtggtggtcagggtagccgcttcgggtcaccaggaataagggatttggtctatttggtggacgacgacggaggagatttcttgttctcaggcggaggagctttcttgttctcaagcggatgcggtggctgagaaatggcacggtcgtcccttgaggtgggacggacgtgggcatcagtagaaggcagaggctgcaaggttaacaagaagatagggggaggaggaaggtcttcatcggggtcgtctctgtcttcaacgccgacgactggtgatccagatagtgtcgccatgagaatttgagaactactcaatctccatgcgactttgggagtctgggacctctttgagtcggtggacaggaaggagcctgggctcacagcacgctcaactgcaagaggtaaaactagggttatattctttattttatatggctgctaacgtgaaggtgctttgggcttttacatttttgcttttgggctacttgcgacaagaagttgaatgggttgtagcctgcaaccattattctttatataatatacataca

SEQ ID NO: 65585 - DNA, 814 bp, Zea Mays
aacaagataaacctccatacatatgatcgaataagatagcacttccattgagccttccactcacctcctttgtctcttgtctcgtcctctgcccttcccatgggtgcccatgcacactccttccccccatatccctcgattcaccagacgcacgccccacatggtgaagaacgacgacagtcacgacagttgcaggcggagcaacgagccaagtggctcgccctcatccttgaggtcatcgcggatgcatgacaccttctcgagcgatggccgatgttgttctgtcataatgacgcacccgagagctcaacatacctccagcggggacccataagtaggtgtcgctttggttgttgtcgtggctgccagtatttagcaccggcaatgccctacgtggtatcccacgcagtgcttttgttggtaggcaagatcgacaagtagctcgatggttcgtgcctatgctcgacataacatagaaatttatacaggttcggaccgcaaagatgtgtaataccctatattctatgtgcgcatgtgatggaattaatctcaagttcaatattacatagtgtgtgaagtcaatgctctagctcgccttatatacgtgacgaagttagggttacacgacgtcgaacaaattgctacagttacgcctatatacacaaaaccaactccgactaacacgtacacgtgtggtccggttggcttatctcttctgcatgcacgtgaatctattttggaatagccacacctatgtctttgaattccacgtcgttatcttatgtatcgggccaacggatcagcccaccaagcc

SEQ ID NO: 65586 - DNA, 526 bp, Zea Mays
atcgtatgaaatagtgctcctagatatggccacctgttacttatgtccctgcgacggtttcgtggttgacgtccctatgttaatgcacggcggttcccatggtgtaggctcgggactcgacaaacacggcatggttccccttttccctccgtgcatgtggatttgtccattagatatggtaccctgtcttgttgttcctaccatactgtctattgtataggcttcgatgctgaggtcgcccctgataggagagttgtgtctatgtcttatcacttgggctcctggcgtcacgcactgtcatggtcgacgtatgcttgtagctctacctcaaggcttaaacttgctcgatgggggacttgatcgtctagtccgccttgtagacttgctcaccaggggacttggtcgcccactctgcctcatagatttgatcgaggggggggggacttggtcgtccgatctgcctcgcatacttgctcggtgggggacttggtcatacaccccacctagaacgcttgctcggcgagcg

SEQ ID NO: 65587 - DNA, 314 bp, Zea Mays
tctcagacgacgaatacgaccacgagtacgaggacctccgggttcgtgctacatccagctcagcaggcacacggatgatacctcgatgtgacctgcatcggaattcttttgttttctttgtttgttcggcgcctcggaatgatttcttactacacgtgcagccgtcgtcatcggtggcgaacatcgacgagtggaggtggaagctgagcatgctgcagcgcaacgcggaggaacaggagatcatctccagggaccggagggaccgccgggattatgaccagatagccaacctcgccaagaggatgggactctac

SEQ ID NO: 65588 - DNA, 308 bp, Zea Mays
aactcatcaagatttgtattgttgcaatagtttctcgaccaaggatcagtcataatttgtcttcccttcaaacgttcaatctttttctagccttttcgctaggctttaatacgtaccggctttgctgtttctacattgtttttatctttatagattacagatacagcagtctcaactgttgactttaatctaaagcgaatagccccctaacacctccatcataatcaaggctgatagatcgtcttggaatcctcgatctcgaagactactattgtgttgtggccaagttagatgatactaaaatgcac

SEQ ID NO: 65589 - DNA, 548 bp, Zea Mays
tatgctaaagaggtctataaaatacatgcgcttcacgcgctgcccaccccccggcaagctcggagacggcgatgccgcccccacgaatctgcttatcgcgcgtccctcccctcgcacccccggcaaactgtaaaacagtatgtacgatcaggccaatgtctgtctgtctgcctctaaacattatgaacccttttgttcttatctgaagtgttacatagctccattttttccatgttgttttcagatgcgcaccctagcaggcaactgcgactgatgcgcattgctgaggaccaatgtggccattgtggacttcaaccagtggtggtttgaggcccgttgcgttcacgccgctgggaacatctactggagtgccgcatcctcagcgggacgcaaataacccagctaggtaatttcagtccctaacatttttaggctgctattgtgcttgtaaatcttatggagtttttttttcagtatgacagtctactagctatttgctgaggagaccttggtagagttcctgtcgaaagcaacaggaactgttgtcg

SEQ ID NO: 65590 - DNA, 691 bp, Zea Mays
aaggatgtacgtgtccggccccacaaactgtaccggatatgtctactccagcatcctagcaggatacgcagttgacagacacacaggtacatgaattactgttaaggcaatagcatattcgtgtactattagaaagttgccccgatgaagctgacattgatccactggttcatacaaatacaacgaaacagaccaaaacacctacaaccccagtggtaatgtttttttattacttgtattttcattgaagggttgtattcatcgttttctttaaatagcatataaccattacaattttttcagggtaaacatggtgacgttggcaagaacatgccgaccaacacaaacgtcactcctcaagcaacaccacatacagaatcttgctcgccgatatttgatgcgatgccgcaaataaaggtatgagtacaccgcctcattgtttttctatattattagtagtagtttactaaacatctaacccatttataccataattgttagtctcccggcggcgtccaacaggcggcagaaacagatcttcccgacagtggtccatgctttgatcagactccatctgaacatgtcagctcagtaattttcattttcattatagttgtcaaaattgttcacagattgtaatatatattttcatatatctttttaggtttctgttgaaaccgatccagctaca

SEQ ID NO: 65591 - DNA, 595 bp, Zea Mays
tgttataaacacccccgtagaataagcgccctataaaaaactttctttgtagggctagtttggaaacttaaattctcttggaaactatagaggattgagagagattaagtttcaccatgagactattagagcatgtacaactctgagccctttgatcagtttttaagtataagcgataactaagagacggtatgatataacattgagccctaagagcatctccaagagatccttaaaatcctgcttccaatccttattttaggaaaaaggataaaacacgcctccaacagatacgtatctagagtcccaaaacttccgcacgcgtaaagaaccccgtacacggcgcaaattcccgcaggcgtacgcgcttccaaaacaagctagttttcgattcccgcgtgattttgctcctttcgcgccatcgtcagccacccactttgcttgatttcgcaccatcgatggcttgcgcgcttggctacttgcttgtgcatccggccagccaggcacctgctttacccaaagccgtagctgagcatttggccagcctaaattatagttgagcatccgagatttaagcaaatgagatacgtgagca

SEQ ID NO: 65592 - DNA, 513 bp, Zea Mays
gcaaaaaccaactaacatagaaatgggaacaatttgacgcttcctgacacgcgatcatcactgtaggttatctttagaatccttggagtctcccattctcattctccttctccttattatcatatttgtaccccagatttgtgtttgccgctcttccaacagcttggcgccttcttggagtaggtcttgaagctccttcttgcttaaggctgtccaagataaaatcaacgcacttgcatgacacataatatcatttgtcgaaattatcaggtcattttcaaaacacattctatttcttgctttccaaatagcccaacaaacagttgagactccaaagaaatgaatattgtccaatcccggcatatgtctttttaaccacacctccaacattgaccaatacccttaggaatgatctctgtattggtgcaattggccatcaaaccccaaataactttggcgacagaacgactaaaaaacaaatgatcgactgatttagtctgatcacaaaagcta

SEQ ID NO: 65593 - DNA, 342 bp, Zea Mays
tacacattttctgaatgtgactgcaggtaaggatttattgaataaatcagctagattatcacaagacttgacttgcaggatttttacctcaccctcattctagagttcatgaggataaaaatacttaggacaaatatgcttagtcatattgctcttaatatagcccgtttccatttgtgcaacacatgcagcattatcttcgtagataatggtgggggtatttgcggtggtagaaccacatgacttctggatgtggttagtcatccgtcgtagccaagcacattctcatgcggcttcatatagcgagattatttctgagtggttagtagacgttgttactaa

SEQ ID NO: 65594 - DNA, 469 bp, Zea Mays
ccctcagcctcacgccgaatcctgcttcaggtccaacgaccacatatcccctcccctgtgctgaggagtgaggacctcaccatctcctcctgttggttgttccaaggcccagcgatggagcgatgatggtggtcttgcctcttttgcgggtgcttcagcggatagtcggcctcaggcctcttacaaagaggtgttgctttcctcccgaccccccatccatcatcctgctgctgaggttgatggcgacggttgggtgagagtcaaggatcgtcgtgcatgcttcagggatcatcgtgcctgccagcgtgatcttcgtcaccctggcctctctgcccccaaggctactcctattgacttgcaggggtggtgcttcaattgcttttcctcgtctcatcgtgcaatcagctgttgtcgtcaggtacgctgctttctctgccggctgcctgggcaccgtgcttacgtgtgcccg

SEQ ID NO: 65595 - DNA, 727 bp, Zea Mays
ccgggtcgagtgacttctgctaccacgaagggtccttcccataagggtgataacttgtgccgtccttcccccgttagaattcggcggaggacgaggtctcctactgagaagaatcgttgtcgcacagccttgtcgtgataacgccttagagtctgttggtaccttgctgattgaattactgcgttcaaccgttcttcctcgagtacatctatgtcctccagcctggtgacctcagcttctgctatgctttcgaagatcagccttggcgccccaaacttgagatcagcgggcagcactgcttccgacccataaaccatgaagaaaggagtgtttccatgcaaagctcggctaggttgggttcttaggctccaaacaacatagggtaattcccttatccactttcctgcaaatttctcattcttatcgaagaccttttttctgagcgcatccaatatcatcccgttggctcgctcaacttgcccgttggctcttggatgggctacagatgcatacttgatctgaatgctcttttgctcgcagaagtcaaagaattctgaacttgtgaagttggatcctaaatcagttatgatgctgtttggtattccgaatctgaatattatgtcttgtatgaattccacggccttagcggaggttaaggaggcaataggcttgaattctatccatttagtgaacttgtcaattgctaccaatacatgagtgtatcccc

SEQ ID NO: 65596 - DNA, 397 bp, Zea Mays
tgacttagtgtcaaaaatgtggtccagtcggcgttcctttcacgctgcaaaagtgtgatgtaaagcttcagcctcttacttgatataaattctaagaatctcattacagtttgcttcaatagaatctaaccacttgtcaaaaggctccccaaattcatcttcgactttatacttatagcgaaatctgactagtctaggctccgcgtccgaagcatcctcctcagacatctctcgcatctcccactcagcccttaatggtcatgttttaaaagccaaatattcttgaacaagatcctttgtcccaatatgtgtacaaacaacgttgaaagaaactatagtagcttgagctttgaaattgatatagcaagttggttttttatatctgaagcatacatga

SEQ ID NO: 65597 - DNA, 574 bp, Zea Mays
aaaccatgagtcagacatttcctaggactcgaacgcaaactagaaatgcccttggagcttgtgcgctagggtcctggctgctagtatgcccgcttctgaccaaccctcactttgttgggagtggtcacgagccctagtgggccgaccttcaaactccaattgctaaggggcccactcagggtccattggtgattgtccgcgtgggtcatggagtcttattcctatgaagaaaaaggaaaaacaaatgaaaagatgtgggcaagaggtcttattagggcgcggttacacgatcatggggtcgtaacaggtttaatgaaggacttacttgattcgctgttgatgcgtaatcatggcagacatgtgtggttgacatctcttgcctaagttggagcagatgggcatcgtgttagaggttcggatgggacgcgctcacatcatgatcgtttacacgacctaaaccagatgttcacagcaatttaacggggcactggtgcttaccggggcacgcgccacttcaggtggttacatagttacgtgataatcgtcccgtgtgtggtatttgaaacgattcagc

SEQ ID NO: 65598 - DNA, 473 bp, Zea Mays
aaaatatgcaacgggtttacctccttgcatcaaaacagcaccaatgccaactctacttgcatcacattcaagttcaaaagtcttaccaaagtcagaagttggagtagaggcgcgtgagtaagcttctcttttaaagatcaaaagagtcctcttgtgactgcccccaattaaatgaaacacccttcttggtcaactcatgtaatggggcagcgatggtgctgaaatccttcacgaaacgataaaatcctgcaagtccaagaaaactccgcacttgtgtcaccgtcgatggcgttggccaactctaaatagcatgcaccttggcctcatcaacctcaataccctgtggagtgacaacatagccaagaaacgacacgcgttcggtgcaaaaggtgcatttctcaaggttagcaaataagcgcgcggcgcgcaaagcatcaaaaacagcacgtagatggtcaagatgttcagataaa

SEQ ID NO: 65599 - DNA, 913 bp, Zea Mays
ctttcatgtaaagggaaccaactctgaaacagaatttgtagtcttcatgggaataaagtgtgcagacttagtcaagcgatccactaccacccatatagcatccctgcctcgaggagaatgatgtaagcccaccacaaaatccatggtgatatgctcccacttccactcctaaatttccaatggcttcagtaaacctgcaggcctcttatgctcggccttcacgcgctgacatacttcacaggcggccacatacttagaaacgtcaaccttcatccgcttccaccagaagttttgcttcaaatctcggtacattttggtttcgccagggtgaacggtgtaaggcgttttatgagcttctctcaagatatccatcttcacctttgatttctgaggcacataaagatggcccctgaaacgaaccaaatcattctcatcaatagtgaactcctggggtttaccatcgccaaccctctttcgagcttcctgcaataaacgatcctgctactgagccgcacgcactctctccatgagggaggattgaataaacatccgagtctcctcactagcgatgccgacataacacaaagcgatccccaaacggtccagatctgcgatcaaagacaaggccacttttggaaccccggacctgctaagggcatcagccaccacatttgccttcctcgggtgataatgaatggacaaatcataatctttaatcaattcgagccaccgacgctgcctcaaattcagctccttctgagtgaaaatatacttgagacttttatgatcggtgtaaatgtcacaagactcgccataaagataatgcctccatgactttagagcaaagaccaccgcgaccaattcaagatcatgagttggataattcccctcatgcttcctcaactgccttgag

SEQ ID NO: 65600 - DNA, 353 bp, Zea Mays
acgatggagtccgggttgaagttgtggagtttaaccccatagtagttcggaagggctcgcatgaagtggctcgacgataccccaaacccgcacttgtggaacaacgcgaagctgacaacgtagccctctgacggattcggttcctcctcattcccgagcacgccatggtagtggaggggcgaagcagacctccatcaacaaggttctatagatcctccacgggcatggtggagtagggccacgggtcatggggcgcaaggacgatgactctcttgccaatgcctaaaatgagaatgcgatggcaacaaggtacgtggatcttaccttgccaccaaacaaccccttacttcaac

SEQ ID NO: 65601 - DNA, 363 bp, Zea Mays
tatagttggtcgacgatgtggttggctgttataggagttcatcggtatcccataaaggggctgggattaggcatgcccatttgtagccgatgggtcctgtaggtcttctttagtgtggcatagtgtgatggaaaattagtaatagtagatttatcaaatgcacgtgctagcctcctataatcctcttgtacacccgtaagatttgttgcatctgttctcgttgttcttctacgtaagatcgaagagcttggatgtcgtcgggtttacttacaacaggtacgattgtagcaggacgtagactcgccaggttgtattccttctgtcggataagcttctagttttggtcgaccctgaaatcagcta

SEQ ID NO: 65602 - DNA, 552 bp, Zea Mays
cagcaacaagggtgtctgctccaaggtctagctatttcgctagctagattcgttctcttttttatgtggatagaaaatatggagaaaataaaaatagctagcaacgacgccgagcaaatagatagaagatttcatgtattccaaaaaactgagtatattacatgtaggatcaaatgctaatggtgcaataaattactgtttttattcttctttcagctctacatcaactagctatttgatacaattattgtggatgcgagcttacatgtaggtctgccgctcgctttccgcgaaggctggggaacatgtgccatgcatgcatgctatgatgccgggcgtgaggagcggcgttggcactgtcgaaccaaaaaatcaggtgctgctgccatgccgcagacccgcagtcctgcaccgcacgtaggtaggaaggactgtacgtgcgtttttttcaagtcgctttgtggtacgtagaactgatcgaaaaaaaaaatcaataaacaaggaatagaatggctatgtcgcatcatactgggaaaccaaacactatctaat

SEQ ID NO: 65603 - DNA, 450 bp, Zea Mays
tgacacaaaatgagtaaaggccttggaaggaggcaggttccaggccgagtacacaacaagggcaccaacatttgataccttgcctctgagtatcatttcgagtcggctcaccaagtccacagcagaaattcttctgttggttacccgggttgagtcagctaggcctcggtacagataggccgggtatgtcctgtccttcaatggctgaatattcttgaagacaaagtcagcaaccacaacctctgcactcagacccatgtccttcaacaatccaatttcagctagcagagcccctacctcagccacctcctggtctgtgggggattccgtctagctcggagtgtgaacatccggttgtcgccctgaccgtggggggagagaatttctgtgattctcaactataaaccactccaagcgccatcctttgatactgtctttgagtgggatatc

SEQ ID NO: 65604 - DNA, 474 bp, Zea Mays
cgacacctttgcgtcgcgtcggggatccaccagccatagcggagccttccgcttcttccgcgtagactcctggcgatccttttccatcactgctgatacaacaacaccaatgtttctcccataaggaaaattttaaaatctcaagccaaacagcacgtaaagtaatccttgccggaggccagggggatacagtcatttttgtgccactcaccccagtcaccttcagcattcatgaagatgattcctagaggtcgggcgaagtcatgacctccctaggctcagcacatgtctttgccaactcctcaacaaaacccattgaggccctcgaaaccctgtatgcctttatcgtacctttgagcagccttccgtctacctaggtcgccacctttttctttccccggtcatccccggcatgagcatagccctcctcaggatataggccatatcgaaggccattcaattcaaacacacggt

SEQ ID NO: 65605 - DNA, 283 bp, Zea Mays
ggcaaaaagaggttgaacagagtgtttgatgttatcgagttcgtttacccaaactactgttatcccgtacagaagcaagggaggaataggaaagccattatacctcagcaactactagtgcatcgaggtcaaagaaaatcaaagttttgacacgtagacctaggcgcatcgagacgaccgatgtgccgaagttaagtgaaagggtggaaacaaccccctcgccatggagactgttcctattgtgccttttggaattattgcagactcgaccagagagccagag

SEQ ID NO: 65606 - DNA, 525 bp, Zea Mays
gggaaaatcaaaaaagttaacaacaaaaatttcaaaaaattcataatcaaatggcaagagtttgttccactgccagggttggtcgtgagggagatgaaaccgaagctactgagactgttctgatttccgaagcaatgaaacagtctgggctggtaacatcagaggatgcgcctacggctggagcagagcaggctgacgttgaggatactgagtctgaagatgattacggcagcgcggtgccaagttaacccagccatctggatttcggaaaatccaccatctccaaaggtgacttacgtaagatgttgagtttgggctatttaagtgaagcaaagaaagacctggttcgttttggtggggaagaaactactccgaagccaggaaaagatgaagtagtgatcttcaaaagtttctttaaagctggtttaagattccctttgaacaagatgattgctgatgtgctgaagaagtttgggatctaccttcatcagctaactcctaacgctatcgttaagcttagcgttt

SEQ ID NO: 65607 - DNA, 1072 bp, Zea Mays
gttcgagtcactcattttcaaagtcgatgaagcataggaagagttataccacatgagaagagaagaagagcaagcccacaatcaacatcactatggcacaagcgaccttcacctcgaaggccacaattatgacctttgtctatgacatcacatctcctctggcagtcgaccttcaagctacactatggctagccttgtatagaccaccacaactccccatgtacgatggtctatcagacctgagacagttcatgatgagctacgaaacaactatatattcgtatggcagcaacatagcagcaatgatgaagtcttttgtcatggcagtgagaatgttgcacaaacctagtactcctccctttggccagggtcgataccactcataagcttacacggcttccaaacgaagctagtaactattcaagcattgttccagtgcatttaggaaccatatgagtatctttaggcctatgtccgatggttcctttgcctttgtgctcaagcgccaagtgtcctcgatggcattgtcgttgaagcaatggtcaagggcttttgctcaagtctagtatctcaatattttgcaaggaagccaccccattccctagtaaaaccgcttaaaaatatgaataaatacaccagagcagataatgattttcggtagagtcgaaaggaggcaaagatgtatacagaatcgtccataagatttaacataaacccaagacacgtttgacgcattattcataatttcagacaaaatgaagaggaacaacctaaatcataggaacaacatttccaaccttaggaatcagtacaaccttggagtgggtacctgcagaattcacaaggaaccttcgtcatcctccagcaccaagaggcggccagggaggccgtggctttggcggaagttttaaccaggatgtgcaacgacaacaaagatttgacagtcgtaggacaaaatagccagatgaaggaagtataccgtacaacatcctactaccatctgcatatcccacattgaattcaatacccaaaactgaagatggaacatttgacgtccaatgctccagttcat

SEQ ID NO: 65608 - DNA, 356 bp, Zea Mays
agaattttgaaatttatcttcatcagctgactcctaacaccattgttaggctcaacgtcttcatctgggccctccgaagccaagggatggaccaggatgccgaagccttctgccgcgtgcatgagttgcactactagacgaaggctagggcagatggtcttcatgaaaattttggttgctataactttgcgtatcgcaaggacacaaagtctcgttctcagttaccgcacaaaatggccaaccggctagaaaggtgaatggttttatattaaggctgattagaagaaaagggggaaactgatgacgatggtcatgtgcccgctgtccttaaacttcggaatgacaaggcccttgtg

SEQ ID NO: 65609 - DNA, 882 bp, Zea Mays
atgacatgaaaatatgatttatgcctcttaaatcagtgtcatgtcatcaaaatcgttagataaaactgctcaggggttatttgtctgtttttgtaaagtcgatgctgttaaacaatcgattttgaaggtgagggatgaagttagaggtgtaaatgttatggatattatccgtccttattcaaatttaacctgtcttaaaagggttgagatccgatctatatccgagtctaggtactcaatatccgatttttatctgtattcgtattctcaaagttgaatatttaagatgtcgatatccattcaaatcttatccgacacataatatccttatctgattcgaatccaaagagaaaatacgaaaacaaatatgagataagtaatatccatctttatcgatctaattacacccctattttaggtagaccacaccctctaaaccttaggagcttgtgtagactttttccttacaaggtcgtagccaatgattgatttggtgcgctgaaacaaatcctaggacagaattcaattcccagtggaatacgtacgttgaagataataaaaactgaaggactgtacttgcaactctgaataaataatagacaccaagataccaggatccagcggcgcatgcgaacatgcatccatgtgccacgactgtgcgctcatgaactcggagtacggcgctccgtactgcaccctagttactccgctgttggatgttgaacctctgtgtgctcccggcgcgttccagaatcttcaaccttatattgttggccagctgagaaaattacagaacgtgtagactgaaactattcaatgagaacttcagtgaacactaaatgctgcatctattgtatttagttctctctatgcatgaattgt

SEQ ID NO: 65610 - DNA, 1186 bp, Zea Mays
cttatctttagtgccaaaatcacatctcataaattatgttttagttatactgagtcttaaacctttggattctagagtctctcgctaactcttcttttctatttactcatatccaactttcaccaactagttagtacatcgtccacgaaaaacatataccaagggatatccccttatatgccccttgtgaccttatctatcaccaagacaaaaaaggtaaggactcaaaaaagacaaatacttgatctgctaatcttccttgaagcaaagttaccttcttcaaatatctttgatatggtacctctctgaccagatagagcctctcttaatttttctgatttggacacaaaagctgtgttgcctaatccagatcctgatctaaccatactacatgatgttttagactgtcaaagagaaaaaatacatataagaaaatataaacatcaaaatagcaaagggtacaacagaactgtacctcttcagcacaactatcagacacagactgtttgaaccttagaatttgatcttcaaggccttttctctggctcatttccagctgcaccttttcttgagtagacttcagttcatcatatattgattcctgcaacaattaccaaagaaacatgtaaccaagaattacagaaaatttaaagtaaataaacaaaccatttgtttataagattcacagtcagggtcggctagctaagactggtttgctttaccttctctgaaataagtccgctgatctttccttttaatgattgtatttcaattgtaaattcttcagtcgctttggttaattccttttccaattcacgggccatactttcctgcaactggaatatactttggtcacattctctgatgattaaggcaatacttcatattcagttgagggcatctgtgcagcattcaatcgtttggatataacttgaccttgcaaaataattcaatacaaccctcgcaaccacttataagatgaaatgctttgactcgctgaaacacacctatcaactgcagtatttattccaggtgcacataaaacaaattcatatgcaaccctagcaaccacttacaagatggaacgctttgactcactgaaacacacctatcaactgcagtatttattcccggtgcacataaaacaaattcatatgcaaccttggcaaccacttacaagatggaa

SEQ ID NO: 65611 - DNA, 547 bp, Zea Mays
ttctagatgtgttcccggaagatttaccaggtatgccgcctgagcggaaagttgagtttgccatagagcttcttcctggaaccgcccccatttctaaaagagcttacagggtatctggaccagagttggttgaactcaagaagcagatcgatgagctatcagagaaaggttacatcaggccaagcacctcgccttgggccgcccctgtcccgttcgtggagaagaaagatggcactaggaggatgtgcatcgattatcgagctctgaatgaggtcacaatcaagaacaagtaccccttgcccagaatagaagatctgttcgaccagctgagaggagctagcgtgttttcaaagatagatctgaggtcaggttaccaccagctcaggattcgacctttagacattccgaagacgacatttattaccaaatatgggctatatgagttcaccgttatgtcttttggcctaacaaatgcaccagccttcttcatgaatctgatgaacagtgtattcatggattatctcaacaagtttgtggtggtatttat

SEQ ID NO: 65612 - DNA, 340 bp, Zea Mays
gttttttggactcttaagcctatgcaatcatggaagagctctacctttgaagctcaatcgttgtattgtccttctaacgccctgtgcgcattttgaaggtacctgtaattaatgttgtgtatgcaataacatcttaaaaaagtttaataaaagagagaacatgatatgcaatatctcatttcttggttgatctcatcatgtatgattttagcatgtttatctcttcattgctttgcccttcttttgcccttttacctataatggcaagggagaagattctatcatcttaattgtgttgccctgttatggttccttactaaagctttaaccaacatgcact

SEQ ID NO: 65613 - DNA, 317 bp, Zea Mays
catgtcgatcgcaacaaaaatgaagaggcagacgcgttggccaaggcatcggccaagggcgagcccttgccctccgacgtgttctaccacatcatcggcacgccagctatccacaacctcgaaggtctgcaaataactcaggacaccaaaggccaccgcatcgtcaacctcatcaaggccgaagactggcgggccccaataacactatacctgcaaggccactaccatccaaccgatcgcaatgaggccaaacgactaaagcacaggagcagggacttcgcactagtcgagggtcaactgtacaagaaggggatcag

SEQ ID NO: 65614 - DNA, 396 bp, Zea Mays
tcgtgaatttacagcccagccaatagccctatctcgctccacaatctcccgctgcaactggtcaacctctactaacaactcagggatgcgacagctatcacgtgcacgctccctgcatccatggcgcagttgcatcattagtcgttcaactctggcctctaggtcccgtatgggatcattactaccactactgctcccctcatgtcgaggagccgacttctgctaaggtacacccagaggtccggtcgccttccactgggtagtctttgtgcgtgccatgtctctataagaggggaagattacttagtattgtttaaatatgatgcatgcatgacctatgattatggaatcagcctcttattgatcccatacctcctacgcataacctaatatttg

SEQ ID NO: 65615 - DNA, 509 bp, Zea Mays
gcggctggcgcccgccggctgctagtgccgttcggatcaggaacggaagcctcgctctctagaaggagcagattttagtaggtagaagtagagcagaagcttcctccgtcgcctctcgtcttgcgccacgtcgaggcttgtggctcgcgtggttgggctcatgacagggacgcgcgctcgtgaatgcattcaccagtgtttcaagtcacctcacaagcaaagcaaggggtgggtgattagtgattatagctttctgatatgactggtgcactcagtaggatgttaaaattcagaattgttgctagtattttccagttgattatttttggaatgaaaatttgatttatcctagaaccgaaggagtaagttccattacgtttcacctcaggcctggttcgtttatacctaaactatatggattatgaggtattagggtgaactgaggaggatttcgactagtagaggcactcaatttctatgaacttgggataaaacgaacatgatctcag

SEQ ID NO: 65616 - DNA, 588 bp, Zea Mays
ggcgtgcaaggctttggggcagacccagcttggtgattggaaggggaactacccaaacttgaacaccagcacttcttcactcactcgatgattacaagctagagctcgagagcagggattccctcactggaccgtgccctaaagcaatgaacaagaatttgttcagcacatggtggagataactctcaagttgccagcgctgcatggctgatacacatggcaaacaagcatcctcaccacaccagctcacaactcaacacaaatatctacccttgtccatttctgcagctaataagcacaataaataagtacttcactgcccaaaactcccaagccagtccaagccttgatatttttgcagtatagagagaccccagatcttcagggatgtatcccaactcgagcacatgggtggagtacagcagagagaggatcttgttcagtttctcaaaccaaactctgaagttgactgaaacagcactactgctccattcccctcccctttgttcagtccctgttatctcataattccccatggcaatagacccaaccttattaaccaaagttattctccaactataaatctaa

SEQ ID NO: 65617 - DNA, 476 bp, Zea Mays
cttagtcaatctatccacaatgacccaaatagaatcgtggtgccaggaggtattgggcaatcccacaatgaaatccatgcaaatgtcctcccatttccaagatggtatgggaaggggctgtaaagtgcctgccaccttcaaatgactggccttgactctctggcaagtgtcgcattcagatatatacttagcaatttcccgcttcattctggtccaccagtacaaggacctgagatcatgatacatcttattactgccagggtgcatggagaattttgaaaggtgaacttcatccaatatcttctttctgagctcgaggttcttgggaacaaccaatcggtctccaaaccatagaatccctttgctgtcctgacggaagcatttgtatttgtccaccttttgtttgatcatttccttaatgacttgaacacccttgtcaccaatctgtgccataactatttgctcatgtaaggtgg

SEQ ID NO: 65618 - DNA, 598 bp, Zea Mays
tccattcactcaacgttggaaataccctgttggccaggtattcttgcactagatctctagtgctaatctgttcagccaccaccctgaattctgttacagcttgttggcatggtgaccccgacgtcatgcggcataggggcctagtcagtccgaagcttaaactcagtgggctcatgaccatcgtcttcagcttctccctcttcttctcatcggccttgatatagaaccactcacttttccaaccggttggccacttggtgcgatagctgagcaccggagccttcgtatccttgcgatacacgaagttataacagccaaaattttcatgtagcccatcttctttggccttcgtttggtaatgtagctcatgcactcggcagaaagcttcagcatttgggtccattccttggcttcgaagggcccaaatgaagatgctgagcctaacgatagcgttaggggtcagctgatgaagagagatttcataattatccaaaacttctccaatcatctcgtgaagcggaaatcgcaatccagctttgaaaaagcttttgaaaactactactttgtcatttttcgtctttggagtggtctcctctcc

SEQ ID NO: 65619 - DNA, 1084 bp, Zea Mays
cttcgtttctcagttcaatcacctcagaccgaaggttgttaaaagccattgtacagctttcatcttcggcgctcttctgtgccctcaaggcattactaagaattaggccctgcaaagaagaaaattttttagtatgacattaacatatcttatttttcaacttcaaagctaacttttatacctttatactgttgtacacgagactatcagcgagatcatcctttgacataaccgaaaggccatcttccagcttcggaaatcccatacttttagctatctcccggcaaacggatatttctttgttgtccgggaggcagtataggaagtcatcttcgttactgccattgaacactaaggcccccttcggatattttagtctttgggcatagtgtctggcttctactatttcttcttcggataaattcttccccgaaacatgtcaaatgatgtagtcaacatctttgaccagagcttcgggagcaggagttttgggtttctctgatacaatttgccctgctgttttggcctcaggagcggcaggcttcgttttggtgggcactgaaggcccagcttcggcctgaacttttgcagcttcgacggttttcttaggaacaggtgttaaggccttcgtggtctctataacagcgtctagtacgctggccatcctcctcctcttgggagttgcagccggagttttttgcaccttcggcaaatctgcctctactggtgggctcaggatttttggcacttttatcaatttcaccacctgtggctcttcagccttatcatctttagcttcggttagcccgactgtaggcactccggcactacagttggctcttcagcgctctgcacaatggaagcagtttgtcttgcttcggcagctaaagagggccctttgccaagttcaggcaccatggccggttcaatgtatcgcggcgggtgggtcaagacccttaactttttgcccttcggcatagcagtagtggccaaagcgatagatttcctcttcttcccttgcctttgcagcggatagtgatagtcagggtatacgaagccaatggcatcaaatactctatttaat

SEQ ID NO: 65620 - DNA, 900 bp, Zea Mays
aatcagtgcaacaatatgtccaatcttgtgagatttgtcagcaagctaaaacagaacatgtgaaatacccgggattattacagccactgcccattcctcaacaagcttgggagatagtgagtttggattttattgaaggcttgccatcctcagaaaattataatactatccttgtggttgtggataagtttaccaaatatggacacttcttagccttatctcatccattcacagcattgaaggtagctcaactatttttctcgcaaatttacaagttgcatgggctgcctcgcatgattatctcggatagggacaggatcttcacgagtacgctctggcaggaactgtttcgactgtcagatacagtgctaatgatgagctcgagttatcatccacagacagatggacaaactgagagattaaatcagtgtttagagggtttcctaaggtgcacagtgcattcgtgtcctcgacgatggcataagtggcttcccgtggcagaatactggtataatactaccatacactcttccttgggtcgttcgccttttgaagttctgtatgggtatgttcctcgcacattaggaattgctaatctaaagctctgtactgttcctgatctggaaacatggatgcaagaaagagaattgttgtctgaattggttaagcagcagttagcacgtgctcaacaacgaatgaagagccaggcagataaaaatcggtctgagcggagttttgaagttggtgatcgagtatatttgaagcttcaaccacatgttcaatcatcggtagctctgcgatctaaccagaaacttgcattcagatattatggaccctacactgttcttcagaaagtaggacaggtcgcttacaagttggaccttccagacagctcaaaaa

SEQ ID NO: 65621 - DNA, 663 bp, Zea Mays
catgaacatgctttctcttccttttatacaagatatgcaaggaatgtagaaagatttaggtacatgtatgaataagattgaatagttttacccttttgtacctttacacagtgatgctctcttcattgtgctttgtccttggtcttattgaattcgcctaagacttatgctcaagacaatgtatgaaaatattttgcacaagagagagttctacaactagtgatccttttctaagtcattgttttagatatcaagtagatcacaaattgcataaacatatcatgaattctccttttaacttagtgcatatcaagatagatgtcgattgaaattaccaattgaagtcaaattgaaattacatgaggcactaagaagcataagtgataattgaagttattcaatgaccaaacaacatatgcgatcaagagaacaacataggcattagatttttaatcaagctcaaaaataggagaatccaataaatatgctactttaacattgaaagctacaatccttgataaaggtgacattattttaccaagttggattgaaatgcagtagcatgccttatgagaaacttgttctcatacatgagactatatgagattactaagataacatgctagtctcaatataatcaagatatagaaatgagctccccct

SEQ ID NO: 65622 - DNA, 555 bp, Zea Mays
gtgcattgagtaaagatgatagtaatttgagaaattttgaatttaacccaaagaaataatttaggaaagtagaaataatatatagaagagaaagaagaaatactatggagcacaaaataaatccataactaaataaattcatcccactgatatgtccaaactgaatatttaaattaagtacaaattcttttgcgaaatttgaattcaaattttagatttgaaaatgaaaataaaacaaaaaaataataaaaagaaaagaagctagacccggaatgggccaaaacctacctggcccatctatcccaggcgccggaccagcccagttggagagagtagtgccgacctatggagctcagtggtcaggtcatccccaaccttcattctgttctaatagaagcgcgaggaatcgggtggaaatcccctgctgatccgatgtgcacggtcttcttccctggtggatcgcgtccgcaacggctgagtagaaattgcgggtcttcgtgctggcttctcgggatccctggtgcttctctctttccccctccgttggaattccct

SEQ ID NO: 65623 - DNA, 294 bp, Zea Mays
cgaagactcggtctccattgatgagatccttcgaagtgggctcgtccacgttgggaacggctgacggaactgttcgcggggacccatgttttatttcttgtggggtcatggcctctgatccatatagaaggcggaaaggggtgaacccggtcgccctgcactcagtcgtgtttagcgcccagaccgcctcaggtagcaaatcggcccacttgcccttttttcgtcgaggagcatctttttgatagctgggaaaaattttccattggcgcgttccacaactccgttggactgcgg

SEQ ID NO: 65624 - DNA, 385 bp, Zea Mays
gagcgaaaaagatattcatgactctcgagaagcagtgaagaaagctgaaaaagctgccgaactcgagagatggatatgtatcgtttaatggcttttagcttcattgtttgttttcgtgaattcaaactgattgattttttctatcttagctgaattacctcctccaccggagccattcgaccctctggctgatccggggataaagaaagcaatataaattatcaacatagccaaatctatcgttgacgaagtcgtcaacaaattgcttaacgaagctgcggagaaagttctaaaggaagaacagtagttgctgtaaaaatgttcttaagtgattaatgtaacatttgttaaaataagcctgtaatatttgatgtgtatagttttg

SEQ ID NO: 65625 - DNA, 545 bp, Zea Mays
tatatgatgatactgacgttctaaggactaaaaccagcaagctacggatggtgtcaaatgcatagtagcgattttcacccatgcctcaggttcaacagaatacatgtcgaaataagtttcacagcgtttaatccaaaggcgcggattatcgccatcaaacatgtgaaaaggcaactgaggcattctgcttgccgcacgcggaccagcttccagaaaacgctgacgagctaagcactcatcgtataaggaaccatggaaacacggtggggaggaaagggaaggtcctgtacccttgaccgggccagggaggaggatcggttccgatccaaaaccctgatcccggtggaagtgatcgtcgcggtggccgaacgggccgattggtttgttgaagcccgaattgctctcgcaaaatccggcttagacaggatcccgggttgcagcggcgcctgctcgaggacggatcggtcgacttgtttgccgagcttgcgcaattccagcttcaaatcgtccatggcggcgtcgaccttgggccgccactggtcgaa

SEQ ID NO: 65626 - DNA, 537 bp, Zea Mays
ggttgccgcgctggcggcctgatccttatcaggtcactgtaccatggccagtttcattcagatgaacctgacagtgtaacattaggtcctattttctccagattttctatggtaccaagcccaaacatctatagcaaagttgttctactataaaggatctacaactttgttatattaacttggggcaaattccttgaagttcctgatctgtagagctccaaagatgtctcagtaccactgttaatctgaacttcagactccaatagcctgacagtctgactttgggtgtgattatctccaaaatcttcataacaactgtgcttacactcttaagcaaagttatgctcctataattgggctacaattttgatgtggtgacctagggcaaaaactctatagtttgaaagttacaaggctccaaagttgagccaatatcactgaaatcagacttagacatttgagaaagagtggctcttttgcacataagtccaaatctcagggtttgacttgcaaactcacatatttgtgacctaaatg

SEQ ID NO: 65627 - DNA, 580 bp, Zea Mays
gttggatcaacagtgaacgacccgaatttaatgagtcaaagatccactctgcgccactggatcacgatctaacgttccaggacagtttccccaatcggtacgccagctcctaatctcagccgttgaaccagatatcagcggcatatgcttctcccccaagctacagtcgaccggtacctagtcgtctactaccttccgtcagcgcactgagtggcgcacatgtcaccgcaacggagtaagccccgtcggcgttggctacgacgtcctatgcgccacatggttctaacgaacacgaccgaggaccgaacgccatgacgccgctagccaacccgtatggatctgcccgctcaaacccccctgcgcccgaacaaggtgacatggtgactctgcccgccaccggcaagcaataaagctcccaaccatacctaatcacgcgtcctaacaggtcctagagaaggcagagacaagagtggacatgatgaaggttacctcaacagcggaggaagcagcgacgctgatggtctaggactcggtcgaatcggtcgcgagtcttaatttcgagagcgaaacctgaacctcg

SEQ ID NO: 65628 - DNA, 682 bp, Zea Mays
gtccggtcttttacaaaacagtacggtctttaagaccgaacatccaccacagcgtaaaggcagtattacgaatgatccggcccccgagaccagagagtccaccatcacacaaagatcatctgattcctctgtgggggacatgatagaggaattcagagatctcgataaactaggacaggggtttacatcggccgatcctttggaggagatcgacataggagatggtaaaactccaaggccgacttttgtaaacaagaccctagagaccaatcctagaaataaaatgattggtctattgaaggaatattcagattgctttgcttggaattacactgagatgccgggattaagccgagagatcgtagagcatcggctgcctattaagtccggtttcagacctttcaagtagaaagctagaacatttcgtccagaccttctcccacgaatcaaggacgaaatccactggctgctagaagctgattttattagaccttgcagataagtagagtgggtcttcaatattgtgccggtggagaaggagtcaggtaagcttagaatatgcattgattttcacaatttaaatagaacaactcctaaagatgagtatcccatgcccatagccgacacattaattaatactgcatcagtgaatagaagtattagctttcttgatggtaatgcc

SEQ ID NO: 65629 - DNA, 545 bp, Zea Mays
tggagggcggtggtttagggtttcggggaaatggctgtttgaggtgtgaaaaccctcccgaaggagctaagaacctgcaggaatgctcaagacacgcagagacacacatagcacaacttggattcacaggaatttacagagatttgaattttgcgcaaagggaggaaaaaggggaagcttcactgggtgaatgtgcagagagaagagagaggagaagacaagagtacacaccagggaagcacgagcacggggattgatggaggatcgccggagcacggccggagaacagatcgccggagaggaggaggtggttgccggtgagggggagcaattcccagagaacagagagcacagaggtgaaaagagcctctggctcggtctcgggctggaggccgttttttaaaacgcgatatgggcgcaccggacagtctacagtgcctgtccggtgcacaccggacagcgcatagcagctgtccggtgaaccaccggacagcgcacaggagaaaggtattttagcgcgcggctgccggtgcaccggacattgc

SEQ ID NO: 65630 - DNA, 980 bp, Zea Mays
tagatctaattttgttgggattggtttcgataccttttcatgacacttggtaccccaggactttgcctttgtgaacgtcaaaaacacatttgtctagatttaaatgaagtatggcctcccttatattggtgaatgttttgacgacgtctgcaaggtgatcgatattgtttttgcttatgacgactatgtcttcgacatcagtgaatatgttgcgactgacttgatcctttaatatagaatgagttagtcgagagaaggtggaccctgcattctttaggccttcttcttccttaggtgggggagaggtagatgttttggggggttgttgaggtggtggtgggagttatagcctttcttggtggatggggagaggttggtagttttgttgatattgctggtagggggatcatctctaggtaaaggtgtgtgtagtgtggctagaaggtgtgggttattgtttgctgcctgcctggggtgcgctcttgctggcctttcgccctccattatttctttggcctctttgatagtgtggcagtcttcggttgagtgtccgacgtcttcgtcattaaagacacattatatcttacggttgcacatggggacgcatcccttgccactaggacctttgtcgcctctggctggttactgattttgatcatagagacgaggggggtctttgagctatttctactagttgatggtgtgggttcgttgctgctaatttgggggtggaggcttctgatttctggtcatgatttgatgtttgctatatgtgagggcttgcatatttttcaaagatttgatacaacacttggagggacgttagtgggtcatgggtgcaatgattgtataggtggcccatgcgtaggccactaatggcataatggatagcggttccgtcttcgatcgacgacagttgagacttgagtgatagaaatttgttgtagtagtcacgaaggctctcctttccagctgccgac

SEQ ID NO: 65631 - DNA, 530 bp, Zea Mays
ctcatctttgcaatcatctctaaaaagatagcaataatagcaataagcactatccttcaccaaactatattccaaccaattgtgttgcttaaaccaatgttcctgaaatgaccttttatcatgtgctttgggaaaattatgaccaatgggttgtgttggacctttttttatgaatgccctcctatcttcacttctaatattaggagcaaattggtcaattggaatgcgaataccgggatcagagataatatgatccatatgaaactcattgactgtactacctgttcctctgacatcttgttcatattggacctcttcattgtcctctaattgagatccaatagctcccttcactattggtggattgtccacctcttggccaactccactcacatgagtacttgggtttgtactactagaagcccgactaaaatagctcttcaaatctacaaattcgcgacttcgtcctctttccctttgatttggcatcattatcatctgcaagtttgtgacaaacatcaacattcaaa

SEQ ID NO: 65632 - DNA, 879 bp, Zea Mays
atttagttgacgccaccaccgctagatagtgctctgctccacaccaccaccccgccatcggtcatgggcccatccccgtgtcattgtcccgccccactatgactgtacaatgagactatatggttcgacacatgatggactagtcacattagactacaccagggacctattagaccacgtgatagctcaaactacccaagttagaccatgactacctagatctcaaggagcctaagatcctatgtaagtattcatccacacccaaatagcccaccaagcgcctccttcaaaaccttttcaaattgttttcataccatttgaaaagtcgctaactctaagtgcattcccatcaaaataccaatacctttcatcttattttagcattttcaaatcgatttgcaaaggtttttcaaacacattttgaaaccaccggtcgatcctatcatgcaggcaaagtaagatttctcaagtgacattaaataaaattatgtaaacaagtttgcccttctgatagcatgactatctatcctcttgatcaagcatttctctactcaaccttacactggtaaaataaaataccatacaaatatacctttgccttacataatatatttccatcttcataatcataaaattatgaacaatagttatccataagtgtagccaaccccactactttgacattatccatatcacgaagcccctctatctttactccatcaagacacttaatatcgatacaagtattcacttggcttaatatttgtggaatgatatggttaacttcataccttcgcgtggccttcatggtccattgatcatagccttgcatgctcttcatcattatcttggtccatcaacgctaagccctctactcac

SEQ ID NO: 65633 - DNA, 612 bp, Zea Mays
gtcatttaaggtcccaaaaggcatagaggatgcagtaaggaagtcgatgctctctgctatggccagttgttttgtgggtggaagaccgagatgaatagggattttgttaagaagaatagggttcctccgcccaagaaaatgggtaaaatcactcaagctcagtgggaggaatttgttcgtcagaagaccgaactgaaggccaaagaactgggcgaaactaattcttagagagcgaagatgaacaaacaccccccatcgcctagggtcagccggatatcaccctaaagttgtgtagtggaacagggtaatagaggaagctatagctaacggcactttggacccaatattaaaagatatcgatgagctagctattcgttggatcttaggttgggcaggtttgactgaggacgacaaacttttgcatccagaattggtaggcgaagtttcgacaaaaattcaagaatatgcagaaaagagaaagaagggcgaatttaagcctcggagggagaatgacatactaaccgcagcactagacaatcctgaacacactggacgggctcggggaatctcttctaagatttcctagagagaggcctttccagagtatgcatc

SEQ ID NO: 65634 - DNA, 357 bp, Zea Mays
agtgtcctcagtgccgcctttcttgagcaaggactgctcttcagctcccgcctccaccttggcatccttacgggccagcgaggttctcaacttattcatccctcatcgcctgcgaagacagcacaacaatgcgtcagacagtgaacatataaaacaccctcgctaagggcacaaacatacctatacaagtgctcggtcgaccctctcccggacgatgtcgcggcagtgaggaccccacatcctatcgtaaagcgccctagccgagcactttagcacatcgtcttcaacctagaatacaccagcatcgaagtcctcgttgctctaatcgaaggcctcaaagtgcatatagcactagcg

SEQ ID NO: 65635 - DNA, 678 bp, Zea Mays
gcgggaatcaaggacgacgacttggtcatccagttccttcatgtccatcttgcagaaggggcaagggcttggctcgagcacctgcatgccgataccatacataatttggccgacctccgaagagcactcgttgggaacttccaaggcacctacaagcgccctagaagctcttgggacctcaagaggtgcgcgcataagagtggagatagcgttcgagactacatccggagattctcacagaaaagaaatgaactcacggatgccaccgacgttgatgtggtgagtgccttcacctacggcaccaccaatgaggccctggtccacgagcttggatgggggtaaccaaagatgaccgctgacctcttcgacattgcagtcaagttcgctgacagggaggacacggtgggggtgattttcctcaagggaaaaagctagtacaacgccgatgagcccagtggggagagaagggaccgacaggagcaccccgatagacatcggagaaattaccgccccacacgcattgaggaaggagaagtcgctgccgtggatcgaccacccaggctgccgacaaagaacaacaacaaccacttccagaagttgatggactcgttgtgccaaaatcacggctttcccgtcttccacaaactccgagagtgcaaactcctaaagcgcttcatc

SEQ ID NO: 65636 - DNA, 363 bp, Zea Mays
taaacattgatagtagcaacatctatagtttatcgtgctttccaaaaggagggaaagttaaagttcagaaatgaacagtggacataaaatgtgatatagcacaaaattacagacaactaagtaatatcacagtagaccctgtgtcatcccacaaggacagaaaacattacctttattccagctacaagacatcttcccttgattgatgattcttctttagctccaggaggcccaaagttagcatcatacttttggtcttcaaaactttgtatttgcaacaagttaagaacattgtctcgaagtttttcccaaatcatgtttgcacagcttgggtagttgtgaaccgctgatctcagcacctga

SEQ ID NO: 65637 - DNA, 861 bp, Zea Mays
ccgcatcaggagtcggcggcgatggaaccaccagtgcggcgtccccgtgcttccttttcttacgctgcttttcctcctaccacacgggctcctccattaatggagatgccggtggcgccacctgattcttcctctcgcgctccttaaccagcctcactgccaccgctgccatcaccgccgaggctagggtttcgggagcgactggtaccggcgactcggacttagattccgggtttcccagaggtcgggggtgggcagccgagaggataaggtaggaggggaattttggtcatcttgggcgggagatgggaaagtgaatgcagccaacagaaaggggtacggttcgttttttggaaaaaacataaagtgacgccgccaaatcatcacataaagccacatctaagcgtcataaaagtaaaaccgtctaccaactcctggcgcctgacaatatatgacgaatcttcgtacccttatgtgacaacaaaaacactaccgtcataaaatcttcatggcctcatgaaattatgacgactcaaaaaattccatcatattatgtgacattatatgacgatagctgaccttgtcattaggtattttgtcataaaaggacaaatttcttgtagtggatcgacatcacctaaaccattcattggcgactgagagtgcggtgatcactcagagagcttttgggtgacccaactcaagatcgtacatggttgtgagcggttcgctgtgtcggagcaacaaaaaatcagcttgtagtgagcacttgaacattgcacataccagggggtgacacccttctgcgggtgctccaatgaggattagtggagagtgttgagtctctgagaccttggcaaa

SEQ ID NO: 65638 - DNA, 632 bp, Zea Mays
gcaaacttgttatggagaatttggagataattacactcaaagttgggctatcaggctattggagtctgaagttcagattaacagtggtacttggacatctttggagctctacagatcaagaacttcaaggaatttgccctaggttaatataaaaaagttgtagaacctttatagtagaacaactttgctatagatgtttgggcttggtaccataggaaatctggagaaaatgggacccaaagttgctctgtcatgttatctcaatgactcgccatggtacagtgatctgataaggatcagagcgccagcgcagagacctcaccgccgacgatccctccaccgcgattcgtgccattgctgtcctgattcgtgtccggagttgatggataacatcgcggggtagaaaaatcttcgccgccgttgagctgggtgccactccggctaaccgccgtgactcccctcttgctcaccacccctcggataagattctcaccgccgtggaaccatcaccatcgtccgccacatgtccagacgctttaccacatcgcggctaaccgagcttagcatgaccgttgatcgccggagtaactgccacggcgtaggacaccaagccactgcgccagtgctttttc

SEQ ID NO: 65639 - DNA, 729 bp, Zea Mays
aacccggacctgaaagcttttcccaccagagtctgtgatgctgcatgtacgccacattgcccggcatgaatctcatctaacagctgcttcccagtagccgagtgaatgcacttcatgaggacccctcctgcacctcttctatacagcaggccgcctataatggtatagtggaccgactgtctcgcgatgcgctccgttgtagccttgttatctggttcttccacgtttcttatatatctgatgattggctctctccagtcattgggatctgcctctgcctgactcagaacgtggcattcctccatctgatctatggcgacactcggttgctgtatttcttggacgaaaaccccaggtggaacttgggcccgactagatcccaactttgatagtgcgtcagccgctgcattgcgatccctttccacatggtggaattctaatccttcgaatttgtccaccagcttccgcaccgctgcgcaatatttgttcattgaatcggtcgagcaatcctagtctttgtttacttggcttatgaccaccagtgagtcaccgtacaccattaatctcttgatgccgagtgaaatagtgatgcttagtccgtggactagtgcttcgtactctgcaacgttattggatgctggaaacaagagctggagtgcatacttgagttgttcacctccgtgagcgataaagagaatccctgcccctgctccttgcagtctcatcgag

SEQ ID NO: 65640 - DNA, 493 bp, Zea Mays
caatttgtttttgacacccttctagtgtttaccgtgctaaaataaggttacacactttttcagggcttaatccgtcttctctcaacatgtgcaagtggatccctgctggcagttaaaacactactacttcttgggatcagcggtactcttaaagatttcctttctggccctgctttgatttctggaacattagtcccccgtgctgtaacaaggcctgccgatcaggtgaatatttctatcactgacgtaggacttttctgccagtgctgtttccaaactagccctaaataaacaattcagccatgatttctctctgtggttcgatccagtaacattctgatttatcggtgaaaaagtaggctttaacatctcacgctttcatctaccacacatattcataattatatgtaccatcgagtaattgtttgtgtgattttcttgagcattgaacatagatgctaatgctgggaattgtgcttgccttgttaaacca

SEQ ID NO: 65641 - DNA, 508 bp, Zea Mays
ggtttgccttctaaaaccgggtgtgacatgtgcggtcatctcggggttccgtggttggtggaaatgtccgctcggacttcccggatgatgattttcgctggccgcattcgtgaactagaggctatcatgttccggctcggcgtccacaatgccttggtcactgctcggcctctcggtgaggactcgatcgagcaggaatgagtatgcctcggatgtgacggcagtccatgacacggcgagctcgaacacctaggagcgttggcaggactcgacgcacggcgccaggcctgcggtcacccatttttcttgtttcctaaagagaaggagtatattattaatttatttcagaggatttgtaaaatctgagatacactaataaatgtcatcaaggtctttgcgcttctttttttgctttgtcttcgctaccggtcgtcctgccgagatgggttttcgcaagttttcaagtcccccggttccattggtgactgttgtcgcagccttcaaggag

SEQ ID NO: 65642 - DNA, 702 bp, Zea Mays
ccttacctgaaaatttgaagccgacgatagtaaagtgcagatgtgggaggtgccattgctctgcgtttacaaaagaacagctaatttttaggaacctcatcataattagtaagccttaacatatgtatcgcacacgtcactacgaaattttcttgaaaaattatggtcataacatagtaacacatagcatgcagaggtgagatggcccagttttggatttagatcagattggcgccaatcattgggatttgccaggaatatctccgcaaaggacccaaggcgatggaaaatgccaggttgataatgccccgacagtcactgaaacattcttctaaccttagccctaacaaacagaacaagctagctagccactgtacgggaatcaggacaccttgaggcttcagataccgggttgacgacgacccgctacccaatccttggcacggttagtggaagaaaacagggacgtcacatgcaaaagaaacaaaacagcccgtcgtgtacgcacagaggggcatcgcattgggatcgtaaaggaaggaacaaaaggaatcaatgatgggagagcgcaacaaggacgggggcctgcaaaaaatatttccgggcagcagagcagtggccaaaggccaaggggggatcccaatagcgaccttgcacagccacacctcactcctatggcatcatgcagctgaccgcacactg

SEQ ID NO: 65643 - DNA, 387 bp, Zea Mays
ccttgcactgcatccatccatccatccatccttgggtctgtgcaagcctgtaaaattaaagcgccctgcctaccaagtagaaggtgtttttcatcgattaactatggttgttaatgctttggaatcaatcaagggcacgcttgttagttagtagccttttgcattggttagctagtgttagaggtgtagtgctagctaggattgtgcatatatatgctaactttgcattacttaaccagttaagctttgctttgccatctctctctgtgtgtcacacacacacactctctagctattgctggttgttgcctgcaaagtgcagagattaaaatatgctaccgagcgcacgcctccatgtgggagccaaaaaacatagctgatgctgat

SEQ ID NO: 65644 - DNA, 287 bp, Zea Mays
tgatgaggttcgacgcttgaaagataggttctatgggttggaactcaaccatgttgctcgatggtacaacgagactgcaaatgagctggctaagatagcctcaggacggacaacggttcccccgaatgtcttctccagagacgtatatcaaccatccgtaaaactcaacgatgcacccgaacccgaagggacctcggcccagctcgaggtaccttcgactgccgagggagaggccctgcacgtcgaggtagagtggattggggtcacaccagtcctaaactggcaga

SEQ ID NO: 65645 - DNA, 1285 bp, Zea Mays
agagacatataagaacactcttcctcttgctcctcttgttcaatctgatccaactattcctctgtcaatgtcatcccgagttcctcctttgttagtgagttcagttgcaactgcaccctcttcgaacacttcagttgatggcccagctcaaatttgtcaccacaactaaagcacagaccgttctgacgtcgatattccttcaccaaacgttctttagaaagctcagccataccggtacctcccctgacctccgttcttgatccagttgccacaaacttgctaggactggcccccttcaatgacttttgtcgttgcttatccataattctttgctgcaacctagcaaggaacacaacccttcccactgatgacggcacatgagactgcaccggagcttgtaatttgtgctttaaacctttaataaactaagccacataaaatgtctcatcaagagtatgattgtgcactgctgtcgcatagcgcgcatcctaaaatgttttcacatattcttccactgatactgcttgatacagatgcaacaacgcacacatggcttggggatattcttcctcaccaaatctctgtatcaccgcccaaggccccaacccatgctgtattttgaaaatctggaaccatttagatgcattcccttccatactcagagaagctatgataatccagatctgctcaggcacccgatacaaagtaaaataatctaaacacttgtctaaccagatccgtggctcctccatcaaacctaggaaacggttgacgaggcactgcagttgttggtaactccatctcctcgacacacctgttcccaaactcccgattacgaaacaaatttgcatcgtcatacctttgctgcggttctggtggcacaggtcgcggtactcctccccgaaacctgttttcccccaacaaatcagcagactcgagatcgtgggccatctgctccaaccgcaattccgcaaccaccttctccgtcctctccatctgctgcgcgatcaggatgtgctcctctgctgcttgctgtgccacagtcacagccagccccacctgagctaacaactaattttgcacttcctctactcccatcaccttctccgccagtcgatccatcttcgccatcatcttctcccagcgatctgcttcctcctccttcgttgccatcacgtccagtacaaaccgagtttgtactgatggcttgggattcggcaccattgtggatgaaccctagaaccgcggcttcctcttcgtcaaacccacgccgaggaggcgtggc

SEQ ID NO: 65646 - DNA, 498 bp, Zea Mays
cggagattgacgttggcacctctgaaaaacgggttggccggaaaacctactcatcacgttcacacgcacaaaaaaaaaagaaagaaaagaagcgaacgatattcacgatcatcaacggatagtcaacttacaccagcgtcatccacagctaccatcaggcaccccgcccttgtctttgtctttctgaaggcacgccgcccttctcaccaaatctctccagtccagctccagcacacggagattgacggaaactctgccatttgctaacgtatcacgttttggcatgcgttttccacgagacagggggagaccttctcaatctcagctagccaaccaccacgcaaacggttatttgatgggctgactccacatatatggacgtgctaccagagaactgaaaaaacaaacacaggcagttagtgatttgatgggcaaccgactccatcagaactcagaagcaatataatccacaatcccgcatccatgtccaggctccac

SEQ ID NO: 65647 - DNA, 644 bp, Zea Mays
cggcggtcttcctctttttctcttgcccttttatcggataatggtaatcagggtatacgaagccaatagcatcaaataccctgtttaatcttttcttgccccgacttccaaaggctgcggacagatcattatcttcggccttggagtatgctccaagtagctcgtcactagtagcttcgatgcacttcagccagtcatcgtttggctcatcaaacttttccctgaatctgaaggtatacttcagtcggaccagtccaccctcactagaatcagcggtggtctccttcggcatgtcctagctttccacaagtggccataccatgaaggatatatgctcttgaatcagatcccttgtgccaatgaaggcacacatagtgctaaaagctctctgacatgcttcgacattgctatcaatttccaccttcggccttcggagactgaagcgagaccaaatggggtgctggatgatttatttgatgtcttcccttgcttttaaatcatttttaacataaaaccactcccccatccaggacccaggctatcttttctggaatgttggtaccgggtggctagcattggggcgagcaataaatccataacaaccaaagttgttgtggtactattctttaccagtggccttcgtc

SEQ ID NO: 65648 - DNA, 1118 bp, Zea Mays
aacagtagctccttgctagattatttcatttttcataatgagctcagattgcaaaatgaataagggtgagccgaatgtcctaaaacatcttcccggagctcgttaaaaaaacttcaaagttcctgcctagcggggaccattgtatagtgaatgaggacgggcgggttctcggttaccattccctcttttttttcttttaaagaaactaaacccgcatggttgtgcacaacatttactgctattgcatcctactgttagttttttctttgctttgaagcttgcttcgaactagcgcccttttgttcggagctttttgtgcatgtttgagagcttcgttgtctcctagagatggcaagagagaaggtggcctctaaactcgccttggtgttggcctctaatgttctagcatggaagagtaggctttggctgccgagagcggacttttgactgaggtagccgggccaactgtcgaagacattctaatcgatccaattaaggggtcataagatgacagtgaggatttggatatcgaggaggacaacaatgatatctggcccacaaagacaagccatgtgaactttagaaagtcaacaattaagggtgggtacattcaggtactaacgaatactcatcatatcagtaatgctgatttagttcgacttggaggcgaggacaccaccaatgccaaaggaaaacaatgtggttgttttccgtagctttttgaaggctaggcttcggtttccactgcataagatggtggtaggaatgttgaaaggtttaatatatatttgcaccagcttactcctaacacgatcatgaggcttggggttttttatttaggatgtacaaagccatggtatagagtcgaatgcagaatacatcagccagatccatgatttacactatcaaacaaaggtagttggggttgatcgatttcataacaacttcgggtgttataactttgcttatcaaaaggaagtgcagttctcggcccttgtgtatcatagcagatgactgaatgcttggatgaagtaatggttccatataaagaattatttggaaaagagagaagatattaggggaataagtcaaaagcctatccgaccaagctttgggtt

SEQ ID NO: 65649 - DNA, 578 bp, Zea Mays
gctcaacgtcatcagccacgctgcgctccagcagatgtagatcccagggtcccgaccgggaccctctcgcccattctctggagtgggccctcaactggtgtatccccttgggagcatcgcactcccgattacattcgggaccgaggagaacttccacactgagaacgtccagttcgatgttgcggaggttaacctccatttcaatgccatcattggcaggccgaccctgtaccggttcatggccatagcccattacaggtacttggtcctgaagatttcgtcccctgctggggtcttcaccatgtggggcaaccaccccactgcgcttgcagctgtcgagaagttgcacgccctggcggcagaagccactcgcccggatgacgcggggagggacccctcgacttcctgtaccaagacgcctgccaaggtgcctaaggtgcaaccatctagagcaaaaggcgtccccgtcaagaccatccggctcagtgcggattcttcctagaccactcgcatcgcgggtgatctggaggagaaataggaaatcacgctcatcgccttcctctaggcaaatgccgacg

SEQ ID NO: 65650 - DNA, 396 bp, Zea Mays
aagggtgcagccggactagcaccacaagtgcgaaaaatcgtagtctaccgcggagactatccgtgcagaagtcgcctacgggtgcagccggactagcacaacaagtgcgcaaaatcgtagtctaccgcggagactatccgtgcagaagtcgcctacgggcgcagccgggctagcgcaacaagtacgaaaaatcgaagtcctccgcgaagaccatccgtgcaatagttgcccaaaggcgcagccggatgaagcgtaacaaaagcaaaaacgaccataccaaactgtccgcgcaaagaccgactacatgtgcaccagtccagcataacaaatacacctgaccaagtacgtaacgcctttgcgagcatagccgaatgagcgagggcacacaacttcatc

SEQ ID NO: 65651 - DNA, 361 bp, Zea Mays
ccagtgacagcatatagtactgcattacatattacacctcacctaaccttccacatacgcctgatgcagcagtcatgccgttgcgctctgaagaagcaccaaaagtgatggcacagcacagacaaggctagcacataaaagctaaagctctctgatgcaatgcaagaaaccaaaggggagatgagaaaagacgagcgctttggacctttggtggggctgaggtgaattaatgcctttgttctcatgggctggatgggctataggctggcacggtcctactcgaatccatcacaccgcgcaaccgattgtgcacccagtaaagtgaagatatgactgtcccaaccacacaaacaacgttaat

SEQ ID NO: 65652 - DNA, 312 bp, Zea Mays
aaaatggcatcatagcatggaagaggaataagcttgaatgtagacttgaaggagagcccttgaacttcccagtcggtatctggcagttcactggagcattgtaacttgttgccattagctactgtgatggacagtggctgcgccagagactaaaccccaggaatagcatcaacgacattagcattcaagaaaaaatgcgaacttccagaatccagtagcatcaatagtttccgaccatggatagtacccaaaaacctgaaggtggactgagctgacttaggagacaccgcttcagtggataagaggatcata

SEQ ID NO: 65653 - DNA, 298 bp, Zea Mays
tttacatataaccccctagggtttcaatccaaggttttccaggggtttgtttagggtttttagtacttctagggtttgggtgccacttaagtccattaatcgggatatcttaagattatttctcatgagttttgaagttttctctcatttgggctttattgacacccaaagctcagtttagggttaagtaccctaccctagggtttcacccatgaccagtcacatcaatacaacttgtttgaaatttttgcctagtgaatgcactctaagtataacaatcacatgatatgctaatgct

SEQ ID NO: 65654 - DNA, 518 bp, Zea Mays
agaaagtgcaggactcctctgtattgggatcaaactggagaaagacagttctttggaccagagcttattcaagaggcagaagaacaagtgcgaatgataagagaaaatttgagaattgcacaatccaggcaaaagagctatgctgataataggaggagactactggagtttaaggagggtgatcacgtgtatctgaaggtgtcaccacttcggggtatgaggagatttaaagttaaaggaaagttgtcccctcgcttcattggacctttcttgatcttaaagcgagtgggagaagttgcatatcgactggagttacccaatcatctgtcagatgtacatgatgtgtttcatgtgtcccagctaaagaagtgcctcagggtacctgaggagcagctactaatggaagaccttagcattcaagatgatctgacttatgcggcgtaccctatcaagattctggacactttgactcgagttacaagaaataaggtgataaagatgtgcaaagtgcaatggag

SEQ ID NO: 65655 - DNA, 358 bp, Zea Mays
cggccgacgagatcaccgacgccgccatgctgctcatgaccctgtcctgtggtctcgtccgcagctagctatatatggctagcttctacctgctgagaaatccgtcgctagcaagtgcaacctgattctgcacctaaaaagtaccctagctacatctaccatatcttaatatcgcttgtgttcttttgtttgattttgtgttgagaccggaagaggaaggagatcgccaggagatatatagagtgatcacatgtccaaggcggacgacaataattatgcgaaaaactctcgctagccaggaattagtcattttctaccataagagtgagccttttaatttcaccctttttcagttctt

SEQ ID NO: 65656 - DNA, 318 bp, Zea Mays
gtttcattctgaatcgttacagcttcgacttctgcctgtttcgtttcagttctaagttgcgccttggaagcttcggcaatttttcttgtaggagcaggactcaagatttttgttgtttctaatacaacatctagcacgttcgccatccttctccttttaggagttgcggtggagcctttttgtatcttcggcattgttgcctctgctgaagggctcaagatctttggcatttttacccttcagttttatctttgttagccttcgtttcaactagctcaaccgaaggtagcttcggcattacagccggctcttcagtcc

SEQ ID NO: 65657 - DNA, 607 bp, Zea Mays
taaaaacaagagcttaaatggatagtgatttggggaggagggagtattaatgttttgttcacataaactatcccaaacagactctatttcactccatatctcacttttatttcaaattccactctgcaactgcaacagtgtggcaagctgcacctgtagctgcgttggcaacctgcagactgtagctgaaatggcatggcagtagctcatagctggccgcctgatccaagcgggaatatcccacatggctgtgctgtaaaatacagaatcttactgtcgccctcagcttggcacgcgctgtgttgcagtgttcttttttttttttctccagagccccgacaggaagcctgggctcagtggagagtgtactactgttgcgttagctctccctgccctgctcggtaaacttgggcgtgttttcgtttcaccccaagaggatagataaatctggggatagggtgggaggggagacaggggtctccaatgatgtggagcaaaaggacagagagcagtctcgcatgtgcacatgcccttcttggacgcttcctctggtatcctagctgcctgctatctatctatctatctatctggtcagcagtacattgac

SEQ ID NO: 65658 - DNA, 1465 bp, Zea Mays
atcagtggggaccaattcagcgtcatcagcagaaatcaaaactctgtcatcaggagcgccggcctctaaggcgacttcctgacccgaagcccgtgctgctgccatacaaccagaatgcggaggagaagaccctacatgaacatccatggaggtatgagagggagaacccactcggacaccctcaggggctgggtcatagctcgcgctacccatccgagccggatcatctccggcaacaccctcgggggctgggcaaacgctagaaccatccttgaggactgagctctttgtggcagccacctctaaggctaaaggaccttcaacaacttccatgggaatggagcaatccagatcagcctctcgactcttaagaccgcgctccaaggtcgacgaggcacgagatgctgctcgagataactctaacccggcatcaggcacatcagcgcaaacttccatcattccaccatctatcggctctgacaatagatcttctaggaccatgtcttcgagagtctgatcaaagtttgtcagagacaattcttgcagaccaatgagagcagacaaagctggagaaggaacaccactactctccccgctggctatgtagcgccggctgttcttccgaatcaagggaatttcctcctcctcttcctcatcttcatcaataatgcggacggtacacccattggggttcagctttggccggattacacccattaggctcagcatcgtcaaggtcacacccattgggttcagcatcagtcgggtcacacccattgggttcagcttcagcaaaaaccggcactagcacttcctcagcagcaggagcagaagggccggcatcctgattcaagcatgacactcgacgaagacgtctctttttctttttcttcccctaagtaggagaagttggatgattggttcagcgaggacgctttgggtgaatactatcagacctctgagtatccacaaccttgccagactcggggagggatgccacagccagtgtttcagcaggggctgcatcagaggaatcttcagccaacatgtccagcatggcacttatttctgcatcactcagattcaaaggcacctcgaaatgaacctgcctctcgtcgtcggggatttcgccaagtgaagcaaccaaagcctcaacctcttcgggagaaggtcgcactctaaggcccaaactgctatcaccagtaggaggatttgacacaaaactgatgaaggccttggaaggaggcagattccaggctgagtatgcaacaggagcaccgatattagacaccttgcctctgagtatcatctcaagtcggctcaccaaatccacagcagaaatccttctgttggtaacacgggttgaatcagcaaggcctcgatacagataagctggatacgctctgtcttttagtggctgaatgttcttgaaaacaaaatcggcaaccacagcctcggcagtcag

SEQ ID NO: 65659 - DNA, 453 bp, Zea Mays
aacctctcaaaaagaaccgatgaaccaaacaaaaaatattaacattcagattgctctgtagtatcccgcaacaccttcattttgtgaccgcatactgtatgtccatctgaccagggcatctcaattctgaacaaaatcaataaccaccaacagtccaaaagaagatacagttagcattacgctcgacagaattcaacttttccgaaagttctatacagcaaacagaggcaatttacatcaaatcactacagctataattaccttctgttggaaatttgggatacttggtcgccaagagttcattgtaacacctcaaactaatacaatgaaaggtgaagttttaaaccatggaagttatggaggaatcacttcctgcacatttggggctggtaccatctggaaactaaatgtcatgaatgcagatcctgttcctagtgaccatgtgggcatcag

SEQ ID NO: 65660 - DNA, 1235 bp, Zea Mays
ctcaactaccagtgctctggagcggttaacacctaatttgacccctaataaccattacccctcaaccaattttaaggttctagcccctaatctctctgcccatggtgacagcgcgatcaacggacaactcgaagcgttcccggtgatcctatgtgttctagctcaattggccgggtcgagaagcatcacaagcacacagggatgctaaaacaagagcgaggagggcatgatcggacctgtggagagctggccacggcgagctcacacacggcggagttttgactaatttggtggaaatcccaaattagagctctctggtggacaatccgaaacacgggtgggtgcgctggatgcttgactacctagtggagctgatggcatgctcaatttatagggcccgagggcggtggctcatgaatttggaatcgctcggtagcgaccggagagaggggagagcactagtggcttaatcgtggcattcaccagtgcaacggctcaaagattgtaatcctcattgtgccacggttactaccgcgcagtaacgagccacgacatggcataactgagatcaccggagtttccacggcaacaccggcggtccggccacgtcgcactgctacaggcgcggtgataagcttcctccgcgaccaaatccgctcccccgcgagatctttttacctccccgtggatatccactacgtgccaagcacgaatcacggcgactggcgcgaatccgggtgcatggtcaccggcggcgaggggcactgaatcctgagatctttctatgacactataccatcagaacaccattcaatcagtctgacagggtcatttgcagggcattaatctctgatttctatgtagcaactttataatctctctgtaacaaagttctagccctataatccagctacaatcttgctatagtagccaggctcaaacactcactggattatcttcaaaagagctcccaaagttcatcccaagtcactgttagtaagattttagattccgagctgacttacagcccaactttgagtccttttaactccaacttttgcacaacacttgtgtctgatgacttagacaaagttatactcctttagtagctcttcaaatttgatgtattgaccctaggcaatttctttatggattatgagatataaggctccaaatatgcctcaagctcattgaattttagacttaggcttatatggcttaagtggtgctttttg

SEQ ID NO: 65661 - DNA, 588 bp, Zea Mays
gctcgatatgctggctgaggactcttctgatgctgctcctgctgggacattagtggtggcgcctctcccagaagctggtataaccttggatattcagaagcctgtcagtgttcgcctaagacgcccttcccgagccaatcaacttgatcctcctgctgatgagcagaaaaagaaaaagagacgtctccggcgagtatctagtttggatcgggatgttgatccttcggttcctgctgctgaagaagtgtctgttcctgaatttactgacgctgaccccaatgggggtgctccacctgttgctgaccccaatgggtgtgttgtctgtgttgctgatgaaaacgacggggaggaagaagatgaggtccctttgactcggaagaacagtcggcagtatgtcgccagtggggaaagtagcggagttccttctcctgctttgtctgccctcattggtctacaagaattgtccctggcaaactttgatcagactcttgaagatatggttccagaagacctgttatcagagccagcggatgatggtgtgatggaggtttgtgctgatgtgctcgacgccgggttgggatcgtcccg

SEQ ID NO: 65662 - DNA, 414 bp, Zea Mays
attcttcaaatcattaacaattaaccgtatgtaatttgcataactaaatggcctccctactgagcacaaatccaactttcctgagaaaattacaaaagccagagccccaaagaatttggtgtcaccttcaatctgcccatgtgacatctttattttgaggaacacggtcatagacatgagtccaaggatggtcacctgggtgatcatgaaaaatatacatgaaagaattatgtttcattagaagctagctgctctcttaccactactactactttgagtaattcccagctagaaatcccataaacttttgtatgtgaaagcagcaggatgagttttgaacttttcaaaaggtacttgtagctcacattccgcatgtgttggcatgcatggaatggtctggaacgttctacaaag

SEQ ID NO: 65663 - DNA, 804 bp, Zea Mays
taaatcatgagaaagcctaaaattgtgcaacagtgggcaaacaaatttttacccaattacttatgaggtaaaccactagataaaaatataaaactcaattaaaaatgtaaggtaacatacattaccccctaccccgtgaagaaggccatatattccaagaatttctaccccctttcccgtaagcaaaaagttgccaaattctagaatggttgctcttgcacaaagaaaaagatagaaaaattaggaaatctggtgtttgacatttttcaagtatagtggtagtagaaagcaccactatggccaaaaatttgagaaaatcacaataaaatgaccaataggtatccgtggctaaatcttggtacaaagtcatattactatccttagataccagcaaaaataaaccttagggaaaaattcactgttagaagagagttgtagttcaaagcaccccctctgccctaaaacttaattattttgtacagagtgaacccttaacattttagtcctcaatttttgagactgaaaactacacaccagtgagaaactactgtattttttgcagaatgtttggaaatttataaagctaggttgtagttcaaacccactttaaagagcataacaaacaaaggaaaagagaggattggtaaaaataataataaatctcacccctaatgaattcaacaaggatcatgataaaccttcacaataacactaaaaggaaatcagtcggacactaaaataatctgaccatttaacttaaccatacttgaccctaaaatggctaagtataccactagaagtctc

SEQ ID NO: 65664 - DNA, 330 bp, Zea Mays
ttgtgatgtcttcgtctgactcaaacattgacatgaccgaggaagagtttttcgagttgttgtagtaaaatataatgcaaccggaggcggagattgcctccaagtcttttgcatcaaggaggcaattgaggctatgctggagatacatcgatcgttaccgtgtatccgcccacgatcggttgatgtaagactactttaacgacatgtgtatctatccatctctctactttcatcaaagatgccacattcgagaagcatattccttcacatctttggagagctagggtgagcactcccgctacttcactcttcgaaccaatgcactcaccc

SEQ ID NO: 65665 - DNA, 394 bp, Zea Mays
tcactgatgatttgcacagaggtccttcggtttctaattctttaccgcatgaggtccacgacaacggcagtgcggaggatgaactccggtgaggttgtgctggtggatttacgcaatgaccggtgctcccgagcggcgtacaccaaactggaccttccccgaatgattcccctaacttaatttcataattggtaaactatcaagctctgtctacgcaggccgcggatgataaggacaattgcacgcgttcccgttgattggtgagctctcagtccaattcgatggttcggcaagcatcacggggttatgagaatgctcaaacaagggagcagaaggcgggggctgacctgaattacgctggccgcggcgagactgttttcacggtggcggagac

SEQ ID NO: 65666 - DNA, 628 bp, Zea Mays
cgccggtcgtaggagtgatctacatagatttatatgacatacatgtatgtcacggtacaatgcatgtcttacatgcacgtacgtacgtagttattgccggcggtaacagtgtacctttgctactttgcctttgtcttgcttcgtctcgacgcaagcttcacaatgatgccatgtgtcatttctgcttcttcttgctccaacatcaaccagattcaaaggtccaaactcgaaacccgtccgcttatggttttgatgcccaaaccacttgacgtctctttctgtgcgagagtagtgtatctgatatattctttccatgatgtttgccaaataaaactagttctattgagggatggggaattcccactagtttaggtggtcacgaggttaaatacagcttcctcaattttgctttaacaatatagtctttgtagattaatctttttacaccaagtaaggacaaatttaagagcgatgttacgtgtacgtagatgcacgagaactatatataatataagtaatttttggacacaaagcgatataatatagtttctggttcgtctaacaaactaattaaacgctagctcggtatcgtcgttttatgacgatgatggatttgacgttaattgct

SEQ ID NO: 65667 - DNA, 968 bp, Zea Mays
gagtaagatcctgtgactttttgtgggtgcacaatgtaaaaaaattaaagctggttaattaagcttcaactttgatacagggtgatggttgggtcaccacataaaatatggagcaaattgaccccaaacatgctctgtcaggcgcttcaaacagagattccaatggtacagtagactgaacgagatcgcaggtgcagtgcaccttgatgccggcgacccctgcgcctggattcacgccagtgaggtgattcgtgctcaccggtgcctggataacgtctcgcagtgaaaagatcaccacggatgagcttaagacactgttccgtccggccgccgtgtccgctctgccccaatcgctttgaatcaaccctcgccagagttagacacctcgcggtcttgtgccacgtgcctcggcactttaaccacatcgcagtgagtcgcgtcatgcatgtccagtgatcgccggtgagtccgccacggtgaaagccactaatcgctcgcatcaatgcaactctccttctctggccgccaccgcgccattccaaattcacgcgccaccgcccccggagcctataaattgagcgtgccttcgggtccataaggtagtcaagcacccaagccaccaagccgtgcctccaattgctcaccagagctcgccaatttcagatttcccccaaatcagccaaaataccgttgtgtgaacacctcgccgtggccacccttctgcaggtcagttcaagctttcttaattggtgttctagctttcctcatgtcccctgaagctcaccgacccattcgattgaactagacctccttaaattgcctagaacaccttggattatcctcggtttccaccgtcgtcgtgagcaggcgtgctccggtccggatcagtgcaattagctgagggattagtgttggggagggttgaattaagtgaaaaacaaaggagaagtctagccgttgcgttttcc

SEQ ID NO: 65668 - DNA, 514 bp, Zea Mays
tggcgtcactatctgctgggaaatatctgtcacatttatacagatcataaaagcttgaagtatatcttcacccagtcagaattgaatatgaggcagaggcgatggcttgagcttattaaggactatgaactggaaattcattatcacccaggcaaagccaatgttgtagcagatgcactaagccgtaaggtttcctgtcactgtcttacggtgaagacctctgacaacactttatgtcaagagatggagaagctaaacctgggaatggtccaacaaggaactttgaatcagctaaagcttgagtcagtcctcttgcaaaggataattgatgctcaaaaggataatgagggtatgaagcacatacgtgagaagttaagggctgggaaagccaaatgtttcaaagaagatgatcaaggcattgtatggtttaataaccgcatagtggtgccaaagaatgaagagctccgccaacaaattcttgatgaagcacatcttagccgctactctattcatc

SEQ ID NO: 65669 - DNA, 455 bp, Zea Mays
gcgacttggatattgcttgtgcttggcattgttgcaggaggaagcggagacctctcgtctctggagtctggccgtgtggatcatgcacactctacatggactatttttcaacaaggtcagcctcctcggtggggaaaacagctggacaattccaaatcagctgagactacaccacctgtgtttactgacagcaaggtagcatcattgcgcgcttattatcgagcacgaggcctttctcagttctgtgctgaaaaatggagcaaaggtcataagtgtgtggacactatccagttacatgctatccaagaactatgggaaatgtttttttcggaaccccatgaatcagagggcgaatttgaagattctgctaaaaccttcatgatcctgctgtcaacagaggccatatccacaaagaaggctctgtctagatcctttcggcttcaaggtcagcttta

SEQ ID NO: 65670 - DNA, 736 bp, Zea Mays
gccgggacgcgtgctggcttgtcgtggcgtcgtcgggcgggttggagtctttgccaccgaggcccgggcttctaggattttccttgtcgcgatcacggaccgccgtattgccgccacggtgcgtgactggggctgtcgccctctcgactcaaggtatgagaaccaccatcacgttcgccctctctctagcttcgcgtagcaccgaccgttcgtgtatatgtgcgctagatcatcgtcggatcgcacgccggcatgttgtccggcgagggcgcaggtgccctgaccggtttcggacgcggggtaggagaaggacatcttgccgtgcgatcggattcgtgcggctgtgatttggttgaggttgtgattcggccaaatccgatatccgtcgttggatcctttatcaacatgtaggatcagatcgtgttcaaaagtgacctgggccgttgatctattatctaatagccctcgttgctcaccagtacataacgcgcccagaaccaatcctcgccgctagatctaatccgggcggctcagatgagcctataccccccccccccttcggcccaacctttttgctaaagtgcccctgatctttttcgtatttaacccgccatcctgcgtggggtgaatatgagtcttgggaaaatttatgccgagcccctgcactttctaataataatggcgcagtccaggaattaaataaaaccggaaaaatagatttagaaatggattttga

SEQ ID NO: 65671 - DNA, 650 bp, Zea Mays
ccgtctggctcgcttgtgacatgccttaagtcatctcaccactcgtctcaagccatgaagactcggcagtgaccgtcgtagaccgtgaaccagtgaacgccatgttagcgaactccggtgactcttcccccttctcactgtgagcacttctccattcaaatttacccttctcacggccgtccactataaattgatgcctcgacttgttccgctagattgttacgaagctagagcacccaccctcgccctcgattagccaccatagccggagaatttcgttcttcccccaaatttgttgtctgtgtcaccgtgagacgtcgcaccgtggccagccacctccaggtccaccctcgctctccttgttcgtgtttcagcacccacgcatgcttgtgatgctcatcggctcaacccattgagctagaccacgctcaatcgaccggaacaccttgatttgtgtacggtgttcgccgtcgccgtgggtggcaatccagggcaggattggttcaattgaggcatggtttaggtttgcctcgggtcagggacgctagccaagcatttagtttaggcagtcgtcaccggtcatggccggtcttggcaacgagatggtcgacggcgagcgcgccgttgctagggttcgttttggagaagaa

SEQ ID NO: 65672 - DNA, 364 bp, Zea Mays
ggcgaccggagggagggaaagttactgacgcgagtgttatcgtggctttcaccgtggcaaagcttccggcgatggacggactcactactatgattcactgcgatgtgttaaagctcctaggcacgtggcgcaaagacggcaagcggccaacgccggtgaggatcatctcggccggccacagacaaagtgggtacggtgaactatccagtgacctggtccgagcttatctgggaaccaagatcttttactcccctcgattatccactttgcgccgagcacgaatcgcgacaccggcgaggatcgcggcgaagttcaccgacggcgcgatacactacatctgaagatcttttcgtgcactgtacca

SEQ ID NO: 65673 - DNA, 788 bp, Zea Mays
ctcgcaagcgacaatgaataggatacaactaagggaaaataggtaaccttcaacttttaaaattgagacgaaatagagaaggttttggagcacaggtataatataggcatcaaggtaagatatagaggtgtcaaaggcaaaggtgataataacaaaaggcataacaaaggatagagttaaggcaagactcgcaaaatggcgaagtggagaaaacaatcaaggtaagataggtgatgtttcaatagaatggttgaagtaagaattcattactgagggaggttataaggaagcaacgagattaccacgagtgtgcaaaataaaattaccgctcatggattattaggaaacaagggtggtcaaggatatgttaactaaaatgttttgaatagtcattggggtataaaggtaagcatatataaaaataatagtatgcaagattccaaggatacgggtataccaagacaagggaaaagacaaaggcgaaggatggcgacctaacagtggaataggaagggatatcataagacaagaaggtcatggacatataaactagagtgtttaagtaggtgtgagaaattcagtagtaagtatctgaaaacagagtattgaagaatctaggggtacgagcgtgtcaataccaagggaatagagatggtcaaatggtagcaatttaatgacgaaagagaaaacgaatcccaaaagacaagaaggttatggtcaggggcatctacaaatatgtcgcaagcacaagaatgagatcagatctaatagattgagagaagtataga

SEQ ID NO: 65674 - DNA, 387 bp, Zea Mays
cgaactgcactatcagacgaaggccagagccgattgtctacacaagagcttcgggtgctacaattttgcgtaccggaaggataccaaggccccagtgattggctaccgcactaaatggccaaccaggtggactagtgaatggttctacatgaaggctgatgagaagaaaagggagaagctcatgactattgtgatgagccccctgaaactgagcttcggcatgacgcaaccattatgcaacatgcaactcggctccccatgccagctggccgaagtagaattcagagtggtagctggtcatattagcactagggacttagtgcaggaatatctagcaaataaaacttttccaacctctagcggatgggggatgctaaagaagaagga

SEQ ID NO: 65675 - DNA, 924 bp, Zea Mays
ggccaagaaaggctagtacaaaacagcctccttatggaggccagtaagaagcatacataaaagaatccattagactctcctatctccttagctctcagctaaaggtacaactagatggcagagccccttggcaccagcaatctcccactgcatcctttcctcattagcagctctaagactcatggtaacactggggttgcagccatcaaaaatgcatttgtttctatgtttccacaaggtccgggctcccagaatgataagggaatcaagcccttttctagtgagcctagtagcaatattccgcaccgattcccaccagcttagatatgagccaacatcaggttgaggagccaaagaatgcagaccgaaattccttaacaacaggtaccaaaattccctggagaaggaacaggtaacgaggagatgatcaatagtttcatcctcttgatcacaaaaggggcacttctcaggatgactcaaccctcttttagcaagtccattcgcagtccagaaatgattttgtgcaaccagctagatgaagaaacaacattttggcaaggcccaagttttccaaattttcttgtgacgagggaaaattacagaccccaaaaagaagccctcgtaagcagtctttgctgaatagatgccattagaagcaatactgaaaacatgtttatcctcaacctcaggctgcagctgccaaactgaagtcatatcccacaactgaagataatctgttaagactcccactgtcagtggacctttaatatcagagatctattttctatttgtaattgcctcataaactgacctgctattgataatcctcttgggtgtaatattatataaacttggagtaaggtctttaattcgcttaccatataaccacttatccttccaaaacttcgtatttgcgccatctcc

SEQ ID NO: 65676 - DNA, 706 bp, Zea Mays
aatagatatcatcctagggatgaattggctagataagtatcaggcagttatcagttgtgataagaggacaatcaagttggtgtccccactaggagaggaagtggtgaccgagttagtcccgcctgagccgaagaaaggaagttgttatcagatggctatcgatagcagtaaagcagacccaattgagagtatcaaggttgtgtctgagttcccagatgtgtttccaaaggacctaccgggtatgccaccagagcgaaaagttgagtttgctatagagcttcttcctggaactgcccccatctttaagagagcttacagagtatcaggaccagagttggttgaacttaaaaagcagatcgatgagctgtcagagaaaggttacatccggccaagcacctcgccttgggccgcccctgtcctatttgtggaaaagaaagatggcaccagaaggatgtgtatcgattatcgagctctgaatgaagtcacaataaaaaacaagtaccccttgcccagaatagaagatctgttcgaccagttgagaggagccagtgtgttctccaagatcgatcagaggtcaggttatcatcagctcaggattcgaccttcagacattccgaagacgacattcattaccaagtatggtttgtatgagttcactgtgatgtcttttggtttgaccaatgcaccagccttctttatgaacttg

SEQ ID NO: 65677 - DNA, 1168 bp, Zea Mays
gcttaacctctgatgtaggagtacaatcatacactggtgtgcaacgtattaagaagtttctgtttagcatgatgtttgtcttaatgttgttcgcaggaacacatgatgtattttaggaaacgaatagcaaaagagatcatggcattaagagccgactgaagaacaccattctgacattgtctcaagtcaggtatttgctttcaaatagcagagatgtgattcttctaaggctgttggtgtgaattcaagtccatgtcgccacaccttttgtaggcttgtatttttttaggacctgattttggtagggaaaagaggggtaaggtaaaacaatgaaaaacgtaggagttcggaaatagttcggcaaaatggccacacctatgtaattgcattgaaactgactaaagctagtgcaaggaactgacacttagttttgttttgtgtttatttcaactcatatgttgtcgtggaaactaaagctagtgattgcacgactccccagtattaacatttcgtgagcgttttatgtatttgggaagtttttggttgcagatggataaacaactgtgaacctaggagcaacttcaaacttttcaggttcaaatcataaagctgtaccgagctggacacatgtctgcacttgaacaacaaaccaccaaccactacagtttctctatttctctagttagctaggagcacaaggcagaacattgaatgctgatagagggtagatcaccccatttcacaaaaacttgtggcaaaccaatagcaatcttaacaaatcgaatcatcttcccaccagtagaaatgtgactgactggctacttagatgcctaaaaatgctctgcacagtgactcccaatgctccttagccaggcgaacacgttcaactcgctccaaccgcgttctcttctaagggcttgtgcttacctgtgtctcagcagcatgttgagtgcatccaggtgcatagcgtcagaaaagaccccttgctgaacatcaactggtgtgacggatgcagcagaacagcagcataggtagcagaatatgtggccacatgaaagagagaccggatcaaacattgtgtcctgtaaataaataaaacatggaaggatgaagagtttggttatggattttaaatagagaggacagagaaggatgcattgtgctctta

SEQ ID NO: 65678 - DNA, 513 bp, Zea Mays
agaaattcaatctttgtgttgcgtatctattctcggttcatgattttatggcgtatggtattttctctggatggagcgtgcatggtagattgacgtgtccttattatgctaaagatacatattgttttcgtcttagtgctggtggcaagatatgttactttaattgccatagatgttttctacccttcaatcaccccttcagaaggcagagaaaaaagtttaggaagggcaccatcatcacgaagggaccgcccaagcgacgtagtgggatagaaattacaaaagagcataggaaacttccatatgaggctaaggtcggtggtcctgttcagtacaggtggatgtttcatatagaaagagcattaaagaagcttagagcaatggtggccaataaggcaagagttgaaggatgtagtgcggaacaacttaaactgaaggaggtagcacacttcacaagttgttactttgcagaagaacataatgtatttgctcgaaagaagaggtaccatgatg

SEQ ID NO: 65679 - DNA, 386 bp, Zea Mays
ttcagatttggggagaagtttgatgagccgaacgatgactggctgaagtgtattgaagctactagcgacgagctacttggggcatacaccaatgccgaggataatgctttgtccgctgctttcgggggttggaagaagaaaagattgaacagggtatttgatgctattggcttcgtataccctgattatcgctacccgctgcaagggcaagggaagaagagaaagattgctgctttggtcattacagttgagccgaagggcaagaagataaaggttttgactcaccggccgcgttatattgaactggccatgatacctgaatttggcaaagggacctcttcagctgccgaagcaaaataaattgttccgattgtgcagagcaatga

SEQ ID NO: 65680 - DNA, 1163 bp, Zea Mays
gtcagggctaaaacgcagaaggcaactcttgagtttaaggtatgctcgtctggaggtcgtgtcaaagctaagttggttgatacttggattcagtttaatgggttgccggttgaattttgtacggtgcctcacatttggggtgttggctcgaccctgggggttgcatccgatgttgatatggcgttttacagacagcatggcatatgtaggatgtaggtcagtgtgatcgatccacaggaaattccctttgcggtggatgtcgaaatagccaaggtcatctatgaggtacacctatgggtggaaaatggcgcagggacagcggtcccaatggcggttgatgatgattctttctttgatgatgatgctgatagtaaaagtgaggataaaggttttgataggaacaacgaagatggtctcaacaggaaggaaaatgctagtgatcagccccttaacaagctggctggtggggataataccgggcacaaatcagttgctctcggggaagtcactaccattgcgggtcagccgatagatggggtgttagctgctggttctttgggggtcggtcaggagctacctgctgatccattggagtccagcatggacgggaatgttgttgatgatgagaagcttttgatgagtgatgctatcgggaaggctaagcaatctgaggtggttgctgctgtcaccgatcaggctggggctattattgctgatcatgtgccaatggatagtccagagttgatgcaatcgcctgatgatagctgtgacaaattgaagcagctggctgctattccagaagcttcacaatctgtcgcagctggtcgcaagaggaggacgagcatcacggatgaaaactccttggcccgtgctgaaacgctgaaggctgaatgtaatggaggtaacaacccatctccctcctctatttcatgtaataaagttttgcaaactcctttgaacttggctgtttcgaatcttgacgcgatcgatatctctctaggtgtagaggaatcccatttagctaagtcaatccaggttcttaatagctatgataaaggtatggtgagtcaggtgggtcgggatggcatggtagaagggactgtttatgacatagtggatgaggagtcagatgaggaattagacagatttattcttaataatct

SEQ ID NO: 65681 - DNA, 399 bp, Zea Mays
ttaaccatcttgccatcccaaggaattgatgtaattctaggaatggattggctagctaggcacaagggtgttatcagctgcgcaagcaagactattcttctcatagatcaccaaggaaaggcagtttcctgtcaagcccaaccgcccgcaaatgatccaatgatatttaatctggcagtagaaagcatgtctgtaatcaaggagtttgaagatgtattcccagaagagttacccgggatgccaccagaaagagaagtagagttctatatagatctcattcccggcactgcacccatcgcaaagagaccataccgcatggcccccactgagttgacggaattgaagcttcagatttcagaactacaacaaaaagggtacatccgtcccagttcgtctccc

SEQ ID NO: 65682 - DNA, 387 bp, Zea Mays
aacaagtttacttaagcaactaaccactggtgctgaatgaaaactaaagataaatgagtctgaagttggactatgagactgcttggagtctgaaattcagactgacagtggaactgcatgaacttagggctcgatttcaaccatgatccagtgggaatttggctatggttgctataacaagaacatagctggatcatagggttgtaactttgatacagggtaatgatcatgttactacacgaaattgggagcaaaaccccctgcaaattgctctgtcaggtgttctgaaccacatgctgatggtacagtaactggattaggccgcccgctcagtccctcgccgccgacgaccattgcgtcaggatttgcgccgtcgccatgattcat

SEQ ID NO: 65683 - DNA, 333 bp, Zea Mays
ctttgttccgcctttacatccattaggtgcaccgtggagctttgagttgatttgatcatcaatcaactcaaatgtcttcatggtcttgcttttgaagggttatgatttgccgtcttgaacgtgatttgcttgacacattggggtgtagccccccgagctgacgaagcggcgagtcggcaagacagacaacagtccagccccgaggtgacgaagtggtgaatcggcaaggcgaacaatagtacagctgacgaagggacgagtcagcaaggcggacaacaacctagttcctgagctgacgaagtgatgagtcgacaaggcggacaacagcccaac

SEQ ID NO: 65684 - DNA, 593 bp, Zea Mays
tctgacctccctcgtctgcatcattcatcgccgccaagccacgactcccatggctaggcccatccaactactaccccactagcccgagctcaccaggagtttcctatacctccctgaagctcatacacccgctcacctaagctctacagcatcttaaaaggcttgacaccatgctctgccagccatatgccgccagagcacgtagaccggacaccccgagtcaccatcattcaattcaagcccatggaaagttccaccaaggccctgcgaagctcccaaggcatttcctcagagctctgccacaccaaggccttcgattgaagcttgtcagcgacctccacccgcctttgcgtgttgaccagccaattctagtcacctccattgatcattgctgccactgagcccgctagacatccacgatgctccccgacttgctactgccaccggtaaggagaaaattttcactagaggaatgtgtcatcctatttccgttgaagtggagcgtgggttgagggagagaaaatccagggggctaagtgcaaagttagtgactcaaggcaatagtgttccaagggcacgatttaaatagttta

SEQ ID NO: 65685 - DNA, 491 bp, Zea Mays
attagtcaaggggttctttattaacttccacacgccgaaggggtacggggaaaccctaaccgtccaatcaatgattgaagaccaggattagatctccatagttttcaaccagtatacaagctcgcccgatcgatctcggatgagcggctgtcatgcgaccacacgattccccattgtagacccttggatagcctatccatggcccatatctgttcaccgaaaggttatgcccaatatctaatcatggccgccaacacatggatcgatgactagggatgcttcttcttacctcgactgcccagctccatggcgtgtgcggaccgcagctgcgcggccccagcgaccatcaatccgggtgcccagtgaaccatcccatataccaccctggcgcaacccaacgtagaactccttgcgaataggttagggacaactcaccagtgtttaatgcagcagggaaccctgaccatgacgaagggcggtcccgcggcgac

SEQ ID NO: 65686 - DNA, 477 bp, Zea Mays
caaaatttggatacaaatttggagtcccggacttaggtacaccatgaagccttattacttctttcatatacaagggaaccaattctgaagcagaatttgtggtcttcatgggaataaagtgcgcagacttagttaggagatccacaacaacccatataacatccttgcctcgaggggaacggggtaagccaaccaaaaaatccatggtgatatgctccgacttccattctggaattcccaacggcttcaataaacctacatgcctcttatgttcagccttcacacgctgacactccccataggctgccacatacttagaaacatcaaccttcatcctcttccaccagaagttttgcttcaaatctctatacatcttggtttcgccggggtgaacggtgtaaggcgttttatgagcttctcccaatatatccatcttcacatctgatttctgtggcacacaaaggcggcctctgaaac

SEQ ID NO: 65687 - DNA, 305 bp, Zea Mays
caagaaatgagttgtcttggttagcctatccacaatgacccaaatagaatcatggtgccgggaggtgttgggcaaacccacaatgaaatccatgctgaggtcctcccatttccaagatggtatggggagaggttgtaaggtactaccttcaatgactagccttgattctttggcaagtgtcgcacttagatacatacttagcaatttcccttttcatcctggtccaccaatataaggatctgaggtcatgatacatcttgttacttccggggtgcatggaaaacttggaaatatgagcttcgtcc

SEQ ID NO: 65688 - DNA, 359 bp, Zea Mays
caaaaacagagaagtctaggggctatcacaaaagaatcccaagactctggttacaactacggtgtactgcgggttgattctctactttctaggggttcttatgcaattgtgtctgagcgaaagggtatctgtcattctgagctgtccgatcggcaacagagcgccatgattaggctctcattaaaacgcacctgcattcattcgcaaccgttggatcccgattcgatggtcccgagacattacagcccgatccaacctagaccattcgattgatatccagcggccacaaatccttactgcgaatcggtatacgcctaataatcacagccgtccatcgaaccacccacgacacagatcta

SEQ ID NO: 65689 - DNA, 1299 bp, Zea Mays
gcaatactcaaagccaacattcagctatacatcggtgcatcattctcgctctggtagcatgtcctttctactctagtattaaatttgggatgacgaattagcttgggctccccacaagatgctcactactttacgcctcaaatcagtggcagacgcaagacgagaattcatgggacccaaaaacccacatgacaaatcaagcaaaagatcgtaaaaaccagtgttgcatttaattcaagttatatatcaaaacacgatataaattcaaagaaaaaataaatgaacaaaagaagtaaacataatagcctaataaaaattgggtgtaccttgtcgaatattgatctcttcgatgggcaggtgtgccgagaaagtggtgggtcaagggacgtctctagttgagagatggggctcgttggttcgacaagctctgacctccaaggacgggtcacatcatcgcgacgaacgaaatctgacctatcgagcaagctcgctcatgaggatgacgagcgaggcgggggcaccgggaaggggtggggttgtgtagtgtcgcgacataaggaacgagacatcgaagcggactggatcaggcggtgtcgataagaatgggactgggtcatagtcaaaatgttcctagatcgattggattgagaagcggggtcatgggtcgtgggtcgacactttaaaaggagaagtatacatctatgagacgagaatattatgaatttgatatgttgagtctaatgggccgatgatcttgggtcgattctatgggtcaagggtcgtgttctaaaatttcaataacaacctaacaccagtctaatattatctcattctaccattgaaactttaggctatctctatcagattccatatcttatcctttattttaaactttactctacaaacagtgtcatctacagtcatgcatcccctattttacaccacctgctggagacagtgttatatttatgcaaacagaaaaacttcaaccgacctaaaactttaatttttctatactaacattaaatgaacattagatatataagagagaaaattaagggggacatggcccactttgcccccctctcggtctgcccctgcctcaaatatatctatatgtagtacttggcatcaacctagctcgcgatagactgagcatgggggcagacctgctctttgataacgttcagctcctcgtcactccggccggtggtgtatccctcggtgattacatcggcaccaatctcatcaaaatgggagaccatctgcccaagggccagactgcctccttgacaaatg

SEQ ID NO: 65690 - DNA, 835 bp, Zea Mays
ctaaaatcgttttgttgttttagttcctatgtgctagaacgattcaattgcatggagggtaggaactgagaagcagagaggtaagcggtaaggagccatgttatctgaatggaaaagcagtgcataaattacaaccaaaaacggtttcttgaattgaacagagaaaaaggagatgacacagaacagagcaaagcaagctgagagatgagggtgggagtaggaactaaactctgctggtagcacacatgattcacatagctcaattgggaaccaaaaaaagcaaatattgttatagtagtggatcagtaagtcgtacatcatatcgagcattccggagcaagcaaggatggggagcgggcatgaaggagtctggcaccatgggcagcgtcatcgtccaacacaggctttccatttctttaggcagcaccaaaaaatacaacacatgtttccatttcttcttcatgcacccctccgtcgttgctttcctttggcatctgttcggcagcacacatctgcagttccttgcggtatagatagatagatagactagacaaatgggagtctaaatcgtataaacattgtcaattagaatattaggaaactatatgcatatatttactttgatcagttttgcagtgttattagtatacaggaacctattggtcacatgcatgggaaactcgatatgtatagcttagtttcatgtatacttaagatactatcctaaataggtgtttagggtttagggtatggccgcaaaaggatgtactataatcattacaaagtttagtgatatcaagaagttactaagtaaaaggttatgattttctcttta

SEQ ID NO: 65691 - DNA, 433 bp, Zea Mays
cgtgaacggacctgtagagagctggccacagcgagctcacacacggcggggttcttgactgatttggggaaaactctaaattatagctctctggtggacaatccgaggcacgggctggtgcattgggtgtgtgattacttagcggagctcactagggcagcaatttataggttccatcggcgatggcggctaattttgaggagacgcacgacgaccagagagaagggaggtcactggcgcaagtgatttgtggctttcaccgtggcttgaccaccggcgatgaccggacatgctaaggcaagtcactgcgacatgatagagcacctaggcacgtggcacccgagcggcaggcggccaactctggcgaggttatctagaccggtcgtaaggcaaggggggtatggcggccagggcgaaacagtgtcccgagctc

SEQ ID NO: 65692 - DNA, 348 bp, Zea Mays
ctccaatcctgcatctagaatgtcagagaaaacgtccatcataccaccatctgttggctcggacagcagatcttcaggaaccacatcctcgagagtctgatcaaaattcgctatggacaactcctgcagaccaacgagagcagacaaagctagagaaggaatatcactactctccccaatgactatgtagcgccgactattcttccgaattaaggggatttcctcctcttcttcttcatcctcgtcaacaacacgaacaatacccccattggggtcaacattggtaggatcacacccattgggttcagcatcgtcaaggttacacccattgggatcagcatcgtcaag

SEQ ID NO: 65693 - DNA, 850 bp, Zea Mays
attaaatttctctagtgtttgtgattttagccaaaaccgtatattcaccccctatagccactgtcctagatcttacactcggctgagacgagtcaatcctcaaagttggggtagctccctgggaggtgctagtggcacactccaatgtagttcaccatgacttctcctagtcatgatgctgttagcatgtgtcgaaacatacggggaactatagtgtcaggccatgttatagtgcactttcctccttcactcaaggtgtaggggtgctcagtcatcgtattatcctataggaaatactctagtgcgtgagttactgttatatgagcttctaatgtgggagcctccagatcagggactccgggtataagtggctacgacgtccaaggtctatcgatgttgaccagctcctcgggctcttcttcttcctctggtttggtctcttcatcctccgtatcctggtagtctactagtatcttatcattggatatgttcatctatcctaatgagacatcctcattctagagcgggtattcagagtcattcgagtcttgcattatgaccctaaggttcacaagttcagtgagaaactctatccaagcctcctactaaagctgagtcacctagtcctagcaatgtgggccttcaggttccaagtcctccatgggctcgtcctcggtctcgaaggtcccgtcatcgaatcatttaggaatatcattagtggtgatgtgcgagggtcccgccttaggtggtgatagtggtgggaagatgttgatgctgatgcatatgtgacctctagtactcttcctagtgatcaagcgagtacgtgccatctaaaaacaaggaaaaattg

SEQ ID NO: 65694 - DNA, 563 bp, Zea Mays
atcgatcaaggaatatgggcgtggcaacatcggccaagaactcggcctatacaggccggaattcgtcgtcggtgcttgcctccaccgcagatccgctatcctccatgggtaagacctctccatggcaacaacaccggtgagtcctccactgttgaagacatcatatcgtagtaagctcgtagcaccatttttagcggtaatcgggggcagaatcccgatttgggctgcttcggcggggacactgccgttctggtgctggtgtcgctgtggctgcgtctggtggagggtgaaacctaggtgaccgtcgatcgacccgccaggatcgggattaggttgtctgggtaccggttcgtctgggtgatcgacaaccgttggatcttgagctgacgtgtgagattaggaacgcttacaccgtcgcgctttattaaactgggaccgtccaatcgacgatccgagggctgagggatggctcgggcgtggtcggatctcgggcgatgatctcgaatccaagggtctgggtcttgtaccggtttaggcacggatggatctaatcgtgactgttg

SEQ ID NO: 65695 - DNA, 1013 bp, Zea Mays
gtaaaatgagtagtagatgtattttttatgtattaaatgttggatagcttaattgacccctattctatagggagtaatgcgaccatattgtcatggtttcggaaatcgggacccagtagaatttatgtttggtgggagaaggctcgagtggacacactccgaatggtgaatcaggtaactcgagaggggttatacttgtttaggcttgtgtcctacgtccagtgtagtgttgatcgtttattgcttagggaaatgtgttacaaaggttgcaaatgtgagaatgagatgaaggggagaacttaggtagaatgctcctcgctctttgtatgcctgttcgttcgtccctttttataattcaagggggaggctcttacaaggggcttatctgcagcatggcacaatctatcgtctacggaagtacttatgagcagtcctccttacgttgtcttctgattcgtgcgtaggtgtatgtccggtatggcggatcgctccatcctacctggtatgcgggtcactgtagatactccaatgctgaggttccccgtagcggagttttgctggtcccacgaggcagaatcaggagatatttggggtcgtacgcggtaacgtctcatcctattgacagagacccccgtcactccatgcgtgtcatggcgtcagccatggcggtgtatggtggtgttgtgccttatcgtagctggcatggggcaatagtgccattcgtgtccccacgtcagtcgggtacagacgtgtggcttccatgtgcatgacagggggtcatgtcatttgggcccacaggtgtactggcccatgttacgagcctttgctccttcgcctcgcaagtccatttgtctgcctcgctgagttgcttagcggggactggtcgtccttcccgcctcgtagggttgcttggcatgagttggtcggcctcgctgagttgctcgacgggagttattagtcgacttgcccgcctcacagggttgctcggcgagagttagtctgcctaccagcct

SEQ ID NO: 65696 - DNA, 375 bp, Zea Mays
gtttgttctaacttttcaacagattacatagaatctaaagattacaggagggtaagaacttaggaaaatgtttctctaagaagtctagagtctcccaagtagcttcttcttcggtgtgttggttccactgtaccttataaaacttgagagtcctttttcgagtaattctgtccttctgattcaaaactcgaaggggatgttccgagtaggttaaatccgattccaaattaacatcacctacatccatagttcgattaggaatcggaagacacttctttaactgagatacatggaacacattatgcaccacgagcagtgattctggcaatcgaagtctatatgcaacttgcccacatcgctcatgaatagggaatg

SEQ ID NO: 65697 - DNA, 566 bp, Zea Mays
ctttagcaaaatggcatggcgaagaggtatctgttgatatgggccgtcaggtctaagatcaagggttaggattagatcctacataaaatgaatcggtatgcaatcggggtcattggatttctaatagacgcctaggattttaaaatactcagctcaactcatgcccatcagatcagaatcgaacggcgcctgccacattcgaccaaatcactacgtttcatctaatcctagccccacgtcacgcgatcgacggctcacactatcccttcctcctcactggcgacagacacggcgaacacgtcctcgcacggcggcggaatcaccggaggtcgcaaatccggccatcccgagcgtcatgcaccaattcacacggccttcgtgaaattgacgacccttcgatcctattcctcccataaatttctttcgccaaccaacacagacctcggtccacgacacagtcaaactcatggagggcaatcactccgatgagcaattaccggcgcccaaggtcactacttccaaatccgaatgctcctacacgatgcagaattaatgacgcgcacgct

SEQ ID NO: 65698 - DNA, 450 bp, Zea Mays
atgggtgtatctaatcgcagtcgttcattacagatcaacggcaccaagcccttcttccacctccagcagaggcctagcggcgtttttgccaccgcggcaaaaacctcgttggcaacaccaggggcgccgcacagatgacttgtttcgcgaacaaatgagggttacagctagggcggaataaggcaaactcggttgatggcttgttaccggattttgcagtgtggagatccccggccacgatggtgtgcggctttgtggccgttgtcggcgtcggtgaagaattgtggcagcaccaaaggcttctcccacccacaagtgccacaacgatctccgtcgtgccccgagaaagcccactgacccgagcttgcgccccgaacaatgacggaacacgatttccatggcgccaatggctcatggttctctttgctcacctatggtgacaaagtggcg

SEQ ID NO: 65699 - DNA, 359 bp, Zea Mays
atccaattcatgttgcgcgatgcgtgtacgaatgcgaaatcggatgactatttcttaccagcgatcgagggacggcgaggtaggtccacgacgcggttgaagtcgcggcggtttgcgcactccaatgagcaattgccgacgacgcagttgattcaatgtcgcgttcggtccccgacgagcatcaacatcgccaaacgaagtccttggactccttcccggagcacgagcgacgctgacggctcaaggcgatgacggcgggcccggcactggtagcggcggtggttctggggagctaagctcgcgtgaggaggtagaaggaggggataacggttcacgggtcgcgcatgggggactacagg

SEQ ID NO: 65700 - DNA, 466 bp, Zea Mays
ggacgccgaaaatcggccctggagaccaagccatgttgtcttcaggaaatcaaccattaagcaagggcaaaatgatgcaatgagaggaaggtactaacgtgatatctctattgtgagggctggaggggaaagtaatgtccctctgccagaagctgataggtgatagaagctttatgaaggcaaggcttcggttccccttggataagttgctggtcgaagttttaaagactttcgaaatttacattcattaggttacccccgaagctatcatcaaggtgggggtctttatttgggccatgaggagccaggggctagaaccaaatgcaaaatgcttctacaacatgtatgagctgtcatatgagagaaaggccattgggaaagaacaatatcactacaacttcggttgctacagcttcgtgcctcgctctgaggtgagctactcggttcctacatttcgaaagagatg

SEQ ID NO: 65701 - DNA, 785 bp, Zea Mays
ggtcctttcaccaagtaaatgtcttatgattaagtccctgttctttgcgattaggcccgtgaagctagttgatcttttaccatttgaccctacaatagtattttgtataaacccctgtcttggtctttaagtactacctcgagccccactaccgatcccacaccttagcatcctctcacgtgccctcctgcgcctagcccacacttgcagttgccaccgatgtcaggcactctcggtgcttccccgtccactacaaggtcacatttgtgatccctaaagctcactgcagcttccctgacctcccccgagctctcctcatccgttgttcagctctgtcgcaccaccctaacttcatcgaagctctctcgaccattgttcttcatcgctagctgctctcaccccatctaccccctcggtgaggcctcaggtatgctcactttctccctagctatctcctaagcccttcctcggttgttttggcctcctagagtgtcgttctggccaactccagcgagagtcctgccgtgcgctgccgcacgccacccctcaccccgtcgtcggccctcggctcatagagacctacgcgtgaagctgagccaaaaccccttggccgttgatatttgatcgtggggtcagtttcatttaaacccgtgttggctcgattgatttaatcttggccctcatatgttgatcggatagtcactagtggttggtaccccttgatctaagcctcatgagcatttttgttaatgagccttgattctttcagatattcgcaaataggc

SEQ ID NO: 65702 - DNA, 586 bp, Zea Mays
cttgttgcggtttgccaatgcacgaatatcaaaccatctattcatgttaacctgtaaattctaaaattgttatgattgtagttgttgttggccatgttgttttccatcaatgtctaatacagtgtatcttgtaaatttccctgtttaataaatatggggtctatgtcctgtataaaccgatttatggttgaaagctggaataccaaagctaatttatttacatcaaaagtaaagtacacacctctaacttttgtcgcacaaaaccacgggcagcagaaacaagggtaaactccaaaggggcaaacttgccatttcatgctgaaatcgacctttcatacgaaaactacggatccacccctccctatgcagcagttgtaagttgtaacttgtacagatggcttatcccaaccaacagtcaggggtaaacccgtcacttcactcctcgcccacggagtcctccgtccccctcccaacaagggcaacgacacagtgacccaccgctcgggcccacctgtcaacgtcgtccttcccctgcccccacaccgcctaccacgtactctacgggcccacacaccgtccacgtcac

SEQ ID NO: 65703 - DNA, 566 bp, Zea Mays
aatagcacaacaagtgtgttaatcgaagtcttttattaaaaagacacttcgtgcaaaagtcgcctaagggtgcaccagaacagcacaagtacgtcaatctacactccgcgcaaaagacacccacgggtgtagccggattagcacaggcgtgcggatacggccaacagggcacattacaatacaaattacagttacatacacacggcgagggcatcatatattacattggctcaaccttcgagatgatacccatctccctgtaattgaacagcattatcctcaattcctcaccctcaaaaagatttcgcagatccccctcacctatgctcgccccaatcggcgaagacaacaattctcgtttaccaacccggtctacccgaagacggccacgctccatccccatatgacggcgcctaccacttcgcgaaaactcacccacactgtgtttcgacaccacccttcgccgcctatactcagtactcgcactaggaagatccccgacaccctccacacgcggcgaagactccgctgcggccacatctaacatagcaaaataatccaagcct

SEQ ID NO: 65704 - DNA, 624 bp, Zea Mays
gtgttgccaactgtttcatcggtccattcttgcacttcctcttccgctttgggtgccacctgcatttaaggcaacaagattatggcaacaacatagatcaaatacaacagaatatattatgttatttgttaccttgttttgggactccataatcacggtcctaaaataggtgttatcaacctttcgcgggatgctaatggcatgacaagcctttgcccaagccctactaagaatctctttcgagctccttcccttacttgtccagggaccagtattgccttggtccagaggcttgagcaagattgtagtctctaacacgctaaggtacttgttccctactccttcccatcatcctatcaagtggcccttgagataccctctagctggaggatccaccacccatgtcataacttccaccagccctctgactacattcgtgctccacatgtgattgatttagagccacttaaggttcatcctcgtactgatcgtcccaaaaatgggttcatgctgcctcatctgccctcagccgttgcctgaacctagacctcttcttttcctttgtcttatctatgtcaagttggaagtatgcctttatgtaggagaaatagagggacatttctt

SEQ ID NO: 65705 - DNA, 289 bp, Zea Mays
taggaagcaacgtaaggaaggtgatgatcttgtgaccattgatttcccaatcgacggccaggactagaagctggataaccttttgccggttaaatccatgtcgcagaaattagatcggacgatccataggcaatcaaacttcattgaatctgtgacgtagatcttggaatgaacggctctaggtgcgtaccgattcaaacccttcgtgatttaatctggtgtgtccggtgttgatcggacggccctgggatcccgataccccttcgtcgttacaaattcacaaaagaga

SEQ ID NO: 65706 - DNA, 482 bp, Zea Mays
ccgaggtctaactcataaattgtcttaagactcagtttgtatccgaatcggacggtgggttaatttgtaaaaattacggggtctctttagcaaataggccagggcgaaggggtatcgggctatttgggccgttggatctcgcgcggacggagcagattagatcacatccatatccaagcggtatgcactggagaccgccggatctgtgatcgatgggcatgatttgattaaacacaggccacacaaccgtcgattcacggcccagatttaatgagcgaaggggtacgctcatacctaatcctatccgttcgctgcggcatcgatggtctggatcaaaaattgtcacgatctaatcctagccacacctcggtcgatcaacggtccaagggcttctcctacctcccggtagccatggacgagggagcagtggccggcgacggcgctccctggccggacctccctcccccacacacggctgcgca

SEQ ID NO: 65707 - DNA, 446 bp, Zea Mays
ctttgataaccccaccattgctgaaggactctgcagcttcggttgctgctcggtcctagaactccctggttctgatatctctagctgaacggtggtagtttcgactgccgcgacatgtattatctccaaggttgagagggtagcttcggcagattcaacagtttccatcttttatgtaacatgcgatgtagcagccctctctaaggaatacgacttcggttgatgagttaaaaccttagtcattttcagcttcgacgtggcggaagaggacttagttgtgattttcctctttgttccttagtttcatacgagaaaacagtagtcgggatagataaattcaattacatcaaaaactgtgttcaaccttctctttccacaaacaccaaaggcagtactcatggcttcgtccttggccttcaaataagcccccaacaattcatcactgg

SEQ ID NO: 65708 - DNA, 400 bp, Zea Mays
cccagggaaggcaaatgttgtggtagatgccttgagcagaaaggcccagtgcaattgcatgagcatggatgtgggagttaccaccctgtgtgatgagttatgcagattgaacctagaagttgtttcttcgggtgacctaagctatatctcggtggagcccacgttgcaagagcagatcatcagggcacaggttgaggataagggtgttcagattatcaaagatatgatcaagcaaaaggcagaaaaatacaagtgtttccgacaggacggcaagggaattctatggtttggagatcgattggttgttcccaaggaccctgagctcagaaagcaaatactggatgaagctcacctttccaaattctctatgcaccctggtagcaacaagatgtaccatgat

SEQ ID NO: 65709 - DNA, 464 bp, Zea Mays
cctgaccatttgttgccttctcaattctcatgcatgtgttgcgttctcatgggtgtgtgccgactcatcttgtttccgcaggcccttccgcgacttacgaaccgccagaaactcgtgcagatggttgaccctgccctgaaaggccagtttgccctcaaggatctgatccaggtcgtcctttctaacgctacttactctcccgtccattactcatttactctagtgtaatcaagccgctcgctattcaattactacacaccaacaagtaagtaagtacatctttaataaccgacacgggagggtgcaggtggccgccatcgcggcgatgtgcgtgcagacgaaggcggagtacaggccgctgatgacggacgtggtgcagtcgctgatccccatcgccaagaccaccccggcgatgtcctgctcctccacgccgctcagaccggccctgcagcacgtcatcttca

SEQ ID NO: 65710 - DNA, 393 bp, Zea Mays
aaaaaggtaacaaacaatgtgaaccctacaactaactctcagggtggtggtggtggtggaatacaaattatgaagcgtcttaccccgcccttacaatgttcttaccagcactgcaggcggaaaacggtgaccggtgtgactgtccaacgagcgtgggtgtgattgcaaaggagtacctgttgtgctcgagagaaagctgtagttctgggaaggctgactaaatatatatatgtggcacacaagtcagcaacagatagcaatgctgaataagtgttccaagtactcgtcctagttgctggcctagaaaatgtaatagaacagttggaccaaggcacaagaaaggaggtacaagtatctaggtgcagcaagaaaacaggcttggggcaaaataat

SEQ ID NO: 65711 - DNA, 409 bp, Zea Mays
gcagggaacaaaactttgaaattagtattctttctatgtgattggtttgacagcactaatgggattagacaaagtcaatatggcataactgaagtaaagcacaaggaatgactttgtggccatgataattttatccttgcacaccagtgcgagcaggtctactatatgtcgtacccaaatccgaagtttaaagcatggtgggtagttcataaggtgaaccctagagaacgtttacatactccttgcactgctggttatcaattcgaagacgaacgggcggatgatgtttatcaagaagaagaattgccaaccacttttactatcgatgagggtgttgcattgaactcactagtcggagaccgtaacgatctcactgctgatgagtgtgttgcaccaaaacgaaaacgaa

SEQ ID NO: 65712 - DNA, 685 bp, Zea Mays
aaaacaccaaaatgaaagggagagatgactggttggtacaacccttcctccttatttatggagggtactttcacattaccaatatacacctagatgcatagagcttaccactcagccgagggcaaaataaatcaactttctcatgatctaatggcagtgctcccttcaagaagttgcttcgtattgatgcaaccttcacgatagctctatgtgtcggccctaattttcttcgaaactgcattgccggatttcaaggccaaacacgtcaaaccttggttgtgtggttttgaggatcaacgactaaacctccgcaggtagcatactttatacgtgtcctccacatccttgtacaagacacgtgtgtcgtcggtccccaaacacgttagcaacatgatttactctatcatgtcctcgcacttactaatgtcactcggcttatctggtcccttaatcaaatacatcacttgttcttcatcgctcttggttcatcggtatgaacttgcatgcccttcaccttcgtcatcaactattgtctctagacttcgcacctgcgtatcataagccaagagacattttgcacaaactcacatctcggttagtctacatgactcaacacaagacgctactccgttgcacttatcataaatttgaatataagggcatatatcgatcttgtgttcccaac

SEQ ID NO: 65713 - DNA, 972 bp, Zea Mays
gcgtggtgcaacaaagcgatggacaaggccatccgtattggccggatcctaatgaagaggcctggcgttgtggtgcctgatgacattgtggctgacgtgcttgctgcgtcggctacttcgagtaatccttctacttccgatgatcttgcagataaggttcctcgcgaggatgctccagcacagtaaccatggagtgaaagcaaacattaatttgttcaaacagaaggcattttttgttgagatgacatttttctaattgatcgtgctgctctgacttaaggcatttccgacctaaaccgattgctgcgctagtagggtataatggtcaccctaagtatgtgtgagcatgttgcaccgacttaaggtgttttcgacttaagccgattgctctattagcagggtataacaatcacccttagtcatgtatgcatgagcatgtcacaccgacttatggcgtttccgattttggccgattgctccgttagtagggtttagtaatcacccttagtcatgtatgtgtgatcatgttgcaccgacttaaggcatttctgacttaagtcaattgctttgttaataggctatagtaatcacccttagtcatgtatgcgtgagcatgccgcaccgacttaaggcgttttcgacttaagccgattgctctgttagtagggtatagtaatcacccttagtcttgtatgcgtgagcatgtcgcaccaacttaaggtgtttccgacttaagtcgattgctctgttagtagtggtatagtgatcacccttagtcatgtatgcaagctgcatcggtttcaggcatttctgacttaagttgattgctatttgagagtttgtttgcaagtggacgaacacagaagctttattgataatgagatctcttgtttacaatgtgtagcttgccgactggagtttatggtatcactacgggtagaatctcctgagatgctcaatattccatgagtt

SEQ ID NO: 65714 - DNA, 784 bp, Zea Mays
tgctacccctcccattgcaactaagaatgtcttgaacaaccattcatatgattcatttttctcatttactaaaaatgcaccaccaataaatgtactttgtaaatgatgattgactccagtaaacggtgcaaaaatcatgtcatattggttggtgctatatgtagaatcaaaggataccaaatcacaaaaatgagtgtagttctttctactcatagcatctgcccaaaaaacatacaccaatctgccttgtttgtccacatcaaaatcatagaaaaatgctggattgattttcttcttcctctctaattgtgcaataaacatcccagcatctgcatttgtaattttctttctaaggtcacgatagtagttttgcaagtccctcaaagtgcacccaacattatcaaatcctccctcgctaacatgtagtagcctatatgcttgtgaggtgcccatgcttgctgtatggcaattgtaaagagtgttctttgcacgttcgctaacactacagttcgatctgagcaaatgacgcttatctggtgacacaagaccatgattgtgctcttcaatcattgcctctatagtgtatcgattaccactagatagtttcacatagatgtatgcgtcacaaccgcatcttgtttcaaaaaggttgtgtgttttcttaccaccagagtgttgaatattatcattgcatttgttcttcctaaatccttgccttgagcacaagaaacgcttccagtaaacaataccgttctctaatctctgctgaccaacatgaactgag

SEQ ID NO: 65715 - DNA, 519 bp, Zea Mays
ttttccgcgccgccgtgagcttctcaccatggccagccatctataggttggttcatgcctctctgcttagtgttctagcatcccttaagtctcctgttgctcgtagacctgattgattgaactagactgcgttgagtcacctagaacacctcagttttccctcgggtctcgccgtcgtcgtgaacagatgaactctgggtcggattcgtgaaattaagggtcggattaggatcgccacgagtggaattaggtgtcgaccgagttagggcaatagtcgttgcacatcctggctggtacaagttcgccggagggcacgctcatctccgttcaccgtcgtggaccgagtgcggtgaagaaatagaagtgcaagggcttaagtgcgaatgtcagagaaacatgtgaatagtgtcgcaacttctttacgagtttttcaaatcgacaggggtctctgcgcaaggttgccaacgcgggcgcacgtgtttcctccgttctcgggctggcttgggctggattcagccc

SEQ ID NO: 65716 - DNA, 347 bp, Zea Mays
ccgtcgatataattcatcttggcctttgcatgcaatattaccgatctaaacgaactcaacattatattcatttgctaatagatactccctccgtttcaaataataggacgtttgaacctttttttacatacatagatcttgctatatgtacttagatggtgacacaatccatctgattagtttgcccgcatcgctttgtctaaaatcaatactactacatacattgacttaaatttgtctaagcgtacgtatgttcatttggttgcttccaatgcccgtagagaaggcgcgtatcacgcgagtggatgcaaaacaagccaattgcctgcatccgctcgtacccaaaa

SEQ ID NO: 65717 - DNA, 311 bp, Zea Mays
caggtttcttgtatgtgtccccttggttataaaagggagggcacataacgttgcaagcgatagactacctcggagaccatcggacacacgtagactcccattcctcatgcaatacaactcacaatggatgtagagtattacgctccagcggcccaaaccacactaacccttgtgctctcgagttcatccaactggtcaggcaaatccctaggcttcccccccagttcacaagattaagctagtgcattccgccacccggctggagttttctcttcaacacacccaaaccctactaaaatgttatatacact

SEQ ID NO: 65718 - DNA, 697 bp, Zea Mays
acattaactaacatccttccaagtagatgctactatttttaacttgaagttttgaaggttctttggcctgtttgtcctcccagttgatcccaccaaattggttctagtggtaggaattgaaagtcgcctagaggagggtgaataggtgaaacctgaaaattataaactttgaacacaaactttacccggggttaaagcgtagcacatttcttgcctcacattgctccacgtcactcgcctcttctcagccgcaagatgcagatccaacggccacgatgccaagaaagtaagacatctggccttctctacaggacagtcacctactctagagcccaaacatcacagattttctagaaaaaatctcatcgccagctcctaattttgttcatttatgagatctagatgtatgttgctttatttgcagtctacacgaaggggacgaggagtttagtttgtggtggtcatatgggacattgtggcccttctgagtctatatgggcctaattggtggggtgggtaagctgtagcctggctagggggagtatacatgatggtatggggttgtatacagttgtgcaactatgtgtgtttggtttgttgttgaatgtggtctaaatatcttggtactatgtttggttctcatgccttgcctggtggctatcccgtgaacgtgtttggtaagatgcacataaacatg

SEQ ID NO: 65719 - DNA, 353 bp, Zea Mays
ggacttggattattttgcggcgttggatgtggctgcagcagagccttcgccgcacgtggagggttccgaggaactcccgggcgcgagtactgggtataggtggcggagggcggtggcgaagcggagagtgagtgaattgtcgcgaagtggtaggcgttatcgaagcgaggtggagaggggtcatcttcgcgtggatgggactggtatgcgagaattgttgtcctcgccgattggggtgagtgtgggtgagggggagctgcgaaatctgtttgagggtgaggaactgaggataatgctattcaactacagggagattggtatcatcccgaaggttgagccaatgtaatatgtga

SEQ ID NO: 65720 - DNA, 422 bp, Zea Mays
gtattgcttaagttagagggagagaaagagagagagtcattccatgagccagtagcatgttgactctaagtgttaatgacaaatgagtaatcttgttaagaaaggtggttgtgctcaaagggtgagggctagaaggggtgaaatggcattaaaggtaattaggagctccaaaaccctaaatagtgccctatggaggattttgagttctaaccactttttgcaaaaagtgcaagtggcaaaatagtagagttttgagagcttaatacttttcccatttggagatttccaagtattgtggtgaaaattggagaaaatagcaaaagttcacaagtgctcaagaattggaattctaagaaaaagtgacattgagcaaagtttgaactcttgtagcttttgatccatgagtgctttgcaataagtca

SEQ ID NO: 65721 - DNA, 392 bp, Zea Mays
aaaaagaacgctaaagatttaaaggcttgcaacttggcgatttagatgtgagcggccggtaccacttgctatggaccagctagccaatacgcaaatgtccagctaagactgaagtgtactctacctttgtaaagggagaacagatctcaacatctttggagagcagacgctccaagcaacacttgggaaataagaacagagttcgcccttgagactggctgggatataccaagttgttgcttttatagtttgtggaaccgtcaaggaacgactggcagcgagcgtgcagcactacacctttgggcgcggctcagttgggagaggtgctggatcagaaaccaacggcgacgatcttcatcgatccagcgtcagttctgtcgcctcgaactgaa

SEQ ID NO: 65722 - DNA, 1825 bp, Zea Mays
tgactgtacttggtgaacttgtccacaattaccaggataccgtcagcattgcctgacttgggtaaaccggaaataaaatccattgatattgtctgccaggctgctgttggaactgccaatggttgcaagagccctgggtaccgtgcacggtctggtttcacctgaagacagatggaacatgaactgacgaagtcagtaacggacttgttgagtccccgccaacagaagagttgtttgatgcggcgcgtggtgactgggataccgctgtgaccacccacgacgctggtatggaaggcgccgataatggactgctgggtgggcaagtgagaaccaacaaggattttacccttgtggcggaggataccgtgctgtagggtgtactcaggaactgctgccgggttgctggcgagttgcaccaacaattcttgagccttggggtcctctttatagctgtcctgaatgctggaaagcccatgtaggaatgggcaaagaaatggccaacaattcagaattaggcgaatgggggcgccgggatagagcatcggcatctttgttctcggatccctgtttgtacacgattttgtactgtaatcccaacaacttggtgaacactctttgctaccacggagtgtgcagacattgatcagagaggtgggcaaggctgcgttgatcagttttcacaataaattctccaaactgcaggaactggcgccactgttggactgctaagagaatggagaggtattccttctcgtaggtggataatcccctggttttaggacccaaagccttgctgacataggtgatggagtggctgttttgcatgaggactgcacccacactggacccgctggcatcggtttcaatacaaaacggctgagaaaaatccgggagcgccagcaccggtgatgactggagggctgtcttcagcgtgttgaaggccgaggtatgcacttgagtccagagaaaaactgcagatttcttgagcagatctgtgaggggacggctgataactccgaaattacggacgaactttcggtagtaccctgcgagaccgaggaaactgcgaagttccttgactgagttgggaactggccatgatacgatggtagaaatcttggttgggtcggtggcaataccgttagagctgattaaatgtcccaggtacgttgtctgccgttgagcaaaggagcatttgcttaatttgattttccagtgttcagctgctagcaaggacaggacttgatgcaagtggagcagatgtgattggtaatccgtgctgtagacctggatatcgtcgaagaagacgagaacacaccgacggagaaggggcttgagtgtggcgttcatagcgccctggaatgtcgctggggcacccgtgagtccaaaggcaagcactctgaattcgaaatggccctcgtgagtagagaatgttgtcttgtgttcttcccccgattgaagcatgatctggtggaactcggaccataaatccagttttgtgaaccaactagcgcctgctaatttttgaaagatatcctcgataactgggattggaaattgcctcttgaccgtcattgcgttgaggtgacgaaaatcaacacagaatcgctaggaattatctttcttcttgaccactaagacaggtgagttgaacttgcttgtactgtgctgaatgatgccagaagacagcatggcttgcacttgtgtttcaatctcagttttcagtgtaggagggtaacggtatggcccgatagacactggtctggctcccgaaataagtggaatggcatggtcacaggctcgactggggggtagcccttcgggt

SEQ ID NO: 65723 - DNA, 618 bp, Zea Mays
gtacaacttatcaccctcaaactgatggacagatcgaaaggactaatcaagtattggaagacatgttgagagcttgtgcccttcagcatggtagtagtagagacaagagtctaccttatgctgagttctcatataataataattactaggccagtctgaagatgttaccgtttgagactctatatggcaggaagtgcaggactcctctattttggaccagactagaggaagacagttctttgggcctgaacttattcaagaggcagaagaacaagtccgtataatttgagagaatttgagggtagctcaaaccaggcaaaggagctatgttgataatagaaggagaccactggaatttgaggaaggtgatcatgtgtatctcaagatgtcaccacttcgtggaatgaagagatttaaagtcaagggcaaattgtcccctcgttttattggaccattcagagtttttaggcgagttggagagatggcctatcaactcgagctacctgataatctatctgatgtgcataatgtattccatgtgtctcaacttaagaggtgtctccgtgtccctaaggaacaattaccaatggaggaactcagtgttcaggatgatttgac

SEQ ID NO: 65724 - DNA, 708 bp, Zea Mays
cggagatactcaacgaccagagccctagctcggccaacacctaattccaccctcgacaactctaatctctccattaattacacgaatccagcccgaaatatctctgtccacaacgacggtgaaaatcagagacaatccgaggtgttcatgacgatttggtgtggtctagctcaatcaaccgagcctacaagcaacaggagacctaagggatgctaaaacatccaacaaagaagcatgaaccaacctgaggagggctggccacgatgagagactctcggcggcgcagaaaacacgatttgggggaaactccaaattgaggagctatggtgaacgattggaggcgtaataacctaacggagctcactagggcagcaatttatagaatctatcggcggtggcgtccaatttgaagtaggcgcgctggcggccagagagaggggaagttcactggtgcaagctgtcgtggctttcaccggggcagtgtctcaggcgatgaacaagctatctaaggtggtttactgtgatgtggtaacgcttctcagtacgtggcatccgggcggcaagcggtagaatccggcgaagtcatctggacaggccgctaggcaagtgagtacagtgaaccatctagtgaccgggtctgagccaatccgggcgccaagatcttttactcccctcagttatccactttgcattgagcacgaatcacgg

SEQ ID NO: 65725 - DNA, 313 bp, Zea Mays
gttttgacctgacccagttaacaattaataaatggtccaaatccctagctggcattccacgcggccttgcacaagctaaatgacaccttatactgcatcttcattcccacacatcttcttcaagatttgatgaaggattcctgaaccccccttttcttaagtttttaataaagtgtcatggtggtgggaaagaaacacattctgaaccttgtatacatgtagcatacatgtcaacaacatgctaatgtggagtctaaatgcaccatgatttaacttgaatcaggaacatttcatgtcatacctctcagttagc

SEQ ID NO: 65726 - DNA, 335 bp, Zea Mays
ttagctaactacatatcatcgagcgcacaacgttaacaccactaaaagacgacaaacattttgtatatttacacaacacaaatacgaccccataagttcaagcgtttatttaatttgctacggcttttcattagttcttctatttatcacacaaaagcatccaacacaagtttaaccgatgacataggcatcaatgtctatggaaattctatatcacaatcaactaaagaagaaacatataaaacatgacacacatgcattattacgcttagtcatggcaagtctatattaatttagtgctaaccaaccatttttagccaaaagggtgaactaac

SEQ ID NO: 65727 - DNA, 768 bp, Zea Mays
cgagaacccagccaccaccaacaggaaccgtagagaggagagagaagtacgccgccaacgctgttcttcgcttaccaaggtcgctcggcgtctgcggataattcgtggggtttgggcgcatcgtcaaggcgtgttgaagctgcggctaccagcgaatcagcgtggttggctactgaaccttggcgatttctcgccggtcgccatggagccgccgtgtcacatgggtggcatcgcggtcaccccgatacgtggtatgatgccttctctgaggtttgcgcttgtatgaatcacgttttgctcgattcctagtcatgattacctcaccaatgcggctctcaaagttttctggtggtcctccgccgcatgctggggcggcgccgctcggcctggctcaaggatggaggaagacgggtccctggccataggattgagatggacggctgggattaaaagtagcatttatcccttcgcgtattgaatccaagcctttggcgtctgatcgtgtggatggggttggagatcgtctggaaccgtggatgccgcatccaaaggttgtgggtgtttcctgttcactttaggggggatctaatcccgtcggttgatgggcgatcggacggctctgggtccccggtaccccttcgccgtgtaattattgcagaagagcccctgcacttagtaaaaatcaacccgccatccatctctggatggatcctgagtcttggaaattttgcaagttaacccctgcgttcctctgcttttgatgcccag

SEQ ID NO: 65728 - DNA, 520 bp, Zea Mays
gaattttttatgaaaaaagctcccgccaatgtgttgttttgtggtgaaaaaatggtgggaagagttgtttctaaaagtggcgccgaaagcaccgtggagggctggaggctgtgaaccgtttcgtgtactcaacagtaattgcaattaatacttcacgctagatcacaggggtacatgcgtctattctcttggctggtaatatgtctgagaaaagctaaaacgccagttaaacttggacggagggagtatattatatttaatgtggtattcgactttgtgctcaatcatcccttctcgaggttactatcataccagaagtaggggttcatatgtcatctttatatttggacactaaggcctgagccacctagctaaatttaattggtatcaagtgtagccctctatacttgattgtattttaggatagactttgcatgtgcatgtgtggctacatgatcgatgcatgcactatatagtgatctagagtgtcttgcatcctaagtcatgtgtcaacgtattt

SEQ ID NO: 65729 - DNA, 645 bp, Zea Mays
aaactaaaaaaataatctgctttttaacaagttaaaagtgttcccaccttcagactattatagacaaggctatctgtgagtttgtccttcgtcattgcagacaaacgtaactcaagcttcggatatcctatactgcctgccatctcccgatagacatcaatttctttattgtcaggcaaacaataaaggaagtcatcctcatcatccccaccatacaccaatgaccctcgagggtactgcagattcttggcgtaatgttgcgcttcggcaatttgctctttcgataatttcttccctaaagcatgacacactataaattctaatacctcagtagatgctccaggggcagggaactcagattcttcggtagcacactcttttcttaacaatgatggtccctcagcagcctccaatggccttgcttcagcaccctcctcagcggccccgaaggtctggcttcggtgggggttgagggcctagcctcaatcgcagcctgcgttgtgccagcatcgacagatccctttacaatcttctcctctgcagcatgcgctgaggtaggagttgacaccttcaccgattctataacagtgtccaatacactagctcttcggccgattccaccctagcaatcttttgtaccttcgg

SEQ ID NO: 65730 - DNA, 600 bp, Zea Mays
gtgaatggtgcggtctagccatggcctccgtcgcgggggacgcgtgcgcgtcgccgtcttcgccccccgaggtgggtgataacctagatgccgtcggtttctggtgaacggtggagattaaaacgtgcgacggattgttatgggccgttgatctctacgtggacgggctggattggaaagggaataacgattcacgtgtgttgatcgtggctgtcgatctgtgattccatggtccctgtcccataccccttcgtgatctaatctgaactcttcgttttggatccagcgacgggatcacgaccgtgtgtaagccgcctcgccaatttgcaaatgagcccctgggattttggtaaatcaacccaccgtccgtactgagtatagaaacattacatataggtctgagttcttctgatttagtccctggattccttaaaagctcaaaccatggtccttaagctttaataattcatataaataaatctagaaaacggtttttagtagaagaataaatccagaaacttgtgtaatccatatctcctatgttttaaccccgatttgacccgttccaattgcgttagcttcgtaataaaatttcctacg

SEQ ID NO: 65731 - DNA, 374 bp, Zea Mays
gctattgtctgaacagaaatatgcatattgaggtagggcatagattgctaattacatggtagcccatatgaacagaactaaagatgtgtatcctgaaggcatgcatgtgtacgaaaggataatgcatttgatctgtgattttgtgctgcaacaatttataaaaggcaaatgcggatttggtttgttattatccaaagccaatgtgcgtagtgaccgcatgaacttggatatttcttgtgtaccatgatgaagatatatgtatgtgtgtagataaaatcaatgtgagtagcaaactcagtaacttagatattcattgcatatcatgatggagatacacgtgtgtatatagatgaatgtatctatggaacatgaac

SEQ ID NO: 65732 - DNA, 301 bp, Zea Mays
caacaaatgattattgttcacatgcatgattattcaattttaaataaaagagggttttagtctatccaatctcctctatttcctggctctcaaataagccctaaactcctcacaattattctagctacaattccccgcgcagtaggttccatcatctctaacccaactttagcatttgcttcagtcctcggatgaagtagagaaaccagcaaatagctagttgttagctgtgttatccgctaagagacaccagcaaatcagcaaacatcaccttagaatagtaagagaattttaatctctt

SEQ ID NO: 65733 - DNA, 509 bp, Zea Mays
gacgtaaaataatcatcgctggaggctatggggatagggtcttttttatgccactcaccctcggtcaccttcagcatccgcgacgatgatttctggaggtcacgcaagtcatgacgtcaccaggctcagtgcatgtctccgttaattccttaataaaactctctgagctcgcaacctcaaatgtcttcgtcgtacctttcacctcaacttcaactttttgcttcttcctcgttgccgtaatcacagccttccccttcgagcagccttctcctacccgcgtcgccacctttttcttccctcgttcatccccagcttcagcagattcctcctcaggatacgggccatagcgaaggccattcacctcaaacacacggtttaacctgacatttgaacctcaaatatcccaacttatcgtcatctctgtccttaccgagtactttccaacaattatcaccgcctccgactccacttctctaacgaaggcggttgcatctcgcccccgtagatcg

SEQ ID NO: 65734 - DNA, 726 bp, Zea Mays
ccgagcgtcagatcagcatccccgatcccaggcgagcctagtccatgccctaattagactaatctaacctaaaatccccttgcccacgacaacgacgaaaaccgaggacgggctaaggtgttctcgatgatccagtgcggtagcattcaattggttaggtgatgagcaacgttaatagtcaaggatgcttaaacacgacacagaaggggatgaacggacctgaggatggttggccacggtggggtgtctcacggcgacgttgcagaccgatttgggggaaaatccaaatttgcgggctacggtggctaatcatgggcgaggagcggtgctttggcttcgtaaaaagttagcggagcagaccgaacactcaatttatagagggtgacctcgagtacgacgaatttgaacgaagaagtgctcgcggtgatgggagaatgagtcaccggagcaactatcgtggcactcactgatacaacggctcgaggatggtaattctaagcttgccacgatcatagctatgtggtgaaagggtcacgatgtggcgcaatcgcgataaacggtgatcaccacgacgatgaccgtccggccacgtcgttgcgcaagtgggtacggcgaactgagcagtaacattgcccaagctcatccccgtgccgaaatcttttaccgcaagtcgttatccgcgtgccacagagcacgaatcgcacggccggcgtgaatcacggcgtg

SEQ ID NO: 65735 - DNA, 484 bp, Zea Mays
acttcgagctttggaaatcccatacttttagccatctccaggcagacagatatctccttgttgttcgggagacagtataagaaatcatcttcgtctgtaccattgaacaccaaggccccttttgggtatttcagtttttgggcataatgattggcctctgcaatccccccttcagataacttctttccagaagcatgacgaataataaaatccagattctcggatagagcttcgggatcaggagatttagcttcttcggctatttctttctctgtagttatgccaaatcctagagattctcattcagccccttcctcagttgcagcgggcttcatttcaacagacactggaggcgcagcttcggctttagcctcggccgtagcagcttcgacaactttcttcacaggagcaggagttaatgcttttgtggtttctatgacagcgtctatcacgcttgccattctccttctcttgggagttgtgg

SEQ ID NO: 65736 - DNA, 451 bp, Zea Mays
tatttcttaagttaatttgatgctcatgcttactttgattcacatgaaataatggttcttgggttggtatttgagagaaaccctaggtgacactggggtgtcacagctgtgtatagcgttaccaacttctctctggtactcggcccccctgggatgtaggctcgacgtgtcgaggctgaatactagtacaccaaagaaaaagttggtggtccggtccctagggggtagtctctacagtttgagactacctacctctggacggggacctagacctgcacacagcttcggccttgaaatgttagtagcacacccatagaacccatcgtctggtatctgccatcctttgattcatgcaacaggacctgcagggtttaggctgggaagccaagccttatgtccagacctacagaatcatagccccaaatactagggtacccgttgcagagtggtg

SEQ ID NO: 65737 - DNA, 304 bp, Zea Mays
ttcggaatgactaggctcctgtgcaacatgtagctagggtcatcatgccagctggccggagtagaatttagggtggtggctgagcaaatcagcaccagggacttggtgcaggaatacctggccaaccggacgtatccaacgtcaagtggctgggggatgccgaagatgaaggaaacaaagaagaaacatgaacttgttcaattatcttatcatttcaaatttgaaaaacagttcaaggagtcttgccaagaatggctagaaatgattgaaactatgtgcaatgaaatattgggaaactatacca

SEQ ID NO: 65738 - DNA, 490 bp, Zea Mays
ctttactattacatttttgtgggagggtctaccatattagtgtgtcattggacccttgtgtgaggcctaactattgcactggtagaatctagcctttacctaaccaataccatcaaatatgactcggtgtcgtcgcaacgcacgggcaattaactagtatacttctaagcctccaataatcgatgctcatcctcctagcactgatgaaggaccttccatcgatgctctccctccacaatatttcacttatctgtatccttctccgtatctatatgggtatccatacgctcttcctccatatggcttgtatggtgctcctcctccatatgttccttcttacggtgctcatcccacatatgattattttgcccccttatcatgatcccttaggaacgttagggccacaaaacagccacaacgatgcggtctccatctagtccacgtactctggtagattgcaattccaacagtgacatgactggatcaagac

SEQ ID NO: 65739 - DNA, 1070 bp, Zea Mays
ggacttggtactacataaaaagtggagtaaatggcgcttgaaggtgggctgtcaaactcctgaaagtttcagatggtgattagtaactaaaactgggttcagcaaatctggctcaacttgggaattcatttatggttcattcatggagttttgagccagggtacttatagcgaagtgatatacgaatacttggtgaacaagtttggagtggtgagcatagtctgctcttctatagaattgggagaaaaggggaggtaaaaactgagctatagtcgactgagacagatcaggtctgtgcaaaaatctgagaaaatatccatctctaccagctattttagtactttctagtactttccactaagggaactcatagccaaaggggggtaacttgtcaccgctctaccatttatggatcagggtacgaaaatgaagacatggaccaaaatgacttagctgcttcactatttgctttgctgtcaaacatgcgacaagggagggggtgtaaagtttttcactgtgtgtgggcttgtgtggtgatcatgcagaggtgttggggacatattagtgtagttagcccttgcttagtccgagccaagaagttcagaaactccagcttgtggtgactgctcaaaatcagccaaaaaccaaagaactacattttaccatgtcctggtgattcatagcagtttcaccatgcccttgtcgtttccctacgtctagactacctcctccatctttcccctactcatctggtacactaagaaagcttgaactcgaaggaaaaccggactatggtgaccaccaccaccaaatcccccatctccccgtggctagccttttcgggaaggtaagatgttcgatgtgctcacgtttcagaacccaaggatcatagtgatgctcacggaatcttccttttcaactctacagcagtgttttcaccggaacaccgtcgagatatacggtgaacactatcaacgtcgaccgacccaatcgtagcttctttgagcgaacttcggtgagtgccatatgcttgaagggtcgctggtactcgtcatgaactcggattgaac

SEQ ID NO: 65740 - DNA, 366 bp, Zea Mays
aggaccgaaggtatcaagacgagcactcacgaatttgacgaaacctagtgctagatgcatcaggggtcagccggggatagggaacatgtacaactgtgtcccccatctgattccttttatacctctaaggcctgcctaagccacctggcgacggccacatctcagggagaagtgcagcactagaggaagaagggctaaccctcatccaattcagaggtatagctcgcgccataagaggagcaactccgtgctagagataagaaccaatgacgcccgcacctataatgcctttctcccgaaggatgagtttgccccttgagataattagagatctagcccttctcaccaggtatgtcatccagttgg

SEQ ID NO: 65741 - DNA, 567 bp, Zea Mays
gctttgtcgagtgctcgataaagtgcactcggcaaagagctagatttcgatagtgccagtagctagatttcactatgatgattgcgagctaatccgtgagtgagaaacaaaatgcataatacttagtccttgactcactcatgtgatactacatcaaacatttgcttgtcatagattaattagaataatttatatcatttttagtcttcacatgtataattagttttgtagttatactatatttgatgctcatgattcataatccaacgtacacatgcactaagctttagtaaaaaaccaaacaccccattagtcaatgagcgcaactcgaagaatttaggctacggttagctgatcgtgcatcaacgaataaggtcgtgcaaaacacggttttgcattgtagacaatactgtttgtcgagaggaaattaaaatgagaaatgtagattaagatgctggagatagtcttaggagtcatttgatacttttgctttcaggagagtctccatttgttctatgcttatggatggagatccttacttgataggtcaaaagagatagcaactta

SEQ ID NO: 65742 - DNA, 533 bp, Zea Mays
taaaaagaaccctagaaagccctagacttaaaccctagggggctaagtgcaaaattagtgcacttttggactaaagtgcaaaaaccatgagattagggtatcttaactcatatggttcacatgtgtgtggatttgcaacttaaactttaagttttgggcctattagcaaaaagccctatttgaaccctatggagttaagtctgatttcagtgcatttggctcaactttggagccctatatctttcaaattgtgaatattttgccctaggtcaccacatcaagtttatagacctatgaaaggagaataactttgttatagagatcatgccttggtaccatgaagtattttgagataaatgtgcccaaagttgggctgtcagtatgtctgaaacctcaattatggtgttcaggggcatgggataaactttgggggccattttgaagatgatctcatggatgtttgagtatggttaccacagttggtttgtagatggatcattatactacaactgtgctactagccgatcaacaac

SEQ ID NO: 65743 - DNA, 629 bp, Zea Mays
gtctgaaaattaatcttcccaatcggctgtatgggaaatctagtctaagtggacaagggtagggggtgtttgctcattaaactaagtacttttttgacccaatagtggcaatttagttgtaactcattaagaaggcattgaaatcttctcatcatagccctattaagattttgttgttcttgtccttagctcaatatataagattgaaaccccactagctacccatggactagaacacgtggagcgaattgtgtgcaggtcatttagaaattggactttttgatcatctagttgaggaccataaacttcattaaaccaccatggagtgccactaacatgatcaaattgtgttgaaattgagtagatgttagttctaatctgaagcaccatacaattaagtcccttccaagacaagaatcccccatacacatgtgccagccactgggagaaaaaaatcaccaaaatcacttccaagcaaggataacaccatatgtcaagagataatagctttctttgtttcatgtaagaaacaatatctgggcgagtactatgaatcatcccacaagttgtatctcttctagctttcttattgagcaccctcacgttccgaatggtaattttagaaggat

SEQ ID NO: 65744 - DNA, 585 bp, Zea Mays
gttggttcgactgaaatataccttcaggtttggagaccaatttatcaaaccagacgatgactggctgacgtgcatcgaagctacaagtgatgaactgcttgggccgtactccaaagcgaaggataatgcgttatctgcgaccttcggaagccggaaaaagaaaaggctaaatagagtttttgatgctattgggttcatgtaccctgactaccgctacccgccacgggggcagaagagaaagagtgcaaccgggaaagatgctgcttcagctgctccgagcgagcccgcgccgaagaggaaaaaggtgaaggttcttactcaccggccgtgatatattgaaccggccgtagtgcccgaatttggcggtgagacctcttcggctactgaagccaaagaacctgcgcctacgcagaagattgaagagccggttgcaatgccgaagacatcctcagccaaattagttgagccgaaggccgataatataggggtcgaaggaacaaagatatcagaaattacaagcccttcggcagaagtgacagtgctgaaggcacaaaaaggtcttacaacgacccctaagaggaaaag

SEQ ID NO: 65745 - DNA, 603 bp, Zea Mays
cggaatccacatagaaatatgtgcaggaatagccgttaaattcttagaaagcaccctagttttctcgagaaaccgttaaattctgtaaaagagcacactcattattctctattttggcagctaaggatcctttaagactcagttttcactgttcgaagtcttggacaagctgtctatattgtgttgcgttcatagcaccaaataattgcaaaaaaattgaacactgaaacacaatttattcggggaaatttagtcatatattctcaccattttatacaaaggttacaatacgacctaaaatatattgctagattatttaattggtacatgtttttttttattttttatataataaaaacatatcatttctgttctaaatatgatttagtgtggaggttcgccagccaccaccaagctagtccgagccttattttccagctccaggcctccagctcgcaatacgaccgagttgagttggctcgtgtctatagctctagccccatccagctggtagcctgcacgccaccgtcgacttcttctactcaactactgcccttcgatgatatgcttcctccgcagaatttattcgatttaataaaataa

SEQ ID NO: 65746 - DNA, 377 bp, Zea Mays
agaaatatggcctccatcttttccactgcaacattaattgccatgcactcctttccacatgtggacatggcctgattcctaggactaacagcttccctcaaataaacaacaagatgaccctcctgcataagagatgtaccaaaccccaaatcactagcatctatctccacgaaaaattgcttagaaacatatgggacaactttagtaggagcatggacaaaggcatgctttaactgaatgaaggcatgtccaaacaaaatgcaccccttcttcaataagtcaaataaagacttactaatcaacccatactttcatgtaatatcatgtcaatccaagaaatcatctttctttggtctaaggcattgctccaaaacaat

SEQ ID NO: 65747 - DNA, 960 bp, Zea Mays
tggaacatctatgattgtcttaccgagtaaaggattgtagacgcacattggcaccccacaacaatgtcccctgaaccaacatcataacacagaacacaatcactgacacacatgttggaccaaagtgaagttcatcaacatacctttccaagtcgggatgcacgaacacaaacacgtggaccgaatatgtgaccaagataacaattcctcgttacaaaagataagaacacaattacgaattgaggtggtacttgtttgtttgaatcgtatgatgcacaccatccctagaacaaatgggatcgaatcactaaacgatgcacgtaaggtgcaaaccctaaacactgacgcatctatggtggaaaacctagaaacgacgtataggcaacatgggggggttgcagatgacgacgaaatgtggcagaccatacctttgtaggagccaacgacagctgagcggacacctgcgactgcctcatcatgtctgcaggagctgcaaccaagtctgacgtgacatgaatcaacgaggtgggatgcgcctaaggatgaaatggagaaggtagggggaatccggacgcgggcgagatggggaggaacgtcgtggtcaaaagcagagagcgagggggatgggaaatggaggagacggaagggcgggtcaggatgccagagaaatggaggagagcatacctgcgaagacgacgacacagcctcagcggatggtggcatcagagggtggggttgaaaccctaaatggcagcacgagtggtcataggatgccgatgacttctttaagatgaggggactttggtcgcttctttcaaaccgttgtggggtgcgagaactgatccggcgagaactagaagtagaggcctcgagtctgcacatcgcgcccaaaaaacgccaatagtaaaaaagaataatgagtataaaagacgttaggaaattaatgtatgtggatgagtc

SEQ ID NO: 65748 - DNA, 805 bp, Zea Mays
ccaagtggtaagttctgatttctgtttgtgtgggcatgcagtcaccaatgtgaggggctgcaaagggatgtgtttgcatccgctatgcagagatttttttctcgcttttttatatctcgctcagtcgcttgtcctcctttagctagaagggtggtactacatggaagcgatgtgctgcgtgcggtttcctatcgtgttgggattgagtggtttctcacggcccatctatagggtaaaggcccactaaaataggtttgggtggttttcatggccaatttaggggttaacggtccacaaagaggggaggggatagacttacgcgcttcgcccgtgacatactgcgaccgtgcaaattggttgtcggtgtttcatactagctctgacaagtaaatttatgtgtgcgtgtttggatccatatggtgtacttagtgggcgcaagatttatactggttcgggtagaatgtccctacatccaattgtcaaggaaaagatctataagtccctgaggctcaccagttagagaaagtattggggaaaaggtcttcagactaacagggtccactggtcagtagaagggtaagggaaacatctaccttagaagcacccgcccccgaataaacctagaggcaccgagggggaaagccactctagtggattcctcacctagctcaagattgacccgccataaatgagcgactacattaactatgcctagcactgagccatagttgaaagagccggtctgcctcccactcatgacctacgagcctctcagcctatgacgcactcatgacctatgagccct

SEQ ID NO: 65749 - DNA, 742 bp, Zea Mays
cctagctattttcacacttagataagatattctatttctaaatgtctcatgaattctataaagacctgcaaaatatattttatgtgtatatgatcatgagtaggtgaaaaggaaaataaaaaggatttcaaaatttggaataaaaaaggggactatcctctccccggtatgcggccacatttgggtcgttaatccaagctatcgcgcccgcgccagtgcccgtgctcgcgtttctttgctccggcttataggtgggcccctggccccatctcgttgtcatatggagcccaaccattagtctctccctccccttcctctgttcttcttcctcctttcctttattgctccgatgccgccatcgtgcctcgctgccacgtacgcgtggacgaccgaccacgtgatcaccttccctgctcggactaagcctcatttccttttcctcgagctctctttctttctctccctgctctccttccttctgcatgaacgccaccatattgccatggccatggagatccagccagatcaatcccggccaattcccttccttgcctaccccgctcttggtctttaagtacttccccgagccccacaaacgatcccacatcttagaaccctctcccatgctttcatgcgccttgctcatcctcaccatcactgtcgtgccattgtgtcacatccggattttaggggcaccaaacccgggcgcgaacttcatcaagtgtgctaggatcaagtctca

SEQ ID NO: 65750 - DNA, 559 bp, Zea Mays
tgtgtggtgtgtgctctaggtggttctcatgtgcactaatgaggttctaacgcgatattctgactttgctaatcacctcactatgctatgtggacttgcaacgctctagcaatgaatacttggtggttgggacatcaagacatccaatatggctgttggaaaggatataaataggccaaccaacaaaaactagccattactgttctgttctggtcgtggtgcaccgaacagttaccaccagtgcgcttcttagccgttgcatagagtcacaccggacaatacgcagtgacttgtccggtgcacaacggacagtccgttgttgcggctctagctgagacataaaatgagctctctgggtcggttgctcgatgcaccaccggacagtccggtgcatactagacagtctggtgccccagtgtagctatacctttttctactcagtgccctctttataatacgactaaagtaaaaataaaatcataactttatactaagtgctccacaactctttcaacacttagatatgaagaccttcatctttagattatatttaatactc

SEQ ID NO: 65751 - DNA, 558 bp, Zea Mays
gagctgatattttgtatgtatgttctaaactcttttgcagttgtaaactactcatcaaagcaatagaatagccgtgcacaataaatcacacccaactgcaactgatcagcctgctttatttgtggctcacataataacccactccctgatcctgaaacatgttcataggagattatattagccatgttgtagcgtagatcaggaaatcaaactaggcctctgtctggtgtttttacggtagcaaatgcaaacttaatttttcttgtgtcatggtacctggatcgtgttctgtcactaaaattactgcacataattccattaaataatatgttgttatacttacatgattttttctttctttgccttgttagcatctattttccctaactatgatggtgactcaaggaggtttgccaccgacaagcaatgaagctaatttgtgcaccaacgacaatggtagccaacttggtacacgaattgtggacgagattatggctgggaagaacatcttctttgatcttcctaataagtaaaaatctatctacctagattgttctc

SEQ ID NO: 65752 - DNA, 355 bp, Zea Mays
aaaggatgagcgtgttcatatgaaaaatctactacccctagttttccctcgcatgaacctaatacggagccacccgcatctaacacattggctacaaatgggtcatcttggacccaggcattgtatggtatgccgatgaatatgttcatagcatcaccgcagcagcagccgcctggcatgcaatcagctttgaacataattagaccatctggctacctcacggatcgtctgacatcctttatcgaaccgtccgaccctacacaagccacgcgcagaccacccaggaagtgccatatatggccgaactatctgggtataaccccgtaccgctcggcctagtcgcggaccgtccgac

SEQ ID NO: 65753 - DNA, 404 bp, Zea Mays
atctcttccaccattgttgccactgctctgtccataattttgtttgccattgattgaattttcctttctatctcagcaacccttatcaattcaaaacacccctcttcggcagcagcatcaagttgttcacagttcacctcttccaaaatgtcttgtgccttcctgtcattgttagaggacacctcatacattttagtatcttccattgtagcattcgtcatcattttgaccattatcatcggtatcctttttcctaccagactgaaaaatccacccaagctacatctttgtgtaatttatccactttggaaaaaaaatcataaaacccttcacttactacgatatccgttgagtcaggaatctgacccacatctatcacagccactagaactcttataactccc

SEQ ID NO: 65754 - DNA, 713 bp, Zea Mays
gtcacggtggccttcgccattccctgctgggactgagggaacgcctaagccttcgcccgctctgggcactccatccgccatggggctctcgctcttcagtcttcgtgctctttagtcttcattcgaagtggtactgtgggggattttgaaatgtgacaattgaaaggagacattttactgtgggactgttgagttcccgaggcgctgtccccggcctataaaaagttgtgcctgggctgcggtcttttacccgtctgtgcgcgcgttaaaatcctagttttcttctctttgcttgcttgcctctttcgctcttgcgctactggtgatctagcccgcgtcaagcaaactgctcgccgccgccgacagtaggtaaccatgccatcttcttccttgttgtcgtctatcacgactgcatcctcgagcgcgccgtcatcggagaagacaatcagtgatccggtggcggttgtggaattgcagcacgggcatacggtcaagcttagtacatcgaggatctacttgggccatgtgctagagatgcaacgtctgtgttattttgggaacagagttgggcgggcgctgggggctgaagatgtcccggagccagatagggagttggttgtgttcgaggcgttttttgctgctggccttcgcttaccggtgcatcgtttcgtagtggatgttttgcggaagtttgaaattcaaattcatcaatt

SEQ ID NO: 65755 - DNA, 410 bp, Zea Mays
tttttctgactcatactggctaagcatgtaatgcaaccaaaacttatatagcataagcgagagtgctaaatatctgtctcatttttatgactcatatgatttacagatttgaagcaagcatcagataaagacaagcaaaacaagcctttgcactcataacctttattaataaatgttctatatttagacattatacatttattaggatcaaacataagtttgtaatcacctctacataataaaaagccactaattaaattctttcttcttgaggggacgtgtcgcacgtcctttacttgcatggtctttcccgcagtaagatttgtaccaacaccttaaacaaccacacatgctttattccctatcaacaaagaggaacttctctcgacctaataagaaatcaaaaaaat

SEQ ID NO: 65756 - DNA, 422 bp, Zea Mays
agattatctctagttagttggataaggattagaagagatctcatagctcttatccttagatcagataagcatcagctgggatataaatacttgtaaaaggtcatctatggaattaagcagaatcagattattctggcttccctgagggagccaggagttggaatcaacctctcttgccgcgcagcctaggtcagccacggcgccccagcgccgccgcccccatctccctcgcgcagctattcatccttataggctaagggagatccctggtaggatccacaatcctaccaatttggtaccagagaccttcgatcctccggccaccatgagttcttcgtcgcaatccccaccggcctccatggccgccgcgcctccatccaccacgccgcacaccgcgccaccctccaccgccgccacgctcg

SEQ ID NO: 65757 - DNA, 355 bp, Zea Mays
cgcgggactctggttagtgcttaccccagcatgttgctatatagacaagtccatcatttctctttcctccctatctaccacagatgttcacaatcacttggtttcagacacctgctgtatagctcgaccgcagaatctcctgttgctgcggtgggagttagagaatacatttctttccttcaatgaaccaccacacttcacgattcagcacaatactacagatttggtcatgacgtattccaagtcctctagaactgggcagaacaacacataaaatcccttgctgcgcatcatagaaaactgtccacgtgcagcacagtgtcaatcaactcaagccagatgttcggactgctgc

SEQ ID NO: 65758 - DNA, 481 bp, Zea Mays
cgaccgcctctgtctcaagtgtaatattttgctcttttgggtctccttctgttttctcgtgccccaaagacacatcacctttggcggattttgttgcaccggttttctcagaagacgatgaacccccaaaggcagtgctgccaagacccagaatgtgcgggctctctacttcctcttcagataaaatttcttggtccttcgaagattttccgccttcgctagaatcctttgaatcggaataaaccgagtcaatgttggtcccaaggtacttaaaggggaatatggtaatgttcgagtcattacctcgagaattcagatgtagtcatgtgacgaagtagtagtggtgctacacttttcctgctcttgggcagctacacttcttcacaactatatctttctgaacacacattttagccttcttcaccacacccgaaggtggatcttcgtcaacctcactcttagcaactctcttccttttctc

SEQ ID NO: 65759 - DNA, 558 bp, Zea Mays
gttatatatatgctagactgtggattatgtttgacaaaaattcaactacttctatctcatcgtagacgtgaaaccgtacgcagtgcacatcttggtcgtaccatagtgatgaggattcttgctacaacgatcgatatatcctaccatactgctagatacatgactccacattattaattatggcatagttggtaagcagtgtagttgtctatactttatcatgtctgcaaatgcgcctatatgtttagcttggctatagtaacagcggcatgcaccacacagtagccatgggtgcacctaggcatggcgacaatatgctttcttgatagaaatgccatccatcatatttggtctaatggacgaaagccttatctcaaccgccatgttccatgtggtcatccttcctaattagaggctcgtgtggcatagggcgcaccgtctggtgttgtgccgccccgagagcatctttgctatggaccgttgcgccatggggtgtctcaaggaatgtttgaggattctgattatggacctgtaggtttcccttataggatctagatg

SEQ ID NO: 65760 - DNA, 484 bp, Zea Mays
gaaaaacctcttaacttcttaaagaaccttctcttctttccccaatattaacaacccttcttctcttgctaccagatggagggcacctttgtccttaagacatcctattgctcggaggtggaagggtttcttcaccttctttgaagttgtgcacttcgcatgggaatctgcaagaagccagagtatgtatggaaggaataccacgagaatggagtcgagaagtgctctatggcagtctacctcggagaaagccgaagctacccaaaccaccctcgctttcagatcaccgctactggccaccacttcctagacacatgccagaacgctacccaaaaagccctccgccaactatgccaaaaatacaacaaggaagtcttcgagacacccttccgctactttccacctagcaacaaaaataaccctacgtggaggaaaatactccagggcttgtcagggagagagcataatgaagatgaccctaccg

SEQ ID NO: 65761 - DNA, 343 bp, Zea Mays
ccaggagcataatggaaggaatacattatgtgaataattaatgctgacagcacacatgagtagaggcatataggcggagccgttcagattccctccgccttagtaacacatgagtaatcagcgggagtcatgatgactgcagtccatgcagtatttgataggcagtgaccctttttttggtaacgcgtggtaacgcgcgagtaatggtgagtcattgtccttgctatggtaacgtgtgagtaacagcacagcccatgcaacgtggactgggcgcgccgcctgtcactggaatggacaggcgcacgtcttatccgtaataaatgcaaagacgcgtgtagcccag

SEQ ID NO: 65762 - DNA, 616 bp, Zea Mays
gcatggtgtcacgcaggtgcaggggccgcggcaatcattacatcacccgccggagtcaaatacagatacgtcgcgcgcctcagcttttcactcgagttagacaaatgcacaaacaatatcgccaagtacgaagcggtcatcctaggacttcgcaagttgcaagccctcggcgtgaccacatgcatcattaaaactgactctaagctcgtcgctagccaaatcgaaaaagactactccgccaaagagtctgtgctaatgcagtatgtcgccgccattcgaagcctcaagaaataattcaagggtttcaccttacaacacattgagagaaacaagaacgaagatgctgacacattagctaaagcagcagcgaagggtgaatccctaccctcagacgtattttatcacgtagtcggtacaccagccgtcagaaaccttgaaggtctgcaaataacgcaagacgccgacggacatcggattgtcaaccttataatggccgaagactggcgggctccaataaccatgtacctccaaggccactaccatccatccaatcacaatgaagccaaaaggcttaaacacaaaagcagagacttcgcagtcgtcaatggccagctct

SEQ ID NO: 65763 - DNA, 638 bp, Zea Mays
cgaaggctcggccaatcaacgcatcatccaataagcacagcgctagctgatcacttcagagagtcgagtcaggtcggagttcttacctctcaaagcgaaaggtgtttcgtgaaagcgaaaccttgagtagcagtgtagtgtaggcctgattagctgctgccgaatttagcaggaggaggatgctttgaccagccaactacatgcatgcatgagctgatgaacacacggctgcatacaggtgaacggccgctgccacgtcgcctttttttttttgtaaaaaaaactagtattttggtagaaacgctgagaaacagagaaagggtgttatcctgctcgatcgtgtcaacgagaaggtactagtacgtgtgtacacaagtatatgctagctagtactgaactactgatagctcacgcagtcacgcaccacacgcatttggatttggaaatcaaggtgcctagcctagctgcttcgcccgtctaaaaaacaagtaacgcatacagcgcacatgcgaagtatactaagtatatttcctctgagaacaaatatatattagaagatcggatttttcttttctttttccgtgttggaatcctgattgttactgtatgtagggtgtccgacaacgacactcctaatt

SEQ ID NO: 65764 - DNA, 1102 bp, Zea Mays
cggagaggacgcgacaatgggggcactcttccaatgggtgctggcctcagtccatagggagaaacgaagaagtcacccctcagcaaagaaagtaaggcaatacatggcaaagtcgcccaagggagggaccatttatagaaaagcacaaggcgtgataaaatgggtcacataccaagtgttgcgtatggaaatgggtgatgtttcggcaccaaatacgcaaaaccgcggaagtacacactaggataaaaggcagcgcccgacccgaggaaagccttcaaggggaaatattctcctctcgggggcttgggggctactgtccgggatatgatcctcggtccctagggcccatctctcagcgagcaaactagggaaaaggactctgacaactaggaaccgctggttagttggaggaaatatgtaatgtataccatagacaaacccacccccgaacgatccctgtggcactgagctcggggttgggcgtggccgaaccagacagggggccccgggcatgccgaagggaaaccattcgagtggatcccgcgcctagcttgagagaaacccgtcataaatgactggccatattaactgcgtctagcgctgagctacaacggaggctccatttgagggagatagatatcccatgggtcatcgtcacatggacacgttccatgggccacttaaacaaaccccgataagtcgaacaccaagatgtaatattaggccgaccttcaggagaagcaggtgctaccgggagaatgacacgctcagtcagaagaattttgaagagtgtggtgtaaagacgtaatccatgcacatatatcgcagaggagtcaacagaattccaagtaacacgccccgcatgcgacaggatagcagatcgttcggcgccaaacttgaagggaagcaaccaccaaaagagtcgtctcgtaagaatagtgaaagtatataggtccaaataagttttcacggtttgtaaagagatatatccctagcctgctatataaggctgtggaggtacccctacaaaaataaccccctctctcaccatcacacccaccagaagaataataggagttttcatccaccgccatacatgact

SEQ ID NO: 65765 - DNA, 321 bp, Zea Mays
cgggaagcgaggtccccatcccacctaagtgccacgccaacacgatcacaagtcgagacaatcatacaacaagcgcagcacgcgatgtcatcatagtttacatacacaaaacgaagggcccgtcggccacattgcataataatacaaatcacattttgtttccctccctctctattgcgaaacgggggagggcagtgttttcactaactatcgcaacacgagagcgaggccagcaaacatgctacatcgtctcagccttcagaataagacccacctcccagaaattaaacaacatcatcttcaactcttcgccttcaaata

SEQ ID NO: 65766 - DNA, 846 bp, Zea Mays
cggtaattgtagcctcggtgggagcagctttggtagctgtagcaacttcggcagcatgtgttatctttgacgctgaggcctgcggtggtggttcttcaatagcttcaattacagtaataatcctccgcctttttggccagcagacttcttggctgccgaaggctccttcttctgtaaaagcttcgtcagatgcggccccagtggacttagcttgataagtaaggatttggtcattacctttagaatttcttctacgtcagcagcagcaggtgttgaaggagtctctccctctatctcagttgtttttggcttcagagccgcaaccttcctctttttcagaacaaccaccttcggctcagggctggattttctctttgttatagtttcttcatcttctttcaccatcctagcagcttgcctgctcagaacactaacaatcctctttctcttttggcctttggcacccttgttcattcgctcatagtcaggatattcaaaattcaatgcatccatcaccctattcaaccttcgcttcggtcgggtgctgaaggccgcagtcatcagctgatcttcctttttagtgtaattacccaaaatttcgttgcacatggtttctatcatttctaaccattcttggcatggccctttaaattgtttctcaaatttcaactgataaggcagtcgcacaagttcattcttctcctttgtaccctttagcttcggcatgttccattcactcagcgtcgggaacaccttataggccagatattcttggactacatctctggtgctgatctgctcggctactgtgggtgatggatatcccccgggtccactagaaggata

SEQ ID NO: 65767 - DNA, 330 bp, Zea Mays
aagaagaaatgataaaataatggagaatgtgttgagaccgcatctggagctgtgttctgcagtgagcacaatgttggcatctgtttgtccgtgtagatcctacacagctgcgagtacgttcttcaccggcaagcaatagcccacagccacatggcgttcgccttttcaaattggatgtcgtggattattatgctctcagcagcagctcccacttgcctctttctctttgactgtctaatcgagagcccccgtaagctagcactacatgtgagctctgagcctagccgacttcctgtcgtgcaagccgtcctggaaggagaggttttgccc

SEQ ID NO: 65768 - DNA, 615 bp, Zea Mays
gaggaagagatatttgaacaacagcgacaagatgtaacaacatatgcaatgacaagatgtaacagcaaatgtaatcacaacagatgatgcatactatgtggatgcaacaggtaatggttcaacttcaattaggtcatttgtttggttttccaaatgaatttaaaagcacaagtgattattaatttgtttgcaggcatacgatagtgctagaccttagtttgacatgcctccatttctaccagcggcatccatcgttccgcaaccaaaacagtctggctagctagcggtctgctcaccttcacaagctgatgcatcacaggtaaaatcgtgaacatgaaattgattctcttgttatagggttctaggagactagtactggtttccaagaacaaatttctgctttgttttgataggaggccaagtgatgccttggggacctccccagtcaggcatgtgctgacaatcgtcgtagatgtcatgggcatattcttctatagggaggccacaaatatcgtggtgatttgctccatggatgatacacgcacctccatcaagcagtaagttaagtatagctcgagtactataacttttagttacagaaaatacagaaattcg

SEQ ID NO: 65769 - DNA, 487 bp, Zea Mays
ttacaagttgtggctatgagaatggtgggctgagtatgagatgaaaatggtaagggtgcctcctagccttatatatacacgatcagataaagcctccccgcacagatgttgatcgcaatctctttgcttatcacctgatttgtagcgaacaatcttcctttatcctgagaaaatcttgcgctctcacgcccgagttatcgccgacggtttagtctgtagggtggacgcaacaaaccctacccgacataccgcgctcctacaacagctaactcggacgtgggcctctttcgtatcagaactggcttgcctctgctggtttcctttatccggctcaccacaaaacgccccaggagggcgcctgctgggtggccccatacgtgttttcatactcatgtggacccggggatatccatcccccacaagcccccgatctttgaattgattttgagtaatcaatccaaaggtcttctctgcttacttttgagtt

SEQ ID NO: 65770 - DNA, 565 bp, Zea Mays
ggcgtgggtgtgcatgccgtggcacggccgggacctcgcggacctccttgcgcgggatatgtatagggccctattaatcaagggtgggcatctgaggtagacgaattcctcgtcgacttcatccatcaccgcggatccacgatgcatatgggtcggaactcttcatcgcctcaacagctggtaagcctcccccacagattcaccctgattcccacactgtttagaactatttagtcggggtttggagcgtcgtagggccatcgcgccccacaccgggcaatggcgccaccgggcttacgctatgcgtcgccgtgacaaaccaaaaggaagaagaaagacaggagccgtctattcgttgatggacgggcgagattagaatgtggctatatcaaaccggtttgatgtcttggccctcagatcgggatccgggtggctcaaaatcaatcgcgtccattttaaatcataaccattggccttcaatccgacggctaaaagcgcataccggttcgatgtggcgccagatatgatctgggccctcggtcttgatccaacggcctggattgag

SEQ ID NO: 65771 - DNA, 1002 bp, Zea Mays
tcactgtgtgcagtccaaaacagcgactaatcatttttagcttctatttacttcaagaattagtcgttttctagagtcttgaatttttctaacactttaccaattgttagagttaatacaatcgaatgaggaccacaactcgatttacaattttatttactacaacatttttataaacactcatattcacaagtatttttgcacaccaaccaactcatacgaatcataaaccactaacctccaaatcgcaatcaccatgcatttacttcccaaatcatgaacgcatacatgtttatcatatgaaccgagtgtttcaatgattaacctaaaacaactaactccattacccaacttgtatcacaaccctatttgaccacccgttgtgcctactcgaaatcatgagcacaatcacacactatatgcgaagcataatttaacgcacgcataatatgcatcgtcacgactcgacttacaaatatagagaaagcgatgactacttggcatgtcaccacctttctatataagccaaaacaatttctactatcgactaagagttctaagtattaaatacattattactttccacgcgcaaataatcctcaacttaacaccagtaacaacgatggatttttactaaactcatcatgtgcataaccctgtctcgcatacaaccatattgcggcatgcactcaagacacttaagcatttcaagaaacatgcacgcttttgtttacttctaatttgtctctaattctttttataattataaaacgtgtgtcatttagcaacatatgaaactatctaatttggagctggaatttttatgaggcacaggtaataccaaatcatgaccaatgtataaatttcacatgcccaagttttatattttatttaatacaaaaataataaattgttaatgcaataaagcatgtgagagcaagttaaatctaaaactaattattttctgtagatgcatgaccatattgagttttcttaggctac

SEQ ID NO: 65772 - DNA, 449 bp, Zea Mays
gggttgaaagatgttgtgtttgaaaatgacaagctttgtagtgcatgtcaagctagaaaataagttgaaaatactcaccctacaaaggtgttggagcagaggctgaacacgacctcgatttgtctgacccggctatgatcaaacatgtttttggtacaggttcatcaggcgaagggtactttggatggggcacgtagcaatgttcattcctctcccttcgttagggggcgaaggtgaaggtctatgccagacgaggaaaggggctcgctgcagcctcagatgcaccccgaaggtcctttccaaaatagtaggtccaaatcccatcaaagtcaaggacgtgactttgtggagtcaatggtgcgacacacatgtgaaggccacatcagattacagtgggacctaggctccgccacgtcaccatccgggcccacttgtaagcccccttgcgg

SEQ ID NO: 65773 - DNA, 472 bp, Zea Mays
ccccgctcatggatctgcatagaacaagactccacagaaccagagtagaggaagggtcaatcacgtcaaagctgaatcagttcctgaggatgcgacgtagtgtatggtatgtttcttattaactccatacctgcatcagttttatttgactctgaagcatcacattcatttataactgagtcattcgtggaaaaacataacataccaaagcaccctcttaagaagatgttacacattagttcaccgggaggtgacatgaaggcgacacattcatgcctccatgttaatctcaagattcaaggaatagattttccagtcaacgtagtggtcttaggatccaacggtattgatgtgattctttgatgcgactggttgaaaaattgtgatggagtgatacaatgtgccaacggaacaattatgttgacaagtccacaaggtgaaagaatccaagttagcacagacaagccaacaa

SEQ ID NO: 65774 - DNA, 491 bp, Zea Mays
ttttctgggccagactgtgcctctgcaaggagcctgctgcattgttgacagaggtggtgggatgggggtgactgaccgtgcgagttgacagacatgctgcgctgcggcgattgatggggtgctcgtgtttcgcttttgctcctcgcattgattggagtgtgatggctgtgaaagctgaaatgagggcagggcctctggcctcagccagccctcaggggtatagggtactgtaggacgtagcctctggcgcatgggcctgcttaatggcttacacgtgtagggcatcccctgtcgccgtgggatagctgcttcctgctgcaatcctacaagaaggccttcttggttcttgcattggagtggagcctagcagcgcaacagaactcagcactcctgttgagaagaatttcttcggtgagaaagggaattgaaaggtttgaactaattgagagaatggataacgagatgccactattgaagagcggtgtcagtgt

SEQ ID NO: 65775 - DNA, 518 bp, Zea Mays
cgcaccgtcatgtgcaatcgtggctggcacaggagagggtgctaccaagtcaccgtccagtggcaggctggatgctggcgcgccgccactattgtcaggcctaccaggagcggcatccatgatgccgagagatcgtgagcctgcatacatagctcttgacccatagggtaaagaggaatcatcagtgctggtcaaaaaatcaagtgtggtgggagcctggggtgaggtggacatatcggcgaagggaaacaccgcctcatcaaagacgatgtgtcgagagataagaatgtgattataatggaggtcaagacaccgatgacctttatggtcggaggagtaccccaggaaaacacacaaggaggagcgaggtgataatttatgtggagctgtggaggatagattaggataacatgcgcagccgaagacacggaggtgagtgtaggagggctgggcgccatgaaggtcaaggtaaggtgtgcgactgtctagggttttagtggggtggcgattgagaagat

SEQ ID NO: 65776 - DNA, 644 bp, Zea Mays
ccggtgatggtgaaagcccagctgcaataaaaaatatgttgataaacttcgaagctagaaatgaacaacgaagcgacatttcaaataaaagtacctataatcatagcacgttcagcagcttcttcagcttgtttagcctcctcttgggcgtcgtgagattctttctcattctttttaatggcttcgtcagccatcttacgaccgcccttcatccagacatcagaataaaacctctcgcctagcaaagaagcttcgaccgaggggaacttcgtgtcgttagctaagaaagtatattctggttgggctacggccttaacgtattcacaaccgaccttttctaaaattgccgcaacccctcgtgcaccagcgaatgcgcagaaatccccgtgatcgccgagtatttcatcaaaagcttcgacttcaccaatccactggataaccccttcgggatcaccgcgaataaatttttgttccgaagagtaggctcccacttttgcaaaactatctttcagtttcttcgcgcattccatggatgtttcgtagcatctctctttggaatcccgaagctcttcaacattcttctgcaccctggatctttccatttcgcttatttcttgcttacctttgcaacttcgaaattttca

SEQ ID NO: 65777 - DNA, 628 bp, Zea Mays
ccccgaacacagaaaggaaatgattctatatgggtaataatcgatcgtctcaccaaggtggcccactttgttccagtaaagaccacttttggaggagctgcccttgcccggatataccttaaagagatagtcaggctccatggcattccgcggaagatagtatcagatagaggaacgcagttcacttcaaaattttggaagggcctccagcaagcaatgggcaccaagctagatttcagcaccgcttaccacccccagtcagatggtcaaacggaaagagtcaacaagatcctcgaagatttgctaagagcttgtgtgctaacatttgatagggattgggagtccagtttgtcgtacgccgaattctcgtacaacaacagccatcaggtcagcatcaaaatgtcaccgtttgaagcactgtacggaagaaaatgccaaactcccctaatgtggtccaatgtaggggaaatgacactagaaggacccgactttgttaaagaagccggagagaaagtcgccttgatccctaggagattacttgaagctcagagtcgacagaagagttacgcagacaacagacgaagggaactcagatttgaggaaggagatttcgtttatctcaaggtct

SEQ ID NO: 65778 - DNA, 421 bp, Zea Mays
gtctcgggcgccttgatccatgggcacgagatgtggtttgccacttggccctagtcaacaattgcgacttcggctgtgtcagctgagtcatcactttcttgttggacgtggataagagcctttctcccgaaggttgaagatggcaagtttatggttctattattcgtcatggtgttgtgcctaagagccatagctaccacaagaccctagaataatatagttaatcatagccactggttgatacgggcaaatcatatgtttgaagtacacaagaacgaagcaatgtcaaacaaaccttaaggctagcgtaggccatgcactcgctaggtcacctttgccaagactagttagccaatgcccaagcatcgagatgctgaagtttaccattagctctgtcaccacctttatttctagtgtttgg

SEQ ID NO: 65779 - DNA, 457 bp, Zea Mays
cacaattagtcacgaaccaaacagcccttaagtctatttaactcaatgcctgattgcctggacaccacaacccaacatttacacggctcattccagcccgctaacgtgaacacttcgacgccgcctacgcttcacgcttggctcgttttctcgtttctctgttgccttgcctccagcatcagcatccacttcagtttgctactgctatcttcttgatctttttttgcttgatctccagcctcctccgctcgatctccatcatcgtgctcacaaaggcgcgaacctatggtagctctctatcactggttgtggcttgcaagcattctactcgccctgaactttgtggaactctctattgccgtggagatgagtactgcactgctagtcctccttttcccacgagtttgactagttcggctttggcagcttccatgaccactgggaagtcaacctccac

SEQ ID NO: 65780 - DNA, 382 bp, Zea Mays
cgacgggcgtcctagtatttggaactttgattcaagggatccgggcatacgacttggcttcccagactaaattctgtatgtcctgttgcatgaatcaaaggatggctgataccagacgatgggtcctatgggtgtgctactaacacttcctagctgaagttgtgtacaggtacaggtccaagtccagactgcatcctaggggccaggtcaccaactaattttcccttaggaatactggtatccagcctcaacacatcgagcctacatcccaggggggccaagtaccagggagaagttggtaacgctacacacagcgaggacaaatagcatacagataagtgttgtttaattaatagttcacaaaagtattgtacaaaaccaa

SEQ ID NO: 65781 - DNA, 434 bp, Zea Mays
cctgcaggtccatgtgcatgtatcaaaggatggctaatgtcgaacgataggtcctatgggtgtactactaacgctccctagccgaagctgtgttcaggtttaggtcccagtcgaggctgtctcctaggggccgctgccaactctgtcaggcatactggtatccagcctcgacacgtcgagcctacatcccacgggggctaggtaccaaggaagagtcggtaacgccacacacacaacaggggcgaatagtatacagataagtgctaatactgcttgataaatagtactcaaaagtaccttataaaaagcaaaagttattacatccgccttcaagcggagtcctagctccatctctactctataggtatggactactctgcaccagtagggtcgtgttgaaagctagctccgagcgacttgccagcggcggcgac

SEQ ID NO: 65782 - DNA, 683 bp, Zea Mays
gttacctgctagcctatcggatgtgcataatgtgttccacgtatctcaactaaagaagtgtctccgtgtgcccgaggaacaattaccaatggaagagctcagtgttcaaggtgatttgacttacacggagtacccgatcaagattttggatactttgactcgggttacgagaaataaggtgataaagatgtgcaaagtgcaatggagtcaccatgttttcttgtccgacaaaatcggcagaggatctcatctgtgagaccgttcacttcacaagctgcacgagtgtctgctttgattttttttttctcgagagagagagaccctgccttgcttgtctggacactctgcacgacatcgagatcgagatgacggcagctggcaagttgtagaactaatccgtgtctgttagtcactgagctgtgccatccgtgcatgcaaaccgtggcaacaaggttaggtgcaccgtaccttcttatcctgatcgcgacgaccagttggatgacatgtgctaattttgttgtccctgcttattcttccattttgttgggttttttttttcctccctccagaagacaacaggcacctaacatgtacagcgtcatgtcgtgaggcgtgcggattagacaaacgcttggttgcggcgcacgtacgtcgagctcaatcgcactctcgctggaagtttg

SEQ ID NO: 65783 - DNA, 347 bp, Zea Mays
ctggaacatcgataatctccgcaaattttttgtttgactcatcagggccggttcgcccttgtaattcgcaaaaacaattttattctggcccgcactcttttcctcccgggggatgaggtttttaacgaggcggagtcatgtaatatacaagtgaaaaatcccctgcaaaaacctacgtcgaaaaagaccgcgccgacggtcttcgaaattcgaccaatacaaagtcaccgcgaggcccagcgctagctaccctcgcgtgcgacaactccacgcaaaagtcgcctaagggtgcagccggactagcacaacaagtgcgaaaaatcgaagtcttctgcgaagactatccg

SEQ ID NO: 65784 - DNA, 389 bp, Zea Mays
gatcgatctgcacacataaatacaggggaggagctggggacgcaatcctaacaacttcgtgaaaataacaacaaatccccagccgattcccctccggttgttgcaggattttgatggattaaccagcgagtccgtggttggcatggaggagaaagagatggcgagtgtgccccacctgtaagtggtgcagatatgtgtagacgcggcgttagaagagtagaagctgggtcccgctagtcagtgaaacaacatggatgaagcttatgcgggagtggctggtaaggtgggctggcagagcttgatcgggcgcatgtgcaggtatgtgtatttttcctttttttgatttagtttcctatttttgtttttcagatttccaaactaagtttgaa

SEQ ID NO: 65785 - DNA, 773 bp, Zea Mays
ggagatatgagtagggaaaaaaggggaggggaaagaaaagaaagaagattacatggagtgattacatattgctgaagaaattacaccatatctctatgtttagatgcaagtgagttacaagaaattgaagggattactcaatcatgcctcgttatgttcattgaatgtatttatatacaagttggagacagatgatacttacgatccactaatctttggatggttttttctcccttgtcgataggcaacaccttgctgcagtgaaggtgctagaacagtcgtcgatgacttgacctagatatgcgtgtatccagcagatcctgcatgtgtgcgcgtgtatcttcggccagcagctcctacgtgcgtgctgtagaaatggatggcacatgtatccggcagcagctcctacctgcgtgtgaaatatgtggacggctggacttgaagtttccagggagcatgacaatataacctagacattgtatacatggatgtaggcctcgatgtacatgaatgttatttttgggctatttcattttgggctatttcatggatgtaggcccatatatgtacgtctagactatttcattttaggctgaatcaaaaccgaatacacttgatagatacatatgcaccaaaaatgaattagtcttgatagatacatattactagtgatgtgaagtggacgtgtccagcctccagcatggcagattagcagtggctcgttttctctccctcgtcccagcgtgcatagcagattagcagtggctcgtttt

SEQ ID NO: 65786 - DNA, 780 bp, Zea Mays
ttcagatttcagatttcagaacatacacataatacacatttcacatttcagatttcagaacacacacataatacacatttcagtattgtctaactgatgtaatactactgctacacataatacacatttcagatttcagaacatacacatttcataatgcatttctatgcaactcagatttcagaaaacacacatttcagaacacatttgtgtgcaccacatatttcacatttcagattgtagattacattttaggtttcagaacatagatccagccatgcatcagtagtgcacagcatgtttacaagacccctacatttttctacccaatgacatctcgctttttcttcttctggttatgaaccaattcctgcaacattccatagatggcttccttttcatgtcgcatagcttgtaagccaagtagtccttgttgtcatccaccttgacatcctagtagttctagatcagacttagggatggtggcaatggcatggggtactatctaccagttcagcgacgaacatggtgtgtaactgaattttgtgatccgcttctaacaccttgtaatacacaacaccaaccttgtgatccatgtctttcagctagtaaactgaacatggcgtgtaactgaaactgcacatggcgtgtaaactgaacatggcgtgtaactaaatttgcttgtaaactgaaactgcacttgttgcatgcctgtatccagaattgcacaggcactgaattgctgaatgattgtgtccagagtgtaaaattcagttctcg

SEQ ID NO: 65787 - DNA, 496 bp, Zea Mays
gttggcgcgattggcttgcttgcttggccaattgtacgggggtagcagtggattttgcatggaggaagtagctgctgctgcatcttggcatgctcgttgcagagagtggagtgcccaccagaggccgtggttgtcgcagaaagagtagctattgtaggtcatgcccgtcatggagggagaagccaccaccggagaggaggtgtggctatcgtatgacgcgctcgtcgtgatgaggaacaaggacctttgaaaactgtggtcgacagtgtggctgcatggggatggtgattgagtaggagaggttggagatgcgtgttggagcggttgtgatattttttagtaggggaggtcggcgcaggcatcaaagggatcgaaaaggcgaagggtgtgggatggggcaaaaactccaacaacaaagggagagacaacgcacaatgaaactctcactttagtcgagtaaagatttagctaggatatggtgttgcgtggctatggc

SEQ ID NO: 65788 - DNA, 327 bp, Zea Mays
catcctacatactggcttgaatgtaccgcttcatttttcgttgttgtgggtgtagatgcaccaccttggattgtattgtggtaagctttaacattgaggattgtaatttcccattcttacaactattaatacatggttgggctcgagaccgattgatgttgagtgtaatttagatgttgaatgtgtgacatcatataattgtttgggcaatatgatgttgtatgacacacatcctttggctagctttcttgatttgaagttgccaactctttctatttataaatgttatggtaatgttgcaatgctccagtgtgtcctttgtcctct

SEQ ID NO: 65789 - DNA, 443 bp, Zea Mays
aggtaaaagtgttgcatgaagctttgggttgctatattggtaagttagaaggtggtaaaaaggactctaattaattttactataataccatatgtacaatgaagataaaattttactttgttaccagacatagatagacaatcttttgcatccgtatgaaagcaattagtttgatcaacatagcctctttacatgttatacgatgtttcccagtatttccagtattaccgattctgatgtatagcagatgtgtcaatagtttaaatcaacattcattgtaaaattgtgcataagtgagggttcgaaaccttgcttgttggttgtacatttattcattgaaaaccttcaaactttttggttttaatggtgggaggttaaggatggatgagagtattgatttggcatgcacaatcctgatccagttcccttgattatccggtctg

SEQ ID NO: 65790 - DNA, 527 bp, Zea Mays
atcaactcataatgagttgatttgtaagttcagtaatgcttcccttataatgaagagtggtttcgcctcacttttgtgcacttttattttgctttcttgtcattcgccgctctcattaatgcctgagggatgtttggaatcaatgaatcacgcttttgactgttttcttcgcgatgtcgacactttggtgatggcggccgagtcatctgaaatcatgtcgttgctttatgagtgacggtcgagttattactggcgatgttggcactttttgaagtaatggctgagcaatagcggccacgtcagtgttttagaaataacgactgagcggtttactggtgatgtcggtgttttggaggtaacagccgagtgatcgatggcaacgtcggcgttttagaggtaacagccgagtgatcgatggcaacgtcggcgttttagaggtaacagccgagtgatcgatggcaacgtcagcgttttagaggtaacagccgagtgataacgggccacgccggccgctttggagatagtgg

SEQ ID NO: 65791 - DNA, 453 bp, Zea Mays
ctcaaaccgtccctatatatacatgattcaatctatagctccctcaatagctcaccaaagtttgagttccgccccaactctagacacaactctagcgaggagttactccttgatccttcatgtacagaggtgctccaggacatcacaacgatcgactctacgtgaccttcgtcgccgcacttctggtttgtcgatcaaatatctggtttgccaccaatctacaaaaaaccgagagctcgagggtcttcttctctcatgagctccaccgttaccatttttcgtttttcttcaattttcagtgttgatggcatatccttcttccacagagcacaaaacccgcagcaccctctcttccccctcctttctctctccccctagcacaatgtgatctccctcccatgtgcatttggacgagctacagagtgcaggccaagggcagcaccccctatgacc

SEQ ID NO: 65792 - DNA, 578 bp, Zea Mays
ttgtgcctctgctccacggtagcactgtaagtaattctggtgataatcaatctgttatgcatcttatggaattacaacgggatcaggtagaacaacgaatagatggaatagaagaaacactaaaaaaataacatatgcattagaaaatctactatttgtagttttccatttcatgatgttgatatagaaaactcgctagatatatcggcaacaaatgggcctatacagtctcagccgttatatggtacatatgctaataaattaatacccaagtcgaccactacctgcgccacacctaattaatgcaagaacacctctaggcacatccgaactgtccacgtataatctcggatcgtccggaagtccaaagcggaccgtccggccccctaccagaccgtccgatgtcccatcacggaacatccgatgtacggaacacacaattgcatcatattgccaacacacaactatactctgcaccacaacaccattaccctccccaccttcagaccatcatagtcgaagcattccgacacttaggacgaagtaccacctgacacacaggaaaaggttttcaccac

SEQ ID NO: 65793 - DNA, 665 bp, Zea Mays
ccaaaataagaatcaaatggtcaagcaagtttatgtagtgaagaaggataatataaaagccaaaagttcagatttgaattcatgcattacagagccaggggaagtgttagatacttcaggtagcagtacccaaacaataggtaaattagctatcgatagtccagatactaaatctgaacttacgaagtctaatgtgcccaaacaaccaagaatctcactctgattatcaatctggcacaagaggctagaaaaactcagtgcacaagagctgaagacgagaggcatgacatgggtcactaatgggagttctcaagatccaggtaaggatgatgcatttggaagaagtgaaggcaaacaaaaggaagaaatcaagtacaagacgtttgggtgaaaggtttgccctagctcaacaaagctattggtcattgcatcgtccatatttttcagctatgccatatacgttgtcccaaggtatgttcagttatcctttatgtcatcattttgctccatatgcatctttatattatggaggagtgcaaccgaattattatgcatatggatagttgcgatatgctgctgcttacataaagtcgaagtatttcagttgttggtagtaatgattcttgctacaatttgcttcagtcatgtttattcatgagatgaac

SEQ ID NO: 65794 - DNA, 382 bp, Zea Mays
caggtggggaaaatctatacgaagctcttcttctctttcccaggtcgcttcatcttcgctgtggtgactccattggactttgcacatctttatcaccttattccttgtaactcgagtcaaagtatccaaaatcttgatcgggtactccgtgtaagtcaaatcaccctgaacactgagctcttccattggtaactgttcctcagggacacaaagacacttcttgagttgagatacgtgaaacacattatgcacatccgatagactagcaggtaactcgagttggtatgccatctccccaaactcgcctaaaaactcagaatggtccaatatagcgaggggacaatttgcccttaactttgaatctcctcattccacgaagtgg

SEQ ID NO: 65795 - DNA, 329 bp, Zea Mays
tgaattctggctaagggaaattaaattcttgggtcacacaatttctcaggatgggatatcagttgatcctgaaaaggtacaagaagtaatggattggaaaccccctaccacagtgaggcagattcggagttttctgggattggcagggtattatcgacgatttattccggattttctccagaattgccaagccaatgactgaactattgaagaagagagtcaagtatgattggagccagaagtgtgaagatgcctttcatacactaaggcagcacttgacaacagccccagtgctagctcaacctaacaacaccaagccctttgaagtg

SEQ ID NO: 65796 - DNA, 892 bp, Zea Mays
aatccgaggatcaatattctggtataaaaaaaagcaaatcagaccaaaaaaatgatgcacaaaaacaaaaaactccataccaccatcagcactgcacgcaccacccgcgaaaaaaaggaaaaaactagaaaagcaaaataataagagcgcccaaaaaaacaacacaaaaattgaatcacaaaaaacctgaagaaacatgttgcgaactagagacttgtcttcagtgttcttctcactaaaatagagatcgttggccaaggtgattcgaatttgagggatgtcctcagtgcggaacttgagcatcatatcaatagatatatcccaatattccatgtattgtagtgtgaaaataccgcagtcatgcctatgataattaaagaaggcaaaattactacaagaaataatttattgtgggtgtttttaaaccatataaaatatatagaaaaaattaagatagcaactgaatttggattctaataaaaagaaatgatagaaatgaaacttacgtattttcctactttggtactgcaggatataaaattttgaatgatgatacataagcatgaccaactaaactaggcagagcaactctaactaaggtctaaactaggctaaaaaatgacgatacactacacatggaaaaggcaatgaaaacaaaccaacaaaattgctgaaaatcttggacagatcaggcaagagcattcataagacagtagaagtgagcaacacactgggaataagaatacaaacaacttaggaaaaaaagactacatataccaactatgtcttatctgccaccattcataacagtataccaaaaaatagagcctcagactaacatcacagctgcacaacactacacccaatgaagatcagagacatgggcaattaa

SEQ ID NO: 65797 - DNA, 341 bp, Zea Mays
gtttgaccctaatggctatgtggactcggacttgagccttgagatcctaagatatcgggttgcgttcataatcaatgtagaacatgaggacctcctcccattggtggaaggaggtttagagacaagaaaactgtggattcatggggttctatgctagagtggtcaggaagtgcatgaccaaatcaagatggtcaagttctagggacaacccatttatgccaccccaatgtagaatatcgtaacaacaaaatttttgtcggatgggattgccccctttctaccataagataaccccctaggatctcaaaagccttagaagatccaaaatatgatgacttatg

SEQ ID NO: 65798 - DNA, 633 bp, Zea Mays
ctttactctcgccaacacacaaagcaatacaaatccatacaggatgtagggtattacgcaatttagtggcccgaacctatctaaatcgccgagttctctatttcattgtgtgatcatcgtgttcacttgatgactgccccacaaataaaaccatcccaagaagtatcctgtggtggattgccagtatcaaacaccgacactgcctctgctacatcaggacgtgcattgttaagacacctcttgtaattgtgacccaaggcgccacatttggtgcactgtttctatgcctttcctgcctctgactcatccagaccatttcggatccgacgtgtctgatggtgacatttcctctttttagcttgtggaattggcaagtaggctttcactttattttcttgagtgtaaggccctgtttgtgtcataccgtatacttcgtgcgataaagtttgaatcgctacatcctttgtggaagtagggtgaagcctatgcagcacttgcctgcatccccagactctccaaaaacagcaatgacatgggagcatggtaaatgcaacacccttggcttgatagacgagcaagtaacagtacaatccccatatagtacacactcctgcaccatacagtacacagtcc

SEQ ID NO: 65799 - DNA, 478 bp, Zea Mays
tgaaatttatttgatcagcgacagattagatgtctggtagatggctcttggccggtcttcatttcgccttgtgcttcaatgcttctgctgactagacttgcagttcagtagctatatttggctttcatttgatctctatcgatatcttctttctgtcttaacacattcattgcatatattgtatggatgtgactacttcagaaaatctattgaaaattcttggtcgtcccccacccaatgggtgttttccaatgggtgtgaccaagggacgtcttggtacgcaaagcgtttagcacattgtcttggagtagtaacttgacctgaccactgggcgtaatcatattgcccaagcagttgaccttagtccaaatggtgtcgtgttacgcgaagcggcgtctgctgcctgactcgcctttaggcaatttgaattgcttattgaatacttgcgactgttcggtgggcgtggtaggagacgaac

SEQ ID NO: 65800 - DNA, 500 bp, Zea Mays
ttatgaaaaattgtgatagagcactagtgtgagctgaagtgtggagtgtgtgttgtaatcataagctttggagctagactcccattgagaagtgtaaaatgggaaagggactctaggttatggagccccttgcggagacctaatctccaaattaagaaaagtgaaaggggactcaagtttgatctttgtgatcacttgagtgaggaaggagtaaagagatacccggtccttagtggactcctcaacaaaggcgtaggtttcattttgaaattgaacttcagtaacaaattgtcgtgtcttttttgctttgccttttgcaattttttcttcacctttcctcccaaagtcacatttgctttgcactgaaatcatattccatagccgctaagtccaattctgcacttatattcattagaaacattgtgaaagtattgtgcttatactatccccagactagtccatcttgttctaactacttaatatcataatcttgaatcaag

SEQ ID NO: 65801 - DNA, 548 bp, Zea Mays
gatttttattttttagggtgttgagcaccatttgtggcactaggcacaactgaatggtctagctctatggccgaacggtccgctcctaggcgtggacgctccgtgattaaatcagaacaggcgtgattaacaccttttccgcgcgtgtttatttctctaatctcgcggattctattgacaaatgattaagaacgggtccaaatctccccccatatatgaaggggtacgcccgattgagcacatcaacaatcaaatcaaaatcaatatatcttctgttcctttcctttttgccctaggagtagatagtaacgtacatgtcttcacctctctttgactctatgccgtctgaaggcattttgggtggcctggcgatcccaagaaaaactctaagatctctcctccatgacagggttcctcccgaggggtgagattcaggtgcagttggcgaacgtcgccactctgcacagacacggaccatccggcgcagcacacgaaacctcgctcctgcttccaggccgcagaccgtcgaccctaggccacggatcgtc

SEQ ID NO: 65802 - DNA, 671 bp, Zea Mays
ccaaaagcatcaacctttatgattcctctaaaggacagggtattaatgaacgatcttgtggtgcagagggtgaggatgaggttgagatggctggtatgactgagttggacttacatggaccttccaaaaccattagtggtgaagatttattggtacttaattttttatccagtctccaaggagtccaagagctctagagaaagggaaaaggttgtcggtactaagatagatgtgatgagagtttagtgaccgcttcacgacagtggggaaggacacaaatgtcttgttttccgcaaaagccaccgccaagtgatgcagattttatgtgtagtaattgaaaatgcaattcagactgagattctagttaagcttttgttgggtgaattacttaagactatatggtctgtagaaccatcaaggcctcgtcatctgactacagaggcaaatatgtgactcttttcagcgagagaagcttggacatacgttcctgtagatagacttacaaatcgctggcagttcctgttgtgtgtttatctcacgatgctaaattaggacttgccattgatgtgatatgaaagttataaaaccgtataatctaacctatctcatggaaatggtagctaatggtctcatattcagtgctgaaggagaagtgaatgtctagtttgttg

SEQ ID NO: 65803 - DNA, 273 bp, Zea Mays
catgtgcttcttcactctgagagtataccagtatgtcatcgatgaataccacaacaaactagtcgaggtattccatgaatactttattcatcaggttcataaagtacgccggtgcattggttaatccaaaagacatgactaaaaacacatatagtccatatcttgtagtgaaagccattttaggtatatcttcagtccgaatcttcaactgatgatagcctgatcttagatctatttttgagaatactttagctcctctcatctgatcaaata

SEQ ID NO: 65804 - DNA, 337 bp, Zea Mays
gtcgtctttaattcattagctaaccatgctaagtgagcacctatgatactttcaagtatgtgaagagcaatcataaggtaagttcaccatctccatcatctttttactagattgcagcaagttgccaagtggcatctgtatctgaggagtgtggtgatttgaatcgatgtacatttagctaggcaaacccaaacacatgtcgaatcctgttgggtttgtgcatgaccatcattctcaatagtattttgtaccataagtcctgaaccgatctagccgccctagagaatgcagctccacctgtcagttaacctgccattttccacctccccaccacaac

SEQ ID NO: 65805 - DNA, 597 bp, Zea Mays
gggttgtttccaccctttcacttagcttcggcatgttggtcgtctcaatgcgcctgggtcggtgcgtcaaaactttgatcttcttcgaccttgacacatcagcagatgccgaggtagcggctttccttttcttcccttgcttccgcgtgggatgacagtagtacgggtatacgaacccgataacatcaaacaccctattcaatctcttcttgccgcgagcaccgaaggcagttgtcatagcttcgtcttctgccttcgaatacgctccaaatatcccatcacttgttgcttctatggcatccaaccaatcatcatttggctcgtcaaattaatttctgaaccggaatgagtactttagataaatcaggcggcggcctccttcggcatttcccactcgctcgcaagaggccatactttgtatgcaatatgctcttgaaccaagtctcttgttccaatatacgtgcacaccgtgttgaaagccgcctggcacgcttgcacatcattcccaagtgcagtgggtggcctcctaatgttgaagcgaactcatatagggcattgaataatccctttcacatcctccctttgactaaggtcatt

SEQ ID NO: 65806 - DNA, 318 bp, Zea Mays
agtctttgtgggaagtaaaatttgtttttctcaagggcattcatgatctggaaaaatgttctccaagatgttttcaaaagattttgaacttggctcattgcataacttacttaactgtcgcggatccctcttaattgcacgacgattcctatgactcaagaattataaatttagcaccgccgttgtttctaagcacttggagcacgccatttgatgtggaattttaaatctgctgtgctttatacttttatgctcgtaagatctgtgcttctcctgtctgtagaattactgtgtacatgctaggagcaaacttgttag

SEQ ID NO: 65807 - DNA, 488 bp, Zea Mays
cggagaggcaccggaggagcctgatcatgggcgacggtggtgcgattgcgatggcggttgcgtgcagagggctggggaacacgggagggagtacgcgggcgtggaatagatagcaggggctcgggcgcacttatagaagagaaagggggaacatcaagctccaaattgccgcacatacgaagaattgatgctccggcagaccttccatccatggcgcacgagaaagaaaagaaatacgcctcagaaggaaagggggagggcgccgggtcataggaaaagggaaaggggagatcatcgcctgctctagttggcaacgaatcgatgagggcggtcgtggcgagggcggcacagcgcggcgtcgagcgaagcaagtgcaggcagccgaggaataagtgctaggcgactgacaggttgggcgcggtcgtcagagaaaggggaaaagaaaaggagagggcgcggtctgatgggctgcttgggtcgaaattggc

SEQ ID NO: 65808 - DNA, 626 bp, Zea Mays
attactataccctactaacgaaacagacagctcaagtcaggaacgcctcaaagcaatataacatgcttacatatttgagggtgatcttaacaccctgctaatggaacatttggtccaagcatagcgtgatcacacgcacgtgaattccatgatacactgtctcgctaaaaatactaactcaatgaaaagtatttctcatccgaacaaatcactaagcgggagcatttttgcaaggaacttctccagaaggattaccaaagtaagaaggtttgttcacaccagcagatacacccagaactcagcaacgatgtcctcagcaccacaacaccaggtcttctcatcaggattcgcccggcacgaacagtcttgtccatcgctttgtcacacattgctttcataaacaacacggtcatcctctaagtccttaatgttgtgatgagcgacttccaactcttgtgtgacaagttttttcgaggcacgcaactccttgaagacagaatctttcgaagacagtagcttacctagttgtgacattttagtctaggaagccctcaactcatccctgtgatggtctagttctgacatagtaaagcgatggctcctccctaagatagtgagggaattgc

SEQ ID NO: 65809 - DNA, 295 bp, Zea Mays
cgagtggatgtaaacagttttgatacatcacaaccggcgagaatcttccttctcacgtctatatatgtttcaaattaagtgtaaattatttcgatttttctagatgtatagcctgaattagagaaacagtaggaactaccagcataattaactccaacaataggcggtggaatctgaggttcgtctaatctatctactctcttgtactataaaagggaggggcaaagtaacgattagagggatttgatcatattacattacacgagctaatttcgagttcacactttcaagggaa

SEQ ID NO: 65810 - DNA, 430 bp, Zea Mays
cttcccccgtccatcagcaccttggtaagacgcttagagcctacggccggctcgacaacgagagggtaggccccgggatgcaggatgttgtcggggtggtcgcagcaatcgaaaacgattggaaatttcgaccaccaaaggtatcaaggaattgtcggctctgctgcatggacttctcgatgagcggccttgatgcggctctatcatcgtaggccttggctccaccgaagatcatgaggcaccctatcggctcggggaaatcttcggcgaggacctcttgctccgttggttttgccgactcctccagccttgccttcttggcgggaggtttggagataaagcgcttcaaaagctcacactcccaaagcttgtgcctgacggggaagccatggttttgacaagatgagtccatcaacttctggaaatggtc

SEQ ID NO: 65811 - DNA, 689 bp, Zea Mays
gtgggaatgaagtcgctgcaaagagattgttcctgaacacgaaacaatgtctcgatcagttcttcaatgaagttgacgtgataagccaggtacgtcacaaaaatctggtgaaactgctcggatgcagcgttgatggcccggaaagcttcttgatatatgagtaccacttgaacaggagcttagatctgtccatattcggtaactccgaactcgtttccatcctgtcgtatattcctcctgcatggacatggacatgaacatgatatatgtgtgtgcagctgatggccagcagaagaggcgtctggattggcagcaaaggttcgatgttatttttggcgtagcagagggcctctgctacctccacgaagagtcagaaactcggatcatccaccgggacatcaaagccagcaacgtcctgttggaccagaagctgaagcccaagataactgactttgggcttgctcgagtcctatgcggtgacaggactcatcttaccacagggattgccgggacagtgtaagtacaaagacttgccttaattaccatcatgcatgctgcatgctcctgagagatggctcgtcaataatgtgcagtggttatatggctcctgagtatgttgtccatggccacctcaccaagaaggccgacgtgtacagcttcggcgtgctggctgtcgagatcgtcaccgg

SEQ ID NO: 65812 - DNA, 956 bp, Zea Mays
gcgccgtgtaccttgttccgctgccggacaacctcgccctgccagttttcccctttccatgcgcgctctcggtgagctcatagcgaccgtgcgagattatcggaatccgggggctcctcaaccaaattgccgaggttctcggtcgattgcatcgctccgcccctatataacccagtcgctcccgctcccttatccatctagccgagaacccagccaccaccaacaggaatcgtagacggagagagagttagagaccgcggtacggatcttcctcacgcgcgaggtattgggatggatggactcggttcattggtcgacggtgagcttcgatgcttgcgttgtcgtcggggggcggagaaggacctcgtggccactagaatttctcacccatgccgctgctccgccgtggaaccactggcgccgtggtcggagaacatcagcatcctcaccattggtacgtgaaccctatatctgttgttgggatcccgtctccgtgtagcgctccctggattgggatctagagcacaggaccgccatccagcaggctcacccgcgatgccccgccgtggccacaggcagcgtcgccgttaccaggcttgggcgatgggggtggaatatgggccgtcaatcccagatgaagggctgggatttgatcccggattctggtttggcctaaactcttctcagtcgtctgatgtggatccggcgcgtgataatcgacctaaggacttaaaatccaggcgcctggtcgaagatccaacggcaaggattgtgtaactcttcgcttaaaggattcatttaatctggtgcgtaggatttcgatctggcggctctagttaacccgtacccccccttcaccgaggtaaactttgctaaaaagaccccgtgcttttacgaaatagaacccgccgtcctcgctagtaggcaaaacttacaatagggtccctggacttttt

SEQ ID NO: 65813 - DNA, 1030 bp, Zea Mays
gataacagaaaacgggaatatcaactttgtaacagttgcatccattcaaaggcataatggtacagaggttgaacacaacaattgtagccagtcagcttgctacgtgtcagctactcaacttatgtcattgtgcaacaatcacactcatgtcagctactcggtttccattactgtggagtgcatgttgttgttgtagtgtgcttgcatatgcagtatgcattgttgttggtgtccacatgatgcgacgagcgaacgacgtgaggcattgcaagcgaatgtggactagactctgtccaaacacgtacacggtgcatccggaggccagagctgttcctggtcactaggcccccatgaccaaaaacttgcgaggggatgtcacggtcacgaccggtgtgtgcttcagtgcttgcatgtgcagcttttgtattggagcttggaggaggttgtagcccaccaagaccaacccgcatccgagcttgcgagtgatacaacgaggagctgaggcaaaggtcttgggtgtggggtgtttggtgacacgaacttgaattgtcgagtcgggccagacagtgaggtggaccgtaaaagcaggaatacaaccaggaattttctcggacgaatacgggaaccattaataccgtcgagaaacaaccattcctgattctgtccccattcccacaaatgtttttcccatttcccgtatctcctaaaaaacaatatacattcgatttacatggtatacaaaatgggccagggtgggattttcccgtcccgtttcatccctaccaacaacaaaagtgttggcacagtcgttgtgatcgtcgagctagattataatctagccagtgaacaaataactagattatatgactagattatataatctagatcctagattattataatatcatcatatattcaagagaagcttattttagattatttttggtaaatacccactacccatgattatgttgttaacattacaggagctgtcattcttctttccctcctcccaaatcgtgcgttgcag

SEQ ID NO: 65814 - DNA, 325 bp, Zea Mays
ctgttgggggcctaccttgtagaagatcctcaaatcactttaccttcaattttagaaagtatgtttcaggtgttgtataaacgattgacgaagctggtcttcgactagagcatcctgcaaaatatttcgtctcgaatatgacctaccgaaggtgtataccgaagatgccaccctcagcgtcaagaaaagctttgcatacaaatcaatagaaagggaaagcattgaacacttgggcggcaagaaagagaaaaaagatgatgacacccctatgatatttgtaaatctagtgagcatgtatttagttccatacaaagttgtatccctc

SEQ ID NO: 65815 - DNA, 669 bp, Zea Mays
gttggactaggtgtacttatctgcacataatcttcttgtccagttttgttggcaaccttgcattctttttctaaagatcgcctacagttcttcccttctgctattttacctgcataagcacaaaaaaatcagcaacgagtacaatctatgttaaggtaaaaaacataagtaaaaactcataccattataaatctcatgcagatcatcatagaaagggaatgatctaccatcccatctctgtaaattctttggtagatcagcccataccccacccacagtggtagccattttcagatcattatccaaccaaagccactatttgacacaatgatcttcacaacattgtagtccttttttagcctttgctctctatccttcaactgcgacactacaaagtttgctgatgtaaacctttcattaatacgctgtgtcatactgttccatgcctctttggtccatccattctgcgcacgatatcttggtgagttgtactctttgaggatgctcacaaaaaaccatgttcttccttcattccaatcagctctaatctcaattttccctagaacaaacaaaattcaaatgacatgaaccaaacagggatcaccagtgaagtgctaaactatgcaaatatgtaaccctagctagaaataagagaggaatatagggcac

SEQ ID NO: 65816 - DNA, 1109 bp, Zea Mays
cgcactcaaggggtaggtgtacctgatgccactatgcaggtgtgctctcatattaagaccatatccgatcgagcaatcacatcggctccttggaaatggtaaaatacctatagccataacttggcggtatggtggtactttcatataacattagaatgtctgtaaaataggagatacgaaactgtaaatcacactatttgacactgtttgtatagtgaactttgaaatagagaatgtgttagaagatctactggagatagccttaagacactcgtccccactctgggttggacctcgataggtcacctcaacggatatgattacatcggcgcacgtccaatgtatattgtatgattataagacagaggatttatcattgtacatgatcatgttgggacgagggcattatcctgatgacagataggatccacatgtagagtatatatgtaagcttaaccactcctttgaattataaaagggaggggtggagcaacatttaagggtattccatttgaacttctaccataccatccaacactagctaaaggtgatcaatttgatctaggcaagtggcaatagttggctgtagtccagtataccataacatactttatatatatctaggaggtcctagcactctctggttagattgcttgtagtctctctatcatgtgtatacaccaatcgataatcaactgaagaagacgtagggtattacacacaatttgagccggacatatacaaaaaaattgatgtgttttaggtataaatttcataactctatagattcgttctctgcttcccttgctatcttttttctcgtgctctggtaccaagtgtctttactatgacacatgaatagaacatagaactcatttaactaaaacatgtttatgttttagagacccaaacaacaacctcaaacggctaaacaaaccatttatataccaaagctgcaagccatatagaggaaaagctatattatttgatgtgagcctgaacatgtttttttaaagcaaatatatatagtttgcgatttacatgtttcataagtcaacgaacgaacaagcagcgactagtgggttacgaaatgtttggtgataactgat

SEQ ID NO: 65817 - DNA, 422 bp, Zea Mays
tttacagcaagaagatcgaagcgaccgaaattttacataggaaaggatgccaggggagtgtcttatgtgctttgtgcagggatcatgaatctattggtaacatagcaaaatttctttagtgtgggtcaacattcccaattcgttagatgatttgtttgggggctgcaaggggaccaagcctagagtttcctcaagattccacactttttccattgctggtttaatttgggccatctagtgcaatcgaatcagaatggcaatggggaaaaattccctaacaacccaatgttgattgtgtatgattctgtctcgcttctgcataaatgggggatcctcctcaataccaaagatcaaccttcactggagaaggctatggagtctatgaagagttggttagctgactttcaaccgacgctgggaag

SEQ ID NO: 65818 - DNA, 891 bp, Zea Mays
ctagtttataaatatccagggctcaatagcaattactttacattagtcgaggacggcgggttgattactgtgaagatcaggggctcttatgcaatagtgttgggctgaaggggggtatcgagcatccaggaccatccgatctgattcaacgacctagattaaatcgcgtgaaggggtatgcgcgacctaatccacgtcgtccactacacgatcaacagatcagattaggtctaccgcataccgaagcggtacgcgatacgagccgcacatcatccaagcgacggtgtagattttaaacactcgtggtacaacgttggccacctgatttaatttcaacgccgtggatgctattaagcgaacaggaacacgatcttttaatcctatccacccaattaaattcaacggtcaccgattcatcttcttcctcccagaacccagtagtggtggtggcattccctccccggtggagttgcgccagagaaggccaagccgatgcccaggtattcctatgcggtcgcggctagagctagaggcagctgagggtatgacggaacagcagaggagattacttacctagggcaaacactgggatatcccaggcacagcatagacgcatactgtccatccaacgagcaatccacaggcaaatgaggccggcattgtccaaatcgatgcccgtgatggactcctcacgccatggcgaccacccgcgactaggtcgtgtacaccgaacgtccgtgggggcatggaaccatggcggctacaccattttctctctctcccatggcatgactctagttttctcccaaaactccaagctcttgacgtccgagctttcttggtgacttgagacgcagcttcagggcggtgtccctacttcttatacacggg

SEQ ID NO: 65819 - DNA, 475 bp, Zea Mays
ctttatcctagtgcaacttatacaagattttcgtttgtggtgaagttgcttcatattaattcgttttatcgtatcaacaatgttggcttcactgcagtactgaagttgttgacatcaacatttcctaattgctcccttccttcatcttttggagatgcaaataaacttatccgtgcactgggacttgggtatgtttcaatccatgtgtgcctaaataactgtgttttgtttcggaagaactatgcaaagcacgatcaatgtccaatttgcggtgaatcaagatggaaatatacaaatagacggattcctcagaaggtactgcgccattttccgttgatccctaggctaaagagaatgtttgcttccaaagaaatagcaaaacaagcacaatggcataagttcaagaggaaacatgtggagaatgagcttagtcatccagctgatggggaggcatggaaagattttgatagaaaat

SEQ ID NO: 65820 - DNA, 1543 bp, Zea Mays
ccccaagccgtctgtgctccacaaggtattctctaaccacatccctcaccgccgggaaagtaatctcatggtcaggtaaaggttgaatgttgataatagcccagtcctcatgcaatggcaggaggcgccgagtaactgacctggccataatctcccggtgaaggaccaccgaagcgctgaagcccggcgggagaaagggttcaggatcaacacgcctaaacgccatcggagcaggaaccgaggatcgccaaccatcagacgaagacggagcaggttggggttttggtgaggtgacgcccaaagaaagcgtcagggactgaaggggtgccgattcaaatttttttaatacctcccgggcgaactcctcgaagcaactggatatgggtggtccaccgatcagagacgcaaccggtgtgcgaaaccaggtactgtgatcaggagaattttggtttcccaccaagaaggcccgactcccaaaggcagggaacgaagtcagaggagaaccgaaggaagtattcttgctgggacaaaaaaaaatccaagtgtccccggcccttacagaaatgacagcttaaggtcggcgggcccggtagcccaacaggcccgcgagcacgtacggggcgccattggaggttgcgggggcgagaccagctggagttcgaaatttaaaatttagaacggttagtaattccgcctccaagagcaacaccagaagaattagggtccaagaaccgaggagatccaatcctccccttagaggaagaaggccacaatcccgaagccggaaagttcaaacggttgaacacggaaactctggggcgaggccgaggcccagcacgaggccaccagatactacgagcctgagcatgattaaggaaaggagggcccaaacgattgaaaaccgaagatccagcccgagccacacgctgagcatcaccaggagacttgatagagttgcgaatcggaacagcattggcaccggtgagagggagcttaacaatatccgcatatgaaggattcttcctgccccggaccttcaaccaggaagcagcttcctcatccgaaaaaagcctgaattcatgcttccaattaggtccaccacgattccaaaggttgaagaaggccctgaactccttacgctcaatggaacctgagttgtaaatatgaaaacccaccgccatcgaagaaaccgaaaaccgaaaaacccggccagccagctgaagcacctcaaagcccgcggcgaacccaccaagggcagcctgaagaatatgaccaaccgagaccgaattcaacttgaagatgcatctgccaaaggagaccaccaaccagaaggacgaccgtagacacgggcgggcaggacaaactggagctgccaggacatcccagagggagtccgcgaaggccaggtctggtcgaaagtccagaagagagaagtccatggctgaaaaacgagaagaccgggggaggaaggagcgagaagcaggaggacctgagctaggggccgacgagggccgccgagaccgccaccatgctgaccgtcgta

SEQ ID NO: 65821 - DNA, 621 bp, Zea Mays
gagcaaccaatatcagaaccaacagaggaacaacactcagaccggtcaaaggtctagtggccaacaacataatcatcaaggaagcgtcgtgaacacaccggccaagaacaacaacacaactaccccagtccaacctaatggctgtttcaagtggagcgaacttgggcactatgctaacaactgcccaaggcgcaatcaacagacaccccagaggaacagcaaccagaggactgatcagaatacacctgctcgtggatctgcacaaaacaagactccgcagaaccagagtaagggaagagttaatctcgtgatagtagaatcagttcctgaggatgccgacatggtgtatggtatgtttcttattaactccatacctgcatcagttttatttgattatgaagcatctcactccttcgtaacaaagtcatttgtggaacaacataatataccaaactatcccttgaagaagaaactattaattcgatcaccgggaggtgaacttagagccactcactcatgccctcagactaaggttgaaattagaggcctaagctttctagtagagctgataattttggaatcgagtggaatcgatgtgatacttggaatagactacttgac

SEQ ID NO: 65822 - DNA, 994 bp, Zea Mays
ctattgagttaagtctgaatttcagtgaattggctcaactttgaagccctatatcttccaaattatgaagattttgccctaggtcaacacatcaagtttgtaaagctatgtaaggggaacaactttgctatggggattgaaccatggtcacatgaaagatttgaagaaaaatgtgcccaaagtcgagctatcagactgccttaagtctgaattcagactgacagtgtgattgagccatctttgagctgggattcgagcatgatctagtaagaatttgtgctatagtaagattgatgttggatagtagagcaacaactttcttaaagatggattagtaagtcgctacatggaaaattaagatccaggccttgcaagttgggctatcaggctgactgaagaacaatcccatggtacagtaacagattggatcaggttttgatcccctcgccgccgacgagccgcgcacggattcgtgctgtcgccgtggtgattcgtgctcacatcaattggatagcactgggggtaagtaaatatcacgccgtgaatacacttcggccactattttactccggctaccgtacccgagcagaccacggtggatttggataagttcgccggagatagcctcttcgcggccttgcgccacgtgccttggcacgttaacctcaccgccgtgactcacgttagcccgtccggtggtcgccggagagcttgccacggtaataggccacgaatcaccgcgctggtgactcatttcttctccgaccgccaccgcgcccaacccaaattcactggccatcgctcaagcacgctataaattgagcatgtcgtgagctccgtagggtaatcacccatccaaagcaccaacaattgcctccaattgttcaccagagaccacgaattgctcatttccccaaactgtgtttccgccaacgtgaaaaagtcctcaccgtggtcagctcgtctcaggtccgctcataccctctgccctttc

SEQ ID NO: 65823 - DNA, 885 bp, Zea Mays
cttaaacccgggtgtgacaccagtcgagtggatttcgcgcccggccctagaatgactcgtcataaataactggccacattaaccatgcctaacactgaggcacagcacgggcaccgctccacttcccactcatgacctacgaacccctcggttcgcatagcactcatgacctacaaatctcccagactatggtgcatttatggtctgcgcacccctcggcctacgacgaactcatgacctatcggactaggcctgagtgcacagacctctagcagggcacaacatgacaggccacaccgagccccaggctacaaaggccaagggtcggtatagactaaatgatggtgcctgggaccatcgcagcccaacgccgtccgccacggtaaatacaagacagcctggcaacctcgaaccccacgagtacgcgtggctttaccatgggtagaatgttagtttcacccttgcctgatggatccttcccaaggaagccaccgctgcctgacccctctcccggactataaaatggaagggttggcctccaggcaagaggatgcttccaaaggtagccagacgacacctagatggagccgaacccacaaggacgaaccccggacgaacaagaggataaggagcgcccacgaggaccaagaggccggagccccaccgccaagccaaaacttagctaggactccactctgtagcttctaagctccacttcgacccccgaataagagacctgggagcctctcctccctctctcgcccacttgtaacccctactacgtgttttgaccatcaatggtgccggtagcggaagccgccgatgactagaagtagcgatgttctaccaaaacgctgatacttatattcatcttagtagaatata

SEQ ID NO: 65824 - DNA, 475 bp, Zea Mays
gtgggagagaggatgtggagtgactgcttgccgagaaaatgaagggttgaagggcaaaatccagaacattttcaaggttggattttgggtgacttatttatcaatgatgtgatgtcatcgaggtttgtgtcagcacccagtccctaggatcgacaggagaaccaacacactcggaagcaatgggccaccattctaggtacgtcggcccagattggtattagtgagtagacctgaagaggcctgtaatgtggcacagtgagggagtctaagaggagatatttgccgctcgtgtaatagtggtcgtcacttttggccaaagaactaagaaacctagcttcctcctccccaaattctctgttagcgctaagcaggtcgctaacagtttgttttttggttagggttgagtgcgacgtttccttgaattggtcgtggttctataggggagagctgatcagatgggcgactacatcaagaa

SEQ ID NO: 65825 - DNA, 571 bp, Zea Mays
ggactcctcgagatcggccaaatcaacagtgtctgacgtgaggctccgtccaatccctttcaaaaaacgagttgtgccagcagtggatttactcttctttttcttctcgaacggggacactaattttggtatagaaactttagatttctttgatggtcgtggagatggctgtggagaaggtggatccctgaagggcgatgtatgtggcggagatggtgggccactatgaggatgaggagaaggagggtcagaaagaggatgaggagcagcatgtgaagtttgaggaggtgatgatggatgtacaataggaacaacaatttgtgaaggcggagacggttgggcctgggacgatggttgtcgtggtggatcaaccaattcgacatcccttcgaggccaaaggataaaattcttgatagcttgtccaagtgtctcgataccttcgagcctagggatgtctagcatgtcgtcctcgtatccttggacgactgtcgtcacttctatcctgcaatattcttctggaatgtcgtttccatggaacttgcgtcctgggatcgcaaggcatgtggctact

SEQ ID NO: 65826 - DNA, 311 bp, Zea Mays
ttttgagttcggttcgaacatgggatatttagccgagtcggataaaattgattagaggacgacatattgagcattccgtttgagagtacggagtcagattagtttttggacatagatcgaacatcgagaaatcggagtcggacacagctcgactagcagctgtcgagcgtttgattaaatgagctttagacgagtttgataaattgagaatgattatcgagttcgcattcgtgccgagaaacaaaagttttaacaggctccaaatttggttgtttcttgtgatcgaataattccgacttcgatgagctttc

SEQ ID NO: 65827 - DNA, 457 bp, Zea Mays
gttttaaagaacaagccaagaaaacataccacaatacatattgtaatggaaatagcctagactgcaaaggtgaaggtggatcagaaaaagtaactcattttttggaaatctatttcagtagatttccttctgacatacaatgtagttctttatcctttggaaaattgtccagatggtaagagtgacactaattatcacattgaagctaggttctgtcaggacaaaatcagaagcaatcctgactgaatcaatggcatcagcaactggtataccaatatcagctttctttggagcaggggcatcatttactccatcaccaagtaacaatatggtaaggaaaaatagcatgtgtcagtaacaaataataactaaaatagtgcggacttaactgctgagtaatatggtcaaatgaacaatatggctaagctagcaatgatcatgtcatgagaaatatgac

SEQ ID NO: 65828 - DNA, 524 bp, Zea Mays
cgcggaccagagcgagctcggagagcttccctactgctttaatctccggtaataatgccactctcgagttatgcattgcctgcgcctactttttcgcccagctgtgaccgttggggagctcggcctcgatgggtgcttctcgtcgatgccgccgtcgtggtctgcatggccaccagtcccgcgtcgccgtctgttggggttgtgaggtagaagagggctgctagccatcggatctgtgatatgcgatggagatgagtgggtgccgttcatcgattaatgtacggtggagatttgatcacatggcgatagaacacgagccttcggattgaaatcgtgcggttcggcgcggagaagagcgttggcgtcgcgtgggccgttgatagttcgatgtgtggtcgagatcaaactgcgcgcctgttctcatcgcaacaccctcacgtgtaatcttagccctccatccgtgatcgcacggccagtacttcacgataccctttcggcctgtcaatttagcataggagcccctg

SEQ ID NO: 65829 - DNA, 822 bp, Zea Mays
ctttgtcgctttccgctgaacttgtgaaaaagttcggtgctccccagttcccacactagccggctttcgcttttgaactatggtcacggccctttttcttctcgcagcagtatctgatacaaagctgacagacttttgctgtgtaggtttctccttgtcgttgtcggtttaggatataaaaattgctgagaaagtgttattttatgtgagacttcccataaattacttgtgacttcagtaagcagcatcaggattactggtcacttccttttttttgtttggtaaacttaaaagtgagggcttgtttagaaacggtttataataccatagtttaccgaataccatgacacaacaatgatatattccacatcagtataatttaacaattgtttgaagacatgatattttggttgcagcttagggtttagggtttagggaagagaaaaggcaaaacttaagtcacatgccactttggtctagacaaaacaaaaaattaaaaccccaaaaatattgtggtattggtgaaatcatgccatcatggttcaaaatacggagcttctagatgtgttctcaatcagcttttagcttaaaatatcatagtatatttaaatactatagtaatgttttgaaactaagaaaatactatattcccaaacagagctctggtactcgaccttaacagccagaacgcagaatgtatttggaaagctctgatccgaaaacagtggcgttcatcactacagaaacaattatgttttcaaagcgaaaacctttaaaaagtactataccatattcctacaccctaccgatccggaaaaacag

SEQ ID NO: 65830 - DNA, 414 bp, Zea Mays
ctcattgaaggtggcgttgaaccaacttaatcatgagttcacgctggtcaagccaagcctgaaggtctaaggaaagagctacatcggtcagcattaaccttagatgtcttggagcatgaccatatagtacttcaaatggggatcgccccaatgatgaatggaaactggtattataacaatattctaccagagacaacaaatgagaccatttttgtaggataagcgtgcacaaaactgtgtagaaaggtttccaagcattgattgacacgctcggtttgggcgtccgtttgaggatgataggaagtgctcatgcgaagtgatgtttctgtcagcttgaatagttcttgccaaaacttactagtaaagactttatctcgatctgatactatcgactaaggcaacccatgcaacttg

SEQ ID NO: 65831 - DNA, 454 bp, Zea Mays
caagcataaatttcacctcacacattaacagtgtctcagcactgtctttcatcactcactgctcaatagcctaggagaatttgccaatcgtccaaggtagcacagtccatgctagatatggccggttggatttacatcctactggcatgccagaggtactggttaactgttcgagtgtaaaagcgtaggatggagcataagtataacttttgttgaagaaacgacatctaagaccaaagggaaaaactgaccataaacccacccacatctagatgtcactcttctaaaggatgcaaacccaccttaactgctctatacgcacatggcacccaagtatcgaaacaaagtaacaaactgtgtgaaccaaagatgcactatgcatagcccgtccctcacaaatctgggtatctagaacccatcccaacacagacacacgcaccaaagagtaaaaatc

SEQ ID NO: 65832 - DNA, 340 bp, Zea Mays
agtgtgttgttcggaggaccaggagactaggttatcacttaaaaacactatatcctaaagtagactttcaagttttaggataccctagctaattagcattatagtagaccacaatcccattaggggtcatatgatgaagtcagtggcagacgcaggacaagaattcagggggggccaaaaaccacatgacaaaatcaaccaataaacaactactgccgcatagccgcatagagttcaagttgtcagttatcaattatgcaaaattgcaaatctagcacagcttgtttgcttaccttcctgactgcttgccttgatggaagggagtggcgaccgataggcc

SEQ ID NO: 65833 - DNA, 535 bp, Zea Mays
atagtgttaattcctcgccatagctaggaattgcggctgcaatgccgccgtgccgtggttggtacgtctcctcgcttccggtggtggtgcgccaccaccgttaggttcgccgtgtttttcccaacgtgagagtgtagctcgatttgaatttgggagatcggggtgcgagagtgcgaatcccggcatgcattcgccatgcgcatatgcggcggcgctgctgccgacgtcatggagattggggaggcacttgtgccgttggatcggtttccagcagatgagattagatcgtgactgattcgttctgagccgttgatccgtcgatgtacgcccagaattaaatgtgtggataccacttcgcgacttcagatccgggcaggatatcttagatcctacggctgctagtgaataccgattcgaaaacctaatcgtagccatcggggtttgatcgggcgactggggtttacccgtaccccttcaccatgactatcttacagaagagcccctgcactccataaaaattatcccgcggttcagg

SEQ ID NO: 65834 - DNA, 416 bp, Zea Mays
gagattccgggagagatgatgcttcagctgctccgagcgagtctgcgccgaagaggaaaagagtgaaagtccttactcatcgaccacgctatattgaaccggccgcagtgcctgattttggcggtgagacctcttcggtgtccgaaggcaaaaaacctgcgatttcgcaaaaaagtgaaccggctgtagcgccgaagacatcatcagccaaatcggatgagctgaaagctattaacattgaagagatgaaggttgggaaaacgagaatattggaagcaataagtccttcagcggaggtggcaatgtcgaaggcacaaaaggatatctcgacaacccccaagagaaagagaatggtcaatgtattggatgtgctagaaataataaaaacttcaagctctactccgaagaaagttgtc

SEQ ID NO: 65835 - DNA, 719 bp, Zea Mays
tgaggagtttgtaaattttgtctgtgtgatactgaacctcggttgctgcgtaggttcttgggtttgggcctgcgcacgcaaccgctactgacaatgctatttttgtggcggcttcgaccgtggctgctgatgacgattcgtttggctctgtgtctaagtgttttgagtctgatgattctgggagttcgattgtgtggacggaggagtcttcagacgaggaattggattattttgcgtcgttggacgtggctgcggcggagacttcgccacgtgtggtgggtgttgaggatccttcaggtgcgagtactgggtgtaggcggcgaagggcggtggcgaaacggagagtgagtgaattgtcgcgaagtaataggcatcattgtggtgagatggagagtggtcgtcttcgtgtggacgggactggtaagtgggaattgttgtcctcgccggctggggctagtgtgggtgaaggggagctgcgaaatctttttgagggtgaggaattgaggataatgctgttcaactatagggagatgggtatcatcccgaaggttgagccaatgtaatatgtgatgccctcgctgtgtgtatgtaaccataatttgtatgataaggctgcgcgccttcgttgatatagccgcgtccataggccactgctgcgcggagtcttttgggagcgacttcgattgtgcgcacctattattccggctgcacccttaggc

SEQ ID NO: 65836 - DNA, 448 bp, Zea Mays
caactcatccatagtgagagcctcgtagttgagtgactcgatgatcgccgagaccttcacttcccaaacccttcgatccagatcatgaagtagcttgagtgctctctcgtgattatcataaggttactgtgccttgttggcacgcatcttgttcacgccgagtaaacatagtgtctatggtctctctagtaaactgaacaaagttctcatactctccttggtacgtctcaaagagtctggttttcacattatcattgccctcatggaatttttgagggtggatcatatctcgtgagccatagacaaatatccaactcattcaaactcactcagagtgaggcacgagaataaagcattgcgagctttgttgtctgaatcacggatcaccacttgaattggagtgttttgttcacttacaacaatgaatgcaacattgaggaaaatctcc

SEQ ID NO: 65837 - DNA, 1516 bp, Zea Mays
cgaataacgattttgattaaaaggtcggatcaccaaccttgttctcttttcaggcccttgatttgacctttcacctgcaaaccctgttgattttccatgtcccgcatttttggcttccacttccagtgccgtactgatagccttactgtaggtaaggtccaagcatgttgccattttccgctgaagcctgtcattgagtcccctcataaaataattcttctttttcagatctgtattcacctggtcaatggcatactgggagagatggttgaacttattgagatactgcatcacagtatctcctccttgcttgaaccggataaactcttcttgtttcatatggagcactccccctggaacataatgctcccggaacgctagcttgaattcctcccaggtaatctgatgcccaacaagttggattgctgaaaattttgtccaccaggtgctggcaggccctcttagctgttgtgcggcaaacagtggcttttgtgtctctgtgcatcgaattatcctaaacttctgttccataactctcacccattcatcggcttataaaggttcttcttctttgatgaagagtggtggtcgagtcttagagaattctaaatatgtagtatcacgcggtccttgtgggggaactctgcctccgtgcggttggaactggttgcccgccatttcgcgcaagaagcgcgtattatcagcggtggcattgaccagggcagcgatagcctcggccaaagtcggtggtactggtggcgggttgggagtatcctccctaccgcgggatgtccccgcaccatcatgtgcacgagtccgtgatggcatctgaggcaaagaaacatttttaaaaaaatgacatgccaacatacaccatcatattacattgccaaaatgtaataattatacaaactccagtgtacaacttgacttcattacttattttacataagtataacacataatctatactactctagtcttcttcatctttcgttgctccatttcctgtcgcaggagatcgttcatcagcaaggttcatggaaggaggggacctaaaaaggtccagctccccatcaggtcctttccttcatttgctatttccgatggtccggctcccattgcagcaacgtctgaaggcacgtccgggtgcagtcgagcatacaatacatgcacttcttcatgtaaagtattacagtacacttgcaggctttcaagggatgcactaagctctgccacacgagctagagctttctcttcgcagtctcaagcgaaagagcgcgagttgacggcccaatcaatggtcgtaacccgttctgagatttcatactgtaggcgactgacttcagctaacaattccgctatacggtgactgtcctgctcacgtgccctattcctatgccgtagttctgacagtagttgttccaccctggccactaggtctccaattgggtcattactgccactactacttccttcgtgcctggaagctagctgatgtcatggcacaccaaga

SEQ ID NO: 65838 - DNA, 930 bp, Zea Mays
gcaattctggcatttagtttagatgaagaatcatcatcatcatcatcagagcttgcatccgaatcccattcaactagataggctttgccatccttcttcttgtgatataacttatttttctttttatcatctccatccttgcccttgttcttcttgcttggacaattcatggcaatgtgaccgggttcaccacactcaaaacattttctatcattgaaagcattttttcttgatgtttgtccccttctaggttgacccttctttttcctcatgaatttgttaaattttttcacaaagagagccaattcctcatcgctttcacttccatttccttcaccttcactttcttccttttcaatttcctttgaaactttagctttgagagctattgattcccctttcacctttttagccaaactcatagcttcggcttgagacttcttgaatatgtcttgagtgagaatttctcccaatacttcggttggagaggtagtggtcaaatcactccttactaacatggtcacaatagtgtcatatttctctgggagagatctaaggaacttgtgagtgaaatccacacctggtacattaaaaccaagtcccttgagctcattcactatctcaattaaccggttaaacatgtcggacacactttcatcctccttcatgagaaattgctcaaactttcctttgcatacatacaacttagcactcttcacaattgtagttccttcatgaatttccattagctttgtccaaatctcatgagtggttgtgagatttttgatgcggttgaactcatttatgtctaacgcatcatagaatacattcatagcttgatcattggttaggacattttcattatcacttggtgatagttcatcttcctttaatacaacaaatccatccttaacaataggccaaatcttt

SEQ ID NO: 65839 - DNA, 309 bp, Zea Mays
ggaatcaacaaagcattaatctcaaggaagattcgatcaagggggagtgttgtgaaaagttgtctcttcaaaaagacaactattcactaaaggagatgatctcatccatccattatgaagataacatcaagccatagattaggcagttacttataaccaaagggtgtgtcctttggcatggatgcagtgaacaattttctctagaattagacatctattcagtgcaccccttgcccttgtataaatatgtacaaagatcaatacaacagacacttcttccatttcttctactctcacttttacttctaa

SEQ ID NO: 65840 - DNA, 1122 bp, Zea Mays
ctctaatcccacatctggaatgtcagagcagacatccatcatatcaccatcaacgggctcggatagcatatcttcagggacaacatcctcgagagcctgatcaaaatttgctatggacaattcttgcaaaccaacaagagcagatagagctcgagaaggaatatcgctaccctccccattgactctgtaacgtcaactgttcttccgaatcaataggacttcttcttcttcttcttcgtcctcgtcaacaatgcagaccataaatggcatagagtcacacccattgagatctgctgtggtggggtcacacccatcgggttcagcatcgtcaaggtcacatccattgggttcaactcttgcagggtcacacccattgggatcaactctggcgccattgggttcagctctagattccaccggtactacttcaatggcaggagcagaagggccagcaccctaatccaaacacgacactcgtcgaagccgtctctttttctttttcttcccctcggcaggcgcagttggacgactgacctggcagagacgtttcggacgagtaccctcaggcctttgagtatacacggttttttcaggctctgggatagttgcaacagccatcggctcaggaggggccgagtcagaagaatctccagccaacatgtccagcatagcacttatctctgcatcacccggattcataggcatctcaaagtgaacttgcctatcttcattgggaagatcaccaagtgaagcaaccagaacctcaacttactcgagagagggtcgcactctaagacccaaaccactgtcactatcaggaggattggacacaaaattgaaaaaggacttgaaagatggcagatcccaggcagaatatgcaacaggagcaccaatatttgataccttgcccctgaaaatcacttccagtcggctcaccaaatccacagcaggaatcctcttgttggtaaaccgggttgagtcggcgacaccactgtataagtaagccgggtatgctctgtccttcagaggctgaatattcttaaaaacaaagtctgcaaccacagcttcagtggtcagacctttctccttcagcaaacaaatttcagtaagcagagccttggc

SEQ ID NO: 65841 - DNA, 481 bp, Zea Mays
acaacttgaccctttgagactaatgtgtttgcttgagtgcttataatacagtctcaaagatggattgaaagggaaaaggtgaacttggacaaagaagaggcttccactgcattccggtatcaatgacctttgttccaagtcactattgtattctctcattgcccgtggcttttcgttgcaatttttatgaggcattggggttaaaaggtcagtagctcttctgttttggtgcttaatgccaaaggggagaaattaaggccaaagcgactggatcagctaccacttgtgaatttttcaaaattttagtgttagtttacttgattttttatcaaaaccctcttattgcaaaaactaaaataaaccaagtggtggtaaaaatgatccaaatatgccaaatcctatgtaattggttttaagtttgacatcaatttgcactttttagctcgcatttggatatgttagtgcattttgagttgctttt

SEQ ID NO: 65842 - DNA, 737 bp, Zea Mays
atatctttgaaaattggggactgagccctagctcagttggtacactcgctggtatgcgagctgccgggtgtgggttcgatcctcaggatcgacaccccgtgcccgtgcctcactttggaatttatctccggttgcctcccaggttgtgcctaggtctaggtatacggtatacacacgcatgcccgtttagtagtattacgtgttttccatgcactagaggtgtaggcctctcaatcccttcctagtgtgtaacggacgcgcacacgtgtgtgtatgtggtgtggtgtgtgtaatggtgtgagttcgtgacctccttgtaccctctcaaaaaaattatctttgaaaaaattggggtctgcaattgtaaatatatcatctgaactattattatcataacagggaaagatggcaaattatatttctggggtgtttttgggaagcatatgaggaagaagtcatgccaaccaaacagtcatataaaaaatgtggagataagcaatcccagtcaaccaaatggcaaatctgaggaagtaggcatgaaattggatatgagaaaaggcaaagaaaaagagagtgctaaatctgacgaggtattggattcaacaggaggcaatgataccgatagggtcaatggctgcgtggcagtgcttgaggctcctgattcagaccctgcatccagttgctcggttccggctgcctcttctcttggcggatattgccatcatgactctgcaaaa

SEQ ID NO: 65843 - DNA, 532 bp, Zea Mays
gccgccatgattcgtgcctcagataagtggattacgctcggcagtcaaaagatcttcagcacggatgagtttggggcactatggccgccctgttgccgtgcccacttgccgggcgacgtggcggtgcggtcatcgccgaggctgccgccattttccccggttttgccacgccttaggtaattaccacgtcactttttactgtgaaggttaaccagtgatagtcatccatctatgaccagcgatcgccacggtagatcgctgcggtgactcatcccctcttctcggtcgccagcgcgatttcctcaaatcaggcaccaccgcttaatgcccctataaattgatggcccggtctactgcgccatgttgtcatgacgccagagcacccactcccaccttcgattagccactatagccggagaatttcattcttcccccaaatcggttgtctgcgccaccgtgagacgtcgcgccggggccagccactttcaggtccgccttcgctcttcttgttcgtgttttagcacccacacat

SEQ ID NO: 65844 - DNA, 580 bp, Zea Mays
attagattcttggggcaccatggacgaaactccctgcgtcgtgattcacggtaacacgaccctccatgcatccgttatcaccacctctcaatttagcgtggaccagctcgaccgggactagaccgggtgcgccggtggggcgccgccgttgctcaaaccgcgccgccacggtgggggttgggagatggaagatgggctggtagccgttggatggggagggaacgaataggattagatctgacaagtgttggccctcgaccgtcgatcatgtggtggatggcgtagattagatcgagaccctttaaaatcagaaccgtagctttcagatctggtggctaccatttcatactgattcacttagagacgcgatataatccgggctgtccggatcagattgtgcgggtgttaggttgatctgccccccataaaatcaacaccgtagtttctagatcctagggctgagggcgtgtatcggttcggataaaggagatctaattcagaccctagtttcaggatcagatggttatggcgcgtccacactaccgcatccgtgcacgttttacagaaaagtccccatggt

SEQ ID NO: 65845 - DNA, 593 bp, Zea Mays
ataatggagaagcgtggagatgagggtgccacgagacgacgaaggcgcggttgaagaatgatgaccatcgatgcgttggaggggagggagtccaatgctagcctttggagtgacaggcaattttgggacatagaagatggcgttgtggcacgcgagtggttttgagtaaaggcagtttgggaaggcgatgaagccaatagtgctatgaatattggaatgggttgttggtcatgtgatctaatccctaatgaggaccaaagcagggcaacacaatttagaaataaagagcttcgttccttctttatcaatgagagatgaagaagattatcaataaaaacttttaaccaatgcaatacatgtacacgagagaaggttatcaaatctacgattcctttactatctttttctaattacaagtaaacacagttgtgccttcgtgaatcaggacaataatccgaaactagagggaatcacaacttcgtaggcacaacaatctagttctcttctgccaaaaggtgtcgacgtgcatggcactgtacctctatatatagtggtgggtcctattacaactccgtataaaatttcaattgtat

SEQ ID NO: 65846 - DNA, 654 bp, Zea Mays
gtgaaatatagtactaggtaactctttagaagcccaatatattgagaacaaatccaactcaaagaatatttaaaaatataagttagcagtgatgcagtgatggagacctatattaccgaagattctcaaaccactttaccttcacgttgaaagaatgtgtttaagatacaacactgggagccaatgaagcaaaccttttccaacagcaataagcgaactagagaagagaagttgaggagcttcgtgtgggcattgatgctgcgaaggcgtgagttgaagctaacaacttcatcgtctaaggctttgctctatgaagtaaagaagaggaaaagccaaaagtcttgatcagcaaaaaaggagaaaagacgatattgaccatgcgttacttgtaaatcatgcacgtaaatttcgtgggcatacttgtaattccatacgaagttgtatctatccttataaatataggaacagtgctatgcacaaatcacgttttcgagagcctagagcttcgttttgctcaaccttcgaaactaccttcgagctatatgttgtgtaaagtcaaagatatgattgtaatgatgttacattgtgagaaacgaagtgaatacaagtatgcgtatccaaatgagtagcatgtttatttttcttgatttacat

SEQ ID NO: 65847 - DNA, 365 bp, Zea Mays
acatacttcgccaaagccacaacgacgttaggtgtcaactgatgaatctgcacttcatacctctgcaacacctccgctacaaaacgatgtgcgggtaaccgaaggccgacagtaaaaaatgcctcgaacacaactatctcaccctccggctccggaatctcttctgcccccggaactcgtccaactccactcccaaaataccccaactgctgcatgtcttgcacgcgagccgaggagatcctcgaaacgccaaatttcaccgtgtggcccgggtgcagctccaccgccaccaaatcaccgaaagtatctttggacgacggttcgaccaacggcgtactcgcagcggatgaagaagaagatggcat

SEQ ID NO: 65848 - DNA, 443 bp, Zea Mays
atatagctgaaaagcacaggaagtgcagcattatgtatttagacatagtatatacctaagtgcacagcaaagaaaccttatgatttggaatggagggaatagtaaagattaaagaactatgctctgaaagatggtgaataagaacatttaaaaagtatcttcagagtaaaatatacagcaagaatccaattcaggtaaggatacatcatacttgcagggatgcagtagcttggtctacgatgtacaaatgtggttgcaagacacagcatcaaagtggaatccatgccgtgagggacattccatacttactaaagacttcacatgattgaaaacacaaagcaaatgaaatttgttcgaaattaagagcatcacataatagattagttggaggtggtgttattatagttacttgagctatgactagcttagtggcttccatcaat

SEQ ID NO: 65849 - DNA, 574 bp, Zea Mays
ccgtttggcgtaaaacgttgagtcattgtgcgtaaatattttattatggattttagtttgacattgacatcgccataatatcgggacagtttcggaaataatggggagaccctgtaaacgtggatgcggttacttttatagtatccgagattaactttcattcgaaaaaagaccattaagcctgcataactaatcggagttggagatggtcggctctggagagtcgccggcgatggaaggagatggcgttcgtcttgatccagagacagagggaggagttggtggtaactcactggtgacaccacctcctgctctactgggtcctgagatcgccgagatgagcataggggaagaaggagaacgaagggtttgacctcctatgtccaatattagctccagggagatggatacgccacaaatactgcattcacctgtaagtccaatcgctgtatttgattattgattgaatatattgttgtgaacatattccatggtacaaacaacaatgacaatgaaatagcaggcaaaaaacattgatccaactatagtgccaacggtagggatgactttcaag

SEQ ID NO: 65850 - DNA, 403 bp, Zea Mays
gcaaggcagtgcaccgatatgccgttgaacactcgcccctacaaaagctacagtatagtactagcgggttccacagttctacgctagaagaagggttatgctagaaggatttctagttggaaaataataatagataataaataggtacagaaagtgatattttatgtttgtagtagggtatagaagaagaatttagagaaaatcgttgtagaagatagatatacagaggaagataggttgctgacatgccacatgagaggttgctcacgtggccagtggccattgtcctcacggccagcaggagcccacacggggacgaggaatttggcaaaatgggtcgctctatcttgccgctctgcaaaacacaccgtttctagctgaactcgtcaaaatgggtcgctca

SEQ ID NO: 65851 - DNA, 439 bp, Zea Mays
cttatcttattctttttttgggtctttatgggtctttatctctttattgggattaacaaattttggtgttcaactcagactttatttcttctgaaaggttccatcagggaattataatcccaactaggagatattctctctacataggagagtgaccattcgtcaggaatgtattaacgatatgaaatttatatgttgcatatttatagttcaagaatacgagttctcctaggtctcatgacgtattttcataatccttttaactgcatattttaattcatgcatttttgctagatgtgttatatactggaatagtgtttattcaacacatatagggatatgactctcacaataccacttgaaccatcacattcatcacacattatttcaatagtgcccataattgtttgaacttcaggccgacggctttcactttgcg

SEQ ID NO: 65852 - DNA, 629 bp, Zea Mays
cttgagaccaagagccttggaagattgaatggaattattcaaattgaagccaatgattttcaaatctgaaaatgggtggtttaggaacgttaatttggacattgatcacccagggaacgtgatctgaggtacccctagccaaggtatgagcagaagtggcggggaagttggaagaccaagcctgcgagataaaacaccagtccagcttttcaagtaaaggttggtgttgcatatttgaccaagtgaatgcttgccctttgagaggaatctcttgtaagcccagctggctgattgccgaattaaagttgagcattcaaatagggtctcctcccggtttgttgcggttctcgggatatctaatcatgttgaaatctccaagaaaaatccagagcttatcttcatcaatttcaaggttagaaaaccaggcaagaaagccctctctgccttgagtagaacatggggcatagatgttggttagccaccaatcaagacctgttaatttagatcgaaaatgaattgtgtgcccaaacaaattctgatcgactacatttccaaattgtgataaaacctccagaagctccaagagaagggccgtgagcaaacttatctaaagctctgttgcagaaaag

SEQ ID NO: 65853 - DNA, 308 bp, Zea Mays
aaaagaagagggagaagctgatgaccatggtcatgagtccactgagtctgagcttcggaatgaccaggcctttatgcaacatgcaactggggtcaccctgtcagctggccgaagtagaatttatagtggtagccgagcaaatcagtaccagggacttggcgcaagaatacttggcgaatagaacatatccaacgtcaagtgactggggaatgccgaagaagaaagaagcagggaagaagcatgaacttgtttgtcttgcttaccgtttcaaatttgagaaacaattcaagaagccttgcaaagaatgg

SEQ ID NO: 65854 - DNA, 1047 bp, Zea Mays
gtagttgaaaaccagcaccaagttgatatatactgaaataataccagcagccagatagtgtgatacaccactccactcatataacattggctctgaatattcctagctacacttttactcctattgcagctgccaacaactttaaacaagtttcctagatcaactacccaccaaggaggctttggcaggatggagccggccacaaccaaagatttacttctcaaccaaagatccgactacattgtgtttttgggcgctagactcatctcatggtactcaaagcggtagcccgtcgtctcccactccaacatggaggccaagtatcgagatatggccaatgacgtggtcgggacgtccttgctccgttagcttcttcatgagctccatagccccattgcccgtgccaccctcatctcctgtgacaacctcaacaagatctacctctccaatctcgtgcatcatcagcgcacgaagtacgtggagatcgagcttcacttcatccgcgagcatgtcgccgacggtgatgtctgcgttctgaccacttcgcagtttgctgacatcttcgccaaggggcttccttctactattttgattgagttttgttcccgtctcaacatctatacaggatagagttgtgactgtgaggggatgttagcgtaagtgttagggttaccatgtatacctttattgtaatgggctttagcccaaataactcatctattaatacatgtccaaccctgattagggttagggttttctcccactctaacaatatcaataatatgatgatggaatttatggtgatcataataaactaagcaaatttgggaaaggcaacaatgacatctttgggtgtccacaagccatatgatacggaatgcatccaatgtgtttcggttacaaggacactacatccaattgataaaatatacctagagtccgagttgaactgcacaatgaaggcaatgacgagaaataattcatttcaccagtccgcactacatattggactaacaaaaggcatgagcaatatgtaagtcattaagg

SEQ ID NO: 65855 - DNA, 581 bp, Zea Mays
ctaaagcatgcttggtgacttccgcactcggctagtgagtcagtctaggataattatatttatgtgttcatcgttggtgtaggttaaattaggtgaaaaatgtaaattatgtgacatataattggtgtttggaagatgagatagattaatttagaaagctgtgttatcaaacatgtgcaccaaagtgcgttgtagtagtgattgcgttaacttgaacaagagtctcaaatgcatgtcgtgctatggttgtatttgagatagtaaattataagagttgtgcaatatgaggttcaatcgatgtagttaatattgattgcactgtagagagttggtgacatgacgaagtagtcatcgcttcctctgcagttaagtcggtcatgtgtggtgatgatattacgcggtgaatgtgtttgttgaatgtatgtggtaattttagtgcactaaatgacacgggtaaaaattagtagtgctcatgtggtgtctaagctaaaatgcgaactagtgggtgaaaagcacttcgatatacatatatgccggatttgatgattgtggtgaatgcgttgattaattgtgtacggtag

SEQ ID NO: 65856 - DNA, 586 bp, Zea Mays
gaaaaggtagttttaggtgcagcgtaaatagttttgggtgctttttttcctcctatctccaacaggtgacgtaaaataggatgaaaaatatgaaataggtcggtgaacgtggagcctagtttcactgaacttaatttttgtgcagctacttgtacatcatttcggctagcctcagttttgctttgagggtgccgtcagacttgagtaaatagctatcagttcccttgccttcagtaacgcttagattcagtcctcagtaaatagttgttttactctttggttgcaaatttaaaacttatgatgggagcggccgatggcggaaactgctgatggcagtggccgacggcggacagctggtgatggaggcgggcaggtggaatgagttgggttggacgggacaaaaaatggtgcgacgggccgatgtgctacagatggcctgacgacgaatattttggggcaaccaaaatgttccctgtttgtagctatatatgagggagatttgagggctatcaaaaagatgggagaggtttaagggatctgttggaggcttcatttttcattttttcctcaaatttttgtttaagga

SEQ ID NO: 65857 - DNA, 367 bp, Zea Mays
gcaatcacacatcagaactgatcttgcaaacttgcagcataagaaaagaatatagaattcttccacaatactaaacagataagcatcttcactgactcccaacacaggccaacacagcttctcagataaagaggaaagtagagtgaaagggcctcccaactagataactaattttattaacattaaaaggtaaaccaaagtgcatgggatacccacactctagcgacagtcattacaaagatccaaatccatcattgttcatcatgacaaacataaaaacacaggataagcaaactaccctgtctaactaagactaaccaagagtaagactaagactataacttctatttttaagcattaattacaa

SEQ ID NO: 65858 - DNA, 1046 bp, Zea Mays
gttaagtaagcatgagcatgtcgcaccgtcttaagtcattgccgacttaagccgattgctccgttagtagggcatagtggtcaccccgagttaagtaagcatgagcatgtcacaccgccttaagtcatcgccgacttaagccgattgctccgttagtagggcatagtggtcacctcgagtttagtaagcatgagcatgtcgcaccgccttaagtcatcgctgacttaagccgattgctctgttagtagggcatagtggtcaccccgagttaagtaaacgtgctaattgacagtgaacaatctgagtgcctttgaaaccttttttattgatgatatttttctcaatttacagaatacatcgttgtcccaatagcttctgagatgtggctaggggtaaaacttcctgagatgttctatgttccatgagttcccaatttctgtttcgtccatctgagcgagtcgatatgatcccggccgagtgacttctgctactatgaatggtccttcccatagaggtgacaatttatgccgtccctcccctgttagaattcggcggaggacgagatctcccactgcaaagaaccgatgccgtatggccttatcatgatagcgcctcagagtttgttggtatcgtgctgattgaatcaccgcatttagtcgctcttcttcgagtacgtcaacgtcttctagcctagtagcttcagcttctgctatgttatcaaagattaaccttggtgccctgaacttgagattggccggtagcactgcctctgaaccataaaccataaagaagggggtatttccatgcagagctcggctgggttgagttctcaggctccaaactacatatggcaactctctgatccattttcctgcgaacttttcattcttgttgaagactttctttctgagtgcttctaatatcatcccgttggctctttctacctgcccgttggctcttgggtgcgccaccgaggcatatttgatctgaatgctcttttgctcgcagaaattgaagaattccgagctggtgaagttggatcctaa

SEQ ID NO: 65859 - DNA, 602 bp, Zea Mays
gttatgtaggattatacttgggttttgctgttggattttcctcatctgaataggaaatcggaatgcacaactgtggtgtggtgttaggaattcgttgtcgatgaaaactttcaaatctgtgtgctttgcgatgcaagtgtgcagtttgataggtcagcattttcttatgtccatgggttgcggctgatatctgaggcttgagaaccatgtatgattaccactaaaaaggtttttaaggtaaaattagagcatgattgctttagaagcattgtcttgcatgttggctccaacggctttgtttttggaaattacgatgacaatttagtttgtgtttgactgctctgtataatggcattgttatttactttacactttacatgcattttgaccaatgtgttgttgctatgtgttcaggaggatctatggttatctgctttccccgttggtaccgaggtttgctcctgtgcctgccttcttttattagtagcagtgtgtatgttagtgatccacatttggacatagctcacatcttctccttaacaacttatataacttgccatatcatctgcagtgggaaaacatcgataagataaaggagttca

SEQ ID NO: 65860 - DNA, 521 bp, Zea Mays
taaatacccccgtcctgtagctggaggaacacgcttgacaagacatttgtgctcctagccatatgttttgtcgtgctactcacttgccacctatcatgttcttgagtgcttgaggtccactatttctagccccaacatttggcgcccatcgtgctcccttcgaagaacatcccacgatggctcccaagaaagtaaacaccagggccaactccttcccagatgaggccgcgaaggcagccctcgacgccaagaaagggaaagtcaccttcgcggacaacatcccacccccacagtcgagaacaccaccaacgggtttgaggcaggaaacaacaagctacctcggaccaaagatccacctaccccaaaaggaagcattcacacttgcagctccgagagcacacccgaagacacccaaacccaaaaagtcacttctaccatgccaaaatgtggtctgatttgacaggaaacatgatacccccgccccactcgggtgtgcgccccttgggtaccaccaacagctc

SEQ ID NO: 65861 - DNA, 696 bp, Zea Mays
gcatggtctagttcaattggccgggccgctaagcatctatagcacacagggatgttgaaacgagagcaaggaagacaggaacgaacctgtagagagctagccacggtgagctcactcacggcggagttttgactgatttgggggaacttcaaaattggagcgctctggtggacgatctgaggcacgggctggtgcgttgggtgcgtgactacctagcggagctcacgacatgctcaatttatagggcccgagggcggtggctcttgaatttggaatggcgcgttggcggctggagagaggggagagcactggcgcaagagatgcgtggctttcaccggggcaaggtcaccggcgatgaacggacacgccaagatgagttactgcgacgtggtagagcacctaggcacgtggcaaccgatcgacaggcagccaactccggtgagcttatctggaccgatcgtaaggcaagggggtacggcggccagccccaggtctcattcgtggcgaagatcttttaccctgaagcgttatctgaccactaacggcatgaatcgcgtcaccagcgtgaatccaggcgtaggggtcaccggtggcaaggtgcactgcacctgtgatctcattcagtttactgtaccatggtgatcactatcagagcgtctgacagagccatttgcagggcattaatctccgattttt

SEQ ID NO: 65862 - DNA, 904 bp, Zea Mays
cattttcttcttccaaggtcaaaggaataatttctgaagcatatgcctcgataggagttgatggcccagcttcagcagtatctagtgtcatatcagcttcgctagatttctttgggatttcaccctttctatcaggagttgaagcaggggtttgtacttttgaagattccataatagcttctagtacgctggccattctcctcctttttggagttactgcaggaattttggacaccttcggcagatctggctcttgtggtgggctcagggttttcggttgctctgccgacttccttaattctggatcttcggttgttttctccttagcttcggcagaacgcttcggcacttcggctgtctcggttttctcctgttccgctattaccatcggttttggcacttcggccgattctcccttggcttcaacaagagtggggtagtctggctcaaccgcagaagaaggcccttcagcaagtttcggcactttggccgtttcaatatacctggccggtgcgttaaaactttaaccttttttccctttggcgtggtagagatagccgaagcaacagcctttcttttctttccctgcttttgcgagggatagcaatagtctaggtacacaaaaccaattacatcaaaaactctgtttaatcttttcttgccttgccctccgaaagccactatcatggcatcatcctcggccctcgtgtaggcaccaagcaactcgttgctagttgcctcaatgcaatctagccagtcatcatttggctcatcaaattaatttctgtacctgaaggtgtacttcaggtaaattaaaccatcctggctggatctagaagcagcttcgttcgtcatctcccagccgcttgagagaggccacactctgtaagcaatatgctcctgg

SEQ ID NO: 65863 - DNA, 292 bp, Zea Mays
ttatggagcttcaatgcgtcagttacttcctctctccatgaatgccgccacgtttcacctgcctcccgcgtaccgcgttgttgactcccctactcgcatctgtttcctctgcgctcgtaccacttcttattcctctagtgccgacggtttctacctcggccataaatggcagccgcccttctccttcacctgcccagcgccgttactccttccctcgctctataaatcttactatcgcagcatcacggaaccggtccacttccattcttcgtgccctcagcctcctgttcgt

SEQ ID NO: 65864 - DNA, 619 bp, Zea Mays
gtcgcattgtgcttcggtgccactggtgccgcgggccgcactgtgcgggagcggaggactgtctcgacatagatcgcggtgaggcacccatgcgaccttacctgttttcctatttcgccttgctgcgctgggttgtagtcatcggggtcttgctgccctcattgactgtgcgtagccacagctttcggggccacccccaccggcggcgatacacaggatcgcgctcgcccatatgggctgtttcttcagctctggttggtcgcggccctagggcaggcgcggtgtcaatgctagccgagccgtaggtagaagatgatggcatggccatcggtaggaggaagaacagtttcgggccgtcgatttcgtgataaacagacatgattagatgaagggttgtgatggtgggaaccgtgggatcggagataagctgtggagatttgatcttgcgtaccccttcatcaaacgaatctgagccgtaggatggtagtttgatgaccgagattagatcccatcctcgtaaaatcctagccacaggattttaatctgatgccccatgttgcttaccggttcatatccgcgtgcatctaatctaggcgctcgttgtggatccaacggcctg

SEQ ID NO: 65865 - DNA, 707 bp, Zea Mays
aataaacagcaaaaggaaattgcggatccactaaccaaagtttgaggcctttagatcacctatttgcctctaatgcagtagaggattccactgcatcaaagatgaaacttgatcggggacaggggcgccacaagatttcaactgggccgacatagagctgaggacattctgcaagctcaaaagttagcaagagaacctgtttgtcaacgtaaataacgcaagggaaagatcagctcacctagaggttagaaaggaataagggaagtcccagagctggaggcatgacgcactgtctgatgatggggtgtcgacacgaacaatgttgagagcatcattcggggagacctcagctccgataacaggcggtggattcctagcatccgggtcactggcctctaaggtgaccggaccaacaagagcagtaggcaaactcatcaccataggtccctcatattgaacctgtggtgatccgacatcgacgtccagcgaggcggccgaagaggaaccaggctcaggacccttgggggctgggtcatcctcagcaccaccctcgggggctgggttatcctcagtggcacctccaaaagctaaagcaccctcgatcatacccacaggagctgggtgaccttggccggtaacgtcaagagacagtgtgtccccgtgagctaggccgccctccaaggtcgatgaagcgtgagaaactgtct

SEQ ID NO: 65866 - DNA, 757 bp, Zea Mays
ccctggtcgccattgcctccctccattccgcagctccatagagtccgcaactaacctaaattccagagccgccatagccatcagtcgccgccaccggtgaatcttaccaacccatgtcgtctgccctctgcgttaggtcgggaggttcgtcttcgcctgggaaagccttctgcgcctccaattcgagttggacaccaccgtggcacgagtaattgctcgccgtacttatccatccgtcgcggagccactgcgcgtcgtggattgattctctgcgccgcacaagactccggtatgatgaccctactagcttccttaggaccctagcttcattctgcatcacttgtacgatgtgtggggccactggcttgccgattggccgctcgtcgacgatggcgccgccgtggcggtgtggctgtgtcgttgtccgacaggggtgatcggggcagctgttcgcgaccgttggattggtttcgaacggctcagattagagaatgcataaccctacgccgttttaagatccgagccatctatccggcgtcgtgcgcatcagattagatctaggatcttttaaatcatgaccgttagatactgatggggcggtcacgggggagagaggttgagcgacgctcgggatccaattgtggccctcagatctgatctgaacgaccctcgtctgagaataccccttcacgggtacattttgctaaagagaccccacccttttcatgaataaacccgcagtccactcggatgtgcc

SEQ ID NO: 65867 - DNA, 867 bp, Zea Mays
cggatggtagtagtgttgttgtatcccccttggattggctgggcattcatctcatcagttgattttttttcctttcattcgttgggacttgagagggtgtatgcatctgtctgcgggcagtggatctgatctgataatgctgctatggcgtggagagcgacgtgcccttaggaaacgccagatgtgcatgctcttgctgaagaaacaggcggttaagtattcttgtgcctgtgttgctcttctaggggtggtaggagcgtggcatcctttgtctgcgttcagtgtgcgctgtatgtgcttgcgtcttccagctgtagacggcgaagacctgcagaggccgtggagagctgctgctgcagtatgactgacatataatcgacgtttatttttctgccggacgactttttggtggcaatctacattgaagcgtgagaggaatcacttattcgctatcttgaacacctgatcttattgtcgctggatttcctcgttcatattcttcatgtcatcttctaattttttatgcttagcggccgacaaattagtcagtcttgtgtcgctgtttggagaagcagcgttgggatctttagaaccggtcatataagcctgattttatatatccgcaaccttgttccccaacagagtcgttaaaaaagtgtgttcccgtcaatgtagacagcaccaatcagtaggggtgtaccggctgtcggtgccggacggtccgtgacctgagcacaggagcagcaccttccctgcaacgcaccggacggttcacgataacgtagggtcgtgttcctcctacctagaatctagatctcgtcccctggtggagagatcataggatgctctaggtcaacaggttaccca

SEQ ID NO: 65868 - DNA, 688 bp, Zea Mays
acccccccacagtgcctgcgacgaccgggagggtgccttcgccgccgcgggttgttgaggtcacggcaatggagactggagaggcatgccgggagttgtctgtggatgactacctggtaggagatgttgccatgttcgatgaaaagacggcttgccgcctctcgttgattggggttattgttgtgtgggttttgtataatgatatgagctcttgtgttaatttgtgtctcgactgcagagactgaggctgagcagttggcggtggcaccggcgaagcttgctgaagagagggcgttggggaagaccgcagttgtcgctacgctggaaccatgggcacaattttgcgtctcggctgatggggacggagaagtcgctggtgcttctgcgggcgagggcgtggcggcaaccgtagcgcgacagctgcgccatgtgagtttattttaaccttagactttgcagtaccaggctgctatcttagctgaccaggtagcgtccggggcgctggtgagtgttgcgacctcgcagcttcgttcagaaaggaagaggctggaggacaaaatagagcgcctgcggatgcagcataccgaggtcgtcagagataagtctgtagccaagaacaagagctggaaccttctggataaggttggcatgcttgaaaaggataacgaagatctcagttagaggctaa

SEQ ID NO: 65869 - DNA, 318 bp, Zea Mays
ctggcccatgggattgcagcattcttttctatgtgccggaatatttctgcagatgtgcatgagctggcaaggcgtcaaagggagactgacgacaatcttcgtcgtcaagcttcctctatgggtatgccttttgcccctcgctcgcctgacgtgcctcttcatccgcctcctccagaaatcaaagagtggcaccagcaggcctacggggtgccttttatgtcagctgacgatgaagaagaagatgaagaatactttgatgatcgtgagcagtttgccccgcctccctaccagggggatccgggtcaatcctcttctcat

SEQ ID NO: 65870 - DNA, 348 bp, Zea Mays
gaggaccatggagaccggagccgaggagcgaaccaccgtgacgtccaaggcttagcagagagctctagtcccatagtccttaggtctagccaggcataagagacttgagagttcttcttccctctctcgcccgcttgtaacccctaatatgagcattgagcaacaacaatactgctagcgcgagccaccgaagactagatgtggggacattctgttcgaatcagtataaacctcgcacccactaagcacaccatcgagaacctagaacacacacaaacaaatttacttatcggagcttggttcgaaacaccgacatgtatctttcatccctctcaagtgatttcgaag

SEQ ID NO: 65871 - DNA, 367 bp, Zea Mays
acagagtacaccgaacataatgataatgattgctacccgactacacatccatcctagctaaacctccccatgcatcctacagtgccccaacaccataatatgacatcctagacacgtgggggcgattactttttggccccctcaagaaggccggaaagggacaacgagccatacgagtggcatagggcaagcattaatgcccataaaatcaaagccaatgggtagggagaaaagataatatccaaacacccacacctatgttggaccagagggtcggtggactaccaccaaccaccattgacatagtaagggagtatatagtcagggcgttccgagataggctcagagttagcatgattcctaggga

SEQ ID NO: 65872 - DNA, 390 bp, Zea Mays
cggcgttctgccacactttggcctgtggaagtatttgtaccactgtcgccttgggatggccggagggcagcaccagctggtggggggcgcgagcttggagatgtgccgtgggaggaaggctgactacctcgacatcccactcaaggacagtatcaagggatggcgcctggaatggttcatcgtggagaatcatgggaattctctccccccacggtcagggagacagccagatgtccgcactccgagctagaccgaatcccccacagaccaggaggtggctgaggcaggggctttgctagctgaagttgaattgttgaaagaaaggggtctgactgcagaagctgtggtcactgactttgttttcaagaacattcaaccgctgaaagacag

SEQ ID NO: 65873 - DNA, 667 bp, Zea Mays
cagaagcaacaacgcaccagtccaacccaatggatgtttcaagtgcggtgagcttggccattatgctaacaactgcccaaggcgcaaccagcagacacctcagaagagcaacaatcagaggaatgaccagaacacccctgcttgtggatctgcatagaacaagactccgcagaaccagagtagaggaagggtcaatcacgtcaccgcagaatcagttcctaaggatgtcgacgtggtgtatggtatgttccttgttaactctatacctgcatcagttttatttgactctggagcatcacattcatttataaccaaatcatttgtggaaaaacataacataccaaagtaccctcttaagaagatgttacacattagttcaccaggaggtgacatgaaggccacacattcatgcctccatgttaatctgaagattcaaggaatagatttttcagtcaacctagtggtcctaggatccaacggtattgatgtgattcttggatgcgattggttgaaaagttgtgatggagtgatacaatgtgccaacggaacaattatgttgacaagcccgcaaggcgaaagaatccaagttagcacatacatgtcaatagatacaaaaggaaagacagtggtgaatcacttggaagaaaagcccctggaaaatatcaag

SEQ ID NO: 65874 - DNA, 468 bp, Zea Mays
ctttcaatcaatgattaatgattaccaagatcataaccatgcgtgcttaatcatgattgtgtgctttagaggttatgtctcttgaatcatttaaatgggtagcttttcattagatatatccaccatgattaactcttttgtgttcataaataaacctgtcatgctatatggttttaatgattaacctatgtgcaaatatgacattttgtttagtttatgttcacatgattactctagtctggtattgtgtgaataccaaaatccatgttgtgcctctaatgcacccttttgagctataaggtgcataaacaaaagaagccctcaattagtgataactgatgctctcatggcaattcaggaaaaggcaaaggtatggagaatggaactatgcaatttcattgaatatcttgaagttccattgattgtgatcacaactatggtcttgcctctgaattggtagtatcttgg

SEQ ID NO: 65875 - DNA, 869 bp, Zea Mays
gcaaaaagatttacagataaaagaaaatgaaatgcaagtgaagagaatgtttgaggaagagaggattatgacaacggatattacttcgatggcagaccattcgcagcagtactacaagggcctataaattgagattattgctcgtcgtgcatcaaagtagctctcagtattggtattttttgacacttcatctatccgatctatgagatgcttaacttagatggcttctaccttaaacaataatttgaactgatccaaaacatatcaaataaacagttataatatttaatttcagcttgaacaataatctggcctgttaattatgagttgtaggcagctagaacatttaatttagtttgttaggtctgacctgtgaattattcttttcttcaggttgctgtgttggagatgccctaaatgaagccatccatggtatcagtacagagtgcaacatgatttccttgacaagccttcaagaaaaatgtgtcgtcattagcttgaaataaatgtcatagtcattagggagatttgaactttttatttgagagctatcattgtgagtgggacaactggtattggtgctctgttgcctttcttgtttaatagttttggtcaaaagtagttagagatcatatgtcgtttgaactgatcaaaaactatttggtcgtgtacagcattggtgctttgttgcctttcttgtttaatagttttggtcataagcagttggagaccatctgctgtttgaactgatcaaaaactatttggtcgtgtacctatgtcctacatctgacccactaccaactgttgagaaattagacatttatcatattaaatttcgaatataaatcgtgaccaccaataaatagtct

SEQ ID NO: 65876 - DNA, 557 bp, Zea Mays
ccgtcgatgagattgctcgacaactatagcatggaactggacccccgtgggatggtcccgagcccccacgtgttccatctagacctccagccatgggagatccggtgccgccatgtgtccgggccattacagatgggactcaaacctccataagtgccttccggactactagccagggtgtctggagctgccatgtttgcatgcgctcctagctactactcttcacccaggcgggggtatggtgttgccacatggcctatggcacatcaaggaagctgccaggcgtcgcttgacgcgggcctctggcatgggaaccacccgcattaaagatgggcaagatgcccacctgttcacactagtggcaggcatcatgtgcagtctgcaaggtcttgggcacgccaataacccgcgtgttaccaaggcaaaggccattgacccactgtgtcgcacgtgggcaaccccatcatgatttctattattcccgctacggaggtaggcgacgaagacatgcggaggggactggacgacaccgtccacctactcccctacgcaagttg

SEQ ID NO: 65877 - DNA, 382 bp, Zea Mays
tagatgataatacaacaaatacttcaagatcggtccttagattgaagcaagcaaatgttgctgctagcgttccaaagtcttctgcccaatatcaaagagaaattgatttagatgaattgccttatgacccagttgatcggaagagaattacagagtacactaaaaatcctaagaagcaagatgagattaggagaagatatttaactagaggaccttatagaccaccacctaattttgagtatccatatagagacattggaagtgaccgtcgaagatttaattcagaatggtttaaagaatatggtggttggcttgaatatagtgacaaggttcataaaggccttttgtttatgctgctacctttttagagattgtaatgagg

SEQ ID NO: 65878 - DNA, 410 bp, Zea Mays
cacgtggccatcgcacgacaggcggccaactccggcgaggctatcaaaccgaccgtgaggcaagtggatacgatggccagcccttggtctcatccgtggtgaagatctttttaccccgaggcgttatccgggcaccagtgggcacaaatcgcattgctggcacgaatcgcatcgtgggggtcgccggcgggaaggtgcactgcacctatgatctcattcagttcactgtaccatcagaaactctatcaggacgcctgacagagcggtttgcagtgcctagatctccatttttcatgtaataacttgtaatccacctttaacaaaagttgttgtcctataatccagctttaatcttactatagcaaccatacttcaattctcactaaatcatactcaaaatagctcccaaa

SEQ ID NO: 65879 - DNA, 588 bp, Zea Mays
caccctttctaagaagagtatcatattcctgtggagttgggtcctttgatcgacgccagagttcatgaagaaattgttccatgtatggcgtcacctcttcaaggttggtcaatacatatagcatgatatgccgccactcttcatgttgtgtggaaggagcaggtcgtcataataggggagccaagtcaagcctgacttatgtgttcacatatgctgctcaccatatcccacaaaaccaccttctgtattggccacgagcccatctatctgttgacgaatttcggcaccagtcatcgttgcaggtgggcggtctgtcactacaacacctttcgtaaagttcttgatgtctaggcggaatggatggtcaggagggagaaattgtcaatgtttatcgaaggacgaatattttccaccctttttcaaccaaatgaacctaagagctttcttgcaaactaggcatgagaacttactgtgaacacaccaggcgcagaatagcccgctcggcagcatcttcagctctttttgcttcttctgaaacgtcatgagattccttctcatttcttttgatggcttcatcagcgatttctt

SEQ ID NO: 65880 - DNA, 319 bp, Zea Mays
atcagcgatgccacacttttggcacattctgctcatcttcttcgctcctttcgtacccaacctaagaacttgttcctcactacttttgatcgttctgcccttaggtttggccttatctggtcttgctaagtttacaccttccctatgaaactccagtttctacaaatcaaagatattaattcaatttacaatctcataatctaaccatatatctaacattgttattaccgttctagcttccacatccggagcactactagcaaccagatgcatatcagtgttctgttccaatgtacgtatcgacatattacattgaaca

SEQ ID NO: 65881 - DNA, 339 bp, Zea Mays
gggggtgcatatcaaagcgaaggatttgaggaacaactctaaatatcaaaagcgaggcttcacatctatgattcaatgcaagagtccaatctatccgagttgataactttgtcaaatcacactcgagggctactgttaagaatatatactagtggtacccaagaacacttcaacgagcaaggccttaacatgtgggtctgagaactcggtgatgttatttagggactatgtccatagttcaaagagatgtctggtttgcctggggaagataaagctcatgatcttattagatcagtagataagattgatatccatataatatggtagagtatggacaat

SEQ ID NO: 65882 - DNA, 1205 bp, Zea Mays
ctttgagctctttatctcagactccttcactggaccgatgctggcttcgactatcgcagtaggaatcgtctctgaagccaaggggatagctttggcctgttctacaagctccaccctctttgcatcaggttttgtaactgtcctttttatagaatgcaaccttggtctatgatttaaaaccttaaccttcttcggcttaggcacagtggaagaagaggaggctgccattttcctcttcaacccttgtttttgggcaggaaaacagtaatcaggataaaaaaatccaatcacattaaaaactctgttcaatctcctctttccgcgagcgccgaaggcagtactcattgcttcatcctctgcctttgcgtaagatcccagcagctcattgctggtggcctcaacagcttcaagccaatcatcattcggctcgtcgaactgacttctatagcgataggtgtattttaagtaaaccagaccaccttcggcgtctcctagtcattcacgagtggccacaccttgtaagcaatatgctcctgtaccagatccctggtaccaatgtaagtgcacacagtattgaaagccatcgaacacgcttgcacctcgtttccacttgcaattaatggccttctaatgccaaagcgtgatcgtatgggacgttggataataccctccacgtcttccctctcactcagatcattcttcacatagaatcattgtttcatccaagagcccggccacatctttcggaatgttggcacagggaacctcgcgtcagaacggggcacaaagctacaacacccgaaattgttgtgatattgttccttcccagttgcttttgtctggtaagataattcatgaatattgtagaaacacttgacatcttgctccagtccttggatcctcatggcccaaataaaaacccccactttaattaaagcttcgggggtaaggtgatgaaggtatatctcaaatgtcttcaatacttcaaccagcatcttgtgcaagggaaaatgaagcccagccttcttaaaactcttaaaaaccactacttcgtttgcttgaggaaggggaatggtattctctcctccatctctcacaatggatgtgtcctggaaatattttcccttcatcgcttcaatctgtccttgctcaacactggattttccaaaaacaacatgacttggcctccatggccgatcttcggc

SEQ ID NO: 65883 - DNA, 729 bp, Zea Mays
tgcatcgctacgtgctgcaactctatccttcatagggaatatatcttcgaaaaaggaggcatcatgagattcagtcacggtgttaacatgcacatctggaaaatcagatttaatcaccataaatctataggctgcactattatgtgcatatcctagaaagacaatcaacgatttttggtcccaatttacgtttcttgcacgcaggcacattaactttggctaaacagccccatgcatgcagaaatccaagagcaggctttctacctttccatccttcatagggtgtttttacatcccttagctgatggaactcggtttagaacaaagcatgcggccaaaatagcttcgccccaccatgacttaggtaaactagaactatccaacatggcattaaccaagtctgtcaaagttcggtttttcagttcagccacccatttgattgaggccagtagggagctgttgactcatggatgattccatgttcagcacagtattcaccgaattcattagagagatactcccctcctcaatcagacctaacccgtttagatttcttttctagttggttttctacctctaccttatagatcttaaaacaattaagtgcatcatctttcatcttaaaaagatagagctggcaatatctagtagcatcatcaataaatgtgataaaatatttcttaactgctctcgtcaaaatttcattcattttacacagatctgagtgaa

SEQ ID NO: 65884 - DNA, 571 bp, Zea Mays
tacatctacggcgggcacaccctacaatacagcaagctctgtcgcatcctggacggactcttcctacagtaccccattgcgacaaggtatggaaattggcagcttccgtcgtaccttattttcaagtctgaaacacgactggtgctgacttgcttcaatcaagatccacaacgcaataatattctaaagaaaatgaaggattcgctagaatgatttaggaatatttgaagactttgattggtctacttgaccatttactttggcagcagtatattggattacttgcagtcttcatgtcctacctttttgcaggtgcaaggatcaggtgattactttagcagcagtatattctctagccttgctttgctattttcataaaaaacagcttgtgtttttgttattattaggcacatatagaaatgttttaggcatggtcaatgaaactcaagtcatgcttagtctacttcctcccattcgcattccctctccggccccgtgatgcaccctcctctccgtcccgcacccccgtcgtccccttcttcaccccccgcacagcggcccggatccccgc

SEQ ID NO: 65885 - DNA, 278 bp, Zea Mays
ggctggggaatcatccgactctacccacaccgagccgatggccatcacaactaggcaagaatttggtgaagaggtggaaactcggaaacccgaaggtgcccacccaaagcgtccatgccgagtgaaccgcccgactgcacctatcgaggagaaaagaaagaagaggcggcttcggcgactgtcgtgcttggatcaggatgccggcccttctgtaccagttcctgatgatgtcccggtagaggccattcctgaggttgatgccaagggttgtgatcgtg

SEQ ID NO: 65886 - DNA, 279 bp, Zea Mays
atctggtcggacggtccggcgaaatacgccggacggtccgcggtataaccggactgtctgagatgatgttcggatggtccgaccgcgtccagtacttgccgtgtgcctagtggttgtggctgtggtggtggcgcgaaagcgtgcatcggcataccatatgatggctgggtcaagggtgacccatttatagccgatgtgtttgacgcgggtggcactgtattagactctcgcgatggaaagttaggagcagctgatttctcgtatgcacgtaaatgcatt

SEQ ID NO: 65887 - DNA, 792 bp, Zea Mays
gataaaagtagaagcaggtttgtggcttaccagcgacacgtaacagagctcggggtgcatcgagacagggacattgtagtcggccttcttcaccgtgcccttgatccgcttgaggaggttgtcggtggtgagggtagccgatgacatccgagaattctccactaaggccttgggcatcatctcgtctaggcgcaggcgtcgctccaccagcgatagcacccttcgatggtgaaaggtggcaacgacccagctgtggtaagcccacggtcgcggggcttctgtagggcatccaaaagggtctacagctgaggctgatgctctcgcggagtgcccaaccgccaattctcccccgcgggggtcacgtctcgcttcgtgtacgggggcagcctcccatcatcgtcgtggagttaaaaccaacagctttgtcacccctagttcgaagaggtaagggaggcatggatacatagatctgctcgatccgagcgcagctggagcatgtagtcaccggtcctcaccacagtgcgaaccttcttcacctctgatggcagagaaaataactccttacagaagtggtggtgctagagatccctgtgatggtcgatcttgaggtacccctcgcagaccgccgcaaagatcgctgccagggcgatggagttcgggttgaagttgtgaagctccaccccgtagtaatgagggagctcccacataaagcagcttgctgacaccccaaaccctcgcttgtggaacggtacgaagctgatgatataacccgcgggcggggtcagctcctcc

SEQ ID NO: 65888 - DNA, 784 bp, Zea Mays
tcttaattagatcaccacactggtaaggggctacatcactcaagcaggtcctagccaaattttagatcgatcaatgcctagagtttgttcaccctcgaacattgtgcctccaacaatgaacatgatacagaagacaagtcgtcataggagccttgttgggagcacgatacacaatacacgtttacaaggtatcttgaaaccaggaacctcacacgtacgggagggacctcgccacagtgtgtagtggctacatgcttccctagttggtatgatccttctaaagcttcgatgttgattgatcctctagccatgcaacaacaacgaggaacaaggaaaactagatgaaggaaagggatgtaaagagaggtagcagatagatttgtgcgccaattatatgtgttgggcacctcaattagccatggatcttatatttacaaggcaaggatggccttatccctcgagaggtcgaaacctctttaagacttgttgaaacgagagttagatccaaacggatcctggtcattttctaaaccggtttgattatttttcctataggtcaaggatattttttatgaaaatattaattaattcatctagcgtctagataaatacaacatcatagatatctctcatagtatttatgctcaaacttgaggattttacgatcacaaatacgacatcatggagatatccacgtctcttatgttggttcggtattaaaggtaaccacctagatccgcgcgtatctgttatgcggggtgtcttatgtgacatcgtgttgacc

SEQ ID NO: 65889 - DNA, 870 bp, Zea Mays
taatagtggtacctagaccatggtcgtagtggtagtaatgcatccaaataaaataggaacttttgtgttctgtctgtgatgcctgcgtacccgatgtaggaatgcttgaagcttatgtttgcttatgtacggaccttatgtggaatgcttcatccttttgtatgaaaattatgtgcaatggttcatccttgtgttcattgtctatgaaccttaagtgaaatgcattaaagtttgtagtttgtactccaagtttgttatctgttgtccaacttaatgtatttatgtatttcattccagaatggctgacaacaacacaaacacaccttttcgaccacctgctgccagccccaattcaggtaaccaaattcccccccacccatgtgggatcctcagatgtggcacgcccaaggtttggacccaacccaggcttctatttttagtaatcctacatcccatatgaccaatcctacttggtcccagggacctaatgacccatcttcatatacctttcgtaatccatggaacccatattttggtatgacgaatactgggagtcctcctacacaaacatctttcggtcaaccacagatggtaccacccattgcaggtccacaagtttccacccatgttcccagccagactgaccctataaattttgaatccaaagcagaacacagtgtccatgaagttaacagccctaccaaaccttcagatacacctgcgacatttagaaggacaaaggaacagaacttcaaacctgatgaagacctgttgctttgcaaaacatggctagagattagtagtgacccagttattagcacagggcagaggaaggagggtttgtgggctagaattgagaaaaggtacaat

SEQ ID NO: 65890 - DNA, 496 bp, Zea Mays
aatcagcagatatctatgtgactcatctttccttttcaccactatcggggttggaatcttgttgtttacattctccactttatcttcattgggattcatcatctaggtagggggaaaagggagagtgagacaaggtttcacaaggttcatgatatatacaaagggcaaatacgaaacaaggacatttagacatttataatagaaaggaagtgacagctagcgtgaaataaggatggtgttgtattttgacagggataggttgatggtattgtgtttcaagggaagactagcaagaaaacaaggttggcacatagattcttcgatttgactcggactctgccaactgagcaggtacaagaggaaaagggtagagagagaaaagaggtaagcatagacggatttaagggagggagcaggaaaagagaacccaactacccaactatatggcactcacttagtgaactgatgtcattgcggaccaagggccacaacacat

SEQ ID NO: 65891 - DNA, 699 bp, Zea Mays
aaacgaggcactactccactcacttgcccatgttctttagctctgttgatcaatatcgcaagcatgtctgctgcgattttgaatagtaaaggagacaacaggtcaccttgtcttaatcccttctttgtttgcaagaactttcccacgtcatcattcacattcaccgcaacactgcctcacataatgaaagatttaacccaagatatccacttgggcgaagcagctaatactagttgtgacctatgagctaactaactattagcagctaatgtatccaatcaggcccttatcaataaaaagaagacgaactgaacttacaatttcctaaatgtagtttttatctcatattctcatttcagtaattgtactatcaatagttttgatgctaactgtagttccctaaccagcattgttgactgaacatttcaactttctcacttgcaaggtttatcaatagagagaaaatcaaatgcctcttttaaaccatcgaccattgattctaatgtaacgttgttgccgaagttgtcaacaaccgtcagacctctcatcttacttaagttattgtactgttgataaattaatgctaactgtaatttcctaaccagaaatgttgactgagcacttcggttatactcgagcaagttttaaacaagtggttcaaatcagtttgcccaaagttgatgctgagtccactatatc

SEQ ID NO: 65892 - DNA, 478 bp, Zea Mays
ttcggccagaacattatcatagagccagctagattaggtgccagcacatgccacctagttttggtaaaactatttataccaaaactatcaaatccttgcagtggtgtgtttgttagagttgttgcatcaaatgttatcaatactcattacctcttgtaggctctgcaacacattatctcattttgtattatgtggcatcaatgtttcactagtcccttcttctcccttttaatggattggttgacattagaatactctggtcatccactcctttggcaaaaccttagagttgtcacagcacatgccaccggtggtacgttcatccggttgttcctagtgtctcccacatgctcttcttccttccataataaaaaaaagtcaatggggtccgatttagggctaacaacttttaccaaatccaaaccttctcataagttcacttttagcacacttgccctccatgaaaataccgttggtt

SEQ ID NO: 65893 - DNA, 579 bp, Zea Mays
ctttttgccttgagctccgaaggcagttgtcatggcatcatcttcagccttcgaatatctccaagcaattcatcactagtcgcctctatggcatctagccagtcgccattcggttcatcaaattggctcttgtaccagaaggtatacttcaggtagactaaaccaccttggctagagccagcagcaatctcctttggcatttcccacccatctgcaagtggccacactctataagcaatgtgctcctgcaccaagtcccttgtgcctatgtaagtacacactgtattgaaagccgcctggcatttttgtatatcatttccaaggatagtggctggcctcctaatgccgaagcgagaccatataggacgttgaatgatcccttttacatcctccctttgaattaggtcattcttcatgtagaaccattcctgcatccaggacccaggccatctcttccaaaatgtgggaattgtgtatctcttctcagaccgaggcacgaaactgtaacaaccaaagttgttgtgatactgctcctttccggtagccttcatctcatacgacaattcatggatgttgcaa

SEQ ID NO: 65894 - DNA, 883 bp, Zea Mays
gtccctgtcccggatggttgatgcaagaagacacacaaggtttatcctggttcggcaagagaaggccctactttcagcgggggaggggacttgtattatcttgcacctaagtgctcgtagtagggggtacaagcgagtcgagagagggaaggagtcccaagtctctgagtgtgattaaggcgagtgccaatatcaggagcgaagtcaggagtgagcggtgaagtgttaagcttgaccttacctatagaaggccctgggcttctcctttatagtcgcaaggaggcccaggtgtacagatgtttgctgtgctatttttgtggtcagaggcggcgtgtctgagccccgtagtggcatggccggccggaggcgcgtccgagccctacagcggcatggtcgatgggatggccttcttctttgagtcgtcctttgattaggtaaagagccgaggctagctcgggagcatgggcgcctacccgagcctgttttgtacagaggtgtggacggaacgtattcgagggtgtcgagtcggagtagttgaaacagcgctcggtatggcaaaaaagcgtgtggtaatctggtccggtcgtcatcttggacggtgacaccggtcttgtcgtttctgtaggccccataccttcagcggggtttgcagtagagcaggtgagcttccctattggggcagttggctgaggccgtgctcgggcgaggcggagatttctcccgaggccgaggccggggtagggcgttgcctgtagccacgctctgggtggttgaaatagtggtcggaatggaggaatactgccctgtattcatgctctgatcatcgccatgggcggtaaaagtagattagaccgtagtcatgtcatcctttgttgactttagc

SEQ ID NO: 65895 - DNA, 1035 bp, Zea Mays
gttggtcccaaagcttgctggatcccagaggggcgtcactccaaccctgctgacacaaccatagtcggccccaatgccactcggcctgtagaacaaggaggagtccctaaggcgactccaagcatgatcgacgtccccaagtgtgtgtgggtcaacgggtagggcgacacaagcatgaaacgcgagggttcccagtaatggagtctggcaggaaactgccccatcaaggctaggcgcagtcgtgtactttcgccaaaaatcattgaaagttggaaatgtgcattgatactattgtccacacggaagaaaacattttcatacacacaataaacactacacagaggttcgatacataaatcctaggggcactatctaaataggagcgaggagactaccgaccgaaggctccagggtcggggggctgatcaggagaaacctaacgtcgactaggttcatgatcgactaagcgtgggggcaaacctgctattcaataacatccagctcctcatcgctctggacggtggcatagcccttagcaataacagcgtcgtcaaatcaaaatgagagaccatccgcccccgacatcggaggagagagatgggcacacaccatgtcgacaaccagacgaagctcttggagtttggcacttctttcagggagaagggtgtccaccaggcatcccgcatcgatggcacttacacgagcgagcaagagctcgtgtgttttctctgttgccaccgcctttgcgttgtccaccacgaccttctcatcacgtgcttgagtgagcattttgtggagctctacagagataggagcgcgaggcagtcaggggtggagaacgatgaagacgtaaggggtaagaaagggactgacctccagacgtgtcatgctccctcgcgagttgtgagtccaattgcaccatacgagcctccgcctcccgtgaggatgactcggctagcccagcaggacacttcaccccatggagtgcctccccaagttgggaacccttgtcccgaaggcaatccacatccccac

SEQ ID NO: 65896 - DNA, 278 bp, Zea Mays
ccggatagagacgccgcgcagtcgcgcaccaccgtagcagccatcgttaccgatctttccaggtcaggaaaaccgagagacatcgtcataagtacaccgccatcacctgacactacactacataatcacaacttccaccaattctatcgtcaccgccactccacacacgtagcgagcaggaacagcagcgcagctccctgtccacaactttcaccgtctatctctagctagctcataatcatcacaataaattcctaggcgacagtgacaggaaaaat

SEQ ID NO: 65897 - DNA, 1148 bp, Zea Mays
cggaggaggtggggcagactgaaccggaggtactgagacaccagactgctgaagcataagagccatgaatgccctactctcagcccgatcctgaagtagctgctgctgaagcgcatcctgcctgtcctgcatgttctgaaacatcgagagcatcctctcggataaccgggcctgcttggctgccaggtgagcctgctgctgagagagagtctggagaatcgaagcaagagcagggtccatagcctgaggagtagcaggggcagcactagaactcccagcctcatgatcatgtgagcgtggaggcataggaggcggaggcggaggaggaaccccaaaatcatcatcatcagctgctggaacctgagtgtcgaactgacgaagagctgcatcctcggcctaagagtcaaaaacaggagcagaagctggcacaggaatctcaggcacaggacggtaggatccaaaaacgaggcgggaggcctcaagggtgccctgaaaccgaggaggctgaatcagctgcgcaaagatgtggcacaagtagtgagcatagggcaactgccgacgagcacagatcccatccaaaacggtgtcctcgatctcaaaaatcaggaagtccacaacgtcaaacttagagtgagagaccagggcaccaaggagccagagctgtatatgtgtggtagcctccctgtatcccatcctcggcagaagagttcgtctgatcagctcatataaatacttggctgctgtagtaaaatatgccggtgaacgtcgcgacccatctgagaagggggggcggaagagagccgcgacgtgagctgtacccggagccacaccgccgtgagggcgacgaggaggatcagaagtgccgtagcagaggctgtgaagacgagtcgtcgactcgggaaatccaaaaagctggcggatctgaccggcagtaatggtgacatcctcgcgctcaaaacgaaacctcatccagtgatgatccgggtctatccatacagaggcgtagaagactcgaacccactcctcaacatacctgccgctggtagtcaaaagggtcagaaggccaggcagatatttgaggtgcgcctgagagtcagcaccggctgcaagcagaaaggctggaagatccaaaagccggtgcactcgca

SEQ ID NO: 65898 - DNA, 799 bp, Zea Mays
cttaaagaggagaggttcccggatgagcccgtgtagatagcaaagggaaggggttcgaaggccgcacaatgctagaaaccagaaagcaaaattctttttcattattattgccttggggacagtgttgaggcgtaccacaccgcggttagcatgcaacacgaacgacatcgtaagcatacaccctaagcataacgcgactggctacatcgtcgtaaccttctagcaggtcctccaacctttcatctgagagggacgaagggggatcgatgagatcctgaaggtggctgccgaagtagacctccaccatgagcagtggcaccgcagccctacaatgaacatcaaagtcagcaatgtcctgaacatggcatgaggcatccagacgctcgatcaaataggcaccatgggccccaacgtaatcaagatgttggctcgagcggtggcgttgcatctcgagctcgcttccaagactgccacgagaaacaagcaggataagaaaaggggacaaaggagaaaaaaccatggaaaaagtgagaatcaaacgacttactggaaacacaacctccagcctcagtgagctacacccacagcagcacgacttcaaccgagcacgaaatacatcgcggctcccccgagcacccgaggaggagaaggaagaaacatggagctctaccgagatgcagcctccgggtagacgacgactgcgctgctatggggggaggtggagcaaaatcagacaaaaagaggacgtccgtgagcccgagggaagaagccttcgacgacttgtgaccaacggagcgcg

SEQ ID NO: 65899 - DNA, 429 bp, Zea Mays
gttgccaaaaagtgtgttggcacctactttgctaaacaccaatgatccctagatcccattcacgtggagttgagaccttgggaacctatctgcaaggtgtcgggcgatcggtgataggtcaccagaccatccatgtgtaggtcaacatggaccagataattaggatcttgtttgcaggtatgtggactacctgcatgtaagaagcggatgtccatgatgacatagagggcttcatgtagaacatagatctcacctcccgagaggtaccccattggggagaagagatcgtagggttgattcgagatcgacaggccatccaaagtaccactagacaacgtagagttaaagagaggtggagattaagattgcaaactacaactagacctatgctacatctactcctaagacatgaagataaataatgtaaat

SEQ ID NO: 65900 - DNA, 1017 bp, Zea Mays
ccctcgggggctgggcagtggcttgcgcttcccacccgagccgagtcatccccggcaacatcctcgggggctgggcaagtgtcaacaccatccttgaggaccaagttctctgcagtatccacctctaaggctgatggaccctcagttacttccatgggaccaagatgatccaagtcagtctcctgactctcaagaccgcgttctaaggttgatgaggcatgagatgacctcaacccagcatcgagcacatcagcacaaacctccatcataccatcatctgctggctctgataacagatcctctagaaccatatcctcaagagtctgatcaaaattcgccaggaacaactcttgcagaccaatgagggcagacaaagcaggagaaggaactccactactttcaccactggcgacgtactgccgactgttcttccgagtcagagggacctcatcctcttcctccccgtcgtcctcatcagcaacacagacaacacacccattggggtcagcagcaggtggagcacacccattggggtcagcagcaggtggagcagacccattggggtcagcagctggtggagcaccctcattaaggtcagcgtcagtaagctcaggcacgggaacttcctcagcagcaggagccgaaggaccagcatcctgatccaaactagatacccgcccgagacgtctctttttctttttctgctcgtcagcaggaagatcaagttgatgggcccgggaagggcgtcttgggcgagtactggcaggcttctggatatccaaggttgtaccagtttctgggagaggcgacaccaccaatgtcccagcaggagcagcatcagaagagtcctcagccagcaaatcaagcatagcacttatttctgcgtcactagggtccaaaggcacctcaaaatggacctgccgttcatcatcaggaatctccccgagcgaggcaaccaagacgccaacttctttagcagagggtcgcactctaaggcccaaactgccatcagtgaca

SEQ ID NO: 65901 - DNA, 468 bp, Zea Mays
gaggagatggggaggacgctttctatgttcctccctcgctcactactcctgctgctctgctcgcggttgtttttgcttaaaaaaacaaagaacttttggtcgttttcgtgacgtaaagtaacgagatttgggcgtttggggctggatgatttggcgtcaggtttttggagctttctatctatggcggttacctgttaactactagtccggaccaacaaaagaattcttttgtgtgcgctcatgtgtggagcgttattgtaccactcaacatatattttatgttttatattctatacataagtgtaatatagataattttacgaaaaaataaaaaaaacagtatatacctaagggctagacacgacatgatgatcgggccgatcaggctaaaccgtgccgaaccactgatcacccatcaaaccatacccatttaaacatgtatacctaaacactagtggtgctcccgag

SEQ ID NO: 65902 - DNA, 351 bp, Zea Mays
caatgaggccgcggaagaagggagaaacaggaagaacaaggccgcgaataagaaaaggaacatagatgacagactcgtgggtgtcttctatcgaaacagtgaccccgcggcaaatccaaaaagggcagagctcttttggaagaagaaccccaacatcaacaagatgaagaagatctggctcagaaacaatagacatgtggttacctgtgaacgacaactgactgttggggtcgatgggaggaatgattgccgcagcagagctctggtccttccgcttcgacgccattgcaatctcgtcgccgggacgaaggggagcagaatttcagagaagcaaaaaggtggtttgaggcg

SEQ ID NO: 65903 - DNA, 339 bp, Zea Mays
acggcggtaccgatggaagcttaatcccgaaaaatgtgtttttggggtaccagcaggaaaattactcggatttattgtcagacaccgaggaattgaggctaattcggataagattgaagctatcatgaaaatggaagcaccacgatcacagaagaaagttcagcgacttactggatgtatggcagctctgagcagatttatatccaggctaggagaaaaaggtttaccattttacaagctactcaagaaagtggataagttccagtggacctcagaagcgcaggaagctctagatgcactgaaaaaattcttgacaacaccaccagtactgaagccgcc

SEQ ID NO: 65904 - DNA, 531 bp, Zea Mays
ggggaataaaggaattagggcgctatggtggctaatcggaggcaagggatggtgctctggcttcgttacaacctagtagagctcacttgggcagcaatttggagactccatcgacggtggtgtccaatttgaagaagtcacgctggcggctggaaagagaggaagtgcactggcgcgggttatcgtggctttcactgtggcaaagcctccggcaatggacggacttactactacggttcactgcgacgtgctaaagttcctaggcacatggcgcacgggcggcaagcggtcaatgccggcgaggattatcacagccgaccgcagaccaagtgggttcggtgaactatccagtgaccgggtccgagccaatccgagcgccaagatcttttactcccctcggttatccacttgtgccgagcacggatcgtggcgaccggcatgaatctgagcgcggggtcaccgacggcgaagtgcagctaacctgtgatctttttcagtcaactgtacaatggaaagccccatttagagtac

SEQ ID NO: 65905 - DNA, 595 bp, Zea Mays
cgctcatgcaatatctcacagccgtccacagtctcgagagacaattcaaggggttcaccctacaacatgttgatcgcgccaagaacgaagaggccgacgcgttagctaaagcagcggccaagggtgaggccttgccctccgacgtgttctaccacgtcatcggcaccagctgtccacaacccagaaggtttacaaataacttaggacgccgaaggccaccgcatcatcaacctcatcatggccgaagattggcaggccccaataactctgtatctgcaaggacagtatcatccaaccgatagcaatgaggccaaacgactaaagcacagaagtcgggacttcgcattagtcaagggtcagctatacaagaaggggatcggtcagcccatgctgaagtgcataactgaaatcgaaggcatacaaaaatccttcgcgaagtccacagcgcaacctgcggctcccactcaggacccagggccctcactgccaaggtgattcgtcaaagattttactagcctgcaataatttgtactgccaatcgagtcacgaggtcatgcgaagcatgccaaaagttctcccctcgctcaggccggcc

SEQ ID NO: 65906 - DNA, 529 bp, Zea Mays
ccgctgacaacacccgcttcctacatgaaatggcgggacagcaacttcagtagcaaggtgggagggcttatccgcacggaccccgcgaaacttcatacttggatttctcggaaacccgtccaccactattcgtcaaagctgaagatcccctcgaagctgatgaatgggttcaggtcattgagcagaagtttggactcatccgatgcacggagacccagaagccattatttgtggctcagcagttaagaggccctgcaagcacctggtggggaaattatgtggccattcagcctgccgaacatcaagtcacctaggacgaatttaaattggcatttcgggagcactacattctagaaggagtgctccatatgaagcaagaagaattcatgaaactcaaacaaggtggagatactgttatgtagtatctcaacaagttcaataatttgtcccagtacgcaattgaccaggtcaatactgacctgaaaaagaggatttgttttatgagaggcctcaatgatcggctacagcg

SEQ ID NO: 65907 - DNA, 493 bp, Zea Mays
ttcgaactcatattctggttttagctcaacttagcttaaaatgtgtcaaacttctggagttgttttatagagctcagtcaaaaactaggattgttattagaaagcatcgattgataaacttggatgttgtgcgttaagcagctggcagggtggtagagggacacttcacatacttccttggactttccacctttttgacatagtttggattgtatgtcgagtagtgggttcgagtgttttatgctacaatttagattgacccagaccgttaattgcttcatttttggtttgagggagaggatgtgaccttacatgctagtgaggtctatgccctttttagtttacctgattacatcatgaagctccacaacctatgttacagatcagctgacccacttcgtcgccctcacggtgaagtgactcccccaccgcctacgtatcggctctattttgatcaccattcttagaggggtcaagacgtgctccttccgac

SEQ ID NO: 65908 - DNA, 406 bp, Zea Mays
tttccagcaaagttttgcccgaattcggatttgagaatatataaagaggagtgtcgaataaggctgttgtctaacaaatttttttccccatccaaacagaagttcagttttcagtacgtgagtggtgctttgttgttaatgaactaatctacatttttaacgaaacgaaactgcagaatagatccagcgtccaaaactgccctggtgacgcaaacctaaatcacatcgtagcatgcaggcccattgccacagcagcactgttaacaagcagatgcacgttatatatatattcacctgtaccaattgcaatgtctgcacgtacgctaaccccgacaacccacctctattcacctctaatctcgtacgagcataccagagcactaatcaataatcccacagacaactc

SEQ ID NO: 65909 - DNA, 844 bp, Zea Mays
gaacgattgaatacggtgattcagttggcccaatattagcaaactctgaggcgctatcatgacaaggccatacgacatcgatcctttccagtgggagacctcatcctccgccgaattctaacgggggagggacggcataaactatcgccactatgggaaggaccattcatagtagcagaagtcactcggcctggatcatatcgtctcactcaaatggacggcacggaaattgggaactcatggaacatagaacatctcaggaggttttacccctacctatatctcaaaagctattgggacgacaatgtattctataaactaggaaatatatcatcaataaaaagacttcaaaggcactcaaattgttcaccgtcaacctgcatgcttacttaactcggggtgaccactataccctactaacggagcaatcggcttaagtcgacaatgacttaaggcggtgcgacatgctcacgtttacttaactcagggtgaccactataccctactaacggagcaatcggcttaagtcagcaacggcttaaggcggtacgacatgctcacgcttacttaactcggggtgaccactataccctactaacggagcaatcggcttaagtcagcaacgggttaaggcggcgcgacatgctcacgcttacttaactcggggtgaccactataccctactaacggagcaatcggcttaagtcagtaacggcttaaggcggtgcgacatgctcatgcttacttaactcggggtgaccactataccctactaacggagcaatcggcttaagtcggcaatgacttaaggcggtgcgacatgctcacgcttatttaactcggg

SEQ ID NO: 65910 - DNA, 349 bp, Zea Mays
tgggcagctgcaagaaaggtgcaaggaaggtgatgatatgctgaggcatcgatacatgcattgtaataaagttcaaagagtagcagatggatcatgaggtcattggttttgttcttttttgaaatttcatctccataacgtgatgatggttgtcagcattaggattatgtttgatcactcgtccgcctcactgtttcagatcggaagatcataggccagtgtcatcctcttcaggaggagcttgagattaagataattaagtcataaccatgactgagtaattatatgtcagttctaattactaaatggagaaggcagattggcttgagcgcagtataatgcaataagc

SEQ ID NO: 65911 - DNA, 1019 bp, Zea Mays
gagaggcggtggacattcatcttgcccgtcggcgcccaggggaggtgagcaacgacgctctgtgtgtcttttctgcttcagttggctacagcctacaagactacaatcgtaaaagaaagcagtatttttaagttgtttgctcctcagtaaattggcagtagtgccgcccgtgcaggggaaaaaacatgtatacatgtttttgctatcctcccgcaccacggaagagtaatcctttctgaaatagttttgtctaatcgtgaagagtcctgcaccacaaaagggtaatcctttctgaaactatgttgcctaattgtgaaaagtcctgtcaaagctgtgtccatttcgttgtttaacagagtagtaatgttagcttcaaccttttgttggtatacgaatgggcagtccttggtagaggaagcttgaccaatctgaaacacaagttgttgtgaggtggccaatctggtaccttttcctgtcttctgcatctattaataggagaggaggaaattctttgtaatcaactccattttcctttatttgtatactgtggtatgtagatgatcgtgatgtaattgaaactttgtcgccctaacatggttttacgttccaggggtaagggctcaaggagtgttctcaagcgtctgaaaaatgggacaactatccatgatgctggctacttcattccaatagagctggatggtccagaggtacacactcctgttctctttcccttgcttgctttgcttgtattttttcccattctctgctagctgttatgagtggcttttcatcttctgatggtttagcaatcttactgagtgcgccactcgctccaggacgccctgttatccgttctcagaatggttctgcgcccatcgcctgcagaaaaaacacccgatttgaagcatctacaggatcaagttatgcgaggtgtttgctatgagaatgctatggtatttacatgttcaccacaagacagtatggggtacaaatgtttgaagtgacaactgtgacttaat

SEQ ID NO: 65912 - DNA, 438 bp, Zea Mays
gtccgagctgggagctcacgacatagagtttcggccccgcacagcaataaagactcaggtgctggttgacttcgtatcagagtggattgagcaccaggtcccggacagcccagaggttaccgaggtgtggagaatgtactttgatggctcattgaagctgcaaggagcgggtgcggggattctctttattgctcctggaggttagcaactcaagtccgcactctagctactgtttccagcatcaaataatgctgcagagtatgaagcacttattcatgggctaagcatcgccgtatcactcgacatcaagaatctgatggtatatggtgactcgctagtggtcataagccagataaacaaagactgggactgctcgactgattccatgggcaagtactgcgtagctgtgcgtaaattagaggacaaatttgaaggatt

SEQ ID NO: 65913 - DNA, 999 bp, Zea Mays
tgcccatccaaataaaacaatcataatgcaactctaaaaaggttgtcaaagaataaatatgtcggtttgtcatgagatcactattgttgtctacttgcactagttctaagctatgaattctcactagtaggcttgaaacatccaccaattgcatattcaactcttagttggcaaatgctttaaatttcttgtgatgattatgatattattcaagatgattgatcccccaaacatagttgaaatatgtttttagctaggagaattgttctaaaagggttcatccaaagttgaacaattatcatctataactaggataagtcttctaataggtaaatatacccatttagatagtcgatcacacatgttcatctaggccactctaatccgctacccgggttttgtgttctaggcccaatcggctcacacagccgacccatgctcaacgagtcggccctcccccacgccctcccacgtcctaggctgtaatgtgggcttgggtcagaaaaggtcacatccatttagacctaaactaacctaatttgccatcgaccgatatgtgtcattgatcatcatcagaaggccagaatcgtgtgtgatacgtataaaaaccgaaaagtgttggaacccaaaaccctaaatcatttctctccctctccttctacatgttctctcctcgtgagctcccttcttcttccacttcttccctgaatccaatgagaaggagagtcatggtggagtttcagtgttgtccacgcagaacctcactagtgcacgcacacccaaggatgagcaggtcgtcattaagcggcctcgtggcaatgccctatggctacacacgccttcgtgcttgatacaggtgatcgcatcacctcttcccatggtctatcgatgtcacctacgacaaaggtaagccttatagaccccttctccttcctttgtttgctcaggtgatagagatttgaggggtgttagtgttgtggtttggggatactaagttag

SEQ ID NO: 65914 - DNA, 411 bp, Zea Mays
attgtttgaggctctatatggcagaaaatgcaggactccactgtattgggatcagactggagaaagataattctttgggcctaaacttatacaagaggcagaggaacaagtgcgaatgataagagagaatttgagaattgcataatcaagacagaagagctatgctgatacccggagaagactactggagtttaaggagggtgatcatgtctatttgaaagtatcacctctccggggtatgaggagatttaaagttaaaggaaagttgtcccctcgcttcattggacccttcctgatcttaaagcgagtgggagaagttgcatatcgactagaattacccgatcacctggcagatgtacatgatgtctttcatgtgtcccaactaaagaagtgcctcagggtacctgagta

SEQ ID NO: 65915 - DNA, 449 bp, Zea Mays
cgagtcaagaatctttactggcttctcacggtactgaaggtctttctgaatctatattgcctcttcttcgatgtgactttctggtgcttgcaggcatttgcggagctgggacacgtgaaacacattgtggatgtcagacatggattctgttagttcaagacaatatgctgagggtcctactctgccgatgatgggatagggaccaacgaatcgcggtgctagctttcctttcacttggaaccttctgacaccacacatcggggagaccttgaggtagacgaagtctccttcctcaaatatgagttctctctgcctgttgtccgcataactcttctgccgactctgagcttaaagtaatctcttgcggatcagggcaactttctcctcagcctctttgacaaaggcaggtccttccagtccttccagtgcattttcgtccatacaatgct

SEQ ID NO: 65916 - DNA, 535 bp, Zea Mays
gttgtacgcaaggctgtctgccagatcagcctttgtcatggcgcaaaggccagcttcgagcttcgaaaaacccatacttctggccatctcccgacagacggataattctttgttgtccgggaggcagtacaaaaagtcatcttcgttcgtaccattaaacactaggggccccttcggatactgcaattcccgcgcataatgtttggcttcagaaatttcttcttcggatagtctttttcccgaagcatgtctaacgatataatcaaaaccttcggagggtacctcgggagtaagggattcagcttctttggtcacacttttctcaaaagctatattactatctagagttattcctttggacctttgctcggttgtggcaagcttcgtcttagcaggcaccgtgggccctgcctcggtttcagcctaggttattgtagcttcaacttctatttgcttagtattagctttgggttgcgttttgtcagcttcgccaaccttccctgtgggagcgggacttatggagtcggttctttcc

SEQ ID NO: 65917 - DNA, 534 bp, Zea Mays
aaaagacaaaggattgttaccgtgactgaagtgattgaaacaacaccaccaagagctccaactctgaagatgccggcaattgaaatcatgacagctactgaagctgtaccttcggaggctgtcgcagaagaggccagagccgaagatgctaactccgaaggtattaatttagagagcatagccactgatatagataaaatgctgctaaacatggccgctgaagaaactgctgcagccaccgaagaaaccacggctgccaaaccccgagaaaggaagaattaaccgaagataccttggaagatgaaacttttgacttccgaaacttagttggccaggagctgactgaagctgaaaaagaagaattaaaagaatatgctatatcttgtggatatcggccgggggcgcttctctttggtggtattgatgatgaagggttaagctgtatacgagaccaaaccggtgcgaaggttgtcggtaccttatcgaagagtatcggcttcccgaagcttgaagcggatatcagccgctaccgtc

SEQ ID NO: 65918 - DNA, 352 bp, Zea Mays
cggtccaaaacgatttcccctgaatcgccacgaccgcgtcgtcaccgccgcacagatcccatctaacggtcgaggcgcttacctcacgtaatctaacagtggacgttggttattccatcaatggttttgagcccaccgtcaatctccgatgaagaaacgcgacggcgcgtgccatcccgcggcggatgccattgccagacacccggatccagtgatctagcgctctaaactcaactctacggggtgctacgcaattgtaaggaactagtgaacatggcgcaggggatactcactggagatgggcactgatcggagttgaccacggtgcacggcgaattcgcagaaacggcga

SEQ ID NO: 65919 - DNA, 1054 bp, Zea Mays
ggataagtacttcaacaataacggtgaactacattctattccttcatcgggtaacaatagaggtcatagagtttttgaaatagtcaggaatatcaagtttgtttttgggaagaagacaaaagacgggaaaacaaggaaggatgccaaaccagctctaggggctatattaaaaaagaagtctattttcttcgagtacttgccttactagaaagagttagatgtgtggcatgcgatggatggtatgcacgtttagaagaacgtgtttgaaagcataattggcaccttgctagacataaagggcaaaacaaaagaagggctcaattcacgcgtggacttggtaaatttaggcataaaaaggaagtacatcctgttcttcaagaaaatgggaagtaccatctcccggcagcaagctacaatcttaatgtagatgagaaacatgcgatgtgtgtttggctcaagaatttgagagtcccatctagattctgctctagcatacggagtattgtgtcaatgaaagacctgacggtcaccaactacaactcatatgattgtcatgtcatgttgattacattcctacctattgccatcagggctataaatcctttgcttttaaagatgacaatcacacggttgtgctactttttcaatagaatttcacaaaaggtaattgaccgtgatgagttggcatctcttcaggaattcgcagtggagacaatatcatagtttgagatatgtttccctccatcgttctttgatattatggtgcaccatgtggtgcacttggtaccacaaatagaggcattgtgtcctatgtacttgcatgaaatgtggacgtatgagtgtttcatgtcaatactgaatggctatgtatcaacccgtgctcgtcccgaggcatccatgatagaggggtactataccgaagaggccattgagtccggaggtccattttgcaatagtatcctaaaagaccaggttgcaataggtttgcctccatcacgacatgggggtagactgtatggaagcagtaggattggacggaaatccttcatcccac

SEQ ID NO: 65920 - DNA, 419 bp, Zea Mays
gccatgctcctgactgccatgacgaaggccttagccaagacagtagtgttgccaccatatgctgatatggttgcttcatagctcatgtggaattgcttcgggtcagagtgcccatcatatatggggagctgtggaggcttgtattaaggtggttatggggtagcctacaactctgctgccaggggagaagcatcatcaaaagcaaaattaccatggtatagatcatcataccatccatcatcgttgactggagtttcttgacgaagctctctatgttgaggccctcgtccttgatcgtcctgcgtgaggtggcgcatttcttcagctgcttcgtcgatcttcctttgaagttcggttaatcgaagcatcttttctcttttcctctgcacctgatgatgtatagcttctaaatccctgat

SEQ ID NO: 65921 - DNA, 570 bp, Zea Mays
agtgcatatagtgctaatacttccaaatgaccccacctattttcagacaagactttgatgatcatctggcctagattcacccctgctaataacaatctaccattgccaaatgtgcccctgcttctccctccctcttctcaacagttctaactccaatttgaaaaaacatcccagttcaaacagtaatgcaacttggcccttccttccaatatacaatccttcaacggaatcctcaaactataaagtgagtagagtagtgacttacaatctcagacagtgtaaaagagggcacccagtcaaatgattaggtattgaagagatacctgaccactaaatagaaggatgaaggagaattccagtgtcacaatcacaaggtcaagaagagaaggatttggaacattcatgtgtacaatatgagatgcttttatacaaagcccatatcagcttcaagtcagcaatgaatggaaaagaataataataaaataatttggaattggggaactgggatccaaatttcaagtccttgtgaatcctaaaagtttgtagagcaatccccatcgttccaaacag

SEQ ID NO: 65922 - DNA, 726 bp, Zea Mays
attttgttttgggattgcctaggacgaagagggggagcgatagttttgttgttgtggttgatcatttctctaagatggcacattttataccttgtcacaaaacggatgatgccattcatattgctaacctgtttttcaaagagattgttcgtttgcatggtatgccttctactattgtttcaaatcgtgatgtaaaattcttgagtcatttttggcgtactctatgaaacaaattggggataaaattgctgttttctactacttgtcatccccaaactgatggacaaacagaagttgtgaatagaacattgtctgcactgctgcgagcaatattgaagaaaaacttgaaaatgtgggaagagtgtttgccgcatgtggagtttgcatataatcgggcggaacactccaccaccaaggtaagtccttttcatgtagtgtatagttttaaccctcgtgctcctattgatcttttgcctctacctactaccgagaaagtacatagtgatgctaaggagcgtgttgactttattttgaaacttcatgcttcaactaaagcaaacattgaaaagatgactgaaaaatatagaattcctggtagtcaaggtagaaaacaagttaagcttgaagtgggtgatttagtgtggttgcacttgagaaaagatagatttccagagttaagaaagtctaaattgatgccacgtggtgctggtccatataagattttgg

SEQ ID NO: 65923 - DNA, 349 bp, Zea Mays
ctctatatcactgacaagtcgctggtgagtccgccatggtgaaagccactaagcgtttgcgccagtgcccctcctcctctccggccgccgcgcgtctccatcaaattccctggccactgctcttgaacactataaattaatcacatcgctagctccgttagataatcacgaagccagagcacccgctcctgcctccgattagcccccatagctctctaatttctcgttctccccaaatcggtttccgccaccgtgaaagagccctcgtcgtggctagcccattttaggttcgatcatactctctgctcttccgtttcagcatccttaggttctcttgatgctccttgac

SEQ ID NO: 65924 - DNA, 530 bp, Zea Mays
aaaaaaatggaaatggaggtaatattaaaataactcatggttttcaagtctgtaacggcgtgcagcttcaggctgctagtgatttttgtttgtaacatgagcaaattttgacggccggcggcgaacgtcgttctgggaatggccccgcccctttgtgccgatgtcaaatgcataaactgtgtgttttgagccgatatgaagcatggttctctctcaagagtgttagctgaatgttcagtaggacaggataaatgtgttgccttgaatgttgaaacgcaacgcatccaacaaggtgagccaaaagatggttccagtgggcatcatgagacagaatccaggcactcggagaagcactaacgaccgtccgagagctgagagggcaaaagcatgtgaggcaccttggctttgtcagcactcagcaccgggtcagctctcgcgactattgccggcgcccggcgatggtacagcaactgtgggtgggggaaacagtaccctaggctgccagtacacgagcaaccatgaacgcaaat

SEQ ID NO: 65925 - DNA, 819 bp, Zea Mays
ctttccaccgcaccgccgtgacaccttaaggctgtcccatcgtcgccggggagattgccacgccgttagccacggatttacatgcgccagtgctttcttccacctccggccgccgcgcgtcttgctcaaaattcgtggccaccgcccgctagcactataaattgacccctccccgaactccgtagagtagtaagctgtctagccaccacgaatcagccacggtcgttcactggaatccgcgaatttggaattctccccaaatcaagtttccgccaccgcaagaaactgctcaccgcggccagccctttctaggtccgttcatccctcactctcctttgtttgagcactcttgtcaccctgtgatgcttaccgagcctccaatttgaactaagagaccaccactcgtcgggaacgcgatcaaacgctcatggtcttcacggttctcgtgggcaggctagaataggtcaccaatcgtgcaattaacttggggaaattgctcggggtagcttggatttggtgtccgccgctcgggaaccctagccgttgccccaatcggccggcgtaggtgctcgccggagctcggctgggcgtgaacgccgtcggggacctcgaaccgagaatagatggaagtgcgggggtctatctgtaaacgtcagtgactctgttaaacagtgaaagaactcgttcgcagttagacagaaaacacgggggtctctgtgcaaagtcgccagggcgcgggcacgcgcgggcgcctttctccctctgagctgggccactgggctgaaatcagcccagtactattcacctgttttctttttc

SEQ ID NO: 65926 - DNA, 462 bp, Zea Mays
gtgagagagttggccggcagttagggttgtgtgtggggttattgggccatataagagaccgacccaaatagtggtttttctttttttttatttttccaaaacttatttgattcttagtttgaaaccagttgcatgttttcaaatttggttttagtggaaagtcatcaaataatccatagtatttataggaaaattggcatcaatttctttttcaaaaattttgaagtctccaaaattcaaactcgtaaatcggcgttaccgatcaacgatgattattgattatctgtaagccggattaatcaaccggtttggtgaaccttggttgtgatatgcgagaactgcttcaagaatttgttctaccgttgtaccagtttggttgagattctacatttttggcgtttcagaaagctaaatcaaacactgttaccgatcgacgatgattaccgattatctgtaagccag

SEQ ID NO: 65927 - DNA, 470 bp, Zea Mays
ttcattttttctagtcttataatcactctaggtagagatccttatgcgcttttgttttgtggcgtttatgactttagatttgtgagttagtgtggtcgtaaccacacatagacagtgtgcttttgaatcatgcatcaaatctgattgagttgtgttcatattgcacttctcctctctgaccctctagttgatttgtgtttatctttcgtttcttgtgtttgggtgttgtttttggggttcctctatatgctagaatcatccctgagattactgctagtctctagtgcaaatcgatcacgttcttgcattggttctagcagttttgatcgaaatatcaaaaccccaacaaaaccccattgaaagtcgagattttgaacttgttcgcaaaattttgatcttttccttatcaaactccatgaatatccttctcttcctctgcgctttctgctatgaaattttgagagttttct

SEQ ID NO: 65928 - DNA, 546 bp, Zea Mays
gttcgcgctcgtccagccgcgacagtgtccgcttgccgccgccctgctggtgctgctctcggtgctggttgccacagagctctggctcctcctcgtgctctcccctgttaagcactcttcgtatttctctcggcagcaggtttgtggttttctatttctttctattcaagtttgccaatagccaaaagtcactttacaatagagcaggtgtatcactttatactgagaatcaaaactaagtgggccctattataaccagttggcgccatagtacttgggattcagcttccttgtccgatcatccctcctcagcttcttgttgtcatgtgctccagcttcagcttcatcaatcttgttccctgtgatcagctctgcatcagcttccaacctctccttgtgcaacccattagtgcagttgttgacatattccccccctaaaaactcagcttgtccccaagctgtcacacagggaaatgactgcctcatcacctgttcgtcctcccaggtggccagagatggatcccagccagaccatttcaccaaaac

SEQ ID NO: 65929 - DNA, 450 bp, Zea Mays
taacgagagatcaatgagggctaaggcaggatcaaactcactaggctcaggtgtacctgatgcatgttgaatccgtagatgtaggttgtaattcacgagcacaaactcatgtagcttctagtatcctagtatgttgcagagctttgtatgaatgaaagcaaatgtactccaattgcgctcacacccacttgatgaaacacattgttaaagaagccacttctcaacacattgtagagtcgggtctttgacccaaacatagcccaccaaatggatggggatgtattgtgatcatttgtcattctccttgctaggtcactagagaattctcctcttttttcctgaggaactcatactcctggatggcaattgataggtcactggataactctcctctttctcttcacttgggcataggatctcatcgataaacaaccggattccgccaaaaac

SEQ ID NO: 65930 - DNA, 360 bp, Zea Mays
tggtcactcagatgagggcagcgctgcacacattacctgagatgccgtctgctcctccttagtcagtataacgtggcccaagcctgacaccaacaaacaacccgtttctttcaatacattatttttaacattatatattcaatagattaatatagttattatcagatctcatttttcatgctactggaaaaatactccctatgctcccgagataccttgaggatagttagcattcagtcgtctatccatgatgctgctgagatcaatgtgttcttcagattttgctttcatagtcaattaaaaatataggttcaccttcccgttcaaaagggtaaaaaaaaatcccaagactgtaaatgg

SEQ ID NO: 65931 - DNA, 412 bp, Zea Mays
ttcatgttattcagagttggccaacgccatcgacggtgacacaagtacgaagttttcttggacttgcaggattttatcgtcgtttcgtgaaggatttcagcaccatcgctgccccattacatgagttgaccaagaagggtgtttcatttaattggggacagtcacaagaggattcttttgctcttttaaaagagaagcttactcacgcgccactactccaacttcctgactttggtaagacttttgaactcgaatgtgatgcaagtggagttggcattggtgctgttttgatgcaaggaggtaaacccgttgcatattttagtgaaaaattgaatggtcctgttcttaattattctacttatgataaagaattatatgctctcatacgatctttgcaaacatggaaacatta

SEQ ID NO: 65932 - DNA, 365 bp, Zea Mays
tgcatcaatcttcccggctaggttagaaataaaccttcgtaaataattcaccttgcccagaaacttctgtacttcgaccttacaggtcggaggtcccacattccgaatagacttgattcggtcagggtctatctctataccatgttcatggatgacaaattctaaaaacttaccagccgacactccaaaagcacacttacgtgggttcattttcaaaccataccgacgcattttatctaaggctttgcgtaaatcagctatatgagaactaaactcaaccgatttgaccacaatatcatcaatgtagacttccacagtgtttcctaacagctcatggaagatcaaattcatagttctctgataag

SEQ ID NO: 65933 - DNA, 566 bp, Zea Mays
tgtcaatagagacgttgtctgccagaagaacacataaggttccatgtatgcagtttgctttctcaaacaacttgagcctgttgggcgagtaataggtatgggagctgactttacacaagcaaaattagatgcaccttcttgggtaaaacacacaaaatgagatttgtcgataagtcggcattgggagtccataacacaggagacgggtgtggatatcgaacaacatcacggtcactcatggttagccagggaatccaagttttaggaagatgatagaagtctgataaaacatcaatgaagggatccatagatgttgacttcacgatgacccaacctcatttagcactagtgcgactccgcctaatcacacatgttggataattctaatacccaaaattgtaaaacataagaagagataatgtccttatgtgtattgtccatacctactatcacatgtgaatgaacaccatcaaaacaaaattaaataaccaaagacacctaaaaaatcatgcatcatgctgatttttatttgattgtgcaattgtggataataaagatggaagtgc

SEQ ID NO: 65934 - DNA, 616 bp, Zea Mays
attttttttccaaatcatgaataaaaaatatacatgggccaggagggataatcctgctcttgttgccgcacaggccacgtgttgtctggccgtgcgcgctggtgcgtggcgtggacgttccactgcgtcctgctccagtcattttcgttcgtctcctcgtgtggtttgaatgaatcggcgctgtcgcattccaacgcgacaaacatcatgtggcacgagcacgtgggctggaccctggacgtttggagcaacgaatggataattaacacgagtcatcagtaaacgaatttcgaacgtgctgctgcagtgctgcctgctggtccaccgtacgtcttggacttctgaccaccgtgtgctgctgctgctacgtactacacctgtccaatcactacagtctatcttggctaagcacgatttaaatcgcatgttcgatggagcttggcggaaagataaggtagtgtttggttttagagtacagtagaatagaattgttctggtttagtaataagactgtttggtttgaattaaaatggaatgaagtcattctaatattgaaatattctcttaagatgctgaatctctgagttccagaaaaaaacagccgtgctcggcttcg

SEQ ID NO: 65935 - DNA, 312 bp, Zea Mays
tgagggagagatggcggggccggatgggaggttaggtttttgggtgtgggtgggcatgtgagcgtttggaggcgtggaatggggtaatctggtgaaatcggtcaaattgaccgggtgggcacgatccgctagcgtagatcggggtgtggggtcaggtcagcctatctgactagttcaacaatatattgctcagttgcacttctttgtttcaattagcagaaccgtttaagtatggtatttagatatagaagacaagctgcatatcaattgtcaaattgtcattgtcagatgcttagtgggaattatcgctgg

SEQ ID NO: 65936 - DNA, 372 bp, Zea Mays
cgacagtaacagtggctgacaataggcctcaggtgagcacaacaacaagccctagaaatagaacccaaggaacaactaaatcacagtataaatctactatgttgtgatgggtcgcttcttcctaacaacttggttcaatcctccccttgcgcttactcgtcaggagcatgcttggaatcattaggttgtcacgacactagtcggagcccctcgacgatgagaagcatagtgctaaccgggcatgcttgggatcattaggtgtctagcaaaaaatggatccacttgcaaagaccagttcaacgacggaattgtggacctctatcggtatatgaggaattccatacccacggatgatgccaagacgcattcaat

SEQ ID NO: 65937 - DNA, 463 bp, Zea Mays
ggaaggggagatgcgtgggcgaggatcgcggggacaggggtgtccatggaatggcatcgatggaagggcgagatcgcggggcggtagcgagggcggacgcggaggattatagaatggcgctttccatagcagtgaatggacgcctatattgggtccttatagagtagtagagatagtgatggtctggtgttggcatgccattttaacaagttgtgcggctagttgtgcatgttggtaaagcagacatgcatttttgcttatatatccttggctctcatatggagagacaaagaaagaggcacaagttatctatattatctatttctcctaaacggaagccatgactttcacgggcggagccagattacgatataggagggggcaagcaatttatcaaatattataaggtgaaaaactatcgtaggatatatacacatgaatatactaatttgcgtatagcgta

SEQ ID NO: 65938 - DNA, 712 bp, Zea Mays
gcaatttggcatgcttgcacttcattcccaagtgcgatggatgaccttctaatgtagaagcgtgaccatataagacgttggataacgcctctcacatcttccctctgattcaggtcattcttcacgtaaaactattccttcatccaagaacctggctacttcttccggaatgtaggcataggataattcgcctcagagcgaggcacgaagccatagcatccaaagttgttatgatactgttctttcccagtcgccttcgtctgataagacagctcatgaatattgtaaaatcatctcgcatccggctccaatcattgactcctcatggcccatataaaacccccctctaatgagagcttcgggggtaagctgatgaaggtaaatctcaaatgtcttcaaaacttcgaccagcattttgtggagtggaaagcgaagcccagctttcatgaagcccctgaagaccaccacttcatcatcttcagggaggggaacagtgtcttctcccctagccctcactattgacacatcatgaaaatatttgccttccatcgcttcaatatacccctgtctgatggttgatttcccaaaaacaacgtggcttggtctccatggccgatcttcggcatcttcgttctcactctcaacatcgaagctctcgttgtcacttgaatcaccagaagctaaaaaacgtggctctagcatttcattggtg

SEQ ID NO: 65939 - DNA, 472 bp, Zea Mays
atatatgttgaagagcttgaataactgatggcttagattattgaacattttctggtcctgttcacttaaaattgacatttagatcaatttgagcataataggtctcgggcaagtcaacgctaaagctagccattctaatggagatgaaattcgaaagaaatctgttggagcgtaaccctcttagctagcaccatatcggaatccggatatggtgttaaatgggcaagggtcggattgacaccccactagtgatgtgccatgtcatgatctgggcacgatgtcaagcgagcaaggatcaggacactacttccttagtggcacgctacatcagtgtccaggtgtagtaaaaaatgtgcaaggattttcagatcatcatcgatgggtgtgaagggtaaggaagctagtcgagccaactagaatccgtttaggtagttggaatataaggttgctcataggtaagttaacagttagt

SEQ ID NO: 65940 - DNA, 350 bp, Zea Mays
ttaaaaatgaatttctaatattatttctctgtttttaaacgtctctgaactgggcctcatttttcagaaagttcaggggctccggtgcaagttttctaagacacagagcacagtatgagcggatggcgggttgatttgtgatttcttcggggtctcatgtgcaaagtgggccgatcgaaggggtatgaatggatcctagccgttggattagttttcaagggaccggattagatcagcggaacactgaaccggtagggcatggtgaccgcaggatcctgattctacggttcagatttaaaatacatcgtgatagcccagacccgtacgatcgcgatccaacgcctagaatt

SEQ ID NO: 65941 - DNA, 659 bp, Zea Mays
atcatgagaagcatacattcctctgtatcttgttatgaaatttctaaaagctaatcacaggatttcacagccagcacaaagcacaaagtggtaaaacatccaggaaaagcagtgtgttacacaatccatcaggtacgaatgtgtaccctaaaccctaaattacactgggcacaagcatacataaatgaaatgcctaaccatggcgacgaaggagtcgtggacgactgacctgcaaaggggagtgggagacattgtcgtttccgtcgtcggtggtggcggcaaacgttgaaatccacggcgacggaagggagagagggttatcgccgatgccgtgacagagggaaggggaaaggtggcctattttgacgggagatggagttcttctatgccagagagacggagtcggtgagaccgtaagggcataaacggcacaacgaggctatgggcccacctgtcagatccgccaaacaatccgtgacctatttcgacgaacaacacagcttgagcgactctcttttcgaactaacacgagaagcgacaacgtagagtgacacgttttgccaaatttctctttgtttctcctacgtgtcatcagtgagagaagcctacgacagttgtgatattggcgccgtgggcttgatgggcagcgaggacttctt

SEQ ID NO: 65942 - DNA, 444 bp, Zea Mays
ggaagtagaagcttcggtaggagcagcttcggttgctgctgttttcggcgctgaggccgatggcggtgtttcttcaatagcctcaatgacagtaataattcttcgcttttttggttcagcgggcttctcggcagctgaaggctccttcttcttctaaaaagcttcattagttccggtcctagcggacttagcttattaggtagagattcgatcattacctttaaaatttcttctgcttcagtgatagaaggtgttgagggaatttcttcttctaaatcagcttttggcttcggagccgtagcctttcttttcttcgacacaaccaccttcggctcaggactggattttttcttttttgctaacttttcatcttcttttatcattctggcagcttgtctttgcataacgatgacagctctttttcgttttggcccttcggcacct

SEQ ID NO: 65943 - DNA, 564 bp, Zea Mays
gtgttgacatatggacaagaaggacgaggatggacctgagggtggctggccacgacgcgacgtctcacggcggtgtagatgacgaatttgggggaaatccggtgactcggggctacgttgcacgagagaggctagctgggggtgggttggacgcataacaaggaggcggagcaggggggtgccttcaatttaaagacctcggccgagcttatcacgaattttggattgggattgagttcaccgcggccggatatttttacggtggcctgctcaccgtggcgcgcgagagggaaatggttcagggatggtaaccggttgcttgccacgacctttacgatgtggaggatgaatcgctacatgtcacggccagggaaatggagaactccggtgatgccaacgcgaccaaccgcggcgaggtaagggggaggcacgatggccggaccagccagcgactgggtttacccctccccggatcttttcacctcttcccggcgttatccacttctcacggagcacgaatcgtggtggctggcgcgaatccacgcgcgaagatcaccagcggcg

SEQ ID NO: 65944 - DNA, 730 bp, Zea Mays
gtcctcgccacgtgtggagggtgccgaggatcttcctagtgcgagtactgagtataggcggcgaagggtggtgtcaaaacacaatgtgggtgagttttcacgaagtggtaggcgccgtcgtatggggatggagcgtggccgtcttcgagtaggccggattggtaaacgagaattgttgtcctcgccgattggggtgagcaaaggtgagggggatctgcaaaatctttttgagggtgaggaattgaggataatgttgttcaattatagggagatgggtatcattccgaaggttgagccgatgtaatgtatgataccctcgtcgtgtgtatgtaactgtaatttgtattgtaatgtggcatgttggtcgtattcgcacgcctgtgctgatccggctgcacccttaggcgacttttgcgtggagtgtctttttaataaaggacttcgattaacgcacttgttgtgctattccggctgcacccttaggcgacttttgcacggagtgtctatttaataaaagacttcgattaatgcacttgttgtgctattccggctgcacccttaggcgatttttgcgcggagtgtctttttaataaaagacttcgattaacgcacttgttgtgctattccggctgcacccttaggcgattttgcgcagagtgtctttttaatagaagacttcgattaacgcactttgtttgctattctggctgcacccttaggcgacttttgc

SEQ ID NO: 65945 - DNA, 497 bp, Zea Mays
ctcttcgaggaataatgcacgatgaaatatatgtagcaattgcagaactaggtaacttctttcagcagctatgcgctaggacccttaaattagatgttttgcaccaaatgaaagagaatatcccaattgttctatacaagcttgagaaaatatttccctcatcattgtttgatgttatgctccacttgtcggtacatttacttgttgaggcaatacttagaggaccagtccaatatggctggatgtaccccgtagaaagaaggttatacactttgaaacattatgtgaggaacatggcacgacctgagggttcaattgcagaagcatatgttgctaatgaatgtttgcatgcatgttcgaggtacaattacgagggaaggaatagagagcatgttgatatgagtaagggtgacttatctgttttccagcatggagtagaattacatagagtcccgaggattacttatttagataaggattatgataagatggtttgg

SEQ ID NO: 65946 - DNA, 810 bp, Zea Mays
ctctgttgttctgatagagtggcgatctatcttggatgccttgattagattgtctgcaatggttcttcctaaatttgtcctcccctatatcccacttttgcgtcacgtcacccagattctatccctactttctcacgtagtggttcccctaaattctcccataataccccactgcaacaataaaataccatttttcatacctatttgtcggtgttttgaaccgaggatcctaccgactagtgaattagtgttgtgtgcctagccccagatgggtgatgcaaggaaacacaagtctttatcctggttcaggcaagagaatgccctacttccagcagagaggggatgagacttatattacttgcacctaagtgcttgtagtaggggctacaagctagtcgggagagggagaggatcctaagtccctggggatgattgaggcaagtgcaaatatcagtgtggaggtgaaaaccgtgaagtgttctctcctccttgaagccttgggctcctctacttatagcctcaaggagggctaccaggagcgccatggtttatcgtgtatgggagaggagacgtgtccggacccctatagccggtatggtcgtcagtatggccttcatacccgttgttgacttgaactgggaggaggacgttcagtccctatatttgcatctcgatcgagctgagtagagagtcgaggctagggtctagggctcggtcgcgtacccaagcctgcctgatgggggtgttgtctgagtcatagttgttgacacaatagtaggtatggtaaaaagtgcttggcaatctgtaaag

SEQ ID NO: 65947 - DNA, 281 bp, Zea Mays
gcgatgctccactgcttgcttcttcgaccaacactactgctactgctgttcaagcatacatacgacgctttatctttacatcaccaccgcgaggagcgcctcccggctcaccacctatcgtctccggtcgcatgatgcattatcttaattacatggaacaaacgaagtgttgacactcttagtggaccaaaagtttagtatgcagagatctttgtagttagcagcatgcatgatgcattattctctcgcatggagcaggaggaggcacgtgtgtgtacgtt

SEQ ID NO: 65948 - DNA, 532 bp, Zea Mays
caaggatgctgagctccgacatgcgggcccaggagcataatggaaggaatacattatgtgaataattaatgctgacagcacacatgagtagaggcgtataggcggagccgttcagattcccttcgccttagtaacacatgagtaatcaacgggagtcatgatgactgcagtccatgcagtgttgataggcagtgacccttttcctggtaacgcgggagtaatggtgagtcattgtccttgctatggtaacgtgtgagtaacagcacgacccacacaacgtggactgggcgcgccgcctgtcactggaatggacagacacatgtcttatccgtaataaatgcaaagacgcacgtagcctagaggctttatgtcaggctccacccgttgccttacaccgcacgcagtaggccacgtggcagcatcgggtctccgcctgggcggggagcaggagtgtatgtgataaggtacggatcccaccagatcaggtctagacacgtgtcgacactggacccccgcctgggtcctgattaag

SEQ ID NO: 65949 - DNA, 534 bp, Zea Mays
ctgatatagagttgtttgagcaaggtgacaaggttttgttgaatttcaaaatttgcatttgttaagacaagcaatttcaagcgtgtataggatttatcttttcatgtgagtatttgctttaaacttctagaattctttagaatacacttgatagatagagaggaattatgatatagagaaaacaagtcgatttgcataagaattaattataggttcgcacaacatagattccgctggagaatgcggatttggactacgtatttggacatagaccgaatatcaagaaagcagattcagacatagatcggataacatcaccactgtcgagagtccgaataaatgagtcttaacgggagtcgcgagatgagattgactttcgaattgcatttgctccaagaaataaaagttttaacaggctccaaatttggttgttcttgagatcgaataattctaaaatttggtgaaacattcatgagtaacttgataaatggagataaatgtgataaagagatagaaattttcactgagcatccg

SEQ ID NO: 65950 - DNA, 399 bp, Zea Mays
aaacactttggccacgacgaggtcaaaccgtacggtgttcttggttgatttgggggaaatcccaaattggggagctctggtggacgatctaaggtgagggttggtttactgggtgcgcaattacttagcagagtaggcgggggtggcaatttataggctccctcagcggtggcgtccaatttcgcgaagacgcgctggcggccggagaggaagaaggttactggcacgcaagcttagtggctttcactgtggcggctctccggcgatcaccgggcatgtaagacgtgattcactgcgacgtggtacaacgcttgagcacgtggtgcacagcggtaagtggccaacggcggcgaggtctatcccgacgagcaagtgggtacggtgaatctcatccgcgac

SEQ ID NO: 65951 - DNA, 621 bp, Zea Mays
aaaacctgctgccttggccgccccagttgaacctgtgtcgaaggctgcgggcaaaaatatgaaggttcttacccaccggccacgttacattgaaccggccgtggtgcctgagtttagcggggaggcctcttcagctgctgaaacaagagtgactgctccaattgcgcagagcactgaagagccgattgtaatgccgaagttaccttcagttaaattggttgagacgaaggctgataaggataaggctgaagggttgaaagttgaaaaaataacaaaaatgccagagattttgagcccgtcaacagagataacagtgccgaaagcacaaaagggttctgccgcaactcctaagaggagaaggatggcaaatgtgttagatgttgtgctagaaacaacaaaatccttgagtcttgcttcttcaggaaaaatttctgaagcttccaaagctctacctgaggctaaaacgaagcaagcagaagtcgaagatgcaaaaattcaagctgaaaccgaagctgggccttcagagcccactgagacagagcccgtcgtagttgaagaagcggcagagcaaattgcgtctaaaaaggttgaagctgatgctaccgaagctttaaaagaaag

SEQ ID NO: 65952 - DNA, 365 bp, Zea Mays
gcttcagctgtcactggatctcgccgtcgtactcgtacatactgcctcttgcacgatcggattctccggctgcaaatccaggaccaggacgacagctgctattaattcatcttcccgatcgaccatcccttcaacttcatcccaaagccacccccaagtacagtacatacagctgaggtgacaagttcagattcagaaagaacccccgtcgtgtacgcaaattgcatcgactcagaagctatctgatgtcgtccttcagtatatttataaaatcaaacatctgtccactgaatccagagaaaagctgctagcttcaggcgccgcaatggcaagcgggctacgcagcggcgaggccaagcctcggc

SEQ ID NO: 65953 - DNA, 682 bp, Zea Mays
cttctgctcctgtttgtgaagaagtattagcagagatccttcctgaggttgatcccaatggtggtgtacatgttgaagctgaccccgatgggtatgaccgtgtagaagctgaccctaatgggtgtgaccttgttgaagctggtcccaatgggtgtgaccgtgcaccggctattgtccgtaattttgatgagaacgaagaagaggaagaagaagctccactgattcgtaagaatagccggtattacagaggtagtaggggggatagtgatattccttctccagctctgtctgctcttgtcagccttcaagaattgtccataacagattttgatcaggcccttgaggatgtcgttcttgaggatatgctgtcggagccgattgctgacgacatgatggatgtttgctctgaaattccagatgtggtattagaggtatcccgagcagtgtctcgtgcatcgtcgactttggaaggtggtctccgatgtcaagaagttggttaggattacccaactcccatgggggtgactgaggatccttcagccttagaggtggctgctacaaaaaacccaacccccgagggtggtgctggcagttacccagcccccgagggtgtcaccggtagtgatccggctctggtgggtggcgcgagctgcgacctagccctcgagggtgttgccggtag

SEQ ID NO: 65954 - DNA, 423 bp, Zea Mays
gttcatatcttccttgtggtacgatccattgatggataaccagaatagtggaataaaccaacccatgagtttaaatattaacaaggtaaaatttgtagatgaatttagaagttaattttaaatttatatggacaatttgtgttcatgcccttactttgaagtctaatggtgaatttgtcctcatttttttgacttggtgatttggcatctggttttcaaaacaacggtagagtataccctagctagcgatactacggaaggttgggtgtagcagttgaccagatgatctcgcttcctattcattcaaagcttacatctttatgtgcttttgattgattcccggtgactaattttactgctctccatatatacaaattcattcacctatcatattgattcccggtgactaatctttatggctgg

SEQ ID NO: 65955 - DNA, 987 bp, Zea Mays
gttgtgctagtccgactgcacccttaggcgacttttgcacggatagtcttttgaggaagacttcgattttgcgcacttgttgtgctagtccggctgcacccttagacgacttttgcgcggagtgtcgcacgcgagggtggccagcgctgcccctcgcggtgacttcatgttggtcgaatgccgaagaccgtcgatgcggtcttttttcgacgttgtaattttttgcgggggattttttgcgtgtatattacatggctccgcctcattaaaaacctcacccccccgggaggaaaagagtgtgggccggaataaaactgtttggggaattacaagggcgagttggccctggggagtcaaataaaaaatttgcgaaggttgtctatgttccaggaatgttccaggtcttcgccagattgtgttgttaatctgtacgcgctgggagacgacttcgttttgacgataaatggtccttcccactttggttccagcttaccccatcactctgtccgggttgtgcggacaagtacgaggtccccttcgttgaattctcttgggacgactgcatggtcgtgccaggccttcgtttgggcttgatatttatcgagggcctgcagggcgaagacacggtctccatcaatgaggtctttggaggttggctcgtcgacgtcgggtattgctgaagcgcttgtctgcggggacccatgtttgatctcctgcagggtcatggcctccgatccgtacagcaggcgaaagggaatgaatctggtcgctcggcactcggtcgtgttcagtgcccagactgcttcaggtagcaggtcgacccattttcccttcttgtcatcgaggagcattttcttgatcgctgtgaaaatctttccgttggcgcgctccacgacgccgttggattgtgggtggtatactgaagcgaaggcaagtttggtgccaatggagaagcagaaatccctgaagtcttggctatcaaattgc

SEQ ID NO: 65956 - DNA, 1143 bp, Zea Mays
cttgtgttcatttgtttacaatttgttttctcctttcctccctaagttctatagcaccaatcttcatctaaatcattatctgttgctctaagtcttgattccgcacattcataagagcaacacaacgtaagttgagcttgtcccttactccagttgacttacatcttgttctaaccatttatattgggatcaagtttttgtttcacctattcatccctatctaggtgactttcattcttgtgcttagaaaatattttgttgaaaaaagtttaggtcatcttattcgatgaaccctgaccaattttacaaaatcacatgggataccctaagaataacacaaaagtctattgctttgcatgatctaggatgacctccaatcatagagaccacaatccgacaaccccaattagggtaagactggtcaccccgatctaatatccctgacctaaattttagaactagccaccatgaccaaaaccaggtccgaccaggggcagagctagctaacattcccaggccaggttaccattggacccgatcatgacatacccaacatacccgaccacctaaccacaatgaagcctacctatttccctgaccaaatcaccctgactaggtcaggaccaagaaaacattaccaatgagttcctcaaaatgggttccccaactaggcttcctcagcaaatcccaacttaagtctccttggtcaatcggtctagaccttggttgtgtcagacctggtcagtctagaccatacgcccctaataggacatcacatcccagaggtgtcgtaagcctctagaaagggataccacatttatagtcccctgaccgttcgatgcatctgcatggtcgaggtatgcggctgcaaagaaaggcacattacacaaggccctaaagtctccctatctcccctctaacaaaggccctgctagtcatggagggcctcacttcaagaaaaagaaagtcaacaaggacatacatgatgaagacaaataggagttccgaggcgaactgctcataggaaagtgtacccaggggtaaggctttagacgcctatatgactcaaccacccccttggccagatcagttcaaggatgacaaagcatacacacgtgcggtgacataccagaaagatcgtac

SEQ ID NO: 65957 - DNA, 390 bp, Zea Mays
tgagtagtaaaattccgatacaatcatattggcagtaaatcatctatctttgcagttggtagatgtagtgacaacatatgcttatgtggtcactggattatggtatttatggagtcttgaaggattccaaatacataatcaccaatcacaaatttacgatgcttggaaagtctttgtgacttagagcatccaggtcaaatatggtacatttgacttagtgaatccttccttccgaggggatacacgaagagtggtatgtttagtgtaaatatgtgcagcatatttctaagcatacattacttatcgacggagttcaagatagaggatatgaattgtaagagtttttcaattcaaagtaaactatcttgagtatcttagatacaaagttgt

SEQ ID NO: 65958 - DNA, 1212 bp, Zea Mays
ctccttctaggaacctagctgacgagcggtctcctgcagcagacagtgaagcgacaaaaggcgatgaagacttgaatagtatagtttagttattgtacttgtgtaaaataagtactgtaggcatgttgtacgctagagtttgtataattacatttggtaatgtaatatgatggtatatgttggcatgttatatttttcccaaatgtttctttgcctcagatgccatcacggactcgcgcgcacgacggtgtggggacttcccgtggtcgggaaggtactcctaacctgccgctagtacctccaacgttggacgaggctatcgctgtcttggtcaatgctactgcagataatacccgcttcttacgagaaatggcaagtaatcaattccaacagcatggcagaagagcccctccacagggaccgcgtgaaaccacgtacttggaattcttagagacacgtcctccactctttgttaaagcagaagaccctcttgaagctgatgagtggatcagggtaatggagcagaagttcggattaatccgttgcacagaaacacagaagccattgttcgttgcccaacaactaagaggccctgccagtacctggtggggaaattttgtggcagttcaaccagccggacatcaggtcacttgggatgaatttaagctcgcattccatgaacactatattccagaaggagtgcttcacatgaaacaagaggaatttattcgactaaaacaaggaggggatactatgatgcagtatctcaacaagtttaatcatttatcccaatatgcgattgaccaagtaaacactaacctgaagaagaaaaattgcttcatgaggggactcaacgataggctccagaggaaaatagctacttgcctggaccttacttacagcagagccgtcagtacgacattggccgtagaagccaagaatataggctatggaaagtccaagggatttggtggtgacaggtctaatcagggacctgagaagcgaactaggttggtaatccgaccttttaatcagaattgttcttcgcctcgtccaacctcctatccattcaaacagcatgttttcattcgccctgccactgcccccacttctacaagtcagttgagtgcccctggtactcgtttccccaccctccctagttcttcaactggctacttcaactgtgggaagtctggtcattttataaaggac

SEQ ID NO: 65959 - DNA, 474 bp, Zea Mays
ggcctggcccccacggcagataccataccaagaggggctccgcaactctccctagctaggaaggacccttcaaggtaacgggagtgcaccgacccaaggggaaccatctagctaggactggaggagcaccttacccagagaccaagtatctctgtaagttctatccatagagcaagactaaggggtcgagtctgtttccttttcttgtgactagataacgcatacgtgtacgacaaaccagtggggtctgcccccatgaacccagactattggtctgcacacatgcacgacaagttataaagagaaactacccccctcagctgcactcttgtgatagttccatcttgctgctccaaggtcctacctcgcagtttttcagataatactttttagctaacccacccgtacggtttccatctgtctgacatggcggcgcccgaattgaacagccaggcttgcagtttaggacccctg

SEQ ID NO: 65960 - DNA, 285 bp, Zea Mays
ggttagaatctgggtgtttggatacgggtacatcatgaacaaggctactaggtacatattggtcaaagcctcgatcgtgtacatcatgaacaaggctacaagatagtatttacctgcaaaaacaaggatctagatgtttgataagctggctgtaggaagaaactgatgattagtttgctccataaataacacatgtgatgttcattacaactaatttgatttcatccctaaatagtttgcttccgtgccggcttaaggtgagaagtcgtccaacttctcatggac

SEQ ID NO: 65961 - DNA, 400 bp, Zea Mays
cttggtgaggatgttgttgttgttcctgttcttccatataattgcggttgtgcatcgattctgcttacttacattgttgttagcctagccagtagctcccattcttctgtataattttgttgttgtgcattttgtaatgtgcatcggactgacatagatcttgctattgctgtgcttcaccgactaggatttgaagaggttagcgggtctgttgggcaatgcatgatcttcatgggatggtgggagtataactgatggctgctgctattttaccgcaccagtttctaccgctatttcttctcatgacacttgcagatattcagttgttcattagtttcagttgcacaagtttctgttccacaagttttagtgctccaaagcctcatacgacgcttaagtc

SEQ ID NO: 65962 - DNA, 744 bp, Zea Mays
ggtcgaaccagctgccgaagaccccgcggcggcggccgggccttcgcaggtggcggaataggggttagggattgtaagtgtaaacttttgtctatgtgatactaaacctcgattgctgcgcaggttccgacatttgggcctgcgcaagcaaccgctactgacaatactgattttgcgacagagacttcaaccgtagtgcctgccgatgatagtttgtttggttctgtgtctgaatgttttgagtctgatggtggatctgggagctcgtttccttggacggaggagtcctcggatgaaggcttggattattttgttgcgttggatgtggctgcggtggaggcttcaccatgtgtggagggtgccgggatcttcctggtgcgagtactgggtgtaggcggcgaagggtggtgggaaaacatactgtgggtgaattttcgcgaagtggcaggcgccgtcgtatggggatggagcgtggccgtctttgagtagaccgggttggtaaacgagaattgttgtcctcgccgactagggcgagcataggcgagggggatcttcggaagctttttgagggtgagtaattgaggataatgttgtttaattacagggagatgggtatcatcccgaaggttgatccgatgtaatatgtgatgccctcaccgtgtgtatgtaattgtaatttgtatggtgatgtggcctattggctgtattcgtacgcttgtgttggtccggctgcgcccgtgggcg

SEQ ID NO: 65963 - DNA, 595 bp, Zea Mays
gtcggtggcaggagcgccctccatggcagagagcttggcacgagagtcaacaggcgtcgatgtcgagtgacactcggccatgcccgccttctgaagaaggttgacagcatactgtcgctggttgaggaagagaccgtcggaagagcgagtgacggatatccccaggaagtgatggagctccctaaggtctgtcatggcaaactcagagtgaagcccgtcgatgagtcgtcgaagtagagtagccgaagatgctgtgaaaacgatgtcgtcgacgtacaacagtaagtaagctgtggagttgccctcagtgaagatgaagagcgaggcgtcagtggcagaggcgacgaagccgagctgtcgaaggaacgtggcaaagcgttggtgccatgcccgaggggcctgcttgagcccgtagagtgagcgctgaagaaggcagacagcgtcagggcgtgccgggtcgacgaagcctggaggctgctgacagtagaccgtctcattcaggtggccgtgaaggaatgcgttcttcacgtccaactggtggatgggccactggcgagaggccgcgatgctgaggacgacccgaatggtggcaggc

SEQ ID NO: 65964 - DNA, 455 bp, Zea Mays
tacggtggccggagtaaaataatggccggagtgtatccacggcgtgatatttacttacccccggtgctatccaactgatccgagcgcgaatcaccacggcgagcgcgaatccgaatgcacggctcgccggcggcgaggggatctgaacctgatcctatctgtttactgtaccatggaattcctattcagtgcgcttgacagcccaacttgcaaggcctggatctcaattttccctttagcgacttactaatccaactttaagaaagttgttgttctactatccagcttcaatcttgctatagcaatgactcccaaattcttaataatcatgctcgaatcccagctcaaagattgctcaatcacactgtcagtctgaattcagacttaaggcagtctgacagcccatctttgggcctaattatctcaaaacatttcatggcaccaaggcataatcc

SEQ ID NO: 65965 - DNA, 969 bp, Zea Mays
tttgtcacttctcatcttattcatctttctcttagagttttggttgactatttagtttgtctattttgcatggactattagctgacaatttatatttcagccaagtgtactttcttaaaaaaagtgggtcgcatggtgatcaattgaaggaactttcttttatgctttgaatttttcttaacatatacattgggtataatcctgcccttctgtttcagtacactcggacatgtacttccaaattcgtgcaaattacccttaaacccttttgatactattgcaagttaacctatgtacttctgtaatgttgctcagctgtacaatgcattggacacgttgagtatctgattgatcatagaaaacatgtgctgtactgagtttcatgtcttatgtaatttgtgatttcattgtggctacattagtatgttttcacttgctttgaaattatagatgatcagtttgcaaacttagaagtacagatggtatttgttttttgcaaataaggtaagctaaatcatctcaattaaaggcactgcttgaaatctggactgtggaattctgaacgtaatgtttccttgaggcacatggcagttcgcagaattactatgaccactaaagttttcttttcagggatgcaacaagctgtcaaactaagtggtgctgtcttccactagcactaggggttgatctgttttgaaaaggccatgtgccgagggaaggacctgtactatggtctcaataatgcaatgttgcatagttattccattgggtcatggttgtcatttcttccttcgctgcgaggtcagtgttttgtcttttgccttcctgttcaattggtgcgtccacttgttttgaaatttacatgaccccataacaaatcaacagtgtcaatactcaatatatcacaatgtttcttttcagtctctcatgagacaatttcaatatcttttttcatgcccctgtagtcaa

SEQ ID NO: 65966 - DNA, 461 bp, Zea Mays
ctccctccttatttatagaggattttttccagggccaaataggccaattgtcgatatgatgatcttataaccatgcttctttcatgaagttgcttcatcttgatactccatgtaccgcctctgatttcctccgaaaccgggtcgcctattttgaggccaaacccacaaaaaccattgatggcagtttttgaggctcaaccactaaatcttcatgggtataatactgcatccaccttccccatgtcttggacacgtgtcccgctattcctcaaccgcatcggcaacacgacctgcttctcaatgtcataactcttgatgatgactaccccaggcgtcagccaccgcacctagtcactagacttctccagttcctcagtcaagacctattgttcatccttcactgttcccagtccattggcatgaacctgcacgacattcatcttctttgtcgaccattgcat

SEQ ID NO: 65967 - DNA, 554 bp, Zea Mays
cacaaatgactttgttacgaaggagtgagatgctccagaatcaaataaaactaatgcaggtatggagttaataaggaacataccatacaccatgtcggcatcctcaggaactatttctgctgtcacatgattaactcttcccttactctggttctacggactcttgttctacgcagttccatgagcaggtgtattctgatcagctctttgattattgttcctttggggtgaccgtgggttgcgcttagggcaattattagcatagtgaccaagttcaccacacttaaaacatctgctgggttggactggagtagttgtattgttgtttctggccaatgtgctcacgacgcttccttgatgattttgttagtacccactagacctttgaccggtctgagagtggttcctctgctggttctaattgtttctctgtccttgctatccagagcgttgcacttgataattattgtttccactctgatttcctgagcaaaactgagaaccttgcgagttattttgtcgggtgtttctgttgtactatccttggaatttcc

SEQ ID NO: 65968 - DNA, 271 bp, Zea Mays
gataaacgacaccgacctttggtctttcaagcaaatgactatgtatacctgaaagtatcaccgatgaagggtgttaatcgattcggggtaaaaggaaagttggcacctagatatattggcccatttcccattcttgaacacttcggaccagtggcgtacagacttcaactgcctgaatcattatctgcgatacataatgtgttccatgtatcccagttgaagaaataccttcggattcctgatcgaaccatcgatgtggtggatgtcactt

SEQ ID NO: 65969 - DNA, 1160 bp, Zea Mays
aaacgaccaagcaaacacacccgactcggtctctcgcagccacgggcatctggctcaggtggggggggggggggggggggtgtgccaccgctatagctactctagtactatcaacagtagcaggggtgcatgattgctcaccatctgcatgcaggcagctctccgcagatccatgcatccacgagcgagagctagcccatgccgtgacaacagttggatctactgctactacagtctacactactagtagtaagatctgagtctctagctaatgaccgatcatcatctacgcctatgctatctactactacttcttcagtcctactaccagcagcagatgagcagtagtgtcgacgatccatccgagcgcttcggttgcctacttgccttgcatgcatgcatgcatgatcagctaccaattcaaccagccctcgtagatacagtcctgtgtcgttccatccttcttgccggccatctttctatgctgtggcgcccaggcacgcgtgcatgatgtgagcctagcttcgtcgcctctatctctagggagtacgtacgtactacatcgctagtaggacggagtactagcagcgttctagttctagctacagggagggcccggccggttccagggattccatcgaatacgtactactctatgtagtatgcatgtgtgtgtgtgtgtggctatgtgctgcatgcatgtgcatctggctagggatcggaggcggcggcaggccgcgtgcgcgcctttggtgctgcatgcgccaggaccagcatcaatgcaggctactccctcgtcactcgatcgacttgtttatgtctcaggtaggtatgaggagtagtaggtggtatagccttttgcacggaaatttagacagatcgagacacatgctatactgccatgcttgctagctgctggactggacctgccgtgcctgcccattggtggacgtttgcaattgcactgacacccaaagtccacggcccaaatgcaatgcaccattgaaacaaaaattcatgcgacggggtgagtgtgtgtgtccatcttgcctccgatttagccggagagtacccgagcagtttctagtttctattaggctaatctccagcaacttagtcatatatactatctattatctcatctcgtattttgaacatcg

SEQ ID NO: 65970 - DNA, 318 bp, Zea Mays
tgttcagtccgtgaatcagagcttcatattcggctgcattgttggaggctggaaatagcaactggagggcatatttgaggtgctcgcctccaggtgcggtaaagagaattcccgcgcctgctccctgtagtttcaacgagccatcgaaatacatttgccatacttccgctatttctgggttgtctggtacttgttgttcagtccactctgatacgaagtcaaccaacgcttgagttttgatggcagtgcgaggtcgaaattcgatgtcatgagatcccagctcacaggcccacttggctattcggccaatggcttcct

SEQ ID NO: 65971 - DNA, 746 bp, Zea Mays
acttcaattagactgacttcggaacaagaattcatcctcgtatattcttgtcacatctcatcatctcatcgttaagggaaaaaaaaggaacttttgactacgagagacactactgttcatgaacgggaaaaactgtaaacccgttccatgattgagttttgggttcaccgagccgttcttgtccgaattttgggatgatgcaggaggtgacgaggatcaaaggccagcatctgaatgatcggaacgcgatagtcaatggtcgggtcaaggggaagatcaacgtcaccagagcgttcggggtcgcctacctgaagcaggtaaaacttgggttcttctaccatttcgttttcagtgcgcatgctcaagtacatttctgttgtcggtcaggcttctgcagttccttgtgcataattagcgtttaaggcgtgcagttcttgtgaacatgctctgtgcattgtgctgtcgcagtctaggactagagaactgcgaggagccgaggaccaatcttgtaggccctatgctccaaatcatggctgattagtggccgtccaacagtggcttggtggagcaggactgtaggagtagcgtagtagcttctactagttccgacgattcttccccaccccgtactgtgtgtgtgtgtgtctcgtggtcccaacccaaattggctccaaggtcaatctgcaaacctgatgatggttctatcgacgttcgtcttctctctggctggcagcccaagtggaaca

SEQ ID NO: 65972 - DNA, 517 bp, Zea Mays
gaggaagtagggcaccttttgtggtgtgaccgaacctcgggataaatcttgtgtatcttgtgttcttgctcattgtgtttgtttgtgttcttcgttctctcaccattgcgtggaagatttgtttatatctttttggtgtgtggattttgagaagtgtccttctcagatctactactttgaatcatgtggatcatttagaacatctcatttccaaagttaactggatgaatttcgagatcaattcagttttacccagtttgcttctagtttttgttgaaaaagttttaacttgcctattcacccccctctaggcaactttcactcatcccgacgcctctgtcatgtgggaccgcgcctcatcagcgcctcatgcactcgccacttctaggtgggccctaatcaccagagcaccttcctcacgtgaattgtgctatccgaccggggatcattgagattcgccatgatctccggtaatgacctgagattagcccgtgggaggaagccaacctcaccctag

SEQ ID NO: 65973 - DNA, 572 bp, Zea Mays
cattgactttgagagatatttcagaggaagcctgtctatcaggcatatgactgtggcaaaggcactagagaaaatgttgtctggggcatttgtttaggcagcttccagtcatttatctctcttctgaatgtaacggaaaaccaactaggtttgtcttgtactgggagctaatttctctttcttaataagaagatgtgtggctcctgcatatttgcgaaaataacaacatagggaaccaatatgcaatatattatagtgatttagccatccacatttaaaatgcctaatctagtatgtaggtcatgatttctaaatgcatcatagttcttcacagataggtacaattaggtatccatggttgaatgtgacatcaaccacagatgcatcaaccagatccacgcttcatacaacaccaaaccaactaagcagccaaaaccaacaacgtgcacggaatgtattaaaaatacactagatccaacattgaacttagttgtatcaaatcccggaatgtattaaaaaatagactgtgaatcacaaatgacccagaaaataaaatgcagcatcacaaaatg

SEQ ID NO: 65974 - DNA, 592 bp, Zea Mays
gaagttaaagaagcaatgggcttgtactctatccacttagtgaatttgtcaatagcaaccagtacatgagtgtatcctccttgagctttcttgaagggtccaatcatatccagtccctagcacgcgaatggccatgttacaggtatggtttgcagttgctgcgttggtaaatgctactgttttgataagtattggcaagcttcacacctctggactaactcggctgcatcactctttgccgttggccagtagaaaccagacctgaataccttcccaaccagagtcctggatgctgcgtgtatcccgcattgcctagcgtggacctcatctagcagttgcttcccagtagccgaaagaatgcatttcatgaggactcttgtcgcgccccttctgtatagtgtttccccaaagagagtgtagtgagttgactgtcttgcgacgcgctctgctgcatttttgtcatctggctcctactcattctttatgtatctaatgattggctctctccagtcatcagaatctgactctggttggctcagaataatgcactcttctacccgatctaatgaaatgctcgggcgcagtacttctt

SEQ ID NO: 65975 - DNA, 816 bp, Zea Mays
gagcaccatcactgtggacgtgaggagaggatgatgagtcgatgcgagtagataacatagtggacttgagtcgaccgggagtccgggaatgctaggagaggatgaggagtcggcatgagcgaatagcggagtggactcgagtcgactcgggatcgtccaagcgagcgaggggacgcgcacggaggcaagaaacgagggcagtggtgtgactgcgcggatgaggttgagcaggtgagccgacagacaacagtgacccacgtggaggttggatggatggcgtcgatgaatggcaccagcgagggcgagcccacatgaggcgaggagagcaggcgaaaggaatggagggagagaaacctcaccactgcaggagtggaggaggagacgcacgagcggcgggagtaaggagggagtagagatgagggaagaggaagagtagagaggaaggagtgatgagacgtgactgtggtgggagcagaggcggactccgcatcatggcctcagccgtcacttaagacggcgagacggtcgtgtcctggcacgaatggacgcaaccaacaggctttggagacgtggtagtacgcgtgaagcgtgggggtgaggaccgaggacaaatcagatgtggtttagaaaagattcacgtccgcgaccgcagccgtccacacgttgatctattgatgggcaaaacctccatgaagcgcggacagacctccgaacctgagcggctttgaagactttagatactagtggatacatgaatgcatgtttccacactgaaccaacatggcctgctaaggtatgtaactgaaaattgaagac

SEQ ID NO: 65976 - DNA, 282 bp, Zea Mays
gtgtcatcgatggagcgggtgttcttaccgattgcatttaatgcacataccttgcgattcttgagaactttggtcaagctagacttgaggctaggccttcagccgagacgccctcgggcgaggtggatttttgcttcccgtcaaaggggtctccccgggttagtcgaggatccatgcgagtgcagcctttactcgaggatgggctcgggcgaggcgtagttttgtggagccggcaagcagggtctcgggtgaatcgtgattcgaccatgcgtgacctcaggg

SEQ ID NO: 65977 - DNA, 1112 bp, Zea Mays
cggcgccagaccaaactacggcgaacttgtactggccaaactacacaacggctagccctcccttttgatggacatcgaattcaaccctacgcgactatttcccctcacttaattgctgtattcgagctctacatcacccttctcacggtgatagcgcgaggaatggaccgaccgagatgttcccgatgatccaatggattctagctcaattggatgggtcagagagtatcaagagcacccaatgatactgaaacaaggaatcagaggacatgaatggacctgaaacacgttggccacggcgaggtcacaccgcgcggtgttcttggttgttttggcggaaatcgcaaattgggacttgctcgtgagcaattggaggcacgacttggtgggttgggtgcttaactaccttacggacccgacgacatgcgcagtttataggctccgggggcgatggctcgtgaattggagttggcgcggtgggggccggagaaggaagaggtcactggtggcgcaatcgtggcgttcaccggcgcagtggttcagagagggtaagctcaagtgtgccacgattactaccacgtagtaaagagccatggcgtggcataactaaggtcgccggagtgtccacgatgacaccggcggtctggccacatcacaacggctacaggcatggtgataagcttcccctgcgaccctatctgcctccccgcgagatctttcacctccctgtgaatatccacagcgtgcccggcacgaatcccggcgaccgacgcaaatccgaacgtgtggatcaccggcggcgagggggactgaaccctgggatattccagtggcactgtaccatggaagatctgattcagagcgcctaaccgagcaacttgtgatgccaagatctttgatttttgcgtgagaatgtattaatctcgctgcaacaaagttctagccctataatccagctacaatcttgctatggtaaccatgctcaaacacccactggattatcttcgaaagggctcccaaagttcatcctatgtcagtgataatcagaattcaggctataggctgactgacagcccaactttaggctcatttttctccaatttctattcagc

SEQ ID NO: 65978 - DNA, 471 bp, Zea Mays
gttgaaggccatcaaacatgcttgaacttcgtttccacttgcaattgaaggcctcctgatgttgaagcgtgatcgtatgggacgctggattatgccctttacatcctccctcttactcagatcattcatgacataaaaccattgcttcatccaagagcccgaccatttttttcgaaacgttggcacaggacacctcacatcagaccagtacacaaagctataacatccagagttgtgatgatattgtctttcccaactgtcttcgtttggtagaacaattcgtgaatgttgtagaaatagttggcatctggcttcagcccttggctcctcatagcccaaatgaaaactccaactttaatcaaagcttcggcagtaagctgatgaagttatatctcaaatatcttcagtacttcgactaacatcttatgcaagggaaaccaaagccaaccttcataaaacttctaaatacca

SEQ ID NO: 65979 - DNA, 446 bp, Zea Mays
agaaaattaagcttgaagattgtctgtcaggtgactaaatcaggtattcccatggtacagtacctgttaactgcagaagatcccgaattcccccccagctcgccaccggtggtccgtcgccgttgatcactgctcgccgtgattcgtgcgccgtggccatcagataagtctagcccagtaaaaatcatcgccgcaggtgagctagactccattccgatgactcctgtcgtacccccttgcccggcggccaaagcggattagctcgccggtgaccgtcgcctcccggctgtgcgccgcgtggcttagcttttccaccgcgtcgccgtgactccgtagggccgtcccatcgtcgccggggaggttgccacgccgttagccacggattcacgggcgccagtgctttcttccaccttcgactgccgcgcgtccttcgtaaaattcccggc

SEQ ID NO: 65980 - DNA, 854 bp, Zea Mays
gacatgaacggttgcagacgatttgccaaaagcttcgttaagattttcatactattgtttaataacgaaattggcctataatctcccaccttctgcggattctccttcttcgggatcaaaacaatgaaggacccattaatacttcttaggcaaacttcatcatgatagaatttttcacaaagatcatataagtcttgagcaatgatatgccaacacttcttaatgaagttggtattgaaaccatcaggaccaggtgatttatccgaaggtaatgattttataatgctgtcaatctccatcttagtgaacggggtgtctaactcgtgaagctcctcattacggattaaaagctctggaaggtcaaaatcaatgcctgagaaatcaaacgatcccaatctgcacttgaaagcatcccagagaagaccagatttatgttcgtgctcaaaatgtatgatcccattctcgtcagtcaaagtggcaattgaatttttcctgtgtttaatggtggcatgagcatggaagaaacgagagcaaatgtcaccatcagttacccacttaatagccgcccgctgcttccaataaattttctgaatgtttagcagatcggccaccttttgctgcagaatatctctgaaattccattcctcaatagaaagatcccgatgttcttccatattgtctataagttcaattagcagcttgatgttttgcaccgttttatcaatttttggtaacgatctctgccaatccttcagaacctttcgaacacacttaaacttggcagtcaggtttttagccttgtcaggaaggcaagggagcccagcccacgtggtttgaaagaaattcaagaaacc

SEQ ID NO: 65981 - DNA, 669 bp, Zea Mays
ctttaatgttgttgctgttttttggttcctatcgtcatgaccatgcactattatttgtaattacctaccttatgcatgtcgctgctattaattaccttgattactgaacaaaataccttactatatactaccacctgactaacgtatttagctagtgaagcatggtggttagttgatgggttcagtcaaaagaggccagcttgcttactattggtctcgctcacttgtactgtgagtctgtgacttaacagagtgtccgtgagagagagagagaaacacacacatacacaaccagacaagagaaacagagaggaaggatggtgagctgatgatgtctgtctgtctgtctccaccagtaacagtatacatgcaattttgccagctacgttaagggccagcccagtccagtccaatgcacgtagatgcagacggccggctggccgggtttgtcccctccatctccgcatcgttttcctttctccccaacttgcattcgcccgttcacgcggtgttgtgctacggatgatgaattcatggcagatccaatcgcctcctcccctactgaaaccggcgccgaaccattccttccggccgtggctgacgagtggtcccctacaccaccccctgtatctgaatggcaaacaccaccacagtcccagacaccgtccc

SEQ ID NO: 65982 - DNA, 1280 bp, Zea Mays
ttaaagtttgcccacataatgcacaggcagcgttgtggggccaatccctcttcgcaagacgatctgttgtccaaattctattttggatggctaaccaattgaagaatttatatttcggtggcgcccataccttccaaatgatccagttcatatttgtaagctcagagccgaggaattaggcaaggtctgctgatttcgccaaatactgtcgatcttctgagagtttccaactaatagagtcacaaatacctggttgcaaggatattctttgcaaaattgaccaaagcctacagtactccccaatgtgttgctttgtcacctcaacagaaaataggttgtggtccctaatccaagtatgattcgacacagcgcctcactcaaagatctgttctttctttgggacacattgaaaatgagaggcgcaatgtccttcagtattaacccttgcacccacgcatcattccaaaaggacacctttgtcccgtctcccaccaaaatcgatgtcactgctgcgaagagctgtcgatcttttgtcatgcaagggagttccaaggccgtctagagcctagttgatgaagcccaatcttgccatagccaacgcaaacgcaaggtccttgcaaatttggttaaatgaaggatacccaagcctccgcactcttttggccttgcggaacggagccaatttaccttgcatttacctcccgtaatttgtgcacacccagcccaaaggaattttttccttctcgagacaattaaattcaatatttccttaggagcccgtaaagcagagagaaggtagattgtttgggaggtaatgactgacttaactaaagttagtctaccaaccatagagaggtttttcccattccagccactgagcttgttcgaaattttgtcaattaagaactgtaagtcgctcttcttcagtctggatgatgagagcgggaggcccaggtattttaaggggaaggtagcccttctggccggcatattccttaggaccacgttgagatcaataccttgacaacagataggcacaactgtggacttatggaagtttgtcaacagccctgacgcctcaccaaatagcccgagcagctttagtattgtctcgacctcctcttttttggtgcaataaatgaggccgcatcatcagcatacaatgagagacgaaggcaaggcgagcgacccctgattttgctgagaagtcccgtctctgttgtcaagtctaaaattttctgcaatgggtcaatggcaagcacaaataacaatggtgagag

SEQ ID NO: 65983 - DNA, 573 bp, Zea Mays
tgcttgtgccagtcgccgatatcagagatgcagtcgctcaaaaacttgaagtcaattctgattcgctaattctgaggcaattggcttatggacatttcctgctcatgcttcccaccctccagtcagttgaccaactgacaacgagatggaacactattcgtgcaggcgccttctccctgcactgtaaaagatggtccaggttttttggatcctcaggtgcaagtttgcctatccctgtggaatttgagctaagtggcattccaattcatgcctgggaactatccactgtccgacacattttgaacccttttgcctgggtacagaaggtacatgaggagactctcgagctcaagaatttggaggtctttcgctgttatggttggtgttatgacctggcctcaatccctcattcgagagatctctggattactgattcgctgggaaatggaccaggcgttggaaggctatctcttgcctatcatgttcagactaaggtgttggatggacaacgtgttgtcccagaccccatccagaccccaacagatatggatggttacacacgacagaggcggc

SEQ ID NO: 65984 - DNA, 421 bp, Zea Mays
gttatgcccgttttatggaagatacctcaagttatggttttcaagggcacaaattggtaggaaccgtagcggcggctatagagcacatggcacaaacttccctggtataagcaataggtaagcaccaaatgatgaaacaaggaggggctgcaatgcaatgcggcttgcaacctaatttagggctagcgtggcgagaattcacacaaggcggctagcgagggcaaatcgagtaatatggtgtctcgacttgtaatctgggtaaggtggatgggatagcggcggaaacaactaacagcgatggagcggttgaactacgattacgacacgacctaaaccagcaacaagactcgaacacagacacaaattcaacaaagcaatctgaaacgaaattgcaaggctaaacagggttataggacagcgg

SEQ ID NO: 65985 - DNA, 319 bp, Zea Mays
acgagaagggtgcttacgagagcttagacgctcaagagggacaggtgggaggagtatcatatcatactcaatgcccagagagatgaactcaagactcccgaacctaattgtcatcccaagcctgagcgggtggtggaaacctgccacctagagcgccggtgagaacggggagtgtttcacgcgaccagcccctacctggcatgccaactatcagtgtttggaccatgggtccttaaccaaccaataaatgtgtcgtgtggccgactctagatggtgtgcgaggagacacaagcaattatcctggttcgggctactcaag

SEQ ID NO: 65986 - DNA, 578 bp, Zea Mays
cgagaaacggacgagaatggaacgaggaggtgtttttttttctgggtgtttagtttttaatggaacagaaataaaacggctcataaagtctataggtaaaaatgtatcataaataattagaatgttttttccaccaaaataatcggataggagcgctcttttggacgggaggactctccccctcgttccctccctaatcatatgcatctctaaccaaacaaagaatattttactctttaaccagacaaaaaaaatgaaacacatatattctgcttgccaaacataggacataatggctccattctttgaaataaaactgtcacattctagttaactcttcaaccaaacacaccatagggatcacgttgaacatattggtttgctacaaattgaaaggaaacttttgcttaggcgggtgtcagtgcaccatcccctcttgctctaccacgtcagctccagactgcactcttgaccttattgttcaagtgcatagtctgcaacaggctataccctaaacccacaaccacatcggggttttctatttcagaattaagtaattcacgtagatttatgtcaac

SEQ ID NO: 65987 - DNA, 623 bp, Zea Mays
tagcaggacacgtgtccagtacgtggggatgtgcatgtgttgcgctacttgtggtggtttggtggttgattatctaaaaaccacctagctctacttgtggcgagtcttaggaatattttgaaatcatgagattactggtttgcttatgtgattttgttttgagtactttcttcatctcaattgatgttaagtacataattttagtctttagtagcaaaatttgattgcctcccattcaccccctcacatcgcctcacccttcaattggtacctaagtcggttaaggctttccttaccctaattggtctgaaatccatgaaggcgacatggaatgaggacttgacaaaccttcgttctttaatgggacgaattacccgtactagaggatccaaatgtcagcatattttcatagtattgggtatcgcatctgggagatttgtctcgatgttgcggtcgatgtggcatgtgctaaaatcactccgatttagatggagttccatgattcaaacaacaaagcttaaaacactttattctcatgtctctcgcttgctgagtctaagcgagttagacatttggctatggctcaccagatttggtccaccctcgagagattccatgaggga

SEQ ID NO: 65988 - DNA, 528 bp, Zea Mays
gaatagcaatttgttagcagtggaaggacaagagttcattttcatctgttagttattgggtgtaatttttataggtcgataattatgcatgtcttttgagtaggatcattcccttgtcgcctttaagctagagtaaaataaaatgttccctttgatgagttcaccatgtggattatggtttttttacttcggtctgctgtacaaccaggggatccatgttgggcctaactattttagggaaccggatcattgaaaattaggcaggtttttatggtggaatcatttaggagggtacttaaccatgtatgagaaattgtaatgttgcttttatttggcacaattatcaaataggaaaatgaatttgagatccatcatatcctcttccctatgccgccatcaacaccgctcttgcatcctatgcggggctgatctagacgtcgtcctcgcccgtcccgtctccctctctccgggaggacacctcgtggccagcacaagctggccttcttcgacttcggcgacgccgctagc

SEQ ID NO: 65989 - DNA, 510 bp, Zea Mays
ctactgacaagttgtctcttgatggtggtgatctattgtcttctgaagatgctacaaagtatagaagcattgtgggtgctctacagtatctcctcttgacacgtcctgatctatccttttgtgttaatcgggtctgtcaatacatggcatcgccaactactttacactgggcagctgtgaagcgtatacttcggtacttgcatgatactgttgatctgggcctatgtttcacacggatgggatcctctcttcttagtgcattttcggatgccgactgggctggcaatcctgatgaccgacgcagtactggtggttatgctatattttttggtggaaatcttgtgtcttggagttctcggaaacaagcgactgtttctcgctctagtactgaatctgagtacaaggcgattgctgatgctacggcagaggttatctggatacaagtcttgctacgtgaacttggcatatcacaggtgcggccacctacactctggtgtgacaatcttggtg

SEQ ID NO: 65990 - DNA, 694 bp, Zea Mays
cccctctactaccatctactggtactggtaaggaaaaggaactagaaccagatacaggctcagtgccaccaccatctgctggtactcgtaaggagggactacaaacaggtcgagacccagggacttcaatggtaggggagaattcgctagaaataggattgctggaatcatctttcctactactacaaaaagcttttctacctgctaccctcttcctccccattgtagagcaaatgaatacagatctagcaagtgagcagcaaggaaactacggtactctagtgtataaataaagcacgagctcgagcacttactgggaaacatacttggcgttggcggagcagtaagtgcatggaagagacggtgacggggaaacatacctggcggcgcttagattcctggcagcgcttcaattcctggcgcttcaattcctagcggcgcggagactggaactggaactggcgcttcgattcctggctgcgcagcgccgtggtcctggagactggaactggaggtggcggcgtgggccctggagactgtgacggggcggcggcgcggtgccctggaactggagaatggttctagcccgggttagggtttaggcggctgcgcggcgccctggactctggagagtggaacagaaacgagacgtcgcgcgatataaacgaaatgcgcgtgtgatggtgcgaaccga

SEQ ID NO: 65991 - DNA, 561 bp, Zea Mays
ataaaccctaacagcaactagcgagctgattaattagccgaagaacgttggggcatttttgccaccagcaaaatgggcaatggtcttgtcctccacgtacttaatgtacacgtcacctgtggaaaagaaaagaaaaacaattacattgtgtataatatatacgttatatacgtacggtggatctgttttacgattttcacttgtaccggcccatttccgtctcaacaggccgtaatttgccatgttcccagcacgtagtccaggatccatggaatattttatgttttccagccggagcgacatcagcatgatgtcattgatgacttaatcctatgtgccattgacgtgtgggtccctaacaacgggagcctctcccacctcagaacttagaccggatctcaacgacactgcgaataaaactgtatctaccggatgcgatccgcggggagcgtaacaaacccaacaacaaccgcgtgatcaccgtaactacctcctcgtaagtatcgcagccgcggtagacttctcccccacggcgcggactcaccatggcccataaatgca

SEQ ID NO: 65992 - DNA, 307 bp, Zea Mays
aaatatgaaagtttcttagttgtttttactctatcactttgatatatacacttttgactaaaagtgcatagaatttgaaatcaccttataggacactaattagggtttcttggttgcaagttagggttttgagcatcctagggtacatttagcacttaagctctctaagataacatttattgaacatttctaccaacctgttaagatcatcctttagtggtcatctcacatggcaacatgcttctaatccttgaagagagacattccaacctagggtcaagaatctcttttaccaagtcagatcatc

SEQ ID NO: 65993 - DNA, 406 bp, Zea Mays
cggtttagctacaatgaacaataccaacctacttaactcaaaacaatgttcgagacaatgataacagtttaagtgtgccatacacctaaactaaacaatctccttgaagagacacttaagataatcaagaactgtatggatcgagtcaaaaatacggaggatgaaacaatacccgatctgtgaaaccgtccacaaaaatcacaaagaagagtggagagatggtggaggagcccgaggggatcgaatctccaacaatctccacgaagttttgatagttttagagggatttgggtgtaggatgtgagagagggagagagaaaagtgagggcgtcggcggctggaagaaatgagagagtgaagatagaaagtagagaggagaggagagaaaaggggcagcagcggctgg

SEQ ID NO: 65994 - DNA, 423 bp, Zea Mays
cctaggcccagatgggtgatgtaaggagacacaaacctttatcctggtttgggcaagcagagaaggccctacttccagcaggggggatgaaacttatattattacttgtacctaaatacttatagtagggatacaagctagtctggacaggggggaagtttccaagtctctggtgattgaggcaagtgccgatatcagctacggaggtgaaaacccgtgaagtgttctcctctcccgaatgaagccctgggctcctctatttatagcctcatggagggctaccagaggcgccatggtttgtcacatatgggagtggagatgtgtccgagcccctatagccggtatggtattcggtatggtctttgtacttgctgttgacttaggccgagaggacgatgtccaatccctttatttgcatctttg

SEQ ID NO: 65995 - DNA, 674 bp, Zea Mays
ggcgacttcaaagcagaaggggaatgatcagtgggagaagatgatgaagggattggactggttggaagagagactgcaggtgatggagtcgggtcagtatcgagtatcgactccaagagcaggcggaccgcgcggccgcgacaacaaggaaggcggaggaggaatgcaagcaagaggaggaggatcgtgcggtgatggcagccttggatgggctgatcggtaaactggaggcaaggcaagggacgaagcaatcaagtcgtccttgcaatctggggcgatcagacatggttgcaatcgtgagcaggaaatgtactaatctggttggggaggtcgatactacgtgcaagccggcaatacttgaagcacaagcatggtcccagagtgatgcccaagaggtatttgatgcaattcctagtcagattttgtgggatgatgaggtgctgcaaggttttgaatcacatgtcggtttaccgaaggttttagatcatggtgattgttgggttggcaaggcagccatagacaatgatctatgtggcacgacagtgtgggatgaggaaatttcttacgactcaatctggcatgagggtttgttacaacagctagcatcgtgccgcaagagcactgatgatacttcaagacaaactgctcaggtagctcaagggcttgatactcag

SEQ ID NO: 65996 - DNA, 1115 bp, Zea Mays
acaagaggccttgagggcttatccattaggcacactggggcatcagtggccctaggggcttatctgctgggtgtcctagggcatggggttaggggattatctattaggtgccccacgacacgagggccctaggggcttatccatcagatgccttaagggcttatctattaaatgcccagggcgcaagaggcttgagggcttatatgtgaggtgctctagggtgtgaaggccttaggggcttattgctaggcaccttagtacaccaggggcttatctgttaagtgtctcagggcataagaaatcctaggagcttagttgcaatgtgcctagtgtgcgaggggccttggggcttttctattaatgcttctaccactacattttaccattgtattagactatattctaccctagattgcttagaaatttaccttatctaatttccattaggtagtttttgaattgtgaacatgtgcaagtctgagtaccaggccacatcaatgttgatcctattgctaatattttttgaagtgtcatctttgacaagcctattcaccctcctctacacttagcagatcattcatcctcataagagtgcttgtgtgggcgtagctggtggcaggcggatgactcctatggcatgacaggcagtcatctaccatggcgtgtatgttgctggcttaagtggcgtggataggaccgacatacgatgttggtgtggggtggggctaggagcatcagtgagaggcagagagcgtactgttgggagagatagagaaagaagatgtcgtggctggttgcggatgtcacaccttgacaccaagatcaatgtactaggttagctgccacatcactgtcatgtcaccatagaccatggcactaagttgttttatctccacgtcgtggcctaagtcgtcgacccctaggccctagggtctaagttgagattttatctagcaaagatgtaaatgtaattctttgaccaagaatggttaaataaatctaggaatggccgccttgaccactaaaaaatggtataatcagaccattttgtagctacccctttctagcagaggttgagcttgccagtcgtgagaagtagagaccaaggccctgtg

SEQ ID NO: 65997 - DNA, 370 bp, Zea Mays
gaaatttcttcaagcctgatatggtaaaggagacagaagagaaagttcaacgaataattcataatttgaagaaagctcaagctcgtcagaagagttatgcagacaaacgactcaaacccttgtactttcaagttgaagattatgtctacctgaaagtttcaccaatgaagggtgtatcacgtttcgaggtaaaggggaagcttgcaccttgatacattggtccttttcctatccttgaaagatatggaccagtggcataccgacttcagttacccgaaaccttgtctatcgtacataatgtgttccacgtgtctcaattgaagaagtgtcttcgggttcccgatcgaaccattgaagtaacggatgttgc

SEQ ID NO: 65998 - DNA, 461 bp, Zea Mays
gttctttccatctctttattgttgccgggctggtttggtccctttggtgtaacagaaataagatggcgattatgaaaaaatttcctaacaatacgacaacgatcatatatgagatcatgtctttcttgtagagctggagcgtgctactcaagacaagggaacatgcgatgatggaagatatactggactcagtgaagaagtggttacagcaacatcattcggttgaggaaaattgcagtgacattggagtgatctgaagtggaagatgtcccttctttttgtcccaggcgtggagttggtgttgctaatatggatgtcatatgagggttctttttgttgtgcttggcttgtttctagctcagttaggttgtttaatcgagtgaagctttctggttgatgatatttgaactttgtcaggttgatgctatcaatgtagagctttggtgactcagtctttaatt

SEQ ID NO: 65999 - DNA, 636 bp, Zea Mays
tttgcttaagtgatcaaaccttggtgtcatacaaaatttggaaataaatagacctaaagtctggctgtcagtcaactcagaatctgaaatgttactgacaatgacatgggatgaactttgggagctcttttgaagataatccagtgagtgtttgaacatggttactatagcaagattgtagctggattatagggctagaacttcgttacagagagattaacaagttgccacacagaaaacggatattaatgccctgcaaatggccttgtcagacagactgaatggtgttctgattgtacagtgactgaataagatcacaggttcagcccccctcaccgccggtgacctcgcgcccagattcacgctggcgtcacaattcacccccggtcgaacacggataacgctcctcggtaaaatcgggcaccgcggatgagcttgagacactgttccgccccggccgccatgtccgcttgactcacggccagttcagataagctcaccggagttggccaccggtcgattggttgccacatgcctaggtgctctaccacgtcgcagtaagccgctctagattgccggctcatcgccggtaagcctgccacggtgaaagccacgcagctcttgcgcctgtgctct

SEQ ID NO: 66000 - DNA, 1457 bp, Zea Mays
gtaagtgcgagcatgttgcaacgtcttaagttgtcgctgacttaagctgattgctccattagtagggtatggtggtcaccctaagttgagtaagcgcgagcatgttgcactgtcttaagtcgtcgccgacttaagccgattgctctattagtagggtataatggtcaccctaagtcgagtaagcgcgagcatgttgcaccgtcttaagtcgtcgccgacttaaggcgattgctccgttagtagggtatagcggtcaccctaagtcgagtaagtgtgttgattccaagtctaatcaaatcgaattcaattgataaccaacagtttgaatgcctttgagaatgaaatcttttattgatgacgtattctccaattacagagtacaacattgctctgatagcttttgaggtcttgctaagggtaaaatttcctaagatgctctatattccatgaattccccacttccgtgccatccatttgagtaagccgatatgatcctggccaagtgacctccgataccatgaatggcccttcccatagtggtgacaatttgtgccgtccttccctcgttagaattcggtgaaggaccaagtctcccactacaaaggatcgatgtcgtatagccttatcatgatagcgccttaaggtctgctggtatctggctgactgaattactgtgttcaatcgctcttcctctagcacatcaatatcctctagcctagtagcttcggcttcagctatgctttcaaataccagccttggtgccccaaacctaaggtcggtaggtagtactgcctctgaaccatagaccatgaagaagggggtatttccatgcagagctcgactgggttgagttcttaagctccaaaccacataaggtaactctctgatccactttcctgcaaacttttcatttttgtcgaacactttcttcctgagtgcttccagtatcataccattagccctttccacctggctattagctcttgggtgtgctactgatgcatacttgatctggatacgccgttgttcgcagaaatcaaagaattcagagctagtgaagttggatcccaggtcagttatgatgccattcagtatcccaaacctgaatattatgtcttgtatggattccactgccttggctgaagttagagaagcaatgagtttgtactctatccatttggtgcatttatcgatggcgaccagcacgtgagtatagcctccctgagctttcttgaagggtccaatcatgtccaatcccgagcacgcaaatggccatgttataggtatggtctgcaggtgctgtgctggtaaatgttgttgctttgataagaattggcaagcttcacatctctggactaactcggctgcgtcaccctttgttgttggccaatagaaaccagacctgaagactttccccaccagagttctggacgctgcatgtattccacactgtccgg

SEQ ID NO: 66001 - DNA, 390 bp, Zea Mays
ggccggcggcgtattcaataccgggaccgggacacgtactcgtacgtacctacgtactcctgcatgcatgcatatatgcacgcgtcctaggtagtatgatcgactagctaggttaatttactcgcgatccatccgatccgatccgatcctacatgccgggccggctacaggaaacagagagagaccacatagaaaacatcattaatcatgggaacagtagcagtagtttcatatccgtcgatcgatctcgatttctagggcactaatcaatgacctcgctcgacgtgggtggccaccctagtagcctggagccgcagctgcttgtgaatttaaggttctcccgccatcatatccgcactgaaggatatgtgtgggcctcccatccaatgc

SEQ ID NO: 66002 - DNA, 1273 bp, Zea Mays
aagcaaatgagtatagggaagataatttaccaggaggaacgataaaatgaaaagagctgagttacctgaagattggagaagaatgagggtaatcccaagtcaggagaagctgcatcgtagctcgacgaaggaagatcaatcggaacaatttgaataacattgtcaggggttgactcagccccaccagcagatatcagaattcttgcatctggctcgccaacctccaaggcgactcgctcgctcaaagtcaaagaagcatgcatcgccatcaccccatcagatcgtggtggagacaacccgacatggacatccattgaggtgtgggaaggagagctcacttggacaccctcgggggctgggttgtagctcgcgccacccaccagagctggatcattaccagcaacaccctcgggggctggttgcagctcgtgctacccaccagagccagatcactaccggcgacaccctcgggggctgggttttctgcaacagccacctctaaggctgaaggatcctcagtcacctccatgggagtcgggcaatcttcaccaacttcttgacatcgaagactgccatccaaagtagacgatgtgcgagacactgctcgggatacctccaatcccacgtctggaatttcagagaaaacatccatcatgtcgccatcagtcggctccgacagcatatcttcaggaacgacatcctcaagggcctgatcaaaatctgttatggacaattcttgaaggctaacaagagcagatagagctggagaaggaatatcactatcccccctactacctctgtaacaccggctattcttatgaattagcgaaacttcttcttcctcttcttcgtcctcatcaaaaatacagataatagccgatgcacagtcacacccattgggatcagcttctgcacggtcacacccattcgggtcagcttccacactgttacacccattgggtgcagcttcaacatgtacaccaccattgggatcaacctcaggaaggacctctgctggtacttcttcacaaacaggtgcagaagggccagcatcctggtccaagcatgacagtcacagaagccgcctcttcttctcctcaataggcgcagttggacgactaacttggcgaggacactttgggcgagtaccctcaggctttcgggtgtccattgttttgttaacctcttgtccaaccgtaacagccatcggttcagcatgggctgagtcagaagattctccagccaacatattgagtacatcatctatttctgc

SEQ ID NO: 66003 - DNA, 593 bp, Zea Mays
cttgaactagcagaacatcctccgtatcccaccacccgagcgatttcctctccctcacgtcccacgccatgccctgatgacgttcttcctcctgaccacgacgctcgccgcagtcccatcctcccagctttcttctgcataatttcttttatattataatttgtgttcatgcttaggtaagtaatgccgcacaatttttgtttacccctatttttgttgcagattgtacagactgtatctctactacttcttaagagcatagcgtaggcgtccacggtgcacggttctgcctgcccctctcccctgcaccccggtgtggccacgcgagcgttgctcgtgcctcccagcaaggaaaccacacgagcgtttcctgcgcctccctctctcgatgcagtgcccttccatccacgcgtcgtgctccttccttccatcaccgcccaaaatctccggcgtgaaagtaggcgaacctcgcgcccgtaatcgtccttccgtgcccccgccttccatcgtcgcgactgtgctacgctcctcttccatcctctcccacacgacttgccctccttccatcgtcgctcccgtgcgcgctgcccttc

SEQ ID NO: 66004 - DNA, 728 bp, Zea Mays
gcaaggtctaataaaattagcttccagcagccggtggatttcgttcttgattcgtgggagaagatctggatgaaatgttctagctctttgcttgaaaggtctgaaaccgaacttaataggcagccgatgctctacgatctctcggcttaatcccggcatcttagtgtaattccaagcaaagcaatccgaatattccttcagtagaccgatcatctcatttctaggatcggtctctaaggttttgtttacaaaagtcggccttagagttttaccatttactatgtcgatctcctccaaaggatcggccgatgtaaacccttgtcctagtttatcgagatctccgaattcctctatcatgtcccccacagaggaatcagatgatttttgtgtgatggcggactctccggtctcgggggccggatcatccgtaatactgtctttacgctgtggtgaatgttcggttttaaaatccgaactattttgtgaaagaccagaccatctggccttagaagccgaactgtccgtgaccaaggactcatgaattttgtgtgtactcatcatttaaactttatttaggatttagccgattctccatcggatctagcattacaggaatgaaacccttcttatctatacttatgaactggtaatcaaaaaaatctactcctatgagacatgtagcagtctcataagtctagagtacggggcatcggccacagtgatacagg

SEQ ID NO: 66005 - DNA, 437 bp, Zea Mays
gtagaggtagcaaacagccaattagccaaacacgagtacacgacagacgacaccaaggactgaatttttgtactcatgtgtgatttgcagtgctatggatgtggatgttagagttgatattgagaatgggtctaatgagaatgaagtgcaagccccaattatagatgatggcaatgctcgctgcgatgaccaagttgctgttgaaccttctgatggtgctaatgttgctgctacccctcttgttggaaagaagaagaaattcatgggtgtagagaatcgtgcggtcaaacagcgaaccactactcctgtgagcaagcttaaggcatccaagtcagtaggatcaaacaaggatagagctattgttttagtgccatcatttgcaaaaggtttgtatatttttcaatttgcacaaattagtttcgcaggctctatgcaac

SEQ ID NO: 66006 - DNA, 396 bp, Zea Mays
gtcgttgtaggggtcgggttcaggcgcctccctgggtattaccaagggcttgtagatgtcccaaggcgatctttgctagttcgtctgttacctcattgtaccatcgcgcgacatggttgagctctaggccgaagaacttgtcttcgaggcgccaaacttcttcgcagtaggcttccattcttgcgtcgtggcagcttgaatttttcatgactttgtcgatgatgagctaggagtccactcggatgttgaggtgcccgactcctagttcaatggtgatgtgcagaccgttgaccaaggccccatactcagccacgttgttagcagcggcaaaatggagtcatacgacgtaccgcagatgcacactgaagggtgagatgaaaagcaatcttgcgcctg

SEQ ID NO: 66007 - DNA, 320 bp, Zea Mays
taaatggcaagtatttcctagcaaataatgatgccatatcttaaggacatgaacaactgcagctaattccaaatcatgagttggatagtgctcctcatgccgacgcagttgtcttgaagcataagctatgactcggccctcttgcattaggacacatccgagtccacttcctgatgcgtcacaatacacatcaaaagacttctctatgtccagttgagccaataccggagcagtggtcaataacaccttcagctgctcgaaagcgtcattgcatttcgaggaccagtcaaacttggtgtcattcttcaataaccctgtaa

SEQ ID NO: 66008 - DNA, 989 bp, Zea Mays
tattatcagctccaccagtctcatgccaacattatgagcaaaaatcacaaagaaaaaaaatgcatggtttatgtgccaaaaaaatcaatcacaagacctagaacagtacgcaaaaggaaaccccactatagactaaccatcattttcattccaaaccaactatgcagttcgaagtgattcaacacattgcgtccatttgcttcagcaatcgcaagtaaaatagcacacttacacaaccatttccgcgttgataggttgaaacagaagcagttctattctccatagggcactggcgcacggctctgctcggggcgacggcgaccggcaatgtacaagtttccctagcaatgtacaagtttccctggcaatgtttgaaatcatatatatatatattactgctacattgcattgtattttatataggcatgaattgatgaacattttacatgtatgtgcatgtggcttatgggttaaacttatggtatcttccaggactcttggcaccctgacaaaatgatcaatccaaaacgacttgtttttctggttcagatcatggtttcgtatccaacttgcttttataggtaaatatttgatgaactctgatttcgttaagcatcgagatcaggctccatgaaatttaatttagtggtagaagttggcagacgtcatattaacaaggccatcagcaagcgaacaagcaaattggctgtgtcactgaaaatactgcagtcgaacaaacagtatgaaagctgcattgaatcatcggaaatcccgtgcgaaataaaaggattttttccaaagaaaataaagatattgctgcataagacaatgatcaaaactacaccggtgcagaaatagcattacatatattaacttagaatggcacaacagaaaagtgaccgacatgttggatatgtatgcttggaacatgagcaatataacatgagccaacttaaacagcaccaagcattctgctcctccgacagagg

SEQ ID NO: 66009 - DNA, 596 bp, Zea Mays
cgagtgttgggtagtgaagattggagtgactcaaaggtcactaggctattcttgagagcctatacagaaaagaacaagagtttgacaaggatgataagagatcgtgatgattatgaggagatgactcctcatcaactatttgccaaaattcaacaacatgagtatgaagaagctccaatcaaaacaagagactcacatgccttgttttcaaatgagcaagattctttcaagaaaagcaaagaccataagtcaaagaaggtggttgaaacatcaagtgatgaagagaattcaagtgatgaggacactgctatgttcatcaagaccttcaagaagtttgtaaggaagaatgacaagtatcagagaaaaggaaagaagagggtatgctatgaatgtggccagaacggtcacttcatagcggattgtccaaacaaaaaggaacaagatgccaagaaggattacaaaagggacaagttgaagaagggaggcaagggcaagggatacttcaagaagaagaagtatggccaagcccacataggtgaagaatggaactcagacgaagagagttcaagctcggaggtagaggaagaggtggctaa

SEQ ID NO: 66010 - DNA, 608 bp, Zea Mays
gcactattcacatttgtctctgacattcgcaccgaggcccctccctttttgtttcttcgcaaggtcaggtccccgaccaccaacggcggtgaacactctccggtgagcctgtaccggccggaatacgcaaaggctaagctccttactcggtcgacactaaattctacccctggcgaccctaatccctcgactaattgcatgaatcccggccaaaatatctctgcccacgacgacggcgaaaatccgagacaatccgaggtgttcacgatttggtgcggtctagcttaatcgaatgggtctacgagcaacagggggcttgagggaggctagaacaccaatcaaagaagcttgaactaacctgcagagggctggccacggctaagtgttcacggtggcacgaaaaacgtatttggggaaaacacgaaattgagagtctctagtggatgatccgaggctagggctgctgcgttggatgtgcaattacctagcagaactcacgggggcaacaatttatagagtcctacggcggtggcgtccaatttgaaggaagtgtgctggcggccggagagaggggaagtcactggcgcaagcgctatcgtggcttttac

SEQ ID NO: 66011 - DNA, 453 bp, Zea Mays
agagaagactataggtccttcttcgccttctgctgctgaggtttcagaaattttgatggtaatgactgaacccatcccattcacaatgctatgtcctctaaggttagatctgactagcctcttgcagtcaaaggaaactgctccgactgctgaggggaaagccggagggcaaaagaaatggcagatgatgaatgtgatgcaagctattgagcagacccagcccccagcttcgacggataaagcaattatgcctgtcgatgctgaagataccgccggagccgataatcttgcaaccacaatgtcgaaaatcgatagacttatatcggatgtggttactgagaaagatgtagccgcaacgccttctgataagggaaaaggaattgaagatacctcttcggaagataagaaattcgaccttcggcacctaggtggccaacaactttccgaagagga

SEQ ID NO: 66012 - DNA, 355 bp, Zea Mays
ttgcttagctggctgttggaggagggtgccttggagggaggtgctgaaacattcttggggccattcaccgagttggagtaggtaggtacgaatgtcttcaactgaggacaattattcttgtagtgactggggtctccatagtgccaacaagcattggctggaggttggctgcttgcaatagatggggtgtggagggaattttgacccggctggctgaaacgtgatggagcgggccctattggcttgctgaagctcagtcctttgggaggaaacccaaaagatcgaactctctggtgcctgtcctgctgctaagctcggagaacttgaaacttcctcttgaggtgacccttttctt

SEQ ID NO: 66013 - DNA, 716 bp, Zea Mays
aaaaaccctttttctcaattcttcttcaaactgatttggctatctttgaggatgttccttggacttagacaaacatatttgccgactatccaactcgtccaagtcccatttcttggtcttttggctttcttcaacttgtgattctgattttgctcaaactagcttcaaaatattgactctttgatattaagctttccaacccttcttgatgtgtcaaatagattcctaggggtgtttgcaacttgtccaagatatgaaactaggtaatctttgtatttccaagtttcactccactaaggttggttttgagctatatgtgtcttagaactgagttgagtgatattatgcacctgtgaattaaagactaggcaaacaagttagtccactaggttgtgatggtcatcaagcaccaaaatcaattagagaatatggttaaggccatttccctttcatgtggtacttttcttaaggccccaccctgatgagatgaatttgatcaaagaaattatgagaatttttggtgttgcttctgggctagtcacaaatattaggaagagctcttttgttcctatcaggtgcagtgatcaagacttggcaacagtttctaggagtcttccctattcggctggacaatttccttgcaagtatctcgggctaccgctctcccataagaagctgctaaaaggtgatttctatcccctcattgatagagttgc

SEQ ID NO: 66014 - DNA, 370 bp, Zea Mays
cagcactggagctgccatcaacttagatctcaattggtcgaaactctcttggcattcctcagtccacttaaactccttgcccttctctaacaatgaggtcataggcttagcaattttggagaacccttcaatgaatcgccggtaatagcctgcgagtcctaagaaacttcggatctccgagattgtacttggtatcttccaatcaactatcgctgttactttagccggatccacagaaattcctcctttggagatgatatgcctgagaaaatgtacttcatcaagccagaactcacacttggtaaatttggcataaagctaattgtcccgtaacttctgtagcaccatctgcaaatgctcctcatgctca

SEQ ID NO: 66015 - DNA, 544 bp, Zea Mays
acctcgtggtgcgtaatcgggttgtaaacaccgacaactgtcgtgccaggtagggggtgcgacgttgatccacgatgactccatggctaacatcttcaacacctcagtcatcttcaatgctagggaggtgttccactttggattcctctcctgcattgcagatcaagaaggtgtcctgcactgcatcgtggatccatctaagaaaatatcttctttggtgacaccaattgcgggggcgggttcgtctcgcctgactctaccgagaactacgccgccgaactccaatgcacataaacctcaaccaacttccgccccacgcaagattgcgcccgtgtcggcaggcccagggccataacaacacctgtagctcgaccgattaaggttgcacccctgtcacggcggacccctctgtccatgtcatccacgtgggtgtggacccggatcactcggtgaaaaggaatggatagccctggcactagtgtggctgcgggaaccagaccgacgactattccggtcactccgcccacatgggggatggccgaag

SEQ ID NO: 66016 - DNA, 342 bp, Zea Mays
caactgcatcataaaatatatttgttagttccgaagctaaaaatagattacgaagctaaaacctcaataaaggtacctataagcctcacacgctcagtagcttctttagctcttttcgcttcttcttgagcgtcgtcagattcttttcattctttctaatatcttcatcagctatctcacggccgcccttcatccatacctcggagtaaaatttcccgcctaacgcagaagctttggttgaacgatttttaatgtcgtcggctgagaaaacaaattcaggctgaactacaaccttggcatgttcgcaaccggccttttctaagatggacgtggcctcccacg

SEQ ID NO: 66017 - DNA, 1021 bp, Zea Mays
aaaggtacgtcgtacaatccattttttgttcttaatactgataatgctgttcttatggatgttgcgcataaaataggggttgaattaggttcttcttttaatgatgctgtggaaaatttaaacctgattaaatccttagagctttctagaaagaatttgattgttcaatctgttaagtttaatgttgataattccaaggcaggtattcttgattctgatatggataataatagccataatgaaagtgtggataatgctttgactgatcttgatgatgttatggttctcagaaaaggttgtaaaattcgtcacaggaaaaaactgtgaggaagaaaaaaaggatagtaaatctcccaataataggaacattcctattaagtggagaggtcagaatgaggggcatacccaaaattgttcagaatgataggtttaatttggaactgtcagggtctgggtaaagaagtgaaaagtgagttccttcgagatattattaggagagagagaattgattttattggtttgcaagaaaccaacaagaaaaactttgatgactcttggttgaacttcattggtggtaacagaaattttgtttgggtctggtctccccctaatggtaggtctggaggcttattggtagggtttgatgctgacatctttgatgttagagagaaagaattgggagaatttatgattcgtattctggtgattcaaaaggaatcaggatttatttggaattttattaatgtttatggggctgctcaaaatgatcaaaaacataaattcctgagtgagttatctactatttgctccaaatgctctcatccaatgttgattggtggcgactttaacattcttagaaaagaatcagataaaaacaaacctggtggcaccaataagtggagttccttatttaaatctattattgatgtacatgatctgattgaattggagcttagtggtaggctttttacctggtctaataatagaaatccccccacttatgaaaagttggacagatttc

SEQ ID NO: 66018 - DNA, 481 bp, Zea Mays
cgggcatgcaacttatcaattcatatattctccctttcagtacatctatggaagtgcttgatcttagtttcaatagattttctgggcgggtccctatgccaagctcatcaggagaagtcttggaatattccaacaatatgttctcttcccttgtgccaaactggactttgtatcttagggacactatttattttagcatatccaaaaataatataaacgatcaactacctccctcaatatgtgatgcaattctggacgttcttgatctatcaaacaacaacttttatggcccaattccatcttgtatcatagaaaatatgacacacacaattttgaacttgaggggcaacaattttaatgggacattgcctaccgacataatgaccacatgtgatctacaggtgctagatttacatggtaacaagattgaagggcggcttccgaggggcctttctaagtgctttcacttggagattttgga

SEQ ID NO: 66019 - DNA, 691 bp, Zea Mays
gtttgaaattcgaattgaggtatgaaatgacgtggaatagatccgatacttcacgaataggtttatatgggcaaatatgagtgaagtgtgtgcttggtttgatttgaggcgaagaaatggaatttgggcactcggctcggaaacgatcgcttgaaacagggaaatgtgtgaaattgaagcctggtatatcggattggcgtgaaattttgcaactatgttactacaggtattgtgaagatgtctaaaaaaatttgggagcgattggagcatttttggctggtttgggcatttcaccgagcacgtggcgagcggtggattagggttctggagaaatgcctatttgaggtggtgaaaccctcccgaaggagctaggaacctgcatggaagctctaggtagtactaggaacacacacattcacttgattcaaacattttgacaggaatttgagagtatgtgcaaggggctggagagaggggcactgcacagagaagcagtgagacagagagggagggaagacaggggagaagctcactgagaggagaaagaagacaagcactgggtgatcgccggagcacggtggtcgccggcgaggagggcaaatcgccagagagcagagaggagccagagagaagagagaagaggaggtctctggctcgggctcgggctggaggcctttttttaaaacacgtt

SEQ ID NO: 66020 - DNA, 521 bp, Zea Mays
cgataacactgccatttcatataagtcttctatacaacatattaaatatgtgatgtgcgatgttacaacctaataatgccttgtcgctatgatttaggcaatagagtactgagaccactatttggtacatacatcaacaatgtagctatgtgtgcacatgctagtgtactatgaagtattatattataagtacagattgctacactggttacaacctatgtcatagccaatggcacgaaagtagaaatgatataacatatatacccttcaacaggtacgacaaccactaaagaagggcatcccaatattgtgccacaaccaaaggcatggctctacatatggcttcatgactaggataagattcgaattgttggatcttagatggcctagaccatcatccgactaacatgaaaccctcccattgctctataaaagggggagcagggtagcgattaggggatttctcttcacagtacgcgtagagaaaaataggatacatgatatctatggacgaacataaa

SEQ ID NO: 66021 - DNA, 489 bp, Zea Mays
caaatcttcaagctgttgtaagcaagacagtctgcaagttgatccttaggcattgcagataaatcaagttcaagcttcgaataacccatattatccattattccccgggaaacatctatctctctgttgtccggcaggcagtaaaggtaatcatcttcatcatttcctccatataccagggatcctcggggatatttcatgtcctttgcataatgccgcacttcggcaatttgctgttctgataattgtttccctgaagcatggcgaacaatgtatccaaagtcaccacgagaagccacttcgggtatcatcagtgttagcttctctggcaaactttcctttacttgctccactggcctacttttcaaaggtccggcctcagtgcaggcaggaaaagcgcttacgacagcagcttctcccaattcttcaattttgtcctcagaaactttagtagaaggagtagataccttcaaaggttttagaacagcg

SEQ ID NO: 66022 - DNA, 696 bp, Zea Mays
ataaatatttacgaacattaaataaatagaatagttgcaatttaataaaattaaaagttcaacctttctaacatccccatctagtaccccttcagaatcaacatttccaacaagcgtcatttgcaactcagattgatgttccgcatcaatatttctgcttccatcctactcatcagtgcattatagtcaatattacaaataatgattaaatcatcaaatgtgtttgtattatgcataaattgccattatttcttgtgtcatatattacatgttgcagtgtacgtactggcacatgctcctcattatcacattgtgacacatgttccccttcattgtttccaacaacctcctcttcgccctagaacgtttaattattacaattggcaacaattaagttgtgaataaaacatagaataattgtataaataaacaacacccaaatggtttccctccccagtacttgcaccaccagcatcaccacatcttatatcttgctccaaacgcacaagcatctccaatagttcatccattgcatccaaggccttatcactccctgcctttgacatactagcaaggtttactacctttattgctttttaagcaacattttctgcctatatgattttgtctctccatcctttcattcaatttcctgtcatctcttcaaaatatcatatcttgcctagctgagtacgt

SEQ ID NO: 66023 - DNA, 624 bp, Zea Mays
gtaaatttagcaaacaatgcagtttctgaaatctttacagaatttggacagattcagttactgaatttgtagaaagcataactcctaaacgatcagacttatggctgtcagattttaacacaagtaagataataaagttatctacaacttttctatggcacatatctacagaaaacacaatttagttcgtcaaacatacagcacaactacaacagtgcgtgcagtccaaaacagcaatcaataaatttcagctcatatataattcaagaatcgccacattcgagagacttgaattactctaacgctttactatttattcgagttaagaccatcaatttagaaccaacaattcgacttacgaattttattcaagtcattagtgcactaaaattactacaaccaattaacaacgcattctccacgataatcacccaacaatttgcgttttaaattagacatcacatgagcactactaattttcatccgcgaccataaccatacacatttagactacaacaagcaaatcaccgtgaccacgagcttacccaaacccatctattaatttggctaactagcgcaacaacataggccgctatacatcctacacgtcggcttgcctcttgt

SEQ ID NO: 66024 - DNA, 642 bp, Zea Mays
cttgacatccttccctcgatgtgctaaatgttcgttgaaacgagtagcaccgccaccactctttcctgcataacaatacctgcacctgaaaggctgaaaccttgaccaatcttctctccatgctcccacactaggtctgacattttacatacaacaatgcaaatgttaaactatcaactttcttgtggatgcctcactaacataacaaatcttcactaaatcttgctgtcataatgcatttcgtataatgacacgccatataataaggaaaatatgaaataagtccacttgttgtctgttatgctacccaaaataccacctaaaaacctaatctctcacatatctacaacccaaaaatccgccgctaaggaataccacgaaaaaagcatatagcaaactagcactaacatatatactgctcatttaattaacgtgaaataattcttttaactaacaaattcgactgacaactaccaactaacaactatctcactaacatgtatgataggtttttccaaaaaatggcgaaaacaaccgtgaaacaacacaaaccaaggctttcatgtcgggttcaccgagaaacgagcgaatatcgccgggaaatgaggagatcccgtcggaaacgaactgctctcaccgaac

SEQ ID NO: 66025 - DNA, 848 bp, Zea Mays
gcggggcgaactctggcgagctgcagggtgatgaagcgaggaggcaaacgggatgacgggcaatggtgacacgcagtagtagatgttggggcgacggtgctgagcgcgggcatgcgaccgagggagaagagcatgagaagaggtgtggtgttgtgggaagcaagcgtgcaggcagcagtcaagcggagaagcgatggagcggttgtgtagaggatttttgatgtggaagcaacgtgaacggcactagacaagggcaaacagaggagatcattgtaagaaactcaccgacgtggtagaatgatgatagcgagttgtagagtatcacgaaacacagaggcgagaacgggacgctcgaactgagctctccgacaagcgacggaaagcggcacaacagctgcagtacacggcgtggaaagaggcttggcattttatagggccagagacgaaggcgaggagcgccggttgctggcactgatggccgaggaggtaacggcggcgttaatggcattgagcagaaaaaagtaacgcccgctgcggcttcatggggaagaagagaaatgaatcgacagtagttgagagaggaacggacgtctgctagcgcacggtcgggcttcagtgcggcgtaatgggtgaagggtggcggcggcgtcttctgattgggcggtggcgtgcgagctagcgtccagacagcgcgcacaggagtgtttcgctggggaagatgaaaagacagagaggctgagagtatggcaaggagggcccacacataagtgaaaataaagaataaagagagatgagatgaatacaaaaaaggctaggtttgaacggtcggttcggccagcgaacacgtg

SEQ ID NO: 66026 - DNA, 1545 bp, Zea Mays
gaatgaggtaacaaaataattctttacatttaagaaagttaatctttactgcgttaatgtgattttcataaatacatcttacgagaaagatccttatgagatgtacaataactatgtcgttcctaaagttgacgctcctaaagttataataacgtctgaggaagaagcttgtgagatatacaataacaatgccgataaggttggattcagtgttaggagtgatacaaaacgttgagcatataagaccatatatttaaaactcctagtttgtagcaaatgaggatttggtactaagggacaacatttggtttggtgtcaacagagaagggtttcgatagtccaaaagattgtacccacgcacaaccattttctagctagtccaaataaaacgtgagaagtaagatctcaatgacatgttatagaagaggacaggctactaattctcaaataagagaagttaggatgaaaccattacaagtgtatggattcataaagtaattttatggtggcacgaaaaatattccattctctatgcagattgcaataatgagattggtcgagaaagaaagaaatatttagaatccaatgatgtgcagacactattggaatacttgaagaacaagcagattgaggatcctacatttttttatatcaatcaaatagacaagccaactggtcatacaactaatttcttttggggtgatggtcagtctatcatggattacaaatgttttggtcatgctatctcgtttgcatcttccttggacctgtcctctagtttatgatggtctacagggatccctgttttgatccttgttgcatggcattttttccaacctatgatggtatctccatcagccctcctgtgttaattttttcgggcatgcctcatgtggggagtctacactctaaagtccctcccagtgaggggtttgcgcaaggcgtgactctatcctctcgtcggtagactgctttcctctggtctaccttcgagctttcccatacgcactaaccctgcccctttgtctctaccaccaccgtggtgcattggagaggaggatagcccacgaggaaccaatagtggcacgcagcatcataagcatcagctatagatatcaaaacataaggtatgataaggcttaaacgtgttgggctaggtatagtggtttgccatacactagactattgaggagcgtggtcaactcctaatgctctcatacctcattcaaacatagagtttagatcttacaaaaactttcaaacatacatagaattattcatactatttagaacattcaaacttgtaaacattgccttgtctagatcattaaaatcaccaagatggagcaccaacatcataggatcatagtcacaacatcaccatcacatattcaaatgcacaaacacataccaaataatgtgtaggcatttgtaaccccattaaaatgttccaagataaaaactcactccttgtgtaagaaggaaaatagtaaaatctagctcataaaggtatattgttaataagtcataacatcacacaactta

SEQ ID NO: 66027 - DNA, 521 bp, Zea Mays
cgaattcttttactatttgctcaagtcactgacactttgcacagaggaccttgaggttctatttcttcgcaggggaggtccacgacggcgttgcgcgcaaccgaactccggtgagcacctgtaccggccgattggggcaacgactagggtctccgagcgactaacacctaattgaatccatcccaagcctttcccccaacataatttcggtaatgatcaagtgttttgctctggccacagtgaccgtgagcataacggctataccgtcgtgttcccggcgaccagaggacttctagtgcaattgcgtgggtcggtgaacatcacagagttatgagaaggctcaaacgagggagagaggaggatgaactgaccggaaagggggctggtcgcggtgaggtcggtttcgggtggcggaaacccgaattgggggaaaaccggaattagggctcgctggtgatcggctgggggcaatactggttggggtggtgcgtgataatgtggtggagctagccgcgggctca

SEQ ID NO: 66028 - DNA, 464 bp, Zea Mays
ctatccatttagtgaatttgtcgattgctaccaacacgtgagtgtatcctccttgagctttcttgaaaggtccaatcatatctagcccccagcatgcaaagggccaagtcaccggtatggtctgcagttgctgtgctggtagatgttgttgtttcgacaagtactggcaagcttcgcacctctgaactaactcggcggcatcactttttgccgttggccaatagaatcccaacctgaagaccttcccgactagtgtcctggacgctgcatgtattccacattgtccagcatgaacctcctccagaagttgcttcccggtagacgatagaatgcatttcatgaagatgcctgatgcgccccttctgtatagtgtatccccaatgagtgtgtagtgagccaactgtctggcgatacgctcggctacatttttatcgtttggctcctcttcattctttatatatctg

SEQ ID NO: 66029 - DNA, 426 bp, Zea Mays
ggatggctttgggcactggcctcatcaaaacatcgtctcgtcccaacgcaacgaagaatctagctaggtacgacacaaactgccactgctctatcggtctcggcttcaattcttcagcggcggaagccaagctactctagctagctagctaggcgcttaggctgtctccaacaagaactagccaaaacgggcagacattcaggccgttggcttgccacagtaatttagctggctatccatacgtccgtcgtatccaatggagcagctaaaatagctggttcccagggcgagtggccagaagcctcagaagtgggtccggattgtcagagacgaaggggagaaaatggctgccggctctgaaccagacaatctagcttttctctctcatcctctctaaaatagctgctccttttggctgtgttgttg

SEQ ID NO: 66030 - DNA, 976 bp, Zea Mays
gtaaaatacagatgctttcgtctagtatcatattagaattgaataaagatataaatacttactccctgtgtctaaataaatttactctgaaaatatatatatcttataactaatttaacaatacttattttatttataaacatttatatttttatgtaaattctgactatttgtttcctagaaaaatacaactttttcaacggtggagaggactactgtcctactggggttacgagttcagataatttgaactctttgaacatctggtcgtggtgggctcgtggcctggccggggcttggcggcaaaacgtaggatctgacgatgggacttcacacatagctagagaagcgaggacgttattcctataggctgtctgtctagtgcctactgcgtgtggcgtgtttactccccaccattggccattgctgccctcttcctgtctcagttgattgatgtgtcccgtgaccttgcttctcgttcctcgatctcctttcacctttcttcacatcttttggtctggattggtggaaatacgaccggtattgagtattgactgcctttgacttaaatgtatggataggagatctaggttttggtacctcccgcgccgtcacacaaacaaacaaataaacagagcagcacaacacaagaacaacctatagctgtagcaaaccgcggcgaacttgcgccccgtacaccctccccctatcccgctcctcccgttttcccagtagcagaggcaagcagtcaggcagagcaccgcagcccaccagaagggacgacgcgtgggagtggaagggtttgtaattggagtaaagtacactagctgtttactaacacgctgtgttacttaccactcaattcagaaaaccggacaaacaagtcttcaaactttgttagcacatgcaaaattatctaacgccgggtttgtaaaatcgattgccaacgtggcatatcacttaaagtccccaactt

SEQ ID NO: 66031 - DNA, 492 bp, Zea Mays
tgctactagagattcttgtggtataattagtaatttagatcacatttagttaaactaagtggtaagtctatctcggggttttcctgaattccttttaaggccttagtgagaattccataagatttctagttgaactttattagagcgaggtttattattttcctttcttcttcttatttcttttatgcttttaagatagatttgaactacaagttatagcaataaattttcaaaacttctggaaaaattacattggcttcttactggtgtataattctctgtctcaaaatttggggtttaacaagtaagtagttctttttggataaaattattaaatgttagggcagaagaggtggtttgaactacaactatcatttaacagaaggttattccttaagacatatttttgctggcatctagattctataacatgtctttgtacaaatttctagccattaatacttaccaattattttattatgatttttccaa

SEQ ID NO: 66032 - DNA, 284 bp, Zea Mays
acatatttgtagtcccacggactctctaaccctagtgtaatagacgggtcctatcttttctactcttcatctaactaatcaccgcacaaattatggatgcttatcccaggtcgctcccacatggaggtacgttcttttgtccccttgggccgctctttgcggcccaccctgtgttgtggccgggctaaaatccggtaataacacatgcccctggttttggcaacggtaatttcgaaaccatcattttctttatattttccgccacttcatttctccttcccctg

SEQ ID NO: 66033 - DNA, 807 bp, Zea Mays
catgggccgagcagcagctaccacactgctgcatgctgtaggttcgtcgcacacatcgctctctcttcccactgacggcatcccaggctgtgatgatttccctgcacagttcgttcacaccggagcaaagctagctaggccgcgcattgggtgaaaggagtgagacaaacaaggcgaagccgaccggatcgagcaccgcaccctttttctagcttttgcacacaccacctgctggctgctgccgcatcaccccccgcgcgcggtctcagtcgccactcgctcgccagcgtgatttgcgacccccgccgaccacatcctggtgagcttgtctcgtcgccgtcgtcgccgccgtccctgtcgtcggtagccgtatgcgtgcatgcatggtttcaggtcgccgttctgaaaagtttctcgatcgactccgcccccatactaaggcgatgccgatgctggctgctgggtgcactgcacacgcacttatatagcattattagcacgcaataatcagaactagagcgagcgagctcgatttctcgcccgtccttggagaccgcgaagaattaaattaacgagcatcttgttgacccttcaataatgtggtttcgataattccattccacacatgcatgatcaggagcgaggaccatctcattctcatctgctggtgtggtatccagtctgccggtagacggacggacggacggacgtacgtacgtcagtacgtgtccctcagatcggaatcattatacataatagagctggtcaaacatatacataattggatatgtcatatgtgtatgcatg

SEQ ID NO: 66034 - DNA, 363 bp, Zea Mays
tacaccagactgtccggtggacaccagacagtgaacagtgtgcgggtagagaatcgcgtgattggctggtttcctgttttgggaggcatcatactatccggtgggtggcaccggaccgtccggtgcaccacttgatcattggccctcggtcgaccagactgtcctgcgcttcacttgaacggtccggtgaattatagctgacgtaggcaagaattctcgagaggatgtagttggtcggaccgtgcaccgaactgtccggtgcacaccggattgttcggtgggtggcaccagactgtccagtgctacgcagtccagcacaatttttcctttgtctttcttgttctctattgctccttttggctt

SEQ ID NO: 66035 - DNA, 511 bp, Zea Mays
cgcagggtcaggaggccctacttcttttgatgagccagctccttagccttcacttcatgagacctcatctcgtgctgccgttgcctcgcgtctgatggaccgtagcggtcgaggtagaggacagggccaaggtaggggtcagggtcgaggcctatttgtgtgcctggcgaaggggattgtcggggtcttcgctatgtgccacagtcgtgctgtcgaggaggttgtgcgcaggcgcgagacacaggtgctacacgatgacatgcgaagcttcgcggcttccatgggccatcccatgccatagtgccctcctccgcctccaatccctgcctaccccgagactcttaatgaatgtcacgaacaggagtatggtgtgtcatttattactcctcaggatgaagctcagaagtttgatgaggccttccagtctgctcctgctgccgcccctggacctattcctagtgaccctaggccttcaggctctagtcaccctccttctccacctccgttccag

SEQ ID NO: 66036 - DNA, 1139 bp, Zea Mays
cagggtgcctaaataaaagcccaagagactctcccaaaaaaatgcccaccgaccaagtccctgtcgagcaaccttgtgaggtggagtgggcgaccaagtctctgtcgagcaaccttacaaagtggagcgagtgacccagtccctgtctatcaaccttgcgaggcggagcggatgaccaagtccctgacaagcaaccttgcaaagaggggcaagaaattgggccccgtgccaatctgactggtgtaagaaatgggccaacccaataatgcgggcccacgtcagcgagaccatatgggtcatcactaaactacgtccaggccttgggtacgacgttgaaaggtccttgatgggcatcagacgacacattgccatgtactatcctaggaaaacccccactggcgtgtggggccattcaaccccggtcgtagggatctcatcatcagagtctctacagtgacttgcatattgaaaaggacgcaacagataccccataccggtgtatgcctacgcatgccagtaggtgacgcaggtctgtgatgacgggtgaggtcgcgctatgcatggccgcaccatggggctgacccacttgacccaccatgcactactacaaagatgttagcggaggactcgctataggaaccattatgacgaacgagcaagatgatatgctacaaggagtgtggttgcgcacgaccctacggactgtatcaggagcactacgtcaaaccaagggggcagatggcccacatacctgtagagaatatatctcttctgtaaggtcctacccttgagatataaaagggcaggggcccctccttcttcagacatgagtacacaagatgtaacatgttctattgtaataccatgatcaacactacactggactagggctctggcatgaaccaatataaaccccatttgtcccaagttcttcgagtcacaacaattcaccattcagagagagtccgcgctagcatccccatcgaacacaaatcttattgtcgcccggtttcctaaaccacgatagttggcgcgccaggtaagggagcgctagcgtactaagtgacaccttccacttcgatggcccagtcatcagcatttgctggaggcaaggcctttgctctagggagccgcatcac

SEQ ID NO: 66037 - DNA, 503 bp, Zea Mays
cgccgccgatggcccgacgtctgatgccttcctgatgatgcgcgacttcagcggagcgggtagggtagggtgtgggagagggagcagcagcgcctccttgtgcatctgtggagattgtggggacgatgttggtcaaatatggtagattgagtcatgtctctcgcgatcatctcgcccgggcagctgggcatgtggcagagagattcgagaggtcgctcagcgttgctgcctactcacacgtcttgcgcggctgaccgacgaaaacgatagatttccgtgtagctatgcatgccatccttaaccacgggctgattcaggcatcgacgacaaaaatggaaccagatacatcatctctcctatatcttcaaatttctttggggttttaaaatgtgtattggactgtttgcgatgccaattgtacagatcaagacgcgtattggactaagtttgccgatgtcatttgtatagattcatgaggcgtgttgacgccgctggctgggctg

SEQ ID NO: 66038 - DNA, 338 bp, Zea Mays
ccacctggacagagtcacggggcaagctggagccaaagtgggaaggtccattcatcgtcaagtcgaaggcgtcccccagcgcatacatgctaacaacgccatccggcgaagacctagaccattcctggaatattgacaatctacgcaaattttttgtccaagtcctcagggcctacgcgcccttgtaattcaccaaacaacattattcaggcccgcactcttttcctcccggggggtgaggtttttaacgaggcggagccatgtaatatatccgcaaaaatcccccgcaaaaactaagatgcaacctgtcgaaaaagaccgcatcaacggtcttcggc

SEQ ID NO: 66039 - DNA, 461 bp, Zea Mays
agggaggaagaagaaagagaaactcactcgaatgaccaaaaagccaaataaaagccaaatagttcattcagagcaagcaaagcttggtcccaaaagaaatgggcaacgactcaacacgaccaagtaagaaaggctagtcctcaagaagaggcaaaagcagggctcaacaccactagccagcagacaaagccaaaatggagcacaaaatcagcacaaaagctaaaatcaaagctagttcctctagaaagaggcaagtggctcaacacaactagaaaaagctccaaacaactcaaatttcttccccttgagaatctttcccctttgatgggaacagcagaagcccgaaaggcacaaaatctctccggccaataatctcaaagtttatcccccttgttgacaaatgtactcatcaagcataaacaagggtagaaatagaaactcccccttgacaagagaactcc

SEQ ID NO: 66040 - DNA, 955 bp, Zea Mays
atatcatactaaattaaagaaattaaataatatgagctttgttgggccgttccgcctaagcccagcctaagcctggctcaaaaaaactcgactcaacaaaaaaaacctgacttaacacgttcaacggaaaggcattggttaatctcgagacaccggcggtgatttattttaagaatttgatcgcatccttgttggcgataggtaatacagagatttattgtaagaaattgagagcatctgtctcctgtcgtgcactgcttatcctcatatttttctagtcatgtgttacgctaaaagaacggtgcccacccaaatgttgcaaactgacgagccgagtctggaattggattctttctttttcttgctttacacgatgctttgtcttgagaaagaaaaaacaaacgattcctattgatacaaatactgtttttgaacgattcattattcatcgtggtatgttactttcagctgcagctattctattacatcagaattcaggattatcaatggaaatgtaggaaggacaaacaagacgatcagaggtggttgaatgaaaccttataattttttttctctagacaatgttagatttttatttatagtgttacactcaaattctcaatatactaccaaaatcataatctggagtcaaatgattatataccctcccgcgagtctaaagaacacaacggaatactcatcagaacgaaaaaacaagcgtttgagcgagacacaacaattctgaaatgatgctctcaacttcatccgagttgaaataagagcccagacacaaatcatctaaatcaactagtggtttgatgatttagaaaactttgtaggcactagagaagacccataaaaaagacgaataagagatcacaaaaatcatccgaattgtgttgctatagaggcaaaagttggcctaggtgcaccagacactagagattgacctgtc

SEQ ID NO: 66041 - DNA, 598 bp, Zea Mays
acacgcaagtctacgggaccaattggggtgcctcggcatcaattggctcccagacatgaaagcagcagcagtggaagtaatgaccccatcagagatcttgaagcccgtgtgagtcgacttcaagcagcgctgcaacacaggaccgatgcttgggtcgccgacggagatagaatcaatgaactgcgaagggacatccgacacttgcaggatcaactcgctgatcgagacttagcacttgactgggccatacagtctcgtttgctaatgtgtgctaaggaagcaagggctcaggcccgaattaaagaacttagctcgactgtcgatgacctgcaggtttactgcaatacgttgcacgaggaagtccatatactatactcacaattacacccaagtgagcctgcacaacctactgaggcggaagccggaccatctcacgttgcgggacgtgcgctgggtggggagctagacctttttgagccccctcctttgaggttggttgacgtctggactcccacacctgacgatgaagccgccaagactaatggaaagcaggaataatggtgtaatagaagtagagtagtgtattgtagggtgtact

SEQ ID NO: 66042 - DNA, 378 bp, Zea Mays
aaaagatcagtagatgcaccgcacctcgccgccagtgccggcgctgcgattcgtgcggattatgaccgacagtggaaaagatcttaccacggataaggtcgtgtgctggccgccgtacccacttgctctgcagccgggcgaaatgatcctcgccggagttggccgcttgccgctcgtgcaccacaaaatcagtggtgttaccacgtcacagtagaccaatgtaggtagcctatccatcgcctatgacagtgccccggtgaatgccacgatagataattccggtgactcctcccctctctcactgcccgcccttcctcgcctaaattcatcgtattcgtgaccgctctctataaattgagtgctcagtgtgctccgttg

SEQ ID NO: 66043 - DNA, 297 bp, Zea Mays
ccataaactcaatcaactatattgacggatctaactcccatgggggtgaagtcttcacggtagacctcatgaccttcggtgaaccctgcattcataggaatgaagcctaacaatcgatcagacagtgttgatcggaccagtgatcaaggtcttgctgaaccttatctccaacaatgtccctctaggacgaggctcaacttgatgtctgatcatagaattgtggcattttgatctagagtagggatcgatatattatgtttcaccaaaacaagagtcatcatgcatgaatcttacgga

SEQ ID NO: 66044 - DNA, 344 bp, Zea Mays
ctggagggtgagatagttgtgttcgaggcattttttactgtcggccttcggttacctgcgcattgtttttgtggcggaggtgttgcagaggtatgaagtgcagatccatcagctgacacctaacgccgttgtggccctggcgaagtatgtctgggcagtgacttcgtatggtggtcagcactccatagaggtcttcgccaagaattattgtttgcattggcagaagagaaaagttggaaacaagattgcacagtttgggtcatgcacctttacaccgaggactgggaagacttcggcggaagttgtggagctagttccctgcgcccgcaacaagtggggcaact

SEQ ID NO: 66045 - DNA, 282 bp, Zea Mays
gacagtaggtccaactttcactcataacctacaagcccttaggcctacgacacactcatgacctactaagcctaggcttgaacacgctagcttcctacaggtcccgcaatacgacgagttgtgccaagatctaggctacgacagccaggggtcaacgtggcatagggacgggaatgatggtgccatggctttttgccgcccacgccgcccgccataaagagcatgaccagggaagcctagccgaccagggcacatcgcacatacgaacgaacgcaactttac

SEQ ID NO: 66046 - DNA, 318 bp, Zea Mays
ggcgatttttctcatgctgctcggcctcaagtagtgagaccacatggtgctcatgcccgacggggtgctggtcttgtgccatatggccaaggaccccatgctaatggttttggttcccacttctctagcagattacagtttcctactcgtggtgatctttaccccctttgggataggggatgtttaatgttttctctaacacttttcaggggcaaatgtcgcaacactagtttccttctaaatatcctaacatcagtgttgtgccatttgctcaccccatgtctttctactgatgaaggatggaggcctagagaacac

SEQ ID NO: 66047 - DNA, 378 bp, Zea Mays
ttgcaatggtgttgtacgggggtatttataggtaaccagtggacggctccaccctgtcaaagatggttgtgcccctggttacctacgttatccctggaatattcccctctcatgggttattgcgggtcattacaacgtgattaaggccatcatggacaaacacactatcaactctgcccacacagtggcttacaagtgggaccctgcagcacgggtcggttacacacgtcaccccattacaatggcgagcgggtaatgacacatagtcttcgcgttccatgcactcagccttcgtagtcgcggtggtctttgccatcccttgctgagatggagagcgcctaagccttcgcccgttctatgcgctcacttcgtcatggg

SEQ ID NO: 66048 - DNA, 704 bp, Zea Mays
gagatgctacgaaatatccttggaatgcgccaagaatctaaagaacaaatttgcaaaggtgcgagcgtactcttccgagcagaagttcatccgcggtgaccccgatggggttatctagtggatcagcggggaggcggaagcttttgacgagatactcagtgatcaaggggatttctgtgcttttgctggtgcccgcggtgctgtatcaattttggaaaaggtcggctgtgaccatgcaaaggctgttgttcagccagaatttgttatctcagccgacgacattaagaatccttcagccgaagtgtcttcgttaagcgttaaattttattccaagtatggataaagggcggacatgagatagctgacgaagctattaggaaaaatgaaaaagaatctcacgacgctcaagaagaggccaaaagagctgaagaagctgcagagcatgccagacttataggtaccttaattaaggtttagcttcgggattcgtttttagcttcggaattaacaaacatttttttatgatgtagctgaacttttacctccaccggagccatatgaccgcgaagccgacccagccatgaaggaagcgttggatataataaaaatcgctaacgaagctgctgacgaggttgtcaacagactactgaacgaagccgctgagaaagtgctaaaagaagattaaaactttgtatatttaggag

SEQ ID NO: 66049 - DNA, 694 bp, Zea Mays
tgaaaacgtttttttttaaaaaaaaatccaaagagtaaatgcaatgcaccgcagatttccattctgtttgacccttgtccacttgcttgatcaaaggccaaccgaccaacgagaacagctgtgtcacgtgtgatactggtctttgcagtacttttttaatgaataaagtcaaggtacacatatatagcttgagatatttagttgagaaacagagttctgtctcttttagccggaactcctctcccatgatgattaaagctccagcgaagataaatcgatcaccatgaactctcaagagcacgatgaataatctaaccacgacaacttctcacaagactctgctaaggaagagcaacacactagtggacctcttcgttgtatcaatatcaccacccatgttaccgctaaggaagagcaacacactagtggacctcttcgttgtatcaatatcaccacccatgttaccatcgatgtacctgagcaactttagctcctttctcgtcatgcttgtaatatatgccatggtcaatcatgcatgtatgtagtgtaggatccaattcatcgtgttaaggtgcgtggtggtggggttctccatgaattagctgacatagcagacaacaaaggcgatgtccgattaggtatgtgccaattaatgaacacaactgataaggcctctgtacttagtggcatccac

SEQ ID NO: 66050 - DNA, 635 bp, Zea Mays
aattgagatttcactctaagtctgaatttcagattggtgggctcaactttggggctttgtaactttcaaagtatagggtctttatcctatgtcaccacatcaaagttgtagaccaatcataggagaacaactttgcttaggagtgtgagcttagttgttgagaaaaatctagagataattaagcccaaagttggactgtcagactacttaaagcctgaaatcagagtgacagtggactgacatcaacttcaagcccaatttcaagcatgatccactggctttttgtggtaacaccatatagcaatgttgtaggtggtttattgctctacaattttgctacaatgtgttgatcatgttgccatatgaatttgggaggaaatcaagctcaaaaacggtctgtcagactgactaaaccccattcacgatggttcagtaccctgaatcagatcagaccgccagcgcagccgcttcatcgccgacaaccgctcctcgccgtgattcgcgccaccaccgtgggattcgcgtcgccgatgacccgataaggccgccaggtaaaagccatgccctggggataactccggtgactcaccgccgtatttccccctgctttgcggctggagcagataggctcgccg

SEQ ID NO: 66051 - DNA, 282 bp, Zea Mays
gttgaaggagcttctttttctgtctcagccatcttcgactctggagtcgcagtttttcttttctttgaagccgccaccttcggctcaggactgggttttttcttcttcagaattttttcgtcctctttcaccatcctagcagcctgtctgcttagaacactgacaaccctttttctctttgtccctttggcatccttgcttaatcgttcataatcagggtagtcaaagttcaaagcgtacattacccgattcaaccttcgtttttgtcaggtgccgaaggct

SEQ ID NO: 66052 - DNA, 831 bp, Zea Mays
ccgtatctgcgtcgccgttaggctcctagtgcaccgccacgcggtgacttctcaccgctgtcgctaactcgtcccttcgccgccgtttcagtgtcggtcggttgtcggggtgattcgcctgggcccatggaacgtgtcagtggcggattggcgcaaggacagcctcgggcgtcgactgaattcctcaccggaattagttctccgccacatatcgctgtcgcccgtggtcgacccccctccatcgcctcccagctgcggtatgtagtcccatcacgtttaaatcacttcccttatcgcgaatcatggccagaacgggtgcggggcgcgttggtgcgcgaaatcgatgaactccggcgtgggctccgccgtgcgtgaagggcggcgccgccgtgcgtgggtcttggttggtagatgagagcggagccatcggatcttgtggcagtggtcgtgattagttcacgcgtaacggttcggcaaggtcgatccttggcgttgatcggaatatggtcgggcgaggttagatttggggggttttaaatctggtgtgtttatctgcgattgcacggctgaggcgcggtaccgatctgtgcgcacagctaatttaatctgggcgaccgaattctaatcggatggccagcgactgcccgaaccccttcacggcgcacttttgcgtaaagagcccctcaccttttagggattcaacccgccatcctctggagctgtgctctgtgtctggcgaatcttgccccgaaccccctgtctttcccagaaaatgaggcccagtccagagcattgtaaaatcagagaaattaatttttaaatgaatttcta

SEQ ID NO: 66053 - DNA, 541 bp, Zea Mays
atcgacctcatcatacatggactcatcatggtatatgactcgactcatgacgggggtggcaatggggctaatgatacagactctatcacgaacactgtcaatgtcagggctgcagggtacagactctcatggactcataactccatcaacttatgaaaccctaagcacggttactcctaaactctcatcatgaatgtgtcatggaaactgccacctgtgtaagcatctattctgcttgtctgaagaggatctggtagtcagatgtgtcatcgttggagaactatgtgacactggtaccagttgggaaggatactatcctgcccagctcggaccgtccctctgggtagaacctgtcggtgacctccatggcccaagccatctctagggtcaacttctccttcttcctcatgacacagcgactctctatcagccgcagtgtagtgcggggaatccagaatccctccttcttgatcttgagtcggtttcctgccggtaggcaacggctaagagctctcaactcttagactcgacgttggtcaga

SEQ ID NO: 66054 - DNA, 487 bp, Zea Mays
cttgtttcttagacctttttccccaatcctgaattttaaattcaaccccaacccccgccacacgtcggctgcgccttggaaccgccaggggggtagaggactgacgtctgacagattttgggactggtaagacgcgtgtgatctggtttgacagtctgctgatgaattgctcttgagcactaatctccacagaatcttgtgttgctggaaggtcatcctcagatggaccaaccaactcagcatcaacgtctaaggcaatagcctccgacggagccgcgtgtgttgctgccacatctgatagggaggaaggtagcgttccagacggaattgccaacacagcatcaacatctgagaggatccttagacggaaccgtgtcagcagctgccacgtctgagggggagggaggaagccagtgacaggattgggagctccaaccccttccaaagtcaggacgttcttgagcctttgacgagagtaaactttcag

SEQ ID NO: 66055 - DNA, 477 bp, Zea Mays
cttcatacattgtagacttgcagtcaaattgggaaattgtttagggtgtgcttgaggggattactctgagtctctgacaaatcttttatattttggatctgaattccaactacctaaacaggaccttattctcccaatcccataaccgtcgataactaatttcgacagatttatattagtatttgtagccaactgtatgatgacaaagatgcttttattgaatgtgtcccctataatatggatccatatcttttataaaaatggccgcattgaaaattttatattgatttgatggacttgtctattattagctttttggtgttttgtacaaagccttcacatgtctttccttcattttacccgaatcacactaggaaacattccaatactaaatccttaaatttacttgctcttgtattcacatttattatttatttgtttctgttgagtttcaactctagtttacccattggcgga

SEQ ID NO: 66056 - DNA, 346 bp, Zea Mays
taggatttttctacatttttctataattgttttagctctggaggaaaaagaaaaagaaagacttgcaacaattctgggccgattctagctcaaacggcccataacacagggaaatcgggcgcgcccacgcccgcggtggaaacttcgcaggaaagccctcggggttttatctaactggagatgggttcggttactattcttaagagtctctgacgatttgcagataggtcctcaatcttctaattctttacaccttgaagccctcgacggcggacggcgatgcgcagggctctgacgagcatgtgaaccggccatttcgctcagcgatcggtgtcctactttggcc

SEQ ID NO: 66057 - DNA, 544 bp, Zea Mays
ctcagtctaaagctggattggataggccactagattacatcttttatataaattctttcactcaggtcaatcttcacataaaaccactgcttcatccatgaacctagccatttttttcgaaaggttggcacaggatgccttgcattagacggtatacgaagttgtaaaacccaaagttattatgatactgctcctttccggtggcctttgtctggtaggacaactcgtgaatattacaaaaacaattagtattcggttccaatccttggctccttattgcccaaatgaaaattccaaccttaattaatggatcaggggtgagcaaatgaaggaaaatttcaaaattcttcaaaacttcaactagaaacttgtgtaaggagaaccgtagcccagctttcatgaagcttcgaaaaaccactacttcatctctttcaggaagtggaacgatattttcaccatcgattctcactatagacacatcatgaaagtattttcctttcatagcctcaacatgtcctttcctcacggttgatttccaaatacc

SEQ ID NO: 66058 - DNA, 529 bp, Zea Mays
taaaagcgacattattttaacaagttggattgatgtggagtagcatagtatatgagaaacattattcttattcaagagactatatggaattactaagataaagcaatagtctcaacataatcaagatataagaatagactccccctaaaggtatgcaccaagtatttgaaagaattgatttagtgcacttacttttaaagacataaaaggagacccattatacatcttgttcaaggctcataaaatttgcaataaataacttgcgccttgcattctcaaaatgaaagggataagaatgcttacaaccacaccattgattatttttaagacctcatcctccaagttggtgttgttgtccttgatgttcttcctttttcatttgagtgtcctccctttgtagttatctctttttccttccaaactcattgaaaatactcaagagagatgttaatggcgcaagggagtatatggcgaaggatgatttctttagataataaatatgaacaattcatcatccataagtcaaata

SEQ ID NO: 66059 - DNA, 661 bp, Zea Mays
gttgaactgggttggatgaagcggttcttggaatccgcagggctctatgttggttatgggttaccaagtaggcctccatcaacttctggacatgctcatccttggcttgcttcagggcttcaacaacaatgacttcacgactttccaaggcagctacacgggcttgagctatggtgagatccacatggagcttacggttgagcttctctgcatcttctgctcgggcaatcatctgacggtggtgccgagccaagaaatcatatcgtgcatctagggtgagtaggtatgcagtgaggtacacgactgaggggttgtcctcaagcagcagctgcccttccaatgcacgcatcctggccatccaaactggacggtttctctgaaagggcggaaagaatttgagcagtgtgtcggccacttcttcttcatagatctgacacagggtcctcaatgccttgcgggcgatgacttggcaggtgtctttgaatctgtgcccagcagcagggacactccattccacatggtgcggactggatccaatgtatacagtcacgacacacttctctgtgccatgctcgatgaattcacgaccatcatactctggttggctcctgattccgagacggactatgcatgctctcagcaacttggggaaaccatcttc

SEQ ID NO: 66060 - DNA, 369 bp, Zea Mays
gtgttttcagctatgagaaccaaagatactagagaatgttacaattgtggtgatgttggacatattgcacgtaattgttctaagccttccaaagttaatcatgggagaggaagaggggcttctagaggcgacagaggtcgtggaggcaggagttgggcaagggcgaatgcaacaactacccaagaacttgaaacatttatggaacacgaagatgaaacaaagttgaggaagaaaaaccaaatctctggagataaagatcaggagtctcacaccggggattttgtccacttcgcctacactaatgaaggtaattatgctcatgcttttgtacccacacaggtcacacagttaaaatggattttggactca

SEQ ID NO: 66061 - DNA, 636 bp, Zea Mays
gtgatgttgggggaaaatgggtgtgctagtcaccaaacatgcctagatgacttaggagatcaatggttacaatgttcatatggaatgtttgtcttgattgtgtttcaaagttatggttgatcaaagaaaaggttgatcacaaatattttatatgatggtaagcaaagcaaaagtggaagggaattttataaggaacaaacttttttgatgagttgatccatgaagataggtgtaacataatcaaacatagctcacaagtcaggaattagtacaaaaccagtaaaagtctaagtcaaattctataaccgacgctaaagatatcccgtgttttccaaaatttttttatataacttgagcagatccaaaactaaaagttgctaagaaaagaagtattgtgtttaagtttgagatcaaagtaagaccatttgacaaggttttgacatcaattaatgactgcaatcaccaatcaggacacagacaacagcaagttaataaccaattatttcttaaaccatttgataaatgggcgagcatattatatgaaagttgtagggtatagtgtcagctctaactttgtttatttgtttattggagctcaagctgaaaaccgcatttacccctctgtttcaccgttcg

SEQ ID NO: 66062 - DNA, 396 bp, Zea Mays
tttctgtcattgtcttaccatgaagacttctgacattacgttatgccaagaaatggaaaagctaaacctaggaatgattcaacatggaacttcaaatcacttgaagcttgagttagtcatcctgcaaagaataattgacgcacaaagaaatgatgagggaatgaaacacattcatgagaaaatagaggccggtaaagccaactgcttcagaagagatgatcaaggtgttgtatgggttaaaccgcatagttgtgcctaagaatgatgagatctgccagcaaattttggatgaagcacatcttagtcgctattctattcatcccggaagcactaagatgtatcatgatctaaaacagcattattggtggacaaagatgaagattgaaatcgcacgct

SEQ ID NO: 66063 - DNA, 528 bp, Zea Mays
gctgcactatgttgtggacatgtccctgcccaagcctattacccacttgcttcagcgctatgaggatctatttcagccaccaactacacttccgcccagccggtcctgtgatcattctattccactcattgacggtgctcgacctgtcagtattcgaccgtatcgtttctcgcctgctatgaaggatgagatcgagtctcaggtcacagagatgttacaaagtggattgatccagcatagcaccggtgtgttttcatctcctgtgctgttggtgaagaagaaggacaatacctagcgcttttgtgtacaccttaatgccctcactgtgaaagccaagtacacagcgcctgtaattgatgagctacttgatgagttatttggcgcctcctagttttcaattttggatcttcgagcaggattccaccagattttgctgaaggacggtgaagctcacaaaactgcttttcagactcatttgggacactacgagttctgagttatggcatttgggctgacgggggctcctgg

SEQ ID NO: 66064 - DNA, 847 bp, Zea Mays
aagcttgcgcctgctgtgagctcgcgattgggatgagagagatgagtcgccgcgggtgattcacgtggtcaccagtgctgtgtccccgaaaaccggttggggagctccgcctggttcccgtgaaggagttcgtagcattgattggatgggagctccttctgtgcctctgtgattgctcgtcggtgaagcgcctccgccgcgggtccgccgttcgccgtgggcagaactgcctacaccgcctgcgatggtatgagtatttctgttagatttggcgtgttcccttgtgcgcgtagaacctggtaattgaggaatggcatagtcacgggcctgattgatctcgccgtcgacgtttgttcctcggcggcgcgtcgtgctgtgggaggagagtgaggcgatgggggagatggggtcggagccgtccgatctgctactaacggctctcatcagatctgtgggtaccggttgggtgttaatccctggtcgttggatcataatcgagcacagcgttcattaggtagatccaaaccattgatcctcaatcctgtggtgattattccgtaccggttcataaaaggtcgtgggtcaatccgatccgtagaactctaatcggatggctggcaatggccgataccccttcggccttggcgttttacttaagaagtcctcggattttaatggaatcaacccgccgtccagggaatagtgtcctgagtctagggtttatttgcgccgtggcccctgtcttctctggttatcttgtgcccagtccagaaaaatataaaattcagtaaaagtgattaggaaatgatttttaatgtgaaaataaatgctagaatttgtttaaccc

SEQ ID NO: 66065 - DNA, 484 bp, Zea Mays
gaggtgtgccgacccggatgcgtctgcctcgtcatggagaaaggagtgttactgcccaatccatggaacatagagcacctccttaattttatccgtaagggcaagacggggaatgggtttcttccttcgtaattaggtagcacctatgtgtggtccagcctagtgcggtccggcctcataaacccgatctctggcactcatcacacatctcatatgtatcaagttataaaggaaagatttacccccagtgctgcctttgcgataattttctttcccatttcgacttgcaagcattatttcttataacccccatgtgattccctattgtttttgctatgttgagatatggattgagttagcgggcttataacttagtttggtgcccctttacttctgaaaggggtccgggtcgctagggaccaggtccggaggaaatgcacttgttctctggggtggtccgaagccatgtagccgcttagcctgg

SEQ ID NO: 66066 - DNA, 1131 bp, Zea Mays
gactttcaggaatcatagcaacactcttaacatggactttgaatctaaccatatctttagaatctaaagataggatatccacttcttcaacagcccttatggtagaacctaattcacatatagcctgataattttgcagctcctctagcacattttcggccacaatccacactgcatgcaatttagatttaggtttggcttgagaactccaatgtgaaacagaaattttcgctcccgacattttcattttgagttcagggaaattaatcatttcatcaagcttctcttgagaaggaaactgcataaggaaaccgacatgacacttggtggctttccaagtcttgccccaaggaaagtggaacccgaagtctttctcaagatcttcaacagaaatcaaaccctccataacagtcaccaaaccgatgaaacttcttttaggttttctggacaagggtttcgcaaaatgggaagagtaaaaccctaatccatcagccgccatacccacaataggcatacaaaggtttgttctgtttaggcaacacacatcgggcagtcatgtgggtttctttgtgacaaatatcacaccacaaggaccaaaagcaatcacgagcatggtggccatcaaccccacatttttgacaaaaaggacgacgcacaacctcaacctcttttttcagagccacaggaggggttttgaggataccggtgtgacctccctcgccagcagacgaagcgccaatgtcatccttgacgtccgattttccaggaatcggcttcaatctccagctgggattccggatcttgttccacgtctgggaaccttgagggttttctttctgattccaccggtcccagttagggtttcgccccttcggatccatctttgacacctacgccgcacaagacagcgccgaccactcctcgtccacaagcgggggacgaatcagggattcaaaccacccaccgcggaagctagcacgaatcgacgatggcagtgaccaaagtcgcgaaagcgaggaagcaagatgcggaaaagagtgcgagccaacaaagtccgacggaaaccctaagacggaacaaggagattttacctcacctcgatgagaaggacgcgaggagttctgggccgcg

SEQ ID NO: 66067 - DNA, 729 bp, Zea Mays
atgaaactcgagggctcttttcaaaagaatccgctgcgaaggggtatcggtgtatcggtgccattggattaacggtctcaagcgaagattagatcgggccgtcattaaagaggtatggaatggcagtcatcggatcaagatcaacggctcccacacactcgcgaaccggtatatgatcttagccacaggatccagagcaacagtccagattaggtctgcttgaaggggtatattactttaaatcgctgcctctaccgcccatccaacggccatgatgcatgagatggaccagccacctgatcaagcttatagtactctgattaaatccttccaaagggatatcatggttctaatcatgggcgtccactcggatcggacggtcaatgcccaatcactcaccacgaatgatgctgaggcggcgccgccgccccctgcacctggtgacctcgtcggagtaacgtgagttggcgctcccaatgccccaacccccaatcccgatggctctatgtttataagagataaggcgaactccatggaagttatctggcccgagatgaggtaatggtcgagcaccatggcagaggtgatgtactagcggtcgattctgtccaccccgggcatcacatcgtcaaattgaggggggcatcggttcccccatatctcggcgatcctccctgaccacctacccgacccagattgatggcaaggctggtatacggcggttccggc

SEQ ID NO: 66068 - DNA, 1216 bp, Zea Mays
agtaaagtgggcatgtggtgttgggaataaagagaaagggagagctgaacttggggattcagtcgagtaaaacagtggcagccatttcagaaaaatttgatggaaatatcttcatccatcaattgatctagggaattctatggtgtgccataccaaaagagacttatgtgaagggggagtttatctgttacagtttcaccacaccgaggataagtttgagggggtgcaaatcctatctacttggtgactcagctgctaactcttgccttgctgtcatacatgcagtgaaggtgtgttggactttccccctgtgctttcaccttatgtggtaaccatgcagtggatgtgtgaagtatgtgggctctggtttagtgttgttaaatgtcccagtgaagcaccacaagttcatttatgtttgtcttgccatagtgtgttgaacccaacaaactgtgctccattattgtgtcatgtcgattccatagcttctccgtcgtggataacctatcccctacaccttggttaagctctcaacctctccccagttctctggcttcactacaaagtcttcaactcgagttgttctgaagagtggtgaccacgcccacaaaaagagaaaccttcccctcatcgtggctagtatttctcgaagggtttctcggacatgtggtgagtgttccgtgctcatcttgactctgtggagctcatcgagttctcgtttttaactctactgtagtcggccattctaacgcgatcgtgtcactgcagatcgacgccactgacagccttacggtcgactgaccaactggtgccttctccatccagatttccagaagcacggtggtcacggtatatccccgatgcattccacatccttagtggtagccttaccgcgctgtgttcggcgaatcacgcttgtcggatcgacgtgcccgccgctgttgacgatggtgtagttctacgaccccgggggtgtattatgtgtgcgactaggaccgctaaggtttagggttccctatggtgttgtccctatcgacgatgtcgcgccgtcgaggtcggtccgacataagctcaccggagttgggcgcggcggactcagggacccaacttgtaaaaggaaagaaggccgaggggttaaacacgagtgacagtgactcaatgaaatagtggaacgagctcggtgaaattagtctgggtggtaggggcttggcagcaaaag

SEQ ID NO: 66069 - DNA, 619 bp, Zea Mays
ttgagggcttgggtctaccatgacttagcataaggatagaattgaatccgagttgaagtcaaagttagggctagagtagaatccaagtctgagtcattgttaatgaatgagaacaatccaaagggattgtaatggtggttgaatcatactaatcttcatcacatggcaccaacgttactagagggtgtgagacaggcctgatgttatagattgtgaggttgccaataatgttggtgatgaattgtaaggaaccaaacatgaatttgtctcttggtgtaaacttcatagatgccaacaagtcttgattaatctccattttcccctacctagcacaggaacatcgaagattgtttgctagtgaatatatagtgtatgttgcaagatcgagagttgaaagttagggcatgagagacaaaaagatttatatgggtttgggcccttgatgtgagataataccctatgtcctgtgtgttggatatgttgttgtatcttctaatcatcaggggattcccttacccctccttttatatcctaaggagggatgacgattacatgaagtcggttaccaagttcataatgaaactgagttagttatggagttctacaagttcagctctat

SEQ ID NO: 66070 - DNA, 815 bp, Zea Mays
agaagatagaatcttacttttaatattactccgtatattattattttcccttataattgcttctttgttgcatggacatgtagacttgtagagcacctatcaacctccagatggcctagttatagttgggcctgtacgatctttgtggatgatatctatggtcagtttttcatatgcatatattctccaaagatcaagagtgtatgtttaaagctccaagaggtagcctcccctgcatggcgccttgccggggcttggccaaagcttcacgatgtgtcatttcatgttcaacgatacttctctgagtggtgagcacgtagacgtagaaagattctttggatcaacatcacaatgcagcagtacgaaacctggggaggtagagtcaggtcgttagaagtctttttttcttctctttatttgcttttccttgacagcagttgaggtatggagcacttcactcttcacctttgattgaaaactattctgtggacttgttccataagaccctacctggttcatgttcttatctacaatttcccaatacatgcatgacttctctgttcattttcagtttaaatgtctattttcatgttctaatgctaccgttgtggctttgtcttatattcacatgttgctgctttgcccctcgtccgctgaatacaaatgtatgcatgtagaggattatttggaccaaacaggaaccaaagaagcatctcctggcctgattcgacgcatcaatgtcttaatattatcagatggacttattccagattcctcgcagcatttgaaatgcctatgcaagaagaaattacact

SEQ ID NO: 66071 - DNA, 646 bp, Zea Mays
ctttacctcttcgcgaacagcctgtcgggtgtgctcccacggtccctgtacaacctgtcctcgctcaagaacttcggggtagaatacaacatgctgtctggaactctccctgccgacatcggcgacaggttccccagcatggaaactcttagcttctctggcaaccggttcagcggagctatcccgccttcggtctccaacctctccgctctcacgaagcttgacctctccggaaatggcttcatcgggcacgtgcctcctgccctggggaagctgcaaggcctcgctgtcctgaacttgggcaacaaccggctagaagccaacgatagccacgggtgggagttcatcacttccctggcaaactgtagccagcttcagaacctgatccttggcaacaactccttcggtggtaagctgccagcttcaatcgccaacctatcgacggctctcgaaactctctatctgggagacaacaggatctctgggcctattccatcggacatcggcaatctggttggtctgaaactacttgagatggcaaacatctccatctccggagagatcccggagagcattgggaggctgaaaaacctggttgaactgggcctttacaacaccagcttgtcaggcctcatacctccctcgc

SEQ ID NO: 66072 - DNA, 509 bp, Zea Mays
gggagggtttcaccatatacgctagcgcgggggcgtcgggccacgctgtggtgatccccatggcggagatttatcgacgcaagcctacccggcacccagaggcgttggttcgagcactaccgattgctaaatgtaactatgaacatgacgaatccctcggacgaaggtcttatcggcgatggcattgtggtgaggttggtccacgaggcgcagcgggtacaacagagatccaacgttggcgagcaattacaggtgcactggtcgtcaatctgtcttgatggagccacgtacatgctcggagtacacccatgatccaccctgatcggtggtctaaggcacatcatcgaccttgcgattctaggtgcggcggcatgcttctccttctctcctcgcgacaatcacacgaccctcatgtgtgctcccggtaatggagggttggcccagctggatggacgaggcggtgctcaggggactaacggcttttatagccacgaaggggctaagtctcc

SEQ ID NO: 66073 - DNA, 742 bp, Zea Mays
ggagccacaaaaccggagagaattggagggctaaaatcctcctcttgccctctaataatatcctttggttttatgactcccaaattagccttaaaaatatatttttcatttatgttgttgcaggccatggcggccatgccggagacatggtccttctcagaagaagaggcgctggtgaaggggacggcggctactacgatgttcccatctgcaacaaaaacccagtgaacaccaccgtcgaccctactttcttcaacaacaacaacagcaacattactgataggttcgcattgctgcattaatttaaatctcttctcagattaagttattattctagtatgtaccaccaataaacaagtacttcattttctcagattaagtaaacaagtacttacatagctgctagctcatgcatgtactccaagtctgagtatttatatggacgcatgtcttcatttctttgttccttccctcttgcattggtctttgtgtcgtctctgcaagtcgctgcacatccagctactttgctgcatttggagggctgcgactgcgagcccttgcattcacgtacgccactgtactggtctttattctgtgctcatgcatatggatgcatgccgtctgcgttctggccttctggggatgtggatatatggaaactactagtcaattgtgatgccaggatgatcatcgatctaaaggaatttgactgcgttattaatttagttgatcgatgcatggc

SEQ ID NO: 66074 - DNA, 653 bp, Zea Mays
aggctagcacacctgcctctttcggctggctaacagaccctagcgatcagggactctttcctcagtgtgctcactgattggtgggtcccaaggaccgggggtcattccacagacagtagctcccgagcccccgacgggagagtgtctcccttcgagggctggtgaaggctcgggcgatgccttttttctcagcgcatacttccatagtttcgcacgcttggtgtcaaaccatcgcttcatttcatatgtggtgttcggcttgtgtcctgtttcattgtgcctgatgccctcttataaataatcgctcccttgagcagttgtgttgtgccttgcttctaccttgttcgggacgattcctctgcgaccccttatggactcagaaaagcatctggtggaagactgcctcccggtgctgtgccctctccatcaaaagatgatcgacctagggcatgggctcttccttctcttgtccctagattctcgtgacggtggttgtcttattttcttccttgcacagccaagtgatctcgacgggataggtgaaagaattcaggatgtcctttagctagggtgggatggtgactctttcgtcgcagacctcctcggacctccaggagagtttggctgccaccaacactacgcttgcgattctc

SEQ ID NO: 66075 - DNA, 1148 bp, Zea Mays
gtgaggcctacctcgggattcttccccatttcagcctatggaagtatctgtatcattgtcggcctgggatggctgggggacaacaccaacttgttggcggtgccagtctggaactgcatcgtgggaggaaatcagagttcctcgacatcccactgaaggatagcatcaaggtgtggcgcctcgagtggttcatcgtggagaatcactgcaagtcccttccccctcggtcgaggaggcagccagatgtccgtactccaagctgggtagaatctccaaccccttcggaggtaacagaggcaaaagtgttgcttgctgaggtctgtttattgaaagatagaggtttgactgctgaagatgtggtcgctgatttcgtcttcaagaatattcagcatttgaaagacagggcatactcagcttatctgtacagtggtgtcaatgactctacccgggttaccaacaagaaaattcccactgaagatttggtgagccgactggacatgattctaaggggcagagtgtcaaatgttggagctcctgttgcctattctgtctggaatctgccacctcaccggtcattttctgagtttgtgtccaaccctcctgctagtaatggtggtatgggtcttagagtgcgaccctctcccgaggacattgaggctctaattgcccctcttcaaaatattcccaattatgagaagcaaactcattttgagatgccagctagcctggacgatgcagagatagatgttgtgcttagtatgttggctggggaatcttccgacttggcccatgctgagccgatggctatcacagctgggcaagaggctggcaaagcagtggagactcggaagcctgagggtgcttgcctaaagtgtccccgcctagttagtcgtctgactacacctgttgaggaaaagaagaagaagaggcagcttcggcgattgtcatgcttggaccaggatgcaggtccttctgccccggctcgtgatgaagtgccaggagaggtccttcctaaagttgatcccaatgggtgtgttcttcctgaggttgtcccaatgggtgtgtccttcatgaagtttatcccaaggggtgtgaccgtgcgccggctgttgtttgtatatttgatgaagatcaagaagaagaagaag

SEQ ID NO: 66076 - DNA, 605 bp, Zea Mays
cggggcttcttcctttgggtcaatctggcatccttggattttgaaacacttcaggatcttcttgacgggggctagcctctttagcctcctagcatagtccatcttcagggtccgatatgcctcacgagtgttggcttcctctccttctgccatctcgagactttcttgaagagctgcattttcttccttcaattccttgatttgctgctctaggctctccacccgggggtttaggtgggtgtagtgggagaaaaggtcatcaaagtggttgtcaagggtgtggagatatccagccatgtagattatggtagggtcatcttcattatgctctctccctgacagggcctggagtcttctcctccacgcagggttatttttgttgttgggtgtaaagtagcggaggggtgtctcggagactagttggagttttggcatagttggcggatggctttttgggcagcattctggcaggtgtctgggaagcggtggccaatagaggtgatttaaaagggagggtgatttgggtagcttcgactttctctcatgtagactaccatggagcacttctcgactccattcttgcggtattctgtccagacatactt

SEQ ID NO: 66077 - DNA, 968 bp, Zea Mays
gtcggattggtcgacctttgcgactgaggactctagtattctcagtgcacttgtgtgtgaggaccagattgaggagcactcaatcagccaaacactaaagtttggggtgccccccacgatgggtgttgtggcatctagtaaggatattatgtctataacataggtgttccccacatttggttgggtacatagaagtggatagtaaatgcataacatggtggatagactggtggatacatgggtgcataattaagtggaggtgtctttgatgttggcggtgttgattgtggatttgggttcatctagacaacatcacaggtcgatttattcagccttaccttttgagatgaaccattttcttccgcttgtctctcttgggtagacgaatgaggtcgctttgcttgctggtcatgtgaaacgacctttttgttgacatatttagctagcaatggatcaaaagtagggccaacttcaatcagccgaccagatgccttaactgtattttgattccacatacctatttcaggtcattggggtttgaatgtgtgtggtcactgctatctctagtcgccaccaaatcgtttgcctaagttagccagaccgtctgtcgtggagctggactgttcgcgctggtgtgccggaccacccacaatgtgcataacatggggctttgctcgatcgcctccttgcatatgactctaggttccttagtcctaatggtaatctttaaagtattgcctccatcgagggtcttctcaaccacaacctccctagagaggattgtcttgtcctcatcaaagactcgagggttgccgattacaacactctttccttttgtctttattagccacatccagccaaactaagactttcttgtcattcagatcaaccatattgatagggaagggctatttgtcaatctgcatttcctagatgctcatctgggcttcatttacggtcgattgtac

SEQ ID NO: 66078 - DNA, 1534 bp, Zea Mays
gcttaatgcttaataagaagctaggtagaaaaggtccacgccaggcagggctgtggcctgtgggctgtggcgtactgttgcgcgttgcgtatggcatgatcagaattcagaccagactgcatggtcggcgttttcggtgcctaaacctgtacacgcgcgcactacagtagcttaagccttaaggtcggcgtagagacagtacagtacagcttcctttccatggtgagcatgagctagctagcaggtggtggtgtggttgttgtgcgtttcagtctcagcaacattcccggccggccgggagagagatcatgcatcttgccgccatgcgttgcgttgcaagcatgcctgcctgattccccttctcgattccggccaccagcacagcatccaaactccgaagccccgccgcgcgcgctcctggatccgatccgattcgacgacggaggacggtaccacgcaccggcccggccgcacatttggtgggcaggctaatggcgtaacgctgacagactccaacttgcattgcatgcactgcgactgcgttgctgtgctagctggactgcgctcgggcgaatatctctaaatacgggccgggccggggtgatattattgagaacgaacaaccggattggacgcgtgcatgcatcgtctcctccccaacaggcagccgccggatgcagcaacgcgctgctatggactggtgcttccaatggcaatggcagctaagctagcgggcagcacgcattatggggccacgatgagcgaggatcggctgggattgggggatcgatgagatgcgatagaaagaagtggtaaagcgggatcggaaaaaagaggcctccaatgccgtcgtcccagctcagctactacttgccttttgcaggtctcggcccgaccacccaagttgccttgcccgagcatcatctcttatccccccctggcctctcccacgccttagctagctctccaacaagcagctagcctccagcaaatgggcacagcattaccacacctcccactagctacccatctcgatctctgcccgtctaagctagagtacccttgcaagcgtttttgtcctctagaaagaaatggcctgccgagactagtaggagcatgcagccactaagtggttgatgacctgctgatgtttcttcaggccggcgcggctgttctatctatatcctctgtctgtcagtgttacattatggactttagtcatgcatgcatgcatggtctttttgttgggtcctgtacattccagcaagggctagcttactagtgatatgatgatggggaagtgtgtgatcatgttaggaaacatcctacccaggttaacacgtacttggatctcatgcatgcaatgcaatgcaacaacaactcacttttctggtcaactagctagcctgcctgcagtgcaatatgcccaactgaatcacgaatatgtggaaaggcgtccctgacttaatcatttgacgcgcatctctttcaaataatgctgcatctcagctccaccaccccaccaacaatctcc

SEQ ID NO: 66079 - DNA, 807 bp, Zea Mays
ctttacaacacaagtagttataagaacaacactaaacactagcttaagaataaacaagaatgaacaagctagtgatagggagttgcaaatcaatgggaagacaagagcacgatgatttttcttttgaggtttggtggtttgctaatcactcaatacccattgagacaagtccaaggttgccactgatcctcatgctactggtgaccctcaagtcacactctctcacatggagtgcttacacccgagatctagcacttgatccaattggaccacttggcgctcttcacacttcgctctactagtgttgctcttcatgtctcccatggggtgagcatggtacccctcacaaagacttctctaaggccacacacaacttcacatgggctttcataaagccacaacccccaagctatctaaaaggtggcaacctccaagagtaacaaccaccactgacttgcaactcaatgatttagtgccatttgatgcaatatctcaacacaacacactaggaatcccactcaaacacttggatatgttctccagcaaacatgtatgtgagtagaagcccaggactaagctcaccacttggacaattcaacccaaaggtgctttatatctcttacattcttaactcatatgccatggacagctaacccctctatttatagcccaaatggataattagctattgcgactctaactaggctactgatgtgaccgtctaacggtggtccaacactccatagttgaaccattattcatggtctaatgtcgactgatcgtgccatgtgtattagccattatggc

SEQ ID NO: 66080 - DNA, 371 bp, Zea Mays
tcgaatttggttttggtgcgactatgttggggattcacctcgccggcgatgggtttcgacgtgaccgcgccgcggccgtcgtggcaaaccgaccgggggaggaggaaacgcaggggatcgtggatccggtattggatggcccatattagagctttacaccggttggcttggggttgatccttggcgttgatcggattatggatgggtgaagttagatatagagggttttaaatccggtgcgttcattcacgatcgcatgactggggatcggtaccggtccaaccgcactgccagtctaatctgcacgaccgaattctgatcggtcgtgtaaacttgctaaagaaaccctagctttgttagaaacaaacccg

SEQ ID NO: 66081 - DNA, 348 bp, Zea Mays
atgtctttaccaaaggtcctcaaactaatgatttttagctattttcgagtttgtttcagaaatagcaaagtaactatcaccaataaataggcaacaacttcagcaataagactaaacgaagcaccacagagcgaccgaaacgagcgattaagagacaaaggaagagtcaagcgacatgcccaacacgtcttaaggaggaaaatacgacaataccctcagcaagctctatagatggcatgtatgggacttgaggatataagtgtaattttatacaaagttgtacgcccacactgcccttataaataagggcacagttcccatgcatagctcacttttttaccatccccg

SEQ ID NO: 66082 - DNA, 1237 bp, Zea Mays
tttttgaatgccattttgctcatctggtttagaacatgttttgggcgttcaaaatcccaaaaccaacatccacctcaaatatgttcgagaattcgctttaacactttgacaaaaaaattaaaaatatccctactagaagtagcaaccatctgtcagtctctgtggcctagtacaaacaatctgatttttcaaaaaaaaactttgtgactcctccgcatgttattttcactactacccactagttacaatcttggatcaagttgtagagacacgaacaacattctatggtgatggaggctttaaagcatttgaagcaaatggccatgacattcttatcccaagcacatgggtggcaatctagtcatacgattgagagtattaaaagtatgcatgtcatgtttctttttttctttttacttgctttcctcggttgtgtgcatcttgttattacataggtctagagatgttcgttatttcaaaagtattcattgtcctatagtttgtttgttttttgataaggaaatgcaataaaaatcttccttatccaaaaaaaacaaactacaggaagtgagatggggcaatgactgttgtgcaagtaagacataggtgagtgtgcaaacgacacatttagcatttacccccctccccccttaggtcactaatagtccagacatgtcactggtacgcactggtatggtgggggtttaaatgctaaaattagcaactacgattggatcacaatctaaaagccattgtctcaaggtaacgacggttacacaagcaaatcttaggtgcaagtatgtgagcctcctggattttaaatcatgatccaatcatccaaccaaagtcgtacgtacttaaacctcccatcataccagggcataccagtgtcatgtctggactaatagcgagctagtgaagggtttaagtgttaaatgtgtaactaaggttggtgagggtttaagtgctatatgtataactatggttggaatacgtgaagggccatgagacacgcacctaataaggcttgcttgctgcgtatatgaacaaaccagaaaagagcatccaaaatatcatccccacgcgagctcaggttactcttgtcccaaatagacgggcaaagaactcccgtaagtagtagtaactgtacgggtaaccgctaaccaagattgaaccagtttctccaggacaggatggcggggtttgttctagtcctttctccgttgataacaatggc

SEQ ID NO: 66083 - DNA, 344 bp, Zea Mays
ttttaaactttccagaaagtcctagtttgctatttttggattaatatttgaaaagttatgattaaaacaagtaactgttgtattgctgtccaaaaatctgcaagtgtgttcacccttttggctaaaaatgcttagttagcacttaacggacatagactggtaatggctaagcttgagataacatatgtgtcatgtttttatatgtttctttctctagttaattgtgatgtagtattgtgttgcgtaagtatctaaaatgtcgtcgtctttttaatggtgttaatgatgaacgccgataacgtacgactagctagcgcttgcgtatagtcattgcagtgttttac

SEQ ID NO: 66084 - DNA, 299 bp, Zea Mays
ttcgtctgcattttctgcttggagctgtttcggtggtatctgagtgcagcgaatgattgaattgcacggtgaatccgtccaaggttgaattgaatctgtgacttgatttgcccggttctgtgaacacgtggaggttgatcctcgcggcatgttctcatatgtagtagttttttgttctgtttgggtgctgtttcgtgccatatgatgttttgcgagctaaggattatattgatgtagcttgaaaagcacttagcagcgtttactgtacattgtcattttttgttcttgtcaatcttctc

SEQ ID NO: 66085 - DNA, 552 bp, Zea Mays
cgacatgatagtaggtatgttcccagtcgactcccatattgcagaagtgttatttgatactggagcaacgcattcattcattactacatcatgggtagaagcacatattctcccaatatctgccatgtcaacccccattcaaattgactcagccggtggtagaattcgagccgatagcatttgtttgaatgtaagcgtggaaataagggggatagcatttcccgctaacctcatagtaatgggtactcagggaatagatgtcatcctagggatcaattggctagataagtatcaggcagttatcagttgtgataagaggacaatcaagttggtgtccccactaggagaggaagtggtgaccaagttagtcccgcctgagccgaaaaaaggaagttgttatcagatggctgtcaaaaacagtgaagcagacccaattgagagtatcaaggtggtgtccgagttcccagatgtgtttccaaaggacttaccaggtatgccaccagagcggaaagttgaatttgccatagagcttcttcctggaaccgcccccat

SEQ ID NO: 66086 - DNA, 636 bp, Zea Mays
accgcagtgtcgcccgtgcccatgcctataagtagcgcctcgcccttggcctctccctccctggccactagcaaaccattcctcgtcggaattcaccgcagccaagcacaccaccgcctgcattgccacccgagcgccaaccaccgtggtccgacaggtgcagccaccctacaaccgagcaaacgccaccaaaagcttccctgagtcgtagtgaagctcctcagccaagccattcaccctctactcccctccagcaacgtgccaccgctcgtcggactttactcgagcgccaacaaacgtggccagcactaacccgtgcactatcacccgattccttgcaccagtagccccctcgacttagtgtgaagcttccctgtcggtggaattgaactctaccaccgtcgttggttaggatttggagccgtcgctcatcacctcagcctgcacatggggaccaagcagcttcgaccaccatcgaccataattcgactgtcgacgtgttcgccgaagcctccccgacctcaccgaccacctcgtcggagccctaccatcgccggtaagccttgctgtgattttctttccatctgtcactgtttcggtgaccttaaggacggtgggttagattaatcaaattct

SEQ ID NO: 66087 - DNA, 579 bp, Zea Mays
ggacaaccatgacagcacttgcgaacaaaaaaggctaatgtagcaagttttaaacacttggcaacgctactgctgcttcgagccatcagacgtttctactcctgtagtactgtactacaagggagccgtggcagggacctgtgaaagtcagatcacaaggaaagaactcgattccgagatgtagtgtaggttctctctccaatgcagtagagggcaactacggtgttatgagagttttgatgacaggtttctccgtaggggccacataaactattagtggaacaatgaaaccacaaacacacggcagcaactactactactacgttaattttttcgttccaggatttccaaatctagcagtgtgattagctaggtagacaattcagctaattacaatcaaattcgaacccagtgggcagtggacacgtatatggtagcacccacattattgcaggagccggaggacatacatacggatcgtcatcagatagatcatccgaggtcttcttccttcttccacgacaacatgtgcatgatgggatgccccttggttctatggcgtactgccatttgttccag

SEQ ID NO: 66088 - DNA, 764 bp, Zea Mays
gtccaatcggggacattaccttcctgctaatccgtctttgctttcaaataaaaacgtccacctcgctttgattaggaggattaacctctctaaccccaccctgccccgtgtcttcttcaatccacacacgaaactgacttcgtcctccatccggcctctgccgttttcgcttcgccagatagttgtagtcgcccgccacctgcgcctataaagcaacacggctgagcattcatacgccggctacttgcttactactagtcaatctactgcgtcgtcgtcctctgttctcgacccttccccgacccacgcggccacgcccatcttcattttcctctccatcacgcgcggtggtgcatgcgatctatgtatgtactagggctaggctaggcgagcttctgggtgcacgtaccgtacgtcgactcatctccctctctttctctaccgtcgttgtactacgtactactccatgtacagcactcgtgaggaagagggcgtcgggaagtcatggcttgggctggggataggcggcggcagcggcggctgcgatctgatgcagcggaataaccgaccaccggtgcagttcgacctgctgttcccgccgcagggcgtcgtggaaggagttgccgcgagcaagaaggcggagaaaggcggtggtggacggaagaggctcaaggtcgttacgggcacggccgacgaggatggccagcagcccccaggcgcgaggaagaagctccggctcaccaaggcgcagtcgacgctgctcg

SEQ ID NO: 66089 - DNA, 638 bp, Zea Mays
gtatatttgatttgcgaactgatgccttggagagcagatctctcatcaggtggttgatggataaattggatccacatgacatgaccatacgcccaggggctggcaaggaactgaagataacaaaagagacggttcgtctgattttgggtttgccatgtgctggaggaggcagggagtttactgattggtacggtgaagtggatgttgctgcaaaactgagtcgtgatctcaatgctggtaaagaagaatttgatgttgtcaagcttcaggacaagatagtgcttgacaatgatgatgagttatcaatcagatgctttttctgattctattcaatcgacttatgtttccttctgcttcatggggcattacaaacaatgaggtactaatgacttcaaacatggcccgaatgactgatattgactggtgtcaactagtttacacggatttgtgtgatgctgccacacattggcataaaaggaacaaaacaaacatcacagcaacaatatatggatgttcactcattgttctagtaagtaattcttttgtttactctgcatatatatgatatgcaaatatttgttatgtactaattttatatatttttgcattcttttttcagatttactatcttgatcact

SEQ ID NO: 66090 - DNA, 448 bp, Zea Mays
ctgggggacgccttcgtcttgatgatgaaagggcccttccacttcggctctagcttgccccgggactctgtccgagctgttcggatgagtacgaggtctccttcgctgaattccctcgggatgactgtgtggtcgcgccatgcttttgtttgagcttggtatttgtttagagcctatagggcgaagacgcggtctccgtcgatgaggtctttcgaagtaggctcgtctacgtcggggacggctgacgtgaccatccgtggtgacccatgttttatttcttgtgggtcatggcctccgatccatacagaaggcggaaaggggtgaacccagtcgccctgcactcagttgtgttcagcgcccagaccgcttcaggtaacaggtcggcccacttgcctttcttgtcgtcgaggagcattttcttgacggttgtgaaaattttaccatttgc

SEQ ID NO: 66091 - DNA, 560 bp, Zea Mays
gcttacctttcgttctactttcaaacttctgcctctgccatattatgatgcaatattgggcatgaattggttccaacaatttagccctatgtatgtggaccggaaacacacgtggttatattccttatttggacacagttgtggtgttgcgaggttgtcaacctttggttcctactagcacatggttggagttggtggtccgataagtggttgacacactccatcttctggttcagttattctcctttgatgagttgtcgattcctgagccagtgttgatgttgctctgtgcttatgaagacttgttccatgttcctacttccttgccacccagtcgcttttgtgtccactctattcctcttatcgagggggctcgacctgttagcatttgcccatatcggttctctctttctatgaagaaagaagttgagtctcaggttgtcaagatgttacaaatttgtattatccaacacagttcttgttccttctcttctctagtacttttggttaagaaaaaagaccactcattgtgtttttgtgtcgattacatgcacttaaat

SEQ ID NO: 66092 - DNA, 444 bp, Zea Mays
caaatcacagaatacataaatacacattatgatttcttatcgagtctccaatggagccatgtggggtagtttattccctgtatccatcccattaatttttgttgccctgtcccattagccccacgggggggagaaaccaccctcatacttattttgaacaggtcggatccctgcggggtcccgcccccatactaaattttaccatccctacctcaaacacaaaagactatgcatgggtgcaaattaggtgttgttcatgggggcatggcatcataatgatgacatgcctaggtaggcatctatatgtggatgtttttgttcttctagcacttttgatatttctctttcaagtcgatggtgggaggcatctccatagggccctatacttggggggctacaactaggaccatgattggtggccctaaattagctcctacaagctat

SEQ ID NO: 66093 - DNA, 747 bp, Zea Mays
taaccaatttacaagtttctggactgcgcaacaatttctgggaaacacagggttctcggtgcaagtttacggagacacagagcatagtactctgaggactgcgggttgttttctaagttttacgaggtctctttaacaaaatatacccgcgaaggggtatcaaggatttctggcagccagatcagagtccaacggttgtgattaaaatctatcccttgaacacccgcgctcatccctgaccatcggatccgcgatccgcggcccagatccaatcgcgcacacaactcctctgaaccacccgatatactctaacggtcctgatttaatgcaccgaagcggtacaccgcttctaatcctagccgtccctatccaaatcaacggcgcacgcggatctgccacactcaaaacgctcgccggcggcgagaacccaccaaattcccccccacggcggcgccattaccgcccggtccgatcacatgcaatcgagccctaaacttcgattcgatgggtatatacgtggaggaggacatggtaaactcggggtaggcatcgttacctcaattagcgcggcgcagaaccccacccatggagcgcggcggagtccagagcttcggcgagaaatcgccgtccacctggtggttatctccctctgtggaggtagcagacagcaccacggaggcgcggcgaagctccccgcccaggcgcgccaatcccggcgcggcgtctacgttgattcgatagcggcgg

SEQ ID NO: 66094 - DNA, 342 bp, Zea Mays
gtctgaaccaaggaaaggaagtggtcaccagatagctgcccatagtgaggcggtcaatccgcttgaagccatcaaattagtatcagaattcccagatgtgttcctcgaggagttaccaggcatgccacctgaaagaaaagttgaatttgccatagagcttatccctggcaccgccctcatttctaaaagatcttatagagtgtccaggccagaattggtggaactaaagaagcagatatacgagttggtggagaacggttacatcagacccagcacctcgccttgggctgccttgtttgtggagaagaaggatggtacgaagaggatgtgcatagattaccg

SEQ ID NO: 66095 - DNA, 428 bp, Zea Mays
ataagataatcatgaactattaaagtcaggataaattatacaaccaaggatatgagaaagtttttttttcctttttttaaggatacaaaatacaagggcattatcaagtagagagacaaagggttcaatatctcgaggtagatattgtccaaggatgacaataaaatggcaagaaaacaaaagtataagaattcaatagggagaaagcattatcaaggagaaaagtagaaaggcaaaggtttaatatatatcaaggtagatattgcgcaaggatggcaatacaatggaaaacaaaagtataagaagtcaagggttatatagcaatattaggaattagaaaaccacttataatataatatcgccattaccgatctagtcgaaaatcttaatactaaagaactatcctatcaacctagcaaagaagtcaa

SEQ ID NO: 66096 - DNA, 947 bp, Zea Mays
taaaagcctgagggttctttaacaaaagtgacccacgaagggggtatggcgcattctcgaccgcccgatccactgtgaacgatcacgattagatcgaactattttaaaccctctctcaccagacaccatcggattcctaacatacggcccagatttaatcctgaagacactacagcttgactatctctcatccacacatctgagaaccaacggaccgggatcatcttcaacctaagacttctccccatccattccgcccaggttagacgtcgcgctctccctggaactctctctttctccgatggttcaccagcgtgcactcagcccggacccgaacacgatgccgccgaacagatgcaccaaacaataccgtagtcgtccatctctaggtcaaggaacgtgctggcgccacctaccttgcgctagtgactaacggcggcgcaacacacacccgcggcggcagaccccgccggagcgcaccaaagcctcgccaggcgccccaaacctcaccggatcaactttatgcgcagaagagcatcaaacgagcatagcggggttgcttcttaccggaaatcgacgcacagagctccacggcgatgctccgatcgacgaattccacgcaaccctgccccgaggatcgctgggagaggacacagacacatccttgtgcacccgcgaatgtcccaggccaaacatcgtgggctcgttggcgctatacctgcgacgttaacacggcggcagccaaatccttccctgcgacgatgatatccttccctgcgacgatgatggggcgtggggcctggaggagctggcttaattggacggggatgtgatcgtaggtacttatacgcagagggaagagagagtttcgggtggttacaacgacccatgaatccggctggggaagaacggcgtcgcgcccgagaatcccggcaggtccgctccat

SEQ ID NO: 66097 - DNA, 569 bp, Zea Mays
tcctaatcaacctaatgtgatcttcaatttgatgggtatcatcatctctttcacatgggtctttcttcgatctattctattttgatgctttgactccctagtgtgtcgtcaatggatttggaattgaatgattgatttaggttggtcgagaataggttgaagatgatgagctggtgaactgatctggtctctctgtttaagaagttgcaaagctgaatggatgggcggtgcgtgacgattgtttgaagcgccaagttcagttttcatccattgagactatggcaaattatatggtgcacgatttccttagactctctgatcatggaagttctagcgaggaagaagaagttgctgccatagtgagtagaagattgggcacgaagaaaagaagagtaggttctgtgttcgggcaccacgtggtctatcgtgatcgacaaatgggtcacattagattatacaatgactactttgttgatcagtctgtgtaccccgatgagctttttcgcagacggtacgtgttggtaaaaactagattgctaatatttagttattttggtgttccatctttt

SEQ ID NO: 66098 - DNA, 440 bp, Zea Mays
cagtttacgaacgtcaccggctacctctactacctttacgaagacgtatctggcagttgatggaaaagggtagatgccggcatccacccggccgtccacacgcctcctttcgggcctttcgccagggggagaacacttggccaggaggaatttatgccttgcagttcaactgttggttgcctgatctagtggcccgagttcgttgcaacagccaacaacagggaccgtcgactcgcggaacaggcttcagctcacggcttgtgaaatagcagccagaaagcgaacgaactatatagtggtgttaaatggtcgttgtatttttttttatggatgcctttggaaactaagttcagctcccaaaccgacaccatttcttcgtaaggtgccatggccagaagattctagtggatattccgtaatataccagtggttggttcttg

SEQ ID NO: 66099 - DNA, 842 bp, Zea Mays
caggagcttctaaaggtccagcttcaggaagagtgtgggctatgttggcatcaacaatttcccttaaatttttagcctgtgtgccaagagcttcggcagcggcatgagttgatgtcttcacggactccataacagcatatagcacactagtcattctccttttccttggagtcactgcgggggtgcttgatggcttcggcagttccgttgtgcacggtggactcagtgcattaattgttctgtcgtcttctctagtttcggctcttcagtcggatttgtcctagctttgactggcatagagcgacctggttctgtgataggagcaaccccttcacttagcttcgacacgtcgaccgtctcaatgcgcctgggtcggcgcgtcaaaactttaaccttttttgaccttgacacactagaagctgccgaggtagcagctttcctctttttcctctgccatcgcgtgggatagcagtagtctgggtacacaaacccgataacatcaaacaccctatgcaatctctttttgccccgagcaccgaaggcagttgtcatagcttcatcttcgacctttgagtatgctccaaacaactcatcgctagttgcctctatagcatctagctagtcatcattcggttcatcaaactagctcctgtattgaaaggtgtacttcagatgaactaaaccattttggctggagccagcggtagcctccttcggcatttcccatccgtttccatgtggccacactctgtaagcaatatgctcctggaccaagtctcttgtgtcgatataagtgcacactgtattgaaagccacctaacatgcttgcacgtcatttccaa

SEQ ID NO: 66100 - DNA, 804 bp, Zea Mays
agattagggtttgattcgtaatattttttaaaacgaaaacatttgtgtcaaatggaacctcaattttgcaaccgaaatggtagctccaagctctgcttcttgtggatcccaaaatcatgaacagttgctagaataacgaagacgctgttcatactgcaaggtcggaaaaccggaccaaattacaaacacctggagtatgctagaagcagcacttgccctgtggcaggcataataatttattacattaatatatgactgctgcatatcggtttctatggatctgtctgtccagcagaagagcggctgtcgaaggcctttctgtgccaaattttcaaatgatctagaggatggggccttggtggtgtaagcctagctgagagcaccacaccatcagcctctcctaccaggctaccactgatatctgcttcgaagcttcaggtaagaagaaagctgctgcaacacagggcactacaaagcgggtgatgtttcagaaactgctgggcataacctgtagtggaagtgtggaactccatgccaatctaacaggtggttgatcttcccaggattgaatcaatgcaacggcaacttaatctttttatctggtttcggagtagcatgagtcaaaacacgcaaatgacagtatgatcaacactttatcctcagcaacctgcttcacaactctctgtgcttgctgaggcgcgctttgcgcactgcttcttggatattcttttcatgctccttgagcatctgctccacgtttccttttgctgtaatcattgaacctgagtgctgatatattctgct

SEQ ID NO: 66101 - DNA, 467 bp, Zea Mays
aatagataaaactttgcaccatgctggacttttgattgtgcatctagtttgaataaaaaattaaacacggatttgaatttgaaaacttaaaatggaaaagaaaagaaaagggcaaagcaaccaatcagtcagaatctgtccctgcaggctacggcccaattgcagtacccctcgcgcggcccagcaacgcccctgcgccacgcacgcgaccggtggactccgctgtcggatgcgtcttccacctccggttcagccttgatctcgtgcacaggctcgacgaaacccttcgtcatctgcttgaactcgcttgcactgtgactctgcttcactgatccgtggggtcgcctcgcaagaaggttcttccccgggttcgttatgaatcaccgtaacaatcgtcgtaaccgcctctaccagccgatgttggttacaacatgagcatcgtggcacattctccggtaagacactcc

SEQ ID NO: 66102 - DNA, 447 bp, Zea Mays
ccggaccacctacctctcgcgctcggggaggaccccgcggaggcgagcgtacgctggacgacatccttgacgcccagtgcccgtaccacaaggatatgcgccacactcttcggaactgcagggacttcaaacactccgtcggacacggccgacccttccaacctctacctcctcctccgccgaggggaggaccagaagaaccacgacaacccagcagcaggaagagggaggaggaggagctttcccgcgcgttgacggggaggtcaacgtcatcttcgacggacacggatcgcaggagaacagaagacaacaaaagctcaacgatcgtcagatattggtggcgaccaccggtcctcccgccccataccggtggtcggagcacccgatcaccttcactcaggcggatcaatggctcaacttctaccacccaggcaaatacccactcct

SEQ ID NO: 66103 - DNA, 861 bp, Zea Mays
ctatctccattcatgcatccaaattacaaaaaatcatcatcttcattcaggtgcaacccaaggtccttgatattgccttccccttccttttttgctcatttcccccatcaaactatggaagaccggccacaaaaaactactgctggtaacaatagcattcccagcccctgcatatctttgcacttaaacactactgctggatactattagtacatgttaataactctagtaagagaactatgtccattcatgattaacgaccagaatatcataaaccttcttgcaggctttaggaactgtgtccattctcagctgctacagctaacacaaaaaattgccactgcggtactggtaaaggattcaatgtaaaacaaaatctatgaatgaaatagagctacaatggaaaacaaaatatcttaagacagaaccacacaaacatggattaaattgtcacattcatgtttcgatgtaggatatgaggacatgaaactgaaaacatgaacaaaagaaaaggctgtcggagacaagtacacagtccggaaccttttacatgtctagtaataatataatatagtatgcgaaattacaaaaggggccggtgttgacatggtttagttgaatcagtttggatgcaacaacaaatgacctaccagagcagcatgtcatgatgtggaatcaccaaaaactgtgattcctaataatgtgaatgaactagttagaagtaaaaatgatccctccaaggtagcagtacagaaatcgtggcatatcctaataaactaaatacgtcgtgggacagaagagcagaacagagcatgcaggtttggcacaatcacatgctcacgtgcatttaccgaaaacaat

SEQ ID NO: 66104 - DNA, 422 bp, Zea Mays
aaaagacttgttgttgttgggttgcgctaatactggtgctgtggtcagatgctgccttaatgcatggaaggcatcttcgcacttctgactccaaacaaacttggcttctttcttcagcaactcagttataggcttcgcaatttgagagaaatccgggataaatcttcggtaataaccagctaatcccagaaaactctgaatctgacgcacagtcgttggtggcttccagttcatcacctcttgcactttatcaggatcaacaactattcctgcttgagagatagtgtgacccaagaatttgtttcctttagccaaaaatcacacttggataacttggcataaaggtggtgctctcgcagacgttgaagcactacatgcaaatgcccggcatgttcttctttgttctttgagtacaccaaaat

SEQ ID NO: 66105 - DNA, 359 bp, Zea Mays
ctcgtggcagcgtgcggctggcggtttgcgtagtctgttgtgtgagaaggtagtgacagtctcgctgggccattgaaacgcaatcctacggtgggatattaaagagctacatgaataccaccaagattaggaacgcgttcgagcgaagcgttagcgacaatatttcttcctcttttttgttctctacagccatacctcatttttaccttgcgctcgccactgatccttagtgtggtaatgtgacgaggaaggtgaccatattctgttcatccttcattcatccctcatcacaaaaccaaataagagacggtgcagcttcaatccacttcaaccctataatcaaacaagaaattaggttt

SEQ ID NO: 66106 - DNA, 411 bp, Zea Mays
ctctcggttaccaaaggaagctatcataagttgatcttctttcttcgtaaagttacccaaaatttcattacacatcatctaaatcatctctagccattcagcgcatggttccttgaacacatcttcgaacttaaaatgatacgtcaacctaacaaggtctcccttattcactttctctttaagcttcggcactccccacctagacagtattcggagaaccttgtaagaaaaaattcttgcaccaaatctcgagtgctaatatgctcaattacagtactgaaggttacttgggctacttgcgtcggtgacccaagagccatgccacaaaccgatcgcgttaagccaaagttcaaactcatcgggctcatcaccgtgttcgtaaattcatcgctatctttgacatcaacttca

SEQ ID NO: 66107 - DNA, 424 bp, Zea Mays
attgatagatatgacgattcacatggtactgatagagagatttacgaggagcaaattatcgagccgacgacagaagatcttgctttgaaagaaaccctaaacgaggagcagaggtctgcctatgataagatcctatctgtcgttgacactgataagggtggagtgttgtttgtggatgggcctagtaggactggaaagactgatctgtataaggcaatgcttgcgtcgttacacagtcaggacaagattacagttgcaacaactacatctggtgttgcggcttccataatgcctgggggtgggatcgcccattcgcgcttcaagataccacttactattgatgatggtgcgatgtgtagcttcacaaaacaaagtgggacaacaaagttgctacaaaaagcatcactcattatttgggacgagg

SEQ ID NO: 66108 - DNA, 1016 bp, Zea Mays
gtgggacgggagtacgactaagtccgccaagaatactaccccacttaaaagaattctgacttaggagcatttgaggtggcacagaaggtctgaccctgggtttcgggtgaccaaaggaatttctaaagatgcagtgggaatgccatgcttttccacaaaactagtggcgatgaatgaatgggatgctctagaatcaaaaagtacagcagcgggggtaaattcgactaggaactcaccgagcactactcctggggcgtgctgagcttcttgagcgtcgacgtgattcactcgagccctaccgtgaaactgggtcatgcttagttggctattggaggtgggtgccttagaggcgggtgctaaaactttcttggggccattcaccgagttggagtaggtaggtacggatgtcttcaactgaggacaattacttttgtagtgactggggtctccacagtgccaacaagcattggctagaggttggctgcttgcaacagatggggtgtggagagaactttgaccaggctagctgaaacattatggagcggaccctgttggcttgttgaagctcggtcctttgggaggaaacccaaaagattgaactctctggtgcatgtcttactgctgagctcggagaacttgaaacttcatcttgaggtgacccttttcttcttctcgagcccattccacttggatggccttgtttgagaggtgcgagaaactgaggaaatcttggctggcgaagatggtcttgagttttggtctcagccccttcaagaaacatgccatcttcttggcttccgtgctgacatcatcaggcgcatagcgagccagttctgtgaatttgtggatgtattcactaacagatctccctccttgagttaactcccgaaattcttctttgagctggacgatttccaagggcacatgatgctctcggaaaactgcttcaaattctgcctaggtagcatctctaacgacagcgctgaaagtatcccaccaggatagggccatcccgg

SEQ ID NO: 66109 - DNA, 333 bp, Zea Mays
cgagggcaagtgggccgttcaaagatgtattaatgttgatattggtgccagtcgatctactgatggtgacgatgatgaaagtgttgacacctttcgtcttcaggagcaaccccgttcgacaagaaaatcgttgattctaaagatctcaacgacgtttaccctgactacaacacaaggctgactataaatgatttttcgatcgatgagtagaaggaatttaaagactacatgaagaagctagatgaggagttccagtgatgacaagttcagaagtgtgaggaggcgtaggaaaaatacttggttcacttcaagaacatatgatggcaagaggcg

SEQ ID NO: 66110 - DNA, 891 bp, Zea Mays
ttcatataatctttttcccgaagcgtgtcgaataatataatcaaggacttcggaagacgcttcgggagtaggtgcgacagctttttcaagcaaaatctggtttatagcttcttctctcgctgccttttctccagtttccgaggatttctccttgacgggctctgaaggcccagcttcggcaccggcctggctcattgtagcttcggcttcgattacttttgcctcggtttcaatctgcgccttcgaagctttggcaattttccttggagtagagcttgaagcttttattgtctccagtacatctagtacactagccatcctttttctcttgggggtcgctgctagacctttttgtgcctttggcacctccactcctgccgaagggcttagaacttctaatgttttcgtctctttgatttttggttcttcaattttgtcagtcttcggcattgcagccggctcttcaatcctctgcgtaagaccaggacctttggcttcagtagctaaagaagtctcactgccaaattcaggcactatggccggttcaatgtagcgtggtcggtgagtaaggaccttcaactttttcctctttggtgcgggctcgtttgaggtagccaaagcagcagccttcccagaagttgcaccctttcttttctgcccccacggcgggtagcgatagtcagggtacacaaatctgatagcatcaaaaactctatttagcgttttcttttttcagctcccgaaggccgcagatagtgcattatctccagacttggagtatgttccaagtagttcatcactagtattttcaacacacttcagccagtcatcgtctggttcgataaattggtctccaaacctgaaagtatatttcaatcgaaccaaaccacc

SEQ ID NO: 66111 - DNA, 533 bp, Zea Mays
cacgactgtggacacgcactcacgcggccagtgccttcttcttcatttccggccgccgcgcgtcctccccaaattcgctggccaccactttaccctcctataaattgatggccggggctgttgcgctatgtgatcatgaagccaacgcaccagctattgcttcaaatcactcaccagagaccacaaattccttacttcccccaaaccggttcatcccaccgcaagaacaccctcaccgtggctagcgcaattcaggctagttcttacgctctgctccctcgtttaagcagtctcatgcgtctgtggtggtcaccgacccacccaattgaattagaccacccccaatcgccgggaacgcattgttctttggatcatccgcgcggtcaccatggtcagggatattagggtcgccgttcatgcaattgacttaggggaaacgctaattggggcgtgaattcggtttcgactgaagtagggcaccagtccttaggtaaatcggccggtacaggtgctcgccggagcctccctgcgcc

SEQ ID NO: 66112 - DNA, 1589 bp, Zea Mays
ctctattgaaattattattgttcttatctaagtctttataaatgaggttgaagtcaccagccaacatccacggtccaagacattcaaccctaatatccttgatttcttgtaggaacataatcttctcatggtctccttgaggaccataaacactggtcagccaccattcatttcccctttcattacagaactaaactgatatactatgattatccagtcttttttgaccagtgaaacccaaatgccacctccaagccactagaatgcccccagctgtcccaacacaaggaaggtaaatgaagttactaaagtttgtcccaagcatggaaagaatcaattgacttgaaataatttgcattttggtttctaaacagacgacctctacccttgagaaatcaacaagttctctcactgagtcttggtgcacagaagaattcagacctctaacattccataccaaaatttttgaaggatccattaaatacattaaaaataatgagccaccaaaatatcagaccttaatagaacaccagatcaggtggagtgctctagccaaacaaggctgaaagggcttcaaatgacattgagacagaagatgagtgaagagttttttatactctttgattacttcttggctaattcctttagatatcgtgatgatttgtaaagtcctcatagctctctttgttgatctgccccccaggtcctgcatctgaaattcaaccctaataccagccacccgacgacttcttctcggagcagaaacaaatggggatggaggtggctaatgtcgtgtgtgttgttgtctagaaccggcaagatacccgaaggccttctgcaaatgttgttaacaaaatcctccctgcgtgatctccctgtgagcccttcatcttcagcatcagagccattctgagtcaatctagagggcaccaacaaagaaggcaccccagttatattaatcgtcttcctcacaattttcttcttcaaaaaactgatctccttcctaatcatgttgttgttgatgcttcgaattcttcctgaagtagactttgaaaggcacagatacctgagccatgatacaagacgtgggggggagctcctcggagctaggggagagagaaggaactgcacccggcaaaacaattgcaccaggcaggggcaagccaggtccaggcctctccagcaatccattaggcatatcctgctggggtgaagaatgcctacccaggcccagcgtcccattcaccagaacatcggtagccagaagaaattgacgaggcgagctcaaaatggtttccttctgtagcctagccagagagatttgctagggcaaaggtggcctaatagagcccagcgactcgacaagaggaaaatccatgtcactagaggcctggtggggcgagctagatccaagtgtattcaggggcccagtagacacatccagatggggcgtccatggagcgatcattagagtgactgtttaacttctccaccgaactctggccgacagaattgggaataggcatctctcgcccgtccgtcgccatgccttctttgtttcccatcacatgcaatgactgcgtctcgtg

SEQ ID NO: 66113 - DNA, 937 bp, Zea Mays
agactttcttgtacgtacccttttttaatcagttcttccacttgttgctgaatctcctttgtttcttctgggttggtgtggtaggcagcatgatttgggagggaagcaccaaacacgaggtctatttgatgttcaattcctctcttgggtggtagccctggtggtacttcattaggaaacacgtcctcatattcctataatgcatcaaagacaatacttggcaaagtagagggtaagttgttagtagaaagaaggttgtccttgtacaggagcacaaagaacatggcactaggttcactcaattctttttaatcccccttcctagtcatcatgactaatccctcttttcccggtgtcttggttattggaggctgtggagttttattttgctttggaaactcttccttactatttttgtgggtcactctcaagtgcttctcgctctctcactgtttcttatttagatcatccttcatactttcctctgatgtcaaaggaagcaaagagattcgctctcctttgtacaagaaagacaacttgttggttcttccaaaaatctggacatcacgatcatataaccaaggtcgacctagcagtaattgacatgcttgcatagggaccacatcacattccacgtgatcattgtacttctcaacagaaaaaggatcattcaccacgtggctaacacgcaacgctccacaattattaagccactgcatcttatatggactaggatgacgccttggttttaattccaatctgtccaccaattcttgactagcaatgttgttgcagctaccattatcaacaatgatgcgacatagcttatctttgatcataccttgggtattggaaagattgtggcgctgtccattttcttctttttcagcagtcacacttagcactcaaagagagataaaacagttatgatctcctt

SEQ ID NO: 66114 - DNA, 673 bp, Zea Mays
gttagcagccgtgacgatggtgtagagaaggagacaagtgattcaagcgcgggacaacaggtggaattgttgggccgcagaagccgcaagcccagctcgaggattttaggagcataatagattcgttgagtcatacggcccatattggtgtatgtaataaatactagagagtgttagttcctggacagttttgatcattagtaagacaaaactctgaccgagtagttcggctagtcgtcgacaaccaagagtgctaacaagtggtatcaaagaccatttcgatttggcggacttcctccacttcaccaggagcgtgaagatggcaggggcgtcagatcccaacctggccacggcgctcgcagcgcagtcctagtccagtccatcaagacgcagtccaagaccttggccccccattccaagatcctacagcaactctacgatcgtttggagtcctaggaccaccgatggggtggattggagaaggcggtccatgccaacacggagaacatcgccaagctgcacgataaactgggtcagactatcgatacctagattacggagatgcaggcagcccagcaggagcgcgccgacaacatggtggcgcatgcctccacccgtctggctacgatggagaatgtcaccaaggtgttcgagtcttggcacccaaggatgg

SEQ ID NO: 66115 - DNA, 490 bp, Zea Mays
ctcaggggtataaatgtgattccacttagtgtttggggatgttttatgacttttctcaaaaagccctaaggtttttctcaacttgggttcagttttgccccctctaaccactatttagggttaagtccttaaaccagggtcctatttgtaaaacagtaaaacaatacaacttggaattctccaaataataaacttattcacttttccaagctctaccattttggtatatggacctttaactaaatccttctagatcttgaattccccttttgggctagttttatggttccgaatgagttctatttgtatttcagcttcttccagggattcatccctttgatccctccacctagagccaagctactccttaacctcaaatccaacttcggtatatagaactcaggtccacagtgtccatggtttaggagttgtttgcttatatctaattctaaacaaggttttcaaaccttacttagggctttgaggttgc

SEQ ID NO: 66116 - DNA, 752 bp, Zea Mays
atcctacccccttaaaaataatctcgtcctcgagatttaagaagatctagggaaaagatgggggaagtctatgcgaagctcttcttctctctcccaagttgcttcatcctcactatggtgactccattgtaccttgcacatctttatcaccttatttcttgtaactcgagtcagagtgtccagaatcttgatagggtactcaacataggtcagatcatcttgaacactaaggtcctccattggtagttgctcctcaggtaccctgaggcacttctttagctgggatacatggaatacatcatgtacatcagtcagattgtcaggtagctcgagttgataggccatctctccaacttgcctaaaactcagagtggtccattatagtgaggggacagtttgcccacaactttaaatctcctcattccacgaagtggtgaaaccttgaggtacccatgatttctttcctcaaaatccagtggtcttcttctattatccgcgtagctcttttgccaggttcgagccaccctcaaattctctcgaattatacgaacttgttcgtctgccccttgaataagttcaggccccaagaactgtctttctccagtctgatcccaatatagaggagtcctgcacttcctgccgtatagagtctcgaacggtaacatcttcagactggcctggtaactattattatatgagaactcagcataaggtagactcttgttccaactactaccatgctgaagggcaca

SEQ ID NO: 66117 - DNA, 716 bp, Zea Mays
gcgtcaacctgggagatcggcagccaccgtcgcgcccgtaattgctcgccgtcgcacttctggacggcggatctgcacggtgcgagggcagctgtctccgtcgcctggtttctggtgagtcacctcatatccattttgcctcatctcagtgatcaagtagcataaatcagggcgtgtgctggtgcggggtgacgtcggggcgggttgccggagtttcgccgccctagcctacgcacagtcgtgctcagtcgttgtcgggatcgtgtgaggagggagcgcgtgcgccgtcagatcttgatggacggcgtggattaagaatagaataccggttcggcttggacttgtcccggccgttggattgttgacgtatgggcgagatcggatcgtgcgtataatagatcgcaacccttgatcgcggatgcgatgaaccagatcgtgtaccgattcattaaagaccagatctagtctggagcgctggattctaatcgtacggctatcacgggcgcatacccctttgccatacacgctttacagaaaatcccccacaaaatcacgaaaccatcccgccgtccattgggggaggggggttcgtctgagtcttaggattaattgcatcagggcacccgagctttccagaaaatgaggcccagtccagaaaggattaaaaatagagaaataattatagaaattagttttaaatacaaaaacaattctag

SEQ ID NO: 66118 - DNA, 332 bp, Zea Mays
cgccaacaagatcatcgatgatctcatcaccgacaatgaaaatgacggtcccaggcagcggcgatccgatgattttttgtaaacgattgtgatcgcgaaagtagagtgtggtggcccagtagcatggtcgcacggtcattttatacccactgcaccaagcgaccccctcgaagtggttcaccagttggttgagggcattgttcatccaactctaaatcaatacttcgggagtggcccactagcatgaaccactccctcggggggctattgatgggcgaagtctgaacacaccctcaaccaatcaaacaaaaaccttgattctgtccaaacgg

SEQ ID NO: 66119 - DNA, 1015 bp, Zea Mays
cctgggcgcccgattgatgcggaccggattcctgcgcaagcctatttaaccgtgcccctcgttcccctctcctctggcacatccatggtcgccatgaatggatgcacaaccggtgtgctgtgccaccgctcggcaggcccgccatggccttgtgtagtgccgtgaagctccgcctgttcatgggggtgtgtgctgtggcttcgccgtgcagaaccgacgcccgagaactcgggatttcttcaccggtgagggtcctccgccgcagcaccactgacctccgtggccagggaatcctgctaaccgaatcacggtaatgagctctccatcagttcgccttccttcactcagtgtataacgccgtccgcatttaggatttagggtctctgtgttctgggtggggaggaactccagcgaactccctgggtggagctcggttttgccaccgccgctgcctggagatgagctggtgagggtgatgtgggtgagggacgctggccgtcggatctcctgatgggcgcgctagattcaattctgcattttaagatcctaagcgtcggatcggatcggatggcccatattggatcacgttacattaaatactgaccgttgatccaagatctggcggccagtagcgcgtaccggttcacttaaatggacgatctaatctggggcgttcgctcgcgatccgacggccctggtcaaataccggtatataaaacactagatctaatcccagccctcgaaatctgatcgtgcgactcagaatggcccgtaccccttcggccggggataattgcatgcgagccctcataaaactatcaaataaacccgccgtcccctcacgtggaaaactaattaaatctaggtactgagtttcacagtttagaccctgtgttttctagaaattgtgttcgcagtccagaattaatagggatattcataattaaatcagaaaatgatttttttataaaaataaatctaggaacttgtttaattcatagttaattcattttag

SEQ ID NO: 66120 - DNA, 376 bp, Zea Mays
gagaggctcaatgtgtggcagagtgtagctagcgtcgggtgcagagtgggtatgagaagagctagggttcatcgtctcttataaattctaggttgatttgggtcaacgactatttatttaagaggcctatctccgttaattgattttaagagacaatcaagttttaagtgtctttgtaaatggtttgtctgtctccaaaaaatcaggggacattttagaagacagtgagattttatgtccacctctgttaatcaaatcgtttgtcttccaaaatcatctatgtaatagtgataatatgataatttattctattgagctaggctcatataaatttagtcaagtatgcttaaatatttctcttattaatatgcaaagt

SEQ ID NO: 66121 - DNA, 450 bp, Zea Mays
ggggggggggggttcagggtacaacatgagaacaggcttatgagtagtctaggactggacactaatctatgggggtgctcagatcattttgtcgtagcctgaaactccacaaacgcgcctcatctttggcttggcgtcggaggcgaagaactgaaggcgtattgttgtggaagacgacttcattcctgtgtttccatattgcccagcagcataagtggatgaaactgtggtggtgatcaagggagattgtagggggggagtgatctcggaggggcaagtggccgagtgagagtcttcaatatgtacgccaaggctgctccagaatgcgttggctgttgggcatctgaacaaaatgtgatctgagtcttcatcagctgagcgacatacatacctcgcaggttgcattggttacaatcttttttttcttgagcaggttttgcttgtggtgaa

SEQ ID NO: 66122 - DNA, 668 bp, Zea Mays
ctaagtttgctcatttccttcttttgaagcatcctttcacagctgccattgttgctaaagtttttatgcaaaatgtatacaagctacatggtttgccatctgctctggtgtctgacagagattgtgtgttcactagtgcattgtggaaaactttgttatctatggctggggtttctttgcacatgagttccgcgtataaccctaagtcggatggtcagactgagcgggttaatcaatgtttggaaacgtttttgagatgttttgtccatgcctgtccccacaagtggagtaagtggattcacttggtcgagttttggtataataccagttggcattcagctttgacttattctccttttgagatgttttatgattattctccttggcattttggtgttgatgttctgtgtccagtgccctcgctgttggattggattcaggagaaggccatcatgactgacttaatacaacaacatttgaagcgtgcccaacattggatgaaacatcaggctaacaaaaatcgtgtggaacgccaattttcggttggtgatcttgtctttctgaagttacaaccttatgtgcaaacctcagtggctcgaagatcctgtcagaaattgacatttcgctattttggtccctgccgggtcttggccaagattgggtcagtg

SEQ ID NO: 66123 - DNA, 937 bp, Zea Mays
cttgtctcctctgatggtctacaacagttttggagtatcgatacaataaataacacctagttagagccattaagtgcttttgttgatttagtgatagaatgattatgtggactaatgttgtgcatgggtatacaaggtttttgtcttttggatatgaggatatgcttaggttaggccacgatgataatcatgtgatcaaaaccctagggaccaaggagttgctttgataccctagacgacaagcaagaagtttaagacatcaaagtgaaagaagcttaaaatatgcaaagaaacatggtttagaatgcaccggagtacgccaccagaagatggctagaggagggtgaatagcttataaacttattctacataaatcatagttataactagagtcaaggtttgaatatatgaaaacatcttagttgctccaatgctaatttactttaaactatcttctgatgaaactagtagctataaaatggtattgtatagaactagccaagctactcactcaacaagagatgaaacttcattataaagaatacgagactagatagactaatataatacaaatagtaaaagtaatttcaaaaatagtatgaagtgcaaaccacatgaggcaagagatgagagaatattaatcctcaagtttcggttgcttaccgtgtatccttgttatggaaagtctaagctagatgatttgtgtgctaattggcatcacacaacatgcttgtaataaggacaccttaagaatcactctacggaggcactctaacatgtcatgattccactatagttgctcttcgcgaatgtcacatggagaatgagcacaagagcccctcacaacaatgatggagacaacaacaatcttcaatatccactcaatgattatataaactctagtctctatgcatctaggtggcaatattcaccaaga

SEQ ID NO: 66124 - DNA, 387 bp, Zea Mays
ggaaaaactaattgtacgatctctaggctgcttaactcgtggtgtcaatctattggacgtggaggatttaaatttcaatgtgtcagtgtgttggtgcatccttgcagacactagccgttctacccctgacgaggaattgaggaccacgttagctttcgttgtgtcttcacgccgactgtggagacctaatctttgtcctttgttccgggaacacgtgagagattcgtgcccgtccgtatatttgttttgatccaatttgttgtttagctcagttcagcaggtcggtcaataatttatgcttcccttctttgaaaggttgaattaaagcattctgttccatcgttggttccatcttttcatttgaaagagaaataaaaaggtaagggc

SEQ ID NO: 66125 - DNA, 1620 bp, Zea Mays
ctatttacactagtagaataggactgttgatggccttgtgaaccaatttggcaactgaacattcacactgaagaccaggaatactactaggaaggtgattgagctggtgccatgtgctaagaaccgttggtgaaattggatgggttgttggttttacgttaagatgaacaaagggggccaagatgccttcgagtgaaatggtgccacattgcttcgtggtgtttccccggttcaaggtgaacaagggcgattcggagaaggctacatttaggcaggttgcccctatcagaagtggtcttgatttggtggaagaatttgttgcttttggagtgtgacctttgagccatggttggaccattaggaaggttgcatgaaggcccatgccgttcaaggagggtatggaagtgattagtcctaccttcacaattgatctagctggcagagatgtcacaacgttcatttgtgatgtggaggctgaggcatgtaaaattattgggaaatatgtgaagaaaatagagttgccaaagagcatcgatattcaaggttgcaacattcagatcaatcgatgttttgagctaaatcatctagaatatgggccatattctgaggctatgaaagaagatgtggaggagacttcaatgaagtggaggtggaataataaggagcggtggttgtgaaaggtggtgggacaaggaggggacttcaaagtgaaaggtgggggtgcctaagtcgagaataaaggaaaaggctcaaattcggtaggccgagccggtggggttgttaagtggggaggcatctggctcggtggaggaaaccatgggttttatcaaggacttggctgccacttgcatagcactaaaccagaccatgatggtggccgagctcaagggtgcaatagtgtgggcggtagaagataccgagggtgagtgtcctaggggtgaaagggtttctaggaccaccgcaggcgaagacattttaacgtctaggctaccgtagtcttttaatgtgttcccttatgttagtaacattggggatgttatgtcagctactatggagaagatatggaaggctatggtgaagagggtggcccctttgcacaccttatgggcctgacgaagctgatgcaggtgaaactggtgaagacagaggcatccaccaaggcggaggttggagtcgtcgtgtgtgtctgcttcacgtgtatcccccattgtgccgccgccataatagtctctctatggaggtgccgatggaatcatcgcttgtgctcggtttctaggatgtggaaaacctctctacgaggggctagacatctcggtgctggattaccaggtcgaggagccttttgacttcacgatgcgcgatagatgtgcctgcaacaatgtcatggaagccaataagattgtggcgcatagggttgctttggtttccttttgatttttgcctttttatggctcacttttgttactatattgatgatgtcggaggcaagactttggtgggttagtgactgcccagccgcgaagggttcggccaagaatgcgacccatgggctaggttctgcaccctctagtggtggctggggtggctttgctgatctggccatctctagcgagatcgagc

SEQ ID NO: 66126 - DNA, 605 bp, Zea Mays
tgtccttttttcactactcaaaggagtgctcaagaaactagattattttcgatgagtttctattggcaaggtgatggaaataaaaagaaatatagacggactaagtgggatattctttatcagcctaaagaccaaggtggtcttggggtcgtggatctaaacacaaagattattgcactacttaataaatggttgtatagattgctcacatctgatggggtctggcaacaaatactacgaaataagcatctaggatcaaaaccattaactcaagtggagtggaaaaatggtgattctcatttttggtcctgcctaacgaaggtgaagcgagaattcctacgttttggatccttcatagtaaaggatggatcacgagtttgtttttgggaggaattctggttaggtgggtcctctttgaaagaccagtatccttccctttataatattgctagaccaagaagtattgagctcttcatctccgaacctttcccgatggaacaactctttgctcccaaattgattgtttggaatgaattgttgccacattgggagggacttgaattgtctcatgaccctgatatgttcactcaaatcattagttctcg

SEQ ID NO: 66127 - DNA, 702 bp, Zea Mays
gcgtaacaccctacgtcctatgatgatctcggtattggtatgagattacaagcaatgaactatgagtacggtgggctgaggtgagatgaaaatggtaggggtgcctcttggccttatatacacgaccatggatagatatccacgcacaagagataaacgtaatccatttgcctatattccggtttgtagcgaactatcttcctacatctctggaaccctctttgttcatccgcccgagttaccgccgaagacttagcatgcgtggcacaactgttcctcccaatatactcgtgttctcatggcgcctaactcgggcgttggcctttcctggttcagaatgagcttgcttcactaggttaccttcggccggcccacccgcaggacgtcctaaggggaaacctgctaggtggcccaggacgcatttccatgtgcgtgtggacccaggggatatccatcccccacaattacatctccttgacataccctttgttgtgacgccacatgctacaactagttcctttcgaaatcgccgcctccgagttttgaggctcacgctcagcaaaacccgccatccgtagcgtagggtgcttttgaggctaaaacaccaaaccgacgtgaatatcgcactacgtgtgtgtctcccacgtcttggacacatgtcccgttagtcctcgaccatgctggcaacacggtccgctccgc

SEQ ID NO: 66128 - DNA, 369 bp, Zea Mays
aaaaagggcaacacgattaagttcattataccttctccctatttccacacatgaagagatgaagaaccacacggagaaggctaagcaaacacgaacaaccaaagagaaaaatgtaaggaaggaaggtgaatcataagatgtgctcattgttccttttcattgttctccccattacaagatattacatcattacctctgagatattgagtgttgccagaaggtatttactcttaagattctttagaggaggagtgttccgaggggattgagagtaacttgtttttcctgcatgggcgatgtggacctatttataaagtcatggcaacatataactccatgtggtatacacacctaccttggcttcctata

SEQ ID NO: 66129 - DNA, 1067 bp, Zea Mays
tcatctaaatatttatgaaagcgcattgtagaggtattgcttgcacttgtcacctaaaatttcccccccccctttcttacgtgatcaatagcaggttgcttacttctttctattatatcgacttgcttgggttttttctgctaaaaaaacctgttacttgttagagatcaagctttatgcccatacttcttaattgcactgttgtggtcattgcaatcatgataatatctatcttgaatcatcatggattttcagtgtctgcatttattcggcatacatatatatggttacgtctgtgtaaaaacaatgaaagatcatatgtactttctacttcttactacaaaggatctgactttcttcctatatgcgcattgtgttttcaaatgtccctttgaactccttctgtagaatgtaacattgttgtccagcaactggaagccaatgcgacatgtattaactgccactggccatccaaaagtaaagtgaaaacaaaattgtagttgccatatttaggagaaaattctgctatgccgaaacatgatattaatgaaactaataaggtcagttcagaataggggtcctctcacagtctagcattgtgtatgtgcgccaatgcctgctatacatggctttgttcttctattgtgactgattattgatttttctagtgagctacaacattctgtttggtaatcacagttccttgggactttcatgtgatttaatatggaaatttctgtatggaatatcaatgcctcaaatttcagggaggaaagcgaagtgatggacggagtccttgggaacttcggcccatcaactctcaatgtggcttacttccaagagctcatggtagtgctctgttcacgaggggagaaacacaggtaaggtaatacacctcatttgagagtatgttgtatctgtcatctctgattgtcatagcatggcatgtctcgtggttttatttgtcacatatgctgatgttggtgtcttgctgatctgttcgatacctgatgatgtctacagaaatttgcgtgtgtgttctatttatatccatcccagttttattt

SEQ ID NO: 66130 - DNA, 523 bp, Zea Mays
cagctccgctaggtagttgtgcatccagtgaaccagctctcacctccaatcatcccctacagctccccaatttgagacttcccccaaatcggtcaagaacaccatgttgtgtgagctcgctgcggtcagcttttcataggtccaatcatgccctcctagcttctattttagcatccatgtgtgctcttgatactgctcgacccatccaattgagttagaacccgtaggatcaccgagaacgtctcggttaatccattgctcgcgttgtcaccgtgggcagtgtgattaagagctcgaaccttgcaattaagtgggggggatggtcattcagggttgaatttggtgtcaagtaaagggaaggactagttgttgcctattctggccagtacgagcttgccggagctcggcctgtcgccgtcctccgttggggatcgcgggttgtaaagaatagaaaggggaagggtctaattgcaattgtcagtggcatagagaaacagtactgcagactctttaagggtttttc

SEQ ID NO: 66131 - DNA, 403 bp, Zea Mays
gtgtaaagtgggtctgccacagttggcacttgggcatgaggatatgatattccaagactggtggagtagaacagaaagtcttgtgccaaaaattcagagaaaaggttttaatacgatggtaatcttagtggcatggtggctttggaaacatcgaaacgcatgtgtctttgatggaatagccccaagcaatggcaccattcttcagcacattcatgaggatgcaactttgtggggaatggctggagctagagctcttagaagcctttggccttagcttgtggctcgtgcctcctctctaaatgctaggttgttgttatcgtgttttgggccatagatgagtctctttatgttttttgttttcatcctgcatgaggagtgtccttgtattttggtttgttcccag

SEQ ID NO: 66132 - DNA, 336 bp, Zea Mays
gttttctcaggcaaactctgttctgtagcttctttctctgccactttctcttcaaactccgagggttgtttatcagcaggctctgaaggcccagcttcgtcgctaccttggcccacttcagcctcaacttcggccggttttgttttaacctcggcaattttccctgaaggaatagaacttgaagcttttactgactctagtacatctaatacacttgccatcctttttcttttgggagtcgccataagacctttttgcgccttcggcaccgccacttctgccgaagggcttaaaacttctaatgtttttgtcccttcgattcttggctcctcaatt

SEQ ID NO: 66133 - DNA, 578 bp, Zea Mays
gaatttgggactaagtcacgtgtgttctcgctagataaatttttgtggatcccatttacccccctctggtcgtctcaccggtcattcaacccgacaggaaaactcgatgagacagatatagaggaagacaaaggagagatttactggccacgctactgttgaactcaaccaaacaagcctagagatgcactgcctcaatgtaagcagcgtcaagcgtgacccaggcaaccaagagactcccctagagcatgaaagccatcaccaacggaggagcatcctctgacaaagacgatccgactgacaaaagtgaccttagccctcatcggtacgggagccaacctaaaaagaagaagaaagaaaaatcaactggcaagaagaaaaatgacctcaagccgtgtaacatccttatcgaactccggtaggcgaagccacaatggcccctcactaatgagggtccatcggcgagacgcttgctggagtccatccgagatgaaagaagctttaggactcaaagaagagttctcattttcttttatgagatcagaaaaaggtaaaagacaggaaagcgtagacacaat

SEQ ID NO: 66134 - DNA, 335 bp, Zea Mays
ctttctgttcggctgttcttttgttctttcactgattttggttgttgatctgcatcgccaagcgcatgtgtgctatctttgtgtgctcgagaaagtatctctgtgcacaaggccgaccggttcccttgatgggaagatccagttaaccctcctgttggtttcccttcttttttatttactatttcttggctacgaattcatagatcagagcccttgagtacagtttctgtgacctgattttgaattggggttaggtattgaaaccctgaccctagaccgtgaatgaatcacaggttcatggccgagacgtcgcgtctctttcagtggccaaaaac

SEQ ID NO: 66135 - DNA, 805 bp, Zea Mays
gtcggtggccagggatgactggtgtcgcaggatgtggatctcgccggacttgggtcgttgggcattgccgcgatggggcattgctacatggatgtaggtaaggaagggtaccgttgcattctcctaggagtcctctgcgtgtagctcgtttgaatctgagtaatgaggttggggtttgaattttggtggtccgacaatggctccgccactggggggcatgtgcaccgccgcgtccggctgtttgagtggagaagatgagtggtaaccgttgatccataaaccaacgatcacgattagatagtaggtgtacagcttcgggcaagcgatttgggccatcggttcatgcttgggtggattggatgaaattatggtgttaatcgggtttgggccgttggattcatatcggacaatccggatctgaaacaacgtctactgcttcggccaggggaaccgtggtcgttgatctctgcatcaacggattagatcagatcttcaaataacccttcgtccttttaaatctgcaccgtgggatccatattcgacgatcggtggtgcataccggtttggatgggggttcgatttaatctaggtcgtccgtgttggatcgggcgaccatgacttaataccagttcggtttaaagggaagctaatctggaccgtccggtttctatcgtacagtcccaaatcgaccataccctttcaccgtgcacattttacataagagaccctttgtttataagtaatcaacccgccatccccttctagtgtagattaaatacagtcgggtcctggtattttgcaaaac

SEQ ID NO: 66136 - DNA, 1000 bp, Zea Mays
cgagcatacctccggtgagcctataccggccaggatactcaatgaccagcgctccagcttggctgacacctaattccaccctcggcgacactaatcccccatctaattgcactaatccggaccggagcacgcttgctcacgacgatggcgaaaaccgagaagaaactatggtgcttagggcaatccagtgtggtctagttcaatcaatcgagcctacaagcaacaggagaccctagagatactagaacatacaacagagaggcatgaaccaacctgaggagggctggccacggtgagagactctcacggcggtgttctgactgatttgggggaaatggggaattgggaggctccggtgaacgatcagaggcaagagctggtgctttggatgctcaataacctagcggagctcactggggcagcaatttatagactccaacggcggtggcatcaaatttgaagaaaatgtgccggcggccagagagagggaccgagtcactgcggtgttctaccgtggtattcaccggacctaggcggatggctatcacgggttaacctcgacggtgcaaagcaacgtggtaaacttcctaatgcgtggcgcaaccgaggaaaacgacggcaagtggacacggtgacagggcaaaacaatgccccaagtttatctcctatgcgatatttctcaccctgtgtagttatctgcactccaccgagcacgaatcgtagcgccggcgaggatcatggcacggagtcatcggcggcgagatacagcgaacctgcgatctttttcagtgtactttaccatcagaactccattcaaagcgcctaacagagcatgtttgagagcgatttactccaaaaattgttcagcacctggtcaagcttggtataacaaagttgttcactaatgttagagcttcaattttgccatagtgaccctgaccttatctccattgaatcaaccatgaactgctcccaaagttaaccaaatgtcactgaactt

SEQ ID NO: 66137 - DNA, 385 bp, Zea Mays
gtcttggtgcccctaaaacccgggtgtgacagtctggcctcttaacaagctcgcagacgtcttcagcccgaaggtcgtttgctatcaccaaatgtttccagccatcggtgaagcccacaaataacgggaggtggtagactacaggacttaatctcttcttggggtccgccgatgccattctccatataagtcccaaacagagaatagggatgaggtagtcaagattgtaggcgctagtgctcaactactagcatctatagatatgggacacaagtccaaatttggtgctactcggcaccatcgatatcactagaaaaaaatacatcaaagagatccacttcccaatagtactcgaagatagttcattgacttgacactctctaag

SEQ ID NO: 66138 - DNA, 516 bp, Zea Mays
gccaatcatctgcgtacaatggatcaggagaactagaaaatgtcgatggcttatggctcatgaactccctgtgcttatctcggggtagaactggtggtggtggtagaggcagtggtgcttgctgatgttgctgttgttgttgttgttgctgttgtgccctcctttcctggcgtatctcttctcattcttggcgcagctctcgacgtatctcctcccgctcttggcgcatctcctggtgttcctgctgcatctgagcatgcatatctaccatagtgtcagccatttgttgcatcatcctcatctgagctgcaaccagtgggtcaactcctgctcgtggaggcggtggtggaggatccatctctgctggttgtggctggggttgtctaaatatcctctgagtgtgtcgattggtaggtaaatcaattccaccacccttcctagtattgaccatctgagttagaaacatatggtaagagagaatagtagacaaggcaggtgattacgaatcaagttact

SEQ ID NO: 66139 - DNA, 675 bp, Zea Mays
cttctaaaaccgggtgtgacagtttcacagtttatacggatgcttctcgaattggtcttggctgtgagttgatgcaggaaggtagagtgattgcttatggctcaaggcagttgaggaagcatgaggggaattatccaactcatgatctcgaattggccgtggtggtctttgctctaaaatcgtggaggcattatctttatggcgagtcttgtgacatttacaccgatcataaaagtctcaagtatattttcactcagacggagctgaatttgaggcagcgtcggtggctcaaattgattaaagattatgattagtccattcattatcaccccagggaaggcaaatgtggtggctgatgtccttagcaggtccgaggtttcaaaagtggccttgcctttgatcgcagatctagaccgtttggggatcactttgtgctatgtcggcacggctagtgaggagactcggatgcttattcaatcctccctcatggagagagtgcatgcggctcaatagcaggattgtttattgcaggaagctcgaaagagggttggcgatggtaaaccccgggagttcaccattgatgcgaatgatttggttcgtttcaggggccgtctttgtgtgcctcagaaatcagaggtgaagatggatatcttgagagaagctcataaaacgcct

SEQ ID NO: 66140 - DNA, 512 bp, Zea Mays
tggatgtgggaggaggatgaagaggggaaggaggcagcggtacctacgagagcagtcacagccgctagcgccgaagtgggtcgtgggagaaggagtcgccccatcactggtgtctatgatgatgccgccgcgggcacggggatggatatgggaggaggatgaagaggggaaggaggtggtggtacatacgggggtagccgtagccattggcgctaaattgggtcatgggagagggagccgtctcactgcgggtgtccgtgaggacaccgataggtgctaagggcaggaagaagaggggaaagaggaagtacctatgggagcagccacggtcgtcggcatcgaagtgggtcacaagagagggagccgctccgccgctggtgtttgcgaggatgagcgcgactacttgctgtcaaggcagcaccgcaactatgaagcaggatgtggatttggcgctcgcactcctcttttggctccgtcaaggatcggttcttctcaacgccagtaacttctcc

SEQ ID NO: 66141 - DNA, 509 bp, Zea Mays
cgcgtggagaaaaatcatttcaacttagggggtatttagttgcacccaaaaaaatttaggtggcgtgtaggtgttctaaacctgtgggtcctaaccaactagtgaatttgtgttgcgtgcccttgtcccggatggttgatgcaaaaagatacacaaggtttatcgtattttgggcaagagaaggccctacttccagcggaggatgagacttatattatcttgcacctaagtgctcgtagtaggggatacaagcaagtccagagagggagtgagtttgaggcaagtgccagtatcaggaggtgagtgaggagtgaatggtgaagtgttgttcttagccttcctagagaaggccctcggctcctccttttatagtagcaaggaggaggcccaggtgtgcctgtattgctattgttgtggtcgtcggaggcgtgtctgagccctgtagtggtatggccggcgggatggcccttgtccttggcgctgtctctggtcaagaaaaggatgcccga

SEQ ID NO: 66142 - DNA, 594 bp, Zea Mays
gggccctaaacacgaccgaatgccaggcaaccggattcacacctttttgtctactatatggatcggaggccatgacaccggaggagataaagcatgggtcaccccgaacaagcacatcagcagtccccgacgtagacgaaccaacgtctaaagacctcatcgacggagaccgtgtcttcgccctataggccctcaacaaataccaagctcaaaccaaggcctggcgcgacaacacggtcgtccctagagagttcaacaatgtagacctcgtactcgtccggaccacccggatagagtcacgaggcaagctggagccgaaatgggagggcccattcatcgtcaagtcgaaggcatcccccagcgcgtataggctatcaacgccatctggcgaagacttagagcactcttggaatattgacaatctccgcaaattttttgtttaaaccctcagggcccacacgcccttgtaatccaccaaacaatactattccggcccgcactcttttcctcccggggggtgacatttttaacaagccggagccatgtaatatacccgcaaaatcccccgcaaaaacaaaaactcagacgcaacat

SEQ ID NO: 66143 - DNA, 475 bp, Zea Mays
ttcggttcccctaccgtttcaagtttgagaaagagttcaagaagccatgccaagagtggttagaaatgattgaaactatgtgcaatgaaatccttggcaactacaccaagaaggaggaccagttaatgactgttgtcttcggcactcggctaaaatgaaggctggatcgcgtgatggacgcgctaaattttgaatatccagactatgaaaggtttgagaagggtgtcgaaggtttgaaaaggaaaaggattgtcagtattctaaacacacaagctgccaggttagtaaacgaggattagaatgtttcgaagaaggcaaaatcagctcctgagccgaaggcgacaatctcaaaaagcagaagcttgacatgactcccgcggctgagccgaaggtagctgaggcaagagaagaagctccttcaatgccccctgctgctgaaatagcagaaattttaaaggtaatgactgaatccttg

SEQ ID NO: 66144 - DNA, 1071 bp, Zea Mays
accacgtaagaatcccgagacccagcgcacaacaacattggatcgcgggttagttactgaataagtaagggtctctttagtaagataacctggccgaaggggtatgagcggttgagagccacaggatcgcaccgacggtcaggattagaacttatactactgcgaaccggtacacagtgcgggccgttagatttaaattctctggtcaggattttaatatatcacgatcgagcaccacccgccgatccaacgatctacggctgagatgagctgggcccaaccggtacacaacatctaatcctaaccgtcaatgcaaagatctacggttcaacccttctcgtccccagtcagccccagggcggcggcgcccaagcttcccccaccggcgatctagccagagcaacttcaattcggcgccatgacgcgccatacccgaaatcgcgcagtgcgaaacagtgtatagattaaggcgaaacatagggagtagtccttaccggcgatagtggcacaggactctcaacccacggggataggcgatctgcggtgatgattcagctccgacgagaaattgtgttgatcgcacgagctcctgagcgctaccatacgcacgcgtatactccacggttcttggagaaggttattagccaatcgccgagcgctgattactggcagagacgagctatggcggtggcggctccaagtcctctcaagatccctctgttcatatcacagatagcaaggggagccagcatttatagtcccaggggcacgcatggtggtgtcgtggatggattaggtggttgcaacaatcatccgaggtcttggggaaggatttgttaagatcccatggatctcgcgtggattgattcacggacgagttcaccgcggagaagtgcctgacgatgcgggcccaatcgtcagtcagcgattagagtactagcgcacgcggtgaggagccggccagtgaggcatcgtcgtcagtgacagggcgagtggcgggctggcgaggggagagtgggccgagagatggggccgaggctagcaaatgttggctcaagcgcagggtatttt

SEQ ID NO: 66145 - DNA, 436 bp, Zea Mays
cttcttctcttccttgtcgtcggctcccttgatgatgatctctgcatcaggagccttgtttgctccagtgagatagtcttcaagcatggcgccgcacacgacagacttcacttgcgctttccatgaggcgaagttcgtcttcgtgagcttctcagccacggtgagtcctgcgagcggattgatgttgacggtcgaagaagaactcgccatggcaggagcagatctacacgatgaactctagtgtttgttggctctggtaccatgtgagaagaatcagagggcaggtggaggaacaccgccccctatgttgggtaccaggcggatgcatgttgaatcaattgatgattggaaaagccccaaccgtggcatacaaataggtgtacacagatcacagtccgtaactcaaggagctatatttggtagcttataattacat

SEQ ID NO: 66146 - DNA, 616 bp, Zea Mays
ctctacaatattgctgcagaaagttaattgagttgccatttgaaattgggagtaaatcagcgctaaacctgctctgtcaggcgctctgatgaagcagtgccatggtacagtgtccgatatggatcagactgccagcgttggatcctcatcgccggtgacctccctgcgcaaggattcgtgctgccaccgcccggattcgcgctagagactaacggataacatcgcggggagagggaatcttcgccaccggtgagctggactccactccggtgaccccccgcacttcccctctaccctgcggcttgagctgatatgctcgccagtgaaccgccgttctccggccttgcgtcgcgtgtcccaacctcgccaccgcatcgtcgtgactccctctagcttcccgtcgaccaccggaattactgccacgacattgaacacgtattcaccgcgccagggttctttcttatctccggccgcccgcgatgttcgatcaaattaagcgccaccgtcgaaacctcctataaattgagcccgagaccagctttgcaacatcatcacccatctcgccaccaagaatcactagcaatcgtgcaccagtgagctcgaatttcattttccc

SEQ ID NO: 66147 - DNA, 771 bp, Zea Mays
gtcaattgttcatggaacccaacaatgccaggaaatcgatggagaaaagcatctggtccatgctgctgaatttcatgtggcagacatatatttaatagacttgtgctaccaggacagcccacactagcagaaacaatccccaagttagacgctgaaatggtcccaaaaccttgaagtaaaacgtctggttttactgatgctgtgcaggacaaagcatctgggtctgtattggagtaaacccctaggatattttgtccttcttgtgtattgaccaaatgaggtaaaactgcatcccctaagactgcagaagcttcatagtcatgatgcacagcctgacgattttggggatcatgttgcgcatcgtggtgtttatgttgcataccgccatcattgttgtcttggggttaccattattatttgtagatttatcttccatctcagtatcttgaaaggcagcgtcagtcttgtgaatatactcatcgaggccatcaaactcctcatcttgctcatcatcatctcctttgtctttcgttacctcttgcttataacccatccaaacaccatctttgcatactttatcgactttaaaataaatttcatacaacccttctcccaccacaatatctgacgattctggaatactgtcaacgtcaattactcccactagaatcctgacaacacccatctttctagtgtatcgcaaatcgaccttttgagtagcacctataatagtgccaaccacccaaagtggaagaaaagatctgatctcat

SEQ ID NO: 66148 - DNA, 1184 bp, Zea Mays
ggaagatgtgctccttgatcttggccttttacaggtacttcttgagcgcctccttgtcgagtacgccctcggacttgtgcttaccagaggtgtactcctgcttgcccttgcgccgactagagtggtggtcatgcgggccagcctcctgcttgccctacatggggcaactggcaacaaagtggttggggttgccacagttatagcatccatcctttgaccagccacgccgctggatcgtacgattgttgtggaaccgtgtgaaccggctggccataagtgctagctcctcatccccaaggctctccacctgttcctctgtgatggtcaacaaagaagacaaatcaaacatagcagacgaggggttagaggaagcaccacctctagagactagggccatggtgggtgcaccagggttctcaatcttggcccaagtctagtggtcaatctcagtggacttaagcttgctgaaaagctcatccacgatgagagtctcatagttgggcatcaaaatgatcgtacagaccttcaccccccaaaccctccgatctagagcatgtagcaatttcagcgctccctcatgatcgtcatagggaagctatgccttgttggcacacatcttgttcacgatggactggaatcgagagaacatggtatcgatcgtctctccggccaactgaacaaagttctcgtactatcactggtacgtctcaaagagtctagttttcacatgatcattgccctcatggaatttcgtgtggaccagatctcgtgagtcgtagccaaatgtctaactcgctcaaactcacccagcgagaggcatgagaacaaagtattgcgagctttcttgttcgaatcatggaactccacttgagttggagtgaatcgttcacttgcagcattgaacgcagcatcgaggcaaatctcccaaactttgcaccctatgctctaaagatatgtcgacatgtgatgttctagtacgagtattttgttccatcgaagaacggtggcttgtcagaaccatgtaccatgtcgcctatgtggatttcgaaccgattagggaatggaaatccttaactggctccgatgccaatttaggaccagtgaggcaaccagagggggatgaatgggagccactgaaaaattctccaacttgagaaaacaacacttttgacttgattccctaa

SEQ ID NO: 66149 - DNA, 619 bp, Zea Mays
tgcaaggaggattgcagtcggatgccgacaaagatggatgtgactagtggtggacgcaggacaaaatatcatgtgaggccaaacaaaatcataagacatctagataagattgaacagatgtaacattgtatataaaaactagtgatcgtacaatagtaattaaaatttgaaagaagagaaaaatatgaacaaaaaaaaactatgtatcgatgttgtgatggctgaacgacagaagcgcgggcgtgcgagcgtaggcataatggggatggacgggtggcagcggcattggtgcggcgacaaagcgagtgagcacgaaaggggaagctaggtgtggtggcggcgttggacgacaaggtcggggtgagcacaacaaggggctgatgatgatggagtagcgctcctaccttgtgtcgattggatacaatgataatagaacagaaacggattgggctgttttagcgagccgtggagttggattgttggggatggtggatgtgtgctacagttttgccttcatatacttattatatttttctaatttgtatcatattcaatgtatatgtaagaaggcaaaaaaaggtgaggccacgaccctctttgcccaccccgtggctccgcc

SEQ ID NO: 66150 - DNA, 568 bp, Zea Mays
tctgacgaaagatggggccctccaattgtgattctcccgttgctgcctaactttgacccccacctttttccctctcttttaaggttggaaagaagatccaaattattattatacaacgcacaaaacattgagggaactactgtgtgagttagcctggtgatgagttgctgccaagggcacatttggcagccctcctttgtgcgaggacatttgttgtagctagggacggagtcaaaaaaaattatgatgggttgaattaaagcgctagtgttcacatttttttaatttcgaaaaggggctttggtaggactctacgtgggttcggaagtgttagctctgtcccctgtaataggcctggtccagttatgtgttctattaatacactacccaaccctattctacccatcgtcaccatccaggccgctgtggccgcttcacaagagcgtcaacacgccgcgtctctcgcttgggagcaggaacgcgctatggggcaggccttgaccacttagctagccactgtccagcgtcttctccacgaccgcgacacaccgccccctcccgttgtgcc

SEQ ID NO: 66151 - DNA, 675 bp, Zea Mays
catagacagacttagttaaaaaggaatagttgcttaatcgggttttacaatcattcacaaccttctactgcaagcacacacccaagagaacacacatgaggagatagtttattcacaattacaaattgtactactttaatgacgttggttacttagtagtattagcagaaagccaaagacatgacattattcattttgtttccctaatttataactgcacttgctaactattgatttagctaagctacttattagaccttaaccaatttagttcgctaacttagtgagacgtgtactacttacttatatataacccgattatattagtcacttattattattacttatgttcacttaaaaccaaaacaagcaagcgatcactcaagtcaaacacaatagagtagagcaatcaatcacttctaacatatttaggacaacagcacaatagtttttgttttaatcataactcttcaaatattagttcaaaattatcaaactaggattttctggaaagtttaaaaagtgttctacaactttgatatttttacctcagcatgattagactcttagcaaggccgaattgcgtaaacacaacagctctgtccagatttggacagattcagacttgcgactttaataatccataaccacaggttcagacatccaaacaaattg

SEQ ID NO: 66152 - DNA, 598 bp, Zea Mays
ggaacggtgcggcataatcacaggtaagatcgctcccataaggatcaccattcgctccacatcgagtagtagtcctccgattgagatttggtgtaggggagtgctgtggtggctgtgcgccggtgagactccgtcgtggggagctcctggcgccgcctcgggccagcgtgtgaagggagaaggtgtgggtaccgtccgatccaacttggacagatgcgattagacgagagtgtaaccattcgtgagattaaatctgagccgtatgttatccatccgatggccatgggtaggtgcttggcgtggcgaatcttgggttgtcagtcgcagatccaacgagcacaattgcgtactggctcgaggtaatgcagatctaatccagaccacacgcagttgatccaacggccagaatcctacgaaaccacttcgcgtgacaaattcgcataagagtccttatgtttttacagaataaaacccgtcatccatgcggctgtagctctgagtctaggaaatttttatatctcagcccctggcttttccagaatttggcgcccagtccagggaattagaaatccagtaaaataattggaatatgattttt

SEQ ID NO: 66153 - DNA, 389 bp, Zea Mays
tattaaggctgtaagggtagcctgtcgttctgccttcgttcaatctggatcgtccatcgctgttgttcaatctggatcgtctatcgccacactaagccgcaccctcctcaccccgccccatccgcgcgcgcaaaaattcgacacatgttgacaataccacgagctgattacacgagctgactgcttcctctgtagcaggaaggtttataagttgctaccacaacctttggctggccgatatggtacaatatatttgtgcgcgctagcctgtgtgtgctgcgttatttggttaacgtatgaggcccatctatcaattaaattctataaggcccatctaggaaaaaccctagagacgttatccccgcaggcagtcacgcggtggctctcat

SEQ ID NO: 66154 - DNA, 1746 bp, Zea Mays
agcgttgatagcacgacaatcaacacacatgcgccaagagccatctttctttgggactaaaacaacgggaactgcacatggtgataaagattcacgaacataccctttgtccaaaagctcttttacctgtcgctggatttcctttgttttttcagaattggtgcggtaggctggacgatttggaagcgaagcacctggtaccaaatcaatttgatgctcaattccacggagtggaggaagtccagctagtatctcatcaggaaaaacatcttcgaagtcctgtaagagatcaagaacaacactaggcagtgatgaaggtaaatcgttggttgaaagtaggacctccttttacaagagcacaaagaatggggctgtggtgtttctcacttctctcaaataactcttgctcacaaagagacactcactgtggtgtggctgtttaggattggcatgaggctttatgttgctggatgggttagaactctctcccttacttgggttgggggtctcactcaattttcttttgtctgattcctctcttttcttgtgagccatatctgaagtatgtatctcctctggagataatggaacaagaaccaccttcttgtcattgtgaatgaaagtgtatttgttagaccgtccaaaatgcaccgagtccacatcaaattgccagggccgaccaagtagcaaatggcatgcttgcatggggacaatatcacaatccacctctccatgataatcaccaatggaaaatgacaaacgaatcatggctgaaaccttaactgtcccagaattattcagccattgcatatggtacggatgtggatggcgacgtggctgcaaaccaagcttctcaacaagcaaagcactaacaatattattgaagctcccaccatctatgatgaaacggcacacttggccttgcactttgcatcgggactgaaataaattatggtgttgtccttgttcagctgcaacaaactgagtggaaagaactctcctaaccaccaaacaaggagatggtgtattcattgtacaaggctcgaaatcaggaaaatcaggaagcaactcatcaaaatcagcactagtaatctcgtcagaagatggagaaataacatcttgtaacatgtcattgtgagcaaaagttggaataggttgaatcgctaaacaattcagaccaagctcaaatgtaccatcctccgctgaatactcacaagtgtcaagattaaaatctgcaaatacattggtaaactcgtcctcctcttcactttgtgaatcataagaaccgtcagaaagggcaataatagtatgacgattgggacatttagcttgtttatgcccatgaccaccacacttaaaacactcaatcttgcttgtcttgcgttgggtggctgcagtagaagaagtgggtttatttgaactcacagctttacctttcgcatccacttgtttggatgaagttgaaatagatctatttgctccacgatatgaggatttgggcattgcatcttcttgctgttgggaatgacgccatgagacattgtatttgtaagacatagcaatttgcctttcagccctctttgcaaaatgaaccaactcagtgagacatgtgtaatttgccatatccactttatcagcaatgggtttattgaggcccaccagaaaccgagccattgtcgattcctcagcctcagttatctctgtacaaagtaagcacatatccaattcttgaaaatatgcatcaac

SEQ ID NO: 66155 - DNA, 585 bp, Zea Mays
cgcccggcgatgcccttgggcgagtcatggctgtgtgtcccgccagggatggcctcgggcgagtcatggctgcctcttccacccgagcgtggtctcgagcgagtcgtgactctgtctcccacccggggatggcctcaggtgtgtcatgcttgtgcatcccacccaaggatggctcaagcgagtcatgactgtgtctcccacccgaggttggcctcgagcgagtcgtgactatatctcctgacataggtttgcctctggcaaatcgtgactgcttctctagcccgaggttggcctcgggcgagtcgtgacagtgtctcctacacgggattggcttctggagagccgtgactacatctcccctaaggttggcctcaagcaagtggtgactacgtctcgtgttgtggtatgacctcgggagagtcatgactatgtctcctgcccgaagatggcctcgggtgagttgtgactgcctctcccgcccgggcttggcctcaggcgagtcgtgactatgtctcccacctagggttggcctcgggcgagtcataactgtatctcccgctcggggatggcctcgggcgagtcgtg

SEQ ID NO: 66156 - DNA, 312 bp, Zea Mays
ataagttagacctagtacgtgaagccttaagaaatagatgggtagctaggtggctatttatataggccataaaggctattactactattagaagggatgctgtagaagcacccgaaaaagtagttaggtctgagaagacgactagaatgagcatgcatcatgattgtcgcattataattgtctcttgtgcatcaacatgcttctctcacctttattccaataataaaaacttatgaataatgtgatgtactgctatgttagaaatgccttaccttgtgttggattggtaagtcttgttaggtcgtgttatgt

SEQ ID NO: 66157 - DNA, 429 bp, Zea Mays
tgtcgagtcttgttgctggtttaggtcgtgtcgtaatcgtagttcaaccgctccgttgatgttatttagttccgccgctatcccatccacctttcccagattacaagtcgagacaccacattactcgatttgccctcgctagccgccttgtgtgaattctcgccacgctagccctagattaggttgcaagccgcattgcattgcagcccctccttgtttcatcatctggcgcttacatattaattataccagggaggtttgtgcccctgtgctctatagccgccgctatggttcctaccaatttgtgcctggaaaaccataacttgaggtaccttccttaaaacgggcataacttttcgctcggtgctctgtttgagctcaaatttttacatcagattcctgactccattctggggtgacccaaactag

SEQ ID NO: 66158 - DNA, 316 bp, Zea Mays
gcaatcatcgagggccagctatacaagaagggggtcagtcaacccatgcttaaatgcatcaccaaaaccgaaggcgtccatatcctgcgcgaagtccacagcggaacttgtggctctcacttcgggcctagggccctcgctgccaaggtgatctgtcaagggttctactggcccgctataatctgcgccgtgaatcgagtcacgaggtcatgtgaagcctgccagaagttctctccccattcaagcaacccttcgcaatacacaaagcagattgcccacacatggccacttcaacgctgggggttggatattgtcg

SEQ ID NO: 66159 - DNA, 393 bp, Zea Mays
gtagggtatagtgatcaccctgagtcgtgtaagcgtgagcatgtcgcaccgacttaaggcgtttctgacttaagccgattgctccgttagtagggtatagtgatcaccctgagtcgtgtaagcgtgagcctgtcgcaccgacttaaggcgtttccgacttaagccgattgctccattagtagggtatagtgatcaccctgagtcgtgtaagcgtgagcatgtcgcaccgacttaagacgtttccgacttaagccgattgctccgttagtagggtatagtgatcaccctgagtgtgacgtactaatttcgagttgagtccgacctaggtcagttgttgatcaagaacttgtatgccttggaaaatggaagtttttattgatgatgaaaccttct

SEQ ID NO: 66160 - DNA, 500 bp, Zea Mays
ctatcctggtgggataccttcagcgctgccgtccgagatgctacatgggcagaatttgaagccaccttccgagaacatcatgtgcccctaggaatcgtccagctcaaagaagatgaatttctagaattaactcaaggagggagatctatcagtgaatacatccacaaattcatagaattagctcgctatgcgccttacgatgtcggcacagaagctaaaaatatggcccgtttcttgaaggggctaagaccagaactcaagactatcctcgccagccaagatttcctcagcttctcacacctctcaaacaaggccatacaagtggaaagggctagggaagaagaaaagggtcacctcaagaggaagttccaagtcctccgagctcagcagcaggacatgcaccagagagttcgatcttttgggttcccacccaagggaccaagcttcaacaagccagctaggtccactccatcacatttcagttagcagggtcaaagttc

SEQ ID NO: 66161 - DNA, 861 bp, Zea Mays
gaaaaaggtgcaaaggcttactggatgcatggcagccctaagcaggttcatatcaagactaggcgagaaaggaataccattttacaaattgctcaagaaggtggacaagtttcagtggaccacagaggcacaggaggctctagaggcactgaagaagttcttgaccacgtcgccagtactcaagccgtcgcgcgcgggctacgcctggtcagccggcggaagatctgctcctatatatctcctgcacgactcacgtggtaagcaccacgttagtaattgaacacgcggaggaaggacatgcataccctgtgcagcatccagtctacttcatcagtgaagtcctcgggccctcaaaaataaggtatcctcaagtccagaagctgttgtacgcggtacttctaaccgctcacaagctccggcactactttgatgaccacaaagtcatagtagtcacaggattcccaataggcgatattctccacaacaaagaagctattggaaggatagctaagtgggcatgcgagctcgaggctcacgacatagagttctggccccgcatggtgataaacactctggcattggtcgacttcatatcagagtggactgagcaccaggtcccggatagcccagaagttgctgaagtgtggagaatgtactttgatggctcgttgaagctgcaaggagcgggtgcagggattctctttattgctcccggaggcaaactcaagtatgcactctagctgttgtttccagcatcaaataatgcaacagagtatgaaacattggtccatgggctgagcatcgcggtatcactcggcatcaagaagctgatggtatatggcgactcgctggtagtcataa

SEQ ID NO: 66162 - DNA, 413 bp, Zea Mays
ggctatgtgcgatgtgtgtcgaagagttaaggctgaacaccagaggccagccggactactgcacccactgaagatacccgagtggaagtgggaagagattggtatagattttattactggattgcctcacccccgaaaggatatgatttgatatgggttattatggatagattgaccaaatggctcatttcattccggtcaagactacttataagggatctcaattggtagagttatatatgactcagattgtgtatttacatggagcatcgaagaagatcgtttcggatagaggatcacagtctacctctagattttggaaaagttttcgtgagaatatggatacaaagttgaattttagttcggcctaccaacctcagactgatggacaaactgaaaggactaatcaagta

SEQ ID NO: 66163 - DNA, 556 bp, Zea Mays
ttggttttttaagtttggtttctaaaaattagaaccgaaattctaatttgaaaagtgaaaattgaatctttcattaaccatatagtttagttcagtttttttgtttaaccaaaaaaccgaggggcaagggcgatggcttaggcttggctcaacaggcgtgatggcttgttgttgctcatgatgaaggtgatgacttatgcatggcaacgaaggctacacaccaagcatgacatctagcggctatatcgtgacgagggtgggctgctggtggtggctggtgggcggcggtcgccaggtgatgagggtggctagtgttcgcaatgtgagggctattgcgtctgtgattgaattacgtgagggatttgccgctgtggtgtgacagcatgagggtatgtgcttcccgcggcatgcagggttgagtcaccctggtggcatgaggctgagaggtgaggggctagcgtagtcgcatgaagggctaggctcgtgggattgagatttgagaaggttgcaagcttgtatggctagcccatgggtaaaatggtggtgcacagttggg

SEQ ID NO: 66164 - DNA, 394 bp, Zea Mays
caccaccaagcgaagggcaataggccacattacaatacaagtcgtagattacacacacacagcgaaggatcaccagtctcaccgcacaaataaatacaattgcgccctctactaccgcacgacaagcgagggcatcacacattatagatcggctcaaccttcgggataatacccgcctcccgataattaaacaacattattttcaattcctcacccgcgaacaaattccgtaggtccccctcaccaatactcgtcccaaccgccgaagacagcaagtcacgttgattaccccgatctacacgaagacgagttcgctccaaccccatctgatggcgcctcccacttcgcgagctctcaccaacactatgcttcgccaccacttttcgctgacggc

SEQ ID NO: 66165 - DNA, 372 bp, Zea Mays
cctaaatagggtagaactaggaacaatgatcatcttaccttgttaggtttgaggggagtccaggagcataatgaggcgatatgggaggtcaacaattatttgaacatcactataccaccgatgaaaactctgacgtggactacaatgtgctagtaccttgacctctagcacatccaccaaggctccataactctaggctagtggatctagcacaacaccacctcctccagtgtcgataacaaccaacaatgggatgacaactttgttagagcatatgatcacacaacaacaacaacaaattgtaccaaagcaacaatggttacctagagagcagcgaaaaatgttggttgatcagctatgatgtgaggtcaa

SEQ ID NO: 66166 - DNA, 686 bp, Zea Mays
gtgttgttgacatcattgtaacgcacccctaggccagtccccccaaagcccaccatcgccagcataggacgttcatgtgctcgtggtggcctattcagatgagcacctcactctcaaaacctaggctgaaagaggagggaggccctcccttataagggcaccatgacccccttgactaggcgaggtggtactaacccagggcgtgcataccggtctctcacatcccaccccctaaaaggcctaaagctctcccaggcagcagcgacaatgtgagctccgataccaattgtaacgcaccctctaggccagtccgcccaaagcccaccatcgccaccgtcggacgttcatgcgctcgcggcagcctattcagacaggcacctcgctctcaaaacctagactgagagaggagggaggccccccttataagggcaccacgtcccccttggctaggcgaggtggtactaacctagggcgtgcataccggtctctcacatcccgccccctaagaggcccaaaactctcctagacagtagcggcaatgtgggctccgataccaattataacgcaccccttgggccagtccgcccaaagcccaccatcgccagcgtcgggcgttcatgcgctcgcgaaagcctattcagacgggcacctcactcttaaaacctagcctgagagagggggaggcc

SEQ ID NO: 66167 - DNA, 487 bp, Zea Mays
gtcttcctcatcacctccaccacctgggggcctggggccgtctgcgtcgcctaagcagcttgcactgcctggaactggcggacctgctcctccagtgcctgcactttcccctccaaacgcttccctttctcctctgcctcgagctcaagctcatccagtagcttgttccgccttgcccacatctcctccctgaaggcgaggtcctcctcctgccaggtgagatcggtcgctcgtttctctagggaagcttccctcaccttgagactttcctcggcacgagcaatgttgttggccttgtcggcaagttcctgttgcagcttctgcagcttcgcctcagccgcagcctgcttgtcctgctgtttctccagcaccgtattataagctttcagcttatcatggaacgctgtgatggcctcctccctttggtctaagtgttccttcttcttgaccaagcttttctccttccgggtcacctcctgctctcggt

SEQ ID NO: 66168 - DNA, 858 bp, Zea Mays
actctcacctacgggtacatcatgaccaaggctagtaggtacaagttgatcaaagtctcgatcgtgtagagcactgtctctaatgaagttatgcaatgccatacaagcaataattatcttggattgtttcctaagcgaaaatgaagggagacttagaagaattctccacttcattttaagcaccccaaacgatcgctctataacattacatagcgaagagtgtgcaaagttgaatacttctttgctaccaataggttgcctcgcattttgccattctgaaatgtggtacttctgacccttataaggtgcaatgtatccctttctatttggataaccagaatccacaagatagtatttacctgcacaaacaaaaatatcaacttagatacatatgacataaattaataacgaatgatacaatagtacaagatagttatataccttccggtggatgcgggaacttgtccgcataagttatcaaagtatcttgtaatactctagtgtcatgcactgaacctggccaacccgtgacaacaaatgtgaacctcatatcgaagtcacaaacggccattacattctgtgatgtgtaaccgtgacgaccaatatattttgcttgctctgtggtcgggacagacgcgggaaagtgacttccatcaatggctcctatgcaatccttgaaatggggccaaaatctagtctctcgcaaccgagggtgaatctctatgaaatttgtgtccttgggcttgattacgttagaagacatcttatatagtgcattaaggacttcactatacttgcgactaatagtttccaaagagtgaccaaacttattccttatctgcctaaatgattgtggac

SEQ ID NO: 66169 - DNA, 654 bp, Zea Mays
tgtattgtcatgtagagttggtgtttgtttgaatagaaagaactgcagctgtcttcacaaaaaaggacaatattcgaagtattcatcttcaaagagactaccggtaggggcaaccatatagcaccttaaagcatggcaactatcatgtcctcttgatggataacatagatacaaatgacgaaatcaacaaattttaccaatgattaagaaatggatcccttcagaggcattgagacctgggacatatgcaaactcattggaaggtgcagaatccaattggagaatcaaatttcagaggatcctaattaatcatgcaatacgacctggatcatgttccacctgtcctggcagaaactgggaaggatgaagcctctctgcagacgcggtcaacaaaccagttttcctagcctccgtcggacggggatgcggcggcctgagcatgaatgactgagggagagcaaacaatgcggcggcaagggttgtacacaacagcgagttctcaaggaaggcgggagcgagagagggaggacgcgtgagctatttttaacaacactcttccataaaaaccaacatttcactgttgtgaaataaaagttgggtcagccccgttctttagcaaaaggctcccagttagcggctacaattccactaaac

SEQ ID NO: 66170 - DNA, 656 bp, Zea Mays
tccaggcctgcaggacatgtgagaggctgtgcagtgggctagtgagagactcaaacagataaatatgccgagaactctctcgccggtggccctggacctgaagcgaagcggaccccatgtccccatgcaccccaccaatccatgctcgcgtgccattaagcgcgaccgtggagtgaagctgcgggctgtggctttgcttgccctaccatacctgccatgccatgtccttgcatgcttcatgttgccattggcgcgtagctagatacgtacatggcaggcaggagcagagcaggaccggcgtccgggcgggacttggactgttcctgctgcaatcacacacagatcaagcactagagatgtccccaacacggggagcaagggaaacgagagagatcagggacggggggactcgtccagactccagagaccgttgccatccctagcccacgcctgacgccccacggcccgctccgatttcttatctttctgactgcaactaccgttcgttgagaatgagaaaggggtgaaatgagtgaacaccttttccttagactagactcgcatcccctggccgtaaccatggcagttacccactggaggctggagctgtacgtagaaatccttcgcgccttttgctgagacacacacacacacac

SEQ ID NO: 66171 - DNA, 502 bp, Zea Mays
aatatagttggtagatggggtagggttgtactttggaccacctacccctgaacgggcctataaatatgcttgtcctgtagtcggatgtgacacacataacgagaagctacagttcacaccaatcgtcttgccgccctctcgtgctctgccctttcttgtcactgagtgtttgggtccacctgacagctcgtcagtgcctaacatttggcgtccaccattcgtgtgacgaagacaacacccacgatgcctcccaagaaaaacactcgcctcagctcaccatcaaacgacgaagacgtcagggttgccctcgccgctaagaaaggcaagggcgaggccgctaagaaaggtcaggtcacccttgcctctgaccactctccaccacctaacccgaaggcctccaccgacctgcatggcgaagcccttactgcaaagcaaaagcaaaaggcagtaaacactgaagaagaaggcgaagtccacaccacaatctcagagaactcgcagg

SEQ ID NO: 66172 - DNA, 549 bp, Zea Mays
ataaatttctaatattaatttctctgtttttaatactctcgggactgggcgtcaaattccagaaaacacaggggcctcggggtaagttttccgtgacacagtgaatagggtgctctggatggcgggctagttatctaataagcgaagggctctttagcaaaacggccaatgaagcggtatgggcgagtctcggccgttggattagacaccgagggcccagattaaatccttattcaaacgaaccggtactgaatcgcatccattggatccgaatcaaacggtggggattttattactctagacctatctctgtccgtccgatccagatcaacgatccagattgaaacgcggcgaaagggtacgcgggatctaatcagggttgttcatcaagatctaacggtgtctgtgtttccccccaatctctccgccagcgacggcggcgccgcccgacttcacggcgaagctcgccggggaaatcccaatcaaacgttccagtgccctagagctcaattaaaggctgctacacgatgcttaggggatggcgaacac

SEQ ID NO: 66173 - DNA, 558 bp, Zea Mays
atcgtggccatcagaagctgttatggtagacaacgtctagctttttagtgtgttttcgtaagaatggttttagtgaaaatcgtctaaatcaaacataaacataaaattgagtcgttacgataagaaaaatctgttacttcccatatcgtaaactttattgattcctttattttcttccacacgtaatcctcacatatcaagattattttcgtagccagattttcaaaaaaagctccttaaaaaaatagactaaacagaccaaatttttccgtagcttatcgtagctagttgttagccagccagtagctatgcagccctgttggaccaaaatcggagcaattattttgagcattgacctgatctggtacaagctagggaccctaaacagtagagcatacttttcgtttcaacaatatgctgcgcgttcatggaccaaaatcggagcaattaaattgaacattgactagatctggtgccctaacgtgtggtacacgcacacttgcacatgcatctataaaaaattgcaaaactaataatttaggctagatttttttaccg

SEQ ID NO: 66174 - DNA, 476 bp, Zea Mays
ggctgttaacttcctgtacactgtgttctgcttcggattcaaaattgagagggtcagtctggttgggaacatgggtagaaacctgtggacatggaatgggtggtacaaactgggtttgaccgaatgacgtttgtgctggaggacccccatgattcatcataccaaaaaatgggttccatggactacgaaaggtatatgtagatgggtcattagctccctgggaccaggtaggattactcatatgggatgtaggaatagtaaatgtagaaggatgggttgggtctaaaccttggccctgccacatctgaggatcccacatgggtgggggaaagactggttacctgaattggggctggcaccagtaggtcgaaaaggtgtgtttgtgttgttgtcagccattctggaatgaaatacaggaatacattaatttggacaacacataacaaacttgtactataaagtataaactttaatgc

SEQ ID NO: 66175 - DNA, 1008 bp, Zea Mays
tgagtaggatccagtaaatatttgattatggttgctattacaaaatcaaagctagtttgtaggagatcaactttgctatagatggattagtgagttagcacacaaaaattcgagaacaaagcccagcaatttgctcggtcagatagactgacgaagatagccatggtacggtgacaaaaagatcttcagatgcagtgaacttgccaccggtgaactccacaccgcgatcctcactggcgtcgcgattcgtgcgccctggtgtgcggataacaactgacagtgaaagatctcaacacaaggaagggttggagccttatcaccggactgttcaccgtgccacttgctgcgcgattgactgaggtgtccttgccggagttcgccacctttcgtagccgtgccacgtacttagaagagttaccacatgcaatagatcattctaggtagcctatccatcgcctgagacattgccctggtgaaagccacggtagttcgcgctggtgactcacccctctctccggccgctagctttcctcttccaaattcggagccaccactctcggatgctataaattgagtgcatagccagctccgctaggttgttacgaagccagagcacccactcccgcctccgatcgtccaccgtagcgccctaatttgggattttcccaaatccattctccgtgccgccgtgagcaccccctccatcgacccactatcctgtcccttcacccatcttcctagctgccattcttgagtcctagtatgttgctaaagcttatcgcgcccccaatttgtatgttactgcactgtgtcgttgggaacacgtcgaggaagtcgctagctccgcggttgtgcatggactgagctctaaaactgcgtccaggttaaattagggatttcccagtggatcaccaggggtggaattaggagtagaccgacttagggcacagattgttgcgtattacggcctatatgagttcgctggagagcgcacgccgtcgtccaccg

SEQ ID NO: 66176 - DNA, 733 bp, Zea Mays
gcgctgttgaagctcaccgggcaccgaacgcgacaagtaatcaactacaccgtcgacaattgctcatcggagtgcgcaaatcgccgcggatccgcaccgcaccgtggccagcgccgtcgagtcaacaattcgcggtaataaacctacccccaccttccttaagccttctgcattgtgtagctgagtttaattaggaaatgggggtgtgggcaagggggtttagcctcgccggccatggcacaccgccgtgggggagctccgctccgccgtgcgtgggtgccctgttggggcagaaaacgtgcgtcgtcggattcttaaagaacggtcgggattacagttggcgtaccctttcgccacattggttgggtgccgttagatcgtgatcggacgacaccagtgagatcggagagaattaaatccgagccgttgatcgcggagtggacggatcgcgctgcataccggttcggcgtgatccagatctaatcaggggcgtccaattttgctcggacggtccgattcttccgataccccttcggcgctgcagttttgcaatcgtgcccctgcgtttattataaatagaacccgccgtcctatatcactgtgcgttgtgtcttaggagttttactccgtagcccctgggtttctctagatttgaggcccagtccagaacctatttaaactgtataaatgaattagaaattgaatatttaatatgaaaataaatgctaggaat

SEQ ID NO: 66177 - DNA, 580 bp, Zea Mays
atcaaatcatatctatatcttacttattagaacatgcggtagtagctagcgcagacagcgacacacacagccctaatagcttgttaataattagcggcgactaacaaccgctctttccgctctcttcccagagctagctagctactgtaggtttgtgtctgtatctcgtcgtcgacgtcgtcatctttcgccggcattccaatttccagctgctgttcggtgcacttgtcgtcacgagttggcaagtgcggtgaccggcgcgcatgcacgcgtacgtgtgagtgcatcggatggatgaacaacctctggccggcgcccggcggcaggcaggaccaggaggcacaggatgtgatgacaaagataagagagctagctaggttataaataacacatgtggttgccatgcatactgaatctgatgcatgcccattaacaattaagaaagccgcgcgcgcgcggtgatttgaacagatggcacctcgcgccgggacgagacggccggaccgaattttttgtattttgaccatttttcggaaaaaagaacacgtttggaccctaaaaaattttaatagcatttttg

SEQ ID NO: 66178 - DNA, 690 bp, Zea Mays
tggccatttggtacgatagctgataacttgagtcttcgcatctttacgataagcaaaattatagcatccaaagttctcgtgcagcccatcctctctagcttttgtctggtaatgaagctcatgtgcccggcagaagccttcggcaagtggttctgccccttggcttcggagagcctagatgtagacgctaagcctaacgttggcgttaggagttagctggtggagataaatcccaaacttccccaaaacatcttcaatcatctcattcaaaggaaatcttaatcctgctttaaagaagcttttaaagactaccacttcatccttttctggcttcggagtaatttcctctccgccaaagtgaattagttcctttttggcttcactgaaatagcctaacttcatcaacttagtcatatcatcttcagtaacagtggacctcccaaacttcaagtggctgggtttagattcaccttcttcagcaccaacctgctcaggttcagcggcaggtgcaccttcatcagaaacatcctctggcgctaccagccccgaccgtttcatcacttcggaaatcggagcgatttcagcagcttcagcttcttctctgtcacgtgtaaccctggcagtggagcgtacccttgccatttgatgatggattcctcacaatttttgatgaagttgttgactttttta

SEQ ID NO: 66179 - DNA, 1305 bp, Zea Mays
gtggtctggtctccagcgagctacacctgcccgtgcttggctccttcccctcacattcctctctggtgagcttatacccttacctctctctctctctatgtgcttctttcccagttctgtcccaacctttcattcattcttcaaatcctaagaaattatgtgaaaatcttgtgccccaatgtgtctctagaacacttgtgtataacctttgcaggtaatcttctccctttgggaggttttacatactaaaacagccatttcaccctctaacccaaaccctgcgcaccaagtgttcggtgaaatgccctaactagcaaaatgagctcaaatcgaccccattttttccaggacgctccagctactaccagtacatcacattccaaattgcacacctatccaatactctaggcacctgttacacaacctattcatctttttgctaatccttttcgagccgggtgccaaaattatttttcctcaaccaaacttcaaaccaagcactcacttcactcatttccgtacctatttacctatcagagaagtgttgactcattttcatgtcatgtcatgcccgtttcgaatttcaaactctatgacacaattcaccattcaaacaccgttctcgcactgtttgacctctgttttatcaaaactctcagtttttgtgtcataactctctatgcatgtatttagtcacatttcatatgcttatgactatgtgaataatctatgctcacctcttctgtcatttcagtgtgcttgcctgtccgtctacgtgactcctgtcctgcctagttcttctctctcaagacgtacccaggtagctattccattctaaatctttacatacctactgctcttctgctctcgcttaccttttctcattatcatgcagcatgtcagtagtgagtgcaggattgtgcagacgaagaatgtcacaccgtcagggggaagatgaccaggaccctcctcgccccttcaaacagtacaagggcaaggcagtctatctcgagcagctggggagcaagaaaaagagatggttggacagagccacctatgtagaagttgtcgaagaagcaatagcagatcaggtagagcagggaggtcagctgaggatcgcctccgaccagattgctttctgagtccgttgcctctcgtcttggcctcgctttacccctgctcaatccactccctcagacccagtcaccactccaccttccactatgctagctcctaccactcttgagccttccaccacatcagttgtgcccactacctcctccacaccagcttccactgcccccg

SEQ ID NO: 66180 - DNA, 644 bp, Zea Mays
tgacggtgagtcaccggagtgacctccagctcaccggcggcagagatccttttcctcgcgacgttatccatccaccacgagcgtgaatcttgatgccggtgacacgaatcatggcggggagtcaccggcggtgagatttttctgccgcggccgatctgatccacaatagagcactgtaccatggcgaatggggttcagtcagtctgacagaccgtttttgagcttgtttcctcccaatttcatatggcaacatgatcaacacataatagcaaaattgtagagcaatataccatctacaacattgctatatggtgttaccacaaaaagccaatggatcatgcttgaaattgggcttgaagttgatgtcagtccactgtcagtctgatttcaagctttaagtagtctgacagtccaactttgggcttaattatctccaatatcttcttaacaactgagctcacattcttaagcaaagttgttctcctatgattgggctacaactttgatgtggtgacatagggcaaagaccctagagtttgaaagttacaaggctcaaaagttgagcccacaaatctgaaattcagacttagaatggaatctcaattggggtcctttttgcaaatgaatccaaaacttagggtttg

SEQ ID NO: 66181 - DNA, 325 bp, Zea Mays
gttatgatgttatttggtatcccaaatctgaatattatgtcttgtatgaattacactgccttggctgaagttagagaagcaatgggtttgtactctatccatttagtgaatttgtcgatggcaaccaatacgtgagtataacctccctgagctttcttgaagggtctaatcatgtccaatccccagcatgcaaatggccatgtcactggtatggtttgcagctgctgtgctggtaaatgctgctgctttgataggaattggcaggcttcacatttctgaactaactcggctgcatcaccctttgctatcggccaatagaaaccgg

SEQ ID NO: 66182 - DNA, 1046 bp, Zea Mays
tgagtctggaggaggccttgccgcattgaggacggttgcttctgggcagtaggggtggttgctctggatcattgccattgtgagctaacctggccgccctcctcgcccttccctcctccattactttaatcccctctcctctccattactttaatcaccacctccgaattaaaaaaaccccaattaacaatcaatcaggtaagccccagcacggcagcacgtaagcgctaatagtctaatcacaaaagagggattagccactaattaagtatgtcgctttgcttttggttggcatcgagggcacagtgaggcgccgtgtcgcatggacgggctgcctcctctcgttcctcgccattgtttaatcagcctcttctccgctggtacgcatagatccagcacatgctagctaaggcaggctttcatcagatcagatgagctgatgagcatgagctctcgtcgacaaacacccggcccttggcttggctcctctcttcggcctttctttttcatctgacaagtgacaagtgacaggaagcttgcttggctgtgatgtttacttgtatttaggcctttagggttccaaggcaggagaatccggctgtttcgtttcatccccgcactggagtctccttctcatagatcgatgcagcttcattcgtagtatatagagtattattatttttcccttgccttgtatcttgcgtgtgtaggagtaggctacaagcggcatcccatgcatctcgtctttccttgcagctctatcctactactagagattagagacacatcagaggtgcattgggaaatggtgacatggattctccacctgtcgcagctgtagcaacattgccggcagctgttctgctgtggcctgtagctgttactgcaatcgtgttggggttgcagtagcagtggcagcagaacaaggtagcctgtgtgtatgagagagagacacacacacacagagatggtcgccgttcgtgtcctccggggggtgctgccggccggcctgttttgcagctggacgtgcagctgcactgcagcca

SEQ ID NO: 66183 - DNA, 698 bp, Zea Mays
tttgtatttatgacccactcaggcactcggtagttggacccacactcggattttgggctaggtccgccccttcttcttccctctcatttcttccattcggacttgagctcctggacggacagttgtgcaatgcaagctccccgctagccgctggtgagtgtggggaaatatatgggaggaatgtgagtggacctcatctcatctcatctctcgtctgttctgatccctgatcttgatctgattgatgcatgcattcatgagctgatggaactgcaggtcacgtagtttcagtctttcagtcaggcccaggcgtactgtacagtagcaggagtagaatctcaagaacaagaagcagatgatcttccttcccacgcagcagggccagggcatactgcaggtcacgtccgtttgaccagctctacacccaagaaaaaacatgcaacgaattccactgtatgtcgtcgtcgtttgtatccaccgacgcacgatctggacaaatgcgtgaggaatcactgctcataggattaggacctaccttttcattgccttctattattaggtatatgcccataataatttgcatcctcgttgtatctttgtttttaaaatgcatttatatacctctcatgcatgattctttgtacgtgaccctgccaatgatagacaagaaaattcttggtaattcgttgaagttattt

SEQ ID NO: 66184 - DNA, 317 bp, Zea Mays
ttaaaaattaacaaagtcaacaacttcatcaaaaactgtgaggaattcatcatcaaatggcaagggtacgttccactgccaggtttacacgtgacggagaagaagccgaagctgctgaaaccgctccgatttccgaagtgatgaaacggtcggggctggtagcgccaaaggatgtttctgatgaaggtgcacctgccgctgaagctgagcaggttggtgctgaagaaggtgaatcagaagatgattatagtgtcgtgccatctaaacccagccacctggagtttgggaggtccactgttaccgaagatgatatgcct

SEQ ID NO: 66185 - DNA, 1078 bp, Zea Mays
gtcaggtgctctgaatgactccctgatggtacagtaacagaaatatccctgggttcagtccccctcgccgctgattattcgcgtgcccggattcgcaccggtcgccgtgattcgtgtctggaatgcagtggatatccatggggaggtaaaagatctcgcaggggagcagatgtggtcgcgggggaggcttatcaccgcgcctgtagccgttgcgacgtggccgcaccgccgggttgccgtggaaactccggtgacctcggttgtgccacgccgtggcttgttactgcgtggtagtaaccgtggcacacttaagagtacaacctttgagccattgcgctggtgaacgccacgcctcctatgcgctagtgctcttccccctctccggccgccgcgcgtcttctccaaattagtcgccaccgctcacgaatcctataaattgagcgggccatcagctccgctaggtagttgtgcatccagtgaaccagctctcacttccaatcatcccctatagctccccaatttgagacttcccccaaatcggtcctaaacatcgtcttgcgtgagctcgccgtggccagcacgctataggtccgttcatgccctctgctccctcgtttcagtactctggtgtgctcttgatactccctgacccatccaattgagttagaacccgtaggatcaccgggaacatcttggtttgtccgttgctcgcgctgtcaccgtgggagtgtgattaagagctcgaaccttgcaattaagtgaggggaaatggtcggttagggttgaatttggtgtcaagtaaagcgaaggattagtcgttgcctattctggccagtacaagctcgccgaagctcggcctgtcgccgttcaccgtcggggatcgcgggttgtaaagaatagaaaggggaggggtctattcataattgtcagtgacacaagaaacagtattgcggactcttcaaaggtttttcaaatcactagggtccttggtgaaaaactggcagcgtggacgcgcgctcgggcgcgttctgcctttattgggctggctcgggctgaattgagcccagtactgttgatg

SEQ ID NO: 66186 - DNA, 355 bp, Zea Mays
ctggtgtctagattttttagagtctaaagttagttgggttagtggtcagcacgttgtggccttctcgcgcggtcgttgcggaagtgcgttgagtagtctctgcttgcatgtagagtcaaatggtggaactagaaaactgggcatagtggccacgattttggctgtgggatggcacagccgcttagggagcatggatacatgcaaccagggactcagctccacctgtaaatgcgtcaaataaataggaatggaaatcagagaagcagacatagtacgctgcgccaaaagactcgtgtactcattgtcttcctcatttttcagttaatcgtattcgtagagaggaagagacagttcg

SEQ ID NO: 66187 - DNA, 769 bp, Zea Mays
gtgataagtggagtgattgggttttgaagactgtgaaaggtggtaaagttgctatccgtactaatgatgtggtcgggccctacttcaaaacccataaaggtgttcgccaaggtgatcctttctcccctctcctttttaatgtggctgccgatggtcttgcttgtctgattcaaaaagccaaggatgaaggtattattaaaggtcttattccccatattatttctggtggctgctgttgccttcaatatgctgatgacacaattttcctgtttcaagatgatttggaaaatgctagaaatttgaagtttattctctgcatctttgaacagatttctggtcttaaaatcaacttccataaaagtgaaattatctgtttgggaaatgctcacaatagagagcatttgtatgctgacatcttcacctgtcctcccagtggtctccctatgaaatatttaggggtccctattgataacaaaaaactgtgcaaatctttgtgggagcccatagttggaaagattgagaacaagttgggttcctggcaagggcgttttcttagtttgggtggtcggcttgtcttgattaacagcagcctcaccaatgttcccttatacatgctctccctgtataaatgtcccaaagttgtgatgaaaaaaatggatatctttaggaaaagattattatggcagggaggtcatgaccagaaaaaataccatttggctgcgtggaatttagtttgctctcccaaaaatatgggtggtcttggtgtttt

SEQ ID NO: 66188 - DNA, 694 bp, Zea Mays
acgcgactctcctctcacacatcacaggcacggtggagcagagctcccgtggtggctagttcaccatagattctctgaccaggaccccagagcatcaaactaaaatattctacatgctagacaacaatgtgatcaagcggactagatgggggagatccttaccgctatccgtgcggtggcgatggctggtcacggtgcagtgacccagcggcaaagcactcgatgccggagaggaattgtgccaactccgagggtctccgctactcgccgaggtccccgaaagttgcaacacaaactggcgacccttctgagcaactctccaaggtccaggcgatggtgattcatgagttcgacgatgccgaacacctcactgctcccaaccgatcatgcaggcgatgcacaacgccactacggtgatgatctttccccgcttttcctctctaagtgcgtggacgtagaagcaactccctcggcgcccgatgaagactaaaggatatcatatgtgtggatcgacgccggtggcttgtggttgaccacagaggaagtactcttctctcccttctctctcggtgttcaatgatgttgtgctagggctatgcgaaacttgcatttatagccacgacgaaaggtccggctggtgatcgatatgtggcgagattctaggcgtatatgtggagtttgttgggatttggat

SEQ ID NO: 66189 - DNA, 600 bp, Zea Mays
gctaagcaaagctttgagaatacaacaggagaaaaacgataacaagttctcaaagctacaagacgaagctgcaacgttccaaagttctttataggaggagactgaaatataaactttaaaagagaaattagccaaagctgacaatgtgaaaacaagcggaaaagcttcataaggatgatgtgatgaagatggaggaacaagagaactccatcaaagaactttgcactagccttgaggtagtagaaaagaatattgttggcagagtcttggaaaataaaaaaattggaaagtttgaaccaacttcaggataactttttccatcttgcctcccgatgctttgccactttgaagaaaatcatttcttcggttggcgcaacttcaaggggctagctcgttcactagtagtgacacctaaggggcgtttggttggatagaaaaaataattgggtgaagttgaggctacaatcaacgcccgaagtgattattgtgcaatgattgggtcacgaggcatagcatcagtgcttgaaaaagctggatgtgaacatgtaaaagccataagggaaaccgactttgacatgaccgtcgaagacataaaaggtc

SEQ ID NO: 66190 - DNA, 600 bp, Zea Mays
cgtaggaaattttattacgaagctaacgcaattggaacgggtcaaatcggggttaaaacataggagatatggattacacaagtttctggatttattcttctactaaaaaccgttttctagatttatttatatgaattattaaagcttaaggaccatggtttgagcttttaaggaatccagggactaaatcagaagaactcagacctatatgtaatgtttctatactcagtacggacggtgggttgatttaccaaaatcccaggggctcatttgcaaattggcgaggcggcttacacacggtcgtgatcccgtcgctggatccaaaacgaagagttcagattagatcacgaaggggtatgggacagggaccatggaatcacagatcgacagccacgatcaacacacgtgaatcgttattccctttccaatccagcccgtccacgtagagatcaacggcccataacaatccgtcgcacgttttaatctccaccgttcaccagaaaccgacggcatctaggttatcacccacctcggggggcgaagacggcgacgcgcacgcgtcccccgcgacggaggccatggctagaccgcaccattcac

SEQ ID NO: 66191 - DNA, 286 bp, Zea Mays
ttgaaaaggagttttcctcgactctgaagtgtcttcactcgtatatgatatgaggtcagcaacattgaacgtgttgctcgcaccatagcctggtggaagatctatcttgtatgcattatcattgatcttggcaagaacacgaaatggacccctcgtggcatcaatttagatttgcgctgatcaggaaaacgctccttgcgcaagtgaatccaaaccaagtccctcgtttcaaataacactttctttccatgcttgttcatgcttgcagccttgcgcacgagctcaa

SEQ ID NO: 66192 - DNA, 530 bp, Zea Mays
ttggtgaattacaagagcgtgttagccctgaggatttaaacaaaaaatttacggagattgtcaatattccaggaatgttccaggtcttcgccagattgcgttgttagtctgtacgcgctgggagacgacttcgtcttgacgataaatggtccttcccactttggctccagcttgccccgtgactctatccgggttgtgcggacaagtacgaggtccccttcgttgaattctcttaggacgactgcgtggtcgcgccaggccttcgtttgggcttggtatttgttgagggcctggagggcgaagacacggtctccgtcgatgagacctttggaggttagctcgtcgacgtcgggtactactgaagcgcttgtccgcggggacccatgtttgatttcctgcggggtcatggcctccgatccgtatagcaggcgaaagggagtgaatccggtcgcccgacactcggtcatgtttagtgcctagactgcttcaggtagcaggtcgacccatttacccttcttgtcatcgaggag

SEQ ID NO: 66193 - DNA, 372 bp, Zea Mays
ctgcggcttctatattcataaaaaccaaggttcaatctaacagaattcggattgaattgtaatttcttgtgaactatgtgtgtatggcaggttgaatgttgaatttgtgaggggctcttaaggaaaaagacatgttgtagaagtatggacgcgcatgagctatccgatggatcagatataacgacaaaggggtatgcaacaataacccttggcatggatttaattacccaaaggggtatgctccttataatcctgaccacccacgagtagatcaacaaatcagatcaactccccccgagcggcactcttcattgaatctgagccgcgcattctagaaccaatagccagtgtgtatctcctcctccatggacc

SEQ ID NO: 66194 - DNA, 426 bp, Zea Mays
gattgcctagaacaaagagggggagtgatagtgtttttgttgttgtcgatcgtttttcaaagatggcacatttgatactgtgtcacaaaactgataatgcttcacatgttgctgatttgttcttcactgagattgtgcgtttgcatggtgtgccaaatactattgtttctgatagggatgctaagttttaagtcatttttggagaaccttgtggtttaaattgggaacaaagttgatgttttctactacttgtcatccccaaactgacgggcaaacagaggttgttaatcgcactttatctaccatgttgcaggctgttttgaaggataatttgaggttgtgggaggaatgtttgccacatattgagtttgcttataacagatcaattcattccacaaccaagcttagtccatttatggtagtata

SEQ ID NO: 66195 - DNA, 578 bp, Zea Mays
tttagaagctacaatgtagggtcctagctaagtcttggctcgtggcgaggctccagcctcctggtcctcgtcggcgctcctcctcctgttcgtccttgtgggtgcttcgtctgaaggcgtccaggctcatctggttgtcctctaaagtgtcctaaagaactctcccccaccccttttcctggaggccaacccctcccttatatagggcgagagaggggtcgaccatcgatggcttcctagggaaggagccgtaggcaagggtaaacctagcgttctacccagggtaaagccacgagtactcatggggcccaggattgtttgtttcatatttaccgtgacggacaacacggggcctgcgatggtcctagacacaatcattttggctacgccgacccttggccttcatagcctagggatcgatgtggccgtcgtgtagtgccttgtcaggggtccgcacactcagtcctaggccgataggccatgagtgcgccgcaagccgaggagtgtgcggacctttaatgtgtcgtagtccaggaggctcataagtcatgagtgctacatgacccgaggggtcatga

SEQ ID NO: 66196 - DNA, 723 bp, Zea Mays
attgaagctgataattaccatcatcaagagtctgaaataaaatagtggcacacgaagcctaaagtggattatccaccagaatagacgttgtctactcatcactagtaacatctactacctcaaccattccaccagaacaaacacaaacagcacacacgatgttgtacttggaggaggcatacctcactagagtcggggtttggatcttggagtagagtcggtctgtactagatctttaagatcaaaaatcaaagaagagcaaacatcagaatgggattattcgaaaccctagctttttaacaaaggggtacaaccccctatatcattaagaaatagacacagaaatagttccatacatggccatctagccaccacagaagaagagccaacaaccaaaccaggactatcggctagacataaagtgacaaggaaatacttccaccatcaactaccactgtcagacccaaaagtatttaaaaccacaactagagaaaaaggaagttcatcaagatacatccatgactggaaaccaaagtatgaacaagtggaactctctgacaagcctaaccaaagcagaaattgcagagccaaaaatcactgaatgtgtctgtccactggtttccagccatgagcacccctgaagacttcacttgttgtccttcggattttgaggtttccttgctccaccagttttctttccctctctttctgtcgaatcgccca

SEQ ID NO: 66197 - DNA, 291 bp, Zea Mays
ttccacagcttcgtttagcagtcgagaaacagcttcgtccataatagcttcggccactttagtaatttcatcttcttcctctacttctgggtcggccattgactcgaaaggctctggaggaggagatagttcagctgcaatacaaaacgtaaataagttcgaagtcacaaaaataaaacataaagttaaaaacaattaggcaatacctatccgcctttcgagttctgcagtcttttcagctgcctccgctgcttctctagcatcgtgagaatctttttcgctcttttttat

SEQ ID NO: 66198 - DNA, 997 bp, Zea Mays
gccgtgcgtcaacctcaccgtgtgagtcgttcacgaacgcaatgcaatctccgtcactgaccagtggggtcgacccataagatcccttcttctagcttcggttgttgcgatttgcacgccgtagctgccgctgcctccccctggctcgaactggccgaaccctccgaactgcgcgacgtatgacctggtgccagacccccccactctccatcaaagttgtgcctcccttctttctcgtgacgccagccccataattgccatctgcgccgagtatgatagggagagatagctgccagcgctccatgaaattggtgggatctgggcctcggcgtggttcccgggtgaggcgtatgggggccaggaaccattctaggacgattgtgcgtgctgcggaggtctcaccaccgtcgaattgctcgtcggagcagttactctgccaccgaatcgccatcgtgcgtgtccaggctctggtcgtgcaccaaccctaggtatgaaccctgctcagcttcgtactaccattgaattcgcaaaacgcctcctagattgaagagtttgggcgtcagaacttcggcggggccacacacagccatggcgccgtggtggtgcagactcgtcaccgtttagaattggggagaggtgtgccgaccgttgatttgggatagcacagtcaggatcagatctcagcataccagttcgcagggtggcctggtgccgtccgatctcctgggaagggcttagattagaagtcgaatcccctttcgcccgtagtcgatctaacccatagatctcctaatcgatggctatgattagatcgcgccagtttaaaatcgtggccattggatcctgtggaacgacgtagattaaaacgttgtgtaacacttcgtaacataaaatcttggccgttgtctggctaatgggcggatctggtgaacccatgatgtggcaagctgtcggccgcagattcatgatcgcgtggccgacattgcatacccgttcg

SEQ ID NO: 66199 - DNA, 491 bp, Zea Mays
aaatcttcataccttgttaatcaaagcttgtgcttcgtctccagcaatctctcggccacccttagtccagatctgggtaataaatatgttacccacacttctggctttgggtaggatattaaccaagtctgatggcgaaaggctgaaggttggtttattaacaactttaagatgattacatctagccttagcgaaagcaacagttgtcccacgggcagccactaacgcgcaaaaatcaccatgaccaactatgacttcgtcaaggtcatcaatttccttctcaatccaaccgagtgctcctgggatatctttggtagaaaggttggcttcttaagacatagttccgacagaattgaagatactttttaatcgagcagtacattgtgttgcaaagccgaagcatatatcccgaagagctttaagtgttccgcttaacttaagattcttctcagcttcagccttgattgtcacgtttaaagcttcagactcac

SEQ ID NO: 66200 - DNA, 640 bp, Zea Mays
aaaagatcctaacttatcctaacctaacttaatagagttaccttatcttaagtgatactctattgccttaatagaatcatcctatcctaaaaaagatttcatgacatcctaatagatctaactaaccttaaaagattctacgatatccttagggattcatcttgccctaattagcgtatttatcccactctagaataacaaccatgagctaacccaaccaatagagtcatgatggattgcataatctgcctatccccacctaacatcaaacaaacttctgacctacaacatgtagtctatctcctccatatctatcttaaccatattccccaaccgataatatacactagcctcgaatcaatgagaccaagaccagagaagagaagatcgacctcgacaaggaaggataaaacagtcaaagtgaatctcgagatgaatcaagacttaaacattgctggtgaagtcttttccttgtcataatctttcttacctcaacctgtccagcttataccctatataataggtaactagatacctaggctctcctaatcaacccctattgactataaaaaaatgagactccggatttttgaaccaactatagactaaaagcggaattacaaaccaattcttttgtatc

SEQ ID NO: 66201 - DNA, 368 bp, Zea Mays
tttgtatgtatggtatgtttacaagtgatgtctcctgaatggagaggtgctaatgggatgaaaatgatggggttccccctagtccttatatacacgactgtagggcactccctacgaacgtgctgatcaaactcttccaccttatctcctagctaatagcgaacatactttgcttatcccgaggaaaaaccggtggctctgtttcgagctatccccgacgtttgaggacatcgggcgcaggaaaaacgaacagcttccacgggatcacgcctaatcccgcgaacgataagaatatgagcccatcgccttcttgggttggcccatttcaactgtagtctttgcccggcccacgatgcggcgaccttgcg

SEQ ID NO: 66202 - DNA, 592 bp, Zea Mays
ggaatccaaggtcacctcaggggtaagctgacgccccatcgccttgtgcttatgctgatccccccttgattccgccttctcctcgttgattctgctgctggctagatttcttccatctcctgctgtgaattgctcaatctggaaggggacggctgcaactgtcgatctgagatcattgacaagaaaggaaggggaggcagaggggtggagagggaaacagagcaggcactcgggcagaggttgaatctcagcgatggagaacgcgagagagaaggagcggcagcgctgaagggggtcgggaactcgggattgggagttcgacgaagccatgccaggaggggaggagcacatgggctgcctggtgggctgggccagcccacttcttactcagccagttttttccttttcctttttttcatctactgttctaagctgctgtttttagtttctattaatttcttaaggtgctgccttgcctcatgctttagtcgcctagggcggtagtcgtcactatgtcttgccttactgccttgataaccatgaaagcatcacctctagttttcagcatttgctgttctcatttttgttgttg

SEQ ID NO: 66203 - DNA, 502 bp, Zea Mays
cacatctttacacaatagattgaatgcctctacaatactaaagtgtttgggagttctgaacataaaatttgccatcattggtttctttgagacatgattataaggcggaactcgcgtatttcgcattttatccccaaaactgttcctgatatatgcattcatccagccaataatatagtgaactggccaacacctttttatatgagaaggaccgaccgaatcagtgctgatcagccttaaagaatagtatagagagcatagcgctggctgtgctagagcatatcgatggcccatagccatccaagaggcaattactaatactccgagtcgacaacaaagcaacagagccaaagtgctaggaatgctgcttttataggcgagtgaagactcaatatcatcaaatgaaggagagtctccaggcgcgttgtgaaaataatcacaccattcctgaaatgagacctcacctcctacctcgagatctctccacacatttaaaagtcac

SEQ ID NO: 66204 - DNA, 818 bp, Zea Mays
gtaaaatgttattacaacattccttgcaattgcaccgttgtgctactgaaattgtttactaaaaccaaaggtgtttgtgctccgttcatctgttaatctgtcctttggcccaaacgttgaagcgatcgaaagctagcttcgtcttaagaattcaaatggctaggaataggtctactaccaggctaattggtgagagcggagaaaccgaagctacttagacagcttcgatcttagagattacgaggatttctagaatggttgttcaagagggagaagaatatgtgccagagaaaaatagtgctaatgctgaagctgaaaatgttgatgtcgaagctggtagtgatgatgaaaatatgatggtttcttgagtccgagcaagcctagctatattgaatttggaaaatatattgtgaagccaaaagatctagttttaatgaagaaactcggctattttggaaagaatgacgatgaagtaataggattcgttgggaatgaagtaattctagagccgaagaatgatgaagtaatagttttcaagaacttcttctgtgctaggcttcggttccctttgtatgagatgattggtgaagttttgaaaaagtttaaaatttatcttcatcagcttactctaaatgctatagtcaggctcagtgtatacatttgggctttgcgaagtcaaggaatgagtgctaatgccaaagggttctgcagagtgcatgaactccactatcaaacgaaagcaagagaagacggtctacataagaactttggatgttacaatttcgcatatagaaaagacacgaaggctcctgtgattg

SEQ ID NO: 66205 - DNA, 339 bp, Zea Mays
agccaagctagcagagttatatatggctcggatagtttgtctatatggagtgcctaagaagatcgtgtctgaccggggatcacaattcacttctcggttttggtagaagttgcacgagttcttggacacccacttgaatttcagttcggcctaccatcctcaagctgatgggcagactgagaggacgaaccaagtactagaggatatgttaagagcttgtgctcttaaacatggtggtaggtgggataagagtttaccctatgaggagttctacaataatagctaccaggccagtttgaagatgtcctcgttccagtctatatatggcagaaaatgcag

SEQ ID NO: 66206 - DNA, 819 bp, Zea Mays
ccgagttctatttcttcgcaggccgaggtccacgacggcgaacagcacggggccgaactccggtgagcctacgtcggccggtttacgcaaagactggtgctcaactttggtttaaacctgattcccaccctaaccaatgtttcccctcaaccaatttgactaatggggctttaacatgctctgtccacgctgacagcgggcaagacggatggtcaaacgcgttcctggtgatctcggacttcccagcttaatcggatgggtcagcgagtaccaggagcaagcaagggtgctgaaacaagaaagcagagggcaggatcagacctgaattgagatggccacgatgaggtcacaaggcacggtgtttctacggtggtggaaacacagattgggggcaatgagcgattcgcggttgttggtggacaattgaagacaagcgtgggtgctatggatgggtgattaccctatggagctcacggtgggctcaatttatagcaggcatgagcggtggccggggaattggacgaagacgcgcggcggtcggagaaggagaaagttactggtgcagttgattcgtggagtataccatggtggactcaccagcgatgatcggatggctaacgtgagtcatggcggcacggttaaaggctggaggcatggcgcaaccgtggtgagtgtcgcggattccggtgacggccgtaaggccacgttgccggcgcaagtgggcaaaaggtagagcgaccccggtgacttgtgtttatctagggcaagatcttttcacgtcgagcataatccactagctcaagacatgaatcgcgacga

SEQ ID NO: 66207 - DNA, 502 bp, Zea Mays
gttgaacatgaacttatccttcaggtgctgtctcatagaggatttggacctaaatggcttaactggattcgaaatatccttcagtctggcacgtcatcggtcttacttaatggcgtgccagggaaaacttttcattgcaagcgtggggtcaggcaaggcgatcctctctcgcccttattgtttgttttggcggcagatttgcttcagagtattatcaataaagcaagacaacaaaatttactccagttacccctgactgaaaattgtggccaagattttccgattgttcaatatgttgatggcacactactgataatggaagcctgcccgaagcaattatttttcctcaaagcagttcttaactcctacgcaacttcgacagggctcagggtgaattataataaatcaagtatgtatccgatcaatgtttgcccagaaaggatggagattctctccagaacgttcaactgtcagacaggatcaatgccttttacctaccttg

SEQ ID NO: 66208 - DNA, 499 bp, Zea Mays
caaattttgcagctgttcagcctgcaggacatcttgtcacgtgggcagaattcaagcacgcgtttagggaacactacattccagaagaggttttacagataaaacaggaggagtttatacatttaaagcaaggaggagactcggtgatgcaatatctcgccaagttcaatcatctctcccagtatgctatagaccaagtggacatgaatctgaagaagaagaattgcttcatgagagatttaaatgtttgactccagcgaaagatggccacatgcttggacctcacctatagcagacccgtaagcacagcgctgtcggtggaagccaaaaattcgggacaaggaaaaacaaagagatatgggggtgaacgatcgtctcaagggtccaagaagcggtcgaggttggtgattcatcctttcaacccaaatcactcttcttttcgtccacctacatatcctttcaagcaaccaggttttatccgccccattcctgcccccgc

SEQ ID NO: 66209 - DNA, 700 bp, Zea Mays
agagtgttccctgaggtactatcgaactctttctctaaagtatccccaaattccttgagaagatcatcaaggcttgctagggatatatcctcggcgtcggaccaatcatctatcctgggggaggtggggctggaggggtcttcttcttcttctccgtttggcaccctcggttggtggtcttcttctggattttcttcttgggagcaagcttctttagcttcttgtcatagtccatctttaaggttcgataggcctcacgggtgttggcctcctcgccttttgctatgtcgagacactcctggagagatgtcttctcttgcttaagctctttgacttgctgctctaggctttccacccgggagtttaggtgggtgcagtgggaggagagatcactgtagtggttgtcgagggtgtggaggtatccagccatgtagacgatggtggggtcatcttctgtggggtctcctcctgacacagcctggagtcttttcctctaggtgggggtatttttgttcctgggtggaaaatatcgaaggggggtctcagggatctcttggcttcagttttggcacaactgtttaagggcttttcgggcaacattctggcaagtgtctgggaagcggtgcccgatgaaggtgacttggaagggagggtggtttgggtagtttcggctttctcccaggtagactgccatagaaca

SEQ ID NO: 66210 - DNA, 340 bp, Zea Mays
actcaagagtatctctttaatctaacagaaggtgatcacaagacttatcccatccactcttgcactagaagaagagagatacaaggaagaagtcccactgataggctccaaaccaagtcgaatcctcaccaccacatcaaaataaaagattatacattggccaagagtctgactattaaggaacacctctacctcttcccatgtagtccccttcattgtctaattgacataccaagccggaatcaccatatcaactatctcaaccaacaaatcatgtgctcctgttaggacgagtagctatgatcataatttggagatctttgttttagaaagagacatc

SEQ ID NO: 66211 - DNA, 283 bp, Zea Mays
ttcgatgacagtgaacaagagttgagtgagatgtgttcggcatcataggacacacgtacatgtatcgttctccttccttctagctagggcgcgctatgtctggagctccgcagaaccacagagacgaacttgtggtcttgctcatgtgctctatggttggagctctatctctttggtggaggccgctgtcattggatatacatcacacaacctccgaatcatgcatttttactttcgcagagatagacgatagagattctagcaggcacgccatcttttgatt

SEQ ID NO: 66212 - DNA, 296 bp, Zea Mays
gaggattcaacttaatactaaagtttctcagactttcaaaagtttctggtaagtcagatattaggtctttctcgaccctggtcttgattatgacatcatcaacatatgcctctacattttgttgtagctaatatatgctagtcacttcttaattcccctctggtatgtagctccatgtttttcatcccaaatggcatggtggtgtaacaatacactctgaacggggtgatgaatgaagtcttgatttggtcctctttttaacatgatttgatgataattggtgtatcagtccaaaa

SEQ ID NO: 66213 - DNA, 272 bp, Zea Mays
gccactcgcagtcgcagccgagggtgagcacacgggacaggactgctggaggacagatcttggaagctactgttgctagagggtggtggaccggtggtgtggttagccaccagggtaggggaggactcaagcagagtgcggagggccggagagtcgagggaggtgtcagggagacgagacgtgattgctgcggcggtacggccttccagttggcagccaccaaggcatcaattcccccacgacatgtgagtcttgattccctagggtttctt

SEQ ID NO: 66214 - DNA, 311 bp, Zea Mays
gttcggcggccgcggtagagaagaagctcacggcggcgattaatctacggttcggcagcagcggtggagaagaatgagacggcagcgattttgctagggtttggccgccgcgagcgttacgagtgaggtgagctgaaaaaaatgcatgctcggttgctggattcgtgggcccgatacacgtaaactgctggcgaaatcaacgcgaaggcccatggaccgacacgtggattactgtatcgtaaacggaaacataagacatcgtaatatcaatatttatgtggggactagtacggctgcccagattgcgggaa

SEQ ID NO: 66215 - DNA, 605 bp, Zea Mays
ggatgcactaagttctgctactcgagctagagctttggcttcacagtcccaagcgaaagagtgtgagtttacggcccagtcaatggccgtatcgcgttccgaaatttcgtactgcaggcgattaacttcggctgatagttcagcaatgcggcgactatcgcgagcatgctccctacacccgtggcgtagtttagacctgaggtgatccactctggcctccaaatccccaatggggtcgttgcttccactgctgcttccttcatgcctggaggccagctgatgttgaggcacaccctgaggtccagttgatttgcgctgggtagtttttgtgtgcgccatatctccataagaggggaaaaatttatttagtatagtttgaacatgatgcatgcataacctaatacttattggatcaatctttcgtcgatcccctacttcctcatatactgcactctgttacccgacttttaaaagataagttactaccagaaagtggtaagataagaatgaaagaatattttaaggtaagtatttaaaaattcttttgaagtactacgtaatgtctaaagagacgggcttcgctccgataccagctgtcacggaac

SEQ ID NO: 66216 - DNA, 839 bp, Zea Mays
agagggaactccactactttccccactggcgaggaattgtcgactgttcttccgagtcagagggacctcattctcttcctccctgttgtcttcatcagcaacacaggcaacacccccattgggatcagcgacagacataccacacccattgggatcaacaatagacataccacacccattggggtcagcatcagtaaattcaggcacgggaacctcctcagcagcaggaaccgagggaccagcgccccgatccaaactagatacttgccaaagacgtctctttttctttttctgctcatcagcagaaagatcagtttgattggctcggcaaggacgtctcgggcgaacacggacaggtctctgaacatccaaggttgtaccagcttctgggagaggcgccaccgccaatgtcccagcaggagtagcatcagaagaatcttcagccagcatatcaagcatagcacttatttctgcatcattaggatccaaaggcacctcaaaatggacttgtcgttcgtcatcaggaatctccccaagcgaggcaaccaaagcactgacttcttcatcagagggtcgcgttctaaggcccaaattgccatcagtcgcaggtggatttgacatgaaaagagtgaagactttggcgggaggcaaattccaggccgagtacgccaccggagcaccaacattggacactttgcccctgagaatcatttccagtcggctcaccaagtctgcagaagggattctcctgttggtaacccgagttgagtcggctagccctcgatacagataagctgggtggatcctatctttcagtggctgaatgttcttgaaaacga

SEQ ID NO: 66217 - DNA, 570 bp, Zea Mays
gtttaattctcaaacaagtaaaaaaaattcaaatactattcaatccatatgggataagaataatcgaacaatgtgtaaaatagatagcaagatcgttatctaatgtgatacgagatgattgtagatataaacattttatgctaaaatctgccataaacaaaaaaaactcggtcggggagggaataatcgccctcccggtattcttgggccgacactcaagccgcacacgacaccacatgtgtaagaatgaagaaaagcaggccccgaccgaccctggccctatcactaacaggccgtcactattcactttgcaatggcctaaccggatggtgacacgcagggcgtaacatagaagcggacggtgtcggggtttcgtatcgacgacgcactatgaggcgtaccacacaatgtttttgggaggacaacgacgtcgataacagctcgatggttagtgtggagcacgacagaacacaagttatacaggtttgagccgtcgcgaggcgtaacaccctacgtcttgtagggttttggagattgtattgctctgagtatgaggatttacaggtgatt

SEQ ID NO: 66218 - DNA, 590 bp, Zea Mays
ggagctccttccaactactaggtgactttcggtttaggaaatgaaaaaaacatctgatgaatccacaggaacataactctttggacattatctttcccctttttagttgaattcacacggtaaaccatccttggcaaaaatttattgttttcttagttttagggccttgctccagtcttagcattaagcaagacaagaaccaatacagcattcaggtggggcacacctgtccaaatctgctccagaagctaaatccaaacttgacaggctgactcatttgcctgatatgttggattggtgagccatcagccagaaactgtttcgcctcctcagggaactcttttcacctccaagctgtgctccttctgaaacagcagcctctcccagtcattcttcacctttcctagccaaaaaatcattgccggacttgcagctcggaaatcagctccctgagtcttcttcgctggtgtgcacagcaggctccatcctggtagcattactgctacctgcctcacaagctattccataaccttccaaatagtttcctggaagcatagagtgtttttgtagtttccatagctttcacgaaa

SEQ ID NO: 66219 - DNA, 431 bp, Zea Mays
gtgcgatcaactgcaagggtgtctcgtgagggagaagaaaccgaggtcactgagacaacaccaatttcagaagtcatggaatgatcaggtctagttgtgatagagggagctattgacgaaggtgctcctgatgccgaagctgaacaaactgttgttgaagaagaaaatgttgatgaaggtgaagaagactacaacattttgatcccaacaaagcctagtcatttagattttgagaaatctactgtgtgacgacatgcccatgatgatgaaactgggctattttggagaagctgaaagcaaacttgttcgatttgctagagaagaaactaccccagagccgaagaaggatgaagttgtggttttcaagagcttctttagagcggggctgcgatttccccttatgagatgataggggaagtcctaaaaaattt

SEQ ID NO: 66220 - DNA, 499 bp, Zea Mays
ccaggggcttcggagggatacttcatcccaggcatgtccggtcaattcatagctccaatgctaatgatgaaagggccagcaatgttcagcatagccatcatagttctcagtcttcaagcatgcaacaaacttctttcagaccaccggctccaaggggcagaggaggaagaagtttcaatggaggaaggtttggcaaccaacccagaaagttgtactgtctttttgtggtgaggacaagggccacacaacaagaacatgccaggtcacaattcagaagcagaacgaaattgctgaagctgaggcgcgacagagtcatctgaagcaagtcatccacactacttcgtgctactctgcatacatcccaaaatacgtgggcaatcaacaacctacgacttctatttcttcggcaagccattcccgagcttcctggccccaattgccaccaccaccaccactgatccacaatcaacagccagaagggcgcaatcatactcagcag

SEQ ID NO: 66221 - DNA, 561 bp, Zea Mays
actcgcaccaaggtgcctgtagtaggggttacaagcacaacggaagaggggaagtccccaagtcccttgaaatgattgagtcaagtgccaatatctaaggcagagtgaagaagtgagtgttcgtctgtgtgttctcttgatcctcccccatccggaggggctggtgctctatttatacatgaaggggatgtccgcagtgaagtcaggtgttttattcgaaggatagatatattggcgccctgcaagccaacgtgacagagaactacattgttgacttgtgtccactggttttccgctaagagccgaggccgagggggtggccgtacgcccgaacccttagcggaggggtagcccataccatagttgttgtaacagcgccagagtatgggctaaagcctacttacgagatgtgtcagcgttcctatgtcgaatgacgtcaagattccacgttacgcttatcgaggttggagatctgctcaagcaaggcggaagtcttcccgaggcgtcgaacaagccctcccgtgacgtgtgccacaaccgacggagtggcctcccatggga

SEQ ID NO: 66222 - DNA, 579 bp, Zea Mays
atgtcgaataatgtagtcaacatcttcgttcagagctttgggagcatgagcttcggtcttttctggtacaatctgctgccctgttgttttgtcctcaggtgcggcaggcttcgtctcggtgggcactgaaggcctagcttcggcttcggcctaaactttcgtagcttcagcaattttcttaggagcaggtttcaaggccttcgtagtctttataacagcgtctagtacgctggccatcctcctcctcttgggagttgtggcaggaattttttgcatctttggcaaatctgcccctatcggtgggctcaggatttctggcgtttttatcaccttttccacctgtggctcttcagccttatcatctctagctttggctggcccgactgtaggcacctttgacactacaatcgtctcttcagtactttgcacaatcggagcagcttgctttgcttcggcggctgaagaggtcccccgctaaatttaggcaccatggccggttcaatgtaacgcagcaggtgggtcagaacgttcatctttttgcccttcggctcagctacaatggccgaagcggcaatcttt

SEQ ID NO: 66223 - DNA, 318 bp, Zea Mays
cttcattccatttctacttcttctactattttgatgtcttaccatttgattgattatgtagaattccttgggactgttgcacattaggcactggaaggtcaggtcctacatcgggcactggattgccgggcataaaatcatgcatgcaaaaatggatactccaaccgatgaagcatgcatattgtcagcttacaatgaaggagtactcaataagatgtctatcttgtgccaaagaatgaactactcacattctcatggcagttgtagagagttggaataatgtctatcttgtactccctccgttaaacctaaactaac

SEQ ID NO: 66224 - DNA, 1506 bp, Zea Mays
ccacagccaccacattcaaaagatgaccttgcaagtaggagacttggtactctagagagtctagaccaacaaagaccaacacaaactatcccaccatgtgaggggtcattcgtagtcggagaggtaatttggccaggcatctacaagttgaacgatgagaaggggaggacgctcgccaatgcaacaaacatcgagtaactgcggtgagtctacccccaatgctcccaaaccaacctgcttctgacccaaggttggatacttaagggctcaggagcaggaggggagcaatacctaagaactagcctgtattgctaacatttttctccttgcagtaggtgtgacgtttatacccttctaagccaatgcagccacactaatacctcttttttctctttgttgtctacccgactcatgcagggtctcgagaaatttgaagggggcctaaaccgaccgagccacccttcaagaacaccctaacctaaggaactagactaacaccaagggatcactttctggaaaggacccgaacccattcacgaacgtcaaaggtccacttttcaataaggacccaaacccattcaaattcctttggcaaggactgaagagaaaaaactcatggcaagatagccatgaattatggagttcgaaggtcggtccgtgaagggcttgtagtcgctctagcgaaaattgagtaaggggcaaccagagatgggcatactagtggcgaggaccctagcgtatgaaacgggtgtcaccaactcgtgtttgagtcctgggagagtctgactcatggtttattgtgaagagaggcagcgattcatcattccggtcaaatggaatcgaaaattatatgagtcgatgcctgggagtacgaggatggtccccagcggaccccgcgcttggatcctgcgaaaggaagtagggcctcactcgaattacccgcttgtagctcactgagcaccattactagcccatcgaggaaagcatggtacagcccacctccccccccccccccccccccccccgtttttgtgaagggatgtgtgggggagagtaaaaccaaaaagatggaacgagcccctagcaggggctcggggccttgccccgcatgagtatggcggacggacaaaattgcatagatagcaccccctagacccaaagagggcttgaaacaaggcagggtcaggggggcctaaaactcatgcacgccatcaaaacaattaagtcacacacgaagtcataaaagactactaatcgtgggactatgaacaaatgcataattattcccttcacaaacaccgcccccagcgtgacgtttgcagcagcatcaaaatcacccagcaattgtcctagaaccacagctgacaaactctcaaattctagaagttaccaccgatgtacagctgcgaggtgggaagagctactactacgccatggtgaagtcttgagctccacggtctcacacgcacaggctaggatgttaaggagacacaaattgtaatcccc

SEQ ID NO: 66225 - DNA, 637 bp, Zea Mays
gtagcggtgtccttatacgtgttagtgacacctttttgaacagatcttttatttcttataagccacaacatataaaacatggcagggttagatacatataacttataaaccaagtaagttttagcatattctaaaaacttataaaccaagttttagcacattctaactactaaagtaggtgctaaatcaagataagatagatgataaggtgctgagatatacaccaactacaacttcactgtaaactataaaatataagattggcacgagacttattttatcattatttccttaagtcttgtatggcagcttctaacaaatctaaatcatctcaattttgatgcgaaatgtgaatccactaatgacatgggtttgccatgtcgtgacctgatgtgaaggtctagatgtcaactccttgatggtttgttcttctattgtttctccatgtggaatgtttttcaccattagtcatgtgttgaaccactgcttgtgttgattcattacccaatcatccttatgcctatgattttgctcgcgaagctcactgatgtgttgttgcataaatgactccattatcgctagctgatgtatgatgttgtgatgtgcctcaagtactgtattgtaatccggtgggatg

SEQ ID NO: 66226 - DNA, 459 bp, Zea Mays
tcatttcaggaaccacgagtgagactctagtacacaagttgggggtaaaagcccacgaaccacaaatgaactcctggatatcacaactagtcatgcatcgggggaagatgtggtgggagcgatcttcgaccaccacaagaatggggccaaacacaataaagagaccgatggcagcaccaatagacaacctaagaaaagaaagaagaatggcaagcaacgacacaatgacatgctagtagccttgatgagccagaaggagaggaagttttcaacctaagaggccattaaccatttcgagaagattctcaagtgcgaacacaaggttgacttgtcccttgtggttcgggttgatgagtgattgtcaatgggtagcgtctcgggtcaagtcgtggactgactgaggcatgagattatgtgttgtgcaaccatgtcagtcagcttgtggtgtgaaggtgtgaa

SEQ ID NO: 66227 - DNA, 581 bp, Zea Mays
ggtcagacgaccgacgtcacggtctacgatggtcagcggatgcgcggcggagtgtgacgatgacgagcaattgctcagccctggcctggtctcttggcttcgttggtatgcggacgcactccctgggcccctttgagtcacccatacggtcggtcgggcaacggcaaagccaatgtcgaattggccccgcagtgtcctaccctagattccgcttcctctcaccctcccgcgagctctctctctctctcgctttgttgttggtgggtcatggcgatggaacgaagaggtggaagccccggcacccggtattatagccccagggtaggtcggttggagggtccgtcgtagcgcccccagcttcgcgtggccattgctttgaggtggggaagagcagcagtgcatacggccccatgtgtcaatggaaacgtgacgccattggtcactggtccaaagggacccatgcgctagagaaagagcttggtgcgcgtacgaggtggagctagacaaacgggcccgagctgcaaacgaggggaaagggaagaaggcacgacgctatggctgacaaggggacttggtgtcgg

SEQ ID NO: 66228 - DNA, 1006 bp, Zea Mays
actggtaaggtctgaacccttgcacagttagctgaaagttgaatttctgtggattttgctcgaatttggaggttcgtagtaacaaacccatggagttttggactgggggttctatagtagaatgaaaaacatgttatggtgagcaagttccttaaggtgagtgggggttggtgctgcactgaaagtagagtaaaatgtcccaaacttttctctcagtcaggtaggttcagattaactaaacaaaaatgcagtatagatggatagtaaaaataaaatgttgaactcagtgagttcagtgtcgacctgaaacttggcaaaagatctaaagtccctgttgtgggactgttgtctttggtcagtggtgatgtggattggtgagggtatggatagcctttgggactcgaaacatctgaagccactatggatgactaagttatatgtttgccctctgttgaaacaccgttgatctccatccactgcctcactgtggcttggtcgtgcatggtgtcttggggctgtggcctcgtgtccactgcatgcagtgagctagttgctccacgtgtgcttgagtattggggcccatgtcaaattcatgcaagtactggtgattccacgtctgccatcgtgataagaacaaacaccgtgcagcgcgtcttcccttttgccatggcgtagtgtagaaaacttcactgccttcatgtggtcattaaccaaggttggcgagtagctcatttgtccatgttcccgtgtcgtgatgacttgtgctatgccgttcatcttccctcagccgccctttatgccatagtctgctttcagctggtgaccgtaccctgcacctctcaaccccaccgtggtcgggtcgtctcgaggagtggctcgcccgtgtcggtcgcgtttggtaattcccttaagccagtgaagctcgtggtactttccttttcagctctactgccgtatctcatcgtgaacgccgcggcgccgctggtgaacgcagctgggatcggcc

SEQ ID NO: 66229 - DNA, 606 bp, Zea Mays
atgagagaaagcaagagcacttcatagagggactcaatgggccactacagtatgcactggttgcccacacttttccatcatttcagagacttcttgataaagctctagctattgaacacaagtgtgttcaactgggagacatgaagaggaaggccattacccaggggcagggtagcagcagtattcatcctcgctacgttccgccccagggtacaccagctcgtcctggaggaggaccgcgcccggctcagtacgctccacaggggactccacagacaccccacactcgtcaggctgcccccactgacaccccaacgagacctacaggacagaggacaggccccacatgcttcaagtgcagtcagtttgggcactatgcaaatgcttgtccgatggggatttccagcacaccagttccgaacaagcaacagagtcatggcaagggattcatcattgccagagttaaccaagtcagtgccgaggccactgcttatggagcggacatcgctattggtatgttttacattaatgcaattccattagccttattatttgattctggagctacgcattcgtttatttctgctcgattttccaccaccaatg

SEQ ID NO: 66230 - DNA, 1084 bp, Zea Mays
gcctcacgtcgagggtccactagctgcagcggagcctttcgtttcttccacgaagactcttggtggtccttgtccatcacagctattacaatagtgtcaatcatccgcctgtaaggaaaaaccttaaaataccgagccagaaaaaacgtaaaattattatcgccggaagccacgggaatggggtattttctgtgccactcaccctagttactttcaacatccgagaagatgcttcctaaatgtaaggcaaggtcatgacctcccctagctcagcgcacgtctctgctagctcctcatcaaattttcccaaggccttcgccacctcagatgtcttcgccaaacccttcattttagcctcaacccttttcttttttttctcactgccagagccacagccttaccctttgaacaccctttgtccatgctgccacgtttcaccacaccctttctcttacgatcatcaacatccctagcatcatcagagccctcctcaggatatgagccataacagagactgtctagctcgaacacatgatttaaccttacattcgaaccttgcatgtaccaacacctcggcatctctgtctttgtcaaatacttcccaacaattttcactgcctctgcctccacctccctgacaaaagccacagtttctcaaccacgcaactcaatggtgaaggcgggctcaacaccattttattctttaaaaaaggcatcgggcgtagcttcacctcacccacctcccaaccgtgcacaagcgaccacactccgcaggtaatgaactcttccaccaagtcacgtctgctgctcgctttggaggcacgacgaagagctgcatccccttttctcaaattaaactgctggaaggcgatgtagcaatgcaaaacagaatggacggaggcagccctagaacaccctcagtgaccttcaatgtcacataaaaccaaaagtcccactagttccccacttattccgcaacctcacccgaagtcttcccagtactcgatgtgaacatgcacaaaccaaattgcacaatcttgccactagcaaccttcttctgctaatggaggcaatagttcttaac

SEQ ID NO: 66231 - DNA, 307 bp, Zea Mays
gtgatatgcttctctatcttggttctatgaaatggagaatacctgtatggttgatagttggcaggcactaaccctggtatcaaaggaatattatggtcagagagccttggaggaggtaaaactgaaggcacaacaaacacatctttgtacttttacactaaaacatgtaattccccatctgcagcatcccttttagtgttagaaacggattccaacaacataagagcccaaacatcattccccttccaccatttctctaactggatagtagataactccatcactttcccatgctgctcagaattac

SEQ ID NO: 66232 - DNA, 553 bp, Zea Mays
cttttgaggaagttttgagtggtcgcggggatatttgcgctttctcaggtgccagaggaatcgtggctattttggagaaatcaggctgcgaccatgtgaaaactttggctcaagccgaagctactttaagtattgaagatacaaaagacccttcggccgaagccagcttagtgggcggaaaattatttactaacatctgggagaatggcggccgaaagatggcgcatgagataataaaaaagagtgaaaaagattctcatgatgcaaaagaagcgatgaaggcagctgaaaaaactgcggaagtagaaaggaggataggtattgcttaataacttctaactttatgttttatttttgcgactccgaacttatttacgttttctatcgcagctgagctatctccttccccagagcccttcgagccaacggacgacccagaaccaaagagagaggaagaaatcactaaaatggccgaagctattttagatgaagctgtttctcgactgttgaacgaagctgcggaagcagttttgaaagaagaatagctgttatt

SEQ ID NO: 66233 - DNA, 600 bp, Zea Mays
ccatggtccaaggatcatcttgatagttctcatccatacgatgccaactgttgatggcagtatggccgaatttgtcgcagatttgacattgggttcgattgccccgaccacaaccaccaccgcgcggtgaccatgtgccaccacaagacgacgcgctagctcggccatgaggtgcgtcgtgagagtacgtgcctccaggtgcaccaccgcgcccacgaccgcgtcgtccaccaccgcgacctgcatagtgagcaaacatacccatattgacttgtagatcggcttcatgttggagacgccaggcttcaaaaaccaggagatgcgagaagacgtcgaaggagagctcttcattcttggtggtcatcgacgtaacgaaggggtcataatcaaccgacagccccgcaaagagataggagagaatctcatcatctctaagaggagccccagccaccgctaattcagaggcgagacccgtgatcttgcggtaaaaatcagcagtagagaggtcgcgcttgcgcgccgtggcgagttcctagcggatctaaatgccccgcgccttggaggaggaggcatacttcttctcgagggaatcccacacag

SEQ ID NO: 66234 - DNA, 1308 bp, Zea Mays
ccaggcaccagtgcaataggtgcgtggaggtgatggtccaggcacctattggagtggtgcctggaccctcccctccaagcacctattacaatggtgcctggaccctcccgaccaagttagttagaagaatattctattttatgacgccaaatattcctcgctagaaaattgaatatttacaccatgtgccaaccgcctacctattttgctctgcttggtgcgaaagcttcggtctcctcctgtccgtgtccccttagtcttctgccattcccgctatcgcggagcgcgcgggggtcatgcttgttgcctcacctactccagaggcgtcaaaggtttccgtctacttctcatccaactcttcgatcactttcttgatttttgccacggtggcggtgctggagctgaggtctaaggtttcgaacatgcggtagaagcaccatataagcctttccataatggaattccaaactagaagatggaatatttacagttagttagaagaataatccattttctgatgccaaatattccttactagaaaattgaatatttacaccgtctgccgcccgcctacctatcttgccctgtcgggtccgaaagcttcgctctcctcctgtccgtgtccccttagtcttccgccattcccgctatcgcggagcgcgcgggggtcatgcttgttgcctcatctgcttcagaggcatcaaaggtgcgttgctactcctggcaacttttggtttctcattttctccatggtttcttcctagagctttttccccaaccactgatggagcagcaggtgattcagatttatcgacagccgttggaagagccggacatgttttgggcgccgattgagctcagcatcgcgagtgacagccaccacggactacaggtacgtaacgaggatcgcctcctcgattacacttatccattggtcttcagttgaatctgggcaaaaatgatgtatcgtgagcgatgcctactgacgacacaccgatatgaaaagttgtatcatgactgataggatttgtttgccctgtccacaatatgtatcgtgagcgatgcctactgttctccgtgtgaatggctgtatcatgactgattgggttcgtcggccctgtccacaagttgtatcgtgaacgatgcctattgttgttggccttgtccacaaaatgtattgtgagtgatgcctcggacatcatcaccaccctaagccacaagacaccgaccctaaaaaaggtatggggtcttagacatcatgagtcatgatacaaccattcacattggtgtgtcgtccctgctgaggca

SEQ ID NO: 66235 - DNA, 613 bp, Zea Mays
aggcctagagatcctccgcgaagtccaagggggaacctgcgggtcacactcaggacccaatgccctcgcagccaaggtgattcgtgagggattctattggcccacgattatatgcacggccaaccgagtcgctaggtcatgtgaagcatgccaaaaattctcccctccatcaggcgccccttcgcagcttaccaagctcgtcgcacacacctagccacttcagcgatgggggctggacatcatcgggccactgcctacggcgcaagggaacctaaaattcaccttcaccgccatcgaatattttaccaaatggatcgaaggcagggcagtctccacgataacagcaaagaccgcacaaaaattcttctggcaaaacattgtctgccggttcggagtcccattcgagctaacagttgacaatggcaaacagttcgacaaccagtatttccgggaattctgcagttccatcggcaccaaggcagtgttctcctccgtctaccacccacaatccaacggtgtcgtcaaacgcgccaacggcaagatgttcagcgccatcaagaaaaggctcctcgacgacaaaaagggcaaatgggcagaccaattacccgaagtc

SEQ ID NO: 66236 - DNA, 710 bp, Zea Mays
gtgatctgcacgcttgaatattcggtaggatattagaatgtgttcttggcgctgaaaactataacattttgtttctgttgttagaattcaacagttgtcatgaatgattgtagaagtaagtgcggtgtgctggttttggaatttttttcctaatttatgctaattgatcagctgggaaggcatagagatcgccctaagatgagtaaacgcgagcatgttacactaagtcgagtaagcgtgagcatgttgcaccgtcttaagtcattgccgacctaagccgattgctccgttagtagggtatagtggtcaccctaagtcgagtgagcgtgagcatgttgcaacgtcttaagtcactgccgacttaagccaattgctccgttagtagggtatagtggtcaccctaagctgagtaagcgtgagcatgttgcaccgtcttaagtcattgctaacttaagccgattgctccgttagtagggtatagtggtcaccttatgccgagtaagcgcgagcatgttgcaccgtcttaagtcattgccgacttaagccgattgctctgttagtagggtatagtggtcaccctatgccgagtaagcgcgagcatgttgcaccatcttaagtcatcgtcaacttaagccggttgctctgttagtagggtatagtggtcaccctatgccgagtaagcgtgctgattgataataaatagttcgagt

SEQ ID NO: 66237 - DNA, 610 bp, Zea Mays
tttcgaggatctcctcggttcgcgtgcaagacatgcagcatttggggtattttgggaacggagttggacgagtttcgggggcggaagagattcctgagccggagggtgagatggttgtgttcgaggcatttttcactgccggactttggttgtctgcgcattgttttgtggtggaagtgttgcggaggtatgacgtgcagatccatcaattgacacctaatgtcgtggtggccctggcgaagtatgtctgggcagtggcttcgtatggcggtcagccctccgtagaggtcttcgccaagaattattgtttgcactagcataagagaaaagttggaagcaagattgcacagtttggatcatgcacctttacgccgaggactgggaagacttcggcggaagttgttgagctagttccctgcgcccgcaacaagtggggcaactggtatgattattggttttatgtggcgggaggcgaggtcgaagacctccctggactcccggcggccgtgatgtgctcccactgctatgtggcattcccgccgtttgaggtggcggaggatgatagtgacgaaggggcccttcgttgtgctgcccgcatgagtagcgggcg

SEQ ID NO: 66238 - DNA, 1275 bp, Zea Mays
gttctgctaactcggtcggagccatgcggtatggtctcttcgcgatgggtgccgttccagggatcagatctatgtagaactccacttctcttttctggtggcattcctggcaattcttctggaaacacgtccatgaattcttctactactgatatactttccgttgctagattgaacatcattgggtcactggcgggtggctgtgcctgacaagagactgactttccctgctggtcggtgaggaggactgtcttgtctgcgcaactgatgatgcctttgtgtttagttagccaatccatccctaggatcacatcaattcctttggatggcaagacggttaagtctaccaggaatactaccctacttaaaaggattctgacttgggagcatttgagctgacatagaaggtcggaccctggggttcgggtgaccaagggaatctctagaggagtagagggaatgccatatttttccacaaagctagtggctatgaaggagtgggatgctccagaatcgaaaagtatggtagcaggagtaaattcaataaggaactcatcgagtactactcccggagcctgctaagcttcctgggcatcgacgtgatttactcgtgcccttccttggtacggagccttgttctgctggctgacggcggagggcgccttgggtgcggatgccgaggtattcttggggccattcaccgagttggagtaggcgggtcctggtggcttcagctgtggacagttgttcttgaagtgactgggatcaccgcagtgccaacatgcatttgccgggggttggttgcttgccaatgagggggaatggaaagagctctgactctgctggctgagtcgtgacggagtgggaccagctggtctactgaagtttggccccttgggtggaaacccaaatgatcgagtcttctgctaccggtcctgctactgtgcccagagaacctggaacttccttttgagatgccctttttcttcctcctttgccctttcaacttgcatggccttgttggaaaggtgagagaaattgaggaagtcttggcttgccaggattgtcttgagttctggcctgagtcccttcaggaaatgggccatcttcttgccctcggtactgacatcatctggcgcgtagcgggctaactctgtgaacttgtgcacatattcgctgacagatcttccatcttgagtcaattctcggaactcgtcctccttaagctgtacaagtccttggggcacatggtgctcccggaaagctgcttcaaat

SEQ ID NO: 66239 - DNA, 421 bp, Zea Mays
tttagatacagaaggtgaacatgttgaataaaatattattatgtccacatattataaaaagaacagtattgtaaattattatatggtacgctctaccttttgttatattctatttataatatggtccatgatgctgctaacaagttggcagtcctatctttacaaaatttacctgtggttgtgtagctgttctccgtctgtacaattttcaattagaaaaattatagcagctaagaaaaatatcttctctttgtcgcagaaactgatggttaatgctggtagatactcttttaatctctactactacttatgtaactaacgtaggcgtccacagaggaaattagtgcacggttctgcctttctccacgcgctgggcttgcatccatggccgcgaatctcacccacaaagcttccatccatg

SEQ ID NO: 66240 - DNA, 777 bp, Zea Mays
gtttacaatgttgggtattacaaatcctaccccccttacaaagaatcttgtcctcgagatttaggaaggactagggaaaagatggggaaaatctatgtgaagctcttcttctctctcccaggcagcttcatctttctccatggtgactccattgtactttgcacattttaattactttgctccttgtgacacgagtcagtgtatcaagaatcttggtgggatactcaacataaatcagatcatcttgaacactaaggtcctccattggtagctactcttcaggtaccctgagacacttcttcagttgtgacacatgaaagacatcatgcacatccgcaagatgatcaggtaactccaattgatatgccacctctcgcactcgctttaggattaagaagggtccaatgaagctaggggacaacttcccgttgactttaaatcttcgcatacctcggagtggtgacaccttcaaatacacatgatcaccctccttgaactctagcagtcttctccgggtatcaacatagcttttctgcctggattgtgcagttctcaaattctcccttatttgatggacttgttcctctgcctcttgtataatctctggtccaaagaattgcctttcaccagtttgatcccaatacagtgaagtcttgcacttcctgtcatacaaagcctcaaacggtgacattttcaaagtggcctggtagctattattgtaagagaactccgcacacggtaaactcttatcccaactaccaccatgtttaagagcac

SEQ ID NO: 66241 - DNA, 390 bp, Zea Mays
cggcgagctccttcttcagcagcggggcgcggataggaagaagccgaccggaggtagcgtccctccacatcgaggagagagactgctaccatgagatagaagggagggaacgggtgagcgttgcggggagaggggtggttctgtagtagctaatgcaaagggagaggacggccgccggaacagctgaacattgccttagctctccgtgcaacccatcacgaattttagacatcatgtggcctgcaaacaagatcgtgcatccgacaggagggatatgttctccacgtcatcctggctctacacgttatcacacaactcaaattttgaagggtctaaaccagtgattagtagccgtttgatttggttgtagatctacgcgtcagctatcca

SEQ ID NO: 66242 - DNA, 382 bp, Zea Mays
ttgatttctggtacacagattctctttttaaaccataatgtgccttgttcagcttctatgaaatatggggctttacccaaactaatttgtgtcttaatttctttgattatctcatcaaactcttgtcctttatgaatctcttgttccaatgtagattcgacttccataaccgttgcttccatattattgagctttccaaggttgagttgttccatttcccagcacaattcctgtgacatcaaatgagtagtgatgttttcacttgacctttacggctcaaagcatctgccactatatttgcttttcctgggtgatattgtatttccaaatcatagtctttaatttactcaagccatcttctctgtcttaggttgagttcttt

SEQ ID NO: 66243 - DNA, 537 bp, Zea Mays
agagaattcttccagagaaatacatttgtcccaatctttgccatagtgtatcacgcttgctctcaacatgtcctcgagaatctgattcactcttttggtttgaccatcagtttgaggatgatatgctgagcttctaatcacagttgttccaagtgacttttgtagctgctcccagaaacgtgctacgaacggtgctcctctatctgacacgatagttattgtgattccatgcaagtgcactatttggtcaatatagatttccgcgtatttttctgtcttgtgggtggtatgcccaggcaagaaatgagctgtcttggttagcctatccacaatgacccaaatggaatcgtggtgcccggaggtgttgggcaatcccacaataaaatccatgcaaatgtcctctaatttccaagatggtatggggagaggttgtaaggtacctgctacctttaaatgacttgctttgattctttggcaagtgtcacactcagatatgtacttatcaatctctctcttcatcctggtccaccaatataa

SEQ ID NO: 66244 - DNA, 466 bp, Zea Mays
aaaatagcaagcaacaagatctgcatttgctacctgacgaggccttggaacaaaccttctacggtagcatctccgttgtggcgattgttcttgcaaattggagatgatatcctggccaattccatcaagaaagccatctagaaattcttcttcggtaagaagatcttctactgtgtaaacgtcgttagcatcattgaactccaattcttcatcgtcgccctgtgaataattggcactttcttgtggtctatttgctcctgacatctttggtaatgcatctgcaaacacccaggagatatatatatatatataatccagttcacatttcagttataaaatcccatgcttgcttctcaggttcacacttcacttcgcagtaaattttcagttcacatttcagttatcaaatctcatgcatgtttctcacattccagtttcacacagatgaattttatttgcattccag

SEQ ID NO: 66245 - DNA, 283 bp, Zea Mays
cgtgttctagtgctaaagtttaacattatgaaaagcaaagttgaggttcctacacactaatggtcatggagtcgggatgggtgggggagggggattagacaaaatggagagttaaggggccaaatatggacttacttcagagacagggtgacaaattagaagaaaataaagagcacgtgcaggcttacaagagctgtaacatggcaaaaagaatacttacctgttatcaacaacaatcattagttcatcattgcatgcagagcagcagaagcttgcctgcata

SEQ ID NO: 66246 - DNA, 821 bp, Zea Mays
aagggcttaaaatccctggcatctttgttacttcttcagttttgacctttcagtcttatctttgtcaaccttcatttcaactggctcaatcgaaggtgccttcggcattatagccgactcttcagtcctctgcacgggaggaacagtttctcttgatttagcagctgaagaggcctccccgccaaactcaggcaccacagccggttcaatgtaacgcggccggtgggtaagtaccttcatctttttgcccgcagccttcgacacaggctcagctgggtggccaaagcagtagcttttctcttcttcccctgtccccgcagcgggtagcggtagttggggtagacgaagccgatggcgtcaaaaactctattcattctcttttttcctcgacctctaaaggctgcagatagcgcattatcttctgccttggaataagctccaagcagctcatcacttgtagcttcgatgcatttcagccagtcatcatttggttcatcaaacttatccccatacctgaatgtatacttcagctggaccagatcaccttcgttggacttggtgatggtctccttcggcatttcccagctctctacaagcggccatactctgaatgctatatgctcttgaattaaatctcttgtaccaatgaaggagtagactgtaccgaatgccttctgacacgcttcggcggtgtcatcagtttcgacttttggctttcggatactgaagcgggaccatatggggcgcatgataacctccttgatgtcctccctcgctatcaagtcgttcttcacataaaacctttcttccatccaagctcc

SEQ ID NO: 66247 - DNA, 322 bp, Zea Mays
tgaagatcgtcaaaaccccatattatcaaactaaaatatgtgtttcaggtactatgtaaaggagtagcgaagctatccttcgtcaaaagcaacttaagaaacatgggcgaagctgcggagctttagatgcatataattgcggcgaaggcgtgagccgaagaagacgactttggatccataggcatcaatatatgaatcaagagagaagaagaataataaggaagcttattccgcgtggaaggaaagggaaaagatagcgtttcccttgtgaaatttgtaagtcatgtgtataagatatgtgtgtgtggttgtaatttcatac

SEQ ID NO: 66248 - DNA, 322 bp, Zea Mays
gaaggaataccgcgaaaacagaattgagaagtgctctatggcagtctacctgggagaaagccgaagctacccaaaccaccctcctttccaagtcaccttcactagacacttgccaaaatgttgcccgaaaagccctccgacaattttgccaaaactacagtaaggaggtttttgaaacccccctttgttacttcccacctagcaacaaaaatacccccacatagaggaaaagacttcaggccctatcaggaagagatcctaccgaagatgaccccaccatcgtctacatggccggatatctccacactctcgataaccacta

SEQ ID NO: 66249 - DNA, 578 bp, Zea Mays
aagtagtgaattaaacattttatattttcccaaatcctgttcattctattcctcccagtatttgggtactataaatcctacccctcttaagaggaatctcgacctcgagattaagatgaactaggaaagaggtggggaaaatctactcccagctcttcttctctttcccaagtagcttcatcttctccatgatgactccattgcactttgcacattttgatcactttactccttgtaacccggatcaaagtatcaatggtcttgataggatactcagtataagtcagatcatcttggacactcaattcctctataggaagttgctcttctggtaccctgagacacttcttcaactgggatacatggaagatagcatgtacatccgcaagatggtcgggtagttccagttggtaggcaacttctcccactcactttaggatcatgaagggtccaataaagcgaggggacaacttccctttaacattaaacctcctcataccccggatcggtgacaccttcagatacacgtgatcaccctccttaaactccaacttccttctccaggtatctacataact

SEQ ID NO: 66250 - DNA, 1015 bp, Zea Mays
ttcttttgcattaaaaatcaatttccatatttaattctctatttttatttgcccctggactgcgagtcattttctgtaaagtacacgggccaatcaataaaaaaccctagacacagagggcacccgcgcaggatggcgggttggttcctggataaccgaggggttgttccgcaagatgcgcacgacgaaaggatacgaggtgatataggccgtccgatctaatgcttgcggctgcgattagattttatcgtgctatgaatcagtgtgtgactggcgtcatcagatcggaatccaatggttatgattttatgaagtctgaatcgcctcaaaccgtccgatcagaaccatacggtcccgattgactcgccacggggaaagcaagattgaatccccaccgcgcattcacgatcccacggctaccaatcctaccgcacttcacctaatctcgaccacccatcaagaaatcgacggcccgcgccatctcttctccgcgctcgcctgggtacggcgactccactgtgctagcgacgaacacctgcgaaccgcggcctagcgctttaaaaccccaaccctgagcccgatagcctcaacacaatgcagaactaatggtgaacacgtggatgggtaatttacctgtagtggcgcagaataattctccagccacggaaccgagctgactgcgacggaggagatagcggagcgaagaattccagactcccttcgaccccaatcgcttcttcccagctccgtaaaccttgtaggagacccgaacacaacggtgattccgcaccaccaccctgaggtggccgcacgggagctcgcgttgatgagattcccacggcggcggcacccgattggcggaatgccaagcttttcccaaccctctgatcacgttgatgctttcctaatcgaggcgcgaggatggggaagacggtcgcggggtcagcacataaaggcccgaggcgcccgccgttgcaatccaccaccctggaatcccggattccgttgcaaccac

SEQ ID NO: 66251 - DNA, 551 bp, Zea Mays
gacgttttgacctaaggatcctaccgactagtggaatgatattgcgtgcctgacccagttgggtgatgcaaggtgacacaagtattttatcctggttcgggctagatagagctctacttccagcaaagggggatgacacctaagtgcttacagtagggagtacaaggtggtcgagagagtgaaggatcacaagtccctagaattgattgaggctagtgtcaatatcgctatgggggagaaaccgtgaagtcttcaccctgcctaaagccctgggcacctctatttataggcttaagggtgggccccaggagcgtcagggttgggcgcatagggtgaggaggtgtggccaagcccttatacctggtatagcttgtgatatggcctttatacccattgttgacttgtgcccggtggagacgtccggttcccatatttaaatatctgactacgcagagagccaaggccagggtcgagagctcagtcacgtacccaagccatcctgatgggaagctgccatgctgtagtggttggagcgttgctgagtatggaaa

SEQ ID NO: 66252 - DNA, 874 bp, Zea Mays
ctccaagcgagcttgcgccgaagaagaaaaagttgaaggtgcttacccaccgaccgcgctacattgaaccggccatagtgcctgagtttggcggggaaacttcttcagtttctgaagcgaaagaacctactcctcccacacaaaagattgaagagccagctataatgccgaaggcgccttcgactaagcttattgaatcgaaggtcgacaaagataaagctgaaagatcaaaaactgaagaagtaataaagatgcccaaggttctaagtccttcagcagaagcaacaatgctgaaggcagaaaaaagttctgcgataacccctagaaggaaaaggatggtaaatgtattagacattttggaaacaacagactccaaacgcccctcttccataaagaaggttgctgaaagtgccgaagcacaggctaaagctgatactaggcagataaaaggtaaaactgcaacaatcgaggctggaaccgaggccgaacctatagtgccagttgagacgaagcttgccatagccgagcaaggggccgaagaagtacctccaaatgctgatatagcttttgagagaaatatggccaaagaaaccgaatcccttgctcccgaagcaccttccgaatatcctgattatatcattcgacatgcttcgggaaaaagattatccgaggaagaattttttgaagctaaacactatgcccgagaactgaagtacccgaaaggggctctagtgtttaatggtacggatgaagatgacttcttgtattgcctcccagataacaaagaattatccgtctgccaggagatggccagaagcatgggttttccgaagctcgaagttggtctctgtgccatgaccaaggacgatcttgc

SEQ ID NO: 66253 - DNA, 644 bp, Zea Mays
caacatagaaccattcttccatccaggccccgggccacctctttcggaatgttaggaccagctaacttacatcgacatggggcacaaagccgtaacaaccaaaattgttgtgatattgctccttgccagtagccttcgttttgtacagcagctcgtgcatattgcagaagcattttgcgcttggtccatcccttggcttcttacggcccaaataaagaccccatcctaataatggcttcgggagtaatttgatgctggaaaatctcgaaggtcttcagcacctcaaccagaaatttgcacaatgggaactgaagcccagccttcataaaactcctgtaaacaaccacctcattctcttcgggagcaggtgcaacactatctcctccagctctcacaatggaaatatctcggaaatatttccctttcatagcatcaatttgactctgcttgatggatgattttccgaagatggtgtggcttggtcgctagggccgattttctgcatcttcgtcttcactttccacatcatagtcatcactgtcgtcagaatctttggacaaatcaaccattattttgtttataatcttctctgtgtttgtttgttccatagtttcataaaacctagcaagagcagggtccacaat

SEQ ID NO: 66254 - DNA, 689 bp, Zea Mays
gttgtttctgaagctgatctcttccaccttgtcgaaatcggtgttctgtcgcctaaggaattatactcctggtggatctggcagggagttacagtctcgacggaggatacccacgatgcgattattttcatgccttttctcatccaaggactggcattgacagtgtcttccttctttcatggccttctttttttattctctaaatcttacgcatctgaataccaattctgtgctttaaatcaccgtgtttgtccacctcttccttggaattttcccaaactttgggctttggaaatacctttaccattgtcagcctgggatggccgaagggcagcatcagcttgtcggaggtgctagtttggaacttcgttgaggcaggaaaactgaatacctcgatattcctttgaaagatagtattaagggatggcgctttgaatggtttaccatggagaatcataagaagtcgcttcctgctcgctcaggaagacagcctgacgtccgaacgcctagctggacagaggtcccgaccgacttagaccttgttgaggccagggttttgctcgccgagatatctgtgttgaagaacagaggcctgaccgttgaagctgtcattgtcaactttgttttcaagaacattcaacctttgaaagatagagtctacccgacttatctatacaccggtgttaatg

SEQ ID NO: 66255 - DNA, 814 bp, Zea Mays
cagacatacagtaagacaccaatccgataatgacaaaaattatacctgtgtatagagctggacaaaatcacttgtctttggggtcaaaaagagaagtttagtacccctgtcattaggtgcaaggggatctaggccataaatgcggaatattggtctacatcccccttgcccatcaaaatttggcaccttcctgattattatacagttcagattcagcattctgtcaacaggaggccatgattctagtgatttgtgccgttttgacacatacttcaaatatctcagctgagaaggcactgggtccagtggtgaaaaaaactcagctaacccatcaggtgcctgtttgcagactgcctccagagctttcctctcatcattataccttttgaggtaaaccaataaggctgccaatgcaaaagcaagaattggccatccaccatgttctgcatgtattagcagaaagttgtcctggcttaatgagagccagctttcactcgatctcagaaaatggtgaatcatctccatggtgagcaaggggcacccttcatagttacgtgggtaacccatcacagacatgtcatagtatgagaaaatgctggcaatttgattgtccttcttgcttccctcaaagttgaataccatgaatgagtcgatagagtggcggccaagtagctgttttaaaattcctccaatgtatggcattagctcgtcttcttccaacaaatccgtggagtaacagtggtcaaatactgtaaagtaaggaagcaatcaaatcggcatcagaaacagagagcattttttaattagaaactag

SEQ ID NO: 66256 - DNA, 292 bp, Zea Mays
aagcactctctagatagctttcaaggtgtggaaagccacaacattgttgtaaagcaaccaaataatagtggaagactctacttatcataagtagtgataagttggagtaggagaaggttgaaaaagtgtccaagtcgtttggctacctcaacaatgtggagtcgggaaagaatttgaggcttagtcgaaccaggggataaatcttgtgtcttgttgctttgcttatttacatttcttgcacttcatattttatatttggtataagtgtttgtgaagtgtaggtacttaatcg

SEQ ID NO: 66257 - DNA, 480 bp, Zea Mays
gccacagtacctaactcgtaatcctctgtacttcatcagtagccttggtcgggctgggtgagtgcctgtagcgtcgttgggagctcgccagagatttctgtcgtggctggtaatgtgccgtcgtcggctggcctggggaagaagatgagagacagtcccgttagatgcgctatggacggtatggattcgaagtcaccataccgtttcactttgacttgtcgcggtcgtcggttttcagatatgcggcccagattagagtggtcgtactggtttagctgggattgatccgagccctcgatctattatcggacgggtgcagttagatcacgcgttaatacaaccccgtccatggatcttggatccgacggacccgatggcgtaccgtttcatatggtggctggttgtatccgtgtcattggcctttgatccaacggatctcatttgatcataccccttcatccagacacattagcatagggg

SEQ ID NO: 66258 - DNA, 479 bp, Zea Mays
ttataagagaaaattagtattacttgggtgccctgtttgttcactatcttgtttcatctcttcagggagttcagtctcagatgatgcagcaaatgcgaacgaaacaataataatcagaggaatgactaaaccacggtgccttgttcattccagagtcagtcatcctgcacaaatggacaaaaaacaaaaaaaaacgtgttagagtcagtctccaatcaggcacatgaacagatgactaatatattaatattcatacaagttaagggatataactttaaaatacagtgttgtaacttctagtgttatttctaattctctccctagattgcaattgagtatctccataatcatcatggcaatctgcataccaataaccgacatctttttcttgaggaaagtcccatttaaatctcagatttcttgatgaattacacccatcacacaagaatgagcagtcacacaaaacctacctggctgaa

SEQ ID NO: 66259 - DNA, 1257 bp, Zea Mays
aacttatgatgcccttgtgcttagttagccaatccattcataggatcacatcaatcccttgggatggcaagacagttaagtctgccaggaacactaccccacttaaaagaattctgacctgggagcatttgagctgacatagaaggtctgaccccggggttcgggtgaccaaaggaatttctaggggtgtagagggaatgccatgcttttccacaaaactagtggctataaatgaatggaatgctcctgaatcaaaaagtacagtagcgggagtaaattcgacaaggaactcaccgggcactactcccggagcttgctgggcctcttgagcatcgacgtggttaactcgtgctctgccctggtactgggtcctgctctgctgactgttagagggggtgccttggaggcaggtgctgaggtaatcttggggccattcaccgagttggagtaggtaggtccggatgccttcaactgggggcagttattcttgaagtgactggggtctccgcagtgccaacaggcatttgctagcggttggttgcttgcaaccgaggggccctgaaaggaactctgacttcgctagctgtagcgtgacggagtgggtccgactggtctattgaagcttggtcccttgggtggaagtccgaaggttcgagttctctggtgtcggtcttgctgctgagctcggagaacttggaatttcctcttgaggtgccctttttcttcttcttttgccctttccacttgtatggctttgttggagaggtgcgagaagctgaggaaatcttggctggcgaggatggtcttgagttctggtcttagccctttcagaaaacgggccatctttctggtttcggtgctgacatcgttaggcgcgtaacgagccaactctgtgaatttatgcacgtactcactaacagatcttccaccttgagttagttcccgaaattcatcctccttgagttgaacgatcccctagggtacatggtgctcgcggaaagcagtttcgaattctacccaggtagcatccctgacggccttgctgaaggtatcccaccatgctaggggcatcccagaaagttgatgagcagccaattgaacacgctgattttcggggcatccgatggcttccagtttcctcttgatcgtgcgcagccagtcgtcggcatcgaggggattgctggatccagcgaacgtgggaggcttgagtctcagaaattctcccatcctgtcctgtggtcttccaccacctgggcg

SEQ ID NO: 66260 - DNA, 965 bp, Zea Mays
tgcaaatgcacccacaaccaaaagaaaatttagaggtaatcattagatattgacattatctgcacctcctcccaacaccatgcacccatcaagtcagccaacttgtgcctattacagataacatgctctagactctatatgcatggtagtgaggatgtagaagcttgacacgtgcctgaatgctaggtacaagctaacaaactcatttgtagatctaccatgacctacttggggtcctcacctcactcttgcctttttaacaagaatgcaaggttgttttaacttgtaggtttcaccatattcacccccatgtaggtggcatcaaggtcctttcatatggtgtgatgtagctaccactagggccagacaatagtttagaccatcagtatgccatcatcataagcaagccactagaagcattagaagagtactcgatcaatgaagctgctaaatgaaatgacatcatcaaagatgacatggcatgagatattagcacaacaagtagcaatgttaaggcaacgagagcctttatgcagtgctgactgaataagaaacaaacatgtggtagatcatggtaataatgaggggtcatggtagcaaggtttgcataacaaagacaatcaatcacacataagtaagcgtaattcgaggctttgcaataaagatgctcattagggacaatgttatggacagacgatgttgaccgactaagaatgtatatggttattgcttgtcccttggcctaataagtagctataatgtgggcatggatgattgaagtgtctctaatatgttaagagtgcatataatgtgttcacatgacattttgagaggatatgtatgggagtgatagacaaaactgggcgccatggcctaataagtagcttttgtggcatgttttacaaattttgtgcccttatctaccaagtacatttgagtggtaggctaagagagctctaaatgta

SEQ ID NO: 66261 - DNA, 1074 bp, Zea Mays
ggtttgcttctgccagggttcaacggccgatttgagcaccttagcatgcagatcttggcaaaacccccgtgtatggtctcttccctgcaccaaatcctacctttttgatgtgagttccaagcaaggatacgatcggggtagagagatataggggtcagaagtcggctctgtcagaactgtccacaccgagacaaaagccatgccaagtcatgtcaaacgacttagggttgggttcaaacttttccagggtgttctaggggtctttaggcgccactttgtcaattgggtcaaatggttttgaagtttgaaacagggtgaacatgtttgatctttggaagagggttggttttggacttagaaaaaaaatctgattttccatttatgctcttccctttggtgaactttttggggtttttttgaaacctttttggggtcacttccttactattttttgtagggtattaggtgtactacaaatgttataattggcccaagtcatgatcatggggttttcatagccctttggtcatactcacttctagggctcctattgcccaaaggggtttgaattagggtttgggcaattctccccaatatatgtgcatgataagccaaggcatgacttctaagatgagttgcacttacttaggatcttgatttccaagtttggtgtactttgctcaagttaaatcacatgtgatgatgggcttgacttgtgtagccttgagtgaaaaccctaagtaacacctggggtgttacaaagtctccgccgtagccacatccaacgcaacaaaataatccaagccttcatccgaggactcctccatccaaggaaacgaactcccagattcaccatcggactcaaaatactcagacatagaaccaaacaaattatcatcggcaagcactatggttgaggccgccacaaaatcagtatagtcagcagcggttgcttgcgcaggtccaaacgtcggaacctacacagcaaccgaggttcagtatcacacagacaacagtttacacttaaaatctccaaaccctattctgacacctatgaaggcctggccgccgccg

SEQ ID NO: 66262 - DNA, 751 bp, Zea Mays
aaacctttgtcctttttggcttaggcgcggcggaagaggatgaagctgcctattttctctttgacccttgttttcgggtaggaaagcagtaatcaggataaaaaatccgatcacatcgaaaactctattcagcctcctattactgcgagcgccaaaggcagttatcatggcttcgtcttctgcctttgaataagctaccaatagctcgtcgatggtggcatcaacaaactcaatccaatcatcaatcggctcgtcaaattgacttctacagcgataggtgtatcttaagtaaatcagaccaccttcgttggagccgacagcagtttccttcggcatctcccaatcattcaccagtggccacactttgtaagcaatatgctcttgtaccaaatccttggtaccaatataggtgcacacagtgttaaaagccatcaaacacgcttgcatttcgttcccagttgcaatggacgaccttctgatgccgaagtgtgactgtatggggcgttggataatgccctccacatcttccctcccactcagatcattcttcacatagaaccattgtttcatccaatagcccgaccacttctttcggaatgtcggcacggggtacctcacattagaatggggcacaaagttgtagcacctgaagttattgtgatacagttccttcccagttgcttttgtctggtaggataattcatgaatgttgcagaaacatttagcatctggcttcaacccttggcttctc

SEQ ID NO: 66263 - DNA, 469 bp, Zea Mays
gttgatttgtcgaaggcggaggtggcgtgttcctcattgtcaaagttggatgaagagcagtcctattccttaccgatgtgtgcctcgcccttctttttcttgtaaaacttcttcttgtccttccccttggtgttcttgctttgatcctagtcatcattattacgtcaatttgctataaaatgatcggtcttaccgcacttgaagtaggcgcgcttccccttgattttgactttgttggagaagtccttgcgctccttgagtgcggtcttgaagcgattgatcacaagcgacatttcctcctcgttaaggccgacaacatcaatttgcaccaccttgtcggcgagagcctccttgttgttcgttgctttgagagcgatgagttgtggtttgttgtagtgggggctcccgtttgcagcgtcgtcgatgtaccttgcttccttggccatcatttgttgactcacgaacttac

SEQ ID NO: 66264 - DNA, 600 bp, Zea Mays
tggacggtaggtaccaaaactagaaagcttagggttcaatgtataaatatttgggacctaaaggtaatgatctttctactactttggagtatgggtttgtttataaatatctcgaggtctgatatgcaaaacctacacggtgaagggttatgggatgatatcgatcgtccgatccaactcggacaatccagattaaatgttttattgaaccgaactagtacacagttgtgacccttggatcaaaaacctatgaatcatatcctatcgactgaaaggttatgttttaacctgagcccttatcatagatctatgactcataataaaaggtgaattggtacgctatcacagcctttggatcttggatccatgacctggattaaagatgaagcgatatgcgactaggatcgttgaatcctcatcctacagccacgatttaatgcaccgatacgatatctctatagtgaccttgaccgcccattggctgatcaacactctccatgccttcaccatgttgccgactatacaggcagcggcgctgcccaccccccacggtagaggcccgccggagacatgcgctccctagtacccgatgccctgaac

SEQ ID NO: 66265 - DNA, 472 bp, Zea Mays
aacaaacgcacgcgtatctggtgtaatctgttatgggcaaccgggagctgcgcctcccttgatcaccgcaagtcggttgtacatgaattgtaatcatctctataaatagatagagccacagccgtattgtgcgtggcgtcccaaacattttcacatggtaatagagccaagatccaaccaataaacaatggccaccctttcttctaccacctcctccctcacctcctccagcgcttccaccatacaatctactcctgctcctctccatcagatcgttaccatcaaattaaccaagaagaattttctcttatggcgtgcgcagctgcttccttatctccgaagcaacaaactcatgcgcttcctcgatggatctcaacccatcccgcccgcaatggttcctgcgtcaacaagcgccggtgccgaactcattgtcaacccgacctatgagacctggtatgatcaagaccagcag

SEQ ID NO: 66266 - DNA, 957 bp, Zea Mays
ttggcgacttgggccgaagaaagccattttggcccacttatgcctccgcgcagcccaacaaccactcttgtcgttctcgcttgagtcactatcacgtgggtccagcgtgtcagtttcagggttcaatgtgttgcacgacgctgagattgccaggtgggtccgaccggccagccccgcacgcagtgcgggatctctttctccaccgcgcactccaccctgtcgattgggggccacccgtcatgttctccctcgcgtgactgggtctccgcctccgcttcacccggcgtgatggccgccatgacgcaactactccaacaacttcggtgattttctgggggccaagttccgcacgacaggcggacttcaacgactgattgagggctcagctaacccactacctagttctcgcgcctatattaccttcttgaccatgccctccccttgcgcgcttgaatccactgtgagatcgtccgctcgccattgccgctgaccgaggagaagaagagagagattgagtgcttgcgggcgacaccgtcaccgcactcacatcgtgtgggttcggttggtcgcgggttggagtctgcagggcgcagtagaaccacccacagcgtcaacggatgcgttggggtctctcggtggcaatccgccatggagctccggtcgtgtggcgggacttcgcatcatcatcgccaacctcgtccttgcctcagtgtgagtaagtctccctcccaccgtactcgctacatgcttggtagatgaacgtcggactttagattgtagcaatcacgggaacgcggggtagagctggacggcaacggcgccactgtctcgcgcgcgcatgctgatgcccgaggtagaagaggactgggtggccgttgatccagccctatacggtggatatttgatgacagtagcaactcagccagattgattcgtgaccgttgatgccagatcgtg

SEQ ID NO: 66267 - DNA, 350 bp, Zea Mays
taaccaaattatagaatttgcatataccatgcaacgaatctgggaaagcagttcacctatgcatgagttagcatttataccgggataaatagattgaataatgtgtataaatcatgcaaaaaatctgctgacacgcaaatcacgtgggatgactttacaagtttgttcagtgtttacgactgcataagaatatgaaacgtaacagcataaaccatgcaatatcgcgacgtcagaccatttatgatattgtatatacgtgaccagtgtgtgcgtaaatctgggttggtctgagattaggaaagtagtgctgtaaattcgcgataaatgtgggacgattacagcgtaaatcg

SEQ ID NO: 66268 - DNA, 513 bp, Zea Mays
gtggacggcatcgtgggcatgggtccacgttccaggaagagggagggatgagagagcgttagggggtgaatggtccggccgagggggagaaccagccactggcgggttcaacggcggctctcctcctatcgtctgattctcggaggacaggaaggtgggctagcacgagtaggggcaggcgagcacggtggtgccgattttgccagtggcgatctagagggggcctaccacggcgaggtggcggagcttcgcgatgggggtgttaaccagcgaggttctagtggtggtcgggggcaggggagtggtgctctatatttgtggtgatgtagtgaagcttctatgctgactggattgccttctatgcggctagagagggatagcgagagctcaccagagagggggagagacagcggcgccgacttgattgggctcaggggagggacgagagtggccgagggctggtgcgggggatgaaggagttcggggtggcccttttataggtgcccgaggagg

SEQ ID NO: 66269 - DNA, 341 bp, Zea Mays
gccactttgcgagtcttgccttaattctgtccatggaatatgcttttcgtcattatcacttttgcccttatcacctctatatcttactttgatgtttatcttatttcggccgtttaaaatctcctctttaccatctcaatccgagagttgtatgttttacccatttttctcttagatgtatcatcttctttgtcacttgcgagtttttaacttcatcctttgcccacttttgtttgttattacctttacctttcccatccctcgaccataccttggtgattacgttatgtctcttatataaaatctcctatcccaatttgagagtggtgttttacttatct

SEQ ID NO: 66270 - DNA, 633 bp, Zea Mays
attcttggcatgtgttgttcctagacggattgtaactttgcattgggagtctccaaaagttgtggacgaccccaagaatgatttgtaccacccactcttcgtgagcacttgagtaagggatcgtcttgacctatgtggtaggcaacggggaacgaggttgagaaagacccaaccctttgtgggcacctcaacgagtagggcacctttgtggtgtgattgaacctcagtaaaaatcgtgcgtctcgtgtgcttttgtgtttgtgctttatttatatccatattaggccttatgtttcaagtgaaatcttattcaatgcttgtattgtgatttttggtgtttgattcgagccttaatttccctttgcagttcaaccggggtagtgcggttgaaccgactctcaatagcagttgaattggccttgctagtggaactggttattctcaaaaagttcaaagtttgtggtggaacatttaggtgtagccaattcaccctccctctaggctactttcatgatcagttactattatgagaaaatggcaccttggaatataattgtattcaacaatggagatgacatgcaacaccaactaagagtagcaaattttattttggtcccattgctcaagcctaag

SEQ ID NO: 66271 - DNA, 511 bp, Zea Mays
aattgactttacctgtctcttctggggaggcgactgaggtcactttgctagccgaccatgggtaccaaccctttttgacatatttagataataattgatcaaaagatggtacaactttgatcagccaacctaatgctttagctatatttgtcttccacgtacctatttcaggacgtcgtggtttgaaggtacgaggtcattgatgctcctacgtgttgtcagaccatctgctaggcccctttggactgtccgacggtgacatagaccgttcgttcctatgtgccggactttccgcaatgcagagaatagggggctgcacaatgtcacctgctcatgtctgccccaagcattggaggccatgatggtgatcttcaatgtctctcctccatcaagggtctttttaggaaccactttcctgcaagtaggtttgacatttttgtctgcagctcaagagtcgtcgatgatgatctcattgtctttgcccttatcggccgtgttaggacgaaccaac

SEQ ID NO: 66272 - DNA, 448 bp, Zea Mays
caaagcttgtattgttggtcccataacaaacttagaaataactaaatcttgttagcataaggacctttggccaaaggcactcccccaacagtagcgcctcatgggattagtttgttttctataatgggttcggatcacgctttaaatgaaggaggtcttgtgcttaaggtttgaaaataccttccttgagcgcattatcaaaaacatacattctcaaatacactttgtagcatgagtggcaaaaatcagcatggtggtccaccgacaacgagtgatcaccgtttgactcctcgactcatgtgccttttatctatataacagaatcgacctgcatggatcggtcgccacatttgctgctgccgccaccagtttctctacctccgtagcaaattagctttattgtttttgtgattttcgaaagtttgacattcatgcacttgcaaatggt

SEQ ID NO: 66273 - DNA, 276 bp, Zea Mays
ggtaatctaaagtatcccccaaattatctatggtaaggtacgtaatctatagttcaggcgacgtttccctaaacattcgttcatatgtcaagggaagaattgtaggcgtggcccatgtaaactggggaggtgggagagagaggatcaagactggattagagcccctgcagcaccaagtaatccagggaacatggttaccatggagcaacttgacggcaaacttcagaagaagacattggttttgaagcttaagattttttatggcaagaccaccga

SEQ ID NO: 66274 - DNA, 324 bp, Zea Mays
gaggcagcaaagatgcccgagattctaaatccttcagcagaagcaacaatgctgaaggcagaaaaaagttctgcaatgacccctagaaggaaaaggatggtaaatgttttagacattttggaaacaatagactccaaacgcccctctcccatgaataaggtttcagaagcgcaggctgaagctgatattaggcagataaagggcaaaactgcaacaattgtggctagggccgaacccgaacccacagtgcctgctgagacgaagcttgccacaggggccgaagaagtacctccaattactgatatagcttttgagaggaatatg

SEQ ID NO: 66275 - DNA, 368 bp, Zea Mays
atacatggaacctgcaatacatccgcacatgatctagagatcttgcaaccaaaccacaggcatgacagctaacagcaggacatagctcatcctctgcatctacatgccaagccaagcaattgaggataaccagtgggggtaagctaggtagcgatcacacagttaatacatttgccagctggcctacaaggagtggcctcaccagcagatagaaaggataggaggcatgggtggccaccataaccatgaagacctacacacatcgagggggtgagtcaggaggccacgcatgccaaccgctgaggaggcagggccaagacacgacctctccctaggctcaatctggagcggagaaactccaccgcccg

SEQ ID NO: 66276 - DNA, 281 bp, Zea Mays
ttctgtcctcttttgaggtcacccaactccgaattgaattggaataaatagctgaattcctggaccaggactcttggtagtgtcaacacgccttggataagatgaacaacgaaaacaaatatgtagacaacgacgactacgtgccctcagacatctcctaagcatcgtcgcctatggaaccactcattggtgaattgttcgactttgcttagcatttcaaacaaatgtgggtgtcgaatacgattctgaccagatgtcgtcgtttagtgacaatgagctat

SEQ ID NO: 66277 - DNA, 534 bp, Zea Mays
atcacggggttatgagaatgctcaaacaagggagcaaaaggtgggggctgacctgaattacgctggccgcggtgagactggtttaacggtggcggaaacccgaattggggagacttcaaaattcgtgagctctggcgaacgatcgaggctaattcgtggtggctggatacttcactgtcttacggagctcgcggcgggcttaatttataggcttagcgagcggtggccgtgaatttggacgagacacacggcggccggaggaagggaagtttcactggcgcaggcgattcgtggcctctaccatggcggtcattccggcgatcaacggagagtcactaaggcttacggcgatgcgttggcgaggcttggacacgcggcggacaacggcgacggcttaacggcggtgagaatccttatccgtgggtggtgagtaaggggagaggtatcgcatctagccagagtggcgtccagctcactgacgacgatgatcttttaccccgcgacgctatccatcaactccaggtacaaatccag

SEQ ID NO: 66278 - DNA, 487 bp, Zea Mays
gacgatgcgacctccgtcttgtgggacatcaacgatggtagaatcttggggaccttcgccttcgagaaagtcgagcccccacttgtggcttgccttcaagtacttcaaacttcgctgacactagtgaagcccttcatgttatcaaagttcatgtcatcttacacgggcaccatgaagcatctcccttcgaaatttctattcaacatctatatccgcatataagattagtgcaatgttcactagttgcttagctagatgattgaggtctactttgaccttcatcctaatagtagccccctgagggagaggctcaacgtaatggtctgatcccgatgtcttttgagaagagtacgaaagctatcctcgatcattagttgagttgcatcgggggcatggtcaaagtgactgagtgcatgatgttatcatcgccacccagttatttagttgcacctataaaaggtaaaatgattggttagggtttttcaac

SEQ ID NO: 66279 - DNA, 390 bp, Zea Mays
ctccccaatctccagtaagaacctcctttacatgtccgctttcgtcaacccttggcgtagaaccggtctcattagagtcagcgggcgcgcggcgaggttgctgccaccagggagggagcgccgccctgtttgtcgcgaggtggaagaaagggcaccggccgttgatcaacctgtgaacgggtcagattgaaatgctggtaccttttcactccagtgaaccctgaccattgatccgtgtatcaacgatctagatttggtctgggcatacctcttgtgtgggcagatcagaaccgttgatctgcaggcatgcagccagaattagatcgttgggtaacccttcgcgcatgtaaccttggccatcggatcgtgatcccacggctcaggtttgat

SEQ ID NO: 66280 - DNA, 383 bp, Zea Mays
gtgagtgtaggtgaaggggagttgcgggatctttttgagggtgaggagttgaggataatgttgttcaactacagggagatgggtattatcccgaaggttgaaccaatgtaaagtgtgatgccctcgctgtaattaagatttgtatgagtctgcttgccttcgctgatctggttgtgcctatgggcaacttgtgtgtggttcggtttgcggggaatacgttgattttgttcccttgtgctaatctggctgcacctgtaggcgacgtttgcacggggagtgttttgggtaagacttcggttttgcacatttgttgtgctattccggctgcacctttaggcgacttttgcacggggagtcttttggggaagacttcggtttttcgc

SEQ ID NO: 66281 - DNA, 572 bp, Zea Mays
cacctgcaacccctgcgtggagtaggtatgcacattgaatgctcctgtcccctgtggacttcggctgagtcttgtcctaggtttgtctttcttacccgaggcgggctcgggcgaggcggagactgctgttctggggggaagggacctcgtctgggacgtggattctctcccaagaacacaccctatccgagggcaggctcgggtgaggcggggttgtgatgacccctgagaggggccttgggtgaagcacgacttatgatccttcgccctagggtaatgtgccttgattgtagtctaggggttaagcatgtattagggggtaatctatgtacccctaattatgatacccgacagtagcccctgagccttccaaggaagtgttttgatacttgtttggaggcttttctgttcatcgtgcgggtatgatgcttaaccctaagaagtggaagatttgtttctgatgggtgcgcgcgaacgcacccatcgggtgtagccaccgaggccttgaaggagtgattgactccttagaggtcttaatatttcattttatagatgtcgttggcttcatctat

SEQ ID NO: 66282 - DNA, 463 bp, Zea Mays
tacaggcaccgtgtcttcatacttcagtaaggggtacccctgattcagggtaccgacaccacccatacggtttccctcccttgccggtatagtgacatccgcattgagtagccaggtccggcagcctgggggccagttctggagaatgggtactcatctcctggggtggtccgggactgtgtagccacttagcttggttccgcaccctaagcctgcacgatccaccactctgtgatgggtatcctagtatttcgaactatagccctgtgggttcaggaacctggggtacggttctagagaatggacgcacggcccctggggtggtccggagccatgaagccacttagcctggtcccgtaccgtaagcctacacgctccaccactctgcgatgggtgtcctagtatctggaactgtgattcagggggcctgggcacacgacttggcttcgcaggccaagtccta

SEQ ID NO: 66283 - DNA, 608 bp, Zea Mays
ggtggacacaacaattgagaaaggaaaagaacaaattaaagatacttcggaagaggaaaacttcaattttcaagatatactagggcaagagttgtcagaaactgaaaaggaagaactgaagaaatatgatgtatcctgtgggtacaaaccaggggctttgctgtttggcggagttaatgaagggaaattgaggtgccttcggaatcgaaccgaggcaaaggtcgttagaactttctcgaagaatgttggcctgccgaagattgaggcggacctctgcaggtaccggcgacagcatatcgccgatagcctgttctatgctaattttaaggtaaaactcttaactttttattattttttgaattaagatgttttctgacgaaggttgttttggcagagtatactattaagtaaagtgctgaggatgcaacaagatctcgaagacaagaaaaacgaagctacaattaaagatctagaaaataaagtcaaagaacacgaagctgctttggagaaaaaggacttcgtcatccattttatggagggttcgctaacagaagctcaagccgaaattgacaggttaaacaactaattgctcacaaaatcggaaaaat

SEQ ID NO: 66284 - DNA, 502 bp, Zea Mays
ccgctagcccccgaccgatcggatcctctcagcctcaagtcaggacgtcaggtagccttttgcgtagtagtacgtagctctcgcgtatcgacgttttcgttggacagtactagttgcgtagtacgtacgtagctctcgcgtcaggtctgcttcttttaattctagaactagaatgatgtgtctaggatgatgtgtggggggcaacgatatttaatctctgaatggtaatcactcctgcttagatgatgatgatgagtagcatagacggtataaggacgtgcggtgccgaaatgaatcacgtcggtctcgtccttaaagatggcactgttgtatatatatctcacttgttgggggtcataacaagttagcgatgtgaccccatggtttagtaaaccctagctccgtgcttgcggtatccatgaccaccatgtgagtcgtcgtcggtttcagcgaggtgtacggcacggacggacagaacctcagaaacctgctgccacgcagc

SEQ ID NO: 66285 - DNA, 603 bp, Zea Mays
atcaacggtgcgcgagcgagagaatatcgaaggcagaaccatggtgcacagggtgtggacgcgtacaatgcagtcttatagagtagtagagaaatacatgatttatgacataattgttggacttggttggtggggacttggtcgttcgccccgcctcgcagacttgctcgacggggatttggtcggtaaatgggccagagggaggtttatggcctcaccttgggtagcagccccaagcattcgtgcgataccttggagtcggtcggaggttttcttgccgaggatcagaagcccctgagtgcacgcaagcacatcagtatgatgtagcccatgagtaatcagtgacgattgcttgggggtttacttagttcctggcgaagccatgggtctgccttttgacgacttcttttgaccttatggtcgtgtcggattcgcttcattttgtgttgtggtcttgatctggccctttgggttggtcaccaaagtggatcgttgcctcagccctgcacggagttgcccgggggcagcgatcgctggagcgagcgtagtctctagggacatacccgtacggagttgcccggaggtggtgcccgccggagcgtg

SEQ ID NO: 66286 - DNA, 405 bp, Zea Mays
gtccgggagggtatatccctcagaatcggggtgcactgcgcgccggaagtccgggaatctctcaccggagtgggagcacagctgttcgtccgcaccacagcgcctatcgatcagtgtgagttgtccgcgcctgtaagaattgctcccttcgattcatcatcaatttagttacgcttagaacctcgggttcgggaatttggtgcgatattgcctgggattgcgttcctccggcgatggtccgccgtgtgtggggggcggcgccgccgcgtttggctgagggatagtgagtagcgccacgggccgtcggatgatctcttgacggtcttgatcaaaccagagccataccggttgggtggaatactcgcagcccctggatcgtgatcctgcggctcgggatggaatcgc

SEQ ID NO: 66287 - DNA, 405 bp, Zea Mays
atcattttgtccaaagtaccctagtttcttcattaaaactagatcctctaccttaactgtggatctcccgaattcgatatgactgggtttgctcgggcttaggatgttgtcatcatcctcactttcattgtcgctttcaacttcggcagcagtctattcaccttcggcatcagcagcaccttcggtgatcgtctcctcttgcacaatcaatctagaacgcctcatcatctccgaaatcggtgttgtctcagaagtcccaacttcatctccttcacgtgccaccctagtagtagatcttaatctagtcatttcacttttcggtctctagcagacgaagttgcacttaagcggtggaatgtttgtccgaagtgtaaaccaacaaccttcggcttgaataaaaatttt

SEQ ID NO: 66288 - DNA, 1301 bp, Zea Mays
cctccgtgaggcgtacctcgggctcgagcgacgggtggtccggcggtgtgcacctcctcgcgaggcctcttctcctagcgcctgtcaggttgctggttcgtgtcacgccgtggtgtgggtggtacgggtttagtacctccggtgagatcctgggcccgctcatctacggtgatgtagaggtctgcctctcgaaacagttgctcagagttggcgtgcgctttctgtagtatggctcaaacgaaggctgagtcattggatcctcggtagaaatcttcaatcaccgctgcctcggtgacttcggggatgtgattcctcatggtctgaaacctcttaaggtatgactggagtgtttcatcgcccttgcgcctgatggatttgaggtcacatggctgcgccggcttgtcagagagggactggaagttggcgatgaaacgccgactgaagtcgccctaatcgtcgatgcagtgtcgtggcagatgtcggagccactgcagtgcgtcttgccctaggacgatgggcaaatatgctgccattacatcttccgtcaccccggcggcccgagcaacagttgtgtagacgaccaaccagcccccgggtcctgcttgggctcgtacttgtcgacgttggagactttgaagttgggggggggggcactgaatggctcagagacgtggagtaagcgtggagaccctgcatgtatcttcctgtcggtgttcgtgaggtcggtcctgaggaggtgagctggtggtgtgtcgtctcgaccgttctcgggttgggccactagtcgaggccacaaccgactcaactcgagtggcgtgacttcaagctgggacgccatgatctcggtcatactcctcctggcgccatatctcgctttcgtgccatcggtcgcacgaagcattgatggagctctgcgtgtctcgttggctattgatggcttggtgtagttcactcggggggatgagcgatggacagaaggtgattagctgctcgagtaagcagcccctggtagccttctgcgtccagagttcgtgggaggccatcagctatttgggctagcacccctccaacttcacttggcatgttcattgcgcaagcgaagtcggggtacaagtttggagcaaagagagggttctctcggcgcaaccttgcgccttgctcgacttgctcccgctcggtcctgagcctgtcggcgatcacggtggcgagaattccgtctttctcggtgtagtcgctcgtcgggagtttctcccacttctgaagcttcgtcccgggatacgggctgcgctgggtcccgttcc

SEQ ID NO: 66289 - DNA, 578 bp, Zea Mays
ccgccaaccgccaacctcatatggtagggacgtcaatcatatacgatgatgaagacctacaagatgacatagacctcgacatcaacactgaggagcagctgctactcataagtctttgcatgcgcaacaacaacctctagaaacagtggacgcccttgcagccaagagacagcgtagcgaaatccaaacaaagattcacaaccttatccaacaagagaaagagcgccttttggcccttgaacaagaaattttagagttacaagcctagtaggcaccacctcacccctcgcacagcagagcaagacatggcaactttggcaaagtcaggcagaccagaaagcacgacaccttccaagccttcaacttcaatgacgaaaagtgccccctctcaaccaagttgcaggagataccctagccatgcaactacagagcaggcaactagctaaaatacaacggaaaagtcgacccctcatagtttatcatgggctaccaggtggcaatggcctccttaggaggtgatgacaatgcaatggcaaaatcgctcataattgccctctagggctctgctttaacacgat

SEQ ID NO: 66290 - DNA, 1044 bp, Zea Mays
gcaaactaaggagaacaactttgctcaaggttgtaagctcacttgttgagaagaatccagagataattaagtccaaagtcgagctgtcaggctacccctggactgaattttcagtaacagtgtgatggggtgaactttgagcccgattttgaataagattcagtgactatttgatggtaagcattgtggcaaagttgaagatggattataggtgtgtaaccttgctgcagaaagttagttgagttgccatttgaaattaagagaaaatctggcttcaaagagctctgtcaggtcgactgactgagggagcaccatggtacagtgctcagattgggataaggctgccagcaccggatgttcaccgccggcgacctctctgcgccaaaattcgtgccgccgccgtccgggttcgtgggcggtagggattggataacgccggggagagggtgattcatacgtggcgccatctcctgagctcggccggagtgattcaccggcggccaccgcaccagtcatttccgccacagtgtcactcgcacctcaattctacctcactgtacttatcttctacgtggtatacatgcgctagcaaggttatctgcggccactgatcgcttgtcggtccgccgtggctttaaatagcggcatgaaccacggcgaggcactcactgcctcaaccgcaagcttgagaagaacccaagattcgcactgccttctccacctcctcccaaatcgattgcgcacggtgaaagcacagcctcttaggccctatagccccgatctcatctcccaatttcgcccagagccgccgcgaccccacttccccctttcctgtctccggcaagcacgaaacaccgcgctccgtggccggaccaccctggtaagcccctgcccatattaaatgttgtttcgacagctctgtgcacttgtgaaactcaccgtggcgtctgattactcaatccggctctggttatgcgggaacgcgtgcccatggtcgcggtttccgccgtgcacatggacagaccattctcatggcgttcctgt

SEQ ID NO: 66291 - DNA, 333 bp, Zea Mays
atatgggagtgttccctactcttcacatgagacaaataaagggctatggaggctgccacacgcgcgcgctcatttgcgttttgtgtttcttcgcgttatttatcgcgtgacttgtgacttgcgacgatgcacgatcgcatcgtgatgtgttctaaatggcagtttaatttttgccttttgtttatttggttatcaaatatcacacctagactgccacgtcaaccaggagtaacgggcacacacgttacgtgtgagatctccgagcggttgcacatagagatattctagggggtggttcctggaatatagcagatcgaatcaaggggttgttga

SEQ ID NO: 66292 - DNA, 727 bp, Zea Mays
caggagaacccttagaagtagatgagtggataaacactatagagcaaaagttttgtttgctgaggcttacagaagatctcaagactgagtatgtggcacaccaattgcagtgacctgcagggatgtggcggtctcatcactgcaccacctatcctgagaatgccctaatcacttggcaatagttcacgatagccttccgaggaaactacactccacctggtctgatggcaagaaaggtgtctgaattcatgagattgacttagggtaccaagtcagtgatagagtatttacatgctttcaacaacttgtctcgctacatgcctgagtatgtggatacataagctaagaaaattgctagtttcaagaggggcttgagcctgaaaatgatgaagagcatgggaatctcagctcatgtctcctacaatgagttcattagtgattgtttgactcaagagaacaagaataatctctacaccatatcaaaagggcgtaagagagccttggagtctgcatcgtcgtagcctagaaccacggtgatggcttgacctaattacaggccagtgttacctggtgcaagatttttccctcctcagaagaagacccaacaatagggattcaagggttataaagcattcaaagtggctctaccacatgctacaactgtggacaaatgggacactttgcaaagtttttccctcttcctaaaaaggagactgatgtttatccc

SEQ ID NO: 66293 - DNA, 355 bp, Zea Mays
tggcatacctggtaagtcttctgggaacacttctgggaattcggacacaactttgatagtctcgagtgaatctggctccttgctatcaatagccatatgatgacaacctcctttccttagctaaggtgagactaactcagctaccactcttttcctagtggggacaccaacttaattatcctcttatcataactgataattgcttggtacttatctagccaattcatccctaggatgacatctattccctgagtacccattactatgagattagcgggaaacactatcccccttatttcacattcaagcaaaatgctatcggctcgaatcctaccaccggctgagtcaatttgga

SEQ ID NO: 66294 - DNA, 495 bp, Zea Mays
cagaccgggtgctgatggttcgaacatggcgtattgaggggtttctcgaaatggtcggtgcgctcctcgattggagaccaccttcctttctgtcctgccgcaacaaccagcatatcggcttgccactaccgatctctcctatttcttgcattgagctggctaccgaaacccccgtttgactccttgtcacgtttggccttctacttgtggctgtcgaagattgctcccaccttgtcttctcctaatgcatggctggttgcaatgtcaagaagctcctttgttcacaggctttttgccctagcttatgcataagggtctcgttggtggtcttcgagatgaaatagctgataatgtcggcatcagcgaggttggtcagcttgttgtattgccgtgagaagcattggatgtagtcccttaggttctcattcaatttctgccaatagttcttaaggtcccataggttgcttgggcatatatatgtgccctagaaattcc

SEQ ID NO: 66295 - DNA, 287 bp, Zea Mays
ccggtattggatcaaccggacatcgaaaagccctttgatgtgtattgtgacgcatcaggcagtggtctcggctgtgttctaatgcaagagggccgagtgatagcttatgcttcaaggcagttgcgctggcatgaggaacattatccaactcatgacctagagttagctgcggtggttcatgccctaaaaatatggcatcattatctgctggggaatatctgtcacatttatacagatcatataagtttgaagtatatctttacccagtcagagcttaatatgagaca

SEQ ID NO: 66296 - DNA, 403 bp, Zea Mays
ggaaagggcatgcggctctggcaatccgccgtcgtaaatggagcaggcaccgccgtgttccatgtaaaccagggtagaagacgctattgcgccgtcagatgggatgctgacggtttagattagaagtcgcgcgtaccccttcgcaagaatcatctcaaccgtaggatcgcgatcggtcggtcagagggtgtcagggtattaggaaatatgggtcgtttgattttgatccatcaaccggtattgaataccgattcggtcgagtatgcatctaatcctggcgatcggacagtggatcgtggctaataccccttcggccgagaatttttacataagagtccctaggtttctttgaaatagaacccgccgtcctattaccctgtactctgtgtctgcagagtcttac

SEQ ID NO: 66297 - DNA, 735 bp, Zea Mays
cggggattgggtagccgacttcggccctttcctctagccaccagaggtggcaccaccctcgtctgctccggggtcttagagctgttgggatggtctaggaagatggggaagggtgcggggaacccaatggtgggggatggactggggtaggggcaccagaggatgaggtccatggtggggcagcttggcggcggcactgggaactctagcgagcaatcgcgcgcaatggagaacaagggagggaaatggcgggggctggagaggttccttatgtcggtgttctcgaccgcacaccatgggtttacccttgtgatgtttttgggcaggacgacatcattgatcgtgactcgacggttcatgcggtggcacgaccggggaaacacacaggcttatacaggttcgagccgtgtgggaggcataacaccctatgtcatgtgatgatctttgtattgggatgacatcacaagctgtgaactatgagaacgatgggctgaggtgagatgaaaatggtaggggtgcctcttggccttatatacacgaccaagggtagctatccccgcacaggtgataaatgtaatccgttcgcctatttcccgatttgtagcaaactgtcctcctacatctagggaaccccctatgctcatctgcccaagttaccgccagaggcttagcctgtcgggtgggcacaaccgtcatgcccaatttactcgtgctctcgtggtgcctaactcgggc

SEQ ID NO: 66298 - DNA, 1152 bp, Zea Mays
gtccctggctagccttgatcatcgtctcagggagtttggggacacattagtaggaaacgctcgtgtgtagtgtaatccgtggtggttgttatgcttgtaatgaactggattgctgaataaaaataacatgtttgcaaaaaaattacatctgcatagtagtaatcctttctcccctctggtagatggcctcggatagaaccatgcctaccgccttaggaattggagtaaggactcccctaggtatcgaaggagaggacggaggtaaagggagtgagacccacctcccggcacctccggagatgccactagacctagcccaagttctggccaaccagactcgactcattgaggtcctcactagaagcctcgagaactagcgcccgattggaggaagacctcaggacagaatgggagaattcctaaggctcaagcctcccacgttcggtggatctagcaacccacttgatgctgatgattggctgcgcacagtgaagaggaagttagaagccattggatgccctaagaaccagtgtgttcacttagctgcccaccagctctccgggatggctctatcctggtgggacactttcagtgctgcagtgagagatgctacctaggcagagtttgaggctgcttttcgagagcatcatgtgcccttgggaatcgtccagctctaggaagaggagttttgagagttgactcaaggagggcaatccgttagtgagtacatccataaattcacagaacttgctcgttatgtaccagatgatgttagcacagaagtcaagaagatggcccgtttgttgaaagggttaagaccagaactcaagaccatccttgccagccaagacttcctcagcttctcgcacctctcaaacaaggccatccaggtggaaagagctcgagaagaggaaaaaggtcacctcaagagaaagtttcaaattctccgagctcaacagcaggacaagcactagagggttcgatcttttgggttcccttccaaggggtcaaacctcagaaagccagtaggatccgcttcgtgatgtttcaaccaacctagtcaaagttgcttccacacctagtccattgcaagcagccaacctccacccaatgcttgttggcattatggagaccccggtcacttcaaaaata

SEQ ID NO: 66299 - DNA, 982 bp, Zea Mays
catcacttgagagttggtcatcatcggagagttggtcatccggtccgtctcgtagagttggtcggcggagttggtcgtttttgaagggcctattttgggtactggttctcgggtactcaacaacatccttcgagccttcgtgtaacaccttggagttgcacggaggcttttgctgaggaccaaattcttgggtgcacgcaagcgcatctgctagacgtagccctcgagcaatccgtgtggattgcttaggggtttattcggtactcaagaagtttaggggcggacccttcctacgatggttgtcacgcgctgagcgtgagttcgcttagtgccagagccgggcatagtcttgggtggtgatcctatgagcgggtcgtcttccaagggcttgatccttgatatgcacacatccccctcggaaggccttttaaggtctctttgaggggaggttcaccttctaccgacctagtcggtgtggggaagaggcctttgagctacgaacgagttatccaagtgagacccgaccaacctccggtagggtgaggtctcagcgagtggtcccactagggggctcaacctgctaggggcatctcattgattccttccttattcgatcttggatcggccatttggtcggtctagccgaccaaagaggggccccatggacaccctgtcagctgggttaccacaggagaatgtgaggtacgaccttggacatgggcacgagaaaacgaactataggccagtcacctagcttgtggctcactaggagcttgctcggtccacccctcgctctacatgagaagtagggggtgagttttgtttttttcacctggtcaatatgaggtagttactatggtggaacggtaaaagaggtggccatcatgatgccattcgtcgcgggtggcttgatgggacatgaaatgacccattcaccgtatcatgcgcatgtggcatgatgggctggttaaccgccttgctt

SEQ ID NO: 66300 - DNA, 659 bp, Zea Mays
ctagagtgcttcagtagtttcaaacggttcacacttatgaaaaaacaaccatccaactaattttaaatcaggataaccaggtgtattcctaagttcatttgaatattcattttaccatgctagttcgtaatgaaccatttacatggcttgctacgaaatgttgcaaaccactccactagtccttaaggagagagaatgtaatctagaagtattaaaccagcacctccaatttgctgtcaaaagcctttaaatggatatattcaggctgttaacattaatttttatcgagtatgaaagggacacatacaaataggaatgtcctttttctggtattcgccccaaacatgaaattccacccttgctgcgagattcgaaggtgtggaccgatgaaataaggcattatggcacctaaaccacatggggaatcgatgattcacgcatattttaaagtggagacgaaacagttaccttgaactcgttgtggacggcactggctaaggcatgggcagatccggcgagagtggttgtcgactggtctgcggcgccgccttagcaccattccgtcggccatcaatgctggattcggctgcaacgaacacctcctcgctcgatctttgtcgccgctcttcaaatccacctagaggtttggcccagacaag

SEQ ID NO: 66301 - DNA, 381 bp, Zea Mays
gttggtattgttgaagtagcgcttcccaccaggtgtttcatgtccttggcaaaagttcatgaccgcgtggtcctccagaacatccatatggtgcacaatgaccacacgaactagtgcgagttttgtcacagccacgataggaaatattggtagagccatgtgcaagagatctcatcttgctcatgtattcagtaactgacaggttactttttggattgttgcaagcggtatgcatgttttcactgctcatgcacgtgatttgatcacgtacatctgctctagggtgtaccaaatcttgcttgggcgtttgatggcaattttgatcagaacctctcacgacaggaggtcataaggaagtcaagcacttatttatcagtagct

SEQ ID NO: 66302 - DNA, 434 bp, Zea Mays
cctacacctagaatccatcctgttggattcaaatgggttttcacccgaaaacggaatgagaacaatgaggttgtgagatataaagcgagattaattgctcaagggtttacccagagaccaggaattgactacaatgagacatattctcctgttatgaatggaataaccttccggtatttaatttcattggcagtacaaaacgtctatttctgcagttgatggatgtcgtgaccgcatatctttatgggtcactagattcagacatatacatgaaagttcctgatggaatacctataccgaagaatggcaaaaatcgtaacatgttttgtgtcaaactcagcaaatctctatatggcttaaaacagtcagggagaatgtggtacaaccgactgaaggaattccttatgaataagggttattctaacagtgatgat

SEQ ID NO: 66303 - DNA, 559 bp, Zea Mays
aagacgggtatgattcgggtggcgagaaagaacacagagagaagtaaatctgattagtctattcttgctcttgcccctttcaatccggcgcactgggtttaggacttagaacacccctgcgcccttgctactttcggttccggtatacaccaaggcatgcatacatagacatatacagttactcctacttcctaggcctacttgaaagttgaagcaaaatagaaggctaacatcaggtttcatttgtagttgatagttgactaagtaagaagcctgatccactccaaatagaacacctgaattgcagaagtacattcttcgtatatattgcacagttgaccattgtttagtgtgtggacatcattcacttgtaaattcatatcggttatgtggagcactagagaaaagtgatcgtgcttcatgaaccttccttcatacaaccaatacccaggctcaggctcaaaaatatacaatctaaacaaccaaatgctacctccagtatggtatttagaatcatgaatttcagggtcccatggtacactgtgacattacctgacca

SEQ ID NO: 66304 - DNA, 691 bp, Zea Mays
ttcattaatccatgagccagatcgatgacgtagtagtcttttggtccttaacatgtcttccatgtggcttgcacaatgaagttgtgttgggttcatcgtgtcatgtatgcaaaaccaaagttaagtgtatctagctaggtcgggtggcttagtggctagggtgactaggcggccatggtatggctgatcggtctaggggaatggtcgattggccaaggatgttgcccgaccaccactcatccttaggacttggcatgatgtcaccagcctatggaaacaattaaggtacatatcatcataagcctcctactcacactagagttagtgtgcaccttgcatatatccacatctccttgactgacgatttctcagaattaggtgatagtgcaacaatatatgtttggatttttatgtgatcttggctcctttgcttgtgctatagcatcattattgtccaactcagaaacaaactttctaatccatacaatttcctttatagcttctaaagctacaatgtactcgacttctattgataaatcaacgatcgtcgcttgcttggaactcttcattggaaatcaaggtttttttatttggtatctacatatagtaaggtatgtaacctaagacaacttaatgtaattgtcaagacaatagtgttgttttccttgcaaagtcaagaaaattaaacaca

SEQ ID NO: 66305 - DNA, 944 bp, Zea Mays
gtaacttggccttgcgccggactataaagtccgttcgccacgagcccctggtcactgtatccatcccatgaagccacgagcatgcatcgcatgctaatcaggcgggggagggagagaaggatcgagggctgcaatcgtcgtctgtcgcatgcaccctagctcggagtcctgctatcgtccgggatggtgcgccggggagtggtgatcttggccaacggcaacacaggcgcgaggagttgtgagggtgaaacaatttatcgctggtgtcggtgagctgccgctgagcagctgttctccatagactatgcgcatcggcttttaattctagtaagaacctactctctctgactcgctatgacctgagcatcgagtagcgcgtttcgtacttgatggtagagcatcggaaccacgcatcgacattctctggcgtaggttcgccgcattactgggcggcgctgccgtggttgccaatggataaaggaaaggagtcatgcgtcgtccaatcgatcgctgacggttgggattagaagatcacatacccctttagaatcatagccgtggatcgtcgatgggcgaacacgattaaatcatgatcatataagatgccagacattgatctcagatcctagggtctagaatgcgtaccaattcatgattggtgtggatataatctggtccgtcgatgccagatcgcacgatcccaagtgaaggataccccttcggtcgtgtctagatcacaaaagagaccttatgtttttatgaaaccaacccgtcgtcatgtttggtataacgggaaacccctagattaactttgcaaattatagatatgcccccatactttacaaaaaaaaatccttggtaactattttcagtataaaaattaatattaaatgacgttaagaacttgtataatttatatcttgcacattttaactctgatttgg

SEQ ID NO: 66306 - DNA, 496 bp, Zea Mays
acagtggttgcaaagctccagctgacttcaagtggcttgcctttatcctctgacaggtgtcacactctgatacatactgggctatctcccttttcattctggtccaccagtacaaaggcttcagatcatggtacatcttggtgcttcccagatgcatagagaatttggagagatgagcctcatccaaaattttcctcttgaggtcctgatctttaggaatcaccaatctgcttttgaaccataacacaccattttcatactggcagaaacaattatacttctcaaccttctgatggagattcttcttgataatttgcactcccttgtcactgagctgggccatgataatctggtcttgcaaagctggctcaacagaaatgtgaggcaaagaaccagaaggaatcacttcaatttgcatcttgctcaactcatcacacaaggtattcatgcgagaatccatcagaatacaattgcattgcatctttggactcaaggc

SEQ ID NO: 66307 - DNA, 473 bp, Zea Mays
atcttcgtttcggtcgggtaccaaaggccgcggtcattagctggtcttctttcttggtaaaattcccaagtatttcattacacatggtctcaatcatctctagccattcttatcaaggctctttgaactgtttttcaaacttgaaacgataagctagtcgaactagttcatgcttcttatttgtttctttcatcttcagcattccccagccacttgacgttggatacgtccggttggctagatattcctgcaccaggtccctgatactgatttgcttagccaccactctgaactctacttcggccaactgacatgatgaccccagttgcatattacataggggcctggtcattccgaagttcaaagacagcggactcatgaccatggtcatcagcttctccctctttttctcatcagccttcatataaaaccattcatttttccaggcggttggccactttgtgtggtagctg

SEQ ID NO: 66308 - DNA, 546 bp, Zea Mays
atggatttcatccaacaattgtctccccagtggccgagtgaatgcatttcatgaagacccctcctgcacctctcctgtatagtgagcctcctataatggtgtagtgggctaattgtcttgtgatgtgttctgctacagccttttcatacggctcttcttcattctttatgtacctgatgataggctctctccagtcgttgggatctgcctctggctgagtcaaggcgttgcactcttccacctgatccgtgaggatgctcggctgtgatatttcttggtcgaaaatcccaggtggagcctgggcccgactggatcccagcttcaacaacgcatccgctgctacgttgcggtctctttccacgtgatggaactccaatccctcagatttgtcttccagttttcgcacggctgcgcagtacttgcccatcgaatcagtcgagcagtgttaatccttgtttatctggcttatgaccaccagcgcgtcaccatataccatcagtttcttgatgccgagtgatacggcaattctcagcccatgggtcagtg

SEQ ID NO: 66309 - DNA, 491 bp, Zea Mays
aagtcgcggcgacggcgcggtactgcgaggagagcgagtcgagcaggtagaggagcggccacagagtactgggtttctgaatatggtctgctttctgaatatactgacattgatctctaaaaggcttaatattcattagttttgttctctgctagcatcaaacatgaacagagagactgtagaggcgccacactagcacatataggtcgaggtggagcaggagaggagcataacatacctttgagctgtaggtcgaggtggtcgacgctccacaacaaccttgctacaacatggaggctgtaacacaaacaaaaggacatgaatcaaaactatagtactgaaacaaccatgccatcaaattaaaacttttaaccacccccatgtcaagcaaacatcatttacattttacaactttctaacaaaacataatataatagtactatctgtgcaactgttgcccatatatttggaattagaagaaggggaaaagg

SEQ ID NO: 66310 - DNA, 282 bp, Zea Mays
gctgcaggtcatcagaaggtaccgccactcttttccccatctgttatacttcccaactgcttcgtttcagtcataattgtggttactgtcgcgtcttacagtggaccgttccatgtgtatgttcatctgcttcttttctttgttataaagtaataacacagcttatctgctactatcacctgttcagttttacatattcaattgaggtcgtaaagaatctatgttgattttggcattcagctcggtagtaccccttattttgcattcatgtctcttccattt

SEQ ID NO: 66311 - DNA, 506 bp, Zea Mays
ccctgttaggtggaacaagtggaggtgcagttctaatcttggccgctgccgtggtatgtgccgatttctgctaatttggtaatttgaattttccaatgtagaaatgcagagccaatatcactatttggttccgcctgatcctactctcttatctgtttgggccataagactatgtttgcataaaataaattcactattgtgttaaaaaagaacataaattcactatttattttttatgtctggtattatcaatccatatcccctgaatccagaagtttcacccaagagttaatccaaattcatggatcgaatgctaaggggcattatgggttgttgtattgtcttatgtagtctgttcattttattatgcacttgtttatagtttagacaatgtatctggtgtcactactcactatattatgttgttcccgacgagttaagttgagttgaagcttgtgtcactagattatactaagttcaggctataacctgctcagtcattgcac

SEQ ID NO: 66312 - DNA, 940 bp, Zea Mays
cgctcctatgtcacatgttgaggtgaaggcaaaggttgacacgaaaagggaaaagcagacaaaggggaggaagaaggcaagggatatgaggagaaggcttctagtagcgatgatgatgttgcttatgaggagattgactttcaatagtccaaaccgagtaacattgacttggggcagtctcttgtgaggcctgatgaggcaaaagttttgaagaggcttgaatatattaacaatgaaggtttgattcacttcgctttcgacgagacaattcccatgtcgaaggatgatgagattattgtgttcaagaggttcttccgagcagccttcaactaatgcataggatggttgttgaagttttaaagaatatgagattaccatgcatcatcttacactaaatgcaatattgagactcggggtctttatatgggtaataacaaagttagggtgtacgaaccgatgtcgaatgcttatgaagagtgcatgaattacactatcaaacaaaggttagaccttctaacaaatttcaaaacaacatcgactattacaactttgcttatcataaacattataagtatcccatgttggcttaccgaagcaagtggtcgcatgactaggcccgagaatggttttacaccaaggcatacagaaagaaaagggaagagctaaaggatataacaatgaagccaatgaaagtaagcttcgacttaaagatacccatctacaacaagagcgaaggtgcccaaacgacttatattgcattcaatattgttgtggataggattggtaccatagatctagtgtaagaatttattgcaaataggatgtttcctattaggactgactagctaggtaatgccgaaggccaaaaagggaatgaagaagtgagttgggtattttgataagtttaccatatcgatataaggatcagcccatgttcaag

SEQ ID NO: 66313 - DNA, 438 bp, Zea Mays
aggtaccacttgcttgcaagtctgaaatcccatctcaaccgtttggactgtttcccccaacagtacatgatatgcacatggcctgaaatcttcaggttgtcataaagaggcttctgcatttgttggtttgactgaccgagctagccaccaatgcaaaaccataatccaattcagaccaagcaaagcatagttgctagatgcttgcatgtctagctccatcacctgctgataacaacatagtttgatcagtacgatcgatagcaatactggtgtacaaatgttgcagccatcgaacacaaggtcacgcaggatgattaatagacatcatcttgcttttcaattatttgtcatgctgattaaaaagagctcacgatcgtacgtgaggatctacgcaccgcacctgacaaagaagggtgggggcggcggactctgccaagt

SEQ ID NO: 66314 - DNA, 1528 bp, Zea Mays
agatgcttgccgacaaggtacacaaacaagagatttttcggttttactcacaagtgatagctgtttattgctactggtggaattagtcatgcctatcatgtgctttcagagggatggttcatgtgagctggagaacaggattagagcacccaaattaggatgactttaagtcaatttctgttaacttgggcctctgctaacacacttttgtagggatagtccaagaatctatttttagcaatgttatcaagtcgtatgactaatcacgatttgtaggttgatcgctgccatggcaatcaactatgcactatgattagtcaggttggtcggtctcatggtcactagaatcgatttagatgatttgataacattggtttttgctcacgattaactaggctgatcgctgccatggcgatcagctatgaactatgattagtcatgattaattatgattagtcatgattaattgtgattagtcatgattagtcttggactgactgatgtcatcagtgactaggaatgattagacgattcgataacattggtttttagtatggccaaagttcattcttagtttaaccttcccctcactttatgtgaatttgacgtgcgcttttgtcactgaattgaacttatgttttttttcatgacactctatgggtgcatgtggcatgctggtctttcttgttgcatgttgagccgacagcttgctggcatgttgtagtgttacgaaacatgtgaactttagcactgtggatatactatatataattctaacacatattgtgatactgatctcaggctttccctggtcatggtacttctgaagattgtggttgttgttatggacggtggaaatggttggttctgatggttttggtcttttgtggattgttattgttttttacgaggggcggcgcgatccttttcaatctcgcatgttgtatcgcaatatgttttcgtttttaatgttgtccatcaactattcttatatgtgtgacaccaacatacttatctattgaatgccatgtacaggcagaggaagttgtggtggaaaagaccaaaacaatgataaaaagcctctacatcttgtcaaaggtgcctttggacaggtatgtaatttacttggttacaatatttgctttaggtgttcttgaatagtatacatattcaagtcaaatagatgatgaaagttacctgagtgactgatcagtcaaattaattttgggtcaaatatggtgaggcacgtatttcaaaattggttcacttatggtgtaacacatttcatagtttttcattgcctcatgtgttcatttggggcctgtagtattagggtatgtacttttgagttgttagactggatagattgcctgtgcattccgtttgatattgggatttgagaagctacatgtgacatttggaactaatgagaatactatacctttgagcataaaagctgagtctttgttccttacatatctcatgcaattgaattgcatttttttattttaagaggattaaatgcatg

SEQ ID NO: 66315 - DNA, 466 bp, Zea Mays
gcaaaaagctcttagcaatatgtagggtatccgacatcagatctgcagcttctggtgacgttgggtgtcctttcgtcggtattatcaaggccgaagccacgctcgggcgaggcagaagtcttcccgaggccatggccgagccagctctagggctcgcagtcgtgtagggaacagttgaaggagtggccttctgcgggatttgcgggagacaggtggtcgaggccaagctcagatgaggcggagtttcttcccgagggctagaccatgatttgtcgtacgcgcgtcctatccagagttggcagacatcgtgagggagcagtagccattattcccgggtatgtgtcatcgttgttggtgaaagtggacgggaccacggtcctgtcgctcctatttgactaaagcgttacgtggagtaggtatgcgcattgattgctcatgtcctcgtggttcccgtgacatttgattg

SEQ ID NO: 66316 - DNA, 515 bp, Zea Mays
tttcagaagagttcaaggggctctgcgtaaattccagtacctatgtgttctaatgtttgttttagtgtggactgcgggttgattcctagattctttagggtctcttttacaaaataacatggccgaagagttataagtgaatcctgaccgttagatcatccaccaacgcctagattattataacactgaatgggtaagccaccctagccatcggatcaagatccatcagtccggataactcttacgagtcgacccgatccaagccgctcgattaccatctaagggccccgattgatctagctgaaggggtatgtggtcgactaatctggaacgttcattcttagataaacggtgcatactacaccctgttcccaggcacatagacggtcggcaggcgaggagagcccgagtatggccgactacgccatggacggaaattgtcattctcgattcctatgctcgaacccgatccggacttggtgagaaaaacagcgaagatgagatgaactcgagag

SEQ ID NO: 66317 - DNA, 552 bp, Zea Mays
ttcgcggagtggcaagtggagtgcaccattacaagttggagtacaattaacgaaaaggacgacttcttgttacaaaagagcgacaaaggaagaaacttcgcgcacctccattctcgacagatgctagcaaaacgagcatgccagatgagcagaagaaacactttcgccgtagcacaagcacagtctcacccaacatcgtacaacctcttcattccttgagacttgacagtcgagagtgagaaacgaacatccctagctttagaaccaggatgaaagggcgacgagccaaggcaagaagaacagttgcggcctcaccaagacgttgaagaacgcctgcgaccttgccaagatgctgaaggagcagaaggcgatgttgtacatcatacgtcgatgcatcgtctgccaccgtgactccatgggtgatgattagtgattgacacgtctttcaatttgttctcgtcagagattcgttcttccaatgtaggattagaaattctttggtgtacatggagttgagttttagttcatttcatgccctttcgctagttcaag

SEQ ID NO: 66318 - DNA, 615 bp, Zea Mays
gtggagatggtggccgctcgctttcagcgtgatcctgccgacgccgaatagctgtgcctatagagacaaggcgagggtcccgctagggtggctgtaataacttttggttatgtaacatattttaataaccgttaatcaactgaaacttatctgtatgttatttgcccttgctgtgtgtagtgtcatcaacttccccctggtacttggcccccctaggaggtaggctcgacgtgtcgaggctggataccagtataccaaagataaaattggtggcccgacccctaggaggtagtctctacagtttgagactacctaccgctggactgggacctagacctgcacacaacttcagctttgaagtttttaggagcacacccataagacctgccatctggtatctttcatcctttgattcatgcaacaggactttgagtgaagccaagccgtatgatcggacccataggatcacagttccaaatactagggtacccaatgcagagtggtggaaagtgcaggcttagggtacgaaaccatgctaagcagctacacagctccggaccactccaggagacgagcgcccattctctagaactggaccctaggttgccggacccc

SEQ ID NO: 66319 - DNA, 618 bp, Zea Mays
caccgaagcccctgacagtttctacatatctttggacctcctttgttgtatgttggaaatcattacctgccctaatgcattcatacattttctacatcagcttctctagggagtgaggtggtttcctggtgaagtactgagctgctgggcctagacaaagccccttaaccattgcctctatgacaatgccatcctacatagttggtgcttgagccatttggtgaagaaaccttcgaacataagcatgaacatattcatcatgctcttgagtgcactagaatagaacttgggcagtatttggtttagtctagaaaccttgaaagcttgtggcatatccttcagcttctgccataaagtgatagtccttggctgaagagatgaataccatggttgggctacacttctgactgccatgacaagtgactttgtaggaagatattatgctttcataacccatcaaaaattactttggatctgatagaccatcatacattggcagctgaggagttctatatagtggtggccatggtgtagcttgtagtatttgtgtcaaggcgaagcttcatcatgcaagaagtcaacatagttgaatgcttcatggcgaaggtcattaggaat

SEQ ID NO: 66320 - DNA, 707 bp, Zea Mays
caagttgggttgtcaggggctctgaattgcatttttgatggtacagtatcccgatcagatcgccagctcagtccctcgccgccgacgagccacgcgcggattcgtgctatcgccgccgtgattcacgctcagattagctggatagcaccgggggttagtaaatatcacaccgtggatatgctccggccactaaattactccgaccaccgtacccgagctagtcacggttgctccggatgggttcgctggagattgccacctcacggccttgcgccacgtgcccaggcatcttaccacatcgcggttagtcgtgttaggcatatccggtgatcaccggagggactgccacggtgaagccactaagcgcttgcgccagtgcccctcttcctctccggtcgccgctcgtcttcatccaattcaccgggccactgctcacggactctataaattgagcacggcatcgggtccgtagggtaatcacacaccaagccaccaagtcatgcctccaattgttcaccagagctctccaatttctcatttcccccaaatcactcaagaacaccgctcggtttgacctcaccatggtcagcgaatcccaggtccgttcatactccatgttctctcgttttagcgtgcttgtgtgcccctgttgctccccgaccccgccaattgagctaggaccccttagatcgctgggaacgcacttg

SEQ ID NO: 66321 - DNA, 821 bp, Zea Mays
aatgatttggctcttcgagaaatacagttgcatggttataaattcacttggtcaaatcatcaatgcaacccagttgtcggtacccacaaagttatctctaatcatgtgttaaggaactgagcagctcgactcaagtcacgactcgaccaaggccaacctcggcgggagacgcagtgacgtttcgtatgaggccaacctcgagcgaaagacaaagacataactcgcccgaggccaatgtcggacggggaatacagtcacggctcacccaaggccaaccttgagcggggaacgcattcccgactcgcccactccagcctcgggcgagaaccgcatttccgattcgctcgagggtgtctcaggtgacgctccgggagctacccgcctcgaccaactacttcgattccagaatggcgcatgtcctcgacttatggtaggtctggtgttgccacgtgttcagagaggtgatatactcagggacttcaccaactggtctagacccccatgtatgcaatccagaccccctagaaggtccaggacctccacgtatataaatcggaccccgagtagggatccagaccccctatagggttcgggtcgctaacaagggctcccggtgctctagggtagaacatgtctctaggccctactttggacccaagcaatggtgacgccacgtggtcgctaggcgcatggtgcaaaccttcgtatgaaagcaaggcctcaacccgcattaaatgcaaggcagccaagacatgctctgaccaagcgcagggcataggctggcttgtgataggtccctataaccgcctcgcgcattaccg

SEQ ID NO: 66322 - DNA, 636 bp, Zea Mays
aaataaaatggccttctagaaataagtgtgatgtcatagtaattattgcagaaatacatttaagaggagttgtgcatataggagctaaccgtcatttcctgatacagtaacaagataccgttgagctgccaaatccatgcagtgaccatagcgaggaccaggccctgccccttgaacaacaaccctgcaacaaatgccagagaaagaaaatgtctgatcacaaaccgacaaacaagataaaaaggaaagcacatggtaaaaagaaacatggcgtcttgagtaaacctaacatgtgccatttaaacttgtcgtttgtgaggtcaaggacatagagatcgtctatggagtgccctgctggtccaattccaccctgcgtcgccattttataaatcgcaactgaaaaaagttggcgcggaaatggaatttgaagatcccaagtccctagtacatggaaaacaaccatggtgcccactgcagctgcagcatgcgcagccctcggagacggaggtctccagcaggatgtaacctgcagaaatgtagaatgtaaccccgatcattcagtgaatccacaatccatttcaccacaaacaatgttacgcaaagctgccagtcaccacactaacacagggacacatt

SEQ ID NO: 66323 - DNA, 413 bp, Zea Mays
cttgaggagctagaaagacaagggtggtgggagcataaaataatttgagaatatgatctcagactatgcacaaagtgcaataaaaaacaagcacttgacaagaacctcagtagatggaatgaatagtagctatgaatccgaataggacaatttgcgatggctaaacactaagggagacccgatctatgatcagaagcgagaagcgtaggcgctggtgcacacatatctaaagtggagcaccttgatccatcgctaacctgatacacatcatgaataaagtaaattattaaccaaatcaaaaatcagtcgaagcaaaatgctagaataggtatggattactctttttcctgcaaactgaaagagtgtcaattttacacaatagaataggtatggaatcggaaatggaaatgtgc

SEQ ID NO: 66324 - DNA, 763 bp, Zea Mays
atttcaggcttggccgaacctcgggataaatccttgcgtctgtgtgctctgttccgtattgtattctgactctctgtcttactcgcttttatatctgcacttcactgctcacttgtggtactagctttccttgaagagcaggatattcttaagacaggaacttcaattccggtgcaacctactcgaagggttcttcactccactgcgatcttgtcttcgagtagagtaagactttaagttctacagtgataatttttattcgcctattcaccccccccccctctaggcgacatccagatcctgttcccgggccaaagggaactttcaccaacttcactgacagcttctcagataaagaggaaagtggagacaaatgggttacccaactaaataactaactttattaataactacaccaagttgtaggggatacccacaccttggtgacaatcattacaaagatccaacttcagtacatgtccatcataacaagcatccaacaaaagataagcaaactaactctgactaagactggataggctgaactaagaattattacagactctgactctgtcgatctaaggatccaaatctatccgggtcctgcagtctggggtaccatagtcgaagcgaccatgggcgatgaacggtaagggtgttgaatcctgacaggggcgggaggaccaccatccagatagtggcgtgtcgcgcattcagcacgcaattccgcaacctctgcccgaaccttgcccaactcgtcaag

SEQ ID NO: 66325 - DNA, 501 bp, Zea Mays
ccctaatcaaatcccttgatttatggttgttgcatggacgtggtggctgttggtttggattgaatcgttgtacataacactattttgtgcttaaactttaggatttttacgatcatgaatacaacgcataagagttgtaaacgtctctcacattggctcgacatttacggtcaaagctgaggagttttagctaaacattgaagcattttacgctcgaactggagtgcacctaccaatgtaccacatgcatattttcatgagcacggtgaaaaggaagtgcatgatttatggtgtctatgactaccataaaaaatcaaattccttgaaaacataactatttaaatcccctaataaactcccgcaatcaaatctcttgattatggtggctgcatggacgcgggggctgttcttgggagtgaatcaacatttaggctatatatgacattatttatgctcaaacttgagaatttttaagctcaaatctgggttgcacccaaatag

SEQ ID NO: 66326 - DNA, 618 bp, Zea Mays
cgagcatgcgttgccgccagagctggaagagttccacggagagcctggacaactccgtagcctcttgacgcattgccaggtccggtaagtcctccgatgtccctttctaccacctgcgttcatgtatcatctattttgttgaattagtagtgcaacagaccactggagtgtttaatttcattgtcaaatgttgtttgtatgtaaagttctcccatacctgaggatcccttgatttgttagtgcaagccatatagaccggtgaatgtaccatcaaactcaaagaactaagtaggtaaacaaactttgagtgaagcatgagtcgaattggtgcatgctctattagtttgacatgaatttttgttacttatggatgagtgtcggtttgtgtgccaccatgcattggtgtattaaatagagcccagagtttttgaaatctgttacttcgattgattacagggtggagtgttggtttgtgtgtttttgtagttttggtatgttgtgcatgaatcttttcagctgccattctcctataggaggactagataatcaactgagagctctgttagtctgactcaatgcttgcaattattgtaatctatacattgatggtttgttgaa

SEQ ID NO: 66327 - DNA, 440 bp, Zea Mays
atcatctcgttcagaggaaatcgtagtcctgctctgaagaagctcttaaaaaccactacttcatcattcttcggtgctggggtagttttttctccagcaaatcaaacaagtttactttcagcttctcccaaatagcctagtttcatcatcatgggcatgtcatcttcggacacagtagatttctcaaaatctagatgactgggctttgttgggatcaaaatactgtaatctttatcactttcatcaacattttcttcttcaacaacaatctgttcagcttcggcatcaggagcaccttcgtcaatagctccctctgtcacaactagacctgatcgttccatgacttctgaaattggtgctgtctcattgacctcggtctcttctccctcacgagacacccttgtagttgatcgcactctagccattttgatggtttttac

SEQ ID NO: 66328 - DNA, 450 bp, Zea Mays
atctctttgatgtatttgttttccctagtgatatcgatggtgccgagtagcaccaaatttggacttgtgtccatatctatagatgctagtagttgagcactagtgcctacaatcttgactacctcatccctattatctgtttgggacttatatggagaaaagctgattcaaaagaaatcgagcccaaacccgcctccgtgtccctcctttcctccccaaacaggaaggaagaatgtctagaaactgtgaggtcccagagtctttactatctacgaaggacgaaattccggagcaggatccgaccgagaagcatggagaagatagaagtgcactttccaatgcagttagacagagaaggcatggatgtgatgttataatgctgaaggacccgaagaagagattatggcctatcatttaccaccactgcccgttatttgtgggcttcaccga

SEQ ID NO: 66329 - DNA, 332 bp, Zea Mays
tatatctagatgacattcaagcaaggctcaaaatatcgaagaaatgattctctcaacggatgctcaatatgatgtgactcaagaatggcttgatagggtgaagatagtaaggaaagggattcgaggaactaagcgaaggtgaaggccaagcgatggcttgtggactgaggtaccattgctaaggtgaacaagagagtacttgcactaagtcgatgaactaattagctatgaagagttatattgtgttgatgcatcagtaaggtgacttgaagccatgagttgatctcatatatggtgaaatggttcaagtcacatgctcgatttatgtttgt

SEQ ID NO: 66330 - DNA, 585 bp, Zea Mays
gttaattcatttttctgttcatttattttcttgcagggagacctaggtatatttttggtgttgtaatttactcccagggtgcatgtatttgaagttttggtttattctaattgatcctagcatgaatgactaacacagttccttagattatattaacacttggcaaacattgtgttcttcatacagagtgatctggatcatgctagcaaagtcttatgactatcatgttgcgcttgggcaaacatattgtatgatttgttcacagcaacatattagctatactactataatcatgagatactccatctatatgcgttgtcattatgttcctcagtaatggtgatgtgaacgttaggaggtcacctataccaccttgtttcttctggaacaaaactgtcgctatttgtgagggaagaagccgaggggagactacgggacgacaagcgcagaaggtgggctagacgatggtgctgccatcacgggcctgtacctgttccgatccaacctatttgggatgcagtactcgcgcaagcgctacttcgtgctcgaggacgtcgcgctccgctgcttcaagttcgcgacgtt

SEQ ID NO: 66331 - DNA, 363 bp, Zea Mays
gagagattggagggagcaccatgtggagcactatatgcaggtatggaggggcaccatatggatatccatgtgaatggtgatggaggaggagcgttggtgctagaagctttagtgggaataggtgtggacatttttaaactggagaccaaacctgaacctaagacgaatccaaatataccgaattgtcggcctatttagggttttcgggttcagtttatatatgtgctatatttggggtacatgttagagttcccgatcttgaaaacatgaatagaactgaataacccaaaatatagagaaattcttggtgtgtgactatatttgttggagcgaaggcgaacacgctacccttcgctcgatgcc

SEQ ID NO: 66332 - DNA, 408 bp, Zea Mays
gtcaggccatcatagataggaagtgtaggtcgcatgtacagtggtgcccatggtgtagtctataattctagtgtcagtgcgaaagcttcatcatagaggaaatcctagacatcaaattcttcgtgatgaaggttgtcatgattgcgaccatcatgatcttggtacctgtagttgtacatgtttttgtgtgcttcgatgttgtgcatctcttcagttgcttcgtcaatcttcctttgaagctcagaaagacgaagcattttctccttgtgcttctcaacttgctgatggatgagttcaaggttgttgatctcctcatcaagctcctcttctcaaggtggtgggctattggccttcttctagttccttgcttctctgattagagcttcgttcccttgattgggattgatg

SEQ ID NO: 66333 - DNA, 387 bp, Zea Mays
tgcaaggctgacatgtaattgacgtttatttctctctcacggacgaccttctggtgacaatctaccttgaagtacgagaggaaccacttcttcaccaccttgcacacctgaccttgatgtcgctagatcttctcctccatcttcttcatgtcatcttctaattttttactctcaccggtccacaaattagtcagccttgtgtcgttgtttggagaagcagcgttgacatctttagaattggccatataagcatgattttgtagatttgcaaacttgttctctagcggagtcgccaaaaagtgtgttggcaccgatctgggcaacgctaatcataggggtgtaccgtctggcggtgccctctgcgacggcgcagacggtccgcggttt

SEQ ID NO: 66334 - DNA, 364 bp, Zea Mays
attccatcttgcttgtaaagctgaacgtgaagtgcagggacgacatgcgaggacacaagctaactcttctgcaggtggcaccacatcgttccactccaagcctgccgccgtggcaccaccagtagcgacatcgccatctaccagcactccacgtgacaaggatgtagcaaaaagtccagcgccacctccagcaacaaatggtgcttctttcgctggacgcaccaaggatattcaatgtcatcgctgtaaagggtttggtcacgaaatacgggattgtcccaacaaacgcacaccgattatacatgacaatggtgagtattcttcagttagtgattccaaacaaaccatatatgctatgcttgcc

SEQ ID NO: 66335 - DNA, 656 bp, Zea Mays
cttgaaccaaatccctcgtgccgacataggtgcatatagtattgaaagccttctagcatgcttgcacgtcatttccgagtgcggctgaaggtcttctgatgccaaagcgtgaccatatacgacgttgaatgatgccccttatatcctccctctggtccaggtcgttctctacataaaaccactcctgcatccaagagcccggccacttcttccgaaatgtaggcacaggataactggcctcagagcagggcacgaagctgtagcagccaaagttgttgtaatattgttctttcccagtcgctttcgtctaataggataattcgtgaatattacagaagcacctggcgtctagctctaacccttggctcctcatgacccatataaaaacccctactttgataagagcctcggggataagttgatgaaggtatatttcaaaagttttcagaacctcgatcaacatcttatgcagtgggaaacaaagtccagctttcatgaagcttctaaaaactaccgcctcattagcttcgagaagaggaacaatattctcccctccggccctcacaatagaaatatcacgaaagtatctgcctttcatcgcttcgatctgcccttgcttaacagatgactttccaaaaacaacatggctaggcctc

SEQ ID NO: 66336 - DNA, 466 bp, Zea Mays
ccagaaccagggtgcatggccctttccaagtgtacataagtttctatattaacacccccatcaatttggacatagtgcaactatgttcagagtgtcctgaaaatgattgaaacgtgtcacaggtagcgccattgtcataatatgtgcaatctaatcttttgtggaggtgatgtgaatgaccagttgtcaagtatcaacacgttcccggacaaagtgatagtcgacatccacatgcttggttcttcgatgaaaaattggattaacacatagatatgtggtaccaacattgtcacaccactaataaggtagctgcaaaaattccaagctctcgtaacatgactcgaacaaactggattatccgcccgcttcataggggtccataacccgccttacataggctaataggattagggttacaatttgatttccttcctaactaccagtcccacgatatccaggatttgtt

SEQ ID NO: 66337 - DNA, 688 bp, Zea Mays
aagggccaatggaatgatactggaagcactcaggaagaaggtgttcgacaaaaatgaaaagtttgtaggaaagtggatcagagaattgccctatgtggtttggagcttgataactcaacctagtcgagccctgcatggaaataccccgttcttcatggtctatggttcagaagcggtgctacccgccgacctcaagttcggggcgccaaggctggtcttcgaaagcatagctgaagcagaagctaccaggctagaggatattgatgtgctggagaaaaagcgattgaacacagtaatttagtcagccagataccagcagaccttgaggcgctatcatgataaagctatacgacatcaatcctttgtagtgggagatttggtccttcgccgaattctaacgggggaaggacgacacaagttgtcaccactataggaatggccattcattgtatcggaggtcactcggccaggatcataccggcttactcaaatggatggtacggaagtggggaattcatggaacatagaacatcttagaaagttttacccttagcatgacctcgaaagctatcggagcaacattgtgctctataatgggagaatacatcatcaataaagttttcattttcaagggcattcaaactgttaactattacttgacttcgattcaattggacttggattcaac

SEQ ID NO: 66338 - DNA, 512 bp, Zea Mays
tttactttgttccttttgattacacatgattacaaggctaccttcaggatattctaaggtggtttggagatgtttacacattacaattagcgatctgagagtgggtgcgtatgtgaacagtaacaaaggtctgaaatgcacatacattgtactactatttatagggacaagcgacgtatagcttcgtatgaaattacatttatgtcctcaaatcttatacacctaatctacagaacttgttgagggtgttgtcgtctttccgcttggagacatgttacacatgccgattcatcccatgatcacacgcttcagacgctccaaggtgcttcgtctaagtactgatgttgaggctattacttgcttccttagtctgtggagatcactatgatgaaggtcactttgtctttcatgaaacaaactcgaagatagttgatactcattggtttgatgacctttggcaaaggcacaccacaacactaactcaatgaatatgtaattgatctctattctct

SEQ ID NO: 66339 - DNA, 607 bp, Zea Mays
gagtcaaaagcttggattccctctaactcacaaaaactaacctaaagtattataatgtaaagagggaactctctatggtgtatctactcccaactttcttctatcctttacaaatgaactcctaggggttgtttatagcctttccatggctaggggtatttatagcttcatatggtcgattgagtgggtaagttggttgaggaggcatgaggtgacaggcctgatcaccatcaacttggttgactggccaggaaggaggctagatagcctccctctagcgtccatcttcaaatcacgatgattagtgctcctctcctagtcggttgaaggtcggttggcagttggatttcttcactattggatcatatttgtgttttatgcttaatttattatatttcaagcgcatggattgatgacatgttgtcatttcgcttgaataagtgtcaaccatgtataagttgtgttgttttgaggcatgacacatgtgcaagacaaaagtagaggcgaggagggcaaccaagtggctaggcagccatgacttagggtgggtgacttcccttgtccatggtgttggccaaatattgtcccttgttacttatttttgcca

SEQ ID NO: 66340 - DNA, 418 bp, Zea Mays
gtgttttctaaagttgacttgcgtagtgggtaccagcagattcgtatgaaattgggagatgaatggaaaactgctttcaaaactaagttcggattgtatgagtggttagtcatgcctttcgggttaactaatgcacctagcactttcatgagattaatgaacgaggttttgcaggccttaattggaaaattagtggtagtatactttgatgacatattgatctacagcaaatctatggatgaacatgttgatcacttgcgtgttgtttttaatgccttacgagatgcgcgtttatttggtaaccttgagaagtgcacattttgcaccgatcgagtgtcgtttcttggctatgttgtgactccacagggaattgaggttgatcaagccaaggtagaagcgatacatggatggcctatgc

SEQ ID NO: 66341 - DNA, 403 bp, Zea Mays
ataaatctttggaccgtcactacgcttccttttatttccagtaatgtcatcctgcttccctagcctgacatctttcaccttctctagctcttgtaggacctcatccacagtgaacctgccaggcgcaactttgttttcacgcttaccattgaaatccaagctattccaccatgaatgtgtccttttaaggtaacgacgatgtccaatgtagcataacttgttccttattgccagagacaacggattcttgtcgcaataaatacatgcataatacccttttgttgttcgcccagataacgtggccagcgctggataatcatgtatacaccatagtacaacagcacgaaggtcgaacttcctaccagtacatgcatcataggtcttgacacccttccatagcttc

SEQ ID NO: 66342 - DNA, 379 bp, Zea Mays
gcttttaataatttcgtgtcaaatcctcctgctggtgatagcggtttgggtcttagagtgcgaccctctcctgaagaagttagtgctttggttgcctcgctcagagaaattcctgacgatgagaggcaggttcattttgaggtgcctatgaatccaagtgatgcagagataagtgccatgcttgatatgttagccgaggattcctctgatgccgctcctgctgaaacattggtggtggcgcccatccctgaggctgacaaagctttggacgctcagaagtctgtcaatgttcgtccgaaacattctcgctgagccgatcaagcctcttttcctgctgagggggagaaaaagaagaagagacgtcttcgtcgggtgtcta

SEQ ID NO: 66343 - DNA, 784 bp, Zea Mays
ttcaaggtggaggttgttgtgcgcctgcaaaaaagaaaggaaggggcatcgacgataaagatgaagcacgataacttcaaaacaactgttgagactatagaggacattgaggacgaggctgtggttggagactggctcgccgaggtcacaaagggcgtcaaccatgcctttgagcttatggcagtagttggtgattgtgaggtccccttgggtgaaggtgcgatgggcgacattgaggaagacgacacgagttttgcgattggccaattgctgaataattgactcgaggtcaagcgaggcggcgtgagtggaggtgccacgcccaatgacaacattgacaagatcattggagatggtgttgacgatccacgttcacacgacgcaatccatgtggacctaggggagtcgggtagaaacggtctagaggacatggccctcaagggactatcgaccaatggcgaggtggaacgcctcttgccagcaggcatagaacgtcgaggacgagaggcatgaacacatgaatgtgctgcatgacaataacctatatgtactatggagattgagtgcgacgacctaagattgaggggcgacgacttttcacgaagaagggcgttgtggatgtctggtgcatcggcggtggatgcgtcgttcttgaggttgtcctcatcaaggttggtgtcgttcggaggtggctcagatgcgatcgagggcggcgtggatgctatcatcgcgctttgcctaggctaggcggcctaggccatgcactcgcgctccttggcaaggc

SEQ ID NO: 66344 - DNA, 417 bp, Zea Mays
gtagaatccagaacgatgatatgggtagcaccaatggaagaaaaacttctccaaccaacagagacctctaaagggatgagtgtgtaatgcagcacgtagtgggattttaaggcgctaacggagatctccaaaggcacgagtgtgtagtgcagcgtgtagcgggattctaaggcgcgataataatatgaagtgaggcaagcttctccaaacaacggagacctccaaaggcacgggtgtgtagtgcaatgtgtaatgggattcttaggcgctaaagtgtgatagtaataggaagagaggcagggacatgggaagaggtaggaaaaggagatttcaaaggatgatcttgaataggagtgaatggagaacagctatccatgtgaaccttgatttgtggcttctgttgtttttgaactctag

SEQ ID NO: 66345 - DNA, 594 bp, Zea Mays
caaaggtaaaaagattttttataccttgttaagcaaatttcgagctttgtcgttagcaagttctcggccgccctttgcccagatctaggtaataaatctgttacatatgcttcaggcttaggctggaatgtcaataaggtcggttggagacaggctgaagtttggcctattaacgacccttggatgattgcacccggcttttatgaaagaagcagccatgccacgagaagctactagcgcacagaagtcaccgtggctagttatgacttcatcgaggacgtcaacttctttctcaatgcattcaaatgctccggggatatcttcggcagaaagactggcttctttggatacgtctccgactgaattgaatatacttttaaccgagcagtgcatcgggccacaaaattgaaacatttattcttaagagctttgagtgcttcacttagtttcaggttcttctcagcttcaaccttgattgtcatatttaaacctttggtttcacggctgaaccggctggagttctcttccaaaagtatttgagtctcctttaactctttgcttagtctctcattctgagcccgatcctcggcaagt

SEQ ID NO: 66346 - DNA, 638 bp, Zea Mays
cttgtcgccatcgtcgttgcggtagctgtggcggaacagaaggaggcggaggcggcaagggtttgggttgggggatcgggaggctgaatctggttagggttcaggtgaggactgcaatttagatgttgaatttcctttgttgagtccaaatatctaaggctatcttcagccgatctcctatcacatccttcatttcaaatttcactctacaaacagtatcaaacaatattatcaatagtcacgcatccctattttactctacccgtgggagacagtttgaagtcaccgagtttttaaagtttgacaatataaatgtaaaagtactgatatattcaacataggataggtatagcttactaaagcccttgatgcgtgaatgataggaattaaagcaaaatatatgttgtgtgacattaatgatcgaatcacatgtgggtctattttaccatctgtatcaagttacaaagataagttttacattttatatatatcatgaaactaagctgaatttactatttagtacattttttcacaatatgtctttttgaaatatggtacgaagatggtttcatatttagaagtgtctaatatactcactaacatttaaaataatccatatagtctagacgactaataat

SEQ ID NO: 66347 - DNA, 613 bp, Zea Mays
gtaaattgtaatgatggtttcaccctaccacgtgtgatgtggaaacatatatgccaataaagactagtttggaagccagaaaaccgcaggggattgaaagggctagaacgctctactcctccaattccaactagacccggagaggattaaagaggctaaaattcactccttattcaattttaaataagaaggtgattttaagcccttcaataccctccggattttagactttccctaaacgttctaccatccaacatcttcccaccggtaactagctctaaacgttctcccacatcgttgcattgttttttttttcaaaatgatctcgtgtgcaaccgtacaaatgcaactgagaggagggaaatgcgagacccttcagtcctcgaagctctctggactgtgggtgattgggtgtggtcgtgtgggcctaaaatgggatggcccatccaagcccgacccgtatttgccagattcgagtgaactggatccaactaaacaaacaattttccccatttgccattcccgacgagcaccttcaccgtctcctcccagtcccacctcgcgtggcacgccatggctttctccccgcgctcgccgtggtcgcgtgccaaga

SEQ ID NO: 66348 - DNA, 403 bp, Zea Mays
cgagaacatagtttccaaggcctacaacaagaagataaaggctaagtcattctaggttggagatctggtccagaagacaatcttgccattaaggatcaaggaccggaagtttgataagtggtcccaagctgggaagggccttacagagttgcgcatgtgatctctggtaatacatatatgttacaaacgttgcaaggcaatttgctgcctaaggcattgaatggtcgttttctgaagcaatatcatactagtatatggcaagatgcttagagaaccgatggtttcacatcgagttgtttacatcttgtaccaggtgttgttggtacgcttagcttccctaaaaggtgggggcatgtgttgagtactagatttggcacctgggcatggtcgaacagtccggcca

SEQ ID NO: 66349 - DNA, 422 bp, Zea Mays
tttaactaacagtggcacaaatggtttaagaaccgcatgagaggtaattcaacagtactcgtccatcactttggaaagatggtgcaattatgaagctagcaacaatccttacatcagtctctctctctcttttttttgcctaaatatgcatgcatggctcacacaactattgaggacataatagagatacaagttgactccctagcactagttaattagtagatacactacgtactcatatctgtcaacatggatgtaaataaagctttatgacttggacccataagaaattaggagaactagctacatatacttaggtcattggacatgttatctaatatggatctatatgtaaataaagttcactagtagaaaaaggctcaaagcctgcggtgcggtatatttttataggcagattcggt

SEQ ID NO: 66350 - DNA, 924 bp, Zea Mays
aaacattcttacctgtcttagtggccaaaacatgggtggcggacgggaggcatgaaatcggtgttcgacgacgaaaacacgtgtcgcgggaggccaaaaatagacttactggcctcctgggaccaaaacctgtactatggtttggacaccagaattctactgtgtgcaaatttactatggtttggagactaaatttttgttgtggcatggtttggacactaaaattctttgctactagtgtttagggttagggcttagggttagaattctgggtttaggtttccataggaaagtgtgcagctcacgggtagccaaaaagacccaacggcctcaggggactaaaacgtaggtggcagattggggacatgaaattggatgtttggcaacgaaaacatgtgctatagatcacgcgaggccaaaaacttctttaccgtgctccggagaccaaaacgcgggtggcggagcgctgacataacattggttgtttggccataaaaacatgtgttgtagctcacgggaggccaaaaagcattatctgtcttagtggccaaaacatgggtggtggacgggaggcatgaaattgttgttcgacgaagaaaacatgtatcgcgggaggccaaaaatagccttaccggcctccggggacaaaaacgtgtagtatggtttggacactagaatcatgcgaggccaaaaactgctttaccgtgctccggagaccaaaaagcgggtggcggagcactgacataaaattggttgtttggccatgaaaacgagtgttgtagctcacaggaggcgaaaaacgagctggccgacaacttggcgtacaatagcttaaaggtgcaaaaataaggtctttgtattatttattgaaaccaaaatttttcatttgtttagacttattgaaaccaaactttttgcagggcc

SEQ ID NO: 66351 - DNA, 672 bp, Zea Mays
cctatcaaacaacaccaatgcaaaaacaacatgattaagcaaaactaaaataacacatcagatcatgacattgtagcgagtgcttctagagcgtggcaagccttttgtagtggaaaagatcgccggaccgtacccctggggcccaccggtcagagagtgcatgggataaggaccggactactggggaccatcggtcaacgagggagtaagggaaccgtgcccctggaagcgcctgcccctggataaaccctgaggcaccgagcctgaggtcgagcgtggcgtagctagagaggggactcaggcgaaccggagggaagccactcgagtggattcgtcgtctagcccaaggctggcccgccataagtggtcgtccacattaattacgcctggcaccaagctacagtagagggtcgatctgcctcccactcatgacatgcgaagcccctcggcctacaactcactcatggcatatcgaggctaggcctaagcgcgtagtccatctacagagcccgcaacgcgacgagccacgccgagacctaggctactgaagccaaaggtagacgtggcacaaaggtagtaatgatggcgctagggcctcgcgtcgcccacaccgtccgccgtaatgagcacaagcagagacaactaggcgacctagacgcatacagacaacac

SEQ ID NO: 66352 - DNA, 404 bp, Zea Mays
atgcatttcaccctcttcaaacatgagaaataaaagcagctcggttgcatcagatatgtaaggaatagactcagcttgtatgctcaaagtcaaaggccagtattctggttagtctcaaaggtcacatgtagcttctcaatctcaaaaggaatgcacaggcaatctacccagtccaacaactcaaaagtaaatattggagtgggagaaaaccctaatcctgggttggacatgtattaatagagaggttaagtgggccaaagcccattacaataggggcaaacagggaaaccctaacaatatacgggaaaccctaacagttactctctaacagtaaataccctactactataggtacaggccccaaatgaacacgtgaggtgaggatgggaaaccatgaaatatgt

SEQ ID NO: 66353 - DNA, 275 bp, Zea Mays
aatatgttggtgctgataccttgggttctatcatgagtcatatagatttcatctgtatggcagcaacacttttatgttcatgttggactccttgtgccttaatttataatttatgatgttatcatattgtgcttgtatgatccatatgatgcaacacaaaagcgagcaaaatgctgcttatatgaactagtatgttggcattgaggttttgttatttaagttatgtttctgctaaatgtgttgcttataacttatatgcatatgcataggaggta

SEQ ID NO: 66354 - DNA, 436 bp, Zea Mays
ctttaataaagaagtgttttgagacggttacatcgtaagaaatgtcttatgttgatttaagacggattgttattgaaaaccatcttaaataaatataccttttgattcattatgattttaagaattgtcttagattttggttagtatattagacacttctacatatgaaaccatctcaaataaagatattattagagtcgtctagagtataagaactgacttagatgttagtgggtatactagacacttctaaatacgaaaccatcttagtatgatatttctgataagtcgtattgtgaaaaaacatagtgaatagtgaattcgacttagtttgatgatatatatgatataaatgtaaaacttatctatgtaacttgatatagatggtaaaatggacccacatgcgacccgatcattaatgtgtcacaacataact

SEQ ID NO: 66355 - DNA, 486 bp, Zea Mays
gattggtggagaggtaaatcgcgctgacgttgtcgcagtacatgagggtggcgcgttgaatagggttgtggagctcctatagtaggtggtgtagctaggaggcctctgccgcgccgttggccacagcgcggtactcggcctctgcgttggaggggagacgacgagctaacgtttagtgacttaggagacgaggttgatgcctaggaacacgacataaccagaagtagaccggcgtatgtcgggacagccaacctagtcagcgtcggtgtagaccacgagcttcgacgttgggagggtcgaagtagaaggtcgtagtcgagggagccgtggaggtagcgcaagatttgcttgagagcggtgagatggggttcccgtagggtgtgcatatacagacacacctgctggacgacgtacgcaatttcggacctgaagaacgtcaggtattggagcgcgccgattaggctccggtaggacgtcgtgttggca

SEQ ID NO: 66356 - DNA, 287 bp, Zea Mays
ctggaggtacattatcacccaggaaaggccaatatagtggcagatgccttgagtcggaaattgcaatgcaactgtgttaggatggattctcgctttaacaccgtgtgtgatgagttgagcaaaatgaagattgaagtgattccttctggtgctttgtctcacatttccgttgagccaactttgcaagaccagatcatcatggcccagctcagtgacaagggagtgcaaattattaaggagaacctccatcagaagaccgagaagtataaatgtttccgccaagatgg

SEQ ID NO: 66357 - DNA, 292 bp, Zea Mays
gtcgaaatgagagaaggcagcataacatctgaaggtactgacccagcaactacaataaaactaccaaagccatcaagtgtttttgcagcgactccaagaaaaaggagaatggctagtgtattagacgttgttttggaatccgtgaagatgccagctcccgcttctgtcgaagcttctagcgaacaaactaaggatgtgaaagaagctgttgctctgagcgctgtcattgctcctaccgaagctgggccttcggaaactgggccaatataactggcggaagagagtgctcccg

SEQ ID NO: 66358 - DNA, 414 bp, Zea Mays
tttcacgcccgacaagagagaagatatccgtgccgagctagcttgcttagtcgtagcagggttcattagagaagtactgcatcctaagtggttagcaaatcctgttcttgtactcaaaaagaataaagtggattggcgcatgtgcgtcgactatacagatctcaacaaacactgtccgaaggatcccttcggacttcctagaatagatcaggtggtagattcaaccgttggatgctctatactgtcattcttggattgctactcgggataccatcaaatcagcttggcaaaagaagacgagaaaacaacattcattaccccgtttggagctttctgctattcctccatgttgttcggcctcaagaacgctggagcgacttacctgagagccattcaaacatgcttagctgatca

SEQ ID NO: 66359 - DNA, 821 bp, Zea Mays
tcaaccttgatgtgtcgtcctcctcttccccatgtaatcctgcctcagcgagagcgataagctcacttaaacttaatgtgtcctcctcctccatcagctccaccatcgccatttttttcctgaacgtatcttgcacgtgcctcatctgcgagatagttcacgtcacatccaatctctacaaatgtaatgagacaaataagtttgcaaattcaggataaataaattgtacaaacaaaactatcatgtcattttcaaactcatttcccttgagacgatcagcaagattccccaacatctgtttctcggctctagccgcctcccattcccttgcatcttgtgctctcttctcatttgccaccttcaatctcctctgctctgcacgcatcgggctgtcaaaactcattgattttacgaacctacgcaagtcctgtatgcattgttaatgtacgaatcgacgagccaagatccacaacacatcttctgtctcattagtctcttggactttattgtacgcatcatctctcctttgttgtcgtaactctcccaaccgtatttcctcgtctcctacaaaaaatagagtaagtacgggtgcaacattgcagctgatgcaaacaaaaaataaataccaacctcatcgtaatctaccatatgtccaaaaatagccaacatcaagcttggaaggaactaatccatacttagcttcaataccacatttgcagagtactggatcaaacttcaactcttccgcccactcattttttcattttcctttgcctctggctctggtcaatgggacataggaccatacaaccattctatga

SEQ ID NO: 66360 - DNA, 448 bp, Zea Mays
tttcccaccaaatggctgacgagaagaaggttgctgatcctgccctggctggtttttacgaggccatggaaaaaacaaacacagagaagattacaaatgagatactagctgttttgtctgaagattctgacgatagtgggagctttgatatggaaagtgaagccgaagatgcagaaaatcggccttggcgaccgagtcataccatttttgggaaatcatccattaagcagagtcaaattgacgctatgaaagggagatattcccgggatatttcaattgtgagagctggaggagatagtgctgcacctgctcccgaagagaatgaggtggttgtttacaggagttttatgaaggccgggcttcggttcgcattaagcaaattcctggttgaagtgctgaagaccttcgagatttttctgcatcaaattacccccgaagccattattag

SEQ ID NO: 66361 - DNA, 492 bp, Zea Mays
gctttgaagaatatgaggtgtgtcctgttcatgcggcccaatatgtatcatggggatgtgcttatctgcgccgaccacgtctgccgtttttgtgtgctcatcaatatgtccaggtgccctcaatgccgcggggggagtaacagatacaccctctgtataaccggtgatcgcagacgctacaggatgcatgtccattgaaatagacgtacctgttgatctatgcacagatgctacaggtggcatgtcatcgccagcgccggtgctggacattttctcgtcgttaatcgccgcccggtgctctcccttccgccaccaatatcacagatacgaacgtggacaagcgactacaaattagaatttgtttcctcccgtaactgtgcctttatttacgcgaacgtggagcacgtctttccttatctcaaaccggtggagatttaaatgttgcatggtttacgctatcatgttacacaacgttatgcagtcgtaaacggt

SEQ ID NO: 66362 - DNA, 400 bp, Zea Mays
gttttctaaattttcaattataacttcttgccttttatcctctaaatcttgttgcatttttaatgccttgctcaaaagcatgctctgtgcacaaatagccttcgttagaaaatattttcgtaccacaagtaataagagttagacacaaaatgtttagcttgaaattagaatagaataaactgccgacaatatgctgtcgacggtagcggctgatatccgcttcaagcttcgggaagatgatactcttcgataaggtaccgacaacctttgcaccagtttggtctcgtatacagcctaacccttcatcatcaataccaccaaagagaagcacccccggccgatatccacaagatatagcatactcttttaattcctctttttcagcttcagtcagctcctg

SEQ ID NO: 66363 - DNA, 931 bp, Zea Mays
gtcgcagtgctacggcttttatgcaccatagcgaagtccgactgagggcgatgttgccagaattttcgggcgaaacataccgaccaatacgcaccataatcggaacagaggttggtgggatctggaggggataaatccgatagcttgggcccatgaatcagtgagcagaggtgaatgacacaggacccgcgcggtccgtcagtagagagctgcgaggacgtgaggtgcgcgcggcgaggtcagctgacggcaggggccctccgatcagtgagaccgcgcgcaggtgggctggccgaggtaaagaagaagtgggccagaactgaggcagtcggcccatgtaggtcttctattctttttctttttatcttttctccctatatttcaaactctagtatttgaattcaaatttgtttgtgatttcaaacccaggttaaattcccaaataatgttccagtaggaagaattataagcactcatatatatttttctttggatattattttccttgttatttacttatggaaggaattcctttctattttctattctatgttttcatttgaaattttgaggtcaagtttaaactatgattctttattccaataaaatgtatcacaacaatttcttcagtgtgatatgtatttttctgaatgtatttatttatttatatcattatttttttttctaatgtaaaattttgggcattacaaatcctacccccttaaaaataatctcgtcctcgagatttgaagaaaagggatgcaaccagtttggtttaggaatcaaaagttttgtttcatgttttttttagtagctagtagatgatttggaaaatatagacatatacgtctagccatctattaggtcagatgaggtacgattatggcaagtatagataataggttgtggcaaggaagagtataataaggaa

SEQ ID NO: 66364 - DNA, 618 bp, Zea Mays
cattaagtccctctatgaagtgctcttactttctctcatcaccagccacttcatctggtgcatatcttgatagttgaatataaatttgtcccggtattcactaactgacatgttgccctatttgattgacaaaaattccttctttttaatcttcatcagtccaacaggaatgtggtaatttctgagctgtgtggtgaattccgcccaagtgatagtatcaacaacatcatgggcaacattgtaagaatcccaccaatcagcagtaggaccagtaagacgaccagaagcatagagcgccttctcctggtcagagcattgtgcgacattcagcatcttctccactgactttaaccaattgtcggtgtgcagaggatctggagagctggcgaaggtaggtggcttgtggctcataaactctcggtgcttgtcccggggtggaactggtggtggaggaggtattggtgcttgttgctgtcgcaccattctctcttgacgcatctcctccctcatctcttgtctctcttggtgcatctcttgacgttcatgccgcatctgcgcctgcatatccgtaatagtattggccatttgttgcagcatctgcatctgggctgcaaccac

SEQ ID NO: 66365 - DNA, 517 bp, Zea Mays
agttgagccaaccttacaagagcagataatcatggcatagcttagtgacaagggtgttcaagtcattaaagaaatgctcaatcaaaagctggataagtataaatgttttcgtcaggacagccagggtattttatggttcgaagatcgactggttgttcccaagaatccagaactcaggaagaaaattttggacgaagctcatctctcaaaattttccatgcaccccgggagtaacaaaatgtatcatgaccttagatccttatattggtggaccaggatgaagagagagattgctaagtacatatccaagtgtgacacttgccaaagaatcaaagctagtcatttaaaagtagcaggtaccttacaacctctccccataccatcttggaaatgggaagatatctgcatggactttattgtgggattgccaaacacctcccgacaccatgattctatttgggtcattgtggataggctaaccaagacagctcatttcttgcccgtgcacacaacccac

SEQ ID NO: 66366 - DNA, 371 bp, Zea Mays
cccccacgttcctgacgtagaaccactcaccctcgtagcgaatggaatatgggtgtgggatctcaaagtagcccgcctaccagctggagcgtagatggatggtgatgctgtcgacaaatgattggccaccatggctagaggatgtcgcagactaaactgatgccgccagagcttccagtaaggctccatgtccacgtgatagaacatgctatgtgaaggatggtgttggggtggaggttctacagctctaatttgtagtagaagactgcccccgcacaaaggggcgcacgggcagcctgaacccacactcgtagaaagacgcaagcacaaccaccacaccatcccacgaccacggcacatcgccctcatct

SEQ ID NO: 66367 - DNA, 489 bp, Zea Mays
atagcatgcacctcgattcatatcaaggttactattagcttggaatatatgattaatgcaaagcaatgcaagcggatcggagagcatataggagagaccacaccacagccccatatgatggatgtctatcgttgttaactagaggcgtgtccaaatcaaatcaccgtggcatcttcattaatttgcaagggacagagacctgctgttgcaaatatattgacacgcaatcagatgcgacagtcgtctgaatatatagctatccttatatatgtggatattctcccaagttggtgccatgtcatttttgtatcatgcatgtccctggctggctgcatcgcctctcatgtgctgccaggaaaatgacctgataatcatgtatttaatctggacgcgttattatacagctagcgtgtagtacttatgatggaccatgtaagtgtaagcacagcagccatacagaaatcgctgcacatttcaactaaagcccaa

SEQ ID NO: 66368 - DNA, 486 bp, Zea Mays
tcgcggcggcgttctacgggacgatttggtgttccggagtgtaggcttcggtaaagtttaattggctggctccgagagcaacagaaggttgaagacaagctagaaccagaagtaatttggtaggtactaacctgatgagtgctggccacggaggagtccttcacggcagcgcgaagaacatggcggaatggatttatggactgtgtgagttcttctggtgaaattgagtcgattgctcaagtacttgtgtgcgtgatgtggtgaagaagcaggatctgggctcaatttataggccgatggccggagttggatgagactcgcggagctgtaaacgcgctggcaagctcactcacgcgggcagagccacggcgatggtccggcgaccgccgattaacctggcagtgccaccgcaacgttttaacgccacgtcgcggatgatctttaccgtggccgcagacccatccccaaccgtggtggcgatcttat

SEQ ID NO: 66369 - DNA, 626 bp, Zea Mays
acgggggccatcatggggaagctccgaattgtcatcgtccgcatttcctgtgggtgctctaggcttacccttggctacggagtagacggtcgtggccgctccactggggattgcccgccagcaatgttggaattgctcgccggagctagccactaccgtcgtgccgcttactctagcggctagagtttccctccgatcgattcaccggtaactcaccaccctttctttcgcctttatgtcctcaacacgtagcaccagtagattagagggtgggtgctccagtgaggggggaattcttcgccgtacttcacggcaccaccacggaacgcgggagcctgtgggcgcggtgttcgcaactatcaagggtggtagttagggctccatgcaaatcaccgtgacctcgggatcatgtagcaccatccagtcgaggttgaggggtggcgaataggggcaaggctccccgcggtggcaaaagtgccaccgtgggatgggcagcgccatcgtgttcatgcacaaggttagggagatgatggtcggaccattgatatcccaggcagcggtcccgattagagcaccggttaccggttcggcctgggttcattcccgccgtccgatgcgaatcaagc

SEQ ID NO: 66370 - DNA, 1048 bp, Zea Mays
tgatatcagaactcaagaggatttgagtttctaaattagctacgtaactatatgcaataataaaaagggtaactatttacaataataaaaagaataaactggagaatgtggtcacgttccttgttttgggaacgttcgttccgttacgagaacgtagtaacaatctcgatcccgtagggttaaaaccgttttagtaacgtatcatgtaccacgtttctgttcctcgatttcatcgatccagaaacctgattactaagataataaacctgaaaaaaaacaaaaaaatatgtttcccacccatttacaagtagtcgatttatagtgcaatggattactctatttaggattccacatgaaaattttatgtgaaaatttggcaccaaaagttttttgccatattatgttccaggcttccaatgtccagacgaaatttgtgcataattctgcaggtagtggaaactgttctgagcaagagggagtaacaagcaaaacattccagcataatttctcctggaataggaaccgcaaaaaacaagtgccaataatctgtgaagtgatcaagattccttgtcaagcaacaactgagatctcagaggcttgtccctgatgtgaatagcagcataccatccagcactgaaagactttgtactcttctaccaaaagcaatggaaccaacagacgaatcgaagccgatgagaacaaaatcagcagctttattccactctcaaacatgtcccagtacagctcctatgcaggcagcgcctatctatgccgatatacctttccctccctgttacctttttttttctcacaaatcaaagtgccacccttcctatgactgtactgtcaaatccggagggcctgagaaacagaaccacggtgcgataaaatgctatgtctttagttttacaccgtagctatgcgttctggaaggggagaatcagatcccatgatctccattattgtgcacaagaaacagaccaccggtggcaggtagaatgtttggggcaagatggatcaggtaacgagtaccatccacagaaattat

SEQ ID NO: 66371 - DNA, 932 bp, Zea Mays
ctgctacttttacaaagatggctttgtttataagggttgggagtgcttctcttccacaccaagctttgaatgagccatatctctctttctactgacatgctgccatctatttgtacattggtcttttttctcattcctgccagcttacctacaggctacagccatcctccctctctctagacacccaggcagggaagaagaaaagaacatatacagagagggagaaggtgagcaaaaacattaggaatcttgtaatcttttcaccttcttgtcctctacagtctgagaatgcaggacactagctggatttgtgggatatggtcaaagcatgcactgtaaggcatcctgctgcttccttgcttgcttaggtgtctccatctccacgagatctttctctctttgcctctctctttatagtacaaaaaaacttgctggtacatggtgatggaatgacttcagcatcaaccaaaccacacacagacacagctaaaaagtttgatcactctccatatcaccaaaaaaaaaaagattttgctccactggtcagattggggagagaaatgaggtggagtatggacattaccctcatgcagatgcagctagtcacctacttctgcatcccaatgagaatctggggcttgtattatgtgtcggtgtgattagttgtttacatgcttgctttgcgctaatctaagcaggtatacttatacttaatacaatccttcagtccaaagtgcctgttttaaatattagaagcattagctgttactgttagcctgttcctttgttcttagttcttacaaaagaccagagagggatgcaacctttggcctgaccttctcaatttgcagtatctattgaaatgcttgtattttttacagatggttctaaatgcctgtttcaccaatggtagggcttcgcattaaatctaa

SEQ ID NO: 66372 - DNA, 748 bp, Zea Mays
acttaaatgcaaaatggacctcatttgagttctatactaagtctgaaatttcagtgatattggctcaactttggagctctacatcttccaaattattgagaatttgccctaggtcaccacatcaactatgtagatctatcttaggtgaacaactttgcttaagtgggcaagtcatgttctagtgagaaatttagagattatcatgctcaaactttggctgtcaggttgattaagttctgaatttcagacaagtagtgcaattgcaagcactttgggcatgaattaatgcatgatcgagcaagtatttgcctaggattgctataacaatattgtagctggatcttagggctataactttgttaaagggtgtcgatcatgttactccacaaaattggaggttattggctctgtaaattcccctgtcagaagcactgctggagcattccatggtacagtaacccgagtggatcagaacgccagcgtagcctgctcgccgccggtgaccctccctgcgctaagattcgcgccgccaccgtctcaattcgtgctctggatgtcgtgataaacgctcggagcacaccgccgtggataagcccggcgattaaagtatcccgaccaccatacaaagttcaccgcggtggaaccagataacctcgccggtgcactgcccccttctggccttatgccgcgtgtcctaaccgcgccaccgcatcgccatgactccctctagcctctccgttgatcgccg

SEQ ID NO: 66373 - DNA, 778 bp, Zea Mays
ttagctcctggttttgtgccgtcgagactgccggtctgacctcggcgactgtcggagtggaagcggagtgtatggggaagtcgtgcggggaaagcttcgagctcaagatcaattggagcgccgttgatttctcactggaggtgtgatcctgtcgtggaccgcagtacaccgtggccagcatttgttacgccgcctattgccggtatgtcaccctatacttgtccgcaatttcatagcgatgttagtcatgttctgggtgaggtattcggggtcggggtggccgttcaggggcgctcaggtgagctcgccgtcgtagctgtctggtcgccaccgttgttggctcccatgtggagaagacatggcaatgaccatagatttctttctgaatggcccagatctaaacataatgataccggttcgggaagagttgtattggtcgtcgattccctggttgggcggtcacgatgagataggatagagaagcgtttgtagccgtgcgatcttgatccaatggccctgtgcgtaccgcttcatcaagtgaatagatctaatctgtgccgctaggcgtggatccaacggtccagaatggcgcgtaccccttcgcctcgagatttattcaaatgagaccccgtattatttactaattgacccgccgtccaacctagtggtaatgtaattatagaagggccctggattttacaaactgaaccccgtgcttctctgtttttatgcgcgaagtccagggagcagagaaaataaataaataattatagaaaat

SEQ ID NO: 66374 - DNA, 343 bp, Zea Mays
ggcgagtatgatgtgccataatggcaggtataagagtccatatcattgagtatgatgtagttggtagccgctgtaacaacacatactacatagttctcgctgatacacctacaacatcaagcgtggctatagcaacgccccaatgctagcatgtgtggtgtagttggtagtcgatgtagacgtacaaaccatatggtgcttacaggtacatctgtgacatggctacaatgacatctttttaccgaaacatcacccctctcaatgagatgagaaggatggaggccgacctcgacctctatgacttatgtggtgggggcgcatgtggtgcccaaaccatgccaac

SEQ ID NO: 66375 - DNA, 333 bp, Zea Mays
gcctgagaaagtgttagatacttcggctagaagtgcccaaacaatagagaaattagctagagatagtccagatactaaatctgaacttaagaagcctaatgtgcccaaaaaaccgagaagcccactcggattatcaatctggcacaagaggctagaaaaactcagtgcacaagagctaaaggcgagaggcatgacatgggcccctaatgggagttctcaacatccaggtaaggatgatgcttttggaagaagtggagtaaaggcaaacaaaaggaagaaagcaagtacaagacgtctaggtgaaaggtatgccccagctcaacaaagctattg

SEQ ID NO: 66376 - DNA, 1256 bp, Zea Mays
ggcgactcggtccaagtccaacgcaagggtcgatggagcgggcccgtctcggttgagttgggccgcgagagggaagacggaagacagtttgattagttgggaaattggaatggagtctggacttgaacttggacctggtctcctccagtcctgcacttgtggcgtatgggccagctcagttataaacagtgttcggggtgttacagtgttagactgtgtgcactgtgcaatagaccttgtaaacggccacccaaatccaaaatgggcatcgccctgcactgtagcacgaggcaaacaccatccagcagaatagctaactacgccacgcaaaatgcatcggagtagagtggctaccgatatttgagtactctctcttctcgacgcatcctcagctcaactacctttgcacgcttttgccgggaaacggaaggaacgaggaggcgaccacaagggttccagagcggcggcgcgttgcagcgatttgactgcgacgacggcacgaccccaagcgtcctcagctaactatcttcgacgcacagttgccgggagacggaaggggcgaggaggtctgcggcaaggttccggcgattcaaagtgacggcgcagccctaagcaatagcatcctccacgcatccttcagccaactggcttccctggaggtaagcatatatgctgaggtctgctagttcattgatgtgttcttattgatggtgtagatttcatagctgtgagatctagatctagacctatgaagtgtgcattttagttaaaacctgtcaatgctaatgtaagtgattttcttagaataatggagcagcaaggaaatgatggtgtgaattcctcccggtcctcacctttctttcacaatgatcagtggacttacacgctagtcactgagcttgatcatctacagcatggccagaacacacatgtatgctagattccccttacattcacaacatttccaattcttctagttgtcttatgattcatggattgtttatatacatttttgcagttccataacccaagttcatcacacatgagtatgcccccatcgtttcaacaattgttagaggtttacaacccatttctagagcgagccgaacaaccaaattcacaggaaacaactaaagaaacacattcaccactacctcaagttggttcaaagcaaaagaaggtttctagaagagggggtggattcactaaagaagaggatagagtaatttgttctgcgtttttgaatgtcagcaaag

SEQ ID NO: 66377 - DNA, 892 bp, Zea Mays
ttacaacatagcagtacaatccatccactgttacaaaagcagtatgcttcctatcttccctagacatctggatttgatggaaaccagagtatgcgtctaggaacgataacagatcgcaccccgaggtagaatccccgatttggtctatacgtggtagtggatacgggtctttgggacagaccttattcaggctggtgtagtcgatacacatccgaagttttccatttgctttggggacgatgactaggttggccagccatatcaggcgatgtacctcttcgatgaagccagcgtctagtagtttccggacctcctctcggatgaagtcctgtcgctcaatggactgtctgtgaggcttctggcttactggcctggcgtcagggttaatcttcaggcagtgctcgatcacctccctggggatcccaggcatctgcgacgactctcatgcgaacacgtcggtatttgcttggaggaaagcaacgagcgtgagttcctatttctcatctagatcacccgcaatgcgagtggtcttggtggagtctgcagcaagccggatggctttgacggggacaccatccgttccggacggttgtacctttggcgccttgaggggtgccttggtaccggaggttgaggggttcctccctccgtcgtctgggcgagcagtttctgccaccagggcgtgcagcctctctatggctgcaagcgcgacagcatggtcaccttggacggtgaggaccccagccggggatggcattttgaggaccaaatactcgtaatgggcgatggacatgaaccgatacagggtcggtctgccaatgatggcgttgaaggggaggttgacttccgcaacatcaaatacgacgttctccgtgcggaagttttcctcagt

SEQ ID NO: 66378 - DNA, 777 bp, Zea Mays
cccgggttaagtaagcgtgcaagttgacagtgaataatttgagtgcctttgaagtctttttattgatgatatatttcccagtttacagcgtacattgtcgtcccaatagcttttgagatgtagctaggggtaaaacttcctgagatgttctatgttccatgagttcccaatttctgtgccgtccatttgagtgagacgatatgatccaggccgagtgacttctgctactatgaatggtccttcccatagtggcgacagtttatgtcgtccctcccccgttagaattcggcggaggacgaggtctcccactgcaaaggatcgatgccgtatggccttgttatgatagcgcctcagagtttgctgatatcgggccgactgaatcaccgtattcaatcgttcttcttctagtacatcctccaacctagtagcctcagcttctgctatgttttcaaagattaaccttggtgccccaaacttgagatcagcaggtagcactgcttccgaaccatagaccataaagaaaggtgtgtttccatgcagagctcgactaggttgagttctcaggctccaaacaacatacggcagctctccgatccactttcctgcgaacttttcattcttgtcaaagactttctttctgagcgcctccaatatcatcctgttggctctttctacctgcctgttggctcttgggtgcgccaccgaggcatatttgatctgaatgctcttttgctcgcagaaatcgaagaactctgagcttgtgaaattggatcccag

SEQ ID NO: 66379 - DNA, 673 bp, Zea Mays
gaagggacatacggtgatggactgctggcacaggtttgatgaaaattttgtgcctgatgatagatttgcaggaacagtatcaaactcatatggtgtggacaccaattggtactttgacacgggagccactgatcatgtcaccggggaactcgagaagctgacggttcgtgacaaatacaagggaggtgatcaggttcacacagcaagtggttcaggtatggagatagctcacattggtcattcagttataaaaaccccatatcgcaatctccatcttaaaaatattttacatgccccacaagccacaaaaagtcttgcctctgttcataagcttgctgctgataattttgctttccttgaatttcactctaatttttttgtgattaaggacaaggtcacgaagaaagttctccttaaaggaccatgtcacagaggtctctacccactatcatcatcgtccctaccttcatcaccaataaagcaggcttatggagtcagcaagccatctttagctacttggcatagtcgcttaggacatccatcctctccaattgtggagaaagttgttagtctctttaatcttcctcattgcgttgagaaaaataaacaatcagtgtgtgatgcatgccaaagagctaaaagtcaccagttaccttatttaaagagtaatagt

SEQ ID NO: 66380 - DNA, 359 bp, Zea Mays
cgagaggatggatacgcaagcactagtgacggtgactacggtttgcatttcttggacctgatgcctagatccatgcctgtcctagatgacacggcggacaagggatttgccttcatgccggcgccggccaatctaggcagcgagctttgggtgcagagagcgttcagaaggctacatcggcagcgctgttctgaacgacatgctgcatgtcttggtgcggcgcagtgcaaacgacgacgacggcgacggcgacttgctcatagttgctatggacggggacgaaggaagcatacgcaggatcattccctggccactgggcgtctattccagagccgtcttcgattcttcgttggccagtc

SEQ ID NO: 66381 - DNA, 465 bp, Zea Mays
cagatgaccaactctcggatgatgaccaactctgccaaccaactctatgacatggaccagatgaccaactctctaatgatgaccaactctctggtgatgaccaactatccggtgatgaccaactctccggtgattaccaactctcggatgacgaccatctctctgatgaccaactctgtcgaccaactctgcgagacgggccagatgaccactcttggatgatgaccaactctcggatgatgatcaactctcagatgatgaccagctctccagtgatgaccaactctccggtgatgaccaactctccggttatgactaactcttggatgacgaccaactctctgatgaccaactctgtcgaccaactctacgagacgaaccagatgaccaactctccgatgatgaccaactcttcggtgatgaccaactataggatgatgaccaactctacaatgaccaacttct

SEQ ID NO: 66382 - DNA, 683 bp, Zea Mays
cgagggactattcctatactagaacagctctgatctatttggatccaaaccaaacatccatattactagaacggagcggctctgtcctaacaaactctagaaccaaacactacctaagctcatgattcttcgcatgcttacatgctacaaggtaaagagtttggtgggcccaaataggggggtcgatcgaactgcggggggttaggttgaccttgtgcatggccaatgggttctcctcccttagtggggacaatctaggtagcttccatgttgtgtatgtactaaagattgtttgcttgcttgattgtgggtccattcatccttgtgaagtgaatgtgagcccgtaagaagaaacacaagttgatccaatggtggaggatcactttgcagtgctacacatggatcatggaaagcttggaaggctagtgggtgcaatgggggacgactgacccctaatgtgtgtcccaccaactcattggtttccattaagcttaaatctgcataggaatactcatggacacgtggaacttgttatttactcaaaatatgctcatgttatgtttaccttctttttattctaaggttgttgatgtgttttgagttagtggaattattacattttcattgtcaataagagccccaagcttaaccattgctcatcccaaataaacaattaaaaaact

SEQ ID NO: 66383 - DNA, 606 bp, Zea Mays
ttaatactggccatccgatctttgatccaaaggctgagatcgcttacaatgtatttcattcttcacaaggctcttttatagcttctctctgtgtgtttggcacaatgtgttaatccagctaggtgaagtaacacttataattttgagactgtttgtcataaccagatttgttttcttcctgtagcaggcggctatacctatctctaccatcatgaagagagagagagagagagagagaggaattctattgagagcttaatgattgttatcaaagaaatcgggtttgtctaagtgctgaaagtgcaaactctgatttccatcagctcttgaccatgtcaccaaggttccattgttatagcgctaccaggcggccttccttctccttttgtgcaacacatcgttgccatgtttgaggatgatcttggctgctgctgcaaattgattctagaactagaacaacttgcccaaatgaaggatggcaaggcctttgctgaatcattggactgtctgtcaaatgttatgtgtaatgttcatgactatctaatccatgtggcattaaggtaaatcttacacataatggataataaccatcacagctactccaga

SEQ ID NO: 66384 - DNA, 279 bp, Zea Mays
ccagctttgaagaatctcttaaaaactactacttcatcttttcctagcttcggaatagtttcctctcaaccaaagcgaaccagctctttcttttcttcattaaaatagcccaatttcaacatcttaggtaggtcatcttcagaggtcgtggattttccgaaatccagatggttgggtttgctcggcaccgcgctgctataatcatcttcagaatcggtctcctcaacatcagcttgctctgcttcagtggcagggacgtcctccgatgttaccagccca

SEQ ID NO: 66385 - DNA, 550 bp, Zea Mays
ctctagttcgtttgttgtttatatgtatgcaattcttttctacattggggttattggtgtttcgccccaaatatacagcatatcatgttccatttgaatatttccccattattattcttgcttggcttatcaatggttctcaccctgctttgctaacactgtctatgttgatagtccttatagaaaacaaacacacaaaaaaacatattgctgagaatttgagatacatatggccggtttgttttagggagaagtaaatatctcattcaagaaagcagctttgatagtttcataggtgcctgcagatatagaattatagattttagtttttttattgggccagtacaggcccatgaaaaacatcagtacaatttagatcttatcatctgaatggaacattcattgctaacaatttgaggctgttttgttgaacttaataggaagtggatggaatgacattatgtagtgtactaagtttgctaagtgatttatgtatgcacagaactgctgctacaaccttttttaggagaacatgttactgaagctttct

SEQ ID NO: 66386 - DNA, 583 bp, Zea Mays
ctttgcttcagcaccgagggttttggggagggcgactagggtttcaactcggcgagcgaacacagaatccttcctggtcgtcggaagcagcttcaaccgcgtcagattcgtctccgcgtcccatgcgatttattcctcccttcttctactctgtactctatcggtgtcgccatcgttcagacgcggccgctggttttgtgttcgcttcttatgtcatcgcacacggtgatttgcggctgtcaaagattgtgttcgccatcgtcgttgctgtcgctcggcacacgccagacctgctgctgcgtcctgcacactcgtccttgcaccgtagcacctgtgtaacctgaaacttccttgacagcgccgtcctctgcttcgcagtcatgccggtgaggtcaacatagacctgcttccagccacgccctcgggttgtttgatgaaatgtctcaacacattttttttctccactacatattgcagtcatgccggtgttgtcagtcgtacacgctggttcgttgatcgatgaagtgtcccaacactttatcctaataaatacatatacgctactaaaggtcatttataattt

SEQ ID NO: 66387 - DNA, 536 bp, Zea Mays
attggacatagtatagaatatccaagccgatctcgtttggttcgttccgtgtgtttcttgtcttgatttaaattttccaatataaataatggataagaatttgtctgactctgggatattcaccaactcaaatcttgtctaaaatattgccgctggtaagttttggtccgatctgtttaatcctcgtgtaaatctaattctgaaacccggagatatttatgttttgtttgtctaaaaaaatagaagaaaaggaggaaaatttctcttctcccttatctccccatcggatgacttctgacttgttcactccacgtcttcggtccgttctcgaaggcacaccataagctcataacctcatctacacatgcgtctcctccctagctccctttaccacgctgccgcccctacctcccttcccatggacgcctgctgctagagctgttcctcccctgcagctcgccagccgcgtcctccccagccatgagctcacccctgcccccagccatggacgccgccgaccatctccccatgctggg

SEQ ID NO: 66388 - DNA, 362 bp, Zea Mays
agaaacggaagtacattttgctaaccattcttatttctggacctacacaacctagagttgacatggatgtatttttggaacccttaatggaggatatgaaaatattttgggaaataggtgttcaaatgttggatgagtatcgtaaagattcgttcacactaagagcaattattttagttacgatcaacgattaccctgctctcttcacattatcaagccagtttaagggaaaggttggtcgcacagtatgtattgatggaactacttacgtgtcccttactgcatctaagaagatagtgtacatgaggcatagacgctttttattggaaggacaaatgtaccgcatgcgaaagatggataag

SEQ ID NO: 66389 - DNA, 721 bp, Zea Mays
cggccatggagatgaggagagggagagctcgaggcggccaccaccggcgagcaaagagacaacggagggattcattgggaggagctcatggtcggagtggaggggaggggacgtagcgtggctgaggtggggagaggcatagggtgaactccatggcggggtcggcggcggctgacaccagagctcacggccaggagacccgcaccagggagacgagcacgagagacagaggggaacacgggcgctgaggagctcggtggaagaggataagcctgagtgagtacgatggtggagaggataaaagagaagaagagatatcgagcggtgggagggaagatattttccctttttaaaaaattaaatgcaaatatctagtgcctaggttttgtgtgagtttaaatgacttggccccaaacatatttcagactacgcattttattttctggattacgaaatagagaaccaaattaataatcaattatttgctctcagttcttactacctcggtcaggtttgtttcggaccgataaccattgtcgttgagttctaattaatttgttaaggacaaaaatcgtaagagtggatcgagcttcctaattcggaatttttaatcgattattttttaataggcatgagaggcattaattcacataacaaatatgtttcgaacttggtgaaacatttagaacaggatggatagacagagatgaagatgatatca

SEQ ID NO: 66390 - DNA, 288 bp, Zea Mays
tggacttgcttcatcattcaccctatattctattgcacgtgcttggtggcatagtactttgcttatgcctaaccatgttgcacatctgctgagatgaacattgggtacacatggagaccccccatccctcctttgtgttacttgaaattttattgaaacacctgtccttccatttactcaaggatgctgatactgtaacatcgtgtacagtgcacactatggaatcctcctttgtgttactttaaaaattttatcgaaacatttgtctgttcaccatttctcaaggat

SEQ ID NO: 66391 - DNA, 408 bp, Zea Mays
gtatccacacgtggaggatgtgtcatgtacttgactgctaggtccatgatggcggtatggcgagggtggggaagcgcgacggctggtgtgctggtgggcaaattaggttaaccataacgatgcttccacccttaatatataagtgtccttatggacttctgacttctaggcctatcaggaaccctaaagcctagtctaattcgaatattatccaaattaggcttccttccccttaagtgtgtgatcatatacgttcacgtatacatagacatggcctaagtattattacatagcctaataattgacaacgacctatagcaagacatgtcagctcctatgcctacgtaaagatcatatcaaattaaccatcacaacattacacacatgatgttcctcttgtctcacgat

SEQ ID NO: 66392 - DNA, 1911 bp, Zea Mays
agagacctgcttctctatctctgttttgtgcaatggtgagtacctgtagggccttgagttcacaggtatatgtcctggtaccaaagaaatatgatgatcataatctctggaaggaggcaaaccagtagggacagcaaaaatatcctcaaactccaccagcaacctttgtaactgctcagggactactgcttctttcttatccaccacttgctccagcataaccaaagcccaaacctcattgcctttcaaccatttattcacttgtagaatggaaatttgtggaacctccttctactgacccgcatctcctcttagctgaacagtcactcccttgtccacaaatgtgagcacattctgcagtcaatcacattgcataggactatgctttttcagccaatcaaaacccaaaatcaggtcatacacatccaactccaataccctaagagtagtagtataggtatgacccccagaccaccactccagatcaaccaccttcttgtcactcctcatcttttctccattagccaccttcacgtccactgctgcacacttttgcacaggcaagcccattttatccactaaattttgactgacaaaactcagagaactgccagagtctatcagattcaccaacatctggttatgcataaaaccttgcaccatcatacatccatcactttccattccactgatagcatttagagacagtttatacaattcttcaacctccttgtcttcggactccagatgctccaacacaggatcagtcaacaccatgcccatgtcttccacagttaaggcatgcaactgaggcaccaccctcttgggacacttcccttggtgacctggctcaaacttttcaccacaagtgaaacaaagtccattcgctcttctaaactccctgagttgcctctcctttgttagatcacctagaataaatcctcccttattgtcagtcttcagattactgcccacagccttattagaagtaatactcctctgcatcttcaacctattcttctctaatatctcctgctgcatgtgagctaaaataactgctctatccacagactatggcaaatgacacattacacccccttgtaattatgtcttcagtcccttcacaaactgattgacaaaaaatctcatccatccccgggttgtgaacagtcgtggcatgccttgcttcttcaaactcttgagcgtactcttcaactccattcttctgatacaggttcagaagatgtctcatggccttgggatattcttccactccaaatttggccctaacagctctgccaaactgcatccagtttcccagtccttgcctcatcttgtacacttgaagccacctcgctgcattcccctccatgtgcatggatgctgatattgcccacaaagcttcaggaacctgataaatggtgaagtagtcttggcacttggccaaccatattccacgttccttcccttgaaatctgggaaacgaatatttgggcaaagatggatgtcctcgccctcccatcacttgatcttcttcttctcttactctctcctgttgtggttctcttcttcttcggatttgatcaccttgattagcaccctcccttgatgatccagcaccatcgccctccaagtccttcgccatcatctccaaacgcaactgcgccaccaccttgcctgtctcctccatttgccttgccaatatagtacgctcttcttctgccttccttgccactgtagctgagagctcgacttgtccttccagccgatgctgtctagcttccaccgtatccaacttcttcaccactcgatccatcatcttcatcatctgttcccacttctcctctcccttctgctccacagtcgccatagcctccagcacgagacgcgtctggacagacggtttcacca

SEQ ID NO: 66393 - DNA, 845 bp, Zea Mays
tggtcaggcactctgaatcagatcttcaatggtacagtgccacacaaatatcaacagattcagggtacctcgccgccggtgatccacgtgtccggatttgcgctggtcgtcgggattcgtgctgggcacgttgttgatattcacggggaggtgaaagatctcgcggggaggcagatagggtcgaaggggaagcttatcaccgtgcctgtagccgttgcgacgtggccggaccgccggtgtcgtcgtggacactccggcgacctcaattataccacgtcgtgactcttcactacgtggtagtaaccgtggcacacttaggcttaccctctctgaaccactacaccggtgaacgccatgattgcgccaccagtgacctcttccttctccggccgccaccgcgccaactccaaattcacaggccaccgcccccagagcctataaattgagtgtgccgtcgagtccgtaaggtagtcaagcacccaacccaccaagtcgtgcctccaattgctcaccagcaagccccaatttgggatttcccccaaatcaaccaagaacaccgtgcggtgtgagctcaccgtggccaacctgctccaggttgattcataaccctctgttgaatgttctagcatctctaggatctcctgttgctcataggctcgattgattgaactagaccataccgaattgcccataacaccgtagcttcttctcgagttttgtcgtcgacgtgaacaggcgtgctccggcccagattagtgcgattgattgaggggttagtgtcgccgagggtcgaattcggtgccggctaagttaggggtccggtcttggcatattccggccaatat

SEQ ID NO: 66394 - DNA, 758 bp, Zea Mays
atcgttgtcgggaatagatagggtctaaggccgtggtggtcagattcacttagggttattagtcggctaggttctgggatggtgtgtgagtgctcgtttccgccgggaatggtcgtcgtcggtgagttcgtgcgcttgtggctaggtgttcgaccagtgttcgccgaagttggagtcgtggacctgaagttgtaaatgagaaagaaggtgagggtcttcggtggaactgtcagtgttggtgaagggtgagctgagttaggtcggtttcggaccagtcctattcctaggtttttcctttttctttttgctagcaacttttaaaagttcaccaacaatcgtaggaaaatgtaataatcgtgaaaccatatttattgagttcataaaattgtgatgtttttattaaaataaggtttaggatttttactgtagagatagattttagataatttaaaagtgctcttagaatgattatatgaattccagtatcaaaattagagctctaaagacaatgaattattttgggtaaacttaacaggtccatttgagtctctagttaaattttgaacttgtttggagtttgattgcctagggaacatgatactagctaaaagtagagttttaatccttaatgtttagtatatgtttaaaagggattaaacaatatagtttgttggtatgaaaggttttgtaagttcaaatgtgttgagctctctggtttctcttagtagatttagtttggtttctttcatcaagttttt

SEQ ID NO: 66395 - DNA, 1880 bp, Zea Mays
gccagtgataataatatttccacatgtggtttcttaagcaaaccgccagtgcttaatgaggtttaagttagtacatggttagtctgccagtaagggtttaggcctacgtaaataggaacagacttttgcttagtgcgcaggtgtcatctgttccaagtgttttgtgtccatgatcggttggattcaactaaagtatgttagtggatgtaataagtcgaacatgaatcttagcagttctgctagtaccttatggtattatggtaccttctgcgtgttattttgcttcttttttcgagtacacttcctagttctttaactttatacttgttttgcattagatggggaagtctggcaaagtgattgcaaagtgggacacaaaagcaacaaaggtttacatagaaatttgtgtagaagaggtcaatgcaggcaacatgtcgcataactttctaaatgcaaaagggtatgctaacctcattaggaagtttaaggaacgcactggccgcacgtacaccagggagcaaataaagaataggtgggactctttaaagagaatgtacacgcaatggaaaacacttaatcaatgggcaacaggtcttggttgagaccctcatactagatcaatcagtgcaccagatgagtgctgggctaagcaaaatgaagtaagtagccttttgtttttttgtagtttaggaatactgatcggcatctgaaagtaggaaattccattttactgcaggcaatgtcagggtgtattatgttcaaaactgccccacttgaaaatgaggacaacttaaagataatgtttggacccattgtgtgcaccaacgagacaacccttgttcatggagttgaggatgctaattcatcatctgatggtcacgaagaagacattttttggtgcgggtgaaagcagcacacctaaccccagctctacagttaagggaaagcgtaaggttttgcatgactctcctaaacctaagaagaaataggatacgagggatgaatacatgaaacagattgtcgatgctttcgagtccaggggctcttacaagtccataacctcatttgaaaacgaccccgtgcgtaaagaggttgcttcccaattgcagcaagtgatcaaagatggtgcagaggaaggaagcgacttacatttctttgcgactcatattttaatggagaaacattatagagatgtatttgctaccctcaagaccaaagaaggaaggaacgcaaggctgcgccgtgcttacaagaagaatgagaagtcaaattaggtgttggtagccctgttatgcttcagattgtcaggcttacgagtcttttttccatcgtccagtgttgttacaaacaatctgtcatttttttatgtcgtctagtgcagttacaaacattgagtcttatgagtattttttcagtcagagaagtatttcaaatattcgagttcaggtagtatttgcaataataattgttgtatatgtgtgagaactatgttggacttatgataaatgtaggacttatgataaatgtacaaccgtcagtttgttgtatgttaaattgctgattgcagaaaactggttattgtttgtatctgtgcagatgttttagcctgataccgaccatagtgatgatgatagggatcacgaggaattattagtggcagcattgactttggatatttgggtagctcgtcaagtagggtacccagaagaagcatggttcgaaacaggtatccaatgggttgagcgtacattggagaatagtgatgattgctatgacatgtttcgcatgcgccacactgtgtttcgtcgtttgcatgatacgttggtgcataattatggtctgcaaccaagtcggggagtaagtacaaaggaagcggttgc

SEQ ID NO: 66396 - DNA, 590 bp, Zea Mays
tttcactataccttgtagcagtcaggtcaggatggtgcggacgaagaatatcacaccatcaggggaggagacgactaggaccctccttgtcccttcaggcaggtcaaggggaagaccgtatatcttgagcagctagagggcaggaagaagagatgtatggatagagccgcacttgcagcggtagcagcagcagactaggctgtggggggaggccagctacagatttcatctgattagattgcatatcgggtttctctcctcgcgtctcgaccttgctccactgctcccccgctccttctgccacattttccactccacctcccacttcgccaactcctgtcgctcctgagtcatccaccaagcccgctgtgtccaccaactccactactccatcttccactgctcctgctcctgctcccgctccctctcccacttctgctccacccattcctccacctcgcttcagggagcgtgacaagactgagctgagactgttggttgttgatccgcatcttcttgaccttcagcgtgccactgttgcccgggtatgtcggttcagacacgtacccgtggagtcttggttgccagcc

SEQ ID NO: 66397 - DNA, 445 bp, Zea Mays
gctggagaaaatgaaaattacagaatatggccccattaaaaacctttaccacttaaaaggaaaaaagggaaccataaaaatggaaaaattacatggttgctacacatagtacctccgaagctcatatgcattccaggactttggaatgtcatttctttccatgtctcttaacctataagatcctagtcttgcccaagataccaccaaaaagaggccctcccacttgagctataacttccctacagtctctagattaaccactcttcgaagcacaaaatgtcctagcttaatgttctttggcctgacttttttgtcttgccactttactatttcgacttggtatttattaatatgatcaattgcttgaagtctgaccccttctactaagttttttgatattttacatgtatcttgatcctctgccgaagctagagtccgtatcgac

SEQ ID NO: 66398 - DNA, 450 bp, Zea Mays
cctacaaaggtaactgggagaatgttcctgttgcccacaataatagatgaaggatgagacgagagaggtgggtgggaataagaaagtataccagcgtctggtgtggtgtggtaggaggcaccagaatcaacaactcagttggtgacaataggagtcagggtcatcgtgctgaacgagctagcaagtaactgttgatcccacccaccaggccacaaattctaggatagaacaaagtggggtgataggagtagtaacgttggttgaggtgccggtggcgcagagggaagtgggccgaaaggataccccgggttgggcatcgtcaggtgtgccagctaggtggaggcagaagcggggaaggtccacctagggacaggccatgccacatggagatgcgaccggttcacgggttgtagagagtgggccaatgggcgtccctttgtccaccccatc

SEQ ID NO: 66399 - DNA, 759 bp, Zea Mays
ctccgatcccattcctttcttccattcgctaaggattcggtttagatccgtcttatgaattgaaaaacatcagcccagcaaaattcagatagggtggtagtggtactactacttctatacttctatactgctcgtccacaaacgtggccagtagttactgaaaaattggtgtaatctggattgttgctatctcattgtatggtgtatgaactaaattcagtttagctccctattttgttaaaccttatggaagcaaaaggtctatgagaaagcaatctacaaaaaaaaacaatcataaacagacttttctagcgagagtttactaatgaatctccccagtattgaatctagaggagcatgcatgtatgttcttactgcaagtatattattctatggttgttttgttgtcacaagtgccaccaataatgtaggcctcgccattttctttttataatatatggattatcacgctgcttgtctatatgtttaataagagcttcataggattttgacttcatcgtatatacttctacgcaaacactcattatatttctggaaaaagattgctcaactatattccccatagaaaagtactcatgatatatccatatgtttttttattttaataacaagagtgtggactcaatactcaattatattccatatcagtcacttagaatacaacaatacataatttatttttccctctcacaagcacaagaatcgctcgtgctgtaagatgtcacactttattacctt

SEQ ID NO: 66400 - DNA, 629 bp, Zea Mays
aataaagtgagctcgcatctcctcttttaatgcattccatgtttgtggtgcagcacgtgtgttaacaagttcattccaccaaaatgatagcaaaatctctaaattcactagtggcttgtctaaccctatgctgctcagaaacaagatgggaattaaatttttgttctaccatcatctcccagtctaagtaagcttcagcatcataagaacccatgaacggtggaatagagaacttaatcttagcaaatggatcatggtctggttcaggattacgatgacaacgtctaccattacctcccataccttgtcgattacgtgcgagacgttgtcgcagcggtgcataaacatcgtcgtcatcgtcgtcgtcatccacaggagagtgagctggggctgaaattggtggtgggggacgagcctccagtacgtccatgcgtgtaacaagttcaacaactcgttgatcaagctgctcataggatgtcgccgcagagtcctggtattttttaaaagcttcagtcattgcacgcatcatctccttcaattccatctgagagacacactcatcgtcgttaagcttaggccccttgtccttgtccatttgattctttggtcctgtcattgttagcacaaaa

SEQ ID NO: 66401 - DNA, 565 bp, Zea Mays
gcttcctccatccaacaagggcaactgtattttggttgtagtagacaagttttccaaatacgctcatttcctagtgttgaggcatcctttcactgctctgacagtcgcaaaagtcttcctgtccgaagtatataaattgcatgggttgcctacggccattatatctgatcgtgatcccgttttcaccagtcggctctggcaagaattattcaagttgacaggtactcagttatgccttagcagttcatatcatccccagtctgatggatagacggagagggtgaatcagtgtcttgaaacgtatctccgttgctttgttcagtcatgtccacgacaatggccaatgtggttgcctcttgcggagttttggtataatacttgctatcattcttcattgggcaaatctccttttctggtactctatggtcactcaccatcacaattgggcctggtatcgattgcacagtgtaccattccggatcttcaacagtatctgaaggaccgtcaactcatgttacaacaagtgcgcatgcacctgcaacgcgctcaggagcgtatgaaaagg

SEQ ID NO: 66402 - DNA, 572 bp, Zea Mays
ggtcctcctccaggatgagccggtgtaccctacgacggcacgtagctgtaacaccccaggtgttacttagggttttcactcaagactacacaagtaagcccatcatcacatgtgacttaaattgggaaaagtacaccaaagttggagctcaagatcctaagtaagtgcaacccatcttagaagtcataccttggcttgttatgcacatataatggggagaattgcccaaaccctaattcaaacccctttggacaagtggagcactagaggaaagtatgaacaaaagggtatggaaaccacatgatcatggcttgggccaattataaaagatgtagtacacttaataccctacaaatgatagtaagaaagtgaccccaaaaagaatttagaaaaaccccaaaaggttcaccaaagggttgagcacaaaagaaaaatcaaaattcttctaagtccaaaaccaccccctttggaaagatcaaacatgttcaccttgatcccaaacttaaaaccacttggcccaattgacaaagtggcgccaaaatacctctagaacaccctggagaagtttgaac

SEQ ID NO: 66403 - DNA, 419 bp, Zea Mays
atatcgatgaggatgggccttgtgactttgtctccgcctccgccaccccgttgtgttccctaggagccatagctacaccccgagactggacatgttgctagtcatagggtaaggtggctactctcagtgtctgatgctccccctcatcttgtccttataattgatcttgatcttgatttgatggacagagatttctgagaaccccagccctacgataccagccaaatcgtcgcaacagctgctatttgcgcccacgaccaagggtaagtggaacaataaggacaagaagaaggatgatgatatggtgattccaccctgctttgagtcctaggagaggtcgaattacagttgctaaaatcttgcttcccttatttcgatctaggggttggttctgagttggcttatttggtttgtttttg

SEQ ID NO: 66404 - DNA, 442 bp, Zea Mays
taggctatccacttctttcttagaaaagggatacttgcccttcgcagcttccgaagtctagccaccttcatcggtgctctttgtagtcatcaataatctgctcagttttggtcccaagggacttagagtggaaaatagcagcggttgggtcattccttatggatttgtgtacaacgcaatgacgaagtagtagcggcttttccttttccttgttcttgtgaatcctcttcttagaaattttagccttttcttctttagagatgtagctttacccgaaggtgacccttcgtcatatttagattagtcatctttcgtatcatcattggcagtcttccttacctttccccactgctttttgtggctctcttcctttttccccaacttcggtgctagttacaggattcctgtaatcagggcattcaaacgctatggcatttataag

SEQ ID NO: 66405 - DNA, 393 bp, Zea Mays
ggaggatcctcgtaaagaccataaagcagcagcgaagcatttgctcaggtatattgcaggcaattgtgaccttggactctcatattctcatagaaagatgacagaagagttgaagctgattggatttaatgacagtgacatagggggcgatgtcgatcgtaggaagagcacctttggcatggtcttcttgctaggttcttgccccatctcttggcagtcgcagaagtagcagattgtagctccacttgtgaggccgagtacattgctggagcagttgcagcctgtcaaagagtctgactgggacggttgctgagtgagatcactggacaggtagtgccgccactggttctcaggatcgacaacaagtcggccattgaattggccaaaaatccc

SEQ ID NO: 66406 - DNA, 677 bp, Zea Mays
gaaacctataaacaaatttgaattcaaattatgaattgagtaggaatatgaaattagaagatagaaatgataaaagaaaaaaaataaagattagaacctagttgggctcgctaccttgttttcagcccgcttgcaacatgccctccagcgcgcggcccagtccctctactcccctgtgggcccagccgcctgttctgcatggccagtgggctcgtgaccgctgactccttggctgtcgtgttttgggctttgacgggtaggctccaacgccagcctttcatgatcgacgctgacttgtgggcccatgtggccagcctctcttgcctcggtcatgcttggctctttgtagggcactgactcgtgggccgctttccagtttggctgccaggtggggcccaatggtcagcatcgtcatcatcctcatgtccgaatggggatcccgcacgctggttacgcaacaactcaccagggatctatgaaattgttggtaagcctaacaaacccgcgcatagaacccggaaccacccctcggccatctgcaagcataaatacagggcccagctaccccctcctcaaccatcatagcacatgtatcaccattgtgtgcggtcaaagacggagagaaagtgatgagaccgtcggggaaaagttctagccaccatcatccaccagcgagg

SEQ ID NO: 66407 - DNA, 362 bp, Zea Mays
ggagtgccggagcttcaccaagaggaggtgagggctctcgaaggcgtcgtagtatgggactaggaggacctcgcccgtgggtctcactcctcaaggtgcttcgtatgttgcccctgcgccctcaagagagggagggggcgtggtcagaagaggggcctcactggattgtttgtgcgccaacaactgagtgaggttttgaagaacggggccttagggcgctttttgaagacagggagcttaggcttatgttgtttaattttcgggaggctggtctaatcccaaaagcagagcttttgtaatccttagaagatttgtattgtcgtggctcgacgaatttaagtgaaacgctgccctcgcccccc

SEQ ID NO: 66408 - DNA, 451 bp, Zea Mays
gtcgtgtgccacgccgcctcgcgctacttcgtcgtcgacacctcgaggattaggattctactccgtgtgtcgttccatctccttccatgcggacgccctagccctcaacaagctcgccacattgctctcctcctctgtcactgcgggtggtgctgggggcagcagtgagcaaattcgggcaggtcacccatgtgccgcatcaaaccacaaccgccctcgcccttggccacgatcttggcttccgacgaatgtgttagggaccgtaggcgacctcataacgagtggagaattcaggcaggtctacctcggcatggacctcgagtccagtgagatcctcgttgtcaaacaggttagtcttacatctcgattctggtgatttgatggatcttgtgttgttttctcgctgtctcagtttatctatgtatctattcattcattccactctaaattg

SEQ ID NO: 66409 - DNA, 408 bp, Zea Mays
agtgtgaagggcaactcagaggctcatgtgtgagggaccgcgtggtggtgaagcaagagcaaggacttggcaccgatgcacataaagcaaaggtgaagagcaagctatgttgagattgatgaaccaagaaggccatgtgataacatggagtggatcatatcattatagtgttatcaagcatgtgctgatttgggctattgatcaagtgacttgatgatgatgatggaggaacttcatgctatggacaaatggtaaaaggtagcatggttggatatacttatggatgaccattgttcatcatttgaggagatggaattgaatgctcaaggcaaaggtataacaataggtttttgttttaccggccaagaggtgcttagaaattgataatttactgggttagtaggctag

SEQ ID NO: 66410 - DNA, 791 bp, Zea Mays
taaggggggaagattagggttccaaaccttgggttgaaattttgggatgttacaaacctaccccacttaaaggaatctcgccctcgagatttagactggatttgagtaaagataagggtattccctcctcaaagagtcctcactcacccaggtagcttcctcttctccttctctgctccactgaactttacagagtttcacttctgagttgcgggtcttccggactgctgagtcaagaatctttactggcttctcacggtactgaagatctttctaaatctgtattgcctcttcttcgatgtgactttctggtacttgcaggcatttgtggagctgggacacgtgaaacacattgtggatatcagacatggattctggtaattcaagacggtatgctgcgggtcccactctgccaatgatgggataggggccaacgaatcgcggtgctagcttccctttcacttggaatcttctgacaccacgcatcggggagaccttgaggtagacgaagtctccttcctcaaatctgagttctcttcgcctgttgtccgcataattcttctgccgactctgagcttcaagtaatcttctgcggatcagggcaactttctcctcagcctctttaacaaaggcaggtccttccaatgccttttaccctacattggaccacatgagaggggtctggcattttcgtccatacaatgattcgaacggtgacatcttgatgctggcctgatggctgttattatacgagaactccgcataaggcaaactggattcccaacttctat

SEQ ID NO: 66411 - DNA, 780 bp, Zea Mays
cccaacggcggcgataccgtcggatgcaccgtcggtggtaggcgtggggggcgcgtccagctctgtcccgccaccaactccggagggtccagaggttattcttaggcgaccactctggtctggcgtcgaacctgaagtaacactgactcccctccctcaggtgctgactcgcgctcaccaggccctccaggaaaccgaggcggctatccggcaggagtgggaggcgctcgagattgagcaccagtgccttggcgactagtgcacccaactggagaagcgcactaaggcgacgtcctgccaattcgcctcagagcgggccgagcttgagcaggagcgtgaggacttcaaggaggacatccggaaggtgtctgactgagaggaggaggtgacccggaaggagagaagcttggtcaagaagaaggaatacttagaccaaaaggaggaggccgtcacagcgctccatgataagctgaaggcttataatacagtgccggagaaacagcgggacaagcaggttgcggctgaggcgaagctacagaagctgtagcaggaacttgccgacaaggccagcgacattgctcgcgccgaggaaaacctcaaggcgagggaagcttccttggcgaaacgggcaactgacctcacctgacaagaggaggacctcgccttcaaggaggagatgtgggcaaggcggaacaagctgctggatgagcttgagctccaggcagaggagaaagggaagcgtttggatgggaaagtgcgggcactggaggagcaggtccg

SEQ ID NO: 66412 - DNA, 382 bp, Zea Mays
catttcgagtgttttcctcctcttttcttggttttatgttttctcttcttctgtgtggtaccgtcgcgggtgtcgatgttctcttcactgtccttttaggccaaggtactctagtctcatgatacgatggaccacgatatccaggaccgtattgaccaatagactccaacataatctttcaacttcttgagtttacgacattcaatgaaatcttgttctcacacagaaaatcagctacatggtcgtcaacaatttgttgtgcttgtgtccctttctttgtgcagtgctcaagggtggcctgagaagttttgtttttatgcctctctgcaactacttcttctggagtcttgcagagcatggcactcactgatttgcttgcctt

SEQ ID NO: 66413 - DNA, 471 bp, Zea Mays
ctaggttgtactcttttttcctttagggttttgtccccatgtagttgaaatggggttttacctaaaggtttttaacgaggcaaccaatctaaatagctctttataaagcatggtgatctattttttgatgtctcatctcatgtatggctgattgtctgattttgtatggctggtggtgtaatactgtaatgcttgtatacttgtatggcaatggcactatggctgattgtctgattgtatggctggtggtgtaatgcttgtatacttgtatggcaatggcactatggctaattgtctgattgtatggctggtggtgtaatgatgtattagtgtattgtatggttgtatattgtggtgacagtaatgctgtattagtgtattgtatggttgtatattgtattcttgattgtcgaacaaatgtattacgtacatatttgctatttgcatggatgttcatgtttgtgatgtggg

SEQ ID NO: 66414 - DNA, 826 bp, Zea Mays
cgcccctctttgtcatcttcaatataatttctgaaagatcactatatacatctctgacatagtttctaacaaatccttcaagtttttcatccaattcttcgccccaaaaggacacacagctttccttatttgattgtagaatctcagcagcctgaaaaaaaggtttaaagccatttttaggagtgcatcagaatgataaaaatgtgcacattacatatccccatacctttgctgccagccatactccaagatcagatatgcaatataagaacattgcatttaatttttttattcttttctctgaattttccaaaggtgaaccatgcagtttccccttcaggatttctaaatgctaagataatgtaaccactgttaattcatgtgtatatcaactcagaacatggtgagagaagttattggaagttatataagaaaatatactaaaaaggtccataaccccatcatgagcataaaacgagataaaaagaaatatggatatgtcagtaaagctattgcatttttttgccaagtataaagccatgagaacattgttgcacatgtataacaaagcaaataatgaataatacagatttgttcatcatcccttcaaggttgaatattaatttgaatttgcttggactaaacacccacgaatatccctaactttataatattacttaccaacagcattatgcctatgatatttaatcatattactagtaatgtgtcgttgtctttcctgttaaaccatttgaagtccaagtcttagttatttttatgtgcattattcatgatatcatatctactacaaaccaggtatataagg

SEQ ID NO: 66415 - DNA, 558 bp, Zea Mays
cgaaataaaattgttttgcgaattacaagggcaagctggccctgaggagtcaaacaaaaaatttgcggagattatcaatgttccaagaatgctctaagtcctcaccggatggcgttgtgagcctgtacgcgctgggggacgccttcgtcttgacgatgaaagggccctcccacttgggctccagcttgccccgggactctgtccgtgctgtccggacgagtacgacgtctccttcgctgaattccctcgggatgactgtgtggtcgcgccatgcttttgtttgagcttggtatttgtttagagcctgtagggcaaagacgcggtctccgtcgatgaggtccttcgaagtgggctcgtccacgtcgaggatggctgacgggactgtccgtggtgacccatgttttatttcttgcggggtcatggcctccgatccatatagagggcggaaaggggtgaatccagtcgccctgcactcagtcgtgttcagtgcccagaccgcttcaggtaacaggtcagcccacttgccctttttgtcgtcgaggagcatcttcttgacgg

SEQ ID NO: 66416 - DNA, 684 bp, Zea Mays
ctcagctatagcatctccagcaattcccatcaaggccttatcgaagcgaactgtgtccggcttatcaagattaacaaagcatccagagccgtccccatctccacagtcagtggcttcttgaaccaatcctgaaattcctgcaaagcaatatcaaaatcagcagcgtcatcgtttgccaagagaccaagcttgcggcagaggacgcgctgggtccgttgcatggcagtcgttcgagggccgttggcaagtctggcgctacgacgtaccgtcgagaggttgaagtcgtgtcactgtttgattcttctagcaggtgctacaggaatagtagactgagtggtcactggtgttgttaccccctccgaaggatgtagcactggtcggtcgagtatggcaggcgagggcttggtgaagatggtgttgagtagatggctttgcgtggtggttgacactgttgcaacatctgctgaaggttcacgcacagcagctgtcgtccgagagaaagcgccgacgttggagtccgtcgcagcctcgtcgttgtagcccgcagcaaccgtgctgcagggagagcctaacatcacatggtcctccgtagactgcaccaaaggcagtagctgcatagcagggcatgttggaagagaatcgagaatacttttaaacgctcgctgcactgggatgagacttacg

SEQ ID NO: 66417 - DNA, 409 bp, Zea Mays
gtgggaatgtagccgcaccctcggggacgaccggggacttcaccgttgttcatgaaggggatccgtggtgttgtagtccggggttgggagcagggtgactccatgccatgagcttcaccactacaaactcacggggtcgatgtcgttggggatctcatgtcgtcacgtcgggtaatacctccctcctaacaatcctattagggctctctttctgccgaaggtcctcaaaacaaaatagctgttttaattcatttaacaagcatactgcaggactaaatgtcgaatgtaaattacggaagcaagggacgcaagggacatgacaaagcttcgataatcattatgatcgtagcttcggctcaagctaatttcgaaggtctcacagcaagccaattcaagagcaggacaaatt

SEQ ID NO: 66418 - DNA, 660 bp, Zea Mays
gcacctttcaatttcttttatttttttccttctctccttgtccattattccccccatatccctgacgctcggagcatgcggcccttgccctcgcatcagtcaccctcatctctacacaagtgtcgcccttgactctctacaccactgcccctccccccgcacccattacaaggctagcctattggtaccctcacttctgccactccactcgacattccatgacctcgaagcgatatcgtgccctgtgtggggctcagccaccaacatccctcaccttcgacgccgtaggtaatcacgtgtgatccatctctccttctgacatgctcacaccaacagatagtcatgtcccttatcatccatcttcatcctctaattttgaggtaccacaaacgacatctaaagagtatattccccttagggaccatcccatatattaggacccagatggttagagaggacgaacaacctataataattaatttatcaaactcgtagttattcactagagctaagttgattagtaacaaacaaacacatacgtgtatatttgttatagctctaatttactctacgcaagctcctaaaacaatatttatagcttggatacttgtagctctaatgtattttagaataaccagaatctaatgaccgttggactaa

SEQ ID NO: 66419 - DNA, 530 bp, Zea Mays
tcagaacgacaaagaagcttcggtaacagaaagtcccgcaaagctgaaaaaacgaagaattatccaagtggccgatgtcattcatcagacaccgccaccgacgtcggcgtcaaaaattgtcactgccgaaaccacagccatcggagccgaaaccaccagagctgaagccaccagagtcgaagccaccggagccgaagctaccgaggcaaccactgaagccgaagccaccggagccgaaaccgggatcaccgaagatcctaatctagaaaccacacttagcgatattgacaatatacttatgagaatgggtaaagaagaagctgctgcggttgcggtgaacacgacaactgaaaaaggaaaagagcagattgaagacactttggaagaagaaaattttaattttcaagatatacttggacaagacttaacagacgctgaaaaagaagagctaaagaaatatgctatatcctgcggatacaaaccagggactctgctatttggtggagtgaatgaagggaagctaagatgcc

SEQ ID NO: 66420 - DNA, 709 bp, Zea Mays
gttgtcctaaacgataattaataggacatcagatggagtactagcggcttacgagaggttgttcgctttggatctgttcaaactaataccactacaatttatagagacaaaacaatgtagaaaaaataaaagctgtttcagattaaatacaaaacactatgcaaacaaaggaagctaaaagctagtaggggtgtcatcatcagctctcgtgatgatttcttgattttggatgggtggttactggttaggctactcgctagggccgtaggggacgtcacctggtggggggagtgggaggtgggtcttatccataaaccatcattgatcaactagatctagtaggtgttgtgtgcatcaagactcagctagtttattgaccggtcacacaagcggagcaggtggtgttgtgtgcaccgtgcgccgtcgtcgtcattcgggcatttgatctccatcttggcatggcatcttcttactgttccagaaaaaagaaaacaaacttcaccttaattgtgtccttgtcaacttgtgaggaaggaggagaagtggagaaccctcggtccaaataccccgtgcaatgtcggccatgcatgcatatgcatgcacgggtcctcctctgtcctctcctccaggctccagctctccagaccaccaacgaggatgaggtccacggccgtcagcgcggctgcgccacgtttctgatactatgtga

SEQ ID NO: 66421 - DNA, 526 bp, Zea Mays
aaagtgtacctcgttttagcatccactagcctccgacttaggtaggttactacatgctcccttccttcggtctcttgcgtcagaacagatcccataactttatcttcagctataatgcataatctgaacagtactcctacctgtggcgcttttaacacgggagtcgacgacaaatactttctaatgagatcaaacgcttcctgttgttctgcccccaggtgaatttggcatcattttaagccgaaggataggagtgaaggcatcaatctgctcagctaggttagaaataaacctccataaataatttaccttgccgaggaacttctgcacttcaagcttataggtcggaggtcccacattccgaatgggtttaattcggtcagggtctatctatataccatgttcatgaatgatgaatcctaagaacttactagccgacactctaaaggcacatttacgtgggttcattttcagaccatatcgacaaattttatcaaaggctttgcacaaatcagctatatgagaa

SEQ ID NO: 66422 - DNA, 791 bp, Zea Mays
accgctttaaggcagtgacacgactcttaagcgttgcttcttcgccttgctcctggtggagcgtgtgggtcgtgtgcccatggtgataggcatgttggggtcggcgaggcatagctcgtcggtggcagtggcaaggaaatcgagggagccgaagatgatgtggctccctggcgtgaaagtcttgccgcacggtgaacattgatgcgtaggccatcagagtgacgagtgtctattgacacgctaatgtcctcctacctaacacgccaactgttgtggttttgggaatcggggacaatgagatttgtgtttggtgttgatgctagcacagaatctcttcgaatggtgaatcgctgagactcaaacgtggggttgagatgaagggtttatactggttcaggatcatgccctagtacattgtagtgctggttgtagtattgctttaggacatgttacatctggtgtgcttgtttgtagatggaagggatcctgcccttttatagctcaagggcagaaccttacagtggagacttgtattctgctagcgagagcatggttcgttgcccttggatggcgtagtccttctgacgtcgttcgtagggtcgtgtgtagccatactcctagcatgacgtactatcccattcattcgtcatacgggtccttgtagcgagtcttccactgacatcttcgtagtggtgcatagtggctccgcgggtcagtcatatggtccagtcgtgcatcatgcagcctcgcccgtcgtcatgagctcgcgtcacttaccgtcgtgcgtaggc

SEQ ID NO: 66423 - DNA, 401 bp, Zea Mays
gataccggtggaaactcaacccagaaaaatgtgtcttcagagtaccagcagggaagttacttggactcattgtcagccaccgaggaattgaagctaacccagaaaaaatcgaggctatcatgagaatggaagcaccacgatcacagaagaaagtgcaaaggcttactggatgcatgacagccttgagcaggttcatatcaaggctaggcgaaaaaggcttgccattctacaaattgctcaagaaggtggacaagttttaatggaccacagaagcacaagaagctctcgatgcattgaagaagttcttgaccacgccacagtgctaaagccaccatgctgagccatgccagatcagccggcagaagatctgctgttatacatctcctgcacgactcacgtgg

SEQ ID NO: 66424 - DNA, 451 bp, Zea Mays
aaaaccaataactccacaatagaagtatcatgtgcccatcctgtcgatgtattaagcacataatgcataaaaaaacacgtactgtgtgtttggtttctcgtactaaagtttagtttatgtcacgtcaaatcgtttgaatatcagtttagttcatgtcacgtcaaatcgtttgaacgcgcgaacgttccagagtccagaccacaggcacaaccaacgaaatggagagagaggaaagaaagacagtcttgtctacgtgagccaccgcctacacccgagattggagaggagaagaaagaaaaaggcggcaacaacgagctcgaggaggcagagctaatgcgtctcggagagtcgggggtcactgtgctagagtccaggtaaggggaggaagaagatgcgctctgttcaatttgcctagaccccatggagctcgaccgcctcgtgcacatcctca

SEQ ID NO: 66425 - DNA, 583 bp, Zea Mays
ctcttaacccctttagcgtctgtttatttcagcttagagattaataatctagattattaagtgaattatagcatctaaattatataatctagtggtatctatttggcaacgacctacgttactggaactcaggttataacgctcacttataccgtgttgaccaaaaaagttgacttctatatctttaagtttgtcaccgaaaaatagaagaaaccggagcgaaaaatctgagccaagccggtccccagcgggaacgagaaattacaccggtttccgtttttaccgtcgagaaatcaaaccctgagcagcaccaaccaaaacactatttcgtaccaaaacactatttcgtacaggatggtggtgcatcttttgtagacccaccatctaggttgtgaggcctgctgcacggattttggtttgcatgcgggttgttacggatttttgtagacccaccatctagataataaaccctcccgagaaaaccgtaaccatatgtactctcgagcacgtacgcgcgcggtaacgtacttttgcgtcctgccgatccgccctcgtgcgcccctataaatctagcgctgcaaac

SEQ ID NO: 66426 - DNA, 483 bp, Zea Mays
tgaacgccacagtagatcgtcgcggtgactcatcccctcttctcggccgccaacgcgatttcttcaacttgggcgacactgctgatggaccctataaatcaatgccccagtgagctccgttaggttgttacgcatccagtgcaccagccctcgcctccgattagccactgtagctcgcgaattccaaacttccctcaaatcgggtttccgcgccaccgtgaacacctcaccgtggccagccctctctaggtcagttcaagcttctttgcttgatgttctagcctcccttgagtcccctgctacttgtagacccatttaattgaactagactaccctagatcaccaagaacatgttggattgttctcggtttttgtcgttgtcgtggacagagagattccgacccggattagtgcaattagttgagggattaaggtcgccagggctggaattaggtgtcagccaagctagagcgccggtcattg

SEQ ID NO: 66427 - DNA, 387 bp, Zea Mays
gttcttcgatcgatttgggggtaatcccaaattggggagctgcggggaacgattggagctgagagttggttcactggatgtacgactacctagcggaacgtgttgaggcttcaatttatagtgctagcgggcggtggccgctaatttgaatgaagatgtgcggcggccggagatagggaagaaccctaggcgcggtgaatacgtgtccagaggcgtggcagttgttccggcgatcaacggtgagcaggggtaagtcgtggcgatgcggtggaaagggtaaacacatggcacaaggccgcagactgcccacgtcgcagtgactagaatcacggtgaccagatctttacttcaccgaagttatctccccgccagcgaacacaaatccca

SEQ ID NO: 66428 - DNA, 572 bp, Zea Mays
cagcaaaaagagaagctttggaatagaacagacaaggccaataattcattttatctaggaaaaatcaccatttaactagcttttgatgaagcaaatgatgataactgcttgacaagaacgaaacaatattggtatccgcctaggatctatcttcaacaacagatagtactgctctcatacgaagaaatcatcagaagtagagaggatacaacaggtctctacaagatcttcatattcctatcacaaattatcatcactagtagtctggtggtcaagacacatgactcttctggctccgaggaccaagaacatgttaatgtctaatttagcttcaagctttatggtgatgtgggatttcatagttatttgtctactcttctcacttctggtagatcggaggtagataatggtaagcatgccaaagggtggaattcagtgtagttcggctacataaaccccaggtatgtgtccatttaggatcgacctttaccatttagcttacaatgtataccaaacttgtcaaaggactatcccgagtcaattcagtgactataagtatttacaattccgag

SEQ ID NO: 66429 - DNA, 884 bp, Zea Mays
ttgctccattttgcctaatcacttgttgctctgcagtccattttctgttattaaaaggacaatgatgtgctattttgtcccatgctagatccagttaattccagtttttagtttgcttcatttttcctaatcacttgttgctctgcggtccattttctgttattaaaaggacaatgatgtgctattttgtcccatgctacatccagttaattccagttttcagtttgctccattttgcttgttaactgaattgcttgttaactgttttgccatgtttctgcttgtttaatataatggattatgcaactagcataatctgtctattatattaagtagctagttgctcctctttaattctccccctcttaccttcatctgttcctgttttcctcttcccttacaacaatcttaccttttgttcatcttttcttctctccttctttagcctcttgtcttgtttaatttaatggattaatgcattatattatgcagttacctccataactatcttctttttatactatacaggtagttaatgcattatattatgctgctacctccataactctcttctttttattctgatcatttttaagtgatgaaattatgtaaagtctgagcttaggaccagttttcagtgatgttttttttcaatctcagcattccacaattttttagtgatgttttttggttaaatctgagcagatctcaatttctcagtgatgttttttggttaaatctgagcagatctcaatttctcagtgatgttttttggttaaatctgagcagatctcaatttctcagtgatgttttttggttcaatctgagcagatctcaatttctcagtgatgttttttggttcaatctgagcagagtacaatttt

SEQ ID NO: 66430 - DNA, 522 bp, Zea Mays
tgttgttctcatgcccaagggtctgaagtaaccaaggtcccctatcattttaggatctggaaatctcatgacaaacttattatcacccacagatctagcagaccatctccacagattcttgcctaacatgttcatgaattccagctcaatctatttttccccaacatttccttggacaactgtgataatagcagtacttgacttttctttgatcatcctattatccactttttcttcaatatagaaaaaaatttgatcctcaacttgtgcagctcaaaatttcggaccaaagttccatggtaagcattttttgcagtcaaacacgacatgatcatcacaaccgtagacatcacaggggaagtagtgtctacaatccttagtaagatggttcttaaaatgacagaaagcacatccgactctatccgagttgaaattgcggataacctcttttttatgtgagactatttgggaccatgttcttccatagggtggagattacctttccaactgccttcacttttt

SEQ ID NO: 66431 - DNA, 1096 bp, Zea Mays
gtcctctgtccctggccccatcagccatctatcaatgcgacagaaaggccacattttttgttttggcattaaagaaacatatttaatttccgcaaataattccatctttagaacaatgatgacgttaatgtatcgttggcagtagcgtggccaatgacgtagtgtggcctcggctcagaggtaggatctgtgtcgtgaacaatcacgtcgaaaacgatctatgacgtgaacgatcatgacgttaatgtatcattggcagtagtgtggccaatgacgttaatgatcatgacgtgaacgatcacgtcgaggtctctcacttggctaaggccagggttagaaatcctgttcaaattccggcgaactccaccaaattttctcattctcgctactaggtggtttcgaaaaccatcgaaatatttcaaagattccgtatgaaatgtttgaaattcaaaaacaaatgggaaaattttaaaaaactagagattctcagaagcccagggatatatttttattcaaaaattcatgtttcggtatcacaaataaatttgatttgttctataatccgttaacccgatcccatacactctccaaccgaacggatgacgacatctttcccttttcactctctctgctcctctccctaataggtgacattgacgaccgatcccatcgcatagccaccgagatccgcttagttttcatcgtttcccagcaatatcttggtgagttcagttggatttgctgagcgtcgaggtttgtcgggaaccgacaagcatagcagcaacctcggtgagatcagctcatttaccaccgggacctgccctttgctgatcggtaatcgcctattttgtgccgagtacttcactttgttgccctaattgagcacgccgccggcttgactcggggtctgcatggccctgatgaagtttggtagcaagttgcgcggggcgtgtagtcaaccgcgtcggtattcatgatcatgctcgacctactcccattcctaggcgccatgacggttcctttatcggttgttcctctgtcggtgaagctcctgctcttccgagtctcgccaacctcggattcttcatcatgtgag

SEQ ID NO: 66432 - DNA, 426 bp, Zea Mays
agaaaaaaaggtttctgagtctgtgtctgtgtctgtgtctgtgtgtgagggctgctagctccatcagctagcggcagtctgtactgctgaactggaacgagattttataatctgattactattgatttctgcaagagtgagagtgatgcaggagtatacagtttgagtttgttcgcagctgatagggtagctagctccagcaggcctggttggtggaggccggacggaggagaagttattgatcgattattaggtgatgggcgagcaagcacacaccaccgacgaccaccagtccagccagcctactgcatcgatggtacatgtacagttgccagtgtcgtctcaaagtcttgcactccctctctctccctacttgctagcagtagcaggcccagccaccgtcgtcgacagctgacagggtccctc

SEQ ID NO: 66433 - DNA, 519 bp, Zea Mays
ggcgtcttccacgcgcgtggcacaacaacctcggtaacgcgcgaagctctaaatgagcattaaatgcccgcagtgatgccatgctacaatgcccctcagtaacgcgcggggcgatttatagagacatgtcacaagccagtctatgccatgcacttggtcagagcacgccttggcctccttgcatttaatgcgggttgagaccttgcttccatgcaaggtttgcaccatgcgcccaacggccacatagcatcaccgggcctatgcctgggttcggagcagagcatgggggcatcatctgccttggagcaccgggagccgttgttgccaactcggaccccatagggggggtctggatccctactcaggagtccagttcgtatatgtcgatgttttggacctaccaggggtctggattacgtacatggggtcttggacccacccatgggggttcagactcgttggtgaagtccttgagcatatcacctccttggacacgtggcaacaccggtgagagcacct

SEQ ID NO: 66434 - DNA, 651 bp, Zea Mays
gttgatatgagtactctattaattctactaagtattggaccagaatatcacacaatccacataggccatgacatcacattattttaggactgaagcaacctagcaatgatatagatgtgttcctagagccattaatggaggacatgcagacactgggaaaatggggacaagatgatggatgtgcccaataaggagtcattcactctaaaagccatcatctttgtcaccatcactgactaccctagtcttttctcgttgtcaaaggggagatcggctgcgtagtttgtcttgacaatacttgccatacttatctcaagggatcttgcaagactatgtacatgaggcacatgcgattcctcatgaaagggcataggtaccaaagagctacaataaataggtacttcgacaacaatgacgagtcacaacttgatgagccggagaagaccaagtacggagaaaaagtgtttgagatggtaagagtacttaggacaatatattgtctaactgatgttactttaatatctcaaatagacatatctaaagcaccaagtaattgtctagcattttcagcatcagtgaaagtaacattaacagcacacaaatgactaagaattttattaaagcgtgcaaaaaactcatctaatgattcac

SEQ ID NO: 66435 - DNA, 512 bp, Zea Mays
gcacaaggcattcaagtttggcggctgcgcgcgcggagacctcatatatgagcatgggattccgtgcagtcacgtacaatcgcgaattgttaatgcgaggacgtatagcgccggctgcggatatggtgcacgtacacgcccggcggcattgccggaccggagaaatacgccggccgcaagtggcaatcgttgatgactagctaattagttcaaacgataggtcttatagtcggtcctaattatagttaacagttgcgttcatactacctgcaaaagacgatactgatgctcttcctcctagccctagtagctactgtagcgtgcattttacaaattgcatggatccctgccactgccatgcatgcatccctattccctacatccatgttgtctccctgcccgcttgcaggcatacagctggtacggttccaccactggcttggctgctcgatcagacaagaagaagacaataatggcgcaatatataaccaagtccgcttccgccgcccggc

SEQ ID NO: 66436 - DNA, 357 bp, Zea Mays
gtttcaacaaaaaagttggagttcaccactaagatcaactatgtggtccaattttttgaagatgtgagtctagcggagagcaaagaagctgccactagagataatctcattggggaagcatatgtcacctttaagggtgatgcctctagctctagcaatgaggatgatggcttaggctatcaaagggtgacattgacatgtgatgttgcccctacctagcacattatctatcaatggtgagagtcattgggttgtttgacgtgggccctacatgtacaccttcatatcttgtgcacctaaaacacacaaagactcaagcaatttatccttgtcagagcacctgagacctaaattgag

SEQ ID NO: 66437 - DNA, 486 bp, Zea Mays
cggagcggaaatgggagcgggagggggaatagtggaagctggagtggtggaggtggtgggtatagcgaaagtagaggatggctcaggagcaacatgagtaggtgaagtgggaggtggagtagaaatagtggtggaaggtgtggagggagtaatggagcgaggtcgagatgcgaggcgacgaactctataggctatctgatcagaagggatctgcagctgtcctccctgctcagcctgctctactgctgctaccgctgcaagtgctgcatgagcggctctgtccatacgacgcttcttcctgccctcctgctgctcaaggtaaaccgtcttccccttgacctgcctgaatgggcgaagagggtcctcgtcgtctcctccccttgatgctgaaacattcttcgtccgcaccatcctgacctgactgttgcacgatagagtgaaaagctaagctgaggtagagagcagtcgataggatctcaaatgaag

SEQ ID NO: 66438 - DNA, 1433 bp, Zea Mays
gacaaataagtattgggttatttagttgtatgccacaagtgacaggtttaaagatatgccaccacaaagtttcttatttggggcatgacactctaaagtgttgagtcttggaaatatggtaatccttcatcatccataaatgtttcctgagccatatccctgcccaggactcaagtacgataacatcaaaggagctgactcgctgagatagccctcatggaaactgcctaatcaagaatcgatcataatcctattttatgaaaacaatgtaaacaatctaagtaaattctttggcatttcgttcctaattgtcgtgtggcggtcacaacgtctatggtgacaccggtcattacatctcttcccacctctacgaacagcttgtcacaagctggatgtcgggggtagagatccttgaccttgaactgctaaagcagctcccaagtggtgtcgtcactaggtaggccacgccactgaacgagaacatgccaggcaccctggcgtagttgggcatgcaacgcatgctccagttcaggcagtagtcgaccatcctgtatgggttgcatgggcagcagagtcgtcaagggtcccacagaacagcttgagcagccccacgttgaagacatcgtggacacgagcgccagctagaagctaaagacgatagaccacatgcctgacatgctccagcacctggaagggaccagcatagtatggcctgagcttacccttggaccgtgtcatgtggggccggacgtttgcacaacgcaggccagaccagcgccaagatggagggcgcggtcacccacataatgagccgaacaagatttgatcggccatatagagtttgttagagtccttagcaaatagataaggatagagttgttagcaaataagataagaaagagagtttttaggagagattttaggaagatttgttagatcaaggtctatgtaagccgcatggcaaaagggatgaaatcaagcagtaattcatatagcttctattccctaccagcaacatagggagccgagaggaaaaacctcaccccacctctaccagcggctacgccctgcgcaacttgggtgcgccgccgccactcccagccacgccataatagaccgagactccagtgattgcgtctgtcgatgagcagacgaacccaccacaaactcaagctcacgatggtggttgtcgcagtatcacttaacatattgttggagctggagaagacactcacgaatctccgtgaggaaggcatcgcaccacctccatttgagttgcccctgcgacgggcagaagaatcgacatcgaggtcggtcgtacaccacctagaagggtgtggtgtgaagcgccatgtggaacaaagtattatagcaatactctgtctaagcaagccagtcaacccaggcacgtggacggttccccaaggcgcaac

SEQ ID NO: 66439 - DNA, 572 bp, Zea Mays
ttcgagaattcgaggagtattttttcatgtattttcttagcacatccaaatccccttaataaagtgtatgctcgaaaaaataggtttatttgaaatgttttatttcagtttaatttaacacaatccaaacaatgttcaaagttttcatgcatggatgctaaagataataggggcctgtgtcgaggaaattttgagtttgtttcttatgccttgagatttagtttcaaaataaaattatctttagcaccaccagaatataggagcacaaagataatcggcaatggattcacatcacaggcaatggacaaatccacacacacgcacaaaaacaataagaaagcaaaatagcaaaagtcccttgctttaggcagagttataaaggtcaaagcaaaatcaatacaattggcaacagattacaatatggcacacggacaagtaaaaaggatatcgttgccgcgcaagatcgatcaacggcgtgaaggggtgagtgcagttatgcacacttcaaaccatacatatcacaaatataaggtgttgtttgattcacatatttgtaacgtaaatgataaccg

SEQ ID NO: 66440 - DNA, 346 bp, Zea Mays
tctgttgtgtcctcgccctctagtggagcgaagcctgagggtggtacttatggctgccctccggagctacaggtgcggagggtgccttcgggagtgtgttgatcgttacactgtctcttactgtgtgcttcgtcttcgccagctccttggtgggtgttgtctgcgagggccttgccctttctctcagctagcagtgctgcctttgccgcttcgtcgacggatggggctgccttcgaactagctcttttgggtgccatcgcgggtggtttgctcgtagcacgaacggtgggcgccaatgtcggaactcgcgctcctgagcaagttgatccaacgggagagtggaagt

SEQ ID NO: 66441 - DNA, 660 bp, Zea Mays
gttcgggcacatagctgttgaaggagcttggactgcgccgccaatgtcctcgactgggcgtcgatcgacttggactgcgcctccaacgctgctgcaacagcagggtcagacgcgccagccatcttcgcgcgacgggtgtagtacggcggcgccgttagaacaggatcgttgacctgataccacttgtcagcgacctagtaggtcaccagtctcttcgtcggagaagaagcagaggaaacgagagaagacagacagagaaggaagaagactagttggtatgagttcgtaattcttccttgccttttctccacatcgttctcgttcttatatgtcttttgtcaagctgattacaaggcccacggcccaattactggatccactcagcaccagaaacgcggacgtttggcttccttcgacgtcggcccatcttctgaaggcttgtttcagcagcctccgttcccgcatcctcctccaattgctgcggctgtgctgatgtcctgacagactgggctgggggactcaagcggcgatcagatcagatggcaacaatgcatgcacgttcgggacgacggcctaacaacgatggaaacagcggctgcgcgttcggcaagaaaacatgcaccattgctgagtaagatgctaaatttagatatactgttg

SEQ ID NO: 66442 - DNA, 550 bp, Zea Mays
aagaggaagttgttgatggagattagtttcctgaacatgtgttggctcatagtttactcatcttgtgtggttcaacaagcaggactcaaactcaaaggaaagcactaaataagtttagaaaaaagagatataagcaacaatactttcccttaaagatgttagcttgcgctaaatgatagatccaaaaaagaagaatgaagagaagcgggtgagagagagaattgtggacgggtacaagtgtatcgttcaaaaagaagaggggagagaaagaattgtgggcgggtgcaagtgcaacatacaaaaagcatgctaccagctaagcctcccatctataatttttttatctaagaattagcatcaacctctatataccggaagcatgctataaactttatacagcccaaagaataccccaaatacacacaagtctggtattttatttaatgtccctaattatcaaccatttattgattagtgataaataatgaacaaccactaagattatgtcaaattacaatttagaggactcagaatttagcagctaacaaat

SEQ ID NO: 66443 - DNA, 797 bp, Zea Mays
cagtatatccaccagacccacctaacacgtactaccagtatataatcgcacattttatataatgacacattctttttccccggaaaaaaaaacgcagatgcgacagaaacagtactgttcttcgcatgacacgaggatgacggagaatttaatcggcctgcgcgcccccatcaaatccgtggtccgcatagtgtgtggtgtacgtgttcatgtttgcgaggtccccgggtgtccggatacagctaggaaatgtatcgatcatccacaacagtaaacgacaaaatttccgatggtcaaaattgtggtacataagccttaagctatcgaaaatagtttatttccaacaatcaaatggttatgtccgacaacatctgtccctcggttgtaacggatcgtaaataaggttatttttgacggtggtcgtcgaaaatagcttatgaccaactatcgcaaagggtcatcgacatttaacttagataacgaccataacgaccgatggtggggccgcggtccttatgtcagacggcccactgctaagccgtcggacataaactctattatgtttgacgacccacttttaatccgtcggacgtaagctgaatttgcgtctgatgattttattaagccgtcagacataaggttattcagcaggggcaaaagaaaccatatttttataaatttatgacatttacagaaaaaacacagattacatatatatacacagatttcttatacaatcacgtattcacattcacaaacatcaattcacataagcattcacattcttgtgtccgatg

SEQ ID NO: 66444 - DNA, 609 bp, Zea Mays
cggtgagggcctatagtaggcattaggccagagtagacatgtgccccgtttgtaaaccccttaggcggcggagaataaagcaaactttcataagtctctcttagagcttagcgcgggatattggcaagaaaggctcatcatagtcaagtgacgatggtcaccccgcgcatcccgttatcaacaaatgccgctcgaatggcaaattgtcttttagccccaggattattttaaaaaacgctcttgaggcactattaaacacagatgttcacgagaagctagatgaggtgctaggataaaggacgacccccttcttttcccacaaccatcacaaaggtgcgggtccacattgactcccccaggcagggtgctacggagcagggaagcacctagctttcaggcaaaaggctccgtgaccttctccatgccagcgaaatctgaatcactccaggcatcgtagtagattttgcttaggtcctccagctcaatcccccttcatagtgagacgttacgacgacaaaggtctagcagatcctttagcggaaggattccttctcaagttcttagaaccagcaagtgaggcccttaaggcaggagacgagcaatttagac

SEQ ID NO: 66445 - DNA, 575 bp, Zea Mays
ggacaggtcagagctggtgatagaatctgcaggaagtagtcctaggtgtcgaagagcacgaccatacaggacgtcaaacggagacattcccaaagaagagtgagggcaagtattgtaccagaactcagcttgtggcaaccaggcactccacttggtcgaacatgagtggacaaaactgcggagaaaggtttcgagacattggttgacgtgctctatttgcccatcactttgaggatgatatgtcgtgctcatttgaagttgtgtacctaaaaggtggaacagttcctgccagagagcgcttgtaaaaatcttgtctctgtctgacacgagtgccttgggtaacccgtgcagcttgtacacgcgagagatgaaggcatgtgccaccttaagtgtcatgaagggatgaagcagactgataaaatgggcatgcttgttgaaggtgtccaccaccacaagaacacaatcagcatgaccagaacgcggaagaccctcaatgaaatccagagaaaccacctgtcatgcgtgttcaggtactggtaagggttggaggaggcctgggtatttggcccgatcgg

SEQ ID NO: 66446 - DNA, 667 bp, Zea Mays
gtcaaatgtagaaaatgatacggtaggatgggattttatccgtcggttttcaaccattaggagtaccagtacagtaccatggctcatggctgacgtgggacaccaaatttgctgctagtagggatgacaccggtaggggatttggatcgggtagaacaaaaactcatcaacgaacaaaccgttaggtgacacctgttcaaactcgtccgtaatcaattggacatgcacttaaatctatcgagtttcggatggcttttgacacccttggacacccgcgtatgagatttaaaatctatattcgcttgattggttggcggcagcctaacctcctggctcacgagggcctgcatctgttcaaacgcgcgtgtctcgcttgtccgcccatgcagctaaatgcgtggttttagacctgatctgcacccgtgtatacatgctcgagcgatgaggtacattttaccaatcaagcgcacatccatagtcaacgtatccggcggttctcgatgtgatcgaccgagcaaccaatcagccgctatgtgaagccgttagtttgcgaatcaggtacggggtcacacccacgagtgaaaatatgtaccaaacctgtacgttaaattgtatgtccaccccacatggctaaaacaaatagatttatttcaaacttcaaccgaat

SEQ ID NO: 66447 - DNA, 818 bp, Zea Mays
aaaaatcaaactatctcgtgggtcgatttcagcttctggctcacttacatcgccagctcggcccagcggcttgcgtcagccttcctcgcagcgtcgtgcccgatctccctgtttctcactgaccactcgggcccgctctccagtcatccctcgcggcgcgcgtgggttccttttgtcgctgacatcacgggcccattccccatcctcatccaaccgctcaggcatgcgcgtgtgggtttagggtctatggaccgggggacttgcccggtcagtcttcctcgccgtggccacccatggctataacagtcgccgaaaatgtcgcgcgcccaagctggcaaaacggtctcaactgtctggcctaccttcgcgcgagcttataaaacctcagggcacaactttcgttcggatctgggtgtattgcgttggctggccatcgtccggtgagagaaggcattgagagagcgaagcgagagagagaaaggaagaaccaccgtagttgtgccaccgccgttcaagccccggtggtgaagagtaaagcaccgcccatgctagtggaggtcgaccgcggcatcgctcgattttgtgatgactcgatgtcgccgcaatttctcaccggaatccggaatcagccgagggttcgcgccacattggaccgacccttttcccatcgccattcgccggtgagatacctcctatctagtttgtcgtgctcttctctctctatttcgcggggtcatgcatgatttagatcactgcggcgaggtatgggcgtaatcacgacgagctagtcgacgggtggcacgcggcactgccgtgtg

SEQ ID NO: 66448 - DNA, 471 bp, Zea Mays
gggctggtcgcctggaagagggcgattaggaggacgacgcgattagggtttctagtcgtccgactagtcgtggacctgggcgattagtcgtctggtcaaacgcttcctggtcgttttttgtcgttgcaattttggtactgagcttcactctggtttttggcccatcgaaggcatatgttgtgcagcttcaggttggggagagaaattggtcgaattttgcagcagtaagtattgttgttcttgttcacttgtttgagtggttgtatgggtcagtcctttatttgctgaatctgatgtcttgcaattgtgcattttcagatccatacaaaaaagagcaaccgactagaacaccagaggcttaataaattggtctatatcagttacaacaagaagatggaaaataggtttcaaacactaagagagctgggattcaaaggaaaaagaagcaacccactagtgcttgaagagttc

SEQ ID NO: 66449 - DNA, 854 bp, Zea Mays
tagtggtcaccctgagttaagtaagcgtgagcatgtcacaccaccttaagtcgtcgccgacttaagtcgattgctctgttagtagggtatagtggtcaccctgagtcgagtaagcatgcaggttgacagtaaacagtttgagtgcctttgagaatgaagtctttttattgatgatgtattttccaatttacagaatacaaggccgtccccatagcttttgaaatctagctaggggtaaaacttcctgagatgttctatattccatgagttcccaattttcgtgtcgtccatttgagtaagacgatatgatccaggccgagtgacttctgctactatgaatgacccttcccataacggtgacaatttgtgtcgtccctcccccgttagaattcggtggaggacgagatctcccactgcgaaggatcgatgtcgtatggccttatcatgatagcgcctcagagtttgctgataccgggctgactgaatcaccgtattcaatcgttcttcttctagtatatcaacatcctccagtctagtagcttcagcttctgctatgttttcgaatattaatctcggtgccccaaacttgagatcagcgggtagcactgcctccgaaccatagaccataaagaaaggagtgtttccatgcagagctcagctaggttgagttctcaggctccagacaacatatggcaactctctgatccactttcctgcgaacttttcattcttgtcgaagactttctttctaagcgctaccaatattatctcgttggctctttctacttgcccgttggctcttgggtgcgccaccgaggcatatttgatctgaatgcttttttgttcacagaaat

SEQ ID NO: 66450 - DNA, 2669 bp, Zea Mays
tggtcaatgtgtatggtgtttgccattgtaggtggaggtgggtgaagaggaggctctggtatgctcaggttcactggtcgcagaagcagttcggtgtgagttgcgctccatgatgcttgaccatgggtggaggtgtctgggagagaatatttacgtggactcgaagtttgatcagaatgatgggaggactgatctgtgcgctgtgaacgtggtacaatgtttgtggcatttttgcccctttttatgcattcattgttgcatgttaatttctgtgcaaagaaatgtcatgtggctgctccagaattggaaatgagcattcaaatctggatgttggggtgttcagtcgaattggttggtgaagtaaaatgggttagaaatggttagttatgcagcgtgcatgattttaacactgaaccgcatgcaacagttgcacaatcacagtttagtttgtgctccaacacatttggttagctcaatgtgcctaaagcttgagctaatgaacttatagtaaagtaacataggctgttcagaaatatcaatagtcactgaagttcaaaatctcagcaatcatatcatttggatttgattattagattaatccctagaactcaatagttctcttcataactatgtgtacactctgactcacaaaataaataacactatgcgtgcactctggtgcctagtcatgatcctgatcctgaagttgccatccaattccagttgagcattgacatgcggatgctctaatcttctcttgcgaagcaattgcgatgctgtgatgctcgatagatatataaaaggcatttgtggttcagatacaaaggtttcttaatgtttttagtggaaaaatagttttagaaatatgagtctagaaggaaaatgaaatgcctccaatggaggtcacatagccttcacttgtttgttgcattcctctttggatagactacttctaccttctgttactctctactatgaagtataagcttttgatgttatatttctggatgttacattgattagttattatatttgtggtgggactgctgcaggaagttcgattagggagaaatgatgattttgaatttattgtctcacctgatgcatttcggtacactatgcataaggtatccttgaattcccatttcccacttctttctgcagaaaagaaaatagtttctgttaacaagttctgtatttctgttgttgctagaattctgatgttgctagttccagtatggtggaaacatttcatcacagcaatgaagtagttttggatacctctaacattctaacatcatgtacaactctgcctgcacttcaggagggccgtgtgattggtaatttggaattttcattttgattacaatgcagtaattcatttcaaaatgattttcccttcttttgcaggatatagcaagatgctcccctcagaacagtgcttgggcaggtttatggagctttgtttattaaaggtgacatatgatgttccttgctttctctttgtttttattccataacatgattttttaggagtaggttctccgtatgacctttttctcaaacagatctttcatatgaccttttttatttcatgatttgtgtttgcagcatgggttagatacaaactgcaattatcatgtagcagtcaaactcacttatggagcttcatgggaaacaaaatggttattgcctccttagtatcctctacatatattatgttgcactgatgatattggtatacagaacattttcacttctcacatctatttcaatatgcttttgatttgctctcttttatttaattaagtaggtggccttcttcattagttctccaaggtccagggcttcaaccagccttaaaatctataagagtatctaaggcaatgtctgccttgcaatcctttgtagaattattgaaaggtatggatgcgctgttgccactttttatgaaaatctgaactcttatctgtcttcgtgatctggttatttagatttgtgtacactgacaaattgacatacgaacttttgctgagtatatatctttatgtattaatggttctgggaaatatttttgtacatgctgtaatgatatcttattagatgctaagtaaactttctccttgtttcagcttggagtttctttggccataatagtctaaccattaaggtatggtttgagcaatcaggctttttgtaactcattctgtcagattgaattatttttcctgaacatacgactccctttgtttaaaatgataagtcgttttgggttttctagatacatagtttttgttatgcacctagatacttacaattcaatacatagtaaaatctatgtatctagaaaagccaaatcgacttagaatttggaacagagagagtattaaatgggaattgaacatacttacatgtatttttgctactatgaatggctatccttgtcgtcttaaacattagttctcttgttgaattatgatagcttatttctctctgttttgttatgtgtagtgagtataacagatatatgttgtctctgttgttgtttaaattattctgttacaggaacaggttctactgaactgctcatcaactttacctgcttgggataaggctgcaagtgacctgccaccacacagttcaagaactgttaatactgagaatcttga

SEQ ID NO: 66451 - DNA, 574 bp, Zea Mays
gccaaagtgatacgtgttgtctaatcgaaattgctcgttgttggatcaacgggccagaacccatcgcccacccccaaccgactttgggcagcgccgccaagcccccgtggtggaggccatcatcggcgagtgcgaaactttgcctaggcttgcaacccttgaacctgacgtgatctacgtgatggcgaacacttagcaagaaatctcaccattgtcggcgttgtggtgaggccgacccgcagtgtggagcggatccacgacacccatggtacgacggcgagaaattcatcgacacccactcaatcacgcgcccgtaatcattcgcacgccccttcgttggatcttggtgaagttccttgtgtaaccgtcgcggcccgcacggcggtgaagattaccagcgacagctccccctttatcttctctctatctcacgatgaggcgtatactttggccaacctaaggattaacaacgcggcgccctcgaatttataggcagggacgacccaggaggtgctcagctggccggatcgagcgaacctaacgcgcttctaccaatggaattctgttattccgc

SEQ ID NO: 66452 - DNA, 522 bp, Zea Mays
ccgaaccctttggccttgctctctcgcacgcctcgcaccctcgcaaaggcctgaacgccgatgatcgctagagaaccgagcccagcgccgcccgcaatctcgctcgagtctcggccaccgtggtgaccaccccatcccctctctacccaatcaagcttcactgttggcttcccaaagaccagtgaagcttcccaaactctctgaccgaacactacctcgtcggagaaaccgaatcacctcatcagacttcatccacccgccgatgcacgtggtctaggtaatccagcgaacaattctttgattccttgcacacacccatttcctatcacccagtgaagcttcacgtacggtttgatttaactctatcgtcgtgatctggcccgccgatgagcaccaccaccaaaactcgtggccaggacacctccggttacctccgatgccaattcgcacatcgacgtgaccgccagagactccccgatctcacccaacccttcgccggagctctatcatcgctagtaagtt

SEQ ID NO: 66453 - DNA, 765 bp, Zea Mays
cggtgacgcgagtcggacttcctctgctgcctccgtccactctgtcgtcgtccacaacgccgccgcagtcatccccagtcctccctccctcgacgcggtctcgactgctccctcctccacagacgacgtggtctagggtttgtgctctcatctgcgttctccctacgttcttcctctactcacacatgctctgtcatctcctctgctctctttcaagttccgctcggtactagcagtgaggtattataatcagcctcctccaagatctgcctcctccaatccagggatattaactatgcttccctctactagcgtcacatgccaagattattataaattcctgctacgatccagcaatttttaatagcagtgttgtggccgagttaatacatacaatccacggtaaaattaatctagagatattttgtaataaaaagtcacatgccaagatcaataggtttagtactagcagtgaggcggcacagataagttagatcggttatttcttgttttcctccttaactatgctttattcttgtatgtatgcaatctgaatttattttgttgattctttatgctttgatgtgaaagctgaaatgggcgcaaataattatatggtttgatactctgaatttgattgtgtgtgagccaagacacgggatagataggatatacattttccacatgttctatatggattataatctggccagctttatttttctcccttgtattttttcctaggagacgaccgcgtaatccttt

SEQ ID NO: 66454 - DNA, 1155 bp, Zea Mays
ccagcggcgtagacaaatagcaatggaggcgacttccacatccctctctgcgtgcttggtaatggcagttgtttcctctctcatggcggcaacacactcccttccatgaggcatcggtgccatgcaagatggaggtggtggccatggggatcgagacttatactcgaagccaaggacacaggacagataaggtttagctggcagccacgagtttgttgggattttgctgatggttgttgtgatacgacgctgttacgtggaggcagacgaatctgactaacggggcccgcctggcattgtcagcatacgcgggcacaggaaggttacgccgccgcacgcggtccccatgtgtaacatcccaattttcaactatggaataaagcttatttaaaattattgattgctatgttagcttaatccaaactatgcaaaccaagacctctatcggttattcctcgatattcttctaaattatagcctaagcttgtctttcacagtggtaaattattgaaaacgtctgatgcccgcccgccataacgcatgctagacagagggagcccacaaccacctgtggcaaaacacatgcgtaaacaaatcataagactgcctctagccgcctcagcatttgtgcatcctggcaagccccacctacaccctctgccctgagacaaccttgtcgtgcacgccgagctgctatattaaagtgttgggttgcagatcttgaagtgatacctcagtgcagaaagccactccggcaagacctcatgcacccgcctgagcacacaccagtcacttgtcacagtcacaactaaatgaatgccccaccatgagccaagttaccctgccaacctcgggatgttgcgactgcactgtggcaacgtcgccactcatagtacgtcggtcaagactccctccattataaattgtcgttcctccgcctataaatattgatgcccttgccgcggaacctcacagtccagccaccatatcattgtcaccccacatccgaacaacgcgtgccttactcttcaaaccagagaacaagccatcaccgtcgatttgaatcgtaggtgagcatgccataatcttcgacctctccctccatcgaagtcattcttaaactatagaagttatgcccttaccatcgattaagac

SEQ ID NO: 66455 - DNA, 886 bp, Zea Mays
gctggattgagatgagccttggcccattaagcccaatagtgtgatgatggtttctaccttgcaaactatcagctattagatatcattaaattgatgtctattcttatttttcgtattggagagaagaagaaataaataattattaagagaaagaggaaaagggcagtggccattgggccactataaggtccatacgaatcgagcagcccatcagtccaaccaatcgcccttatccttatcctcttctttctgcttggtctcatatgtaagggtaacaagttgcagctcctagtggcggcggcgacagcaatgcctctccaccctaggcagcatgccttccacacgacatgggcagacgcaatgaccgaggctactactccactctttcaaatacggtcatgtatctcttttccatggatgtgcaacgcatacaaactcatatgctctccctgattcactattccagtcaagaaaacaatcggtctgttcaatttcggggggcgttggtcctcatcaccttccttttccatcatgtggtggtgtcattcattgatctggtgccctgtattgctgtagattaagagggtgacagtgtatttgcgtgtggcgtctgctagtgatgtttggaggtcgtgcatatactagcgtggagttgtttcttgtgatatttctactactcgcgcaaactgacaaactagtgatcgtgtgtgtgcttgtgtggtactgcacgatttttctggttggcatagatcgtggcctgattcttgggatcttcgatgcataatattccgttgttcctctttggattgttgtcgtggacgtctccctcggctctagcagctgctttgtatctccatcaatctcctaccgattaggctcagacgtg

SEQ ID NO: 66456 - DNA, 558 bp, Zea Mays
ccttgttccgccgagacgtggagtgtgacgacggctagagcaatcgccagggatgcaactcagccagatgtcttgcatctcttctctcgcggtccatgacctgcactggcattgtagaatcggtgtgtggtgtgcccatccatgccttagggcccgctagttggaccttggaagtgagccaccatgctacaaggacccttgagaaccatttcggacctgtgtccacccaggcatccatgcctacgacttgtcgggcctggagtagctgagtctctagacgatgttcctttgaaacaaacagtcgtcgctggccatctagatcaatcatgcaaatggtgtcatctgcaggcttgcatgcgaagattgtgagacggtagcttcccggaaacatcccattccaacaattttgcactactagtagaaactactaccatgtcagttgagcagtgactgctggtactctcgaatggtcacctcggggaatacatgaaacaaaattgtgttatatacccacgagaaatgattgcacaagtaatattttagatatgtccgtagctg

SEQ ID NO: 66457 - DNA, 441 bp, Zea Mays
acttcgtcatattcgggctcaagcctctcttgaaactagcgatcttcttggcctcgatgtccacatagtcaggctcatagcgtgacagattgttgaaagcatgaagatactccgttgctgattgtgtgccttgagttaacttcatgaattctaacaccttcatttccattaagtcgggtggaatgtaattccctctgaaagctacggtgaattggtaccaagcaatgggagcattttcagggtaagtggtgcagtagtgagaccaccacatccctgcaggtccatgcaattggtgcgctgcatactctgtcttgagatcatctaaaagtctcaatagacagaacttttgttccatcgtgttgatccattcatctgcctccatgggttctgctgcttccttgaatatcggcggcctggtatccatgaaatccttgaagttgc

SEQ ID NO: 66458 - DNA, 514 bp, Zea Mays
attgctttgagtggaattggggacttggagagattttgattcactctaattgtgtcttgtattgaatgcactagctcttgtattgaatgtgttggttgaaaacttggatgccttgaagttagggatgtaaacggtacggataatatctgtctgtatccgtgtccgaagagagcaaataatgatttggatattttttttggatattcgaacgttttttctgaatatcgaatatggattcagatacttgcttcagatatcgaatacgaatacaatataggctatattcgtcggatatcaggtattcgacaagagtatcgaatatatccgaataggtattcgatttaatatccgatttggctctgctggcaaacaccgaagtaccaaaccacggcccacttggccttcctatggccatccaccaggtgtccaggagtcctaaccctaccgcgctagctcctgttcgcctgttcggttgtttccgcttgcgctcggtggcaccaccgctgcctctccg

SEQ ID NO: 66459 - DNA, 425 bp, Zea Mays
ctagaaattcagaaccctaactgattctaagcacacacggactgtccgtgttgccaccgcggaccgtccatatgcacccctgccttttggtggaggttggcgaaccaaaagcatatgcacctgccaacacaatttgggaaacaatagatttcacaagtcattttgttcccgaaataagaactaagcctgatacaagccaccggattttcaatccaataaggtgattattattcaataaaggtctaatgcataaaggtcgtttcagactgcatctttctcggtcgtgaccatctgatcaatggatcacaaggtatagaatggaggtgccctcagtctaaataggcaaagggactatgtatgtaccatgggtttatcgtcgtaccattccacatttgaacaggataatatattgacgatgagtaggc

SEQ ID NO: 66460 - DNA, 538 bp, Zea Mays
tggtagtaagggcactggtggtgaggggagagagttttagtggataggagctcgaagtggagggagcagggcatgctgggggggttaggctttataggtgcacaccattgattggaggggagagggcgttgacatgagcagtgcaaccgtttgtcattttaatgctaggtggacatgctcaggttaatgatgcggccatgcgggcatcaagggaggaaagaggtgaaatggttgtagtgaatgtcgttcttgtccactgtcgtatgacgagcttaggggcaatgttcggggtgtgcagaggttggatcagttgagggatgtccgttaaggaataacgaacatggtcgagaggttcgggatgacacatggggcccacatgttagagagagagcacgtacaggagagcggctaacaggccagtcccgcccatcagcgagagcgggcgtgggtgagtgcactgacgggccagtcacactagtctatgtgcgagggtgcaagcgcgagctaggacaaaagcctatgtgtcgcccggttacac

SEQ ID NO: 66461 - DNA, 1684 bp, Zea Mays
taattgttttggctctggaataaaaagaaaaggaaaaaccggggaatagtactgggccagaagcagcccatacgacccagccactcagagaaacggggcgcgcccgcgttggcagtcttgcagaagagccctcacggtttttgaataacccgaagaagtccaaacactattgaacccagtcgctgacactttgcaaaaatgtccctagacttctgtctcttctccaaagacctccctggtcacggcacgctcgccgttcatcccggacgaggtctgtaccggctatggccggcgataactgcccggactaaccatcggggaggcttcactgacctaagatggcttcggaacacacatcaatttgacccgaacgcactgagaatggcatgtccacatgcacggcggaaaccgcggtgtcgattccgtgttcttaattatctacgcccgaattggtcaaacggatgctacggtgagctttacgtgcctacatagctgctagaacaacacttgagagatgcagagctttaccagagtggtctggccacggacgagctgttcttggcggcgcggcggactgaattgggggaaaacggcgtcgcggcggctctgggtgaaattgggggtggagattgaggcaaaacggccgtaagaagctgtgctttcaccgtgcacaatcgatttgggagaaggtggagggggcggtgtgaatttgacttcgatcaagtcactgtgtttgcgatgatcacacctcgccgtgaacccaatggctatttatagccgtggcggtccggcgatcacttcgcggccacggacagcatcactagcgcatgccgaccacgtcggtagaaggtacagtgtgggagaactacgacatgagcgccaccgcggcggaattcactggtctcagtggccgccggtgaagtctccggctagacttggggaacggtgccacgtatgcgccgtttaactccgactctatccatttcctatcgcgcgtgaatccgaacggcggcggcatgaattttggcgcagagagggcgctggcggtctgatccgatgttgttactgtaccatggaatgctccatcagtgcttctgacaggggaatttacagagccaataacttccaattttgtgtagtaacatgatcgacactctttaacaaagttatagtcctaagatccggctacaatattgttatagcaatcctaaacaaattattactcgatcatgcccaaattcatgcccaaagtcactgcagtggcactgtcagtctgaaattcagacctcaacagcctgacaacctgactttaggtttaattatctccaaattcttcataagaacatggcttgttctcttaagcaaacttgttatccattaataggtctataagtttgatgtggtgccccagggcaaaaactctatagtttgaaagttacaaggctccaaagttaagctcaccaatctgaaattcagacttaggctgaaatcacaactaggggcctttttgcaaatgaatccaaatcttagggtttggcttccaaattcacacctaagtgaaccaagtgacttaagatactttataaacttggtttttgcactttagtccaaatgtgcatcaattttgcacataagtccctagggtttggttttagggttttccagggttctaatatgggtttta

SEQ ID NO: 66462 - DNA, 584 bp, Zea Mays
catcatagataagcttgtgcgtctcaaggtacctggcctttgcctcatggaggacctcgctgacgtagtagaccggcttctggatggttcggacccctgtggtcgatcccgggtcctcaacctccaggccttccatcaacatcgtggtggtcggaccaccaccttctcctaggggaacttcttgactcccttggggatgttgtgccgtccttttggcgaccaacaccatgctcaccacctctaaagccgctgcaatgtataagtacaacggttcccccggctccggagctaccagtattggcagggacacaaggtgctgctttaactcttgaaaggctcgttctgcctcttcggtccaagagaatggaccggacttccgcaatagcctgaagaagggtagcaccctctcagccagtcttgagatgaagcggctaagggcggccagtgaccccgtaagcttctggacgtccttgatgcgggccggaggtctcattgcctcaattgcctttatcttctctgggtttgcttcgatgccccagtgtgaaaccaggaatcccagcaacttccctgcggagacaccaaag

SEQ ID NO: 66463 - DNA, 663 bp, Zea Mays
gtggaagtggagctgagaagctacatagtggaatcctagctaagttttggcttgacggtagggctccggcctcctggtcctcgtcagtgctcctcctcttgtttgtccttgtggatgtgtgtctcagtgagctcgactccatttgcaatatcatctggctacctccagaagtgtcaccttgtctgaggccaacccctcccttttatagaccaagagaggggtcgatcagaggtggcttccttaggaaggggccataaggcaagggtaaatccaatgttctacccggggtaaagccacgcgtattcatggggcccgagatcgcctagttgtctcgtatttactgtggcggacagagcggggttgcaagggctcgaggcaccatcatttaggctacgccgacgcctagccttcataacctggggctcgacgcgacccatcattttgcatgctgccagaggtctatgcacccagacctaatcttgtaggccatgagtgcgccttaggccgaggggcgcgcagaccataaatgtgccatagtctgggggactcatcggtcatgagtgctatgcggcctgaggggttcgtaggtcatgagtgggaagtggaccgacgctcatgctatggctcggtgttaggggtggtaaatgcgggcaattattttcg

SEQ ID NO: 66464 - DNA, 337 bp, Zea Mays
tccttcgcatgcgtttgcacatgcatggtctttgtctttaagtatttttcacaggtgatctaaattgcacttcttgtcctcctacaccacctccgcttaagattttaaagacattttctactgatcaacagaaggagttgcttgctgcttatgataatcttctatcgtcctacgagactcattaccgtgcctacaagttctggttggatgaggatgcacgtgcttgtgctattcttgctgctatggaggatccacttgttgctgatattgttgagtttgagtttgcacatcagatgtgggctttctgtcacacccggatttaaggacaaatgtcaca

SEQ ID NO: 66465 - DNA, 306 bp, Zea Mays
attggatgtagatagggatgcttgtcctatcaagcaagggaaaacaagatatcgaccggagctccttgcacaaattgaagctgaggttgataaaaatagctgcagatttcattagggaagtaaaataccctaagtgggtttctagcattgtgcctgtgcaaaagaaaaatgggcaaattcgtatatgtgtagattttagagatttgaataaagcgtgcccaaaagatgattttctgattccaatttctgagatcctcatagatgtcaccatggcatatgaaatattttctttcatggatggtttct

SEQ ID NO: 66466 - DNA, 421 bp, Zea Mays
ggacataatgtggccatccaacgtttcctcttttactgtagtgcagtgaactaccactatgcggcataggcgtcactatgtctggtcagtgggggaggaagaaaagcttctggccgtcgatcgtgtattgaacgactgagaatagatctggggtgtattcgccttttaaaattggagtcatgggtgttgggctggatgtttatgattagatcgggtaaaataccgattcagcatttgatcagggccgcacgtgttagattgggcagtgctagtcaagcgcacgtttctagcggtggcatactttgtaaataacccctcagtcttcgcaaaactatcctgcaaaccagaatagtgtaaaagtcattatgcataagtcctagtttttatgacttagaccctgggtttaatttttttattgccc

SEQ ID NO: 66467 - DNA, 959 bp, Zea Mays
gtgggttccgaggtccagttaagcatcctccctttttctttttctttttatgtttctatttttcctattttgtcttattttgaattccaaattcaaacttcaatttaaattcaaactttgtggcacttttgtacactgaataattatttagtttgatcatacctactgcgatgaagttattaaattatacttttatttattgaataaaattcctttctctcctctattttcatggttttatttccaagttagactttgaattctatggatccattgatatgctattaatgatacatttattttattaagcacaaatgcacaatcaaataaaaactcagcatgatgcacagattaattatgtgttcattgttctattcatccacttttaactagtgttgggcacatgcaataattagtagaggccacaaaccattgagattatctctattctctttattacacttttgagtattacaaatcctacccccttaaaaataatctcgtcctcgagatttaagaagaatgagggaaaagatggggaaaatctatgcgaagttcttcttctctttcccaggttgcttcatcttccccatggtgactccattgcactttgcacatctttatcaccttatttctcgtaactcgagtcaaagtatccaaaatcctgataggatactccatgtaaaccaaaccaccctgaacactgagttcctccacgggtagctgttactgagagacacgtagacatttcttaagttgagacacgtaaattacattatacacatcagatatattatcaggtagctcgagttgatagaccatctctccaacttgtctaaaaacctctaaaggggcctataaagtgagggaacaatttgcccttaactttaaatctcctcattccacgaagtggtgacaccttgaggtacacataatctccttgctcaaattccagtggc

SEQ ID NO: 66468 - DNA, 804 bp, Zea Mays
ataaaacaactcagaagggatctcctccctctcaacctggatcaaatagagtcttcaggttcttggcacctgcaagggaccagttctgctgctcttccctgaaaccctcgacctgattagcaaggcaaggactaactccgtcaaagacatatttgtttctatgtttctagaggctccaagcccctagaatgacagcgctgtcgttgaagccctttttcttgcctttgggaattaaggacgaaaaaccaatacgggagagaatagagtgccaaaattgccttgcaaacaaactgctggagatgatatgctgcacggtttcctcttcttgatcacaaagcacgcaacacttcgggaagtcaagcccgcttttttcatcatgtctgcagtccaacacttgtttgttattgatagctagccaaatgaaaaacttgcatttaggggtcgcccaactcttccaaaccatcttccaaggctcaaacactacaatagccatgtagaaagctctgcaagccgacttagatgtaaacaacccagaattggagaacctccaaacatgtttgtaagtgagtaattacacggggagaaccccaaaccctaaaccctaacaccccccgcagtcacaattctatcctgtacaaatgtcgagactagaccgaaagtctaaaaatacactcgatggtaacccctttgtgaagatgtcggcgaactgcagcgtggtgaggacgctgagaacccgaacgtcactggaagtgacacgctcgcggacgaagtgtaggccgatctccacatgcttcatgcgctgat

SEQ ID NO: 66469 - DNA, 524 bp, Zea Mays
gttttgcaggatcacaccttcaatggattaagttgggtgctcgatattgaatgtataaatcatatttggagatagtagcaagggtggtaacaactgaatctaagtgcatattattttcaaatcttatctcttttgtgacttgtgtagccactaaggaaaaagaagcacttgaggatatacatcagttgttgattatgaaataaaggtctaattggaagatgaatgaatattatcatatggtgaacaatccaaaattatgtggcgtattctctatctagttaatttggatttgattcttctttattagacacttaccataatatggattaagtcagcccttttagacttcattgaataaccatgcatattatccatgtcattcaaaatatattgtgcatgagggctcaagggaaatttagtccatattatgaggtttctctattttagcaactcacttgccttccacatataaaggattgctaaataagaaactagtgcttgtgctactaatgccatctcttgtg

SEQ ID NO: 66470 - DNA, 416 bp, Zea Mays
ttattatgagttatcaggtcaaagtggcctcatccgaatgagatgacaatgcaatggcgaagtctctcatcatcaccctggagggccccgccttaacatggtgcatcaggcttcctccgttgtcgattgattcatgggcggcccttcggcacaaattcctcctcaacttccaagggtacagacagcaaacagatgccctcgcagagctatcactttgcagacagttagagagggaaagccttcatgactactacaagaaatttttgtcgcttaagtctcagttacgttagtggaagacagcaatgctattcattacgccatcaacggtctctgcacaggtcacatatatagtcactacaccaaggatccaccaccaactctccaagagttgtatcaattattcaagaagtatgaac

SEQ ID NO: 66471 - DNA, 1404 bp, Zea Mays
ttccaaacctcgggtttgaaaattgggatgttacaaacctaccccacttaaatgaatctcgccctcgagattcagacggggctcgagaaaaggtaagggtattccctcctcagagagtcctcactttcccaggtacttcgtcttctccttctctgctccactgaaccatacagagtcttacttctgagttgcaggtctttcagactgctgagtcaagaatctttattggcttttcccagtactggagatctttttgagtctaaattgtctctgcctcgatgtggttctctggtacttgcaggcacttacggagctgggacacatgaaacacattgtgaatatctgacatggattctggtagtgcaaggcggtatgttgcgggtcccactctgctaatgatgggataggggtcgacgaaacgcggtgctagctttcctttcatttggaaccttttgaccccacgcatcagggagaacttgaggtatacgaagtctccttcctcaaatctgagttccctccgtctattgtctgcataacttttctgtcgactctgagcttccagtaacctactgagtcctgcggatcagggcaactttctctttggcctctttaacaaagtcgggtccttccagtgtcctttcccctacattggaccacattaggggggtctggcacttccgtccatacaatgcttcgaacggtgacatcttgatactggcctgatggctgttgttatatgagaattcggcatacgacaaactggactcccaattttcgtcgaacgtcaacacacaggctcttagtaaatcttcgaggaccttgttgaccctttccgtttgaccatcttactgagggtgataggcggtgcagaaatctaacttggtgcccatagcttgctgaaggctcttccaaaattttgaggtgaactgcgtccctctatctgacactatcttccgaggaataccatggagcctgactatctctttaagatatatccgggcaagggtggctcctccaaaattggttttcactggaatgaagtgggccaccttggtgagacggtctatcattacccagatagagtcatttcctttttgcgtccggggcagtccggttacaaaatccatgcctatttcctcccacttccattcaggcactgggaggggttgcagtaggcctgcaggtttctaatgttcggcctttgttcgttggtaggtgtcacatcgggccacatactgtgctatctctttcttcatcgctctccaccagtatctggttttgaggtctaggtacatcttggtggttcctaggtggatggagtaggctgagttgtgagcttcattgagcaggacttcccgtgcctctccctttgatacgcacagacggttcttgaaccaaaggact

SEQ ID NO: 66472 - DNA, 786 bp, Zea Mays
cagtggctccggcgagcttaacttgaccagaaaacgcaatgtctaggctccttctttgctcgaccccctaattctaaccccggcgacgagaatccctcaactaattgcacaattccaggttgagaactctctgtccacggtgatggcgcataccaaggataacccgaggcgttcccggtgatctaacgcggtctaattcaaatggttgggccgataagtatcaagagcacataagagagctgaaacaagagcgaggagggcatgatcggacctgtggagggctggccacgacgagctcagtcacggtggagttttgactgatttgggggaacttcaaaattggagcgctctagtggacaatctgaggcacgggcgggtgcattgggtgtgtgattacttagcggagctgatggcatgcttaatttatatggcccgagggcggtggctcctaattttagcatggcgtgctgcggccgaagagaaggaatgttactggcgctaaaccctaattttggcatggcgcaagggattcgtggctttcaccatggcctgaccaccggcgattaccagacatgctaaggcaagttactatgacgtggtagagcacctaggcacatgacgcatggtcggtaagcggccaacgccggtgaggaccattttgcccgaccgcaacccaagtgggtacgacgagctcaccgtcgaccgggttcgagcccatccagtgctaagatttttaccctatcgttattatctcctcgccagagagcacgaatcatggtgacgacg

SEQ ID NO: 66473 - DNA, 506 bp, Zea Mays
ctcccctcttccacccctttgtgcccatttcaaattcctgtgaattccagtgaaaccaagtggtgaaatgtattcctctatgtgccttgaacatccttgtagattctcagctccttagggagggtttcacagcctctaatagccatttctccaaaaccctaaaactccgcgcaccacgtgttcggtgaaatgcccaaaccagccaaaaatgctcaaattgaacccaaaattttcaggcacattcacaacccctccagtaacatattcgcaaaatttcacgcccatccgatattctaggatttaatttcaccaaattccccgtttcgagcgatcgtttccgagccgagtgcccaaatctcattttcttcgcctaaattcaaaccaagcacacacttcactcatattcacccatataaacctattcgtaaagtatcggctcaattccacgtcatttcgtgcctcaattcgaattccaaacctcctatggcactttttatcgttcaaac

SEQ ID NO: 66474 - DNA, 273 bp, Zea Mays
ttagagccttgcttagaatcaagccctacaaaacaaagaatgagcatataatgataggaaaagatacaaaaataatctattttacgacaagtcaaaatatacacaccttcagactattgtaggcaaggctgtccgcaagctgatccttcgacattgcggataagacgagttcaagcttcagatatcctatattgtccgccatttcccggcagacatgtatctctttattgtctggaagacagtaaaggaagtcatcttcttcatcgccaccat

SEQ ID NO: 66475 - DNA, 1127 bp, Zea Mays
cgacaacaactcccagtgaatctcgcgggaggccattctgacaactatgctaacgcctccttgtacgaatgcatgcctcgaggcaggcacggccaaggcctcaggaggaacctccgtctcgcccgggcggggcctcaacctagataacatcgaccaaaggacgccaccaactcctccacgaaggctgctgacgacgtgatggctacaagaccgacgtcaagtttgctttacgccatacggagagaattaccatgtgctttttaccatacttatcactgtttcaacaactatggctcggacaacacgttcatcagataggctcaggtacgcgtccgagccccagatcctggcctcgactctctgcacggtcaagatgcaaatacatggactagacaccctcctcctggttcaagtcaacagccagtacgaaggctataccgacggccataccggctataggggctcagactcgtctctcctcccataaacgacaaaccatggcgctcctgggaaccctccatgaggttataaaaggaggagtctagggcttcatataggggaggagaacacttcacaggttttcaccctccacgacaatattggcactcgcctcaatcaccagggacttgggatccactccctcttccaggcaacttgtaccccctactacaagcacttaggtgcaagataatataagtctcatccccctctgctagaagtaggaccttcccttgcccgaacaaggataaacgcttatgacttcttgcatcacccatccggatctgggcacacaacacttattcactagttggtaggaccctcaggtcaaaacaccgacagttggtgtgctaggtaaggggctcgctgtttggtgacaccacattcccaccaagactctagatggctaatcctcagcacccttggcacctcggcatggtgatatggttcgggagtctcgagttcatgcccctcgagttcggctatgacatgacgctccttctgcctagacacccatcggacgtcgcccaccgtttctttcggctagggggagcacgactacgcctgctcccttggccagaggagagatattcagacacggtgatctggttcaggagtgtcgagttcat

SEQ ID NO: 66476 - DNA, 643 bp, Zea Mays
gtttagaaatagcagaaaattattttaattagggaggactcgctcgcccatctctgtcgcaagtcgcggcatttttcgtgtgcttcacgacgactgggaatcaaactcatgacctcaccctctcaggaaatctcctctaccactctgcctatgacgtgccttgtgttaaattacagttttgttacccacatattataactaactgagtgtaaattgactatttgaggtcactcaaacaaaaaagttccttggcttcgcaaagcctaaatatacacgctgagtttgactatagcattcggagtcagctgatgaagataaatttcaaactttttcaaaacttcgctaatcatttcgtacaaagggaaccgaagcccggcacagaagaagctcttgaaaactattacttcatcattcttcgattccgggactatttcgtcgcctgcgaaccttatcaactcatcatcattgtttacaaaatagtcgagtttcttcattaaaaccaggtcttctagccacaatagattttctaaattcaatatggctaggcttgctcggactcaaaatgccatcatcctcttcatcatgactatcagcttcggcatcaacagtcttagcttcgacatcaacgatacccttctctggc

SEQ ID NO: 66477 - DNA, 834 bp, Zea Mays
aagaaggtcggccgccaagacaaacaacagtggcgagagagggtctccttgtctaacacctcgtttgcaatgaaaggatttaccagggacgccattgagtaacaccgaagaagtgccagaaagaagaatgctccaaacccagttaatccacttaggaccaaaacctttgtggatcataacctgaagaatcagctcatgctctacagtgtcaaaagccttttcgaagtctagtttaagcacaatgatttctttctttgaggagtgacataagtgaatgtattcataagcccaagccaaacaatcctgaatagatcttcctttgatgaaaccatattgattcctatgaattaatcgagacatgaatggttgcaaacggtttgccaaaagcttcgttaaaattttcatactattgtttaataacgaaattggcctataatctcccaccttctgcggattctccttcttcggaatcaaaacaatgaaggatccattaatacttctcaggaaaacttcatcatgataaaaattttcacaaagatcatagaagtcttgagcaatgatatgccaacacttcttaatgaagttggtattgaaaccatcaggaccaggtgatttatccgaaggtaatgattttataatgttgtcaatctccaacttagagaacggggaatctaactcatgaagctcttcattacggattaaaagctcaggaagatcaaaatcaatacctgagaaatcagacgatcccaatctgctcttgaaagcatcccagaggagaccagatttatgttcgtgctcaaaatggatgatcccattctcgtcagtcaaagtggc

SEQ ID NO: 66478 - DNA, 425 bp, Zea Mays
agcgctttgatctgcttgtctaccaacgttgccttgtcagtgtcacgacggcactcaccttgacagtgtaaacaaagctacatggttcaagagaagcccaaatttcatattacaccgtgcaacgtacttcacacccttcactccttcagtacaattaacagactaggagcatatacaacagtttcattttaaaaaacagaggaaaacacacaaagtttaaaaactaagggcaaatttgtagttacacctaaaatagggtcattgacgtaattgccccaaaagaattagggagctaacatcaaatcttgtctatcagattcaccacattttcacggaataggggcatagggcgcactaaccctaggttggattacattcaactatagaggacaattttttatgttagcatgttatcacctttttag

SEQ ID NO: 66479 - DNA, 355 bp, Zea Mays
tgaccacagtgtcgtcccaagagaattcaacgaaggggacctagtactcacaaggaccaccagaatagagtcccggggcaagctagagccaaagtgggaagggccatacatagtcaagacaaaagcatcgccaaacgcttataggctagccacatcatctagcgaagacttagagcactcatggaatatagagaacttacgtaaattctttatttaagatccaagtcccaagcgcctttgtaatttttcaaacaatgtcgttcaggcccgcactcttttcctcctaggggtgaggtttttaacgaggtggagccatgtaatataataccgaaaagcccccacacaaacaatctag

SEQ ID NO: 66480 - DNA, 328 bp, Zea Mays
cctaccccgacactgcatcgacgactggagcgacttcagtcggtgcttcatcgccaacttccaatctctcttcgacaaaccggcgcaaccatgggacctcaaatccatcaagcaccgaggggatgagactctctggtcgtacctcaaaagattccagaccatgagaaatcgtatccccgaggttgcggaagcatcattgatcgaggacttctaccggggatctaatgactcggccttcgttcgagccataccgcaaaaggcgtcgaatacctccgaacagctattctgggaagcggacctctacatcaccgccaacgaacaagctcag

SEQ ID NO: 66481 - DNA, 382 bp, Zea Mays
ccttaagctgaagatcttcttgagagaatgtaattgggatgtaggaccatttgaatctgatgtagggcccctagacaccaacatgttgcacccttctttgcgcttctttcttttgctttttgttattgggttcgaagctagattctcctgtaatggggaggataagctatcttttaccttgcgacgaagcaccgaggctaatgttaattgccatattcttcgtcgaagtcgtgagttgaccaaaggtgagcgccaatgttgatcacctgttaagattcatgtagagatctagaatagggcatcacaattaaaggtataagaccctcgtccttcaagtctatcccgtaagagagattgaaggaatacaatctttacaaattta

SEQ ID NO: 66482 - DNA, 679 bp, Zea Mays
gcggccttagcacaaaacaagagaggactagcgacggattagtggattagagaggagaggaagatggagattggagattacctgcgcagccggagcactggagaagagaggaagatggagatccaccgacgacagttagggttagggacttagggttagggttagccgttagcagtagctgcttggggttgggagtagccgagtagacagtagaggtagatccacaaccacagtccacagaacataggagggagagaagaggctctggttcggcggttcctcaatggctcaactcaactggcgatgcgacgaccggacgaccgagctacgagcacgggaatacgggaagggaggatgtcgaggaaggaaagacctagtccatatcaacgcgtcgacgtggatgaccggagggagagaagaggctccggttcggtggttcctcaacggcgaaaccggcgatgcaacgatgacgatcgagtagccgagaagaggccacaccgacgacgacgaggccacgacgacaaccaagctgcgagcgagatgaggcggccgacggcggtcggcgggattggggctagggtttagtcgccactcgccagtcgccaagagaaggagagagaccgagagagagtgagggcgtgaggcggccgtgtctgtggactgtggtgcggtgcgaccg

SEQ ID NO: 66483 - DNA, 419 bp, Zea Mays
aaacaaatacataaataataaaaaaatcaaagacaaatgaatgattgcatatgtgagcacgtcatatccattcccacggagagagagaaagcgctggagctaactaaactgttctttttttttcttcttcttctctggaagacacaggcactaatggcgacagtgatggccacaaaggaatcaattatcacataacgcgacccggttagttggggagacattgattaagcacctcaacgaacgccattcctgcggaccagaaaggaattgcataatatatgtgtgtgcgcgcacttttccacccttttgagctttcaccgatcgatggctgatcaaatctcccgtccctacccgtggatccatcgatgcagaaatgatagcaacaggttggttatatatgtactcaaatattctgaaac

SEQ ID NO: 66484 - DNA, 1134 bp, Zea Mays
aatttaccaattccagggaattctttggactgcagtcactattccctaaaatccaggggctaatgcgctaaaatttggactcgatttttaattgtttttgaactggagatgatgacaggttgattctataattactcggggtctatttagcaaagctgccgcccgaaggggtacgggctgtcctcggtcgttcggtttaatacaaatgatcgagattagatcaaattctttatgaacagatgtcaaatgaaaaccacacaattccatatctacggtctatacttttatgaaaacgcgatctaatcctcaccgctcatccatgatccaacgaccatgatcaaggttggtccaaacagtgcacttgggttgcataggatcgtttgatccgatcgctcggtccatgattcccttgctctccccctacactggccgagaacccaggcggtgccgccacatgcccacgacggtcgcacgacagcgcagactcgacaagcttctctacgagccaaactcaacatcggtcagtgctaaacaaaaccgagtgaaccgtgaattcgtaaaggtcctgttaccgggaactgtggtgatcatagtgctgctccaagagttcttgtaattcaacgttggtgcctaaccaccggcgagaaatcgccatctactcccggcctctcacgcccgatgaagcaatgcacgattcaatggcccctaatgagccccctgatctcctgctgagcgatggtaaaggcgtgtagttatggcattagttccatctcttcttgctcggccaacaagttcttgtccactgggatgtggctcaagtttctctgtgcttggtttcctcatggtccatggtttggcgatggtaaggtcgcaggggccttggtatttatgcgtcgggacacttgattggaatttgaaggatccccccaccaacatcacatttcggttgaggattcatctcaatctaagaagaagcagttggcattggtggcccacacgccaacgacacatgcatggtgagcgcatgaccctttgtgaggtcgaccggcagacccacacatcaatgtcggcatgcgtgaaggatccctacctgggcgtggtcttggggctagtgcaggtggccgaaccgtcggc

SEQ ID NO: 66485 - DNA, 375 bp, Zea Mays
cgaaaagtcacatctatgcttacaaataatcttcttctaatagggtcccaacacttgtatcccttttgtgtagatgcataaccaacaaatacacacttaacaacttgaggatccaatttacccactgaaggtcgatggtcgtgcacaaagcaaacacaaccaaaaactctaggtgggactttaaactcttgttgtttcaataggagttcagcaagtgatctcatacccaaaaccctagatggcatgtgattgatcagatatgtagctttcatcactgcctcactccagagatacttaggcacattcatttgaaacatcagggaccttgccacttctaacaggtgtcgattcttcctctcggccacaccattctaa

SEQ ID NO: 66486 - DNA, 300 bp, Zea Mays
ctgaaggttaatattacgtcttcatccgttccgtgaggctgaagtgagcatttattaaagatgggtgtttttcaggtaagttgtctcaagctactgttgtgcgctagtataccgcagttgagtcatcccgcaaaaaggaagatctgtcttgaagcttatagcgcaattaattaattcaccaacaatggcattcccataatcccatacatttgtgagtcatgcataagacctactggaaattggctcaatcagtctgaatgtgctactgtgttttctgttttatacctggacttctaaggt

SEQ ID NO: 66487 - DNA, 789 bp, Zea Mays
tcagggtgttacaaagaccttggtccaccaagctctattcatcgctccatgatacatattattatatcattcagcctacctgtcgggtactagctcccttacacatgctccccttatcctataaggtatagggtttaggatttaggctataaaatgtagggacatgcgttgcaaggggacacacactaggtcgctctcgagcccatcgaggaactcggggacggacaaagtcacttaaactccctcagagacatcttcatccagtcccaggctttctcaagctcccagcaatacaactcatagtggagtagagtattacactctggtggcctaaaccactctaaacccttgtgtttgtccatctcattaggcaaaccctaggttgccccatgttctaaggattaggcgccaacatttggtgcgccaggtaggggactaagtcaacattatggtctcctctacctcctgatggatttgaggaaagaggccaacgagggttatgccttcatcaacctgaccttgccggcttaccggctatggaggccgatggcggcctaccacgtgcacttttgggctttcaagggtagcgccaagacctatgtagcccaacacatcggcaaccgaacaagcttcgccctcgaccctcacgaaggcagtgcaagtagctgcttaaccttcaagtctaacactcgatgtcactcgtgcggttaggtcgtcgtcgtacctttttttaccgaaacttactataggaggtctacagtatttttattccaaaaatagataatttta

SEQ ID NO: 66488 - DNA, 883 bp, Zea Mays
tatgggctaagggtggaagagttgggaaggtaggattagggaacaaaggaataaccgggggtaaggtagaaccgaaggtagtagtggaacaaggttgttggagtaaggagaggtaggtaaaggagtataggaggttgaatgggttatgttatatttgtggggagaagtttgaaccagggcatcaagctagtgtcctaagagggtgcctcaacagttgaatgtgcttaccactgaagacttggagatggttctgactgatgacatgttgggacagatatcagaagcggaagttcatgaggaacatgaggaagagctttataagctgtccttacatgcattgagtggggcagaaaattctaaatgtataaggtatggacctctgattcaagacaatgtaatgctagtgttggtggatttaggcagtactaccagctttatcagtcagagtatggtggataatttgaaactggaaactgaaccttgtgaagcagtgttagttaagatctccggttccctcgacccatcggtcaacgagcgcactagggaaaagcctctagcaactggggccatcgatcagcaggaggagaaaggaaacgtattccctggaaggacccgcccccggatgaaccccacggcaccaagcccggggtcgggcgtggcggagctagatagagggctgggcaaaccgaagggaaaccactcgagtggatcccttgcccggcccaagatcaacctgccatatatgattagccacattaactacgcctggcgtcgagccacggcagaggcaccggtccgcctcccactcatggcctacgagcccctccggctgcaatgcacccataacctacgaaccctttggactgcggcacatttatggctc

SEQ ID NO: 66489 - DNA, 491 bp, Zea Mays
taactttgtaggaggcaatgaacgagttggtcctttggcatcgacgcgacatcaagttgggtgatgagccgatcttaagccgtgtatcatgtcataagtcaccaacgtcaaattcaacaccaatgcaacagaaagatagttcgatcattccataccccatggtgcaggaaaatatggcaccgacctccacaaaaatcgttgaaacaatcatatcacctctgcgaaggaactcgacgagggggacgtagacaaaattgttcctcagaatgtcgacgcaaacataaaaaaggaagcaaaggttgacaccaatgttgaagggccaactacttcaaagaaaattcatcagcgaatcgccactgacgatgtcaagaaaccgtcagaatcagtggcacgctacctgcataaattgcggagagttatgacaaatcaatcaaaagcagaatcagcatctcgtggagtacgcacacggtcccaaatagacaatttcgaag

SEQ ID NO: 66490 - DNA, 761 bp, Zea Mays
gtcggttttgtttcagctttggtttgcattttcaaagcctcggcgattttccctgaaggagtagagcttaaagccttcactgtttctaacacatctggtacatttgccatcctttttcttttgggagttgtcgcaagacttttctgtgccttcgacactgttacttctgccgaagggcttaaaatttctaacatttttgttcctttagtttttggctcttcgaccttatctctaccagtctttgactcagctagctcggctgagagtaccttcggcattatagccgggtctttagctttctgcgtaggaggaatgggttcctttggttcagcagctgaagaagtctccccgccaaattcaggcaccactgtcggctcaatataacgtggcctgtgggtaaggactttcaacttcttgttcttcggcgctggctcatttggagtggccgaagcagtagtcttggtcgaagcagcagttttcctcttctttccccgtccccatagcgggtaggagtagtcggggtaaacaaaaccaatggcatcaaaaactttgtttaatctcttttttcctcgggcccccaaggatgtggataatgcattatcttccacttttaaatacggcccaagcagttcatcacttcactataccacaacaccaaattagtgtctgacgaccgtcgctataaatagagaattagcatcaaattgttagtcggtatacatggccacagatggtgagtcggcatatgtctaaattccaac

SEQ ID NO: 66491 - DNA, 724 bp, Zea Mays
tcaaactgtccgacctcatggcctagattgtccgcgatatcagcaatggtgcgatttttctcttttggcgtatgcattgttcttcatttatgatttagccaattttccattggctctaatattacaagggtgaagacttccctgcacacacttataaatggataatctgaaaaatctaccatggtaagacactttgcagagtcataagtccaaagcacaaggggtttgcgtgtattgtttcaacctcgtcgcctacccattgaattaacatttggtgtagagtagaaggtacacattgattggcgtgtatccaatctcctcctaagattatactatagttgccctctaccttgacgatgctgaatgtagtggccatggtctttgtaccgatgtttagttcaacggacatgacacccttggcctcgatcggactgtttctcccaacgccactaagagtcatgtatgtcctaatcaactcattatctagcttgcctagacttcggtacaaagaaaatggcatcaagttgatgaccgctccatcatcaatcaacatccttgaaatccctcccatcatatggtcgcgcacgaagagcggctttagatgattgaccgagtccttaggtttggtgaatacagcttcattaggaccttaagacataacaggttcatctagggatggaaatttactccacaaacttaaaacctgatagataccagatccgac

SEQ ID NO: 66492 - DNA, 1217 bp, Zea Mays
ccgaatcatgtccaactaatataaaaggaaaaaacgatcctatctcaacctttcccacacagtcgccaccatggtcatagtctatagaactcttaaatctcctaagaagaattaccatccgccactttttgcatgtgcctattgtcgatcatgataataactcaggcagacctcttccagttttaatgtcttatggtttctgcctactgctaggttgcatgtggtattcgaaagctgcaactggctcacatactggtatggtctaatagagacttagagagtgggcctgtcgagccatggcttgccctccctgtttccctttgcaggcactctgccggatttaagttggcggcggggttgtgtaatgtgttagccagatgacgcttcattccaatattttctgcgcctctgtggcctgtgggctccgtggtctggcttcagcataggcccatgctatgcacgcaagcagtgtacgctgatgcgtgtaccttgttgagtaaattgctgcatggcatctgcctctgcctggccatgaatggatatcaaaatcctcaaccagatgtgaccacactctgaaaggagacaaaccattaaaggccacagagttgaaggactccatatgttgacctacctgcccactgctcgatcagcaccatggaccaaatccttgcatacaaacacctcgcttttggtaaactatgggtaaattactgcagcagacggtctaatggttatagtatccgattcacgcgcgcaaggaaggtttgccaacgcacgcaggtggtgttcagtagtgggactcattcggcggcgtgggatgtggtcaccagtgtcagcgaatcacgctgcattatacgtacatttggttccggactaccggcgtaggagtgagataatgctagggcatggagggacgctgtgttattaaacgccgttacttgttgagacaaacaacttcgccgtacgctggctgcaacttcattcctattacgtcagcgcggtactgatcctacaaccaaacagcacagagattctgcaggttggttttagttctgactgaagttctgcacgaccgaatgaaactaaacttatgtagtcactagtcaggcagtgcagaaacgctgcggaggagacatatagaccgcaatgcagagtgcgcgtacgtccttgcccgtgtggtgcgccacccctagtaatcatcagctcgcctatctatt

SEQ ID NO: 66493 - DNA, 478 bp, Zea Mays
tagtcatgtgtaaatctatagcacattattggaaactggagcatgtactaaaatatgcactccggcactaaatcagttgcaaacttccagtaggttatgcatcaaggaaaatatataataatggtgtcagtgtgaagaaggagcaatcatgtgtacatgtgtagcacattattgaaaaatgaagcttatactaaaatctgcattccagcacattactggaaactcgagtatattatactaaaatatgtattccaaatatttatttaggcatttgatcgaacatcttgcgcgcatggtgcaccagcaacaactcgcttccaatagcagtaggagccatgtgagctctccgcccttcgccttgccgcagctccatcattcatatccgacatggactgacttcctcttgtcggggttagggagaagagcgagggcgaaggcgacattcacggcagcaaatattcgagagattggaaaaccc

SEQ ID NO: 66494 - DNA, 972 bp, Zea Mays
cggccctcgtgtaggcaccaagcaattcgtcgctagtcgcctcaatgcaatctagccagttatcgttcggctcatcgaattgatttctatacctgaaggtgtacttcaagtagactaaaccatcttggctggacccagaagcagcttcattcggcatctcccagtcgcttgcgagaggccacactatgtaagcaatgtgctcctggactaagtcccttgtgccaatataagtgcaaactgtgttatacgcagcttgacactcttctacgtcattcccaagggcaagagacggcctcctaatgtcgaagcgagaccagatagagcgtggaatgatacccttaatatcttctctttcgaccaggtcattttcatataaaaccactcttgcatcgaggcccctggatacctcttccgaaacattggaactggataattcacaccagagtgaggcacgaagctgtagcaaccaaaatttttgtgattttattctttcccagtggcctttgcctcgtacgacagttcgtgaatattgcagaaacatcttgcatttggttctaacccctggctcctcatggcccaaataaaaatccccattctgatgatagcctcggggtgagttgatgaaggaatatttcaaaagtcttcaaaacttcaactagcaacttatctaaagggaaccgaagtcccgctttcatgaagcttctgtaaacgactacttcgtcagcttcaggcaaaggggcattgctatctcccccagccctcacaatagaaatatcgtggaagtaccttcccttcattgcatcaatttgactttgtttgatagttgatctcccgaagatagtatgactcggtcgccaggtccgatcttcggcaccttcattcccactctctatatcaaaatcttcatcgttgctggaactttcagatatttcagcaagtgtctcacgagcaatcttttctgcattggtctct

SEQ ID NO: 66495 - DNA, 750 bp, Zea Mays
ctggatctccgggtgggccccgccaaaaccgcccgcggactccatggagtctatatgacaggtgtcgcgacctcctcgacccctcctaacctccctgcaacgtggcgcaaagccctatctcgggggtttgccaccgccgtagtgagtgttaaggagggaagtcctccgtgagcctgcagctatctccctctctagtcaccggccgaccaattgcaagcgtgggtggctgcacccaagcgtggcggacacgttcctcgaagcggaaggaagaagagacctgcggtgatcccgagattgctcgtcggaatcgagctgtttcgccgaaccaacgtcatagcgagaccaccataacatatgtaacaaccagaggtatgtgtcacgccacctgcttcgccttgatctcctatacgctcggcgctaggcggaatatagggttaggaccgggttcgccgggttatcgccgctgatgaagcgcgcggctgcggcagctctcaccgtagtgcccaacctcggcgagggaacgaagatagctcgggtccgtggaaataatgatcgacgacccagatcgatcgcgtgtctggaccgctcgatttggatccaagggtagaagcgcgctgcgcgtcaggaactaatctaagtcgtagatcgcgtatcctgcggctcggattgcataccggttcagcgtatacaacttctaatctaggccgaccgttgcggatcgggcggccaggactttgcgataccccttcg

SEQ ID NO: 66496 - DNA, 447 bp, Zea Mays
aggagcctgtggcaatcaataagcctgtggaaataaggtgaaggatcattactatttttgatgctattgaagaaacaccaccaccgtcctcggtgtcaaaaacaccggctgccaaagataccgcagcaaccgaggctgcccccgccgaagctgtaactgccgaagctgagacgaccgaagatacaaatctagaaggcactttttctgatattgataagatgatcttgaacatggccgcggaagaagctgccacagctgccgaaaagatcctggccccagtgcccgggaaagagaaggaggttgccgaagagactttagaggaaggggattttaattttcaagacatacttggcaaaaagctatctaaagctgagaaggaagaattgagggattacgcaatatcatgcggctataaaccaggagcattgctcttcggtggtgttgccg

SEQ ID NO: 66497 - DNA, 710 bp, Zea Mays
tcacgctggccgcggggaggctaaactgcgcagtgttcttgagcagattgggggaaatccaaaattcgagttctctggtggggggtttgggatgcaggtggatgcagtagctgcgtgaatacttgacggagttgaggacgcgctcaatttatagaccccaaggtcggtagctctcaatttgaccgcgatgtgttggcagccgaagatagggaagaacacggtggccgtaaccgtggcagtcaccggtgtaacggcgcaaggagaatactcctaagggtgccacacttactaccgcgtagtaacaagcttcggcgtggcacagccaaggtcaccggcgcttccacggcgactccggtagtccggccacgtcgcagcgactatactcacggcgataaactccaattcgcgatcctatcccttccccgccgtgagatcttttctctgccgtagttatccaaccgccagtgaacacgaatcacggcggcggcgtgaatcttcgcatagggaggtcgcgtcgacgagcaagccacgctagcaacctgatccactttggtctactgtaccatggcgagacctcattcagacagcctgtcagtccctattgaaggcaatttttctcttaatttcatatggtaacacaagtccaactctgcagcaaacttgtagagcattataccaactacaactttgctatatggtgttgtcacaaa

SEQ ID NO: 66498 - DNA, 3249 bp, Zea Mays
cggcggctgcgtacatggaggccggggcaccgccccgcggctggcgctgtggggtgctctggctcgtcagcgtcgaggtgagcccactgccttcgatccggtacgggttttggcgggcgggcggtgggagctgagtacagattcggggcggagtggtcgggaaagttcggggggctcagcgtgctctcagcggatttggtataggctgatgcgggcatcgtgtttggaggttgatttcagatatttggcttccctgctgcgcgtagggttttactgtttctctgcgcacttttggggcaacaaatatttgtctgtctctcggagctatttttggatgcttggggcgcgaccaaatttaggtacacctagggttttatcatttatatgtggattgcttgacgtttgctctctctttcgtgaacatttgggcttcttataacttgcgttcaagtaccattgtaaggaggaaccgtgctttttgtattgatcccgacgatttttctttcaattcttttctcgtgttgcagattgtgttggttctagtctgcactcgcggagctggtgcggattctggtgaaagcaaaggatcgtttctgcaagactctgaagctggagaaaaggatgtctaccttagccactcctgcatccacgacgagatactacatcaacggcgacgagctgggaggaaggagtactctgtcatgccacaagtgtaccatgagtctcgggaggatgcggagcgtgtaagaggacgacacttgttgggcatgtcatcttggcgtgctccgcacgagaatgccaggaagccaatacgaatatacctcaattatgatgccgtcgggcattcgcccgaccgtgattgtaaaaatgttggcgacatcgtgaaggtcagtttgtcacattagcttttctcattgcaccaccagctattttatctgtgtagtagaattgaaactgttgtttctatttggtagcttggcgaacctcctgtatcatcagcaccaggaacacctatatgcgatcctcatggtgatccaccactggtgggagactgctggtacaattgcacccttgaggacatagctgggaaagacaagaggcaacgtctccgtaaggtgcagttctcatgcttttgttgtctctctgaaggttcagttcaaatgcataccgaacactctggactggtatagaagctgtatcatccatatccccatttccatatttttctgacttctgttttgttgttgagaatcatttaacaggcactggggcaaacagtagagtggtttagaaaagctctagctgttgaacctgtcaaggggaacctacggctcagtgggtactcagcttgtggtcaggatggaggtgtacaactacctcatgcgtatgttgaaggtaattttcagttttaatgaatcagtttagcaatcttgcattcttgcctgctaattgcctgactatgttttcatgtgaatctctcctcaattgcagatggtgttgctaatgctgatttagtcctcttagtaacaactagaccaacaacaggtaacacccttgcatgggctgtggcctgtgaacgtgaccagtggggtcgggccattgcaggtttgtgaaccaactcaattaagtacagacatccacatgccaggggtttctagtgttgttctgaccctacatgtattctttttctgcttttaggacatgttaatgtggcccctcgtcatttgacagctgaagctgaaacattactttcagctactctaatacacgaggttatgcatgttctagggtttgatcctcatgccttcacacattttcgtgatgaaaggaaaaggagacgtggtcaggtactcaacaatgtatttcccacttcagtattgtgatatattttcttttgcttaaaatagaccctaatgctcaaaatgtcagtgcattaccttatttaaatttgggttgcacttcgacctgcttttaatgtttctatgactaaagcgctagaaattcgatgggtgatgtcaactttgctggtttatggaataatcgctttggcaattaccactatatggtggtaatacaagggcagttaagcggataatcctaaaaaatggttagatataatttaggttgcaggtgcttataagttggagtcttgggagttacgtgtagacctcatcggtctgctgtaagctttgtcacatcacatgttgggcaaccagctcacgatgacatttatgttaaaatgtatgccagcaactcaatgattgctgaagaatttgagaacatgacctccatacttgtgtgtgaatatgtactggacaaaaagaataaaattccacacagtgtggcatgcttagcttaacaaccaatattcttctctaatctatgtttatctatttgttccttcaggttactgctcaaagtttggataaaaagcttggaagaatggttactcgtgttgtcctaccacgagttgtcatgcacgcgagacatcattatggagtaagttctaactaaagatgtggaaaaagttaattgagtcattggcgacagttatttattttcatgctctttacttagaaaaccccttcatataaactaaccaatttgttttcatgctctttacttagaaaatcacttcatataaactaaccggtttttgtcttgtactcttgtgctaggcattttcccaaaacttcactgggttagaattggaagacgggggaggccggggcacctcaggtagataacatgcaccctttatggtcttaatttttatttttctttctttccttttttcatttgctgttatatgtatgcatcatgcaagtttccaaacacattcatttgttttgatgtttgatatactattaggttcacattgggagaagaggctcttaatgaatgagatcatgactgggtcagtggatacgagatctgtggtttcaagaatgactttagcattactggaggacagtggatggtatcaagctaattacagcatggctgaacatttagattggggtcagaatcagggaacagagtttgttatatctccttgcaactcatggaaaggggcataccattgcaatacaactcaattatcaggatgcacatataatagggaggcagaaggttactgccctatagtaaactatagtggggacttgcccaagtgggctcaatattttccccaagccaataaaggtatgcccaaatgtagcataaattattatgtttatgacattaaac

SEQ ID NO: 66499 - DNA, 612 bp, Zea Mays
atggattgggtgaaacaattaagagcaagtgaagttgtgatcaacgaaccaataaggccatgtgatgacgtaaagtggatcatatcattaaatgcagttcaagccaaatgttgatttatgttgtttttaagtggcttgatgaaaaatgatggaggaacttcatgctatgaacaatgataaaaggcatcgatgtttcaaacaagcaccaactagtaaatttttgtatgcacattttggatccagatggtgtgctcagtgggcgcaagatatatactaattcaagtagaatgtccctacttccagtcttcagtggctcgcgctactggcaacttgttgcccgataaaaggtggcatggttggctacacaatgtatgattaatgttcatcattcgatgaaggatgatggataaacctcatgctatgaacaatgatcaaaggtatcatggttaactacactatggatgatcattgtccatcatttgatgaaggatggtggagcaacatcatgctatgaacaatgattaaaggttgtgtggttggaaacaccaatggatgatcatttcatgaagaacattagatgatatgaaatggaatgtgcatgataaaggtatg

SEQ ID NO: 66500 - DNA, 567 bp, Zea Mays
cggacgcgctattcttggcggcgcagctgaccgatttggggaaaacggcgtcgtggtgtgctcgggtgaaattgaggatggagcttcggcctatacgaccgcaagggactctagttttatcctgcacaatcaatttgggaagagggggcagaggcaacacgaatttggacttcttctgagcttcactggtggagatgaaaacacctcgtcgtggctccttgctcaatttataggcacggcggcccaacagatgacccccgaccacggatagcagcgcaagcgcatgcctaccacgtcggaaagagatacagtgagggagatggaagcatgggcgacaccgcggcaaaattcacaggtcacggtggccgccggtgaagactccggctgggctagggcggtggcgccacgtatgggttgtccctccccgacgttatccattccctactgcgcacgaacccggacggagacgacgcgaattttggcgcaaagaggtcgccggtggtgagatttttctgccgtggcgatctgatccccaatttagttactgtaccatggcgcacctccatc

SEQ ID NO: 66501 - DNA, 621 bp, Zea Mays
attaaagccttatcatcagactattcattgtgccacttgccgcgcgattgactgtggtgtcctcgccggcgttcgccgtctttcgtagccgcgccacgtacttagaagagtaccacgtcgcagtagatagccgtaggtagtctgtccatcgcgtgagacgttgccccggtgaacgccatggtagttcacgctggtgactcacccctctcttcgatcgttggtcttcccctttcaaaattcggagccaccaccctaatacactatagtcggagaattttgttcttcccccaaatctgttgtccgtgccaccatgagacatcgcgccgtggccagccgtctccaggtctgccctcgctctccatggccatgttttagcacccacacatgcttgtgatactcatcggctcaacccattgtgcttgaccacactcaatcgaccgaaacaccttaatttgtatgcggtgtttgccgtcaccatggtcgagtgaatccagggcaggattagttcaattgaggcttgttctaggttcaccttgggtcggtaacgctaacccattagttaatttaggcagccgacgccggtcatggccggtctgagcaacaagatggccggcggcgagc

SEQ ID NO: 66502 - DNA, 688 bp, Zea Mays
aaaatatattttagtttgaatagtcagaccactttagttgtactacttttgaccatatccataaatcaagtctgggagacgaacattttgtaaccaacatcgcaaataaaataacaaaaatcgggttccacatgtggttttaggaaagtgacgctcgacctcgaggtttagacttttcttcgatgggccatgggcagtagccttctaggaagtggacccaaatgcagatgcttagcagtgcacccttggatcccttatcctgatgcactcaatcctcttaatcacgtaactggtcattgctgagcaaagtatcgagaagcagctcttaagtcatgatgaggtccgaaactctaggtgtctagcttgagctactaggacaactgttctagggtgatgggggtgtaggcttacggtacgggactaggctaaacgactatctagcttcggaccacccccgagaacgtggcactttccctggacctagtaccaagtgatctggtctccattcatcatcaggtgggtctgaactaagcaacaagttagttagcacaacttcagatttcatggtagcaacaggaaacggggcccgcaaggggagttgatacactgcaggaaaaaccaggaaaacatgtcggtcaggaaccaaccttcttactctaataggacgacgttcttaaccgacatataa

SEQ ID NO: 66503 - DNA, 1398 bp, Zea Mays
cgtacaggctgacaacaccatccggcgaagacctagagcattcctggaatattgacaatctccgcaatttttttgtttaaactctcagggcccacgcgcccttgtaatccaccaaacaatattattttggcccgcactcttttcctctcgggggtgaggtttttaacaaggcggagccatgtaatatacctgcaaaaatcccacgcaaaaactcagacgcaacatgtcgaaaaagaccgcatcgacggtcttcggcattcgaccactccgaagtcacccgtgagaggcagcgcagactaccctcacgtgcgacactccacgcaaaagtcgcctaagggtgcagccggaatagcacaacaagtgcgttaatcgaagtcttttatttaaaagacactccgagcaaaagttgcctaagggtgcagctggaatagcacaacaagtgcgttaatcaaagtcttttatttaaaagacactccgatcaaaagtcgcctaagggtgcagctggaatagcacaacaagtgcgttaatcgaagtcttttatttaaaagacactacgagcaaaagtcgcctaagggtgcagccgaaatagcacaacaagtgcgttaatcaaagtcttttatttaaaagacactccacgcaaaagtcgcctaagggtgcagccggaatagcacaccaagtgcgttaatcgaagtctcttattaaaaagacactccgcgcaaattcgcccatgggcgcagccggaccaacacaggcgtacgaatacgacaaacatgccacattaccatacaaattacaattacatacacacggcgtgggcatcacatattacatcggctcaaccttcgggatgatacccatctccctgtaattaaacagcattatcctcaattcctcaccctcaaaaagcttccaaagatccccctcgcctacgctcgccccaatcggcgaggacaacaattctcgtttaccaacccggtctactcggagatggccacgctccatccccatacgacgacgcctgccacttcgtgaaaattcacccacactatgttttcccaccacccttcgccgcctacacccagtactcgcactaggaagatccccggcaccctccacacgcggcgaagtctccgccgcagccacatccaatgcaacaaaataatccaagccttcatcagaggactcctccgtccaagaaaacaaactcccagattcaccatcagactcaaaacactcagacacagaaccaaacaaactatcatcggtaggcactacggttgaggccaccacaaaatcagtattgtcagcagcggttgcttgcgcaggcccaaacgtcggaacctgcgtagcaaccgaggttcagtatcacagagacaaaagtttacacttaaaatccct

SEQ ID NO: 66504 - DNA, 564 bp, Zea Mays
atttagcatatattcaaatcgataaaaactaatttttcctatgatgcaatgattcatgaaggcatgtctatgttgtagatcaaatctgtcattttagtttggttatgcaaatagtcttatgatatatttctttttcattatgttttcttttttccttttatatgaaagatgccacataagtgctttgtttatgttgttttgttcacttatctattatgtttctagagccatataacataattgaggtattctaatgtggacgagtgtctagagtgtacaattatttcatatagtcatttgtttatatgttgatgtatgcaagtcaataaagtacatgtaaaatcagcatgtatatttgttcattgttaatcattttattagttgcatatgtttcacattgttgccccgcaggctgctgcttcaattatgcggaaggttgatcgactcccaaccaatccgaagcgattaatcattgagtcaagccaagaatgcttcagtgtcgacatcccgtgctcgacagacaccagagaccctccaaatactcgatgtgatggtgatcctccg

SEQ ID NO: 66505 - DNA, 405 bp, Zea Mays
tattagacgcggtcatggaatcaacagaggtactgactcctgcctctgcagaagtacttaacataggtgaaaagaatacgaaggaaactgtcgaagccgtcatgacccagtttgaaactgaagttgagcccttagctcccacagaaacgggacccacagaggttgtcgaaaagaatatcgaagcatagccttcagatgctaccaaaactaacgaagaatctgaatcccctcctgctgaagcctctactgaaggattgaaatatatagtgcgtcacgcgaaaggaaaaaaactatcagaagagcagattgttgaagctactttaataggcgtgaaattttattccgatgtttggatgaggggcggccgtgagattgctgacgaagctataaggaaaaataaaaaag

SEQ ID NO: 66506 - DNA, 808 bp, Zea Mays
ccttcactgtctacatttgtatggctctaaagtggacaaagtggcacatcccaagtccatcagatttgcgaatttggtagtcattcagtgcttatgctattggattctggcatttctattttgtttgtgagttctgctatagcttaccagttaccaacaccaccggtaccttgtccttcgttatgcgtccatgtagccaatggttccaatctttaatgttcctcctagattatggatgttgtatggtccatccaaggttgtcagtttgtcacaactctcaatgtattggacctccagccctatgacatggtaatcggcatggattggctctcccttcatagtccgatgatggttcattgggccgatcattggctttcaattacactaggctcttctttagtgaaactttaaggtgtgcaagcttcaggtagccatggtgcactggttcagctatgcaacctctcggatctgccagataaggaacagtccctgattcagtctctacatccagagttacaagtgctgctggacaaatattctttagtgtttgcatctccttctgggctgccacctgttcgggactgcgatcatcagattccattgcttcctggtgcacgtcctgtccaaatgcgaccttaccggtacgcgcctgctctcaagttagaaattgagcaacaagtggatgatatgcataaaaatggtcttattcagcacagtaaaagtccttttgccccttcagtgattttgttaagaaaaaggacaatacgtatcgcttttgcggattatcgctatctcaatgcactgaccg

SEQ ID NO: 66507 - DNA, 564 bp, Zea Mays
ggcttttcttccaaatgattcaacattgtctttccttttgcatttgttggcatgtctgtgctaacttggattctttcgccttgcagacttgtcaacgtaattgttccgttggcacactgtatcactcaatcacaacttttcaaccaatcccatccaagaatcacatcaataccgttggatcctaggaccactaggttgactgaaaaatctattccttgaatcttgagattaacatggaggcatgagtgtgtggccttcatgtcacctcctcgtgaactaatgtgtaacatcttcttaagagggtgctttggtaggttatgcttttccacgaatgactcagttataaatgaatgtgatgcgccagagtcaaataaaactgatgcaggtatgaagttaacaagaaacatatcatataccacgtcggcatcctcaggcactgattctgtggtgacatgattgaccctttctctactctggttctgcggagtcttgttctgtgcagatccacgagcaggggtgttctggtcattcctctgattgttgctcttctgaggtgtctgctgg

SEQ ID NO: 66508 - DNA, 604 bp, Zea Mays
cttggtatgaatacatgctgaatcattctaaacgctacatgaaaaatatgtaaaactgccattttctgtcaaattgtttactgccacaggttatctctgttttcagtgcagagcctgacactaaagttcaacactaaccaagtgctaagatgggcatgtcatcagattggatataatagtaatgagtagaagaagcttctagcttcaattgagcatctgcgtgctgaaagcttataatttcaattggttggcacatctaaacctacaaagccaagaccaatccatcaaccatcaagaaacacccgcgtgcttggccaactgaccaccagcaggtgccgaatcagtgtgaagcttagaatctacaacaaacatgaacaccatcccattgcaaaaaccctatacgtgagatcagatagaaacaaaaaagatgctatgtgcttattgaccttatcttgttgcttctgtcggtgcattgcaatgggatggtgttcacactccacggggtaaaatagcagcccaactggaaaagagaaggtgaggattagaaatcataaaacacactgcgaattattatcacaactgtgtgttatatgtatcaagatgt

SEQ ID NO: 66509 - DNA, 632 bp, Zea Mays
ggtagtcgtcctcgcggtcgatgatgcgctgggacctcttgggcagcccgtcgtcgtcgtcggctgaccgcgggaggtcggcggcggcgatggcgtggcccgtgtaggccgcgaggcggcgcggtgcggggttggccaactccgtgtcgtcctccgcggcgtcatcctcggaggccgggatggaggtgtcgtagcccgcgaagcggttggggtcggcgcccccgccaccgtagaggtcggtgtcgaaggtgacggaggacacggccatgggcgcgccggccgccagcgcctcctccatcttgcgccgctcctcctgcgtgcgcgctagatccgcgtcgatcgagtccatggcggtggcgcgggcgggggcgagtagggtttggtttggtttggtttggtggacgaaatggaagatgcgaattgcgatgcgagattggagaagggaaggggactagctagcgggactgcggggagacgggagacgcccttcacccctgaccagtgacaacgtgtattgggttgaaatgtcggcacaatggctagatcttgtccgttgattgtcgtagacgcgatctgggccgttcatttgtggtaccgacttctccaaacaaaggcctcgcccccaaacggcc

SEQ ID NO: 66510 - DNA, 590 bp, Zea Mays
aatttacctagtgtttttgattttagtcaaaaccgcctattcaccccccccctctagccggtgtcctagatcctacagaggtcatacccttcgagtcagaggaaaaaggaacacctacccatgatttctgcgcaggtgggttgggaggcccttttctccttcttcgctcgaaggctcctcaagcgctccactaagttctcccccgcgtccctctttcgctccgcctcaatgatgacgaccaccggaaggggcaggagacacgacgccaggggtctgatcccctgcggagcctgcatcagatgaaaaaaatgacacactaggaagaaggggctcaccacggtgctcatgacatccttggaaaggcaaggggtgaatcctcatccatgaaggaccccaacgacaacatcgtgatgaccctaaccctaacctcgatctctgttagcgcgagctacggggaggaaggatggtcagggtcgttgactctggagtactggtgcatcagtttctggtgggccatcagaggttgaatctggcgatgcatgaaggtacgcgccaaaagacccgttgcttcaacgtcttgaccaacgtca

SEQ ID NO: 66511 - DNA, 698 bp, Zea Mays
caggaatgtcccttcaagtgctgttttacctgttattcgacctgcccttggccgtcagcaatcaatttctgatcgtgcaaaggctgccatgcaagaatacttgaaccatttcttgggaaacttggatattgtcaactcaagagaggtagcaaaaacacttttccgtaaaacaagtcatgttagttttgatgactgtgtaaatatatacaaagtgtattgttcatgtgtccgttagagtggatcatcatgtttctcattttcttttatacagtaacatctgttaaaatgcaggtctgcaagtttttggaagtttcactgttatcatttctgccagaatatgggcctaagctaaaggaagattatgttacagcaaggcacttgccgaaaattgagatggacagtaaagagagatactgttcatcctgttgttttagtttttgcagtagtagctggcaaaaggtactgaaaatatttgatgattttattttgttttactaaaatgatggtgacttttacatgagctgttaaatcaaacgcttcttgataggtttgggctgtactgaagccaggattcttggctttacttcaagatccatttgatcctaagctcttggacataattattttcgatgtgtcaccttgcactgatagagatggagatgaccaaaccactctagcaaaggagataaaggaacgta

SEQ ID NO: 66512 - DNA, 336 bp, Zea Mays
aaagactccaaggagtatgtaaagctatatttggaattggctctttgcttttcaagagtaacatgagttacagaagttcttaataacttgaggggcatttaccagtttaattacttcattttagctagtcaaaattaatacctactttgctgcgaactaagttttgcacctgatttctaagtgatccataccccacttgaagtatatctaattacccattttgagaataaccaagttgagagcgttgaatcaagtcatcacatcaaaccatcttatcccttaggcataattggaattaacaccatttcttatccattcaacaaatcttaagatgta

SEQ ID NO: 66513 - DNA, 366 bp, Zea Mays
cgctgagttcaaggagtgaccaagcttactacaaacttactatcgaattctcttaacaagtaacaaactgaattggataattatgtacggaaggagaaagagagaccggggtacctctgctcgctcggctacccttgatctgcttcctttttgcttggtgctgtgagattgaactctgaactttaaactggatactcagctggctgacctcctatggggtttataaacccttttacagcaccgttacatccacagaacagcactaggcttagcttgaccgccggtgaagagaagaccgtgagtccgtcaaactcgtcatttacttgccgtcacttttctgcttccatcccgttcgtctattagcgc

SEQ ID NO: 66514 - DNA, 544 bp, Zea Mays
gcgggatttgagaaatgaaatccgcttttggatttgtttttgaaatgtaggggcatgatttcaatttcggtggattggtcggttccccttcctcctctcccctatatatatgggagggggaccggtcgtggccttcaccatgcattcgcactcttatcctcaacttcctctattttttctagtcatgaccaaagatcgaaattggagcgagaggggcgaagagaggttcaagtgaggggctacttggtggcagggtaagatccacgtacctcaccgtcgtcgccttctattttcttctgtggccgagagagtcaacgtccttgtgccccacgacccgtggccctactccaccgtgaccgtggtggatctgtggaaccttgtcgacggaggtctgctttgcccctctcctatcgaagtgcgcctcgaatggctgatgcccagggatgaggaggagtcgaatccacccgaggactacatcatcagctttgtttcattccatgagcaagagtttggggtgccgtcgagccgcttcatgcgaatgctc

SEQ ID NO: 66515 - DNA, 518 bp, Zea Mays
gggaaccgctcgaggctgagcaccagcgccttggtgattggcacacccagctggaggaacgtaccaaggccgtgtcctaccaatttgctttggagcgatccgatcttgagcaggggcgtgaggaactcaaggaggacctgaagaaggtgcttgagcgggagtggaaggcgacccgggaggagaagaggctggtcgagaagaaagagcacttagaccagcgagatgtggtcaccacagaatttcatgagaaattgaaagcctataatgcgatgctggagaagcagcgggatgagcagaccacgactgaggcgacactgcagaagctgcagcaggagcttgatgacaggactagcaacatctctctcaccgaagaaaacctcaaggcaaaggatgcctccctagaggagcgggtgacggatctcatccgacaggggaaggacctcgcctggagggaggagatgtgggaaaggcgggacaagttgctggccgagcacgagctcgaggcggaggagaaggag

SEQ ID NO: 66516 - DNA, 619 bp, Zea Mays
tgatcaacataacttgtggactaatgtgtttgctagtgtttgtatttagggtttagggttagggtttagatgaattaccaaggaacaacgtagaggattattagttttattattagtttatttcttgcagttggatggtagtctttatgcattatgggaagttattgtactgtcatttggcctagatattttttatttggttttgagtatgtgtagcaatagcttgatgatttatgtttttagatgcgagtaaaatccttcttgtagagtaaactactataaacaattctgtttggtatgaagtacacaccaacatcatagcttttgtttgaaagcaagttggattaggttggggatcaaataaataagaaacaaagatattgaaaaattaaggaaagagtagaagacaatgagttaaaattatttgttactcctataaaacatgtatgaagcaagagtggattgtaatatgtgttttttattgcaaatagagtagacaactgtttaagtgtgagaacatatgtaatctagatgttaaaacatgtttcatttgagattttcttggaacatgtggtattgaaatgtttacatatatcagttatatagtgatccgctgaca

SEQ ID NO: 66517 - DNA, 411 bp, Zea Mays
cttatccttcaaagactcctatggtggtcagatctttggatttaaagaaagatccattcagaccacgggatgatgaagaacagacattgggaccagagttcccatatctcagtgctattggtgcattgatgtatcttgctaacaatacccggccggatattgcttttgcagtaaatttgttagcaaggcacagttctgccccaacgaaaagacactgggttggcattaagaatattttccgatacctaaatggcacaaaggatctaggactcttttacaagagaagtaatgatcctagtttaattgggtatacagatgctggctatttatctgatccccacaatggccgatcgcaaacaggattcatattcttacaaggtggaactgccatctcgtggaaatcgtctaaac

SEQ ID NO: 66518 - DNA, 832 bp, Zea Mays
aaactcattttgttgagaaaaatcctttgcctactgagagatttgagagttggtaattgtttgattagcaacctcattagtgcatttagagtaggtagtgtacacccattgttcttcttagccttgattagatcaagtgagaagtttgtacttgttattcttggtaatggacaaactaaaccaaaatagtgtgaaagtatcatgggtttgcatattgatttccatgtggagattgaatcatgctaatgttacatctggatccagtcgtaccatccaacagatgacgtaggggatgaaggaactttgagtagccaactagctggggaagggggtttcatctagggaggcatcaatctgtcaccaccgccgtcgttgaggatcttgatacaacttagacaatggatagaagaagagcattaatggggatgtggttggcaggagaagcgttgaacgtgcaaacgaggatgtgcgatacgtgcaagatcgatggtgccacatggaatcatggatgaaaccagtggcatattcattgcccggcaaccctgggtgacttcccgggcttctctccggtaagtcgtggataaatatatgataaatattgttggtcacttactcttggttccttcaggacaccaaaaacaaggcaacacaaatagattattttcttcttcattctttagttaacttttcttaatgagattaattaaagagagaatgtcaaagcaataagcattgaacgaatagagaaatcagagtatgaaaatgaaagtataacaaacaactcatctcgaacatatgagtataattcttctttattcctttattaacagaa

SEQ ID NO: 66519 - DNA, 708 bp, Zea Mays
tgccaaggtgccaaaggtgcagccgtttggagcagatggcggacccgtgaagaccatctaggtcggcgcggactcctcccagaccacccgcatcgcgggcaatctgggagagaaataggaactcgcgctcatcgccttcctccgggtagatgtcgatgttttcgcttgggaaccgtcacagatgcctgagatccctagggaggtgattgagcatcatctgaagatccaccccgacgccaggccagtgagccagaagcctcagagatagtccgttgagcggcaggacttcatccgtcaggaggtccggaagctgcttgacgccggctttatcgaagaggtccatcacctagtgtggctggccaacccggtcatcgtgccaaaggcgaatgggaagcttcgaatgtgcatcgactacaccagcctgaacaaggcttgtcccaaggacccgtatccacttccacacatagatcaaatcgtggactctacctccgggtgcgacctcttgtccttcttagatgcctacttgggtttccatttgatccggatggctagggaggataggaagcataccgcttttgtaatagtggatgggctctactgctatgttgtaatgccctacggtctgaagaatgccttaccaacatttgtatgggcgatgagtaagaccttctgggacctgattagggacaaggtagagatatatgttga

SEQ ID NO: 66520 - DNA, 390 bp, Zea Mays
ggaatttgcacataatggtgatgacctaccaaccaaccgatccaagatcaacggtctgcaatccattgagcgaaagggtatagattttctaattgtggccgctacaactggatccaacggttgcggcaccttcctaccgccttaccgcgttcaacacggtggcgcaagaccggacgaggcggaccatcgttggaggaacgcaatcctaggcaatactgcaccaaattcctgaactcgaggttctatgcgtaactgaattgataacgaatcgaagggagcaattcttacaggcgcggacaactcaccctaatcggtcggcgttgtgacgtggacggacgacggtgcacccactccggtgagaaattcctggactttcggtgcgtagcgcac

SEQ ID NO: 66521 - DNA, 438 bp, Zea Mays
aaagaatcaaacgtaactataggttgggtagtagtaaaagataggggacgaaaagtcggtttgggtttcggggaatggaacggagattaaaaaaacaaaagctgggtcacatggatctcaatctcattcgtccccatgtggactgtagtaccgtaccactaaccatgtgacggtactacggtagcctttggttttgactggattgtgtacaggcggccgcgcgctggcacgagtagctaccagcaccagctacgtacgtgtacgtagctttgctagagctgcccgtaacgtaacgccccctgttgacatgcggccttttgttttcaagaagatcggctggaccagtgtgagagccttagcacactgcacgtaccaggatgggtcagatcacttggcggtcacaaagtccgcgccagacgccgaaatggttaagctgct

SEQ ID NO: 66522 - DNA, 1066 bp, Zea Mays
ggatgatgatggtgaaggccccgttcaaatttcgcattcggatgtctgggatgtggagcttgtatgatagggatttcgtcctcttgattttgtggtcttatttggagctcgtaggatgggaattttgtcttctggatgctgcgcttcttgtctctgctatcgtgatgttggtggtgcagttaaaatttctcgttggaatggttggggtttggagctcatagtatacggattggatttcgtcctcaggattttgcacttatgcattgctgtttgtgcagtggtattgtgcattgtagtttgcgcagtggtattgttacaactcaattttttccagagtgaactgatacattcttttgtgcgtgggtgggaggaaggttattaggcttggaatgactgatcatgtttgaaaaacaaaatatcgtgctttgttattgttagttacacttcatgtagtagcactacagatttgccacgactatggctgtgcagtagaccagtatccaaggtctaacagattaacatgtgtaaaatgggcagctgtatgtgctttgtcttagtgttagcatgtgtgcttgagtgcttctaagtttgcaggggcatactgcacaatctgttgatgttgttggagtccgcaagcatctgaaggggtattgagattgttttgattctgataacacaaaggaaggtgctgctgtggttgctggaagctgagaccactaaactcattaggacacactgattttaagttattataggcttttggtgtgccattgctactatgccttcactgatttgttgcatttgtcttgacaatactctctttttttctttccacctgtctggatgtttttccctgcgttaggaatgtgctatttctttcttatgctgtatgcctcaaaatatagcacaatatccacccagtactggtgattttggcaatgctgctggtaaaaaaatgtcagtgcataggagaagaaagcgtttaagttccaagcaagttgaaataggctacagtttaacccaactgaaaccaaagtctccgttagtccgttggatctgtccaaac

SEQ ID NO: 66523 - DNA, 621 bp, Zea Mays
ctcgtaccggctaaaataagcaatggctggtgccctaacttggctaagacctaattcaacacctaacaagcgtttcccctcaattaatttcatagctcgagctctaaatcgccctgtccccgaagacagcgcagacaatggatgaacaaacgtgttcccggtgatctagggcattctagctcaatcgaacgggtcgaggagcatcaggagaacctaaggatgctgaaacgggagagcagagagtatgatcggacctgaaacaggctagccacggcgaagcccctttcacggtggcggaaacccgatttgatggaaatgagcaattcgtggattctggtgagtaattggaggcacgagcgggtggattggatgctggaatacctaacagagctaagggtgtgctcaatttttagggctcttgagcggtggccggtgaatttgaactcgcgcggtggtggtcggagaggaggagaggcactggcgcacgcgattggtggccattgtcgtggcaacctcaccggcgatcactggataggctaacatgagtcacggcggtgtggttaaagtgtcgaggcacgtggcacaaggccgcaaggtgtctaactccggcgagggtaaatc

SEQ ID NO: 66524 - DNA, 812 bp, Zea Mays
tttacataagcatggcaccgggataagttttcaaaccaaaggaacactaaactatatactcactacttagaaggttacacgctttaaaacccatacgcttgctatctaatggttagagaaataaagattagaagcagcataatgtcagcaacgaacgccctgactgtaacccatgtacataaatgcagcataactgcactcaccggcaaatactcgtcatgatcttaaaggcagtctatattaaatgggtccaatctatcgttgcttcggtgcaattgctgacaaggtatcattgtggtggtggccttcttgtacattgtttcttctctattaatagatacatgccattttgaaaagaaggatgtgtgcacttactagccaggccatatgcccttggtgcataggataccaagtttgtgtatcatgggattgagaggcaccaggaatctttgctacacaacgcagtaggattgaggtgcagccatcaaaccaacgccgcacaactttgggacttgtttagtaggactcatatcgtggattgagttcttggactatatacgtatatacggttgtaggtttcaagaatctagaacctgactttgcctactccttctgcatggcggttccatttggttgaacttgacttcgcctactcctaatttgtttaatgatgttattgagcatctcaaattgaaagagatagagatgttgggtcgacaatttacatggacaaataatttagacgcaccaacatttgagaagttagatagagttcttatgagcctagaatgggaattaaaattccctaaatt

SEQ ID NO: 66525 - DNA, 517 bp, Zea Mays
ccgtctaatcagtctaatcactagtgtgtacacttaccaaagtttacatttcaatccaagtttcagtccggttaatctatctctagcatatcactttccttgtggaaaatacgatacctagaatactcctgatgaagggtgcaatcgatctctgtgcgcttacggagtaaaatccaattggtataagaaccaccaacaagcatgcaccacaatattcaaggacacctatagcagcatggagggcatacttcttcaactgcgcacgacattaggatctcggactgacgtcaacaacacacccatgaatggtaaggtaggaggagttatggcttagctctcacctaacaattgtaaccctttcccttagtctataaaagggaagggcggccctggtgtaaggggacacgacaaaaagaaccagcagtttggatagaatagacacactaggcaagctcaaacagtacataagaacacttagttgttttcatcaatccaattaaaagaggatgtatggtat

SEQ ID NO: 66526 - DNA, 433 bp, Zea Mays
ccggaatagcacaagtgcgcaaaatcgaggccatctccacaagactccacgcaaaatacgcctacgggtgcagccggtctaaataaacgtggaaaatcaaagatttccccagaaacacccggacacaagccgcctacgggcgcggccggatcaacgaaggcacgcagcctcatcatacaaatcatagttacacacagcgagggcatcacacattacaacggctcaacttcgggatgatacccatctccctatagttgaacaacattatcttcaatccctcaccctcaaaaagatttcgcaactcaccctcacctacactcgccccagccgacgaagacaacaattcccgtttggcagtcccgtccactcgaagacgaccaccctctacctcaccatgacgcctatcacttcgtgacaactcactcaccctccg

SEQ ID NO: 66527 - DNA, 369 bp, Zea Mays
caaatttacgttcttctaaatacaaaaagtattgtgtattaaatgggtacatcatctttttcggccttggaatcacctttactatccggatcccaggtgtccaaggtctttgctacagaatcattttcctatgggagaaaagtaaacaatcccgtcacctagcaagggcacaagcagcaaaaataaactaaaaacaaggcggcacagagcaacaaagtcgatgtcatcggtacagtcatggctgcaaggaccctggtggctagggcggtagcattcgctgtggcccccatggtttcgctggctggttcccagatctcctccgtagcgctgccaaggacacgcaccatctgcatcgacttccacctcctt

SEQ ID NO: 66528 - DNA, 912 bp, Zea Mays
cgtcgtatcactcggcatcaagaaactgatggtatatggtgactcgctagtggtcataagccagataaacaaagactaggactgctcgactgattccatgggcaagtactgcgcagctgtgggaaaactgtaggacaaattcgaaggattggagttccatcacatggaaagagaccgcaacgcagcagtagatgcgttgtcgaaactgggatccagtcgggcccaggctccacctgggatattcatccaagaaatatcacaactgagcatcctctcgaatcaggtggaagagtgcaacgccttgagccagccagagtcagaccctaacgactggagagaccctgtcatcatgtacataaaaattaagaagagccggatgacaaggctacagtggaacgcatcgcgaggcagtcagcccactacaccatcatagggggcttactgtacaggagaggtggagcaggagtcctcatgaaatgcatccacccggctactaggaagcaattgttagatgaaattcatgccaggccgtgtggggtacatgcaacatcaaggactctggtcgggaaggctttcagatccgatttctactggccaactacaaagagtgatgttgccgagttagtccagaagtgtgaggcatgtcaattcctatcaaagcaacaacacttacccgcgcaacagctgcagaccattcatgtaacatggtcgttcgcatgctgggggctggacatgattggacctttcaagaaagctcagggaggctatactcatatactagttgccattgataaattcacaaaatggatagagtacaagccaattgcctctttgacctcaaccaaagcagtggagtttatacaagacataatattcaggtttgggataccaaacagtagcatcactgaccta

SEQ ID NO: 66529 - DNA, 1419 bp, Zea Mays
cttttttgcaggtggtgactctgagcgaaaaaatcgcttcactgtatgattgttaccgctgctaatatattaactaatctctggatctgctgcagagaagcagccgtggatggacaagctgcacgttttgcagaagcttgctgccgacgaaaagacctcttcaaggatcttcaaagctctcgctgatccaccaacaactagcctccagcgccttaaggtgatcctaacattcaaatcgtatcattatataattttttctcctagaaatattgtaatgtgatccaaaacggtacttcgtgggcttaacagaatccttttaaaactcaatgctcaggctctcaccacgggtggactccctacctttattgatgtcggcaatagttttggtgctcctgcaatagtcgaagataatataatgcatcaggttcatctcatcccacattcaattttgtaccgactaggtccaattatttctctacagctcatgctggtttgctagccatgatgatgtgatgttttctgttccttggggatcaaccagttggctaaaaatggaaagagagttgtcatgatgggggatgatacatggatacaactgtaccctgaacacttcaacaagtcattcccatacccttcctttaatgttaaagaccttgacacagtatgagattctgtcaatcaaatccttgttcttgttttttgatgaacctcttagttctttcttttaagtttgactgaattatcaattatggttgtatgccaggtagataatggtgtaattgagcacttgcttccatctcttcacaaaaatgattgggatgttcttattgcacattttcttggagtggtaagttattgtgcattcaatttggacttacctgctatttgtcatccttttatctttagctggaaacttgtgagatcaactttgtttaggaccatgcaggacatatatttggtgttgactcaaccccgatgatccagaagttggagcaatacaatcagatcctggaggtcagttgtctcatgcatatactattcttctcttcttgtgctttttaggaggcatttagcattatcttatctatgctctccacatttattttccaatcttctgaatgttctacagtccattcttattttcttctatagggtgttattgacacattgagaagtctatccaaacctggtggtacccatgagaatactttgcttttggtaatgggtgatcatggtcaaaccctgaatggtgaccatggaggagggactgctgaagaggtgatcttctttctgtttggctgtgagtacatagcaatcacatttaatctcgtgtgaattgtaggttgaaacatcgctgtttgcatggagtccaaggaccccaccagatgcagtcttatctgttcttgatgatagttcgtg

SEQ ID NO: 66530 - DNA, 691 bp, Zea Mays
cctagagcgagcgactcgctcgtgaagctccccgatcatatgctgaggtgggtgatgacactgaatgtgttgtagagccttcctcgagaaagtggcctccccctcaacagcagcctgaccgcctccaggctcaccagactcaggctcatctggaccttgagttgtggaagaagtgatgtcatgtccatcatctgagttcgtggacacaggctcaattggtgcagctggtggagtcgaatcgagaccaccctagttagctttgtcgtgctcctccataaagatggtctcacccatttgatctggacctataggctcggctcaaagacaggggatggactaggcgaagtctcatcaaaggtcacctcacatgtctccatgattcggttagtctcaaggttaagaacacgataggcactaaagtgtagagcataaccgagaaaacaccatcagaagactatgactcagttttgtccaaatttccatgttttaagataaaacacctgcagccgaacaccctaaaatggctaacctagggtgaccgtccaaaccatagctcatatgaagtcttgttcaagaaagctcgaagaaagatgcagttcgacacatggcaggcagtgttgatcgctttggcccaaaaatgcctaggagttctatacttatcaagcatcgtcctagccatctcaacaagggt

SEQ ID NO: 66531 - DNA, 1296 bp, Zea Mays
acttcgaacgtctatcaatgacattctggaagcaagaccacaaggtttgttggacagggatgtgtgactataagccacgctgttgtgcattttcagaagggaaggaattggtggacaaattattgtactcctacgaagacttgtttgcataaccctgcggcctaccaccagcccgacgccatgatcaccacatcaaattactgcctggcacgacaccaatggttgtacgttcgtaccgatacccctagctcttgaaggatgaaattgagaagcaatgtgaggacatgctgcatcgaggaattataagggaatgcacgccaacattctcttctccggtgctccttgtgaagaagtcagatggaacatggagattctgtgtggactaccatgaactcaatgggaagacggtgaatgaccatttccccataccagtggttgatgaattgttagatgagctttagggttctagattcttcaccaagctggaccttcggagtgggtaccaccaggtgcgaatgcaccccaaagatgttgacaaaacaaaattccgaacacaccgaggccactttgagttcctcgtcatgccattcggcctcaccaacgccccgtccacattccaaagcttgatgaatgatatcctcaactcattcatatgcaagtttgtgctagtatttttcgatgacatcctgatttatagcaagacgtgggcagctcacctccaacacgtcaagtaagtgttccaaacactgagaacacataagttggcattgaagcgctccaagtgtttttatggggttactagtgtgtcatatttgggccatataatctcggcatatggtgtggctatggatcctgagaaggtagcaacattagagacttagtcgcagcccagaactttaagggtgctacgtggtttccttgggcttacaggatattaccggaagttcattgcaagctatggcgaaatcgcagcaccattaactgtcctattgaagaaggaatcatttcagtggtcggaggcatcaacaaaggcattcctcgcactcaaacaggcacacatgaccgtctccttgctgcagatgcctgacttgagcaagagttttgtggttgttccgacgcgtcaggttccaggtttggggcagttctccaccaaggtgcacgagcgtgtggcatattttagtaaagcggtggccagtggcggagctctataaaattaacatcccgagccactctataaaacttgaaggttactttaaacagcccctaatatattgtgcggctaattataccgctaaa

SEQ ID NO: 66532 - DNA, 487 bp, Zea Mays
aggccaccgaaacatttaatcatgcatcgctggtacatgacccccgcattctttagtctttacaccaaacaacatcgtcacatagcagtatgagtcaaaaggggtgatgaaggaagttgtgggttggtcggatttcttcatcgtgacctggtgatagcccgagtaggcatcaaggaagcttagaacctcacagctggaggtagaatcgaccacctgatcgatgcaagggagggggaatggatcctttgggcatgccttattcaggtcggtgtaatcgacgcacatcctccatatcatgttttcttttagaccaacacaggattggctagccattaggggttggttaatctcacggataaaaccaacaacgaggagcttgacaatctcttccctgatggccttgcatttttcttcgtcaaagaagcgttcatcgaatccacctcctcctgttagtcggctcctcctcttgttcgttggctcgtctcgg

SEQ ID NO: 66533 - DNA, 682 bp, Zea Mays
ttggccttatatacacaaccagagagttatccctttacaagttgtgaccactatctattctgttgatctcctcctttatggtggtttgtagtcctacatatctggagtccaatcaccttcttagctgagtcatcgtcgaatgcacagctcttcgtgtgcgcgcaaccgcatcacctgagatatcagtgctttggcagcacataactcggacgccagtctttgtcttattggatcaagttctcccgacctaattataacctgctggcccatcccacaagccaaaccattaggaggcccattaggcggccgatgacacgttttagtgttcgtgaggactcggaggatatctatccctcacaactagagattaaatggattagaaccattattttcatccataatccatttaaaacataaaatacattggagaatacattcaaactaacttaagcataacgaaagtcaactaaatctaagaatcatccttccttcaccgcatgtggggaggctcctcgttatcgtcgttctcctcgtcatccttgtcttcctccttagcctcaacatctatgtcatcaatgactatgacaatagtgtcattggcagtgtcattcgtggctccacaggtgtcgtccctcgtggcaagctgcaacgaggagacgagaaataatacttaagttttgaa

SEQ ID NO: 66534 - DNA, 769 bp, Zea Mays
ttctgctcttcatggttctcttggagacacaacttgtcaaagcaagagcaatctggagcaaagactgaccatgcagccatctatctgtccaaaagagcgtgttggccccatttccaacaatagaacaaatagaggctgtgaagagggctgtatcaaacctatgcgcctttattttttaaaatcatcccagggcctatctggttcagtttccttaagccaaagccatctcaagttaaaggaccagcccagcacctccaagttatgaatacgcagccctccatgggagatgggttggcagacctttgaccaaccaacaacacaatgcccccccaacaacacaatccctataacagtccttcctttccaaaggaagccccttcgaatcttatctattgccttgatcacccattttggacattgcaatgctatgaggtgataaatggggatagcagtgagtacagccttaaccaaagttgccctccctcccagctgggtgaagacaagcagccttccagccggcagctttgcaacgaccttatcaataagctctaggaaggaacttctagggagcttctttactgagagaggaagtcctaagtatttgcacgggaatggaacaacattgcaaggtaaaacctcctgagcagcaccaatgacatgaccttcacattgaatgggtgtcatactgcacttacttatatttgtgaccaggcccgatgcctcaccaaacaccctcagaagctccttaaccattccaagctcatttctg

SEQ ID NO: 66535 - DNA, 1130 bp, Zea Mays
gcaacttgagtcagttttaataaagaaacaaagaaggaaagctagtccttgcaaagttttgcgatactttcctattaaagataggctaaaaagattgtttatgtgcaaggatatagcacctctcctaaggtggcatgatgaagagcgcataaaggatggtgcattacgtcatccagcagatgcacctgtatggaccaagttcgatgaaaagttcgcaatttttgcatcagactctcgtaatattcgttttgggttggctacagatgggtttaatccatttgggatgttgagcagtactcatagttgttggccagtagttttaacagtatataatctacctccgtggttatgcatgaaagatcataatcttatgttgtccttaatgattcctagtcctaaaagtcctggagacaaaattcatgtgttcttggaaccactattggaggacctgaaagatatatttcagaatggcatgtccacatatgacgcatcgagagatgaactatttaatttgcgaggggctgttttaatgacaacaagtgacttgccaggtttaggaatgctctcatcacatatggttcatggcaaatttgcctgcccgccatgtggtgacaatgcatggatgaaacgtctaaagcacgatcgtaagtcatcttttatgggacaccgtcaatggctttatgaagagcatccttatcgttttgatgcagattcatttgatggaacaacagagctaagatcagctcctgtgacctattatgatcgttcgattttgccgaacataatctcactgggggattttaagaattctaaaacttacaagtcagtaagtagcctcttcacattgccatattgggatgataatattcttagatacaatcttgatgtgatgcatattgataagaatgtttttaataatctacatggtacacggttcaatttagatggaaagacaaaagataatctcaaatctcgtctagatttacaagacatgaacattagacaggacctgcacccccaagagaaacctttcggcaagtggtatttgccaccagcaagatatgctatgaataaaagtgagaggcaagcattaggtaaagtacttcgaggaataacagttcctgatgggt

SEQ ID NO: 66536 - DNA, 434 bp, Zea Mays
caaaaagtgtccttcactagttgtgtgtcccaactatcatctctagattaatcgattatgtcactttaccaagaaggctaacacctattagggttattggccttctagacatgtcatagggaaaccaaaggccatacgatatgttcagattttcacccatctcaaccctccaaatgagccctagcttccccgactgggcttcaagacaagacttgtcggaatagtacatgtcctatagcacttgtgagcttgcttactcaaaatcgccatgttaaaagcttggaaatctctaaatctgagccccgtactttttaggattgatcatcacctcctgacttagtcaatggatcttgtgttttccttccagatagttacaccaatagcgacaaatcgcggaactaatttggtcacacaaggtcttcgtaacatcaaag

SEQ ID NO: 66537 - DNA, 1098 bp, Zea Mays
ggcgggttagtttgtaataacccgaggggctccactataaaatagccacaacgaaggggtactgatcagttctggccgttggatcttacatcaagggccataattagatcggggaaggttatgaaccggtatgcgttcactgccctaggatcaaagatcgatcgcccgaaatcgtccacacattgttgtcacccgaaccacacgtcaggcaatcaacaacacagattctatgcatcgaaggtgtatcgctatcttctgatccgggccgtcaacacagagatctagggttgagcgaccgtcttccttctctagcgtgctcgacggcggcgcaacacatcaccgtggcagcgcaaccactgacaacctggccaatcaacccaattgccctaacctaaatgctaatcggtgcaaacggaagacacggagatgcggaaccaaatggagaccatcctacctgaaacagtggtgatagccgtgctgcccacggcacgagccagattcatggcgacgaaaaatgctctgatgaggaattctccatccacagttggtcatttcccacacgggcgccacgagtgtattcccagggatcgagcgaagctctcgggcccgacagggagtccccagtgatgacatcatcgcattcacgacagcaacccgatccccatatgcggcggcccatggcgacgaacccttcgaaccccctgacctcttcctatctcacagtattgttggtgatacacagcttcatgcgatggctttaaaggtgagggtgattggattacatagtcggggatgaacttgccgtcgcatagctcagattaaggccaaatcggccggcggagatctcggttgggcgactccaagatagttagactagctaggagttagttgggagtcttgcgcacgcaatgatgcctgagagagatggctggcatgcagggcccaagcaccagcgagtgatggaggcgcaggatccatggcagaagtccgcaacggccacggcgtgaggttgatgttgaccgcgtgggcccaacctgtcaatggcaaaaggcacgcagaccgtgtagtcgggacttgtccagtggggcccacctatca

SEQ ID NO: 66538 - DNA, 2281 bp, Zea Mays
cttgataagtctttaatagagtgtcattatatggaactacccacctattatccaacttgtgaccccctttaatgacgtagcggtcattgttccgtcgtctgtatgtagcaaatccttgttcgtccaggttagtttcttcatggaactcctttggataattcttcgagcatctgttatttttcatacattgagaatttggatttaatgctccgcatggaccgtggatcatatgttctgccaccaaacagtaccctaaagggtcgatgcttggatctggaatctcagcactgatgaaagaatcaataaagttggatgtaggctccgaagtgccatttgatacccaaaatatgatatgcgagtgaggtaggcctcgtttttggaattcaattgtgtagagcactgcatggaaagggtgttagaattcatggtagattatgtaatacgtggggaataattgtctggttttttatgtacggtcgtatgtgtgttgtgggatgagaacggccatacctgcagtgcatgatccaaaaatagatccatttcttatgtcatgcatcaaatcatttaatttcatatgataaactcgaactataacattagatctatcgggagggttctgtccattttcaaacatgctttccaaaatttcaggccagtttgcattgcatgtaaaggtgacaaaaaaatcaggtgggccatgaactcgacagatagttatgatgtcatggtaattttggatcatatatcttcttcctcctgtatgtgacgcaggaaggatgatagttttgccaacttcctcaccactaatacaaccacgactaatcgcatctgtgattccctgtatgctttccatgcgcaggtttttttgattgttaataacatagttcaacctattttcatcgatgcatgctctagcgtccactttagcttgacttgataataaaccgtagcatagatatggatttggttggttttttctgtaatgaaattggtagcaataatattcttgcatggtcatgtgtcttcgtgcattgttgtcatttgcacataaaccattgtataagattccaacttggaagccatgttctccaaaaggaaaaagcaatggatactgcagagccatataagctaggtgaagtgaggatattcgtttgagttctttgcttttagtttcaataataatatcacgtttgaatgtgtccaaagagaaatccccaacaatcaacatagcaagttgatccgttgttggcaaattatattgtacaggatcaccctccttagcaccaatgagtctaataataaaatcttcactttcattatcagctagacgatctcttgccatacggaatttttttgcaaatggattgtgatcatcaagcatttttatcaacccattgactataacagggtccaaaccaccatcatttctgtcgttattccccaaagagttcattctattttgaatctcatttgcagtatcgtagatgtacagttgaatgaatttaggtgaggatccatctgaaggtaatagagatcctatacgatgatgaacctgtccacatattttgaatagcggtggaccacgaccatcattaacagaattatctatctgagcgcccattgatgtgaaagcaaataagcagttgtattgtcttatgtttctgataattttttttgaggttatgtcaccatcgaaccttgcaagagaagatagaggttcaggcctaggtctatacggaggtatgataatcttgccacctttacaacaattgttatatacaatagatgagtctcgttgccgattacgaactctttcagcataccaaaaaatagcatggcagtgagagcactcatactcaggttttccgaggtgcgatctgtttggatatgaggctgtgtttgattttggctgatcggttcgcacgatgttatttgaagagaaaaattgtgaggaattgagacaaagttagtaaccaattttgggaaggaaaatatgatgttaaaaaaatctagtacgtaacagttgtagttagtaactatttgttttttatgtttaaggacaatgcgtgttgcattaccttttaatgattgtatgtactcatcagagaagtaagcatattgcgacaacgctggtattgtcgacaataggccttagggaaaaaaaggacaaaagtaagttagtaatatagtttaataatttgtgtgagagcatgaaacgattaatattgctattttttgttagttgtcgttacctcttttagcaagtctgttctgattaatc

SEQ ID NO: 66539 - DNA, 493 bp, Zea Mays
cgggtacacattgtcatctctagtcggacacagtcatctcatccagcccgtgcgtgacggtcacacgatccgcttctgagtgtaggaatagcgggaagtcctggcgtaggtaggcagtgacgggtcggcgtcgctgatgagcctgcatagctcgtccctggactctgctttcacatcgctttgcagctgtgccgcttcaccagccgcagcagaagatcatcctcacagaacgctggaccatcatgcaccagcagatcgaatcttacgggcccatgctcccatacctacctttggatccgggctcagattctggacggcgcaaattgcagcgcggataagattcacctgctgcaaggatggatcgaggtttcagtccgtgtctcccttcctctcacagaatctcgcgaaatttctggaaaaaaaaacaaaaattaaactttcatatttttcgggaaaaaaacagtcgtatctttcgatcgaaatttacttcgtc

SEQ ID NO: 66540 - DNA, 490 bp, Zea Mays
gaacgtaacgcgcttcgaatctgctacgcgggactccagggcggcgacgcggaagtcccatttgctgtcgcgagcatgaaaacacttgtccaacgccgagaggagggcgcgtgtttgatgatctagcgcctgggtgacggtgatgttggtgccgatggatggagaagactccatggaacgaggatccgaggaccgatgaatctgataccacttgttagcaaccctcaccgatagaacatgaatcactgaaccagacaaagcataactcaagcaacaagtgctggatagatggagtttgggaaggaaacaacaagtagggaaatcacagctagaaggaagatgctataatgttctagatgatccgggtacaagagagagttggggaaagaagaacagcgctagacaaagtaggaagatgaatagtaaaaggttctgatattttctccccttccttcgtgctgaccttcactgcacctttgtagtatttttc

SEQ ID NO: 66541 - DNA, 658 bp, Zea Mays
atgattggctatttcttcctgttgacggattcagcaggtaagggggactgtggctccacatgggaatcctgactaggagggggcaggcacttggagggaatcttgatcgagacagtttccatgctgggctcaacgaaggcagagatagcaccagacaataaaaatttcttggcccattcaaaggagtccggcctcaacagcaagcccatgaagaaagcagcccacacctttggaacaagaactaagtctgagttggtggggaacaaatcagcccaagaagaaaggcgctttctagccaggtagtcttcatatgcaggatcatggttgggctgctccaagtgttgcatgaagcccacattgatgttttcctcaacttgcatgttctcctccccttggtcgttgtttccctccaaaagcatacccgctgggggaaaggctggcagagcaagaactgcatccacaggttctgggacttccacctgagggaaatggatctcttgcgggataatgacatcattgaagagacccatagactcatcggagggtagatcttcaaggcctgagagctgataactgaattggtcctccacattattatcatttggcactggctcaggaggttgaacttgttgggcttgttgaactggccaggcatccc

SEQ ID NO: 66542 - DNA, 472 bp, Zea Mays
cgcctttatacatatttacaacaatgcccatcaaggcattcaaacactatttgcaaatgatataaggataatatcgtattttctctatcttcgtctttacaagtctcagctttcattgtttagtgacttcctttttgactcatgctcgaagtcatcgccttcggcaccgtctctactgcttgcttgtagacgaagtgtctttatttaatgcttcagccgaaggttagcttcgtctgtaagaagaaacattcctgaaacacatttacttatgctgaaactatgtgttagtcagctaattttctctttgtcagcaagttatcttcggcatagcattagtcgtctccttagggaagtcatgcaatacagttaatcagaggaccttcaacaatgtaggcccccaatcagtgatctttggcataagaggccccaaacactatctatgcacctattgttttttctcctactaacttct

SEQ ID NO: 66543 - DNA, 665 bp, Zea Mays
aggtgtagtggccacttgtgtatagtagattcgcccaatcttctttatattcttgcttgctgcattatttgtcgtgtttcccttgccttggcttgaactccctgggttctgctggtcattggatttattctgcctcggatatgggcagtctttggtaaaatgtctagacttcccacaattgaaacagccggttgaagaactcgggagggcggggaaacgagcaccaggggcactcggctgagttgttgaaatgggggcagtggcaaggcggatgaagacaggctgtttgaaggggtaggagggtggacgaggtgaagaacggttttgattgaaaggtcggatcaccaacctttgtcgcttttcaggcccctggttgggcctatcacctccaaagccctttgacttcccagggcctgcatgcttagcttcaactgccagcgcggtgctgacagccttgctgtaggagagatcaagacaagtggccatctttcgttatagccggtcattgaggcctcacatgaagcagttcttcttttttaggtcagtattgacctgatcaattgcgtattgggacaaatgattgaatttgttgagatactgcataacagtatctcgtccttgcttgagtctcatgaattccgcttgcttcatatggagcacccctt

SEQ ID NO: 66544 - DNA, 781 bp, Zea Mays
cctccacaaaataagagcaactgaaattcttttgtaacttgtaagctcaatagctcatgaccctagtatctagtcaactactacggctattagtggagtaaataactgctgagaaaaagggaaccttcatagctgttatgttgaactgttgcattcttgggcccaactggattttcaactttgcagaaagaagcagacactggatacggtacattatggaaggcacaaatgagaagctgaacaaagtatttgctgacaccggtgccatgactattttgcagagttcaggtggcaacttaacactcgtaggttctgaaggaaggaaaaagataagttaacatcataatagcctattaacagcagcaggatcacaggttacagctctaacttctaacctcattctctgtctttggagagtagaaaattacatgtgcctggaatttactttactaattactccctccatttcagtataaggtgcggtttgactaggtgtggtttccaaaactatactttgacctatattttttcttatactacaatgtttctggcaacaaaattataaccatatgtagtttttcaaatactaaaccaatgatgtcacttttgtataacaaagtttacatcttgtaagcctaattgttggttgtaattacaaagtttgaatcttaaaattagtgcccaccttataaaaataaatgggggcagtactaagcattggtttaggagggcatgcatttgagtttaaaagaacagaaaagctcggatcattaaactaacg

SEQ ID NO: 66545 - DNA, 848 bp, Zea Mays
tggcttctttgaagctagttatctgaagattgatcctacgtcatgaagatcggccatcgtgacacatcagattggcaccgccgcgaatccatcccagtgcgtgggcgagcaccttttctaccttctactccggaaataccctgaccagcgtgttttgagtcggattaggatctcggtagtgcaccgtttggggcaaaccaactcacaccggtgatggcaccgccgtgtaggcgcggccatcaccatcgtcttgcaccgtgttgaagagataatcggggtcattgaagtagtagggagcggtcaagattagatcataggatacctcttcgcgagattaaatctagggcgtcgtttcggtgatgggtggtttagatcggatcggggcgtggttgtcccatgtccatcgatatcggatatgacggttggaaacacgtaccgattcataatccacttagatttaatctgggtcgcacatctctgatccatcggccagaaacagaggataccccttccactacaccaaaatcatacacttcctaatgttttggtgtatcaacccgcagtccacctttatacacagaaccttacaatcaggcccgaaattttatgaaattgaccatgtacttcttcaaaatagtatctgcagtccactgaatttggtgttttaataaaattaattcaaaaatgatttgtagtgtaaaattaattccagaaatttgtttaattcataagtaattcattttaattcctttttgacccattccagttgtattaaatttgtattaatattgtttatcatccagtaactttgttttattatgaaacatagattaaaattattcacttag

SEQ ID NO: 66546 - DNA, 717 bp, Zea Mays
acaggcattggagcagtccttatgcagaatggacatccacttgcatttttactaaagcactgggcgttaaaaaccagggattatctacatatgagaatgagtatctagcgatcttcatgtctgttacccagtggagagtttatttgcagttaactgagtttcacatttacacagatcatcaaagtctcacacagctgaatgagcaacatctccatacggtattgcaacataaattatacaccaaacttgcggggctgcagtaccgtattatttataaaaagagcacagataatctggcagccgacgcattatccagagtaccaacttcagcacagctcagtaatatttctcaatgcactcctacttggctgtaggaggtactccatggatatcagaatgatgagcaagcacaacaactgcaaattgagctggctgtaacaccaacatgtccaactttgtcgttctctctcacacaaggaattatccattataagggcagagtgtggctaggaaacaatagtgttgtgcagtccaaggttatttaaacaatgcacgattcagcgcttgggggcattcgggttttccggtaacatatcgtcgcattaaacaactgttttactagaagggcatgaaacaggacattcatcggtacgtccaatcttgcagcacctgtcaacaggccaaactggacagatctcgctacccaggactgttggc

SEQ ID NO: 66547 - DNA, 526 bp, Zea Mays
ctttcttttggtgaattacatagagtgcaaagtagaagctattacggcctcatattatactaatcactttgctatagtgtttgtggccatgtggatataatttttatagtctattcacacccctctagctaccaaggtcctttcaaccatatctccatgacaccacaacacttcaccttgatatgaatgttcttatttagtggatcagccaagggaaggttgatcttcactcttttggaatcatttatgaattccacaacctctagaataggactcttctttttgccaagcactcgaacaaaggaattagtcatcatgcccaccaggatgtcatagatatgagtccacactaggagattcatgacgatcacatttgataattttgaaatacatcatatcttaccaagatgggggtgtctcccttgtgtttccaaggaccccttgtaacgccccgaattttttgcagttgaattttttctttctttactcgccaaaattcgggcgttaccttttctttttctttttc

SEQ ID NO: 66548 - DNA, 852 bp, Zea Mays
tgatactgaaactcggttgctacacaggttccgacgtctgggcctgcgcaagcaacccctactgatggtattaattttgtggcggtcacgaacgcagtgcctgctaatgatagtttttctggttctgaatctgggtctttttcatatctgatggtggcgagtttgagagcccgttttcttggattgaagagtcttcagatgaagatttggattattttgttgcgttagatgtggccgcggcggagtcttcgctgtggctagagatgggcgaaacgtttgatcccccggctggggcgaggatcgaacaccgtcaacgaaaagtggtggcgaagcatagtgttggtgagagttcgcgaagtggtaggcgccggatggggttggagcgaactcgtcttcgtgtatatcggggtaatcaacgcgacttgttgtctttgtcgtttgggacgagtattggtgagggggacctacggaatttgtttgagggtggggaattgaaaatgatttttgtttaattatcgggaggcgggcattatcccgaatgttgagccgatgtagaatgtgtgatgccctcgcttgtcgtgaggtagtagaggacgcaattgtatttatttgtgcggtgggtctggtgacccttcgctgtgtgtatgtaatctgcgacttgtattgtaatgtggcctgttgcccttcgcttggcagtgtgatgttgtaagtgtctggcggcacccttgggcgatttttgcacggggctgtcttgtgggaaagactttgtgtcgcacattactgtgcttgtccggctgcacccttaggcgacttttgcacggagttgtcttttagtaaaagacttcgtatcgc

SEQ ID NO: 66549 - DNA, 953 bp, Zea Mays
gagagacctatgtcatgactatgtttatatactattgaataaagtattgtttgaataactatcatttacatcgattatcacgtatgtgacttgttcgtgaaactatttgttgattatggtgttattctagatgatccctagtccatatccttatatgagataatgagtacgcatggactagcacatgtattaattgatgatcatgtttcacggatcatggatatagagatatcaggttaataatgtgaacacatgttaatgaacatggtgttggatcgacccaccccgaaacactactaggattgctattatgtatgtgccatcagttgtttttgagtggtacacctactagaacctaagacctgagatcgccattgtttctcactatgtgaagttgtgcattttgggacactaatctctacgccgtaactaggtagtcataaaaggagtcttcgggtgtaccatgaagcatggaatgggatatgtgcggatcaaaatgggatttgcccctcttagataataggagagatatctctggtccctcgagatagttggattggaaagtgcatggccatgccaatatgattagagagttaatcacaatgactaaatgttagtcattaactgaatcaactatttgatcgagtgaatggttaagctataacaaggatgacgcgtaccttgccttgagcttgactgatatcgtgcggcaaagggattagtaagtgaatgtatcaaggttcaggcggtatgatttttaatgtacattcaggagttagtatgtcctgctaggtaccgctactgacttgtggtttggaattgttccattcactgttgtctgcacatgaacctaatgggtcacacacttaagaggttagaacattggaacttgcctatatgattgtctctagtgcaagtgggagattgttagtgatatgcccaagaggcaatca

SEQ ID NO: 66550 - DNA, 419 bp, Zea Mays
gtgggttccgaggggctcccgggtgcgagtactgtgtataggcggcgaagggcggtggcgaaacggagagtgagtgaattgccgtgaagtggtaggcgtcatcgtagtgagatggagagtggtcgtcttcgcgtggacgggactggtaaacgggaattgttgtcctcgccgattggggcgagtgtaggtgaaggggagctgcgaaatctttttgagggtgaggaattgaggataatgttgttcaactacagggagatgggtatcatcccgaaggttgagccattgtaatatatgatgccctcgctgtgtgtatgtaaccgtaatttgtatgataaagctgcgcgccttcgttgatatgagtcttttgtgaaagacttcgatctttacgtagttattgtgctgttccggctgcaccctta

SEQ ID NO: 66551 - DNA, 435 bp, Zea Mays
gtgggaatgttttggtaaagatgtaggtgaattgtgaacgagtcatttaacgtattaggcatgtcgtgtagtggtggtatgaaaaatgggttaggaatcgatcggctaaatgccaagttcggttagagttattttgttacttgggattgtagggtgaagtgatggcatgactacgtagccgtcaagtcatctatcatgtgactatgcttaagtgtgccttgctataagttagaataagtcgagtctctagaacgcggcaatttttgaagtaaatagaagctgaattttaataattgttgttttgggctgcacacgctgtttttgtcgtgctgtatgtttgatgaactaaattgtattttctgcaaatatatgctaaagaaaagtggtagataactttattatcttgctggtgttaaaatttgacaggcataagtc

SEQ ID NO: 66552 - DNA, 1132 bp, Zea Mays
aaaaaaagaagaagtcaccgaagcccttacctgcagcctggctcacggtctgcccaggagcgtttattccccctcccccgcatggcccatctaccgggagaattccactcacacaccacgcagcccacgttcgtttattctttctttattcatttggccggagcttacatcaccctgacctcagcaatgacgccaactctgtctaagtgacatgtgggcccttggccagccacacagcgtacccacgcctggtggactccaaactgcctggccgagttccacgccagctctcgcccatcggcaccgtaacaaccccacgcttctcggcatccggtgcataaatacgggagctgcgacctgatcctgactcataggctcggtggaaaccaatgtcccatgcccccatattgacccggcgtgaacgttgtggcaagcaagaagtagccgccagggacagcgctcgaagcacaaccatcttctgtcgtcgccgcgaaaatctaccaccaagggatcatcggcgcaagccgccttgaggtatgacactgatgcttgcgatagtacctcatatcgaagccttccacgttcagtcacggcctccgccgcatctagagtggtccgtcagaaagggataggatatggtgaagatgagaccaaaccacaaacggaaaatcaacggctaaattagaaaatgaacatatcctttcagatccctgcgcctagccataaatctttcactggggccccggtaatggcgtgccaccgcgggcgggggaaacgacgccgctgctgggtttctgggtagaagatgagccgtggcagttggatcttgattcgacggtcttgattagatctgggggaaatttgtgcgtgccgttgatctgcggatggacgaccccgattagcgcacgcgtaccctttcactaggattctcccgggtcgccggatcgggatcccgtggcccaggatggtgctgggcgttataaaatccgcggcgttgatttctaatcggacgactcagatggcctcgtaccccttcggccgtgtcaaattctaaaagagtccttgtgttctaacagattcaacccgcagtcctgatggtggtgatctgagtctgtagaagttttataatttt

SEQ ID NO: 66553 - DNA, 398 bp, Zea Mays
gatggcccaactctagatggattgcccttggtgccccagatgcccccaaggtcagctctggcgccttcaagtctgctgaggctagggaggaggtcctggtcgatccaaccgacttggccaagagggtccacgtcggggtagcactcactagcaaactaaaaggtacactcttcgacttcctctaggccaactgtgatgtctttgcatggaagctcatagacatgccagggatcctaagggaagtcatcgagctccctgaacatcttgccaaaggccaggccggtagcctaacatctccaccatttcaacttggagaagcgcaaagacataggcgaggaggtctcgaagctcttagcggcaatgtttgtaagagaagttcaccacctagtgtggattgc

SEQ ID NO: 66554 - DNA, 343 bp, Zea Mays
gcgtgatggccctgaggagtcaaacaaaaaatttgcggagattatctatgttccaggaatgctccaggtcttcgccagattgcgttgttagcttgtacgtgctgggagacgacttcatcttgacaatgaatggtccttcccacttcggctccagcttacctcgtgactctgtccgggttgttcggacgagtacgaggtccccttcgttgaattctttcgggacgactgtgtggtcgcgccaggtctttgtttgggcttgatatttattgagggcctacagggtgaagacgcggtctgcatcaatgagatatttggaggttagctcgtctacgtcgggtgaggc

SEQ ID NO: 66555 - DNA, 1270 bp, Zea Mays
gctgatggtaacttggattggtacaaggcctattggatcctttggggcttcacttagcatctgtagtggactatgatgagaccttcagccccatcgtgaagccaaccaccattcgaattgtcctatcccacgtgctctctagggactagcggtccaccagttggatgtataggaatacctttcttcacatcattctaaccaagacgatgtactgcaccagtccaccgggtttgtcgactccactcactcgggtctggtgtgcaagcttaatcactccttatatgacctcaagcaggcacatgagcttggcacagtcgttttgcctcctacttggtctcccttgactttgttgacgccaagtagtacacgtccttgttcatcatttgacacgatgacaacaccatctacctcctgttctacgtcaacgacgacgtgctcacggtgtccagtgccgccctcattcagcatacgatcgcttccctaaagtgagagtccaagatgaaggacttgggccctctccacaacttcctaggggccaccatggagtgccaccccgagggcgtcttccttcaccagcagtagtgcaccatcaacgttctggagcgggctagcatgtccatccgtatgccttgatccatgtttgttgacacctagggaatggtccctgacgatgatgcctccccccagttggcaacatgacggcctaccaaagcttcactgggcctctctagtacctcaccttcacccgacctgagatcgcctataccgtcgagcaggtgttccctcacatgcacacctcacaagagctgcacctcaccagtgtgaagcatattatttgctactccatgacactcttgaccacgaccttcttcttcgacccacctcagacttttgaactgatcgtttacactgacgctgattggggcccgacacgtgctagtcgacctcaggctatgccatgttcttcgacctccactttatccacaagcgtgtcgctgtcggtgatgtcaatgtcctccgcatcctgaccacctcccatttcgctattttcaccaagaactttccatccacgtcgttctagagttataactacgtggatgttagattgtgtgttatactaatctaattagattttggcccagcccatgtatagtttactacacacgaatgtctgctctaattaaggttagagttctctattagattctatcacccatagttacaaaatgtaatattaaaatacaaattgattatattaaaacaatataaa

SEQ ID NO: 66556 - DNA, 483 bp, Zea Mays
ggtgtgctttgataatcttacaacaaaggtccgacgatgttgtacataggaatcgaccccggcggcttcacccatcacactcccctcacacgggcgattgccgatgatgggcgcacggcttcgctcgacgcgatctacggtatcggttggatggggtggtcgcggtgcccccaactcccttttaaactatcgaggccacagacatcggttagagggaaaacagtcccggagatctaggcgcatcagcttgagtctgccgccgagctagaaggtgaagttgacgccacaggcccacagttaagtgtcgcgagtgaaacgcaaaggggttagagtggcggctgcacagcggggcccgccagacagagtctccgagttgtgaccatcgcatgcaagaaggggaccgatgactggggcccacgatgcagtggcccaggcagcacgcgtgcgaggacccatcctcccaacgtttcaaatttttgtcta

SEQ ID NO: 66557 - DNA, 551 bp, Zea Mays
caactctctctgcaggatgactctcatccccaaagggggaaatcagatgaacatcttgggagagagtaaagtccttctttccttcatgaagccaaacaatactaaaagcttaaatgtttttgacatgatttagcaagagatcatccatgcatcttgctttcccctcaagggatgtctacatgcccccttcatcatgaaaatgattgaagtggtgacccaatttcgttatgagaagggcacaagacatatctcatatacccctttctagattgacccaaacaatccagtagggcggttgaggaaggcccctcccagctctcgtgagcaagctgctgctggtacctcgcgtccttctcctggtcgtggatctcccacaccacgtggtcgtggtcgtggtcgaggtcatggttgcggcatgggagcaagagtagctcatgggatcgcagccttcttctccatgtgcaggaatatctcttctgatgttcatgagctggctaggcgatagcgggatactgacgacaatctccgtcgtcaggctacatcggtatccc

SEQ ID NO: 66558 - DNA, 545 bp, Zea Mays
cgggacttcacccattgactgcacttgtggtgcacccaacaggtacaatagtaaagcaaagcaaacttcgaaagcttaggaggagcaaaggacattgttctcttttagagcttcgggccaactagtcataaaagttggcttgagccttcggggcttgtgggggatagatatcccctaggtcctcatgagcactaaaacatgtcatgggccgcctaataggtttccgggttagtcatcctatggtatggatctgcacgatagggccaatccaggtaggcccgacccaagttaacggagaccgacatccgagttaagcgccactaatgcctggatgtgtcggacaaggcagttgtaaacacccaaagggcttggcattcgacgataactaggacggttaggcgataaaagctccagatatgctaggacacgatttgaagtaaaggacataagcaagtagatagtaatcgtgacttgtaatgggataactctatctggtcgtgtatttaaggtccagggggacccccaaccatttgatgtctcatcac

SEQ ID NO: 66559 - DNA, 340 bp, Zea Mays
agaagcggagtatcggttcggccaagggagtgctggtcgtccgatcggtatcttacgggactagggcgtgttccaccgttttagatctagaccgtagatccgccatcgactggttctggatcgatctctggttgtagtgaatctcagcctttaatcattaatcatacggttactgcgtcataccgcttcgggttgagggtagtctaatctggtctgttggtttgtaattcgatggttccgatcgagggatagcctttcggtccgaccccttttgcaaacacgcccctatgtttccagggaaccaacctgcggtccactgcgtggttagactgagtcttgg

SEQ ID NO: 66560 - DNA, 418 bp, Zea Mays
ggttattcacctggggttagttacagaccgagcatggtgattgtttctaccctgaagctctgcgtctcgctaggatcttcactgcattatttgcttttgtcgtaaccgcctaccaattttccctcgcatagctgacgctgccggagtcgcggattctgttgtaaccaccacagatcgtcagcttttactccaaggcgaactccttaggctctaggtttatataaatcaagctgtcgcatgaccctccacctcacccaagtctcatactactcctaattctacggccgtcctgctacccaagagaacagggagatacagagcggggcgaggagagatgggtcaccgccacggtcatctcgtgccacaccattgcttcatccccgacgaacaggtctgggcgttgtgcgagttcccggga

SEQ ID NO: 66561 - DNA, 327 bp, Zea Mays
tgcctatccccacctaacatcaagcaaacttttaacctatatcatgtagtctatctcacccatatctattttaaccatattccccagcccgataatatacactaactcctaatcaatgagacgagaccggagaagatgatcaacctcatcaagaaaggatgagcaccaactcaattcttcaaggatcaagtgagatcaccaagatgagtcagcatccacaatcttggatggagtcttttcttaccccactccttacccaaaactatatatgctttaaagatatctttcatcctgcataataaagtgactatacttatatatacccag

SEQ ID NO: 66562 - DNA, 327 bp, Zea Mays
cttattcgttccaattcgtgctacaaccaaatcaaaattagatccaatctactatgtatatcacatatatgcaaagcattcaaataaaaaactatagatggcctagctttgatatcactataggaaaatgtatactctacacactagcatatctaacacattcaaccaagataacatgcgagtagaaggatcatggatcgttactactagatacacagtgtaacaaaagaagaacatatcgatgtagtaaaagtagtggaagtagtcggacatcgcctccatccccaagtttgttgctgatcaatactgcaacaacaacaacatctc

SEQ ID NO: 66563 - DNA, 924 bp, Zea Mays
tggatggcgggttgaaactctaaatttgcaggggttctttagataaaaatcacggcgaaggggtatcgacgatagtgggccgttggattacgatcgagcggatcagattagattcaaaccccaccgaaccgctatgcagctccagtcgtccgattttgatcaaacgaccaggaacaccccacaccatgatctcatctgattcatccgtgggtcgatcgacgacacggattaatctcaggaaaggggtacgtgcacatcaaccgcaaccgcggatttcaagatccacggccatagtacttcttctccacgcgaataccaggtgtggcagcaccgttccccccctacggtggacgtcatagccagaccacccattcaccactcccgggccaaaaattctaatctgaggtacgctacgcgcagttaagacgtaagggaacaggatgaaggctccataccggggtattatcgacggtgaatcgcggatcccaccggcaacaaccactctggatgccgacgctgagctcccagtgctccgtcgcagttgcagaggggaaagaggaagcggtggacgtagggagagggaaggggtttgtattttatactcctaggtgaccgaaacttcccctcgaaacaaccggatcgatcaaacggatctgcacgattcatggctctcggcaattgtttttcttcctcggtctctctctaccctcgagttcttggcctcaagattctaggcgacagatagtggagcggggcccggcggtgcacacatatatacgcgggcgaagttgggtgtccatccaatatatccgccagaatctcaactaaccccagccgacgcagatcacggagccccaccgcggtattcgtttccagcttctgcgcgtttccgtttcaggctagaagaagaccctaacaagtggg

SEQ ID NO: 66564 - DNA, 842 bp, Zea Mays
cctcccggggtgtgagccacctgaggagctttttcgccgggcggtcgatgccaacaagagggagggcggcactcgccgttaagttggtgccagtgccactgccaccaccaagttggggtggtgcaagcccgatgtcggcctcaggacgactattagcttgaagaagatgcttaaacctgcagggatgttcgctgcgatagtaaagctgttttatgttaggagagaacggatacgatctattgttgcggcttaggatgcactgcgtggcacttctcaatcgcgttcgtagcagcgtgcggcgtgagggatcaacttcttggatgacgctgtcgagtttactgaagacaagctcatagtgctccatccatctcctcgtgtcggcatccagatgttgctggctaagtgtcttgagaaactccgcaatgatgctcagctccgtctccatgaaggccaagcagcgccgtctagtgtaacctgcagcgacgacgcagcgacggccggcagcaccagcacccagctgttgagagatactcgcccgaacgggctccaacacgcttagtacctccgcgatctttgccaccctcgtgtcctcctgatcctgcttgttggaaggagaaggctgctgcttccgggaaccatgtggatgtgggtgcgccgccatgacaccagtagctgcagaataagagagggagaatatatatatatatatataatgtcgatcggcatttatttagtttattttcccaagcaaaaggagagagggacacacgtacacacacttacttgatccagctgcaggataattaatgtccgagctctcgatcaaatctcagcctctagct

SEQ ID NO: 66565 - DNA, 296 bp, Zea Mays
ttatatcaactccctctgcaggatgaccctcatttcaaaagggggtaatcagatgaacattcttcgggagagcaaggtcttgctctcttttatgaaacccagcagctcagaaagcataaatgtctttgatatgatttggcaggaaatcattcatgccgcctgctttcctttgaaggggtgtcttcatgctccgtttatcatgaagatgattgaggttgtgactcagttcagatttgacaaaggtaccagacatcagtcatacacccctttctggattgatcccaacaatccagcag

SEQ ID NO: 66566 - DNA, 762 bp, Zea Mays
gtattttccctggcatacatgggatgatgagaactgatgagcgagaggaggaattctgaaggaatttaatggggcgcatgacatcttgacattggcgatctcgagatgccaactcctctgcggctacaatttattcttcgactggtgtagagaattgaaccttttctcagtcggttgaatggttgctgcccatgtcagcggggagaggagacttgcgacagtccgtcagtccgatgtgtggtcacaaacaggctcgtcaacttgctgcctgatgccgaggaaacagcaaatttgtcagcttgcttgccaggaaatatcatatcatatcacatcatatgggctgcagaatgttaccattgtgttcacggcatttttttggttggtgccggctggaaagagttttccaaagtttgcaccatgtctaatcatagctagaaaggatcagagactgacctgaccatgctcatttctattgcgaaacctgtaactggctcagtgaagcacggagcagttacaaagaaacattgaagcctgagcagttacaaagaaacattgaagcctgagcagttacatgctcgggtgccgcctgccggtgcgtgttcgatttccacaatacaacttgcgtcactggaggcgaaaaaaggttccagacttccagtgcaaacataaaacacacatgcatgtaacgacggctgtcgacgcaagccagtgcagtacaacatttgccgataaaagtcaaacgggtgcctgacaccccgtttc

SEQ ID NO: 66567 - DNA, 1042 bp, Zea Mays
gtatttatagcctccaactacccaaatagtcattgggagttcgggtgcaccggaccaatcactgttgtaggtctggtgcacactggatctctgtcatgcctgcaggtttagtgacaattttaattcttttgtcagcttatcacgcacactggatcgtctggtgcaccattggacctcgccacatatgctgccacatcatatagcgttgggaccggaagacgaccgatgagtcctgataggtcggtgcgctaagaatctcctctaggaaacaactcttttagcataactggtccggtgcttcgtccgttgcacaacggacgagtctggtgcgccaagccagaactgcccaaaaaaatgctctctgcgtacccggtccagtacacacctggattcggtctagtgcgcaacaaatcacgatcttaagtccttttttggtcttttttctttctctttgtttggttgccttcttgtgcatttttatgactttagataaacatatctagagttcatccaaccaacctaagtgatagttccatatatttctgatcatagaacttatttcctcattctagctcaaactttagaccaaaagaccaattttaatatctaaccattccaacgctcttaggtgctcaattagggccatgtagaaattatgttcccttcaagaaaacgttcaacgtcgagggccgagtgaactctccaacattgacattaccggatggggctccctgtcttctccgatcgcaaccagaaggaaacagtaacgctgtgaagttctggctacaagcgaaccaacgcatgcatgaaatggcgcgcaaaatgtcacaccatgaatcacatccgaacaaagtatggctaacaaagaaacacaaacacatacacggagcagagcagcaatccatcttgcctctggctacaatttctactacccacactacgagttcgccgagacgactcggacaccagaccgtccgctcgccacgctgccgctggcacgatgagcgctgctgcgcccacggtactggccgttagcatttcc

SEQ ID NO: 66568 - DNA, 770 bp, Zea Mays
tccacaattctgtgaccccataaccatttctctgtccaaaagagacttgtagcaccatccccaagctccgtttgcatagccacaaaaaagaattctttaaccttgctaggaactcgaatggacatagagggccaaggtcttcctggatcagtctttgctagccataacacctcattctgagagcccaagagaggtccctaagattggagatgccaaggccgcctaactcaatgggggtaaagccacatgatagtgtcctccatttgcatctttgtggtcccgccaaagaaaacctcaccgaattttatcaatcgcctttacaacccatgttggtaggtctacgaccatagccaagtaaataagcatttcagtgagaacaaactggacatggacacaccggccaactttagtcattaagtctgctttccacccaggcagttgattggcaatcttatcaataacgggctggaccagatccttagtgagctttttgatagcgagaggcagtcccaaatacctacaagggaacttgtaaatctcacatggcaccaattcttgcatcaaggccgaatcctgaattcctgatcatcgcaacttatgggaaaatcactagatttctggacatttgtgtgaaccctgaaggcttcaacaaagaggtgaagggtatccatggttatattaatatctgcagcagccggtctgaggaacacaagcacattatcagcatataaagagaaccggtgttgcaacactaaaggggccaagggctc

SEQ ID NO: 66569 - DNA, 644 bp, Zea Mays
actaccttaggcctcccaatgcatccgaagttcaagtgctacttgcatttaacgtgatgtgtggtttcctgggcatgcttggtagcattgattgcatgcactgggattggcgcaactgtccaactgcttggaaatgcatgttcacgggtcgtggtatccatccctccatggtgctcgaggcagttgctacacatgacttgtggattcaacacgcgtattttgggatgcctagaagaaataatgacataaatgtattgcatcactcacctttgttttgcaggcatgtcagcaacgagcaccccttgttcacttcgaggttaaaggcaacatgtataatatggtctattatcttgtagacggtatctacttggagtggcatgtgttttgaagattgtttgaaacctaatcataaatagggctcggaggttcgcccaagttcaagaaggcgctcagaaagatatcaagcatgctttcgaggttcttgaagcaaggtagacagttatttgcggacctacatatggttgggatcgcgtgaacctgaataatatcatgaagacctacatcatccttcacaacatgattatcgaggacgagtgtggctccaaccttccgatgcactacgataggatgggaactctagttaa

SEQ ID NO: 66570 - DNA, 617 bp, Zea Mays
gtaggtgaggggttagaagcagaaccacctctagagaccatggccatggtgggtgcaccaggattctcaatcttcccaggactggtgctcaatctcagtggacttgagcttgctgaacaactcatccacggtgagagtctcatagttggacgactcaatgatcgccgagaccttcacctcccaaaccctctgatccagagcatgaagtagcatgagcgctctctcactatcatcataaggtaactatgctttgttgacacacatcttgttcacaatggactggaaccaggaaaacaaagtgtctatgatctctccaaccaactgaacaaagttcttgtattctcgccggtatgtctcaaagagtctggtcttcacatgatcattgcccttatggaatttcttgagggtggaccagatctcgtgagtcgtaaccaaatgtccaactcgctcaaactcacctagcgagaggcaccagaacaaagcgttgcgagctttgttgttcgagtcatggaactccacttgaattggagtgattcgttcacttgcagcactgaacccaacatcgagacaaatctcccaaactttgtaccctatactttgaaggaatgacgacatgc

SEQ ID NO: 66571 - DNA, 716 bp, Zea Mays
gtcagatgaaaaaactgaggtagccaaaatcgatgtccaaaggctccttgaagcaaagttcatcaaacccatcgactatcccacctggttggccaacattgtcatggtcaaaaagaaaaatgacaaatgacgcatgtgcatagacttcactagtctaaacaaagcatgaaaaacacgagttccctcttcccacaatagacaagattgttgactcagcagcaggatgcaaagtcatgtccttgctcgattgtttttccagttatcaccaaatataccatagagaggaagataaagccaacaccagtttcatcacactcttcggcacatattgtttcatgagaatgcctgaaggcctaaagaatgcagggtccaccttccctcgcctgactcactctatattgaaggatcaagttagatgcaacatattcacttatgtcgatgatatcattgtcacaagcaaaaacaagaccggtcacctcgtagacctcgtcgaaacattcgctggtatgagggaggctagacttcgtctaaatctagaaaaatgtgtcttcggcattcacaagggcaaagtcctagggtacctcatgttgaaaaaaggtatagaagccaatcccgataaaatcagagctataacaaaaatgcacccgccgcaaattatcagagaaatccagaagctggcaggatgcattacagccctcaaaaggttcatctcaaag

SEQ ID NO: 66572 - DNA, 297 bp, Zea Mays
acgagctatatactaatttatataccactcggttattaaatcaaagcaagtataaaatttcaccactaaattaatccacttagtatcattaattcgataagatgaagctgtatacacttgtttcataggagcacgcgcaggcgtagcccgagtacaggtcgatgcacagcaatttccaaacagcactaaactatcaatatatgaacatcaaggtgttgaaggtgccttttgtaccatgtaattcgatctaagctagagcgtagagtagaatttacccgtatttaccatacaacttcc

SEQ ID NO: 66573 - DNA, 635 bp, Zea Mays
ccgccatacagtagaaccttaatcaaacgcgcggagagtatcactggtttacctgaatcttggtgcccacacaaaatagctcgagaaaacgtggttcgtccggtcgatgatggggtagttcttgatagtgcttcgcaacgttgcgaacgcgttaagcctgcaaacttctgaggtggtccggccatggcgatgtggtgagacggtggcacagtcaccagacaaggagaagataacgcgcgacggacttaggcaaaacgaatggcgaaaccaggaccattgctgattgtgagggcatgagcgagagagacccacagcgagcctagcctagtgagcacaaggtggcgaaaggcttcattaagccgagcaatatggcaccggagaaaacaaaggccactagctgcatgcccatatcgcgacggggaacgctctcgagggtgccagctctaagcaaaacaaggcacgtggccgcaatgcaacggcgcatggataactgaatttcagcaaagcggtaaattttggataaccatcgcattcaccaatcaggactggaagcactgaactcactcggccttacgtaccatccattcaaacctcaacttgcctaatgcacgtggggcacagcaggcgtggaaatc

SEQ ID NO: 66574 - DNA, 1318 bp, Zea Mays
acaagtgcgaatgcgttcctggcttcgcgggcaatgcttctgtaccaactggatgcaaaggtacacgtaccatatatatcgatcgtaaatacgagtgttatgtgaagccattcaactgctagcttgctatatgtgatgtgatggtctctcacatcaatcatcacttaatcgttcagtaattttccccatgaacctcattctgctaacgaaatctgaataattattgtattcatccattttttaaaatgttcactaactatcaaagcatctcagttacagatcgatgaatgacaacattttcagtaaaaagacaacgtaagcacagtaattgctaaatgaaattgtcactgcctaccgctttagcgatgcagaaagacacaacaattgttcagccattacttaatcattcagtaatttattagaacttcagtaattcttccgacgaatctcattctattgatgttaccgacggaatctgaataaacgacaagttggatcaggcgcgcagggggggatcgtggatccatcacacacggttctcgggcggtcagacgcgcgggggagggcacacggggctaggtgcgtgttggggcaaggagcggggtggggctggtctggtctaggtgaagctttaccataggtgacaatatatagggctgtagttttccatttgaaaatggtttaatgaacttcgcattagatacctccgaccccaacaggagcaccggtgcatgatttttggttcgatcgggtggggactagcccgatggggacattggtgggcacaccaccaagtttaagcataaaatcctcaagtttgagcgtaaatagtgtcagatatatcataaatgttattacaatggtcaacacgatatcacgtacgtgaattcacgtgtttatcgtaaatacggagccaacatgagagacgtgagtatatctgttacgtcgtattcatggtcgtaaaattctcatgtttaagcataaatggtgtcagatatagtgtaaatgttgttacaatggtcagcacgatgtcacataagaccccccgcatagcagtcgtgcgtgaaactagttggttaccgtaaatactgagccaatgtgagagacgtagatatctctaggacatggtattcatgatcgtaaaattctcaagtttgagtgtaaatagtatcagatatagagtaaatgttgttacaatagtcagcgcgatgtcacgtacaacccctctataacagacgtgcgcgaatccaagtggttacgggacctgtaaacgttgggtcaggtcgtgttcgggttgtgagtcatttggtatggaccg

SEQ ID NO: 66575 - DNA, 469 bp, Zea Mays
gctggatcccgggaagccatccttcacccccagcaaagggaagcccaatgtggtcatgttcgtcggcttgcagggtcagtatcgttcatctgcctaattgttcgttacatcttattcttacatataatgtcgaattgcttgtctccattgattgtgcaaagtaccatacacacagtagaagatgcatgtcttcgttcagtgtttatttccacacacctggaatgaaacaatagaaggtgtttgtttgataaatcattagcaacaaattatgtagttatttctttttcatgtttaaattgggcgtatttgtcactgatgattatatgtttgaggcctttatttcaaaggtttggggctgcctattttttcgggggtgtttgaatctcgaaatggtatagagaagcattctcttttgctttcgactgtccattcaaacagcttgtctcttccaatcgcgtcgctctgccat

SEQ ID NO: 66576 - DNA, 681 bp, Zea Mays
acgctgcccgggatgaccccaacccggcgtcgagcacatcagcacaaacatctgtcgcaccaccatccgctggctctgataacagatcctctggaaccatgtcttcaagagtctgatcaaagttcgccagggacaatccttgtagaccaatgagggcagacagagcaggagaaggaactccactactttccccactggcgacatattgccgactgttcttccgagtcaaagggacctcatcttcttcctcctcgtcgttttcatcagcaacacagacaacacccccattgggatcagcggtagatggagcacacccattgggatcagcgacagatggatcacacccattggggtcagcgtcagtaaattcaagcacaggcacttcctcaacagcaggaaccgaatgaccaacatcccgatccaaactggatactcgccgaagacgtctctttttctttttctgctcatcagcaggagaatcaagttgattggctcgacaagggcgtttcggtcgaacactgacaggtttctgaatatccaaggttgtaccagcttccaggagaggcgccaccaccaatgtcccagcaggagcagcatcagaagagtcctcggccagcatatcaagcatagcacttatctctgcatcactaggatccaaaggcacctcaaagtggacctgcc

SEQ ID NO: 66577 - DNA, 731 bp, Zea Mays
gtggagtgtataggctctatgtaaataaggctagtttaggaagtttaaataaccctttataaatataggggtaagctgtttagttcagcatcacatggcttccatttgttttggcttagggttttaatactcacatttcctatctctagacgactctagtttttagccacggatctgcaacgattttgtacttcaactgtgtttgtgctctgcaagtttaattcgaggaagggttgcccgtacggcccataggttttgatcacttctcaatttcagttttgcacccttgctagaatttctgaagtcttgtgttctttgttttcccttccccttctcttgtggttttgtggagaacctttgagttcttttgatgtgggtgttgttggggaatgatttgtgtagagatagactccttggatcactacaaatgcccttatgatgtagttcttggtcgtgattcgagttgagttctctttgagttcgttttgaggaaacccccaacaaaaaaccattcatctcgggatttctgatatgcaatttgatttcttgtttgttcgggttcatacttcaccagagaacttctttaaccatgcacaaactttttgtcaaatttcagatcattgttggcatttttgcttgcccgacactgccgctcatgtgcacgactctgccagacctagggccagcactaccgctttgacttttcaggtgcttttgactctgaaattttc

SEQ ID NO: 66578 - DNA, 425 bp, Zea Mays
ctcattcctggcgagtggcgactcctcccgtcctcctccttcctgaggaaatctccggctgctcctcctctccgaccaactcctgatcaagaaccgccagtcctccgtgaccaactccggtggctcatctctgacgtctaactaactccggtgatcaagaattcaagaagatgagtacctcatctgaaggtatcgtgatcaagcattgttttcagtttggtacttggtttcagactttcagtttagaaattttggatcaagaactcattataatttggtttcagtttatatgttctcaagaagtacacaactctgatttgtgaaccaccttttctctttattcatgggtgctactcaaggtgacggctactcttctgtaagatgtaatgttgtttgagactttgagtactgcaatactgctaaat

SEQ ID NO: 66579 - DNA, 580 bp, Zea Mays
tattctgtttttatttttcttacagctcagctttgatcattctttgaagtgatgcattgttgttttttggttcctacataaatagaagggtcgatgggttattggattatgagtgatgataacaaaatattctgtttttaattcgggtagtcatgctttcaatttagtgtgcttgttgttcatcaatacaaaaagggtctatcccttagcctcttgttcagttagtaggtcttggtcagcatgcacattatgttcacttagtaggtctcttgttcagttacagctcagcatgcacattatgttttcatacgactattttcaaatatttgtcaatgtacttcaatcaatgcttaactttggtatctgaaagtttgaagataactagaagtcactctaacatgctcttgcgcactcagattaagtcatttttatgactcgcatgcattatgtttctgctagcttgccatggcatttagtaaccttttcatgactgtgtgacatataagtaatcaacaagcaacttcattcaataatctttcatgactgtgtgtgacatataagtaatcaactgcatacttgt

SEQ ID NO: 66580 - DNA, 1513 bp, Zea Mays
ggagaagactgcattaaccatttgaagccttccagtctgtgataagaagatggaggttgacgccagtcttttttcaattttctggataagaggaagaaaagcacccaagttgggtctttgaaggcccaagggaagccctaagtaagtaaagggcattgatccaattttgcaatgaaatgtatttgcaaggatctccattttcttgtctgtgacattaatgggataaatgttagatttatggtaattcacatgaagcccagtggagtcagcaaaagaattgagcattgcttttaaaaagaaaagctgtctagggcaggcttccattatgagaatagtatcgtcagcatattggatgatagggaaatctggaccataattgtttggtaagggaagacgaagaatgccaccttcgcaagccttgttgacaatagactgcagaagatcagctgcaagaacaaaaagaagtggggacaaagggtctccttgtctgactctgcgtctgcagtgaaatcttttcccagggactccattcaaaagaacttctaaagaaccggagccaagaatcatagaaacccagtggatccatttatcaccgaaccccttgtgcctcaaaatctccataagagctgcatgttccaatttatcaaatgccttctgaaaatcaagctttaaaatgaccatttcctttctggatttgtggcaaagagaaatatattcaaaagcccaggctaagcaatcctggatcgatctatccttgatgaaaccatattgattctgatggatgagctttgtgatcaccagttgcaaacgattggctaagatttttgttagtactttaacactcgtgttaaggagggagatgtgtctataatcaccaactgagtccagagagctgtttttgggaatgagagtcacatatgacccattaatgctatgcatgcagagagattcttcaaaaaatttgttgaaaagatcatagaaatcaggggcaatcaccggccagcattttttaacaaagtccgtattaaagccatctggacctggcgatttatttgatggcagacaagtaatgatttgatcaatctcaagacaagagaaagggtgttcaagctctgacaaattatcaatcggctgaatcaaagcagataagttgaaaaccatggaagtttgttgagaggtccccaaacagttcttgaaggcattgaaaagcacagattctttgtcagtatgagagagagccatatttccattgtcatctttaagagaagaaatgaggttatgtctatgcttgacagtggcattggtgtgaaagaatttagtgccagcatctcctagggtggcccatttgatttgacctctttgtttccaataaatctgttgtttagctaaaaggtcttgtaaatgaagaagaagaatttctttgaagttccattcctgaatggttaagtctctgctctcctcaatgaagtccaaaagctgaatcaccaacttaaccttatcaatcgattttgct

SEQ ID NO: 66581 - DNA, 286 bp, Zea Mays
atgaacggcagaacatggtacaaaataaacgcttcaggagcactagcatccacgaacaaaattgtatcattaccagccactcgagtccgcgtcaggagctccgagtcatggcgctagctgtagtccactcgctcatgaatcatataatcacttggacagaaaccgaaacacgcactgcggcgagatattccgtctcttgagagagctacagtaaagcggatactcctaggtgttttctctcgcgactctggtatccaaaaggcaaagatattttcgccacggtgcc

SEQ ID NO: 66582 - DNA, 567 bp, Zea Mays
tcggcctgggatggccggagggcagcaccagctggtgggggcacgagcttggagatgcgccgtgggaggaagactgattaactcgacatcccactcaaggatagcatcaagggatggcgcctggaatggttcatcgtggagaatcatgggaatttcctccccccacggtcagggagacagccgaatgttcgcacttcgagctggaccaaatcccccatagaccaggaggtggccgaggcaggggctctgctagctgaagttggattgttgaaagaaaggggtctgactgcagaagctgtggtcgctgactttgttttcaagaacattcagccgctgaaagacagagcatatccggcctatctgtaccgaggcttggctgattcaactcgggtgaccaacagaagaattcctgctgtggacttggtgagccggctcgaaatgatactcagaggcaaggtgtcgaacatcggcgctcctgttgcatactcggcctggaatctgcctccttcccaggtctttaccagtttcgtgtcaaatcctcctgctggtgatagcggtttgggcctt

SEQ ID NO: 66583 - DNA, 675 bp, Zea Mays
tatgttttaactggcagaaagtgagcaatttccgtgagccgatcaacaataacccagatagagtcatacccctttgcggtcctgggcaatcccacaataaagtccatacttatatcttcccatttccatgttggtattggtagagactgtaatggaccggcagcttttaggtgtatggccttgacacgcttgcaagtgtcacatctagccacatagcgtgcaatctcgattttcatctttgtccaccaataatgctgtttcagatcttgatacatcttagtgcttccgggatgaatagaatagcgactaagatgtgcttcatctaaaatttgctggcggagctcttcattcttcagcaccactatgcggttattaaaccataccacaccttgattatcttcttggaagcaattggcttttccagcctttatcttttcacgtatgtgtttaataccctcatcatttttctgtgcctcaattatcctttgtaagatgactgactccagcttcaagtgatttgaagtcccatgttgaatcatacctaggtttagattctccatctcctggcataacgtaatgtcagaagtccccacagttagacaatggcaggaagccttgcgactgagtgcatctgccactacatttgctttgcccgggtgataatggatctccaat

SEQ ID NO: 66584 - DNA, 517 bp, Zea Mays
gtggatagaacatggtaagaagaatcctaataacatgccacaaacttgggatgcgttgaaatgggtcatgcgggctagatttgttccttcttattatgcacgtgatatgctaaacaagttgcaacaattgagacagggtactaaaagtgtagaagaatattatcaggaattacaaatgggtatgttgcgttgtaacatagaggagggtgaggaatctgctatggctagatttttgggcgggttaaatagggaaattcaggacatccttgcttataaagattatgctaatgtaacctgattgtttcatcttgcttgcaaagctgaaagggaagtgcagggacgacgtgctagtgcaaggtctaatgtttctgcaggaaaatctacaccatggcaacagcgcacgactacgtccacgactggccgtacaccagcaccaactccctcgccgagtcaaccagcaccaccgccttcctccggcgacaaaccacgtgcatcttccacaaattcagcaaccaaa

SEQ ID NO: 66585 - DNA, 490 bp, Zea Mays
aagttattatgaataatgtagaatcatcggtcgcatcaggtggtgctcctggtgttggttcagcagcttctgctactctagactttgctgcttttgttgaaaaggctatagcagcacttccaccagagcttgcatcccaagctgttgacgtgaagaggaaagctaaatcacaagacccgggatggaaatatggttggtggccagattcgacaaagaaggactttgtgcagtgcattttctgtaggaagatcatcccttctaagataaaaaggttcaagcaacatctcactggaggttttggggatacaatgaaatgtggtagtgtgcctgaattgatttcaaaagagatgcttgcttacctaaggaagaatgcaaggtctttggttgtgaatgtggatgaagatggtggagaatatgaaagtgaaggtaaaaaagaacaagttgcagctgaaccaagttcagggactaaggttaagcaagcgaagaagaa

SEQ ID NO: 66586 - DNA, 407 bp, Zea Mays
cccacctcgtcttctttcttctcgggcctgtcctttcgttgctcgacgaggtcacgagcccgctcgtctgcggcgatgtatctgtcggcgtcgtggaagagctgctccgaggtagtcagagccttgtggaggatggcccttacgaaggcctcgtcacgggccttgtggaggatagcagtggtgttagatgcttgtgtcttattgtaatcagtctaagggttatggaccttggcccagaccatgtaccccttttccaatatatatacactcaacccacgctggttagagttaggttgttatggtttccagcagaatgaataaaaataatgtatgttataatcaaatattcattttttctcatatggaacattgggacaatgagttgtggttctttaattgttatctag

SEQ ID NO: 66587 - DNA, 1881 bp, Zea Mays
ctgcgcaccgcgagatcttgcacacgcgacgaacaatcgagacaatcgcccttccacgtaccaatgaagccagcccacgcaatcacgtcatatagacgtgaaggcacaaactgggtgaaccacagttcggcgttctacaactccctcgagaatcgaaagaacaagtccgcaattctctcaagactcacattgagaactcaaagagtttgtatttctgaattggcagccaaaaagatccactcgtcatctattacatggatacatatagcactagtggtgttttcagtttagataaaataaatgggaacacacagtgggaagttgtagcactccttctattaatagcctggcctaatggaactctttggatggttgatactcttttgcatgcttgtacgtgtgtggacagcaacctggttgctgactgccttcttaactcacaaatttatttgacatccacggctgatctgcatggtagctgaatggtccgtccttctccctttattctcacaagcacgtccaagcaccaagctatcattattcttctaagtttcacactgcaatatcagcatgtcacagagagagctgatcatcacaatgttggaaggcaaaatccatcatcgtcccatgaacttgggtacacgccatcattcctaagaatattcaaacaacaacttgaaagcactgactgatctggatcattgtgattaattaaaataaggttagcattcacctgagaataaatttccttctctagttgtttagctcgcattcttgtaactggaccatcaatatttgttgcattcttattctttataattttagtgtcaatgctaggggtgtcctcatcagcctccctctcttgagaaggagtcgtcctcgactctgactcaccaacaaatggaagcaagtctttaacattgaatgttgcactcacattggaatattcagacgggagctctagtttataagcattatcatttatttttgcaagaaccctgaatggaccatctcctcagggtgataacttactcttgcggtgttgaggaaatcgatccttgcgcaaatgtagccacactagatcacctggtttaaaaagtacttttttcttacccttgtttgcttgcttggcatactgagcagatttcttcttaatatttgtccttgtgtcctcatgtatttttttgatcaactcagatctcttgatagcatctaaattaacttgttcctgcaatggtaagggcaaaagatccatcggtgtatgtggtttaaaaccgtaaacaatttcaaatggacaaaaattagttgttgaatgtactgccctgttataagcaaactcgacatgtggaaggcattgttcacacatattcagattctttttcagcacagctcacaacatagtcgagagagtacggttgacaaccttagtttgaccatcggtttgtggatgacaagtggtagaaaataacaatttggtgcctagtttaccccacaatgtcttccaaaagtagctaagaaatttggcatcccgatctgaaacaatagtctttggcacgccatgtaaacgaacaatctccctgaaaaataatttagcaacatgtgaggcatcgtcgttcttgtggcatggaataaaatgtgccatcttagagaagcgatcaacaacaacaaaaatggaatcgctccccctttgagaccaaggtaaccccaaaataaaatccatggatatatcttcccaaggtacatttggaattggtaatggagtatatagaccatggggattaaggcgggacttagctttcaagcaggttatgcagcgctcaacatgccgttggacatcacgtctcatatgtggccaaaagaaatgatcggaaagcatgtcca

SEQ ID NO: 66588 - DNA, 454 bp, Zea Mays
agattatcaaaattgcaaatgacgttattgacgaagctgtcgacaggcttctgaacgaagctgccgataaagtcctcaaggaggactaaaatctttgtattcttggtagttaaatgccctgggaaatgattcttagttttgtaagaaacaattgtaaacaatttgtatgtatattgatgcaatacaattctttatgaagcgtggaaccttcgtacatactgttttttgagcctacggcgaaaaacaccttcccttcttttcacgcttcagaaagaaatcccccttctttgccgaagctgctatatgatgcttgattcttggtgtaattattgtgtaggaatagtattgtcgaaagcataaatttcacgtggcagtagtttcaagcatgaaccgtgcacctttaatactctttcataaatcttttgctgaagctaaaggagaaattcccattttt

SEQ ID NO: 66589 - DNA, 506 bp, Zea Mays
cgtggctgctgatgacgattcgtttggctctgtgtctaagtgttttgagtctgatgattctaggagttcgattgcgtggacggaggagtcttcagatgaggatttggattattttgcggcgttggatgtggctgcagcggagccttcgccgcgcgcggagggttccgaggaactcccgggcacgagtactgggtataggcggcgaagggcggtggtgaagcgaagagtgagtgaattgtcgtgaagtggtaggcgttatcgtggcgaggtggagagagaggtcgtcttcgcgtggacgggactggtaagcgagaattgttgtcctcgccgattggggtgagtgtaggtgagggggagctgcgaaatctgtttgagggtgaggaactgaggataatgctgttcaactatagggatatgggtatcatcccgaaggttgagctaatgtaatatatgatgcccttgctgtgtgtatgcaaccgctatttgtatgataaggctgtgtgcct

SEQ ID NO: 66590 - DNA, 485 bp, Zea Mays
atcacattcatttcacttcttaatgagcaaaatctagtttcatccaatggctttgtaaaaatatcggccaaatggtcatccgtgccaattgaatatatagagatgtctccctttccaacatgatccctcaagaagtgatgtcgtatatcaatatgcttagttcttgagtgttggaccggatttgtagccaattttaccacactctcattatcatacatgagaggcacattcttaaaaatgatcccataatccaactgtgtttgtttcatccataataattgagcacaacaattaccggccgatatatattccgcctcggcggtagagagagcaacgaaattttgctttttagaagaccatgaaacaagagatcttccaagaaattgtcaacaaccggaggtgatctttctatcaaccttgcaacccgcgtaatccgaatccgaatatccaattaattcaaattgagcacctttgggataccatag

SEQ ID NO: 66591 - DNA, 476 bp, Zea Mays
cggctaactcggcggagacgctttgggcgggcaccttcaggcttccaaatctccaccactttgccaagctcttgtctagccgtgatagccatcagttcagcatgggtcgagtcagacgattccccagccagcatactaagcacaacatctatctctacatcgtctgtgctagctggcatctcaaaatgagtttgcttctcatcactgggaagattccgaagaggggcaatcagagcctcaatgtcctcgggagatggtcgcactctaagacccaggctaccatcactagcaggagggttggacacaaattcagaaaacgacctatgaggtggcagattccaggcagaataggcaacaggagcaccaacatttgacactctgcccctcaggatcatatccagtcggctcaccagatcttcagtgggaattctcttatttgtaacctgggtagagtcattgatgccactgtacagata

SEQ ID NO: 66592 - DNA, 511 bp, Zea Mays
gtctttaccgagtgtccgataaaaagtactcggcaaggaatccgttgcgaatgtacaattcatcgggacctctttatcgagagtcacactcggcaaagactttgtcgaaagttttctggactttgccgagtgtatgaagcacttggcaaaacaactgtttccggtagtgcattaagaaaataatcgtgcacatctctttagtttctgatgcacttgtttcactaacttttctgtcctgatgacgtagctcatcaaattagatgattttatgctagctagcgaagataaaaatccaacgggaagaacaactgctttgacttgttttaagagagaagaacagttatttggacactcaagttgaagtagcactgctgtctactgctaagtcccagtaataatacaagcataggatttgccccaaagggcagccagattcttcacattcaaaatcagtacagaaatactttatttaacgtcaggaccagtatatgagaccggacatgtgcgcaag

SEQ ID NO: 66593 - DNA, 546 bp, Zea Mays
tagtcaagaacaccgccgtgtgagtgctcaccgtggctagctcgctacaggtctgttcacaacctcctcgttctcgtttccacatccctgtgtgctgtagatgcttatcaatccggccaattgaactagaccaccttagatcgccaggaacacctcggttcatccacagtttgcgccatcaccgtggatagagtgattacgggctagaactctgcaattgagtgagggattcgtgtcgccgagggtagaattaggcgttgtgcaatggagaggcatagccgttgcgttttctggccggtcttgactcgccggagccactgctccaccgtccgcggtcggggacttcaattcgcgaaggattagaaagtgaggggccttggtgcaaatgtcagtgacacatagaaatagtgtgcgggactatttactagtttttcaaataagcagggtcctctgcataaagtgaacaccgtgggcgcgcgcgggcacgctttcgccaacacgtgggccggcttgggccagtttcagcccagtactattcactttttt

SEQ ID NO: 66594 - DNA, 405 bp, Zea Mays
aaaaaatctaatcacatgcttgtgttggtgttttcttgcccttgtgtgtttacccttgaatttacacctacacaacatgtagatttccataacttgactcctatatcgaccgaaacttccttgtgcacgtagttatgtcaaaacaaaacatcgtttggtgtctagttgcgcaaaccatgtccaagccatgtttctttccataaatccttgccccaaaaacttcatagcatttctgttgatcatcctagctaatcttgtttgatgacctctcttttcacctagatctagtaaatctttacctttgtgaatcgtgttgtggctttatcatccgaatctctggatccgtcattgattctgccccgttatctggttattttctataacctgttctcaagtatcggatgt

SEQ ID NO: 66595 - DNA, 380 bp, Zea Mays
ttagcacgagctacatgtgctagtgtctatagtaactctatcgatcttaaaatctaactatagcccaatatttatccatagagacgaagggtgtatatacaccgtaaaacgatcgtctatatatgtttgtgttatgaagattaacaaagaaatgaaaatagaaacgggatgggcatccgctagtaactaagaccaactccagcagtctccatataaggccgtgtatccatcaaatatacgcgcccacgcactgttcacggctccagcaggtaccgcaaacagctccgcaaaaaacggggcaggggttggcgctcccttttctcgcgtattctctctcatccgcgcaacccaaccgtcactccatccgaaccaggtttgct

SEQ ID NO: 66596 - DNA, 320 bp, Zea Mays
atatatttttatcttatggtcttctactctctaccagatgaatcatcatctccgacatccaccgttcgttttttcgacgttgatgtctcattccattgtggggctgcagctatgattttgttccttgaaccaggaggccgtcctcgcttacgtccagataggttagccaatcgaaccctattatcctcgacagttaaacacgtacagctgttgtgaccatcagctatgccacatttctggcactgcctgctcatctctagctctttcgcacccaatttaaaacttgtgctcactactttgatgtcttcccttaggcttgg

SEQ ID NO: 66597 - DNA, 961 bp, Zea Mays
caaccacagacggcggagcagtggctccggcgagcctgtaccggcctgaaaacgcaatgaccggtgctcaagtgtggccgacacctaattccaccctcaataacacgaatccctcaagcaattgcgaagttctagctcaaaaactctctgtccacggcgatggcgcacaccgaggacaatctgaggtgttcccggtgatccaacacgggctagttcaattggctaggccaataagcatctatagcacacaagggtgctgaaacaagagcgaggagggcatgaatggacctgcagagagctagccacggcgcggcgttcacggtggcacggtaacccgatttgggggaagagagaaattgggaggctatggtggctaatcggaggcaagggcgggtcctctggcttcgtgacgaccttgagagctagcggcaccatcaatttatagtgcccaaggtcgatggctccaaattttgaaggagaaggctggtgaccggagagagaggtgagtcactggcggctcagtcgtggcgcctgccggtgcaacggttctaaaatggcaagcctaggcgtgccacggttactactacacggtaaagagctatggcttggcataattgaggtcgctggagtaccacggcgacaccggcggtccggccacatcgcacggctacaggcgcagttgataagcttcaccccgcgaccaaatccactcccccgcgagatctttttacttcctcgttgatatccactgtgcacctagcacgaatcacggcgaccggcaaagaatcctggagcaaggccaccggcgacgagggggatgaatctgaagatcttttgcgcactgtaccatggccatcatcttaagtttttctgacagcgtgatttgtggagccttgttctccattttctatgtgacaacttactaatcttcctgtaacaaagttattgtcctataatccag

SEQ ID NO: 66598 - DNA, 667 bp, Zea Mays
accacaagctcactcccccttgggaaggacccttcatcatggccaaggtgctgaatccaggaacatacaagctcagtaacaaagaaggataagtcaacgacaacacgtggaatatagaacaactatgttgcttttatccttaggcatacatgcccatttgtactatgttctctatattcaataaagaatagctctcaagagaggctcggccttgctttcaaaatcgagcctccctcggggccaggaggtggaacccctcctctgtgttgtcttgtttcctcacagttttgaaaaacgaacacatttcatagcctcgccctagttgtaacgcgaaaacccttaggaacagagaacatcccaactaaggaaaaatagtcgagccgcaggaacacctaagcctcagggatatggtttcctcactcactattccctccccaaagggtaactcacgttccgatggggacaccgtagtaggactaaagcaacaggcacaaaacagcggaaaaaaaccacacaacaaatcacaaaaagttgacatgcagtgtcaactgagttcttagcatgtattacaaaaattcaaaaattccctgtagggcgatgaccaggttcacgcagtcggaggaggtccggcaggggatgcggcagcggttggtgacaggggaggagg

SEQ ID NO: 66599 - DNA, 462 bp, Zea Mays
tggcttctcatagcccaaataaaaactccatctttaatcaaggcttcaggagtaagctgatgaaggtatatctcaaatgtctttagcactttgaccagcatcttgtgtaacgaaaaacgaagtccaaccttcataaaacttttaaacagtaccacctcatctgcctcaggaagaggaataatgctttctcctccagccctcactatggatatatcatggaaatatttgcccttcgtcgcttcaatttgcccttgcttaacagttgatttcctgaaaacaacatggcttagcctccatggccgatcttcggcatcttcattttcactctcaacatcgaagctcttgctgtcgctggaatctccagatatcccagatagcatttcatcagtgattttcaatattggtcctctccatggcttcatagaaaccagcgagtgcggggtccacgcttttcttatcttc

SEQ ID NO: 66600 - DNA, 676 bp, Zea Mays
ctgtccaacccaatggatgtttcaagtgcggtgagctaggccactatgccaacaactgcccaagacgcaaccaacagacaccccaaaggagaaatactcaaaggaatgaccagaacacccccgctcgtggatctgctcagaacaagactccgcagaaccagagcagaggaagggtcaatcacgtcaccgcaaagtcagtgcctgaggatgtcgacatagtgtatggtatgttccttgttaactccatacctgcatcagttttatttgactctggagcatcgcattcgtttataactgagtcatttgtggaaaaacacaatatacctaattatcctcttaagaagatattacacattagttcaccgggaggtgacatgaaggccacacactcatgcccccatgttaatatcaagattcaaggaatagatttttcagtcgacccagtggtcctaggatccaacagtattgatgtgattcttggatgcaactggttgaaaagttgtgatggagtgatacagtgtgccaatggaacaattatgttgacaagtcctcaaggtgaaagaatccaagttaacatagacaagtcaacagatgaaaaagggaaaacagtgatcaatcacttggaagaaaagcccttggaaaatatcaaagtagtgtgcgaatacccagacgtatt

SEQ ID NO: 66601 - DNA, 453 bp, Zea Mays
ccaaaatacaacaaattgtggtggtggacacaaagaatgtttttatttgttttctaatttaaatttgagtataggaactgccataatgtaaaggaggatgcaatgtacaagctttattatgtaaccaagtgctcatttcaaacccacaaagacactttagcatgctacgccaagatagaccaagcaactctccaaacttttgttgttggcttgcacgacattgtcgtagatctatgcacattgctacattgtgacactaccatgtattccattacactactatgacttaatgatcaattaggaaatgatgggtatttataccgcttatcctgcctccacaatagccatcttgagcattcacttctcactagaactacacaatctctccactctccattaaaggcactcaacctatcctactctttcccttgagattccttgagagattggcct

SEQ ID NO: 66602 - DNA, 530 bp, Zea Mays
ctcgggtagtgcactcactgcagcgccgaccagaggtggcagcttgcgtctatcacattaactcatgcatgtgtcagcatggctgccccctgcatacgttagcataccagactccccgctatagccgacttgagccgacaggaagatccacacggtggccaagggagaaaatctctgtccgccgcagtacgcaaggcttcatgttgtacatattcaatactagatcactagtcccacttgtcagggctcagcacccttccccttgaactataaagaaactcaaaccctctcacactcacagctcacaagctctcagcaatacaactcctaagtgggcgtagggtattacgctctggcagcccaaaccactctaaatccttgtatgttcttgtgttccaccatctcctcaggctaaccctaggcagcccccttattcttaggattacgcaggtgctttctgccacccggctgaagattacctctgacatcttcccatcttttttgtattttagctctttttacgaaagatt

SEQ ID NO: 66603 - DNA, 431 bp, Zea Mays
gcaagatggatgtatggtgtgagggactaatgtacaaaaagtgggctagagactagacagatggagagccagctagtagatggtgtggtggaaacggtgccagatttctttgcaagcaaacatgcagtgcgcgtctgttagttgatgacacatgcatggcacacatggagtcatggtcttatggatgttgtgcccacctagatgacttgcaagtcttctcttctgttcacatacaacaaaaacggtggagaacttgacaatcatgacaaaatcaatggtgcagtgctcacactcatcttacactacaagcttctcatcttgcacatatgtttcccctttcctacatgaaaaacaaacaaaagtgacaatcacatcagttacggtcgatgctagaacacgccatcacatgagcacactcatgcaactctcac

SEQ ID NO: 66604 - DNA, 581 bp, Zea Mays
taaacaaattcttagcatttattttttatattaaaaatcattttctaattccatttatttgatttcttaacttcctggactgggcgctctaatacagagaagttcagggtttaactcgcaaaacatcccagacacagaactatcccgcaggacgacgggtttattaactaaaagtccgagggcttctctgtaaaccatgctcagcgaaggggtatcctgcgatctaaaccgcactattggaaaccagcgctctagattagatcggaccactgcaaaaattggtacttgaccacgaccatcggatcacgatcccgcgacccaaaatcttccacgacttgactgaatctagtccctcaatcctgagatcaacgatccggattcaaaatagtgaagcgatgccttgggttattataatcctagccgctcggtcgcagatttgcggttgggatcagtcgtgcccaaaatagcatgtgccctctaatctcgaccacacgtggccagatcaacggtgccgcgccgttctccctcccagcaacaacaggcgtggcggcgcacaggtctgacggcggagaactcaccgg

SEQ ID NO: 66605 - DNA, 436 bp, Zea Mays
gcgcgcaccaggtggagatctccatggcgctgatggcttggtttgtgcggatatgtgatgcggcgaggggagtaacgcaccagccgaggggatagatgtgggctcggagtttgttgccgggaatagcggaggcagcccaggatctcggcaatgctggtgtggttctgttgcgagttcaacggtgaccgaaggatggggattccgttggccgagcctgcgcgctgattgagggatgggcggactcagtcaagcaggatggggaagaagatgagcccgaccgagggggcccacacggcggtgtccagctgagatggtgaataatggggaggaggcagctgacgtgctgggcccaatagtcattcacaggcgaggagacaagaaggctcgccagtgggccggttggtggccaagttgggctggctgaggaggaaaatgg

SEQ ID NO: 66606 - DNA, 511 bp, Zea Mays
gtgagcgagcgagcgagatggcactgcaggccatggagaagtgaagtgattgtggacctggatggaggagatgcttagtgattagtgactagtgagactgaaagcgtttttggcttggtgaaattctatagagagagagagagaggggtggaagttgaaaggtgtacgtactgttttcgactgcaatggaaatggaatcaaaccatgcatgatgacacatatgatgaggagaaaaggctgcagggagtgccatggcatggggaaaggaaaggtaaaaaagttgtggcctgttacctttgtgattggcatcattagcccataatgtggtgctcattcattctctgccatgcatatgctactctcaccagtaggccccacaggccacaacaggcttaattaatgcttaccatttaccccttcccacattctcggaaaatactacagaagaggattgaaccttttgcagcctccagatttacactcgtctagccaacaaaacacacatattctt

SEQ ID NO: 66607 - DNA, 365 bp, Zea Mays
ttcgggggacgcagcggggagaggggtcaggcggaaggggaggtttctggttgtttggttttgggtttggcatggcgtgctgggttttgctgtatggtagggtcgcaattagttaggtggcgtgcagacagcaggggcagtgcgctggcgactcgcccacggtggtggacgcgtgggtctccgtttcgccacttttgggggacagcaacaataagtgagattaaggacggaccaccactgtaccatgtgcatgattagttgtttatgaagatgtgattttaggattgtctccaacaaactagtaaaaacgtaattcagcaggctacccactaagaccgtttaaatttgtttgcccatcatatctc

SEQ ID NO: 66608 - DNA, 620 bp, Zea Mays
cataagtcgagtaagcgtgagcatgttgcaccgtcttaagtcactgtcgacttaagccgattgctctgttggtagggtatagtggtcaccctaagtcgagtaagcgtgctgattggtaataaacacttcgagtgcccttgagaacgaaatcttttattgatgaggtatttaccgattatagaatacaatgctccccctatagcttttgaaatcttgctaagggtaaaacttcctgagatgctctatattccatgaattccctatttctgtgacatccatttgagtaagcctatatgattctggtcgagtgacctctgctactacaaatggtccttcccatagtggtgataatttgtgacgtccttcccccgttagaattcgacgaaggaccaagtctcccactacaaaggatcgatgtcgtatggccttgtcatgatagcgcctcagggtttgctggtatctggctgactgaattactgtattcaatcgctcttcctccaatacgtcaatgtcctctaatctggtagcctctgcttcagctatgctttcgaagaccaaccttggtgccccaaacctgagatcagtaggtagcactgcctctgaaccatagaccatgaaga

SEQ ID NO: 66609 - DNA, 1024 bp, Zea Mays
tgccatctgcagactggactggtagctgttattataagaaaattctgccaaggaaagacacttgtcccaatccttcccatagtgtagcacacatgccctcaacatgtcttctagaatctgattcaccctttctctctgaccatctgtttgaggacggtatgccgagcttcttattacttgggtcccaagtgattcttgcaattgttcccagaaacgtgccacgaatggtgctcctctatcagacacaatagtccttggtatcccatgcaaacgaactatcttgtcaatataaatttctgcatacttttctgccctgtgggtggtatgcactggcaagaaatgcgttgttttggtcaacctatccacgatgacccagatagaatcatggtgtcgggaggtattttgcaatcccacaatgaagttcatgcaaatatcctcccatttccaagatggtatgggaaggggctgtaaagtgcctaataccttcaaaagactggccttgactctctcgcaagtgtcgcattcagatatatacttagcaatttccctcttcattctggtccaccagtacaaagatctgaggtcatgatacatcttgttactaccgggtgcatagagaatttggaaaggtgagcttcatccaatatcttctttctgagttcggggttcttgggaacaaccagtcggtctccaaaccatagaatccctttgctatcctgacggaaacatttgtatttatccaccttctgttcgaccatttccttaatgacttgaacacccttgtcactgatctgtgccatgactatctgctcatgtaaagtgggctccattgaaatataactcaaggcaccggaggaaatgacttctaggtttagtttgcacaactcatcacatagggtggtgattcttgcatccatattaatacaattgcactggggctttcctacttaaggcatctgccacaacattggctttgcccggatggtagtgcacctccaaatcatagtccttgattaattctaac

SEQ ID NO: 66610 - DNA, 428 bp, Zea Mays
cctatgtgcttctttcttctgcttcttattcactagctcaaagcttgatcccctcattatgagatatatatgcttggaagcatgtattgtgttgttgattgtatgagctttggagccttcccttctatccatcggaaatggctcttggattggatactggggttgaccgaagggcggttgttcatattggggtgctcttaggagctaagggtgatgagtatcccaattgcttgaatgggggtgtactaaagcattggaggctgaaggatgtgtatttgacttgtggtgttggatatattgttgctcataagctggtgggcagtaagatgttgtatggcaaaaaaaatagctaatttctttgattggcagttgttagctctatttgtttttgtgttgtaattctataattcttggttgtgtgatgcttt

SEQ ID NO: 66611 - DNA, 396 bp, Zea Mays
aatggaattataacatgagacaaggactgctaaacaaacattttttgcggtgtcacgtcaaatttcggcaaacgggtacaagctggtgtggtttgaggtgggatatttgtgttcctcaacatgttgtttcgaacatcaaaacagaaatcctgttgacaaaatagtgtggttcgtatccagctaaaaagtaatatgcaaacaatgtacgtatgatgagtaaaaaagctaatgaggttggatatattacctgattgcctgtatcaatatccacttcgtcaggacaagtctccagtactctacgaatatgctgttgtctttcatgaatttcttcaaactgagtaccacccaactgggtctcaagctgcgatgcttgggatgacagatccggtgtgggtt

SEQ ID NO: 66612 - DNA, 695 bp, Zea Mays
ggtgatgctgtgagaatgtccggcgcggaaagaaacaagggagccagaggtagtgcagatcccgggcgcgataggatgttcgaacggagcaacagataagacatgtcctatagttcaggtcaggagagaggacggacggtccggtcctaggtacaactctggtttgaaggcctgtttgggagtaaataggttagagagtattgaagaagctaaaatccctttaatatttaaaattaaatagctaaagtattttagtcacttcaatcttttccaatctccttggctccttgctctcaaacatggtctcgtggttggtacagacccacccgagttttctgcgcacaaagggttaacaataacaaaataatgcatgttattaattataggattaatactactgccaacgagttcaaggtcattttcagcgggagatgatgatgtggaagagtgggatggtggggccgaattggcaatgggaaatgagccctcatcaaacgctacctcacgagaaatatataccggataagaaccgcaatcaagacacttagtattatatatatgagtctctccacccccaatcagattgaacacacttgatttttgagtctagaaggcgctcaacatgggattgaaattgaagaaacaaacgaggagccctcaggcctatcacgcatcaaataaatccaccataagtc

SEQ ID NO: 66613 - DNA, 359 bp, Zea Mays
agatcttcatggccgaagaggatgcgtctaaaatggcctttatatgtccaggcttcattggtttatttgaatgggttgtcatgacatttggtcttaaaaatgctagtgctacttatcagagggctatgaatttgatcttccatgaattgttaggaaacattgtggaagtctacattgatgatattgtagtcaaatcggctgagtttagttctcatatagctgatttgcgcaaagcctttgataaaatgcgtcggtatggtttgaaaatgaacccacgtaaatgtgcttttggggtgtcggctggtaagtttttaggatttgtcatccatgaacatggcaaagtgtcggggaccataatt

SEQ ID NO: 66614 - DNA, 807 bp, Zea Mays
gaagaccgattagttgttcctaagaatcctgaactcaggaaaaaatattggacgaagctcatctttccaaattttccatgcaccccggcagtaacaagatgtatcatgatctcagatctttgtattggtggaccaggatgaagagagaaattgctaagtatatatctgaatgcgacacttaccaaagagtcaaggccagtcatttgaaggtagcaggtaccttacagccccttcccataccatcttggaaatgggaggatgtttgcatggattttattgtgggattgcccaacacctcctgacaccatgattctatttgggtcattgtggataggttaaccaagacagctcatttcttgccggtacataccacccacagggcagagaagtatgcagaaatttatattgaccagatagtgtgtttgcatggaataccaaggactatagtgtcagacagaggagcaccgttcatagcacgtttctgggagcagttgcaagagtcacttggaacccatgtaataagaagctcagtgtaccatcctcagacagatggtcagacagaaagggtaaatcagattttggaagacatgttgagggcatgtgtgctgcactatgggaagaattgggacaagtgcctttctttggcagaattctcttataacaacaactactagtccagcctaaagatggcaccgttcgaggccttgtatgggtgaaggtgtagaacaccactaaattggtcagaagctggagagagggaaatatttggacctgacctagtacttgaagtcgaggagaaagtcagag

SEQ ID NO: 66615 - DNA, 529 bp, Zea Mays
accataatggatcgcacatgctctcaacatgtcttcaaggaattggttcactctttctgtttggccatcagtttgctgatcgtacgcggaacttcttattagcctggttcctaaggattcttgcagttgctcctaaaatcttgctatgaattgggctcctctatcggaaacgataggctgaggacaaggcatcatcttcggccctggtatatgtcccaagcaactcgtcgctagtaacctcaatgcatttcaaccagtcatcatttggttcatcgaacttctctctgtatctgaaggtatatttcaatcgaactaatccaccttcgctggattcagcagtagtctccttcggcatctcccagctatccacaagtggccacactctataggctatgtgctcttgaattatgtcccttgtgccaatgaaagcacatacattgctaaaagccttctggcacgcttcggcattactttcaatagccaccttcggaggccgaagcgatactagatggggcgctggataatttcc

SEQ ID NO: 66616 - DNA, 353 bp, Zea Mays
gacaacaatattttttctctcctactgtttggaagctatatttgcacccggaaggaaataagataggcaaactttcaaacgaatatctaaaacttcagatccacaacggatcagcatatatatacctttcaatggacattgaaacagttgcgaacagagcaaagtcaaatcacaccggagagatcttggaacagaaatgacagatagagagtgcagattaaaccgggacgacatgcacgcacctctagattagcaatggagcgctgttgaaacttgcaaactcatggtcaagcaagctcaaacggtgggagagtagtgaacggtttgatgccagtaaatacaatatattgggg

SEQ ID NO: 66617 - DNA, 762 bp, Zea Mays
cggctacgggaggaaggggggacacgacgacgaccacgagcagcaggcgtaccgaaagccgaagccctcgtacgggcacggggacggcgacgacgaccaccaggcgtacaggaagccgaagccgtcgtacggggacgagaggcccagctccggccggaagaagaagaatgtgagcgtaggctgccgaatggccgatgggccttgaactcgtaatctgggctgttttaaacatggtgaaattacaggacgacgacgatgactctgatgacgacggcgcgaggaagccacgttacaaaaagaaagacgacgacgactcggatgacgatgacaggaagaagcgctacgagaagaacgaccgccgccgccgccacgactatgacgattgagctatatgcatgcagtctcgtatatacacatgtgctcgagtcacgcgttatgcaatgtatcatccccattgcatctcctactagcagtactgtagtaaataagcgaagctgagatgcagggggatgcatatggtggacacagttttgatttcaagtgacgccgctttacagcctacttcttccttgtttttgttcttcaccttttgtactgttctgatggtaacctgtatactcgcgcggttacttgcgaccattgtttttttttgaacaaaatattactgtcgattttcaggttcacagtaactaaaaaaaacgtcatatacatgacatgctatgctacacaggtgctgttcttcatagctggtgaacttgcatt

SEQ ID NO: 66618 - DNA, 571 bp, Zea Mays
cctcacttgactgctctcaagcgcatccttcggtacttgcagggtactccggactttggccttcattttcaccgttccgctacgactgagctcaccgtatacactgatgctgattgggcaggctgccctgacactcgccggtctacttcaggctatgcagtcttcctgggtaacaatcttgtgtcgtggtcctccaaacgtcagaccacagtctctcgctcgagtgctgaggctgagtatcgggctgtggctaatggtgttgcagaagcttcctggttgcgacagctcttgatgggactacattcccctttgactcgcagcagcttggtctattgcgacaatgttagtgccgtctacatgtcctctaacccggttcaacaccagcgcaccaagcatattgagattgatcttcacttcgttcgtgacaaggtcgccgttggggatgttcgtgtccttcatgttccgacgacatcttagtttgctgacattttcactaaaggcctgccatcctcgatcttcaccgactttaggtccagtctcaacgtctgccgtggctagagttgggactgcg

SEQ ID NO: 66619 - DNA, 285 bp, Zea Mays
gcggtaggtgggtgtgtgggagatgaatgcatggcgaccgtcagattcacgtcgtggggtctggattagatcttggggtagcgcttcgacgttttgataagagaggtcagatcggtggcagatgatccagatctgatcctagctaattaaatcgtggccgtgcgggttagatcttacggtttagatcccataccggttcacgtgtcaatctgggccaaccacaatagatctgacggctagggtgaactcatacccctttggccaatgcgttttgcatatgagtcc

SEQ ID NO: 66620 - DNA, 310 bp, Zea Mays
ctcgcttgtatatgtgtaaaggcttgtattatgaggttgtgtgcccccgcacacttggctatgcctgcgaaggcgttgtgtacttggtctggtgtgttttgttatgctatgctggtgcgcatatagtcggtcttggcgcggacagtttggtgttgtcgtttttgcttttgttgtgctagtccggctgcacccttaggcggcttctgcacggatagtctacgcggtagactttggtttctttgcacttgttgtgctagtccggctgcacccttaggcgacttctgcgcggatagttttcgcggtagacttc

SEQ ID NO: 66621 - DNA, 678 bp, Zea Mays
aaaagcctaaggttgaatagctccccaattgaatttggaatagtctcaataggcaagcctgataagtctaatactgcaaggtactttggtttggaggaaatagaagaataccacaaagataatgtcatgctggtgtcgaacgttatgaaggtgcgaagcctggatggatcaatggttgatagaatgtccttgctgcattggagcacagccactcgtcgggaatatgattccactagcattccttcattatttccatcataagttgtactaaaaccctctcgtttagattggaaaatggctagttcacgcacaagatcatgcattcggatacatctaaccctaccaaagctgttcctctctgcaacgtgaagcatgctccgtcgtatgagttctctaagataactttcagcagtgtcttctaagctgcatgcccctttttgttcaataaatccttcagctatccacaatctaatcaatctctttctgtgtattagatagtcttctggaaacatggcacaatacaggaaacagttcttcaaatagtctggtaggtatttatagcttagatttataattttctccacgcgattaaggttctcattgttgtgtagctcccagataagctgatcataaaatagcttccactcagcaacattctttggtctcaacgacaatatg

SEQ ID NO: 66622 - DNA, 859 bp, Zea Mays
aagagaagtaagcttagagccaaaccaaatatcgtaagacaatgggaacgacaagtacgtaatgttgcaatggttcatatgatatgatctttatgtgcgcataacagttgacatgtcttgctaggggatgctatcaattattgggccaagtaagagtactcgggccacgtctatgtgtatgtgaacctatagggtcacacacttaaggaagcctaactcggattagatccaaaattagcctagactttaaggttactgattgagcctcggagtcagaagcccaccacctgcaaaccagcagtcatgcctctctcgccctcgccaagccgctgtcgcacctagcagttcggtatgcggcacttcctccctctatgtgtggatacctcggaggtgctgcatctagagcactgagacgaaccacacgaggacgtgaaggacgccgatgattgcacaccactgcttaacgcgtttgtcaacatcgagacggcttctgctgctctgcgcgtctagtggtaattccatgacctataacaacagtagatcttgatttatggggttaaattttttgttttgagctactgtagcctcctcataattcatcacctgtgtcccaagttcttcggtcgagtcccagagattcaccatttggagtaagtctgcacaagcatcccccatcgaacacaaatctattatcccccggttttcgaaaccatgacactcctgctacgagtttagtctataccctgtataacccaccagtttcaactttgcaaaacccacctaaccaaatcaccccactcataacctcctctaaacccaccaaatgaattacacccacacataaacacgccttcaaaac

SEQ ID NO: 66623 - DNA, 884 bp, Zea Mays
tgttacatatacctagaaaacacacaaaaaaagaggaaagaagaaagggaatagaaaaaagaaaaagataaatcccccctcagctcagcccaggccaattatagcctagaggctcactctcgcgcccctctccatgcgcttgcctccacctcctcggcccatctacgcccatgtcctcgcacccgcgcgcccatgccgtctccccctctcctttcgttttcagcccagccccacttttcagcaccttcttctccctccccctcatgggctcacagtgcacacgccctcgacgccggtcggcatcctctgcctcgatgatcaccatagttgagttaagcatcgttttgtccccatctgttgtgcgcatgtacctgcacatcaccattgtccttcactcgtcatggcatcacatcactgtcgtccccacccatgtgcgccgcccctgctccccgcccgctggagtctagctggccaccaagttccctaaaccctccacaactcgcatcgatcaccatccctcctcctcccctcccatgagcccaatttaagcaggcgtcgccaccctccccagctccagtgagaccccaccaaccccagtcgtccagagctcaattaaacgagcgcacgagcttcactagctccacacaatcatcgtgcacctcactctgaccgatcaccggctggagccacgtcatcgacctcaccatcgtggtggccctccaccccaccgtggttagccctccctagctcaccaccaaccaaattgagcccacctccatgatcactcacctccacccgtgctagtgcacctccccatttccagagaaccaggccatcggcggagaaccaccgtagaccctcaccaatgtccagttctcctcgcc

SEQ ID NO: 66624 - DNA, 1168 bp, Zea Mays
tttatttgcacaaagatatgtgctttcctaaagtttatacctttgagcaacctcctctctagctagctatgcctgggataaccctatagctttcaagaatgtgaaagccatgcatgcttttgccccaatagcaaatgcactcttctttattttcagcctaccatgcacctaagaatcacgagagagatgcgtatgtttccgtgtccaaattatatgttcatggatttaactgaaattggaggatggaaaggtgaaggtggaatgattatatgaaatctagtgagcgatatcttggcgaactatgtttgtcgatcctacagttgtttaagagaatgtttggatccacagtgctaaagtttaacactacacttttagtaaactttaccaattggagatccaaacacgaatgctaaaatgtgctagaagaaggtactaaaaataaactgctaaattttagcacccattagcacaaagagtgctaaagtttagcgtgtggaatccaaatgggtcctaagtttctttcatttgtagtcttcttcctatccctgattacttacaccaggcaatgatcaaagtaggaaaagaagcataaagtttgcccttttgatattgcctgaaatcttagcctttagttctttacgtcgcctttaatttagctttgctacttacctttctcatgtttataagctgcaaataggtttctctagcatgcatgcacatatgcacgggcatatctcttctctactgttataaagcacaattttaccgttccacaccatcgtcgcgtgtcacttaagcctgtttaaacgttgggtcggttgggttcgggtcaagtcaagctcaggtctgtgggtcgtttggcataacccacgcctgacccatgcatggtacagtatcgggtcaggtcgggttggctcgtgtctccttgttggacggattgggtcggggttttttcgggttgagtcaagtttttttggctttggatcagattttttcgggttggtcggattttggataaaaaatgatggctcatacccgacttgtggatcgctgcgggtcaaaaactatggctcgtacttgttcattacattggtcgagtcggatggtccatactcatgtctatgtgtcaccatttttctcatatttaaatggtaaaaaagttaaaatt

SEQ ID NO: 66625 - DNA, 468 bp, Zea Mays
ggcatacaacgaggcaccacatggttcgatggtgcaccagaccgttaacatagagaagtatttcttagggctttgatagttttggcacaatagaccagttcggatagcaccgatgggataccagaccaattgcgtagagaaggaagttttgggtctaccaaagtcaaacactaatggcacattggaccaagcaccagtggtaaactatacctttatagtttaatggctagtttcaaagttcaacggttacgctgatgtggcgctgacatggctcaatctagaggttcaccagactggtctgatgcatcctaacagctgataacttttcagaacgatcactaggaacaatagtctgacataagtctggtgcacctagtatctgcataatttgggtaacaactagtttgtcttgtgggcaacatacatcactcgtccatgcctccaacacatacaagcaagtgttcagaa

SEQ ID NO: 66626 - DNA, 545 bp, Zea Mays
gtgtgacccaaccattttgaggtggtccttgacggggatggcagacgatgatgatggaaacttggtgcacgaccgattatgatggaaagagatggtgtgagtgggtctagacaaggcagaaggatgagacactagtgtgggtgagcgtaatcaggcagggatgtactgatgacaatggattttgccactgaactagagctatgatctatgggtcaaaaggggggaaaagagggactacaccgacattgacgttatttaacggcaagggcacaagtgttggctttgccaccttctactcaagctcaccaacaaagcaacttgtgtacacatgtgctagagcaacaaaattagggcagtgaccatcggtggagcaacaaaccgacaagctggccgatgtcaccgttcttgactaaaacatgcctaaacttcatccttggtcttccagtttcacatagaaactttgggatctggcttaaggaaagatgttctctaatgtgtgctataaactttgatttaatgggaataatcaaaagatcaacaaattc

SEQ ID NO: 66627 - DNA, 419 bp, Zea Mays
attttgagcgttcatcgggagcgggtttcggcgggacggccgcggtcgattcggacatttgagcagggctgagttcgcggaactaggctgggagcatctccgggacgcctgggtgcagtgcgaatttctcgtcgtcgctcttttgccgccgcagggctgtggcgtcccgtggcctgggatgttgggcacgcaactcaaggtatggatgtctcccctggattcatgttggccgccgcttagtctaggtttgattagtctgggtaatagaccatagaatcaccgtggacttatggccgaacccgtttcgccgtcgtggatctgtgctgagtggtaggcaagtcccccccacggcaccaccgccagtaggcatccttctactgtgtttgccaatatctcctccccctatttctgtattcatg

SEQ ID NO: 66628 - DNA, 322 bp, Zea Mays
ttgggtcacactatctctcaagatgacatagctattgatccggataaggtgcaagaggtgatgaattggaagccaacaacgactatatgtcagatttagagttttctgggattggccgggtattatcgactatttattccagatttctctcgaattgcgaagcccatgacagaattgttgaagaagggagcaaaattcgaatggggtcagaaatgtgaagatgccttccacaccttgaggctacatctgaccacaacacctgtgttagcgcagcctggcaacatcaagcagtttgatgtgtatggtgatgcctcgggcactg

SEQ ID NO: 66629 - DNA, 846 bp, Zea Mays
ggggtttgtatttttgaagaatccataacagtgtctagtacgctggccattctcctcctttttggatttattgtaggaattttggacaccttcggcagccccggctcttgtggcgggctcagggtttttggttgctctaccgacctccttggttctagtttttcggctgttttctccttagttttggtaggtcgtttcagcacttcgactgtctcgggtttcccctgttctgctatcatgatcggtttcagcacttcggccgattctcccttggcttcagcaagagctgggtactctggctcaacagcagaagaaggcccctcagcatgcttcgacacattggccgtctcaatatagttgggccggtgcgtcaaaactttaaccttttccccttcggcgttgtagaaatagccgaagtagtagcctttctcttctttccctgctttcgcgagggatagaaatagtctaggtacacaaaaccaataacatcaaagactctattcaatctcttcttgtctcgccctccgaaggccactgttagggcatcatcctcggcccttgtgttagcaccaagcaactcatcgctagttgcctcaatgcaatctagccagtcatcattcggctcatcaaattgacttcggtacctgaaggtatactttaggtaaactaaaccatcctggctggacccagaagcagcttcagtcggcatctcccaaccgcttgagagcggccacactctataagcaatgtgctcctggactaagtccctggtgccaatataggtgcaaaccgtgctataagcagcttggcacgcctgaatatcattcccaagtatgagaggcggtc

SEQ ID NO: 66630 - DNA, 345 bp, Zea Mays
ggagacactctcactaagagaagctaggagccagaaaagaaaagcaaccagcccaacactacaggaggaggagttggaccaggaaatcagagacctggaagctatacatcagcaagtacagaggaaaagggaaaagatgcttcggctagctgaacttcagaggaagatggacgaagccaccgaagaaatgcgccacatcacgaaagatgatcaaggacgagggcctcaacacagagagcttcatcaagaaactccaatcaacgatgatggatggtatgatgatctttaccatggtaactttgcttttgatgatgcttctcccctgacagcagagttgcaggctac

SEQ ID NO: 66631 - DNA, 372 bp, Zea Mays
ggaaaggtataacaaagctctacctgattttcacaatgattaaaacaaattactcacaaaaaatctccagaaaatgatactactactactgttcgccacccacaaaatttctagacagcacctctaccgattcgcataggtaaacatataaccaattggattgcagcactaatacaaaaaaagataatcacaaaatcaccttgaattctccccccttctctccctccttcttccttccaccaaattctaattgaagacttgcaccaacacgatgtagatggaagcggggaaggggctgcccttggagaggaggagatggggggcggctagggttgtgatggctgcaagacttggggaaggaggatatgggag

SEQ ID NO: 66632 - DNA, 892 bp, Zea Mays
caactctctgatgaccaactctgtcgaccaactctgcgaggcgaaccggttgaccaactctctggatgaccaactctgcgaggcggactggctgactaactctctgatgaccaactctccgctaatcagctctggccgaccaactcaccgacgagcaacctgacgaggcaaaaatctgagtccaacgctacagatccacgttagctacgacaggacgtgtcaccatcaagccatgtccggacatatgcacaacacatcgaatgggcactagggtatctacagtgacccgtacatcgaaaggacgggacagtgtgccatactgagtgtaagcctacacatgctgacaggtgacgaagggctcatgacgacaggagaatccacgccacatacgaccacaccatgagacttgtccgtgggacccgccgcgcaccactacaaagactttagtgatggacacgctacaggagccagagtaatggacgatgccataccgagagtacggctacacacaaccctacggaggacccaccatgacaactcgggggagccaatctctctctagtagaaaacatatcttctctataaggtcctgtccttgagatataaaaaaggcaggccccctccttcttcccacacaagcacacatgctataacacaatctactgcaattcgatgatcaacactacactgtactagggccccatcctaaactagtataagcccgtgtctcagatttctcttttagtcctagtgattcaccatttagagtgagtccgcgcttgtgtcgtggtttcggaaactagggtgcagtaagatttgtgttcagcaggggtgctagcgtggactcactctaaatggtgaatcgttactcgaatgaagaactcggaacacg

SEQ ID NO: 66633 - DNA, 913 bp, Zea Mays
cggacgcctactatacgtgccatcgacgccatcgacgccattccgcccgtagtgccacatcggacgcttgcctcttggcaggtcgcccggattcctttgcgggctgatcaactacgctcggcccagcggacgatgctcggcctgacgatagacccgcgtctaatctaaaaaagaagaagacacaagtatcacgtattttgagtttttttccaaacagttctacaagtaatcaagtttatacaaataccactaacggtctatggcgccgaacaaagataaattacattaatcttcgaatatacgtactctctctctctctcctccagcaacaggatacggatggtcggccaaggcaaccatgctccttagcatattatttgctctcctcccatgacatttgtttaacccggtgggtgtgggttagcacatgggcaagaggtagcgtccatgatggagctggtgagtgtccaaactacaaacagatgcacccccgggttcccgtcgaaatgctcctctaatcacccacccacctggtccttgtaggggctgggctctagggtgggagaaaacggaacaccccgggtggccccacacgcgcacatcgggagatgcccgcctgacctctacgcctccggccgtccccctctctctctcactttctcttctctctccccggccagacacaaaaacttttacttccccgaggcgaggcccgcagaagcagagcaacgcaccagcacgcacaggcacatctcccctacaacacgcatgcccacgctctagctagagaagccgccctgccctgctgtggtggtggtctagagacaaacaagcctttggtctccgtgcgtgtatcatcgtgttggtctgcctccctccctccctcggcccgcccccctgcctgccttctcgc

SEQ ID NO: 66634 - DNA, 731 bp, Zea Mays
gctgcaacaggatcacacccattggggttagcttcagtaggatcacacccattggggtcagctggtgtacggatacattcgttggggtcagttggtgcatggtcacacccatgggggtcaacttcagcaggtacaccaccagcgagatcaactccagtaaagacctctgttggtacttcttcacaagcagcatcagaaggtccagcatcctggtccaagcatgacaaccactgaagccgtctctttttcttcttcttcccttcaacaggtgcagttgggcggttgacctgacgaagacgctttgggcgagtaccctcaggctttcgggtgtccactattctattgtagcacctaaaattctattttgggaaatgacttccaataacaatttcattcctctataaaatatatctctctaaactaaaacacataatgataactaagaatttgatattcaagatttatctctaaaacttaaaactaaaaggttggagcaaccaatgaaagagagactttcaaactacttactctttcctttataaactatacaaataatacgccccttaaaaatatagttaaactaaaaataattcatgggacaatatgtattaaattctcctaagtagatatgtaatgaagattttcttttctaagtgtgcattcaaagttatgttttctaagtaaataaataaataccatgtgtatattccattattgaagtgttcatctaa

SEQ ID NO: 66635 - DNA, 425 bp, Zea Mays
agattgttaagcttttagagacatgagaggacaaaggacaacagcgaaatccattaatccacatggatatgccttttaaagataaggttggcaaaaacaacgtcatgatgcctagagaaagagcatcggaaagactagaaatgagagattagattgatcgacatccgatacttgagaatgggttatagcggataaccagataatatggcagaatcatagaggatcccgagattcggatgataaagccaacatgattcacaagaacgaggattaccagatccaggctaaaggagaggtaggcaaaccggatcagctaggatgattaacagaaatgctatgatgttttaggagcaaggatttatggaaagaaacatgaccttgatagggtttgcgtaactagacaccaacaacaaatatattttttt

SEQ ID NO: 66636 - DNA, 272 bp, Zea Mays
tgatcacgttatttatatcaataaatggaaactcaattcagaaattgattacgttagttattttacgtagttaatcattgaccttgtttaatgttgaccaattgaaaatagttataattctattggtgcatgtgactaatacttgttagtgtaactaggtggaactagatcacgtaatgattagttatgcatctacccgtaatatgcttcgagtatagctttaaccactgcgagaccttccttcttctctttctagccatggcaaatgcaat

SEQ ID NO: 66637 - DNA, 655 bp, Zea Mays
taaaaaaaaacaattttctgctagatatgcctttgctctatagtttgatttgatatacctgttttctcacaaggacagcaatctaaaaggctattccactcaaaatcacatggataggttaaggtgaaatacagtataaacaggaattgttgcatttttctgttatctggagtctggacaaaatgacaggtagttaacaaaagatggcagagatggttggcaaccaatcagttgagttcagcatgcagtagttgagcgtgcctatttcaccttctattaattgatgatacttgaataaaattggcacatccagaacaaaattaattgatgacacttgaataaaatttactatggaaacgaaaatgtacctacaatgtctggcaagaaattgtctccgcacgtggggtcttcatctttcacctctatgcaaataggatccaatcatccaaccactctagcctattgcaaagaactacagtaatccactgaaatgtttctacaaggcatgttgcagtagaccttccatacgtagcagtgttttgcatatcattttcccactgtcatgaatccatgatagatatagcaacatatgacttatcagataacaaaagcaatgggccagactacttcaagcaaaaggttcattgagagaaat

SEQ ID NO: 66638 - DNA, 441 bp, Zea Mays
tgaagatagagatagagaaagagaaagagatagagtctggttgcacggagagaaggttggcgcatgtttcaaatgcaagtattgtagagaaacaaagagcggaggggatggtacccgattgaaggagcatctcgcgcatagagggaagaatgttaagaaatgtccctctgttcctccagacataaaggcatacttcaaacttgacatagacaagacaaaggaaaagaagagttctaggttcaggcagcagttgagggcagatgaggaagcacaaacccattttggggatgatgagtatgaggatgaacttaaagcagctctgcatctgtcacgtgtggagcacaaatttagtcagagggctggtgcaaggtttgacaggggtggtagatcctccagccagagggtatctcgagggccacttgataggatgatgggaaggag

SEQ ID NO: 66639 - DNA, 484 bp, Zea Mays
gttcagataactcaccgccggcgaccgtgcgcccggattcgcgcccactgcggtgattcatgccccgcgcagatggataacgacaaggaggtaagaaataccgcaccgtggataaactccggccactattctactccggccgccgtacccgcttttgtcacgatcgctttggatagcctcgccggagttagccactttgcgaccttgcgccacatgccttggttctttaaccatgccgcagtgagtcatcttagcccacccgatcgtcgccggtgagcccaccacggtaaatgccaccaatcgcttgcgccagagcacccccttctctccggccgccgcgcgtctttccccgaattagtcgccaccgctcatggatcctataaattgagcctgccgtcagttccgcaaggtagtccagcatccaatccacccactcgtgcctccaattactcaccaaagagccccaatttgggatttcccccaa

SEQ ID NO: 66640 - DNA, 884 bp, Zea Mays
ccggattggatcgccagctcagagacctcgccgccggtgaccacgcgcgcggattcgtgctaccgacgtgattcacgctgaattaaacgtggataacgataacggggtgaaagatctcgccgcggatgggctagaatgtactgtgtgcttgatggttcatcagtgcacaccgacgacgtggccgagcggcaatcaccggcgtgttcgctgttcatcgagtggacgccacaccttaggaggtttatcgcgtcagtatgagccgaagtgaccatccaatgaccgtcgtagttcagtcgctctgcggttgccacggtagatcgccgccatgactcattcccctatcggccgccaccgcaattcgtccaaattaagcaacaccactcacggactctataaattgagcacgccatgagctccgtagggtagtcaagcacaaagccaccaagtcgtgccctcaattgatcaccagagctcgccaatttcccatttcccccaaacctgctttccgccaccgtgaaagaggcctcgccgtggccagctcgtctcaggtccgctcataccctctgccctttcgttttagtgttcttttgtgcccctgatgctccccaaccccgctaattagactaagaccccttagatcaccgggaacgcgtatgattgttcgtcgtgccctctgccaccgtggacagagcgtgttagagcgccgttagtgaaattagttgaggggaaactcttgttagggtttgaatttggtctcaaccaaagtagagcaccggtcatcgagtgatccggctggtataagctcgccgttcgccgtcgtggacttggggttgtgaagagaggaaagtgcaagggtgtttctacaagtgtcagcgagacatagg

SEQ ID NO: 66641 - DNA, 839 bp, Zea Mays
cttgctttgcctgagaaaggaattgtataatcggatggaatggcgtatcatcataatttgcctggtttgctgcccaacaatatttatggagatgagatcactattacacttctggcttctagcaacgtaacttcacaccttaagcactcatgaaatgctctgtactcttgtttgcactgagtttgatttctctcggtctcggtcaatgggcttctacacatacttttaatcttacagatagaactgcagagcagcaaaggttgagtggcttgccacatcatgacactccaccaaatagttatttcagaaacttcgatatgactaaagcatagacaaggcaaaattaggaatgcaccaaacaggtcgttggttaaagttatcttaggaaagtgggttgaaacagatttcatgatgaacactaccaaaccatctctgcagagcttattccacatttatcacttaattttttaattccaattttaaccttacatttttaaagaactaaaattgactgaatttttagttatttattttttgtatcattgcttgttgtaccctaaatgatattttaccaacagtactattatgaatgttacatttacacatctttatgtattgtctgaactggttagtggttatacattgtgggctcactgtttaaggactgcttcttgtaaaatctctttattcatcctttatttgtgcaggggtttgggttctgtgctagaacttaacaatgcattggtatcatcagcattagacattcttctcaagcctatgtcatggggaatatccatagaattagggcagagatttcccttttctcatgcttacttccc

SEQ ID NO: 66642 - DNA, 556 bp, Zea Mays
gtaaatagcatcatcacacgtgacatcgacttaaccgcagaggaagcgatgactacttcggcatgtcactacctctctacagtccaatcaatattaactacatcgatcgaacctcatattgcgcaactcttataatttactatctcaaatacaaccatagcacgacatgcacttgagactctttgttcaagttaacgcaatcacaactaccatacacatgcgtaccactttttcccccacgtacttttaatctatgctaaaaccatactcgtgcacataccaacttacaaacccatgcacaacgacaaaactgacgaccatctcactacaacatctaacaagagctgtgaatccttaacatgttcacacccgactttttctataattgtcgcggctcctcggcaccagcaatagcataaaaatccccacgatcgctaagtatctcatcaaaagcttcgacctcttcgcctatccactagataaccccatcgggatcaccataaataaatttctgctccaaagaataagctcccacctttctaaagctatcttttag

SEQ ID NO: 66643 - DNA, 567 bp, Zea Mays
atgctagattggaaagtaaaggcactaaaagcttagaagcatggttaagccaagtattgatcatcaaaagaaaggaaccctagccttcataccattctcactcatgaacaaggttctaaaaccctaattcccctattaagccattaaaccctaagcatgggattaaaggggaaagagtgggcaaatgaccaaatcataaaagggaacctttaccaaagatgaagtatagtagtaaatctacaaaatgtattaagagaggtattgcaaaaagggccaacaaaaaccccaaaaccattcactaagtggggagcacacttgagccattcaaaaattctctaagtcccaaaactcaccctagcctaaagatcagatgtgttcacccttgtgctggcgccaaaaccacttggactaaataacaaaaagtggccaattacccaaggcacccacctgcaaaagttgaaatcaaaccatggtcgtttgacatggtttggcaccagttttgtcgctggtgaatagtgcagacagacaagacttggcacccacatatctcacaagctaggacagatc

SEQ ID NO: 66644 - DNA, 880 bp, Zea Mays
acaagtagacttactaatttttatacaagttattttgcgctctagaactaccatacacaattaatcaacgcattcaccacaattatcaaatccggcatatatgtatattgaagcgcttttcacccactagttcgcattttaacttagacaccacatgagcattactaatttttttacccgcgaccataaccatacgcatttagactacaacaagcaattcatcgtgaccacgaacttaacccaaaaccatctaacaaaactgctaacccattattgtagcactccgagacacaatatgtatatagcaatcacttatcgcaatcgactctttttcttaacagaagttagccaacacagtataaagcttagcaaactattttagacatcgcaactcaaaaacataggttggagcaggtcaatcagtttttcctaatcattgctcaacttaaattagttaacacacaagtcatctaaaataacacattttttgggggtgtaacatagaggcattaacacatggcataaaactccataagacttacattggctactgaaggacctaaagcacttatgggcatatgttatcggattgttcttcaattttaacaaggactgactcatgaacgctactcgccttcaataattattgggctgagataacgctcatataagacctctaatcgatcaacaagacatttatttatccaaagggaatggaatgcaataatgacaaagcaaggcatcgatccgccatacattagaaagcatgatgacaccgatagatgctatcaactaatcgttttaaaaatattaaacttacttctcgctttgccactacactaccctttagtcacatgaccatcgtgagcatccttcacac

SEQ ID NO: 66645 - DNA, 819 bp, Zea Mays
tacttgtgttcatcttactctaatagcatcctttaggtcatgtgctcatcattatatatatatatagtttatatattgagagccttgtgctctcaataactgtagagagccccgaccaccaacactgaaccatataacgtaaaccgagccccacatccgaacccacgttccaggaataccgggtcaggcccactttccacgcggtcaaccgagcatatgtcctcatcgtccacatcacctatttctctaccctaaccccagtcgctgtcctcttccctcgccgactcgttgtcaacccaccataattcatcgtgcagcgcagcggtgactcctcgttcctccgcccctgcacgcttctcaaccctaaccggtgtcgttctcactctcctcgcggtcaaccggagtatatgcccctgtgctgccgccgccattcgtcgttgagccaccaccgcgcgactccataacaccaggtgcccgcatccctctcccaccaccgttgctgcattactctttcccaatctcaccgcctcattcttctgttccatttcttctccgccgctccgccgccgtatatgtgaggtgtccctcatcgtgtcgccccatctgccccatttcatcaccggtgtctaggctgctccctggttcatcattcggcttcaagcactgacagatttgtggtcgtcgatgacaaggaaaagtcaggtcagcgtggcatgcataaatgtatattttgctggtttgtcattgcataaatcatgttttatgaacattttgttggtatgcatacatgtatatggcaattgtacactgcaatgttat

SEQ ID NO: 66646 - DNA, 529 bp, Zea Mays
tgagtgactgcagtagggattacaagcacagcgggagagaggaagtccccaagtccctagaactgactgaggcaagtgtcaatatcctaagacttagtgggaaacgactgagtgttcgccttcgtgtcccttttttcttttgggggaactacactgcccgatttatacatgtaggagatatatgatgtgaagcctagggtcgctgtattccaaggagagttgccttggtgtcctataagctgacgtgatagtgcactgcattgttgacttgtgccactgatttcctactgagagccaaggcagaggccaagggggtggtcatacacccgagtcctcaagggaggggtcgcccataccgtagttgttgtaatagcgccgtggtatgggtaaaagcctgcttatagtgtgcgtcagcgtccctgtgcggggtgacgtcgtgattccttgccacatttatcgaggtcagagccctgctcgagcgaggcagaagtcttcccgaggcgtcggttgagccatcccttgacatgtg

SEQ ID NO: 66647 - DNA, 632 bp, Zea Mays
tcaagcgcggattggctccaaatctttgagattatggccatgatcccattgagagatctcttcccctgacatttctttgtcgtttgtgtgtggaggcttatgggttttgctgactggatcaagagatatggaggggtgaagttgggtttgtctcaatgctgaacaccgagagaagatcccgggtttgacgtatctagggcacgcgtcccaatgccaacttcaggtatgaggtagaggggttagttaagcacatttttgtcaatgggagctttgggttttgagatagagattaaggtgaacgcgctcggttttggtttagaggctgaaaattcagaaatctgaatttcagatttccctatgaaacctccacttggatggctttcttgaggtttttaacaaactattttggccaaacttttataatctttattgtagcttagttagtgtattccaattttaataattggcctaagccgtgattccatgtttttcatggtctttttaccccttttcttccttttctacttaagtggctcaattagggtggatctagggtttcaacatttttccccttttgaaaacctcatatggtttaggcatgattctttagataaaatcttagtggatctttt

SEQ ID NO: 66648 - DNA, 317 bp, Zea Mays
gtgataactctcctccaattaattcaccctgatggtgatttgcctcacaaagaggttcatcttgatgatgaagttcctagcaatgcgcgcaatatcattgtgctaggaatacagaacaatgaatctttcgtttttgggaaatgacgaagatcattattaaatgtgggagacaaatgtgtcgacacctatattgcctctctagattgcaaagggatccaaaacaaagtcctaggcatgagtgcttgaagctctcttatccggtctgataaatgcaatcgaggctgaaccaataatcacaaaatcaaagacacgagctc

SEQ ID NO: 66649 - DNA, 660 bp, Zea Mays
atttgcatcacttgagttagagccaacacaatcatgattatcaagtgaacttgtggtgtgtctttcatcatcatcacttgaccatgaggtggagtattctttcacaaccaccgtgttgtggatgtgctcaacatcctcgctagagatcctccaatatacgtcatcaagatatgtccaaatatcatgagcagtctccatatacataatttccttaaacaccttatcacttatccattgatataaaatgttagtagcttggtgttcaagatgtaagcatttctcttttgcttgggtgagatcttttgtgctctcatcaaagggtttataaaagcctacacttatgatccaccataattttgcatcaattgtatgaaaataatggctcatgcaagttttccactgtgcaaaatgtgtgccatcaaaaatatgtggttcacaagtaacctctagccctttagtcgccatccagcttactctcgggtcggttaagaccaccaaatgagagaaccaggctttgataccacttgtagggtcgagatggcggactagagggaggtgaatagtcctttctaaaactaattacaatggctaaaacaaataaatacagaattaaaactattttggtttagctaagactacactcctctaacaataacaaac

SEQ ID NO: 66650 - DNA, 298 bp, Zea Mays
gatctgatgtctcccctcccgaggcctttgatggtacgggatgcgtagcccaaggcgcaagtgtggcagactcgcgtcctgactgtagctacgggcccaagcgaatatgaaccggtctccgctgaatctgggagccgctcgagcgtcgagaccggggatcctggtcctcaccgttgtcgtcatcactaggtcgcctgctgaacgctggaggtgggggcggtagaggctccatggtcgtatcatgtaggtgcgccggggtagcgctcacactgatcttgaaagtgaggcatctcttctc

SEQ ID NO: 66651 - DNA, 728 bp, Zea Mays
cacaagtgagtatcatatttaaagacaaataactaatataaaagctataccattaaaatatgcatcatgctggtttttcaccttgtgtgcactccgtgacaacataaaaataatgtgaaaagaaatataccaatggccaaagtggaatttaagatgtaaaagaaattctagaaattagaaaggaggataaataaaatattttgtgggtgagaataaatatataaaaacaaatactattcttacactagagaaacgaagtcgaacatttggacaagggttagattcgtaacaagatccacattcaaatttgaaatttgaaaatgaaaagaagaaaaaaaataataaaacagaaaagaataaaaaaagaaccagaacccgaatgggcccggaatgcccctttcggcccattttccctttaccgcgcgccggcccaccttccatttccttaacctgccgcgcctcatccagttgacatggggaccccacgggtcagtttctctacgtgggcgcgcgtgggcttcactggttggtggccttgggctggcggctgcgtggggtgtgtgtcgtgtcgctgacgcgtgggccccaccttctggcgtcttcctcgcgtgcaccccgagcggactccgcaacgtagacctggggcctgggcgaacagatccgtcgttctccgcgcgcgggatttccgccgagtccgctcaactcgtcctttataaaatcggacgccg

SEQ ID NO: 66652 - DNA, 370 bp, Zea Mays
cagtataaagatctgaggtcatgatacatcttgttactgcctgggtgcatggaaaattttgaaaggtgagcttcatccaatattttctttctaagctcaggattcttgggaaccaccaatcggtctccaaaccataggatccctttgctgtcctgacggaagcatttgtatttttccgccttctgtccgatcatttccttaataacttgaacacccttgtcaccaatctgtgccatgactatttgctcttgtaatgtgggctccactgaaatgtaacttaaagcaccggaggaaacgacttctattttcaacttgcacaactcatcacatatggtggtgattcccgcatccatagtcatacacttgcact

SEQ ID NO: 66653 - DNA, 640 bp, Zea Mays
ccagaactgggtgggaccacatggtagagttaccatgctacacctatggatctaggtgataggcagttgccatgggccaggttaataatgagtaggctcaatctagccatacaaaatgttcggccaagatcagccctccctgccttttggaagtaccctattgaactccccacgaactacccaacaatgaaagcaggatctaacgattgtggattctttgttatgagatatatgtagcactacgactacatggatggagctatcaatgcagtcattgatccggtacataattgccagctaaactttttttttgtgttatgacacaatgtatgtataattatgtctaactcacactttccttatattggtttgcaggataattcagagtacattcgctctcttgtactacattacatgatattccatcacctaaacaaaaacagctccatgctttcagatttagaaagattcatgttctctcagtagtagcctagtctaggtcactgccattgaacagagtttatgtatatcatggtctgttggcttctattagcatacagataatacttttgcccatatctatatttgttatgtaccaatctcctagctatgtcgtaccagatatgttttatatgttaat

SEQ ID NO: 66654 - DNA, 783 bp, Zea Mays
atgaattgtgatatagtgttgtggtggaggatgcatcaaatgatggggaagctaccttagttgtgcaaactacttttaagaactccatttttcttactaccatcaaagacggtccttctcattctatggttgaggataatacagaacctgttttggtagaggacacaccagttgatgatgaagctaccttggtagtgcatggtccttctctttctatggttgaggataatatagaaccttgactggtagaggatcctccgatagatatagtgtcttcttcatccacaagagctagaaaggatgaggaccttgcatgcccgcctttagctcccccctcaccatcaactacgacagttaggcgttggtgtaagtcctataatatctcgtcgcttcatcgaagtgctcgtcttgcacaacgtggtgtgtgtttaaagatttggacattgttgggattgacgggaagcccaacaagagttcaattctagcctgcgcagaccatctaaaagcgttgttgccacttgctaccagacctccttaagaagcttttgagtttaaaaggtcgtgccttttgggactttgtggtggaggtttatctaccttttcattagattttgtctttgttgtgttgggtggctttttcttgtgtgctcgtgttgtcagagctgttatgtgctcctgttactagggtgttgctgttgttggtagggttgacgtagttttttgctatagcggttgttttttgttgtagtcctcttcgggaggttgttgtgtgcctattttggg

SEQ ID NO: 66655 - DNA, 894 bp, Zea Mays
tggtctatacttctctcaatctgttagatctgatctcactcttgtgcttgtgacatctttctaaatgccccctgaccataaccttcttgccttttgggattcatttctcttccatcattaaattgctactgtttgactatctttattcccttagcattgacatgctcgtaccattagattcttcaatactcctgtttcaaatacttacatctaaatttctactgcctacttaaacacttcagtttatatgtccatgaattttttgtcttctgaaatcccttcttattccgttgttaagtcgttatcctttggctttttctattcccttgtcttggtatgcccgtatccttgggatattgcatactctcatctttttatatttgcttatctttatacactaatgtttgtttataaacatttcagttacatgcccttgaccacccttgtttcttgacgatccatgagcaatcatttcattttgcatatccttggtgatctcgttgttttcttataacttccctaggtaataatttcttttacttcaaccattctgttgggaccttacctatctcacccttgattgtcttatccacttcgccacttcgggagtcttgccttaactctatccttggttacgctttcacgattatcatctttacccttatcgcctctatatcttactttgatgcttatattataccctgtcctttaaaaccttctctcttccatctcaattttatagttgtattttacctattttcctttggtcatattctattccttgccgcttgcgagttttaactccatcctttgtcgtgctccagttgggtcttacctttacctttctcatctcttaatcttaccttggtgattacaccatgtccgttctctaaa

SEQ ID NO: 66656 - DNA, 492 bp, Zea Mays
ctcagctccggccgccaacacggctcggccgaattgatcaccaccgcccgtcctccctataaattgagctcgtgactaactccgtgaggtcgtcagctaactagccaccactaatcagccacaatcatctaccagcgagcttgaatttccaatttcccccaacttcgttctccgccaccgtgaaacgagcctcaccgcggccaacccaatttaggtcagttcatgtttctctgttgcttgttctaacattctcatgtgcccttgatgctctccaaaccatccaattgaactagaccgccatgaatcgacgggaacacattcatctgcccgcaaggtccacggtcactgcggccagagcaaacctaataaccatccttgcaattgatttgggggaaatgctcggggtagtactgatttcatgtccgccgctcggagaacccagccatagccccaatcggccggtccagaacctcgccggagcgtccctgcgcc

SEQ ID NO: 66657 - DNA, 552 bp, Zea Mays
ctctggacagtgctcccctctccacccttttgtgccaaattcaaaattctgtgaattccagtgaatccaagtgatgcaatgtgttcctatgtgcccattgtgtacccctgcaagtttctagctccttagggagggtttcacagcctctaatagccatttctccaaaaccctagaactccacacgtcacgtgttcggtgaaatgcccaaaccagccaaaatgctccgattgaacacaaatttttcaggcaccttcataacacctctagtaacatattcacaaaatttcacgcccatccgatattccaggctttaatttcaccaaatttcccgtttcgagcgatcgtttccgagccgagtgccctaatttcattttcttcgcctaaattcaaaccaagcacacacttcactcatattcacccatataaacctattcgtgaagtatcggctcaattccacgtcatttcgtgcctcaattcgaattccaaacctcctatggcactttttatcgttcaaacgtcgttttcacgtcgtttgacctctcgatcgcctta

SEQ ID NO: 66658 - DNA, 293 bp, Zea Mays
ttcagagacacctaccaagtcgttgcccacaaggcattgagggccctatgtcaaatctatgaagaggaagtggctgacaccctgctcagattatttccgtcctttcagagagaccgccctaattggatggccaggatgcgtgccttagaagggcagcagctgctggaggacgaccctacagtcgtgtacctcacggcatacctgcttaccatggatgcacagtatgatctcttggctcggcaccaccgtcagattattgcccaagtagaagatgcagaaaggcgcaaccgtca

SEQ ID NO: 66659 - DNA, 462 bp, Zea Mays
caccgatgtgagcactaaataccacatacactgatagctagtttagggtgtgactggtgcattgagttgataagcactaaacatttctggtgctctcaactatgctgagtggggatgtaatggataatttcaccctttgtggctattgatactcactcacttagcctattgaggtctcttgcccatatcaactcttgaagcaactacttaagagcaagaaagagcctttgactagtaaagaacttgagagtttataattgtgtgattagtagcctcattagtgtattgggagtagcttgtgtgcaccatccatgcatactcattagactttgaaaggtcagcgagagtaagtgcttgttactcttgatgattgatatcacttatatgactaggtggtgattagaagtgtggtgatcacccgaagagcttgtgagtgacctggctcgatcttgtacacaattg

SEQ ID NO: 66660 - DNA, 534 bp, Zea Mays
ccacaacccagatttctggctataaatctttggaccgtcactacgcgtccttttatttccagtaatgtcagcctgcttccctggcctgacatctttcaccttctctagctcttgtaggacctcatccacagtgaacctgccaggctcaacattgttttcacgcttaccattgaaatctaagttattccgccatgaatgagtccttttaaggtaacgacgatgtccaatgtagcataacttgttccttattgccagagacaacggattcttgtcacaataaatacatgcataatacccttttgttgttcgcccagataacgtggccagtgctggataatcatgtatacaccatagtacagcagcacgaaggtcgaacttcctaccagtacatgcatcataggtcttgacacccttccataggttgagcagttctttcctggacatcttggacctgggatgagtaaatacataaaacagtttgttggattcacgcattcccatggtgggtgattaagcggtgtcacaagcactggc

SEQ ID NO: 66661 - DNA, 666 bp, Zea Mays
ggttttcttgcaaagtattgggttgctggcccttgtctaagccccttgaccatagcttctatgacaatgtcgtcctggattattgatgcctaggctcgaagatgaagaaatctttggatgaatgaatagaggtattcatctagatcctgggtacactgaaacaaagcttgtgcagtgactgcctttgactggaatcttggaagctagtaaggagcatttcttttaacttctaccatgaagtaacaattctgtcatgacgaaggactttggcatgactgctgaattacaccatataacgatatggtagcttcgtagctcataaggaattgctttggatcagtcaggccatcatacattggcaatgtggggcatgtataatggtggctagggtgtcacctgtagctctggtgtcagtggggaagcttcatcatagagggagtcttggaagtttactagttcatgacaaagattgttttggttgaagccctcataattctggtccctatagttgttctagtctcgcgcttcaatgttgcgcattacttcagttgcttcgtcaatctttttctgatgttcagaaagatgaagcaccttctccctgcgcttctccaattgttggtggattgcttcgaggttgtagatctcttgatctagctcttggtcttg

SEQ ID NO: 66662 - DNA, 1040 bp, Zea Mays
tgaagccctcgacaatctaacaaatccctaaggaatttaacgagggctacttagtcttaatcaaaacagccaggatgaaaggaaaagacaaactcaagcccaaatggaaggaaccctttgtcatcatcaaaaaagactctaccaagttccctttttacatttgtttgtcttcaagcccatactatttccctcacaagggatatgaggttttaatgagacaaagccatgtaacactaaaccttaacaatgtttccccactaaagtgtcacaagatcaaaagcctaaaacacaagcctagcattcaataaaattgcacaaatcatagcacccaccaagacgcaaagtctattgggttacggtcatcgaagacatctaaatgtgtaaacgataaaaatgatttgaagacgtctaagcacacaaccggaccaagaaaacaatctgagtgaagacacctaaggatgcaaacaattaaaatgattcaaagacgactaagggcatagcttgatcaagaaaacaattcgagcgaagacacctaaaggtgtaaacgaatcaagaaagaattcagagacgcttaaaggcgtagccagatcaataaaacaatctgagcaaagaaacctaaggatgtaaacgaatcaaaaaaggttttgaaggtgctaaggacacaactggatcaagaaaatggtccgagcgaagacacctaaaggtgtaaatgaaccaagaattgtttcaaaggcgcctaagagtagaaccaaattaagaaaacgatccaagcaaagacacctcttgatgtaaatgaatcgagaaatggttcaaagatgcaaaagtgtgcaaccagattaagaaaacgatctgagcggagacaccgcaaagtataaaccaatcaagaaatgattcaaagatgtctaagggcataaccggatcaaaaagacgatctgagtgaagacacctaacaatgcaaacaaatcaagaaataattagaagacctattgagcgcaaccatccaaacaaagacaacaaatgacaactaaaaccaccgactc

SEQ ID NO: 66663 - DNA, 713 bp, Zea Mays
gtgttatctcccgtaaacagcgattatggatttaagcgcgggatatcagtatataaagtggacactaaattttaatcatctcgccaaagttcgagtttggtgtcgttttcatttccataatctaagcaattaaaaaggggttcaagaaacttttggattatcgaatcttcgtttgctggcgaattttaaactgttcagatcacgcgcataagtgaatacaaaaatcagaaaacttctgattttatgtaaaacttggagccccgcgctattcgaaaagaacaatgcgcacagactctcgcccacgtaatcgatgtgtgacgtcgtttccggaaaggattgcactctcgatgctgcatcggtattgcacatttatttcgcgatatgtcgagtcttgtgtccgtttaaaattattagatcaaaagaatacaaaatcggaagcccgacccactcgaatgatttttatccccaaacaaatttatctagaactcgacgaaggaagttttcggaacaaattatcggtgccgaaataagtttatttcggtctgtcgtttcttgttcagatccaaatctttggatataggtaactggtaaaaattaatatgccagagtgttcgctaaatttagagaaggaaacatgtatccatatagcgtgtcgacccactatacatcactaaaaatctggattcaaaaaaatctgggattttcggttaaaa

SEQ ID NO: 66664 - DNA, 441 bp, Zea Mays
ccaaaccagcaccccaacctagagtcctcggtgaacgacaagaataaggacgacgatgtagtgattaaatgattaattttggagtaagtgactaaatctatctatctatatcctataaaactcaccacttgaaacaacgctatgtctacacaatcaaacaccccacactcataacctacactaaacgcactcatcaaatgtactagctaaatttctccataaaaaccaacgctccagattgctccatttatctcatatctcttaatcacatctaacgtttactgtttcttggatcatctctcatcatcgatcacctacgacgatcaatggcccaattcccctccctcacccgtgtacatctcgcggcgcaatcaatgccacagcccgcaagccccgcctatcaaccccagtcgcttcttttctagagatagcaatagggaa

SEQ ID NO: 66665 - DNA, 349 bp, Zea Mays
gagatcttccgcaaggttgctgttactaaccttgaaggtttaggaagaatatttccaatagtctttgtgtgtatatacaaccatagtatgcagcaatatggacctagatgataggggccttaacagtggctactactactgcatctttataatctcgtaactgaacatgactgtagtacttgttagatagcttggaaactctaaccctgattagggtaggcaattatataatatagcacctcccgctgtcgaaactctagctagagcaaatgttgagacttgagactgaagcgaaactctgaaaacagtgaggagggaagatcattggcaaagatgtcgacaaactgcg

SEQ ID NO: 66666 - DNA, 1443 bp, Zea Mays
gaaaattctgttacacaactcaatgtcagtttggtatgggttgtttcagtcaattgagattgagctgtcagtgttggtttttctctactttagggcatcatagtttttgttcaataagtttttagccctggagtgttataccaaagtgatagggcttggtttggagagtaattttggttaaggaagtctagtatgttgttaagaggaattgtgggatccaagggcttaaatagtgaggactagaatggagcagtagtgctttttcagttaaccttagagtttggttttagaaactgaacaagatcctctctctgctgtactccacctatgtgctcgaattggaatacatcactgaagatctagggtctctccatactgtaaatatccagggtttggactgttgtggggggctgtgagcagtagaatccttatccatttgttcactgtctctagcatgggacaggggggatatttgtgtgttgggcttgtgtgtgacctgcaatttatgttgggcatccacgtgtattagccatgcagtgttggcaccttgagaattatctccaccatgtgctgaacaaattcagtgaatcactgccctgtcttcttgtctattgctttagggcacaatccagtgaggggatccctgctctcaagctcttgctggtcctttagtacctctgcagtttgtgttgcggtttaagttcccctctcaatccccaggtcgatttgcccttgttcttcacagccaacgcccaacctggtgaccatacccatcgaaaccaacacctcgtcgtggccaaagcattccagaccgtagcacgctcgtgtggttctcgttccgtgctctctaaaggttagcgaagctcacccagttggaaattttagctctattgttgtgtgttgcatagaacggggttgcgatgtctcggtttggcgccgtggacagcttccgcgtggacccattaacctacattgtccccgatcgacttaacgcgagcaccgagaccctcgtaagtcgttgaagcttcccataccctccgttcaagctctaacgcgtggtggtcacgagagtgggatcaccggtccatcccttctgccactgtcgtcggtaacccaggtctagagtctccacgtttgcattgagcacgtgactgagttcgcttcggttcatgggtgtgctgatgccgtcgccgtaggctatgtcggaccaccgtggccaatccggcatgggctcaccggagctacccgcgacggagtcatggccgagtttctgtgaaagaagaaaaacagaagggcttatgtgttgctgtcagtgacccacgtaaatagcgatttggtctcgtgttggttaggcaaagttgcaagggattttccgcaaaagagccaacgcagggcgcggactgcgagccatgggccagcttgtcctgttgcgctggccgtctg

SEQ ID NO: 66667 - DNA, 477 bp, Zea Mays
tagagccctgggctctctctaactacaggaagccccgaccaaaaaccgaccaggtgctctgaccggccggcacgctttactggttgactgtaatacattgttatgtcaattataaataagagttatgctcctttttgttaccgtttacactcttttggtgtgcgcacgtctcgcggcatccgggcccacgaaaagatcgtgttcccgcaatctgggcagtttacgtataccgggcccacgaatcaaggaaccgagctttcattttctcagctcatctctcccgtaactatcgctcccgccgaaccctagtcaaatccgccgccgtatgctgcttctcctccgcgcccggcgaaccctagactaatcgcctccgtgagcattaagattctcccccgcagttcccccgccgtcgcattctccttcaccaccgcagagacccgccctcgccttatccgccgcatacacgtcgtggccttg

SEQ ID NO: 66668 - DNA, 671 bp, Zea Mays
cccacatagtgcctcgtcatgcactgcatcatcggcacccatcagagcatactttttcttaggatcatggccttcttgccgcatccttctggcaacatcatccagaaactctgcaatcctattctagtctgggtgattctggttatctacaataaagacatgaagcctaatgtttgagtaagatccaaaaaactacacacacttcatgatgtatattctgggtgccttactacttcatgtggtaaaacaaaaaagcttaaatctccttaacaatcaatccatatctcaactaattttagctatctagctttagaaagcgcatgttaatgaccaaaaacaatcttatctccaatgaaaacagatacacatggacaggtgaatgaacgtgatagtgaaagtcgacgaaaagtctctcctagtgaagaatagaaagaaaccaaaataaataggaaaaaaacaaacggaaggcaagctcagaaatcagcagcaggaatgaccataattcatgatgaagtagcaaaaaaagaatgagatgagctaaggaatggaggttcaccatccctcaatgactctgacctccagcctccaacgtccccataatggtataaacagaggagacacaaggcattagaacagacaacaggcatcaaaacagacaaagtatgtaattt

SEQ ID NO: 66669 - DNA, 484 bp, Zea Mays
aacatcctgcagcaggtttgggaagtgtcccgtctcgaacattgaagtgtaatgctccatgataggccatatcccgacgaagttctcctcctgctcatcgttggcttcttcattgttgatttcctcttcttcttcctcttcctcatcatcatcttctccaccatcaccagaatcatctagatcgtcgcctccaggagtaggggcttgggctactggtgctggcggtgctgaagatgaagctccagctgcaaaggctagtgattctgacaacggggtgggtgtcgctagaatctcctttgagctatcctccagaatcactccattctccacatgaaggtgatggagatccacagggacttcctattctaccactaggtagacaggagcctgccgtggcggagggatatagttggtgttcacacgggtggtctggatagtacgcaccatctatacgagaaaatgtcaccttagttgaggtttaaag

SEQ ID NO: 66670 - DNA, 292 bp, Zea Mays
cacaattcgacaatcaaggaagcaataactcatcatggatgggtgagaagtatcaacctgtaggccatctcgtcaatcgaccacttgagctagttcgtcgagctttaggcaatcgttcaatctctatgcatcgttcaaaataaagaggatgagataacatgggtcctcactcatgcaggttcctactcaacgtcaacagcatacaaagcacaattcataggacatactaacattaacttcaagacacttatctgggaaccctaggcacctttgaagtgcaagctctttgcct

SEQ ID NO: 66671 - DNA, 451 bp, Zea Mays
gagggccccaaccatatcatctcaaaggaccaacagagaaggcctccgcgacggttgaggtgcagcacgacgggagtgccgacgcaacacacagttatcagagcggagtagacgaagtagtcgaggacgagacgatgatgctggcgacgaggttgtgctgaacgaagcggagaggtaggcgtggcgacacttcgaggttcctggagtcgtggaggtgagagccacgacgcatgggaaacgagcctcaatggcgccagtggagcgcgatggaggtgtttgttggcgaagaactcgataaatgcggtgtagaccggcgacgatggctggcacgcctaggacaagcgcaaggtgttgacacaacacgcagaggacccgttgtgggggacagatatcccccgggtccactagaaggcaagaaggcctcgcgcggggccttgggccagctacctcg

SEQ ID NO: 66672 - DNA, 283 bp, Zea Mays
ctccaccgtccgctcagatcaaacggcagagacgccttctccctccccaacgccaacactgaggccatccccagaaactcacggcggcgcccatggtaggcaatcaccaatacccgatcccgagccgaaaacttcgatccgaaccggaatacacgtaattctaatggtggtgaacattataggtgactcaataccggggattggagtgccgacgaacgcagttcacgggatggagcggaggcgggacgaatctcgcgttccggcgagaaattccatgaccacc

SEQ ID NO: 66673 - DNA, 499 bp, Zea Mays
cgagaatggcctcgagcgagtcgtgactacgtatcccgccgggggttggcctcaggcgagtggtgactacctgtcccgcttgaggatggccacggacgagtcgtgactactcccacccagggttgtcctcgggcaagtcgtgtctgcctatcccacccgatgatggcctcaagcgagtcgtggctgactgtccaaccagggcttggtctcaggtgagtcgtgattgtgtctcccatcaggggttggcttctggcgtgtcgtgactgcctgtctcactagaggatggcctcgggctagtcgtggctgcctatcctgcctgggcttggcctcgggcgagtcgtgactgcctctctgacccgagggttgcctcgggcagactgcttattctgtcttggcttggcctcgggcgagttgtaactttgtatcccaccggggttggcctcgggcgagtcgtaactgtgtatcccacccagggggttggcctcgggcgagtagtgat

SEQ ID NO: 66674 - DNA, 1179 bp, Zea Mays
aaagatctttgtagaaattagtagccactttgttgatatcatcatcagcactaacaatattttcctcatgaactaaggaaagaattttaactcttctttttttacccttggcaataagatgaaaatatctggagttttcatcaccctcgttaataaatttttctctagccatctgttttcttttacagcattcttcaaccatcaaattctttaagttccactccaaatctaatttttcaagtctttcctcgtgagaaataccaatactttcacttttttatccataaaatcaattttttggcttaactcttttttaagcttagaatatctgccttcaacattaatattccaacccttcaacgtttttttcagccttttaattttttctttccaaatatcgatattagaacaacttctaaccggaagagaccaactattccaaacaatatctttgaaattcggacgaaatttctagcacaactcatatctgaagtctctattaggagatacacgggaatcagttttaagacaaagaggaacatgatcggatagagttctatcaagaccagttaccaccacatttttgaaatgaaggacccattctggactagccagaaatctatccagttttttaaaagtgggagggtccctattatttgaccaggtatacattcttccactcaaatcaagttcaatcaaactgtgaatatcaatgatagaattgaacaaagaactccaacaattcgttcccccaggcttgttcttatcagattctttccttagaatattaaaatcacctcctatcaacatagggtaattgcattttgagcagaaggaagccaactcagtcagaaaaatttgcttgtgttcattctgagcagcaccatacacattaataaaattccatacaaaaccactttctttatgagccaggagaaccctaatcataaaatcgcctttctcaacttgtctgatatcaaaaacatcagcatcaaaaccaacaagcaaaccaccagatctccctttggttggagaccagaaccaggcaaaatttctattactgctaatagaattcaaccaagaatctttaaaggattttttattggtctcttggatcccaataaagtcaattctctcctttctaattaactcttttaagaattcaatttttattccttt

SEQ ID NO: 66675 - DNA, 1009 bp, Zea Mays
ggaacaccaggtgctgcttcaactcttggaaggcttgttctgcctcttcggtccaagagaatgggccagactttcgcaacaacttgaagaagggtagcgcgctctcagctagccttgaaatgaagcggctaagggtggctaatgaccccgtaagcttctggacgtccttgatacgggtcggaggcctcattgcctcaatcgccttgattttctctgggttggttcaatgccccggtacgaaaccaggaaccccaacaacttccctgtggagacaccaaagacgcacttgttcgggttcagctttgtgcgggttgcccgcagcttgtcgaagaccgaaggttaagtcttccactagggtcgactttctcttagtcttgactacgatgtcatcgacgtagacctccaccctgtccctgattaggtccctgaaagtcttactcatcgcccgcacaaatgttggcaaggcgttcttcagaccgtaaggcattacgacatagcagtaaagcccattcactgttacaaaagcggtatgcttcctatcttccctagacatatggatttgatggaaaccagagtaagcatctaagaaggacaagaggtcgcacccggaggtagaatccatgatttaatctatacgtgggagtggatacgggtccttaggataagccttattaaggctggtgtagtcgatgcacatctgaagcttcacattcgccttggggacgatgactgggttggccagccacactgggtgatgaacctcttcgatgaagccggcgtctagcagcttccgaacctcctttcagatgaagttttgccgctcgacggactgtcttcgaggcttctgactcaccgatctggcgtcagggttgatcttcagatggtgctcgatcacctccctggggatcccaggcatctgcgatggctcccatgcgaacatgttggcatttgcctggaggatggcgacgagcgcgagttcctatttctcctccagatcacccgcaatgcg

SEQ ID NO: 66676 - DNA, 395 bp, Zea Mays
gccatggttttccacaatgaaccactctaaacgccatcctttaatgctatccttaagtgggatgtcaaggtattctgttttcctcccacggtgcatctccagacttgcaccacccatgagctggtgctgcccccaaccatcccaggacgacaatgatacaagtacttccacaaaccgaagtgaggaagaattccaaggtaggcttcgcacagatgaacaaagacagaaatttgcagaatagagttggaatttaggtgagtcagattcaaattgtaaaagtcaaggagaccgcgaaagaagggagaaatgggaagagcaaagccgcagataagaaaagggatgtaaacaacggactcatgggtatcttctgtcgggacagtaaccccacgacaaat

SEQ ID NO: 66677 - DNA, 515 bp, Zea Mays
tggactgttgtctggtggagtggtggactatggtggttgctgctgcttgagtgcaggctggtggactagtggtctggtgttgctgccttgctgctctgagccttgagtgctggcgtactagcgtgctactgctgttgtgtcgcttagagcctaggaggctggatcgctgctagagccctagactgctgctgcgttttgcatcatgcatattttcagtttgtcttgtctagtgtctctgtatgagtgtgggcttgtggcattgttctgttatagacttctggtgtctctagtggtgttttgcatcatgcatacttctgtactcatgtgtctgcctgctaagtgcttttgtggatttgtggcattgttatgcaaccttggtgcctttgtggatttattttgtttaattatttaattgtgcatttgagcagacttggtgaagcatacatgcatgctgcctgcgctcgatatgtaattgcaataattcgggcagagaccgaaatccgactgtacatttc

SEQ ID NO: 66678 - DNA, 291 bp, Zea Mays
gggtattacctataaatctactatccttggagttcacggtccagacctcatttgggtactgcaaacaaaggcagagacatataagtggagataacagtgtggggtttgtggcaatgaaatctaattgcaatgtaaaaagttgtatgtttttgctctgctctccaggtgctagcttctgccttaatgcagagtcatgacataattacagtctagagtcatgacataattacagtataatgtttttctagcagttgttgttggtttcttcaatgttttttgtttacaccatgc

SEQ ID NO: 66679 - DNA, 437 bp, Zea Mays
ttgctgaagccattggaaatttcggagtgcaagtgggagcatatcaccatggattttgtggtgggcttacctcgttctccttggggcagggatgccatttgggtggtagtggatcgcttgactaagtctgcgcactttattcccatgaagaccaccaattcagctttagagttggtccccctgtatatgaaggaagtagtcaggctccacggggtacctaagtccattgtttctgattgagactccaaatttgtatccaaattctgggagagtcttcatagtgcattgtgcaccaagctttctcttagtgtcgcttttcatcctcagactgatggtcagtcggagcgaacgatccaaaccttggaagatatgttgtgtgcttgtgttctgtcttggaagggtagctgggaagatcatcttgcattggcagagtttgc

SEQ ID NO: 66680 - DNA, 318 bp, Zea Mays
attgtgtgtcaggtttcttttgccacttgggctagttaatagaggagataatagctacattgatatagaggcgcaatgaacctgtagtgtacaaagtaatgattatatgttactatgattactctaattttcatcttcccgcaactcatgctatcatattctgatctcatggcacatttgagagaacaccctagaatataagttcatgtctcacttctcggtggagttgcatatgtctccctatcataatcctctctatcatagagtgttgagagagaaggccttcgaaaccgatgtatctatgacacctgctcgagt

SEQ ID NO: 66681 - DNA, 661 bp, Zea Mays
taataatgtgttttctctgaatattttttgctttgtatgtctctaaaatttttgacatgtgcggtcacaaatggttaggagggaggaaaacaatatgccgagtatggttctgttactgttgagagcaaaggaaaatggcgactaggctcatcaacaatatgtgaagtttctcatttatttattttttaaatagagaacaaactgaagcccaagaacaacatgcactacaaatggttaagcaacaattgttttctccactatttaatgcctgaagtaaatttattttccgaatggtactgcataactatacagccttcctccttttttaaaaaaaatatactactgcagtctgcattgatgccaatcatgttctaaacccttcttattctctctgtaaaaaagggattagtaaaacacttacaggcgcaacctcagctaggtttgggttgttgtctggaaggagattagtttcaaggactgagctgatcaacatgccggcaaggaacaactctttctttttgccttgcatgagctaggggaaattcagtactggctacacgggaagcgggataagttgcagtgacagcaaaaccagataggagaaagagtgcaggaactgaagaaggttaggggattgtctcgtgttgtttttgcaagcaca

SEQ ID NO: 66682 - DNA, 281 bp, Zea Mays
acatgatcgtggatgtggttgatgctagaatgaacactgtcatgacagacacatatgtgcaaccagtgtgtgccttgcatccatatgtgaactatgtcatggggaccacgaacaatctcatgatagatcttcataagggtgttgaaatgatgtttgattcgaatactattgcaatggcactccaagagtatggtttcttcaataggaagattggagacttctcgagtgagtttgcaaggagaatggtcgttgatcgcgggacttctccttcgagttggtgg

SEQ ID NO: 66683 - DNA, 736 bp, Zea Mays
ccattgtgctgccgctgccggacatcgggatcgaggacgccaccaccaaggtgctttaacttgtgctttatttctttgacatgttattcctgtgcaacatctaatcatgagatctactaaccgttcttggcataaacaaatctagagatctactaccagttcctttcacctcccagttaattcaattcgacaatagcatcacgcctcattgttatgcatgcctttccttggctttgtcggtgttttgactcccacaggcgcatatgacttattaccagaaccatatgcaatagatacagaacactcagtcatagttatggtagttgagagatacctcttattcatcattggggatttgacacctattcatagaaggatactttttatatgaaacttagcttactagatggaatcatctttcttctactggcccttgagcgcaattttagcaggttgagtcataacctgatgtatatacttgatctcaccctctatttaataagctatgagcctgtgacaggggacttcttttattgggcatctgtaatttgaatttctttctagtatttaggtacaacttcttccctgtcagtggtcagtatccattggcttctggatatatagagttagagaaatcggcttcaagtttacaattaattagagaagttacttggctagcttctagaaaccattatatagggcctgtcagcataccctccctatgaacagaatccta

SEQ ID NO: 66684 - DNA, 389 bp, Zea Mays
tatttctttggtgtcaaatcatgtctaggaccattgctagaaattttgttttccgggtattaaataagaatttgagtcttttctataattgttctaaaattataaaattcaagatttagacatatctaatcccaatttagctccaccgaaacccttttcaaataccacatccatctgcctttttctatctagtagccaagcacgaattccaacctccaaactactcccgtgagaacaggacctccatgatcgctactgccagaactcgtttcgacatctccttcatccttgtcgctgccgctcgcctgcccagcgggcccaggcgccaggccgcaccatgtctcacgcgcgtgcgcgtcgcgcggacgcagcagcccatcagtcgctcc

SEQ ID NO: 66685 - DNA, 782 bp, Zea Mays
aggtgtgacacatggcctatgcgaacttgggtttcaggtcgtgagggagaagttgatgctcgcgagaggtcccggcattacgcaaggtgcttcacattcacactcctaggcgaggcggcgattctcgcggtgagagttcctttgtaggcaaaaatcccatttgtcatgagtctccccaccttggacgtttcatcgagagaaataggttgggttgggtctcgttccccaacagcatgatgacactggatgttgcggcgatgatttcatcggtgacgctcctcatgttgtgggagcttctcccttgtatgatcggctcgtcatcggaggcagggtcgatctccaccaccgttttgatgtagagtgcatcggggtatagtagagcaggaatctcggtgtcacgatgtagtggctgctccctagggccgagcgatcacgactttagtcgaccacacccttctgaccctaggggcgatggggaccttggtcttgtccttcttccgagtgacccgggttggagatatggatagttgggtatgtcgtgttagggatgtcgtaacgcccaagcgaggtggaggcattaaggggaccgtgtgctttgtctccatagagacagggggacgcgacacacatctgagtttgtccttgggtccaaggacgtgtcggtgtaggtcgggtcatgattaaccgaggtttaatgatggccgccaccggggctgtcccagatcttggcgagggcatcttcgccatggggctggcgatgcaggatcttgggcgtctttctc

SEQ ID NO: 66686 - DNA, 451 bp, Zea Mays
attatattaagaagaaagaaaaaaagtccaaaatgggccagtacaaagagaaccaccctacggtggccaaacccgcacatacacgaactgatccatgctaaccaaaaaacacaccactcctgcaccagaactaggtatggccatatcttccttagcccagtcgccccggccaagcaccacattctcgtgtcttccttgatgtcttgaacaataatggagatacttggagacactccctcaaaaacacaagtattactatgtttccatagccaccacgccacaagggccaccattgtgttaaaacctcgccttttctccttaggtaccctaggagaggaagcacaccaccaatcctggaacacagaggagcccagtcctgccgtgaactgttacaaaccgaccatagacaacactataaactagacctgcctagcaaacacatatgtcacca

SEQ ID NO: 66687 - DNA, 366 bp, Zea Mays
gttcttgatgcataagcaatgactcggttgtcttgcatcaaggcacaacctagtccagtgccagaggcatcacagtacacatcaaatggcttgctgctgtcgggttgtgctaacactggtgctgcggtcagatgttgcctcagtgcatggaaggcatcttctcacttctgaccccaaacaaattttgcttctttcttcaacagctcagttatgggcttcgcaattcgagagaaatctggaatgaatctttggtaataatcagctaatcccagaaaactccgaatctgacggacagtcgtgggtggcttccagttcatcacctcttgcactttatcaggatcaacagctatgcctgcctgggaaata

SEQ ID NO: 66688 - DNA, 448 bp, Zea Mays
atgtgttcttattgtttatgtctttacttgttcttattatttacaattgttgcttcaggaatttgcaatgtgcttccccttctgcccacgtgctcgctccaccgaatatgctactacgaatcaggcatgtcgcaggttctgcatgctccatgttatttcctatgccttggttaattgttatggattacttgttatgtttgcacgtgcttcatacatccatactttgatttatcctgtatgcttcttctttttggccatcttggctttacctccctacttgctgttacctctggtggtattcagaactgattccaatgtgatacctattctcttgtcgcatacctagacactccatttgcgattctataaactgctgaccaatggaccatggaccatgtcagagtactggtcgctctcctggaaatgagaggaagatgagacctaccac

SEQ ID NO: 66689 - DNA, 807 bp, Zea Mays
ctagctggagcatccggtgacccatcgcagactgtctggtgtccaatacacagagtggcaccataatgataacacaacaatattctacaccacaccagcactaccctctcctaccttcggcccataagagccaaagcattctagcacctaggtcggagtacaaaggtcgatgcagggcttcgaggcggggttcgatcgtggtgggctcgatctgcgcaaaaccacaacaatagtgagctaaaaatgtgtcaatggtgacctaacgagcacgcaacgatagggattgggctacaaaacttactggggattcctttgactccattgactatctggtgtggaacgagtggtgaacaagggtggtggtccaactgcaatgatggtggtaaccaggaacggatgagtcggtgatctatgatgtgttttgggtgcaggtttcaaaggcagcttttacgtagtgaatctcagcggcggtgacaggatgcaggcgcgagaacacgtcagcaaccggtacggcgacaacggtggcacgagtagagggcggagatgcaacctgacaacgttgatgagcaagagtgggggctcgatcacgatgcaggcgcaagaacgcgtcagcaacaggtacggcgacaacggtggcacgagcaaagggcggagatgcaaccacacaacgttgatgagcaagggtgggggctcgatcacgatacagggcggtggtatttatagagaaagggcatgggcgcaggggtggccaaactactcgcaaacgttggggagcgttgcggtgtcgtgctcctgtccgcgtgggaa

SEQ ID NO: 66690 - DNA, 1231 bp, Zea Mays
gacgatttgtaaacagaggtatggacctcaatctaatgaagccaagattcagtttctgcaagagctgagacaaattagagcagcttgtcagggtccttggatgatttctgggaatttcaatctcatattgcaggccgaggataaaaacaactcgcatattaatcgggctatgatgggtcgattcacaaaattggtagatgatctagctcttaaagagattcgactacacgggcgcaagtttacttggtctaatcagccgaatcagcctactcttgtcaagcttgatagagtgctatgctctattgactaggaggaattgttccctaatgcaatgttacaaagtgcagcttctgaagattctggtcactgtcctttattattgggtttcagagataacaaagatgttaaaaggcgttttcattttgaatccttctggacaaagattgaagggtttcttgaagtggtgcagaatgcttggagttctgttcctattggccaatgtccattttccacttttgatttaaaactcaaaggtgggacacattgagactcggttgcatcttgctagagacttgatccatcagcttgagattgcgcaggaggaagacgcgcagcaaggtggagtactgggcgtcgagggccaggggaggcacgaccaccagggttggggcgcgatgggaaacgacggcggctggtaaaggataaggaagaggatggatcgtgggaataatgccaaggagatatttttccacatttcctctctttttttatttctctttggcttttctatttatgcaaaaatctgtatacatccgtgttctaagatttagatcaaaacgagatgcaaacgaaccgaacaaaatcacatcagccttgatatttgagactgcacttgatccggttgaaatcagataaattttatttgcagaccgaacactcagatcagggcaagaaacaaatagatcgaaccaaattacatcggctttgatattttaagcgacatttggtttagtcaaacatatatgaattttgccgccatccaaacattcgactagataacaattcgattaaggaatcggtgcatggtttttctcggacaacgggcggggtcccaattttacagaaaatcagtcgttttccgatttttcatattcacttagacgcgtaatccgaacgtctcaaactcgccatcatatgagattagtgaattccgaacttcatgaaatctttt

SEQ ID NO: 66691 - DNA, 398 bp, Zea Mays
cttgagttgacttgtcatttgaggaatgaatcctccccaaggcatcatatagggtggttccctctatgaacttggggaatctccatcccttatgctctatgctagggtttaccttatgtgagttgtacccaagcccctttctcccattgttgggctttaaggacttgtacttgggttcaactttctttaacccatcattgctagagcatttcttcaaaatttctttgaccttaacctgtgggcttttcttccttgcatggttagtcaaacaacaagaagcatgatatttgacacaatgtttataaatggtattattggaggagctagacttagattcaatcaataaagatgaggcattgatgttcttgcaattttcaagttgcacttgaagttcttga

SEQ ID NO: 66692 - DNA, 314 bp, Zea Mays
ccttaccagcttcaacaattcattttaattcaatggggaaacatccacaccagatgaatgtataagaagatcaaacacatcacctcaaagcaccacaaaacaagtagttctattgaaacaaaactcctaatcttcctaaaccttgttcttgccatcatgaaaaggtaatcatgtaatctcacattctttgcaccccacaaaaagggagaaagcctatagaactaatgcagcaataaagccgacaagaagccaataacattctgtgcggcacagttcatcgaagaaatgccaaaaactccacaaagagcactgac

SEQ ID NO: 66693 - DNA, 644 bp, Zea Mays
tacaactttgctgcagagcattggtctagttgccatggaaaattgggaggaaattcgccctaaacattgactgtcaggctgactgaagaacaatcccatggtacagtaaactgaaacagatcgcagattcacccccccccccccttgtcgccgatgatcttgcacctagatccatgtcggcatcacgattcacgcctgaccgaattcagataagcgctcctcggtaagaaatatcacgctggagataaactccagccactgttctcaccgtcgtggtcagtcacgctggcatcaccggagttctccgttaccaggcctagcaacgtgcctcaacgttttaccacgtcgtagtgagtcaccgtaagccactctctgctactggttcgtcgccgatgaggccgccacggtagatgccaccgagctctcgcgacagtgctctcttcactctccgaccgccaccgcgccaactcaaattcacgagccaccgcccccaagtcctataaattgagcacaccgtcaggtccgtagggtagtcacgcatccagccaccaagccgtgccctcaattgatcaccagagctcactaatttctcatttcccccaaacctactttccgccaccgtgaaagaggcctcgttgtggcca

SEQ ID NO: 66694 - DNA, 487 bp, Zea Mays
gtggaatcccatgtaaacgaacaacttctttgaaaaacaattcagcaatatgtgaagcgtcatcactcttgtggcatggaataaaatgtgccattttgctaaatcgatcaaccgcaacaaaaatggaatcccttccctgctttgttcgtggtaaaccaagaacaaaatccatggatatgtcttcccaaggcacactaggaataggtagtggagtgtataagccatgagggtttaaacgagacttagctttatgacatgattcgcatcaaaggacatgtcgctccacatcccttctcattttaggccaaaagaaatgatcgacaagtacttgctccgtcttcttggtgccaaaatgacccataagtcctcctgcatgagcttcctgaaaaagtaaaattcgaacagaacattctggaatgcagagtttgttagctcggaacaaaaaaccatcattaacatgaaattttacccatcctctgccatcaca

SEQ ID NO: 66695 - DNA, 1202 bp, Zea Mays
cccaagtttctatagaagaattggagctggtatattgaagattaactttgttaaagacggattagggggttgccacacaaaaatttatgaaaaacatctctgaagttgctctgtcaggcgctctgatgaacggtttcgatggtatagtaactgaacaagatggcagatacaacgtatcgcgctgccggtgacccgcgtgctcggattcatgccggcgctgcgattcgcgcccagtaacgcgcggataacgaccctcgatgaaaagatctcaccacggatgaactcagagcactgtggccactctgtcgcccatccacttgcgctggcgacgtggccgaccggccgtcgtcgaggtatacgtcgttcgctgtggtcgcgccacgccttgacccttttaccacgtcgttgctagccgtaatagctcactagtgaccgtcgtagctcctcaaccagtgaatgccacggtagaacaccgcggtgactcagtccctctctccggccgccagcacacttctttcaaattgggcgccaccgccgttgaactctataaattgaagcctcagagaactccgccaggtcgtcacgaagccagagccccctacctccgattagccaccatagtgccctaatttctttcttcccccaaatctgctttccgcgccaccgtgaacgcctcgccatggccagccttctgcaggtcagttgaagcttccttaattggtgttctagcctccctcatgtcccctgtagctcacagacccattcgattgaactagaccgcactggattgccctgaacaccatagtttcctctcgatttttgccgtcgtcgtgagcaggcgtgctttgggtcggtttagtgcaattggttgagggattagtgtcgtcgagggtggaattaggtgttgagcaacagaggggcctagtcgttgcgttttcaggcggcacaagctcgccgaagccactgcttcgccgttcctagttggggacctaaccttgcgaagaaacaaaaagggaggggcctcgatgtaaatgtcagagacacatgtaaatagtgcgcaggattcttaattagttattcaaacagtcagggtcctctgtggaaagcgaacaccacgggcacgacccaacggaccacgccgggagataaaactccagccgctctggccttcctccgttccactgctcattgggttcgtgagg

SEQ ID NO: 66696 - DNA, 586 bp, Zea Mays
ttttctttatttcttttctatgttcttgcgatgatgcaatgaaataaatgtgtgtgttacatgtgatttatcaacgtgtgtgtcggcgattttaaatcagcggcaatcacatgtgcatccccaacaacttcgtgtcggcgataaatctgctaagggatttgtgcttttcatgtatgtgcttgaatagagagaaaaggataatattatgcataaaatctgagttcaacatctttcttaataccttttgctcgatctccttagtagagcctcgtgcgtgataatgtgttaagaacccctttctaccgagtgtagtccaagggctccttaactgaataataatagaacacaaggagacaagagtgtagagagggactgattctttattatgtggtgctgctgtccaaggggtacaggttatggagacctcctctctatttatagacaaaatctagggttttaggcatatgggccacatgggccttcgtggccctaaagggcttcttaacacttcttttgttaatcagacgtgggagttaggtgctcgtcggcggcatatcgagcgtgccaccggcatatgcgcgcacac

SEQ ID NO: 66697 - DNA, 772 bp, Zea Mays
cagagcttagtgcggccctcgatagcctgcaagtgtactgtaatactttacatgaagaagtacatgtactgtatgctcgactgcacctggacatgccttcagatgttgctatagtgggagctagaccatcgggtacagtaaatgaaggaccttatgtgggagttggacctttttaggccccctccttccatgaaccttgctgacgaacggtctcctgcagcaggaaatgaagcaacaaaggatgacaaagactagaataatatagtttagatattatacttatgtagaattagtaatgaagtcaagttgtacgctggagtctgtataattattacattttggtaatgtaatatgatggtgtatgctggcatgttatattttttccaaatgtttctttgcctcagatgccatcacggactcgcgcacatgatggtgcggggacttcccgtgatagggaagatactcctaaaccgccactagtaccactgactttagccgaggctatcgctgccctggtcaatgccaccactgataatacgcgcttcttgcgcgaaatggcgggcaatcagttccaacagcacggtgggagagctcctcttcaaggaccgtgtgagactacatatctagaattttctgagactcgacccccgctcttcatcaaagcagaagaacctttagaagctgatgaatgggtgagagttatggaacataagtttgggttgattcgatgcatggagacgcagaagccgctgtttgccgcacaacaactaag

SEQ ID NO: 66698 - DNA, 615 bp, Zea Mays
gtgggagagcgatttctcgccgccgcgagctgtcaccgcagagccgctccgtagcgtgagctggatccgagcacatccgatccccttaagcgatagctctgtgtgatttgctacaggctcgctacctagatctcgagttgggggtaggaatcagggctctagtccgtgattgggtgttcctccggcgatgctccgccgggtgggaggtatgtgccgccgtcggaagcaccgtgggggggggggggaagacaaatcgtcggtcgcggattcacgaatggacagttaggattaagtccatcatacccgtttggtcaagtgtatctgtgcccttagatcttgatcggacgttccagtggttgggttgagcgctttaaaatctggtgtgttggtcatcaatcggacgggagccaacgcttaccggttgatgggcaggcatatctaatcctagccgtagatttaggatcgtgcgaccctggtcgaaacataccccttcggccatgaatttttgctaaagagaccccgccaaactttggaaacaacccgcggtcctcagggtactattcactgtgtctcggggatcttacaccgaggcccctgaccttcctgaaatttgac

SEQ ID NO: 66699 - DNA, 803 bp, Zea Mays
caattttttgtgcatctacacggtgcttactaagtgcatttatcaataagggggagaaattttcacacacacaaatcctattggggatgtatttctttgagaggctctgagtacttctttaaggggagttgattttgtccagtggggttttgagagatgtgtcttggtagttgtgttgagtcatttgcctctttctggagggactagctttgcctttagctttattgcttccttttctccaatttggctctaatctctagctcgtggtgttgagcccattctcttccttttcttgatggctagccaaactttgcttggttgttttgggccgttgcccataactttggggacgaagctttgctcacttttgatgacttgcatattggcctttatctagcttcttgtcatttgagtgagttcctttcttatttccttatttttgctgatctttgtgtttgtgtcgtggtgttcataatgcactcattaagggggacattttgaacacaaggttgatgtgtgccttgtcgttcaggttgtgatgagtaattgtcaaaaagggtagtgccttgagttgggttagttagacaaacctgggtgcgaggttgttggtgcaacacgtctctcggatggtggtcgacaatgaaggtgaaggttatgtgggtttgtgctaatggactaggagcgatgaaggataggcactaagtcttgaccaagggactgaagaagctaggtgactagccgtggtggctaacacctagtgatattggcgggtgcgaggacatggagggccggatcttctcgct

SEQ ID NO: 66700 - DNA, 546 bp, Zea Mays
acataacgtaaactgaatctgaaatgtaaattgaaccgaaatgagtactacactgaacctaaatgcctcttttactaaactgaacagacaaagctcattcactaaaataaaaagaagcttaaactaaccatctaatgctgctgcttctccaggcaccaaaggaacttgaacaccatcaccttgcacttcatctgctccatctttgtcatctgtagcatgaaagaaaacaaaaggaagaataaaaccataaggtgcgaatgacgtgggaaaacaataaactcagtgaaggaccaccttctgttccatcgtcccacacggccacaccatgtcataatcgagttcattagttgggccattaaactttgcaatattatcccaatctattggttctacgtttaaatcgatccccaatccacgcattgccgatgttaatgagacagggaaacagatacggaggggaagagttcgttcggatggtctagacacagtgatcctcctaggtgatctatataggccattgattgagtggcgagcaacgaaaaaatt

SEQ ID NO: 66701 - DNA, 422 bp, Zea Mays
cggcttcggaataataacgtacatgcgcagtcgacgaagcaggacgaagctacgggaagtctttaagtgcgtgctcgccaagatagtagggggaaagacagtgttaccctcattatgtttaatagctcaaatgtatagccttgagggcacgattgtaattttatcaaagttgtaccccgcgcctataaatagaggaatagtgccatgcattagggagatctttggatcagagaaaaagtagaaagcttcatcttcaaagttgtacttccttcttcttgtaagcctcacaaagacaaaggtaccaatgtaatctcttgttcaataataaaaaagcaagaagaagtaagcgatatcttgcaaggtcttattatgtgtattgttcatatttcatataatttaccttgtgcaatcctcatgtttcc

SEQ ID NO: 66702 - DNA, 629 bp, Zea Mays
gacgaaggaggtatgggttgtaaaggacaacccatctattgtccaattcacaccctcagaccttttctttacggtcatcgtcatgacgtctgtaaatagggtatgaatccttcccttgcaaggttgtgtcactaaaaggccaagggtaatgattcttgcatgatttacgacccttagtgcatgggcagttagggtttagcgacccacacgggtcgtgcatcatatgcttgataaccatctttcgtagttcaggatacttgttgcttgggatctcggctgagatcaaaaggtcatacttctcaagacatgtgagcttgtacttcctcttcattatgagtagaaaatgggcatgcggcaaacccctcttctgaaactccacgacatagatgtaggctcggaccttaccaagaatatcctgtttagtcagcctatgctttaactcttgtagctttgcatgaaagacacacactacaagatccggacgatcttgcagtgtctgcccagagagaagctccctccttgtatcatcccagttagggttacatgtcatggtaagaaatatgtctggtttaccaaacttccgcaccagagccataacatccatataccgacgtctcatgtcacaacga

SEQ ID NO: 66703 - DNA, 383 bp, Zea Mays
cctaggtatactatgtttagctattaggtagaagtagagaaggttgcgttaataaggattagggcaaagaaagattccattatcttgactcatctggtgattctgttttgccctttgaagacttgagttggtgcttatcctcccttgacgtggttggtcttctttgggccctcaatcctggagttgccatccgagttgaggacatatggctaggatagctagggtacatgaggtagttaggtttaaacagagttttactttgcttttgggatatctagattaggcaacctatgatgtaggttaggttgttgtttacggacgagttagtccaagatattaatttagggtaagatatgtttatagaattagggcctaattttttt

SEQ ID NO: 66704 - DNA, 517 bp, Zea Mays
ccgctacttaccaatgtaggcccctaatcagggtggctgcagcctagtgagtcagttgtaattagcttgaagtcattcgacctcctccgctggcttgctttcttagggctccgcttgcccccttgtcgtggtcaccttgcgccgccgccacccggtgtggagcctccatggggttctggagtcgctttgaccgaaaaaaccacctggacgccctcgtctcttgtgggctcctccacgagggagactacttgctccctggctccgaagaagttctagatccatcgcaggctttgtggtttcattcatgcacttccatgagtgcagcctcacgatgcctccccaccattcctttgtggggtgattgcacaattacaagatccagttgcatcacttgaaccctaatggggcttagcacatggctgctttcatttccctatgcgagggaaaacttgggatgtccccccatttccgcctttggtgttacctcttctctaccgagttgcctcgtaagcgatcg

SEQ ID NO: 66705 - DNA, 283 bp, Zea Mays
gcttaagtgcatcgaagctacaagcgatgaactgcttggaccatattcaaagacagaagataacgcgctatctgcgaccttcggagggcggaaaaagaagaggttgaatagagttttcgatgctattgggtttatgtaccctgattaccgctactcgctaaaagggcaaaagagaaaaaacacaacttctggaaaaggtggtgcttcagttgctctaagtgaggccgcgccaaaaaggaaaagggtgaaggtccttactcactgaccgcgcttcatcgaaccg

SEQ ID NO: 66706 - DNA, 632 bp, Zea Mays
cttgaagacacttccatccacttatagaacatcgtctaactccttgtattctgtccgcagtgatgcttggaattcgtaccatgtgttagtcatctagcttctggttgcattcccatgctaaggtgatgaaccaccattttattcatgcacatcataggcttattggttcagatgtctagaggcttgaatccatcttgatcccatgctggttcatacactcaatcattcttaaggacattgaaataagaactcaaaagcataggctcattcaacatagactgattattaaacataaggttagtgttcacctgagaatgaatttccttcagcaactgtttagctctactcctagtaattggaccagctatatcaagtggagtttcatttgaagatgaatgaatgcttggcatgtcctcattagagatgcacaagctcatactttttcccctcttttttcttcttcggcattccccaactgccagaggttaggaatgtccggtttgccagatattcttgaactaaatccctagtgctgatatgcttagccacgacccagaactccacctcagctagctggcagggagaccccaactgcatgttgcacaagggccgagtcatgccgaagtttaatc

SEQ ID NO: 66707 - DNA, 484 bp, Zea Mays
gccaaccccacctaggctggatgtatcaactatcgactagtgtgtcatgtgcgaggagcagaccacatcgacttcataatccacaacctccacctgtatttgcaagattcaacacttgaggttgggttgcatccaaaactaggccgaccttgaggaaatcttcgtcagaaattcccaaggcacgtacgttcgccctggctacccatgggacctcaagaatcaccgtcaaaaagcatgatgagacattaagggactacatccggtgtttctcgcgacaatgcaacaagctgactaacctcaccgacgtcgacgtaattagtgctttcacctcaggaaccacaagtgagactctggtgcacaagctagggtacaagggcccaggaaccacaaataagctccttgacattgcaaccacccacgcattgggagaggacgcagtgggggcaattttcaaccaccgcaggcagaaagccaaacacgataa

SEQ ID NO: 66708 - DNA, 428 bp, Zea Mays
ccgagactcatacaacagtactcgggatggcgggttgatttcgtaaacaccagggggctcttttgcaaactaggcaggccgaagggctatgggttgtttttggccgcacgatcagaaaccagcgcgccagatcagatcagatcattgcataaatcggcacttgacgtagacccacagatcgcgatcgaatggatgaaaatccgtcacggcacccgctaatctgcaccgcccctatgatttagccccgaaccggtacgccagagtttaatctgagccgtccattagctgatccaatggctacactgcataaccactcttcgccctctatacgtacggcagaggacggcagcgcagccgcgcagcacggcggacgccaccacctgcgatgcccaaacattgatcccacgccaaaaattccgatcgaaaag

SEQ ID NO: 66709 - DNA, 541 bp, Zea Mays
aaacattatggttcaaaggccgactagtagtccccaagaatgaaaaactcataaacaaaattctggacgagtctcacctctccaaattctccatacacctgggaagcaacaagatgtaccatgatctagaacccctatattggtggacaaggatgaagaggtaaattgcaaagtacgtgtctgagtgcgacacctgtcagaagattaaagcaagtcacctaaaagcagtcggtgccttgcaaccactctcaataccttcttggaagtgggatgatattagtatggactttattatgggattgcccaatacctctcgacatcacgattcaatctaggttattgtggatagattgacaaaattggctcattttcttctagtgcacaaaactggtaaggcacaaaagtatgaggaattatatatcgacctaatcatgtgtttacacggattgccttggaaaattgtctctgtccgaggaaccaaactcatagccagattttgggaacagttgtaagagtccttagggcccaaactgataagaag

SEQ ID NO: 66710 - DNA, 1241 bp, Zea Mays
gggcaagcttccaaaatcagcagtgtgtcatccgcgtattggactatcggaaaatcttgaccacaattctctggcaatggtaacttgagcaggtcttgccgccgcgctttatttatgatgctctgaagtagatctgccgcgagaacaaaaagaagaggcgagaggggatcaccctgcctgaccccacgcttgcagtgaaaggttttcccagggacaccattaagaagaactgaagacgtgccagaccgaagaatatccctaatccagcttatccatctgggcccgaagccattgtgcagcaatacctgaagaatgaactcatgctctagagaatcaaaagccttttcaaagtctaatttgagcacaataatctctttttttgaaatatgacaaagatgaatatattcgaatggccaggccagacagtcctgaatggttcttcctttgatgaagccatattgatttttgtggacaagggaagtcatcactgtctgtaaccggttagccagcagcttagtaatgattttcatactattattcagaagagagattggtctgaaatcgcccactactctggcattatccttcttcggaatcaggacaatataagaaccattaatgcttcgaaggcaaacatccccgtggtaaaactgatcacataagtcatagaagtcttgtgaaataatcggccagcattttttgataaagttggtattaaacccatcaggtcccggggatttatcagaaggaagggccgccacaatactatcaatttcttgctttgaaaaaggctcatctagccactgcaagtcactgcggcagagcatcaaactaggaagatcaaagacattgtccacaaaatcggaggaacccaagcgtcgtttgaacgcgttccagagcaggttggctttgaggtcatgctctgtaaaggctgaaccactgtcatctgagagcaacgcaattgtattgcggccatgccttactgttgcatgagcatgaaagaatctggagcagatatctccatccgtaacccatttgatggaggcccgttgcttccaataaattttttgaagccgaagcaactcagcagccttgtgttgtaatagctcgcggaaattccattcttcaatcaaaagatcacgatgctcttcgataagatcaatgaattcaataatcaacttaatttggctcacagttttgtcgatttttagcagggaccgctgccactcttttagaatctt

SEQ ID NO: 66711 - DNA, 785 bp, Zea Mays
gctaaaaccaatgctccttgcatatgaggtatacatctcatgaaatgtaaccatcttctaaaacgaaagccgctccatcatcttacagttgttacaggttgatcatgactattatccacctatacagaggtaaaacaagacaataattaaaatgtataaaaatagtttggaaaaatatgcaatccctctattttattaggttgagctagttgatcacttggcacaccgttcgatgccatggctttggacatccctaaagccaatatgtacaaatttgaccgcatcatcgtgattgctcctagctagcaggtatccctaagcattggcgattggtttatgttgatttgttttcaaccttaccgaaaatccacacggttcctgactcttttttatcgcgtcatgatcgagagcataataattgtaatggttgtggtttccttcaccatgtgcagatgtgctacactataaaaagggggcaaggggccgtcttgggagctttcctttcccggaccacctcgccatcacatacacacagaaaaaccctaactgatctgttggagtgcagaggtgagggcagctcgccgccaccatgaccacgacaatgtcgccctgaggcacgactacttcctctattgctaaggacgtgctcgtgccccatacactactgtcagtctgtcaccttctttgtttgctcccactgaaggtataagatttactgagtacgattagatgtagtgattagcggatacatccggagcaggtgtgtccgatggtctcactctcac

SEQ ID NO: 66712 - DNA, 450 bp, Zea Mays
caggccaggaagacacagcagctactttagatgggtcagtagccactccagcttggctaataatatgacccaagtaagagatctcttgacggccaaaggagcacttagacagcttaacttgccaacaatcttgaaccaatagctgcaacaccaactctatatgtagcaagtggtcttcccaagtatgactatatacaagaatatcatcgaagaacaccaagacacatttccggagaagagatgacaatgtcttgttcatggcgccctgaaacgtagcaggtgctccagtaagtccaaacgacataacacgaaactcataatggccgttatgtgtttgaaacgctgtcttgtgctgatcgtcaggagccatacgtatttgatgaaatccggcacgcaagtctagagttgagaaccaagcagcaccatgtagctcatcaagaaactcatcca

SEQ ID NO: 66713 - DNA, 647 bp, Zea Mays
ttcgtccctaacctcgcaagacatgaacccgagctcaacaacctcctaggaatccacgcgggcatcggtaatgtaccgcgtccccacacttcgggctcatccttcacccatatatacccaagcgagacccccctgaagccatagcccgagccatcatcatccaccaccatcgcggaggagtgggagaagtggatgtcgccaccacggtcaaatcccgagtacgccgcatccagtccttcgatgggtggaccggggatattcgttgcatctctgggggagctcccatggccacatcgaggggaatctgctatcagggtgacccgattgctcgtcggagcgatccctcttccgctgtgtcacgccatgccgtgggtaggcccccaaacgccataagccgaggtaagaaaatctcctatgcgttcggcatatcgccacaagggctgggaccatttcgggtcaagtattggacactggaggggccgtttcggctggcgccggtatggtcgccgccgtgacgggcttggtggcgccgctagtgccagctggggtaggaagaacgtctcctgaccatcgattctgggatggacgacgcatattaaatgtagggatgcacggttcggattttgatctcggtcatccaatccaaa

SEQ ID NO: 66714 - DNA, 396 bp, Zea Mays
atgatatcgcattgaccattgtaacaatatttatgttgtgtctgacactttttactatcaaacttaaggatattatgctcatgaatatgacatcccagagatatccacgtatcttaagttggctcgtttttttacggtaaccacctggattcgtgcacacctgatatgtgggggtctcacgtaacaccacgctaaccattataagaacatttatgccatatctgacactatttacgttcaaacttgaggattttacgatcatatataccacgtcccaaagatatctacatctctcaatttggctctgtatttacagtgaccacctagattcatgcatgtctgttgcgacatttatgctatatctaacacaatttatgctcaaacttgagaatttta

SEQ ID NO: 66715 - DNA, 570 bp, Zea Mays
tatgtattatattaattttatacttcaaaagactctgcaggggtgtttctgcaaattttgggggtctggatgtaagggtttccccacggctgaggacggtgggtcctaattttaaagtcaccagggactcttttgcaagattcatgggtcgaaggggtacagatgtgtatcgccgttagatcaaaagctcacgacgcagattagtccggactcataaatgaaccgatacgcaatactaatcaccggatcccgatccaacggctaaaacatcatcgacccccaacctaaccagatccgttggattaaaaatcagtgctcggattttaatgaagtcgagattgactcggaatcgtccgatcagatctcaacggttctaacttactcgcccaaaatgatccaaacttctaatctcgtccgtcaaattcggatcgacggcgaggggcctttctccccccagctgaaaccccgcggcggtggaactcaccagcacacatgcgaccgagaacccaaagtcctaaaaccaaatcggacgaagctacgcgaagaggatggaaaaacagagctagtaag

SEQ ID NO: 66716 - DNA, 371 bp, Zea Mays
gagacgtgcacgcgtctgagcatggtctcaccctccggagggaactctgtctcacccaaagtcggccccagcctcaggaaaaaactctgcctcgcctgagctcggcttcggtcaactgcctcagcaacaactccccacaaatcccacaggaggccactccgacagctgtactaacccctccctatacgactgcatgcctcgaggtaggctcgaccaatgcctcgagaggaacctccatcttgcccgagcctggtctcagcctagataacatcgaccaaaggacgtcaccaactcctccatgaaggctgttgacaacgggatggctacaggactgatgtcaagtctgcttgacaccataaggggagaattac

SEQ ID NO: 66717 - DNA, 328 bp, Zea Mays
agaaaacttgattgacatttgtaaggtattgttaccattagatgcggctctaaataccatcaactccaaggaaaaagaccatttcccctgttttaggtgtaggattaccatcttaatagtgatattttattgcatagacatcatcattttcttacgttgaacatttgttgacattacagttttcttagataccaaatgggacgcacaacactcacccaacatttttgtcatcattttagttaataattaatagtgacattgagccaagttttgattgttccaaatggcagacttcaacatttgttatgattgttaaattaattcttga

SEQ ID NO: 66718 - DNA, 649 bp, Zea Mays
ctgttgttagaatccaacagtagttataattgcggaagtaaatgcagtgtgatgattttgaaacttcttcttatttcgcgaggcatagagatcgccctaagatgagtaatcgcaaacgtgcttgtgttggatcgagtagatgtgagcacgccgtgccgatttaagtcactaccgacttaaaccgactgctctgttagtagggtatagtggtcaccctgagttacgcgtgagcatgtcacaccgccttaagtcgtcgccgacttaagtcgattgctccgttagtagggtatagtggtcaccctgagttaagtaagcgtgagcatgttacaccaccttaagtcgtcgctgacttaagtcgattgctccgttagtagggtatagtggtcaccctgagttaagtaagtgtgagcatgtcacaccgccttaagtcgtcgctgacttaagtcgattgctccattagtagggtatagtggtcaccctgagttaagtaagcgtgagcatgtcacaccgccttaagtcgtcgccgacttaagtcgattgctctgttagtagggtatagcggtcaccctgagttaagtaagcatgcaggttgacagtaaacagtttgagtgcctttgagaatgaagtctttttattgatgatgtgtttc

SEQ ID NO: 66719 - DNA, 792 bp, Zea Mays
tacccgcaaatcggaccgtggtggcgtgggaatcacggggattcaatcgacgccgccggtgctgcgcggcaaacgtcgagaactcaccaaacccgtgcctattacggtgacgatcgacggaaattgcagacacccgcggtagcgtgccgaagatcaactggtctttgataccaactgttgtgccccgtggccaccgaggatctccgatggcgtgaggtgcgtactcaaacgaacgagggagaggtgggtgctcgccaggaaagtttccggcggcaagtttctgtttctttttctttcttgtctctcaagttcccaagtctcgcttattacatactctgcacataggcactgacgactgggcccacaggtggtgccctaattacagactccatgacatctggcatacttaggccactaacccaggcttagacacgtcggcttcagtcattgaggcgcgtccggcacaccggccgcgacagcttcccccctgcagcggttgcttgtccacaagcaacgaacgaaggaaacctggcctgtagaacataccagtcttcccaggtcgccgagtccactggaaggtgagtccatttcaccagcacctgtgggacagccttagagcctttctacaccagacgacgctccagaacccgctcaggttgaagatcagtggtactgaaatccagcagcattttgggatctgcaaaaactggcgtgtaatttggtgtgaagggtttcagttgactgacatggaaaactggatggatgaggcagccatcaggtaatttaaggcga

SEQ ID NO: 66720 - DNA, 976 bp, Zea Mays
gtgaccgatgccgtcgttggtgtaccgagagcagagcatggagtgccaccaccgccatggccatcctccaccgacggcgctggtccctgggctcaaacgtcctccttgtccgcctaatataaatccccagccgaacctccctccatctgtctgtgcttgctccaaatatccgcgccaccatttgtcaccaagatagccggggaggagaagaaagccattgtgctagtgcctcatctgcgcgggcgacgaagcaccagggagcaacatcgagatcgggcggagtctacacggcgccgaatcggactgaagagtgggcggatcaagggcaatttctcgccggtgaagaagtgttaatgcgaaattgcgaatctacgtgccgccgtgggtggccctattcttgtctccgtctccggtgtggagctattttattgattcgatttcgtttcctctgcacgtagcacctaaccgggaccgaattaagcaccaagaccttggatcgcctgttcgctgtcgtgtgccacgacaccgccgcctctgggtgggccgagaaaagagagaggaaggagagatcactgtggtcatagatcaaataatggacggacaagattgtgttgtagcgtaccctatcaccccattttgatccagtcgtagatcatgggatcgacggtcctgtgggatcggatgggtgcacaccgttggatgatgatatgatggtctcggaggcataccgcttcaggattagttctgggtcgttggatctaaattcgaaggtctacgtggcgtaccggttcgaggctggtggaatttaatcctagctattcctatcgatcggatggccaagatcgacccgtaccctttcgtcgtggcgagtttgcaaaagagtccctgagttagatggaaaacaactcgtcgtcttagtagagttagagaacattcaaaataggtcatgcttttagtagttgggtctctgagcttc

SEQ ID NO: 66721 - DNA, 852 bp, Zea Mays
tgtactggacagcctaagcaacgactagccctcccctttgctggacaccgaattcaaccctatgcgactatttcccctcacttaattgctggatttgacctctacatcaccctattcacggtgatagcggacacaatggctagtatgaggtgtttccggcgatatacaaggttctagcctaatcgatcgggtcaagaagcatcaggggcatgtaagggtgctgaaacaaaagaacagaggacaagatcggacctggagtgcactagccacggtgagagcttgttcacggtggtggaaaactaatttgggggaactaagcaattcgggggttctggtgaataattggaggcatgggtgggtgtgttgagtgcacaattacatagcggagctgagggtgtgctcaatttatagggcccttgagcggtggcccatgaatttgagatcgcgtggtggcggtcggagagaaggaggtgcactggcgcaagcgattggtggtatttaccgtggcaagctcaccagcgatcactggatgggataaggtgactcactgcggtgtggttaaagcaccgaggcaagtggagcaaggttgcgtggtggctaactccggtgagcctatccaaagcggtcgtgactcaggcgggtacggcggccggagtagaatagtggccggagttcatccacggggtgatatttcttacccctctatgttatccaactacgccgagcacgaatcactgtggcgggcgcgaatccgggcgcacggtcaccggcggtgagttagctgaactggcaatctgatctttacactgtaccatcgaaaccctgattcagagtgactgacaggccgaattg

SEQ ID NO: 66722 - DNA, 536 bp, Zea Mays
tgagaaatgaagccttggtgaaggataaaattctactttcattggtagacaaagtgaagaaagacaaagcaaacttgaacgctcaatctgaagctcataaagccgaagttgaagaccttcggaaaaaacttgccgaagctaatgaaaattttgaacttgcaaaggcgaagcaagaaataagtgaatggtcaaacactaggatggagaaaaatgttgcggagcttcgtgattccaaggagagatgttttgagaaatccttgaaatgtgtgagaaaattgaaaaccagctttgccaaggtgggtgcatattctttcgaagagaatttcattcgaggcgatcccgagggtgttattgattggataagcggagaagccaaagctttcgaagagatccttagtgatcgcggggacatttgtgcttttgccggcgctcgaggggttgctgcaattctagagaaggctggttgtgaccatgttaaagttgcagcccagaccgaagccgccttctccacagacgacacgagagacccttcggtc

SEQ ID NO: 66723 - DNA, 810 bp, Zea Mays
ggttgtggatcaagtgaaggcaaaggtataacataggttttgtttttgccggtctccaggagtttagagaagttacttgaccggattagtatgctagatggccgtactattaagaggggtcaatgacgtttgtctgtgtcaaacttgtactaacagcacttccaatttcaagagttaaaaatcttttcaaaagcatgtttgaaattgctaagtcttgagataggcggaccgtccgcgatcctccagtggggtctgaagtatgtttacttcggactggtcctgttcatttgtactgcgaaccgtccgggccttggggccgggccgtccacagtcctgaccagagaagattgttctctgcacaatccctattttattgtgcggactgtccagccagggtcggcggaccgtccgcgagtgcaaaatggatttgggcagggagtgtgtgtttttggatgtttctactacggactgttcggaggataagcccggacagtactgactcccaggtcacggaccgtccggccttgtagggcggacggtccgcatgtgttaactcctcttggtcagagctctggtgctccaagttgccaggtctcggaaggtccggccaaggttggcggactgtccagaccttacttttctgacagctctgacagatttcaaacgggaaaaatagtcgttatgtgtacggcggaccgtccggccttagggcgcggaccgtccgcgtgtgcgcagaaaatgtgcaagttgcacataacggttggatttgagaggtgtgctataaatagaaggggagctcgtgtgagaggg

SEQ ID NO: 66724 - DNA, 983 bp, Zea Mays
ctcggcacgacctatcgtgttgtgggtcctgttggcggctagtgcacttaggcctaggttcgataggtcacgagtgggccacatgcctaggggtttgtcggtaccccaatacaagggtacccacttctactgagtcaaggcaggacccttatggctatcagtagccatgtgatgacgggcgagcggtctaccctgaatcggggtccagagctcgtccgacggggccactgcctccgggctggtgtcaccacgtgccccatcagtggaattgctcagcgactacaccctggggttggatccatatggggtgaccccggacccctacgtatgccattcaaaccttctgtcgggggaggtccggtgtcgctacatgtctaggacattatggatggaacttgtacctccacaagtgccatatgtacccccaaccaagggaggtccagggctgccatgtctgcatgcgctcccagtccctgctctccgcttaggcagggatatggtgttgccatgtggcctatggagcatcacgaaagccgccagacatagcctgacatgagactctagcatgggggctacctatattaagtacgagcaggaggcgtgcctgtgcgcactagtcataggcggtgtgcaccccacattaaatgcaagcggtgtgtgtagtccacaagacctaggctgcgctagtaacccgcgcgttaccaaggcgaagatcattgactctccgcgacgcgcatgggggctctcatcatgacctttactattcccgctacaagacaggtggacaggacaggacaacactgtccatctactcccctatgtaagatgataagacagtctatgttgtagcctacactagagccttcgcccacacgccaataggacaaggcggatgcgaatttggccagatggcccgcacaatgaccaagagaagatatctacccaccgtaggagaagaccttggtccaccagctctatccttc

SEQ ID NO: 66725 - DNA, 617 bp, Zea Mays
gacatattttaggccaccaaccccctattgctctataaataccccctccatgtccgtgtgataagatatttgagctctcaaccatccgttttgtcgtgccacatgtcaccactatttccgagtgcttgggccctctgttctcagtaccaacattgagtatggtcatacttgaatgggaacggtggatttggatgcggtgtggttctcccataataaaagggataccggacgagatggagcatggtcttgaatgacatgattgattacttttgctgaaacattgattttgtttgctcttgtatttctttaatttttttctttattttggcatatgttttatatgtggtcaactcttttctatgcacgccataaaatatatcctgaggtcttaatggttcacgaccactagttcttccttctctctatcttttgtgacttcatatatggtgaatatcctatcattgtggtggcttcttttttgaagattgctttcaacagttgttgtattgtcgatgtcgatgtagtttaattgatgaaaggaagaaaatgtctttgctccgaactacttggtcagagacgattttgtgtactttttattggagatcgagtgcttgttt

SEQ ID NO: 66726 - DNA, 430 bp, Zea Mays
tggtctgaaaaacgccttgccaacatttgtacgggcgatgagtaagactttcggggacctaattagggacagggtagaggtgtacgttgatgacatcatggtcaagactaagaggggtcgaccctagtggaagacttaaccctggtcttcgacaagctgtgggcaacacacacgaagctgaacccggacaagtgcatctttggtgtctccgcagggaagttgctgggattcctggtttcacaccggggcatcgaagcaaacccagaaaagataaaggcaattgaggcaatgaggcctctggcccgcatcaaggacgtctagaagcttacggggtcactagccgcccttagccgcttcatctcaagactggctgagagggcgttgcccttcttcaggctattgcggaagtccggtccattctcttggaccg

SEQ ID NO: 66727 - DNA, 1970 bp, Zea Mays
caccacaaaagggtcaaagaccacacggcgaacaatttttccccgttggccattgacggacaaacgcgttctccctgaaaagcatgctgtgaggctcgatatcgctgcggctgtcgtgctcccgcagcgcacaggaaggtgagtgaggaggaagaaaccgcatgcaaggggacgggagtacgggaccggcgggcggaagacgaacgggattccaaaaaaacgacttgtcgtggcggagcggaatccacaatagcgacgagccgtcggggtctgccggcctggatgcaaaccagtctcgtcgtcacggactcccggaataaatactccctcctgcgtatagctcttccctgtcctctcatacactttctctgctcgcgcaaagctcttcctcgtgtaaagacgacgagaaatttatgtactctcgcaccacctcacaaacagacctgatcctctccgtttctttttgtttcccttttccctcttccgcgattccgtcgcccggttcaatttggacgcgcgcggcgtagggcgcccggcggaaaccgccgaattcccctcttcctcgcgcgtgctcagcgattcgaggtaacagccttttatcttcttccccttcatctccgcgatttcttgggggtcggggtctgaatccccgccgtgtgttgcgattgccggagtggggtttgccactttgagcggttgcacggccggttccggtgtaatctccgctcccctttgggcgttacatctggttcttgcctcgattttgcgttgggattacgggtacgggtgcctaccgaaggggttggggttggtgaggaaatgactcgttcgatcaggctaacgcgtctttatgcggtattgtataaatttccttctgtttcttgcgcactagaccgcactagtggagattgattgtgcgtgcatggggcctttgatgatcaagtaaagcagttgaaacagcgtccccttggtgttggaatcatgcgaaagatcatggttcgcccctccaactggcaccttccggcttccgggccttgtactgttcctcagcttaacaagtaggattgctcgaatcatgctgttcatgtgttgttcagcggcttggaattcggggggcgtgcttctgtactgttcttgactcttgtggtgttgattgtggaagcggcgtgcttgatgatgcagacgtcgttcccgtggtgttttcttgtgtcctgtccttgagcgagcttcagtggtccccgcacgtcaaattttacaggccagggattttgcgagctgttgtgacggtttcctgaattatgatgggaaaagttgcaacacgtgggagaccctgcggggagtgaggacaaggtcaaggttttgaagctgcgatttgtccatgtgtaatgctcacatttttcagatgcaactgttgcatttctgggtgtgttgtctggtaaactagctacttgctcatctcattggcatgccacttaatacacgacgtgggaggctcgaacccttttcagttatggttttgtagttctcttttgcactccatcctcagtttatctcacataaatggtagctgtcatgttaatctgattatcatgtcaattgtcaagtcattatctatttatctctgaataattgtctgacaacgagccagactaatatgagtgagtcctttcttttgctgtttgtttatttacttcatacttagttgatttagcataaatgtaacctgttataatctcattggcaagccacttaatatgcagcgtgggaggctcgaattcttttcagttatggttttgtagttctcttctgcactccgtcctcagtttatctcacataaatggtagctgtcatgttaatctgattatcatgtcaagtcattatctatttatctctgaataattgtctgacagcgagccggactaatatgagggagtcctgtttatttacttcatccttagttgatttagcat

SEQ ID NO: 66728 - DNA, 679 bp, Zea Mays
ggaaaggttaggtgtatttgaataggtaacccatcaaattatgcatatcatgaatgtaaacttagttatcatgtgttgaatagtgtcgaggaaatgatccccggtccctaggacccaccggccagtgagtgcaccgaggaaagaggtactgattgctggggttcgttagtcagtcggaagaggcaggtgtgctagccctggaaggacacaccctcgatcgaaccctgcgacaaacaagtcctaggtcgggcatggcggagcctgacaagggagaatgggcgtgtcgaaatggaaccactcaagtggatcccgcgcccagccctggactgaccctccataaatgactggtcgcattaaccacgcctagcaccgagccacaacatgggcgtcggtctgcttcccactcatcgatggacccctcagaccgcataacgctcatgacctacgtgccctccgactgcggtgcattaatggcccgcatacccctcgacctgtggcacacttatggtctaccagactaggcctgaatgcacagacctcccacagggcactacacgatgggctacgccgagcccctagctatgaaagccaagggttgtcatagcctgaatgatggcacctgggaccatcactgccccacatcatctaccacgataaatacacaacagctaggcagccc

SEQ ID NO: 66729 - DNA, 339 bp, Zea Mays
gaattgcggtcgatcctagtaaagtcaaggatattctagaatggaattcacctattatagtgcatcaagtttggagtttccttggactggctggatattaccgcagattcattccaatttctccaagattgttaaacccattacgggattattgaagaatgatacaaagcttgattggtcctcgaaatgcaacgaagcttttgagcagctgaaagtgttgttaaccactgcaccggtgttggcccaaccggatattgaaaagccttttgatgtgtattgtgacgcgtcaggcagtggactcgaatgtgtcctaatgcaagaaggacgagtgatagccta

SEQ ID NO: 66730 - DNA, 707 bp, Zea Mays
ccaccgtcgttcgtagagctcgacgctaaattggagccttgcgggaggccaggaggcttcgctcgggtctccggttcgcgttggtggcgattactgggcaggagggtgaccggagcgcgcccaatttgtctccgccgtcgcgcattcgcgcttcgccgtggaccgaccgaaacaacgccggactttgggtaaggacccgctctcctggttcgccttcatctcaatttcattccgcgcctagcgtattagggtttggcgcactggagccatggatttgcctactccggcgaggcctccgccgtgcgctgagcgccgccgtgttcagctcggtagaggaagaagggaccgataaccgttggatgggaaaaggacgtctaggattaaatctggtttgtgttggacctaggccgtaggatgatgatccgagggtagttaggcgtgtgtttacgcaatcgttgtggaccgttgggattcgatccatcggttctaatgcgtagtggtgcgtgggcagatcttgagcgcagatcttggatcctacggtagatagtgggaatggagtagtgatcaacaccggtctaatcctgtccgttcgcgcttgatcggacggctgtggaccgaggataccctttcgcccagtcaatttaacaaaagaacccctcaggttttagcgtatcaacccgccgtccagggaccctgttctctgtgcc

SEQ ID NO: 66731 - DNA, 2184 bp, Zea Mays
gggtacataagataaggcttacatccatcatactaaatgtgatggatgatgttgaggtcaagaaagtacaatatcaccacatataaagctacatgtatactcgcatacactatgtggtacgtaccacaataactatagccacgactgaacatgatgcatacccaaaagcattatagatatatgcatctacaccatttactaactacgacatgctcaatggcatggactcatgaacaaggcatgcattgtgtactacttcatgtcaatggcacggactcattacaataggatagatcagctactacaacaagacatgctcgatactatagcatgactaaggcatgcattgtgtactgctccatgtctattacaagatagaagtagtggaaccttttttgtgtaagctccaccatccaacatgcacgcaactcttctccccatgtgcaaatgaccgtcgctcgacgggatcaacccgacgttgcaaaaattggagtctgaaggccatcccattgaggctcttggctgctcccaaaatagcgaagtgagggacgatcaagaagtgggtacactagcggcagcccctagcgcgcaagtaccaagggcacttccaaatcgtgtttgagtttcaggaaatgttagactcatggtttatcatgcagagaggcagcgagccatcgaacccggttgcatggggttgataactatatgagttgagacatggaagtatgaggacggtcaccagcggacccacgcttggatcctatgaaaggagttagtgcctcacttagattacccgtttataattaactgagcgccatgaactcgaccactgagggaagcatggtactgttcacccttcccctttctagtgaacggaacgtgcggggaggagccataaaaaggcaggggtgccccctatacggacctgctctaatgaacaggggctcaggggtttgtctcgcataagtaaagaaaggtcaaaaggaacattgaggcccgaaggaggaaggggtcggacccccacacatactaaaagggccaaccaaggagtagagctatgacaaactttgtggaaaaccactatctcgcaaagacaataacaagtctcctcacctactaatttctctcagtttttcccttctaaagcacgagggcctcgtgggctcacgcagacaactaccgcctaacaaaaccaactagacctagaagtagttaaagttctatgatctgcccagcgggacccaggtttacccatagggtgttgccctaaggttggtaagccgctgacccccaacaaggggatggtagtcgtaaaggacaggaactcggaaacacgacaacaatcactaaccaattcccatagaaggaagctcaggccctaccaaaagtaaccaaaccacaaaaaggacgcgagaagacctgacctccttcacccggctagcctagcgaacaaagcgtgagtggtcgggatcccccctgtcacttaggattattcctccgggacaactgaagacttagggggctcgctctaaacgtgcgaaaaggacaaatttggtgccttcacgtaaagaaactagaaaaaaaggatgtagatctgtttcacgcgcatggaacctcgagagaaaggtcaaaaaacgatatctgccgaaggcagctcgacatcctaacccagtaaaaaaacgaggaagggaatatgtcataaaaatgaggcccaattacaatataacccacgaccatggaaagtcgaggatcagaggcaacagtctgcctcatgtgaaagattagtcagaccaagggccacaaacgattccctccaacatgaggagattgaccacaacctcgacaacaggatcgaagttgtcctctacgtcctcaagagcatccgccgacacaacctcaaggataccggcgatgttgtgcaacgcatgacccaaccgaagttgggcaaccgtgaaggccgctgttgcacccagatgaacactgcgataacaatgtcatggaccctgtttagaacatccaagagatgctcttcttggctagcaccacaagcacaaaccagacactatggccttgtcagtgccttcaagtaggtctgagaccttcatctcgagctctaaaaagtaaagtaggaggagggttagaggaggaaaaggaagaaaagaaatgaagaaaggaatgtggtgc

SEQ ID NO: 66732 - DNA, 663 bp, Zea Mays
ctgaatttacagaatcagccaacgttgcctccttgcatacctccctatttagctgccttgatcacccaatttcacttaacaacagacctctcccctttaaccaaagtgattctccatgcatagctcttcctcttttgcataacaactcatggttgaaaatatatagaacaagagttgtggcgatccaaagttgcccccatcactctgcactcctgtcagttaactgaactcgctgactgatagaggaagttcaggtgtactttattcctaattgtgtatagtaccaagcccatctctttttaggaaaattgttcactgtactatggtctttaaacgtactacacaaagcatggttcatagctctatggatcaaatactagagagctccaaagttgggctcatcacactgaaactgattttcagttgactgaaacagcctgctgcaccatctgcatctccctgttcaagccttgttattgcacaacttcacatggcaacaaacccatctctgttaaccaaaagtattctccaactatagctctattagtttgttgcagcagtccaggaccaaaaatgcagggatcaaaagttacagtgccccaaacagcttccaaactcactaaatctcctagcaatagtcaactaaatgagtcctctctcaag

SEQ ID NO: 66733 - DNA, 505 bp, Zea Mays
attctgggttgtagcaagtaactaggggcataacagtacttagagggcacacccacctactcggttacctataaataccaccgcgttgtacattgatgggacacgttgaacaagacgctatagttccctccttactgttttgttgagcacttgtgttctccccttcctgagtgtttggacccacctgaccacaagtcagttaaccccaacacaaagagctttaagctctgtgggtggccatgggtgcagcgtgcgcgcgtctcctgccgccgaccatgactccactctctgtgcagctgagggcgctcctggcccacgtggaggacaacatggtggaaggcacactttttgggagcaacatggtcctcgtgatgaagacttggactagattgaggaccaggtcagccctcatgctcaattgatggcggagctactcaatctggtgctcctcctgcgatgccccaagctccttagttttagtttttgtttctgattttgtaaaaac

SEQ ID NO: 66734 - DNA, 1632 bp, Zea Mays
gcaatacctagatgctacttttactgcgctaaggcataatgatgcctggaatcacagggccctcctttttaaccgtgaatgttggttgatgttgttgggttttcccctggactatcgctcctcagagtacttgcaagctgccattggttcattcggcagattgattttgtgggagtaggacaggcacaatgtgaccaggactctgcttagggtctgtgtcacgtcgcttgaagaagtccctcagttcattgtcttttctgaagctgaaggtttttttggggattcttggactgtgcaatgcgagatcatccagcaaaatctgcttggtggtcaaccccaagatgaagatccagtcccggtggtccttgaagatggtcaacagcttcctcttgctttttttggcctgggtcaacctatgtctgctgtgggtttggaccttaacttcccgccagaggagaatattcaggctcagcctgaagacaatatttagggagaatgggattagtggattgttaatgctcagccttctcagcagattcagcaggacattcaacctgaggagcagcagatcagcaaccatcactctggcctgtcttcggacagctctattggcctaaacccgggtgctccagtccagaatggtcagattttggatggcctgggcttggttgggccggtagtgcctgataatgttcctgcagtcatcgctctgggtgttgtgcctccaaatgggcttcaagaggttgatggcccacttattcaggggaaccaccaagaactggaggatgtcccgctcccagatgctcaacaggaggggcaaattaaccatgtttataacaatgtggagatgaattttatgtttgctcaggattggcaaccagacccggtcttccaattgcacatggagagaaaaaggatggcgcaattttacaggctatgggcaaattactttgctcctgtgggcaaaccagagatttcagtgaagattccaaaaaagtggtcgcctttctttatgtccaatttgcttcaggaggattcatttaactggtccaagtccttcctttcctccgagataccgcctactctgctggagcctgagatggaggctctttcatttgctattcccaagagctacccgaataacaagtttatggatactgtcctctcggagggctctcaggacaagatccctgaaatggaagatgtaggctcttctccctcacgcccatctattgtggattctgacctcaggcgaagcaaaagactgagagaagctagggctggattcaggcagggatcatgtcaaaaaaagaattgcttgatgtgccatcataaattcgagggcccaccctccttgtctgccaaggtcatccgaaatcttggggaaaaattttgcagtatgccagaagaagatttgtctgacaaaaagctgcagaagaagaagaaatcctcaggatgtgtcggccccaacaagccaagcaagaaagacaaaaatgacaaggaaaaaacaatgatgatgaagacaagtagggagatggtgtatcactggtctgggagattttgcttccattggaactgttggacattttggctgtttattctccggtggttatgtttaactgtcgagatttc

SEQ ID NO: 66735 - DNA, 650 bp, Zea Mays
gccaagggactcatggggcatggactcatcattcactctcttcttggttgctttaactactggataacaccgggcagatcccattgcgtcaggagggaattcggccacctcccatggctgaggtccgaggaccatgaccaaagtcgtgggagctaagggactcatggggcataaactcgcacagaccatggtagttgataggaccatggtggctagagagggtgaatagtcttttctaaaacttaatacacaatggaagtggttgttggagagaagggcatttgctaaaggtccatgctaacgcaaaccattcaagcgtttgggaaaagctttgaatcaagaaaaagctattactgaaagcacaaagctaggaggcgtcatcgaaggcaatacattctcagaacatgcgaagttatcttcataaacaaaaagtgaaacaaataaggctagggagaagaaaaatgtgtacaacatgtctatggtataaaaatacataattgtatcccctagttccgaagacccgttgtatagtaagaagggcattctcgtaactttgcacaaaaatatataccagcgtgactctataaataggggaacaatatcactgctacatggataatcattttgtaatcttgtgcctgtaatagatt

SEQ ID NO: 66736 - DNA, 1309 bp, Zea Mays
gccttttctcaacaaggcctagccaagcttggagagttctgcctatgccatagccaccactagtcggtcacaaaccgccactcgccgcttggtcagatatagaactatctagctctagttgggcgagggtggctgtgggatggtgctaaggtgtttgtatacatgttcaggcgggattgggttagtcgagcggcctaaagtccgacacgtattcgactcggcgcacgctcaataagatatgaagaataatatgcttatgtaagtccaacacgacagtcgtgccatgattgggcctcatgcatgacacgtcgtgccgggccaagctcggcccgttaaagcactcgaccagacgtgaggatagcaaaaatatattccctccctgtgatgtatggctacctgcctgctccacttgcccccttcgcccctcggttacatcgcctcattctcattgtctcacgcaaactctatgaaagctcctccgtttctcttgctcgtcgctctcctcttgctctagggatcttccttctattcaatggtgagccgatgacaagtagccactatcggcgtgacagtggcctactcgctctgtcgtcgctaacctgttttgtaactataagtccggctctggcttaaccttaaaccgatgaccctcgataatgacttttttgtggtgctcctgctactttggcgctcttgatccggttggtctcgtgaagtccgatttggctattcccctagatctaccttttttgctcgtcatgttgttcttagtttgatgatttgttcttagatctcttgctttcgtcgcatctgtgtatatctcttattctactactgtcggcgacaagtgtttctcattttaaccttaactctaagcctaacctactatgttcccctctctctcgactatcctcgctaagatccatgttctgctccactcctcccttaacctcaagcaacatcccctctagtggcccctcgtcggtgactctagtgttttggtcggtaaggtgaagttattcccctagatctactatttctgtgtcgtcataatgttttattttgctttcttttttcatttatgtgtttcgaaggttgttgaggagccaaagacgtcgtgaggagtcagctaagaattcctagatggaccttgattcagccgctaaggaggcggagcatgagactgtggatcacaatgggcaacctgatggcatggcgttgtttagcagtaatgtcaatgttgctatcgacatgtttaagcgtgtccataattatatgtattatgttttttcttgtattagttttttgt

SEQ ID NO: 66737 - DNA, 497 bp, Zea Mays
gtggtggagccctgaatggcgatgcttgtggtggagatgatgggtcagaaaggggatgaggagcaacatgtgaagtttgaggcgatgatggatgtacaataggaactgcagtttgaggagtcggagatggatgggcaggggatgacgacggtggtagataaaccaaatcgacatcccttcgaggccaaaggatgaaattgttgatagcttgtccaagtatctcaataccttcgggcgcagggatgtcttgcatgtcgtcctaggatccttgaacgactatcatcacttaaatcctgcaatagtcttccggaatgtcacttccatggaacttgtgtcctgagatcgcaaggcctctggctactttcttcatacaattattgttaataccatatcttataactagtgtgcacgccacaggccttgtgatgtcatcaactggatagcagaccttatttcttgttgacgcgatagagcttggaacggtcgtacgattggtg

SEQ ID NO: 66738 - DNA, 467 bp, Zea Mays
cgaagaccacaccttcgtgcctattctaatccagctgtaaacgcggacgctggctcttccttgtgagttgtgattggtgccgtgttctccatcccatgctacatcttcctccgacgccgcgcactcgcctccctctggatcccatcgctccgctcgccttctcctccgtcagcccgaccagcctcgcctccaccctctccctctcacttccttctctcgtcgccgcaacacacaactccattggccccgatttggatctcctagccgtcgcgacgtccctctgtcaggtcccgccatcgtgtcctgtacgggtgtgtctcgtttactaaaaactctcatcgccgacacgctgcgatccgacttcgggatgctcgcgccactcccatgcctaacaagcacactctatggccgctacgaagccgaccaggcctacctcctccgcaagaccgccctccaagccctctccc

SEQ ID NO: 66739 - DNA, 455 bp, Zea Mays
gggcgacctaatttcattatgtggcttcgggaccatgtaagtcttaattgtgtggctccgagagctaattttagttaactaatattacagaatttgctaatgtgttgtggcataattgacagtttggggaggaaatgaatttgaatgatgacttacgtcggttatctatttgaagcgtaactaccaaaagctatggacgttacgacgtcaatggatatcgctttcattcaagctttttcgaatcaagtcatcctatggtcgccactcaaaatagtggagtcgttactagggcaaccgacatggaaggacacgaagcctgctattacgggaaaatcaaaaatataattgagattacatttgctggaaataagcctttagcgctagttttctttgagtgtaaatggtatgacccgaagtattataggactgaatttgggatgacacagatccaacct

SEQ ID NO: 66740 - DNA, 938 bp, Zea Mays
atttaatttcacgggtagttttttagatttatgaaacttatccagtagtttgcagtgcatttgtctactatataaaacatcagttttcatggtgtcatagtttctatcatcatcatttacatggttccacggtttctaccgtcattgtgtttctccacgtataaatggtaaaaaaactaaaactattcacaaatgggaattcatggtgtcataacgggaatacggtaccagacgggatgaatttttcacggtgtcataacgggaatacggtaccggacgagacgaatttttctagtttgttttcatccctacctggacctcaacgtgtaccgtccggtttctagacctcctcatttggcatctagacccctaactagggagcccaagtcttcaagccagcatgcaatattggtccctgctctccgcttggaaagggttccggtgttgccacatggctcgtgggcgcatgccacaagccttcggctagaagcaagcttgccgcctgcattcaacgagcggcgggggcgtgccctactatgcacagagcatggacatgcttcgttatgctgtgcaggaacgaatgatcgctccgagcattaccaatgtatgcagttgtgtgtcagcgccgcgcacaatggcttgcacagtgcaccatgtggtacaggcttaagcggttgtgtctctgcgtcacgcgcgtgggcggcgccatcatgagcaaccgtcggctcgggcaatgcactcgttgtagcaccagctagaggtgactgcataggtcattcgcattaactcctgcgcacgtcagcaagagcggcccctacatacgtcagcatatctacaccactctatggtcgctcgggctggcaagtggggcagaagcaggcctggttagaagatctgtgcggcgaccgagaagatctatgtccgtcgtagaatttaac

SEQ ID NO: 66741 - DNA, 438 bp, Zea Mays
gaaaaagtccaacgaattatacataatttgaaagaagcacaagctcgacaaaagagttatgtagacaaacgacgccaacccttgtactttcaagtcagagatcatgtgtatctgaaagtataaccaatgaagggcgcaactcatttcggtgtaaaaggaaagcttgcacctcgatacattggtccattcctcattctggaacaatgtggaccagtggcgtaccgactacaactacccgaaacgttatctgtagtacacaatgtgttccatgtgtcccaattgaagaagtgtcttcgggttcaagatcgaaccattgaagtgatggatgttaccttgaaactagatttaacatattcagaacatcccatttgagtcctggatcaaaaggacagggtcacccgaagaagagttctgaaattctataagatacaatggaac

SEQ ID NO: 66742 - DNA, 348 bp, Zea Mays
ttgagggatgctctctactacaaggatgcttttgagaggctcacttctattgatcgtcgtaggtatggtagtattgcaccttcacctaatgaatgggacaaggctgctatgttgattcctttcttgaaaaaattctttgaactaactgagatattttccggtacaacatatccaacgccaatatgtttttagaggcttttgtgaggttaagcttttgccatctgattggtgcaatagtagtgataatattatttgtgaaatggcaaatgctatgactttcaagtttgataagtattggaagaagtccaatattgctcttgctgtagcaaatgttcttgatcctaggtt

SEQ ID NO: 66743 - DNA, 494 bp, Zea Mays
ggctaaatctataattaaataaaagtctagggggctattctaaagaaactagggacctatgcgctaaaacagaggatggcgggttgatttcctaaaaccagggggttcttaagcaaaacttacacacgaaggggtactgggtaatctcagccatcggatgagagatcaacggcccagattagatcgtgcaggcgcggctgacaagcgaggccaaggtgtcagcgggtcggggcggactgactagctaggcctagaggcatagacgcgggtgagggggaagagagaggggcggtcagatcctgatcgaagggctaggattagatctactcgggttatgtccaaaccatccgatctcgaacggacgaccgagatctaacagccaggggctggcttgggcgtggtggtgccgctcggcaccacggtgagagttcgccggagacgagaagactggccacagcggggctctggaggcttagggaaagggtcagacacgt

SEQ ID NO: 66744 - DNA, 929 bp, Zea Mays
ctgccatcaggttcccgtcttatcttttgtcttactgtttcaggtagttccattttccttggtgaaaagtttgtttgtggatttgatttccttcgtttttctagatctcacttccggcccggtgctaggtacctctactgccattaggttctcgtcttatcttttgtcctgctgttttagatagttccatttccttggtgaaaagtttgtgtgtgtatttgatttccttcgtttttccagatcttttatattagaattcatttggctgtaatatctcatatgctgaagttgaatgtttatcggtcataatatgagatatgaaaacattgggcagggttgcttttatgtcacatcgtgcgaaccagacaggcttggttcttttctttatttactttcaagaaaaaagataaaaaaagatagaatgggagcataagttgctttcttatgctatgcttttgacgaaatctaacatttatttattatctaaactgcaatgcggatgattcttgatgtttgctaatttcaacttcactgcgttattcatggtgcagccttaccgtgccaacagcaaaacaaagatatcagatcatacaaccatgttttctgataccttgttggacattttcaggggggctgcaagcacaagatcgtgataagggacatgaggttggtactcccagatgacacactgaaaccaagcagaataccctctccagacgttccaattgtagaggggcttgcataagtgcgacgaaggtgactgacgacgataagtgggctctgaacaaccccttctacttctgcatcaaatgctactacctcctccacaaggacagcacactgctatatcctcacactgtggtgaatgttggtgccgataaaattgttgagtctactgttgttttcagtgaccatgacaaggcctcgac

SEQ ID NO: 66745 - DNA, 544 bp, Zea Mays
cagggatagcctatggtactataagtcctaaggtcgcaccttgtttaggtgaagaaaactcaagcgtcatagggtggagtggtggactgaccgcataaactaatggaggtggggtactatactggaaccatcggcctctgaatcatgtggtcttcaatgtaaccatgcatggaggtgaaggtggtagtacctgtctggtatagggttggcaacaagacgtgtcgtggtcagggactgctccccatccccaccttgatccccgaaacctattccccgtcttggccttgaaacgcttatacggaggatttcatccccgtccccgttagagacccaatccccacgaagaacccatggggatcaattattgactttagatattatggtatgcacacaaaaacaaagattgtcacgtgggtgaattgcatctaagcgaaggaaatgaggactaaggttaccaagtgagaattttgaatctttatatggggtcacaatgacacgagccttcataaaccgcatgaggggacggtatgactcttaattcgag

SEQ ID NO: 66746 - DNA, 675 bp, Zea Mays
gttggagctcatagatggcaatctagatcaagtcatgaagacttggagttttggagtccaacatcgacctcaaacaagccaaaaggagcaaaactgtgaaaaaggttatgtatgcaggtttgagtgtttaaatatgttgcatacaccttctactatgcacatggcactttggttttgctctctaaccttgtctatagagaaagtgacatttggagctctcgttgaggtgaaacagaaattttggagaaaataaatgaaggagttttgaacccatcatttagtcaattaggttatgctctaattatgtttgtctaagtgctagggaacctatcaagaagagtcaggaagagttggagaagtttggctaagtttggccaaacttgtggtagtctaagcttcacctggcagtcttgggtgactacgctcgggcgaatcaaaaatgcactcgagtgagtcatgactgcgttcgggtgagtcgtgactgccttgagcgagccaggactatgtcttctgctgaggttagcctcgagcgaatcagaactatgtctcccgccaaggttggcctcgggcgaatcaaaacatagtctcttaccgaggttggccccaggcgaatcggaactatgcctcccattcgagtgttggtctcgagtgaatcgtgactgtgtcgggtcatgg

SEQ ID NO: 66747 - DNA, 539 bp, Zea Mays
gtgtagacgtccacacctcagatggtgcacggttctgcctcccaggctcctacatcgggcccaacgtgcagctctgctccctcgccctcccaacgcatgcaaaccagcaggtccatttcctcacggttctgcctccaaggctaggctcccacgtcagctctgctccctcgccctcccaacgcatgcaacccagcaggcccatttcctcgccaagcaaaacaaatatctacaacattacctaaatcgttctctaccaacgccattgagccgctagcaagttaacatttggggctgcaccaacgcttataagccgttctctgcctgtttcactagccggtatggcactaaccacaatagtaaagaaagcaccacaaacaatgctcgtgtcctgggctaaaatcttcatgtggcccgtattccagcgatgtttggtgcggcccagatagcgaatcggtacagtgtgccctcgctatctttccggcgaaatccgcggtcgcatgcccccgctcgtgattcccctccccgcgcccgtagccccc

SEQ ID NO: 66748 - DNA, 384 bp, Zea Mays
ttttaattcccaacagataagcaaataattaattagaacatgcgttgcgacaaagaataatgttactaacgtgtaatcaacgttaatataaagctgacgcgagtgaagcacatcgagacaggtctatggcgcaaaattcattgaataaccaacgattcatggattaaatgacatggcacatttctattggacgaaaacgaggctataccgggagtcgtagagggcacaaccacagaagacctggatggtgagatttcctgtgctcttcttcaatcaacacgcaggaacgaaccttcgcagggagaacgaaatcgcgcacaaagcgcttgacggtccgccgcgcagggaaagtttgcctgtgcgcggacaggggctggatttggc

SEQ ID NO: 66749 - DNA, 438 bp, Zea Mays
gcatgccagtacttgtcaaaacagcagcatctaccagcacagtaactacaaaccatacctgtaacttggtcgttcgcatgctgggggttggatatgattggacctttcaaaaaagctcaaggaggatacactcatgtactggttgctatcgacaaattcactaagtggatagaattcaaacccattgcttctctaacttcagccaaggcagtggaattcatacaagatataatattcaggtttggaataccaaacaacatcataaccgacctaggatccaacttcacaagctcagagttcttcaacttctgcgagcaaaagagcattcagatcaaatatgcctcggtggcgcacccaagagccaacgggcaggtagaaagagccaacaggatgatattggaggcactcaggaagaaagtcttcgacaagaatgaaaag

SEQ ID NO: 66750 - DNA, 1017 bp, Zea Mays
gtgaatttgcaagccaaaccctaagttttggccttatttgcaaaaaggaccctaattgagatttcatgttaagtctgaatttcagagttttggctcaactttggggctttgtatctttcaaattctagggtttttgccctaggtcaccacatcaaaattgtagcccaatcataggagaacaactttgcttaagagtgtgagctcagttgttaagacaaatccagagataattaagctcaaagcttggctgtcatgctggtttcattctgaaattcagatattcagtgtaacagagtcagctttgagtgtgaattcaaccatgatctagtgatcaaatgagctcagtcactatagtcgaaatataggtggtatatagctctccaactttggtgcagtgagatgacgaagttgtaatccaaaaattggagaggaattgctctgaagttgctctgtcaggcgtcttaaactgaatttcccatggtacagtgcctggaaggatcagatcaaccgcgcccctcgccgctgatgactttgagccgggatcgtcgccgccattgagattcgcactcactggtaaccggatagcactaagagtcgcgtaaatatcctcgccatggatagactccgaccattaaataactccggccaccgtaccatggttaccgcggcggaattggataagaacgtcggtgatcgccgtcgcacgaccttgcgccacgtgtccgagtctttccaccgcgtcgccgtgactccctattgctgtcccatcgtcgccggggaggttgccacgacagtagacacgaattcaccgcactcgcattcttcttcatctccggccaccgaattgatgcttgccgagccaccgaattgaactaggagactcccaatcgccgggaacacggcgatctagccgcactgctcaaggtcaccgtggccagagcaaaacacttgatcattagtgaaattaagttgggggaaggctcgggatgggttcaatccggtgtatgtcgctcgaga

SEQ ID NO: 66751 - DNA, 436 bp, Zea Mays
ctggcagattggagggaggagcggtgagaaggttgaatcatagcagacgacgtaaagctccaattaatggtggcaatggcgagttgcagcaaatatggttaggagtagggatgtagggaccgatgaagcgttatatatgtgaggagaagcgagaacacgagcacgagcgtgaattcactgtgaccggtgtcatagtatccgcacgggtggtgagcaccaccatgggtggccaactagaagagaggaagggaagggggggcgtccgacacctcgctatagggcctaggacaacatgaagcgacacgcagaggctgacatgcgagccgagaagagaaaaaagtttaaaattcaaaactttaaaatcagttgctataaactttacctaaaaataagcattagaaaggtaaaataagaggatcccgtatccgtcaagaac

SEQ ID NO: 66752 - DNA, 476 bp, Zea Mays
gcctcccgcacctcgacttcccgctcgcgagtgagtgggaccgacgacctaactctaccataatagttcagtggattgtacttagcctggtgctgtcaacacctgctactgacttacagacttacagggaaataatcaacttgacttcaaagtctcatgcgacaagactattctaataagaaaagcatttagtgagcaagattttgttgaccattcatgacgagtatcacagctatcatcttttttgtgcatctctaggtctgttgttcttgtccatgcaaaaccaatgaatgatccattggcacaattgtacaatgcttcaacaatggtcctgattcctcaagacgctagttatcctaaacctaaaaatttgacccaaacaactacagtgacaaactaaacttcttaaaagcaatacaagtatctacaagtatctaaaccacacataagggatctccaaaaaatttaagtcaaat

SEQ ID NO: 66753 - DNA, 317 bp, Zea Mays
caaaatagtacattctgtttattccttccttgccaccgtagctgagagctcggcttgtcctttcaaccgatgttgcccagcttccaccgtatccaacttcttcatcacccggtccatcatcttcatcatatgttcccacttctcctctcccttctgctccacagtcgccatggctccggcacgaaacgtgtctggacataaggtttcaccaccggcgccgtcatgacagctccagagtcaacacgcttctgataccaaattgtcacgacctttggcctggggattcaccaaaccctaggcgtgagtccgtgaacaac

SEQ ID NO: 66754 - DNA, 291 bp, Zea Mays
gactgcggagacaaatgtagctacagaagaaaccatggccacaatgctagataaaggaaaagaaattgataattactccttcggacgaaagggattttgatcttcggcacttgggcggtcaggaactgtccgaggaagacaagtcggaactgaaagagtttgcaatatcttgcggttaccagccggggtctttgctcttcggcggggttgatgaagaaattttaggatgtattcgcgaccacgtcggggcgaagataattgacactctgtctaagagtgttggattcccga

SEQ ID NO: 66755 - DNA, 832 bp, Zea Mays
ggaagggccattcgtggtatcggaggtcactcggccaggatcatatcggcttactcaaatggatggcacgaaagtggggaattcatggaatatagagcatctcaggaagttttatccttagcaaaacttcaaaagctatcggagcaacgttgtactctgtaattgaaaaatacgtcatcaataaaagatttcattctcaaaggcattcaaactattggttatcaattgacttcgatttgattagatttggaatcaacacacttactcgacttagggtgacctctataccatactaacggagcaatcagcttaagtcggcgacgacttaagacggtgcgacatgctcgctcttactcggcttagggtgaccactataccctactaacggagcaatcggcttaagtcagcgatgactcaagacggtgcgacatgctcgtgcttactcgacttagggtgaccactataccctattaacgaagcaatcagcttaagtcggcaatgacttaagatggtgcgacatgctcgcgcttactcgacttagggtggctactataccctactaacgaagcaatcggcttaagtcggcaatgacttaagacagtgcaacatgctcgcacttactcgacttaaggtggacactataccctactaacgaagcaatcggcttaagtcggcaatgacttaagacggttcaacatgctcacatctactcatcttagggcaaccactatgccttaccagccaagcgattggcataagtaaggaaaaaactccaaaaccagcatgccgcatttacttccgtaatcgttcaagatgaccgttacatcctgac

SEQ ID NO: 66756 - DNA, 667 bp, Zea Mays
caaaatcgggtgccaccgcccttggacactataaattggtgccccagccttcttcgctaagtaattgtgcgcccagtgaaccagccctcacctccaattgtcccccacaactccccaatttgggatttcccccaattatgttctctgcgccgccgtgagtgagctcaccgtggccagctttctgcagctccgttcacacccgcctcgctcttgtttcagcactctagtgtgctcttgatgcttctcgacccagccaattgagctagaacatgtaggatcaccgggaacaccttgaattgttctcggttgtcgccatcaccgtgaatagaatgatttcaagctcaaatcgtgcaattagttgagggattagtgtcaccgagagtagaattaggtgtcagccgaactaggggtccggtttttgcattttccggccgatataagctcgtcggagccactgctccgccgtccacggtcggggatctcgacttgtgaagaaatagaaaagggaagggcccatctgtgaatgtcagtgacacagagaaatagtgcaatggcctctttaagggtttttcaaatcgctagggtcctctatgcaaacctggcaacgcaggcgcgcgcgggcgcgtttcgcctgtcgtgggccagacttaggaaattcataggaaat

SEQ ID NO: 66757 - DNA, 404 bp, Zea Mays
ctataatggtgacacaaaagcgtgcatcggcataccatatgatggctggttcaagggtgacccatttatagctgatgtgtttgacgcgggtggctctgtattagactgtcccaatggaaagctaggagcagctgatttctcgtatgcacatagatgcattttaatagattcatctacatattgctttaactgatcttgttgatccatgaaagtcataagagatagatctggagtacttacagcgggaccctgaagtggaggtaggagagattccatatcgatctccccttgatggatgatcttctagtggcgatccaccgtgaagtgtgacaagtacttttctgccgcctccttgcaccgttcggagagtttatgcagcagttccgcctcttccttgtcgcgtt

SEQ ID NO: 66758 - DNA, 1056 bp, Zea Mays
gctgcgcagctgacagatgggcccaacctagcggtcatcctgtagttcttccccaagcgccgcacgtcgcccacctcctaacgacctccgcatcctgggccatgcatgccggatgtgcgtggcgacttctggaccctgatatatgtgggctatcaccccgtctgcgtgccctctattcataccacgcagaacccctctcaattccgcccgacgtgggagaaatcgacgtcccgaactcaccggtgtggtgcttggactagccgccaccatcaatctgcgcaaacgccgtcgctgggtccctggtgactagcgtaggcgcgcctccattgcccgcgggattaggagactgccggtggagctctttggacggggcgaaaccatctgtgcaggagggtcctcggcggtgatctttcgtgaagcgtcgcctgcgcccagcctctacctcgtctcggcggggtgagttcttgttctgctatccttgctgttgtgattttcgcccgaggtatcatcagggtatagattgtagtgggtcgctcgagtatcacgcagaccaccgggatatcgggcggtgggtggcctactgcagggcgccaccgctagggtgttttgctcctcctggttcgcggctagaggtagaagatggcctgtgtgtcgtccgatcgtgtagcggcggccaggattgttggagggtgtcttgtcggctaggtgtaggagaaggaacgggcactgtcgatcaaggatcgtgcgaccagtgtgggatagaattgatagtgtgttgtggatcgtaggattcgaatccaacatgtgaggatgatctcaggttcataagtgtctcgggctaatcctggcggccgagttctgatcgaacgactctagcgcaaggataccccttcgccgagctgtttttcacatgggaccctaagtttattgagaatgaacctgccgtctagtagggaggaagtctgtgtcttgggaagaattgtagatgaacccctggtcttttatgaatttgacgcctagtccagaataagtataaaatcagagaaattaaatttt

SEQ ID NO: 66759 - DNA, 753 bp, Zea Mays
gtcttgacggggacgccgtctgctccagatggttgtaccttagacaccttggcaggcgtcttggtacaggaagtcgaggggtccctccctccatcatccgggcgagcggtttctgccgccagggcgtgcaacttctcgatagctgcaagcgcagtggggcggtcgccccacacagtgaggaccccagcacgggacgacatcttgaggaccaagtacccgtaatgggcaatggccatgaatcggtacagggccagcctgccaatgatggcattgaaagggaggttaacctccgcaacgtcgaactggacgttctcagtgtggaagttttcctcagtcccgaatgtaaccgggagtgcgatgctcccaaggggatacaccggttgagggcctactccggagaatgggcgagagggtcccagtcgagatcctgggatctgcagctgcttgaacgcagcatgactgatgacgttgagcccagctccaccatcaatcaggacatgatgtagcctcatgttggcgatgacaggggcggtgatgagtggtagtatgccagctcctgccatgttttcggggcagtcagatgccccgaaggagatagtggtgctccgccaccgctgatgtggggctgcctttgggacccctgggatcgccgaaagcacctcgcggcgcagggacttcacgttcctacgggaggtgagctcctagcttccgccatacattacgtacaacttcttgcggcggtcgttgtcatca

SEQ ID NO: 66760 - DNA, 347 bp, Zea Mays
gttcacactaatcctctcacataccagttagccatgtgttctgtttgacaaggagaaggaagcagaaacaaggtcgaaggagaagaggaactcagctccagccaatgacaagcccatgtgtgcattgtggtaggtgagagcttcgaaggctagctgcttcttgcctcttgcatttctcttttcttgctcgcgctccaaatcttcttattgcggtggcttggcaagcgtactggttgtctgtgtctgcctggcgacgacatttgctgcacacgatctcctgcagtcgctactcgctacaacaaggctgctgggggatgccattgttagctgattcttttcctcactgg

SEQ ID NO: 66761 - DNA, 431 bp, Zea Mays
aacgggtttcactcagcttaaactcctaatcggcgatgaagcaataactccggaagaggcaaagacaggatcaataaggactctagcttcgacaaaggatgaagatacttgcaaagtgtcaaaagactctatagaaggggtcaggctttaggcaatagatcatattaataaataccaagccaaaacagcaaaatggcgagacaaaaagttagattaaagaacattaagccaggacatttggtgcttcgatgaatagctaacccagaaactataggaaagctacaactcaagtgggagggccccttcttggtagcatcttcatcaagaccaggatcatataggttaagggacatgaatcagaatgatattctaagatcctggaacgcagatgagcttcagagatactatgtataacaatcatgtaattgttc

SEQ ID NO: 66762 - DNA, 394 bp, Zea Mays
gttccttgacgaatttcatgcatctatagacctgtgttgttggttgatacttaaagttgttgcacgaaggttttggggcttttattctgtcttttgtgttcaggttcttaagatctttatgatcatctaacaagtcaaaactcatgaggcatatctagttaatatgcaccagagagagatacataagcttccattcaattccttgtggatgtggtaatacatgctatagggagaaatcaatggatctgatttcaacccaatgaagggctccaactgctagtctgcatggaggtgttatacatagaagttagctaacttatggctatctctcttgtgattctaagtaaaccaatatcctcttgaccatccaagaacacctttcactcatatcttt

SEQ ID NO: 66763 - DNA, 341 bp, Zea Mays
aggtcagtgtttacttggtcaataacatattgagataaatgattaaacttgttgagatactgcatcactgtatcccctccttgttttagtcgaataaactcctcttgtttcatgtgaagcactccctctggaacatagtgttcacggaatgctagcttaaattcatcccacgtgacctaatgtctggctggttgaactgccacaaaatttccccaccaggtactggcagggcctctcagttgttgggcggcgaacaacgacttctgtatttctgtgcaacggattaatccgaacttctgctccataacccttatccactcatcagcttcaagagggtcttc

SEQ ID NO: 66764 - DNA, 1621 bp, Zea Mays
ctgcttccttgattcttaactgatggtatcctgatctcagatcaatcttcgagaaatacttggcctcttgaagttggtcgaaaaggtcatcaatccaaggtaacagatacttgttcttgattgtgacttcgtttaaggatcggtaatcaatacacattctcatgcttccatcctttttggtgacaaacaatactggagctccccaaggtgatgagctgggacgaatgaaccctttctgctaaagctctgcggtctgaatttttaattctggcaattctgtaggtgccatgcggtacgacctctttgcaatcggtgttgtgcctggaaggaggtagatgtagaactctacttctctttctggaggtattcctgacaattcttctggaaagacatccatgaattcttctaccacagatatgctttctgctgctagactaaatatcatcggatcttgtgttggtggttgagctttacatgaaactgactttccctagtggtcggtgagaagaactgtcttatctgcacagcctatgacgccgttatgctaggacaacaaatccattcctaggattacatcaattccatgggatggtagtacgactaagtgtgccaggaatactaccccacttaaaagaattctgactcgggagcacttgaggtggcacaaaaggtctgatcctgaggttcaggtgatcagagggacttctaatggtgtagtgggaatgccatgcctttccacaaaactagtggcgttgaaagaatgagatgctctagaatcaaaaagtactgtagcaggggtaaattttactaggaactcaccgagtactactccaggggtctgttgagcttcctgggcgtcgacgtggttcactcgggccctgttgtggaactgcggcctgcttatctgactattggaggagagtgccttggaggtgggtgctgcggcattcttggggccattcatcgagttggagtagacaggtgtggttggcttcaggtgtggacagttgttcttgaagtgatcggggtcaccacactgccaacaagcattggttggaggttgactgcttgcgatggactaagtgcggaaggaactctgaccaggctggttgaaacgcggtggagcggatcctgctggcttgctgaaatttgaccctttgggagggaacccaaaagatcgaatcttcttgtgcctgtcttgctgttactttctcttgaggtgacctctttcctcttcccagactctttctacctggatggccttgtttgagaggtgcgagaagctgaggaaatcttagctgataaggatagttttgagctccgaccttaacccttttagaaaacatgccatcttcttgacttctgaactgacatcatctggtgcatagcaagcaagctctatgaatttgtggatgtattcactaacagatcgtcctccttgagtcaagtctcaaaattcctcttccttaagctgaacaattcctgagggcacaccatgctcacagaaagcagccataaattctgcccaggtgacatttctcacaacagcactgaaggtgtcccactaggatagagctatcccagagagttggtggacagccaggtgaacacgctaatcttc

SEQ ID NO: 66765 - DNA, 498 bp, Zea Mays
accaaaagctaactattgtctgaaacctaagcaacagaaagaagtgatgaagtggatgaaggatattacattccccgatggttatgctgctggttttagaagatctgtgaacttgaagaaaatgaagatgaatggactcaagagccatgacttccacataattatggaaaggctcatgcctgtaatgcttcgtgggtacattttcgatgctatgtggaaaacattagctgaagttagctatttctacagacagttgtgtgctaaagaaatcagaagagatgtgatgaaacagctggagaagaggcaccgatgcttttgtgcaaattggaaaaaatatttccaccgggtttcttcaatcctatgcagcatctctttatacatcttccatatgaggctaaggttggtgaaacctgttcagtacaagtggatgtttcatatagaaagagcattaaagaagcttagagcaatggtgggcaataaggcaagagttgaaggatg

SEQ ID NO: 66766 - DNA, 328 bp, Zea Mays
ccgcggtgagacaaaattaaggcaaaagaagggaagggtgaggttccttactcaggggcagtgctcaggggagctcgacacgacgtcaagaggcttcggttagctggacggcgagggaacgcggcggcggcaatctccggtctgcacagggagggagttagatgcggatggggtaggcggctattgaaaggggaaaccgaggtgggttcccagtgcaatgcgctcaggcggagctcacagtggccgacacgatggcagaggcctggcgacgatggtggaacgatgatggcggggctgcgagctaggtgagggcaagggacagggagag

SEQ ID NO: 66767 - DNA, 362 bp, Zea Mays
tagaaatccaagagcaggctttctacctttccatccttcatagggtgttttatcacccttagctgatggaactcggtttagaacaaagcatgtgaccaaaatagcttcgccccaccatgacttaggtaaaccagaactatccaacatggcattaaccaagtctgtcaaagttcgggttttccattcagccaccccatttgattgaggcgagtagggagctgttgtctcatggatgattccatgttccgcacagtattcaccgaattaattagaaagatactcccctcctctatcagacctaaccagtttaattttcttttctagttggttttctacctctaccttatagatcttaaaacaat

SEQ ID NO: 66768 - DNA, 673 bp, Zea Mays
ggaaaagattgaaggagaaacactccaagggggaagcgtgtttgacaaaaacaagtggcaagtggaggaagcaagccaaggaatgacggcaaagcgacaacagatggactctcgcccagcgcgtgacgaaccatcgtagaaaagggggtccacctcttacactgcataaaaccccaagcaatccacgtcgattactcagggggctacatctagcagatgtgcttgcccgtacctagaaaggcgaccacccagccagaaaactaggagataaactctcacccagcgcgtgacaaaccatcgcagaaaagggtccacccctcacactgcataaaccccctagcaatccatgtcgattgctcgagggctcgggggctacatctagcagatagtcttgtgcacaccaaagaaggcaaccgtttaggaaaagcctctacgcaactccacgaagttacacaaaggctcgtgtgctgttgtcggatacctaggaaccgggtgcttaaagaaggcccaaaaggcttccaaagacgacccactaaccgacaagtccacctgccgagcgactcgctgaggcatcccaaaaggcctccttaaagaggcccactaaccgaccgacctgcctcgcgagcgacttagcaacgcagcccaataggcctcccgaagacgactgaccaac

SEQ ID NO: 66769 - DNA, 391 bp, Zea Mays
ggcatcgttgcgacctctctaaagcaaactgcgacgaatcttatcaaaggccttaatcacccactttggatggtcaagagtcagagcaccataagtaatagtgacgtgaggacagactgaactagaatggccctaccgatgctagtcatcaaactggccttccaagcaggaaggaggccagctagtctgtcaattgtgggttgcaacagagccttactaagcttctttagtgtaagaggtaaacccaaatacatggttggaaacatagccaaaccgcaagggaaacaatcctagactgtcggcatattagcaggagaacatgaatcgacaccactctactcttttgaatgttggttttcaaacaagtagcctctccaaaaagatccaaaag

SEQ ID NO: 66770 - DNA, 299 bp, Zea Mays
gcggactgttcgtcgctgtatgcggatggtctgactgggtagtttagggtttgcgtagtacgtggtggctcgggcgcatgtctcggtaactcatcaaaaatgggaccgaccaccactagcccggacggtccgcgctcatgtgcggacggtccggacatgcatagatcggcgaatttatcgctgatgtgcgtaggacgttgtggttgcccggggtacgtgtctatcgacatcccataaaggggttgtgactagtcgtgacaacctatagccgatgaatcacgcgtgttttcccttaactc

SEQ ID NO: 66771 - DNA, 399 bp, Zea Mays
gaggggatgaacttatattacttgcacctaaataattgcagtagagaacacaagctggtcgggagagagaatgatcccaagtccctagcgttgattgaggcaagtgtaaatatcagtgtagaggtgtaaactgtgtagtctttcctccaccggcttaaagccatgtgttcctctatttatagcctcaaggagggctaccaggagcgtcggggcttgtcgcatatgggagtggaggtgcgtccgagcccctgtggccagcatggtcatcggcacggtcctcgtatttgcagttgacttaagccgggaaagggatgtctagttcctatatttgcatctttgaccgtgcagagagccgagaccagtgcctggggctcggacacgtactcgagcctgtctgat

SEQ ID NO: 66772 - DNA, 391 bp, Zea Mays
gaaaacaattattggagttataaaaccaaacccaaatttgttaataaaaatccagtggacttgtaaccaccaaaaccccactgcaaaaatgataacaccccagcccatcattttaagtagggtaaacaaataaaacttgataatgagtcatatttcaaataaatcatgagtaacccaaaaataatgcaataatgggcaaataaaattttgctagatcaataatgagataggccaccagagaaaaatgcaaacccattggaaagatgcaaaataatacctcttgccaatacttcatgaaaaaggccatttaatccaaataattcctaccaccccctcccttaagcaaaaagatgccaaacttcagaatgattgctcttgcacaaagaagaag

SEQ ID NO: 66773 - DNA, 649 bp, Zea Mays
cgagggctcggtctctgcggtggagaagaacgagggggcggcgccaccgcctccgcgattctgggtcccttccccggcgacggcgtctctgcggtggagaaggcgattccgggtctctgcgatggagaatgtgaatgcgacggcggtggaactacgggggagaatctctatgggttcggcggtcgcggtagagaagaagcccacggcggcgattaatctagggttcggcagctgcggtggagaacaagcggacggcggcgattgagctagggttcggccgccgcgagcgttacgggtgacgtgagctgaaaaaatacgtgctcggttgctggattcgtgggcccgatacacgtaaactgctgcgcgaaatcaacgcgaaggcccatggaccgacacgtggattactgtatcgtaaaaggcaacataagacatcgtaatataaatatttatgtggggactagtacggctgcccagattgcaggaacataatctcctcgtgggcccggatgcccgaaacatgcgcataccaaaaaagtgtgtaaaccgtaatacgattgagcataacacatagttataattgacgtatataggaggtacagtgagccaaaaaagcctgcgcacctggtcggtacggtgcggtccgcgcacc

SEQ ID NO: 66774 - DNA, 403 bp, Zea Mays
aaattcctgcgcgcaagtgatgcgcgtgcatcgaaccagagaacatgtggcctgtagtaaacagcggagcaaaaactagctataccttgaagaggccaagagacattgatactagcctttttcgtcgtggacctcgattcaatcttaggaatttcttcatatttcacatgcctaaacatacaaagaagcatgcagttgtttttagtccagaagtcatataaacacatgctagctagtgtctataaacagggctgctgccaaataaaaacatcaggcgcttcatggcatttatacattggagacttggattttgtgttgtattgtcccatctatctatattcgtcatggtcgcggacgcacgctatagccttgtatggtggttccagttccacacttccactgg

SEQ ID NO: 66775 - DNA, 398 bp, Zea Mays
tttgcgtcacattgttaatatttcatcttctacttttcttcctcccgcggtcgtttccccctaaattcacctatttaccccaccacaaacataaaatatcatttccatatattttcatcattcattgccatttttctcaactaacaaacaatagtgtacacagatagcgaggcaaaggggatgcacagcactcccccacatctggtgcgtgtctgcagcttcctcttgccctgtaccatgtaaaggaggctttagaggtaagcgatgcaccgtccgcgttactctaaagagtaacagtgcaaggggagcggatggcgcggcggtcagtctaagatcgtaaaagaaatgtattggatacactattctcgagaattttaatggttcgagcttcaaaacca

SEQ ID NO: 66776 - DNA, 1041 bp, Zea Mays
ccctcggcgacactaatccctccattaattgcacgaatccggcccagaattcgtctgcccctgacgatggcaagatccaaggagaaactatggtgttcagggcaattcagcgtggtctaattcaatcaaccgagcctacaagcatcaggagacctaagagatgctagaacatcaaacagataggcatgaaccaacctgaggagggtggccacggtgagagactctcggcggcgcggaaaacaaatttggggaaaaagagaaattgagaggctatggtgaacgattggaggcaaggactggttcactggattcataacaagtagtcaaaacaggccgaggcatcaatttatagaggacgcccgcgaggagggcaaatttggacggggaagtgcgcacggtgagaagggggaggagtcaccggagtttgctaacgtggtgttcactggtttacgttctacggcggtcactgctgagtcttcatggcttgcgacgagtggtgagatgacttaaggcatgtcactaccgatctagacagcggcacaacggcgacggtcgcacagccacgtcgccggtgcaagttggtacaacaacagggtgaaacagtgccccaagttcatctcctgtgcgatatttttcaccctgtgtagttatctgcactccaccaggcacgaatcgcaatagcggcgaggatcacggcgtgggatcaccagcggcagtacactaaaccattgtgaactcccatcagggcgcgtgatagagcaagtttgagagcgtttaactccaaaatcgttcagcgctaggtcaagcttggtataacaaagttgtttactaatgttagagcttcaactttgccacagtgaccctgaccttatctccattgaattaaccatgaactgcttccaaagttaaccaaatgtcactgaacttaggttttcagagctaaggttgtctgacaggccagcttcaagtctccttttctcccattttcatgtagtactagggcttactcacttaatcaaatttgtaccctttacatagatc

SEQ ID NO: 66777 - DNA, 460 bp, Zea Mays
gcatatgcacgcgtacgaacgcgcggcgattacagatctccatccgccccccgccaagtcactgtccggaccttcgggtggtgggggatccgcgcgcgtcgtcgtcgtgagaatcatgtttgcgttttgctccataacagacgcgtacggcgaacgtgtgccacgtgcgttgcgtatactagctataatatacgtgtgtcatcaggacacgtgtcacgtatgcacgtacgtgtgtatcctaatatacatacatacatacatactctgactgtgggtgttatatagctaccgccgggatgcatgaggtatacatgcatgcatacagttgtattactaccacctagtgtagacgtttgcacgtacgtatacgtcctcagtgtgctagctaatagtacaacatagatacgtacatagtaacgcacacatatatatacaccacccagcgtgcgagctaacatga

SEQ ID NO: 66778 - DNA, 893 bp, Zea Mays
ctcaacatctgaaaagttttctatccctgagggaggcagtgttggcggggcttcctctttttggtcagtctggcatccttggctcttggtccactttcggatcttcttggcggggcgagcttctttaacttcttagcgtagtccatcttcagagtccggtatgcctcacgagtgttggcttcttcgccttccgccatgtcgagactttcttggagggacgccttttcttccttcaattccttgatttgttgctctaggctttccacccgggaatttaggtgggtgcagtgggagaaaaggtcggcatagtggttgtcaagggtatggagatatccggccatgtatactatggtagggtcatcttcattaggatatctccctgacaaggcctaaagtcttttcctccaggtaggagtatttttttgctgggtgggaagtagcgaaggggtgtctcagagacctccctgctgtagttttggcatagctggcggagggctctttgggtagcattctggcaagtgtctgggaagcggtgtccagtggcggtgacttggaagggagggtgatttgggtagttttggctttctcccaggtagactgccatagagcatttctcaattccgttctcgcggtattctttccagacgtactccagcttcttgcggattcccatacgaagcgtgcaactccgtagaaggtgagggaacccttccacctccgagcaataggatgtcctaatgacaaaggagccttccatctagtagcaagagaagaagggtttgttaatatcaggggaaagagagaagattcttttagaggttaagaggtctttttcttttaaggaaaacttttaaggtcggggctacgatctacggctagtcctatagatctga

SEQ ID NO: 66779 - DNA, 462 bp, Zea Mays
cttcacctcatcgttgatgctgtttcaaaatattagtcacctcgactaattctatgttgtgcttctatatgcccccttgccaaaagtattttattctattatggtctaacctttctcaatctactggatctgatcttactcttgtgcttgagacatctttgtagatgccccttgaccataaccttcttgtctttttggggttctctcctctttcgtcattaaattgctaccatctggcaaactctagtgctttggtattgacatgcttgtatccctttaatactcttgtttcaaatacttgcatctaaatttctactgcctacttagacatttcagtttatatatccatgaccttcctgtcttttgagaccctttcctcttctgttatttaagtcgctatcattcggcaatttcttgtttcttggtattggtatgctcatctccttgaaatctttcatactc

SEQ ID NO: 66780 - DNA, 454 bp, Zea Mays
cgactcagaaacccgtcgctcgtctctcttcctcctaaagcaaaatgaagctagatgcccatccctctcacaatattcacaatggtacctcacctctctcttaggtggattttgtttgtgggagggggctttctttttagatggctaaggggctctaggaaggggattgctagagatgtcgggaaaggtgtcaagtgtgttcctaagatgattaggttttggaagccacacttgtttctgaggaggagctctcataggttcatcaatcacaccatctctcacaggggtgactggattagcagagatggttttgataagctttagagtgggtgaaggtttctctgaaggtgccaaaccactgcactcgccaaccttcctaaagcgagcgacactcccatccttagtagcaaagcctaaccccggtccgccagttcccctcttgaactgactgacc

SEQ ID NO: 66781 - DNA, 496 bp, Zea Mays
ctgtcgtacaaattctatcttggattgccaaccaccttaaaaacatgcattttggcggtgcttaagggtttcggatgatccagcccaagtctcttcgcgtggagctaataaattgagcgtcatatgctgatcttgctgaataccggtggtctgctatgaacttccatcttatggtatcctaagtgctttggtgcaggtgcacattttgcacctcagtccaaaggttgcaaaactccactaggtgctgcactaagatccctacagactggagattgatgtcttcgatctggttattgttccataaggcctcacacaaggttctgctattcttctaagagatgttgaaaacacgatgcgcaatatctcttggtcgctttccctgaatccaagcgctaccctagaaggacgccttcttcccatctcccaatgagatcattgtggatgccacaaacaacagacgatttgtcttcgtgcaggggagttctgaggctgctgt

SEQ ID NO: 66782 - DNA, 339 bp, Zea Mays
ctgggatgagctctatggcaaattcaactttcctttcaggtggcatgcctggtaactcctcggggaatacatcgagaaattctgacacaatcctaattgcctcaatcggattggactccttgtcatctactgataaatggtgataggctccttcttctagttcaggtaagtacagcttggttactacttcctttccggatggggacaccaactgaactattctcttgtcacaactgacaatggcttcatttttgtgtagccaattcatccctaggatgacatctaacccttgagttcccatgactactaggctagcgcggaagcctatcccccttattt

SEQ ID NO: 66783 - DNA, 445 bp, Zea Mays
caacaatacaggggatgaccaaattagcaaaagaatgtagctactttccattttgctgagagtgcaagtcttattgaagaaagatcaaacatgtatcactctaccaacaattctaatactcaaatggaaaagacaattgcaaaatcaggaacccacgacaaaacaagaaaaagaatagtccgctttcagtgaaatggatgccacttgcacctaacaatagcaaatggatgtcactttctatttcacagactgctcacttctgatacacaaacagtgttagcagggaacgcttttgtacttgctaatataacagtactccctccgtcccagtttataaggcataaccacttttaccattatttttacactactttgctatcaagtcagccagtgaaaaatacttactaattattcttcactcatgcccattgaacatagattattt

SEQ ID NO: 66784 - DNA, 400 bp, Zea Mays
ggtctggaaaccaagattgaaataggataagtcaccgtgcgtgggtaatacggcccaacgtccacaggtggctcctccacatggagatccaaagatgaaggcagattatccggatcatcacaccaaacacgcagccggaatgaagacaaatcaacaacctcctcaggaccaggaagcagctcatgaaccaggcagtgtccaacgagaagctgctcagcagaatgaacatcccggaggtgaaccgggaggccgcgaagctcaatatccagcaggaaaggcatctctcttccaccggaggccaagaactgacgagacaacctcctaatgtgcatccgcagaggaggtgcatagaaggactgaccctcactgagcatccgatcagccagctccacgttgggaa

SEQ ID NO: 66785 - DNA, 637 bp, Zea Mays
aaaaagaaaagaagaaagcttacttgatgcttgggccggaatccacgcccgtcggcccaacacccgcgcacgcagcccactctccttagtgtgtggtaactatcaggtggcccgcttggctagctcccacccgcatgcacgtcatgtgccccctatcaccgccacatggggcccaccattcgggttccctcgggtaggtgcgaactcaagatgtttctctaacatgtggggcccgctccccagcatctcaccatgcatgtatcgcttccatctaacgtctccatgtgggtccgtgtggtcagcattatcttcttcccccgtaaccaaccttaggaggatctccaggaatagttgaaactacctccgccttcccgatggtcgtttcatcctagctcctgcctgccagttctagggtatttaaacttgtgcccctcgcccctctagcccatccagccatccttcgattgccaccaacatcgagcgaagcaaagccaggagggagaagtattcggcggagagcggtcgtagttggagtcaccacaaattcactctctattgtggaccgggcattggactgcgcgaccaacggtaatgaccttcccctcacttcgtcgtttccttagcgtggagtagcacc

SEQ ID NO: 66786 - DNA, 442 bp, Zea Mays
gccggtttgaagatgtccccgtttgaagctttatatggcagaaggtgtataactcctctatattgggatcaaactggtgaaaggaagttctttagaccaaaaattatacaagaggcggaagaacaagtatggttgatacgagagaacttgagaactacgcagtcaaggcagaaaagctatgcagatacccggagaaggcagttagagtttaaggagggtgaacacgtgtatttgaaggtgtcaccgatccggggtatgaggaggtttaaagttaaagggaagttgtcccctcgctttattggacccttcaagatcctaaagcgagtgggggaagttgcctaccaactggaactactcgaccatcttgcagatgtacatgatgtcttccatgtatcccagttgaagaagtgcctaagggtaccagaagagcaattgcctatgg

SEQ ID NO: 66787 - DNA, 403 bp, Zea Mays
agatcggtccattgggatcctccgtatcttccgtaactcgtctccctccccgcgcttcaataaactgcgccctgaaacccccctaccacctcggactataaaatcaagccctcactatcccctccatcgatacggaagcattagagagacatcactaaagagatcgttgggggagaacgagagagatgtgcagccgccgtggtcgggatcatgttgcgctagcgtcggagccttggagcgtggactgtggcagtcatctgtgctcgctgcacgagtccgtaacttcaccaagtggtttgggcgattggagttcatggcgagctcgccaaagtacaggaatcatattcttgcggtaaaccacccccctaatctgttagcttccgtctctaccctatttcatgca

SEQ ID NO: 66788 - DNA, 490 bp, Zea Mays
acagttcgacctatcatccccaaacaagtggacagactgagagagtgaaccaaatacttgaagacatgttgcgggcatgcgttctggagttcccacagaaatgggatgaatgcttaccattggcagagttttcatataacaacaattatcaagaaagcattaagatggcaccatttgaagctttgtatggacgacagtgccgtactccattaaattggtctaaaccaggggaaaggtgattttttaggcctgatatggtaaaagaaatggaagaaaaggttcaacaaatcatacataacttgaaagaagcacatgctcgacaaaagagttatgcagacaaatgccgccaacccttgtactttcaagtcaaagattatgtgtacataaaagtatcaccaatgaagggtgtgactcgtttcggtgtaaaaggaaagcttgcaccccggtacattggtccgttcctgattcttgaacaatgtgggccagtggc

SEQ ID NO: 66789 - DNA, 479 bp, Zea Mays
ctccgccgctacgccctcaccgaccacgtcctctccatggtcactgacccgtcggaggattagctactgatggatgaggtggtgctttcctggattcatggcaccctcacgacttaacttcaagacatcgttcgagtgccgaacgataccgctcaccagatctagggtgctcttgaggctcatttcctcggcaaccgccagacttgggtcatgtaccttgagaccgctttccaccagcttgctcaaggcgatctctctgtggacgagtactaccgtcagatgaagatgatgacggacactctctataccctcggggcccccatcaccgatgagagcctcgtgctcaacctcctccgcagcttgagccctcgcttcgatcgcgtgaagtgcattcttacccgcatgaagccttttcccacttttgcggagaccaaaaacgatctgcttctcgaggagcttcgcctctccgccactacgac

SEQ ID NO: 66790 - DNA, 471 bp, Zea Mays
gccactttttgggacgccagtcctgctaagtgaatcggcaaccacattcgcctttcctggatgatattgaattgacatatcataatcctttatcaactcaagccaccgacgctgcctcaaattcaactctttctgagtgaaaatgtacttgagactcttatgatcggtgtaaatgtcacaagactcaccataaagataatgcctccacgatttcagggcaaacacaacagcgaccaatcaccaagtcgaggtcatgggtaggataattcctctcatgtttcttcaactgcttagagccataagcaatcaccctgctttcctacatcaacacacaaccaaggccaatatgagaagcatctgtataaactatgaaacacttaccactctcaggcaaggctaaaataggagcattcacctactcatccttcaatgcctgataactaacctcgcaatcattggtccagacaaaag

SEQ ID NO: 66791 - DNA, 433 bp, Zea Mays
cacgggacggtgaacgataagggtgctgaatcccgacaggggcgggagaaccaccatccagatagtggcatgctgcgcacttagcacgcaattccgcaacctccgcccgaaccttgcccaactcgtcgagggcgtggtccaactctgtgttgagcacgacagccaagttgaccatgttgttcagcctgggattgccctcaccaactggcgaggcaatcacacctccagcaccgccggtcgaacggtgagggtagtacttcaggtcgaggccatcagctaccccgctgaacaacgagcaatactgagaaagtgcccgtcgtgctgcattttgcatggctgcatcggcagtatccctcttagtaatagaatagtgctcttagaaggcctctgcaccccggggatcatcatccggacggcgcaccaagcaagtagc

SEQ ID NO: 66792 - DNA, 387 bp, Zea Mays
tcagccaccactctgaattctgctatagctagctgacatggtaaccctggcttcatgttgcataagggtctggtcatcccgaagcttaaactcagtgggctcatgaccagcgtcttcagcttctccctcttcttctcatcggccttgatataaaaccactcacttttccagccagttggccacttggtgcgataactgaggaccagagccttcatatccttgcgatacgcgaagttataacaaccaaaattttcatgtagcccgtcttctctggccttcgtttggtaatctctggccttcgtttggtaatgcagcttatgcactcggcaaaaagcttcagcatttgggtccatcccttggctttgaagggcccagatgaaaatgctg

SEQ ID NO: 66793 - DNA, 689 bp, Zea Mays
ccgaaaaaacggagaattattcaagtgacagatgtgatccactagacgccgccaccggcgacggtgtcaaaaattgtctttgccgagactgccgaagccgaaggcgccgcagccgaagctactggagtggaaaccactgaagctgaaaccggcgaagccgaagctaccggggccgaagccggggccactgaagagtcgaacctgaaaaccacacttgaggttattgacaatatactcctgaaaatggctgaagaagaagctactgtagctgcggtgaacacggcaactgaaaaggggaaagagcaaattgatgaaatttcggaagaaggagattttaactttcaagatttgcttggacaagaattaacagacgctaagaaagaggagttgaaaaaatatgccatatcttgcggatataaatcaggggctatgctatttggtggggtcaacgaagggaaactaagatgccttcggaaccgcaccgaggccaaaattgttagaaccctctccaaaagcattggcttgccgaagctggaagcggacttgtgccgttatcaacgacaccacatcgccggaagcttgctttatgctaacttcaaggtaacgaatatttttgttattttattactattattattatcttttaggtcgtgttctaacgaagattgttttgacagagcatattatta

SEQ ID NO: 66794 - DNA, 430 bp, Zea Mays
atgggatacagggaggctaccacacatatccagctctggctccttggtgccctggtctctcactccgagtttgacattgtggatttccttatttgtgagatcgaggacaccattttggatggtctgtgtgcccgtcgacaactgccgtatgctcactatctatgtcatatttttgctcagctgattcgacctccccagttctagggcacacttgaggcctcacgccttgtctttgggtcctaccgtcctgcgcctgaggctcctgtgccagcttctgctccagtttttgacactcaggccaaggatactgctcttcatcagttcgaagctcaggatgcagcagttgatgatgatgatgatgatgatgatgattttgggattccacctccgcctccgcctccgcctcctatgcctccacgctcacatgatc

SEQ ID NO: 66795 - DNA, 531 bp, Zea Mays
ccaaaacatatagaaattgctacctagcacatttccctttcaatcatgctcatagagttctccgaaagcatcaaggtgtatcgatgaaatacaatcccatgaagtgtgctacataatgattagtgtaagtgaccattaatctctgttgatcaacatttatcaaacaggaggtccaacttaccagaagtatgtcattgatcttgtacctggggatcttctatagatatccaagatcagtatatccaaacataaggagaacatgagtacacctggagatcataacttgatctcatgtgttgttagctagcaaatctttgcaaagcaatatccggccagatgctcttgcaagatacaatagcacatctcatgatcagaaagaatcaaataacaatgattctctcatattgaatttcttcaatatatgttggatatagacaactttgtatccaagatacttaagatagtttactttgaattggaaatctctttcaattcatatcctctatcttgaactccgtcgataagtaatgt

SEQ ID NO: 66796 - DNA, 394 bp, Zea Mays
gtaaattccagggacatggattaaatctccgtttactgcctatggaccgcgggttcatttcggtaaattctagagttccttacgcaaaatgccttggccgaaggggtatccgccgatcaggaccactcgatccgaaatcaagggatcatattagatctcgatcgccacatgaacatgtatgtcaaactagccaatggatcgaggaccaatggcacggatcttaggtaaactagatcgacagggaaccaaccaatctccaatcgacggtccatgaccacttaccgaaacgctacggccgattaaaatcctacgcattcatcacataatcattggctcagatgttgccagatccgattgaatcggtgaccttggtgagcgatccaatggccacgcc

SEQ ID NO: 66797 - DNA, 410 bp, Zea Mays
catgtgcatgttgtaggtaacctagaactcctgctctctagagatgtgaatctattcttgctcctctcttctaggcaagcgaatatcatgaatctgaacatgcctgtccctgatgtcctcattacaaaagcacacaatgtgagcagacctcatgtagctcactttgtgccagatcccctaaagataaaagtacatgactagaaaaccatatccatcttcttcctcatcagcacgcgtgatcaacaaggttgcttaaaaatgtccaataacttcattcttccaattgtacttcatagtcatgatgtttttcataccttgggcctcgcatgctctgaatgcccgagtcatgtcttagtcattcatttgttcacatatttcccagtcaatcaccatatgcttcaaaacaggtt

SEQ ID NO: 66798 - DNA, 428 bp, Zea Mays
attcagtgtcatcatcattagtatctccttgatcatcatcgtcaaggagatagacagagacatatgaatccgaatctgaactattagttttcttgtttgctgcattttcccctttgttgatgcagatggtggtaaagatttatttagaacagaagtatatttgttcagacccaaatcttgcatcttctttatattcttctccacttgtttatcctgtcttctctcataatcagttatctcatgttgaactgcttgcaagatagataagaataagcacactgtgcatattagataatataaaggattttactaaaagctaagaggtactactatttgcagggaagataagaggaaagagctagtagtgccatgtgtagagcaaatagataagatgtgagaggttatagattagaggtaagatagattag

SEQ ID NO: 66799 - DNA, 381 bp, Zea Mays
tgtcgaggaataccagcgacagttctcacttcttctgtgccggtgcaatgaccttactaccatgcagtaggtcagcatgttcacggcaggtctagggaacccctgcacacggatgtcaaattataagctcccaggaatttgcagtgcgccatgaacctgacaagggcctatgaaaaaagggaattggaggcaggaaaaagaggaggatacagagctgctaggaatagtttggtagtcaaggaagccggcaacaacacagcatccaaggtagttgttcgcctcgacctcgattcaaacggctatcaccggaagagttagcgacgaagcgtgcaaaggggaaatgctatcattgcacagagaagtactcaatgggtgttgctc

SEQ ID NO: 66800 - DNA, 573 bp, Zea Mays
tacgcagccgatcctcggcgaccatgggatcagcagaatgggcaaagacagggggatggcccctcatgaattctgcccgcttgtctctgggcacctacgacatctgaacttgcacttgaggctgaggtgggggtggctgctgctgcacctgctggattgctgctaaggtctgaccaattgcttggactacttgagtttgcatcatgaacatctactcaactgtcatggggggtggcagtggcaactacggctgctgagctgcctcctcctaggtgcatgcggttccggctgagcaagccttgcacctctgcgcctgttctcagacatctgtagaaagcacaaacaattcagatctgactctgcagtctttcagcataagaaaagatatatggaaatctttatagcactgaacaaatgatcatcttcactgacatcttctcagataaagaggaaagtggaaataaagggattacccaactaaataactgactttattaataactacaccaagttgcaggggatacccacaccttgatgacaatcattacaaagatccaacttcattacatgttc

SEQ ID NO: 66801 - DNA, 581 bp, Zea Mays
atcggagaaccgatcgagagtagatctagaggggaactaactagaagatgtaaagagggactaacctgagaacttcacgaagctgatgaggaggacaacactagggagatgtgagagtcgcgcgagatcgtttgcgggcgcgatgtcgtcaccaaggttcgagagagaggatgacgacgagcacgtgagcacgacgatagagatgagagccacagctgcggctgcgagtgaacccagagacgagaaagaggcgagtgaaccctagcatatttttaccgggcgagcatagtccaggccggcaagcgaagcgagttatctccgtttcgatcggccaggacacagagtcagctatggcccgtcccagccagtctctcaagttgagccagacaaccaaatatgatgtgcctatttcaaaaggatctggtcgtgagttgggccaaacaaccaaacacatcatttatgtttaatatctagccactaaaggataaatgttatatgtctatcaattgatatcctattatttatctgctcatttttactctaaatttgacgagacagctcacaaagacatataagtaaag

SEQ ID NO: 66802 - DNA, 800 bp, Zea Mays
tacactttagtccaaaagtgccctaattttgcacttagccccctagggtttaggtttagggttttctagggttccaattagggttcttggtatttcaggggtgtgaatgtaatgtaggtccattcttagtaacattttatgactatttcacttaagctttagggttttctctatttgggttttgttttacccttctaatcctcatttagggttaagtaccctactccagggttttatttgcaaaacaccatatcaatacaacttgtttgaaatttttgcctagtgaatgcattctaggtgtatcaaacatatgaaatgctaatgctgatgatgttatgctcaagttttattgatagtaacaccaggggtgttacacgtgggctccccatggcgatgaactaggccggataaagcctttctttagaagttttgttgtctgcttctttagctcacctaaatccttaacctccatcccataaggccttttagaaataggtgtggtgccaggtttgaagaaataaaggagtagtgctcacaaaaattagcaatacattacgtgtagttactcccttgctgatgtcacctaggatttgttccaccagataatcccatcggatggtggcgtggattggtgctggagatgcatatggtacttcttcctccttgtctttttgttcacacactcccccttgatccatgccattttcttgaggtgcctatttctcatcttgacttggggtgcactattgttgaggaagaaggtggattttgttcttgttgttcctgtggttccacatcgc

SEQ ID NO: 66803 - DNA, 447 bp, Zea Mays
aaatggcttggtgttgtcgggttgagctagcactggggctgttgtcaaatgctgcctcaaggtatggaatggaacgcaccttcacacttttggctccactcaaatttgactcccttctttaacagttcagtcattggcttggcaattctggagaaatccggaataaatcgtcgataataccctgccaatcccagaaaactccgaatctgcttcactgtagtcgggggtttccaatccatgacctcttgtaccttctcaggatcaactgatatcccatcctgagaaatcgtgtgacccaagaatttaatctctttcagccaaaactcacacttactcagcttagcatacaactgatgttcacgcagtctctgaagtacagtatgcaagtgtttagtgtgctcggcttcgttcttggaataaaccagtatatcatcaatgaaaacgacc

SEQ ID NO: 66804 - DNA, 340 bp, Zea Mays
aaaaattccaccatactacatcaaatgttgtcagtagatctttgagggatgttgttaggtttcataatcgtggaagaattagttcacatcttcatggatgataattcctttctagctgcatctgaatattacgctttggagaacacctaacagctggtgctgtggtaagtggtaacctcttaccaaaagggggtttgtgttatggtgttttcttgtcgctcttaatattagcatatgtttttgccatggggtaatgattgtgctgatagatttactctgttattcttgggggcacaatagtttttttagttcacttaaactgttagtctcttttacttaa

SEQ ID NO: 66805 - DNA, 475 bp, Zea Mays
ttatataatcaaacaggcccttagtcagtaaaaaaaccaaacctgttaacccacgcccgcctcatcttgcacaccgacaagaaattgtgtttaatctcatcttgagttcgatggctattgtgtaacaaaaggatatatatatatatatatgctattggtaatggaagcccagggcttccgataggtatgggaagccctagccagggtgtggtcacgcgcgtggtcaggtcgggccagtggggcgcgtgcgtccgcgcgattgtggggcacatttatgcatgtgtaaacatgtgttatgttttgcgtaaaccgaaggtgcgcacgtggtggggtcgagttgggatggacgaaggtgggccaaacgtcgtgttcgctggtcgggtagttggttcctactcgtgtttatgctagcatatttaatggttcagacttgcataacatgagagcggcaacgaacctttcattggttcattca

SEQ ID NO: 66806 - DNA, 589 bp, Zea Mays
gtggttggctcctcaccaggccggaactccactgccgaacagtgtcgacgctagaaactctggtgagaaccactcctagccacttctactttacttatccatgccggtggtacttcttaggcttagatgttggggttctggcaacctgggggtcaaacgccggtgcaagtcgtgccctggggcgagtgcagcggcgccgcatggcgagttagaggtagaagaaaacatggatgccgttgacgtgaaaagcaacggtcaggattcaatcagagacttaaggatgcgataaccggcctcggccgttgatctgctcgtatgcggctgagattagctcatgtagaaatggatttgggccctcggatcttgatccaacggcctgtagatggcgctggttcattatgtggaataatctgatctgggcggtccgttttcgatcggacggttgatactgcccgataccccttcgactggggacaatttcataagagccctccgctttagttgtattcaacccgccatcctccttagggttagactgagtctgagaatcttctcgcttaagtccctgtgttttgggctaatagtaggc

SEQ ID NO: 66807 - DNA, 613 bp, Zea Mays
caatctctgtaagtaccttatccgtggggtatcagtggtacacagaaatgtccgctgccttgtgaatctccctgaactatcttgtacctcggcaacaaagaatgtcgtggcatttgtttttgctcccaacaggaaacttcatagaaggaactgtcttggtcgaaataagctcttaactcaattgatcgtcatagtagtcttgattgatttctcatcaacagtgagtacttatggcattagaattcatacttagccttgctatcaaccaacatgtgattgatcggtgttccattgttgtcgtgcccattggctcgcggtgatttgcactcgagatgtgaaatttcactgagttgtcctctcaccaccttgtacgaaataataatctgatgaatatgtgtgactgcccctccatatttttcggacaagactttccactaatgtatcacctttgtgtttttggacatatctaaagatataggagtagcggggattcactagagtcataaattgcacagagcggagaaaactgaccctgactagttttagaagctggcctgatgagccagttgccatgtcgcgaactttgtccatttcaaattaaatttgctccatc

SEQ ID NO: 66808 - DNA, 438 bp, Zea Mays
aaggacgacaggaggcaaaagttggcaaaagatgggagaaaataaagccatcacaaccatcatcatcgtgttctctcgtacggatgtcatcaccccgcgagtagcttgcctcgttaattagtccccagcttaaagcagacgatgaattcatccccttttcagctcaaaattgccctccaaactttgacgacttctgaacgtctggatgtgtctgtataagatgcatgatagcgaaagatctcgcgtaatcgtacgtcgtcgttaattatcacaacgttattattgggggcacccgtgttgtaatggtggtgactaggcggtgtacgcttgtaatgatgcagtcagaattgtgaggaagagtgtagaattaagactgactgcaatggtttcctctaaaaatttcttccctttatgtcacatcacatcaccagaattcgt

SEQ ID NO: 66809 - DNA, 376 bp, Zea Mays
aggagatctacacggcgactttcctccgagttgtcaaataaagcaagagccttcccggaacgaaaggaatcccaagcaatagcggcggcatcccaagccccaacggcaagaataacagagggcagagcaaagcagaagttgagcagagcagccccagaccagcacgctcaagcaaaacactctccctctcaaattccaaaccctgccaccacgaaccattgctctttccccattgcacatttaccccaccaagagtaacccgccgatctagagcgcgcccaaggctagaacagagcaatgcgcaaggcgctcgtcaacgccgtcctcttcccggctctcgccgtggtcgtcgctctggccatctgctacttcgtcc

SEQ ID NO: 66810 - DNA, 690 bp, Zea Mays
ctaaaacgttgcctttaactcggatcctaggcgtagactctacacgagagcggacccagaattttggcacgtctttaagcttctgtactgctgctctgttctggtgctgcatgaccatgcatgagctacgtatatagtactagtatgtacaggctttagctcgcccgtgaatcagacgaaaaaaagagaacggcgcgtgagtacggtactagcaagtgtatatacggtccgctgtccgctccatgcacggatggatgtccattattgagaaaaatcggtgctgcagagtcggatcgtcgtcacatgcgccaggtccaggtgtgtcacacagtgcacgtacttcgtacaagatgatttgcacatacgtacgtgtacatcacgagcacgagacagcgttaacgttatgtcggttgtgacactttggataattgagctccgtaaaagtctgaaccactaatgcccctccaattctctcggttctgtggcttccaaaatagtcctaagggtttatgtagcagcaagaagatcaatggtgctaaaatatcttattatttaattttaaatagtaagagattctagccttcttattccttttgctcccaaaaaaaaccaatgatgttgcgaggttaggagttttgttggatgcaagaagggtagaaagaaaagaaacacatcggagatcactaccgg

SEQ ID NO: 66811 - DNA, 779 bp, Zea Mays
gtgaagtcagtgcagacttcataggtggtggtgcccaatgagcaagaggttgtcgtggcactagactccaaaggatcgttagccgctgaaggcctactacttaggtgtcaatgccacatggctcttcgccaccaggggagcttttggagactgactttgagatggtacactttttcgatgtggagatttaggcggtggtgagatttttgttgattatacttttattgcttttgtgctttgcgtgcgtttatgtatgctttcatgttatttgtttttgttgtttgtttttgtggtagaaggtggcaacaaagagaaagtgatgatggtgactacataaacattccacatgagatttgagtgtgtgggcgcattttgtgcctctattgaggtgggggaggagttgccaaggatgggggcacaactgaggtggcgaatgccgctatcgaggcagcgagaccaccaccaagaccttgttcggttgggtctaaatcaaaggggattgaaccagcttgtttggttgtgttcgaaggggattggaggggactacatctcagcttcattatgtaagttaattttatgcatgtttatgcttgttgattgtgttgggggttatggttgtttctaaaaatgattgatgatgcagcatggggacttgactgacaatgtggtttttggggaggagatcaaagttgccatgttctaagtggagtctgaaaaagaggctctatctacagaactggagcaactcctggttaaggccaccgaccgagagagaaatc

SEQ ID NO: 66812 - DNA, 501 bp, Zea Mays
agccgaaggcatcagctcctaagaaacggaaacttgacaagataccttctgccaaactgaaggtacatgatgcgccaaaaagaaccttgagccctctgtcaccttctactgccgaagcgttagaaattttgaaggtaatgactgaatccccaccattcaagctgctaagtcctctgggatcggaactgaccaaccttttacagaaaagggaaattccttcggctaccgatggaagagacgggggacagaaaaggcgacgtatgatgaacatactccattcaattgagaaaacccggcctctagcttcggcagtcaagactatcaaatctattgatgctgaggctgttgttgcaactgaaggcaaagacctcacagccaccatgtccgaagttgacaagattatatcagatgtggctgtggaaaaggaggtggccacagaagtgtcagacaaagggaagaaggctaaagaaatctcttcgaaagaagaagacttcgacctac

SEQ ID NO: 66813 - DNA, 294 bp, Zea Mays
gttaggggcttaggccgcatccaatggtctagcttagacctagataaaacaatttttaaagtagatagtgcaaaagcaagagactagaatagactcaagagtcaatctcgcatttcacgatgcatccttttctcatagcatgatgttgatgtggtctctttttcctccatgcttattaacttagatctagtgctagctggtactgacgcccttaaccttctctttagttatagttatctagcatattcattcgttacacatctgttagttgttagtggtatggctgggattaag

SEQ ID NO: 66814 - DNA, 315 bp, Zea Mays
aacaagcctttcaagtgttgaagcagcacctggtgtccctaccaatactggtagctccagaacctggggagacgttgtatttatacatcgcggcggctacagaagcggtgagcatggtgctagtcgttgaaaggatggcacaagaaggccaggaacctgagggctcgggaccggctacaggggtccggaccattcagaggccggtctactacatcagcgaggtcctccatgaaacaaaggccaggtaccttgagacgcacaaacttctctatgttgtgcttgttgcgtccaggaagttgcgccactatttctagg

SEQ ID NO: 66815 - DNA, 1580 bp, Zea Mays
ctctcgttggcctccaccccggacccggcgaccactccagtgaaccccctctacgtgccctggctgggagtctccctgacccccaggttggccgtccgaagtcccagcggtggagtgacgctagcccggattcttctggagattcttgcctggcgccccattcctataaagaagccctgctagccacccccacgtttccagtggctgcaaccccggggacgacagagatacttgctggtgaggggaagacggtggctggctcacgacctgaggtgcagagtcggctggtgccccagcgactggacgaggacggctggcaggtggtgcagcgcagaagtaagtttcgcggtgatcatcttccccgtcgctggtcccaggtggaccttcggggaaaatgctataactgcttttctcccacacatcttgctgtgacctgtcgccggcctactagatgctttaagtgcttcaagcttggacaccaggccgccggttgtccttccctcccagcagcagcgaagaagaactcagtgtggtagcgactgagtaaccagagtgagagagcttcggtgtggcaacgtttggcagtgcagcagaaccaaccgcctccgtttgccgcagactcccatagaagaaggtcggtgtggaggaggatcactccgttggagcctgcgctgaaggcagacacttcaaggatgtttgctgcaggcgactctcaaagaagcctacacaacaagaagaaaagacgacgctccaaacggggcaaaggatcgttggggtttggtgctggtccaggctctatgtccccggtttcctctgatactgctgacgcctccaggaaggtccataggtcggcgctgaggtctggaggacaaatggagatattcaagaagtcattgccttcttgtgtgttggaattcaccactgagatggcgcgtgaagaggtatttctccgccgtgccctgttcacaacagttgttgggactaggccggaggtgctaggagttgaagtgttagaagaagtcgcacataattttgaggtccatattgaagccatgcagattcatcaagtccagccagaggatttcctcttgattctacctgatgaagaaactgcctcaagagtgcttaatgatggcaaggcatatagggggcctcatttcagtttgaagttcaagcgctggtcgagatttactcatgcatcttcgacgatcatgtctggtatggtggaggttgagattagaggaatcccagagcacgcttggtttcgttctacggcagaaaacatcttgagagactcttgctggatttcggacgtgcatccggatactttgcaaaagaaagattactcagcctttcgggtcagtgcttggtgctttgatcctggaagactacaccgtgatatggaccttctcatcgtcgagcctggattgcacgcacttgagaagagatgcctcacttacaagattagtgtgagcgctaccctgtcagagctatctgcggcggacctggggcctccaccgcccccacctccggcgtacggcaggagacctgatggtgatggcggcggcggcgaggaccag

SEQ ID NO: 66816 - DNA, 341 bp, Zea Mays
gacggacccctcctgtgtttgagggagacaatttttcttactgggaaatttatatggaggtgtatttagaggcatagaagttgtgggtgtatagagacaccacacaaggacttctaaacctaaggatcttaccaacctagttgatgacaagatatactatgagaagtggaatgccaaggccaaaaacaccatctttatatgtctttgaaaagtggtatttaacccagcacggaaccataaggacactaatgcgctatagttagacatttatgcactccatgagggaaccaagagtaaggatgggtaatgctaccaccttgttatgaaaatgctaaattcat

SEQ ID NO: 66817 - DNA, 861 bp, Zea Mays
cattcgctgccccctcgcaggtgacaagatatgcataggacatgaggcctgtcacgatgaacgggagtgactccagctcctcctgcggccacccaagaaagcgaagacccatctcctccccagatttatcaaaaggagcgatctgtgcgaccgagctcgcgatacacttccacgaatagcgtgtgcgcccgctcaacaccggcatgggtggaggtctctgtcttctcgcaatagttgcgcaggctttttagctccgactccttgtcggtagcgcgcttgagggtgagatcagccttagtgcgcggctttaacttctgcgcgggcaccctgggccttcgtgcgacctcttttcgcaccctccttttcctcggcaagtaggcggctcaggtcttccctcactttttctgccgccgaaagcttctcaagcagattgcggcttttattctccaccgtcgacttgtccctcatcgcctctgtatgttgcgtgcggaggcgctcaatccttccctcaagccgccgcctttcggtggcaaactccaaggtcaacgcccccgaagcaatacgttccgcgaaggtggtcgcctgacaccaaaacatctttcaaaaacagaaccatgaaaacgacacagctacaagcgctaatcacactcacgtatttcagcagctgcacgactgaggtggccacgcccatagcagcggcatcggaggcgatttcaccatcggtgcaaaatctagcccacgggtcctctgagacccccgtgtcacccttcattcccgtcgccgcgaccacagagctggcagacgatgccgccggcacaaccgccagctggccagactctgcccctacatcacattcatatc

SEQ ID NO: 66818 - DNA, 295 bp, Zea Mays
gatggtccggccatgtatggtgcgacctgagtgttttgtgtgcgggtctgcatcggttcggacggtccggcgaaacacgccggacggtctgcggtataaccagactgtctaagatgatgctcggacggtccggtcgcgtccagtacctgccgcgtgcctagcggttgcggctgtgatggtgacacgaaagcgtgcatcggcataccatatgatggctgggtcaagggtgacccatttatagccgatgtgtttgacgcgggtggcactgtattacactctcgcgatggaaagttag

SEQ ID NO: 66819 - DNA, 382 bp, Zea Mays
gttttagagaataacagcttgatctacccatgtcctgttaggtttgaaatttatttgatcggcgacagattggacgtctggtagatggctcttggctggtcttcatttcgctttgtgcttcaatgcttctgttgattagacttgtactttagtggctatatttggctttcctccgatctctatcgatatctttcttctgtcttgatacattcattgcatataatgtgtggatgtgactgcttgggaaaatctattgaaaattcttggatgtcctccgaatggtgtcgtgttacgtgaaacggcgcctgctgcctgccttgcttccagacgatttgaattgcttattgaatacttgcgattattcagtgaccatggtaggaga

SEQ ID NO: 66820 - DNA, 1297 bp, Zea Mays
gttggattgggccagagtgaaaccactgacactagtgtgaatttatgtacacgtgctttttttaaaaaaaactacacgttcgtaaccgcacaaaattctcgtgggtatccctgcagacatatttatagccggagcgagggacctatggtgatgagtgatcgatttgatagaggtgataaaaaagataagggagatccgttgcatggcaagaacactgcaggggtagggcagctctctcaaataaagggtgttcgggtcgtggtctgtgcctgatcaaggtgatgaagaagatgagggagatccgttgcaagggtgttctaacgtacttgaagaatgaggaatacatgtgacgtccttattcatcctctcccaatgcttaagcttaactttcaaggccttgctgatattgtgcgagaatatttggtgggtcagcggaacttggaaattcatgctatccaacgctcccaccttggtcaggctctagtcatatttcgttttgtttttgatcgggacaacatggttgcattgggtccgcagcgagcgctagggtttaccattaaggtaatccaccatgattaaggttggaatcaacgggccttgaacttcaatagggagtgttggctaatgttgctcggtttcccgtaagatttctggtcccatgagcatattcagaatgccattggttcatttggcagagttattatgtgggattcaggtcgttcgaatatcgctaggttgatggtgagagcaagagttacctccatagaagaggtgtcacactttatagtcttttcagtggcagagggtttccagggagtttcttgactgttcagtctgaggtagtgcaacatgttatgatgggaggaaacccaaaaaatgaagaataagtacctccatatccaaacaatggtcaagagctcccgtttgatttctttggtctaggacagccagtcaacaatgttaatcttgacctgaacaatcctctaccacaggaggatgtgcctgaaaatgttaatgagatgaacgaagacaatgcagcttggaaggaatggccagctccagctcaagctccttaagctcagaataatttagagaataaagatcaattcaactttcaacttttagggcttgaggagctaaattcctcagatagctcaattggcctgccaaatggattcatgccactaatgcctaatcattattttaaccaaaacgggttaatgataatgaggattttaatcctaagcatgtgcaagaacaggttgatgcaatattagctcttctggttggccctgaa

SEQ ID NO: 66821 - DNA, 482 bp, Zea Mays
tccgaaaggaggtccggaaggtgctggacgccggtttcatcgaagaggttcatcacccagtgtggctggccaatccagtcatagttccaaaggcaaacgggaagcttcggatgtgcatcgactacaccagccttaataaagcttgtcccaaggacccgtatccacttccacgtatagatcaaattgtggattctacctccgagtgtgacctcttgtccttcttagatgcttactctggtttccatcaaatctagatgactagggaagataggaagcataccacttttgtaacagtggatgggctttactgctatgtcgtaatgccttacggtctaaaaaacaccttgccgacatttgtgcgggcgatgagtaagactttcggggacctgattagggacatagtagaggtatacgtcgatgacatcatggtcaagactaagagagggtcgaccctagtggaagacttaaccctggtcttcgac

SEQ ID NO: 66822 - DNA, 615 bp, Zea Mays
ctggactgcgcacacaattttgcagaagcctagggtctaactcataaagttcaggaccaatccgtaatattaacagcataggggtggacggcgggttgaataggtaaaacccccgggtctcttttgaaagaagtacacgacgaaggggtattggtgatggctcgccgtcggatctgagatggaaagctcagattaaaacaacgaacaggcaagcgatttgatcccttggatcacaaatctacggccatgatttaatgtacgaaggggtatgcgcccacttaatcttatccgtgcactgcaatatcaacggtctgcgttgaaacctggtcacaatccaatccacatcgcccctgctagatcctactgtccttatgcatcttcttcctcagtccgagctgggcgatgccttgccccaaccgcggcggcggcttgaccgagccctggaccaccgccgctccgatgaccaccgttgcacggaacccaaatgttgtgatggcccgagcactagcctatccacggtcatacaccaggaaacggaaacagtgataacacaggcggaaaagtactcaccgacgatgagcctgctacgatgcctaccacagctcatcgacccga

SEQ ID NO: 66823 - DNA, 469 bp, Zea Mays
cttgatttaaggtaattcactttgagacccgtcgaggtagcaaaggagtttagaactgctctgaggaaaaataattgtttggggcaagcttccaagatcaagagagtgtcgtcagcatattgaacaatcgggaaatcttgaccacagttctcagtgagtggcagctgaagaagaccctgctgtctcgccttattgattatactttgaagcaaatctgccgctagaacgaataaaagaggcgaaagggggtctccttgtcgtaccccacgcttgcaatgaaaagatttgcccggcacaccattaaggagaaccgaggacgtgccagaatggaggatatccctaatccaacccagccatttgggcccaaattctctgaaggacagcacctgaaggatcagatcgtgctcacctgtgtcaaaggccttctcaaagtccagcttgagcacaatgatttcttttttggaaacat

SEQ ID NO: 66824 - DNA, 677 bp, Zea Mays
ctttgacaatgttgtcaatctccagcttagagaaaggggaatctaattcatgaagatcttcatttctgattaaaagctctaacaaatcaaaatcaataccaataaaatcagacgatcccagtctgttcttgaaagcttcccagagaagatttgatttgtgctcatgctcaaaatgtatagccccaatatcatcggtcaaagaagtaattgaatattttatatgttttacagtggcatgtgcatggaaaaaacgagagcaaatgtccccttcagtgatccacttgatagatgcctgttgcttccaatagattttctaaatatttagcagttcagctactttttcttgcataatatctctaaaattccattcctcaatagaaagatcacaatgctcttcaatattgtcaataaactctattaacaacttgatatttctcgtcgtcgtatcaatatttggtaaagatcgctgccagtccttcagaacctttcgaataatcttaaacttggctgttaagtttttagctttgtcaggaatgcatggaagcccaagccacgtggtttgaaaaagattcatgaatccatcaaattccatccagaagttctcaaacctaaaaatcttcggtttagggatcttagacttaaaagacatcaggcaaggcacgtggtcagaaatgtcc

SEQ ID NO: 66825 - DNA, 887 bp, Zea Mays
agcttgtgcaaggtgggttagcctttgtgttattccttagcaggagctaatcacaaggtgaaggctgaataatgaatactaataccagtgcgaactagctaacatttgcttttgaaatccataagaggaaccttgtatacctacttgtcgtttcaatttttaatcagactaatctttataagctcaaaatgttgatgcccaaacatcataatacatgttctagaggaagctataccatcctccaataatgtcaactgctgactgcattctgccaatgggtttaggcaatagaaatttgcaaaggttttaccaccaaaatagatatttaaaaatatcctattaccctctattgtgcattgggctaatgtgcagacagttgtttactgactttactaagctagggtgaacctgctttggcgtttggagaactgttgagctgatggaccactggcaggaaactcgttccaccttatcatttcaaggaaaaaattgtgtgttatgctcctcagttcagtggctttaatcagcatgattcacaggagcttctcgcctttttattggacggtctccatgaagaccttaacgaggttagatgtaaactgtaagaagaagcaaaggatgcaagtgtggtcgtcctgatgaagtagcagatgaatacttgagcaaccatctagctcgaaatggttcttttatagttgatacatgccatgtaagtttaaacccccctattcttcgtttctttgtagtttcaacatattattatagggcacgcaacgcgcgcctattgatctagtatgtatatggtgtagtggttagtcttggcttgtaggttcttcacgtggcatgtttgaatcccttctatgtgtcatgctttttgcattttgttg

SEQ ID NO: 66826 - DNA, 400 bp, Zea Mays
gcgccgtgacttgcggataaccatgggaaatgaaagatctcaactcaggaaaggagtagagacttatcaccggactattcactgtgactcttgcagcgcattggacagaggtgtcctcgtcggagttcgccgtcgatcgtagccacgccatgtgcttagaagaactaccacgtcgaagtagatatccgtatgaggtctattcatcgtcggaggcattaccccggggaacgccacgatagttcacgccggtgactcacctctcccctcgaccgccggtctccccctttcaaaattcggcaccaccgcttagcgcccttataaattgacagcacggtctgctccgctatgttatcaccaagccagagcatccatccctgccctcgattagctactacagccg

SEQ ID NO: 66827 - DNA, 562 bp, Zea Mays
gcagaccgcttgcatggcacaacaagacaagtcgggtcgagcccaggctacggaggccaggggtcggcgtagctcgaatgagggcgctcgggccccacgcctgcgccgtctgcaacaaagaatatgagacaaccatacaagcccagggcccacgggtgcgagtggctttaccccgtggtagaacgttcagttttaccactgcctgatgacaccttcttaaggaagccactgttggtcgaccccctcagcctataaaaggaggaggtcagtctccatacatgggaggacatacatacaagaagacgaccagacggacaactagacgcaaaaaacaacgaatcgacgggaggaaggatgacgaaccgacgaggacctagaggccggagcctcatcgccaagacaagacttagttaggattccactatgtagctcttgccaccacctccaccacaagatacctgggagctcctcctacttctctcgcccgattgtaaccccttctatgagtattgatcagcaatggtgccgatagcgcaagccaccgatgactggatgcaaggat

SEQ ID NO: 66828 - DNA, 655 bp, Zea Mays
agagattgagctaagacagactataaagagtacagagaacccaactatctaaggtttaacctagctaactattgtcattgtggacaaaagtcacacaatacaacaacaatcattacaaagaaacaaatcaatcatagccacaaagataactaacatgaactcaaacatatcagcacaacataactcgatgttattaattcaatcaaaaggcaatcttgcctagggaaaacaatttcttatagttttttttgaaaggtgggacaaggttaggaataaggaagatattataaaatcaaggagtcgggtaagaaatagcaaggagttaaacaagacatatttgttggtggccaagagtgaaataagataatcatgaactattaaagtcaggataaatgatacaaccaaggatatgaaatgagttagggagaaagctttatcaaggagacaaaatagagaggcattttcaagtaggagtagggagacaaagaattcaatatatcaaggtagatattgagtaagggtggcaatacaatagcaagaaaacaaaagtataataattcaatagggagaaagcattatcaaggagaaaagtagagaggcaaaagtttaatatatcaaggtagatattgcacaagggtggcaatacaatggcaag

SEQ ID NO: 66829 - DNA, 453 bp, Zea Mays
ggatttccgaaacttgaagaaggtctttcggttctgtcgaaagatgaacttgctgatagcctcgcgtacaatagcataaatgtatagaagttaactttggagttggaaacaaagtattttattgtcatactcaattctttcttcttctttacagggcttgattcttagtaatgccttgagggcacaaaagaatgttgaagacgagagctgtaccatagcactcaacaaccttcgttcagaggtgattgagttaagaagcgaaggcttggaaaaagataaaattttgatttcattggtagataaagtgaaagaagatgaagctaactaccatgctcagatcgaagcccaaaaaaccgagattgaagatcttcgaagggaattggctgaagctaatgaaaaatgcacgcttgcactggccaaccaagaggttagtgaatactggaaaaataagct

SEQ ID NO: 66830 - DNA, 394 bp, Zea Mays
gagattcacaatattctctcttgagacattatgtaagattctaaatctgttcatcacatattcacatatactatttcctaagcataggggttcatgcttaataggatacttatcacataactttatttgaatctgaactttatttggatgtgcgttatttgtgcccatttctccacacgtttgtatctttggaaacaaattactgcagcatggtttgaacagtaatcgtttcaactgaaattttagtcaaaacaaggtacctcatttgagtagtttgttccgggaatttgtcatgccagttagcggtcaaattggctacttgatccatagtggaacgtagtcttgtgggacacctgccttcaaatgatgatctatgctattgtgtgtttctttc

SEQ ID NO: 66831 - DNA, 565 bp, Zea Mays
aagaaaaacatcctgaattattacatgccagacgtacaccatctttattacattatactgaactggtaatcattatacatactcagtagtacaactcaacttccttatttactttacataaggacactacttaaactacactactctaattatcttcgtccttggccgttccaatgccagcttcgggagaacgttcatctgcaaggttcatggaaggaggggctccaaaaagatccaaatccccatcaggtcctccattaggtgctccatatggtccagctcccattgctacaacttttggtggcacatttggatgcagccggtcatataacacgtgcacctcttcatgcagggtgttacaatacgcttgcagattatccagggatgcgcttagttctgctacccgggctagagcctttgcctcacaatcctaggcgaaagagcatgaatttaccgcccagtcaatggttgtgtctcattccacaattttctgttgcaagcaattaacctccgctgacagttcagcaatgcggcaactatctcgcgcacgctccctactcccgtg

SEQ ID NO: 66832 - DNA, 702 bp, Zea Mays
aagatatcacaactcgaacagattaaatcagagttaaaataaaaaagttatggaattcctagttttctaggttatttaggactatttttatacacataatcactttcccgggcttaaatgcaaagtccagggccagtttgtaattataaaaggtttactcgagggctcaactttgaaaactaggatggcgggttggtttccggatactgcagggtttcttttgcaatttttccacgagggatggggtaccggtgtccgtgagccgttggattatttttgcgtggcacagattagatcgtgaagcggtaagtgaacctggccattgcttcacagatcgacggtcatcgaagtgggatctgcccgcctaatcgtgacagtttatctcaagactaacgacacccgagcttctccccccacctgaccgactaagacgttgcctcccccaactgcggtagaagcacgccggcgttcatcgaccccttgcacaggcgattcaatcgaacttcggataggtgcagcgcggtgcaggaaaaaaacgaatgccatggaggcggtcataccggtgctcaagacggcggcgaggcccgaccacgaagcacggcgcaagcatggcggcggggaactccgttgacaaattcttgcacttctgcccctcccaacacgaggtcgtgccacacgttcggtcagcggatgatttcgacc

SEQ ID NO: 66833 - DNA, 684 bp, Zea Mays
tggcaccaagtcgcataggacagcctctgcaaggtctcaaagttgctcgaacagacagaaattcagaatagatctgtctaattaggacccatgaacctgacaggccaacttgagcatcatttttctagatttttggcacaggatcaagcccatatttcttaagaacatttaatctccttctaatggtctctaatttatctacacagctcatagactttaacccactagattggtcacaaaaagattcctatcctagcttgatatactgcttcattggtttcagattactgtgtggtctgaaattttagagttctattagctctgttttggggtatcctttcagaggatttcatagtattttagagttgggtctcccaattgaacttatacccctatagtagctctaccattttgatgtactaacctgggacagaatcctcataaatgaagagatatacagccccaaatatggtccaaattactgggatttagacttagtcacatgaaaggtgtagagtggctttgtgcaaataagcccaaatctcatggttttgatttgcaaatcttcaaatatgtgaaccatatgatttggggtgccctaacaccttggtttttgcacttggatccaaaagtgtgccaaattcacacataaccccctagggtttcaattcatggttttcagtg

SEQ ID NO: 66834 - DNA, 628 bp, Zea Mays
gcacacggagccgtccgattaaaaggtgacggcgcggattagatcatggctttaaacgaaccggtacaagactatagccaccagatctatcctagggtctaaattctatgaatacccaatcccaacacatccgttcgatcagatccggacggcacagattgaaaccccgaaaaggtatagctagacctaatcaccaccgttcatcagaaaaccaatgatagaggcaccccttccatggatctaatcttggccactctatgaaaaatctacggcgctggtgcttcttttcttccccgaggtcgggcgcggcggcaaagcacgcatccatggcagcgagcttacaggcgtgcaacagtccaaggcccatgcgcactaactcaagtctggctgggtgctacgtgaagagggtgcaagggcgaatttgctggtgccactaatcccacaaatcagccatggccagagcctgcccacgacagcgcaccaaccgcggcgaaaaaacacaccagcggaaattcccggcgtaccacgaccctacgcatcgcaggacaggtgcaaatccaaatcacgggttcggcggagacagggggagtttattaccttcaatggcaacatggagaatccggaccac

SEQ ID NO: 66835 - DNA, 769 bp, Zea Mays
tgagaccaaattccatattatctaatactaattggtgtctatccgagtacttgtaaatgtggatgagccaatctaccccaccgcatggaggttgtaatgactgctacctcttacaattcgtatgtgctgaaatggtcttatacatgtggttttgtaatgtttttggcgactcatgatgcctgtatctaatacttggtggcagactgaaactgagggattcataattttcatggaggatgtagagttttttaaagtgattcataatacctatcaaattgaagcttcataaacggggggattcatgctaaagaaccaattggatcaaatacttggtgatagactgaaactgggggattcatggtaagcgtggggatgcggaggaacaggatgcacgaagaaagtcactaacactaagactgaacaatataggtcgaggaggatcaaggtaggagaggagaggagcagggcgtaactttgagctataggttgaggtggtcgtcggcgtcggagtctagccaccacgactgacagtggggaggagcggtcgcgtgctcactggtcgaagaaacagggaagcaagaagtgtcaggagccatggcgtgcttgccggtcagggaagaggtacgtatgagatcagtggcgcctccccttagctttgacactgatgtcgttcttgcccttggcgccacgccgggagtggtgtcagtggcatggaggccgcccaccgggacgataggatggggagacaccgagcagcgcctggatgcac

SEQ ID NO: 66836 - DNA, 1348 bp, Zea Mays
gtgatttagatcgcctggccattcgggaacgttatcatggtgatgatcaagttcaagttggaaacggagcaggtttgaaaattctccatactggtcattccttaattaatacttgtgatcggcctcttgatttgcgtaatatccttcatgttcctaagattactaaacaccttctctctgtccataaattcacactagataaataaagttttctttgaatttcatccttggcattttcttattaaggatcttctcacacggaaaacactgctgggcggaagatgtaaagggggcctctaccacctctcgccttcgaacgctgcacaattgaagcaaactctcatcagtcggtctttccctagtcgtgcccagtggcatgctagacttggtcatccatcccctcaagtagttcagtctattttaagcctcagtaatattttgtgtcctcgagagtccactaggtctatttgcaatgcttgtcaagtcgccaagagtcaccaattaccgtatttttcttctgttcatcgaactctagctcctttggagttgattcattctgatgtttggggtcccgcacctgtctctatcaatggttacaaatattatatcagttttattgatgattttacgaaatttacttggatataccttatgcatgatcgctcggaggccccacgattttttcaactttttcaaactagtgttgagcgcctccttgatgccaagataaaaatagttcaatctgattgggggggagagtaccaaaaactccacaatacctttttccggtctttgggcatcactcatcatgtctcatgtcctcacacccatcaacaaaacggctctgctgagagaaaacatcgtcacattgttgaaaccggcctagctctgttagcccatgcttcaatgcctctcaaattttgggatgaagccttcctcactgccacatacctcattaatcgcatgcctacccgtgtcatcgataacactagtcctattgaacgcctgttccacaaaactcctgattattcgctcctaaaaatttttggttgtgcatgttggcctcatctccgaccatataacaaacacaaattatctttccggtcaaaagagtgtgtttttcttgggtatagtgcatctcataagggctacaaatgtctagatgttgattccggtcgagtttatgtttctcgtgatgtcatctttgatgaaaatgtttttccctttgctaggacatcactcgagccttacccagatatacccaacccacctacagccgtgcgcaattttcatttggctgatcatagtgttaattttggttttgatcatatggccacaccggtgctcc

SEQ ID NO: 66837 - DNA, 504 bp, Zea Mays
aataattagaaactgtgtgtagtatcattatcctatgaactttaataagttccttgtcctccattctttagattacctcgttaggtataatatgtgtttctctcgcttgattgggtagaaggtattgtgactgtttaacccttcggcctttaaatggtatgagctgttgtttgttttgcttatggaaagacgctaagttcaaattagaagtcttgtttgggtgtatgtgatttctcatctttgtgtgttggatactagaggtatgtacttgtatagattgtaggtttccttaatttgaccgctagtccaacttttgtttgttctagtgtgtttatgccgatagaatgttggtggtatgtttgcataaagtcaaaattagaccatgtcctcacctaggagccatgactcaaatcgatgttaattccttgaaattttccccagtttccaaacgtggacgagtctgaattttttccgatgttacttcatgatcaagctcatataaat

SEQ ID NO: 66838 - DNA, 539 bp, Zea Mays
atgcaaacagtctctttagtcgttatacaaaaggttaaagaaattcctgcccaaagttgctctgtcagacttgtactgaagaactgaatttgaatctaaaaagcagaagtggtcgccagtgttattgaccaaactttgggatcaagattataaaggatctagtgctcgattgagtttagttcctacagtcgaattgcagttggggtatagctccatagctttgatacaggtaagtgattatgttgtcatacgaaatttgagagtaaatcgcgctcaaactcgctcggtcaggcgcactgaagatgaattccatggtacagtgactggatcagactgccagctcggtcagctcgtcaccggtgatccgcgtgaccggatttgtgctggtcgccgggattcgtgctttgcacgcagaagatttctacgagaaggtaaagatctcccggaggggaatggataagatcacggattggagattatcaccgtgcttttagccgtggcaacgtggctggactacggacgtcgccgtggaagcgccg

SEQ ID NO: 66839 - DNA, 305 bp, Zea Mays
tcaagtacgactttcgtgtgacagttaacgcgagacgggcgcatgttgtttgcgttgcgcgctgacgtagggcttcgtttccgtgttgaaatttctggcaaacgggcgtccagtttctcctttctctaagctgatcaaagaaaaaaacgattaatcaacggcaggtgacgacgttgggattgaagtcaagttggcacacttgggcagtacggccgaaaggaaagaaatgcaggtatccacgtgttatacctcatgcatgtaaccactctgaccgtttttatcattttcgcctagctagcacctac

SEQ ID NO: 66840 - DNA, 1060 bp, Zea Mays
ctccacgcggctagcctatgtctccatgccatacgtgtttttttcctatttgtttattcaccttgccgcgtatgacatcaacatgacatcaagcaagcaacttcagtggtcgttctgttcgtgcgtagtctcgctgcgtccatctagaaaatcaagcacttaaacaacctcccgatgttcctagcattaccggtttccggatattttccctctcgggctataagtatgagacgccggggcaccctgccaatccaaacatttctatatgcttcctgatgggtgggcagatcatcaactagcaccgagggagagcagcgagtgagagaactcaatgacgccatagttgttccgcgtctgcgcggttgtctaggatgccatggaagaccgtggtgcatgctaggaattgtgggcaacttggtcgaagcatctgcaagcttagggagcccgggcagcaaggaaattctcgccagtgatgtcggccaccacggtgccgctcggtggcatgggctgtgcgactgtcctcagtattccaggtaatacttccacgctcggttcgtcgttgtgtcctccacgtaaatccagcaaacacaaccaagggggggggcttgggaacatcgggttgcagctcgtcggtgtgaaggccaccgaactaggatgcgccactgtgttcctggtgtccggagaaagaagatgagaccgtagccatcgatcggctagcggatggtcaggattagatcgtcgccctactatttgtctgaacgtcgtggatcttcgatctaacggatatcatggcgtaccggttcgattttatgccggtctaatctggcgcgtttggtgttgatccaacggcctaaatcgttacgtaccccttcaccgtggaatttttgtttaagagtccctgactttattgaaaattaacccgccatccacctagttcaaagaaccttgcgattgggtcctgttttattcagaatagcccatgtactctttagaaatgttatctgcagtccacagggtattaagtactataaaatacattagagttactgattttaatata

SEQ ID NO: 66841 - DNA, 347 bp, Zea Mays
acgacaccgacgtagagtggcctggcggcgacgctaacttgctccggcgagcaattgtgcacgcacaagggcatggaatggggaatcaggggcatagggaggttggttaccttgagagagggctctagggcgcttgaatggcagcgggagcacagcgaagcctcgggtcgacagcggtggccttgggctgcacggtgggggagtctggtgagcgcgagtagagagagatagagggggaaggggcgaattgaggggtgtcctaagttgctggcattgaggcagagctcaccggggcaacagacacgacggggactcgaagacggcttcggaacaggcctaagaccatg

SEQ ID NO: 66842 - DNA, 872 bp, Zea Mays
tgcttgatggttttggtagttccgttacgcacactcagtgcctttaactgttctaccgtctcctccagtttcggctcttcagtcacatttgtcctagcttcgactggcaaagatcgacctggctctatgataggagcggctccctcaattagcttcggcacgtcggccgtttcaatgcgcatgggttggtgcatcaaaactttaacctttttcgacctcgacacactagaagttgctgaggtagcagctttcctcttcttcccctgctttcgcgtgggatagcagtaatctggatacacaaacccgatgacatcaaacaccctattcaatctctttttgccccgagcaccgaaggcagttgtcatagcttcatcttcagccttcgagtatgctccaagcagctcatcgctagttgcctctatcacatctaaccagtcatcattcggctcatcaaactggctcctatatcgaaaagtatacttcaaatagaccaaaccattttggatggagccagtgtcagcctccttcgacatctcccatctgcttgcaagtgaccacactctgtaatcaatatgctcttggactaagtctgttgtaccgatgtaagtacacaatgtattgaaagttgcctgacacgcctgcacaccatttccaagtgcaatgaccggcttcctaatgccgaagtgagaccatatagggcgctgaataacccctgttatatcttccctttcactaagatcaaccttcacataaaaccatacttgcatcagcgcggggtacaaagctgtagcagccaaaattgttgtggtatgctctttcccggtcgccttcgtctgatatgataactcatggatattacagaaacacctggc

SEQ ID NO: 66843 - DNA, 536 bp, Zea Mays
ctctcggctgccattctcccagatgtcagtaaagaatttcccaccaactaagcttgcttcggccgaggggtattttgtatcttcaatagataaggtagcttcggtttgggccaaagttttcacgtgatcacagcctaatttctccaaaatagccacgattccccctggcacctgagaaggcgcagacatccccgcgaccactcaaaacttcttcaaaggcttcaacttcgttgctgatccaatcaattgggccttcaggatcaccccttacgaagttgtcctcgctagagaatgcgccaacattggcgaagctagattttatcttttgcacacattctatggatttttcgtagcatttctctttcgaagaccgaagttctacaactgtcttctcccaataatttttctaatagttactgacgtctcggtcagcttcggcaattgcacactttaacttcgcttcagccagctgtttctgaagatcttcaacttcgcacttctgggcttcagcttgagctttggaagtagcttcgtct

SEQ ID NO: 66844 - DNA, 307 bp, Zea Mays
agccatatcatgccactggcaacaaaagtccagcatctaacccagctaaagctttgagcagacctgacacaaaaactattgccaatataagacgactaagacaggaaaaggggtttgaccaagacattattacagacaggcatcctgatataagaaccataagagtcactaggttcaagaacagaaagaagcatcatcgccaaaaaggatcccccactcatccaatcactgcgtcagcctcctgtcaactggagaccacccccaagctcgaatgaagaaatcactagccatttttctgatatggttg

SEQ ID NO: 66845 - DNA, 482 bp, Zea Mays
acgagcaattccaccaatcaaaattgtaattccactgcccaattctagatcagagagaaaaccctatgaatccccaaagttgaataaatcagacaaattccatgagattttgaaataccgagatgaagacatggttgatgaactcccaacaatctcccggacagtccgtgcgcaacttcggttcaccgtccgctcacaaacgacaagaatcacttttggcgtgtggagtgtgagagagaagtgttgaaagtgaaaatctgactgcctctgcccgatttatctgcctatcacggacggtccgcgtggggtctatggacggtccgcgccctatcacttcaaacagtctgctctgctgactcggactatccagaacctgatacgtcggacggtccgcggtcattacctggacagtacgtgacctgatactcaaacatccaaactttgtccactttctgtttttgaaattcaaatttggttcatcg

SEQ ID NO: 66846 - DNA, 1829 bp, Zea Mays
tggtcatatcagcagtaaaagaatcacgaaagactgcagcctagtgcgccctcaactcatataggttgcttaaccacgagttgtccttcaacccatatgtttccaacaaatcagtccacatcttatcaaaggatgccacagaactctcttcataaacacatttcttaaaatcagcaagaaacttaggatggtccttcattacttgactgagatgttttgcagcattttgataaatgtgccacaaacaaaggtgatgccttgtatttggtaaaacaattctaattgctgctgacatggccgcacattgatcagtgaagattgtgctaggatgcttgcctgacatagctgctagaaatgtattaaatagctagataaatgattcaattgtttcattatataagagtgcagccccaaaaataattgtccgcttatggtggttagtcccaaggagcggagcaaagggcatttcaaacttatttgtttgaaatgtggtgtcaaatgacacggcgtcaccaaagcatgcgtaatccatgatagcttgaccatctgcccagaagaaattagctatccgaccatcttcttcatctaattgtatggcgtaaaaaaaagctggatcctctaattgtttattcttcaagtattctaatagtatctgtgaatcattggctggcaaatacttcttgcgctcacgtccaattagattattgcaatccattcgtgagaagggtacattttcagctcctccataccagtgcttgaaaactcatacatttcagctggctttattccagcttgtcgtatttgaccaataagtaatttgtctgcctcttgtatctgtcgatggggcctcagtttgtgtaccttgtttggactagcaagataatgattatgttcaagaacaaccttttgtactgtccagacctcctctcggctaacactgaactggacacgagcatgacaacatgttcttgtggtagcattttctttcaaagtatcatgttttgaatgtttacctttttctccttccttgctgcaaactatatgtttctgatagatagttccatcaactcttcgtcttgcattgctttttgtaatactaaaactgatcttcctagcataggagttgtacatctcatatgcatctgcctctgatttgaatgccattccaacttcaggtacaattgcatcttcactgttatctcgctgcataaagagatataaattaaaatggtgaaaactacataatagataacatcatgtcatatattatattacctggatagtaggttgatcgtcagacgtcataggattcagcaaccttgaagtgaagttggtggaatttggcggcatcacttccgccatcgagatgttggaagcaccagcaatatgctccatagcaggggttgaggatgaccttgatcgtgaaacaccacaatattcaatctcctacagtgaaaccttggctgttgtgcgctccagaatgacgatgggaggtcgccgcagcttgtggatcgaaactgtgtagcagcggagaaaatgcggaaacggtgatggtctgatcctaatttcacgcagcaaacgcaatccggctctgcctcaaggaacggctggctaggctcgattagccatgtcatcagcggctcgattagctggcatcattagctattgattttggacgcctgtcgtgcatcgaagtgatgccgcacgattgacgtcttgcgtcagcggtgcatagaattttattccgtgatcttctactgcaatttgtcaaaacaccctgaattcacggattctctctcgtcaccgtctctatttacattacacgcgcc

SEQ ID NO: 66847 - DNA, 682 bp, Zea Mays
ggggtagggcaagcttcactagctcacctagaaccaggaacagtgacggggacggccggaggaaggcccgagttggttgtccacgttgcggcggcctatggtggggtgctttggcggcgaggaacggttccgacgagctcactgcagtagcaaacaaagcaataggtcggtgagctttcgtgtccatggaggaggctagaacggggtacagaagggatgtaacctaccctagtcgacctggccacggagacgctcaccacggcggcgccgagaatggcgatggagaagatgttgctctcggagttgctaacgcaattcggctggtgtgtgtgagctctggggtgcgcaaagagatgaggaagcaccgactgaatttcaaaagatcttcaagctttcctgctacgctggcgagcctacgaaagggcagagggccacgacgagcgcctaggtgaatgcaccagctggaatggtgacacctcatgtttacatgcggcacgtagaggaagatttttaccccaatacacggtgaccacatgcagcgaacgaagtaacggtggcgttctcccctgccagcttgaccgaccaagtttaacgacttttgcttccccaatcttaaagcaacttgccacttcatcctaaacaaagttgtacccgatgctacgcttaacaaccttgctataat

SEQ ID NO: 66848 - DNA, 577 bp, Zea Mays
aatgatttaacataactattgttaaagtatcattttgtttctattggaatactgttgccgacaatgtaaaaccgatcttctaaaatttcttgtgttttgttggttgcttttcaataaacaggaattggtttctttctagttgttcatgttgtacactggtcagagtgtgttctgacagatcttgtggtgttccctgctgggttgctcatcaaagttcctgtcgtctgcttgtattgcaggatattatgatcagtggagcgccaaacccagaacaaatcagcaactctgttaggagggctaacgagaaccatctggcaaatcgactacgctattctcttagggtgagtataatacagttcgacactcctgcgcagtgccagtgagttggttgctcacgtagcatcctattctgcaggtctatgcttctgtactgtatctacagctaccagattactttaggatcatgcttcgagggcgagaagttgagcgtcatcacattgcctctgacttgatatatcctgaacgcatcagttatagaccacaaagttgcggaataataagagaggtttgacttggt

SEQ ID NO: 66849 - DNA, 1930 bp, Zea Mays
ggctgcagagccggagcagtggcggctgtgagcaccaaccggtccgctggtcggaggacaccgaccgagtggcatgtgaccatcggatgtacgtggcggggatcatggtggatggtgatagaatagtgcaccgacgacttgtcgcgggagcgggccgagtcatggaatggctcgtcggaggaggggtcctgtggaccaggccacacgccgctggtagatgcgggcgggatcggcgaagtgaatgtaagggggtcggagaggtggggcaacgcgtggcatggttagaggcaacgtggtgacgcatggtgtgggtggaggctacaaggccgcaggtggcacggtcgaaggcgaaggagccatgcatggcacagaagaggtcgctgggaccggtggtaggggaaggggactaggggaggtacttagacgagatcgacatcgagaagagagttgaggtcgagatgtggggaggagccagcaaggggaaaccatcctcatcgaaaacatgtcgagagatgatggtgcaacgagtgagaaggtcggggcaccgtaccccttgtggtcacaggagtacccgaggaaaaaggtagcgtgctgatcggggcgaaagtttgtggggaacgatggcagaggtattaggataggtgcgaatcatgcgatcagtcttgccgttttgaggggaggtgcaaggatatgacatccgcagctacatgtcgtgcaagagaaagaaggcatgagacatggagttatcgaactcctgcccgttgtcacactgaacaccccagatggtgcaaccgaactgagtcaacacccatgcgaagaagtgagataaggtggggaaggtgtcagacttacgacggaggggaagagtccagaggtagtgagagaagtcatccatgatgaccagatagtattggttaccggaaaagctcggtatcaaaggggtgagcattgtgggacatggaagaggtgaagggtaagtgattgtggtgaccaagctgacaagcatggcaaggcgaggtaacgttgccgcggggtggggaatgatcaaggtggacgagagtcgagaaaggacgtcatggctggggtggccaagacggtggttccaagtggaggcagaggcagtggtgacgtgggtggagggtgtggcaacacgtgatgtgggaggtatgtccggaaagtgaataggatagagagtgggaaagagttgtcgcagcgagcgaccacaacacgagtggtaagatcccagatggtgagcctccggggatcaaactctatggaacagtggttgtcagtggtgaagcgacgaaccaagagaaggttctatatgatgttgtggacaacaaggatgttgttgaggtacattggactaggaagaatcgtcgcttactgaggtgacaggcagagtcgacccattaccgacaatgatggaagaaggtaaagtggggctgtggggatggggtgaagaaacagtaccagggtcaggagtggtgtggtacgaggcgccgcagtcagcaacctagttggtgggagtaacatgagtgggctacgaggacatgtggtggtacgaagagagctatgggaggcacctccacagagacatcgggatgggcgtcgagaccgccagtgacgagcatgagcagtggagacgacaaggcctcgatcgtcatggagacaatctcaaaaccgcggaatacaaacgaccctgtagcttggcggctctcttgaggatggacggaggccgaatggtggtagagctcgacacagtcatggagaactgggttcatgacgcggtcaaaggccacgaacgtgccaaggagaaattggtcgtcgtgaagggagacatggacacgataggaaggcaaatggacgacaacagagcgaaggacgagcgtcaagggagcagacatagggaggctccacggtgtcagat

SEQ ID NO: 66850 - DNA, 378 bp, Zea Mays
gccgtcgcgcgctcttcttcctgggtggagcgtccatgaggtggaagcagcagcgtccctagtgccagggtctgtcggctgagtgcgggggagaatgaaaggagtgtccgaaggcctgatcatcgggaccacggtcggggtggtcataggcgtgctgctggctctcgggacgctgctgtgcctgaggcggcgtcggcgttcccagacgcagataaggagcagcagctcgaggagggcgtcgactgtccccatccgcaccaatggcgttaacgcctgcgccatgctctcgaactcgaccacggggcaggagtctccgactccgcgggagctcgaagagcgtgggagttctctgtggatccaagggccaggtagaaagag

SEQ ID NO: 66851 - DNA, 1039 bp, Zea Mays
tgagcatcgacgtggtttactcatgcccttccttgatactgggtcttgttctactagctgatggaggagggcgccttgggggcgggtgctgaggtattcttggggccattcaccgagttggagtaagcaggtcctgatgccttcaactaggggcagttgttcttgaagtgactggggtctccgcaatgccaacaggcatttgctggtggttggttgcttgcaaccgagggggcctgaaaggagctctgactctactgactaaaacgtgacggagtgggtcccgctggtctattgaagcttggtcccttgggtggaaacccaaaagatcgagttctctgctgccgatcctgttgctgagctcggaggacttggaatttcctcttgaggtgacccttttattcttcctttgccctttccacttgtatggctttgtttgagaggtgcgagaagctgagaaaatcttggctggctaggatggtcttgagttctggtctgagccctttcaagaagtgggccatcttattgccttctgtgctgacgtcatcaggcgcatagcgggctaattctgtgaatttgtgcacgtactcgctgacagatcttccaccctgagttagttcccgaaatccatcttccttgagctgaacgatcccttggggcacatggtgctctcggaaagcagtttcaaactctgtccaggtagcatctctaacggcagcgttgaaggtatcccaccaagccagggccatcccaggaagttgatgagcagccaattgaacatgctgattctttgggcatccgatggcttctaacttccttttaatcgtgcgcagccagtcatcaacatcgagggaattgctggatctagcgaatgtgggaggcttgagcctcaggaaatctcccatcctgtcttgtggtcttccaccattcaggcattgattctccagacttccagtgaggacctcaatgagtcgggtttggttggctagaacttgggctaagtctaatggcagctccggaggtgtggggaggtgggtctcac

SEQ ID NO: 66852 - DNA, 540 bp, Zea Mays
ccagtaccaccgactttggccgaggctatccctgccctggtcaatgccactgcggataatacgcgcttcttgcgcgaaatggcgggaatcagttccaaccgcatggtgggagagctcctccccaagggttgcgtgatactacatatttggaattttctaagactcgaccccccgctctttattaaagcagaagaacctctagaagccgatgagtgggtaagagttatggaacagaagtttgggctgattcgcttcacagagacgcagaagccactgtttgctgcacaacagctgagagggcctggcagtacttagtgggcaaattttgtagcaattcaatcggctggacatcagatcacttgggaggaattcaagctagcattccgggagcattatgttccagagggagtgctccatatgaaacaagaagaattcatccggttaaagcaagggggagatactgtaatgcagtatctcaacaaattcaaccatctatctcagtatgccatcgacaaagtgaatacagatctgaagaaaaag

SEQ ID NO: 66853 - DNA, 287 bp, Zea Mays
tccttatttatttgcataagtcagtgttttcagctcactcgattaatcatgtttaaccatggtaaatcaataatttggtccctggacaaggaataggtgcattgatttgattatattgcctagtaaatcaattagctgtcaaatcatcaaccgtagccacgaatagtcgacccattctaattgaatgactagttgctagaaatgataacttgggcttcgacccaatagcattcaaggtccagcccatacatcaccacctaatatatgctactaacactcaggctcct

SEQ ID NO: 66854 - DNA, 453 bp, Zea Mays
acgcccaggtcgtggatcgtccggcccagagacgcagttcatccgtgctgccatagagggcattgctaggcggtacaccccctgtgattagcgctgcctagatcagtgccaacactcttatctcgctctgcaaccctttttccgtgcctcgatgaactgttcatagctccagcaggccccctatcccggagtgcaaaatagaagccacccctggcgctcagtatgcctatgagttctttctcatctccgcacctcaaccttcactttcgtccgctcccaccgaatccgctaccaccctgaggatcgaccttctttctccccccacctattgtcgaaaccacaggagttggtctcatcacgacgctccacctctaagcccacctgctgctcaaggaggactgaagggagtacatcaacgtctgctcctgcatcaacaatgttgcatcctccgtc

SEQ ID NO: 66855 - DNA, 568 bp, Zea Mays
gtggaccaggccaagaatgaagaggccgacgcactggccaaggccgccgccagaggcgagtctctcccctccgacgtgttctaccatgtcatcggcatgccagccgtccggagccccaaagggctccaaataaccaatgacagcgcgggccaccgcatagtcaaccttattatgaccgaagactggcgggcaccaataaccctgttcctacaagggtactaccacccaactgacatcaacgaggccaagcgcctcaaacatcaaagccgggacttcgcactgattgagggccaactctacaagaaaggggtcagtcagccaatgcttaaatgtgtcaccgagaccgaaggcgtccaaatcctgcgcgacgtccacagtggtacttgcggctctcacgcagggccaagggccctagccgcaaaagtgatccgccaaggcttctactggcccgcaatgatctgcgctgcaaatcgggttgcaaggtcctgcgaagcctgccagaagttttctcctcgatcaggcagcccctcgcaattcacgaaactgatcgcccacacatggcctctcc

SEQ ID NO: 66856 - DNA, 744 bp, Zea Mays
ctcgggtgtgacagtatggcgccttgaggcgggctcagagggaaggagtggagaagagcgtaatgtcgcatcgattgcagcgaccatgctacggtacgagatgaagtcgaagctagagctggggtcctcgtacgcgaggaggacgtggatgggggtgagacgggagcagccaccacaaggtggggtagacctatatctctatctctgattctctctggtatccttagcatcgtggtattgcatctcgacgacaacggcctaaataaaaacatagaaaatattagagtttacagcattatagctgtcattgaagtcattctttatctacctgattggatacctgcgtgtgtgtaaccggcctcgcgcgagcctgctcccgcagatacggaggtttcacgtgtatcggcggatgcaggacaaaagcctcccgtaaagccgtgactgcacctgtacatgcaggtctggccacatgcatacaggcaaacaaactcgcgcagcggcctggtcaacacatgtcggcggccaggctacccatatacgcgtaaccaaacacacggtatgtaacttcatacatgagtgccgtctcaatctgatagcatacttttttgttcaaaatcagagatggaataaatctctactactacttaattgtgtagtgtaggagtgcacaggtgcttgttctgccggttccctctacccacccgccgccgctctgctccccgccatccacgcgacgcagagccg

SEQ ID NO: 66857 - DNA, 392 bp, Zea Mays
caaagcccctggtttgtacccacaggatatagcatatttcttcagttcttctttttcaatttctgataactcttgccctagtatatcttgaaaattgaagttttcctcttccaaagtatcttcaatttgctcttttcctttctcaattgttgtgtctaccacggccgcagcagcttcttcctcagccatctttagaagcatgttatcaatatcaccaagtgtggtttctagatcagaatcttcggcggtttcgtctttggcaccttcggcttcggcggcttcagatccgacagcgccagcgccttcagtaattggtatttttgacgccgatgccggcggcggtgtctgatgaataacatcggccacttggataattctccgttttttcagct

SEQ ID NO: 66858 - DNA, 531 bp, Zea Mays
gtcgatagggcgtggcggtgttggtagcgcatggtggtgatacaagggtggcgcgcgtcgatggggcgctacgacgaggggcaggggcgatggctggcttgactatagagtgggaccgtctaatttctttgggccatatgcagccttcgttggcttttattgtagatgatggaaattaactaactttcgtcggctgctgtcagaagttaaccttgtctacatgtgccaattagtgaccgataaaaattagttaattttgtgtcaccttgtcggttatcctaaaagccgacaaaaataaaatgtgtcgacgaaagtgtctatttttagtgtagggttagtgaacatagtagatgtcttggaattggtctgcacgttatattatggtgatcttctcttaggcatatcgaagagttcccgtccttgcaatcagcctatagtgagctatggttttcttggctcctcgtcctatcttcatcttattgatgtcttagacctcatgcaagtcttttaagatcttcaatagtgccctag

SEQ ID NO: 66859 - DNA, 453 bp, Zea Mays
accttagttacttcggcagtagtatccgatgaagcccagccatagtctacagttgaaagtggccatgatccttttgatttatgtcggaaccagtaacttgggttccctggagggtttgtagtagcctgtttgttaaagaagggtataaaaatccacgaagaaaaaagagaaaattttgaatctaatctattcttaattttaggataaaacgtagatgtggtaagagacatacttgtgctctctttatgtatcccatagccctctcaacggttggaccatattcattggtagtatctgctgataacaaggcctggattataaatgctaactcccagttgttagcgccattggttacctaacatgagaattgcacatcaaggttttattaatttccatagtgagctaaaaactcaatacaagtaatatagcatattccatgatgtggactaattc

SEQ ID NO: 66860 - DNA, 682 bp, Zea Mays
gggcccactgcctcgcgatgcgttccgctgcagccttgtcatccggttcttcttcattttttatgtacctgatgataggctctctccagtcattggggtccgactctggttggctcaaggtgttgcactcttccacctgatccgagaggatgctcggctgtgatatttcttggacgaagatcctaggtggagcctgggcccgactggatcctagctttgacaacgcgtctgctgctgcgttgcggtctctttccacgtgatggaactctaatccttcaaatttgtcctccaatttttgcacaactgcgcagtacttgcccatggagtcagtcaagcaatcccagtctttgtttatctggcttatgactactagcgaatcaccatataccattagtttcttgatgccgagtgatacgacgatgcttaacccgtggatcagtgcttcatactatgctgcattgatgctggaaatagtagctggagtgcatacatgacttgctcacctccagcggcaataaagagaatccctgcacctgctccttgcagcttcaacgagccatcaaagtacattctccacacctcggtaacctctaggctgtttgggacctggtgctcggtccagtctgatacgaagtcaaccagcgcctgagtctttattgtcgtgcgaggccgaaattatatg

SEQ ID NO: 66861 - DNA, 370 bp, Zea Mays
gactgaatgcagtaatccaatcagcacgataccagcaaactctaaggcgctatcacgacaaagctgtgcggcagcggttcttttcaataggagacctcgtcctccgttaaattctaacgggggagggacggcacaagttatcacccttatgggaagggcctttgatagtagcagaagtcactcggcccggatcatatcgcctcactcagatggatggcacaaaggttgggaattcctgaaacatagagcacctcagaaagttttacccctagctgtatttcaaaacagttggggcggcaatgtattctttaaagtggaaatatgtcatcaataaagagagatttcaaatatactcggctcgtttacgatt

SEQ ID NO: 66862 - DNA, 644 bp, Zea Mays
cttctccaactgcaacagcgtgttatctcccacacgagctccgtaactgaatcaacgaattcaccgcgaggttgtagatccaattccttgatccgtgctcggactctatccgttcttggggtataaaaacacttccgtcggccctaccttgcccccatcatccatggagtgcagaggacatcagagcgagagagagaagaaaatttgtcgctgcggggtgggagctgtgaaggaccgccgcgcacgctggccatctgcgacctcactgcggctgtattggcttgccggtgaatcaccaaagctcgtgtacctgggctctgcgtgggtggtcacgattgggtatccaggcagggtggctaccttgtcagactccatctttgccgacgtggttcgacctccaccgcgattagggcatagcgccaccggattcacggtacaaattactccctcttgaacttcctttgtactggatcgcgttgcactggttggcttgcgtcggagctagtggaattgctctctgtgaagcctggcgccgccgcgggccgcgccattccgtggctgggatcgtcgagaatttaatagcagaaattggttccacgttcgagttctactccgttccctcatcatgtggcaccaaatcaccc

SEQ ID NO: 66863 - DNA, 294 bp, Zea Mays
cggggccgtgcggtgtagtgtactaccatcctgcacacaggcactgttgttagcgccgtcggcacttgattcttcccccactaccgtcaaacgctcaatcacgacggctggagcggacggtcggctcggcacccctgttgtgcttgtgcatggatcaagcatcgtacggccgtactgcattacagatacacagccgtttcctcgtgtcctgcaacaggatgagagctagctgtgccacatctgacttcaccccgagcgatcgagatactacctgccatgcctgcctgccaagcc

SEQ ID NO: 66864 - DNA, 613 bp, Zea Mays
atccaggccttagggcccgctatttcgaccttggaagcatgagccacgatgtttcatagctgcctaagaaccatcttggagttgtgtccacccaggcatccatgcctatgagttgccaggtccgaagcagctgagcctctaggcgctactcctttgaaaggaacaaccggcgcaggtcatccaggtcaatcatgcaagtggtgtcatttggatgcttgcaagccaagattgtgagagggtagtttcccgaacgcatcgcattccgactattattttgcattatagaaactagtatcttgtcacttgaacagtgagtggtgttactgtagctagttctcaaatgatcacattgggaaaatacatgaaacaaaattgtgttaaatacgcatgtaggagataggagaaatgacccgatagcgttattagatgtctgtagctgacataaggtagcacaacataaagactacttactctatacacatagtaagtatatgtaaaagtgatacatcttagataccaaaatatcttataatttaaaatagagcaaacacaacataaatattatttgtctatatataactcatcatggcctgaacctagtgccaatgccacc

SEQ ID NO: 66865 - DNA, 634 bp, Zea Mays
tactacttcctttccggatggggacaccaacttgactgttctcttgtcacaactgacagtggcttggttcctgtgtagccaattcatccctaggatgacatctaacccttgagttcccattactactaggttagcggggaagtctatcccccttatttcaatccttagattcggacaaatcctatctgactgaacttttgccccaactgaattaactcttaaaggtgggatcattggttctatggggatgttatgtgcttctacccaagatgtagaaacaaaagaatgcatggcaacagtgtcaaataatacttttgcgggataggattcgactggaaacatacctactgccatgtcctgagcatcctggattgcttcgacctccaggtggttcaccttcccacagttgtaggcctgaccacagcctcctggtgcttgctgtggtgctccttgtcttgctggggtattgactgctggcgactgttgagctgctttctttggatagttcttcgcccagtgatttcgttctccacaatagaagcatgcacgacctcctacgtgtgctggagctgcttggctattctagttggttgctggggaaggaaggcgagctgcctagctattctgaagctgg

SEQ ID NO: 66866 - DNA, 975 bp, Zea Mays
tgctaaagcgactacagaggacagtcaaaaagcgactgttgtcctctagatgctaaagagactacagaggacagtcaagctgtcctctaaatgctaaaggactacggaggacagtcaaaagcaggctgtcctctagatgctcaagactcaagacttattccatcataggaaacagggttgatgtcgcgttctgtacccggggtcatcgtcccaaattgtgggtcggggtcaccatgggtcatcgttcgtgacagaggatgatcatgcaggttagggatgggtggcacgaattggggtaagccgacgtagatgatgatagggcgatgcgtatggtggtgaggacagggatcctcctgtggccagtaagcgctttggcttcctgcgtcggctctcctcttgtaggttgcagaggtcctaggatgggcggcgacgcttttgcctcgtgaggtctatggctcctatgtgcgtctagggcagaatatagagtttcattgctataatgggttggtattgggatggtgttaggttgtgttaagttagtattaggctaggccgctaggcatatcacatagggtccttgtgatgttggaacacgacactcgacccatggaatcaacccaagatcatcgacccattagactcgggttcacgtacctaactcatgattcatgtcccatagaggtataacccccttgtaccatatttttttcaagtgtcaatccacaaccccgttcctcaacccaatcgacttgggaacattgtgactatgcctgggattggcttctctacttctctcgcacgtagtccctcaagcaggtgcaacgccgccacatttccctccctcgtgctcgtgcgcgcagcctaccttttgctcctttcctccctcttgctgctgctccctcagaacgatctctgcatggcccctataggatcatccatggctgccgcagatgacctaggcggtgttggatttgg

SEQ ID NO: 66867 - DNA, 436 bp, Zea Mays
catggcatcaatctgactctgtttaatggatgactttccaaagatggtatgacttggccgccagggccggtcttcggcatcttcatccccactttccacatcaaagtcatcactatcatcagaatcttcagataaatcagctagtatttcatttgtaatcttctctgtgtttgttttttccatggcctcgtaaaagccagccaaggcaggatcagcaaccttcttttcgtcagccatttggtgggaaattgaacgaaatgccgaagctcacaaaacaagtgaaatctgacagcaagaaaattaaaactcaagaaaacatcacaagcaattgaaatggcacaatagatgttgtcgatgtgggtttctatttatatgcttagtgcattgcaacttggcaggccccatttgtcattgactttggatattctagcgaagg

SEQ ID NO: 66868 - DNA, 577 bp, Zea Mays
agtcagtacctgatatatactttaatacatttaaagaacaaggttcatattgcacgaataaagggttaggggtgagattggatgattaggtattgtggtagcagtgcaattggtctgtttgattttgtgacaaaataaagaagaaatacattctcttgatcatgaaatggcagtaaggatagaattttttcattggttgagtttgtgcctgaaggctgacagtggatctatttggcatatttgtgctgccatggtgcttttctatagtgttgtttgctgttttatataaaataagaaggcccttacaataaactaaaccaacctaggaggaactaggtacattgcaaaaagaggactttagctaatgggggtgcacgcccatatctcccaccaactgagctaggctcaaatcctgtttttgtaacatataagattgatttagtagagtgctgatgaggtctagcatctactacattgtaatggtatctgaatggaaccaaagcattttaaagcatgaatccatatagttactttagatgatatagttgacttaataacttataatctgtagctatgg

SEQ ID NO: 66869 - DNA, 522 bp, Zea Mays
gatggccctagcgccgcctgccagcggagtggacaggacacattaaatgctgagggggcacatcacctgtcagcaaggtgggcaagcgacacgtcctctccacaataattgaagagaccgtgcggctttagaggccttacgtcaggctccgcccgctggctcatatcacggaccacaagccacgcagcagcagcgggtctccgcccgagtggggagcgcaagcgcataggataaggcctggacacgttacttgcggaatcgacgaggaagcatccatggtaaggtgtcaggatggctgcgtcgaacaaagcaatgccaggtaactaattacagagcacatatatatccttccttattcctcctctatcaatcatcagcattgggatcaatttctgttttcctgtgtaatttgtcagtgttaagcagcaacaaactcaggcgctagagaatgcccgctctcttgttctgctgctcgccactctcgcagcggccatccacctaccaagcagggctgaacccgcc

SEQ ID NO: 66870 - DNA, 662 bp, Zea Mays
ttaactcctatatatatataatatatcttgtattatcgactatcaagtgtaatctagctatcttgtgtgtcaccgttagttttatctccatttactttgattattacactcatgcatactttaagttgataaacaattagctaactgtgaataaattttttcaaattagtaaaagtaattgtttgtttctttactccttacttgcctcccaaacaactttaccttactacaaaacatagggtccatactagtttcctctccatgcacctatctttcattgtgttcaccctcatataatcactagtgtgtacacttaccaaagtttacattacaattcaagtttgaatttggttagtccttctatatcatgttgcttccctgtgcaaaatatgatacctataatactccagtgaagggctacaatcgatctccatgtgcttgtggagtaaagtccaattagcataagaaccaccaacactagtgaactcgctcggttaaattacactgcatcgggggagggaatagtggaacgagtggttggagtaaatgcacttaatgtccgatgtcaggttacagatacaaaggtggagctcatgctatgcagcagtgtgtttgctaaggaacaacacaggcgagagagaggtcaaggatgacaagtaggc

SEQ ID NO: 66871 - DNA, 590 bp, Zea Mays
ccagatttggcaagaacacaactctttcggcggcaaaaccccagtttccataagatgcaagagatcagactcagaaatgatagacatgtggttaccggcaaatggaagctggctattgggaccaatgggcagaatgattggagcagcagcactctatctcttcctcttgggggccatcgcaatctctcgggcggagtgggcaggctcgagaactcagaaaacagagaagcggcggaggagaaaagtaagatttagggttcggaactcaagaagacatgtcggtataattataagttagctccataagtcgggcgcaaagagtgctagatcataactcggaaaagcaaggatcacaatcatcactcgggcattacctctaaaatgccggcaagacttcaagcacacgaacaaaaagcatgcaacagtggttaagtgaaaaaactgcattctttataggggagttcatcacaaacttgaagccgactcattatgagtcggcctcttccacccctggtcattacattacattacattacattacactactctactacttacactacgttatactaatactactctaattcaca

SEQ ID NO: 66872 - DNA, 397 bp, Zea Mays
acgacggcgagagctgaccacgggtggcgcagaaatgctcctagcggcgatatagggtatgattgagtgactatggtggaacgcgagggtaagggaaggagagggacgtgactagcattcccttataacgactgagacaaggtggagggggtcggccggctactccaaggagagccgtcgcgcaatccgcgcggttcattgcaacggtgagctgcaagatgacaggtggggtcctcccgtcaccgacagtccagcagagacgcgtgcgcgggagacttatgaaccgggccccctgtcgacgtgtagagctgggttgggctggcggtgcaggctaatgggtcgggaaggttttggcccaaacaccatctgcgcttttctttttctttttttccttttc

SEQ ID NO: 66873 - DNA, 670 bp, Zea Mays
ctaccataaaaagtgtacaatgtgagaacggtcatgagtttgacaatgccacctcccgcctcttctttctcacgcacggtgtttcccttcgcatgtcgtgtccctccacctcatagcaaaatgggaaagccaagcgtgtcctgcgcactgtcaacaacatcatctgttctctcctcttttagtcccacctcccaccttactgggtggaggcccttcacactgcctcctgcttttcaaccgtcatcccaccaaaaccttatagtttctcactccctttcatgccctccataggtgacctccctcctactttcacctccgtgtgttatcctaacttgtccaccactgcccccacaaactcgctcccattccattctctatgtctttcttggctactcatccgacaacaaaggttacaaatgtcttgacctctccaatagtcgtgtcatcatctctcgcgatgtaacctttgatgagtcctcctttcccttcgttgaggtcccaccaaacacgtctccctctaccctcgatttcaagatcttgtgcaagtgattcacccaaggcaccctaccagacttgccccgcgtgcccctggctctcatgggctatcccccaagttgggcttcctgtcaaactggcccattcccttgggctgcatccatttgtgcctcgc

SEQ ID NO: 66874 - DNA, 504 bp, Zea Mays
ccatgttgtttgaaatgtttagttattctatttttcaccatgtatcttcctctaacatgccttaatttgcaaatttagcataactatggattgaaaaatatatgtatgtaaaaaatactaagcatatttgtgaagctaaacatgatgttacttaagaaaatatgttgttaacataataagattaatattgaaatggaaacatatgtaaattagaatcatccgacaaagctaagagatgtccatgctttgagaaccttctttagatcacgaccgcagaagtagctctccaagactcaacgaaggatgccgcaattccccaaatacatggcatgcatcctcatggttgacgtcgccaccataaacacggacaactcaattccccactccatcaatttagaagcgagcaagcaagcaaccgatcgctcaccccatatgcaccaatctggctcccaagcttcgttcgcatcagtaccaccagcactccacctgcagctaccaattgag

SEQ ID NO: 66875 - DNA, 873 bp, Zea Mays
atacaagaggactacatttacttctggtctctacacactaaggtgtacacatccaaaaaaagtgagaaagaaaaaaaaagaggttttgagccaaccactaactatgggggatagatatccccttggtccccacgacttggattaagtccatggaccgttgaagggcttgagtggactggtcgggtagaccgcatggcccaaccgactaactcaaactagaagacaacatgaagattgaagcctaaaggatgagaggttttgttgtcgagaacatcggcgtgaagacttgcgtacgaataggaacaacctcagtgcatgcaggagtagagataagcacaagacatcagtgtaaccctaataatcctatcgcgtatataaggcaggatagggaccccttcactcgattcgacccgtgagtagtctgccagcgcatagttattcttcttaagcattctgtaactcaaactcagagctatccatctcgtagcacacaggacgtagggtattatgtattccaacgtcccgaaccagtatatttcttgtgttctctcgtgttcagcacgaaccatcgagctaccatcgatcttaccaaccacaaaagcgttatgtggcacatctcacatagaggttgcttatcatacgatatgatgcatgtatacaccaccgaatatttagtcatgacatacttctataccgctatataatccacttaaactttgcaaaacccaaccatccaaatcatccccacggccataatctccaaattgcacctagacttaacacactatcagaaccaatttataccactatataatccaccggtttaaactttataaaatctacctaaccaaatcaccccatgcccacaacctc

SEQ ID NO: 66876 - DNA, 671 bp, Zea Mays
gtttttttaggagcttttctgaaaagctggctatgtggagaagctggctgataagaatctgagtgtttggttcggctgctgtaggaagaagctggtggttagaatttgagtgtttggatagccatattctgggattgtagattctgagagaaaaaatggaaaaaacgcaaacaaacttaataatcataaggtacttacataaccacatgatttgtgtagcacaagttatttatttacacacacggataagtacctatgacactaacgcattagcgatagaatccctaaaagcactcatgtctaactaatctgacgggtgctgctactctcactgacaactacgtcatcaacatgcctactgctaggtactcgtcaaagtcacgatcgtgtagctcactgtcccgaatgaagttatgcaacgctatgcatgctataactatcttcgattgcttcttcaacgaaaatgaaggcaagctaagtaggattctccacttcatcttcagcaccccaaacgatcgctctataacattcctctgcgtcgagtgcgcatagttgaatacctctttcgcactaactagttgcctcccatgctgccattcagaaatgtggtacttttgacctttgtaaggtaataggtaccccttcctgttagggtacccagagtcaacaag

SEQ ID NO: 66877 - DNA, 465 bp, Zea Mays
gtttacggtacaaaatgtttgaacggctgtggagatagtaaaagaggatttttcctttattattgaagataacgaaacatattttacacgtattttgattttaggactgggtttgagagatttaaatggatcaaattaaaatgctatacgcactaagcatacgattttccacaattacgaatagagaactaaatcatttagcaattattcgggtttggctctgagtaccccggtctcgcttattttgtatctaaaatcttagtcatcgaattctaataaatttatttgggacaaaatcgcagtacttagttgatttttaaacaggcaccaaactcaataattctcgagataactaaactccaacttcgtgaaacattttgaacagttcagatagacagagatgagtgcggtaacgaaatcctgatatgaaaaaaataatcaggatatagagactgttattctcaa

SEQ ID NO: 66878 - DNA, 537 bp, Zea Mays
ttgatgtgagtgcttgatttcaatcgactgtgcagccggtgggatcctctgccgtaacatacatggacattgcgacaatgggcaattggtgtgtgggactatggtgtgttggagcgaaggccatccgcccccttattcgatctgctttaaatataaattgactaggttccatcagtcacaggaggcgaagggtagttcaacccgtaccaaagggaaagcctcggttggagagctaatgaaggcttggaggcgaagggatctaacgttcaaagcgggggctctttaagacttcgctcaccacaactctgagtacaaatattggcaagattcgaagacccgacgccccctgagcgaagacagccgcgccctgcccgctcgagctgtggaatgggcccacacagcgtcttgctggcccactcgggcccatttgtaagcacatcctggggtaaggtttatggtgcatttaattaggctgtacttaacttcgctgtaatgacttttgcccctcaagggaggaatattctggggaagacacat

SEQ ID NO: 66879 - DNA, 849 bp, Zea Mays
ctaccattcaaccgcattatctcacacatacaggactggtgtgtgagaaaaatccggttgctaacgttggccgagtagtcgttgtaagctttctctaccttctgcacaatatcagcaataccctttggtgaagttttttgatatgcagactgaagtgaagagaagaaaccaaggtccaaaatatttaggtcaggagagtttggtggttgacacatcaaccttatgtcaaacccatctacagatgctgcctcaccaaaaaaaggatcatcaacaacaacatgtgtcttggcattgtcgtgttgtatgaatacaggggtaccacgttcctgtggtggccacttctcctttattgcgggcaataccttgttcacaagataatcacggctaacttctttggttaccattgtacctgtcggcctattgacactactccttttagctggctccactgtaacgaatgcccaagtaccaatctttcctgaaaatatacaattcccatcactatcaaacctaggcctagcgactgccgtaaaaaacatcaccttctctataaagttcttgctctgggttgttctctcgggtacagtctcatctacagccaagtagtacttctgagttttcttagtgcgataaaaccatttctcatcagtgtgcacaatgttgtacattccattaaaacttgtttcatgtggcacactagatggttcgagcattgagagacaaaaccttactctagcctttttgttttcttcattcaatgtaggcttgattgcatttgagtgacgtctaaactccccctctttgaatctcctatgaagtgttgatagtgacataccgagtgcattggat

SEQ ID NO: 66880 - DNA, 509 bp, Zea Mays
atcccaagataccctcttggaaggacttgagtggcatcaaaaccctagagtactaaaaaccccgaaaagatccctggaaaaccctaaactgaaatcctaggaggttaagtgcaaactttgtacacttttgggctaaagtgcaaaaacaaaggtaatataacaccacaaactatgtgcttctcacatttaaggatttgcaagttaaaaagtgggatttggacctaattgcaaaaagtaccttttgaaccccatatgctcaagtcagaattcagtgcaattggagcaactttggagctttatatcttctaatccatgaagattctgttctggcttaatacatcaagattatagagctattataggagtacaactttgcttaagtgaataagccttggtgttgtacaaaattaggagctaaataggtttgaagtctggctgtcagaccaccctgaaacttaatcgggactgacagtgagttctggcgaactttggacttgattctagctcaa

SEQ ID NO: 66881 - DNA, 387 bp, Zea Mays
gaagcatgagatttgtgagatagaaagatcaagagcgcaaaagaacaccgatgagcttcgtgcttccaaagaaaggtgttatgaaatatccttggaatgcgccaggaattaaaggatagctttgctagggttggggcatattcctctaagcagagattcatccgcggcaaccaggatggagttgtccagtggatatgcgtggaagccgaagcttttgacaaaattctaagtgagcggggagatttatgtgcctttgctggtgtgcggggggccatgtccatcttggagaaggctggttgcgaacatgccaaggctgtagttcagccagaatttgttttctcaaccgacgacattaaaaacccttcagccgaagcttctgcattaggc

SEQ ID NO: 66882 - DNA, 884 bp, Zea Mays
cgcccctttcggatcgggtctttcgtttctcgctttcttgcaagaatgttggtttcacagtttatcggcttcgttcttactcctgctccgtgttcaaagcgtatctgcacctatggaattctggcggtccaaactggatcattgaatggctgtgttattcagaggaagaatccaagtcttggaaattggtttctcatcgccgttcttcaccggtctcgttcgctgatatcgttcgtaagccagctctgtcaggtgcaaacttggttcctttgggtcggccggaaaggcccagacgttcttccttaagaataaagcagcgacattcggtttcgatcggatttccttcccactttgccccgccattgatcaaggatatgctgtgcgttcgcaatttcaaaaatattcaaattacagcatcggccgcgttgctagctccggatttcagccatcattgaggacctctcgcgttctcccttgggccccgcggaagttgatttggcggcccaagaagattttggaacagtgcccggggaattttgggcaggattttatccccagacttaatggctctgcagacccagtgacgacatgccaccgtcatatttgggacctttctctctcaggaaaaaaatcacaaatatttggtctttcggggcagaagtgcaaacgaccttttggctctttccccaataagttcgagaaagcctcatgggtgtagcccccgcgtttatggttcaggccccctctgctgtcgcttacaggtgggcctccttctccgcccttctttaacaattttggtgagttcactcaggcgtttctatcgagtagcaactcttcgcctttcacggaacttgcactgttcacaaaaccccattccgctccgc

SEQ ID NO: 66883 - DNA, 305 bp, Zea Mays
cgagccctgaaattctgaattactaagagaagatcctaggcgtctgaacgcagaaattctagcctgatccggatgcccaacaccgcaagagatctcctttttgttgagaatcgggaccgcattagcaccagagagagggagcttaacaatatctgcgtaatatatactcttcttgccccgaatagtcaaccaggaagcattctcttcaccaataaatttcttgtactcatgaatccaattagggccaccatgattccaaagattgaaaaaggctctgaattccacacgatcaatacactttgaat

SEQ ID NO: 66884 - DNA, 1068 bp, Zea Mays
aaacaaagagataaaacgaccactaccaaacttgacaacgacatcacgcctcatccttatctctgtccttcagcgatgtagactccataaatggtccttgcccacacgttagtttcgtttacactccacgttcatgtgggacggatctttctttgtagaagacgagcgaggacggcgggaggagggttgtcagttgtgtggcttaagaaagcgccgtccgaatttcctatatatgaaaggagctccaaaacacggcttcctagcctagccacgtcggcataattttttcaagccgctggattgtgcatcaatggcttacgttcgcatcactgtctctgcctctcgatagttcctctcgttctctccaccttgtcgctcgtcgcgttttcgctgttggatcgcacatcagcggtctcacatcctgcgtcccgaagattctagaaatttcacgccctgcctccgtgactctccaccgacgctctcgttgtgctccgtctctcttgcgtgtgctccgcctctcttccatgtatgcttccctcgccttgtggcctcgctgctcgccgcggccccgcctccatccttgcctccatcaccttcgcctctcgcctcctcctcgctcgacggctgcggccttgttgctcgacgtaagcctgcacctcggcccgacctccatcccggactccctctccttcgcttcttgtctcctcctcgacacccgggaagacgaacgaccgtcgtggccccacacctcggcctcgccttcatcccaaactcccttcgcccctcgcctcctcctcgacgcctagaaagacgaacggtctccagatgtctgtatttgtgcttctccacgcgagccttccagacgagcaatccgaaaagaaaaaaggaagtcgcgtcctcgttctcgcgggtaccgtgcgcatctcgcttgcgctccatccggggctcccgacggcgtcgacacgtccgacgatccaagccatccatcacatcggaggtggtcatacatgtcccgcgcctatggtcgttgaccactcaaggatcgagctcccccgcctggaccttaga

SEQ ID NO: 66885 - DNA, 567 bp, Zea Mays
agtaaccgtataccatcagtttcttgatgcctagtgacacaacgatgttgagtccacgtattaaggccacatactctgctgcattgttggaggctaggaacaggagctgaaacgcatacttgagttggtctcctccaggggcaacgaaaaggattcatgcccctaccccctacagtttcagtgccccgtcgaaatacatcttctagacttcggctgactcgaggttctcaggaacctcatgctcaatccattttgatataaaatctactagggcctgggtcttgattgtggtgcgaggtcggaactctatgtcgtgagctccaagctcacatgcccacttgactgtccttccgactgcttctttgttgtggagtatatctcctattagtaaacctatgactactatgactttgtgattatcgaagtagtgatgcagtttgcgagtagtgaggagtaccgcgtatagtagcttctggacttgagggtatcttattttagagggtccgaggacttcactgatgaagtagacatgatgttgcaccggctatgcatgcccttcttctgccc

SEQ ID NO: 66886 - DNA, 523 bp, Zea Mays
agaaaacacataccttcggtcggtcttgagctaggtgtcgtgcattgatcccagcatggtggtcagtcaatttaagaggggaactagcggaccgagaatatgctttgcttctaggtctgggagtgacaaggttggtgagtggagtggattgaaaccattagagaaaccttcattcactcccaagcttgacaaaatcacctcacctgagcctatcacccgtgcgagagatggtgtgacttaggagcctgtgagagcccctcctcagaaacaagtgtggattccaaaacctaaccgccttgggaacacacttgttacccttcccgacatctctagcgatccccttcctggaagccctcagccacatccacctaaaaagcccaaaactcacaaacagataccacccaagagagaggtgagattccattgtgactattgtgagagggatgggcatctggctgttttttttctttaggaggaagagaaatgagcgtcgggtttctgagccgagcataaaagacatgaa

SEQ ID NO: 66887 - DNA, 420 bp, Zea Mays
agggaagtgtcaaggacaaagcaaacacatcagtggtgccttgaaaagattacatgcgacgaccgtgtaaaattttctgtatatcttaagtcgcaggatctaattcttccttagtagtttcacataggtaatggtgtttgctattgctcaaccttcttaattcaaaagctattttgaaaaccaaaattctttggacactctatgtttgtggttgttgttaggattgagaaacggagagtgttcctattgaaaagcagttgaacttgacttcagctgattttagcttttcttgagctgggttgaacttgacttcagctgagttgaacttttctacagctgaggttgaacttgactttagctgaattgaacttaacttcaaccgagaaactctctggccaaaaccagttgaacctgcctctg

SEQ ID NO: 66888 - DNA, 391 bp, Zea Mays
tgatgacgagaaaaagtaggaactatttctggagggattaatcgggccactccaataccaactaatgtctcaatcattcttgtccttctgtcggacaaggctatagctctagagcacaagcgagttgaactaggagagatgaaaagaaaggctactaaccagggacatgctagaagtagtacgcgtccccgttatgctacaccccaaggcacaccggcttgtagcagtcccagacaatagactcaacaagtccaatctgctactccccaagcaagcaccccgatcggacctgtttctcctaatgcatcaacaaacaggtcatgcttcaaatgtggtcaggctagacattatgccaactactgtcccaacagggctgcttacaccacaccag

SEQ ID NO: 66889 - DNA, 374 bp, Zea Mays
tatctcgataccattgcaggaggggatggatcaccatgggagaaagtggggacgccgcgagcaggattcgttgagcacgacatcgtgatttccggtaacaacccctcccatagattctctttgagcctagctttgttttgatgtgtttcgcttagagcaccgggcaccgtatcggcaacggaccaatcaccggtgaagctctgtcgtatgggggcggcgacgccgctgctctggtcgtggcgggcaagggggaagtgccttaaacgtggattaaaggatgaacggttgagattaggcctgtgcataccattttgtggggtgatctgagctactgatcgatgacggacgaatgagatctaatcggggagtctgtt

SEQ ID NO: 66890 - DNA, 405 bp, Zea Mays
tccttgccagtagccttcgtctcataggacaactcgtgcatgttgcagaagcattttgcactcggctctagtccttggctccgcacggcccaaataaaaatccccatcctgattatggcttcaggggtaatcttatgaagaaaattttcaaaggtctttagcacttcaactagaaatttactcaatagaaaccaaagccctgccttcatgaagctcctgtaaataacaacttcatctccttcgggcatagggacggcgatgtcccctttcaactctcacaatgaacatatcacggaaatatctccctttcatagcatcaatctgactctgtttgatggatgactttccgaagatggtatgactcactgccagggccgatcttcggcatcatcgttcccactttcc

SEQ ID NO: 66891 - DNA, 2456 bp, Zea Mays
ccactctctattacttagattcagaccttcataggatgttttagagtgtttattgtcttagccttttccctatggattattttgtgtacggattattttgtgtacgcttgtttcttgccttcgtaaggagtgtcttgtatctggggttcttttccctttcccttctactataatataaggtgcagttctccagcgttttcgagaaaaagagtgtacttcctgcatagacacttgaaaaaacagaaccataaacaatagagtaactatagatgtcataagcttcctaaatccttttttctggaatatgcatgagagctgcgcatctttgtattgatagaagaataagaaagggggagagaaccccattacagcacacacaccccaacactagagactaactaaggatcactgactaacatggagaaaacacgacccacaacattgttttaagccagcaactcatcgacttggaggaaagatggggccttggctccaatcaaggaccagagcaccgcctcttccctagccaccctaagggttgtgaccaagctaggattacatccatcaaagacacatctattcatatgcttccatatggtccaagcacctaggattactaaagaattgaaaccctttctcataagatcagatgcccgagagctgctagacttccaccacgactcaaaggaatcctcgtgagctggacacagctcctgcagccccactgaactaaggaaatcaaaccagaactgcttggcaaaaacacatttgaccagcaaatgatttatggtttcatcctcttggtcgcacaaggggcactactctggtcggtctagtcctctttttctgagcctgtcagcagtcgagcacctattatgttccacaagccagataaagaacttgcacttcctaggagcccaagatttccacacacgctctgctggttcgaattgaactgaaccaaggaagagagctttataagcagaactagttgtataatcgcctgaagcactgaatttccatatatgtcgatcccttattgcaggctgaagcacaactgcatcaagcacttcacaaagttccaggaattcaacaatgactctgactgaaattgccccattcacatcgaagatccaatggaaattagggagagcatctttgaccaaccgattgttggcaagacgcaagggcaccatatcaaacattgcaggagttatgtccttaatacatctcccatccaaccatctgtccttccaaaaaagggtattagctccatcaccgagcttagtaataacggttgcagcaatcagattttgtaccaccttacaaacatgagtggggaagtccgcccaaggcctactgggatctgttttctgcagccatggccaacaagctctcagagcccaacagaggctctttaactcattaatcccaagaccacccagctccttgggacgggtaaccttaggccaagccaagaggcaatgaccaccacagaactctttcctgcccctctagaggaagcccttcctcagtttatcgattgctttgatggcccatacaggaaggtcaagtgctaaagctgcataaatcatctttgccgtcatgacgaactgcacatgaatagctctaccagccctggtcataagctcagctttccattctggcagaaggctggccactctatcaacaatggcctgaacctggtcccttgagagtttcttaggagacaaaggcaaatcgaggtacttacaaggaaaatctgaaatattacatggcagctgtaaacaattcaccttttcttccccacaatagattgggaacacactactcttttggatattagtccttagacctgaagctgagccaaatagatgaagaatatccataaccacactgatgtccggggcagtaggacttagaaataacactgtgtcatctgcgtacagcgagatacggtgctgcatattccttgtagagagaggttgaagaaacccttcctcagaggctcgctgcacgagcagattcaagacatccattacaagaataaacaacatagatgatagaggatcaccctgcctcagcccgcgttaatgcccaatacattccccgggcagaccattcagtaaaatcttggtagaagaggtagctaatagcccacttattatatcacacaagatctgtccaaaaccaagtttttttcaagacctcgataaggaaggcccatgataccgagtcaaaagcctttgaaatgtctagcttgagaaggatacgagcctgcttctgacaatgtaagaatctggtcgtctgctggactagcataaagttgtcaagaataaattgtttcttaataaaagcagtttgattgggggaaaccatattttgcagccggcctgctaacctgttagccaacaatttattcaccaacttcacgaaactatgaaccagactgattg

SEQ ID NO: 66892 - DNA, 692 bp, Zea Mays
agtctaactattaacattgatcaacaatactaaatacaaacattttgaggacatgtgtatttcatgtagaatctgataaattcctttgaaattgcaagtgttgttgacatatttttcttcaagttttatcaaaattaaagagctaggcttgatttttgattgagttcttggcacaaagttaattgaaatatgctttggcacaaagtctaaaatatattcagactcggctagctttgaacctgggggactctatccagttgagcgtgcgaacgtcgggctgcctccccggtcgaggagggagggacttgttgtggttctccatggtaaaccactcaatgtgccatcctttaatgttgtccttcaggggatatcaagatactctgttttcctgccccgcgaagctccaggctgcaccatcaacaagttgatgttatcctctggtcatcccaggccgacagtggtagaggtatttccaaagcccgaaatgaggaagaattctaaggaaagcttcgcagaggtgcacaaaaatggcaatttgaataatagaactggggtttaagtgtgtaagattcagatcgtaaaaatcgagcaggccgcggaaaaagggagaagctggcagagccagacctcggagtgagaaaaggcacgaagacgacagcttcatggatgtcctctgtcggaatggtaacctg

SEQ ID NO: 66893 - DNA, 477 bp, Zea Mays
aaggtgccccagcctgaataggcaaatggactatgtatgtaccacgggttcatcgccgtaccattccacatttgaataggataatataccaacgatgagtaggcgggtggaaagtatcatggcatcaatggatgaataggcgatgcttgttgcatcgcctttcgggctgctttattcattcgttttgttttagcatgtgatggtggtttctttgttggtcgatcacgtagaacgaccttcttgctaatgtatttggagagcaatcgatcaaaagtagggtcggatttgaccagccgaccatgtacgttatatgtgctttgctcttacgtctcctttttcgctttgtgtggaggctgacgcctctggccatgggcagactgtccggctgagtaagctagaccgtctgcatgagcaccggaccatccacgcgcatgtgttggatagtccgtgatgctcaagtcagggagtcgtgctcag

SEQ ID NO: 66894 - DNA, 590 bp, Zea Mays
gcattttaaacgatcggttttaattcgaaacgaacaaccagaatctataaaaccgagagagcaattaattccccattgcttcggtggagacaaatcaggtggccaaccaatcaatctcgtggtggtggagagaagtaggaaaagaagaaagtcccattggtcattttggttttagttggtgatgatgatgcatcatcggtcataactttccaatatatgcgacacggcacatcatatcaccgtaaccatcaagaatgccaacgtacgtcagatgaaacgaagccaagcgctcttgcgaattcatggtcctcactagctagctggccgggtgcggttcacacaacaaaatgcaacaaaatatgatcctctctcgcggccaatcatctatctattggcgagctctctttttaagttttacaattttacgagggtgacgggagaaaccataccgaaacccgtgtttaaaaactatgaattttcaccgttattttgtcgggtcacaatgcaaatctgatactactgattaaccatagagacgggaaatggtgtacgaaaaataatgaagtagttgcgccacttccacatttttg

SEQ ID NO: 66895 - DNA, 712 bp, Zea Mays
tgtgctagcactgcgcgcgtagcagagggtctcacgaataggtatgaggaagacgatggctagggtttgcatgtgtggtggagagctctaaccctagccccttcccatatatttatagagcgtgttaatgggctgcatcccattaaacctcttatcccaattgggccttaatctgaattgtgtatgattgccacttgagcatatcactaataatctcccacttgcactagatacaatcatataggcaagttccaatgttccaacctcttaagtgtgtgactcgttaggttcatgttcagatggcagtgaatggaacctttccaaaccacaagtcagtagaagtacctagcaggacatactaactcccgaatgtacattaaaaatcatatcgattgaaccttgatacattcacgtaccaatccctttctcgcacgatatctatcaagctcaaggcaaggtacgtgccatccttgttatagcttaaccattcactcgatcaaatagtggattcaattcatgaataacatttagtcattatgattaactctttaatcatattggcatggccatgaactttccaatccaaccatctcgagggccccagagatatctctcctgttatctaagaggggcaaatctcattttgatccgcacatattgcattccatgcttcatggtacacccgaagactccttttatgactacccaatta

SEQ ID NO: 66896 - DNA, 648 bp, Zea Mays
gggtgggaaggtcgggagaaggacggatggaggtcgacagcgctgctgcagcgaaggctgccacacgataaacaacgcagttaaaaatggtaagccatacgcacgccgcggcacggtaacttgcattgttttatttaatctaaacaataattaggatgcttagtattttatattgagagatataccactactggctgatagcttgagctagcggacaggaggcttatatgagaggtgactggacgcgtaaggggcctcaggggcttacccgccaggggcgaagcctggatccaaagttaggggggccaaattagattaggggggctggtagaagcattttttacactatttgcatgagaattagcttaaaaaactaacatctcctatagaattatgtgagcattaggagggacattgccccctgtgcccccctgccgtcacccctgttacccgctaggtatagatggtcaaacgggccgtgctaaatgagccgacactaagcacgacatgacccatagtacttcggcatggtacgtgcacgattcatatagtgccagtgcgggcatgacacgagtctagtgctgtgcttgggccgccatcccgacacgatgagctggcacgagcacgacacgattaactggtcggcgg

SEQ ID NO: 66897 - DNA, 428 bp, Zea Mays
tttgggtcggaccgtccgttacttttggtgttcaacagacggttcaagatgctctgagtctgaggcgttcttcaagcatcaccccctcctgcctactactattttagcctatataaatatatgggatgatgtgatgtggttatcactatacccaccatcacaaaaatcctactgaggttaaccaaataccaccatcatacatccattcccctaccttgcgacccccttattataccctcctctcgaaacatgacacaacacaatgatgatggtggtggtggtgtgtgtaggaagatgactctcaatgatacagctcgataaaaaaagaaaacatataaaaaattaaactaatttgcaaacggataactactctactctactataggcgtcagcatcgagctttataaggctgcctctagcggtcttac

SEQ ID NO: 66898 - DNA, 957 bp, Zea Mays
tggcaaagttgaagatgaactataggtctataactttagtatagagacttaaatcagtcaccacagtaaatttggaggaaattcgagttcaacattggctatcaggttcatctgactgaaactcgcgatggtacagtagcctggattggatcaggctgccagcgcggaactctcaccgtcgacgatacctccgccgtgattcgtgtcgctggtgtttgggttcgtgcgggtggcaagtagataacgtcgcggggtgaaagtgcatcaccgtcggtgagctggactccactccggctagccgccgtgcccctcccctgcacactgatctttcggatagggttctcaccggcgtcgtgctgtcaccatcgtcgtgcaccacgtgtcttagcacgagacaccttcgtggtgactcgttagctgcatgtccgacgatcaccggaatcactgccacggtgagagctactttttcccccgcaccgagctcactggccgctaacacccctcggccgaattcgccaccgaccctcgatgcgcctataaattgcggatgccgcgggctccgtagggtagtaagctaaccagccacctcgaatcagcctcaatcattcactgagagccgcgaattcggagttctccccaaatcattttccgccgccgtgaaacccaccccaccgtggccagaccactctggcaaagttccgcgcctctcaagtattgttctagcatctatgtaggcacgtaaagctcaccgtagcaaccgtttgcccaatccgggcctgcgtaattgggaacatgggatcaacgccgcggttcccaccgtgaacggggacaggccgttctcatggcgttcttgtccaattgatgcatgttccttggtcgccttaagtaggttatgctcccgctgtcgctcgactgagcattcgccgtcggccggggccagtccgtgcggcgtcggtg

SEQ ID NO: 66899 - DNA, 515 bp, Zea Mays
ggtcaggtcatcttgcacactgaggtcctctagtggtagctgctcctcaggtaccctgaggcacttctttagctgagacacatgaaatacatcatgtacatctgacagatgatcgggtaacttcagttgatatgcaacttctcccactcgctttaagatcaagaaaggtccaatgaagcgaggggacaactttcctttaactttaaatctcctcataccccggagtggtgacaccttcaaatagacatgatcaccctccttaaactccagtagtctccttctattatcagcatagctcttttgcctggattgtgccattctcaaattttctcttatcattcgaacttgttcttccgcctcttgaataagctcaggcccaaagaactgtatttctccagtctgatcccaatatagaggggtcctgcattttctgccatatagagcctcgaatggtgacatcttcaaattggcctggtagctattattataagaaaactcagcatagggtaagctct

SEQ ID NO: 66900 - DNA, 1138 bp, Zea Mays
aaatgtaccgaagccgccaggggctttgggggaaggtttcatataaaacatgtccaaagcattcacaacccagcacaaggcaaagaaaaaatggttcagtctcagggtcaatcaggccaacaacaaacaagctcccagcagtagccttctcacagtatgtttcgtccatcggctccaagagggggagagggaggctaaagctttggcgacaggttcaatgcacctccaaggaagtcgttctgcttattttgtggtgaagataagggccacataacaagaacttgccaccacgccattaacaagcagaaagagattgcttcgccagcatctcaaccctcttagtcgaaggaggtgttcagtacatcttcatacttctcaccatacattccacggtacgtccatcctcaatcacaagagcctaggctgcttcaacctttagccttaaacgcttcgagtaaccctgtgatgatcgtgtggtagccgtctactatcttcatcccaagaccacccccttatgattaggtccctgttgatcatcccaaattcccaatgcaagacatgcaacaaagggatagaagggaagtctccgaagcttgtactatcaatagcacggtcctagagaccaagcgcatatactcaaaaaccctaaggggctgggtaggcaaacccgaagcggacaaagaaatactattgtgcatttacatttatttatgcaatctctttatttcccacaaatcaatgtaataataagttggcaccttcgagtgcaccgacaaagtgttgcaatcgaagctttgtgtgcaaaaagctctgaagtcgttcctaagggaatatagagttggattctgtcacctaagtaacggtgaaaaagcttcaaagtcatttctaagggaatgcagagctcgactctgtcacctaagtaacaatgaaaaaagcttcaaagtcgttcctaagggaatgcgagctcgattttgtcacctaagtaacggtgaaaaagctctaaagtcgtttctaagagaatgtagagctcgattttgtcacctaagtaacgatgaaaaagctctgaagttgttcctaagagaatgcaaagctcctatgcaatcacctaaacaatagcggaaaaagccgaagtcgttct

SEQ ID NO: 66901 - DNA, 478 bp, Zea Mays
ctcaggtgcttcttagcatctctctatgactctgtagtctgttcactcaatctataccttcttttgaactcatggtgggtggtgtgtctcacttgcctagtactacctctaactctattccaaccttgtcttcatagaccacttcatctaaacaatgttcttgtctcatcatctctacaaccattgtgtagctgccacattgagcatcacatctcattgtatgttgacgatgttgtcttattcgtttagccaacactagaggacttatcaatgaccatgtccatcttatagttgtttggagatgcatcagggctacaaacaaatgtgtacaacaactctatggtcccaatacgacactagggtgaggagctctcaatgattgccatgacccttctctatgagatcaaggaatttccatgcaaatattttggttttttgttgtcgataaggaagtggatgatggcagaatcacaaacca

SEQ ID NO: 66902 - DNA, 401 bp, Zea Mays
gttgagtttggttgctggattagatttgtttgggttcagtttaattctgtccatccgcttccatcctacaaaaccgaccctatctacaaaacaaatcctatctctaaaaccgaccctatccacaaaacagatcctatctctaaaaccgaccctatccacaaaacagatcctatctctaaaaccgaccatatccacaaaacaaatcctatctctaaaaccgaccatatccacaaaatagatcatatctctacaaccgaccttatccacaaaatagatcatatctctaaaaccgaccctatccacaaaaccgaactcccacccttccaacacctcgccagaaatcctgattcggagtccaaacttaaaacagccgtaactttcgcctcagaactcgaatcggg

SEQ ID NO: 66903 - DNA, 454 bp, Zea Mays
cggccacacttcctcaaaaatccatgaacctagatgatatggtttcaaaacatctaagcatctcctagctaaagagaaagaggaggactataaactgagtgagggaaatgagtgtgctaaaagagacagttgaatggttcaaccctcccctcctatttatagagggttattccttttaactaaactacccctgtatacttagagcctatctactcagctagggacaaaatagacaaactcttggaattttgatctgacaaccatgtagtcttcaagaagttgctttgccctgacgcacccttcgtgatgacgacatgtgccacctccgagccaggttttgaggcccaaactcggtgaaacctacaaactgtcatgctgggtagttttgaggatcaaccaccaaaacaccgcaagtagcatactccatatgtattctctacatcctagacatgta

SEQ ID NO: 66904 - DNA, 586 bp, Zea Mays
agcccttgtatctttcaaattagtgagaatttgccctaggccaccacataaattttgtaaacctatcataggagagcaactttgatgcagacatctcctgtggttgttatacaaaaattggagaaaaaccaactcaaagtcgctctgtcagaactgagacagaaaactgaaactgaaacctaggttaaaaatggtcccagtgaggtaaggccaagtttgatgcgccatatctttgaatccactcggttttagtccaagaatcctatagttagtttgtagactgatatatggtgaacaaatcttagtaagggagattgctctgttcttaacaagaatttagagattaagaagggagaagatggtcggttcaggcgactgaagaacaatctccatggtacagtgctttgagtggatcagtacgccagattagctcgccatcattgatcgccgtcccgattcgtgcgcggtactggatggataacgccggggaaagggtaactcgtacgtggcaccatctcctgagctcagccggagttattcaccggcggccaccgtgactcagtgagctctcgtcgtgctgtcgcac

SEQ ID NO: 66905 - DNA, 291 bp, Zea Mays
aagctaaaaatagtgaaggccctattggaaccacaatgttagagattgataggattatagctgatgtggttctcgagagggaaatggctgaagtgaccactgatagggcttcgcccttaaaaatgaaagaattggaaggagtttcttcggaggatagatagttggacctacgacacttgggcggccaggaactctccaaagaagatatctctgagttaaaagaattcgctattgccggcggctacaagtctagatccgtgctctttggtggtgtcgacgaggagattctag

SEQ ID NO: 66906 - DNA, 913 bp, Zea Mays
attttttgttgcgaggaagttattcgtttcagtttctatattatttaacatttaagaaaacttattagatgtaacatttgtggtgtagaatggggagtctgtagaagcagtggtcatgcgatatgacacacggctggggaagtatgatggaaagcctcggcctggtggagtgcggtcaaccctctgtgtgtcatcacaggtcaatatatatttctatgttggatgtcaggtgctcaggtctggaagaatttgtttttaacggtttaaattgtttaaaaccttttgccagaagacctgttcataacttaattgtcatcagtatgttatgattcgagaatcataacatactgatgacaattaagttatgttgactgctcttcaatactttatatttgttgagtaagcttgtaactgtatatttgttgactgctcttcaatccttttacaatactaaacaggttgggtgcaagatgggctgcagattctgtgctactggaacaatgggcttcaaaagcaatctgtcttctggagaaattgtagagcagctggtccatgcatctcgctattctcagatccgaaatgttgttttcatggtaattttcactcaaatactagtggttgtttgaaatttctatctattcaaaaaatcgtgacattagaatgcaatgactatgcttcttttgtgatcccttggagcattgttttcgtcttgattatgctgaccaaatttaaccgtgttatttgattttattgttgattccatgaacaaataagctcattatgattcatagattggaaaagaacatccattcttttgccaacaaatgtcacatgtaaccctcacattagattgtattcttaacttagatcattgtgatgataccgagtgaaagcaatagagaagcgcataata

SEQ ID NO: 66907 - DNA, 519 bp, Zea Mays
cttgaagtgatcggggtctccatagtgccaacaagcattagctggaggttggctgcttgcaatggactgggtgtggaaggaactttgactaggctggttgaaacgtgacagagcggatcctgctggcttgttgaggtttgaccccttggaagggaacccaaaagatcgaaccctctggtgcctatcctgctgttgagctcagagaatttgaaactttctcttgaggtgacctttttcctcttttcgtgctctttccacctggatggccttgtttgagaggtgcgagaagctgaggaagtcttggctggctaggatagtcttgagttctagtcttaaccctttcaagaaacgggccatcttcttggcttctatgctaacgtcatctggtgcataacgagcaagttctgtgaatttatggatgtactcactaacggatctccctccttgagtcaactcttgaaactcctcttccttgagctatacgattcccaagggcacatgatgctctcggaaagcagt

SEQ ID NO: 66908 - DNA, 859 bp, Zea Mays
aggattgcatatgctgtagtgttgtactgatgccgcattgcattttgtcatgaatcaaggaaacaaatgggtagcaatctgtcacacctttgaagcttcctgctgtgctcactcgctgatattttcagtttgtagtcgtcattgtacttcactacaaaacgtaacgtaacattaggcatgcacttgttcttcctgtaccttagattcttctttccatggaattgtactttcattttctctactactctataagaacctaacgtagaccgcggtgcacggttctgcctcctcacggcgcatacgacccacatgttagtgtcttccttcttccccgtgcgcgccctctcccctctacccctgcatccgcatggtatcgccgcaatcccctcatcgattaatgcctcagccatggaaggaaaaatcccgtcactgccacagaagtaaacacatcccctcgcagcaattcagcacgcatgaatcccattgtcgatgacgcgcaggaccacccattgcccaatcgttctttccatgcaccgcggatgccccgcccatatccctctcgccccaaatgcaatccacgcctcgccaccatggaaggaatcgcaacctaatcccctcatcgccatccagcgcacaggaccaccatcggcccgcatcccatcgcaagtgtaggaccaccccgcctggatcttttgatgctcgagtacttcccattctacgcgccagccctgcccagatcttgcgatgctcgagtatgagatggaagacacctctttaagcgctcaaatctgaacatcacacctctcttcacaaacattaatatgatatacagtatgctgtccaaagtgttgtctaaaaa

SEQ ID NO: 66909 - DNA, 314 bp, Zea Mays
tatctccttttgccatgaggcaagtaggagtgtaggaatcatcgtggaggttggtgaagagttgcgagcttgaagtagattggatggcgatgtttgccacctctttctcttcttcggagctagaactctcttcatcggagttccattcttcaccaatgtgggcttggccatatttcttcttcttgaagtatcccttgttcttgcctccctttttgaacttatcctttttgtagtccttcttggcttcttgttcctttttgtttgggcaatccgctatgaaatggccggtttggccacattcataacatgccctc

SEQ ID NO: 66910 - DNA, 420 bp, Zea Mays
tcgctccactgctagggttgatcgtgagggagatgagaccgaagctgctgagactgttccgatttccgaagccatgaagcggtctgggctggtaacatcggaggacgtccctgccgctggagcagggcaagttgatgttgaggaaaccgattctgaggatgattatagttgcacggtgccgagcaaacccagccatttggattttggaaaatccacagtctccgaaggtgacctacctaagatgttgaaattgggctatttcaatgaagaaaagaaagagctagttcgctttggcggagaggaaactactccgaagccaggaaaagatgaaatagtagtttttaagagtttcttcaaagctggtttgagattccctttgaataagatgattgctaatgtgctgaaaaagtttgggatcta

SEQ ID NO: 66911 - DNA, 740 bp, Zea Mays
caaaatcaaagatgaattatagggcaacaagtttactacatacggttaatcaaattactacacaaaaattcaagaattaaacgctttgatttgctcggtcagaaccctggatgaagaagcccatggtacagtaactaaaaaagatcagtaggtgtgttgcaccttgctgctggtgaccccacgctcgggttcgtgccggcgtcatgattcgtgccctctgtggtgtggatcacgatcggcagtaaaagatcttcgccggggatgaacttggggcactgttttgccctgtcatcgtacccacttgcaccggcgacgtggctatgcggtcgtcgccgtcgacccgctgtctggctcggttgtgacacgtcttaagtcatcccaccactcgtcgcaagccatgaagactcgatagtgaccgtcgtagaccgtgaaccagtgaacgccacgttagtgaactccggtgactcttcccccttctcaccgtgagcgcttctccattcaaattcatccttctcgcgatcgtccactataaattgaggcctcaacctattccgctagattgttacgaagccagagcacccaccctcgccttcgattagccaccacagccgaagaatttcgttcttccccaaaatctgttgtctgcgccatcgtgagacgtagcgctgtggctagctacctccaggtccgccctcgctcttcttgtccgtgtttcaacacccacgcgtgcttgtgatgct

SEQ ID NO: 66912 - DNA, 507 bp, Zea Mays
ctccatctcctttcctggtaagaattcctctctagggttcgctattcactctgcaatgcgtaggagcttttggattgggagattgggtcgtgcgcgcgcggaatggttatcttgccggtgtgggcgcgccgcgggctacgggggattggtcgggtcgcttggtggccattggatccaccaaggatggctcagattagaatcaggacaccgtttcacgtaattgtgatctgggccgtagatgccaaattggacgagtgaagctgggactcggttatgagaagcgcagacgatagatctttgatccaacggtggggatcacgtaccgttttaatttatgtaagatctaatccgggccatcggttctggaactagtggccaatatcacaccataccccttcgctgaggtagtttagcataagagaccctaggatctttatttatcaacccgccatcctatgcgactgttctctgtgtcttacgaattttaccccgaaccccctatctttc

SEQ ID NO: 66913 - DNA, 714 bp, Zea Mays
aattcaagtgccaaaactggagatccttttcctcagatgggatctgatcaagtccaagctgtaaactcatcttgtaaagctcaagtcctaaaactcaagctttgcaaagttggtaaccaagatttttgcttatcgcttggcaccctgctgcctaagctggtctaacaaccagagcgcctttgttaggaggaatattcacaacaatttcttacttgtgcagcagcttgctcagaccctacataaaagtaaagaaccatacatccttttgaagctagagatttcaaaggcatttgatactgttagcgtaactgtatgctctattgtaatgcctctattgtaatgggcctcagacccacctaactctattatattaatgcactatcaactctggttagggttttctattccaacatggtatcaagcctctacattccctaaccaccaggcactctagccgtcggcgcacccccggccatcgccaccgtcatggagcagtcctccggcaacccctccctctccttcccctgcatctcccagagcgatcgtcaccgcgtccgcccgcaccttctcggcgtccacgactgcctccctccctttctccttttcatgtgctcgcctccctccccacgcaagcggcacgaacgtccactgcaccaaccaccgctgcagccatcgcgcggacgattgcgattacggccgctgccgcacctcctc

SEQ ID NO: 66914 - DNA, 401 bp, Zea Mays
gccgacaatatgttgtcgtctgtaacaactaatgtcagactccaacttcgtgaatccaacgttggataaagtgcccacaatcttcgccccggcacggtcgtgaatgcatcctaagatttcttcatcgaccccgccgaagagcatggaccccggttggtaaccgcaagccatagcgaattctttaagctctagtttatcttcctccgaaagtcctggccacccaggtgccgaaggtcgaaacatttctcttccgaaggagtatcatcaattttcttccctttgttaggcaccgcggccatgcctccctccgcaaccacacctgtcttctccgcagccacatctgatataagcttgtcaatttctgacattgtggctgcgagttcctcagctttggctccgcc

SEQ ID NO: 66915 - DNA, 347 bp, Zea Mays
aaaaacaaacgaggttgcctaaggttagcctaaggagattgaagaacacaagaacacacaagggtttagagtggttcaggccgccgaagcttaataccctacgtccacttgcgagttgtattgctagggatgtctaagagattgagtttgtatcatatgtgccatcccttttacagtcttatggaggcatgtaatgggtcccacaagtggccccagcaatctagtattaaacaatgctcaacatggagcattggagcattaagcgctatggcaaaaggagatcttagcccttggcctttgagtggatcttctaacgaacatgctttcatctagtttgtcagcgcgag

SEQ ID NO: 66916 - DNA, 493 bp, Zea Mays
ataattaaggccaaagttggactgtcaggctgactgatgactgaaacttggtctgacagtaggattacctgaacttggggctcaatttcaaacaagatcgagccagaatttgcttgaggttactataacaacattatagccagatcttagggctataactttgctaaagagtggcaatcgagttactacacaaaactggaagttattggttctgcaaatcactttgtcaggctgtctgacgaacactcgccatggtacagtgtcctgagatgatcaaaccgccagcgctaaatagatctcaccgccgcgattcgtgtcgccagcgtgtggattcgtgcactaggattggggatgacgcttcgattgtcaccccgtgcactggacgccactccggtgactcaccgtcgtaccccccgtgctttgcggctggtgctgataagctcaccggcgacagccgtcgtctgaccttgcgccgcgtgtccaaaccttgcca

SEQ ID NO: 66917 - DNA, 502 bp, Zea Mays
atcggagatgcgatgtatagtacctcgcaccttggtgaagcgggagatgaacgtccggagagtctccccgggctcctgcctcaccgcatggaggtgggcctccacaccgtgctgctggtaagcactgggaagttcgctgtgaaccatgcgcagagctcttcccaagagtagattgatcctggggcgaggttcatgagccaagtccgggcaggtccagacaaggcgacatggaaatatgttgccatcacagcggtgtttccacctgctgctgtgatagcgatgacgtacacctgcaggaattccgacaggtttgacgtaccatcgtacttttccggcaggtgtggccagaacttggatggccatgacgccgcacggagatgatccgcgagggcggtgcagcccacactagccaaggggacacccgcttgggaccgggtgcccattggggcctgcggtgctaccacagtgaagtctcaatcgaggttgcgaccctcgatgtttt

SEQ ID NO: 66918 - DNA, 324 bp, Zea Mays
ttcatgatagcttcaatcttatccggattagcctcaattcctcggtggctgacgataaacccgagtaactttcctgccggtaccccgaaaacacatttttcaggattaagcttccatctataccgtctcagactgttgaaaacaagctgtaagtctttgatgaagttttccgagttctctgtgttgattaccacttcatctacgtaggcttccacacgcttgccccagtgatcggctaagcatgtttggatggctctctgataagtcgctccagcgtttttgaggccgaacggcacggaggtataacagaaagcaccaaacggg

SEQ ID NO: 66919 - DNA, 396 bp, Zea Mays
tttggattccaccactcggagccatacgtccgcatcaagtggatcctctgtccttgtaaagagtggtagttgtgtgctaaggaactcataataagtggctgtgactggatgggcgctgatactgtttgccacccccaaagtgctgaggttgctgctgacgttgcgcaatctatcgcagaatctcattttgctgagtcatcagctcctacatagtgggaggctgtggcggtggcgggggaatctgttggttctgcctatggcacgctcctaccatctaaaattaaggagttcctgttgttaatcataatttatattcgtgataagtaatgagcaaacaacggggattccaaacttcagatctggtcataataatttcataaacgaacttaatctcat

SEQ ID NO: 66920 - DNA, 288 bp, Zea Mays
catgaaaggagctctgactctgctgactgaaccatgacggggtgggtccagctggtctactgaagcttggtcccttgggtgggaatccaaaggatcgagttctctggtgccgatcttgctgttgagctcggaggacttggaatttcctcttaagatggcctttttcttcttcctttgccctttccacttgcatggctttgttggagaggtgcgagaaactgaggaagtcttggctggccaggatggtcttgagttctggtctgagcccctttaggaagcgggccatct

SEQ ID NO: 66921 - DNA, 414 bp, Zea Mays
gccaggggaagaaaagattaaacagagtatttgatgccatcggcttcatataccgtgattattactacccactacgaaggcaagggaagaaaagaaaagctatcgctttggcaaccactgttgtgccgaagggcaagaagatgaaggtcctgacccatcggccgcgatatattgaaccggtcgttgtgcctgaatttggcgaaggaacctcttcaactgctgaagtaaaacaagctgctccgattacgcagagcgcagaagagccgattgtagtgccgaaggtgcctacagtcgggcctaccgaagccaaagatggtgcggccaaagagccgataatggaaaaggtattgaaactaccagaaattctgagcccatcagaaggagcagaattgccaaaggtacaaaaaattgttg

SEQ ID NO: 66922 - DNA, 1356 bp, Zea Mays
gtcaccttaaccaggtcgagcccaaccatgatggacctgaatatagtttttctgacctgaaccctctaggtcggtcgactagagattctctaacctagaccctccgctaggtcggtctcaaccttaatcacgtcaaacatgctctgacctaggtctctccagtcagtcggcctcgacctcaattagggcctaactagtctgcacatcctcgatgggacaccaaacaccacaacccaaaagtaacataaaggctagcgtgtttaagtctaaatgacctttaggcacatgcccttgacatagggtacactatgagtggaaacaagtattgtatgaagaactctaaggactctttgtccaaccacctcgcctcagacgcacgaataaggaaccacaaactatgacggtcctcgtattaggtacaagaaatcaaaagaccccgataaagacaggagcagaagaaagggaatattaaggctttggacgcctgcaggacccaactgcccccatgacaatatcaacataggaatgagagggcgagcacgctcatcatggtagaccttcagagaagcgtcagaagtaacttgtatccaaagtcataaaatatcataccccatcaaaatctccatgtaacgatggccacatgttccctcggccatataaaaggcaagcgaacttagcatgtattcttctcacacaagcacaagagccaggcacttcgccttgtaacacacaaaattagtaaaaaagacttcaacaccatattggatgtaggagttctctctgaaccagtttaaagctcctctcatgctcacgaagagcaaggccatcgagacaatgacgctgcaagccccataccaacctacaaattcacttgtcatgggtccataaccacaatagttagcacgccatgtagaagcctatggtgtgctgcatttttgcttttgatggctccgatcactccctaagaccctttccctctaggtatcaagatcaccttagataccctagacatctttatcatgggggatggcactctaagacttatcgtccccaacacccctcaggcactagcaaaaccgagaaccacacaacacgccttccaaacacgctccaagtgattccgttgaaagagggctagaccatggctcgaggatgtacaagctgcaagcccactaaaggcctgccaaggcaacaagggctacgatagtggctcgactcctgatccgcatgggctctaggaaccccacacttcctaagctctctatgtgtccctcgtgatcaacacaaccacgaaaaccgagggcatggtcgcaggttgacacatagccgttcgaggaggtcatggactcatcgttc

SEQ ID NO: 66923 - DNA, 1042 bp, Zea Mays
atggatggtgtaaggcgttttatgagcttctctcaagatatccatcttcacctctgatttctgaggcacacagaggcggcccctgaaacgaaccaaatcattctcatcaatggtgaactcccgcggtttaccatcacccatcctctttcgagcttccttcaatagacgatactgctactgagccgcacgcactctctccatgagagaggattgactaagcatctgagtctccttgccagcggtgccgacataacacaaagcgatccccatacggtccagatcagcgatcaacggcaaggccaccttcggaaccacggacctgctaagggcaccaaccaccacattagccttccctgggtgataatgaatggacaaatcataatctttagtcaattccagccaccgacgctgcctcaaattcagctccttctgagtaaaaatatacttgagacttttgtgatcggtgaaaatgtcacaagtctcgccataaaggtaatgcctccacgtcttaagagcaaaaacaaccgcggccaattccagatcatgagttggataattcccctcatgcttcctcaactgccttgagccataagcaatcactctgccttcctgcattagcacacagccaagaccaatacgcgaagcatccgtataaactgtgaaacgcttaccgctctcaggcaaagctaggataggggcgtccacctacttgctcttcaatgactgataactaacctcacaatcgccggaccagacgaagggaacaccctttccaagagcctagtcaaaggcttagcaatgctggaaaaatttggtacaaagcgccgataatacccagcaagccccaagaaactccggatttcagagacactagaaggtctcttccactccaccacaaccgcaacattcttgggatcaaccacaataccctgctgattaatcacgtgccccaggaaagccacttcggatagccaaaaggcacacttcttcaacttgccatagaattgattcttccttagggcacccagaatgagacggagat

SEQ ID NO: 66924 - DNA, 2609 bp, Zea Mays
aaaaagtgaaaagctagttacgtgttttaaacaagtgttatggatggtcgcgtcccatttgaggcagtgaacagactgatgagagatggagttgataatccagaatattgtatgttttggtataaatttgatctattaatatgaaacttgagaacaaatggcaggtcaatataatataaaactaactgctccgaaagcagtcatcctgcctgacccgatccaaggacacatcgtattccacctttattttttatattagttattgaaaagtctaattattgtgcctagctttttccatggttcgtaaccactcccttatatttcttgtacaagcactccacctcaatcaggttgcaagtcctacttttgctagttcgcggtcggaagaagccatagccatccaggaagaagaagccatagcaaaagcagctgaggggggattagagaagaacagcagcgcatcagatagggagaattgaagctgatcttttgtatcatatatctttcctgcatgcttcatcagtccgacacttgagagaggttcgagagagaagttattaagctgcctccacactggtagcaagtgattgcatgcatgggggataggacatggcagcagccacatgcgcaggcttcttccccagacgcagggaccaaggtccaagcttcatcatcgtccgtccatggcaacatcatgtaaaccctaacacacatggatatatagctggattcggatcttgctctattttcttgcgaatatatagatatatagatggatcggaattgaaggtttgctttttttttttttgcttgcttttgactcctttcttctgatttctgaagcatatggtggattatatatactgtggcgtcaatctcttctctggttttcatcagatttttaattttccacggtggatttaatttaactgttcaacatagaatttgctcgatcggaaattttgtctttacataaacttattttttttattggtagcatttccagtatatcattttagtaactgaccaaactaaaatgatgattgataccagcctaatttataattttgcgtgtattgatttgtgcaagtgcagcagaaaggagccagctggaggcggcggatacgacgacatggccgagttcgatcaagcgctcttcctctatcttaacagcagccaggatcaagcatcagttattcaagatcaacctcgtaagccacacacttaactcccttagcttatgcatgcatatacatgcacgggctgtatatataaggggataaactttattgcatagtataggttagatcatattgcctccattttttatttatttgacgctaattagtccaattttgtactgaccggcgacaaataaaaacaaacaaacggagtaagggagtacatggcagattaattaattaattaaactcaaacatgccattctgtgatgcatctaccctgattggacatggctcaaaacaagaatgagagcaaattaaagatgcgatacaatggcgtgaggatcagacctctcaatcgtctttccttcttttttgtatgcaaagcttgttctctctgagtccgacaaaagccaattttcagagaaggaaaaaaaagaatctctgctagttcaaggagagtgacatgtaacaaacacttgctcgagtatgtgctcatttcattccagataggtcattttctttctgctgaaataacgcagttgggcagagatgtgatttctcatagtctagatagctctttcccttcaccacgtatccacttccaacaaccatatacacacgcatatatacgtgcatacattattcccattctccgcccttatatgtgacaatctaataactagttcaatggactaattagcttagagcttgtttgatagcaactaaaattagtactagcggattcaacctgcaaactattagctaggaattgctaataactgtttaggattgttaatagtttataaatatgtacctttgatttattatccaaccacctattagcagattaattgaaacaatcttcatttaaaatcatctatagctaaaaaaatagcagctaccaactcttaaaaactatattagattgtattttaagaatatattacatctgttcttcaatatttgtcgtctgttaggtaatttttgaactaagaaaccgcgacaaataaaaaagaatggatcggtcatttgttagcatcgctatgccatctctcgtacatgtacacttattagcttctagtttaatcgcagaactttgtgcagaaactctcaacatcttcccttctgaaccaatgcatgtcgtcgagcctgctgcaccaaaggtacgtacgaaaaaaaaaagattagcgacgacgaccacatgcattggctctcgatccagtctccatttagataccttttctcactttcctgccctcattatatatatattgatctttcgtcttatcgtgagctactttaattatttcaagcaggaatctatgggggctacgactaacaacacggcgtggaacaacgccggcgcaggcccatccaagcagccgccatccaaccttccgtcgaggacgacggcgactccggcag

SEQ ID NO: 66925 - DNA, 418 bp, Zea Mays
gaagatgagcgaatgctaggccaaggatatcagagcataagaaccctttatccaaaggaagaaaattgtgctagattcatctacgacaacacatccccactttcaagtgatttgcaagcagcaccacggctgacttcatacaagcctcctcagcttcccaacatatgatggctaatttgaccctaatggattcttgataagctatggggaaaccatcttccttcggtcgaaacacaatagtgttacccaaattattcaacgtggttgttaagggcatgcataatgcaaaccgggtattcatgtctttatctaggatcaattaccacatggtataaactcaaggatcagttgctcacaagctttcaaggttttcataccaagccagtcatagctcaacctttgtttcaatgtgcccaag

SEQ ID NO: 66926 - DNA, 894 bp, Zea Mays
tggaaatccctgctgcggttacaaatggagaagaagtagctgctactgctgctggctgccgccttgaatcaaaatcaaatcaaatcaattgaatccctaagtgaaaaaaaaaactaaaggagctcggctgagctgacaaacggaaacccagatgagatggagaggagagggaaggaaaggaacacgcaaataaaaggggaagggaggggacagggggattggtcgctctgttcgtgcgtggtcaatatatgctttgcttagtacaacaggataggagattaggaggagcaacagctttcttgttgcttggaaagctccgcgcagagaccaagaagaagggatggcatggcccggccgcgtttggcagccagggggagactgaatcaaatcaactcaaaatggaggaagaataataagacgaggcagacgggggaggggctccgtctctgtcccgcccgccaaacggacacggagtacaaaccaaggggtagtagccaaccaacccccccaaatggcagatgggaaatggcccacctctcgtgcgtttgcttggaaagaatttgttgaatccggagtgctccctctcctctccctcagtcatcgttgacttgcctggccgccccatgtcccttccaatcttctagaagataccggccaaacaaatgcgctgctgctacaactacgtttttttttggaaaaaattttgatgtgttctacaatattttttttcatagagcaactttttaatcaggaattggaattatcgatttctatgactcctaccgacccttggtcctctcgcttcattcgtccacccagtcacaaaagaaagcagtgtgtttgttaacgggttgatacgagttggaacaggttgaacctgcatcaactcatgtt

SEQ ID NO: 66927 - DNA, 1169 bp, Zea Mays
actagtatcgacaagtttcatatcaatacacgatacaagtttaaggaagaaaactatatgaacaaaggaaacaaatataatgctaagttcttgctgaccgaatcgaagttatgtgtaatttgttgaatgttgacctcctcgaagtgtggggtgcgggaaaggggcgggtcaggagacgtctccgattgagagcttgggctcgctggttcgccaagctcgtcgaccacccggaatgcgtcgcatcgtcatgacgagcaagatctagcctattgggcgggtgtcgcgacgacgatgacgagatgatggggggcagaggtgccaagaaggggcggggtcaggcgacatcgcatcgagaaggggctgcggtgggagcgtggtatatcggggcaggctggtttgggtggcatcagggatagtatggccgaacggatagttgtgacgactgggccgatccaacgaggaggtccatgacagggttgttttagtcttttaaaaactttaattttttctacacttaacagtaaatgattattagatataagagattatacaagattgagtcggtaggagagtgagtggcatggaaaggtgttgaatagttggcaatatcttccacttcgagctgacatatgggcccaagctaagggaagagtgcaactcacttaacagattattagctagtattctctttctctgtcaatggggatgtgggtgatggagatggaatgaagctagatgccaagaaatagaactacatagatatatagggactatgtagtacgtacgtagtatagtgtgggtggtgagctagcttagagcgatcgagatagtagtaggcgatgcatcccaagcgatgatcgatcgagttccagacaaaagaaagcatccaatcaaacttcttctcatgcatggatcggaagaaagaacaagcaaagaaagatgccttgtttcttgagctgcccctgcctgcatctgcatccgactccgacgaccataatgcaagcccgtaattaattaagctgcgctgggaagagctttggaggaaggcggagatgacaaactgacagggacacggattgactcactgatggatggatggatggatgggattggacggcagctggctgccttggcccacttccactgcaaacgcgacgggtgcaggcttt

SEQ ID NO: 66928 - DNA, 593 bp, Zea Mays
cctcgatataagaatcccaagagccagtgtatacatgaccggaccgcgggttaattttacaaaaaccaagggcctctttgttaaatcatccggctgaaagggtatcgagggtgttcagccgtccgatcagatcctgatggtgaggattagatccacagccgctcgaaccgatatcctacgggaaccatcggatcccgatctaatggtctcgattcaatgtgcgctaatctcatctcgtccgcaagatcggatatcaacggtgcacaattagtgtggtaacgcagtagcccaaaactcatatcaaccgtgcgttgattgatcgatggcccgcacggctcccatcctcgtcaaccaaatttttctaccatggcgaccaggcacggcggagcgcccaccccgcggtggcgccattaccgacgaagtcgcgccccatgacccggccacccaaactcgacaatgatcacaccatagggagagaaaggaacaacgaatgtttacagggcactctcaccaaaaatccgggcgtggtgatgatggcacgcggcgatgcgcggacccgcagcaccagtgagaaattcctccacgatgtccac

SEQ ID NO: 66929 - DNA, 924 bp, Zea Mays
attttgtcttcacatttggtacttttttatgatgaactattttgtggtaattcttatcattattatttgtacattcgctatttgctagggtctaattcttagcaaaactttaaaggctcagaaggatgcagaagatgagagaaatcagatagcaattggaaaccttcgttcggaagtcataactctaagaaacgaagctctcgaaaaggataagatcatgctctctctggtggagagattaaaatctagtgaagctaggctgtctagcctttccgaagtagagcagagggtgaaggagtttgaagagaagcaacagaaagatgcaaagcgtattgctgacttggagtatgcgctatctgttcaagtggaattgcagagatctgaagtgcaaggattggaaaagaaactcgaaattttaatgtctagcaaacaaaacgcgaaatatctgatactgaacggctgagagttcagaaaaatgtcgaggagcttcatcgagcaaaagaagaatgctacaatgttgccatggagtgttgtaataaattgaaagatagctttgcaaaagttggcgcattctctacggagcaaaattttatccgtgttgatcctgatggggtcattcattggatcgacggcgaggccgaagcttttaacgaaattctcagcgatcgggaagacttctgtgccttcgccggcgcccacggagctatgtcacttcttgagaaggttggctgcgatcacgcaaatactgtagttcagccagaatttttggtctcagccaatgacattaagaacccttcatccaaagccgctgccctgagtgggaaattttattccgaagtctggttgaaaggtgttcgagagatagctgacgaagctatcagaaaaatgagaaagggtctcatgttgccttggaagaggctagga

SEQ ID NO: 66930 - DNA, 1430 bp, Zea Mays
ctggtcctcctcttcagcaaccgcgccgatcccgccgaggccatgcggctcatcgcggagatggagcgcgacggcgtgcccggcaacatctccaccgtgaatttgctggtcgggatgggcgtggaggtggggaggtgcctggacctggcaagtaagtgggggctcaggctgaacgggtacacctacaagtgccttgtgcaggcgcatctgaggagtcgggaggtgtggaaggggttcgaggtatatgagaagatgcggaggaagggctacaagctggacatatttgcatataacatgctgcttaatgcgcttgccaaggctggaatggtatgataatgatcataaatttatatatttagtgatatattttgtcatgctgggctaactttaggaagtaggaatggttgtgttaaaaaatgttgttggtatgcttaattttgatcacatgaccagagcatattaggaatcacgagtatgagagataccttcctcaaatatttcctgaggacaaaatttgcgctacttagatggtacttgcacagtatgtaaagatgagcttctactgtctggtctaaggtggttggtacactagttgatgttatatgaatgaattaacagtttatctgattatggattccagctactcttgtgctgggagacaccatttagggttgatttgatgctaacgggatcccgggtcaccaaatcaacccttaatgtttacatgggcacttgcatgtctgaaagaattcaaacttgtagaaaagcttgtttctgctgcaattgttttccacaaattgttgattgttagggtgttgctactcgctacatatagatgtccttgatatgtttgagttactggtgtgggggaatctgtataaaagtcatgttatatattctttgccctgctctactgtcatccggaactgcagtcctttgtgtcacaaaagaaacacggcaccatgatactaaattgcttgctttaaactctaggcgtattgcgaggccgatgaggatgggtcagacggttcctagtgaggtcaggatgcatgggaaggctgccatctgggtaaggagcgtggggagaggcgtgtgcctgtgctcctgaaatggtgcaggcggcgcagtggcacttgtgaatcctgtctgtccgccccaatctagtgcaaccgaatggataaggagatggtggaacttctgtaattttcagcaaaacaaagcaataggtgaaggtgttggctccctgaattggtgcgaaacccacccaaacaatgttttggccaccaccgaaggaaatgcatatcatttccactctgattccagcggcagtattcccattaggagtcatttcttacgattctgatgaaaaacggtactgaacggcccctaagtcccaatagaggaatattagaagtagtcaaaattacagc

SEQ ID NO: 66931 - DNA, 710 bp, Zea Mays
tgaacaactcttatagattgttggcatgatgtttcatcgggtatggtgccttagcttctttttaggtggataattggtccatggatgttatgaggataaagtaacctaacttggcttctttttgcgtcaatgccactcatctgagtcaaggatgtcatggaagcactatactagtcctccatattcttattacccatgtctatgttggctcatcaggaattggaaggcatgcaagccatcctagaagaaacttcatataatgacaatcaaaaggacatttgggttataagttctagaagagcaaaattctcagtccaaagataatacaaaagcaactttgataattcctaggttccaagggtatttttgaagctctagaagagcaaatgtataatgaggattatgttttttggatggcttcttcttgtcaatagacttaacactaggcaatgcttctccgaaagaatttgttacaaggccaatcttgctgctgtgtaatgtgtccaaatgcaagggacgaggacattgagcacctattcttttcatgcccttttgcatctaacttttggaggatccttagtatttgctgggataattagctccctattcatcatcacttggtgcaagtaaggaacaattttcctcatcatttcttcttggagatctgtcttattgccctctgggtaatgtgcaaagcttgaaacatgaaa

SEQ ID NO: 66932 - DNA, 401 bp, Zea Mays
tcgttcctataggaatactcatgcttttgcttatgagtctttcttgtacttgtatttctacttcttgaacaaatagaggcttagtaggcccactttattatttgatttaatctatgtggagtaatccttttaacattttgccttatccgcgtgtactgtgggctactaagattcttgtctaggggttgagttcatggatgatggttgttttcccttccttacaatcgcccttgcgcctttttggcccaagatctttactggttgctggtcttcatgtgttagtggcattgattgcaatttggaatgcagatggatggcctcgtagatgagctgaaccatgcttattgctatgatatgccacggggcgaaggctcttgtttcgtcgtatcctcttccctggg

SEQ ID NO: 66933 - DNA, 669 bp, Zea Mays
gcgcaattttctaatggtgaaggttatggacttatggttccttttgcgatctatgccggtgacttgggtgtatatataacccacaaaataactaaccgagtttactaatagtcagtactatactacatccgctatatatatacgtcaagaatcttgaatagtgagagattctggccctctacaatcccctccaaacaagtccttaaaaagttaaaaggaatacccaatggcatgaagaatctatcgtgctagttctgccatgcatcgtcctctgtaaataatggatcttgaatcaacgacaacgcagcgcacacagacgagacatctccatttccaaaacgaatttcacaagaaatgatccatgcatggaaacataatcgaacaccaagcccgcacgcacacacaagctatgtacgtacgtgtgcgcttaaccggaactcactagaacgcctatatattgtattattcatgcctgcatgcgtctgtgagcgcgcttcttattttcgcctagctagctagctgtcgcttgctccgtcgggaacgagttgcttgggtgtgttggtgaagcagcacgaatcgctcgcgcgctaatctccaaaccccgcatgcatgtccattagctgccaacgcgccgaggcatgcatgtgtggctacggaggctggcgcgtg

SEQ ID NO: 66934 - DNA, 774 bp, Zea Mays
gcgacggcggcaagggcgacaacggcgacgacggtgccagtggcgaggtgacattgacttaagtagaagtagtaggtgtagtgtaggggtagcagtgggggcaggagtcttttgtaaggatcaatttataatgaactaattttgctcatgtaatgacacccctcttatataataaagtcgttgtttcctacctttttgagtactgagctctctctctctttcatgctgcgtttgaggtatgatcgctggtgttgagttcttcatttttctcagtttcctgtatccttgtgctttagtattgatgactgacttctcccgaccgacttgtacgccaaaatgagttctttgtccaattcaacttgtccgattcatcacctttcttttcgattctaaaatattgtctccctagtgctgatgctatgataagtaggggtagttatatatacgtgcttatgcctgacagtttttggcagaaaccctagcgcttctttcgctgtaatctcttcctttgaaattctcctaccttagtgaccccgctctcgattctgtggtcacgagaggtcccatggcacccaagaagaagcaggggtgcaacaaccgccatcccttattgatcccaatagtcaactccccttttgtggtaactacacctccatcgtttctgaatccgatttgcttcaccttgtccaggtgggcgttcttcctccaaaagagttgagttcatggaacgtttggcaagggatcaccgtgcccatagaaaacacccatgagtcc

SEQ ID NO: 66935 - DNA, 584 bp, Zea Mays
aaaaatttgagatctgggccctgaaacttgctctgtcacacgctctgatggtgatcaccatggtccagtgactgaattagatcacaggttcagcccccctcaccgccggtgatctcgcgcccggattcatgccgccgtcgcgattcacgcccggtcgaacgcggataacgatcctcggtgaaaaatccggcgctgaggatgagcttgagacactgttccgccccggccgccgtgtccgcttgtctcacggccggtccagataacctcgccggagttagctgcctaccgctcagatgccacgtgcctaaacgcaatacttcgtcgcagtgactcgccttagcttgttcggtcatcgcctatggtcttgccacggtgaagtgccacgataaccatgtaccagtaactcttcccctctccggtcgccagcgtgccattccaaattgaagagccaccgccctcgggccctataaattaagtgtgccatcagctccgttaggtaatcacaaagccagagcacccgctcctacctccgattagccaccagagagctccaatttctctctctccccaaattggttttccgc

SEQ ID NO: 66936 - DNA, 416 bp, Zea Mays
gttgaatattggaccagagtttggactgtcgtacttggtgtggtttgacttggtggacaagtcaactagaacttcctgtaactattgaaagccctagactccaaataccatatatatatatatgtctggaaaagcttgagcatttttcacgtgataagaacatgcatgatgcatcgtctagctaaagcacaattgccaaggggcgtatatgtatatatgtaagcattattacaggccacacgtacccgtccgtaccgtacatgagccctgcctcttcgtcgagggtcagccagaccattggagtatgtacaaatttagagagagagcggggtaatggagtgcagtggccaagtcgtctgtagtccttctggactcctacctagcacagggatcggtacgtctaatatgtagcagca

SEQ ID NO: 66937 - DNA, 954 bp, Zea Mays
ccacactaggcataggaatctttttagcatcggcagcaacacccctctttctatgctgcggaggatcaccatcacaccgcgtatttgtagggtctccaatgtcagtcgagcgcggaatgtcaacactgaaacattcttgacttgactcaatgattaaacgctttggattggttgggggtcgatcaaccttccgcataattgaagcagcagcctacaaaggaacaatgtaaaacacctgtgctttattgagttacatcaacatatacaccaatgattatacgaactaattgtacactcaacacagtcatacacattataattcatcaattgtgtttatatgaccctaacaacataaatggtaagtgaacaaaacatcaaaaaaaatgtatcattgcattgtagaaattgccatatacatatatgcaaaccaacagaatgttcatctaaaacagtatttcctcagaaaaatatatatttatgcagtagtagtagtagttaataagcagcaacataaacatttatacatgactaaaacaaaacatgcaaccagaagttcaaaattctgcagttcataacatattagtttacgtggatattagacccttactgtgcatctgaaacactttttacataataaaactctaataatttacttgaaaaaaaagcaaacatccaactaactgaatcacattctggaattgatgtatgttactaaacaagctctacaagttctagacttatgcagtcttgtcccgtttttatctagaaccgtctaaattgtagatatatgcttgttgtttgacctctctacatatctagaaccgcctaaattgtttgggctggtgacttaagttgagtgtgataagaaaaagaggccagttgagtatgatctttatttcaagatccttgtgcttttggggtcatttcagtgtttcattctggtaattgatgggt

SEQ ID NO: 66938 - DNA, 562 bp, Zea Mays
caccaagcaactcatcgctggttgcgtcaatggcgtctagccagtcgtcgtttggttcgtcaaattgagtcatgtatttaattgtatacttcaagtaaatcaagccactctggctagaccgagcagtagcctccttcggcatctcccacccactcccgagtggccacaccttgtaggcaatgtgctcttggactaagtccctggtgcctatgtcggtgcataccgtgttataagcagcttggcacgcttgaatgccgtttccaagggcaagagatggtcttctaatgccaaagtgagaccatatgggacgttggataattcccttgatgtcttctctctcaaccagatcgttatttacatagaaccattcttgcatccaggcccctagccatctcttgcgaaacgttggcactggattgcttacttcggaatgggttacgaagccataacaaccaaaattgttgtggtattgttcttttccaatagccttcgtctcataagacaattcatgcaagttgcagaaacatttcgcattcgcctcttgtccttgactcctcatggc

SEQ ID NO: 66939 - DNA, 508 bp, Zea Mays
ggccgatttggccgccccaacttaggcgtggcgtggcgccacacgccacacagcaaacacgcccttaaagcaccaccatgacctatctggtcgcttttgctaccgatgtccttctctacaagaagttgcatatgcaccttcattaacaacccctaagacacgaaagcgtttttgcagtcatggagtgagcaccaagacccgagagccaaccactacctaggccagcaggtcgccaatcgcatgggccagcccaaaaaaggcgaggggtggctttagatactatggttggacgaattaacaaaaccctatcgtagatagagaagaggagatgacaaatataatggctgtagagaggcatgactaccttagggatggcgcagaagacatagacgtaggtgaggccgcgagctcacgacctgagcaccaacgagcaatagaggaagcccttgtaggccccccttcagcatccctacccctgctcagacatcgtgctcggtccagatctaag

SEQ ID NO: 66940 - DNA, 1334 bp, Zea Mays
ctggggatacagtagaatttatgttcggcgaggagactaatgcgaactcactccgaatagtgaatcacgaatgacttgagtagagggtttatactggtttaggctggtgccctagtccaatgtagtgctagccgtagtattagctaagaaacatgttacaataggtatgagtgtgagagtgaggggccgagaactctagctgaatgcttctatctttgactgtttggctccctccttttttatagctcagggggtccttacgcagggatctatcgtccgagggtacgatctatcctctatggtagtcctgctaacgtggtccttttgacattgtcttgggtcgtgcaaccaatatggcaaagcactccatttgcccggtatgcggatcactgtaacaactccggtgttgcgctccattgtaatgacgtattatgggacccatgtgtcatagttagaaggcgctgggattcgtacgcggcgacgccccgccccattgttatggacttctctatcatccattgtcgtgtcgtggcgtcatcccgagtaatggaagtgcttaatgttgcctggttaatggaagtgcttaacgatagagttaatagggcaaaatggtactatataaaggttagactgttaaatagatgacattggtgtgttgggctccattgtagtgacgtttgatgggacccatgtgccatagttagaaggcgttgggattcgtacgcggcaacgccccgccccattgttaaggacttctctatcatccattgccgtgtcatggcgacatcccgattaatgaaagtgcttaatgttgcctggttaatggaagtgcttaacgatagagttaatagggaaaaatggtactatataaatgttagaccgttaaatagatgacattggtatgttgggcttcattgtagtgacgtttgatgggacccatgtatcatagtttgaaggcgttgggattcgtacgcggcgacatccccatcccattgttaaggacttctctgtcatccgttgtcgtgtcgtggcatcatcctcgttaatggaagtgcttaatgttgcctggttaatggaagtgcttatcgatagagttaataggtgtaaaatggtactatagcaatgttagactgctaaatagatgccattgggtaatctagcgagtaagacatgaattgtagggtattttagctattgataatattaaagcatatccaagggtcattctaaatttcactctctaaattatcatatggagagtcatttacataaaaaccactttctataaattttcaatctccaacaaccttttttatatattatttacactctag

SEQ ID NO: 66941 - DNA, 355 bp, Zea Mays
cggatccgaagacccattgaattggctcaatcactgtgagcaattctttaggggacagcgcactccggcctccgatcgcacatggctaacgtcacaccacctcaaggggcctgcgcagatgtggtactacgccctggagcacaatgagggcatgcctccttgggaccattttgctgaactgtgatgtctccgcttcggacaaccagtgcgaggctcacgcatcgccgagctgggatgccttcccttcctgtctacggtctaggagtactcggaccgcttcctggcattgatgtgccaagcgtgcaacatctcccctctctagaagacagaattgttcatgggcggccttcccgaa

SEQ ID NO: 66942 - DNA, 699 bp, Zea Mays
gataaatatagtctatgtgaggtgctctaattatttcaagtgtatgcacatgatgaggtgtcctaagggtagagttaagggagaaaacaaaataaggggggttaggaggttagggtttcaaaccttgggttgggatttttgggatgttacaaacctaccccacttaaaggaatctcacggatttgagaaaagataagggtattccctcctcatggagtcctcactctcccaggtagcttcctcttctccttctctgctccactgaactttatagagcttcacctctgaggtgcgggtctttctgactgctgaatcaagaatcttcactggcttctcacggtactggaggtctttctgaatctgcactgcctcttcttcgatgtgactttctggtgcttgcaggcatttgcggagctgagatacgtgaaacacattgtggatgtcggacatggattccggtagttcaaggcagtatgctgtgggtcctaccctgccaatgatgggatagggaccgacgaatcgcggtgctagctttccttttacctagaacctcctgacaccacgcattggagaaaccttgaggtagacgaagtctccttcctcaaatctgagttccctccgtttgttgtccgcataactcttctgccgactctgagcttcaagtaaccttctgcggattagagcaactttctcttccgc

SEQ ID NO: 66943 - DNA, 448 bp, Zea Mays
cagaagccttttgcaccttcggcagttttgcctctgtcggagggctcagaatttttggcatttttattatttcttcaatctttggctcttcagccttatcaaccttatcttcaactggctcgactgtatgcgccttcggcactacggtcggctcttcagcgctctgtgcaatcggagcagtttgtgttgcttcggctgctgaagagcaccctgcgccaaattcaggcactgcggccggctcaatataacacggtcgatgggttagaaccttcacctttttgctcttcggcataggctcagctggggtgaccgaagcagcaatcttcctctttttctcttgccctcacagcgggtagcggtaataagggtatacgaagccaatagcatcaaataccctgtttaatcttttcttgccccgacctccaaaggctgtggacagagcattatc

SEQ ID NO: 66944 - DNA, 840 bp, Zea Mays
atcggaaacaaagagaaggacaattcatcacgttgtagttttcagtgtcgtgcgaatctagcgacagatgtctcaggaaaatacaagaggcagaaagagtgatctggccggcctggatcatcctgcatatatcatacaagcaatcataatgtcggtaggcccccctactaccacggacatatgtgtgtgtgtgttcgtatttattcagtgtaagaaagtaagtaatgcagtagtcatacgattgtcagtttggattgccggacagtacgtagtttagtacgtatgtccatgcatcgttcaatggtagactgaatttagattaatcacgaaattataacaagttatatgcactaattagtcatcattagtttttgctattagactataattagttgatatccaagagccttttaatcgatgtttaaaatatagactagtaaaccttaactatccaaacaggccggactttatcacatggaagaaaagtcgcaaagacggcgtccaattacgtcttttttttatttgcaatgatccacagcagaaattaaaccgaccgttactgtgccagattcttctcaaaacataactgaaatagcaaaagcctgggaattactctcacgagttgaatttgggtaatgtgcttgggcagtatatgaatgctgtatagacggggaccgcctaatgtcaggtgacaagacaatgatgatacgattcctaagtcccatcctggcatctggtcatctggagctaagagagggtacactcacaagtgtgtggatatatatgcagggcaggagtccaggaccatgtggaatgtgcatttgtgtctactaattattg

SEQ ID NO: 66945 - DNA, 652 bp, Zea Mays
ccgtgagaaagccgaagagtctcgtaatgtatgtgttgcgttggccacagatgggttcaatccctatggaatgagcgctgccccgtacacatgttggcccatgtttgttatcccaatcaatctccccctggtgtgtgctttcaaaggcataacatatttgtgtcgttgataattcccggacacccggggaataaaatgggcgtggacatggagcctctgattgatgagttggtacgtgtttgggagaaaggggtatggatgtatgaccgagctacgaagacaaacttcaaaatgcatgtttggtactagtactccatgcatgacttaccggcgaatgtgctattatgcgcctggtgtgttcacggtaaattcccatgcctagtttgcaaggaagctcttaggttcatttggttgaagaagggtgacaaatattcgtcgttcgataaacatcgacaatttctccctcctgaccatccatttcgcctagacatcaagaactttaccaaaggtgtcgtattgatagaccgcccacctgcaatgatgactggtgtcgaaattcgtcaacaaatagatgagctcgtggtcaatccagaaggtggatttgtgggatatggtgagcagcatatgtggacacataagtcaggcctaactc

SEQ ID NO: 66946 - DNA, 722 bp, Zea Mays
cacaaatttagctcccctcgccgccggtgaccctctctctgtcaccacgattcgtgctctctagcatggagattatcacggcagggtaaaaatcttggcaccggataggctcggacccggtcgacggtgagctcatcgtacccacttgggctgtggtcgggcaaagtggtcctcgccggagtaggccgccaaccaaccgtgcgccacgtgccttagggcgttaccacatcatagtataccactgaagcatggctgttcatcgtcagtgaccttgccacggtgaaatccacgaatcctatgcgccagtgctctcccctctctccagccgccagcacgccatgcccaaattaggagccaccgccctcgggccctataaattaagcatgccatcaactccactaggtaatcacacacccaacacaccagcccatgcctcaaattatccaccagagcgcttcaatttggtatttccaccaaattagtcaagaacaccgccatgtgagtgctcaccgtggctagctcgctacaggtccgttcacgacctcctcgttctcgtttccaatccctgtgtgttgtagatgcttatcaacccggccaattgaactagaccaccatagatcaccgggaacacctcggttcatccgcagtttgtgccatcaccgtggacagagtgattacgggctagaactccacaattgagtgagggattagtgtcgccgagg

SEQ ID NO: 66947 - DNA, 1071 bp, Zea Mays
caaaaacctattgggttccttttttccctctcctttaacagttcaataatgtacatattagtgacctgcaagcagtaaaaatcacaatattagaagatagcggtagggatcctggcatcacatattacagctacagtttaggtttttgcaacattatagccacatctaccgaagacaagcagcttttatattaatcactttttgcctcccactatgactgtccagaggtacctaatgcttatgtattgaagaaatggtatttcaaaaacctattgggttcctttttccctctcctttaacagttcaatgtacatattagtgacctgcaaggagtaaaaatcacaatattagaagatagcagtagggatcctagcatcacatattactgctacagtttaggttttttacaacattatagctacatctaccaaagacaagcagctcttattgcttaattacttttctgggatgtatccacaattctgaaccttctagcttttcggtagatatctacttagaatttaagttttgaggatcttatttactagattagacttcagcaatagacattaatttagaatacccaatttattgcaatctaattatccatcgcataactctttttcaatgtctaccttatatacctctgctcgcgtggacaagatattgctaaaggaggtgctcgcagggaggaggacctcaacgtggtgggcatactttgcaggttgaattgtttctaaccttattaaagtctcattcttgtaacatgaaagtcatatatagttttctgaatgggacatattttaactaaacgaaacaatgtttaacacacaaattacttgtttagagcctcctctcgttcataaagattgtccacgtttctaagcaaactactctaatttcatatattctgttctaggtcgaatagaatttcaggtattccttaattctttacacagttcaatttaaaattatgtctcaggctctcagcttcatatgtcgggtaaacttccacactctcacttatcttgtgctattcaagcttgcatctttctatgccctttgattttg

SEQ ID NO: 66948 - DNA, 1231 bp, Zea Mays
cagacagagaaccatagagctaaggacacttgacggaaggcaattacacatgctcaacgagacctaaaggcctagaggacggagccaaggcttagcgtaggctccaaaccagtagtcttttaggcccaccctcgcataagaggtttgagagatcttcttccctccctctctcgcttgtaacctgcttgtaacccatattacgagcatcgagtaacaaagatgtcggtagcgtgagccaccaaagactggatgtagggacgttctgtccgaaccactataaacgttgcacccaccgagcacaccaatcgaagcatagaaccagcacatagaaatttacttgttagagcagaggtttgaaacaccgacagttggtgcgccaggtaggggtcctgtgcgttctcgacgaactcttcaggctccagatggccgccgcgacgccgatcggttcctctaaacgacaatctactctgggaaccttaacttcgtcttctacgatgaaggggaaagggtcaaggccctggaagcctgaccccttcatcctaggagtctcaacgctatgacgtggtcctgcggtgacccccatgccgttctcactctcagagtgattgatcgcttcaggagcctcgacttcatcatcgacaaagatgacgagatggtccaagcgtcacccacctgaccttcaccgcccaaaaacccgaacatcgttgtggaagcactcggcggcctcaaccttaccctacaggggcaaggtacagagcagggattgtccttgccctccaaggcctacaaaataaggcgacacattgcaacccatatgggccctgacctgtcatatgacgatctgcgagccttcttctcatcctacgtggatcttttcacatggtatgacgaggaaaggttgccttgccatgatgactctagtagcagccctcacacgtttccacctcactagtgccatgctccgggggtgatcgtggcccagagccacctcccaactaccgatgacttggagtttgtcgggatagtcgaaggtggtggatacctcatttttgatgccctttgctcaggctcaggctcggaccttgtctccccaacaagcagtgaggacagacctcccaacgatgaggaaaatgaaggacaccttatcctcgcgacccatgtcccccctagaaggacatgcgttgtcggtgacactagcaaactagggtgctacatgaggcaagaccctaag

SEQ ID NO: 66949 - DNA, 1025 bp, Zea Mays
agcttcacttctgaggtgcgggtctttcggacagccaaatcaagaatcttaactggcttctctcggtactgaagatctttctgaatctgcactgcctcttctttgatgtgactttttggtgcttgcaggcatttgcggagctgggatacgtgaaacacattgtggatgtcagacatggactctggtagttcaagacggtatgctacgggtcccactctgccaatgatgggatagggaccgacgaatcgcggtgctagttttcctttcacttggaacctcctgacaccacgcatcggggagaccttgaggtagatgaagtctccttcttcaaatctgagctctctccgcctattgtccgcataactcttctaccgactctgagcttcaagtaatctcctgcggatcagggcaactttctcttctgcctctttgacaaaggcaggtccttctagtgcttttcccctacgttggaccacatgagaggtgtctggcattttcgtccatacaatgcttcgaatggtgacatcttgatgctggcctgatagctgttgttgtatgagaactctgcgtagggtagactggattcccaacttctatcgaatgctagcacacatgctcttaatagatcttcgaggactttgttaactctttctgtctgcccgtctgtctgagggtgataagcggtgctgaaatctagcttggtgcccatcgctttttgaaggcttatccagaatttggaggtgaactgggttcccctatctgacactatctttcttgggatgccatggagtctgactatctctttgagataaatttgggcaagggtggctcctccaaaggtagtttttactagaatgaaatgggctaccttggtgaggcgatctattattacccagatagagtcattccttttttgcgtccggggtagtccggttactaaatccatgcctatttcttcccacttccattcaggcacggggaggggttgtaataggcctgcaggtttttggtgctcggccttcgtc

SEQ ID NO: 66950 - DNA, 284 bp, Zea Mays
tgacattgtagtcaaatcgactgagtttagttctcatatagctgatttgtgcaacgcctttgataaaatgcgtcggtatggtttgaaaatgaacccacgtaaatgtgcttttggggtgtcgactggtaagtttttaggatttgtcatccatgaacatggcatagagatagaccctgactgaattaagtctattcggagtgtgggacctccgacctgtaaggtcgaagtgcagaagtttctcggcaaggtgaattatttacgaaggtttatttctaacctagccg

SEQ ID NO: 66951 - DNA, 536 bp, Zea Mays
gtcatcgtatatgtgcaaatggctaatttgatcaacaaaaatgatactcgatttttaaaaaaacaaaaaatacgacattggtagcatataagtgagtcatggaataaaatgcatttctgggttgccaaaagactttagccaaacaaataagtagagcatagtttgcagccgtgcggtgtagcaaaaggtttaacaatgggcagttgatatatacaaaagagtaggtttttcttctgccactacacagtacaagttgctaaggatgaacatcaggggaggaaaggtaacagacacgattttaagtgagatgcattcacgttgaccgccagcatatcaaaagcgtcataggcgtagcatcctgatcaaagttaacttgaaatacagttagacaatattaccaaaagaatacacagagtaaaaaattatacaaaatcgtgtgtgtgcccggacaagagagcgagactcaggacgacggtagatctggtctctaaaaagcgaagagaggacagggcgtgtaggagaagcacgtagtaaaa

SEQ ID NO: 66952 - DNA, 580 bp, Zea Mays
ttcaaaattattcttcatactatttatgcaatgctcaacttcttcgtccgtctttccatttaactcttcattgtctttgccgattctgaaagtgtggctttcctcacatatcaatattgggttcagatacctaatccttttaccggcattagcatcgggcttggcaccgtacaggatctcttgttggtcatgttgcattctacaagtcacacgtgcgtgtgtcagatattgaaaattaataacacatagatgtggaaatatgagtgacacttacagtgcaaacagagtcacaagttgcacgtcgagtttaagaaggttcatcattaaccacatatcctcgaatgcaagaaaggccttttggtccgaaccaataaaaagcatggtctggtatatgcacactaatggtgtcaatgccaactgatgatgcacgcatgtaccagtcatgcaaccttttaataccagcaaggaccttcctcagtttctcaagagttagtagaggtctggccggcacataatgtttaggcacatttttataatctaccttagttggcatatttatctttgcggccattgccttagc

SEQ ID NO: 66953 - DNA, 603 bp, Zea Mays
aagaagatggctttgggtaggtttaccaatgattgatcaggctcataatccactaattaatagttttaaatttaaaaatgcccaactgagtgtaccaacagatattttaaaaatcactggcataaatatttaattcagataacaaatatgaagcatattatagacataatcaacacccgaagagattaaaaacagcatgtcatgtttctgaagttgcaagcattggaaaatcatgttgattttccaaggagatatctcaaatatgtcgaattttctcatccccactgtcattttcctaacatcaatacaacccgaaggggcgaggatggctgacggcagcaaatgaatctaatgttacttgaacccttcatacatcaatgcatctggtgcggaaggggcgaggatggctgacggcagcaaatgcgaacgcggggatccgaaagcaagggtagaatgatcactccggaagcaaaaaactgaaaagaaaataaaaagaagttaaaagtactctaaatactattttagcaaaatagtccacaaagttatattataaataatctaatattacttgaacccttcatacatcagcactgaatcttaaat

SEQ ID NO: 66954 - DNA, 357 bp, Zea Mays
cgaggatatgatgtccgagccgactaccgatgacgtgatggtcgtttgttcagatgttccagacggcggactagaggtatcccgagcggtgtctcgcgcatcgtcgtctttggtgggcagtcttcaatgccaagatgctggcccaagttgcccgactcccatggaggtgacggaggagccctcagccttagagatggctactacagaagatccagcatccgagggtggtgctggcagttacccagcccccgagggtgttgccggtagtgatccggctctagtgggtagcgcaagctgcaacccagcccccgagggtgttcaggtgggctctccttcccacacctccatggacgtcca

SEQ ID NO: 66955 - DNA, 767 bp, Zea Mays
aaataatgttgtagttctaattcagagggtgtatatttgatagggtggtattttggataagatgtttgtgaatcatcgacaattgtgtgccatatgtgttgaaaaattcttttttatcttttatttggcaatatgttagcattatgacaaatagattgcgtagttcaaatgatgttgcccaattagttgcttcttgatatgtgcgataccactcattgtcatcgtctagtaatcctctaactgcgcaagcctctttaaaggtttggtataaaacaccattatacgttcgtatatcttcatagtttttagcacctttaacaatcattagaagcattattaaatagaatctttcaccttcagtagggtttacataatagagccttccaattttgaaaccatgttgtcttttcttccattgtcttttttctccaacccaacgccattgtttggggaactcatagtatgttaattcttttgcatcttcatattgcttatttgcattaaactattcagttagcattgtttttctatactttggatttttagctatgtctaccaatttatcatttgatttcatcttaatgatattcatcaatggtagatgaactggcagtctttctacaggtggccaatggtaatgtatctcgtatcctaataacctccaaagagcttcttgctcacatatatatctgcagtctagatattcttgtatctcatctatagtttctgcttctttgtttacatgtgattcttctcctttttggatt

SEQ ID NO: 66956 - DNA, 909 bp, Zea Mays
tgccaagctgctttcaacaccgtatgtacctatattggcacaagagacttagttcaagagcatattgcgtataaagtatggcctcttgcaagtgaatgggaaatgccgaaggaagccgccgctggctccagccagggtggcctggtttatttgaagtatacttttcggtttagaaactaatttgatgagccaaatggtgattggctggatgctatagaggcaacaagtgagaaactacttggagcgtattcgaaggcagaagacgaagctatgacagctgccttcagcgctcgtggcaagaagaggttgaatagagtttttgatgttattgggttcgcttacccggactactgttatgtcgtgcaaaggcaagggagaaaaaggaaggtcactgcttcgacatctattggtgcaacgaaaacaaagaaaatgaaggtcttgacacgtaggccgaggcgcatcgaaacaaccgatgtgccgaagctaacttaaagagcggaaacgacctccctagccacaaaggctgcttctgctatgcctattgaagctattgcagactcggccagagagcaggaattagaaaaggtagcagagaagatgccagaacaacctaagatgatgatgacagtactgccaaagctgtcagctacaacaggaactccaaggaagaggaggatgactagtgttttggaagctgttccataatctatgaaaacatcgcctccttcgtccgtcgaagcgtctagcagcaaaggtgaagatgtcacagagatgatctcggccagtacttctacttatgtcgaggcgggacctttggaaactgcatcagaaaatcttgtggaagagagtcgtccagagaaaccctcgacacctgctcccgaagcaccttccaagagtgatttgaatttt

SEQ ID NO: 66957 - DNA, 583 bp, Zea Mays
ctattttatctgaagttttgaacctcaccttttctctattgttcgaaactttgaccttagttttgaatacgacgagggatcaaaggtaggatcgaaaaactctgcaaatcgggccggagcgataacaaataaataaataaaaataaaaccccactattgggatttagggttccacggcggtccagatactaccagattccccctacccccgacatgacatccgtggccccccagctatttcaacctgcgtgcgcccaagatcgaccgaccgatgactcatcgtccaatagtaaaaagcacataaatatttcaagaatatgaaaaactaaaaccgaagcatacacataggtgcattatttgcaactgtccttggcacatcatccatctgctgcaagcctgcaacgtactgtacctatcgctggagagactacagtaagagaggcgagaaatccagccagccagcaccgagggcatgctgtgcacagtgcagggcattcgggccccagaggcctttgaatgagggcatgcatgagccgcatctatgcaagcaatcttttaaacgatatacgtacccaaaccccgg

SEQ ID NO: 66958 - DNA, 692 bp, Zea Mays
gcagtcgggccagcaccgttgaccgcaaccctggattgtcgcagagcggcgaaatgccctgaggaggcatcaaggattcggggataaaggcctcaccagtgatccccctcaccacaatttccaactcctcccaggtcagatcagtcccaggcccgcgctggatcctaccaatgtcgctggggccggtaaaccaacaacacagacgcggcctcccctgcagcggcatgactcggcgcttcaggaaatccccgagtacgtgcattgaggtcaggccaccaaccgccagttccctaatcctgtccaggacaagctcgaactccggcactaggcatggttttaccctccattgcttccgctcgaggctaggcccgtcactcggaagggtaaggcggtcactgacctcagcactggcgatcacccagtcacttcgccagttctcccacctcgcaccgccaagggaggcgatgtaggtcactgtcggatctgtccttgactggaagtagtaggccctgaggtgatctttgccattcccagatctcaccagcatgaaaaactggcgaaaaagggaagtacaagccgccactcccacaaacatctcacagaagtggacaaagatggccacctggaggatggagtggggtgtgaggtgctggagttgaagcccgaactcctccagcagcagcaggaagaac

SEQ ID NO: 66959 - DNA, 976 bp, Zea Mays
atttcattttatttgaatttaaagatcaaattcaaatttaaatctagaaaatggaaaaaataaaacagtgaaccacgtgacctagaggtcattcatctcaatagcaagcgtgcggccgcactctcccctaccctctcgctaacacccggaccccgcttgtcaatgcttccctctcgtactctgggcctgtgacgctgaccactaggacccatttgtcttcccttacctcttgtgctaattgttgttgttcacagcagcgcgcaccgccgctaaaatcgcccctgcaaggctcgatcggactttctgtcactatcaagcaatggtggggttctcacccaacatatacatcccttatccccaccctattcctcctggatcgacaccccttaatgccaagaagatcacggcggctcccatcactcccccagtcacgctactctcgttgttgctccctccttccaattaatggcacagagctatataagctgccctagcatgctctactcacctcagatcaagctcctagccactcgatcaccctgtccattcacccagtcccattaccattgctcataagctccccagaagtgttttgcttccatctgaggcccttcgtctccaacactgtcaccttcttcttatgtttgtttgggacacccgtgatgcaccccggaggaatctctaccgacatatatgccctagacccatgataacctaacctcatagtgccctcactaaagtcgatcgctacacttcatcacatgttgcccttctcttcactactagtagcttcacataacggtaatgaacatcccgaactctttctcaggaccgattatgcctagaccctaaggcaattggtcgatgtagttacttcgagctgtcacgagcaccatcctcgtcggtcgtgctcctcccattgatccccatcgccaaacctagctcagaatgttcgttgtggccaaatatggtatgg

SEQ ID NO: 66960 - DNA, 352 bp, Zea Mays
cgagggagagagagtaccataccttcgaaccagaggtggatcttgatggtagttagggtcgcagtgggtgagatgagatcataacgttgtgcaccttcgagttggctcgtcactccttctcttccttgggcattagagtctaagcagagcattgatagtcgacgacgtaaaaatgttaagatctacagaagccacatgtaggttaaacgattttcgatcactagggcgctagatgcgagatctagtcccttctgagtttggtaagtagggttttgcggaagtacgagtgtgtcggctttattctctttaatatagtgcttgtgactaggagctgaaagtcacctaaagagga

SEQ ID NO: 66961 - DNA, 283 bp, Zea Mays
gagcggttgaatacagtaattcagtcagctagatatcagcagaccctgaggcgctatcatgataagactatacgacatcgatccttcatagtgggagatttggtccttcgccgaattctaacgagagaaggacgacacaaattatcaccgctatgggaggggcctttcatagtgtcggaggtcactcgaccaggatcatatcggcttactcaaatggatggcacggaagtagggaattcatggaatatagagcacctcaggaagttttacccttagcaagaac

SEQ ID NO: 66962 - DNA, 674 bp, Zea Mays
cacagtttacccctagattttggaaaagtttttatgagaatatggatacaaagttgaattttagtttggcttaccatcctcaaactgatggataaactgaaaggactaatcaagtattggaggacatgttgagagcttgtgcccttcagcattgtagtagttgggacaagagtctaccttatgctgaattctcatataataatagttaccaggccagtctgaagatgttaccgttcgaggctccatatggcaggaagtgcaggactcctctatttttggaccagactactagaggaagacagttctttggacctaaacttattcaagaagcagaagaataagtccgtataattcgagagaatttaagggtggctcaaaccaggcaaaagagctacgctgataatagaaggaggccactggaaatttgaggaaggtgattatgtgtacctcaaggtgtcaccacttcgtggaatgaggagatttaaagttaagggcaaattgtcccctcgctttattggaccattcaaagtttttaggcgagttggagagatagcctatcaactcgagctacctgataatctatcggatgtgcataatgtgttccacgtatctcaactgaagaagtgtctccatgttcctgaggaacagttaccaacggaagagctcagtgttca

SEQ ID NO: 66963 - DNA, 354 bp, Zea Mays
tatagtttccaactctgttccttgttcctctgttgctccaagtttctggtgcgtggttgaaaaatgaaaaatgaatgtgccattgccccccttcagaacacagaccacatgcttatatccaataaccttcttctccctctgttgcttgtttgtcccttgctcccatcctacaagatacataaagttcattgttaagactagatgagcttcagcaagcataaattggttgctcttgaaaaaaatcacaagatggttaagactagatgattttgaggaccttcggcaagggttacccccaacagtagcccctcacgggattagttcattttttccataacgtgctcagaccgcaga

SEQ ID NO: 66964 - DNA, 601 bp, Zea Mays
ctcttcagtcttcgtttccctcgagcaccgaaggcagtatacatagcttcgtcctcagccttcgtatagcctcctaagaattcatcacttgttgcttcaatagaatctaaccaatcatcatctggctcaccaaattgattcctaaatcgataagtgtatttcaggtgaaccaaactgctctttctggcttctgaatcagcttcaacactcttcagcatttcccattcggcagccaggagccataccttgaaggctatgtgttcctgcactaagtctctagaactaatgtagctgcatacaacattgaatgccaccaggcaaccttgtgatttatccgcattcacaatagcaggccttctcagtccgaagctggatcagataggccactagattacatcttttatgtcaattctttcactcaggtcattcttcacataaaaccaatgtttcatccatgaacctggccattttttctgaaaggttggcacatgatgccttgcatcagaccggtatatgaaggtgtaacacccaaagttattatgatactgcttcttttcggtggccttcgtctgataggaaaactcgtgaatattacaaaaac

SEQ ID NO: 66965 - DNA, 846 bp, Zea Mays
gagaagcttatgactatggcgatgagtcccctgaagttgaacttcggcatgacaaggctattatgcaacattcaactcggatcccctgccaattagctgaagtaaagttcagggttatggcagagcacattagtactcaagatttggtgcaagaatatctagctaacaaaacctttccaacatcgggtgggtggggaatgccgaagaagaaggatgaaaggaaaattttgagcttgtttggttgccttatcggttcaagtttcagaacactttcagcggcccctgtgccaaatgattggaaatgatagagataatgtgcaatgagatcctcaaaaactatacgaagaaagaggatcaattgatgacagttgccttcggtactcggaagaaacgaaggctgaattgggtaatggacgcccttggcttcaagtacccggactatgaaagccttgccgaagaagctgggggaacgaagaaaaggagaattgtaagcattttgaaaaggcaagcaatctgatccattgaaaaggacaagcagagggctgcttccaagaaacaaaaaaattcagcggagccgaagctttcggctcccaaaaagcgaaagttttcaactctggcccctatcgaggcgaaggtaaaagattcaccaaagaagattgctagaacctctttgtcatattccatcgacgcaacggaaatcctgaaggtaatgactgaaacctttttgtttgctatcctaagtcctctgaggtcatatctaactagcttattgcagtcaaaggagaagggggttgaaaaggtgtggaagaggagaagaagactgcttcagcgactagaggaaatgag

SEQ ID NO: 66966 - DNA, 496 bp, Zea Mays
atttgcgactcctctgtttcctatttctttttttggtaccgttgagtgggcacttataacttgtttgtctgtgaccaagttctccacattttttgcatcgtatagggcctcttttcatttgcctaccaccttctttattacttgtcttaggtttactcccaccttcgagacaacctttcattcgtaatttcctttgcctaccaacacctcgttttgctaaaggtccttttacatcagggtccatatcaacatgaggccactgtgaacgatcccttataggatagatgactctacagtatgcttctctaaacttttgtactgaataaaaatcatgcacatagttttcgatcctttcacttctaaaactagtgatgacaactatggcatggtcacaaggcttcccagtgtgctgccactccagacatgagcactcttgtgctcctagatcaacaatatgtctttcttgtttggggctattatcaaaaacctcagcatg

SEQ ID NO: 66967 - DNA, 1068 bp, Zea Mays
ggtgatactaaccttatgctgaagttcaatgaagcaattagcaacttagacttgattgaaattcccctacacgggctaacgtacacctggtcgaacagacagcgggaacctcttcttcagaggctggattggtttttcatctctcaagaatggtcgattgtctacccggactcccatgctaagacaatgtcgcgagatatctccgatcatgttccttgtttggtttcctttaagtctagaattcctaaacctaagttatttcggtttgagaacttctggcttgaattggatggtttcatgaatcttttccaaactacatggaatgggctccctagcatacccgacaaagctaaaaacctgactgccaagttcaagtatgtaagaaaagttctgaaagattggcagagatcgctgccaaaaattgataaaacggtgaagaacatcaagctgctaattgagcttattgacaacatggaagagcatcgggatctatctattgaggaatggaatttcagagaaattctgcgacaaaaggtgaccgaattgcttaacattcagaaaatctattggaagcagcgtgcggctattaggtgggttactgatggagacatttgctctcacttctttcacgcccatgccaccattaggcacaggaaaaattcaattgctaccttgactgacgacaatgggatcactttcctcgagcatgaacataaatctggtcttctctgggacgctttcaagtgcagattgggttcgtctgacttttcaggcattggttttgacctctcagaacttttaaccagtaatgagcaacttcacgagttagactcaccgtttactaaattggagatcgatagcattataaaacttttaccttcggataaatctccgggccccgatggtttcaatacaaattttatcaagaagtgttggcatgtcattgctccagatttctatgatctttgtgataaattctatcatggtgaggtctgccttagaagtatcaacgggtccttcattgttttgatcccgaagatggagaatcctcagaaggtgggggattac

SEQ ID NO: 66968 - DNA, 622 bp, Zea Mays
cgagtgtgcaacaaggtattccgcggacgtcgatgcgcgagtaggcgctaggtggaggaccatggggcctagggtggtagacggacagctaagcggtggtggcgcctcagcaacgttggacagcaattccgtggcgattttgtggtgctaaggtggactgaggcgatgaggaagcggtcggacctgcgcggcgggcgaaactgtgactcaggaaaagaaagttgatgtgtgggaatgataaactgcacaggctgcacgtcaaaaagagagctcgtcaccatgctgcttcccgatttcatatccatgttccggcctcagtgctgctcctcgatctgttcccgccagacaccattcctgacatcaagttgcagttcctccccccgcccggctgctgtgacctcttcctccctccgtgtgccacggtgagccgtaatccaaaggccagacctcctcgttgccagttgtcgtgacctgaagctaggcaagatctcctgttctcctcacgcctccgctctcctctgctcctctctcctttttctccctgtcatcttcctcctctgtagtccttcagtccttcctcctctgctcctctataaatttcagaggcatattattaaatcct

SEQ ID NO: 66969 - DNA, 550 bp, Zea Mays
ctcaacctgggttatacaagctggtagcgttcaatccaacgactcggaaagaatcagtgacctactagggctatggtacttgcaccaatttggacagaggcaacccgtaacggccggtcgacatgaacaatgtccacgacggtgttcccgggcgacaacgcggcgttccctaagctatggcacggtagcgttcaattggccgagaccgggagcttcactagcactagaggatgcaaaaacacggatcagagggacatgaactaacctagagaagactggccacgacgagatgcctcacgacggcgatggtgatcgagttgggggaaatcccgaattcttgggttgcggtggatggattgaggcgagaagtggtgcactgagcgtgtaacaagagggcggaacagggagggcacttaatttatatagagcaaccacaattgcaacgaatttgggcgaagatgagctcgcgacggtgaagagatgagtcaccgaagttcaactgtcgtggcgctcaatggggtaaggtctcggggcagtaaatgggctgtcc

SEQ ID NO: 66970 - DNA, 1214 bp, Zea Mays
tcaatttggagttaaattcatcaagttatgaatttcctaagtttgggacattattttgcattaaaaagaatttctgtattaaatttaatagatttctgagttacttggactgcggccactatttaacagaaacccagggggttctgcgcaaaagccaccaagactcagaactcccccagtgtggactgcgggttgtttatatggttttacagggtctctttagcaaatattacatcgcgaaggggtaccggtgaagatcggtcgtccgatcactgatcaagggcccatattagatcgcacatccctgcaaaccggtacgactcggtatccttggatcataaatgaacggcctagattttatgaggcttgatctgcatcggacggccgagaagggttcaggccgaaccgatacccaagatttaatccctgccctacaactctgatctaacgaccatccacacgtcttcaacctccagacgcacacaatggccgcgcagggtgacagccgctgggctacctcgaggaggagcacagccatcagctcgccccacacgcgggacaggcgtcgaggcagcagcggacgcctggccgttgcccaaggcgagagcacacccaggtaaaaaaatatcgttgcatggacataactactcctgacctttacgaatctcgacggagggggaggtacctgcacgattcggtggtggccaggcccaggctttcccgaaatgatggcgtcgatgttgctacccacagtacaagcagcgtttgcggagtagacgaactccggcgagatcctccatggcacaggttcgatctccagagccggcgcccgggaccctggtgacggtgtgtccgattcctttggtggctgcttttagttctctctcggcaagggtacgagcggtagatggtgatggctgtatgcctcaagtatttatgcaccagagggggagatcggctggtggtacctggctagcatcttgtgcggcatgcagcgatttggtcgcaaggttgttacgaggatagagatgctacagcagagccccacatgtccacgagccggtgcccgcgagcgtccttccgcccgacatgcatggccctgtacgtgccgatagcaaacggatgcatgcaagagaattcaacgaccaatttgctagcgaactagagatccaacgagatgacctcatacctgatgtcatgctaatacatactcc

SEQ ID NO: 66971 - DNA, 1069 bp, Zea Mays
ctataacctcctgactgaccaagtccctgtcgagcaagaccacgaggcggagcgaccgaccaataacctaccgagcaagtctgcgaggcagggcggccaaatgagtccccgctgagcaagtcagcaaggcgaagctacaagtccccaacgagaaagtcagcgaggcgaagttcccaaccaagtccgcgcgcccatgaagcagagattcgaatctagtggtgcaaacccgcactcacgacaagacgcgtcattaccacacacgcctgaacgtgcgcacactgcacaagacgagccctggggagtcatcatcagcatgcttgtactccctgcaagatcaagtccccgtagaacaagaacacaaggcggggcgaccgaccaaggtccccactgagcaagtctatgagacggagatccaagtcctacgctacaagtccacgtcgactaagacaagatgtgtcaccccaggccacgaacaaacataagaatggcaaactgagggcacgccgaggggttgctttcgacaggactacacctcctcaggtacgaccataggtgcacacctaatgccctaaggggctggtcgaccctattcacagaggaccttagcaccagagcttctacagtgacccgaacatcggataatacgtagcaaatacaccataacgggtgtacatctacgaacaccggtgagtaacgcgggctcatgacaatgggtgagaccgcacgacacacgactgcaccgtatgactgacctgcagagccccacgcactgctgcaaggatgtcagcaggaggctcgctacagggacccatatgacgagcggatggggcagtacgactacgcatgaacctacagacaacagaccaagatccctccagtagaataccagtccccactatgaagtctggtccttaagttataaaaggggagggctccctctttcttcacacacgagcacaccaattgtaacacgcctcctagcaaaattacgatcaacactacactagattagggcgcgagcctggaccagtaaagcccactatctcaatcacatcgctcgagtcccggc

SEQ ID NO: 66972 - DNA, 590 bp, Zea Mays
gagttagtgagacagactgcataaaaggcttgcatgacattaagataaagagctaacacaacattttgatttccaatataagattagttaaggatgatttccgattctgcttagcttcatcatactacaagagtgtacaagtgttataatccttaacaaagatcttttgaactttatagatttcagagcatgatatccaaatcatctttctgatccaacaatatttctttgagcacaaattgagataaagacttgagcgggactttagggcaggtagaatagagcatcacattgtttgcatatagcagatgacaccatattttattctctttataaagaggcaaaacacaataggtgcgaaagattctccaaatttattcatatatcacttagcacaattacaattcttgaaaggggcaacaccttgacatttttttgtgaaacatactccttcttctcgctaaatgatatattattcttccttgttagatgcaccaatcagagctagaggtcgattgtcttcaactactattctttctccaaatggggtttccaaacacatggttctctcagtatgttggattactgcc

SEQ ID NO: 66973 - DNA, 315 bp, Zea Mays
tagcaattaacaaaacacatcatactggtgtaactttgaactctgttcagcatgatctgtgctcgttctcagttctagtagaagttctggaagctatgcctatttatgtgggtttagataagaaggtcctgcttctacttctacgaagtatctttctgaagttcaattgctgagatgttgggttgaatggaattgtagttgtagtgtagggtgtagcaatgggagtttgcttgacaatggtgatttgagtagtcctcctaacgcatatgatgcacctaacaattatggatgtaatcaatctaaataataacctag

SEQ ID NO: 66974 - DNA, 516 bp, Zea Mays
gttgattggaaaccagatcgtctgtgtgacatctccaccaaatcgatagttaccttcacttgacggaagatcgggcacccccgttcctatcaagtggtattcaaagactcaggtattaccatcaggattactctagtttagtttatgtttttcttcctataactctagaaaattgccatacaaaaaaattccgctatcctagaaccctgtttagccttgcaatttcgtttcagattgctttgttgagtttgtgtccgtgttcgagtcttgttgctggtttaggtcgtgttgtcatcgtagttcaactactccgtcgctgttatttgtttccgccgctatcccatccacctttcccagattacaagtcgagacaccacattactcgatttgccctcgctagccaccttgtgtgaactctcgccacgctagccctagattaggttgcaagccgccttgcatcgcagcccctccttgtttcatcatctggcgcttacctattgcttataccagggaggt

SEQ ID NO: 66975 - DNA, 652 bp, Zea Mays
taaatctgaagaacatacgagatgtgaatttgagcatggtactactcttgtggttacacaaatcttgagtgttcaaatgaaagaagctgaaattggacagcgacaatctttttcaaacgcgagccaaagtgcaagacaaagtagtaaaggtgatcattgatggagggagctgtcataatcttgtaagtcatgagatggttgaaaagcttggtctgaagttacagcgacaccctcatccatatcatgtccaatggttgaatgaatcaggagatatcaagattggttataaggtgaaagtttcattcaagattggagagtatgttgacacagtggagtgcgatgttgcacccatgtttgtgtgtcacttgctgctgggaagaccttggcaatatgaccgttattctcagcattatggaataacaaatcagtacacactagatctaaaagggagaaagtatgtactcaagcctatgacccctcaacaaatcatgtctgaacacttacaaaagaaaactgaaattagtacagcaagtagaggaggagaagagcaaaagaaattaagtgccatccacaattcggtgagtgagtgctacaagccaaattcaagagataaaaagaaggaagagggagaacatctagttatgctagccac

SEQ ID NO: 66976 - DNA, 609 bp, Zea Mays
cagcaagcggcatccattgccgcgttgcaacgtcatagtgagacccagttagatcgtgagcgtaggtggcgtcatggtgccaaggtaagatcctaccgatagcctacccatatactggtgtggactacgaggcaaggtagatgtactatgtgcaagatcctgatgaggctttatttggatactctagtatccatcccgatccacatgtattgagatgtattggggtgtaaagtatccagacaaagcatgaggcgacaagctgacaagtgacgaggaggtaaggtgacgttggtagcgcgcgagttaggtcacccaactgatcattcgatggcggaaggagcgagcgaaccatgagtgagctagcgctagaggaaagaatcctcggagggaagtgggctgagcagtggagcatcgaggaaaattagatcaaaacctaattttgattaaggtcaacacaagtaagaacacagatagatcacaacgttttggcagcttcaactacaaacttgactagagctaaaatcattgcgatacaagtaaatgccttcgttgaatgaaactacatcgctacaggttacttgtttgtaaggatcatctttgaagaaaaaa

SEQ ID NO: 66977 - DNA, 431 bp, Zea Mays
gaatttttgctcgaaagaataggctcctacctttgtaaaactgttctttagagttttggcgcattccaaggatatcttgtagcatcttttttggagtcgcggagctcttcgacattcttttgcacccttaatctttcaatttcgcttatttcgtgcttcacatttgcaacttcaaatttttcattaatttccgcaagcttcttcttcaaatcttcaacttcggccttgtgagctcggcttgtgcactaagtttggcttcggtagttttcagcctgtccactaaggaaaacaatatcttatccttctcgagagcttcattccttagtgaaatgacctctgacaaaagattcccaagagctatctgacagctctcgtcttctgcttccttttgggcctttaaagccttacttagaattaagccctaataataa

SEQ ID NO: 66978 - DNA, 459 bp, Zea Mays
ccaaaaggccccgtagtcgttgccccttccttctaaaagatgccaaaaaccagttgtctacgtgggtatcggaccgggaacaatctaaccccccacatctggccggtgccttttcagagctggctgacaccagacgttgtccggtgcacctctggactgggtgccacgttagctagtcgttggctagcgtgcgaccgagggagagagtcgttgacgacggtctggtgcaccaccggaccggttactgtagacagtctggtgaattttataattaaattcccaagactttgaagttcgactgtattagtggtctggtgcacatggacccggttcggtgcgccaggtcgccctgcgcaaaagtccagggcctctgtggacccgatccagtgaggcccagaacagcccaacttaggctattttgagcgtatattgttcaattctttttggctatttcttggg

SEQ ID NO: 66979 - DNA, 417 bp, Zea Mays
tgctcttcgggtaccctgaggcacttctttagttgagacacgtggaagacatcatgtacattcgcaagatggtcgggtagctctagttgataggcaacttcccccactcgctttaagatcaagaagggtccaataaagcaaggggacaacttccctttaactttaacccttcgcataccccaaattagtgacaccttcagatacacgtggtcaccctccttaaactctagtagtcttctccgggtatccgcatagcttttctgtcttgactgcgcagttctcaagttctcccttatcattcgtacttgttcttctgcctcctgtataatctctgacccaaagaactgcctttcaccagtctaatcccagtgagtcctgcattttctgccatatagagcctcaaacagggacatcttc

SEQ ID NO: 66980 - DNA, 717 bp, Zea Mays
cctcttctcctttgtggtagtcgtgaccaaaggactagcatgggggcaagtagacgtcgacgcatctgaagaactccttcactgttcgcctgacatggtttcgttgatgaccggctccccatctcaaccatgatggatcgtgggcggggtctgcggctaccgagaatatataggtgcggctttgtggttatcttctggtaagggccgaggatggcgcggttaactcggccttatagttcgagacagatacagtgatggatctgttaaggtgcgaacggcttgaaccggcagcaaagtctacggcgtgtatcaaggggcggttgcgcttgatcggctctaagcgtgggatgggagataggtcagacaaatgggcccacttgccattgacagcagcagctgaacgcgcgacgaagttctgtttagctgacaccatgtttattccatcatggcattggttgcgtcagttagaaaaaaaacaaacttactaacaggtcggcgctaggccatatccggtatagagaggctgcctccacatgtgctggaggatagccacgagagtcttccccacactgcttttttttatgttacgtcttcgtatctctatattgtatttcctatttcagttttctttctaattcaaattcctatttcaaattcagttcaatttgatatactagattcatttatcgatgcaacaaataaaaatctcaacaagat

SEQ ID NO: 66981 - DNA, 308 bp, Zea Mays
attgatttctgggcaggcaacactggtgtgaccatattggtgataggtggcggtggaagaggaagaggacctcaagaataactcctacctgttgaagtaacatcaaatttcttgaattcttagttcttggatacctccacattctcctcctacaattgggtaagcacaaaggcagtatcgagatccttggggcgttgtatcattacaatggatttaatatcatgtcttagaccatctaggaacaatgtagtgtaatataatggatcgttcatctcctggtaactattaagctggtcgacaagttgggc

SEQ ID NO: 66982 - DNA, 379 bp, Zea Mays
tggcggaaacatttatacttttcaaccttctgatggagattctccttgataatctgcactcccttgtcactgagctgggccatgatgatctggtcttgcaaggttggctcgacaaaaatgtgagacagagcaccagaaggaatcacttcaatttgcatcttgctcaactcatcacacaaggtgttaatgtgagcatccatcagaatacaattgcactgcaacttccgactcaaggcatctgctaccacattggctttcccggggtgataatgtacctccaggtcataatccttgatcagctctagccatcttctctgcctcatgttgagatcagcctgagtaaagatgtacttaaggctcttatgagtgaagatgttgc

SEQ ID NO: 66983 - DNA, 281 bp, Zea Mays
aaccacttgtgaatttcaaaaattgtagagttagaatctttgtgtttgatcaaaaccctcttattgcaaaattgttctcttataggggagaggtttcattatgggaaaaagggggagtttgtggcatttgatcaaatttactcttgaaagatctcttgatttgccaaaacaagtattttgatatagagataggaaaaagaattagttttgtgaaaataaaccaagtggtggcaaaagtgatccaaatatgccaaatcctatgtgagttaaattagtcttca

SEQ ID NO: 66984 - DNA, 277 bp, Zea Mays
gtcggatatccgacccgatggagctgggtatggatacatgttttgacccgtgggtcaaactcgaatccgacccgaagtcaggtgggcacgaattaggatattactttatacccgcgggttatccgttggatattcgaaaccgacccataatgtatttttggcctagcccatattacatatcaaagaacaaatcctaacaccataaaccccacacctaacgctcccaatttctcactgttggctgccccttatagccttgctggcttcctgcgctgtg

SEQ ID NO: 66985 - DNA, 1217 bp, Zea Mays
cctagatataccagtattgactaataaaaactcacgacagtttggttgaatttaacaggtatataatgctatctgtttcgctatttcttatctattgtttaccttctgtttccaactttgtatgcatggccaacatctgccacatttgacaattcatagaatcgccaatcttttaaaatgatctacacagttactgttgcacaatgcgagacagacaagcgatccatctatctagtacattccttcggatatcacttcactgttcagccttatgaacagattactgcgaagctcaagccgctggttaaaaaaagaggctccggatagtcattcatcaatggattctaacactatctgaatgacaacgtcatcaagaaggtcctccaccatcagatcctccatgtccaacgcggtgcactccgcgtcatataccaggttcatccagccgtcctttctcataaggtcatgtgccacaatgtcctccaccgtctggccttccttccaatgcaggctcaggtagcagctcaccttcgcccacacctcctcaaggacatggtaccccatgggaatgggtctggttcgcaggtcgaagcgtgagtgccatgggccgatgacgagtgaggagtcatagatgtccagcaggacctcgttgatgagatcaaacaggagcatgcgcctgacgatgctgtgaggttcatcgcttgccatgctgacctcctgacacgagcattctgcctcgtcaaagaccacagggctcactggctgattggacgcgtaccagtcgacatcgccgcagctgaaccctgatttcttgaggatgtccttgacatactggaaatcagcctcgttcttgtcactgacatagatgtgcaagggttctgcagcaccttgttcagaaaattcgtgtatgaagcggaagtccgaatccaaagcatcgttaggctgccctgacttgactaaccactcttcagcttcaagatcagcatccttggcaccagacagtttcgtcgccttaactaaccactcttcatcctcatggtcaataccattcatgacacgggagcgcttcagtggtgtgaccagccattcttcatcattgaaattggcagcatatgctcctgcggacagtggtggcttgactaaccagtcctcgtcctcaagctgcaagttttcgaactgtggctctgaatctaaaaattgtattgagaaaagaaaag

SEQ ID NO: 66986 - DNA, 413 bp, Zea Mays
acgatgtgccctctcggcatttaatgcgtccagtcctctccgctggcagacggcgtcagggtcatcctgcagacggcgcacctgtccagtctgttgtcaaatagtgcgcacgtgccatgcagcgcactgtgctcaccatcccttgtgcgagaagcttcccctgcacgccgagactatacaagatctcgggtgtcagggcgcaagaagatggctccagcaggagatatcagtggctacatccgctatgttcctgggcccacatgtcggggctcagcactcttgtacatgcccccctttagctataaaaggggaggcatgcggtgttacaaaggacaggctcacttagacccaagtgattctagacaactcaaactctcaagcaatacatcacacagtggagtagggtattacgc

SEQ ID NO: 66987 - DNA, 364 bp, Zea Mays
tccgatcggaacctacggttaggatttaacacagcgaaggggtatctgagatctaatcctaaccgtactctcacagatcgatggtcgccatagccttgcgttgatataccccacgcccgtagaaccacgacgagttgcggatccatggcgaaggagtgctccgatgagcaattctcgcgtcgattctaaccaatcgcgctcggtgtggccaaatacttcttcctagggacgcgactcagttcccagacctcgaccgaagactcggcggtgacgccgaccaaaagtagcgtgcgacggcacttttcctcacacatggccctggtggcgctcgacgatggtgcttccgcctcggatggggtgagga

SEQ ID NO: 66988 - DNA, 805 bp, Zea Mays
aaaacccctcagagacacagaagactatgaattgtggggcctcttctagcgaaataaccctggcttgcaccaacaatctagtaagcttagcattatccacttcccacatgatgaggcccctgaaggacctaatttcgttctggatgtgttctagcgtccagaagtctaatggggaccccctgaagcatcaaccaacactctgttgaaattcaaagcctagaaataccaggcttcattgtgcctaattaccgtgaaggtgaatccatgtgcttgttggggcctagagtaaccatattgtcctgatctaggacatataggaatctaaccaaaacctgaccaacatgcgacctttgaatgctctggatgctaagctgtttatgcaccactagataaccaataaccaactcttgaatgtccgtgaagggcaaagcatgctccgacagaggatgagtgaatcggcttccctcgaggtggtcgtccacgcgcagtcagagaagagagtgaatcggggtgtaggattaggtccacttgtcagaggcataacatttttgcgaaaccaagtatttggaggtatagttcacgtaatatccacgtatttgtggggaaacaagtcttgaggggatcctctaacgtggaaactcttcaatgattgtccatgattactgttaccaaagaagaaaccaaaattgtctcctgatagattagctaaattttgaggtgggccaccttggctggtcggatcatgggccttttcgacagccacactcgccagaatagtgggcttcaacatgaggatgtttaatgt

SEQ ID NO: 66989 - DNA, 450 bp, Zea Mays
atttctgtgggctgcaaacgtgcatgaaactgacgactagtaaatccgcctcgaagcacttatcgatggatatagccacaacctgatgaacagtttgggatatgtggtcaagaacgcgtgcgctgagctgctgctggaccagcagcttgcagtcgacgatacaatacaacgatgatgttgatacaactggcgactccacgtcgacatcaccattcgatggctttgccaaaccaacgagaaagttaagcatccgtgaccagctcaacggacggccaatgacatgagctccatgagttcacttcgatgctttgctgctcgaaaatatcttcataggcaactgacaccaacagcaacaactcagctaaaatcaggccactttagcatgggtaactgatttgagtctccagtttgcctctagtatgtgtaggaacttctaggtggttgaagcaa

SEQ ID NO: 66990 - DNA, 730 bp, Zea Mays
tgaattgtttaatgtttaaataattttatactcttttttattaatgctaatcagtgagctgttaatctcgtgtacagaatggcaggataaacaacacatcaatagcagaatggctgctaatctgctaatcagcctaatctgctgcctggtgaagtactgaagtggagtgctggtggctgctggtttctgcagttctgctaatcagcctaatcagtgagctgggcggtttctggctttctgctggtggccggtttctgctggagtgctgctgtgctggtggctggtggcctggtgcaggcgtgcagccgtgcaagtgcaatggtgctgggcgactgggcgtgttgcgtgtatctgtttgtgcatcttatattcttatctggtgtagtgtgttatgtgtatgtgtgatgccgtgatctactgaactactgagctgggcgtcagggcgtgtgcatctgtttcactgtttgtggctttgtgtcgtccgtgtctgtctgtactctggagtagtggagtgtatgcatgtgtgctgtactgtcatgtgctactgagcatgtatgttctgtttgctgtttttaaaattcggggaacacttgaatcttgagaacttgattgttttgtttgtgcgtctgctctggtggctgtgtttaaaatttaatttggttgtttcgggagtacccgatacccgaacccgaagtgtcgggtacccgaactttcgggtactatattaccc

SEQ ID NO: 66991 - DNA, 336 bp, Zea Mays
agaagatggtacttgaacatatcgctacaattatacctttggggatctaagtagcaatggaaggtaagaaaaccatatatctttgaaggaagagcgatcccgcaagcacgagagtgtctgtccagcaaaaggtgaaaatgcatgggcattgtacctctatttataggtgtagtgcgaaatataacttcgtataaaactacaacacatgaatattgggcctactgatggaaacatcatattttccttcaaaagacgtggtgcgcaagcgactcgatcacttattcacttctttgctgctccaaccgcgtcgaagaaccgaagcttccccgatcttcg

SEQ ID NO: 66992 - DNA, 425 bp, Zea Mays
caaccattggaaaacttagtggcttatatagattatcactacaaaacaataatcttacaggtaccattgaggaatggatcggaaagatgacaaatctacaatttttaacactacagtcaaacaacttcatagggaaaattccaccttcaattggcaatcttacacagttgatagatatcttctctgtagccaaaaacaatttatctggttttgtaccatctaacttctggaatcttaaaatatcgaagttggaccttagccataacaatttccaagggagcatacctgttcaatttagtaacttagaactcatctggctaaatctttcatcaaacaaatttagtggtgaaattcctggaactttaggacaacttgaacaaatacagaccattcaaatggaccaaaacattcttactggaaacatt

SEQ ID NO: 66993 - DNA, 489 bp, Zea Mays
cttggcggcacgacggaccgaattggggaaaattggtgattccctggctagggtggctaatcgggggtgagagcgggtgctatggcttcgcaatttagagacgaaggatggagctcggttgatttgaacggagagggtgaggatgtggtgaatttataggcgcagtgagccactatcatggccatggtgataaccattgccggtctttgctggcgatcaacggcggtgtcaagcgatatccattcttacgggcttgccaggtccccaccgcgatagtaacacggtcacatcggcgcagcgtggatgaacggaggggagcggcgccgatgaccggatatggccggaatgaggagtggccgcgtggcagccggagttattgctctccaccgcggcgatcttacccagaacaaaaggatcttcgtgcggagaggcttgctgatcgatcatcccgaccctgacgcaaatcgcgacggggattggtcatcggcg

SEQ ID NO: 66994 - DNA, 314 bp, Zea Mays
gcaaaaagggagttgactattgggatcgatggggggaatgacaggcgcagcgctcccctgcttcttcttcctaggcgccatgagacttcactaaggaacaaaatcaagcgcgagcccacagacgagcaagaatttcagaaaaatgtttgtggtggaaaaaaacagagttagggtttgttcaccaggaaactgtcagcgggtgtgtatatgcacacgctaagttgggcgcgctaagtcggacgatgtaagccgaataagttctagctgagtgaagtaagttagatagagtacataacagtcggagttatcaattg

SEQ ID NO: 66995 - DNA, 679 bp, Zea Mays
ctcgcgcgtccgcgcgcgcgctggcggatttgcggaaaagtcctcggggttttcactaactgggatccggtctctttactgttacccagggtcactgacaacttacgaaaaggtccttccactttcttttcttccccacgagtatccctggccacgacgtgcacgcggatcacccctggcataacccgtactggtcatggctggtattggctgctacggctagcgattggaaaggcattaccaactaacagagacctcggaacacacatcaatttgacacaaacgtactgagaacggcctgtccacgtgcacggcggaaaccgtgaccacgggcacgcgttcccgctcaaccggggctggattgagtaatcagatgccacggtgatcttcacaagcgaacggagttgcagaaacaacattcgatttgggcagagccttaccaaggtgatctgaccacggaacgcggagttttgtgcttgccggagccagaaaagggggaaactggggtcgcggcggctcggggcgaaattgggagatgggatcggggctataggaccgtaagagactgtgctttcaccgtgcgcaatcaatttgggcgaaggtggaaagggcagtgcgaatttgacttcgatttggttcactggtgtgcgtaatgaccgagccttgccgtgatccaggg

SEQ ID NO: 66996 - DNA, 660 bp, Zea Mays
caccggagtaatggcgccgccacggatccgcacaccttcgtgggcagggcgcagctcggcgtgattcacggtaaggactccttcccctgactcgcgttcatctctagttcgtgtagtgtcgttcggctaaggaaataggcccgggaggggcgggagcacgccgctccggcgggttcgccgtcgtcgggtggacggcgctgccgcttgggcgctctgggatcgggagaatcgcgtgcaccgtcagatcttgatggacggatgagattagaagggagatgtaccggttcggctcattaaaacgggaccaccaaattggaatccaagggcataggattgatcgcagtcacattaaatcaggggcgtagatcttggatcctgaggttcgggttgcgtaccgattcgaacgcgtccagatttaatcgtggccctcggtttcaatcaaacggccaggtagcgcaataccccttcgtccgttcattttgcgaataagaccttatgcttttactaaataaaccctcggtccactgcacgggtaaactgagtcttaggaaaccttacaccggggcccctgtcttgtatagaaattgaggcgcagtccagggaattaagaaatcagagaaattaatttagaaatggattttaatatgaaaataatagcta

SEQ ID NO: 66997 - DNA, 983 bp, Zea Mays
ctaagtcaccacatcaaatttgtaaacctatcaaaggagaacaactttgcttaagagggtaagcatggttattgagaagaaattggagaaaattagacccaaagatgggctgtcaagctgttgaagtctgaatttcagactgacagtggcctagaaccaagtttgagagccatttcgaccatgatccagtgaaaatctatctagggatgctataacaaagatgaagatggtttgtaggactacaactttgctgcagagcattggttatgttgccatatgaatttgggagaaaatcgagctcaaagatgatctgttaggccaactgaatgaggaatcccatggtacagggcctaaacaggatcagaacaccagctcagctcaccgccgacgacctccgccgcgattcgtgttgccggcgtctggattcgtgctcgtggcaagtggataacatctcgggtagaaggatcagcaccaccgttgagctggacaccactctggctagccgccgtacctccccccttgctcaccgatccctcggataagattctcaccatcattgaaccatcaccgtcgtccgccgcgtgtccaaacgctttaccatgtcgcggctaaccgtgctttgcatgtccggtgatcgccggaggtgccgccacggtaaaagccacgttgcgcggccaccagtgactcaccccgttttacggattgtaatccgccgctcaaattcactgcgctcacggccgatcgctataaattgaagccactgcaagctccgtagggtagtcatgtaccccgacacccagtattgccctcagttgattgccagcgagctcgaatttcacagttcccccaatttggttttccaccaccgtgaaaacgatctcaccgcagccaacgcaattccggttagttcatgttgtctgctctctcgtttaagcattctcatgcgtccgtgttgcttgccgacccacccaattgaaccaaga

SEQ ID NO: 66998 - DNA, 561 bp, Zea Mays
agagttgagtcggcaacggcttcaactggtggcacaacccggggacggtcgagacagcacatcagcaactcccctccccgggaccggcaccacaatcgtcgacaggaggacacgtgtggagtatcggcgcttactccgcgtctcagggccatccagtggcccccaaactccaacgtcgacaaatacgagcccaagcaagaccccagaggctggttgaccgtctatacaaccgctgcccgggtcgctggtgcaactgaagacgtaatgactacgtacttgcccatcgtcctcggacaagatgcattgcaatggctacgacacctgccgcgacactacatcgacgattggaacaacttcagtcggtgtttcatcgccaacttccaatccctctccgataagccagcgcagctgtgggacctcaaatccatcaggcaccgaagggatgaaacactttggtcgtacctcaagaggtttcagaccatgagaaatcgcatccccgaggtcactgagacagcaatgattgaggatttctaccggggatccaatgactcggccttcgtc

SEQ ID NO: 66999 - DNA, 445 bp, Zea Mays
tgttgtggcagatgccttgagcagaaaggcccagtgtaattgtatgagcatggatatgggaattaccaccctgtgtgatgagttgtgcaagctgaacctggaaattgtttcttcgggtaacttaagctatatctcagtggaacccacgttgcaagagcagatcatcagggcacaggttgaggataagggtgttcaggttatcagggatatgatcaagcaaaaggcagaaaaatacaaatgtttccggcaggacaacaaaggaattctatggtttggagatcgattggttgttcccaaggaccctgagcttagaaggaaaatactagatgaagctcacctttcaaaattctccatgcaccctggtagcaacaagatgtaccatgacctcagatctttatattggtggactagaatgaaaagggaaattgccaagtacatatccgag

SEQ ID NO: 67000 - DNA, 710 bp, Zea Mays
gagctctgaaaatagatcatttaaatcaacatcagaggagccatccaaagagaaagtgtttgcaaatttaatgcaagaatctcttagttcagtagtatccagtgccttcagggttgttgagctcatcaaaaatccaaatatacttttgaatgattggagttcttcaaatctactttttaatgaactaattgcaacatcaaccataaccaaaaagtaattaactttaaaagccttctcagcttcgagttttgcttcctcaaattcagtttcatcatattgtttcttcctcttagcatggcgctttactggaaatgatggctccacacctagtcctgatgcaatctctcttgcaatgatcaagctagaagcaaacccttcatttctataatattcaaaaacttcattgcaccttctatgttctttaatgtagcatcaaggcacatggatggcgactgcagctgcttgctcactttgtttacagtaaataaaatttcataccaaataaccataccaagtatgaactcaaatgtaccaagaacatcaaataaattttttgcatcgcttctatcctttgattcaacatccttatctgtacttaactgaagcaaagctgaccttatgtttggagcttcaaatctaattgctctgacacttttaatccgactctcccaacgagtattgcaccatgacttcacagttaaactttcaac

SEQ ID NO: 67001 - DNA, 385 bp, Zea Mays
agagattggatacatgccaataagtgtgtaccttttactttacaccaaatgttggtagaatggatatgtgatgaagttgaaactgtacacacagacgcaccgcttgtgttgctatggtcgatgccccgtactttggacatatagtccaacaagtgtctgagtggcattgacttttctaattaccaattcaatagaatatataaaggagagttcacccctgaagtgctagagccgatagaaaattgggtaaatcagaaatgaaccataatgcattttttaggagaaaaagatgcccttgctggaagcgcggacgatttgagcatggaggtcggatggttcagatgcgagcagagaaggtactagattatggtcgaccttaaggaca

SEQ ID NO: 67002 - DNA, 642 bp, Zea Mays
tcgctctgtcagacgctctgatgagaattaccatggtacattaactgacaaagatcccaggtgcagtgcacctcgccgccggtgatcccgcgcccgaattcgcgccggtcatcatgattcatgctcgacgcaaagtggataaccgaggggagtaaaagatcttggcgcccagataagctcggacctggtcactggatggttcaccgtacccacttgctctatggccggtcgtgataatcctcgccggcattggtcgcctgccacccatgcgccacgtgcctaggagctttaccacgttgcagtgaagcgtagtagggagtccatccatcgccggaggctttgccatggtgaaagccacggtagtgcttgcgccagtgacctcccctctctccggccgccagcacttcccgtccaaattcgccctcctcactgtcgtcctctataaattgatgccccggcgaactccgttaggttattacgcacccagcgcaccagctctcacgcctaatcgtccaccatagcaccttaattcgggttttcccccaaatccgttccccgcgccgccgtgtgtagctctttcgtggccagcgtcgcctgaggtagttctttgttctagcttccttagggtgtagtgatgctccc

SEQ ID NO: 67003 - DNA, 1284 bp, Zea Mays
gctaggaaaggtggagatgcaagttagttggacagcgaatcacagccgaaacgatctgaaaatgttgtttttgatgtcaatgacaatatgacctcaaacatgtccaagaaagaaaaaggtagggaccatgacgaagcagcaaactgtgagaactctgcagttagcacaagcagatatcggaatggtcatgaagattttccgcgctaagagagattggaagacaggttggaaaaatgaagattgtatcgaggacattgctgtatgtgttggttccgatgatgaagagggttcaacagaagaaggtgcaggtcgaccctaaggatcaagaagactttgacagggcactgaaagccattcaagcttggagtcacgtaagctgactactgaagcagcggacaaaagatgtgtgggaatccggtggtgttagcgaggtgtgcattcaaggtgcttgtgaaggaaggacataagcagcagacaaagcaaatgcccatccgggggggactgccccactggtgccagagcaacagaatgctgctgagctcgaggagaagcagaacatgaagcggaaaattcttggatacaacgaaaggtaggaagaagaagaagaactgaacggagcgttcgccaggaagtgggaacggctggtgtcaaggaggaaggactgacgagcaccctgctggtcgcgttatctgggacggcccaaacagaggtggtggtgtacagtgcagcacagcggcactacttgggttgctggtgggttcttccgtggctatggaagggaggtgagctgatgccactgcgttcatggtttggtttggtaatggtttgccccaggaaagagccacctcagtatcgttccatgaacgtatttgcatcaggagttgtgcgacgtgagaacggtttgcatcaggagttggctcgtggtatgtggaactagtttgtttatgttgctatgcttgtacacaggaccgttttcactactacctcagatcaggtaatctcgtatccactagctcctcaaccgatgccttgcagtgcaaccctggacccggcgaccttgaacagttagttgactctcatgtttgctctgtcagatgtcaggatgcttatggcgcgcatgatctgagcacgagaattttcgtacaattttcttcttcagatgtaaagtctctccttcgctgccctgcttactcatattatttacgctgcacatgctcctggtgcctcctattaccatgtttatgctttcaacactccatgattattcttccccccccccccccc

SEQ ID NO: 67004 - DNA, 539 bp, Zea Mays
gtacttgtcaaagcaacaacatctaccagcacagcaactgcaaaccataccagtgacttggccattcgcatgcaggggactggatatgattggacctttcaagaaagctcaaggaggatacactcatgtactggtagcaatcgacaaattcactaaatggatagagttcaaacccattgcttctttaacctcagctaaggccgtggaattcatacaagacataatattcagattcggaataccgaacagtatcataactgacctgggatccaacttcacaagttcagagttcttcgatttctgcgagcaaaagaacattcagatcaagtacgcttcggtggcacacccaagagccaacgggcaggttgaacgagctaacaggatgatattagaggcactcaggaaaaaggtcttcgataaaaatgaaaagttcgcaggaaaatggataagggagttgccctacgtcgtttggagcctaagaactcaacctagtcgagctttgcacggaaacactcctttcttcatggtctatgggtcag

SEQ ID NO: 67005 - DNA, 391 bp, Zea Mays
gaggtattgagggagaaaataaaaggaggacaatgtcacgttatctaaagttcttagtattcgagttgcttatgctagtttaaatgcaatagaaggattcagaacataaaacagaaaattgggtggcaattagcaccaacatatcatgattgttgtacagaaaagaaatattaccaaatattatgtaaatagcacacctttccactcttttgggatgtgaaagactatcctgttataacccgtgggattatcagccggcacaaatggtgggttcagtgggaaaggatatgtgatatttgtgtagattggtcctgggaaaaaaacatggaaatgccatctcatcagaacagacgaactgtatgtagcatggcacttgagaatgctctaacgt

SEQ ID NO: 67006 - DNA, 1260 bp, Zea Mays
ctggggcacaacatggagccgcacaatgccgatgaataaggcttgtgcgacggactcagtagagtacgactgcgccagggggatgaagtgacagtacttgttgtacctatccaccaccatcatgaggacgaacttgacatgaatgcgaggtaatgttccatgaagtcgagcacaatgttcatacagacgccctagggtacgagcaaatgaaggagaagacccaccaggtcgaggttctccgatttataccgcttgcatgtcacgcaagagcacactaggtcttgaccagttgttgcatgttaggaaaatgaaagtcgcggcgaagacgatgaagtgtgcgttggaccacttcatgttcgtccccgtgtacggcgaccataatcccctggatgagcagggatgctaggggaatgtccaggcacccgctgaactggaccatgttgtctatgagcgttcagggcacgccgcgagagcctatgcagagttcgtctcgtatggtgatgagggtagggttggtgtcctacacttgatggaggcgcgtgctgaagtcaaagtgtggagtagagatggcgaagatggcctccgcctccgtgtcgagttgggacaaggcatccaccaccacatttgccacactaggcttgtattcgattgagcagtcaaagcccaacagtttcccccacctagtggcgctaggcatcatggtgaggcgctgatcaaacatgtacttgaggatataatgatctatcttgacgaggaagtgactgcctcataggtacgacctctagtgccgtatggcatggacaagggcgatgagctcccactcataagcgacgagggagcaacgacgtgaagcgacagggcggctgaagaacgcaatcagatggacatcctgaatgagcacagcatcaaactcgtgcgaagaagcaccacactcaacgatgaagtccttggcgaaacccgggatcgccaataccgatgttgatgtaaccgccaccttgagtgcacaaaaatcatgactactgcgtcagtccaagagaacccttccttcatgagaagtacggtcaacggtgccacggtgaagccaaagttgtggacgaatttgtggtagtagtcggctaggccaaggaacccacgcaccgcccgcgctgactaagacaccagccagttatggatggcctataccttggccaggtccatggcgacgccctccttaagagatgacgtggtcgaggtatgaaaccgaggtgacttcgaaggaac

SEQ ID NO: 67007 - DNA, 452 bp, Zea Mays
gttttgtgatcggttgtgttcctaattttgtgtataatagatctggttttctattttgtccatgatcgagcagtggaagtggaacccctgcggctgaggcgtgcagtctgactgaaattactgttctgcccatgatgctttggctgagtatagggcgagcagggaaaccagccaagtcagactgcgtgcattccatgcatgtattcaacctgctcattccagtcaaccatgatgaggtatcagatgctgcttggttacttgtcactcgcgatcgatcttactgtatatgcacactgtgtaatttgaaaaaaataaaactgtacgatcgtgcatatacttatgcatgcacatgcatgcgagcgaagatggtgccctacgcatgcatgcgagcgtaatagccacacatgtcatgttcacatagacctgaatgtagcacaacagtttccttccat

SEQ ID NO: 67008 - DNA, 405 bp, Zea Mays
caacggcccacggtgaatctctccccggatctaatcctagccacacatcaaccttcctatggcaccggtcactttctcccacccaaacgacggagctcggcggcgacccgagccaccacggcggcggcatcaccggatcaagccaacctatgattccgagcccgaaacatccctaccgaagcagctacacgaagcggaaacaagcacgaagctattggaggattgctcaccgagaatcgcccgcgaagatgccctgcccacggcgctaggcggtcccgcggcggcggtagacctccagtgaggaattcggccagcagcagaggtccccgaactccgaaaccacccccaacacgatctgcagaacaaggcgaatcaggcgaccttccattcttcccggttcacgac

SEQ ID NO: 67009 - DNA, 1427 bp, Zea Mays
cgacattcagggctctctgcgtggccccaagcacaccgtggtcgaccaccaaggccctctactagcacccaaccatcatcgctgccctacctttaactgtgtccgtctaacccctacgttccttctcctaggccaccgcactcgaccactaaacctccatggctggccctaacccacctctcctagccaccaaggcccctgaaagtgcatctacatctttttgggttttggtgaattgaatgacaacaatattaaataactaatcagtttgtcaagtgttgaacatgaaattaagtatatagcacatgtcttagtgaaagacatagaaggtgtaacacaagagaatcatgtgatattccatagaaagatcagtcatgattattgatcatggatatcacaagaaggatttgatacaagttcaacactcaaattagatagtcaagaattcaatgtacactcaaagtggtatggcttaagaaaagcttgatagagtgaagataacaaggaaaagggcattaagggactaagcaaagaagaaagtcaagatgactaaggtaccaaggctaaggtgaagaagtaagtatttgcatttagtcgagggactaatcaagctcaggagaagtcttgcaatgtttgtgcgatccttgttgaagaagatgaggagaagaatggacattgattaagttggttttcaatgtgatatacttggagacagtctgatagggtgaagacaaacaaggaaaaggctttaagggactaagcaaacatgaatgtcaagcaaatggcttatggaccgaggtaccatggctagggtgaagaagagaatacttgcaagatgtcgacagactaatcagattttgaagagttatgttgtgttagatatcacaacattagaatacatgattggatgccatcggattaactcatatttattgtgatggttcaagtcataaggattaagggatgcaaactcaagggatcaagcatggtcacaagtccaagcagaaggtatcaaagatagaacctggtagggctcacttgttgtgtagagtttggtaaaaaagccaagaatgataaatcaataaggaattggattttgggtaattacagagtttagatgtgttcttggtgattattttatcatattggaattcaatggaataagataattgatcagatttggagtttgaggttctaagtgccaactagacctaatcattggccacccgacttgatcaatgcaacgggcatgtacgtgtcatagtttttgatccgcaacaatccacgggctaagtacgagccatgatttttgacccaacccgaaaaaccccaacctaacatgcccaacaggcaagcacgggccgacccgacccgatccgacactaggcacgagttgatacgggccatgccaaattaccaacggcccg

SEQ ID NO: 67010 - DNA, 676 bp, Zea Mays
cgaagggagaggcacaagaaatcctgctagatgaagcccacaactcagcctattctatccacccagggtctaccaagatgtacctagacctcaaagctagatactggtggagaggaatgaaaaaagagatagctcagtatgtggcccggtgtgatacttgtcgatgaactacgcagaacatcagaggcccgcaggcctactgcaacccctttcagtgcccaaatggaagtgggaagaaataggcatggacttcataatcgtactgccccgaacccaaaaggggaacgattctatctgagttataattggccatcttactgaagtagctcacttcattcccgtaaagactacctttggaggagccaccctcgcccggatatatctcaaagaaatagtcagacttcatggcattccgcgaagaatagtgtcagacaggggaacgcaattcacctcaaaattttggttgagccttcagcaagctatgggcaccaagctagacttcaacaccgcctaccacccccagtcagatggacaaacagaaagagtcaacaaagtcctcaaagatttgttgagagcctgtgtgctgaccttcgacagagactgggagtccagtttgccgtatgcagaattctcgtacaacaacagttacaaggccatcatcaagatgtcacctttt

SEQ ID NO: 67011 - DNA, 843 bp, Zea Mays
caataagaggcatgctaaatttcaagccttgttacaagatcgataatatttagctcactcaaagcacaaaactgtaactcatctagaggcttagtgaagacatcagctaattgttttttctcatgttacaaattgtgatgtctcctttaacttcgtggtctctcaagaagtgatgccggatatcgatgagtttggtacgagaatggttcatgtgattgttttgcaagttttataacactttcgttgtcattcaaaagtgagattttggaaagttgacatccaaaatcatgaagggtttgcctcatccaaaatagtttgatgcaacatgcactagtcgtcacatactcaggtttggtggtgggtaatgcgattgatttttgcttcttagaactctaatacgccaaagatcttacgagcaattggcatatcatggatctactctttctatcaacctgtaattgtcacataatcgaattttgaatagacaacaaatcaaaagtggagcctttgtgataccataagccaaggtgaggagttcgtactaaataacaaataatttagtaaactactcttaacgagcaataagtgatactattttagattaatttgaaatctagcatatgtggccacgctaagcaaaatatcgtacctagatgcacaaatgcaaagaagggattcaatcacggagcgatatacattttggctgacggccttttcatttttatccaagtcgagatgcccactagatgccattggaattttgatgggcttaacattgtccatatcaaacttatttaacatatcaagattatactttatttgacaaatgaaggtgcccttctt

SEQ ID NO: 67012 - DNA, 483 bp, Zea Mays
tgcctctatataggaggaggaagactggaagaggacaggcagtaggtcccacgacccttccagggaagagagtgttcgtgacgcgggcggcccccaaatccgcataacaatctctgttgcccccccgccaaaatcctcagatccccttgctgcagtgcagatctctctataatccgcgctcgtggcgacctctcctccagcttccgttcctgaaatccatctctagtttcgccatttgggttttttctcgagggtttcgctcctcactcatctgatttaacgaagggagctgggtcacacccacaggccgcggcttctgaaattcgatggccgtggctgcagcgcgcctgacgctcccagatcgattcgacgaggtttacatagcctctgcccggtgaaaagatgggctcgtgggttatacgcgcctcgcacatgcacgagctgaatttcttctcgccttttcgatcatgacgtctttcgttt

SEQ ID NO: 67013 - DNA, 1220 bp, Zea Mays
cacatgaagggttagtctcaacatccagcgagacacgcaacaacaagttgcttcatggttacaattctacaaacttattgttattactaccaaatgcagtcaatcattaagatttagactgatatgtgcaacactattttatccataagggtccttcaggggctcatgcataccattcgtcgtttggagccattagttgacttcagaccaacaagtaaaatgaccatcagggtctaacgctcacaaagacattcactgattgcattgtgcttttaagcacataggaaaaatgtgtgtgtttatattggtagtgaagtgcacgacatcagaccaatgctgccaagcaaagatttttatatgcagagatgtatagtccagctcatttttatcattgcccatggtttacccaattactcatactgctctgaaattgggtatcaatttatgcaacatttataggtattataatgttgagagagaatttataacaatagttaataatttatggtgctaccagcagggcaaatatttctcctcatgatataccaatttgttctataaagcattatttcgatctcttcgttgttcggcaaaaagagaagctttggaatagaacagacaaggccaagaattcattttatctgagaaaaatcaccatataactagcttttgatgaagcaaatgatgataattgtttgacaagaacgaaacaagattggtatccgcctaggatccatcttcaacaacagatagtactgctctcatgcgaaggagtcatcatgactagggaaaatgcaacaggtctccataagatctttatatttttatcacaaattatcaccacttataatctcgtggtcaagacttacggctcttctggtgctaagcactaaggacatattaatgcccaatttagcttcaagctctgtggtgatgtgggatttcatggctatttttctactcttcttacttctggtagatcagatatagataatggtaagcatgccaaagggtggaattcagtgtagttcggctacataaacctcaggtatgtgtccattcaggaccgacctttaccatttagtttacagtgtataccaaacttgtcaaaggactatcccgagtcaattcagtgactataagtatttacaattccgagagatgtatgcgacacaagcatagaggttctagatagaacgagtaaagtggttcgacggaac

SEQ ID NO: 67014 - DNA, 498 bp, Zea Mays
ggaggacccaatgggaggagagaagccacatccatacatgaataatgtagtgtgggcgtcaggcgctaccacggctacacctcgcatccccctgaccgtacaatcatcttcctcaaagaaacgtccatggatttgcatcgtgtggcatccttctcagatctcctccactcccgtcaacccgagtctgtaacacccctggtgttaccaaactaaaacttgggcattgcatcatatgcattgacatttcattatgtatgttacacctagagtgcatccactaggctaaaatctcaaaacaagtttgtgaggtgatgacttgacttgatctttaaccctaggatagggcacttacctaaggaatagaagcatgtgggtgtgtgagatgataatttgggtacggtctcaaaggttagtggagatgttcaaaagagactaaacttagagagtttgagtggcccataaaccctagaacactcaaaaccctaatacggaccctag

SEQ ID NO: 67015 - DNA, 948 bp, Zea Mays
cggagggagccttgggggcgtatgccgaggtattcttggggccattcaccgagttggagtaggcgggtcctggtggcttcagctgcggacagttgttcttgaagtgacttggatcaccgcagtgccaacatgcatttgccggaggttggttgcttgccactgagggggaatggaaagagctctgactctgctggctgaatcatgacggagtgggtccagctggtctactgaagtttggccccttgggtggaaacccaaatgatcgagtcttctggtgccggtcctgctgctgtgcccggagaacctggaacttccttttgagatgtcctttttcttcctccttagccctttcaacttgcatggccttgttggaaaggtgagagaagttgaggaagtcttggctagccagaattgtcttgagttctggcctgagtcccttcaggaaacgggccatcttcttgctctcgatactgacctcatctggcgcgtagcgggctaactcagtgaacttgtgcacatattcgctgacagatcttccatcttgagtcaattctcggaactcgtcctccttaagctgtaccagtccttggggcacatggtgttcccggaaagctgcttcaaattccgcccaggtagcatctctgatggtgacgttgaaggtgtcccaccaggctaaggccatcccagaaagttggtgggcagctagttgaacatgctgattttctgggcaaccaatggcttccagtttccttttgatcgtgcgcatccaatcgtctgcatcgagggggttgcttgatccagcgaacgtgggaggtttgagtcttaggaagtcccccattctgtcttgcggtcttccaccattcggttgttgattttccagatttcgagtgaggacctcgatgagtcgggtttgattggctagaacttgggctaggtctaagggtagtg

SEQ ID NO: 67016 - DNA, 405 bp, Zea Mays
ggagtctgagggcgcttccgctttccgtccctttggtcgcgcttgcccttaccacccttgttgtcgaccatcgtggttctggtaagtggaggaagaagaacgaaaacaagaaaaagagcgagtgaaggagacgttcgtaggcaggcagtctatttaaagaggccaaggaacgacccttcgcctcctgcttgtacattgaacagtcgcgaggacttcaatagccgtgtaaatttccaagaaagggagcagattattgacacccattagcataacacggcaccagagggaagtaataccaaccgcttaggtgcatcattacccaccccccgtcgagttaggttactattttgggacaagacagtgtacacacccattgggtgcacaaactggatttttcaagatttt

SEQ ID NO: 67017 - DNA, 347 bp, Zea Mays
agaaaatcaagttttctaatcctaccatctttcccagacatcctggagtccttgaccccaggttctggaatctttttcaagctgatttctacaattctgtcatcatcacaaagaagcaccgagtagtccgtcacagggtgattgactgggaaggttgtgagcgaatgaatgatgatgatgatatgaatcaagctctcaagatatgtgagcataaggagttgaagaacatcatgactttagaatacccctggaacaacgaggtagtggcttaattttatgccactctctagatcaagaaggtcgatgaagaagctgatggatatgactacccggtcatgtacttcttc

SEQ ID NO: 67018 - DNA, 851 bp, Zea Mays
gtgatgttgtaccctaggagttatgttgtccactttgctattctagcggacgcctccagatttttgagcaactccccaagacccctatcggaagtgactcataccttgtgtgcctcaaagtagtgtcttagcttgcacgaagccatgatgaccgtgtatgctatttgtttgagctctatcatgtcgcactttgagcttgtgaggactttagagaaaaaatatactaggcattggtgagccttgccgtcttttaccttttcttggactaatgctgtgctgactgcgctgggcgaggcgtcgatgtatagtagtaggggtagcgctgggtctagacttgttaatgttgccaggtcggattgatattgcttcagagactggccccaagtgaagtctcttgcgccgcgtaatgttttgagaaaatggaggcttcgctcggtggacctcgagataaatctgttcagtgcagccattctgcctgttaaccgttggatgtccttggtggattgtggtggtgccatgtccatgatggcttgaattttattcggatttgcttcaattcctctgtgtgatacgaggtaaccgaggatttttccttggcttacaccgaagatgcatttctttgggttcagccggagttgggtttcacgcatgttggtgaatgtttctgcgaggtctaaaaggtgatattccttgtttttactcgcaatgagaatatgtcgacatatgtgaagacattacgacccatttggtcctcgagaatcttcttggtgaggcgggagaatgttgaaccgtcgtttttgagcccttcgggcatccacacgaagcaatacgtgccgaagggtgtaatgaaa

SEQ ID NO: 67019 - DNA, 332 bp, Zea Mays
gagaaagtttacggtgagaaagaacttgttgggtggtaatgcctttgaagatcgagtttgacttctctccttccttgatgaggttgatcttgtccttttctggtcttggtttcattgattcggggtcagtgtatatcctcgtaattggggaatatggttaagatagatatggatgagatagactacatgatgtgggtcaaaagtttgtttgacgttaggtgtggatagacagattatgcaatccatcatgactggtctaatgtgctaagttaaggtaacgcctagctagtagggtctaatctcttctaccagtatcaccaatctgtttaggt

SEQ ID NO: 67020 - DNA, 405 bp, Zea Mays
ctaggagttgaggatgcaaattcttcctctgatggtcacgaggaagatgtggtggctgctgctgaaaatagtactccggacccaagtactggaatcaaaggaaagcgcaagttgtaccatgactccccgaagcctaggaagaaaaaggaatagagggatgagtacatgaaaaggattgttgatgcatctgaagcaagaactttgagctccaccaaaagcatttctaattatgaggatgacccgatacgtaaggaggttgcagctcaattgaaccaagtgctcaaagacggtgctactgaaggaagcaatctgcatttcttcgctacacaactgttaatagacaaacgacatcacgatgtcttcgcaactcttcggaccaaggaaggaaggacagcttggcttcgc

SEQ ID NO: 67021 - DNA, 585 bp, Zea Mays
gataagtccagattgcttagaggtcaagtcctcttgaaaccataaatataggggtcatgtaaccatttgaatcttaaacataaatagagtatggcaattccctaatccctttccctcttctcagcctcggtcttcttcgctcactctgcaccgccacccctctccatgtgtctttacgcagcctgagaatggtcaggttcagacaccatatatattagcataaaaaagaaggcctggaatgcctttatccagcctgagagtatgaataatttaatacatgaagtgccaaacaagttacactcaccacctttttctcatgcaaatgtcaaactgcatacacaattgcacatactgcttttcaacaagcagtggtctgtataacaatgtgttcttccttgaatttccatcagaagggcatatcagtgccactaggacaaatcatattgccagaaccttcaacaagataatgatacaaggattaaaattaatgtcacaatggagaaaatcagacaacagctatggttatacatagatatgtcttacaaatatatctaacctaaagagtagcattctagagtctggaca

SEQ ID NO: 67022 - DNA, 1138 bp, Zea Mays
tctagatacaacgtcacattcgagccaaggataggaataaaatcccaggtcttggaaaacttcatattagactggactaggccttcggaacgacaccagcatcacacagaaactatttggactatccactatgatggtgtgtggtgtcatgtgggagcaggcactgcaacaattattacatcacccataggcctcaaatacatatatgtcgtgtgtctcagtttcgcacttgaatcacacaaatgcacgaacaagatagcagaatacgaaatcgtcatccttggactccgcaaactacgagccctagggtaacaacgtgtataatcaaaattgattccaagatagtcactggccaaatcaaaaaggattgttctgccaaagaaccagtcctcatgcaatatctctcggtcgtgcgaatcctaaaaacagttcaaagaattcacattgcagcacatagagcacaacaagaatgaagagaccgacatgttggcgaaagcaccagcgaaaggcgacccactgccatctgacgtgttcttccacacaatcgacacaccagctttaagaaacctcgaaggcctacagataacataagacccccgacgaccgcaaaatcgtacatctaataatgaccgaagactggcatgaacccatcactttatacctccaaggtcattatcacccctctgaccagagcgaagccaaaagattcaagcacagaagtcgtgacttcgcattgatagatggacaactatacaaaaagggaataagccaaccgatgctcaaatgtatcacagcagtcgaaggcatacaactccgtcgtgaggtccatagaggaacatgtgggtcacactcgaggcctaggaccctcaccgccaaagtcatgcgccaaggtttctactagccagctattgtgtgcatagccaacatagtggtccgctcgtgcgaagcgtgccaaaaattctcacctagaacatgtgcccccttgcaattcataaagctcatcgcccacacctggccactgcaacgttggggcctcgatatcattggaccattgcccactgcgcaaggcaacctcaaatttgcttttgttgcagtcgaatacttcactaagtggatcaaagctagagttgcgtcaaca

SEQ ID NO: 67023 - DNA, 349 bp, Zea Mays
atcgaactctcttcactctagctcggttcgacccctctactcccgccaccactaccagtctaccactccaccttcctccaccacaccagcttctgccgctccaatgccttccaccacactcgctacgcctacagcctccaccacacctgcttccactgctcctgctacctctgtcactccaccagtacctccaccccatttccgagagcatgacgagacagaggttcgagcacttgctgcagatcccagactgtttgacctcaagagggctagtaccaccagggtttgtaatttcagacatgtgccagtggagtcctggtttctagctcagcgagatccttcagctgct

SEQ ID NO: 67024 - DNA, 494 bp, Zea Mays
ggtaaagctaaaaaggattacatcagtgttgttgctcattttgtgaactctgattggtgtttagaaaagaggttacttggtattagacctatagaggtagctcatactgggtataacatagttgagcgtgttcaaatggttgcagatgattatggcattactgataagatatttgctattgtgcttgataatgcctcatctaacaaaactacgatggatgttcttaaaccattgttttctggttatattggcaatttgattcctcttgcaccagcgttgtgcttgccacattattaacttgattgttaagagttgtttgaaaagtttacaaccatatcttgaagattttagaactgcaataacattcttaaattcttcgaatcaacgcattgcttcctataaacaatattgcctaagtgttggtgtccgtcctcgtaagttcggagcagacatggatgttagatggaattcaacttttcttatgcttaaacatc

SEQ ID NO: 67025 - DNA, 539 bp, Zea Mays
gggaaacgagcaccaggggcactcggctgattgttctagacaagggtaggagtgggatggatgaacacgggttgtctgaagggatatgtgggtgggcgagaagaagaacgatttgggttgaagggacgaattaccaaccttgttcgcttttcagacccctgaaatggtccttcacccacatatctttttggctttccttgtcccgaatttttggcttcaactgacagtgatgtgcttacaaccgtgttgtaggtgagatccaggcacgtagccattttatgctggagtcgatcattcaatcccctcatgaagcaattctgtgtccacttgatcgatggcatattgggagaggtgattaaacttgttgagatactacattacagaatctcccccttgctttagaggtatgaactcctccagcttcatctgtagcaccccttccgaaacataatgttccatgaatgcttgtttgaactccgcccacgtgacctgatgtcctgcaggctgaatggctgacaaatttgcccaccaagtactag

SEQ ID NO: 67026 - DNA, 892 bp, Zea Mays
cgatctaacggtccaagatttagggcgctagggatttggcttgcatctaatccgaaccgtcgcccacggatccgatggccacggacccatcgtcttctccgtgccttggttccctctgtccgccgcggcccggccacggcgaaaacccaactccagcgaggcgaatcaccggcaaaggcgcgactaaacctaattggatctatcttacacgttgtggtaaagaaagcgggcataggcgaggaattcataccaaaaatcatgaacgcagaagagctgtccacggtaaggtggcaatcccgccctgccgcgcacaccgacgtgaaattcaccccgattaagggtcgcccagctcgttctgagagcacggaaagattccccggacgctggctcacaccgacaaccgcgcgcagggattggaacaacgacgtggagggttctcaccggcggcacggcagtagcccaggcggcgcaacttttgctatgcggcaagggaaaagggaaatagtgggagggtatggggcgaacaagtccacgaccacattggctttttatctatagaagcagtcaaccgagcagaggagaaaacgcaacaatggcgggatcacccctgtcgagttcggaccgttcgttgaggaaggatctgaacacgtgaccccacgcgtaagtgtcaaagcaccggcgcaacggctggaagccacaggacgctgggtccctcccgtcagcgtatacttggtagcgcgcagagcaacaaccatacgaccccacctgtcggcgcggacacgcggtaagctgcgcagtcaatggtgtttgggccaggcgcgttaggttaggtgggccgagggtagaaaattgggcccaaccgagttcttttccatttttatttttctttttc

SEQ ID NO: 67027 - DNA, 504 bp, Zea Mays
cttaaaagggagactcacccttcccccattggactagtcttttggggcgattgggcctttccctgagtagggtgtgcttaatgaactgtagagctctgggcaacactaattggttgggcttcgtccaaccccacctgggctaggtgtatcatctggtatcagagctagggcccagttcaagaaggtgggaatgatgacgacatcttctactattactcattggcaaagacagaattggaccagttggcccaattgtagtaggatcgcttaacttgggaggaggaagccaccttaaaagggagactcacccttccctcattggactagtctttggggtgattgagcctttccctcagttgggtgtgcttaatgaactattgggctctgagcaaccctaatttgttaggcctcggctaaccccacttgggttgggtgtatcacaactacctactgccaaaattttctgtgcttctgaagcttgccatccaccgcaactttggaaac

SEQ ID NO: 67028 - DNA, 1133 bp, Zea Mays
gggcctaatgacttgggaggttctgtcacaataacttttcgctcggtgctccgtttgagctcattttttacagcagattcgctttggcctgtttggttcggtcaaaaaattaaaaaaatcgggaagataattaaaaaaattgtttaagtgttttaggaattttagagattctttgtgattttctctaggtcacaatataactctgtttcaagtgaaattttgtgtgcttccattctttgtgtttttggatcaatggtaaaaaaattcagaatatttcgagctcttttgctggtactcttttgcaaacgcgcctttgatttctactagtgctgaaaaatctgctctatttacagaactgtcgtttctactagatacttgtacctcctttcttatgctttggtccaactgttctattacattttctaggctagcaactaggactagtacttggaacacttattcagcattgctatctattactgacttgtgtaccacatatatatatttagtcagccttcctagaactccagctttctctcgagcagaacaagtactcctttgcaaccacacccacgctcgttggatagtcacatcggtcaccgtttgccacctgcagtgctggtaagaaccttgtaagagcggggtaagatgcttcataatttatattccaccacctccaccaccaccctgagagatagttgtagggttcacattgtttgttgcctttttgtctctgttttgtgctaacaatgacaggaccaaagaatcaaatgaataaggacaagtggcctaagcttaacgatgatgagtgtgtctctcagatggaattgaaggagatgatgcgcgcgatgactgaagcttttaaaaaataccaggactctacggcgacatcctatgagcagcttgatcgacgagttgctgaacttgttacacgcatcgacgtactggaggctcatcccccaccaccaacttcagccccagctcactctcctgtggacgacgacgacgatgacgacgatgtttatgcaccgctgcgacaacgcctcgcacgtaatcgacaaggtatgggaggtaatggtagacgtcgtcataatcctgaaccagaccatgatccatttgctaagtttaagttc

SEQ ID NO: 67029 - DNA, 315 bp, Zea Mays
gcacccaacctttccgcatgggtagctctggggccgccgcgtggccgaaaaaggtggtatactctaggaaccatcagtaggtccggacctcctcgagaaagcgctggacccctgtactcacaacccagatctccgagtatggtccagggctcccatgaaagcaagccggaccccttgggtgaggtctagacccctctgagtggggtccgggccacccacatcaaggtcccgggacaaggaatatcttgccctaagtcaaggacgagcaagggtccagtactaacgcgtgtccaggctttatcctgtgcgtttccg

SEQ ID NO: 67030 - DNA, 492 bp, Zea Mays
gtagaggtctgcttctcgaaatagttgctcggaggtggtcagcgctttctgtagtatggctcagacgaaggccgagtcattagacccccggtagaagtcctcaatcattgctgcctcagtgacttcgggaatccggttcctcatggtttgaaacctcttgaggtacgaccgaagtgtttcgtccccccggcgcctgatggatttgaggtcccacggctacgccggtttgtcggagagggactaaaagttggcgataaagcatcgactgaaatcattccaatcgtcgatgcagtgtcgcggcaggtgtcgtagccactgcaatgcatcctgcccgagaacaatgggcaaatatgcagtcatcacatcttcagttgcctcggcagcccgggcggcggtcgtatagatggccaaccaacctcccgggtcctgcttaggctcgtacttgtcgacgttggagaccttgaagtttgggggccactggatggccttgag

SEQ ID NO: 67031 - DNA, 430 bp, Zea Mays
gtgcctagcactttcatgagattgatgaacgaggttttacatgctttcatcggtaaatttgtggtggtatattttgatgatattcttatctatagtaagtctcatgatgatcatattgaacatttacgtgttgtttttgatgttttgtgtgatgcacgtttatttggtaaccttgagaagtgcaccttcagcaccgatcgtgtgtcttttcttggatatgttgtgacatcgcagggcattgagatggatgaggcaaaaattgttgccatcacgagctggccacttccaaccacggtcacgcaggttcgaagttttcttggtcttacaggattctacaggcgatttgtgcgggatttcagcaccattgcagcacctctccacgagttgacaaaaaatggagtgtcgtttcgttggggaccatcacaacagc

SEQ ID NO: 67032 - DNA, 339 bp, Zea Mays
cagaatttggaaaactgagtatcaggccgcggaccatccgcccatggaccacggaccgtccgcagtatcaggaactggacagtccggtcagcagtgcagatagtctgaatgcatcagggcgcggaccgtccgccgcccctgcgcggaccgtccgcgacaggcagtaaagccgggcagaggcagcagacttgtcatttctgctcattgcatctcctctctcgctctccactcgccaaaaagtcactttcgtcgattgtgcacggacggagaagagaagttgcacacggacagttcaaaggcttgtggaaaagttcaacaaacatgtcgtcatcccggtat

SEQ ID NO: 67033 - DNA, 272 bp, Zea Mays
gtgaaagtagatagtcgcaaaaaggatctcctataaggaggaagccaagaagtcgaggcaacacgtcaccctaaacctgagtccaccaacaccctacgaagcatgcaagacgacgaagagaagaatgaagggtaggctacaaaggccaagggttggcatggacagaggcggacaagcggagtaatgatgtcgctcggactcctgtcgtcgacaagcttcaccaatagtcttgaagaggcacgacaggagagttatatggaacgaataacgac

SEQ ID NO: 67034 - DNA, 1057 bp, Zea Mays
tgccattgtgctgggtcaaccaatccattcctaggatcacatcaatcccgtggatggtagtacgactagatccgccaagaatactacccacttaaaagaattctgacttgggagcatttgaggtggcatagaaggtctgaccctggggttcgggtgaccaaagggatttctaatgatgaagtggggatgccatgcttttccacaaaactagtggtgatgaatgaatgagatgctccagaatcaaaaaagcacaacagtgggggtaaatttgactaggaactcaccgggtactactctaggggcttgctgagcttcttgggcatcgacgtgattcactcgagccctaccgtggaactgtgtcttgcttaactagctgttggtggatggtgtcttggaggcaggtgctgaaacattcttggggccattcaccgagttggagtaggcaggtacggatgttttcaaatgtgagcaattattcttgaagtgactttggtctccacagtgccaacaagcattggttggaggttggctgcttgaaacagactgggtgtggaaggaactttgaccaggctagttgagacgtgacagagcggatcctgctgtttgctgaagtttgaccccttggaagggaaccgaaaagatcgaaccctctgatgcctatcctgttgttgagctcagagaacttgaaattttctcttgaggtgacctttttcctcttctcgtgctcttttcacttggatggccttgttcgagaggtgcgagaaacttagaaagtcttggctggcaaggatggtcttaagttctggtcttaaccctttcaagaaacggaccatcttcttggcttccgtgctgacatcatcaggtgcatagcgagcaagttctgtgaatttgtggatgtattcactgacagatcgccctcattgagttaactccccaaattcctcctcctttagctggacaatttccgagggtacatgatattctcggaaagcagcctcaaactctgcccaggtagcatctcttattgcagcactgaaggtgtcccaccaggatagag

SEQ ID NO: 67035 - DNA, 601 bp, Zea Mays
cgacaatgagacaacatagtgggtcttggttcaccatggtctgaggtgtggaaggtggtagatttcactttgaggtgcttcgtgggtgttctgaatgctagtggagcttatgacaccaatgtcgaggatgataggctccaatgtaagcagaacaaacccggggagcttgtcaatggagaaagtggcactatgtgagggcttagggccgttttggggaatggtagatctctctgtgaggtgagtaggggatgttgggggtctgcttttataggattgcacctttaaggcctcctttggcagccccgctagaggaaccctaggggagccagcaccggggaggcaaatccttgccatgcaaattccccgggtggacaccgccccgcggtgctgctgtgccctactgctgtttagagctacagaggtgccatgcgcctgctcgcttcaactaccatggaattagccggctctgccatggagctgggtgtccgtggctgaccactagctaccagcccgaacagttgtaacaccccagtgttactaaggtttcttctcagtacccaactggtggccatcatcacatgtaaacataattgagaaaaag

SEQ ID NO: 67036 - DNA, 361 bp, Zea Mays
ggtcactgtcagtctgaaattcagactttatcagcctgacagtcgaactttgggcttaattatccccaatttcttctcaacaactatgcttacacccttaagcaaagttgttctcctttgataggtctacaaatttgatgtggtgacctagggaaaaaaccttagaatttaaaggttacaaagccccaaagttgagcccatatcactgatttcagacttaaccatttaagaaaaagtgtggctttttgcatataagcccaaaacttagggtttaaattgcaaatccacatttttgtgatccataagacttaagacactttattattatagtttttgcactttagtccaaaagtggactagt

SEQ ID NO: 67037 - DNA, 803 bp, Zea Mays
ctgtgttcgtacttcaccactccgcaaggaatttgcgccgccattaccaccgcgagggagccattcgcgcagccacctcgattgccccattaacaccatcactccaagaaattgggggattggggattgaagccagtgtttgggggtgctctcggaccggttgccgcaaggaattacggcctctgatgccatcgattgctcaccgaagtcggagctccgcctcggttccgctcaacaccgtcgaccggccgcaacacggtcctaatcgtcggtaataactccccccatgcctcgccgtaaccctgcattcttgtagcttacatccaattggagtctggggccctgaatcgccgggtcgggttactccgaccatggtggccgccgtgcgggtgggcggcgctgttgcgcgcgtatgttaggttggggaggggttgtcagccgttgatctctggtcgacggttgtgattagatgacagcgtaccgcttcgtgaagttgatcaatgccgtcagatggggatcagacgggtgttcgagcgcctcggttagtttgatccagtccgttgatcgaaaatctgatggctatttccgcgcgctggtttaggatatcggcgatctaatctgagccctaggattttgatcggacgcccagatttgagaataccccttcggcccggacgtttcgcaaatgaaccccccgattatttcagaatgaacccgcagtcctgcgatgtggcgctctgagtcattgtatatttcatgtataagcccctgcgcttcacagtaattgacgcccagtccagaac

SEQ ID NO: 67038 - DNA, 539 bp, Zea Mays
gtcgtccttaggctcagcttgtggggctcaatcttcggggccttcggtcttgaatatgttgatgtgggagtcggcgaacgaggggtacgtgtgtcaggccaaaggcatgcctataagatcacattaaatatcgatgttgtcatggttatcccatggcaatacaatcaatataccagctacttgagtaagtattataacatatgatatcgtcctttgtgatgtgatctcgctattgactgattgcacaagatatgttcccattttgataggattagtgtctagcaacacattaccatatttaagtagtgtcctcctctagcaaattttgttttttccctttcattttgcttttcaatagattcaattaacaatttgccgaaacaaagtaaacactacttttagacctgacaagtaatgtaggaacaagccagttcacaattcgtatacaacaaaatttatatgacacctaaaaaagatttgacaattcagtatttcagttccttcaagtgagctggtagcctggtatggaaaagattatc

SEQ ID NO: 67039 - DNA, 497 bp, Zea Mays
tcaaacggtcaggattacgaggccgaaagggtatgctagggatctaatctcgagcttccattttctgatgtgcggccaccgattatcttctcccccaaccgagctggacgacagcgccttgtcccccaaccgcggcggcccacaccgacgagatccccacacgacgcacagacgatcctatgcggcatagaacactactggaactaattgaagtcacgatgaatgtaagggagggcttattacctttgtttgggatggtggctgccctaccacgtggtttcacggttctgcgtcagctcctcaactcctgtgagcaattcacaatgctccgatgatccctgcgcccgctcgctagcacaaacacggtccaagagtgtctgcaacctcgatcgaaccctggtcaagcctttggcgatggcgcatccgaaggttgatggtggcgacgcttcctccctctctggacacaccctcacgacggcggttggtttacaggggcg

SEQ ID NO: 67040 - DNA, 420 bp, Zea Mays
ttgagtgctataacttgaagcctcagggaactccgctagctaattatgtgtccaacgcaccaacacttgcctccaattgtccaccagagccgcccaattgcccatttcctccaaatcggtctaaatagcgccgcgtgagcacctcgctgtggccagcgtgctacaggtccgttcatgtcctctgctctcttgtttcagtaccttatgtgcccttgatgcttctcgatctgaccaattaagctagaacccattagatcaccgggaacactttgaattgtccccggattgtgtggtcaccatgagcagagaggttgggagctcgaaccgtgcaattgatcgaggggaaacgattgttagatgttgaattaggtatcaaccaagttagagcaccggccattgcgtgtcttggccagtacaggg

SEQ ID NO: 67041 - DNA, 656 bp, Zea Mays
acaagagcgttcttcgaggtactagcgagttccttgtctaaggtgtccccaaatgccttgagaagatcatcgaggctggctagggatacatcttcctcattggaccagtcatctattctggggggaggtagggctagaggggccttcttcttcttctctgtctggcatccttggttagcggtcttcttctggatcttctttttgggggcgagtgctttcagcttcttgtcaaagtctatcttcaaggtccggtaggcctcacgggtgttggcttcctcgccttccactatgctgagactctcctggagggatgccttctcttgcttaagttctttgacttgctgctctaggctttccactcgggagtttaggtgggtacaatgggaggagagttcatcgtagtggttgtcgacggtgtggaggtatccggccatgtagacgatagtgggatcatcttctatgggatcttctcctgacagagcctggagtcttttcttccaggtgggggtgtttttgttgctgggtgggaaatatcggaggggggtctcaaagatctctcagctatagttctggcacagttgtttgagggcttttcgagcaacgctctggcatgtgtctgagaagcggtgcccgatgaaagtaatttggaagggagg

SEQ ID NO: 67042 - DNA, 504 bp, Zea Mays
gccgaagataagaggagcggagatgctgcattggctggattttatgaagctatagagaaaaccaatgttgaaaaaataaccgataagattttggctgggtagtgtgaagactccggagatagcaaggattttgatgttgatagtggtaatgacgatgtcgaagatcggccgtggaggccaagccatgttgtctttggaaaatctactatcaagaaaggacaaattgagacaatgaagggcaaatattttcatgatatatccatagtgcgagtcggaggggagaacattgttcctcttcctgaggcagacgaagtggtggttttctgaagctttatgaaaaataggctacaatttcccctgcacagaatgccagacgaagtgctgagaggtttgcgatattccttcatcagctcactcccaaggctttgattaaagttggagttttcatctaggtgatgaggagccatctaggtgatgaggagtcgagccagatgccgactgctt

SEQ ID NO: 67043 - DNA, 889 bp, Zea Mays
caagaatctcgtcatcgagatttaggaaggactagggaaaagatggggaaaatctatgcgtagttcttcttctctctcccaagtagcctcatcttctccatggcgactccattgtactttgcacattttaatcactttgctccttctgacacgagtctgtgtatcaagaatattcataggatactcagcataagtcagatcatcttgaacactaagatccttcattggtagctgctcttcaggtaccctgagacacttcttcaattgtgatacatgaaagacatcatgtacatccgcaagatgattgggtagctttagttgatatgcaacttctcccactcgctttaagatcaagaaaggtccaatgaagcaaggggacaactttcctttaactttaaatcttctcataccccagattggtgacaccttcaaatacacatgatcaccttccttaaactcgagtagtctccttcgggtatccgcataacttttctgccttgactgtgtagtcctcaaattcttgcttatcattcgcacttgttcttctgcctcttgtataagttcaggcccaaagaactgcctttcaccagtttgatcccaatatagtggagtcctgcactttctgccatatagagcctcgaacggtgacatcttcaaactgggctggtagctattattgtatgagaacttcgcatatggtaagctcttatcccaactaccaccatgtttaagagcacaagctcttaatataacctccagcacttggttagtcctatcggtctgcccatcagtttgaggatggtaggccgaactaaaattcaactgtgtatccaagcactcatgcaacttcttccaaaaccaagaagtaaactgtgatcctcagtcatac

SEQ ID NO: 67044 - DNA, 631 bp, Zea Mays
gtcctctggaaccatatcttctagagtctgatcaaagttcgccagagataactcctgtagaccgacgagggctgacagagcaggagaaggaactccactactttccccactggcaatatactaccgactgttcttccgagtgaaaaggacctcattttcttcctccccatcattttcatcagcaacacacccattggggtcagcgacagatggaccacacccattggggtcagcgtcagtaaattcaggcacgggaactccctcagcagcaggaaccgaaggaccagcgccccgatccaaactagatacttgccgaagacgtctctttttctttttctgctcatcaacagaaggatcaagtttattgactcggcaaggacgtctcgggcgaacactgacaggtctctgaacatccaaggttgttctagcttctaggagaggcgccaccgccaatgtcccagcaggagtagcatcagaagaatcttcggccagcatatcaagcatagcacttatttctgcatcattaggatccaaaggcacctcaaagtggacttgccgttcatcatcgggaatttctccaatcgaagcaactaaggcgctaacttcttcagcggagggtcgcactctaagg

SEQ ID NO: 67045 - DNA, 1339 bp, Zea Mays
ctaactcagactaatttctcaaagaaaacaatacaccttgacaataatcataaaacaatataaaatgaaacccaaggcattgtcataggtgcaatcaacactaggatttcccatcatcaaatttggatgcagctccccagtctttacacaacacttcaccaagtaccttagaacactaagcacaacaatcattgaattcaacaacctcgtttgttaatgccattaaggccaaacatccatatatcttcaatgtatgaaacacctcacataccgttctcaagcactataaaacatggttgttattacattagaatccaactactagagacctccaaactattctgttgacatgaagcaaatggtgttcatgtcatataacgtctttttctcctctcaaaagagataaaatttgcaagactcataaagcaatgaagggataacaacaagaaaaactaatgcacttcgtgacacagactcatgcaaaagcttcttaaatattactttcaacactaaaataataacacgatactatgcttaacaggagtaattggacttcaataagacaatccacataaccaaactaccttgattaacctcacatacaacaaaacctcctattaatgcacttgaacaatttgtacctcgtgatatcacatgatgcattcaaagtagtagacatacatgatctatcaaaccatcattcatatgaaaaaaatctcaatctaatgcaacaaccacatcattatacagatagatgactaacaaacataagcaactcccagttaagcattgacttcgtttaagataaagcggtccaaataatgattcaacaagcatgcatagagaaactgatcataaaaaaatcaaactaccatatatcgttggcgaataaaaaatataaaacaggttgtcaatatcgtccacatgactagcctgcaacaactaaaaattatgcataacctttatggatattgaaacaaaccatagaaggaaaacatgcacgcctcttcaactataatatagacataaaattcacttgaaaccaccctatttattgttaataataaggttgcacacaataagaaaacctatcaggtaaacatggttggatttatctatccacgtcatcttacaaattcacttgagttcgaccagtctcaagatttcatagacagtacaacattgcctttgctctatagagacaaaccaattgtatactaagatcaagttagcaagtagccacactagctaaaaaggggtgaggcacaaagcattgcatccatggaaatattacattgataagttgggttgtaacccaacagtcaatcaaactcaacaa

SEQ ID NO: 67046 - DNA, 599 bp, Zea Mays
caagattcaagtttgcgatgagctcgagagatgaagagaaagggagaatagagatgaaatcaacagcgagttagattgacttcacctcacaccaagggtccttcaaacaattgaaggagatgcgatttcggatgtgagaggtgaattgaatgctcttgtttgaaggttggtcaaccaagaattcgtggagagggtagaagtgaatgaagagagagagagtgtgaggggtatataaaggatccccaaaagctggcagatgttgggaaaagtggactcaaaattggttgaaccggtttccaccagggtgttttcggttcactgacagactcagccgaagctgcacccgccgaagccgcaattgccgaagctacaatggccaaggatgcaaacttagaaagcacactttctgatatggataaaatacttctggatatggtcgcagaagaagctgctacagccgccgaagagaccatggccacagtgcctgggaaagagaaggaaatagccgaagatacttcagaagaagaaaatttcaactttcaaaacttaattggacaagaattgacaaaggctgagaaagaagagttgagagattatgc

SEQ ID NO: 67047 - DNA, 635 bp, Zea Mays
gcttcctgaatgaatgagtggtactagactgataggtgggccttggcatctagtgtgtatgcgcagaaggtgcaggtctatcagtactgcagtaacttcagttacagagcttggttggcaactagcaagtgggatacgcgatgaggccggtgcatcctgtgcttgatccccatctaaattttggatggggtacatgggcatttagggcttgatgtgatgcatggtgaattgtcgatatagacaataatgaaccgcgactagggtaaggtgccatactgccatggattggaactatacatgtacatataggccggcctggaccggcacggcacaggcacacaaaagcacgacccacaaagacatggctcacaaaagcacatatctaattatgggccatgccgtgccagcacgtgtgcctagtcatcggcccacggcacggcccacaattagttatatgtgccaggccggcctaaatagcacaaaatgtcttaatgtgccagatcggcccatatacatacaacagtaatacataaacaaaaagtatagaatttatatatgaccaaaataaaactaagatgttttgtggatgcacattaaaaacctttggtcagaaagaaaaaatattacactagccc

SEQ ID NO: 67048 - DNA, 522 bp, Zea Mays
agaacatgctgaagctagtctttagattgaagtcataggccaaagaaaataaaagaggaaatccctagagttcttggttgagacatacaatgttgatgaagagattgaatggctcgaagccatccaaaggcagatcgagatttagaatcacaagatgcttcaagtcactcaacttagtaagtagatagatgaggcatgtaaagagattcatcgcataaagaagagaaaaagatgaatagatgaaaggcataggacaccataacacaagaactcttcatctagaagaataaaactatgccatattcatccatgataacacaccccattatcaagcgatctacaagcagctccatggtctgcttcatataagcctcctcatcttctcacatttgttggccaatcctgcccaaatcaatttcctatgagctatgaggcaactatagcctcttttggcaaaaacacaacaatgttagccaaatctttcatcatggctatgaggggcatagcatagaccaaacattc

SEQ ID NO: 67049 - DNA, 512 bp, Zea Mays
cgggaccctgacatgcgggcctggtgagtgggccctcctcatcccgcgaagtctttgacctaggagttgaggtttggtcaccttcgtcttctgctcgcctttgacaccgaggtcttcacatattttgatgggtgtggccgaatcgaaggagaggggacgattttgattcttgcgtgcctagccttagtggtcttcatcctcaaggcggcgaacccccaagtcagactatcttcatgccttcagagttgcactagggggaatacgaggactccctgatgccacagctcgcacaggccgagcgttgaaggacccgaggtctcagatcgcgtctgggttctacactcacatatggggtcagtttggttccattcgaagtcccccgatgattggctcgaggtctttttggccttcatatcaacaccctaaaccctaaagaaatgaaaaaaatatttagtagtaagtaaacttcacatattaattatacatttctatacattacttttcaaattaat

SEQ ID NO: 67050 - DNA, 830 bp, Zea Mays
attccaactatttatggtaaattttcatatgaagacttcaatagccattctgctcctctttttttaaactaaacataaaaaaaagaaatagagtcacttcattattcttcactccttaaccaaacacatccttagcgagcgaagcgactctattcgagattctaagagtgtgtggtgtgaaatatttccatttaatttttctgtttaggatcatcgcaaagagagagggagaagtagaaatatggtgggatttcaccattttttagcgtgcttgtcccaactatggaggacgatattcgtgatttagagtcattccactttgatcgcatcgttctctctcgaaccaaaaccaaatatagaatggagcgactctgtcaccctcgctccaacccaagagacgagagatgtcgctgattgcagctcgctccaacccaagagacgagagatttcgctgattgcagcagcctatcatattcgtagctgggagtttgcattggttggctaagctaagcctaccctcaccttgcgctgccggtacaggtacacacgtacgtgcgtggctctggctggcttgccgcgggtagctcgcgacctctacgtgggatagatgggattcccgtgaccctgaacccgcctagctgccttcctaacacacacacaccctcatcagtctgtctcggtcacatcacaagcctgcctgccattggagctagctggaggctcgctcgagctggagcggcttgacgacgcgcctatacagctcacacacccacccggcccacaggaaacaacagcgcttgctacagctgcgtgtaccatgcatgttttca

SEQ ID NO: 67051 - DNA, 309 bp, Zea Mays
ttagggtgtggaattaatgaatgttgagccaatgagtgacaggtttagaggtacctatattttatggcaggtacatgcatgtggacacgctcaggatggtgaagtggataccagcaggggatctaggtatattttgggtcctctgtcccaactctccggtcattttttccaacaaatattgagatttcctttaaattcagcatcaatcaaaacaaacatgtagtaacgaaggagaatatcaagtgaagtagtactccctttagcctaattagcgaggggcaatgtagttttattttgtttgaaactcgc

SEQ ID NO: 67052 - DNA, 333 bp, Zea Mays
tagaattcccttgctatcctgacggaagcacttgtatttttctgccttctgcttgatcatttccttgataacctgaactcccttatcctcaatctgtgccctgactatctgctcttgcaatgtgggctctaccgagatataacttaagtcacccaaagaaacaacttccaggttcagcttgcacaattcatcgcacagggtggtgactcttgcatccatgctcatacaattgcactgagcttttctgctcagggcatctgccacgacattagccttgcccggatggcagtgcacttccaaatcatagtccttgattaactccaaccatctcct

SEQ ID NO: 67053 - DNA, 555 bp, Zea Mays
gttagcactaaattacaataattccatcatcagtgaactctttgaatgttattatgttttagcatttctgttttaaaatgtatgaagatgttgaaagcaagacatctcatcaatttgatggaaccagaatacgatatttaacaagatgcaatgagccagatatctatcagtgaaaaataatcatcaacattttttctgttggtaattagaaaagcttgagactgggtttctacatacatgaatttataataaggaaaactttatatcagttatctgaatgaaacatctaagatgcaaagtaggttgttcctctttaagattggcacatgctcagctggtgtcaatggtggccccatcaatcttaaataaaatacagttcattttctattcaaaataaaaatgactggccaacatactgcaactgcaattcatttgatggcccccatttcacattctagatcataattgacaactgaatcagctttcattcacatgtcaagtgcactgcacacaaccaacctggcgagatagtgaataactcaacctatcctagag

SEQ ID NO: 67054 - DNA, 406 bp, Zea Mays
ggcatgaatactacatatttgtccttcaatatgaaggattagtctcaacatccagtgagacatgcaacaacaagttgcttcgtggttacaattctgcaaacttattgttattattaccaaatgcacagtcaatcattaagatttagactaatatacgcaacactattttatccataagggtccttcaggggctcatgcatacaattcatcttttggagctagtagttgacttcagatcaataagtaaaatgaccatcagggtctagcgctcacaaatacattcactggtttcattgtgcttttaagcacataggaaaacgtgtgcagataatggtagtaaagtgcacgacagcaggccaatcctgtcaagcaaatatttttgttatgcagagatgtatagtccaac

SEQ ID NO: 67055 - DNA, 753 bp, Zea Mays
gaactaacctacgcaggatgtccttggcgacgtggtagatcgccaaagcacgtggcgttcaccaggtaaacggcgagctccggtgaggataaactcggccggccgtgcggcaagtagatgagatggccggaccagctaacagttgtgatccatcccgcgctagatctttttacccatccccggtgttatccattcctccctgagcacgaatcggaacggcggtggcacgaatcgcggcggataggtcatcggcggcgaggaccctgcgctggcggtctgatccttatcggactactgtaccatgggatatgttcatcagtgtgcctgacagtcacagtttaggaccaaatctctctaaagtttctctagtaactcactccactctctgtagcaaagtttcaaagctacaaaccagctacaatttgactatagggattgaactcatttgagcactggatccaaatcaaaatcgagctcaaagttcacctcataacactgtaactctgaaattcaacttcaagcagtctgacagcccatctttgattgggtttttctccagatttcacataagaccatggcttgaatccttaaacaaagttgttcccctaagattgatcttcaactttgatgtggttacctatcattaattctcactattttgaaagctacacagccccaaagttgggcctacaaccctgttttcagacttggtatagaactcaaatgaggtccattttgcatttaagtccaaaa

SEQ ID NO: 67056 - DNA, 692 bp, Zea Mays
ttggacgtagttgttcaagttgatggggaactaaactcaatctgagcacgacgtatgtaaatcaatctatcattcacaggagaatgtagggtaacctctctaaactgcccttatgttggtaccatttgtacctaggttcaaaacgcatcaagcctacaccccattctatttgttacacttttcatattttgggtgccttctataccccaacatcatgcaacgatgacatttagcatgccaggtagagatatggcactacgttcttcttggatttggtgtgttttttcatgtagtgcaaccatggcatctccagctcaattgccaactagagcactcacctccaacacctactccaacaactatgattgagccttaacacaagcaatgtcagtcttgcatagtcttgcccactattgcctcatgtaggaggacttgttctagcaggaacacgtggaactactctcataggcctttctttgtctcatgcatcttctagagtgcgccataccctagggacgtcacattgtattcctctataggtactagaagaacatgtcttcttaccgcacatcactcccacagtctcgcgtcaagatcatggtgaggtggcctccaagcatgaaggttcctcctagcaatggtcatcctaacgggatcatcggtgcctcaactcgctgacgacatcatcggcc

SEQ ID NO: 67057 - DNA, 1700 bp, Zea Mays
ccctcgggggctgggtagctgccagtgccaccctcgggggctgggtcctctacaacagccacttctaaggctgaaggcccctcagccacctccatgggagtcgggtaactcggatcagtgtctttgcatggaagactgccctccaaggtcgacgatgcgcgggacaccacccgggttacctcttgcccggcagaatcaagcaatgaaagcccaccatctgggacctctgaacagacgactgggatatcagcctcaggaggctccgatagtatgtctttaggaatgacctcttccagtgcttgatcaaaatctgatatcgaaagcccctgaagactgacaagtgctgacagagctggggagggaatatcgctacccctctcgctgcctctatagtaacgactattcttgtggatcagtgggatttcttattcttcttcctcttcatgctagtcaaacatgccaccagtagcctgcgcatcatcacagcttttggcgtcaactttgggaatggcggccgtcgggacatcgtcagggatcggtacagaaggaccagcatcctgatccaagcacgacaatcgacgaagtcacctctttttctttttctcctcgacaggtgcagtcggacggttcactcggcgtcaatgctttgagtgggcaccttcaggtttccgaatctccatttccttgccaaattcttgcccagttgtgatggccatcagctcggtgcgggtagagtcggacgattccccggccagcaggctaagcacgacatccatctcagcatcatcagtgctggctggcatctcaaagtgagtttgcctcttagcctcgggaagaatccaaagtggagcaatcaaggcctcaatgtcctcaagagagggtcgcactctatgacccgggctaccatcacgagcaggagggttggagacaaattcagagaatggcctatttggcggtaggttccatgtagaataggctacaggagcaccagcattcgagaccctgcccctcaaaatcatgtccactcgatttagcaaatcttcattgggaatcctcctatttgtaacccgggtggaatcattgatgctgctatataagtaagcgaggtaaattctgtccttcaagggttgaatgtttttgaagacgaagtcagcaaccatagcttcagcagtcagaaccccatctttcagcaggcagatctcagcaagtaatactttggcctctgttatctccgaaaaagtaggagattctacccagctaggtgtgcgaacatatggttgcctccccgaccgagggggagagagatttgcagtggttttccatgatgaaccactcaagacgtcatcctttaatactgtccttgagaggaatatcgaggtactccactttccttccccggtgaagctctaaacttgcgccgccaacaagctgatgctgtcccccagccatcccagaccgacagtgataaagatacttctagagtccgaagtgagggagaatcccaagaaaagcctcgcatagatgtacgaaaatggcaacttgtagaattgagttagggttcaaatgcatcagattcaactcctagaaatcaagaaggctgcggaaaaagggggagatgggaagagcaagcccgcggatgagaaatggaacgtaaacggcagattcatgagtgtcctctgtcagaacagtgacaccacgac

SEQ ID NO: 67058 - DNA, 653 bp, Zea Mays
gccgtgactccctctaaactccccgtcgaccaccggagttactgccacgacggtgaacacgtgttcactgcaccagagttcttcctcacttccgaccgccgcacatcaacgcccaaattcacggtcaccgccgaagagccctataaattgaagcccccgctagctccgcaaggtcatcctccacccagccaccgctaatcgctagcagtccttcgccagagctcgcgaattttgaattcgccccaaatccctctccaccaccgagaaccacaccctaccatggccagccttccctaggtctgctcattaccttcttgttcctgttctagcatccttacgtgatggtgatgctcctcgatccctttaattgagccggaccgccagggattgccgggaacacgtaccatttcttcatcgttcgcggttcacgtggatagagcaggatagtttaccaaatgagaaattaacttaggggaatcattcggggagagttcaattgagtgttagccgctcgggagcgccggtcatagccccatttggccagtacaggagctcgccggagcctctccacgctcgacgccgtcgaggacttccctctacgaagaaaaagaaaccgagggagctttctgtaaactgtcagtgacacaagaaac

SEQ ID NO: 67059 - DNA, 558 bp, Zea Mays
atagggatctacggggtttcttttgcatgatggcatggccgaaggggtatggtgagatcctagccattggattagatacgggcgcgccagattaaatcattattcctgcgaaccggtacggaatcgcatctattggatccgaatcaaacggtgagggttttattactctggatctatcgctgtccgtccgatccagatcgacgaaccagatcgaaacgtggtgaaagggtatgcgcggactaatcacagccgttcgcgccgatccgacggcgcacgatctccgccccaacagggcacacacgcacggcggtgccgccccacggcggtgtgccatgaccggcggagctaaaccccgtatacacgcacccgttttctaattcaacttagatactcaatgcggaaggcttaatgaagatgggggtaggtttattaccgcgaattgatgactcgacggcgctggccacggtgtacagtggatttcgcggcagtgccctacgacggcgagcaatcgccgatggtgcagtcgatcagttgtcgcgctcggtgctcggtgagcat

SEQ ID NO: 67060 - DNA, 411 bp, Zea Mays
gcagcggcagccgccagccggcacgaacgcagaatacgaacgctgagacctgtacagttagggtttaattttatttgggctaaaatctctactgcatttttgtgctacgacccgggccacgacccaggtggcccagggcccatatccgcccctgaccgcggtcatacacaatcttaagggcatacccttatgaaagttcacgctacacgatcatatacgccgttgtagcccatcggaaaattctactgcaaagtaagaaaaaccccccatgtcgctatactgtttattgtcttctttgtcattgtgaaagaattatgttcttcgactcatgttgttgatatgaaatcaggaacaagtgctaaagtcaacatcatgccaaaaataattatactccacacacatgtataaatt

SEQ ID NO: 67061 - DNA, 456 bp, Zea Mays
gttttgccccaaatcagccaaactcgccgccgagaagagctcttctgtggccagcgtcgcccaaggtagttctagcccaattgcgatatgttctagcttcctttcagtgtgacgatgctccccatacttagaattcgaacgctactgcacctcatcgccgggaacggctcggcctgccctcagttttcgccatcgtcgtaggtaagagaatctagggtcgggttagctcgattagagcatggtctaggctcgcctgggtttggggatttcgatcgagtgctcggtttcatcaggcatcgccatttggagcgagttcccgcgagagatggccgacgggtgagctcgacgtcgtcagaggttgaattggagaaggaatagaagtgcaggggtgtatgcgcaaatgtcagcgagacagagaaacaatgtcgcgggctcttttccggtttttcaaaacac

SEQ ID NO: 67062 - DNA, 635 bp, Zea Mays
ctttcgtccctcccattattccatacccatacaaatgtcagaccttggaatgtcaactgcaagtgatgtcactaagtgcaaagaatgcggtgtgctgacaagtcaaaacaacactataaataaaacagctgatgaacagaccttcaagacacaaaaggatgcacaaccaaaccaacagacaagtgaccgtggaacatgttgttgttgtgagtactatggaattccttgtcgccagatcagtacaaacgaaagtgaaactacaaaacagaagaaccgaattttattttctggcataaacaaacaaatgtctccccaagaacatctaatagcagattctctcgtacctaatgccctatcagatgatgaattgcaaagtattccaaaaaggaaacatcataaggatgcccagccccaagaggaatcacaagagtgttacattgatggatggactattacttgcacacagtttcagcctcgtcgtcacatcagctccaagaaacaaaaagggaaacatggaaaaagtcaagaaataacttcaagaaaagcttgctatcaatgtggacgtgaaggtcattactttcgtaattgtcctaagaagagttcactacagatcacctccgagatgaagctatctc

SEQ ID NO: 67063 - DNA, 633 bp, Zea Mays
ggactacgggacaagaagaagagccagaaaacttgctccttttatttctcctacctctggtttgatcaggcgacggagacggaatgggatggggattagattggacgtatatatagccgctgagcggcagaggggatcaacaacgagatgggggaacaaacaagaaacgagatgacgagaggtgaatactgatgaagtactactagtacagtagtactagtatagccaataattacatctcaggttgtgctgggattaggaattagggagggaggtggtaggaagaaggggccttggtgttggcttttgtggagctgctacagtgacagcaccaaaccagagagagccagagagatgatgcacctttccacgcttgctttaggttttagcagctttctttgcggggattacattacatgagaaggaaggggaaagctggagttggtggtgggtttgcatgcattgtgccctgtccttgcagcagaggaagagaacatggagatgagcaatttgatcatgcatctcaacgcaattgataaaacacctttttgctgcatggaaagggagtttgcagtgtttttggtcgctcatccaattactcagctacactgatctaactacgaaataatcgag

SEQ ID NO: 67064 - DNA, 271 bp, Zea Mays
aaagcctgcgaatctctgtgcgcgcggccccatatctccagaacttgtattaatgcgcctcaattactccaccctccttccgctcacgcgactgcgtccacggtccaacacgcatctcatcggccgtttgcgtaaactgaaagtgtgtgtttctcctccatcttctcttccgtccggaggcgattttgcaggcttgtttcccgttccttctctaccgcgtttgggcttgcggtccttttgcacttttctgctctacggcaggactagcagc

SEQ ID NO: 67065 - DNA, 1615 bp, Zea Mays
gttgaaatttttcaggtttggtcatcgggtactgggctttgtgcccaccgcatgacaccaatgaccttttcttctaatctgcccgaagttcacattccaagataagagacacctgaagaacaggatatgtatatgataaagtggcactgtgagatgaaatactgggaaaagatttctttcctatgttctgtttgcatattttcctttctccatttattttgggtccatgaaaggagtatatgaccttaagctatctccagcagatcgtgcatacggtcgtgcaaaacactgttttgtgttgtaaatagcactgtttgcagagtgaagtttgaaatatgggataggataggggatgggatagtagagttgctggagatagccttagaaactataatttggacaaacagtaagaagatgattgatagagggctagtctatatgcacatgcataactgctcaaactccacaaaagtgatgcaaacaggtagttgggagcaaatacagcacccacatccaggatattgcacaatatatatatatgaaaattcaaatttaaatgtacagcgaaaaaaggcacagagcaggtaccttcaaggcttctgaagaatgatcgtctagaagacaaaataccaggcactcaagcaatgttctattagtaatcccaaaggtagtagcaaaatcatccaccagatacctccattctgaatctggtctactccaatgtcgatcaaatagataatacaataactgggaagtgtcaaggaaacttaatgcagtagcatgcctgtgaggaacaatataaacatgatatcccaagcgacaagtaaaagagaccaaaggtagtacaagataaaataaaaaaactgaaggatacaatagcttgctttgcaatcaccatgtctgatgctccgtgtagaaagagtacatcaactgcctcacgcaaattcttaaaagggtatctgtcaatactacaatgatcggttgtaattgtggaacagaacatagatgatgattgttcattctgtaaacatgttattgttatgtcttcctccttatccctataattttgttcaatgccaaggttttgtagggcctgctcgatgaatagtgtagtctgattggcttcatttatatctgaccctttatcagaaaatccaggccattttctttcttctgcatatgccttcctttgaatcacatcagagctccatgatgtatgatcagtgtaccttgaacagatgtcctgaataaatctatgcctgatacaccagatcatggcctccaaatgctgaagaaaaagccagaactaatactttaccaagatataatgattattctgaaagaagtgtatcctttcaagcgtttcagttatgtacaagtggatatgcatggccttaagatacagaatgtttcaagatttagggtttactgaggcattatgcacaaatttagtgtagtgataatgccaatgggggaagaggaatgggaaagataggacatcacctattggagtgagtgactccttaaaataaagattacatatgaagtaaagtaatgctacaaaatcaactaaaaggattgttgatgtgcaggcatctttaacagatactccaag

SEQ ID NO: 67066 - DNA, 694 bp, Zea Mays
ccgaggaagacacagcgagtggagcggggcgctaatttatgaggggcagtggaggcgagattagggtagcaagcgcacctgaagacacgaagatgatcataggaggggtggatgccaaaaagagcgaagtaaggagtgcggtgggcaaccgtcttggttggcagacggttgagtaggtaggtggcagtggtgagggcctcagcccagtagtgaggaggaagggaagcctgaaagagcagggagcgcgtgacatcgttcgctgtgcgaatcatgcgctcagccctaccattctgaggagacgtgtagggacacggcatacggaggtggactctgcgagagaggaaaaaatttcgggacacattgttatagaactcgtggccgttgtcacactggatgctccggatggtgctaccgaactgagtggagacccaagcgaagaagtgagacagggtgggaaaagtgtccgatttctgacgaagaggaaatgtccacaaacagtgagagaaatcatcgagtatgagtaaataatacttatagccagaaatgttgattacaggggatgtccatacatcacagtgtatcagatcaaaagtgtctgctgccctagaagaagaggtgggaaatgggagcctaacatgacgacctaactgacaagcatgacagaggtgctcaaaagatcccctacaaccagaaa

SEQ ID NO: 67067 - DNA, 589 bp, Zea Mays
atctttactagtttttgcctcagcttgctcggccgagggtgccttcggcatggtggccggttcttcagccttctgtgtagaaggaattcgctcctttggagcagcagctgaagaagtttccccgccaaactcgggcaccacggccggctcaatataacggggccggtgggtgaggactttcaattttttactcttcggcggagactcgcttggagcagccgaagcggcaacctttcaagaggttgcaccctttcttttctgtccccgtggcgggtagcaatagttagggtacacaaatccaatagcatcgaaaaccctatttaacattttcttttttcggctcccgaaggccgcagatagtgcattatcttcggacttggaatatgctccaagtagctcatcgctagtattttcaacacacttcagccagtcatcatctggttcgacaaactggtctccaaacctgaaggtgtatttcaatcgaatcagaccgccttcgctagggttagtgatggtttctttcggcatttctcagctgtctattaatggccatatcctgtaggctacatgttcttgaactaagtctctt

SEQ ID NO: 67068 - DNA, 456 bp, Zea Mays
cgccacccttgggggttgggttgctaccggcaccaccctcgggggctaggtcttctgcagcagccacctcttaaggttgaaggcccctcagccacctccatagtagttggatgactcagatctgtgtttttgcatggaagactgtcctccaaggtcgacaatgcacgagacaccacccgggttacctcttgcccaacagaatcatgcagcgaaagaccaccatctgggacctttgaacagatggtcggaatgtcagcctcaggaggctctgataaaatgtctttgggaatgacctcttccagtgcctgatcaaagtctgatatcgaaagctcttgaaggctcacgagtggcgacaaggcctaggagggaatatcgctgcccccattgctgcctctatagtgatggctgttcttgcggatcagcggaatttcttcttcttcttcctcttcatccttg

SEQ ID NO: 67069 - DNA, 440 bp, Zea Mays
gaagatacggatacgatcactgttcatctcgtcgtcagagtccctgctgcacacactggtgcacgtgcacccctagcttgttgttgccaaactggattagctctcctgtgacggcaaggaatttccttgccggcataataagctccaagacacggcataatggaacggaacccgttgcaaccgtgtcgtgtcgactagggagtagagagggagtaatgtacctgctgaacggaacccattgcgtccggtcgcttgctgatgtcattcctcttccggctgaaaatccggacctcccaccgtttggcactgttcgtggaaggcatgggcagctacgcgattgtagggaagaaaggtatctgtccaacttgacatctaacctaatcggctaatcaacacctccccctatccaaaacaaagagggctgctttacttgcaaaata

SEQ ID NO: 67070 - DNA, 1320 bp, Zea Mays
gttcatttacgcgtcgcgagggtggttcatagaagtattaattggttgttaaaaacacttcatcgtaaagtagtgtgttagttgtggtaaatttaataaagcgtaaagcatgcttggtaatttccatagtcggctaagatgttcgtctatgttaaaaatattttatgtattcatcgtggtgtaggatagagtggatcgaagatataaattatgtgacatgtgattagtgtttttaagatgagatgtgcgaatgatcggttagtgttgcacttgtctagtcgataaatgttgtcataaataattgtgctaaaattggtcatgagaatgcagtgggcacgtggtgtgtttgtatgtgacaagtagattggaagtgtggggtctgtcgaagcgctgtgatgtcgaacgtgtatatcgaagtgcattgtagtggtaattgcgttaagttaatcggtagtgtctcgagtgcacgccacaacatggttgtatgcgagacaaggtaatataaggtgtgctcgacacgaatgttcggtcgatataagtaggaattgttttggcttaaatagagaggtggtgacatgctgaagtagtcatcgcttcctctatgtttatgagtcgagtcaaaatgtggggtactagtggtacgctaggcaggcggtgtccaaataaattaaccggttgatgtggtagttgccgtgcgtgatttattgttagtgagtagtgggattacgagttatgtgaggattatgttagaaactagtatgcggcgtgtaactgtgttcgtgtggtgaataataggtcggtaggtattgttggtgtcagtagcaaatgtagtcttatggagttttacgccatgtgtaaacgtctccatgatagacccccaaaaatgtgatatttaagtgacttgtgtgttgtccagtttaagttgagaaaaggttaagaaacattaattaacttgctcccacccatgttttgagttgcaatgtctaaatggttcgctaagtcttctactgtgattagccaactcatgttaattaggagtcgatttcgttaagtgtttgttatatatatatatatatatgttgtgtctcggatttgcgatagtaataggcaagccgacgtgtatgctgtcgagcggatcatgtcgttgctctagttagccaaattgttcgatgatttggttaaaatcgtagtcacgatgatttgcttgttgtattctaaatgcgtatggttacgatcgcggatgaaaaatattagtgctcatgtaatgtctaagttgaaatgcaaactattgggtgattatcgtgaagaatccgttgttat

SEQ ID NO: 67071 - DNA, 950 bp, Zea Mays
tctctaggatatctatggtgttatcccggatctccacctactgctctagggttgcgatgcgctggttcaattgttccacctgtaggtctttttccaccaattctgaagacaagtcgaccatgaagtcctctcgactgtcgagggtgatcatagtaatctgagcaaggttagtgaggtgtgtcatggcgtcgctctataggaattgtaggcagtacaacgcgctcatacactgaacagtgatcctcccaacttggtcgggatgcatagcccatacgtccttcacgtggctcactctgttgcaccacatggggtcatccctctcttctcggcaggaaagagtcctagtgggtgcattaccatctccaagggatgatacccacagaaggttgtcagggtcttcagtgctgtggcctcggtggtgtcgtccgccctgaacccgatagtcaagggaacgccaacccggttgcagagggtgagcctccagagtcagccaaacccgaaaacgtggcacccgatgctcctcgtacaactgcactttgtacgtagggggtgtagggtaacacctcccacaagatggagggaaaaccctcgtgagaatggtagtcgaaactgaaacgagtgtctcctccattgatgggggtgggtgaagtcatctgtgaaagagggttagatgtaagtgttatggcagtggaaaggaaaaaacatgtgcctaggttgttaaaaggaggtgggttagattagattcgtctattccaacacatcttattatcccttattaacaatgcttgttaggcttattatcttaacttctagtttataatgcatgcatactggaaagacgtcttctcaccaatcggatggggtgcttctagggcatccctgctattataagactagcctatatggcctacttatttagccacctatttccccatactcctagggcgttt

SEQ ID NO: 67072 - DNA, 519 bp, Zea Mays
cttttaagcacataggaaaaatgtgtgtgtttatattggtagtgaagtgcacggcatcaggccaatgctgccaagcaaagatttttatatgcagagatctcatactgttctgaaattgggtatcaatttgtgcaacatttttaggtattataattctgagagagaacttataacaacagtcaaatatttgttgtgtaagctgccaacagggcaaacttttctcctcatattacacaccaatttgttctataaagcattatttcgatctcttcattgttcagcaaaaaaagagaagctttggaatagaacatacaaggccaagaattcgttttatctgggaaaacccacctgattcttaagcttttgattaagcaaatggtgataactgcttggcaatagcgaaacaagactgttatccatctaaaaccaggcttcaacaacagatagtagtgctctcataagaagaaatcatcaggagtagagaggatacaacaggtctccacaagatcttcatatttc

SEQ ID NO: 67073 - DNA, 962 bp, Zea Mays
ccttgcgttcgtgtatataaggccaagggggatcctcatcattttcatctcattagcacctcaccacccggtagacaccacttgtaaacacctcccacatacaaagtcatcccatgaagtagggtattacgctcctcaagcggcccgaacctgctgaaactcgctcgactctctctttctcgtgccctcagcacgaaccattgcgttataatccacgacaccgtcctacccaaaagcaccacgagggtaccctagggtgtgcggtcggacactaaacaccgacactagcggcaatagagttccggtgaaggactcgataagtttcatgaggtcgaggcggtcacctttgtagttgacttgtcgctagaggtggccagagtagcttggaccacgtgcacaagcagcaaagtttgacggtggcatgaactccggctgaccggtggcagtagagttcgattcgaccgatcagcgagctccacaggaggtcagtgatgcagtccactgatggaatttgatggacgcaggctgtggaggacgatctacgctcaacgacggagccttcatcttcaatgaggtcgatttcactattcctgtgaggtatagcttatgcttgagctcggggaggctttacggaacgttaagggagctaaaggtggagttggattggttggaacatgaccggagcggggtgaccgcggtggctggtgctcataggcaagggtggcgcgtgagaagctcgctagaactgggtgctgtctcgagaaagtgtgataacgagctgagggagcaactgagggcatgactgagggctcaatcgacctctataggcgtgggcataggcgtggcacgcccctagtcgaggtcgagcacatggcgacactcatgtagtcactttcaaatgttcattggctccatatctttgcggatttgtgcaaacatcccattaaagatttcctctccac

SEQ ID NO: 67074 - DNA, 606 bp, Zea Mays
caatcataaaaacaatcttttaggaaaaatcataaaggctgaagccaacaattacgtagatcaggggaaaaactacagttatagtgcaaccacaattatgaaattgcagaatcataagcaagcttcattatgactgaatctacacatcttatctatttgctctacgcatggcactactatctctttcctcttatcttccctgcaaatagtagtacctcttagcttttagtaaaatcctttatattatctaatacgcacagtgtgcttgttcttatctatcttgcaagtagttcaacatgagataactgattatgagagaagacgggataaacaggtggaggagaatataaagaagatgcaagatttgggtctgaacaaatatacttctgttctaaataaatctctaccaccatctgcatcaacaaaggggaaaaatgtagtaaacaagaaaactaatagttcagattcggattcatatgtctctgtctatctccttgacgatgatgatcaaggagatactgatgatgatgacactaaatcttatgagcagccacaacccctggcaattaaggtgctccttctctcttcaaagtagtggatggcaaa

SEQ ID NO: 67075 - DNA, 519 bp, Zea Mays
cgaaaactgcttttcatcagccggtactgtagccatcccaaattctacgatccattagctactgcacctcactagttgccttgttcatcatcagcccatatatctccaatccggcaatcgtcccaagtagtaactgtatcaggatctctccatatccctctctacagagggagcttccagcacaccaaaccctacctgtgtctgtgtgtgcctgcctctctttatcatcaggagcttccactattccacaccttcctctatctcctgcccggccccctcgccacctccaccgatccagcgccatccgggtacgtccatggcgtccaccaccagcgatagcctcccctcctctccctccatccccaccaccgacggagccgccgaccaagagttctcctcctcccactaccaccaccacagcagcagcagcagcctcttcttcccgccgccgtcgtcctcctcctcctcccagctgcccagcctatacctcgactcctccttccacggcctcctccccac

SEQ ID NO: 67076 - DNA, 320 bp, Zea Mays
gtcaaggtatggttatcatctgctgttgaagaactgtccttgttttaaatatatactacaatagaactgatctatgaattggagctacaatattggtggtttatggaaacgttctttggaaactaaatgataacattgtatttgtatgacatgatgcagtcatgtcataatgtgtagtgttagttatatgtcagtcttatttcgctctaaactatgcacttcgtcttaaactgagcctatttggactgcatcaagaagcacgccacattcgtcttcatctagtagtaatcatcatatatatttaggagtagaaaacttat

SEQ ID NO: 67077 - DNA, 379 bp, Zea Mays
gccgttggtaattaactagtgttatgtcaagggatcagagtaaatgtcaagggatcagagtaaatgtcaagggatcagtcataggacatgaatgtcttgtttcaattgaaggtaacggtggagaggtcggaaaactaaacaaacgatgggacttttgaaggcagcagcagtatgagaccaaatcaattataactgcagtttagaaactcctatatatttgatatggttactgatgactgtcatcatttgccatcagaatgatagattatctagagggcatcttacaagtaaaatgagatcgtattatcaacaacacagacttcaaggcctggttttaacttgtaagtgaaggtgaatgaggacatcagtaatcagtgtg

SEQ ID NO: 67078 - DNA, 454 bp, Zea Mays
tatatatacagttgtgcatttgtttgaactaaaaactaataaattttaaaagaacaccgacaataagaacattttcgcctagctgcagccgccttaaagacgatgttgattgatgaggggtcatctctatatgttgtaagaacacaagcaataagaacatttgtttgtactaaaaactacttatatatgtttactaataaatattcattatccccctctgtcagttaactgggccttgaggaacacaacaccatattcccttctagatccaagctgaagcgaagtcagctgatccagccgagtaaacaagtcctgcttcccaagtcaaacatcctcccttgctccccctagaatatacacacaacatttgctcctaggtaggaacatggcatacaacagttgctctttttcagatttagctataaagtgggtaaccaaatgacctagaattcac

SEQ ID NO: 67079 - DNA, 307 bp, Zea Mays
ctttaggaggatgttgattatctttcccacaccagcttcttcgccttgagcactgaagatgaagagagcctcctccagaccgagatccgtgtctcaggtcgaggctactcccttagactatctccactgatcgcacttggctccggaaggttgatcctcctccagaccgagatcttagtctcaggtcgagaagcaacaatgttgttcaccgccaccttcccagacttaatcctctgccacaccggtcttttaagcagactgcattcaaaagaacgatgtccctgttcccggcaccgaaaacacctcg

SEQ ID NO: 67080 - DNA, 617 bp, Zea Mays
gtcgtatgaaagaaaacatgtaccaaaaattatgaacaagctgcattggaacaaatgatttttagcatatttactaaatggcagtcacgactattaccacccacacctataaaacttaatccaatacacataaaacttaatccaatacacctgacttgaatgtcttaccttctacgaccatgtgtgtgactaatttaagaactacacaatcaaattcatttgcataatatcaggatacctaactatacaacagaagtaactgattcgctgttcaagactaaagattcagatacctttgaacaaggtctcgaatgacacaaattggcttcaatgcatccgcttaacttctcgacgaacaaatttcactaaatctccttcaactatttgttgttgtataggccttacaaacgcccaaataaaggccctatttgtgggagttgttgtgcgttgtgatggcacacacgaatttacaatttgaaagcaccatatgctaaagataatattgagtcttttgtaaaaaaaaattactgagacaaatgaaaagaaacaaaaactatggtgccagtgcatccttacgagcttcttttaacaagaacaaatgagtgataaaaatttat

SEQ ID NO: 67081 - DNA, 431 bp, Zea Mays
gcggcaccgccggcgatcaccggacatgcgaagcacggttagccgcgacgtggtaaagcgtctggacacgtggcggacgacggtgatggctcaacggcggtgagaatcttatctgagggatcggtgagcaagggggggaggcacgacagctagccggaatagtttactgaccggagcttatccatggcggcgatatttacgtgaccccgagcgttatccaagcactggtgagcacgaatcacctcaccggctggaatcgtggcgcgagggtcggcggcggcgaggggataaacctgagattcttcttcagtcactgtaccatggcgtcccatttcagttaacctgacagagcaacttggagcatgatttactctcaatttccaataacaactcctcccaagctttgcagcaaaattgtagagctataaacc

SEQ ID NO: 67082 - DNA, 407 bp, Zea Mays
atcttactagacgctgcgttgcgttgcgtgcataatcggagcatgcaaattctctgatttctagtcattataaattggcgcttcagatctcttcttgcatcagtgttagaaatcccactcttcgtgacatgtggatcagtggacgagatcttgttaatctaggatgaaaatttttccccccactgattcacccgaccatgctttcacgttgtcaataacaaattttatgatcacaactgtatctcttgaaccctaagcatgtcgaagcaaaccagtgggagtcttctcctaaacccataatttccttcaaaagcatccataattctcaacccaaggctctaagaaccgatacaagtactacttggttctgaatcacgcgttgaggatcaaattaagcatgacctgac

SEQ ID NO: 67083 - DNA, 406 bp, Zea Mays
aaacaacaaatttctaatttttcctatcttcttctttgtgcaagagcaatcattttgaaaattggtagctttttgcttaagggaaaggtggtaagaatttcttgaactgaatggcttttttttcatgaagtaggggcaatgggtattacttgtagctttcaatagtgttttgcattttttctctggtggcctacttcattattaatttgataaaaattatttgcccactattgcacacttttaggcttgcttatgatttaattgaaatatgtcttaataccaagttctatttgtttaccctacttaaaatgatgggctggggtgtttatcatttttgtagtggtatcttagtggttacaagtccactgaatttttcttatcaattttgaaattgttttcataattc

SEQ ID NO: 67084 - DNA, 308 bp, Zea Mays
cttcattgtatttgccgattctgaaagtgtggctttcctcacatatcagtattgggttcagatacccaatccttttaccggcattagcatcgggcttggtaccgtaaaagatctcttgttggtcatgttgcattctacaagtcaaacgtgcatgtgtcagatattgaaaatttatatggctcactaataataataacacatagatgtggaaatatgagcgacacttacagtgcaaacagagtcacaagttgcacatcgagtttctgaaggttcatcattaaccacatatcatcgaatgcaagaaaggc

SEQ ID NO: 67085 - DNA, 658 bp, Zea Mays
ccggtagtagggtatagtgatcaccctgagttgtgtaagcgtgagcatgtcacaccagcttaaggcgtttccgacttaagttgattgctccgttagtagggtatagtgatcaccctaagttgtgtaagcgtgagcatgtcacaccagcttaaggcgtttccaacttaagccgattgttccgttagtagggtataatgatcaccctaagttgtgtaagcgtgagcatgtcgcaccggcttaaggcatttctgacttaagccaaatgctccgttagtagggtataatgatcacactaagttgtgtacgagtgccgtgccgatttcgagttgagtctaacctaggtcagtagtttgatcaagaacttgtatgccttggaacatggaagctttattgataatgaaaccttctgcttataaagtacaactcatcctcaagagttttgaggcatttcttacgggtaaaatttcctgaggttctcaatattccatgaattttccacttcggtgtcgtccatttcagtgagccggtaggatcacggccgtgttacctctgcgacgatgaatggtccttcccatggtggtgacaatttgtgtcgtccctccccctttagcactcggtggaggaccaaatctcccattgtgaaggatcgatgtcgtac

SEQ ID NO: 67086 - DNA, 675 bp, Zea Mays
ctgacatcgaagaagaaaatgttgatgaagaagaggaagactataactctctgatcccatcaaaacctagccacttggattttgaaaagtctactgtgtttgaggtcgatgtgcccatgatgatgaagctgggttatttcggggaagctgagaagaagcttattcgttttgccggagaagaaaccactccaaagccgaaagatgacgaagtagtggttttcaaaagctttttcagagcaagattgcggtttcccttgaacgagatgattggggaagttttggataattatgaaatctatcttcattagctgacccctaacgctatttttaggcttagcgtcttcatctgggcccttcgaagccaaggaatggacccaaatgctgaagctttctaccgagtgcatgcgctacattactagacgaaggccagagaagatgggctacatgaaaattttggctgttataacttcgcgtatcgcaaggatacgaaggctccggtgctcagctatcgcaccaagtggccaaccggctggaaaagtgagtggttctatatcaaagctgatgagaagaagagggagaagttgaagacgatggtcatgagcccactgagtttaagcttcggactgactaggcccctgtgccgcatgatgtcggggtcaccatgccaacaagttg

SEQ ID NO: 67087 - DNA, 643 bp, Zea Mays
ggacgatcaagaagtcaaaagacgtgaaaaccacagttgatagataaatagtgacataggaggtttggaattcgaaatgaggcacgaaatgatatggaattgagccgagacttcacgaataggtttatatagttgaatattggtgaagtgtgtgcttggtttgaatttaggcgaagaaaaagtaatttgggcactcggcttggaaacgatcgctcaaatcgggaaatttggtaaactttaagcctgggatctcggattggtgtgaaatttggcaagtaggttactggaagtgtggtgaaggtgcctgaaaaatttgggttcaattggagcaagtttggctggtttgggcatttcatcgaacacgtgaagggcgaggaattagggttttagggaaatggccttttgaggtatgaaaaccctcccgaaggagctaggaacctgcaagaatgtttgaggcacgcataggaacacaaatggccacaaggttttactggatttcatagagatttgaattttgcacaaaggagagaaaaaggagctccactgcctctcagtactgccttagaacaggagagaaggggagaggagagagctgctcaccgagggggaagagctcgggcgaggtcgccggagcccagcgggg

SEQ ID NO: 67088 - DNA, 707 bp, Zea Mays
gtctgtctgaaaattcagacattggtaccctgacagcccaactttaggcttagttatctctggatttttcttaacaactgagctcatactcttaagcaaagttgttctcctatgattgagctacaaacttgatgtggtgacctagggcaaaaatcctataatttgaaagttacaaggctcaaaggttaagcccacaaatctgaaatttagacttagagtaaattctccattggggtcctttttgcaaatcaatctaaacttaggatttggcttgtaaatcttcccaaatatgaaccatgtgactttatatgctttatcatggtagtttttacactttagtccaaatgtgcacaatttttgcacataggcccctagggtttggacttagggttttctagggttcaaatggggtttttggatatcccaggggtataaatgtgattcaagtttatttttgggaatatttcatgactatttccctaaagcttttaggttttctcaacttgggctaggttttacccctttaatccctatttagggttaagttccctatccagggttctatttgcaaaatgttataacaatacaacttgtttgaaatttttacctagtaaatgcactctaggtgtgtcaaacatatgcaatgccaatgtttatgatgccatgctcaagttttagttgtagtaacaccaggggtgttacaaact

SEQ ID NO: 67089 - DNA, 417 bp, Zea Mays
ctcttttcctcctagggggtgaggtttttaacaaggcggagccatgtaatatatccgcaaaaatcccccgcaaaaaccaagatgcaacatgtcgaaaaagaccgcatcaacggtcttcggcattcgaccactccgaagtgactgcgagaggcagcgcagactaccctcacgtgcgacactcaacgcaaaagtcgcctaagggtgcagccagaatagcacaacaagtgcgttaatcagtcttttatccaaaagacactccatgcaaaagaagcctaagggtgcagccaaaatagctcaacaagagcgttattcgaagtcttttattcaaaagacactccgcgcaaaagtcgcctaagggtgcagctggaatagctcaacaagagcgttattcgaagtcttctcttcaaaagacactcc

SEQ ID NO: 67090 - DNA, 908 bp, Zea Mays
ttggaaccctagggggttaagtgtaaaatttgtacagacccaagtgcaaataccaaggtagtacaacatcacaaactatgtgtttctcacatttgaggatttgcaagccaaatgatgaagtttggacttatttgcaaaaaggacaccccatacatccgtatgcctaagtctgaaaaccagtgcatagagccaactttggaaccttgtatcttttagttcatgaggaatttgcctaggttcaacacatcaaacttgtagagctactgtaggagtacaactttgcttatgtgattaagccttgatcacatgcaaaatttggagtaaaatgagcacaaagtcaggctatcaatcagccctaagtctgaattctgattaacagtgaagtggatgaacttagagatcgattttgagtaggatcctgtgactatttgatggtggacactataacaaagttagaaagggattatagggcaacaatttccctgctggccgaagatcaagttgttacacaaaaattgacgaacgaagcactacaaatcgctctgtcagaaccactaatgactagcgcgatggtacagtgattggatcagatcgccaagtttggtgtacctcgttgccggtgacctccgcactgcgattcacgccgatgccacgattcatgccgataaagagtagataaccgtgagggttaaaaagatctcggggaagaaggtcttagccggggctgagtcaccgccatacccacttgcccgcgcggtcggtaaaatatcgccgctggtgctcgccatgattgcagcaagggacatgtagtcgcctgattcaccacattgccgtgatcgtggcatccccgagatagtggcagtcgcaaggtgaacgcatgcgctccacggtgaggttcggtgattgcc

SEQ ID NO: 67091 - DNA, 441 bp, Zea Mays
aaaatagcaagagagatacatggccaaggagtcgccgccgttgaagcctcggagtcggtccaagaagcttcactacatctcaagggaggcgcctgggccgcgacggtgaggttcggccatctggacgaccttaattgctcatcggagcaacttccctcatgttgtagtgtccgagagtctgcaccacgccaaccccctggtgagtcacatccatataattttctaaggtctcagcttcgggtaggtcaagtttgtggcaggggtcgatggggggagagtcaggatggatgtcgtcactaatggcgccaccgcggatgggggcactcccccgtgctctgccctcgggggagggtgatgactcggttgccgttgatcccagatttggcgactacgattagaaaccatgtaacccttcatgctaccgatctcggcccttcatcg

SEQ ID NO: 67092 - DNA, 813 bp, Zea Mays
gggtggcggacagatgagtgcgttcccgatgattggtggtctctcagttcaaattggtgacacggtaagcattacagagctatgagagtgctcaaacgaggaagcaggggacagggactgaccggaaaaggcctggccacggcgaggtgttcttcgcggtggcggagacttgatttgggggaagtttgaaattccagagctcggttgaacgattacgggtgggagtgggtgctaaggcttcacgatgacatagtgcagctaccccgaccatcaatttatagagggcatcgacgatggccgggaatttgaagaaggacgcgcggcggtcggaggagaggaagggcactggcgcacgtgaatccgtgtccatcgtcgtggcaagctcaccggcgatgatctaacggctgtaaagagtcacggtgacgcgacagaggtgctcggatacgtggcgtaaggctgagcgacggtgatcaccggcgtttttatccaattctgccgcggtgaacgcatgtacggtggccggaatattttatcggccgaagtttatccacggcggggacccttgcttgatcccaagtgttatccactcagtccgcacgaatcacggcgagcaacgatcaacggcgacgagctaccggcgacgagcaggggggtgggatcttctttagttcatctattactgtaccatggcaatcgccattcagtcgattgacagaacatcttggagcatgatttactctcaattttcaatgacaactcattaaactttctgcagcaacattgtagagctataaactagctacaagtttgtca

SEQ ID NO: 67093 - DNA, 519 bp, Zea Mays
atgaaattctagcccttcaaatttgtcttccagtttttggacggctgtatagtacttgcccatagaatcattcgagcaatcccagtctttatttatctgacttatgaccaccagtgaatctccgtataccatcaacctcttaatgcccagtgatatggcaatgttcaatccatggatcagagcttcatattctgctgcattatttgatgctgagaacgacaactgaagagcatatttgagttgttcacctctaggggcaatgaagaggattcctgcgcctgctccctgtagtttcagcgagccatcgaaatacattcgtcatacttctgcagcctccgggttgtctggtacttgttgctcggtccattctgatatgaagtcaactagtgcttgagtctttattgcagtgcgaggccaaaactcaatatcgtaagctcctagctcgcaggcccacttggctattcttccaatggcttctttgttgtgaagaatatcccctattggaaacccggtgactac

SEQ ID NO: 67094 - DNA, 315 bp, Zea Mays
ggcctaagagcaagcacatgtttttttaatgtgccaagtggattgtaagaagatgctagtacagcatacatgtgtgttgggtgccattgtgtttgtacagtatacacacaagagagaaaatacttgtgatttgtacggacccatcacccatggatcggataagaaaatacaggtgcatacatgcatgctccactttcctttcttttatcatgtgtgttaagttttgagttttgcatggtgtcatttgtgttggaatatgatttgaattctaatgtcagccttgtggatatttgttttcttattggactacagtcc

SEQ ID NO: 67095 - DNA, 1768 bp, Zea Mays
gccgaaagcagcccaagcggtccaaacctaggtggaaaacacgcgcgaccgcgcccgtgctgcagactttgcaagaaaacccctggcattctggttaacttgaagtgggttctttcactgttgctttgagtcactcacagtttccaagaagaccccccgtattctattcctttactagtcgaggtccccgatagggaacagcgttgcagagctccggcgagctcgcgtaccggccgaaccgctccaggactggcgccctactttggtagagatcaaatccaagatctaacgagggtttcccctcaatcaatttcacgattggcgatctacctagctctgcccacgaagacagcgggcatcgtggacattcactcgcgttcccggtgatcagtgggttcctagttcaattgggcgggtcgatgatcatcacgggtacacgagagcactcaaacgagggagcagacggtatgaactgacctgaattgcgctggccacggcgaggtgttcttgcggtgtgtttgagcagatttgggggaactgtaaaattcgagctcgctggtgatcaactgagggtaatacttggtggctgggtgtgtgatgatcttgcggagcttatggagggctcaatttatactaagcgagagcggtggccgggaattgtagcgatgacgcgcggcggtcagaggagggggagttcactggcgtagtggattcgtggcatcaaccgtggcattcagtccggtgatcaatggagggctaaagcagatcacgacgatgcggtggagatgcctagacatgcggcacaaggccggaaggcggcaatcaccggcgatctcatcttaatccaccgcggcgagcgtggtacggtggccggaattatttactggccggaggttatccacggcggcgtgactccaagcgttatccgatcaacccgagcacgaatcgagacgacgatggcacgaatcgcgtcggagagatcgtcggcggtgaaaaactgagctggtggtctgatctacttcagatactgtaccatggcgaactctatgcagtgcacctgacagccaagatttagggcagattttctctaaatttttcatggcaactcacccaaagctctgcagcaaagttgtacaccaatgattcagctacaatcttgccataaaaactatagccaaattcctactagatcatgcttgaattcgtgcccaaatttcctgcagttgcagtgtcagtctgaaattcagacttcaaacagcctgacagcccatctttgggtgcatttttctccaatttcttcataacaaccatgcttactctcttaagcaaagttattctcctttgataggtctacaatgttgatgtggtgatctagggcaaaatctttcttgtttggaagttacaaggtcacaaagatgagctcaaaacactgaatttcagacttagctttagaactcaaatagggtccttttgcaaataggtccaaaattcagggtttagcttgcaaatcttcatgattgtgaaccatatgacttaagataccttactttcatagtttttgcactttagtccaaaagtgcactgattttgcacttagccccctggggtttaggtttagggttttccagggtcctttttagggtttttggtatttcaggggtgtgaatgtaatttaggtccattcttagtgacattttatgtctatttcacttaagctttagggttttctctatttggactttatttaacccttctaatccctatctag

SEQ ID NO: 67096 - DNA, 780 bp, Zea Mays
gcatacattgttaaaggccttctggcatgcttcaatttcatttccaagagcagtggctggccttctgatgccgaagtgagaccaaatagggcgttgaatgatcccctttatatcttctctttcaactaagttgttctttacataaaaccactcttctatccaggctcctggccacctcttccgaaacgtcgggactggatagctcacatcagagcgaggcacgaagccgtaacaaccaaaattattatgatattgctctttgcgagtagacttcgtctcataggacagatcatgcatgttatagaagcattttgcactcggctctagtccctggctcctcatggcccaaatgaaaatccccattttgacgatagcttcaggggtaatctgatgaaggtaaatctcaaaagtcttcagaacttcaactaaaaatttattcaagggaaactgaagccttgccttcatgaaactcctgtagacaacaacttcgtctacttcgggcgtaggggcagtgttatctcctccagccctcacaatagaaatatcacgaaagtatcttcctttcatagcatcaatctgactctgcttgatggttgattttccgaagatggtatgactcggccaccaaggccgatcttcggcatcttcatttccactttccaagtcaaaactttcactgtcgccggaatcctcagataacccagccaacatttcattggtgattttctctgtattcgtcttctccatagcctcataaaacccaaccagtgcaggttcaac

SEQ ID NO: 67097 - DNA, 1450 bp, Zea Mays
tgcttgtactctatccatttggtgaacttgtcaatggcaaccagcacgtgagtatagcctccctgagctttcttgaagggttcaatcatgtccaacccccagcatgcaaatggtcatgttatagggatggtctgcagctgctgtgccggtaaatgttgttgcttcgacaagaattggcaagcttcacacctctggactaactcggtggcatcactctttgctgttggccaatagaaaccagacctgaaaactttcccaaccagagttctggatgctgtgtgtactccgcactgtccggcgtggatttcatccaatagctgcttcccagtagttgaggaaatgcacttcatgaggacttccatcgcaccccttctgtatagtgcgccccctatgagggtgtagtgggccgactgtcttgcgatgcgttctgccatagccctatcatccggttcttcttcattctttatgtacctgatgataggctctctccagtcattagggtccaactttggttggtttaatgtgttgcattcttctatctgatcggagggaatactcgggtgtgacacttcttggacgaagatcccaggtgggacctgggcccgactggatcccagcttcgacaacgcgtctgctgctgcattgcggtctctttccacgtgatggaattccaacccttcaaacttgtcttctatttttcggacggctgcacagtacctgcccatagaatcagtcgagcaatcccagtctttatttatctggcttatgaccactagtgaatctccgtataccatcaacctcttaacacccagtgacacggtgatgttcaatccatggatcagtgcttcatattctactgcattatttgatgctgggaataagagctgaagtgctattctactgcattatttgatgctgggaataagagctgaagtgcatacttgagttgttcacctcctggagcaatgaagaggatccctgcgcctgctccctgcagtttcagcgagccatcgaaatacattcgccatacttcagtagcctctgggttgtctggaacctgatgctcaatccattctgatacgaagtcaactagtgcttgagtctttactgtcgtgcgaggccgaaactctatgtcatgagctcccagttcgcaggcccagttggctattcttccgatggcttctttgttgtgaagaatatcccctattggaaacctggtgacaactatgactttgtggtcgtcaaagtagtgacggagcttgcgagcggttagaagtaccacatacagtagtttttgaacttggggatacttctttttagagggtccgagaacttcgctgatgaagtagaccagatgttgtactggatatgtatgtcctgtgcttctgtggtccactgaaatttgtccaccttcttgagtaatttgtagaatggcatacctttctcaccc

SEQ ID NO: 67098 - DNA, 653 bp, Zea Mays
gcccaacagagcttgctgccctctacctccaagcgggccccgaggatctgatccaggcgccggaggtgatcggcggcggagtccagcaccgggagggcatcggagatcgacatcggcagctttgacactgtgatggggctcatccctagtggcaccagtgtcgtgctcgcctcgccggcccactcggcaatgtgctggaccccggcgcgatgctatgcctggagatattcaagggccttcctggtggcctccaccgcctggggacccagcgccgcctgcgtcgcattgaactagtggatctgctcctccagtttcctctctttttcctctgcctcgagctcgtgcttggccagcaactcgcctcgtcgggtgagcatttcttccctaaaggcgagatccgtctctcgcctggcgaggtccatctcccgcctgtccaaggactgctccttcgccttaaggttttccttggcgagggcggcgtcgctggccttgccctcgagctcttgctgccatttctgcagcctttccacagccttgacctgctgggcccgctgggcttccagagtctggtccagagcgctcagcttggcctggtactccgtcgtgagggcctccctctgggtcacggcttcctccctcctggccactttctt

SEQ ID NO: 67099 - DNA, 950 bp, Zea Mays
tgaaattttaacacaatcaaggtaagaaaagcgtctacaactttcgtataacgaccatgaacaaattgtaatattaacttaagcaaacaatgcagtttctgaaatctgtatagaatttggacagattcagttactgaatttgtgaacagcataactactaaacgatcagacttatggctgtcaaattttaacacaagtaagataataaggttatctataactcttctatatgacttttctacagaaaacatgattcagttcatcaaacatacaacacgaggaaatcactgcttgcagtccaaaacaacaactaataattttcagctcctatataattcaagaattgccgcgttttagagacttgaattattctaacactttaccattggttagagttaaattaattaaatgaggactcacaagtagacttacaaatttgtatacaagttattccgtgcgctagaactaccatacacaattaatcaacgcattcaccagaatcatcaaatccggcatgtaagtatatcgaagcgcttttcacccactagttcgcattttagcttagacaccacatgagaactactaatttttactcgcgaccataaccatacacatttagaccacaacaagtatttcatcgtgattacgagcttaaccaaactatctagcaattcggctaactagagcaacgacatagcccgctaaataacatacatgtcggcttgcctattattatcgcaatccgagacacagcatatacatataacaatcacttacgaaatcgactcctacttaacataagttggctaacgtagtacaagacttagcaaaccattttagacattgtaattcaaaacatgggttggagcagattaatcagcctttcctaattattgctcaacttaaattagttaacacacatgtcacttaaaatagcacatttttggggt

SEQ ID NO: 67100 - DNA, 889 bp, Zea Mays
ggcggaaacccgtcctagttggagtctttgtgttcaaactctacgaaccataagtaaaaatcaaatagacgaagttgggagcggcaaggaaatagacggctaggccacctcggtagctcacattggcgagttggtcgcaacgatcgaccgataggattggcaccaaccccttatcaaccgattatcagactgagcactacctaaagacacaaccgaggctaggattctctctcgcaaagcaaaatccttcgtgattattgacggaatgctctataagaagagtgcctctggcatcaagcaaaaatgcatcacgttcgaagaggggtgacaattgcttgccgaagtgcgcggaggaacgtgtgggcaccatgcagccccacacttgctcgtcggcaaggcattcacacaaggattctattggccaatggccatgatcgacgccgaacaagtcgttcgtacctgtgagggctgccagtactacgtgtggcaaacgcatatgccgactcaagctatccagaccatacccatcccctagctgtttgcggtttgggggtaggacttggtcgagcccttcgaaagcacccatgggctgcacccacctgcttatagtagtggataaattcaccaaatggattgaggccaaaccaattgccaagctcaaatcatcagagtctgccactttcttccacgacatcgtctatcggttcgaggtgcccaactccatcatcactgataacgaaacccagtttacgggagaattcttcctacaattctgcgatgacttcaacatccgcgtcgattgggcaacgatggcgcacccgaagtctaatgggcaggttgaatgagcgaacgacctaatcttgcaaggcctcaaaccactaatttttga

SEQ ID NO: 67101 - DNA, 291 bp, Zea Mays
caatatgtactgacgatttagttaagagaatcatcatcaacattgattggttacgattcttaagaagatgttaataaagattgttgaaagccacaaacatgagtaaaaataggtctataaccaccaatacaaagcttctatgcactagtgttacgagattatcgaaagtaccatctgtatgtgcgtcccaatgcatgtttgcgaaatccaattcgtgcatatgtgatttgaatttctcatggtttccatactagctacctcttgtttttcacagatttgatgatagtcaaa

SEQ ID NO: 67102 - DNA, 659 bp, Zea Mays
ctagcagccaaaatatccactctctttgctcagcaaaacagataggggagggagcagataaggcctccacggagggtatacactatagtccaaggttgatatttcttacagcgtgaggccactaaatttgctgctgtctagctcatcccatcgcaggaccaacagacaaagcctcccagcttatcttccccaaaacagtccacagttgattttcttttgagtagagctgaggagaatctagatccttcactgtgtacctcgtccataattccctttgcacacacaagtgagatcagcagggacaggatcttcttcagttaatcaaacccaacactgaatcagctttatcaaccattactgccctattgcacagctctctgtttgatcccctttatctcacaaattcacttagcaacaaacccatcatccttaactaaatttagtcactaactacagccctaccaacttggtatagcaccccaaggctgcaactataaagaacacaagttatgggcaccaaactggagcccaaaagcactgaaaagtgcagtttcagcttaactgaaacaacccaaaacagtctgtcagagggagtttagatgcattctactccacagtttgcatggcactaggtccatctcactttaggaaacttttac

SEQ ID NO: 67103 - DNA, 1301 bp, Zea Mays
taatatcttgggaggttcggtgatagattgtgacaccccactgtgcctccttctaaacctttagggaaggactaagccatccggagacgtactagtcgctcggaaggaccctagtgcctagggacgaaagatccttcgatgtctggtctagaggcccagatagggtcttcaggagaggcacccctcgctagagataagcgccagtaatgcctgtctataacacctttctctcggaggatacacaacctcaccatatttctttggatttgaactttctcttcaggcgtaacatcgtgactccagttgaatggagcatcagacggaacgctccaatcgacgccaagaagctgtggtcctggcaagggccctttactagtgtctcgcaggtagaaccatcacctgtgccaacccttattagacaaggaaaggggaattgagatatacttgtgcgacctcccgctgcgaaggcgaatactggcacactcaatcgaccacacttccattgttctctactcatccttcttccgcaacatctcgacatagaagaagtatctccataaggtaatatcaggctcaacacctagatacccttcgcacaaggcgatggaagcagctatgcactgaatcccatccggattcagatagtgaagctgcacctacaaatacttgaagagggtcacaatgaaaggatgaagagggaaggcgaggcctcgctcgtggaagcaaacaaatgaaaccacataaccgagaggcggggtcggggcctccttgatgcctagaattagccatccgccatcgtcaagtagaccgcgcccgacgagggcctaaaggttctcctggctcattaaggatcagtgctagtctgccatagggagcacaacagatgtcccaagtgtgagaaggataggccaagtgaggtagatgaggaacaagggaaccgaaagcaaggtggacaagacaggcagagcgatgcgattaaataattgttgtcctacgaaaccctacagctttgtgccagcggagatgacacgacagaggaggaagcaagcctgacccaccaacatgccaggcctcatgctatcccaggtagagacatgtgtaagttattcccctgtgcacaataaatgagggaacacaaaggtaaaagccattaaggcgggagtttcctcggattacatcgtgtaaggatttggtatgcatagagtgggggtgaataggttacctgtaaattttcaggacaagaaactattaaattccatagtggtagtgccactcttagcctgacactgtcacagtctggc

SEQ ID NO: 67104 - DNA, 933 bp, Zea Mays
ctggtggataattggaggcaagcgtgggtgcgttggcttcgtggtaacttggcgcaacagccccggccatcaatttataggagggtaaagcggtggccagtgaatttggggaggacgcgcggcggccggaaatgaagaagaaggcgggtgcggtgaattcgtgtccagtggcgtggcagttgttccggcgatcaacggggagtgggggtaagtcgcggcgatgcggtggaaaggggtaaacacgcggcacaaggccggaaggcggcggtcaccggcgggcttatctgctcaaccgtagggtagaggggaaaagcacgggggtcgccggaatggagcccagctcatcggcggtgaagattctccttaccccgcgacgttatctggttaccaacgagcgcaaatcctaacggcggcggcgcgaatcttcgcgcagagaggtcgccggtggtgagatttttctgccgcggctgatctgatccgtttggttactgtaccatggggaaatggtattcagtccatctgacagacaaagtttgggcatcattttctctcaaattcacatggcaactaatccgaggctctgcagtaaagttgtagactaacataccatctccatctttgttatagcagccatgggcaaattcttaatagattagtcataatttgtctccaaagatgatccaatgtcactgaccatataatcttcagcttattttattctgacagcccatctttgggctcacttatctccaaattttccataacaagcttgctcacactcttaagcaaaattgttcccctaacatagagctacaaagttgatgtggtgccctaaggtaaatttttactatcttgaaagttgcacagctctaaagttgagccctcaacactaaatttcagacttagctttagaacacaaatagggtccttttg

SEQ ID NO: 67105 - DNA, 511 bp, Zea Mays
ggagaccccactcgagcaccgtcgggggctgggtcatagtctgcactacccacttgagccggatcatccccggcagcaccctcgggggctgggcagtggcttacacttcccacccgaaccaagtcatccccggcaacatcctcgggggctgggcatgtgtcaacaccaccctgggggtccaggttctctgcggtagccacctctaaggctgatgggccctcagttacttccatgggactagaacgatccaattcagtctcccgaccctcgagatcgcgctccaacgtcgacgaggcacgggaggacctcaacccagcatcttgcacatcagcacaaacttccatcacaccatcatccactggctccgataacaaatcctctggaaccatatcctcaagagcctgatcaaaattggccagggacagttcttgcaggccaatgagagcagacaaagcaggagagggaactccactactttcaccgctggcgatgaactgtcggctatttttcc

SEQ ID NO: 67106 - DNA, 713 bp, Zea Mays
ataaaatcttacccttttggcctctctatgaaggattttcaaaccaaaatagtgatgctttgttataatagcaccgacgaaccgtaccctatccctctagcaatgccacatgccttcattatgccaacgttcaatagcacacactagcaccgtcaccttgctcatgctggaacttctgttcttcaacaccatgccaccacaaactatctcgtgcaatagatcattacacgcacaattagacattccttcttgtacaaaaattggcatttcagtgtcaatgcttctacacaccacaatacttggacctcatatatctaatgcaataatgaaaaagaatttggcaacacactcacatcacccttgacagatagctgctttttcccgtccctatacatcataataaaatgcccaatccgagcacatcactagaaatacatataacatcatccaagcctttctaagtatgtctacctccggagttttgggttgaagctcttcttacaaccactaaaatcttaaatttccaaaaaactagtgaagccctatttgggtcaacaccataagaaggatgccattgggttttggatgtcgatgttatcctaacttttcatccacaattccccacaaacttgttcctcggtctaggtgcatccttaccagatgcctaacaaaccaaaaaggatactaccactttgatttctctactaattgca

SEQ ID NO: 67107 - DNA, 737 bp, Zea Mays
ctagattagaatccattaaatccatcgtcagatcttcatcaccttcaaatccttctgagcaacaatataaacaagggtgagcacacttatggtgggagctccacaagtgaggagaaaatgcaaggttaacaaggtaaggctactttttaatacgattaatattttacattttcgttggtaaagattttaatatcaatacatatttactaggtattataccaaacccaattaatcataaataataatcaacataagctcaatccacttgaccaaattatcattaacatgaggctcagaacatgatttatttccatcttcaagttcaattatatgtgagggttcatgtcgctcttaagtatgagtattgggacagagaccgaaccagccctcgatcaacccttctttgcccccgccctatgtcaaaggctaatgtttgtttggatgcaggcccaatgcaattgcagacttcgctaagcgcgagccattacaggggacttcgcctcctagggaccgacgatagtctcgaagggatggcccatacgagggctcacgaggatcgaaggcgagtgttacgcctgtgaagacatgtaggtctcgaccagtcagaacccttcgacatgaagtcaaagggcggagccaaagtgttcgtgccgtcggatcgaaggctccgcggagataaatgtgaggcctaggatggatcggatgcttggagcatggaggcgtctcctcaggtccac

SEQ ID NO: 67108 - DNA, 405 bp, Zea Mays
aattgcgtgagtgaactgtccaaacataggttaaggttgtaagacaacttttttccaccatacagttgctaaaaagatggaatataaagaattcaaaacaataggtcaccttttaaacctcaaatgacgtttctatgatattgtgggcattgtattcacactagagggtattagagtacaactagtggatgaagacgttattgggctagctaatgaacttttgtgatacctggtttccaataatcccgtctattcatggtaacttagatggtgtttatgtccactcaagtaaaacaccacacaaaaatagtgtttctatgatattgagggcattgtattcgcacgagagggtattagagtaccactagtggatgaagacattagtgggctagctaatgacctttt

SEQ ID NO: 67109 - DNA, 303 bp, Zea Mays
tgctgtgccagtaggtgttgttgctttgacaagtactggcaagcttcgcacctctgaactaactcggctgcgtcattcttcgctgttggccaatagaatcctgacctgaagaccttcccgactagtgtcttggacgctgcgtgtattccacattgcccggcatggacctcatccagaattcgcttcccagtagatgagagaatgcatttcatgaagacgcctgatgcaccccttctgtataatgtctccccaatgagcgtgtagtgagtcgactgtctggcaatacgctcgactgcatttttg

SEQ ID NO: 67110 - DNA, 1805 bp, Zea Mays
aagctcatctagcatatcatcaaggcgtggtattggatatcgataccgaattgtgatgttattaatagcgcgacagtcgacacacatacaccatgacccatctttctttggaacaagtaaaacaggaactgagcaaggactaagagattcacgaatgtaacctttatcaagcaacacctacacctggcgctggatctccttcgtctcatctggattcgtacggtacggggcgtggtttgggagctgggtgccggggatgaggtcgatctggtgttcaatgccgcgaagcgggggaagacccggtggcaagtccatggggaaaacatcagcatactcctgcaaaaggttagaaacagcagggggaatatccaaaggcggggtatcatcaagtgaaacgagcatactagaacatacaagtgcatagtagggcaagtgagtatcacgtaggtcatcaaaatcagcacatgtagcaagtaaaacagaagcatgcaacttgattaggggtggatggcataggtgcatgttgctttgcagtttttgaagcccgagcaagatcatcttttataatttggtcaggggtcatgggatggataattattttctgacccttaaacatgaaagaataatgattcaaacgaccatgatgtaaactatcattatcatattgccacggtctaccaagtaacaaagagcatgcttccataggaataacatcacaatcagcataattgttgcagccgccactatcgatgatgatgcgaaaagggaacacgtaccgagcgtgtaactttgattttgccaccatcattaagccattgaatgtgatatgggttcgggtgcttatgagtgggcaaggataacttctctaccaaagttgtactcggcaaattgttgcagctaccactatcgatgatgatgtgaatcgatcattcttgtacaacgcctttagtatggaatagagtgtgtcgctgattgttctcaggttgggcaacctgtgtactaagaacacgctgtgcaacaagactctcatacctctcggcatcgccaggagcgacatgtacctcctcattatctgcttggtcagtggcaagcatagcatgtcgagtttctttggaatcactagcgaaagaatactcaccattgtcacgtatgagtaaggtacgcttgctggggcagtcccaaattacgtgccaaatcctttgcaatgatggcactgaatatctcgtgtatgtcctgtggaaggaatagcgcctgtaattgggggcgttgcaggtttggccgtcctctcgcgtggtgtagtgctaatggtggatggcacgggaagagcaggagctaagctggatgtcgggctccgtcctgcaaaagagttagtatgtgtcttggatcggcgcccctgcacttcacgttcagctttgcaagcatattcaaacaacgtggtcatatcaaaatattccttataatcaagtatatcctgaatttctcagtgcaaaccaccgcgaaaacgtgccatagcagcgtcatcctattcaaacaaaccacaacgaatcatacccttttgtagttcctggtaatattcctcaacagattgttgaccttgttgaaaatgctgcattttattaagcaaatcttgggcataataggaaggcacaaatctgtgtggcataacaacttttaattgagttcaagtggtgggagtggcagtgggatgtttttgtttatattcacgccaccaaattaaagcaaaatcagtaaattcactaatagcatctttaacttgagaagaagcagaagtatcatggcataca

SEQ ID NO: 67111 - DNA, 471 bp, Zea Mays
gcattgtactgcgttcatgtttgaaagggcataaccacaccgtaactgatatgtacataaccccgcacaatccacattcctaatcacctaagaaaattattaagttgttacctgacaagggggcacgagtgttagaatcagcatccatcactcttgacatggtgccgtgtcctgtatgcacgttgcataataccattgaccgtttattcagcgcaatgctcaattccaagacacttgttggtaacaaagagttgagccaccggttgtcccagacacagtctgaaatctttccgctcttgttggtttcagatgattgaattgccgtagtactcaatatctagaaggcctgttgtaaactgacagagtgatatagaccagaagagtttgtgctgtgaggtctttcacgtttatgacagaataggcatgccatatatcatatagtggtagaagtcacaatcataggatattcag

SEQ ID NO: 67112 - DNA, 349 bp, Zea Mays
tcaataggtacaccaccaatgggatcaacctcagtaaagacctctgctggtacttcttcacaaacaggagcagaagggccagcatcctggtccaagcatgacattcgctgaagccgtctctttttcttcttctcctcctcaacaggcacagttgggaggctgacttggcgaggatgctttgagagaataccctcaggattttgggtgtccactattttgtcaagctcttgtataatcgtaacagccattgcttcagcagggggcgagtcagaagattctccagccaacatattgagtacaacatctatttctgcatcatctagacttgtcggcatctcaaaatgaactt

SEQ ID NO: 67113 - DNA, 374 bp, Zea Mays
attaacaaagttatagagcataaaataaactacaaagtgtagtaagaaagattggtcatttgaattttccaaaatccccaaaacagccaatgaagtgaagcctctaggaaaaattcagaaattcagaaaactgaattttagaccatttccaaagttcagatgtgttccctgttttccaaaactcaaatccataaagtccaaatatcaaagtggcgcccaaaataccctaggaacactctggtgaagtttgaaatcaaaccaaaatcgtttgacatgatttgacataggttttgtctcggtttgaacagtgctgacagagctatcttcacgccacaatatcttctcacccaggccatatctttactcgggactca

SEQ ID NO: 67114 - DNA, 640 bp, Zea Mays
tttgacgatgcctccacgttgtccttgctcatcacccatggtgcccttctacttgtgtcgtgtccctacacatcccccacaaaacggcaaggctgggtgtatgattcgttccatcaataacatcatccgctctcttttgttttaggcatccctgtctccttgccgttgggttgaaaaactccacaccactatgtatctattgaaccatttccccaccaaaatctcgtgcaacctaaccccttttggcacctcgccttcctatgagcaccttcgggtatttgattgcgcctactatcccaacctattcgccaccactccccacaaactctcgccccttgctctataatgtgtctttcttggctactcctccgatcacaaggggtatcggtgtctcgatctctcttctaaccgtattgtgatctcttgtcgtgtcgcgttcgataagaacaatttctcattctcttgagcatcgtctcccactagtaagcttgatttcctctctgagatggactcgatggtatctaccatcaaccacctcctcttgcgggtacccggtcttctttagttcctgtagcgccacatgcagtcacgatgccaccctccacgccgcatggccatgaccatgatgccctttgtgcct

SEQ ID NO: 67115 - DNA, 721 bp, Zea Mays
gaaaagttgaaacaaacactttagtacaaatggagttaaactcgcggtccaccagacatggagaaggtgggagtgcgcacaattttttttcacggttcgtgcctcttcgtgcccatctgttagtataaaagcgatagagcgggtgaggggcgagtcacattcactgccccagcccacctactgccaaaaatttctgactccaaagctttcattccaccgctacttccaaagctaactttgacaaaacatcttcagggtgcagttctcttggatggccagaatccgtacaatggctaggatactttggatgtgccagtttctttggaggcgcttcagcaagagggtgatactttggatactgtgccattttctacgacactgatctttgaagtcatgagggcttgtcatcaatgaactctgtagaggagctgcctaaggataggctatcaaaacaaagccatattgagataggtcgatccatcctgaaacagaaagacttacagacaatgaaaaagcagtgttattttagcagtaaagttaatgtgcgacttcctggggacaagacaactccaaacccgaagaagaacaaagttgtcgtctttaagagtttctttactgctgggcttcgactaccaatgtaccaattgattgcaaagatactacagaagtaccaagtatttatgcatcagttgacaccaaacgctatagttcgtcttactgt

SEQ ID NO: 67116 - DNA, 505 bp, Zea Mays
gtacgaacaaacaagatgggttaatggtgcacctgtcagatgttgatgcatggaaggctcttgacaactttgatctagagttcgctagcgatgcaagaaatgttcgtatcggcttggcaacttatggtttcacgcctttcaatatgactgttgtgtcgtattcatgttggcatgtcattgtcataccgtacaaccttccacctgctctttgcatgaaatatgagtttatgttcttatgtcttgttatacctgggcttgagcatcatgacatatgtctaaatgtgatgcttcaacctctgattgaagagttaaagaagttatgggaaggggtggaagcctatgactgcttcaagaagcagaaattcaatctttgggttgcgtatctattcttggttcatgattttatggcgtatggtattttctttggatggagcgtgtatggtagattgacatgtccttattgtggtcaagatacagattgttttcgccttagtgctagtggcaa

SEQ ID NO: 67117 - DNA, 342 bp, Zea Mays
agtccacaagggccgaccagctttccgcaagttcgttcgatcgattaggattaggattacgtacgtacagcatgtaggaggaggatcggagtagtacatgcattgcacgcacgcgcgcggacaatgcgtgacggacacccgaaagttccgagctgcacccatgctatgcacttgtatatctacatcaccactcatcgccatactatatgatacgatatacccggcccggccccttggtgaaccgaaccgtacgtacagctgatcgatcggtcggacggcgtcggcgtcgccattagggtttttttaaattggtgcccttagttttggttgtgtgctcatcta

SEQ ID NO: 67118 - DNA, 442 bp, Zea Mays
tttgtgtaaaaccaaacatctgatcataaaatccccgacctcttgctccctaacatcaaagcaatcgctattaaagcctactaaaaggccgccagacctacctctagggatagaatgaatccaaatgaactttttcccccactgatagcatctagccaagattggctgaagttctttttcatagtctcttgcagacctatgaaatcagccttctcatcacaaatgagttctttcaagaactcaatcttgccttgtttcctcaaaccctgacagttccaaatgattccaatcatttaaaactatatctaatgtcatgtctttccctcatctgtctcctcttttcaggattttttcctgactttaggagaggtgacccacatattttttccttatgttattttttatgatctatcgactttaatccagtcaatatcatttcctt

SEQ ID NO: 67119 - DNA, 528 bp, Zea Mays
ctttcttggaaacttaagttgctattgaagtcctacgactgtttgctgaacaggtgggaaacgaagagtcgccctttgccctctttaatagtctgcttgcccttggtcgtctacctcacttgctcttgttcttatgcgctccacttctccttttcctactggctcgagagaaccatggccggtgggaaaggaggcaagggcaagcgtaactcagcgtacgggaagcgcaagcgttctacgcgtcatctaatggaggactttagtgactcgaagtattatgaggaggagttctcctccgtgttcgatgactctcctccatcgacctcccccgtgccgtcattcgatgactcgaacgattccatggggctgtcagtggccgagcgtgcctacatttggtccatcgagcgagcagaacttggggggtcggatgactcagagggggaggactcatcggaggaatccgaggaggaggactccgaggaggaggtcggtggcggaggcggcaacgggggcaatgctagtgtcggc

SEQ ID NO: 67120 - DNA, 677 bp, Zea Mays
gtgatggatccgggctccccatagcgaagtctcttacggggagtggacaacgccatggcgggaacctgggctttaggcggatcccatccttgaagtagggcttccagggctgcaatcctggcatgggcatcctctagctccaagtgcaccctagagagatccagggtggcactgtccaggtcggtgttgagaccggccactacaccagctagggtgttgaggcgatcctcaccagcttcacctggaacgatgttggtctggcttcctccactcagacgttgagtgagatgcctgaacctcgtgtcatgcaactgttgtcggtaggtgtggctgagagaccacagggtccgtctggcagcatcgctgaccgaagcagcgtaggtggatagcggtgtcagggactcatcagcagacagagtcctgaatcccctatcccctgcatcaatcaccctgacgtgaatgcgagtgatgtagtatcaagcccggggaggctcgctcactcgctttgtctcgtacaagggtcggacgtaggttcccaacgcatgcaacacgtcttgcagcaggttggggaagtgccccgtctcgaacattgatgtgtaatgttcggtgacaggaccaaaccccatgaagtagtcctgctggacgtaggtggcctcctcgttgacttgttcctcttc

SEQ ID NO: 67121 - DNA, 1295 bp, Zea Mays
ttcagcaaagactcatgaaagagtattgaaaaaggcatggtccatgcttgcgacaatactgtcatatgaattacgctttcgacaatgctattcctacgcaacgtctacggcaagaatcaaacatcatgcagttgctttggcaaagaaggggggtttctttctaaagcatggaaagaagggaatgtgttttttcgcccgccggctcaaaaacggtatgtacgaaggttccacgcttcacaaagaaatatattacatcaatatacatgcaaattgtttataagtgtttcttacaaaacctggagttatgtacaaggacattaaactatcgaaaatacaaagcttcagtcttcctttaggactttgtcggcaacttcattcagcagcttgtcaacagcttcgtcaattgcatcattagcaatcttgattatatcgagcgcctccttaacagatgggtcagcttcaggattatatggctcgggagggggagaaagctcagctgcattaaaacacaaatatctatcagtgccgaagctgaaaaacttacgaagctgagttataaagggcatacctataagtctagcccgctcgacagcttcctcaactcttttagcctcttctaaggcatcatgagattctttctcattccttttaatggcttcgtcatcaatttctcgtccacccttcagccatacttaggaataaaatttcccacccaaggttgtagcttcggctcaagggtttctaacatcatcaactcagaaggttaaatctggctgagctacagccttggcatgatcacaaccaaccttctccaaaatggacgtagcccaatgggcaccggcaaaggcacagaagtcccctctgtcactaagaatttcctcaaaagcttcgacctcaccgtttatccattgaataacttcaccaggatttccacgaatgagtttctgctcggaagaaaatgcaccaacttttcaaaagttgttctttagatttttagcacattccatagctatttcatagcatttttctttagcagcacgaagctcatcaagattttctgtgcccttgatctttcaatttcacatatttcgtgttttactacttcaacattaaaattcttagttgcttcagcaactttcttctttagctcttgcatctcggcttcatgagtttcagcttttagcagaaagcctggcttcgctagattttaatatctccacagaagagagtaggatcttatccttctcaagagcttcgtttcacaatgttatgacctccgaacgaaggtttccaag

SEQ ID NO: 67122 - DNA, 441 bp, Zea Mays
aatttctgtcaagtgtcaacacacaggctcttagcaaatcctcgaggaccttgttgaccctttctgtctaaccatctgactgggggtgataggcggtgctgaagtctagcttggtgcccatagcttgctgaaggctcatccagaattttgaggtgaactgtgttcccctgtctgacactatcttccgtggaataccatgaagtctgactatttccttaagatatatccgggcaagggtggctcctccaaaggtagtttttacggggatgaaatgtgctaccttggtgagacagtcaattatgacccagatagaatcgttccctttttgggtccgaggtagtctggttacaaaatccatgcctatttcttcccacttccatttgggtactggaaggggttgcagtagacctgcaggcttctgatgctctaccttagttcgct

SEQ ID NO: 67123 - DNA, 498 bp, Zea Mays
gcaaggtaagaccatggagcagcgaggtggatctatcataggggcacaatgagggtgtagtttttctttataactcgtcatgcatgtgtgcagactaataggccgggtttatggggacagaccccgctgggttgttgtacacgttgcgttacctagttacaaaaaggaaacagatttgacccctcagacttgctctatgaatagaacttacagagatgtttcggcatcggggtaaggtactcctctagtcatagctagatggttgccctaggtcggtgtattcccgttaccttgaagggtccttcccagcagggggagagttgcgaagcccttcttggtttggtacttgccgtagggctaggtcccgcccccgggtctccatctgcatttgacacgggagcccttgtctttggttgtggtcactttcgcgtgtacctgttggctgcctggatccgtgggggaatccagaagggtttccggaggaaggcatgcttcagc

SEQ ID NO: 67124 - DNA, 812 bp, Zea Mays
aattgcgaggccctgccagcacctgatgggcatacttttccgccattcaacctgtgggacaccaggtcacatgggaagagttcaaactggcatttagggaacattatgttctggaaggagtactacagatgaagctggaagaatttatacgtctgaagcaagggggagattctgtgatgcagtatctcaacaaatttaatcatctctcccaatacgtcattgatcaagtggacatagacttgaaaaagaagaattgcttcatgaggggactaaatgacagactccagcgcaagatggccacgtgtctggacctcacatatagtagggttgtcagcacaacactgtcagttgaagccaaaaatgcgggacaaggaaagtcaaaaggatatgcaggtgaaagatcaactcagggacctgaaaagaggacaaggttggtaatccgacctttcaattcaaaccgttcttctcctcgtctgcccacatatcccttcagacaactcgtgttcattcgtcccactcctgcccccgcccagaccaatcagtcgagtgcccctggtgctcgtttccctgcctttcccagttccttgagtggcttcttcaattgtggcaagtccggacatttcatcaaggactgcccctacccgaagcagaacaaatccaactttccacagacttctgggaacacaaatcaaggaaagggaaacacggccaaccctccagtgggcagaaatctgaagaaaactcggcgagtctattatacccaggtggcgactacaccggaaggcgaaccggtgatgatgggtacgttcctc

SEQ ID NO: 67125 - DNA, 1173 bp, Zea Mays
attcatttaacgttatacttttggttaatctgtctatatacttattggtatgccgacctcattcagactctttgttatttgttattcacaatgcatattgctcattcatcacatttctagtcatatagtttatccattatatagttctcatataaggttatatatgatgttttatcagtcccaaatatgcaacattagtacaagatatacgctacgtttcatagacttcaacaatcaactttatagaaatcatttgtgacacatgcaatgtttactgcaaaaacatatgttcgcatcacatacaacatactaatcactgggtgagtcactattgtcgatattaattgcgtgtttttagatgttgttgtctcattccattgaggagcgttacttccaaccttgtttctagatccaggaggtcatcctctcttacgtccaacaaggctagccaaccgaactctattctcctccaatgacaaacatgtcctactattgtgaccattggcaataccacacttctggcatttcctgttcattttctttgtaccttttgcgcccaatttaataaccttttgttcactcccctttcttgttcttcccttgggttttgagttatttggtcttgccaagcttataccatcgactacaaaatccaatttctgtaattcaaaagtatagttttttcagcatataatattatgcagtcccacattcactctaataccattattacctttctggcatctacatattgttcatggccaccacttccattcatatctgcgtgatcctgcaaattaacctatacccgccaacacatttttaagctcgaacataagccaataacacaaaccaataacacatttgtatgtacaaccacaaatcaatatcgtggttaaagttattacctgttcaaaggaatgtatcggtatagggatttgaacattgtccacacccccttcaattatattagatacttcttgaatttcctgtaaaaatgggtcacaactcattatatatcatttacaattcaacatacacaacaatataatcaatatgcatcaatatttactgtaaatacgttggcattcctttcacccaattcaccatctctttcaacgtctatattttcttcatcatagtcctgttattttattgttttatacatcatca

SEQ ID NO: 67126 - DNA, 513 bp, Zea Mays
cgcggctcgcgcacgcagctcgcgtcgagttgttcttcaaggtgaagctggagatcgtggggatccatccccacgcgtggtcgcgtgacaccgcctccatgatcctggctccggcgtgctggatcgagaaggtggacgcggcgtcggccgacaagacggaccagtcgttcttcggcgtcactgcctggacaaacgaccccagcgccatcccccgttctgtttcgctgctcatcgcagagaacgagctgcgggtggtgcattctgacgaggtcctgcatcgcattttcgaccgcctgccctcgtatctgaggaagaaggtgacgctcaagtacggtgttatggtccacctgcgggaggtggaggacctcgctccgagctcctcttcgtcatcttcgtcgccctctccgccgagctccgacgatgacagcggactcggggagaaccccgaccggcgttttctttcctccggtcgcggttggggctctcgacgttggcgctttccctgcagtcgtg

SEQ ID NO: 67127 - DNA, 418 bp, Zea Mays
ttccgatgtgggtgcttgttggttcggtaatcgaactactaggccttttctagatcttgtcttttctaaggcgtagagaagatgcacgcttgcatggggaagcatgctaacctttgctccgcgcagctctttttatgtttgtgcatgtgtttctcctatttgtacaaatcacaaaataagtgatttttgcgagtacgctatgggagctgatgactgtgtatagcatacctttgctcgcgggctggtaacagccacagcgcccagaaatatcagaattgaatcatccctcagatgatctgatctctacttctctagtacatctttgtttaacattagcattgaatcatccctcatcatagttggatatataggaaaccagctgccaacagaaatatcagaatgtaagaagcaatatcac

SEQ ID NO: 67128 - DNA, 987 bp, Zea Mays
ccattgaatggggtcagctttggaaccctgtatctttcaaattatgaggaatttgcctagggtcaacacatcaaacttatagagttatcataggagaacaactttgcttaggtaactaagctttgatttcatacaaagtttggagaaaaacaagctcaaagttgtgttgtcagtcaacctgaaacctgaattatgatattcagtgacataggatgaactttgggagccatttcgaaggtgatccagtaggtgtttgagcatggttactatagcaagattgtagctggattatagggctagaactttgttacagagagattggcaagttgccacatagaatttggagaaaatctgcccaaattatgctttgtcagttgttctgatgaacaatcccgatggtacagtgcacccaaatatctcatatacagagcatctcgccgtcgatgacccttcgccgctattgacgtcgatcgtcgcgattcgtgcgccgtgatttgcggataaccctggacaaggaaagatctcaactcgggaaagggataaagacttatcgccggactgttcaccgtaacacttaccgcgcagtggacagaggtgtcctcgttggagttcgtcgtcggtcgtagccgcgccacgtgcttagaagatctaccacgtcacagtagataaccgtaggaggtcagttcgtcgccggagacagtaccccggggagcgccacgatagtttacgtcggtgactcacccctcctctcgaccgtcggtctcccctttcaaaattggacaccaccgcttagcgcccttataaattgatggtccggtctgttgcgccatgttatcacaaagccagagcacccattcccaccttcaattagccaccatagccggagaatttccttcttcccccaaattggtcgactgcggcgccgtgaatcgcctcatcgcggctagctgcccccaggtccgccctcgctctttttgtccgtgtttt

SEQ ID NO: 67129 - DNA, 501 bp, Zea Mays
caaagagccgttgagagaactgcaaaaattctgctatgtgctagtgcaccggacctcaacagtcgcccaccatcaaagagatctgctccagtcttccatccttgcggggcaccggcctagtctggtgtaatactagaccgaccacgtgtcagctagccgttgagatggccattgacgggctaagagagccattggacccaaggtccggtgcactactagactgggtctatatgccaggccaccgaagatgattcgcatatctctctggtaaactagttcggtgcaccaccggactagtccggtacgccaggccgtcgaggtcccatttcgtacctctatggaatttaggtccggtggaccggtgtaacactagactggtccaatgtgccccaggtaattgaacttcgtctctttcttggattctcttctccaaattaatttcacttgtctaagagtgttcccatgacttagacaattatttctattaccaatccaaccaat

SEQ ID NO: 67130 - DNA, 307 bp, Zea Mays
gttttgagtccgacggtgagtctaggagttcgtttccttggacggaggagtcctcagacgaaggcttagattattttgttgcgttagatgtggctgcagcggagccttcgccgcgcgtggtgggttctgaggggctcccgggtgcgagtactgtgtataggcggcaaaggggggtggcgaaacggagagtgagtgagttgccgttaagtggtaggcgtcatcgtagtgagatggagagtggccgtcttcgcgtggacgggactggtaaacgggaattgttgtcctcgccgattgaggcgagtgtagg

SEQ ID NO: 67131 - DNA, 415 bp, Zea Mays
tgactaatggaaacctaaactttagtcttttaaccactaagagagtgagtaaaggtgtatgaggggggtgtttgccatggttctagatcaaaactctggagtgcacattctatggagttttgagagctgtacaaatctctagagtgtcgcttttgctatgctataatccttaaaaagcaacctaaacatggagtttgaaggaccgccactgtcactggttataagaaagaaatctaaattctggagcagaggtgctccacctaaagctttggagccatgcaacgatatggggatatatcaagttgtaaggtaagttatctccacctaaggatatcgccggaaccatgaaccaaggagaacgaaataatgtacaatgatccatggtaagcgtccatgggtgaatgattaaagtgac

SEQ ID NO: 67132 - DNA, 388 bp, Zea Mays
taaagctaaggccagactggcacgtggcaaatatgaggttacggcccaaggcaggataattaaaacaccactcccgaactaagatgggagattggggattttagataatagacatattgtaatcaccaaggtaagatcgagaaatgagaaaggtaaaggcgatgaaaacaaagcacaacaaaggatggagttaaaactcgcaagcgacaaagaagaggatacgaccaagggaagaataggtaaaatacaactcttagattgagatggcagagaggagattttatagggcaggtataagatacgcatcaaggtaagatatagaggtgagaaaagtaaagatgataataatgaaaagcataacaaatgatagagttaaggcaggactcgc

SEQ ID NO: 67133 - DNA, 448 bp, Zea Mays
aaacactcttgataagtcatcggatgcctgatgtccaaggccaacaatagatagaaccaacgagtagctaagaaacatagcaagtgagttgagactcatctttggttgctctagacacccaaatgatcaaagaacatgttgaatgattagcgtagatactttgtgaagtacttggattagttctgctcatagtgcttgctctaggtttcggtctagtgtttggtgaggtttgagaaactctttaacccttagtgcttatgtgcaccatattgtaattatactcggatgagcttgtatcttgcgagatcacgcctaccttattttatagtatacgttgtagggggcgttagggcacgaaattgtggcatatgaccacttcttgattacaagggcccaaggacgtgtcatatgcttcatggtgtcgcttaggtagctagtatgattcttc

SEQ ID NO: 67134 - DNA, 656 bp, Zea Mays
caacagtcatcatgcgcacatcttttactggctgacaagtgtcacactttgtcacatagcgagcaatctctatcctcattttagtccaccacaatctctatcttcattttagtccaccaatagtgttgctttaaatcttggtacatttagtactccctaggtggatagaataccgagtgagatgagcttcatctagtatctgttagcgagctcagtgtccttaggtatcgctatacgatctttaaaccagagaacttcttggtcatctttttctgaagcattttgctttgccaacttccattttctcttgaatatgctgcatgcccttattagtttttttgagcaacaacaattctctgttgaagaacatactcaagctttagctgtgtcagggttctgtgttgaactatccccaaagttggccccatgtcactgaaacacagtttcaatttcaacactttatctgaaatcctttccctcccttactaactcgactaatagagccactttgaggcgtgtttactcccttttccatgtagcaccataccaacatcacttaagtaaactttactatagtgaccatggtgcttaactttctggatcaaccacagaacaacccccaaagttgggtgaatatcattgaaattccaatttca

SEQ ID NO: 67135 - DNA, 525 bp, Zea Mays
atgatttggaagtgcattaccatcctggcaaagccaatgttgtagcagatgccttgagcagaaaggctcagtgcaattgtatgagcatggatgcaagagttaccaccctgtgcgatgaattgtgcaagctgaacctggaaattgttgcttcaggtgatttaagttatatctcggtagagcccacattgcaagagcaaatagccagggcacagattgaagataagagtgttcaagttatcaaagaaatgatcaagcagaaggcagagaaatacaagtgcttccgtcaggacagcaagggaattctatggtttggagatcgattggttgttcccaaggaccctgagctcaaaaagaagatactggatgaagctcatctttcaaaattctccatgcacccaggtagcaacaagatgtaccatgatctcagatctttatattggtggaccagaatgaagagggaaattgccaagtacatatccaagtgtgacacctgccagaggatcaaagctagtcatttgaaggcag

SEQ ID NO: 67136 - DNA, 450 bp, Zea Mays
caacatgcaccaactgctcctccaaaagcaagcaccccagcaggacctgttgctcccaacacatccaccaacagggcatgcttcaagtgtggacaaccgggacactacgccaactactgtcccaacagagctgcctacactacaccggctccgatgaagcaaggacaagcctcggcaggaaagagtcagcccctatctgtcaaccggagacaagctcatcatgcagaagtagaagctgaaccaggtgaactggaaattcaagaagaagagctggttgaagatgaagtagtcggtgaagaagtcaacgaacaacaagaatagagataaacataaacatagatacgtatatacatattttactatttgtaagacctaaatattagtttagctagtagtagtattttactattttagtaataataataaggtctacttgaccctgtgttttgc

SEQ ID NO: 67137 - DNA, 1371 bp, Zea Mays
ggtggctcagtggaagaagttcaatagacaggccaagatcttgtgcatcctggagaagagagtattgttagggtaaacaaaggacaagaaacattttgagatgtgatggcagcatgcagttttaaatagaagaactgcctttgcacgttgatatgttgtcctaatcatatcagtttttagttttcactgctcctgtaatagtaccaaaaggaacttcttcattggtgaatataagaattcatttattgacggtcttcacagatgaaaagtttcaaatgagggatatggaatgactacatttagacagacattaagtggtgaagttaaggaagagatagcactacttgcatggtacggaagaaaatatgtagtctctagcttcaatcgctgcaaactgtttgggccaaaatccgatctttagaggatactaaataccaaccatatcgtgcagagtaaagaaatttgatgaaaacacagactgcatctaaagtgcaagtagaaatatgtgaacttcaaaatatttgtgcaactatttgtcttttgtatgctcagataggaaataaatttgcgctctaaaaaacatatctgcaatttccaaagaatgaagcaactaaagcaacattaaacaagcgactatagaatgaacctacaatgactcttaaaataaatgtaatgaatgagaatgtgctgacacggcgacatgaaaacgacttaaatatgacacaaaatacagtcctctaggttccaacaatttgtaaggttcaaactaaaattaacattagacatacacccaactttttctagcttctcgtacatatccatggcccgccgcccgtcgtcgtcaagtaggcttgtgctggatacatcaaaattgaaaagtactgattatcttcgaatgaacggtcataacttgtaattttgcatacaatttagaagtagctgtataacacaatggatagtaatcaaatgaaggtcaaagaaaacaagtagtactatgcattatatgaaagtattataatggaaaacagagggagggttctgatcatcttattaccccatatcaccggctaaaatgaaaccagaaatagctaacgaagtgtggtacaaaatgataaataaaagccaatattagttactcaggcatgcagttacctctgtgaataacagagcatctggatctcttctaagtcggtagcaaaaaaagggaaaacaaccgtctctagttctatgtagaggacattaggtaaaccttaaagactggaaaaagaagaacagggaaaacaagaggtggaacaacacaaacctataacattttttctttgcattcttcatgcattcctctataatctttctcacttgttccagagaaat

SEQ ID NO: 67138 - DNA, 672 bp, Zea Mays
gagcgcacgagggagtgggcggatgttaatgaaccactggtgggggagaaagcggtagggggcagcgaggacgcatgcagagcaaacgacgtgcggaggggaggagggagaagaagggcttggccttagaggctgtggctttgatgtgtatggcgtgctcgtggcatgcggagcgggcgttggttgccaattttggtggagctctggagctggatgatgcagggtggttttaacaacgtacgaaaggtttcaatgcgggagcagacgcacgacacacgattgttaatcgtcgaaattgttgcattataatagtagagaaaggttaggaggagacgtacgactgatgaccatagaaattgttgcattataatattagatgctagagaaaggtcgagttataaataccagtgttatttatataccatagagaccgagttatgtaattaccaatgttgccggatgcggtgcttgatacccgacttttggttaccaccgtcaccacctaacgtcccaaccaaccaaaccaacccacacatcgtggtgattgccaccttggtgccgaagaagtagagcctgcgacgatctcttaaagagaacatatcatattcatgtgctcacgttccttgggtgagcacgtgtgcactttaaatctgagtcctcctttgttaattt

SEQ ID NO: 67139 - DNA, 457 bp, Zea Mays
gacaatgatttctgtgagaggagggaggagttacataggtacatcaaagaagccagaggcttcaggggaaggttccaccccaggcatgttcaaagcattcacaacccaatgcagggtgaggaaaagatggcccagtctcaaggtcagtcgggccagcaacaagcaagctcccagcagtaaagaagctctcaacaccaacctttgcataacacattttgtccacctgctccgagaggcggaaggggaggccaaagtttcggtggcaggttcaattcatccccaaggaaaccattcttcttgttttgtggtgaggacaaaggccacaccacaagaatatgccatcatactatcaacaagcagaaggaacttgcttcgtctgctactcaaccctcctagtcaaaggaggtgttcagtacatcatcatactattcaccttacatcccacagtatgtccagc

SEQ ID NO: 67140 - DNA, 426 bp, Zea Mays
tacttccgggatttttgtttgtttgtttgttcgattggcccgttatgcgacgtgtttagttgttgtcgttttaggattgttccgtagttgtgggtgtaggcgcgtggctaggttttttttccctttgtgtaaggtgtatgcttcaacagtgaacaccgtatcagagtttggggcttcggacttgtatgtcaaatgggatttctgtggcgatttcgcgcgatgatcaactgaattcaataccctaatctggaaaatttcagttagagatgacaaaatgctgttaccatgatgattcaatgtccaaacatccattccagcgccacaggtagaagataccagaaacagtatctactcctataaaacaccaatttttctggttcctactatcgccccttttgcaaaagagtcattatacttctttctaat

SEQ ID NO: 67141 - DNA, 646 bp, Zea Mays
taattctaagactcagccgaactcctctacggacggcgggttctatttcatttaactcgagggtcctatttgcaaagcgcaagccgaaggggtagctcgcgctaacagtcgtccgatcaacatccgacgatgaggattagaagtctattcgaacaaaccggtattcactctgggccctcagatcctggatctacgtttacgatttaatgaagtccgatgcacgcgccgatcgtccgatcccgatcggacgttccccacacactaccttcactggtatcctcgttcaatctagaccgttggttcacagatcaaccatccagatcttcactaactagcctgagccgctgatcaaatctagtcgtgcataatcaaaccaacggcgcgcacattatcttctccccccaacgcgactgcccagaaacacggcgtcgcgacgagtcagacggtggtgtcctcgccggtgactacccaacccacggaatcaacgaaacatactggctattacctagtgcaatcgaaagaggggaaagaggcgaacgcaaccatccaggactcaccggtgattatgtagcgcagatcgccgcccacggtgtgatgcggatccgcagcgccggcgagcaatcaccgatggcgtagcaaatttgaa

SEQ ID NO: 67142 - DNA, 419 bp, Zea Mays
gctgcaggtggctgggcgctgcgctcggagatggaaggagcagaagcatgccatgggtggtggcgtggtgcaactcgtgccctggtgcttggaatcggagaggagcgtgtgaggggtagaaccgaggtaggaagaagctagggagacagtagggggaggggatgaagcagggatgaaggtggtggtgctatttatggaggagaagctccagagtagggtagccatgttctcttctttgtagcaaaatagtgaacacgtggtgagggctacagtagagactttgggcggcaagttttggcattttctgtttagattcagatcttgggcactatagaagatattttccttgatctatgctctacaaatcatatatagagattgagtcagttcaggcatgggttaaagagttatagacccac

SEQ ID NO: 67143 - DNA, 412 bp, Zea Mays
ggggagcagttccccgacggggaattccccgttgccatctctatttacaagtatgagaacgagaatgcgggtaacaaataaactcaagagcacaagaaccgagcaacgaactcaaatgcaaactctccacaagacactaatcatttcactagctcaaatcaatcgaatgcggcacttaggaggctttggatgacttggagttgtcgcaataaatgtatgtatgttttgtgtatctcttgtgtgcctttaatgctggttgggggtatttatgccccaacaagcccacatagccatcggaatgaagtagggaaagctgactttctacggtggtacaccaaacatcctacaatgacagttcgatggcacaccgaacccctgttagaatgttcatttagtgaccgttctaacggag

SEQ ID NO: 67144 - DNA, 2158 bp, Zea Mays
caacaatacatagccatacaacaataatatataaacagaggtgcaaaacatatatgtccaaagaaagtcgggttgttttgtggttgtgggtgtctcattaaaaaccttcttatatacggactctatgtttagtgtgcttccttttcatatacagactctatgtttagttggttttaatgggtcttacctaaatgggacgtgctaggccagtccgttggcttaaattaaggtccagtcatggcccacgagattgggccgtgccagacctagctcatgtctaaaattgtgtgttttagaccagtctatgaagcacaacccaaatgtacacctataactgaaactcaaccgagtataatgcgcaatatcaacagtctctgctatgaaggctatcaaggcgaagtatcaggtgaagaagaactggatgggagacccgtgcgttgctgggacttttaggtgggatggactgacgtgcagctatgccatttctgatcctccaaaaattactgccctgtaagtggtcattactccgtactacgtacgtacgtaagagcgtagcgtccagtataataatcctatatagtatatatatattttttttgcagaaacatgtccttcagtggtctgaccggtgacatatcatctgctttcgcaaatctcaaggctgtccaatccttgtacgtacgtgtggggtcggagttcttcatctgccagcagctaaattttattgcaacctcctagtcatgcatatatatagtgcatgatctcaagtagctataagacatgtcctttgatttgcagggatttgtcacacaacaacctgacgggctcaatccctagctccctgtcacaactgccgtcactgacaactctgtaaagtctgctgattaactcggcaaattattctgcatcttgcgatttcatgaaccaatatgcatgcatcagcatcacacgtcggctcacatcaatgcatgttacaccttccagagatttgacggggaatcagctcagcggaccaataccctctagtcttctcaaaagaatccaagacggctccttaaacctaatgtccgttatctttatcctctataattttgttcttcattctagcagacatatatgcatgatatgatatgataccgcctttaatttccagcctgacgacgacagtatcgatctgtctctcatctctgtacgtgtagctatgccgataatccagacctttgcaccaacgccggggattcatgtcagacggcgccgcaaggaaagagcaagctagtcatctactacgtcgctgttcctatggctctgatcgtggtggcgttggcagtactgctgtgttgtcttctgcggcggcgaaagacgcgaggtgagtagtaaagcatcgactgaccgcgctctctagctagttagctagccagccatcggccatcctgaacgagcgagaaccactggtccgccggtgcattcagggctagcggacgtctctgtgaagccccgggacaagactccgacgagccttgcttcaatggcggccgacgaacacagacttagctcgctgcggcttgagaaccgccggttcacatacgaggacctagagatgatcaccgacagcttcaagcgtgtcattggccggggcggctttggatacgtctacgagggcttcttggaggatggcactcaggtggcggtgaagatgaggtctcagtcgtccaatcagggtgccaaggagttcctcacggaggtacggacggtatagccgtctctttcacaatcacacgcacgcatggaaattaattgactagtcgccatgcatgcatgacctctctggcgggccggccggccacctctccaagtccaggcacagatcttgacacggatccatcacaagaaccttgtctccatggtcggctactgcaaagatggggtgtacatggcgcttgtctacgagtacatgtcagaaggatccctgcaggagcacattgcaggtgtgtacgtgtatactgtttagctgtttacaacttctgttgatctgaattaatttctcatgcatgctaaatatatgtcgttcttctgtatataggaaaacgcttgacttgggggcagaggcttcgaatcgcattggaatcagcgcaaggtatacaaaatcatacacactaga

SEQ ID NO: 67145 - DNA, 634 bp, Zea Mays
gttcagccaccgtcgaggagtttgcatgagagaaggtgctgccaccgatgaattacctgcatgcagttgtttgttccctgatggtgggccagggtattgcactaggacccttggagcaaggcggagcgggttgtgtctacgtggcctactcgggggacaagaatggctccccagactttgtctacctcagaggctccacctcagattgtggccaacctccactgacgtgataacctcgataaaaacacctcccatgtgttcggtttttgccccatagtgtgtagtagcgttattgtcaagaaatcgggtctccgcaccgagtaggctacactgttatcctaaatggccatttagaccatttaaacgccacttaaatgctactcattagctaactgtttagatcgtttatgccgtttaatccatttttagtctagttaaacagtcgtgtagtccgattaaacactaattagaggatgaccgactatttaccgtttagcgtttaggataatactggtaggctatgctccagccatggctccgttgtggggttggtggcgccaccacgactggttggccgatttggagaggagtgatgtgtgcctttggttagtagatcaacgatggtgattacaag

SEQ ID NO: 67146 - DNA, 504 bp, Zea Mays
gctaacacgtgcattcggtaaatccaatgttgctaattttccacagcacgagggtaagactagggaaaatgcacgccatccatcggatgcaaaatggcatgaccaattacaaccattgtatgggatgtcgatatacacatatcttggacaaccacagtctcctgcgcaaatcaggggtaaatccaccaatctacgcacagtcggaccgtcctcgcctgagtgtggaccgttcggaccagcggtggctggccccgttttctaaaccaagttaccaaagctcgagccagggccactgtattttgcacaaactctaatatactctttcggaccatccacacatatggttggacagtccgaatatatcaccgaacggtctagctatacgaccggacagtccgcgtacacagccggacggtctgcgtatcaaaccgggcagtttgatgcggagcatatggaatgtaatattaattatcattcctcatcttacgtccatcccagccaaac

SEQ ID NO: 67147 - DNA, 384 bp, Zea Mays
ctccaaatcttcaaagcgtgcactacgatagctaattccagatcatgtgtaggataattcatttcatgcttccgtaactgcctcgaggcataggctattacttttccttcttacattaacacacatctaagtcctagatgtgatgcatcgcaatacatgtcaaatcctttgtgaatatcaggcataatcaacactggtgcagtggttagcttttcctttaattcctcaaaacatttatgacatgcttcatcccacttaaactctttacctttctccggcattgaagtaaggggtttcactattttggagaagccttccatgaatcacctgtaatatcctgccaatccaagaaaactcctgatcttggacacatctgttggttgc

SEQ ID NO: 67148 - DNA, 845 bp, Zea Mays
tcatggactattctgtataaaactatctccaacaaactccatgtccactctctatctcactcatatttcaaactttactctgcaaacaatataatctacaatacaaaacaatactttaaactttaaagggacttttacgcagcttgctagagaagtgtcactccatttacccgtctgcctttttttatataaaaggcagtatgaatggcatcgatagctttgtcaaaagtctctcattcctaatcacaaaaactttcatgtcgttaacctgattgatagctgaatactgttgactgtgggggagatggagaaagcttacaggggaagtaaaaggtaggtagcccgaggctgtgtgacgtttcctttagaaacctccattgctggctccccatcctcttcctgcttcatggtttcacctgctgccttctccttcctcgattgccgcagctgctatgggaataccatctttctacaaatgggtcgtcagcaagtacccaagcatcatctcccctgtgaaggacgaaccagaggagtgccctgatggcatcatctacgacaacctctacctcgacatgaattgcatcatccattgctgcttccacccacaggaccagctaacgcatgcagacatagatgtatccacacacctcaatccatgcgaatctggacggtataaatgtatgtgttgactgactgacacaccgttgcaggtgcgccctccgacgacggccaatgaggtgttcgagtccatgttcgagtacatggaccgcttgttccgcatcgtcaggccaacaagtctgctgtacttggcagtaggttcgtgcatagattgttacacatcaaac

SEQ ID NO: 67149 - DNA, 341 bp, Zea Mays
ctcatgaacactgtcatgaaaaacaataagagtggtattggatataattcctttgtgcgaaagaaatctacaattcaatacaattcaaagcagactcataagcctatcaaatgctttgagtgtggaaaagaaggtcattttcccacaattgcaaagccaagccaccaactcccttgccaaagcactcaagaccatttgccttcaacgctcattatgttctaagaaaagtagcaaatggaaaagtcaaagttacattcctaggtcaaccatgcaagagtagacctagacaaatttgggttgcaaagtccttgattgaaaaagtcaccgatcccatgcaaaat

SEQ ID NO: 67150 - DNA, 605 bp, Zea Mays
atcggtagtgcatgcaagttcgtagtactatatacgctgtgccgcccatgcatgggcatggcgatggcgtggtgcgtgccgacagcacacgtacgtacggagtacacaagccgtgtggctggctctgggcgcttttcgatcgtagtttgcaaagcgagattctaggcacgaggcagacggatccatgcaggggcaggacaggacgacgctaaaggtaataaaacgtgcgcaagggcttgctcatgcttttacgtaaagaactctctcgcgcacggcacggcacgaccgcaaaggggccatttccatccatccatctttttacgatcaacacggtcaagaggcatcgcgcgtcatgttacttcaagttactagaacgggtgtagaacgcaatgcagagagtgcgtgttgcgggatgctttcaccatacattgtttctagctagctgcaagattttggagctcagattggctgagcgagagctgagacttttacgcacgtggcccaaaactcgatattcccacatcctcgcaaaaaaaaaaaaagaggaaaggatccatatgatcgatgcacatgcatgcatgcaagcacagctatgtatttgtggc

SEQ ID NO: 67151 - DNA, 415 bp, Zea Mays
ccgaggtcaacgtagcttgattatacttaaatctcaacgcgtgatgcaataacagtttccgctgtggacattttgccatccgttcgctggctagagtactgccaattaatcatggccgcttccgcacggtggcggcaatcgcggtgaagccacaaacgtaatcagtcgtgcccacattttgttaggctcagtttactccgacctaactgtaacttaaaattcttggagaaaacgaaaaaactagtctccaacaatttctccaaatctctcccaactttttgatagctctaaaacaaatagggtcctccaatgctatttcccactaccacatcaccactactacctgccaccacagcaccaattttgtttgccaccaccccatcgccgctactaccacctttaacatcccgcatct

SEQ ID NO: 67152 - DNA, 365 bp, Zea Mays
ggcggtctacatgttgcttatctattgctagctgacaacctcaggcttgtcaacctgcgtccctctcactggaaactcaagtgaacgtcatcgtcttatcctcctccaagggacgatgaatacgagcgagcttctggcgccattcagaaaaaagtgctgtctgctgttgcaattgatgaggtgcagttcgtggaatgctgttgcaattgtattccaaggcgctgaacattgaaatagtgtttgactttacctacgttctgcgtattattcaggatactgcatcatcagccgaagtagacttctctgggccctgcgcatttaggtttttaattcaagataagtaggagtcgttttctcgttttctg

SEQ ID NO: 67153 - DNA, 563 bp, Zea Mays
agggtgtaagcatagttgttgagaataaattggagataattaggtccaaagttggactgtcaggctgatacagtctgaacttccgattaacagtgactttgatccaagtttgagagccatttcgactaagatccagtgagaatctacctagggttgctataacaaagttgtagagctactatacaggaacaactttgctgcagaacttggtatgtgttgccatgaagatttgagagaaaaaccagcccaaagattggctgtcaggtgctctgatgggagctcgcgatggtacagtgtcccaaatggatcagaacgacagcgcgacggtctcaccgccgacgaccgatctccaccgtgattcgcgccaccgccgttgtgattcacgtcgccgatgacccgataaggccgccaggtaaaagccatgcgcctggggataactccggtgactcaccgccgtacccccctgctttgcggcttgagcagataagctcgccggtgaaccgctatcttccggccttgtgccacgtacccaagtgtttccaccgtgtcgccgtgaacctttg

SEQ ID NO: 67154 - DNA, 333 bp, Zea Mays
aattgatcgaacaactctaagcaagaacaacttatcttctacacttcgatttattctgtactagttctaaggctaacatggggtgatgtttgtgttcaaagtttgtaaatttcaggtatcgtctattcacctccctctagctgactttcaaatgttatcaaagcccagtacttagagttgaacaactcgaagtgatgtttggacaaaacgccaagaacgagaaggtgacgtcgggaggaaaactcgagccttcgggaacaaagcccgaagacaaggtgccatcgggagagatcaagtcattcgacgacaagcacaaagcacaaggaatgaaag

SEQ ID NO: 67155 - DNA, 328 bp, Zea Mays
attaaactcaaacagtaaatcttgggcaccccctcaaccaaattgctgataatatactactccctctgatagtcccttcggacactagcacaagattaaggtaaggaatacaatgaccctacttccaccaattgttgctaagttaaggtagaatggtagataacacattcactgaattgattagggcgcctttaagcaagtgtagacatggaatggaagaatgaagataaaagatgtcacaaaattgtcatggacttatatttggtggatctaagactatctccaaaagacttccagaaaatcaccccaaaacatggtttttgggagc

SEQ ID NO: 67156 - DNA, 378 bp, Zea Mays
cgtttctgcgggagagtgcgtgcgttgagatgatccattaaagactggccgtctgatacgtttcagtaagagatctagtacgttggttttgacagtgggattattttggagttaatacgttgggtgtatttagctgggcatgagtgtgtgggataatttctatggtgtatctagcttagttttaactggtgggtttaatgggtagagatatatacacacacctgagacgatgaatcaataggtgtgattaactcgtttattgggtccgtgtacgctcattctgtccggacagttttttttatgtcccatatttaatttattaggcgagtcacttttatgttactcaaaacggtttcaatcaaaagcaccagctttgtc

SEQ ID NO: 67157 - DNA, 465 bp, Zea Mays
gggcggtgctggtgaagaagagattgattataaaaccgctatgccatcgaagccaagccatttggattttgggaagtcgactgtgtctgaagctgatatggccatgatgacgaagctaggctacttcagagaagccgagatggggttgattcgctttggcggggaagagactatcccggaaccaaaaaatgatgaagtggtagtttttaagagcttattcaaagcagggttgagatttcctctgcacgggatgattgcagatgttttggaaaattttgagatttatcttcattagctgacccctaacgccattgttaggctcagcgtgtatatctgggctctccgaagccaaggggtggagccgctcgccgaagccttctaccgagtacatgaacttcactatcagacgaaggctagagaggacggactgcatgagaacttcggctgctataatttcgcttattg

SEQ ID NO: 67158 - DNA, 429 bp, Zea Mays
ctgacttgattaaccctgacaatgctgaatcccttacccggagtctgttgcttgttctgagttggtgcactggaattccccaccggacaaacattagcataatgcccaacctgactgcacttgaagcatgtagggcctgtcttctgtcatgtaggcctcgccggggtgctagtgggggcagcctgacgagtgtggggtgtctgtggagtcccctgtggagcatactaagctggacgtggtcctcctcctagatgagttggtgtaccctagggcggaacgtagcgagggcgaagactgctactaccctgcccctgggcaatggccttcctctttaagtctcccagttgaacacgcttgtgttcaatagctagggctttatcaagaagcctctaaaatgatggaaatctatgagcaaccagtgcatactgt

SEQ ID NO: 67159 - DNA, 443 bp, Zea Mays
gcgagaccaaatagggcattgaatgaccccctttatatcttctctctcaaccaagttgttctttacataaaaccactcttccatccaggcacctggccacctcttccgaaatgtcgggactggatagctcacattagaacgaggcacaaagccgtaacaaccaaaattattatgatattgctctttgccagtagccttcgtctcataagacagctcatgcatgttgcagaagcattttgcacttggctctagttcctagctccttatggcccagatgaaaatgcccattctaacgatagcttcaggggtaatctgatgaaggtagctctcaaaagtcttcaggattacaactaaaaatttgttcaagggaaaccaaagccctgccttcatgaagctcctgtagacaacaacttcgtctacttcgggtgtaggggcagtgctat

SEQ ID NO: 67160 - DNA, 638 bp, Zea Mays
aatcaaacccaaatcaaattattacaactcaagataaccaacgtggaataattgattccatactgtcgcctaaaataacttgggccataggttggataatctgcaaaataatcttgatatagcctcacgtgtccttcctctctattacgtcgaaccgtttgacggccatgaacagaaccgcgacgtctcgattcttcatcaaactgatcttcatcaatgatcaaatgcgcgacattgaaaaagaattcttcttcgtcatctgaggatgatgaatccaacacccgcttaacaagtctgctttgtccactcatcaattattctttttctaattgccctacttttttctgtcggcgtcgcacacaacaaataatgaatctgccctagtttttctagcggtggtggtcgtttctccgatcacatggacaaagtagcactaatttgggccatggcgtagatcagctaatttgacgcctttttcctggtggcgtagcatcaactcatttgggccatagccttgacgtgacatattttaaatattgggctattagtttattagggagctgttgtgtgtgtagatacttttagcctatgaaaaaattatagtatccctcaaaactggtttttcgggccgacttttt

SEQ ID NO: 67161 - DNA, 332 bp, Zea Mays
catactcacagaccactggaatcttcttcatcggtgactccatcatagcaaaagcacatgatcgggtagaatcttggctaggtagatataacatcaggtcttcggaggtaggggaacgaatctccagagctttggcagctacatccatcactacttgatgattagtcatccagtcggctcccagcatgatgtccataccctctaatcccagaattaggagtgtggttttgaagattttacttcccatggagataggcacacttcatattaattggttggttgcaattttacccccatgtgtggctatcatgaatgacccttttgtatgacag

SEQ ID NO: 67162 - DNA, 570 bp, Zea Mays
tgcttcaaatggtgacatcttcagtctggtctggtaactattattataagagaactcagcatatggtagactcttgtcccaactgcctccatgcttaagggcacaagcttttaacatatcctcaagtacttagttagttctctcagtgtggccatcagtttgaggatgataggccaaactgaagttcaacttcgtatccatgttctcatgaaggctcttccaaaaccttgaggtgaattgagatcctcgatcagacacaatcttctttggtacaccgtgtaaacacacaattcaagccatatacaattttgccaactgagaacccttgtaagtggtcttgaccggaatgaagtgagccactttgattagtctatctatgatcgcccatatggaatcataacccttcggggtgcgaggcaacccggtaatgaaatccatcccaatttcttcccacttccattcaggtatttttaatgggtgtagcagtccaactagtctttgatgttcagctttgattctttgacatacatcacacatagccacatgttcagccacatatctttttagcac

SEQ ID NO: 67163 - DNA, 347 bp, Zea Mays
aaaaacaaaaaaaagcaatgttagttcatcatcataaacatagtgcttagaggtgctccggaaaatgtccatggaccatcatgcttacgaagagaggtaagagattaccgaaaaagcaagaagtgacaggcaactccaaattttagagaggaaagagacagcaaaagcggcgagaagtgaaagacaacttcaactcatagagaaacagacaaccgcaacagaggcagatttacctacaagaaatgatgatgaggaatcagcgggaggacaaggaggaaaggtttatgtgttctgatgttgataagattataccatgggtcagggactactacatcaggaaacagaag

SEQ ID NO: 67164 - DNA, 333 bp, Zea Mays
atccgagtcgtcatctgcagacgttctcaccacttgattggagcctaaaccataagtacacataaccagtggctcatcttcatagtcatagatggcaatgccaaggactagcccgacaaatatttgcaaacccacatcaactccagaagtcaacaagggcaatttaacgtgaacgagaacctgccaggcatgccaaaccagttcttgctcggtgcaggcagacattttcgcaagctgccggtcgcgcacggattgacagcacgggggagttgcggtaactaacatttgccgacccgaagcaccgtttcctcggttagctttgaaggttccaac

SEQ ID NO: 67165 - DNA, 326 bp, Zea Mays
accaacctctcactcttgtgaccgcccgattataatctaacgatcacgatttaaaagaacctagatctaatccgacgcacacgatacaggatcgacggctctgatcaacgcggcgaaggggtaagtcacgttttaatcttagccactaaaatcgggatccacggccacgatatctcctccttccttcctcaacgtgaagacacggcagcgacctgcactgatggcggcgccatggacggtgattgttccgacccacatgctgcccctaaactctaacccaaaagcagcagcgtgaagcggtaacggtatagtcatgcggaggatgc

SEQ ID NO: 67166 - DNA, 873 bp, Zea Mays
gttggaataattcgggcggttccgccacaagaagttctctccccgctcgggcaacccttcgcaattcacaaagctgattgcccacacatggccacttcaacgctgggggctagacattgttgggccactacccacggctcaagggaacctcaagttcaccttcgtcgccgtcaagtactttaccaagtggatcgaggcaagggcaatatctacaataacgtcgaagactgcccagaaattcttctggcaaaacattgtttgccgattcagagtcccgtccaagctcacggtcgacaatggcaaatagtttgatagccaggacttcagggatttctgcttctccacggcaccaagctcgccttcgcatcagtatatcacccgcaatctaacggcgtcgtcgagtgcgccaacggcaagattttcactgctatcaagaaaagactactcgacgacagcaagggcaaatgggccgaccacctacctgaagtagtctgggcgctaaacacgaccgagtgtcgggtgactgatttcactcctttccatctactatatggttcggaggccatgaccccgcaggaaataaaacacgggtcacctcgaacaagtgcatcagccgcccctgacgtagacgagccaacgtccaaagacctcatcgacggagaccgcgtcttcgccctgcaggccctcaataaataccaagctcaaacgaaggcctggcacgaccacgcagtcgtcccaagagagttcaacgaaggagaccttgtactcgtccgaaccacccggatagagtcacggggcaagctggagccaaagtgggaggggccgttcatcgtcaagtcgaaggcgtcccccagcgcatataggctgacaacg

SEQ ID NO: 67167 - DNA, 857 bp, Zea Mays
atgaaataaatcaagagataggctcttcgctgactccgtctctacacgactcttaatacatattgtgttttgattgatatattagagcaactccaagagattagctaaaaagactagctaaatttactgatttagctactctctaaaatagattctagagaaaaagtgtaggctaatccaacagactcggtaaacctacggattgaatagagagtgaagcaggctatctaaaattggagagcgaagatggagaaatagagagccactaaatttgaagagtcgtttacagagtctattggatacaattttcttttaatattagctaaatttacctttacaaaatcatatacctagtctcttggagttgctcttatgtagtttcttagctgtctaatgtacttgaaaaccaaccagtatttgggttatacatgacctaatagtttgtatgattaacataaagttaccatataaggacatgtacgccacgtgaggtcccttgaggggtctatataggattctccatatataatgtctctgaactgtatttatggtctagaggctcagagttgtatcatgcaatctcttaaatatctcttatatttagaaaatcaaaccatcgtcttagagttttacatgccataagtacagtaatcacttttgcgctttttctgaacaaatgaatgagcgaaagaaatcgttgcgctttttcttaacaaatggatgagcgaaagaaatcgttgcaacttgcaagtttgaagacaaaaccgcctagtactgctgtgcgtactgtcttcaggttcaggcccaaccgcccaggtaggcttccaggccgtgcgccgcgtgggcggcatgccggc

SEQ ID NO: 67168 - DNA, 898 bp, Zea Mays
ctttttcacttaaaccctccgcctttctgttctttacatgccgagatcctcgacgttgagcggtgttgcagagctccggggagctcgcgtaccggccgatttgcgcaaggactggcacccttctttggcctaaaccaaattcgggatctaatgaacgtttcccccaacctaattccaagaatagttaaccggttggctttggccatggcgaccgtgggcatcgcggacagttaaacgcgttcctggcgatcattggctttctagttcaattgggtgggtcgatgagcatcacaggcacatgagaacacttaaacgagggagcaaaaggtttgaattgacctgaattgcactggccacggcgagggtgttcttgcggtgggttagagaagatttgggggaaattcgaaattcaagctctcggttgcaagattggaggcaatactgggtggtgtggtgcgtgatgatcttgcggagcttacggagggctcaatttatactaagcgagagtggtggccagtaattggagcgatgacgagcggcggtcggaggagggaaagttcactagcgcgtgtgattggtggcaaaccccggggcaaggccttaggtaatagaaggacggtgtgttgcgatcgactgcaacgtggtaagatggctgacggcgtggcataactggaaagaacggcggcacgccggtgatggacatgcggccacgtcgccggtaagtggatgagcgacagagtggctactttgctccaagatcatccacggtgagatcttttctccagaggatcgttatctgtgtttagctgggtgggaatcacggcgccggcgtgaatccgagcgcgcgatcgccggtggcgaggggctgagctggcgacctgatcccttcattgtacca

SEQ ID NO: 67169 - DNA, 563 bp, Zea Mays
gttgaacagggtttttgatgcaattggttttgtatatcctaattattgctatccctcgcgaaagcagggaaaaaagaggaaagttgccacttcagccatctctgctgtgccgaagggcaagaaaatcaaggttttgacctaccggccaagatatattgaaacggccatagtgccaaaatttggtgaagagacatcttccgctgccgaagcggaacaagctgctcccgccgcttggagcgttgaggaatcgactatagtgccaaaggtgcctatagttgagcgagtcgaagccgaagatggggcagccaaaaagccaaagtttgaaaaaacaatagtgctgccagaaattatgagcccaccggtagaagcagaattgccgaaggttgcaaaagctcacgccacgactcccaagaggagaagaatggctagcgtactagacgctgtcatggggacgacaaggtcactaactcctacccctatgaagatagctgtcaaagctgtagcggttcgtgctaaaaccgaggctgggccctcagcgcccgcggaagcagaacctgccgcaa

SEQ ID NO: 67170 - DNA, 529 bp, Zea Mays
cttatgaaaaatgtgctcacgaaggggtatgaatcaaatctgaccgtctgattagaaatcaagcgctagcacctaaaacgaaatggtacgctagtggtgtcattggatttgcatcctatggttcagatctaatgcacccaagctctaatctcgtgcatccgatccgaattggacgaccctcgttaccttgacccaatcgatatgtggctgctcaatcctgagcgttacactggaatccaatggctccaaacatccaattctctcttctatttgtggcctttaatcacgagatcaacggcccagggacgtcttctaccctcgacaccctctctcctcaactccaaccggtctaacaccagggcggcgccatttgcagcacacagcccaaaggtgctatggtttctacccatgaagcctccctagatccgcgctgcgagggttaaaacaaaccgaggtcatgagcttaccgataagggagatgttgacgggtccgttcccttggagcggcgttaaccaccagcaattgtgc

SEQ ID NO: 67171 - DNA, 399 bp, Zea Mays
ggacgggactttaatgggcctctttgtttcttctacttttaggcatgaaacgcttgttttttagtccgctttcgtgagaatcgtttctataaaaatctctcaaatcaacgtgaatgtagaattcgtcaagttgtcgctatggaagaatcggtctattcctaaaccatgcagacttctttatcttcctcctcaagaaaggcctgtaatatctagattcttgtgtgttgggtacttgatttccatcctctgaaggcattgagaaccaatacaacacaagttaaatatgtaaactttcgtccttgttttaacacttcttcaaagtgttatcatgaaggacaaagatcttttcaaaggaggtgcgacttaaaacaatataaaaatgaaacgacaacaagtgat

SEQ ID NO: 67172 - DNA, 554 bp, Zea Mays
ttcccgatctaacggtggacaagtatcatcttcctcccgacctcggacggcgacgcctgacctacggtggcgaaaaaaagactccggcgagcacgacgattcttcgcagtaaggcccctaggtttacccgtgatcgaccaaacaccacttagaactagcgtgaatcatatgggtgcggtattaccggacgtagtgcagaggagggctccaatcgcgacaaggggcggagaagtgaggttgaggcagcgccggcgagaaattcacagtgtactgttgcaccccgcaccaatcttctcggccagaaacggcgcagagcgtaatccgactccaccggacatcggataggagcacaagcggtgaggggaagcaaagtcgacggtggcggcgttctcaccctcgctcggtggccacggtaagaactagggctcgaggctagggatgagtctcgtggggcacaacatagtaactacctggcgcacacggatggctttatcgtggcgaggtgggcggccaggtcctctgaagccagaaccgcggatcgcggcacgccgctg

SEQ ID NO: 67173 - DNA, 887 bp, Zea Mays
ggcgttatggctgttttgattttctgggactgatccattcactcatgaaagtatgaaacaaggacgtacggatgattgagcaaggattcaaatggaccatggtggaaacacagcaacagagagaaaatagcagagtggagcactgtttttgcttttcttttcttttccatacttcctttccctcttcatttcaagcattagagctggacagtgcttgcagcctgtcttcctgtctggccaattcatgttgcgaaatgccaatgttgtccaacatcaaccccacagaaaatgtggtatgtcctaacaaaagatgcaactgaaacatgacagcaatgttgtggaagcataatgtgcacgtagatgtaacccaaactacatccttgtgtacttgtttgcctccaacaatcgagatatgacaggctcatacgttatttattgtctgaaccgacagactattcagaataaaagaatcaacctgccgcagagatggacagcaagctcacaagcaaatggactggcatgattcttcttgtctgctggttcaactgtgtgttgcttccacttctttcattatatatagagagagaagcccacggagagtagacaccattagagcagcattcctctcccctccaaaagaagagagcgctgcatttttcgccccaagcatggcttaccgtacaagatctgcgagtgcgccttccagccgttgctccaacgaacccagcatcgaggatcagctgcagattcattaacgaaaccatccgaggaggcttggaagtgtgtctacaacgacatttaggagatcatgtgcttgactagcaaccaagtcagcctgtgccaaccaaagcaaaggaaagcagtggaggacgaggttgagcgcgcgc

SEQ ID NO: 67174 - DNA, 335 bp, Zea Mays
cgaagcttaagcatttctcctgaagttctgtaaaggatttatgcaaatttgagtatttatccacttcattcttcaggctctcttcaaaatatttcttttcttgctcgaatttttctgatcgacggagcaattcattctttaatttgtcattttcagtttggacttcagccaaagagccctccatggtctgaataatgaaatccttcttttctagtgcaccttcgtgctctttgaccataatttcaagatcttgaattgcgaagtctttctttttcagattggcttcatgattttcaactttttcagccaaatcttgaatgacggttttgtttttc

SEQ ID NO: 67175 - DNA, 912 bp, Zea Mays
caaaattaatacttgggaaaaggttaatcctatttccctttcatgaatgatgactagcttgaggctgttgaggcgaccaatgaagagctactgggggcttatataaaggcagaggatgaagccatgaacactaccttcggcgctcgaggcaaaaggagactgaacatagtttttgatgtgattggatttatttatcctgactatcgttttcctactcgaaaacaagggtcaaaaaggaaaatggcaactatgtcctcttctgtcgcgtcaaagatgaagagagctaaggttttgactcgtaggccgaagctgcactctttagagaagaccggtgccacgcttgccgcagagaagatagaaattgctgaacatgccgaagccacccccttggcttcatgagataattcttgctgtgatcgtcgaagctagtgtggtccggtagaagagatggaagcaaagagctcaaagactgaagagcatccgaagctgttgagtcccccaaccacgacggagctgccgaatttaacaactactgcaacaatgactcctaggaaagggagaagaatggctagtgtttcggatgctgttctaaaatcttagaaggtgccaactcctgtttctactgaagctttggaggataatattaaaaaattagtggtaactgctgcaagcgcttctcctacatgcgctgaagttggaccttcgggatttaagccagtgggacaagaaaaggaagatcttctggagaagccgacatcgcctacacccgaagcatcgtgtcaagacgatttggaatatattgtttgccatgcttcagggaaacaactatcagaagagcaaattgccaaagtgcaacattatgcaaaggacctgaaataccctcgagggtccttagtttatgcaggaaatgac

SEQ ID NO: 67176 - DNA, 624 bp, Zea Mays
tgcaattctatctgtcaggcgctctgaatcaggttttcgatagtacagtgtttggatcagatcgccaggttcagatcccctcgccgtcggtgatcccgtgccgcaatcctcgtcgccgttgcaattcgtgctctatggggtgcagataactcttaaggctaagaaatatcgcgttgtgggtgaactcaggccactgtttctctccggccgttgtacccgcctgattcacggctgcttcggataaactcaccggagttagccacctcgcgaccttgcgccacatgctttggtgctttaaccacgtcgcagtgagtcaccttagcccacccgttcatcgctggtgagcttgccacggtaaacgccaccaattgcttgcgccagtgcacccttttctctccggtcgccaccgcgccatctcaaattcatggaccaccgctcaagggtcctatgaattgagtgtgtcgtcagctctgctaggtagtcaagcacctaatccatcaactcgtgcctcaaatcatccaggagagctcgccaattcgagatttcccccaaatcggtcccgagcaccgcgcgaagtgacctcgtcgtggccagtgtgctacaggtctgttcatgcccttgctc

SEQ ID NO: 67177 - DNA, 796 bp, Zea Mays
attcgatggtcaacatacaacctaggaaaggaaggggaggggaggtagatagctgattccgtgtctgcaacacacacatacacaacaggcccgcctatccgcagattaccacccgccactgattcgggaccaaatcctctcggcctgctaatcggcacgcacatttgcccgctccccgccctcacgatcggctactgatggcaatgtggcctgtgggtgccgctatacaatcgctcacgaaacattttgtcaccggtagccagtgccagatctagaaatccgccaaatggtatgcctgttggatctggaagtttgatatagggtactccgcgtccaaaaaattttattgtatatgtacaatacggtaaaatccatttacaaattcggtgaaaaaaactgtctagcaaatcggtattcgaagtaaaaactagcatactagtcaagtttaacagtttgtataaattgcccttcttctaatgcagataggaatgaaatctttatttcttagttgattgatctgtcagccttgagtgctgctcacaaaggtttcctagcttgctacctgatgccgagaaactaactaactccgtagcttctagagaatatcatgtagcttctagagaatatcgtatcatataagcttcagaagaaagttagacgagattgccattttgttcgtcgttgccaccagatcaaggcttctgcaagtctgagcctatgagtggacgagctagcgcctctgcaccaggcaatcaaaacagtgtggcgcctgtcgcttgggatcataactcacgaa

SEQ ID NO: 67178 - DNA, 323 bp, Zea Mays
gtcaccggctccttcaactaataggataatcatttaaaaagatttcaatgcataaatgtcgttcaggattgcatctttctcgaccatgaatacttgatcaatgggtcaacatgcacaaaattgtggtgcccctcatcccgagtaagcaaagggattatgtatgtaatacgagttcatcgtcgcactatcccatgtttgaacagaacaatatattgatgatgagtaggctagtgaaaagtaccatgacatcactagagatggatgaacaagcgagccaagaccttatttccccctagatcttatttcgggtttagggtttaggg

SEQ ID NO: 67179 - DNA, 445 bp, Zea Mays
acggactcaatcggaaccagcaacactggtaggatgggacgggagacgatcgagttcgagcggcgtgaaacacacagcaggaatgaaggccacgtcctcacagaggatcgaattggcagcgccgaggcgtttgctggccccggtgaggccgtcaccacggatgaacaaggattgtccctcgccgctcctcgatgggctaagctatgcccctggaatagagttccagcattatgtttgaaatagatggaatctccgcatgcatgaccaatcgggtaattcctcgatcttccttctgtttgtttcctttggtcgttgcaaatggcgcctctcctccgaatcagtgggttttttctgcaaactgttattggtggatttgctgcctcttcgatgtggtgcaacttttggatcgtgtctttcgattcttggtttgttccaaaaaagtggg

SEQ ID NO: 67180 - DNA, 580 bp, Zea Mays
caagattctccataaagataatgcatccatgattctagagcaaagaccaccgcgaccaattcgagatcatgagttggataattccgctcatgcttcctcaactgccttgagccataagcaatcactctgccttcctgcatcaacacacagccaagaccaattcgagaagcatccataaaaactgtgaaacgcttaccactctcaggcaaagctaggataggggcgttcaccaacttgttcttcaatgtctaataactgatctcgcaatcgctggaccagacgaaaagaacacccttctccaagagtctggttaaaggcttagcaatgctggaaaattttggtatgaaacgccaataatatccggcaagccccaagaaacttcggatttcaaagacactggagggtctcttccactccaccacagccgcgacattcttgggatcaactgcaatgccctgttaattaatcacatgacccaagaaagccacttccaacagtcaaaaggcacacttcttcaatttgccaaaaaattgattcttccttaaagcacccagaatgagacggagatgccgctcatgct

SEQ ID NO: 67181 - DNA, 382 bp, Zea Mays
gtttcatacctcgctccgacaagtaaatttattgtgcgtgtttcgggctccgaagggtgtgtgcggagagcacatatttatgctggctcatggagaatgttcgtacatatagtcatcggtggcttgcgctatcaagaccattgatgatcaaactcgtaataggggttacaagtaggatggaagtggaaccaagaagttgagagagggaggagaggctcatagatctcttattgggatggaagtggagcttagaagttgtaaggtggagtcctagctaagtcttggcttggcggggctccagcttctggtcctcgttggcgctcctccttctgttcgtccttgtgggctagtcttcgtctgttgatccatctatcgatctccc

SEQ ID NO: 67182 - DNA, 366 bp, Zea Mays
cgggatgagtagcatcggttcatgactgctctaaaccgttggatgaactccacaatagtctctccatgtttctgcctgagttgtgccaagtcaacaattctggtttagcagcctcagattgatactggatgtggaactagtcttctagttgcttcacagtctagatcgagtccactcctaacaaggtatatggtgcaaatgctagcttgtgcgagactatgaaaagaatctcacccgcaacgaatccaatactgaaatcatcacaagctacattaggtatcgactcatgtgctcgatagagctagctccttctgatccattaaacttggtgaactcgaggagctgatacttaggcgatagaggaat

SEQ ID NO: 67183 - DNA, 492 bp, Zea Mays
caccacatcaaacttatagacctattaaaggagaacaattttgcttaagagtgtgagcatagttgttaagaaaatttaggagataattaagcccaaagttggactatcaggttactaaggtctgaattttcagacagacagtgcaaccactgagactttgagcataaattcaactatgatccagcaagaatctgcccatggctgctatgacaaacttgtagctgatttgtagctctccaactttgctgcagagcatggagtatgttaccatatagatttgtgagaaaatcgagcctaaatgttgactgttaggcgctctgaataagtgctcgccatggtacagtgactgaaacggatcagaacgccagcgcgactgtcctcaccgccgacgaccctccaccgtgattcgtgccgtcgtcgccgcgattggtgtttggatggtttggatagcgctcagggtcacacaaatatcaccgccgtggataactccga

SEQ ID NO: 67184 - DNA, 445 bp, Zea Mays
ctttgcacatctttataaccttattcctcgtaactcgagtcaatgtatccaaaatcctgatggggtactcaacataagtcaaatcttcttgaacactaaggtcttccattggtaattgctcctcaggtaccctgaggcatttcttcagctgagacacatgaaagacatcatgaacatccgcaagatgatctggtaactccaattggtatgcaacctctcccactcgctttaagattaagaagggtccaataaagcgaggggacaactttcctttgactttgaatcttctcataccccggagtggtgacaccttcaaatagacataatctccctctttaaactcaagcagtcttctccgggtgtcagcatagcttttctgtctggactgtgcagttctcaaattctcccttatttgctggacttgttcctctgcttcttggataat

SEQ ID NO: 67185 - DNA, 371 bp, Zea Mays
ctccggtatacaactttgtgattttcttgtgcacagaaacagtctagatttttctcattgcaggttcttaattggggattgccgctaaaatttgtcattgtgcgtgtcttgctgcagtctctgttttcctgaaacaggaaaaatcttatttcagtttcagtatcatcacttatggagtaaaagcgtttggttgatgcattagggtgatgatttgtgtgttcttgttcctcagggctgcatgaacaccaatatgtgttaatcttcgaggtgggatgagtgctggaagactcaagtggcagcatagcaattcttggtttgggcaatgatcataaaccatgactggtagaagtgcctttgaggaatcaaggcag

SEQ ID NO: 67186 - DNA, 464 bp, Zea Mays
ttgagttcaaatcatggcttcaagtcaccttactgatgcatcaacacaacataactccatagctgattagttcatcgtcttagtgcaagcactctcttcttcaccttagccatggtacctcggtccactagccgtcgcttggccttcgccttcgcttagtccttgaagccctttccttgctatcttcaccctatcaagccattcttgagtcacatcaaattgagcatccattgagtgaaccatttcttcagtattgtgaaccttgcttgaatgtcatctagatataaaaactaagatcaatcaagatctattttggttctcatagaagcatatatggactaatagtaatatggtcaagccaattcacgatttctcatatcttattcactttggcttgtctaattctcttaatcacttcaacctctattctgatcatatgtatgcatagtgatttctcaggtttt

SEQ ID NO: 67187 - DNA, 546 bp, Zea Mays
acgacgtgcccccaccgaccccggctccgcctcaactcccacctacgggaccgtctaccacgacaccatggtcctcattcgctgctggctgggaccctgccgccctcgccgccgcatatagcaccatggcgttggccccaccgccctctgactggatcatcgactccggtgcatcctgtcacaccactcccaccacaggcatgctctctcgctcacacccacctccccacacacaccctacctcgatcgtcgttggaaacgattccactcttccagccacctcagtaggtgcctcagtactcccttaaccgttctacctcaacgatgttctcatagctcctcacatcactcacaatctcctttctgcccgtcggttcaccaccgacaattcttgttccattgagtttgaccctaccggtttttctgtgaaggatctggccaccagtaccccactcgctcgatgtgacagcgtcgggcccctctacacgctccgaccgtcgtccaccggcgtgtctccacctcctgtcctggtctccaccaccacca

SEQ ID NO: 67188 - DNA, 663 bp, Zea Mays
gcgatcttctccagcctcacctggaacaatgctaggctggctttctccacgaaaacatagaggaagatgcatgtactttgtgtcatgcaattgttgccagcaattgtggctgagagaccacagagctcgcctagcagcattgctgaccgaagcagcgtaggtggatagaggcatcagagactcatgagctgatagagtcctgaaacctctatcccctgcatccatcaccctgatatgaacgcgagtgatgtagtagcaagcccgaggggctcagacactcgccttgtctcatacagggtcagacgtaggtccctaacgcatgtagaacatcctacaacagattagggaagtgcctcgtctcgaacatttgagtataatgttcagtgacaggccatatccccacgaagttgtcctcctgctcttcattggcttcctaattgttgttatcttcctcttcttcttcatcatcgccatcttcatcatcgtcactagaatcatctggattgtcgcctccaggggcaggggcttggactgctggtgctggcggtgctgaagatgacgctccagctgcaaaggctagtgattctgccaatggggtggactttggcagaaactcctttgagttgtcctccagaacaactccgttctccacatgaaggtgat

SEQ ID NO: 67189 - DNA, 611 bp, Zea Mays
ctggtgttggctgctggatagtggatacttttggacttggcactttgtgttttggacttgccatatacttttgggcttttgcctgtggactgctagtttactaacactgatagtgcactagtgttgtagtggtactaatactaggctaccagcatactactctttgttgttgggcacttgggcgtactactctctgctgtttggcacatgactaaactgaatagttgatactgttagtctataagtaatagcgtgacatgttggcctcttgggcacttggtctgcaatttggttgacccgtgacatgctgtggaactaatatagtacattactacattttgatctttctactgggagaccgatcttacatcttacaatactataattttatgtgtgatgctcttgtttgcatatggattatgcatggctgcaagcctgcaaatgtttctttttcgtgttaccaattcccgatcgtaatcgactcgttcctgattgaaaatgttccgttcccgatatcttgtaatatcggtttcgtttttccgtgcaacattcccgttcccgtttccgattccggcaaaaaatgtagtaacggtaatggtttgagcattttt

SEQ ID NO: 67190 - DNA, 531 bp, Zea Mays
ttctagttccctgtggatacgacacggtgtcgaatcggtggctataaggcttccgatatgattgccctgtacctgacacactaacaccgagtttgtccctgaacaccccagctacttcgtctttgatcctctccgccatgtctggcgaccatccattgagtttgtgggtggaaatctcaggttgcctgacatcactctgtcggctttcctcccagggatgtttgaggtgtgtgttaggtgtcctattaatgtcaccagctcatgccctatacctctcatgctctcttgtggccgaacagtattcagccctatgtccatgaggtggtatggtatgattataatgtgttgctggtggggcaccataatgttgctgcgatgaatgtggaaactgtgcatattgcgcagctctcggctctgcgtacgcatatccggacggcccggtgtaagaggccggatggtctgcgacctggccaaacggtctgaaggtatatctggaatgtccagccatataaggtgctacgtgggtagtct

SEQ ID NO: 67191 - DNA, 595 bp, Zea Mays
cggcattaggcattgatgaagctgttgctgccaacaatttaagggctgaacttggtttatcaaaagaagattttggggttgcagctcttcaagatcgtctgaggaaagggtctgacgatgatctaagcatcagatccttcttcctgatactgttcaataggttgttgttccctactgccagctaaggaataactaaccatgaggttcttttaactgaggagatggatcgtttccacgagatggactggtgccagctaattttccatgatttatgccaagctgccaagaagtggcatactaggagcgttacaaatgtttctacaaccatttacggatgttccatcgttattcttgtaagcatatccctttttttgtctgttatatgtagccatattttttatgcaaaattcatatacacgtagcttatgcttttgttatgtctcacaacgattcatgttatgcttttgcagctgtattatttggatcatcttcatgactcagctgcacctcagaataaatgtggaacaccacgcatcaaatattttgataggaatattattcaagcactgacaagagctgacaagggcaagatacg

SEQ ID NO: 67192 - DNA, 506 bp, Zea Mays
tgaaggtgtggaggaatatgatattagtctgactgccattatccatgagggccttgcgaatttcccagcctggtacattgcagctgatgaccatggcatcagtgtgaggggcgttgcgaagattgacatcgtttgagtcgaacgtaagtgggatgtgtgaccactttgtctggatgaccagttcgttgacagtaacatggtttatgctttggtaatattctctcctctgcctctttgtattgaagtctatgctcgagtctccactgatcacgtttatgatgcagtgaaccaaaggctgagggtaggcctcttcttcttttggcggcatcaggggtagcttcctttgatggtgcatcgattgcagaaggggtgggggtagctgtaatctttctaggtgcgctggtagctgttggtagtttggctggtactgtgggtagtggttgtatgcttcttgttgatgttgaaactgtgtactacaacctttgatggttgttctaggtagtccc

SEQ ID NO: 67193 - DNA, 854 bp, Zea Mays
tcactctggccggaatacgccacgaccagtgctctaaattggtttactcctaattcaacaccgaagaagcatttcccctcgatcaattgcactagcggagctctaaatcgtcctgcccacggagacagcgcgaacaacggatgaacacgggtgttcccgacgacctggcgcagcttagctcaattgaatgggtcaaggagcatcaggagaacctaaggacactgaaacgggagagcagagagcatgaacagacctgggagtagctagccacggagtacggaggattttcgttcgccgatgacaaaaaagggggaaaacggcgctgcgacgtttccgggcggaattaggaggtgaggctggggctacacggtcgcaaaggactatggtttcaccgtgcacaaccaatttgggagaggtggagaggatttcgcgaatttgtgcttcaaccgagttcactggtgaagatgtgaatacctcgccgtgggtggcacggctatttaaaggcgcggtggtccgactaacgatccacggccgcggattacaccgttcgtgcatggttaccacgtaaagaagggacacagtgagggaggagcgaggcatggatgacacagcggcggaaatgaccgagccacggcggccgccggtgaattatctccgactaggctcaggctaggtccgcgaggtcgcgacacgtccaaagttacctccctgcgaatatccacggcgtgccaggcatgaatcacggcaatcggcgcgaatccgggcgtgcggatcgccagcggcaagggggactgaaccctgggatatttcagtgcactgtaccattggaagcttcatcagttgttctgaccgag

SEQ ID NO: 67194 - DNA, 608 bp, Zea Mays
actaacaggcaaattcccaatgaagacctgctaagccgacttgacatgatactgaggggcagggtttcgaatgttggtgctcccttatcttactctgcctagaatctgccttcacatagttccttcgctgactttgtctccaatcctcctgtgcgagatggtagcccgggccatagagtgcgaccttgcttagaggacattgagaccttaattgctcccctccagaatcttcccgaggctgagaagcaaactcacttcgagatgccatctagcatcgatgacgttgagatggatgttgttcttagcctactggctggagaatcatctaactctacccacactaagccgatgacaattgcgactgggcaagagtttggtgaagacgaggaaatttagagaccagagggtgctcttcggaaatgttcacgccaagtgaaccatccagctgcacctgctgaggagaagaagaagaaaaggcgactctggcggttgtcatgcctggaacaagacgttggcccttccacattatttcttggcgatggcccgacgagcaccaaccctaaggacaatgctggaggttgtgatgatgttcaagctactggcggtgt

SEQ ID NO: 67195 - DNA, 478 bp, Zea Mays
acctccgagtccttagcgttgagcactctaatctatctgcgaccatcgacctcatatgcgatcaccttggggtttcacagccaagggaagtgtccgcctgtactccctagatggcgcttgtctccagccgcattcaagaactagaggccactacgtttcgactcactgccctctacgccttggaccccgcttcccttggtgaggattcagtcaagtgaggttgagcctgcctcagatatgtcgtcgattagtcacatgaggcctgaggctagctctaggcaggagacacagttccatctcgcccgagaccagctctaggcgggagacgcaattctggctccccaaaggccaacctcagatgggtgacactgttatgcctcgcctaaggccaacctcgaatgagagatgtcgttccgtctttctcaaggccaacctctggcaggagaaccagtcacgactcacctgaggccagctctag

SEQ ID NO: 67196 - DNA, 833 bp, Zea Mays
tgaaaatgggagataaatggacaaaaagttaggctgtcagtcacccctgaagctgatttttgactgacagtgaactgggacaaactttgggagcgattttgagtaagatccagtggatgtttgattatggttgctataacaaagtcaaagcttggttgtaggagatcaactttgctatagacggattagtaggttgtcacatgacaattggagaacaaagcgcttcaattcgctctgtcagaacaactgatgaagaacgagatggtacaatatctgcaaaagatcacagatgaagtgaacattgtcgtcggtgaactccgcgccacgatcctcgccggcgttaccattcatgcgctctggcgtgcagataacggtcgacggtgaaaagatcttgcgcgaggatgaacttggggcactgttttgccctatcaccgtacccacttgcaccggcaacatggttgtgcgaccgtcgccgtcgtgccaccatctaggtcggttgtgacacgccttaagtcatctcaccactcatcacaagccgtgaagactcgttagtgaccgccgtagaccgtgaaccagtgaacgccacgttagcgaactccgttgactcttcccctttctcaccgcgagggcttctctgttcaaatttgtcctactcgcggctgtccactataaattgatgcctcggcctattccgctagattgttatgaagccatagcaccaatccatgccctcgattagccacaatagctggagaatttcgttctttccccaaatccgttgtctgcgccaccgtgagacgccgcgccatggccggccacctctaggtccgccc

SEQ ID NO: 67197 - DNA, 781 bp, Zea Mays
gatggctcgttaagattgcaggggtaggagcagcgatccttttcattgcccctgggggtgaccaactcaagtatgcacttcagctcctgtttccagcatctaacaatgccgcagagtacaaggccttggttcaagggctaagcatcgccatttcactaggcatcaaaaggttaattgtatatggcgactcgcttgttgtcatcagccaggtaaataaggactggaactgctcaactgattcaatgaacagatactgcactgtggtgcagaagctggaagacaaattcgagggtttaaaatttgatcacatgggaagggttcgcaatgcagcagcagatgcattgtcaaaattggggtccacacgggcataggttccacctaggattttcgtccaagagatatagcaaccgagcgtcaccgtagagcatgctgaagagtgcaatgccttagaccaagcagaaacagatctcaatgactagagggagccgattatcaggtacataaaaaatgaggaagaacagtatgatggggccgtgacagaacgtatcacaagacagtcggcccactataccatgatagggggtatgctatacagaagaggtgcaggaggagtcctcatgaagtgtattcattcggctagaggaagccagctactagatgaaatccatgcagggcaatgtggcatacatgcagcatcaaggacattggtagggaaagctttcagatccgggttctactggccaacagcaaagaatgatgtggcatagttggttctgaaatg

SEQ ID NO: 67198 - DNA, 418 bp, Zea Mays
ggcgggcagggacgcgtgcacggaagagcggcgacggggagacaggcgcgcatgcaaatgaaagagaataacaaaggcgatgtctgtttattttcggtgtttcatctctagtcgtcaaaaataagtcctaatttttaacggctggatctagaccgcaaaaaataatcattattttagttttctgttggaagccccaaaaatgcattatgtttctgttgtggtaggttatgcttctcgccaccgccctaacattttgcgccatatcattgacgaacgactttaacaatcaaccgatcgagcggtgcaatcgataagggccttatccgacattccgtcgaacaaggcatgatcgtcgtcggtgtcgaactgtgcgttggcggttatgcggcgccctagcttgatggtggctagctcagcc

SEQ ID NO: 67199 - DNA, 1022 bp, Zea Mays
cttcctcctaaagcaaaaatcagctagactgcccatccctctcacaatactcacaatggaacctcacctctctcttaggtggaattttcttgtgggaggtggatttatttttggaaggctgaggggctctaggaagtggatcactagagatgtcgggaagggtgtcaaatgtgtttctgaggtggttaggttttggatcccacacttgtttctaaggaggggctctcacaggctcctcaatcacacaatctctcacaagggtgataggcttatgtcgggtgattttgataagtttgggagttgatgaaggtttctctgatggtttcaatcctctccactcaccaacctttccaaagcaaacaacattcccatccttactagcaaagcctaacccaggtccgccagtttccctcttgaactgacttaccagcatgcccaactagggatcactactagacatccatctcaagaccgaccgaaggtatttgttttcttcctcgatatatgtcttgtcatgtctataggactcaagagcagactgcaaaccctcacaaagtgcacactgctcagatttagggccactaattgagctatcctcctcaagcaagactatcctagcatctctctctcttctagctcggtctgcaaactaggacaagcagtacacgcacctaacaagccagacctagatctcaactcatcgcactcatctagtaaggtgacgtactcggtctacaaagttgtgatgttcgacatgtgtagagagcactcaaaacattcagtctcgtcaaacaccacaaatgaagctctagcagactcaagctccctaagtatgctctcatacttgaatttaaaatctttcctctcacaagtagcaagcctaagaaacttatcctagttcgccaaagcaacattcagcccttttatctcagcggtgagatcatcgacagaatgtgataccttagaggtagaggcatcaccgatgtcctaaccatcactgcctaccacatcatcaccaaggg

SEQ ID NO: 67200 - DNA, 990 bp, Zea Mays
cgccactttcggctcaggtctggtttttctctttttcaaagatttttcatcttcttttgccatcctagcagcctgtctgctcaaaacactaacaactctcttcctttttacccctttggcacccttattgagatgctcataattaggatattcaaaattcagagcgtccattacaaggtttaatcttcgtttcggtcgggtaccgaaggctgcagtcatcagttgatcctcttttttggtgtaatttcccagcacttcattacacactgtttcaatcatttcctgtcactcttggcaaggttctttaaattgtttctcaaatttaaaccgataaggaagtcgcacaagctcaagtcccttcttcgttcgttttagcttcagcatgctaaattcgctcaaagtcggagatgttctgttagccaaatattcttgaactagatctctggtgctaatctgttcggctaccaccatgaattatgctacagcttgttggcatggcgaccccgatgtcatgcggcacaggggccagccaacccgaagcttaaactcagcgggctcatcactagcgtcttcaacttctccctcttcttctcatcggccttgatgcgatagctaagcaccggggccttcatatccttgtgatatgcaaagttataacagccaaagttttcatgcagcccgtcttctctagccttcatctggtaatgcagctcgtgcactcggtagaaagcttcagcattcgggtccattccttggcttcgaagggcctagatgaagacgctgagcctaacgatagtgttaggggtcagctgatgaagatagatttcgtaattatccaaaacttccccaatcatctcgttcaagggaaaccgcaatcccgctctgaaaaaacttttggaaactaccacctcatcatttttcggtgtcgaagtggtttcttttctggcaaatcgaatcagctttttctcagcttctccgaagtagcccagc

SEQ ID NO: 67201 - DNA, 436 bp, Zea Mays
ccaaatcaactggatagcacttggagatcatcgccgtggataactccggccagtaaagtattccggccaccgtacaagcgttcaccgcggcggaattggataagtacaccgatgaccgccgcttctcggccttgcaccgcgtgtccatgcacttccaccgcatcgccgtgacctcctctcgctccccgttgatcgccggagtaattgccatggcatcagacacgaattcactgcgccagtgaacttcccctttctctgaccgccgcgcgtctcgcccaaattcatggccaccgctcactaagggtataaattgaccccgccgcgagcttcgtaaggcagtgaagtatccagccaccgctaattagccacgatcgttcgtcagagctcgagaatttcttgtttcccccaaactggtctccgccaccgcgaaaaacag

SEQ ID NO: 67202 - DNA, 345 bp, Zea Mays
atttaattaggaattccatacaaaacatcacaattctgcatcgtcaaaattattctgaaacattgcgacgtcaaaattgaacctagcttacgttggaaacagacaccgaacattcgtacgcaggaagccacagttggcttgcactgaaagacacgagcttcacccagaagccacattcacctcccctatatatatatgcatacttcctcttcccaaatgtgcccacatcccacacaactcgagctagttagccattgttcggtatgtctcatttccatagggacgatgattctgattccagtgatattgacgacaacacacttatgcttgtcagtcttcttaccc

SEQ ID NO: 67203 - DNA, 783 bp, Zea Mays
ctgacggacggcgcaggtctgcaattgcaaagcgtgcacgtggggttttcttggtggcacgtggaccatatgatctgaaacgtacggatggatcttggcgtgctaatttgagcatcaccgactggaactggaagttgttgaggggaatagtgacgtcgtgtcatactactagtagataggagtatagaagtagatttatgcttcctctctcttttagggcagctctggtcctgaataaaactaactgacacagtttcgtgagacaaagttcggctctcggttcgtgagagttaaggctctctccggtttcataaaaacctctcacaaccatatataccgtatgcacactactcaacggttctctatggaaggtttctatgacctccgagttaattttggagcgtgtctgtgtacgggatgactccttctaataggttgtgtgcctccatattcctcgcatgacgctctatcacatatatctactgtgcaagaccctgtagcttactctatgctcctgccatcgtaccagatgggttccgcataatgtgcttccggtaaggttgagttcgtgttcagtacgacttcatcttccgtcaactcccttgtgtcaccctccagcatgttcgggcacgcgtaaggtgtgtcgtcctgtcctttttctggtacgtgggtggagacttcgatgccataaccctcccctactgccgtacaaataacgtggacatgattttgtgatgttgtgtcttttgtcgcggccgtcgtggaccaacgacgtcagtccag

SEQ ID NO: 67204 - DNA, 534 bp, Zea Mays
atcgggagaatttagaattggggaattttcagggtttggttcagcttggtttaatttcttggattgttattgcggatctgtggttgctacgcggcccgcgcgcgggatggattgatgaggacggaagggaggaggtgtgctagcgacctgcaggctcaaatcaagctaggggatcggaggaggaagaagaagaaggaggaggaggagcagtggctgggtaagaagagtagcaggagatgtgatgagtgtggtagcagtagcagtactatgaaggttcttgtgcattggtgggacaagggaaaggagatggatacttactttttggcttgcaaccaaaggtaattgaattggcctcctcctttcctagctagtagctagtacttatattacctaatcagtctcacccactgtagtagtgttgttaataactgttgcagttttgcagctaagcatgtgtgtgcatgtatcatgtgatgtatggatgcttgggatcgacctccatctccctgtcactgtgtaggtatgcagtacccc

SEQ ID NO: 67205 - DNA, 318 bp, Zea Mays
gttttatgcaatgtgaatggattcgtgattatatcgaggatatatttattgatgtgacgagtagtttagaaaatgccagtttgcgtggaggatgtattgttaagacatgagtgtcagagttcatatattagtggtcgcgccacattgattgaagtgtctcgagtgcatgccacaatatggtttcatgcgagacggggttgtgtgcctgatgcgtttagtaaaaatccatcagtgtcactgatgttaagttgaggtttatttgcgcgtggaaagtaataatgtgtttaatacttagaatcttagtcgatagtagaaatt

SEQ ID NO: 67206 - DNA, 677 bp, Zea Mays
gtagatttaagaaacaaaaccagaaaaaggtgaaatcactgaatattatgttgaatagaaaggctaaccataatccaaactggtgttatatagccatccaatgccatcttggttgggataaaaagctttgttgttgttggtcctcacataatgctagattgatgtctgcaatcactaggaactagcagtagagacaattatgatgtattaatgagaaatgaaatttctgatattagaagtcttcatttgcttttacattttgttctttttatgatcttgatcttagaagcagggttttggtaccagcttagctaattttctgaagttttatgttcttactttttagtttcctatatgatatactgcattctaaactctgtatccgtggggaaagttgttgagaggcattggtatgagaaaaatctctacgcctattaagcgggagtttcgtcgtgcatcactcccttcctctcctccacacgatggtggttcccctccacgcaagatagcaactgcaacgcagcattctaaactctgtatccgtcttcgtagttcatgtgcagtaagatactttactttgtatctgtctttgtagttcatgtgcagtcagagaagtgtttgctcaaagtcttctgttagatttcttgcatttgcctgttttgttttctccagaggct

SEQ ID NO: 67207 - DNA, 503 bp, Zea Mays
atcagaagattctaatgagaagcattgcaagatgatcaagctaggattgcggaacttgaagtgaagtttgctagaagaaactctttcgaagctatcgacgatgccctattttctgtcttatccccactcctgaagaagtttgttatggatcccctggatctattatttgacttcttggttaggttgataggattgttctttagtattaagattttcgactagatcggtaatggcgatattatattatattatagtggttttctaatccataatattgctatataacccttgacttcttatactcttgttttcttgccattatattgccatccttgcgcaatatctaccttgatatactaaattctttgtctccctactcctacttgataatgcctctctattttgcctccttgataatgctttctccctaactcacttcatatccttggttgtatcatttatcctcactttaatagttcatggttatcttatttcactcttgg

SEQ ID NO: 67208 - DNA, 790 bp, Zea Mays
gaggctagctagggatacttccttgacatcagaaaggttatctagccctagagaaggcaatgttagtggggactcctccttcgtgtcagtctggtatccttggtttttgaaatgattctgaaccctcttgacgggggtgaaccttttttagcttcctggcatagtccttctttaggatcctgtatgcctcacaggtgttggcttcctcgccttctgccatttttaggctgttttggagggctgcattctcttctttcagttccttgacccgctgctctaggctttctacccgggagtttaggtgggtgcaatgggagaagaggttatcaaagtgggtgtcaagactatggagatatccggccatgtagattacggtggggtcatccttattatgctttctccctgacaaagcttggagtcttttcctccaagcagggttatttttgttgttgggtggcaagtagcgaagaggtgtctcggtgacttcgttgttgtagttttggcatagctggcggagagcttttaaggcaacattttggcatgtgccttggaagcggtggccagtggtagtgatatggaaaggtgggtggtttgggtagcttcaactttcccctaggtagactgccatggagcacttctcaactccaatctctcggcactgcttccatacatactctggcttcctgcgaactcccaggcgaaccgcacaactccgaagaaggtaagagaatccttctacctccgagcaatatgatgttttaaggacaaaggcgccctccatctggtagtc

SEQ ID NO: 67209 - DNA, 431 bp, Zea Mays
ccaccgtgccatgctaaattcaagagccaccgcccctgggtcctataaattgagcgtgccatcggctccactaggtagtcacgcacccaatgcaccaacccctgcctcagattgtccaccagagtgccccaatttgagatttcccccaaatcggtctagaacaccgtgtgtgtgagctcgccgtggccagctctccacaggtccgatcactccctcctcgctcttgttttagcatccctgtgtgcttgtgatgcttctcgacccggccaattgagctagaacccataggatcaccaggaacgcttcgagttgtccgttgatcgcggtgtcaccgtgggcagagagattaggggctagaaccttgaaattggttgaggggaaatggttattaagggtcgaattaggtgtcgaccactccagagcaccggtca

SEQ ID NO: 67210 - DNA, 369 bp, Zea Mays
agacgttatacctatgataggagaggttgcctaccaacagggatgcaactctctcatgccttgtgctataaaagaaaaatgtaaagcaatgtagaaatcaaattttccactagcaagctgtgtcgagagagaactaaaagacgacagccttcaaaggttgccaatgaccgaccttcaagggctaccacctacattcaaatcttagaacatgagtttagagctctaggttctttgttctagtcactagctcagtcatcatctgagtatgtaagatttggatatcctattcctccacacatagaatgtaaggtattatgctccgatgacatagacctattgaaattgtgcatgtgcattctaccatatcag

SEQ ID NO: 67211 - DNA, 1583 bp, Zea Mays
gtaaattcaacaaggaactcaccgagcactactcccggagcttgctgggcctcttgagcgtcgacgtggttgactcgtgctctgccctggtactgggtcctgctctgctgactgttggaggtaggtgccttggaggtaggtgccgagggaatcttggggccattcactgagttggagtaggcgggtccgggtgccttcaactgggggcagttattcttgaagtgactggggtctctgcagtgccaacaggcatttgctggcggttggttgcttgcaacagagggggcctgaagggagctctgactctgctgactgtagcgtgacggagtgggtccagctggtctattgaagcttggtcccctgggtggaagcccaaagggtcgagctctctggtgacgatcttgctgctgagctcggagaacctggaatttcctcttgatgtgccctttttcttcctcttttgccctttccacttggatggatttgttggaaaggtgagagaagttgaggaagtcttggtggtgaggatggtcttaagctcgggtcttagccctttcagaaaacgggccatcttcctggactcgatgctgacatcgtcaggcgcgtaatgggccagctccgtgaacttgtgcacatactcactgacagttctcccaccttgagttagctcccggaactcatcttccttgagttgaactatcccctggggtacatggtgctcacggaaggctgtttcgaattctgcccaggtagcatctctgatggcctcgctgaaggtatcccaccatgctagggccatcccagaaagttgatgagcagccagttgaacacgctgattttcggggcatccgatggcttccagtttcctcttgatcatgcgcagccagtcgtctgcatcgaggggattgctggaccccgcaaacgtgggaggcttgagtctcgaaaattctcccatcctgtcctgtggtctcccaccacctgggcgctggttttccagacttctagtgaggacttcaatgagtcgggtctgattggctagaacttgggccaggtctagtggtagttccggaggtgcggggaggtgggtctcacccacttctccgccagcttctccttcagctcttaggggaaaacctgctccaatcccggaggcggtaggcgtggttttatccgaagccatctgccaggggaaaagagttactaccatgcacatgccaattttttttaaacagttactttattcattacatcaattcattacataatacagcacacaactaccgtaagcttattacacgcgagtgctatcgagggtactcccgaactccttctctaaagtgtccccaaattccttgagaaggtcatcaaggctggctagggacatttcctcggtgtcggacgagtttcttatcctggtagggggtagggctggaggggcttcttccttctgctcagtctgacatccttgacttttggttttcttgcggattttcctcgtgggggcgagcttcttcagcttcttgtcgtaatccatctttagagtgcggtaggcctcatgggtgttggtttcctcgccttctgct

SEQ ID NO: 67212 - DNA, 331 bp, Zea Mays
aggaggctgactcataatgagtcggtttcaagtttgtaacgatcttcccccacgaataaaaatgcagctctttgctggtccactattgcatgtttttgctcgcgcactcggtgactcactggcatttttgaggtaatgcccgagtgatgcttgtgatctccacatttctgagttatggtctcgcactttgcgcccgacttatcggtccaacccatatttctgcagacatatccccttgagttctgaaccctagttcttgctttttcctccgccacttctttgttttctgagcccttgagtccacccgctttgcttgagagatcgtgatgga

SEQ ID NO: 67213 - DNA, 721 bp, Zea Mays
ctactatgaaggatgtgtatcaaggatactcaagaagctaaatgtaaaggcaatagttttgtgggcctcgtctgggcacacctacaacttggccatgaacataattaaatagtgtatgcaactctgccaaacccgctacttagatttatagtcaaacacaggtcggagcgacttggcaacaatatttgagaaaaggtcgggcgacaagatgatgaaacttatttacatgattttgttgtaacaaacaatggttgaaaatataaggaagccctttggataaggttcgaatttagatctgcattccttgttacagcctccttccttcagttgtacaagcaggcaagagagaaaagtgtccccaactctctagtgcgagtgtgtgggttgggattctgtgttgcatgctagagtcctctaggtcgaagtacttcgaggctccagaggacccctaccccctctttggttaaagcagacccttcttttataggtcaagaaaggagcctcttaaaagggtctcctccgtgggggagtacatataaaggtaaaaaaggatcttctatcgttgaaaaaccgccgtgctggtaatgtgtctcgtacttgatgatgtacttcggttgaatgctccatgttgcttacgtgtgtatagtgcttaataccctcgaaagtacatgtcgttgaccaggggcatttagagttggtgacatagtgctgctcgtaatgg

SEQ ID NO: 67214 - DNA, 480 bp, Zea Mays
caaattcttactgatttgagagttaataagctccaaggttgagcttataacactgattttcagacttagagtgaaatcacaatttggggtctttttgcaaattagtccaaaacctagggtttagcttgtaaatcttcataaatgtgaaccatgtgacttaatatgctttaacatagtagttttctcactttagtccaaatgtgcactgtttttgcacataggcccctagggtttggatttagggttttccagggttccaattagggtttctggtatctcagggatatgaatgtaatgtaaacccatctttggtaacattttatgattgttttacttaatccttaggattttcttaatttgggtcatgttttaccctcctggtccctatttagggttaagtcccttattccagggttctatttgcaaaacaccaaaacaatacaacttgtttgaaatttttacctagtaaatgcactctag

SEQ ID NO: 67215 - DNA, 937 bp, Zea Mays
atttaatttaaaaatcatgaaactatttttattaaattctacggaaaataagaagtctaggaaaattggtttgacatttttatcatttttctataattttctacaatttcctaaagcttcattgaaaaagaaaaaggaaaagactaaacagtactgggccggtttcagcccaggcggcccagtaacacagggaaaagcggggggcgcccgtgccgcgttggaaacttcgcagaaaggccctcggggtttttgctaactgggaacgggttccttcactgttactcagagtcgctgatagtttgcgctaaggtccttcggtttctatttccttccacgtcgaagtccccgacgacggtgagcgcagggaagctccggcgagcttgcagactggccgaacggggcaatgaccggcgctcccgagcggcggacacgaaattggacctcccctgatcaattcccccaacttaatttcacgattggtaagctatcaacctctgtccacgtgaaccgcgaacgatgaggacaatggcacacgttcccggtgatgggggtggtctagttcaattgagcgggttggtgagcatcaccagtatacaaggatgctaaaacgagaacagagagggcatgatcagacctgtggagggctggccacggccagggtgctttcacggcggcggagaactgttttggggaaaacaagagattctcaagctctagggaacgattcaaggcacgaatggctccactggttgcgcaattacctaacagagcgagtggtggcggcaatttataggaggcttaggcggtggtgctcaatttagccgagcaaagctggcggccggaggggaaaagggctctggcgcatgacacaggtggcctttcaccgtggcaggtgctccggtgatcaccagacatgcaccgcatgattcaccatgac

SEQ ID NO: 67216 - DNA, 440 bp, Zea Mays
gtatatatagagaattgttcatattgcctttaatttacctaacactctagataacatcagccagtcgtttgacgactgaatttttttcgtttaagaaagatatcgggaacttggttttagtagggtatggtgttgtcatatgggcgatatggaaaacaagaaataaagcttgttttgataataaaatgtgtttagacccctccgatatgacttacctatgttgcttttgtttggattactaggctacgttgcaggcagagaaagcaagaaatatgttgttggaatgaagcctgctaattcgaaggacaacaaatgaagtcttcaattggatgtggggctgggctccgatgaccagaagttttttgggatgatcaatggaagcaagatggtgtcgttccttgattatgaagaagtctagtatgatgggttatgtaatgtct

SEQ ID NO: 67217 - DNA, 536 bp, Zea Mays
cccggaccccctccgctggggttccagagcgctcattataggtgtcggtcttcacccgcacccagtggccttactgggcaggaccaaccactgggctatgatggaccaccattatcatggtggctaagggtagtcgcggagggtctgccttgacccagcagtagtgagtacaccaatcttgaggtaccaataggtgccatctaaagtagtgatccaaggggagaaaacatctatggcaatcaaagtagcaaatctttccaccagaaccaagacaaaaccattcagatctctaccacaaattagacatgtcgatcttctatgcaaactccacctaacaaagatgttgtaagccataaaataatgtaccgagaacaaataccctaccccagagattgaatttctgcttcttgaagaagtcgtaggcttcagctccttcccatagcttcttcaactcttcaatcaatagttaaatcattacattgagacatatgctaggattatcaggcctagatataacagggcattggaacataaac

SEQ ID NO: 67218 - DNA, 403 bp, Zea Mays
cattttcttataccttagggttcttgttgcctctcatcttttctacctctcgtcactcatggcatttccatgaaacacctccgtcttgcccacctgcctcgtctcctatggttccccaccaccaccgtgctaactcaacttcgctagggcatcactgtgactccccatttccctgtccaactgtcttcctccattgcccccatcaaggacatcgccgcctcctcacccctattgcgcccacaccatgctgcaccatcgtcggtatgaacttctttcctagatttttcttctagacccttcagaattggagaaggaaggtcacttgacctcaaaccctaaccaagctaatcacatggcaagggcttgaatcgagacacccataaaatcgagtgttgcattgccc

SEQ ID NO: 67219 - DNA, 476 bp, Zea Mays
tgtaggaggatggggacaacagactcgacgggctctagcaaggatagtggttctggatccacgacggtggtcggagcaggcggagatgtcgcaggggaggctggatgacagaggtcggagacgccgggcgagcagggctaccccgcgcaggagcatccgcaacggaccacttttcccgcgagaccccaggcggccgtgacaacgatcgagaagagaacgtgccgaggctgcatcgggtgccggcgtggagtatgtggcaacggcggagaggagggggaaagggactcgacgaggctgtgtatagactccaagagcacgggatgcgcggtgtttattaataaacagggtgatgaccaaatcttaacaacttcccctggaatcccaacgaatccaacggatatggcggcaatacaggccactggcagcatgcaagccacccatggcggaagaagagggcccagtcccaggagccccac

SEQ ID NO: 67220 - DNA, 950 bp, Zea Mays
accagcatcaaccaaggaaaattggagcaaattaattttgaatccttggcgcgtgagttacttgagccaaacaaatgctacttgcttgactgtggtgctgaaatatatgtatggatgggcagaagtgcttctttgcaagaaagaaagggcgcgagcaaaattgctgaggtattttgtataaattacttatgcttcttcattgtatattttttgaaagaattcttcttcattatatctattctaagatattattcaaggcagaaaatttttaaaatagttgtactctcaaatataaggaaagctagttacttcactctcaaaatggaaagaggtaatcaattttattgggctcactactaatactgattattttaaaaccattttttattgatgttcacaacatattcatgttttacattattatgcatctatgcgggcttaattttttttgcttctatacagaaactactcattgatgctagtcgaacaaaatcacatgttatcaaagtgatcgagggattcgagacagtcacgttcaagtcaaaatttattgagtggccacccacacctgatttgaagttatcatctgaggatggaagagtcaaagttgcaggttattgactagatattatcagttccttgaatctaaagaacatattatcagttctcgtgcaagatattgctaaaattcaaatttcacacttttatccactattttttcttgcagccctcctcaaatctcaaggattagatgttaaaggcttgatgaaaactgcacctgtaaaagaagaaccccggccttacattgattgcacaggtcatttgcaggtactatcttatccaactcttagagccctttgtgcaaggtgttgagtacattcgtcttggttttgtgttcttttagattccatctcaaacctaccccaacttacttaaaacaaaaggttttg

SEQ ID NO: 67221 - DNA, 565 bp, Zea Mays
gtggacggaagagtcttcggatgaggacttggattactttgcggccttggatgtggctacgacggaggcttctccgcgtgttgcggatgctgaaggtgtgcctggtccgagtgctgggcggatggcgaagcgtagagtgagtgaagcggatggcggtcgacttcgtgtgggcagggctggcaagcaggaattgttgtcctcgcccactggggcgagtgtaggtgagggggagttgcgaagtctttttgagggtgaggagcttaggataatgctatttaactatagggagatgtgaatcattccgaaggttgaaccaatgtaaggtgtgatgccctcgctgtacgtgtgttactatagtttgtatgatgaggctgtgcgccttcgcgcatctggctatgtccataggtgcgttgcgcgcttggtctggcacatttgttatgttggtccagctgcgcctgtagttgctctgtgcgcggaaagtttcttggtgtagacttttgcatggatgtaatgcgcttgcgttttggcgcgcttgttgaattagtccggctgcacccttaggcga

SEQ ID NO: 67222 - DNA, 423 bp, Zea Mays
ccctcgaagtcggagcaattcctcgccggcattgagtgtgccgctaccgggccattgcatcgtgtctagtcctcaccaccgcacggataccggtaaggatgctcccccatgcttcgcatttatcctcacagcgtgtagattggttcacagatagaccctggtcaccggttggctgtgcggtgtcgctttggcgaacttacctccgcgctggatacacaagcactgcttgggcaccgtggtggagaagaaggcaccgttgtcgtcgatccagggttcagtggtggtgattagattcaggatagcgtgtgacataggaagatgtagatcattggatagagatcaggtcgtcctgattagatgactagataccgcttcaatctacttaaatcagtgccatcggatttggatcttgcggcctcgaac

SEQ ID NO: 67223 - DNA, 616 bp, Zea Mays
tgaaacttcaaaaaaaccactactttatctgcctcaggaagaggaacaatgttctctcctctgactctcactatggatatatcatgaacatacttgccctttattgtctcaatatgtccatttttaacagtacattttccaaagatgacatggcttggtcttcatggctgatctttggcatcatctgcaccactatcaacatcaaaatcatcactgtcctcagaatcttcagccagcccaacaagaattttgctggttattttctcagcattggtcctttccatatccttataaaacccagccaatgtggggtcttcgctcctcttatattcgaccatcttagctcagactaagcaaggaaccaaagctagaaaacaaactaaattccaatggctcagaaaatagcagcacaagtcggtggcacaacaaatgttttatcatgaccctcatatttatatacaaaaaaccactgcaaagtggcccccacaacttataaagtttcgctattctagcgaagggaagatgttttttagaccttcggcataaggctttcgttcattttgcagtctgagtttgttacaaggaaataaactaatactgcaaggggctactgttg

SEQ ID NO: 67224 - DNA, 878 bp, Zea Mays
gcgatgagttgggatctcaacgaggtagcaggatgagatcttgatgaggtagcgagctaagagcttgaagtggtagcaagatccttggatctcacctaagcagttcggtgggaccatagagaggaaccaagcgaagatcctaaagcggtggcagtggcgacgagcttggatctggacaagacaccactatggaatctcaaagaggcaacaagttggcattctagagtgatagcgacgattttggatctcaatggggcatcagggggggttgaaagaggcaacaagcctagagatcgaagcaacgacgatgagctcggatctcgataaggcagtaggatgggaccttccaagattagagctcaaagcaatggtgttgaggtgggataacaaaggagcaacatgtctagtgccaaaagaggcagcaacaattcagggtcttggtgaggcgacatgtcgagctcttaaaacatcgaggatgagttgggatttggacaaggatgacaaggggaatctcaacgaggtatcaggcttagagtcgattttgggtttggaggaggacgttgaatggaatctcgatgaggtaccgggcttagagcattgttcagatttagatgaggatgttgagtgggatctcgatgaggtaccaggcttagagacaagttcggatttggacgatgatgcagagtggaatctcgatgaggtactaggcgtagagtcgagttcagatttagagggtgatgaatggaatctcaatgaggtacgaggcttagagtcgagttcgagtttggatgaggatgttgagttgaatctcactgaggtaccaggcttagagccaagttcagatttagacgaggatgttgagtcgaatctcgacaaag

SEQ ID NO: 67225 - DNA, 638 bp, Zea Mays
ggcaaatgcatgtatacttcgtgtccgaagtattaggctcgtccaagaggaattatacagaaatataaaaagtcctatgtgcggtcttgatggttcaagaaagctttgacattatttttagtctcataatatcatcgtaccttcgtcccaaccactaaaagacattataagaaatagataagcttcaaggagaattggaaaatgagttgcagaactcaacaaattcgtccttgattttgtgcatagatcatctatcaaatctcaagcactagcagatttcattgttgattggactcctggtccacaagacgaagctagtgcattagacgaagctgtctgtacaatcttctatgatggctcatggggatccttcggggctggtgttgtagctattatcatctcaccatccaaagtaaagacatcatacgctgctaaactgcaattctagtgtacaaaaaacatagttgagtacgaagctctgttactaggcttgaggaagcttaatgcaatgggtgtaagaggaccaaccctcaaatcatactctcaggtcattataggccatgtggacaagtcaagcaagcaaaaaaatcccactttaaataagtaccttgatatggtccgaataatggaggcctcat

SEQ ID NO: 67226 - DNA, 403 bp, Zea Mays
gcggaggaaaacaatttgcattgaatatagttatgtgcaagacgttgcacaacaaaaagacctttcaccatggtaacaagtttgcatttgttacagacaaatagacaatcttgtcccagcatagcctcttgatccttctacagaaataaaaattgtctgtgaggaaatacaatgtactacaaatcctccatattcatcacgaattgtcaatatatttctgagtgaatagtacgaataatctcgttttactacaagattaagaggtaccggcggaaagaaccgaaacatagattaccccttaaacctgctagaccaacattttatgatctttgttgaatcttggatttgtaaaaccaggacatataaatctagagcaagatctttaattttttgaagcaacact

SEQ ID NO: 67227 - DNA, 938 bp, Zea Mays
ttgcgtagcgaagagtgtgcatagttgaatacttctttgctcccaataggttgcctcgcattttgccattctaaaatgtggtacttctgacccttataaggtgcaaggtacccttttctatttggataacctgaatcgacaagatagtatttacctgcacaaacagaaaataaaaagttaaatacttaagacataaattaataccgtatgatacaaaagtacaacatacttatataccttccggtggatgggggaacctgtccgcataagttatcaaagtatcttgtaatactctagtgtcatgtacggaacctagccaacctgtgacaacaaatgtgaacctcatatcgaagtcacaaacggccattacattctgcgatgcgtaaccgtgccgaccaatatatttggcttgctccgaggccgggacagaggctggaaagtgactaccatcaattgctcctatgcaatccttgaagtggggccaaaatctcccctctcgcaaacgaggatgaatctctatgaaatttgggtctttgggcttgattatgtcagatgacatcttatatagtgcattcaggacttcactatacttgcgactagtagtttccaaggagtgaccaaacttattccttatctgcctaaatgattgtggacccccacatgcccacaagaaaattcctagagcttctgttgtactgacacctcggcttggaagcagaccgtaactttccaccaacgtatcatgcaatcgtctaaaaacagtacgccgcatgcgaaacatatcaaagcagtcgttactattctccaaagttcgctcaacccattgaatacctgattcaaccattgttcttctagataccccagtggatgacctcccccaaatgtctacagcatatagggcaacaagcaattgaccatccctgtcatccctgtcagca

SEQ ID NO: 67228 - DNA, 476 bp, Zea Mays
gctgctcgcaccgtcgacactcttgcaagtcgttggtcgtgttggagagtgtcctttcatcccttggcattgctcgtcaggtttgggagaatttggctggtttgtggtgcgcaagaagtctagggtgagggaatatgaggatcatgacgattgtgtaggtcgacggatagagacgtggttggatgactgcgcagccgtttcagggggaggggcgttcctaacgacggtatgtgtcgatgtcgcgatgacgttcgtggaagaaacccaatggcgtttgaggaggaagagggggagggacactccttgtcacacgatgccatttgacaaaacaggggatggcgggtggagggagtaggggacaaggctcgtggcgcatggtggcctgtaggtcaacgagaagtgaaaactaagaggatgaggttgttagtggcgtcctatggaactcacataagaaggggaagagacgattggaaatc

SEQ ID NO: 67229 - DNA, 1299 bp, Zea Mays
cgataccggcccaaccgaacaaagcctcagcggggtgagtgtctctttttgcggtcgccccctttgctatcctttgcttacacttgactgtctgcttggttcgttcctttagcaccttctcacacgatgggtagctcgggcaaaggcgctagctagagtcggagcagtttcacacggttgccatccgcgccaaagaagaggatttcgacctcaccgatcttcgctccgaagttagtcgtcttcaaggcgaggagtcgtccctacgcgaggagtgtgatggcgctcagagcgacgcggattgcctccaagaagaggcttcctagcttgaagagacacttcacggagtgaagtctcgcactgagccagtcgagtcgtattccaaggaggcggaggcccgcttggcgcgagcggactcggagcttgtgaaagagcgcaacgcgataggaggtcagccccttctctcgttccttacgcctttatcatttgtcatctctgattgcttcaacctcttttttttcacagagctccgtaatatgctctcccaaatgtaggttgcaagggacacgatagaggagtcaaaggaattggcagcgaggaaagcatgcaggttctcgctcgcccatgatagcgtcgttgttgcacgcgcaaggcagataccctgctcttggagaggagcaccaaactccgagagcttcgtctggttgccggcatggtgtgcgcctgtctcttgtccccaccgtcgatcgaggcgtctctggttgatcatatgcgggggctccccaaccatgtggagcgtgtggtcgctgagagcgcttgtcaaggaggcatcatggaccttgggcagatggtctcacattttgatgagattgatgccgctataatcgctaaggctacatcaccaaccagagtgacgaggagctggacgtcatcgaagagcaggtccacccccatgcttagtcgaccgtgagccggagatgccaagtccctcttgaccggcccctaggtccttgagtcctccgctggcgattcgcctgctcccgcttagatggtgcctctagtactttatgtaatgaactcctatataacatttctgcatgtgtaaaaatgttgtttccactttgggccttatgtcgtattgtcacgtatcttcccttcctctttttccttttcttatctccgtgttgatttggttggcactatcatactgagcggaggtgttgacatgaattcccaattatcattgatattttagcaaaatacatgatcgcaccttgctcttagatggggtcgttcttctcg

SEQ ID NO: 67230 - DNA, 509 bp, Zea Mays
gtggccagctcaccggcggtaaggatctttaccgagttgtgcataaccaatgaccacgacgcacgaatcacgacgagcagagatcaacggtgatggacaccggcggcgagcagggggggtgaacctgcgatcttcttcagtttggaactactgtaccatggtgaaaacctgattcagtcgcctgacaaagcacattggagccactttctctctcaattttgaatggtaacttaacccaagctctgcatcaaagttgtaatgctacttacctgctacaaatcaactatagggattaaacctatttaagcactggatcaaggtttaattcaagtccaaagttagctctgttgcactgaacttctgaacttctaactgaatcagcctgacagccaatcttcaggcttaattatctcccatattctcttaacaactttgctcacttccttaaacaaagttgttctcctatgattgagctacaaacttgatgtggtgacctagggcaaaaaccc

SEQ ID NO: 67231 - DNA, 944 bp, Zea Mays
cactcacactttttaggacatgattgtccattagagcaacataaatgggctatgagctaacaagaccaaaataataagtttaatattaaggaatggttgatgagggattagactaaggcaggatggtatagctcactaactagttaaggaccacacatctatgatagaaaatcataaacataattgcacaaaacacttaattgtatattggtgtgccaagccttatatatctaattatgatccttctgcccatagatttagtaaggggagcatgatgatatatagatgaaagtaattacctcgatatcctttaggtaacgaggaataataatccattaccttgccatcttgcattttgaactgttcatggacactagattaaagaaaggttgagacatcaaggtatccattatgtaccgataggtcatatgtaccaacaattcacatgagtgatatctgttgtctttgctggggttaatgtgtaccccttaacagagtctattttagtcgtatggatgggtcatataagtgatatccattaactttgttgcgttaatgtgtacccctctatagattcattttcattgaatgctataagttttgtacttctagatatgaaccaaagctaaattgaaacaagtactcctagaaggtcgggtccaatgctaattgctcgtttcaacaaccatgttatgcttgttaatgtttggtataggtccttatttacaattttggtataaaatgttcttacacaactcaaatataatccttgctgctaaccatatgcatacttatttaggtagatcttgtagagtacaatcgagtactcacactacttcagctctatgttgtttttatggctacgagttacatagtggtcaccctacttgagctccatgttgtttgtatggctaccacctacatagtggcggagtagaacaccc

SEQ ID NO: 67232 - DNA, 506 bp, Zea Mays
ttcaattgtatacaaccattcctggcagggttctttgaagtgcttcttgaatttgaaatgatagggcagtcgaacgagttcattcttcttcttctttccttcaaagcttcgacataccccattcccttagcattgggaatactcgattggccaagtattcttgaactaaatccctagttccgatgtgttcagacacaactctaaactcatacacaacatctgggcatggtgcccccggcgtcatgttgcactgaggcctagtcagcctaaaggttaactccagcgggctctgcactagcttctcctttttctcagcaatcttaacatagaaccattcagatttccaaccggtcggccatttagtgcgatagctgaccactggagttttcatgtctttgcgataagcaaagttatagcagccgaagttctcatgcaatccgtattccctggccttcgtctgataatgaagttcatgtactcggcagaaggcttcggcgagcggttcc

SEQ ID NO: 67233 - DNA, 735 bp, Zea Mays
aagaaacgtacccataatcatcggttctccttctggtgttgtcgccacctgggtataataaactcgtctcgttttcttcatatttttgcccgttggagggttgaccgtgtttccctttccttgatttgcgttcccagaaatctgttgaaaatttgatttgttctccttcagataggggcagtctttgatgaaatgcccagactttccacaattaaagtagccacttgaggaactaggaagggcagagaaacgagcaccaggggcactcggctgattattctaggcgggggcaggagttggacggatgaacacgggttgtctgaagggatatgtgggtgcacgaggagaagaacgatttaggttgaagggacggattaccaaccttgtccgcttttcagaaccctgagatggtgcttcacccgcatatctttttggctttccttgtcccaaagttttggcttcaacaaccagtgttatgctgatagccctgctatacgtgagatccagacacgtagccattttgcgctggagtctatcattcaaccctctcataaagcaatttttctttttcagatcagtgtccacttggtcaatagcatattgggagaggtgattaaacttgttgaggtattgcatcacggaatctcccccttgcttcagacgtatgaactcctccagcttcatctgtagcaccccttgcggaacgtagtgttccctgaatgcctgttagaactc

SEQ ID NO: 67234 - DNA, 297 bp, Zea Mays
atttccttggggtttcttttataaaaaccaacgtgggcaaagggtgtcggattaactggaccgctcgatctgctttagacgatcgtgattagatctatatcgtgttaaaccagtacaggtcttagccatcagatcaaaatcctcaacaggaggttcccccatcccatgctatcttaatagtcgtccgattcagatgggcggttaagatttaaagcacccaaacggtatctaccctctaatctagaccacacagcgtggatccaacgacccaagcatgagcctccccatctaggctgg

SEQ ID NO: 67235 - DNA, 730 bp, Zea Mays
tcttcatctcgaaaacagtaaaaagttaaggtaagaactttaccttgaaattagaataaaacaagctaccggcgatatgttgccgccggtatctgctgaggtcggcctcaagcttcggacaaccaacactcttcgctagagtgctgacaaccttcgctccagtccggtcccggaggcatcctaagctctcttcgtcaacgccaccgaagagcaatgctcctggttgatagccgcatgatattgcgtaatccctcagctcttccttctcagctttggacagcttttgaccaagtatgttttgaaaactaaaatccttttcctccgaagtatcctcggtaatctccttctctttcccgggcactggggccagggtctcttcggtagctgtagtagtttcttccgtggccatatccaaaatcatcttatcaatatcagaaaatacaccctcaagatttgtggcttcggccgccgcagcttcggctgttgtagctttggcgggagcagcttcggcagctggtgtttttgacgctgaggtcggcggtggcgtttcttcaatagcatcaataacagtaataatccttctccttttttcagcaggcttcttgattgccgcaggttcctccttctataaaagcttgattagttgtggccctagtggacttagcttgagaggtaaagattcggtcattacctttaaaatttcctccacgtcagcagcaggaggcgttga

SEQ ID NO: 67236 - DNA, 596 bp, Zea Mays
catcctatatggtcacgcttcgacattagaaggccatccatcgcacatggaaatgaagtgcaagagtgtagggttgctttcaacaccgtatgcgcctatattgccacaagagatttagttcaagagcataatgcttataaagtatggcctcttacaagcgaatggaaaatgccaaaggaagccgcagctggctccagctagggtggcttggtatatcttaagtatacttttcggtttagaaaccaatttgatgagccaaatgatgattggatggacgctatagaggcaacaagtgatgaactacttggagcatactcgagggcagaagacaaagctatgacagctgccttcggcgctcatggaaaaaagaggttgaatagagtgtttgatgttattaggttcatttactcagactattgctatcccgtccaaaagcaagggagaaaaaggaaagtcgctgcttctacatctactggtgcgccgaagacaaagaaaaccaaggtcttgactcatagaccgaggcacatcgagacggtcgatgtgccgaagttaattgaaagggcagaaactacccctctagcgacagagattgctcc

SEQ ID NO: 67237 - DNA, 661 bp, Zea Mays
ccatatgaaaataagaaacacaaaaaagaattcttggataaatagattgtgagtcgagtgagctcttgtctgcgatctgtttccatcatccctgttgtctgattcaaaattctaactcatcccttcctagagtaattattgctaattcatcgatgcttttaattgacgaataccactgaactgggacaactttgattctgcttggtgtattggctgttggtgctagactgactggcctctaaaactactaatgtggagaattaccgagctaaattttgatccaatgtgcaatgatctggacagcatgggtcattacataaacatgaaccttcccacatgtgttcctttcatatatatggcacacatttttttctaactgaatactattaggacaagttagagacaatatggaatttccaaaccaatatgctcagacatgcattctagatcacatatgatatatatacatccataccagtattaaacaggaggatgccataaccaataaataagattttagtttaatttgctaagcgaaaccatatatggacagatgtgcagaaggagtacaatcaagttaccataaaaaatagatggagaaccacaaagcaggttaaagatagatgtcacaaaattaataaattgacaagcttgttcttgg

SEQ ID NO: 67238 - DNA, 708 bp, Zea Mays
tttaatcagaactgatgccaagcacctagcaaagaaggcttgtgcatctgcaggatgctgattcaaagtgcaagccctctttatacagataccgaattggatatttcactcaatagtgccaaagtttgtggaaatgaatcagtttgttattatctaaactggaattaggcaatgcatagatgatatacacaattgagagatgatacgtaaataaataaaaaaagtgagggagccgatgagaaatcaatgtgagtcactttatgggacaaggggtagggacctttatggggctgcatctgtttacaacgctatcagctatgggttgggctaattaaacacaaaacaatgtgaaaactgcaaactgtttgcgggcaaaaactgtgaatcaaacagctcatgggagaagagcataaccctgtttcgtgcatgcaagaattataaatccagcaatggtcgattatccagtcatgtaagtggaagttcacagaagcacaaaaattatcattgcgagtaactaaatcagcacttaatactttgagtcataggccataaaggaaaaatttagatgacataaagttcagtagaattgagcgtctagttctgaacatgttagtagtcaccatacagtcatctcaaacgcttcttgcaaaactacctagctcattagactaatactttagcatgtcagataaaacagaaatgatcttg

SEQ ID NO: 67239 - DNA, 430 bp, Zea Mays
catctcatacgttttccagattctaggttgtcccccaatgcatcccgagctaggcttggtggaatttgtgagtccatctagttcccatcctttcccttttctatctctattttttaccagtttcgtgtcctctgatcctccttctctcctcttccagccttcctctctggtgctgcgggacgacctcgttcctttgctgagaagcacgacagagaaggtagcagatcgtgcacgggcggagtagcaatggaaggacaaaagaaccagggtggagaagagtaggcgaaggaccgagcgctagatgcacagggactgtggcgtcgagattgactgaactgatgaggatggggatgacgatgctacggtgcaggctctgagctttgggccattcctgatgcctcccttgacgcatcaatggttgattctgttc

SEQ ID NO: 67240 - DNA, 735 bp, Zea Mays
ggattacaagggcgtgttagccctaaggattcaaacaaaaaatttacggagattatcaatatttcaggaatgctctaagtcttcgctggatggcattgttagcctgtacgcgctgggggacgccttcatcttgacgatgaagggaccctcccactttggctccagcttgccccgtgactctgtccgagttgtccggacgagtacgaggtccccttcgttgaattctcttgggacgactgtgtggtcgcgccatgcttttgtttgagcttggtatttgttgagggcttgcagggcaaagacacggtctccgtcgatgaggtccttggaagttggttcgtctacgtctgggacggctgaagtgcttgtccgcggtgacccatgttttatttcctgcggggtcatggcctccgatccatatagtaggcggaagggagtgaacctagtcgcccggcactcggtcgtgttcagcgcccagattgctttaggtagcaggtcggcccatttacccttcttgtcgtcgagaagcattttcttgatggccgtgaaaatttttccgttggcacgctccacgacgtcgttagactgtgggtgatacactgaggcaaaggcaagcttggtgccaatggagaagcagaagtccttgaaatcctggctatcaaattgtttgtcgttgtcaactgtgagctcggacgggactccgaatcggcaaataatcactacagcaatccaaagcat

SEQ ID NO: 67241 - DNA, 564 bp, Zea Mays
atgtgtaaaataagaaacgcggaattgtagatgacactgtttgcagagataagtttgaaataggggaggatacaatagataatctgctagagatagtcttagatcgagttctttatactatatctatgaggtattgaatctgaactagcccgtgatggagttcgtagctgtggtgggaggccactggacgacgtacgtccatcttaacttcgctgccttgaagccaagttaagcttggcacaaggccactagaggccgaggagcccagcccagtgtgtggcgaggaattgctaggctattatatgttttgtattaggaagaaaatccattttacaatcttttaaatcgcatcgctctggtcgactacagcaagtgggatttcctgcatgcccatgtggttgttgcatcgggaatataccgaaacaatatcgtgaatactgatcgagagatcgaaactgctagtgcgtaattgcagtagtatggttgccatgccacggcaggtccctggagctcacctcactcactgctcacgtacctgcctgcctgctgtgctgagcatcgtcg

SEQ ID NO: 67242 - DNA, 373 bp, Zea Mays
gtcaaatagacaaattgttggcaaaagtgctatgcatataaatgttcggctgacgtaccttcgtcacagctattaggtatacatatattattatggtagcagcagctgatgaagtcatcaagcaagctagctagaaggaaagtgtggtcaaggtggggtcaaagctatgagctagctagaacggtgccgccatgaccaccgaatttttcccccaggtatatgtatatgaatgaaaaaccgaaaggctcgccgctttctgcagtcggaagcaaacgccaatattgcgtactggggaacctacgaagcttcctacgcgcagcgaaactaatctacagtacggaaaccgaagctcgaaaaaagggagcaaaagcgg

SEQ ID NO: 67243 - DNA, 538 bp, Zea Mays
ctggaccgtgggtcgaataggtaaaagaacatggctcttttataaattgcctgcccgaagcggtatgggcagatcagggtcgccagatcaagcagggatgacccagattagattgctacttcatgaactggtacgctttggcgtctgccctatccgaaatctatgaccacgattaaatggaggcgcacttcatccctaccctctgatcagatcgaatggctctcacgcaccaacacaaacgggtacgacatcggctaatcttcactgttcattcccagatcgacagagggctcatcttcctcctcttgatgaccagagatgccaacgctttgtcaaccgcggcggcgcccatggccgatctgtgccatccatcgatccctagccctaagctccgatatgaggtaagctatacgtagacgataaataggtgaactagatgagggcttccttaccgatgctcacatgggacagaaccctgcccatggtgacaagcggcggtacacatgctttcacatccgaccctggggcttggcggcgc

SEQ ID NO: 67244 - DNA, 458 bp, Zea Mays
gggtcaaccctctcttagtcttgactacgatgtcatcgacgtatacttccaccttgtccctaattaggtccccgaaagtcttactcatcgcccccacaaatgtcagcaaggcatttttcagaccgtaaggcattacgacatagcagtaaagcccatccactgttacaaaagtggtatgcttcctatcttccctagacatctagatttgatggaaaccagagtaagcatctaagaaggacaagaggtcgcacccggaggtagaatccacgatttgatctatacgtggaagtggatacgggtccttgggacaagccttattaaggctgttgtagtcgatgcacatccgaagcttcccgtttgcctttggaacaatgactgggttggccagccacactgggtgatgaacctcttcgatgaagccggcgtccagcagcttccggacctcctttcggatgaag

SEQ ID NO: 67245 - DNA, 567 bp, Zea Mays
tcgagctggggactggagaaacgacgccgaccggaggtcaactcggaggccggagggcctctaccacgcgctgctgcgctgatgtccatggcagaggcgagtgctggctgaggagggagatgagggagtgagcgctcgtacaggaaaggaaaaagatctggcgacgagatgagcacaccgtgcaggaaaatcagcaccgcacacaggataaactcaacacccatgggcggcggcttggagatgaagacacagagaggatagagctggagaaaaatatcctatggatatgaggacgacgacgatgctgtggctcaccaaaaaaaatcctatggcgtgagaagataggagcgcgcgaggagatgagattagctaaaaaaatatctgaaggggcaacagtagggctagatggctggatattttgttttcttttttttaagcgatatagatatccataactcagttacttatatccgaagattggatccggtcgggaaacgatagcccgaataagactgatttcgacttcgataatttgctctgcgtgagtcgaccaaaattagccgaaat

SEQ ID NO: 67246 - DNA, 558 bp, Zea Mays
caatttatcaatcaaaggctccatgtacacgcccattttattccctaggtgtccaggaaatgtcaacgacccgaatatgttctatctttgaaagcatacgccgggggagattgatggggataacaaacatgggccaacatgtgaacggggcagcggtcattccatagggattgaacccatctgtggccaacgcaacacgtacattatgagcctcttcggctttctcatgatgaatgacatcaaagtgtttccatgcttcaccatcaaatgcatgcatcatcttgtcaggattgtatcgtctgccatttttgtgccatgtcatctatttcgctgcatccttggtcatgtatagacgctggatccttggtatgaacgggaggttgtaacaccccaggtgtttatattctgttcgacaacgattttggatttaagcgcgggatatcagtatattaagtgagcactaaattttaatcatctcgcaaaagttcgagtttggtgccattttcattttgataatctacgcacttaaaaagggttcatgaagcttttgaattatca

SEQ ID NO: 67247 - DNA, 411 bp, Zea Mays
ccgcggaggcgaacatacattggacgacatcctcgacgcccagtgcccgtaccacaaggacatgcgccacacccttcggaattgtagggacttcaagcactctgttgggaacggccgacccttccaacctctaccacctcccccacctcgaggaggacccagagaacctcgacagcctcaacaacaggaagggggaggaggcggagccttcccgcgcgtcgacggagaagtcaacgtcatcttcggcagacatgggttgcaagaaagcaagaggcaacagaagctcaacaaccgtcagatactggtggcgaccactggtcctcccgccccgtatcgatggtccgaacacccgatcaccttcactcgggcggatcagtggctcaacttcgatcacccgggcaagtacccgct

SEQ ID NO: 67248 - DNA, 388 bp, Zea Mays
gctatgctgaccctaggtcgttagattagttagaaatggaaagcctagtttcttcaaaacttgctaatttcactcttataaattcctttatcagtcttacctctttgaaattcaactgagttgacacttctcttgtagatggtttgcactctccaaactacccgcgtcaacaccagctacgcccctcagccccggcagatcccggtctacccagtggtagtcgaggaagttccggcggatttccctcccgtctgagtggagaatgtaatcaacctggaggacagctcggaggagcagctgccgacccccactccgttggcagaatccctggctttcgcagctgggtcatcaacgtcagcatcgtttgcaccagccttccaagcacctg

SEQ ID NO: 67249 - DNA, 649 bp, Zea Mays
cagaagttctggctgcgtcctgtcctcgagtcctggtcggcatctcaaagaaggagggggctcaaaaaggtctaactccccacccagcgcgcgtcccgcaacgtgagatggtctggcttccgcctcagcagggtgtgcaggctcactagggtgtaactgtaagtataatatatggacttcctcatgcaacgtattgcagtaaacctgcaggtcatcgacagtcgagctaagttctttaattcgggcctgagcccttgcttccttagcacatattagcaaacgagactgtacagcccagtcaagtgctaagtctcgatcagcgagttgatcctgcagatgtcggatgtcccttctcagttcattgattctatctccgtcggtgacccaagcatcggtcctatgttgcagtgctgcttgaagtcgactcacacgggcttcaagatctccgatggggtcgttacttccactgctgctgctttcatgtcggggagccaattgatgccgaggcaccccaattggtcccgtagacttgcgtgccgttagcctggttcatggcggcatcttttctaagggggaaaatatgattcttagcatgatgcatgtataattacagaatcaaccttagtcgattcaaccttctatacattgc

SEQ ID NO: 67250 - DNA, 412 bp, Zea Mays
gagcaatgctcctggttgatagccgcacgatattgcgtaatccctcagctcttccttctcagccttagacagcttttgaccaattatgttttgaaaattaaaatccttttcctccgaagtatcttcggcaatctccttctctttcccgggcactgtggccagggtatcctcggcagctgtagcagcttcttccgcagccatgttcaaaagcatcttatcaatatcggaaaaagtgccctccagatttgtatcttcgatcgatttagctttggcagttgcagcttcgacgggggcatcttcggtagctgcagcgtcttcggtagctggtgtttttgacgccgaggccggcggtggtgtttcttcaatggcttcaataacagtaataattctccgcctttttggcccagcagac

SEQ ID NO: 67251 - DNA, 608 bp, Zea Mays
cggctaacacaccatcgccttcccccggtcagcagggcagaggcgatgtgccccacacggcggccaccatggccggccttagccgatacgattttcgagtactcccacacccatttttaggtgcaacatgatgctaggcgcgtggtgatttgatagggaagcacataccagcgaaccatggtgcgagaacccccacccacggtgaggtgtgaaccgcggcaagctcttcaacgccggcgcgaaattcggcctaacccgaggacccctttttcgctctagtgccacagaccttgctccttgcgcctccaccagtccttccgagccaccagcgcagacaaacaaccccaattgccacgattcctcggcgacgacgctatttctcatgacggcggggcgacggatagtaagataatggccaaaaattccaccgacgagcctgtatatgtgggcgagactcagactgcaagcgtcgacaactcccaacaacctatcgagcgcgatctacggccacagacgatctcggcgttcggttccaccggatccgttcgccgtggggaggaggcttctggttgctcggtcccacatgcaagcgctgcaggaaaattgag

SEQ ID NO: 67252 - DNA, 441 bp, Zea Mays
aaaaagatcgtcaccactgttgggctatgggtactaatccggctagtcgtcgtgctcctttctgctttgcggtcggtccggataattcaccagagttggctgcccatcgaccgaacgccacgtgcctcaacaattaccatgtcgcaatcaccagtgttatgcacgtccaatgatcgtcggggaggccgccacggtgaaggccacgaatcaccatgcccgtgactcatttcttctctgaccaccaccgcgttgaatccaaattcacttgccaccgcttagcaatcctataaattgatggtcgggtctgttgcgccatgttatcacgaagccaaagcacccagtcccaccttcaatcagtcactatagctagagaatttctttctttccccaattcggtcgactatgtcgccgtgaaccgcctcctcgtggctagctgctccc

SEQ ID NO: 67253 - DNA, 1359 bp, Zea Mays
cttggtttgtatgaacatgccatatcctttttgctcttattgtcacaagtccatgcaaatgatgtttgcaaacctcaattccactattatacaaaatacttgaggttgtgttttcatcaattgccaaaaaggggagattgaaagcatctaggtcctagttgggttttaatgattaatgaatacgctagactattatggttaatatatgttttgcaaaaacattataaattaggtcatggtactagttatttcttgggcatatgtgctactcatgtccctattgatggaattcaattctagtttataaagatgagcataaagattaatggatgactagttctaattgtccttggagttgagtgagggacacttaaattccttacttttcccttttaccatactataaaggggcatgattgggtagcttgatctagttgagtcttctaaaatccagtgctagcttgctctatggaagccaaaatattattgagatcaaagccaacttgaagattgtttgaactagatagagttggatatgttgtctatgcacaagacatgcataacaccttatctcgattggtttcattcaatgcgacactgttgagtctggtgtgcaccatacgagagttactatgctaactctaagtagttggggaggctttggagtcattgaatgtatctggtgatgcactagatctcccatcgtacatgcatcattgcaagttaaagactttgactagggagtcagtgcactcatcgaacgtacctagtagtgcactgggctcatcactaaatcgatctatttgtagatggagaacccaagagactagcatggttcactggatgagtatggtattcactggatgtgtcatatattaatgactagtttggaaactagccattatagactcatcagatgtgtttggtgtgggaagaagtggtgcactgaacacactcgataccctcgattctcttgagtcgatgggtaatcgctagtcctttacctgagggctataaataccaatccatgtcatccatttgtttagtacaagaaaccctttgaagagaaagagagagcctttgtctagtgacgtgtttgagctttgataatcgcgagactagggacctcattagtgcatagagagtgacaagtgtgcatttatgattctcattaggtttgttcaggtcaagtgagattttgttcttattactcttcgagatcgacatcacctacacagtttggtggcgatcgagagtttggtgatcactcgatggagagtgtgggtggcccaactcatggtgtaaatggtagttggttattgactatgctagagtgtttaataatcgacatgtagagag

SEQ ID NO: 67254 - DNA, 638 bp, Zea Mays
gggacatacaagaacgcagggttcagttgtccttgttctgaaacatgctataaaaaccaggagacagaacaaaacgaatttaaaactttggtagtaaggcagaataatttcttgcaaggaatactagtgctgaatatttgctgaatccgcttgcttttggacatacatttgaccattggccacattagtgcagtgtttcttttgtgtcatactagtatatactagtgtagaattatgttcctgaatgtttagattccaattgtcacactcactctagctagtttgaaagtacatgatgacatgaaaagctgtgggaaagtttgaggaaactgaactttagagtgctttcctttctttttcttgttttgtacacacaaaaaggcaggggctcagtcatccttgctctggaaaaagctaaagaacaaacagacaaaacacagtgcaagtgaattttgatgctagcatttttgtctggggtaacaaagttgataaaactcattagccattagtagtatatatgcatgtgcaatcttctttggtcatccctttgttgtgcacaaagaaaatctgattatggtgatttttgtagattaatctcatgcaatttcttgctgtaaagcttggccagtggccaccag

SEQ ID NO: 67255 - DNA, 461 bp, Zea Mays
caaagatatcagaagttacaagtccttcagcagaggtgacagtgccgaaggcacaaaaagatcttacagttacccctaaaaggaaaaggatggtccacgtactagatgtactggaagaaataaagacttcaagctctactccagggaaaacaaccgaagcttcaaaaacgcaaattgagacaacagcctctgaagccgaagctacacagcgccaggctgagaccgaagctgggcctttagagcccgccaaggagaaatccttgggaaccagagaaaaggaaacagaagcggcagagcaaatttttgctgaaaaaactgccactgccacccccgaagcatttgccgaagctctcaattatattttatgacatgcttcggggaaaaagttgactgaaaaagaaaagcgagaagctcagttctatgcccaaaaattgaaatatccgaagggggcattgattttc

SEQ ID NO: 67256 - DNA, 613 bp, Zea Mays
cttcgaaagcatagcagaagctgaggccaccaggctggaggacattgatgtacttgaagaagaacgacttaatgcagtaatccaatcagcacggtaccagcagactctaaggcgctatcacgacaagactgtgcgacaacgattcttcttagtaggagatctcgtcctccgccgaattctaatgggggagggacgacacaagttatcacccttatgggaaggacccttcatggtagcggaagtcactcggcccggattgtatcgcctcactcagatggatggcacggaagttgggaactcctggaacatagagcacctcagaaagttttatccctagctgtatttcaaaactgctgaggcgacaatgtactctgtaaagtggaaatatgtcgtcaataaagagagatttcaaagatattcagttcgtttatgattggcttgcattcttactcggggtgaccactatgccctgctaacggagcaatcgacttaagtcagcaacgacttaaggcggtgcaacatgctcacgcttacttaacttggggtgaccactatgctctgctaacggagcaatcgacttaagtcggcaatgacttaaggcggtgcaacatgc

SEQ ID NO: 67257 - DNA, 679 bp, Zea Mays
cctctctctgctggatctatggccgccagctccgcgcccaccagccgcaaattgcccgccatctcctcgatttgcattatccaataacgagtgatccaaacaaatcggcgttcgtcctcgccaagacagtgttccgcgcttccgttcgctccgccgctcattcctttcctccaccgacccccgggggctcacaaggtaatatttcacctccttccctctctttccctcgcggccgtgcctctcctcagttgtctcaatcagcgggcgcgtacatatctttcgcctgtgctgccgaatcctaggttttgcgatcgtcgtcgtgtgccgaacgaatttgtgagcgtttcatgtcgttgttgttgctcatctgcctggcatcaggcacgaccatgtgtgtcatgtggcagtgttgtgtttcctgtccgtctcggcattgatccccctttgcgtttcagtgggttcatggttcgtctggttggattagtcatttctgcaagcggggcgaattgggtgcgattctggtgtctatccttttatctgtggtgtattgaaagaatagggccattttgcttccttcgaactgttttcttctattgttattcttttattttgtgttggttctactcagagcttgctttcggtggtgctaattcctatagaatcggatgctcccttggcc

SEQ ID NO: 67258 - DNA, 862 bp, Zea Mays
ggggaaatctgcctttaaaaaggggttcatccctcgagtagcagccatgtcttgcttctctcccactcgcggtgccctttcgccttcgagctctctgcgccctttgtcttcaaggtttctgctttgtgtcgccatagtttaccatggccttgtgacttcatcccgagcacgcccagactgagtgagtgctcgaaatggtataccgcctgcttggatgggatgcgccgacgcttggtggaaagatttgcgccggcgtcatccactcctatgagcttgccgctagagagttcgtgccttttgttttccctagcgggccggtgctaccggtcttgtcttccctctgctggaggtgcgcggccttgtgggagcggcgctcttccactggtgcttggcttcaaggatgttcatcaaccttgcggtggtggggattgcggtggtggggagcgagctgagccgcggctttgcctcccacataggctggtgcccgcctgaaagtaggggtgaaaacgggacgagattacccggcggataccggatacgggtacttaaaatacccagtttttcaggtaccggatacgggtaattttgtatacgggtcggatacggatactacccggatatacatcggatacgggtaggatacaggatgaccactacccggcaaatacccgagaagtacgggtaggatacaggtacccggttagcgggtacccggttcagttcctgcgtgcgcaggggtgtaatttgaacaaatattatccgacatcggataccaaatatccgatacatttttcgaatacatccgaatccgaacatgattcgataaatatccgatcaaattttatttatatttttttaaaat

SEQ ID NO: 67259 - DNA, 763 bp, Zea Mays
tctgaataaatgcaatctttcaaacatgccattttctttatgtgaacatttcaacccctattagagcatgcactcaacaactctacccagactacaaccccccttcaaaatatgttttaaatgcttatggatacaagaaatgtaggagctttagtggtatagcaatcaaaatgaaatgatgctttaagtggttttgttatgtgagtaaaacaataaatctaggaggtaccaaatgctcaaatagatcatatgatagaaattgtgacttctaagcattttgaacagtttgtaagcctcttaaatagaagtcactattgaaatagcacataacaagtatgagcaggaaatcgaaccaagtgtcaacatgtgtagacaaggtcaactacccgaaacaacaatcaatcatcatgacaaaggcaaacctaagacatatgctttatcaaaatttagagtttgtagcttaacacaagtattagttaaagcatgtgattgcgatgggttgtaagcactgtcttgcctaacatatgctagaacatttcaacttagcaaagcatatgctagaacaacagttagaagcataaagccacagttttggtcatgcaccaccctagttattttcaatgcgaagtagtcttaatacaatgatatgtgacaataaagcaaactcatctcaatcttttcttttcacttatcttggattcaaattttagcataatttttagagttcatttaatgaattgaatgactccaatcaagagtcata

SEQ ID NO: 67260 - DNA, 1751 bp, Zea Mays
gttggattcggtggagctggagctggagaggctccatgtcgacctggacccctttgttgtcaaccgggtgctccggagcatctcggactcggagatggcagtgcggttctactggtgggcagagtccaggcctgggtttgatcacacccagttcgcgatagcgtatgttgtcagcctgctctttgtagacagcaactttttcctgctgtcggagttcctcgagagagtgaggagtcagggggttgcattgcatcgctctctctatcggatcctcttgtcgggctatgtaagggcaggcaagttcgattctgtcatccatacatttgatgagatggttacatctggatgccgtgagtttggtgtggactacaacaggttcattggtgttctagttaagaattgctgctttgatttggtcgagaagtattatagtgtggcacttgataaaggtttttgcttgacttcattcacttattcgaggtggatatctgcactgtgccaatcagaaaggattgagctcgtagagagactccttgccgatatggataagtttggctgttttccagatatttgggcatgtaacatatatgtggactgtttgtgtaaacataacaggttgcatgatgccttgaagacgcttgagaatatgtggatcagaggaaccaatccagatgttgtcacttacacaacagttgttggatgtttatgtgataacaagcagtttgcagaagcggtcgagctttgggaagaaatggtgaggaggggcctcaaacctgatatcgttgcctgtggcgtattgatatttgggctgtgcaagagtgacaaggttgatgaggcttttgagctggcattgaggatgctgagtcttaatttagaactcaatgtctgtatttacaatgccctgataagtggcttcttgagatccggaagcattaataaagcattcaaaatcatatccgtcatgcggacaaatggttgtgagccagacgttgtcacatataatatccgtttgaaccattactgcaacacaggtatgataaaggaagctgaaaagttgatcgaggagatggaaatgagtgggattgtaaatcctgatcggtacagctataatcaaatgttaaagggattgtgcaaagctcatcaattggacagggcatttggttttgtttcagatcatatggaggttggtgggttctgtgatattgtatcttgtaacatactgattgatgcattctgtaaggcaaagaaagtaagttctgctttgaagctgttcaaagaaatgggttataagggaatacaagcagatgctgtgacatatggaactctaattaatggtctttacggtgtaggatactactacctagctgaggaaatttttgagcagatgctgaaagctcgggttgttccaaatgttaatctgtacaatattatgctccataacctgtgcaaagctggtcagtttgaacaggctcagaaaattttcttgcagatgattcagaaggaagtgtcgccagatattattacttttaacacgctcatatattggcttggtaaatgctcaagggcaattgaagctattgatctgttcagggatatgacagctagagggatagaacctgatagcttgacatttaggtatctgatcagtggcctcctagaggaggggaaagctacacaggcttatgaggtatgggaatatatgttggagaatggcataattctcgacagagatgtttctgacaggctgataa

SEQ ID NO: 67261 - DNA, 359 bp, Zea Mays
tcaagttctttctaaggtttcaagtgaaacagtaaaggaaagaacttttatgtgccagaccaagtacacacaagacatgttgaagaagtttggcacgaaaaaggtgaagcctaccaagattacaatggcttcaaatggtcatctcggcctaaatgaagaaggtaaatatgtcaatcaaaagctctatagatccatgataggttcactactttacatatgttcatctagacctgacataatgttaagtgtgtgcatgtgtgttcgcttttaagttaacccgaaagagtgtcatttagttgctgttaagataatcttaatatatctagttcacacccaaaactaggactttggtatcctaa

SEQ ID NO: 67262 - DNA, 494 bp, Zea Mays
cacacgtcatggacagggggagtcttcttcttccttggtttctcacgtgaacagcaaatgtccagccatgggggcttcttgcgcagagagcaggggcgtccatggagctgcttggggagatggcatggagatggaagatgcagtggagagcggggcctgcatctccatgggaggctgtggagaggcaccatgcaccaagcatagggaggcaagtgccgagcgccatgggtagggagctccctgctcttgcgcttcaaatagagaggagccgtgtggggagaagagggagaacaaaatgaaaatggctgggagaggaggaatggctgctgcttgatttaaagagacgtccctgccagccattgggcgagatgggcggcattgttgcagagctctgcacatgttagcctgctggcaggtgatggcagagcgaccttgggcgcccatttttggcattttccttttggaatcgaacccggatcactgcagaagatttg

SEQ ID NO: 67263 - DNA, 513 bp, Zea Mays
tgaatttttggggtgctacaaaagttctacaccagattctgtagtcgttgcgacctcaaagcaatgagtcctcatttgtactctaggcagtcatactcaatgaacaaataatgcatgatttctgtgcaattgttattcacatgtcctgcattacatcatgtgcagtttatgttatgtcctctgtactcatattaatggggcaatcagcttaggtaagagccctcccaatggctgttgttacattctcacacaaattaaaaatgggtggtgacctctatacccttgaacaaagcaatcatcttaggtcgtaggccgacttacaactgttgttacatgctcacgcaaactcgaaagggtgacctctataccctgtgaatgggacaatcagcttaggtcacaacccgacttacggctagtgttacatgctcacacaaattcaaaagggtgatctctataccatgtacatagagcaatcaacttaggccataactcgaccatatagttacatgccca

SEQ ID NO: 67264 - DNA, 323 bp, Zea Mays
cttttggacaggacgacatcgttgattgcaactcaatggtacgtatgggtgcacgccggatcacacaagagtttataaaagttcgggccgctggaatgcgtaacaccctacatcctgtcgaggatgagtatttgagtattactggtgtacacgggttacaaatgagctgtgggcagaggagggtgaattatcctattgatctagtggtggcgtagttgctatgagaaggctaatgagctatgaggtagtgaatttatgtgacgagatgattcgcgttcataggggtaccccctcggccttatatagatgcccagagggttatc

SEQ ID NO: 67265 - DNA, 1064 bp, Zea Mays
gcacttgttgcatcgctgctaatgtctgaccaattgcctgaactgcctgagtttgcatcaagaacatctgctcaatggtcatcaggggtggtggtggtggcaaatgctgctgcggagctgcctcctcctggggtgcctgctgctctggctgagcatgcctcgcacctctgcgcctgttctcagacatctgtagaaaccatacacatatcagatctgactctgcagtctttcagcataagaaaagatatacggaaatcttcaaagcactgattaattgatcatcttcacttacagcttctcagataaataggaaagtggaaataaatggattacccaagttgcaggggatacccacaccttggtgacaatcattacaaagatccaacttcattacatgaccatcataacaagcatccaacataagataagcaaactaactctaactagactgactggactaagacactgaacaaagcattattacagactctgactctgtcgatctaggtatccaaatctatccgggtcctgtagtctggggtaccatagtcgaagcgaccacggggcagtgaacggtaagggtgctgaatcccgacaggggcgggagaaccaccatcaagatagtggtgtaccgtgcattcagcacgcaattccgcaacctccgcacgaaccttgcccaactcgtcaagggcgtggtccaactatgtgttgaggacggcgactaggttgaccatgcttctcagcctaggattgccctcaccaactggcaagacaatcatgcctccaacattgccggtcgaacggcgagggtagtacttcaggtcaaggtcatcagctaccccgctgaacaatgagcaatactgagaaagtgcccatcgtgctgcatcatgcatggctgcatcggctagagatgtcaatggggaattccctagcggggattaactccccagacccgtacccatgaacatagacccgcccccatccccgaacccgaccacgggtacaaaaatcctcccatacccatccccgaccgggtactaaatacccatgggtatccatacccg

SEQ ID NO: 67266 - DNA, 451 bp, Zea Mays
accagaaggtttaggaaccttttttttgttgctaaatcaaggataataatttcttcggaaataagtttgatgttaaattacccacaagaaaggtttctgccatgaagaactttgatgttaggaatgttgagcgtcgatccctcaccagtcaccacaaaagtaaattagcgccaaataagtttgacaacaatgacaagcaaaactaagacttggctacaaaatgctacttagctgagttcattcaatagttttcgagcacacaaatttgatggatagcagcttgttgatcttgattactctagagagtcaactaaaaatcaatatgtatactgtatagcattaaagatacacttatgtaaccccttcatgtatagcgttaaagatacacttatgtaaccccttcatcctacaatggtaagcataatttgatcagagaaaagtcaaccaaaat

SEQ ID NO: 67267 - DNA, 466 bp, Zea Mays
ctttgtttggtatttgtttccccagattaaccggagaactgggtcgatttttccatcctcgttttatgtgttataccgtaggctgctttatactcaaatgtaaaaagggaactgcaaaattatacatgacatagtccacacgggaccggagtagctagcgtgtttggaataccacctgtagcaacagaaactgacccgatctgactggaggcactacgcggatgaaaaggtcagctcgccaaccgccccgcctcgctgccattgaaagagcatcgcggtcggtccatctacccttcggagttcggaccatgtgtacacactaaattttggattgactctgaccaagtatactagtcacagcttttatactagcacaatgctagtcaagtctacaacggaaagcaagctctgacgtctgacgttacgtataccttgtcacagcggcatttccttgccacctaccgcg

SEQ ID NO: 67268 - DNA, 563 bp, Zea Mays
acatgaggaacaaagcggaccatctcgttaaagcccacttcatactcttgcttgaaagataggaaatcaatcttcgttttctccaggaaggtgaccgggtagaacctcctctcaaactgcctgatgaaaacatcccaggacaggactcctggtgaggaggagtgagctgcctgcacgcctctccaccaaatttgagcctctcttttcagcagctgtgtgccaaagcgaacacgatcacgatacacaatcttgaagacatccttcttatcctccacataagtccgccaatacgccacctcaatcggagtaccactgccatcaaaggtgtccagcttcatgcccatccactgcatcagataaagaccactgacgggaagggggacctcaaccctgccacctggagcagcacccgcggggacagcgcccccaggcactcctccacctccagcaccctgagcggcacccataggggcaacaggaatagcttgcctcagaatggccaactcctgctgcatggcctgcatcgcggctaacattgccgccggactcatagaatccccact

SEQ ID NO: 67269 - DNA, 775 bp, Zea Mays
ttgctacgaatttaaaccgacttaatatcatctaatctacataaattattgttgaaatgaacaagccttagatgaatctccctacccaaacaccctgtaacatcggtcagattgccgcctactggaagcgaaaccaaaacaggtacactacatgaaaatgatagtgctcagctagctagaagggtgcctagatcaatctccatttttcaggaccatcaaaaacagaataaatatctgtacttttgctttggcaccagcggcacctgattgatctcgtcctctcgtcgagttcgaaaataatcctttcaggctatatatgtacatgtatgctttcgtcgcttctttttcacaacagtatttgttaggtagttaattctcgatcgagagggaccttgcatcaatctcatcctgtaactacctgtgttgtgtgttgtgcatcgtgaggatgaagcgattgatttgtttggtatctttcctcccattccccattgccattattgaagggtcatggtaggctactagaggtctagggcctgatcatgataagctaatacaagtctagcacttaagagctagactgccacccacgatgcatacagaaactagaaatagtttctatgcgtatgattggttgtctgggtaaccgacgcatggctcgaccaagcctggcctgtcacaaacgcggctttcgtgcttctccatgtatgcaacaaaaaaggctcaatttggcctccgttgcatccacacatagaggcatgcacatgcaggcatccaa

SEQ ID NO: 67270 - DNA, 617 bp, Zea Mays
gtgattctggagccgaaggatgatgaagttgttgtatttaaaatcttcttcagagcaggactttggttccctctgtatgatataataggagaggttttgaagaactttgaaatatacctacatcaactgacatctaatgcaattgttaggcttagtgtctacatttgggccctccgaagacaggggatgagtcctaatgccgaagccttctatcgagtgcacgagctgcattaccagacgaaggccagggcagatggccttcatgagaattttggttgctacaattttgcgtatcgaaaggatacgaaggcaccggttcttatctaccatactaagtgaccaactagctggaaaagcgaatggttttacatgaaagcagacaagaaaaggagggataagctgatgactatggttatgagtccactgaaattaagctttggaatgacaaggcccctgtgcaatttggctcgccatgccaagtagccgaagtggaatttagagtggtagcgaccgaagtcagtactagagatctggtgtaagaattcttggcaaatagagtatttccgacctctagtggctgggggatgcccaagaaaaaggatgggagcaaaaagcac

SEQ ID NO: 67271 - DNA, 337 bp, Zea Mays
tttctctaatattacaacagtcgtgtgcgtgccctctctctttgtgtcgttgacacagggattccccgagtttctctctctgtcagcgctcgctttctgtcactgataggtcgttcccacatgtcatcacctacctcttgttgtcgcaatgcatcactgactaaaagctttccattaccatcgctgaccctccctagcttcgactgattgcacaatcatcactagatcatgtcttgcatgcctaaaactccttgatttccttttttggttgatagcgtgccatagcagcgccagtttgagcctaaccaaatctcaaagatcatcgagacattttttc

SEQ ID NO: 67272 - DNA, 365 bp, Zea Mays
atcctagtgaatgagcataaatgcgcttcaagcagccggataagttatgggaatgccaatcaagcatgggtagcacagaaggccttgcatttactaagaaatgagccttgacttggtgctaaggctttgcaaaagaggttacaaggcacctacaactgtagggtcagttatgatgtgacatggaaaggaatgcaagaagctctaaaagagatgtatggcaattgggatgatagttttagtatgttgtataggtggaaggaagaagttttgataaaatcccccatagtgtggtggagacagacacccaagttgtagatgaaaaggtctacttccatagattttttgtgcactacaaccttgcatag

SEQ ID NO: 67273 - DNA, 443 bp, Zea Mays
gatggcgattcgaatcgattactaactagctggcggggtattcctaacataaacctaatgtacccttacaccggccgacgcaagagcaacatgggtcacctttcgaataattctgcagctaggtccgtcccactgccatctcatgggtattcaacggtagctaggatgtccaaccatataacccaaggtcgtcgctaggtcaactaaccatgcacttgcccttggtctaatcatctgcaaccaccatggatgcacacccggtcgcgctgctcggccaaacttgaactactcgacttcatggtcggaacgagttatccggccagctaagtgattagacataagttcaacatgactcgagggaccccaatggtacggtcctgaatcgacacaaacatggataagtagacacccaagacctccatgccttgttgtttccctatttg

SEQ ID NO: 67274 - DNA, 384 bp, Zea Mays
ctgttttagagttgaggggacgaggtgcataatatcacgcattttgtgtacaggtgggtggagagataaactcgacttggtgatgataagaggagggcatgattgagtgcagcgtcagcgtgcgttatcggacagtgcatgcttgtgtgatatttatgcatactctggctgagactgatactctttccgtgaggtgtcaagtctgatctacaacaaagttgcaataatgatgattagtttctgttctgaaataataattgctccagtttcatgctgtcaatccagcgacctgcatataccgggagagggagggagtcaacgcccatctgtatatcctggctgtctctgaacatgtttacttgacgttgacgtgttcgcttcttc

SEQ ID NO: 67275 - DNA, 775 bp, Zea Mays
aggtgggccatgaccccatctcaatttttcttaaccccctatacctaggtttaggtacacaccaaaataaacaaatttttgtatagttagcgtggacagatctaatgaaaacaaggttttgacctatttttctctcgatgcttcactactcagtccacttttcatctgagccatttgattctcttccctagcgcaagcccactcgtgtctcactcgcttcttcggtcatcgactgaccagtaagtaggtgacctaacccgcccgctgctgcgcactttgccttctcatcactcatcggctcgtcgactcgtcgggatcctacacacaacgttgatattttgcctcctagtatgcacagcacatgggcaagctgttggtgggatcatggcatcacctgtccctcgctaactcattagagtgccaccgcgccattgcaacacgacaatgggtgtcgcttgccgtcaccatcatctatcgctaccttgcctcctgcactcgctcctcctacttgtcgtcgtctcaccaacgctatctcacgacaaattcgatgactcaccggaacgacgcgctgatgcggctgctccgccctagtgcctcgtcctcagtcagtccacctattttctccctctagctctcctttcgggagccaaaaaggttttttggtattcatatccttttgggaacactagattatcatttaatattcatgttattatcattaatctaaatttatgatctagtctagtgttgcgctatcggccccacctagaatttt

SEQ ID NO: 67276 - DNA, 515 bp, Zea Mays
cacagctcctatctaatagcgcgaagggatatacactaatccgatctcaaccgttcattctctgatccacggctacgattcaactaaccgaagggggtatcacgcttctaatctgatccctcaatccagggatcgacagtccagatggccccaagctgcgtctcctcccccccgcatacctgggcacggcggcgaccgcacagacggcgacgccattaacggtgaccgtgttcctccaaaactaaggtcctctactccaatccatggtcgctacacgccgttccaaccaaatagagataatggcgcatgtactcaccaaggatggcgcgtgcagtagctcggcccacggtagacccaggcacaacacggtggtgagagctccggcgagcaattcccaagaaagcctcatacaccgatgtccgcaacctccaccctcgctctcagggtgcaccagcgaaggatcacgaccccaacggaggccccgagctgcgacgtggacgagatgacggcggcag

SEQ ID NO: 67277 - DNA, 292 bp, Zea Mays
gttgcacgacttcacgtcaggtttggcccgttgcttatgtcgtgggccacaagcagcgggtctccgcctgagcgggaagtggagggcaaggcccggacacgtgtcagcaccggacccctgctcataccagggtcctcctcgttccgggaccctactggggttcggatttacccggaggctccggacttatatgtataggggtccggtgtccttctgtgggggaccagactgactgggatgtgttgtctttccttgccatgtggcgccgtcccccgcgtggctaggagacgtc

SEQ ID NO: 67278 - DNA, 310 bp, Zea Mays
taggagtcgaaaggacagagaacgtgggaacgtgctcaacagtcacgtcccaagaagccctgtggaccaggagccgtagactaaaatgagtgtacatagtaactgcttatatcctgtaacacattcttctctgcgggcgcatggaagtggtgcactattcgcgaggattcagatggcttcgtgatctttctaggagggatcccgtcgtgaatgaaagatgttacattgggattatagattatgatggggtctcgatccatgattctcgggaaactcctaaattaggggatagaaatggagcaatttcttc

SEQ ID NO: 67279 - DNA, 448 bp, Zea Mays
cattctacaatagtatactaaaagaccaggttgcaataggtttgcctccatcatgacacgagggtagactgtatggaagcggtaggatgggatggaaatccttcatcccactggatttcaatacaatacttggggcacatcacaacatcctaaaatcagctagcgataatggagccatttatccaacatcacatcaatgagcttcgtgagcaaaatcctaggcatacggatgattgggtaatgaagcaacataagcagcggttcaacacatggctaatggtgaaagacattccacatggagaaacaatagaagaacaaaccatcaaggggttggcatctggaccatcacgccagatcacgacatgacaaacctatgacaatagtggattcccattatgtaccaagtccaaggacaaaaggagcatgtcacaaaatagtggtgttcgat

SEQ ID NO: 67280 - DNA, 692 bp, Zea Mays
cacatgggtcaataaagcagaagatgctccgtaggtcgatagaaaggcccccaataagtcgtccaatagggtgcataatgggtctctctggcgtgaagcaggaaccgattaaagtgatggaacgctgtatagtgcacaagcaaactcgtcgcgcaaatgttgtgcgaaataaccgcctggagtctgaagacgcgtcttgtgcacagcaaaacaccgaattagtcggaggataacacggagaagaaaaccaaacaccaaaggaataggaatgctggtaatggaagagaatagacttagataaactcaacaatctgtacagggatatatctccagtcggttatataaagctatagaggtacccctacaaaaactctcttgctcgccattagattgataggagactacatcttccacctcccgcaaaccatctataagatgcaaactcaaggcaattcaatactcagcaccacactggatgtagggtattacacattcacacgacttgaacctgtataagctttctgtgttctgacgtgcccccgcacgtaccctcgagcagcgatcgacgtcgtcgtcctcccaaaagcactgcatgagctaccctgtagtgcgcagtcgggaccaaacatcaacagctggcgcaccaagtagggggtgctacgtcgattcacgacagctccatagcaatcatc

SEQ ID NO: 67281 - DNA, 393 bp, Zea Mays
cagtgctgtaaggccaagatcacaggttccaaaccatccgggcatggtcaccagattgtccgctgtttgggaaccgaaccgcctaggtgaggtcgtcggactgttcgtcgttgatagaaacatcatagtgatggctttagggaactcagccgaggatacgcccgatatggttgattggaggataccccttactacttatttacgagaccctagtgttagagcagataggagtattcggtggacaacttttaagtatgttctcattaatgatgaactttatcgttgaaatcctagcgatgttatgcttaaatgcttcggccctaatgatgttgtattagccatggccgaaatacatggaggcatttgtggtactcaccaatcgactccaaagat

SEQ ID NO: 67282 - DNA, 530 bp, Zea Mays
cttcaaggaaaaagcagtgttaattgaatccatggtattgtatacaaatcagcatccttgcttcagcttgtcgtaaacaatacaaggcattatctaaaagatatttgatggccacatgagaaaggagtgcagacttccactttacatgaaccaggtgaataaacaaagcaagattctagctattcccttaaaagagacatggatctcgcaagccaacaatagaaaaataggataatcatgatgttatagcctcactttacgagcccaatgactagaccaggcaagaaacacgaatagcttgtggtgaatattgaaggcggcctaaacggacagtcaacatcagggaaagaaagagatactcctaccaatgtggtacacgagcttgatcacaagcttgggcttcatgatgggaatcgcggactcgcactccagccacagtccttctaggctaaattgcaagcacgaccgtgtgggcgagggctgggaccgagactttgggtggccgggcggggctacgacctgcagggaag

SEQ ID NO: 67283 - DNA, 623 bp, Zea Mays
gtcgcctaagggtgcagcccccccggactagctcaataagtacgcacaatcgaatactttcccaaaaagaccccgcgcacaagtcgcctacgggcgcggccggatcaacgaaggcacgcaacctcatacaaattacagttacatacatacagcgagggcatcacacattatattggctcaaccttccggatgatacccatatccctgtagttgagcagcattatcctcaattcctcaccctcaaaaagacttcgcagctccccctcacctacactcgccccagtcagcgaggacaacaattcccgtttgccagtctcgtccacacgaagacgaccaccctccatctcaccatgatgacgcctatcactttgcgacaactcactcactctctgtttcgccaccgcccttcgccgcctacgcccagcactcgcacccggaagaccttcagcatccatcacgcgcggagaagtctccgctgtagccacgtccaatgccgcaaaataatccaagtcctcatccaaagactcttttgtccacacaatcgaactcctagaatcatcagactcaaaaaacttagacacagaatcatcagaatcgccttcagcaatcacggtcgaagccgc

SEQ ID NO: 67284 - DNA, 437 bp, Zea Mays
cgaatctcaagctttcggcaactcatagatgcaacaatggcgaaagcatgggagcaactacaagaacatatcgttgttggccctcaccatggaatggaaaatggatctccattcatagcttcttccacgatctcaataggatcatggaagagcacctagatgttgaattcggtggatccttcttatccttgagcgtcactatcacttgaaccctaatcgagaagatggcaatcaatgaagaatggaaagaagagaggtctagtagagtagtacccatacccgaggagttcatcagcttgagagcactaacatgctcgttgtaatgatggacatgctctcaaagaaattggaagagcgaccaataaaagaggtgcaacatgtctaggccctggatacccacctgacatgtgaggtctgtgggaacatagaaccctcag

SEQ ID NO: 67285 - DNA, 839 bp, Zea Mays
ctgatcaaggaggccaggtcgaagtacttggccaatttcaaggtggacaagaaccagaaagtcgtccgtatacatgagattaacctggcgccactccgacctattgctgcgacccctaatgtaagtaacacggacgacatccaagcccttcgatcttatgtagatgaatgatgagaacaaatgcaacaaatattagggggtgtacaagaagattatacgagattaacacgtgcattcgataaatctatcatttctagttttccatcacacgatgtccaaactaaagataacctacaagatccatcggctgcaaatgggtatgcccaatcccaaccactttatggggtgctaatgaattcctatagcgaacagtcacatcctctgccacctatatgggaggaacaaacgcccttgtgcacgactggacagtccaggcctgaatccggacgatccggcctagtggcagtcgactctgttccccacgatgagccaccgaagacagcaccagagacggtagagatgcttagacagtacggctatgcgcacagaccatccaagcacatcatcggaccatccggatatcacgtcggattgtccacgacagggtatgtggagcaaatcgcagattattaccaacaaccctcctaccagccccaaactaacgtctctctagcatccacagccactcaaagacgtggaataatcccacccacacatgagtatgagccattttcgcaccccctagaaggccgaaaagattcaacatgcaatatggggtacctagggccaacattaatactccacataatccaaacctatgggcaacagaacgacataat

SEQ ID NO: 67286 - DNA, 592 bp, Zea Mays
attcactttctagtgaacttgcctctattcctgcttcatcttcctcaagtgcattttgcccaaccctagcttaagccccaccattagcagcaagcttgtaaccatggctgcctcacatcgtcgtgaatttgagaagtctaccatcgattcaaaggatatgtgcattctaattgtgtgaagcttctacccaagaaaaataacagtcaatggaagttaccagacaatgatttttccctatgattgatgcacatcaagtagttgtcttatactagttcttcttgcctatatttgaaatcccgagctcttcatttttagggaacttttgaattattaccagatcaaattgattcatctaaatccaaatctcattcttcacaatgccatattcactcatatttgtgaaccttatctaggcattccaccattctttccattattgtaatcctccttttcctttgctcccaacccactacagaaaccctagcatttggtatgttagagtgcagttgttgatagccgctagtacttaggctgtgtcttttaaacttcttgaagaattggtacaagaaagggttttacatcagaaaccaaa

SEQ ID NO: 67287 - DNA, 390 bp, Zea Mays
gagctgggtagcttcagtgtgtagaggtagtaaataggaagagaggagagcactgagttgactatttgtagtctgcccgcttgtgagagaaatagtgaagttgatgatagcctcctttcaatcttctaaatcaaaggaagaaatgagtctagcttcggcttagtggtccccataggaaatcccaagtaggtaaaagataagctcccaatgttgtagttaaaagtattggctagcaataccatcctctcgtctaacacattgatcgaatatatgttggatttatggtaattgacgtgcatgccagttgaggtcgcgaatgagttcagcattgcttagaggaagaagagatgtctcgggcacacttccataattagaatggtgtcatcggca

SEQ ID NO: 67288 - DNA, 485 bp, Zea Mays
gaagtcttcgtcgaacagccgccggggttcgtgctaaagggccaagaagggaaggtcctgcgcctcgtcaaggcgctgtacggactccgtcaagctcctcgcgcctggtacgccaaactggacagctccctgctggaacttgggttccaacgcagcagctccgagcatgctgtgtacttccgcggtgctggcggacatcgcctcgtcgtgggagtgtacgtcgacgacctggtgatcaccggcggcacccaagacgacatcgacaagttcaaggtccagatgaagggcatattccacatgagcgacctggggctgctccactactacctcggtctggaggtgaaccagactagggacggcatcacgctcgggcagagggcgtacgcggcgaagatattggagaacggcggcctagctgagtgcaatcccagctgcatccccatggagccgcgcctcaagttgagcaaggcgagcacggctcccgc

SEQ ID NO: 67289 - DNA, 643 bp, Zea Mays
caagcttggtagatctggcctgtgttaatggagtttcatggagaactttgtgcgaattaaattatagaatgtatcaacaattctaaattaaaatttgcatggcatgaaagctagggtttgaagtggattagtattcatgacaacatttaaattttcctttgcaacgcacggacatatacctagtatatatatattcacaatacatatcttatctctacatatcaaacgccgcataaagcaacagccggagaagaagcgatgcggttggagaaaaaagggcaagatggcgatcgtgtggagaagatgatgtcaccgttcgaaaaagtcaatgagctccaccatcaagcacccatccagggagaggaagacattcaataggtatgtagagctcacgttgtgcgcccctgctattttcgagatttcgatgtgggcctcctcgaggaggcataggtgcttggcataggcatgctcgattcgtcgctatagctcgacggctcgcgtccgtaggatcgagagcaggagccttcccccatcggcgatattccctcatcgtcctcgtaggggtgggggtgacattgtgacaagacagagagggaaggtgcttaccatgtgatggcatgagacaaaataccatggaagggag

SEQ ID NO: 67290 - DNA, 666 bp, Zea Mays
ctataacattatagggcttatcttatattattttccattacatccggatggcgggttaataacctaaaaccctaaggtctcttttgcaaatctaccacggcgaaaggatatgtatgaatcctgactgttggatccatctcgagggctcagattaaatcgcgtaagggtatgggatcatgccccttggacccagatcctacggttccacatgttatgaaaacgggatccaatcccgaaccgcacgatcttgatccgaccgcctgcattcgataaaacgaaggggtactctagatctgatctacgccgcccatctacaatcccacggttcccacaatcacaacccttcatctaatcttgaccgttagtcatgagatcgacagctctggacttgtcttcttccccaccaggccggatgagctcgacggcgacaaagcgccaactgagctccaacccccaatcccctacctccactcaaatcccgacacgacaagtgctacacgacgtgggaagcaaggcgacaagaaggagaaattatcacatcaatcacacgcgcaaagatcccagcccacgaaagaatgtggctcggcagcggtgttgttcgttcggcgagagattccaacgtcaatcgcggccaaacccgggtggcgcggccacgaccgtcaaccc

SEQ ID NO: 67291 - DNA, 860 bp, Zea Mays
cactcgctttaagatcaaagaaaggtccaatgaagtgaggggcaacttttctttaactttaaatctcctcataccccggatcagtgacaccttcagatacacgtgatcaccctccttaaactccagtagtctccttctattatcagcatagctcttttgccttgattgtgcaattctcaaattctcccttatcattcaaacttgttcttctgcctcttgaataagttcaggcccaaagaactgtctttctccagtttgatcccaataaagtggggtcctgcattttctgccatatagagcctcaaatggtgacatcttcaaactggccaagtaactattattataagaaaactcagcatatggtaagctcttatcccaacttccaccatgtttaagagcacaagctcttaacatatcctccagcacttgattagtcctttcggtctgcccatcggtctggggatggtaggctgagctgaaattcaactttgtatccaagctctcatgcaacttcttccaaaaccgagaagtgaactgtgatcctcgatcagacacgatcttcttaggcactccatgtaaacaaactatctgagtcatatacaattctgctagcttggctcccgtgtaattagtcctcacaggtatgaaatgagccacttttgtcaatctgtccacaatcacccaaatagagtcatacccagcaggggtgcggggtaatccaacaatgaaatccataccaatttcttcccatttccactcgggaatcttaagcgggtgcaatagtccagcgggtctttgatgttcggccttgactctttgacacacatcacacttagccacatgagcagcaacatctcttt

SEQ ID NO: 67292 - DNA, 370 bp, Zea Mays
ttcaatcacctcttccagtatgccattgatcacggggatacaaacctgaaaaagaagaattgttttatgaggggactaaatgatagactccagcataagatggcaacatgtttggacctcacatacagcagggctgtcaatacagcactggtagttgaagccaaaaatgcgggacacggaaagtcaaaaggatatgcgggtgaaagatcaactcaaggacctgaaaagagaacaaggttggtaatccgacctttcaatccaaaccgttcttcacctcgccaacctacatatccattcaaacaacccgtatttatttgtcccactcccgcccccgttccgaccaattagccgagtgcccctagtactcgtt

SEQ ID NO: 67293 - DNA, 1144 bp, Zea Mays
cctcatatgaggatatcatatccttgagattgttagcaccaattcccactagcctccttctgaagattaaggatttagaattcgtactcagcaccttttctacacttatctctttgtcaagagataaatcatgcagtcttttaaatcttaccgagagaggaatattcccacaccaacaatcattccaaaaactggttgatttaccatctccaatgattcttttgtagtttttgtaaaacacatcttttacttccagaatgctcttccagaaatgcgagtccccttgtttcttttccatcaaactcaaaggtcttcctctgatatatttaaaccttactattttttgccataggccctccctattctccaatctccaccaccatttagccagtagacaatggttcatgtatctaaggtctaaaattcccagtcctccttgatccttaggtctacaaacagtatcccagttcaccagatggggtttattgttctttttttcccctgccatagcatcctccttctatacatgtccagttttttgagcacactaacaggagcccagaaaagggaaagcatgtataaggggatgctagacaaattattgttaatcagcaccagcctccccccaaggctgagataccttccttgccagactcccagttttttccatcttttcttccattttggcccaatgggagattctaagagtcttgtaatccacaggaatgcctaagtagttcatgggtaaatttttgataggacaagtgaagatttcagcgtataaattcttcatctcttcagctttgccaaaacacagaatctcactcttgtgaaagttaattttgaggcctgacatctgctcaaaaaggaccaaaacaaatttcagattccttgcatacatcgggttgtcctgaagaaggaagatagtgtcatctacatactgtaaacaagcacaaccactttcaattatgtgaggaacaaggcccaccaaaagaccaacctcctaggcccttttaatcatgcaagaaagaccatccacaacaatgttgaagagcaacggagataagggatctccctgtcttaccaccttatgagtagagaagaaggggccagttagattgttagtcctaatggccaccttgcc

SEQ ID NO: 67294 - DNA, 559 bp, Zea Mays
ctggaacaatactatttactgttcgaactttagactgttccctcacatcgcgttgtggctgctcctgaaattgccctggatgttgttggttgtatgaagaagttagtgcagcgtaggtggttggggcaagacccatctggccgaagagtggcttgtcgaagcaactgaagctgaaggttgcaggatttgttgttgattatggacatattctgggatgtatggagaataatacgaaacagtgtgaaggacttgcttcggctggttctatcttacttcggctttggcaatttccttctgcttttgaattgtgacttggcaggttcttgttgtgtgctccttaccctctccatagaataagcagaatatccttgttggctaagaattgtatcttccccaaagcttcttcctacccttccacctcttggagctggcggtctgagagaactctgttgtgttcctgttgactgggagtgattttgttgtccttgggtatgattgtttttgtcttcactttggcatggattgtgaattgtcctgacataccttggattgaatcgtc

SEQ ID NO: 67295 - DNA, 599 bp, Zea Mays
gtcctggaacaattgagtcatgtacattctttgacaaaggctactaaggtgtatctagggtgagataacatgtttctagctagtttttttctcacaaacaacaagttcgttggagtttctacactcaagatgagcttttttactattacaagtttatcattcctaggctttttctcatgttttcaccatttttcataagctacctcacatttttatgtgttttgggaattctagaactatcgagcaccaaacatccttaggcaactattaagaccactagggtgtatctagggcaagacaacatttttctagctagcttctactcacaaacaatgtgttctttggattttctacacccgcgaggagctcaaacacccaaagtcatgatttttttgctatttctggtttattattcctaaacttttagtttgttctaacacttagccacatgttatgtttcttgagcccattttcttaagtaatttttttatattctaagctctcgacctattctcacgttttcaccatttttatgagttatagctcactggttttagttattttgggagcccttaaaatatcgagtcccagacattttt

SEQ ID NO: 67296 - DNA, 594 bp, Zea Mays
gacattgccgcttccgcgccctcgcttggatcgagagcgaggtggagtatctccgtggatttcctggtcatccgaggagtcggattcgaccaccgacgggttccttcgacgcaccattctaagaaataagaaatagaacctatgatgagcaaggatcaaacatgtttgagtagaaacgcataagatattgatcatgtacttcaaccgttcatatgagcggttcaactacaacgaataatatcaaattgctaatctctaacaatgtttgtgacaaatgaagatagtctaagtgctgcaatcacttaaactaaaatgtacccaacgaacgatacaatagataatcaagaacgcgtaggatcgagtacaaggaaataacatagggcaatacctcgatccggagattgggtcaaaaactcccaacgagatggaggaagatggtggaaacacgccaggaagaacggatctccaacaactcttccaaaagagtgagggctcgagagagtttttggagtggagtgtgaaggtgtgagaggggaatgagagggcgacggcggctgtaaaaagagactgcgaagggaagaggagagagggaga

SEQ ID NO: 67297 - DNA, 530 bp, Zea Mays
ttgggctagcatacgacaaatcaattaccagcataagcattatttctaggtttaataagcatgttataagtatttgaattgtttggcttaggaatattatcattgggacaatcttgattaggtgtacctttcttctacaagtgtagcaaatgtgatccttcttattcgtagcttcattctttgcttgttgtacacttgcaagtgactaggccaagcttttggtgcttgagtgcttttggctcttgttatgctaggttacagttgttttgttgtatccatcattgtcatcttggtggaggcaacttactaacctcaacccaatccgtccaattcttgtatgaacacatagcaatctcatgcccatacttgttgcacccatagcacattctcttttttcttcttttgctcttgctaacattgtcataactagattgtgatccttaagttgggatttagagcaagcatgttttgaacccttctcaagcttgttgaccatgttctcacgattaccttgagaaccttgtcctttc

SEQ ID NO: 67298 - DNA, 644 bp, Zea Mays
ctggcatgaaaactcctggcttgtgactctagcagaggattccaatcgttgatctagaactgtattcttcagttcaatctagtggaacttgtctccgataggaaccgtgggatcttggttgaaatctacctcgttgatcatcgtgcgacagcagcacatatgctgaagcagatccgtcggacgatgacagaacatccactggcggcggcttggtagtagattggatctgctcagtcttgaacttgtttgtcgttgaagatgatccatggagctagctgatgtcgatgtcgcctcccctattgtcggtgtttagtaccggcaatgcaccactaggtgtaccacgagatgcttttatgagtcgacaacatcaactgtaggtcgatggtttgcttcgagatgcgacaaaacacacgatttatacaggttcgggccgcgaatgcgtaataccctacatcctatttgcggtgggttgtattgctttgatatgtggaggtttacaatgagggctagggtttagatgtttgatgagagagcagggcgtgtataagattggattccctcagatctaccttgggagggatccctagctcgccttatataatccggcgtggcttgggttacaagtcagtttccttatatatctc

SEQ ID NO: 67299 - DNA, 692 bp, Zea Mays
ggtgggatctgaactatcatgcacgcagaacacgggcaaatagtacctccttgggaaccgcggtggtggtaaaaaccattttactagtgcggtggtgacgagcatcacgcgcatgatcgggcataccactaggagtgggggtcataggtcatgtgagtcgcggagacagatgtgacatcaagcatgacaataggtgagctacgactagtttggcaacgagcgtgccaccgctgtacgccagtcacgatcagattgcttgacatgagatcgtagttgtggcctcacctgtgggttcgtaacatctcctgaggtgggccctgggccactgtcggtaccctgaaactgaggtaccctctcctactgtgccaaaggcagactcccgcgtggttacctataactgcatactaaggaaccgagcagccaggcccatgggtccagactcgagtgacgggaccattagccttgggacccattcctcgctcggggacaggtccggtgccgccatgtgtcccaggggtggaactgctcagtgactagtgctatgagtctggaccccgcatgtggatcctaggcctccacgtatgccgtcaggaccctcgcaggcgtgccccggatcgccacatgtgccatatgtactcctggcaggggcctaggtcttcaaggcaacatgcactcttgaccctcactctccg

SEQ ID NO: 67300 - DNA, 426 bp, Zea Mays
ggaaattgtggtccactggggaagtatgaaccaaagcctctatcacatggtccttggccatatggcacacgaccagcatcccgtcgggcacgaccatcacgtagtctcactacctgaggcttagtggtaagaggcaaaacacctctaggcctcgcaggacatctctgaacaggctgaccatgaacaccatgagaggggctgttcatgtccttcctgctcgactcagaaacccgccgctcatctctcttcctcctaaagcaaaaagaagctagatgcccatccctctcacaatactcacaatggtacctcacctctgtcttgggtggattttgttagtgggaggaggctttctttttggatggttgaggggctctaggaaggggatcgctagagatgtcgggaaaggtgtcaagtgtgttcctgaga

SEQ ID NO: 67301 - DNA, 799 bp, Zea Mays
gtaatatcaataaaaatatattagtgcccaaattagaatttggagataacatataaaaaggaaaataaaagaaaataccacacaatataatggaaataaatatataaataattatattcttttcatcctaagatttgaattagttcatctaacctaggtataaactttacaacaatatttgagttcaaattgaaattcaaaacttcaaagaaaggaaattaggaaaaaagggaaagaaaaaaacaaagagaatcccaacacaccacatgggccacaacctgaaatcgggccacctggcccgtccttcacgcgcactcggttgcatatgctgcctagtccttttgcggtgactggtggggcctgctgttagtggggcacgcctgtacgactccacgctaccggttcacacactggcaagtggatctgggtgtcatcgtctcaactgctcggcaaaagctttgcgcggacgctaggaaaatcggcggtgaccaccctaccagccatcgaccccatagcggatgaaagctgaccgtgtgtcctaccgctcaagtgcattagggttcgccgccaccaacatagagcgttgcgcaccacttcgattactgtcacgggcatacgaggatttcagggggactgcttccaccgtgcgccaattcgccgtcgtcgtgcttccccataggggtgcccaaggttgtcagccgagacgaaggacgctcatgcgtgggacgtccgggctggagccatcacgggcatgctagtgatcaccagggtgagctctccgcagtaaagccgccacgtg

SEQ ID NO: 67302 - DNA, 595 bp, Zea Mays
ttgggttcgcgtatggccgcttccatccagttcgatgcgtgatatctgcagctgcgtttccgcactgccgctgagccttttttcgtggaaccgtttttgatttcggcgctctttgatagttaaatgatcatggctggaagtaagcggacaaagaatgacactgcaatatgctgtatatcttgttatggacaaagataaccaatagtgtattgatctgtagttaatcaataagagcttaggtacactgattcagcagcagtagcagtgtgtccttgactatatgcctaccaatggttaacagtttactgaccagagatcattgatctgtaggtggatttctttgtacagcattaagagatttgtagcctctaagccttatttgtatgctttcaaattgtcatcgtgtggcctccctacacctacatgttatcttagttcagattagctaagacatatatgtccgtaacttcattttttcatttttgtgccctactaggatctcatgcttaaccttctattgtagttatacatcctgaatgttgttagctgaaattaatcattactaatgctatttatgtttaatagtatatttttt

SEQ ID NO: 67303 - DNA, 1260 bp, Zea Mays
aactcatcgagcactactcccggggcttgttgagcctcttgagcgttgacgtggttcactcgtgccctgccatgatactgggtcttgcttagctggttgttggaggagggtgccttggaggtgggtgccgaggcactcttggggccattcaccgagttggagtaggtaggcacagatgtcttcaactgagggcaattattcttgtagtgactggggtctccgcagtgccaacagtcattggctggaggttggttgcttgcaacggagggggcctgaagggaactttgacctagctgactgaaacgtgatggagtgggtccagctggcttgttgaagcttggtcccttgggtggaaacccaaaggatcgaattctctggtgcctgtcttgctgctgggctcggaggacttggaacttcctcttgaggtgacccttttcttcttccctagccctttccacttgtatggccttgtttgagaggtgcgagaagctgaggaagtcttcgctggcgaggatagtcttgagttctggtcttagccctttcaagaaacgggccatcttcttggcttccgtgctaacatcgtcaggcgcatagcgtgccaattctgtgaatttgtggacgtattcacagacagatcttcctccttgagttaattcccgaaattcatcttctttgagctggacgatccctaggggcacatgatgttctcgaaaggtggcttcaaattctgctcaggtagcatctctgacggcagcgttgaaggtatcccactaggatagggccatcctagaaagttgatgagcagccagatgaacacgcggttctcagggcatctgatggcctctaacttcctttttattgtgcatagccagtcatcagcgtcgagtgggttgctgggtccagcgaatgtgggaggcttgagccttagaaaatctcccattctgtcctgaggtcttccaccatttgggcgctggttctcaaggcttctagtgaggacctcaatgagtcgggtttggttggccagaacttgggctaaatctaatggcagctccagaggtgcggggaggtgggtttcactcccttctccaccgacttctccttcagcacctaggggagaccttgctccaatccctgaggcggtaggcgtggttttatccgaagccatctgccagggggaaagaattactactatgcacatgccatatttttttaaacatgttattttattcaacacacaagttcattacaagcatacagttg

SEQ ID NO: 67304 - DNA, 579 bp, Zea Mays
taatctctgcaataccatcttcaaatgattcacatgctcctcctcactttgagaatatataagaatgtcatcaatgaataccaccacaaacttgtcaagataatccatgaatacactgttcatcagattcatgaagaaggctggtgcattcgttagaccaaaagacataacagtgaactcgtacaactcatacttggtaatgaatactgtcttcgaaatgtctgaaggtcgaatcctgagctggtgataacccgacctcagatctatctttgaaaacacgctggctcctctcaactggtcgaacagatcttctattctgggcaaggggtacttgttcttgattgtgacctcattgagagctcgataatcgatgcacatcctcctagtgccatctttcttctccacgaactggacaggggcggcccaaggcgaggtgcttggcctaatataacctttctctgctagctcatcaatctgcttcttgagttcaaccaactctggtccagataccctataagctcttttagaaataggggtggtgccaggaagaagctctatggcaaactcaactttccgctc

SEQ ID NO: 67305 - DNA, 730 bp, Zea Mays
actggtgattgtattgtggtaattgctgaggcacgtggcattcagtcgacgggcagccaactccggtgacttatccggaccagccgcaaagtagaaaggagcacgacggctagccggattagtacccatagcccaacagcggtgacgatctttttaccctgcggcgttatccgggcttaagtgggtacgaatcacctcatcgacgcaaatctacgcttgaggtcgccggcggcgagggggatctacttctgttgatattttggtactgtaccattggaagcttttttagttagcctgacagctgaggtttagggcaggttttctccaaatttttcatggcaacatcatcatccttctgcaccaaagttgtagacctatagatcatcttcatctttgttatagcagtcctagtcgaattcccaatggacttagctcaaatctgatctcaagttcgaccaataatactgacgaccacttctgctatcagattctgattcagttgttcaataccagtctgacagagcaactttgggcaacaatttctttaatttttgtataacaactaaagagactgtctgcatcaaagttattctcctataatagttctacagaattgatgtggtgacctagggcaaaaactttataacttggcagatatagggctccaaagatgagccaatgccacagatttcagacttagcccatatagttcaagtgtggctcttttgca

SEQ ID NO: 67306 - DNA, 490 bp, Zea Mays
agagaacaatgttcctcttcccaaagctgatgaagtggtggttttcagaagcttcatgaaagctgcttcggttccccctggacaaattattggtcgaagttctgaaaacctttaaaatttaccttcatcaactcactcccgaagctatcattaaagtggggatctttatatgggccatgaggagccagggactggaaccagatgcaagatgcttctgtaacattcatgagttgtcttatgagacgaaggctaccggaaaggagcagtatcacaacaactttgattgttacagcttcgtgcctcgatctgaggcaagctacccagtgcctatgttttgaaagaggtggccgagctcctggatgcaggaatggttttacgtaaagaatgacctaagttagagggaggatgtgatagggattattcaacgccctatatggtctcgcttcgggattagaaggctagcccctacacttgggaatgatgtgcaagc

SEQ ID NO: 67307 - DNA, 641 bp, Zea Mays
gatgaagaaagggggggtgatacaccattggcttggcgtgagagtcgggtggtgtacccacccatgcacatcactgatagacatgcacatgttgggcatagcgatgaactggcataggcgagggcactagagagagccccatgggtgggagcgatgtcaaaggagatgccactagggctgaaggcggagccacgaaggtccctagggacccaacatgggttgacaggggtggcacacgggttaataagggccaacagggtggctcggagggaggctgggggagcaggagccatgagggccatcgggtcaccgactgaagctgtgtttggggacctgtagttggaaaaacaaatagtggctgacaattggttgccacgaaatcaaggtcatggagaaaatccaactcaggaagggaggcggtgggtggttcggaagtaggcgagaaagggaaatccatcttgtcgaagatgacatgacgggagatcaagagacgatgagtggtgaggttaggacaccagtaccctttgtgatcaggggagtacccgagggagacacaacgagcagagcgaggagcaagcttatggggagtagtatcagaaaggttgggtagcatgtgatggaatacgtcttggaggcgttgt

SEQ ID NO: 67308 - DNA, 653 bp, Zea Mays
gtcggcttatcggagagagacgggaagtttgcaataaaccagcgactaaagtcgctccaatcatcgatgcagtgacgaggtagatgtcggagccactgcagcgcatcttgccctaggacaatgggcaagtacgctgtcatgacgtcctctgttgcccagtagcccgagcgacagtcgtgtagacggtcaaccagctgcccgggtcctgcttaggctcgtatttgtcgatgttggagaccttgaagttgggaggccactggatggcccagagacacggagtgagcgtggaaactctgcacgtgtcctcctgtcggcgttcatgtcttcggtcccggggaggggagtcggtagcaggtcatctcgaccgtccccggaatgggccactggttgaggctgtcgccgactcaactcgggtggcacgagttcgtgctggtatgtcgtgatcccggtcgtactcctcccagcgccttatctcattttcatgccgccagtcgcgcgaagcgctgatggtgcttcgcgcatctcgttggctgttgatggcatgacacaggtcattcataggatgagcgaggggtagaagatgatgagctgcctgagtaagcagccgtcggtaaccttccgcgtttggggttcgcgggagggcatcggcaatc

SEQ ID NO: 67309 - DNA, 285 bp, Zea Mays
gttaccgactcaactcgggttactaataggagaattcctactgaggatttggtgagccggctagacatgatcttgagaggcaaagtatcaaatgttggtgctcctgttgcctactctgcttggaatttgccacctcctaagtcctttttcaatttcgtgtccaatcctcctgctggtgatagtggtctgggtcttagagtgcgaccctctcccgaagatattgaggtcttggttgcttctctttgtgatcttcccaatgatgagaggcaagttcattttgagatg

SEQ ID NO: 67310 - DNA, 711 bp, Zea Mays
gaagggtgttctctttgtctggtccaacgattgcgaggtcagttatcagacattgaagaacaagttggtggacgcccctatcctagctttgcctgagagcggtaagtgtttcacagtttatacggatgctttgcgaattggtcttggctgtgtgttgatgctggaaggcagagtgattgcttatggctcaaggtaattgaggaagcatgaggggaattatccaactcatgatcttgaattggccacggtggtttttgctctaaagtcgtggaggaattatctttatggcgaggcttgtgacatttacaccgatcataaaagtctcgagtatattttcactcaaaaggagctgaatttgaggcagcgtcggtggcttgaattgattaaagattatgatttgtccattcattatcacccagggaaggcaaatgtggtggttgatgcccttagcaggtccggggttccaaaagtggccttgtcgttgattgctgatctggaccgtttggggatcgctttgtgctatgtcggcaccgctagtgaggagactcatatgcttattcaatcttccctcatggagagagtgcgtgcggctcagcggcaggatcgtttattgcaggaagctcgaaagaaggttggcgatggtaaacccagggagttctccattgatgagaatgatttggttcgtttcaggggccgcctttgtgtgcctca

SEQ ID NO: 67311 - DNA, 297 bp, Zea Mays
tcctccgccgaattctaacgggggagggacggcacaagtatcgcccttatgagaaggacccttcatggtagcagaagtcactcggcccggatcatatcgtctcactcagatggatggcacagaagtcgggaactcctggaacatagaacacctcagaaagttttatccctagctgtatttcaaaaacagccgggacgacgatgtactctgtaaagtgggaatatgtcatcaataaaaaagaggtttcaaagatactcagattgtttacgattgacttgcattcttacttaactcggg

SEQ ID NO: 67312 - DNA, 923 bp, Zea Mays
gtgattctcgcttattgtgttccatatttgaaagtactatttgattgaaccaattaaataaaggaacgattaataaattaaaaatgtattactgcatcatgtcagattttaatttgcatttcaaatggaaatcccaacttagatttgaagttgaaaattcaaataaaaaaagcataaaataaaaaaatagaagcttacctgggcctaaaaccctaccttagtcgcagcccactccctctcccacacccgcgtggcccacacgccctacttcgactgaccaacagggctcatgcctcaatttcatagccacacccgcgcgccgaacaaagagactagcaagtgggacctagacgtcggtttcttctgctccacgaatttagtcaccgagttcgttacaatccgagtataggttgttgggattttgttgattcagttgttgtaatcccaagcccacaccttgccaacagacacgccatgtgcggagcgtgaccatagccgccatgaggaacatgaagaactcagactgccactgttaggattaagactcaaccccccattaggcctacaagagcaaatgagaaaggacctgaaacccaccgcgcgattgtgacgcctagccgagagcagggagccaccgaacgagggagaaaacgttgttggcaaaccgtgagacaaatctagagccatcatgtccaattcgcgcgtatgccgacgacgagcccttaggatctggccaaggtgcatcgtgggctatgctgtgggtgtctgtagcctgatcatgcagggttacggtcggaggcatggtgaatttctcaatggattgcatcatcattgttcaaaccatcgtgtgtcatggatcggttgttagggtgtgtcctgtacaagagtcggttaacaagaactgaggtagagttaatctaatt

SEQ ID NO: 67313 - DNA, 499 bp, Zea Mays
tgatgaggagttggatctttttaggccccctccttccatgaaccttgctgacgaacagtctcctgtagcaggaaatgaagcaaccaaggatgacgaagactagaatagtatagtttagacgttatacttatgtaaaataagtaatgaagtcaagttgtacaacggagtctgtataattacattttggtaatgtaatatgatggtgtttgctggcatgttatattttccaaatgtttctttgcctcagatgccatcacggaatcgcgcacatgatggtgcggggacttctcgtggtcgggaagatactcctaacccgccaccagtaccaccgactttggccgaggctatcgctaccctggtcaatgccacagcggataatacgcgcttcttgcgcgaaatgacagacaatcagttccaacagcacagaggtagagctcctccgcaaggacctcgtgatactacatattcggaattttatgagactcaacccccgatcttt

SEQ ID NO: 67314 - DNA, 583 bp, Zea Mays
gacgcggtcagcccaccacatacgtgcttgcatcaggatttatggtggtataaccgggttatggaatttgtgtatatcatgcacgcgacaaccacaagccaggatgctatgggtcagtaattatacgaatgcatatacatattgagtaatgtgcatataccatgcaacgaatctgagaacgcagttcacctatgcatgcgtcagcatttataccgggataaacagattgaataatgtgtataaaccatgcaaaaagaatctactgacgcgcaaatcacgtggaacgactttacaagtttgttcagtgtttacgactgcataagaacatgaaaagtaatcgcataaatcatgcaatatcgcaacgccagaccatttatgctattgtatatacgtgaccagtgtgtgcatagatctggtttggtttgagattaggaaagtagtgttgtaaaatctcgataaatgtgggacagataccgctttattctcaatgttgcggtttgaggagcattaaaataaggaaatattcttttgagactttgacgttactttgtagtagcctttcctgtacgatagcatatacgag

SEQ ID NO: 67315 - DNA, 428 bp, Zea Mays
ctttaaaatcagtaagagtttgccctaggtcaccacatcaaacttgtagacctaacaaaggagaacaactttgcttaagagtgtaagcatagtcgttgagaagaaatgggagataattaagcctaaagtcgggctgtcagtctgataaggtctgaatttcagacaatcagtgcaaccacagaaactttgagcatgaattcgggtatgatcaagccagaatctgcccatagttgctatgacaaagatgtagctgatttgtagctctccaactttgcaacagaacttggtatgagttgctatagaaatttgagagaaaaattgccctgaagtcgcactgtcaggtgcactgatggcagctcgcaatggtacagtagaccaaaggggatcagaccgccagcgcagcagcttcaccgccgacgaccgatttc

SEQ ID NO: 67316 - DNA, 1404 bp, Zea Mays
tcgagacaccgctcgggatacttctaatcccgtgtttggaatttcagaacaaacgaccatcatgtcatcagcagtcggctcggatagcatatcctcagggacgacatcctcaagggcctgatcaaaatccgctatggacaattcttgaaggctgacaagagcagacagagctggagaaggaatatcactatcctctactaccattgtgatgctggttattcttacgaattagtgggacttcttctttctcttcctcgtcctcataaaaaatacggacaatagccggtgcacggtcacacccattgggttcaatttcaacacgtttacatccattgtgattaacttcagcaagattacacccattaggatcaatttcggcacggttacacccattgggatcagcttcagcaaggtcacacccattgggatcaacttcaacatggacaccaccattgggatcaacctcaggaaggacctctgctggcacttcatcacaaactagagcagaaggaccgacatcctggtccaagcatgacagtcgccggagccgcctctttttcttcttcttttcctcaacaggcgcagtcggacggctaacttggcgaggacgcttcgggcgagtaccctcaggcttccgggtctccactgttttattaagctcttgtccaaccgtaatagccatcggttcagcatgggtcgagtcagaagattctccagccagcatactgagtacaacatctatttttgcatcatctggactggtcgacatatcaaaatgaatttgtctctcatcattgggagtatcacaacggggagcaaccagagccgcaatgtcctcgggagagggtcgcactctaagacccagactaccatcactagcaggagggttggacacgaaattgaaaaatggcctatgagatggcagattccaagcaaaataggcaacaagagcaccaacatttggtatcttgcccctcaagatcatgtctagtcggctcaccaaaacgtcagtaggaattttcttgttggtgacccgggtagaatcagtaatactgctgtacaaataagctagatacgccctatctttcaaaggctgaatattcttgaaaatgaagtcagcaaccacagcttcggcagtcagacccctctccttcagcagacagatctcagcaagcagaactctagcctccgtcacctccaaagcagtgggacactcaacccaactcgaagtacgtacatctggttgtctccctgaccgaggggggagggacttgcagtggttttccataataaaccactcaaggcgccaccctttaatgctatccttgagaggaatgtcgaggtattctgtcttcctcccgtggcgcatctccaaacttgcaccaccaacgagctggtgctgcc

SEQ ID NO: 67317 - DNA, 421 bp, Zea Mays
tcggttttggacacttcatcacgtggatttctataattccgtcattctccccaagaagcatcaacctatcctgcatcaacgctatatcaactgggaaggttatgaagccattggggacccagaaatgacacatgcattgagggcctgtgaaaggaaacagatgaagagtatcatgacattccaatatgattggaatgatgaagttattgctcaattctactcaactttgtggataaagctagctgacgaggagagtcattacaactacccttatctgaacttcttcattgaaggtagttggtataaggtgagctatcgtcgatttgctcacattcttggcttttctgacaatgatatctctggcgacaagatcaagattcatgatttccggcagcctactagagatgaagccaaggatctt

SEQ ID NO: 67318 - DNA, 279 bp, Zea Mays
gttgggacacgtggaatacatcatgcacatcagacaagtgatcaggtagctctatttgataggccatctccccaactcgcctaaagattttggagggtccaataaagcgaggggataacgtgcccttaactttgaatctcctcattccacgaagtggtgagaccttgaggtacacatgatcaccctcctcaaactctagtggtcttcttcgattatcagcatagctcttttgcctggtctgtgctaccctcaagttctctaggattgtacagacttgtt

SEQ ID NO: 67319 - DNA, 320 bp, Zea Mays
taagccaaatggtaaaggtcaatactgaatgaaaataaaattgaggtttatgtagcagaactacattggatttcaccctttgacatgcttaccataatctatatatgatctaccagaagtaagaagagtagaaaaatagccatgaaatcccacatcaccacagagcttgaagtgaaattgggcattaatatatcattggtccttggcgccggaagatccataattcttgaccactaagctattggtgatggtaatttgtgatagaaatatgaagatcttatggataccagatgtattctcccttgtcttgatgactcttt

SEQ ID NO: 67320 - DNA, 275 bp, Zea Mays
cccgggggtccttttagaccttcacgccgagctgcttggcaggtgggccgcccagttcgtgggccgtctttgggaggccttcggtccttctttgggtaccctgttctcaggtaaccaacacttccccatttctgaaacatcagaaccttattattactaaggtcatctactacccttgctagttgctaccttacatatgttcctttggtgttcatgcattattatacatttctctttcatcaatgctaagccagtgccttgtgtctaaaaatcta

SEQ ID NO: 67321 - DNA, 309 bp, Zea Mays
gtagacagaggtgtactggcgtgtgtcggggcaaccggaccaatccacgttggtgtatacgatcaactcataagttggagatggctgaagaaggtcgtagtcgagggtgccacagaggtagcgaagaatccgtttggcaacggttaggtggggttcccgtggggtgtgcatgtgaaggcatactatgaatgcacacctgttggaccatgtaggcaatgttggattgggtgaaggtgagatactggagagccctagcgaggtctggaaggccgtcacatcgtagatcagggcgtcatcgtcgttggagac

SEQ ID NO: 67322 - DNA, 336 bp, Zea Mays
ctcgctcggacaccctcgggggctgggtcacggtttgcgctacccacttgagccggatcatctccggcagtaccctcgggggctgggcagtggcttgcgcttcccacccgagccgagtcatccccggcaacatcctcgggggctgggcaagtgtcaacatcgtccttgaggaccaagttctctgcagtagccgcctctaaggctgatggaccctcagttacttccatgggaccaagatgatccaagtcagtctcctgaccctcaagaccgcgttctaaggtcgatgaggcacgagatgacctcaacccagcatcgagaacatcaacacaaacctcc

SEQ ID NO: 67323 - DNA, 545 bp, Zea Mays
atgaaaagcaagtgcttgcaataaaaggaatcttacaactcccaatataacaagcaagcgacctttatattcctcttccatctttttaccccctcgattcatcacgagacacactttgcctctgatttttgtagtcctcataggaccttataaacttattgtgatctatgccattaccacgagctccaatggtttcacatccatatttccatcgacgaaacccaacaaccgtgaaggcatcaacaccataattttcagctattggttgtttaaaaagatagcaataaaaacaaaaggccacatcctaagcaatgctatattccaaccatggattatttacataccattcatcatgaaaagacctattgcgattgcctatcactcttttaggatacttatgaccttttggttggcatggacccttcgcaatatatgctcttctgacagcatccctaatgtttgcatcaatttgatcaattggcatgcgaagacccggatcggctataacttgatcgacattattggtattgctatctcttaaaccc

SEQ ID NO: 67324 - DNA, 555 bp, Zea Mays
tccctgaaaatatctccatccactaactactctaggtgtttctggtgtgtgctaactaaaggaactcattgcctagaagggggtcacttgctacaactccaccttgcctggtataaacatggaggtgtaaaaatcatcccctagctgattcagctgcttggatgcctatttgttgtcccacatgcagaaaaagaagttggccacatctcttgtcttccatgtgctttccccatacgtggtgctcatgcagaaggattgggagacatgttagtgtagttggactcctgttaaaccctagtaaagaccccaacagctccagctctctaaactatttacattggtgagttatggcaccaaactaaactccatgtgtttctgtcgatttccttcccctctcaccgtgccataccattcccatacacctattctaagcccttaagtttttcctagttccttggtctcattgcatcagcttgaacacgagtttgccttggaggtggggaccatacaggccgactgcccacctccccgtggtaagccttcccaagaaggtaa

SEQ ID NO: 67325 - DNA, 419 bp, Zea Mays
tatttgagaggtatagttaataattagttgctctgttagctgacctgttctaaacctctgctaactttagccgctaactattaattttagagatttgaaacaatgccttaattggatgcaaaaggctactcaaccatgctttggaacctgacacgacgactgtattaattagtatttcacttctcttataaatgaatctaaaatgatttcgaacaaaaatattatataaccaattagtacaagttaaatattacttttatgatttgttattcatatttgtagcatagcatatcgattttttgtgcttgtataactacaaaaataattattaattatcttcgcacgagcatagatcgaattgtttctaacatattttttactcttgaaactaaaaattacagattatatccatataacta

SEQ ID NO: 67326 - DNA, 653 bp, Zea Mays
gaacctttaatgaggattttctatatcaagatattattgtcatcatcatcgtcattattattacagatcatacttctatatctacatagcacacttaaaagagtttgttatttccatgtacttgtttgctcataaatcaagttcgaagttccaatgttgttgtattctttaaccatgtttggcttgattttttcgaagtttgtggctgcttgttataaactaagatgtttttcaacaacggtcttccttttaccaatgtaattgctactattatttgtaggaaattgaatatgctttgagatctttcaagagtgggcaaactcctatttttggtcatttctctgaactcgctgttgtttacccagagtcgaatggatggtgcatacaacaatgcagagctgcccaatttcagctcacattcagatcatagccttccagtgttattattaatgatcagtgatttatacaatcttcaggtcaaggcattgataaatggacaattcccagcctatgttcctgttagggctcctttggatgacccaatctctgcagggatcccagcccaatccgcgtgaggaataaggccacgtcttctcttccccacgtatctcgagctcctgtttggatgaggcacgagccaaaatgtcatgggc

SEQ ID NO: 67327 - DNA, 461 bp, Zea Mays
gtatgattaatagggtaatggttaggttttggatatcattttcagaatcatttttgattgtcatattatcaatttgtaggatgtctaggcgcggtaaatatgctaaacaaaggtaagcgttgtattaaattatatttgtgagtctattatatttatgattcttatagatcttatcgaaatttaggaagggtcctttgaccggaactgccttcgacccactgccattgccaactgtgttccggtgcctatgtgtttttgtggtgatccttgcaaggttgacaagtatgtggatcatgacacctatcgacagaggtattggatgtgtgctaactatgcatttgagccaacgattgttcagcgtcggatgaatttaatggtgagaataatcttttaatatgttaacaatttaaagactcgaagtgatgcatgttttctttgcctactaatcattgcatattttg

SEQ ID NO: 67328 - DNA, 1308 bp, Zea Mays
gaaactttagttgagattggcttaagaaacaaaaatatggtgccatttattaggcgagtgttagatttgagtttcagtgtgtttcaatgtagttaccagttagtaaattagattgtggaaaaaatggacaaaagattgttcgtatggcaggacaaaagtgcagttagctatgattgtgaccctaaaaggagttctcaccctaggaataaactattgacagtgttgagcaccatatttggtatctgggcacaatcggatggtccggctctatggtccagacggtccacgcccccgcgatcagattaacacgagcaagagtacttatcccatgtgtagttatcctaacctatccatgggaatctgttggatcttgactaggaacaggtccagaccccctccctataaatataaagggtacaaatgattgagaactctaaacacatttcaatcgaatcaatctatttaccttcatttatcattcatgccttaggagtagacatagcatagccctagtcgtagttttctgtatctcaatcttcaccacgctttgactccatgttggttggaaacgtcttgggtggcatgtcgatcccaagaaaaccctagatccttcctctctggtgaggtccctcccagggcaagatctaggttctagaggaactcatcgcaaaattcatgataactatctttagttatctgctggtgaatgtctttaggtacatcgagttagggtcattaccctagctctttgccctgaaggaagtcctcttcctcgacctgatttcttaatctctaggcaactctacgacgtctgtggtgccctaggtgacctactgatctcggagcaccctaagatctccctctaagggataagatctagattcccacgagaaagaagaaggctttgcgcccttccagaccatccggcccatagtgcatactgtccagagcgacgcagagaacgccagcatattcagaggagcccaaaagcaatcaaaactgtttcgttctctctcttttttgtatgaactcacatcatcctgggcagaaagaaaatatccaagtttcctctcgtcccgtttaaatttgtacgtacggcggtggagagagagagagagagttgcgaccacaacagcagtactaccggccgggctccatgcagacaacgtactggtggggagcttgttgccggggaacaggagcagggccacatcaactggagaggtgaggcggagcgagagcgaaacgagggcaaaaactaggaccagccatcctcgcctgctgggcgctggccacgtgatggtggcc

SEQ ID NO: 67329 - DNA, 402 bp, Zea Mays
gtgttgtgtatagaaatctcagcaagatcgaccatggatttgagactacacacgtgagaagaagggcagatgaaccatggccacgtgttggacacgagctggcactcgagagcacgcccaacctgtgccccctgtcggacaccaccgtgtccaagccacgcccgcacctataaaacctgctttgacccccagtaacactccccgcacatccttgaactcaccccgaatagctagtcaccagaatttcgccattgaacctagctccgccgcccaccgttctccccgacgcacggccaccgtggccagagctcaccgctccaccccagccccaactgagacatccattaaactccttatgccctagaaaagctccccagccattccccgagcttgctaccgcgc

SEQ ID NO: 67330 - DNA, 350 bp, Zea Mays
ataaactaggaaaggggtttacatcggccgatcctttggaagagatcgacataggagatggtaaaactgcaaggccgacttttgtaaacaagaccctggagaccgatccaagaaatgaaatgatcggtctattgaaggaatattcggattgctttgcttggaattacactgagatgtcgggattaagccaagagatcgtagagcatcggctgcccattaagtccgatttcagacttttcaagcagagagctagaacatttcatccagatcttctcccacgaatccaggatgaaatccactagctgctagaagctaattttattagaccttgcagatacacagagtgggtc

SEQ ID NO: 67331 - DNA, 352 bp, Zea Mays
tatttccatgtagagcttgactgggttgagttcacaggctctagaccacgtatgacagttctctgatccattttcctgcaagcttttcactcttatcgaataccttttttctgagtgcttccagtatcattccgttggctctttccacatggccattggctcttgggtgtgccactgatgcgtacttgatctggatgctcctttgctcgcagaaatcaaagaactcagagctggtgaagttggatcccaggtcagtgacgatgctattcggtatcccgaacctgaatattatatcctggataaactccactgcttttgcttaggtcaaagaggcaatcggcttgtactctat

SEQ ID NO: 67332 - DNA, 593 bp, Zea Mays
ttgcccatggatgatgaggtatgtgattttatggcatgctcattctaccactagtttccccatattgtgtattaattctttctggcctcctggggatcgaaaaaggcttattcacatataagggtggagccatactaaggtcttgatgagtcgtagggaggggaaagtgctgctatggtagatgaaaggattgcgggtaataatccacatcctgttctacgtactcatctatggatgatctggtgtgaaatgatgaacgtccaccgggatactcggacgttccgcttgtgtagccagacaatatgagcatattagttaagccttgcaaagagtacaacggtcctggtacaattctatgtggtctcttgtaaaggacgtgaccatcgatcagggacacgaacagtccaagcttaggcccatatagtctggtcgtggacaggatcataggtttatcccaaattggtggaggaggttgtggttgcttggtgtttaaattcatgggcataccataaggtggttgggtttgtgaatgcacatttataaccgatgaaatatgtgttgtagccttagcatcaatctcatgtgatggaaaa

SEQ ID NO: 67333 - DNA, 1050 bp, Zea Mays
ggggcccgctggtcagccatccttacctccataacaaaccgggcgcgtgccatggcgaggatcgcgcaacggccgccgagctcgggctgagcctaacaaccccaaaccctggatcttccccagtcggtcgcataaaacccatcctcgggctcgtctgagcaattcggcctgcgcatttttgggagccgccattacagtgaaaaggaggaaagcggagggagagggtgtcgaccgtgccaccgccgtagactcgccgttggccagcctcccagtcgcggtggtctgtccagggtgtatcagcggactccgccgcgtgtgctggaccaacccctgggtcggttgcgtcttcccatcgacgacaattgctcaccggagctgcgactgccgccaagccacatctccgcaggcatcgagttctctgcgtcgccggacctaggtaagacttccccgaatctcctccttaccttcatcaaatgtagaaccgggtgattgagtcccctgttgcgctggagcaagcttattgctcgtcggcgtgattagaaccaccgttgtccgccatcctcggtagatagtgggttttaatgatcttacacacgaattgactcactagaacgattcgccgcgttgcgggcttggcgtagggcttaggaattaaattttggtgcactggcgaggcagaacggtcatctccggcgatgcgccgccgcgcagttgcctcaccaccacgctcggccactggaattggggaagaaaggtgactgtcgcccgaccgttggatgcccaacggatggccaagattaaatgatgcgcataccctttggtgagatcgtatctgggccgtcggttgtatggcgggcgatgtagattagatctggggattttaaatcgtggccgttgggtggatcggatggccagaattgattgcggggttcaggggacgtcagatctaatccgggccctcggttctggatctagcggctcacatacaaccgtaccccttcgcgggtacattttgctaaagaaaccctagggtattttataatgaacccg

SEQ ID NO: 67334 - DNA, 982 bp, Zea Mays
gcatttattgctgcacaaagagcacaacaccacttagagcatttttacactctgactggtatacttttgaaggtcctgtatttctcctctcttttgcatttttgcattttcttagggggagttctcttgtcaaggggaggatttgtttctactcttgtttgtgcttgatggtccatttgtcaacaaggggtagactgagattttcggtcccctaacaagagggagagatttgtgactttcaggctcccatcaaagggggagagaatttgagatttgatgttttcagctttttaagcctggagtcctttcaaggggggttgtctggtgctttaggagaggctttgagcatgttgagtttccttcgagggggagagtttctaagctttggaggtttcgctagttgtcttgagccatttgcctctttctggaagaacaacctttgatttcagcttttatgttgattttgtgtctgctgggcagtggtgttgagctttgtttttgcctcttcttgatgactagcattttctgcttcggcgtgttgagtcgttgcccatttctttggggaccaagctttgcttgctctaaatgacctatcttgcttttggtcgttcgagtgagtttatcttcgtattccttcattctgcttatatatgttcatatggtggtgttgacaatgcactcatcaaggggggattgcgaatacaaggttgacttgtcccttgtggtttgggtttatgatgagagattgttaatggtagcgcctcgggtcgagtcatggactgaacggggcgtgagttatgtgtgtgcaaccatgtcggttggcttgtggtgtgtatgtgtggagcacaggtacaacgatctaagacgaaggtaaaggtcatgcaggttcgtgtcgatggaccgggagcggagaagaacgagcgttgggacttaactgagggaccggagtcaccagggtgactagccatgttagctgacacct

SEQ ID NO: 67335 - DNA, 439 bp, Zea Mays
ttctgatgtgtccttgatgctccccgaccccgccaatcggactaggcccccttagatcactgggaacgcgttcgattgtccgtggtgcccgctgccaccgtggacaaagcatgttagaactccgttagagaaattagttgaggggaaacacttgttagggattgaattaggtctaagccgaagtagagcaccggtcgttgcgtgaatcagccggtgtaggctcgccggagctcggttctccgccgctgcccatcgtggactctcccttgtgaagaattagaacttcgagggtcttagtgcaaacgtcagtgaaacaaacaaatagtgctctgggttatttgctgcttattcaaaatgctagggtcttctgtgtaaaaccgctaccgcgggcgcactttcaccagtgaatgggccgactcgggccagattcagcctaatc

SEQ ID NO: 67336 - DNA, 419 bp, Zea Mays
tcgccctctctctcgctctgcacgcacgcccgtgaagctcggtggtccgtcgtcattcatcatggttccgtgctcgttctgccgtcgccgtcgaaccctcggcgtgtctattgcctcagtgagctttgccccgtcacctgcgaaccaggacacccctcggtttgctcccttcccctctgtttctctcagtccatgctcaccagtcctctctttgcactgccgcagctccgccgcagtcgacccgtgacctcgccgtgccccggatgccgttcgtgagtccctgagccttctctcatggtaaccaatctatccccgtgccaagtttcccctagaatgcccttggttatgcgctattgctcaccggagtaacctccggtccgcctgaggttccccctccgtcgtctgcccgtctcagcccc

SEQ ID NO: 67337 - DNA, 371 bp, Zea Mays
gcataacaaacgtggagcacgccatgaatacgatagggaaataggcgtaccgtggggatgaggaggtcgacgccgatgatgtcactgcgccatcggacgcgggcgggacacgatccgcgcagttgaacagacaatcaccggggttcctctacgcacgtaggccaccaacggcttgttgcccatggattgtcctcaaccacccctcggcacaagaacgctgcgacacggtgacggcggcggtcatggaatacctctccccctctcacactggcgttggtctgctacacgattcttgggtggttgcaagcagagagagaggcggcgctctaggccctatatagccccgagcgagccggatcccggaagccgat

SEQ ID NO: 67338 - DNA, 1572 bp, Zea Mays
ccgggccctggtgtcttttccactacatccccaccatctttttctaggaattgggaatgctagatgacctcttgggtatacgtaattgcctatcggagcagcttctggagatgctggcaggggaggcagaggtggaccggtcctaggtcctagtgggaggacgtccctcaaatggatgaaggttgggagccagtcctagtgaggatcaaggagcttgttagggccagcctatcgacgatcaaccttctagcccgtttcctggctcgaaggattgccctgcttcaaagacacataaaagttatgtgtgagtacgacgaggtctaggatgaaatacgggtcgggctaggacccgagtggagtttccacgtcactacccatagcaccctagttcgtctttgtgtgggtcctatagcgacaatatgctcacgcttcccgtaggcattcatgccctctttgagagcaatggggtgtacgggcgagcagcaacaacaatgcctgagtgcaatacaagtggcctcgtggccccaacaagaaggatcttgttcaatggttgttgaagacgtggaggacaaggccgagacactaaccgagggtaggtggcccctggtgtgacgtgcacctgcgagagtaagtggcccttgaagtcgacgcacccctacgaggccaggaggccccaactaggagatatcccagaaggggaagaggtagcacgaacgaggccgattcaagtcgttctcgtaagagggtgacatagcttggggacccctcccccacaagcatcaaaggcaagatccagagatccttttctcgggtacctggcacctattcaagtaagtaggcttctttatttcttctctttccctttttacatattcttatgacttttttagacctattgcaacatcagcccagtgtggggcactcagaccctgaggtcggcccatggcccgactcaaatggagtttggggcatcatttcctcgcgatggcgagcatgcgccaccgcagggacatgctgatgtgccactgtctttgggcaccgcaaggacagatccccctagggtcttagatgtgggggtccatgtcctagggccatactgcccctaatggagtcgctgcatatttctgccttgagacatgttagatttagccaacctaagtcctcgacttctccggaggacccttggtccctagaggacatggttcccaattggcgtcggagtataaggtcgggaaccaaagggtcccaagcaactaagcatagcatgtgttttggggttggtctgcaccaaggacccatcttactgcctcgagacgcgagaccccgagagaccctgagggcctataacacctagtgccccaagggcttatactgtcggatgccccggggcgcgtggggcccaaaggcttataccgtcaggtgcctcagggtgtcagaggccctgaaagcttatattgttaggttcttggggtgccaggaaatcaagagcttatgctatcagatgtctcgggtgccaggaccctagcggcttataccgtcaagtgccctagggcacgagaggctccaaaggct

SEQ ID NO: 67339 - DNA, 349 bp, Zea Mays
tattatctgaaagactgcaaggtgggaccatggagcagcaagatggaactatcacaagagcacgactaaggggggtagtttcttcttcataacttgtcgtgcatgtgtgcagactaatagtccgggttcatgggggcagacccaaccgggttatcatacacgtatgcgtcatttagttacaaaaaaggaaacagactcgaccccttagtcttgctctatggatagaacttacagagatatttggcatcggggtaaggtactcctccaatcgtagctagatggttgcccctgggtcggtgcactcccgttaccttgaagggtccttcccagctgggggagagttgcggag

SEQ ID NO: 67340 - DNA, 298 bp, Zea Mays
aagaaggtaaaggttttgtgtactgataatggcatggaattttgttcagatgcttttaagtatttctgcagatagtaaggtattatgaggcaccattaccattccatatactccacagcagaatggagtagcagaaaggatgaacatgactatcatctctaagactcgttgcatgttgttcaatgttggtacggataaacatttttgggttgaagcagtttcataacatgttatttaattaacggatcacctttcattgctctcaataagaccagttaaaggttttcgtttgcactgc

SEQ ID NO: 67341 - DNA, 384 bp, Zea Mays
gattgctctgctcccatggaagtggttgaaggtccttcagccttagaggtggctgttacagagagctcggccttcaaggatggcgctagcgcttacccagcctccaagggtgttgccggagatgatccggctcggatgggtagcgcgagctatgacccagcccccgagggtgtccaagttggttctccctctcatacttccatggatgttcacgtagggtcttctcctccgcattctggttgcgtggcaacagctcaagcttcgggtcagggagtcgctttagaggccagcgctcctgatgacagagttttgatttctgctgatgacactgacttggtccccactgatgtattgcgggttgttccggttggtgatccttcatcg

SEQ ID NO: 67342 - DNA, 1273 bp, Zea Mays
gacagactccaaagtagtcgccggccaggttgagaaggagtactctacaaaggaccctgcgctcatgcagtatctcacagctgtccgtagcctcgagagacaattcaagggtttcaccctacagcatgtcgaccgcgccaagaacgaagaggctgacgcattggctaaggcagcggccaagggcgaggccttgccctccgatgtgttctaccacgtcattggcacactagctgtccataaccccgaaggcctgcaaataacttaggacaccgaaggccaccacatcattaacctcatcatggctgaagactggcgggcaccaataacacagtacctgcaaggccactaccatccaagcgatcgcaatgaggccaaacgactaaagcatagaagcagggacttcgcattagtcgagggtcagctgtacaaaaaaggggatcagctagcccatgttgaagtgcataactgaaaccgaaggcatgacaatcctccgcgaagttcacaacggaacctgtggctctcactcaggacccagggctctcgctgccaaagtgattcgtcagggattttattggcccgcaataatctgcaccgccaatcgagtcacaaggtcatgcaaagcatgccaaaagttctcccctcgctcaggcagcccctcacaattcaccaaactcatcgcccatacatggccacttcaatgctgggggctagacatggttggaccactgcctacagctcaagggaacctcaagttcaccttcgtcgctgtcgaatatttcacaaagtggattgaggccatggcagtatccataataacatcgaagaccgcccaaaaattcttctggcaaaacattatctgccgcttcggagtctcgtccgaactcatagtcgacaacgacaaacagttcgacaaccaagacttcagggatttctgcttttccatcggcaccaagcctgtcttcgcctcggtgtaccacccacaatccaacagtgttgttgagcgtgccaatggcaagatttttagtgccatcaagaaaaggcttcttgacgacaaaaagggcaaatggaccgaccaattactcgaagtggtatgggccctgaacacgacagagtgtcgggcaaccgggttcacacctttctgcctattgtatggatctgaagccatgacaccgcaagagttaaagcatgggcccctcgaacaaacaaatcagcagtccccgatgtcgacgaaccaacttccaaagatctcatcgacggagaccgcgtcctcgcc

SEQ ID NO: 67343 - DNA, 1876 bp, Zea Mays
gttttgttctcagctccacgaacttgattatgcccaacgacttggtcagtatatcggcaagttgatcatcaatccccacatgatctacacttaccataccttgttcgatgcaatctcgaatgtaatggtaacgagtatcaatgtgcttgcttctatcgtgaaacaccggattcttgctcagttctattgctgattgattgtcaataaataaactgaacttctgcatattttcctttaatatatctgctagtagcatactcagccacactccttgacatacacccagagcagcagctacatattctgcctcgcaagacgatagagcaactactctttgcttctgcgacgaccaggttattggattcagacccagaaagaacaagatacctgaggtactctttctatgcacaagatcacctgaacaatcactgtcggtgtaccccagcagtgacagaccaactccaccacctctcttatatttgactccaacattgactgttccaacaacatacctgataatccttttcactgcaccctagtgatctttgtttggagcttccataaatctactaacaaggccaatcgagaatgtcaaatctggtcttgtgttcactaaatacctcagactaccaataatgcttctgtatctagtctgttcaaaatcagttcctttttgagcagttgtcagttttactcgctgttccataggtgtatctgtaggattgcaccctgtcattcgacattgatccacaatctttgctgcataggaactctgacagatagttatttcattcttcgactgtctgacctccatacctaggtagtagctgagcaagcccatatcactcatactgaaagtatgcatcatttgatgtttgaagtgtgtgatgtcagacactgatggtccacaaatgatgagatcatcaacataaactcctaccaccagcaaagaaaactctgaccccttcctatagacagcatgttccaccttgcacttctcaaacccgagggaaataagctctgaatcaagtcgagcattccaagcccttggtgcttgtttcaaaccatatagagccttattcagtttcagaacctttctaacttttgtaggatcttggaaacctggtggttgtaagacatatacttcttgcagattatcattcaaaaaggctgatttcacatccatatggtgcacctgccagttttcttatgctgctaatgctaataacactctgacagtctctagtctagctactggtgcgaaaacttcatcatagtctacaccttccttctgagcataaccttttgcaacaagcctggccttgtgtttaacaacatttcctactgcatctttcttaagtttgaaaacccactacaaacctatagccttttgacctcttggtaaatcagaccaaaaccaagtgttattggattctatagcttgcagttcagcttgcatagcttctctccactcctgactcttcaaggcattttcaatggtcactggttcatctacagctagcattaaaacaccactgtattcatagtcaagaatttcttcagtgttttcaaacaagtcagtcaaggtcctatattttacaggaaccatgcctgagttttctgaactcgatgattgtggaatgttgtttgcaccaaatattggacctgtattctgtccttgtgaggttgaggctacaaatggagtctgtgagtttaaaggtgtcacaggtgattgtggatgtggtgatagtggaagtgatccaccacccccagaattttcactcacatcacctgtacccgcaggaatacccatttgctgaccaggtacagtaaactgaaatggtgtgattgaaatatttgtgtctattccagtcga

SEQ ID NO: 67344 - DNA, 632 bp, Zea Mays
gtttctgtaaaagataaattaccatgcttaataaaagacagagacacctattgcttaagatttcagaattgttccacttctgctatactctagaagaaaatatgatgcacaaggtatcttaagaaaaacatcatgcttcgagctcataaatgatgcatattctgattcgtgtatgaggcaaagaaatatcagagttgtaagtagttatttagatttcttactgtcaactcataagtgctagcatgtcagattattatgacagaagtaactgcctatcttgtgaaacagaaactttagtgaaaataacataaaggggaaaaccttgtcctgttcagaagttgtggttgaattccatggtagccgaaagaataaacaaaacctgcaaagaaaaataggctatccaattatcaacatggtaaacttatttagataatgcagtaaaggtaaatggttttgtataggcactaaaaaggtaaatggttttgtataggctatccaattatcaaagctcacgtacaatactaaaatgctactattagtgaacagacatgttacttctagcaataagcaatgtaaattgttcagtatactacatgtggcaggaattaggaaatttagattttacatttagc

SEQ ID NO: 67345 - DNA, 957 bp, Zea Mays
cgaccactccaccctcaaaggagatggagggagcacggagcatcacaccaagctccttcttctcggacatcctcttcattcagagaagaatggaggatgcacctgtttccgacgacgagcccaccataccgggggaggagccccccaacgtaacacacgtcgacgctagaataggcgtcgtaacatacggcgtcaccacgaagccagggaacggggtccagcataattcgtctctcgggatgaagcttctgaagtaggggaaacccctgatgaaagagcgctccgagaacgccgcaactctcgtcgccgtgatcgtcgccacacacaggaacgcgaatgggagtaagctgagcaggacgccaggctctgacgcgagaacccacttctccctcggaacctattccctgactttgctcgagcattgaatacgtcgagtgaagtcgagggggtcctggcttagatcgcgaacggcctaccatgcacccctgacacggagggctatcggtaggtcctcacccaggcggcgaaccatcttcttcccctcgctcacccgccaaacgatctgcgtcacaccatcaaccgtcggcgagacacgcagagtaatatcaacgtttcacgtgatcaccggcatgaggaagagatgaggcagcgagatgggtacgaccgagatcatggtgcaccggtgcgtagccatgccaccaggaccaagtcggcatcagcttccaccaacagtccagcaccaggtcggtcgaggcaacacgacgcacgacgtcactcgcctcctcgggatcgtcgtcatgatcatcaccgggaggacggaggacatgtagagtctctgcccttaccctaggctccgagcgatctaatggtcaccaaacttcaaagtctccaacgtcgacaagtatgaacccaagcaagacccgggcggctggctggccatctatacgaccgtcgctc

SEQ ID NO: 67346 - DNA, 531 bp, Zea Mays
gcggaggcgagcagacactggacgacatcctcgatgcctagtgctcgtatcacaaggatatgcgccacaccttgcggaactgcagagacttcaaacattccgtcaggaatggccgacccttccaacctctaccacctcccccaccgcgaggagggcccggtgaaccttaacgacctcaacaacaggaagggggagaaggtggagcattcccgcgcgtcgacggagaggtcaacgtcatattcggaggacatgggtcgcaagagaacaaaaggcaacagaagctcagcgaccgacagatactgatggcaaccaccagtgcccctaccccttatcggtggtcagaacacccaatcacctttacccgggcggatcagtgactcaacttcgatcatccaagcaagtacccgctccttgtcgatctagtgatccgagagagcagggtaaagaaagtattagtggacgggggaagcagcatcaacgtcaccttcccccggacactcttgggcttgggagttgcactcaaagagctcc

SEQ ID NO: 67347 - DNA, 338 bp, Zea Mays
ctatccgcgcagaagtcgcctaagggtgcagccggactaagcacaacaagtgcgaaaaaaatccaatgtctatcgcgaagactatccgcgcagaagtcgcctaagggtgcagccggactaagcacaacaagtgcgagaaaacccgaagtctatcgcaaagactccgcgcagaagccgcctaagggcgcagccgaaccagtacaacaaaagcagaaacgacagcatcaaaccatctgcgctaagaccgactatattcacaccagcatagcaaaaccaaaccatacaaagtacacaacgctctcgcaggcacaggcacgcaagggcacacaacttcatct

SEQ ID NO: 67348 - DNA, 511 bp, Zea Mays
ggtttagatatgtttgggccgcctgagcctaatattctagtcctctgtatgcttgatggttagacacaagtgtgggtagagttcaaatgctcaaatgatgtctgagctagtgagtgaggagaccctaactgacctttgcgatgtctactcctgagccgagagcgagagctctttccatgtgctagcttgtagctgatgaggaagtgaagtccaaaaagctataccgaagccaaggtgaagttaagcgaagccttttctatatcgctctacccctcctttttatagcaaaaaagagagatacatgtatgtatgcacaacagatcttgtctagcagaggtccaactactgttatcttattgtaattgttgtaccatacacagcacacttttgatgtgtcatattggtgagtatggatcaacacagtggcatgtataggtgtgtaaccccgtcgagtatgtagttggtagttgctagaggcgcacatactgcatagtggtcacacatagacctg

SEQ ID NO: 67349 - DNA, 742 bp, Zea Mays
gagtgcctcattggttgtgtcataggtgaaggcacttactacgttggtgttaatggtgtcgggaagttcattccttttatgcaaaaacctctgctcgcatagctgctcaacctcctcttgctcccggcgctgattgttgagaaggtattgggcgtcgcgaatctcactgatacggttcttcacggggattcaatcctgcgcagattgggagggttgtgcccccctcctccaagatgaggtcgtgcacttgcagtaattatctgcgtcggtgggattctaccgatcgatcttggcctgttgtaccgcagccttctccaccaaattgcggaggtttcataacattgcctttgcctccggttcgtcaggcttagggatggatcgaagcatcatggctgctaatgccatgtttctgcccggggttgaggaagtattgtaccctgtcactgctctcggcgagctggttgtaaatcttttttcccaaggctattcggcctcgagatgtttttgctcaatgtcgccataaactcgatcgagcttacagacgagagcgtcaagctcttcttgctgctctcgtaggatggcctcacgcgcctggcattggcgctgatactcctcatcctggatgggggactcattgtcccccctgccgttatcgtttcatggcggtgttgccacaaagcaggcccttctcagcgcttcatcggcgtcagagttgaccacggtcgagccgtggctcgaattg

SEQ ID NO: 67350 - DNA, 335 bp, Zea Mays
actcatggtatccatttcagccccaagtcggcatggtgaaatactgaaatggaattggtctttggtgcacgtgttgcagctgtgtaatttcttgttatgtccaccatttaagagcctgatatacagccttagcataagaaaattgcttggttcttgagtacatggacaccatctgccacagtgactagtcgagcacttcatggctgctgttgcttggacttcatctggcctcttatgccatgataagaaaatcattgggtcactttccgcaattgacatgaaggtagtgttggtcataaatatcaactggtataccatctagtctgggacatata

SEQ ID NO: 67351 - DNA, 773 bp, Zea Mays
aggatcttcaaccacagactgcaccgcgagtgatggctctctgctgactccagaggttccgtgatttgtactgttccagccagccatttgttgccatcatatgaccgcgaacatgcttacatgtggagataagtggcatgcacgcgcgccggcacatcttcatgcacgccggtccttcctgatagaaacaacactgccccgctccgcgtcacattagcttagtacccagccttcccgccgagcaatatgcatcagacatcctcgaacatgacacggtgtgtcgtttcgctccttaaactaaacagatggtgctggaacttaccggtctatctaaaaccgtccaaaatcgggtttgctcaggccagatatcgacgtgttgtgctacattagagccactcactcactcacttgggtctttaaacttggcatattgtgtccctttgatcctccaactttaattagtgcgcattcaaacgtggcacgccgcgtctgcatccggtttgagcaaaccaggtttttcacgggccgaccaagctacatggcatgttttcctggtttcctgagttcgaggacgtgcccaattgatacacagcgtgccaagttcaaggaccgctgctgcattttacttcttcccgccatatgattgtcgtgttcatgcatgcttgcaatctattacaagttaatcgggtgtcgtccggtttgagttctgctatttctgtgtttcagatgctcgcacaatttgttttgcaacgaaaaggctcttgtacctcacc

SEQ ID NO: 67352 - DNA, 291 bp, Zea Mays
atataaaaagatgagagtatgcaagatttcaaggagatgagcataccaataccaagagacaagaaattgtcgaaagatagcgacttaacaacagaataggaaagggtctcaaaagacaggttggtcatgggcatataaactaaaatgtttaagtagacattagaaatttggaggaaagtatttgaaacaagagtatcaaagaattcagagatacgagcatgtcaataccaaaggactagagttcgctagatggtagcaatttaatgacgaaagaggaaagaatcccaaaaa

SEQ ID NO: 67353 - DNA, 578 bp, Zea Mays
cgcagatcaacatctctgccgtcaaaggttagtggcacatgtgaccactttgtttgcacgactgggctgatgagggcgacgtggttgacgcttcggtagtgatccctcttttgccgcttcgtttcgaagtcaatgctggaccccttggtgatcatgtgaatgactccacaatacggctgatcggtgaagtcttcttgttttggtgtttgggggtgattttggtggtgtgggttttggttgatgcggaggcaggagtggtggtggtacgacctgtacctcctggtggtgctgatatgagtggttgggtagatgctgggcgtggccgtggttgtatggttgtgggtggtggtgttgatatgtgtgcgcgacaactctttggttgtcgactggtggtgcccgagacatcctgtccctggtggcctttgtttccgggcaatccctcgttgggtgcgcgcagtctttgccatgaaacaggtagtaaaatctgcgctgttgctgcgcccgtccccagcctcggccacgcgtgccattgccgcggccttggggggatagtcttgacggcgagcggcctcgccggc

SEQ ID NO: 67354 - DNA, 813 bp, Zea Mays
cttggaccgagagcaccataatcagaaaacacaagggcgactacgcaaaagtttcccagactcagcctacctcggagatgtactgcgtgttgattcactagaaaccgaggggctttttattaaaacggcacagtgaaggggtatcgggtaaccctcgctgttggatctagctcaacgcttaggattagattcctacatctaaggatcagcgcgccacgatagccgcaggatcatagatctacggtccgatctcaatgcaacccatcagcagcgcctgccctaatcacgatcctctatgcctgatccgacggtccgaagacctcacactcgtttaaaccccaaacatggctacgccgcccctccacgcgacggacctcgccggagacatccaattcccgaccctcgacgccctaaaacccgatccaaacacttctacacgatgctaggtggaaagcgaaacgtggggagggagtagtaccggcttagtgtggtgtggagctccctacgcacggtgagggtaacatgacggcggttgtcccaacgacggtgaggaattgcctacacccagcatgattccatggcttggaggattcacgcccacactccccaagtcctggtgaagcaccccgagcagcaatcagggtctaggcgatggtgtagtcaatttgccctcacgactgctcccttctctccctccgagctcggcgatgggattcggggtgttgcgagattgtgcgcaaaggcgggtctagagctgtggactcttgattcatatagcccgaggcctccgatggtggttacgcgaggtttgtt

SEQ ID NO: 67355 - DNA, 336 bp, Zea Mays
tgccggtggtcaaaactttaagagatggcagactagggttaaattctggatcatgttgttgaggatctggtgggtgatttccctagtacttcttctcactgaggagcgaaaccgtaacttcgagtcgaacatctcttcctacgttggttgtatcttgacactgttgtcagatcaactatatgacatacacatgcaccacaaatgtggatattgctaatgctcaaaattttgggtatgtccctcaaattctcttagcatgtcaatcaccgattggaaccaatgtacatgtttgttcttatctaaatttattttcttcttatcaggctaccgacagta

SEQ ID NO: 67356 - DNA, 1097 bp, Zea Mays
  misc_feature (843)..(942): n is a, c, g, or t
ggcaatttgagctagaatggacttcttttccattttcaaggtcttagtgctacacgtgtgaaaaccacgacagcccattagttatatgggcctctatggactctaaacctagcctgctttacctctactttctcctactctactttttttaacaaaatccaatgcagacacaaaggtactaaggtagcttggacgttttacactagatcgttctaaaaacttttttattatagcagagtagaatttgaaataggagatagaataggtaagctgctgggagacaagcttatgctaaaaaataagacagagctagcagtacacgcatgggaacatgtttggttaaggagcttctatttaaaaaaaacggaagatgaaccaatttggattttgcttttctatcgttacttcctttttagtacaaatttgaaaacaacttggaaccctccttttactgcttatccaagttccatatattaataagactttgatgtgttttctattcctagtcatgatccttatgatgttgttgacaatctatttctatattgctacgacacacttttctttatagcatagggagtagaaaattgcatccctatctagacggtggatcccatctaatacacgtccaactatttccatcattataggtaaaaatgaatttgttttttctgtttttaaatgatgtatattttgattaacgtaagttgtttaaaaaaatatagtgttttttttgtttttgaatgtaataaatttctacttttctggtattttgattttttttatatatttcaaaaaatgttttttatgtgcaatccataaaaaaattccatatgaatattnnnnnnnnnnnnnnnnnnnnnnnnnnnnnnnnnnnnnnnnnnnnnnnnnnnnnnnnnnnnnnnnnnnnnnnnnnnnnnnnnnnnnnnnnnnnnnnnnnnntaaaaaataagacagagctagcagtacacgcatgacgcatgggaacatgtttggttaaggagcttctatttaaaaaaacggaagatgaaccaatttggattttgcttttctatcgttacttcctttttagtacaaatttgaaaacaacttggaac

SEQ ID NO: 67357 - DNA, 615 bp, Zea Mays
gcaaaatcgaggtcttcctcagaagactatccgtgcaaaagtcgcctaagggcgcagccggactagcacaataagcgcgcaaaatcgacgtctctctcaaaatactatccgtgcaaagaccaactacaggtgcagccggaccgacataaaaaacgcgctagacctagtgcacaagtcccctacgggcacgatcggatcagcgaaggcacacagcctcatcatacaaattatagttacatacgtacagcgagggcatcacacctcacattgcttcaaccttcgggacgatacccatctccctatagttaaacagcattatcctcagctcctcaccctcaaaaagacttcgcaactccccctcacctacactcgcaccaactggcgaggacaacaattcccgcttgccagccctgtccacacgaagacgaccaccctccacctcactcactctacgcttcgccaccgcccttcgtcacctacgcccagcactcggaccgggaataacttcagtatccatcagacgcggagaagcctccgcctcagccacatccaacgccgcgaaataatacaaatcctcatccgaagactcctccgtccacaccaccgaactcccag

SEQ ID NO: 67358 - DNA, 708 bp, Zea Mays
ttgtaatattctctaaaacttttattataatgactgtctcagagtcgatttccaaaaccgataaaacaatgcaactcttttgctgtaaaactgacaggatagaaacaatggtcagctaaaattcagaatctacaaactcctgctgtacacaatagaaaattgcaaacgagtacgcgccagaaaggttttgaaattgtccactacttttgtaataaagttgctcccaaattcctcatttatacccttcaaatctgcaccaccgatagttaaactcagtctgaaatactacacttccgaaattcgacccatattcagacatacacttcttccaatctatttagccaaaaattacaagtaagtaccctgacatcaaatcattgatggcgagcatcaaggtcggcatcgaattggtcgaggtggccgttgccaaactgcctaggccatgggatcctcctccaccggtgccaccacaccttcaacctgacatcctcggcgagtttaggtcgctccccacgcgccctctacctaatttcggaccgacgacctagtatgacatgtcatcgactctcatcgtcgaaaggttggattcggacgcatttatgcatccacccacctcccgcacaacggtacgccgcagttcagttccccacaatccactcaccttcttggatctcccacaatggcacgatgctatattgtatcggtatg

SEQ ID NO: 67359 - DNA, 641 bp, Zea Mays
caaaagacgcctaagggcgatagtttaaaataaaatctcggcaaagacacctaagggtgtgaagacgccgaagggtgcaataagatgaaaatagtcgcgacacacaccagtcgtgcgaagacaccccgagcgcaaacacgctaaagggcaccgaaaaaccaaaaaccagatccacctgaaggctagcaccagtccccaatcgataaaggggggagaggacaacatttcactcttatttttgccgatcggagacaaccgccagcacaacttgcacaagcagaaaatatacacaatacaaacttactatagttagttttgacaaagtcattattacatatatgcaaaacaatatgaaatcaaggactcgggggctcctccttcggtataaaatcagcctccctataattgcgcaacatgatctcaagctccctgtaccagcggggggcctccggttgccccgacgcatccaccgtagccacatccttcgcaacaaaaaagtcaagtcttcattagtgattcctcgtccattttcgcgaaaacacctaagtcagcatcatcaattgaatgtgaatcgaaaaaattgtcaccactatccgagccagacggactctagcaagctaaaggtgtaacacagagaacag

SEQ ID NO: 67360 - DNA, 726 bp, Zea Mays
cgagacgatcgataggtcaaacggcgtgaaaacgacatttgaacgataaatagtgccataggaggtttggaattcgaattgaggcacgaaacgacatggaattgagccgatacttcacgaataggtttatataggtgaatatgagtgacgtgtgtgcttagtttgaatttaggcgaagaaaacgagatttgggcactcggctcggaaacgattgctcgaaacggagaattgagtgaaattgaagcctggaaactcggattggcgtgaaatttggcaagtatgttgctggaagtgttgtgaaggtgcctgaaaaatttgggttcaattggagcatttttggctggtttgggcatttcaccgagcacgtggcgtgcggggaattaggttttcggtgaaatgggcatttgaggtgtgaaaaccctcccgaaggagctaataacctgcaggagtgttcaaggcacacataggaacacattccaccatttggagtcactgggattcacaggatttgaagaaattcacaaacggtggaaatgggagcctctgctcaccagaacagagagtgagagagaactgagggagagatggatgggctgctcaccgagagggagaggacaagcccaggcggagcacgatcgccggagtacggtggtcgccggagagggaaggtcgccggcgggggaaagggaatcgccagagagacagagagagagcgctggaaatgag

SEQ ID NO: 67361 - DNA, 311 bp, Zea Mays
caaagaacctgcgcttacgcagaggattaaagagccggctgtaaagctgaagatatcctcagtcaaattagctgagccgaaggctgataatattgaagagataggggtcgaaggaacaaagatattagaagttacgagcccttcgacagatgtgacagtgccgaaggcacaaaaaggtcttacaacgacccctaagaggaaaagaatggtcaacgtactagatgcgctggagacaataaagacaagctctactccaaggaaaattgccgaagctccaaagacgcagactgagacaaaactaaccaaagccg

SEQ ID NO: 67362 - DNA, 852 bp, Zea Mays
acgcaaatggccatgttacaggtatggtctgcagctgttgtgccggtaaatgttgttgcgttgacaagaactggcaagcttcacatctctggactaactcagcggcaacactctttgctattggccaatagaaaccagacttgaaaactttcccaaccagagttctggatgctgcatgtattccacattgtccggcgtggatttcatccaatagctgcttcccagtagttgaggaaatacacttcatgaggactcctgtcgcaccccttctgtacagtgcaccccctatgagggtgtagtgggccgactgtctcgcgatgcattctgctgcagccttatcatccggttcttcttcattctttatgtacctgatgataggctctctccagtcattagggtccgattctggttggctcaaggtgttgcattttttcgcctgatctgagagaatacttgggcgtgatacttcctggagactccgggtgggacctgggcccgactggatcctagctttgacaacgcgtctgctgctatgttgcagtctctttccatgtgatggaattccaacccttcaaacttgtcttctaattttcagacggttgtacagtacttgcccatagaatcaaccgagcaatcccaatctttatttatctagcttatgaccactagtgaatctccgtataccatcaacctcttaacgcccagtgatatggcgatgttcaacccatggatcagtgcctcgtattttgctgcattatttgatgctgggaataatagctgaaacgcgtacttgagttgttcacctccaggggcaatgaagaggatccctgcgcctgctccctacagcttcag

SEQ ID NO: 67363 - DNA, 604 bp, Zea Mays
gcccaagtgaaaatagcattttgggtatccaaggaccggttggttggtagtaaccatataatcgttatcctacctcgaacaaggtgaccagacatgaacgcccatgaacccaaccattatcgttttctggaaacgtcggcagtccggccctagttctgtgcattttgtctcccccactgcagaacccagccattaccattttctggaaaagaaagaaaaatgtcgtcgttatgcgtcatgatttgcaatccctggccaccttctgttgttatggtatgggcacatgagcatcaatcggccatcgcccacctcgacgtcgatccatagtaaaagggggccctacgcttgataatttcatgtcgtctctgagtcagatctatctcccttggaggagctcatcctgtcatctgaccccgactccctttcggctgctgtgtggatcactgcaaccgtgcagttgccgtgctgctgaaagtgatatgcacatatatacggtccttgtttaatgggcatctttggtagggctgatgatatatggcatggtgctcggctttacctctgcctgattgccttcatctcggccaggcaggccattgctgtcgcg

SEQ ID NO: 67364 - DNA, 432 bp, Zea Mays
taaatttatactaaaaaatattttctaaactattttcctggttttaccaactatctggactgggcatatatttctgggaagtgcagggggtcaagcgcaaaagaaacaaagactcagtcgctgtatagggtggatcgcgggttgatttaacaaaatcctaagggattctttgcactaatgcatgactgaagggttatcagcgatcctaggccattggattaggggtcgagcgcccagatctgatctgcctaacttaaaccggtacgcgacctacgccatcggatcagaatcccacggatcgtgttctatgcgtgcaaatcagctcgcgacccccagatcagatattgacggacacgattcaattgaacgaaggggtgcgctaagttctaatcgtagccgcccatggagatcggagggttcacaagcgtcggc

SEQ ID NO: 67365 - DNA, 813 bp, Zea Mays
cgagcatgttgcaccgtcttaagtcgttgccgacttaagccgattgctccattggcagggcatagtggtcaccccgagttaagtaagcgcgagcatattgcaccatcttaagttgttgccgacttaagccgattgctcagttagcagggcatagtgatcaccccgagttaagtacgcgcgagcatgttgcaccgtcttaagtcgttgccgacttaagtcgattgctccgttagcagggcatagtggtcaccccgagttaagtaagcgcgagcatgttgcaccgtcttaagtcgttgtcgacttaagccgattgctccgttggcagggcatagtggtcaccccgagttaagtaagcgcgagcatgttgcaccgtcttaagtcgttgccgacttaagccgattgctccgttagcaggtcatagtggtcaccccgagttgagtacgcgcgagcatgttgcaccgtcttaagtcgttgccgacttaagccgattgctccgttagcagggcatagtggtcaccctgagttaagtaagaatgtaggtcgatcatgaacaaactgagtattcttgaagccctttttattgatgacatatttcccattttacagagtacattgtcgtcccgatagcttttgaaatgcagctagggataaaacttcctgaggtgttctatattccatgagttcccaatttccgtgccgtccatctgagtgagacgatatgatcccggccgagtgacttctgctactatgaatggtccttcccataggggtgacaacttgtgccgtccctcccccgttagaatttggcagagg

SEQ ID NO: 67366 - DNA, 524 bp, Zea Mays
gtgagaatcagtcaagtagatgtatgatgaactttaatgcctaaaaattaagtcaactaagatccttcgctacaaactcaacttgaagtttttagaggaggtgacccataatcgaaggtgaggagctaatgatgataactgttagaactcgctaactcgcggtcagtgaagctcaaatagtggaaagatagaaagtggtttgatgccgagtaacacagagtattagggcaacaatgttttttccgtcccccgcaatggtgttgtacgggggtatttataggtaatccagggtcggccctgccccataaaagacaattatacccttggttacctatgttatccccagaatattctcccttgagggttatggcgagtcattaaagcataattaattaaaatcatgggctgacctactaacaactctgcccgcatagcggcttacaggtgggatcatgttgcatgggccaactatacacgggccccttgttacaattagtagtaggttacaacacatggtcttcgca

SEQ ID NO: 67367 - DNA, 664 bp, Zea Mays
acgccttcagacggacacgagcccataaggacgaataggaggaggagcgtcgatgtgctcgctgacagatgggcattcttgacatcaagctaagagatggaccactcacgaacaaagaccacaacaaaaagcatgcgaacagtcatcatgtgagcaaccggagcaaaagtctcatcataatcgtggccatgttcctgttagaaaccacgagcaaccaatcgagccttatagcactcaagagagccatccgagcaggtcttaaccttataaacccaattacacgtgatataacgaacacgtggtggacaaggtacaagttcccatgtgctagtgcgctctagagtagcgatctccatagccattatcacatgctgccattcttgatgtaaaatggcatcatgataagaggtcggatcaggaagagcagcaatcacaaaagctgaaggagaatactgatcagtaggctgacaaagacagtgactacgtctaagagacagctctagtgtagaaacggtagggaaaatggctcagtggaagaggacaagtcaacaggaatagatgattcacacatcaagagaggatgaagcagcatgagatggctcttcagacgaagacaccgcatcagaaggggtcatggtgcggcttgtgtaaaaaattttcactg

SEQ ID NO: 67368 - DNA, 547 bp, Zea Mays
ttggttgctgttgttctctcggctggacgttgacagtttgcgtcgcgattctggtagccacgtatacgtaggtggtggccaactggttaggtttttagccaagtgctgttgtaagcgtgtgtgtgtgatagagattgcatgtccagcaaaagccgctcctagctgcttcagtgccagtgccgtgtggcttctgctagcttagcttgcattggatggcaatggcatgcatccagcatgcagaggacggccgtcggtagcacgtacgtacgtacacacgttcacattggctggctggctggctgcctgccagccgggcaccctagtccgtacggcacggctacgcgttctctcatgtcagtttcaaatgtcaaaatttcccggttcatgtgaagttcgtactcccgcgtcgtgtgggtggagttaaacaatcatatatatgttcgtgctttcaacctacgttattaattaaggtcttgtgcatctgaaaaagtttagctttctgctttgtcgtcgattacatatatgcaggcacattgtttagttctta

SEQ ID NO: 67369 - DNA, 698 bp, Zea Mays
gtaacaaattgagaacgttagtgctgcagagcagttaggaaagtagaggaagccttacatgttaggtaaagggcacttctatctttccttggagcaatggagcagctgaggaagcactcattctttaagtgagcgccatgttatagcttagctagttattatttattggttacacgtcctttaatattttttgtgccactctagtgcctacagtttgtacatgagatctgtggtactgaatatgcttaaaacaaaattagctgtagtagccttattcagattgaacttaaccttatacagattgaacttcatgtatggtaaactgcttgcaatgaaggaaaagggcataaagcatatgaatctcatgggcttcactacctttgtagcgagtatgcaccatccttccttatggagagcattgaacacagaactagaccatattagaaggatagggttgggccaatttgtttgacgacaacttctgcccaagtgctcttgttttcttttgaagaaataaacagacagtgaatcttcagggctaaagctaggttattggttgcctgattaggcaattataactttagtggatcaatagtgaggtgctcctgcctaccggggacaaattttctgatgatttgagataaagctgattaaggagtaagaactggctgctacaccagtgaccagtgtttgaagag

SEQ ID NO: 67370 - DNA, 307 bp, Zea Mays
aaaataccaggccatgaacataatataatcagtgtgtaaacggatggtggtggtggtgggctacttaccaccgggacctccaggcgtaattgctgataagccaagatgaaccgttaacatgaccaatatcagaagaagcagcagccgagtcgtcaagaaaccacaaccgtttctttgcatgttttgtttcctggttggcagttggcaccgagggatgacgatgctacgcctaaaatcacaaagcttccggagcctattaatagccgttgcctgcaggctgcagctgaacccttgtgtgtcaagtgag

SEQ ID NO: 67371 - DNA, 447 bp, Zea Mays
gcgagggtagccatcgctgcccctcgcggtgacttttgtgtcggtcgaatgccgaagaccgttgatgcggtctttttcgacgtagtttttgtgggggatttttcgcgtgtatattacatggctccgcctcgttaaaaacctcaccccctgggaggaaaagagtgcgggccggcttaaaactgttctgcggattacaagggcgaagtggccctgaggagttaaacaaaaaatttgcgaagattatcaatgttccaagaatgttctaagtcttcgccgaatggcgttgtgagactgtacgcgctgagggacgccttcgtcttgacgatgaaagggccctcccattttggctccaacttgccccgggactctgtccgagctgtctggacgagtacgaggtctccttcgttgaattccctcgggatgactgtgtggttgcgccatgctttt

SEQ ID NO: 67372 - DNA, 643 bp, Zea Mays
tagctgggggaggagctgtaaacgcaccccaagttgcaaatcgaactaaacaatttatgatcggacaaagacatccaaagttgtcattaacatttctcttgacttgctatatacaaccgtgagtagtgacagaagcaatgttgacatgcacacctcggatttcacaagtaggaggcttgcacatgtctggagaactccggtggtggcgatgcgcatgtccaggacgtgcccttttccggcctcctcgcgacgtatgtacacagtctgatcgccgtcgtggtagccggatccaatgaccacgacgcggccaaaccttccggcgacacagagactcgtagattgtagcgctccacgcaccgccatgtctgggaccttcgcccatgcccccccccccccccccccccgccgaggacgcccttgctgcacttgtctacgcgctcgacttggtgtcctcgaaggtggcgaagctcgcacccggtggttggatagaggatacacagtgaacctccaagaatagcatgcgaaaggacggtccgctattttaccggatactttaccgttcattgttggacgctttacaggaggtttggttctctaaatttagagttcaggaccatatacaggtccttgttggagtcggtct

SEQ ID NO: 67373 - DNA, 582 bp, Zea Mays
acggtacaggctagggaagggatgagggatcgagatttatagatgcggggtgagctggcgactgaaaaatacgggaaatcccaacctccgaaataacttggttgagttccagccatggtttgttgcgcgagttagagatcggacgcgattctgttccgaggtgagacaagtccacgcgctagagaagtcccgccaaggtggcccactggtcatcggtttgtggcaagcacaggtgagggcgtccacacgagtgcgggtgaggctgagcgccagagatacaatggctgggcgacggggttgggaacgctccttacagcatgggcctacccgacagccagcaaccaaaaaggaaaagactgggggtgcaaataggccggccaaggctattttggcccagtcgtagaaggaggaaggcaaggacgagatgggctggactgcattcggcccaggtaagcgttttattttgttttttcttttcctatttcgtttttcagatttctattttgaatacaaatctgtttccaagattcaagttcatatgaaagagtaccataaaattctagatttcaaatatcaaacaac

SEQ ID NO: 67374 - DNA, 434 bp, Zea Mays
cgccggggagggataacccgtacgtggcgccatcccccgagctcagccggagttattcaccggcggccaccgactcagtcgtttccgccgtggtgtcctctgtaccatgatcctacctcactgtacctctcctctacgtgctaggcatgcactaaagaagttatccgtggctgtgaagtgatcgccggaccaccgcggctataaattgcccgtgatccacggcgaggtatgaacatcacacacacagtgagttgaattgaagccaaattcacgctgcctctgcccctcctctcaaattgattgtacacggtaaaactagagtcccttgcggctgtatagccccaagctccgccctcaatttcacccgagcacaccgcgacgccattttcccccaaatccgattgccgcgccgccgagaacagctcgtccgtggc

SEQ ID NO: 67375 - DNA, 1018 bp, Zea Mays
ctcaacgccatcatttaatgctatccttcagggggatatcaagatactctattttcctgttctgacgaagctctaaactggcaccaccaacaagttgatgctgtcctctagccatcccggggtgacagtggtagagatatttccaaagaccgaaatgaagaagaattccaaagtaagcttcgcagaggtgcacaaaaacgacaatttgaagaatagaattggggtttaaatgtgtgagattcagatcgtaaaaatcaaggaggtcgcggaaaaagggagaagctggcagggcaagccctctgatgaggaaaggcatgaagacgacagcttcatgagtgtcctctgtcaaaatggtaacctcacaccagatttgccaggaacacagctccttcggcggtagaacatcggtttcgataaggtgcaagagatcagactcagaaacaacgaacatatggttaccggcaaacggaagctggctattaggatcgatgggcagaatgattggagcagcaacactctgtgtcttcctcttgggggccatcactgtctctcaagtgaagtgggcaaactcaagaactcataaaacagagaagcggcagaggaaaaaaagcaagagttaggattcagagctcaagggggcacgttagcataaatatgagttgggtcgataagtcgggcgcaaaaatgctagaccataactcggaaaagcggagatcacaatcatcactcgggcattacctctaaaatgccagcgagcctctaaatgagcaagtaaaagcacgcaacggaggataagcaaagaactgcatttttcattcatgaggggagttcgtcacaaacttgaaacggactcatggcctcttccacttcttggtcattacattacattacactactctactacttacactacgctataccaatactactctaatctactattgtttagtactacttactacttactactaccactatctatactaatatctaaaccagtagcattatgccattggcc

SEQ ID NO: 67376 - DNA, 462 bp, Zea Mays
gttctttgcggttgcagctgcagggggcgcacccttaggaggggggaggagtcgcaggcatgatgggcgtgaacggacggaggagtccggacacgaggagcgagcacgacaatggggtggatcagcgcgggggaagcagcaccgggagagggcgtggcttatgcagcggaaggagaaaacatagtacctgataccatgcaagcaatgtaggttgcaagatatagtagatgtattgttgagaaacaatgtacacaaatatataggcaaggacaagggtggctattagaaacagaaccaacctccattatccttgcctaatattactcaatctacaggatcttggatttatagtccaaggaaacctcctgagatatggcaggctgggctacataaggctaagcctatggcccatatgtatataaacttgtctaacactttgagcttttccttaatcatatccac

SEQ ID NO: 67377 - DNA, 1098 bp, Zea Mays
ggcattactaagaattaagccctgcaaagaggagaaaagaattgagcatgacaaataaaatacttcattctcaaattcaaagttaacttctatacctttatattgttgtatgttaggctgtcagcaagatcatccttcgacaaaatcgaaaggccatcttccagcttcgggaatcccatgctcttacctatctcccggcaaacagatatttctttgttgtccgggagacagtataagaattcgtcatcgttagtgccattaaacactaaagctcccttcgaatatttcaaatttcgcgtatagtgtctggcttccagaatttcttcttcgaacaatttcttcccgaagcgtgtcgaaatatgtaatcaacattttcgatcggagcttcgggagcaggagtctcgatcttttcaggtgcaatctgccctgccgttttttcctcaggcgcggcaggcttcgccgtgatgggcgctgaaggcctagctttggcttcatcctgagtttttgtagcttcggtttctgctttcccagtttcggtttcggcttgcgctttggcagcttcaacaattttctttgtaggagcagggctcatggcctttgtagtctccagcacagcatccagcacattggccatcctcctcttcttggaagtcacgacagaagccttttgcaccttaggcagtgttgcctctgttggagggctcaggatttctagcatttttatcactttttccacttgtggctcttaggccttatcatctttagcttcggctggcccgactgtaggcatcttcggcactacaattggctcttcaatgctctgtgcaattgaagcagcttgtcttgcttcagcagttgaagaggctccttcggcaaattcaggcaccacgtccgattcaatataacgcgaccggtgggtcagaaccttcacctttttgctcttcggcacaactgtggtggccgaagcggcagccttcctcttttttccttgccctagcagcgggaagcgataatcggggtatatgaagccaatcacatcaaagaccttgttcaatcttttcttcccccggcctccgaaggctgcggacaaagcattat

SEQ ID NO: 67378 - DNA, 590 bp, Zea Mays
gttgatattaattttgtgcgtatatacgcatgaagatgatcttatacaacatagaatacgttttcttgacttttgagagcactcatggctcgccggctagctagctagcagctgctgccttaaaggaaaagtcctctaaaaaaaacatgcttgctgtatgcgtcaaaagaagagaagtagtacggaataaaactgcacgagaatccagtccagccatcattccttccatatggcttttttccgggttttcgttttggtttctcccatgaacgaataaaaacgaacgttcgctcggctactactcatttcgctcgccgccattcatcacgacgacctcacctgactagtaggataagcttagcttggctttccgtgcaagtttcccggcccatgcatgcttcatcttttcggaatccaagaaataatataggtcgtccaacatcatgcatgcatgaaatccgccagctcccgagtaggtgaaaataccagcagtatagttgatggcttgggtggtcttctcttgggtcgtctcgctccaagggcatccaaaggaaagtctagggatcctttgttgtaagaaccggtctgta

SEQ ID NO: 67379 - DNA, 316 bp, Zea Mays
acaataaagcgatgtaattgaacagaatatactcgtgttctggtaggataatgtacaccgaatattagagtccgacaatagaaaggttatctttgcccctagaagtgttatgcaattttgtcaaggcttgttacttctttcttcctaaccatcctaggcctaacgcatcacctttggcaattagccaactactaacaccaccataaaacaacatgatggttaggccatctcccagtatttatcttcttcattttcacatagtaggaacaaacaaacacattggaattaggacatgggtccaagttccaaaccaaac

SEQ ID NO: 67380 - DNA, 327 bp, Zea Mays
ggtagatgccgttcggggtcagaaatcggaccgagtagcttcgcaatgtcgcatggaatgatttgctccttctcacccgaccgaatcagagccttgggtgggctgatttctcgccgccgtagtgatgccgccgtgattcggtgctttgccgcgggcagggacctgggcgcaacggttcgtgattgggagtgatccacgtgactcgtggtagccgagtgtccatgaaaaccgatttgggtgcatgaatcggtcggggactcaccgtgggacgcgttcgccggtgggcttccgtcgccttgggtgcgcgccgccgtccacgcaacctgg

SEQ ID NO: 67381 - DNA, 515 bp, Zea Mays
aaatttgttacgacaattgttgaagtttttgaagatgagtacctgagatcacctaataagaacgacacaactcgattactagacctggtactatttttgtgagttcacaatttactttgatagtgaaaatattgtggcatatgaggatgaattttgtatcctcgattggtggcatgagtacaaactaacatccaattttctctataatggctaaagatattatgttagttcctgtcacaactactttggaaacttgcattactctttataataggtttcttgaggagcgacgatgaaggagatgtggatctgtattatggcttaggacttagccaacaaagagcacaacatgttgtggaggacaaagagactccttcaagaacttatgggttgaacaagattaggaacttgttgattagagtgtgttgagtctatgagtgtcacttggtgagtaatattaagggcatttttgcatcttgggctttaaaagggttggctaataaattggctaattg

SEQ ID NO: 67382 - DNA, 438 bp, Zea Mays
ctcctaccttaagcaagagaaatcaaataggaaaactaattgaaccatgctgttatgattggaccatcaaaataaaaagggtagcacaccaaattaactacaaaaattagtaagcaaattaccacagaaaggttggttaaaattccccaaacaagctacaaagtgggacaagcaaatgaaatcatagaatacctctaatctgaaaatcagcctctgatcggacatctccatgttaattaagattcaggccataaaactaatggctccaattcacaaagtcgtacctaattagcttccctaacatataccagaagctgacattggaactcggagtgtgacaacaccaaaccatgggttttaccttggtaatggtctgctagacagatcacacttgagtataccatatcttctctgccagtgagtaaaacccgactactc

SEQ ID NO: 67383 - DNA, 321 bp, Zea Mays
caccgcgaggtccagcgctagctaccctcgcgtgcgaccctccacgcaaaagtcgcccaagggtgcagccggactagcacaaaaagtgcgaaaaatcgaagtcttcctcaaaaagactatccgtgcaaaagtcgcctaagggtgcagccggactagcacaacaagtacgaaaaatcgaagtcttcctcaaaaagactatccatgcaaaagtcgcctaagggtgcagccggactagcacaacaagtgcgaaaaatcgaagtcttcctcaaaaagactatccgtgcaaaagtcgcctaagggtgcagccggactagcacaaca

SEQ ID NO: 67384 - DNA, 716 bp, Zea Mays
cgggcgtagctcggcgtggtggcttgagtactggcggagtggtcaagaatttcttcagtgcctctaaagcctcttgtgcttctgtggtccactgaaatttgtacaccttcttgagcaatttatagaatggcattcctttctcgactagccttgatatgaatctgcttagcgctgccatgcatccagtgagcctttgtacccttttttgtgaccgcggtggttccatcctcataatggcctcaatcttctctagatttgcttctattcattgatgattgacaataaacccaagtagctttacggttggcactccgaatacgcatttttctgggtttagcttccatcggtagcatctcaagctgttgaagactagttgcagatcctcgatgaagatttctgagttttctgtcttgataaccacatcatcaacataagcctccactcgcttgccccagtgatcggctaagcatgtatggatggctctctggtaagtcgctccagcgttcttggggccgaacgacatggaggtatagcagaaggctccaaattgtgtgatgaaggcagtcttctcctcgtcctctttctccagactgatctaatgatacccggagtagcagtctaggaaggagagcatagagcagccaacggtcgaatcaactacctgatctatcctagggagtccgaagggatccttcggacagtgcttattgagatca

SEQ ID NO: 67385 - DNA, 368 bp, Zea Mays
ttccactcgtgatcatcgtcgtagccttcaaggcataggtgttcgcagtcacaactagcttctttgatgtgtccttccgtccgcatcacatgtcccttttggtccgctctagcgaggatgaaagtaggattgccccgcccgacgtccttcctcgaggttcgatcacgggggtctctggttacgttgtcctaagccaccttcccgtcaagggtgccctaggagggaaggagcgacgtggcatcacgtttcgctaaagaccctttcgaaaaaaagataagagaactcgaagcactaattttggaagaggaaaagtaacgtagttggctttgcggtgggggtccccgcccgttactccactgggtccgtcg

SEQ ID NO: 67386 - DNA, 411 bp, Zea Mays
cgaaggttcaggagacttcctaaaggtttgttcggttaacgatggattgacggagattggatgagattaaatctagaatttaatctagtccaatctcttttaatctttttctaactgaacaaggtgacgaggcttcacgtgaagactttgtgaagactgtatcaacgaagcttcacattgattcttcgatattagattatggcttgctccatttgcttcctttgaccaaatagcccctagaaataaataccaaaatacaaatattggctgttagttttcaaatattagggtcacattctacctttgacgaagcctccaacagtggcccctcgtcagcaaaaacctactatctgaatcccatgaaatcgtggtttcaagtaaaggttaaaacatcgtccccgatcatcagag

SEQ ID NO: 67387 - DNA, 568 bp, Zea Mays
gcattacatagagtgggagggagagaacgaagagtcgcaactcctcaccaatagacacatattccctatacatagcgagtggtgcctttgtaccccttcatggattacataaagagggagagagagaacgaagagtcacaactcttcatcaatagacacatattccataacaaacacctaatcactttgctaagtaatttcttccatttgtagtggttgagtcctttgcttcttgtatcttgacgatgaacagttgcatcctttcatgaatgggtacctctccatatggatgagatcaccgttgaattaaatcttaacataattcattcccacacttattggtcttctatcgaattatttggtatgtgataacaacatattttcatttcaagctaagtttgcagtggctatatattttgcgttagaatgcgttgaactgccttatctgttttggtctatagaggcaacatattacacagtataatagtttgagatatcacatgtatgttgttttttctacatatttttcggtagatgctttgatcttttttactaagttatagttgac

SEQ ID NO: 67388 - DNA, 404 bp, Zea Mays
ctagagtgaatatggtgccaaagcatcagggacgttcagatggatgaagatttataaactttcttaccccttgaaagcataaggtagtttgtttggcccctgttgcattgtagcttggcaacagttcagtatgaacccatagtgtgcatcttattaattttattatttaatctacctccttattgctacattagtatatcgatgaatgtgcgatgttattttcaacactggacaacatccagcaggcaagtaattttagaactggacatgaatttcaataaacaatatatgcacctatgtgtgttttggattcttcatagatttgtatgagctctaaatctaacggaaacattaatcaattgcctggattagagaaggaaatgttgagattcaatggcttacct

SEQ ID NO: 67389 - DNA, 544 bp, Zea Mays
aaatcgtcgagcatcccaaaggatttcggtaaatcaactcataaccaagatcgtagattaagtaaatacacaatcacacactgtaatttttgcagcggaaataatattactgtcggtgtctagacacgagggtctaaccacccagtgaaataatgctgcatgcccctaacccagatgagtgatgtaagatgacacaagtctttatcctggtccaggcaagagaaagccctacttcgagcaaaggaggcatgagacttatattacttgcacctaagtgcttgtagtagggagtacaagatgagcgggagaaggaaggatcccaagtcctagggttgattgaggcaagtgccaatatcgtggtggaggagaaaaccgtgaagtgtttgcgtgcctccctgaagctatgggctgccctatttatagcctcaaggaggacttccaggagtaccagagttggccgcgtatggtgaggaggtgtggccgaccccttgtagatggtatggcccggagcatgggtcttgtacttgctgttgacttgtgcccg

SEQ ID NO: 67390 - DNA, 407 bp, Zea Mays
ttggggctgagcgcgtcaaggaggcgaacgccgaccggctgcggagggagttcactggcctgtcgttcaggccgggtgaatcggtcgaggacttcgccggaagggcctccacgctcgcaaatcagttgcgagtggtcggtgatgacatcaccgagaaggaggtagtgaagaaggtgttgcattctgttcctgacaaccttgaacagattgcgctgtccattgagactctactggacttgaacgacaccacggtggaggaggtgatcggacgtctccgggcggtggagcagcgcaagacggcggctgcaacgactaccaaagaaggcagcggtagcttactcctcaccgaggaggaatggctggcgcgattcaagtcaactgatggaggaagccgaacaggctcgagc

SEQ ID NO: 67391 - DNA, 542 bp, Zea Mays
atttattccatttattcactccatgggctgcggctaggattttctaatagttcatggtttagactgttaaaatcaggacctatgtgcaatgttttcaacacagaaagggatggtgggttgatatgtaaaaagggcaggggctcttttacaaaatgggatcggtgaaggggtaaggagtgcactgggccattagatccagtacgcatggtctcgatttaaattaaccgaggcacgaaccgacccgagatatgcccacgccagaacctagtcctagccctctgattcaatcttaatggctctagattaaatcagcgggaggtatttaattatttaatcctgggcgcacaatgacggatcaacggccccgcaactctcttcttcctctgacctgctatagcggtagagacgggcaccacggcagctcccacgccggtgaacccgactcagttccccccgagtgcgcagaaatccaccctgttcacgatcagccgcaacgccgcggggattaaaaactccgttgaacgattccccgcgcccaactc

SEQ ID NO: 67392 - DNA, 325 bp, Zea Mays
attatgaatagcacttgtattcgatattgttgttgaaatgagaccctaaccctaattgggggcagaagatatattaatatgcccaagtatatggaccaaggcccattacatagatggaatacacagaaatacacaacacactgacacccccacggtcgcagctctacactgtacagatgttgagactagaccaaaactccaagaacattgtggaagggagccccttggtgaagatgtcgtcgaactgtgaagtgatctaacctatagggggcgggacctcatgataagggggcagctttcatgacctttctcgatcgagctcaac

SEQ ID NO: 67393 - DNA, 725 bp, Zea Mays
aacaagggctgagcccaagagtcttgaaagattgtatgaaagtcttcatgttgaagccaaaaattctcaaacctgaaaatgggcggttttgggacgttaatttggacattgataatccaagggacatggtccgaggcgcctcttgctagggagtgagcagaagtagcagggaattgggtagaccaagcctgcaagacaaaacaccagtcaagcttttctaataaaggatggcgttgcatatttgaccatgtgtaagcttgtcccttaagggggatttcttgagtgcccagttggctgattgccaaattaaagtccagcattctatgagtgtctccccctgatttgttactgttttcaggtgttctaatcatattgaagtcgccaagaaatatccagagcttatcatcatcaatctcgagttagagaaccaagaaagaaaggcctttcgaccctggggggaacatggggcgtagatattggtgagccaccaaacctgttttgttaactttgtgcggaataagatcgtatgtccgaacgaattctattgtatcacctcaacatcaaaatgagaacttttccaaattgttataaaacccccagatgcaccaataacgaatataggaatcttcaaaggaatctttcttgtctcctggatgcatagaatgtcacaattggtttccataatactattccgcatagagttccatttgatgtcagaattaatt

SEQ ID NO: 67394 - DNA, 658 bp, Zea Mays
acattcacgcgaggcttcatataatgcaataatttccgagtggtttgttgaagttgagaccaaagtttgttttgacaacttccatgaaattgtagtcctccacaaagaaatacatatcccgtttgggatttgcctgaatgtggatcagacaggtatccagcgtcagcgtacccgataagatttagatcttgattttttcgataaaacaaaacaagatccttgcttccttgtaggtaacggaagatgtccttgatctctttccaatgccttttggtgggttccgcactatatcttgctaacatattcacgacaaatgcaatatctggtctcgtgctatttgctagatacattagcgctccaattgcacttaggtatgggtattgaactccaagaactaacccccccctcttgcttaggtcggtatgggtcttggtctatatgtaatgaccttccgatcataggtgttttggtagggtatgccttctcaaaaccaaatctttctaatactttatgagtgtaagttgattggtggattaatattccaccttcaaaatattcaagctgcaagcctaaacaaaatttggttttacccaaatctttcatctcaaattcagacttcaagtatgagcttgcttcttcaatttcgtcatgtgttcct

SEQ ID NO: 67395 - DNA, 465 bp, Zea Mays
caagacacaagacaatttccatccgttagtggataaggttgctgatcgtttaccgggatggaaagcggccttaatgcatcctgcgggacgtgcaacccttgtcaaggcagttctcacagcagtgcctgtttaccatttcattgccttacaatgctccaaatgggtgattaaggcaattgacaagataaggagaggcttcctatggaagagaaggaaagatattaaagggggtcactgtctaatgaattggaaccaagtttgcagacccctagagctaggtggtttggccattcacaatctggagtctctaggttgggtgttggacatgaggtggctttggttgaaaaaaactcaacatgatcggccttggtctgggttagatattcaggtgcatccaaatgttgctgctatgtttgcaatctcggtggtgacttcggttgggaatggggaaagtactcttttctg

SEQ ID NO: 67396 - DNA, 429 bp, Zea Mays
gtcagtcgttcaaaacttgacttaattgtcttcataaaaaacttactttatatcaaaactcgtctcttttatcatcaacccttcttatctgattcttcgtttatcagaaggttctaatgagaagcattgtaagatgatcaagctaggattgcggaacttgaagcaaaatttgccagaagaaacccttttgaagctatcgatgatgccctattctctgtcttatccccactccgcaagaagttttgttatggatcccctggatctattatttgacttcttggataggttaataggatagttctatagtgctaagttttcgactagatcggtaaagacgacgttatattgtggttgttttctaactcataatattgctatataacccttgatttcttctactcttgttttcttgccattgtattgtcatcc

SEQ ID NO: 67397 - DNA, 365 bp, Zea Mays
cgggaagagtgatgcataacgacagtaaaaccgtagaaccaatgaaaaatggtgttttatatagtagtgagggtctggtaattcttttttggtaaactcacagtttacatgcgactaaccgtataaagtacagactgaccaagtctagcgatggtacaatgagaaattctcctacaggccttgctacaacaaagtatttcaggtgacacggagctcaagcaaaaccactgccactctcctatctcaaatctctggcagtggcaccctgttcaaccaaacgtctactgttttcctgctggccgttttcagcaaacacggaatcttcaagcaagacccatgcttcagccgccatgcagacagatggc

SEQ ID NO: 67398 - DNA, 379 bp, Zea Mays
gagaagggaaaaaggattcagctgaagccacacatgaggaaagccaaagaagatgcaaagcaaggcacacaaaaagcactgctcttcagccacaccacgcaaaggataagagaaagcagatgatgcattcgttcagaatctgatgacacacagctttgttctagccattcaacagttagttactactcaagagttcctagctagctagcatgcatgttcctagctagttgttcatcgctcatgcatgtctgaacatgcttgatttgttaaccactttatttagctctcgatcatcgctttaacggaagatgcacatccatccatccacccaagagaaagagattcatgttggacgcatgcatggtagggtactccgaat

SEQ ID NO: 67399 - DNA, 378 bp, Zea Mays
ttgaaagagcgctaggcgtggggcccatagggcacggcgccgaggtgggcgcgtgggcgggccagaatgtcagtgcagagagtgaagtcgtggtagcaccaggtgccaacattaggttattaatagattactataaatatagatatatgcaacatggatctataagtgcaatggcgagctaagatctcattctcctcgaccgtcgcacatatcttccgaccagatatgttatctatctcgtttgcctccctagacccatagcggtatgttcctagtatgttgatgtcactggggctaggcaggctgatgtgtgcaggggttaatgtgatatctatgtgtcaactccaacccatacagtagcgggtgtattgccgactg

SEQ ID NO: 67400 - DNA, 905 bp, Zea Mays
gttgtgaggcgaagcggtgcccgaagggagggccatcggcgtcttcaacggagatgagcgccccagtgccgatcctagtgttggtagaattccgcgttcgccgaggcctccaggatgacttgcgaggctacgtggtcctagatgtggccagggagactccagagaagcgcggatctgctcgacggagtactacaggtgggagatggacgaatccacccgagggcgccatctgtcgagcacctggacagcagactccagtgctgcgacacggaatcccgcgtcctcctcgttctagcgaagcctagattcggtgttgacatccgacgaagtaaggtggccctccacatcggcatggatggactccgacaggtcggataggcgccaatctgcttcagcgacgtgggattcaaggccaccgacccgaaattcccacttagtttcgagcgatttggaacctcttgtccaattcggcgaggagcgagtgggtttggttctccagtgctagggtgagatttgtctcagcaggtgaagttggcgacatgtttgtggcaagggatcgaccctctgataccaatttgttagctacatatggaagggaggaagaattctagagaaggagattctggagaaggaggaggtagatgaggaacaacagttccatagaatttcagatagtgttcattacaagcatgccatctgaagacagacatcatctcctacatatactcgatacacacgaggtcccactaggcagactcacagatagatagacctaccatatagagactgcatcaagcccactccggaccactcgtacggacattaggacgacgcttgcgaactcctcggtgagaggtttcctgtgtgtgcatcggcaacggaggtgtaacattgcgacccttttt

SEQ ID NO: 67401 - DNA, 558 bp, Zea Mays
acggcggaaaccgagaacattttgatatgttcaagacaactcagggtagtctagcacaattggataggtttacgagtaacaggagacttaatggaggctagaacattaagcaatttggtatgtactaacccaaggaatgctagccatggaggggtcccttgcggcggtggaaaccgattccagggaattccggtgatctctgagggtggtggaccaaacagggtggctagtgactcgttggcttcacaactaagggacgaagagctgtgcttggttgatttggatgaagggggatgagagcatggtgaatttataggcctagtgagccaccgtggcggccatggtgataaccatcaccggacttagctggcgaccagcggtgacgtcgggcgctgccctttcttatgagtttgccacgtcccgtcgcgacagtaacgcggtcaaataggtgagggcgtggatgaatggagaggagcggcgccggtgaccaggcacggccggaaggatcagtggtcacgtggcggccggaattattaccctccaccgcggcgatcttac

SEQ ID NO: 67402 - DNA, 486 bp, Zea Mays
gtagaattcgagccgatagcatttgtttgaatataagtgtgaaaataaggggatagcatttcccgccaaccttatagtaatgggtactcagggaatagatgtcatcctagggatgaattggctagataagtatcaggcagttatcagttgtgataaaaggaccatcaagttggtgtccccactaggagaggaagtggtgaccgagttagtcccgcctgagccaaaggaaggaagttgttatcagatagctgttgatagcagtggagcagacccaattgagagtatcaaggttgtgtctgagttctcagatgtgtttccgaaggacttaccgggcatgccaccagagcggaaagttgaatttgccatagagcttcttcccggaaccgtccctatcttcaagagagcttacagaatatctggaccagagttggatgaacttaagaagcagattgatgagctgtcagagaaaggttacattcggccaag

SEQ ID NO: 67403 - DNA, 1004 bp, Zea Mays
ccaaaaaatgacatccgaataaatatccggatccatccctacctatgtctcactgacatttgcactaagacccctagacttctatttcttcgctggataagtccctggcgacggcgcgttcacccgccgactgtctcatcaccggaatccgtcctaaatgacgacgaccgccggaactaagcatcatatcaccatccccgagcccaggcgagtctagtccatgccctaattgaactaatacggccctggattctcctatccacgacgacgacgaacaccgaggcgttcccgacgattaagcgcggtctagctcaattggttgagctgacaagcatcacaagcgtgcgagagtgatgaaacatggataaggagggcgagagcgaacctagagatggctatccacggcgcggtgtcacacagtggcgcagatgaccgatttgtgggaagaactaaattagggcgctacggtggctaatcgaaggcgggagtgggtgctctgggttcgtgataaactaatggagttggctgtgcactcaattatagcagctggccacggttgtcccgaatttaaaggagatttggatcacgatggtgacaggatgttgcactggtgagctcgtcatggcgttcaacgacactatgactcaagggcggtaactcttagcttgccatggtggagggtacgtggtgaaagaactatggcgtggcacaatcgcagtgaatggcgacctccacggtgatgaccgtccggccacgtcactgcgcaagtgggtacgacgactgggcagtaatagtgccccgacttcatcccctgcgcgagatctttcactttacgtagggatccgcgtaccaccgggcacgaatcgcaacgccaacgaggatcacggcgcaggatcaccggcggcggtgcactgaacttggcgatcttcgtcaggttactgtaccacgtgaattcctttcattgcgcttgacagagcagattgagaagctccattctccatttt

SEQ ID NO: 67404 - DNA, 932 bp, Zea Mays
ccttgatgcacaggtgctctacctagctagctgcatgtgagtgcttatatactgcatgacctcatataagccactcccccggcctgtgctgtgctgcgttcgcttttgatctcgcactgtagctttccaatgcaaaagtcagccaggtgatcacatgaatgggcgtctcttcgctccgggtgtgtgatctttgctttgttgcatgcgctgcttttgcgtgtgcgagaacacggccggttgacgtactgcttgaggactccttttctgctgtggcgctcatgaagtgagtaattgctttgcgtttgtttgtgtctctccagatttcttgggcattgatgaggaccgtgtgtgtgagcgcacgctcctgggacacgcaggctggctcttctcgacctctttcagattcaagagggcctctctcgatcgagaactgcaggaaaatcaaaacacttcctacacaatactgaaactgaaaaatgctacaacatcatttcgactaatccttatattaagaagttttggtccacatacttcccctgtagttagctcactgatgtatggtctatgacccaactgcaagtgaaataactgtagatgatctcgttacggttcggcctcctgccctatagtgtgtctgcaaataagacaatgcaagcctgttgttaatgtacactacaagaaactacttaactttctaaagcctaaactctcggaagttaagtgaacacggtcgaaagtcaatgaaacttttgaaagttaggggatcatgtcggaagttaagctctcagaaagagctagtcgaaagttagactaactttcgacgactagtggggctcgtttgaagttagcgggggttgacgcagtaagcacagtaacttccaatcgttttattggcctctcagaagttattgtgctaatttccgaccatttta

SEQ ID NO: 67405 - DNA, 1101 bp, Zea Mays
gaaaacagacccctggcatgtgcacgcgtgacttcagcgaaatctacagtacatggggcagtgttgaaactgatcttaaacttaacaggatcttagctttgtattaacaggaccattaactcaaactaaggtggaattggttttaacgactaaccagagtgggtttgtgagacaacagagtggctcagctaggggacttttttaaccaagccgaaaaattcgtcgcaacgaggattcgaaccaaagattttggaggtggtactgagaaaccttaaccactatactagaggctcttttgccatttcaaagtgtgtagcatggaatgaacatgaacatatgtacatatcagttcaatgcaaggagcaaggtggtgcaagtttatatattccagaacaggatggcagcagctcatatgaagctacgaagcatgagagaggccaccagatgggcggcatgcactggcctgtcgtgtacatgtgtcactcgagccgtcacggcgggaaaagggcctaatttgctcggacgcgcgtgttgtgtcgtacgtacgtcgcgcacttaacaaaagcggcatgcatgattacccccgtccctttgccgagtttggaacaccacgaatccacgattagcagcaaaagcaaaatacgagagcgcagggtagtagtacctggagggatcggagatgcatgcacgttgcacgagacatttgaggccagatatttgggtcatttgatgaacagttcgcggacggattggggattggggatttggctcctccgtccgcgtcgctgttgggccgaggcgcgcgccaggcggagcgagagagttcacgttgcgaagatcgaagaagcgggtgaagacccaaacaaaccgtgaaaaaatttctacatccccaatacaaacacactcttttgtatcccctcacagccaccacctaaaagcgattagagatggcaatagaaacctgaatatccgacggaatttacccaatataaagataagtatggtatgatttctatactcgcgggtatataaacggacaataatatctacctatatccatactcgtatagccgtaggtaaattatacccgtattacaccgc

SEQ ID NO: 67406 - DNA, 592 bp, Zea Mays
gcaagggtcaaaggagataacagacaagggtatgagggaaaggatgaaggcatagaagagccagtggtatgagtacaacaaagaatggagttacgtcaaggcttacacacggtgaagaaaaggatattgtcaagggtgagataagtagaacaccgctctcaaattgggataggagattggagattttagatagcagacataatgtaatcaccagggtaatgtcgagagatgggaaaggtcaaggcaacactaaacagaggcacaacaaagggtagagttgaaaactcacaagcgacacggaagaggatactatcaagagaaaataggtaaaataaaactctaaaattgagatggaagagagaaggttttagaggacgggtataatataagcttcagggtaggatatggatgtgacaagggtaaggataaaaatcgtgaaaagcatgaccaaggatagaattaaggcaagactgacaaagtggagaaaacaatcaagggtaagataagtgaggttccaacaaaatggttgaagtaacagaaattattaccaagggaagttataaggaaatgatgagatcatcaacgatgtgtg

SEQ ID NO: 67407 - DNA, 692 bp, Zea Mays
gcaaaaggctgttcgaagaatttagcaagttacacttataatatctgaatattggggagccctgcgaagttctgtgggggacgttgccatcctgctccgccatcgccaatttttttttattttctttgatctagaaattatggatgacacttctaaaatgtaaactaaatcattcatacacagtttgacaggaacaaatatgttgttagtggattctgcccaatcacaccaaagtaacataattatccaaggtttaattctccataaaacagatagccaaaacaaactaaaattttgtgctgagatgaccaaacatatcaaatggtatgcacaattgaaacaaaatgttattgaacacttactggttgacatgaactgacttgggagcatataagcattataacggagaaaccaagagacaaacaaagttgacagagactcattcaagtgggacgctaatatcaagcaacaacttgttctatatgaaattggagaacgggagggtacagggtgtggtatttatgtagcctgagtttgtgcacatagatattgaattagaaagatcattaatcacagatccagaaatacaaacacgaaatagctgaaaggtggaaaagtagtaaatatgtagtataaacaattaaggagacagaaatagagtgagggcgtggcagtggaatcaccagatcggc

SEQ ID NO: 67408 - DNA, 654 bp, Zea Mays
gttgccccatccccttctccacctcccctggcctcgttgccccatccccttctttctttgggaatgtagtgttaacataggtattagactagtttctaataatcagtggatctaatgatgtgtactaataaagatcgtgtatgagggaggggagggctctgtctgcctctttttctctgcatctgactgcataaacatatttgccagtatcttatatattagcatgtgttataccgtatagaagttagttatcttcttttgtaagtgactatagcgtcgtgcaaatgtacagtgtactttgtctgatctaccgcgggttacgacaactattttgcttagaaacaatatgcccctccatactttctattgctgtattaatctgaaatttttactcagtggctaatatatatgggtttgcacttgcatatataccttccatcatgttctatacctaggcctgtttggttttgtggaattcttataatacattaacattgtatagaatatctgctaaaaaatcaaacgagtctcattttggtacgagataatggttatgtggactaaaatctcactattcggcggatcgctgattatgggaaataatcgagaatatacctgtcatccatgcaacttggcctctcttgcatcgcttcg

SEQ ID NO: 67409 - DNA, 1071 bp, Zea Mays
tgacctcaacacgatcacgcctaacccacgactagctcgggcatgggcccatcgtgctcctaggtcggcccacttccatcgtttccctttgcccgacccacaacgggatgtcatagaggggcgaatgtcacgtggccccgggcgaagttttcaccaccgagtggacccgagggatatctgtcccccacataagggactcgtcgtcaatctcaaatgacatctcaacaggagagcagtcgccatcaaggggaaggcggtgggggcctcacccatggagattgaggttgtcgctgtcagccccccgccaggctccactgcgcttgaggttgcccccgttgacctctagccaagtatagtggcattcgagggtgccgctgctgaccagcagccaagcacatgtgaggttgtcaccatcgaccgcctgttatgctctatggtatgtgaagttgtcacccctgatgcccggggtgacttattctacctgccaatcgattttaggaagccatgacaacaagagctatgccttcgttagcatggctcccttcttggaatccattgatagggtcccatgggccgcaccaaggcccgcacagtccactccgctgacctaagccttggctccctagcgcactgagtggtcatcatcggttgtcggccaaaccctatggtgtgctcactctccaccatcagttgcatcagggggaggtcagaataagctccctacgtagaggtggagctcaacaaataatccattaagggctatgccttcgttaacatgaccccaccaaaggcattagccggttgctatggtcccccatgggggcccagcacatgaaccaatggtgtttcaagggcagggaagtgctaagacctgcacggtccactgtgtcgcctactactgggctccagagcgccaaggcttaactcgtcggtcgcggcacaagcccatgtaatctaaggtaggctgcttcggcaagtagcacgagttccatagcgttcgaggtagccgtcgtaggtcattgtcaagctccaccaccatctgttgccaaggcagaacatgctgctagttat

SEQ ID NO: 67410 - DNA, 491 bp, Zea Mays
gaaaagttcacgggaaagtggatcagagagttgtcgtatgtggtttggagcctaagaactcaacctagccgagctctgcatggaaatactcccttcttcatggtctacggttcggaggcagtgctacatgccgacctcaggtttggggcaccaaggctatagctgaggcagaagctaccagactagaggatattgatgtattcgaagaagagcgattgaatatagtaattcagtccgctagataccagcaaaccctgaggcgctatcatgacaaggctatccaacatcgatccttcgtagtgggagacttggtccttcgtcgaattctaacggaggagggacgacacaaattgtcaccactatgggaagggccatttgtggtagcagaagtcactcggtcaggatcatatcggcttactcaaatggatggcacggaagtagggaattcatggaatatagagcacctcaggaagttttacccttagcaagat

SEQ ID NO: 67411 - DNA, 302 bp, Zea Mays
tgccaatgcaagcatgtagtattctgctaggaaggccatggcaatttgataaagattctatgcatcatggtagatcaaatcagtattccttccaataccatgataaaaggattgtgttgcatccaatgtctcctgaagcaattttaaaagatgaacttactagagctagtaaaatgaagaatcaggaacaggctaaaagtgaaaatcggattgtggcaaatgaacttgagaagcacaaagagagtagagccaaatctgttcatgataatagaaatgagatcaagctgaaaggggcatgtttc

SEQ ID NO: 67412 - DNA, 373 bp, Zea Mays
gatgtggtcaatagtgtaggcttgagtgaaaaccctaagtaacacctggggtgttacagtattctcaagtgtcaagttatgtgatcaatcactaattgttcatggtgtaagcggctaagcgccatggtgagatgaggaaatagcagcagaaactgcagtagttgattcatttcctgcacttatccttgaccagactgctcgaaccacccttatggaaagggacctattcttaaaaactcgacccgcggggggtaagacagccctcgagtattatattaagaggacattctcacatagctcgagaaaccaccgaaccactaccccacccatacaggccaccgtagtccatgtgcgaacaagtgtaatgggaccg

SEQ ID NO: 67413 - DNA, 558 bp, Zea Mays
cagggacgtgccatccgacgagcacgtacgtctgagattatattggtccggcaggtttccaagttgcatgtatatatgcatgtggacgcgcatgcagtgcaggaaaggaaaacgaaaagggcgcgcccacacacacctactgggctagctagctagccgcgccaataactcttggctggtggatcacagacagacagcgtacgtacgtacgtgtacgtatatgatccacgtattgtgctgtgctgtgcccccacatattgtgctagctagctcacgtattgtgctgtgctgtgcccccacatgatgcacatatatgtgtagcccataatgcttatgtacgagtatatatatgggtatatatatgaactgaagcccctaccgtacgtgtacatgagtgactggtgccacacccggacaatcgcggatcgagaacacacacaaacacacacgcttcgtgtctacagtacgtatacgtatagtacgaccacaggccggccgggtccacagcatgcatgcaggatcctcctcgacctcggcgatcgatcgacgcccggccgg

SEQ ID NO: 67414 - DNA, 280 bp, Zea Mays
gcatcagctcctcaagttcccacatagcctcgcgctcagactgattagtccataagaccttgacatacttaattgatctcttcctcaatacacactctgagaattccactatatgcaccggacgacactccaaggtcggatcctgctacaccgcaattggttccatctcaatctgatggtccggatcccgcaagaacttcctcaacatagagacatgaaaaaccgggtgtacccctgccatggaatccggcagcagcaagcgataagccaggctacccac

SEQ ID NO: 67415 - DNA, 793 bp, Zea Mays
gtaggatttctcaggcacgcatggttcacgaaattgtgccgaaattcagataatgtgtgcatgagaacgtagccgtggatttctcaggcacgcatggagtactgtgtttaggcgtgatttggtttgatgcgtggctgatttggtttgatgagtcctcaaaatatttgatttgtcaattgtttataagaccgtttcagataacaaaaggattgacgaagtttatctttgtttgggaatgatgcgtgactagtacgcacacacatgaagatgaagctacaagctttggctccatagtctgaatgcacggcgagacaaatgatgaaatctttaaggtttgctcaacacggctataaaagaaaagatgacaatatccttagttgatcttttagttcatgtatacagtatatagagctgagaatatagctataatttcatacgaagttgtactttagtctggcactataaataggggtataatggcatacatatgaacgggctcctccggaggagaatttgattgctctgtatatgaccttcctgccttcgagttgttttctttacttccgaaaggtataactataatcgttattaataagaaaagatgaagtacaataacttatctaatatgagttatttggaatatctttatgctttaatttctttatccattatttatctctctaaccatatccctttaattaatcttttttaaaatgagttaattaaaggacgaaagaatgattaatttatttgttaatgcatttttctttaccatagtgagcctcgaagtcag

SEQ ID NO: 67416 - DNA, 502 bp, Zea Mays
ttgcagaagtgttatttgatactggagcaacgcattctttcattactgcatcatgggtaaaagcacataatcttccaataactgccatgtcaaccctcattcaaattgactcagccggtggtagaattcgagccgatagcatttgtctcaatgtatgtgtggaaataagggggatagtgtttcccgctaacctcatagtaatgggtactcagggaatagatgtcatcctagggatgaattggctagataagtatcaggcagttatcagttgtgataagaggacaatcaagttggtgtccccactaggagaggaagtggtgaccgagctagtcccgcctaagccgaagaaaggaagttgttatcagatggctgttgatagcagtgaagcaaacccaattgagagtatcaagattgtgtccgagtttccagatgtgtttcccaaggacttaccgggtatgccaccagagcggaaagttgaatttgccatagagcttcttcctgg

SEQ ID NO: 67417 - DNA, 648 bp, Zea Mays
atcagccttaatataaaaccattcacctttccagccggttggccattttgtgcggtaactgagaactggagccttcgtatccttgcgatacgcaaaattgtagcaaccaaaattttcatgaagaccgttgccctggccttcgtctagtagtgcaactcgtgcactcggcagaatgcttcagcatctgggctaatcccttagcttcggagggcccagatgaagacgctaagcctaacaatggcgttaggggtcagctgatgaagatatatttcgaaatttttcaagacttcccctatcatctcgttcagaggaaatcgcagtcctgctctgaagaagctcttgaaaaccactacttcatcactcttcggtgttggggtggtctcttctccggcaaatcggacaagtttgcttttagcttccccgaagtagcccagcttcatcatcatgggcatgtcagcttcagacacagtagatttctcaaaatctagatggttgggttttgttgggatcaaaatactataatcttcctcatcttcattaatattttcttcttcagcaacgacttgtttagcttcggcaacaggagtaccttcgtcagtagttccctctgtcacaactagacctgattgtttcatgacttcggaaatt

SEQ ID NO: 67418 - DNA, 456 bp, Zea Mays
ggctcttcgaccttatctttatcagtctttgactcatctagctcggctgagggtacctttggcattatagccggatcttcagccttctgcgtaggaggaatgggctcttttggttcagcagctgaagaagtctcgtcaccaaactcaggcaccatggccggttcaatatagcgtggccggtgggtaaggaccttcatctttttgcttgtagccttcggcacaggttcggctgaggcggccacagcagtagctttccttttcttcccttgcccccgcagcaggtaacagtagtcgggatacacgaagccaagagcgtcaaaaactttgttcaatctcctttttcctcgacctccgaaggctatggacaatgcattatcttctgccatggaatatgatccaagtagttcatcacttgtcacttcgatgcatttcaaccagtcatcgtttggttcatcg

SEQ ID NO: 67419 - DNA, 376 bp, Zea Mays
caaacacccaattcccctcgcaaatggacaaatgttttttgatcaaggggtttgggcaagatgtcagcaagctagcgagtagtatcgatgtgacacaattcgatgtcgtctttctcataatgatcacgaagaaagtgaacgtgaacatcaatgtgcttggtcctcgaatgcagcacatgattcttggcaacacttatggcactcgtgttattgcaaagcggaggcacatgatgaaaatccaagccaaaattccataaggtagccatcatccaaatcaactgcgaacaacagctagcgaccatgatatactcgacctctgtggtagatagggcaacactagattgttttcgagaagaccatgaaaccagtgaagtcc

SEQ ID NO: 67420 - DNA, 335 bp, Zea Mays
caaaatcctcgagagcctgataaaaatttgctagggacaactcttgcagaccaacgagagcagacaaagccggagaaggaatatcgctactctccccactgactatgtaacgccgactattcttccgaattaaggggatttcctcctcttcttcttcgtcctcgtcaacaatacgaacaatacccccattggggtcagctctggcaggatcacatccattgggatcagcatcatcaaggtcacacccattgggttcagcatcgtcaaggtcacacccattgggttgagcatcgtcaaggtcacacccattgggttcagcatcagcaggatcacac

SEQ ID NO: 67421 - DNA, 1667 bp, Zea Mays
agatttagcaggggtggttttgataagcttgggagtgggtgaaggtttctctaaaggtgtcaaaccactgcactcaccaaccttcccaaagcgagcgccacttccatccttagcagcaaagcctaaccccgggccgccagttcccctcttgaactgactgaccatcatgctcaactagggctcactacacgacacccaactcaagacagatcgaagatatgtgttttcttcctcaattcttgtcttgtcgtgtctgcaggactcaagggcagattgcaaaccctcacaaagtgcacactgcgtaggtgcaggggcactcattgagctagccttctcaagcgaagataccatagcgtctctctgtgctagctcagactgcaagccaggacaaacggtacacgcacccaacaggatagacctagatcccaactcatcacgctcatctagcaaggtggagtacttggtctgcaaagtggcgatgtttgacatgtgtagagcgcactcatcacattcagtctcgtcggacacgtcaactgaagctctagcagactcaagttccctaagcgtgctctcgtacttggatctaaactctctcctctcatgagcagcctgcctaagcaacttattctgactagccagagcatcgttcagctcttctatctcagcgacgagatcatcggcggaaggtagtaccttagaagtagtgtcatcgccgatgtctttgtcctcgtttgtgccgaccgcatcctcaccaagtgccatggtgcagaagcctcctgcagtgtcggcgatgaagcacaacatgttcaggttgtcctcgacccttctcttagtctcctcatcactcgaggaagatacaacatcgtcggagtcgtggtcgaggtcgctgagggaggcgaggaaggcatgctccttgatctttgccttctgaaggtacttcttattgagcgcctccttgtcaaatcctcccttggacttgtacttgccggtgatggtcacgcgggctagactccgatttttccttcttggggcagctggcaatgaagtgatcgggatcgccacagttatagcatccgtccttggacctgccattgccgctggctcatacggttgttgtggaaccacgtgaaccagctggccacaagtgccagctcctcatccccaaggctctccaccttctcctctataatagacaacaaagaagataatcaaacatagcaggtgaggagttagaagcagaaccacctccagagaccaaggccatggtgggtgcaccagggttctcaatcttggcccgagtctggtggtcaatctctatggacttgagcttgctgaagagctcatgcacggtgagagtctcgtagttgggcgactcgatgatcaccgagacctttacctcccaaaccctccgatctagagcatgtagtaatttcagcgctctctcatgatcactatagggtagttgtgccttattggcacacatcttgttcacaattaactggaacctggagaacatagaatcaatggtctctccagccaactgtgagaagttctcgtactctcgcctgtatgtctcaaacagtttggtctcacatgatcgttgccctcatagaatctctcaagggtataccagatctgatgagccgtagtcagatgcccaactcgct

SEQ ID NO: 67422 - DNA, 471 bp, Zea Mays
taaatgtgtactaaaaattattttctataattacttatttattttctctgctccctggactttgcgcacaaaaacagtgaagctcggggtctaattcataaaagtcctaagattcagtttacccacacagtggaccgcgggttgattccgtttaagttaggggtctcttttgcaattcgcgtccagtgaaggggtacgatcgatttaggctcgttcgatagacaccggacgatccagatttgatctacctaagccaaaacagtatgcttcaatggcggtcggatctaacacctgcggttcggattttatgttcgcgagatccaacactgcccctagatttcgcaatcaacgaccacaacaatgatcctacgcatactcgaatcggtatctgcacgattgaatcgcatccgttcgctttcgatccaacgacctgggttcattactacgcgatcagatctcatgcgcccaaat

SEQ ID NO: 67423 - DNA, 414 bp, Zea Mays
ctggtcctaggccagcgaaggaggttgctgctgcttcgcggcccggtggcagaggtcggtcacgtgctgaacggcgagaaacagaaggaacatggtggagcagcggccgtcaatggtggcagcgggatctctctgtcgtctcgtctcttcggtgctcaataatggcatccccgcccatggcaagcatacccctaccagatcctatggccagggaagggtgcgactggtcctatttatacgcccagagcattcagttggaagggagcgtgcatcacggagcatgctgatgatcccgggttccgttttgctggggcagacatgggggaagatgaaggacctgacaggggtggaccaactgcagtggaacaggcgcgctacgcagggggaagaaatggatgagaaggggtcccgcgc

SEQ ID NO: 67424 - DNA, 520 bp, Zea Mays
attgatcagcatacggatctgggatcgagacaacttatataacgctaaggggaggcccacataaatgcaagggaaagcagaaaactcacaatgcagcatccttttagccacaacaaccatatcacttaagcaatgaattggaagcacattacttttctagacattagtcttgaggcctgaagctgtaccaaacaattgaagaatgttcaacaccaaacttatgtcaggagggtcggccgcagggaaatcacaacatcatccgcataaagaaaaatgcggtgttgcaatggttttgaggacaatggttgcaagagaccttcctcagacgtccgctgaatcagccatgatagaatatacattactaaacgccttgcctcagcccccttggtgcagaatacgctcacccggaatcccattgactaaaatctgagtagaagacgtagccaacagcccactcataatatcacaccaaatctgcccaaattcaaacttcttcatgacttcaatcgagaaatcccaa

SEQ ID NO: 67425 - DNA, 1635 bp, Zea Mays
ggaaaaactaaataaagtgtggttgtccagagggatccccagggccaagaagaaagtccaactcggaaagggagtcgacggtggagctagagggggtcaagaaaggaaagaccattttggcgaagacatcgtgatgtgagatcaagagacgatcagtggtgagatcaagacatcagtaccatttgtgattaggagagtaactgaggaagacacaatgggtgtagcagggggcaagcttatgtggagtggtggcagaaaggttggggtagcacgcacacccaaaaatgtgaagatggtcataggatgtagtggtgccaaaaagagcaaagcggggtatggaggtacgaatcattgttgtaggaagacgattaaagaggtgggtggcgttgtggaggctctcaacccagtagcgagcaggaacagatgcctaaaatagcaaggagcgcgtgatgatgttggtagtgcgagccttgtgctcagcctcttcattctgagaagtgtatgagtaggacatctagagctatacaccatgggaggagaaggaccaagaggagttatcaaactcacggccattgttacactggacatacttaatggtgcgaccaaactgagtggaaacctaagcgaacaagtgcagaagagtggaaaaggtatcagactacgaacgtaagggaagagttctcgaagaatgagccaatcatcaagaaccaccagataatatttgtaactcaaaacactgataacaagagaggtccacaaatcatagtgtatgggatcaaaaattatcacagcctgagaggaggagctagtgaagggagtcgaacatgacgattgagctgacaggcatggcatagatgcttagatgtacccctagttcaagaagtgactgaaatatacataagttggacagcatggcagccggcagggctaggatgactgagccggcgatgccatgtgctagaggtagtggaagtaatcggtgcgtgtggttgcggcgatgacgaaggcgatgataaagcagaagtagtagatggagaagtagacacatgcaaccgtagtgtgtacaggggctagagctatcacattgggtgagatggctctaggtagcgagaaccttcacggataagccaaaaggatcaaactcaatagcgcatgagttatcggtggtaaattgatgaacggataaaaggttttgaatgatatggggggagacgagaactttgcaaagatgaaagggctcgggaaggaaagggctcgagaagcacttgatcacctataaaggtgatcgggagaatcttcctgttgtcgataatctatatctatactaatctattaagaacctaatgtgagcacctggtgatatcatggcttcaccctctgctgtaccacactgtgcaaaaatagtgcaaagcgaacactcgaacccacacccccttgctccaaacatttgggggtaaccactagaccacacataccttagtgtttataaatatctcaatacctatttatatatactactctattaagaacctaatgtgggcacctggtgctaccacaactttaccctccacgctaacattctaggcccgccccacgcgctgccagctattgtgtctgctcagcacccgactccac

SEQ ID NO: 67426 - DNA, 331 bp, Zea Mays
ctttacttatttatttttatattgatccatgagtcaaatgcacaacaaaatacctgaaagtatgagcattgttcgaaaactgtagaagctagatgtatgggttgcaacatttgataacacacaatcacacattcatattcccaaaacactaagatctcacagccgtactattgttgtatactacttgtcttctattcttactttaaaatgtatgtttgccttcatcacgaaacgtgtcagtatttgccttaatacagtccacctatccctgtccagtcatttgtcagtctatttgtttaaatggtaacatggttctctcaccggagcttct

SEQ ID NO: 67427 - DNA, 457 bp, Zea Mays
ctttattagatctggctcggcggtgctctgactttaaggagaagtactcttagagtcagaccgacttagcacagacctctgcttttctagatggtgcacgttccctgaattcttctctaaatgcccagcttgatttcgagaggatggcacatgaggtaaacttccttggctggccctgtttttctatccttgctttaatgctgaatgttgttctctgcttgcaggaagaaaaacaaacacttgttgcttcccatgacaatctggacaggttgtaccatgacgctagtaactccttgaccattctggagaggagccaccacttcactatgtctgacttagaccatcatcaccacgagctgctgacatctcaggatgaagtttctcgacttggccagttgttgtctaccaaggactccaccatcagggaactgcacgcctccaagaaacttatcgcgca

SEQ ID NO: 67428 - DNA, 365 bp, Zea Mays
ttaggatgtaagtgtagattctttggttccataggactaaaatattctaaaaactgaattattttcggtaatttgtactgtcttttcttgaggaactacattgattacacctttttaacatagactcctggctttgtgtttttcaattttcccttcagtttggaggcagtttcctatttagttttcttgtgatagttagctagctgcgttgatacaaggaaacttctcatgattcatattcgaaaattagttatatcatatggttgcattaatttcatcaacatcatgaaagagaggaattgttttgggctgaggcagaagtattatgtcaatgttccatgtacttttggatattataatgtcag

SEQ ID NO: 67429 - DNA, 994 bp, Zea Mays
cggcatggcatatcaccaccttagaaagggacatgtcttgattgcagtatagcaccacaggaccagtcgcagagcaagtcagaacttttccagggagctagagtccacccactataacaaaacaacccggttatattggaatcaacataagacaaagacgatctatcgagatgaaagattgcaaattcctcttgatcggtaggttattgtagtcagtttgggcccaatagcaaaacgggaaaggtggtccctctaaggtcgccaccaatcctcgaagctccaagccgtatacacaaaatgtagaccaaacaacatcaagatagacagatcggaaaaaagggcctatccttttgaggcaatcaatatgtcagggagattggccttactttgcatagtatgatgaatgaaaaaccggggaggaaccaggttcaggccaaactgacgagcagttatcattggttgataagattcatagcctggtttgactagcctattaattaccagaactcatgctgacaggaaggagacatgggcatgaagatggtttgactatctagtgagtatgctttgcaagggagaaggccacggggcacggtgaactaatgtatccaatccagttatcatggctgcatccatcagggttagtgtcattagggcatggccaaagaagaaattctattctatacattaaaggcggacgcaaagctccgcagccacgctatccacgacagctgaaaaaactgtagccgtcagattcttgatttacgatctttaccatagtgagggcctgaggggaactggcagcttctaaaggctcctcgaatatgccagatcaaacatcgatgtggcattttatatatcccacacgcagtctgcctcgccggttccgccctctctccattgacccaccttggcctcatctcaaccgactaggcagccacatgacgctcggcctctccaccgtccgcccttgcttcatagtgccagcaacggc

SEQ ID NO: 67430 - DNA, 358 bp, Zea Mays
gcggacagttgaacgcgttctcggcgattggtggtggtctagttcaatcggatgggtcgacgagcatcacgggtatgtgagatcactcaaacgagagatcagaggggacgagctaacctgtatcgcgctggccacggcgaggtgttcttgtggcattcttcgaccgatttgggggtaatcccaaattggggagatgtggggaacgatcggagctgatagttggtttactggacgcacaattacctagcggaacatgctgaggcttcaatttataggatgctcgagcggtggtgatcaatttgggcaagttgtgctggcggctggaggggaaaaggagctctatgcttggaacaggtgg

SEQ ID NO: 67431 - DNA, 407 bp, Zea Mays
ggcgtgcgtgcggtctgcccacccaaggttcagtactttcagtgtcaatttattcagtaactaggttccatgcattcatctccttctttctgtttcagtttatacaactttctgtttcagtttatacaacttgtgatgtaacgtagtttcaatagccgaatcgaatgtagtacttaaacattgacattgttgtagtgaaacacagttttagtgctcgaagcaaatgaggtactaaaaattgttgtgttgaagctaatgatttagatgccgaaacaaatgatgcacctcacattatgtggcctaaaaaactgaaggacattgcaacatcctaaactaaacaacttattgtggctgaagcaaataaagtaagtatctgaaactttttttgtttactaaaacgaaagatg

SEQ ID NO: 67432 - DNA, 955 bp, Zea Mays
cttactccttcgcacggcggtcgacgcccacagttcgcggtggcgaagcagaggtgagcgaccgaggaggcggcagagtaaagatgagcgcaaagcagggccaaggcgagcataaagattagaagaggtgagcggatgtccttagaggtgcggaggcgaagcgagcgagcgacagccaatagccgacgatagagaagcgagcaatttcacctgcctgtgcgagcatcggcgcaaccaagaagccaaacgggtgacgaagaagcgagcaactatgtctgtctgcgagcgacgacgtaacaaagaagctagacagatgtcagacgcgaagaaaggccatgggtcttggacctagtgctgctaatgggtcgggctaaggtatggcgtgggctatacctcgccacattaggtcctccgcccctgctgcaaggtgtaccggcggcggtgccttctgcgacagcgcggacagtccgcaacctagggccggatggactgcgacctacagtatgagccgagtcttctctgcgccgagccgaacggtctgcgtgtgtgtagaggcgacgacgttcactaacaacacctggacctgaccctctgtgagggacccgtcagggaggagagatcatagggtttgtttttgcatcggcagaccacccaagatgccttgagacgatgtagagtcgaagagatgtgaagattggagtgataaaatgctaagttactgtctacttatagggcaaaacgtaaaggaaaagaagatatattgattttggttcgattgttggatgtatcccttcgaatatataaggaatgtatggacccattcctagacatcctccaacaactcacacgagtttagagggataaacacgtgtagagatagaagttaatctgtatgatctgatctgatctaattgtataccgtccgttgcctaagggctatagatgtccaaatggg

SEQ ID NO: 67433 - DNA, 481 bp, Zea Mays
aaaacatccacttcccctttgatattgaagcggacactttaatcagtgttgcaatggcgatggttgtgcagctcgatctcacagatcaagatgtaacgacgattgcagaaatgatagatgctgaaatacgttcgcatattcctgattgggcagcagaggagtcaattgacaaccaaggggatgaagctgcttactctgagacccatagttcagaaggtgatgagggaacttctgaactgcgtgatgagatcggttgccgctacacccacatcggcgacatgcactggatcttcgcccgccatcagcgctcgtgatcagcgttcgtcgttcagtcaccattttggaaacaccgggtggaggggaatatggaatacagggagatccacagtgtaacttaatttttcaaaacattatcttagcctgtcaggttctagaatacaacctattcagtagtaacttattgtgttttcttaatatgctg

SEQ ID NO: 67434 - DNA, 734 bp, Zea Mays
gcatgttgttgtcttttttattctatggcaaaccacctgcatctctcgtatgaatatttccttgcaacttgacgtcgttgggggtattctcgaagatccaccattcctgcattccatatgcaccacatcattacaaatgagagttcccggccttctgaccagtttatctgcccccgaatcgatcttatgatcgtgtggacattaggcacgacgctatcacctcgatcaagtcccatcacctcttcgcgaagttgcagtttaagaacggatgggatagcgtctcttctctttggatgatatagttttcgcatgagtacgagtccaattccatgttcctcttctgagcattgattttgtatttagtttgtcacgcatgattagccaaaagaagaaattttgtttcggttggcgctttgatttccacatcagcatgaacgtgggtttaacttttttgccacccatcatccgcgcgtaagttttatgagatgaaaatatttgtcctgtccaaagataagtccacttgtctagggcagttgaagttcgatgactagatagagtattttctaggatttggaattgttggaatgctaccgatgacatatgaaatttgaaacgcgtcctggagctaagcggttgtctgggcctgcatgagtgtgaggtcattatgtgttgagaatgagaagatcagtgcagtctacaaaacaacattttaggtgaccatatggatgaactgt

SEQ ID NO: 67435 - DNA, 403 bp, Zea Mays
tcctacccccttaaaaataatctcgacctcgagattaggaagaactagggaagaggtggggaaattctattcgaagctcttcttctctctcccaagtagcctcatcttcaccatggtgactccattgcactttgcacatttttatcactttatttcttgtaacccgagtcaaagtgtcaatgatcttgataggatattccgtgtaagttagatcaccttgcacactaagttcttccattggtaactgttcctcagggacacaggcaattcttgagttgggatacgtggaatacatcatgtacatcagactgacgatctggtagctcaagctggtaggtcatctccccaactcgcctaaagattctaaagggttcaataaagcaaggggataacttgtccttaa

SEQ ID NO: 67436 - DNA, 588 bp, Zea Mays
ttaaaaaaatagatattcaaactttgagttacgtatttgtggtcagtgcatgacttcatggtttatgctatttttgctggttggagtacacgtggtagattgacatgtccatattgcggttcagatacagattgcttctgtcttgctcatggtggaaagatcacttacttcgattgtcatcgatgttggttgccatggaaacacccctttaggagcgataataaaaactttataaagaacactctggtcacaaaaggaccgctaaaacatctaaacacaacagaagtttatgctcagctgaacaatatgctcagctgaacaaccttgtcccaaatgaaaaggggtacaagtaccaaagatttgaagtggaccacaactggacacatgtatgtgtcctgtggagctcccttatatgccatcattgattcttgtgcacaagattgatgtcatgcaccaaggaagtaattttgctgatgcccacacacacacctgcatgcattttgaaaaaacaaaggacaatctgaaagctcaaagagatctagcaatgctttgtgaccgaccaacccaagtgctcaatgaccacggcaa

SEQ ID NO: 67437 - DNA, 421 bp, Zea Mays
gccgaacatgcatgggccattctctacgtcgaacacgcacgcacgttttgtcgtcacttattactagcaatagcaatagcaatagcaatagagaggcatgtaaaagaagtgcaaaacttattttgtgcatataataacaacacaagtagtataaagagaggcaaggcaaggaacgatgatagaggggactcgtgttataatgtaacgatgggtacacgtttgttatatctatactacttattaagagtgtaatagtagtctgcctcctgccgttctgccgttctgccatcctgcaacctcaaccgtccattccattgttctgcaatttcaaccgttcgatcaccagccgctcgatcccccaccgtcgccagtcgtccgatcccatcgcccgatccccgccccggaggttggagatgcgagg

SEQ ID NO: 67438 - DNA, 625 bp, Zea Mays
gggggctcggggtaagaatctccagacacagagcacagccccagaggatggcgggttgaatcgctaaaaggtgaggggctcttttacaatttcggctcggcgaaagggtacgatgcgatctgagccgcacaacaaccatcccacagtccaaaccctatctggccctgggtcgttcatcctgagatcaacggcactggtgctttctcctttcttccgctctcccggtgaaccgagcaccctctggcagggaatgcccacgaccgcgccatatggccgacaaggtccgcgacccaaacccaaatcaaactagtctagccctaaacggaactcaaggagaacacaggggaatgatttcgccgaccgccacgcagccgaacacccccgaccacgatacaggcggcgcccgaacgacattccccgcacaaaggccaaattcgtgcccaattcgcccacgattaactacggcgcgacattagctaggtaagggaatacgacgagggtaaagaatcgagagctcaccgaacacggaggtcgaattggcgctagacttcccacggcggatcaatgggcgcgatgacgaattccggccgccattggattgatttccccccaatctgtcaacggg

SEQ ID NO: 67439 - DNA, 908 bp, Zea Mays
catgacaacgtctagcacgctggccattctccttctcttgagagttgtggcgggagcctttgtcaccttcggcaattctgcctctaccggtgggctcagaattttttggcattatcactattttttccaattctgattctctggccgcatcatctttggctttggctggcgcgactataggcaccttcggcactacaatcgacccttcaatgctctgagcggtggaagcggcttgttttgcttcggcagcggaggaggtcccttaaccaaattcaggcactataaccgtttcaatatatcgaggccggtgggttaaaacctttattttcttcctcttcggcacagtggtggtggccgaagcggcagttttcctcttttttccttgccttctcaaggggtagcagtaatcaggatatatgaagccaattgcatcaaaaaccctgttcaatcttttcttgccccgacccccaaaggctgaggacaaggcatcatcctcggctctggtatatgtcccaagcaactcgtcgttagtagcctcaatgcatttcaaccagtcaacatttggtttgtcaaactggtccctgaatctgaaggtatatttcaatcgaactaatccaccttcgctggattcagcagtagtctccttcggcatctcccagctgtccacaagtggccatactctgtaggctatgtgctcttgaattatgtctcttgtgccaatgaaagcacaaacattgctaaaggccttctgacacgctttggcatcactttcaatagctaccttcggccttcgaaggccgaagcgagaccagatggggcgctggataatttccttaatatcctccctctcaatcagattattcttaacataaaaccattcctccatccaggccccgggtcatcttttc

SEQ ID NO: 67440 - DNA, 556 bp, Zea Mays
gagaaataatttgatcaattgatgtacggacttgtttgctgcacgtgcatctaccaaagggtgcctagaggggtccttttatagccccaaatgaacccgtagccgttgcccctttccttgcaaagaatatccaaattttcttttgtctgtgagtgcactaatagtccgatgaacaccggacatccccctgtgcaacggtcaccagatcaggtgactggttgctttccatttcgggtgggcatcggactgtccggtgaccccatttgaccattgcgcgctcacgtggccgagccgatcgttgcgctacctagagagtcgttggccccaggcacactagattgtccattgaattatagcaacgagcccaggcaaaggctgagagtggccagttgaccaggccaggcaccggacatgtccagagcacactggattgtctgatgaagcccagtcaagcccaaattcatttacttcttctcgactctttttgagaggttccctaacacttagacaaacatagttagccactaaaacatttttactaagcgatgggttcata

SEQ ID NO: 67441 - DNA, 488 bp, Zea Mays
ccttttgttctctcggtcccctctatttcttgttccttttcttcttactcgcaacactccaaggtccctggttcctatcctccttttcttctcttggtcccctccatcttattctcttgttggtccccactctcttgtttttgcttttgtgaaaggcaaacagctactgccacctgaatggaaccacaaaagtaagtcaaaatcaatctttttccatcaaatcatctggttttatttggcaactaaattttggtgcaagttcttttatgagcaagtaaacaccaaacttagaactgcattgtgtttttcttgtagaatggagaatcaaccttcttgggtgccaagtattggtatgaaatttaatagtgtagaacaggcatggaatttctgggtttcctatggtggtatggtaggatttgatgcaagaaaacaatataacaacaaaagaaaaacggatggagtatccacttcaagcagatttgtgtgtg

SEQ ID NO: 67442 - DNA, 363 bp, Zea Mays
cacggaatactgagaagtgcaggggctaaacactaaaatttctgagacactgagtacagtcagggtgtacggcgggttaattcgtgtaaagtgcggggtctctttagcaaagtgcacccgcgaaggggtatccacggatcccggccgttggatctgattcaacggctgcgatcaaattcaccaaccggtacaccccgattctaatctcgttcgttcacttatggatcgaaggccacaatcacatcttctaccccccagccaaaccgcaaccccatgatttattcccaggcgtcaaatccgtatcaaacggtccgcatgactcccccaccaccaacgcggccagacgcggcggcgccgccccgc

SEQ ID NO: 67443 - DNA, 696 bp, Zea Mays
taaataaggggcaactatcttcccagaaaaaacaagttatcagccgcttcactacagagaattaattaagttcagcctcgttgtaaataatagtattatcaaagagacctcgagatatagtccaacataaatcctgaaggtcaaatgatgaaaaaaaaggcagtccaccaaccacataatgcacgtctcatcaaccatggaacatgtaaaaagttgagttaagatataaaatgcatgcagatggctcatcatcaactattgtcttcttgtatttaactaagataaaccgcagggcgtcaactattgtcttcttgtatttccctggaactatctctatcagtgtatcttcatttaccaatttttgtttaactgagataaaccgcaggcgcagggcatcaagaacagcaagatatgacatggcaaactgttatgcaacgttttctctctctccctcttctcccaagaagtaggatttatcattactcatcatgtttatcaaggcatcgccttagcgtcgctttagcgctaaggcgcgcgcagaaagcagagcgtctagctcgccttgccccggcgtgtaaggcgtccgcccccgcgtaagtcgccagcggggcgacgccttaggggtaggtagggttttgagtgggggtttaagttaggtcgaccgcacgcgcgtacccatcggttcgggtcagagct

SEQ ID NO: 67444 - DNA, 421 bp, Zea Mays
ttgcgtccggggtagtccggttacgaagtccatgcctatttcttcccacttccattcaggtatcgggaggggttgcaataggcctgcaggtttttggtgctcggccttcgttcgttggcagatgtcacaccgggccacatactgagctatttctttcttcatacctctccaccagtatctggttttgaggtctaggtacatcttggtagtccctgggtggatggagtaggctgagttgtgagcttctttgagcaagacctcttgtgcttccccttttggtacacacagacaatttttgaaccaaagggctccttgttcatctgtcctgaggtccgggagttgttccttgcgggccctttccacaagttttgctgtctctgggtctaggcgttgagatttgcatatgaggtcttccagcatt

SEQ ID NO: 67445 - DNA, 651 bp, Zea Mays
cggctggaattcatcaccgtacacatcgatccgccgcaccgcgtgggtagattggagtactcctggaatcgcggtgagcaacctctcccctacatcgtacggttatcctctacgtgttactaaaattgattcgaagttcgtgcgagtgggccggattttgggcgacaccggccatggcgccaccgcgggcgagacgctctgccgtgctcgttcgccgtaggggagtagagatagatgacgatgcgatcggagccgtcgatcaacctaggggcggtctcgattagacgccgaccgtaccgcttcgggccatggttgggcaccgttgatctcatgacgaacggacatgattaaatgttcgtgtaccaattctccacgttaggtctggtccgttgatctggatcggacggatagaaatagatctagaataataacatcttcacggttgaattcggatccaatggttctcgtcgcgtaccgagtcatccgccgctagatataatcctggccgcgggattgagatctgacggccgaaacggtccataccctttcggttgtgcacattcacaaatgagcccctgcagaatacagaaactaacctgtcgtccatatccactgttcactgagtctagtgaatcttatgcggtggtccct

SEQ ID NO: 67446 - DNA, 512 bp, Zea Mays
gccaacatgagtatgatgatgccatttgaccaaatggcgtgaagccatcggtcgtgaggccgattcaaacattcctcggatcagctacaaagtcgggatcaaacgtgtcgagagccttccaagcatccccatctgaagggtgcacgattaggtcatcgttgtcgcagacaccttctttgtgccatcgcatgtgcatagcggttttttagatagaaacaactgtttcacttgaggagttagtggcaagtagcggagctgcttatgtgcaacatctgtcaacaccttgtcaccctcatcattaacaacttccacaaatctagattgtccacatttcaaacattttttctctcccgcatgctccttcatgaaaagcatacaattatttttgcacacgtcaatcttttcataatctataccgagacctttgataattatttttgaatggtacatgtctttaggcaacttattgggctttgggagcacatctcctaataactttaaaatctcattgt

SEQ ID NO: 67447 - DNA, 603 bp, Zea Mays
gcaaagcctacagccgtccgctgccttgtcatatacaagatcaccttaacatacaaatttataattttaatccgtactattcgttcaacaacattcggttgaacctgtgtaggtcttatttgggagcaggggattgaagagggacttcgaattgaaggggtttgagaaggattaattttgagtacaaagagatcaaatcatctctaattattttgcaaccgaacaaactctaagatttggttcaattgcgtctgcattgaagggattaaactaacatcggcaacggcctatgtaccaagtactttatatcgggcactaaacaagtaatttaccgatttatatctatcactcgacaatgaaaagacgctgtcacgatgggcagagacggtaacagtgtctttgccgagtgtaagtttcgacacttaacaaagaacgcttttgtaggatctagacgtctagtcacagtagctttaccgagtatctacgatcgagcggcactcgataaagaaagctgtcgggtagtgttgggtcaagattttcgcgggtcttttttttggtctgatcgtgctgtgtgctttatttacgcggccgtggcgaactatg

SEQ ID NO: 67448 - DNA, 682 bp, Zea Mays
ctctgaactacttcacatcagtaaaaactattccaatatccatattgggtttctcatggttgcatcgtcaaacctcacataatcaaccctaagagacctttgcacatatatactctcatcatcagaactgaagggactatgaccatcttcattaggttcatctgtcaaataaactcttgtattatcaattttggttatcaactttctagtaggctctttctaattttgtttgagttattgctattctagatcacatataaatcttcatcccttctttagttacccatgctccatattcttcatctttacatgtatcatatcttgcttcacgttcccatgcatcactactatatgagttctcactgtcatatccatcacgattgacattttttctaccatctggttttaacattccaggaggcttcacttcacaatgaacaatttacacacctttaggccctcgtgatcctacatcaattgctatacatgtttggcattatccatcaaaacaagaccttgtggtggtatatgaccaggtttcaaatagtacaaggtgacatttcctttgtaaccatgatacacaagattttcctacattacaaattagtcaaccccattagttccataaatctcatttaaaccgaccctgccaccagaatatccatttgcactaccatctaag

SEQ ID NO: 67449 - DNA, 353 bp, Zea Mays
tacgtgcatgtgcaacttgcccacagatgagttcgtcagaccgtgccagctgggattcgatgacaactaaatattcattgacctatgcatcattcagaagaaccttaataacttcaatagcatgggcttaactaaatatggatggcaacaagtgtatcgcagcttcagagagcagactggtcttgattatgaaaacaaaaaactgctaaacaaattgaacttgctctgaaggtctttccagcattggcaatacttgcagaaccatactgggcttggccttgactcaaggactggtgatatagagactgatgattcgtactgggggacccagaaaggggtacattgttcatgaa

SEQ ID NO: 67450 - DNA, 592 bp, Zea Mays
ccgccctctactacgcgcggtcagttgattgctgggcttgtctgcttcctgctgctccgatgtgattggccgtggatggggccatgggggtttagctgtatcaacgcgattggctctgcgctccatcccttggtgaaatctgttccgtgagtaatcttaatatctgtttaaacggatagctagcacctagcaggttccaaaatggttgttagtcttaaaaacctgttagttgctaactctacaaaacccaactcatataaagggaaaatagaatggccctaatactgttagctgtatgaaatgtatgattagatggttggtttgctatgttattctggttgcttctacactggtcattatctctgatcagtgttcaatgctggttatcgccctacaatctataattgccctgaggcttgcaatcaatgttctccacaagtaaccagagtggtacaaaagaaaacacgtgtattgatgcctgttatcttcgatcaatattctagtgtatcatttatttgctaccagggtcatatctgtggaaacatgctcaggtcgaggctacgtccacacagcacagcagccccgagctgga

SEQ ID NO: 67451 - DNA, 465 bp, Zea Mays
ttttgtaactcgagccaaagtgtcaagaatcttgatagggtactccgtgtaaatcaaatctccctgaacactgagctcttccataggtaactgtttctcagggacgcggagatacttcttaagttgagacacatggaatgcacataagatagattatcaggtagctcgagatgataggccatctctccaacttgcctaaaaattcagaatgttccaataaagcgaggggacaatttgcccttgactttgaatctcctcattccacgaagtggtgacatcttgaggtacacatgatcaccttcctcaaactccagtgacatcttccattatcagcgtagctcttttgcctggtctgagctaccctcaggttctccctgattatacggacttgttcttctgcctcttgaataagttcaggtccaaagaactgtcttcctctagtctggtccaaaaatagaggagtcc

SEQ ID NO: 67452 - DNA, 658 bp, Zea Mays
ctattgtccaattcataacctctaaccttttcattactcccatgatcacgacacctataaatagggtatgaatcctttccttgcaacgttgcatcgctaaaatctctaggataatggtttttgcatgaagcacgacccttagtgcatgggtatttaggatttagcaacccgcacggtccatgcatcatatgcttgataaccatcttgtacagttgggggtacttcttcttgttagggatctcaacgaagataaggagatcatactgatcggggcaagttagcttgtactttctttgcatgatgagtaggaaatgggcatgaggcaaacctcgcttctggaactccacgacaaagacataagcccggatttttccaagaatatgatgcttagtcaatctcttcttcagttcctctagttttggacggaatatgcgaacaacaaggtctagacgatcctatggtgactgcatagggagaagctctctggttatttcatcccaattggggttgcacgtcatagtgaggaatatgtctggcttcccaaacttccgcacaagggccatagaatccatataccgccgtctcatgtcatgagaaccaccgataaatgatgtagacagcacagttcgctttccaattttgtctgctctattctcgc

SEQ ID NO: 67453 - DNA, 453 bp, Zea Mays
cttgaagaaaatgtcaagaacttgaggaatgacaagaggaaggaacaaaagaagaaaatcaatacctctaccaaaagcctcaaccatgcctccatgcaaggtcacatccaaggtaatgatcaagccacacttcacactaagaaaagtaagaagtgtagtgaatgctttgaaaatgggcacttgattaggtcatgtccctatattaaataaaatggcttgattattaacaaggatgataaaaattgttttagatgctctgagaagggacatttagttaagtcatgtccctatgtaaaacaaaaaggcatagttttggaaaagaaaatatttactaaccatgtagcaagcaagaaacaaggaaagaagaaatcttcaaaacatgaagatcgtctttgctacatatgccgaaagaagggacatctatgtaaggattgtcctattggtaactattcc

SEQ ID NO: 67454 - DNA, 1585 bp, Zea Mays
ggccttccaagtctgcctgataaagcaaaaaaacttaacagccgagtttaagattacaaggaaggctctaaaggattggcagatatcattaccaaaaattgataaaacagtgagtgataacaagttgctatttgagtttatagacaatattgaagaacaccgcgatctttctattgaggaatggaacttcagagatattatgcagaacaaagtggctgaattgctaaacattcagaaaatttattggaagcaacgagcgtctatcaaatggatcactgaaggagatatttgctcgcgtttttttcatgcacatgccacggtaaaacacaaaagaaatacaattgcttctttgactgatgagaatgggataattcactcggagcataatcacaaatcaaatcttctttgggatgctttcaagagtagactgggatcttctgatttcttaggtattgattttgacctaacagaccttttaaccagaaacgaagatctccaatggttagattctccattcactaagcaggagattgacaacattatcaaatccctaccttccgacaaatcccctggtcctgatgggttcaacaccaattttattacaaaatgctggcacatcattgctcaagacttttatgacctctgtgaaaagttttatcaagaagaggtttgcctgagaagcattaatggatccttcattgttttgattccgaagaaggataatccgcaaaaagtgggagattttaggccaatttcgctactaaacaatagtatgaaaattatcacgaagcttctggcaaatcgactgcaaacaatgatgacacggttagttcacaggaaccaatatggtttcataaaaggaagaacaattcaagattgcttggcttgggcctacgaatacattcatttatgccattcctcaaaaaaagaaatcattgtgctaaaacttgatttcgaaaaggcgtttgatactttagaacatgaactgattctgcaggttctgactcataaaggatttggtacaaagtggattaactgggttcgaaatatcctacattctggcacttcttcggtgttactcaatggagtcccagggaaaacctttcattgcaagcgaggagtcagacaaggagatcctctctcaccgctgttgtttgtcttggcggctgatcttcttcagagtattatgaataaggccagacatctgaattttcttcagcttcctctgccagctagttgtgaacaagattttcctattgtacaatatgctgacgatactctcttgataatggaggcctgcccgaagcagttattctttcttaaggcaattctcaatccctttgcaacctcaactggtcttagggtcaattataacaaatcaagtatgtatccgataaatgttaaccctgagaagatggagatcctatcaagaactctcaattgtcagacaggtgcaatgcctttcacttaccttggattgcctttgggtctttcaaagcctagacttcagcagttcctacctttaatccaaagaattgaaaagagattgtcatgtacttccaattttctatctcaggctgggcgt

SEQ ID NO: 67455 - DNA, 837 bp, Zea Mays
atatagaaatttagataaggaaagttataaggactttcctcatcggccagcttgatccaaagagtagaatagaactgagcaataacctcatcattccaatcatattggaatgtcataatgttcttcatcctcttcctttcacaggccctcaaagcctgtgtcatctctgggtctccaattgcttcacatccttcccagttgatgtatctctgatgcaggataggctgatgcctcttgggaagaatcacagagttataaaaatcgacatgctgaagggtccagaaccgattaccatcgatcctaacatcacaaatacgtaatgtagggttttggaatcggatgtcctggagaagggcagacccttcgctggcagtgaaatctgtgacaggctcatttgcagatcgacgagcctccgccctgtgaagaaccaacccccggataatgggtgcgttggcagaaaggaggtcaacttcatcatccttgcatccgtcatcatcgctagttggctcccatgcctgtggattggccgcgggtcgagaccgaccagagggattccggaccgtccgaccacgtgcaccatgagacccttaggcctcaccaccttgcatcacatttccggatcctcgcccgcgcttggatctggaacgcgggggagtttcttcatgaatttcttgatcatcatcggagtcagattcaacaactgatgggttcctatgacgcaccatccttaagataaaaagagaacatatggtgagcgaggagatcgatgttcaaggattttaacaaacacgtttgagtaaagatgcatatgatattgagcatgcacttcaaccgttc

SEQ ID NO: 67456 - DNA, 494 bp, Zea Mays
tcatgatctatttctggatccgccactagagagatgttatgaccggcgtgcaatatgtgagacgccataagcgcgtcatagcagctagttagttgctattttattggctgatttatttagttgctattttattggctgatttgttgctgggttattgccagccggctagataggattagttggagaataatgtggagatctacctagatatagggaggttagtttatcagataagttagaaggggactatatataccagctgttaatattaatgaaagaggtcatgcagggcaacccttgccttctgctcccagccgcatctctccctgtgccgcagccctctacctccctctctcgctcacgcccaggccaagatcacggcgaccagatgccgtggtccaggcccttggccgcctactcgccaccacaaccaactccacaactcaagctctaccactctcagctaaactagtgatattttgttttgatatgtg

SEQ ID NO: 67457 - DNA, 751 bp, Zea Mays
gtaaacgaacaaggcctaaggctatgttcggttcggcggggatcgaccgggatggtggcccaatccacgtggatcgtcccggtggaaagttttccggaccacacttgtaactgcgttcggttagcccacgcggtattattcttcagacttttcccggtcattttcctgaagcctggcccgggaactcgcccacgccgcaaccacgtggaacatttccatatgaaggcgaggggaagggcgacgcgtgtggcttgtgaggcgacgacgacggtgcgctaaggatgatgcctgtgacctcaccatctgttgttcgtctccattcccttcgatggtcgatttctcttcggtaatcacgcccttgtccttttccaatctatttactgtccatgaacgagaagctcggagttcttgggctcttggcggttgcatcgacctcgctgggcgcgcagatgctggtccgcaacattgacctcactagacgcgtagatgcccatggtgtcggcctcgctggggcgtgcagacgtctaggcgatggccttgcgggaccgcgtggaggctcgaatgaccctcccatggcgtccagaactccagattgaaggaccccactgctagaaatttgaggtcgtattagtaccccatggaaagaccacctcaaatgaccttggtagctattaggaaggcagtagcgtactttctctaaagcattagacgcatttagcagctactagccaatgaagttacctgcaccttc

SEQ ID NO: 67458 - DNA, 449 bp, Zea Mays
gcacggtatggtacgtctctaacatttaaaaggtatttatggcaaccatatgttgcgactacttgcccttacttgctcaaaaggtaagttaacaaaaacaaacatgcctttctcattcatcagatggacactaccctccttttagttcccttgataacactatcattggcaaactcctactgagcaatcaacttgtcctcacactgaactattgtctttatcgctgcaatgtttacaaggctggctaagtctaacataaagaaacaaagagatgtcagaatacaaatatcagtgtaaaatctaaaacattagactcaaggcatgattaacatctctttcttaagatgaaaaatgtgtaatattgtatgcatattcaaaataccacttgtaaatgacaaaaggagataaatgaggatgcagctgctaatgaaaagaattaccagtccttc

SEQ ID NO: 67459 - DNA, 610 bp, Zea Mays
gttggtatgaggcccatgcatgtcgactttgtttgaacgaatggaataaacgcattccttcaatataagcaaagtacgtacgtacatgtggggagaggaagaccaagtcgtttggagtatgcggctgcctcaccctctgctgcaacatggtccctgcatcttaccaaaggtagaagatagatcgattatgaagaaaccaaaggggcgagagtcagagaacctccctaatgtacaatataaggaccgaaggtatatcacaaaaggtccccaaggtacgtcgtctacgtcagaggagtagtaaccttcgagaactcttgaaagttatcggcagtcagcacgggaagcatggaaaaagtccaatatgccgagcaatactgtggacatcttgtaaatgtagagtctaacgtacggttgtaagtgtggaagttgatactatttttttcaaccttcttccactatcatatatgccttcgtaatacttgtgaaaggctactgttctcttgatccttaaagccagcatcgagggtcttggaggaagcttttgccacttcaacagtttggctctgtcatcgtaaacactctacgagatccacaagcctctatcacaaat

SEQ ID NO: 67460 - DNA, 588 bp, Zea Mays
gcggattggatatggactctgaaaagggcctgtgcgagggaagattccagaaagaatacgaaagaggagaaccagcattcgaaacattgcccctcagcatcgaatcaacttgactcaacacatcctcctcagatattcgctaattagtaattcgagtggggtcattaacaccagtgtacagataagaaggttagactctatctttcaaaggctaaatattcttgaaatcaaagtcgacaacaacagcttcagcagtcaagcctctgaccctaaacgcacatatctctgcaagtaacaccctggactcagcaagctctaaatctttggggatctctgtccaactaggcgttcggacatcgggctgtctcccggatcgagcgagaagtgacttgttatgattttccatagtaaaccactcgaagtgccatcctttaatgttgtctttcaaaggaatgtcgagatactcagctttcctgcctccgcgaagttccaagctagcacctccaacaagctgatgatgtcctccagccatcccgggccaacaatggtaaaagtatttccaaagcccaaagtgtggaagaattccaa

SEQ ID NO: 67461 - DNA, 483 bp, Zea Mays
caaaaagaataacctccacttctcctctttgcaaaccaggtatcacactctacaccccttaaaaagaattcgacctcgaattatgacgcttctatcggaacgacaaaaggaaaaaattaatgaatcaacaacacttacccacaacgaaaagttccggatatttctgccgcatcagctcctcaagttcccacgtagcctcgctctcagactgattagtccataagaccttgacatacttaattgatctcttcctcaaaacatgctccgaggattccaagatacgcaccggacgatactccaaagtcagatcctgctgcaccacaattggttccatctcaatctgatggtccggatcccgcaagaacttcctcagcatagagacatgaaaaactgggtgtacccctgccatggaatccggcaattgcaagcgataagccaagctgcccacccgggccaagatagtgaacggtccaatatatctcg

SEQ ID NO: 67462 - DNA, 283 bp, Zea Mays
tagctgcacatgtggctgtatgtaatgtatgtcaaagagtcaaagctaaacatcagaggctagctggactgctacacccattaaaagtacccgaatggaagtgtgaagaaattggtatggatttcattatcgggttgcctcacaccccgaaaggttatgattccatatgggtgatcgtggatagattaaccaaagtggctcacttcattccggtcaagaccacttacaagggttcttagttggcagagttatacatggctcaaattgtatgcctacatggtgt

SEQ ID NO: 67463 - DNA, 622 bp, Zea Mays
gaacaaatgtaggaggagcccaaaaccatgctcgtaaaaggaggcaagcaccacgacctcgccgtcgcgcagcactggagtgttgccttcctcctccaggcaccaatcggagatcagtttcgcggggaaggaacccccttcccctccaagtccacgagccgagcacgggtgaggtgcacaaaggaaaggcatccatgagttacgataggaggagatcgctagggaggaaggcgagcaaagggaggaagacgaacagaggagtgtgtgatggccgccaaggaaggaaaaaggcagatgcttaggcacaaaattttggtaagcgtaaccgaacccaaatgccctcatgctctgttttatgcgtaggaacgagaaacccaagtggtgcctgaaaggtgggctccccgcgagctacctaggaggatccgccgctccaggataccgccgcctcggatgtcgagtggaggactgcgcgttttgttgggcgcaaaccgcatcggacatagcttcgaggcagcacgcgacaggagaagcgacggcaacggggaaggacggttaaccacccagtcacaccacttgagcacgaaacgcccaacgagccgttttgcatcccatcaagacaccc

SEQ ID NO: 67464 - DNA, 330 bp, Zea Mays
catagaggatcctaggataatgcatgcaaggggacgtcgtgcacagcaagcgaatcctgcatgcaaggtggggccagcgatttttaaggacgtagtggagttttggtaagtgcatgcaagcaggtggagcatagacggtgttttcccacttttgagcgccatccgcatgcaggcaggtgagtaggtggggcccacttccttttgattgcatgcagagcacacacgttggggagaacacgctgagtcgtgcgcctcgtgcaccataagcgctcaggattagcatgcataccggatcccggtttctatcttctacattgaaacttgaaaacg

SEQ ID NO: 67465 - DNA, 462 bp, Zea Mays
taaagggcgaacaaacatattcagatttggccctagatgctcggggcctaggatgactagtgcaaggaacatgaactcttctttattgaccaactcaggaggaagattatatggcacaatgaagacaggccaacacgagtaagggcttgcactgctattgaaaggtgtgaatccatccgtcgatagaccaagccgtacactcctagggtcatttgcaaattcgggatcaaactcgtcgaatgccttccacgcatcaccgtcagacggatggaccattatgtctggatcagtgatgagacgtacaccattctttggccatgtcatatgcagagctatttccttgttgaggaacaaccttgaaagccgaggaatgatgggcaaccgatgaagttgcttagctgcgaccttcataattaccaattcaccctcatcatttgtcacctcgacatatctagaagcttc

SEQ ID NO: 67466 - DNA, 626 bp, Zea Mays
gaaggagccatcgggttttccttaagataagccaagttagttcgctatttgctaggagataagccggaagagtgtgatcagcgtgtgcgtagggagtgccccatggttgtgtatataaggcctaggccctagggagaaccccatcattttcataccatcagcacctctccattcgggaaacaccacttgtaaacataccacacatacaaagtcaccctaggaagtagggtattatgattctccaagaacatgtagaaaatcgcctgactctctccctctctctctctcatgcctctggcacgaaccatcgagctacgatcaacaacaccgtcctacccaaaagcaccacgagggtacccctgggcgtgcggtcggacactagacaccgacacgtggtgagaattcctatgtcccattcgcctcgtgtgtagcatcgtgaagcgcttacttattgccgagttgggataccagggtgccgtcaattgatcaccggagttcagaagccgcatagatccaattcgcgccgtggacagattggtcgtcgcctctaactgcgataataagccccccatgttgttcgccttgccctcctttttgcttagcaccaactggtctcgaggttggag

SEQ ID NO: 67467 - DNA, 962 bp, Zea Mays
cccctataaaacgattggatcctcctataggcacagtgagagcatagttctcatctactatataacctcgaactcaagagcaattccatcttagcagcacataagacatagggtattacgcatctcagtagcccaaacctgtatatatcattgactcccaacatgctacgcacgaaccatcgagctatcgtcgacttcgtcgaccgcaaaatcattatgtagtatatctcatagtgtgttgctggtgctaaacaccgagaaaagcatttgcttccaaagactctaaactatgaaatatttgaactgttaccggttaggagctcatatggagtcttcttgagaagtcgatgaaggtagagccgatttatggcacgacaagtagtgttgactgcttccaccccaaatcgatctgaagtcttgtacttatcaagtatggccttgccgcaacaattagtgtttgattcttcctttctatcgcaccattttgttgtggtgaatatagagtcggaaatccatgcttgattccttcttcaagatagtccatcacttgtgtattttttaattcatttccattgtcgctccttattttctagattctcaaattgaactaattttaagcccttttcaagaatttcttgagagttcattgggtttcacttttatcctgcaagaaaaatacccaagtgaagcgtgtataatcatatacaataatgagaccatactttttaccattaatgcttaagtaggccaccagaccaaatatccatgtgtaggagctctaatggccttgacgtcgtcatgatgttcttggtgggatgatttgacccaacttgctttcttgcttggcaagcactgcatggcatgtctttctcaaaacaaacattggttagtcctatgacatggttaccttttagaagcttatgaagattcttcgtactaacatgggcttgtcagtggtgaca

SEQ ID NO: 67468 - DNA, 528 bp, Zea Mays
gggtaatccacattacgaggcttgcagcagcccatcagctggacaaacgaggaactcctcatcagggatctcccatcggaacaaggtagctaaagcctttatctgactgacggaaagaggcttatcaaattctctagcgcagcgatctagatcatccgcagaaacaggagcctctccatttttcaaccccagcttcaaacaaatagtgtgagccgttgagttcaccctaaggggaggaagtttggctacacgtcttgatcttcttggcacgaagttgggcgggatagactttctggctttaagctttggagatgaaggaaccggcaacacatttgtgaggggctttacgatcttgttaatgaatgtcatagccacctcctccactgaagttatacgactttgcttggggagttttcttcgagaatacacttgcaagatcttgcaaggctgctggaccagggtaggagatggccacataaagtccaaagagcagtgaaggttatcattctgctcaaaagacaaatcatc

SEQ ID NO: 67469 - DNA, 880 bp, Zea Mays
cgcccgagcctgccctcgggccaaggcgacactcggggaaatccccgtcctgcccgaggtcctctcttctcggaacaacagtttccgcctcggccaagcccatctcaggcaaggaggacaaccccgagcccggcctcagtcaaaggttgcgggaaccgcggggacataagcattcaatgtaaatacctgcccacgtgacatcgcaggcgaacaagagtgataggaccacggtcccatccactttcaccaactatgatgacgcatgcccggtaataacggctactgctcccccacgctgtctgccaactccggatggggcgcgcgtatggcacatcatggtctggccctcgggaagaaactacgcctcgcccaaagccgacctcagccttggaacaaactctgcctcgcccgagcccggcatcgcccacctgcaccctgcgaatcccacagaaggccagtctttcaactattccctacacgactgcgaaccccagagcaggctcggccatggcctcgggaagacttctgcctcgaccaagcgtggcttcggccttaataataccgacgaaaggacgctagatgtcatcagaagttgtagagctgacgtcggataccctacgtattgccaagagctttttgccatacttgtcactactccaaccactacaactcagacaactcctccatcagataggcttgggcacacgactgagcctcgggcattagcctcggctctctgcacagtcaaagatgcaaatacaggaaccggacatcccttcccggctcaagtcaatagcaagtacaaaggtcataccaaaggccataccggctacaggggcttggacacgcctcctctcccgtatacgacaagccttggtgc

SEQ ID NO: 67470 - DNA, 451 bp, Zea Mays
aaggtggcatgaataaattcgagcttgtaagattaccttatcgatttaagtttcaggataccttcaacggtccctgcaccgagtggctgcaaatgattgaggtgatgtgcgcaatgaaatactggttaattatacgaagaaataagaccaactaattactattgctttcaataatcggaagaagtaaaagatgaatcaggtcatggatacactgggatttgattatccaatctacgcgaagttcgaagaacaagctactggggtaaaaaggaagaggactcccagtattatgaaaagataggctgagagattagagaaggaagataagaagatgaaaatggtttcaaaaaaatgaaaggggattgacgaaggtgaatcttcgcagtcggggccaaaatcccctgctccaaagaagcgaaaatcatcgaagccggaccttgctagtaagaag

SEQ ID NO: 67471 - DNA, 1217 bp, Zea Mays
agaaaaggaagcgccctatcgggcgctagacagctcacgcaagtaggggaacaaattaaactatatatcatagtgtataagacaaacattttgatgcggacacaaaatcagaaagtccagaagtaccttaagattagtactaacaacaatcatttgtttggcaacagctcgtggcctgaacaaattatcgttacaaataatcacatataacaatcatttgtttggcaacagcccgtggcctgaacaaatactaataacaatgtcgcacaaggtgtaaactgagtacctaataataaaaaggagtactgaaataaaaatacagtggcactggaaaagatatgttgcaaggatatcaactggtatccagtaaaggtatcagcaaatgcagcaacacaagatgagaccggtcctggttactgactctatatttaaaaattaaaataggattggttgatgtatcggctcttgatttggaacttcaaaagtttggatatagtccttccattgcaccgatttcctagaatagtgaactcaatattttgctagctaatatgaatgaacattttttgcttccgcctgtccaaacaggccataaatctttcgctcagcatttgtccatttgccaactctactgcaagccccatttccaaattgctgggacgcttcacaaggggggaacacctctaccagtattgagtcttcaaattccaacccagccttgccatacaacattcaatgaactaaaaaaacatatcccattcagtttggcatcaatctcaacacgggagttctccagaatgagtatactgcatccctgtcgctgatcattcagagaaattcgttccaaaggggattcagcaccacgctgcaagaatttcatcaaacagtaagtcatagccaaggctaagcactgagccacactcctagatattctcagctctaaccacattgcaaaagcctcccaatatgacaaatcaaatacttgcaggttcatcactgtaattgtaacataaagatctggcttttctttctaagagaaaaatatatatacatatacaaccacatttcttccatggtttcggctcaacagcataaacatatttcctaccaggacaccttaaacaaacgcaacaggatacaactgccagctaaacatgacactgtgactcttcatagaatgttcgcctgcctacagtacgagcaggagaaacaaaaca

SEQ ID NO: 67472 - DNA, 578 bp, Zea Mays
gcagattacatgtaattgtgggaggtggaagatgaagttgcctatcaatcaatggagtgctctcttttttgtaggggtacttctacagccttatatagctgactgaagagacatcgctttatggatcattgagtccaatcgagtctactttctgttgctacaagtatgcatattctttcagtgcttggtttccttctccaagttatcgtctgagtgatccggtgctcggctgtgctcaagacacgtctttagagttcaggtgatccctctgcggacacgcaacgtaatccccctgcaggacacatgcaccatcggtatacacgtgcaatattcttcgagattttcagctatcctccgcgtcgtcacttcggttattatttgtcccacccaagcgaggctcactatgcgctctattaggcgacttatcaggggcctctttggtggcccatggaatgtatctacgccttagtggcccatgggacatctatctcccaaaatcccccaaggctcaagcgaattttcgaggataataggctcgagacaccaagaatgaactatgttatttgattgtctttaag

SEQ ID NO: 67473 - DNA, 469 bp, Zea Mays
aaaaaatctgtgaaggaaaatagaagtaacaactctcctaaacataggaacattcctattaaaaggaggggcttgcatccttatctcacccataacattccagaatgataggtttaatttggaattgtcaggggctgggcaaggatgtgaaaactgaattcttgaaagatatcattaggaaagaaaaaattgattttattggtttacaagaaaccaaatttttttgaggactcttggttgaattctattggtggtaatataaattttgtgtggttttggtctcctcctaatgggagatctgggggcttacttgtggggtttgatgctgatattttggatgtgagagaaaaagaattaggagagttcatgatccgaatcctggtggtacataaagaaaatggctttatttggaatttcataaatgtttatggggcggatcaagctgatcagaaacaaaaatttcttagtg

SEQ ID NO: 67474 - DNA, 439 bp, Zea Mays
cccaagtgtgctatgaattggattatatgttcgtgtgtgcttttcccaccttcaccagaaaattcagagaagtctggtattctagttccctgtggatacgacacggtgtcgaatcggtgactataaggcttccgatatgattgccctgtacctgacacactaacaccgagtttgtccctgaacaccccagctacttcgtctctgatcctctctgtcatgtctagcgaccatccattgagtttgtgggtggaaatctcaggttgcctgacatcactctgtcggctttcctcctagggatgtttgaggtgtgtgttaggtgtcctattaatgtcaccagctcctgccctatacctctgagactctcttgtggccgaacaatatttagccctatgtccatgaggtggtatggtatgattataatgtgttgctggtggggcac

SEQ ID NO: 67475 - DNA, 1874 bp, Zea Mays
ccaagaagactgctgtcggctttgggttcttacccatcggaacacaaggtgaggactatttatttgctgattgcacagtaaattggagttggtagtttactgccttggtgaagtgaaaaaaggaagaaaagtggaaattatttgtgtaccggtggaattgctagagaatgggagagaatcaagggattgagcaagttcttggtaagttggttgaattgctgtcagcaagaagggacgaagctccatcttcaagtaaggaaaatattgtccatatagaaccagttcagaagctagagctgatgccaaatgaggttaaactggagggggtaaagaattatttggcttggtctaggagagccttgcgattgttgaaagcaaaaagactcgagggctatgttgatggaactgtcgttgagcccaaagacaagccaagtgctgaatggaaggattgggatgctataaactctttggtagcagcatggatgttaagttctatgatcccagcaattgctagcactattgatacaattataagtgctgcagaaatgtggaaagcgcttgaagaaatgtattcgggagctggaaatgttatgttgatggtggagactgaagatcgcctccataatatcaaacagggggagcgaactgtggcggagtatgttcaggaattgcagtgtttgtgggctgatgttgaccattatgatcctattgagctaccacactcagagtgtgttgtttgggcaaagaaatgggtggaaaaaagacgtgtgcttcaatttttaaggggtctaaacccagagtttgagggaagacgagcctccatgtttcatcaatccactcttcctagcctacaagaggcaatagctgctatatcccaggaggagtcacgactcaaagtgatgagggaaagtcctccagtgtcatctcaccctgtgttttcagctatgagaactaaagacgctagagagtgttacaattgtggtgatattggacacattgctcgtaattgtactaaacctttcaagtttaaccgcgggagaggaagaggggctgctagaggtggtagaggttgtggaggtagaagttgggcaagagctaatgcaacaactacaaaagaagaccttgagatctttatggagaatgaagctgaaacaaagtcgactgagcaacataaaattcctggaaataaaaatcaggagtcctacactggggattttgtcaactgcgcctacacagatgaaggtaattatgtccatgctcttgtacccacacaaatcacacgattaaattggattttagactcgggagcatcaaagcatgtcacaggcacgtcaagtgagtttacatcatatatgagatatccccccacacgtaaagaaatgattcaaactgctgatggtactccacgacctatcaagggtgttggcacagtacaatgcacttcatctattaagttgtcatcagttttgtatgtgccaacttttcctgttaatttgatatcactaagtgctttggttgatcaattggactatcagattatacttgaccgagataattgtttaattcaggagaggagaacagggaaaagacttgggacagctaccaggcgtagtggattatggtatatgtaccatgaggagacaaatgatacaagatgcactatgttggcaacgaagttggaagagaaggaagttgtagtgatgcttttgcattgtagattcgggcatctctcttttgataagatatgcaaagtttttcccgatgtaatgtgtggggtggataaaagcaagctattgtgtgatgcctgtgagtttgcaaaacacacgaggacatcttatataagtcgaggtatcaggagtatatctcctttcgtg

SEQ ID NO: 67476 - DNA, 716 bp, Zea Mays
gttgagacgagggttgataaggctgataagccagaaactgaagaaacaacgcaagtgtcaaagattttgagccctcctgaaaaagccacagtaccaaaggtacaaatgggtactgccataactcctgggagaagaaggatggtgaatgtattagatgtactggagacaaccgactccataagactcactcccaaagaaagggttgctgaaattgacaaagctcaacccaaaactgatattaagcagaaagatgctgaagctacaataacccaggctgaaaccgaggcggggcccttcgtgcctgctgagacaaagtctgcagcaaacgagcagggggccgaagaaacaattccagatactaatataacttttgagaaaagtgtggtcaaagaaaccgaatcccttactcccaaagcactctccgaaggtttttattatatcattcgacatgcttcgggaaagagattatccgaagaagaaaattttgaagctaaacactatgcccgagagctgaagtatccgaagggggccttggtgtttaatggtacgaacgaggatgatttcttgtactgcctcccagacaacaaagaattatccgtttgtcgggagatgtccagaagtatgggttttccgaaactcgaagtcggcctttgtgccatgacgaaggacgatctcgcagatagtcttgcatacaacagtctgaaggtacagagatt

SEQ ID NO: 67477 - DNA, 862 bp, Zea Mays
ctccttaaaccgataaggcaaaaccttcaacacatcgctcttcgtctcttcatctctcttcttaggctttggcattctctagctagatagcatgggcaatgttgagtttctaagaaattcttgcaccagatcctgggtcccaatatggtccaccatagtaataaaagtcgcatgggctacctaggaagttgagcctaggaccatattgcacaaaggtttcttgtagtcaaatcttatcctcaagggactcatgacaataccctgtaatacttcccttttctttgtgtcgaccttcatgtaaaatcattccctggttcactcatttggccatttggtccggtacgcaagcataggagaccactaacttttcgatatgcaaagttgtagcagtcaaagttgttatgttgctacactttctcaatagcattcatttataatgtagctcatggattctacaaaagccttcagcgctcgccctcacaccctagctatgcactgcccaaatgtacacactcagtctaactatagcatttagagttaattgatgcataaagatttcatatttcctcaggacttcagcgatcattttgaacttctgaaaaccactatctcgtcatccttaggctctaggtggtgtcactactagcaaactgaaccccatccgtctcatcaacatagtcgagcttcttcataacatcaaaattgttgggcttcacagtggattccccaaagtcaatatggctcggttttgttggttgaaggtcaatttcatcttcgtcagttatcgaggcatctccctccccaatttattcctcttctgctactttagtctcagttgttgccttcatagcttttaaaattg

SEQ ID NO: 67478 - DNA, 590 bp, Zea Mays
atttatcttgccgaggaacttctgcacttcaagcttataggtcggaggtctcacattctgaatggatttaattcggtcagggtctatctctataccatgttcatgaatgatgaatcctaagaacttaccagccgacactccaaaagcgcatttacgtgggttcattttcagaccataccgacgcattttatcaaaggcttaatcagctatatgagaactaaactcagccaatttgactacaatatcatcaatgtagacttccatagtgtttcccaacaactcgtgaaagatcaaattcatagccctctgataagtagcaccagcgtttttcagaccaaatgtcatgacaactcactcaaataaaccaatgaaacttggacatataaaggccgttttagacgcatcttcttcggccatgaaaatctgattatatccggcattaccgttaagaaagctaataattctatttcctgcgcattattgatcaacgtgttggctatgggcatgggatattcatctttaggagttgctctattcaaattgtgaaaatcaatgcatactctgagcttgcatgattctttcttctccac

SEQ ID NO: 67479 - DNA, 398 bp, Zea Mays
caactagccagctagttacaatatgtttggatggatgtactaaatgatgcattcattgatggattattctaaatggtattgatttagaacatgtttggtgattaaaatttggtagagagactaaagtttggtccctactttgtttggttataaggactaaaattgttcaacaatcattaaatcacatgtaaaaagactaaattaccctttcatgtaactactcatctaccatcgggactgcaataaatgaggggcaaaagaagtaaaactaaccctttagttccttttagtcatcttatgagggattagagtctaaacagtccccttttagtccttatgtggcaaaatagggactaaattatagcaactaaagattagtccctggaatcaaatagtcc

SEQ ID NO: 67480 - DNA, 383 bp, Zea Mays
taggatgttctgaatatgtcaagtctggctctaggacaacatctgctatttcaatggttcgatctggaacccaaagacatttcttcaactgagacacgtggaacacattatgtacagcagacaaggtttcaggtagttgaagtcgatacgccattggcccatatctttcaagaatgagaaaaggaccaatatatcgtggtgcaagctttcctttaaccccaaaacgtgatacacccttcattggtgaaactttcaggtagacataatctccaaccggaaagtataagggtatccggtgtgtgtctgcgtaactcttctgacgaggttgaactttcttcaaattatgaattattcgttgaaccttcgcttctgtctcctttacc

SEQ ID NO: 67481 - DNA, 293 bp, Zea Mays
attttgaatctatctttggaggcctgtccccgtcagatctggctgacgacaagatcgagagtagaggatgtcgaagggagaggataaaggccattcaacacggcatgcaaaggagtgtggtccggtggcacaacatatggggtagaagtggtccgacgatgaaggagaagcttgtgtcacgcgtgttggacctagctgcatcactgtgcgagaaagtggaaaatagagcgtgccgtacctggctacctcactatgtggaaaatgggaaaaatgagcacgtgagtgtgaagaaa

SEQ ID NO: 67482 - DNA, 1306 bp, Zea Mays
cgtataagcattgatattttcctaaaatttgttggacaaccagctgagaatcaccaaatacttctacatgtgttactcccatataattcaaaagttctaaaccgatcaagagagcttcgtattcgacttgattattagtgcaatgggttttcaattggctagagaagtcaaaagtggcattccttggtgaaacaagcacgatgctaatcctttgtccttcattgcaaaccgattcatcaaaatacaaagtctagggactaataatgagatatgacatatctatctcaagagtatcatcaatctgatgctctacaacaaaatcagctatgacctggcctttcatggatgccaaagattcataggccaaatcatattctataagtgcataagcccatttaccaattctaccactcatgattgggtttatcagcatatgtttgattacatctgtttgacacaaaactgtgcaagagctagataggaggtaatatctaagcttggtgcatgcataaaacaaacatagacataatttctcaataaaagagtatcttattttagcatccaccaatcttcgacttagataagttatgtaatgctcctttcccttgctctcctaagtcagaacaacttcgatgaccttatcttcagctgcgacatataacctaaaagggaagccactctttggtgctttcaacactggaactaaatataagtaatcctcaataagatcaaaaacatgatgttgctctgctcccaagtgaaatcgacattatccttaaatagaagaatgggagtaaaagcatcaaccttcccgacaagattagaaatgaatctccataactaacttattttgccgagaaacctttgcatttcaagcttactagtaggtgctcctatgttccgaataacctttattcgattgggatcaacctctatgccatgttcatgaatggtgaatcctaagaattttccagccgacactccaaaggcatatttgtgcgggttcaattttagcccatacctatgcatcttatcaaaggttttgcgcaaatcgactagatgagaattaaatgcttccgatttgactactatatcatctatgtatacctccacaatgtttcctaataactcaaggaagatcaaattcgtagccctttgataagtggcactgacattctttaacccaaatgtcatgataacccactcggagaaaccaataatgtctagacatataaaggtcgttttggaagcatcctcttcagccacaaagatttgattatatctgacattcccatcaagaaaacta

SEQ ID NO: 67483 - DNA, 1211 bp, Zea Mays
ggcggcaagcagtgatcgtttgtgttgaaaccatgcatggacatggctgttcagctactgtaatataataacgtgtgtgcgtaccagtggactgtaacgttgagcggagagtggttgatgacgtggaccagcaccgtgtcgccttcgttggcttcgatcacgggaccgggtactccgtccaccgccgtgatgcttacattccccggctggcagatgcgcggccaggatatcgtcgccacctgaaaaattgaaggataaataccatgctatatgagatgagatagatgcgcgacctgcagaccttcagttagtttatctgacagtttgatatgtgtcaggtgcagggctaggaataatgctcatatacgcagatccgtgcagttatattgacaagctaattataactgggatgagggtctaataaactgaaaaacaaaaccgtgacgagagcgagagcgagagcgagagagagtacattgaaggtatgctccacagtagcagcttgagcgaggactgcagcggaacacaaaactagcagtaggatcatccaagagcgcggcatgctggagaactagagttctgcaaggccgcagcgcaaacgctcagtgtctgcacttggcacagctagctgcaagacatgcatggaaaactagcagctattagctactagctagctagagatgagtcgaccctgcgatgattgcaacaagtgcaatacaaatgccctttatatacgtgcctgagttgacacagtcaggggactgggatgttttctgactcatgcgtgatttttctgtcacaactgtaagattgtcaccgttgatgatggcaccgtaccaccgtaagattgttctgatgctgaacaactactcctgaactactacttcctagacttgacctgcgcatgcatgatgccttgtgcagctgtgctttgcttactccccagacccaagccgtacttttccttctcaattttgtaagtagcacatatttctggagagacttgcacatattctgtcgtcgcagacttatgccggcggttttgttggttcttgactagttgtttcggatgatggtatctgtatccacttttacccccaaaaatcaaatacttcagctctatcagttacctgtaaccaacagtgacaggcttgtattgcaaagtatagttttctttttacaattaactctcaaaaccgaaacaaaatttc

SEQ ID NO: 67484 - DNA, 432 bp, Zea Mays
tgacttagttataaatgaatgcgatgctccagagtcaaataaaactgaagcatgtatggagttgataagaaacataccatacaccacgtcagcatcctcagggactgattccactgtcacgtgattaacccttcctctattctggttctgcggcgttttgttctgcacagatccacgagcgggtgtgttctggtcagttctctgtccgctgttgttctgaggtgtctgttgattgcgccttgggcagttgttagcataatggccaagttcaccgcacttgaaacaaccattgggttgtactggtgcgttgttgttgcttttggcctatatgtttacggcgccaccttgacgagtctgcgaattactaccaggcctttggttggtctgagagctgttcctctgctagttctgagcttgattgcttctctagcc

SEQ ID NO: 67485 - DNA, 649 bp, Zea Mays
aatttacagttagcatggatttcattgctgtcagcaatggtgacttgctttaccaggtatgcgttcagtcttgatcaagagatctggagggaaaatattaatttccttgtttttgaagaactaacttttgtgaagtaacaaggaagctcttttagctttaatacacttggtattacagttcatttcttttctgtgcatgttagttatgttctgttttctgatcttagaaggtctctagtaaggaagatccttaaaaaagaacttatgtgtataaattgaacactccagttagtgcacagtggatatccttggttgttggcgcacttgaagttcttcctgacagaaatgacataaatgtctcacacatatgtttatcccctgctttggcaaagcttcagaacactattgcatttttccacaatgcatacaggtgccgatcaatctttttttttctgtgagaagtgcttagattggtgttgattttattagtatctcaataagcttattttttaattgatttctgaaatttgcatttcttttgcagctgttatgatgactatctttctgcaccatttcccttaggtttatacaagcacatttttcttccatctgaaatgacaatattaccagcaagcttaggagcctccac

SEQ ID NO: 67486 - DNA, 383 bp, Zea Mays
gagaagtactagtagatcgcaagaaattgggcggaacgagaatggatgagcagagaaccagagatagaggaggcaagtagaagcaactccactatataaataaatatacactgcgcggataaattaacgcaaggtaacagaaataccagcatgtttcatgatgcacgaataaataaaacttcatcgaggatgagaagctggttcgttcgaggacagaacatcaccaatgattaaatacctggataaccctagaatactccaaaatctgctccaactgcaagaacagtactccagcatgactaaagaattgaacaccttttttttagacgcaataattccgagtatccaaacacaacagctacaccatgcatataaaaaccaga

SEQ ID NO: 67487 - DNA, 506 bp, Zea Mays
cacactttgccatttttggtaagcctccctcctataatcacctttgtgtctttggctacaaatgttaccctaacctcgttgccacaaccccacataagctttctcttcgctccaccctttgtgtttcccttggttactccactcatcacaagggttatctttgtcttaatcggtaaacaaattagtttataatttcacgccatgtggtctttgatgaaaactcattccccttctccaaggattcctctcccccacacgtgcatccttttaacttttagatgattcacctaacatggtgtcggttccttttgagcttgtcactgatttttccttttccacggtcttcattactggagccccgatatcgtcatttggttctacaccacctcctcatgctctggcccttgctcaggcgctgaagttgggatccctcgatggtctacctactccagccgcccctacgcaccagtccagtggctagtcgaccacccggccgacatctgtcc

SEQ ID NO: 67488 - DNA, 610 bp, Zea Mays
gtttctaaggatttccccttggcgggctccgaaggcccagcttcagtctcagcctggtgctttgtagcttcggctttagaggctgtcgtctcaatttgcgcttttggagcttcggcaattttcttcggagtagaggttgaagactttatcgtctctaacacatctagtacattgaccatccttttcctcttcggagttgccgtgaggtctttttgcgccttcagcctgtcattcctgccggagggcttgtaacttccactatctttgttttcgcggtctctatttctttaatattatcggccttcggcaatatagccagctcttcattcttctgagtaagagaaggttctttggcttcagtagcagtagaggtctcaccaccaaattcgggcactgaggccggttcgatgaagcgtggtcggtgagtaaggaccttcacccttttcctctttggcgcagcctcacttagagcaaccgaagtatcaccatttccagaggttgcgctttttctcttttgcccattcagcaggtagcggtaatcagggtacataaacccaatagcatagaaaactctattcagcctcttctttttctgccctccgaaggtcgc

SEQ ID NO: 67489 - DNA, 1124 bp, Zea Mays
caggatcataaagccacccacaatcagctgatgtgagattacttcaataacttgtggatctatcattcactctactttcgtcgaatgcaccacatgcagactctttctataaatctttgacagattaggtgaccattccccctaattcactcgtagagtcatgaactcaaacacagtggtttcttccctcgccaaaaatacatcgcttccctctacatgctcgcctacaataatgttgctaactccatcaataaatatattaaaataaggaaacatatgatcttagagagtcttgagcaattctataatggtgttgtttcatgttttggtgacaagtatgtataatcgttgtcccactgttggcgatcttaagtatcttttagctaaagggaagagatggatttttgggtacataggtagtacatattacatgcattaagtagaaaaattgtctcgttgaatggaaagagaagtttactttgggggacactggatccctgcccataatgctcgagacggatgcctcgtatgacttatgaattttgcatgcttttttatagtagggtggaacaacgatgtcaatgcgctcaaccaatcgttgttattcattgatgagctcaagagagaaacatcaaatgtgaagttcatgatgaatggacatagtataactaagagtactacctcgccaatggcatctagttctagtggtcagtgtttgtgaagaccattttctcctatagactctgaaagcagcatatgtttgttgcatgccacgagaggacgtacagagatcatttggggtcctctaggattgcttctatattctcgctagcctaggtcattctttttcccagcaaatacttagtgtgatcatgtgtgcatgtatcgttcaacacaacatgattgttaaagataagcatgaaaaaagcatatgatatggataactatgagatagtcgagtcctccattgtagcaccaaccatcatttccatgcacccatgagatttatagacatcattcaatgtgaggccacaattcatgctagtatggttcatgaccagcgtcaaaatgatttaatggagtatatctagaatctacattttggcaattagattttatttttg

SEQ ID NO: 67490 - DNA, 531 bp, Zea Mays
gtccaagtgagcatgcgtgtgtgggtgttggcgtgttgccgaagagggttaaaggcgtgagttgaggagagtggagggtaccgaaagttgtaacaaattattattctccagctactctctctcatcaacatgttcctcatgttaacgctgcctacctctctgaatccttctccactattagtagtgtaacatctggtatcagattcatcgattctgggtagttcgcgctggatcctgatccggccacgactatttcactcggttgcagcgtcgtcaaggtgtcatggatcccaataccaagttgatcctggaagaaattctctgcgctggatctgaagtgggagcgcaagttctctgagttcgcaactaggaaagaggctcgcctggggagttggaagcggctagagcgtacttgggggcttggagacccaaggtcgacgtcgccatggatgatgtcaagttggagttacacaagttcaacaagcgtgggatcgtacaacaatggatggctccatagagcctccgttgttg

SEQ ID NO: 67491 - DNA, 392 bp, Zea Mays
gtacgctataaatgttgcatatatagtatatctagaatggcgtaaaacattgaggcattgtgcgtaagaagttgtaatgttgttttgtattgaagttacactcctacaatatcggtatggttacggaaattatggaaataccctggaaacatgggtgcggttacttgtttagagtatcatccgtgatttccttgcattcgaaaaaaatatctgactactggagaactagttggcgatggagatgtccggctctggacaatcgccggcgatggtaggagatggcggtcatcttggtccaaacactgagggatttgttgatggtaacttaatggttacaccgcctcctgctctacgggggcctgtaatcgacgcttcaagcatgggggatgaag

SEQ ID NO: 67492 - DNA, 713 bp, Zea Mays
ggagtacacttctggcaatcacaagtccaagggaggattcaataaggatgcacttaagaattgtctccagaaggccaagatcaaggagtgtgccttcctcgcctccctcatcgaccttgaccatgactccgaagacgcatcgtcttccttgagcaacgaggagtctaattagcgagtcgaggataagctaaacagactctgcttcctcaccgacactgcaggcggtctttgcaccatggcgcttggtgatgatgcgatggacatcgacgactaggagatcggtgacaacactacttctgaggtactaccttccgccgatgatctcgctgctgaggtagaagagctaacactgcattggctagtcatgataagttgcttacgtaggctgctcgtgagaggagagagtttagttccaagtacgagagcaacttgagtcttctcaagcttcagttgtggtgtctgacgagactgaatgtgatgagtgtgctctttccatgtcgaacatcaccactttgcagaagaagtacgctaccttgctagatgagcgcaacgaattgagattgaggtctagcttgttgggtgcaccgtgcatgtattgtttgtcctagcttgtagaccgagctagcagagagagagagagagagacgctaggatagacttgcttgagaaggctagctcagtgagtgcccttgtacctacgtagtgtgcacttt

SEQ ID NO: 67493 - DNA, 717 bp, Zea Mays
cgagaatcttcactggcttttcccggtattggagatccttttgaatctgaattacatctgcctcgatgtgggtttctggtacctttaggcatttgcggagttgagacacatggaacacattgtgaatatctgacatggattctggtatctcaagacggtatgctgcgggccctattcgagaaatgacggggtagggaccgacgaaacgtggtgccaattttcctttcatttggaaccttttgacaccacgcatcggggagaccttgagataaacgaaatctccttcctcaaatctgagttcccttcgtctattgtctgcgtaactcttctgtcgactctgagcttcaagtaacctcctgcggatcaaagcgaccttctcttcggcttctttaacaaagtcgggtccttctagtgtcctttcccctacattggaccacattaggggagtctggcattttcttccatacagtgcttcgaatggtgacattttgatgctggcctgatggctgttgttgtacgagaattcggcgtacgacaaactggactcccaatccctgtcgaaagttaacacgcaggctctgagtaaatcttcgaggaccttgttgactctttctgtttgaccatctgactggggatgataagcgatgctgaaatctagcttggtgcccattgcttgctggaggcccttccaaaattttgaagtgaactgcgttcctc

SEQ ID NO: 67494 - DNA, 425 bp, Zea Mays
tggaattcatacaagacataatattcagattcggaataccgaacagtatcataactgacctgggatccaacttcacaagttcagagttcttcgatttctgtgagcaaaagaacattcagatcaagtacgcttcggtagcacacccaagagccaacgggcaggttgaacgagctaacgggatgatcttagaagcactcaggaaaaaggtcttcgataaaaatgaaaagttcgtaggaaaatggataagggagttgccctatgtcgtttggagcctaagaacccaacctagccgagctctgcatggaaacactcctttcttcatggtctatgggtcagaggcagtattactcgctgatctcaagtttggggcgccaaggttggtcttcgaaagcatagcagaagccgaagctactaggctggaggac

SEQ ID NO: 67495 - DNA, 501 bp, Zea Mays
cacatatgcaatgtcaggcatgttaggcctagcggccaagtctttggtaggcagtggggtcactaatgcaggcaccgtcactagatacatttgccttcgtgtccactagggtcacacatggattgtagtaatgtatgcaagtgcactccaagatatctagggcatgttgacaccactgaaaaatatgtcatctaggtaacgctcaacaaaaatccctagaaagtggtgatgatgacccaaatccttcatcacgaacacatgctgaaggaccataatgatctagagtaggagataggaaaaagagatagttcgcacaatatcatcaacatacatgaggaggtacacaatgtgacttccatgctaatagatgagtagagaggtgtcagacttagcctcaacaaatcccagggagagtaagtaagtggctaacatgttgtaccaagctctaggagcctactttagaccatagagagacttgttgagcttgcaaaccatgtcagg

SEQ ID NO: 67496 - DNA, 567 bp, Zea Mays
gtgcaacctctcctggcgcgctaacctgtgagattataggagtcgcgagtgggttttggtgagtggatgggaaagggttgggcgcgggttacggtctgaggcgctcggtcaaccgttgcggcaaagggaggatggccatggctatggcgggtccgccgtcgggcacgtcgtcgacggtaccctagtgtctccccaaggaagacaataggttgatcgtttatccagtgatcggtggctcatatcgagcgtacgcaccgtgtcggcgggagttaatcatagcctctcgtgcatgatcggacgacatcggttagagcagaggtcataaaaatctaggtcgtcgtatctgatccaacgacccctttgcataccggtttgggttggagtccagtctaatcagcgccataaactttggatcggacggctgcgattgctccatacccttttgaccgtgtccattttattaaagagaccctgaagaatttgggtattaacccgccgtccactggaagcgcatagtaatttcagatgtgcccttaaatttatggaatgcaccccgaaatacctgat

SEQ ID NO: 67497 - DNA, 1494 bp, Zea Mays
tctgtacattaggccccctatgatggtgtaatgggtcgactgcctcacgatgcgctcagctgcagccttgtcatccggctcttcttcattttttatatatctgatgctaggctatctctagtagttggggtttgactctggttggctcaaggtgttgcactcttccgcctgacctgaaagaatgcttggtcatgatatttcttggacgaagattctgggtggggcctgggcccgactggatcccagtttcgacaacgcgtctgctgctgtgttgcggtctctttccacatgatggaattctaatcctttgaatttgtcctctagttttcgcacaaccgcgcagtacttgcccatggagtcagtcgagcagtcccattctttatttatctggcttatgaccactagcgaatcaccatataccatcagtttcttgatgtcgagtgatacagcgatgcctaacccgtggatcagtgcttcatactctgctgcattatttgatgctggaaatagtagctagagtgcatacttgagttgttctactccaagagcaataaagagaatccctgcacccgctcccttcagcttcaacgagccatcaaagtacattttccactcctcgataacctctaggctatctgggacctgatgttcagtccactcagatacgaagtcaaccagtgcctgagtcttgattgtcgtgcggggccggaactctatgtcgtgagctcccagctcgcacgcccacttggctatccttccaatagcttatttgttgtgaagaatgtcccctattggaaatcctatgactaccatgactttatggtcgtcaaagtagtgtcggagtttgcgcgcggttagaagtaccgcatacaacaacttctgaacttgaggatatcgtatctttgaaggcccaaggacctcgctgatgaagtagactggatgttgcaccgggtgcgcatgtccttcctccacccgctcgactactaacgtggtgcttaccacatgagtcgtgcaggagatatatagtagcagatcttctgccggctgatttggtgcagctcggcgtggcggcttgagtactggtggtgtagtcaagaactttttcagtccttctagagcttcttgtgcctctgtggtccactaaaacttgtccaccttttcgagcaacttgtagaatggcatgcctttctcgcctagccttgatatgaatctgcttaggactgccatgcatccagtaagcctctgtacctttttctgtgatcgtggcgcttccattctcatgatggcctcgattttttctaggttagcttcaattcctcggtggctgacaatgaatctgagtaacttccctgctggtactccgaaaacacatttttttgggttgagttttcaccggtaacgcctcaggctattaaagactagctgcaaatcttcgatgaagctttatgagttttctgttttgatcactacatcatcaacgtaggcttccacccg

SEQ ID NO: 67498 - DNA, 567 bp, Zea Mays
tgctcttaattgattttgtagttcatgcatataggactgaggacataaatgtaattgtcacaaagctgtatcccgccactaaaaataaatatacattgccatgcacatgatatagattttttttgggggttgagatttgaatcgctctatcttcgaagctgtgatctcgtcacctttgtatcgttgcttctatctacgtaggtgtattcgtaattattcataatgaagaagaaagctacaaagagaacacaactgtaactgtttcatatatgtactttcattttatctaaagacctcttactcttataatcttattcctctaatctatctcttgaataggttaaaggaacaaaggtcctctattaatgattatgttgctctgttttggtctccctttagaaatcagagtaggtgaccaaccttggcacccacctccggtgaatccacaactacaaacacatcttcgtcatgccaacgaagaagtcaacacctgttggtcctattcttactcccatagaccaaaactgaaatgaagaagagctcctcctccaagcacaaaacaaaaat

SEQ ID NO: 67499 - DNA, 594 bp, Zea Mays
cgaagaacccgaccgcggttacgacggcgtagggggccatcaacgacgacctagctggggacgacgtccgtcggcgcagctcagccacgcccgaccccttaagcgcgacggcaacagcaagggcggcactggtaaaaatcaatattttaactcttgcagtcggctcgggtctttggtttccgaagccttttctgcttaacgacttgttagatcatttttgctacgcacgacgtcgactttagctctactttcgctgctgttctaggacctccttagtccttattctgcacacactcctgtgaaacctcactctgactgcatggaagccgtggccgcctatatttcatgtcgcgaaaaacgcgggctttgcctgtactcagtaaaccctgtcacagttaacacagcagcctcgctggcatacacgtgcatggaagctaatcgtgttctatctatcgctgccttatttggcaatcgacgttgcgtttttatttttacatgtactctgggaacggattgatttgatgtacaggttgtattcatttcttccctttgttgcggtgtccgcatggctcgttatgctagttcctgattcct

SEQ ID NO: 67500 - DNA, 910 bp, Zea Mays
atatttataattcaaatatatgagtcctcctaggatctcatgacggatcttcagaatcctattaactgcatattttaattcatgtcatttgccagatatattacatagcggaacagtggttattcaacacatatgtgggatgggtctctcacaagaccacttgaaccatcacattcaccacacattatttcaatagtgcccataaatgtccgaacttcaagctcgtgactttcattttgcgattattggttcagcctcgattgcatttatcaatgacccgataagagagcttcaagcactcgtgcctaggactttgttttggatccatttgcaatctagagaggcaagatagatgtcgacacatttgtctcccacatttaataatgatcttcgtcatttcccaaaaacgaaagattcattgttccgtattcctagcacaatgatattgcgcgcattgctaggaacttcatcatcaagatgaaccttttcgtgaggcaaattatcagcagggcgagttcatcggaggagagttattacagaccacgtgaatctgcaatcagaacatatgctttgactacggccgatggatcatatccgtaggcgtccccacagaatagatcaaatgccaataagtcaaatgtggatatgatattaatcccgggtatatccacatctatatcaggtagaagcattcaaaccaatatcgttaatcctcaacgatttctggcaaactccatatacacaggagtacacaccgaacgacaggttcagtttggcttatgtgcgtttaatagaatattgaggcattacactatatgtgcattcctccccctaataccgagatgttctaaaagtatacatataaaatccccagccacaatcatctagtttgtggccaatgtatgctatt

SEQ ID NO: 67501 - DNA, 511 bp, Zea Mays
ccatattgatgttggtacatatatgtttctatgagaatcacactaaggcttgattgatcttaacactcatatctagatgacattcaagcaaggttcacaatattgaagaaatgatgctcaatgaaatgtgacttggatacagtctgatagggtgaagacaagcaaagaaagggcttcgagggactaagcgaggtgaaggacaagcaggtggcttgtggaccaaggtaccatggctaaggtgaagaagaaaatacttgcaagatgtcgatggactaatcagattgtgaagagtcatacagtgatgaagatcacaacaatagaagacatgattttaattcatcggtttaattcatatgtgatgagatgattcaaatcatatgacacgggggttgctagctcaagacaagtgaagaagcatggtcacaagtccaaggaagaggtatcaaataaagaacctggaaaaggctcatagttatgcaagactttgatagaaatggccaaaaagtaaaag

SEQ ID NO: 67502 - DNA, 929 bp, Zea Mays
gcatagagatcctcagtgatttgaaaaatcaataaagactccctatgcactataacttgtctggctgacaatcgcacttaagcccctctcctttctctccttcgcaagatcgagtccccgacggtgaacgacggcgtgcgcgctccagcgaacctgtaccggccacaactctcaataattcgtgctctagttcagtctacgcctaattccacccttggcgatccactgggaaacactaatttaacccgaacaccactcaagagctcgattcacacaaacccgcggagttgtagacattcctgacgcgttcctaatgttctagtgtggtatagcctaattggtcgagccgacgagcatcacaagcatgcgagagtgctgaaacacggacagggaggacgagtgcagacctgagagcggctggctacggtggggtgacatacggtggcgtagacgaccgatttgggggaagaacgaaattctccggctatggtggctaatcgagccgacgagcatcacaagcatgcgagagtgctgaaacacggatagggaggacgagtgcagacctgagagcggctggctacggtggggtgacatacggtggcgcagacgaccgatttgggggaagaacgaaattctccggctatggtggctaatcagaggcgggagtgggtgctctgggttcgtgataagctaacggagctgactgtgcactcaatttatagcagctggccacggttgtctggaatttgaaggagatttggatcacggtggtgataggatgttgcactggtgagctcgtcgtggcgttcaatggcactatgactcaagggcggtaactcttagcttgccacggcttcgggtacgtggtgaaaggacttcgacatggcgcaatcacggtgaacggtgatctccacggcgatgaccgcccg

SEQ ID NO: 67503 - DNA, 327 bp, Zea Mays
aatgattgtctaaagctaatggaactgatcatatagcttcaaaatcaacgtccttgccatcaaccactttaagggttcttcccttttctttgagactttgagacataaggaatcccaacaaggaattagtaacatgtaccgtggcacctgaatcaatccaccatagactcatagaaaaatcagcataatgtaatttcattattattacctttcttcttacccttatagttcccttgcccattgttcttcccatgcctacataattaacagcatgccttcttttggccttaagtctctcctcctcttggacacacatggcgatcaaat

SEQ ID NO: 67504 - DNA, 796 bp, Zea Mays
tcattgaggtcctcactagaagcctcaagaaccagcgcccgattggaggaagacctcaggacagaatgggagagttcctaaggctcaagcctcccacgttcgctggatctagcaacccgctcgatgttgatgattgactgcgcacggtgaagaggaagttagaggctattcgatgccctcaaaaccagcgtgttcacctagctacccaccagctcttcgggatggctctatactggtgggacaccttcagcgctgtagtaagagatgctacctgggcagagtttgaggctgctttccgatagcatcatgtgcccttgggaatcgtccagctcaaggaggaggaatttcgggagttaactcaaggagggtgatccgttagtgaatacatccataaattcatagaacttgctcgttatgcacctgatgacgttagcacggaagccaagaagatggcccgtttcttgaaagggttaagaccagaactcaagaccatccttgccagccaagacttcctcagtttctcgcacctctcgaacaaggtcatccaggtggaaagagcacgagaagaggaaaaaggtcacctcaagagaaagtttgaagttcttcgagctcaacagcaggacaggcaccagagggttcaatcttttgggttcccttccaaggggtcgaacctcagcaagccagccggatccactccgtcacatttcaactagcctggtcaaagttccttccacacccagtctgttgcaagcagccaacctccaaccaatgcttgttgacattgtggagatcccgg

SEQ ID NO: 67505 - DNA, 872 bp, Zea Mays
accacacaaaaccttaggttaataatttgcagtgcaaataaactgggcattgacttgccaaacacacaccacagattgaattgaagagcatgagtgatagaggggagggcggccgagagggagctactacgtgtgcgcgtgtggaaaagcagagctcgcagtggtgattttacatctttacagctccctttatgtgtgcacggactttaaccagttttttcccccgctaatgctctctgacttctgacccggcccagcgcctctcgctctcctatctctttctcatcctctatggctagctaccccttctctttccctctctcttttctcctctggaaaagccaagggagtgttctctgaaaagcttcctttgtctggcgagcgaccctccccatctttggagtgtctttttcaccttttccgtttccctacacgagaaaaaaaaagcttgcttgcgcatagagagatggcgaaagaagaatcaacctttcgtgcaatgcggccacagcgaaagattttgcattggtccttgcattgtttccaccaaacaagctcttctacgacttctagatatatctccccagtactgtacatacaagggacaaacattagcatacatacatatatgttcttgcattgctttgaataagctagctagatagacatatgtctggggtgtgcatgcatggcgcaacactgtgcagtgtatatgcagatttaattagacgtactactactgcgtaccccaccatcaaactctgatgcaaatcaaggggctaggaatgaagtagtagctaggaacagctagcataaacatctagatctctctctttaataaagtacgcctagtaattgtctaattataatcccct

SEQ ID NO: 67506 - DNA, 915 bp, Zea Mays
ctttagaatgatttttttgtttgctcataattgattgatgattgttgtcataaattttcttttatatgaaaacccaattaattaatctagaaaccgcttggtccaaaaataaaactttaatggtaaatatttttaaataattattgtgaatttttagaaatattttaaagtatatttattattatggaaaaaaaaatcatggacgtcttctaggcctagtcaaccaacgttccctcctctcccttgttggctgccatacgaggcccatgtgtcagccactttttttaccatcgttctcacactcgctcgctgcgctcgttcgaatttcagccgtttctttgcgcagtgttgaagccgccatttatagcattcattaactgcgaacgtttcatggtagcgtttcaatggtcatcaaggccacgttcttcctcgcctataaaacgcgacaccgggcgtgttctcctcctcttccacgctcgttgttctcttgcgttctagctctttgctgcttgtagctcgccgcaggcacgcccacctcgctggagccctgttccttgacccccagcactaccacatccagcaaaagccttccccaacgccactgttctgattccctgccgaaacgctgcccgtcgtcgtgtcatcgaagacccgccatctctgcctgctgctcagcacaaccactcagtccctgctggttgcaccaagttgcggtcgctagagcgattcctgtgctgtgttgtgacagcgatcccctcctgcaaccgaagcctcgtcgaccggcgtcttgttctacttcttctctgtgctacgtacctgtgcctgaaagtcatgtcagaggcagaagaagctaaagtttgtaatctacaccttagaagctagcacctatgtttgattttcaaattataactgaat

SEQ ID NO: 67507 - DNA, 474 bp, Zea Mays
aaggaacagaaaatgtcaggcatcaagctgctacaactgaatgatcgtggaatacagtacctccataggaaaatatgcatgtcgtgaatcactgtaagtctgatggcaaggccaagagacatacttcaatttttcttatcccagtccaagctaaaacgaaacaccatagactttacgctgaaactaaacaccatagaatttagtattagcttagcccagaagagtaaatgagatttaatccatagaaaagctaagactttctttgacaaattgttagatacgatagttcaggcatgcatgtttggccaaaaaaacataaacaatttttgtagctagctactgattagtgtccaaaatggtttcatgtgtagtgaccaaaaattgaaaatcccgacatggccagcccagccatacatgccaaaggaatgcaaaagatacaatctagtgatctaatgaaattaaacctcatttgta

SEQ ID NO: 67508 - DNA, 435 bp, Zea Mays
attgttttagtctgtgtgatgaagcaacatgttgcttattgcaggtatacttcctaccaccctttggccaaatatcaaagacctctctttctcccaataaaatgcagcctcatatgttgtcaatggtgacaaactacagtgctgactaaacagaagtggtaaacaaaagtatgaattagttcttatctagtgtgaatagcgcactataagagcactaagattaattgcagattatagaacataaaacaaagatacaaaataatccagtgtggtgagtaccaaaaaaatccactaaaattgcaaatctttgcccaacttcctggtgaaattggtacatttctaccatcaaatttagtcagttttccatatccaaagaagacagaactggaatgggacagaaacacagaatgaagtattagcaatgttcttaaaaac

SEQ ID NO: 67509 - DNA, 601 bp, Zea Mays
ggctacactagtgggtcaactgtaaaaatccctaaaaagctacgacagtcttcgtttcgaagcagatacgattttgaaataaaaagttcatccagcactgggtccaaaaggggaaaaaggcagaaaaaaatttggtctccaagtggtggatgtgagggggtgtgagtgtgaaagaggatgtttgcattcgtggtcgttgggaatgaattggtatggccaaggtgtcgccagcagccaagacctcgtagtagccggcagtagtgttagggccggtcgttgatcctgatgacaggactgtttagctatcatatcaagcacttcaggttgagttttacactttatctgtacgctagctatatacattcaggctgcatcgtattgacagtcttgtcttggttggcatcctggcaattggttatgtagctgtttcaccggttcggctgctgatccgctgccaaactgcagtgcccggtaaagtaagccgtgagaccgagctttgtttgtgtacttcagtattagcccttgaaaaattaaggttctcaaactagtagtactaaggatttgtttgtgtacttcagtattaactctaattcatatgtgt

SEQ ID NO: 67510 - DNA, 557 bp, Zea Mays
tggcctgagcagcttccaagttcttcttaatgactctgactttattctcggcttcaagtactaggtcaggtccaaatatttccctctctccaacttgtgaccaatttagcggtgttctacaccttctcccatacaaggcctcgaacggtgccatctttaggctggattggtagctattattgtaagagaactcagccaaggaaaggcacttatcccaattattaccatagtgtaacacacaggctcgcaacatgtcctcaaggatctgatttactctttccgtctggccatcagtttgaggatggtatgcagaggttctgatcacatgggttccaagtgactcttgcagctactcctagaaacatgctacgaacggtgctcctctgtctgacacgatagtccttggtattccatgcaaacgcactatttggtcaatatagatttttgcatacttttctgccctgtgggtggtatgtactggcaagaaatgagctgtcttggttaacctatccacaattacccaaatagaatcgtggtgtcgagaggtgttaggcaaa

SEQ ID NO: 67511 - DNA, 509 bp, Zea Mays
cacactaagacctcatccatagcagctacaagaacagcaacaacactacgagtttttccttgaaagacggattggtttctatgcttctaaatcatccatgccccaagaataaccagggagttaaaacctctcctagtctgacctttcaccttaaggtctgtggcatcaactattgcagcttagctaaccacagcagctcaaaccaaacttgtctagaaaaaacacaagcgacaagtaagtgattgatagtttcctgctgctggtcacatagggggcagcactccgaatgttgcaaaccccttctagcaagcctatccgttgtccaacacctattatactccaccaaccaaatgaaaaaatggcatttgttaggagcacaactcttccggatcctatcagccggctcaaaatatatagccccctgcgataaggtctcataagctgacttcacggtgtatgatccagaggaagaaaacttcgacaagtgagaatcaggcactccaggttgc

SEQ ID NO: 67512 - DNA, 346 bp, Zea Mays
gaactatgtaattgaacatcctaaagttccgttgatcgtgatcatagctatgtttgcctttcaattgacagtatcttagcttaggcgctttataccttaaaatgttgtttcctttggtgtacttaaaatgaagtacttcttaatcttggtgtgcttagacattgtgctttatatgatcttgtcatctttcaattggtgtacatgttgcaatgatcatcatgtgtgaagcgtgcctaggttgcgtgtaaaatattatatatcttgaggcatgcattgtttccattagtcataaaatgtattatgacatctatccaattggtatctttttgtgatgcaatttatgctg

SEQ ID NO: 67513 - DNA, 342 bp, Zea Mays
ggtagaagctgggaagggaggcagcgactgctcactgtcactgactgctgtgttgccgatggcgatgggggcgtggggtgcaaagcattgaatggcttttattctcgtggagcagagcagggagagggatggatgggggaagagaagaccccgtgctgtgcctgctgcccggcacatgacatgctttgtgcgacgtagtacgggggcatagtacttgcttgctcttgggagcttcaattctgtgctggcggagtggatgggactggctgggattgggaggaggtgccagccaccacgtactcctacgtgtctatagcatgtgaggaccacgccacggccgtc

SEQ ID NO: 67514 - DNA, 706 bp, Zea Mays
gggcacctgtgcctcctcccctatgctactagtgctcctcctactgaagttaggcataaataaaatataattacaaaataatatagtattatatcgattaaaaataattttcatgatcgggattagctggatcataagtctcatcgactatcaaccatgtcatagtcaacaccatctgaagacataatgttgtctttgtcattgtctgaatgtaatcgttcaaccatttttaagctcttctcattttgcacctcatcatccttctcgtcaacaaccatttcaatatctacttccattccgaccgcttcggttaatcctatatcaaatcgtccttctaccttatcttcttgaaagaactcttcgccatatgtgtttgggtctaagttataatctttatagtttgggacaggtaattaccatgcggtgataccttatacacgatatcgcaattcttaaaatggtctttcgtttggcacgcatatgggagataataaacttgtgtcgcgtgttgggccctgatatagatattgtgagctggtaagatggaatcttgtcgaatttcgactaagccaagattataatatgtctgtctcatttcttcaggatcaaaccaatgacatttgaatatgacgggattagagttttaaaaccatgaaaattgagtttatatatctcttcaattcttccctattactcgacctcgtca

SEQ ID NO: 67515 - DNA, 302 bp, Zea Mays
atagcctctcgcccacgtaaacgatgcgtgtcatcgcttccaaaaggatcacaatttcgatgccgcatcgatctcgcatatttacttcgcgaaatgtcgagtcttatgtctgtttaaaaatttatggcttaagagaacatgatttggaatcccgacccactcttgtgattttgtcccgagcaaattaattaagaactcaacaacaaaagtattaacacaaaattaaattagatcgagataattagagctaatattgagtattcataattaatctgtttccctgttcagactacagataaaat

SEQ ID NO: 67516 - DNA, 322 bp, Zea Mays
ggggtgttgttgtccttggatctcagatccaagggtctgggttgcgtacatgttttgacgtggacagatctaatcgtgaccgtaggtttttaatccaacggccaggatccattcatacccctccgcggatacattttgttaaagagccccctggtgtttacgaaatcaacccgccgtcctacgggatagctctgagtcttgggacgttttgcgccgtagcccatgctcttccctgtattagtgtgcacagtccagagacttacaaattgaataaataaacatggaaatgaatttttaatgtaaaaataaatgctagaatttg

SEQ ID NO: 67517 - DNA, 501 bp, Zea Mays
gtcttgtatgaattccacggccttagctgaggttaaagaagcaatggtttgaactctatccatttggtgaatttgtcgattgctaccagtacatgagtgtatcctccttgagctttcttgaaaggtccaatcatatcgagtccccagcatgcgaagggccaagtcactggtatggtctgcagttgctgtgctggtagatgttgttgcttcgacaagtactggcaagcttcgcacctctgaactaactcggctgcgtcattcttcgctgttggccaatagaatcctgacctgaagaccttcccgactagtgtcttggatgctgcgtgtattccacattgcctagcatggacctcatctagaagtcgcttcccggtagatgagagaatgcacttcatgaagacgcctgatgcaccccttctgtataatgtctctccaatgagtgtgtagtgagccaactgtctggcgatacgctcggctgtatttttgtcatctggttcctct

SEQ ID NO: 67518 - DNA, 272 bp, Zea Mays
taagtttctattacttgtcattttgtactttattactttaaagaaggcacttgcgtgccttatataaattaggaagatatctttgttctaaattggcatctccaatattgcggtaagtagtgagaattcagtggtaagttcataacaaaatagaggcaatgggctaaaatggaggttttataggaccacaaataattggatgtaagttagtaattccttcatgccttgaaaacacaatcttagccatgaatagaagacaccactgactgcct

SEQ ID NO: 67519 - DNA, 461 bp, Zea Mays
gagatgcataatactctgtgtaattgcagagacttcaagaactcgataatccacggtcgaccattccaagtacttcctccaccacctccttgatgggaccaaggtttgcaaccacagcggcaagggggcgatgcccctcctttccctcgcattgatgggaggtgagtgtcatctttggagacactgctcataggagaacaaggagcattagaagctatccgacctacaagtcctagtggccacaatttgctcgccaacaccatattgatggtcaaaaaattgatcactttagtcaagctgaccagtggctaggcttcgatcatctaggcatgtaccctctacttgttaacctggtgatctgagagagctgaattaagaactgttggatgagggtagcatcatcaacgccacattccctagtaacctccaagcgcttggggtctgttggtacttgatttcaa

SEQ ID NO: 67520 - DNA, 423 bp, Zea Mays
aaagcaacatgttcaaaacaaatgagtttttcaaaagggcaaaatgttgaaaccctaataacaaccctaattgagctctataagcaaaattgaagacaaaaagcaaaagagtatgaaaaatatagaatcatggcttaggccaaatataaacattgaagtatatttaataagcaacaataaagattaaggaagcttggccaaaataatttaaataaaaccccaagcaagcttctcaagtggggactcaatagggaattctgaaattctgaatttcagaccttgagccaaagaccaagcgtgttcaccttgatccctagctcaaatcctaaagaccccattgacaaaaacgtgtctaactaacccctctgtcacatgccagaagatggcattgggacgcgagctctagacacgacaaaaccctgg

SEQ ID NO: 67521 - DNA, 381 bp, Zea Mays
aacctgacttgctgtcatggagcctagggttatcatcatggggtcgatgccatatggcgtgactctagagtttgagaggagctctaggcggtatacactagggataccatagtcaagacatgtaactacttggtcagcatgctagtcgtgggtacaacccctgtgatgtagggtggttccatgcatggcaagctagggttgaccctagctgaagctataaatatagtgacaccatgccgccattgctcaataattttatcactagcttccaccataggggggttgtgaatgagtgcttcggtagtgctgagcaggttgagatcactactaacaccaaaaagaggcatcagaggacgtggcaaggcaaaggttgcaagggag

SEQ ID NO: 67522 - DNA, 1023 bp, Zea Mays
ctcaaagaaagacatcataaacatcgctagactggtcaacacagaattaattaatacgagacgccctcctactgacataagttttcctttccggctgctaagctttttctcgaatttggcctccactgttttccaatcaccaattgtcaacctacggtggtgcataggaatcccaagatatctgaagggcagacctccacaactacaaccaaacaaccttgtgtacctcccttcaccctctttttccttcccataacagaatacctcactcttgtgaaagtttattttaagaccagataactgctcaaaggcacataatatgagcttcatattcattgccttttctagatcgtggtccataaacaaaattgtatcatcggcgtattgcagaatggaaagccccccatctaccaaatgcggcaccaagcccttgatctggccattttcctttgctctattaatcaaggtagcaagcatgtccactaccaagttaaagagaataggagatagcgggtcgccctgcctcacccctccttgagtctggaaaaaaggacccatgtgatcattaactctaaccgcaacatgaccccccttcatgaaagactcgatccaactaccccaggtacttgaaaaacctttcatacaaagggattgttgaacaaagatccacttcaccttatcataagctttctcgaagtcaattttgaaaatggccccttctcttttcttcgtatggagctcatgaatagtctcatgtaagaccaccaccccctccatgatatttctttctggcaggaacgcagtctatagtggactgattacattctgcgcaacctctgtgatcctcttagtcgccacctttgtgaagattttgaaactgacatttaggagacatcagtcggtattgttgaaccgagatcgcctcccgactcttaggaagcaaaatgatagtcccaaagttgagactatacaaagggagattccctgtgtggaactcacgaaacaaagccataatatcatctt

SEQ ID NO: 67523 - DNA, 584 bp, Zea Mays
aacatccgtaaatggttgtagaaacattggtaacgctcctagtatgccacttcttggccgcttggcataaatcattgaatattagctggcaccagtccatctcgtggaaacgatccatttccttagttaaaagaacctcatggttagttattccccagcttgcagtagggaacaaccacctattgaacaatatcaggaagaaggatctgatgcttagatcatcgtcaaaccctttcctcaaacgatcttgaagagctgcaacaccaaaatcttttttggataaaccaagttcaacccttaaattgtttgcagcaacagcttcatcaatgcctaatgcctttcctcccccagcatttggtaaccccaaaataaggtgcatcgtctcctttgtaatttttagctccttccctgggccggctcgaattgtcatatcattatggtctagcttttccatcagccaagctaaatgaggtctactgccaagcgcgtcaactctcatatcaagtttactggagaaccccctccatgcaatagcttgacgttgtctgtcatttaaaatctgaatgcgtactataatatcttgg

SEQ ID NO: 67524 - DNA, 556 bp, Zea Mays
gccagaggttggtgtaacgatggcgtcggggctccacgccgcccaccattaaggatacagccagagaagcctaaatgacaagggcgcaagacgaaaagcacgatttactagggtagaatgtctcgttttaccccggctcggcagctccttctaagagaaggagccgataatcaacccatgccttggtctataaaaggggaaggtcggagatggaggaacggacacaggcaacacacaagaagaacaaacgaaccagaggaccacagaggccagagcgaacaactgtgatgtccaaggcttagtagagagctctagtcctgtagttcttaggtctagccacacataagagacttcagagctcttcttccctctctcgcccacttgtaacccctactacgagtattgagcaacaaaggtgtccgcgccgtccccataataaaaatgagacatacaaacgaccctaggcccacgaccacgtgcggccttacctcgggtagaacgcttggttttaccctttccatgtggctccttcctgtggaagccaccactggtcgac

SEQ ID NO: 67525 - DNA, 546 bp, Zea Mays
ctgagaatgatgagtactggaaatccacaaattttcataagtactacaggtacctcaactctcttttcaggatgactctcattcccaaggggggaaatcaaatgaacatcctgggtgaaagcaaagttcttctctccttcatgaagcccaatagcagtgagagcttgaatgtgtttgatatgatttggcaagaaattattcatgcctcttgctttcctctcaagggatgtctgcatgcccccttcatcatgaaaatgattgaggtggtcacccaattcagatataaaaagggcaccagacatccttcctatacccctttctggattgaccccaataatctagcagggcggttgaggaaggctcctgcaagctctcgtgagcaaactacagctggtccctctcgtccttctcctggtcattgctctcccacaccatgtggtcgtggtcgaggtcgtggtcgcggcatgggagcaaggttggctcatgggatagcaaacttttatccatgtgtaggaatatctctattgatgttcacgagctggccag

SEQ ID NO: 67526 - DNA, 620 bp, Zea Mays
caagatttgatcatgctagtgctgctaccctaggttctcaagtcatggcggaatttcatggtatccctaaacatgttcgaaatctccacacaattcataatatgttgtggggttactgttcagatattaagctcttgtcggagtcttttgctaggttggttgctcatgcaaagtgcttacctagggttgcttgcctgaacatatccttgagttctttaaacttctagtgcctgaacctaatgttggatttgatcatgtggatgctgagtccaagcatctgttgtcctatgttgttcgatgctccacatccttcagctcccagtcgttgatggacaagggttccccttggcctccgataggtgatgatcgggatgatgagtcggcagggcaaagtcacgacccttttgcctcgtgaccagctggcgggcatggagatatggactctaatgagcctaccttggatggaggggatggcgcgaccagtgagggtgaggaggcccaatgtccggtgcatgagcgcttgggtcgtcgagcttctccttcccatcacatggaggctctcgacgtatcatgcatgggtggcagcacagaggaggcctctgcccctattttctctagcg

SEQ ID NO: 67527 - DNA, 516 bp, Zea Mays
gacaaacatgagctaaccatttccaattcccagcttgagataagaattgcaaagtagaagaaagccttattgtttatcagtggtgagaaatcctcgatctttggttttgtgacacccaaaggtagccccaaataggtaaaaagaaaagtcagtgtttgataattaaaagttcgagcaagatgttctagtttcttctgagaaatgttaattgggtagacatttgactttgcataattaaccctaggacatattgattcaacaaaagaattcagaggtgctttgagagcaaagagttacttggggcaggcttccatgataagaaaagtatcattagcatattacacttttgggaatcatcaccatctcgttgtctcaaaggaagttctaacaaaccaatattctttgctatgattcgtcagaaaaaaggaatgataagaaaaaggaacggtagctaattttttctttataacatgattttttagattatgctttgtagaagatctgtagccaaaacaa

SEQ ID NO: 67528 - DNA, 674 bp, Zea Mays
gactttttccatgtttccctttttgtttcttggatctgatgcgacgacgaggctgaaactgtgtgcaagtaatagtccatccatcaatgtaacactcttgtgtttcttcttggggctgggcatccttatgatgtttcctttttggaatactttgtaattcatcatctgacagtgcattaggtacgagagaatctgctattagatgttcttggggagacatttgtctgtttatgccagaaaataaaattcggttcttctgttttgtactttcactttcatttgtactgatctggcgacaaggaattccatagtactcacaacaacaacttgttccaagttcacttgtttgttggtttggttgtgcatccttttgtgtcttgaatgtcttttcatcagctgtttgatttatagtgttgttttgacttgtcaacacaccacattctttgcatttagtgacatcacttgtagttgacattccaaggtctgacatctgtatgggtatggaagaatggaagggacgaaagggttgagcaaagacagattatagagagcagagaaaacccatctatctaaggttttacctagctaactgatgtcattgtgaacaaaagtcacaatacaccaacaatcatttcaaagaagcaaatcaaacatgaacacaaaggacaatgaac

SEQ ID NO: 67529 - DNA, 1167 bp, Zea Mays
tatcctagaagatgatattttctaagacaagacattcatgttaccattcaataggagttcacataaggaatactaatagctctcgtcgccaaagagttagaagcgctaaacattttctttcaataaatcacattccaatttaaatctcaccatacaatgtgactattttataagcatggccacaatcctcacaaacacacatacaagtctaccaacacattgttcactccatttattccacaacctatacttcaacacacaccattcattgcctatatatgcactaaaacatttctcacaacatccgaaactcaaaaccaatccctaccacacaaaattttgatgaagcaccacaattactttgctctaaactatcatgacataaccataaaacatctaacttatattaaggcatactcaagcattcgaagaagcttccatgatttcactcattcctaatccttcatctgttatacacattttggcctataaatgttattttgggtggtgttgtaaacatcttatttggactccaaatttttactagagataggtgataaacaatcatgactactgtaccaattttacatgcccaggttttatatattaatttcaacaaaaagaacaatttgttaatgcaataaagtatgtgagagcaagttaaatctaaaactaattatttctgtggatgcatgaccatattaagttttattaggccactacaactatttttcttttttacatccatgtattatttataaaccatttaaaactacttaatatgcatcaaataagttaaatcactaactcagtgatacatgcaccataaatcacgaaatagtttaccaatcaccaatcatcatacctagagtatactgtaaaaatttcaaaccatttggagcactagagctacagatccaaaaatagcaagcaaaacaatcatttttcctatttaacaagatttaactaatacaccaagaaaacagtaaacaacatatgagtttcatatttttattagttagagcatgacactatctaactaactaaacaaatctcattctgtttggacacctaaaactcgaaatatggaaagaaacaagttcatagatttcctaaaccactacaacaaaatttttcaactaaaacatgtagtattataaatccaat

SEQ ID NO: 67530 - DNA, 504 bp, Zea Mays
ttttgtatgagaacaagattccattgaatgccattaactcaataagttgggagattatgttggagtccattgggcagtacgatcctgtatatcgtggcctatcataccatgaggctagggtaccttggcttgaaagggcagtgaagagaacatcaacattaagagctaatcaagaaaaggcttggaaggaatatggttgctcaattatgttagatggatggatcaacacaagacaacaccatttgatcaacttcattgccaatagtccagcatggatctactttctaggttatttgatgcattaattgagatagcaaatgccaatatgttggcaaatctgttggagaagcaaataatgaaggtggggaaagaacatgtcgtctaggtggtcactaacaatggatccaatttcaaagtagtggggaggatccttatggacataattctgcattgttttggactacttgtgctgcacattgcttggatttgttgttggaggatatt

SEQ ID NO: 67531 - DNA, 414 bp, Zea Mays
taccatgctgagtgctatttcaaccactacggctcaaacgtctcatccccaggatgggctcgggtatgcattcaagcccctcaccctagcctcgactctctacttggtcaaaacacggataaaggaactgaacatcctcctcctaataaaaagcaataggtaggacaagggccatcccgacggccataccgctacaggggctcggatttaccccctctcaacattacgacgacctttgtacccctgggctcccgctctcatcccccctcgctggacgtagggccttctattgcccgaaccaggataatcttgtgtcttcttacatcacccatctggactgggacatgtagcacaaattcactcgttggttaggaccctcagcccaaaataccgacatctatatatacatatatt

SEQ ID NO: 67532 - DNA, 818 bp, Zea Mays
gttgcccctcctcttagtcgctcacgctaggccttttctattccttttgttgtagcgtcgtcatgccgcaattctcatgagactcaatcatggttggcaggaaggcaatcaatctgcacaaacctggacaagggtgggcggttctgcagttcagaacagttcttcggtcggttgtgcattccagatcttttcttgtccacgatgctaagatgggaggcggagggagcaggaagaagcaaccaagtggaggggagcaggaagacaaaccagggaggcggggaggatgaaggtcttccacgacgctgagatggaatgggcgtgggcacgagctgcgaactgggcggttgtgtggcggagtagatgctagtggtgaagatgaaggctgaaatgctggtgttgagatgggaactggcgtgcgcacgagctgcgaactgcgcggttgcgtggcggtggatcgggagtaaatagtgccagcgaagatgaaggttgaaacgtctatggagattggacgagtgcggaccatatagggccgcgaatcagtgagtctcaaatatgctacccttcaagttgggcctcaaaacgtttagacgaattttatgaaatgagactcctgttggagctatccattcttgttgaggccctatattttaatttgtttgtgttttagggttcctattggagttgctatagcagtgaccttattttatacaaaaatcatcaaacaaggttatacggcttgatctctctggttctaaatatagtaccctatataatagagatatatcctcgttttctcttaatcttgaactacttatttt

SEQ ID NO: 67533 - DNA, 294 bp, Zea Mays
tttatcaaaaagacacttcgtgcaaaagacgcctaacggtgcagccggaacaagcacgccaagtgcgttaatcgaagtcttttataaaaaagacactccgtgcaaaagacgcctaagggtgcagccggaataagcacaacaagtgcgtgagtcgaagtcttttcttaaaaagacactccgtgcaaaagacgcctaagggtgcagccggaatagcacaacaagtgcgtcaatcgaagtcttttcttaaaaagacactccgtgcaaaagacgcctaagggtgcagccggaatagcg

SEQ ID NO: 67534 - DNA, 315 bp, Zea Mays
ctaaaatcctagctaacagactggggaataaactgcaatctatggtctcccaaaggcagagtgctttcatcaaaggccggttcatccaagacaattttatgattgtgcaacaaactgccagactcctccatcagcaaagacaagcaagaatccttttgaaactagacattactaaagcttttgactcagtttcctggcctttcctcctcgaagttcttcagaaactggggtttgggcagatttggatgaatgttctgtgtggactgctatctacctcgtccacacaagtactgcttaatggtgttgctggcgaaa

SEQ ID NO: 67535 - DNA, 311 bp, Zea Mays
ctccaatccctgtacttcggaactgtgcaatcccacttgaatagatggctcatactctaagtcatcaatatgctttgcatctttttgttgcttttcttcaagctccttcatcttcaactttgcctcagaaaggctagacatcgtagcttcactagattttaacctctccaccaaagagagcatgatcttatccttctcgagagctttgtttctcaaagttatgacctccaaacgaaggtttccaattgccatctggttgctctcatcttctgcatccttctgagcttttaaagctttactaagaattagac

SEQ ID NO: 67536 - DNA, 562 bp, Zea Mays
atcattgtgacaaaattattgaatatatataggagaacaactttgctgaagtcagatgggtatgttactattggaaaatggaagtatttcaccctcaaagttgctctgtcaggcaaacagaagcaggtaaattcaggcatgaacagtagctgaacaagatcacaggttcagtgaacctcaccgccggtgatttgcacaccgtgattcatgctcggttcgagtaggatattaccagggagatcgcaaggggactggattgagcccatgtgtcgtacccacttgcccggtaacgtggtcgagcggccctcaccatggtggtcgctgtctctcgcggttgcgccacatcgtgttcatttcaccatgtatctataaccgtggcaagtagtcggttactgctctgggtcgttaacccatcgtgcgccacggagaacttgcctcggtagaaatatctcgtcgtcgtcgtgagctcaacttcatccaaattcgcgagtaggcggttcgatccctttaaattgaagactctccctgctccgcccccttgttatggacccaatgcaccccc

SEQ ID NO: 67537 - DNA, 475 bp, Zea Mays
gttgcgacaggtgggccgacccgataagcaagtataagagtctgtatttctgacgtgaactctaagaaagaaaagaagaaacataatactaccccaaatctgatcgccagcgtctctcgcggcgatcgtgtgcgctcacgtctcgatgaatcctcaccgatggccacgggccataacatctggtatcaaagttgtgctcctcggcttgggtccttaacgtccactacgtcaccggttccgaagccttcggtgcaaacttggttcatctttgacaccatgacgaccaaggagaaggaggatgcggatcggtgggaaaagttaacgttgaagatggaacggttgacgaagagggtgatagggatggatgacgtgcaacaacagttgttggcgcagacggatttggccgcaactgttgttcagagagtggcggaggagtgggtgcatctggcccaacagctggagcaggcggtcgtgg

SEQ ID NO: 67538 - DNA, 457 bp, Zea Mays
ggaattcccacagaaatgggatgattgtttaccattggcggagttttcatacaacaacaactatcaagagagcatcaagatggcaccttttgaagctttgtatggatgacggtgtcgtactctgttaaactggtctgaaccagaagaaagatggtttttcaggcctgatatggtgaaagaaatggaagagaaggtttaatgaattatacataatttgaaggaagcccaagctcgccaaaagagttacgcagacaaacgacgccaacccttgtacttccaagttgaagattatgtctacctcaaaatctcaccaatgaagggtgtatctcgtttcggggtaaaagggaagcttgcaccctggtacattggtccttttcctatccttgaaagatgtggaccagtggcataccgactcctactacccgaaacattgtctgcagtgcacaatgtgttccac

SEQ ID NO: 67539 - DNA, 517 bp, Zea Mays
gccttccggtgtagtggctacttgagtataataaatttgccctgtcttcttgacatttttgcccgttgaattattagccatgttccctttgccttgattggagctcccagagttctgctgagtgttgattttattctgcttcgggtatggacagtcctttataaaatgaccagactttccacagttgaagcagccagtagaagaactagggagagcgggaaaacgagtactaggggcactcggctgatttgtagaagtaggggcagtggtaggacgaatgaaaacaggttgcttgaacggataggatggtggggaggcgaagaacgattctgattaaaaggtcagatcaccaacctggttcgcttcttaggtccctgattagacctgtcacctccaaatccctttgattttccatggcatgtattcttggcttctactgccagcgctgtactgacatccctactataggtaagatctagacatgttgccattttccattgaagcctgtcattaagtc

SEQ ID NO: 67540 - DNA, 314 bp, Zea Mays
ctgttgttgggaatgagtcaacatatatgctatatcttatgctcaaacgtgagagtttttacactcaaatctgggttgcgcccacacagtgccccgcgtgcaaattttttgcatgcacaacaattttcagatctagtataatttttggacctaccataattttcgtatctgaaaccgcacctaccataaaaatcgaaaaccacatacacattgggtgggtgatgattgtaccttccataaaaacatgaccctacatgcgaggtaacggaagcaagattttatgctatgtctggtactactttacattgaaaatc

SEQ ID NO: 67541 - DNA, 609 bp, Zea Mays
attgccatacaaaaaaaatttccgctgtcctagaacccttgtttagcctttgcaattttgttttcagtttggctttgttcagttcgtgtccgtggtcgagtcgtgttgccggtttagggtgtatcttcatcgaagatcaactgccctcgctagccgctatcccatccaccattacctagatcacaagtcgatccacccattaatcgacttgccctcgctagccgccaccgcgccagccctagatagatttcagatacgccgctatcccatccaacattacctagatcacaagtcgatccaccccattaatcgctgtgattgcagatagggaatttttgccctaaccgccgctttctagtcgtgcatccaaaaatataacttgaggtaccttccttaaaccgggcataacttttcgctcgggtgtcaaaaaaatctgaaatttttacaggagcttgttgacaccattctgaggccagccaaacttatgcccagtttggttttgataaaaaattgtcaaaaaaattcaggaaaataaagaaaaaaatttgtcaaagctcttgcacgcttttcagagaacttgctcattttctgtagaccacatctgatctc

SEQ ID NO: 67542 - DNA, 859 bp, Zea Mays
gttgctactatgtagtaaatatttctatgaggataacacaatttgaatgaatcgaattggatgtaaaatgaattagttattatttttatacaaagagaatcattttctgatttaaattatgaatattcctactaattctagactggggacacaattttccaagaatccagggtcaatcgtgtgaaaaacaggaccaatacgcaattagctttgactagggctagacatcgggttaatttataaagagcggagggtctcttatgtaaaatcgtgaggcccaaagggtatgggcaatttgcagccgttcgatcacaacagagtggctcggattatatgatggcgtggtcgattaggtatgtcacgcggcccgcttgatctaaaatcaatgacccagatcaattaggtgaacgggtatgcgagtgatataatcctagccgctcaccacagagtcaatagctagattcctttcttctttctccagtcacctgagcggtccagagtagagagctccacggcggcggagatcaccggtgtgtagtgctccggcacccaggtgccccatctaggatacggagctatgccgaacaacgcggagggtatgaagaacataatggaatgcatcataccggttatggtagcgttagtagtgctgcccacgccgcgacatgcatccacgacatggccaacccatcagcaagaaatcatcttcacgccatggtccctcgcgtgccatgggttacctgagcgcccacccagacactcggcggacatcaaaggtcaaccaatgggcgcaaatcgatggggtggtcacgatattgcgacagcggagcactcctttttggcgacttggtaatggcgg

SEQ ID NO: 67543 - DNA, 464 bp, Zea Mays
gtttggcggggatgcttcttcagctgctgaaccaagagaacccattcctcctacgcagaaggctgaagagtcggctataatgccgaaggcacctttggttgatctagctgagtcgaagactgataaggataaggctgaagagtcaaatattggagaaacaaaagtaacagcgacgaaggcacaaaaaagttttgtggcaactcccaagaggagaaggatggctaatgtactagatgtgttagaaacggtaaaaactttgaaccctgctccttcaaggaaaactgtcgaagcctcgaaagcgcaaaccgaagctgaaacaaagccgaccgaaattgaagctacggcaacccaagctggtaccgaagctgggcctttagagccctctaagaaaaagtctgcggaaattgaagaaaaggcaacagaagaaaaggccacagagcaaattccgcttgaaaaggttgtca

SEQ ID NO: 67544 - DNA, 478 bp, Zea Mays
agccacagtagtagtggtgacagcagacactggaggcactagtggctgagtgctgactggtccaacgacctggtttgagaagtccagggtgaccggcctgagcgaagagatggacagaccaaaagagtggagctgtggtcctaactgaatgggtggcacgagtgcagcctgaagagctagaggaggagcatactgcactagagggatcgaaacactggtatgctgaagaatacaccacaaccttctatgccttctgtgacattaacattacgtcacaaacaatagtatttttgtcataccttacatgttggtgacgtgattgtgacgaaaatcacatcgtcacagaaggtgcgtgttaaatggtgtactatgacgaataacaaaaaaacgtcataatagtttatgacgcaaactacaaacgtcactaattctatgacactcgaattcgtcactaattatgtctaaatacgtcacaatt

SEQ ID NO: 67545 - DNA, 381 bp, Zea Mays
ccttataaatatgtgaacaatgtcatgcaaaaattaacctcttggaggccctacgcttcattttccttagctttcgaagtaccgtcgagcctgttctcctataaagccgaaggtatgattgtatatttgtttaaagagaataataaaatgaaagatgccaaggcatttgggaagagtaacacacttcatctttcatcgcattcttatattcttttacaatcattgtggtggacagatatcccccaggtccgttagaaggcgaaagacccttgcatggggtcacaaactagttaccccgcaaggctgtctcgtcgtgggccggacaaagactacaagtgaaaatgggccgacccaagaaggcaagggggtcgtacctagatc

SEQ ID NO: 67546 - DNA, 374 bp, Zea Mays
gacaaacctatagctagggctagaaaagtgttctcagctcaagagcttcttcacaagctcaagagcttcaatctcatcaagtctcatgaggatttcaccaagaaccaagttagagagtttgggagcatgaatagaggtgggaaggcttgtctgcttgtaggttgaaggtgaataaggaagatgaccattaggggaggagagatatagtcaactggccaagtatggaggttccacacttgagctgtggagttccactcaaatacgtgaaggttctatgccaccaaaaacaaatgggaagtaatattgtactgtgtatttgggtttgataagtttttatcgatctttgcatatagaaattgagcactttattcact

SEQ ID NO: 67547 - DNA, 294 bp, Zea Mays
ggtttacctaggttggatggatgagtgtttaaaaggatccgtagaggtagtgtgagttgttgcacttattgtctattaggctgcacacctaattttactaggtgaatattaacatgggtaatcgggttcagatgattgcttactaaacgatacctgcttacctaatagtgaggattttgttccattttatacccatagagacaattttgtcccataccctaacgctaagggcttgttcgttttgctctcaatccttgtgatttggatgagattgagtgtgtttaaatcctaaac

SEQ ID NO: 67548 - DNA, 381 bp, Zea Mays
aaaatttctcaggacaaaagacaaagtctcattcattgctgctagaaaagtatttggggcccagtgagaccaaatgtcaccactctaaattcaaaatgacccagaagagtctgaaacacagtcttaggttcctctcccgattgcaacaatatttggtgatatcatgcctttaagtctagcttgctaaaccatttggctaaagccaactcatccatgagatggtcaaagacgggtatcgggtatttacttttgatagtcaagccattcaagtaacgataatcaacgcaaaaacaccatgtatgatcctttttcttaaccagcaagactggagatgcaaatgggctctggcttttctggataaccccttgtgaaagcatgtcc

SEQ ID NO: 67549 - DNA, 354 bp, Zea Mays
agattatatagtggggtagactacaggagcgagaagttctagtccttatacctctcaaacaacacctatgtgctgtggcactcaaatcggcttattggggctagtctgactgttcacgtgcaatggccgggaaaataagctcccaacgttaaactgctaaaccgagttactctggtgatttgttagggtgtgttcagttaaggagtggaggagaatgaagcggctccattcctattttctatatgtttgatttccaacgaaaaaggggcggagcagctcctagagtctccacatgggatataaatagttgagatgctctcgttccaccaaaatgaccggacacgagccgtctcc

SEQ ID NO: 67550 - DNA, 780 bp, Zea Mays
gttggttgaatctcgaaccggtctagatttggcgctgctacttccgacttccaacgtcccgagctgtgtttgttcgatcttggactggtctaaatttgacactactgctccagactttttcgacgtctaagaaacaagtcctagacaatgacgctttgtgctttaatgcgcgttgtggaacttaaattagatgattaggacgctctagtctagaccaccacctcgcgttgggactcctaggcgtcgggtttccaatcttgctacccagcgtgccatgctgtttccatcttgcaacctgcggtgggagggtggtctcttcatgctcttccgtgaccagtcattgttccgtataacccatatttgtgggttctgatggcacagcagtttgttgcttatgtaccttagtgctagcaaatgaacccaaaatctaacgccaaatctacaactgtactactgcattcacgggctaccaattggtggtgtttgttgcgtggtgcgatcaacagtgctagagatgttgaatcgtctttctccaggaatagctatctcgcaacatattatacccgctgttttgtgtctgttacccttatttgggcatgggcatgctttcagtttgcactgctgattgtgacatttagttggaccgttttacatgtttagggtgttctgaaactgagaattatacctactgaccgtgatagagaatttaatcttggtgggcaatttacagcattttcagaagacgaacagctgcctatcctcaatttcttttgatttata

SEQ ID NO: 67551 - DNA, 490 bp, Zea Mays
tatatatatatatcttcctctcgtcgaacctgttccagatctcgtgccctttttgcgagatcaccgaaccgcgtcttctcgcgaatggcatgctgctcgcatcggcgatccttgtctatccccgtctaccccttcggcgtccacctcgtcatcttgggcccgtgggccagctctgaccgccttagtctaattttatctaaccctttctacctctgcctaactcagtttctgtcgtatactttctcgctcaaatcgtcacgcaaccgtctttttcgctcggccaaaacgcaatccgcggcaaaatcgacaagtgcctctcgcaccctcttctctatatacatgtaccccaccattgaaacccccctccatgtcttcttccccaaactgcaacagctcaaactccatggaaaactcccatgtgttgcattgtccttgcgcacaagcgctctcggtgcagagccgtgggaccgtcgctgcatgccctcttccc

SEQ ID NO: 67552 - DNA, 416 bp, Zea Mays
tacgagtccggccacacaaactataccggtctaccggatatgtctactccagcatcccagcatgagacgcagttgagagacacacaggtacatgaattactgttaaggcaacaacatattcgtgtactattataaagttgccctgatgaagctgacattgatccactggttcatacaaatataacgaaacagaccaaaacacctacaaccctagtgataatgtttttttattacttgtattttcattgaaggtttgtattcatcgttttctttaaatagcatataaccattacatttttcagggtaaacatggtgacgttggcaagaacatgtcgaccaacacaaacgtcactcctcaagcaacaccacatacggaatcttgctcgtcgatatttgatgcgacgccgtaaataaat

SEQ ID NO: 67553 - DNA, 696 bp, Zea Mays
ctcttcttcttctttcgtgaataaggcatcacatactttacaatcgacgttatatccttcactaccttgatttgggcctagcgtattgtctccccatgcttatttagtcggacctacgcatctgcaatttccttctctatttcttgaatcctcctcgacgccatcctaatagtagtgtcatgctcacacaaatgcctttttatggctgcccttgacgattcatcagcaagcgaagacacaatgtcagccatcaatgactccattgtagggaaaccatatgggatgtcatcatcgctgtcatgacggctgacactgcatggtcgatcctcttaatttcctgccatcgatacttgaatcttctgctttcttgtgtctgccaacagaggatgacctcttgccctagtttgctactgtcggtaccctaagtatggggtacccactcctgctgggttaagatgagacccctatggccgcccatagccatgagattaccgagtggctagcctagcactgggttaaggcccaccccatgaagccatggtccagcccggttgtttccctaggctaggccgccatcaccatgagtctcacaaagagagtaaccaacaacttcgaccgtaggtctagggtccccatagccagaaatcagacctacacatggacccttcggatccttggagaaggggcccggagggc

SEQ ID NO: 67554 - DNA, 415 bp, Zea Mays
ccaggatcatatcgtctcactcagatggatggcacggaaattggaaactcttggaatatagaacatctcagaaagttttatccctagctgtatttcaaaagctatcgggacggcgatgtactctgtaaaatgggaaatatgtcatcaataaaaaaggcttcaaagatgctcagtttgttcatgatcgacttgcattcttacttaactcggggtgaccactatgccctactaacggagcaatcggcttaagtcggcaacgacttaaggcggtgcaacatgctcgcgcttacttaactcggggtgaccactatgccctactaacggagcaatcggcttaagtcggcaacgacttaaggcggtgcaacatgctcgcgcttacttaactcggggtgaccactatgccctactaacggag

SEQ ID NO: 67555 - DNA, 921 bp, Zea Mays
ggcttggcttgataccacataaacctaggagaaaaagattctcaaactacctctgtcagaagggagatgcagattttgggtagtaactgtaggctgaatttagagagctggaatggcaccagtgtgatgtagctgatttttggacgccataacttgggatttacgcagtttcggtccaagacccctattgtaactttgaagaaccttgtttggtgaacaagttttgttaacatagattggtctgcctttagtaaaaatagggagcaaagaggggctaaactgagcaagttcagtcaaacgatgaatatcagaagggcctgaaatatctgaagaaaatatccttgcccgctttggaatccaggtgtgtccaagtgaagtgaagataagccaaagatggtcatggaaggataactttgggcaggatcactgccttgaggattaagccggggaggtaaaaagatctagcctgcatgtgacacttgcttgagtgctccatgctacggtgtcatcggcggccctacctcaatgtgtctctatattacgtggtgtccatgcacttgtgtcgtaccttagtgaccgtgggtagccagtcgtgccgtcgttcccttaaaacctagcgagagcaatggtgatgcactcagtgccttctggtgtgatcaatgccgcgaggaagaaactaaaattcaccgtgccctcacctccttgactcaaattatctgtgcaccataaacatgttatcccttacggttgtatagcctgagcgtgaccgtctatcctcgcctaagttcaccacaacatccattgatcatgtctgaccctaccgtgcgcgctcaccttcgcttcaccgtggccagtgctctctgaggttaccgtggtcaagcttgtgtgtgtttctggttccgttacatagcaggatccccg

SEQ ID NO: 67556 - DNA, 912 bp, Zea Mays
gtcattcaatcaccaaaacttatagaaatggcttaattgcccatttccctttcaacatccctccgatgtatgtgcatatacactagattagctatgaacatctcttcaatttctactttctcacttgcatatcaacgatcttagacaagcatttcccacctatataaaataaaaggtaggaactgtttggtagtaaggtatttttatgattttactgtagcacaatggtatttgataaaattatcgtattctagctccttaggtgttgggttggactttgtaataccgtgttttgaatacaatgaatttagcaaaaccaaagttttttgagcattggatactacactctgcaaagaagttctctcccaagtggttatcactactcctacatgtatattttcccatactcatatgcagacatgctttccccagtctattcatgtgccatcaatattccaccactgctaccaaagtcgaaaccattaatgatgatatcgacaccgcccataaacaacatataatgagacgtcaaggagacaaagatcggtacatatgccttccttgcatataaaattgattctccaatccatctcaacaaccctagtatgtgaaggatatcttgtgacagctctctcctctaccaacctagtttcccatgctactccatcttctctgctctctatttacaccgcatcgacctcctcacctcgtgtgcctctcgggttagcatcacctctcaaccttttgacgctgattgtctacctctaggactaatgccacctccttgacttccacgcctctcgtacctcacatgctagtgctacctcctcgcctctcgtggctcccgagccaacactaaatccctttgtcttatgcctcttggtcgatttaagacaaccccacccctcatcc

SEQ ID NO: 67557 - DNA, 826 bp, Zea Mays
tctggcgtcgtgccatggaagaggagctccaggctctggtctccaacaatacctgggaacttattcctcgtcctccaggtgcccatgtcatcacagggaaatgacatttctgtcacaaatttcatgcaaatggttctcttgagcgctacaaggctcattaggtatgtcgaggattcactcagcgtcatggggttgattatgatgagacttttagtctggtggtcaaaccagctacggttcgcacagtcctctcgctagctctgtcaagggattgacctatacaccaacttgatgtcaagaatgtgtttcttcatgggactctttctgagacaatctattgcaaccagcctgcaggttttgttgactctgttcatcccacttatgtctgtcgtctcaacaagtccctttatggcctgaagcaagccccacgagcctggtacagttgttttgcttcccacatgaagtctctgggttttgttgaagccaaagcatatacctccctgtttattttccacaatggcactgagacagcttacttctttatgttgatgatattatcctcactacatccagttcaactatattctagcgtgtcattacagctcttcagttagattttcccatgaaggaacttgggccacgaatgtagcgtaagatgcgcttaagggcggcaaggtgagactctcgcggatcatgcatgtgaaggaaaacctgctgaacaacataggcaatgtcaggtctagcaaaagtgagacactgaagagcaccagacaaactctagaaatccgtaggagagggaggaccatcggcagagcttgggttgata

SEQ ID NO: 67558 - DNA, 1004 bp, Zea Mays
caagagacttacttcaagaacatgtagcctacaggatatggccactgatagatagctgggaaatgccgaaagaaaccatcactaaccctagcgaaggcggcctggttcgattgaaatacaccttcaggtttggggaccagtttgttgaaccagatgatgactggctgaagtgtgttgaaaatactagtgatgagttacttggaacatattccaagtccgaagataatgcactatctgcggccttcgggagccgaaaaaagaaaagattaaatagggtttttgatgctattggatttgtgtaccctgactatcgctacccgccatgagggtagaaaataaagggtgcaacctctggaaaggttgttgcttcggctgctccaagcgagcctgcgccgaagagtaaaaagttgaaagtcctcacccaccggccccgttatattgagccggccgtggtgcccgagtttggtgggaagacttcttcagctgctgatccgaaagagctaattcctcctacgcagaaggctgaagaaccggctaccatgccgaagggaccctcatccgagcaggctgaggcaaagactggtaaagataaggccgaaaagccagagactgaaggaataaaaatgttagaagttttcagcccttcggcagaagtaccaatgctgaagatacaaaaaggtcttgcggctactcccaaaagaagaaggatgacaagtgtactagatgtgctagaaacggtaaaggcttcaagctctactcaagggaaaattgccaaggctacaaaaatgcaaatcgaagctaaaacaaaattgaagagaaggccttcagagaacttgataagccagactagcgaaaccgaagctgcaatgagccagactagcgccgaagccgggccttcagagcctgctaagaaaaaaccctcgaaaattgaagagaaggccacagaggaagaggctatagaacagactttgtctagaaaagctgccgctcctgctcccgaaaca

SEQ ID NO: 67559 - DNA, 486 bp, Zea Mays
tgctagactacttgcacaaagaccaagaaaccaacaaagtccccaaaaattgacaagtcccagaagtagacttgcgctccaaacggcaacccacaaaatcagcatcagagtaaccgcataaagacagaacatacaaagaggattaccacaaatcaaactcaagagtgaaacacaggcaccttataatccacttaacaacatatctatgatatgtgcgcggggaagcatagaaacgagcgcacaaacaaactacaaagtgtatgttcggcctcgtcgcagtcaagtacatgagagagccaacatgctcatgtactcttggtccacgggcttgccgtcctcatcaatatcaagtgtcataatggtggacatgagcattgaaagaggcttggcctcgcccatgttgaacttcttctggacgtcctttgtatacttgccttgatgcacaaaggtctcgtcttgggtctgcttgatttgcagcccaagaaa

SEQ ID NO: 67560 - DNA, 633 bp, Zea Mays
cctttataaaattagtgttgtcattatatatgagatagatgttctagatttaaaatgtatatatgtgcatcgtacttctttgaacaccagatacgttcccaacatgttttagtgttgttcttttggttggaaccagtagcatcaaaatcgaagtctgtgcagtcggcaccaccgatgggaaggagcggcaacgccacgtgcccatgagacaacaaatatcagcaatgcttcctccacccacatctgttccgcctcgtcccaactatttcagacctccttgtacggtttttgtacctcggtgtcggtgtatgacggctaaaccaacctcgttctggtgctcgacaaccttttcccttcccattgcaaccctccacgcatggcctcctagtcctcctcgccaccgccaatttctctctctcgtacatctactgaaagggaaatagccttaaaccatttcttatattttagtgcttgatgaccttcacaaccattcggactaactagtttgtctagtctctgattcacaggtccataagatcaacagtttagtttctaagtgacaatcagctcagtttcaaccaaacaggggtaaaccatggaatagatgaactgtcaatagttctactctttgga

SEQ ID NO: 67561 - DNA, 860 bp, Zea Mays
gttcttgttgaccattgcatggttttggagatgatatatgactataatgatcaagtcatggagacttgaagttttggatccaaacccgacctcaaacaggtcaaaactcaaaaggagcaaaatggtgaaaaaggttaattatgtaaggtttgagtgtttgaatatgttgcatacacctttcactatgcattatgtactttggtttgctctctaacttggtttgtagataaagtgtcattcgaggccatgttcgaggagaaacagcgaagttaagaacatgatgagaaagatgtaagattacgtgacttatgtcatggttttggaaactgagggacaataagatttgtgttcggtaggggatgctagcatggactcactccaaatggtgaatcgctgggactcaacgagaaatctgagacaatgggtcatactggttcaggcttgcgccctactctagtgtagtgttgatcgtattattacttggaacatgttacaacaagtgtgcttgtgtatctagaaagaaagtggcattgtccttttatagttcaagggtaagactttacactgggggtttgtattctactaggggtgtccgatcggttgccctaggatagtgtagtcctcttgacgtcgtctgttggtcgtacactgtcgtacttttggtatggcccacctctttgtccgttcggcatacgggttcctgtagcaagtttgatgttgacgtagtggcatccggtgggtcccacatggcagacttatggtggagcttagggtcgtgtttggtgcggctccatcttctgtcatgaccaccgcgtcactttcagcatgcgtatgcatacacccgatatggtatatcatcc

SEQ ID NO: 67562 - DNA, 657 bp, Zea Mays
atcgaaccagacgatgactggctgaaatgtgttgaaaatactagtgatgaactacttggagcatactccaagtctgaagataatgcactatctatggccttcagaagccgaaaaaagaagaggctaaatagagtttttgatgctattggatttatgtaccctgactaccgctacccgccacgggggcagaagagaaagaatacaacttctggaaacgtcgctgcttcggctgctccaagcgagcctgtgtcgaagaggaaaaagctgaaggtccttacccaccgaccgcgctacattggaccggccatagtgcccgaatttggcggtgagacctcttcggctattgaagccaaaggacctgctcttacgcagaggattgaagagccggctgcaatgccgaaggctgacaaaattgaagaaccgagaactgaagggacgaaaacatcagaagttctaagcccttcggcaggagtggaggtgccgaagacacaaaagggtctagcagcaacccccaagagaaaaaggatggctagtgtactagatgtgctggagacaataaaaacttcaagctctattctagggaaaattgccaaggcttcaaaaacacaggttgaatccgagacaaagctgaccgaagccaaagctacaatgagccgg

SEQ ID NO: 67563 - DNA, 312 bp, Zea Mays
cattttactcagtagcaagcccaactcttcacataaaactgtttcaccttcagatgatcttccatcttgctatagaacttttagcccaaaaacgcatgaatttgtcacaaaactgctctaaaccgggcatcatgcactacaaattcagttttcagtgactgaacataattcaattacagccaacctgacagctgatcttggaaccagtttttctctaggttttgtataggatcaagtccctcacccttaaagacatttgttcatttataaataacctccatttttgctataaagatctcagttcaaaatttc

SEQ ID NO: 67564 - DNA, 390 bp, Zea Mays
ctggcagaaacgttactctatcttctaattagggacgttcgtcacaaatcctacgacacggatcaaaactcgtgaaacattatgcgttcatggtcctatgtgattctgggaccacgccggggagggtggatgacataccaaaagcagagacgaccgcacggatgctatccgcgacgaaggcggcttccaaagttcccgtgaagaccggtgagaaattgtgcccctcgcatatgtaaccatctactaatgcccctttggacaccacaccaataaccccgaccaatttgcatggctggaccgatgacaagcgcagaggatggcaatggcggcaatcactcccttctcattttctctctacgaccttgatttggatggaggttcaaaataggg

SEQ ID NO: 67565 - DNA, 514 bp, Zea Mays
tgatttacgattcaagatagtgaatgacttagagcatgagacatagccacctggcataatagagacagtacaaaggattttaaacacatcatgtacatgctaggtgtcaatctcaatagtgaacatgttttggattcagtaagtaattgtcaagttcacaattatgaaaacaagattagctcaacaaaattatatcaatatgaacaaaaggagcttaagcctgccataacatcatcatgtacacacagaacatactactaggagcatagttacaacctagcagttatacaagtgaagctcaaaatgctacatgagatgcaagcataatacaaaaagcaagaaagaagaactaaaacttacatgaaaagtagcataaaggaagaaaaaccaaaaaacggagccctcgataaaaaagagaatcacacacccaattccccttgcaaatgtgcaaatgtagcctgatcaaggggtttggttaaaatgtcatcaagctgcttgtggtatcaacgtggcg

SEQ ID NO: 67566 - DNA, 746 bp, Zea Mays
aaagaattcgacctcgaattccgccgcttcaatcagaacgacaaaagaaagattagcgaaaacaaagaagctcacccataatgaacagttcggagcacttctgccgcatcagctcctcaagttcccaagtagcctcacgctcagactgattagtccacaagaccttaacatacttaattgatctccttctcatgacacgctccgaggactccaagatacgcaccgggcaacactccagcatcaaatcctgctgcacagcaatcggttccatctcgatttgatggtccggatcccgcaaaaacttcctcaacatagagacatgaaataccgggtgtacccctgccatggaatcccgcaattgcaagcgataagccaagttgcccacccgggccaagatagtgaacggtccaatgtatctcgggctaagctttccgaagacaccaaaccgaacaactcctttagtaggtgataccctgagaaggacttggtcacccactgcaaattccaagtctcgcctcctcacatcagcataactcttctaacggctctgagcggccaaaatattctgacgaattttccgaaccttctcagatgtctgctgaacccaatcaggaccaaccagagatctctctcccatagtctcccagcacagaggggaggtacaccacctgccatataaggcctcaaatggtgccatcttgatgctagcctggtagctgttgttataagcgaactcggccaacgcg

SEQ ID NO: 67567 - DNA, 549 bp, Zea Mays
cggctgcacccttatgcgacttttgcacggatttgtcttttgataaagacttcatatcgtgcacttgttgtgcttgtccggctgcacccttaagtgacttttgcgcggagttgtcttttagtaaagacttcgtatcgtgcacttgttgtgcttgtccggctgcacccttaggcgactttttgcgtggagtggtcttttagtaaagacttcgtatcgtgcacttgttgtgcttgtccggctgcacccttaggtgacttttgcacggatttgtcctttgataaagacttcgtatcgtgcacgtgttgtgcttgtccggctgcacccttaggcgtcttttgcacagatttgccttttgataaagacttcgtatcgtgcacttgttgtgcttgtccgactgcacccttaggcgacatttgcgcggattttgtcgcacgcgagggtagtctacgctacctgtcgcggtgacttcaaatcggtcgaatgccgaaggccgtcggagcggtctttttcgacatggtgatacttgaaatattttgcaggggattttca

SEQ ID NO: 67568 - DNA, 1132 bp, Zea Mays
ggaggaggtgaccggtcattgatgcgtcggggaggaggtcgtggacgtcacagcttttggcgcggtggaagaggaacatcgactggggtcgggtcatcggggatagagctgctcaggttcaaatcagagatggagggagccacggaaggtctgtatcgggaggggtggtgtcaaaccgcgctgctggtaagcgtcaagggcctttggtaagttctccggtagtacctgatgtctccaaggctgtcgatttgcttcatcaagcttttgcagcggcaaatggtagcgggagtgcagctaatcatgtcccggacagtacgtgtgatcaatttgtatcgctactacaactccctgataggagcagtaatgcctctgccagtaccagatgggatgcagtgggctcgaatctagggccccaccgtagttcacgacttgagacgatcaatgagatttctaagccatcccatttagatgaccaggtgggatcctcagcacttcaagtggtcaaagaaaaggtgccgttttatttcaagtgtaaaacaaaaggtcaccagctgagtgaatgcattattgagctgttttgtgaagtgtgtgatgtcaagacccacttatcttcgaaatgtccggtggttcgtacttgcaatacttttgcagttcctagtgggtatgcggtagatggtttggggttttactatatacctcagcctactcctgtcaaatcaaagcaaggtagctatgttggtacagtgactgttgtggagggctcaatgacagaggagcagatcactagtgagctgagaaggttggttgctacggagtgggattggagtgtgaagggctttggaaataatgtgttctcgacgggttttccttcaatgagtgaactgcaacgaatgattgaatgggggacaattcacactaaatttggtgctaaaatgcaagtcaaggaagagggatctggagaagaaataaaatatgtgatgccaaaggtatgggtgcagttcacaggattacctaaggaattgagagaatacccggtaatttgggtggttggctccatgctaggcatctcaaaagaggtggatatggtatttactcggaagtttgatagggcaagactgcaggtggcagtgct

SEQ ID NO: 67569 - DNA, 368 bp, Zea Mays
gtggcttagcgctaacacaattagccatctccatatttaagtggatctatctgtaagcaaaaccaagttaatcagatgaatactgaagtttgctaaggaattgggtaaaaaacataaggagcaacttttgttaggagtcagggtgtgcctttcctggtatgaggtggggatgtctcgttgctaacttggaagataggcattcgttttgttagagaactggcgaaataatagatgttgacaggaggaactgctgcggagaggcgatgggggcgacaggtcccgcccgtggagcatagtagatgcggtttgtgatgcctacgaacagcgcctcgccgttgggcctgaacgcagcgacgaccacctcctcg

SEQ ID NO: 67570 - DNA, 835 bp, Zea Mays
caagcatcacagagttatgagagtgctcaaacgagggagaggggaggatgaactgaccggagttgtactggccgcggagaggttggtttcacggtggcggaaaccagtttgggggaaaaccgaaattcaagctctatgacgcacgattgctagcgattctcggtggctgggtgggtgatgaccttgcggggctggcggagggctcaatttataggaagcaagagcggcggccgggaattttagcggtgacgcgcggcggtcagaggaagaagaagagcactggcgcagtggattcgtggccagcgccgtagcaattgctccggcgatcaacagggagccgctaaggcttacgacgatgcggtggaaagttagagccacgcggcggacaacggtgacggcagtcaccggcgttcttatcggtttctactgcggtgaacatggtacggcgaccggaattgtttatcggccggagtttatccccggcgacgtacaccagtgttatccactcaccccgagcacatgttggaccagcggcggcatgaatcgcggcggaaatcggtcgtcggtggtgagtctgccgcgctgtcgttctgatccatttgggacactgtaccatcgcgatgctaattcagtgtgtctgatagccaagatttagggccagattcctctcaatttcctatggcaacatacccgagtctctgcagcaaagttgtagagctacataccagctacaaatcgactatagggattaaactcagttgaccactggatcaaggttgaattcaagtccaaagttagctctgttacactgcaattctgaatttcagagttccat

SEQ ID NO: 67571 - DNA, 368 bp, Zea Mays
gtcaccctcatcagctctatcttccagaccgcggcctgtcctttagctacataaactatcatatcccgggtgaaaaggccaggtatgagcatgagaaagtggcatataatggtctccatttcacgcaagttgaaggcaataagaagatgataaggccattacttaggacaagcacatctatcaaccaaccccacccagtgaaaagcttcaccttttgattcggatagagctgggtactgtaagcccggacgctgagagtgaataggatatggatctatctgatgcctggaagacgcgacatctcccaaatttcagagtgcaccccattccgcattggatggtggtgggcgatggatagaccatctggc

SEQ ID NO: 67572 - DNA, 422 bp, Zea Mays
ggcaggatgaaaggggacatagtcctaaagcagaggctatgcttctctgcgatcaaagaaatcatttacaaaggtctatcacggcttgccactgtttgtccacagtttgctggtcgtgcttctagcctcagagcaaggggaaaggggctgttgcgtggatggtaggaggaaaggggacagagccctaaagcagagatgattttgaggcgcctggagcaaagcagtagtgggcataggcaccgtcaccgtcagcaaggacgcgatgacactcgatagacatccacataggctctaggaatctaggtcaatactcccaaagaaggcactgtcaattggaacaaagggtggtaagtgttttctttttatttatttattacagtcctaaatgaatctaatgggcgaactgtttttccatccccggt

SEQ ID NO: 67573 - DNA, 363 bp, Zea Mays
agcgaaaaccggaagaacaaacagctggctcacgtctcaaaataggacgatcatgagtaccacgtgcggggtactgctcacgtcgttcagcacgcatccttcgaaaacaaaactcataaagatgaccgtcacgatcacaaaaatcacaatggtatagtttatgtgctggcgcgaaggaggctttagcattagaaccagaagcaacaaaaatatgcttagcagaattatcacaagagaaaccacttggcttagcattttgtacacactcgaagtattttggcttaggcacccaaacctgccttttaggagcagatctagatgtctcaaccagcaacccatcagaggtgacacttgaacccttcc

SEQ ID NO: 67574 - DNA, 1358 bp, Zea Mays
tccttaccaatcatggggtaaatgctagagaaccatctagagtttccggtcatgtggcacgaacaactaaaatccatgagccatgtgttctccaggcctctaacctatgtcaatagaaagacacatggtgaacaaatggcacaacgttggggttagtaaactatgaagagtaccagtgttgcagcatttacccctaaaaagtgtcaggaaaaacaccaaacatccccgctcccataggtaggtagcgatcaccacaagacaaaaatcaaggtctgcaaaagctattggtaccaaaacttcaaatctttggtcatatggcacttgaccaacatctcgtcgggcacgactaccatatgatctcactacttgaggcctaacaacctgaggaaaagctcctctaggcctagcagtgcatatctgagtaggaggatcacacacaccatgagaagggtggtacatgtctttactgctcacctcaaaccctgcctctcatttctcttcctcctaaaacaaaatgcaaccaagtgaccatctctcttgcaatattcatagtggtagctcacctctctcttaggtggagtcttattgtgggaatgggtcatcttgggtggctatggtgctctaggaaggggatcactagagatgtcaagaaaggtgtcaagtgggttcttgagatgattaggttttgatactagacttgtttttgaggtggggcccttggaggctccacaaacactccatctctcacatctggggaggcagatatgggtggagtgaatttgataggctgggagatggctggagatttctagaaaggtgtaaaaccattgcactcaccaaccttactataaccagcatcactcccaaatctagcagcaaagcctaaccctggtccgccagttccgctcttatactgaccatcatgcctaacttgggctcactgctagacaaatacctcaagactaatcaaaggtatgtgttttcgtcctcgatcctagtcctgatgtgtctataggactcaagctctaactacaagtataggtgcactcacagaggtagccttctcaataagcaaggctatcctagcattcttctttgctagctcagtctagaagccagcacaagccttacatgcacccaacaaactagatctagatcgcaactcaacacactcatctagcaaggtgacatacttggtctgcaatgtggtgatgtttgacatgtgaagagcgcactcatcacattcagtcttgtcggacaccacgacagaagctctagtagactcaagatccccaagagtggactcgtacttgtgcttgtactctttcatcttatgagcagcaagcctaagcaacttg

SEQ ID NO: 67575 - DNA, 474 bp, Zea Mays
cgaagtagttctagagccaagaaatgatgaagtcgttgtttttaagagcttctttagagcgggacttcggttccctctgtacgaaatgatcggtgaagttttgaagaagtttgaaatctatctttatcaactaactccaaacgctatagtcaggcttagcatgtacatatgggctttacgaagtcaaggaaaaagtgctaatgccgaggggttctacagagtccatgagcttcactatcaaaccaaagcaagggcagatggcatgcataaaaacttcggatgctacaatttcgcatatcgaaaagacacaaaggctccagtcggttatcgcaccaagtggcctaccggttagacaaatgaatggttttatgtaaaagctgatgagaagaaaagggaaaaacttatgagtatggtaatgagtcccttgaaattaagcttcggcatgacgaggctattgtgtaacatgcagctcgg

SEQ ID NO: 67576 - DNA, 1152 bp, Zea Mays
atcttaatcgatcatttgagaggcgtgggagctgagaaacgttgttagagagttgagactccattgctatagctctagacacctataggagatagatatcctctaggtcctcgtagcgtgggttgagtccattggtcgttaaagggttgagtgggccggtcaattaagcccatatgttgtctggctaactcagacccaaggacaatggaaagcttgcttaagcactaaggcatcgtaacaatcattgctgaagaagatgacacggagttctatgtcgcccataagtcggaacaagatcaccatgcatgcaacattatctacaaacatgaacagactcatgtatgtgtaggggtagaaataagcgtcaacttgtaaaacctaaccttgtcatataaataaggcaggataggtaacctacgaaccgattccacaccaccatagtcggatagagcaatccattttgtaatgccaaactcggttcaatatcatcaacacagagcacatgatgtatgtgttacacatttcgatagcccaaacctatataaatcttcatgttctgtcatgttgcacacgaaccatcaagctacagtcgatctcgccaaccacaaaaagaactatgtgatatatctcgtagtgtgctgtcgatactaaacaccgacacctagcgtgccaggtatgggagcccacatcgacatcagttagctccatgtccatcatcttcaccaacaccgtcaacttagctccatggccatcatcttcaccaacaccgtcggtcgagctcctcccagcagaatacaagtccacattatagagtctagcccttgaactataaaagggacgaaggaccccctctttttctaaaaacacaaccactccggttgtaacacgctctagagcaatactatggtcagcaatacactagattaggatgcaagcctaaactagtataaacccataatctcaaatccacattcgtgtccctgtgattcaccattcagagtgaaccgagttcacgctaatcccccccattgaacacaaatcttactgcccctggtttccgaatacacgaaacattacttgtataatcatggagctcatgcaactttaaccaaatttcatttgcttttatcagggtgaacacttggttaataa

SEQ ID NO: 67577 - DNA, 526 bp, Zea Mays
gatagagaatattattacaaaattttagaaattggaatggctcaatttggatcaaaaatggaatttctatgaattttacaagtttctagatttgtttttgtaataaaaatgaatttctaatattatttctctgtttttaaacatctctggactgggcgtcaattatagaaaagcgcaggggtgttggcgcaagagatcctaagacacagactagccagggaaggactgcgggttgttttctgttttccgagggctctttagaaaaatgaccatcgcgaaggggtacgggttgaatctgaccgtccgatccaaagtcgagggcgcagattagactggccattaaatgaaccggtatgctctcccgatcgtcggatcaaagatctacggttcaggttcaattactcgcgatctaatgtgatgcttacgatctggcgccaacggccaggatctactcctacgcgaaggggtatttagctctaatcgtagccacacatccgagatggacggcccagagggcgtcttcccc

SEQ ID NO: 67578 - DNA, 624 bp, Zea Mays
ggtcaacccagtagaggagtagtgcatggagctagatgtcatggcggtgcaagcgcatggaggtgcaagtggcaagcaacttggaggtgtgcacggaaagggggagcatgcacgggtagagtagagcaccacatggcagtcctccgtgtggaggaggcgcatatcatggcggtgtaggacacgacgtatgggcgcgatatttcgtcgaacaccctggtggcattgttctagtcctcacagtcggtgtagaagcgaagagggagcaagcgaggatgggttggatttggtcaaggcacgacgacacgcttgggtgtgtatctggtacacgaggcggcggtcacgacacaggagcagggcatggccagagacgttggcagtcgcgtggcgtcgttgcgaccagagcacatgtggtcaacggcggcggttgcctatgaggaggcgatccccgtggcactccccagtttgacgcccatcatcagggccactgtttctgcttgaagagaggggaagattagagtagatcgatatgaccgtgcgatggagaagatgtgaggtagaaggaagccaataagggcatttccatcttctcagagagtcttgtatgcgcaaaacgtagataatagg

SEQ ID NO: 67579 - DNA, 524 bp, Zea Mays
ctcctcgtgctcggccaaatcaacagtacgtgacgtgaggtcccgtccaatccctttcaaaaatcaagctgtgccagcagtagtagctttactcttctttttctcgaatgtggacaccaattttggtagagggaatttagatttctttgattgtcgtgaatcctttgatggctgtggagaaggtggtggtgtcctaaatgttgatgcttgtggcagagacggtggattagaaagagaatgaggagcagcatgggaagattgtggaggtgatgatggatgtaaaggtactaaagtttgaggaggcggagatggttggggatgagatgatgatggcgttggtggatgaaccaatttgacatcccttcgaggccaaaggatgaaatttttgatggcttgtccaagtgtctcgattccttcgggcccagggatgtctagcatgtcgtcctcagatccttggatgaccattgccacttctaccctgcaataatcatctggtatgtcgcttccatgaaacttatgtcctg

SEQ ID NO: 67580 - DNA, 388 bp, Zea Mays
cgagagttttccccttatgcccttaccagaactgtcggtctttggggttgaatgttctaacatgcctactgatctagtgcatgtaggttagattgtggaatttccgatcggtcttgtaatagtgtacctagcttatcaaatactgaagcttgtggtgcctcccaagctaggtgatgtggtattctatatggatactatgggtgtggtgtctctcctcaccacatgggtggataagcaggcgggtaggcaggtggatatgtagatgggtacatgggcgaatatgttggtggtggatatgtaagcagtggatgtggatgtggtgtcgtccatggtgtttgtggtgtgggtggaattagctggactaccttttgggtcgttttagtctgtc

SEQ ID NO: 67581 - DNA, 555 bp, Zea Mays
ttgcaagcagcaagatttgagaaaggagaacatatttgtgaagtttgagcaggaaaagatcaaaactccacaaacagattcaaaatcccagttgtgattggggtttgttggggtttcgctatttcgaatcaaactgctagaatgaagcacatatccatgatctgctctaactagagactcaaaatgatctaaggatagtgtcccaacaacaagtgtccccaaatcaatccccaaactcaagaaatcaaagattctcacaaaatccaacaagagaagagaatgggagagagcaaagacaaaatcaaataaaaaatgcagcaaccacaaactgaagctcacgtgcttgtgattggggtttgtcgcgattttgcctcgacgcacccttcgcgatgacgtcacgtgctgcctccaattcccacaggaaccacaccgccaagttttgaggcccaaacttggtgaaacccaccattcgtagcgttgggtgattttgaggctcaagcaccaaaccgtcgtgagtagcctacttcatacgcatacccacgtcctggacacatg

SEQ ID NO: 67582 - DNA, 1113 bp, Zea Mays
cccagtgcaggaccatcgaagcgctgaagcccggcggaagaaagggctcgggatcaacacacctatacgccatcggagaaggaagcgaggatcgccaaccagcagtcgaagaaggagcagtttggggttttgatgaagtgacacccaaagaaagcgtcagggactggagaggtgacgattcggattttttaatacctcccgggcgaactcctcgaagcaactatagctaggggtccaccgatcagagacaccacgggggagcgaaaccaggtactgtggtccagagattttcgatttcccaccaaaatggcacgactcccaaaggcagggaacgaggctaaaggaaaaccgaaagaagatttcttagagggacaaaataattccaagtgccccctcaccttacagaaatgacagcggaagacaggtgggcccagtggcccagcaggccctcgaacccgaacgggacgccattgaaggttgcgagtccgagaccagttaaaattcgaattttgaaatttgtaacagtcacgaattctgccgccatgaacttcgccaataggatcagggaaaagcagtgatgaggaaaccctcctagaattcgaaaaccttggggacacagccctccgctgagaggatgaagaccacgacctaggggcgggcaatcccaggcgattgaacgcagaaattctgaagcgaggctgatgcgtcccaccagcggagaacctcttatcgctgcgaaccggagccaaattacgagaaggagagcccatacgattgaacgcagatattctagtgtgagcctgatgctcatcaccaccagagaacttaatattgctacgaatcgggacaacattagcaccagtgagagggagcttaacaatatccgcaaaagataatctcttcctgccccgaacatccagccaagatgccgtttcttcatccgtaaaaatcttgaattcttgtctccagttagggccaccttggttccaaaggttgaagaatgttctaaattccttacgatcaatacatctggaattgtagatatggaaacccacgaccatcgaagaaaccgaaaaccgaaaaacccgatcagcgagctgaagcacctcaaac

SEQ ID NO: 67583 - DNA, 601 bp, Zea Mays
tggatatacaggggcatacagtaaataagtatataaaaagacgtaaaccagttcagttatatgcataatcacaccagagtagaactgaagaacgtacataactgaataaaacagccaatgcattgaagtactatgtatatgctgcaaatatcataaaaaattacataaaaattcataaaccattgcagatagatgcataatcacgccagaacacaaatgataaagtgcataactagcatatataaatatgtccatctaaaacatatctggaacgacatatctaggagtttgctaagagcgcatatggacaaaagtattatctggatgctaacataagccaacaaaccaatatgtacatcaacaccattcagtgacagtaccctaaactaggctagtactaaaataacttgaagccaacaaaaggcaacagaccatcatgttcagactaccattcagtgagagtaaactatactaggctactactgagagaacttgaatctatccagatgtgaaaccatggagctgtttctgtttagtcaatggaatattatgtattgcagtatgtcacacccgggtttcaggggtccaaaacccgggcgcg

SEQ ID NO: 67584 - DNA, 505 bp, Zea Mays
tgcaatatagaatagacctgaaaaaaatgaatggattggacacaaaactaaaattatgatagttagaagtgaatactcacagggcaataaccaaatggttcgccaccctgtcgtggcttacgcttatcaaccattgacaatgcctttatgatattcttgttaaaatacttgatgcacggagtgccacttttgttgttggtagctgcagcatggtgcaagtggtccaaataatatagctacataacatagagatatcatgtgagtcatatgcaaatgaagacaagtgaacgtatacacaaaatatatgaatgtattttcgggttgcaatggattaaaataagaaaagatttaccatatttactatgaaacttacaagaacaaggatggaacacctgtacatcatcgccgggatgttattagtgctccgaatgtgccatttctgggtagcttcacataggtcgctgaaaatgagatggcaccaatcaatgtgagggaatcgatccaa

SEQ ID NO: 67585 - DNA, 799 bp, Zea Mays
ggcgaggcggtgagcagctgagcggcaagcgggaagcgtcgagcgtgaatccgtgatgctgtctgtcggtctgtctctgtctgaccgattagggatttactgatttagggttgccgtcttgccgagttgggccgttgggggcattggggcttgggcagttgggcggctgcaagcacaaaagaatgagaggaaacgaggactagaggaccaggggctattcggtttcatatatggtgtttcggttcggtgtacactgaaaaccgaggccgacactgagcaccgaagttcttaggaattgaaaccgaaaccgaaaccgaaccccgaaaaaccgaaacttcgggtcggttttcaaaaattcggttcggtaattcggtttcggcttaaaagtgcccaggcctatcagtgcagcaggtatgtggtagtttctgaactgtgtgacaaattccgcccaagtaatagcgtcagcagcgtcatgggcagcaacataagaatcacaccaatcagcagcaggaccagtcagacgaccagaaacatagagaaccttctcccggtcagagcaatgggcaatgtttagcatcttctctactgacttcaaccagtcgtcggcgtgaagaggatctagagaactggcgaaggtaggcagcttgtggctcataaattcctggtgcttgtcccggggtggaagtggtggtggaggtggtggcaatggggcttgctgctgtcgccccatcctctcctgacgcatctcctctcgcatatcttgcctttcttggcgtatctcttggtgttcctgccgcat

SEQ ID NO: 67586 - DNA, 390 bp, Zea Mays
atgtacatttatttgtatgatagccctgaattgcatatttagtatcatttggttgcttcaaagaggtgcatcaccggccaaggctttcattgccgagggaaagtttgctgttgatccagttgataattgttgcctcctctcctattgctttgctctttcacattttgttgatgggctagcttttgttcatgacagcgcacaaaagtttaggtattgttgtaggtgtgaattcaaattttgaagtagatagtgggcacccaattctgatatgaggtttcaatatggaatattccataattttattgtgtgtgtttggctgaagtagggcacatgattggaatatgaattgaaaaacagtttgggcattttgcagctataatacgtcatgct

SEQ ID NO: 67587 - DNA, 457 bp, Zea Mays
gtaaatggggagaaggggtactaaaactttggaaaccatggttcaattaagtaatgatcatgatagaagggataccctagcttttcatgcatcttcaccttggaaaaagatgctcaaaccctagacacccccctcttgagccattagacccccaagctttggattaatgggaaagctatgcaaatgaccatttcatgacttaaaccctttaccaaagttgaagaacatttatatatctacaagaaatagcaagggaattattccaaaaaggtcccacaaaacccccaaattcagcccccaagtgaagagcactatagagtaacccacattttctctaagtcaaaaatcagcccacttttaaagatcatagatgttcacttagttgctggcgccaaatccttaaggtccaaataacaaataggagatatattacccaaggcacacccctgaaaaattt

SEQ ID NO: 67588 - DNA, 1102 bp, Zea Mays
ctagtttggaagacataaattcagagggtattggagggctaaaatctctctcttctatcccgtagctcccaaactagctcttggggtttatatcttttccctacatttatatatacgcatccacatgtccgttaaaagtgtttgttttttccgtgtttgtgttttgttttttttttcgtgtttgtgttcacgcttctaagccgcacactactaatgcgcatgtataggtgtctaggtttcgccctacctacacacgtgtccggacttaaccccgtggcccagatacctaccgcatgacccaagtcacccgacctcgagccgcctgaagtcgaaaaccttaaaccctagacatagtcgtgtgcccatgctaaatccccatctcgtctggagtctaaacgtcgcgccacatctagctcctggtctccataccgtcgcatgactccatagctccaccagcccaccccatcgcgccgggagccaccaagacgtgccgcccgaccactttcgacctctctatcagactgtcactcttcacgcccgaccatcggtctctgcggtttgtgcccacccacctaccacgtccaaccaggctttgtatcagattttgattccgggttggctccgccactaggatatcaggtaacaggataacaatatttattcgtagtgtggtagatgatttctagagcatagtactataagaggatacatagacgtacaaatgaaccatctgccatgttaattagggcacggtcggatcggccaggactaggcaaggacacaacatgtcgtcggaccatgttaagtagagcatcaaattcgtggtcatcactatgagtaatcaatcatcgtcttcgtactgatgagaaatccatgtcctctcattacccccatctcactagccaacttgtccctagtagcaagcttgggtcctagtcctatcttgaataagaatggatgatggagaatataggtccactcgtcatgacaaccgaaacatcattgccaccaaggacaaacttgcaataagcaacataaggactaaagtaagttcttcaagataatgcctccatggaagaaaacgacatcgttagtattgtca

SEQ ID NO: 67589 - DNA, 524 bp, Zea Mays
tcaaaggtgataacagacaagggtgtaagagaaaagatgaaggaacagaagagccagtggtacaaatacaataaagaatggagttaagtccaggcctacacacggtaaagaagaggatatagtgagataagtaaaacatagctctcaaattgagatagaaaagaggggatttcaacaagcagacctaaaataagtatcaaggcaagatttacagattacaaaggtaaggatgatatcaaacaaaagctcaacaaaggatgaagttaaggtaagtcaagacttgcaaagcaacaaagggaaaggaaacgaacaagagcgggatacggaaaacaacactctcggattgaaatggaataagtgaggctttaaaaaaatcagtaaatatcattgtaaatatggagagatgtcaagggtcaaaggtgataataggcaaggatataaaggaagaggtaaatgtgcatagaaaaaactaggaatctaggtacaaccaagaatagagttaagataagtcttgcaagtggtaa

SEQ ID NO: 67590 - DNA, 519 bp, Zea Mays
aggacattgggaaagaatacataaatgatctatgtaataagtcattcttcacgatacagaagaaagaatttgtcagctattatgtgatgccacctgtaatttatgagctcgcaaaatcagtggcagctgaagaatgcttcagaataggaggtgatgaaaggacaagaatcccatcgtcagtgcgtcatctatcagtacatctagatagactttcagcacttgatgacacaatcccatacaagaatctacgcactctcattttccttactagcagaacagtggctccaattaatgtctccatccctccagtggctctcaataacataagaagcctccgtgtgttggatttatcctgtgcatgatgggacgatttcctgatagcatatcaaattgtgtgcatcttcgctacctaaatatctcatctactaccattgcaacagtaccagaattcttgtgcaaactctaccacctacaggttttgaatttatcaggttgtaggcttggaaaattgccttccag

SEQ ID NO: 67591 - DNA, 962 bp, Zea Mays
ggaatgtccataattgttgcccaaagtgccttagtgacaattttttcagtgtgcatcacgtgaatgttgtgtggaaggagaaggtcgtcataataggggagccgagtctagcccgacttatgggtccacatatgctgctcaccatatcccacaaaaccaccttgtggattgaccataagaccatctatttgttgacgaactttggcaccagtcatcattgcacgtgggcggtctgttactatgacacatttcataaattcttgatgtctagtcaggatgcatggtcaggtgggagaaattatcgatatttatcgaacaatgaatatttgccacccttcttcaaccaaatgaacctcagaaattccttgcaaactgggcatgggaatataccgtgaacacaccaggtgcaaaatagcccatacgttggtaaatcatgcatgcagtactggtaccaaacatgcattttgaagtttttcttcgtagctcggtcgtatgtccataccccttcctcccaaggatggaccaattcatcattgaaaggctccatgtacatgcccattttatttctcgtgtgtccaggaattatcaatgacacgaatatgtcctatctttgaaagcgtacgctgggggagatttatgggataacgaacacgggcaacatgtgtatgaggcagcggtcattccataggccatagggattgaacccatctgtggccagcgcaacacatacattatgagcctctttggctttctcatggtgaatgccatcaaaataggtcatgcttcaccattggatgcatgtaccatcttatcaggattgtatcgtttgccatttctgtgccatgccatcagtttcatggattcctcagtcatgtatagacgttggatcctctgtatgaatggaagatgacgtagaattgtcataaggatgtcgagtgtcacacctggttttggaaggcaaa

SEQ ID NO: 67592 - DNA, 291 bp, Zea Mays
ctgggtatgaaagcataataatgagaccacgttgtgtcaaaatggttaaagcagaccagaactgttgcgaggcagtgacacagtagctgaccaagagcaagcctaatactgcgtgtggtgatttgtgactgtgtcaaatgactgttttggtagtggcgcgcacaatcatcgattggtaaaacaacaagggcaggtttggatagttggaatgtagggtcactggttagtttggaaactcaaacctcctccataacttgatagaattgaggaaattagtacatttctctctcg

SEQ ID NO: 67593 - DNA, 843 bp, Zea Mays
caaccctagcgaaggtggtttagttggattgaaatataccttcaggtttggagaccaatttatcgaaccagacgatgactggctgaagtgtgttgaaaataccagtgatgaactacttggagcatactccaagtctgaagataatgcactatctgtggcctttgggagccgaaaaaagaaaaggctaaatagagtttttgatgctattggatttgtgtatcctgattattgctacccgccgcgggggcaaaaaagaaagggtgcaacttctgggaaggctgctgctttggctgctccaagcaagtccgcaccgaagaggaaaaaattgaaggtccttactcaccggccacagtgcctgaatttggcggtgagacttcttcagctattgaagccaaaggacctgctcttacgcagaggattgaagaaccggctgcaatgccgaagattgacaaaattgaagaatcgagaatcgaaggggcaaaaacattagaagttctaagcccttcggcaggagtggaggtgtcgaagacacaaaaaggtctagcagcaaccccaagagaaaaaggatggctagtgtactagatgtgctggagacaataaaagcttcaagctctactccagggataattgccaaggcttcgaaagcgcaaattgaaatcgatacaaagctgactgaagccgaagctacaatgagccaggccgacgctaaagcttggccttcagagcccgccaaggagaaatccttggaaaccggagaaaaggcagcggaagaagaagctatagaacagattctgcctgaaaaagctaccactcctactcccgaagcgccttccgaagctctta

SEQ ID NO: 67594 - DNA, 1287 bp, Zea Mays
ccacaatcgaaccagtcaaccaaacattatatttcctttacttttctgctctagtagtagaataatctagcattagtattagtcttcctcaacctattttttcatccccaagcgactctacgccgtcttggatgtcccgagtggcccgtcgatcccggaacaccctctggaactcccctccccgacagagtccctcttgggaggtgagatctagggttctacgtcgccagaagacaccctgcttcatcacgaaccatctgagccctgcgcgcggaccgtgatgcagagaggagacactcctacagcatggttacggaccatccatgctcccacaaagagcaccggtaggtggtgcacccctagtgtttgaccccaaatagaagacaacacacttttgggcgactccgctgggtacaagaagtgtgacctaacatagatcgccccagatggtcggttcaaaggaccactttggtatctccccaagcaacattgtgaagccgactatggagacctcatcggctgaagatcaacaagaatttgatgagtacaaaaggcaaataatccaagaagccaaggcaaagtacttaactaagttcaaggtggacaggcacgagaaggtcatctagcaaaggaagactaacctagcatcacttcgacctactgcacctgcccccaatgtaagtaaaatggatgacatccaatctcttagaacttacatagatgaacaacaagagcaaatgcaacaagtaatacggggtatgcaagtggattataaaatgatggcgcgtgcatttgaaaaatatgtcattcccaatttcccatagtagcatttgctctagaaactcctactgtgctagaccatatcgggtgtaccgttgtggcatagtctggcacatacatgcatgaatatttgtgtgggatgtggttaggctgctcattgaagaactggcaatcctcaggacctccacaagtcttgtacacaacgtatgccgatgaagaggccaattgtgtttctagggcagcaactgaatacggtataggtggcctggtctggaaaggaatctcccctttgtgacttcccagtaccgagcctgttggagagtacagatgcttcatgatctcttgaacaatgataacaaccataggttcaaatgcattcatcaggctcttggagtgacgatggagtgaatgagcgaccatgtagttgacttcttgacgtaacaccctagtgtgttgttccgaaggtaacgagaggtcaacctcgtcaagagtgccctcgggcgagaa

SEQ ID NO: 67595 - DNA, 1018 bp, Zea Mays
aggagagacctgatttgttgtgaaactgaaacagatttctcagtgaacaatagtttcaatcttgtataaccattttgagttatttttttcaaacagtaaaaacattgggctacttagattaacacaccaaatcaattatttgtctcctgcacaagttcatgatatagaggctcttcgtatccatgggaagttcagtacaacttcagagaaatatgaaacagaacaatacaacaaaatccaatggttcttcgaagagtactaaagatgactcaattcaagtgataaattttcattgataccacctcttgctgttccctgtattgaccaatccatgcaacttgcgacaacagcccatcatccggtgacacattctcttctctccggccaccgattctaacttccaacaactcagtgcacaccttcacctcctaaggttcacaactctgtgacacccaattgtccttgactatggacgatacaacaacagaaccttcagctcctgcatcacataccaacaatgtaatcatcacatgattctaacataaaaaaagcaacacctgattaatcaaccaatcagcacctgtataagtggaaaagaagagacaaactcaacacttcaacatttatacaatattggaaaagaagagacaaaccagcaagttcatgaatcatcaatagtattggccgaaataacatctgaagaggaagcctaaggtctaggctacataatggatccacatcagggaaagaagcatcaaacagaagagaaatatataagacaaacaaaggaaaggaagcaaaccttcctgctccctatcgagatccacttctccgattatccatgtgattgctcacatagtcaggttgatctcaccagtggccttgggtgtgacagccacgtcacatataaacaagtaaatcacagaatgcaggcaaaggatcaatgatgtaaactttgctctgtacacacatttaggagaaaagtcacatattgcaaatgagcaccctggtagactga

SEQ ID NO: 67596 - DNA, 425 bp, Zea Mays
ggccgaagaggtatctttgattttcagccgttcgattacaatctgaccgaccagattagatcagccctgatatgaaccggtacgtgtacgttatccctcagatcaaaatcctacggtcatggtttaacgaatcacagatctaatctgggccaagggatcagagatccacggctcagatcagtttcatccaaacgctgtcgaacttctaatcgtggccgttaagtatccgatcgacagccatagacccatcttccacccgcagtcgtgcaagagggaatcaacggcgcagacaacctcttcaccctcttccttaccagccggtcgaccacggtggcgcggtgcacaccgcggcggagctcaccggtgagcatggccgaacggcacccaagcccccatatcaccaacaaaaacggctacacgatgcg

SEQ ID NO: 67597 - DNA, 1730 bp, Zea Mays
ttatgatgtcgccaaatgagcacatcctggcagcatgccaaggctcaagtgtgtcaaccttgcacgtacatgtacgtcgccggttccgttccgtccaccgggcagcacaatgagcttcagctagcgctgggccgtgcaaaccctaaccgccgcccaccgccatggatcgggcggcatgcatagagttcgtggcgagcggcggagcgctaggtagagcttagacctcatcagatttgttctactctactgaatcctggttgcatctcatggatgcatgtttcttcttctgcttattattgtctgtgcttcaagctctgtcaatgctatatatatatatgctccgccactgctcgtcgctaattcgatcggcagcgcgggcatcggagcagctagccacgcatgcatcagccaagcttggatggaatggagcagctgggacggttccagatgattaaatattatactccgtacaaattatacagcatcccaaatggattctttgtaaccgaacaagtcaggatgaatacggcgggcatcggagaaaggtgagttcatccacttctctctcacaactctgtcaagagtggtatatatatgtttaaactatattgcatattccagtgagacatgtcagctctggggcgctgcagcctggatccagaagcttcacaattctataccacccctcacttgttctgttgtttgaaaaccaggttttcgaacgacatttcaagctcaattagcccagtacccagttaccccactgggggacactttgtacatgagcagccagccaatctgcgcataggctaacgcctaacggcctggccccgcccatgtcagcaggcctccgaggcttttggttgcccaaccagcccatgggctgaattcataacagtgttggcacacagtttcctcttcactcggaagcttattattatcgatcctgaaccagagactagcagagctagcatttcgacgacgcgtctcaactctcaacctccaagtccacctcgtgtacgtgctgccttgccagttgccactgggcactgctggcccagtgaccaaccatgcgttagatctgacagcaccaccgaaccatcctccccggtgatcaacaaacgacggcagccacatcttgcacccaacgtgatgatgaatgatgcctagaacttttgacaacaaaacgcagcacaggtagcaggtttaattcaacaagactttctactatatagagccacaccatagagataactaatctgtgcgcaaagccaaagtgctgacggcaactgtggtgcagccttttcatctccgtttttaagttttttgcccctccttttgttttctgtttttctgggaactctttaaaccgccgtggcgccgtgtaaactttgctgtagccttttcgcgtgcaatggcagagcgccctgttcttttcctgctaaagaaaaaaaaaaaggagcacctgatcgctggcaggcccacggcccacccaactgtgtctgtaacgctcggcgtccctgcattgcatgccaagtgccaaccaccagtccatagcagggtcagggagaccgcagatgaggccggggcaacggtgatgccgcaaagaggattcagaatcctttttcttttcttttcttttaccaccgggctggcatcacagattacacgcgcagtagagtaagcacgtctctctcgtagccaagaacaacagtctacacagctcgctt

SEQ ID NO: 67598 - DNA, 273 bp, Zea Mays
gtcccaatccacactctaaccaaaccaaccaagcaatgtcagcacaattgcggggctgagatctttccatttctccgtatcttgattcagcttcggccaccagaacctgcactcaaacttttgcctctttttgctacccacgccgagcacacaggaaacaagcaagcaagcagcctcctatccaaactgagacaaattaagtcaactgacaattcttcagttacctacaactgaacttacaccaccgaactaaacttgtatctcgactaccac

SEQ ID NO: 67599 - DNA, 413 bp, Zea Mays
tgtaaacgccacgtctggagaactccggtgactcaccttctttctggccgtgagatcatctcatcccaaattcacgaagcactcgagtggtcactataattgaaggccctccctgctccgtcttcttgttacacgcccagtgcaccactcctctcctcaatccctccaccgtagcccgaggaataggaatttcccccaaatcaatcatctgcgccaccacgaggcatctcgccgtggccagagccctctaaggtaactatgttcgggctagagagtgttttgagttctcttacatgtcgcgatgctcatcgacccgctcgattgaactctaccacaaccggaaccccggaacactgtgtcgccaccatggaatgccactgtggacagtccctccgttgactccctgctctgtc

SEQ ID NO: 67600 - DNA, 569 bp, Zea Mays
ggaaacacatagcttgcacactacacatgtgcactcactgccacgtttaacagaattggactgtgctcggtcgctccgtgattttttgtgctcctcaaaactcgacccaaacaggttttagtctttaactatcaagtccaaataacatgtaggttgttgcttacatatataatgaataacatatctgtttttacattattatataggaaggtcatagaattcggtgaatgtattggaaattgtctcgatattcaacaatcatttgcagacgggatgtgtctggataatgttttcatgcagtgtttcatccagtgtttttgcgatgaagaaataaatcattgcccgtccatcaacaaaaatagacttgtactagatgtcaatgttggtgtatgtaaaattcattaatacctacctatttttgcaatagtttacatacagttttatatgacacagtaattatgactatgcagactctcctcaattttgaggagcatgaacgctacagcaagtctcctcagatttttgatcaaactgtccttgatgcttatctggacaagacactgccccag

SEQ ID NO: 67601 - DNA, 626 bp, Zea Mays
tctcttcactgtgctaaggactctctgtcttgtgtgagttccaagtgaagatatggtctaggttggaagatacggtggcgcaaagtcaggtctgtctggactgttcagcacgagacaaaacccatgtcaattcatgtcaaacggttttggtttgagttcaaactttaccagagtgtgcttagggtattttggtgccactttgtcaattggaccatgtggatttagagtttgcaactaagtgaacacatgtgatctttagaagtgggctgaaaatagacttagagaaaaagtgattttttttcttttgtgcttcccacttgagtgatcattttggggattttggtgggacctttttgggaaaacctccttactatttcttgtaagtatataatatgctacaacttttgtgaatgggtcaagtcatgatcttgtgatttatatagttctaccactaatcctttcttggtgctttactggcttaaggagggtagtcctagggtttgagcatttttcccaattggaggtgcatgaaagggctaggatgtgacttctaggatgatcaacacttggttaagaccttgctcctcaagtttggtgcctttttctcaaactaaaccacatgtgat

SEQ ID NO: 67602 - DNA, 529 bp, Zea Mays
tttctgaacagcactaggtccaacttagtattaaagaattgttcctcaatgtaagggatacaactttggtttaaagatagtagtccttagctccattaatcagtcacaaattagctcccaaattggagaaatgtcattggtttctcagtttcagcactgccctagtctgacagcacaagtttggagatgttttacactaggttccatatagttttagggctaggtttcatacacaaatttgtactactataatagccctacaactttgttatggtgacatattgtcaaacccttatggattacaagttacaaggcttcaaacattgctcaatatcacctttttgcttagggctccaattcttgagcacttgtgaacctgtgccattttctccaatttgcttcacaacacttgaaaatccccaaatgggaaaagtgttaaactcacaaagctctaaaactttaatatatacacttttggcaaaaagtacttagaatttgaaatcaccttatagggcactaattagggttt

SEQ ID NO: 67603 - DNA, 297 bp, Zea Mays
caaatcccaagcaagcggtcatccgccatcggaaggagaagaagatgaatcatgtaaagtgtgaggcccatggggagagagtgtcgatgaccactaacatgtagaactaatcatcatgggtggcgtcagctgacgagccgagtatgggggaggtgttatcacgcaagcagtcaataacaacactgaaagggaaatggcccttaaccatttcttatattgattttagtgcctaatgaccatcacaaccatttgtactaactagtttgcctagtctttgattcacaggttcataagtcc

SEQ ID NO: 67604 - DNA, 809 bp, Zea Mays
atagacaatattattaccaaacaaatgtcgctagaatgaattaatttggagctaggatggattaaatatgaatttcacaagtttattaatttatttgtgtactaaaaatcaatttctataagtatttatctaatttctttgttctgtgggccgagcactaaatacagagaaccaccggggcagaaccagaaatttttcccagactcagggagcgcctgggatggactgcgggtttattcctgaaatccccaggatctcttacgaaaatatgccagggcgaaagggtatcgtctaaatctggtcgttgggtcttgcgcggatggtgcggattagatcgaactgccagcgaagcggtacgcgttcctggccacaggatccaagatctactgtcacaggttcatcgcatcccaattccacctagtcgtccgaccgtgaaccgaccgccgagataaactccgcgaaggggtacgtgctcattctaatctccaccctcgctcacggatccgacggctgacataggctcccatccctattcccctcaacggctcaaagggtcactggagaagacgcaggccacggcggcgccatttgtcaacaaccgcgatcacccgctctatcgcagtaatctccaatctaccggttgcaacatgtaacactgaaccgaccaaaacggggaagccacaaatcaccgaggatggcgcgcacaggagtccggtccacagtgaacagagactcggcacggccattgaattccgacgagcgattccccggtagtacgcccttccagatgccgatagcacccacccgcg

SEQ ID NO: 67605 - DNA, 486 bp, Zea Mays
tccttttcaagatcttcagcagaaatcaaaccctctaccaccttcaccagcccgatgaaacttcttttaggttttttagacaggggtttagcaaaatgagaggaataaaaccctaaaccatccaccgccataccaacaatgggcatgcatggtttgttttgtttgggaagaacacatctagcagtcatatgtgtttctttacgacaaatatcacaccacaaagacttgaagcaatctctggcatggtgcccctccacgccacattttttacagaaaaaacggcgaacaatttcattctcttttttcaaaacgggcggggggacttgagaatacctgattgaccgccatcacccgatgaagatgtcatgatatcttccttgttatctgatttacccagagccggtttcaatctccaactgagattccgattcttcccccaccactgagagccttggaggacagccttctgcccccaacgatcccaac

SEQ ID NO: 67606 - DNA, 563 bp, Zea Mays
caaacggaggccaggacggggccttccgccattgctttcacccacccccaaaccaccgctaccactcgatcgagacagcagagggagatagtaatacggaaaaatatatttttttaacctttagtcatgtcgctcgcctcccaccccacactagtgttcttttcatcactttcacctaaaagccctaacagtgccacctctgcggcgcgacttttcgcctctacggctgttgatattcctaccctctgttccacctccaagttggctccgcagatctcccctttttaggacaaacaatccatccaccaccgccctacacaccctccttcctaaaaatagtagccggcgccatgcaaatgcgattccccacagctccccgttcctgatggagctcctccgcagatcaatggacctatgagacgacgagcgacgccagtcagcaaccaggtcgtccaggtaccgcaggaactcccagcggccacccctactagcaaccactccagtctccagctgagctgagctgagcaacaaagggtatacacttgtaactctatgatactctc

SEQ ID NO: 67607 - DNA, 824 bp, Zea Mays
ctccttcggggttggtgcgcggtcaggggcttctatcgagcttcttcgctgcttcgggtgcgtctgctgagtggtcgggcgacctgggagggccccaattcgtcactgtcgctgcgagtccgcggcactccgttgacaggacttccacgacttcgattggcggtgagcaccttccattgaaattccatgtcattaccgctgccaatttctacctttggattggagtttaggtgcggggatagggggattagtagatctagccatggagccatcgtggtccagggtgccgccgcgttctacgagaaccagtgaggaagacgcggtgttggtcgtcgaacgtgtgatggacggccacgatcaaatccagtttcccctttctcccgattggatcgcgtccgttggatctttcaccaacggtgttgattagattaagtgtaccgattcggggtatcccacctggagcgctagatcggaatccaagggcataggattgatcgcagtcacattaaatccggggcgtagatcttggatcctggggctcaggttgcgtaccgatttgagcgtggccagatttaatcgtgacctttggtttagatcggacggccggtgttctgcgataccccttcgcgaacacattttcataagaaccccctagagattgaataattaacccgcaatcctgtctgcaggactctgtgtcttaggaccttttgcgccagggcccctgagttctttgtaaatagtgcgcccagtctagaacattataaaaccagagaaaataatttataaatgaatttttaatagataaataaatgctagaactt

SEQ ID NO: 67608 - DNA, 378 bp, Zea Mays
cttgtaaacccccataacttgaccgctagaccgacccaagtctccttgtgcacttgtggcaaaaaaaatcgtttggtgtctagttgcacaaaccctatcaaggccatgtttcttccatagatcctgtcccgaaacttcataacatttctgttgatcatcctagccgatcttgtttgcctacctctcctgcatggatctggtgatctctttccttgtgaatcatgttgtggctttatcatccgaatctctggatccttcattgattctgccctattatctggttatctgctataacccgttctcaagtatcgaattttgatcttgcctaaatctctcatttctgatcgttctcatacccccttcttcgaggaatcatga

SEQ ID NO: 67609 - DNA, 622 bp, Zea Mays
ataggaggaggatgaattaggcaatatattttctatactttaaatcaaggcctctattttttatttatcaaaacctacgagaataaccaaacaagcatgtaaaactaaggttttgactaagtgatgttatctctatcgcaagagagttatgcaacttaggttccagtcctaccaactagtatgtaactaagttaggaaaggtaaaacgtgtaactaaggtaacaatataaatgtgaaggcttacatatagtagagatacaaactcccgttgatgcgctgatatttttaccaaagtatcaagaagtgtgcaagcttcttactagcctttgttggagccccacgcaaaggaagcacacacgagagccaagctcctagccaagtaacaccatagatagtcccaggccttctccacacacaagtggtgcttcagtttcgatctctctcggatgctctccgttgtctccactatcaagcttccagcagaaatattgttgacttcgttccctgtaatacattgtgacaaccacaccacaaatgcaattagtatgatattacaagatacaacccccttctggtacaactacaatggtacgcgcaagcactaagggatttgaggtgtcta

SEQ ID NO: 67610 - DNA, 750 bp, Zea Mays
gtgttttgatagttaaggaataagatgtaccttgtctgcgtcagttagcccactagggttttgtcggaggaccgtcatcatgtaaccagcaaaagtagaacactatgttttgatagtatcccatctactcatcaaagattttgtggacctttccggcgatgttcctcgtctagagttgtaagcctcagtaattcgactccaaaacccttgacgcttttggcctgtgttaattatgggatcacaactgacagcaagccaaacgtgacaaaccctcatgtcctcatcaacaataaagtttgctagcttagttcgttgattagccttcttagctacagctggtggtgttgatccttctgcgtgcccatccactggaagaacaaattgttcactcccaacaggttgctcctcatgctggcttaggaagctaccatattgtgccatcacctggttccagttagttcccatgctatacatacaagagaagcacaacaaacttgtcatcaatctgcactagcgactttgaaaatgcacatacacatatggtaaaaattgcaattgtttgaacatgcacaattcatatgaattaaaccaaacatactgaaacacaactgataataattgtaatagttcaaatagtttgagtgtacaaccaagacaacactcaaaacccacaaaagcatgacaagatcatactggttttgtcatacagacgctgatgccatttcaagttttcatcatacacacactgct

SEQ ID NO: 67611 - DNA, 442 bp, Zea Mays
cagacggataactctttgttgtccgcgaggcagtacaggaaatcatcttcgtctgtaccgttaaacactaaggccccttcgggtacttcagttcccgggcataatgtttggcttcaaaaacttcttcttcagataatctttttcccgaagcatgtcgaacgatataatcaagactttcagacagtgcttcgggagcaggggatttggcttctttggtcattcttttctccagagctacgccattatctggagattcttcttcggccctctgctcggttgcggcgagcttcgtttcaacgggcactgagggcccagcttcggtttccatatgtgttgtagtagcttcggcaatctccttcacaggagcaggagtcagtgctcttgttgtctccacaacggtgtctagcacgcttgccattcttctcctcttgggaattgtggc

SEQ ID NO: 67612 - DNA, 468 bp, Zea Mays
gtgacatatgatatgttgatattgtctaggttgatttggtcattgtggaatgctcaaaggaggttcataagagtgttttttctaattgccagacaaccttgtagaaactagacccaaagccgtctcaagattcttttgcaatgaagggaacgtcaaggctggtgggaggtaagagggggagtacataatttgtacgtagaaggtggggattggaacgagagtagcccccatagatgaggcgtagtattcagagatgactttggttttttcttcctggcttgagtagactacttggccaacttgtaccccgggcgatagagcacttcttccttcgagcacaagcatgagcatggtggaaaaaagtgttttcgtcttcttctctgatggctttctgcttgcttctttgtttttagtaggtagcccactcaaggagagactgtgacatccatgatctgcatagcccccgag

SEQ ID NO: 67613 - DNA, 402 bp, Zea Mays
gaataatctgggcggttctgccacagaaatcatgaatagtaatgggccgtattcagcccgagtcggcccacgaataggcggaacgcgtccgcgtctgcgcccacatgtttgattttgcacaaaggtccctggccatttgaataaccagtaaagagtccttgaacactattcctatgtctcacttacaatcgcatataggtccccgtacttctatttcttcaagattcaagtccctggccgcgcaccgatcgaatacttggccggggtcgcgtctactcgtcggtggtgacctattccggtggtgccgagtacacggacaccatcacagatgctactctaacacactcacaggcttaattcgaccagagcgtcattaattcatagttgtccgcaacaacggcg

SEQ ID NO: 67614 - DNA, 390 bp, Zea Mays
gttcctgcaagataaccgagatgtattcgcatggcaacctgcggatatgccgggagtcccgagagaactggccgagcacaaattgaaggtctatcctcaagcaaggccgattcgacagaagctgcgtcgtttcacgcctgaaaaaagagaagctattcgcaccgagttagcccgcttagtgtctgcggggttcattagggaagtgctgcaccccgagtggctagcaaatcctgttcttgtactcaaaaagaataaagtggattggcgcatgtgcgtcgactatactgatctcaacaaacattgtctgaaggatcccttcgggctccctagaatagatcaggtagtcgactcgactgctggctgttctatgttgtccttcctagactgcta

SEQ ID NO: 67615 - DNA, 365 bp, Zea Mays
actcagcaaagagtactcggcaaagagccgaattccagtagcacttctagttaattgttgtgaccttctgtcctttttgaagatccttgagaaatgtctgcatgatatatcatttctaaatcacgatttgaatgcataaaacatatgaattacacctatttcctagtattcagaatataacgatcattgatcaagacttgcaagctatgcaagaacatatgttgttactttttttataagtattgtaggtgcaaactaatcaaaggtaataagtagttttggcacacacatataataaccatttcaataaaaaaagttccaatacaagataatttttcattttgatctagacaagtccaacgcat

SEQ ID NO: 67616 - DNA, 694 bp, Zea Mays
tgcaactaagttttcttagtagatcaagcagttgaattggtccgtcgtaatggataaggctatataaacagtcaacaatgttggctatatgtaacacctctgctgttatgagaactaaaactttggcattacatcatatacactgacattacattatttgtgatacacctagaatgcattcactaggttaaaatttcaatgaaatatttgatgtgatgcttgtttgagtgtatgatctggtaagggtgttccttaagctaggtaggggtgaatctctccaagggttagtaacatgtgacctcatgttgtaagcacaaaggagtgatcttgccaaattgggaagacatgttttaagaggtgattatttggagacgctaagcacttatgtaccttgggacactcaaaaccctaatctggagccaaaaaaccctaaataatgccttatagaggattccaaattctagccactttttgcaaaaagtgtatataccaaagttgtagagttttgagagcttaacatttttcctatttggggatttccaagtgttgtagagtaaattggagtaaagtgcaaaagtttcacatgtgcttgggtagcctcgagaatggagtttgtgtgcttgttacgtggagaagggatcgtcgtcgacaagtttgcacgactccggctaggtgttcgaccggcgcgtcctcg

SEQ ID NO: 67617 - DNA, 378 bp, Zea Mays
ttaccgtgacagaagtgattgaaacaacacccccaagggctccatctccgaaggtgctggcaattgaaagcacgatagctactgaagttgtaccttcggaggttgccgcagaagaagccagagccgaagatgccaactccgaagatattaatttagagagcatagctgctgatatagataaaatgctgctaaacatggccgctgaagaaactgctgcagccaccgaagagaccacggccgcaaaacccgagaaagaaggaataaccaaagatacttcggaagatgaaacttgtgacttccgaaacttagttggccaggagctgacagaagctgaaaaagaggaattaaaagagtatgctatatcttgagggtaccggc

SEQ ID NO: 67618 - DNA, 1142 bp, Zea Mays
ataggatggaaatgatgagtatgcaatctaccatatgataggaaattcttcaaagaatggtaatataaatttaaaggcgtttgaagtgcttcaatttttctatgtgactacacaagacacataagaaatgatattctaaaatacttgcacttaaaagataagtgttaccatcctttggctttcctccatgttgtaggccttgatttttcgcatatgatatatcttcacttcctacaacatataatatcttcctcgagatgatatgagtttaagacatagcaatttgaaaaataaccttgggtcaatcatgtatatagatcattgaagattgatagtttgagttgataagaattgaatggactctctcaagcatcccaaggcttcatatcatctccttctcctgcaaagcttgtcaatcatattttggtacccatcgcttgatgggtccatcatggttagtcaacaaagatctaggaacccaaaagtcctttgtgttagcactaggtaaactcattacctttctagcacaagttgcaattttgggttgcctagttacatgagaatcaattgacaagttaggagtgggataatcaccaatgggacaatccttgcattgatgtcccttcttccggcatgtgtagcataggcgtttttcaagttttgaaactttcttctttccttgtttgttgcttgctacattgttagtaaaaactttcttttctaaccctatgcctttttgttttaaatggggacaagatctaagtaagtgtcccttcttagagcatttaaaacaaagtctatcatccttgttaataatcaagccatttttaatgtagggacatgacctaatcaagtgccccttttcaaagcattcactacacctcttaatgtgaagtgtggcttgatcattaccttggatgttaccttttgtagaggcgtggttgaggcttttggaggaggtattgaatttcatcttttgcttcttcctcttggtaatcctcaaatccttgacattttcctcaagggttttagtgcatgccacggttgttctcgtctcaagcttcttcaccatgtggtcacggttatcttgagaaggttgagcaatgcacttcccttttagttgtgtcaagctcatcttcagc

SEQ ID NO: 67619 - DNA, 499 bp, Zea Mays
gatgatgctgtgatctttctccgaccagatagaaatgaccttgtggtgatcaataatatccttgagtgcttcgggcatgcatcggggcttcatacaaaccttgccaagagttccgggggcttcatacaaaccttgccaagagttccggctccccaattcattgcccggctgaggccctggcccttactgcagatgtgctgtcatgtcagattaaggagtttccctgcacttatcttgggctgccactatgtatccatacaccaacaagaatggggtcatgcctcgtattgataaaattgcagatcatctcccgggttggaaggcccccctaatgaataaggctggacaccttgttatggtacggacggttctgactgccaccccaatccatcatttgattgctcttgaccttccaaaatgggtgttaaaagctattgacaaaaggcgtaagggtttcctttggaaagaacaggagcatgccaatgaaagaaattgtctg

SEQ ID NO: 67620 - DNA, 575 bp, Zea Mays
tttatgtgttttacagcaatctcttgcgaagtgagattgtgcgcgtgttttacactaaatttcgtactcatttacgctgttttagctcacgttttacgctgaaatcattcgagccagaacccccgcacgatcgactgcacgcgattttcacgccgtaatttaggccccgtttgctgttacaaaacagatataagatttacgctaaatttcgtactcatttacgctgttttagcttacgttttacgctggaatccgcccgagccagaacccgcgcacgatcggttgcatgcgatttttatgccgtaattttaggcctcgtttgctgttacaaaacagatataagatttacgctaaatttcgtactcatttacgctgttttagcttacgttttacgctggaatccgcccgagccagaacccgcgcacgatcggctgcatgcgatttttatgccgtaattttaggccccgtttgctgttacaaaacagatataagatttacgctaaatttcgtactcatttacgctgttttagcttacgttttacgctgcaatccgcccgagccagagccagaaccag

SEQ ID NO: 67621 - DNA, 462 bp, Zea Mays
cagaattaagtttgaaataggagatagaataggtaagctgctaagtctgtctccaacagattatcgactgcactgttcacagaattgcactgttcacagaattaagtttgaaataagagatagaataggtaagctgctggagacagcttaaacatatgataagggaagcacatcagtattgtcaatcttcaaacagggattacaatgtgcacaccgaaattaccattcggttcatatgtcatgtctgtttatgcattctgtgagccgctaaagaaaccagcaactcctggttggtttaaagagatttccttatatacaaagccggttcaaaaccagcgccatcgttcatccacgtcagccaaaaaaatcacatccacacgatagtgcatcgacggacaggtctacttctcagtgtgcttccgtcgctacatgcgcctagaaacttccagacgtccagtaaag

SEQ ID NO: 67622 - DNA, 825 bp, Zea Mays
aaattacatatgggccagtcacatagcttgcggctcactaggagcttgctcaacccgtccctcgctctacgtggggattttgaacgggttttaattattacttggttggcgtctggtaattaccgtagcggcgaggtgaggcggggtggtcatcattatttcgctcgggatggactccttatgggacgtgaaacaacccacttgtcgtgctacacctaggtagtgtgcatgcctggctaacaatcttgcttgttactggctcgacctctatcacacatcttttcagtgctctaccccaagcacgtggggtcctgcaaaaatcacatggttctctttgtccaaggtgacctttggcctaaaggggatccctcgcgctgtttttgtgggggttcacgctatctaggtgtccggcctttctcctgcacttccgtataagtaactaggatggtgctcagggttatttttgcttaccgtattctcgtgtttgtgagtctgccctcttggactactttcgctctctctctcctttgtgcatccctgtttgctcgcatggcgtcgttccccccagtgcgatccatgagtgtcgtcttcatggcttggagaagaaggggttcctccccttgaaagatatcttggggtggaggctagaagccgaggcccgagggtgaggtgcctcgccccagggatgatgaagtaatcgtgcttgcgtccttctacgagcatgggttcgagttgccccttcatttgttcttgcgtgggctcctccactactatcaggtggagatccaaaacctctgagagcacctagaggggggtgaataggtg

SEQ ID NO: 67623 - DNA, 484 bp, Zea Mays
caaaagtcgcctaagagagtagccgaaacagccgcaaaagtcgcccaggggtgcagcgagatcagcacaggcgtgcgaatacagccaacatgccacattaccatacaaattatagttacatacacacggcgaaggcattatatattacatcggctcaaccttcgggatgatacccatctccgtgtaattgaacaacattatcctcaattcctcaccctcaaaaagatttcatagatccccctcacctatgctcgccccaatcggcgaggacaacaattctcgtttaccaatccggtctactcgaagacggccacgctccatcccaatacgacagcgcctaccacttcacgaaaacttacccacactgtgttttgacaccacccttcgccgcctatactcagtactcgcactaggaagatccccggcaccctccacacgcggcgaagactgcgctgcggccacatctaacgcagcaaaataatcc

SEQ ID NO: 67624 - DNA, 573 bp, Zea Mays
attggtgacatgaacaagaaaactattatgagctcaaacactagtgaacatcaagacttttagcttcccctcaccttatggttatgatgggagttctagcctaatagtgctaatcaccctttatgcttgccttctagatgaagagtgtccatggtaagcttggttgtttctaacttgaactacttttgttagattgaattgaatacccttacttggagtctagtccccttaaatgttgtccattttcacccttttatagtctaaagaacaacagaggttacatgaacctcgaatgccataggctaaacccaactactccactgttatcttattcttggagtcttactagggcccatcccttagtcatgccattgtgttagagatatccatttcaaggcaattgccatacttgttgtaggggtaggtatgatatgttgtgtctacagatgtcgtgtccccattccatttggtacgtgtagttggtagccagtgtagccttttgtactttactatacttcatggtacgcttcgtgtacgcaagcatggctacagggttgatcaacacatcatata

SEQ ID NO: 67625 - DNA, 894 bp, Zea Mays
tcctgggagaaggtaagagcgatatgggaccacttggtcctaatgtagggtcctgggatgcctacatgtggtacccttctttgggtgtctttcttttgtttcttgttggtgggttcaaaactcgagccccagtgatcgggagtgcaagcttcttcaatgtcgatgccgaagcttgatggcttgccattgttcaagttgttgtagtcgtggaattaccgaaggtgggcgccaatgttgaatacttgatttcaatcccttgaaggcattgaaaaccaaggcaacacaagttaaaaacatgggccttcatccttaacttaatgcttcctcaaaatgttaatgtgaaggacgaaggtcttcaaaagagggtgtaaataaacaatgtaaaaataaaacaacaatgagtaatgaagtatgaaactcatctcatatgccttagcatttttattccatcatcttttgtatcaaacaagtttacaaacatacctttggctccttgacacaaggtggcacgaaggttcttcgaaggctacacaacatgaagctatggtactcaaaaggtgaatttatgtatggtactattcacctatttatagggaaggagaacaacgtgaaaaattacaaacatgcccatgaagtttacacacatgtattacaaacgacatatggatattaatgacttttatctttatttcttgttgcacaagtcctaaacttcatatccacgacatctttgcattcaaagcctcattcatgccaaagttattggcttccgctcacatcttcgccacttgcacacttagtcgaagctccacctcatgctgcttcggcttttctcatcaatctcccaaccgaaggctagcttcatccgttgttagtttatgtacctaaaacacg

SEQ ID NO: 67626 - DNA, 1140 bp, Zea Mays
tcgtggcctgccacacgaacggtaggccaagggcacgccaagtggtcgttatcgacatgatcacacctccctaagtacgaccctagatgctctcccactggcttgagaggccaaacaaccatgttcataaaggacctcagcatcggagcttctacattgacctaaatactgggtagtacgcagcagatacaccatatcaggtgtacgcctacgcatgccaatgagtgtcacagtctcgtgacggcgggcaataccacacgatgcaaggctgctccatatgattgacgtgtggtaccctccgcgcactaccacgaggatgtttgcgggagactagctacagggactcgtatgacgagcgaacgggacaatacgccatcatggaagtacggatatgcacgactctatgaatggcgtcagaggaactatgccatccatgggccaccggccgagcttcctccagtagaatacaagtccccattgtaaagtctggcccttgaactataaaagtgaaggaccccctctttcttgacacacgagcacaccagttgtaacacgccctcaacaatactatgataagcactacactggactagggcgcaagcatgaaccagtataccccaccgtctcaaatccatcgcttgagccctagcggctcaccattcggagtgagttcgcgctaacttcccctccaaacacaaatcttaatgccacctggtttctaaaaccacgacaatagacatctcaaattcatgatctatcatttttccaaactcttcataaaattcttgatttgttgaaccaaaaaatatatcatccacataaacttggcatacaaacaaatcacttgaaattcctttggtgaatatcatagtaccgaccttgcctattttgaactcttttgagagtaagaaatctcttaatgtctcataccatgatctaagtgcttatttcaatccatacaatactttcttaagcttgtacacaaagttaggttcttacaatcttcaaaatagggtggtcgttcaaaaaatactaggtcactgatatatccattaagagatatactctttatgtccatttgatataacttgatgtcatgagcacatgcatatgccaataatattcttattgcttccaatc

SEQ ID NO: 67627 - DNA, 338 bp, Zea Mays
tgagtattggattcctctgagtttgaaggttacaagtgattgtgggaggtggaagatgaagttgcctatcaatttaatggagtgttctctttttcttgtaggggtacctctacaaccttatatagctgactggagagatatccctttatagatcattgagtccactcgagtctacttcctattgctacaagtattcatattcttttggtgcttggttatcatctgaatgatccgacgcttgaccatgctcgggatgcgtcttcagagttcaggtgatccctccgtgggacacgcgcaccaccggtatacccgtgcagtacccttcgagattttcagct

SEQ ID NO: 67628 - DNA, 347 bp, Zea Mays
gtcctagataggacgagcaaagtggttcgacgggaacacacaattgttttcacaccaacatagtgaaaattttctcagaataacctctcggtatactcgcaacttcgtgttgctagcgtctacatgtccttttatctcatagtttgcttcatgtcattcagcaacaaagagagcaatgtgctaacatctggttgagcaatgtatgactgagatttctagtcataaattatttgataaggtctttttgcttactaatagagtcccaatttgtgatgtcttctatgccaaaaaggctttcatgcattatattatatatcttcgggttacttcgggtaaaactttatgca

SEQ ID NO: 67629 - DNA, 458 bp, Zea Mays
tgggccaccaactgccagctgcttcttctcgaattgaaatgaatcccaaaacagaacgcgatgttggcgggatgaaatcctttgattaccgatcaagctaacctctggtctctggcagattcgcggcagtcagtcactgacaggtgaaccccaaccacaagcgtcttcctccccgagatctcagacaatggttccccgctcgcatggcacaaatccgagctccacggctcaaccacccgtgcggagtcgccgggttctgttacagccaccgcgatccaacctccgctggagccccatataaacaactgaggcctcgctcgcccatcaaccatcgaactccgtgaagccctcaccattgtagcacccgagagagagagagaacgtgagatgtgagccgcggtatgggtcccattgcctcgggtgagtcgtgtgggattccctgggaagctctgcgcgtg

SEQ ID NO: 67630 - DNA, 609 bp, Zea Mays
taccaaaaatctcagccttatatctatttttacaaactgacatttgccccaaatctctagtcttagctttaagttgactcataacagcaggaagaatattgccacatagcttatctacaatctttctcctcttttcccataaatccattatcatttgcctcaatctgtcaactaaatcaacaatgggcaagtcttttatgttcttaatccatgaattaaaacactcggctagattattgttcacatagtcacatttttgtttcgatggaaagcatagacctactccataagtggttgtgatgctcgttcaagtaatctgcaacatttggagcagctttcataacttgactaaaagggaaatcaaaccagtcacgtctgtatgccctagcagccggccacatgttcttgtcaaaaacttcaccacgatacttcttcgtaatatttttctagagatgcctcatgcactccctgtgctcaatgccaggaaataccatcttgactgcaccatctaggcacttgcatgtccaaatatattgctagtcctcgtggttgccctattgccttcttgagctgccacatgaaccaagtccagttatctttagattctaa

SEQ ID NO: 67631 - DNA, 562 bp, Zea Mays
tacctcccctggggcttggtgtttatccgcgcatcgtgtagagggcaatagagggagttttgggctcgaatttggcggtttggctgtccgtggccatggcgccgctgtggtcatcgggcgccgctgtctcggattgaacgaagagaggagagagtggaagagtcatgggcaccgtttatccgattaccgacggtggagattagacgtcagataatgtttcgaccaagaggatttcagccgtagatgcgtgatacagtggtcaatattaaatccttgccatcggatttagatcgggcggctctgggcgcataccggttcggccaagatccgatctaatccgtgccctccgtgcgagatccaacgaccgatacaccgcgataccccttcggcctgtctgtttcacaaaagagtccctgttctttacataatccaacccgccgtcctcattgacagtaatatgagtctagggtttacttgcgccaaggcccctgagcttactacaaatcgaggccgagtccagaaaggattaaaaatagataaataattatagaaattagttttt

SEQ ID NO: 67632 - DNA, 486 bp, Zea Mays
cctccgctgatagctcagcaatgcggcggctatctcgcgcacgctccctatttccatggcgcagttctgacatgagtcgtaccaccctggcctctagatcccatatgggatcattgcttccgctactgctcccctcatgtcgaggagccaactggtgcggggcacgcctcgaggtccagttgcctttcattgggtggtcttggtacacgccatacctccataagaggggaagatttatttagtgtagtttaaacatgatgcatgcatgacctaatgattatggaatcaacttttcgttgaacccgtacctcctacgtatactattatttggcactctgttacccgacttcaaaatataagttactaccagaaagtggcaagataagaatgaaagaatgtttcaaggtaagtattttaaaaatcttttgaagtactacgtaatgtccgaagagacaggcttcgctctgataccagctgtcacggaac

SEQ ID NO: 67633 - DNA, 510 bp, Zea Mays
gtcgggacaggattttttctgtctgttttcaaccctaatactcacaagcaacaaatagataacatgtggagaaatatcagcaaaacatacaatgtggggaaagaggggattttcaatgttgcttaccactatcacgagaatagataacatgtgctgacagtttcttcgtgttctccaatctgtcattaaacaaggcattaacactggtactatcacagtttgtaagcaggttagggcctaaaaatcaaaggtacagcataagtgaaaggatacagcactacttggaaaaatgtttgtgtaacaccgattgagatggtttgaactaggcctgttcaaatggcgggtagggtcaggtcaagatcagcttgtgggtcgtttggcacagcccgcacgacccctgtatagttttgggttgggtcaggttggaccatgcctccatgtccaacgcgtcggtcggttttttctggattgttcgggttttttggctttgggtcaagattttcagatcgg

SEQ ID NO: 67634 - DNA, 542 bp, Zea Mays
ctaataactcaaggccacatgccaccacacatgattccttaaacaaccagcacacacctcttaatctatctatcatcgatccaagcacaagcaaacacgtctcaggcgcactagtaccctttaatcatgcatgtgtgatgtgtagtgggctcaccacaccaatcctttgccagcctgtcgcctcagacgatataaaataaacaacatgggttaacaggctctaatgtgccagcatgttccccggtggggagctggttatggtagacccaaggtgcttcaatcgattgaactaatgagatgcattgcacatgtaataataatctccatgattttagggcctgggtgccttgatttgcagccatgttccccaactcccaccttcatgacatatgtcaacgggaaccatgatgtgtattatacccacgatcacccgtagagtacgtaccaacatgagtacatgacacatgtacaaagtgccagccgtcgatacatcggcacaacgatctccagtacacgattagtggatagcacgcgcaaattag

SEQ ID NO: 67635 - DNA, 709 bp, Zea Mays
cgcgacgacacacggaggtgcggagaaccgatttggggggaatcccaaattagggcgtggtggtggacgataggagctacctaggggtgggttggacgcgtaacaaagaggcggagcaaagggtatcttcaatttatagatcccgattgaactgggcacgaattttggattgagatcacgattaccacggccaggatatttcacagtggcttgctcaccgtggcacgcgagagggaactagtccacggacgataaccagctgcttgccacgacccttacgatgcgaaggagtggtcattacgtgtcatggctggagaaacggtgagcttcctgtgatgccagcgtgactgaccgcggcaggacacgacggccggttcggccaacgactggattcacccctccccggatattttcaccccgcacgacgttatctacctctcccgcggcacaaatctcccaggcgggcacgaattgcggtggcagatcaccgacgtcaagttcacggcaccggagatttttttttcactgtaccatggtgatcttcatcagacgctctgacagaacgatttggagaacttcgttctccatttttcatgtgacaactcactcacctgcctgcatcaattttgtcgtccaaggtacaaactacaattttgttacaaagatcttactcagacatccactcaattcctcacaatttgatctcaaa

SEQ ID NO: 67636 - DNA, 476 bp, Zea Mays
aatagatcaaatatggatccaggaaaatcaatagatgataaattcagcaagttgcatccaagttttccagtagacaccagaattggcatagttggagcagggccaagcggcttatcagcagcatatgcactagctaagctagggtatcacaatgtaaccgtgtttgagagatgtcataatgtttcagggatgtgcgagtccattgatatcgagggtgaggaacttgactaatgcactcttgttcaattgttttgacatctgtgtatttattatcattgacattgttattcaggaaggacatatgatctgggaggacaagttatagcagcaaacagtgcccctgttataactcatctggcaaaggaactaggttctgaatttgaagacatggatacacacaagcttgctcttattgacagccaaacaggaaacattcgagatcttgaagttgctgaggactatgtatccatggtttc

SEQ ID NO: 67637 - DNA, 511 bp, Zea Mays
ctaaaaagaatgatgatattagtgatttttttgacatgatatctcttctacttaatgtggctggagcttcttgcaaaagaaaagacatgatacgacaaagtcaacaagatagagtaaaaaaagcaataggcagtggacagattagtactggaacaggattgaaccaagaacaatctcttcaaagacctggagacacacggtggtgctctcactataagactctcaagagtcttaatagcttgtttcgttctgttattgaggttcttgaatatgtggaaaagcatggcccaaatgacaaaaagagacgccaagctcgtgggctactagattatctcaaggattttgattttgtgtttcatttacacatgatgttgatgatcctgggctatgcaaattctctatcactttgtttacaaaggaaggatcaggatatattggaggccatgacagaggtaaaattaacaaagcaaaaatttcaacaaattagagatgacggttgggaacctttgat

SEQ ID NO: 67638 - DNA, 535 bp, Zea Mays
ccgttaacggctgccgtttccccttctccctccccactaactctcccattgccggcgccattaatggtcgattgaaggaaccggccacctctctccctccctcggcgacctctcccctctcctccctctctctataaaacggcagtcgagcccttctccctctccattcccaagctcgctctccattccatcccgcctccctgcctcgctctcacacgctccacttcgctgctcgcttgtttgctcgcttgtttgcgtgtgtgtttccgccatcgcgccgctcgccgtgactagaggtccctgctccttccccgtcaccggcgaaggcgaacacaagtcactggcgtccccttcgacgaatcactgtccagaacactgtccgccgcagtgaagccaacccagtctctagcccgttgtctcctttgccgtgaaaaccaagaaccggaggtagaagatgatcgattcctattttgttccctgacttttgtaaatttggcgctcatcgaccgctgtcgacgcagccacgcaacacccc

SEQ ID NO: 67639 - DNA, 276 bp, Zea Mays
ggattttttgcgggggctttttggcagtatattacatggctccgcctcgttaaaaacctcaccccccgggaggaaaagagtgcaagcctgagtaacattgtttgaagaattacaaaggcgcttgggccttggatcttaaataaagaattcacggaggttatctatgttccatgaatgctctaagtcttcgccagacgatgttgttaacctgtaagcgtttggggatgcctttgtcttaactatgtatggcccttcccacttcggctctagcttgcc

SEQ ID NO: 67640 - DNA, 558 bp, Zea Mays
ctgggtgagaattttgggatgttacaaacctaccccacttaaaggaatctcgccctcgagattcagacggggctcaagaaaaggtaagggtattccttcctcagagagtcctcactttcccaggtggcttcctcttctccatctctgctccactgaaccttacagagtctcacttctgagttgcgggtccttctgactgctgagtcgagaattttcactggcttttctcggtattggaggtccttttggatctgaatcgcctctgcctcgatgtggttttctggtacttgcaggcatttgcggagctgggacacatggaacacattgtgaatgtctgacatggattctggtagctcaaggcggtatgctgcgggtcccactcggctaatgacggggtaggggccgacgaaacgtggtgctagctttcctttcatttggaaccttttgacaccacgcatgggggagaccttgagataaacgaaatttccttcctcaaatctgagttctcttcgtctgttgtctgcgtaacttttcggtcgactctgagcttcaagtaac

SEQ ID NO: 67641 - DNA, 895 bp, Zea Mays
ggtttgcatcaaagtaaaaatttgcttccagaatgcactagtaaacaccttttccctgtcagaaacaatacacaaagtcatcccatgtagcttgcaaatgttatccactattacttgagccacttgttgtgcagaaaatggatgtttcaaagggaagaaatgggcatatttggaaaagcgatctaccaccaccaagattgttgtatatccctctgacttaggaaagccttcaacaaaatccatagagatatcttgccacacccctttcgaaatagataatggctgcaacaacctagcaggatgaacatgcttagctttagctttctagcaaatagcacactgcttcacaaagtttgtaacatccaacttcagccctttccaatagaaagcctttttaaccctctaataggtaggaagaatactagaatggcctcccaatacactatcatgcaacacggagatgagtttagttctcagagcagaattttggcccacccaaatctgatcaccacgcctaatcaagccttgatgtaaagagaaaccatgccgatcaggacttaggacaaccagtttggttaacaactattgggcctcctcatcggtcacataagaattcaatatttcttgcaaccataaaggtgtcacctcagacacagcatgcagagctaaagcatgtcccaccttagtcaacgcatcagcagccaaattttcctttccttgcctatacacaattttgaactgaagacccatcaacttgggcattgccttcctttgcaactcagactgcaattgttgtccttctaagaaacacaagcttttatggtctgtcttgataatgaattcattgtgtagcaaataggttctccatttcaaagcaatggtagcctcatctgtc

SEQ ID NO: 67642 - DNA, 472 bp, Zea Mays
gtaccaaagaattggacttgatacgctgaactagccgtgtagcaattggtgttcccaaaattcaatgtgacggtgtcctgttggtcagttaactgaacagaccttacagcaagccaaaggtgaaggaactgacgagcctagtcattagtagtaagatgttgcagacccaccatccacctgttccttgcaagggcattttttactgagtgattcttcctccttgcaagtctgaagcagctagaggctatgtccataggtgttgtaccattaatccacctatccttccagaaatttgttctttcaccatttcctagagtgagaaatgtacatgaccggaagagtgccaattcagcttcggtggcggcatgaggtaaagtggcccatggtttgcatgtgtcagtccatttataccaaagccatcgaagcatgagggctctgttgaagcggggcagatacttaactcccagcccgc

SEQ ID NO: 67643 - DNA, 589 bp, Zea Mays
ccagtaagaacctcctcaaccgcatcgcgttcacctaaggatcatgtagagctcaccgagatggaaaatagggcactggggcccctaatcgctcgtctccggcgtgctgcgccgccgcacggtgctgtggcgccgccgctttgttgacagggagaggagagtttgggggaagggacgtgggtcgttgaaacggagatgtacggctgggattgaatctggattttccctgggtcggtatgtgcgagtccatccgatggcaatcgtagggtcagcattagatctcagtactttaaatcaagaccatcgatcctcgatccaagggtgaccggagtgtaccgtttcattgttaggatgaatctaatcgtagccctagattcctgatcgtgcggccagcgcgatccgataccccttcggcgtggtaatttcgcataagagaccctcggcttttcctataccaacccgccgtccacctagtttatatcctgtgtcttggaattattacaccgagacccatgcacttcatagaatttagggcgcaatccagggaaaatagaaaatcagggaaattgatttataaaatgaatttttt

SEQ ID NO: 67644 - DNA, 314 bp, Zea Mays
taaaatggagagtaaaggcactaaaagttttagaatcatggctaagctaagcattaaccataacaaggaagaaaaccctatgctccatacaatgttcacccacaaacaagattctaaaaccctaattacctcttaaacccttaaactgtaaccatgggattaaaagggaaagagtgggcaaatgatcaaaacataaaaaggaacctttactaaagatgaagagtattagtaaagctacaaaatttagtaagagaaatattgcaaaaaggcccaacaaaaacctcaaaatagttcaccaagtggaaagcacactt

SEQ ID NO: 67645 - DNA, 662 bp, Zea Mays
taaaattttacgcccactataagtagcttcagccgaagggtcttttatgtcatctgtggagaaggcggcctcagcctgggctgcaattttaatgtggtcgcaaccagccttctccagaattgccgcaatacctcgagcaccagaaaaggcacaaatatccttgtgatcgttcaggatttcttcaaaggcttcagcttccccgcttatccaatcaatgacaccttcggggttgcctcgaataaagttctcttcagaagaataagcacctacctttgcaaagcctcttttcaatttttttcacgcaatccaaggatttttcgaagcatctttccttggattcgcgaagctcctcaacgtttttctctagcctagtttttgaccattcactaatttcttcactggcttttgcaagtgcaaagttctcattagcttcggcgagctttttctgaaggtcttcgacctcggctttatgagcttcggcctgagcgttgtattttgcttcatcttctttcacttcactcaccaatgaaattagaatcttgtccttctccaaggcttcaattctcagctcaattacctctgatcgaaggttgccgagagctatagtgcagctttcgtcttctgcattcttttgcgccctcagagcattgctaagaattaag

SEQ ID NO: 67646 - DNA, 277 bp, Zea Mays
ggccaagtcactggtatggtctgcagttgctgtgctggtagatgttgttgcttcgacaagtactggcaagcttcgcacctctgaactaactccgctgcgtcatttttcgctgttggccaatagaatcctgacctgaagaccttcccgactagtgtcttggatgccgcgtgtattccacattgcccagcatggacctcatctagaagtcgcttcccggtagatgagagaatgcacttcatgaagacgcctgatgcaccccttctatataatgtctccc

SEQ ID NO: 67647 - DNA, 345 bp, Zea Mays
aaattgttggactgctgatcgtagcgagatccgatcatgatatatacattagactatatgcaaaacctttggttttagtattcgctcacgagtcatttcagtgagtttgctgccgcgcggccaggtggcacgcgtagggcaatacgactcgaaccataaccatactcagttagtagtacttcattgttaacatggaatgtacggaaaacaatactctattgattggactcaatatatccgtcctaaaacagatggtcttagaaggatccaagatttatcccaaaataattaatatttttatttctcaatttacatgtgtcttccttttcttttaatacatttttc

SEQ ID NO: 67648 - DNA, 1699 bp, Zea Mays
gcgctctaccactccgttggactgagggtgatatactgatgtgaggacgacctttgttcctagggaggcacagaaatcccaaaagtcttgattgtcaaactattttccattgtctactgttagctcggagggtaccctaaaacggcagacaatgttttgtgagaagaatttttgaactgtttttgttgttatggtggactgcccttgcttcgatccacttggtgaagtattctacagcgacaaaggcaaatttgaggttaccctgagcgatgggaagatgccctactatgtcgaggccctagcactgcagaagccatgtgtgggagattaactttgtgagctgcgaaggcgtcctgcttcgaggtgcaaatttttggcaggcttcgcaggatcgcacaacacggttcactgtgcatacaatatccggctagtaaaatccttggcgcgtgactttggcggcgagggccctagcgcctgagtggtagtcacatgttcttttgtgtacttcgcggaggaggtctacgccttctatagccgtgatgcatttgagcaaaggttgacatattccttttttgtacagtttcccttctattagggtgaaacaacggcttcggtacttgagtcttttggcctcggcttggtctgtaggacgatagtgcctttgtaggtaatggacgattggtgccctctagtcttcggtcatgatgagacttataattctgtgcccataggggtccctcacgacggaggcttcaattatctgaaaaatgaagattgtgacttcattgaatttctcgactcgacgactatattgtaccctgagagttctgctacccacttgcctatcctggttgtagcttctgggttgttgaatagatcgttgaggcttcggtctgttgcctctcttatcttgtgcgcttcaaagtagtgacgcagctttcgtgatgccatgagcacagcgtatgctattttctccatttctgtcatattgcatttggagttgttgaggacctctaagatgaaatatacacactgctattgcagttttccatccttggccttctcctgcaccaaagttgtgctgactgcgttgtgggatgcagcgacgtacaagagtagagtggaggtgggctctggtcttgttaaggttaccatttctgatagataagttttgagataatcgaaggtcgctacctactcgggccccagacaaattttttgctaccctcaaggtctttaggaaaggtaggcttcactctgtagatcgcgagatgaatatatttaatgctaccagccttcctgtgagcctttggatgtcttttgctgtttgcggaggctgcatgtccattattgctttgactttggtggggttggcctcgatgcctctatgggatacaaggtagcccaagatttttccctggcgattaccgaagatgcatttttctggatttaggtgacgccttgcttcgcacattcttgcaaacgttttgacgaggtcagcaatgtggtcttccttgtttttgcttgagacgacaatgttgtcgacgtaagtgaaaacattacggcccaactgctcttcaagcagtggctttgttaggcatgaaaaagtggagccgacattcttgaggccttcgggcatatgcacaaagcagtatgtgccgaagggtgttataaagcttgtcttcgctttatcctcctt

SEQ ID NO: 67649 - DNA, 288 bp, Zea Mays
ttggcatgaatgtgtgctacactcaggatttgttcaattttctttttaccccttcatgcattctaagtcaatgtcgatacttctttcattttagggagacaacttaagcagtagcagacaacaaaaattgatagtgggttggtttcacacggaccctgttgaaagctagaaaaatgtaagggaaagcaaaaaatgtgaatgggtacatcatattctcagtgaataggatcaaacagaaagaccttgatatcaatttttagttgctggagtcaggggtgctttcatttt

SEQ ID NO: 67650 - DNA, 309 bp, Zea Mays
caacagaacacatccaccaccacacgaccattaacaacctagcctaacctctaaagatgagttggcgggtgagaaactcatgtagaggggaggctcccgccacactccaaaaaataccctcattctccacattttgtaggacagtttgaacacaagacattttatcttcaaaacacaaacattccgatgcttccaaatctcccaggcgatcaacatgacgaaggaattaaggcctttccttagctccttcgtaatttccttgaccattcagccccaccagcttaagaatctcttaccaccagataatgc

SEQ ID NO: 67651 - DNA, 384 bp, Zea Mays
gatgaaatgacgagtacttttctaactatatagcttagcagtagacgatctttcatgtaagttcgactattcttctattactatttttagcgtttaatataggtaatggtgtttcatctattccattcatagaaaatgttataaaagacggggataaataattaaacatcactttccccacgttccatatgtcacaaccaccagcaccgcgacaacgggatacttcgtcgattcttggacctgatgtaatgacatgtttagccaatttagattaattctactaagaaatatccaaccgagctttttttctaaacatagttaatttagaaaaattagccaacatagctcaatttttagaaaaaaatagttaatttggtttaatta

SEQ ID NO: 67652 - DNA, 394 bp, Zea Mays
gggaaggtgagagggtcggcggtgtcgtgcctttctctgttggtgctgttggccgaggccgggctcgggcgatacaaagatttctcccgagggcgaggacgggtcgggacaaggatacgcagtcgtacctggagtggttggaatagcaatcggagtggtctcctgcgggattcgcgggaggggttcttggcatttaatgcgcttctgccagggcagtcggccgaggtcgagcccaggtgaggcagagttttctcctgaggccgaggttgtgaccagtcatcgcatgtcctgctcggagttgttgaaacagtgatcggagtggggaaacagtgtcccgtattcgcgctcgcgcatcgttgttggcgttgaaagtagattagaccattgtcgcacc

SEQ ID NO: 67653 - DNA, 805 bp, Zea Mays
cggtgagcgcacaccgcacggtgtttttgattaatttgggggaaatccaaaattggagttctctggtgaatgatttgagacacgagtgggtgcgctgggtgcttgaatacctagcgaagctgagagcacgctcaatttataggattcgagggcggtggcttgtgaattggacgtagtgcgctggcggccggagaggcagaagaacactggtggctttaatcgtggcgttcaccggtgcaacggctcaacgattgcgatcctaagtgtgccacggttactaccgcacagtaacgagccacggcgtggcatacccgaggagaacggcgatagtcgcgtcaatggctgttcggccacgtcgccggcgcaggtgggcaaaagacagagcgaccacattgtcttgtgttcatccgcgacgagatctttttaccgtcgagcgtaatccactcgcccgaggcacgaatcgcgacggccggcgcgaatctaggcgcaaaggccaccggcggcgaggggggctgaaccaaagatctttgtttattgtaccatcagattcttattcagtcagcctgtcagagcaatttgcagggagatttgttcccaaattcatgtagtgactcgatcatctctctttatcaaagttgtagccctatgatccatctacaatcttgctatagcaaccatagtcaaacaattactggatcatggtcgaatccaatctcaaagcttgcccaacttcactgttatcccttattcagttcattggctgactgtcagcttgacttaagacctaattatctccaaatcttac

SEQ ID NO: 67654 - DNA, 803 bp, Zea Mays
atcacggcgagctcagctagcagttggtgaagcaccagcaacgaggtggggagtcaaagcaagcgccgccgacgttgttgctgtcttcccctttgcatgtatctaggcagggggtgtaggaggtgtcgcacaagccatggtaggagccgctcaggtgcctgcaggtgcatatgtctgccccaacggaggccatctctgcatgcatgatgtaaaaaaaccccatagttaattaaaacaaaactgagatatgaaagtataatggccattcataaatgtattttactcaaaagtttgatatctagaaggggaaaaaaataaaacaaatagtaatttaggacagagctgggaccggtggtgacgatggccgcgagtagaaggaagatagcagcggtggcagagagagtccttggtgacggcgccattggaggatgcttaatagccttttatttactgcaaggtggtatgttaattggagacgaatgtaatggcctagtgaggagattgctgaatgagtgagtgattcatcgaggagaaggttgcaatatatagatagacatgcgctgatgcgcaggtagcagccggagaagacgttgtgatatatcagagacgtacgagacactagttacaatgatgatgatgttcggagagatcaaagcatggcttgtgcaacctacaatgctgctacgaggaatcaaaagatataccagcctgctgcggctgatcttttcatgaagatgtatgtcacctagctagtgtgaaatttaataatctcagacaaagaaacgctacgacgtacatcagcg

SEQ ID NO: 67655 - DNA, 410 bp, Zea Mays
cgtcggtccaccatgtgtcagtgccttcgttggcccacctgttagcgtagggtatgtgtccactatttggtgcacgacgcccgtggtgtgcacgacattgtaattactccgtcgagagaaatattctcggaatatagttggtaaccggggttagggtcgtattttggaccacctacccttggacgggcctataaatatcccgcctgcagctggatgggacacacataacaagaagctatagttctccgctattcgttttgccgcgctcctgagctctcacctattctctgagtgtttgggtccacctgacagtgcaaccgcgtgtcagtgctcaacatttgacacccaccgtttgtgtgacgaatacaacaaccacatgactcccaagaacagcacttgtcctagcccac

SEQ ID NO: 67656 - DNA, 375 bp, Zea Mays
ggatgtgaagggtgttatccagcgtcctatatggtcacgcttcggcatcagaaggccatccaacgcacttggaaatgacgtgcaagcgtgccaagctgctttcaacatagtgtgcacctatattggcacaagagacttagttcaggagcatatcgcttacaaagtatggcctcttgcaagcgaatgggaattgccaaaggaagttgccgccgactccagctagggtggcttggtttatcttaagtatacttttcggttcagaaactagtttgatgatccaaatgatgattggctggaggccataaaggcaacaagtgatgaacttcttggagcgtactcgagggcagaagacgaagctatgacggctgccttcgg

SEQ ID NO: 67657 - DNA, 612 bp, Zea Mays
cgagaaggggtcagggtcggacgacaacgcatgtcgagaaggcgacatcggagcgtcgggaacggggcatcagagtggattggtttaggtggtgttggaaagaaaggactgtagtgacaagaaggacgagaattagagaatgcaactgatctgactatgagccctacgatagaactagtttgatttacctaattttttttaaaaacattagatataaaatgtactaaaagtcgaaggggcacggcccctttgcccccatgttgatccgccactgaaagagagccgcgtcgtcgttgctttcactgtcaaaactagtttttgggatgtttggcgacgaaagctgtgcggttagggaggaatctgactgaggcctggatacggggaggttttcataggctttcgttcgtcgcttttcttcgttcggtctctagtctcttagtacgtggtaggtgtaggtgtcataagaactacgcgagccatacggattttagtatcagaaatgccaagtgtttgctccattctcatcacccccatggcgcctgtgtttttagttactctcggccggacggacgagtagttgctgtcaggcttttttttatcgctatggaacac

SEQ ID NO: 67658 - DNA, 384 bp, Zea Mays
tgtcgcacgaagtgctttcttttctgtgttagtcttaattagttgatataaactagtgtttagtatattgatattctttttagtatttaaagcttgctttgcaccaaattttagttagattatagttgtctacgcaaacaagagaaattaaaaacatgacatcccataacaattctaggtaatattatgtagctaagcaagagctaaaatgctcataccactgcaacatatttttaggtatatcgttgctttcatgtagtatagagctgcatcagttcatacataaaactacacgaccatgtgataagtatctgagctaatagagcaaatacggcagatgctgttttgacgctctcaggaacgtatggagaactgttggagaga

SEQ ID NO: 67659 - DNA, 1205 bp, Zea Mays
ctcccccctcgatcggggaggcagaccgatgtccgcacacccagctggacagagtcccccacagcctcagagctagccgaatccagggtattgcttgccgaaatatgtgtgctgaaagacaagggcctgactgccgaagctgttgttgctgactttgtcttcaagaacatccaacctctaaaagatagagtgtacccagcttatctgtacaccgggctcaatgaccctacccgaattaccaatagacggattcctcacgaggacctgctgagccggattgacttgatgttaaggggcaaggtttcgaatgctggtgctcccctatcttattatgcctccacagagtcccttttctgaattcatttccaatcctcatgttcaagatggtagtctgggtcatagagtgcgaccctcattgggtgacatcgaggctttcatcgcttcattccggaatcttcctgaagcagagaggtagactcatttccagatgccgatcagtgctgatgaggtcgaggtgaacgtagttcttagtatgctggatggagaatcgtctgaccctgcccgtactgagtcgatagctgttgcgattgggtagaatcttggtgaggacgaagaagttcagaatcctgaaggtgtttgtcgcaaccgatcgcgccggacaaactacccaactgcgcctgatgaggggaaaaagagaaagaaaagacttcggcgaatatcatgcttagaacaagatgctggtccctcgacatcactcctcggtggtggctcggcgagcaccaccctcgaggacgatatcagaggttgtggtgatgatagagttggcggttgtgtgcttgatgaggacgaagaggaggaagaagaagaaattcccttgattcgtaagaacacccgtagcagcaggagtagtgacattccgacacaggccttatcaggacttgttagcctccagggggttgacaatgtttgcctttgaccatgcattagaagagattatccctaaaaacctgttatcagagcctactgaagttgaaagttccatcgtctgttcagaggttccggatgatatccctttgtcatgcaatcctgtcgggcaagaggtaacccggacagtttctcacgcttcgtcgaccttggagggcggtctagctcacgaggacacgctggcccttgatgctgttggttagagtcacccggctcctctg

SEQ ID NO: 67660 - DNA, 379 bp, Zea Mays
gtcgttagaagcattgcagagagacgaggaaatcaccgatatcgaagtcatgcaagggtatgcaagtgttcccatttcagaggatttgaaaaagatagaaactatgacgaagaagggggagactgataaagcagtcgaagaaggggaggatttagaggataatgtctctgctactggggatgatgttgccggggaagaagagtatgaccttcatccatccaagcctagttatactgacatggtgcaatatctcataaagcccaacgagtaaaaggtttaaaaggcttggatatattgatgctgaaaatttaatctgttttgtcacagaaggaagttttcctaagctgaaagtcatggtgtataagagcttcttctgggc

SEQ ID NO: 67661 - DNA, 999 bp, Zea Mays
aagattttgccctaggtcaccacatcaactatgtagatctattaaaggtgaacaacgttgtttaagaggttaagcattgttgttatgaagaattgggagataattaaacccaaaattgggctgtcaggctatttgatgtttgaaattcagactatcagtggtactgagtcatctttggacaggaaatcaagcatgatcgagtgggaatttggctatagttgttatggcaagattgtagctgaatcattggtctacaactttgctgcagagctttaggtgagttgctatagaaaatttagagaaaattgaccctaaaacctggctgtcaggcgcactgacgaagcattccatggtacaatgcaccccaaacagaaacagatcgcggttcacccccctcctcatcgccggtgatccgtcgctgggatggttgattgctcgtcgcgattcatgcaacgtggtcagtagataagcacgggcaggtaaaaatcttagcgcccggatggaattgggtgtcgtggcggctaagcttgtcgtacctcccatgctcatcggtcgatcggataaccttcgccgccgttgatctgtcaccggtgcgcgccacgtgcttaagcgctagcccgtatcttggtgaatcatggagtgcatgtccggtgatcgccggaggactgccacggtgaaagccacccgttcggagcaccagtgcccctttccccctccgggcgccagcacttctctgccaaattgagcgccaccgctgttgcgctctataaattgagtgcacccgcagctccgtagtgtaatcacgcatctattgcaccaaaccttgccccggattatccaccagggaccgagaattgctcgtttcccccaatcacggtttccgccaccgtaaaacacacctcgccgtggccagcgcgatacaggttagctcgtcccctctgctctctcatttgagtgttctcatgaacccgtgatgctcatagacccgcccaattggac

SEQ ID NO: 67662 - DNA, 790 bp, Zea Mays
gcacgaagggttagctgagaccgtggagcgtcgaagacaccgaaattgctcacctgactatcgtcttcgccgttgggccgcgatgcatcgacgctagggctctgtgcctccatattcatggtaaaaacctccctaccaagtccaccttgaccctctgaacatgtaccacctattgattaaagagttacgggggttcgcgcgaggtgaacaaaaccaatcatggtgaccgtcacggggaaccaagcgtcgtcgtgttcgaccacctggaggagagtgatgaccatgggactgttgatcagaggataaacagttgagattcgatcacagtcaccatttcagccttttgatctgggccatcaaaaccggaccgggcgggtgtgtgacaagcttagtttcttttttatatggatcgttgatctccctgtgggaggccgtgattaaaccaagacataacccctcgcttcattaaaccttggtcgtgggatgcaaatcgtccggtggagatttgatcctagcagggggtggtatcggccatcgatctcggatccgttggtcaggaatcgatcccgcctccttttaatcctaagcataggatcaagatccaaccgtctatatatcatatcgggtgtgatctaatcctagccgttgtgatagatcgaacggtccacatccctgcataccccttcaaccggagatcttgcataagagaccctaagcttttaacaaagtaacccacagttctgacctatgtaagaactcttactaacaggtcccagattttatgatttca

SEQ ID NO: 67663 - DNA, 543 bp, Zea Mays
acactgctcaagaggtagctcaggtgtttctggacactgtggttaagcttcatggtgctcctaaaactattgtgtcagacagagataaagtgtttacaagttctttctggacacatttgtttcagcttgtgggagtgaagttgctattttctactgcatatcatcctcagacagatgggcaaactgagagggtgaatcagtgtttggaacaatatcttaggtgtgcagtccatgatcatcctcacaaatggaggcattggttggctttagcagagttttggtataacaccacctaccatactgctatggactgttctccctttaaaattatgtatggttatacacctcctatgatggttgttccttgattgagagaggaaggggatagggatgtcactacctggttgcaggaaagataagtggcctctgaactgcttagagagaggttggcacaagctcagaatagaatgaaacaaatggcagacagagggcgaactcctagggaattccaggttggagaatttgtgcttctcaagttacaac

SEQ ID NO: 67664 - DNA, 306 bp, Zea Mays
gctcttcggataatcaaagcaaggcaaaggtcaaggctcatttggattagatgtggagacgccaacactaaactcttccaactgagagccaactccaggaggagaaagaattttatcgcacatctgaacgtgcaaggcagaactgttacacagcacgacgacaaagcaacgacactgctgcaccacttccagtccctcctgggaacttattcgacaagaacagcatccataaattgggatagtttaccactgccaacgcatgacctacattcccttgatgatccactaactgaagctgaaattcag

SEQ ID NO: 67665 - DNA, 1466 bp, Zea Mays
gagccagatgtgtctccccatcagggaaggccacggacacaaccctaggagcgagttgaatcaccccggggccaaggtcgcgcttcgaacggcaacagggacatggtcccctggcggcggcgcttcctcaatctctctctcccaatcgcgagctcactgttggtgctaaaattctttattcctggcggctaggatggggaggggatgctagcctatttatacgcacgagactggataaggaggggagggtacggatgaatcccgcccggatttctcgccaacaacccgctagaaccacgctaggaatggaggtgggtgatggatcttacacggtggccccacctggcagtgacacagtgaaaaagaaaaagaaaagggggcgcaagtgggccgcgcgggagagaaggaggagatgggccagaatgggtacagtcggcccaggtaaggtttcttctctttttctttttattttctgtttcatttctttttcaaattcaaacttcaattcaaatttaaacacgatttaactttgaatttcaaacatcattctaatgtgaaaccaaatcctaacttcatgtttactattatttatattattattattattattattatttatcttcccctcaccatttaattaaatgattatcataattatctttctcaattcttttcaaatccatgttttgatcttcaaatttccaagtgtctaaattcacactaatgtggatataacttatatcgtttacaatgttattagtattagttttttttattcttctcattgttatgtattcatgttcttttcttcttctactatttattatttattttcttctgatgcaaattttgggctttacaaatcctaccccccttaacagaaatctcgtcctcgagatttgcaaggacagggatgtaaaaagctttatttactatttggcctttaacttctaattaatttaggaataagaagtttcatgttatttagaaagtggtcacgaaaggatgggtatatattcgtatagtcaccttattgtgtaggataaaagataggttagggcaaaaatagcctggagtaagacagtttatggtgagaataactccgtgttggatggtaatgcatctgatgatcaagtttgacttctctcctttcttgacaaggttgatcttgttctctttatggtcttggtctccttgattcgaggttagtgtatatcatcggagttggggcatatggtcgaagtagttatgggcgagatggactacatgatgtaggtcaaaatcttgtttgatgtttggtaggcacagatagattatgcaacccatcatgactctattggttgggttagagatattaggatgacataaaatcttttcaagataagatgaatcctctaaggtaatagagtatattttaagataagatggatctattaagctagctagattgtagtgggggatagtct

SEQ ID NO: 67666 - DNA, 924 bp, Zea Mays
gacaagtcaaccttgtgttcgcaatctcccccttgatgagtgcattatcaacaccaccatttgagcatatgtaaactaaaagagaaggaagaagagaaactcactcaaatgaccataagctagataaaagccagacaagtcatttagagtaagcaaaacttggtctccaaagaaatgggcaacgactcaacacgaccaagcaagaaaaggctagccctaaataagaggcaaaagcagggttcaacaccactagacagaagccaaaatttcatcgaagcacaaaaggctttatcagagcataaaaaaccaattcagagcataaggtcagcacaaaagctaaaatcaaagctagttcctccagaaggaggcaaacgactcaacacaactagcaatagctccaaataacacatctcacacttttgaatgagaggaagcccaaaagacaaattctccccctagatagaggaaatgggaaatctcaaaatctctcccccttgttgacaagtgaacttatcaagcatagacagaggtagaaagaaaaaactccccttgacaagagaacctcccctgagaaaaaacagaaatgcaacagagagtatgaaatagagaaaatgcatgagcttcaagagtataccagtcagagtgtaaaaatgctataagtggtattgtgctaagtgtgcagcaataaatgcacgtgctagcagatgctcaaactgggcatatgcacaagatatgtgaagtgtaagtattttgattcagttttaagcatttcaaagaggtgttcaccacaaagacaacagtaagcatatagtaagcaggaaatcaactaagtgtcagtcacaagtgaacaaggtgaactaccccaaacaatgatcactcatcatgctagaaacatatctgaaatagataccatttgaaattttc

SEQ ID NO: 67667 - DNA, 445 bp, Zea Mays
gcatttgggctgacgggggctcctggcacatttcagagggcgatgaaccataccctagctcccttattaaggaaatgtgcactagtattttttgatgacattctggtttacaacgcatcccttaatgagcacatcagtcacttggaacaggtgtttgaactgctctctgctgatgattggaaggttaagctttccaagtgcaagtttgcctaacaacaggttgcctatctaggacatgttgtcaattcaaagggagtgtcgactgatccagttaagatcgaagctattgcaaactagccagaaccttcttgtgttaaggaattgcgtagcttcttgggcctcgccgattattatcacaagtttatacgccactttggcattatctgccaacctctcactgcattgctgaagaaaggggttctgtacatttggaccagtgaccaca

SEQ ID NO: 67668 - DNA, 574 bp, Zea Mays
cgggtgtgataagcaacaagaatgacagcgggcggtggcgcacaaacctgatcaccaatcggaaagaataaaaggactcacaacatcaacaaatttgggtgtggatctgagggacgaggtgacagagcttatggcccaagcggcttccccacagtcatcactacaacgacacatggagaggaagcatggatgttgtgcccccactgtcgtcaccacgatggcatgcagaaaggacaaggcatgatctcgccgataggagatcccaagcaaccactagatcacgtggagaaaccaatgttcctaatctattcaagcttgacgacacgacaataggcacggcagatcagaagggccagccacacatcctaactacaaggcacagccccgacaaagatatctcctcggaagtcatacattggcggctttgcaagaggaaatctaggtcataacctaagctcgtgataccatgaaggaaaatagaacttatgtaattagatggatgtattgcaattgagtccttaaacgatttatatagagtatatgattcatatagagtacttgacttagcggttta

SEQ ID NO: 67669 - DNA, 454 bp, Zea Mays
ctgtcgtgggccctagaagacgaatcgctcctgtcacgctgtctgctcccacaggcaacagccacgtcttccgcgccgcagtgtccgatcgatcgatcccttctaggggaggggaattcaggacaggaggaggccaggttctcgccccgcaataggacgccgatcgattccggatcttagctcgagagcccggtgcccccttctcggtgctcgttgcaggattttcggtactgttctcgcggtggcgtcccacgggatcgcgccttccttcctcctctattttatgtttttggctggctcttggaatttggttggagagtcggggatggattgcttattttattttgctatgcaatatcttcccgacaggccaggtatttaggaggaagacctgatttgtccttcagctaacagtcaacactgaaggttcacttgggcaagcaatataattttt

SEQ ID NO: 67670 - DNA, 428 bp, Zea Mays
atcaggttttcaaaagcgtaagaaacaaaaaagaatagagggtttaattcagtctcaaaaaggagctatggatagattcgttattaaagaatcacaagtatcccctgtgaatcagccagctgatggaggccctgcaattgatagtactgctgctaacaacgaggttgatgatgttcctattgataacacaaacgtagggatgggcaataatagtgataatttgaatacttcagcgtctatgaatgatggtgattcttttcagcctgatatatttgattccagtgacagttgcatcagcagaacgaagcttttctaaattgaagctattgaagtcatatttgcgctctacaatgttacaacaaagacttactgatttggcccagatatcacttgagagtgaattattggagaagattgaatatgagcgt

SEQ ID NO: 67671 - DNA, 461 bp, Zea Mays
cgagattgtccctatcaaaaatgaatcggaacctcaccaaagcctgacccaagtgggagcgctgaacactcctaatctgaacatgtctaatctccaaaaggtactctcggacaatgtcagcaaaaaattggaaattgacctcattctcaggtagcggttggaccaggacgattccccaatcatcatgagcggacggttgcgggcgagtgacagtaagtaccataatctcccgatgatcaatgggttgcgccgtgaagccttgagggagaaaagggcccggatcaacacgatggaaagccattccctccgagaatccagaggtcgagtccttttggctcgccgcacactcaccactcagacgagggcaaagcaatggtgggattgatcgcggcagaggggtggaagagggttttgcgcacagtgcaagttcggtggaaggcgaagagccacctcttggaaga

SEQ ID NO: 67672 - DNA, 1199 bp, Zea Mays
cctccctacctgacggcgcctgcaataacactgtcttccaaaaacaagatatggctgcgcgatactgagttaaccaatccataccccaagataacatcaaatgaccctagggaaatcaccacaagattagctgaaaatacctcattagcaagaatgacggaacaacccgggtagaccgaacaactactaatggagccattagcagaactaaccacaattgggtgacccatcctctgcacggaaataccagcacgcgacacaaaattctccgaaacaaatgaaaaactagcgccagagtcaaaaagagcatgggaatcaaacgagttaactgagaccgtacctgtcaccacgtctccctgctctctgccatccgtaaagggtagcacatatgctccagaaacacccgtagaagaggaagctcctagagtgaaattaacagaagaaccccacagagtcgtaggatgaggcaggcgtggagctccaaacttggatggtacaagagcggttagtgcaggagtgggcgtggctaggtactgaggaaaagcctgcataggcacgaactgaagagtcccgggcatatagaactgctgctgaggggtggtatagaaaattgctgctcagcgcttgacatcatgttgacagtaccctgcaaagaggaagaagtcactggctcccatttaagtttcccattgagattcctcctacacaccacatccttgtgatcctggtgcaagtatttaacaagttttccaaacgaacgggtatcggctgatctcgatcgcacgatcattgatcaacggccaagattagatctgagcgcgagcgtaaacgggggcgcgcaggtgagcactgacaagcgagccaggggtgtcagtgactagggagggaggcggactgaccagccaggcccaggggcagagtgcgcggacgtgaatcgatgttcgcagatctgaaccgttggattggggacagacggttgtgatggggtgtgcgatggtttttacagctcggtgactggcgttgctccctccacagcggtgaggtcgccggaggtgaggtagacgcagtcacagggggtctagggttgtcggtgagggctagaatgggtgaagaaggttcggcgaactcactggtaggattccggccgcaagaacgggaccggaaacgggagaacgatgatgggaggtgctccagtcggg

SEQ ID NO: 67673 - DNA, 1037 bp, Zea Mays
cgctgataaggaggcactcttcattatcgtctcaaccacgggccacacgtcagtgacgagatcagcgcgccgcctccttctctccgctgagcatctcagagagatacgcgcaagctgctgcgcctgcacaaaagggccattcaccggcggatctgtcgacgatggtgtgcagttcgtcattgatcatcgcatcctctaaaagcgcgtagaatttctctgggaccatggcgttagatgcgctcatacatgcagtaaaagatatccaagaggcagccatagaccttgcttaatattcagaggaacaggaacttattaagaactgagaagagcagagctcataagaatttcgcgcagcctcacgagattccgggtatcctaaaagcgcgtagaatttctgaacaggagcatggggtcagaaggttgatactaataaataaaaaggaagactcatctgcggtaagactgaagtgcagaaacagatatgccaatttattcgaattaaagtcggctgtttggacggttgcgccacagaaacaaaaacactataaaagcattgtaagtcggaacggattaaagtcaaacgaatatgctaaattcggtacggaatcttctcacaggcagtctcttctcaaagcttgtcagcgtcactccccatgtcgaggggacgtctgaaaaaatggaaccataattcctgcacaagcccatcggtagattaatgtgtagcccggaacgtagagagtgcagagtgcagaccctggctttggtgactgtcttcacgaggaatttctgtgaaccgtctttgcgtgtgtgtatgttgagctgaaacgttgcgctccaacaatttgactggttcggttgttacaatatccacttgccttgcatcgatgtaaaatcacaattatctaacttttgaaagaaagaaaaactcagtagcatgcccagaaatctgacacgatgaattctccaatccagcttcatcagaaagagctcagggggaatcttacattataaggtctagtctaggagctacaaaacca

SEQ ID NO: 67674 - DNA, 1029 bp, Zea Mays
ggcgtgaggtattctaggtacgataggcggtcccaactctcttgaatggttcgaccacgccatcaccttcgatcgctccgaccaccctgagcacgttccgtggcccgggcggtacccgcttatcataaatcccattgttggattagtatgactatcaaaaactaatggacggaggaagcagactcaatatcctttactctgccacgctcgacgccatgggccttgactggggctacctccgaccgatgggaggaccttttcatggtgtcatactaggaagacaagcgagacatcgctcgaacgggtcgatttacccgtcacttttggaacaccgaccaacttcagaatagagacactgacttttgaagtagtgggttctagggaacctaccacgccatcctgggaaagttgtgctgcacaaaatttatggtcatccccaactacacctacctgaagctcaaaatgccgggtctcgtgggtacaatcaccgttggcaccatgacacaatacacatatgaatgcgagggcgaatgctgcgacttggctgaaggcgccgccaccattgaagagtagacgcttgatgcaaaaagagtgggtacgaccttcaagccgacagacaacacgaaggaggtgctcttagatcccaagggaaccaacaagggaatgatacgaatcaggaccaagctctccactaaataggaaaatgcgctcatcgacttcctccgcacggagaaggatatattcgcgtgaagcccttcaacgtgaggggcatcccgagggaagtcgtcgagcaccctttgcaggtcaagcccagatccaaacccgttaaacaatagttgcgtcattttgatgaagagaagcgtgaagccatcggggaagaagtcgacaagctcctcacggtcgggttcattagagagatacaccaccccgaatggttgtccatttggtattagtttggaaaaagagtgaggaatggaggatgtgcgtcgattacaccagccagtggcggacccaaaaattggccaagcc

SEQ ID NO: 67675 - DNA, 477 bp, Zea Mays
atacaaaggctggacgaggaagtccaacgacaacaggttcatataagcaagttgccgaaaaagtggtacctctcgcacttcaaggtagatcgccaccagaaggtcgtaaagggagggaagtaaagtacgactccctatcagccttgctgcatcaactccccattgtaagtaacaccacgccattagccgatattcaatctattaaaatttcttttgataattggattgaaagtataatggaggatatagagaatatgatgcatgtatagaaaaagctcatacacctgattttttgtcacatgaattgggcactaaaataactgtgtcaaacacatcggcaacaaatgggtcttctcagtcccagccatgttatagtacgcgaatgaactcatatcaggggcaaatgttgtcaccatcctcattgcccggtagaccggctctaggcacggccgcacagtccgtgcacgatcattgacc

SEQ ID NO: 67676 - DNA, 503 bp, Zea Mays
tcgagctatacagtgcctcattgttaataaaacgtcatgaccagtagagtatgtgctgatctgaacaatgctcgccaacaccatgaccgagtatggatgaacgatgatccttttttgaaaatctttgggatgtgattttcggacaagttttctttattgaaatatattcataaaacatcttccttcatcctaaactaaaattcgttttagttaattaatgggttcgtaccaacatttgatgtatatgtttatatatgtttgtagattcatatttatatatttgaacacggacataaaagttaagatctaaacctgctactattttggtatgggtgagtattaaaagtagatccatttgtgcaagcatgagtaataaaatatatatatggtttatagatatataataccttgtagcatacgcatcaacaatgactccgtggcccaatggataaggcgctggtctacggaaccagagattctgggttcgatccccagcggagtcg

SEQ ID NO: 67677 - DNA, 549 bp, Zea Mays
ggggcctaaacttctttggtccttagtctctcaaggagtgactaaaagaagttaaatcatattaattatatatcttatccctcgtttatttatgttgcagtggaagaagaataatgacgagagaatggtaaagagcattttgatcttcttacgagtcatttaatagggtgtgagtacttttggtccatgtaactaaataacgcagtgaggggctaaactttactagtttcctagaccaaaggaactaaggggaccctacgtgagtttgaaatgcataaaaaatggagtaatcctttgttcatctagatctgtagctgcgatgcgacgtacacaggagttgggacgcacccgcatcattgggggcatccatcgtctcggctcccctacgtgtgtattattgtccggcctcagctctaccctacttattaactcatcctgcacgtgccacgtacttcacgtatccatcattgcctcgcgattcctggttcagattatgccggtcttgactcatgacgagacgctcttcgcgcccccaaccatccatcatgg

SEQ ID NO: 67678 - DNA, 596 bp, Zea Mays
ggtatatatacgtaaaatgttattagtcatgttatttgtttacaatgattttacaattcaggccgcttgatgcgtaataccctacatcctgttttgcggtgggtagtattgctttgatatctgtaggttacaatgagggctagggtttggatgtttgatgagagagcgggggcgtgtataagattagatcctccctagatctgccttgggagggatccctagctcgccttatataatccggcgtggcttgggttacaagtaggtttccctatatatctcctagccggtttagatttcattagagtccttatattgtgtgccaagtgcacattaggccgagaatatgcttcatgaggagctaggggttatccatccccgataaagtgatcgcctgtacgcccgagcttccgagggggaggctgcctacactgaagtggttgtagcagtgtcgggatatgggttgagggccgcttacagggcacatcgtcgtcctagcgtgcgatgacgtcgagattatttgcagcatccattggaataagtgcctttgtttagtcgatgcagaagccctctcgaggcactagctgagccatccctcg

SEQ ID NO: 67679 - DNA, 390 bp, Zea Mays
acattatatgcattttatacctcaaggagttgaaatcactagtatcagatgctcccaaaatagttataacccatcatattttctatatttacaatactccatcagctacgcccgtttgtcccgtgacccagcatgtttctggcttggcccaaacatagcccggtccgatggctaacgggctcgagccgacatgtcccattaagcatgtcggtcttggacagccataccagcgcgcccatgtgctttggctcggccctacacgagatatgggtcggcacagcgacgacccgttgttgtataaggccacccactccaagacaaccccacttccaccacaccacccactttcgtcgctcgtaaccctaaccccctcgccccctcggcccctcc

SEQ ID NO: 67680 - DNA, 729 bp, Zea Mays
gtcgtatagggtcgttcggattgagtcttggtggcgaatttgggctaacggcgtcggtgcggctgcaaatcggagcttcgccatgggcaggggcctgtgcttgatggcggatgcaactggttgggcaattaggttcaaggagctatcgactgggtgagggcttagctaatcggagaatggtgctcgggttggtgggatgcacaaccccggcggtcttgccgccgcgtggtgggctgcgccgccgtggtcagcactgggggagaagaaaggctccggttcgttggatcaagcaccagcgggcaggatcagagcagcgaatagcgttttagttcatttaatctggggcgttcagagctgatcgggtggataggattaagtcagacgcgcagtcgtcacttgtgccgtggatcttgaatcggacgacttgtattaactcgcgggattggcgggcgctggatctaatctgtgcccttagttctgatccgacgaccagggttcattgataccccttcgatcccgtacatttgcatatgagcccctgctttatatagaaaccaacccgcggtccatcgcgagagggttatgtgtcttgggaagatttacaccgtggcccctgtactatctgctatttatgcgcgcaatccaggacccatgggaaattgataaatgaattagaaacatgaatttctagtgtatgaataattctagaactcatttaaatcatagaaa

SEQ ID NO: 67681 - DNA, 780 bp, Zea Mays
ctgaaacactagccgttgcaactatcctagagcctgaaaaaaccttgaatgctcaaaagtctgatggtgttcacccaaaatgccttcgcccgactggtcatccagctgctcctgccgaggggaagaagaagaaaaagaggaggcttcggcgagtgtcgtgtttggaccaggatgctggcccttccgctcctgctgctgaagaagtactagtggaactttttcctggagttgaacccaatgggtgtgaccctgctgacgctgaccccaatgggtgtgacttcaatgatgctgatcccaatgggtgtgacctcgatgatgtttaccccaatgggtgcaatccggtcagagctgaccccaatgggtgtgttgttcgtggcgttgacgaggatgaagaagaagaggaggaaatccccttaattcggaaaaacagtcggcgctacctagtcagtggggggagtagtgatgttccttctccagctttgtctgctctcgttggtctgcaagagttgtccatagcaaattttgatcaggctctcgaggatgtggttcctgaagatctgctatctaagccgacagatggtggtatgatggacgtttgcactgacattctggatgtggggttagagttatctcgagcagcgtctcatgcctcgtcgaccttcgagtgcggtcttcagagtcaagaagctggtctaggttgttccactcccatagaggtagctgagaatccttcagccttagaggtggctgctgcagagaacccggtccccaagtatggcg

SEQ ID NO: 67682 - DNA, 757 bp, Zea Mays
ttgtcgtgcatagtcttgtccttcacaagtacaaccatctggtgtgtgttagacaccacggtgggccaatagaaaccctgtcgaaaggcgtttcctatgaggcttcgtggagcgacatggtgcccacaagtcccaatgtgaatatcctctaggagtcgtatcccctgcttgttggggatgcaccatttctttattcctatatgccccttgttgtacaggtcctttccaattagaacaaaagactttgctcaccgatgaatccttcgcacccccatctcatcttctaggagtgtgtcgttggtcatgtagtcgtggtatggtatcctccagtcacccatggggtctgctagttgtttctaccctcgacgatggcgatgggttcgtgggtcgatggatcgatgcctgaagactgcttatcctcaaggtgggtctgatcgtaatgaacagtcggttcgaagaggtcagtaacaaatacccctgaaggggcagtcgactgtccggacgccatcttcatgagggtgtccgctgcttctttatcccgctagagaacatggtttagttcgacgccatcgattttttctttgagacgtcacacctctcgacagtatgctgtcatcttggggtcgtgacattctgagtccttcatcacttgtcccatgaccagttgggactctcactagatgttgaggcgccagatgcccagatctacgtcgatgcgtagggcatttacgagggcttcgtattctgccatgttttt

SEQ ID NO: 67683 - DNA, 311 bp, Zea Mays
catgaggcctgtgtgcttttcttccctggttatcccggactaccatttgcatgctacataggccaaaattgccacaggcctttttcacctcatccctgttaatccacgagggaaacaaaaaactgctctggcctcgtgtttatcgttcctgtcgaagctctcatctagtctgtctctgtcacaacagccatggtggctagggtttacaccaccggcttccatccgtaggaaaaacctcctcatctgaaatcagtcgttgccctccatcctcacatgcccatgctgcttgtcgcccctctccaccaccagga

SEQ ID NO: 67684 - DNA, 399 bp, Zea Mays
caggggtcaaaagaagctaagtttgagggaaaatgagcatatggacctacgaggatcaaaacaataaagacatatgacttagagtgtttagatagactaaggagatgtttgtctaagtcacagaacttttcaagagtatagtctattaaagacaaaaaaagcccaaaattagcttaagttgggttgttctgggtgcaccgaaccaaatttgtagaggagttgagagaaatcaaacactggcgcgctagactaaagcacttgtttttggacacagacaacttgacacactagatcaagtctggtggtgcaccggacccaaattctagagagcttgatttgatatactagtcaaatggagcaccagactgaggtctagtgagcactagaccagcaatagga

SEQ ID NO: 67685 - DNA, 672 bp, Zea Mays
gtgcaatctcgcggagctatgccgttgacatacatgcgtcggccaggaatatttcgagttgctccgaatcgatttgttgaccgtacgctgctagaagctgattatcaaacatcaaacaactagcggcgggatagattgcttagattacatcccgagctgtggaacatctttggctgcactcttccctttctgcgtcctatacgcctgagctgactttacgagagaagagcggttatagtccgacaacggcggggacttacgtgtgtcacgctgttctttctcccttagggtgacttttctccttagttgttgtcatgctatgtactccggcttaggcaggtttttctcaagttccctcttctttgcatttccttccgctacacctttcttctagttatccacatccctttgaaccgccactattgattcctcttcagactcattagccaacttctttggagagggcttgcgacagctagctttctgcttctttagcttggacatcatcggggggcaggggcctcttatggctctttgacataggaggcgatggaggagggggagacgaccttgtaggagatggagatggagacagagaagcacccgtgccatggatggcaccatcatcatctggaagaggaggagacgggtaccctagccaccacactggga

SEQ ID NO: 67686 - DNA, 757 bp, Zea Mays
gcgcaatataatctgaggataaaatttgtcacaagatttgaatttaaattggaatgaaagtttgaatttggaaagaaagaaaagaaaatggaaaataaaaagaaaagaaggagaaaacgacttgggctgaaaatccaagaaatcgcgcttggcccactagtattttcgtggccagcccagtctcatccctgcaccgtgccacggtatgacatgcgggacccaattgtccacgagaccaagtaatcacccgcgtgtgggacattagctctgtcaccgaacaatgggcctgccatgtctgcttcccaagcgcgcactcagatccgcacacactgacattgtggccccggaacgccagatatcttctttcccatgcttccgcgatgatcgggcgggtggaaaccaactgcggcatgcgcagaccagctggttgactgggcctcgcgtctataaaggatagggagttcccaagccacacgcaatctcttccccctcattagaatccgctccaccgagtttgttccgccgcgaagagagaaaaggaggacaggagggaggtcggacattggccgccgccgcggacttggtcatcagtcactggtgacgccctcaaagcagtccggtgtgctcgacgtgaatctcgggaggattaccgttgggacgccacgggcggtgctcgactgggatgcgcagtacctgtaacatcccaattttgatcccgaggttagaaaccctaaactcctagcccccacttaattac

SEQ ID NO: 67687 - DNA, 481 bp, Zea Mays
tttaagtacggagtaaccggggctttgacctctctcctcaccacgctgcaatcgacctcgtcggggctcgggtttgggggagaataggtgtgggaagggagacttagaccgccgccgtgccttcccatccatgcgtggtcgctggaggccgtaggaggggtcggcgaccatcaccggggtaccccgaatacgtgcgcgagatacacgggcatcgttggaggaagcattgctgggaatttctcaccagaatttgttctgcggtgaccgtccaccttgcaccatggacacacccgcctacgctgcaagtgctggtgagtgccccctctgcgagttcggtttcatcttctctctgcgtagcacggtttgggtcagggcttaggcgtacgggctgggggaattgcggtccgcatcaatggcgccgtcgtaagggcacggccaccgccgtcacccggcctcagggtagaagacgggatgcgcgccg

SEQ ID NO: 67688 - DNA, 706 bp, Zea Mays
gtccaccaaggcgaccagggagactccgttgatgacgactgggagtttcatcgtgttgcccacgtcgatccctgttagggcgtgcagggagatccccagctcttcctgtacggactccgcgccggcgtcgtcgtccatctcgatgaggaaaatgcccttgcctgcacacttgtggtctgtcgtatatttctcggtgcagtgatagcactcaccattggcgcgcttggccgccaactcctccgacgagagtcgcttcatgcgaggtcgtggtgcacccccaagtttggacgtggtcgccggagggagggcctttgaggacgatcgaccggctggtagtgcggcgtgggtaagccgacgctcgtgagcccgggccaagctcatggctgtttggaggttcggtggtcgcttcagctcgacctccgttcgcaagggttcccctaggcctgcagtaaagagctcaacctgctggtgaggcgtgacgtcgtgcgcacgacacaggagctgggagaattgtcgttggtagtcctccacggtgccggtgcgatacaagtccttcagctccgccaagctattgtgtcgcagcggaggcccgaaccgcatgttgatgtacttggcaaagcggcgccacggcaccataccgtagtcgagctcgaagccgaagtaccaatccagtgctgcaccgtccaagtgcagggacgccacccac

SEQ ID NO: 67689 - DNA, 326 bp, Zea Mays
gtggtaacggttgatttggatgatgtggtggtggtgcaggcgatagagctaggatctcttggtgttgctagtatgtgttgtggttttgctggtgaggatggtaatgttcattgtagaattggtgctggttgtattgctggggatggtaggtgtgggcgataactctttggttgtcagtcggttggtttctggccatttgatcctttgtggctttggtttcagggcagtccctggttgggtgtgtcaagacttcgccatggaaaagataatagagccttcgctgttgtgggcctcagtctctgcccctgcttctggttgtgttatcg

SEQ ID NO: 67690 - DNA, 460 bp, Zea Mays
gagggttgaggccttacttgggagactgcttcctgatgacctactaggtagccacaccaccagaatcgcaatctataagtaactaatcatcagagtcatctgtcgtgcaatcctcaatgataacctcattccacttgttgcattgtcctacatcacacttttctgcatttctcttgtaataattggcttctacttcatctacagcttgggagaatagctaatcctcatcctcagcctcaacctcagcctcatcacacttctgcttgtaataagcggcctctacctcttcggcggcctaagacataaactcatcctcctcctcctgagcacgtaatcctgcctcagttagtgcgatgagctcactcaaccttgatgtgtcgtcctcctcttcccatgtaatcctgcctcagcgagagcgataagctcactcaaccttgatgtgtcctcctcctccatcagc

SEQ ID NO: 67691 - DNA, 317 bp, Zea Mays
aaagcggaaaacctcattggcgacgaagttgaaggtggtgttgaaaacaacgaccatggatctatcgtacacatatcgacatcgcaccccctacgtggcatgccagttgttggtgtttggtaccaacgacacactacggggtgtaccaagtagtgtttttgggaggacggcgaggtcgatcacaactcgatggttcatgcgaggcacgacggaaaatgacggattatacaggttcgggccgctcgaggccgtaataccctacgtcttgtgagtttgtggatgtgtattgcccggtgaaagctctcttgtgggttttg

SEQ ID NO: 67692 - DNA, 571 bp, Zea Mays
gctgctgctttggcggccctagctgagtctgtgccgaaggctgcgggcaaaaagatgaaggtacttacccaccggccgtgttacattgaaccggctgtgatacctgaacttggcgaaaggacctcttcatctaccaagacaaaggaaaccgttcctcccgtgcaaaggactgaagagtcggctacaatgccgaaggtacctttggttaagctagctgaaccaaaggcagacaaagattgtagagatgccaagaatgacagaagttttaagtccttcaacagaggcaacagtgccgaagatacaaaaaggctccgccgcaactcctaaaaggagaaggatggcgaacgtgctagatgttgtactagaaacagcaagaaccttgaatcctactcctaccagaaaaattgccgaaacttccgaggcgcatcccgaaggtgaaacgaaacattcagaagtcgaagctataataattcaaactaaaaccgaacctaggccttcagagcccactgaaataaagcctaccggaattgaagaaaaaacaacagaagaaaaggccacagatcaaatttcg

SEQ ID NO: 67693 - DNA, 536 bp, Zea Mays
gcgccgccgtgctctggcggggcagggaggtggaagacggccgtggagcgtccatccggtgatctacggctgagattaaaacatgcgtaatgtttcgcgttgggtcaatctagagcgttgatcagcgatcggatgactccgggtatggatgtgatctccaccgttggatcaacatctgatggtcctcgtagcgtaccggtttaataaatgtagatctaatctaggccgtaggtgtgagatcctgcggctgagatcagcagataccccttcggcttgcatattttgctaaagagtcctcgggaaactaagaaaccaacccgccgtccactgtagggtttggctgagtctgtggattacttatgtttttgcccctgtacttctgtttatttagcgcacagtccagacacctattaaaaccaggaaattcatttagaaaatggtttttcagtttaaattaattacagaaacatattaaattcctagaaaagtcatattaggttcaaattgacccattttggttcctataattttataat

SEQ ID NO: 67694 - DNA, 607 bp, Zea Mays
ttttgaaatttgggagtacgggtaattatagttacaattttgcgacaatctgacttgtccttaaaatagcctaaagtttctcagttcagtcaataatgcttataaggtgtatattattgaaagggaggtgtgtgagaaactataaatacataaaccatcaaggcacatgttcatgggtttttttcttcgagaactttacaaaatatttgtaatttcaggattttgtttgccgttgaaatttggaaaatgtgatatagacacacacacacagagatgttatggtctttacaaaaatattagtgggaatttggtgaagcatttatgtcccagaaaagtaatgtggggttgctaacacgttattttattagtttagcttttgggtatctttctcgctctacaaggtatcaagctttttcttcttaattatcattaaactatacaaatatatgatggtggttatccctatggtccaaacaaactacttggactcactgtcacatactcttttgagtgaaaattccaagtcatctcaacatagtgaatgtttcgcttacctagagcatatataaatctgttttggacctgtgtctgaacagctttgcaattt

SEQ ID NO: 67695 - DNA, 509 bp, Zea Mays
gctgctggtacagtggactggacacacgagttacaggcagtaccagtacgtacgtacgtagtatcgagcacgattcacacacacagccatagtacctacgtacgtacgcgcctttcctgtcagttttgtttcctcctctccttctcagctacagcgaggatgtcattagcgagaatgacatgtgttagtcctttgcttgagtacactgtacacctagcaacacactggtaaccgaaagcgaacccaccagtagtagttctagtatgtgtgttactgtcagaacagatcggatccactgcagtactactagtgcgcaggcgggagatcgagagaaggcgagctgttaaaatccgctgtcgtcactgcctccacccgtaaaaaacgactgatgatactcctgcagcgtagcatgagctgaggagctgaggctgcggtgagtcacggacggcccccaatttcttctccaacgatagtgcaaccccaaccgtcggcggcggccgctatcggcg

SEQ ID NO: 67696 - DNA, 716 bp, Zea Mays
gttgatgttgagtgattgtcacatgggtagtactttggtgtgagtcttggactaactagagtatgagttgtgtgttgtgcaaccatgtctctcaacttgcggtgtgtagtctagggacggtggttgacgacgagggtaaagatcatgcggttcgtgctgatgggacgggatcggtgaaggatgagcactaggtcttgattgagggactggagaaggcgagtgactagccgtggtgactaacacttgggacacacattagtgctagcacgtggaggcgtgaatcgtgttgccgacatggttggaatggtgggaaacatgtacaggatgtagggacgcatatggagtacgctattcatggtaatttcaatggttgagcctcaaaaccgccaagcgctatggagggttggtttcaccgagtttgggcctcaaaactcggtagtgcggttctagcgggaattggaggcgacaagtggcatcatcgcaaagggtgcgtcgaggcaaatcaacttcgtgcggagcacatggacgttagatgcatatttcaaaagttggtccattttgccctcggttaagaggatgagctctatgtatctaggggtagattagactaatgaataaccctgaaagggaaatgggccaataagacatttctataattttggtgttttaatgtccaacacaacattatggactcacttggtttctaagaatatgag

SEQ ID NO: 67697 - DNA, 449 bp, Zea Mays
accgtcgtagatagcctgtccatcgcctgggacattgccccggtgaacgccacggtagttcgcaccggtgactcaccccctctcttcggtcgccaacttccctcttccaaattcagagccaccactctcgaatactataaattgagtgcatatcttgctccgctaggttgttttgaagccagagcaccaaccctcgcctccgattagccaccatagcgcctgaatttgacttttcccccaattcggtcgccatcgccgccatggagagctcttccgtggccagcgtcacctgaggtagttccaacccaattaccatatgttctagcttccttagggtatagtggtgctccccgtacttagagtttggacgttaccgcgcctagtcgtcgggaacaccttggttcaccctcgggtctcgccgtcgtcgtggacagaagaactccgggttg

SEQ ID NO: 67698 - DNA, 521 bp, Zea Mays
gtttggtaacatggaaaagtgcacattttgcatgcaacgtgtctcgtttcttggttatgtggttactccgcagggcattgaggtggatagcagcaaggttgaagccattcaggactggcctacaccaacgacggtcacgcaaattcgaagttttcttggacttgcaggattttaccgccgttttgtgcatgattttagctccattgctgcccctttgcacgaactcacaaagaaaggtgtgtcttttgcttgggacccccacaagaagaggcattcaacactttgaaaggtaagttaacccatgctccactcttacaattgcccgtcttttagaaagtgttttaacttgaatgtgatgctagtggtattgggttaggtgctgttttgttacaagaaggaaaaccgaaactatattgctggccacaagtgcaaaggatggatgggaaaaatactgcggcaacgcagaattaccgatgaaggccagcaagagtgtgcagaaaacttcccggcgccgatacact

SEQ ID NO: 67699 - DNA, 695 bp, Zea Mays
gcaagggcgtaaacatatggtagtgggcggaattatagggattagattcctcgtgcaaacgtggattctgtgaaatgtgggcacggaatttgtggatcttgcatggagcataatggcggaaggtatagataatatcgaataagatgttaaaagatatggcataacacatatacatgataaatgttgtgtatatagtatatacagtttggcataaaatgttaagtcattatgcgtaaatagtgatatagagatatttgtattacatgtatcttgctacattatcagaactggtttggaaaaaatggaaataccctagaaagggggatgcggttacacgttaagtatagcatccatgattttctttcattcgaaaaatagacctccagactgcagaactagttggtggtggagatggccggctttggacaatcgccgacgatggtaggagatggaggtgggattcgtccagacactgagggagtcgttgatgctaacttaatggttacaccaccttctgttctaatggggcctgtaatcgacgagataagcaatgtggggaaggagaacaacggattcgacctccgatgtccaatattagctcccgggagatggatacgcctcaaatattacattcacatgtaagttcagtttttgtatttgatacttgattgattagattgttatgagcataatcc

SEQ ID NO: 67700 - DNA, 652 bp, Zea Mays
actaccaaataatcctcgatagttggcacctaggtaggggaaattgtgatgatcatagcatatctgatggcaactatgggctttgcacagggagacgtgatcttcggtaccttcagattcgtcgccaacacgctcgagaaccttaggcttgtcccagattccccgacgacctcaatttccctcacccaagctctagtagatccaatctgcacttcgttttggacgtctccttgacaccatctcaaactcagaccatgcttcgacttggattctggccatgactcgaactcagactcatactactcaggagatcagttagtgtttagggcaagctctgggcactaggatggtcggtcctctaatcatgcagacaatgatgaagaccagacaacgagaatactaaagaaccatgaagagttgtggcagcgtggccaagatgcacatgaccattacccaaatggacgatttccatggccaacaagtgtacactacagcgagattgaacatcatgatggtgaaactcctttgggatagaaccaccccattgtttccataggataatgtgcaggctcatgaagaattgaaaaaggtaaacaacatgatggcacacccgactttcattgggtgatagtcggagatatagagagtataa

SEQ ID NO: 67701 - DNA, 633 bp, Zea Mays
cccaattaaaagttcagtcaatacaaattggtgaatcaacaaaatctaccacttgaaggttcagatatcagttctgtcaatgaatccatatgtgcatgaactcactacatattgtgattataaatatgtaaccatgcgtggaatgattcttgtcttcttgatttatgtcttgcatttgcgtcgtgaattacagtgattggttttgattcaacttatcatgctctactaatactttgatatagactgcgatggcaagagatctgcaacaacgagcagggggtgagggagcgaacatagtggttgtcccctcgttccaactgtaaagtcggccctctcctccttacctcaatgtactgctcgtaagtttttataactcggaagaatcatgctaaatagcccaatgatgatacatgtaaactattttcttgccatgaaccttgaagtcgagatggaaagacctcttcgaattataaatctcagcctgatttgagctttgagtctgatgacatgttttgcgccacaggtatcctacattattagtggttaaagagtaaacgtagagctcagatcccgttgaatgtgaaatatgagctagatttgtctccacaacctgaggttaactttagtgtgcat

SEQ ID NO: 67702 - DNA, 367 bp, Zea Mays
aaaggttggcaaggcattccttagaccatagggcattacaacataacaatatagtccatctactgttacaaaagcggtatgcttcctatcctccttagccatccagatttggtggaaaccagagtaagcgtccaagaaggataagaggtcgcacctcgaagtagagtccacaatctgatctatacgcggcagtggatacgggtccttggggcatgccttattcaggctggtgtagtcgatgcacatccgaagcttccctttggccttcggcacgacgactgggttggccagccacaccgggtgatgaacctcttcaataaagccagcgtgcaacagcttctggacctcttctcggatgaagtcctgc

SEQ ID NO: 67703 - DNA, 280 bp, Zea Mays
ggttgagccgatgtagggcgtggtgccctcgcttgtgtatgtgcaggggtttgtaaaatggagtggggtgccctcgcgtgcttgtgcctgcgagggcgctgtgtactttgactggcgtgattgattgtgctgtgccagtgtgattataattggtcttgctgtggcttctgcctttgtcatactgggtcggctgcgcccttgggcggtttttgcgggtcggctgcgccttttaggcgacttctgcgcgaaaagccttcgcgatagactttgatttttgcgc

SEQ ID NO: 67704 - DNA, 1117 bp, Zea Mays
aaaagaccgcggcaacggtctttgacattttacgcacaaaacagtcaccgcaagaggcagcgcagactgccctcgcgtgcgacacatccaagcaaaagccgcctaagggtgcagctgggcatgcacaataagtgcgcgacatcacttacagggtacgaagtctttactaaaagacacgtccgagcaaaagccacctaagggtgcagccgggcatgcacaataagtgcgcgacatcacccacagggtgcgaagtctttacaaaaagacatgcccgagcaaaagccgcctaagggtgcagccaggcatgcacaataagtgcgcgacatcacccacagggtgcgaagtctttactaaaaagacacgtccgagcaaaagccgcctaagggtgcagccgggcatgcacaataagtgcacgacatcaaccacagggtgcgaagtctttacaaaaagacacgtccgagcaaaagccgcctaagggtgcagccgggcgagcgcaacaagtgcgcgacatcacccgcaggaagcgaagtcctcatcctactaagtgtcgcgcaaacacgattacaaatagaagcaatctcacaataagtgcagcacgcaatatgccatcgtaggtaacatacataaaacattttgttgccctcactctctattgcgaagagggggagggcagtgttttcactcactatcgcaacacgagagcgaggccagcaaaaatgctacataggctccgccttcagaataagacccacctcccggaaattaaacaacatcatccttaactcttcgccctcaaacagattccgcatgtccccctccccaatacacgtttcggacgtcgaggatagtagaccgcgttgacaaccccaatctagtcgaagacgagaccgctccatacccatccgacgacgtctcccacttcgtgacgtcccgccaatgctctgtttcgacaccacacttcgcctacgcgagtcttcggccatcgccctagccagggtggtagacacttcgtgcgcattaggttgtggcggagactccaatgcggccaaattcaacgtagtaaagtagtttaaatcctcctcagaagactcctcaatccatgaaaaagggctcccaa

SEQ ID NO: 67705 - DNA, 606 bp, Zea Mays
ctttcctttacgtaacctctcatccatattatatgtatcgtacatttagtatggttccagagcctgctcgatctccattattgcttcacctgcacctcttatatttcccaccgtactcgatgcaagcgcacacttatctctaatttgtttccacgtgcactcctcctcacggctcgtcaccaggcgccgcttctgcctccacacacgtcggcgatgtgggcgcccggctccttctaccagaccatatcaccctcacctgcgtggctccgctgggaccgtgtgccaccaggccattggccttatctcctggtcgtgcgtttttgctacctgggtgcagctcacctccctgtgccctagcttctcctccagttcgccgtggagctcaccttgggtgctgtccgccggccatctcctgctcatctccccttcatgctcatctaccgtcaccaagctacactcctctgctctgtcctctggagctcgtcagtgcttgggtggccatcgtcgaccacgtcgaccttgccgttggtccaagccacgtccatggtcgtcgagcacgccaaccatcgtgggctaccctcactcgactccctgttagctggcgtc

SEQ ID NO: 67706 - DNA, 345 bp, Zea Mays
aacaaacaccattcacatagtttttaattggaagtgatatggatgtgtttgtagatgttgaaccttaagaaatagggccattggaccatcaagcatggtcaacacctacacataatatgccaaaagaaggcatgatcatctaatcctaggaacaatgtcattggaccatagtgtccgagtccgacagtgtccgaattaggtatgtatgtgtcggtctgatgggtgtcatcagactgtactatgcaactatagcagctaaggttcttatagcgcatcaaacatgtgagtaggataattgttggactaatgagtcccaatttgatgccttgtagaatatggctagag

SEQ ID NO: 67707 - DNA, 974 bp, Zea Mays
gggtatttattcttgatggttacttcgttcaaacttctataatcaacgcacattctcctcgaaccatccttcttgttcacaaatagaactggggctccccaaggagatgaacttgggcgaatgaaacctttttctagtaattcttctatttgtttcttcagttctactaaatctttgacatccattctataaggtcttttcgagataggtgcggttccgggtaataattcaatagaaaactctatatcacggtcaggtggcatacctggtaattcctccggaaatacgtctgggtactcgcacactaccttgataatttccaagggcttttcttccaagtgattgatcactgtctttccttttgcatctgttgacttgtctatgctaacttggattccttcaccttgaggacttatcaacataattgttccgttggcacactgtatcactccatcacaacttttcaaccaatcgcatccaagaatcacatcaataccgttggatcctaggaccactgggttgactgaaaaatctattccttgaatcttgagattaacatgggggcatgagtgtgtggccttcatgtcacctcccggtgaactaatgtgtaacatcttcttaagggggtacttaggtatgttgtgtttttccacaaatgactcagttataaaagaatgtgatgctctagagtcaaataaaactgatgcaggtatggagttaacaaggaacataccatacactacgtcggcatcctcaggtactgattctacggtgacgtgattgacccttcctctactctggttctgcggagtcttgttttgagcaaatccacgagcgggggtgttctggtcatttctctggttactgcttttctgaggtgtctgctgtttgcgccttgggcagttgttagcatagtggcccagctcaccgcacttgaaacagccattgggatggactggtgcattgttgcttct

SEQ ID NO: 67708 - DNA, 565 bp, Zea Mays
gcaggaaatagttctcaaaatcagaacaagaatactcctgtcaacaatgcaaaaggaaaggataataagaaatctgggtgagtgttctatactcaagttgatgtgacttcagaagggcatcctgtacttatgggtacattccttgtttcccatcatcctaccaaagtactttttgacactagtgcatcccatacatttctcaataaagattttttcatgcatcataatatttttattcaagaagcgagatggggtgtggcaatacaatctcctggggtcgattgtttacgaaggaaatggcttttcaagtgccaatagaattagttgggcataactaccctaccaatatgatagtacttaagggccaggacatagatgtaatcctaggtatgaattggctagctcaacatgaagccattattgacacaaacaagtggattattcagatacatacagtgttaggagaaagttagttaaaaatccagttgtcttctctagaagaagtttcaggaagggcttatagcgtagtagttgaagagttagccaatatcccggtggtgcaaga

SEQ ID NO: 67709 - DNA, 566 bp, Zea Mays
cagccattatgtcgactttaatgatgtcccagcatgtcttgtaaaattttcctgtaaaaccatcaggcccaggagccttatcagaagggagacaagcaatggtgtccctaacctctttctccgaaaaaaggctgctccaaagcacttagatccatcgcagccctgtgacaattactcaaatcaatagtaaaatgcctctgcaaatcagcccccagcagattgcaaaaatactcttcaagaatttgctgcatgtcatcatgattggtagccattcttccatcttcctcaagtttggaaatgaaattctttttcttccgataacatgcctgtaaatgaaagaacttagtgttggcatcaccctcctttagatagtggatccgcgatctcaaccgagcaacagtcctttcaagagacgcaaggctaaggcaatgttgcttcaacatgtttagcaaccaaacttccccactggacaaagttctgatatcctgcgccatttccagcctatgtaacacttctctgacaagccctagctgcatcctcacattacacacttctttatgccccca

SEQ ID NO: 67710 - DNA, 1066 bp, Zea Mays
tcctgaaatcaacttggtaaatttactaagttgctatcacaatcaatttagtctctacatgtagcaactagtttcccactcccgaaaaggccagtcgcgccattttttttgtttcatcaccttattctggcgcgttggcctcgccgccacaacccactcgcaccattttttctctgtcccgtccagtttccgtcgccccaggatctcgtcattgttgcctggcctagggcttcccttccctaacacatccgtctagcctccgtccgtctggattcctcctggacaccaccgcctagctcccgtcggcaaggattactgctccttcggtaagctgccgttctcacgtccctgtgacctggtcccaccctcgctgccggtgcatcgccttccattcctcgacgcctccgcctccgcctgcccccatccgcttagctccccttggctgggatttgctgctccaccgctaggccatcgtccctggcgactgccctcccccaaaaagcactgagattttgtagatactctattgttcactttattttttttatgtcagtctggttcccctatataactccgatttggttgccatagtttttctccatttgttggtgactcgtgtattttgcaaatcatccaaaaggtgtggggatcatactcttaaaacagaacggtcatatatagtgttcatcgtgtttctggaacccatatacatgataatggaattgatgtggcatccccgggatgattttaaacaaatctgttttaatcccaatggtggtttcattgaatctccattctgtttattctagtgaaagtagcacttgtacctctacaattctattcatgtgtacgtatgtattcttgttcatgtaatttgagtcaccgaaggacatcatgtgccaatatatgatgatttccatttgtgtctactactacattgtgttgctccaacaagataacactacaaatagaatgtcgaaagcagctgaactttactgaagagtgaagacattgctgctatctacttctgcttgtcttcatagtagagacagacccatggacttag

SEQ ID NO: 67711 - DNA, 752 bp, Zea Mays
tttccaaatctcccacaaaaaatagatcatgagaccgtcaaaacctctgcgctcatgctgcacaactttaagtcgaatctttctccaccaattctatgacgatctttggctgtccacgacatggagagcattaatattgaaccaaagcggtagaaggttccaaacctccttggtgaacacacaatctttgaaaagatggccaatatttctggctcttgcctacacaacatgcaaattgggtcatgcaaccgtccactgaccgcaacaaattcttatccgtgagaattttccaatgaagcaaagtccatgcgaagaagtggcgtttaggttctatctttgccttccagatcggcatgagcctaagcctgggctgagagctgactgccctagaactgggcaaggtaagtgcttttgatggtaaacacgccatccagagtccacctccaacttatatcgtcctccgtggtaggatctagagccacctcactaatggcctcccagagagccacatactctataatttccatgagtgactccaccgtcagcatgtgggagacccatctgttaccctcgatggcccgcctaacagtgatcttcttttggttggtcttttcgaagagcaaaggagctaaggtgcgagcctaagagccatttagctagttgaagtaccaaaaggatgccacatctccatttccaatagtaaccttggtcaacatgtgaaatagggctctatcaacctttgaacacgggat

SEQ ID NO: 67712 - DNA, 353 bp, Zea Mays
gttgaaatgtacctaaaacacacttgtttgtgtcaaagtgaatgttaaatgaggatcttcgacataataggcccccaacagtagccccttgcgaaatgagttcgtttctacataacgagcttagatcgaaaatgaaataaattaggaggcattgtgccgaaggtccgaaagacaacttcccgaagctcgttatgaatcattgtcctattatcaccctgactggtggggtccagatttaggcacgtacaacagttatattttgaaaatctacaggtataaaaggaggtgacacccggtagtttcagcatggcatttgctgctttgcgcctaatgctattaaagcctgctctgcc

SEQ ID NO: 67713 - DNA, 651 bp, Zea Mays
attctcaggcacctcattacttacatttgcagttttaatctgatgtagggagaatctaaaagcattaagggtaaaagtgttgatgaaaaaatcaaccgggcattgattcgtttgcagatggaaatggttgcagctttaacagaggtaaaaatatacttaggccgatgtgaaatactgcttgcagtcaaggtaaagagatgaaactggattgcaaaccaaataacaaaaaaatccacactacaaaattattatatatcatcacaaacagttcatctatcaccctaaaaatgtccgtacattcatgtccagaaagcacaaaaagaatagaagaatgaacccaaagtgaatccagtaacagtcttccatttcacctagaacacaaaaagaagagcaaaaacaaatttgatctctaggtttatatgcatgaaatagccataatctatgtctctttcagttcaactgtttccagcatgcaaaaaggcagaatcaattgaatttctgctattttaggctcatccaatcaatgtttgcagtcagctggggatcagtcactcatatttttacttgaacaatgcaggaaagttggtgtcatttcattaaaacagaggaatacaaagatgtacaacatctccccgaccctaccaacacacg

SEQ ID NO: 67714 - DNA, 520 bp, Zea Mays
cttttagaaattacaacttaaaggtgtatgatcttcttgagttaaacaaggttaactttgcttatgtaagacccttgggtggtatacttggtaaattgggtcaaacttagctaaggtaagtagtggattcaatttttggggttccactgaattccttttaagtcttagggagaattgataagttctcaagttagacttattggggtgaggtttatttcttcttcccttttcttttattctctttaatgttttggagtaggtttgaactacaagttgcttttataaattctaaaaattctgcaaaaattacagtggcttggtactggtgtatgtttctctatctcaaaacttgggggtcagaaagtgaatagttttctctggacaaaattatcaaatcctagggcagaaggggtgctttgaactacaactactatttaacagtgggcaattctctagaacttatttttgctggcttttaggtgttataacatgactttatacaaatttctagtcattaata

SEQ ID NO: 67715 - DNA, 308 bp, Zea Mays
ttcccctcttcgttggctcgaccctccttcatttatatgccaaggagaggactagctacagatgaattctctcagaaggtattgctgtgaaatggttttcccttggtaaacgccttcccatgtgtcattatctgctctgaataactctccatcgactgttggtgaagtataaggaccataggtgtccgaacgtcatcgttactcagtctgtccacctacgcccgtgatgacccctgacctttgtagtctgtcctcctgccttccctcccttgtcttgcatgttgtgtagggcgtcgaagggctcaggc

SEQ ID NO: 67716 - DNA, 674 bp, Zea Mays
atggcatgtttgtatatcatttccaaaggcagtggctatcctcctaatgctgaagcgagaccatataggacgttgaatgatcccttttacatcctccctttgacttaggtcattcttcacatagaaccattcctgcatccaggacccaggccatctcttcacgaaatgtgggaattgggtagctcttctcagaccgaggcacgaaactgtaacaaccaaagttgttgtgatactgctcctttccggtagccttcatctcatacgacaactcatggatgttgcaaaagcatctcgcatctggtcctagtccttggctcctcatagcccatataaagatctccactttaatgatggcatcgggagtaagttggtgaaggtaaatttcaaaggttttagaacctcgaccaacaatttgtccagggggaaccaaagtcccgctttcatgaagcttctgtaaactaccacttcgtcagcttcaggaagaggaacattattctctcctccggtccttacgattgagatatcacaaaaatacctccccctcattgcatcgatctgaccttgtttaatagataatttttcgaagacaacatggcttggtctccagggccgatcttcggcatcttcgtttccactttctacatagaaactttcactatcgctagagtttttag

SEQ ID NO: 67717 - DNA, 465 bp, Zea Mays
cttcggtattgatgcactaaactattaagggctagagaatgtaagttaaggtattaagaaaataagttctaaatatgagtgattaagcatgagatcaagaggagaatgttggattgatctcatttaggtttggtcataaaagaccaagcaggacctctcgcgtcccgattgagggcatagaaaccaccttggttacgggcccattcacatcgtgtaaataaataagaaataagactaatatgtgaaccaacatttactggtacctccttgcccccacaaacataaacgagatcttatctgctctatcgtggttagtgaagaaaagactgtcgtccccattattgatgttgtcgtcgctgccgatcattggacttctaccttactataaatctatgacggcctcctataccaaagatatacacctaagttttatcaattctagttgatatgattatggggttaaga

SEQ ID NO: 67718 - DNA, 408 bp, Zea Mays
tatacagataatgtttcacagcaacctgcaaggccaataagcaacagaacagcttatgcgacagataatgtttcacaacaacctgcaaagagacaacttgttacagatagacatgattttatgtctatggacccaaacattgtgaaccattcacctagctggtcacttagtgatgcagttggtcctcaagtacttgattttagtaaaagagtagcatgagatgttgttcaaacgtcaagaaatcaaaacaacaatccaagggccagttccggtccagttccgcctattgaaacatggtctaggcctggcgtggttgcaggggctaataccatgttgaagccaggtcaaaacctgaacgatcattccaaactgctatactccacaaaatttcctgttgatagtgctatc

SEQ ID NO: 67719 - DNA, 384 bp, Zea Mays
ctcaagcgagcagcgttgcatcgataggggagcgctaaatatctttagcgatttggtattcaacatctattcgattccttgctaccaaattccaacatccaaacgaagtaatagtgttgtcctttgaacgtaaggagaaggtgatcaagtggttttttaaagatcaggagggagagactcctactgtaaattttgtattaataatggtaaattacagcgtagtgtatgtacaggagaatcctaattgaatagttgagaaggtaaaccgaatgagctatagggttaagactgccactgattaagacagtctgggattgaattgtcatattttcctcttgctctctagatgaccaggagtaattcctttgagaatttatttttgca

SEQ ID NO: 67720 - DNA, 1080 bp, Zea Mays
cttacttctaacactggcttagttaacatccaaatatagttcaatttggacatcctatcaaggttcatttaagcgttgtcacatcctcttcagcttccttggtgtgaacttcttcgataggaacttcttagttgtagtcttgggtcgtgactggatttggacatcagcttgaacatggacaacatcagcttcaacatggggaaaatagctcttccattatggacagcaccttcaacttggatagcaccttcaacttggggaaaaatagcgccatcatcatggataatatcttcaactgaaaaacaccatcttcaacatggaaaacagaaccttgaacttgggggaaaatagctgtaaaactgcaggtaagatcttgccagtaagttgtctccaattcttctccttttttcccacaacaccataatcatctccctacgcttgtctgcaaggctcaacaacagaaagatccttccaatctttaatccaattgttggatacttcagctagattgttggtgacatagtcacacttgatggaagggttaaactcactcctccatttcacctcttaataaaattctgcataagatgtctaaagaatttcgtatggtcagcccgaggaaacacaaccttttcttcattttctaaccctttgcatgtatctgtacaaacagcaagcgaagtaagatctcctatttccctgtgaagttgcctcatgaaccacacccaattgtcatcagtttcaccatctataaatccaaatgtaagtggatacatccaattgtgaccatcaatagtcgtggttgcagccatatgcccattgctaagctaactcgtacattttatcgtcgtcaactcctagtcaataacagcttcagagtgagaatcatgatgtactaccattgctaataagctaagcgggggctcatcatcaaggctgaaaataaaaaataaaaaaatggattcaaatggactgttaatttgtagtgctgctattctctactcagcttgattccagaaaagttagtacatgtacaagcatacccgtacatagaatcattccaactatactccatctatc

SEQ ID NO: 67721 - DNA, 682 bp, Zea Mays
attcactgcttgctactgtccaatttttagtgcaattattgttgcttgtcatgactttaaaaaaaaaaactcgaccacaggacgagacacctagggatttaagaaggtaccgtgcttcaaacctagattaggactcaagtttaatgactcctatagttcaacactactggtccacaacaacaagcttggctgatcaggcaagtgttaatggagtttcatggagaattttgtgggcattaaattacagaacacatcaacaattctaaactagggttcgaaggggattagtattcatgagaacatttaaattttctgttgcaaagcacgagcactctgctatatatttaaagcaccagtttcgtacgtcgtgcgtcaccgtaggtctcactacgtcaaaaacgctcaaaggggacgtgaccatctgtgacacttgttaaaaacacgtcactaatttttcacagtgacttcttttttaaaaaacgcgtcactaacaactgtgcacatgtgacatctattgtaaaaatacgtcactagcaaaatatggtaataactcagtgacatcttttattttacgtatctctactatgatctgtttagtgacatgtatatataaatgcgtcactggcttcatacgtcaaatctgtttagtgacgtgtatatataaacatgtcactgacttcag

SEQ ID NO: 67722 - DNA, 1092 bp, Zea Mays
cctaactttgcttgagaatggtaagcgtttcacagtttatacggatgcttctcgaattggtcttggctgtgtgttgatgcaggaaggcagagtgatcgcttatggctcaaggcagttgaggaagcatgaggggaattacccaactcatgatcttgaattggccgcggtggtctttgctctaaaatcgtggaggcattatctttatggcgagtcttgtgacatttacaccgatcataaaagtctcaagtatattttcattcagaaggagatgaatttgaggcagcatcggtggctcaaattggttaaagattatgatttgtccattcattatcacccgaggaaggcaaatgtggtggctgatgcccttagcaggtccggggttccaaaagtggccatgcctttgatcgctgatctggaccatttggggatcactttgtgctatgtcggcaccgctagcgaggagactcggatgcttattcaatcctccctcatggagagagtgtgtgtggctcagcagcaggatcgattattgcaggaagctcgaaagagggttggcaatggtaaaccctgggagttcaccattgatgagaatgatttggtttgtttcaggggccgcctttgtgtgcctcagaaatcagaggtgaagatggatatcttgagagaagctcataaaacgccttacaccgttcaccctagcgaaaccaaaatgtatagagatttgaagcaaaacttctggtggaagcggatgaaggttagcgtttctaagtatgtggtcgcctgtgaagtatgtcagcgcatgaaggccgagcataagaggcctgcaggtttactaaagccattggaaattccagagtggaagtgggagcatatcaccatggattttgtggtgggcttacctcgttctcttcagggcagggatgctatatgggtggtagtggatcgcttgactaagtctgcgcactttattcccatgaagaccacaaattcagcttcagagttggttcccttgtatatgaaggaagtaatcaggcttcacgtggtttctaagtccattgttttttatcgagactccaaatttatatccaaatcctg

SEQ ID NO: 67723 - DNA, 968 bp, Zea Mays
ggccgctacgcacgacgacggtcatgaaggggtgcagcgcactctccatcgccttcgccgcgatttcttcttccctgccatgcgtcgtgtggtccaagacttcgtccacgcctgcgctacgtgccagtgcaaccagtctgagcacctacacccgacgggcctgctgctgcccctgcctgttccccaagccgtgtggtccgacatcggcttggatttcatcaaggcgctgccccgcattgggggcaaatcagtgatcctcaccgtggtcgataggttcagcaaatattttcattttgttcctctggctcacccctacagtgctgagtctgtggcccatgcattcttcagcgagatcgttcgcctccatgggattcctcagtccatggtgtcggaccgggactctatgttcacctcggcgttctggaaggagttaatgcgcctcacaggcaccaagctgcacatgacgtccgccttccacccgcagtctgatggccagacggaggtggccaacaaagtcatcgtcatgtacctccggtgcttcactggggaccggccccatcagtggctacgttggctaccgtgggcggagtatgtctacaacacggcgtaccaatcatcacttagggacactcctttcaaggtggtttacggcagggatcctccctccatccgctcttatgagcctggcgatacccaggtggcggtggtggccaagacaatggctgaacgtgaggagctcctagcggatgttcactaccgcctggaacaagcccaggtcgtccagaagaagttctacgatcgcctgcaccgaccggtctcctataccgtgggcgactgggtgctgctgcgcctgcatcatcgggcagcctcctcccttccccacgcgcccaagggcaagctgaagctgcgcttcgtcgggccgtatcaagtcacagagctcatcaatccggtggcagttcgcctagcgc

SEQ ID NO: 67724 - DNA, 356 bp, Zea Mays
gtaattttcaatgtaatatcaaatggaagagttgttgaacataccattaggtaaggttctgtcaaggaataagctttgacaaaacaattgcctgagcaatctccaaatgaactgaagatttgcttcaaataggccttcacctcagggtcctgaatttgctctttaaaggtacaagaagggtcggtcaatccactgtattcccaagcataattggtattctccttcaaaggggactcaacactatatccaactggctgccacatgcacgccagacaacccgagtgccttcatatcctatatcctctttacaacactaagtatggctctagaatatttaggcgggggatcactcatcc

SEQ ID NO: 67725 - DNA, 518 bp, Zea Mays
aagtcaagtcaccttgaacactaagctcttccattggtaactgttcctcggggacacggagacacttcttcagttgagacacgtggaacacattatgcacatccaatagagtagcaggtaactcgagttggtatgccatctccccaactcgcctaaagatcaagaatggtccaatgtagcgtggggacaatttgcccttaactttgaatctcctcattccacgaagtggtgacaccttgagatacacataatctccttcttcaaattccagtggtctccttctattatcagcatagctcttttgcctggtttgagccactctcaaattctctcgaattatacggacttgctcttctgcttcttgaatcagttcaggcccaaagaactgtctttctccagtttgatcccaatacaaaggagtcctgcacttcctcccatacaaagcttcaaaaggtgacattttcagactggcctgataactattattataagagaactcagcataaggtagactctta

SEQ ID NO: 67726 - DNA, 1142 bp, Zea Mays
ccaacaccagaggaaaaagggcgcccgcgcccgcgcgctctggtgactttgcagaaaggtcctcggtgttctggctaatctgaaatgagcataaacactattttcaggagtcgctgacactacacagaaaggccctccagtttctatctcttccccgcgaatgcccctgaccacggcgcgttgttcgttcatcacggacaaggtctgtaccggccatggccgacaaagattgctcaagctaactatctatgaggcttcactgacctacaacggccttagaacgcacactaatttgacccgaacaccccgagaacgaccggtccacgtgcacggcggaaaccgagcacgggagtacacgttcccgcggattgggagtggtctagttcgatttaacgggtcggtgagcatcaagagcaagcaaggatgttgaaacaaggaaaccgagggtgagattggacctgaatcgggctgaccacggcgaggtcaagttgtgcggtgttcctgagcgttttgggggaaatctcaaattgaagctttctggtggaggatttgaggtgcagaagggtgcgctagatgctcgaatacataacgaagctaacggtgcactggatttatagactccgggggcggtggctctcaatttgaccgcgatgtgttggcggccggagacggggaagaagcctggcgcgcgcggttacgtgtccctagccgtggcgggctcatcggcgatgatgggacggcagtagggaattacggcggtgccgtggaaaggctcggacacgcggcgggcacaaagatggcacgacggcggcgagcggctttatctacggcggtgagcaaaggggaggggtgccgtggccgatcggggtggcttccagctcggcggtgacgactatcttttgacgccgcgaagttatccacttacccgagcgcaaatcgtgacgccggcgacgtgaatcacggcggagaggttaccggcgtcgagctgtccaagctggcgtccttatcagtgcactgtaccatcgaggagcttgttcagacagtctgacagagcgatttgcagggggttttccttccaatttcatgtggcaacaagtctaagtctctgcatccaagttgtagttctatgtaccagctacaaa

SEQ ID NO: 67727 - DNA, 632 bp, Zea Mays
aaaaatcagaataaagagaaaaaaattgtgcgcataagcaagaacaccattgatttgtgcacctctatgattcatattattttcatcttgtttccttattgtaccttgatccttgttacatcctttgtgtcttcctccaactgttctaatactactctaggccagcagttaggacaagtactttgaacacttattcaacattgctatctgttactgagttatgtgccacaaatatatatttagtgagccttcccaaaactcaacctttatctcgagcagaataggtactcctttgcaatcacactcacgctctttgggctatcacactggccaccgtttgccacctgcagtgctggtaagaaccttgtaagagcggggtaagacgtttcataacttgtgttccaccaccacccttgagagtatttgtaggatttacaccttttgcttgttgctttgtttctgttttgtactaacaatgataggaacatttcatctggagccccgtgacatgatgagagctatgtgtgatactctcaacataaacactgaaaggttgaagagagtatcaggacttgttgaacagatggacacgaaggagactcgtctaccacaacctccaatttctttcgcag

SEQ ID NO: 67728 - DNA, 633 bp, Zea Mays
taaaaaaatgtctaaaatgtggacaatctagatttgtggaagttgttaatgatgagggtgacaaggtgatgacagatgttgcacataagtagcttcactacttgccactaactcctcgagtgaaatggttatttctataaaaaaaacctaccatgcacatgcgatggcataaagaaggtatctgtgagaacgatgagctaatggtgcaccctttagatgaggatgcttggaaggctctcaacacgtttgatccagactttgcagctaaatcgaggaatgttcgaatcgacctcgcgaccgatggatccacaccttttggtcaaatagcatcatcatactcatgttggcccatctttgttattccatacaaccttccacctgctctttgtatgaagtatgaatttatatttctttgcttgatcatacctggcccgaaccatcctagaaagaaacacaatgtcattttaaaacccttgattgaagagttgaaggagctttggaaaggtgtcgaagcatacaatgtttttaaaaaacagatattcaaacttcgagtcatgtatttgtggtcggttcatgacttcatggggtatgctatttttgtcggatggagtacacatgatagattgacatgtc

SEQ ID NO: 67729 - DNA, 348 bp, Zea Mays
caagaacctgtcttattaacatggctttatttggatctttagcttctgggatttgcatgtttgcctgcttacatgtgattcagtctcgccggcagactactcgcacatgtagggtgaatataatcctactcttggttggttctcagtacacacgaacatactcttgctgcagcctcttgatttagacctggtttgcacagtacagtacagatctacacaaactgttctgtgcgattaccgtcaacagttagtttgcacgcgacctgctgtgttaattagagatgtgtgaacattagagctgtctagttggatttccctgtgatttcaaatcaatctacctctcggtac

SEQ ID NO: 67730 - DNA, 827 bp, Zea Mays
attaggagtttgtccttgctagaaccgccacttgctgaacatgaatggacaaaaaataatacattaggagtttgctagttataacaaggaatacataccaaaaaagttgacatggcacctatagtagacatgggtgtagtacccatttcgtcaccgacactgattataggtgcattgattttgctagacgtagttatcatttcaatgtagccacttgtcggggaaatgatcctcggtccctgagacctgctggccatagagcgcgctgaggaaagagcccctattcgctgatgttcgttggtcaactagaagagctggatacgtcaaccctgaaagagcccacactcagccgaactccacgggaccgagaccggggtcgggcgtggcgaaacctgacgaggagggggggacgtgttggaagggaaccactcgagtggatcctacgcccggccccagactaaccacgttgtaaataactggtcgcagtaaccatgcctggcacctagccacaccgcgtccgccagtccacttcccactcataacctaagaacccctcgggccacgtagcattcatgatctacaagtccctaggaatgtggcgcatttatgctccgcgcgcccccgacctacgacacactcatggcctatcgaattagacatgtgttgtcattggcgatgtctgcgttctctgcgtcccgaccatttcgtaattcgctgatatattcaccaaggggctcctgtctattgttttcactgcgatagagttgtgtgcgggagtgttagagtaaatgttagtgttttctatatattgttagggtttccttgta

SEQ ID NO: 67731 - DNA, 479 bp, Zea Mays
ccgtggcccaatggataaggcgctggtctacggaaccagagattctgggttcgatccccagcggagtcggtacactttctttatttttaaaatccagcgagtccaaattttgttcggcattttttcatttttaagatccagcgagttcaagtttttgttttcttcttgaagtttttccatatgatccactcagtgtttgatggctaatgatttcgtttctaaaatcagccttttttatccatcgaatactttcggttctcctaagtcacacatttttttctcacaataaaagttggaataaatttataacagaaacttaatattgtcgattacacacgaaaatgtattttatgattatctccattcacagcggttgtacacatatttatcaacttaattaacaacaaagtttgcatgtgttacaatattatcaaatttctcatgcctcctttggtgtttgtttcagattgtacaaagac

SEQ ID NO: 67732 - DNA, 276 bp, Zea Mays
ttttcctagattttctaattatttggaccgcgcgcatgatttaaacaaacgccaggggccattgcgcaaatattcctaagactggattgcgggttgattcagttatttgccaggggttcatatgaaaatccgttcaggtgaagggttatcatcgaaacctggccgtccgatcgggattctacgacctagattagatccacattacatcgaaccggcacgcgatctggcacgtcggatcgacgataaagggctacgattcaatttacgcccgatccg

SEQ ID NO: 67733 - DNA, 748 bp, Zea Mays
gtgctgtcaagctccgagtatctggtatcttgttctactgttgcgaccctgattcctgatcacccatgaccgtgatagtgcttaccctgttagtgcctaactcggtttggtgcagaagcttctcttggtcttttgatatatagtgtatgacctcgccatcagctgttttgatgtcttcccgtgcttccaaattttatagactgcatctgatttcttacgtctttacttatcatttttcccattatacggtttataccctgcatttctctgtcctgcatttggtaattgattacttgttagaaggtgcaaatcagctcctcaattgctacaagatcaatattcagtctggataattttgtagcatatttctggtagaaatcctattattgtgggtggctttgggaccctatagcttcattgagtccaccaatatgagttggaaagcttaagagttctctctggggtccaattactgtataagtgctaatagtatcagtttcctgccaaaaaaaaggaagggctactaatttcaagctcttttcatcttgttctgtcattctcttatgtcatggtgaacatcaccttctccatttcatagctatataatgatcttgtggtggattttgtgttccatagattgtggatacatgattgatgtaaacatgaataataaaggatttatcctcactacggtcaaaagttccatactgctacctgaatgtttttttaataaaaatgaataataaag

SEQ ID NO: 67734 - DNA, 859 bp, Zea Mays
gaaatcgaagattaatgctctgcaaatttctctgtcagacagactgaatggagttttgattgtacagtaactgaagaagatctttggtgcattgcaccttgccgccggtgacccccgcgcctggattcgtgtcggcgatgcgatccgtgcccgttggcgcatggataacgcctcggtgtgaaaagatcttcaccgtagatgagatcgggagctggccgccgtacccacttgccttatcgccggttcagatatcctcgccggagtttgccgcccgccgctcgggtgccatgtgcctgagaggtttaacacgtcgcagtaaacctgtgttgcaagcccatccatcgccggaggccttgccacggtgactgccacgataacctactctggtgagtcttcccattctccggccgccagcacgccattccaaaattaggagccaccgcccttggacactataaattgagcataccactagctccgttaggtaatcacgaagccagagcaaccgctcctgcctccgattagccaccatagctctctaattcctctttcccccaaatcggttttccgcaccccgtgaacacctcgtcgtgaccagccttctgcaggttagttcaagcctccttgattaatgttctagcctccctcaagtcccctggtactcatagactcattggattgaactagatcgccctggatcaccaagaacatgtctatttgttctcggttttcgccgttgtcgtggatagagtgttcccaacctggaattgtgcaattagttgagggattcgtgtcgccgggggttgaattaggggtcgagcaaaggaggggccgagccgttgcgttttccggtcgggat

SEQ ID NO: 67735 - DNA, 620 bp, Zea Mays
cagcgacctcttgcctcgcctctctgattccctagtcgagccatcatcctccccctttgcgaattttgaggaagagacgccgccgccatggaaattgttttccgtcttcgcttaaggcgcaagctcgggtcagtgggcttccttggggtacgacggtgatcattgtggcgctcgcgggtggaagaagcctttggtgctgccccaatttctcaccagcaccaacaattgccacggaaccacacttcgtcgtggcctggggactgcaccgcataaccaccggtaagattgcccccattgagttcgccgtaatctccactaccgattgatcatcaccgtgttcggggtagctcgccaaatcgttgatccgtcgttcgccggcgcgctcacaacagtggattggcccggcagcgccaccgcgtctggttgcggcttggggaagacgggggttcggccgttggatgatgaaggaacgacgtggattacaataggtgtacccatccgctcagttggctctcgaccgttgatttgcgcttgaatgcttcagattagatctcgcacaccggttcgggtggttggatcctgatcgtaggatctgatcggacgatcgggggtgagcgcgg

SEQ ID NO: 67736 - DNA, 273 bp, Zea Mays
gtttcgcagctgtgagggccccacatcctatcataaagcgccccagcggagcgctttagcaccgcatcttcaacctggaagatctcgcggtcgaaatcttcatcggaccgatcgaagacttcgaagtgcctacatccctcacgtgacaaggcgttcacggccccctcacaggttatcagcgaagcgaaggacatgagacccgtcacaatcgacggaagcacctccagctcctcctgcaaccacccgagaaagcagaggcccacctccttgcca

SEQ ID NO: 67737 - DNA, 788 bp, Zea Mays
ggaatgtgacaggcagagaccatgacacattggtaacggcactggtaatcatgcagcgtttatcactgctactacgatactgatgactgaaaacaccacgctactaataacatatccccaatgcttcttgtggtgttgctgttgtcacctcatgcatgtgtcacacaaagctacggtcaaaggcatgcagcatgcagttccagccgaccaagctggtgggcgataagcccatttttagagccttccaaggccctcccaaattgtcaggttacgagccacaccccacacagatgctgcaggcatgcatgcatatgcttggcaaccacacatggccttgtactcttgcggtctgtgactcctccggcctttggcctctccgatcccgggcattgactgcatgattggggggaacggagaatcctctccacgtctctccattgctgctgcacgtatctatttgctcatggcaccaccatgtcctttccattcggcttagaaaattcctgtgatgatttgatctcccttcttgtccaacgacgacaacaactcgtagtgctccggcctcgatctgcgccggagtgccatgatcacaagctgccgagcaggcccctaccactggccgtgcgcgtccctactggtcgtggtcgatcgatcatggcgttgcgtaccacagtccgctgaatgtgatgctcgggctccactcattttcgtataatattactaccgggagatatacatatacgtgctgctatactagctcagtataagacgacacatctcggtaccgt

SEQ ID NO: 67738 - DNA, 501 bp, Zea Mays
ctttccgtagtgtagtgcacatgctcgcaacatgtcttccaaaatctgattcaccctttctgtctggccatctgtttgtggatggtatgctgagcttcggattacttgtgtcccaagtgattcttgtagcttctcccaaaagcgtgccacaaacagtgctcctctgtcggatataatggtctttggaataccatgcaatcgcactatttgatcaacataaatttctgtgtacttctccgtcttgtgggtggtgtgcacgggcaagaaatgagcggtcttggtcaacctgtccacaataacccaaacggaatcatggtgcctggaggtattgggcaatcccatgataaaatccatgcaaatgtcctcccatttccaagatggtatgggaaggggttgcaaagggcctgctgcctttaaatgactggccttgatcctctggcaggtgtcacactcggatatgtacttggcaatttccctcttcatcctggtccaccaatatag

SEQ ID NO: 67739 - DNA, 333 bp, Zea Mays
ccaccaagactgtgctgctcccctcagctgacgaggaccatacaacaccttctcacgatcgttgcactgggcagtgtgcaactcccgctccacggtacgcaaccaatcttctgcgtccatgggatcaacagagtgggcaaagacagggggatggcccctcatgaactctgtctgcttgtctctgggcacttgtggcatctgaacttgcattggaggctaaggtgggggtggctgctgctgcacctgctgcatcgctgctaaggtctgaccaattgcctgaactacctaagtttgcatcatgaacatctgctcgactgtcatcgggggtggcgg

SEQ ID NO: 67740 - DNA, 358 bp, Zea Mays
agaacaacggaaatgggctgacccaggaatgcgataggcccacgcccggattactcgtggcttgggcgtgatcccgttgaagctattcacttttcccgtgctcgacatcctcaaacgccggagatagctcggagcggaggcgccgagttttccttgggatagcgaagtttgttcgctattagctaggagataagctggaagaatgtgatcagcgtgtacaagggaagcaccctgcggtcgtgtatataaggccaaggggatccccatcattttcatctcattagagcctcaccactcggtagacaccacttgtaaacatctcccgcatacagaatcatctcaggaagtaggatattac

SEQ ID NO: 67741 - DNA, 731 bp, Zea Mays
agccctcatcaatggaacatcatcaaacaggctgaaacagccaaagccctcagtaattttttagcataaaaagaacaagtgtagtatacagttcacttttttcaaagaaaacatcacagggctaaggaatctgataatctcaaattaccacaagcctcaggtccaatttttcaatgaaacagccatagccctcacaaatttcgtcgcataaaaagaagaagtgtagtatacatgttcagtattttcaaagaattcatcacagggctaagcaacctcataatctcaaattaccacaagcctcaggtcaaattttccaatgaaacaacatctaacaggctgaaaacagccatagccctcacaaatttcatcgcatgaaaagaagtgtagtatacagttcagtattttgaaagaaatcatcacagggctaagcaacctgataatctcaaataatcacaaggattaactcacttcacatttcctcagttcacaattcaatcacagggctaaacaatctcaataattgcctggctcagtataagtttcagaatacaaacctcagaatacttggccactgtcaccttagcacaatcgacagctgcactggcctgtttgtaagaatgcatagcacttttttccgccgccatagcggattcaagaacatcaagagttgaaaccacatcgttacctatggaaaatgtggcgcaataatcaccagcaacaatactcgcggc

SEQ ID NO: 67742 - DNA, 363 bp, Zea Mays
caacatggcggacgattacaacatggcggacgagagttgtgttccattgtcgcaaaaaggcgatgcaacaattacgtagcataaaatagtgcttggtttcagagccaattagagtagatcggttttatgttggctccgtctgaaatattttgaggagtatgatgattgaacttttaagcataattttccttcttttagagtcacggttctacatagtctaaacaacaataaattagaagtggtctcttggaaccaatccggaaccaaatgatcccaacaccgtgtctatatatttggcgtgcacttcctctgggttgtcctcacattctttaccaccttttcaaaacagtgtcctcgctcctc

SEQ ID NO: 67743 - DNA, 386 bp, Zea Mays
cagcgaccaggccgtcccgcaggcggcgtgcctgtccattccgttggtaggcagtacgcccgtgctgcggagtgcaatgtgctcatcatcactcgtacgttgccagggaagcttccgctgcacgctaatgctacgcagatcgcagatatcagggcacaaggagattgcactggcgaccaacattagttgctccaagtattacatccgttatgtccctgggcccgcatgtcggggcacaacacccttgtacgtgcccccctttagctataaatggggaggcacgcaacgttacaagaaggacacacttagacccagctcaggctcacaagttcatacaagctctcaagctcaatacaatcacacagtggagtagggtattacgctcc

SEQ ID NO: 67744 - DNA, 398 bp, Zea Mays
ctggttccagacctttcaagcagagagctagaacatttcgtcccgatcttctcccatgaatcaaggacgaaatccaccagctactagaagctaattttattagaccttgcagatacgcagagtgggtctccaatattgtgccggtggagaaggagtcaggtaagcttagagtatgcattgattttcgcaatttaaatagagcaactcctaaagatgagtatcccatgcccatagccgacacattaatcaataacgcatcagggaatagaattattagctttcttgatggtaatgccggatataatcagatttttatggccgaagaagatgcgtctaaaatggccttcatatgtctaagcttcattggtttatttgaatgggttgtcaagatatttggt

SEQ ID NO: 67745 - DNA, 331 bp, Zea Mays
tctcaagtttggggtgccaaggttgatcttcgaaagtatagcagaagctgaggccaccaggctggaggacgttgatgtacttgaggaagaacggctgaatgcggtaatccaatcagcacggtaccagcagactctaaggcgctatctcgacaaggctgtgcggcaacggttcttttcagtaggagacctcgtcctccgccaaattctaacgggagagggacggcacaagttatcacccttatgggaaggacccttcatagtagcagaagtcactcggcccggatcgtatcgcctcactcagatggatggcacggaagttgggaactcctgg

SEQ ID NO: 67746 - DNA, 277 bp, Zea Mays
gccgaactaaaattcaatcttatatccaaggactcgtgcaacttcttccagtaccgagaagtaaactgtgatccccggtctgacacaatcttcattggcaccccatgtaagcatacaatctgtgccatgtacaactctgctaacttggctcctgaatacgtggtcttcattggaataaagtgggctactttagttagcctatccacaatcacccatatagagtcatacccagcagatgtgcagggtaaacccacaatgaagtccatgccaatctctt

SEQ ID NO: 67747 - DNA, 483 bp, Zea Mays
agtgctggaggatatgttaagagcttgtgctattaaacatggtggaatttgggacaagagtctaccttatgctgagttctcatataataatagttaccaggccagtctgatgatgacaccgttcgagactctgtatggcaggaaatgcaggactcctttatattggatgagactagaggaagacagttctttggacctgaacttattcaagaggcaaaagaacaagtccatataatttgggataatttgagggtagctcagaccaggaaaggagctatgctgataatagaagaagaccactgaaatttgagaaaggagattatgtttacctcaaggtgtcaccacttcgtggattgaggagagttaagggcaatttgtcccctcgccttattggaccattcggagtttttaggcaagttggagagatggcctatcaactcgagctacctaataatctaactgatgtgcataatgtattccgtg

SEQ ID NO: 67748 - DNA, 296 bp, Zea Mays
cacatacgataatgaacttaccatggttagaaagaaatgagaaaaggtctcgcgagagttaaagcttatgcccgagacgcactatgggttgatgaataactagacgtcacgtgttctaattccaattggtcttaacaaaagaattagctacatgcactaatgtaaacgttaccacttttagtagattaacattgaatgagttaggcaattagctatacaaattaactaacgtaaccaatttccaaattgagactcctatcttattaatataaacacgtgattagcgtgcataggac

SEQ ID NO: 67749 - DNA, 623 bp, Zea Mays
ggcaagggacccttcggctgaacatagcatttcgtctttttccttcaaagagtcttcgagttctttgaccttatcctctaaacctttgataatagattcgtttttcctatcctcatcatcttgtttcatttttaaagctttgctcagcaacatgctctacaaaaacgaacttcaaattaaaatatttaagctaatacgaacacatcagtgataacttgtagaagggttcttactttgaagttagaataaaacatgatgcctatgatgtgctggcgcctgtagccgctgatatccgtctcaagcttcgggaatccgacactctttgacagggtgcctataatttttgcaccagcacgatcccgaatgcatcccaggatttcttcgtcaaccccgccaaagagtaccgacccaggttgataaccacacgagatcgcaaattcccttaactttgatctgtcctcttcagagagttgttggctgcccaggtgtcgtaggtcgaaatccattccctttgaagaggtttcataaatctcttttcccttgcctaaaatggttgcgaccacttccttctccacaaccacatctgatatcagcttgtcgatctcggacagagtggttgcaag

SEQ ID NO: 67750 - DNA, 572 bp, Zea Mays
cactgcgctaatactacttgaattgttgaaatggctgtaggtatgttgaaacatcggaaggtgaccaacaattttatccatctgttgatgtcccctagataccaagtctagtgaacaatctcccatcttggtgttatcgttagcaatgttaacaagatttatatctcttattctcgtagcataatatgtcatcttttgagtcctagtagaaaatataaaagaactaagctggaggtgtggagtccttttagctgtctcccatccctgcctgatttaagttcagggtctaggatttaaaaaacacattttaggttttctgataacttcacatcacttattttggcaaaggatgaaatagaccatcacacttttgtaagagcagcgtgtgttagattatttgttaatgtagtggttgagagaatccaagattggttgaaaggcttccggtctagaatttaaaaacacatcttaggttttctgataacatccctgcctggttttaagttcagggtctaggctttaaaaacacattttaggttttgtgataacttcacatcattttattttggcaa

SEQ ID NO: 67751 - DNA, 499 bp, Zea Mays
caaaggtagtgttccttgaaaccatgtacacacataggcagcaaagacctttttccagttcatgaattggccagatgtcgatggaatagaggagggcgtcgcagcatgaggtagtagggttttgtggggctgtctcctagcaggagagcagcgccacgctggtgaagtcaagcctgcaactcagcgaggagcaagcaagtgacggcgacagcagcagcaacatgatggtgacgagcagcgaaacggaggaggaggccatcgacttctctagtatgtactagtgggtaggatagtggcgattgtgacccgaccgtccctatcgattgtggtggtggtccattttatagcccatgcaaacagccgggcgctgctgcgtctgcgtgcaccattcatctctcgtttgatcagggacgcagagcagagcagctagctggcgtcactctcatcactagtagtactatcgtacaaccaacccagcagcagcagactccaatcatta

SEQ ID NO: 67752 - DNA, 912 bp, Zea Mays
caacgagtatatatcgagacccgttccctaggttccgagccgttttggctttgctccgagtctcaccagtgccgcaggggagagagagagaggaagcagcgccgccggatggtttcgtgtacaccgccgtcgcgtccatgatttcggccctgtgggtctctccgtgcgttggggattgaaccggggagttccctgttgtagattggcgtcggagcccttgaatttcgtcgccgtggtgcgaactccaccgcacgtccgccaaactcagtggggcggttcgtccaatgcctgaatcaaggtaagaaaccctcatctagttcgtcttgttggttacatcgtgtagctctgttcaatttgacagaggtcggggagttagcaggatcggtctgcgccggcgtgatgctcaccgccatggagatcggagtgccgctagctgtgcgctattggtagaagaaaaccctcgtccgctgatctaaccaccaatggctaggattaggtcgagttgtatccctccgcgcgatgcatcgtgaccatagatctagtgatgaccggctctgggtgcatacagttccatgtgggatctagcccgttggatcaagatcgagtgtgcaggtttccatctcaatattttaaatcccgagcgttgttatttgatcgggcggctggggtggcgtaccggttgggggccaacctgatctaatcagagctcttggatttaaatccgacggcccagcaatacccataccccttcgccatggcagaattacgtatgaaacccctcggaagagagaattcaacctgccgtcctagcgctgagtactctatgtcttaggaggttttgcaccaaagcccctgcactcctctatttttatgtgcccagtccaggatccttaagaaattcagaaattaata

SEQ ID NO: 67753 - DNA, 342 bp, Zea Mays
tgggtgggtcttcgggtgaggaggtttctggttcggcccaaaaggaaccatgtccctcgtcgcgtgatgcggtgacttttacaggtaacgcgttagggtttcctcctgacttcgtcgggtcgtattcttttccgcatcttgcctcttccctctctcggctctggtctctcccgtctttggttcgctttagtttccacgacggctggttcgagtcttcaatccgtcctccagtggcggaagaagagtggccgcctctgcctcgggtggcgtccgtgttgaagatggatccaaaaggccgaaaccctaattgcgatcggtggggtctgaaagaggtgcctcaag

SEQ ID NO: 67754 - DNA, 399 bp, Zea Mays
gcgggatgccatgaagtctgactatttctttgagagatatcagggcgagggtggctcctccgaaggtagtctttactggtatgaagtgagctatcttggtaagacggtcaattacgacccagatagaatcgttccctttttgggtccggggcagtccgattacgaagtccatgcctatttcttcccacttccatttgggcactggaaggggttgcagtaggcctgcgggcctctgatgttctgccttagttcgttgacaagtatcacaccgggctacatgctgagctatctcctttttcattcctctccaccagtatctggtcttgaggtctaggtacatcttggtagaccctgggtggatagaataggctgagttgtgggcttcatctagcaggattt

SEQ ID NO: 67755 - DNA, 478 bp, Zea Mays
ctcgctggatgtgagagtggcaaacataaattatatccaagctatacatacgaatttcagccaaaacagcccatggtcactctaacgaagctacagcagttttcgtctcttgtgattagttcacacctcttaggcgtaactgttccctgcacagacgcttgagtacctctagttattcttgagtgagatatctgttttccttggtggactctagccgaaacatgacctctttgaccacggccagctgtagcgctaggtttacgagtttagtcttctaggggcggagctagggggttttattggggtcagctgacccctataaaatttgaaaaatactatacaaatatactgttagctagtgtatttagatgatgattagtagaactgaccccgataactttgttttctggcttcgccctcttcttccatttattgattccccttgcggtagagccagtttgatgtgaatacgtttgag

SEQ ID NO: 67756 - DNA, 413 bp, Zea Mays
ctgactctcaacatagccaacacaacttctcagataaagaggaaagtggaaataaaaggttgcccaaccaaatgactaactttattaataactacaccaagttgcaggggatacccacactttgatgacaatcattaaaaagagccaaatccatcataagttcatcacgaaaaacatagaaacacatgataagaaaactactccaactgattagaactaactaagactaagacattgacttaaacatttattacaaacttcgactctagcgatctaaggctccaagtttatctaggtcctatagtcaggggtgccataagcataatgaccacggggcggcgagcggtaagggtgctgagtcccaacaggggcgaagaaccatcctcctgatggcagcgctccgctcgctcagc

SEQ ID NO: 67757 - DNA, 740 bp, Zea Mays
gtcgaggtaaacatcgtcgccgtaatcgtgccacgaccatgaccctttaaccacgtcgctactagccgcaacagctcgccaatgaccgccgtagccctcagccagtgagtgccacggttaaccgcaccggtgactcatctcttcttctcggccgctaacgcaatcctttcgaattggacaccaccgctcactgactctataaattgagtacgccatgagctccatagggtagttacccagccaaagcaccagcatttgcctccaattgttcaccagagcctccgaattgctcacttcccccaaatcagttctccgccaccgtgaaagactctcaccatggccagcgagttacaggtccattcccactctctttttctttgtttcagttctctgatatgtccttgaagctcatcggcccaaccaattgtactagaccggggtagatcgtcgggaacgctccatgctgtccagtaatcgcgctgtcaccgtgcgcagtgtgatttagaactcaaatcttgcaattaagtgaggggaaatggtcgtttagggttgaatttggtgtctagcaaatggaagggctagccgttacttattctgaccagtacaagctcgccggagctcggcctgtcgctgttcgccgtcgaggatcgtgggttgtaaagaaaaagaagtagaagggcctatctgcatttgtcagtgactcaaacaaatagtgcatagggttcttcgctagttattcg

SEQ ID NO: 67758 - DNA, 480 bp, Zea Mays
cgtgctgcgtctgagtgcgacgtttatgctgcacctgcacagagttgactaactagtaggcacgataatgattggaagcagccgcagccgcaccggcaccacccgcctttgtcttgttttctttcctccccctagaggcgagcatcggtttcagtttacacgcggttggactgaaagacggatactttgggctttgaaggcgtgctagtttcattcataccggttggaatttgggtacttgttgtcgtcaggcttgctttggtatgggggtagacatcagacatgtggccatgtgatgtgctactgcttcagcctgtcgctgtgctggctagtgctgcgaattaggttcttgttctgcttatctgaatataagttttccatcgatttttttttctcacactaatttgtactatcaagtatcaggaccctttgctttacttgatgctattgttcggtgggtagttcatttatcaataaaaa

SEQ ID NO: 67759 - DNA, 423 bp, Zea Mays
caagaatacatgtgagaacacctatgttgatacaagcaagcaacatgtacactccatgtatttttgaagcctttcaagttgagtatgaaagatcattggcagcatatgctagaccaatggaaaaacctaatgagttcactgtggggattgttaaggttgtggatggaaaaaccataatggaaagggaatacaaagttgaactacattctaaagagatggactcgtgaaacaagatgtggttctatacaagatattcgtggagacaatgttatagaaaacccaaaaattgatgcaacaagacgctaccaaaatcttgcccgcaagttcctatcacttgcttctcgtgcagctgactatgaagaaatctattcatatattgataatgtactcgatactctacatagagatgttgatgaaaagata

SEQ ID NO: 67760 - DNA, 798 bp, Zea Mays
caaattgtttataagtgtttattacaaaaccaggagttatgtacaaggacatcaaactatcgaaaatacaaagcttcagtcttcctttaggactttgtcggtagcttcgtttagtaacttgtcgacagcttcgtcaatagcatcgttagcaatcttgattatatcaagcgcctccttgacaaatgggtcagcttcaggattatatggctcgggagggggagcaagctcagctgcattgaaacacaaatatctattagtgccgaaacagaaaaatttacgaagctgagttataaagcgtatacctataagtctggcccgctcagcagcttctgagcttcctcgactcttttagcctcttctaaggcattatgagattctttctcattctttttaatggtttcatcagcaatttctcgtccacccttcagccatacttcggaataaaacttcccacccaaagtagtagcttcgactgaagggtttctaacatcgtcggctgagaaggcaaaatctagctgagctacagccttggcatgatcacaaccaaccttctccaaaatggacgtagccccacgagcaccggcaaaggcacagaagtcccctctgtcactaagaatttcctcgaaagcttcgacctcgctgtttatccattgaataacttcatcgggattccacgaatgaatttctgctcagaagaaattgcaccaactttagaaaagctattcttgagatttttagcacattccatagctatttcatagcatttttccttagcagcatgaagcttatcaatatttt

SEQ ID NO: 67761 - DNA, 446 bp, Zea Mays
cgaggaggcagacatgctcagcagaaacaatgtgcccaacaagaggaggaaccctagaaacaatagctacctccaccaccaccacccttgttgttagtggagcagatgtttctaatgcagaactaggcagtgcaagctattagacagactctagcagccatgtagcaatctcaactgcaaccctagccttagccacagatgcaaatgccacgggacaaacgtggcaagttcatgagagggcatcctcctaccttcgcccatttcgctgaccctatggatgctgaagactggttgcgcatagtagaaagaggactactcaccccaatgtgatgacagatagaaggttctgtatggtccccaccacctgaggagagcagctcaatcctggtgggagtcctaccttgccacccatgctaactctgaaaccatcatttgggaggagttta

SEQ ID NO: 67762 - DNA, 785 bp, Zea Mays
ctctcccgttttgtcttagatattggcacttacctcaatcatctctagggacttggggactttccctctcccgttgtgcttataaacccctactacaggcaccacggtgcgagtaatataagtctcatcctctatgctagaagtagggccttgagtagcccaaaccaggataatcgcttgtgtctcctcgcacaccatctagagtcgaccacgcggcttatttactgtttggttaagggcccgtggtccaaacatcgacattatgaactttgtattggttttatgttgtacgtatatatgcgggatgttgtgaactctatatgagctttatgttgtatgtatatatgttggatgttgtgaactctgtacatacgattagtccaaagttgtacacatacacataattttaattattgtatacacatacatatattattataataaatatattaaaaccgattctagccaaataacgatattaaatgtccatttttttatcgtttcacttctagaactggtacaatattaaaagtttaagcctagaaacgatattaaagttggatcttttagtaccggttcgtgccaagaaccgatactactgactcctctttagtaccgaactatgtagtcgggactaaagattaatgcttttagtctcgattttctagtatccattgcgaatttggtcccaactagatacaaaggacgtgtttggttcttctagcaaaacccaaccatctcgcctagctaaggtaaggcgacaattggttgcaggggcggagcca

SEQ ID NO: 67763 - DNA, 517 bp, Zea Mays
tcatgtttgacttgtcagcttgtaggcatacatcaagattttcatggtgacgatgtaggggccttcccactttggctcaagcttgcctcttgactgagtccgcggtgttcgcacgaggaccaagtcgccctcgtcaaattccttgaatttgactgacttttctctctattcctttgttgcctcttggtacttggtgattttggcaagggcctcagtcttgtagtctttgagtaaatccttggttgctggttcatctgcctccggtgtggattgcacttgcgctcttagggatttgaacttgatttgttgtggtgtcattgcctcggcgccatacattaacttaaaaggggtgaaacatgtggcccttgtctccattgtatttagtccccataggacctctggcagttggatggctcatttccccctcttgtcatcaagtaatcttttcttgaccgttgtgaagattttgtcattggccctctctactgccccattagattgagggtggtaaacagag

SEQ ID NO: 67764 - DNA, 1046 bp, Zea Mays
agggtcaacgacatagggtcgacgagagagcgtgagtagacgcatgaagacgctttctaaaaagcttatttgcctcctcccttgcatcatctcgaaggcaactggttctagagacctgctctcctgatcgcagatgtacgttggcgctcgagatgaagaagactacagtggcagagcagaagaaagaagaggcaaaaacctaattcatgtgggctatgttttggcgatggctatcagacgccttaacaacagataaattgaagtataagataagatcagatgatgcgtactaattaaacataatgattgacgatgtggaagtgatatgatcgacaacatggaagcagtagggtcgacgaagtcgaagcagcatggtgacgatgtcaagcggcagggtcaacgacgttagtgatagggtcaacgagaagagtgtgagtagtcgcatgaagacgctttccaaaaagtttatttgcctcctcccttgcatcatctcgaaggcaactggttctagagacctgctctcccgatcgcagatgtacgttgatccgatctagaacacggttaaataaggacttggacccttatctgcaaggtgctgaatttcgacgagccattcacgcatgtcgtgcgcccgcacccttcgcccaccgaggccaggctaggcgagcgagtgcctacgtgcgtgcgatactctatcctctttttcccaaccatggcttggtgggagagggaagtctccacatataaactagtctcactctacttaagcaaacaatgtgggactattggttccaccattcccttgccatacatgggtttatgtgatttttctaggatttaattgaatttttcaaatgggccttgcccataaatccaacatcttggcggtaggtggggatcagtgtcggtcctgagggtggaccataggggcggctgtctgaactcccaagtttatagggccccaccctaggtatatatttagaagaaaattttaatataatatcatactatatattttttatatttttgtttgatataaatatttt

SEQ ID NO: 67765 - DNA, 413 bp, Zea Mays
gtttaatgcttgtttgcagtttggcaaggtcaaatagggacttgttggatttgttgattcagattatggagcagatttggacaagagaaggtcattgacaggttatgtatttacggttggtggacgtgcagtcaattggagggcttgtctacatcccacagttctttgtctactacaaaggcagagtatgttgcagtttgtgatgctagcaaagaggttgtttgattgaaatgtttatatgctgagttttgtggagatacatcttgtattacattgttctgtgactgtcagagtgctatttcccttacaaaggatcagatgtttcatgagaggacaaagcacattgatattaagtatcattatacccgagaaatagttgcagaagttaaattgagggtatgtgaaagggaaat

SEQ ID NO: 67766 - DNA, 437 bp, Zea Mays
gttctaacgcaacatctgttacttcaatggttcgatcgggaacccaaagacacttcttcaattgagacacgtggaacacattatgtactgcagacaaggtttcaggtaactgaagtcggtatgccactggtccatatctttcaaggataggaaaagggtcaatgtatcgaggtgcaagcttcccctttaccccaaaacgtgatacacccttcattggtgaaactttcaggtagacataatctcccactagaaagtacaagggttgtcgtcgcttgtctgcataactcttctgacgagtttgagctttcttcaaattatgaattatttgttgaactttctcttctgtctcctttaccatatcaggcctgaagaaatttctttcacctggttcagaccagtttaacggagtacgacatcgtcgtccatataaagcttcg

SEQ ID NO: 67767 - DNA, 405 bp, Zea Mays
ggagagcacggagaggtagggaatcagttcaacatgggggctatgatttatagggcgaggaggtagtaacggcgccgcagaatgggcagaggacgcgagcagtctgtatatccaataatggcgtagagaaatcttcgtaatgcagcataatggggaggaagaggaaatgttgcatgtccattacggtggaatatggaccggcgagcagacgtcatgaataagagaactgatggcggcgtacggcactttactacaggcgtgcgagcagcatctatggagaagaagtatttctccaatgccatgcggtgtgggtcccacaagcaagtgagacaaaaagggagggagagaaaacgtgactgcaggaagctgggccgcctagttttgttggccgagcgaccgttttcc

SEQ ID NO: 67768 - DNA, 646 bp, Zea Mays
gtccgtcttagcctagtggctgggtctacccagtaaggccattggcctcaggtgaaggccaacacctataatcagcgccctggaactccagtagaggggattcgggtttgccacgtgtcttgaagacaagggctctcggcacctgtgcctagggtccaaacccccgggagcagcctcgacactcgtggcggaccacccggacctctgtcctaagggggtccggtggtgccacgtgttggccaacaccggaagagatgagacctcccccgaacaccatccaaacccccagccaagggcggttcggagctgtcacaaggtagggcagtcccagtcactactccccacacaaggcgaggcccaatgctatcacgtgttctacgacgcgtgacgtaagccattggggaaaccccgacgtcagcctctaagtgtgaagcgcttctgcattaactacgacgagatgtatacccacccgccccagtgataggcagtgcgtccacaatgcacaggtcgcatagtaactcgcgcgttactgaggtaaaaccattgaccccctgcgccgcatgggcagctatcatcatgactcccattgtagcctgtgcgctatcgaggcaaaaggagacatgcatggaagacaggttgccgccgc

SEQ ID NO: 67769 - DNA, 757 bp, Zea Mays
gagaaataacacctcgattaaccattacaaattaacaagatttcgaactaatagaaccttaagaagtcaaacacaattcgaaataacatagttcaataacttagcaatataaaacataataagacatagacataataaatatgcaatgtaaatgttcgaaagtccacatgcgagctccccctgattgccatcttcccatcttcatttctctccccctttggcatcaatttccacaaaggggtgtcactgcgcaccaggtgagggacgtggatacatactgtagtattcagagctaaagttgtcaaagatggaggtgaactgattgaagtcattctgaagctgctgctaccttccatctagtgaatgaatgttgtcattggtagacatagtctctaattgactaaatagagcacccatattgtcttgaaagctttgttgcatgttgttcattctgctcataatgggatcacgcatagtatcgtgaatatgagtgcgaagatcagcaaactgtgaatgtaccccatccagttggatgtcaacaacagataatctattgtgcagatcagaatattggctatcaaaatgagattgcatagcatcaaagcggccattcacatgtgtcattgccctaaaaccgtccatccatatgagtctagagcccatgctgcatctgctgaaaataaggatcaaaatagccaggtgtgggttgccagtactgtccttgctgctaagtaggtggaggaggaggcatttgctg

SEQ ID NO: 67770 - DNA, 952 bp, Zea Mays
ctttgattgacaccccgtgtcagaagtatctacggctctgcttggcgaaatcgtctgcaatcacgatgcattcaggtgcatcacaaagtggtctctcaagctcaacggacttgacttaagcacatccctaggactgcgatcaagtctcaggccttagctgacttcgttgtggaatggatggaagcccaggcactgccccctatcgaggacctagaatattggaccatgtactttgatgggtcctacctcaagatgggtagcggtgcaggactagtcctcacattgccccaaggatacaagctccgctacactatctgcctccacttcaacgcaaccaacaacatggtgaaatacgaggccctcgtcaactgacttcaaattgcagcggaagtaggagcacgacaactcatggtgagacgtgactctaagttgtttgtcaaccaagtcatgaaggcaatagagccacgctacctgtggatgtgcgcataatatagcaaagtacgcaagttggaagagaggttaaagggctttgagcttcaccaaagctatcagtgtcgagctctcgaccatcgcatctgggcaaaaacccatccttgacgaggtcttcacctccgacatacatgaaccctccatcaagatcaagcaaccaagggaagagcctagtaagacgatgggcaaccaagtcgaccatgcagcataggctcaggggctggtcgcaacgatcggtcagtagggctgacaccgaccatttatcaacaagctctctaataggatcctcctggaagacacgagtgaggcaaggcagttgtcccgcaaagcaacatcctctgtgctcatcgatggggaactttacaaaaggagtgctttagggatcaagcagaaatgcatcacagtcgaagaaggacgacaattgctcgtggaagtacatggagagacatgtggtcgccacgcc

SEQ ID NO: 67771 - DNA, 1208 bp, Zea Mays
gttttgctgaatgagtgtgctgttgttgcagatggcgcatgccgaaggcgtcgaggaccttggtggtctagacagtgcgctacccgaggctgcggaggtggatccagcgccgacatctgatgccggtgagggcctctcgtcgacccctgcgccgactatagccgacgaagaccccacaccagcccctgcgttgacgtgtgaggacgcctcgaaggcggtggtcgagccagctaccgaagacctcgcggcggcggccgagccttcgcaggtggcggaataggggttagggattgcaagtgaactttttgtctgtgtgatactgaacctcggttgctacgcaggttccgacgtttgggcctgcgcaagcaaccactactgacaatactgattttgcggcggagacttcaattgtagtgcccgccgatgatagtgtgcctggctctatgtctgaatgttttgagtccgacggtgagtctgggagtttgtttccttagacggaggagtcctcggatgaaggcttagattattttgttgcgttggatgtggctgtggtggagactttgccacgtgtggagggtgctaaggatcttcctggtacgagtagtgggtgttcgcggcgaagggtggtgggaaaacagtgcgttggtgaattttcgcggagcggcaggtgccgtcgcatggagatggagcgtggccgacttcgagtagacggggctggtaaacgagaattgttgtcttcaccgaacggggcaggcataggcgaaaagaatcttcgggagctatttgagggtgaggaattgaggataatgctgtttaattacagggagatgggtatcattccgaaggttgagccgatgtgataggcgatgccctcgccgtgtgtgtgtaattgtaatggtgatgtggcatgttggccgtattcgtacacttgtattgttccggctgcgtacgtgggcggctttgtgcggagtatctttgtaatgatagacttcgattaacgttattccggttgcgcccttaagtaattgttgcgctatcttttgaataaaagatttcgattaaagttcctgatgtgctgttccggctgcacccttaggggacttttgctcggaatgttctgtaaagaaaagacttcgaataacgctcttgttgagctattccggctgcacccttaggcaactttcgcccggagtgtcttttgaagaaaa

SEQ ID NO: 67772 - DNA, 335 bp, Zea Mays
agatgctgcactgggtatgtgtgcccttcttctacccactcgactaccaacgtggtgcttaccatgtgagtcgtggagcaaatatatagcagcagatcctcgaccggctgatcggttgtaacttggtgtggtggcttgagcactggtggtgtggtcagaaacttctttagtgcatccaaggcttcctgcgcttccatggtccactgaaatttgtccaccttcttgagcaacttatggaacgacattcctttctttcctagccttgatatgaatctgcttagcgctgccatgcatctagtgaacctttataccttcttctgtgatcgtggtggctc

SEQ ID NO: 67773 - DNA, 388 bp, Zea Mays
ggcgatgatccagaccatattgctcatgtgaaggcgtatctgagtaaggaatttcaaatgtctgacttggggacactcagttattttttgggcattgaggttttgcagactcaaaatggtatttatctttctcaggccaagtacatacaataccttcttgatcgttctggtcttagtgatactcgcagtgttgccacgcctatggatcttcacttatctcttcgtccgactgatgggacacctttggaggatccatctcgatatagacatcttgttggtagcttagtttaccttactgtcaccaggccagatattgctcatgtggttcagatcttgagtcagtttgtctctgctcctacatcagttcattatgggcacttacttcgtg

SEQ ID NO: 67774 - DNA, 374 bp, Zea Mays
gtcttgatctctcttccaaccgcatgattatctcctgtcatgtggtctttgatgaggacaacttcccgtttgctgcctcatccaatctaactaacctagattttttatgatacaactaccaccatgtcggctctcttgcctgcgctcgggatacacccctaggtctgagcacactgttgcgttgcctgcgccggtgattcctccgggatttctgcatcaggtagcaccaccacacctgtccgcgccacgcgcggcatctctggcgtcacatgagactcccgggatcgccatgacgggtgcgccatcttctgcgcctaacgtgacgctctctgctgctgcctgcacgactcctgcattggctgccgcgcacgcat

SEQ ID NO: 67775 - DNA, 807 bp, Zea Mays
gcattttagaggtaaccgtcgagtgatggctgatattgccggtgttttagaggtaaccgccgagtgacgcctcacactgccagcgttttagaggtaaccgccgagtgaatcctagaactttgctttctcgagtagtgacttggcactttttagaaatagtgcccgacacgggaaagcccatttatactcgcgccgacgtgcattttttatttctgagccctaacttcacttttttgcctcgaaccactcctctgcttccctgagatctcgatcctgctcgatccgccggcaagactgcgatgacgctgaagcggaaggggaagagctccattgcggcaatcatcccgcctatcgaccccaacagccagttgtcattcgcgggtaaccacatatccatcatctcagaatctgacctccttcatcttgttgacattggggttttgcttccaaaagaactctgccattggcgaatttgctgcggcgttaccatttcgacagaggatacccatgaatctgtcgtttacgttccttttcttattcacggtcttgctcttcccgtctctccctttttccgcgacctccttgattctatgaattgaacttgactcatatgaaccctaattccatcttgcaagtttccatttttgtacatctatgcgaggcctttctcgggattctcccccacttcggtctctggaaatacctttatcattgttagcccgggatggctgggggacagcaccagctcgttggcggcgcacgcctggagcttcgtcgcgggagaaaagcagagtacctcgacattcc

SEQ ID NO: 67776 - DNA, 482 bp, Zea Mays
cggaatacgatagtggaagcctgggcatggtcgagccggggagcagaggcataatggaggaacccagacgccggacctgggcgccatggaagagttcggtcatggggagagaaatggagaggagagggaagtagtcagcacagtacttaatccctggagtcgctgatttcacagagtttggtggcgagggattcagccgatccgttcgcaacgactccaccgcaaggaaggggctccaccacaggcggcggcgaagtctacatgcacgacccggctgatgcgcgaggtgggtgataacgctgaccagcgggccccacaatccagtggtcaccagtgactctacgcgcgcgcgatgcggcaacagccatggcggcacgcacgactacaatctggcggacggggcccacacaccagttgtggagagcagggagtgggtggcgcagcgagaagcctggcgactagggtttggccaggcgcgctgg

SEQ ID NO: 67777 - DNA, 502 bp, Zea Mays
gaggtctccaaggatgccgatgatgcagctggtggcaagaaaaggcgccgaggtaagagaaggttgctgccccaccatttaagaaaaagaagaagaggcgggttgaagttagcctagctggcagcacgggaggtgaagggagtggtgtggcacaggacgcaaaggcatcgactagctttgctgaaggtccgactgagacatgcgcggaaccagtggaggttatgactttgcctgctctttgggaagcctcaacgtggatgttgatgatgacaggggtgagtggcataggaacgttcccattactagggcctctggcaaagactactttacgtctaggatggtgcggttctttggattgtttacttatgggcgtaatattgatgttgttgtatcagctttgatggggaaggaccagagagagtcctcgaagaagaggaaggcccaaaagccccgttgcggctggtggatcatcatcgggccaatgggtcgaagtctaaggacg

SEQ ID NO: 67778 - DNA, 1002 bp, Zea Mays
attttcaggttttgcctattcaccccctccaggcgacgttcagcgggtcacatcacccagggggaatgaagtcatcacggagacaagacgtgactcgaaataatgcttaagtttctgtttggtaattagaacaatgttcaatagtttttgtacctaggggtagcaagtttttgcgccgatgaagacttcacttatgaagtagacgggatccgcttatgaaataatgcgatgtccaagtgctccttcgcggttcgcggcctcttgcgtcctaggttgtgcaccagagttttgctcatggttcccaaaatgaaagcatttatgacatcgataaggtttgctagttcgttgcatagtcatgagaaacaccggatctagtcccttaaggtctcgtcgagtttttgtcgataggtcccatgggtggccagggcggacgtacgtgccttggaagttccccacaaaattttttcaaggccgaccctattatgaatgcagttgggcctcaagttttccaaacatgtttgcaccgagtctatcaggtataaggggagattgcagattatgaagtcgtcgtgattcgctcgtccctcatggtacacaggtcaataatccctcagccaacggttggtgtttgactctcccgaatgttttgcgatattggtgggcaccctatatcattgcgacaccgacgctcgaaggatatggtggctaaaagccctagaggtggcgggctcaggcttcaattcccatcggaatcgaaatgacctccacggtgttgcttgccccgacaggagacacccgacccgtcacatccctactccctagtcttgtgaccaggcgcgctccatgtgcttggacttggcctttgggccggcgaggtgggacccgtgccacgctttcttctagctcgaggggtcacattgtcgtggcatcgtttgttgttggcgtagacgcgatgcagctgttggtttctggttcacaacgctgagacatggagctctcagc

SEQ ID NO: 67779 - DNA, 714 bp, Zea Mays
tcgccactatcctacccactagtacatactagagcagccgatggcctcctcctccgtttcactgctcgtcaccatcatgctgctgctgcagtcgtcatcacctgcttgctcctcgctgagttgcggccttgactttactagcgtggcgctgcactcctgccaggagacggcaccacaaaatgctactgcctcatgctgcaacgccctcctctattccatcgacatctggccaattcatgaattagaaaaaggtctttgatgcctatatgtgtacatggtttcaaggaacactacctttgatctgcctacgtcttacgtctcatgcggtggtaaagactcaagtaatgtgctgcagtggaatgtcatcatccctcgccctacagactgcaatggtaagtctcgaacattccttaattaatcactatgtactccattccatcatattattattatactacatgcatactcctacagatccatgctccaggcagctggggaagaacggtgtgtccccaccgccaccgctagctcccagcgggctcggatcaggtgccatagcagccattgcagtcgtagcatgtgtggacattgtaggcttcctcggatggtgtgactactactcctggttttgcagtccagcggccaaagtgcaagttagcatccagcaggtccacacctcaatttctgaattgattaattattattacaactgta

SEQ ID NO: 67780 - DNA, 816 bp, Zea Mays
atctttacacgacttcatgtgttatccagccgatctggtcacgaatcacggcggcgaggacacgcatctacgcgcggggaggttgtcggcggtgagattgccgtgctggcggtctgatccacttcggtttactgtaccatcgaatcaccatgagacaacctgacagagcaagttcaggtccagatttctccacattttctatggtaccaagcccaaacatctatagcaaagttgttctactacaaaggatctacaatttttctatatcgacctagggcaaattccttgaagatcatgatctatagagctccaaagatgacccagtaccactgttagtctgaatttcagactccaataacctgacagctcgactttgagtgtgtttttcttccatttcttcataacaactatgcttacactcttaagcaaagttgttcccctttcatagagctacaaagttgatgtggtgccctaaggtgaattctcactattttgaaagttataaagctccaaagttgagctaaaatactgattttcagacttaggtgtatagggtttaagtggtgctttttgcaattagacccaaaacttagggttcaacttgcaaatccacatatttgtgatccatatgacttaggacactttattatcatggtttttgcactttagtccaaaagtggactaattttgcacttaaccccctagggtttggatttagggttttccagggtcctttttagggtttttggtatttcaagggtgtgaatgtaatgcaagtcccttcttagtaacattttatgactatttttcttaagc

SEQ ID NO: 67781 - DNA, 484 bp, Zea Mays
ctggattaggtgcttgactacttagcggagccgagggtgtgtgcaatttatagcgtgcttgagcggtggccggtgaatttgatggaaacgcgtggcggttggagaggagaaggggcactggcgcaaacgattagtggctttcaccatggtggactcaccggcgatcaccggataagacgcccgagcacgtggttcatggtcggtaagcggccagcgccagcgaggaccaattcggccggccgcaatccaagtgggtgcggcgaactccccgtcgatcgggtccgagtttatctggcgccaagatctttacgcggccatgattatctccataccagagggcacgaatcatagtgacgacgcgaatcacggtgcgacggtcaccagcggcgaggggcgatgtatctgaagatcttcttcagttcactgtaccatgagaactccaattcagagcctctgtccgaccaacttgtaggacccataactc

SEQ ID NO: 67782 - DNA, 655 bp, Zea Mays
aggaatgggcttcgagggtccaagcaagggtgaaggtcaaacaagaggcttgaggaccaatggactaatggctaaggtgaagaagatagtacttgtatggtgttaagggactaatcaaactatggagagttatgttgttgtgagtataaaaaagatggaagatgtgatttaagacgatgaatttaactcatatgtgatgagatggttcaaataataaggcttaaaggtatgctagctcaaagagaagagaagaagcatactcacaagtctatggataaaggtatcaaagaaaagaatctagaagggttcactgatgtgtagactttgagaggagcaaaaagtgagaaatggacaaggaattggactttggagtttagagttttaggagtcggttgcagcaaaaggttgatgaaaaggtgcaatctaatgagaaggttgggtacaacaaatgggatgtcttaaattgtttgggtggactcaagaaacattcgtctaagtcatagaagtgcctaatagatgagccaagtgaagcaaataaagatgtgcctaaaatggacaaggtctagatgctttgagtgcaccagaccgatccggtgagcaccagacaggggcactggactcgacacttagagagcatgtaatggggctatggaag

SEQ ID NO: 67783 - DNA, 717 bp, Zea Mays
cacatagcgtgcaatttcaatcttcatcttcgtccaccaataatgttgctttagatcatgatacatcttagtgcttctgggatgaatggaatagcgactaagatgagcttcatccaaaatttgctggcagacctcatcattcttgggcacaactatacggttgttaaaccatataataccttgatcatcctttctgaaacagttagctttaccggcctttattttctcatgaacgtgtttcataccctcatcacttctttgtgcataattatcctttgcagaagaatcgactccagcttcaagtgatttaaggttccatgttgaattatccccaggtttaacttctccatttcatggcataatgtaatgtcagaagtcttcatcgtaagacaatgacaggaagccttgcgacttagtgcatctgccactacattggccttgcctgggtgatagtgaatttccaattcgtagtccttaatcagttcaagccatctcctctgcctcatgtttagttctgattgggtaaaaatgtacttcaagcttttatgatatgtatagatatgatagatattccccagcagataatgacgccatattttcagggcatgaaccacaacagctaattctaggtcatgagttggataatgttcctcatgccggcgcaactgtcttgaggcatacgctataactcggccctcttgcatcaagacacaacct

SEQ ID NO: 67784 - DNA, 810 bp, Zea Mays
atgttacattctacagaaagagttcaaagggacctttgaaaacacaatgcgcatataggaagaaagtcagatcctttgtagtaagaactagaaagtacatatgatctttcattgtttttacacagacgtaaccatatatatgtatgccgaataaatgcagacactgaaaatccatgatgattcaagatagatattatcatgattgcaatgaccagaacagtgcaattcagaagtatgggcataaagctagatctctaacaagtaacaagtttttttagcagaaaaaactctagcaagtcgatataatagaaagaagtaagcatcctgctattgatcacataagaaaggggggaaattttaggtgacaagtgcaagcaatacctctacaatgcgctttcgtaaatatttagatgaaatttccttgaagactagcttcacatcaacttctgcaaatagctgtatagaagaaatacatggaaatcagtaaaaatatgtcacctgtttaataagcaaggtggtaggttaaaactgttgagcaaagcaaaaaaggggaagcacgaaaatcaccaattatcatcacctgaaggggcttccttgaaaccggcttgatgtgaacatcgccttcatctacttctccgtcatctacaatttcatcctcatcctcatcctcaacaatatcagccaaactttcagtgcctccagataagccatctttggaaacatagccctgctcagaaagtatacttataactttctcttccaatgctgaaagagcttttcttctgggaatctttccttttatttgtaatg

SEQ ID NO: 67785 - DNA, 918 bp, Zea Mays
cgcgatctctacaaaaccatcctcaaatgacctgcatgctcttcttcactttgagaatatataagaatgtcatgaataaataccaccacaaacttgtcaagataatccatgaatacactgttcatcagattcataaagaaggccggtgcatttgttaggccaaaagacatcacggtgaactcatacaacccatacttggtaatgaatgtcgtcttcggaatgtctgaaggtcgaatcctgagctgatgataacctgacctcagatctatctttgaaaacacattggctcctctcagctggtcgaacagatcttctatttcgggcaaggggtacttgttcttgatcgttacctcattcagagctcgataatcgatgcacatctttctagtaccatcgttcttctccatgaataggacaggggcggcccaaggtgaggtgcttggctggatgtaacctttctttgatagctcatcgatctgcttcttgagttcaactaactctggtccagatactctgtaagctctcttaaagatggggcggttccaggaagaagctctatggcaaactcaacctttcgctccggtggcatgcctggtaagtcctttgggaacacatctaggaactcggacacaaccttgataatctcaagtggatctgcttcactgctatcaatagccatctgataacaacttcctttctttggctcaggcgggactaactcggtcaccacttcctctcctagtggagacatcaacttgattgtcctcttatcacaactgataactgcgtgatacttatctagcaaattcatccctaggatgacatctattccctgagtaccgattactatgagattagcaagaaacgctatccctcttatttccacacttacattcaagcaaatgatatcggctcaaa

SEQ ID NO: 67786 - DNA, 513 bp, Zea Mays
tttgcagaaaggccctcggtgttctggctaactgggaacgggttcagttactgttttcttgagtcactgacagtttctaaaaaggacctccaccttctattcctttgcagattaaggtccacgacgaggaacaaccctggccacactccggcgagcacctggaccggccggagggagccaagactggcggcccctagtggcgaacaccgaattggatctcccccgaacaattctcctcaaacaatttcaccaatggcgcactaaaacgccctggccacggtgaccgtgtgggtgatccaaagaacaatgcgttcccggcgattggcggcgatctaattcaattgggtgggtcggtgagcatcacaaacgcatgagactgcttaaacgcgggagcagaaagtttgcactgacctgaatcgagttagccgcggcgagctgttcttctcggtgttttcgaaccggtttggggaaaatgcaaaattcgagctcgctggtgatcggctgggggcaata

SEQ ID NO: 67787 - DNA, 1395 bp, Zea Mays
ggaaggaaaggcggagcaggagccacggccaccaccagacccggccaaggcggagcaggagggtggccaaatttcctccagaactcggttctgaggctgctgcccaggtctgcaggcatctgggtttctgtgatgacaatgaagttatttctgtccaggatgccgggaaatatgcgaagctatttgtttctgggctctctagcgttcatattgctgctttggcagcgctgtttggctggtcggtgccgctgaacggacctgtttaggtgcggttgggctggtttgctggtggtgtttgatcgttgtttagatggattcaagctgctttttaatctggaatgtgagagggctgaatgatcgtgtgaagagagattctgttaaatctttggtggttgatattagaccttcgattatttgcctgcaggaaaccaaactttgttctatttcagattttgatattctctcaattttggggtctggtttcagtaattttgtttacagccagcgattggtaccagaggagggtgttggtatcctggcgtgatggagctttttcatctttggcttcagttatcaagcaattttcggtttcagttaaattgcaagagaaaaatggttcgtgctggtggttcactggagtgtatggtcctcaccagaacaatcttaaatcctcctttcttcatgaattaagagaaatcagagatacctgtgtgggaccatgggaccatggatcattggggggagattttaatctgattttcagggaggaagacaagaacaattccaatattaacagggctatccctggatctgaaagagattcatttgaagggaaggaggtatacttggtccaaccagagggatgctccaactcttgttaagctggaccatgtcatttgcactagctgttgggaagatctatttccggacgcttctcttcatagtaatgctaccacatcttcagatcattgtcctttgaccctcaaggtcagagatggctgcatggggaaaagacggtttcactttgagagtttttggcccaaaattcctggttttctggaggtggtgggtgcgtcctggagcatgccagttgggagctcctgcccgttggagcaagtgtcattgaagcttaaaaggttagctcgcgcattgcagtcctgggggcataaagaagtgggtaatgtgaggatgcagctggggcttgtcagagaagtgttgcataggctggaaatggcgcaggatatcagaattttgtctagtggggaagtttggttgctaaacttgttgaagcaacggtgccttagccttgcgtctcttgaaaggactgttgctcggttgagatcacggatccactatctaaaggagggtgatgccaacactaagttctttcattcg

SEQ ID NO: 67788 - DNA, 637 bp, Zea Mays
cagtcaatggaacttcaagattttcaatgaattacatagttccctactccatacctttgccttttacctgaataccatgagatccactcttttaggtagtgtggaggtgggagcacctgttgtcacaatttgagggctccttttgctcatgcacctccttccttaaaattacctcgacatagctcaaagggggtgcattagagacacaacttggatttcttgttttggtatacacgagtaccaagacaaagaaatcatgtgaacgtggactaaacaaaactatcatgcttgcacatacgttaatatcaattgatgcataatcataaaaaacaacacaacatgatttacacaaaaagatacaggtttagccatatacaccaagagagctaatcatgacagatagatatatcaaatgaaaacctaacaatttgaaagattcaagggatataaactataaagcacacagtcatgatcaatcaagcatgattattatattgaaaaacatggattgcaacaacatcaaatgaatgacattatacaacaagcaatcttaaaggtataattactctaagcataggtcaagcaagacaagccaacttaagagcaatactaattgaaaataatgcacttaagatac

SEQ ID NO: 67789 - DNA, 800 bp, Zea Mays
ggggtactgcaaggcttacagttaagcataccagcacggtgcagaatatccaacatatactgacgctgtgagaggaacagactgtcagggcgacgttgaacgctgacttcaagaaaatgatggagagttcacatgtctgtcatagagaattcccgacagagagcagcaataatccgctgaagaagactcagggaagaggccgtcaaaacgatgtcatcaacataaagaagcaaaatagccatatctaagctgtgacgatggatgaagactgaagtatctgactttgcttcaataaaaccaagagtggtgaggtgagaagcaaaccgatggtgccaggcgcggggagcttgcttcaatccatatagagacttgttcaagcggcagacaaagtcaggtctggaggtgtcagcaaaaccagtcggtgaataggccatgaatgagagagtgcaagagtgaggacagcccgaacagttgatggcttgaccacgggattgaaggtttcatcatagtcaatacccggacgttgtgtgaagccacgaagaacccaccgagccttatagcgatcaagagagccatctgatttgaatttgtgatgaaagacccacttgtatgtaaccaggttgacaccagaaggccgaggaaccagggaccatgtgtcattggcttgcagggcatcgaactcctcctgcatagcatgtcgccacaacagatctgccaatgctgatcggacggaggatggcactggggagagcgcggtcacctgaagattcaggcggtcgacggggtgtcgtgtgccttcc

SEQ ID NO: 67790 - DNA, 669 bp, Zea Mays
agtgttcaggacatcaatagtccagaaaaaatgcacctcctgttcagaaacaaaagaaatctaaggaacaaaactttactgctccagaagacatactcctttgcactacatggttgcaaattagtagtgaccctattgtgcacactggacaaaggagggaggggctttgggctcgaattgaaaaaggtacaatgaacaaaggggggacttcccttgtagacttaacagagcacttagtagcagatgggacaagattagagctgatatcagtaagttctccggatactacgcaagagtccttagagagaaacaaagtggcttaagtgacgaggataaggttagacattttgtaactattttatttgaagttgaacttgctgtcattttactaattctaattgaacatcgaattttgaagacatccaaggcagctatattgtttgcgcatgaggagaacaaaccattccattatatgcattgctggcatcaattgaagggggaacccaaatgggagagtatctgtcaaggacattcgttcagaggattaaatgctaaatctattggatcttcggggtgtccatcaattgaagcaccagaaactgatagtggatctgccgggttgataggaaaacggccccgtggtcgtgattacagtaaagctaaaagaaa

SEQ ID NO: 67791 - DNA, 690 bp, Zea Mays
ttatccttcaaggaaccttcgcactaccttctgttaaagagccaaagatatgcttgtaaacttatctagcataatgggagatgaaattaaaatgataaggggaagaatatgagttttcatactctattgtgttgtcaatccattacgcatcacttttgttcatctttatattcgaaaatctcaatcctccacattaacactttaaacaagtgttgagcttaggacgatggttcacattcctaacttatgttgccttgattttcaatgccttcaggggattgagatcatgtacccaatagtccccgtccttgcataattaaatggtcggaccatggacccttcgaggggacaaaggagctccaacaatggctaagtatggaagcacttgcaagtcaaatggaaggagttggccctcgataaaggcatggcaacccccaatggtacaatgccacattcaaggtctactcccaagcgactcatgctaatagcactacaaataaggattttgtatatcgtattaaatgtggtgtgtgatgttacggtctaatacacactgtagttatgacttatgcaccaggcgtactcaagtccataattcgatacgtggcatcgactttgtagccatgtatgggcatgctagtataccttaaagtattatcaagtacaaattgctacaacaattaccaacta

SEQ ID NO: 67792 - DNA, 799 bp, Zea Mays
ctagttgctaatatatgaaaatagattcttacatgagccatggctgcgacataaaagagatgcgccacctagaggcaatgaatcatcacataccattgatcgatagctcagagaaacacaaaatgtgcattaaacttgccattaaagaaacacaaaagcaagttaaatgccacaaaagttatcttaaataatgtaggttggttcaaatcaatagttcaaaaaggggtttttaccacaaaatgtgcatttaacttgatttcttaaccacaaaagatcaataccagagtaaataccagatctgttacgagagtgatatgttaacaaatgctttgacaaagaaaataatacacagaacgggattcatatcataaaaagcagcatggttatacacaagacgagattcatagcataaaagcagcatggctatacacagaacgggaaccaaatataccacaataccaattctgttaagagagtgagctaaaaagcaacatggttgtaccagatctgttcaaaggtggctttatccggccaaaagcagcagtattttaggaccctcagattcttatatcagtagtaatcaagattctcagatcggtttggttcaaatcagtagtactcaatgggaactgagacgaagacctcgtgtccaggaaggagaggggaatgtcaaactccttacctttgaagaaacctggagagtgcgagaggagggtgcgagagctccacaacgggaactgaggtgagctcgacagagagagagggagctcaacagagagagagagggagctcgacagcg

SEQ ID NO: 67793 - DNA, 422 bp, Zea Mays
gggcctgtgagcctttcggtcacaagtttagttcgtcgtcgaagtggcggtggaaacgagtagaaaaaggttgcgttgtttgcaaccgtggctttgggtaattggatttattggttcagtagcgtctgcatggtccgcagaggcgcagacgaggtggcgtgcagctgcgctcacctgtgcttgtgccccacgtccatcgacgcacagaggaaaaaaattgtgtgcgtacctgttgcaaactattgtttgccaaagggtgatcggcaaacgcattattcaaatcgctaacaaaccagagcctcgttcgttcatctgaaaccatgcgtcagtatagttgtatatcaccggcgagttgacccattaaacaagagaattattatgcagacaagcagttccgacaaattgcacaggcatgaatatgg

SEQ ID NO: 67794 - DNA, 1064 bp, Zea Mays
ttttagtttcgatgacacgtgagctttcatggggatgaaggaatgcctcaccagtgtggctgcatcaatgaatgggatgtgcagaaactcggtgatggcgtcaatgccggcgaggcatcacatagagcacttgacctgcaagagcacaactgacaagtcaatctgtgactgaaggccatagttaaagattaatcggggatggaaatgagaaccataagaaagcatcatggaagccgaataacactggtgggatcataagttgccaaaggaaaaagtggcgagacaaactgattttatactacaggaggagagcggtggatggtggtatggcaacagaatgcacaagtccctctcacgaggactgttcgtctgcaaagaatgtcatgtgataggtcactggttattagttattactaaaccaaaaagcacaggatgcaaagagatggacgtacatgcatggatggtgctgagactcaaaggatgatcttagtggcttagtgaggcccttactgtgacatggcttcacgaaattacagaactatgttagtggggttttgctttataagagatactagcaaatggcgcgcgccagcgcgcgcgttcttgttatggaaatttaatacttatttctatctaaatcatatagaagggacattattatactattacacatgtatatagagcgatacggacgactgtaagcattacatagtaaattgtcaccatagggtgtagcaagctacaaacagttcttgtttagtagtactcatatatacatatatatttaggagtacatgagacttcatacatatatagtaggatgcatcaacaaaagttgtctggacattgttttccaagtaaggcaaaagctatatacatgtgctgctgcgtagaagttccaactttgaagccagacttgtttcctgtaatgtacggtgatcatgttattgtagtgcaaagaacttttttttgctgtaactgaagtaaaggattacaatagataatatttatgaataaatggaataaatggaaccatacatttttattcatcgtgtagatttttg

SEQ ID NO: 67795 - DNA, 929 bp, Zea Mays
ggacaacaacgactccagttgtatgccatcgatagtctcatcatcgatccagtgcaaaatgacgataggttgatcttcgactccctccaaatcatctccttgtcgcgcgttctcttcaattcctgaccggtccctgcttcctctgcatttgaggataagtgctggcattggcttctattgtctaacctcggcttcctctcgtggatccactgtgggtcggcgatggatccctctgtccatcgtcttcccttcacccacgactaaggatggcaacgggacgaggcagtactgggggagtgctccttgccctgatccccaaaatatattcactgcccctgaaatgcttaatggggaggatttcatccccatccccttgggggcccgatccccataggaagcccgtggggattaattatcgagtacaaatactatgatatacacagataaataaggtttgttatgtgagagagtggcaaccgaatgaaaaaataagggttaaggttagtgagtgatgattttgcatctttatatgaggttatagtgatacgatttattggattcgaccttcatagaccgcataaggggacgatctaactcctaatctgggtcctcactggatccctacgagggaatttttatcccctcccatgtcccgctaaatttcagatgcccatctcgacatccccgcggaggagtttttgtccccatcctcatcccgtttaggtcgggcccccatgggaaaatttgccatccttacccacgactagcctagccctcgcgacattgacgtccgtctcatcaatgggatccttgtctgaatctgtgtcacagggtgtggcatcaactgtctcgtcctctctgtttgcttccgcgatggtcgccccatccgctgccctactggcctccaccatcccccatcaatagccgac

SEQ ID NO: 67796 - DNA, 495 bp, Zea Mays
gccgcattgccattggtggaagtcaagggatcgagatagccagggttgtcccaaccagcacaggatgatatgtcgagtggagtggttcgccagacccatgggtggcagcgtcgttgatgacgctgcgaccgttagcaccaaggtctgtgttgtggttgtttttggaggatccaagccccatcctaccatggaggtagtcggaactgctcatgaaagtgcccctacctggtacgccctgacgacgtttgtcagtcgagggtacagaggcgtaccacccataagaatcagtagggggctttagtgtgctgaccttctacccaccacacttgtcaagccccgacccgattaccaggaatatgagcatggagaacatgggaaatcttatgatgggagcaaaggacttaggttcggactacgagagtgtaatatcctatgtcctatttggatgagatgaatttcttgaaataaccaattgtttgtattgatgttgtctgt

SEQ ID NO: 67797 - DNA, 914 bp, Zea Mays
aactttgctatagccgacttggtagtttgttgaatgaaaatcgaagaaaaatgactcttaatttgctctgccaggcactctgaattcagtatgacatgaacaataaactgaacaagatcgagttcagtgcgtccactgccgatgttccttagccatgattcgagttcgtgccacgattggtgtcgttgagacgtggatcaatgaagtggtaaaagatctcgggttcggattcggtgaccgagttaccgttctagccacggacaccacgggtcctcaccgtgcttcattcaccaccgccgtagcaagccaccggatgctttggccatccacgcagctagttggaggaccttgtcttgaactgtcgtaaagggtctgcggtaagtccgccacgttattagcctgaggacaccataaaggctaacgtggagctcctcgggctattgccgccaccatgattcctcggtcaaattgaccaccctcgtggtgactccctttaaattgagcttgccctcagccctgcctctatgttacacacccaagccaccctttgttttcctcgttcaaccgttggtagccaagaacaacaggttcttcccatcggtggtcaccagcgccgccgagtggtgcacccgtatggtcagcctttcctaaggttggtcatgtttgtttgacttgtgtttcgtaatctataggtcatggtgaagcttatgcgcttgcctgtttgaactctaccacgcagggttacccggaacaccgttgtgttatccggtgaacgccgccgagtgcagtgtccacgtcgaccagccaaaccgtagctcctccaggcgaacttaggtgagcaccatatacttgatggatcactggtactagtcgtgaactctgattgaaccctaccgtgcttaacactttggtct

SEQ ID NO: 67798 - DNA, 935 bp, Zea Mays
ttttactccatatataccactacccacaaatgctgcagaagcaagaagaacccgaagattaatacttaaccaaaatagactcggcagaagaggtaatgccaacttaactgaatgtgatggcattaaacttgattacaattccttcatggataaataaatgaaatttctaactaccttatttcttttgttcaaaaaaaagattcaatgttgacaacaatgacgacttcacagtgtggctatttcacagatgagtacatacaatcacttaaaggtaatgtaatatacgattacctctatttccaaacagaccttccttacctttcttgaaaagaccttgctaacattgagccattttctctgcaaagcgtagcttcatatccaaatagatcatatcatgggaaacctaaatatgagtgctcatactgtcatgctattttttggtatgctgaaagagtacgaaatcggcatggtgctacatctattacatataacaattgctgcaaaggtggcaagatcagcatacctccatataggcctagacccgaacctctattttctcttgcaagatttgacggtgatgcaacctcaaagagattcatcagaagcataaggcaatacaattgcttatttgctttcacatcaatgggtgcacaaatagataattcagtcaatgatggtcgtggtccaccactatttaaaatatgtggacaagtgcatcatcggattggatctctattacctccagatggatcatcaccaaagttcattcagttgtacatttacgacactgccaatgaagttcaaaacagaatgaaatgcctaggagatgagatcaataaccaagataatttggatactgatatagtcaatggattaattgagatgctagacaatcataatccattcgtaaaaaaattccgcatggcaagagaccg

SEQ ID NO: 67799 - DNA, 708 bp, Zea Mays
gtttaggacccctctacgaaagcagggggtccggcagcctaggggccagttctagagaatgggtactcgttccctggggtggtctgaagctatgtagtcgcttagcttggttccgtaccctaagcctgcacgctccaccactctgcgacaggtatcctagtatttggaactatagccctatgggtccaggaacctaggattcggttctggagaatggacgctcgtctcctagggtggtccggagccgtgtagccagttagcctggttccgtaccctaagcctgcatgctccaccgctctgcgatgggtgtccttgtatctggagctgtgattcagggggtctgggcacacggcttggcttcccaggctaaatcctataggtcatgttgcatgaatcaaaggatggctgatcccagatgatgggtcccatgggtgtgccgctaacactccctagccgaggctgtgtgcaggtccaggtcccagttgaggctagcccctggggaccgggtcaccaactctttcctaggtatgctggtatccagcctcgacacgtcaagcctacatcccagaggggccaagtactaggagaggagttggtaaccccacacacagcaagagcaaataccatatagataagagctgttttaattaattgttcccaaaagtatcttacaaaaacaaaagttattacatccgccatcaagcggag

SEQ ID NO: 67800 - DNA, 632 bp, Zea Mays
gccagattgaggcaaactcaatcgatcttgcactagtggcgccaacctatcaaatacgaaagtcaggggtcccccctagcggggtactgaggcatcccatatggatatggttgtaggccccacatttgatttgggacatagggtggtggtagatacgcatattgatatggcatcggtggatatgggggtagaggtgtccatctaggtaaattgggcattaatttgacattgttcttaggtggctcaatagatcctacttgtctcccacatagaggtgaatggggttgttttgttggtcgattgttgggaccgaccttctttttcacatatttgaatagtaactaatcaaaggttgggccagatttggctagccgacatgatgctttagatgtattggtcttccacgtacctatttttggtcatcatggcttgaaggtacgtggttgtcgctgctcctggttactgctagactgtctgccagacccatctaaaccattcgatggggtcctggaccatccgtgcctacgtggcggaccgttcgcgatgcgcaaaacaggtcgctgcacttggtcgcctgcctgcgcctgcccccaacattggagtccgagatggtgatcttcaatgtctcccct

SEQ ID NO: 67801 - DNA, 401 bp, Zea Mays
gagttagagaaggttggtggtttgtgactcataaactcccggtgcttatccctaggtggagctggtggtggaggtggaggcagtggtgcttgttgttgttgctgttgcgcccttctctcttgacgtatctcctcccgctcttggcgcatctcccgacgtatatcctctctttcctggcgcatttcttgatgctcttgtcgcatctgagcgtgcatgtctgccatagtgtctgccatttgctgcattatttgcatctaggctgaaataactggatcagcaccgactggtggaggatttgggggattcatctctgcttgttgttgttgttgtctaagcacccttcggttatatggattggcaggtagatcaattcctcctcccttcctggtattgaccatctg

SEQ ID NO: 67802 - DNA, 459 bp, Zea Mays
aaagccttcccgaccagagtccttgatgttgcatgtactccgcactgcccggcatggatttcatctaacaattgtttcccggtagccgagtgaatgcatttcatgtggactcctgccgcacctcttctatacagtaagccccctatgatggtgtagtgggccgactgcctcgcgatgcgttcctcgacagccttgtcatccggttcttcttcattttttatatacctgatgataggctctctccagtcattggggtccgactctggttggctcaaggtgttgcactcttccacctgatccgagaggatgctcggttgtgatatttcttggacgaagatcctagctggagcctgagcccgactggatcccagcttcgacaacgcgtctaccgctgcattgcggtctctttccacgcgatggaactctaatccttcaaatttgtcctccaatttttgcaca

SEQ ID NO: 67803 - DNA, 475 bp, Zea Mays
accccatatttggcatccagtgcgtcccagatttgttttacaatggtcatcattatgcaagagtctactatgtcatgtcacaccacaccaattattgccctcttgacatagaatctgcatcctgaagcacacacactcctctttagcaatgtgtggtctaggtgatataggtttgagaactaaatagcattgcatggctgttagccatagtaaacatcttggaccccaccttttataggttgtgccctaaaaaacatttgttttgagcacactagcaaagctagtggcagaaaaagtcctatatcacatttcctgattctcacaaagttagaccttttcagttgtattttaatccataaaaatattaagtactagtgacaataaaaaggtgtgcatgtggatccattgtgtctacaaccaatataatagtgataaatatgattaccaaccattgggcatagctatcatactatag

SEQ ID NO: 67804 - DNA, 600 bp, Zea Mays
tataggagaacaactttgatgcagacatccctttgggttgtgacacaaaaattagagaaaaacatactccaagtcgctcgatcagaacagttttagaaaactaaaactgaacctaaggttaaaacaaggttccagtgaggtgaggtcaagtttgatgcgccatatctttgaatcccctcggttttgacccaaatgtcctgtataaggattgaagactgtggaatcaagaacaaactttattaaggaatcttgcccggttattcataagaatcatgagaactagtcggtggaagggggtcggttcaggcgactgacaaagatgtgccatggtacagtgccccgatggatcagaccgccagctaagctcaccgtcgttgatcgccgtccggattcgtgcacggtatgggagggataacgccggggaaagggtgattcatacgtggcgacatctcctgagctcggccggtgttttctcaccggcagtcgccgtgacttagcgcggttcgccgcgctgtcgccatatttcgatctctcttactgtgcttcgttcttatgtggtagacatgcgctaaaattttggtttagagaaatatgacgtag

SEQ ID NO: 67805 - DNA, 657 bp, Zea Mays
aacaacgacgagcacaccctccggcgagcatgtaccagctggaatacgcaatgactaggcttctcacttggtcgacacctaattcccccctggcgaccctaatccctctatcaattgcacaaatccggcccgaaatccctctgtccacgacgacggcgagaaccgagggcaacccgaggtgtttccggtgatttagcgtggtctagttcaattggttgggccgacaagcatccctagtgtgcaaggctgctaaaacaaaggtaaggagggcaagagcggacctgcatacggcggtccacggcgcggtgactcacggcggcacggagaaccgaattgggggaaatcccaaattgaggcgctatagtggatgatccgagacaagagctagtatactggcttcgtaacaatctaacagagcaggctagggcatcaatttatagagtccatgaacggtggcttcgaattgaggagagaagctagcgaccgaggagaggggatgagtcaccgtggcgatctaccgtggcattcactggacaaaggcgtatgactatcactggttaacctccacggctcaaagcgacaaggtaaaatagcctaaggcatggcgcgaccgagggaacggcagcagccacgacgacgaccgcgcagccacgtcgc

SEQ ID NO: 67806 - DNA, 416 bp, Zea Mays
agcttctcttgcatccttaatttgttcactaggagcttcggtagaggcaggagccgatgtctttacagattccaaaatagcatctagcacgctagccattctcctttttcttggagtcactgcagaaacgcttaatggcttcggtagtcctattgcaactggtgggctcaacatcttaaattgatctactgccttctctaacttcgactcttcggccgagtctgtgctagcttcgatcggcatagcaggacttgattctagggcagaagggatgacttctacacgttcaataagctttggcacatcggccaactcaatgtgtttcgatctacatgtcaagaccttcaccttcttcgccttcggcgcactagaagatgccgaagctgcaatttttcttttccccctttgttttcgaa

SEQ ID NO: 67807 - DNA, 1236 bp, Zea Mays
ttctaattgcttttactggattttataattctctggactgggcacaagataaccagatagcacaggggctaacccgcaaaaagtctcaagactcagatctatcgtatgatggacggcgggtttatttggttaaaacagggggtctccttagcaaaatggcaccgcgaaggggtatcgttgaatggtggccgaccgatctaaaccaagggctcagattagatcaccacactcgtgaaccggtacgcactactagtcatcggatcaagatcctacggctacgatgaaaacaaagtcataaactcccatggccgttgatgtgcccaccgacggacccgatcaaccgattgaattgatcctgcccaatctaatcgcggccgcccacacatcatccaacggcacgcacggattcccccatccttctctacttccccgcgcatgtaaacaccttgacccaatcccagccgttggtggcaggatcgatggacaagggacgcctcctacctaacgacgcccagacacggacgagcgccccaacgaatacggcggcgactcgccggagccatcccccgatggcgcaccagagcaccgttttttctatccaagaggcgcaatacgacgagaggagactggtaaaccgcatggaggttgtcttacctcagatcgagcgccgggaggggctatccacgtgatgaggcggtcacgcggcggatactggattccggcaaggaattgaagagcttccggtgatcttcacagcgtactggggccacggccaccaccagagccatccgccgaagctttctagccacaaatcgaggccgtgacgacggtgaggctgtggatctacgtcggcggcccgctttctagctttttccccacggcggccatggcggccggaatctcctcttctcagcacacggcaacgagctatatcacggtgcaccgattagagcaggcgagaagggggaaaaagcatggttcgatttatacaccggcggcgaagtccgagcggagaaaaaggcacaggactgttgaaggccgatcttccgcgcttctgttgcggctagacgcggaacgaccgcatcacgaggggaagggagcgtaatccacggaatcccatggttccgagtccgttactgcacagggaggagggagctccaacagagctacggcgcggatttggggaagaagagcgggagaaacgtggccagcgcgggcgactgaccaacggccgag

SEQ ID NO: 67808 - DNA, 493 bp, Zea Mays
ccggtaccgaccgatataaccactgagaggtcaaggaaaaggacacagagcaaccagaaaagaggtgacaggggactgaacaagtttcctgacaaaacatataaaatctcagatgtgagcccgaaaggtcagcccctagctctagaagaggcactctctaagttccagaatgcacttgggttcttagttagggataatcttgacatcacaatccgacattggaaagatgtgtcagatgatgtcaagaatcaaatatggaataagctattaacgaggtttgttctacctcggggttcagaagaactcatgaaggaatacacgatgaagcagcttgcaaccaattttcgaaactggaggtctgagatgaatacaaaatttgcaaagaaaggcctagacccgacaaaaaaataaaaatcttagaaggtcagtgggcagtatttctagagcagaggagcagccctgaatttatatctctaagcgaggcaaattcaga

SEQ ID NO: 67809 - DNA, 330 bp, Zea Mays
ttgcacttctctactaatctctcatctaaagtgcttgtgaagtacaagacttcttgagacaaaaactacaattccactgcaacctactcaactcgacttaaatccactacgtacactgcttcaagtagggtaagaagttctaagctctaagtgttgatttttattcacatcttcacctgccctaggtgacatccagatctgtgttcccagtcaaagggaactttcaattggtaccggagctaggctctccgttgtgggtttagctgttcggagaggatgacatcgtctaaagaggtaaccctagaacttctacttagtgatggtttgaat

SEQ ID NO: 67810 - DNA, 421 bp, Zea Mays
atttgctaggagcttatacgaaagctgaagattaagctatgaatatcgccttcggcgctcgtgggaagaaaaggttgaatagagtatttgttgtcatcggttttgtctatcctgattactgctttccggctcgaaagcaaggggcgaaaaggaaaatcacatcaacaaccccctctaccgcgttgaaagcaaaggaaatgaaagttgtaactcaccggccgaagtcatattttttggagagggcttctttactgcctgccactacagtagtcgaagttcccaccattcaactggagaaggcaacaacagatagttcgaaggtcaaacatcaaccgaagctgcagagtcctccaacaatgccagggttgtcaagaacagcagcagttccagcagctactcctaggaaagggaggaggatgac

SEQ ID NO: 67811 - DNA, 379 bp, Zea Mays
tgcacgattttgtaatggattattttgcctatgtatggaacgccaaaaaacttggctgtagagcccttcatccaaatagtcctcaaatgctaaatagtttaacaaaagtttttactaaattttagcaggtactaaactttagccttatgaaaacagaccattactttgtccacggaccacggcacgctgtgcttatcaattttgtctgtggcagatacgaaatggtaatttgggttacagcacacagcaagcattattttagtcattttttggcttgagagagcagtgaatggatgcttgtgcaaaccgtagagataaacgatagtacagtgaaatatcgacaacatgattgctaataagtcaagaaagtgaggacgat

SEQ ID NO: 67812 - DNA, 840 bp, Zea Mays
gaaggttgttcgacgaaagtccagtcagggacgtggtctcgtggaacacactgattggtgggtacgtgaggagtggcctcccgcgggaggcgctagagttgttttggaggttggcggaagacggcaatgcagtgaggcctgacgaggtcacggtgatcggagcagtgtcgggatgtgcacagatgggggatttggagctagggaagaggctgcatgagtttgtggacaataaaggggtgaggtgcacggtgaggctgatgaacgcggtgatggatatgtatgtcaagtgtggcagtttagagttagcaaactcggtgtttgaaaggatcagtaacagaactgctgtttcttggacaaccatgatcgtggggcatgcgaggctggggatgatggaagatgcacggatgttgttcgatgagatgcctgaaagggatgtattcccatggaatgctctgatggctggttatgtacagaataagcagggcaaggaggctattgcactgtttcatgagatgcagaaatcaaaggtggatcctaatgagatcaccatggttaatctcttatctgcttgctcgcagctaggagcattagaaatggggatgtgggtccaccattacattgaccgacataaacttcatcttagtgttgcacttggtacatctctggtggacatgtatgcaaagtgtggcaacatcaagaaggcaatctgtgttttcaatgaaatcccagttcaaaatgcactcacatggacctcaatgatatgtggtcttgcaaatcatggacatgctgatgaggccatagaatacttccagagaatgatagatcttggattgcagccag

SEQ ID NO: 67813 - DNA, 470 bp, Zea Mays
tttcaaaccaacaaaacaaggtcttcgaacttagtcgggcatctaaattggtgtgatgtgtcatttggaccacttgacacttaaaactagcaaaaaaaagttactggaactggtcaaccatccaaactcgagtttggttatagaatgttgacgtcttgtgccacattcagatacctattgaacagtaacaccaagttcgaagacctaaatgacacagtatactaagtttgatgacttaagtgactccaaatgatacaacatatatagttcaaggacttaagtgcttcttaattagagaaacatttttttcgtttgctccctgggtgaaacaaccccttctccatgtacaaaatgtcgatctcctccacagaaaaccaatatgtatcggcaaaaatatacccctctaacacttcattaacaacgacaaccgagctggacaacccatcaaccgcaatcaaacccaaaaaaat

SEQ ID NO: 67814 - DNA, 915 bp, Zea Mays
gtcagtcggatcaggggttagggttggactgatagtgagctcgaatgaactttggaggctgaattctgtgtgatttaatcagaattcgctcaaggcttctatagtcgaattgtagctggattataggtcagtaactttgttacaaacagattagtaagtcgtcacatggaaaatggagaacaaggctcttcaactcgtgctgtcagaacttctgatgatgattgccatggtacagtaacctgaataagatcgcgagttcagtgtatctcgccgccgatgaccccgcgccatcatcctcgccggcactgcaattcgtgcctagtggtgtgcggataacgactcaggtaaaagatctcgcgccagggatgaagtcagggcactatggccgccctattgccatacccacttgtgccgcaacgtggccggacggtcgtcctcgtggagatcgtccctcaccacgattgcgccacgatgtagtcctttcaccatgtacccgaagtcatggcaaactaagagttaccacccttgagtcgtagtgtcgttgatcgccacgacgagttcaccagtgcaacatcccgtcaccaccgtgatctaaacctcgttcaaattcgggacaaccgtggccagctgctataaattgagtgcatagccagctccattagcctatcacgaacccagagcacccactctcacacctgatcgtccaccatagcgccttaattcgggttttcccctaaatttgttttccgcaccgccgtgagcacccctccgtcgactcaccatcatgtccatccacccgcctacctagctgtcgttcttgagccctggtatgttgctaaagcttatcgagcccccaatttgtatggtgttgtattgtgtcgtcgagaacacgacgggaaagactcaagttccgcg

SEQ ID NO: 67815 - DNA, 484 bp, Zea Mays
gacaagtctatcttttagctccctatttgcttcacttaatttttcacatttatctttggcatctttaagggaggttttgagctcatttttggtggatgacatagttttattttcttccttcatttcttcactagttttaacagttatgtcatacttggtagttaagaactcattttcatcctttaacttgtcacatttagcttttgactttctaatgatttgagtatattctttaagtaagtcagctaattcatcattggtaggagaagcatactcgtcatcactatcactatcacaatcatcaacaatatcattttcaggttgtaccttccgtccacctttagccatgaggcataggtgtgaagtggatgaaggtgatggtggtggtgaagagaaatctccagcgatggcgacaaccttttcatcattttcttcttcacttgaagaggacccgcttcaggattcaatgtcagtgagccagtca

SEQ ID NO: 67816 - DNA, 365 bp, Zea Mays
ggaggactccatcaggaacgaggccgtggaggattgcatcgagttccttaaacggtcgtcggccgagggcgacgccgccaagctctccactgtcagcgccgccgacggcaatctgaccgacgtaggtggggaggacaaagagataggggcgttcttcatcctcaacgtcgaggcacggcgtgagatctcaccgagcagcgggtgtagagaatgaatctaacggacattaattagagttattcagtttgttccagtggtttttttctatcgatgatatgctgtcatcttttgtgaatgattcgcttggattcattaacaaattaagtgcgtgacacagcgaagtggcaagttaatcggtatgcgtg

SEQ ID NO: 67817 - DNA, 482 bp, Zea Mays
ttcgggagcactacattctagaaggggtgctccatatgaaacaagaagaattcatgaagcttaaacaaggtggagatagtatctcaacaagttcaaccatttgtcccagtatgccattgatcaggtcaacactgacctgaagaagagaaattgttttatgagtggccttaatgaccgactacaacggaagatggccacctgccttgacctcttctacagcagggctgtcagcacgacgctggcagttgaagccaagtatgcaggcccaggaaagtcaaagggcaatggaggtgacaggcccaaccaggggcctgagaagcgacaaaggttggtgatctgaccttttaatcaaaaccgttcttcgccacgtccaccctcctacccttttaaacagtctgtatttatccgccctaccactgcccccacctcaacaaatcagccgagtgcccctggtactcgtttccctgccctctcgagttcat

SEQ ID NO: 67818 - DNA, 694 bp, Zea Mays
caattttggccaaccgttctctatatgtggactacactcttccttatactgagtcaggggtacgcatgctggttccagttcgggaccagagacagaagactgcatggacattcctagaacctttaacagctgatctatggtttggaactggatccttcgttgtcttcacaggttttatagtttggtttatcgagcacagaacgaatcaggaattcagaggaccgccagccagtcaaattggatcagtcttctacttctccttctcaacacttgtatttgctcatagggagaggattgtgaacaatttatcaagaattgcagtagttgtttggctttttgtggttctaatattgcagcagagttataccgcaagcttaagctcaattctcacggtagaacagctccaaccaacagtcaccaatttagatgaagttatcagacgaggggattatgttggctacctcaatgattctttcatgcctaaccttttgaaaaggttgaaaattaacgaaacaaaaatgagggccttcagctctcctgaggagtacaatgacgccctatcaaccggaaaagttgccgtcattgttgatgaaataccatacctcaaagtgtttcttgcgaagtattgccacaactacactatggttgggccaacttacaaatttgatggatttggttacgtaagtgacttttt

SEQ ID NO: 67819 - DNA, 668 bp, Zea Mays
caaaataagaactcgcgaccaatgtggccaaatcaggactccggtccaggactacacctagatccggcactaactgaccatacactcggcacaagcaaagaactacgccaaccatcgccagaaatggttttgtcccaaaacagtgaacaaactagataaaccccaaagcaattcttacgtatttactcgatggctcggaggctacatctagcagatgcgcacgcacgcacccgagactctagttctcaacaagaaagcctcgaaatagctccaagtagttgctcgaaggctcagggactgcatctagtagacgcgcttgcgcgcaccagacaccccagttcccaacaagaaagcctccgaacaactccaagaagttacacgaatgctcgtgggctgctgacatgtacccaggaatagggtgcccaaaagtaagcccataactcatggcggcccatctagaccgatcaagtaccaccaagcaactatgtgaggcagaccggccgaccaaagtcccatcgagcaactttgcgagtaggcttgggcataaaaaccgaaaaccaaaaaatctggaactcaccaaaccgttatattcttcggttaccattcttcaaaaaacgaaatttagctttgtgctcattttttagttcagtttaaaccgaaaagccgaa

SEQ ID NO: 67820 - DNA, 808 bp, Zea Mays
tgaaaacctagggtctcttttagaaagtgcacgcggcgaaggggtatcgttaaacctgagccatccgatcaatactggatgcctcggattagatccatatttcatcgaaccgatatcggatacggaccgtcagatcaccatccaagggtcgggatctatcgacactagcgctctcgctcacccacacacccgtagatctacgactctgatttgttttccccaaagcgataagctacaattgatctgggccactcatcaaaacatctacggttctcattcgcttacccccggatctaatccccaccgcacaataatcaatcggacggtgcacggttcctcacctttctctggtcaacacaaggtggcggcacaggcctctacggcggcctagcctgccagcgtgcacggattcgaagacctagtgatctttgtgtaccacgactcggtgcaagaggaaattgagacacaagcgaatcgattagggggtatcttacaggcagtggcgaaggattcgatgatgccctcggcaggatgcggcaacacgacgaagatggttctccggcgagcaattcctctaacgccaaccgttaagctgagcacatcgaggccgccaacaccatcaacgtacccccagcgagtcgcccagatcctgcgactgagctcgagcggcggggttccccggtctctcccatggcggcttccatcggctctctctctctctccctgctgccctcctgtggtgatgagttctcggcctcctcttgctgccacgcgctttggttgagcggcccgcagggagaaggtcgcg

SEQ ID NO: 67821 - DNA, 729 bp, Zea Mays
ccaaaatctaatttgggtcccatccccgagcttgaaacaccctagacccaaaaacatgtgtttaaccttcattagacctacccaaaagtgagaatcaccaggcatatgctctatttgggtaaaggcttttcctctcatatatttatttcacagaattgtctgccatacaccatcctcattaatcagcttaaaaagccatttactcaataagcacttgttctggaggtcacgatttattatcccaaacctcccaagtcttttggaaagcagactatgttccacttggtaattttgtatttccttttgtgttcctcctgtcccaaagaaaacgggatctaaatttatccaatctagcgagtacctctctaggcacctcaaaaaaggataacataaacaacgtgagactcatcaagacttaaattaacaaggaccaaactcccaccagtggacaaaacttttcctttccatccatttagtcttttcttaaacctttcctcaattaccatccagtcggcattattaagttttctatgatgcataggaattccaaggtacttaaaaggtagttgtcccttgtcacacccaaaaaaatatgaatactctattatcgagtcatttgctgaaccatagcaaaatatttcactcttattgaaattaatttttagtcctgagagctgctcaaaagtcgtaagcagtaattttagattcttagctccttccagatcatta

SEQ ID NO: 67822 - DNA, 447 bp, Zea Mays
cgattaaaattaaaatgtgaactagcagaaccatgtctaaatagattaaattaaatagtatgaaagccatagtgagagtgagatggttgtatgtttgttccttgctgacgatcgggtagagaagacgacgctggcattcagcatagtctcattcttgctgtcggcatggacgagttgtggcgaagaagttgaagacaataaaaaagagattgagaaagtcgcgcagagcgctttccagaaacattattcggcctagagacctgctctcctattcgtcggtgcaaaccgacaattggtttggagtagtgtacgcagtgccacaatatgcaggaagagacggaattagatgtgtttgttgtgttgtttttcgacccgcgttcaggttgtggccatccaaaaccgagttggttccaaaaaaatttgtaccagataaggatctgatgatcg

SEQ ID NO: 67823 - DNA, 457 bp, Zea Mays
ggaacgcaaccagggaatcccaacctggccacgtttctcccaactggccaaccagcgatttggcccgccaactcgcagcaaccccctgggcgagttgtgccaccttcgtctgcaagggtccgttgttgacgacacggaggctttcctcacgcatctgtcccgctgcaacaccctcacggaacaacaccggattgccatcttcaacataggtctgggtgaaccattgaagaccgacgtcgagctgcaacagccgaacactttagaggacatcgtggggttggctcgtgcctatgaacgacgtgctacagttgcgggatcctacaacatgtcatccacaccacgctcctccatccggaacagtagcaacacggcgaccccggcagcacgaccagccacgacaacaacacctagagcaccggtcaagcagcgtgctccaccagggacatggctgtcccgg

SEQ ID NO: 67824 - DNA, 494 bp, Zea Mays
ataagtctgtcgatttcgaacagagtggttgtaaggttttcaccttcggctgtagcagtggcttcgacatcagtcggtttggcagctttgcttgccgaagctggaggcggggtttgttcaattgcttgtagtatattcacaatgcgtcgtttcttctggcccccgtctctccctttagcagtcgaagatacttcctttttatgtaagaggctggtcagttccaatcctagaggacttagcggtgtgaatgggaaggactcagtcattaccttcaatatttctgagacctcagcagcagaagacgaagggcttgcaattggtttcaggacatcttgtgtcttcgtcttctccgaggattctacagcaagcttctgtttttaggagtcaatgccttcgacaccgacactgttttcatcttcttcaaagtttcttggtcttccttgatagaccggatagcttgcctacacagaatgctgacaaccctttttcttttc

SEQ ID NO: 67825 - DNA, 379 bp, Zea Mays
taaatgtgcataaagaatactgactatatgcatatataataaaacaaatgtgtaaacaaatgactcaagtgaatgtgcataaacaatactgaggatatgcatatatatcaaatacaaataagcatatttgataataaaatagatgtgaaaataaatcattaaagtaaatgtgcataaagagtactgactatatgcatatataataaaacaaatgtgtaaacaaatgactcaagtgaatgtgcataaacagtactgaagatatgcatatatattacatacaaaaagcatatatgtgttacttgggttgtataagagtactctctgctaactcatcagtaaatacctaatccacaacctttgtttagatctatgaatgtcg

SEQ ID NO: 67826 - DNA, 955 bp, Zea Mays
gcaaagctccagcgagcttgtaccgaccggattacgcaaagaccggcactctccgtcgactggcacctaattcaagccttaaccgaagtttcccctcaactaatttcactaatggcgcactaacacgcctgaccacggtgaccgtatggacaacggacaatctaatgcgttcccggcgatctacgacagctcagctcaattgaacgggtcagtgagcatcaggaacaagcaagggtgcagaaacaagaaagctgggggcaggatcggacctgaattggactggccacggcgaggtcccaagccacggtgttcttgagggatttgggggaaatcctaaattggggagttctaggggaggatttgaggcacgagttgcttcactagttgcgcaattacctagcggagcgaacgggggcggcaatttatagcctccaacggcggtggcatccaatttcacgaggatgtgttggcggccggaggggaaaagaggtattggcgctcgggacgagtggctttcaccgtggcagccctccggcgatcaccggacatgcataccatgattcatcgcgacgtgggctagtgcttaagcacgtggcgcacaacgatgagcgatcaacagcggcgaaatctatcccggacgcacgacgagcaagtgggtacggtgaatctcatccgcgcccgagcccgagctgatccattgctaagatttttactccatcgtggttatccccttaccagcgaacacgaatcgcggcgacggtgtgaatcatggcgtaaagatcaccggcggcgagggggatgcattcgggatctgattcagctactgtaccatgggacgtttcagcagacagcctgccaatcgatgtttaggacagattttctcccaatttttcatcgcaacacaaccaatgctctgcagcaaagttgtagccctacaaaccatcttcacttttgc

SEQ ID NO: 67827 - DNA, 493 bp, Zea Mays
atattttctttttgagtcccccaccttcccagaagaaacgagacctaaactggtccaaatgttttaggacttcccgtggaacttcgaaaaaagagaacatgaacatagctaagctactaagtatcgagttaatcagcaccaggcgaccgccgactgagagaagtttacctttccatccacttagttttttctgaaacctttcttcgattaccctccattctgtattactcgattttctgtggtgtatcggaatacctagatatttgaatggaaagctccccacgccacacccaaaaatgtcagagtattctaattctaaccctttggcagcaccatagcagaaaaatttgcttttatggaagttaatttttaggcctaaaagttgctcaaatgcacatagcactagcttcatgttgttagccctttctaaatcatcttccatgaagataatcgtatcatttgcgtattggagtattgaaagtcctccatctac

SEQ ID NO: 67828 - DNA, 397 bp, Zea Mays
ggaaccacaataccatggtaaaaccgggtgttttaccctagggaggctgtgttgttcgtatgcgtcttatcgcctagtggtctctattcgtactcattctgacggacgacgtaacctccatgacaacataggcctgcctgatgtatcaacgacggtggatctagaccttttaagaggtgatttcgacgctaccgcgaacgttgtactcagagtagtgtcattagaagaaataatccatgatctcccatagctcttgttttatgtcctgactgtctggactttgcaacatgcatgggttttaggtccccaagatcttggctagtctcaggaattttcttggtcttagagcgctttttgtgcgactttcacccatcctccacactaatgcggagcgagc

SEQ ID NO: 67829 - DNA, 1134 bp, Zea Mays
taggatgggggtttttatttgggccgtgaggagccaggggctagagccaagcgcaaaatgcttttgcaacatgcacgagctgctatacgagacgaaggctactggcaaggagcagtatcacaacaactttggttgttatggcttcatgcctcgccccgatgtaagttacccgaaaaggtggcctggggcctggatggaggaatgattttatgttaagaataatttagttgagagggaagatataaaaggaattattcaacgccccatttggtctcacttcggcatcaggaggccagccaccgctcttgggaacgatatagaggcatgccagagaagcttcaacactgtgtgtacttttattggcacaagagacctggttcaagaacacatcgcctacagagtatggccgcttgtgagtgaatgggagatgccgaaggaggctactgctggttctagtcagggcggcctggtctatttaaaatatactttcagatatagaggcaagtttgatgagccaaacgatgaatggttgagcagtattgaggcaaccagtgacgaattgcttggggcctacacaaggactgaagatgatgcaatgacattggccttcgaaggccgagacaagaaaagattgaatagagtttttgacatcattggtttcgtataccctgattattgctatccctcgcgaaagcagggaaagaaaaggaaaattgccgcttcggccatctctgttgtgtcgaagggcaaaaagatcaaggtcttaacacactggtcgagatacattgagacggccatagtgccgaagcttggtgaagggacatctttcactgccgaagcagaacaacctgctcccgccatccctggggaagacctgactcaatttccgaaggttcctgtagcaggtccagccaaaacgccaaaacacgatgctgaaaccaaagagaaggcggccaaagagctagagccagagctgccaaaaatcttgagcccatcagcagagccaggattgccgaagatatccagagctcctgcaataactcccaagaggaggaggatggcaagcgtgttggacgctgttatggagttgacaagggcattgactcctgcccttgcaaaaaatattgctgaaac

SEQ ID NO: 67830 - DNA, 643 bp, Zea Mays
gctgcccaacaactaagaggccctgccagtatatagtgggcgaattttgtagcagttcaaccggctggacatcagatcacatgggaagaatacaagctagcattccgtgaacactatgttccagagggagtgcttcacatgaaacaagaggagttcattcgactaaagcaagggagagatactgtaatatagtatctcaacaagttcaatcatctgtcctagtatgctatcgatcaagtaaatactgatctgaagaaaaagaattgcttcatgaggggacttaatgacaggctttagaggaaaatggcaacctgtctggaccttacttacagcagagctgtcagcacgacattggtcgtagaagccaagaacacagaccatggaaaatcaaagggatttggaggtgataggtctaatcagggacctgagaagcgaactaggttggtgatccggccttttaatcagaatcgttcttcgcctcgtccaccctcctatcccttcaagcagcctgttttcattcgtcctaccattgcccctgcttcagtcgagtgccactggtactcatttccccgctcttcctagttcttccactggatgctttaactttggaaagtccggacactttataaaggactatccatac

SEQ ID NO: 67831 - DNA, 933 bp, Zea Mays
ctgcagagggagacgaaaaggaggcaaggaactctttgcgccgaggaggaagatggcatgtaaagcaggaagacgaaagcagcatggtaaagatccgaagcacccatctcgggcgaatttataggaatggacggtgtcaccgaggtgtgggtcgcaacggccagtcagctgtcgtttcgaatcccgcacgcacgtgcgccgcaaacggtcggctgacaggtctagacgtcccatcgcattaaatgaccgtgcccccattgagagaaaacgcaacgagcgtcgtttcatattgcacctcaaaaggtacgccctcctccctctacctctctttccttatttcatccccttgcagttaataggaagaaggcgtcttctacctcgggtgtcccaccttgagaagaaaaaaggcaaggcagaatattattcagaggttcgaaggttaggccctcgacatggttcggtaagactgccttaggatgtcagggctctgagcccattactaatcagggattggaagtttggctcctcgaaagggcttcataaccgcccagaacacagagtcaggggtgactgtgggtacgcccatacatggccatagctcgggttatgacctgaggtaccctaagacatatccgagaccccccgggagcgattcgtgacggtatcccatcgtagggaggtgttgagcccgcgaaccctatcaaatgggttcgggaccaggtgaatcacctgcaggtacttttggggcgtgtctctggaccgctagccgaccactatcgaaaggagctcggaccctgcaaggatcacctggtaacaactcaacggaaacatcatgcttgttgcccatcgagggtagcatgacgcattccccctcttcctccttgtagagaggcgacaaagaggcatacaaatcaaaaagtcgaggcacccctt

SEQ ID NO: 67832 - DNA, 680 bp, Zea Mays
agtttatccaaaggtctagtttttgattggtactgcagcacgtagatcctgtagaaggctttcacatctgctcaagcaccttggctttgcatgaaccatatgtagacacttagtcttactatggcatttagcgtcaactggtgcatgtaaatttcatatttcttcattacattgacaatcatcttgaacatgagcagccgaagtccaccactaagaagcttttgaaaactacaatctcatcttccttcgactcaagattggtctcatcaccagcaaaacgaatgatattatcatcttcaacgtacccaagtttattcaagagctcttggtcactaagcttgatggtagactagccaatatcgatgtagccaggctttgttggccgaagatcgttgtcttctcccgcagcatccaaagcaccctcctctatatggtcttccttagcaacctcgttagccttcagcctcctcgtcctggttgtccccttcatcacctcagaaattacaggacccacaaccatggtgtaaagagtgtctttctccctcccaagtgcctacgacgaagttggggttaccaactcagcagtcgaatgaatcctagccatcggaggattgcctaagatcaagttcccaaagcatgcaataaaaccagaggaatggaaaaagcttcggaagcagaga

SEQ ID NO: 67833 - DNA, 399 bp, Zea Mays
cacaagtatagtaaagtgagtagttagtaccagatagcccagataataatctcaagatattgttgaaaccccttagtttggctctaggatctaatataaaagcaaatgcatagagcataggaatatccctacagtacttaagaaacttagacttcataggagcaatagcatgtctaagcaatgcatcattctcatactgatttaaatgctggacaatgtcaaggatgttatgcattataagtggagatgtaggatagtaaaccctagaaagagtcacagtagcatcataaaacagttcaagaaactcaagcaacttttcaaccacataccaatgtgaatttgtcaacagattaggctcacctggttttctaggatagttagtgtccatgaagacaccaa

SEQ ID NO: 67834 - DNA, 421 bp, Zea Mays
cagatcgggttgttcagagttggagctgtatcaaataggccctaactctgttaacatcattccttgctctttcctggatccgccccattcccactcaagccagtagcctatgtaagccatccgctcccacctaatatcaccaacaaccctcctaatgcatgcacaactcccaccatgccaaagttctctttaaagatgaataaataaataatgagggaaaggatcaaaggagcatcaaatataaccccgcactcacgcacccagccacaaacgcatagttgggcgcacaaaatgcttgaatcatggccattaaggattcaccatcacacaaccgttcctaatctaggacaaaaggcacggtgtctactcaaggacacttggatgtattgatgcaagtgcaaactaggtggcaccattcaac

SEQ ID NO: 67835 - DNA, 528 bp, Zea Mays
cggtcgcgcagtttgtaatcatgtattatgtttctatgccaggttagttgcgtagctggtgctctgaacctttagttggtctgtgtttcacactccatatcgggtggttcagtgtccaggtgtcttgcattttgtctaacctcctcttaacgaaagcgtgcaatgacgtgttcaagaaagaaaaatatagctcatatgttaaagagcacaagcttgtcacatttaaacacaagctcatacattgaatgaaacgcattttacaacaatattgatggaatacaaggagcacactgcaagtggtaccatcatcctataccatgctactgatgtgcagtctcgatgctggtctcgatggtgggttgccaaggaactaagatggagtcagtggacttgttggtcgacaactgcatggcgaacaactgagatcatagatggttttacaactagctcacttcattctcgttggcaaattctgcttcgctctctcttgcatactggatcttcacctaaaattcccattgcatccca

SEQ ID NO: 67836 - DNA, 403 bp, Zea Mays
ttggtgtacgagcagaacctggccactcgttggcggcccggtggtggagcaattgctccgacgagcaattcgacggtggcaagacctccgcaacgtgcccaaaccacccggattagtcctcggcctccagacgcctcacccggatgtctcgccaatgccaaaaacctaatgcttccgtggagcgttggtggctacctcacccttcctctcttggcgctgatgataaactatgggtctggtgtcgcgagaagggagggaggctcggttttgatgggtagcggggaatgacaccgggtcatatgccgcgtgatccggaaggttcggccactagctggtcccggtatctcggcttccgttacgcggtgccacgcccagctacgatggtgaagcaacagggtgacag

SEQ ID NO: 67837 - DNA, 465 bp, Zea Mays
ccgagtttgtgttccactcagaatcatgttcaatgggccggttatacaacatatggatggcaatgtgccatggtggatacattatatactgaagaaggagcacagatggaaaatcagcttcagaagaaccctaacagatcgaaggtgaaaaggtcatccggcatcatcaactcaaggaggagctagcggacgtcactttatcagctgatcagggagacgacgattgaatgaacgcgctgtgcgtcgaccacaaataattaaagctaccatattattaacgatgcaatggcggcacactcgatcgccacgtacgagcaggcttgtttcagacgaccccccacaaatccacgcgcgttgcattcgcgtagatagatgagggacgaagaagaagagagcgcgcgtacgtaaccgccccgcgacgccgcaagtcgtcgtcgtcgccaaccttcgttcggcctcatcggc

SEQ ID NO: 67838 - DNA, 732 bp, Zea Mays
atttattgtggcaattagccatttcttcatattaaaccgatgcagttccctcgccagtcgttccatccacgtcaacaaaaaaatctaggccgcacacgtgttccctactgcttcgtatcacgacgcagcctggtgctgctcttcctttaccattttgcttgcccttcacatttattaaaaaaatgaaacgatgacgccgccgagtgaacaccccagaacctgccagagaggtaggggacgccgccgccgacagagactccgcggcttccgctgcactctccgacgattaccgcttttccaggtaaaaaaaattcatatgcttccttctctacccactggtcgtcccttactatggctcccgcatccatttcgaggacgaaaacaagcccatgtcttcctccgtcgtcgacgtccacctccgcccagtttcgagggactacgagctcgcggcttcctccgtcgtcagcgtctacattcgtccattgtcactttttcaggtaaagaaatgtttttcatgtttttgttcgctttccgccgttcgtggcttactgcaaattacacatttattttcctcatcgctcttcaaactcatgttgcaatgtgctctacatctacagccgcaaacccacatactttttcccattttcttaggatattgcaaaccctaaatctaagggcaggtattgtggacctgcagttgccttttgctgctcacgcgttagcaaagctgtg

SEQ ID NO: 67839 - DNA, 701 bp, Zea Mays
caggagcacgattgttattaccttgctggcggtgtggcataccttctgtgttttgatgaagacggcaacgtaggcgcaaatctctggtggccgcttcatcataattaccttcttcatcaaacaccacatcatcaggaagacgtggacaaggaggtggtggtggtggcggtgcttgttgttgcgtctccaacacagcaagtctgtcgacgatcttggacaatcgtcgatccagcctctcgtaagtcttgccaaggttcatgtcaatgaaggcatcatgcactgacttgtggaccgtctcctccatttgctcctttaggagcttcttgtttgcctcaagatcttggtggctaacacattcattgaagtctgtagggatccttgcttcttcttcgtcgcctgccatcgaaacacaaaaacaggaaacaaacggtgaaggttatccctaataatctcactacacgctcctctcaggtggaacacaggaacacgctctattgtatcttaccaagctcttacaagtgtctgacgaaatacaaagcaaaggatggtacaatcggaggctggttcgtgatacttacaaagatggagtgaaaccgcgattgaaaggtcacagctgtattgatcagaagaaagtatgtggagcttgggaggccaaaaactaatatcaaggattagcaaaaatcgagtgcagattagcgaag

SEQ ID NO: 67840 - DNA, 311 bp, Zea Mays
aaattcaactttccgctctggtggcatacctggtaaatcctttggaaacacatctagaaactcagacacaatcttgatactctcaattgggtctgcttcactgctaatagccatctagtaacaacttcttttctttggttcaggcgggactaactcggtcaccacttcctctcctagtggggacaccaacttgattgttctcctatcacaactgataactgcctgatacttatccagccaattcatccctaggatgacatctattccctgagtacccattactatgaggttagcgggaaactctatccccc

SEQ ID NO: 67841 - DNA, 714 bp, Zea Mays
tagctctttcgtggttcgtgggcttttgcgccctagcttgtgcaccaaagtttcacttgtggttctcaagatgaatgcgttgataacattagcgtcagcaaggttagtcagctcgttgcactaccatgacaaatgccagacgtagtcccttaaggtttcattaggcttttgtcgacagttcttgtggtcccacaggttgccagggctaacgtacatgccttggaagtttcccacgaatatttccttgaggtcggcccaattttgtatgcaaccaggccttaggttctctaaccatgcttgcaccaaatctaacaagtacagggggaaattgcgggttataaagtcaccttgctccgctcctcccgcataacacgccagttggtagtctcccaaccaaaggttggggtttgactctcttgaatatatgttgtgatattgacgggtgccatgtactgttgcggcactggtacttgaaggatgcggtggttggctgaaggcccaaggccctggtggtggtgggctcagactttggttccaattagggttgaaacagcctctgcgacgctatttgtatcgatggagtcgccagacccgtcacatccctcctccctagtctcgtgaccaggagcgctccacgtgcttcaatccagtctttggcaccgatgaggtgggacccgtgtcgcactttcttcaatctcgaggggttgttgcaac

SEQ ID NO: 67842 - DNA, 749 bp, Zea Mays
gaacaagatcccttgttccaatgtgtgtgcaaacaacattgaaagcaactatagcagcctgagcttcgaagttgatataacatgttggtttttttatatccgaagcatgtgacaataggagtcttgatgatcccttttatatcagtctgatcattcaaatcattcttcatatgaaaccactctctcgcctactcattcggccactttcttcggtatgcacgagtcgggaacattgcacccctccgataagcaaagttataacagccgaaattgttgtgaaggcccctagttgccttcatcataaagtgtaattcgtggatttagctaaagcccttgcagaaagctttggcatcaagctcaacaccctaactctacacagtccaaagaaaaattactaaacacactatggcgtctggtgtaagatggtgaaggtatatgttaaaccttttcaaaacagaaactaccgtcttatgcaaaggaaatataagctcagctttcagaataattcggaacacgacaacttcgtcctcctttggcttcgacactaaatgatcgcctttcagccgcacccaatcgacattgtcaatataaccaaagcagttaagtaccacaatttgtcctcctttgatttttgatttgccaaatttcacgtgactcagctttgtaggatgaatggtagtgttgtcttcttaaatatcaatgtcgtcgctatcctcggatggattcacagcatcggtttcgacttgaga

SEQ ID NO: 67843 - DNA, 672 bp, Zea Mays
gcggatcagtgcaactttctcttctgcctctttgacaaaggcaggtccttctagtgcttttcccccacgttggaccatatgagaggggtctggcatttccgtccatacagtgcttcgaatggtgacatcttgatgctggactgatagttattgttgtaggagaactctgcgtagggtagactggattcccaacttctatcaaaagctaacacacatgctcttaacagatcttcaaggactttgttgactctctctgtctgcccatctgtctgagggtggtaagcggtactgaaatctagcttggtgcccatggctttctaaaggcttgtccagaatttggatgtgaactgggttcctctgtctgacactatcttccttgggatgccatggagtctgactatctccttgaggtaaatccgggcaagggtggctcctgcaaaggtagttttcactggaacgaaatgggctaccttggtgaggcggtctattattacccagatggagtcatttcctttctgcgtccggggcagtccggttacgaagtccatgcctatttcttcccacttccattcaggtatcgggaggggttgtaataggtcagcaggtttttggtgttcggccttcgtccgttggcagatgtcacatcaggccacatactgagctatttctttc

SEQ ID NO: 67844 - DNA, 483 bp, Zea Mays
gaataatttgttacttctatttaatctttttatccaatccaagcaaaatcctgaataaaaaactagctaacttgtttataatactcgatatgtgtgtgctggataccaatatcaacatagatatatctttgcattcctattttctttttaaatagttcatatgttgaatatcgtgctattaattctatcaataatatgtatccttcttcaaaatgattggagattgtcattatttctaaagcacatacttttgagtcatacatgtgtgcagctacaatgctacatggtctaatttatctactatgagtgaatgaatagcatgtggagatgtgggaaacaaggagcaataattgggtgctaaaggttaatttattctttgttcatagttttatgagtgtaatacattttgggatttttcaatttatcatctttcattattctatttgaatcttttgatacattctaacatgatgctacaacaat

SEQ ID NO: 67845 - DNA, 1504 bp, Zea Mays
attgactccgctttggagctctatgtcttccaaaatagtgagaatttaccctaggtcaccacatcaaatttgtaaacctatcaaaggagaacaattttgcttaagagtgtaagcaaggttgttatgaagaatttgaagataattaaacctaaagtcaggctgtcaggctgttaaagtctgaatttcagactgacagtgcaactgcagtgactttgggcatgaattcaagcaggattgagcaagaatttgcttaggattgctataaaaatattgtagctagatcttagagctaaaactttgctaaagggtgatgatcatgttactgcacaaaatcgggagtaaacaaccctgcaaatcgctctgccaggtgactgaatgggctttcccatggtacagtaacctaaaacggatcaggacgccaactcaactcgctgccgacgatccccaccgcaattcgtgtcgccgccgtcctgattcgtgcccggtgaggatcggataacgccggggatggataactcgtacgtggcgccatctctcgagtccagccggagttcttcaccggcggccaccgtgactcgataactttcgccgcggtgtcactcatgccgcgatctgcctcactgtgcctcctaccgacgtggtatgcatgcgctagcaatgctatccgtggtcgaagatcgtctgtcgggtcgccgtggctataaatagcacggtggtccacggcgaggtgtgaccatcacacacacagtgagttgaatcgaagccgaattcgcgctacctctgccccctcctgtcaaattaagtgtgcgcagtaaaactagagttctttgcgaagctgaagcacccgctcccaccctcgattagccaccatagccagagaatcaccaattttccccaaatcggtcagccgcgccaccgagaatagcccgatcatggccagcccgctctggtgagttcctatccaattcaagtgttgttttcgtggctctgcatgctggtaaagctcaccgtggcacccgtttactcaattcagccatgatttggcggggacgcgtactcgttaacccggtttacgccatgatcgtgggcagacagttcccagtggggtttatgtcaaattaaaggatgttcctagattatccttgatcggttatgcctccccgatagttaaccatagcagtcattgccggccatggccggtacagaccacgtcgaagacgaacggcgagtgcgccgtggccagggatgtttctagagaagaaatagaagtacgagggtatttcttcaaaccgtcagtgactcagggcaacagtaaaagaacccactttgagttaaccagaacgccagggacctccgtgcaaagtctgcagcgtgggcgcgcgctttcccctggaattgggccgtttgggctactttcgacccagtactgtttaagctttttccttttcttttctataaaacttgagaaatctgtagaaaattgtagaaaatggtaaaaatgtca

SEQ ID NO: 67846 - DNA, 512 bp, Zea Mays
tcgagagccagaagaggaaagctatcagccctgtaccataagatgatgagcccgaatgagagatccacaacccatccaccaacaagttgaaaagtgcaaacagaagatgcttcaactttctgagtttcagaaccagattgatgaaacaactgagcaaatgcataacattgtgcaagacactggccatcaacatgagggtcacaaccatgttgatctttgacatgaagcatacaactatgatgacttcttgtatgacgatgcttcttctttgacaccagagctgcaagccacaccatggccatcactatacaaacccccacaactaccaatgtatgacgacctgtcagacccaaaatagttcctaatgagctactaagctacaatatcttcttatggaggtaatgcaatagttatggcaaagtcatttgccatgacagtcagaagtgtagttcagacttgatactcatctcttcggccaagaatgatcacttcatggcaaaagctaagggaca

SEQ ID NO: 67847 - DNA, 290 bp, Zea Mays
gtgacacagatcgttcgatgaatgggcgagaggtagaagatgattggccgcttgagtgagcactcgtcgatagccctctgcgtctggagttcgtggaaggccattggctatctgcgctaggacctctccaaccttgcttggcgtgttcagcatccgatagaagtcagggtatagtttccgtgcgaggagtgggttctctcgtcgaagctagcatcatgttcagcttcctcgtgctcgcattcttgagcttggcaaaaatcgcggcggtgggagttgtgccgttctcggtg

SEQ ID NO: 67848 - DNA, 322 bp, Zea Mays
ctgcttggagggtagctagctagtagcaagcaatccagcaagcttgttcttgcttttgtgggggacaaaaaaggaggtaggccgggtggaggggaagcaggatgtgagatatggggctgcggaaagggagttatcttttcttagcaccaagcaagcaccaggagagacgagagaatacacacggaacacggttacggtgaggagaaacgaaaggagggagagagatggggtaacttgagttggcttccaagagaggacaataaagaagtatgtgagggcagatgagagagagagagacagtcatatcaagagagggacagga

SEQ ID NO: 67849 - DNA, 720 bp, Zea Mays
gctccatatccgggcgcggagaacatgcggcgccggtgctcactcccttttctcgcgtcctctctctcttccccgcacttcaaccgtcgcttttgcaaacgagctggagcagctgagagggaagcggtggcggtcgacgtcttcgggtagtgcttgcttctcgtcggcgattggcccttcgagccctcggtacgccgtccagatctgaactccgttgtggtttctattaggttttagttgcttcatttgttcgatctgtgtggttctatgagttgtggtctacgaatattgggcatagaacctgaacgacggtttcgatctgtgtggttctagggttatgttgcgtgaatattggttctagggtatgtagatgctagcggttctaatttgtggcaggtctggtcatgttgtgcttttcgttgttcaattgatttgtccatgtacccacattttttgccgcattttgcacaaacgaggttatatgagttgtagtgaccccactcaatatcctaggctatcatgcatattttgttcatggacgcgtagtcaatatcctaggctgtcaatacttccatcgtcgaacagaaactgaccatatctccttggtcattttcagtttcagagatggaaaaagagccacttgacatggttgagagcttagttcgagtcatcgagacacatgtcaacatcattcgcagtctagtgactgatggggttgtg

SEQ ID NO: 67850 - DNA, 1036 bp, Zea Mays
gattgacagcctccgtgagactatattgaagaaagcccatgactctgattactctattcatcctggtagcataaagatatatcaggatctgaagcaaaagtattagtggtatgggctgaaaagagatgtagctgcacacgtggttgtgtgtgatgtatgtcaaagagtcaacaccaaagaccagctggactactgcacccgttaaaggtacccgaatggaagtgggaagaaattggtatggatttcgttaccgggttgcctcgcacctcgaagggttatgattctatatgggtgatcgtggacagattgaccaaagtgactcacttcatgttggtcagtactacttataaaggttctcagctggcagagttatacatggctcgaattgtgtgtttacacggggtaccgaagaagattggttctgctcgtggatcccaattcacctcaaggttttagaagagccttcatgagaacatgggtacgaagttgaactttagttcggcctatcatcctcaaactgatggccaaactgagaggactaacctggatatgttgagagcttgtgcccttaaacatgggggcagttgggacaagagtctaccatatgctgagttctcttataataatagttatcatgccagtctgaagatgtcaccatttgaagctttatatggcagaaagtgcagaactcctctatattgggatcaggctggagaaaggcagttctttgggcctaagattattcaagaggcagaagaacaagttcgcataatccaggagaacttgagggtagcacagacccgacaaaagagttatgcagaaaatcgaagaagaccattggaatttgaagagggtgatcatgtgtacctcaatgtgtcaccaattcgtggaatgagaagattcaaagttaagggcaagttatcccctcgctttattggacccttcagaatctttaggcgagttggggagatggcctaccaactggaactacctgatcatttgtctgatgtacacgatgtattccacgtgtctcaac

SEQ ID NO: 67851 - DNA, 308 bp, Zea Mays
tagagtagtatagtctaagtattgtacttatgtaaaataagtaagaaaagttgagttgtataatggagtctgtataattattactgttccacaatgaaataaagatggtgtatgatggcatgttatatttttccaattgtttcattgcctcagatgccatcccggacccgtgcacatgatggggcaggtacatcccacggtggggagggcactcccaatccgccaccggtacctcctaccttggccgaggctatcgctgccttggtcaacaccactgccgacaatacgcgctttctgcgcgaaatggc

SEQ ID NO: 67852 - DNA, 508 bp, Zea Mays
cgacatcaccgtaaactgcagagctgacatattacccaaaggctttttgccatactcagtattgcaccaaccactacctcatgggtaagctccttgtcaggtaggctcgggtacgtgaccaagcctttggccctggcctcgactctcagcagaaatcaggcgtctctatcgggcagaagtcaacaacaagtacaagacccatgctccaagccataccatctacaggggctcggcttcacctcctcaccgcacacggccaacccaggagatcctagcaaccctccttgaggctataaatagggcagtccacagcttcaggaaggcaggcgaacacttcacgattctcacctccaccaccatattggcacttgcctcaatcaaccctagggacttgggatccttccctctcccgattagcttgtactccctattgcaagcacataggtgcaagtaatataagtctcatcctccctctgctagaagtagggccttctcccgcccgaaccag

SEQ ID NO: 67853 - DNA, 560 bp, Zea Mays
ttgttacccagactcagcccgttaaactaaaaactctctgcttgaatacatgtacccatgggcggatacaattccacacccatacccggacacatcagttattctatacccgacaggtacccatacccatctagagtggtggagttatgcctgtctgcccaacttagtttagggcgaatggtgagtgtcgagcggcaacatttggccttccatcttccaggtgcgggcgtgccgttgcctaagtgcggcttggtcgcttcgattgtacaataacaaagagtcgcatactcgcgtcgcacaagcttggagccttggacatgctttactattttggttgttgtctccatagtgctgccatttgtcctaaggcctacgtagtatatagttgtgctaaggagctaggagcccaagataaatcattgagttatactaaaattttagagaattgttggctatattccgggtataaaatacccatgggtacacgggtacgagtttactgtgtatgtacccgtaatgtttgtgcccgttgggtcctctttttctcccattaacagacc

SEQ ID NO: 67854 - DNA, 497 bp, Zea Mays
gtcggggtacggtggtgatcattgtggcactcgcaggtggaagaagcctttcgtgctgccccaatttctcaccggcaccaataattgccacggaaccacacttcgtcgcgcctggggactgcatgacacaaccacccataagattgctcatcatcgcgttcggggtagctcgccaaatagctgatccgtcgtttgccgacacgctcataacagtggattggccgggcagcgccgccgcatctggttgcggcttggggaagagggggttcggccgttggatgatgaaagaacggcatggattagaataggtgtacccatccgctcagttggctctcggccgttgatctgcgcttgaacgattagatctcgcacaccggttcgggtggttggatcctgatcgtaggatctgatcggacggtcaggggtgagcgcggatgtgtagcttgcttggatctaatcaggcgcgtccatttctgatcgggcgacactgattgcag

SEQ ID NO: 67855 - DNA, 602 bp, Zea Mays
cttagggtgactactatgcctcactaacgcagcaatcggcttaagtcgaaaactccttaagttggtgcaatgtgatcaattaagcagcaaaaagctcagggcgcgtactataccctactcacacacaacaaaatgggagaataactcaatgttcaaaaaaccgcgaaaaaatactatctcaatgaaaagtgttttctgtttgaacaaatcaatgttcgctttcactctctagttactgtgcaggagcatcctcgcaaggaaccttgtccgcagggtcaccagaagaacagggattactcaaagtagccgacacagcgagtacatcagctacaatgtcatcagacaccacaacgtcaggcctcttcatcagaatccggctagcccagactgccttatccatcgctttgtcacaccatgccttcatgatggcacggtcgtcatccatgaccttaatatcacgacgcgtagcctccacatcacgacaagcaacttctagctcctgtgacacaagtttttttgagacgcaaagctctctgatgatggaatctttcgaagacaatgacctgctgagtctcgatacctcgccctgggagacctttaac

SEQ ID NO: 67856 - DNA, 412 bp, Zea Mays
gcacctccaacttctgatcatgcactgaccatactgaagccataggtcgacaatgatagctatagatacattattattagcgtcagctgatgcttttgacttagtgttgtgcgtattatcactactggatcaccaaaccgacagtgataggagtggttgttcaatcatgtaattttcactcttatgtaattttccgaagagcttttcttagaatctatattccttgataatctagatgtgataagaatttggatatcttggggcttacgtgtggacgaagatgggtctgcatggtttagggtttaggaagtggtggattactcctgtcgcgacgactcggtggattgtacattcacgttgatgtgctggttatgctacatagttactaggcattcatccatgttcaacaaat

SEQ ID NO: 67857 - DNA, 677 bp, Zea Mays
tgacaactaatgtaagggattctggtatatacacgttccgagcacagggcatgatgtaccacaatatcaagtcatttggtagggaaggtggggcagagcataaacaccttgagctttacttttatgatgatgatcccaatctctagcatcggtaccgtaagtgccgtgaagagcatcaatagaaagacaaggaggttatcaaacaaatagtcatcatactacgtggaaacccatactccaagcaccttaggaccatgggccacgttgagaaccttgatggctatcgtaccgcattgaacctagaccaaacattgaactagaagacgtataacacacccctcactttggaggtggccgctgtctggatcgaagggagcgaagggcaaggccagttcagcaaagagtgttacgctccatgggaaggacagctcaagccactacatccgctcataccatggatgctacgatgcactatcatatccactgttcttccctagaggcgaacttggatgacatgcaaatatcccaaaggttggagtatccatggccgaagtggatgcatatcgtgtgacgcatagggcaagtaatgcaaatgatgaagatgcgggttagttgttaatttgatatttcagatacttgcacattattaactatgctttcagcatcactcacttttc

SEQ ID NO: 67858 - DNA, 406 bp, Zea Mays
gggtggaagtctagtgagtgagtggattcgtaagcatttgttctttgtttatgtgctcaagttcaactatttgagcatagactttctcctttataacataataatgaacgtcaatgggtcaacgttggaagggcataccctcaactactgctaagacgcaaacaaggatccatgcacgggagattgacttctgggcccatatacaagggtcactaatcttaggaccctaccactagcgagcatctcttggccttaggatgaagaactctagcactaacttcgatttatactatggtgcttctaggaagactggtaggccgcatgacgtcacacacaggagtaaacccatgggactccttgcgcccctaggcacttgatagtattagcctcttaggccatctccaac

SEQ ID NO: 67859 - DNA, 510 bp, Zea Mays
tacacagacacatactctagagccaccagccaggaccaacaagcaccagaatcccatccaaagtgatgaggggccaataaagtacccctcatattgctctccccaaccacacaatattgatttgcgaaggcctagctccacagaaagaagctagcttgctcgactgcatatgtaggaacaaatacgtcttcgcatggtcgccatctgacctggtgagagttaaccagagtatcattgaacacagactgcatatcaacccatccgctcgcccctagaaatagcaacaccgcaagatgtcaaatgagaacatggaggcaaccaaggccgaagtccagcggctcttggatgcaaaatctattgaaccaattgactaccccacttgactcacaaatgttgtcatggtaaaaaataaaaatggcaaatagcacatgtgcatcgacttcaccggcctaaacaaagaatgctttaaggatgagttccccctccctcgaatcgataaaatcatcgatt

SEQ ID NO: 67860 - DNA, 480 bp, Zea Mays
gaagcatacaataatttgacaaacgtcgaatgagaaatcgagtggtcagaacttaacagtggaggaagattccaagcagaataagatcgaggagcactagcattcacaatggcacccctcagcatcatctcgatccgactcaagatgttctcgtctgaaatttgtttgtctctcacccgggaaggataaccaggtatacacatatgaagggtagactctatccttgagaggttggatattattgaagacaaagtcgatcaccacaacttcggcaattaggcctctgtcctttaaaccagcaatttcagctaacaagactttagcctcaacaacttcaaaattagttggggcctcaatccaactgggcacgtgaacatctggttgtcttccagaacgagcaggcaaggacttgttgtgattctccatagtgaaccactcaaaatgtcaccctttgatgatgtccttcagagggatatctaa

SEQ ID NO: 67861 - DNA, 638 bp, Zea Mays
caagttgtgtgagtggacaacagggaaacaaatcgatcttatgctttgatagtaatttcagttgatactaacaaacaagttgtacgattatactgaaaactatctcatttgcctcaatccatgttataaccaaagcaaaagtaaatataatatactatgcatatcgtctatatatatgcaaaccatatacataaaaaattatgcataacctagctcttgtaccaatgatagaaaacatgtacattacgttctagcatatctacctgtccaaccaagatatcacgtgagtagagaattatgtatggtcaccactaaacgtgcaatattactaaagaagaacacgtcgatgtagtgaaagtagtcgaacgtcctcgtgtaccaacaccgacactagcacacttacccatcctcttcaagttcattgttgatcaacatcgtgcaaccaccaccatcgtcatcttcataatgtacacaagtgtgggggataaaacaccaagaagctagtgtgctagcaccaaactgtcggcgatgccttaagcaccagcaaccctagggagagagatgacgactaagatgatcctcctaagcatgccaaccacttcttctatttagaatcttgctaatggacttaataagac

SEQ ID NO: 67862 - DNA, 676 bp, Zea Mays
aaatgctcctctttctaattgactcgctgtctaacttttgtgttttaagtccctcgtagggacgctgacgggaaggtctcgccttcttattgaccaaagggaagcatgggagtgttctgctagtgatcttctaacgacgaaaagcgaggtcgttgaagcccgcggacgcgtcgtgttgattcaaaacacctatgatgccttggtcggggtagcaaggagggatgcagaatcgacgactgttgcacgactcaagaatgtgaaaagggactccttcctccacatcatagagcgagggaaggaggtagctgaggcccatgtcatgaccttagaggaggagctaggcggtcggaccaagaaggaggagaaacccatggcctctctgcaaggtaacacctttcgataattttccctagagcttggcgtccgccgcgcgctccccctcctctcatggctatgtttcgtccggtcagccatttagggtaaattcaacattgtcgaggggaaattcatcaaggtgcaaagccgtctggaggagttgaagaagtagaaacatctcctatcggaggtggtgagcgccatgcgtgggcgcttcggagcacctccttcgcccgagtctgagtcactcgtctcccgccttcagggcctcgttgaccggttccaagagcttgagaaggag

SEQ ID NO: 67863 - DNA, 480 bp, Zea Mays
caagctcctcgggtttgacttcaccgtcgagtacaagccgggcaccgccaacaccgtcgccgatgccctgtcccggcgtgatacctgcgaggagggggcagtcttggctctctctgcacctcgcttcgacttcatcgaccgtcttcgtcaagctcaacttcaagacccagctctcgtcgccatccgtgatgagattaccgcgggtaccaggggggcgccgtggtccctcctggacgacatggtggcttacgccgcccggctatatgttcccccggactcgctactgctgctggaattggtggcggctgtacacggggacgaccatgaaggggtacaacgtactctacatcgactacgccgcgacttccacttccccgccatgcgccgggtggtgcaagacttcgtccgcggctgtgcaacctgccagcacaacaaatcagatcatctccatccggcgggactgctgctgcccctgcccat

SEQ ID NO: 67864 - DNA, 308 bp, Zea Mays
tttgaactccctaatgcctagttctttccccttcttcctattcgttgtccatgtttcttcaccaccttgcattgcttcctcctcttccttctattcacttctccctattccctttagtgaaactatattaagttagcacaacacgaaggacttgacaggaggaaggcatagagtatagcaggagcaactagacttaccgaaaagaggaacttattacacaagggagcaacaactcattgctagatagtagcaagagaatgtggaataggtgaccatgcttgggctatatgaggctgattgacaatgaa

SEQ ID NO: 67865 - DNA, 344 bp, Zea Mays
tcccaatagcttttgagatatagctaggggtaaaacttcctgagatgttctatgttccatgagttcccaatttccgtgccatccatttgagtgagacgatatgatctaggccgagtgacttctgctactatgaacggtccttcccatagtggcgacaatttgtgccgtccctcccccgttagaattcgacggaggacgaggtctcccactgcaaaggatcgatgtcgtatggtcttgtcatgatagcggctcagagtttgctgatatcgggctgactgaatcaccgtattcaatcgttcttcttctagtacatcgacatcttccagcctagtagcctcagcttc

SEQ ID NO: 67866 - DNA, 797 bp, Zea Mays
tcgttccacgatttcttgctgcaagcgattaacctccgctgacaactcagcaatgcggcggctatctcacgcatgctccctatttccatggcatagttctgacatgaggcgttccaccctggcctcaagatcccctattggatcattgcttccactactgctcccctcatgtcgaggagccaattggcgtcgaaccataccgtgtttgcctggccacatgaggttgaggcgttggcgatgtggtcaccaaacacttgaagtcacttaactagagaattgggtgtttccagggtatagtctggggaagtgaaggcaacaatactgtgttgaagctacacacagtggcttacgacagaggcaaggatctctcctttactcccttccccccttcggttactcttaaataggtagggaaaagatcatgcgatgtctgggttcatgggattacagcaaagggagctctggaggtgccagtgaacgcatgggtatggatgcatggctcaaccctaaagatccacgccggtctcctgagcacagcaagacagggatatggtagagtttaccacggcagagggtaggcagataaggtttcactgaagcagatattcttttcggtccaaacttgagatattttggtgatggccaaagttctgaatatccctgctatttcttctcatctctatcttcattttatactaaagtaagacacggcaagggaaaaagatcaatggcagatatttctgatcatcaggatctacagcacttgactgaccccccactgttcagccacctttttc

SEQ ID NO: 67867 - DNA, 528 bp, Zea Mays
gccataactgcgctttgcttcaaacaatctgattgcgattggtgcacaatgggtgtgtattattgctcactgacctgtggcccccacacctgattgtcgcccagtcatgcacataacgctcgattctaccgtggcaggggtaaaaatgggctttcttgttttcttccaccgacactattgaggctagctaccacaaaaccttgggattagtcctagacttgactcaagatttgatgtttagtagcgcacccatgggagcccacagtctattacagttgatcgtttgagacatgcaactgggtcttgctatacagagcttgggaagccagcctttaagctagaatgaggtctaggacaccgggtgcacagttttaggtactagggcacctattgcagagtggtggagtgtgtaggcttagggtacatgattaggctaagcggctacacgactccaaaccatcctaggaaaacatgcacattttctatggacccgccccccagtgatcagaacctcttctagcagtaaaa

SEQ ID NO: 67868 - DNA, 642 bp, Zea Mays
aaggaccagcatcttgatccaggcacgacagtcgtcgaagtcgtctcttcttcttctcctcgccaggtgccgcgtggcagctcattcggcgtgaacgctttgtgcaggcaccttcgggtttttggatctccacttcctcgccatattcttgtctagtcgtgatggccattggctcgatacgggtagagtcagacgattccccagccaacaagctaagcacgacgtccatcttagcatcatcggtgctagatggcatctcaaaatgagtttgcctcttagcctcaggaaaactccgaagtggggcaatcaaggcttcaatatccttaggggagggtcacactctatggcccaggctaccatcacgagcaggagggttggagacaaattcagagaatggccaatttggaggcaggttccacgcagagtaagctaaaggggcaccagcattcgagaccctgcccctcagaatcatatccaaccggctcagcaaatcctcattgggagtctatctatttgtgacccgggtggaatcattgatgtcggtatacaaataagcgggatagactctgtctttcaggggttgaatgttcttgaagataaagtcagcaaccacggcctcagcagtcaaacccctatccttca

SEQ ID NO: 67869 - DNA, 579 bp, Zea Mays
acatgtgttcaggacgtgggagacacgtatgaagtacgctacaaatggggtttcggtggttgaacattcaaaaccacctagctcgacagttcataggttttgccaggtttgggcctcagaatctggtggcacggttccggtggaaatcgcagacgacacatgatgtcatcaccgagggtgcgtcaagacgaagcaactgcgtgaaaactgattggccgtcagatcaaaattctaagagttggtccattttacccctggttgagtgaatatggtctatatatttagggataatttaggaaaaaggaataaccctctataaatagaatgtgagaactgaaccattcggctatctcttaagcactttcattccctcagtttgtaatctttctcgttctagctaagagatccttagatattttgggggcacgacatctaagcctacgtattttttaaagaagtgtggctgtagtcacacttagtcctcacgacgttttattttgtgtcaaatatgatgttattggtttttattacttcttcttctctcaacctctctagtctgattttttgagttgatccctg

SEQ ID NO: 67870 - DNA, 472 bp, Zea Mays
gtggagcacccccattggggtcagcagcaggtggagcacccccattgaggtcagcatcagtaaattcaggaacaggcacttcttcagcagcaggaattgaaggaccaacatctcgatccaatctagatactcgccggagacgtctctttttccttttctgctcgtcagcaggaggatcaagttgattggctcgggaagggcgtcttgggcgaacactgacaggtttctaaatatccaaggttgtatcagtttctgggggaggcgccaccatcaacgtcccagcaggagcagcatcagaagagtcctcagccagcaaatcaagcatagcacttatttctgcgtcactaggatccaaaggtacctcaaagtggacttgccgttcatcatcaggaatttccccgagcgaggcaaccaaggcgttaacttcttcagcagagggtcgcactctaaggcccaaactgccatcagcaac

SEQ ID NO: 67871 - DNA, 456 bp, Zea Mays
cgaaaagaaaccattaaagaatagagtgacgaagcacgcaactccatctaatcagttttttggcagaaaacactgatgaggccattccgacctcatgccctcctggcctcatctcaattgctaatgcccccatactcaccagcccatagtccttgcatccctcacttcttctattcccttcactaaggacagggacagacagggaagatcgtcaccatgtcatctagtgacgtatcatctactagggaaaatagtcttgtaattttagtgcttgtactaaacatctgcgcactctgtaagcaactatatttagacattgcttatctctctcgttttcccccaaaaacataacaatggtggtaataaagtattgactcaagtttatgtgaacctggagaaagaataactgaaagcagactcaagttttttctctgaccaaaatctcttgcatgcttt

SEQ ID NO: 67872 - DNA, 479 bp, Zea Mays
ttttttcccgccgcaacagaacggctgcaggacccgtgtcttgaaaggtgaatcttcgctggccatgtgaatttccagcaagattctgcacatctgctagtgctagtgcaaggagagcgtctggtccacgaaattggccgacgaaattcactttatttgggattttcctttggctgcacctgcatcccgtttcctcctgaacatgacaggctcgatacttatctagctccgtttacgtctcttgagaggtttgttttctgtcagcaaggcacgcaacttcgcctttaatttgcatgtgtagacagcccatattgttgcatcttagtctagcagtagaaactagattagcactctgctttacgtttgttcgtgcacgtgcctcccacttttttgccgccgccccatggtcctcggaggatttcacatcagctgaaagcaaccgctgcgtgatttgctgctgggacccgcgccaaaactag

SEQ ID NO: 67873 - DNA, 318 bp, Zea Mays
gtggatattcatagaatcgccagggaagcgccgtgaacacacatgcaagaaacaacaatcaaattaccccagttcagcccaacagatgcttcaagtgtggagaaattggtcactatgccaataagtgcccaaagcgcaatccacaaacgcaccagaaaaacaccagtaaaaggtttgactagaacacgcctgcacgcaacacccaaggcaaaggccagcaaaatcaaaacagagtcaaggtcaaccacatcatggctgagacaacttaggaggaaccagaacttgtacttggtacattccttatcaactcaatacccg

SEQ ID NO: 67874 - DNA, 669 bp, Zea Mays
ctagcttcggttttagcttgaacttgggcggtttcggcctgcctagtttcagtttcggcctgcctagtttcagtttcggcctgcgatttaattttggttggaacgactttctttatgagaacagggctcaaaactttcttagtttccaacacaacatccaacacgtttgacatccttctcctcttaggagtggcagcagaagtcttttgtatctttggctcttcagcctttttagtcttatcttcggctggctctgctatatgcatcttcggcattacagctggttcttcagtgccgtgtgtagtcgaagcagtttgtattgttttggccgctgaagaggaccctgcttcaaactcaagcaccacgaccggttcaatgtaacacggtcggtgggtaagaaccttcaactttttttcctttcggcacaggctcaactagggtggccgaagtagcagctttcctcttttcccctagccccgcagccgatagtggtagtcggggcatatgaagccaatggcatcaaaaaccatgttcagacttttcttcccccgtcttccgaaggctgcagatagagcattgtcttcggcattagaataagctccaagcaattcatcacttgtagcttcaatacactttagccagtcgtcattgggttcatcaaacttctct

SEQ ID NO: 67875 - DNA, 335 bp, Zea Mays
gaaggtgtgaagctgtttttcaacttaccaataaggcttgtgttgaggacctatcattagcatccttacggagactgcaaattacatagttgcacaagtccactgattgagaataccaagacaacaattatagatggaaacatatgatccaaactttattggtgttaccttctacatgcttttccatgcatatgtaataagtaatataaaaagcagtcattttgacttgagcaataaaaccatgaacaagaaatgcaagcgcccttatgggcgttttaaaataggagtagatcaaaattgccaatgccaaaataattacctaatgctatttgttc

SEQ ID NO: 67876 - DNA, 679 bp, Zea Mays
caagatatgggcacaaatcataacaatgtgtttattttggtttgcacattataaatatatctgatcgctatggactcttcacaaatttgcttcgcgtcaattttagcttttgcgataacgtcacatgctccctctagttctcgttgaaactcctcccgagttttgagttttgtggcttggaccccaaaatagttttttatggttttgaggactaaaccaccaaaaaaatatttgatagttttgaggcctaagagcaacttcaaatggttgctaaaaagttttccccaaaagatgattattggggacatgttaaaaaaatttagaggtgaattatcatgtatacttcaacagttcacttaaacaaatgatgaaaaactgaaaactggaccaaataaaaaaacctacctccatctagttctgtttgcgcctgcagttgaatagcttgcactgcagacactggtacgggaaaaaatggttaatgaaagaacagctgaacaaattgatgactagaaatggtgaccgatatctaggccgacgatgcaaggagcttaatggagtcaatctcagccacaatctgtcttacagactcacagaacatgtcagtagcaggaagataaatcaactcgctgggactgggaatgccaatcattcaccagaaacaaacatcagcaagatgatc

SEQ ID NO: 67877 - DNA, 484 bp, Zea Mays
ttggggagcgatgtcatggcttgacggaggaacatcagtggaacaatttgaaaaacgttgccaggggcgagctcagtcccaccagtggatactagacttctcgcatctagctcgccgacctccaaggcgacttgtttgctcgaagccatagaagcttgcatcgccatcgccccatcagaccgtggtggagacgacccaacatggacatccatggaggtgtgggaaggagagctcacctaaacaccctcgggggctgggttccagctcgtgccacccaccagagccggatcactaccagcaacaccctcgggggcttggttgcagcttgcgctacccaccagagacggatcactaccggcgacaccctcgagggctgggtaactgccagcaccatcctcgggggctgggtttttttatagcagccacctctaaggctgaaggatcctctatcacctccatgtgagtcgggtaattcagatcaacg

SEQ ID NO: 67878 - DNA, 665 bp, Zea Mays
tagcttaggacaggtcggcttcgagggtgcgcctcttgacttgaaggggcctctgctctactactagctagctttatatattacggaccaagttgcatggtgacccaggtagccccgtcatcacagttccaaacagttgccactctcaagcttctcatctttttagtgacaaccaccatgattacgacaagaagccaagtctaaaagcccttcgccgtgacccatggatttttgtttttacggctcatgcatgctaagttgctaacacgccctgaccgcgctgtggtcgtacgcagagtgtcggttgctctctacgcgggtgtagtgtaggagtatttttttaaatcagaatggtgactactggagtactggctcgagcaaacttcaaacacgccggtgatgtaataaccggacccaccagggaaggaagagaaagaaagaaaaaagacaaactgtctgtggcgcgtgcgtagatgtggggtgcaggacacacggaaacagacgtagatgctcaaagtaccgcagtcacacacaagacagcaggtgacttgtctatacgtctcatgggagaaagcgacatagcttgcccgacactgattccgattcgcgatcctagattagcgatactttctgtaagaaaatgatccctccgtcctcggtatata

SEQ ID NO: 67879 - DNA, 464 bp, Zea Mays
caagctgcaataatttccctaataaccgattagccattagcttagtgatgatctgagcgaagctatggatcagacttatgggactaaaatcttttatctcctccatgacaactttcttgggcagaagggtaatatatgcagaattgaggagaaaaagtctactatcatcaccctaaaacagtctattcacagcaaccataaatctactttgataatttctgaagccatcttgtagaatctacctgtaaagccatctggcctgagagatttatctcaaggcatggacctgatggtgttccaaacttcttcctaattaataatcaggtctaactcggtaagatcaacaactgacctatgaaaggaatgaagatcaagagtgaagttacgctatcccacagatcccaacaacttggtgtaaaaatcctagaccacatatccttctaatcagtgaacacgtcctcttt

SEQ ID NO: 67880 - DNA, 643 bp, Zea Mays
ctgagttggaaacatgaggtggttatgcgggggtcgggaggcagttaagacatgccattcagggtcttttccactcaatgattcttgccattcttggtccatgttatacctaggttatccaccttgacagtatccccctagcctctagagaagtctagtgctccttcggaggtttgttttttagaccatattgaggacgcacgagtggactcaatgtagtctagcccatgagtctctgaaggaaccgtgggttcgttcgaaggatccttcaactgcgggtatgacctatgttttgggtagagtgttctatgattgctctttcgatctcattctacgatgccaacccttgagcctttgctcattatggcggaccaatcagagagtcattttgactttttagcgccatcctgtctgcatctcattcacttggaaatagaggggttggaccatgcctccactttggctgatgttatgaagtggggagtccgatgagttgtaaacgactacaactgaatgaagttttggccccttttagaggaatttgatggagcagttagtgataaccatcaaaattctcaacttccacctccatacagttctcgaggtcattctaccaacctcaagggctccgacgcctttcttc

SEQ ID NO: 67881 - DNA, 391 bp, Zea Mays
cgaggatcacagtttacttctcgattttggaagaagttgcatgagagcttggatacacagttgaattttagtttggcctaccatccccaaactgatgggcagacagagaggactaaccaagtactagaggatatgttaagagcttgtgctcttaaacatggtggaagttgggataagagcttaccatatgcagagttctcttataataataactaccagaccagtttgaagatgtcaccatttgaggctctatacggcagaaaatgcaggactccactgtattgggaccagactggagaaagacagttctttgttatacaagaggcagaagaacaagtgcgaatgataagagagaatttgagaattgcacaatcaaggcaaaagagctatg

SEQ ID NO: 67882 - DNA, 873 bp, Zea Mays
ctcgacctcgtcaagcccgggcgtaaagactccagaacacgtgtttttcgattgggccgactttggtcgtagcttgttgtgcgaaaacggtatccattgatgtcatacccataatatttcctgaccctataagcaaagccattggctacttgtgtcaactcggcactcatagatggatctctttgccctgcaagtattcaaaagttcagagacgctaaattgagttcatagatggatatctttgacaaactaagcacgtaccttatgtttgaaccaggaaatgaaattggacaatccatttcctacaccctttttaatatgggtatcatattcctgtggagttgggtccttgatcgacgccagaattcatgaagaaattgttccatgtatggcgtcacctcttcaaggttggtcaatacatatagcatgatatgtcgccactcttcatgtctcagggtcttggtggtcaaaccacttccacttctgagttggcctctaaatatgatgaggttcgattcattgccgccatcattataacgaggggtggattatgcacgctcggtagtttgtcaccatagtaagttgttgtgaagtttgacacctcctctagaatgtatgcctctgcaatggaagcctcgattttgcatttatttctacatttctttcgaatagtctttagacatctctcaattggatagcaccaatgtccctgcatgcccccattcgtgcctcataagggagatgaagaatcaaatgttgcatcagattgaagaagccgggtggaaatatcttctcaagcttacacagtaacacatgtgttagtctttccaagtctacaatcacagtccatgataactattttgcacaaacctg

SEQ ID NO: 67883 - DNA, 1934 bp, Zea Mays
ggtgagcccaaatggcatcaccctgaactgataatgaccatggtgtgtcttaaaggcagttttgaactcatcctcagcccccattcggatctggtgataacttgaggtcatgtaaagacttgtgaagaatttagttctagctaattcatctaatatctcctctaccagaggcattggaaatatgttcttaattgtcatgtcattcaattttctgtaatccacacagagcctccaacttccatccttttttgcaccagtaacacaggagaggcaaaaggattcacactagggactatcaaaccagcagccaatagttcagacacttgcttttcaatctcagttttatgatgtggtgaataccggtagggtctggaattcactggtatagaacctggcaaaagtgggatatgatggtcatatggtctagtgggaggcaactgggtgggcacagcaaacacatcctcaaactcttccagaattactgttagtgtctcatttccagccacatcttcctctcctttaacctcctctgacatcacaaacacccatacttcatctcccttcacccacttctctaactgcaacacagacacctgttgcacctccctctttaggtctacatccccctgtagtctgaccttcaccccctgatcacagaaggttagcaccttgttgatccagtcataatgcattgggctatgttgtttcaaccagtcataccctaatatcacatcataagcctccaatgccaacaccctcatggcagttctatagacatgcccccagccttccacttcacctctctgacatttttttcacacaccatgatctccccattagctaccttcaccttcacaggagggcagtcttctgtgctcaaccccagtttagtcaccattctctgactaataaaagtagtggagctaccggagtcaatcaacataaacagcacctgatcttggatcagagattgcatcctcatacaaccatcacactctgtcccctttatggcattccaggacagctgatgtaatccttccactatatgctcctcctcctgttctagctttagcaacacttcatcagttagaattgtgctcatatcctccactgtcaactgatgtatttgagtcactactctcttgggacatttggcttgatgcccaggttcaaatttgtctccacatatgtaacatagcccattggcccttctataatctcttaactgtctttccttactcaattcaggattcaggatcccacttctactccccattgcctaagtcttgatccccataaccccctatgacttctcatcctattcttctcggcaatttcttgatataattgagctaatctcatggccttatccactatcttgggtgtcaggcttcaaacccctcacatagtgggtcacaaacaaagtttcatccaactccgaattatgcaaggtagctgcatatctgatatcattgaaagcctgagagtattcttctaccccatgctattgtttcacattgactaacgctctcatggcatgagggtactcttccaccccaaacttctccgtcaccgcatgggtgaactgctcctagtctcccaaaccatgttttagtttatacacctgcagccacttcgacgcatttccctccatgtgcatcgaggcagtgcttgcccagatccactcgggcacctaataaactgtgaaatattccattgcagttggtttggaaacgaccacttcggtagagaactgggcctgaactcccttccttcaccccattgctccctccgttctctacctccttccctgccaaatcctcagcccctctcatcccagcgatgaacatgattttctcgcttagagttggattcgttaccttccaaatccttcgccagcaactcgagtcgaagacgcgagacaactttctcag

SEQ ID NO: 67884 - DNA, 282 bp, Zea Mays
ctttgaggaattgaaggactatataataaagctaacgacactttgtccaccttcgccaggggctcctctattactctatgtatcagcttagcagacaaccgtaagtggtgccttggtccaagaggtggtaagcgaaggtgtgaaaatgcagatgattgtttacttcatatccgaagtattaagtccatccaaaataaattacacagagatggagaaggtcctttatgcagtctgtcggtaccctgaatcaggggtaccccttactacagtatgaaggcacgg

SEQ ID NO: 67885 - DNA, 472 bp, Zea Mays
ccctggagaaaagaagacccaggacatccatgacaagaatgaaaagtattggggatagatgatctccctgcctgagtccccttctatgctgtttttttttaccagggcagccatttaagagaacctgggtagaggaggaaccaagaagcccacaaatgatatctctccaaagatcttcaaaacccatctgcttcataacttcaatcaggaaaggctaggaaatagagccgtgccttgctctaggaatgaaaaagtcttgcagtttgttgaacaagcatacgtatatttgtcatcttctgcattgtccacatctcaacgtaacttgataaaatattatgtatattggaccaagttacgttgcgatgtgaatgttgcgacgtggacgatgtagaagatggcataacaggaacatctcttgcagcggagctagcactgatctagctgcaggtgcaccagcgcagcacaccacacg

SEQ ID NO: 67886 - DNA, 584 bp, Zea Mays
tcaaatcgagataaattggattggagaagtttggctcaaacgagtcagacttgcaccagcctgcggtgcaccggactgtccggtgcgcaccaattctctagtgaacaagtgatggggtggagtggagtgaagtgtttgatgcagttataggtgttggctacttatgctagcttgttgcatgttgccttcgatcatggttctccccttaattttatagacgaaggggaagggaagccctattacataaatctagggattggacgagacagataggggcccaaccttatcatgttgcttcttgtccttcgggatatttgctgacaaaaggacttcttcggctaacatcgtcctcttccaccacgttattgtagccatgtgtgctatgctaatgtgccttgtcttttcttgcagcatacccttggttatcctctaggccatggagtggttgagccatgttcaacttccctacaggtgatgcacgttcgttcgtgtttttcctagaatggtcatttggactgtccctaacattagagctcttttgctgacatacaaactattatgatgtcattgcaaccacatacctg

SEQ ID NO: 67887 - DNA, 555 bp, Zea Mays
gacggtcaaaatggctaccataaggtctacgatatgactgcccccctgaggactatactaactccgagcttatctcggaacgccccagctatttcctctcttactatatcgatggcagccggtgggagaccaccaactctttaatccaatatgggtgaggttgtttggatattggtatgttgttttcttccccattggtttgggttttgcggcgcgttaatacataccctatgaggctcataggactggccatttctttctggccttctggaggctggaaagtactcactctcacatgtttggtaggttatattatggtgctagtgtgtcgcgtggtgagatggggagtttagctgggacgtatgcagagttggatatccatcctccttaaaaaagtctgtgacgggccgtccggttaaatacgcggaccatccgtttacgtgcgcggactatccggccatgtggccggaccgtctggcgttatattcgggctgtctggcgtcatacacggatggttcgaatgggttatctagggtttgcacggtatgtggcggc

SEQ ID NO: 67888 - DNA, 1234 bp, Zea Mays
tgccgacacagctagggagggaatatcgctaccccccttgctgcctttatagtgtcggttgttcttgcagatcagcgagacttcttcttcttcctcttcgtcctcgtcaaacatacagccagcagcatgtgcacgatcacaaccctttgcatcaacctcaagaatggcctctgccaagacatcatcaggaaccggtacagaagggtcggcatcctgatccaagcacgatagtcgccgaagtcgcctcttctttcttttctcctcgacaggtgcagtcgggcggttcactcgatgtggatgctttgggcgggcaccttcgggtttctgagtttccacctcttcaccaaattcttgcctagttgtgatggccatcggctcggtgtgggtagagtcggatgattccccagccaacaggctaagcacaacatctatctcagcgtcatcagtgctggctggcatctcaaagtgagtctacctctcatcctcgggaagactccgaagtggagcaatcaaagcctcaatatcctcaggagagggtcacactctatgacccaggctaccgtcacgagcaggagggttggatacaaactcagagaatggcctaagtggcagcaggttccatccaaaataggccacaggagcaccagcatttgaaaccctgcccctcaggatcatgtccaggcgactcagcaaatcttcagtaggaatccttctgttcgtgacccgtgtagaatcgttgacaccgctatataagtaagcggggtaaaccctgtcctttaagggttgaatgttcttgaatacaaagtcaacaactacagcttcagcagttagacccccatccttcagcgagtagatcttggcaagcaacactttggcctctgttatctccggagaggtcggagattctatccagctaggtgtgcgaacatctggctgcctccccgaccgaggggggagagatttgcagtggttctccacaatgaaccactcaaggcgccaccccttgatactgtccttgagaagaatgtcaagatactctgctttcctcccccggcgaagctctagacttgcgccgccaacaagctggtgctgtcccccagccatcccgggccgacaatgataaagatatttccagagaccgaagtgggggataatcccgagaaaggcctcacatagatgtacaaaaatggaaatttgcagaatggaattagggttcagatgagtcaagttcaac

SEQ ID NO: 67889 - DNA, 368 bp, Zea Mays
cgctaagctacgtgaggggctcaactcatgtagttggctattcggacgtgaaggctacaaacaccaaacgacgtggtgcttgtatgatagactcaaacaccaaccgaaatggtttttgacttataggtagcaaaacccccgtcacctgtgtttagaacccacctaaagctgttcatcgcggtctagaggccattttggagaagggtttacctggatccgctcttaacgtagttgtcacaccgcgtacatggcagtaggaggaattaaatatagcacatcgtgcatctaggaatagcagatgggccgtcggtcgtgggctgccacgacatataactagcacgtccaggtttacgtaatagcacatccag

SEQ ID NO: 67890 - DNA, 433 bp, Zea Mays
cttggtaggatgctctatataggtcagatcaccctgcacactgagttcttccattggcaactgttcttgtgggactctgagacacttcttcagctagcacacatggaacacatcatgtacatctgccagatgacttggtaactcaagttggtaggccacttctccaacttgcttacgattttcaagggtccaataaagcgaggggacaacttccgtttgactttaaatcttctcatacctcgaactagtgacacttttaggtacacatgatcaccttcctcaaactccaactgtcctcttcgggtgtctatataactttttgccttgactgtgttatcctcaggttctccctaattatctgaacatgttccgctacttcttggataatctctaatctgaagcattgtctgtcaccagtctaatcccaatacaa

SEQ ID NO: 67891 - DNA, 389 bp, Zea Mays
gttatcaagaatgaaacattttttaataaatgcagtttgattgggagaaaccatatcctgcagcatccttgccaacctaccagccaacaactttgtcaaaaatttggcaaagccatgaacaaggctgatcggacgaaagtccttcacatgggaaattgttgccataacatcaactttgatggttggccaacacaatttgtagaaacatcctgtgaaaccatctgggcctagggctttatccaaaggtatggttttaatagtattccacacttcgttctcaagaaacggtgcatcaaggctggaacgatcaaatgaaggcattcccaatgcctccagatcaatggttacttctctacccacaacagtaccaagaagctcgtgataaaaat

SEQ ID NO: 67892 - DNA, 277 bp, Zea Mays
ggcatacattttaggtttggctgaaccatgggaaaatcattgcacgtccctacttatctatggtattagatttctgtgaagtgtgggttctatttgagacaaagtctttattccattgcaatctacactttgagtagaataaggaagttatattgtgttaagatttttaaataacctattcaccccactctatacgacatccagatccttagtaccaccaaagggtaatttcactttcgacggcttaaagggctgtcgtcggacgttaaggcaatgt

SEQ ID NO: 67893 - DNA, 890 bp, Zea Mays
attttcagataccccatcagacagagtacatatctggtgcatcagacatccctcttggatgtcacaccgatcaccataccggataccccatgctcaacgatcgcaatggctcgtttcaactgttagctggcatggacacgcatcgaacgtgttcgatgggtgcattagagagttcggtgagtatgcaaaatttatgcactcctttcaatggttagtattagacatgatgactatatataagacccccactggccatttgagaggcgtaggagctaagaaacatagctagtgaattgagactccattcatcttgaccctcaaatgttcaaagatcactcggtgattggcataggtgttttacaaagtgattaggttagttagatcgttgtattagtgcttgcttaggttatgcctagcgattagaagtgatgttatatatcataaaatctttggtgcttgcacgcactattatagttgtaccgagagggactgttaatctggcaaggtcgcaccaactgcgtatagtgtgaccactactgtgtattggagggactagatctgcggtaatttagccagaagctcgatagtggagacgacaaggagcatccaagagagaccgaaaccgtatttcacttgcacgtgaagaagactcaaggatatctatgaagttatatgatcgaaagcttaaccttcatgtggggctccaatggaaactagtaaaaagcttgtgtgcttctccatatctcgataaaagtatctacacattgatgagagttcgtatatctatcatatttcaatgcatttatatcgttaccttggttacatgctctaccttctagcttagttatagactagtaggtgatagaaatagaacgagatagcaacactta

SEQ ID NO: 67894 - DNA, 409 bp, Zea Mays
aaaacgcggtagggtctaaattgaagcttgggtgagtttcacaaattcacgagaggtcgagtatacgcactaatttggaccaagcgaggggggtggaagagtgagtcgacgtgagcatgctctcagaggtgttccgtggcgtcgagatggtgttctcgataccagaatgcggtagtgctcaatcggttaggccgatgagcaacgttaatagtcaaggatgataaaacatggtacagaaggggattaacagacctgagatcggcaggccacggcgagatgcctcacaacggcgagtttggctaatttgggggaaaaactaaattcgctgtctatggtggctaatcggaggtgagagttggtgtcctggcttcgcaacaggctaacggagcaggctgcacactcaatttat

SEQ ID NO: 67895 - DNA, 849 bp, Zea Mays
cgggcctccccttttggtacacacagacgatgtttgaaccaaaggactccttggtcatctgttctgaggtccgggagttgttccttgcgggctttctctatgagtcttgctgtctcagagtctagacgttgagctttgcaaatgaggtcttccatcattggtttgacttcgacactgtcgttgtttcccagacatgcatttagttgcgctgattctttcttccaatcttctaaaaagttggttccttttttcccgaatggttttcgactgagggcgccggctaccacgttggccttcccggggtgatagtgaatttctaggtcgtaatctttgatcagctctaaccatcttcgctgacggaggttgaggtctggttgagtgaatatatacctcagacttttgtgatcggtgaaaatgtggcatttgtttccgattaggtaatgcctccatatcttcaaggcgtgcactatggctgccaattccaaatcatgggtggggtaattctgttcgtgcggcttgagtaggcgtgatgcgtaagcaatgaccttctcgttttgcattagcacacaccctaagccttgcctcgaggcatcacagaagacgacaaaattttgatgaatatctggcagtgatagaacgagtgctgtcgtaagtttctcctttatgacctggaaactcccttcacattttggggtccacacaaatttatggtctttcttgagaagttctgtcatcggtcttgctatgctggagaatcctttgatgaagcggcggtaataccctgccattcctaggaagcttcgaacttcactgacgttggttggctgcctccattttgatactgcttcc

SEQ ID NO: 67896 - DNA, 335 bp, Zea Mays
aaagagtttaaaacaacaaggaaaggggtaaatgcatcagggcttgccttgtgttacaggtggaatttcagcttgcggggcaacttcttcttcgactaccacttcttcttcgttttctatacataacaatacatatacatgaatgtttatgtgatgctatgaatatgccgttataatagaaacacattaagttgtatcttgaatacaactttccttcacggtacacactagtcactagagtttcttgggttagtactctattagggttaggcaattatactctaggaagctagtgtcttaggtttgggaccaaacaatgtctaaagcatgtcaaa

SEQ ID NO: 67897 - DNA, 992 bp, Zea Mays
gtgcaaggttgcgttctggtgcgtgcagcagcagccggaagcgaggccgcccatgggtgcggtggtgaagatgctagagggtgagatgagcatcgctgctcctgtgaaccccttccagcatctaatggcgacgccggtgatggccaacctgtggacgacgacgatggcgagtagcgcaaacgctgtgtcagcaactgccatttctgagactagcatcgagatcgtctcgctttgacacctggctgcaactgaaaatgggcaggacatggtcaaagctttgattagtttgtccaccggtctctttctccttcggtatgctgatggtgcacgactgcacccgaacggtgaacttaactgttaactcttgcgaagctctaaatgtctttgctgcgttgctttgagctctcaagtctgaactgtgaacatgtgttctcatgcctcaacttcatacgatgatttgatttttttttttgccacctgcaccagcacctgcccagctgccgtgacgcgaaatggacccatggtatggcagtttgcacaccctgcttaactagtatccattcatccatattgtcctcaaccttttattgtcatcagtggatctgatcatttgttttgcaccgcaattaaataaataggttccttagggtgttagggtagtacaagtcttcccaaccagtgtttgagactatgcatagataccacgcacaccattagagcaagtataataagctgatatacacgggttgtaagggataccacgtcagatttatgatgatgtagaagaaagaaaagtggggagacaaaaaaatgggtcgctcactagtagctagctgagagtgtactactcacgaactcgaagtgtctttatgagagagaggtagaccatgtattaaatgtgtagcttgtatcatgagagttattagatgagtggggcaaaatgtacaaccctgagactccggttcgattttctaagtataagagacaactaa

SEQ ID NO: 67898 - DNA, 417 bp, Zea Mays
ctagcctagtagtaatgggaactcaagggttagatgtcatcctagggatgaattggctacacagaaaccaagccactgtcagttgtgacaagaggacagttaagttggtgtccccatccggaaaggaggtagtaaccaagctatacttacctgaactagaagaaggagcctgtcaccatttatcagtagatgacgaggagtccaatccgattgaaacaattaggattgtgtcagaatttcccgatgtattccctgaagagttaccaggcatgccacctaaaaggaaagttgaatttgccatagagcttatcccaggcaccacccctatttccaagagagcttatcgagtgtccagactagaattggtggaactcaagaaggaaattgacgagttgttagagaaaggttacatcaggc

SEQ ID NO: 67899 - DNA, 1466 bp, Zea Mays
atgatgtccctcagataggtgcgctaatggagaaataaaccttcggaccgccactccacagtgatgcccaaaaagtggtgaagtcgcccaaggtccttaatggtgaaatcccgttaaagagctaaaatagtatgtcgaagaagaatacatttggaagctatgaggacaatatcatcgacataaagtaatagatacaccgtctttgcacctcgatggaagataaacagagaggtgtccgacttagtctcgtgaaatcccaacatagcaagaaatgaagcaaatcggctgtactaggctcggggcgcctgcttaagcccatgaggcacttattgaggagacaaaccaagtccggatgtggtgggtcgacgaaaccaactagttgagtagcatatacagtctcaaatagtgtgccatgcagaaaagcattcttcacgtcgagctggtgcactagccagtcacatgagaatgccaaggacagcaccatgcggatgatgtccggtttaacatctgggttgaaagtcttgtcatagtcaaaattgagtgaaagcgtgacacacccaacgcgcattgtagcgctctaaggatccatcagtgtgtcgttttatgagtccaaacacatttgttgttgacggcattggcaccatctagacgaggcaccaggtcctaggtctggttggtaactagagccttgaactcctccatagcctggcgccaattaggatcaatgagggcagaacgagccttcgaaactagtgacacaactgaagatgacagaactagacggtcaataggttgttagaacccacgcttggcacacgtgatcatcggatgcgagttaaccagcggcatgaccagcttagcatccgtcggaagaggcatcgacatggtcacaggagcattagttggtcgggggcgtcgccgtttgatgggccaacgtatacaggatttagctcctcgtcttcagcatggttcctaaaagaattgttaacaggaggataatttcgggagctttaacaaacagaagatggatcttggatgtgtatggtatggttacttggcagtttttacatgaattctgtggtttatgggaggccttagaaaggattcagctgtagtaagagatattggataagcatttctggcgcctctccgctacagggcaattttcggtcaatcggcttatgaaatgatcatgcaaggatcaataatctttaagccttgggaacatatctgcaaaacttgggcgccgccaaaatgtgcattcttcatgtggttagtggcccacaacatgtgttgcagttggacaactgttaggcaccaaaggagaaatttacctcacagtgaagtttgtgttctgtgtgactagactgctgaaactctagatcatatcttagtttcttgcgtcttctcacagcagttctggttcttcctccttagccggataggcttggttacccttgccctgc

SEQ ID NO: 67900 - DNA, 537 bp, Zea Mays
ggaagaaagccgaaatagaaccgtcgtgcggttaataggctcacagtagagtaggaaaccaattgctttcccccaaattcatgtggccacgtgttagcatgccattggcatttctaatttgtgtgatcttctatggccacaaccgtgcgaccctatttgagactcattttttcggctaatagaaatgtgtcgtatcacagtaatctgtgagatactaaatattcaatatattttgtgtcccaaatccgttttaatccattccagttacgtttgctttgtaataatatcgtctatatgttagaaacattattttgtcgcaacacatgtcttcgttaatttattaattgtttatttatctgatggtaattaaaatagcaatttaattaaaactaatatgtagttttaatctgtgcaattataaatacatgttaacataaataatgctaactcaaatacatgatcaaatagtcgtctagtgtaaacacaacatctatttagtagtttttgcgtgtcattcacgcgctgtttctacgttgt

SEQ ID NO: 67901 - DNA, 1235 bp, Zea Mays
ggttactgaagcaaattgacaaaattagatgagggtttctttggaaaggcgaggaaccaaaagtaatgagtggtggcatttgccttgtgaactggccaacggtttcacgccctaaaaatattggtggtcttggagtggtagacctggaacgttttgctcgagctcttcgaatccgttggatgtggttccaatggagagaccgggacatggcctggacggggcttgacacccatgtaccaaagaagatagagacttttttcatgcttcaacttcagtgacagttggcaatgggacccttgcttctttctggttctccaattggattactggcacgacggcgcgtctcattgcccccaatctcttcattaaggcaaagcgcaaaaacattaaggtacaaaaggccctgctcgacaatacatggatttctcttatttctctggtttctggggaaactgaaataattgaatttgtgagactttgggaagccatccatgaagtccatataaatattgaggaagtagacaaaatcatatggcgaatactctaccaagagtgcttacctggctcagttccacgggagttttgccaagctcaaactttctccagtttggaaggcgaagacggagcctaaatgtcggttctttgcatggaccctcctccataaaaatattctagcggccaataatcttcagaagcgaggttggaataatgatcctatttgcaagctttgtaagcgagaaccggagacggtgggccatctagcaaaagattgcatattcacaaaatcgtgttggagttggcttagctcgtggtacaacctctcctctctgcaaaagttggaccagtgctcgtcggtctatggatggtggaggaagtgcagactaaaagtagagaaaactgctcacaaggaattcgatggtctctgtatttacttttggtgggagatttggaaagaaagaaatagaagaatctttcatggtcttgagaagagcgagtgagaagtggccaatttcgtcaaagaagatttcaacccgcaaagagcttctagttaggtttagcattttagcgttttgtttgtgtggcgtgctgggtttctagtgggctgttttgctagtgcttcttttcttttctttgccccctctcccctagtgttgtttttcctttccagtgtttgtaagtgtctctttctaataaatttttggccatggcaaagctcttgccgtgtcctttaaaaa

SEQ ID NO: 67902 - DNA, 958 bp, Zea Mays
tttagcggttgtggccgctgtagatccatgcctagctccagccaccgcccattgtcgtaagcaccatgacttcctcctcaccgcctcaaagttcaggcaacaacggcgacacaggaaggtgagaactgagaacttagttcccactccatatttactttggatctacctgtataatcttatatgattgtggtcttccatggaccatggcttaattgttgagtgactaacgctaacccaccggtgatcctcacaaagggacaccttgaacaagaactggctaccacatgctaccagtgatgcagcagccgcaacccctattgtgtcttctgctactcccaaaactgctgctggaactactgtcatgccatacgctagtgtcggtaattcctcgatgtctgacgcaatggctcccgtcatccaccaaaaccacgtgttaaaaagaccatcgccaagaaaataagtcgccttgctactgaaggaccgccttctactccgactactcaagaacaagacgcgtcaaccgtggctggcacacatctattaaaatcattggggtttgatttcaagcacgctaacctcttatttgatcttgttattacagttcgcttaattttatggttgcacatgtatatgtggaatgggtatgcatttatactatgtatttatacatccacatgtatattgttgtcgaataacgatgttgtgcatatatattctgtgttaaaatgcaagagatggttgtacatgtaagtttatatgatctaatgcaactgatcactgctgtgcatattttaagtatgttattttcaattattgttcattatgttaatttatatttatttttcaactttcagatttagtggcagccaacaggaaatattgtcacaacctcaaccagagtctataaatgattcagagccaatacaaatagatgatgatgagcctcaactagaggatg

SEQ ID NO: 67903 - DNA, 580 bp, Zea Mays
tgaggccgtgggtggggccgctgccttctcctaggcgatcgcccccccgtacccttggagatgctcttggctcggcttcgatggcgaggccccgtcgggcggcgcgaggtctgcagcggggacggccgccgcctttggtgaagttgaaccgacagaatttgggtaggcagcgggtggaaaggcaactgggggcccatggaagcccatctggtaggcctcgaaaatcaagttttagcccatggctggattccgttctgatggaaggtgggccattcaacaccacgggggctaattatggcccatccggcggcggttggaatgtgccgaatatgcacgtaaggagggcggcgggtctccttcctgggttcacggtcatttgttcaaggttgggaactagggttagccactgccccgctccacgttccaggtctctgatactcgcggcgacatcattctctttcgcggacgtggtgcgcggaggtatggagaaaggggacgacattcgggggaatggcagggcagagcctcctaggggccccggccaagggaacgccatggggagggggcgttttgcccctcc

SEQ ID NO: 67904 - DNA, 946 bp, Zea Mays
tttgtattgaaaccatctgggcccggggatttatctgaaggtaagagttttataatgctatcgatttccagtttagaaaacggagaatctaacccctgaagttgcccattgctggttaaaagttctgagagatcaaaaccaatgtctgagaagtcagacgaacccagtctgcgtttgaaagcttcccatagaagatcagacttatgctcatgctcaaggaacgtgatcccattgtcatcagtcaaagtagggattgaatttttcctgtgcttaatggtggcatgggcgtggaagaagcgagagcaaatgtctccatcagtaacccacctaatagccgcacgctgcttccaatatattttctgaatattaagcaaatctgccaccttttgttgcagaatttccctgaaattccattcctcaatagatagatcccggtgctcttccatgttgtcaataagttcaattagcaacttgatgttcttcactgttatatcaatttttggcagcgatctctgccagtctttcagaactttccttacatacttgaacttggcagtcaggttcttagccttgtcgggaatgctaggaatcccattccaagtagtttgaaaaaggttcatgaaaccatccaattcaagccagaagttctcaaaccgaaataacttaggtttaggaattttagacttaaaggaaaccaaacagggaacatgatcggagatgtctcgcggcattgtcttagcatgggagtccgggtagacagtcgaccattcttgagagatgaaaaaccaatccagcctctaaagaagaggttcccgctgtctgttcgaccaagtgtacgtgagcccgtgaaggggaatttcaatcaagtctaaattgcttattgcttcattgaacttcagcataaggttagcatcacccccaatcctatttctgttctccggccgac

SEQ ID NO: 67905 - DNA, 297 bp, Zea Mays
gtgagatcgcttgatgcttgggtttcgacctagtaggcttctggatgaagcttcaaggttcccagttacgtttagagataacgcataaggtatcccttagacatgattatgttgaattagctatcaagttggtgaaacagttaagggaaaccggtcggtttacaatgtgatgatgcttgggtatgtttagcgttttacatagttagctccgctgagttcttgttttttgtttggttgtcttgatcataatgtgacttcaattcttataatgttgaaatggacctcatccatttgaat

SEQ ID NO: 67906 - DNA, 454 bp, Zea Mays
aagggtgcagccggaatggcacaataagtgcgcaaaatcgaagtcttttccaaaagactcttcgtgcaaaagtcgcctaagggtgcagccggactctccgtgccaaagtcgcctaagggtgcagccggaataataggtgtgcacaatcgaagtcgctcccaaaagactctccgtgcagaagtggcctatgggcacggctgtatcaacgaagtcgtgcagccttatcatacaaattatggttacatacacacagcgagagcatcacatattacattggctcaaccttcaggatgatacccatctccctgtagttgaacaacattatcctcaattcctcaccctcaaaaatatttcgcagctccccttcacccacactagccccagccggcgaggacaacaattcccgcttaccagtcccgtccacgcgaagatgaccactctccatctcaccaca

SEQ ID NO: 67907 - DNA, 594 bp, Zea Mays
tgaaattggatcccaagtcagttataatgctatttggtattccaaacctgaatattatatcttgtatgaattccactgccttagctgaggtcagagaaacaataggtttgcactctatccatttagtgaatttgtcaactgcaaccagcatgtgagtgtatcctccttcagctttcttgaagggtccaatcatgtctagtccccagcacgcaaatggcccatgttacgggtatggtttgcaattgttgtgctggtaaatgctgctgctttgataagtattggcaagcttcacacctctggactaactcggctgcatcactctttgctgttggccagtagaaaccagacctgaagaccttcccaaccagagtcctggatgctgcgtgtatcccgcattgcccggcgtggatctcatctagtagtttcttcccagtagccgaaagaatgcacttcatgaggactcctgttgcgccccttttgtacagtgcttccccaatgagagtgtagtgagctgactgccttgcgatgcgttttgctgcagttttgtcatccggctcctcttcattctttatatatctgatgattggctccctc

SEQ ID NO: 67908 - DNA, 913 bp, Zea Mays
taaagcctaggggtctaatcgcaagtaaaaggactgaatttaaataactctatactaaacaaggaccccgggttagtttcaaagaagctgagggtgtctttaaaaaatgaccccacggttgagcgatcctgactgtttgatctaaattcgatggcatagattagattcctataacactgaatcggtacgcaaccaaagccatccaatcacgatccaacgatcgctattttaaatacaaagatcggttcttatgcgtatgatttggattagatgatccatatcaccccgaccgaaccattactttcaatctaatcatagccatctacgatcctatcaatggtcatccttcaatgcccaccctacgacggtgacaggcggcggtgccgcgctccacacggcggcgaccatggtcgacgtaggctgacacgctatccaagcgctcaaactcctaaaggaaaggtgctaaacgatgctcaggcaatagcgaaacagagggggattatctcaccggcgattacgcatcggtgatgtttggccacggcaacaggtagcccaccggtaagtcaactgctccgacaagcaattgcgcggggtgctacgtgcgtgattggcatacccagtcatcatccttgaccaccctgcgaatccccaacgacgacaaccatgtggattggccttggcgacctcaccctcactctgagctcgagcttctcacaaggtggtggttctcgggtgttgccttcgatatggttcacagaacaccgatgagatggacgaggcggtccttggtttttatggtacgcgttcggctcaggtcaaggggatgagggcggagacggggcctacttatatgcacacgggcgaggctagagcaacagattccggttgtaacatagtgaaagagaaggggatg

SEQ ID NO: 67909 - DNA, 778 bp, Zea Mays
atttctttttttgaagtactctcaatttgagctgattattctgctactagggtacagtggtcaccctaaatcgtgtgaatgtgagcatgccacatcaacttaaggcgtttcaaacttaagccgattagtctgatagtagggcatagtggtcacactaagttaagtaagcgtgagcatgtcgcaccgacttaaggcgtttccgacttaagccgattcctctgttagtagggcatagtgatcaccctaagtcaagtaagcgtgagcatgtcgcactgacttaaggcctttccgacttaagacgattgctccgttactagggcatagtgaccactataagttaagtaagagtgagcatgtcgcaccgacataaggcatttccgacttaagccgattgcttcgttagtagggcatagcgatcaccctaagtcaagtatgtgtgagcatgtcgcaccgacttaaggcgtttctaacttaagtcgattgcttcgttagtagggcatagtgatcaccctaagtcgtgtaagcgtgagcatgtcgcaccgacttaaggcgtttccgacttaagtcgattgctccattagtagggcatagtgatcaccctaagtcaagtcatgccgatttcaagtcaagcccaatcgaagtcagttgtcaatcgagagtctgaatgcctttggaaaatgaaagctttattgatgatgaaatcttttggttacagagtacaatttcccttcaatgggttttgaggccttgctaagggtagaacattcttgggtgttct

SEQ ID NO: 67910 - DNA, 1236 bp, Zea Mays
agagagtacatgcctagtaaatatgtgatgggaccctcaacctcaaaaccggatgctgtgtgaagacatgacaagtccaatcgtcggtgagcttgcaaagctatatgcactgtcagctgagctctgtagaaagactcccaagtttgggtgttgaatagagggccggctgcttgatcacgatgagctgaaaaccaagtgtccactggcacgtgcctgaagcgacgaaccctagcggtagtggctctatgaagatcaaacaatcacgggtccacaacaagtggctgaacctcgatctcgtcacgctctctaaaatgggcgggaggtactggtggagtggcagatgtagcaggagcgatggaagtaggtgtggtggaggttgcaggtgtggcgagggtggtggtagacactggagtggcggaagctggcgtggtagtggagggtggagtggtagtggtgactagagcatatgagttgtatctggctagagtggagcatgcccaagatgagaagcgacagacatagaaggctatctagtttgatccaatcctcatctgccctccctgctctgccctctcagctactactgctgctactgttctagtgactctgtccaattttctcttcttcttctctccatgcagcactaggtagacctccttgcccttgtcctatctgaacaagcgagggggatcctgatcattgccccctcctactggggtgacatttttagtcctcaccatcctgactacaggaactgcccactgatcattgacacactgcacgagaatgagagtagataagcgagagcagcaaagtagtagataagaagagagataggaaagatttgctaccaggggaatgtctctcaaaaaataccaagcaggagaagagtcacgtgagctagcacgccgtcacattgaaatgacagaagaggtgagcacgtattagtcacatagtcataatcatatgaaatgtgaactaaacatacacacaatggtatgatatggagataatcatatgaggcaattataagacggccacaagcaggtggaaatttgtaaagagttcaaagggtcacaaaattttgggcatgagcaagcttattggatagggcatagatacacaattatgagagaggagggtttggtttggaatttgggctctgggaagacaaggttgtcacacaacactacatgggtttgcatagagtaaacatatcacataaaggagaataac

SEQ ID NO: 67911 - DNA, 849 bp, Zea Mays
acctagtttgcttatagtttttgttgaaatttttttaacttgcctattcacccccctctaggcaactttcatgttcggtgggggatgctagtgcggactcactccgaatggtgaaccacgggggctcgaagatggatctaagacaagggattatactggttcaggctttcgccctagtccaatgtagtgttgatcgtagtattgctttgaggcgtgctacaataggtgtgtttgtgtccatgagaaggaggggtgccttcccttttatatatcaagggtaggaccttacagttggacttgtattctactggagagagagagagatctgctcctcgggttgacatggtgggtccttcatagggtcgtgcgtagccatattcccggcatggcgtcgtcctttcccgctgctctggctcatgtagcaagtacatcgctgacatcttcataatgggttccacggatcagtctcaaagtgcgtcctacgtggcgtggcttctcctgtcgtcatgggcccttcgatacctactaacgtgcgcaggcccacgctcggtatgacacgttgtcccgtcctttcgatgtacgggtcactatagagaccccggtgcccattcagtgtactgtgcgcatatttggacatggcttgatggtaacgcatcccatcgtaactgacatggatcagtagcgctagacttagatctctgccttgctgggtgttcgatagagaattggtcggccagagctgattgtcggagagttggtcgtcggagttggtcatcggagttggtcatcggagagttggtcatcatcggagagttagtcatcatcgaagagttggtcatcatcggagag

SEQ ID NO: 67912 - DNA, 362 bp, Zea Mays
taaaagtacacacagtgttgaagcttctctggcatgcctctatatcattcccaagagtggtggctggcctcctgatgccgaagcgagaccaaatgggacgttgaataattccttttatatcttccctctcaattaaattattcttaacatagaactttttaagaatgttggcaccaggcaacttacatcggcacggggcacgaagccataacaaccaaaattgttgtgatactgctccttgccagtagccttcatctcgtacagcagctcgtgcatattgcagaagcattttgcgcttggctcaagcccctggcttctcacggcccaaatgaaaacccccatcctaataatggcttcagggg

SEQ ID NO: 67913 - DNA, 309 bp, Zea Mays
gcacggtgaccccaacgacatgcggcacaggggcctcgtcaacccgaagcttaagctcagcgggctcagtactagcgtcttgagcttctccatcttcttctcatcggccttaacataaaaccactcatttttccaaccggttggccatttggtgcaatagctaaccactagagtcttcatatctttacggtaagcgaagttgtaacaaccaaaattctcatgaagaccatcttctctggccttcgtctgatagtgaagctcgtgcactcggcaaaaagctttggcattcgggtctattccttggcttcg

SEQ ID NO: 67914 - DNA, 352 bp, Zea Mays
gggaggcttgtgtgcttcttgataccttagtaaaaataccaacacgttaatgggctttatgtcgctatcacatttaacatttctcatttacattatgttatcttggttgtgtgccttaccttcctagcttagttgtagactaggtggataggtttggaacataggttgcataactcctttgtggtagggatagcaacacttagttaaaaccatagttgcacataatataccttggttcttcacataggttctgactaggagataaatagagtttatagtttagagagaaattaggttgcctaattcaaccctccctcttgagcatcaagtgttccttcaagtggtatcagag

SEQ ID NO: 67915 - DNA, 588 bp, Zea Mays
ttcttgctaagggtaaaacttcctgaggtgctctatattccatgaattccctacttctgtgccatccattttagtaagccgatatgatcctggccgagtgacctccgataccatgaacggcccttcccatagcggcgataatttgtgtcgtccttctcccgttagaattcgacgaaggaccaagtctcccactacaaaggatcgatgtcgtatagtcttatcatgatagcgcctcagggtgtgctggtatctagctgactgaattactgcgttcaaccgctcttcttccagtatgtcaatatcttctagcttgatagcttctacttcaactatgttttcgaatatcagccttggtgccccaaacctgaggtcggcgggtagcactgtctccgaaccatagaccatgaagaagggggtgtttccatgcagagctcgactaggttgagttcttaggctccaaaccacataagggaattctctgatccacttccttgcgaacttttcattcttgtcgaagactttcttcctgagtgcttccagtatcattccattagccctttccacctgaccgttggctcttggatgtgc

SEQ ID NO: 67916 - DNA, 524 bp, Zea Mays
gccgtgcaccagctattgtccgtattttttacgaggacgaagaagaggaagaagaaattccgctaattcgtaagaatagccagcgttatagaggtagtggtggggatagtgatattccttctctagctctgtctgctcttgttagccttcaagaattatccataacagattttgaccaggcccttgaggatgtcattcctgaagatatgctgtcggagccgactgctggtgatatgatggatgtttgctctgacattccagatgtgggattagaggtattccgggcagtatctcatgtatcgtcaactttggaaggcagtcttcggtgtcaagaagttggttaggattgctcgactcccatggaggtgactgaggatccttcagccttagaggtggctgttgcagaaaacctagccccccaagggtggtgctagcggttacccagcccccaagggtgtcaccggtagtgatccagctctggtgggtagcacgagctgcaacccagcccccgagggtgttgtcgg

SEQ ID NO: 67917 - DNA, 271 bp, Zea Mays
gaccaaaccaagagatgaagccacctagtggtggaaagacatggagaaggcctaaggccgattttgtcctaagcagggcccagaggaaggaagtacttcagtggatcaagatgttgatgttccctgatgggtatgcagctaacctgagtagggggtgaacttatctactctgcaagtcttagggatgaagagtcatgacttccacatatggattgaacagattcttcctgcgatggttcgaggctatgtccctgagcatgtctggctagcg

SEQ ID NO: 67918 - DNA, 625 bp, Zea Mays
gagccgtcagatcacatctcaacgaccaggattacatcttgctacattagaatcggcgtggatcccgaaccgtccattcccgatcccccgcctcggatttaatgaggccacgacccgactccgatcatcgatttataaacggacggccacgatctacttaaccgaaaaggtatctgcgtttttaatcccagccgtccgcacagatctaacggtcagaggctttcccccgtattccctaacgcagagcacggcggcgcccgaagccgtaccggcggcggcatcgtcggagcagcgtcccaatggtcatcccgacgcccaggacccaacccgaaccgtgctagacgaagtgcgggatactatgaacagcagggaagggctattaccggctcatatcgcgagttgaagccagtccatggtgcagagcggccccggcggcggcgatgaggtacgacgagaaattccgctagcgcagcgacaccacggagaaattaacagctgccgaagcgtcttggagtcacgacgcagcaccggagtgctccacagaggtcccagatcaacatttaaggctccatcgccgtagtaggtgatttatccccgcggcggcatcctctctgttccatctctc

SEQ ID NO: 67919 - DNA, 527 bp, Zea Mays
aatatgtatagctagttcaaatgtgcttctgtaagttgcgtttaacatacattcatcttctacatgttttctaatttattaaaaatcatgttacgtgtttgatgtttaatgataaattatgaagacatgctagttgctttctcggagcggaatatcgggaaatggccaaagccaactattataggcctctattgttgaaggccttcaaaatgttatgttatcaatcaaatatgtttcacgaactttagaaggatagcgaagctagtcttcgtctaaggcagcacgtgaaacaaaaacaaagctaggaagctttagctccatgggattgacgcgcggacgggaccggggcatagaggttcggttccgcggtaacgacgcatgaaacaaaagtggacgagaagaatccaacgatagtaccaagtactggctgatgaagaactcatgggggcgacttggggtgaaaatggatacctcagaatggagaatgatatttcggacaagaggagcatgtgtggcctagccatgga

SEQ ID NO: 67920 - DNA, 493 bp, Zea Mays
gggaagacaagaccggtagcaccggcccgctagggaggacaaaaggcacgaactctctagcggcaagctcatcagagtggatgaccccgacacattccatccaggcagacaatacaccatttcgagcactcactcagtctgggcgcgctcgggatgaagtcacaaggccatggcaaactacggcaacgcaaagcagaaaccttgaaggcaaaggggcgcagagagctcaaaggcgaaagggcaccgcgagtgggagagaagcaagacatggctgctactcgagggatgaacccttatttaagggcagatttcctcgctcacgccccgaagcgtcacgagcaaggtctcccccgatgagcaccagggttcccatcctatgacacgggggccaggcctcacatgtcatacaagctggcccgaagcgcgaagaaggcgaaccgccgcacaaggagcatgcaaccgccccgcggattgtgtgtcccttcattttcgc

SEQ ID NO: 67921 - DNA, 644 bp, Zea Mays
gaaatctgagagatctatgacataagcgcttttacttcttgatagaccaaggtgatggctgactattgaccctacactaagcatgacaacaaggcctagagtcaggaccatgggtgtagttaattcatggtacatatcagatctaccatggtgggtctctactcatgcttgatcctttcaagaaattttagttgttacaagaaattttagattaacccaatgtccctattcacttggacatcataatcctttaaagtatgcatgcttgtatataggcccatctattgtctcattgtttcctactctttcgaggcttgctccaccaccaaatgtgttgcacctcattgctctcattgactatattgagctcatgcacttatcatcggacacctcgtacatccttctctcttgcttctcctcctatggtacctaaaaaggtgatggaccaattaggtcactagttggaggatgtgagagggtttggatgatgagggtgtagtgcaatgcgtgagcttaatgctatcgaggagtgccgagaggttgagcattagatatgatgttgggtgctgcttaacggacgatgggctagcctagaaaattaggagaggaagacaagaaatgggcttatatgcagacatgggtac

SEQ ID NO: 67922 - DNA, 910 bp, Zea Mays
gaaaaatatctagtacacttaaaggtgcaccgacatcaaaggatcatccagcaaggaaagtacgagatgacatctcttgtacctgctacacgtgctcctaatgtaagtaaacccatgaacatctaatcacttagtcattatatagatgagcagcgggatcaattaaaacaatacatggggggtatgaaagagtcctttagaaaattgacatatgcatatgaaaaatccaccgtttctaattttccattgcacgagattgatgctaaggatgtcacacataatttatcagctacaaatgggcatttacaaacccagccattttatggtatatgccaatgaactcatacaccagacaaccacaacctcctccatcaatttggaataaacctaatgtcctgcccatggccagaccgtctgggcctgagctcggactatccacgcctctggtcgatggccccgtcctttacggtggacaacccaaaatcatgccaggacccctatactctttgcaaggcttaactaacacgctcagaccgtctggttacacaagcaccattcgaatatcccgaaccatctacatttcataccagtccatccgaatttaacaccggacagtctgtgttccacaccggaccatccagagatgagtacacagaataggatgcggattattacccacaattctttcacccgccacaacaacacttacccctctctacggctcatcagggttgtagtatggctctaccctcatatgggaatgaacactttttggcctccaggagagcgaaaagaattaatacacaatatggagcgactagggtagtatgagcatgccacaaaatgacatagctcatcatccatgggcaagaggtcggcatatgaagcccggccacccacaccttcaggc

SEQ ID NO: 67923 - DNA, 515 bp, Zea Mays
tcaacatgatgaaaataaggtaaaaatgcatttgtgataatataagagttcaagcatgacaactaaaaaaaggaaaagattctcaccagtctggtctatcacgtacacgttgatgccgacgtcattaaattgtcttgctaaatgatgatacctcccactgtcgcagcaatccaaggaaagtcagggtcagccatcctgtaccaacaaatcggtatagctagaaaaatcatgtctaaataaactgataggaacatgaagtgttcttgcttcttactgtgcttgtttagcccatgtatggcaataacaaatccactaaatattatgcataaggcaaatattaggcacaaagtccatgttctgaaagcaaaaaagtgagtcctatgcaaatagcatgtttggaaaaacttgactaaaaccccatatatgaggtatggtgcatgatatattcaggaaaccatctatgtttcttgtttattcagtttcattatttcttggagaaaaaataaacatgcttc

SEQ ID NO: 67924 - DNA, 472 bp, Zea Mays
gtttaccggatgtgttgtactctctttgcttagcttcagtcgagtctccatagacacttcgtaggaattagattcctccatctctctcctctctagaacctttgctacatatgccccttgactgagcaacgtcgtagtttgcccttgcatcacttttatgccaaggtactagtaaagtaaactgaaatcactcatcttaaatatacctatcatctcttccttgaacaccttgatgagtgacatcaaattgttgtccaacttctcgttctaggtgtgtagtatttgaagtagtccatacaataccttttgcagcttgagcaccatgtgccccttgccagtgatgatgaaactagttggttggtccatgtatattccctcttgcaagtcactaataaagaatgctgacttaatgtccatgtggtgcatctgttatccctcatgcaccacgagagcgatgaacaggcgggccgag

SEQ ID NO: 67925 - DNA, 587 bp, Zea Mays
gaccgattgagaactccgaacacattccaatcgaaccaatctattaatttcgttatcaatcctttatcattcctgccctaggagtagatttagcataactttagttgtagcttcccgcatatccatctccacccctactcgagattctacgtcgtctagatctgtcttaggtgccatgccgacaccaaaacgaccctaggaatttactcctcccgggagcaagatcggatcctcagagtgaaatcttaatccctaggcgactctacatcatttaggaacgctccgggtgacatatcgacccggatcaccctaggatcgatctctcctcctaggggggcgagatctaggttcccacggggaagaatacgaccctacgccatcatggaccgtccgaagcgatgcagggaaggagtcgctcctatagcgagatcacggaccgtccggcccagagccacggagcgtcctcgccgcctcataggataccgccagatggtatatccttagtgtttggtgctatatcggcgtcaacagccggcacacggcaaccacaaggtgcacatggagatggagttgacaatgctaggctg

SEQ ID NO: 67926 - DNA, 365 bp, Zea Mays
gccgttggccgcttaccgcctgcgcgccacgtgcttaaccgcagtaccacgtcacagtgaatcgcgttatgcatgtccggtgatcgccggtgagtccgccacggtgaaagccactaatcgctcgcaccagtgcaactctccttctacggccgccaccgcgccattccaaatttacgcgccaccacccccgaagcctataaattgagcgtgccttcgggtccgtaaggtagtcaagcacctaagccaccaagtcgtgcctccaattgctcactagagctcgccaattttagatttcccccaaatcagccaaaatatcgccgcgtcaacacctcgccgtggacacccttctgcaggtcagttcaagc

SEQ ID NO: 67927 - DNA, 333 bp, Zea Mays
gtgcctggggcgctgtccctgcgggtgctgctccaggtggcggggctgaggtgcctcttccagtcagtggtctttctctgatgcagtggatgggcatgaagttggacacttttgatggcagtggtactccggtcgaggtggcagattggctaacttacgtggaggatatgatgaatgtctttgagattgtgtatggtgatcgtgttcgctttggcacacagctactgaagggagaggctcaaatttggtggagaggcgtgcaggcagcgcactcctcctcaccaggagtcctgtcttgggatgtcttcatcaggtagtttgaaaggaggttct

SEQ ID NO: 67928 - DNA, 942 bp, Zea Mays
aaattgaaccatgttcaaaacaatatcagacatagcacgagagtaccacatgcgatagttcctaactgggtgctagctcatgtcttacataagttttaagcatcatgtatttaactaattaatgaaataaagtcctttgagtacacacctaacttattcttgagtaaaatttatacagtgaaattagaatatttattacttcacatatttcgctaataacttaaagacctaaacacataggtggaagaacaatcaagaagcgtagcaacccaatgcttccctttcaaccaagaacaatcaataagagtatccttcagagtttgaaaacttataacaacatcgtacagttcaacttatcatctagttcagagacgaaagtgggttaataaaaaacatatagcattctatgtttacattgcgctgatgtagaaggagctgcacattactttacacaccagaatgagacatcctggaagaaacaatgaccatcgcgacatgcaagcaattgattaagcagaaaacctggagtcatctactccatccattcgcagtccaagaagtggcttcaagaatttgttttgggatcacaatgcaagccttcaataattcgaatcatcaatgggaccagtccctgttaagacatcgcttataagaaacaacagaaccaatagaatcaaccagctggagggaagaagcgctaaaaatatagtcaagtattgccttagaatattcagatggtttttgccacacccaaatatgagaaaaagtgacactcccattgcttaatgcaagtcgaaactgcattcatgaattttgatactatgatctgcgcataagtaggcatcaattatgctgttcatgtactattaaataatttttaagcttttaaatatcagacaaaggaaactgtgcaacgaaggaaactgtaagaccaattttttt

SEQ ID NO: 67929 - DNA, 281 bp, Zea Mays
tggatagggtgccgacgcggtcgcgaatgcatcctaatatttcctcatcgacctcgccaaagagcatggaccctgcttggtaaccacaagatacaacaaattcttttaattctaacttatcctcatcagaaagttcttggccgcccaggtgccgaagatcaaaatctttttcgtccgaaggagtattatcaattctctttcctttatctggcactgcggccaagtcttcctctgcaaccacatctgcaaccacatctgatacaagcctgtcaatttccgac

SEQ ID NO: 67930 - DNA, 340 bp, Zea Mays
gaagtgcctcaacccaatagggaggaggaaggcgggcttgaaaaagcagggagcgaacgatgttgttgaccatgcgcaagatacgttcggcacgaccattctgctgggaggtgtagggacaggacatctgaaggcggacaccgtgagagagaaagaaagctcgtgcgtgagagttatcgaactcacgaccattgtcgcattgcaagcttttaatggtggtgccaaactgagtgagaacaaatgaaaaaaagttagcaatggtggggaaagtgtccgatttgggacgaaggggaaaagtccacagaaagtgggagcagtcgtcaagtatggcgagatagta

SEQ ID NO: 67931 - DNA, 736 bp, Zea Mays
ctcgattccaggccggcatctcgttggctggggtaggctgtgttgccctagcagaccatctccacgcggcgacgtggccgcccaagtttcggtcacatctgccggaggagtacgatggcacgacgagcccatcagaattcctctaggtttatgtcaccgccattacggcagcgggtggagacaccaccgtattggcaacctacttccatgtggccctatctggaccagcccagacttggctcatgaatcaagccccagggtccatctgctcctgggaacagctctgtgcgcggtttgtggcgaacttcgctagcgcttaccagcggcacggagtggaggcacacctccaccgagtaaggcaggagcctgaggagaccctccgagcgttcatttcccgcttcaccaaggtacgtgggacaatcccccgtatctcggatgcttccatcatctctgctttccgccagggggtacgtgatgagaagatgttggaaaaattggccacacacaatggggacgacgtcaccacactcctcgctctggctgataagtgcgccagagccgccgagggccgtgcttggcactcggtaccacaggtagaggttaccaagacgggcgactcggatgtcgtcacccagggcgaaggcaggaagaaaaagaaaagcaagaaccacgaccatgaaaagccacggttcgctatttcagttgctgccgccactgccgggggccaaggcgagcg

SEQ ID NO: 67932 - DNA, 467 bp, Zea Mays
cagtcggaagcccgtgcaccatcttctcgcgtcccagcttgcgcaacgcctggaagttgaggtggccatagcgctcatgccagcgccacgccacgtcgccgatccgcgccgtgaaacacaccggagcggcgatggtcatgtcaaggaggtacaagcgattgttgtgagcgttgcaccttcgccagcagttgttgctgcggatcatggagacgcatcactcctcccccgatgctgattgtgtagccatcctcgtccatctggccgagactcacgatgttggtggtgaggcacgggatgtagtacactccttccaaccgacaatgttctccggacttgcaagcgaagaggactgtcccctttcccttgatggcgaccatggacccgtcgccgaaccggacagatccggtgacggcggtgtcgagctcggcgatgatattgtgtgttcccatcatgtgatttgtcgcccc

SEQ ID NO: 67933 - DNA, 695 bp, Zea Mays
acactgttcgaggccaaataccaacgaactctaggggctccacacgacgtgcaggaccttggtgtcagctctgcaatgtggccttgaactccacctttgtttctactctacgagccaccacctctttgggatcaaagaccaatattccctagatcccccctagatcccactcatggggagtcaagtccttggagtcctccctgcaaggtgctagatggatcgcgatagatcaccagatcgtcagcgtaggtcattttcgagcagatagttacacttttgtctgcggaggcgttgaccgtccacgtgtaggcggtagaccatccatgctggcatattggcttcgcatggaaccttgatctcgtctctcatgagggaatccgtcgaggaggagagattgtgctgctttaggatcgacaagtcacccaaaacgtgtctagacgatttagagtcgaagagaggtgaagattgagattaggaaactacaactaaagctatgctacgtctactcctaaggcatgatattgtagatagattggtttgattggattatgtgtgttctcaatcaggcgttccccttcatatatatatggggaggtttggacccgttcataagtgatatccaacaacttctcgtgagtttgttaggataagcacgcatgagataaggactctagcttgaactaatataatcgttg

SEQ ID NO: 67934 - DNA, 819 bp, Zea Mays
atctggttatatatgaaaaacaaaggactaggatggattatgtcacctactgaggtgataggcagagtggattcattatcgacaatgatggaagaagggaaggtggggctgcaaggatggggtaaagaaacagtactgtggtcagaagtggtggggtatgaggaagagttagcaacatagtcggtggaagtgggttgcgatgacacagtaaacgaggagagaacgggggaggtaccccacggagccaccaggagaggtgttgggttgacagtggcgaccaagctgacgacgagtatgggtagtcgagacgacaatgtcttaattgttatggagacaatctcggcactacggaacacaaacagctcagtagtgtgttggtcctctcaaaggtggatggaggccatagggtggttggagctcggcgcagtcatagagaacagtgttcatgaccctatcaaaggctatgaatgtgccctgttgtcgtgaagggacatagggaggcctaactaaccacgctgctctagccaaaaatatccactcacgtttcccatgaccgaaatccgctaactgacatgtgtatccccttccccgtgatatcgccacgggcgggtagttgaaaccacccgcgctcggcgcgggccagctggtcggcctgtgctccagaccccgcgcaacaaccctcatcgatttcacaccaccgagaacatcgcgccgtggggagagagatcagggggagggagttttgccgccgccgcgggctcaatcacccgccgccgatgaagccttcgtgaccatctagagtgcactacaagaagtctg

SEQ ID NO: 67935 - DNA, 407 bp, Zea Mays
atctcactatattgcttatggaccgcgggttcattttgtaactcaacaggagctcttaaggaaaaagggctgaccgaaagggtatcggacgatcctagccgtccgatcggttgcacacggtcaggattagattccatctaactctaactagtacactatgtagaccctaggatcaagatccaatggccatggttttaaatagcacggatagcaaggcgtccgttcgatcacaatccaacggaccagatccaaccacgaaacagtgagctagtatctaatctagtgcgtccattcggatcgaacgatcatcgctccgtttgaacccgattgaatcctgcccacaaatatccgatccaacggccaccgcgcccttcctccacgaaccacaccggacggcggcgtaaccc

SEQ ID NO: 67936 - DNA, 572 bp, Zea Mays
ctctcaggactgggcctcaaataccagaaagagcaggggctaaatcgcaagattcccaagactcagtgaatagtcacaatggaccgcgggtttgattctgtgaagttcagggacttatttgaaaccttgctcggtcgaagggttacgggaccatctgagccgttcgatctagagtgaatgactcagattagattatacacccgcgcgaaccggtatgcaacaggaacccttggatcaaagatcaagggtagggatttaaagaagtcgagatcacccaggattcatccgattcgatcctacggcccggattaacccttgcctaaacgattcgcgcgaccaatctaagccgtctacacgtaatccaatggccagactaaagggacgaacgagatatcagcctggtcaaaacaggaccgttcattcacggatcaagggctcccgctccgtcttctttccccccctacgttggtcgctggcatgtcctgcacagccggcggtgccattgccgcccacggccatccattggcccggcgcccagacaccatcgccaactaatcctacacgtagctgac

SEQ ID NO: 67937 - DNA, 438 bp, Zea Mays
ctgccagcacgacggagccccgatgagcacccaaccgggacaacgaattcccccaatggctcccaacgcaccgaacgaggcaccatgccctcggcggcgatcctcgcccgaggtagccccaacccccaacagccacgagcccgattccaaccaccggtcgccactatacgatgcccagaacagcacaaataatataggagggagctcaccggttaatcgtgttgcgtcgaccccccgtgacttagctcgcggcggctgcttcccgtagaagtccggtgatagggtctcccttcctcccggtgattctgtggcttcgatggtgtccagggccacgggcgctctgattttatagccaagaggaagggagaagtccgggcgagaggaggccgagatctccggcgaggttcacgcgattctctagcgcgcgtgggtttgttg

SEQ ID NO: 67938 - DNA, 397 bp, Zea Mays
gaccaagtacctcaccttgggccgcacatgtcctgttcgtggagaagaaagatggcactaggaggatgtgcatcgattaccgagctttaaatgaagtcacaatcaagaacaagtaccgcctacctagaatagaatatctgttcgaccagctaagaggagccagcatgttctcgaagatagatcagaggtcaggttatcatcagctcaggatctgaccttcggacatctcgaagacgacatttattaccaagtatgggttgtatgagtacacagttatgtatttttgtgtaacgaatgcgccagccttcttcatgaatctgatgaacattgtgtttatggattatctcgacaagtttgtggtggtattcacatattctcaaagtgaggaggagcttgt

SEQ ID NO: 67939 - DNA, 445 bp, Zea Mays
tttaagaccaaatgtcatggcaacccactcaaataaaccaatgaagcctagacatataaaggccattttagacgcatcttctttggccatgaaaatctgattatatccggcattaccatcaagaaagctaataattctattccctggtgcattattgattaatgtgtcggctatgggcatgggatattcatctttaggagttgctctatttaaattgtgaaaatcaatgcatactctaagcttacctgactccttcttctccaccggcacaatattggagaccgactctgcgtatctgcaaggtctaataaaattagcttctaatagccggtgaatttcatccttgattcgtgggagaaggtctggacgaaatgttctagctttctgcttgaaaggtctgaaaatggacttaatgggcagccgatgctctacgatctcacggctt

SEQ ID NO: 67940 - DNA, 301 bp, Zea Mays
cttgccttggctggaactcaccgggttctgctgattattggagttattccgcttcggatatgggcagtctttaacgaagtgtccagacttcccacaattgaagcagccagtagatgaactcgggagtgcagggaaacgagtaccaggggcactcggctgatttgttgaggtgggggcagtggcagggtggataaagacaggttgtttaaaggggtaggagggtggacgtggtgaagaacggttttgattaaaagatcagataaccaacctttgtcgctcctcaggcccttggttggacctg

SEQ ID NO: 67941 - DNA, 862 bp, Zea Mays
ggatacccaacgcgatctactgtcttcgatggctaggacgtgtattggggagggggacttgtggaatctatttgagggcgaagagttgaagatgatgttgtttaatttcctagaggcgggtcttattccgaaggtggagccgatgtagcatttttgctggcctcgctctcgtgttgcgatagtgagtgaaaacgttgccctcccccgcttcgcagtagagagggagggcggcaaaatatgatttgtattacttgtatgatgtggccgatgggccctttgttttatgtatctaaaatacgatggcatatcgcgtgctgcatttattataagattgtctcggtttgtaatcgtgttggcgcggcacttaggatgaggacttcgcttcccgcggttgatgtcgtgcgcttctggcgcgtgcccggctgcacccttaggcgccttttgctcggacgtgtcttatagcaaatacttcgcaccctatgggtgatgtcgtgcacttattatgcatgcccggctgtacccttagacggctttcgctcggacgtgtcttatagaaaagactttgcaccatgtgggtgatgtcgcacacttattgtgcatgcttggctgcacccttaggtgacttttgcttggacgtgtcttatagaaaaaacttcgcaccctgtgggtgatgtcgcacacttattgtgcttgcccggctgtacccttaggctgcttttgctcggacgtgtcttatagaaaagactttgcaccctgtgggtgatgtcgcgcacttattgtgcatgcccggctacacccttaggtggcttttgctcggacgtgtcttatagaaaagacttcgcaccctataggtgatgtcgca

SEQ ID NO: 67942 - DNA, 582 bp, Zea Mays
accgtcgatgcggtctttttcgacatgttgcgtcggagtttttgcgggggatttttgcaggtatattacatggctccgccttattaaaaacctcaccccccgggaggaaaagagtgcgggccgaaatagtattgtttggtggattacaagggcgcgtgggccctgagggtttaaacaaaaaatttacggagattgtcaatattccaggaatgctctaggtctttgccggatggcgttgtcagcctatacgcgctgggggacgccttcgatttgacgatgaatggaccctcccacttcggctccagtttgccccgtgactctgtccgggtggtccggacgagtacgaggtctccttcgttgaactctcttgggacgaccgcgtggtcgcgacaggccttggtttgagcttggtatttgttgagggcctgcagggcgaagacgcagtctctgtcgatgaggtctttggacgttggttcgtctacgtcggggactactgatgtgcttgttcggggcgacccatgctttatctcttgcggcgtcatggcctccgatccatatagtagacgaaaaggtgtgaatccg

SEQ ID NO: 67943 - DNA, 841 bp, Zea Mays
acagctcggaggaacttctgtcgatgcccaccccgttggcagagtcattggccttagcagctagatcaacaacctcagcgccgcctgcaccagcagttcaagctcctgcacccagaggcgacgatccagacgactctagggacgatgatgaagatgacgacgatgacgaagatgacgaggaaaacgtcaacgaggaggccaacgatgctcagcaggactacttcatggggttttggtctgtcaccgaacattacacatcaatgttcgagacagggcactttcccaacctgttgcaagacgtgctgcacgcgttgggaacctatgtccgagccttgtacgagacaaggcgagtgtgcgagcctccccgggcttgctactacatcactcgcatccacgtcagggtgatggatgcaggggatagggagttcaggactctatcagctcatgagtccctaacaccgctatctacctacgctgcttcggtcagcaatgctgccaaacggactctgtggtctctcagccacacctaccagcagcagctgcatgacacaaggttcaagcatcttcctctgtgtctgagtggaggaagccagaccagcatcgttctaggtggagttggtgaggatcgccttaacaccctagccggtgtagtggccggtcttaacaccgacctggacagtgccaccttggatctctctagggtgcacttggagctggaggacgcccatgccaggattgcagccctagaagctcagcttcaaggacgggatcccttgaagcccaggtccccgccatggcgttgtcccttccccgcaagaggattcgttatggggagcccgga

SEQ ID NO: 67944 - DNA, 503 bp, Zea Mays
aaaaaaaggataaacaacgcaaggaaccaagaatacgtgcaactcgacaaaatcctggcatgaaccatgcatgcgaggctgctggccatcagacgttgcatgcgatgtgcgctgtatttgaccgtgtagctaggaagtaggatcttgactttgaccatcgctcggccactgcgtgtggactcgaccgctcatcgatccgccgagaactccgccagccccaagctcggcgctggtctgtaagggcatgggtcgtgtagagccaggagcatgggctgacgactggccgcatctatacacgacaactcaccaccaaggctactggctgcgacccgcgagggaacgtggtaggcgtcctcgcttggcgtgattcgtgctgcaaggtgcaagggccgccgatcggaggaggccatggagcgatgcaacccgtagaaccacgcgacgccatgctcagcgacgacaacaggcgtgcggagtgctggagcccgccagcggggcggcaccgg

SEQ ID NO: 67945 - DNA, 475 bp, Zea Mays
cagaaatgaatcctccaccgaatcccccgcctattgatgatgtgactactgctcaaatgcgattactacaacaaatggccaacactatgacagaaatgcaagcacaaatccgtcaagaacgacaggaaatgcggcaagaacgccaagaaatgcgccaagaacggcaggaacgacaacaactaccacctccaccaccagcagctccacctagagataagcaccaggagtttatgagtcacaagccacctacattctctaactcctcagatccactacaagctgacgactagttaaaatccatggacaagatgctcaatatagctcagtgcactgacaggaagaaagtgctatatgcatcgggttgcctcactggccccgctgtggattggtgggatgcatactgtgtagcacatgttgctgctcacaccattacctaggcagaattctccactcactttaggaattaccatattcc

SEQ ID NO: 67946 - DNA, 525 bp, Zea Mays
cttgtatggtagtaattagggagatttttctaaagaatatagcctagccaggaacccgtgaaactatgatcagttagaggcattttgtgaaagagattacgttttagttagtttattattttcagtctattttatttctttcagaaaaaaattgctatagtctatgtgttgtttcttggccttctaagtgaagaggtgagtaaatacaaatcttttttaaatgattgtttattatcctccaatcatgatctcctctatgtgctgcaaaagttggagcggctgatgcatgttttgatttaaatattaaggaagaaaaatgtttccaatggcaaataagacaccactttaatttctgaaggcaattaaggaaaacagaacttttgtagtatatcctaaaaacacacaggttacaatcaagttacctcaactgaggacggacacaagtagcacctgcctccaagtgcactaaacccctagcgcccctctaactgataagatagttagattaaagatacatgttcaatt

SEQ ID NO: 67947 - DNA, 584 bp, Zea Mays
atttatcagaagcacagggggttctgtgcaaattctaggaccttaccgtaatgcttctaatataattctggacggtgggttgtttttgaaataattcagggtctctttagcaagattaccaggccgaagaggtatctcttgttgtgagccgttcgatcaagattcggtggataaaatataacaatgaagggcaagtaactgtaacccctgatccatgtatcagcggtccagatccaaggcaggcgtgatccactgtgcaccgcaggatcatgatcaaacggtcatggtttaacacctgaaccgttttccagggatcaaatcaaagtcgtccgtccatagatcgatggccaggtggtcgtcttcaacccccccggcactcactcctttcttctggccgactcaagacggcgccaggagcgcacgatggtttatccctggcggctaaccagtactaaccgaaaacctcggcttgcattgaggatgacatgatagcggcatagacatggtcgagcagaggggcagggcatgacggagtgttgcagggagatccagtgcttgaggtgccgcgcgccatggaggccgag

SEQ ID NO: 67948 - DNA, 374 bp, Zea Mays
agaaaatcaccaatgagatgctggctggattatctgaaaactccagcgatagtgagagttttgacgtagaaagtggaaatgaagatgccaaagatcggccatggagaccaagccatgttttcggaaagtcgactattaaacaagggcagatcgaagcaatgagaggcagatactttcgtgatatttcaatcgtgagggccggaggggagaatactgttcctcttcctgaagctgacgaagtggtaatttttagaagcttcatgaaagctggacttcggatccccctagacaagatgttggtcgaagttctaaaaacttttgaaatttatcttcatcaacttacccccgaagctattatcaaagtaggggttttt

SEQ ID NO: 67949 - DNA, 1016 bp, Zea Mays
cggcgacggacggtggcacgagtcgtgctagcctgacgtcactggtcttgctcacatagttacggtatgaagttcctagcttgaggccccaaactcctgatgcacctgcggctcgggcttggtctggtgcaagaacaataaccctgtggggaacgacgatgtagtggtggtgcagcgacgtccacacacaaggacaatgcaagagaggccagtgtcatcttccatttctttgctgatgatttttctctaccccgtggtttgacgcgagtgagggagggggatcgatgcgatagggcgagggagggctagtgacgggtgagggaggcgagcgatgagtagcaatgggcaccagccaccgagggatagggttttgcagtttcgtgggcctaatgctacatgggtcttgcccaggccaatgtcctgggtggcctgggcctaaatccacccctaccttcactacatattctcgccacctaaaaaattgagtggtactcccctttgtccaaatatataaagcacaaccactttttattcaattctcataataaaatgtgtgctctctctacatatgcgtacattggtacataagtactagtgttgaaatagagaactaaatgtatttcctaatctttgaactagatgtagttacaccttatatactagaatggggggagtacacccttgagcttatggacaccgagtcttccccttgcacataataattgtctattcatgaagcaatggaccacatctatactaatattgagttgaggaggataatagaaactaactttggttgtcgatatgtaggataatatgctagagtgaagtaataagatggccatgatgttttatagtcaaagaggtattgtggaaggaagaaaaatcatggttgcaagttaacttggatgagggttagggtaaagtgggaaatgtatatggagttgatcgacaaagtaatacaatatatgagattatttcttctcttcccctcttttaattgtattatatttttc

SEQ ID NO: 67950 - DNA, 421 bp, Zea Mays
atctttgtaaatgcattcgtgtgattaaggaagcttcgtgtatttgttgtactttactttgtgatgcgtgaaaccaaaatgagcttttttgagatgaaggaaaaaacacattcccttcttttcacgcatggcaaaggcacgcagttaccatgttcttagtagtaaaacaaagatcaaacatttcaacataataaacgagctactttgacatttatttacaacatttattttacatggtcgatatagagacttgctacaaggactttatatacctttggtggtacttgatatctgcttgattatgtccttctattagagagcttcgatgatttttgccacctgtactaggtgatggaccctgtttatcatgcaattcgaaggtagagggaataacctcccggttttggaaggcaaaccgaat

SEQ ID NO: 67951 - DNA, 287 bp, Zea Mays
gcccttataagtgcaacacggccccctttggctaagcaaggtggtactaacccagggtgtgcataccggtcccttacaattgtaacgcacccactaggccagtccgcccaaagcccaccatcgccagcgcgtcggacgttcatgcactcgtgcgaagcctattcagatggacacctcgctctcaaaacctaggctgagagaggagggaggcccgcccttataagtgcaacatggcccccttggctaggtgaggtgatactaacccagggcgtgcataccgatccctt

SEQ ID NO: 67952 - DNA, 450 bp, Zea Mays
tatccaacctacctacatcataggttgcctagtccatatatccccaaaagcaaagttaaactctgttcaaacctacctcatgtacctcgactattctaactatatgtcctaaactctactaacaactccaagaataaaggccaaagaagacaaaccacgtcaaagaaggataagcatcaactcaagtcttcaaagatcgagttggatcgccagatgaatcaagatccacaatcttggatggagtcttttcttaccccattgctttttacccaaacctatatatgctttaaaaatatcctttatcctacataataaaatgactatacatatagatacacatgctctcctaagcactcactaatgaaaaaagaggcttttgatttttgaaataattagaaactaaaagctaaaattgcgaaccactcttcctatatcccttttcttacaaat

SEQ ID NO: 67953 - DNA, 563 bp, Zea Mays
tgacatatcaggaatcattcaatctcctattgtcacatgttttggattttagaaaccaacgtgttatgttaactttgaagcccaaacagccatagttgcctttaatgttgttagcacttatattgggacgaggtatcttgttcaagagtacttagcttttaaaatgtggccatttgtagctgagtgggacatgccgaaggtgtctgaaggggattctttggatgctgagcctgggctaattaggcttcgatgtaagtatagattcgaagataagttcggagaaccgagcgatggttggctagattatgttgaagcaaaatgcaatgaaattcttggtaattttagcaagttggaagcagaggctttgtcgcgggccttctgggctcaaaagagatatcgactaaatcgtgtttttgatgccatcggatacttctatccagactatcctgtcatggctcaagattcgaagaaaaggaagaagaaagtgaccataagacgaagcaaggttccgaaggttcatgacggatcaactcctcaggcttcagaggaaatctcagtaataa

SEQ ID NO: 67954 - DNA, 1323 bp, Zea Mays
tatttttatccgaggcttgatatatgagattgaaatctcctaacgccatccactttgtccatcgttgtgctgcgaggccacttagttcttgaagaaaaactagtttctcagcgctcgactgtggcccataaacccctgtgatccaccaagctgaattgtccgccttcatagtgatcatggccgagacagtgtgtgaggtggtgtacacttgcgaaagtgagaaaaagtcattcgaagctgcaagcagaatcccacccctagaatccatttgcaggcagcacaacagtgttgtttagaaaattcggacccaaggtacgaaggatggttgcatcgtcgaatgtagtgagtttagtctcctgcaagcaaacaatggtactactagtatctcgaactagttcttgtacagaatcacgcctggccagttcattgagcccccgcacattccagctcaaaattttgcagttatgttgagacattggtagacaactgagacccaagataaatcagaccaagccaaggaagtggcaaattaattccattacactcaaaccagatctagaacagggggtactgggatgaaccttgaagttcccagaacactgcagatagtagacaaacaagcacttgtaacgacgaacgacgaacgactaagctgagtggtccagcagaatcgcagcaattgaaggcccctggctgctgccgtgattctcggccaccaaacaaattggttgtgcagatacaccatgacgcattgaggacaaaagaacgaagaagtgctagacattgcaaaagactagggcccccgcagagcgtgccagaccgcatgtcttaaacctgcgccgtaggcccctgtggtggaaggattccgcagaggtccatcagcgcttgcagcaccaaggacgacagtggacccttgaagaggttgatgtaggtctccagcgtggcacttgcagtagcctgatcagacggatggccttccttaggcagcaagcccaggcgctttagcaggacctggcgtgcgcgttcctggatgttcccacgcggccatgcgatcgccgccagccgcatgctcttgcgagtcggcctagcagcttgcttcttctttgtcttcaggtttggtggcgcttgatggagctcctggagcagtggtggtgcaacagggcaggtgtggttgctgatgaaggacgccacggtggtagtggccggctcccctagctctggctctgggaaaacagttgtagcctgctgagcggtctccatgccggtgacaagagttgtctctgaacccacagctacccccagcgctgcatccatcgtgatggt

SEQ ID NO: 67955 - DNA, 1356 bp, Zea Mays
atttggctctggaagaaaaagaaaaaggaaaaacttgtaacagtattgggccgattctgacccaggttggcccaacaacagcagatacgcgcccgcgcgcgcgcctgtagattttgcgaaaacggccccgaggtcttaactaatctgcaaaacattctacataatatctaagagtcaccgacaccttacaccgaggtccctggaactttgcttcttccccaaatacgtccctgaccacggcgcgctcgccgtcgactatctcgctgctcggtctggccaaaaacttcggcggctacccaaaccagctgctgggtaagcatcactgacccgaggcaaccatagaacaggctccaatgtgactaacccggaccaggatgtgcttgaccacggtgatggcggacaccaagcatcgatcaatacgtttcggttgcatacgtaaggtaaaactccctgggttgcgtggataacaatcccgagcacatgagggcgctaaaacacgagcaacaagggcgaggacggacctggaatcagctggccgcaagtaggcggttcacgacggcgcagtcgaccgaattggggggaaaacggcgttgcggcgactctgggtgaaattgggggtggggattgaggctacacgaccgtaagaaactatagcttcaccgtgcagactcaatttgggagaagggggcagagacaacgcgaattttggattgcgatcagctcactggtgaagaggtaaacacctcgtcgtggctccctgctctatatataggcacgacgatccgacgatcatttcacatgccgaccacgtcagtaggaggcacagtgagagaaatcacggcatgcgtgacagcgcggcgagagttcactgagtcacggtggtcgccggtgaacaactccggctggctcggggtatggtgccacgtacgcgttatctgactccggcgttatccgttccctaccacgcacgaacccggacggcggtggcacgaattttggcgcagagaggttgccggcggtgagggtctgtcacactggcgatctgatccatctcgggacactgtaccatggcgagggtcattctgatgaactgacagagcaagtttaggtcacattttctctaatatttgcatgagaacttcatcaaccctctgtaccataagttatagacctacagttaatcttcaactttgccacaatgcttaccatcaaatagtcactgaatcccattcaaaatcgagctcaaagttcaccccatcacactgctattgaaaattcagtccagggattgcctgacagcccgactttgagggtgattatctccaattttttctcaacaactatgcttacactttt

SEQ ID NO: 67956 - DNA, 494 bp, Zea Mays
gttgggattcttccctcttccgtcattaaatttctaccctttaactatctttgttcccttggtattgacatgctcgtacccctagattctttaatactcttgtttcaaatacttacatctgaatttctcctgcctacttaaacactccagtttatgtgtccatgaacttctggtcttccgagatccctccctatttcgctgttaagtcattatcctctgcctttttctattcccttgtctaggtacgctcgtatcattggaatcttgcatactcttatttttatatatgcttacctttatatcccaatgactgttcaagacattttagtttacatgtccttgaccacccttgtttctaaatgatccatgagcggtcattttattttgcacatccttggtgatgtcgttaattccttgtaacttctttcgataatgaatttttatttcaactcttttgtcggaacctcacttatcttattcttgattgttttctc

SEQ ID NO: 67957 - DNA, 364 bp, Zea Mays
aattcctggactgtgcaccaaaattaacgaagtgcaggggctaatttataaaatttctccagacacagagaccccacgtggtggactgcgtgttgattagctatttctcggagggctctttagcaaaatggtcgccgtgaaggggtatcagattatttcagccacccgatccggaatcgagggctcagattaaatcacggatggtatgggatcacgccagattcgatccaggtcattccccacacgatctacggtcagtgtttaatagagcacggtcacatcgcggtcgttgaatccgatctcgatgccacagatacactggaacaaactggtaccccagtctaatcctagtcgtacaaaaccc

SEQ ID NO: 67958 - DNA, 722 bp, Zea Mays
catatgtaccctattggccctcctccctcggtttcatcgttcttcttagagccaccgctcttgcccctaccaccacactcaatcctgtcctggaccccatggattggtggtgggatcagcaattacttgcaaactcatttagcatgatgacactgacctctcttgccctcatcaaatgggtggctgacactggggcctcctatcacactactctaaatgatggtatacttcttatttacactctcctaatccatctcttctatcgttgttggcaatgggaatactcttatggtcaccttagtaggttattccgtccttctttgttttttcatctttgtaatgttcttgttgtcctcaacattatttaaattttttctatttgttcatcagttcactgttgataattcatgttctatggaatttgactattttggcttgtctatgaagagtatgacctcatagcacctccttgctcactgtgatagcttcggggcctttgcaccctgtggtttatggcttcaactctgtcaccacttttgtcctcgccattgccacatacactgactacctccactacttcttccacctgacatcgttgcctcagtcatcctagttctgacatgttgtcctagttgtgtcatagtttagtaatctcatgtactcagtgtactcttaagcatctatatcatgcctaacagttaggtcatcatgttagacttcac

SEQ ID NO: 67959 - DNA, 915 bp, Zea Mays
ctcttgaaaagatagaaatcccttgaaaaactgaagttcttaaactaaccgttaggtggtggcatgaccccgcgttgtggtggaaccaactgttagcgctcgctgcgtccaatgaggtgagcgacatcttatttatgtggaagaggtcgtgtcactcgcacgtcgttctgttgttgttggttgttgatttgccgctcgcgcgtcgttctattgctattggttgttgatttgccgttcacgcgtcgttctgttgttgttggttgttgattttttcgtaagcatacgtgcggtgtttagcttagggccatgcatccacaaaaacaggacgatggcgagtgggtctaggcgaagcgcaggagtcaatgtcggttgcaggctgtgtggcgggtacaggatgcaggagatggtggaggttgcaggagatgcaggatgtggctttgcgcgactcatgaatgggttagggtttgctgctgggctgagaggcacatgggagaaggccacaggggatgaggaaggtggacgaagcgtgtcgatagaataggttgacttgactgcatgtttgatttaaaaattataaggagctttttgggtttgcggctggactcaaaggcagataggataaagtcacatggggcgaagaaggtgggtggagcgcatcgatacaataggtcggctggactgtgggtttgattttaaaaaattataaggagctttttgcaaaatcaacgaaggtgaaattattgaaccatgaaaactggtgctttaatatagtaaacaaagaactacagtgatgttgtgtggttgctatccagcaatcgtcgctctagctggttgccacgtgttgagcaccactagtacaatgctcgtgcgctgcgtcatcacacaatcatagtttatacccataaagaataattt

SEQ ID NO: 67960 - DNA, 400 bp, Zea Mays
ttcccgacctccactccgatgcactcttcgattgcacgtggttagagtccgatgactccctctatgtcgtcgcctttgcggacggtgagatccgggcatggtagctgcaacatggacgggatgtgggagggattgatcgcccgatccccgccatgggcatcgcgactttgggtgcatgccacggggtcgcatggtggatgttcgcatgctacgtagccctgcgttcgggcgctactagaggcggtgcaacgtgtgttcatgttcgaccagaagggcatgttctagattccctccaccagtgtcgagtttcgtcgggccattaacgtcgaaggctactagtgcagacagcagcaaatatgatgggaaatgttagtggcacattggattactcgaaaattgg

SEQ ID NO: 67961 - DNA, 636 bp, Zea Mays
acggcgctttgggatctgcacaggcggcggaacatcggcggtcaacatcggacaccatcgctggtgaaccttcttttcctctacgttaattttgggtgcgcatcgggggttcgggtgccggcgtggcggtcatggtcacggggcggtcctaggggctggcgagccgccgggtacctctatcgggtcttggccagcgtcggtggatcaacgggagagagagaacgcgggagaggacgcgacatctgtgcctgggcagccaggggttgaagaaggccggtggatcgttgatctcgtcttcaacggtgacgattagatggatggttgagagtgtgggagccgtagatattagatggacggcctggatcgaatcttggcgtaccccttcgattcattaaaccaaggccgtggattctggatcggacggccaggggcatgcgcgggtgtgttgcgcgtctggatctaatcgggcacgtccgttgcggatcgagcggccaggacttcatgatatcccttcgctggcctcttttgcataagggtccctgggaaaaccactaatgaacccgcagtccaccctgtacaacactctgtgtctcggtttcttttacgcttgagcccctgcgctttctggaatttgag

SEQ ID NO: 67962 - DNA, 442 bp, Zea Mays
cagaactgaacatgaggcaaagaagatggcttgagctaattaaagattatgacttggaaatccactatcacctaggaaaagccaatgtggtggcaaatgcactgagtcgcaaggcttcctgtcattgtcttacagtaaggacccctgacaccacactatgtcaagaaatggaaaagttgaacctgggtatgatacaacatggaactttgacacaattaaagcttgagtcagttcttctacagagaattattgatgcccaaagaaccgacaagggtatgaaacatattcatgagaaaatagaagccgacaaagcaaattgcttcagaaaagatgaccaaggaataatatggttcaatgatcgcataattgtgcctaaagatgctgaagtccaccaacaaattttcgatgaagctcatcttagtcgatattccattcatcccgg

SEQ ID NO: 67963 - DNA, 480 bp, Zea Mays
gtgagggttaactctttccaccctttgaattcaaatcaaatccattccaaatactgtgaatccaagtggttgtgaatgtgtctagtgctctattgaatacccctgcaggttcctagctccctttgggagggtttcaatccttaaatcaaccatttcaccgaaaccctaaaacaccgcttgccacgtgctcggtgaaatgtccaaaccagtcaaaaatgctccaattgaacccaaactttttaggcaccttcaccatacctccagtaacatattcgccaaatttcacgccaatctgatatcctaggcttcaatttcacacaattccctgtttcgagcgatccattccgagccgagtgcccaaattccattttcttcgtctaaaatcaaaccaagcgcacacttcactcatatttacccatataaacctattcgtgaagtatcagctcaattccaaatcatttcatgcctcattttcaattt

SEQ ID NO: 67964 - DNA, 1154 bp, Zea Mays
cagaagttcaataaataaacacaacaactagttcactagtcggagtccgccataatgatgcaagattcattcatttcttcttcattgtcttcaaggcatgaccctgcgagcctcctagcgtctggtggcccctctaaacatatgattggttacctgcactatctcatccagagccatcgcgtgcatttactttatgcgagtatgtgtttggttgtcagtgtgccggaaatgcagtcggtatgaacggatgcaaaaccatctttttaaaaaggcatttacccgcatctgccatatgaccaaaactggcgtaaccggccgcagtcttggacgagcctggcttggcgtgtccaagcatccaaacagccgataaatcgcatggtcgctggcagctagtggcaggacaacacaactgtgtacgatagcatgcatgaacaatgcgagagtagccaaaagtccgatatagggtagggagcagggaaggtcaccgggaggatcggtagggggccgaccgccgggaagttcgcaaggggcaaggagcatggacgaagggagctcacgcggtcgggagcaacatatccacagaagggtggggtggcggactaggtggcatttgtgtcagggatggggatttggcgaaatgggtggtggctgcggctaggagagagatgctggtgagaatatgtccaacagtttacccatatgattaccaaaaacaatgttttgaactattctacactgttcgtagagtggagtttgaatatagggatgacgacgggggtaagctgatggagatagtctgacaaactaattttaaaatatatacttcctaatacggacccacatgtcatgttcgtggagcgggtttagcggatatgcggatgtggatacatttttttgcccgctaaaaatatcctatgggtttattgttgtatcctcatccttactcgcagatataaaaatatacccgtattcgcacttgtcaggtttattatccgtagtcacgtggatattttatgtcgttaccatctctagttgtgcatatggaggtagaaatggggcgagcgggactaaagaggacgatgtacgaagagaataatgattttatctactcttttaaagcatgagtttcgtgcggcatgcgtcacccgtcaaac

SEQ ID NO: 67965 - DNA, 446 bp, Zea Mays
aagatttttctccttttgtgtaggctccggtcctcgataatccataaagtgtggcaagatttccttaagcatgcctaatatgtggtgtagaaattgagtgtctaaccttaagcaagtgtggtagaaaatgtgtggcaattttggtactttaggcacacaactaaacatgccctgtgtttaaattctgcgccacagtttgctacgtttaagagaactttgccatacttttacatgttattgacaatgcctatggagctggagaaaattaaattttgtcataactgcggctataaactaaacacatgtctaacttgatcaaacctgactaactttagatgtgacaaactgtggcaatgaagtagcaaaccaaacaactctaatctttccttgggaccatagagttagcaggagcatgtagactagtactaatgtgttgctacagtttc

SEQ ID NO: 67966 - DNA, 732 bp, Zea Mays
gatttctagtagaaatacacttgctgcttcaaggccccattactatatgaattcattgttgactgacgggagcaaagtagcagatcagtttgggtgttttggtcagttttgtggctaaatagtgttgttgtttatattttttattagagcacttgctctgtttgcaattgaaaaggttttcaaaaacagaaactctgctgttcattgaataggtttccaatttgaattggttaaagctcattctagcataattctatcggtatcgaaactctgcagttcattggttaaagcccaatgtgtaatattctgaaactctaaatgctctaggtctacagcatctaccgcccctgtccaggttcctgcacgatccagatgttccctgtcagcttagtctgcagatcagaaaatgctctctgtctccagtgaattgcggtgggatagcgggataggaaaatggaaagaacaagtcgaacatgaaagtagcgacgtcgggtgagggatggcggcaaatcactgaactgcaccagttgcaaactgcacatggtttaaggctcactggttggaggctaaccttcagtttgggcctaatcaaattgactgaagtaactaaattaaaatatagggctcaattatgaggcttgtgattggagttgttcttaaatccctacaaaatcaccacacggaagatcaaacatgatgtcttctagtagttactctggagtctacgtcgtc

SEQ ID NO: 67967 - DNA, 290 bp, Zea Mays
ttttatctttgtcggatgccttagaattcagcattatatcatcagccttatgctttagagattagcatacggttttgcctttgagatcaacaatgcggtctatccatgtcttgttaggtttggaatttatttgatctgcgacagatttgacatctggtagatggcccttggctagtcttcatttcgttttgtgcttcaatgctcctgttgattagacttgtacttcatcagctatttttggctttcctctgatctccatcgatatctttcttctgtcttgattgcattgc

SEQ ID NO: 67968 - DNA, 479 bp, Zea Mays
gcacttggaggactggctcaaaggagggtagtggggtccggtctgcagggagccgtgagggggaagatggttggaggggacagtggcactggcagacgatttctgcctctgcttctctctctctctccacgctcagcggtaatggcgagcggacgatcgcacggaggattcaagcgcgcaaggggagggcgaggtcaagaagattaatataggcgcgagaaccgggcagtaggttagctgagccctctgtcagacgataaagcccgcccgccgtgcggaactcgcccccagaaaatcgtcggagtcggtttggtcagcgcgtggttcgcggaggagctgcggagcgtgcggacctggaagatctacagggagagctcctgacgtgtggggcccgcgctatcagtgcccgcggaaaccgagcgcgcgcgcggagtgcacgagagactggcccgtggggccctactgtcggcgcccgcggg

SEQ ID NO: 67969 - DNA, 1190 bp, Zea Mays
cttgaatgaactccactgcttttgccgaggtcaaagaggcaatgggtttgtattctatccactttgtgaatttatcaacggcgaccagtatgtgtgtgtacacccttgagctttcttgaagggcccaatcatgtccagcccccagcatgcaaacggctaggttgcaggaatagtcagcaactgttacgcgggtaggtgctgctactttgataagaattggcatgcctcgcacttttggactaactctgctgcgtcattcttcgttgttggccagtagaacccggacctgaaagccttccctaccaaagtctgtgacgccgcatgcacaccacattgcctagcatggatcttgtccaacagctgcttcccagtagccgagtgaatgcacatcatgaggactcctcctgcacctcttctatacagtaggccccctataatggtatagtgggccgactatctcgcgatgcgctctgccacaaccttgtcatctggttcttccttgtttcttatgtatttgatgattggctccctccaatcattaagatctgcttctgcctgacttagaacatggcattcctccatctgatctatggtgacactcggttgctgtatttcttggacgaaaaccccaggtgaaacatgggcccgactagaccctagttttgatagtacatttgccgctgcattgcgatctctttccatgtggtagaattctaatccttcgaacttgtcctctagcttccataccgcttcacaatatctgttcattgagtcggttgagcaatcccagtctttgttcacatggcttatgaccaccagtgagtcaccgtacaccattaatctcttgatgccgattgaaacaacgatgttttgtccatggaccagtgcctcgtactctgcggcattgttggatgctggaaacaagagctggagtacatacttgagttgttcaactcgaggagcgatgaagacaatccctacccctgctccttgcagtctcaacgagccatcaaagtacattcttcagattttagcaacttctgggctttccgggacctggtgctcagtccactctgatatgaagtcaaccagtgcctgagtctttatctctgtgcgaggtcagaactctatatcatgagctcaaagttcgcatgcccacttggctgttctcccaacggcttccttgttgt

SEQ ID NO: 67970 - DNA, 429 bp, Zea Mays
gcaatctcggccagcaaagtcctcgccttagagacattagaatcagttggccctctatccaactaggcactcgcacatccgtttgtatcccagagcgagcaaggagggaattgttatggtttccatagtaaaacattcatatcgccaccccttaatgctatcctacaaagggatatctagatactcggtcttctagtctcgacgaagttccaggctggctcctccaactacttggtgttggccacccgccatactcgacttacaatgatacagatgcctccataatccaaaatgtaggctaatcccaaggaaggctttacagagatggacaaagatggcaatttgtaaaacggaattaggattcagatgggtcagactaagggagtagtagccgagaagaccgtggaagaaggaggagacgggtaaact

SEQ ID NO: 67971 - DNA, 657 bp, Zea Mays
gggagtgtgctattgggatcaatcgaagggacaaccggtatagcaacaccttgtttcctcttcctggacgacatcgcgatcccacaagcagagtagctcaagaacagcgtgagaaagtgtgggagtttgagaagctagaatgcggcggaggaaaaataaaagctagggttcgtgcaccaagaaaacgttgacaaagatataagttagcgcattaagtcgggcacagcgtgacaggctggtatctcggacaggtttcgacgtaacaaaacaaaatgggtcggatagtgcccctggttgggtattcttgagtactctcaaaatctaaagtcatcagtcaagttctctggatcaattttccaagcaaaggcacgaagcatgcaacaacagaaaagcaaagaacatgtttcattcattaaccggttggaaaccattagaaaaggaaaaaaataccgactcattatgagccaacctttgatttccttgatctcctcctcctcctcctactaaactattactaaactaccactacactatactactatttcagccggtagcaccttgccaccaccatcaccgtcgtcgcccccgctgtcgctgcctttgccaccgtcgtcgccaccttcgctgtcgtcgttgccgcccttgcctccctcctcg

SEQ ID NO: 67972 - DNA, 570 bp, Zea Mays
ctgctttcatgtaaaaccattcactcttccaaccagttggccacttggtgcggtagctaagaactggtgcctttgtatcctttcgatacgcaaaattgtagcagccaaaattttcatgaaggctatctaccctggccttcgtctggtaatgcagctcgtgcacccggcagaaagcttcggcattaggactcatcccctggcttcggagggcccagatgtagacactaagtctaacaattgtgttgggtgtcaattgatgaaggtatatttcaaaattcttcaaaacctctcctatcatatcatagagagggaaccaaagccccgccctgaagaagcttttaaacacaataacttcatcatccttcggctctagaaccacttcttcgccagcaaaacgaacaagcctactctcggcttctccaaagtaacccattttttcattataaccatatcatccaccgtcatagtagatctaccaaagtcaaggtgactaggtttttctaggatcaagatggtgtaatcttcgtcgtcttcattaccacttccctctccaactgtgattccctcagc

SEQ ID NO: 67973 - DNA, 477 bp, Zea Mays
gaggtattgacttgcttcttttgttccttcctcttgacaatcctcaattccttgacattttcttcaagggattttgtgcatgccacggttattcccatctcaagcttcttcaccatgtaatcacggttatcttgaaaaggttgagcagtgcacttcccttttagttgtgtcaagctcgttcttagcctcttattttcttccttgagcttttgacatgtatcatcttttgttcctggagattttagctcaaaggaggatttgcttgttgatgagcaacaagcattagcacatggtaatatagtttcaatttgaatacatgtgcatgagtgaggttgttgggattttaagttttctatcacaacctcatgagcaatgtttaacataatatgatcatccataagattttcatgagaacatagaagcatatcatgtttttcttgaaaggctagattttcaattttagcctttctacttggt

SEQ ID NO: 67974 - DNA, 960 bp, Zea Mays
ccccgcgcctccagagctgccattagacctagcccaagttctggccaaccaaacccgactcattgaggtcctcactagaagcctcaagaaccagcgcccgatggaggaagacctcaggacagaatgggagagttcctaaggcttaagcctcccacattcgccggatccagcaacccgctcgatgctgatgactgtctgcgcacagtaaagaagaagttagaggccattggatgccctgaaaaccagcgtgttcatctaggtgctcatcagctctccgggatggccctatcctggtgggatactttcagcgctgctgtcagagatgctacctgggcagaatttgaagccgctttccgatagcatcatgtgcccttgggaatcgtccagctcaaagaagaagaatttcaggagttaactcaaggagggagatttgttagtgagtacgtccacaaattcatagagctggctcgctatgcgccttatgatgtcagcacacaagccaagaagatagcccgtttcttgaaggggctgagaccagaactcaagaccatcctcgccagccaagatttcctcagtttctcgcacctctcgaactaagccatctagttggaaagggcacgagaagaagggccacctcaagaggaagtttcaagttctccgagctcagcagcaggacaggcaatagagagttcgatcttttgggttccctcccaaagggccaagctttagcaagccaatagggtccgctccgtcatgtttcagccagcctggtcaaagttccctccacacccatctgttgcaagcagccaacctccaaccaatacttgttggcactgtggagaccccagtcactacaagaataattgtcctcagttgaagacatctatacctgcctactccaactcggtgaatggccccaagaatgtttcagcacccgcctccaaggcaccctccaccaac

SEQ ID NO: 67975 - DNA, 359 bp, Zea Mays
caaattcctggacttatccgtattgaaaactatactatttggatcgcgcgtttattccatggtttccagggtctcttttagcaatttcacactgccaagggttatctgtgatccttggccgttggatctctatctaacgattgcgattagattttcataaaacctgaaccagtaaacactgacagccgctggatcaagattcaacttgaatcgataagctacactagccgtcggatcgacgatcctcggccaagatcgaaggaaacataggggtaggctcagtctaatctggaacgttgatcaagtgatcaatgccccagggtcaccaccacccacgtcgagctaagcacggcggtgcc

SEQ ID NO: 67976 - DNA, 1174 bp, Zea Mays
gacactttcaaataaaccctcgaactcctatgtcttcacagagtccagtccacgacggtggacggcgacacaccgatcaccggcgtgccagtactggccgatttacgcaatgaccggcgctctccgttgactggcacctaattcacacctcaaccgaagtttcccctaaattaatttcactaatgacacactaaaatgccttgaccacagtgaccgtatgggcaacggatgaacacgggcgttcacggtaacccagggtggtctagttcaatcagaggggttgtgaagcttgaggaggacttagggatgctagaacaaatgattaaagcgcttgaactaacccgagcaagctggccacggcgagggcaaaccatgcggagttcttgagtgatttgggggaagtacgaaattagagctctcggtatacgattggaggcaatacttggtggcttggtgcgtgattatcctacggacctgacagtgtactcaatttatagaaggctagagcggtggccggtgaatttggattgagacgcgcggcaaccagaggaagaggaagtcactagcgtacgggattagtggatgtaaccgtggcaacctcaccggtgatcgctggataggccagcacgagtcacgacggtgtggttaaagtgctgaggcacgtggcatcagaccgtgagatgtctaactacggcgaggggtgattcaaggtgatcgggattgagcggacacggtggccggaccaacagtgcccaaggctcatccgggggaaagaagatcttttcaccttggagcgttatccgaacaccagtgggcacgaatcacctcaccggcgtgaatctacgcgcgcggtcgccggcggtgagggggaatgaacccgtgatctgattcagtgactgtaccatgggaatgcctgacagagcacttgacagaccgagtttggcttcgattctctcttgatttcatataacaactgattcaactctctgtatcaaagttatagatcaataatccatgttcacttttgctatagcaacaaccatcaatcgagcaacagatctagctcaaaatggctcacaaacctagttctaggccactgtcagtctgatttcagacttaagacagcctaacaagtcaacttggagtcaaattttctccaaatttcttatgtaac

SEQ ID NO: 67977 - DNA, 403 bp, Zea Mays
tcttcttctggggtgtctgtgggttatgcctaggggcagttgttggcataatggccaagttcgccacacttaaaacaaccattgggttgaacaggagtagttgcattgttgttcatggccggtgtgttcacgatgcttccctgacgattctactgttgcccactagacctttggtcggtctaggtgttgcttctctgctagttctggtattgattgttcctctgactttgttgtccagagcgttgtgcttgatagttgttgttcccactctggtttccggagcggaactgagaaccttaggagttgttttgtcgggtatttctgccggtctgcccttggtacttcctcttgtggtcggacagttctttccttttgttctcaaggccaattgcctttttcagtg

SEQ ID NO: 67978 - DNA, 939 bp, Zea Mays
gtatatccaaatggaagcaaccatccaacattagtgaaattcgaagttttttgggaatggcgggatattaccgccgttttatcaaaggattctccagcattgcaaaacccatgaccgaactcctcaagaaagacaacaaatttgtatggaccccaaagtgtgaagaaatctccaggtcataaagaagaaactcacaaccacaccagtgctaacattaccagatatccaccaaagctttgtcatcttctatgatgcttcaagccaaggtttgtgatgcgtgctaatgcagaatgagaaagtcatcgcctatgcatctcgtctactcaagccccatgaatagaattatccaacccatgatttggaattagcagccatagtgcatgctctcaagatatggagacaatacttgattgggaacaaatgtcacctattcatagatcacaaaagtctgaagtacatctttacccagccagatctcgacctccgtcagcgaagatggctagagctaattaaggattatgacattgaaatccactatcacccaggaaagacaaatgtagtggctgacaccctcagccggaaacctttcgggaaggaagcaacaaacttcctggaagactggaagagagaatcgactcaactaaatgcttgtttggggaaaatggtagtatagaagttaaaccgatgctagaagatctcattcgcaaagctcaacgtttggacgccgagatgacaggacttgcagaaaaggctagcaaggaacaactcatagatctcagaacatatgaaaagggaactctttggttcaggaaccgtctgtgtgtaccaaaggagaggcacgagaaatactgctagatgaagcccacaactcagcctattctatccacccagggtctaccaagatgtacctagacctcaaacccagatactggtggagag

SEQ ID NO: 67979 - DNA, 579 bp, Zea Mays
ctcccaacctctctgctcacggtgaccgcacgatcaacggataacacgaagtgttcccggtgatcctctgggtccaagcttaattggatgggtcagggagtatcaagagcacataaggatacagaaacgaggaaccagaggacatgaacggacctgtaatgtgtggcccgtgaatttgggatggcgcggtggcggtcggagagagagagaggagagcactagcgcaagaaattggtggctttcactgtggcaagctcatcggcgatcaccggacatgtgtaatacgagctactgcgacgtagtaaggtaccaaggcacgtggcgcatggtcgataggtggctaactccgtttagttcatccgaatcggccgtgagtcaagcggacacagtggccggagtgaaacagtagctcaagttcatccacaagtcgaaatttactaccccgagcaactatcagtactctgttgagcacgaatcgtagcgttaggcacgaatccaagtgcacggctcacaggcgacgaggttctctgaacctgagatatttgtgttgcactgtaccatcggaatccttattcaaag

SEQ ID NO: 67980 - DNA, 442 bp, Zea Mays
gatgaaacatgctctatgcacttatctgtgatggaactagtcaagtgaaaaatgttaaagttaaagtttaaagtaaagatgagattagggggatgttggactgttctccaccaagatagcccaattgtcatcttgggcctttgatctgcaccctaatcgagggcgtccaacactacatggttggtggctcccatcacattcaactataaggaaggaggccggcgactaaatgcatgttgttcgtctgagccgtactctccaccgacaaaaccttaacactaatccacgagggtgcgcagccaatgatgggaaaccaccaccgatcttcaccgtcaccaacgtcgcttccccgaccgttgctatactagcacaaaacttcactgatgaacgagatggtagtgaacaccacacccatgatccccaccaagggtattattttatg

SEQ ID NO: 67981 - DNA, 904 bp, Zea Mays
ttagaacataactaaagtagcttcaccaaacaacattggtatttatggcataaataacttttaaagtgaaacatgccttatgtcatgtgtatgttcaagctttcagttgttcctcttccatctcccaattgtacatgagtggcagaaaatgtgtatgccttgtgccaagcacataaaaatataaatgcatgcagcatagttaccaccttcagtcaaacaaaatggcccatgccacctcatgaacatcgaaggggaatattaaacaaatgctgaatctgttgcaaatacatatatatcttccatagaacagttatctgtggctaagatactgttagtaaggtagcaataatatatctctactgttgtgctcatttgcctaaaacatcccatttttcaatctaatttagccatagcgattctctctactgttgtcttctatggagctaaaaaataggcacttttagcagactaacaccactacttttctttcatactctactgcttattgctggttataaaacatatattatcttgaaatcctgagaactgcaaagttactaagatccccacaatgactgggtgcctgggtcacaggaacacatggaccttcaaaacctgcccaaatggatttagattttatagtatatatcacttgtgttagaatatttgtataggccttatgtgtgtggggggccgggctgtcatctgcgtatgtacaggcctggcccataggtgctgcgccacctctgctgggaggtttttccccctgtcctgccgccaccctcctgtaggcggcagccctagggtttcctcccctcctgtctgcctatatatgttgccccttggggtcctatcaatacacacaaatcataggcgactatccctgcccaacatggtaatcaga

SEQ ID NO: 67982 - DNA, 843 bp, Zea Mays
ctctcgtgctccggtttcacatactactgggctgggccatagatctgatcaagatacagaatcaggccgataattcccaggcatgggctgctaggacattaggcccgttgaagaggccacagaacagaatagcgcaaaggaccaccgcgcggccgggccaaattgcagcaaaacagagtccccgaacacgaacacaaccactccctcttggatttgggcctctacgggcggctctactcaaatcccttcacttcgttccgttgttcgacctgttgaatcgaagcgatcgtgcacgtgggcgagtggggtggtcatttgtctctctcttttccaggtggacgtggacccgagaagacctcgagctggcttcactagtcaggactcaggacctaactgcagctgaaaccgcccgaaggcctatcgtcccacggaaaataaggcccacaggaacccaacgaccacgtttctccgttctccctctcaccaaacatggatgaagcagcaaccagccgacaagcagcgaagctagagatgaagattggtttcatgttatatacaaaaaaggaaaaggaatgatatgtttatttcgctgtctaacttaccacatatgtttttatgtgtaaaggttattctttaactccgacaattaaacttatctttcttacaaaaacaagtacacaactagctataggctaatttggcaacattgaccggaggtagcaattacatttttttaaaaaaaaatctaagtttcacttgtatctgaggatcaaaagttttttatctctgtctaccacaaattttgaataccgaatgggcttgggttcaatcgcatcattctag

SEQ ID NO: 67983 - DNA, 606 bp, Zea Mays
gctgttcatgctcgaggcggcacagccgccggagacgaggtatattggggtttctaggggcgtcggggtggtctaggtagccatggaggttgtggaggactcagcgagcataatggtgaggtaggggttgcaggaacgagactgagacggactgacggtggagagggaacctcaatcgaaccagaggtgactccggcgagcaatacccatcgtggtgggggataatccggcgtgctaaggctggcataggcttcggggtgagggtaggggtgctctatggctaagttcgagcttggggaggggctgcagtggccggacgccgtgaagacacggcggccctacgaggggcgactccggcgagccaaaattcctcatagtgagacaaatttagtgcagaagaagggcggggaaatgtcacttacccagagacggcgctcggggtagcttggcacgacgcgagggggctccggttgaccggacgacgaggaatcacggcggcggcgagctccaacctgcgcaggggagaggttgagcatggaccgggcagaggagttgaggaaaggggaaaaacacagcgggttcccggtgcgcaaaacttaggtgaag

SEQ ID NO: 67984 - DNA, 320 bp, Zea Mays
cttttgctcatgcacctcatagctcgagagggtgcattagagacacaacatggatttttgttttggtatacacagagtaccaagacaaagtaatcatgtgaacatgggctaaacaaaactatcatgcttgcacataggttaatcattaaaaactacatagcatgacttatagaaagatacaggtttatccacatacactaagagagttaatcatggtggatatatcaattgaaaagctacccattgaatgattcaagagatataacctataaagcacacagtcacgattgagcaagcatgattatgatcttggaaatcat

SEQ ID NO: 67985 - DNA, 753 bp, Zea Mays
ttgccttccaaaaccgggtgtgacacccattcggctcgagcttgccttaggactctgttctgctggttctgataaggacaaggtccccttcgtcgaactctttaggactgatattgctgcctcaccatgtcttcgtttgcgcttggtatctgttcaatgtttcgagggtgaaaacacgatctccatcgagaaggtccttggtagttgactcgtcgatatctggtgtggccgtggcatttgttcgtggtgatccgtgctttagttcttgcagagtcatggctttgggtctatacattaactggaaaggggtaaacccggtggctctagattctattgtgtttagcgcccaaatgacttcaggaagttgtctgcccatttgcccttttgtcatcaagtagtctcttctttatggcgctaaaaatcttgacgttggtgcgttctactactccgttggattgtgggtggtagactgatgcgaacattgccttcgtgccgatggaattgcaaaattccctgaagtcttgattgtcacattgtttgccattgtcgactgttaattgattgtccaacaatgtcgagtccccaacgctgtagtggtcaggtgtgtgcaatgagctttgtgaacagcgaaggggcgctgttcgaggtgagaatttttggcatccttcgcacgaatgagtcactcggttggccacacacacgatggctggccagtagaaaccttggtgtatgacctcggtagagagagctctc

SEQ ID NO: 67986 - DNA, 929 bp, Zea Mays
tggagagagggaagataagtacatggaggcataagccagaccagaaagatgtgctaaaaacaattgcagcggctttagtctggcaacaacaactgcagtggcttcaacaagggatcaaaaagctggtgactaggccccacatatctaaaacccgcccatgtacaaacatcaaaatagcatgtgccaacctgacattcagttctatgcagatatggtgttcaagtttctgttaaacgtgatgccatgtctccagatttgatgcccaaaaggcatatatctccagaacggcaatgctttgaggaatgagcatgaccctgttccgaccaaaggccgggaaaatggatgccggagttgagaacgacgattctggaatgcacaagattctggtgcagttctaaactgcttttctggactctatgtgtattaactgaaaactaaagaaacacgggcttattacagtgtcgagttcatcagccagggcactttcacaaccgtgccatcccacggttcccgctcgacacgagctccactcacacacgaccttcctaagacacgctcaatcgttcctcgagctcaactaactagctaaagactcggactccatacaaactgaatcaaacagaaaagaacacaaacgaatgactgacgaaactgacgacaacagactctgaaactgggaatgcagacctctgaatggtggctgaaacttgtctcagaccctgtctattactacagctttgtcatattctcatggtggagatttagatgcaatcacatgggttagaacgttaaccattcatcatatgcagatatgacattgaaaggctgcatctttacaaaaaaaaggaggagggggacataatcattaatccattaaaacctccactcacatgtaatcgtctttctcaagaaaaccaagctccatgacc

SEQ ID NO: 67987 - DNA, 595 bp, Zea Mays
atttatttctttttaatatcgcttgtatgtttattttatggtttgtttatgtatggacatgactatagtatgcaactgtgttctttgtgcttatatgatattagattcgagttgaaagtcgtttcaaatatttattatttatttgcattcgtaataatttattcaaatgtttattatttatttaatatcgcttgtatgttcatttccagtttgttttgatttcatctcgcctaaatctgaacgttcgggtataaatatctgataaaaatttatctgattctgggaatgcctaccaaatcaaacatcgttcaaatattatcggcgatctcattttggtcaaatcgatttgtgtatctgttaaatgttaattcgagcacccgtatttattcataggttattgtaaaaaggagaagaattctaacttatcatctccatcattttgtcttttatttatccaaaccgtatcctcttttcattatccatacatgattttgttaaagaaaagagaaaatttttattggttttatttttcacgacagcttccttcttatctcttccgtcgtccctggtaatttcctgaagacgccatcgtcca

SEQ ID NO: 67988 - DNA, 1156 bp, Zea Mays
ccttgtgatgcttttgggcaggacgacgccgttgatcgtgactcgatggttcgtgcggtggcacgataggagaaacatataagcttgtacaggttcgagccacgtgagaggcgtaacaccctacgtcatgcgatgatcttggtattgggatgagattacaagctgtgaactatgagaatggtgggctgaggtgagatgaaaatggtaggggtggctcttggccttatatacacgaccaagtgtagctatccccacattggtgacaaatgtaatccattcgcctatttctcggtttgtagcgaaatgtcctcctacatcttgggaactccctgcgctcatccgcccgagttaccaccggaggcttagcttgtcgggtgggcgcaatcgtcatgctagacatacttgtgctctcatggtgcctaaattagatgttggcctttgctggttcagaatgggcttgcttcgcctggttactttcggccggcccaccacaggacgccctagggggatgcctgctaggtggccccagatgtgttttcatgcgcatgtggacccgagggatatctatcccccacaagccccccgagctttgaattgattttgagtaatcaactcaaaggtcattattgttcgcttttgagtttagcgtttttcccttggctttcctgtgtctgttgggtgcaccgaagatgcacccaatgggtgtagccccttagatttgaattgattttgagtaaccaactcaaatgtcattaatgttcgcttttgagtttagtgttcttccctgggctttcctgtgtccattgggtgcaccgaaggtgcaccaaatgggtgtagcccacaagctttgaattgatttcgagtaatcaactcaaaggtcttttaaacctgcactcagaagattttgatgtaatccagcggtgacgtctgtccacccctagcttggtttgaattcgttccgactggatgccttgatgaataggagtctagtcggccgagcctaaaccaggagaagtctggctagacgacacttgaccaaggacttcaatgcttctgctgattggacttttgcccgatagagtcctaattgccttcagttttaccgatcttgcccttttttgttgggtattcaatgcatatatgttgcaggtcatgc

SEQ ID NO: 67989 - DNA, 562 bp, Zea Mays
gaaaaatggtgggtcggtcgtaccattccctcggatagaccctcctagggggccactatgatccatgagcgaaagaaagcatcggctaatataaagatccgcggatgaggatgcttgcactccccctccccttctcttgcttttaagggagaggggtacccggaagagctcgcatagagaggaggaaggaggaaaagactcgagggccccacatcactagagactaatgaatggaagtcttttatatatatcttattgatacaaagagacaacaccgaggcatagtacattgtgattagtgcgcatcacgaatgatgtcgtgagctgacaccctaagaacgaagtggttggccacatcgtcgtagccttctagcaggtcctctagcccttcatccaaaaagggtgaaggagaactgatgatgtcctaacggcggtgactagtgcagatctcccccatgagcaacgccaccgtgccccctaacgaacgtcaaagtcgatgatatcccagatgcaacacgagacattctcaaggcgctcgatcagggagacatcgcgggccccg

SEQ ID NO: 67990 - DNA, 375 bp, Zea Mays
agggagttctatggtttgaagaccgattggttgttcttaaaaatccagaactcaggaagaaaatattggacgaagctcatctttccaaattttccatgcaccctagcagtaacaagatgtatcatgacctcagacctttgtattggtggacccgaatgaaaagagaaattgctaagtatgtatctgagtgcgacacttgccaaagaatcaaggctagtcatttgaaggtagcaggtaccttacagcctcttcccatcccttcttggaaatgggaggacatttgcatggatttcattgtgggtttgcccaacacctcccggcaccacgattctattgggtcattgtggataggctaaccaaaacagctcatttctt

SEQ ID NO: 67991 - DNA, 858 bp, Zea Mays
ccatcaacagcggcacaaaattgcacccacgggtccagcgaggttccatccgcacccttcgctgaagcccccgtgtcggcgggcggcctcgccagtgccaccaccaactcagtacctatgccagaatcacagttagcataaatatgcaccaccttacccaatccataacaaacaccccacttaccagcaggcggtagccccgtctaggcatcaaacatggtaatgcccccaccaggtagtcatcgacagataactcctggccggtccctcccgtctctgacaccgtcgtttcaacatcgcatggtggcgaagactcctttgtgggtaccacgggcaccgcagaagggggcattgctgcagccggattgacccccttcacgctggggcgcgacatcttagcgtcgcgacacaggtcaaccagttgaagagggaccttctgtttcttccgctgggcctcttggcgatccttatccatcactgctaacacaacaacaccaatatttcttccgtaaggaaagattttcagctcacgagccatacgagacgtaaaatagtcattgccgacgaccctaggaatagggtccttcctatgccaccgaccccggtaaccttcaacatttacgaagatgtttcccggagtttgggcgaagtcataacctccccaggccaagcacatgtccctgtcaaatcctcaacaaaaaacctataggccttcggccccaccgcttcccgctctgtacctttcgtatctattttcctcttccgagttgctgcaatcatagccttccccttcgaggtgcccacttcagaccgagtcttcacttgtttacctcggtcatccctagcatcagtagagtc

SEQ ID NO: 67992 - DNA, 682 bp, Zea Mays
gaatttcggactttgatgtgaatttttgggctttgatataaattttgggctctgatgtaaattttgggctttcataacttcaaccctccaaaatgagtctggcacgtttaaccaataatgtgtcatatcatggatcaagggctaaactcgcggatcggtttggcatgacccataataatcatgggctaggacattccaagattgagtcttaacgtgctttttcgggtttggttggaccgggcgacctgaatctacaactatagggtgcatgcacttgggtagaggaattagacgcatgccctcggggaccttgacctcagtgagggagtgactcgtcaatccataagtgtttagggtctatttcgcaagaaggggagaagggtgaagttgggcctagttttaggcctaatagaaggctggtcgtgaatgggctcagctacctgtcaactctagtatgcaatcatcagtgtcttctcccattaggacatttcttcattttctttctttactttgtccctatcaaaatttgaatgagcagtgtattaggagaaaaaattaaatccgtataagtgtatcactataaatagctcctcattcattttcgtgcatctatcaaattcatataagtgtattactataaaatctatagccgttcattttcgtgcatctctcgttgaattag

SEQ ID NO: 67993 - DNA, 966 bp, Zea Mays
atcaatttatgtatggtttatgtcattttgtaaaatgatttaaaaggaaaacttcatgcatgcatgtttgaacccctgtaaccccacaatgctttcttaatagtagtagggatttcaaaacaaagggccgcaataaccaaattgtttagcataagaatataatcttaactgtaatctaagcttgaggaaaccatttaggtattctagcattcacttgccaggagttctattaatgttcaactagaaccatagtgatagattggttccttgttggtggggtccacttcgatctggaagctggagcccttagcatcttcatgatgaccttcatctcaccgtcttggtgtcaactgtgttgagatcaagggttgagacaagagaggggaagaaggagcgagtagggcgagttcttttcagtctcctattttggcccaagtagaagtgtgctttagcgagttgggtcttgtagtttggtgaatttatatgtacccactgctgtttatggaaggtgtccaaatcagtcaggttgtgatgttgtagacaacatggaagctgtagctggataaggatgctgactgctgacagggtgttcaccatgcacatgatttgcattttggctatgcagatacgtgcacctctattagttgggccacttgtatatgtatggttgataggcatcattgcacctatgaaccattcctatttgaaagattggcaatgtttatcttcctcgtcatgcttacattgccttatcttggttcatagtgcacatgtagttatcattccaatcagaatctttctctagcatgtcaaattattaaaataagtggtgtcaggtgtgaatctaagacaactgcagtaggacatgagatgggtagccaggcaatgtcctcatattatcctagctgataaataaagagaagccatccccttacaatctctactgccgattgtaagaaagtaagg

SEQ ID NO: 67994 - DNA, 797 bp, Zea Mays
caaatctgagatcactggcccaaattcggccacgacggattgctgtgtgagcccttggatcagaacgcgatggctcacgattccccgtcaacctctgatccgacagcagcggcgagcgggattctacggtggcgtttcgccggagaaatacccatttaaaggccccgagacctacccaagggctattgcgtgcaagagtatgttaacgcagtaatgaattcgttggagggtgactcacttctaatcgcggcgctgctcggtctggccacgacgtttgcggacaacggtggtgttgaccggccgacgaggaattcctcaatattcggtgggtcgccttccaattactccctcgcccagcttctacgtggtcaatcccacccccaagtagccccgctggagcccgaaccccaccgttgacgagtatctgtggcggaggcgatgtccctttgcgcggtacgcggtggcgcaacgtgtcgtggtgcgtagcagtggagggaagaggggcttgagagggtgaggtcgaggggattcatataagcatgagcgtcggggagtgcgccagttggtgctaggaagtttggggggtttgttgtggtcgcggcaaggatctcgcgtgctctgttacgaaggagagggagaggagcttctgtccggtggggtccacacaccggtgacacaaaacgcggccattgacgtggttgtggagccatgaatcatggcccacatgtcggtgcccggatgaaccgcgggcggagaaacagcccggaggaggttgggatactggagagtgggccccg

SEQ ID NO: 67995 - DNA, 941 bp, Zea Mays
caggggccctgtggccaccctgtcagccgggttaccgcaggagaatgtgaggtacgaccatggacgtgggcacgagcaaatgacttatgggccagtcacctagcttgcggctcactgggagtttactcggtccaccccccgctctacgtgagaagttggggtgagcttcggttttttacctggtcgatatgaggttgttactgtggtggcgcggtaaaagaggtggccatcatgacgccgttcgacgtcggtggcttgatgggacgtgaaacagcccattcatcgtattgggtgcaggtggtgtgaggggtggttagccacctcgcccgttactggtgtacccccggtggtgatgcacttctgaagccgtgatcaagctagaaatcgaccctgaacacaactcaaggtcatcgcttagtattgtaccctcggggctcctactttgttgtgctcaaccttttgaatcatgtagctggagcttgccaagcagagttttaggaaccaacccttaagtttggttgaggtccggacctttagggacccagtccgaggtactaggacagctgtcctagggtggtggagggtgtagccttacggtacagaactaggctaagcggctacctagctccggaccacccccgagaacgtggtcctttcccttggctggaggtccctagcagttcaatcctcgttcagcaccaaagggggcccaaactaagcgacaagctagttacatgatcacaacagaagtcagaaaccacgtgggggttagaggaaacaatatatgtaaattgaagcaggaaaaggaattgaacggagagcaaattcttcattcgtagctgaatttataagagttaggcgacggacaccatagaccaggtttatgagggcgaacctcaccgggtacaaaagaactgtgcgatggattccagagaccgggt

SEQ ID NO: 67996 - DNA, 434 bp, Zea Mays
atcgtcaccgctgttgggctatgggtactaatccggctagccgccgtgctcctttctgctttgcggccggtccagatatgtcactggagttggctgcccgtcgaccaaacgccacgtgcctcagcaattaccacgttgcaatcaccagtgttatgcacgtccgatgatcgccggggaggccgccacggtgaaggccacgaatcacaatgtctgtgactcatttcttctctggccgccaccacgctcaatccaaattcaatagccaccgcttagcaatcctataaattgatggccggttctgttgcgccatgttatcacgaagccaaagcacccagtcccagcttcaattagtcactatagccggagaatttctttcttcccccaattcggtcgactacgccgccgtgaaccgcctcctcgtggttagctgctcc

SEQ ID NO: 67997 - DNA, 549 bp, Zea Mays
ggctacgcacgctgaggcggaagggaggcgcgtggaagcgggtctaaccatgcagaaaagagaggcccacgcccgggaaagaatggcgggagctatgcgtgggaaagattgagtaaaagggaaagaggcgggagctgttgtgcgcaggagagtgaaacagagtgagagctactgtgcgcaggagagtgaaacagagcgggagctgctgttgttgcgtatttttgtgggagaggagggaaacagggccaccactactggtcctcttccctagctgtccaggccaccggtgtccttcccattctggtcaagtcgtatagggtcattgccgccgtccaaggtctgtgcctctctgctccttttcctagtgcactagtcatctagacgtgctctccctctccctcctttgctcttgctctactcgactgctcctcctccatctcctgtcttatacttctattcaagcatgtgcttaatttgtttgctgtatacttctattctaaccagttcgatgctatgacttggatgcttaatttgtttgttgaattagtt

SEQ ID NO: 67998 - DNA, 592 bp, Zea Mays
cttccctgtatgactgctgctagtaatttctcaatgggggaaaactaattcaatgtaagcagtctggttactagtagtaatttccaaggatatgcacagcacggttgtctaaggatgtgcatggttgcctatatatggttgtgtgtattgtggttgattcttgagatataggcctgtgaatgacttgtgttgggttggtaggaataggatctgttggtgctgcacatcggacggacacagacctgcattactctgtcttgatgtaaagttgtaggtgtatgttaattcaatcagctgaaatcttaagtgcctctttttttgtctgcatttcgtacaccaatttacaggttgctatagtcagcttgctggaaatgtgtttcttctggccatgcgccatttaatatggttgtacatcagtacatgtctacttctcttttccacacacctgtgctgctgtgaatatttttgatacttcagttgtaatatatgctcagctgtgttcttctgtcgtactgtttctacagttattatacttttcattcgtcttcgtgctaaatcagccgtccatgatatagctcggaagttacaaaga

SEQ ID NO: 67999 - DNA, 542 bp, Zea Mays
tggaaacgtcgctgcttcggttgctccaagcgagcctgcaccgaagaggaaaaaggtgaaggttcttactcaccgatcgcgctacattgaaccggccacagtgcctgaatttggctgtgagacctcttcggctactgaagccaaaggacctgctcttacgtagaggattgaagagccggctgcaatgccgaaggctgacaaaattgaagaaccgagaaccgaagggacgaaaacatcagaaattctaagcccttcggcaggagtggaggcgccgaagacacaaaaagatctagcagcaacccccaagagaaaaaggatggctagtgtattagatgtgctggagatgataaaacttcaagctctactccaggaaaaattgccaaggcttcgaaaatacagattgaaaccaagacaaagctgaccgaagccgaagctatactgagccaggctgacgccgaagtcgggccttcagtgcccgccaaggagaaatcctcggaaactagagaaaaggcagcggaagaagagggtatagaacagatttt

SEQ ID NO: 68000 - DNA, 756 bp, Zea Mays
taggacatattccaaggccgaagatgatgccttgtctgcagccttcgggggtcggggcaagaaaagattaaacaaggtttttgatgcaattgacttcgtatatcctaactatagctattccttgaggaaagaaaaaagaggaaaactaccgcttcggccgccaccgctgtgtcaaagggtaagaaaatgaaaggttttgacacaccggcctcggtatattgaaatggccgtagtgcctgaatttggtgaggggacctcctctactgccgaagcagaacaagccgatgccgcctcttggagcactgaagggtctaatgtagtgccaaaagtgcctacagtcgggccaaccgaagccaaagatgattcagccgaagagccaaaagtggaaaaatcagtgaaaatgccaaaaattctgagctcgccagtagaggcagaatttccgatagtgcaaaaagctcctgtctcagcttccaagagaaggaggatggccagcgtgctagacgttgtcatggagaccacaaaggccttgagtcctgctcctactaagaaaattgccgaagccgtcaaagtccaggccgaagccgaagctgggccttcggtgcccattaaaatgaaggctgccgcgtctgatcatagagctgagcaacaaacttcagatactggcatgacagcggggcaagatatgatggaaaaagcaaaatctcctacccccgaagctccagtcgaaaatgttgattacattattcgacattcttt

SEQ ID NO: 68001 - DNA, 401 bp, Zea Mays
taacatcacgtgggcttcaatcccatctcccttgatgctccatcaatcacagtacgtgctaatccctttgtaaaagggtccgccaagtttcgagcagtattaatatactctacgatgatctctctagtatttctcaaatgccttactgatttgatacgtcgtttcacatgtcttgagaactttgcattttccttagtgttgcctacaattgtgatcacgctttgattatcacaatgcaacaaaatgattggtactagtttatctaccattggcaagtccatcaacagctctttcaaccactctgccttagtagtggctgactcaagtgctacaagttctgcctccatagtagactttgttaagtagtctgcttacgagacctccaagaaactacagcccca

SEQ ID NO: 68002 - DNA, 322 bp, Zea Mays
gactgggtagacctcagctaaagttgttgagattgttccttgtgctaggaataagtggggcaattggtgggacttttggttttatgtggctcccgaggatgtcgaagggttgtcgagttttccccctgccatcctatgctcacattgctatgtggcttttccacattttgaggtggcagaagaagatgaagacgagggggcccttcagtacgcggcccgcctgagtagcggacgtgacttgcttgaggagtttattgcctgcgcggtgtggcccctagcgcatggttgggcactgggtgagattaccccccgccagatgccg

SEQ ID NO: 68003 - DNA, 693 bp, Zea Mays
ggatgcttgcgaccctaatctactagactactactgtgagtaattggggcgaacccagggcataactaaaagcgaggaggggcgcaaagggtttcttacgctccttgtggcacgcataggggtgacgctgaccggaggtgattggcgttggagcgacgaagattcagtgagataggtgctggtacatttgacgatgaggctcgttgtaggtgtcacaagcactgatgaagttgatgacgctagagatggaaacgggaacactctggtggctgtagaacactcctctgaagctcaataatgtcgatgatgacactagtagcatgctcaactcaaaaggaaaggcgacgatgaaggcgatgcaagtaggaattgttgggcattattggtgccattaagaaatggattgagcagggaaatggctagggaagttgcgtgttatcctggatatccattgacagtggcagtgagatcagtcaagcgctgcaaatgaggaattggtgacgggatgttcgctggtgaatagaaaggaaggtacatgaggttagggatgacatcccagtcccacacgctagagatagagagagaacacatgagcgcgagcgaggaggcattaacaccataggcccgtctatcagcgatcgagcaagagaaggacgcgagcacacgcaactgttaggccaaaagccactaggc

SEQ ID NO: 68004 - DNA, 325 bp, Zea Mays
gcaatgcaaatagatatatcgtggcaatcatgttttcaagataatttacaaagacgtggatatggcatacctatgaacatttgtttctgttacaatgctacagactggttctattgcaatgctacagactcggggttaatcggggaaccctgaaaaaacatttagctgacataatagtcatctagatgagaaaaggctgacatttgatacggatgcatcaggctgaaaatcctcagttccgaaccaaccttataggtaagcaatccaaactctagcaaccttattcaacatcatcaagtttcaaagctttcacaataataatttc

SEQ ID NO: 68005 - DNA, 447 bp, Zea Mays
ggcttatgatggtcatcgaaaacgtgaatttaccttacgtgctgtatatttgtggtcaattcatgatttgcctgcatatggtatttggtctggctggtgtgtccacggtcgactgtgttgtcccatatgcatgggggacacacaagcatatcgattggagcatggtaaaaaggtctcattctttgattgtcattgacggtttcttccatccaatcacccatttcgaaatgatacgaagtcatttagaagaggcataaaagttaaagagggtccaccaaaacgtttaatgggtgaagatatcatgatataacatcgtgcccttcaaagggctacagaaggtcatgagtttgaaggctatggtcaagatcacaactggactcatatttcttttctctgggaacttccgtatgcgaaggtattgattttaccacacaacatagatttgat

SEQ ID NO: 68006 - DNA, 344 bp, Zea Mays
tcatgtgacaactcactcacttgcctggatcaattttgtcttccaaagtaccaactacaattttgttacaaagatcttactcagacatccactcaattccccacaatttgatctccaagttcttccaatttcactggtggtcataattcagtcttcagtggcgactgacagtccattttcatgtcaatttatttccaattttgtatagcataaatgcttagtcaattaagcaaaattgtactcctatcatagctctacaagattcatgtattgacttagagcaaaatcttcatgaatcaagagatacaaagctccaaaggtgacctaattccactgaaattcag

SEQ ID NO: 68007 - DNA, 471 bp, Zea Mays
cttgagatacacatgatcaccttccacaaattccagtggtctcctattatcagcatagctccgttatctggtctgagctaccctcaaattctcccgaattatacggacttgttcttctgcctcttgaataaattcaggtccaaagaacagtcttcctctagtctggtccaaaatagaggagtcctgcatttcttgtcatacagagtctcgaacggtaacatcttcagactggcctggtaactattactatatgagaacttagcataaggtagactcttgtcccactactaccatgctaaagggcacaagctctcaacatatcttccaatacttgattagtcctttcagtctgaggtaggccgaactaacattcaacttcgtatccacattctcttgaaaacttttccaaaatcttgaggtaaattgtgatcctctatccaaaacgatcttctttggtacaccgtgtagaga

SEQ ID NO: 68008 - DNA, 739 bp, Zea Mays
tggcaaacaaaataaagcattttagggttttgctttacacgagatctaaagccaaaacccgctataactttggaaaaggtcaaggtttagcgaggggaaaagggaaaaggaaagggtaacgcccgaatttggcgagtgaagaaaagaaaaaattcaactaaaaaattcggggcgttacagggtcctggctgaatagctggcacaacaagagcctgaagagtgagagaccaaggtaccaagtagccaaagctgaatatgagtggcagcctccctgtaacccatccgtggcagaagcgtccgcctcatgagctgatatagaaacttggccgctgtggtgaagtctgccggagaacatcgcgacccatctgagaagggcagtcggaacaaagccgcgatgtgagctgtatctggagcaactccaccgtgagggcgtcgaggaggatcagaggtaccgtagcacaagctatgaagacgagtcaatgactcaggaaatccaaacagctggcgaatctggctggcatgaatagtgacatcctctcgctcaaagcggaacctcatccactagtgatcagggtcgatccatacagaagcataaaaaactcagacccattcctcaacatatctgccgttgatagtcagaagagtcagaagtccaagcaaataggagaggtgaacctcagagtcggcaccggctgctagcaggaaggaagggagatccaatagccggtgcgctcgtagt

SEQ ID NO: 68009 - DNA, 348 bp, Zea Mays
tgatcatctgtgagggtagagaagttatgagacctaagaatgatcctgtgcaagtttcagcaaagtgcaaaattgtagactgtgcttggtatatatatgcctctagacttccagatggtcgttccttcaacatcaagaagtatgtaaaggaccacacttgtgggaaaagtcacacggtgaagcaaatggatgctaactggattggcacagagtatgagcattttttcagaagtgagaaagattggcgagttaagtcccttagggacaccgtccttagggacacacaggtggggatctcacttaccaaagcctatagagcaaagagatacgcagtgcagaagattggtg

SEQ ID NO: 68010 - DNA, 580 bp, Zea Mays
gtgatttgttcatgaaaagtcggtccttttattttgtttaacatgcctagtctagtacgtacaatctacttattagttttagtccctgtctcctattctttttttaatatattttcttcaaagatatcagcatttgtcgcctgtccttgatgtcatatatgattgcaccttttaatcgttgacttgacccaggggtggtttcatcatgcacgcagtccttctgtctcctgtcatgccctctgtccaaattttcaaacatacgaattacgtcgttttcgcgctcgataccgcgactagacctcttaatcaaggactcgggtaaaggtcattacattggcgtatcggtctgaaaacactactagctgtattcttttctttaagagcaaaagcaatctagtttgagcagtggattcctagatatactgtatgcatttaataaacagatacagtatatggctaaataggcctgtcctctttcactcgcactatcatatatgtgttgatgtctttttggatcaaacactaaaggtctctagatcccactcgtggggaacgagaccttgggtaactgaaagtcgcc

SEQ ID NO: 68011 - DNA, 585 bp, Zea Mays
gttgaattttagttcggcctacctacctcaaactgatggacagactgaaaggactagtcaagtattggaagacatgttgagggcttgtacccttcagcgtggtagtagttgggacaagagtctaccttatgctgagttctcataaaataataattactaggtcagtctgaagatgtcaccgttcgaggctctatatggcaggaaatgcaggactcctctgtattggatcagactagaggaagacagttctttgggcctgagattatacaagaagcagaagaacaagtccatcaaataagggagaatttgagaactgcacagtcaaggcagaaaagctatgctgatacccggagaagacagctagagtttaaatagggtgattatgtctattcgaaggtgtcaccactcagggggtatgagaagatttaaagtcaaaggaaagttgtcccctcgctttattggacccttcttaatcttaaagcgagtgggagaggttgcatatcaattggggttgccggatcatcttgcagatgttcatgatgtttttcatttatctcagctgaagaaatgtctcagggtacctga

SEQ ID NO: 68012 - DNA, 976 bp, Zea Mays
aatgttagctcttcaaaggttggagaatggatatcaagagcccttgtagctatatctagtagaacctggtgttgggtcatccagtcggttcctaaaatgatgtctacactttccaagcccaaaactaggagtgtagttttgaaggttttacttcctaactggataggtacattatggttcattgataggttgcaaccttgccccctagcgttgctataataaaggcccctttggtgtgatagaaaggcaattggcatttgacactgaattttgcactaatgaaactatgtgatgcactggagccaaatagaattattgatggttgacttaaaactgagaaagtaccggtcatgatgggtgctccctcgggtagatcttctagggtggtgaagtttagccttccctacttgacttgcactttttgcttcttgccctttccaggagcttccactgggccgggtcttggttgattgcattggcaatccttagcgtagtggcccgtgttgctgcaagcgtaacatctgtttctagtcccttgccggaactactgtggctgctgctgaggttgattgttcctcggagcagtggtgggaaaggattgggtgcttgctgttgttggggtggcctgatctcccatctgcctgattgctgctgaaatcccctgctctggttgctttaaacaatctggaacctttggggttgcatcgaagatctagtcattggtgcatttttctccttttcggctcggtgagccagaatacaatccctcttgagagatggctaggttgaccaactcattgtagctatttgctcgaatagtgttgagacgttcccaaagtcgtgttgagccctctctagaatctatcccttttcttttcatctgagttggcgtggtatccggcgtactagcataggtcgttgaaagcttaggcatactgcagcaccgagcgggttcattgagtcaatgcgaggagct

SEQ ID NO: 68013 - DNA, 600 bp, Zea Mays
accaggggtgtacatccttccccccataaaagaatctcggcccgagatttaaggctccagggtaagtaatagaaaaggaaacacgtcacaactttatttcctaatttctattacagaggagagggtgggtgtgtgggtttgttctaactttacaacaaagtacatataccctaaaaattacaagaggctaagaacttaggaaaatgtttttctaagaaatcttcagactcccatgtagcttcttcttctgtgtgttggttccactgtaccttgtagaagttgagggtcctttttcgagtaactcggtctttctgatccaacactcggatgggacattccaaataggttaagtctggttccaaattaacatcagacacatccatagtttgattagggatccaaaggcactacttcaattgtgatacgtggaacacattatgtatagtagacagtgattctggcagccaaagtctgtacgcaaccagcccacattgttctagaatagggatcaggccaatgtatcggggtgctaactttcctttaaccccaaatcgactaacacccttcatcggtgatactttcaagtacacatgatctccg

SEQ ID NO: 68014 - DNA, 478 bp, Zea Mays
atggtggaagttgggataagagtttaccgtatgcagagttctcttacaataatagctaccaggccagtttgaagatgtccccgtttgaggctttgtatggcagaaagtgcaggactccactgtattgggatcaaactggtgaaaggcagttctttggacctgaaattatacaagaggcagaagaacaagtccatcaaataagggagaatttgagaactgcatagtcaaggcagaaaagctatgcagatacccggagaaggctactagagtttaaggtgggtgatcatgtatatttgaaggtgtcaccaatccggggtatgagaggatttaaagtcaaaggaaagttgtcccctcgctttattggacccttcttaatcctaaagcgggtgggagaggttgcctatcaactagaactacctgatcatcttgtggatgtacacgatgtattccatgtgtctcaactaaagaagtgtctcag

SEQ ID NO: 68015 - DNA, 356 bp, Zea Mays
ctgcaagcggcgtgcctgtccattacgttggcaggcagcatgcccgtgctgcagagtgcactgtgctcatcatcactcgtacgttgccagggaagcttccgctgcacgccaatactacgctgaccgcggatatcagggcgcaaggggattgcactggcgactagcattagttgctccaagtattacatccgttatgttcctgggcccacatgtcggggctcagcatccttgtacgtgccccctttgagctataaaaagggaggcacgcgacgttacaggggggagacacttagacccaacttagactctcacactcacaagttcatacaagctctcaagctcaatacatcacacag

SEQ ID NO: 68016 - DNA, 842 bp, Zea Mays
tcatgatttgtgctcggcgcgaagtggataaccacgggggggaggtaaaagatctggcaggggtgatttggtcgcgggcaggggcttatcggatgcacttgatggccgtgcgacgtggccggacagtcatcgccgtggagatcgtcgttcaccacgattgtgccatgccgtagtctattcaccacatcgtcacaagctgtaaggactcgatagtgaccgccgtagatagttagccagtgagcgccacgttagcgacctccggtgactcttcccccttctcaccgcgagcgcttccccatccaaatttgtcctcctcgcggccgtcctctataaattgatgccttggcctgctccgtctacttgttatgaaccaagtgaaccactcctcacgcccgatcgtccatcgtagcgccctaatttggaatttcccccaaatccactctccgcgctgccgtgagcacctcctccatcgacccactgttcagtccctccacccgccttcctagctgctattcttgagccctggtacgttgcagaagcttaccgtgctcccaatttgtgtgttgctgtactgtgtcgtcgggaacacgtcgggattgtctcaagttccacggttgtgcgtggactgagctctagaactgtgtttaggttaaattaagtatttccagtggatcgcctggagtgggatttggcgtagaccgaattagagcatggattgtttggtgttgcggccggtacaagtttgccggtgagcgcacgccgtcgttcgccgtcggggacttcgtcttgcgaagaaatggtagttttagggtttgagaattttgctcactttggggtgcaag

SEQ ID NO: 68017 - DNA, 975 bp, Zea Mays
attgggcatggagatgcagcatcagtacaccatggaatctcagatgtcttcgggtgttgattagcctcgtggccaggacatgagaaggggcaacactaggggtccagcccacaagaggggaaagtcacaacaccagtgccaccacccctattgtggcaaaccctctgaatcaggtacttcaagagggagtactcagaggtatcgggctgttccgaagcccaggctggggttggtgtgttttcgttgtggtgaagcgcatcgccgtgccgagtgtcagtggagtggtaggtgctctatctgcagccaggatcacaaggatgtggtgtgtaggaggaatcccaatgggaaactcaaatgggagccagtgacttcttcctcttcgcagggcactgtcaacatgatgtcaagcgctgagcagcaattttctataccaccccctcaacagcaattctatatgcccgggactcctcagtttgtgcctatgcagggtttccctcagaacctagtcgcgcctactcctgcaccgaccactcatgtaccatcccagtttggagctccgcgtctgcctcatcctgcgactctgtggggttcttctattaatttcactccaggagcttcttcttccacgggtgtttctggatcatatgtgctaccctctgcggatggcagagagcagggagacgtggtgacaggtacagtctcagttgattcgtttgttgcccatgcactctttgactccggcgctagttattcgtttctttcggagaattttgtgtcgcgtgctggtctttcggtgcagaggatgggtcacccagttgtggttagttctgctaatggctccattagtagttgttcagtctgccagggttgttctgtcattcttgctgatgaggtcttttcagctaatctcgtggtgatttccctagggtcatttgatgttatcttgggtatggattggttaactctgtatcgcgc

SEQ ID NO: 68018 - DNA, 324 bp, Zea Mays
agtgagtttcaaacatataggttaaagcaagacaaaaaggaaacattttttgatatgcaccgacgtttccttcccgctaatcatccttttaggaaagatacaaagtcatttcagaaaggcaattgggttagagatgggcgtccaaagcgacaaacaggtgaagatatcatgagacaacatcgttacctaaaaccatcagaaggagttaggtttgaagggtatggtaaagaacacaactggacacacatctcctttctctggtagctaacgtacgtgaaggcattgatcttaccccataacatagatttgatgcatcaggagcat

SEQ ID NO: 68019 - DNA, 748 bp, Zea Mays
gttttgcggcagattgccgagcctgtgcctgccgtactataatgatcttttctttttctagcgctgcaaaccgtcacaactgttgcatgaccagctgggcggcctgccattactggacttggaaaaaactgaaggggtgagtgtttttttgcaaatggaaagcaaaatatcgctctctctctctatacgtgatgcaagcgactgcgtcacccatttttgcgtatccttgaattctcatctgcgctccctctctcttgtcctgcgtgatttgaagaaatccatcgggcagacatcttttcgtcttgattatcgatgcctttgcttaggctggtttgatccatctggcatagaggatgggtagagaacaccgttgcagtatataggggtcttttgaagcgcagtaactgttgcagacagctttatgactataatgccttagcttacaaggtagctgcgctctatagattgtagttgcagcacctacggctgtagggccgcctaacaagcttgcctgccagctgttaaccttctcttgtcttctccgcgcgcgggtcaacaccaaccaaccaacaggtcctgcatgcattgtttgttgatcggcaacttgtgctgggaacagtcaatgagaacgccgccgcctcccagtgcgtgtggtgtggtcgtgtggggaagaaggacgaaagagatggactgcggtcggggttgggcaggcaaatgtagactaggctgaggctcccacacgtacgca

SEQ ID NO: 68020 - DNA, 465 bp, Zea Mays
tattgtccaccagcaaattgaacttctgaacactttcccctgtaatatctgcaagcaatctgctcaaccagactccctgacaggttccaagtgcagcagctacatactctacctcacatgaggatagggcaactattttctgcttctgagacgaccaagtcaccacattcctccctaagaaaaacagaatgcctgaagtactttttctgtgaactaaatcacctgagcaatcactgtcagtgaaacccagtagagacagcttggttcctcctcctttcttgagttcactccatactcgagtgtaccagcaatatacctgatgattttcttcatagcacaccagtgttctttgtttggtgtctccatgaacctactgaccaacccaactgaaaatgacaagtcaggtcttgtattcaccaagtatctgagactgcctgtgatgcttctacacctggtctcatcctt

SEQ ID NO: 68021 - DNA, 628 bp, Zea Mays
tttaaattttaatggatccattgatatgttgttaatgactcatttattttattaaccacaaatgcgcaatcgagtaaaactcagcatgatgcaagatttatttaggtgtctttggggtatttatttaattgtgtaagtggtgtgttcacatgaaatgacggttagagataacacacatacataatacatgtatttcatttctcctttttgattttttttacaaagtaggtattacacggagcaatcggcttaagtcggcaatgacttaaggcggtgcgacatgctcacacttacttaactcagggtgaccactataccctactaacggagcaatcgacttaagtcagcaatgacttaaggcagtgcgacatgctcacacttacttaacttagggtgaccactataccctactagcggagcaatcggcttaagttagcaatgacttaaggtggtgcgacatgctcacgcttacttaacttagggtgaccactataccctactaatggagcaataggcttaagtcagtagtgacttaaggcggtgcaacatgctcacatctactcgacctagtatgaacatgcttacaatcactcatcttagggcgatctctacgcctcgcaaaatagag

SEQ ID NO: 68022 - DNA, 540 bp, Zea Mays
agggttggctgagcgaggggagaatttttggcatgcctcacatgacctagtgactcgattggccgtgcaaattatcgcgggccagtaaaatccctgacgaatcaccttggctgcgagggccctgggtcctgagtgtgagccataggttccattgtggacttcgcggaggattgctaggccttcagtttcggttatgcatttaagcataggctggctgatgccctttttgtacagctggccctcaactattgcgaagtccctgctcctgtgtttaaggcgtttggcctcattgcgattggtaggatggtagtggccctgcaggtatagtagtattggggcccgctagtcttcggccatgatgagattgacgattcggtggccttcggcgtcttgagttatttgcaagccttcggggttgtggacgactggcgtgccgatgacgtggtagaacacgtcggagggcagggcttcgccctgggctgctgctttggcccacgcgtcggcctcttcgttcttgttacgatcgacatgctgcagggt

SEQ ID NO: 68023 - DNA, 326 bp, Zea Mays
gttagatcccaggtctctgataatgttgttaggtatcccgaacctaaacattatttcttgaatgaattccaatgcttttgctgaggtcaaagaggcggtaggtttgtactctatccattttgtgaacttgtcaatggcgacgagtatgtgagtatagcctccttaagctttattgaatggcccaatcatatctagccccgagcaagcaaatggccaggttacagggatagtttgcaaatgttgggcggtcaagtgttgttgcttcgataggaactggcatgcttcacatttctaaaccaactctgccgcatccttctttgttgttg

SEQ ID NO: 68024 - DNA, 387 bp, Zea Mays
tccgcgcgggtgcaccgaggtcgaggtggcgtcgcgcgtgggtattgaccgcgtttatacttgcgtattttgactacaacggttacataaatcgtcacagcggtgtggtctggtcggtgtggggtggtggtttacgatttatgcttgtataattcgatgttaacaactgcatatcaatcgggcgcgcagtgtttacgatcatatacacaacaaattatgatccatatgaacacgacatacacccaacgttttatacctcgtacatggcgtggttcttgatttatgcttttgtaaactgtttacgacactttgcacagttctttatgcttaatatgaacacggcataaacacactgaccaacttatcgtgtgctgactagtggacccc

SEQ ID NO: 68025 - DNA, 779 bp, Zea Mays
cagctcttctacctcagcggcgagatcatcggcaaagtgtgatacatcagaagcagagccatcgccgacgtcttggccgtcaccacccaccacatcatcaccaagaccatcgtgcaaaggccgtctgtggttttggcgaagaagcagagtttgttcagcttgtcctcgacttgcttgttggtctcctcatcgctcaaggaaagatgttgtgttgtcaaagtcgtggtcgaggtcgctgagggaggcgaggaatgcacactccttgatcttggccttctagaggtacttcttcttgagcgcctccttgtcgaatcctcccttatacttgtgcttgcaggaggtgtactctcgcttgcccttgcaccgaccagagtggtggtcatgcggactagcctcctgcttgcccttcttggggcaactggcgacaaagtggttaaagttgccatagttgtaacatccgtccctcgacccgccatgtggcaaactcatacgtttgttgtggaaccacgtgaatcgactagccacaagcaccagctcctcatccctaagtctctccacctgctcctctatgatggtcaacaaagaagacaaaacaaacatagcagatgaggggttagaggatcaccatctctagagactagggccatggtgggtgcaccagggttttcaatcttggcccaggtctgatggtcaatctcagtggacttgagcttgctgaatagctcatccacggtgagagtctcatagttggacgactcgattatcaccaagaccttcac

SEQ ID NO: 68026 - DNA, 294 bp, Zea Mays
ttgaaaacaagtgaccaacatcccctattcttcattcaacctgactcacgtcatcggatcgttggcccctcactactcgtcatcccacatacttaggaaatacttcttcaggtgctgaccgttgactgccatcaggaacatagctccatttaactcctcaagcatatatgcattcccgggtagggcctaatcgactctgtagggtccatgcaagtttggagaccatttgtcgtatgtcgcgtctttggtcccgagtggtaacaccacttccgacactagatctccagcctaaaa

SEQ ID NO: 68027 - DNA, 385 bp, Zea Mays
cctgctaagccccgcaaccccgcctcatcattgccaaatgcccctattcctgcatcatccatctctatgctaataggagcactgcctgagggtaaggagactgtcgtgcccctcctcatcctcaatcacccctatatcacgttagatttctcaccagagttgtcccacaccgctgcaagcactctcgccggtgtccgagctctctcgattgctcccacatcctcaaatgtgcttagtgtgttcgtgtagcccgttatggatcgacgaccaacattagtcacagctgagctatcttctggctagtctagcctatgtcaatgaactcctgtcgtggagcccaaagccgtcgtcgtagctccaccacacccccttcatttaatatcac

SEQ ID NO: 68028 - DNA, 715 bp, Zea Mays
aagggtgtggtggtagggaagctgacaatcacttgatggcgatgaggatccacctctattgattctctctaccttttactctattggtcggcgcccttggtcgtgcccacaacccagtcttagttcgattgttcttttggggatgatggtagatacctagatggagaggttgctggagtggttttgatgtgtattctttgcagtatttgacgttgttatttatattgattaatgattgtaaccatgtatgcatgtggagattggaaggagctcagaaggctgggacactgacctgctttacgacgaggagcgtgggatggttcaaggtggccctgttcgcagacctgctttacgacgaggatgcgtggacggactggtgccccgcgcaggatgccacatctgaccgcgttatagccgtcatccacgacgccgagaacctaggtgcctacttgcccacgctctccttctgcttccctttacggttcacccctttcctccaaatgaactgacacggaactccctctgccgcacggtctttgtaaccaatttaaccctactgattttctaaaatcagcggtgaaattaacaagatgcccacgcctgccaaaattagccaccttatggttatctctttcacgtatgttcattgatatcgtttatcagtacagtgaacaggtaggacaagattgtgagctcaaaataatgtcaacctggc

SEQ ID NO: 68029 - DNA, 374 bp, Zea Mays
ctgcaatagaaaatatcatttcatccaaactacaatcgctccctactcatgcaggcctgaagtcaacacttagggctggtctaggaatatcatttttctaagtaatttttattttcacataagaaattagtttatttttccttagaacttgtaaaaatggagtttctaaaatagcaaactactcttaggaggtgtttgcttgacttgtgggtcccaccgtttgagtgacaagtggttcccatgacctattcaggtagtaacagtattacttaggccactcccaagtcccaatccaggagatatatagtatagttcactaaataggttgttaagaaaaacatagtatggcaccgcagctaaaaaagacaaaggag

SEQ ID NO: 68030 - DNA, 545 bp, Zea Mays
acctacacttttcaattggggaagtcatgataaatgcgtgcaacaaaaactttaatccatgcacagaaaatcattaagattgatgaaagtagctgagtaaacaattagtcgcaattacaggaaacatattagttctaatcaaacatggtaggcaaatgtagagacatcacagctgaaaactaccattctcgattgagaaaatcatgctaaacgggcatgacaaactttgatctaagaacgaaaatcttcatgattaatcagcattaattaatccagcaaactgaacaagtttcaaaacccacaaaacaaccagttatagtccctatcgaaattgagagtaggaaacagataagtcgcataatttgctggcgaatctattagaaaaaagtgttaagaaatcaacatgttgtcatatcggggctcacaacgtatcattctccattgacagaccatgaagaaatgagcacaggaaactttaagattcaatgccttcgatgaataggcattagaaaaaaaaagttggaagataaaactagctaactgaa

SEQ ID NO: 68031 - DNA, 292 bp, Zea Mays
ctttgagtgtaaatggtatgacctgaagtattataggaccgaatttgggatgacacagatccaacctgaaaaattgcttcaaggacatgacacgtatatccttgcccatcaagcagaccaagtttatttctcgacatatccatgcaaaaagttgtctacatggagggttgtgtacaatgtaaatccccgcgaacgcctatacacttctggtgaggacgaatatcaaattggtcaccttgagcaggttgatgaggtgtttcaagaagaagagttgccaactagttttcataat

SEQ ID NO: 68032 - DNA, 321 bp, Zea Mays
aacaccgtctaactccttgtattctgtctgcagtgatgcttggaattcgtaccatgtgtcagtcatctagcttctggttgcattcccatgctaaggtgatgaaccaccattttattcatgcacaccataggcttcttggttcagatgtctagaggcttgaatccatcttgatcccatgctggttcatacactccatcattcctaaggacattgaaacaagaactcaaaagcataggctcattcaacatagacttattattaaacataaggttagcgttcacttgagaatgaatttccttctgcaattgtttagctctactc

SEQ ID NO: 68033 - DNA, 1455 bp, Zea Mays
ccgatccatcagcgttcggagtcactgaactgccttgtcaggatgtgtgctgcaaattaaagtcggttgttttcaggtcgacgctccagctagccagttcgataaccgaaggctgatgatctttgcctggtgtcgatcgacgatcggaacagagatgtaaaacgccattggatgggagtatgagacaacgaaactgatatatcgtccccagcctgttgctatcgctatagagctatgctgcagggagtttgctgagaggcagtggagagcttgttgtctcgatgatctgccgtccactggtccatgcattgcttggtgccctgccattgcgattaattaataagcatgagcaacaagagccataataataatgccgtatgctggtccctgctgcccctgccgttggttggtccctcacgtgaaactccagcagcaggctactacacaccaaggactggacgagacgcacgccttgcctctgatcgatgcttactatgctgctgctgtgctagctctctccgtagaacactggtcagtgtggctagccagacgccagactcttttgcaagcgtaggttggtgcgttaattaagcatgcagttcttactacgccatgaacaaccacacagctagcagcacatgatgtgcagtgcagatgaacatcgttcaagttcagctaagccggtacggtggcgtctgtttcatgcatattattatccctagtccgaatcgacgcagaggcgtgcacagggactgttgcttcttctttttttgtttctggattgatgcagatcgagggccctctctctcacgtatgtactcgccgcctgtttttggcctcacacacaaggtaggtggtggggctcctctcctttcatttggttgaagatttaatggtatcagttacatggactatgactgcacttaacatctgagactagaaccggttcccaagccactactttctccaaagcacaagtgtgtaaatccagctcctcccatcttttttggcttgaagagaggtttccagtttctcagcatctgagtcgccatacacatacatcacctacttcacacacacacatccagttcttcccctgaaaacacaaagcattatgggttttccataaggaccacaaaacacatccagttcttcactaccatcccaaacatcttccaaagagggcacctctagcttgttcattattaatcacgtaaagtggccaaaattgagtagctaaacttgaattgccaaaccaaatatctttccaaaaaacggattcttctaccattgcatcccccactttccatttaacaccttatgtgtgccgttcgcgccgcccagaggacacctcgccaaaacggcgaagccctcagcttgggacagcaagataaattcggatttttcgtgttatatttgtgatccacaatctgggaccacaaggtatgattattg

SEQ ID NO: 68034 - DNA, 336 bp, Zea Mays
ataaaataagcaaactaactctaactaatattgactagactaagatactgaactaagcattattacaggctccgactctgtcgatctagggatccaaatctatccgggtcctgcagtctggggtaccatagttgaaacgaccacggggcggtgaacggtaagggtgctgaatcccgacaggggcgggagaaccaccatccagatagtggcgtgctgcgcactcagcacgcaattctgcaacctccgcccaaaccttgcccaactcatcgagggcgtggtccaactctgtgttgagcacagcgaccaagttgaccatgctgttcagcctgggattgc

SEQ ID NO: 68035 - DNA, 493 bp, Zea Mays
atatataccacgcggaggaggagccatgctacggtcgccacgacaaccttatcatgtgcatgatccaatgcttatctgaggcagcatgtatccacagcaactagcgaagacattcagcgcatccacagtggccaagttgacattcttgaggcgacagattggcacctaacgagattgccctcttctcccatattcggagtgtgcatcatcagtgcatggggtcatgtgttcataatattattttagcatagttgatgttagaatctttatgcgtaacaattaatgtaatttcaagatatgtgggaacagaatgtgagcacgtggtcgctcgtgcatcagaagagttggccaacatcacctggaacggttaataagcaacccaaactgtggtgtgtcaatgactaactgaggtgacgtttggttcgacgaaatgtaacgcaaaacgatttatgtgggataatggatatcgatacttttgtttagttgacctctt

SEQ ID NO: 68036 - DNA, 1067 bp, Zea Mays
cttaagtccaattattttcctctcattaacatgtacattatgtcatatatcagctgcataaccatcaggaaacttcaccccttttagtacttagcagaataatttcctctcagcaggactcattgagtaagcagttggtggcaaataaagttggtcttcaacttcaatagggtgaagatcacttctaatacctaggacttgaaggtctaaccgagaattcaagttatcctttgattttccatctgtgcctagaaatgtattaagtaagctttcactcacatttttccctatgtgcatgaagtcgaaattatgtctcaataataaatctttccagtatggtagttgaaaccaaatagatctccttttgaatatgactaatggttcccctttcttgcatctcttgtttgctggtttctttctagatggatccttgccaaaattttgattaagatctttagtgcactccaaaatttgttctccagaaagcggagtaggagctggtataaactcagttttaccaaatttatcaatgtcaaacctaaatggatggtcatcaagaaagaatctacgattttccatatagcaatttttgctgccattactaagtctaagtgaacaagtgtggtagtggaaatcaggacatgctgcttcaccagctgtgatagatccagatgtgtatcctagacctgggaaatcagtaatagtccacaatagtgcagcccgtaacttgaaaaattcaccctttgaagcatcataagttctaactccattgacaaacatatctagcagatcatcaacaaggagttgataatacacatccatgtcactaccaggtccatttcgaccaggaatcaacaaagaaaggaagaaatttgattgcttcatgcacattgaaggtggaaagttgtagggaatacaaataccaggccaaacactatagttgacattcatggacctaaatggattaaagccatcagtagcaaatgcaaggcggatattacggctatctgcggtaaactctggatgcttgtcgtcaaagttcttccaaaggggtgaatctgctggat

SEQ ID NO: 68037 - DNA, 719 bp, Zea Mays
caactccgggaattcctcgctggagatcctcttcgccgcatcaccatgggcgtgggtctccgcgccaccatttggggtaataacccatccatcctattcgtttcgctttgcgcatcgtgtagcaccgatctaatcgaggtttagtgtgtcacgcgggtgatctgcacagtccggccatggtgccaccgtacgccagggcagcgccgccatctctggcagaactggggggaagggcgccgtgtggtcgttggattctgacgtgtggtctggatccgatctgtgcctcggattgggtagatgtgtgtggagttgttgatcttgttgtggacggtcgagattagataataggataccccttcgcgatattaaatcgggagcgcagattcaatatcgggtggatgggatctaaacgtcgttcatccgtccgatctggatcgggcgcgtaggaatcgatcgtctattttaaatcctggacgtcagtcgatgatccgagggctaggacgacctcacgtcatggtgaactcctggtcgtggatctctgatgcacggtaagaaatgcataccgtttcgttgttgggatgttttaatctgggccgcgggatctattctagacggttcagatggcagcgtacctcttcgccgagctatactttctaaagagcccctgttgaatccagtaatcaacccgccgtccttggattctattcgctgagtcttgg

SEQ ID NO: 68038 - DNA, 559 bp, Zea Mays
aaccattcttatttcatttgatatacaattattcagttaaacaaaatataaacgtcgcagggatctaaacgatattaactatagaaatcgaagggtagctaacaaaaaatagatctcgtcttctaccttcagcacgtggccacgatatatggagcggatcgacggttttaacggtgcggacgagctaggcgcagggacggatcttcctggcgatgatgacggtgttcggtgtggcgatggcgatcatagtgacggtgcgagctccacgcagatagcagatagcatggggggtaacgagctccagcgggcatggcgctgatacatataggccggggaaggagagaagataacagggagaggaaacgaaggggtcgatgcaattaatggctagtggggagaggaagaaaaatgggaacaacgatttacgatggtggcattctccactgcggtagacgagagggcggctgcgagtggaagaggaaacggaaggccagtgcgtggttagcggcggcgttctcctgtaacgtaaacgtgagagccacggagaggcggagagcag

SEQ ID NO: 68039 - DNA, 2245 bp, Zea Mays
ctcgatcagaaacaatggacttaggcaccccgtgaagcctgattacttccttcatatacaagggaaccaactctaaagctgaatttgtggtcttcatgggaatgaagtgcgcagacttagtcaagcgatccactaccacccatatagcatccctgcctcgaggagaacgaggtaagcccaccacaaaatccatggtgatatactcccacttccactctagaatttccaatggcttcaataaacctgcaggcctcttatgctcggccttcacgcgctgacatacttcacaggcggccacatacttagaaacatcaaccttcatcctcttccaccagaagttttgcttcaaatctctgtacattttggtttcgccagggtgaacggtgtaaggcgttttatgagcttctctcaagatatccatcttcacctctgacttctgaggcacacaaagatgacccttgaaacgaaccaaatcattctcatcaatggtgaactcacggggtttaccatcgccgaccctctttcgagcttcctgcaacaaacgatcctgctgttgagccacgcacactttctcgagaagggaagattgaatgagcatccgagtctcctctctagcggtgccgacatagcacaaagcggcccccatacggtccagatctacgatcaaaggcaaggccacttttggaaccccggacctgctaagggcatcagccaccacatttgccttccccaggtgataatgaatggatagatcataatcctttatcaatttgagccaccgacgctgcctcaaattcagctccttctgagtgaaaatatacttgagacttttatgttcggtgtagatgtcgcaagacttgccataaagataatacctccacgattttagggcaaagaccaccacgaccaattcgaggtcatgagtcggataattcccctcgtgcttcctcaactgccttgagccataagtaatcactctgccttcctgcatcaacacacagccaacaccaattcgagaagcatccatataaactgtgaaacgcttaccactctcaagcaaagctaggataggggcgttcaccaacttgttcttcaatgtctgataactaacctctcaatcactggaccataccaaaagaacacccttctccaagagtctagtcaaaagcttagcaatgctggaaaaatttggtatgaagcgctaataatatccggcaagccctaagaaacttcaaatttcagagacactagagggtctcttccactccaccacagccgcgacattcttgggatcaactgcaatgccctgctaattaatcacatgacccaggaaagccacttcggacacccaaaaggcacacttcttcaatgtgccataaaattgattcttcgtaagggctcccagaatgagacggagatgccgctcatgctcttcctttgtctttgaataaatcagaatatcatccaggaacacgaccacaaagttgtccaagaactcatgtaacatcctattcattgcttccataaaagcagcaggggcattagttaagccaaaagacatgactatgaactcgtaatgcccatacctggtgcaaaaggttgtcttctcaatatcctcctcacgaatcctcaattgatgataactagagttcaaatcaattttggataacacctgggcacccctcaactgttcaaagagaacctcaatatggggtagcagatatttattcttgattgtcacttgattcaaagcacgataatccacacataacctcttgcttttatccttcttctcaacaaacaatactggggaagtccatggcgacctgctaggcctaatgaaacccttagccaacagatcatccaattgccgcttcaattcaacctgctcctttggagccatccgatacggggccttgtgaataggttgcgtacccggaatcaatttgatttcaaaagctacatcgcgctctggaggaatgcctggaagatctgctggaaacacgtcagcaaagtcacacaccacacggatgtcctgcacccgcaaggcagcctcaccctccaccaccgtaccatggagaaaaagattcccgacttccttgaccgacgatccggaagcaattgcgacaacaaggataacgtgaactttggagaacttcccaagagcaccacctccctacccaacagcgcctgcaataacactgtcttccaaaacaggatataactgcgcgatactgagataacc

SEQ ID NO: 68040 - DNA, 394 bp, Zea Mays
ccgggcggggccgagcatcccgtttggccatctctggttccaccgatatcttgcaacctgacctgacgttcacacaaagcaaagcggtcctcgatcctcctttcacattagtagtcgcctacactactcagctttgcacattagtagaccgaacacaacctcgattgaagagcgaagaccatgttgagcggaggctcgactcgccctcgttctaagctaacgaatacccccacttcgccttcaattgccttcataggttcactgtgtagggacttcgaccaaagaagcctctgatcgaacgagcccgtcattgaggggccgcgcaggcggcggttgaacgaccaacactttgctacacctcggaatcgaagtcctagtcacccctcgcgatgcg

SEQ ID NO: 68041 - DNA, 417 bp, Zea Mays
ccaccaaccatcatctcacctatctggtaagaaaaaatggcatcggatcacatttatggtgatgatgaccttgatggtgagttctctactcctctgggaagaagatcaggttcttcttcaaccccttaagctatttgtactgttgcatctactctgagttagtttcctacttatacagtgatactatcactgagtttgatgaggacttcaatgtcctttcttggtggcatcaacataagttaacttatccttattctttcactactagctaaagatgtcttgacagtgccagcatctactatttcctttgagtctacctttagtcttgctggcagggtgattgaagagcgtcgacgtcatctagctcctgatatggtagagatattatcatgcatcaaagattgggaacttgctgat

SEQ ID NO: 68042 - DNA, 367 bp, Zea Mays
taatcatggagtggtcatcctcattcttttgatcgttgacccgtgtgtggtttgtttgtgcctgtgtctagtttggtcatccccttaggctaggcacgattcgcctgacccctaggttgacttagggctcgttcaaccctttttcgttttgcccaacccctaggcgtccttgcttcacatcgggactaggggcaaacattagcggtttactcatgatccagaagcagattgggccttactcgagccttttcagagtatctttactcatcacgactcgtgggccttggggacccggttttgaccctgacaacagagttttgtctttcataagatgtgtatataatgaaattgatgatcaagattccaa

SEQ ID NO: 68043 - DNA, 665 bp, Zea Mays
cttgatcaaaatcttattgggttagctttcaaatggatctagttttaccttaagatcaggggcggagccagcgcccggcttgcccgggcacatgcccagcaggcttggctctactggtgcacgaaagcatgcggagatgacatgctgatgcaggactagagaaagggccgattgcttgagttcttcatttggctgatgaagattaggctttttggtgagatcaatgggattggtgacacgattgataattagagaagtaatgatattaagattacaggatcactgaaacaaatgttgtcgtcagtctaataaaagatcgggaaccctgtccgcatgcatgtgtgaaacgattgatctcagaagcatcaaatggtgtcgctgagatgaggccggattcaggagctgtgaactcacaagccacatgttgctacctcaacctcaacgaaccagccagccagcacggttccctgtttaattgttatgatgtgtcctgcagttacgaaccttgccggttgccgtctcttgcgaccatcttatacgcatgctttgtcagggtgacatgatgcatccttgccttacagccaaacacgttccttgcacggattaacacgccgtagtagaaacccagaggtcgtctctgctgatgaccagggcgtcactactac

SEQ ID NO: 68044 - DNA, 356 bp, Zea Mays
gggaaatagaatggagaagcacaacaactatagtgttgtagaggaagaggatctaggtacatgagaggagaggggtggagaagatgaacagtagtagttgagaggtagagagtttaggtttcttcaaatgattctttcgatgtctcctctgttgttctcatgtgctttgtataacaccgccagtggtccctgtacaactcacctaggctaaggcccaaggcccatacaacatccaactgtggtccctgacacaaccgcccaactgcctcctcccatcccttctcgttccttcccctgtaggctatgctctacagcgatccagcttcttccctgcgtgtccagctgccctccatcat

SEQ ID NO: 68045 - DNA, 592 bp, Zea Mays
ggctaatcaaaggtgggaatggttgctctggcttcatgataacatggtgcagcataccgggccatcaatttataagggcgctaagcggtggccggtgaatttggtttcacacagtggcggtcggagaacgaggagatcactggtgcaagcgattggtggcagctatcgttgcggttctccggcgatcaccggatacagataacccgagctattgcgacgtggtaaaagggtcatagcatggcgcgaccggggaaaacggcggtgcccgcggtaatggtcgcgtggccacgtcgccggcgcaagtgggcaagaggcagaatggccacagtgacttgtgttcatccgcggcaagatcttttcacgttgagtgtaatccactcgcccgaggcacgaatcacgacggtcggcgacgcgaatctggatgcgcagatcaccggcggcgaggtaccctgaatctgttgatatttgtgtgcactgtactattgtgatggttcttcagaaccactgagagagcatgtttggggttaatttgctccatattttatgtggtgacacaaccatcactctacatcaaagttgaagcctaataaac

SEQ ID NO: 68046 - DNA, 509 bp, Zea Mays
atccacgataacatcaaagactgcccagaaattcttctggcaaaacattgtttgccggttcggagtcccgtccgagctcacagttgacaatggcaagcaatttgacaaccaagacttcagggatttctgcttctccattagaaccaagcttgcctttgcctcagtgtaccacccacaatccaatggcgtcgtggagcgcgccaatggtaaaattttcacagccgttaagaagatgctcctcgacgacaagaagggcaagtgggtcgacctgttacctgtagtggtctgggcgctgaacacgactgagtgcagggcgactgggttcacccctttccgcctgctatatggatcggaggccatgaccccgcaagaaataaaacatgggtcaccacggactatcacttcagccgtccccgacgtagacgagcctacttcgaaggacctcatcgacggagatcgtgtcttcgccctacaggccataaacaaataccaagctcaaacaaaagtat

SEQ ID NO: 68047 - DNA, 466 bp, Zea Mays
cacggaggcgaaggcaagcttggtgccgatggagaagcagaaatctttgaagtcttggttgtcgaactgcttgccgttgtcgaccgtgagttcagacgggactccgaagcggcaaacaatattttgccaaaagaatttctgtgttgtctttgatgttatagtggatactgccctcgcttcaatccatttggtgaagtattcgacggcgacgaaggtgaacttgaggttcccctgagccgtgggcaggggcccgacaatgtctaggccccagcgctgaaggggccacgtgtgggcgattagcttcacgaactgcgaagggcgtcccgagtgtggggaaaatttctgacaggcttcgcaggatctcacgacccgatttgtggcgcaaatcatggcgggccagtagaaaccttggcgaatcacctttgccgctagggccctaggccctgcgtgggagccgcaagtcccg

SEQ ID NO: 68048 - DNA, 455 bp, Zea Mays
ctccaagcagaatgccaagttccagcggactgattagtgattaccacgaggtaacacatgtgctcctggcataggaacacaagaagactcttgtagaacagcacatcgtgaaggaaacccaggtagaataattttgcttattctttctttagagtatgcccgtgtgtttgtctatagagcctaatcgttctaaaatttatttcttatgttcaatcctttgggttaaggttttatgtacagtgagcatgaaactatgccagggtcagcatattggaaagtagtttccctcccataattttctagaagcaataagttgttgagtattacgccgccattttcagcttgtttgcatgaatgtccatttgattttatctgcatcattaggaactgccaaagcacaaaaatgttcatttgatcttttagttacctacctcattgagaactggcaatgtgaa

SEQ ID NO: 68049 - DNA, 873 bp, Zea Mays
gcggagtgacagaggggggggggcagaaggaaaccactcgagtgggttcgtcgcctggcctgagacttctgatccaccgtaagtggctggacgcattaattgcgattgacaccaggtcgcagtagagagtcggtctaccccccacttatgacctgcgtagcccctcggcttacagtgcactcatgacctgcgcagttgtctagtcatcgtcgcactcatgatctacgagcccctcggcccacggagcactcatggtctatcgagcctaggcctgagagcgtgaaccgtccacaaagtctgcaacgtgacaagccacgctgagacccagaatgtggaggccaggggtcggcgtggcgtagagatagtaatgatggtgccaaggaccatgtcgcccacgccagacgtcataatgagcacggacagagatgacaaggtgcatgtggacaaacgaccttgccacgataagacactcggttttaccatggaataatggctccttctcaaaggagccaccgaccgtcgaccctcgccttggcctataaaaggaggaggtcgaccatgaggtcgggggttggacagatggacgaagacaacctggtgtgacacagacacacaaagacgacccaagacagaagacactcgagtgaaggcaaccgcacatgcccggagagacttggaggccgaatccaaggtttagcatagggctccagttccgtagtctttagggtcactcccacataagagacttgggagcctttcctctctctctcacccgattgtaacccctactatgagcatcgagcaatagaggtgccgatagagctgtccaagactggatgcatggattatgcctgaaccagtataaaccttgcg

SEQ ID NO: 68050 - DNA, 448 bp, Zea Mays
aaaactcaaaacccatgcatccagaagatcaaaactaaatttattgtttggcaccactaaaaattgtctctgctcgaaggctgactgtagtgtaaaacaatattttacacaatcatatgtacaatctgctggagccagtctagccacatgcatgacctgctagagctagtcagaagaagtgaagtgactacatatcccatccgggctccgacagacatggccacaatcgaagcctaacggtcacactgacttacttgtagcaacttgtggcgctagagaagttcttacggttacatcgatctcaacagtcacgtgagtggcaagagaaagttacaactgcacgaaactaccttacctctctttgcccatgtgaacgacaccaccagacgattgaaaatggtagctcaaatgatgtaataccagaaacgcatacgacataccagaaacg

SEQ ID NO: 68051 - DNA, 473 bp, Zea Mays
gtggtagggagcagtggttgtaacatcagtgttggggttgtgcgtagaagtagtgttgataattagcaaatgttatgtgaatgtttgtactaagtttaaagaccacaacaggtggtgaggctccagatcatacctagtgccattctggattcccggtgaaggcaagtaaaatgcagtggtggtttgctatcgcttgactcgtatcttattccctatcattgagtattcataagtattgcaggtgttaaacatggaattttacaatgatgttttatttgatctaaagtattaatggtatatgttaataatgttgatgaacatgatttgagaatggtatatgtggttgactcacgtctttgaggaagttgaagtagaacatatatcgtaatttctactcgtcgtcatcgtccatcagtgtcgtccaatcgatctccccatcttcatcgtcggagaggatgatgactggcgctacc

SEQ ID NO: 68052 - DNA, 722 bp, Zea Mays
gtgccttggttgcctcgcttggggagattcctgatgatgaatggcaggtccattttgaggtgcccctgaaccctagtgatgcagagataagcgctatgcttgatttgctggctgaggactcttctgatgctgctcctgctggggcattggtagtggcgcccctcccaaaggctgatacaaccttggatactcagaagcctgccagtactcgcccgaggcgcccttgccgagccagtcaacctgatccttctgctgatgagcagaaaaagaaaaagagacgcctccggcgagtatctagtttggatcgggacgctggtacctcggttcctgctactgaagaagtgcgtgtgactgaatttactgacgctgaccccaatgggtgtacccaatctgctgctgatcccaatgtgggtgttccatctgttgctgatcccaacgtgggtgctccatctgttgctgatctcaatgggggtgctgcccgtattgctaatgtagacgacgaggaggaagaggatgaagttcctttgactcggaaaaacagtcggaagtgcatcgctaggggtgctgcccgtattgctaatgtagacgacgaggaggaagaggatgaagttcctttgactcggaaaaacagtcggaagtgcatcgctagtggggtgctgcccgtatcgctagtagtggagttccttctcctgctttgtctgctctcattggtctgcaagaac

SEQ ID NO: 68053 - DNA, 564 bp, Zea Mays
cgaaccgaaggtttaggagttccttgaatcgcccccaggatggcgtacctttgtcctcctggagttgcgtgtgccagagctgcacgacgtcgtccaggtgataggacgccatccacacgcgctcttttgccatggtacgatgctggcggaagtacgagtcgcacttgttgaggaaaagcatgggatctgtcgtactatcgaagcggggaaaatcccacctcctgtgcttgggcggatgattcgggggcggaccctccaagcggtgctcgctgccaccgccggacgatgatgcagacttctccttcttcatcacctccatgtcggccttcatggtggccatatcggtggagagggttttgagggcttgcaggacgtcggccagggtcggcttggccatggttggtgcggcagaggtaggcgatggtggtggtagggggtggtggtgggtggcgacggatgtagaggactgcatggagcgggtgagagaggatcgtcgagaccttgataccaggttgtcaagggcacggtgatccctagtagctggcccttgactgcggagctcgt

SEQ ID NO: 68054 - DNA, 872 bp, Zea Mays
ggaggcagtaggagcgctgctgcggaaactcgtcgctggtaggattcaagcgtcagcgaagccattcaggctttgttctaccatcgctgcaactaggggaagatctaattggaagggcaccagctgcaatcggaggaattactcgctgaccggccaacctcgccgccattcgcaactcgccccgcgcagtgagcttcgcgccgtgtctgccagtaactcccttcccttagctgcgtcacgttccttgatcggtagcaaatcacctcacacccgaattttactagcatagacttcggaattgctcgacgacatcacatcccgtcgtgaaatcgccccatccatggttgagaacctctgcggcgggtaacagtgggcaaagccctcggggcaacccccatcgcgcccacttccattcgcactagtttgcacaggggattggctccgggagtcgggggattggattaacgacgatggcgccgccgctcggctggggtcggggtttgtgcaccgttggatacgagaggtgcggccctgattagaatcgaacactggttcggccagggcctctggtggccatcgatcccagatccggtggcggaggatggttatgcggttcattaaaatcgggccgcaaatcttaaatcgttcggtctgcgtagaataccgttttaggaaggtctagatctaatctcgtgcgcccatctcagatcgtgcggccgagattcaaacattccccttcgctgcgcgcattttctaaaagagaccctggggttttacctattcaacccgccgtcctcggcgacagtaatctgagtctagggaatattgatatgttagcccctgctgttattggattttggcgcccagtccag

SEQ ID NO: 68055 - DNA, 790 bp, Zea Mays
ctggaaatataaaaatgtgaatacacaatacagtcatacaaatacacaatacaaatgtttccctggttatacaaatacaacttagtccatcctggttataaaaatgtgaatacacaatacagtcatacaactgagcaccagaagatccagagtgatttgaaaaaccagagtgctatggcactgcataatggaccaattggtatgcccccaatgctaaaacaggtaccttttctgaagtttggaccttacataactggaaaatactaaaatttcatttctgataagacacgcacatatattcctaatagaccaactactactctcccagtgccaacaatggttattattcttggactaaaatatgtttccacttttgaacaatggacccggactaagcaagatgcccagaatgaccaaaagctctttcttccatcctccactccgcagctgtcatcgccacaactacctcctgttaatgaagaaaacaaatcttgctatgaaaaacagtcactcaaaattataagtgctaatgtacctatctggattaacacattgtgcaaaacaacctatgttttcaagcgacgaatcattaaaatttaaaagtaagctttaggggaacaaaactatccaaaaaggagtcagaacttacaccaaatacttcacattatatgtttctaagtgcccagtcaaacttaaaaatgtctatgctgaagaaagcactcaggcaatggcagtgacaactctggaattaggtaaagacaattctatcagtgaaattcagattatataa

SEQ ID NO: 68056 - DNA, 378 bp, Zea Mays
ctcggcttccctcccctggctggcgcttgctcgccgggcccgtggcggtgatgagggggcggcagtaaatagttgtggcagactggcagcagtgtggttgaatcgacgcgtctgcctgtgcggctgcggcgtagtagtagcctagtaggagcagcagtgcgaggggatggtgtgggcgtgggcctcccagtcgttccatcggttaggaccgactaatcaacatcgtagaccgacttatcaaggcgagttaccaattaatcagcaaggaacactggtaagccgacaggccgagtaggagctaggttttggggttttttcccttttcgtttgaaatcttttaaaataggagtgacacttgcaatatatgataataacagt

SEQ ID NO: 68057 - DNA, 447 bp, Zea Mays
cgacgagtaagcgtcgtctagctcatttagttgagccgacaagcatcacaagcatgcgagggtgctaaaacacgaataaggagggtgagtgcggacctgagagcggctagcctcgatggggtgattcacggtggtgcagatgaccattttgggggaaaacccaaattctacggctatagtggctaatcggagctgagagttagtgtcttgggttcgtgataacttggcgaagcagagtggggcatcaatttataggagctttaggcggcggctccgaatttgggagaagagtggagcttatcttcctggtgaggcaatcaccgaggctcaccgtggagcgcatgcgttcgcctagcgactgccactatctcggggatgccacgatcatggcaatgtggtgaatcaggcgactacgtgtcccttgctgcgatcacggcgagcaccggt

SEQ ID NO: 68058 - DNA, 421 bp, Zea Mays
cttatctcagtttatgcacaagaggacaggtgggcagggggggggggggtgttggctataatcaaccagcaacaggtagagactaggaatacactcactgcatgcttgacatggaggcaaacaaatagacagcatctcatggaatggagttcacaagggaatactttactgcagctgtgcgtggaggtaactctcgggactcaatagcacaacgtggaggagggctggaggaccagcggctgcatgatcatgtgcacgtggactcacacccacaagcctacgcaggacccagcacaggggaaaactatgagtctacctgctgcatgtttgccagggagacagccagacagcagttagatgagatagagttcatcccctttcaatccaattcagggcagcaaagtatatcccaggttatttc

SEQ ID NO: 68059 - DNA, 545 bp, Zea Mays
ccactgcggcatgcatgatgacatgggccaggtcgccacggaaaaaacgagatttgggcggagtgtttggtgcgccgaatagggttggtatatgcaggtaattggtcgttgtgcagcgtaggtacagggtcgttggttgtttgaatcgtacttcgtgagcagttagtgctgttgatcggttcaggatctcgtatctggtagaaggcacggatcaggcatgcagactgtacgaggcctcatgcttggtagactggtagtcgtctgtagctaaagacaggtatggtttttactggacttgaaaatgttgttagctagctagtctatcgatgttagtttcgtagagagtcaacgcaaatcacctttgctaatggtcaattgtatactccgaagtccaaacacaccttttttatcacttacagtacgtcgcaagtctgtcaaaacggcgcccagttcagacagtgctgttcgttttcactctgagcttccatgaattgctcactcttttgctaacagtattggaacccaagggccagtgatcttcattt

SEQ ID NO: 68060 - DNA, 415 bp, Zea Mays
cacaaggatatatagcccctctccaaaactagccgttatgggccaatttcaccttttctgcgcacatgcggacggtctgcaatacaagcccggaccgtccgcacaagaatcccaacggctataaacgattataaaaatgtcagagcattcaaaaatgacttgcggacggtctgcccctcaaggtcggacggtccgcgatacataaaactgagccaaaacgatgttttgctgactctgctcatttgctgaaatttgtactgtggacggttcgcacctggaccccggacggtccgcaatacaaaatctttgtactgtggacggtccgcacctggaccctggacggtccgcaatacaaaatatttgtactgtggacggtccgcactcaggccccggacggtccgcagttcaaaaaata

SEQ ID NO: 68061 - DNA, 579 bp, Zea Mays
accaaagcctgatattaaaaacaaatgagtacaaagacagtaatttgccaggagtattgccagaacagaaaaagccaaattacctgaagattagaaaagaacgaaggaaatcccaagtcacgagaagctaggtgttggctcgacgaaggaatatcaactgcggaaatatgaagaacatcgctagggattaattcaacaccactagcaggcatcagaaccctagcatccggtgcgccaacctctaaggcgactccctcatttgaagcatgtgctgctattatgccaccagagtgtggtggagaagacccgacgtggacatccatggaggtatgagaaggggagcttgctcggacacccttgggggctgggttgcagctcgcactgcccataagagccggatcatcaccggcaacaccctcgggggctaggttgcatcttgcgctacccacccgagctggatcattaccggcaacaccctcgggggctgggcaactgccggcaccacccttgaggactgggttctctgcaacagccacctctaaggctgaaggattctcagtcacctccatgggaattgag

SEQ ID NO: 68062 - DNA, 726 bp, Zea Mays
cagatgtaggataatatacacctaaaagtgaaacaattgacaaatagaataactctaagaattccaacacatgtttagccgtcgctgagtggtcgttgccaaggcggccgagtggctggactgctggttgagagtgtgagggaaggggatcggggtcaggtactcaggccgtcggcgcatcgagtgagtggcggcaggcgacgatcaagaggattgggatcatcgggatcgagcggcgacatggttagaaggtgaacgaaaggcagagagagaggcaactatggttagggttttcaacaaactcttcttgagtctgagcgtctgacatgacgacgatggcactttgtataacatgggatgcggggacagggggcatggagtcgtcaggccgagccagatgtccatatgggccacacaaagggtgattctcataatgcttggagttggaccatcgggatgcaaacaggctgggtcgggttgggcaaggcttttcgggttgatcgggcctatcgaccagctaaatggaccaagcagtattcatgctgtgccgcctcaacgtccttgggtctaagtccaagcatggcccttgatgggcttcggggtagcccaaacactgttaaatcgtgtcgtgttgtattcgcgccatggtaaaatagtcgtgcttcatgctagctcatatatccctacccgtctagccacccagtggcggagctgggcctatgtcac

SEQ ID NO: 68063 - DNA, 653 bp, Zea Mays
gttcttacggatcagtggaatctcttcttcttcctcatcaagcacaccgctagcagcatgagcatcatcgcaacctctagcattgtcctcagggatggtgctcgctgggccatcgccaaggaataatgtagaggggccagggtcttgttccaggcatgacaactgccagtgttgccttttcttcctcttctcctcatcaggtgcagctggatggttcactcgacgtgaatgtttccgacgagcaccctctggtctctgaatttcctcgtcttcgccaaactcttgcccagtcgcaattgccatcggctcagtacggggagagtcagatgattctccggctagtaggctaagaacaacatccatctcagcatcatcgatactggatggcatctcgaagtgagtttgcttcttgacctcagaaagattccgaaggggagcaattaaggcctcaatgtcctctgaggagggtcacactctatggccccgggctaccatctcgaacaggaggagtggagacaaaatcagagaagggactatgcagaggcaggttccatgcagagtaagataagggagcaccagcattcaaaaccctgcccctcagtatcatatcaagtcggcttagcaggtcctcattgggaatttgcctattagtg

SEQ ID NO: 68064 - DNA, 566 bp, Zea Mays
gacgaccctctcccttttataggtcgggacaggggtcgggcggcggtggtttcctcgggaagaagtcgtaaggcaagggtaaaactagtgttttaccctgggagaggccacacatactcgtggggtccggtgctgtctggttgtcgtgtattatcgtggtggatgacgcgtcggcgatggtcctaggcaccatcattctggctacgtcgacccctggcttccgtagcctggggctcggcgcggcccgtcgtgtagtgccctgctggaggtttgcacactcagtcctagaccgatagaccataagtgcgtcgtaggtcgaggggcgcgcgggccattaatgcactgttatccgggggctcgtaggtcatgagtgctatgtagctcgaggggttcatatgtcatgagtggaaagtggaccggcgcccacgctgtggcttggtgccaaacgtggttaatgcgaccagtcatttatggcgggtcagtctgaggcctggcacgagatccactcgagtggttcccttctgacacgcccgaactcccttgtcaggctccaccacgcccgaccc

SEQ ID NO: 68065 - DNA, 444 bp, Zea Mays
cttgttccgagtaccccgttcctgggtactcgacacatgtgttcttctcaatttgtttatacacagtttttggagcgactagagcaggccccttatgtagtaactatatagatgccccgctcgaagcccattgatggcatagtgaattgcaatgtgatcttcgacagtagggatctatgacttcagaattactgatctgttctaatactcatggaggccctcagttttttattgcttgcaaagtgataaccatgcaaaggcgtcactatcgagcctatagccttggaagttgagcaagaacctatcatgaaggaaccatagtcacaaagttcttagatcgatagggtcaaggaacatggccaaggaacgtggtacgcaacatatgagataattttacttggtgggaacaaaaatgaccttacgtacctgggtcggggacggcgt

SEQ ID NO: 68066 - DNA, 710 bp, Zea Mays
cagatatctaaagagtacaggggcttctgcgtaaaaatcctacagactcagagcatagtcaacacagactgtgggtttattctcaataaatccaggggcttttatgttattctgacccgcgaaggggtatcctgaaattagggccgacggatcgagaacgtacgatccatattagattgatgtaataagtgaagcggtaagtgttatcagccccaggatcccagatcggcgatcaggatccatccacgccccgctctattcctgaccgcacgtattccgatcaacggcccagattgaacctacttctccacgaaccgttacgcgcgtggttccttggatccagatccgacggtgctcatcacgccatcacccttaatcgcccgattcgtccgatcaaccgcaaacactctggatcaaccctagtgaacaggtacgctgagatctaatccagaccggacgttcctaatccgacgcccaggctcttttccccaacccgacagcgccccggcgatggagctcagctcccacggtggctggtacgccgacgagcacgaaatccggtgcctaaccgcccaatctaaaaattgatcgatacaaaactgagaggggaagatggcgaaactgcagagagggttctcaccggtgtttgaagaggttgcgagcctgtccacagaggagagtggatccgcggcggcgcttgtactccggcg

SEQ ID NO: 68067 - DNA, 563 bp, Zea Mays
acgatccatgagcgatcattttatctcgcacatccttggtgatcttgttgctttcttataacttccctcggtaaggaatctttacttcaacccttctattggaaccttacctatcttacgcttgattgttttctccacttcaccacttcgcgagtcttgccttaactctatccttggtcatgcttttcacgattttcatccttacccttgtcacatctatatcttaccctaaagcttatattatacctgttctctaaaaccttatctcttccatataaattttagagttgtattttacctattttctcttcatagtatcctcttccgtgtcgcttgcgagttttcaattccatcctttgttgtgcttctgtttagtgttgcctttacctttcccatctctcaaccataccttggtgattacattatgtttgttatctaaaatccccaatctcctatcccaatttaatagtagtattttacttatctcacccttggcaatatcctcttctttaccacgtgtaagccttgatgtaactccatcctttgttgtacttataccactg

SEQ ID NO: 68068 - DNA, 584 bp, Zea Mays
atataaggatagagatgtgtaaactgctggagatagtcttatggcctattattgtttgctagtctgagcttttgtcctacacatccattcttttcgcgtcttcccaaacatatcttactattactattggaaattcaggcatccagccatccactatataaaatgattgctccctatatgtcattgttttttagaaccttgccttttgtgttattgttgatcattagtggggagtcagacatggagcccaggggaaaagttccattttgggttttggcttccatgttgctttgccccctccctcttgcaccatctcttctgtcttatcagatcacatgctgctacagtcaggacagtttggcccagaactgcaaatcgttgctgccttgctatgcagactgcaacttattatttttttgttagccttattgttgtaaaatacgaaatttctaaataaatcttgattttccagttttaaatctctgtacatgtagtgtgtccaccagttcttccagattgaccaaactctgataattcaatctgagcatcccatctctaaccactgtagttttctttgcatcagt

SEQ ID NO: 68069 - DNA, 526 bp, Zea Mays
ctttctaacaaactttttgaaagtcctgatgaacattgttgtgtcttcatcacttgaactttctaccacctttttgcatttgtggtccttgttcatttgaaccatcttggttgagttttgatcattgacaaccatggcatgtgtgtcccttgccttggttggtgcatcctctgcttcatgttgttgaatcttagcaaacaattgatgaggagtcatctcctcataatcatcacggtctcttatcattcttgctaggctcttgtccttttatttataggctctcatgaatagcctagtgatcttagaattactccaatctttactaccaagaactcttatcttattgactaacaccatcaaccgatcaaaaagtgattggagtgactcacccttgatccaatcataccttgtgagctcactctccaaaaccttgatcctaagcccctttgctttaagattgctttcatgtgacattttgcgattgttccaaatatcatgagcatcctctcttccttgcaccttgcgt

SEQ ID NO: 68070 - DNA, 384 bp, Zea Mays
tccatgctgaggcgctacatcgcgctccaggctccctttctgcatttgcttttgctgcttgccaatgcgtgctctggtgtcttttgggtccatggcctgagtctgatcacttaatggcagagcgactatagatactaagctacaataattgtatgtgttgtgtccccttttgcaaattgtttttttatccatagtgcttggagggacctaatttcggctaggaccatgcaaagttgtgtgcctaattgcccatattccttgatgtttgttgcttaatctaagtgttaaacgcatcaccacttatgacaatggtttctgcctcacatccaaaatggagatatagacgacataagtctgaggtactcctgacttgctttgatattg

SEQ ID NO: 68071 - DNA, 404 bp, Zea Mays
ggagagcaaggccactaggcaaagcattgcccgaagaagacatcacaatagcaatcaactcccaatgccccagcaagacaaggtgcaccgcaagatgtaacagacagtcatggtcagacatacaaccgtgggaaggtaaatcacttggagaccgaagcaatccaggatgcagcagacatggcagtaagtatgttctgagtcaaatctcacccaacaaaagtgctattaatactagtgctatacattcatttgttactgcaacatgggtagaaacacataatattccctagaactaatgctaccaccactaaggattagttcagttgggggaaggttcaagcagataaaatgtgtctaaatgtaaggttattaccaattgaaagaatgctaattgaaagggaccg

SEQ ID NO: 68072 - DNA, 447 bp, Zea Mays
ggaaacaatcgacgacctgttagtaggatgtgttttctaaaggcaattatggttctatgtgctccaaagagtgggtcttggtggcttggctccataactagttgatctaaatttctttggctagtggaataaagcttctaactcaatggatagcatgcttagaagagggcttaactccctggtcatcatgggtgtttagatcatttggaggcacaaaaacagttgtgtctttgatggggtctctcctaatctgtccacagtgttagttttggccagaaatgagttctgaaagtgggatacggctagtgcaagaggcatctctgcccttgcagtagtggtgcagggtgtggagggttgatccttcgcatgatagttaggtcgcctttcttaatcgcaggcgcttatgtaatttgttcctttggtgtggcgtgagtgcgtgtgtggatg

SEQ ID NO: 68073 - DNA, 467 bp, Zea Mays
tgatatgctatgtttatgcggcatgccttggtaccagcaaagaatgatgattgtgtattaccctgtggtgagcttgtgaagctctgaatcataagtcgtgggaaactgatggcgacattgagttatgagccgctttagtcaatcaggatgccttaaaaaggagaggactgatgccatgtgatttagggaatacataccctctgttgtagggttgggatttaaaaatttaaaccctatatattggagacatttcaagatatctatctgtctgattccaaattcccttgacgtgctgagtgcactgttcgatttttttattattggaagctttgtttgagatgctgcatcttcagttttctagtggccgatgctgatcgtgctgtatataattcaggcgtgctcattgttgttttgtatactagctgcactgcatccataaattgtggttaggctaactcgaatgtttg

SEQ ID NO: 68074 - DNA, 1493 bp, Zea Mays
ccatggttgtcttgggcttggatgctctagatgtagaggaatgcttttgtcttccaaggaacacctccaaacttggctatttctgttaggacatatcttccaaaacctcatagagatacataagctcaccaatagctgtaacagagagatttccatgcagatcagccatctaacgaaagttgggcaagacatcctttaccagcctcatgttagcaagacaaatgggcaccaaatcaaccattgatggagctaagtctttaatacatctaccatccagccacatgtccttccaaaaaaagggtattggccccatccccaatcttagtaacaacaattgtagcaaacaatttctacgctacaacacacactttaattgagaactccgaccaaggctttgtatgatcagttttttgcagtcacggccatcgaatccggaaggcccaaccaagattccatatgtcactaatccctagctcaccaatagctataatagagagatttccatgcagatcagccatctaacgaaagttgggcaagacaacctttaccaacctcatgttagcaagacgaatgggcaccaaatcaaccactgatggagctaagtatttaatacatctaccatccagccacatgtccttccaaaaaagggtactgtccccatccccaatcttagtcacaacaactgtagcaaacaatttctacactacagcacacactttaattgagaactccgaccaaggctttgaatgatcagttttttgcaggcacgaccatcgaacccggaaggctcaaccaagattccataggtcactaatccctagcccacccatctcctttggccaggttactttagaccatgccaagagacagtgaccacccttcccttcttgtctacctcgccacaaaaaattcctttgaattttatcaattgctttgatgacccaaaccggaatatccaaagccatcttagcataaatcatcttggctgttaaagaaaactgaacatggatggctctaccagcccaagatataagatccgctttccaccgcgataatagaatggctacccaatcaacaatggcctgaagttggtgccttggaagcttccggagtgaaataagcaatctgagatacttacatggaaaatctgaaatgggagagggaagcaactcttatatacaattaagctcctcattaccgcaacgaattgggaatacactactcttttggacattggtctgtaacctagaagccacaccaaacaaccagagaatgtccaaagccatgttgatgtccgaagcaaccaacctcaacaaaataaccacatcgtttgcatacaaagagatacggtgatgcaaactgttggaagacaatgactgaagcagattctcctcagaagcacgctgcaccttcaaattaagaacatccataactaaaataaaaaacataggggacaaagggtcaccttgtctcagccctctcctatgagcaat

SEQ ID NO: 68075 - DNA, 312 bp, Zea Mays
ctgaaacgaaccaaaccattctcatcaatggtgaactcccgcggtttaccatcaccaaccctctttcgagcttccagcaaaagacgatcctgctgctgagccgcacgcaccctctccatgagagaggattggataagcatctgagtctccttgctagcggtgccgacataacacaaagcgatccccaaacggtctagatcagcgatcaatggcaaagccacctttggaaccccagacctgctaagggcatccgccaccacattagccttcccgggtgataatgaatggacaaatcataatctttaatcaatt

SEQ ID NO: 68076 - DNA, 882 bp, Zea Mays
aaaactactaaagttctaaagtacaatggaatcctatctaactaagcctaccatccatcacctggttggtttgagttgtggccacttcctccagttgtactatagctggtgaataggttgtttgcccatgaagtcatgacgtcgtttgggccagatttatctctaggtgctacaaccaaaggggaggtgtctagaaatccatgtaacacatatttggatcttaaatactaagttcttcatttgtaacacgcactcatgtacatatggatgaatacctgatctggacgaaccaaagggaaatatggtggaggtggaggcgatggtgcaagtgttggaggcggcatcccaaaggttggcagcaagacgcccgtttgttgtgacacttgctacaaaatagatgcaagtaaccattgatgaagtaccaaacgaaacaagtttgtagttacaaataacatattacttcaacttaatgagaagaaagcctcttgctaggcccataagtttgcatagtactcgtccttatgcctttggtgctcaacctattgcctctgatactctgttgcctcaacgcttgtaacacccaaaatacctattttggaatttgaaagaggttctccaaaagatgtgaattaaaatgtctttgataaagatcttcatgaaaatactttcttgaaacacataaatgataatattgaattgttcatatatagtttgaatactaagactgaaattctaattaaataataataataataaatatatctatatacctatatatagattatgtttgtttggaatacaatgattcctattgagttatatatatttctatgcctctatgcttaaagagataaaatagataagtaaaatataatggttgca

SEQ ID NO: 68077 - DNA, 419 bp, Zea Mays
aaatatctttacgaaatgcatcaaataattacagtaattggtaaactaggtctgaaaaatgcataaatgcacacaacatcataggttggttcaataaacatcccattaaagtttaaaatgatttggagaaagtggtagtatagatccatcacaagcatgaacatctcccactcagtaactaggctctatgtgagagatgtacgcattttcggaggatgtatgtcaccactttgtcataataaattgaaattttttgtcaacattgtacaccaaaatgaagtgtacatgcaagtttttagattttctagctacctaaggtttttttgccacttatcatttagtaaaataataaataattacattaatagttaaactagttctaaaaattgcaccggcacacaacatcatggtacacctcc

SEQ ID NO: 68078 - DNA, 1051 bp, Zea Mays
cctgtcatcttgtcgcaacggaccgcttcttccgccatggccgctgagccgccgttgcaacctccgcggagatctcggggctcctggggtttttccgcgactccaccttccggatcgtccgccacggataaatcctctcccggcagctcgggcgcagcacgtccctccattccactgccagctccgtgaaccgagggaagagagaaggcggagtaccgccgcgggtgatctagggaccaccgtcgctccggtggaacttgtaggggagatagcttcgcactctctggtggatcgtatctgctgttctcgttgggctcctgtggccgtaaatcggtggcgattgctcgacgactttccccctccgttgtgacttgcatctctgcgtggactgcgccaccatcgtcactaacccaagtaagtgatgcccagagctattcgtcgtggtctctacttcgtttagcactaggttgattcaggattgggcgtcggacggtacgagcagagcccccgccggcgaacctccgccttgggcactcgggtgccgccgtggccggcccgtcgggggagaagaagatgatgcgtggggccgttggatatccatcatgcggtcgggattagatgcaggcgtgtgaggttttgagccatggatttgcggatcaggggccaggatcacccctgcataccccttttcgcttgtgagatcgtgaccattgatcgcgtattcgacggcttagattagatctaggggaaagttggccctcaaccgtcgatcgtgcagggaatggcctggatcaaatctggcgtatcccttcatgtcattaaatccgaaccgtgattcccatatctgacggcctcgatgcggtgccggttcgaagttaatctggacctaatccgcaccgttcatttgcaatcgtgcgacccagataccgccataccccttcgttgggtagatttgcgtctgaacccccgcagaatcacaaaaccaacccgccgtcctcactcactatttattgagtctagggaatcttctgcgctagcccctgacctatcc

SEQ ID NO: 68079 - DNA, 300 bp, Zea Mays
caagagcaaatagtctaggcacagattggagataagggtgttcaggttatcaaagacatgatcaagcagaaggcagagaagtacaagtgttttcgtcaggatagcaagggaattctatggtttggagaccgattggttgtacctaagaacccggagctcagaaagaagatattggatgaagctcacctttctaaattctccatgcaccctggcagcaacaagatgtaccacgatctcagatccttatactggtggaccagaatgaaaagggaaatagccaagtacatatccgagtgtgac

SEQ ID NO: 68080 - DNA, 581 bp, Zea Mays
ataattgttgagtcccgttaaaaggaaacactaaatgatccaacgcttacgaatttagcacaataaacgttgtaacgactagttggccggttagggagtataaatacctctccaacgcgttcattctagctctattgcccatttgtttagctgaagaaacactttggagagagagagagagaacctctgcatagtgggctgtttgagattagataatcacgagattaaggagctcattagtgcatagagagtagcaagtgtgcctccaccttaatcatttgacttgtttaagtcaagtgtgagtttgtacttattactcttagcgatcaacatcacctagatgacttgttgatggagtgcgaatgattgcggatgattcaccatgctagtgtggagaagaaacaacctatatataacacttgattcttgcgcgaaaaggggagccacacccttgtacatgtgctccaatgaggactactgaggagtgtcaactctctagtacatcaagaaaatgttgtcttgtttctaaccttttttactttgagcatttactttcatacaattatcttattgtatttaca

SEQ ID NO: 68081 - DNA, 608 bp, Zea Mays
agccctgcgaggcattctcttttgttgaagtgtatagatagattgcttaccttctctcaatatagcttagcttttcactctaacacttgtgacactcgctgttctcttcggtctcctggatggatgggttggaaggagccaaatgcccgatgtgaactgtaattcaaaatctgaagaaaaaaaaaatgaatgtttttacaggtgcatgtgagctgtatgactagttagaaaaatacggggattgtattcaaacaggagtaacacacgctcatctatcggtgattcggtgtgatccgatcacagcgctagctacttgtgttgtttattgtttgtttcagcctgtcagggaccatgcaatcggattgtattgttactactgctgcaaaagctttcttaccgggtcgtgggccgtgggccgtgggccgtggccgcggccgtaatttccttctatgtttgaaaggaaaacataatggggacgtgataggccggcggccgcactgcatgtagctggtccttgtccccgaccccggccagatctgatgggttagccgaagtacgaaaaagcacagcccaaatacgacgtacctcgaaatattttagtgccggac

SEQ ID NO: 68082 - DNA, 312 bp, Zea Mays
gagacctgtgtcatgagtattttttgtgctatctagctgcttgtactgtgcatgccattttaaccttctttgctttgttgagttcgattaacttttgagcttcggcatttgcgcaaccactgtctaaatggctgaggataagaagatcactgaccttgcactggccaggttttacgaagctatggagaagaccaatacggagaaaatcaccaatgagatgctggctggattatctgaaaattccagcgatagggaaagttttgacatagaaagtggaaatgaagaagtcgaagaccggccatggaggccaag

SEQ ID NO: 68083 - DNA, 576 bp, Zea Mays
gggaaattaatctcatttggggaggctgattttggttaactctgtcctatgtagcttacctatgtttatgttacccttttttcaagtcccatgtggtgttcttaagaaaatggatcactacagatctaggtttttttggcggaatgaccaacacaaaaaagtatcatctcgctaaatgggaaatactatgtcaaccaaaagactagatagggcttggcattatcaatctcgatctttaaaataattggctacttagcaagtggttgtttagactatgtaatgaagatgggatgtggcaatagctgattcaaaacaaataccttaagaatgcaaccctaagctaggtgtgcaaaaaccaggcgactcacacttttggtcaggcctaatggatattaaaaaccaaattctaaatctaggaacttttatagtaaagaatgggacccaagtaaggttttgggaagataatatcaattttcctctctgtttaatatcatccgaaaaaatgcaactatggttgaagtcctttgttcattgccttcgaatatttccttcaagagatctttgatggggaacaag

SEQ ID NO: 68084 - DNA, 1189 bp, Zea Mays
ctccctccatctatgtactccggtactccctaaccttaaccctaacccctccgctcctcgacgtcggccatcgctaccggctccagactccggtacagcggtactccgtcctcctccctcgtccctccctccgtctatgtctgtttgcttgcttgtagttgtagctgtgcagaacacatcttgtagctgtgcagaactcatctggatttggtgcagtacctgtgtagctgcctgcctggtcgttgttcgcttgatggtcgctgttcgcttgctattgttgttcgcttgctggtggctcagtggttgtggttgtgctatgcctattcacttgctgtacgtcggtgtcagtgtgattcactgatgggtgatggttcactgtcgtgtcctcctcaccgtcgcttgtttggacatctatattgataactcatcatcctcccgagtcctgacctcctcactcaccctcctaattcctattcccatctggctgtctcccagtcccagactcctcacaagctagcacagtagcacctagaatccagcctctttgttgtcatctctggtgctctggctttcaaaggtatgtctttagtgtttactcatctctagttaatgtagcctatttgtagaatttagtttaatttcagttttggtacattgcagtcgttgaggaaccggaggcgacagttcacaggtctagctggtttagctcctcgggctcgtggtcgaagtcggggtcatggaccttgacgcggctgtagaggaggaggagcgccggcttgaggatcacaatgaggtgcaggatgctaggtactttctggggttcggtgacacccatggggatcctattgaagttgatactgttgtcagctctcaaattggtactggcactagatcaacaagcccaccagtccctgatcctagtcaggctgatcctgatgctagtggtaccaagatgaagaaaaggtccaagtggtggaatgacttcgatgaattgactaagactgtcgatggtaagaaagtcaggtatgctgcttgttgcaagcactgtaagcaaacattcagtgctcgatctagttctggtactggccatttgttgcgacataattgtccttctaagaaaacacatgaacgctctggccaagtccaatcagtgcttaagtacaatgttgatggtactttgcagcgttgg

SEQ ID NO: 68085 - DNA, 645 bp, Zea Mays
gaagaagagcttaaacaacatattacgagttattacaaaaacctctttagtaaaccagacacaacattgatcgaacttgaggaatctaatactcatgatattccccaagtttcggactctgagaatgaaatactaactgctaattttactatagaagaggttaaaaaggcagtatttaatatggaacataataaagctcctggaccagatggttttccagctgagttttatcaagtgttttgggaaattattaagtttgatctgtttgcgttgtttgtggactttcataaaaattccctaccggttcacagcttaaattttggaataatcactttaattccaaagaaagacaatgcaaataaaatacaggattacagacctattttcttacttaatgtgtcattcaaaatcattactaaagttctcacaaatagaataggtctagtagcagacagaattgtcagcccctcacagacagcttttatgcctggtcgtaacatcctagaaggagttattatcctccacgaatccattcatgagttacaaaggaaaaagttagatggagttatcattaaattagacttcgagaaggcttatgataaagtgaaatggagttttctccagcaagcaatgcgtatgaagggt

SEQ ID NO: 68086 - DNA, 631 bp, Zea Mays
agatcgatgcctgtcgagcttgctcagctgcttgtcgagcctgctcagatgctataagagcctgctgctgcgtaagagactgaaggattgcagctagagtagggtccacggcaggagggcagcaggggcagcactagaactcccgacctcatgatcatgtgagcgtggaggcataggaggcagaggcggaggcggaatccaaaaatcatcatcatcatcatcaggaactgctgtgccgtgagtctcgaactgatggaatgtcacatcctttgcctgaatgtctgtcactggatcaggtactgacactgggtcctcaagggttggacggtaggagccaaagtggaggcgagaggcctcaagagtgccctagaactgcagtggctagattagatgtgcgaaaatgtagcagagataatgagcatacgatagctgtcgccgggcacaaagaccatccaatatcgtatcctcgatctcacatataagaaaatcaaccacatcaaactttgaatgagagatcggggcaccaagtagccagagctggatgtgagtggtggcctctctataacccatctggggcagtagcgtccatctcatgagctgatataagtacttggtagctggagtgaaatct

SEQ ID NO: 68087 - DNA, 769 bp, Zea Mays
tgaacaatgtccacggcggcgttcccacgtgacgatgcggcgttcccaagcgatgatgctgtaacaccccaagtgttacttagagttttcactcaaggctacaccagcaaagaccatcatcacatgtggtttagtttgagcaaaggactccaaacatggaaatcaagaccctaagtaagtgcaacccatcttaaatgtcatgccttggcttatcatgcacatataatggggagaattgcccaaactcgaatgcaaacccccttgggacaattggagcactataagagagtatggccaaaaggctataaaaaccacatgatcatgacttgggccaattataacaattgtagtacacataataccctactaaaaatagtaagaaagtgaccccaaaagatttcagaaaaaccccaaaaggttcaccaaagggttgagcataagaaaaaatcagaattcttctaagtccaaaaccaacccttttccaaagatcaaacatgttcaccctcattcaaacttcaaaaccacttgacccaattgacaaagtggcgcctaaagacccctagaacaccctggaaaagtttgaacccaaccctaagtcgtttgacacgacttggcacaagttttgtctcggtgtggacagctctgacagagccgacttcccacccccgtatctctctaacccgaccacatctccccttggaactcacatgaactaggtagccctaggtgcagggaagagatctctcaaaggtcttagggcaagattcgc

SEQ ID NO: 68088 - DNA, 383 bp, Zea Mays
ggcagcaccaacccgctggggaggacaaaaggcacgaactctctggcggcaagttcgtcggggaggatggcgccggcgcaaatccttccgccgaacgccagcgcatcccatccaagtaggcggtataccatgtcgagcactcactcagtatgggcacgctcgggatgaacttataaggccatggtaaactatggtgacacaaagcagaaaccttgaaggcaaaggggcgtagagagctcgaaggcgaaagggcaccgcgagtgggagagaagcaaggcatggctgctactcgagggatgaacccctctttaaaggcagactcccccgctcccgcctcgaaacgtcgcgagaagtctcccccgatgcacaccggggtatccatc

SEQ ID NO: 68089 - DNA, 669 bp, Zea Mays
aagttgttggttcctgctgtcgtggctcacgtctagggttttggcgaaccctaggccacgggtcatgacatctaggtgtgtgtggtgactacgttccccgaatcactcacctccccatggccagcttttcctaggaggtaaaatactcgatttgctcatgtttcatagcccatgtatgttagtgatgctcatggcgtgctcgtttgaacgctaccgcagtgatttcaccagaacaccgccgcgccacctatgaacgccaccgctagtagcgtgtacgtcaaccggtgaacccgcatcttccccgagcaactcaaagtgagaatcatgttcttgagatgtcgccgatacttgttgtggcttagaatggaactctaccgcgttagtgtctcgggtcgagctcgtcggagctcggtatgtcaccaccaccgtggtgcgaggtgcttgggagcactgttgtccgattaaccgtggtagggtggcatggtactatcgagggtcgtgtaggtgtgcttcgtttcaccggaggtgaccgtcgccggcgagtctgcacgagtgatggccagcgtccgccagagtgagtcgtggaccaaggtttgtgaaaaaacaaaatggcagggacctcggtgctcatgtcagtgaaacaaccaaataggacacatgacctttatt

SEQ ID NO: 68090 - DNA, 412 bp, Zea Mays
tagatgcatgaaggctcttaaaagatgaacacacaatagacctgaaatcatgaagaccaatcattatttttttaatgatacacattaatttgtactacaatcaacaaattatttagtatgcaattttattcttttaatcaacacaatatgtacaaacttgtatgttcccactgtttgcactcgcatgtatactccccagcttctatgtccgctgttatcttgaattgatgttgtccccacacaattttattagatctttttgtatgttgtacgatccaatctttatcacaactgtctgtgtccttcaaaattctgtatgcagtggtgtatttcattgattcctcaaatctattcataacagctctagtgtatgccctagagactctcacttcgaacctatacaatgtatctg

SEQ ID NO: 68091 - DNA, 459 bp, Zea Mays
agtcgcaagacgtgtgaagatttatgatccccttaatgagtaacctaaggtacatatttatagtccggggacttactaaccctaatgagtttgaaaattaactctatcttcctattttaaagctagcttaacttactcttactagacacacgtccgccttggcccgaaaaattcccgcgtaggggccaatctcctaattttcagaattgcccccttgcagcccattttaagttatgacccatcttgagcccgattaaattccggtgataacaagatcatgacttgattatccatcgcggcattagaagcgtgatccagcagtcttgcaccctctactagtaggtcctacaactatttcttgctcagccctgcccaagagaatatgagcgcactagcatgacaggcaacatcaatgggggatttgattaaaatgttatcaaaacaaattttgttcctcgc

SEQ ID NO: 68092 - DNA, 1264 bp, Zea Mays
cagcctgcaggtattctgatgaacgataatccaatgggaaccccagaagcataagccagcattcatggttgaaaagaagagcccggtggttccaagcatcattgtgacggaccgcggtgaaagtagcatccagatattgctgggggcccagcagaaccaaattatcccgctccaaaacactacgaaactgcactatcacctgccccaagtgcgagcgctgaatggcacgaacaccgacccgatgatgctcaacaagatactccctgaccacatctctgaccacagggaacaaaaccccgtgctcaggtaaaggatgaatattgataatcgcccagtcctcatgcattggcggcaaacgctgcgagactgacctgaccatgatcccacggtgctggaccaccgcggcgctgaagcctggtggtaggaacggctccgggtccactcgtcggtacgccattgccagaatctcagaaggtcaccggagagccaagagcaaaggagcggtttggggttttggtgaagtgacacccagcgagagctccaaggacgtttcgggcgcctgttcgtatatttttagtaagaccgccctggcgaattcaccgaagcaggcaaaggcaggaggagtcccacccgtcagggacccgggtgaagggcggaactaggacccgaagtccaacaggcgagacgacccctccaaaaggcaattactttcgaaggaagggaacaaggagagggggaatccaaattccgatttcttacgattgcagaacaattccaaatgccccctggctttacaaaattggcagagaaacgctgaggaaaccgaaccagacaaatccgtccttccaaggttgaggtgggccgaagggcccggcccagacctgagaggcccattacgaagaatgggccgccaacgaagcctacgagtcctggggaacccaacagcagaatttgaaattgaagaggagcaatcatcacggccctgacgcccgcgtccaatcatgcttccgttaagcctaggaagacccacagaaggaaaaggcctgcaatggagagcatgcgacgagactcccgaggccggggatgagacaggaaacctcgagccccgcgcacctgaggaggatcccaatctattgaagacagaaatcctcggcgcattcaaatttccagcgaagcgggaagaaggattatgacgacgaattgggacaacgtttgcaccggtcaacggcggacgcctaaccatatcagcgaacgagattttttc

SEQ ID NO: 68093 - DNA, 271 bp, Zea Mays
agtttatccctacggacacgcacctggaaacgaaagaccgccaccacaagcttatgttgagagacaacgcactcctcgggtatcaccttgcaatccaaacatgcttatttatcctctcttcttgtaaggacaaagtcaatctaactagagtgttggctactacaataggtcactaaatgggattctctttctaaagagaaagtgttggctatcaatatgccaaaagctattgcaaagtccaagacttcctctccctcatgtttcctactac

SEQ ID NO: 68094 - DNA, 546 bp, Zea Mays
tgcatggtgctgcccgccgaaggttgagatgattggattggcttctcgatcggccacacggccatgcatgaagatgcaaacaaaaaaggcacctttctttagtagtgctcagtgtctttcaggaataccttcccggcccttttcgaagataaattcgggcatttattcattcatgcattgttttaggaggcaaaatgagacaaatagtagtactaatcccgaaaaggcaggcagaaaatagcgagtggacatgcagccaaatgcacgcaaacacggctgctgcgcatccaatgcaagaggatcgtcgtcctcggttgcagcatggcgacggtgatgccactgttttgcatgagcaccgctaatttcgagaatccaaatcgaaatcccatcgataaaaaaagtagcgttcgccatatcttatgcttcattattccatccttacttgtgcggccgcccgcatgcccatgccgtacgtagctagcagctgcttctctgggcatggcgtacccggtgcagcgttgcgtgatccctcctcgtcaaaacatg

SEQ ID NO: 68095 - DNA, 319 bp, Zea Mays
catgaatagacgagaatattggaaaccaggtaccacaaaaggtcattagctagcccaataacgtcttcatccactagttgtactctagtaccctctagtgtgaatacaatgcccacaatatcatagaaacgtcatttgaggtttaaaaggtgatctattgttttgaattctttatattccaactttttagcaactgtatggtggaaacctgttatcaaaaaaggtcattagctagcccaataacgtcttcatccactagttgtactctaataccctctcgtgcgaatacaatgccctcaatatcatagaaacactattt

SEQ ID NO: 68096 - DNA, 429 bp, Zea Mays
tgggaaaccaggtatcacaaaaggtcattagctagcccaataacgtcttcatccactagttgtactctaataccctctagtgtgaatacaatgcccccaatatcatagaaacgtcatttgaggtttaaaaggtgatctattgttttgaattctttatattccaactttttagcaactgtatggtggaaaaaatttgtcttacaaccttaacctatgtttggacagttcactcacgcaatttggctaaattttccatagtctttattttattttgagaaacgatgtggtatattgatgtgtggtgttttacttgagtggacataaacacaatctaaggatgccatgaatagacgagattatagttaacatattatcacaaaaggtcattagctagcccactaatgtcttcatccactagttgtactctaa

SEQ ID NO: 68097 - DNA, 272 bp, Zea Mays
aaatcagatcccagatgcatccccctcgccgccgatgatctttacgtcgtgattcacgctgtcgccgcgattcgtgttcgctggtgcggggataaccacgacggagtaaaaatcttggcactggatcagctcaggcttgggcacggatgaggttcaccgtacccacttgctcgtcgtgcggccgggatagatttcgccgccgttgatcgctcaccgttgtgcgccacgtgcttaaacgctagcccacgtcgctgtgaatcatggtatgcatg

SEQ ID NO: 68098 - DNA, 289 bp, Zea Mays
actcgccaactcaagctacgtaggcgacggtgaggctggggttaggagtaaacgtttcctcttacgttcgatcgcttgtgtatggggccatgcaatggtcggctccgcacgtcagtgactcatctgcagctacgtccacggtggtaagtgcagagggacaagacaacaaccatgatatatgttgatctcataatacgacaatcatgtattcatgtttgtcaaacacatcctaatgatacgtgcacctgtattccaatgcaaggctaagtttaatactccttccgtccca

SEQ ID NO: 68099 - DNA, 488 bp, Zea Mays
ggtgaaagataccagatggtgggtcctatgggtgtgctcctaaaaacttcaaagccgaagttgtgtgcaggtccaggtcccagtctagtagtaggtagtctcaaactgtagagactacctcctaagggtcggaccaccaattttatctttggtatactggtatccatcctcgacacgtcgagcctacctcccaggggggccaagtaccagggggaagttgatgacgctacacacaacaaggccaaataacatacagataagtttaagttccagtgctacctcattagcggttcttagaatatgttacaaaaccaaaagttattacagccgcccccagcggaaccctcgccttgtttctacaggatcgactattcgacgtcggcaggatcacgctgaaagcgagcgaccaccgtctccacgacatcttgtacactctcccgggcggtatcttttgtggcggctaccggaccatcgatcacctgcgccaa

SEQ ID NO: 68100 - DNA, 653 bp, Zea Mays
aagactattgtcgacgtttgatagtcgggggtaaaatggagatgtagaggtttgacaaaggggctcttgaagggctactctactagccttcatggcgaagggcatagcctagttgtcgtaatatggcaatggcaaccctcccaaaactgctagagagccagtgggttttttggaggtttaggccatcacgacataacaccatatgtccttttttggatcagattcaagagaaacgactgagtcctatcatagttggctagccagatcctgagagtatgaatgcgtggagttgtctgatttggtgaacgttgtccctcgggtttcctgccttaggtcgattgagattgtttgagtggtattgactcgggttgtctgcctctatagtggaggcctcccctcccttttatagaccaatggagagagagttacatatgataggtggggcatggggctagattgaatgcctgtattgtcctccatttatgggtgcccccatcccacatttatggaagccctgttgatgtcagtctatcgttctaggagtgttagtggcgcagtaggcactcgcaccacctgtaccagatatcccaggcatcgtgtggagctagtgcaagtttgtcgaaagcataatcgtggtagggagagaagtaggc

SEQ ID NO: 68101 - DNA, 690 bp, Zea Mays
aaaagttcgtgcatattgcagaaacactttgcgctcggttccagctcttggcttcctacagcccaaataaacatccccatcctaattatagcttcgggagtgatttgatgaagaaatatctggaatatcttcaacacttcaaccacaaatttgctcaatgggaaccgaaggcctgccttaaaaaagcatcggtaaacaacaacttcattttctttaggagcaggggcagtgctgtctcctccaaccctcacaatagacatgtcacgaaagtatcttcctctcatggtgtcaatatgactttgcttaatggctgactttctgaagatggtatggcttggccgccagggctggtcctcagaatcttcattctcactttccacatcataatcatcgctgtcgtcgaaatcttcagacaaatccgccattatttcctttgtgatcttttctgtgtttgtctttgccataaattcgtaaaacccagcaagaaaagggttcgcaactttcttctcctgatacaacttatcctcctcggatatcttcttctcctcagacatcttcttctcctcagtcatcttcttctcttcagacatggagcaagcacttgtctttaatccgaagctcgaaaatcaggcgagggctgataagcaagagttaaaaatctgagaaaataacacaagcagcagaaatggc

SEQ ID NO: 68102 - DNA, 547 bp, Zea Mays
gtcggaggaagttactgccgaaggtgtctccaatgtcgaaactgaataaattgtagctagaggcgaaagtgaagaagataacagtattctgagtgcaacaaagcctagccacattgagtttgggaaatctactataacggaggatgacatgattatgatgagaaaagttggctatttcggggaggctgagagcaagcttgtctggtttgctagggaggaaatagttccagagccaaaagaggacgaagttgtcattttcaagagcttcttcaggacaggatttcgatttcacttaaatgacatgataggggaagttctaaagaactttgagatataccttcatctattgacacccaatgctattgtcaggatcagtgtttttatatgggctctccgaagccagggtatgagcgttaatgccgaagctttttgccgggtgcatgaactgcactatcagacaaaggccagagcagatggtcttcataagaactttggctgctacaactttgcatatagaaaagatacaaaggctccaggaattggctat

SEQ ID NO: 68103 - DNA, 523 bp, Zea Mays
cggcatggttacttctgtcgaagggcttaaaattcctaacacttctgtttctttaatttttggtttttccaccttatttttatcgacttttgactcacctagcacggatgaaggtaccttcggcatcatagccagatcctcagctttctgtgtaggaggaataagctcctttggttcagcagctgaagaagtttccccaccaaactcgggtatcacggccgtctcgatatagcgttgctggtgggtgagaactttcaactttctgctcttcggcgcgggctcatctggagtggccgaagcaacagtcttggccgaagcagcggttttcctctttcttcctcatccccgcagcgggtagcagtaatcagggtaaacaaaaccaatggcatcaaaaactctattcaatctcttttttcctcggccctcgaaggatgtggataatgcatcatcttctgctttggaatatgacccaagcaattcatcacttatagattcaatacatttcagccagtcgttatttggt

SEQ ID NO: 68104 - DNA, 960 bp, Zea Mays
tcgtacatgggtagctgggttgccttgtacgaaggtggccatgggatagactgcaactctgtggctaggggagaagcatcatcaaaagcaatgttatcatggtcaaaatcatcataccacatatcatcatggctggggcccttctggcgatggtctctttgttgtggtttattcccttgctcagtatcatgtgtgatatgtcttatttcctcggctgcttcgtcaatcttcttttggagctcagccagccaaagcatcttcttcttcctattttccacctgttgatgtatagcttccaagttgttgatctcttggtctagctcttcatcttgtggagttgggctagtggccttcctcttctgactttgggcctcccttagaaggatcccatcttgattggtgtccaagggagcaagaacagcccctggctgtggggggatagataacccctgggtccattggaaggcgcaaattctgcttggggccacatgccagtcgccccgcaaggacgccgtgtcgtgggccgggcaaaggtaacggtggaaatgggtagacctaggaaggcgatggggtcacgcccggattactcgtggcttgggcgtgatcccgtagaagctgttcgcttttcccgcgcccgacatcctcgaaaggatagctcagaacagaggcatcgggttttcctcaggataagcgaagtctattcactattagccaagagataagctggaagagtttgatcagcatgtacgcgggaagtaccctacgatcgtgtatatatggccaagtgggtccccattgttttcaactcattagcacctcaccacttggaagacaccacttgtaaacgcctcgcacatacagaatcatcccaggaagtagggtagtacgctcctcaagtggcctgaacctactgaaactcgctccattctttctcttctagtgcccccggcatgaaccatc

SEQ ID NO: 68105 - DNA, 396 bp, Zea Mays
gttgatagatagctgctgaaatacatcactgccttatttacaacaatcggtcttcattccagtgttatttttggctccaaaataacttgcacgtacatatttatgcatgtctccacaagaaacggtaacaaactaaatttgacaacgctgcaggataccactgggcatgtcattactcctactaaacgtgcaagctcattggaagagttacaacaggaggacaaccctatagatgaggttggaccttttactacttcactggttgtctcaaattactcaacagtcgagacacaagtgagtagcactaaaaaaaggtgagcatcgcatatggctgattcctactattatttcagattcataccatttgcctgtgtatatctatatgataaaatgttt

SEQ ID NO: 68106 - DNA, 390 bp, Zea Mays
atttgattttggttattttctggttacctgtcctgcttggtgaaaactctgctatgttaacatagatatgtatccgtctgcttccgttctagtttcatccctaggtaggcccttgtactttacaatttataggttggacacaaatcaatttctgctgttgagatcagtgcctagaggcaacatatagacaaaatttatcttctactctgattttttctttgaaaggacttcctagctgacatacgtggggaggtaactcatacatgtttgtatgtattcaagggatttaatatatttgttatatgatagttctggggttacctcgatgtaagtgataatgtgtattttgagggctgaattattccttctaagcttatgcttcaccgcttt

SEQ ID NO: 68107 - DNA, 589 bp, Zea Mays
atgatccactaaagacttatccaaggctactagggtcagatggtcctaaattaagccctaaaagagaatgaaaaagaagcttatgcggccctaggtttgtgttgccaacaaaagtagtgagccttcccctgaggctaatatacaaccttagctgatgccctaggacactaaaaatactacaccatacataggacaaatctctatggtttgactaagtgtagggtagtgaaagacttagttgagcacttccaatagtgatctgccagtagcaccctagacaaaagcaccacgaccaacaacatcgacacaagtggctccaaggcaacaaattaaggcctaagaattttctcatcgaagaagatgaagaatacctagacttctaggacccagtgcataagtgaccataatctacggggctgtcaaaaagcttagctcatggcaaaacctcaagatctttctccgagaggtgcatgccactgtcatgtggcctcgctctatcggtccctaaaatggacaaacactcctatcacatttgactctactaactatcctagcaacatagcaggcacatggtttctattccttttgg

SEQ ID NO: 68108 - DNA, 667 bp, Zea Mays
agcaaaagtatgtaagattaccaaagtttaagagaacttacccgacaaccagccttcatcatgtgctttaaaagttaaggaattaatacataaggaaaacatcatgtgcattacaagttaaggaattaatacataaggaaaacatcatgtgtattacaagttaaggaattaatacataaggaaaacaaaacagaaacaagaataaagcatgtctggttgcatatctagatttgtcaggcgcataagaaaaaacataatcaaccaaaagtgaaatactaacatccaacatcttcgccatcgtcatcctaccatttgtctagtcaaccttcaaaaacacaggttcttttttaggagccttggccacgaaccgctctcatctttcttgttctggtagcatatgaatttatatctcatcaaaaaggaagagatcaagagaatgctcattgcaggtcaagcaacccattctcctccttgcgatttcgcatcagcttgatccaggccaccgccatccacaacggcgtcttgctaggacatcaacatcattgtaggaaaaaataaataaacaaagcagacgttaggttgcccatcctctgccacccgggagcaacaaaaatcgatctccacttaccacttgtcaggcttgaaacccttatgcaggatgccagag

SEQ ID NO: 68109 - DNA, 659 bp, Zea Mays
atgatgaatggattggataaaaatatctaatagctgcgatgactcatatttttaggaagtgcgtcatgtgatggtcgatagtttcgttgttgtgcttaggtttgtaagtaggtatatgcgcgagtatgttttggcgtagattaaaggttcatagaggagaaattggtacgcatgtgcgttaatcagagagccgactagctataattggggatgaagtaagtagattggaggtataggttttaatcgataagaagtttgatcggtgtggttagattgtttgggcatatgtagtgtagtggtggtataaaaaaatgggttagaaattgatcggctaaatggcaagtgcggttagagttgttttgttacttgggattgtgtggtgaagtgatggcatgactacgtagccatcacgtcatctattgtgtgactatgcttaagtgtgccttgatataaattagagggtttatggttatgccatgatagtctagagctaaacgcttgtggtactcatcataatcttgcttggtagtcaaattaagtcttgtttgctcccgagctgaaattgctgcatgtatgctctctgttgtggtgatgattcagtaaatcaagttatcttttaggaatatgtgttctatataaaagatgtagttgacttcaat

SEQ ID NO: 68110 - DNA, 681 bp, Zea Mays
aaataaacagaaacattggacttcgaaaattctattcgaaataatagataagtactacctttgtccactagaatccattatacttgtggatggaggtactagtgttttgtctatagttctaaacttggtgtgcataatcaacatcatcaataccctaaagtagtaacagttttcacaattcacaaaagcaaaatgaaattgaaatgcagaaaaaatgcaaccatgcacctcatgctacggatatgattatccgtgggtcaggagcagtatctgacctcactattgcataatataacactatttgttgcaaacagatacacttaaaaaggttgaaccagttgctattgatggtttcctaagatcgacatggaaccctagtaagactataaatctagaactaatcatgtgggatcaacccactactgcaagcctaacaatgaagcaaactgagctgggtgtaaaatattctacacaggatagaaaggctagtgctttcaagacacattgacaaaatatattgatttgttagttgtaaaacatggaatagtatctaagacttcactggatcaaaacatctaaaggctagaaaagatgactacaactctagaactgaacatgtgcgatcaaaccactactgtcagcccaatgatggactgaatggagctgggtgtaacacatttc

SEQ ID NO: 68111 - DNA, 687 bp, Zea Mays
aaggagcacaaatcccgtttcctcagtgaactgtctgcagtttgctcgagaagccaggtccctatgcttataggtggtgatttcaacatcctcagaaaactgaagaaaaaaataaaccgggtgccctcagtaagtggagttttctgtttaatagtatcatagaccatcatggtctagtggaatttgagttgaaaatagactatatacgtggtctaacaaccgcagcgatcctacttttgaaaaacttgacagatttttggccagtcctgactgggatcttgcttacaacaatatcagtgttcttgggttaaatagatccttctcggatcatgctcctctttgccttcaaactgatactctccccgtggtgcgtaaggactttagatatgagctgtgctggaaagttagaccggattttcacaacttagtgaaaagtatttggtctctccctgttggtgtgaccaatagtcttgatgtgtggaagttgaaattgaaacgtctgaggcaaaaacttaaaggttggaacagcaatattgtggggcactacaaaaaactgaagaaaaatttgactgaaaaaattgatatccttgacaaagctagtgagacttcaggcttatcagatgctgacagatttttgaaactggatctggaatctaacctcaagaagattgtcaatgaggaaaacat

SEQ ID NO: 68112 - DNA, 397 bp, Zea Mays
cttctccaactgccttgtttgctcctggctctccatcaaggaacaatgtggtcccatagaatcgagtgtagtagcgcaacgatctagtgatactctctgatagcgacatgcccactgatccaatcattacccctactgatgtcataggtcatttgtatggtacacatttgaaaataatatctgacaactaaaacaacattgaaacaacgtacttatgatacaatgacatattctattactcggacttctattgaagagccatcatcacatgtcactgctttgaagcatcctttgtggcatcgtgcaatacaagaataatttgatgtcctcattaaaaacaagaattggcatcttctccctccttgttaggcacgggcataaaaaccaaaaaccaaac

SEQ ID NO: 68113 - DNA, 357 bp, Zea Mays
ggcaactcctgttcatccagttgactaaaaagtggacactgtttaatatggttattagctagtacacggaactacagtttgtcagttggtaagctaacaatctgttttttgtgaccttgatatcataggtggtctagagagtaatacacagatcatagatggtaatggctcagtggttcacatagtgaaggcgtggaattcaacagtcaaaggcttggaatccaacgtgtagcaagttcaaagaaaaataaaatgtcaatcatgataacaatgtgagggcaaaaacagtcccaaaggtcatacatgtgcagggactattgactctttgtatgtcttttcttcttgagcaaataaaaa

SEQ ID NO: 68114 - DNA, 280 bp, Zea Mays
gaacggatccactccggctagggatgaaaacgggacagatacagccggatacagggtcatcctgtatcctaccctaatgtatttctctcggatacgagaccggatatgggtagttaagattcaggatggatataggacaggaccgggtaataatccgggcgggtaagaaacggataacaaatactactcgattaggtaccagataattgtcgggtagttcgtcccgatgatattaattgtccaaccatccaacaaatacataaattaagcaatacataat

SEQ ID NO: 68115 - DNA, 2063 bp, Zea Mays
atcgaagttaagccactgatcagctcggctgaaggatattatgtgctccgaccatcggtaaggagccggagcactttttgtggccactagaacttgtcgatcattaagttttggttgccttatgctttcttgtgccatgtggcctccgaatatgacattgaactccctgtcaatacgcgagaaagctccacctctctccccttcctgttgctgaggctgcctaggctcattaggctctcctcgaggcgggggaggtggcagcgactggaatggtcggccatgcccgacggagtttttgaagtccctgaagttccacagggtgtgccgcatgtccttgtggtacgagcactgggagtcgagaatctcatccaatgtccttaccccccccccccatggggtgtgccgcgagctcgagcgacaggtggcccggcagtgtgcacctcctcgcggggtcttttctcccagcgtttgtctagttgctggttcgtgtcccttcgcggtgtgggtggtacgggctttgcgcctccaatgaggtcttgagcccgctcatccgcggtgatgtagacgttcgcctccctgaacagttgtttagaggtggcgggtgctttttgatgtatggctcggacaaaagctagatcgttggatcccgatagaagtcttcgatcacagccgcctcagcgaccttggggatatggttcctcattgtttgaaaccttttgaggaacaaacgaagagtttcatcattttgtcgcctaatggatttgagatcccacagctatgtcggtttatcggagagggacttgaagttcatgataaaccgacaactgaaatctccccaatcgtcgatgcagtgtcgaggtagatgccagcgccattgtagtgcgtcctgcccgagaacgatgggcaagtacgctgtcatgacgtcctccgttgccccagcagtccgggcagcggttgtgtagacggccaaccaaccctctgggtcctgcttgggctcatatttgttgacgttggagactttgaaattgggaggccattggatggcccggaggcgaggggtgagcgtggagaccccgcacgtatcctcttgtcgatgatcatgtcgtcgatcctggggaggggagcgagtattaggtcacctcgaccgtccccgggctagactgttggttgaggctgctgctgactcgatctgggttgctcagctgtgtgctgggacaccatgatctcgatcgtattcctcccggcgccatatttcattctcgtgtcgacgatcgtgtgaagcactgatgttgctccgtgcgtctcgtcggctgttgatggcgtgacgcgggtcattcggtgggtgggcaagagatagaagatgattggctgcctgagtaagcatctgtcgatagccctccgtgtttggggttcgcgagaggccatcggctatctgcgctaggacttctccaacttcgctcgacgtgttcaatgctcggtcgaagtcggggtacaagtttcgagcgaggatcagattgtcccgttggagcctagcatcttgttcggctagttcccgctcgcattcctgagcttgatggtggtcgcggtgccaggagttgcgccgtccttgatgtgctctttcatcgggggtctcccccatctctgaagctttgtcctgagagatgggttgtgtgggtcccgttcttcggcttcgtgatgtcgccgcacgttacggcgcctgtttctctgtcgctgagcatcgcgctagggaggttcttcccccagcacagtgggttcatcataagagatgggcgatgactctagtctccactcatgttttggccactaagacagataaggtatttttggcctcccgtgagctacaacacacatttttgtggccaaaaaaacaatttatgccagcgttcctccaccagcgttttggtctctagagcacggtaaagcagtttttggcctagcgtgagcttagcacatgtttctgttgccaaatatccaatttcatgtccccaatctgccacctacgttttagaccccggaggtcgttgggtctttttggccatccg

SEQ ID NO: 68116 - DNA, 600 bp, Zea Mays
aagaagcagagatatgcactttgcgtatccgcaatcgcaatacgacatcttgctctttgaaagcaacctgattagtgtgaagtttatttatttagctgtagacatattcgattgtgtgaaaataggcatccataaagccattattaagttggtcccgtttgtttgagcttctacacggcttgtcggcgtgaaagaccaaatggttgatgttttctttttcctgatcacatagtagacagcgagctggatgaggcaagtttcttttggctaaacagtcagccatccagcatctgcaactagccaagcaaaaaagacacacttaggtcaacctgctgaacctgacagtcagacaacaagggagcctgtccgaagtcctggaagattttcaaatacagctaagcttgcccttcttcatgaatatcgtaatcctgttaaactagacaattaggacgactatgaatgatttagttttcaaagcaatgcaaccaaacttgcagacaagtcgaagtgccctccaaaaagagcttggccagctctcctttagagctaaacagagatcgagccacttttttgagtcatggtgccaaagtctattgtaat

SEQ ID NO: 68117 - DNA, 593 bp, Zea Mays
tgacctaaaggcgacatgtgctatcacagaaagacaagcccatgtacggtgagagtttctaacttatggccatgtgcttgcgattgtactgaagctatggttcaatattgtaggttgggtataattattcattgattgactctagggagatgaggtgacaaggacgacaatctataccatcatccttataggtgtctcattctcacgactcagcctaggacatggagatttctaggatgcacgaagttataaggcaataggcggagtagcagaggcagcaacctgaggaccaaagggagaaggatgagtactatgcgaacctctaggctcagcagcaggctttcctctcggcaagttgaagtaatatgatttacaagtacaaacttgtttcattttgtgcttcctcaaaagttacttgcatctaatttgtagcaattggcacaaccaataggtgtctagatgccaacctttgggatgtcagctatggcaccgtcacctacaccttcaccatgttttcctttgattcatccagaccaggtattcgttcatatgtacatatatgtgtttaatagaaaataagaacttagtgttta

SEQ ID NO: 68118 - DNA, 387 bp, Zea Mays
gtgccttctccacggtggcgcgagcaggcgcctgttcttgctcttgtttcttggtggtagcagttgctttctattcgtctgtcaagttggagtggcactcgctgatgttgtccatcatgggaaaaaggaggggttgctaggggagagagagagggtatagcgcaccctagggtaggattagaggacggaagtgaattggatctagtctcgtgataccatgttaaagggatgtggcactgaagtcggatattggattgatgatagaggtacaaggggtgtacagtatataggcaaggatcatctaaggcttatagaaaacacccaatcaatggagatccttgcataacctatggccaactaccataaacaccaatgcacaaatggcag

SEQ ID NO: 68119 - DNA, 317 bp, Zea Mays
aacaggataagaggctcgtggggggtttatcacctatctcatgattggccaacctcagctacaagaaattaaaggaattgctaatccaaacgcacactgttttggacaagaaggaaagctgcgttattataaacgcaacggagtgcaagtggcgcgtcatgcacgtggctaaataagcgctttcactgccctcaacactcatcagccagccacaggagttgaagcaacaaagcaaggttggcgtgtatcacatcaagcattagcaagcctaataataaaagaaagatccaataatctggagacaggaacagtgcact

SEQ ID NO: 68120 - DNA, 407 bp, Zea Mays
cctagatcttgctcgtgggaaacgagaccttgtggaaccttcatgctagatggtagataagatgtaagacaaattacactatctttgtgccggcatcttcttagggccaaccaacaacgaaccctagggacttcacatgatgtgcatgacctttgggtgcggctctgggcgaggtaccagacggtccgcggtagatcaccgaatcattcacgataggtcaccagaccgtccgcgggagggcgacaaactgtccgcgatgacatagggagctctctagatctcgcccatcggggatacctcgttagggaaagatcgttgggtcgttttggggttgacataccacccaagatacctctaaacgacgtagagtcggataaagacgatgatatacggtgagaagttacaac

SEQ ID NO: 68121 - DNA, 1295 bp, Zea Mays
ccatgaaaacaccaatgagtagcgagaaaaatcatcaacagtcaccaacacataccacttccccaaaaagatcatacctgagcacttgccaggttgcttggtcatcaccttggcgacgggggaatgggaagcagcaaccattttaccatgacgacaagggtggaaaataagatatttttcatatttcaatttggtcaatccttggatgaggtcaagtgagcttaattgagacaaaagatcaaagctcaaatgaccaaacctcctatgccacttccaaatctaagagaaagaacttgccacaagacatcgagaagggtcacaagagtgggaaaaatcaacacgaaaaactcatccaaatggagaaatctagcaaacaagattttccttagcctccaaaacaagagaaagctccttaaagtgctcatcaaaatcatcctcaatgagtgtcacgagagacaaccttacctctcagcatgtcccggaatgtgatatattccttgtcaatcatggggtcgaggctagagaaccatctagagctttcggtcatgtggcgcgaacaaccataatccaagagccacgtgttctctaggcctccatcctcagaggtggagtcatcaacgatgtccttgtcaccgctgcctgccgtgtcctcaccaagtgtcatggtgcagaggccttccacgttgtcgacaagaaagcggagtccattgagcttgtctatgacctgcctcttgagctccttgtcgctcaaggaagatgaagtagagtcgtcagagtcgtggtcttggtcgctgagggaggcaaggaaggcacactccttgtgaaggaccgatgaggcgactagaggggtgaatgggagccactacaaattctcgcacaatgagaacatcagttgtgacttgaatcccaaaattactctaaaacctcatgggactcacaaacaaccagatcactatgtatttcaatccagtgtcgtttggacacaccaaaacctagaaacagatcaacccaactgtctgccaaaaatcagaataaaaaacacaaaacagagggcgttgcggtgccgcacctcaggccgacagtgtcgagcagcagtagtgtcgcgcacatggccggtagtgccagaccactaaaaagtgacagaattgcctcaaacttggcaaaacatttgtgcagggagaaagatgtatactgatgaagtatcaacccgagaaactcaaagatcaaagtgcggatcagaaatcccatctcggttggggttttgttggggtttgctatttcgagtccaaactgag

SEQ ID NO: 68122 - DNA, 408 bp, Zea Mays
agaggaaggaacaaaagaagaaaatcaatacctctgccaaaagcctcaatcatgcctccatgcaaggtaacatccaaggtaatgatcaagccacacttcacactaagaaaagtaagaagtgtagtgaatgttttgaaaaaaggcactagattaggtcatgtccctacattaaagaaaatggcttggttattaacaaggatgataaaaaatgttttagatgctttgagaagggacatatggttgagtcatgtccctatgtaaaataaaagggcatagttttagaaaagaaaatatttactaaccatgtagcaagcaagagacaaggaaagaagaaatcttcaaaagatgaagatcgcctttgctacatatgccgaaagaagggacatctatgtaaggattgtcctattg

SEQ ID NO: 68123 - DNA, 603 bp, Zea Mays
ctttaggcctcgttcggctttgacggaacgacatggaacacgaccgattccatcaggaattatttgatctggactcaaattagaaccaatctaaaatggttgttcagatagacctgttctgtaatgaaaccaagctattccagaatgaaaccagacctttttacccactcaacgacttggattagagccacacctataatcacttggaatcaaaccaaaccaagcctttataggttttagtgaaacatccagatccactctatccggctcagattgaaaaaaatatacctgtcttcaagttggaacaaacgaacgcggccttactggaagaggctgggccaaacggatgaggctggggcgtctgcctattctgacggtggattagcatcgtcgttggattggatggttccaggcctatagcgaaagggacgactactgctgtcttgcagctggagcctgatccatgggagctgagggtactgtaccaaccgaggatttcgttgcgtcgcgggggatgctttagctgttagcgcggttactgatctggatatggctttattgggtccttcaaggtccctatacttaacgaggaatcctcaacgt

SEQ ID NO: 68124 - DNA, 360 bp, Zea Mays
atctaatcagaaccgttcgtcaatagatcaatggcccaggcgctaacccagctacacacgcccaacaccggccgccggggtagctctacgcggcggcaccatcgtcggtgttcaggcgatccggggagccgggctcgatactagttatttcttcgcagaaggtggagaggaggtccaggcgaaccttacgggagggttccacattggtgacgaatgcggtgacagtccgtccacagcgcctcgcggcaccgcgacggtgagcaggagaactggacgaacagggggcggaatcgagcatggatgggttctacacgtggagcgggttgaggcgaactcggagtaggtttgcttaccggtgaa

SEQ ID NO: 68125 - DNA, 597 bp, Zea Mays
aatttaaagaataaaatatatgaactaaaaattattcactacaaacaaaacacccccctatatatgttaacatctttccaagacgatttttgaatgtttttgagagcgtcgggggaactgtacgtactacatctacatgcgtggcgtggcgcctatggggccagctggcagtattttttagatgctagctaggctagctgctgcatgcactgtcggtatttatatcagcgtaagatcgggaagatctatagtagtagtacgtggaacagcgtgtttgacgcgacgcgatctgttttgcttccagatcgaatgctttttgtcctatccgatcgctaatcatgagctccagcgtcacggcccttgaaattgctctgctacgacattccattgggaataatgaacacgtctaggatctgctggtttatgttggcagatgacaatttgaattatatagaacttttcttcattcgagatggtatactttgtacatggtccctctattccgaacgtggttgcgaaacgacactaggaatgtgagttttaggagagacaagggagcaggccggtattatgttgaacataagcatgacttaaaac

SEQ ID NO: 68126 - DNA, 383 bp, Zea Mays
gcgaaggtgtatgggtatgcaaggtcctacctcgaggattttgctctcggaggtactagggatggtcccttcacatattaatgaaggtgagtcggtcgaactgagcatgggtccttgtcatgctgtcttgacaaggagttgagtggaattcacgacttttctcgtgatgaggagttagagcttagattgccttttgagggcaaggagcttgaactgctgctgtataattataggcaacatggactcattccgaaggaggagccccctagcccttgatgatgtgttggtttcgtaacctaagcgcgaagaccttttggcttgcttttgttgcctttgaatgttatcatcgatcgccaacttggatgtggaacgctgcccttgcc

SEQ ID NO: 68127 - DNA, 796 bp, Zea Mays
atagtgttgtcggcggtagcattaactagggcagcgatagcctcaaccagtgtaggaggtacaggtggcgggttgggagtgtcctccccgccgtgggaagttcccaccccatcatgagcacgagttcgcgatggcatctgaggaagaaaacatcctgaattattacatgccaaacacacaccatctttattacattgcggaaccgtaataattatacctactcagtatacaactcgacttccttatttatttttcataaggacattacttaaactatactactctaatccttttcgttcttagctgctccactgcctgcttcaggagaccgttcatctgcaaggttcatggaaggaggggctccaaaaaggtccaaccactcatcagatccttcatttgttgttcgagatggtctagctcccattgctgcaacttctggtggcatgctcggatgcagccgatcatacaatacgtgcacctcttcatgcagggtgttggaatacgcttgcaggttttccagggatgcgctaagttctgctacttgagctagagctttggcttcacaattccaggcaaaatagcgcgagtttacggcccagtcaatggtcataccgtgttccgtaatttcttgttgtaggcgagtaacttctgctgatagttcagcaatgcggcggctatcgcacgcacgctccctacacccgtggcgtagttcatacctgagtcgctccactctggcctccaaatcccctatggggtcattgcttccactgctgcttccttcatgtatagaggccag

SEQ ID NO: 68128 - DNA, 723 bp, Zea Mays
gaatcagatcccaggttcactgaacctgccgccagcgtcctcacactgtaatccaatctcgacttggagattcgtgtgaaggagcaaataaccgcggtgaaaagatcatcggggagggtttggattggttcacgggaagaatcattcgccgtacccacttgcacggcatcgtggccgagcagccaccatcatggtggccaccgtctcccgctgttgcgccacgccgaggtccatttaccatgtcgtcgtggtcgtcgtgagtagggaattactaccctgaaccgttacatcgtcgtgagccaccatgaccaagttccatgaaagctcttgacgccgctgctggcatactcatccaaaattcacagcatgtgttgtcggttcctttaaattgagtgcttcccttcctctagtctcttgttacgaacccagcgcaccacccctcactctagatcatcgatcatagcccttctcagcgaagaaccaagaacatcacatcgccgtcgtagagcgtcgtcgaggacgcccttcatgtcgacccactgtcctatcccttcgcccaccttcccaatcgtcgtccttgagtctttgtgagtcactgaagcttatgcaccttcaatttgaacgctaccgcactatgtcaatgggaactttctcgccggtccacggtgtccgtcgtagtcgtgggcagaggggttctgagctagattagcctgattaatacat

SEQ ID NO: 68129 - DNA, 537 bp, Zea Mays
ttatttttgctggtatttaggtgctataatatgactttgggccaaattttagccgctaatacttattggttattttactgtgattttttaaagtttttggcccaaggggtgctttctactaccattatacttgaaaaatgccaaacaacagattcctattttttcctatcttcttctttgtgcaagagcaatcattctagaatttggcaactttttgcttaagggaagaggggtagaaattattggattatatggtcttttccatggggtaggggtaatggatttttgaataggttttgtatttttctctggtggtctaattgggtaaaaatttatttgcctactgttacacaattttagactttcttatgatttaattagaacatgggctaaaaccatatttgaattgtttagctcacttattgtgaggggttgggatatttattatttttgtagtggtgttttattagttaggagtctactgaatttttcttatcatttttgaaatggtccttatatttttaattatggcttttc

SEQ ID NO: 68130 - DNA, 436 bp, Zea Mays
gtatgtatattctaaaacatgacgtttgccatgtttattgtcttagactttttccaaatgttggaatggatgttcatatcatgtgtgtagtcatgtcttgtccaggggttgtagaacgatagccgcaccgaccctagcctctatcgctagggccaccacgggtagagccatcgcccctgtggccgcccttacggggttggcgatcgtcgtcagagctgggagcctgaagaggaactccaggattgggggcggtaggagggcgcgtatgaactcttgtcgatagagggtgcgccgtagtggacgcggggactcatcgtccatggtaagctcctcgaggaacaactcgttgcggatgtcgtggaaggaggggaacaggacggttcgcttgatgagcgccttcagatggtcataccgccgcctaagagcacacagaagg

SEQ ID NO: 68131 - DNA, 986 bp, Zea Mays
cttctaccacgataaaaaagggagcttatctgatataaaagtattatcattcttttctataaatgcaattaaatttgaggtggattgacttgggacacatgaagatacagcatgtgtcttgccaaagaatggtagtagtactcaggaagcgttgattttattaggtgcaatacactgctgaacgcaactttctcagtatcaatgaaggatgggaaatctaagccatcgttttacatgcttttttaaatagaatagaaagtgactgttacattgtcagcacgtacacgatacaatgccaaagttccgttcaaatttccaagacggtctgggccttacagaaaattatgtccgttgtcagagtctcaatttagcagcggcagcaatggcaatctattcaggtattaacgttcgaaatctgtttgaatttactctattcgagacacaatatatgagttagacaacgaccatttcttttccaagaacatcatatttttttttctttccttgccaagcacgatggcactgcgaccattactcgtcttcgctgaattaccatttccgaacggcgatcctattcctgccacaggattaaactcttgccaagcacgatggcactgtgtgagttgaattcgcagtggcggaggacagtgaagggctgaaccccctcgaacaccgtcgcgttcgaaccagcgatgcgcacacttcagcttttagagcatcacggcatttggctctccactggccgaaactctggattctgaacgtggtgtgtgtgtgtaaccatgtgaccagcagaaggctacgtcagtgcaacctttgagttgaggatcgccacatgatggatcctgccggagattcaaccgacatgactactgccaaccggttcttcaaatgacactgatgagcacaaaacgctgctgcttttgaggatcgtaacatggatccaagatgagctcagcgttaggtcagagtgatcctccttcgtc

SEQ ID NO: 68132 - DNA, 668 bp, Zea Mays
gcaagtgctgcccgaggctgtgacataaggaatgtaagggtttgcaaggccacaggtcctgcttgatctgaggcttggccctaagggcgaaggtcccctagaatgccaagataagcccacttcagatctatcttctgttgatgaggttttcaaggatgctttgccaaaatttaacaatatgccttctctcggtgccgacagtggctcactggccctccataggccaaggtgtctacatgtgggaccaatattgccacaaacacctgatatggcagacctgtcgtgatgtttatgcttcttatgttgtcggtgcctggggtgacgtaacaaccaacaaaccctggctaagtagtggcgcacaggggatggcagagtaagtcgtggaagcgacgacccactgtggcagaagtggtagataccatggtttagccactcttagggtgatgcttctaggcttttgttgttgtatgcattgctccgcaaagaggccagctgtcagacaccacgtcaacctgacttgtagttcaagcatcatgcatagccatatcgcacgattctcgaaatacaagagtcgcacgatgtttcagatgctatgtccaataaaagcaagagatagatagagaagggcgtctttaatctcaagcatcatgttccatcttcttatcctc

SEQ ID NO: 68133 - DNA, 632 bp, Zea Mays
ttttttatataaattttgggctttacattctatcgccgcctcaaatgttgccccagtgcggctggcaaaggcgacgaggttggtgcagttggaagatacgaataagcgagtgctccaggcgtacggtagcacggcgtcacttttcatgcagatgggctcgtacaagatgctctcggactggggctatggctacgtctacatcgtcgtcgttgtcgtcaactgcacataacctgtttttaaaaatgccttctccacccgagcccgagcccaggcgttagttttctttctcccagccgctgctcagcactgctctactccccctcgccgccgtccaagctccggcaagcttcccctgccctagctcggccttcctcttctctctggtgagcatcttcatctccttttcccctctctccctctgtcactcttagtcacctagaggagctccaccacctctttgtgttcaactcaattttcgctcaaaatcatgtgaatccaagtttgtgtgtgtgtctagtgccctattgaattcccctacaggtcttgagctccctagggagggttccatgccttcaaatagccatttcactctcgtttcaaatcctcgcgcaccacatgttcggtgaaatgtc

SEQ ID NO: 68134 - DNA, 725 bp, Zea Mays
gtggtagaattcgagcagatagcatttgcttgaatgtaagtgtggaaataagggggatagcgtttcccgctaacctcatagtaatgggtactcagggaatagatgtcatcctagggatgaactggctagataagtatcaggcagttatcagttgtgataagagaacaatcaagttgatgtccccactaggagaggaagttgtgaccgagttagtcccgcctgagccaaggaaaggaagttgttatcagatggctattgataacagtgaagcagatccactggggattatcaaggttgtgtcagaattcccagatgtgttcccaaaggacttaccaggtatgccacctgagcgaaaagttgagtttgccatagagcttctttctggaaccgcccccatctttaagagagcttacagagtatctggaccagagttggttgagcttaagaagcagatcgatgagctgtcagagaaaggttacatctggccaagtacctcgccttgggccgcccctgtcctattcgtggagaagaaagatggcactaggaggatgtgcatcgattatcaagctctgaatgaggtcacgatcaagaacaagtacctcttgcctagaatagaagatctgtttgaccagttgagaggagccagcgtgttctcaaagatagatctgaggtcaggttatcaccagctcaggattcgaccctcagacattccgaagacggcattc

SEQ ID NO: 68135 - DNA, 1014 bp, Zea Mays
ccaaaaccgggtgtgacagtactgctcacaagttgtcagcttctatgccaggtgagccaaggaattgaattcgcgctaaaaagccatatccttggtcggtttcgcaaggtcgatcgttgctagctcgacgttatcttttttcatgacgcgggacgagtatcaccgattcttaatcgccttgaaccgttgaatgaactccataacagtttcctcacgcttctgcctgatttatgctagatcggcaatcccaacttcagaagcttcagaatgatactgggtgtgaaactgatcctctagatgcttccatgttctaatcaagtccatgtctagcgaggtataccacgtaaaggccggccttttaagggactgtgagaggaatcttactcgcaacgggtctgatactgagaccgtccctagctgcatcaagtattggctaatatgctcaatagagctagctcttccaaaccactgaacttggtgaactcagggagccaatacttatgtggcaatggtatcaagtcatactcactgagatatggattggtatagctaactgccctccacttcatggtcattccaaactggtctctcagaattatgtttatatggtctgtagtagcggtgcatggggcctagttctcatgacttagcctagtggcatatttgtccagccatgcttgcttctcggtgtccgcctcataaattcctgctacaccagaccatattgggtgtgccgtgccggcacagtctggcacatacatgcatgaatatccatgtgggatgtggttaggtggcttattgaagaactggtaatcctcaggacctccacacgtcttgtacacaacgtacaccggtgaagcggccaattgtgtttttggggcagctactgaatacggtagaggtgactgggtctggaaaggaatatcccctttatgacttcccaacatcgggcctgttgaagagtactgatgcttcatgatctcctggacagtgtgaacaaccacacgctcgaat

SEQ ID NO: 68136 - DNA, 594 bp, Zea Mays
agtcgattcacgtggttccacaacaaccgtttgaattgatgacatggcaggtccaaggatggatgttacaattgtggcgaccctgaccacttcatcgccagctgccccaagaagaacaggctgaaggatggccagctcgaccatcctctggttggtgcaagggcaagcacgagtacacaaggacaagtccaaggagaggtttggcaaggaggcgctcaagaagaagtacctctataacgccaaggtaaggagtgttccttccttgccatcctcagcgacctcgaccatgacttcgatgacttatcttcttcctcgagcaacatcttgttaggtgggtcgaggacaagatgaacagactctacttccttgccgacaccgtgggaagcctcttcattatggcacttggtgagaacacggtaggtagcgacgataagtacatcagcgatgactccacctctgaggtatcactttccgacgatgatctcaccattgaggtagatgagctgatggctgcttcggcgagtcaggacaagtcgcttaggcttgcttcttgtgagaggaaagaattcaagagcaagtatgagagcatgctta

SEQ ID NO: 68137 - DNA, 391 bp, Zea Mays
acacgccccaagaaagatgtttcttcttccatggcgtcggtgatcggtctccgtccgctctccccaacctcccatgctttcagtttcaggcggcatgccccatggtgactcggtgagcaggacgattcgttttcgtccacgagtcacaacgtacgtcttggtaaacgtcctggaacagtgtgcgcacacaaagacccacgcgtgctcgcctctggttctgggttcttcacccaaacagcaaggacaacaggcattggattcggggcaacgatagcctgctacttcttcctctgccatgggcaattggggcatggcatggcagctcgcttctgcgccactttacactccactgaccactgcctctcgcctttgaagcatacaaaggagtaaa

SEQ ID NO: 68138 - DNA, 676 bp, Zea Mays
ggaagagtcagtggcttgctagaactactgtgtttgtgtgaacttggacagaaacaccctggaacgattggtcgacggaagccatgtccgcggcagcgttcccggacaataccatcacgttcacgatgctacggtgcggtaaatttcatttggttgagccgatgagtatcgtaggggcaagagggtgtagaaacacgaacaagaaggacacgaacggacctgtgggaggatggccacggtgcggtgtttcacggcggcgtagatgaccaatttgggggaaaatccaaatttggtcactacagtggctaatcggcggtgagcaatgatgctttgagttcgtgataagttagcggagcaagctgaacactcaatttatagagggcgactgagagtacgacaaattttaatggagaagagcacacagtgatgagagaatgagtcaccggagctatcagtcgtggttctcactgatacaacggttcaaggatggtaattccaagcttaccacagtcatacctacgtggtgaaagggtcacggcgtggcgcaatcacgatgaatggcgaccaccacggcgatgaccgtccggccacgtcgctgcgcaagtgggtacgacgaactgagcagtaatagtgccaagctcatccccccacgcgagatcttttaccgccagtcgtt

SEQ ID NO: 68139 - DNA, 814 bp, Zea Mays
ccacagaaccatccgattggggaccaacggcggggattttaaatgttaggatcactacgcgcccatctgtttatgatctaacgacaaggattcgtttcagcaaagggttacacgttgatctaatctacaccgttcattttgcatcctacggccacggtgcttcttctacctccgcacagcatgggcgctgaaacagaaaacatcacagcgtatgtgaacatcaggagggcatagctagctacacgcgggtgcgggtctaagtgcgactggatctacaccgatttcaaggcgcaagtaatggtggctctcaaggatgttttcataccgctttcaaggcgccagcacagtcgtccagaagatctgctgcacgactgcgatccgtcaccgtcgacacgaagcgctcgcccatcgtccgggcgaatctgtggacgaacctcagtgccacacgaggatttgaggaggtcaggcaccgcgtgaacgacgtcgaagaccccggcgatcttcccacgacgaagctacacgcccgaccttgtatattgtttttctctgggcggctacaaaccctacgacgctcccccttggttgtttctctggtcaaccgagatggcaaatctcgcagggaccaacgggtttatgggcgagcagggcggtagtgccgcagatcacggttgtcgttccgcccgcgctcgtatcccacggagatacccgtatacgcgtacacattggcctagctgtcagcggcagtagaaagtgtacagatgacgttattcctgacatcagaacgacgtcagtcggacgaataaccctagaatat

SEQ ID NO: 68140 - DNA, 447 bp, Zea Mays
gtagcgaacactcgatcgtgggcaggttgtgccgtgtggcaaaggcgctgtcgtggctgtccatcgtcgtcgctgggtgccagcctgggaatggcgaaggcagggagtttggggagaagatgggtttgcgccgtttaatcgtggcttgaatggcgagcttggagctgttcgctgccgcgtctatggtgctcggccacggcgggttagctggagaaagtaatgagagaagagggagagaaccggtgtggttgaaggcgacacctgggacgttgattttatgattaacgaccacgattagaactactgacccctttggccagattaaatcctgggcgtggggatcagatctggcggtcggaatcgggtgctggcgtgggtggcgttgatccgttgatccctgattggacgacctagatagtgtaccgattcgattctaatcagagccgc

SEQ ID NO: 68141 - DNA, 446 bp, Zea Mays
cccagcctgcaaagccccaaacccaattggcgtgtccaagcgaagcaccgcagcaaccggtgaggacgaatccgaggctctaggcgtggcgtggcgcgacgatagctcctccaagcagcattccaaagctccctttctctccctctggtacccacagggctatatgaaccggaactgatatggccacggtggatggagaatgcggaggcgaccgcggacaacatttatagggtccgggatgtccgatatacccggccagagcgagatacggagaggggaatacacgcgacaaacttggcggtgggaggttgaaggaggtctgataatgtggccccacatggtagagaaatgagaggaggcgcgtgagaatgacgaggtgggcccccctcctgttgctgacgcggatttggcaaacggactggcgttcgtctgttcatccgggccca

SEQ ID NO: 68142 - DNA, 534 bp, Zea Mays
cgccagttaggcttctccggagagcttggctaccaatggggttgggcggcaccgccattggcacaggctgggaaaaggaatgggcgtggaccatagatctgctgatcgacgaccataattaaacgggggataccgttttagcacataggattgtggccattgctggcttgatgaacggctcggagttgagggcagagatatcagttggccatgtgatctgggccctcgatctgagtttctgtggctaggattagatataggcataccccttcgatggatcgatccgggttcgttgatctcgaatccaatggccaatattgcataccggttcggttaagataacaatatgatctggaccccagattctaatcgtgcgaccaggatatgagcataccccttcgactaggttatcttactaaagagaccttgtattttatttaaataaacccgccgtccagcaaagtgttgcaaacattgcatctaggtcctgttttattggatctagcccctgtactttcctatattattgcccgc

SEQ ID NO: 68143 - DNA, 805 bp, Zea Mays
taccattctagataagaacaactatatttttcaagaatgaaaatcaccggtgcatgtccctctgactaggatgttagtgatcttggtgaatggcgccatattcagacctgttgtgcttatgcatttttattgtctctggatcttacatgtgcctccctccagtgctggtttttaaaagttaatgttattggtggatcttgtctccgtttttcttaaaaaaaaaacagagtggctccgcggtggtgctggaaggagtgaagaaagagagaacggtgtcgtctctggcttcttctgttaaggaccaagccttggatgatgccacctcctgcttcgcccgtgccacgtcaaggatgacacgccagcgcgatagaggaggtgagcaagcagacctgagttcaccagcacgacctgaacccgtcaccttaagcaacgatttactcttgattttgaataactaaccgaagctctacaactttggtataacaaccttggaccggaactcaactgatcaagaactaaaggactccaaatttcagtacttttaactgaaacaagtttcagttatttgaactgctccctgcgcccaaattcgactgatagtgtaacttgatacacaatttactcccaaacccaaatagtactaggggaatgattcttaataagagttgttctcctatattaggtcttcaagtttcctataaagttcacagaccaaaactccctggatcaaatgctaaaaagcttcaaagtttgcacaaacaccctgaaccctaatggattgctgatggtacagtaaacctcccca

SEQ ID NO: 68144 - DNA, 533 bp, Zea Mays
gcaattatgaccattggaagaagatgatgtgtttgcaattgaaggctatgagcccaaagatatggagagatgtggattattcgttcattatgttggatatgaaggacacaccaccaagatgagaggagaattagtaattaaatgatcacactctcaatgtaatctatgaagaacttgagcccaaggtctatgtgtcaataatagtcatggagatgacacatgaagtatggaagagacttgaggattattatgagggcacatcggtggtgaaggaagcgaaagtttccaccttcaaggacaattatgccaaattcaaattgtcgagtgctcgggaaccgggtacccgaaaaaatggccaacttcgtcgactaactctacaaggcggaccagatgaccaactcttcgatgatgaccaactccgtgagatggaccgaatgaccaactctccgatgaccaactctgatgaccaacttccccgaccaactctgcgaggcggactggatgaccaacactccctctgctcccagcaccga

SEQ ID NO: 68145 - DNA, 530 bp, Zea Mays
cttgggatatcggccttgtcgtcccctgggcgtgcctcaactgtgactagcgcagcgaaagcatgggggcccatttgtctgtcgcttggcgagggacgaagtgtcgctgccgatggggccatctcgtcagctccttcctcttgtgcgggggcacaacagaacgcgcgggcgccggtggtcctgttgccggaatgcacggaggaaaacccggggccgttgcaaccatcgcgaccttgcccttgtgtattaataccgatcacctcttccagctggccatcggcgaggacaatcgagacatcaccattgctgcagccgagtgcggagcgggagcagagagagaacgtagagagagaacgtgagggctgtcgccaagcgggtgttcgacactgccgcgctcggggcattccggtgcttgccagtgcgcgcggcgtggcggacgcgtccctggaagcggaaggaagaagaggcctgcggtgatcccgagatttcttgtcggagtcaagctgttccgccgaaccaacatcatagcg

SEQ ID NO: 68146 - DNA, 974 bp, Zea Mays
ttgcatgctacagagggtgcaagtgagaaggagatgtcgagggagaggagaattgctactcaatgctccattttttcctgccttgttcgtgtttagccaccccctattatagcccaagggttggccttctataaagatatgagaggcctgaagtagggcgggacatgttatatacgagagggagttcttctgacatagctccactgacgtcgcctcctgacacacgcgtaagcgcacttccggtatggagggttgctccgtcctgtcctatacatggattactgtagagactccggtgctaaggcttcccatagcggagcttggttggtcccacagtgcagagtcaggggacgttaagggacgtggatgatgacacctcgtctcgttgatggagactccccttcactcgcctgacatgtcgtggcgttagtcaagatatttggtggcaacatgccttatcgtggttggcgtgggtcagcaattcacactagaacatagtcatgacataggtctctcacacaatcacactagaatcactgatgtaagcatcttatacccattgatcttgtgtgtgcctcatgttttgcttgtgaaagaggtttcatcaatggatctgcaacatttgaattcgtgtgcaccttgaaaatcttcacatcacctcattctatgatctctcgaatgagatgatagcgacgtagtatatgtttggtcttttggtgtgatctaggctccttttcctgtgcaatggatccactattatcacaatagagatccactagactggacgcactagcaataacacctaactcagaaacaaaatttatgatccaaacaacctcttttgtagcttctgaagccgtattatactcatcttccgccaccgaatatgttgttgtatcttgtttggaactcttccaactcactgccccaccattgatagagaaaacaaaattggattgcaatctataatcatc

SEQ ID NO: 68147 - DNA, 452 bp, Zea Mays
tcgcgccgcgccgtggaccagggtctgtgcggcccaaatcctaggtatgttgcctgcttcgagttcgctacctaccggttattgtataccatcgtcgaatttagtaataggtcgttcggggtcggttagccgtcgccggtgtgttctccatcgcggggatcgacggtgcgtccgtgctctgcaaccgggcgaagaagacgggggcgcatccgtccgattttgcaccgacggtgattagtttggcgaaccctttaggtcaggttagatcggtgatgttgatcttggatcctacggctgcgatttctcccagcgtaacgattcaaccagagtgcaccaggaccgttcgatcgcgattgggcgattcctattgaataccggtttgggatggggccctgatctaatctgggcgcctcattcccgatcggacgatcgtgggaccacagtaccccttc

SEQ ID NO: 68148 - DNA, 478 bp, Zea Mays
caaagctttgattaaagtgggagtttttatttgggctatgagaagccaagggctagagtcagatgctatgtgcttctgcaatgtacacaaattatcttaccaaacaaaggcaactaggaaggagcaataccataacaacttcgggtgctacaacttcgtgccccgctctaagataagttatcccgggccgacgtttcagaagaagtgaccaagttcttggatgaagcaatggttctatttaaagaatggtctgagcaagagggaggatgtgagaggtattatttagcgtcccatatggtcacgcttcggcattagaaggccatcaattgcaattgggaatgaggtgcaagcgtgcttaatggcttgcaacaccgtgtgtagctatatcagtactagggatttggtacaggaacacattgctttcaaggtatggcctcttgtgagtgagtgggagatgccgaaggaaactgctgctggc

SEQ ID NO: 68149 - DNA, 276 bp, Zea Mays
gttgattgcgtcaatggcatctaaccagtcatcgttgggctcatcaaattggctcctgaatttgaatgtatacttcaagtaaaccaagccaccatggctagacccagcagcagtctcctttggcatctcccacccacacccgagtggccacaccttgaaggcaatgtgttcctggactaagtccctggtgcctatgtaagtgcatactgtgttataagcagcttggcatgcttgtatgtcgttttcgatggcaagcattggtctcctaatgccgaa

SEQ ID NO: 68150 - DNA, 454 bp, Zea Mays
aaaaccaagcgttctacctagggtgaagccacatgcgctcgtggcctcgggatcaccttactgtgttgtattctttatggtggatggcgggagcatcgtagggcccaagcgccatcatttaggctatgttgactcctggccttcatagcctagggctcaacacggttcatcgtgttgtgccctgccggtggtctgtgcactcaggcctagtcctgataggtcatgagtgtgccacaggttgaggagcatgtgggccatcaatgcgttgtagtccaaggggttcgtaggatatgagtgcgatgtgggccgagggactcgtaggtcatgagtggaaggcagactggtgcccctgctatcgcttaacgtcaggcgtggttaatacgacatgtcacttatgacgggtcgatcttgggccgggcgagggatccacttgagtcatttccctttggttcgc

SEQ ID NO: 68151 - DNA, 638 bp, Zea Mays
ggcgggtggcctccagctcttgcatgacaagcttctttgaagcacacatatctttgatgacagaatctttggaatacagtagcttaacaagtcaggacacttcagactgggacgccctcagttcatcccgatgatggtcctggtaagacatggtgaagcgatgactcctctccataatggtcaaggaattactggcatcacaatatagtctatccagcgagaggcaatgagtgttcgtctctcttcctgcaagtaaaaacagcactaagcatcgaagcatggaaatcaaaagcagaagcagtcaagaaaatttacctcataagctatcttctctgagtcaagcagagcattcaaagaagaattcaaggtacaggcactgtcaaggaaggcagaggtttggttcaggtcaacctggctccgggtatacttctccttagcatcggagcaccgcttagtcaaatttggtaaagtagtagaaaagagtacaatatctgagataaggaaggcaataaatagcaaaaaattgtgccctgcagactcactaacctaggtttgaggccttcagatcttctatctgcctttgaagcagcagagggttccactgcatcagggacgaaacttggtcggggacaggggca

SEQ ID NO: 68152 - DNA, 638 bp, Zea Mays
gttcgaaggatgagcgaggggtagaaggtgattagctgcctgagtaagcagccgccggtagccttccgcgtctggggttcgcgggagaccgtcagctatttgggccaatacccctctgacttcactcggcgtgttcattgcacgagcaaagtcagggtacaggttccgagcgaagagagggttctcttggtgcagccttgcaccttgttcggcttgttctcgctcttggtcctgagcttgtggcgatcgcggtggtgagagttccgccattctcggtgcactcgctcgttgggagtttcttccacttctgaggctttgtctcgggatacgggctgtgacggatcccgttcactagcttcgtgatgtcaccgtatgttccggcgtctgttcctctgtcgtcgcgcttcacgctggggaggttcatccccttgcatggtaggctcgtcgttggagatgggtaatgactccaatatcccctcgatgaagaggacgtcggggtagaaaggagccaacgtgatgacactcttctttttgccctcctttgaaggcgaaggcatcggaaagatggctcggcgtgttcccgtcccttgactcaggacgtttgcttctttctttcgagtgatctgcgtccactcctt

SEQ ID NO: 68153 - DNA, 926 bp, Zea Mays
aacatgtaatttacgtccaataacaaattgttgtttggtgagagctactacctactgacatgttatgcatcctttgtacatcagcctttcatgtaggaccattcgttcacattatgtaaaatagactacataaattttgtgtaggtatttaatcgataaagtgaatgtagcatgcaagtagtgctatctgttctttaactgcaccgcttaatgcctgtctgaatgtagtcattccatatacctcatttgaaactttttagattagtgaaggccatcagtaaatgaattcttatattcaccgattaagatgatccttttggtactattacaggagcaatgaaaactgatacgattaggacaacaattcaacgtgcaaaggcaattcttctatttaaatctacatgctgctagcacatctcaaaatgtttttgtgtggagttcagttgttttagtactttaggtgcacttcatgtccgtgtaacatctaaaggaggctgacatgcaaattaattgcctatcacgtatgcagagaaaaagtagtcaaatgagaggtgtctccgtgttttggattcttgtgtgcacatatgattgtacagttttataatacagatttatgattccacaatatttatggctcacatatgactgggcaaatttggattgtgcatatattagtgtatagtttttacgaatagagtggatgaatggctacatgtaaatcaaataggttgttacattgttggttgaataatcagtgtagactactggttaattagccaatccactattaaggttcaaagctagccattaatggacaagacattttgataaagctttcattcgttgtctcttttaattgacataatttttttagaattttctgctgttcgaaagaagaaatgagtaccgaagcactgaacaagaac

SEQ ID NO: 68154 - DNA, 598 bp, Zea Mays
gtcgtgaactgcacaggcatcgcctatagcgtcggtgagtacctcctccagtgattcagcgttcacgtcttcgcgtaggactatttatcggtatggttagagcgctggtatggtgggtggccgtgcgccgacgtggatccgccggggatggatggcgtcgccgcgctgctggccggaggtagaagactgtggttgagtcgtagatcttgagttgtgcggttgtgatgtgtacacgcgttcccctcggttaatgtgatctggaccgttggatccacaccgtgcggacatgattagatcatggtgctttaaaccctggaccgttggatctaatcgagcggttctgattggatctagcttcattaaatcgtggtcgttgttgctcgatctgatggtctctatcacataccgattcatgtaatggatgatttaatccgggcggtccgatacagatcagacgactcaagatggcccataccccttcgcctcgacaatgttgctaaagagtccctggaaacagaggatttaacccacagtccacactgtgggaagcctgagtctgggaaatattttgagttagtccctgcgtttctctgttttt

SEQ ID NO: 68155 - DNA, 767 bp, Zea Mays
tttccagtgtgtccggttacaaatattatcttattattcttgatgattgctcacattttctttggacgtttcctcttcgccttgaatccgaaacattcactaccttggctaattttttctcttatgtgaagacacggttcggctgcaccatctgaagcattcaatgtgacaacggtcgtgagttcgacaactcttccactcgcaccttctttctcactcaaggtgttttgctccggatgtcatgcccctacacgtcctcccaaaacggtaaagccgagcatatgattcgttccattaacaacatcattcgttcccttttatgtcaggcctccctcgccccatcctattgggtcgaaggtcttcacaccgctacatacctccttaatcggctacccatacaaacccttatttatggcaccccgtattttgccctcttcggctctcaccctacctatgaccacctccgcgttttcggttgtgcgtgttaccccaacatgtccgccaccgctcctcacaagcttgccccccgctctagccattgtgtctttcttggctattccagcaatcacaaaggctatcgttgtttggacctttccaccaaaaaattctcacctcgcgccatgtggtttttaatgaggcctcgtttccccttgccgactctcgagcctcgatcactaaccttgactttttgtctgagcttgaggagtcgatcttgccgatcgagccctccactgcaggtactcgcctcacctcgcctgtcgcggttg

SEQ ID NO: 68156 - DNA, 983 bp, Zea Mays
cggggtcgtgatgatcggacggtgagcatctctgggcaaagatctttttgctccgggtaagatcgtcgtggtggaaggcactaactccggctgccacgcggccatccctcctcccggccgtgtccggtcatcggcgccgctcccctctgttcgtccatgtcgcactgatgtgactgcgttactgtcgcggcggggacgtggcaagcccgtaagaatggttatcgcttgacgccgccgttgatcgccagcaaagaccggcaatggttatcaccatggccatggcagtggcttattgcgcctataaattcatcgcctcctcaccctctccgttcaaatcaactgagcacaactcttcgtctctaaattgtgaagccgtagcactcgcctacaccctcgattgcccaccatagccggagaattcccctttcccccaaattggtctccgccaccgtaaagcaccactccaccgtggccagtccgttctggtaaggcaccatccaattcgcgtgttgttctcatgtccttgtatgctggtgatgctctccaaaccgcccaatcaaactagaagcccaccaatcactgggaacacgagctaatgtctatagctttcgctgtcctcgtgggtagagcgaaatagatcaccagatatgaaattgattggggggaaaccattgataggccgtgaatttggtgtagaccgctcagtagcacctatccttgccccgtttggccggtccacgagctcgccggagctctgccgcgccatgcaccgtcggggactttaaacccagaatagatagaagtgggaggacttttatgcaaactggcagcgactgtgttaaacagtggaagacctgatcctagttagtgaaaacctcgaggacttttgcgcaaaacagccagcgcccgggcgcgggcgcgctttccctctggtgttgggccacctgggatggaattggcccagcactgtttctgtttttcct

SEQ ID NO: 68157 - DNA, 1021 bp, Zea Mays
ttagagacaatagagggtctcttccactccaccacagtcgcgacattcttgggatcaaccgcaatgccctgctgactaatcacatgccccaggaaagccacttcagacagccaaaaggcgcacttcttcaatttgccataaaattgattcttcctaagagcactcagaacgagacggagatgccgctcatgctcttcctcggtctttgaatatatcaggatatcatctaggaacacgaccacaaagttgtccaagaactcatgtaacatcctattcattgcttccataaaagcaaagcagcaggggcattagttaagccaaaagacatgactatgaactcgtaattcccatacctggtgcaaaaggttgtcttctcaatatcctcctcacgaatcctcaattgatgataactagagttcaaatcaattttagagaacacccgggcacccctcaactgttcaaagagaacctcaatacggggtagcggatatttattcttgattgtcacttgattcaaagcatgataatccacacatagcctcttgcttttatctttcttctcaacaaacaatactggggaagcccatggcgacatgcttggcctaatgaaacccttagctagcagatcatccaattgccgcttcaattcaacctgctcctttggagccatctgatacggtgccttatgaataggctgcgtacccgaaatcagcttgatttcaaaagctgcatcgtgctctggaggaacgcctggaagctctgccagaaacacgtcggcaaagtcacacaccacccggatgtcctgcacccgcaaggcagcctcaccctccaccaccatggagaaaaagattcccgacttccttgaccggagatccagaagaaattgcgccaacaagggtaacatgaactttggggaacttcccaagaataccacctccctacccgacggcgcctgcaataacactgtcttccaaaaacaggatataactgcgcgatactgagataaccgatccatacccaa

SEQ ID NO: 68158 - DNA, 480 bp, Zea Mays
aattgtagatgatactgtttgtagagtaaggtttaaaatagaggataagatagggaatctaatagagatagcctagagtttcaatagtagaatgagatgatattagactggtgttatgttgttattgaaattttagaacatgaaccttgatccatatcaacctgagatcatcggccattagactcaacatatcaaattcataatattcccgtcccttagatgtatacatccctttttaaagtgtcgaccaacgatccatgaccctgctcctcaatccaatcgatccaggaacattttgactatggcccagtcccattcttatcgacactgcctgatccagtccgcttcgagacatgtcgtgatactcccccgcctcgcttgtcatcctcatgacgctagctagctcggcatgtccgatttcgttcgtcgcgatgatgtgacccgtccttggaggtcaacgagcttgtcgaactaacgagc

SEQ ID NO: 68159 - DNA, 288 bp, Zea Mays
ataggtttatatgggtaaatatgagtgaagtgtgcgcttggtttgattttaggcgaagaaagtggaatttgggcactcggctcggaaccgatcgctagaaatggggatttgtggaaatttggagtctgggatatcggattggcgtaaagtttggcgaatatgttactggaggtgttaggaaggagcctaaaaaatttgggaccgattggagcaattttggctggtttgggcatttcaccgagcacctggtgtcagagttctagggttagagtgaaatgcctatttgag

SEQ ID NO: 68160 - DNA, 1016 bp, Zea Mays
agtccaccatgtctataggctttaaatgatgtagctgtgacaaaaactcttaaaacaacttaagaataaagcaaaaccttaagacatgtccaatgactcatgtcactttgacgtttgcataagaaccctaaaatgcttgatcaaactcgtataaacgttcgacactgatatatagagatgtgtatgtaaaacagttcggataggtaggctttaaatgatgtagctatgacaaaaactcctaaaacaattgaagaataaagcaaaacacttgcattctgaagtctggcccttcctaataatagtactactgctattttagtccaataataatactaatgctactccagttggggcctcactactgtttctttacagagggaaaaatagtattctaaagggagggtagacaaatagatggaaaacagcagatccatttcctcccatctgcagaccaaatgaatgttgccctttatgcaggcaaggcaactatcgttttttgggtgatcagtttggcgctgtgcattgtgtgaaatagacatttgcttgcaacatatgcatataaattaaagaggccgagcagctacatttgtttcaaagggcaaaaaaacgttcgtgaccaaacagtccaatacttagcaattctgtgttctagggtgcaggaatgtgcatatacatgttcttgttattatttgtcgtgtccagttttcgctgtatgaactggcctactagttgcttgttttgttgataatgttttatctgcatcacctagcaaatggttgctttgtttttcgatttatgtgatcctcacatgcctttcctcttataaatatatgtagtatgtactgttatgtagaaacactgaatgcctgaataattgtactccatgctttctatttatctgaatgcaaatctggtatactctattgttaacagccagctgaccatgatgccctcagcctagggtacttgtagctatttcaactctgttcttctaatctaaaaaaaactagaccaac

SEQ ID NO: 68161 - DNA, 274 bp, Zea Mays
ttctttgggttgtccgcgctgtcaccgtggccagagacatttgggtagccattcatgaaattgaatgaggggaaacactcctcagggctggaattaggtttaaaccaaagattagcaccggtcttagggtaatccgaccagtaatagctcaccggagctcagctccccgccggtcaccgtcgtgggcagagtctggtgaagaaaagaaaacgcagggatgtctttgtaaagtgtcagtgagactgtggaatagtgcaagagattctttaaagaa

SEQ ID NO: 68162 - DNA, 925 bp, Zea Mays
tgactttatcactagagggcaaaatagagcgccttcgtatgcaacatactgaagctatcagggacaagtcggtggccgcgaacaagagttgaaaccttctcgataaggtgaagacacttgaaaaacaaaatgaagatctcggtcgtcggctcaacgacgagaaagatgtcaccgctaaggcaaagatggaggtcgagagtgcccgcgcagaggcccaagctgcctacaaccgtgctgtcgagcttgagctcgaggtgaagagcatgagaacctaccgcgagaagatggagtctaccacgcgtgccggggtggaccgggcgcacacactttttgttgatgcgtaccgcgacctcggtgcacaaactgcccccttcgacaagtctggaggggaggtggggacccattttctcgggtggctgcaggaggagctggagtcgctcccatccatcatgacgggcctcatgtcctaggcgtcgctcgtctcctgcgaagggccgcgaatgccttggctcgtgagggttgcaggcacttcgaggcctttgaccagagcaatgaggacttcatcgctggtgtattccaggtcgaagatgacatgttgaagtgcatggttgggcgctttacgataggatgtggggtcctcacggttgcggcgtcgtccaggagagggatgaccgagcactggcataggtatgtttgcgcccttagcaaaggtgtcttttatgtttgccttgtctaatgcattgttgtgctgtcttcgcaggcgatgatggacgaataagttgaggacctcgtcggcttggagggctcggtggccagaaaggatgccgaagttgaggcagtagctaaagagcagtcttcgctcaaaaaaggtggcgttgacgaccctgcgactgtggggacttatgcgcaggtgtaatgaatagag

SEQ ID NO: 68163 - DNA, 507 bp, Zea Mays
aagggaggcccctggccgttaaatcggctatcgatctcacggcgggcagatctctgtctcaagtccggttagtggcatggtccgtgcggaggtcctcgacgtgcgtcctcacggcaagctatgccgcgcatggcggccggatccattctgttcagagtctgccaattgaagacgatgagctattgaccgttggattggatcgtgcgatagagatcaaaacacgatagcgtttggtctaagtaggatcggcgccgttggatgtagggcggttctaggcggttgatactcggatcgatggtggggagtagatcacgtcgcattaaatctgggccatccagaatagattgtgtggctgagattaatcggtaacccttggccgcaccgttttatgaatgagaccctgtgctttcttgcaataaacccgccgtcctgggggcactattcactgagtctctggtttcttgcgccagagcccctgcgcttcctagtatttgaggcccaatccag

SEQ ID NO: 68164 - DNA, 392 bp, Zea Mays
agggtggagtggtggttgtcctagccgtaaaggactaatggtgatggtggtatttcacctagcagggcgggccaagtgtaagtgttgttggtgtggtcgaagcgttgagtagggaagttataactagagctaacagagtagtggctatcatcatcaacaaaaagcaaaaccaatcgattcaatcacttctcatctctcgttgtgattgaagtgcttcatggtctaaatcttgtgtggcatggctaaactaactctccccagtgaatccccaacccaccatacaactccccccgacataactccatacaacatcactaccccactaccatatgttccaccacctgtggcattatcatcgcttccatcccattactaccatcatcatcttctcc

SEQ ID NO: 68165 - DNA, 317 bp, Zea Mays
ccatctcatcaaccaaagcctgacattggaaacaaatgagtgcaaggacagcatttcacccggagtatagtcagatcaagaaaagccaaattacctggagattggagaaggatgaaggaagccccaaatcatgggaagtcagttggtgacttgatgaaggattaccaactgaagcaatctgcagagcatcattagggaccaattcagcatcaccagcagaaaccaaaactctagcgtcaggtgcgtcggcctctaaggcgacttcttgacccgaagcacgtgctgcagccatgcaaccagagtgtggaggagaagac

SEQ ID NO: 68166 - DNA, 752 bp, Zea Mays
ctaaacattaaaccccaaaccctaaccctcaaatcaaaacccgaaatctcgaatcccaaaagcctaatctctaaaccccgagccccaaaccctaaagcctgaacattgaaccccaaaccctaatttgtgaaccctatacctcgaaccctaaaacaaagacccgaccaccaaaacacaaaactctaaaccccaaactccaaaccctaaaaagtaaagtaaggctgttttggcctcgcgtgagctacaacacatgttttcatggccgaacaaccaatttagtgtccaaaccatagtacactagtgtccgaaccattgtacacgcatttggccccggaggccggtaaggctatttttggcctcccgcgacacatgttttcatcgtcgaacaacaatttcattcctcccgtccaccacccatgttttggccactgaaacaggtaaggatgtttttagcatccagtgagctatagcacactaaacctcgaaccccaaaatcctaaaccccgagacccaaaccctaaaccatgaatccggaaccccgaaccctaaaactaaaacccaacccccaaaacacaaaacctcaaatcctaaactccaaatcctaaactccatatcctaaacaccaaacttcaaatcctaaaactcaaattgaaatcctaaacctcgaaccccaaaagcctaaactctaaacacagagccccaaaccctaaagcccgaaccctgaaccctgaaccctaaattgtgaaccctat

SEQ ID NO: 68167 - DNA, 631 bp, Zea Mays
gttggttcttcagcgctctgtgtaatcggagcagtttgtgttgcttcggctgctgaagaggaccctgcgccaaattcaggcaccatggccggttcaatataacgcggccggtgggttagaaccttcacctttttgctcttcggcataggctcatctggggtgaccgaagtggcaatcttcctctttttctcttgccctcgcagcgggtagcggtagtcagggtatacgaagccaatagcatcaaataccctgtttaatcttttcttgccctgacctccaaaggatatggacagagcattatctttggccttggaatatgctccaagtagctcatcactagtagcttcgatacacttcagccagtcgtcatttggctcatcaaacttctccctaaacctgaaggtatacttcagtcggaccaaaccaccctcactagaatcggcggtggtctccttcggcatatcccagctctccacaagtggccataccctgaaggatatatgctcttgaatcaaatcccttgtgccaatgaaggcacacacagtgctgaaagccctttgacatgctttgacattgccatcaatttccaccttcggcctttgtaggccgaagcgagaccagatgtgtcact

SEQ ID NO: 68168 - DNA, 977 bp, Zea Mays
gtttcttggcatttaaatcagcacctctccaaaggcagtgccgtctgagtctgtcaatgtgtctgatcaccattttggggagcttaagagtgcatatgtaatatgttggaagagaggagaagactgcattaaccatttgaagccttccagcctgtgataagaagatggaggttgacgccagtcttttttcaattttctggataaggggtagaaaagcacccaatttaggtctttggagacccaagggaagccctaagtaagtaaagggcaatgatccaatgttgcaatgaaaaatatttgcaaggatctccattttctggtccgtgacattgatggggtaaatgttggacttatggtaattcacatgaagcccagtggagtcagcaaaagagttgagcattgcctttaagaagaaaagttgtctagggcaggcttccattatgagaatagtatcatcagcgtattggatgatagggaaatccggaacataattgtttggtggtggaagacgaagaatgccaccttcacatgccttgttgacaatagactgcaaaaggtcagcagcaagaacaaaaagaagtggggacagagggccaccttgtctgactccgcgtcgacagtgaaatcttttcccagggactccattcaaaagaacttcagaagatccggatccaagaatcatagagatccagtggatccatttatcaccgaaccccttgtgcctcaagatctccaaaagagcagcatgctccagtttatcaaatgccttctcaaaatcaagctttagaatgaccctttcttttctggatttgtgacaaagggaaatatattcaaaagcccaagctaagcaatcctggatcgatctatccttgataaaaccatattgattctgatggacgagctttgtgatcaccggctgcaagcgattggctaagatttttgttagaactttgacactcgtgttaaggagggagatg

SEQ ID NO: 68169 - DNA, 814 bp, Zea Mays
gggggacgaaggtgaatccagggaccgccgccgcgacaccactcgactccggcgcgtcggttacccgattggcggctgcagtaacccaaggggggggacctggggagcacgcgcgtggatctgccggcagcagggtcggctggcaactcaccggtatgagatcacttcgcaccttctcggcgttccgccattgtcgaagcttgcatcgccgccataggaaatcgtgtgctagctggtcgtagcggggcgaggcacaccatcgccccggagttgcttatagatcaatagcgaatgatgatcggggcacgtccgtcgccgtcggtgtctgcgttgctccgtggagcgcactggcgtaatattccatcgaggaagaagaggctttagcctttgatccggccctagacggttaggattagaagtatgtcgcgggagccagggaccgtgggattttaagcagagggtttagatcagtttggcttttttttccctccgctcgattaaatcttatccgttgatgcgggatccggtggcgcgaaatggtgctgtgagtcgttaaatccgaaccgtagaagtttaatccgttggccaggatagacccatgccccttcaccgtgccacaattgctaaggaacccctggaaaagtggaattcaacccgcagtcctgtctgcaggattttgtgtctcggtttattttgcgccagggcccctgcactctctaaaaatagtggtcgtcgtccagagtctgggaatttcaggaaataaaatctaaaatgattttcaggatagaaataaatatgataaacttagaaaatt

SEQ ID NO: 68170 - DNA, 393 bp, Zea Mays
cttgtgggggcattacttttgctccatacataagcttgaagtgtgtacaacctgtggctctagactctgttgtgtttagcccccataggtcatcaggtagttgggccattttgtgaagtactcaatggcgaccaaagaaaatttgagattgccttgggccgttggcaaggggtcgatgatgtttataccccatcgttggaggggccatatggatgcgattagttttgtttgctacaagggccccctttgtgttgaaaatttttaccatggctcgcaagaatactcaacatggagtgcctctatgatgatccctggcaagaagaaaccttggtgcatggccatggatgcgagggctctaaggcttatgtgacaaccgcttaggcttttgtggac

SEQ ID NO: 68171 - DNA, 397 bp, Zea Mays
ctttggagagaatgatgacaaactggttcattttgctagagaggaggtgattccagaaccaaaataggatgaagtcgtagtcttcaaaagcttcttcagggctggacttcggttccccctttatgagatgatcgctgaagttttgaagaagttcgaaatttacctacatcaactgacccccaatgtcattgttagacttagcgtgtacatttgggctcttcgaagccaaggaaaaagtgtcaatgctgaagggttctgtcgagtgcacgaacttcattatcagacaaaggctagaaccgatggtctgcacaagaattttgggtgctacaattttgcataccgaaaggatactaaggcccatgtgattggttaccatacgaagtgatcgatcgggtgg

SEQ ID NO: 68172 - DNA, 909 bp, Zea Mays
gaatgtgcagattaggatagaaatccacatatcagaatggcatgatttaaaaataaaaggaattatttcagctaatcaacgccaaccaaacttaatgctaaatatactaattcacaacataacagaagtaaaaaaggcatgggccataacaaacctatgatgatgcatttcatgagaagcaaattcagagtgcaaactttacaggtttgttgtatcacaagatcaaaacatttcccatgattgctgatataccattgagtcgatgatggaaatctaagctggataaatacagaagcaacatggtgttaagaggattacctgaacctcaggcaatgggcgttcttggatcagggaatcaggcaacctatttccccaaaccaaaccagcaagcaaatatgggggctaggctgagttgggaggcggaacagtagagcggtgttgagtgcgtcggagaagatgcagatagttgaagctggcctgtaccgtcttcctgtgagagcaccggggaggatgggggttgtgggctggtggcatcgaggtcgcactggtcatctttaaggaccgacatcctcatcgatggtaggtatcggcattgggatggaaggtgattgaagcaacataatttaaggacccgtcaatttgggctgattgaagatctcggatggtaagaaagatgcctggctcggggacgaggatggcggggcgaggatgtcaggattgtggaggccaatcgggggcccgagaatgacgggatgcgtgctttccatcgaggaactggcgacgatgtctggaatgcggcgtgctttccattgccaccgaggaaccagcgagcgtctcacctgaggaagtgcgcttgtcgcggcgggcatgcgcggggctgggcaggggcgtggttgagcttgtgctggc

SEQ ID NO: 68173 - DNA, 847 bp, Zea Mays
ctgaaattcagtgaatatggtcaactttggagctttatatctccaaatctacaagagttttgcttgaggtcaatacatcaaacctgtagagctaaaataggagtgcaaatttgcttaagtgattaaaccttggtatcatacaaaatttggagataaatagacctaaagtcggactaacagtcagtcattgaactgaataatggttaaaagtgaagttaggcgaactttgagattggattcgaccatgatcaagtgattgtttgactatggttgctatagcaagattgtagccggatcatagggcaacaacttttgttacaggcagattaacaagttgtcatgtaaaaatctgagatctaggccctgcaaattggtttgtcaggcgctctgaatgaggattccattgtacagtagctgaaaagatcccaagattcatcacccttcgctgccggtgatccatcgtcacaattcacgctcgcctgggagattcgtgctacgagaagtgtggataatgtcgggcgtggtgagaatatccagtgcagggtgaatctggtcgctggccggaccggtcgccgtgtcccgccgtggttaatcgcgctggcatcaccggagttcgccattatccggctaggctacgtgcctcgacgccttaccacgtcgaaataaaccgctctaggtagctcgttcatcgcctcagccactgccccgataaaagccacgaatcaccacgccagtgactcagtccctttctccgaccgccaacgcgccattccaaattcaagagccaccgccctcgagtcctataaattaagtgtgccatcagctccgctaggtagtcatgcatcca

SEQ ID NO: 68174 - DNA, 405 bp, Zea Mays
gtttgcaacaaccaaggtcatggagaaaatgagccatcaaaatcaactacaaggacaggttgcaaagctcgtgtccagtttagcattagcagggaagggtttagtacagtgcaaaaggttgaacttgaacacaatcataccctcgctagtccgacaaagcacacaagttaaggtcccaatgacatgttattaaagcagacagacaactcattatccaaatacgggaagccagaatgaggccaacacaagtgtatgaatttatgaagcaattttatggaggtgctgataaagttccattctcaaggatggattgtaataatgtgatcggtcgtgaacgaaagaaatacttagaatcgaatgatgcacaaacactattggaatacttgaagaataagcaaatagagg

SEQ ID NO: 68175 - DNA, 532 bp, Zea Mays
ttcggggcagacggcggacccgtgaagaccatccaggtcggcgcggactcctcccagaccacccgcattgcgggcaatttgggagagaaataggaactcgcgctcgtcgccttcctccgggaaaatgttgaagtttttgcttgggaaccgtcatagatgcctgggatccccaaggaggtgattgagcaccatctgaagatccaccctgacgccaggccagtaagccagaagcctcggagacagtctgttgagcggtaggacttcatccgccaagaggtccagaagctgcttgacgccggctttatcgaagaggtccatcaccccgtgtggctggccaacccggtcatcgtgccaaaggcgaacggggagcttcgaatgtgcatcgactacactagcctgaataaggcctgtcccaaggacccgtatccacttccacgcatagatcagatcgtggactctacctctgggtgcgacctcttatccttcttagatgcctacttgggtttccactagatccagatggctagggagg

SEQ ID NO: 68176 - DNA, 815 bp, Zea Mays
catctaccagcacagcggctgcagactatacccgtaacctggtcgttcgcgtgctggggattggatatgattggacctttcaagaaagctcaaggaggatacactcatgtactggtggctatcgacaaattcactaaatggatagagttcaaacccattgtctctctaacttcagctaaggcagtggaattcatacaagacataatattcaggttcgggataccgaatagcattataactgacctgggatccaacttcaccagttcagagttcttcgatttctgtgagcaaaagagcattcagatcaaatatgcctcggtggcgcacccaagagccaacgggcaagtagaaagagccaacgggatgatattagaagcactcagaaagaaagtcttcgacaagaatgagaagttcgcaggaaagtggatcagagagctgccgtatgtagtttggagcctgagaactcaacctagccgagctctgcatggaaatactcccttctttatggtttacggttcggaggcggtgctacctgctgatctcaagtttggggcaccgaggttaatctttaaaaacatagcagaagctgaagctactaggctggaggatgttgatgtactcgaagaagagcgactgaatacggtgattcaatcagcacggtatcagcaaactctaaggcgctatcatgataaggccatacggcatcgatccttcgcagtgggagatctcatcctccgccgaattctaacgggggagagacgacataaattatcacctctatgggaaggaccattcatagtagcagaagtcactcg

SEQ ID NO: 68177 - DNA, 793 bp, Zea Mays
ttttaatcagattataattatagagagattaacctagattagtagaattaatctactgaatatagattgagcatttatctaattaaaaatacatggaatatggtacacgtgatgatgctactgcgtagaaaatatttttatgaagctaacacaactggaacgggtcaattcagagttaaaacagagaaattatgaatttgtgaagttttaggattgactttctatattaaaattcattttctaattaattttattatttcaaatatcccattttgacctaggacaatattttgaactcttccagggtgctctgcgcaaaattccacggccaaagcgcacaatccccggcccccatgcagatggcaggtttattatgaaatactctgaggactctttagcaatattaccatggagaagggttatcgttaagtcctggctgctcgatttactacgcacggcctagattagacctgattctccctgaactggtatccaataatgaccgcgcgatcaaagatcgacggtccacccccacgatctaacctatgcccttggatttcgaactggtggtcctattttaatgggccgaaacggtgtaaaccctaacccctcatctcacacacccgctcaagatccaacggatctaagcatgtcctcaacctcaccttgctagagcgcggcagcgccatgttccgcggtggcgccatataccccggcgagcaatcgacagcgcaccagtgcccgaaacaccgaatagatttgtgctacctacagcgggtgctaagacgaatca

SEQ ID NO: 68178 - DNA, 539 bp, Zea Mays
ctctacgcgacgacatcggtaggatccacaatcatatcaagtatattaaaggaaaagaaagaaaaattaagtaggaatgatacctaatttaaaacaaaatttgaacattaaaacattaactgttttagaacgcagaaactactgcaaatcatgtttagcaagaatcgatgtgaaagctaaataaactactgttgtactaccctactggagatgaagatgtgaatccataggtaaaaacaaatcagtacggcaaagacgatagcatatagatcttgcttccatgtttgaaaatgaataaaaatgagataagatttgacaatgtgtctggactgttcgagttcatggattcctgtcatcaagctcaaaccaggccaagcttaagtgtctttttgttactggtcagtaacaattaacaaagtggccggttttggttgtggctcatacgctcacacgatgttgtttctctccgtacgtctcccatgagaacacccgttttcttttaggcccgtgggtcacaaggcaaatcacttccggtttga

SEQ ID NO: 68179 - DNA, 531 bp, Zea Mays
tgtatagctgcatccaaattcgatggtgtgaaatcttagtgttgattacatttatgacgtactttgagcttcattgcatgttgtttcatgctggatatcaagttgtgtagtttccttagacaattagtccgaggtagaagttcttgtgttaattaagaccaataatgggcccatgttttgaatggtggtgctatatggggtaccttggatgcttaggttggagtggtcgaattcgaggacgaattctttttaaggggggtagagtgtgataccccaattttctgaaaagaagttaaacttctttttctcttttctttcttgttctgtggcattggggtttggagtttcaggaggcattcctcaggaaacagtagatcttttggcattttttctgccggggtcgggagctcaaatggatgagcgagtttgggccattgatttcaatccggtggatgggagcccccctctcctccccaaccctagccaaccccctctccctctccccaatttgttgcagccgccccctccctc

SEQ ID NO: 68180 - DNA, 315 bp, Zea Mays
gtcattgttgaccacactgttttttttcttagtattggtctccccataacaaacccccttcttgcgccaccttgacgttattgcgctccaacttaagctccttaatcaccattgtaggctgagtctcattgcactcctcatcttcctatcccagggctccaaatcatctttgcgtgtaggtccataaggccatctcaagcaagtcgtgtaagtggtcatgcaaagtactgttttgtaatgtaaattatattttttgcagagtgaagtttgaaatagagagtgagatagcgagtctgttaaaaatagtcggagttt

SEQ ID NO: 68181 - DNA, 338 bp, Zea Mays
ttaatatgcatcatatacacacaacaagcataccgatcacaagatgtcctacaaaataggttagacaaacatgtttctctatgttctccactatagcagatagtcacggcggtccctaaaaacctcacagaattccatgcatagtccctaagtacgtcaattcacatcttgagaacatgcgacaatctcaggtctaaggacacaatatacatgttgcaaaaatagaactatattacaatatctcacgttgggtcgttccagcctcatggcatacatgcacccacattattagtttaacatctctatgtccatgacttgtgaaatgtggtcatcaacta

SEQ ID NO: 68182 - DNA, 487 bp, Zea Mays
gcggccgcaatgggaggaggaggtaagagaagaggggaatcccgcgaaggcctgaagcttttatgctctggatgcccaatccgcccccggaggttcggccggcgaaattcacggcagggagcaggttgttctcaacaaccccggcttcgcggagacgaccggtgacgtgggacccactggcagggagccgactccaagcgaaatgtgcacgtcagaatgacagtgtggggacgggatgtcggcgccgcgcggtaggaagatgacagcgcccgcgaatggatgactgggaggacccacacgacagagaccccagtgaagcgacacggaagaagggctgatgggctgcgcggtggtaaatcggagttgggcccacaaagggtttagtcggcccatgatggcacagtttcgtttttcttttattctattccgaatttccccttttttatattttcaaattctaacatttgaacttcaacttgagttgtga

SEQ ID NO: 68183 - DNA, 705 bp, Zea Mays
tctatgtcctggcccttccgcactatcatattggtgggtaggtatgcccacccaattctactggcacatgaaatgctacttcctttgtgcctaactttcccctaggagattttacaataactcccatatttgtttcttgaattggaacatcacgattcacaacaaaagttctattaatgaatgtatgagatgcaccagtatcaaaaagtactttagcaaaatgatgggcaacaaagaacgaacccatcagcactggattcccttctagagtcacatccacttgagtatagaacactcgcccaaatttcctattgtccttcccttttgcactgttaccagaaatattattgttctgattttgagaattgtttcccgccgacctctggaaattggagttattttggcgaggatagggacaatctttaatgaaatgtcccactttttcacaattgtaacaaggatatttagtgctagtgggaacaggtaagcggggaacttgggtgtttgcaggtcaaagttggtttggccagttggtgggatgaatataagtagggttcttgaaaggataggtagttgaatggtaaggaacatttgtagaaccagcagtcctgattacctccttctggcatatcgccgtcgactaagaaaaccctgacctagaacctttccatgcctgcctcacattttgatgtactcgtgcctttt

SEQ ID NO: 68184 - DNA, 550 bp, Zea Mays
gacagactaaggatatgtttgtctaagtcattgaagtggtcaagtgtatagctaaatgaagacaagagaagaaagaccaaaaaggacaagtctggttgctctaggtgtagtagaccaagtctagcggtacaccggactgaacatgcagagagcatgttttgcgacacatgcaacttggcacaccaaactaggtctggtgatgagtcaaactgaagttgcagggagtttgtttttggggtgctgaagactttggcacaccagaccgagtccgatggtgaactggaccaagtacgcgggaaggatgttttatagtttcaggcagatggtgcccggaccggagtccggtacacactggaccaacagtatacccaacggtcaaaaggttcagcccaatggtctactgacatggcaaggtccagtgggtcacctagcgatccgttgggtgctaacaacatgacagctttatccaacaatcattgacctagcacggacagttagtggtctagtggcaccgaatttgccactgttcatggtccggtacacacgtttt

SEQ ID NO: 68185 - DNA, 306 bp, Zea Mays
aaccaaacaaggtcttatttggcgaatctgaatcacctagcatagcgagctgcgcgaccacgtccgtgagtcaaagtgcgaatgcctccaccgacttgccgtctcggaacgagagcatctcgtacatgcggcgtagcctctgtgccgtcgacttcctcactcattcatcgccgatccgcatcgtctttagtgtttcccacgcctcctttgccgtgggcttgatagccagtgtggccaccatctctggtggcgcggcgctgcagatgacatccagtgccatccggtcgtcgcgctcgtcgacgtcgc

SEQ ID NO: 68186 - DNA, 364 bp, Zea Mays
gggaaaacgagtaccaggggcactcggttgattggtaggagcgggggcagtagtgggacgaataaaaacaggctacttgaagggataggaaggtggacgaggcgaagaacgattctgattaaaaggtcggatcaccaacctggttgtcttctcaggtccttggtttgacctttcacctctaaacccctttgattttccatgcccagtatttttggcttccattgccagtgttgtactgacagccctactgtaggtaagatccagacatgttgccattttccattgaagcctgtcattaagtcccctcataaaacaattctttttcttcggatctgtatttacttggtcgatggcatactgggac

SEQ ID NO: 68187 - DNA, 901 bp, Zea Mays
tcgggatttaatatgcaaatgttcccaagactcaggacctacccgcggaggactgcgggtttaatccgttaaaagctgagagctcttttgcactatttccaggccgaaggggtaaggagagattcgggccgtccgatcaggaatctagggctcaagttagatcgacgcagtacgcgaaccggtattgaatcctggctgacggatcgccatccaacgatccacattttaaatatcagaggtccccgcgatccattcgatcgacatcgaacggacgcgggcgaaacgctacccagatctaatcctacgcgatcagccgccatccgacggtccctgaaaactccacaaagggtacacggtttcctaatctagagcgtaatacgggagatcaacggctcctgtccgtcttcttccccacgcgacggcagtgaacagtggcgttgccagctgccacggcgaaggacgccgacgatgggccacccagtcattccaacggccaaaccccacataaaatagtgctaaacaatgaggggtcaacggcgaacgcgcggggagagttctcatatgtgatggcgcccaacagagttctatcgacgaggaagcacggccacggcgaaatttccagccccggcgatcgattcgcaccggcacagcgccaatccccgacccgggatacagcggacactttccactaccaccagcgtttcaccaattcgcgtttctggcggccgaacgacggtggggaagctcctgcctggtggagaatcggccgcgctcgcacggcactctcacagcgcgcaacagcgaacgccgcccccccggtagccatgcacacacccagcggcccccagagaacgattccgcacgggacgcagtggcagcaccgcttcctccctcccatccg

SEQ ID NO: 68188 - DNA, 1480 bp, Zea Mays
tttaccccatccccgtcggcgctggctggcatgtgaaattgcagagaactagggcacgacatcccgcgcgcccggccgaaacgatctcgtgcgcgtgcctgatctcgtccctggcgggtctgatttaatccctagcgggtccgatctcgtgcgtgagagagaaattttgatgtctgcgcttgcagttatgctctgttcgtgcgtatgcagttagagagcaaattcgagattgtgcgcgtgcagcagtagctatcctctgcaatttccatgcgtgcagtagttagagaacaacctcctacttcttaattagtttggtgctactgctacattatgcgtgcaacagattagttcatttcgaagttcatgtatgtgctgtgtctggccatctaaaaaaacatcgttttcttgtcccttccatttaatttgctctcagccaactctattgaattaggccactgcatgcctgtggcctgtgtggtgtgtgagatattgctgttaaagatatctcatctgttatgttcagtcaattgttgttaggcatttactcggtcaaagaaaaaagaattgttaggcatttcaatgtttttcccagcatgcatggacaaaggctgttcgtatcacaagcaaaatgtttaagccatttttcaatgcaaaatgatagcagccgataattatttgctttagaaactgtcaattttcttatgtcccatcagtttgtgccttttattttgctttagaaactagctacactcttgatttgttggaactaacatatcattgctctgcatttaaacgatcatctagcagatttaaactgtatttcacaagtttcaggttctagtatacgatcatctagcagatttaaacgatggtattcatcataaatcttcagatggtttagtagatgtaaattagagtaaacatttaagagtgaatgatatatgaatctgttttgacaacaaatatattgccacaagttttataattaatatttaccatatttatggcaccgagtaaggcatggatgaatctagttgatgagcgtcttagtattgaatgtttggatggcctgacttcaaaaaaaatctttatttagatggagtcgccaagttcttggattatgcattcagtaggtcaggtgatggaggtatataaaactttggatggtttaatagccctcatcagacatacagatcacacccccttggataagttactgcagccacttgaataacgaagaattctttgagtagctgcaaccttactatgtgaacaataagttccggactaattcatgtgggaggccttttgtctaataggcagtcaagggcagatgggctttgtagccaatattgtgattagataaacaattatgatttaatggcatccatggccagtagaggatactctaggataggttgagttattcactatcttgccaggttggttgtgtgcagtgcacttgacatgtgaatgaaag

SEQ ID NO: 68189 - DNA, 998 bp, Zea Mays
attttagggcaaacttgtagaaattccagaggacgcgtcattgcacaaaaaaattctgaaacttggtgtgttttcttcttatgtgctgctgcaaaagagataaatataaaaaaatattttaaaaaaaaatcgcaaaaaaaagaaaaaaaagaaaagagtagcacataaaaagaaacgccagtgttctgtgcacctctgtgattattttgccccaagcctgttttcttgctgcacctagatacttgtgccttggtccaactgttctattacattttctaggccagcaactaggacgagtacttggaacacttattcagcgttgctatctgttactgacttgtgtgccacatatatatatttagtcggccttcccagagccccagctttctctcgggcagaacaagtacttctttccaatcacacccacgctcgttgcatagtcacaccagtcaccatttgccacctacattgctggtaagaaccttgtaagagaggggtaagacgcttcataatttgtataccaccaccaccaccctgagagatagttgtagggttcacattgtttgttgcctgtttgtctctgttttgtgataacaatgacatgaccaaagaatcaaatggataaagacaaggggcttaagcttaacgacgatgagtgtgtctcttagctggaattgaaggagatgatgcgtgcgatgactgaagcttttaaaaaataccaggactctacggtgacatcctatgagtagcttgatcgacgagttgctgaacttgttacacacatggacgtactagaggctcgtcccccaccaccaactccagccccagctctttctcctgtggacgacgacgatgatgacaacgatgtttatgcaccgctacgacaatgcctcgcacgtcatcgacaaggtatgggaggtaatggtagacgtcgtcatcataatcctaaaccagaccatgatccatttgctaagattaagttctctattccaccgttc

SEQ ID NO: 68190 - DNA, 375 bp, Zea Mays
caaattttctttatccttatgatccatgaaatcactgttttatattcactatcttgttttatattcacaattttttccatcctcaaggttcctgttgcaaagtatagaaaacaactagtttctaggcatggtctactatctgcagttttagttttgttgattactagattcaacccttttttgttggcaaattgctttgaactgccaacgatagtcactaaaatatactttaggtgttgtgtacttcaggtgttgatagtagagctcttgtttgatagtgtactgcagttgcactgaccactcttgttttcagttatgcgagtttacagaaatgcagtagagctgaaatgttgtgcgagttatgcagtagagctc

SEQ ID NO: 68191 - DNA, 423 bp, Zea Mays
tgtatccttactgcagtaattgccttcttttcaagatagtctgtatttcatgatagatacataatgactattgctcttgttcaagtatacctttactttcataattcacggatgtttgtcatgggggtgctttatgcactttaacttgctttactctaatatttctcaatacagtagcaagctcctttattaatagccgatgagctcatatttcttttagctttctattcctttacatttactggtatattcataccctgaaggcgcctcgctagcaggctgctctccagttactagctctcaactagttccccattatttcactgaggtgttttatgaatggaccgtgacaagctctcttatccatttttctccaggcgtccccgggtacttgggattagagtaactagatttcctatcctt

SEQ ID NO: 68192 - DNA, 538 bp, Zea Mays
ggtctaggacccttgtgcgtaggtctgaacgataggcgtggaggcccgggacccatccatgtgggtccagactacatatgcgggggtccgagacccgcccatgggagtccagactatacacgttgaggtccaagacctgtctgtgggggcccagacccattggtgtactcgctgagcatttccccttccgggacacatggcagtacatgacctaatcctgagctaggagcaggttctgaggccagcgatcctatcaaatgggttcggtcccgtgggcccggctgctcggttccttagtacgtggttagagagctcaccacgcgagtccctatcttaacacagtaaaagtgggtaccctagttatggggtaccgaaaaggtgcttctcaaaggtatgttgttcccccactagtgcttcattgtttttttatagtttctaacctaagatttaccatatatgtgactttttgcatggtcctagatccactactcccactgctcctccatcgtccttgtgaacttgcgttcttctgtgtctg

SEQ ID NO: 68193 - DNA, 509 bp, Zea Mays
atcccttcctaaaatattgaaaacatacatggtataatctcattatgtatcttatggttttcatcgtcgtcgatgttttaatataagactacttcaaactattatatttatcgattatgagtgatttagtaagataatatcgttgtagcagtttagttaagcccgtctcaaacttttttctagatctgtccctaggctagcatgctagagagatgatcatcttagtcgtcgccacctctcttcctaggttgcaggtgccctggatgccattgtagtttctctcactgtcgtgtggttctagcacaccgatattgcgacatttcatcctttcacgtgtggataccaaatgcgatgttgttgttgctgtggttttaatccacaacaaactcaaagagtatgggcgaatgtgtcactaccattgctatacaaggatgttcgactactttccctacatcaacacgctcttttttattgtgttgcacatctagtggtaacgatccataatcctt

SEQ ID NO: 68194 - DNA, 576 bp, Zea Mays
gtgacacacttcacccacacgccatatatatctcaaaagacaaagccctcctttccacaacgaacgaacatattcctcccgtcgatcgctccagacactatcaccttccacctctcagcttcactctcaagcctctactccatcttcttgtgaagcttctcaagattctcgcgatcgcatgcctttacccttcctctctctctttctctctctggtcatcttactaaactacctccaatgccggtgccaatggcggcagctcagttcctctagctagtctcccaccgtaattagcaaacccggagaaaaaaagggaacattcgacgccaccccgtgatgaggccttcgccacctttgctcctgttcgtgctcctgcacttcgcgctcctgtccaccattgccgccgccgatgggaatgggaatgggaatgggaacggcgacctgcgcggcgacgcgatggcgctgctcgccctcaaggccgcgctcggctgccggccgggcgcgctgcggtcgtggtcggagggcaatgccgggtccgtgtgcgcgtggacgggcgtccggtgcgcggccggacgc

SEQ ID NO: 68195 - DNA, 325 bp, Zea Mays
tcggggtagaacggtactgctgtcgtggcgtctttctttctgttctcctttgaggtcggaggaacgggaagaacgacttgcctctccctggtctcctcctttctcgcgacccgtgtccactctttcgtcggggaagtagtactcgggggcttgtgggtcagcgagcttctagctccagcctccctggagacgatctttttccgaagagccggaggtagcgtctttccagcattttcggagtttgttggaggaaacttcttttccggcagatccgcgatgcggtgtagagttccctcttcatccgctacagatgagattgtcccga

SEQ ID NO: 68196 - DNA, 271 bp, Zea Mays
agagaccatgaggggaagcatatacaaaactattgattcccaactatcaaggggggcaaccactcgaacagttcagaggctccctactagtatatatatattcaactcccatagccaaccataccaaaacaaagtctatcccaatctggcctcacgcatgaaaatcatcaacccttaacctggcgaagaccaacatctgtctttgttccaacaaccagtcattgaagtcgagtgtcaatggccaaccagaaggccaatgtatcactatttg

SEQ ID NO: 68197 - DNA, 457 bp, Zea Mays
ttcattgacgatattctggtctattccaagaatgaagacgaacatactgagcatctgcacatcgtgcttcagcggctaagcgatcatcatctttatgctaagttgtctaaatgtgagttctggctaaagaaaattaaattcttgggtcacacaatttctcaggatgggatatcagttgatcctgagaaggtacaagaggtaatggattggaaacccccgactacagtaaggcagattcggagttttctgggattggcagggtattatcgatgatttattccggatttctccagaattgccaaaccaatgactgaactgttaaagaagggagtcaagtataattggagccaaaagtgcaaagatgcttttcatacactgaggcagcatttgataacagccctagtgctagctcaacctgataacaccaagccctttgaagtttattgtgatgcttctg

SEQ ID NO: 68198 - DNA, 578 bp, Zea Mays
aaacggcccacaccacactggccgaatcgatacaccacttctaatcataactagtcatagggatattacagtcagcggccatcttctcccaccgcacactagggcacggcggcgctctgccacactgcggcgttcttcgtcggcgagcggctgccagagactctagggcacaatcctaaccccagctaggcctacagactatggatgtcaacccaaatagggttatagatacctcaccgttgaaggcgttatggcgaagtcggttcacggggcgaggcggacacacggtggtggacagaatctggtgataaattcttcacggccctaggcttccctttgatcagtgcttgtcatgtgtgggttccaagtgactcaagcgaccctcccagacctccactcagaggtcagtgccgtgtaggcccgaatcagccatggtcgcaatcctgaaccccctgtcatcttcttgcccagtcctggcgactcaatcggaggtgttgctgcccaaggtacggatggacgaggggagggcacggttttataccctgggctgagtccaagaaggtgggcacgctcccgag

SEQ ID NO: 68199 - DNA, 437 bp, Zea Mays
cgcggctataaatagccctgtgattcccggcgaggcacgaccatcacacacaccgtgggttgaatcgaagccaaattcgcgctgtctctgcccctcctctcaaattgattgtgcgcagtaaaactagaacctcttgcggccgtgtagccccaagctccgtcctcaattccacccgagcacgccgcgacgccattttcccccaaatcggtccgtcgcgccgccgagaacagcttgtccgtggctagcccgctctggtaagactctgtccaattcaagcgttgttttagtagctctgcatgcttgtgaagcttgtcgtggcaaccgttagctcaattcggccatggttaagcgggaacgtgagctcgtgatcacggtctccgccgtgcacatggccagaccattcccaaagtattcaagctaagattagtgagtgttcc

SEQ ID NO: 68200 - DNA, 684 bp, Zea Mays
gatggttgtctcattgggcatattaaatatgccagcttttacttcatgccacctcttgaggtaaccatgtagtgactcatcctccttcttaacaacttactcaagatcatgctgagtcttctcccagtcacaagtcgtgctaaagttgttgataaactggtgagtcaattctacctaggagtcgatagagtttgttcgaagaccaaataaccacttcgtggctcatgggaatgtagttggccatgatgggagagtcacctcctgtggtagtgataaacaactagtaaactccaagctactcaacatggtttgtatgactgtcatatgactcaaccgatgttggcttgaagttctttagccagttggctctgctcaagagattgctgaaagctttaatgatagttgatgtatggccctaaggagttgactttcactggattcgatcactgttgaaacttcacactcacggtcatgtcttttagcttcccgatgcaccacttcttggtcttggtgcctggcattgatatagttgtgtaggtcttgatgttgaaaatgtctatctagctcatctcgaatatctccgctacaaggcagggtttggacttgttctagattaagctgagccaatgttcgagccccatcatgttgcttgttcacaacataagtttgtgactcgttacaatg

SEQ ID NO: 68201 - DNA, 351 bp, Zea Mays
gttgaaaagtatacaactttggtgcagaaggatgatggagttgtcatgcaaaatttagagaaaatctgccttgaatgtggactgtcaggctatctgcagaaccctcctatggtacagtggctgaatcagatcgcgggttcattccccctcgccgccgatgacccttcgccgcgattgttgactgatcgtcgtgattcgtgcgccgtggcttgcggataaccgtgggcgggtaaagatcttggcgcctggatcaacttgggtccagtcgcggctaggctcaccgtacccccttgctcgtcgatcgattaggataggtctcaccgtcgttggccgattaccgccatgcgccac

SEQ ID NO: 68202 - DNA, 515 bp, Zea Mays
cttttgtattagcgtggatgacgggttaagtttaatgaaatccgagggctcttttcaaaagaatccaccgcgaagaggtatcagcgtatcggggccgttggatcgacggtctgtggtggagattagattgggccttcattaaagaggtatggaatggcagccatcggatcaagatcaacggctcccacacaccctcgaaccggtatctgatctcagccacaggatctggagcaacggtccagattagatcttatggaatcgttacccggaatcaaatcttagtcgtccgctagaagatctatggatcacatcaccccatctattcttatccactgatcacccgatcgacggtcacaacccatcttccagctcctggccctaagcacggcggcacactcggcccccgcgacggagcatcaccggagcgacactcaactcgcgcccaggtgcgtaatccccgatttagctaaacgctgcgcgaggtggaaaacacggagaattggtttagggcctgc

SEQ ID NO: 68203 - DNA, 468 bp, Zea Mays
actctatgtcttatgcctatggacaactatttgtaatattctgtgggttgaactatgtttagttcaaatcactctgtgaatggttaatcgaggagtgattataattgttgtgcttactttacatattatctcttgtatgcctcgataaccatgactgtaggaagatctccatcaaaactccgatcaattatgtgtgttgtatcttcagcttgaaatatcatgcacacacatagggggaacttttcttacattctaagttttattgggatttatctatctctcggacagaacttcaaatcaaaataagttctatgaaactcatctctaaaatccttcttatacctaaggtatgagggagatttggagaaacaaaacttctcttaaaaatattgtgtagtgttgtcatcaattaccaaaaagggggagattgtgaatcatctaggccccttagtgatgttttggtaatta

SEQ ID NO: 68204 - DNA, 468 bp, Zea Mays
gaatacatcaagtctggttctagggcaacatccgttacttcaatggttcgattgggaacccgaagacacttcttcaattgagacacgtggaacacattatgtactgcagacaaggtttcgggtaactggagtcggtatgccactagtccatattgttcaagatcaggaaaaggaccaatatactgggggtgcaagcttccctttaaccccgaaacgtgatacacccttcatcggtgaaactttcaggtagacataatctccaactagaaagtataagggttgtcgtcgcttgtctgcataattcatttgacgagcttgagcttctttcaaattaggaattattcgttgaactttttcttcggtctcctttaccatatcaggtctgaagaagcttctttcacctggttcagaccaatttaacggagtacgacatcgtcgtccatataaagcttcgaagggtgccatctt

SEQ ID NO: 68205 - DNA, 477 bp, Zea Mays
ccggctttgtcctttaaaaccgggtgttacaatctgatagtatctcaatgcctccggccttgggatttcctttgttcatttctaactttcaggtgagtgtgtcctgaccatgttctatctttgtcgatagatgatttccttgttaacttttatatttgtagagtgttctagactcagtgttagctcagctgaggtcgtgtggtgtccccgttcctgatcagattttatctctatcgcaatggagccctcttcttcttcagaagcagatgcacgacctgaaagttttgaatgtcggtcagtgggtaaataactcttttggtgttcgttgcttcctcgcttacaccacagatcattttcacttgctttttcagtggtgctctgatgctctgatgctctgatgctgaagaaaggtgcgcttagagtgaggcatatcttgatcaagtttccacattttggtgcccgagccatgaactcttc

SEQ ID NO: 68206 - DNA, 716 bp, Zea Mays
tgggcgacaggagtggtcggaacagcggtggcgccgagagcctgatcttgccatgggaggcgccccctcttttacctttcttacaacacgttcaaaggtcctctagaagagtcgagacttgactcacctctggctgatatgcagagggcatttggcaaccgttgagccacaatcaaatggctaagaaagcaattgatgacgtggacgcatgtcaggcgatgttttgtaccggttttaataattgtagtgtatgcctgtgtattagtctatctttctcatgcatctatcaaaagaatagttagataaagaacaaaatgtagacacgtttatagaaaatggtacatctcactcacagtatccaacaattaaccctaatcccgtaaatgataggaaaaaaacaaaatgatgatttaggtctgttgtgtgacacattaatgatcgggtcgcatgtgggtccattttactatatatatcaagttgtagagataagttttacattttatatcatatatatcaccaaactaagccaaattcactatttactatgtttttcacaatatgtcttattagaaatttcatatgaaggcagtttcatatttagaagtgtctagatactcactaaaatctaagacagttcttatagtctagacgactctaataatatctttatttgagatggtttcatatacaaaagtgtctaatatactgaccaaaat

SEQ ID NO: 68207 - DNA, 370 bp, Zea Mays
gactaagaagatccatggtgtgaagatggtatgcacatttgcacgcattagactgtgtttgaaataaaagttgctgctattacctacttaactgcattcacatgtctttaggatatacattagactcttgattgattctgaagaaatggcaagttctcatagctctggcttaacatttcaaacaaaaaataggatatgttggtaggagtactagagagggatcagcgaggtccacaagctgacagtacttaccgctgttcttgctgtcctttgtgcaatgtgcctcaaactgtgatacatacatcttaaatattgttgaatattgagtggccaatgaaaggaagactcatctaggttgagtctgtagctg

SEQ ID NO: 68208 - DNA, 551 bp, Zea Mays
aaagattcctaggcccttggggctcaccggtcagagaaagcacatgaggtaagaacctccaaactaccggggaccatccgttaacgaggggtaggggaatcgtctacccaagaagcacccgtccccgaatagaccatgaggcatcgagcccgaggtcatgcatggcggagctacaaagggggctaggcgaaccgaaaggaaaccacccgagtaaattcctcgcctggcccgagactgacccgctataaacggtcgaccgcattaagtacatctgacactgagtcgtaatagagagccgatccgcctcccactcatgacctgcacaaccctttggtcagcagcgcattcatgacctacgagaccctcggcctgtggagcactcatgacttatcaagcctaggtctgagtgcatggaccatccactgggctcgctacacgatgagccacgtcgaggcctaggctatggagccacgtcgaggcctaggctatggaggccagaggtctgcatggcatagaggtagtaatgatggcaccgggtccctgcaccgtcc

SEQ ID NO: 68209 - DNA, 396 bp, Zea Mays
tgaggcgcggcggggccagcggcgcggacgcggaaggttctggaaggttcctatcattgttcagaagcctcatcatcagagtggaagcccccggggtagtaatagtataaagtcggaaagccgctgtgcagtgctgttctccatcagatgcgaggtgtgcaccgttcgatcctatatcaacggctgtgatcgagcgctggcgtgtcaaaatggatccactcggatgcacctggaagtccagtccacttggatgcagaaaggtttaacctggcaggtggagatgttctgaagttctgcaagtgcaaggtataatggaagcagtgagctgaatgactggccggccaaaagcaagcaatgtttgcccgtccaagctagttaaacccactcggtgaagat

SEQ ID NO: 68210 - DNA, 533 bp, Zea Mays
aactattgtatgcagtacttctaaatgcacgcaagctccgtcactactttgacgaccacaaagtcatagtagtcactagatatccaataggggatattctccacaacaaagaagccatcggaagaatagccaagtgggcctgcgagctaggagctcacaaaatcgagttttgaccttgcactgcaataaagactcaagcactagttgacttcgtatcagagtggaccgagcaacaagtgccagataacccggagatcacagaagtatggcgaatgtatttcgatggctcgttgaagctacagggagcaggcgcagggatcctcttcattgcacctggaggtgaacaactcaaatatgctcttcaattattattctcggcatccaataatgcggcagaatatgaagctttgattcatggactgaacattgccatatcacaaggcattaagagactgatggtatatggagattcactggtggtcgtaagtcaaataaataaagaatgggattgctcgaatgactctatgggtacc

SEQ ID NO: 68211 - DNA, 594 bp, Zea Mays
ggcttgtatagtgcaccgcatgatactgaggtaggcggttgtgtcttagcgtcgcgcgcatgggcgacatcatcatgagtagtcgttggctcacgtagagcatgcacgtccatcgcattaactataccacacatgaacagggctggccccctacatacgtcagcataccaggcacaccgtgcgactcgcatgagctatcaaatagggcagaagacatgcctagtcagaagattcacacgacggtcgaggagaagatctctacccagtgtagtctttactactctatgttgtatttaatactagttcgctagggcgcacctatcggggctcctcagcacccttgtatgtgttgcccttgtactataaaagggagggcacatgcattacaaggggatatcatcctgacttagacttgtcttcacccaaactcaagctctcagcaatacaactcacagtagacgtagagtgttagactctagcggcctgaaccactctaagtctctacatgttcttgcatccccacaggctaaccctaggcaacccctcgttcttagaattaggcaggtgcattcctccacccagctagagtttacc

SEQ ID NO: 68212 - DNA, 587 bp, Zea Mays
ttgggaattgcttgttggagccccctggctccgtggcgccgcgtcgcgctgtgggcaaggtagtaccaccattcaaacattgaatcgggggtctcgtgtgattctcctagcgccgggttgtatttagagccaccggccatgggtacatatgtcgttgggcgccgggttgatgaactccggcggggtcatcaccatgaacacgacggcgcacccgtgctcggggttgggcaagggtggcactgcatccgaccgttgatctgtaagcgtgtggcttggttagatcctggctccggtattgtgtcggccgttcactccccatcatgtggctacgattagaatgaagataaggtttcgatggttgtgatcctagccgctggtgggtgatctaagggttgaggttggatcaccgcgtaggtgtattgcggactgtacgatttagatccgagggctcgtatcgcgcatcggttgacttggttatgagatctaacctcgtccgtggagtttcgatcgggtagctcccatgtgcgggtaccccttcggtgcgggcgaacttgtaaaagggaccctgaacaattggctaatcaacc

SEQ ID NO: 68213 - DNA, 589 bp, Zea Mays
cggatgaccaaggttcctatggtcgaattggaacttgtataaagtttaacaactttgttttaatccggtcggtaacttatcatgtagaaatcaaagaaaaacacctcttaagatgctctgttaggacaactgaagaagatcctgattgtatactagcgaaaaaaaatctttagatggagtgaatgtgccgccggtgaactctgcgccgtgatcctcgccggcgtcatgattcgtgcgctcggtgtgcggatatcggccggcggtgaaaagatcttggcacacggatttgctcggacctggtcactggtgggttcaccgtacccacttggtctgcgagcgggtgagatgatccttgccggcgttagccgcttgccacccgtgcgccacgtgcctagcagctttaacacgtcacagtgaaccatagcagtaagcccgtccatcgccagagaccttgccatggtgaaagccacgatcacccgcgccagtacgtttcccctctctccggccgccagcgcaacttctcaaaattagctgccaccgctctcgaacactataaattgagtgtgccgctagctccgttaggttatcc

SEQ ID NO: 68214 - DNA, 683 bp, Zea Mays
atcaaggaccaccagacggggcgcgtgattcttcgctgcaatagtgacagcgacctatacaccttcccttcaccatcggtgcaccactgcagcctcgccgttaccgccacgctttggcaccaccgcctcggtcaccccggatcctccagcctcgccaccctacaaagcatgtcggtcatttcatgtaataagagccccccaccctttgccatgcatgtcagcttggcaagcacgtgcggctaccatttagtcattctacatctgtgaccactgctccttttgatttagttcactgtgatgtgtggacgtcacctgtactgagcacttcaggatttaaatattatcttgtcctacttgatgatttttcacattactgttggtccttcccgctgcgacacaaatctgaagtacaccgccacatagtcgatttcatcgcttatgctcagacacagtttgccaccacacccaaatcatttcaagccgataatgggactgagtttgttaacactgccaccacctcatacctcgctagctgtggcatctcgctgcgcctctcgtgtccctacacctcaccacaaaatggcaaagctgaacgcatgcttcgcacaacaaacaacaccatccgcaccatgctcctccatgcgttcatgccaccatcctactgggctgaggccctcgctact

SEQ ID NO: 68215 - DNA, 303 bp, Zea Mays
aagaaaagattaaacagggtattcgatgctattggcttcgtataccctgattaccattatccgctacgagggcaaaagaaaaagaggaagactactgcttcggccattgcagctgagctaaagggcaaaaagatgaaggttctgacccaccggtcgcattgcattgaaccggtcgtggtgcctaaatttggcgaaggagcctcttcaactaccgaagcaagacagactgctccaattacgcagagcattgaagaaccagctgtaatgccgaagacgcctacagttgggccaaccaaagctaaa

SEQ ID NO: 68216 - DNA, 1437 bp, Zea Mays
ctgggaaattggaagaccaggcaggcgagacaaagcaccagtcaagcttttcaagcaaaggaagatgttgcatattagaccaagtgaacgcttgtcctctgagaggaatctcttgtaaacctagctgactaattaccgcattgaagttgagcattctgatagggtcaccaccctgcttgttacaattttcagggtacctaatcatgttgaaatcaccaaggaaaatccaaagcttgtcttcatcaatttcaaggttagagaaccaggcaagaaaagcttctctaccatgaggagtacaaggtgcatagatgttggaaagccaccagacttgcccatttagattagattgaaaacgaatagtgtgcccaaacaaattctgctcaactacctcagcctcaaagagggagcctttccaaatagtgatgaatcctccagaagctccaatagaagggccgagagcaaatttatttaaatagcggttgcagaagagacgaatataagagtcatcgaaggattccttttttgtttcctgaatacaaacaatgtcacagttggattccaaatattattccgcaaagagttccacttgatgtcagagttaatgcctctgatgttgtgagacaaaattttcagtgaccggtgagaactctgaaaatgactatccattgaaaaccaaaaatatttcactgaagagctcgagtacgccaagcatacatcgacaggggcccaagcatacaatatgaaggaggtaagccaattcagagattcccaaaaaagtggggcagcgcgtgccaatactacccccgaaatccagacataagaaaagccgaaaaggcttaaaaaaaccccatatgacctttgaacccagaaaattcgggccattcacccataagacataaattggtgaaaagatagatgtggtccccatagcgggcactacaggcccaataacataaggagtagatttgttgcgatacataattaaaccaaaagatgtcaagaaccactgcgcagcagccccaagctgaaacagaagagacggcaacgcattacagccccgccaagggatgagactccgcatcatcatccatagcagaagcctccctctagtcatcagatggagaacccaactcattcctggagcaagacgaggaacgaggcctctggatggcagcactggaggacctggagttatttaaagcatcaaggctcaacttgtggggggtcaacattgcagaagttagtgcccaacttattgatagtcctgtgggagagagatggcggtgatgccccagcacagcacgagcagttatttttaattccaaaacaaggcttaaagcctttggccttttctctaagccttgcactccttctcacttcagtgtcgaccaaggttgcacgtttctttctgttaactgcttcagaagtcacagggga

SEQ ID NO: 68217 - DNA, 483 bp, Zea Mays
aggagctagggaagaaaagtctagtatcacgacctagatgataggcgtggcataaatgcttatgggtgccccctagtacaagagatgattgagctactatgcaacctggacaacacttctgaactaaggcgaccagttgatgatgccaagtgttagatgtagtcgtagtagttagtgtgtgcggctgcgtcatggacgacaatgattatgtagtggaagcaatggatggaatagtggaagctggaagccgcaaggtgtacatgagcccaaagttagcacatcgtgtgaggaggctccaggtggctagatccttcatggacaggccaaagcgtcaaattatcagtgataaactcatggacatataaaagcttatgaatgatgttgggggcgacaataacgtttcagaagcgaaaggaaccaataaggaccgaatcacctactgaggtgacccggcaaaggtgcccattgccaactacgatagaa

SEQ ID NO: 68218 - DNA, 608 bp, Zea Mays
ttcggcttcaacagtagcatccttagcttcggcttcattatttttttacttcaattactacctgtgaagtggagacttttcagcaagggttagtaaaacaattgctaaagtgtgagtgcactaaacttttaacagaagcgaaaaggtcaaataccttcggctttcttgctttgcagcttccaactaatatctacagctctttcatcggtctatcatgcttgtatagattttgaaagtcagtacgtacatgccctgcgtatgtaaagacgaaggtaataggatacaaaacttctccctattctttatagattctttctatacttatttccttctcgccctccttccatatttcagataagaattttatagaccacttcgaagcttcgacaatcgatcttcggatgtgggtagtagaatctctaaaatcagggttggtacaaacctttacatgattgtaaaaccgaagaagtgcttcaagcgcctatccaagcacaatagtcctatcgtgttgggagaatactttcaaaagcacaggtctcactgagcacccacttcatttagccctccatgtcaccatccgagaaattcttctctttagacagagcccc

SEQ ID NO: 68219 - DNA, 354 bp, Zea Mays
ccaaggtcagtcatttcagggtatttggctgcggatgctttgtgctaaaacagggtaatctggacaagtttgagtcccggtcttctgatggggtttttctgggttaaccattacattctcatgcttatcgtgttcttaacctagagactaaccgcattatggagacttgtgaggttacattcgatgagactgcaccttgtccatcacctgtctttgagcctgcaggtccagattagatgggatagaccatctttgttgaggaggagcacgacaacgatgattgggttgctctcaagccaactccaccagccgccctagttgagcctgcttccactactatggctgacgaacccg

SEQ ID NO: 68220 - DNA, 404 bp, Zea Mays
cgcgcacaagttgcctacgggcgcggccggatcaacgaaggcacgcagcctcatacaaattatagttacatacagcgagggcgtcacacattacattggctcaaccttcaggatgatacccatctctctgtagttgaagaacattatcctcaattcctcaccctcaaaaagatttcgcagctccccctcacctacactcgccccagccggcgaggacaacaattcctgtttgccagtcccgtccacacgaagacgaccaccctccatctcaccacgatgacacctatgacttcgcgacaactcactcactctccgtttcgccactgcccttcgccgcctacgcccagcactcgcacccggaagatcctcagcacccatcacacacggagatgtctctgccgcag

SEQ ID NO: 68221 - DNA, 645 bp, Zea Mays
ttgcttgaccgactgaagaattgactcggccggggactttcaagcaccattttgctgcaacaaacaagcatcgcgcagcccctcgcctcgcaaagcgcaaggcaaatgcagccggcgctgcctttcggctttcggcctttcgccccgtcgcgcgtgggggacccgcgcgttgccgacgactcgcgatagaccggaaagagtgacacaactggcgatggctcacacttggccacctgctgcgaggagccgaggagtgagcacccagggaggcggcaggagaggagagcaatgggccaatggggtacggtacggtagaccctatccggtgtcgtagtagttcagtgcgtgtgaacgagggacggcttaaggtcgtcacgtcacagactgtcagtctgcctgtctcggcggagcccgacagttgaatcccctgctggcagacgagacgagagcagcaccccctccccgtttcgtagaaaatcccatggaagattcattccccttttcgtcctgcgctgccgtgcgacggtgtcgcaatggatatgatacgcctggatttgttttgtttccggggcggcctgcctgtttcctgttcctgtcttgtacttcgcagttgtaaggctgagtccaatgcacagcctccctctt

SEQ ID NO: 68222 - DNA, 365 bp, Zea Mays
agagaaccatcaggattgtacttaagaagagactgaacaatgccactactttgttgttcctttttagcagtgcaattatgccgaagcaaatggccagtcccacaactagatttagcactgaaggtctgcttacaatatttgcaaagggcaccataccttaccctcttaccattgacgagattagtcagctcctcaaagtcattccagactttggatctcttccttgaggcattggcaccgatgctaccactagtaccagtaccaatactgcttccatcagcagcagtggggctagttgagcctatccctgtaccggcactaggagcatcatcgttgccaatgccgataaaggcccttgcatccta

SEQ ID NO: 68223 - DNA, 669 bp, Zea Mays
ttatagcacgggcggacagggtggtggccgaccgtgggcgtgtgggggggctccagagtgccagctcgtggtgaacacgtggttgcggttcatatgcctgtgttctaaatcatgtagtcacttgtccgagcctgatctcagtgggatttctgtacatggcgtcttcaccactccctaagctagctctcttgtatgggtgttaagagatattgttcagtggtttataagatatgggagggaaaaggttggtctatctcatagtccaaatatgaggcaaaaaggatgtcaagtcgtgtcaaacttcctggtctcgaggccaccttttggcatgtgttagattatgtaattaggcacaacttaggtaattatagtccactggtttggggtttgtagcttagtgaacacttagggtctttgttgagggctgatttttagttaatgagttttctgatttctcctctcttctcacacacatttgacatgattagggattttgctaagccttttcggtgcttaacccttaataacttttgttagttatttagtgaagtataacttttgttaatggcccactttgtgatgatgggatttaattagtttccttaatcacttgtttttggtgccccccttgctcccaaggggtaaacttagggttttgggttaattccc

SEQ ID NO: 68224 - DNA, 383 bp, Zea Mays
gagttcgattgtgtggacagaggagtcttcggatgaggatttggattactttgcagcattggatgtggctgcggcggaggcttctccacgtgtaatgggtggtgaggatctgccgggtgcgagtactaggcataggtgacgaagggcggtggcgaaacggagagtgagtgagttgtcacgaagtgataggcgtcattgtggcgaggtggagggtagtcctcttcgtgtggacgggactggcaagcgggaattgctggcctcgtcggctggggcgagtgtaggtgagggagagctgcgaagtctgtttgagggcgatgaattgaggataatgctgttcaactatagggagatgggtatcatcccgaaggttgagccgatgtaat

SEQ ID NO: 68225 - DNA, 373 bp, Zea Mays
ccacacccattggggggacgtccaggaattttcaatagattttccaagcagtcacatccacacagtatacacaatgaatgtatcaagacagaaggaagatatcgacggagatcggaggaaagccaaaaatagctgttgaagtacaagtctaatcaacaggagcattgaagcacaaagcaaaatgaagaacaaccaagagccatctaccggatgtccaatctgtcgcagatcaaataaatttcaaaacctaacaggacatgggtagaccgcgttgttgatatcaaagacaaaactgtatgctgatttctaaagcataaagctggcgatataatgctgaactctaaggcattcgacgaagataaaaggatgattt

SEQ ID NO: 68226 - DNA, 428 bp, Zea Mays
ttcaaaattttaagcgttattaaacaaattacaacagatttgaactaaaaatatgattttgacccataaattgaactaattacaatcatctaaatatgatttacacccatagattacaacagattttgaaaaataccccgtcaggtctcggtacaatacttctgtctcgtcactgttggcgtcgccaaaagcttgtacaattaaccaggaacacttgtgatcttcaatatcggtcccaatctaccatggagaagagcacaacgtgaacatacctgccctgtagagagaaaaaaaatgattgacgataggtaactattctgaacttcagacttacagggagataaaaagagtagtaagatgtcttgtacttgacaatgcgacggtacctgtgcagcaaaagaaacctgcattagcatcggcaacggagt

SEQ ID NO: 68227 - DNA, 1036 bp, Zea Mays
ccgccgcaatgtataggtacagcggttcccctggctccggagcaaccaggatcggcagggaagctagatgctgcttcaactcatggaaggcttgttccgcctcttcggtccaggcaaatgggccggatttctataggagcttgagaagggcagtgccctctcagtcaaccttgaaatgaagcggctaagggcagccagtgatcctgcaagcttctggatgtccttaatacgggcaggaggcctcattacctcaatagccttgattttctctgggttagcttcaatgccccggtatgaaaccaggaaccccagcaacttccctgcggagacaccgaagatgcatttctctgggtttagctaggtgtgggttgcccgcagcttgccgaaaaccaaggtcaggtcctccactatagtcgacccttctctagtcttgaccacgatgtcatcgatgtagatctccaccttgtcccgaatcaggtccccgaaggtcttactcatcgcccgaacaaatgttggcaaggcgttttttagaccgtagggcattacaacataacagtacaacccatccaccatcacaaaagtagtatgcttcctatcctccctagacatccggatttgatagaaaccggagtaggcgtccaaaaaggacaaaaggtcgcaccccgaggtagagtccacgatctgatctatacgtggcggtggatacaggtccttgggacatgccttatttaggctggtgtagtcgatgcacatccgaagcttcccgtttgcctttggcacgatgactgggttggccagccacacggggtgatgaacctcttcgatgaagccggcgtgcaacagcttccggacctcctcacggatgaagtcatgccgctccacggactgtctccgtggcttctggcttactggcttggcgtccgggtagatatttagatggtgctcaatcacctccctagggatcccaggcatctgcgacggctcccaagcgaacacgtcggcatttgcttggaggaaggcgacgagcgcgagttcc

SEQ ID NO: 68228 - DNA, 491 bp, Zea Mays
tgaaaaggggtcggggattacaggcacgtggacctaactagcaaaagaaagttgggcgtccatcggggccaagccaaccaactgctgacccggtcgagactcgggactcgggagagaaagtgtactttttgagtactaacaacgagtcaacgacacctgcttgcattgcattgcatgtcggttagctgatcccttttcccaatgacacgcggataccggcctgtttctggaaggaaacgagtacgggacaaattaaggcaagagtagctgctgaccaaggctctcatgcatgccaccggtgcgtgcatgattgccactctccaagctagctagctagctaccgcaccattttttacataccgaaaaaaacaagaaacgaaaacatcacaagcctcacacgcgggacaatggccacacacgtacgcgctgcatgcaacaccacgtccacgggttccgggacatattgacgccgtcaacggcatggaaccaaa

SEQ ID NO: 68229 - DNA, 650 bp, Zea Mays
ggatggtccgccgtcacacagagatcatctaatttctttacgggagacatatagaggaattcagagatctcgacaaattaggacagaggtttacatcggccgatcctttggaggagatcgatataggagatggtaaaactctaaggccgacttttgtgaacaagaccctggagaccgatcctagagatgaaatgatcgacctattaaaagaatattctgattgcttcgcttgaaattaaactgagatgctaggattatgccgagagatagtagagcatcggctgcctattaaatccggttttaggcctttcaagcagaagctagaacattttgtccagacctactcccacgaataaaggacgaaattcaccagcttctagaagctaattttattagaccttgcagatatgcagagtagatctccaatattgtgctggtggagaagaaagaatcaggtaagcttagattatgtattgattttcataatttgaaaagggcaacttctaaagatgaatatcccatgcccatagccaacacattgatcaataatgcgtcaataagtagaattattagctttcttgatggtaatgccagatataatcagattttcatggccaaagaagatgcgtctaaaacggcctttatatgtc

SEQ ID NO: 68230 - DNA, 657 bp, Zea Mays
acgcaagacagtgatccctagaatacagtaagcaatcttcggcctcataattaagctgattttcactatttgacgagaattcgggatcaatgaaaaaaacatcattaccagcccactgcacgtttgttattggactttgagggcctatgcatttccgattgtagcaactagacacatgcatgggactcaaccagatgaattaattctgcgttccaatggcaaagcaatgaagaattcagaacactagaccgataatctatccaaggaacaaaacaagacaaacaggatacagcaggctaccaaattgaagaacaattgggttattgttcggcctggtatgaagtcgagggaattagacaaattactgactagtcagctgggaaacagttgattgacaacaagtacaccttagagacgagcactacgaaaatattgtttgcaactactaaaatattgttgtaaagggttggacaaaaataaaggaagataaaagcacggttactttggtcacaactagtactaaaaggtagtgttggctctgaccttgttgggcgatcctcctaaatacaggcaagtaaagtcacatggaagttgcctagagaccgcaaattgccagatgctcaaagccagtacacagactcagcacataaatattcg

SEQ ID NO: 68231 - DNA, 1156 bp, Zea Mays
gttcagggcaaagttcacatacagattgctagggcaaatatggattcaaaccacaaacagatttgtgaatagattttcaggctgtgaatagattttcaggctgtgaacagatttgtgaacattaaatgaccacaattaccacaaacagatacactgaccacaaacaccaacattgttctgggaccataaactaccaggttgcattgacagattcattttatcatacataatcctcttctcatttggtaggtagtcttcacatgattggtctataatgttgtctccaaaattaataggctccgattgatccaaattacttataccacctaaaacggcttcatctcttttattttcctttgccttgtcctcttcattgagtcctagttgagaatacatctgcatctcacttggaacatcacgtctcccttcctcctcccaaaaatcacatagtaccatagattcccaatctaacctagatttgtcttgtaccttatcattgtcctgcatggcaagtctccactaagtgaagtcacatataatcctaaccttactatattgtacaaaaatgaagcacaactaaccttattagcattatttccacctaatgcaactagcggtaaggaacttgaacaaggcggtgaagacattacgacaatgtctgcgtgaacaaagcggttgaacaaacaggtgaggtaaggaacttgaacaaggcgattgaacaaggcggtgaagacaaatagctacctggtggggaagaaatggcaatgtctgcgtcattgaataggtccaaatcatccatggtggatctactgcacaaatagaccgagctagatctagttgggggaggagacacgaatgggggagagaagttgaatgaatgaagagcagcaacgacaaactcacgagcggctgttgcagtcaggtactcttggttcgagacagcgacgcccggcgttcgtagggagattccttggtgtgagaggaagggagaactcgacggcgatggagatctcacggccatggagacggacgtcggtatcaacgacactaatgatcacgattagaaaataatcctggttcgaaccttgtaatggagtattcatgtctatttcagagtgtgatatttgtccagcctttttataataacgaatttctt

SEQ ID NO: 68232 - DNA, 714 bp, Zea Mays
taaacaagatagagacgtcttgtttttaccaagttattaagaagctcacattttttcctagttcttggagtcctttgtacctatgttatttttttctagtttttgttagagtccctcgtaaaagcatctccaaccatgcatcaaattgatgccccatattaaaatatagggtttaatctagaaaaaacagttctaactgtgcctcattttataaaaaatatcaaaaaaattatagtacacctcttgaaatgccacaaatatattacaccttattgaattgtcatatttgtcgtagtggacctagctaacgaggccacaacaaccacgtcttccctcgtggcccatggccttcctccaatcctaaagcgccacatgtctttgttactcatatgaggctttattgttggagcttaactatttattgctgccctaaatcctctaaagcatgatggttttaaatttatagggcatttttatagggcaccctcttggagatgctctaaggatacctttgtgagggctaagctctgattgcaagggttaagcttctgattgggtaacttttggatagttctcgggtcttcaagcgcatatgattctatgagataggttctcctagaccctttttgctatttttactatcaagtcttggtatatggtgccaaccacaccataaacttggttgtattcatgtgctctaatgttacattatgg

SEQ ID NO: 68233 - DNA, 649 bp, Zea Mays
caagatcacaacattggcgtccacctccggtgaactcatttctgcaaccacaacaagcttcatcatggcaccaaagaagtcagcagcagctagctctgtcctcacatccttggacatgaaccagggagaagaagcattgcagcaggcacacaaccaaaagaggaaggcagtcagtccgactcaaaagacgaagcacttgatcaagagatacaaaacctagaggccatccatcaacaagtggaaaatcgcaaagaaaagatgcttcgtctctcagaattacaaaagaagattactgtcgcaaccaaagaaatgtgcaacatcgtgtagaccatagaacaaccagaacactaataccaacacagggatcttcggaatgaagaccacaaccaagacaatcttcggtacgatgttttcaaccacaatgattttctctatgatgatggttcccctggctgtggagttgcatgcactaccttggccaccttcgtacaaaccatcatggttaccaatgtatgatggccattcttatccaaaaacaattcttgatgagttacaaggccacaatatcttcgtatgggggtaacacatcggtgatggcaaaataattcgtcatggcggtcaggaatgtcgctcaagcgtggtattcttc

SEQ ID NO: 68234 - DNA, 452 bp, Zea Mays
gccaaggattgggctacaatctcaaggtaccctaagacatatccgagacccacgggagcgattcaagacggtaccccatcgaagggaggcatcgagccctcagaccccatcaaacgggtctaggaccaggcaaatcacccacatgtacctttgggacacgtctccggaacactgatcgactcctatcaatggagcttgggcctccgatcgaattacccgttaacagctcactggagacgtcatgcttgtttcccattgagggtagcatgatgctttccccctcttcctccttacagaaaggcagcgaagaggcgtataaccaaaaaagtcaaggcgaccctcgatcaacctctcgccttgtgcagaggctcaggggctacccttgcacccttgctacgacaaacgtgttggaaactccatcaatccaacataggcgctcaggggctcccttc

SEQ ID NO: 68235 - DNA, 429 bp, Zea Mays
cttgcataggttacgccagaagcgggtgggagtgggtctgaattcacaggaactacatttgttgagtccctcttcgcgtaccctcctcctggtggcagtagcgcccaaaactctaaccatccaagtggtggttatcccagagtatggtgcttttggtcgtctttgtttcttaactcgtgcacgatatgttaaatcaaactttgtacgctatgtgttttcgtgttttcgtgaactaaacactttaatttatctagttgttgctatttgaaatggttgtgtgggctatgttggtgatgtgaagtttgtgatgtgtgaattgattatgtggttgtaatgtgaagtttttgtgaactatgtgaatgaatgtgttggtaatgtgaccaatattgatgtattttcttgtccgtgatgatatgtatcttatgtgtg

SEQ ID NO: 68236 - DNA, 334 bp, Zea Mays
cacaacatcttttttcacaaccacaacccaaccaaacagacccttaagcggtttgtagttccatgagttcccttgcgcttttgatttggtttacggttagattgcaccactgtacaaaaaggaggattttgagtgagaatacctaattatcttgctgatagttgagtgaaaggtagtttgataggtggattttgagcaatagcgcttaagccaagtgcccatctaatatagcctgttaccgtacatgtaagtttatttgattcaagtgcacttgacattctataacatttatttatggactatcctctccattttaataaaggaaaacactaga

SEQ ID NO: 68237 - DNA, 966 bp, Zea Mays
gatgtctgctgaacccaatcaggaccgaccaaggatctctctcccaaagtctcccaacataaaggggagatacaccgcctgccatataaggcctcatacggtgccatcttgatgctagcctgatagctgttgttataagcaaactcagccaacgcgagatgatcctcccagctaccctccatgaaagaacacaagcacgtagcatgtcctccaaagtttggatccgctctgactaaccattaatttgagggtgaaaagcaatactaagagaaagcttggtacccaaagcactgtgaagactctcccaaaatttggatacaaatttggagtctcggtctgaaacaatggacttaggcacaccgtgaagccttattacttctttcatatataagagaactgattctgaagctgaatttgtggtcttcatgggaataaagtgcgtagacttagttaggcgatccacaacaacccatatagcatccctgactcgaggggaacggggtaagccaaccacgaaatccatggtgatatgctcccacttccattctggaatttccaacggcttcaataaacatgcaggcctcttatgtttagccttcacgcggtggcacaccccacaggctgccacatacttagaaacaccaaccttcatcctcttccaccagaagttttgcttcaaatctctgtacatcttggtttcgccagggtgaacggtgtaaggcgctttatgagcttctctcaatatatccatcttcacctctgatttctgtggcacacaaagacgacctcttaaatgaaccaaatcattctcatcaatggtgaactctcaaggtttaccatcgccgaccctctttcgagcctcctgcaacaaacgatcctgctgctgtgccacacgcactctgtctagaagggaggactgaatgagcatccgagtctcctctctagcggtgccaacaaagcacaaag

SEQ ID NO: 68238 - DNA, 496 bp, Zea Mays
aggttggtttcttaataactaaggggctcttttgtaaagcggtcggccgaagggttatgatctaatatgggtcgtctgatcttaaatgggtggctcagattagaccgggactccactgaacgagtactaggggtgtaaacggtatggatattatctgagcatccgaccgtccgaaaggcctaattattcggttggatagttttttagaatatccgtagttttttcggatttcggatccggatacggatatttttgttcggatagcggatacggatatggtaggactgatatccgtcggatttcaaatattcggaaattttctcggatttatccgaccaactattcagaaattatccggcccatttctcaactccactgattcattctcatcagtaggcccacgtctcaacttaactcaactctcactcatggtcacgtatgagacccatgtggccaagtccaagtttccatggccaatggcccagcaccacacgga

SEQ ID NO: 68239 - DNA, 359 bp, Zea Mays
ctaagatgggttgcacttacttaggatcttgagttccaagtttggtgtactttcccaacttaagtcacatgtgatgatgggcttacttgtgtagccttgagtgaaaactctaagtaacacctggggtgttacacaccgaggtgtgttgttaccagaaatggcaatggaacatcgatccctgattttccgagggaaattccttcattagaggatgggaagtttcccccccacagggaataattctccccgatgagtaaacagggacatggatggccagggaattatttctcatccccgtttcccacggggggcgttaaacttgcacatgacgatgatttcatgtaacaattaatgataaa

SEQ ID NO: 68240 - DNA, 627 bp, Zea Mays
gatcgccgtcgcacggccttgcgccgcgtgtccgagtctttccaccgcgtcgccgtgactccctattgttgtcccatcgtcgccggggaggttgccacgacggtagacacgaattcaccgcacacgcgttcttcttcatctccggccaccagcacggctcggccaaattgatcaccaccgctcgctccttctataaattgggcccgcggccagctccaccacattatcacgcaccaccccaaccagtattgctcctagtcaatcaccagtgagctcgaattttaaacttcccccaattcggtttccgcccccgcgaagaacagcttcaccgtcgccagccctgttccggtcagtccctgtcccttgctccctcgtttgaggattctcataaccccgtgatgcttgccgagccaccgaattgaactaggagactcccaatcgccgggaacacggcgatctagccgcactgctcacggtcaccgtggccagagcaaaacacttgatcattagtgaaattaagttgggggaaaggctcgggatgggttcaatccggtgtatgtcgctcgagagcaccggtcgtagcgtaaaccagcaagtacaatctcaccggagtttgttccccgcgct

SEQ ID NO: 68241 - DNA, 750 bp, Zea Mays
ctgggcctaatgggccttaacacgtaggatgtcggacaatcctccccaaccttctgttcccccagcgacgagccccatccctgtgacctctagggcagcagctgccacaagcacgtcgcccgctgcgcccgtgtcacaggactccttcattgtgttccagcagcaggtgttggactcccagacattgatcatcaaccacctgtcggcgttgaccgcccggttggggcaatcgaggtgcaatccgcgtcggcctcgtccatgattgatccttcatcatcgtcccacgtcttcccctcgactgcgcaagattaacctatggccctcccgactatgggggcatccaaaccgcacccgatgcgacgtcctccctgtcacttagaggtcaagtaaccctttctatataaggagaaggattatatcaattgaaggtaagcagaagattagaaagaaatcctttctctcttgccgacagtgggcaaagccctgcgaccgacctccccagcgccccatccttaatcgttgcgccacgtccccaataggatctgcaatcctatgaacccaccaaatccggatccctaacagtctcactggggcatgcccccaaaataaattttgttgcatcctcacgtgatgccacgatgggtcagaacaggatgcttgtcatctatggagccctgtgtgactaacaacctcactagggatgttgtcaagctgtgtgtagttgtaggtcttgatatgagtgtgtgtgca

SEQ ID NO: 68242 - DNA, 569 bp, Zea Mays
gaaaaaaaggtgtgccgccatggttcctcgccccaactgcgttcgatgtgctcggccctcgctggcaatcgctcgtcgtgggaagagaagggcggagccacagctagctaacctgggcatcggctcagaatcccctaggacgcgtagagtgctcgtcgccggggtgtcgtcattcccgcagaatcaccgtgcgccatcgcggctcggcgacgggggctagaagatgaatggtggtcgttgatctccctgtgttcggctcagattagtagtccgaaaccgatttggcctggtgcgatctgaaccgttaatctgatatgatgcggctttgatcgatggggtcgtgtgggccgttgatcggtcatccgatggccgttgcggcgtaacccttcgcgatctaatttgggccttcggatcgcgatcggatggctgacaatcaagcgtaccccgtcagccgagactcattttcagaagagccctcgtctttggaggtattcaacccgccgtccattagtgggttagcctgagtctgtgaaatatttcgagttagaccctatagtttctgatagtta

SEQ ID NO: 68243 - DNA, 664 bp, Zea Mays
acgagaactctgcataaggcaaattggactcccaatttctatcaaacgtcaacacacaagctcttaataaatcctcgaggaccttgttgaccctttctgtctgaccatctgactgggggtgataggcggtgctgaagtctagcttggtgcccatagcttgctgaaggctcatccaaaattttgaggtgaactgtgttcccctgtctgacactatcttccgtggaataccatggagtctgactatctctttaagatatatccaggcaagggtggcccctctgaaggtagttttcactaggatgaagtgggacaccttggtaagacggtctattatcacccagatagagtcgttccctttttgggtccggggcagtccggttacaaaatccatgcctatttcttcccacttccattcgggcactggaaggggttgcaataggcctgcaagcttctgatgctcggccttagtttgttggcaagtgtcacaccgggccacatactgtgctatctctttcttcatccctctccaccagtatctgatcttgaggtctaggtacatcttggtggtccctgggtggatggagtaggctgagttgtgagcttcgtcaagcagaacttctcgtgcctctccttttggtacacacagatggttcttgaaccaaag

SEQ ID NO: 68244 - DNA, 430 bp, Zea Mays
ctcaataagtacgaagtcccggcttcggtgcttgaggcgcttggcctcgttgatgtcacttgggtggtaatatccttgcaggaacagggttattggggcccaccaatcttcagtcatgatgaggttgacgatgcgatggccctcggcgtcgttggttatctttagaccctctagattatggacggctggtatgccaatgatatggtagaatacgtcggagggcaaggcttcgcctctggccgctgctttggccaatgcgtcggcctcttcgttcctggcgtggtccacatgctgcaaggtgaaacccttgaattgtctctcaagactgcgaatggttgtaagatactgcatgagtgcagggtcttttgctgaatattctttttcgaccttgccggcaacgactttggagtctgtcttgactatgcaggtg

SEQ ID NO: 68245 - DNA, 1056 bp, Zea Mays
ccttaaaccatttcttgtattttggtgcttgatgaccatcacaaccattcggactaactagtttgcctagtctttgattcacaggttcataagattcaacagtttagtttctaagaaagaatcagctcagattcaaccaaataggggtaaaacatgagatagatgaactaccaatagttctactctttggataagttcaaaataccacgagaaacgtattcaacacttctagaaaaggttggaaagctcaaaatcaacgtatcactattttggagctagtttgagcaaaagaagaaatatgaatgaaagaatcaaaatgttcatgatccatgatttagaatagatggaaagccacttgagatatttttctaagtcataggatctctctcaagtttagccaaagcaacttggagaagattgttcaaagatcaatgggaagtcagaaactcaagttctgaaattgcctagcgcggaccgtctagcccctttcggcggaccgtccgcgacacagtttcgacttcggccaggaactaaaaatcgtggatagtctgactaaaccacggactgtccggctatatagtgtggaccgtccgaccataattcacggaccgtccacatgtgaagacatggttcagtccgaaggtgacaagttgagccaaaggaattatagagctgacgtggaccgtccgggaccaagggcggaccatccgcatggtgtcaccaaggcagatagccgttgatctgtcaaacatatcgttggagatgtcggaatcgaccgttggagggtcgcggaccatccgggccctagtcgcggaccgtccgctagtgcaatttctggcagatgcgcccccaacggctatatgggtggttgagggctataaaagccaccccaacctgcccattcttaagcattcattgatccattacatacacaagagttgggtattcactcctatctactagagcaacacttctatgcacatcaaagcctcacaagtgccacaaaagagagatcaagcaagaaagagctactcgtgtgcgtttagtgatagtgcc

SEQ ID NO: 68246 - DNA, 402 bp, Zea Mays
cttaggcgtcacccgtttcctacaccaacctataaaagggagaggctggcccctaggcaacagtattggaaaaagaagaatagaaggacacttggagattgatgatggatcaacagacagagacgagcccataaggacgaacatgagaaagagcgtcgacgaggacgaggaggccaaaaccccgtcaagccaagacttagctaggactccacctctcagcttctaagctccacttccaccccgataagatatctaggagcctctcctccctctctcgactgcttgtaacccctactacaagtttgatcatcaatggtgccggtagtgcaagtcactgatgactagatgcagggacgttctactcaaactagtataaatctcgcaccctccaagcacaccctc

SEQ ID NO: 68247 - DNA, 521 bp, Zea Mays
cccaaggtaggtgcttggtctgatgtaacctttctctgacagctcatcaatttgcttcttgagctcaaccaactcgggtccagataccctgtaagctcttttagaaatgggggcggtgctaggaagaagctctatggcaaactcaactttccgctcaggtggcatactggtaaatctttcgggaacacatctagaaactctgacacaaccttgatagtctcgagtgaatctgcctccttgctatcaatagccatctgatgacaacctcctttccttggatcgggtgagacaaactcagccaccatttcttctcctagtggggacaccaacttaattgtcctcttatcacaactgataattgcttggtacttatctagccaattcatccctaggatgacatctacttcctgagtacccattactatgaggttagcgggaaactctatcccccttatttccacacttacattcaagcaaacactatcagctcaaactttaccaccggctgtatcaatttgaat

SEQ ID NO: 68248 - DNA, 1956 bp, Zea Mays
caaggagtcctcactctcccaagtagcttcctcttctccttctctactccactgaactttatagagtttcacttctgagttgcgggtcttccggactactgagtcaagaatctttactggcttctcacaatactgaagatctttctgaatctgtattgcctcttctttgatgtgactttctggtacttgcaggcatttgcggagctgggacacgtgaaacacattgtggatatcagacatggattctggtaattcaagaaggtacgctgcgggtcccactctgccaatgatgggataggggccgacgaatcgcggtgctagcttccctttcacttggaatcttttgacaccacgcatcggggagaccttgaggtagacaaagtctccttcctcaaatctgagttctctccgcctgttgtccgcataactcttctgccgactctgagcttcaagtaatcttctgcggatcagggcaactttctcctcagcctctttgacaaaggcaggtccttccagtgccttttcccctacgttggaccacatgagaggggtctggcattttcgtccatacaacgcttcgaacggtgacatcttgatgctggcctaatggctgttattatacgagaactccgaataaggcaaactggattcccaacttctattgaatgttaacacaccgactcttaatagatcttcgaggaccttgttgaccctttctgtctgcccatctgtcttagggtgataggcggtgctaaagtctagcttggtgcccatagctttctgaaggcttgtccagaatttggaggtgaactgggttcctctgtctgacactatctttcttggaatgccatggagtctgactatctcttcgagataaattcgggcaagggtggctcctccaaaggtagttttcactgggataaaatgggctaccttggtaagacggtctattatcacccagatagagtcattccctttttgcgtccggggtagtccggttacaaaatacatgcctatttcttcccacttccattcaggcactgggaggggttgcaataggcctgcaggcttttggtgctcggccttcgttcgttggcaggtgtcacaccgggccacatactgtgctatctctttcttcatccctctccaccagtatctggttttgaggtctaggtacatcttggtagttcctgggtggatggagtaggctgagttgtgagcttcctcgagcaggacttctcatgcctccccttttggtacacacagacgattcttgaaccaaagggctccttgttcatctgtcctgaggtccggaagttgttctttgcaagctttttccacaagtcttgctgtctctgagtctaagcattgagctttgcatatgaggtcttctagcattggtttgacttcgaggctgccgttgtctcccaaacacgtgttcagttgagctgattccttcttccaatcttctaaaaagttggttccctttatcccgaaaggttttcggttgagggcgtctgctaccacgttggcctttccggggtgataatgaatctcaaggtcataatctttgatcagttctagccatcttctttgacggaggttgagatctggctgagtgaagatatacctcagactcttgtgatcggtgaagatgtgacatttgttcccaattaggtagtgcctccatatcttcaaggcatgcactatggctgccaattccaaatcatgggtggggtaattctgctcatgcggcttgagtaggcgcgatgcgtaagcaatgactttctcgttttgcatcagcacgcaccctaagccttgcctcgaggcatcacagaagacgacgaaatcctgatgtatatccggtagtgtcaaaacgggtgcggttgtgagcttctcctttatgatctggaaacttccttcacacttcggggtccacacaaacttatggtcttt

SEQ ID NO: 68249 - DNA, 596 bp, Zea Mays
ctttccttattctgtcaatggtatctaaaccccattgtgggatatccactgccattgccatataaaccgtcatgctggtaaggacatgctgaactaggattcttctccctgctttgtcaataagtctgccttccaacttgaaagctgattagcaaatctatcagtaaaaggttggaagtgctgcctagataacttgtgcaatgatagaggaagattcaaataacggcaagggaatgaagatattccacaaggcatcaaaccttgggtctccaccatatcctcaattgaacatctgataggaatgacattagatttctggggattattgtgcagcccagaggcatccccaaaaagctgaagaatgccaagagtgatagataaatctgctgttgttgggtgaacaaaaagggcaacatcatcaacatataaggagatccgatggagctttttcctgttggataactgctagagtaaaccctccacctctgtcttggaaaacatacagactaggacatctatggcaagaataaacaataaaggagataggggatccccttgacgaaggcctctctggtggatgatgtgctgtcctggaa

SEQ ID NO: 68250 - DNA, 709 bp, Zea Mays
caccgtgccatcctctgtgttcggcatgccgctactcgtctgatttctccttacttgcccgtccgcactccatggtttcgcagctgagcctcgacgccgtttctccgatctccttgcttgttgtgccacgtgcgtgcctgctctgctctactcagctcagtgctgccgtcaacgccgttctgcgctgctgctcaccgttgtctaatgttccccctgcgcagcctctaatcacgccatcgctcgtgtcactgctccattgctatcatacagtgcgccagcccctcctgtaactgcttcgccatcgttcttcgtctcatcagaacacgccatgcctcatcatcaaagcctcgctttgagtgcctcaccgacgtcaccttcagacccccttcgaagttcgccagcatgatgtcgcgggagctctctagacgccaccattcattggagttcgcctcggcatccttctccagtgacgtcgttacctcgctactcgtggccgcaccatcgcaccagtagctacgccatcatcgcgccacgtcaagcaccgtcataaaagcgtcgtcgtgcccccgtagatcccgtgttctgctctcttcgtgtgccatccgaaggtagaagaaaggtccgatttttatacgctaccccctatcttgtacgtttaatttagatctaaccactgctataattttccccattgtaaaatacgaatgtc

SEQ ID NO: 68251 - DNA, 604 bp, Zea Mays
aaacaactcaaacctaactcgaacatgaccaagttttccgagttaacttctaagacatcgaacaactatggtccaagcctaatccaactaccattcaggttcaagaatactgcttctatctaccaaacggtggtctctagacttaacttgtccactcctgtaacaaaggagggagacaaagaagaagtcacactgacgaccgacgctcaacaaggcctagtccttactaccaagttagaagagaagatcatacactagccatgtgtctactcatggattcttttggttcttcccacatagtcaccatcatggagccactaccatatcaaactagtatcactctcaccgacattgtagaagcaataaccattaagccttgcaccttcaatagcatggccacctgtggtcatagcaggaggttttcatgctcatagaagtcgattccggtgacgagaaagaagttgatgtctttagcaacaagaacaacatggttggagagacagatgctcaatacaagaataggaaacattcgtagtgacgtatctatacttgacttcgccatgaagtacacaaccaacatgaagccgagcagtagcaacacaac

SEQ ID NO: 68252 - DNA, 644 bp, Zea Mays
acttttctgccctgtgagtggtatgcactggcaagaaatgggcagtcttggtcaatctgtccacgataacccaaatagaatcatggtgcctggaggtattgggtaatcccactataaagtccatgcaaatatcctcccatttccaagatggtatgggaaggggttgcaaagggcctgctgccttcaagtgactagctttgattctctggcaggtgtcacattcggatatgtacttggcaatttcccttttcattcttgtccaccaatatagagatctgagatcatggtacatcttgttgctgccagggtgcatggagaatttggaaaggtgagcttcgtccagtatcttctttctaagctcagggtccttgggaacaaccaatcgatctccaaaccatagtatgcccttgctgtcctgccggaaacacttgtatttctctgccttttgcttgatcatatccttgataacctgaactcccttatcctcaacctgtgccctgactatttgttcttgcaatgtgggctctaccgagatatagcttagtttacccgaagaaacaacctccaggttcaatttgcacaactcatcacacagggtggtcactcccacatccatgctcatacaattacactgggcctttctg

SEQ ID NO: 68253 - DNA, 432 bp, Zea Mays
cttataagttccgtggactccgccattggcgcaggcgtttgaccctgaaaccaacccgtgcgagtaagagcaccgacatcgagagagagagagaaaaggagaagggagaaggtacgcgtggtcttgtacgccgtcttgggctccatatcgtcgcactcggggatctacgacaccttacacgcggaccggagccatggccgtggtcagggactggcggaatcactcaccggcgttcattggcgccgcttctccgccccgcgtcgaggactgtcctcatcaccacaaatcctctggtatggtcgctttcgttggggtcgttagctaattccggtggtgtagaatcacgcgggggaggaaattactcctcattggggcgagaattgcacaccggtgttcacccagcttcggtcgccgtgactcgccatggatgtg

SEQ ID NO: 68254 - DNA, 567 bp, Zea Mays
gtaaaagtaaatattcaagattcaatcatgcggtggaagaaaaaatagatgacgtggatatagcgagagctgttgttttgaaccagctttgttatatttccttatctttaaagcaggacagaaacggcacatatgagtgtatccacgtcgactgaaaacattatagtcgttggatcgtcgatcgttggttcattttccctcgcctgatttctcgtgccctcctcgttctcgtcagctctggagacttccacacgcggcttacgctcctcgtcagccctcggctctcgtcctcggagaacgcgcgctcgtccgactacggagatggagctgcagcacctcgtcatggaccagaacaactaagcctcggacaacgcctcgtggtccaactccctcaccgacgccttcctcggcaagtcctccaagatgcagcctcaagtaagcctccgtagcctcctcagtgtcgtcatcagttcagcagtctcaagcctagaggcttagccgatgccgcgttgagtctcagtggtggttgtggattcacagagctattgaactgaaccggccctgttg

SEQ ID NO: 68255 - DNA, 388 bp, Zea Mays
aattgacacactgcacatgtaggatgggtttcctgccttactattgatatcttatgttattgtcagtgctggattaacattgtttgaagaagtgctatgccaaccttatttacttactcctgtggctgcagttatgccgcctcgtagggctcttggtagcccgcaagcccctagtggggattctatgagtccggcagcaatgttagccacgatgcaggccatgcagcaggagttggccattctgaggcaggctattcctgttgctcctgcaggtgctgctcagggtgctggtggtggaggagtgcccaggggcgctgttcccgtgggtgctgcttcaggtggtggggctgaggtgcctcttcctgttagtggtctttctctgatgcag

SEQ ID NO: 68256 - DNA, 605 bp, Zea Mays
attttcctcaaagttgaccctaatgataaggtgccaatctatatttctactaatactagtataaagcctattgtatgctacgatcatgaggagggtatgggttgataacatgggcaatggagacgtaggggaggtggaggctaccgcggcgacgacgcgggggaggtggaggctagggcggcgaggtcagaggagggatgaggaatgagaggtggtctaaataatattgtccattagagttgagcaagggagagagggttatccaacgatctgaaccgttgattttgattatgtgttaagtatgcgtgtattttttgatagatttagtggagcttatgagtgtggtgatttggttgggtggattttgaaaagttaatttaaactggtggattatatagtggtatatatttttttaaaatataacacgatttttttattgttaccgttactagcaaacatgtctacgaacgagagaaaaataaacattcgctataaatgataatggaatggcacctattgatttatccatttacgttgtaccacttctataaaatttaaataaaatttaaatgaaccatgatacatactgtacaaatcaatataag

SEQ ID NO: 68257 - DNA, 345 bp, Zea Mays
ccgaagcatacttgacctgaatgcttttttgctcgcagaaatcaaagaactctgaacttgtgaagttggatcccaggtcggttatgatactgttcggtattccgaacctcaatattatgtcttgtatgaattccacggctttagctgaggtcaaagaagcaatgggtttgaactctatccatttagtgaatttgtcgattgctaccagtacatgagtgtatcctccttgagctttcttgaaaggtccaatcatatctagccccagcatgcaaagggccaagtcaccggtatggtctgcagttgctgtgctggtagatgttgttgctttgacaagtactggcaagc

SEQ ID NO: 68258 - DNA, 721 bp, Zea Mays
tgtactggccaagacacgcaatggccggtgctctaacttggctgatacctaattcaacatctaacaaacgtttcccctcgatcaattgcacgattcgatctcccaacctctctgctcacggtgaccatatgatcaatggataacacgaagtgttcccggcgattcaatgggttctagcttaattggtcgggtcgagaagcatcaggggctcataagggtactgaaacaagagagcagaggacatgaatggacctgaagtgcactggccacggtgagagcttttccacggcgacggaaaactgatttgggggaagtgagcaattcgggggctttggtgaacaattgaaggcaagtgatggtgctttggatgggtaattaccctacagagctcatggcatgctcaatttatagagtccgtgagcggtgttgtccagttcgaagggattgagctggcggcccgagaagggggtgagtcacggtggtgatctaccatggcaatcgcagggcaattgagctacaacggttactggatggtcactacaactcatgacgatgcgataaacgacctaaggtgtggcacccccatggtaaatggcaaacacgccggtgatggccgctcggtcacgtcgccggtgagcacaaatgtataaccgagcgcacagtacttccaagctcatccgcggcaagatcttttacccggggatcgttatccgcgtttaat

SEQ ID NO: 68259 - DNA, 793 bp, Zea Mays
gttgtggatggttggcaacggaggtggaacgtctggtggcggcccgacgaacttcttgtggagaccaacatggaagacatcgtgtagcttggtgtggggaggcaggacgaggcggataacgacctcgttgatgcgctcggcgacgcagtacggtccgaagaagcgtgttttcagcttgccctttgtctcttgtgaaagagaggcggcggagcactgtcgaaggcggatgagaactcaatcgccaacgttgtaggagataggacggtagcgcctgtcgtagaacttcttctggaccgcttgagcttgttccaggcgatagcgaacgtccgctaggagttcctcccgatccgtcatgttcttggctacggccacgacccttatttcgctcggctcgcaggaacggatgcacgacgggtcccgaccatacaccactttgaatggcgtctctcagagcgaagactggtaagccgtgttgtagacgtactccgtccatggaagccaccggagccactgtcgagggcgatcccccgtgaagcacctgaggtacatggcgatcattttgttggaagcctctgtttgcccatccgactgtgggtggaaggccatcgtcatgtggagtttggcgccgatgagcctcatgagctccttccagaaggttgatatgaacaccggatcccggtcgtacaccatggattggggtaccccatggaggcgcacgatgtccgcgaagaacgcctgcgcgacggactctgcactgtacgggtgagtcaaaggtataaagtgacaatatttt

SEQ ID NO: 68260 - DNA, 776 bp, Zea Mays
aggtcccttcaccaaattcaagcactacgaccgtttcaatatatcgtggccggtgggtcaaaaccttcattttcttgcccttcggcacagtagtggtggccgaagcggcaatttttctcctttttccttgccttcgcaatgggtagcagtaatcagggtatatgaagccaattgcatcaaaaactctgttcaatcttttcttgccccgacccccaaaggctaaggataaagcatcatcttcggctctggtatatgccccaagtaacttgtcgctagtagcctcaatacttttcagccaatcgtcatttggctcgccaaaccggtccctgaacctaaaggtatattttaatcgaactagtccacctttggtggacccggcagtagtatccttcggtatctcccagttatctacaagtggccacatcctataggctatgtgctcttggattatatctcgtgtgccaatgaaagcacagacattgcttaaagctttttggcatgcttcggcatcactttcaatagccaccttcggccttcgaaggccgaagcgagaccagatgtggcgttggataatttccttaatgtcctccctctcaatcagattattcttaacataaaaccattcctccatctaggcccctgaccatcttttccggtatgttggaaccgggtagcttgcattatagcgagcaatgaatccgtaacaaccgaagttgttgtgatactgctctttgccggtggccttcgtctcgtacaaaagttcatgcatactgcaa

SEQ ID NO: 68261 - DNA, 551 bp, Zea Mays
attacaacgactcgtatgtgcgctatattcttcttgccggtgtaagcagaagcgagcaatgcaaggtcgatctggaggttgaagaaggtgcagacttagtggcgtcgtccgagcgtgcgtgtgcgtgtccaatcagaacttcctataccatatccatcagtatctaatggcctcacaccgattagttaagcatgcatgtcgcgactgaatttctatctgatccccatcttgactttttttctccccggcaccgtctgctgctggaaggaagagtggtagcctggtaggagctgagaaccctcaaccctctgacaggtgtgtttcttatacagtagtggtcattgagagcataatttggtgtaatcatatgcaaaggtaggaggaggagaaaaacgagtgaaaacctttcaggatcctcgtcatcagtcacaaccgaatttgcttgttttaatttctctgtcaagtagtggccagcgcttggcttttatttaaatttaagctgtgagcaaaagtagcacaactagatcggccagtatcgtcccgaacaaaag

SEQ ID NO: 68262 - DNA, 398 bp, Zea Mays
ctcgtggatctgcgcagaacaaaacgccacagaaccagaatagaggaagggttaatcacatcacagcagaatcagtgcctgaagatgccgacgtggtgtatggtatgtttcttatcaactccatacctgcttcagttttatttgactctggagcatcgcattcatttataactgagtcattcgtggaaaaacataacataccaaagcaccctcttaagaatatgttacacattagttcaccgggaggtgacatgaaggccacacattcatgcctccatgttaatctcaatattcaaggaatagattttccagtcaacctagtggtcttaggatccaacggtattgatgtgattcttggatgcgactggttgaaaagttgtgatggagtgatacaatgt

SEQ ID NO: 68263 - DNA, 943 bp, Zea Mays
gtattatgttctccatgtatatattgttgatatttaagtgtaagttgtcaggggtgataattaggggtatccagattatccctccaaaaagcgcactcaggaatggtaaaggcataaccccaaggggaagtagtcgaggtacctcccaacacgaggcctctacccgagagtctcccacctcatgcagaacttcgcctcgcccgaagtcacaaccgctcgatccgtctcgcccgagctgatcctaggcaagtaagaagcgcccgaaaacaagtgggaacactcgcatttaatgtgcataactaccccacgtcgcggcagcaggagcgcaatggcaaacaagacagcagtcaaatccgggcgcaacaatatgattacacccccgctacagtatgtgcacgccgcctgccattccccgatgggacatctaatacgacgggtgaagcagaccggtcctcggacacaatctccgcctcgcccgacgcagagttcagcctcggatgctttctccgccttgcccaagctcggcctcgcccgagcagggctctgaccttgataaacgcggcaaggaattacgacgtcactccacacagggacgctgatgcaccccgtaaacaggcttttacccatactccgacgctgttacaacaactacggtatgggcgactcctcccctgagggctcgggcgtacgaccatcccctcggcctctgcctcggctctcagcaggaaatcagcggacataagtcaacaatgcagtgcaccgttacgtcggcttacaggacaccaggacaaccccttggactacgacgaccccagacttcacagcatatatctcttacaccaaggcgaacaattagtcatttcccactaagtcttagaatattggcacttgccttaatcagttctagggtcttgggaacttcctctctctcactttgcttgta

SEQ ID NO: 68264 - DNA, 759 bp, Zea Mays
gctcggccctgcttcctccaatcctcttccactgctattgttgttgaaaaaagatacacacacaaaaaaaaggagatgtctgaatttcttgttatagctctgctgttgtgtcttctcaaagatggagcatacaaggccacggcatgggatgatgccgacttcttcagcaactgcccaccatctcggtgcagcaaacatggtccggagatcaggtaccctttccggctcgaatccagcaatacctcctcattatgcggggcaccattcatgaagcttggatgctacggcgacgacaccattctggttctcccaacagtcgttatccagtacaaagtgaccgccatagattacaggcatggtaccctcacgctcgccccgcgtgtggacaactcgtcttcctcctgcaagcagaagctcatgtcagtgtccctacctcgcagcattatcaaatgtgaaaacctgtacccctgctcactgctatgctattttggatatggaatgatagtaagctgcttaagagagttcacgccaagtaatcttgctgttaattacatcttcggcccaatctcgtgccttagcagcgcggccgacttctcctatttggtggatcgttctgcatccatgtctgtgcttccactagattgcagggtcatgcctgatagctactttctgatgatggacactcgcaatgacgattcaacattcaaggagaaagcagaaacaatactcaatttctcaggttcgcaaacaacctacttg

SEQ ID NO: 68265 - DNA, 596 bp, Zea Mays
cgaacatcaggagtagctggtggaggaccttatggggagttggatctctttggagcccctccttccatgaacctcgcgtatgatcgttctcacaaagctagtagtggagcaggaggagccaaggacacagataactagattagtgtagtagtatgtggtttccttatgtaatctaaataaggaaaagtgagttgtataagttgagtatgtataattagaaccagtttggaataatgtaacagaggttgtgtaatcgtggcatgtaataatcaagtatgttttcttcttcagatgtcgtccagaactcgtgctcaagatgggtctggaacttcccacggtggggaggaaactccgaacccgccgcctgtacctcccacgctggcagaggctatcgctgccttaattaatgccactgctgataacaattgttttatttgagaaatggctgggaatcaaattcatcaacagggagcagaggtcaaccccaaggccccaaagacacaacatacctagagttttaaaaaactcgtattttggtcacttgttcttaaaggctgtgaaccaagaacaaggcaacacaattgttaagtattaaa

SEQ ID NO: 68266 - DNA, 728 bp, Zea Mays
ctccgctcagtttggcctccttggttcttggtcttcttttggattttcttcgtgggggcgagcttcttcagcttcttatcgtaatccatcttcagggttcggtaggcttcacgggtgttggcctcctcgccttctgctatatcgagacactcttggagggtcgccttctacttcttaatttccttgacctgttgctctaagctttccacctgggagtttaggtgggtgcagtgggaggagagaccatcgtagtggttatcaagagtgtggaggtatccggccatgtagacaatggtggggtcatcctcggtagggtctctccctgatagggcctggagtcttttcctctaggtgggggtatttttgttgctaggtgggaagtaacgaagggggtttcaaagatctctctgctgtagttttggcattagagatggcaacgggcgcgtacccgctgggtactatgttcccaaacccgtacccgcgaaattaaaatatacccgctaagaaacccatgcccgcagccgggtacaagtttttgcccgtacccgtgcccacccaggtaccgggtacccgcgggctaccggtgcccgacaagaaagctaatgggctgggctgccaaccatgtttactaggctgggctcattcgaatgctagccaatcgttcctgcactgaggctctagatttcatagatagctaatgggctgggctgccaaccatgtttactagg

SEQ ID NO: 68267 - DNA, 278 bp, Zea Mays
atttccacctggcttcttcaatccgatgcagcatttgattcttctgctcccatatgaggcacgattgaaaggcccgtgcagggatgttggtgctatccaatcgagagacctctaaagactatttgaaagaaatttagaaataaatgcaaaatcgaagcttccattgcagaggcatacattctagaggaggtgtcaaacttcacaacaacttactatggtgacaaactgccgagcatgcataatccaccccctcgttacaatgatggcggcaaataatc

SEQ ID NO: 68268 - DNA, 2725 bp, Zea Mays
atctttgagggtgtagtgcaactgatcagacagcgccagagcagacaacaacttcatcgcacgagggtcagagatgtagccataaattacctcctggaaccaagcgggagaagccactgacaaggaatagaggtgaccagtaggatgtggacgacgcgaaagggcatcaacagctgtattatcagtgcccttcttgtattgaattcgataatgtaatctgagcaacttggtgaacaccttgtgttgccatggggtgtggagtcgctgctctgtaaggtgggaaagactacactgatcagtataaatgacaaattcagtgtgctgcaagtatggtagccactgatccacgaccaacaagattgtgagatactctttttcatatgtggacagtcccaagtttccagggcccaaagccttgctaacaaacgctagaggatggccattttgctgcaacactgctccaatgcctgaacccgaggcgtccgtctcaattgtgaaaggacgagaaaaatctggtaaagccagtaccggtgctgaagttagtgcttgtttaagggccacaaatgctgattcctgcacagatgtccagacaaaaactgaatgcttcttgaggagggaagtaagaggcttggccaaaaggccaaaattgcgcgcaaacttgtgataataacccgcgagaccgagaaaccctcgcaattccttgcatgaggatgacacagaccatgaagaaatagcagccaccttggctgggtctgtggccatgccagcactactgattacatgtcccagataagcgatctgctcgtggccaaaagtgcatttagacaatctgacctaccaattgtcgcgcgcaagcaactgcaacaccaactccaagtgtgccaaatgtgcctcccaggttggactataaaacaggatatcatcgaagaatactaaagcacacttacagagcaaggaggataatgtacggttcatagcactctgaaatgtagccagtgctccggttaatccaaaggacatggcccggaactcaaactgaccatggtgggtagagaatgctgtcttgtgttgatcctggggtgccattcgaatttgatgaaaaccagcacgcaagtccagtgtagaaaaccatgcagccccatgcaactcgtctaaaaactcatcaataactggaataggaaaacgagtcttgacagcgagagcatttaaatgacggtaatcaacacaaaaatggtagctgtcgtccttctttttcaccaatataactgacgatgagaaatcactccgactatgttgtatgatacccgactgcagcatgtcccgaacttgtcgctcaatctctgacttcaaggcgggagcatagcgataagggcgcatacgaaagggttggcctcctggtattaaaggaatctgatgatcatgatctctctcgggaggtaagccctgaggtactgtgaagaccgactggaacttgttgagcaaagactgaagctcctctggtagagtggacaatattccttgctctttttctgataaatcaatcaattggcaaaactctatgactgaacagtggtctgttgctgtctgcaggccaaacaatttgactgtagacccttggtatgggatggccagccacttttctgcccagtgaaccatcataggactgtaaagttccaaccaatccatgccaactattaagtcataagtttggagaggcaaaatacgtaagttggactggaactcacacgctcccaatgaccaaacagcttggggtatgtgctgcatacactgaatacgatctccattggccacctgaacggacatcatctgtggcaaagaagataccccttgaatatgttgggccacctgagcactaagaaatgaatgtgaactacttgagtccaacaagatcagcagttccatgccctgaatagtgcccataaacttcatagtgcgggacgcggaatcatcctgaattgcagccttggacaataacattgactgaatttccccctctggttcagactgacagtcagcttctaggttttgtggtgccagcagttgccaaagctcttctaccatatggagagaaattgtgtctgcacagcgatgaccacgagtatactgaagcccacacttgtagtagaggccctttgctttgcggtaggcatataatgaggaaagcttgtcgttagtggattgaaactttgcagtgctagccgactggtccgaatccaacttagaagtcccagcttgacgaggaggtggaggcaatggtagagcatttcgagaaaatgctcgaggggtgaaagaagcatcgtacttcttagcatccttccgtgtcgtgcccacctcttcctgcaattgtgccagaacaaaggcagtatccaaatttcgaggtctttgaactaaaacaactgatttaatctcatcacgtaggccatctataaatctcataatatagtaaagggggtctgaaatggtgctatatgccttgagttgatcgaccagctgagaaaactgttctacatatgtggcgacagttgtggtttgcttaatgtgaaaaagctgtcgaataaggagttcgtgctgatcacaaccgaaacggtccttaatcatgcaaccaaactcaggccaagtgatgttgggtaattggggttccacagactgcaaccaacgtgcagctgggccagtgaagtgcattgtggaaacacggatctagaca

SEQ ID NO: 68269 - DNA, 361 bp, Zea Mays
ttgttatttcctttacccttctcatcactctatcctaccttgtgattacattatgtctgttatctaaaatatccaatctcctatcccaatttgagagcagtgttttacttattttatccttggcaatatcctcttctttttcgcgggtaagccttgacataactccattctttgttgtaattatgccactggctcttcaatgccttcatcttttctctcataccattgtctgttatcgcccttgacccttgcaatattgatgtcttctacctaaatgcttaccttaaacttgtcctttaaaagccccccatttccaacctagttggagagctgagttacctatctcttccttgatttcttt

SEQ ID NO: 68270 - DNA, 1548 bp, Zea Mays
cttgcgctacccacccgagccggatcattaccggcaacaccctcgggggctgggcaaccgctggcaccacccttgaggactgggttctctgcaacaaccacctctaaggctgaaggattctcagtcacctccatggtaattgaacgaccttgaccaatctcttgggctctgaagaccgccttccaaggtcgacgatgcatgcgatgctgcccgggatacctctaatcccacatctggaatgtcagagtagatgtccatcatattaacatcagttggctcggacaacagatcttcaggaacaacatcctcaagagcctgatcaaaatttgctatggataattcttgcagaccaacaagagcagacagaactggagaaggaatatcgctactcccccccactaactctgtaacgccgactattcttctgaattaatgggacttcctcttcttcttcctcgtcctcatcaacaatacggacaataaacggcacagggtcacacccattgggatcagctctggcagggtcacacccattggaatcagctctggcagggtcacaccaattgggatcagctctggcagggtcacacccattgggatcagcattagcaaggtcacacccattgggatcagcatcagcagggtcacacccgttgagatcaacatcagcatggtcacacccattgggatcagctccagtaaagagttccaccggtacttcttcagcagcaggagcagaagggccagcatcctggtccaaacacgacactcgccgaagccgtctctttttctttttcttcccctcggcaggtgcagttggatgactgacctggcggagacgtttcgggcgagtaccctcaggcctttgagtatccacggttttttcaggctctaggatagttgcaacagccattgtttcagcagggaccgagacagaagaattcccagccaacatgtccagcatagcacttatctctgcatcacctggactcattgggaagatcaccaagtgaagcaaccagaacctcaacttcttcgagagagggtcgcactctaagacccaaaccactgtcaccaacaggaggattggacacaaaatcgaaaaaggacttggaaggtggcagattccaagcagaatatgcaataggagcaccgatatttgatactttgcctctaaggatcatttccagttggctcaccaaatccacagcaggaatcctcttgttggtaacccgggttgagtcagtgacaccactatacaaataagccgggtatgctctgtccttaagtggctgaatattcttaaaaacaaagtctgcaaccacagcttcagcggtcagacctctctccttcaacaaacaaatttcagcaagcagaaccttggcttctgttatctccaagtctgtgggagactgaatcgaacttggagcacgaacatccggctgtctccctgaccgaggggggagggacttgccatggttttccacaatgaaccactctaaacgccatcctttaatgctatccttaagtgggatgtcaaggtattcc

SEQ ID NO: 68271 - DNA, 682 bp, Zea Mays
gtcgacataggcagtgttgtagatatcatatttgtcaaagcttttagacaaatggaagagcccaaagataagcttcaagatttagcttttcctctgtgtggcttcgaggacaacaggtgatggcactaggaaagctaatcatgcatgttacctttcgctatgtcaataacacaagaacagtggatgtcatgttcaatgtcgttgatatggaattcccataaatgtcgtcatcagaagaggaactctcaatgtgttcgaagcagttttgtatttagcttatctctgcatgaagatacccaacaatcaaggagtgatatcggtttatggcagtcaagaggcagcaagaagggcagaaggaaccctgcaagagccaaagattgttcacaacatagatgaagccaaagcacaatccaatattctgagaaactagtaaaagaaaaggcatcttcggtagatcaactgaagctggtgcttctttgtgatgatgttgtagaacagagagtcttcttcagcaaccagctaacttcggagcaagagtctaatctttgaaggtttttgtttcacaataaggatgtctttgcctggtcagcaaattacctgtgtggagtggatagaaacataatagagcatgccctgaatgtggatccaagtgctaggccacgcaaacaaaagcttcgtaaaa

SEQ ID NO: 68272 - DNA, 651 bp, Zea Mays
gtctagccccttaggcgcttcagtagatatgcttagcttctggtatagtaatgtttacttttcgagcttcagactactcccttgtatcgcgttgtggctgatcctgaaattgccctggatgctgttggttgtatgatgaagttggtgctggcatgggtggttgatgcaggacccgtatggctaaagagtgttttgccgaattaactgaagctgaaggttgtgggattagatgttggatgtggacatattctgggatgtatggagaataatacgaagcagtgtgaaggacctactttggcgaattctgtcttgcttcggcttcggcaatttctttttggttttgaattgtgactttgcaggttcttgttgtgtgcccgttgtcctttccacagactaagcagaatagtattcttggctgagaatcgtacctccccccaaaacttcttccaccccttccacctcttagagctggtggtatgaaggaactcttctgggttcctattgactgggcatgattttgttgccctggaggatggttatttttgtcttcgcctttgcttggattgtaaatggtcctgacatgccttggattgaatcgcccaccaaagccccttgtaatttcagagtatctgaaggcttcttctttccttt

SEQ ID NO: 68273 - DNA, 337 bp, Zea Mays
cctcctgccactagaaccacacatggtattgcacgacctcatcccatgtctggtgctatacatcatggtgttgctcctcctcctcatggtgttactcctcctggtacatcaaattcaatatttagatatatgttaatagcatattcattagtaagatatattctaataaaataattgaattgttatctcatctctctgggtagcactcaatacctcttgatgcctcttggagctcaaagaattgtcttgtaaaaaagtctgcacgagtcccttgaacaatcccttcattgtctactttttcgtcttttgtgacatcctatatcaaaataagataggt

SEQ ID NO: 68274 - DNA, 415 bp, Zea Mays
cacgatttagtgtaaaaagcgggtttagcgggcctagcggtaaacggggtcgggctggccctcgagacttagttttatgtccgggtccgacccgtttattcgtctcgggctgaatagggctcgtaccgggccaaaaaacgtgcttcgatccgagattttgggcttcgagctttttgtacatctgtcgcgccatcgtctccgcggcgccgcagaatgtatccatcgtagttatgcgcattgttactagggctgaccaaatatcagctctatagtgaactaagctaacattctagctcgattccctaatgagtcacctcaagctacaagtgaaacgagtcaaagcaagccacaacataagttcatatggtcgttggcatcgtcttgtctctagtagtcttgccctcttacagtctcg

SEQ ID NO: 68275 - DNA, 585 bp, Zea Mays
gattgggcctttcaagaaagctcaaggaggatacactcatgtactggtagcaatcgacaaattcactaaatggatagaattcaaacccattgcttctttaaactcagccaaggccgtggaattcatacaggacataatattcagattcggaataccgaacagtatcataactgacctaggatccaacttcacaagttcagagttcttcaatttctgcgaacaaaagagcattcagatcaagtatgctttggtagcacatccaagagccaacgggcaggtagaacgagctaacgggatgatattggaggcactcaggaaaaaggtcttcgataaaaatgaaaagttcacaagaaaatggatgagggaattgccctacgtcgtttggagcctaagaactcaacctagccgagctctgcatggaaacactcctttcttcatggtctatgggtcagaggcagtattacccgctgatctcaagtctggggcgccaaggttggtctttgaaagcatatcagaagccgaagctactaggctggaggatatggatgtactcgaagaagaacggctgaacgcagtaattcaatc

SEQ ID NO: 68276 - DNA, 884 bp, Zea Mays
gtgggaggtgggagtggtgtgactgtgtgagagctagtaggtatgtggtggaggatggggatgatgaataagaagtgctccccttggtccggcatgagcggtgattcaaggcttgtggtaacagctcgagccttgctgccattaaaatgatgagcatccgaggtttgactatgtatgctatagatagtgtgctggaagacaccattcctgaggacgaagtatcttctcctagaggtaagcctaccagtctgccctggtactttagatcgtgagggtcctccagcccccgagggtacttcggttggctctccttctactgtttcaatggatgcccatgttggattgctaatgcccaatattgatgatgttgttgtaacgagttctgttgtgcccattgagccagccaacccaaccaccttggagatcagtggttctggtgctgaaaacccaatgggtttctctagcgctgaaaacccaatgggctttcttctttttgtttgcattttttatggttggtaaatgcttcttcagctttaactcaatggttcttagatactgaggagaagggtgcccaaaatcaagcaaagcttgatcaggtaaccaggttctttgacggtggacgtgccatgaactccttcatgcagtcaaaattggacatggagaagaaaacccatgaggtaatccgccaagagcttcaggttgcttattccatactttcgacctattatcaaaggttctcccatccgcaagaggaggtgcataaacttcttgcttacaaaaataatcttgacaagttgtaccgggatgcctctagctctcttactacttttgagaggatcatcatttcaccatggaggagctggagcacaagagaggtgagcaaa

SEQ ID NO: 68277 - DNA, 305 bp, Zea Mays
gtccgcagtatcaggaactggacagtccggtcagcaatgcagacagtctgaatgcatcaggccgcggaccgtccgccgcccctgcgcggaccgtccgcgacaggcagtaaagccgggcagaggcagcagacttgttatttctgctctttgcaactcctctctcactctcccctcgccaaaaaggtctcctttgtcgattgtgcacggacggagaagagaagttacgcacggacagtccgacagcttgtggaaaagttcaaccaacatgtcgtcatcacggtatttcataatcttatggatttcat

SEQ ID NO: 68278 - DNA, 790 bp, Zea Mays
ctcatctactgctgatggtatgtctagagggctcatgtccttcttttgtatcctcaacaacctcttcaggcagactcttctcctagatattagttcagcttcaaatctctatgtgtatgctagaaatctgcttgctaggactagacgcaatggtgatcctttctcagtctctcgctttctttgggctgagattcagatggcttcagaagatgcaaggagagcacttcctatgctctttatattatgttcatcatcgagagggtgatcggttatgtcttcaatcatgagtgccttcatcagccgtttcaagttgagaggtcccaatcctcgactcttgctgctcaggctcgctcttctgctaatgagcgtccaagggcatctttaggtggagagctagctaggcactctttcccagtgactggctagatccctctcatccttcatcatcttatgggaagaagccagggaagctcacacgttggttttgcaagatttttggtacattctcttatgcagctaacactgcatatgaggctcgtcttgagatccgtgagcttcgtcagcgtgcaagacttcctcgtatccctaatccatggcctcctctagcatacaatgatatttcagaggatgatgaggatgaagaagaagaagaagaagaggagattcaaccagctcgcaccaggtgtttgcgctacccatcgtggtggtagggttgtgatttctgatgatgaaggtgttggtgatgacattccatgggatgagattgtttgtgaggacgactagtctcttt

SEQ ID NO: 68279 - DNA, 302 bp, Zea Mays
gcccctcttcctctccgaccgccagcgcgccaatccaaaattggaggccaccgctcttgaacactataaattaagcataccgctagctccgttagataatcacgaagccagagcacccgctcctgcctccgatagccaccacagctctccaatttccctttctccccaattctgttttccgccaccgtgaaagagcccttgtcgtggccagcttgttctaggtttgttcatactctctgatcgttcgttttagtgtccttaggttctcctaatgctgctcgactcattcgattgaactagac

SEQ ID NO: 68280 - DNA, 670 bp, Zea Mays
tggacaccactcagcctcgtactttaatgcttctgctgattggacttgtgctttggtaactgcatttggacttcctcccatttcagtcgatcttccctttttgtcacggtatattcattgcatatattttgcagttatcgccacttcagaaaatcttgaagaaattaggcggttaagcggtacacccaatgggtgtgcccaaagggtgtctgctccgcgaaaggtgtttaccgcgttgtcctgaagtagtaacttgatatgacggaggggtgtaatcatttgcctgaggagtggacttcaatcataccggtgccttgttacgcaaaacggcgccagatgcctgactcattttcaggcagtttgaatagcttattgaattcttgcgactgttcggtgagcgagttaggaagtggatggtcacccctcaacctctttcaatagcccacttacctcggcttctttcttcactcgctcttgatcacttgctttcttcttccttctcacttctcccccttctgcgcgatcatggggagagacaagaaaggcaagggatggccccgccgcgctgatgggagcgcaagcgtcctccaagtccgccctcggaggacttcggggactcggagtactcgaaggaggcttcctccgagtatggtcggtcgcccgctccagc

SEQ ID NO: 68281 - DNA, 1051 bp, Zea Mays
ccactttacatgtttgagatcaaatgtcatcgtcaaggcacaaaactggctccggttccattgttggaactaggaaagcgaacaatgctcagacctagccgctagatgcagtataatagatgttataccttcgatattagatggagtcattagagcgacgccatcccgatcgttccttcaactggccgcgggtgaggatgagcgacatcggcggcggtctttcactccacttaccgcgttagagaccagatcaaatctccttggatgtgtataggagagaaagctaccgacaaacgttggtttgtatatgggccatctctcttatttatatacgggtgtgaaaaaggatcgaaaccataatattgttgcactcctactcaggaagcgagaaaagagtttaatctgcagatcagcgtgaacaccagtggtgatgatggagaggtcatcactgctagatcgtacacagtgccgatgacgatgagaggtttaacgtcgacggtttttgaactgatggttataatcttggttatcacggcttgctttcataaatgcccgcgaaaccggtggtgaaggggtatgaacaggtgatgctagactttgtgtactttgtgtagtaaaggagtaaaaggacatggtaattccgaacaacattgcttgtttgtgtgtgaggctgaggataactaggagcacgccaagaagtaatatgacagtgagaaataattaagaagaaagaatcattcaactatatatataactagtaagcgcttacatcatatcctgaccaggacggccccgatctggacgctcttgacctctcccttgtgcatggattcggtgactagctccgtgtacatgtggaatagtgcgtcaatgatggcggccccgaaatggtgggtgagcatggactcatggatggccctgatcgccatggacaccttcctgccgtctgtctcaacgcctgcgccgctgctcatgctgccttcgaacgtccgcacgtagtcgaggctgaaggagccttccttgctcacctcctcctcgatctcccgtgcgc

SEQ ID NO: 68282 - DNA, 536 bp, Zea Mays
ggcatttgaggccaaatacaaacttaaccttggctcctgtgactaaggctggacatactgtgggatgtaaggtgaataggatgaggatgtattgaacacctcttttgactgggagggttgattggctgacgaagcaagctccttctacttgttgatggtgtggtggcatgttcttgtggtgtggtcgttgtcctcaccacaaaacaagtagaatggtttctttggaggtgcgttgaatctaccaccaagacttcggcctccccttcctcctctcggagtaggtggatgaaccgtgttgtgtgaaggttgctgctgagagcttgcctgttgctagcccgactaaccctgagactgggccaccttttcctcaccttgcaccgggttgtggatacttttgacatgtcttggataaaaccttccattttaagcccctggaggctttggtgtatctgtgaaattcctcccttctttggaaaaaatcattgttagcccttatgtactcgtccatttttttgcagcaatttttcaagggagtg

SEQ ID NO: 68283 - DNA, 361 bp, Zea Mays
caactgcaagggtgactcgtgaaggagaggaggccgaaaccaccgagacagccccaatctccgaagtcatgagacaatcgggattggttgtgatagagggggccattaacgaaggtgcacatactgctaaagctgatatcgaggaagaaaatgttgatgaagaagaggaagactataacactctaatcctagcaaaacccagtcacttggattttgaaaaatctactgtctctgaggctgatgtgcccgtgatgatgaagctgggttacttcggggagactgagaagaagcttattcgctttgccggcgaagaaaccactccaaagccgaaaaatgacgaagtagtagttttaaaaagctt

SEQ ID NO: 68284 - DNA, 809 bp, Zea Mays
atgatggagagatccagccgcccaggcctaactaaccgttcatccagcggcgattacgcgtacggacgttttaggtgcacatatttggaaatgatggagaggtaaggtagccgcatgttacggagccccagaccaaccgaacaggggaacatggccgtgccttccggaggatcttttcatcagacatgtacatacattagtggacgacctccttttcccgtccagtccagctgggtacgtactactcgatcaggaggaggagggtcaacctccactccacccaccaacggccgtcccgtcccgtcccgtcccgtctcgtcttttgcgccgctagctccatctggctgagaaggtttcagtttcgtttcaaacacacacacacgcagacacgcggagggccggagaggaaaacctgaggacggtgcaagctcatactaaaacaagtactgtagctaatccccgggacatcaggggtgtggcaggcaccaggttgccgtagtagttcagttgtgtatgcattgcaccagcgcgtctgatcctatctaggtatagccgtatagcacactactccagacaggatccgtgttgatccgcgtcggaattaaagatatacgctcgatgccacctactactacgtagtatgctcgtccagtccagtcgcgaatcgcgattcagagacaaggctgtggtgccggtggccggtgggtgcgctctgcggttctgtctacgccaatctctaccgccatcattgccttctcgaccaacaacagagacgtattgccacgacgatggccaccaccgacgcggac

SEQ ID NO: 68285 - DNA, 347 bp, Zea Mays
ctaggaagcgttcaagtcgatcttacagtctctgcagtctgcgccttgtgcttgtccggcttcctgaagctaaaagaaatgatgcccccgagctcgagctgcatgtatggagaatttctgcacagaggaaaacattagggaagggagacgatcaggagcgaaagcaaaccaacaaaatctaatgcacggaactttcaacagctctcttctttcctgcctcatgctgaagaaacaacaacacgataaggtgaatcagaaacatatacattattaaaaaatgaagcactaaaagtaggtagcagagaagaaacatatgctcacttgcattcgtgtaacaacaacccaaa

SEQ ID NO: 68286 - DNA, 627 bp, Zea Mays
gtcacagtatcgtgggctttggataagtcttataaattcaccacaaaaccactttacagatttagaaccgatgggggaatcactaaaaacattcatggtataatctagaagtacagggtacctttgaaaattaagatcttcctttagcaactttatagtaggaaaatccaagtggcgatggagatgaaaaaagggtttggaaaggaagcggttcttgctccctttgtggagaatttgaaactgctgaacacattttcgcccactgtgtactagccaaatacgtgtggggttgcatttaccttgtctttggtctgaacccccctccagatcggtggaagattttttttttggggaccaaaacctttatattttcaagtttgcagggctgttttgggccatgtggtgtaatcggaataggatggcgatggagaagcggtttcctaagagcccacatgagatcttatataacgccatatctttttctgcagaaatggaagtctctcctcaagcaaaaggatttagagaaggtgaggtgtttgatcagctccctgaagaattggttgtgtaatttccaaccagccttaggagaggtgtctgacatcgaggttatctgaggccgagctggtg

SEQ ID NO: 68287 - DNA, 356 bp, Zea Mays
acctcgaagcacatataagttttcagctttcaaatcacctttaataaccacaagagagccttttgttacctttatgacaccgtcaccggcagtatacttgtaaccttttgtgtccagagtacttagagagatgaggttcctggacatggatggaacatgtcgcacttcagtcaatgtgcgtacaatcccatcgaacatcttgatctgcacggtgcccatgccaacaacagtgcaaggggaattatcacccatctaaagagtacctccgttctgcacagcttcataggtactgaacagagattttttagtgcaaacatgatacgagcaagcagaatcgaggatccattgggcatcat

SEQ ID NO: 68288 - DNA, 934 bp, Zea Mays
ctcacaagtgttagtgataggggagtgtgtaataggatcagaggcagtttagttaggttctcttgagatattcagtgtggttaggatgaagaatgttggtggtggcctaggagtcgatgatagatataggaagccaccctcatcctctgcctatgagaagggcaaggttttagagactaaaagctcttaaagataaagcttgcagacaaggagacctagagacccttgaggtggcacaacatagaggcaactaagggaggtggcaaatcaggctccatttgagttatagatgtgacaaaggagccaccttaaatagagactatgtagataggacaggcacaaatgtccattgttcaatggcccactcatgctaatgcactagttacaccttatgtcgagggactgaggcatcgaggttgtataccatttcctcactttaggacaacaagtatagaccacccactagtcatacacttggaccttaggactgctagtgcctcgagggtacatcaacttaggtttgtacctttagagtagtgattcctggctaagagagggatcccatgcatagcctcatagagtttatacaccatgttacacgaggatttccattcaatgaaggcacatagtcggatcacttcatgtccacatggagtatgtatcctacggatatagtggcagttggagaagagtagatactctagcacctcacctacttgctagggttggcagacctctaggaccctcttacattgttgtgtgtataaggagggcctaactaacctatattaatggttgatcatcgccctagcctccatgtctcatttagacatattagatatcatttttgtgagatggaggataccattggataggtatcaggttttgccgccagtttccttatgctcagaggaccttataccttctgatgagg

SEQ ID NO: 68289 - DNA, 469 bp, Zea Mays
ctaatttctatgaaccagagttaagtaaacttgaactttttctgtaagtcgtggttgaaaaaggctttagtatgttttaccttttcaagtgcttccaagagaattgataagttgtagcataaccaaagagaagccaaaagaggcaaaaagaaataaggatactatgtcttcaaacatggtatttccttctgcatgacagatagatagaaaaccacttggctacttcggtctcatagcagatgagttaaaagttcacagtagatgagttaaaagtcaggcgccctattaaaaagaagatgcagatagcccttaatgtgcacactaatgatagctcattagtggaagctagcttagttctagttttctatagtgtttgcttctttcagtccttgctggaagctagtttagttctagttttctatagtgtttgcactatcattttcagtataggttttagtataggtttcag

SEQ ID NO: 68290 - DNA, 414 bp, Zea Mays
ttcccgagcatttcccctaacttaatttcagaaatggctaactggttaactctggccacgacgaccgcgagcggagcagagggttgaatatgttcccggcgattaagggggactcagttcaattgggttggttgaggagcatcaggggagtatactaatactgaaacaaggtaacagagggcgtgaacaaacctgggagtggctgaccgcggcgaggtgttcttcgctgtgtgatgaaccgatttggggaaactcgaaattcgtgagctctagcgaacaattaagggtgggagcgggtgctttggtttcgtgatgacatagcgcagctgactcggccttcaatttatagagggcttaagcggtggtgcttaatttggccgagcagtgctggcggccggaggggagaaagagtac

SEQ ID NO: 68291 - DNA, 318 bp, Zea Mays
cagatttctccactcacttaaggaattaccatattcctgctggtctcatgaagatcaagaaaaaagagttcatatccctcaaatagggaggcatgtcagtaagtgaatacagagacacattcatccaactatctcgatatgctcctggggaagttgatgatgatgagaaaacgcaggagctgtttctggaggattttaatagaacgatgagttttatgtcaactaaaactctataaaaaggttaaatgatgctgaggtgatttggtaaaggctatcacactactgtagataaaggctggtgactggtgacgatgatcg

SEQ ID NO: 68292 - DNA, 385 bp, Zea Mays
cgaagctaacccggaggactctgggcttgaaggaaatccccttggcaccagccaaagaccacaaaaggcttccgccttggccaacctaacaaccacaaccaaattcggaggagttccttgaaagacaataacatttctgtgtttccacaacatccaagctctcaggacaaccagagtcaaattcttttttgctcagcccactcatacgagcactattgaagcaccaccactgatcaaaatcattctcacccagccctggatggaggttctgcattccaaagggcctgagcagctcaaatcaaaactgccgcacatacaccttttatctagttcatttaaatcgtcattggatttcttagtcaacatttccttcctaagtcagaga

SEQ ID NO: 68293 - DNA, 667 bp, Zea Mays
ctgggtttggggggtcatggtgatggctctatttattcaccaaggtgagcggatcctggccagaagatcagaacaacctgccaaatccgcacggaatccgccgacgccggtgccaaagcaaatctggtgccaggttgaagatgcctgacgccaaggtcccactggcagagacacaagaggaggcgtgcggatgtggaccgaggatgacaaggtaggcccaccagtcagagactaagcgcggcagcaaaaggggtaggaatgggtgcgcgcgttagtgggccagaattttggaattcggcccaagtcgagttctggtgtatttctttttgtttttcatttccattttttatttaaacttcaaatttgtgtctagttccaagttcaaatccaaattcaaattgaacccttatttttgaacttcaaatttcctagtgaatataacttctactatttacaatactattatttattattttcttgttattcttttagagaaggaataaatgacttagttgagattttcactcccattttctattcctaattccaaattcaattattcaaactcacatttatacccttattttaatttttcagattttccaaatgtatcaattgaaatccaaatgtgaatataaaccatattattttaaatattactattttt

SEQ ID NO: 68294 - DNA, 577 bp, Zea Mays
cccgtcggtcagtggcatggatcagccgtgcggtcctgcccaccgtcacgaccctgcgtcacttgttggcgtgcgtgggtgtagacccggtatggtgtatctgccgcgtagaacccaatattcgggccactataaaagctttgatgctgaggtcgtttatgaacaggatcgtccagcccgtcaaggtagtgggagcgtgtcttgaactgtacttgggaaggtgtggtcatatactcatatcgatagcaatcactcgacgtgccctcggcctgtcgttcacgtggctgccctcagccacacctcatcttgtggtgtcatgttttgtcctagttggcgtggacatcgcgacgtctgatttgggtttccaccttgctgactttcttagtagggacctgggtggccaccctgtcttatggactttcttggcaggggtctggcccgtcgctccgccacgtacttgctcggcagggacctgtccagtcgcgctgcctcgtggatttgcttggcagagacctggtcggttgccccgcctcgcatacttgctcgacagggacctgagtggtcgttctgcctcgcg

SEQ ID NO: 68295 - DNA, 287 bp, Zea Mays
cggggacggtgtgatgtaggcggcgctggcggcttggagcagccaggggtgtggccagacgtgctccgaccatgcttcagccattctcctttagcttttgctcgatccgtccatccatccatccaccaacaaccatttcctccttggtcccgtgcatgctcatagctcaggtaggtgaccaaaattcattcctaaatagcattgtaattcttgtgtgagcgtgaaactcaattgttggatggaatctgtgtgcttcattctatctcgatctctacagcagggtgcac

SEQ ID NO: 68296 - DNA, 839 bp, Zea Mays
tttataatctgccttagttggcttctttatctttatgatggttgtctcagccttttttgctaactcctcgtgctctgtgcaatctctgacaaaaatctcgttgggacatcaatagtagatttactcttcttttttctcatgtggggacaccaattttggtatagaaaatttagatttctttgatggtcgtggatccattgatgactgtggagaaggtagatcccttgctagtggcgtagatagtgggtcactaagaggatgaggaggagaaggtggtggagccctaaatggcgatgcttgtggtgaagacaatggatcagaaagaggatgaggagcagcatgtgaagtttgaggaggtgatgatggatgtacaataggaacgacaagtgatgactcttgcgttaggagttaggtaggggacaacaacgatggtggaggatcaaccaaatcgacatcccttctaggccaaaggatacaattcttagtagcttgtccaagtgtctcaatacctttgggcctagtgatgtctagcatgtcgccctcggatccttggacgaccatagtcacttctaccctacaatactcttctggaatgttgcttccatagaacttgtgtcctgagatcacaaggcatgtggctactttattcatatgatgattgttaatatcatatcttataactagtgtgcatgccataggccttgtgatatcatcaactggatagcgaaccttatttcccattggcgtgagagagctagggacagtcatacaatcggttgaagacgacgattgtgctgctagaattatttgcatctatggagtggttatctgttgaatag

SEQ ID NO: 68297 - DNA, 407 bp, Zea Mays
catttacgttgttttagttcatgttttacgctaaaatttgtacgagtcagaacccgatcacgatgggacgcgtgagatttttacgccgtaattttcggcccgcattcaccattttgaaacagatgtacgatttacactaaaattcgtaatcatttacgcagttttagttcatgttttacgctacaatctgtcagagtaagaacccgtgcctgatgggatgcacgctggcacgggacgtggcctggctggggcttgcttgtactaatggaagccctgggcttccattacctcgtccctatatatatatataatatgtaatgtacctacatacgaagggtgggacccatgaaattgggggcctagggtgatcaccccctctcgatcctctaggaccggcactagttgat

SEQ ID NO: 68298 - DNA, 557 bp, Zea Mays
ctctcaacgactccttaccgtcattctctatgtatttccgcctctagattggagttcaagcacagggattggggattgagagaccccggccatggcgccaccatatgtcggggcaacgccgccgtgcagtctgtacggggtaaggatggggatggtgtgtcgttggatcttcctaggatggctcggattagaagtagaacgtcggtccggaagaattaatctaggacattgtttgtcgattcgatgaacgacgtcgatcgcgatcagcatgaaatataggtcgtagattctcggttgggcggttgttgtgcaatccgcgcagctggtaaccctaacggttcgatccaaaaccaagggcccacgctgctcgacgtgtcctatggccacagatctaatccttgccgcagacttgggatcctacggccgtgatcgtccaataccccttcggctggcggtctttcatatgagcccctgcctttctggatattcaacccgccattccccgcggggaatatctgagtcataggaattcttgcgcagaagaccctatgctttcc

SEQ ID NO: 68299 - DNA, 517 bp, Zea Mays
gtaagtcttaattatgtggctccgagacctaattttagttaactaatattacagaatttgctaatgctttgtggcataattgacagtttggggaggaaatgaatttaaatgatgacttacgtcagttatctattggaagcgtaacttccaaaagctatggacgttacgacgttaatggatatcgctttcgttcaagtatttttgaatcaagtcatcctatggccgccactcaaaatagtggagtcgttacttcggcaaccgacatggaaggacacaaagcctgctattacgggaaaataaaaaatataatcgacattacatttgctggaaataagccttcaacactagttttctttgagtgtaaatggtatgacccgaagtattataggaccaaatttgggatgacacagatccaacctgaaaaattgcttcaaggacacgacacgtatatccttgcccatcaagcagaccaagattatttctcgacatatccatgcaaaaagttgtctacatggag

SEQ ID NO: 68300 - DNA, 337 bp, Zea Mays
ccagaaccaggaagattaccacggtctacgagaacagaaccagcaagattatcaaattctgcaagaccaaaatcagcaatattaccacggtctcccagaccagaaccagcaagattaccaccttctacaagaccagaaccaacaagatttccaccttctgcaagaccagaaccagcaagattaccacggtctgcaagaccagaaccagcaagattatcaagttctgcaagaccaaaaccagcaatattaccacggtctgccagatcagaaccagcaaaattaccacgtcctacaagatcagaaccatcaagattaccacatcctgcaagagcagaac

SEQ ID NO: 68301 - DNA, 1572 bp, Zea Mays
gttagagtaatcatcaagaaagtcgaaggccgctggtgggggtggattggaagcctcagaaaagggaaacgaggtttcatcaaaaaccacatgacgggagataatggtacgattggattggcgatcaaagcataggtaacctttgtggtggggggaatagccaaggaagacacaaagggttgagcgaggggataatttatgtggagtggtggcagaaaggttggggtagcatttgcagccaaaaacgcgaaggtgctcataggatgggttgtggccgaagagagcaaagtgtggtgtagagagtgcgagtgttttggtgggtagtatgttgaggagatatgttgcggtcccaagagccgcagcccaaaaactggggggaacactggattgaaagaggagggtgtggatgatattgttgatggaacggatgacacgttcagccttaccattttgagctgaagtgtaggggcaagacatgcgcagatggactccatgggaggagaaaaaagtgcgggcttgaaggttgtcaaattcgcgaccattgtcgcactggatgctctggatagggacaccaaactgcgtacgaacgtaggcaaagaaattggttagggtggaaagggtgtcagatttgagacgtaaaggaaaagtccataaatagtgagagcagtcatccaagataacaaggtaatatttgtggccagacacactagtgatgggtgaggtccagagatcacagtgaattaactgaaaattacaggtggcgcgtgaggaagaagtaggaaatggtagacggacatgtcgtccgagttgacaagcatgacaaggatgagtactagtatttttattacaagaaattgcggatgactgcgctaaatgtgataaaacggcgtgaccgggatgtccaagtcgttggaccatagggtagatgcaagaagagcagaggccgggaaccgcagggggtatagtggaccagagctgttacatctgaagatctcgcgccgagtgggtagatccttcacagagcagccaaaaggatcaaattcaacagagcaattattatcagtggtaaattgacggacagaaatcagatccttaatgagggagggggaaactaaaacattgtgaagagaaagattatagggaagacgggtggtgccagtggagataacagggattagatgaccgttgccaacgacaatatgagtaggaagatgctgggaagaggggggatgagatattataccagcgtcagatgtcatgtgactggaggcaccagtatcaaagtgccactcttgttgaggcggctgctgaagagtgacagtttggaagttggcagcgagggtgtgttgatcccagacgggtgcaggcgtagaaggatcggcgtaggcagggggcggcccatatgctgcagcgggaactgcccactgaccaggagtgtcggcgacgaaggcatgcggtggtgggggcgaggcagcaggcggacgaggagtcgaaggtggacgttggccaggccacatgtagatggcccccgtccaagggttgtagtagttgtagttggaagatggtgcaggg

SEQ ID NO: 68302 - DNA, 1066 bp, Zea Mays
ctgattttgatttatctccattttggcatgggttctagatgctttgaacatgtctaggatgaaaccttacttcaaagccccctgtggcctccgcatatttctatgcctcttgtccatactgacgaaaatcattgtttactctgatgaactcatccatcttctatactaacttctctatagagtgaggaggcttactagcaaagtattgtgatgctgggcctgaacgaagtcccttgatcattacttcgatgatgatatcatctagcacgcttggtgtctgatcccaaagctagagaaaccatagacaaaggcctggagatattcatcttgctcttgggcatattgaaatagggcctgagtggttatgggcttcatttggaagccttggaagttggtgaggagaatgtccttgagcttgtgccatgatgatacagatcctaaccaaagaggagaataccatatttgtgctacatttttttctgccacaaaaaatgattttgccatgaccacttagttatcgccatatgaggatatggtagctttgtaactcatcaagaactgctttggatttgtcaatccatcatatattggaagctgaggtagcctatataatggcggccatggagtttcctgtaattattctgctaaggggaagtatcatcatataaataagtgtcatggatgtgtcctatggagaaggagcggagccaaggggggccgacaggggccatggccccgcccaaggttgtggcatacacatatatatattgtatagactaaatatatatattttagattttgtgtagcataattaatcaaaggtttaatatagtggttggtaatatatgatccataactctattgtagtatgccaaccaaagtctaaaagagacaatatatataagataaaatattcgttgaatgactaatcgatgatatgagacgtcaaacctaattcgcttgtagacgttgatatctaaacctcacccctttatcattcatcttatcatctggttgggcagctgccatcctaccgattgccgccgatcacttgacttgcctctgc

SEQ ID NO: 68303 - DNA, 376 bp, Zea Mays
caattttaaaaatctaaaacttgcttagaaactgataagaatcgttaggagtagacagctagacctaggacgaaaggccttagggatagtgggagaaataggtggctaagtaagtaggccctgtgggtcggtacttagatttttaaaggatgccctaggagcacccttctattcggaaaggagacgttattttcagcatgcatgcattataaaaactaaaagggattaagcactaaagaagtaaaatttgagctaacccgtttccttttaaacccctcaggctcttttattttcttccttccaccataatctttacctctgatacccttccgcagatgacttcacccacccccgccaatggaagagacacccattt

SEQ ID NO: 68304 - DNA, 617 bp, Zea Mays
catttttgcccgctgaattagttgccatgttcccttaccttgattggagctcccagagttctgctgattgttgaatttattctgcttcggatatggacagtcttttataaatgaccagactttccatagttgaagcagccagtagaagaactagggagagcggggaaacgagcaccaggggcacttggctgatttgtagaagtgggggcagtggcagggcgaatgaaaacaggctgtttgaacggataggagggtggacgaggcgaagaacagttctggttaaaaggtcggattaccaacctggttcgcttctcaggtccctgattagacctatcacctccaaaaccctttgattttccttggcctgtgttcttggcttctactgccagcaccgtgctaacagctctgctgtaagtaagatctaggcaggtgccattttccgttggagccagtcgttgagtcccctcatgaagcaattctatttcttcaggtcagtgttcacttgatcaatagcatattgggataaatggttgaacttgttgagatactgcattacagtatctcccccttgctttagtcgaataaactcctcttgtttcatgtgaagcactccctct

SEQ ID NO: 68305 - DNA, 345 bp, Zea Mays
tgcaaatgagatagagagactaagcacagagcaaatagtgactgatagaattagcaaagagtgagatgtctacctggaaagcgcacactggaggtgacgatccaggcagaacggaagacggcacacacaaagtcactgaaatgacagaagaggtgagcacgtattagtcacatagtcataagcatatgaaatgtgaacaaatacatacacaaagagatatggcacgagacggaacgatcgataagtcaaaaaccgtgaaaacgacgtttgacggacaaatagagacatgggatgattggaattcaaaatgaggcacaaaacgatatgggattgagccgatacttc

SEQ ID NO: 68306 - DNA, 629 bp, Zea Mays
gttaataatgaattaattggggttcaaacagtgaaggttatcggttagttttctaacaatgatgatgggatcaaccccttgtagatcattgtaacctctagaaaacatacctcggttacacgtcttgatgtcgactcgaggtcgattattggaaactcctttgatcttgtgggaaatgtaaaaatggtttgtagaatacatttcaacaaagggggtcatgggaaactcagtgatctatctgtctaattggaaaatataatctattaatccatttctcctttttatgactaaacctcttctagcacccttggtgccaggcaaatctttcttcaagatctttcgacattctaggtggcctttctcgtcttatggtacccccattatgttattactttatggatccttcagagaggtgttcattgcgatgaatcgactttgtcgacctcatgtatagcttatctatacagatatatctttgttgtttatcttgaatgtgtgcaacgtagatgatcaatctcgggctactttgtttttagatttaacatcaatgcactttatatcagcttggttgttgaagaaagaaaacagatgatggtgaaaaggataatctaactaatccaagtaatcca

SEQ ID NO: 68307 - DNA, 581 bp, Zea Mays
cctgccggctccaaggaagaatcggttgaagtgccaaaggttcctgcaaccgagtcggccgaagcgccgaaacatgctgccgaagccaaaggaaaggcggtcgaagagctagagctaggggaaacagcagggctaccaaaaatactgagcccgccacaggagccagaattgccgaaggtatcgaaagctcctacaataactcccaagaggaggaggatggctagcgtgctggacgccgtcttagagtcgacaagggcatcaactcctgctcctgcaaaggagactgccgaagctgctacagctcgtgctgaacccgaagctgggctctcagtgcccattgaaacaaagcctgctgggactgggcagagtgttgaacaaggaccttcaggcatcggtcttgttctggagaaagaaggcgcacccaagaagattgaatctcctactcccgaagcatcttctaaagagcttgactttattattcgacatgcttcgggtaaaaggttgtctgaagaggaaattgtggaagccaaacactacgcccgggaactgaagtacccgaagggggccttggtgtacaatgg

SEQ ID NO: 68308 - DNA, 647 bp, Zea Mays
aatttttctaatcaagtccctttgtgacttcagtaaatgtgccttgattcaggcacaatgctattgattgtgctagcatcagattcttcatggtgttgcgctattgctgtggctggcgatgcccttctggttgctggttatgatccagggtatgtgctaatggtggtggtggtggtaactgagcccatgccgcttgagaatgacttgccgaagcaactgatatcgtgggttgctggttgcccacatattcagggatagatggagaatagcacgaggcagtatggaagacctgcgtcggctgattctgccgtgcttcggcttcagcgatctccttctgcttttggatcgtgacttggctcgtccttgttgtgtgtcctttatcctccccacagaataagcagaacaatctcctaggttgcgtgctgaaccttcctccgaagcttcttcccctttgcctcttggagctggtggcctgtaagaggtttgctgcatcccggagattgtgagctttgctggctgccctgggtgtgatttgttctgtcatcatttgtgttgggattgtggattgttctaacatgcctggggtggaatcttcctctgaatcccttagtcctctcagaatatctataagcctcctcccttctttg

SEQ ID NO: 68309 - DNA, 588 bp, Zea Mays
aatttattgaaacatttccttatattgtcaaatacaagaaaggaaaagataatgttgtagcagatgctttgtctcgacgacatgctttgttgacgcaacttgatgctaaaattcttggattagaaagtataaaggaattatatccaactgacctatactttgctgaaccatattctaagtgttgtgatggcagaggatgggtaaaatttcatgttaatgatggttttttgttccgagctaacaaattctgcattctagagtgttctgttcgaattttacttttgcaggaagctcatgcaggaggacttatgggtcattttggtgccaagaagacggagcaatacttgtcgatcatttcttttggcctaaaatgagaagggatgtggagcgacatgtccttcgatgtcaatcatgtcataaagctaagtctcgtttaaaccctcctggcttatacactccactacctattcctagtgtgccctgggaagacatatccataaattttgttcttggtttaccacgaacaaagcagggaagggattccatttttgttgtggttgatcgatttagcaaaatggcacattttat

SEQ ID NO: 68310 - DNA, 355 bp, Zea Mays
gtccgagtcgtcggacgacacctgggggaggcatagaccggcgatccctcggactcggagtcaccgaagtcctccgacgaaggactcggttcacgcttccgtttgtcaccggagcgacgcggcgagccttgacctttcttgtccttgcccatggctagatagaagagaagagggggtcgagaaagaagcaactgatgataaaaggatgtgtgaagataataacggggcaagcaggctatttatagaggccggaggcaactgttcatctcctatcacactcaccgaacagtcgcaagtattcaataagcaattcaaatcgcctgaaggcaagtcaggcagcagacgtcgcttcgcg

SEQ ID NO: 68311 - DNA, 509 bp, Zea Mays
catgcacaagaggaaccggaacgcagacgtggtttgtgacgacaagacccctcgtaaatcctccccgtgccgtcttggcaccggcacccccggacggaattgacattccacccaacagggatcgagatcgccatggaaattgtttctaggacgaaagccatgtaggctcatggttaccggtatctttgcacgctgctgatggcgaaatgcaaccaccactatagaggaggctcctggttgttgttcttgactgcttggatcgagtagaataataaagacagcaggggatgattccttccccctgccgctgcatgctcgtttcttctctagtgtttgttcccttgtttcttttcccagtactgctcctttgttcgcttcctatccttcctcctcctccccgcctcccgagtcccgtccctctgcggatttagctcccacccagtggctcagctcaactcggaccactgagctctgaccactaactcaaccactccagatcacggcgggca

SEQ ID NO: 68312 - DNA, 755 bp, Zea Mays
tggaatcttgtcgaatttcgactatcccaaggttagaatgtgttcgtctcatcacttgagggtcaagctaatgacatttgaatatcgctggagtaagaggtttggaaccataaaaattgagctcatatatttttcgattcatccaaaataatcgacatcgtcaaggccgggcgtaaagactccagaacacgttattttccgattgggccgactttggtcgtagtttgttgtgcgaaaacggtatccattgacgtcatacccagaatatttcttgaccctataagcaaagccgttggctatttgtctcaactcggcactcatagacggatctctttggccctgcaagtattcacaagttaaaagatgctaaattgagttcatagacggatctctttgataaactaagcacatatcttacgtttgaaccaggaaatgaaatcgggcaatccatttctcgcaccctttctaagaagagtgtcatattcctgtggagtggggtcccttgatcgacgctggaattcatgaacaaattgttccatgtatggcgtcacctcttcaagattggtcaatacatatagcatgatatgccgccactcttcatgtgtcagggtcttggtggtcgagccacttgcgcttccgagttggcctcgaaatatgctaaggttcgattcattgccgccatcattgtaatgagggggtggattatgcacgctcgatagtttgtcaccataataagttgttgtgaagtttgacac

SEQ ID NO: 68313 - DNA, 554 bp, Zea Mays
aagtgccatggtcgtggacatattgcatcccaatgtccaagtaggaggaccatgattgttaatgaacgtggcgaatgggaatatgaaagtgatcctgaggatgagggtccaagatttgatgaagaaattgaaagtgaagagagagaggaaattcagcccgacgaaggagacaacaattgttttatttctcgtcgagtgcttagtgttgctgctaccaaagaagataataatcagtggacaatctttttcacacaagaggcatgattaaggagaagttgtgcagcatcattgttgacaatggcagctgcaataatattgcaagtcaagaattggttgagagattgggaataaagcagcgctgtcatccttctccatacaagatccaatggttaaatgattgtggtgcgctgaaagtaaccaatgttgtgaccgttcctttttctattagaaggtacaatgatcaagtggagtgtgatgtggtacctatgcaagcatgccagctgctgctgggtaggccatggttgtatgatcgagattcttagatttgtggtcgt

SEQ ID NO: 68314 - DNA, 453 bp, Zea Mays
gggctgagtgggccctctgcaccgcctcaaattgtcgccagaagtcggggcgccgccacggaccgcgctcctctgtgggcggggtcgacgcaacgcgattaaccggtgagctcccttctatattgtttgtgctggtctgggcatcgtatggtggcggccggtggttggaatcgggctcgggacagttgggggctagagctacctcgagcatggattgccgccaagagcatggggccccgtttggtgccttgggaagctattaggggattcgccggcccggtcgggtgctcatcggggctccgtcgtgctggcagtgctctctgggctgggggattgaccttgatgccgctgccatcgttgttgcctcgcctcgctgttgccgtgtccgtcgcgggccgaggagagcgtcgctgccgcaaggattccatgtaagaaaccgtccatgaagttcgc

SEQ ID NO: 68315 - DNA, 706 bp, Zea Mays
gttggagacaacctaaggctacctgcagcggtactgcgaggtgtccccaccacttctttagcggctacaggagcacgctacacgccacaacggtgccccatatggtgcatgtcaaatcgcggtaggcttctctctctccctccagatgaagttgggctctaccaagcggtcgccaacttcgctctgtctcccgcgttcatgtcgaggttggcaacgaatgtattcgggcaacgctcgaggcgacgatagtctcccccaccgctcggaccttccaaggagttcctggagcatagtgtcttcatcccacatcactattgtcatcctagatcctcactagcttccgcttcttccctcagtcaccctcggcacgtaatgacggcgacgctgatacttgggcgctcagcaatggcagggcagtcctagactccacgtatgcctcagtggctctcccacacttgtcttgccaaccgcctcacgcctttgcctctggtcatccgcacatcggccgacgactctacgtgtcgtcctcctgctcccctcctcccactggtggaccatcaaccgcgcccggctctagcgtctgcactatgcgccacatgcaatcgttgggtagcagaagctagcagcccgctttgaatgacctagatcatatgaagaagatgccccagatgctactcgactacaaggtttatgtttctcaggtgac

SEQ ID NO: 68316 - DNA, 408 bp, Zea Mays
ttctcagctccttagggagggttttcccacaccacatagtgttttcaccgaaaccctaaaactccgcccaccacgtgttcggtgaaatgcccaaaccagccaaaaatgctccaattgaacccagatttttcaggcaccttcacaacatctccagtagcatattcgcaaaatttcacgcccatccgatattccaggctttaatttttccaaattccccgtttcgagcaatcgtttccgagccgagtgcccaaatttcattttcttcgcctaaattcaaaccaagcacacacttcactcctatcacccatataaacctattcgtgaagtatcggctcaattccatgtcatttcgtgcctcaattcaaattccaaacctcctatggctctatttatcgttcaaacgccgtt

SEQ ID NO: 68317 - DNA, 605 bp, Zea Mays
tgctagacgctggcttcatcgaagaggttcatcacccaatatggctagccaacccagtcatcgtccccaaggcgaatgggaagctttggatgtgcatcgactacaccagcctgaataaggcatgtcccaaggacccgtacccacttccacgtatagaccaaatcgtggattgtacctccgggtgtgacctattgtcattcttagacgcttactctagtttccatcaaatccagatgtccagggaagataggaagcataccgcttttgtaacagtggatgggctttacggctatgttgttatgtcgtacagtctgaaaaacgccttgcctacatttgtacgggcgatgagtaagacttttggggacctgattagggacaaagtagaagtctatatcgatgacattgtagtcaagactaagagaaggtcgaccctagtggaggacttaaccctggtcttcgacaagctacaggcaacccgcacaaagctgaacccagacaaatgcgtttttggcatttccgctgggaagttgctgggattcctggtttcgtaccggggcattgaagcgaacccggagaaaattagagcgatcgagtcaatgaggccc

SEQ ID NO: 68318 - DNA, 697 bp, Zea Mays
ttgccagaaatcgttgaggagtaaccatattggtctgaatgtttctacctgatgtagatgtggatatacccgggattaatatcatatccacatttgacttattggcatttgatctattctcggggacgcctgcgaatatgatccatcagccttagtcaaagcatatgtctgattgcagattcacgtggtctatgataactctcctccgattaattcaccctgctggtgatttgcctcacgaagaggttcatcttgatgatgaagttcctagcaatgcgcgcaatatcattgtgctgggaatacggaacaatgaatctttcattttgggaaatgacgaagatcattattaaatgtgggagacaaatatgtcgacgcctatcttgcccctctagattgcaaatggatccaaaacaaagtcctaggcatgagtgctttaagctctcttatcgggtcattgataaatgcaatcgaggttgaaccaataatcgcaaaatgaaagtcacgagcttgaagttcggatatttatgggcactattgaaataatgtgtggtgaatgcgatggttcaagtggtcttgtgagagacccatcccacgtatgtgttgaataaacactgttccgctatgtaatatatctggcaaatggcatgaattaaattatgcagttaataggattctgaagatccgtcatgagatccta

SEQ ID NO: 68319 - DNA, 426 bp, Zea Mays
caattctggacaaacttgtggtgcaggcgtcgctcctaggcgtttgattttgaacctatcggggtacgattaattaatgcttgaagggcatcatcagaggagtcgtctacaatatcgactagcaattatcgctcgtgctaacgctatagttctgaagagggaccgacgacggcatgacagaggtcagagggggtcaggcaaccgtggcgacgtcgtaaaggttgaacaacaacgcgagtgaggcggagggggagaggggacgtagggggtattgtgcgtgtgatgagcgataagagtgaggatgatctaaatagcattgcccattggatttgagtaagagggaagagggtatccaacgaactgaattgttagtcttaagggtgtgttatgtgtagctgcagtttgtttgttgggtttaggagatgt

SEQ ID NO: 68320 - DNA, 848 bp, Zea Mays
atcttatttcactattggccaccgacaaatatgtcttgtctagctccttgataattcttacctgactccttgactttataatatctttcttattccaaaccttgtctcaccttttgttttggttgaatgagtataattggattgtgttgtgctgatatgtttgagttcatgttagttatatttgtgactatgtttgatttgttttttttgtaatgattgttgttgtattgtgtgacttttgtccacaatgacatcagttagctaggaaaaaccttagatagatgggttttctctgctctctataatctgtctttgctcaacccttctgtcccttccattcttccatacccatacagatgtcagaccttggaatgtcaactacaagtgatgtcactaaatgcaaagaatgtggtgtgttgacaagtcaaaacaacactataaatgaaacagctgatgaacagaccttcaagacacaaaaggatgaacaaccaaaccaacagacaagtgaccttggaaaatgttgttgttgtgagtgctatggaattccttgtcgccagattagtacaaacgaaagtgaaactacaaaacagaagaaccggattttgtttcctggcataaaaagtcaatggtctccccaagaacgactaatagcagatgcactgtcagacgatgaattgccaggtattccaaaaagaaaacatcacaaggatgcccagccccaaggagaaacgcatgagtgttacattgatggatggactattacttgcacacagtttcagcctcatcgtcgcatcaggtccaagaaacgaaaagagaaacatggaaaaagtcaagaaataacttcaaga

SEQ ID NO: 68321 - DNA, 513 bp, Zea Mays
ctgcgccgccgttgactcgcttgtccgccgtcgatttggggtaaacgcggggtcttggcaactcgcccgggcgtgtggagcgtgaccgcggcgaattggggacacggatgcctcaagtgttggggaaatttctcgccgaccggccagcacttccaccattcgcaactcaccgcgcgctggaagcttcgctccgtgcctactggtaataccccttcccacgtattgcttttcgcctagcatcgagtaggagggtgttaatcgagttttgggggcagcgaggatgggattttgggtgcactccggcgatgcgccgccgtgtccgtcgcgggcgccgccgtccggtcacctgggttgtgggagcgtttctgaccgcgggatctaaaagctgcggtcgggattaggggatggcccggtagttaatcagaggtagagtttggaacttggcgcaagcaaccaggtgtcgttgatctgagatttaacgcatagggttaaatcgcggatactgaaaatcgg

SEQ ID NO: 68322 - DNA, 467 bp, Zea Mays
cgacgaatcgcggtgctagctttcctttcacttggaacctcttgacaccacgcatcggggagaccttgaggtagatgaagtctccttcctcaaatctgagttttctccgcctgttgtctgcataacttttctgtcgactctgagcttcaagtaatcttttgcggatcagggcaactttctcttcagcttctttaacaaaggtaggtccttccattgtcttttcccctacgttggaccacatgagaggggtctggcactttcgtccatacaatgcttcgaacggtgacatcttgatactggcctgatggctgttgttatacgagaactctgcaaaaggcaaactggactcccagtttctgtcgaacgttaacacacaggctcttaataaatcttcgaggaccttgttgaccctttctgtctgaccatctgactgggggtgataggcgatgctgaagtctagcttggtg

SEQ ID NO: 68323 - DNA, 473 bp, Zea Mays
atagagaacggtccaatgtatctcgggctaagcttcctggagacaccgaaccgaatgactcctctagtaggtgataccctgagaagaacttgatcacccactgcaaattccaagtcccgcctcctcacatcagcataactcttctgacggctctaagtggccaaaatattctgatgaatctcccgaacattctcagatgtctgttgaacccaattaggaccgaccaaagatctctctcccaaagtctcctagcacaaaagggagatacaccgcctgccatacaaggcctcatatggtgccatcttgatgctagcctgatagctgttgttataagcgaactcagtcaaggcgagatgatcctcccagctacccttccatgatagaacacatgcacgcaacatgtcttccaaggtttggatagttcgctccgactgaccatcagtctgagggtgaaaagcaacactaagagaaag

SEQ ID NO: 68324 - DNA, 554 bp, Zea Mays
ctactagctaacaccttttcttttagctatcattccagctgatattttctctctctttgttgcatcttttagctttactggtagaactaagcgcaataaagtagtcctattccagttaatcatgtgagaattggttaaaagagtggatcctggtgagactgaaatggcctgcttcctaacttatgctgaccttttttctggggcgctgttgccagctgcaaattttgtattatatatggtgatcgcttgtaaagctcatcgacagggttgttgaacgggtggttacttttggtgcatttcgcagtgcggtatctcaaaaggtaattgttctatttgctgtctttgtctgtttgcttaatctcgaagctctgttgttgtcttgcgggagagttggatttgctaggctatctcgggcagcctcccaatctctctgtgcagctccgctggagatggccgcacgctgcaggtgggcgtgggcgtgggcgtggcactcctttcgagctgccattggcgttctgagtattcagatttcagaaccaccttgcccgcatggt

SEQ ID NO: 68325 - DNA, 558 bp, Zea Mays
gtccaagtgtggtgacttagactagttagactgccattggatatgtttgtctaagtcataggaacatcctcaagaccagccaaattcatttgaataagaattagacaagtttgcaaaatttagtatgtggtctggcgcactggaccggtctggtggtgcaccggatcgcgtacatagagaaggtcgagacttggttttaaccaatgggcatatccgactggtctgatggtgcactagaccatctatgtagagaagatgtaatctagacaatcgggtggcggaagactggaccgctccaagtttcaacggccatctactgacgtggcactgacatggagggtccggtgtgccaccggaccagttattatgccaaccacccgttagaacggtaacctgccaagtcaggcgtcaaagggtctagtggttcatcggaccagtactgtaggggtccggtgcaccataaatacacaccaaccagcatagtaaagacacaaaagctacaccaaacatccatacattcattacaacatctcctaagcattcaaagcctcacaagcg

SEQ ID NO: 68326 - DNA, 612 bp, Zea Mays
aaaatatacgtaatgaatgtatcacgacaaaaggaggagatggactgagatgggaggaagtccaaatgtggctactgaagtacaagtctaatcagcagaagcattgaagcacagagcaggatgatgtccagccgagagccatctgtctcaaccagccagacgtccaatctgtcatcgatcgaattaatttcagacctaacaaggcgtggacagatagcgtcgtttgaattcacagagtataagatgaaaacctttgaatgaattatttccaaaatccactcaaagctcgggggctacacccttcggtgcccccaatagattttcagtctcatggagataaaatgctgatttctaaagcataagatgatgacctttgaatgaattatttccaaaatccactcaaagctcgggggctacacccagtgcacccaatagattttcagtcccataaagataaaatgctgatttctaaagcataagatgaagataaaatgttgatttctaaagcataagatgaagataaaatgctggtttctaaagcataagatgatgacaaaatgctgatttctaaagcataagataaagataaaattctgatttctaaagcataag

SEQ ID NO: 68327 - DNA, 614 bp, Zea Mays
ggctgtgtgttgatgcaggaaggcagagtgatcacttatggctcaaggcagttgaggaagcatttggggaattacccaactcatgatcttgaattggccgcagtggtctttgctctaaatcatggaggcattatatttatggtgagtgttgtgacattttcactgatcataaaagtctcaagtatattttcactcaaaagaagctgaatttgaggcagcgtcggtggctcgaattgattaaagattatgatttgtccattcattatcacctggggaaggaaaatgtggtggctgatgcccttagcaggtccggggttccaaaagtggccttgcctttgatcgctgatctggaccatttggggatcgctttgtgctatgtcggcaccgctagtgaggagactcggatgcttattcattcctccctcatggagagagtgcgtgtggctcagcagccggatcgattattgcaggaagctcgaaagagggttggcgatggtaaaccccgggagttcaccattgatgagaatgatttggttcgtttcaggggccgtctttgtgtgccacaaaaatcagaggtgaagatggatatcttgagagaagctcataaaacgcct

SEQ ID NO: 68328 - DNA, 562 bp, Zea Mays
ctgggacctgatgctcagtccactctaatacgaagtcaaccagtgcttgagtctttattgttgtgcgaggttggaactctatgtcgtgagtcgtgcaggagatgtataacaacagatcttctgctggctgattgggcgtggctcggcgtggtggcttgagtactggtggtgtagtcaggtactttttcagtgcctctagagcttcctgtgcttctgtggtccgctgaaacttgtccacctttttgagtaatttgtagaatggcatgcctttctcgcctagccttgatatgaacctgctcagggctgccatgcatccaataagcctctatacctttttctgtgatcgtggcgcttccattctcatgatggcctcaatttttttctgcgttggcttcaattcctcaatggctgacaatgaatccgagtaacttccctgccagtactctgaagacacacttttctggattgagcttccaccggtatcgcctcaagttgttgaaaccagttgcaaatcttcgatgaagttctctgagttttctattttgatcagcacatcatcgac

SEQ ID NO: 68329 - DNA, 433 bp, Zea Mays
tttatagccgattgtatttgccaatggaagacaacacaatcattggtgttatgaagaaaggatccatgccatttacaatatacacacccttttaattcttcaaccagaggaattgtatgtgacaatttaatgttaccatgcttaagtaactcatcaaatattttatcacacttagcaacattaaatgtgaacttaactttccctttttgtgtcgggtgcggtgagagcgagcagaagaattggccttagcagaccaaacaagctcaacaatgtgtaaccttttctgctcccggggcttaggtggtcggctatctttaggtcggccttctgtaataggctgatcataggtggattccggtgctccggacggtccaacctgtgtagtcggacggtctgcgagcgaaccggacggtccgatactattctcggattg

SEQ ID NO: 68330 - DNA, 354 bp, Zea Mays
gtcagcgacatctttgcagcactctaaggtaagagcaagcaatctctaaactgaccaaggctggttcgaaaacaagaaaagatgttcgaaactagctttgaaggtgaagcaggcactaatagcagcaaatacaaacagtaagagtcgtgccctataacgctgggtatcgcccccttttatacgtgcaaccgtttgactttaaccatcacattcaatgatcattggttcccacaacatagcactgcagttttcataaggagctttgcgaatgtgtttttcggaccttcagcacaaggcctcccaattacaatttttgtgatctaagctcgttatgaagcaatgaactcatcccgc

SEQ ID NO: 68331 - DNA, 1049 bp, Zea Mays
gcggcgaaggttatccgatcgaccgatgagctggggggaagtacggcaagcttagccgccacgagacccaactcaatccgggcgccaagatttttacctgcccgtgcttatcttctgaccacggtgcacgaatcgcgacgatcagcgctcatcgtggcggcgagtcaccagcgacagtgaacgactggcagtcgatcttatgcagatactgtaccatggcatcccttattcagttagcctgaccgagcgatttgaaaccccatttcctcccgattttcaatggcaaccagttgattggccagtaacaaagttgttgtctgatgatccaacaacaatcttgttatagcaaccatggccaaattcttattagatcagggttgatttctagttcaaagttggctcagtgtcactgttagtctgaatttcagactgcaaatagcctgacagcccgactttgagctgaattatctccaaattcttcataacaacaatgtttaactccttaaacaaagttgttcacctttgatagatttacatatttgatgtggtgacctggggcaaaaaccttagaatttgaaagttacaaagctccaaagttgagcccatatcacagaatttcagacttagggtgagatctcaaatagggtctttttgcaaataagtccaaaattcagggtttagcttgcaaatcttcatgattgtgaaccatatgacttaaaacaccttactttactagtttttgcactttagtccaaaagtggactaattttgcacttaaacccctagggtttaggtttagggttttccaaggtccttattagggtttttggtatttcatgggtgtaaatgtaattcaagtctattcttagtaacattttataactattttacttaagctttagggttttctctatttgggttttgttttaccccttctaaatcttatttagggttaagtaccctaatccagggttttatttgcaaaatgccatagcaatacaacttgtttgaaattttgcctagtgaatgcactctaggtgtgtcaaaca

SEQ ID NO: 68332 - DNA, 408 bp, Zea Mays
ccgttgtctcccagacatgcatttagctgagctgattctttcttccaatcttctaagaagttggtccctttgatcccgaaaggttttcggctgagggcgtctgctactatgttggccttcctggggtggtagtggatttcgaggtcataatccttgatcaattcaagccatcttctttgacggaggttgaggtccggctgcgtgaagatgtacttcatactcttgtgatcagtgaagatgtggcatttgttcccaatcagataatgcctccatattttcagggcgtgaactatggctgctaattccaagtcgtgggtagggtagttctgctcgtggggcttgagtaagcgggatgcataggcaataactttctcattttgcatcaagacacaccctaagtcttgcctt

SEQ ID NO: 68333 - DNA, 616 bp, Zea Mays
ccaagaagtggtacacgagtggtggcatcttgaggtggcttaatgagtagtttgaagagtgcccactggacgcataccaagtagtcgtcaactactatatagtgcttgagcgcttcatatgtttagtacgaccctcttcttgaatggcacgaggatacaacctcgtggatgtacaccatatgcttgtggagttgggatgatgtcaagaacctaaggcaagatggggatccacaatgttttccttcatttattgtcagctccgtgaggcttgtcgatggcctagaggtgcctagtccactcagctgggatgcacaactatttttttagatattacatctttcacatgaggaggcaatatgtattactatatcctttgacatctagatgtaatgtaaattcactaacagttgcatctttgtagatttggatgtgacattgactactagtttgtaggacacacacattggccccacctaatgcttggttcctagaaggaaaccccacggtaccccctaccatggcacacaatatgagcgtgcctcgggtacgtaccacatctctcattaggaatacattagctacaccaatgagtttgacatccttcaacctcaacatg

SEQ ID NO: 68334 - DNA, 281 bp, Zea Mays
cccctaggcatttgaataaccagtaaagagtccttgaacactattcacatgtctctctgacagttacataagagtcctcttatttccatttctttacgacccgggtcctcgaccgcgcaccgatcgaacacttggccaaaatcgtgtgtacttgctaacggtgacctgttccagtggtgtcgagtacacgggctccatctccgacgctacgcgaacacatctatgggtttaatttgaccaatcctccactaatctctatcggtccgcgaccaccacggaac

SEQ ID NO: 68335 - DNA, 310 bp, Zea Mays
tattaccagactactctagattattataggtcatattgtaataagttcgattttgcgttagacgacaaaactttttatgatattattattattataacaaccatgtgatggcgatatttgcaaaatgtttgatttggatttttgcttgagtgcaatgatcttattgaatgatagccataagaacattaaaataaacaaacaagcttaactttagttaaaatctattatcccctagaatctttctctactcttcacttatcatgtttagtttcataaaaaacacatacaccctattaaaattagtataaaa

SEQ ID NO: 68336 - DNA, 365 bp, Zea Mays
cccaacatcactatatactgcataggtgacgtattatttagggtcttttcccatatttagtactatgccaacccttatggtatgggcacctccttaccgggggctcgggtacgtgactgagccctcggctctcagcagaaatcaaagcgggcacaagccaaacaacatgtacaagacccatgctctgggccataccgtctacatggactcggctacacctcttcaccgtacacgaccaactccagtactccagtcagccctccttgaggctataaaataagacagcctacaacttcaggaaggcagatgaacacttcacagttttctcctccaccacgatattggcacttgcctcaatcaacccc

SEQ ID NO: 68337 - DNA, 742 bp, Zea Mays
tttaaacaattataataaccataatgtaaattcaaattttgggaccagaaagactactgaaaagaactatttattacgtaattgaaaagctactgaagcagtaattattctaattggatcacaaatgttcgctttatttacactagaaaattctaacgcagagacatatgcacgattattcattgattaaaagtgtagcaagtaaagttccatgttttcttcacggcacaagagcagggtagagctgaccttcaatggcggggctccggattgcggctaggaaggggaaaacgaaagcgtcgatagggaatcaagggatgtgctctatgcgagctgagcacacaggcagcaggcaaggcacgacgatgagtgacggcacaggcagagtcacacgaagcagcgaatctggggcagcgagagagagataggcgagaagggctggcgagatgcggtttgatttatagtccgggaagggagtaacagacgccagtatgagagtaataggggaggataaattctcaccgtcaatgggcggaagtaacggtcggcgctaatggacattaaagatgggagagagtgcgacggcattagtgaggagcggtcaagctgatcgcggcgatgctccgactgggcagcgctgagaggcggcaaccggtgcagtatcgcggggcaagtcagcggcggcgcgctgcgacgcagcgagcagcgtgcgtgcgatgcgaagctgctggggagaggaaac

SEQ ID NO: 68338 - DNA, 426 bp, Zea Mays
cccacctccttttaacaacccgcacacacgtttctccttaccactaccatgacacttacatctaaccctattttcacagatgacttcacccacccccatcaatggacgagacactcgtttcagttttgactacctttcccacgagggttttccctccatatatgtgggaggtgctctgctccgccggttaccctacaccccctctgtatactgtgcagctatacgaggagcatcgggtgccacgttgcaggtttggctaaccctggagtctcaccctctacagccgggatggcgttcccttgactctgagactgtcgggtttagggcggacgacaccactgagcccacagcgctaaaagccctgacaaccttctgcgaatatcatcccctagagatgatgatgcacccactgggactcttccccgc

SEQ ID NO: 68339 - DNA, 1032 bp, Zea Mays
ctcgaattgaaaaaaggtacaacgaacagaggggccagtacccttgtagactgaacagagcacttagcagcagatgggacaagattagagcagatgtgagtaagttctctggctactacgcaagagttttaagagagaaccaaagtggcttaactgatgacgataaggtaaggcaaatcatatagagtttaaatcatgttaattatttagtagtgtatacttgtgattacatttgtctaattcatctaatatttctgcagacttcaaaggcggcaaccttgtttgcacacgaggaacagaaaccattccattatatgcattgctggcatcaactgaagggtgaaccgaaatgggagagtatctgtcaaggacattccttccgaggcttaaatgcaaaatctattggatcttcaggtaatccatctgttgaggcacatgaaactgatagtggttctgctggtttgacaggaaaacggccgagaggtcgtgattacagtaaatctgagagaaagaaaggtgcatcttcctcttctacagaatacttaagccgtttgtaagaaatgacagaaaaacaaattcagaggtcaattgaaaagtgtgaaaagaaagacaagtgctcagaagaagacagggaatttgagaaaaagaggtcggaattggaagcacagaaagtaattattagacaaagggaattgaaacttcaagaactcgaatcggcccaatcacgattacagatgctgtgttcaacgaatgaggcagatgttgatccagaagtttggattctcatgaaggaacagaaaaagaagttgcagcagtttatttttaagtttgagtaatttgtaacgttctgtcacatggcgtggacatcattcttggcgtcgacagtttttatgtgacatctttgttgagaacattctacttagttcgaaccataaatgttgcaggacataatagctgtattttatgtcgtgttatgttgtaatagacaataattgtggccaggagtgcaaacatgttagaagactatatgat

SEQ ID NO: 68340 - DNA, 607 bp, Zea Mays
tggttcccacatatttagcgggccactgtttccttcttgtggtgatcactacccccctacgggacggggatgtttggtgtttttgctaacacttttcaggagaaattgttgcaacattgattttcatcttagtatcataaccccaatgttgtgctattttctcacctcgtgtctttctattggtgaagatgaaggcctagaaaacacgtggctcatggatttcagttgttcgtgccacatgactgtaagctctagacagttctccagccttgaccccaatatttgcaaagagtacataacttggggataagtcgagaggtatggttgtctcacatggcatcattcaagtgaacgagagctctgtgctcaaggacattgctttggttttgaatttacattttaacctgctttctattttgcaaatcctggaggatgattatgaagtgcactttaagagtgggctttcttgtgttttggatgcctagggaggtcttgtttgtcggatttcaacgtttggtcgagttttttgagccggttttcccattcttctagccctctcgatgtcttttggtaggatcttccttactggtttggaagtggcatagga

SEQ ID NO: 68341 - DNA, 693 bp, Zea Mays
ctagatcttctaggcatgtatctccttttggttgttgtgttggctctttgcgtcctaacctcttgcctcatctaatcaacatacacgcgcaggcctcgatataggttgtggcatagtctcacacgctgccgtgtgtaggggcgtatggacggtgttgtcccatgtcctccttttgtctcttcatgcctcggtaacgcacgaggaacagtagaggttataataaggggcgtccaagtggcgcattgagtcaatgcccttgccttggcaacgtgcggataacagtgtatcccatatgttgcagactaggcgtgtcgcgtgcagttaatgcgggggtatgccacttgtcctttggcgtgggcaagtgcccatctcgcctatgcataacactggtgggccccatgccagaggcttacactaggcactgcccaacatcttacgtcaggtgtgcctagccacatgtcggcaccagacctctgtctaggcagggagaaggcctgggacatgtggcgacgtggcacctttgggctttccctgactggggacccgaatcatgcttgagggggtccagtccccagtcgtattggctcagacacgtggcgcaccgaacctctctttggcttgaggtccggatgacacatgtggggtccgagaccactccaggggtccataaccgatctcgctactagagggtgc

SEQ ID NO: 68342 - DNA, 572 bp, Zea Mays
cttgtgtatgtcctcgctacacgtatctcaaacatatacaatgtatttgtttccttttgaccctacagtagacaaaaatagacgttatactacggtaagttaaatattatgacataataatattctacgtactcaccatgcatcctagtgcctcttttgcctctttcatcttcctactgtgtagaagcttcaacatttgcttggcgaattgatgtagtggcgtgtttgcatcgacatgagcactttttacgagtttgtttatgctctcgctatgctgtgtagagaccatcaacccacaataatcatgtttgaaaaaagctggtatccaatcattacgaatttcatacattctggaaagactgatgttatcatgtaggtggaaatcatcaatcagcattgcccaagcagtctcaaactcagttacagttaaaggatgatgtattatagattggaaccttgatttgaaatcctcttcctcaaatctagcgtacaactcatttaaatacggcatatacctgttctgaacatgccacaaacacaaacgatggattgtgtttggaaataccctgcct

SEQ ID NO: 68343 - DNA, 466 bp, Zea Mays
gtccgtccttctgttcctcgatccgtcgatcctgatcggtctcgatttgtcccctgccctgaggcgaccctctcccttttataggctgggataagcggtcggcggcgacttctatacaaaggagttataaggtagggtaaaaccagcgttttacctcgggcgagtccatgcgtactcatggggcttgaggttgtctggttgttgtgtatttatcatagtgggtgacgtggaggcgtcgatggtctcagacgccaccactcgggctacgtcgacccatgacctccatagccttgggctcggcgcggctcgtcgtgtaatgccatgcatgcgagctatttgttgggggcctacactgccagaggtccttcgattagttatgttacatgattgccttaaggtgctgaaggtcacttgttgacgaagaaacaatcaattacttaacacataactttggccatgagtaaat

SEQ ID NO: 68344 - DNA, 376 bp, Zea Mays
ccacggtcgactgtgttgtcccatatgcatgggggacacacaagcatatcgattggagcatggtaaaaaggtcttattctttgattgtcatcgacggtttcttccatctaatcacccgtttcgaaatgatacgaagtcatttagaagaggcataaaagttaaagagggtccaccaaaacgtttaatgggtgaagatatcatgatacaacatcgtgcccttcaaagggctgcagaaggtcatgagtttgaaggctatggtcaagatcacaactggactcatatttcttttctctgggaacttccgtatgcgaaggtattgattttaccacacaacatagatttgatgcaccaagagcgcaatgttgctgaaagcatc

SEQ ID NO: 68345 - DNA, 284 bp, Zea Mays
ccatccatcgattgagagaccgagcggtgcgcggacagggacaatttacactccaacatgggagtgtgggacacacaccggtgcctgcctggctagggctagtcaaccgatcggatggaagctatacgtcgtcgtcctccgatccgtcccgcgtggagtacgtacgaacgcagtgcgcgatccgcggggaatgggcacgatcgcacgagaattccatgtccatgagcggtggaatccgagggcgggcggctatatacacggaattcttccctagtactctctcc

SEQ ID NO: 68346 - DNA, 571 bp, Zea Mays
ttaggcatagagtgattgattgggaaggttgtgaaaatataaatgatgctgatatgattcgggttctaagagcatgcgagcagaaggggatgaaggatatcttgactatggaacatccatggaatgatgaggttattactcagttctatgcaactctttggataaagaaggttgatgaggaagcggatgcgtacgatcacccagtcatgtacttctacctctagggagtttgacacaaagtatgttatcatcgttttgatcatatcatgggtttctctgacgagaacatcaaagggaggaaccttcgggttcatgatattcgtcaacccaggtgtgaagagcaggaagtggtgcatatctcaaatgagagggtactagattacttctaacatgtacaggtactatcagtacctcaactcattatccaggatgacaatccttcttaagcaaggcaaccagatgaatgtccttggggagagtcatgtctttatcatgcttatgactcctacctgcaccggcaagatcaatgtttttgatacgatctaggaagagattattcgagcatcttggt

SEQ ID NO: 68347 - DNA, 673 bp, Zea Mays
tccttgggagcctcctctccctcgcttcctgcctcgtttgcctccatatcctgatggtgcatctccaggtggtcgttggcttcctcaagctcctcctgcacatcaaggagctggatctccaggatatcgatagtgttatctcggatctccacctgctgctctaaagttgcgatgcgcaggcttaactgtcccacctgtaggtctttctccaccaattctaaagacaagtcgaccacgaagtcctctcaactattgagggtgagcttagtggtctgagcaaggttagtgaggtgtgccatggcatcgctttgcagggcctgtaggcggtacagtgcgctcatacactgaacagtgatcctcccaacttggtcaggatgcatggcccacacgtccttcatgtggctcactcggttgcatcacatggggtcatccctcttctcagcggggaagagtcccagtggatgcatcaccatctccaggggatgatatccgcagaaggtggtcaggttcttcagtgctgcggcctcggtggtgtcttccgccctgaacccgatagtctcggaatcaagggaacgccaaaccggctatagatagtgagcctccagagtcagccagacccggcaacggggcacccgatgctcctcgtacaactgcaccgtgtacaaagggggtg

SEQ ID NO: 68348 - DNA, 975 bp, Zea Mays
atacccgtggatcagcgcgagggcaggtcctgctgcggtagctcggtttcttggccaatcttgagtccgatgagcaattccggcaccaccagcactacacctccccggttcgaacgcgcgcacgatcagtgcggcccagaaaagcaccagggaccttgctccagcctcgatcgtcggcgataaatcgtagcatggcggcagtggaatcttcttccggcggcgatggtggaaaccggttgcgtgacgttgttcttttgcgtggaagaagcgattggttcaggcgcatggcatgggcgacctaggctttagtagttcgagggtgaggccacaacgaccacgtccgaagtgggtggggacgacggggtcggccatgcacggggattatgtgtgaggtgagggaaggaagttgtcgatggggaccacctatcagccacaggtgacccgacgtgcgcgggcgggtgacgtcctgccatcgagacctacatgtcggtaccaagttgtgggcccgggctaccacatgggccggcccagaattggcctagcacaaggtttccttctctttttttcttttattctttttttctcatttgttttcaaatcaaattttcaagtattcaaactaaattcaaatttctgttttgaactccaattctcaaacataattccaatatgaatagtacttccactgtttgccataatattattttattattattattattattactttccactcttttgctcctatattttttagagctcaaatttgaattcaaagctagatttgttttaattataagtttgagttttaatgcacaaacaaaggaatttcagcatgatgcataagttcatgtgtttatttagtatgcatttaaaagaaaaatatgcctcaataacaagtcacataatcaaatttggctcctttattatttctcacatgactcgagtcctagagattagattctagggtttaca

SEQ ID NO: 68349 - DNA, 825 bp, Zea Mays
attccgtgacaacagacatgtggttacctgtgaaaggcaactggctattggggtcgatgggaggaatgaccactgcagcagaattttggttcttctgcttgggcaccatcgcaatctcgttagcggattgaagggaagcaaaatcagagggaagcagagtaatatttggaggcagaaaggtgaagttagggctcagaatgcagaggcgtgcggcgacgtgatataaatggggtttccccgggtcagacaccgtttctaaaaagtgccaagtcatcactcgaaaaaagcaagacgtcctcgcataactcggcagctacctctaaatcgccgatgtggctcagcataactcggcagctacctctaaagcgccgacgtggctcagaataactcggcagctacctctaaagcgccgatatggcccagcataactcggcggctatttctaaagcactgatgtggcctagcctaactcggttgttacctctaaagcgccgatgtggcccaatataactcggccgttacttctaaaacgcccacatggtctagagcagctcgacagttatctctaaaaaatgtcggcaatgcataactcagctgttttctccatgtaaacgccagcagaaccaaatgcgactcagcaattaccagtcattactcgggtgttacctctaagaacaacggcaatgctgggaatgaatacaagctatcgattgactataaaagagcgatggaaaaacaaagatgagatactcagaacaagtcgaaattttcttcaatatattgataagggaagtccttccacaaactcaaagaccaactcattat

SEQ ID NO: 68350 - DNA, 438 bp, Zea Mays
atgtccaagattaaatatatgtgatgcctaaacgtgtaatccacggcgatcatcagatccgaaatcaacggatgaagaacgatcgtgcccctatctgacctaacttgtccattaccgaatcgacgtcatagatctaattgagcgaaacggtgcccccagatctaatcagaaccatgcccttagatccaacggcctcgcgagcttctccctcaccagcgcccaagcagcagtagcgccgcccaacccacgacagcggatggccggagttggccctacccggcatcccgaagccctaatcctatcatggctacttctattacggagaatggattatgacggccctaattagatactccataccaggaattaatgactccatagctccgcccacggcgtcagacgaatccgcgggtgcccgaggtcgacggtgagcaattc

SEQ ID NO: 68351 - DNA, 563 bp, Zea Mays
actgagaacaccaacaccaagccatccaggtcctagcaaaagacaagatttagtcgtcacttgattgggaatctaatcctggccctaaaatgatgcacacttgctactcccttactctagcaaatccttaatcttcaacttgaacacttgctaatgctctccactagcttctaaatgtccaaggtatgtctatccttgtatcttgccaaagagagcgcaaaaagggccataacatccgacaactgcttcaacccctcattggatctgacgttttcaacacatcattggattttgttgctagattagttaggatcaatccataattaggctatcaattaattaaaattttgaaatattcacaattaatgccaagtgatgtgctccgtacgacgtgatgtgtcaccttttgcgacacaatgacggttagcaagagtataagacataaatgtgttgggccttagggcacatgggtaaaatatatgggtctaacactgacaacagtacaatcattaatttacctctttgccaccatgggaacctatctagattcatcctatagtcta

SEQ ID NO: 68352 - DNA, 875 bp, Zea Mays
catcgattctggggggaggtagggctagaggggccttcttcttcttcttcttctctgtctggcatccttggttagtggacttcttttggatcttctttttgggggcgagtgccttcagcttcttgtcaaagtctgacttcaaggttcggtaggcctcacgggtgttggcttcctcgccttccgctatgctgagactctcctgaagggataccttctcttgcgtaagctctttgacttgctgctctaggcattccactcgggagtttaggtgggtacaatgggaggagagctcatcgtagtggttgtcgagggtgtggaggtatccggccatgtagacgatagtgggatcatcttctatgggatctcctcctgacagagcctggagtcttttcttccaggtgggggtgtttttgttgctgggtgggaaatatcggaggggagtttcaaaggtctctcggctatagttttggcacagttgtttgagggcttttcgagcaacgctctggcatgtgtctgggaagcggtgcccgatgaaggtaatttggaaaggagggtggtttgggtagttccggctttctcccaggtagactgccatagagcacttttccattccattttcacggtactccttccagacatattcgggcttcttgcggatccccaggcgtagtgcgcagcttcgaagcaggtgaggaaagccttcctcctctgagcaataggaagtcctaatcacccaggggttttccatctggtagacgaaaagaaaggtctattaatctcggggaaaaggggaaagagtgtttcttgaaggtaagaggtgtttttcttgttaaggcaacttttaaggtcagggttgtggtctacggccagttcta

SEQ ID NO: 68353 - DNA, 278 bp, Zea Mays
ggaggatatactacaacttgatccatttgagactaatatgtttgcttgactgattttgatatagtctgagagatggattgaatgggaacatgtggacttggacatagaataggcttccactgcactctagtatcaatgtatcttgttccaagtccctctctgtgtttctctcattgcctttggttttactcgggctttttgtgaggcaatgaggttaaaggggccaaaaagttcttccgttttggtgcttaatgccagaggaggagaaattaaggcca

SEQ ID NO: 68354 - DNA, 279 bp, Zea Mays
ttggatagcttctgttactgtaatgattcttcgcttctttggcccagctgccttcttcgtaattaaaggctcctttcccttctgaaaagtttcgttagatgcggccccagaggacttagcttggtaggcagggtttcagtcattacctttaggatttcttccacgttgacagcagaaggcgttgagggaatttcctcagtgggctcagtcgttttcaactctggagttgcagcttttctctttttcaaagctgccaccttcggttcaggagtggttttt

SEQ ID NO: 68355 - DNA, 614 bp, Zea Mays
cacaacttctctaagactcaggctacaccgcacggactgcgggttaatttgactctcttcgggggtctctttagcaaagtctatcggcgaaggggtatcagacgggctgagcccgtccgatcggatctgcaaggctctaattacattgcggttataactgaaccggtacgcagctcaagccgttggatcagagatctgtgatctggattttattagggtgcaaccagatctagctcatccgatatctaatcaacggctcggatttaacctgtcgaatgggtacgccacttctaatccttatcgcccaaaaccgatcggacgacaacgacgctcatctaatccctaccgctcgatctcgcatcagtggttactggcatcatcccccaacagagcaaccagacggcggcgccgcccagggacacggtggtccatcgccgtaggagttcaattcgagtgattttgtaccccaatcacaacaataattggtgctacacgattcttgtgacgtgatgactacttgggtggagtactcaccagcgatgatgtcgtggcgaagtctgtccatggtgaggagcgggtctgcggcgacccgcgacttcgtcgaggaatccccg

SEQ ID NO: 68356 - DNA, 574 bp, Zea Mays
cctttgttcaaccagagctgcagtaccttggtcatgtaatatctagagaaggggtagctactgactcttccaaaactacagctatgctggcttggcctatacctcagaatattactgaactaaggggatttctaggtctcattggttattatagaaagtttgtgaaaggctatggagtcttagcctaacctttgaccaagttattgcaaaagcaaaacaagttcaattggggagaagaagcacaacaggcatttgaggctctcaaacaagcaatgactactactccagtgttggctctgcccagatttgatattccttttattgtggagactgatgcttgtgatctaggaatgggggccattttgatgcaagaagggagacctattgcttttctaagcaaagctttaggtgaaaagaacaagcacttgtctatatatatgagaaggagttcttggctttgattttggctgtggacaaatggagaccctatcttcagagagctcctttcatcatcaggactgaccaccagtcccttacttttctgggagaacaacagttacactctgaacttcag

SEQ ID NO: 68357 - DNA, 326 bp, Zea Mays
atggggcctgtgctcttgacgtgagccacacaaccgaaggtgcgcaggtgatggaccgccggcgtcctcccatgccatagctcatatggcgtcttgctgccatttcccttcgtcatggtcctgttcagcaggtagacggtggtggagaccgcctccccccaaaacgtgccgaggaggccgctggccttgagcatgctcctggcggtgccaaccaccgtttggttcctacgctcgacgacaccattttgctggggtgtatatggcgcggtcagttcacgcctcacgccgagctcggtgcaatagtcattgaagtgacccgccgtgaa

SEQ ID NO: 68358 - DNA, 435 bp, Zea Mays
gttaggaaggcatgggtatatatgtgtatagtcattttgttataaaagatgggtaggttagggcaagaatagcctggggtaagaaagtttatagtgagaaaggactccttgttgagtggtaatgcatttgaagatcgagtttgacttctctccttccttgacgaggttgatcttgttctttttctggtcttggtctcattgagtcggggtcaatgtatatcatctgagtttccggagtatggttacgatagatatgggtgagatagactacatgatgtaggtcaaaagtttgtttgaggttaggtggagatagatagattatgcaatccatcaagactattggttgggttaggcctcatgcatgtgactgagttagtttaaggcattggtttagttttaagttcatgagggctatggccttatcttttgtaccag

SEQ ID NO: 68359 - DNA, 642 bp, Zea Mays
gatcatgtgttgttgataagatttacggtacctacacagcgaacacaaccttcttttgcctaagcatcttgacgtagacaacgggcatgcaacatgtcgtattgaatctagaacgcgtgagaggtatagtcgtgctcgatctgcttggagcactaccgtgcattttttctagaatcagatagccatttggtgcggctgtatgcccatgcgctagcttcactagttgatgttgtgatgtgttgcattgccattgtagacacatcaaataaataaaacgaaattattgcttagaagtaatatgttttacatcgaatatatatagtttaatgtgctttgagctagggtgatccgtggcccacacgaaccaccaagggcgtagctaggtagaagatggtggatgcacatgcacccacgaaaatttgaaaaactagtgatttagatcattttttcaccatatatgcacgacctataagttattactatatatacaccctcaatgtatttgcaccctcctctaattcgttctagcttcgccattgtggaccaccctctagctttgcatctggctgacgtacacattctatcgtacttaaacgaactagtaaaatgcccgcttgaggaggtgctcgttgtaccaacatc

SEQ ID NO: 68360 - DNA, 509 bp, Zea Mays
aaaagcccaagttaaaaactacaacctagttttaattagattgtcgtttttgaataactatagaataccaaaaatatagataattaattaatcaattaaacttgcgacatgactagataaaattactactacaaaatcgatgatatggcgcattctcattggctgtgaagtcgaccacactgatgaccacaaataccgtgggtgtagaagatccatagaggaatgtgtgggtgcggttttgcatttggtggaatcgtgttgcatgcagctctgaatttgcgtggtgcatgcaacagagtcacgatcaaacacatggcaagggaataatgggagagaaaatagccatgcatgcaggtggggcccacaggcactctcttcctccatcttctcaactgaacgcatgcaaaacggtttctccatctatcggcgcacacgcagggggatggccggctgtggggtttgaccggtggccgggaaaagctggccatgagccagcggccgcggctagc

SEQ ID NO: 68361 - DNA, 387 bp, Zea Mays
gtttgtggattgtggatccatatgtggttggccaagattagattagagaaaatcgtttgtgcgccgtcgatcccgtgttggacgaccatgatcgcgtgtagcgtaccccttcgtcaaataaatctgagacgtaggatggtagttcgatgaccgagattagatcccatcctcataaaaccctagccgcatgattttaatcggatgccccacgttgcgtaccggttcggagtgaatcgggatctaataatccgcaccgtccatttgtgatcgtgcggcccagatttgatcataccccttcgcgggtatgttttactaaagagcccctggaaatttgaaaatagaacccacagtcccgtgctgctatgcgctgagtctaggaaatctttg

SEQ ID NO: 68362 - DNA, 867 bp, Zea Mays
cagacaagcagtgactcgtcgttcaagatagcaatcgaaatcagggattacaatgaccaaggccagcgcctcaagattttttcatctacaacctgaatctgaaactaattctcaactccgtactaaaactcatgacggggcaggcggctacccgacacaacacctttgcttattccctagtcacaacacgtactgatcaacctcgaggaaccatgtggcggctaaatttctcattgagtatcaaggacgacgaacacagcggacaagatttggatgtcagcatgccacacatgctcaggattttatcagatctgacggcctagactcgaacctatcggtgatacataaagctaagctcctctaatatttatgcattgatttaattattgtctttacaaaaagttatttcctacgtatcctcttgtttggtctcatatgcatgggaaaacttaacaaaatacttcggttgatttagtatatgctattcatattttacaacatgctacataatattcatgttgtctgttttatagaccactatctgccagcctagaattcgaggactgcattactcagttcccaaacactgggacatcattgtcgactaattaattcattaactcgggggctgccaatcagcttttggtcatccgggttatggatttatcaaattatttctgaatcatttggctattgaattgtaattaaattatttttggaatatccgagttattggaacagtggtattattcatggatcactcgaattgtctatattatttctggatcacctagactatttctggatcaaccaagatttcggatcactcagtctattcctggatcactctgattattttggtttttt

SEQ ID NO: 68363 - DNA, 553 bp, Zea Mays
agctgtggttacaaggcctagatatgaagcaaatggaaattgcacatttgatggtaaaatagggattttcccttttgtcaaggtagaaccagcaaaaagaaagagtcaaaatagggagagaggtaagacaatgtaattttatctgcaatattttcatatgctttacataacattgtctttgcatttgcaggtgtccttgtaacaaaacccatgacgtcggtaacaaaggatgtgagtcgagactttctggtgaacaaagttctaccagctttgaaggcgaagtggccagctgaagaaagagggatgccaatcttcatccaacaagacaatgcaaggactcacattggtgtagatgatccatcgtttgtgacagccgccaaagaagatggttgggacattaggctaacatgccagcctcctaattcacctgatctgaacgttttggatcttggattttttgctgcaatccaatctttgtttgagaaaggtacaccaaacaacattagagaaattctcagaaaggttgatgagtcatatcagaattatcctgtgg

SEQ ID NO: 68364 - DNA, 551 bp, Zea Mays
gccagccctacgaagttgaagccacccagcttcgtctacgctctatacgctgcttcgaatgaaggctagcttcgctatcttcttagagtacctaaaacatatttgattttataatacaaagctttgaagaccttcaacaatagagacccccaacaatagcccctcacagaattagttttttataacgagcacaaaccgcgaaaagaataaagcaggtcatgcgtcgaaggtccgaaaaacaccttcccttcctcgttattagaccaaccttcgagcatcaagccttagtgcgagtcttatggtagggtataaaatatgtcatcttagagaaatgatcgacaaccacaaaacactatccctccctcttttttctaggcaagtccaaaacaaatttcatagaaataacctcccaaggtgcatttggaacacaaagaggcatgtaaacaccatatgggttaagtagtgacttagctttgttgcacgtggtgcaacatgagatgtagcgctcaacatcacgccgcattcgaggccaaaataagtgagtggatagc

SEQ ID NO: 68365 - DNA, 321 bp, Zea Mays
gcggatgggaaatgccgaaggaggctgtcgctggctcgagccaaaatggtttggtttatctgaagtatacctttcgatgcaggagccaatttgatgaaccgaatgatgactggctggatgttatagaagcaactagcgatgagctgcttggagcatactcgaaggcagaagatgaagctatgacaactgccttcggtgctcggggcaaaaagagattgaatagggtgtttgatgttatcgggtttgtgtacccagactattgttatcctttgcgaaagcaagggaagaagaggaaagctgctacctcggcaacttctagtg

SEQ ID NO: 68366 - DNA, 620 bp, Zea Mays
aaaagaaatagatttgttagcgcgatcgtatttgtaagcaagatgtaaaagatgcgaaaaagaaggtgagaagaacctagtggtctcccttcttcattaattccacttgtcagatagccctgagcaagtgttccagggtcgaggtatagaaacaaactagggcgctgaaacttcatcacaaattgagttgttcacgttgctcgatgctcttggcattagctggtgtcctcttcttgttgttctactcaataactacaggcaatgtacgccagctaactggtatgcagaaggggtacgggtcctccggttggtcggaggaagtcccatccaagattcatggcgtttgctcgaggtggagtagaggacagtaagcctgctacctctagccatgagcaccttggttagatgtgccgtaccgccaacgaagtcgacgataggtggacattggcctagctagggaatgtgctcgtatccgatagattgatcgaatgcaatggtgtatttgaaccgaccgaaagaggccaagatcgttggccaagtgtccatcaccttgcatcgttcgatttttttgtgctccctcaaggcgcaatagccacgcctctcgaaggttagtaaacaac

SEQ ID NO: 68367 - DNA, 299 bp, Zea Mays
agcgaaccatactagatgctgccgcaagttcttgctccaaactgtagcacccagacatcattggaattgttaaatgttcctcattataaattggattgatacgttcatgtgggtgctgagcttctgcgaataacaaaggttccatttctccacccttttcaatcaaaagatgtgttttattctgtagcctctttgttcttagacattgcaatctcatatctacttctttcatgcttggtctatgccctcctttggatcttaagcacgcttctataagtgaggagatatcattaatctct

SEQ ID NO: 68368 - DNA, 1570 bp, Zea Mays
cctccggcgaagacatccttcaggtccccctcgggtgactgtgtaatacccactttgtaagaaagatctaaaagagaaattatatcactctacatctatatgtactaccgatgtttatcatttcatgtggacacattacttacacaaataaataagtaacaaaagacactcaactaaatcatgcaccatgctggtttttcgttttgtgtgcattttgtgacaataatgtaaaaataaacatgttaatacccaaattagaatttaaatcctaaaggaaaatgctagaattgaaacaagagaagataatatttacacataagatcaaataaatatataaaataatccaatcaggcttatattggtatttggaattacagttgatttaagtatgaacttcacacttataaatacaaatttggggtttaaattcgaaatttgaaagaaaagaaaataggagataaaagaaaaaaagggggggaaataggaatgcctcacttgggccaatttggcctagccggcccatttggctatccctccgcgcggcctagttctcatctacacgctggggcgccgacaacctgggcccacttgccatttactcacagacgcgtctaaccagtggtgttctctatgccatgtggacccgagaagtcagccgaaaaaccttaacaaccatggtcacgcatggcgggtgcgccggcgtagctgggagcggactcggggtcaaatccgtctccacctcgcctctataagatgcgccgcaaaccctagacgactcctcttccacctccgtgatagccatcgaccgatagcgccgtgagcgagagtgctgcgcagagaacgtgaagagaggctcgccattggtgattcgtggccccgggggagtttggccgcgattgtggcctggtggaagaccacgaagtgtggcggggcatacgcaaggaagtttcgggctgatcacctgcgctgtggggcggattgctcaccgacgatcgattcgcaccgctgggccgccagtcctcgtcgatagagcgcgatacttcgaaattggaggtatgatggtggggtatgtattgggggtgtgcaccacatcgcgtagcaagttgtaggttgaactgcggggcaccaagcgctgagaatcgaccgcactggcggtagctccgccatggggtgggatgacgccgtcgtcgtccgtgtccagagggagaagacgatcgcgggccattggatgatccctgagcggtttagatcaggccgcgtataccggttcggttcaacgtcacggaaccgtccgatctaaatcgtgtgcacaggataagatcttaggttattaaatcgggagcgttgcatttggatctgacggctgctatcgcataccgcttcgcgggagatcagatctaatcgtagtcgtccctggttgatctcacggcttggattagtcgataccctttcgccctgtcgtttttgcacaagaacccttagaaaactaagaaaccaacccgccgtccactcgggttttttacttagtcttagaaaactttggtttagccccctgacctttctggaaatt

SEQ ID NO: 68369 - DNA, 363 bp, Zea Mays
atatatatgttggtgagagagagaaaaacaacaacaagtcccacggctggcttgtcgggtgagctgcaaattttgccacatgacgcgatttcctgttaggatcaggatcaggatcactgactgacacacaagtgcagagtaccaggctacgcggccactagaccagaccagagcacgcccacgtcttaaccaagctactaggtgcgtgatggaggtgtggtggacacggccggccgcattcggagcaagtggttagcacaccgacgacaggtgacaactgacagggcacacagcacaagcattttccggttattaaaggccgaggcagacgctgcccgctggcgctctgcacccggttttcag

SEQ ID NO: 68370 - DNA, 806 bp, Zea Mays
gagaaaccaaaattcaagctctcggaggcacggttgctaacgattgttggtggctaggtgggtgatgatgttatgcagctaggggagggctcaatttataggtggagcgagcggtggccgcgaattttggacgagacacacggcggtcggaagtgaggaagaatgctggtgcagtgaacacgtgttcaccgtcgtggcagtaactccggtggtcgacggggagtttagagggagtcacggcgatgcgatggcgtggttaggacacgcggtggccaacagcgatggcacgacgacgttgagcaactttacccgcgggcggtgagccaggggaggagtaccgcggctgaccggggtggcttccagcttgacggcggcgacgatcttttaccccgagaggttatccacaagccgcgagcgcgaatccggacggcggcaacacgaatcgtggcgaagttcgtcggcggggagctgagctggtgttctgatccgatcggctactgtaccatggcgagtgctccatcagacaacctgacagagcaacttggagcatgatttattctcaatttccaatgacaactcctcccaagctcggcagcaaaattgtagagctataaactagcaataattcgactatagggcttgaactcatttgagcactagatcaaggttgaatccatactcaaagttggctctattacactgaacatctgaatttcagagtggaatcggcctgacagccaaactttaggcttaattatctccaatattttcttaacagctgtgctcacactcttaagcaaagttgt

SEQ ID NO: 68371 - DNA, 577 bp, Zea Mays
gttttacaagcaaacctagctagggaagagatgaaacatgaattggcatctgtaccataacgaatgtccgatgatttgtctctataattaatgtttcaaacttggtgtttgcagactacttagactcttttttatcatcaattccaccatgcatgaagtcaaagaggatcactcaattctctagagaccgatgccatctgccctttggaaacctccacttccgtttttccacgcaatccatcccctataaccatgataggcttcaagctccttgacaataactcctcagccaggaagaatacaacaacgaagagtgatggtgacgagggctaaaacgaagacacctaacctttgcatatctgtggccaatggacaaagagcactgatatggtggcgggggtggaggaggaggtcgacgatgagcctccaacaaagaggcaaaagaaggatcctggctccaacaatgaggattcttattagcttggtttatttgaattgcatgtagtcaatataatgtttattaagagatgtatatgtattagttttaaatcacatgacataatcggttagaattttt

SEQ ID NO: 68372 - DNA, 323 bp, Zea Mays
gttaaacttcaattcttgtcgtagctacagcacactttgccacacaggctcaacaaactcttcctgattccatccagacccctcaccatcgatccctttgagcacctgttcatcacagaggtaaattatatccccaataacaacgtttgtgatatcaagcaaaaggttgctctcatgtacaggccataaaattatctggaatgtttatttgccacacaagctcgacaaatctctgcaatgtttacaaaatcaaacttaagaagtaacaatgagaaggaagacaggttagtagaaaaagtattcgaacagacattggactttgc

SEQ ID NO: 68373 - DNA, 462 bp, Zea Mays
tttgcaagccaatgcaccgctcggttgagaagcattttcaattcagttggagctgcatctgaggaaaccaatctcgctgccgaagatatacccggagcactcgaatttattgaaaaggaggtagatgtccttgacgaagttataactggccatggagacttttgtgtgctagttgcttctcgtggtatagctaccatcttcataaaagtcggatgcaatcatgcgagagctgtcaacaggccaaatttcaatctttcatcatcggatctggttgacgttccaatcgaagcccgaagcatagggaacaggtttattacccaaatttgggctaagggcgggcgtgaattggctggagacgaagcctgaaaactgcttaacacagtatgggaccttacctttgttcttttaccttgacctttccctatcagatttttgattaccttgcactttgttattctgcag

SEQ ID NO: 68374 - DNA, 1059 bp, Zea Mays
gcagtctcaatggcaatttcacatgccaacagggacaccgacagagcgcttggttggatagaaaaggagttgggcgaagtcgaagcaataatcaatgcccgcagtgattattgcgaaatgattgggtcacacggcatggattcggtgctctagaaggttgtctgtaatcatgctaaagtcgtaggagaagctaacttcggcatagccgtagaagatattaaggctcctttgaagagcgtactcggcgttgcgaaaagatttctctacgagttgtgggacataggtggccgacactagctgccttagaagacgaagaattactttactatatattgaagcaggacccttccgtgctcattgaaagtgtccacgtttcccaaaaaaatcagccgtccgatggcctgcaacaatgcaaatccaaccatcaaaagcaagtctgtttccttcactctaccctccgagtgctcttttctttgcagccgctaccagagccttctggaccggggatgaatcgaccggagagaatgagagaagtcaggggacgaatcgaccggagagaatgagagaagtcaggggaggaatcgtctccgtcgtgccgccatcttctccactaagttgacgccggtcgctagtcgccgctctcgacgtcccccctcctccgtcgtccactgcccttggcactacaccagtgtcgtccgccgcatcatcgttcctgcttcgccgcatactcgccgcgccgtcgccgacaaggaccatccgggctgaggcctgctaaaatctccaccacttctctgactacttcgtcatctcctccacgttcgacatagatacaaatgtcttttcccccatcggagctgagtacatccgagtgtcctcactgatagggtttgcaaatacatatgccttttctcaattggaactccgtacacctgctcgcacttgattatttctcattgcagctatcagtcgtccgttcatttcacgtaggaccttcctgtgcttccagattgttaatggcgtccggtcaaaaataagttagctataccatcctcaccctcg

SEQ ID NO: 68375 - DNA, 478 bp, Zea Mays
ttatcactgtgaccatcgcgatgctcacggagcctataaatccaccctgctcccacttcgtttgtctcaaatcaaccaagcccagctcttcattcctcagttgtgaatccaaccagccactagccatcacgttctgtcccccatcctctatgatcaacggagttcccctgaaccagtttcttccgccgccgtgaagaactcttccatggctagcactcctcgggttagtgcatacccaattgattcgagttcttgcttgtttttagccccctgttgctctcggagccggccaattggagtttacctgagtctcatcaccggaacacccctctgctctgtagaacgccgccacgacgccctctctgtcgaccctcttttccactcttgcccagcccaaattctagcatgtacgtaaactctggtgaacccgtgaagcttacccaagcttcaatttagtcagccatgctttcggttatcc

SEQ ID NO: 68376 - DNA, 927 bp, Zea Mays
gtcatgtcggtgtataaccctatcgtactagcacaagatgtgctccagtggatccgtcagctccctcgccattgcatcaaccattgggtcgacttttgagaccgcttcgccgccaactatcaatcactatctgacaagcccgcatagtcgtgggacctcaagtctatcaggcgcaagaacgatgagtcccttcgctcattcctcaagtgtttccaatccatgagaaaccgcatccctaacttcatcgaaacagtgacgaccgaggacttgtatcaggggtctcacgatagggccttcctacgggctatccttcaaaaagccctgacgacctccgagcaactctttcgggaggccgatatctacatcaccacctacgagcaggcccacaacctcgtcgatcaaccaaggactatgccctagaagaaggaggggaacccacataggacaagcgctaagacaagaggctaagatatgaagttcatgcaatggcactgccgacgacttgtgcgtgtagcacctcccgcaatagcaacccacaaacgctggacaaaatactcaatgacccatgtccttatcacaaggagatgtgccatactctgcgtagagacttcaagaattcgattgacgatggctggcccttccagccgctccctccaccaccctggtgggacctaggtacacaacctcggcagcaaggtgcggccagacgggagtttccttgagtcgataggaattcaacatcatctacgggccatggatacaaggagaacaagatgcaacaaaaccttaccaattgttaagtcctggtggccacggtcagtcccccgacaccgtataggtggtcggagaccgcgatcactttcaatcgtactgatcagtggcttagctttgatcatccgagcaagtatactcttattcttaacccaa

SEQ ID NO: 68377 - DNA, 698 bp, Zea Mays
cccagctcaggtgatgacagaggaaaccactctcaagggcattagcagagctctcagacttcagggacgcaacaaagctcttacaggccaccgctctaagaggtagaagaggcagaagcttcggaggaaggttcagctcctagcccaagagattgttctatttattatgtggggaagacaaaggacatacaacaaggacgtgccgagtcacgatccagaagcagaaagagatagctaaagccgaagcaagacagaatcatgctaagcaggtcctgcatactacttagctattccccatacattcccgagtatgtgggcaaccaacagcccacaacatcagttgctttggcaagccactctcaagctgcatgggtcctgctaccaccaccaccacctatgacaccagccttgacccacaatcaacagctagaagggcaccgccaaacacagcaacaacgtgacgcgcgtgaagaatccgaagctcgcacaatcaatagcaatgtgcccgagtcgaggcacatttactgaagtcacactggggctctattacaaaaattttcattcctaatgtactctttatctttctgtccttatgttgctctccttcgaagacaatataagaaggtttaaccttcgtcctcttgtaaaaaatctatggttacaccatcgagtgtaacaggaagggtgatgaagctcca

SEQ ID NO: 68378 - DNA, 388 bp, Zea Mays
agaagatgatgcgtggggctgttggatatccatcttgcggttgggattagattcgggcgtgtgaggttttgagccatggattcacgaatcaggggccaggatcatcaccgcatacccttgtcgcttgtgagatcgtgaccgttgattgcgtgctcaacaggttagattagatctaggggaaagttggccctcaaccattgatcgtgcagggaatggcctagatcgaatcttggcgtatcccttcgagtcattaaatccaaaccgtgaatcctggatccgatagcctagatgcagtaccagttcgaaattaatctggacctaatccgcaccgtttatttgcaatcgtgcggcccagatatcctgataccccttcggccgcctattatgc

SEQ ID NO: 68379 - DNA, 514 bp, Zea Mays
ctcgccggcaaccacctcctcctctccggtgatctgttctccggccgtgctctggcgatcctccgtcaatccccgtgctcgtgcttccctggtgtgtactcttgtcttctcctctctcttctctctgcacattcacccagtgaagcttcccctttttcctccctttgcgcaaaattcaaatctccgtaaattcctgtgaatccaagttgtgctatgtgtatctctgtgtgtcttgagcattcctacaggttcttagctccttcgggagggttttcacacctcaaacagccatttccctgaaaccctaaaccaccaccctccacgtgttcggtgaaatgcccaaaccagccaaaaaatgctccaattgaacccaaatttttcaggcaccttcacaacacttcctgtaacacttttgccaaatttcacgccaatccgagattccaggcttcaatttcactcaattccccgttttgagcgatcgtttttgagccgagtgcccaaatctctttttctt

SEQ ID NO: 68380 - DNA, 1599 bp, Zea Mays
taggtacttacgtaagaggggtagcctagaggatcaaagctcatccagaaggggatagggtggaacaccgtccctacctccctaaccatgggaggggagctggtaggcttgccataggagcaacatgtgttggcatcattgttctaggcgtgaagctaatgccagacaggtccctcgcaagggagtctgcgtcatcggcctgtccgaaagcgtcagctgggcgaggagtgctgctcgcggcgcggtagcggttgttctgtctccgtctcctccagcaagaaggactacgatggaggtctaggtgccctctctagctaggggagcaagtgtggtcgtgatcccctggttgggagaaacggtagtcggtgttggtgtgatgtctaggcgggaggagcaccaaatcttaattaaatccaagggacatgaactcaagactcctgaaccagatcatcgtgccaagctacaaagggtgttcaggattgaccatctagatccttaatgggaatgtgatgttaacacgcagcatgcccctacctagcacgccaagttttggtgttttgacccatgggtcctaaccaacaagtgaatttgtgatgtgtgcccctatccagatgggtgatgcaagaaaacacaagatttatcctagtttgggcaagagaaggccctacttccaacgaggggtgatgagacttatattatcttgcacctaggtgcttatagtaggggacacaagctagttgagagagggagaaggtctcaagtatctaagtattattgaggtcagatccaatataaggagtgcagtgagcggtcaagtgttgtctcccttctgtcccaaagacaatggactcctccttttatagtcgcaagggggaagcctatgagtacaagggttgtcgcgctgttgttgtgatcagaggagatgagtccgagcccctatagcagtatggttgaagggattgcccttgtccttggcaccgtctttggtcaggagaaggatgtctaatccctgtaacctgcactttgaccaggtagagagtcgaggctaggttgggggctcggacgcgtgccccagtctgtcctgtgcaagggtgcagatgaatcatttataagcatgtcgagtcgtagtggttgaaatagcgctcgacatggtgaaaagtttgtggtaatatgacccgtgcgtcatccgagatgggggaaagcagattggacaccgtccttgtggtttctgtagccatcctatctttagaggggttcgcgggggaggaggcgacatcgtgtgtttctctgttggtgatgtttgtcgaggccaggctcaggcaagacggagacttctctcgaggtcgagcccgggtcggcacactgatacgtagtcatgcctagagtggttggaatagcagtcggagtggtctcatgcgagatttgggaaagggtaggtggcatttaatgctcttctgctatggcagttggccgaggtcgagctcgagcgaggcggggatttcttccgagactgaggccttgaccagacgttgcatgtcccactcagagtggtcaaaatagtggccggagtgggggaacagtgcccagtattcatgccct

SEQ ID NO: 68381 - DNA, 284 bp, Zea Mays
ggtggcgctcgtacaccgttagatcgagaatgggcgacggagattaagtcgagcgtagcgcttcggccacggttgttgactgccgttgatcggatgacgaacggccaggattagaacttggtgtaccctttcgccacattggttgggtgccgttagatcgtgatcgggcggcaccagtgagatcggagagaattaaatctgcgccgttgatcgcggagtggacggatcgcgctgcataccggttcggcgtggtccagatctaatctggcgcgcccaagtctgat

SEQ ID NO: 68382 - DNA, 342 bp, Zea Mays
gcctaataaggagaggagataagtcaggaatagtttatgtttaatcggttcctaaataatgggttagttcctttttatgtggctaaatagtagcagtagatatgtctatcctaagatgatccagaccgcctatggctataaaggcagcttggcattagctgtaatgatcaaccaggaataagatctcccttttgtttggatgagatcacctcgaatcatcctagccaggcatgacatcggcgtaggagatctgggtgaccggcgccctcttcttccatacaccttgcgccactccaatctccctctccactccccattgaaggaaaccaggaaaccaagatt

SEQ ID NO: 68383 - DNA, 878 bp, Zea Mays
gtcctacttaggtgcctagctgccacatcccaagtttgtcgtcagctaaccatccacgcctagccaaaagcgccatagtggtgagagaaggtgttagccgaaggagcgaattggttcgtcgtcggtgatttccgtcgataccggttcttcgtcctcagtgctaggccgagggagggtcgccatcgtccgtgaagccgtgcgtggccgcggttgaagtcaagtgccttcgtcgcgtggtgaattgctcgccgttgctgggaaatttctaccgaccgtgcaatcacgtggacagagccgctatcatcataaatcagaggtaagatcacctccctaccctttgccctactctcctctacgtataatacacttaggattaggttttggggcactaagtcgcggtgaccgcgctcggcggcgaagcgccaccgtgagtccagtcccgccgtcgtgtagagggtgaaaaggtggaagatgatccttgggacgatggatccggaatggacgattgggattagaagatggggtgagtggatcgaggctgtagattgtcatgtgggcggccacgattagattggcgtacctcttcgggatcgcggcattgcgaccgttaatatcgaatcctagcgtcgagcgctgttcatgaatcataaaatcctaatcgtcgatctctgatccgatgaaccacgctacatactgattcaatgaatcatggacctaatctgggtcatccactcttgatcggatggctagggttactccaaatacctaggttcgcgcaaattgtaatttagccctcgggaaacatgggaaacaacccgcggtccgcggtgcagcgctctgagtctctggaaactttatagtttagcccctgttgtctc

SEQ ID NO: 68384 - DNA, 361 bp, Zea Mays
gcgaggatgagtcttcatcaccacaaggtacatttttctgtattgcttccactgataataatgacagggaaaatgagaccggcgatgtggaagaagaggagattcgtcggttctacacccatctcaacaaagaatacaaagtgctcttggttaagctgttgaggaggaacaaggaacaaggcgagacgcttctcaggctagaggagactctcatcaaaaccaacaacagcctggagaagatgaccaaagaacatgaggagctaaagtgctctcatgataattaggtccaacgctatgaatctgttttattttagcaaataaataatcatgatgtattatctgatgttgctcaacttaaaac

SEQ ID NO: 68385 - DNA, 404 bp, Zea Mays
gaagaatttggacttaagtgcaatggtttttcaacggttagggatggcgggttgatttatcaaaagggaaggggctcttatgcaagaaaacccggccgaaggggtatcattgaatcatagccgcatgatctgatctgggcggtcaagattagatcaggttgacactctaaccgatatgcaaccagaaacgtccgatttaaaatcgagggctatgatcgcatcggccgagggagttctttatcttcaatcctaaccgctcgatcttttctcaacagttccgatcaattccccgaactggtatctagtcgctcaaatctccgtcgttgactaggatccaacggtcgacgccttttcttcctcccctgagcaccgacgcggcgatgaggcctgcacccatgacggcg

SEQ ID NO: 68386 - DNA, 469 bp, Zea Mays
tgaaagtagcgccagagccgaagatgcaagaccctaagaaaagtaaacttgatgagataccttctgccaaaccgaaggtagatgaagtgctgaaggaaaccttgagcccttcgtcgcccactgctgccgaggtgacagaaatttgggaggtaatgactgaatccccaccattcaagctgataagtcctttgagatcggaactgaccaaccttttacagaagatgaaagtgccttcagctacggaagagaatattggagggcaaaagaaatggaggattgtgaacgtaatgcaagcaattgaacaaacaccgccttcagcttcggcggtgaaagcagcaattcctgcagatactaaagatgctggtggagccgaagctgaagaactgtcagccacaatgtcagaaattgacaaacttatctcagatgtggttgcggagaaggcagatgtgattgcagagaaaagcatggc

SEQ ID NO: 68387 - DNA, 1132 bp, Zea Mays
tcgcaatgaatagcccggatggtgcaccgaaatgagtggacacccacacaaagaggtgagaaagactggtgaaggtgttggacctgcggtgaacgagaaaggtcaactagcactgagagaaaccatctaggatgaccagattgtaccggtaaccagagatgcttggaacagggcatgtctaaaggtcatagtggatgaggtcgaaggggtgaataggtcgggacatggaagaagagaagggtaagcgaatataacacccaagctgacaggcatggcaaagcgaggtgtcatcgccacaagggcaagggatagtcgaggtggtcgagagtcgagagaggatgtcgtggctgaggtggccaagacgacagtgtcaagtggaggcagaggtagtggaggtaaggttgtagggttgggcaacataggcggaggaagatgggttgggggaagcgaatggggtatcggggcccggagctatcgcatcaagcaaccatagcatgagtggtaagaacctgtattgtgaggccctagggatcgaactcaatagagtagcagttgtcagtggtgaagcgacggactgagagaaggttataaacgatgtttggggcaacaaggatgttgttgaggtacaaaggaccgggaaggaccgtgtcacctactaaggtgacaggtagagtcgacccattaccgacaatggaggaaaggaaggtggagctatggggatggggtaaaccgacggctctggggtcgagatgttgtgaaatgaggcgtcgaagttggcaacccagttaatgggaggagagtgcggcgaagacatgtggtagccaagggaggcacccctaaagagccactgtgaggcgacaaggtgatcatgggcggtgaagacgacaaggcctcgatcgtcaaggagacgcgcacaagatagggaggtgtgtggaccgcgacatggcgaatgacgggcgttgagggagcaggcatgggagtgaaagagggcaagaggcttcctgcacgaaactggaggggcctagcgtggcgcacaaggcgcgcaacgatgggagaggaggaagatcctgccacacagaagtaggaaaggggactagcaagggtcaaggtgcagtgtagggggtctatgcag

SEQ ID NO: 68388 - DNA, 375 bp, Zea Mays
ttttatttcaatgccttgtcgtcgaacccttaagtgatccattctaattgttactggttaagggcttaaagtatcagctttagattgcaaaaattgcaaccggtaccttcagcttccatgttccaagtgccaaccaacaatttccatgtcgctgaactccatcgaccttgaaaactttgagtacttcttcatattcaacgtttatgcacataaacaacagactgccagcgaggacatgttagacatgtgtcgattatgcgtgcagttgggttaccttaccacttgagttgtattaggggttaggatagagctggagttgaattttatattccagggggccataaatgtgaggcaacctctgttgtaaccatgaga

SEQ ID NO: 68389 - DNA, 357 bp, Zea Mays
ctcagcaagctccgggagtagtgctcggtgagttccttgtcgaatttactcccgctactgtactttttgattcaggagcatcccattctttcatagccactagttttgtggaaaagcatggcatcccctctacccacctagaaatccccttggtcacccgaacaccagggtcagaccttctatgccagctcaaatgctcccaagtcagaattcttttaagtggggtagtgttcttggcagacttaaccgtcttgccatcacaaggaatcgacgtgatcttagggatggattggttaaccaagcacaagggcatcataagttgcgcaagcaagaccatccttctcactgaccgccaag

SEQ ID NO: 68390 - DNA, 824 bp, Zea Mays
cgtgtagctgggctcatgctgtcggtcgagttaccactgcacctgccgcccatgcatgtattggatgccaggttttacagtacgttggattcagagaagcttgtttttccgtggacatcacgtatgccatggatggacatggaccactgcattcattgcatctatctgcaaccgatgatctaattccagtccggttcgttgtcacatagggttttacgattccatttgaacggcatttcctgtggactgtcgagaactgaaaatcgacgaaaaactgtcgaaattcggttgaacggaacggtatgagttttcaaatttgaatccagcggttttcgtttataacgcccgagaaaccgtctgttgggtggatgcctaagtcgaaggccctcgaaatattaggttgtcaactgtctctaagtctattttaggtgtctcaaaaaacatggagaatcaccttcgttttggattttcgtctcggcgacacggttgaaggggaaatcaagagcttaggcttcgtggcatgaacccgaagcaagtggctagagcacaaaaaagaaacccgccaacatgtgcgacattgtctcaaggagaaatgacggtgctacccccttgcggtttctgtagctatatgtatagggttcaaggtcgtggatgtaatttcatatgaagttgtatatcgagtcgccactataaatagaggtacagtaccatacaagggggacacgttggacttttgcttcttatacctaattgctcaacctccgaagcttggacattgtcccaccttcgaactactgtctgagtccccgaaggtatcagtgtaa

SEQ ID NO: 68391 - DNA, 651 bp, Zea Mays
aaatttactgggaaagaaagtgcagatgactatcttaattgggctgagcagtgtgatcaaattttcagagttcacaatctttcagatcaacaccgagtgaacttagcttcagtcgaattctctaattatgctcttacttggtggaatcaagtacaagaacatcaatttagattgggactaagacatattaatacatgggaagagatgaagcgagtgatgaagaggcaaattgttccttccagctatcagcgtggtcttcgaaaccgattgcaactattgaagcaagggaagagatcagttgatgaatagtttaaggagatggagtagctattagtgtggactggaataagagaagatctcgagtcaaccatggctagatttctaggtggactcaatgaagagatttctagatttgtcgagatgttcccataccgtaccttgcaagatctagttgatcaagcaatgcgtacagagagaaaaattcagcaagagtcacacggaaaatcttatgccagtcattataatgttgtcccatggcgcaaacaacattctagtgcttcttttgggggaggacgatcccaaggaaatgcagctaggtcttctccatccaatggtacatcaaagatggcagcttctatagggtcattccct

SEQ ID NO: 68392 - DNA, 459 bp, Zea Mays
gggaggatgcagggacgagggggccgagcagaagccaatgcagcagtcgacaccggaggttactgtggatgtgggctaggttccatggagggatagattgagattgtgtggtgttttgtttcaggttcagcctcaccgcctgctgtggagaggacaacactgtagtctgagactgttgctctacaagttcctactgccctacttcattttcagggtacccttatttttaagcttgtattcttcggttagcatatgttagtaccaatttataatacatctctaatttatattttctatgtctaatttcacatgcagcctggtcactttgcatgtgatggtttgaaatctatatctatactactacataagacactaacgtagacgtccacaatcacacggtgcacggttctgcccgacggctgccccccctgccccggtccgcgccaatctcgctccgtg

SEQ ID NO: 68393 - DNA, 653 bp, Zea Mays
cccaaccatatccgatcacattagtgagatggagagcagctagcaacagcatgggcttcaagttagagcgcaagtgacctgttcgatcataaaggcagaaaggtgcctgatcctgctcagcattccaatcctgctgatggacgaacgagacgatatgacctactagtagcgtttgtctggcttgttgtgtggcacttagctgcgtgcctgcctttgttgacagcacagcaagccgatcagagagacccacggacgtaggactgtaggagtacgtacccatgggctgatgatgagcatggcggattctccatccaatcgttatggggatggctgagaaggccccatgccatggggtcagatgccacaccacctttccttcctccaaaaagtctccacgcatgcatggattcgttcgccaaaaggcggcagatcagcagcaggaaggcagtgtccttccctcctcgtgcgctggtgtgctgtgcatgtgccatggttgggtgaaaagcgaggacgacgatgcttgcagcaatagcaatggtgctggtgggagcggaatgggattcccatatgcatactaccaccatacgggtgtgtgtactatgcgttgagtattttcacgtttggttgcatggggccctgtctgtgaggttctt

SEQ ID NO: 68394 - DNA, 312 bp, Zea Mays
aaggagaggctcaagcggcagcgcggagaagaaaggaggagcacacacgaggaagatgaagcgatgaaaagaaaatggagactgggcctgagcgagagaaaaattagaaacaacggttatgggtacaccagacaggcaacaatagactgtctggtgcgcaccagacaacctgcatagaggtagttgcaaaccaacactaagcctgagcaccgaacagtgcacagtgcattgtctaatgcacacgggacaatccaacgagcccagacagagaaaagtttgaatcttttcttctgtattgcgcaccaaaccaaa

SEQ ID NO: 68395 - DNA, 369 bp, Zea Mays
agcctttgagcagctgaaggtgttattgatcactgctccggtattagctcaatcagacattgaaaagccttttgatgtgtattatgacgcatcaggcagtggtcttggatgtgtcttaattcaagggggacgagttatagcatatgcttcaagacagttgcgccggcatgaggaacattatccaactcatgacttagaattagctactgtggttcatgccctgaaaatatggcgtcattatctgctgggaaatatctgtcatatatatacagatcataaaagcttgaagtatatttttacccagtcagaactaaatatgaggcagaggagatggcttgagctgattaaggattatgaattggaaattca

SEQ ID NO: 68396 - DNA, 620 bp, Zea Mays
cttgaatgcaagcaagtttatgtctaatatttaataggtgttataaataagtatagactgagttttttaaaatacaaaaaaaattatatcaggtccgatcggcactacaagacgagacagtggcccaagcatgtcacgtctttcgggtcgggctgccacaggcccaattttaatagtgtcgagcgacactattaaatggtcgtgtctcgggccggcccctaggcacgatccaattgaccatctataccgacccccttcgcatcatcatgcgccacaagccccgcacatcacgcgctccacgcaccgccacacatccaacgctcctcgcctcctccgcgcttgcaccaaacgcccaccatcctcgcctccctccacttagccccccgcctacgcctgcccccgcgtgttgcccctatcgcccgggccccctgccccgccgcgacagacccccctagtctcctccctcaccttcgcccttcacctcctcctcgatgctcgcgcctccggcaaggatcttgaggggctcgtggctagcgtcgatgcgctcaagactctatgcagagccacgacaagttgtcttattagtacgtgcgctacttccacgaggttgacgaggagct

SEQ ID NO: 68397 - DNA, 344 bp, Zea Mays
ggaaaataatagcctagggtaagaaagtttccggtgagaaagaactccgtgttgggtggtaatgcatgtgaagatcgagtttgacttttctccttccttgatggggttgatctttccatctccagtcttggtcttattgattcgaggttattgtatatcatcggggtcagggaatatggctaaaacagacatggatgagatagactacatgaggtagatcaagatcttgtttgatgttaagtggggacagatagattatacactctatcatgactctattggttggatcagatctcatgcatgtggctgagttggtttaaggcactagtttagttttaagtgca

SEQ ID NO: 68398 - DNA, 415 bp, Zea Mays
tagtgctctcataaaggcaaaggtatggaaaatggaactgtgcaatcttattgattatcttgaaattccattgatagtgatcatagctgtgttcttgcatttcattggtaatatcgtggcttatgcattagaatgttgtttcttatggtgtacctaaagaaccttcttaactatgatgtgcttaagacatgatcgtgttgtctttcaattggtatatgtgctccaatgatagttaagtatgaagcatgtctaagtttgcgtgtaaatgttagacttcctgtgagtatccaattggcttatgtgccactgaggcatgcattgttgtatttagtcaacctttcatttagccttcaattgatgttaagtggcttttcatttgatattcaaattggcatctttgtgtgatgaaagtgat

SEQ ID NO: 68399 - DNA, 510 bp, Zea Mays
gtggcgaacccgccggagctcggctccgagccaacccgacagccccgcccaaaccgaagtccctacacgcactgaggatgacaagttgagcatgcaggtagccgacttacctgccattgaagcagtggagggagcctgaccaacgtccagcggcatcgctgtccaacccagcgacgaagcgacggagggctcactgtgaagctattaacaagctctggagattccccgatgccacgaagagatgccataggcactggagatcatctcggattgcgccctgaaggctatggggcagcagggcccaggttccgcgccggtgatcccctcctttcttctctctctcaacgggacataacttctctctggacgactcgatccctctctctctctctcttgcactcatggcgatggtggctcggttgatgggagggcctgggttttataggggcgggatgagcccaggcttaagaatcgcgaggacccacagcactccaaccagcgcagatcaca

SEQ ID NO: 68400 - DNA, 350 bp, Zea Mays
tattgaccatcgaagttagaagtatatggtaatagttttgcaagggaaattattcaataagcggaatgaataagctagtagctggttataatctgaagattctttagtagggcttaatctttgttttatgtctagattggggtaaccagtcgtataatgtgaatatccaagggtaagatagaatctgtcaagatgagagatatatatgggtgagatagactacaagatgtaggttaaaagtttgtttgttgttaggtgggaatagaaaggttataccattcatcatggctctatgggttgggttagctcctaaactcatggttaagttggtctacacctggctaggaggg

SEQ ID NO: 68401 - DNA, 386 bp, Zea Mays
gattggggagcgtcgtaggcgccgctagacagggagagccgcagccggagtgctagacaaggagacagggactcagggtcagggagctaagggttgcccaggtttcatagttggctgtcaactgggccatggcctgtgggttgtgttgcttaggggctagtgctcagcctggcacctgtacggtgctaggtattttgggtagaatgggtacttcgggtagcgtgggttaataccagattaggctcgaacttagttcgggtattctgtttcgttacccgctggatctgtttgggtaacgggcttcaagctaaacgggtacgagtttgggtaatatggcttcgggcttgggttttatgcctagatctactgctagcagtggcaccgcc

SEQ ID NO: 68402 - DNA, 764 bp, Zea Mays
cttaacataatcgcctttcgaccgtagcctcgaccgttgttttctctttctcgcttagtcgtaggtgtgagccctgcgccaagcgtctgcttatttgttatattctactgcgtggtgtctgttcattttctattatatttgtggaatatatgtttgaactcgtattgataatggtcagttggcgaagtccgaaggagttgcaggtgaagaccagagcagtcaagcagccccagtgcaaggaggaggcagagcatgttttcattgtggagagcaaggtcattaggtgatgcattgtccaaagaaggtagctcaacagcagctaggctctagtgtcccaacaaatcagaatgtgtctcagccaggagcagacaattgcgcccaaacacgttacaactatggaagattgaaccatttggaggctgaagcagtccaagaaacaccaggtatgatagtatgtatgtatccagtcaaattccatattgcaaaagtgttatttgatactggagcaacacattcattcattactgcatcatggttagaagcgcataatcttccaataaccaccatgtcaacaccccttcaaatcgattcaaccgatggtaaagttcgagccgatagtgtttgcttgaatgtaagtgtggaaataagggggatagagtttcccgctaacctcatagtaatggatactcaaggaatagatgttatcctagggataaattggctagataagtaccaagaagttatcaattgtgataggaggacaa

SEQ ID NO: 68403 - DNA, 866 bp, Zea Mays
ggcagccatgccccatgggtgacaactcgcatcaaccaacgacgaaacgaggttgacgacagtaggaggagcccaggaaatgattcggcggctctccctggacacggaagtccacgggcacgggagtgcatgaatctgttggaagttggagttctaaaattttaatacgtaaccgtcactaaaacgtagtataaaacggtctcaccctctgcatagccgctaacctgctgcctgctggcgccctcgcccgacgagccgtcgacggaccgatcgatcgatcggcctgccgcagtgccgctgccgctgtactgtgcactgtgatctggcgcgcgccgggcgtctgtatgcagctgagctggcccctcggcccgtggaagcacgaggctcaagcactacgcaaatgatacacgcgcgaaagagggtcaaaaatttcgaaacaccatctctttttatttcttctccaggcagtccacagagattttgctctgaacactccagcattgattgcacatggagcatccgccgttagtgacgcagcagcaggagccggtgcaggggggtgtggggacgagagggtgagacagatcacgcaacagctaacacgtcctcaagtggctcgcgcagtatgtactgtatcatgtactagcatatactcggatcgagatcgataccatcctgccggccctccaaattcctaattccaccgagacgcgattgaccaaacactttgttgtttcagttcgtcgacgacgtcagagccaccggggctccgctatacagtgtagtgcgtgtgctctgcaagtgtaaaggcacgcgtccagattgtttgtacacgcgctcctgcctcggcacaccgagagtccggc

SEQ ID NO: 68404 - DNA, 298 bp, Zea Mays
cccgtttggctgtctataaaattcaattcaccattttagcccatttcctatccctgaaattttagcctatgcacgtttcagacccttacctgtcggaaagggttagaaagttagctaggttttagcctctcgcactgctcgtgcctcgcaccgctattcgtgcttgtggtggtcgccgtcagcgcgacacttcttggctagcaggtgatcatcctcaacgacctgcacaccacctgcgcacaggtgacccccacacaccactgaaatttcctatccctgaaatttcctggctgatagg

SEQ ID NO: 68405 - DNA, 547 bp, Zea Mays
caagtggtattcaaagactcaggtattaccgtcaggcttaccctagtttagtttaggtttttcatcctataactccagataattggcatacaaaaaaatattccgctgtcctagaacccttgtttagccttgcaatttcgtttcagattgctttgttgagtttgtgtccgtgtcgagtcttgttgctggtttaggtcgtgtcgtcatcgtagtcaaccgctccatcgctgttatttgtttccgccgctatcccatccaccttacccagattacaagtcgagacaccacattactcgatttgccctcgctagccgccttgtgtgaattctcgccacgctagccctagattaggttgcaagccgcattgcattatagcccctccttgtttcatcatctagcgcttacctattgtttataccagggaggtttgtgcccctgtgctctatagccgccgctacggttcctaccaatttgtgccctggaaaaccataacttgaggtaccttccataaaacgggcataacttttcgctcggtgctccgtttgag

SEQ ID NO: 68406 - DNA, 498 bp, Zea Mays
ctttgttgtactgcatcaacatggcttcaccagcacgtctagtcaatggagttgtggcctctagagattttgacagtagacatgtcatagatgcgcagcggttcactcggtccagcacttcactacctcaagagaggctagggtcagatcaagcttacccacattaaatgttgcctagactatatctttggtgggtccagtccaacaacccttcaatgggaacaaatggcgctgctgccactggccccattcctgtgtgtgatccttcccatgtgcataacacatctagggagtctcacgagaaacacctccatgagcactaggacaccatcgtccttcagcgtgttccactcccacagcctcactctgaagttgatctattgagacgatggccagacatgagtatgtggacagaggagatccggggacacggccagcgggcagggatggttgactaacacgagctatgggcaatggccaaggatggcctacaactga

SEQ ID NO: 68407 - DNA, 476 bp, Zea Mays
ttggcaccgccgtcgtggcaattgaaagtgtggcattgaaatctctctcgaattgtaaatttggcatcgagcgcgcttaatggtgtttagcccttgtgcagtgctcgtgctgccctcgcgccgttagaaacttgccgccgtcttcctcttctaccgtcgcccgtgaagctcccgtatgccattctctctgtgtcctctcctcctcattctcgccctagtcgtcgtcttgctcgctcgaactctgctcgccctagccgtcgtcttcctcgagctgctctctttgtctccgcgcactgggccctgtccttctccagatcctctcgtattccattctccctgtctcctctcctccttattctcgccctggccgtcgtcttcctcgagctgctctgttcgtctccgcgcactgggtgcattcgtgccctgtccttatccggatctcgcccttccctgcctcgccggttcctacgctcgtg

SEQ ID NO: 68408 - DNA, 478 bp, Zea Mays
ctctcatagatttaaatggttcataggcaagtcatattctatgagtgcatacgcccacttaccaattctaccactcataatcgggttatgcaacatgtatttgatcacatcggcttgaacagaaaccgtgcaatgactagacagtaaataacatctacacttggtgcatgcataaaacaagcataagcataacttctaaataaaagtgtacatcatttcaacatccaccaacctccgacttagatatgtcaccacatgctcctttccttcagtttcttgtgtcagaacagccccaatgaccttatcttcagctgcaatgtataatctgaatggtactcctgcttgtggtgcttttaatacgagagccgaagacaagtattttttaatgagatcaaatgcttcctgctgctctgccccccaagcgaattcggcatcattcttaagccgaaggataggggtgaaggcatcaatcttcccg

SEQ ID NO: 68409 - DNA, 834 bp, Zea Mays
ccgcggcggaagcgaccgagccacggcgaccgccggtgggatatctccggccacgcacgactgagttcgcgggatggtgccacgtccgaagttatctctccgcgatcaaatccctttcaccagatcactcgagcacatctgattcaacagtgccttagatcttttatctgcgttcttcagatatttgcagagttttgatcttcagcgttttactgaaccgaccaccttccatcctctctatctcctaattcttgttaagaacagggtgatcttcattaataaaacttgttcaccaaacaacagtctttaagtttactataaggttcatggttcaattctgtacagattttcagatttggtgctctcaattcgactgcatttcattggggccatacctatctgaacccaattttcagatttgcccaacttactcgacatcacaacttcacccttatttatctccaatttctgttgagcaccagtgatctttcacttaatcaaacttgttctcctatgatagctctacaaacttcatgtgttgacatagggcaaaatcttcataatttggaagatatagggcttcaaagttgagccaattcactgaaattcagacatagccattggagcacaaatgtggtctttttgcaaataagcccaaaacttatggtttcatttgcaaatctccaaatatttgaaccatatgacttaggataccctatttccatgatttttgcacttaggtcccaaaatgtgcacattttgcatataacaccttagggtttcaatctagggttttccaggggtctattaggacttttggtacttctagggttc

SEQ ID NO: 68410 - DNA, 809 bp, Zea Mays
gcgtcattggccacacagaagtcaactttctgaagaacaatctgtcagaactgactgacatatggcttcctgtcagtgggaagtgtgaccaagcgagcaaccctaggctgcacttgagaatattcttgaacaactcgaggggcaccgaagtcgtcatgaactacctagcaaagatggggaaagaagtcggcaagaaggtaagggatttaccacagttctttctgtgctgagaaagctgatcggcgggcgtactcccgtcttcagccgctcacagcagtgtaggacatgtgtgcagataaatttgcggtcagcccaaacaaacgttgcattccggaagctgttcgccctccctctggaagagttcctcatcgacgatttcacctgccatctcaaacggaagatgccgcttcaggttgatggttcgtttggctcctgccggtgtccaaccccccgttgtgttggcactaaaaacctgtcccgtttcatgtgatgcagggccgcctctttttctccccgagaatagttgggttttattccaacatatttgggcacaagaccaagttcttctttctgtgggaggacgtcgacgacatccaggtcatccctgctacactgtccatcggtagcccgtctctgatgatcatccttcggaaggatagagggttggaggcaaagcatggtgccaagggaacagatcatcatggaaggctcaagtttgttttccaatctttcgtttccttcaacgatgcttacaggtagattcagtttcttccctgtttaaagatctgatgagacaaatatgtctagaa

SEQ ID NO: 68411 - DNA, 387 bp, Zea Mays
tagaaatactgccctctgacctactaagattttatattattttgtcgagtctggtcctttctttgcaaactttgtattcacctcagacctccaatttcggaaattgattgcaaactgctttgttgtgtattctttcacgagttcttctgaaccccgaggcaaaacgaaccacgttaatagcttattccacatttgattcttggcatcgtctaacacatctctccactctcgaattatgatgtcaagattatctctaactaagaacccaggtgcattccaaaacttaggcattgcctcttctggagctaggggctaacctttcatgctcatatctgagattttatatgagttgttaggaaacttgttcaatcctctggcacctctttt

SEQ ID NO: 68412 - DNA, 2024 bp, Zea Mays
gcgattaatcgcgattagtcgggctggtcgcctggaagagggcgattagaaggacgacgcgattagggtttctagtcgtcctagtcgtccaactagtcgtcgacctgggcgattagtcgtctggtcgaacacttcctggtcgtttttggtcgttgcagttttggtactgggcttcactctggtggtttttggcccatctacagtagcccgcccctccaaaaaccctcccagctaccaggacccctcccagccgcctgaacccttcccagccgccagaaaccctactcctctcctctgtcctctctggtttctgccaacgtctctgctccagcctccaagtgctccagccagcaggtaatgcagtttggatgctctagcgcgatttgtttggatgctgatctgctctaggtagcagccagcaggttcctgctgtactttttactgaattactgcaagtaattatgccaatattactttcagtttggactttggactttggatggattctgttttacacttttactgaattactgctagtctgctactaattatgcctatattattgtagaaatacaatgtttatatagttaatatatagttatatacatatacatatgtccttaaatctaacggacgaccagaggtcgaccaggaccgattaggtcgactaatcgtcgccctaatcgcgattagtcgcctggtcgcccctctcactcgaccagctggtcgcccgacttgtaaacattgtgtagaagcatgtttggatggtgggttagactactaaatcattcagattggacctttacatatggaaaatttaaaaattatctcctgagccctgactaaaaaaatcgacaattatcgggcacatctggttcatgaacacatttcctgcatgataacatcgcagttgtgaagtccgccagcactaggtcacttgctcacccgtaccagtaccatcatctgccaccattgccaccttctagcacattgatttgactcgcatcttcagcagtgtcttcctctttaacgtgacatgccttgattcatgccgtcgattctctcacatgtttcattcatagggcagaactagagcctctttcatttgtcattttgttaacagtgtagattctctcacatgttttgccaccttggccatgaatgaaatagctacgaaggatttccttgttgctgttgtactatatgcaatgctagatttgtgacgtgaacttatatgcgattaatgtcattccaaccttggccatggttccgttcaaattcaagcatggctttgctttgttgcaacttgcaagagttacttcccataattagtgaatgactagatggtctcttttgatgtttcttgttcctttaacttttgtacttaagttgtcttctgctattagtattaaccagtaggggcacaaacccttcctgtttcttcaaaaaaaaaacttatatgctattggcatgcacattgtttctagaagatgttttataaacaaacatgtgaaagctatttgagcttctatctttatgtctctagctgttctatttgctaattatttgaccatattaactgaagtaagaggcagttatccctgctttagtattggcttgcttcccattttaaatttctaaatagcttattttgctaagttgttgattggctagcactttcctagaatcttcttattcattgaagattcatagcatctctcaggtgaactttataactccaagatagcttagtacctcatactggtcatgaatatcaagcactagccatagtgatacatcaattatgggttctgacttgaccattggttctgccttaaagttcttccgtctcattacttcatctttagggcttgtttggctacactccaatccccccaatccatatgggctgggagggatttgaggtgggaaatgaactaattttcctatcaaacaagcccttatgtggtgtggaacatcatgtcctagcttattatgtgagcaagattgaattttccatctta

SEQ ID NO: 68413 - DNA, 429 bp, Zea Mays
ctactacttccagtcaaggtcagacccgacagtgacctacattgcctcccttggcggtgcgaggtgggagaactggcaaagtgactgggtgatcgccatcgctgaggccagcgaccgccttgctcttccgagtgacgggtccagcctcgagcggaaacaatggagggtgaaaccatgcctcgtaccggagttcaggcccatcttggacaggattaaggaactggcggttggaggcttgacctcaatgcacgtactcggggatttcttgaagcgccgagtcatgccgctgcaggggaggccgcgtttgagttgctggtttactggccccagcaacattggtaggatccaccatgggcctgggaccgatctaacttgggaggagttggaaattttggtgagggtgggtcaccggtgaggcttttatccctg

SEQ ID NO: 68414 - DNA, 388 bp, Zea Mays
ttattttgaagccaacgcaactggaacagactaaaacagagatgaaatgtgtaagatatgatttttctaacatttttggaattattttgatgtttaaaatcattctttataatcatatacccgctcctggtaactatctggactatgggtcaaattttttactagcacaggggcctaaccgaaagaaaaaggaccgatttgtaataatctttgaatgcgtgtggatggcgggttcatttcatagaagttcaagatctctttagtaaaatgaacatggcaaaggggtatcctctaaccacaaccacccgatcatatcttgacggcccagatcagattataacctcttcgaaccggtatgaaatcttgatcatcggatcttcaatcgacg

SEQ ID NO: 68415 - DNA, 480 bp, Zea Mays
agggaatgccgatgagcttcgtgcttccaaagaaagatgttatgaaatatccttggaatgcaccaagaaattaaagaacagcttcgctaaggttggggcatattcctctgagcagagattcatctacggcgaccctgatggagttatccagtggatcagcggggaagccgaagcttttgacgaaattcatagcgaccgaggagatttttatgcctttgctggtgcacgtggggccacctccatcttggagaaggctagttgcgatcatactaaggttgtggctcagtcagacttcgccttctcagtagaagatatcaaaaacccttcagccgaatctactaccgtaagtgggaaatgttactccgagatatggctgaagggcgggtgagaagtcgatgatgaagccatcaaaaggaacgaaaaggaatcacatgatgcttcagaagaggcaaaaagggctaaagaagctaccgagcgggc

SEQ ID NO: 68416 - DNA, 748 bp, Zea Mays
gattaggagtcagctgatgaagatatatttcaaaattctttagcacctcccctatcatctcgttcagaggaaatcgcagtcctgctctgaaactcttaaaaaccactacttcatcattctttggtgctggagtagtctcttctttggcaaatcggacaagttttctttcagtttccccaaagtagccaagcttcatcatcatgggcatgtcgtcttcggacacagtagatttctcaaaatcaagatggctgggttttacggggatcagaatactgtaatctttctcaatttcatcaacattttcttcttcagcaacagcctgttcaacttcggcatcaggagtaccttcatcaatagctccctctatcacaactagtcctgatcgttccatgacttctaaaattggcgctgtctcagtgacctcggtctcttctccctcacgagacacccttgcagttgatcgcactctagccatttggatgtttttaacaacttgacgaagctaactcgtctgatgaagtttactttaaaatgatgaagtgctcgcttgagagtgcagcgcagaaagcttcagctatggttaaattttttaacagcacaacagtgcaatgacaatgaatgttgtggtaactcctcaccaacctgctgtttatatagtgctgcaggtgggaagacgaaccaccaggtcgcccgcactcgctgaacggtagaccactcagcactcggaatattataatcgtttctcggc

SEQ ID NO: 68417 - DNA, 959 bp, Zea Mays
gaatcaaaaagtacaacagtgggggtaaattcgactaggaactcaccaagcactactccaggggcttgctgagcttcttgggcgtcgacgtggttcactcgagccctgccgtgaaactaggtcttgcttagctggctgttggtggagggtgctttggaggcgggtgctgaaacattcttggggccattcaccaagttggagtaggcaggtacagatgtcttcaactgtggacaattattcttgaagtgactggggtctccacagtgccaacaagcattggttggaggttggctacttgcaacagattgggtgtggaaggaattttgaccaggctggttgagatgtgacggagcggatcctactggtttgctaaagttcgaccctttggaagggaacccaaaagatcgaaccctctggtgcctgtcctgctgctgagctcggagaacttgaaactttctcttgaggtgacctttttcttcttctcgtgctctttccacctggatggccttgttcgagaggtgcgagaaactgaggaagtcttggctggtgaggttggtcttgagttctggtcttaaccccttcaagaaacgggccatcttcttggcttccgtgctgacatcatcaggtgcatagcgagccaattctgtgaatttgtggatgtattcactgacggatcgccctccttgagttaactcctgaaattcctcttccttgagctggacgattcccaaaggcatatggtgctctcagaaagcggcttcaaattctacccaggtagcatcccttacggcagcgctaaaagtatcccaccaggatagggccatcccggagagctaatgagcagctaggtgaacacgctggttttcaggacatccaatggtctctaacttcctctttactgtgcgcagccagtcatcagcatcgagcgggttgctagatccggcgaatgtgagaggctt

SEQ ID NO: 68418 - DNA, 360 bp, Zea Mays
cttatattatgggacaagaataaaatgtggttataccttatattatgcaatggggggagtaaatgatatacaatctgtgtatgtgcagccatgaacttgaaactttattgtaatctatagggatgcacatagaaaacatgttaaaatctggtttttctccactattgaccaacaccagtaaggcaagagaaacttgattgcttccttgatccacatgcatttgatgactgcaaaggaacacaaggtctcacgacttctgtggacaaggacaacgacacaatgagcatttccttcttctgtagatggaattcactgttccaaaaataactttgcctctcgacaacagcttttgcaaataaa

SEQ ID NO: 68419 - DNA, 317 bp, Zea Mays
ttgttggtcatggaagtccaccatctagatctggtcgtgaatggatttgccccactctctaaaatttccagagttccttcggttccttgctccattgtcttccttaagaccagaacgatgatcattctagtgtccatccatcgagtaaactatgaacatgaagtggtcttcaagtagatcatacaagtacaagtctgagcccaaatctgagttcggttagagtatagcagactgagctagactcggtaatttaagtgttgataggcttctttctcatgtcatattgtactagtcagctgctcatgcattgctatggt

SEQ ID NO: 68420 - DNA, 409 bp, Zea Mays
aaaactatccttcattttctttgcgcaatccagggatttttcataacatctctcttttgatacccgaagctcatccacattcttttacaatcttgaactagtccattcgcttatttcttgcttcgcttttgccacttcaaaatcctcgttcgtttcggcaagctttttctttaggccttcaatttcggctttatgagcttcggattgtgcattaagttttgcttcgctgctcttcagcctatccaccaaggaaagcagtattttatctttttcaagcgcctcgttccttagcgtaataacttctgaccgaaggttcccaagggctatttggcagctttcgtcttccacattcttttgtgcccttaaagccttgcttagtattaagccctacaaaaaatgaaggatcagc

SEQ ID NO: 68421 - DNA, 476 bp, Zea Mays
gtggagcccactttacatgagcaaatagtcatggcacagattggtgacaagggtgttcaagtcatcaaggatatgcttaagcaaaaggtggataagtaccaatgctttcgacaggacagcaggggagttctatggtttgaagaccgattggttgttcctaaaaattccgaactcagaaggaaaatattggatgaagctcatctttccaaattttccatgcaccccgacagtaacaagatgtatcatgatctcaggtccttgtactggtggaccagaatgaagaggaaaatttctaagtatgtatctgaatgcgacacttgccagagagtcaaagctagtcatttgaaggtagccagtaccttacagcctcttcccgtacaagcttggaaatgggaggatatttgcattggttttattgtgggtttacccaacacctcccgacaccacgattttatttgggtaattgtggataggtt

SEQ ID NO: 68422 - DNA, 356 bp, Zea Mays
atcaaacgtctatcacacactactatgttgtattagcaacagtataaacattaacatgcatggaaatatattctataacatataaccccagaagacataatattttttcatcctcatcaatcacaatactatcaccaagattccaatttataaatcggctgtcagtccaacttttgttggtggcttgatcatgatgaagagtgactttctaactatagtgtatgcattatatgttatgtttgtcagttcaactagtccctgcagcgtcgagacatgaaatgaagcctaactaatagtaagcacaaggagagagagcactagtgaaaaattccactaccaaatatcgtttgtgcatg

SEQ ID NO: 68423 - DNA, 1184 bp, Zea Mays
ctcaacccagcatcaagcacatcagcgcaaacctccatcacaccgtcatccactggctccgataacaagccctctggaaccatatcctcaagagtctgatcaaaattggccagggacagttcttgcagaccaatgagagcagacaaagcaggagagggaactccactactttcaccactggcgatgaactgccgactgtttttccgagtcaaaggaacttcatcttcctcctcctcgtcatccacattggcaacacaagcagcacacccattgggatcagcaatagatggagcacccacattgggatcagcagcggattgggtacacccattggggtcagatcagtaaattcagtcacatgcacttcttcagcagcaggaaccgaggtaccagcgtcccgatccaaactggatacttgccggaggcgtcttcttttcttcttctgctcatcagcagaaggatcaggctgattggctcggcaagggcgcctcgggcgagtactggcaggtttctgagtatccaaagttgtatcagcctctaggaggggcgccactaccagtgccccagcaggagcagcatcagaagaatcctcagccagcaaatcaagcatagcgcttatctctgcatcactagggttcaggggcacctcaaaatggacctgccgttcatcatcaggaatctccccaagcgaggcaaccaaggcactaacttcttcagcagagggtcgcactctaaggcccaagctgccatcagtgacaggcggattcgacacaaaaagggtgaaggctttgggaggaggcaggttccaggccgagtatgccactggagcaccaacatttgacactttgcctctaaggatcatctcaagtcggctcaccaagtctgcagagggaattttgctgttggtaacccgagttgagtcggctaggcctcgatacatataagctgggtgcgccctgtccttcaacggctgaatattcttgaaatcaaaatcagtaaccacagcttcagcagtcagacccctctctttcagcagtccaacttcagctagcaacgcacctgcctcagctacctcctgatctgtgggagactcggtccagcttggggtgcgaacgtccggctgtcttcctgaccgaggggggagagagttcccataattctcaactatgaaccactccaagcgc

SEQ ID NO: 68424 - DNA, 797 bp, Zea Mays
tcgcctgtcgaaactctcaattaggccacaaagaattctatgaagacaaacacatcagttgatacggctgggatccctaccggagatgcttcggagattgtacggatgagacacggagggctgaggcggtgcacggcacaggggcaccgtggctgatctcgagagagatgagagagagagagagagagagttggtggctagggttcgccctgcttcctgagggaagcgggcaatggtaattgcttctgcttaattccattggatagcatttacaagtatttatttcccctactaatccttatcctgatctaggagatctaatctgggatcccctctaatccttatccaactaacttgatccacctaatccttatctcctactgctgccctgcgcctataatggcgcccagtcataacatcagtatttcacaaagcaggcgcccagtcataacatcagtatttcacaaagcagcttgtacagttcagttgccacagcgatgcatcttttaaattgataaacttccttgcaagttgttataactcttataaagactaagtgtcactatcaactgtcaaccacatctttagggctgtaatggaaataattactggatgtgtcaaagtttttgagtaattggctttactcagtgcttttgaagaacatgaaagcatgccatattaactaaattagttacattattagtcatggagggtaccagaaaagaaaacaaattgcaatacttgcctagtatcagatggttgctactcggcaaaggctgcttatgagggcttctttg

SEQ ID NO: 68425 - DNA, 700 bp, Zea Mays
aaagtatagggtttttgccctaggtcaccacataaagtttgtagctcaatcataggggaacaactttgtttaaggattcaagccatgttcttataagaaatgtggagaaaatctcaacccaagttagactgtcagactgctaaaggactgaaatcaggctaacagtgagctaacagcaacttcaagcccaatttcgagtatgatctaatggcttttagtggaaacaccatattgcaacatggtatatggtacattgctctacaatttttctacagagcttgacatgggttgtcattagaaattgagagagaattgggctccaaaattgactgtcaggctgtctgaatgcaactctcccatggtacagtgctctattggtgattagaccgccagcgcaagtgctcaccgccgacgacctatccgcgccgcgatttgcgccggggtcgaggtgatcgggcggcaaacatctccccgcgaagacctctttgctccggataagactgccgcggtggagggcactagctccggctgccacgcggccatccctccttccggccatgtccggtcaccggcgccgcccttctctgttcggccacgccatcatggatttgactgccttacggccgtggttgtaggcgtggcatccttaggagtattctccttgcgccgttgcgtcggtgaacgccacgggtacagccac

SEQ ID NO: 68426 - DNA, 420 bp, Zea Mays
gcgacttcgtaaaaatctcgagactcagtcaacagagcacgggacggcgggttagtttctaataaagctaggggttctttagcaagattacaaggccgaagggttactgcgtaatcggaatcatccgatcagaactctagggcccagattagatctctattactttgaaccaggacccgatcctagtcgtcggatacaagatccgtggtgcacatcgcacggctccccgctcgctctcaaccgtaggatcattgatccacggtactgataaatctccgaaccagtactgaaaacaggccactggatccgtaatcgacggcctaaaatcactcataccccaactcctctcgcccgtccgatcacaatcttactgccgagatggatttcacgaaggggcacattcgccatctaatctctacc

SEQ ID NO: 68427 - DNA, 719 bp, Zea Mays
tctagcaccaccagctctacccgacacctcaagctctgtattatagtaactcttgggcacacctatcgaggcctagttcctttgtagcgtgccccttggactataaaagggagggcacctgcgatgtagagggggtaagttacaactcacaggctagatacactcaagctctcaagcaatacaactcatagtggacctgtggatgtagggtattacgctccggcgacccgaatcactcgaaatctttatgttcttgtgttcgcccatccggtcagacaaacatctaggcccccacctcatctgaggaccaggtcgggtgcactccgctacccggtcggagggagaattttcccctccgacatttggcgcaacaagtagggacagggtccttagcttgacccccttcttgatatgacatcccactcatccactagcgggctcggcccgggtgaatccaccgacatttggcgcaaggcggggaagcgacgccttaagaggctcgtcgtcgacctcaaacgacgtgtcaacaggcgcagatccgccaccaagcagaaagcggtgggagcctcaaccatgacaattcaagctactgttgtcatccctcgctagtctccaccatgcctgaggtcgcctccgttgacccctagccacggatagtggcgttcgaggttgccaccgttagctagtagccaagcacaggagaggctgactccatcgac

SEQ ID NO: 68428 - DNA, 881 bp, Zea Mays
ctttgttgaggtctgtgaagtcaatacacatcctacacttgcattggacttcttgaccatgactatattggccaacaactttggatatgcaacttctcttataactcaagtactaggcaatattttaactttggccctgtcctcagacatctttcgaaacttctgcttttgtggcctacttatcgggtcaacatttagagagtgctctattatgcttctgtcaactccacgcaagtcatttgctaaccaggcaaagacaaccttattgtgaaacagaaatatcttaagattggattcttgctctgaagttagctggttgctaaacaaaacctgttgatctacaacatcttcataaaggaggactagctttggctgatcagccgaagatgctttctcttttacttgtttttctgatgcctgagcctgtgcttcagcttcgtctttgttgtagatggttttaggttcttgtagggtccctcctacccttcttgtagcttctagactaccatatactgatataactccttggttgcttggtatcttcatacagaggtacgctgaatgtaggactgcttcggagatgttgagtgtttgtctttcgatgattgcgttgtatgggaattctatatcaactatttcaaacacgacctctgttgttcttgtgttgttgacatagctgaaggtgataggcatagccaactttccaagggtcatcacttgttgtccttcgaagccacatacaggaaaggttggatcttgaatcttatcctctagttcctgcatctgtctaaaagcctttgcaaatataatgtctgtgaaacttcctgtatcaaccaggacgttgtgtaccatgaagccctttatgacacacgagattacca

SEQ ID NO: 68429 - DNA, 357 bp, Zea Mays
gagaactgggaaatgccgaaggaaactgtcgccgaatcaagcaaaggtgagctggtccggttaaagtatactttcagatatggggataaattcgatgagccaaacgatgactggttaaaatgcatcgaagtaacaagtgatgaactgcttggatcatattccaaggcagaagataatgcattatccacagccttcggaagtcggggaaagaagagattgaacagagtttttgacgctattagcttcgtctatcccgactaccgctatccactgcgggggcaaggaaagaagaggaaagctactgctgcggtcgcctcggcagaacctgtgccgaaggctacaagcaaaaagatgaag

SEQ ID NO: 68430 - DNA, 474 bp, Zea Mays
gaaaaattttcaacttcattcaaaaaacaagaaattcaatcatcaaatggccagagtgtgttccacagctagagttacgcgcgacggagaggaagccaaaggtgctgaaactgccccaatctctaaagtgatgcagcgctcagggctggtaacattggaggatgtacctgccgctgaagcagagcaggctgatgttgagactgagtctaaagatgattacagcgcggtgccaagtaaacccagccacctggacttcgggaaatccaccatcttcgaagatgatttgcctaagatgttgaatttgggctattttaatgaagcgaagaaagagctgattcgttttggtggggaagagactactccgaagctaggaaaggacgaagtagtgttctttaaaagtttctttaaagctggtttaaggtttcctttgaacaagatgattgctgatgtattgaataagtttgggatctacct

SEQ ID NO: 68431 - DNA, 400 bp, Zea Mays
tgtcaagaggattatccgttacatatcaggcacaaagcatctcgggtgtagatacctaagaggggtggcgtcagaactactcagatactcagatagtgatcatgctggagaacttgtaaagagaaagagtaccagtggtgtagttttctttctgggcaggaacataatcacctggacttctcagaaacaaaaggtagtatcactttcatcgtgtgagtctgaatatatagcagctgcaatagcagcctgtcaaggtgtttggttaaaccggcttcttgcagacctactgggtactgagcagaagagtttcaagcttttgatagacaaccggttagcacaagaactgagcaaaaatcctgtgtaccatgagagaagtaaacatatcgacacccggtatcat

SEQ ID NO: 68432 - DNA, 306 bp, Zea Mays
tgacactattatgtgtagactactatgaaacacagaccttattatgctagtagcagatcttttttgtccataaatttaaatactgggcagttaacactattatgctagcagctaaagtagaatggagtaagctaaaccatagtctaaattctcaaatcgatctgctattagtctactgcttgtttgtgcacatgtcaggaccaaaggggcgacatctgaactgagatcattcacaactctgaactttagcctcctggacagaggaaagttgatgattaaatacaaatgcactcggttactaatgaa

SEQ ID NO: 68433 - DNA, 664 bp, Zea Mays
gccggttgccgtgattcgtgcctggcacgcagtggatatccacggggaggtaaaagatcttgcaggggagcagatgtggtcgcgggggaggcttatcaccacgcttgtagctgttgcgacgtggcaggaccaccgatattgccgtggaaactccggtgacctcggttgtgccacgtcgtggctagttactgtgcggtagtaaccgtagcacacttaagagtacaacctttgaaccattgcgctggtgaacgccacgaatcctttgcgccagtgcacttctccctctccggctgccgtgcgtctcctccaaattagccgccaccgctcatgaatcctataaattgagtgtgccatcagctccgctaggtagttgtgcatccagtgtgtgagctcttatcattccctacagctccccaatttgagacttcccccaaatcggtcgagaacaccgcgtgtgtgagctcgtcatggtcagcgctccacaggtccgatcatgttctcctcgctcttgttctagcattcctgtgtgctcttgaagctcatcggcccaaccaattgcactgaatcggagtagatcgacgggaacactttgaattgtccccggattgcacggtcaccgtggacagcgtaattaggcgttagagtcttgcaattgagtgagggg

SEQ ID NO: 68434 - DNA, 981 bp, Zea Mays
aatttggagtagacttctatattcaatagaggagaggaggcttacaatatataggccacacatgtgacgcaccagggaagggtatggcagtctggtgccaatcagagcaggcctaccaaaagagagatatcctgtttccgatattcatacagcagatctggctacctaaggaaggaacctctagttaccataacataccatgttgctatactagcctagacctctagttgccataacagaccatgttgctatactagcctagacagaagtgcctcatgcaggaggcaatccaggaagactaccaaaacagtctaaccccccgcagtcaaaacatctagccaatgcaaatgttgagactggtcttgaactcaagaaacacgaaggaaggcaggcctttcgtaaagatgtctgcaaactgagaggtggtaggaacatgctgaacgcgaacttcaccagtagcaacccgctcacgaacaaaatggatatatatctcgacatgcttcgtccgatggtgctgaactagattagtggataagtagacaacgctgatgttgtcacaataaacaagggtgtttctatgaagagggttgtgaagttcttggaggagttgtcgtagccaacaagcctcggcaacactatttgcaacagcacggtactcaacttcagcactggagcgagaaacaactttttgtcggttggaagaccaggagacaagattatctccaagaaacgccgcataaccagaggtggagcgacgagtgtccagacacccagcccaatcagcatcagttaataccacgagctcggaaacagacgtggagcgtgggagaagaccatgatcagtcgtaccttgaaggtagcgaataatactcttcagagcagtcaggtgggactcgtggggatcatgcatatgaaggcaaatttgctgaactgcataggtaatatcaggtctggtgaaagtcagatactgaagggcactag

SEQ ID NO: 68435 - DNA, 508 bp, Zea Mays
atatttgaacaaatatatactcgatgtaccatatattttcgtttctaattatatcttccaataacatgatatgtatgtttagataaccatggcaaatcagcactaaaagaaagtttctcctataaattatttagattacatagaacatcaaattcaatatagcccaaagtatttaaagaagataacaacttcagctcatcatgcacactagttgtaggattgaatgttctaattttggcacaattaataggatcagaagcaacaacatcaagtttgttctctagttgtggcatagaaataatagtattatcattacacaattattctttatcacaaggaacaacaagacaatcctcttgtaaccaaggcaactcagatttatctaaaggcatgacatcattagaattactcaaattatttttagtatcatccatataaataaattgttccctcataagtgctttcacgtttgtccaagtttgtggtttctcatagtcatgcaaattat

SEQ ID NO: 68436 - DNA, 362 bp, Zea Mays
gttttctgatcaagtagccattggtgcaccggaccactatgcagtaattgctattgtgttataactagccattagggaggttcgtggcacacctatggtgcaccagacctagtccgatgcacacgtaggctaagtggaacagtaagggttagtatttggtagttgggtatttacacccctcccactggccacattgtgtgtcctaccctctccaatagtcatagcattcattgtgagagtttaaagacccattacatagtgaggtgattagcaaagtcataatcatgtgattaggacatcattagtgcaagatagagccacctagagcatccaccacccacattaggcttgtcatggtcgag

SEQ ID NO: 68437 - DNA, 951 bp, Zea Mays
gcatccaactgtatcaaaaaaaaaatcatgcgggcattattttgaccagcgccgcgcatgcggacaacgattcccagcgctacaaagcaccaccagcagcagccaacggtgcgtccacatgataaagcgcagatgctttatttggtcaatcattgtcactcatggatgggattattaatatactttctaataactgcgcactaaacttatacgcaaccactaacatatgtgcaagcaactggtcacgaaatgtctggctgttacggctggatgcaccctaccctacacatgttcgactaaagggattgtgtatcaatttgggatctttgggggtagcgggtacctggtagcaaggagataatcatcgttgtcgaaatactgcaaactcttaaggtagtgtttgattctgtagtattgtgggacggagccgctacacttctaatttgttgttgtttggattggtttcgtgtatctaaaataggaaaattatccataaatgttgaaccatctggctccaccaaaatatctagaacagagccacttcatcccaaccggctccggaagcaaacaatacctaattggatggtttgcttccagatccataacaatcattattatggtcacaatattctcaaaagcaatttcaccaagaatcatcagtggactggtagcaaggagataatagctttcctatgcccgctaatacttcaccaagcaaacatcccaattaagtagagctgccctaaacaatgaacatgaacgttgcaacttaaaaaccgcctacaacatgaaagccagccaaaagcccaaaaacaagcaaacatccacgagaaccttcccacccaatagttcttaggttctagcagctcgtaaaacgctaatgcaaatggtcacttcacgttaaagctcactatgtacaaaattatatacagttctggtatctaaaattag

SEQ ID NO: 68438 - DNA, 1522 bp, Zea Mays
agcagggcatagtggtcaccccaagttaagtaagcgcgagcatgttgcaccgtcttaagtcgttgccgacttaagctgattgctccactagcagggcatagtggtcaccccgagttaagtaagcgcgagcatgttgcaccgtcttaagtcgttgccgacttaagccgattgctccgttagcagggcatagtggtcaccccgagttaagtaagcgcgagcatgtggcaccgtcttaagtcgttgccgacttaagccgattgctccgttagtagggcatagtggtcaccccgagtcaagtaagaatgcaggtcgaccatgaacaattatgagtattcttgaggtctctttattgatgatatattttcagttcacagagtacattgtcgtcccgatagcttttgaaatacagctaggggtaaaacttcctgaggtgttctatgttccatgagttcccaatttccgtgtcgtccatttgagtgagatgatatgatcccggccgagtgacctctgctactatgaatggtccttcccatagaggtgacaacttgtgccatccctcccccgttagaattaggcggaggacgaggtctcccactgcgaaggatcgacatcgcatggtcatatcatgataacgcctcaaagtttgctggtaccgtgctgattgaattaccgtgttcagccgttcttcttcgagtacatcaacatcctccagcctggtagcctcggcttctgctatgctttcaaagaccaaccttggcgccccaaacttgaggtcagcaggtagtactgcctctgacccgtagaccatgaagaagggagtatttccatgcagagctcgactaggttgagttcttaggctccaaacgacgtagggcaactcccttatccactttcctgtgaacttttcatttttatcgaagacttttttcctgagtgcctccaatatcatcccgttagctcgttcaacctgcccgttggctcttgggtgtgccaccgaagcatatttgatctgaatgctcttttgctcgcagaaatcgaagaactctgaacttgtgaagttggatcttaggtcagttatgatactattcggtactccgaatttgaatattatgtcttgtatgaattccatggccttagctgaggttaaagaagcaatgggtttaaactctatccatttagtgaatttgtcgattgctaccagtatatgagtgtatcctccttgagctttcttgaaaggtccaatcatatccagtcccagcatgcgaacgaccaagttactagtatggtctgcagttgctgtgctggtagatgttgttgctttgacaagtactggcaggcttcgcacctctgaactaactcggctgcatcactttttgttgttggccagtagaatcccgacctgaagaccttccctactagtgtcttggatgctgcgtgtattccacattgcctagcatggacttcctccagaagttgcttccccgtagatgagagaatgcatttcatgaggacgcccgatgca

SEQ ID NO: 68439 - DNA, 693 bp, Zea Mays
ggagcatctcatctggtgtctcattgtactacttgtgacttatctatcatgttattgtatatatagcttgattattagcgattagttttagaagaggaagggataaagttacctaaaataaatgttgagtgaaacattgatgttagaagaggaatatgagctcatggataaccaagccatgaacgaattgacttgctgtgtcgagaagatagaggcatactatagacaaatccacaagatggaggagaggctcgatggattcgaactctaccatgtgcttcgacacgacaatgaggcggtggatgccctcacaaaggtagcctatactagggatgtagttccccttgggagtttttcttgacgtgttcctgacctctaaatctgactcgagaataagactgttgtagcctcaacctccgacctatgcaaggctaccccaaaggaccaacagatggatggtcggatgaggtgcatcagtgaaagccctagtttggttttgataattgagtgccaaacatgtggactaatgcttgcaatgggtttatttaggtagggttcacttaaaagtgatgaacaaggcataagagatggagatcacaaccatatgtgtgcaagtgttcatccaatagagagaagatagagtggaaaacaagtcctaaggcaaaggtataatgttagggtgttgattttgac

SEQ ID NO: 68440 - DNA, 319 bp, Zea Mays
gaagctgcaagtgctcgtttctcctcctacagacaagattcagctctcaaatatccagaaatcagtaaaagcacagtagatccaattaagtaagcttacctcattagccaccctttcagagtcaagccgagcattaagagaggaattcgaagaatttgcgtcgtctaaagaagcagaaacccaggccaggtcgatctgaccttgggaatacttctcctcaagctcagaataccactgggttgagtcggtttgatactgaagatgtttctcctcgagcttagagtacctccgggtcatatctgacaaaaaacaaccgaat

SEQ ID NO: 68441 - DNA, 549 bp, Zea Mays
acggcatcgatccttcgcagtgggagatctcgtcctctgccgaattctaacgggggaggtgcggcataaattatcacctctatgggaaggaccgttcctagtagcagaagtcacttggccgggatcatatcgcctcactcagatggacggcacggaaattgggaactcatggaatatagaacacctcaggaagttttacccctagctacatcctagaagctctcggaacgacgatgtattctgtaaatcgagaaaatatcatcaattaaaaggtttcaaaggcactcagattgttcactgtcaattggcacgcttacttaacccggggtgaccactatgccctactaacggagcaatcggcttaagttggcaatgacttaaggcggtgcgacatgctcacgcttaccaaactcagggtgaccactatgccctactaacagagcaatcggcttaagtcggcaattacttaaggcggtgcgacatgctcactcttacctaactcagggtgaccactatgccctactaacgaagcaatcggcttaagtcggc

SEQ ID NO: 68442 - DNA, 417 bp, Zea Mays
tgaatggggatcgccatggtacagtaagttctaaactgaagaagatcccgactcaacccctgcttgtcgccggtggtccgtcaccgttgatcgattgctcgccgtgattcgtgcgttgtggccatcagataagccacccaccccttgctccagtattcttgtttccctccggccgccgcgcgtcatcgcctaaattcgtggccactgctcgagggctctataaattgacctcgcccatagctccgtcaggtagtcaagcaactcctacatcaattcgtgccctgaattatccacccgagagcctcagtttaggattttcccccaaatccaccaagaacaccgtgcggtgtgtgctccccgtggtcagcctattccaggtgaattcatactcctctattgattgttctagcatcccta

SEQ ID NO: 68443 - DNA, 575 bp, Zea Mays
caccacatgtgtagtcttcatgtgtctttctttcgcttgtaggggttctgtatgaagcttcatgtatttagtctttgtgatagaagcttcgatctgaagtctttacatccgcaagtttctcacttttcattactccatttggcatgaagtatattatgcaattctatgtggataaggaatgattgttagttaattctagattattgaaggacacgtttaattgtcatggaatcctcaacagtagcccctagtgggtgaaggtctattctaaaagtctaaacaccgcaaactcgtgatttcctgtaaaggatgtaacgtcgtcgtagaacttcacaactagttgttacattgaagtttgatcgtcatgattgaatagttgtttgggctgaaaattgcttataaataccatacttcgagggttgtttattgcattattatccttgtgtcctagtgatcttattattgtagaccttggtattgtaaagctttggaataagtcttttactcgctttgttgattgtattcagaaaattcggggaagagctaacctttttcacttctacaggttttgatga

SEQ ID NO: 68444 - DNA, 511 bp, Zea Mays
aaaagagtcatcaagtagtcattgaaaatatctcatgaactttaggctcatggtgggttttgtaggaaaaaatcatgaaggcttttgtagaaaaaaaataaattcgcatgcacagttaaccaaacttacatcaataaaaaggggagaaggcattgttcgtcagagtctgagctgccatcaaaacaactcagccagttagtatcaatctgcacccatgaatctcacagatctagcaaaacaaaatggaaccaaaacacacatgaggcttaacagcgagttggaaaatctgcgacagaattcaccttccagtcaaggagcaggaggaaggcctcgaggccctaggcaccacagtcgatgtagtcgtggttaacatgcgagaacatcactacatctgtcagccaacacgtaacaaaactcaaccttttaagaaaagcaaactggttataagtaacaagatattgacatacataagtttacaacattttagtaaagagtttgaactgaaagttat

SEQ ID NO: 68445 - DNA, 367 bp, Zea Mays
tacgactgagatgcaggtgtcttgttggccgctcattatgtgatcctaggcagcgagcacctctctgaagttgaccatctatttgttcacctcgacaggttttgcgacgatgaaaaatgcaagcaacaggaaaccgatttcggagtcgcggcttcactgtagactggccactagttgttcacagcccgagcgtggttggattctagaaattggaaaccccactaccttgttgtcatgctgtgtgacacacgtagtacaaaggtcgtctcgaacaacatgactgcacatgcagcagagatgatatttcgtgacctgaaaatgtcagcatctgttgttctgtactgtgcctcattggcgttaacagtgc

SEQ ID NO: 68446 - DNA, 1730 bp, Zea Mays
tcgtaagcaagcaagaaaaaagaaccttactaggatgagggctctccttctgccaatccatattaattggtatcaaagcccactaccatgacatcgccatccatcaccggtcttgacaccgatcctacgaccatctctaataagctcgacctcatcttggcccagatcgtcaccctcaacaagcaccttgacgctcatgaacgacatatcgcaggcgtggaacatgtgctcggcgtcgtgtacggcctactagtatctccgacccgacacccctaccccaacaattgtgacaccaccagcaaaaggccatagatgcaacaacttcggcaatctcatcaccaacttcgccaacactagcatcaccaacacaggcgatcgcccctacaccaacattggaggtcatggtgcctttgtcattgcctctaccaaccacatcactgatccttttcatttaccaacggtgcaactatcacgagcagggtagtggctatttttgcacgcgcggattccctaccgactgagtggcatgccttcaaagctccaacgtctgcttggagtatgcctctagcacaaccccactcttttgcacccatagaggggtggctgctcatggagggcactatcaactccatgtgcaggcgctcctgaacggattagatttcgagcagataagacgcaacaaccaattctcggacctcgaggaggaaggaatggatcttgcaccattgcagaggcagatcctatggaccgaagtcgattttggggagccttatatcttccacgtcgactacaactacaacataggtctcctccggcggggctgccatggtgatcttctctaggccacgtgtgcccatctattcgagctctttacttctgatggcacccacttgatcagggatttcggtcctttctttcatggtggctcgtccgtgcggcagcgtcagggaagccaccacaccaccagttgtgtgcatgcttcatgagccacctgaccctacctcgctgctacttgctatctaccccacatggagagatatcccaacaaactctacatgagtggactaccaggtcttccactccagcaaccgccacagctttagaacaaactatcttggaggggtggagtagtgttatggcaagtggagtcacacaagggcccacacaacactgtggagtgtgaacattgtcagatcagagagtccaattatgagcaatatgttgaatgtgttctctagctcgatcaagatcaccaagtctaggcatatcctgactaattgcgccccgatcaaagtacaaccctatccatggttgttgccttcggtcatagacgctatatcaatcaaggcaagggtcagcacggaagccaatgcttcttgctccggtaaccctagacaccaaaattcctaagaggatctgatctcctttatcgtttgagtggccgaaaacgcccaactctccatgacgtcggtagaccctaatggttctaccctaccggccaccaacatgccaccccaagtccctgatccacaaggaggaggagaaacaagtctaggcgatggcgctccacacacggactcgacgttgacgccgaccgccacaatccacccgggcccgaaggtatagactgtatactcccccaccttctcttccacctcaccattgcactagttcacgagtcaatcaatctatcgctaagaaccggacgagtctaagagtgaattctgcta

SEQ ID NO: 68447 - DNA, 1041 bp, Zea Mays
ctttccataatcagactcatcattgattcgtccaggacgattgtgcactgtctgcacatcatctaagtacctcgagcacaatgttataaattcatatgcaagataaccctctgctattgaggcctctggatgagccatattgcgaatgagaggtttaagaagttttatatatctctcaaattggtacatccatcgatacatggtgggtccaccaattaaagcttcggtagctaaatgaataggcaagtgcatcatgctaacgaaaaatgagggtggaaattccttttccagtttacacaaagtggttgttataagtggatgcaattgctctaactgttcagttgataatgcctttgagttcagttctcagaaaaaatatgaaagctctaataaaggctcatatatacgatttggtaaatatcctcgtagaacataaggaagtaaatgatttaacacgacatgacaatcatgagtcttcattccagatagctttccttccttcaaattaacatgactgctaatattagaagagaaaccatctggaactttcaaatccttcaagaattgcaaaactgatctcttagcttctggaggcaaaacataaggtgcttgtggcataactaacttgtccccatcttcaactagatgcagatgtggctttagattcatttctttcaaatcaagacatgaattattgttgtcctttgtttttcctttgatatctaaaattgtttcaattatacagccacatacatttttctctatatgcatcacatctagattatgcctcagcagaagtgttttgaagtatggtaatttaaaaaagatgctcttcttagtctaattatctcccctctcactgtgtgaaatcttactctttttactctgatccttggacaagtttatcccctctagatcatctacttgttgaagcacctcatctccagttaatggctcagttgggcctcagacctctcttgttccatcaaaagaagctttatcgtttctccatctatgatctttaggtagaaagcgtcgatg

SEQ ID NO: 68448 - DNA, 350 bp, Zea Mays
atgggttgtctgaagggatatgtgggcggacgaggagaagaacagtttgaattaaaaggtcggattaccaaccttgtcctcttttcaggtccctaagttgatctttcacccgcatatccttttgactttccttgtcccgcatttttggcttcaactgaaagtgttgtactgacagctctgctgtatgtgaggtccacgcactttgccatcttgcgctggagtctgtcatttagttccctcatgaagcaattcttctttttcaagtttgtgtccacttgatcaatagcgtattgggagaggtgattgaatttattgagatactgcttcatagaatctccccttgcttcaaa

SEQ ID NO: 68449 - DNA, 1363 bp, Zea Mays
gaaatgtattgaggtatgttgatgatacataagattacaaactctagcacagaagacatctagaggacgaggatgttctggagagctagaccaactctatccacggtcgtcccttttatatcccaaggtagaggttaagcttacacatgtgtgtcatttatgaaccctatttgtgatcgagttaactgcctctgacctatcataactatgtataatagctaagggtaagtagtggcggacacaggaccaaaattcatgagggacaaaaaaaactgcatgacaaaatccctaaatcaagtaaaaccgtaaaaactacttttgcattgaattcaagctttatatcaatacacggtagaagtttaaagaagcaaactatatgaacaaaataaggaaacatactgctaagttcttgttgtcataatcaaagtcgtgcgtaccttatcgaatgtctatcttctccaagggtgggacgctgggtaagggacaggtcacacgatgtctcttaactagttcaccaagctcatcggtcggtgagataaatcacatcgtcgcgataagcgagatcaggactactagatggtccagcgtcgcgacgatgacaagtaggacagggacgtcggcaagggagcatccgaacagactggcttgagcagtgtcgtgatgaatgaggattgatggatagatgcgaggacaggaggaggacaagagtcgaaaggactagaccgatccgacagtagccccagaacagaaatgttttagcccatccaaaactttattttttctacacttaacaatagatgtacattaggtatagagacattatagaaaattgagggggccatggcctaatttgcccccctttgaattcgcctctgggtggaggagaggtgatttcttcgtacgataggaagtacatattgcatgcattagtagtggagaaactaacacattagatggagaaaacaattcacaaggaggggcattagatctccaatcatcatgcttgagacagttgcctcgtatgacttgtagatttggtatgtattttggctagcggggtcgaacaacgatgtcaacatgctcaatcagttgtgattgttcactaacatgttcaaagaagaagcatcaaatgtgaacttcatggtgaatagacatgggtacaaccaagggtactacctcgttaatggtatataccctcaatggctagtgtttgtgaagaccatttccctcacactagagctaaaaaaaatctttaggcttccgagttgactcgagcttaaagcggcttggctcatctctaaacagctcgcgagcctcagacaaactgagctgagctagttttttccctcaccaggcaggcgag

SEQ ID NO: 68450 - DNA, 328 bp, Zea Mays
gcgagtttgaacacccttactaatgtcacccacaatttgatcaactgggtgatccttcacaatagaatgatggattcttgataccatttgagaattgctagttgaagcatgaggagggaccgaatgagttgaagtatcttgatcatgagcatccacaatttcatcattttgttggctttggtgattttcttcatttagggttgaagaggatggaatgacaaccacactattatcatcatcatcttcttttggctttatttcaccaatagccattgttttcatagcatttctcaattgagttccaccaacatcatcaagattatcgctt

SEQ ID NO: 68451 - DNA, 291 bp, Zea Mays
ccgggctcgactgcatcctccaccgagctggcctcctcgtcgacctccaccgagctcctctcctcgccggccatggaggccgtcgtcccagctcctccctcacctccccttggtgctcggcctccaccaggtcgtggccttcaccacctcctcatcctggcccctcttgcccatgccatcttctcccagtttcctctacaacagccgatgctcttcctctctctgcttcctctccggccgtctggctccctgctcggcgggcacaagccctcggaccccccgcgatctgct

SEQ ID NO: 68452 - DNA, 292 bp, Zea Mays
ctctgccactcgtgtagttgacgttggaagagatccggatcacacaatgacaagggctaacacacccatagttgacacacgccctttgaacgcaacgaggaacgtagcggttcgataaaatgatctagagaccggttaagcaaaccgatattgatcctattcttcgcagtagattcccgaacatctcttgcgaagacctatcggggaggagcatgtggaggttgttctaggatcggcaaggccatctagaacgccgccatatcttgcatggagacatgacgaatatcaagat

SEQ ID NO: 68453 - DNA, 442 bp, Zea Mays
caaattcctctcagatttctatagcaacgtgaccaacactctacagcaaaattatagcttaatagaccagctccaactttgatacatcgtgcatccacaaacagtcacaggatcatgctcaaaattgagcttgaagttcatgcaattccactgttagtctgatttcagactttaagtagtctgacagtccaactttgggcttaattatctccaaattcttatcaacaactatgcttacactcttaagcaaagttgttctcctttgataggtctataatatttatgtggtgacctaaggcaaattctcactaatttgaaagatacaaaggctcaaagttgaatcaatcacactgaaatttagacttcatcaagtgagtcaagtgtggctcttttgcacttaagtccaaatctcaagctttggattgcaaaccctcatgattgg

SEQ ID NO: 68454 - DNA, 433 bp, Zea Mays
gccgattaggtgtttgatgaattgccttaaggtattgtcagccgtaacctgtaacctcatgagtcatgagcatgtgctaaccccggtccatcctgcccgatttgtccctctgcacctgaatgagtacaccgagagaaggtgcctccaaacttactaatcgattagtatgtcttcattgttctactattgtctactgtattcttgtgcgttgagatgttaggtttttgttactcagttgtggggtttcattattcttgtgcattgagaatgctggtggcctcatgctcatgtggggtttctagatttgttatctgtcactttgttcatctgagagaatgttggttgcctcatgctcatgcgggatttccagagtttgttgtctgtcacttttgttcgtctgtttgaagtgttacattatctattacactctccg

SEQ ID NO: 68455 - DNA, 425 bp, Zea Mays
agcttgccatgcctatatatgaaggtcgtcacttggcgagcatgggaaatgcatttcttgaactctctaattttcccaatgtcctcaagcatgagatccaaacagtgagcaacacatggagtccaaaacaagtgagggatctttctttctaaaagtcttccagcagccttaaattagcccattatatgtaacaatctgcactaccttgtctctaccaatggcatcaattcttttctctagtagtgcagctaacatctgagcatctgctatctcacttgaggcattgacagactccaagaaaaatgtgccagctggactattgacaagaaaattgatcaagtgccgacccctcctatctgtccaaccatcagacataagtgtgcaaccaaatttagtccaagccaactcatgagtcttttttatct

SEQ ID NO: 68456 - DNA, 287 bp, Zea Mays
tgtctcatattaagctctgactgggtaaagatatacttcaaacttatatgatctgtataaatgtgacagatattccccagcagataatgatgccatatttttagggcatgaaccaccgcagctaactctaggtcatgagttggataatgttcctcatgccagcgcaactgccttgaagcataagctatcactcggccctcttgcattagaacacagccgagaccactgcctgatgcgtcacaatacacatcaaagggcttttcgatgtccggttgatccaataccgg

SEQ ID NO: 68457 - DNA, 390 bp, Zea Mays
aacactaggagtttcagaacttaactttagaagtcatatgtttgatgacaaagagttacctgacctctgatttctcgtgccatttgagcactcccatcctctggtgtcttcctgactgttcatctttcctgacttacctatcgaaatctcatcctaaaatttgctcttggtttgcttctctatcactgctcagctgtcacacgagcactacattccaacacttatgtgcacgagttctagggtaccaggcctccaaaattaaagtcgcccaagtgtttatatacttgggtgaaggacgataatcacattttgggggaatattagcgatatgactgcttacttcctccacttctttttggtgtttttatggtgattgagtcaacacagcaa

SEQ ID NO: 68458 - DNA, 284 bp, Zea Mays
gacgaggcgaagaacgattttgattgaaaggtcggattaccaacctttgtcgcttttcaggcccctggttggacctgtcacctccaaagccctttgacttccctgggcctgtgttctttgcttcaactgccagcgttgtgctgacagccctgctgtagaagagatcgaggcaagtggtcatcttccgttgtagccagtcattaaggcctctcataaaacaattcctctttttcaggtcagtgttgacctggtcaattgcatactaggacaaatgattgaatttg

SEQ ID NO: 68459 - DNA, 466 bp, Zea Mays
gtcgcgccatctcgtcttgtgtcactacgtgcattgactttatctgaacatttgtttggttgacagtgcatctagagtgtgggttgtttatctgagcatttgtttggttaacagtgcatctagagcgtgggttacacgagtggatgcaaaacaaattattttgagaccttttggctacatccactcacatacatacgctaaaaatgcccgtttccagccggcctgaatggtgggagcgcggcaatcagccggaatatttctttctttcatgggagtcatgcatgtacacgtagtattgtcttcaataacgcgaatccaagttttaggattggaactgtgactggcaaactagaacggaattaatcatcgtgagtcacatcctatcttacagttgttgaaccaataacggatcagaatgagatgttttctcggcacatatttctaaggttgtgaaggtagggattgc

SEQ ID NO: 68460 - DNA, 475 bp, Zea Mays
aggtttcccacttgaaactagtcgtttgtagtggtggaggagccattttggcttagtgtgtcatcaatcataccttaattgttaaaatgtttatatcttccattataaacacaagataagatgtggtgatgtggatgtgatgtccgctactagctgtttgacctcccactcaatagtttgtgtcacactgaataagtttggtgcactgtccggttactaatcattggggtaaagttgtctgaccgctagtctgacacaacacaccagatacatctggtgcgccactaaatgcactacatcagctagtcgttggaacttccagttaggcaagcattgatttattgtacattcggcgtgccactggatacgtcaggtgtgtccaattttgagtcgttccaatttacattctctctgccagcattgttagatgtgacgcttggtgccacaccagacacgttaggtgccctctgctgac

SEQ ID NO: 68461 - DNA, 1048 bp, Zea Mays
caaacttgaagattttatgatcatgagtatgacatcccagagatatccatgtacctcacattggctcggaatttatgataaccacctagattcgtgcacgcctgttacactatatatgacactatttacgctcaaacttaaggattttacaatcaagaatttgacgtcctagagatatctacatctctcatgttggctcgacaatcacgggaaccacctggattcgcacacgtttgttatgcgaggtcatacgtgacatcgctttgaccatcaaaacaacatttacgctatatacgacactttatactcaaacttcaggattttacgatcacgaatacgatgtcccagagatatccacgtctctcatgttggcttggcaaccatgggaaccacctggactcatgcacgtttgttacgcgagggtcgtacgtaactatatttactctatatctacactatttacgctcaaacttgaggattttatgatcatgaatacgatgtcacagagatatccatgtctctgatgttctctcggcatttacaataaccacctatattcgtgcacgtatgttacgtgggggtgtcttatatggcatcacactgaccattgtaacactattacgttatatatgatacaatttacactcaaacttgagaattttatgatcatggatacaccgcgtcagagatatccacgtctctcatgttgactcgatatttacggtaaccacacaggtctgttacgcgggggtcatgcgtgacatcgcgctggccattgtaacaacatttacgctatatttgacactatttacgttaaaacttaaggattttgtgctaaaaaatgtctcacatgccatattttttcgtgcacaacgaaaagggaatcatgcgatttatggtgtttgttactgctaaaaaaatcaaatcctctaatttccacgtggacataggtgggatggttggttgagcggaggacggagccgatcgaggctactgtaactatttaaggtagtgtttggttgagtagccaagtaaaacggagtcgttt

SEQ ID NO: 68462 - DNA, 1037 bp, Zea Mays
ggaacacaggattagaactcaagtatgtagcacccaaattgtcacaccacaaaacaggcggtcttgactgcataacatgcaattccttcaacaatgattgtatccatgttgcttcagctgcatcatttgctaaagccttgtactcggctgcgagcattccatgagataaggtttggcccaaagaaaatggcatagcctccagttgaacgtcgatcatcaatgcatctcgcccagtctgcatcggtgaagatgcttagtaaactagatcttgatggtcgtaatgacagtccagtattcaaagttccttttacaaaccggagtatgcgcttgacagcctcccagtgtaggattgtgggtttggagaggaactgacatactttgttaactgagaatgacaagtcaggtcgtgtgagagtaaggtattgaagagcccccactgtactccgatagacaaaagcatccttgtctgtaagaggtttcccaattgctctggataatttttcagtggcacaaagaggagtggcaactgacttacagttttccatatgaactcgactaagaatatctctagcatatttctgttgagtgagtgtcatgcccccagaattgtaagtcacttcaataccaagaaagtaatttaactaacctagatccttcataggaaaagagactgagagttgctgcagtaattgccttgttgcttcaggagaggagctggtaatgacgatatcatcaacgtacacaagcatgaacatggtgatgtcgttggccaagtagataaacaaagaagaatcagcaactgaagaagaaaaaccaagctggtaaaggcgctcactaagtcgagagtaccacgccctgggggactgttttagaccgtaaatggacttgtgaagcttacaaacattgtcaggtcgagaggcatcttgaaaacctggaggctgttgcatgtatgctgtgtcatcaagaaaaccatgaaggaaagcattgctgatgtcaatttgcctggtgtgccatccacgagagactgcaagggaaag

SEQ ID NO: 68463 - DNA, 1271 bp, Zea Mays
aaaaaaataaacataaataacaaaaccttcttgctgtgaatcgcgctgcgttgcagctctcaggacttcatcgatcatttcaccaaatgtttcagatagttcaatctgcttcgaaacaattatctgatggctcagctgaagagaatcacagtacttatccacctctttgtcatgagcgtcaaacattgattcaaacattggtcgatgctaggagggcaaacatttcaacttgttgccaatcaaatgcttgatacatggcacatatatgttgaaaacggcagaaacgtgccgttctggtgcaatgacgtaacacgtttctgaacggctacgaaactgtataaagcccagttacaactgttagcagtaattaaaattgaaacttctaaaaataggacaaaaaatggatatgtctaacctctgcatagccgaatggttcaccagttttacggggtggacgtctgtcacccctagccaaatcccttatggtctcattgtcaaaaaacttaatgcggggagtaccatatttgttatcaggagatgtagggtgatgtaagtgatcaagatagtaaatctgaaaaaaatgaatgaaaaaatataaacttagtacaaaacaaatatttccatatcatatatatgcacagtgaacaaaataattacttactagaactatgagtgaacatccatatattgttgctgtaatgtttgttttgttccttttgtgccaacgtgtggcagcatcacacaaatccgtgtaaactagttgacaccagtcaatatcaaccattcgggccatgtttgaagtcattagtacctcattgtttgtaatgccccatgaagcagatggaaaaagaagtcgattgaatagaatcagaaaaaagcatctgattgataattcatcatcagtgccaagcactatattgtcctgaagcttgacaacatcaaattcttctttaccaactttgagatcacgtctaagttttgcagcagcatccacttcaccataccaatcagtaaactccctgccccctctagcacatggcaaacccaaaataagacgaaccgtctcttttgttatcttcagttccttgccagctcctgggcgtatggtcatgtcatgtggatccaatttatccatcaaccacctaatgagagatctgctctctaaggtatcagttcgcaaatcaaatatactggaaaatcccaacctagcgactgcatcgcgctgccgatcgctcattatccaagttgagacaataacatcataaggaatg

SEQ ID NO: 68464 - DNA, 409 bp, Zea Mays
cattgatgatatcctggtctattccaaaaatgaagacgagcatactgagcatctgcacatcgtgcttcaacgactgcgcgatcatcgtctttatgctaagttgtctaaatgtgaattctggctaagggaaattaaattcttgggtcacacaatttctcagtatgggatatcagttgatcctgagaaggtacaagaggtaatggattggaaacccccgactatagtgaggcagattcagagttttctgggtttggcagggtattatcgacgattcattccggatttctctagaattgccaagccaatgactgaactgttgaagaagggagtcaagtataattggagccaaaagtgtgaagatgcctttcatacactaagccagcatttgacaacagccccagtactagct

SEQ ID NO: 68465 - DNA, 611 bp, Zea Mays
gctgacggaagaaatagctcaactctgaaagcgctagccagacatgctcagggacatagcctcgaaccatcacaggatgaatccattcaatccatatgtggaagtcatgactcttcatccctaagactcacatagtagataagttcaccccctactcaggttagctgcatatccatcaaggaacatcaacatcttgatccactgaagtacttctttcctctaggccctgcttaggacgaaatcggccttaggccttctccacgtctttttgccacttggcggcttcatctctaggtttggtctatcacataacgctgccaaatccacgcttgcctttacgttatcctttgacttatcaagaatgtccataattgttgcccacagtgcctcgacaacattcttttcagtgtgcatcacgtcaatgttgtgtggaaggagcagatcgtcataatagggagccgagtcaagccagacttatgtgtccacatatgctgctcaccatatcccacaaaactaccttctatattgtccacgagcccatctatctgttgacgaatttcgtcaccagtcatcattgcaggtgggcgatctgtcactacgacacctttcgt

SEQ ID NO: 68466 - DNA, 406 bp, Zea Mays
gggcaacggctaggttctccgagcaacagacatgaaatcggggctaccttgatcattttccccaacttaattgcgctaataatcaactaaggagctctggccacggtgaccgagagcatggcggctagatcgtcgtgttcccgacgattggtggtctcctagtttgaattgaaggctcggcaagcatcacagagtaaccagagtgctcaaacaagggagagagagcgatgaactaacctggaaagggctggccgcggtgatgggtggtttacggtggcggagagtcgatttgggggaaatatgaaattggggagctgtggggaatgatcggagctacgagcgggttctctggacgtgcgattacctaacggaacgggctgaggcttcaatttataggatacttaaa

SEQ ID NO: 68467 - DNA, 497 bp, Zea Mays
ttgaaatccctttcaaggatagtatcaagggatggcgcttggagtggtttattgttgagaaccacggaagttctctccccccacggtcggggagacagccggacgttcgcactccgagttggaccgagtcccccacggatcaggaggtggatgaggcaagggctttgctagctgaagttggactgctgaaggagaggggtctgactgcagaggctatggttgctgattttgtcttcaagaacattcagccgttgaaggacatggcatacccggcttatctgtaccaaggtctagctgactcaactcgggttaccaacagaagaattcccactgtagatttggtgaaccgacttgagatgattcttagaggcaaggtatcaaatgttggtgccccagtggcatactcagcctagaacctgcccccttccaaggccttcactctttttgtgtcgaatccacctgtcgctgatgggggtttgggccttagagtgcgaccc

SEQ ID NO: 68468 - DNA, 580 bp, Zea Mays
tttaataataacatcatcgcttgccagaggccaatgcatccacccctgccccgaccgaatcacaaaaatgttgaagcccgaaatgaacctaatcattcgaattcttgctgagatttgctagggaaagagctagtgaacaaggaaatatacaagaaagtgcaagttgaagagcagagggaggcatacctcaatgaattgaaccctagtgacagagtaccagcagatctggccaggcaaggttggagtccccagcgctggtgtctcctcttccgtgcagtaggtagggagcttaggaatggcggtgagacgcgacagcggctctctgctcgggtcgtgacggcttcccggatcttgtggccggggacgacaaagcactaggggagatccagatcgtcgaagggggacaacaaggtgcgcaccacggtcgcttcaacaccaatgccgccttgattcgcaatggtggatcgctgtcgccttcctaaccgccgaggagaaggaaactaccgtcttccattagcaagaaaaatggttctttatatggtgatattagaataaaatacccaattaaattaaataaaat

SEQ ID NO: 68469 - DNA, 1021 bp, Zea Mays
tagaattctataaccactcctacatttgagtaagaataactcatctcaagagctttgcctcttgacttgagaacgagtatagggtttgagaaacccaagccttggtgacttctcaacaacgtgaaggtttgcaagcatttgtggtgagctagaccacaatataaatctccatgttcttgcgttccttacttattttatgatatacttgctcataagggatatttagtgtttgatcctaatctaacaatttgtgcatcttagattactttctactggtgagttaggatttacatcatcttagaaacctaacaaatttactcgatctattttttactaggtcaattttggactgtgcagttcatgttcgtggcagtgccgctctaagaccgatagtgccagaccatcacactatgtagttcatgtttgtggcttgtgttgctaatcagttttagagtgtcattttttacatgcctatccatcccactctaggcatagtagatccttgcaactggcttttagggggcccaatagtctaccatgtgtgttgatattggggagcacttagggtatatggacacataggctcaaggtccttagcaatgcaaggtccctaaaaggttatttttcagcccctgagcataggatcatgggtgagttctcgagcccctgcgagtatgaacaccacaaaatatgccacaatgtcccctaggcgatatagttcacgatgcatctggggactttagcatcacaaaggccccaaagggatgtcccattgaccccaagaccagaggattgagccaacaatgtgttttgggctcttagtatcgcaaggaacccaatgggacatcttcgacccctaggtacgaagagccctatgaccacgagacacaacacttacagattgctcgaatttctcctgcatgaatttataagaaacaatagtaaaattcctccttctcatggtgatccttactttattttaagttgtagactcttgattctacttctaaaaccttttggg

SEQ ID NO: 68470 - DNA, 658 bp, Zea Mays
cgcgagatcatcaagcttgcaaagcgcgtcagcgagcgacgcgagcagtcgtccaaggacgactccccacctcatcgccggcctggcaaggagggggtcgacgacggcgaggtagccgcgggagaatgagaactcgggtatcagtcacccgagggggacctcaaggacgtcttcaccggagaatccgactccggggacgataacgaccgccacaagaagttgtacgtcatgtacggcgggagctaggagctcacctcctgcaggttcgtcaagtccctacgccgcgaggtcctgtcggtgactccaggggtcccgaaggctgccccacatcaacgatggaggagcaccaccatctccttcggggcatccgactgcccccgacaacatggcaggggccggtgtgctaccactcaccaccgcccctgtcatcgccaatatgcggctgcaccatgtgttgattgatggcggggcaggcctcaacgtcatcagccatgctgcgttcaaacagttgcagatcccggggtcccgtttgggaccctctccccattctctagagtgggcccacagccggtgtatccccttggaagcatcgcactctgggttacattcgggaccgaggagaacttccacacggagaatgtcgtgttcaacgtcgcgg

SEQ ID NO: 68471 - DNA, 714 bp, Zea Mays
cagatgccaagtgcttctgtaatattcatgaattatcctatcaaacgaaagcaactgggaaagaacaatatcacaataacttcggctgctacaacttcgtgccccactctgggaccagctaccctgtgcctacatttcagaagaaatggctgggctcttggatgcaggagtggttttatgtgaaaaatgatctagaccagagggaggatataaggggcatcattcaacgtcctatatggtctcgctttggcatcaaaagaccttagtcgcactcgaaaatgatgtgcaagcatgccagatggctttcaatactatatgcacctacatcggcacaagggatttgattcaagagcatattgcttacagagtatggccccttgcgagtggatgggaaatgccgaaggaagctaccgctggctccagccaaagtggcctgatctatctgaagtacacattttgatttagggatcagtttgacgaaccgaatgatgatcggttggatgctatagaggcaacaagtgatgaactgcttagaacctactcgagggccgaagacgaagctatgacagtggccttcggcgctcgagggaaaaagagactgaatagggtttttgatgttatcgggtttatctaccctgactactgttttcctgctcggaaacaaagggggaaaggaaaactgctgcttcgacgtcttctagtgcgccgaagacg

SEQ ID NO: 68472 - DNA, 593 bp, Zea Mays
gatattgatcctagtactctacactgtgaggtgatgtgagatgatggatcaaaaaacaagaacatatatattcatcgttcattttgttccatgactgaaaaagcaagcaccggagccatctggaagaagcaagcaccggagcccagtacgccgccgcccgttgctgatcagcacggacgtcgtgctttctctaccaaaagaactgcgcgcgaaaaaaaaatacacggaaccaggtgcactgaagcaattgggaaacaatgtgtgacacgtaaatttgagggaggaaaggcaatagattcgggacacgaataatacgagggaaagaagagggaactgttggagggcataaaaagcattttcttcactaaaaacgcttttggggttcgtttacatgttttcttggagatgctctaagggcaccaaaaataagtttttattattatttttaacgataatagagaggtagtagaaagtaatttattttcaacagctaaagatatgtgatgtcttattttcggtggaatgcctttagccaataaaaaataagttaattttggatggtctccgtattatttttggagaattaacgtagc

SEQ ID NO: 68473 - DNA, 457 bp, Zea Mays
aaatgaaagaatcaaaggaggcattgatgagcaaggtatgtcgtgcttgttatcaataatgtatggcatacatgtttatgtaaatatgttgtttaattatgataataacgtcttatagggaccaaggacaacagatacattgtataggttcgaagtgagagtctctagggcatacaccagagctgttatgaatagattgaggaatcaatgaaatacaccactgcatacaaaatattaaatgacacagacggttgtgataaagattggatcgtacaacatacaaaaaggtctaataaaattgtgtggggacaatatcaattcaaaataacagcggacatagaagctggggagtatacgtgcgagtgcaaacagtgggaacatacaggtttgtacatattgtgttgattaaaagaataaatttgcatactaaataatttgttgattgtagtacaaatta

SEQ ID NO: 68474 - DNA, 297 bp, Zea Mays
tagaaggcttgctttaggacgttcttcaagtagaaccacttcacatgccaccccttgttggactttgctattggtgcactgatgtactatgaggctcaggatccccagaaatgaatgctggcacaacaaatctacaacgctaagaaggcacccgagcactcctttttcctctagaggtacaccatgaagagatgtcgacatagctcaaaatggggtttgatccctacaaatcccttacaaagcaccatgaacatggctatgtgcttgatcccatagggattcaggtgcaaaagctcg

SEQ ID NO: 68475 - DNA, 531 bp, Zea Mays
gacgcgacattatcaataaaacataaagatatacaccaaatgcagcatcaaaacatgggaattatactgaccacaagctaatcgcaagagccagtgaaaagatgggaaaaagaaatgttctgcgagaggtgctccacctcgacgtaggtgtgaacgattaactgacaatctgatagaaatgttcatgatgccattttagcctagaaacataacatattcagtgcccatcaggcattaacaatactgggttgaccacaacaatccatttaatgcggtgagcaagctcgtctcaactcagcaagcatagccatcatccatgtaagtgccaaatcccatgagacgaagatatgcaagcagtgaagcacacatagcaattacgccaattaaggatcaacgcacactcacccaatagacatccttggggtgacgacagcgtagaaaccagcgccgacgttcgggcatgaagactccaacgaacctacataggccaaaacccaaaatatcaaacaatgaaaagaaaccctagaccag

SEQ ID NO: 68476 - DNA, 701 bp, Zea Mays
ggattctggaacagtacttttgactgttcgagcttcggactcttctcttgcatcacgctgctgctgaacttgacattgcccctggggttgctgattgtgagatgtagttggagctgatggtggtggttgaggtaaggcccacctagctagagagtgacttgtcgaagcaacaaaagctgtaggttgtggaaatggctgttgattacacacatactctgggatgtatggagagtagcacgaagtagtgtgaagaacttgcttcggctggatctgccatgcttcagcctcagctattgccttctagttttgtatcgtaacttggcaggtccttgttgtatgtcccatgtccttcccgcataacaggaaaaacagtcttcttggttgggagttgtatctccctcctctgcctcgtcctcctctacctcttggtgctggcggtctgaaggaactccattgagcccctgttgactgggagctacgctgctgcccttgattgtgattgtttttatcttcggtttgagtcggattgtggattgttcggacatgccttagatgaagccttcccctgaagccccaagtcatctcaaagtacctataagcttcttcccttctttgtcgaaaatcattgtcagctctgatatattcatccattttttgagaagcttctctcgggtttgagggggttttctagcaaaaatatt

SEQ ID NO: 68477 - DNA, 428 bp, Zea Mays
atattattgttatttgcggggattttagatcggatcgatccggtttgggaacacggggacaatatatatcccagattcaatgtgctttatttgcctaaaaagatgttcagatgagatggacaccgagagtgacaccccattaccatcaagcatcgtggctggaggcacttcaagggaaaatttgtttgagtgggctaagaaaaatgtgggagacactcacgttggtaagcgaaatgtgcaattcatgttaccaaaaacgagaaagaaaggaaagaaagcagtggcaagcggtgacgagatcgatagtggagataaaagtccatggtaccaagagtcccaatacatttcacatatactaccaaatgttggtggactcgtggagtacgacttctacgtggaccagacagacttggtcggtacaatacgaa

SEQ ID NO: 68478 - DNA, 756 bp, Zea Mays
cttcagtgccttccacatccgacgctgagttgatatctttaaagcgccgagagcgcaaaaccgttaaccaaatccccctttcattatcctcgcatttctaaatacactcctttaccttttgtacattaggaaaaccaccccaatttcatggtgatgattattcttggtggagtattaaaataaaaaaccatctatactctatccacccaagtttttgggatgttgttgattttggaatgaacctaccggagaaggatgatgaaggctatgaatccgacaaggcagcccaaaccattcatcgcaactcataagaaaccacgatactacttgtctctctatgtaggaggtgttaaacaaggtgaacgagctacaaacggccaaggagatttaggactccctcaaaacgacgcacgaaggtgacatgatcacaaagatcacaggaatggagcttgtcgacggagagctcggaaagttcaccatcaacaaaggggaagggccacaatagacatacaactggctcaagacattagtgaaccaaatccacaacctcgggagcaccaaatggatcgaccatgaagtcatttgactcatgctgaggtcccttgtttcatgcaatgctacacttgttactcttttgtgtgaaaaatcctaggtatgaggtgatgaccctcaatgtggtgcttgggaagttccttagacatgagatgatggttaaggattccaagcatgtggaggatttacataaaggcaactccc

SEQ ID NO: 68479 - DNA, 1261 bp, Zea Mays
ctcgagattagtacagagatagaatactctaattttgttgctcattatcttctacatgggcttcttcattttcaaccggcacctcttcctggtcttcgagttcttcgggttcagcttctgcttgcacctggttaacttgctcgctattgacggataaggcctggcttttacctcctgagacttgaccctgcttcatcagagctagagtactgcaagcagccttgttaggatagttgttggcataatacatagcatgcccgcatttaaaagcatgacctatttgtcgaagtgttaggagcgactggtcccactggaatgcttgctttggaaggagtagattggacctattgtccggaacttccacgagctggggtaccttgtgatgaggcataacaaggacgattactacttccagcctgttcctggttagtagccttcctcttcatctcgactagctccacacgcttgttttccagagctatagccttgtccagaagtttctggaaggacgggaatgagtgggatatcagttggtattggagtggatggatcaatccttccggaaaatagttcctcctttttctcgtcatctgcaacttccctaggagcaaatcgccgatagaacccagcgagcccaaggaagcttctcacttggctcacattctgtggaggcatccagtcgcgtacaactttgatcttttcttcatctacctccacaccttgttctgatacaacaaatacaagaaacactaccttgtcggtgcaaaaggtgcacttctccaggttagcatacaatttctgttctcgaaggacagccagtacatatcggatatgttcaacatgttcatcaagggatttactgtaaattagtatatcatcaaaatagacaacaacaaacttgcaaatgaaggttctaagaacatgattcattaatcttataaatgtactaggtgcatttgttaacccaaagggcatcaccaaccattcatacaacccaaattttgttttaaaggctatttttcattcatctccctctttcatacaaatctgataatagccacttcttaagttaattttagtgaaaataaaagcaccactaagttcatcaagcatatcatctaatctaggattggatgtctataccttacggtgatgttattgatagctcggcaatccacacacattctccaagatccatctttcttaggaactagaaagacatgggcaacacaagggaaagactttcttgtatgtaccattt

SEQ ID NO: 68480 - DNA, 626 bp, Zea Mays
ccctcgagggctggaccatagcttgcgctactcatccgagctagatcatctccggcaacaccctcgggggctggataagcgccagcaccatccttgaggaccaagtcctctgcaacagctacctctaaggctgaaggtccctcaatcacttccatgggagcagggcaatccaaaacatcttcctagccctcaagaccgtgctccaaggtcaatgaggcgcgggacgctgcccgggaggaccccaacccggcgccgaacacattaacacaaacatccatcgcgccatcgtccgccgattctgataacagatcttctggaatcatgtcctcaagagcctgatcaaagttcgccagagataattcttgcagaccaataagggcagacaaggccggagaaggaacaccgctactttccccactaactatgtaacgacgactgtttttccaaatcagagggatttcgtcctcttcttcatcatcctcatcaacaagacggacagcacacccattgggatcagcgtcaaacgggttacacccattgggatcagcttcagtaaattcaggaactggcacttcctcagcaacaggaacagagggaccaacaccctggtccaagctagacacccg

SEQ ID NO: 68481 - DNA, 1073 bp, Zea Mays
agacccaaggatctccactaggaacgaagtctcacctcaaccccaacttgggctcgatgacaccatggagtcggacctagaatacgacatcagctttgacctaagtttagattccaattttgactctaatgatattttagcaaaaccctcagaacctatcacaaacccatgtggtggcgtgctataagccgatgcagtaactcaacattcgaaagcataatacaatcccgaacaagttgtcagtgaccaacaagtaaccagccccaagacagagttggctacaccaagaagcaatgttgtagctagaataaggcggagacaccataaaatcaatcacatcaagagtaggcctatcctggacaggatcggtggcaagaggctagtcaaccctgggatgagtcaaaggaattgcactactagatgagatctcgggcaattcgacccgcgtattttcatacaggaagagatgagcaggtcttgtatgcacgaacaatatgttttggaattcatcaggatggtcaaccttttaggccaaatcatccacgccacaccaactcagaacattatcgagtccaaattgtcaatcaatgtactcatacccttgctccctcaaaacatcccacagattagggaggatctgaatcggttgaacaacaagatgatctactcaaccctatatgcatgagaaaaagagccactctcatccaaaagtagaaggcataagcaagaaaaagaccaaactactatgcgaattagagcacagtatcaccccgcagtctagcagtaataccagtcagggcctttgacaaccatgtaaaaagcatacttatatcttcctcctcatcatcatcactagaggaattataattaggaatatctttaagatatacctttttctccttcaccatcaagcaagtgtggttgaccttggggaagagagaagatttgttggaggcgattatggcgaggccttcatcgttggagtcaggggagcaacattttgaatcccactcatagctgatgtgggcttaacctttcttcttcttgtagattttttcttctttacattgtta

SEQ ID NO: 68482 - DNA, 502 bp, Zea Mays
cataaaagtctgaaatatatttttacacagtcagaactggacatgtgacaaagaaggtggctcgagctgatcaaagattataacttaaaaatccactaacatccaggaaaagccaatgtggtggcagatgcactgggtcgcaaggcttcctgccattgtcttacagtgagggtttctgacaccaccttatgtcaagaaatggagaagttaaacctggaaatgatacaacatggaactttgacccaattaaagcttgagtccgttcttctacggaaaattattgatgcccaaagaagtgacaagggtatgaagcatattaatgagaaaatagaagccggcaaagctaattgcttcagaaaatatgaccaaggaatattatggttcaatgaccgcatagttgtgcctaaagatgctcaagttcgccaacaaattttggatgaagctcatcctagtcgatattccattcatcccggaagcactaagatgtatcaagacttaaagc

SEQ ID NO: 68483 - DNA, 365 bp, Zea Mays
gcgagggctgcatgcacttcaaagctattggtgggatcctgccttagcaccatggtgccaccaccatctaccctcactatgtcaccagggtcccaccacgtcgtcgcaatgcaacaattgttgtcgcttgccattgcctacaaccacttgccctctctgcccctcgcatgttgctgcctcatcatcgtcatctcaaggcagactcgccacagcgacacgctgatgtggccgctttaccctggtgctctcccctcgtcctttgttggcccacccatttccctctctccgcctttcccctaggttggccaaaatggttttctgatattcatatcattttagaacgctcctaatattatcacctaacc

SEQ ID NO: 68484 - DNA, 958 bp, Zea Mays
aggcttttagatcatctatttgcttctaaagcaggaggggattccactgcaacaaggacaaaacctgatcgggaacaggggcaccgcaagacctcaactgagccaacacagagctcaaaacattctgcaaatacaagaattagcaaaggaatctatttgtcaacacaagtaaagcatagcaaaagtcagctcacctaaaggttagaaaggaacaagggaaatcccaaagccggaggcactgacgtgctatcagacggtggggtactagcagaagcaatatttagagcagactcgagccccaaatgaggattagagctcacgcccaaggcaacactcagtgaaacctcagctctgacagcatgcagcggattcccagcgttcgggtcaccgacctctaaagtgatcagaccaacaagagaaataggaagacttgtcaacactggctcctcagactgaactggcggtgatctgacatgaacatccatagaagcggtcgaggaggagccaagctcggcaccctcgggggctaggtcatcctcagcagcaccctcgtgggctgggttatcctcagcagcaccctcgggggctgggttatcctcagcggcacccttggggctaaagcaccctcaatcatactcacaggatctaggtaacccttgcatgtaacatcaggaaccgaggtatccccatgacttaggccgccctcaaaggtcgaagaaaatgggaaactgtctgggttatttcttgcccgactggattactagctgagggggtgtcatccgggaccttgccatggatgacagcaccctcagtttgaggaagcttcaataaaagatcttcagggataatctcctccagtgcataatcaatggcagacatcgtcaacctctagagattaaccagccctgacagagcctgaattgggacatcattgttgtttttgctacggaaattcttg

SEQ ID NO: 68485 - DNA, 704 bp, Zea Mays
attaatatacttcttacattcttagacatataaagtcacattggggcactagatatttcacacatggaaaacaagcagatgaatgtaactgatctaataagagtaacttcctatatgtgcttgtagtttccagttaatacttaatttagtgtctttctatggaaacgggaaattaaccttgcaagttgtaacaccatttggttaacatggatgtggtttgtagcacgtgaggggtagaacgatgtccgcctctttcatttatggttcatggtacaagtctatgagagatgtctgttaattgaaaatcatgatggttcatatatgaaacagaataccaatctctctagaaatataaaagtatcaggggtcagagattaatctcgttggggactgcaactagacatcactcggttctagatcaaagtagatttattagggttttaattttttggctgagatgtgtcaagttactcttattcatatgttccatttttacctaatttgggatctcatgatctttgctggttctttcaatatgttaaactgaaataacaagcacttagcagctagcaacatcaagatgcaaggaatctcattgtcctagatgttaaactaaaatagcagttagattttcctagatgttaaactgcagtagcagttagattttccatgcaagatccttaaactgatcacttaatgttcac

SEQ ID NO: 68486 - DNA, 483 bp, Zea Mays
gtgaacttcgccagtgcctaccagcagcatggtgtagaagcacacctccatgcagtaaggcaggaacccagggaaaccctctaggtgttcatttcctgcttcaccaaggtacgtgggacaatccctcgtatctcagatgcttccatcatcacagctttccgccagggggtgcgtgacaaaaagatgctagggaagctggccacgcgcgatgtggacaatgtcaccacactcttcgccctagctgataaatgtgccagggccgctgagggccgtgcttggcactcggcaccacaagctggggtcgcccagacgggcggttcggatgctgacgcccagggcgatggcaaaaagaaaaagaggaacaagggccgcggccgcgagaagcaacaggttgctgctccagtcatcactgccgcagctggaggccagggtaagcgcaacaagcgctcacggccccaagaaggcaacgacagcacatgccca

SEQ ID NO: 68487 - DNA, 837 bp, Zea Mays
gttaatggtgtatccatccgtgttatacctaatcacactgtaatgttctgtaataaccattgggaggggaatattctagggataacgtaggtaaccagggacataattgtatttgccaaggtgatactgccccttaggtacttataaatacccacacatagcatcctaatgcaggaggctgaaaatccaccgtgttgacaagtatcaaatcattcccgttctccatggtttggattagtttgaccacgtgtcagcaagttccaacacacttatacctaatgacttcttgcatattagttgttgccgtgtcatatatccttctctttcgtatgcctcggtaatgtcattatactaatttgtgcgctgtcattatactaatttgtgcgcaaggcgaccccaatcactgtcactggtgagcagcattcgtgaatcgtggcctgtcaggaccgcgtgaccatcaaagcagatgctcctgccattacaagtttgcctactctggactcaggagtggactccaccacggtaacggataacgtcattgtcagtcgtcgtcgtccactccggcggatactactaaagccgcactgcagaaaagaccgtccatgcaccgtgcggatttggttgcgttgcctgtcgtggtcgtcgccgcctccgttcgttgcctgcctcacacaccggccatgatagtaccatccacgaagctttgaaaattgaaattgccggcaagatttgttgaccttttattttggcattgcataattgcaaccattcgtccgcttagtggagtggatttgtggtcgttcccatgtggctaaaacaaatctgaggtcaacgtgg

SEQ ID NO: 68488 - DNA, 671 bp, Zea Mays
agaattttcaccgcctctctgcgacgactccaaaggacagcgacaagacaaggacaagatcactatatcaacaagcacaaaacggggaggagacctcgtctagatctacaaggaccaccaagtgatgcgacgttgttgcccatagtgtttagggtagggaagggaagacgcggggataataagtgagcacatttgtgattttgtggtggtaaaggggaaagatggcgacgacatgggagctaggagaatcagccctttgcaagtacatgtggtagacttgtgaagttgcgaagcatagacatgggtgtagtaggagactaggggatgaagtttgagcgaagtcatggcattttatatgtgggtgagaaggtctttagtcaacattttcttaatcagatcatgttgtgatgccattacaagctctaagtggagcccaaacatgacctaggaattggatcaggcaaacacgagcatgatagatatgaaagcatctagttttagtgactaatgacaacactaaattattggctatgagtaataataattggctatatagtttttgtgcccctattgatggtattcaattattgattttagaaggatgagcaaaaaggttaaggactggctagttctaatagttaatagagttgatagacatatatactagtgat

SEQ ID NO: 68489 - DNA, 527 bp, Zea Mays
cacgtataatactcagagagcacgggggctaactcgcaaaacatctcagactcagtctatcccgagatgtactgtgggttgattcccaataagtgcagggactttttagcaaaagtaatgcgacgaaagggtatcgtctgaatctggtcgcccgatcagaaacggacgcgcgagattagatctgggccagttatgaacccgctaactttcttggttgccggatccgagattcacgacccccgggttacaattccctcggacactcacttgccgcacgatcaaaatccaatggccatgatcaagtctaccgaaccggtacgcgtccgactcaatcgcatccgtacgttttcaatcggaaggctagagttttattcttacgtgatctaatcaccgccacccaactaccatcggacggacgacagccatcttcaccacccggtgcctggccggcggtgcctgtgctccatacacggcggcggatcactggagccgcacgcccccccgctcctaccatgccctaaaatgaa

SEQ ID NO: 68490 - DNA, 872 bp, Zea Mays
cacatatcacggctatgtccatgcgtgccttgtcattgtctttcattttatcagggaaatccatgcatgtatttatgagggattggcaaaagttactctcttgatgcatgacgttgatgttgtgcatcaaaatcaatgacttagcataagaaagctcccacaagccacatgtgtgagtccagttatgctcctcaccaaaaccttgataccttttcccactctcgtctaggacaagtttcctatgctcttctgtaatttctatcccactacacgtcgcttgggcggtcccttcgtgacgatggtgcccttcctaaactcctttctctgccttctgaaggggtgattgaagggtagaaaacatctatggcaatcaaagtaacatatcttgccaccagcactaagacgaaaacaatctgtatctttagcacaataaggacacgtcaatctaccatgcacgctccatccagagaaaataccatacaccataaaatcatgaaccgagaacagatacgcaacacgaagattgaatttatgcttcttgaagcagtcataggcttccactccttgccataacttctttaactcttcaatcaatggttgaagcatcacattgaggcgtacgccaggatgctcaggcccaggtataacaagacataggaacataaactcatatttcatgcaaagagcaggtggaaggttgtacgatatggcaatgacaagccaacatgaatatgacgcagcggtcatattgaaaggtgtgaaaccatcagttgccaagccgatacgaacgtttcttgcatcgctggaaaaatatggatcaaagttgtcaagagccttccatgcatcaccatctaacgggtgcaccattaacc

SEQ ID NO: 68491 - DNA, 451 bp, Zea Mays
aagtcataataatgtcatttatagagccttcttacttaacttcttttggtgctccattttgttaagatgagtggatttagggtttaagcacttctcccatttttatgtgcatgatatggctaaggtaggtattctaagatgattaacacttaattaggaccatggttctcaagtttggcgtcttttgctcaaactaaaccacatgagataataggtcaagggtgtgagtgttgagtagaaaccctgagtaacacttagggtgttaaaggtggcttcgtagctcatgagaaacttcttggggtctgttagaccatcatagataggtagtgtaggaggcatgtacagtggtggccatggtgtagcttgcagctctggtgtcaatggagaaacttcaacatagaggaaatcttgggccttgtacacctcgtgacaaagattgtcatgatcttgc

SEQ ID NO: 68492 - DNA, 375 bp, Zea Mays
ctccctgtttgttatgatatcctttagtggttgagataatggcacaataatgttgtgggattggaagtagtgccgaagctttcttgaagccattaggactgcatacagaactttcttcatctctataaaattccttttagatgggcttaatacttaatacatgaagtagacagtcattttcctttttacaccttcgtccactacctctagaaccaaagtaccactcatggttgattgtgaagctgattcataaagcaatagaggagcccctagtgaaggtggagacagtgctgttagctttatcaggtaatctttcaattcttcgaaggcttgttgctgagaaggtccctgctaaaagacctatgcggatttcag

SEQ ID NO: 68493 - DNA, 271 bp, Zea Mays
gaattaggcatttggccaaaacatgttttggcctttgctttccaattgtgtgtttgctgcatctccttgagctcagagacccattacccaaccacggattaccttttcgtttttactaaatttagttttgactaaaaatattgacttttgtattctttaatttagaatcggaaagcagcaaaatccgtagcgagaaataccgcttgagcacgagcgggaacgagatttttataccgagaaatcggtttttccggccgataaatcaatcagg

SEQ ID NO: 68494 - DNA, 479 bp, Zea Mays
caaggagaaaatgataggtttcaaggctacggggaggaccacaactggacccatatttcatcaatatgggagcttccgtatgcaaaagccttgatcatgccgcacaacatattttcggcggctattttcgtcggtatgtcgacgaaaataatctattttcgtcggtttaagctttttttcgtgggtttttggcccatgaaaatttaggcgtttcctgtagtgacgggtgttggcctcctcaccttccgctatgtcgagacactcttggagggatgccttctccttcttaagctccttgacctgctgctctaagctttccaccggggagtttaggtggggtgcagtgggaggagagatcatcatagtggttatcgagagtgtggaggtatccggccatgtagacaatggtggggtcatcctcggtggggtctctccctgacagggcctgaagtcttttcctccaggtgggggtatttttg

SEQ ID NO: 68495 - DNA, 953 bp, Zea Mays
attgaattttagttcggcctaccatcatcaaactgatgggcagaccaaaaggaccaaccaagtactagaagatatgttaagagcttgtgctcttaaacatggtggtagttgggataagagtttaccgtatacagagttctcttacaataatagctatcaggccagtttgaagatgtccctgtttgaggctttatatggcagaaaatgcaggactcctctatattgggatcaaacgggtgaacaacagtactttgggccagaaattatacaggaggcagaagaacaagtccgacaaataagggagaatttgagaactgcgtagtcaaggcagaaaagctatgctaatacccggagaagattattagagtttaaggagagtgatcacgtatatttgaaggtgtcaccgatccagggtatgaggagatttaaagtaaaagggaagttgtcccctcgctttattggacctttcttgatactaaggcgagtgggagaagttgcctatcaaataaaactactcgatcatcttgcggatgtacatgatgtcttccatgtgtctcaactgaagaagtgtctcagggtacccgaagagcagttacctatggaggatcttagtgttcaagatgatctgacttatacggaatatcctatcaagattcttgataccttgacacgtgtcacgaggagtaaagtgattaaaatgtgcaaagtacaatgaagccaccatggataagatgaggctacatgggaaagagaagaagaactacgagtagatttccccacctctttcctagtccatcctaatctcggggacgagattctttgcaagggggtaggattcgtagtacccaaatttataaaagagttgaactcgttacgtgttttgccatccactcattactttatggaaataatcacatttaaagaattaaataaggcacatccataaaatatgc

SEQ ID NO: 68496 - DNA, 430 bp, Zea Mays
ctcctcgtactgttgcactgtgtacagaggtggtgcagggtacccaactgcgcttagtacctcccacaagatcgagggaaaaccctcccgggaaaggtagtcaaagctaaagtgggtgtctccactatcgtgggggtaggctaagccatctatgtaagaggggtaagtgtgagtgctggagattagtagcaagagaaaggtgtacttaggttaaaaggatatggttgtatggatagactcgttttaatttacttctatgttaaccatccttagccatagttttagggatcacgaattaatgcaatttccttccaacttttaattaacaagtttccttttattcctgatgcatgcatgctcgtatgaacgtgctctcattgagcataggggtgcacctagggcatcccccttttatagtagcggcctgaac

SEQ ID NO: 68497 - DNA, 643 bp, Zea Mays
gctaacaacaaaaaccaatgtcgcttaatgactcctccaatcattggctcagctaggtgatgacaatcaccaagagtaacaagagaacaaccagataactcacccaacttgtgccataagatgcaggaacaatgatacaaagactctccaatctcacccaatttacaaatcagaggatgcgagtgagtgtactgtgtcttagctctcaaactgtgtgcacacatgtttgggaattcaagagagtggacatggctggactgtcggtggttagcattggcaacacactatgggatgtcccatgtagtggttttatggttggcaagatcgacgattagcttgatggttcatgcaaagcacgatgggacacaaagatttatacatgttcaggccatagagatgcacaataccctatgtcctgtgtgttattgtgatggaattgatctttacttcgagattacagagtgcatggaagctatgatctagctagcatgtcaggggatccaatcgttttgtaggggtccctaacccaccttgtatatgcgacgaggttaggattacatgaggtcgaacagattactattgctacacttatatccatggaacagactccgactaacatgtacacatgtggtctggttggttt

SEQ ID NO: 68498 - DNA, 414 bp, Zea Mays
tgctgttgtttgtggtgtcaattggacaatatctgtggctgatatatccggttttgcttggcagaagggtccatttgtctttgctcttgtttttcctagtcagatgtgcgaggtcatttttggtggctcgtcgcgggggatgaggccaaccgatgctggtccagatcgtccggtctcaagccaagactgtctggtcgtgcgcaggagcacgatttgttcccaaataggtggtcgaggatgtggatggccattataggagttcataggcatcccataaaggggctgggactgggcatgctcatttacaactaatgggtcttgtgggtcttctttagtttgggcatcatgtgatggaaaactagtaatagcaggtttatcaaacatacatgctatcctcctataatcctcttgaac

SEQ ID NO: 68499 - DNA, 434 bp, Zea Mays
aatatagtagacatcgcaacaaattcagggggtggtttaattcttgagtaatacaacccagaggaggtgccttgcgctttctctaccacttttgtttcacattcgtccgttgatgtgatatggaggtattcagcaccactcacacatgcagttgtaatgtgatagccactacaacggatatctttgaacgtgaggagagtacgagttgctcctgggtataggaatgcttcttcaatgaagatcctagtaccgttagggaggaccacaatggctggaccggagcctacaatgcggccattgttgccgacaattgtagtgatattttcagtcctcttcaggagtgtctgaaaatatttcgtctctctaagaatcgaatttgtggctgcgctatcaatcaggcatggttcatcgttttcctccatcgtgggaagtgg

SEQ ID NO: 68500 - DNA, 1112 bp, Zea Mays
ttcctcgttttttatgtatctgataattggttccctcccgtcgttgggatctgcttctgcctaacctagaacgtggcactcctcaacctgctctgtggtgacgcttggctactgtatctcttggacaaaaaccccaggtggaacttgggcttgactggaccccaacttcgacaatgcatttgttgttgcgttgcgatccctttctatgtgatggaattccaaaccctcgaatttgtcctccagctttcgtagcactgcacagtatctattcattgagtcggttgagcagtcccagtctttgtttacctagctgatgaccaccagtgaatcgtcatataccattaatcttctgatgtcgagtgagatggtgatgctcagcccatgaaccagggcctcgtactctgcagcattgtcggacaccgaaaacaggagctgaagcgcatacttgagttgatcacctccaggagcgatgaaaagaatccctgcccccgactccttgcaatcttagcgagccatcaaagtacattttccagactttagcagcttctgagttttacgaaacctagtgctcagtccattctgatacgaaatcaaccagtacttgaatctttattgcaatgcgaggctgaaattctatatcatgagctccgagttcgcatgcccacttggttgttctcccaacagcttccttgttgtggagtatatctcctattgggaatcctgtgactactatgactttgtggtcgtcaaagtagtgtcgaagcttgcgagcagttagaagtactgcgtataatagcttctgaacttgagggtaccttatcttcttgggaccgaggacttcactaataaagtaaactagatgttgtactgtgtatgcgtgcccttcttcttcccgctcgactaccagcgtagtgcttactacgtgagtcgtgcaggagatatatagtagcaggtcttcagccagctgattggaggtagctcggtgtggcagcttgagcactggtggcgtggtcagaaactttttagtgcctccaaggcttcttgagcttcggtgttccactggaatttatccacctttttgagcaacttatagaatggcatcccattctcac

SEQ ID NO: 68501 - DNA, 530 bp, Zea Mays
agccatgactggttctatatccacgcgcagggaccgataaggatactggtataggagtcggttgcgaaaacccggcggcctcggtgctgagtttgcaacaaactagagatagatacgtgaggaagatttggtctgaccgcaaaggccacgtgcagcgacataccggaagagaatgtgtaggagctgttgacgccgtgctggtgtaaacctaatgcaagcatgcatggtggccgaaaaaaataatggccgtgtaggccgtggttgagtgtcttggccaaaacctcgtttccctcctttttcttttgccatttcttttctatttttttcttcattcaactttaattcaaatttggatttctttttgcatttccatcccatgtttaaatgcacaatcataagaaccagcatgagatgtcattatatttgtatatacatatatttattattctattttgcaagtatttctagctatgtaattttcacatatgcgatacacaaataattttgaatgtgtgatcaaagctaaaaag

SEQ ID NO: 68502 - DNA, 692 bp, Zea Mays
gccaaaaagtattttattctagtatggtctatatttctctcaatctattagatctgatctcactcttgtgcttgtgacacctttgtagatgccctctgaccataacctttttgtctattgggattcttccctcctccgtcattaaatcactaccttttgactatctttattcccttagtattgacatgctcgtaccattagattcttcaatactcttgtttcaaatacttacatttgaatttctactacctacttaaacacttcagtttatatgtccacgaatttcttgccttctgaaaccccttcttatttcgttgttaagttgttatcctttgcccttttctattcccttgccttggtatgcccgcatctttggaatcttgcatattcttatattcttatgtatgcttatctttcataccccaatgaatgttcaagacatttcatttttcacgcccttgaccacctttatttcttgatgatccatgagcaaccattctatttcacagatcctcgaggatctcatcgtttccttataacttccctcggtaataatttctgttacttcaacccttctgttggaaccttacctatcttaccctcgattgttttctccacttcgccatttcgcgagtcttgccttaactctatccttggttatgcttttcacgattatcatctttacccttgtc

SEQ ID NO: 68503 - DNA, 630 bp, Zea Mays
gtgaggtgctctaattatttcaagagtatgcacatgatgaggtgttctaagggtagagttaagggagaaaaaaataaggggggttaggaggttagcgtttcaaaccttgggttgggatttttgggatgctacaaacctaccccacttaaaggaatctcgccctcgagatatagactggatttgagaaaagataagtgtattccctcctcaaggagtcctcactctcccatgtagcttcctcttctccttctctgctccactgaactttacagagcttcacttctgaggtgcgggtctttctgactgctgaatcaagaatcttcactggcttctcacggtactgaagatctttctgaatctgcactgcctcttcttcgatgtgactttctggtgcttgcaggcatttgcggagctgggatacgtgaaacacattgtggatgtcggacatggattccggtaattccagacggtatgctgcgggtcctaccctgtcgatgatgggatagggaccgacgaatcgcggtgctagttttccttttacttggaacctcctgacaccacgcattggagaaaccttgaggtagacgaagtctccttcctcaaatatgagttccctccgcctgttgtccg

SEQ ID NO: 68504 - DNA, 291 bp, Zea Mays
taggtagcgtactccatactgatcccccatgtcattaacacatatcccactagtcatcgaccactctagtgacacaatctattccgccatgtcctagcgctcgttggtgtcttcaggtgtcagccaccatagctagtcaccctgcttctccagtccctcgttcaagttctagcgctcgtccttcgccgctttcggtccatcgacattgaacccacatgaccttcacctctgtcatcaagcatcgcatttggactccacacctacgcaccacaagccaagagtcatattgca

SEQ ID NO: 68505 - DNA, 676 bp, Zea Mays
agtgcagaactcttcgacttctgtgagcaaaaatgtatccaagtcaaatatacattagtggcacacccaagatctaatgggcaagtagagagagtgaatgggatgatattacaggtgcttagaaagaaaatattcgacaaaaacaaaaagctcacaggaaagtggatccgagagctgccttatgtagtctagagtttgtgaacctagcccagccaagccttacttgggaatactccattttttatggtatatagatcaaaggcagttttactagtaggcttggcctttggagcacccagattaacctttgaaaacattgcagaggcagaagcaacctcatttgaggtaatcgatgtgctagaggaggaacgtctaaatgttgtcatccaatctgccagataccagaaaccctaaggcgctaccatgataaggttgtacgacaccaagcatttgcagtaggggacctggtgcttcgccacaaacaaccaggagaagcaggtacaaattgtcaccgccatgggaagggccctccatgattgcagaagtaactcggccagggtcatatcggttaactcagatggacggtactctagtagggaactcatggaatgtcaagcacctatggaagttctacccatagtagcaccataaactctagatggtagactacaatttg

SEQ ID NO: 68506 - DNA, 915 bp, Zea Mays
cttgcaggcatttgcggagctgggacacatgaaacacattgtgaatatcggacatggattctggtaattccagatggtacgctgtgggtcccactctgccaatgatgggataggggccgacgaatcgcgatgctagctttcctttcacttggaaccttctgacaccacgcatcggggagaccttgaggtagacgaagtctccttcctcaaaccagagttctctccgccggttgtccgcataactcttctgccgactctgagctttaagtaatcttctgtggatcagggcaactttctccttagcctctttaacaaaggcaggcccttccagtgccttttcccctatgttggaccacatgagaggggtctggcattttcgtccatacaatgcttcgaaaggtgacatcttgatactggcctgatggctgttgttatacgagaactctgcataaggcaaactggattcctagcttctatcgaacgttaacacacaggccctcaataaatcttcgaggaccttgttgaccctttctgtctgaccatctgtctggggtgataggcagtgctgaagtctagcttggtgtgcatagctttctgaaggctcgtccaaaacttgaaggtgaactgggttcctctgtctgacacaatcttccttgggatgccatggagtctgactatctcttaagataaatccatgcaagggtagctcctccaaaggttgttttcactaggatgaagtgggctaccttggtaagacggtctattattacccagatagagttgttccctttttgcgtctggggtagtccggttacaaaatccatgcctatttcctaacacttccattcaggcactggaaggggttgcaataggcctgcaggcttttggtgctcgactttcgttcattggcaagtg

SEQ ID NO: 68507 - DNA, 294 bp, Zea Mays
ggtatctgaaatttgctgacccaccttatcttcaggcacggtggccttcgtcttagtagacgctgaaggcccaacttcggcttcgacttgatttttggcagctttgtcaactttcttggtagaagcaggagttaaagccttcgtggtctctatgacagcgtctagtacgctggccatcctcctccttttgggagttgcagcaacagttttttgtacctttggcaattctgctcctgctgatgggctcagaatttctggcattttcattgtttcctccacctttggctcttcgac

SEQ ID NO: 68508 - DNA, 375 bp, Zea Mays
gctatttatatctgtaccgagacaatgagaaggacaagcaaagattgattccatctaatccctatctctctctctctctctcaagccgtcggctagggggtacaccccaaccagcgaagaatgacgagggggcataaccccgccagctaccacgggccgagactacgaactttgtagtcgaggtccgacgtccttgggcacgtacgcccttgacaggcaattctctggaaggtatgacttaacaatcttgggtgtggcaattctttacaatacttcaaagttatttgagcctttctgcaaggtatgtctttataatctttgagttgcttacatattttatcaaatatgttgtctgacatgttccatgaatacatc

SEQ ID NO: 68509 - DNA, 627 bp, Zea Mays
gtcgactggctgcagtcccttcttggtgatgtggagcacgtcgtcgttgagggtgcgttccatgggagcagcttggctctggagcatatggtctctcactttgatgagatcgacactatcgtgttcgccaaaggtttcaccaccaaccgaagcgatgaggagctggacacaatttaagatcaagtccgccccatgccaaagtgctcaccgaacgagtggacatgaagatcctgatgactggcccctggattatagcatcgcctactagtgaccctcccaccggcgcctaggtcgcttctcgtgtttgttctattttgtaataacttccttggatggacaagatctttacgtgacgtgttatttccatttcaaaccttttgcccttcggatcctggctttagtggcctttttggagttcgtgaatctttgtggcggtggtttcttctgtgttgactggcatgatagtcagtaggtgtagagtcctttacttgcttcctgtggggcatgatgacctggccaccttggtgacttatttgtagtactccgattgaaagcgtagtctggggcattggtactttaggttgaaaaaactcgtcttctgtttggcggggtcttacgagggcaaag

SEQ ID NO: 68510 - DNA, 372 bp, Zea Mays
gaggtggcagtggggagaaggctcagaaggaagcgagagatttttgcagggggaaaaaaggcaactgcttgtgctgctcctcctagcgagcctgacgggaaccgcgacgatgaggatggccggtttgtggatcgccgccttcagcttgctgctctgctcgtccttgtcaggtgatggctgctcctatcctagctgctgaatttggtttacgctcgttaagttcacagatcatgtatgagattaatttcgttcgtaatgctatacatgtccaaccccaaggtgttccgacatcggctagtttagtacatgcattgcttcgtgttcttggtaggaacatgagaacagaaccggcgttacatgggctgattcttc

SEQ ID NO: 68511 - DNA, 920 bp, Zea Mays
aaattagttgctctcttatggtaattatctggcgcagacgcgtagctaagtatagttgtactaaagtagttactcttttaaaatgaaaattgcggataaaaagattgatgacgttagctagcttggtaattaatccatgatttcgagtatgtaccagctgaatacgtgtgtcattcggccttcacagtatttcctttatattaaagccggttcaaaacggtaacaatgaagctatccacgttatcaagaaatcatgcaccgtttgatcagtggatgcgtgccatcctaatcctccaatctgcatgctccacacaaataaataaatttcctttatattaaagccgattcaacaatgaagctatccatatcatcaagaaatcatgcactgtttgatcagtggatgcgtgccaacctaatcctccaatctgcatgttccacacaaataaataaatttcctttatattaaagccggttcaaaacggtaacaatgaagctatccacgtcatcaagaaatcatgcaccgttcgatcattggatgtgtgccatgctaatcctccaatctgcatgctccacacaaataaataaatttcatttatattaaagtcggttcaacaatgaagctatccacatcatcaagaaatcatgcaccgttcgatcagtggatgtgtgccatcctaatcctccaatctgcatgctccacacaaataaataaatcctatgcatctccacagtgttggagacttccaggcgcttcttctcctcgcgctctccctcgccgccatgttcgcctttctctgcagtggctcctgtcgtccctcatcgtcgtcccacacctccctcgtctgcaagcgctgtcgcctcctcgtctccaaccccatctgccgcttccatgttcaccatagggcgcctctcctcctcag

SEQ ID NO: 68512 - DNA, 877 bp, Zea Mays
aataactttgcttaggagtgtaagcagggttgttatgaagaaattggagaaaaatgcactcaaagttgggctatcaggctgtttgatgtctgaatttcagactaacagtgcaactgcaagaactttgggcacgaattcaggcatgatcgagcaagaatttgcctagggttgctataccaagattatagctggatcctagagctataactttgctaaagagtgtcgatcatgttactacataaaattaagagaaaattcgccctaaactttgactgtcaggtgcactgaatgaggaatggccatggtacagtactgaagaagatcgactgccagccgttcaccgtcgacgacctctccgccgcgattcatgccgccgccgtctcgattcgtgctcagggaggaatggataataccggggatgggtaaaaagatcgggcgcgggatggattgcgattgctagctggtccggccatcctgtccacttgccgcgtggtcgaccgagtttatcctcaccggagctcgccgtttcactcaaccgtgccacgccgcaaagcattctccacgtcgtagggatcgtggaggatagccagttacccctcctgcaccgttttctccacgcacgccacaatacgcagagcacggtgaaatatccaagtcgccgtgagctgatctccaacccaaattcactggccgccgctcacgatcactataaattgagtgcacccatggctccatagggtaatcacgcatctattgcaccaatccttgccccggattatccaccagggaccgagaattgctcacttcccccaatcacgttttccgccaccgtaaaacgcacctcactgtggccagccacttccaggtttgttcatgc

SEQ ID NO: 68513 - DNA, 486 bp, Zea Mays
tcgccagattgcgttgttaacctgtacgcgcttagacgacttcgtcttgacgataattggtccttcccactttggctccagcttaccccgtgactctgtccgggttgtgcggacgagtacgaggtccccttcgttgaattctcttgggacgactatgtggtcgcgccaggccttcgtttgggcttggtatttgttgagggcctgcagagcgaagacacggtctccgtcgatgaggtctttggaggttagctcgtctacgtcgggtactgctgaagcacttgtccgtggggacccatgtttgatttcctgcagggtcatggcctccgatctgtatagcaggcgaaagggagtgaatccggtcgcctgacactcggtcgtgttcagcgcccagactgcttcaggtagcaggtcggcccatttacccttcttgtcgtcgaggagcattttcttgattgccgtgaaaatcttgccgttggcgtgctccac

SEQ ID NO: 68514 - DNA, 1249 bp, Zea Mays
ctaagaaatgtcgtggacaaactaattacctttctgttttattctaaaattgtttagagatatttatcctcttctaacaagaatcaatcacgatcatgtttttatagaaacaatgcaagatatctaagaaaagttctaggcatttcatccctaatttgtcatcgtggctagccactggcgtggcctcgacgcctataggtgatgtcggtcataacatctatcaaagtttgcttcgaacaactcatcctagagctaaatgtctaggtagaggtccttgaattgttgaaacagctcccaagtgctgtcgtcgccggacaggtcatgccactaaatgaggacatgtcaggcccttcgacgtagttagacacaacacacgctctggcgcaggcaatagtatgtcatcttataaaggcgatgaagtcattggagggttttcgtggaagggcttaagcagccctgtgtggaatatgttatggagacaagtgccctctaagagctaaatgtgatagtccacctgcccgattcgcatactctgacaaatggggtcgctttggtgaatagtggttttttatagtccaatggtgtatctcgagcaaccattagaacattctatcgatccaatgctcactagaaacaacccagagtgaggatttgcactgatagaattgtgtcattgacctacatcgcgccattctgatggctaaccctagcctggacgagccaatatacatagcatatagtctaatggatccaacctctcaattcgatggtacatccagtgcacttcaagcttggtttgatcccatttcctcaaatgtgtcaacttcacaagtgttctaccatgtgtgcaagtgagttaccattttcacaaacattttcaaagagtttttcacatcatcactaggcctaatgcatatgcaatgaattatgatatctagtgacacttaaataaccgattcaaccatagagttctcttagggtgtgtttggttcagctttctgaactagattcgctgccaacaatctggaatcccaaccaaatggggtacaatagcactatagattcctgaaaacctacatgtttctctagttaaattcagaataacctcttagcctagattttatagattcatgtcatccatgttaaaaaaaactcggtcgataggggaagcccgccccatggaccatggtattatatccagatcagggtttctgatccataaagtctaaactttgacacaaaattcatg

SEQ ID NO: 68515 - DNA, 458 bp, Zea Mays
ccgaattcctcatcggaaatcaagatttggggctgtgccgccatctcccgtgggcgtgcgccctcgcagcagctaggccggtgagtaaccttccacgatcctcgccgtgattcaggactgcttttgcacaaatttggttgggggaaacatgcatggtggcgccaaatcgggtgtctctggcgagctcaccgtctctatggccgctccgccaccgcctaggcgcatcggggaggaagaatcgggtccaccgttggatcacatagggttggtccagattagatgttggaatgatgcgccaggagtcgtatgttttggatcggatggtgggggatgcagttgaataccgattcgttatattatatccagatcgttgattgaccgatggacggatcagatctgatcgtagtatggtgtcccgtgggtcgtaggatagtaatccaaaggcatatataacttac

SEQ ID NO: 68516 - DNA, 551 bp, Zea Mays
aatgaattcttaccgtggatttatggcgattagggcatggtccctgataatggcgatacgatggtggaggcggaacaccgacgaggtgttctcttgctagtcggttgccacgacaatcgatgccatgcacaggagctacgagtctttacaatcttcttgggctacttgctgacggttgcggcggcggcgcactctcagttcggcaacggcagcggattcctccttgctctcggtagtgatggttggtggtggcgatggcaaccctgattcgatggaacgagaggggcgacgacttataagcgcaggggcaagctagctcggatctaaccgaacaccccagattcccgacgaggtggttacgtcggcgctcaacccagatggatacaacattcgcacgaggaggaaggtctctagaagacggggcccaccggcggtgactcgacgcggtgcgtaggggctagcgcgatgagcccgccgatcattgagccattgtgcacacttaatgggaaagagtggctaacaagggggccctcctgtctgcgtcggcagag

SEQ ID NO: 68517 - DNA, 370 bp, Zea Mays
tttagtgactgtgatcctgctccaacaccttatgaccctagcatgctattgagaaagaatcggaggatagcaagggatcaattgacatacttctagatcattggctcgctcatgtaccttgcaagtgcaacaagaccggacatctcatatgctgtgagtaagctgagtcggtttgtgtcaaaaccaggagatgatcgctggcgtgctcttgagagagtgttgcggtatttgaaaggtactatgacatacgatattcattatactagaaacccaaaagtgctggaaggctattgtgatgccaactggatttttaatgctgatgagctttatgccacaagcgaatatgtgtttctgtttggaggtgacgctg

SEQ ID NO: 68518 - DNA, 1027 bp, Zea Mays
caacaatcttatctatccttggcagggggaactcatccttaggacaaactttatttaggcttgtgtaatctatgcacatccttcacctaccattcttctttttaaccacgacaacactagcaagccatgtcgaataatagaatggcttgatgaattgtgccttgaggagccaatggacttcggcctttgcagcctcggtctttttatctaacattttatggagctttttttgtttttcggcaaaattgaagggtctatgctcaaaatgtgctcgatgatggcacgactgacgcctacgaggtctaaagccaaccatgcaaagacgtctttattccagtttagacaagataacatcttatcttcctctgcctattgaggtccttactgattagtaccgtttgattcggtactaaagggtccaaggtgactttttagcctccttattgctctagatcgaagcctttattgcttttgtttttgccaggtgagggcgactagggccttctccctccgcggagaggcaatatacattacactgcctagggacgaagtccctttctatgttccaagttgtttctgatctccatagactattattactccctgaggacttggacttttcatgcagaggtataatctgtgactttgaaccccttcccatgaaggcattgttagggtagaccatttctactatgtcgaaggttatatgttgtctttgcattggaggttgtgccaaatgagaagggcaactcgaccttaccaagaggaacagcacccttccctccaaaaccatacacgaatttgtcaattagctagttgtaacaggttgtggtttatgcctatacgatcgatggcatgaagaaagatgatgtcagcttgtctctcgtcatcgataagcaacttgtgtaatcccatcctgccacattgttgtttatgactgaaagcacctagagagggggtgaataggtgatcctgtaaaattcaacactaataaccacaaaactttgttatgtaagttagaacggct

SEQ ID NO: 68519 - DNA, 434 bp, Zea Mays
cttaaagatagctttgcaaaggtgggtgcatactcatcggagcaaagatttatccgaggcgatcccgaaggagttattcaatggattggcgaagaggtcgaagcttttgaagaaatactcagtgatcatggagatttttgtgccttcgccggtgcccgaggggttgcagcagttttggagaaaactggttgtgaacatgttaatgctgcagcccaggcagaagccatcttctctgcagacgatacgaaggaaccttcaaccgaagctactttggtgggcgggaagttctatgtcgatatctggatgaagggcgaccgtgagatggccgatgaagctataaaaaagagtgaaaaagaatctcacgatgcacgagtggaggcaaaggaggctgaagaagctgctgaacgcgcgttgattataggtatccccctttt

SEQ ID NO: 68520 - DNA, 892 bp, Zea Mays
agcgtgagcatattgcaccgccttaagtcatttgccgacttaagccgattgctccgttagtagggtatagtggtcaccttgagtcgagtaagcatgtagattgacaataaacagttcgagtgcctttgagaatgatgtctttttattgatgatgtattttccaattacagaatacaatgctgcaccgatagcttttgaaatctagctaggggtaaaacttcctgagatgctctatattccatgaattccctatttctgtgccatccatttgagtaagtcgatatgaaccaggccgagtgacttctgctactatgaatggtccttcccatagtggcgacaatttgtgccgtccttcccctgttagaattcggtgaaggaccaagtctcccactgcgaaagatcgatgtcgtatggctttatcgtgatagcgcctcagagtttgctggtacctagctgactgaattactgtattcaatcgttcttcttccaatatatcaatatcctccagtctagtggcttctgcttcggctatgttttcaaaaatcagcctcgatgccccaaacttgagatcaactggtagcactgcctccgaaccataaaccataaagaagggagtgtttccatgcaaagcttggctaggttgaattcttaggctccagaccatgtacgacaactctctgatccactttccggcgaacttttcattcttgtcgaagactttctttctgagtgcttccaatatcattccattagctctttctacctgatcgttggctcttgggtgtgctactgatgcatatttgatctggatgcttctttgttcgcagaaatcaaagaactctgaactagtgaaattggatcccaggtcagttatgatgctattcggtattcc

SEQ ID NO: 68521 - DNA, 639 bp, Zea Mays
ggatggaaggaaggattcggaccacagtgggaaggtctgtacaagaaacgtgatcgatacaaggaagagatggcggattattttaagcaggaggccaagaaagagttcaaagccatgatgtctgaaatgctatcgaatcctcctccagaattgatgcaacagttggcgagtgcgatgtctgttcaacagatgaccactccacagatacaaacaattccagcagctcaaccgccggcttccaccgattgtacgacattaccaagctctgttggttcaacgggaaataaggtccgttatccagttgatgacatcacaaggcctgcgacgtgcacactggttataagatatggtattaacaataaacgtacaaagaaagtagccacaggccttgcgatcccaggatgcaagttccatggaaacgatattccagaggattattgcaaagtagaagtgacgacggttgtccaaggatccaaggacgacatgttagacatccctgggcccgaaggtatcgagaaacttggacaagctatcaagaattttatcctttggcctcgaagggatgtcgaattgattgattggtcgaattcgtcgcaggcccaaccgtctcctccttctcaaattgctgttcctattgta

SEQ ID NO: 68522 - DNA, 506 bp, Zea Mays
ccgacgcattggccaaggctgccgccagaggcgagtccctgccctccgacgtgttctaccatgtcatcggcacgccagctgtccggagccccaaagggctccaaataaccaatgatagcgagggccaccgcatagtcaaccttatcatgaccgaagactggcgggcaccaataactctgttcctacaggggtactaccacccaaccgacatcaacgaggccaagcgcctcaaacatcgaagccgggacttcgcactgattgagggccaactctacaagaagggggtcagtcagccaatgcttaaatgcgtcaccgaaaccgaaggcgtccagatcctgcgcgaagtccacagtggtacctgcggctctcacgcagggccaagggccctagccgcaaaggtgatacgccaaggtttctactagcccacaatgatctacgccgcaaatcgggtcacaaggtcctgcgaagcctgccagaaattttcccctcgatcaggcatcccctcg

SEQ ID NO: 68523 - DNA, 319 bp, Zea Mays
gcgaagcatagtgttggtgagagttcgcgaagtggtaggcgccgtcggatggggttggagcgaactcgtcttcgtgtagatcggtataatcaacgcgacttgttgtcttcgtcgtttgggacgagtattggtgaggggacctacggaatttgtttgagggggaggaattgtggatgatgttgtttaactatcgggaggcgggcattatctcgaaggttgagccgatgtagaatgtgtgatgccctcacttgtcgtgcagtagtagagggcgcaattgtatttatttgtgtggtgggtctggtgacccttcgctgtgtat

SEQ ID NO: 68524 - DNA, 410 bp, Zea Mays
gggatattcatctttaggagttgctctatttaaattgcgaaaatcaatgcatactctaagcttacctgactccttctccaccggcacaatattggagacccactctgcgtatctacaaggtccgataaaatcagcttctagcagccggtggatttcgtccttgatgcgtgggagaagatctggacgaaatgttctagctctctgcttgaaaggtctgaaaccagatttaataggcagtcgatgctctacgatctctcggcttaatccaggcatctcggtgtaattccaagcaaagcaatctgagtattccttcaatagaccgatcatctcatctctaggatcggtctctagggtcttgtttacaaaagtcggccttggagttttaccatctcctatgtcaatctcctcca

SEQ ID NO: 68525 - DNA, 1139 bp, Zea Mays
cttccgtcgccctccgactcgttagcttatggtactagcggttgattgcggctgttcaaggacttggggttctctgcagactgcagcttcaagtttttggtcgaactcaattaacacttaacagtatgtaaaggactggttagaattaaagatggcttgtgcgagttacgcaactgtgccctgtgttttcgttcagtgccgccccgcatataacacctattgctggaatcagtcagtaatctaatgtcgttacatctcgtgggcctgcaactattactatgtgatggctgtttgttcaggctaattgctgtctgttttctttcccaacttataatgtgctcactatgcaccagactgtttataggtgggttcaacaaatgtaatggattggtggtggtgcactatatgcactagattgttgtggtgcactatacttatgaagcctcttctcgaactgaggatttttaaatcaggatgaatatgaagtgtttgtctaattgaagcatgccttagtttgtactgcttcagtaactgccatgttacttgatggccgttttttatcagactgtagaatggatcttacttgttgctgctagtcaatatttttagttgggcatgcaagcttgtctgtgagttagctttttcacaggtgaacaaattacaaatgtacattacaaatcacaatcgtcaaattggttatccagttcacaagtgttgcatgttatctgcggtctttttgatgcaacttaaatgtaatacttatttcgagcatggtatatcataataatgttgagtgagtttactatccttgcatgttaacatatgtgcctcttccgttcatcacaattgcactattcatatacttttagccttaaatttataatattagtcaacagtgcccaaaacagacaaacagtggtgtatgcagtttcactgatagaacaaagggacctatgaaagagtccgctgttatgtttttccctgttttagtgaatggtgaaacaatccaagttcgatatttatcttttctgaggaagcaccacaagtccacaatacatggattacattgtttacgtgcatactttgtctgattgaaaatagatgtcattttattattcctaacttgtcacaggaaatgc

SEQ ID NO: 68526 - DNA, 517 bp, Zea Mays
gttggaatcgtgggacggtgggaggagaaagaactcgttgctttctgttctgcgctgcccaacccaaccccatcccggccgttatatccgcaaccgaatgtggccgctgtagccggcccatgaccatgagaacgattgggcttctcgaccattcctatggaaaatatccagcaatctgagcttatgaagcccatacagtaatcaaaccaggtgtctcatctctctgccgcatcaactatcttgcttgcttgccgcgcgagtagtttaatcaccgcctgcctacctgcccgtcctccctccgttgtgtgcatggctcctgctgcatgcaagggcaaaagcgcggcaggggtacgtggcgggtccgggtggggcgaatgaaaagcgggaattcaccttttttgcaggggtacgtgttgggaggtgagaggcgtagtttcattacgccaataattggagcccccgcgcgtccgtacaggactcaccagcacgcagcggctttcccgcacgccaatggcca

SEQ ID NO: 68527 - DNA, 389 bp, Zea Mays
cattgatctgtgcacctccatgattcatcttatttccatcttgtttccatgttgtacctatatctttgttacctcctttgtgtcttcctccatctgttataatacattctctagaccagcagctaggacgagtactttgaacacttatttagcattgctatctgttactgacttgtgtgccacaaatatatattagttagccttcccaaagctccacctttctctcgagcagaatagatactcctttgcaatcacacccacgctctttggcatgtcacactggccaccgtttgccacctgtggtgttgtaagagcggggtaagacgcttcataacttgtgttccaccaccaaacttaagagtgaaagggaaatgtgcccttgggccatt

SEQ ID NO: 68528 - DNA, 498 bp, Zea Mays
agcagaactctgcttcttccgcttgggcgccatcgcaatcttgctggtggatcgaacaagggcgaaatcttagggaaacaaatgagtggtttgaggcggaaatgtgaagttagggctcagaactcaaaagtgtacgtcgatatgagtataaatggggttttcccaggttgggcaccatttctaaaaagtgccaagtcatcactcgggaaagcgagacttctgacataactcagctgttacctctaaaacgccgacaacatcaagcaccactcggccgtcacctctaaaacgcagaaagtgtcagccataactcggcagttatctctaaaacgctgacagtgtctgtcatgactcgattgttacctctaaaacaccgacaacatcaagcaccactcggacgttacctctaaaacaccaacagtgtcagccataactcggttgttatccctaaaacgccgacactgtctgtcataactcagctattacctctaaaaacac

SEQ ID NO: 68529 - DNA, 485 bp, Zea Mays
tgagtccttggttaataatgattgggtcgatgacatttaaggtgggttttcctggcagcattttgcagaatttttcagactctaggatcatattcaggatgtgaccttaactgatcaggaagatagacatacatggaagctagaatcagatggggcatactcctcaaaatcagcttacagggcgttctttgagggttctactacctttgaaccatggaagagaatctggaacatgggccccaaacaaatgcaagatgtttatgtggctggctgtcagaaatagatgttggacttctgatcggtttgctagaaggggcctacctcatccaaacagatgtcccctctgtgatcaagaggatgagaccatccaacatctgttagcttcttgtgtggttgccagacaagtctggttttctctgttctctactctgaacctctcaacctgggcccccagacaacaagataataattttactgaatggtgg

SEQ ID NO: 68530 - DNA, 966 bp, Zea Mays
gcgatacgcccgctacaacatgggctagagttgacatcacgaagatatcacattaactcttacacatgtcagcttgcccagcctcgacaacgtcagcacaccaggaacattctgttgtgagcccagaccgacaaacaggatggagaacatatttggtcagaagatatgcgcaacagacgaggagaaggagatcgtaggcgtcgttgcacttatagctccatgttgtatatatttaatattgaaatggtaggcccatctgccgggtctagctcccttgcattgtgcctcccttggactataaaaggaatggcacatgtgctacaagggacattcacacttgaatccatatgtaggcatcacaaaccagtctcaaaccttcgacaatacaacccacaagtggagtatggtattaccctatgacggctcgaaccactctaaacccttgtgtgttcttgcgttcatccacctaatcaggcaaaccctagggtgcgcctttgttcttaggattaggcgggtgcattctgccacctggctggagttctctccgaaatttggcttagttttatctccgaaatttggcacgccaggtaggggcatgtttttctctgctcgaatgatgctgcagatcgtcaagcatctcgtctcctccaaaaacgacatccaaatgggggaggaagtggcgtcacctgcgccgcgggtagctccttgccctgcctcacgtgttgcatcgcccattgcgctacaacacacaccaaagctggtatctagagtttcctcgcatgacgcccccggtggagcattatcagcggctagggtgttcctacgctatcccccaagctctgtagcatctacaactataatgagggagtggtgtgacgacgtcgaccacctcattaactttgcccaaagtgcctctggtttggtgtggactggggttcggtgtggaccgaggcacgtccaccgctc

SEQ ID NO: 68531 - DNA, 494 bp, Zea Mays
gttttacgaggatatagaaagaaccaacactgagaaaataaccagcaaaattcttgctggactgtctgaagattctgaggacagtgatgattttgatgttgatagtggtgcagatgatgctgaagatcagccatggaggccaagtcaggttgtcttcggaaaatctactgttaagaaaggatatattgagacgatgaagggtaagtattttcatgatatatctgtagtgagagctggaggagagaacattgttcctcttcctgaggaaaacgaagtagtggtttttcgaagtttcatgaaagctaggctacgtttcccctgcagagaatgttagtcgaagtgctgaagaggtttgagatattacttcatcatcttacttctgaagctttggttaaagttggagtttttatctggacgatgagaagccaagggctacagccagatgttgattgcttctgcaatatccacgaactatcttaccggacgaaggcaat

SEQ ID NO: 68532 - DNA, 660 bp, Zea Mays
ttgcgggggatttttgcggttatattacatggctctgcctcattaaaaacctcaccttccgggaggaaaagagtgcgggccggaatgatactatttggtgaattacaagggcgtgttagccctgaggattcaaacaaaaaatttgcggagattatcgatattccaggactgctctagggcctcatcggatggcgtgattagcctgtacgcgttgggggacgccttcgtcttgacgataaaaggaccctcccactttggctccagcttgccccatgactctgtccgagttgtccggacgagtacgaggtccccttcgttgaattctcttgggaccactgcgtggtcgcgccaggccttcgtttgagcttggtatttgttgagagcctgcagggtgaagacgcggtctccgtcgatgaggtctttggaggttggttcatctacgtcggggacggctaaagcgcttgtccgtggtgacccacgtttgatttcctgcagggtcatggccaccgatccgtatagcaggcgaaagggagtgaatccagtcgcccggcattcggtcgtgttcagcgcccagactgcttcaggtagcaggtcgccccatttacccttcttgtcatcgagaagcattttcttgatggcagtgaaaatcttgccgttgat

SEQ ID NO: 68533 - DNA, 461 bp, Zea Mays
atcgtttctgccgccgggcaccattgtccagtgaccaccaccctggcaattgcaagatgctgtgtggcagcggcacacccggacagccctgatctcatgaggtatttgggccttgcagggagcgatgccgtcgatggaatggaacagctccatcggcggaggctacgaaggtggaatgcatgcttcctggttttggtataactaatgcttatttaagaggtatatctaacaattagttaatcaactagttgatccattctaaatcgttaggtaattttagccgctagcttcccctggttccgcgtctgcttggtcaggcaagtcatcatccgtgccactgccagtgccatgcatgcttcctggttttggtgtctgcaaactttcttgtcccaaaaggcatagaggatgcagtaaggaagtcgatgctctctgctatggccaagatgtttcatgggtggaag

SEQ ID NO: 68534 - DNA, 352 bp, Zea Mays
aacaaagcttgtgcagtgatagacttggactgaaaaccctggaagctggtgagaagcatttccttaagcttcatccatgaattgatagtccttggtcaaagcaacgagtaccaagtttgggccacactttggactgccatcatgaaggacttcgacatgactactaagttaccacaatatgaggatatggtagcctcataactcatgaggaaatgcttcgggtcggtcaggccatcgtagataggtagtgtatgaggcctatatagtggtgtccatggtgtagcatgtaattctggtttcagtgtggaagcttcgtcatagaggaaatcttgaatgttgaattcttcatgac

SEQ ID NO: 68535 - DNA, 520 bp, Zea Mays
tagttttcggtcctaatttgcacttcttgttagttggcacattcactttagccaaagaatcccaggtgcgcaaataggagatatttaatttcttattttcccaatacttgattggtgtgatttatttgttctttgtgggaactttattcaggacatgacatgccatcaagatcgcctcaccccaccattccttagatagtcccgaagtctctaacatggcgttaaccaaatcagttagagtatggttctttctttcagtaaccccattggattgtggtgagtatggcggtgtcctctcatgaataataccatgttccacacaaaaatcagaaaaatcacccgaaaagtattctccaccgcgatcagagcttaaccatttaatttttctcttgagttgattttcaacttcagctttataggtcttaaaatcatgcaaagcttcatcttttgatttcaagaattacacataacaaaatctagtagaatcatcgataaaagtaataaaatattgcttgctccc

SEQ ID NO: 68536 - DNA, 1194 bp, Zea Mays
gcatgacgccacagctggagctcctgagcgacagggacacaattgaacccttaccgaacacttcccccaaatcaatttcatcgttgggactacaaattaaccggtccatggcgacagggcggatggttatagggacgaacacgttccaacataatgacggcgaggatgaccaaattgaggctggggaaagtttcacggggtcaccagggtctatgaacacactttggtttgggcagaactagaaccgaagagcgggtcgacggtgaggggggtcacagcggcgttctacagagcaggcgcgtgttccggtgaaaggcttcggccgaacttcaattggccggttccgagagcaataagagaccataatcgtgctaaaacaaggagcaattgggggaattactaacccgaggatgctgatttcggtagagttccttgcggcggagcaagaacagggaaggggagaaattgtgggctgcgcaagttctttggtggaattgactcaattgcttaagcactgaggtgcggaatgtggagaagaagccaagctcgagcgcaatttataggctactggccagaaccggatgaggatcacggattcctgaccgcgctggcaggcttatcgcgcgggcgggccacagcgatggtccggtggtcgtcgattaaccgaagaatgccacctcagtgaaacacctccacgtcgtcgataacttttaccacggccaccgacgaccatcccaagctatggtggcgttcttatcgccggcgaggtcgttttggtaattccagtgctcagtttcagtagaatcaacgagtctgacagcccaagtttagcgttgatttactccagatttagtgtagtgaccgagctagctctctgtaccaaagttatagcttaataaaccagctttaattttgttacatggtgcatccttgaaagatcacaagatcatacccaaaatcgaacactaagttaatccagtctcactgtcattggaaaattcagacttaaaacgacctggcagcctgactttgagggtgattatctccaaattttgcacaacaacctaacttactctcttaagcaaaattgttctccttagataggtctacatagttgatgtggtgacctagggcaaagtttcaatagtttggaagttacaagggctcaaagttgagccaatcctttaattttca

SEQ ID NO: 68537 - DNA, 489 bp, Zea Mays
aaaacataccatgaggtacttacaacaatttaaagcatgtagattgccatagaatagaaatgatgaatatgcaatctaccatatgagaggaatttcttcaaagaatggtgacataattttaaggcatttgaagtgcttctttttctatgtgactacacaagacacatgagaaatggtaatttaagatacgtgcacataaaacataagtgttaccatcctttggctttcctccatgttgtaggccttgatcttttcacacaggataattctttatttcctacgatatcaatatcttccccgagatgatatgagttttagacataataatttgaaataaccttgggtcaatcttggatatgtagatcattgaagattgatagcttgagttaaattgaattgactctctcaagcaccccaaagcttcatatcatctccttctcctgcaaagcttgtcaagcatattttggtacccatctcttgatgggtcca

SEQ ID NO: 68538 - DNA, 503 bp, Zea Mays
tggttatcatcctcctcctgtaacaaagaattatgctctgtagcaatatctatgttgtgggttgggtcatgatctgcggtagcatttgaactaggatgcgaagaagcaacaagagcttcgatcgattcatggtttgtagcaggacatgaattgggttgcgtaggaacagacaagctatgggtagtttcttggtttatttcagcaattctttgcctagtaactctaattgttcgctcctgtggaggtgccgcaattcttttatttcctcttgttacttttgttgagatttgatcaccatcgttggagatgttggcacgaacacccttacgactttggaattcctgaatatgtagaatacaataaggatatgcaaatcaaattgattgtgaacccaaatttaaagacagataattgagatgctaagaattaataagtaccacgggtgacctcttcattagaaccatcggtgtcttcaccatcatataaactccctgattgctgag

SEQ ID NO: 68539 - DNA, 736 bp, Zea Mays
catcgccatgattcgtgctctctggtgaggggataatcatggcggagtaaagatcttggcactagataggcttgggctctgtcgcggatgagtttcaccgtacccacttgctcgtcgatcagccgggatagacctcaccgcggttggccacttaccgttgtgtgccacgtgctcaagcgttgtaccacgtcactgtgaatcgcgtcttgcatgctcggtgatcgccggagagccaccacggtgaaagccactaagcttgcgcgccagtaaccttcttcctctctggccgccagcacatcttcgcaaaattggacgccaccactgagggagcctataaattgtcgcccccgcctgctccgctaagtaattgtgcacccagtaaaccaaccctcacctcagatcgtccaccagagctccccaatttgggatttcccccaaatcaaccaagaacatcgtgcggtgtgacctcgccatggccaaagtgtttcaggtccgttcatgtccgctgtcctcttgtttcagcacccttacttgctcctgatactcgctgacccatccgatttagctaggcggtcctagatcaccgggaacacgtttactcatccgatggtccgcgctgtctccgtggaccggatgatttggagccccgttagtaaaattgagtgaggggaaatgattaggaggggtccaatttggtgtctgccgtgcaagagcaccggtcgttgcaggatccggc

SEQ ID NO: 68540 - DNA, 534 bp, Zea Mays
caggggccgagtcagaagattctccagccaacatatcgagcacaacattcatctctgcatcatctggactcgctggcatctcaaaatgaactcgcctctcatcattgggaagatcacaaagagaagcaaccaaggcctcaatatcttcgagagagggtcgtactctaagacccagaccactatcaccagcaggaggattagacacgaaattgaaaatggacttaggaggtggcagattccaagcagagtaggcaacaggagcaccaacatttgatactttgcctctcaagatcatgtctagccggctcaccaaatccttaacaggaattctcctattagtaacccgagtggagtcggtaacaccactgtacaagtaagccgggtatgctctgtctttcaggggctggatgttcttaaaaacaaaatcagtaaccacaacttcggaggtcagatctctttccttcagcagacagacttcagcaagcagaaccttagcctctgttacttccaaggcagtaggagactcaatccaac

SEQ ID NO: 68541 - DNA, 580 bp, Zea Mays
ttttgtaatccctactatagactggcgcaaggtaacatgagtagcatgaactagacgttgggacatacttcccaaacgagtataaatccttgtgtcatctttgcacaccatccgctcctagccacacaaaagcatgataatcactgtcggtgatacgacacgccgacaccaccgaggcgacacaccacccaacaaaagaacttctatgtcatataagtcttcatgtacacacgcagaagcttgcataccagttgtggtgccaatatgagtttgacaccctctagctcgtacacctctaacgagttccatttgttttttattcattgccatgattaggagggaaccaaaggattcaagcgtggaggcacaacctgcatggtggaaaggaggcggtggcatgcgagtggtagagcatggagtgagaaagatacaaggtgggcacataggtcgaggagcacgtcgagggaggcaaggaaggcgatgaaggcttggtagagcgagagcaatggttaggaggggagtgagcctgtgagagaaagagggagagtgcataagatgacgtggacgccatacaaatggt

SEQ ID NO: 68542 - DNA, 1183 bp, Zea Mays
gaaacatcctttcagctccagcctcctcccacatgtttttctgcaaggtcattaggtaaaccaattacataaaaagaattcgaagtagctttgctaattataaaatgtaattaactggaccatgctttgctattttttggatagtgacttacacacttacaaaatgctatatgtttgcaataagtgatacacactatttatgcaaatgaaaatcccttttaggattgttaaacagagttctgcagtctgggtatttttttggtatcttttgtgaagcattcatattagtagtaaatctaaatatatttatatttgtttgttaggtatgtgtaattgcaaccattggacaactagcacccacggctcagaacaatcgagtgaattcaaaactcaaggatgctcaaaaaatataattgctaacagaacttgagtctccacatgaagcatgggggtaatcacagaggctgaaactgatattgtctgcttaatattgtaatacttgtccatccatgtctcatatttttgtgaagggaagtgacgggtaatcatgctttctttcaccttaagtttaggcttggataatgcaaaccacgtgactttgctataattacagatgcgaagatcatgctctggttgtttctttctggctatcatcccattcatcggtatctaaaatcgcccaaccccctgtaaacaaactgagaagttgattctaattgatatttcttttattgtgatgtcttaatccaatgttcccgtccttatgtgttgcatctttctgctccatattattttaatttgctctatacttgctaagttgtttattggtattcccaggacatatatattatataaatacaacaacctaattatgtgttcaaacacacaaaactagctcttatgttaattcaccttaaccgttaactattccatctcccaattgttgtattttattttagatgatggtttcagttccagctaacagagctacctgattgttttaccttctgcacatatataatgcatgcactacatttataacatttagttaacaagatataatatttttataatttatattacaaaaatgattttgatgcgcgcaaggcgcgcacaagttactagttttatttacaataaatgagctacatattaaatggatacacaccaaagcaaaacatca

SEQ ID NO: 68543 - DNA, 856 bp, Zea Mays
atttgattaagtgactaagcactggtgctgtacaaaatttggagttaaaaggaccaaaagtcgggcagtcagtcgagtctgaagactgaaccatggctgacagtgagctctgatgagttttaaggccgatttgtgcttgatcgagtgagggaatgaccaaagtccctatgatcgaattaaagcctgtacataggttaacaactttgttgtaatccgattggtaacttgtcacgcaaaaattgaagaaaaatgcctctgaagatgctcggtcagaacaactgaagcagcccctgatggtacaatggcgaaaagattcgcggattcagtgaatctcgccgccggtgaccttacaccgcgattgacgtcggtcgtcgcgattcgtgcgccgtggtttgcggataactgctggcggtgaaagatctcaactcagggaaggagtggagtcttatcaccggactattcactgtgacacttgccgcgcatttgactgaggtgtcctcgccggagttcgccgtcttttgtagtcgcgccacgtacttagaagagctaccacgtcgcagtagattaccataggtaatatgttcgtcgcctaagacattgccccagggaacgccacggtagttcgcgccggtgactcacctctcccttcgaccgccggctttcccctttcaaaatttggcaccaccgcttagcgcccttataaattgacggcacggtctgctccgccatgttatcgcgaagccagagcatccatccctgccctcgattagccaccatagccgaagaattttgttcttcccccaaatcggttgcccgcgccgccgtgagacgtcgcgccgtggctagccatctccag

SEQ ID NO: 68544 - DNA, 374 bp, Zea Mays
aacacttgttgcttgaaaggatatgtgggtggacgaggagaagagagatttggggttgaaaggacgaatgaccaaccttgatcgcttttcagacccatgggacgatccttcacccccatatctctttgtttttccttgtcccaaattcttggcttccactgatagcgttgtgcttacatccctgctataagtgagatccaggcatgtggccatcttgcgctggagtcgatcattcaaacctctcatgaagtaatttttcttctttaaatatgtgtccacatggtcgatagcatactgggagagatgattgaacttgttgagatattgcattactgagtctcccccttgctttaaatgtataaactctccagctt

SEQ ID NO: 68545 - DNA, 728 bp, Zea Mays
aaggaaagacttcatcctggttggtggatcatgactaatttttcgatccagtttgactcttttatccttcgttgatgaggctgatctctttccttcttgggtcttggtgcttcaatccgaattagggacttgtagttaaggaagctatgagtaggatagactctatgaggtaggtcaacgttggggatggatggactatgcattctaatactcattcttgtgaccatgactccactcgagttaggatcttgagccttatgacttggaccgtaaaactatatgatttaccatgatggattcaagtcacatccttatgtcatgatcttcaatgcaccatgcctcttctcatcttgatcaaccttgacccttgcaagaacctcttattcaccttatcttcaggtacctcagtcctcttgatcatctcccttgctctagtccctcgaagttcttcttgcctttgtccttggttcaatcaactatctccaagtcatatacattggatcccacttagcaatgtccattcttcaactttcttcatttttgatatccataattcatattcatcttagcttatttggaatatcacatttgactccatgtgtcgaaccttgtaagctttataccaagtacctgctcaaaacttaacacctagtcagtcctttcattgtgttgtcatctgagcgccaaaacccacaagggactattcaatctaccctttttggtgattg

SEQ ID NO: 68546 - DNA, 417 bp, Zea Mays
ctcccccctcctggtgcatatataagttgaccgtgccaggtcaaggaatctgtgacctcgccgccattattccagagaaaacacgctgccgccatcgggagggcttagcactgagaggagagagatccgcaaccgcggtgtcgcgcttgctccatcggcggggtctcggtggcgggctagggagttccaacaggtacccaagttggtgtccgtagcctcaccgtgcgtgattggtgcacggggagttggcgattgctgatcggagcttcatcgtcgccgcgggtctacttcggtgcgtgggcaagcacgtctccgtctccgacgccagtgggcaattcctcccttactcgtgtctatctccgtgttccatagtgcgtagccgtgctaaacgtaggttccgttgggccgaacggccgg

SEQ ID NO: 68547 - DNA, 511 bp, Zea Mays
tttcaaacaactcctacacgtaagtgtataatacaaccctacaatatagagttgcagtaaaataacatacatattaaccatgtgttcatatcgattaggagctaattgttaattgtgtggatctatcgctttaaggcaacaattataggggcattttgacacggtttgtactggatgaaccattaccaccggcaccaccatatttaatgcatataaatgaccacacgaaccgattaaaatataaacgcgtggtgccttcttccaagcccatgcatgggtcacctgagacttcctggcgcccatctggccatctcccagactcccactacctcccgtcctctccacacacagcacactccacagcacaaggagcgcctcctaactctcgccacttgtagctagctaccttgcgcttgcatagctgctcccggccggtggagtcggagaagctagcggccagccatgagacacgctccatcgtcgccggccatgctcctgttgttgctcctgg

SEQ ID NO: 68548 - DNA, 618 bp, Zea Mays
ctctgtcagagatttcatgatcaaccacaaaagtgtctgttgtttgcatgtcagtttcacacaagaagttgtcccagtcccaatgcttactctcctcaaaaatgacatccctgctgaccacaagccttctggagattggatcaaacagtctgtacccttttgtacccgattcatatccaatcaagaccattttacttgacctgtcagataatttattcatgcctggaccaagttgcttcacatgtgctacacacccaaacactttcagatgactgaccttgggctttctaccatgccaaacttcaaaaggagttctactgtccagggccttggtaggtgacctgttcagtaaatacactgcagtcctgattgcctcaccccaaaatattgttggaaccaccattgcttttaacaaacacctggccatttcaaccactgtttgatttcttctttccaccactccattctgctgaggggaatatggagtggtagtgtagtgtttgatgccatcttgactgcagaaagtttcaaacagaatagaggtaaattctcctcccctgtctgtcctgagagccttcaacttatcaccagtttcagtttctgctctttgtttaattt

SEQ ID NO: 68549 - DNA, 466 bp, Zea Mays
atttccataacaatcttggtgaaactatcatccggttgaagcacatttggcaagctccatattatctgattattgctgagatctagcaatctcatgatggttgacaactgctctatggttgagcaatctcatgagatacaactcattattggtgagctctagcaacttggacacattttgtttgaagcatttgtgttagggtgtatcattgccaaattacctctaacttgaagggattttgccatggctcttaaacataggaggtaaaacaatatgtgtggatgtgggaaaaaaaggttcaggcaaaggatggtgcatccaaggagcatgaggcaccgttcaatgctaatatcataaaacatgctagaaaaaagaaggaaaacccaaaggtcgtacataccaccaactttaagaagacgaagacatacatggaggatatcgtttgcgatgtctatggcaagactag

SEQ ID NO: 68550 - DNA, 648 bp, Zea Mays
tgactatatgggccaacccttcctggtatgccacttctcttatgattccaccactgagcaatattttgacttcgacttttgcatcttcaggcatcttccagagtttttgcttgcatggcctgacacttaggtccacattcagggcatgctctattatactcctatccactccacatagatcatttgctgaccaggcaaagaaatatttgttatgaaataggaacctttggagattggactcttgctctgaagttagctagttgccgaagaataccctttgctctacgacatcatcacagagaagtactggttttagctgctccgccgaagatgccttttcttttactagtttttagaatcttgaatttgtcttttgtcttcatcaatgttgtaaacaattttctgctcttgtagggtcccttctacccttcttgctgcttcttgcctgccataaactgatatcaccccttgattgttgggtatcttcatgcagagataagctgaatgtaaaacttcttcgaagacaataagagttcccctcttgatgacagcattgtatgggaattccatatcaacaacatcgaacattacatctttggttcctgtgttattgatgtagccgaaggtgacgagcatgactagcttccc

SEQ ID NO: 68551 - DNA, 462 bp, Zea Mays
ggatgacaaggctgcagcggaacgcatcgcgaggcagtcggcccactacaccatcatagggggcttactgtacaggagaggcgcagcaggagtcctcatgaaatgcattcactcggctactggaaaataattgttagaaaaaatccatgctaggcattgtggggtatattcagcattaaggactctagtcgagaaggctttcagatccgatttctactggccaactacgaagagtgatgccgccgagttagtccagaagtgtgaggcatgccaattcctatcatagcaatagcacttacccgtgcagcagctgcagaccattcctataacatggccatttgcatgctgggggttggacatgattggacctttcaaaaaagctcagggaggctatactcatatactagttgccattgacaaattcacaaaatggatagagtacaagccaatcgcttctttgac
